United States Patent Application Publication US 2005/0244851 A1 - sequence listing, part 123

SEQ ID NO: 4799450 - DNA, 25 bp, Homo sapien
catgtccagttgatatctgtgctcc

SEQ ID NO: 4799451 - DNA, 25 bp, Homo sapien
ttcaaggtagatcattggtccaggg

SEQ ID NO: 4799452 - DNA, 25 bp, Homo sapien
aagcttcaaggtagatcattggtcc

SEQ ID NO: 4799453 - DNA, 25 bp, Homo sapien
gaagcttcaaggtagatcattggtc

SEQ ID NO: 4799454 - DNA, 25 bp, Homo sapien
gcttcaaggtagatcattggtccag

SEQ ID NO: 4799455 - DNA, 25 bp, Homo sapien
tcgaagatgccccttacagcagcca

SEQ ID NO: 4799456 - DNA, 25 bp, Homo sapien
tcccagttcatccatatctcctcct

SEQ ID NO: 4799457 - DNA, 25 bp, Homo sapien
cagcccactctaggatagggtcgaa

SEQ ID NO: 4799458 - DNA, 25 bp, Homo sapien
tctaggatagggtcgaagatgcccc

SEQ ID NO: 4799459 - DNA, 25 bp, Homo sapien
tgtatttagcctcggtggatacaaa

SEQ ID NO: 4799460 - DNA, 25 bp, Homo sapien
tggatacaaagcctgtggatagcct

SEQ ID NO: 4799461 - DNA, 25 bp, Homo sapien
aaagcctgtggatagcctcggtgaa

SEQ ID NO: 4799462 - DNA, 25 bp, Homo sapien
tcggtgaatgaagcctgtgaccctg

SEQ ID NO: 4799463 - DNA, 25 bp, Homo sapien
catagtccactaccaggatatcagc

SEQ ID NO: 4799464 - DNA, 25 bp, Homo sapien
cttctaaagttgtttggtccaagct

SEQ ID NO: 4799465 - DNA, 25 bp, Homo sapien
actaccaggatatcagctcttctaa

SEQ ID NO: 4799466 - DNA, 25 bp, Homo sapien
tctaaagttgtttggtccaagctcc

SEQ ID NO: 4799467 - DNA, 25 bp, Homo sapien
aatcctgaagaaaaccatgtgggcc

SEQ ID NO: 4799468 - DNA, 25 bp, Homo sapien
tgttcttgaagaatcaataatcctg

SEQ ID NO: 4799469 - DNA, 25 bp, Homo sapien
atgtgggccttgctccccaaggcac

SEQ ID NO: 4799470 - DNA, 25 bp, Homo sapien
tcttgaagaatcaataatcctgaag

SEQ ID NO: 4799471 - DNA, 25 bp, Homo sapien
tttcctgttatataaaccggcagta

SEQ ID NO: 4799472 - DNA, 25 bp, Homo sapien
cctgttatataaaccggcagtaatt

SEQ ID NO: 4799473 - DNA, 25 bp, Homo sapien
tatataaaccggcagtaattgtctt

SEQ ID NO: 4799474 - DNA, 25 bp, Homo sapien
ctatttcctgttatataaaccggca

SEQ ID NO: 4799475 - DNA, 25 bp, Homo sapien
aacaccaataagaggcagcagaagt

SEQ ID NO: 4799476 - DNA, 25 bp, Homo sapien
tctttgactgggagaatgattcttg

SEQ ID NO: 4799477 - DNA, 25 bp, Homo sapien
ctggcagttgtcataaaaacaccaa

SEQ ID NO: 4799478 - DNA, 25 bp, Homo sapien
agaagtgtctttgactgggagaatg

SEQ ID NO: 4799479 - DNA, 25 bp, Homo sapien
aataaagcttcccttttgttgtatg

SEQ ID NO: 4799480 - DNA, 25 bp, Homo sapien
taaggcatcgaagagcatcattcgg

SEQ ID NO: 4799481 - DNA, 25 bp, Homo sapien
catccgtttccttctagaattagac

SEQ ID NO: 4799482 - DNA, 25 bp, Homo sapien
caggcctgcagatttaaggcatcga

SEQ ID NO: 4799483 - DNA, 25 bp, Homo sapien
ttctcctctgcttggtcaaaaacca

SEQ ID NO: 4799484 - DNA, 25 bp, Homo sapien
aaaaccaagacattcataagacaat

SEQ ID NO: 4799485 - DNA, 25 bp, Homo sapien
tctcctctgcttggtcaaaaaccaa

SEQ ID NO: 4799486 - DNA, 25 bp, Homo sapien
tcaaaaaccaagacattcataagac

SEQ ID NO: 4799487 - DNA, 25 bp, Homo sapien
gctttaccacgctgggcaaaccacc

SEQ ID NO: 4799488 - DNA, 25 bp, Homo sapien
gcactgagataaccaggaggcaggt

SEQ ID NO: 4799489 - DNA, 25 bp, Homo sapien
tctgctttaccacgctgggcaaacc

SEQ ID NO: 4799490 - DNA, 25 bp, Homo sapien
ttctgctttaccacgctgggcaaac

SEQ ID NO: 4799491 - DNA, 25 bp, Homo sapien
caacttcggggggatctctatacag

SEQ ID NO: 4799492 - DNA, 25 bp, Homo sapien
tcggggggatctctatacaggacat

SEQ ID NO: 4799493 - DNA, 25 bp, Homo sapien
ttgtgactaactggcctttaaagtc

SEQ ID NO: 4799494 - DNA, 25 bp, Homo sapien
tctgttagtcacttttgtgactaac

SEQ ID NO: 4799495 - DNA, 25 bp, Homo sapien
cctgggtgctgttgtcaagcccctg

SEQ ID NO: 4799496 - DNA, 25 bp, Homo sapien
cagggaagacctgggtgctgttgtc

SEQ ID NO: 4799497 - DNA, 25 bp, Homo sapien
agtggactctgccttccatattgtc

SEQ ID NO: 4799498 - DNA, 25 bp, Homo sapien
tctttgagggtgacaagctcaggga

SEQ ID NO: 4799499 - DNA, 25 bp, Homo sapien
tgacgctccggtgacagcttggaaa

SEQ ID NO: 4799500 - DNA, 25 bp, Homo sapien
agcgtttgttgacgctccggtgaca

SEQ ID NO: 4799501 - DNA, 25 bp, Homo sapien
ccggtgacagcttggaaactcatct

SEQ ID NO: 4799502 - DNA, 25 bp, Homo sapien
cagatggagcgtttgttgacgctcc

SEQ ID NO: 4799503 - DNA, 25 bp, Homo sapien
tagtctggtgtgtgtgcagaaatgt

SEQ ID NO: 4799504 - DNA, 25 bp, Homo sapien
tttccacacactggcttccatagtc

SEQ ID NO: 4799505 - DNA, 25 bp, Homo sapien
cactggcttccatagtctggtgtgt

SEQ ID NO: 4799506 - DNA, 25 bp, Homo sapien
aatctagcagaagcatttccacaca

SEQ ID NO: 4799507 - DNA, 25 bp, Homo sapien
gtttttccaatcaatggttacatca

SEQ ID NO: 4799508 - DNA, 25 bp, Homo sapien
tgctgttatcggttgattctcagga

SEQ ID NO: 4799509 - DNA, 25 bp, Homo sapien
cattggaatccacagtctctcaaga

SEQ ID NO: 4799510 - DNA, 25 bp, Homo sapien
cagcaaccacctcataactattagg

SEQ ID NO: 4799511 - DNA, 25 bp, Homo sapien
gaatgttgaagtcacaaatatattt

SEQ ID NO: 4799512 - DNA, 25 bp, Homo sapien
ttcattatctccatggaatgttgaa

SEQ ID NO: 4799513 - DNA, 25 bp, Homo sapien
catggaatgttgaagtcacaaatat

SEQ ID NO: 4799514 - DNA, 25 bp, Homo sapien
tttcattatctccatggaatgttga

SEQ ID NO: 4799515 - DNA, 25 bp, Homo sapien
ctttgcaggagagtccaagtggaat

SEQ ID NO: 4799516 - DNA, 25 bp, Homo sapien
caactgcatatttttgcgaccagca

SEQ ID NO: 4799517 - DNA, 25 bp, Homo sapien
tgagacaggcccattattttcccct

SEQ ID NO: 4799518 - DNA, 25 bp, Homo sapien
gagtattggttcaccttatccaggc

SEQ ID NO: 4799519 - DNA, 25 bp, Homo sapien
ttatctgatgcagcagagccttcca

SEQ ID NO: 4799520 - DNA, 25 bp, Homo sapien
tctgatgcagcagagccttccacat

SEQ ID NO: 4799521 - DNA, 25 bp, Homo sapien
tcattatctgatgcagcagagcctt

SEQ ID NO: 4799522 - DNA, 25 bp, Homo sapien
tatctgatgcagcagagccttccac

SEQ ID NO: 4799523 - DNA, 25 bp, Homo sapien
tcagaatgattgtggcataccagca

SEQ ID NO: 4799524 - DNA, 25 bp, Homo sapien
tgtggcataccagcatcagaaggat

SEQ ID NO: 4799525 - DNA, 25 bp, Homo sapien
catcagaaggatgcgtaaatggatc

SEQ ID NO: 4799526 - DNA, 25 bp, Homo sapien
aaatggatcagacgcagtctccacc

SEQ ID NO: 4799527 - DNA, 25 bp, Homo sapien
catgtgctgggccaagatcttcctc

SEQ ID NO: 4799528 - DNA, 25 bp, Homo sapien
gccatgtgctgggccaagatcttcc

SEQ ID NO: 4799529 - DNA, 25 bp, Homo sapien
tgtgctgggccaagatcttcctcat

SEQ ID NO: 4799530 - DNA, 25 bp, Homo sapien
ctgccatgtgctgggccaagatctt

SEQ ID NO: 4799531 - DNA, 25 bp, Homo sapien
aattgaataccctatacttctctct

SEQ ID NO: 4799532 - DNA, 25 bp, Homo sapien
aatttaatgggctgtaggtgttgat

SEQ ID NO: 4799533 - DNA, 25 bp, Homo sapien
gataggacctatcttatgcaaattg

SEQ ID NO: 4799534 - DNA, 25 bp, Homo sapien
gctgttctaacaggataggacctat

SEQ ID NO: 4799535 - DNA, 25 bp, Homo sapien
gattgctcaatctataaaatgagct

SEQ ID NO: 4799536 - DNA, 25 bp, Homo sapien
caggtatagcaacgtggtcacacgg

SEQ ID NO: 4799537 - DNA, 25 bp, Homo sapien
gggagatatctgcttggcagataaa

SEQ ID NO: 4799538 - DNA, 25 bp, Homo sapien
atcaggcacagtgaagggacctgtt

SEQ ID NO: 4799539 - DNA, 25 bp, Homo sapien
gcatttgtctagtccctgtatcggg

SEQ ID NO: 4799540 - DNA, 25 bp, Homo sapien
ttcttggataattcctgtcctggtc

SEQ ID NO: 4799541 - DNA, 25 bp, Homo sapien
tccagtccttgaaagactgtttcaa

SEQ ID NO: 4799542 - DNA, 25 bp, Homo sapien
tggaagccttcttggataattcctg

SEQ ID NO: 4799543 - DNA, 25 bp, Homo sapien
gtccttccagtccttgaaagactgt

SEQ ID NO: 4799544 - DNA, 25 bp, Homo sapien
tgattaggttctgccaaccaaatgc

SEQ ID NO: 4799545 - DNA, 25 bp, Homo sapien
ggtttaactgtgattaggttctgcc

SEQ ID NO: 4799546 - DNA, 25 bp, Homo sapien
ctcctttgcacctggggtttaactg

SEQ ID NO: 4799547 - DNA, 25 bp, Homo sapien
tacaagctatacttcctggactcct

SEQ ID NO: 4799548 - DNA, 25 bp, Homo sapien
attctatcaatatgagcccaaaagc

SEQ ID NO: 4799549 - DNA, 25 bp, Homo sapien
ttctatcaatatgagcccaaaagca

SEQ ID NO: 4799550 - DNA, 25 bp, Homo sapien
tctatcaatatgagcccaaaagcat

SEQ ID NO: 4799551 - DNA, 25 bp, Homo sapien
tatcaatatgagcccaaaagcattc

SEQ ID NO: 4799552 - DNA, 25 bp, Homo sapien
gagccaaagggcctccattggagtt

SEQ ID NO: 4799553 - DNA, 25 bp, Homo sapien
cagagcagtcgggaggaactttaat

SEQ ID NO: 4799554 - DNA, 25 bp, Homo sapien
gcctccattggagttgcatagggca

SEQ ID NO: 4799555 - DNA, 25 bp, Homo sapien
cttgtgcttgcccaccaaggattcc

SEQ ID NO: 4799556 - DNA, 25 bp, Homo sapien
taacctcagataactgagagtggcc

SEQ ID NO: 4799557 - DNA, 25 bp, Homo sapien
gatgctggagacaccaagatgtccg

SEQ ID NO: 4799558 - DNA, 25 bp, Homo sapien
atgtccgcaaagagccctccatcag

SEQ ID NO: 4799559 - DNA, 25 bp, Homo sapien
catcaggtagggattttgtttcaca

SEQ ID NO: 4799560 - DNA, 25 bp, Homo sapien
tccttcagcctctgcgtgccgtcat

SEQ ID NO: 4799561 - DNA, 25 bp, Homo sapien
tcccaaggagaaatgtgccccaaag

SEQ ID NO: 4799562 - DNA, 25 bp, Homo sapien
tcagggaacttgttacctgcccaaa

SEQ ID NO: 4799563 - DNA, 25 bp, Homo sapien
tgcgtgccgtcatccccgatcaggg

SEQ ID NO: 4799564 - DNA, 25 bp, Homo sapien
cagaataggcaaatcgagggctaca

SEQ ID NO: 4799565 - DNA, 25 bp, Homo sapien
gcaacggtgtcaggagagtccctct

SEQ ID NO: 4799566 - DNA, 25 bp, Homo sapien
ggattggcatcgcagggttcctcat

SEQ ID NO: 4799567 - DNA, 25 bp, Homo sapien
tgaatcccattcaatcgtaccacgg

SEQ ID NO: 4799568 - DNA, 25 bp, Homo sapien
aacgcagcccctcagactgctcagc

SEQ ID NO: 4799569 - DNA, 25 bp, Homo sapien
tgaacgcagcccctcagactgctca

SEQ ID NO: 4799570 - DNA, 25 bp, Homo sapien
gcagcccctcagactgctcagccac

SEQ ID NO: 4799571 - DNA, 25 bp, Homo sapien
gcccctcagactgctcagccaccct

SEQ ID NO: 4799572 - DNA, 25 bp, Homo sapien
ccaaattaggttccatgtaagcata

SEQ ID NO: 4799573 - DNA, 25 bp, Homo sapien
acagccacattaaaggtctgataag

SEQ ID NO: 4799574 - DNA, 25 bp, Homo sapien
ctgataagccaaattaggttccatg

SEQ ID NO: 4799575 - DNA, 25 bp, Homo sapien
cctaaatttcaatgcacccatgatc

SEQ ID NO: 4799576 - DNA, 25 bp, Homo sapien
agctcataacctgaaggatgctggg

SEQ ID NO: 4799577 - DNA, 25 bp, Homo sapien
tcataacctgaaggatgctgggcat

SEQ ID NO: 4799578 - DNA, 25 bp, Homo sapien
cataacctgaaggatgctgggcatc

SEQ ID NO: 4799579 - DNA, 25 bp, Homo sapien
ctacagctcataacctgaaggatgc

SEQ ID NO: 4799580 - DNA, 25 bp, Homo sapien
gcagctctcttcttgagccctccct

SEQ ID NO: 4799581 - DNA, 25 bp, Homo sapien
ctctccttagctgttgaggcaaaga

SEQ ID NO: 4799582 - DNA, 25 bp, Homo sapien
cagctctcttcttgagccctccctc

SEQ ID NO: 4799583 - DNA, 25 bp, Homo sapien
gaggcagctctcttcttgagccctc

SEQ ID NO: 4799584 - DNA, 25 bp, Homo sapien
ccctactttgctctagtgcttgaga

SEQ ID NO: 4799585 - DNA, 25 bp, Homo sapien
gagtagccgactccaaagtcaagca

SEQ ID NO: 4799586 - DNA, 25 bp, Homo sapien
aagtcaagcacatttgaagcaccac

SEQ ID NO: 4799587 - DNA, 25 bp, Homo sapien
taagagaggcgactgctgacagcca

SEQ ID NO: 4799588 - DNA, 25 bp, Homo sapien
tccagagaggctaaaagaaggtcca

SEQ ID NO: 4799589 - DNA, 25 bp, Homo sapien
caggctccaagtcactaatgccaac

SEQ ID NO: 4799590 - DNA, 25 bp, Homo sapien
tccaagtcactaatgccaacagctg

SEQ ID NO: 4799591 - DNA, 25 bp, Homo sapien
gctaaaagaaggtccaggctccaag

SEQ ID NO: 4799592 - DNA, 25 bp, Homo sapien
gagcacaactggcgggaggacgtca

SEQ ID NO: 4799593 - DNA, 25 bp, Homo sapien
gcctccagccaggatgcgggacttg

SEQ ID NO: 4799594 - DNA, 25 bp, Homo sapien
cctccagccaggatgcgggacttgt

SEQ ID NO: 4799595 - DNA, 25 bp, Homo sapien
tcagagcacaactggcgggaggacg

SEQ ID NO: 4799596 - DNA, 25 bp, Homo sapien
gaagttggggtattccagtttcatg

SEQ ID NO: 4799597 - DNA, 25 bp, Homo sapien
gtattccagtttcatggtagcagga

SEQ ID NO: 4799598 - DNA, 25 bp, Homo sapien
tggggtattccagtttcatggtagc

SEQ ID NO: 4799599 - DNA, 25 bp, Homo sapien
catggtagcaggagtgttgggaaga

SEQ ID NO: 4799600 - DNA, 25 bp, Homo sapien
gagatcatcaaggacaagccccgat

SEQ ID NO: 4799601 - DNA, 25 bp, Homo sapien
agatgcagttggcattccatactgt

SEQ ID NO: 4799602 - DNA, 25 bp, Homo sapien
tactgttccatactttccgtactgc

SEQ ID NO: 4799603 - DNA, 25 bp, Homo sapien
ggcattccatactgttccatacttt

SEQ ID NO: 4799604 - DNA, 25 bp, Homo sapien
gcagttggcattccatactgttcca

SEQ ID NO: 4799605 - DNA, 25 bp, Homo sapien
gaattcaattgtgggtctctgggct

SEQ ID NO: 4799606 - DNA, 25 bp, Homo sapien
gactgagaatacttcgatttgtaac

SEQ ID NO: 4799607 - DNA, 25 bp, Homo sapien
aatgctgcagtttctcgaagagatg

SEQ ID NO: 4799608 - DNA, 25 bp, Homo sapien
tcgatttgtaacagggaaatgctgc

SEQ ID NO: 4799609 - DNA, 25 bp, Homo sapien
cccagaagagggagggccttcacta

SEQ ID NO: 4799610 - DNA, 25 bp, Homo sapien
tgttcttggcattaatccagcccaa

SEQ ID NO: 4799611 - DNA, 25 bp, Homo sapien
ttcactagcccaaggttgaaagtat

SEQ ID NO: 4799612 - DNA, 25 bp, Homo sapien
ccttcactagcccaaggttgaaagt

SEQ ID NO: 4799613 - DNA, 25 bp, Homo sapien
aatatttctaaaggaccattcaaag

SEQ ID NO: 4799614 - DNA, 25 bp, Homo sapien
tttctaaaggaccattcaaagctaa

SEQ ID NO: 4799615 - DNA, 25 bp, Homo sapien
ctagtatcgggtcaggagaggcttc

SEQ ID NO: 4799616 - DNA, 25 bp, Homo sapien
tagtatcgggtcaggagaggcttcc

SEQ ID NO: 4799617 - DNA, 25 bp, Homo sapien
ctgtcatcacgggaacaatgcaaat

SEQ ID NO: 4799618 - DNA, 25 bp, Homo sapien
gctaaatcgggaatggcaccactgc

SEQ ID NO: 4799619 - DNA, 25 bp, Homo sapien
ggatggctgatgacacacccctgtc

SEQ ID NO: 4799620 - DNA, 25 bp, Homo sapien
tgggaagccgctaaagtgttttggc

SEQ ID NO: 4799621 - DNA, 25 bp, Homo sapien
tgtggagcacctgcacctttctgac

SEQ ID NO: 4799622 - DNA, 25 bp, Homo sapien
tggcactggctgagtactaagcaaa

SEQ ID NO: 4799623 - DNA, 25 bp, Homo sapien
aatagatttcctttggccagacagc

SEQ ID NO: 4799624 - DNA, 25 bp, Homo sapien
cttggaacaaagagacagcgtgagc

SEQ ID NO: 4799625 - DNA, 25 bp, Homo sapien
gaagcacaagctttattggctgaaa

SEQ ID NO: 4799626 - DNA, 25 bp, Homo sapien
ggactgcatgttcctggatgggctc

SEQ ID NO: 4799627 - DNA, 25 bp, Homo sapien
gtctgctgggactgcatgttcctgg

SEQ ID NO: 4799628 - DNA, 25 bp, Homo sapien
tggtctgctgggactgcatgttcct

SEQ ID NO: 4799629 - DNA, 25 bp, Homo sapien
ctgcatgttcctggatgggctcccc

SEQ ID NO: 4799630 - DNA, 25 bp, Homo sapien
gaaagcgagactgttattctcaaag

SEQ ID NO: 4799631 - DNA, 25 bp, Homo sapien
tctgaagtaagaccccgacagaggt

SEQ ID NO: 4799632 - DNA, 25 bp, Homo sapien
ttacctaataaacaacgatgagatc

SEQ ID NO: 4799633 - DNA, 25 bp, Homo sapien
tgctttcaaaaacatagtttggtca

SEQ ID NO: 4799634 - DNA, 25 bp, Homo sapien
gcagtgaaaagactcaaagggcata

SEQ ID NO: 4799635 - DNA, 25 bp, Homo sapien
cagtgaaaagactcaaagggcatac

SEQ ID NO: 4799636 - DNA, 25 bp, Homo sapien
tgcagtgaaaagactcaaagggcat

SEQ ID NO: 4799637 - DNA, 25 bp, Homo sapien
tctggccttccgaaggattttgtgg

SEQ ID NO: 4799638 - DNA, 25 bp, Homo sapien
ctggccttccgaaggattttgtggg

SEQ ID NO: 4799639 - DNA, 25 bp, Homo sapien
caaagggctcggacatgtagacaac

SEQ ID NO: 4799640 - DNA, 25 bp, Homo sapien
catgctatgccggttcagagaacac

SEQ ID NO: 4799641 - DNA, 25 bp, Homo sapien
gacgcccggagcactgtactagaaa

SEQ ID NO: 4799642 - DNA, 25 bp, Homo sapien
gagggtccaagttctacgaagccag

SEQ ID NO: 4799643 - DNA, 25 bp, Homo sapien
cctgtgactgttcagggccaaaggc

SEQ ID NO: 4799644 - DNA, 25 bp, Homo sapien
ccctgtgactgttcagggccaaagg

SEQ ID NO: 4799645 - DNA, 25 bp, Homo sapien
tgtgactgttcagggccaaaggctg

SEQ ID NO: 4799646 - DNA, 25 bp, Homo sapien
cctttctctagacctatgcagagca

SEQ ID NO: 4799647 - DNA, 25 bp, Homo sapien
ctagacctatgcagagcattgctcc

SEQ ID NO: 4799648 - DNA, 25 bp, Homo sapien
tctctagacctatgcagagcattgc

SEQ ID NO: 4799649 - DNA, 25 bp, Homo sapien
ctttctctagacctatgcagagcat

SEQ ID NO: 4799650 - DNA, 25 bp, Homo sapien
ctgccttaacaggaccacagctggc

SEQ ID NO: 4799651 - DNA, 25 bp, Homo sapien
atgactttttcctggcgcttgctca

SEQ ID NO: 4799652 - DNA, 25 bp, Homo sapien
ttttcctggcgcttgctcagctgca

SEQ ID NO: 4799653 - DNA, 25 bp, Homo sapien
tgactttttcctggcgcttgctcag

SEQ ID NO: 4799654 - DNA, 25 bp, Homo sapien
actttttcctggcgcttgctcagct

SEQ ID NO: 4799655 - DNA, 25 bp, Homo sapien
tttatgtagtttggtgacctctgcc

SEQ ID NO: 4799656 - DNA, 25 bp, Homo sapien
tttttatgtagtttggtgacctctg

SEQ ID NO: 4799657 - DNA, 25 bp, Homo sapien
agtttggtgacctctgccttcattt

SEQ ID NO: 4799658 - DNA, 25 bp, Homo sapien
ttttatgtagtttggtgacctctgc

SEQ ID NO: 4799659 - DNA, 25 bp, Homo sapien
ccagagaagcttcagccgcctgtag

SEQ ID NO: 4799660 - DNA, 25 bp, Homo sapien
tggccatcctcggggagtgagactc

SEQ ID NO: 4799661 - DNA, 25 bp, Homo sapien
agagaagcttcagccgcctgtaggc

SEQ ID NO: 4799662 - DNA, 25 bp, Homo sapien
tgctcacagtgaagggggcactggc

SEQ ID NO: 4799663 - DNA, 25 bp, Homo sapien
ctcacaaacttgctcagtggtgctg

SEQ ID NO: 4799664 - DNA, 25 bp, Homo sapien
caaacttgctcagtggtgctgggtg

SEQ ID NO: 4799665 - DNA, 25 bp, Homo sapien
cacaaacttgctcagtggtgctggg

SEQ ID NO: 4799666 - DNA, 25 bp, Homo sapien
aaacttgctcagtggtgctgggtgt

SEQ ID NO: 4799667 - DNA, 25 bp, Homo sapien
taacatgcagtataaatctccagac

SEQ ID NO: 4799668 - DNA, 25 bp, Homo sapien
aatctccagactgtagggcttctgt

SEQ ID NO: 4799669 - DNA, 25 bp, Homo sapien
aaaagattttagacaagcaagcctt

SEQ ID NO: 4799670 - DNA, 25 bp, Homo sapien
tatgaaggctgttacgtgcagtctt

SEQ ID NO: 4799671 - DNA, 25 bp, Homo sapien
cacacggagtgctagttgccgaact

SEQ ID NO: 4799672 - DNA, 25 bp, Homo sapien
gagtccgtgtcattcccagagagtg

SEQ ID NO: 4799673 - DNA, 25 bp, Homo sapien
cagggcctcatagtcctcaatcagg

SEQ ID NO: 4799674 - DNA, 25 bp, Homo sapien
aactgccactgtcgcaggagaggga

SEQ ID NO: 4799675 - DNA, 25 bp, Homo sapien
gtaaaatgagaagtaggatgtaaaa

SEQ ID NO: 4799676 - DNA, 25 bp, Homo sapien
ctgtaaaatgagaagtaggatgtaa

SEQ ID NO: 4799677 - DNA, 25 bp, Homo sapien
taaaatgagaagtaggatgtaaaat

SEQ ID NO: 4799678 - DNA, 25 bp, Homo sapien
tgtaaaatgagaagtaggatgtaaa

SEQ ID NO: 4799679 - DNA, 25 bp, Homo sapien
tagaagaggccctcgtgcccaaatg

SEQ ID NO: 4799680 - DNA, 25 bp, Homo sapien
aggtaacactctgcgttcaagacgc

SEQ ID NO: 4799681 - DNA, 25 bp, Homo sapien
ggcacgctcctggacctctgtatat

SEQ ID NO: 4799682 - DNA, 25 bp, Homo sapien
tcaagacgcttatgatgttgaagct

SEQ ID NO: 4799683 - DNA, 25 bp, Homo sapien
tatgagtcatcttgtaggagaggct

SEQ ID NO: 4799684 - DNA, 25 bp, Homo sapien
gtcaactcaaccaacacttatcaac

SEQ ID NO: 4799685 - DNA, 25 bp, Homo sapien
taggagaggctcaagtcaactcaac

SEQ ID NO: 4799686 - DNA, 25 bp, Homo sapien
cccacactgggcttatgagtcatct

SEQ ID NO: 4799687 - DNA, 25 bp, Homo sapien
aagaccccagattcacaaggatgac

SEQ ID NO: 4799688 - DNA, 25 bp, Homo sapien
agcccacagtctgatcagaacacag

SEQ ID NO: 4799689 - DNA, 25 bp, Homo sapien
cctgcattccagtagcccacagtct

SEQ ID NO: 4799690 - DNA, 25 bp, Homo sapien
gaagaccccagattcacaaggatga

SEQ ID NO: 4799691 - DNA, 25 bp, Homo sapien
taagggataaggctggacggaccca

SEQ ID NO: 4799692 - DNA, 25 bp, Homo sapien
cagcagcaaaggcatgtcacagaga

SEQ ID NO: 4799693 - DNA, 25 bp, Homo sapien
tctaccggcaaagagtgggacaaag

SEQ ID NO: 4799694 - DNA, 25 bp, Homo sapien
tgaggaaacgggacttctaccggca

SEQ ID NO: 4799695 - DNA, 25 bp, Homo sapien
catccaatgctcccacagttacctg

SEQ ID NO: 4799696 - DNA, 25 bp, Homo sapien
gcaagttaaaaagtcttactgtcac

SEQ ID NO: 4799697 - DNA, 25 bp, Homo sapien
taaaaagtcttactgtcacatccaa

SEQ ID NO: 4799698 - DNA, 25 bp, Homo sapien
ttctgcaagttaaaaagtcttactg

SEQ ID NO: 4799699 - DNA, 25 bp, Homo sapien
ggaggaatcaaacagatcaaatgaa

SEQ ID NO: 4799700 - DNA, 25 bp, Homo sapien
gaggaatcaaacagatcaaatgaat

SEQ ID NO: 4799701 - DNA, 25 bp, Homo sapien
gggaggaatcaaacagatcaaatga

SEQ ID NO: 4799702 - DNA, 25 bp, Homo sapien
aggaatcaaacagatcaaatgaatt

SEQ ID NO: 4799703 - DNA, 25 bp, Homo sapien
aactgttagtttcactgttgtcagc

SEQ ID NO: 4799704 - DNA, 25 bp, Homo sapien
cacgagaactgttagtttcactgtt

SEQ ID NO: 4799705 - DNA, 25 bp, Homo sapien
aaatgcaaaacacgagaactgttag

SEQ ID NO: 4799706 - DNA, 25 bp, Homo sapien
cactgttgtcagcattcaagagaga

SEQ ID NO: 4799707 - DNA, 25 bp, Homo sapien
ttaattagcagtcaggtcccctggc

SEQ ID NO: 4799708 - DNA, 25 bp, Homo sapien
tgaactaatcactacgagcggactg

SEQ ID NO: 4799709 - DNA, 25 bp, Homo sapien
ggagattacgccactttgcccaagg

SEQ ID NO: 4799710 - DNA, 25 bp, Homo sapien
caggatacccaacgctccagagagt

SEQ ID NO: 4799711 - DNA, 25 bp, Homo sapien
cgtgtttgtcaggctgaaggggcac

SEQ ID NO: 4799712 - DNA, 25 bp, Homo sapien
tttctagttgcaagcgcagagcctg

SEQ ID NO: 4799713 - DNA, 25 bp, Homo sapien
tgttccttgagcctgctctgcagag

SEQ ID NO: 4799714 - DNA, 25 bp, Homo sapien
cagagtgctgctggtttcgatgctc

SEQ ID NO: 4799715 - DNA, 25 bp, Homo sapien
ctcagggatggacacggcttggaca

SEQ ID NO: 4799716 - DNA, 25 bp, Homo sapien
aagggtcagccatcgaaggaactca

SEQ ID NO: 4799717 - DNA, 25 bp, Homo sapien
gctcaaagggtgaagtggcctactg

SEQ ID NO: 4799718 - DNA, 25 bp, Homo sapien
caatgcccagcacgtgagaggtgtc

SEQ ID NO: 4799719 - DNA, 25 bp, Homo sapien
ctgggatacagagagcaacgaggcc

SEQ ID NO: 4799720 - DNA, 25 bp, Homo sapien
agcccaaagcacagtagcctcaagg

SEQ ID NO: 4799721 - DNA, 25 bp, Homo sapien
gcccaaagcacagtagcctcaaggt

SEQ ID NO: 4799722 - DNA, 25 bp, Homo sapien
caaagcacagtagcctcaaggtgag

SEQ ID NO: 4799723 - DNA, 25 bp, Homo sapien
ccaaagcacagtagcctcaaggtga

SEQ ID NO: 4799724 - DNA, 25 bp, Homo sapien
caatagcttgtcattctgtgagagc

SEQ ID NO: 4799725 - DNA, 25 bp, Homo sapien
cttcagctccactcggagagactgc

SEQ ID NO: 4799726 - DNA, 25 bp, Homo sapien
agctccactcggagagactgcaata

SEQ ID NO: 4799727 - DNA, 25 bp, Homo sapien
cagcttctcatacgccttcagctcc

SEQ ID NO: 4799728 - DNA, 25 bp, Homo sapien
gcatactcccgctgaaggtgctcca

SEQ ID NO: 4799729 - DNA, 25 bp, Homo sapien
ggagagggactctcgtaatttgtca

SEQ ID NO: 4799730 - DNA, 25 bp, Homo sapien
caggctcacggtcttcctggagagg

SEQ ID NO: 4799731 - DNA, 25 bp, Homo sapien
attttcttccttcacgctggcatac

SEQ ID NO: 4799732 - DNA, 25 bp, Homo sapien
aatgaatttctgatgttagagaact

SEQ ID NO: 4799733 - DNA, 25 bp, Homo sapien
agaaatgaatttctgatgttagaga

SEQ ID NO: 4799734 - DNA, 25 bp, Homo sapien
aaatgaatttctgatgttagagaac

SEQ ID NO: 4799735 - DNA, 25 bp, Homo sapien
gaaatgaatttctgatgttagagaa

SEQ ID NO: 4799736 - DNA, 25 bp, Homo sapien
gaaccagaagcaaaaatgcttgtag

SEQ ID NO: 4799737 - DNA, 25 bp, Homo sapien
ccagaagcaaaaatgcttgtagaac

SEQ ID NO: 4799738 - DNA, 25 bp, Homo sapien
ctgaaccagaagcaaaaatgcttgt

SEQ ID NO: 4799739 - DNA, 25 bp, Homo sapien
aaccagaagcaaaaatgcttgtaga

SEQ ID NO: 4799740 - DNA, 25 bp, Homo sapien
gctttctcaaagttcgaatttcctg

SEQ ID NO: 4799741 - DNA, 25 bp, Homo sapien
ttgaacaaattcagatccttgccgt

SEQ ID NO: 4799742 - DNA, 25 bp, Homo sapien
actgtttccgtagcttctcatttgt

SEQ ID NO: 4799743 - DNA, 25 bp, Homo sapien
aatagattcttctaaacgctttctc

SEQ ID NO: 4799744 - DNA, 25 bp, Homo sapien
gagaaaaactgttcaccataactga

SEQ ID NO: 4799745 - DNA, 25 bp, Homo sapien
cataatcagagagcgcatgagaggc

SEQ ID NO: 4799746 - DNA, 25 bp, Homo sapien
cattatcttgcttctggtctcgtga

SEQ ID NO: 4799747 - DNA, 25 bp, Homo sapien
gtctcgtgagaagaaggacttttca

SEQ ID NO: 4799748 - DNA, 25 bp, Homo sapien
ctccatcagttcattctgggtgttc

SEQ ID NO: 4799749 - DNA, 25 bp, Homo sapien
tcattctgggtgttcatttccactc

SEQ ID NO: 4799750 - DNA, 25 bp, Homo sapien
agttcattctgggtgttcatttcca

SEQ ID NO: 4799751 - DNA, 25 bp, Homo sapien
ccatcagttcattctgggtgttcat

SEQ ID NO: 4799752 - DNA, 25 bp, Homo sapien
tagtgtgagacaataggaggacttc

SEQ ID NO: 4799753 - DNA, 25 bp, Homo sapien
tccataactgaacaagcaagagaag

SEQ ID NO: 4799754 - DNA, 25 bp, Homo sapien
caggcaaatcttgttgctacaccta

SEQ ID NO: 4799755 - DNA, 25 bp, Homo sapien
tattcaaaagcttaggatgcatgtc

SEQ ID NO: 4799756 - DNA, 25 bp, Homo sapien
cactttcctctctgcactgatccat

SEQ ID NO: 4799757 - DNA, 25 bp, Homo sapien
cttcactttcctctctgcactgatc

SEQ ID NO: 4799758 - DNA, 25 bp, Homo sapien
ctggttgacccaacttcactttcct

SEQ ID NO: 4799759 - DNA, 25 bp, Homo sapien
tggttgacccaacttcactttcctc

SEQ ID NO: 4799760 - DNA, 25 bp, Homo sapien
ggtggacccaaaagacaactgcact

SEQ ID NO: 4799761 - DNA, 25 bp, Homo sapien
cacctgagtggaaagggtggaccca

SEQ ID NO: 4799762 - DNA, 25 bp, Homo sapien
taatatttacagtgctccactcagg

SEQ ID NO: 4799763 - DNA, 25 bp, Homo sapien
tacttccgagctcaaaatccatcag

SEQ ID NO: 4799764 - DNA, 25 bp, Homo sapien
tggtgggctggcaaaggcccctggc

SEQ ID NO: 4799765 - DNA, 25 bp, Homo sapien
catcatcatcagagggtggtgggct

SEQ ID NO: 4799766 - DNA, 25 bp, Homo sapien
cctggcaaaggccccctccagactg

SEQ ID NO: 4799767 - DNA, 25 bp, Homo sapien
tcatcatcatcagagggtggtgggc

SEQ ID NO: 4799768 - DNA, 25 bp, Homo sapien
tggtttgtaacagtgccgaccacaa

SEQ ID NO: 4799769 - DNA, 25 bp, Homo sapien
ggcccctgaggcgtctaaactggac

SEQ ID NO: 4799770 - DNA, 25 bp, Homo sapien
taacagtgccgaccacaagccatgt

SEQ ID NO: 4799771 - DNA, 25 bp, Homo sapien
cctgaggcgtctaaactggactcct

SEQ ID NO: 4799772 - DNA, 25 bp, Homo sapien
tgctgccgttgaagggagagctccc

SEQ ID NO: 4799773 - DNA, 25 bp, Homo sapien
agctgttcctggaaaccctcggcca

SEQ ID NO: 4799774 - DNA, 25 bp, Homo sapien
tgttgacgggagatgacacagatgc

SEQ ID NO: 4799775 - DNA, 25 bp, Homo sapien
tcctcaaatgccttaatcatggtgt

SEQ ID NO: 4799776 - DNA, 25 bp, Homo sapien
cagattatggatctcactgaaaagt

SEQ ID NO: 4799777 - DNA, 25 bp, Homo sapien
tattctgcagattatggatctcact

SEQ ID NO: 4799778 - DNA, 25 bp, Homo sapien
tgcagcttgtattcctgttcctcca

SEQ ID NO: 4799779 - DNA, 25 bp, Homo sapien
tctgaacttattctgcagattatgg

SEQ ID NO: 4799780 - DNA, 25 bp, Homo sapien
tcacactgactttagcagaaggctg

SEQ ID NO: 4799781 - DNA, 25 bp, Homo sapien
aaaactgtaattatggcctcactgc

SEQ ID NO: 4799782 - DNA, 25 bp, Homo sapien
gcaaggtcatcaggtgggcaaatct

SEQ ID NO: 4799783 - DNA, 25 bp, Homo sapien
gccagcggaccgaggattttcacgt

SEQ ID NO: 4799784 - DNA, 25 bp, Homo sapien
taaagagtggtaattctgaatatcc

SEQ ID NO: 4799785 - DNA, 25 bp, Homo sapien
cattttcacattctcggcgtctagt

SEQ ID NO: 4799786 - DNA, 25 bp, Homo sapien
gagagattctgtgaagcaacagtaa

SEQ ID NO: 4799787 - DNA, 25 bp, Homo sapien
ctagtacagaacctaacccagacca

SEQ ID NO: 4799788 - DNA, 25 bp, Homo sapien
gcttctttgctgatcactgtccatt

SEQ ID NO: 4799789 - DNA, 25 bp, Homo sapien
caatctcgtagcttctttgctgatc

SEQ ID NO: 4799790 - DNA, 25 bp, Homo sapien
ttgtctctccagacagaagatgtgg

SEQ ID NO: 4799791 - DNA, 25 bp, Homo sapien
cgtagcttctttgctgatcactgtc

SEQ ID NO: 4799792 - DNA, 25 bp, Homo sapien
cagccagaattaacttttggtgaag

SEQ ID NO: 4799793 - DNA, 25 bp, Homo sapien
ttgtcgggcgttggcctcccctcca

SEQ ID NO: 4799794 - DNA, 25 bp, Homo sapien
tttggtgaagttgcttattacaagt

SEQ ID NO: 4799795 - DNA, 25 bp, Homo sapien
tacaagttttaaactccttcagctc

SEQ ID NO: 4799796 - DNA, 25 bp, Homo sapien
tattaggattggcaagcgggacttc

SEQ ID NO: 4799797 - DNA, 25 bp, Homo sapien
gtggcagggagacgatacatatttc

SEQ ID NO: 4799798 - DNA, 25 bp, Homo sapien
tggttttattaggattggcaagcgg

SEQ ID NO: 4799799 - DNA, 25 bp, Homo sapien
catatttcctaatgaccgggatggt

SEQ ID NO: 4799800 - DNA, 25 bp, Homo sapien
ttgaatctcagcaggtcgccctccg

SEQ ID NO: 4799801 - DNA, 25 bp, Homo sapien
ttgatcggtttctcttcccaagcct

SEQ ID NO: 4799802 - DNA, 25 bp, Homo sapien
cagtgttgatcggtttctcttccca

SEQ ID NO: 4799803 - DNA, 25 bp, Homo sapien
ctgagtgcagtgttgatcggtttct

SEQ ID NO: 4799804 - DNA, 25 bp, Homo sapien
caagacaacttcagttcatcatgtg

SEQ ID NO: 4799805 - DNA, 25 bp, Homo sapien
gcttaggtgtcttctcagttttacc

SEQ ID NO: 4799806 - DNA, 25 bp, Homo sapien
tgggcacttcgcctgcctttactag

SEQ ID NO: 4799807 - DNA, 25 bp, Homo sapien
taccatcaaggtgttctccagaaac

SEQ ID NO: 4799808 - DNA, 25 bp, Homo sapien
cagttcccgtaccactttcagaagg

SEQ ID NO: 4799809 - DNA, 25 bp, Homo sapien
gtcccagaagcagttcccgtaccac

SEQ ID NO: 4799810 - DNA, 25 bp, Homo sapien
agcagttcccgtaccactttcagaa

SEQ ID NO: 4799811 - DNA, 25 bp, Homo sapien
ccagaagcagttcccgtaccacttt

SEQ ID NO: 4799812 - DNA, 25 bp, Homo sapien
gtgaaacagtcaggctgtactctac

SEQ ID NO: 4799813 - DNA, 25 bp, Homo sapien
ctccgaacttccctccctccgatct

SEQ ID NO: 4799814 - DNA, 25 bp, Homo sapien
ctggtgaaacagtcaggctgtactc

SEQ ID NO: 4799815 - DNA, 25 bp, Homo sapien
cctccctccgatctttgctgccact

SEQ ID NO: 4799816 - DNA, 25 bp, Homo sapien
cttcttctaggcagccaggtgcgtg

SEQ ID NO: 4799817 - DNA, 25 bp, Homo sapien
tgggccccatcacaatctgaaatct

SEQ ID NO: 4799818 - DNA, 25 bp, Homo sapien
ttccagtaataatgtggccttctca

SEQ ID NO: 4799819 - DNA, 25 bp, Homo sapien
tgaaatcttagactccgtgtgcctt

SEQ ID NO: 4799820 - DNA, 25 bp, Homo sapien
caggaaattaatctcgtcatcctcc

SEQ ID NO: 4799821 - DNA, 25 bp, Homo sapien
tcactcaggaaattaatctcgtcat

SEQ ID NO: 4799822 - DNA, 25 bp, Homo sapien
caattttgatcgtgtcctcgtcctc

SEQ ID NO: 4799823 - DNA, 25 bp, Homo sapien
gtcatcctccccaattttgatcgtg

SEQ ID NO: 4799824 - DNA, 25 bp, Homo sapien
ttaacccatagtgggacaaaatcag

SEQ ID NO: 4799825 - DNA, 25 bp, Homo sapien
ggaaatgtgaatagaacctaggtgg

SEQ ID NO: 4799826 - DNA, 25 bp, Homo sapien
gaacgcaggcttacaatttctatag

SEQ ID NO: 4799827 - DNA, 25 bp, Homo sapien
cttgtaaaacttagtgaacgcaggc

SEQ ID NO: 4799828 - DNA, 25 bp, Homo sapien
caaggtgcttcctacgagagagtca

SEQ ID NO: 4799829 - DNA, 25 bp, Homo sapien
tccagtttcatacgtgagggaccca

SEQ ID NO: 4799830 - DNA, 25 bp, Homo sapien
gggaaacaacatcacaacttcaggg

SEQ ID NO: 4799831 - DNA, 25 bp, Homo sapien
taacatgcgcatgaagcaaggtgct

SEQ ID NO: 4799832 - DNA, 25 bp, Homo sapien
tcaggtgctggttgtctgtatacag

SEQ ID NO: 4799833 - DNA, 25 bp, Homo sapien
tagacgcaagtctatctggaaaccc

SEQ ID NO: 4799834 - DNA, 25 bp, Homo sapien
tggaaacccatgcaggagagatcaa

SEQ ID NO: 4799835 - DNA, 25 bp, Homo sapien
tcactagctgtataaggtcactgac

SEQ ID NO: 4799836 - DNA, 25 bp, Homo sapien
tgtacagctgcccatacagcaacct

SEQ ID NO: 4799837 - DNA, 25 bp, Homo sapien
tacagctgcccatacagcaaccttg

SEQ ID NO: 4799838 - DNA, 25 bp, Homo sapien
atacaggcaattagcctctcctctg

SEQ ID NO: 4799839 - DNA, 25 bp, Homo sapien
cccatctcccatacaggcaattagc

SEQ ID NO: 4799840 - DNA, 25 bp, Homo sapien
gatgtttgatcactataaagtgaaa

SEQ ID NO: 4799841 - DNA, 25 bp, Homo sapien
gaaaccgattgttttcttcaaggca

SEQ ID NO: 4799842 - DNA, 25 bp, Homo sapien
aaaatgttccacttgaaaccgattg

SEQ ID NO: 4799843 - DNA, 25 bp, Homo sapien
ggcaaatacttagataagatgtttg

SEQ ID NO: 4799844 - DNA, 25 bp, Homo sapien
gcagaaagtgcctgctagtgctaag

SEQ ID NO: 4799845 - DNA, 25 bp, Homo sapien
acaagcacactaagtgcagaaagtg

SEQ ID NO: 4799846 - DNA, 25 bp, Homo sapien
taagtgcagaaagtgcctgctagtg

SEQ ID NO: 4799847 - DNA, 25 bp, Homo sapien
gcacactaagtgcagaaagtgcctg

SEQ ID NO: 4799848 - DNA, 25 bp, Homo sapien
gaatctctggtcaccaatgtaagga

SEQ ID NO: 4799849 - DNA, 25 bp, Homo sapien
tcaccaatgtaaggatctgtttcct

SEQ ID NO: 4799850 - DNA, 25 bp, Homo sapien
gaagaatctctggtcaccaatgtaa

SEQ ID NO: 4799851 - DNA, 25 bp, Homo sapien
tctggtcaccaatgtaaggatctgt

SEQ ID NO: 4799852 - DNA, 25 bp, Homo sapien
tagacttaaaggaagatgccctggc

SEQ ID NO: 4799853 - DNA, 25 bp, Homo sapien
tgggcacgtcaaaccccagctgagt

SEQ ID NO: 4799854 - DNA, 25 bp, Homo sapien
gatcacaggtgaaaagttaggtgcc

SEQ ID NO: 4799855 - DNA, 25 bp, Homo sapien
tatgtgtactcagcaaggcatatcc

SEQ ID NO: 4799856 - DNA, 25 bp, Homo sapien
gaaaccccgtgtatgcttcatccct

SEQ ID NO: 4799857 - DNA, 25 bp, Homo sapien
caccacaaaaaggatctccaaacga

SEQ ID NO: 4799858 - DNA, 25 bp, Homo sapien
taggaaggctaacatcagcatggtc

SEQ ID NO: 4799859 - DNA, 25 bp, Homo sapien
tatttaggactctcctgaagttcag

SEQ ID NO: 4799860 - DNA, 25 bp, Homo sapien
attctgatatgaaagcacatcctgc

SEQ ID NO: 4799861 - DNA, 25 bp, Homo sapien
gcttccgcagggcaaaaatcttgtt

SEQ ID NO: 4799862 - DNA, 25 bp, Homo sapien
tccgaatttcgctgatctgctcctc

SEQ ID NO: 4799863 - DNA, 25 bp, Homo sapien
caaggtcttccgcaaattctgatat

SEQ ID NO: 4799864 - DNA, 25 bp, Homo sapien
tctttaagacctgaatcagctcttc

SEQ ID NO: 4799865 - DNA, 25 bp, Homo sapien
cctgaatcagctcttcatagtctga

SEQ ID NO: 4799866 - DNA, 25 bp, Homo sapien
tgggtatagatgtcctgctctttct

SEQ ID NO: 4799867 - DNA, 25 bp, Homo sapien
cagatgggtatagatgtcctgctct

SEQ ID NO: 4799868 - DNA, 25 bp, Homo sapien
caggttaatgtgaatcttagccaac

SEQ ID NO: 4799869 - DNA, 25 bp, Homo sapien
actaaaataacctgatgagctgcta

SEQ ID NO: 4799870 - DNA, 25 bp, Homo sapien
tgagctgctatcttggtgtgaaaaa

SEQ ID NO: 4799871 - DNA, 25 bp, Homo sapien
gattacaggagatactttttacatg

SEQ ID NO: 4799872 - DNA, 25 bp, Homo sapien
gttattaagccttcactcctgagct

SEQ ID NO: 4799873 - DNA, 25 bp, Homo sapien
agagcacttttctgttattaagcct

SEQ ID NO: 4799874 - DNA, 25 bp, Homo sapien
cacttttctgttattaagccttcac

SEQ ID NO: 4799875 - DNA, 25 bp, Homo sapien
cttagagaagatggttttgctgcct

SEQ ID NO: 4799876 - DNA, 25 bp, Homo sapien
tatttagtcgtcatatgacccagga

SEQ ID NO: 4799877 - DNA, 25 bp, Homo sapien
tagaagaacctcagtgaagtggcct

SEQ ID NO: 4799878 - DNA, 25 bp, Homo sapien
gaagtggcctgagcactagggcaaa

SEQ ID NO: 4799879 - DNA, 25 bp, Homo sapien
tattctcctagttagtccctgtggg

SEQ ID NO: 4799880 - DNA, 25 bp, Homo sapien
tactttctgttagatgtttgatcac

SEQ ID NO: 4799881 - DNA, 25 bp, Homo sapien
gactcttgtaacgattttccattgc

SEQ ID NO: 4799882 - DNA, 25 bp, Homo sapien
ttattgctttcactcagaagactct

SEQ ID NO: 4799883 - DNA, 25 bp, Homo sapien
gaagcaacacgtccttctgattggt

SEQ ID NO: 4799884 - DNA, 25 bp, Homo sapien
cgggcagcggagctgtctcagtctt

SEQ ID NO: 4799885 - DNA, 25 bp, Homo sapien
gccccagctgcagatatgaagcgga

SEQ ID NO: 4799886 - DNA, 25 bp, Homo sapien
cgcccgaccgccgggaggatggagt

SEQ ID NO: 4799887 - DNA, 25 bp, Homo sapien
aggatggagttcagcgggcagcgga

SEQ ID NO: 4799888 - DNA, 25 bp, Homo sapien
tacccaatgctaaatagagtacagt

SEQ ID NO: 4799889 - DNA, 25 bp, Homo sapien
gaatatatctatacaacagtcctta

SEQ ID NO: 4799890 - DNA, 25 bp, Homo sapien
cagtcataaaaaagatcacctagag

SEQ ID NO: 4799891 - DNA, 25 bp, Homo sapien
gcccagttattatacctctatcagg

SEQ ID NO: 4799892 - DNA, 25 bp, Homo sapien
tcttctctcgatgggcttcctccag

SEQ ID NO: 4799893 - DNA, 25 bp, Homo sapien
tagagcagtctcatagtcttcagac

SEQ ID NO: 4799894 - DNA, 25 bp, Homo sapien
cttaatgcttctacgcagtctgtgg

SEQ ID NO: 4799895 - DNA, 25 bp, Homo sapien
gcagcgcagccgaaagggcttcctt

SEQ ID NO: 4799896 - DNA, 25 bp, Homo sapien
aaaggcagcactgagcttttcaatt

SEQ ID NO: 4799897 - DNA, 25 bp, Homo sapien
ctgtgctttctgtagggcctctctg

SEQ ID NO: 4799898 - DNA, 25 bp, Homo sapien
ctgaaattcctgggtctgtgctttc

SEQ ID NO: 4799899 - DNA, 25 bp, Homo sapien
ctctggctttagcaaaggcagcact

SEQ ID NO: 4799900 - DNA, 25 bp, Homo sapien
tatccacgctttgaactgagtcagt

SEQ ID NO: 4799901 - DNA, 25 bp, Homo sapien
tcatgcaagccagacacctagaagt

SEQ ID NO: 4799902 - DNA, 25 bp, Homo sapien
tggcaccaccatacctctagtcatg

SEQ ID NO: 4799903 - DNA, 25 bp, Homo sapien
atctggatggtccacgggctcctca

SEQ ID NO: 4799904 - DNA, 25 bp, Homo sapien
gaatggctttatccctctttagact

SEQ ID NO: 4799905 - DNA, 25 bp, Homo sapien
aaccctgaatggctttatccctctt

SEQ ID NO: 4799906 - DNA, 25 bp, Homo sapien
aatgccatggttaaaccctgaatgg

SEQ ID NO: 4799907 - DNA, 25 bp, Homo sapien
tcctttgattttaatgccatggtta

SEQ ID NO: 4799908 - DNA, 25 bp, Homo sapien
tccaagtggagctgaacatagtgcc

SEQ ID NO: 4799909 - DNA, 25 bp, Homo sapien
gattcactaagttgatgcgttccaa

SEQ ID NO: 4799910 - DNA, 25 bp, Homo sapien
caagttactgtgttaccgctcccgg

SEQ ID NO: 4799911 - DNA, 25 bp, Homo sapien
gacgatgacagctattcctatggga

SEQ ID NO: 4799912 - DNA, 25 bp, Homo sapien
tctcttcaaagctgtttctctcctt

SEQ ID NO: 4799913 - DNA, 25 bp, Homo sapien
tctccttctgatgctccatttgtgc

SEQ ID NO: 4799914 - DNA, 25 bp, Homo sapien
ccttctgatgctccatttgtgcagc

SEQ ID NO: 4799915 - DNA, 25 bp, Homo sapien
tctctccttctgatgctccatttgt

SEQ ID NO: 4799916 - DNA, 25 bp, Homo sapien
cttcaaaagagcttgctggggaggc

SEQ ID NO: 4799917 - DNA, 25 bp, Homo sapien
ggctttggggtcagctactagcaac

SEQ ID NO: 4799918 - DNA, 25 bp, Homo sapien
tggggtcagctactagcaacccatc

SEQ ID NO: 4799919 - DNA, 25 bp, Homo sapien
ggtcagctactagcaacccatctct

SEQ ID NO: 4799920 - DNA, 25 bp, Homo sapien
ttcttcccttggagcagcacaaagt

SEQ ID NO: 4799921 - DNA, 25 bp, Homo sapien
gacacattctcatcaggacatgcca

SEQ ID NO: 4799922 - DNA, 25 bp, Homo sapien
ctcggagctctccagatgacacatt

SEQ ID NO: 4799923 - DNA, 25 bp, Homo sapien
ttttcttcccttggagcagcacaaa

SEQ ID NO: 4799924 - DNA, 25 bp, Homo sapien
tcccaggaagatgccgcctttagca

SEQ ID NO: 4799925 - DNA, 25 bp, Homo sapien
gcaaagctctgatccgacatccatg

SEQ ID NO: 4799926 - DNA, 25 bp, Homo sapien
gaagatgccgcctttagcaaagctc

SEQ ID NO: 4799927 - DNA, 25 bp, Homo sapien
cagtcagacctatgggaaatcccag

SEQ ID NO: 4799928 - DNA, 25 bp, Homo sapien
tcctggatttctgcatcagcctgag

SEQ ID NO: 4799929 - DNA, 25 bp, Homo sapien
cacctccactttggtcaccatcagc

SEQ ID NO: 4799930 - DNA, 25 bp, Homo sapien
tctgcatcagcctgagaaccagtct

SEQ ID NO: 4799931 - DNA, 25 bp, Homo sapien
tcagcctgagaaccagtcttctacc

SEQ ID NO: 4799932 - DNA, 25 bp, Homo sapien
aaaactttcattttccagatcaaag

SEQ ID NO: 4799933 - DNA, 25 bp, Homo sapien
tattaatcataaaactttcattttc

SEQ ID NO: 4799934 - DNA, 25 bp, Homo sapien
cttgaaattattaatcataaaactt

SEQ ID NO: 4799935 - DNA, 25 bp, Homo sapien
taaaactttcattttccagatcaaa

SEQ ID NO: 4799936 - DNA, 25 bp, Homo sapien
tgaaagcttgctttccaaacgcaac

SEQ ID NO: 4799937 - DNA, 25 bp, Homo sapien
ttctcatccaggaccagagccatcg

SEQ ID NO: 4799938 - DNA, 25 bp, Homo sapien
ctttctcatccaggaccagagccat

SEQ ID NO: 4799939 - DNA, 25 bp, Homo sapien
aaccgaagagccttctccgtctctg

SEQ ID NO: 4799940 - DNA, 25 bp, Homo sapien
ggagtattcttttagttaggagatc

SEQ ID NO: 4799941 - DNA, 25 bp, Homo sapien
gtattcttttagttaggagatcttc

SEQ ID NO: 4799942 - DNA, 25 bp, Homo sapien
tattcttttagttaggagatcttcc

SEQ ID NO: 4799943 - DNA, 25 bp, Homo sapien
ttcttttagttaggagatcttccac

SEQ ID NO: 4799944 - DNA, 25 bp, Homo sapien
gcatcttctttcacccgctggattt

SEQ ID NO: 4799945 - DNA, 25 bp, Homo sapien
cgctggatttcagagccacctgctt

SEQ ID NO: 4799946 - DNA, 25 bp, Homo sapien
ggatttcagagccacctgcttcagc

SEQ ID NO: 4799947 - DNA, 25 bp, Homo sapien
ctgcttcagctaagctctcaactgc

SEQ ID NO: 4799948 - DNA, 25 bp, Homo sapien
ccagatctgaagctttacaaagggc

SEQ ID NO: 4799949 - DNA, 25 bp, Homo sapien
gctagaggaagccatgcgcggttcc

SEQ ID NO: 4799950 - DNA, 25 bp, Homo sapien
cagcgaagtccgttaagagactgat

SEQ ID NO: 4799951 - DNA, 25 bp, Homo sapien
cgttaagagactgatgcgggctaga

SEQ ID NO: 4799952 - DNA, 25 bp, Homo sapien
gagttcccgcttcagactttctact

SEQ ID NO: 4799953 - DNA, 25 bp, Homo sapien
ctttctacttccaccttgagctcaa

SEQ ID NO: 4799954 - DNA, 25 bp, Homo sapien
ttctacttccaccttgagctcaatg

SEQ ID NO: 4799955 - DNA, 25 bp, Homo sapien
ctggagttcccgcttcagactttct

SEQ ID NO: 4799956 - DNA, 25 bp, Homo sapien
tttccactggtgcaaacttcagagg

SEQ ID NO: 4799957 - DNA, 25 bp, Homo sapien
gaataccgaagagtcctatcacaga

SEQ ID NO: 4799958 - DNA, 25 bp, Homo sapien
caggccaagggctaatctactagaa

SEQ ID NO: 4799959 - DNA, 25 bp, Homo sapien
gacagttacaggcaagcacacagga

SEQ ID NO: 4799960 - DNA, 25 bp, Homo sapien
aaatagatgcggagctttaggttaa

SEQ ID NO: 4799961 - DNA, 25 bp, Homo sapien
ttttgtagatatgttcagtggggcc

SEQ ID NO: 4799962 - DNA, 25 bp, Homo sapien
gggccatgaaattcctgttgcattc

SEQ ID NO: 4799963 - DNA, 25 bp, Homo sapien
tagatgcggagctttaggttaaagt

SEQ ID NO: 4799964 - DNA, 25 bp, Homo sapien
tctctgcttagtaccactttcctca

SEQ ID NO: 4799965 - DNA, 25 bp, Homo sapien
tcagttctctgcttagtaccacttt

SEQ ID NO: 4799966 - DNA, 25 bp, Homo sapien
ttctctgcttagtaccactttcctc

SEQ ID NO: 4799967 - DNA, 25 bp, Homo sapien
tctgcttagtaccactttcctcaca

SEQ ID NO: 4799968 - DNA, 25 bp, Homo sapien
acaaaatgctgcctccgcaaggcct

SEQ ID NO: 4799969 - DNA, 25 bp, Homo sapien
cttcacaaaatgctgcctccgcaag

SEQ ID NO: 4799970 - DNA, 25 bp, Homo sapien
tcacaacaggtacaggccttcacaa

SEQ ID NO: 4799971 - DNA, 25 bp, Homo sapien
caggtacaggccttcacaaaatgct

SEQ ID NO: 4799972 - DNA, 25 bp, Homo sapien
ctttaggacaccagaaagacaccaa

SEQ ID NO: 4799973 - DNA, 25 bp, Homo sapien
ttaggacaccagaaagacaccaaac

SEQ ID NO: 4799974 - DNA, 25 bp, Homo sapien
tttaggacaccagaaagacaccaaa

SEQ ID NO: 4799975 - DNA, 25 bp, Homo sapien
gtccttcatgttccgtgctctggtg

SEQ ID NO: 4799976 - DNA, 25 bp, Homo sapien
cacctacggtgtgccagttcaggga

SEQ ID NO: 4799977 - DNA, 25 bp, Homo sapien
tctgggccccagagatatgaaagct

SEQ ID NO: 4799978 - DNA, 25 bp, Homo sapien
ttctttactcaagagaatgcctggt

SEQ ID NO: 4799979 - DNA, 25 bp, Homo sapien
gatgctcacagtccaatgtctactt

SEQ ID NO: 4799980 - DNA, 25 bp, Homo sapien
aacccagcattggggttgatgccat

SEQ ID NO: 4799981 - DNA, 25 bp, Homo sapien
tcccatctagaacccgcctaggagg

SEQ ID NO: 4799982 - DNA, 25 bp, Homo sapien
gtatacatcatgctacaacatcctt

SEQ ID NO: 4799983 - DNA, 25 bp, Homo sapien
tctacttaatatgccctcatgatgt

SEQ ID NO: 4799984 - DNA, 25 bp, Homo sapien
gcctaggaggtaatcactgttttca

SEQ ID NO: 4799985 - DNA, 25 bp, Homo sapien
cacgaccaccaatgccccggccgca

SEQ ID NO: 4799986 - DNA, 25 bp, Homo sapien
acgaccaccaatgccccggccgcac

SEQ ID NO: 4799987 - DNA, 25 bp, Homo sapien
gagcgtcccagggacggtgacgtcc

SEQ ID NO: 4799988 - DNA, 25 bp, Homo sapien
cagggacggtgacgtcctcttccaa

SEQ ID NO: 4799989 - DNA, 25 bp, Homo sapien
gcgtcccagggacggtgacgtcctc

SEQ ID NO: 4799990 - DNA, 25 bp, Homo sapien
tcccagggacggtgacgtcctcttc

SEQ ID NO: 4799991 - DNA, 25 bp, Homo sapien
ggctacagaggtggcgacagcgttg

SEQ ID NO: 4799992 - DNA, 25 bp, Homo sapien
tacagaggtggcgacagcgttggtg

SEQ ID NO: 4799993 - DNA, 25 bp, Homo sapien
acagaggtggcgacagcgttggtgt

SEQ ID NO: 4799994 - DNA, 25 bp, Homo sapien
ctacagaggtggcgacagcgttggt

SEQ ID NO: 4799995 - DNA, 25 bp, Homo sapien
gtggcggcggcgccactagtacccc

SEQ ID NO: 4799996 - DNA, 25 bp, Homo sapien
tgtggcggcggcgccactagtaccc

SEQ ID NO: 4799997 - DNA, 25 bp, Homo sapien
gccactagtaccccccgcgatagcg

SEQ ID NO: 4799998 - DNA, 25 bp, Homo sapien
cactagtaccccccgcgatagcgac

SEQ ID NO: 4799999 - DNA, 25 bp, Homo sapien
tcttgttcagactctggcggcgccg

SEQ ID NO: 4800000 - DNA, 25 bp, Homo sapien
gctcttgttcagactctggcggcgc

SEQ ID NO: 4800001 - DNA, 25 bp, Homo sapien
gccgccatctttcccggcgcttctt

SEQ ID NO: 4800002 - DNA, 25 bp, Homo sapien
ccagctcttgttcagactctggcgg

SEQ ID NO: 4800003 - DNA, 25 bp, Homo sapien
gcagggaagcggggataggtgccat

SEQ ID NO: 4800004 - DNA, 25 bp, Homo sapien
cgcacgcagtgaagccgaccggctg

SEQ ID NO: 4800005 - DNA, 25 bp, Homo sapien
aacgaggcggggtcacggaggcgca

SEQ ID NO: 4800006 - DNA, 25 bp, Homo sapien
accggctggcgccagaggacgggca

SEQ ID NO: 4800007 - DNA, 25 bp, Homo sapien
ttatgaagtgggctgaaagtaaatg

SEQ ID NO: 4800008 - DNA, 25 bp, Homo sapien
tatttgaagacatgaaacaactctg

SEQ ID NO: 4800009 - DNA, 25 bp, Homo sapien
tgaaacaactctgaccacacaaaaa

SEQ ID NO: 4800010 - DNA, 25 bp, Homo sapien
tggcatgtatttgaagacatgaaac

SEQ ID NO: 4800011 - DNA, 25 bp, Homo sapien
actgggaagagtaacgcactaggcc

SEQ ID NO: 4800012 - DNA, 25 bp, Homo sapien
tgagcaatggccaaatacgcaaagc

SEQ ID NO: 4800013 - DNA, 25 bp, Homo sapien
gaaagaacattgtgcagtgcatccc

SEQ ID NO: 4800014 - DNA, 25 bp, Homo sapien
gggaggacacggacatacttaacac

SEQ ID NO: 4800015 - DNA, 25 bp, Homo sapien
taagagcaatagataggctaagcgc

SEQ ID NO: 4800016 - DNA, 25 bp, Homo sapien
aaatgacggatgctcaccagagtcc

SEQ ID NO: 4800017 - DNA, 25 bp, Homo sapien
tcatcactgagcaagaatcctggga

SEQ ID NO: 4800018 - DNA, 25 bp, Homo sapien
tagatacaaatacaacgtcgaccag

SEQ ID NO: 4800019 - DNA, 25 bp, Homo sapien
ttatgtatgggcgtcgtcagggtca

SEQ ID NO: 4800020 - DNA, 25 bp, Homo sapien
taaattgggtccatgatacatcagc

SEQ ID NO: 4800021 - DNA, 25 bp, Homo sapien
tctttcagctcgatggtccaaaagg

SEQ ID NO: 4800022 - DNA, 25 bp, Homo sapien
tactcgcggtacatatatacagccc

SEQ ID NO: 4800023 - DNA, 25 bp, Homo sapien
ctgaaaagatagtctgcagggttgt

SEQ ID NO: 4800024 - DNA, 25 bp, Homo sapien
tactatttataacaggggtgggcac

SEQ ID NO: 4800025 - DNA, 25 bp, Homo sapien
aaaagatagtctgcagggttgtagg

SEQ ID NO: 4800026 - DNA, 25 bp, Homo sapien
aatggtagaaccttcaggtgttgga

SEQ ID NO: 4800027 - DNA, 25 bp, Homo sapien
gatgcaatttccctcgaggtcgtga

SEQ ID NO: 4800028 - DNA, 25 bp, Homo sapien
cactctcgggcttacaaatctttgg

SEQ ID NO: 4800029 - DNA, 25 bp, Homo sapien
tgcagttcgggcctatgtaaccatc

SEQ ID NO: 4800030 - DNA, 25 bp, Homo sapien
tccacatggccgtgacattggcact

SEQ ID NO: 4800031 - DNA, 25 bp, Homo sapien
gctgaacaagggcagcgaagacatt

SEQ ID NO: 4800032 - DNA, 25 bp, Homo sapien
tcaggactctgataaaatccttctt

SEQ ID NO: 4800033 - DNA, 25 bp, Homo sapien
gacattctttagtggcatcaggact

SEQ ID NO: 4800034 - DNA, 25 bp, Homo sapien
agagcagctgcctgtagatgtcact

SEQ ID NO: 4800035 - DNA, 25 bp, Homo sapien
gatacagagtacactaaccagatgg

SEQ ID NO: 4800036 - DNA, 25 bp, Homo sapien
tgagccattagattagccacccagc

SEQ ID NO: 4800037 - DNA, 25 bp, Homo sapien
cacactaagcgcactaagcaaatgg

SEQ ID NO: 4800038 - DNA, 25 bp, Homo sapien
tcaaagggacactcagaactactat

SEQ ID NO: 4800039 - DNA, 25 bp, Homo sapien
gatggaccaggcactatataaaggc

SEQ ID NO: 4800040 - DNA, 25 bp, Homo sapien
tatcgagaacatagtaacagttacc

SEQ ID NO: 4800041 - DNA, 25 bp, Homo sapien
tataaaggctgtacaagtgtattgc

SEQ ID NO: 4800042 - DNA, 25 bp, Homo sapien
atcttcacgacaacccactaggcag

SEQ ID NO: 4800043 - DNA, 25 bp, Homo sapien
tgtgatctagtacatcctacttaga

SEQ ID NO: 4800044 - DNA, 25 bp, Homo sapien
aagtttgttgtagcaggagtttggc

SEQ ID NO: 4800045 - DNA, 25 bp, Homo sapien
gaagaatcaacctatagctgaaaga

SEQ ID NO: 4800046 - DNA, 25 bp, Homo sapien
ttggcttgctgtgatctagtacatc

SEQ ID NO: 4800047 - DNA, 25 bp, Homo sapien
ctgtgagggcatcgcaactggcaga

SEQ ID NO: 4800048 - DNA, 25 bp, Homo sapien
tgtgagggcatcgcaactggcagac

SEQ ID NO: 4800049 - DNA, 25 bp, Homo sapien
catcggtcacatatagagccaatga

SEQ ID NO: 4800050 - DNA, 25 bp, Homo sapien
gagccaatgacacccactttgcact

SEQ ID NO: 4800051 - DNA, 25 bp, Homo sapien
tcttactaaagccataatatccatc

SEQ ID NO: 4800052 - DNA, 25 bp, Homo sapien
tattgcattggcagggcaagcagcc

SEQ ID NO: 4800053 - DNA, 25 bp, Homo sapien
aaataaaagcaaagacaatgaataa

SEQ ID NO: 4800054 - DNA, 25 bp, Homo sapien
aaagcaaagacaatgaataaaagta

SEQ ID NO: 4800055 - DNA, 25 bp, Homo sapien
gcaaagacaatgaataaaagtaaat

SEQ ID NO: 4800056 - DNA, 25 bp, Homo sapien
gcaaataaaagcaaagacaatgaat

SEQ ID NO: 4800057 - DNA, 25 bp, Homo sapien
catttagtcccctaggctgcagtgg

SEQ ID NO: 4800058 - DNA, 25 bp, Homo sapien
ggtctcatttagtcccctaggctgc

SEQ ID NO: 4800059 - DNA, 25 bp, Homo sapien
ctcatttagtcccctaggctgcagt

SEQ ID NO: 4800060 - DNA, 25 bp, Homo sapien
tgagaaagggtctcatttagtcccc

SEQ ID NO: 4800061 - DNA, 25 bp, Homo sapien
ctgttgattgatgtatcacgtttat

SEQ ID NO: 4800062 - DNA, 25 bp, Homo sapien
ccacccttgcatccctagtataaat

SEQ ID NO: 4800063 - DNA, 25 bp, Homo sapien
gatgatcatgtggttactgtccttc

SEQ ID NO: 4800064 - DNA, 25 bp, Homo sapien
attctgttgattgatgtatcacgtt

SEQ ID NO: 4800065 - DNA, 25 bp, Homo sapien
caatgttgagacgttagatattggg

SEQ ID NO: 4800066 - DNA, 25 bp, Homo sapien
acttgtgttgtagtctaacatgtgg

SEQ ID NO: 4800067 - DNA, 25 bp, Homo sapien
tagatattgggtgttgaaatctgca

SEQ ID NO: 4800068 - DNA, 25 bp, Homo sapien
agatgatatgtccaatgttgagacg

SEQ ID NO: 4800069 - DNA, 25 bp, Homo sapien
ggatttaatctgtttatactcaagg

SEQ ID NO: 4800070 - DNA, 25 bp, Homo sapien
cagcatatagttaggccatatcttt

SEQ ID NO: 4800071 - DNA, 25 bp, Homo sapien
gggggatttaatctgtttatactca

SEQ ID NO: 4800072 - DNA, 25 bp, Homo sapien
tagttaggccatatctttttatcca

SEQ ID NO: 4800073 - DNA, 25 bp, Homo sapien
gataaggactttcatctgcagttgg

SEQ ID NO: 4800074 - DNA, 25 bp, Homo sapien
tctcagtggcataggctgtacacat

SEQ ID NO: 4800075 - DNA, 25 bp, Homo sapien
gtgacgttcctttggtggcaaccta

SEQ ID NO: 4800076 - DNA, 25 bp, Homo sapien
tgcacctggtggaacaatcatctct

SEQ ID NO: 4800077 - DNA, 25 bp, Homo sapien
taggatattgtctcgcatttactcg

SEQ ID NO: 4800078 - DNA, 25 bp, Homo sapien
catttactcgtcatgtctccgcagc

SEQ ID NO: 4800079 - DNA, 25 bp, Homo sapien
catacatctaaaatggcaggtcaac

SEQ ID NO: 4800080 - DNA, 25 bp, Homo sapien
gaggctcggcctgtttaacttcgta

SEQ ID NO: 4800081 - DNA, 25 bp, Homo sapien
gaggactgacccctagagttatagg

SEQ ID NO: 4800082 - DNA, 25 bp, Homo sapien
ttttatacctagcatcacaggagga

SEQ ID NO: 4800083 - DNA, 25 bp, Homo sapien
tgggaccggcttacacaatgagatg

SEQ ID NO: 4800084 - DNA, 25 bp, Homo sapien
cataagtatagcatgaacaggccct

SEQ ID NO: 4800085 - DNA, 25 bp, Homo sapien
acatcagggccttcatggtttggcc

SEQ ID NO: 4800086 - DNA, 25 bp, Homo sapien
acgtatttacaaggcacatcagggc

SEQ ID NO: 4800087 - DNA, 25 bp, Homo sapien
gaatatctagtatgtgccaatcact

SEQ ID NO: 4800088 - DNA, 25 bp, Homo sapien
gaatagctcttcacttatgtgctca

SEQ ID NO: 4800089 - DNA, 25 bp, Homo sapien
ctctgttgtgaccaatagaagtata

SEQ ID NO: 4800090 - DNA, 25 bp, Homo sapien
catggaggaaaacttactggaagag

SEQ ID NO: 4800091 - DNA, 25 bp, Homo sapien
acttactggaagagaggtcaagaaa

SEQ ID NO: 4800092 - DNA, 25 bp, Homo sapien
tgagaggctgaagtattgttaggct

SEQ ID NO: 4800093 - DNA, 25 bp, Homo sapien
cattcctaaggttaacagtggctac

SEQ ID NO: 4800094 - DNA, 25 bp, Homo sapien
cacagtaaagcacctatacaaaagt

SEQ ID NO: 4800095 - DNA, 25 bp, Homo sapien
gtaacaaactccaatgttaggatat

SEQ ID NO: 4800096 - DNA, 25 bp, Homo sapien
ttcctgagcaaaaaccattcctaag

SEQ ID NO: 4800097 - DNA, 25 bp, Homo sapien
gttgatatttggtgcacctttcaaa

SEQ ID NO: 4800098 - DNA, 25 bp, Homo sapien
ctttgttgatatttggtgcaccttt

SEQ ID NO: 4800099 - DNA, 25 bp, Homo sapien
tttgttgatatttggtgcacctttc

SEQ ID NO: 4800100 - DNA, 25 bp, Homo sapien
tgcacctttcaaattgttgacatgt

SEQ ID NO: 4800101 - DNA, 25 bp, Homo sapien
ttaaaatgcagtatttggctgtatt

SEQ ID NO: 4800102 - DNA, 25 bp, Homo sapien
ttaacacagacttctcacacattat

SEQ ID NO: 4800103 - DNA, 25 bp, Homo sapien
taaaatgcagtatttggctgtattt

SEQ ID NO: 4800104 - DNA, 25 bp, Homo sapien
ctggaatttaacacagacttctcac

SEQ ID NO: 4800105 - DNA, 25 bp, Homo sapien
cccaggttaagctttagatgtccaa

SEQ ID NO: 4800106 - DNA, 25 bp, Homo sapien
tcagtgcagtacaaggcaaatgctt

SEQ ID NO: 4800107 - DNA, 25 bp, Homo sapien
ggcgactctagtgcttttgaagaac

SEQ ID NO: 4800108 - DNA, 25 bp, Homo sapien
gcagcagatcttgggttatacccag

SEQ ID NO: 4800109 - DNA, 25 bp, Homo sapien
ctgttgcacggtatgctgagagctc

SEQ ID NO: 4800110 - DNA, 25 bp, Homo sapien
tgttgcacggtatgctgagagctcc

SEQ ID NO: 4800111 - DNA, 25 bp, Homo sapien
gttgcacggtatgctgagagctcca

SEQ ID NO: 4800112 - DNA, 25 bp, Homo sapien
ttgcacggtatgctgagagctccat

SEQ ID NO: 4800113 - DNA, 25 bp, Homo sapien
ggtttcacagtgaagcccctgataa

SEQ ID NO: 4800114 - DNA, 25 bp, Homo sapien
tggttgcagcgattcacattcaggc

SEQ ID NO: 4800115 - DNA, 25 bp, Homo sapien
cagagcccagaagtgtaatttaggt

SEQ ID NO: 4800116 - DNA, 25 bp, Homo sapien
acagtcacatggctgacagagccca

SEQ ID NO: 4800117 - DNA, 25 bp, Homo sapien
aatacagacataggattgcattcca

SEQ ID NO: 4800118 - DNA, 25 bp, Homo sapien
tgttcaaggctgcaagcaatacaga

SEQ ID NO: 4800119 - DNA, 25 bp, Homo sapien
tattgccaaggcactattagatgtt

SEQ ID NO: 4800120 - DNA, 25 bp, Homo sapien
taatagtcttggagaaacaggcaat

SEQ ID NO: 4800121 - DNA, 25 bp, Homo sapien
aggagagagggagctatcatgatac

SEQ ID NO: 4800122 - DNA, 25 bp, Homo sapien
cggccgagggaattcttatttaatg

SEQ ID NO: 4800123 - DNA, 25 bp, Homo sapien
tcatgatacagtatgctggtaggca

SEQ ID NO: 4800124 - DNA, 25 bp, Homo sapien
gctggtaggcattccttacttccct

SEQ ID NO: 4800125 - DNA, 25 bp, Homo sapien
tggtaggctcatatcctaaaaacct

SEQ ID NO: 4800126 - DNA, 25 bp, Homo sapien
gcaccagatggtaggctcatatcct

SEQ ID NO: 4800127 - DNA, 25 bp, Homo sapien
ctgtgcaccagatggtaggctcata

SEQ ID NO: 4800128 - DNA, 25 bp, Homo sapien
ccagatggtaggctcatatcctaaa

SEQ ID NO: 4800129 - DNA, 25 bp, Homo sapien
tgtaagaggcaagtacttgcttttc

SEQ ID NO: 4800130 - DNA, 25 bp, Homo sapien
tctgagactctaagattcatgactg

SEQ ID NO: 4800131 - DNA, 25 bp, Homo sapien
agcttctgagactctaagattcatg

SEQ ID NO: 4800132 - DNA, 25 bp, Homo sapien
agactctaagattcatgactggctg

SEQ ID NO: 4800133 - DNA, 25 bp, Homo sapien
tattttccaaagaaggagttcacgc

SEQ ID NO: 4800134 - DNA, 25 bp, Homo sapien
gcaaatgggtctgcccactcagata

SEQ ID NO: 4800135 - DNA, 25 bp, Homo sapien
cgctgggctccctcagttggaaagc

SEQ ID NO: 4800136 - DNA, 25 bp, Homo sapien
ggtaatgtggcaaatgggtctgccc

SEQ ID NO: 4800137 - DNA, 25 bp, Homo sapien
tactcatctgactcataacagacat

SEQ ID NO: 4800138 - DNA, 25 bp, Homo sapien
ctggaaaccaatccactgtacaaat

SEQ ID NO: 4800139 - DNA, 25 bp, Homo sapien
ctcatctgactcataacagacatcc

SEQ ID NO: 4800140 - DNA, 25 bp, Homo sapien
ggaaaccaatccactgtacaaatca

SEQ ID NO: 4800141 - DNA, 25 bp, Homo sapien
tctatagttgaataacagctgctcc

SEQ ID NO: 4800142 - DNA, 25 bp, Homo sapien
ctgtaggatgtaatctagttggaaa

SEQ ID NO: 4800143 - DNA, 25 bp, Homo sapien
taggatgtaatctagttggaaaaca

SEQ ID NO: 4800144 - DNA, 25 bp, Homo sapien
tattcgaatctagttggatctatag

SEQ ID NO: 4800145 - DNA, 25 bp, Homo sapien
agcgaacctggatcactgtgtacat

SEQ ID NO: 4800146 - DNA, 25 bp, Homo sapien
cctggatcactgtgtacatctcaga

SEQ ID NO: 4800147 - DNA, 25 bp, Homo sapien
ctactgaaagcgaacctggatcact

SEQ ID NO: 4800148 - DNA, 25 bp, Homo sapien
gatcactgtgtacatctcagaacca

SEQ ID NO: 4800149 - DNA, 25 bp, Homo sapien
caatggctgttttggggatttccat

SEQ ID NO: 4800150 - DNA, 25 bp, Homo sapien
agaactggacaatggctgttttggg

SEQ ID NO: 4800151 - DNA, 25 bp, Homo sapien
cagaactggacaatggctgttttgg

SEQ ID NO: 4800152 - DNA, 25 bp, Homo sapien
ggacaatggctgttttggggatttc

SEQ ID NO: 4800153 - DNA, 25 bp, Homo sapien
gataattctagcttgacctgggcca

SEQ ID NO: 4800154 - DNA, 25 bp, Homo sapien
tgtaactggcaacatgacacaggat

SEQ ID NO: 4800155 - DNA, 25 bp, Homo sapien
aaatgtcttctatttagtccagttc

SEQ ID NO: 4800156 - DNA, 25 bp, Homo sapien
tagtccagttctgagcagtaccatt

SEQ ID NO: 4800157 - DNA, 25 bp, Homo sapien
ttagaattggatatagtcacgaaaa

SEQ ID NO: 4800158 - DNA, 25 bp, Homo sapien
tggatatagtcacgaaaaaacttta

SEQ ID NO: 4800159 - DNA, 25 bp, Homo sapien
tattgctgcttaatataatgtaaac

SEQ ID NO: 4800160 - DNA, 25 bp, Homo sapien
tcataaaatgttagagtaggagaat

SEQ ID NO: 4800161 - DNA, 25 bp, Homo sapien
tcttggaagaattaagctttgagga

SEQ ID NO: 4800162 - DNA, 25 bp, Homo sapien
ggaagaattaagctttgaggaagca

SEQ ID NO: 4800163 - DNA, 25 bp, Homo sapien
ctagaaagacgtcttggaagaatta

SEQ ID NO: 4800164 - DNA, 25 bp, Homo sapien
gacgtcttggaagaattaagctttg

SEQ ID NO: 4800165 - DNA, 25 bp, Homo sapien
caaacctaggtatccagacataatc

SEQ ID NO: 4800166 - DNA, 25 bp, Homo sapien
cactgtctttcagctaaacaaggtc

SEQ ID NO: 4800167 - DNA, 25 bp, Homo sapien
cagtcagggtagtcatttctagtga

SEQ ID NO: 4800168 - DNA, 25 bp, Homo sapien
ctttaaagttaccagggcagtcagg

SEQ ID NO: 4800169 - DNA, 25 bp, Homo sapien
tttgaatgtaggttctgccagagct

SEQ ID NO: 4800170 - DNA, 25 bp, Homo sapien
aattttcctgtaactcacttggtgg

SEQ ID NO: 4800171 - DNA, 25 bp, Homo sapien
gccagacccactaggtttgaatgta

SEQ ID NO: 4800172 - DNA, 25 bp, Homo sapien
gacctactccgaatacatttggcaa

SEQ ID NO: 4800173 - DNA, 25 bp, Homo sapien
gtactatgcgggctttcaaacttcc

SEQ ID NO: 4800174 - DNA, 25 bp, Homo sapien
cctcagcttttgacccagtggttga

SEQ ID NO: 4800175 - DNA, 25 bp, Homo sapien
gctgggtgcgcgaacccaacccaaa

SEQ ID NO: 4800176 - DNA, 25 bp, Homo sapien
ttgaaggaggtactatgcgggcttt

SEQ ID NO: 4800177 - DNA, 25 bp, Homo sapien
gcgccggtacggtggtcgctacagg

SEQ ID NO: 4800178 - DNA, 25 bp, Homo sapien
ccagtggtcgtcgaaagggtggtcg

SEQ ID NO: 4800179 - DNA, 25 bp, Homo sapien
ccgagcggcgcctgaaaggtggtgg

SEQ ID NO: 4800180 - DNA, 25 bp, Homo sapien
agaggtggtcgaagtgcgttccgcc

SEQ ID NO: 4800181 - DNA, 25 bp, Homo sapien
ggcggcggcgcagcacaacagggcg

SEQ ID NO: 4800182 - DNA, 25 bp, Homo sapien
ggcgacgcgtccacctgccccgcgg

SEQ ID NO: 4800183 - DNA, 25 bp, Homo sapien
ggtggctgggctcgccccgcaaccc

SEQ ID NO: 4800184 - DNA, 25 bp, Homo sapien
gccaccggtgacattccccgccgag

SEQ ID NO: 4800185 - DNA, 25 bp, Homo sapien
gtcatcttctcctcgttgcaatccg

SEQ ID NO: 4800186 - DNA, 25 bp, Homo sapien
ggtcagtcatcttctcctcgttgca

SEQ ID NO: 4800187 - DNA, 25 bp, Homo sapien
agtcggttggtcagtcatcttctcc

SEQ ID NO: 4800188 - DNA, 25 bp, Homo sapien
tcagccagtcggttggtcagtcatc

SEQ ID NO: 4800189 - DNA, 25 bp, Homo sapien
cgcggagggagcgaccggaccgagc

SEQ ID NO: 4800190 - DNA, 25 bp, Homo sapien
accatcgccacctccctctgacagg

SEQ ID NO: 4800191 - DNA, 25 bp, Homo sapien
gccccagcgcggagggagcgaccgg

SEQ ID NO: 4800192 - DNA, 25 bp, Homo sapien
gccaccgggcgcaccatcgccacct

SEQ ID NO: 4800193 - DNA, 25 bp, Homo sapien
tgtgaaggagcatggaacatccagg

SEQ ID NO: 4800194 - DNA, 25 bp, Homo sapien
tgttagctacgcttcctgaaatgga

SEQ ID NO: 4800195 - DNA, 25 bp, Homo sapien
gcctagcagataatgggagctcaat

SEQ ID NO: 4800196 - DNA, 25 bp, Homo sapien
tagttagcaacttagcaaggacagc

SEQ ID NO: 4800197 - DNA, 25 bp, Homo sapien
ctaattcaggacaatttcatcatcc

SEQ ID NO: 4800198 - DNA, 25 bp, Homo sapien
tgttagtaatcatgccccattgccc

SEQ ID NO: 4800199 - DNA, 25 bp, Homo sapien
aggtctttcttgcaatcatcactat

SEQ ID NO: 4800200 - DNA, 25 bp, Homo sapien
tttttagcatattcatgaggtcttt

SEQ ID NO: 4800201 - DNA, 25 bp, Homo sapien
tttcaatttatagattcttcctcca

SEQ ID NO: 4800202 - DNA, 25 bp, Homo sapien
ttcaatttatagattcttcctccac

SEQ ID NO: 4800203 - DNA, 25 bp, Homo sapien
tcaatttatagattcttcctccacc

SEQ ID NO: 4800204 - DNA, 25 bp, Homo sapien
caatttatagattcttcctccaccc

SEQ ID NO: 4800205 - DNA, 25 bp, Homo sapien
tttataagggctacagtgctccagc

SEQ ID NO: 4800206 - DNA, 25 bp, Homo sapien
tgtcctaaaagagagccgatcagcc

SEQ ID NO: 4800207 - DNA, 25 bp, Homo sapien
cattttaggattggcagcccaactc

SEQ ID NO: 4800208 - DNA, 25 bp, Homo sapien
gaatgagtgtatgttcaggcaagct

SEQ ID NO: 4800209 - DNA, 25 bp, Homo sapien
tcttgactcgggcagtggttagaca

SEQ ID NO: 4800210 - DNA, 25 bp, Homo sapien
taagacaggttgaacagtgcacaca

SEQ ID NO: 4800211 - DNA, 25 bp, Homo sapien
cagggccgtggtactcaaatgacaa

SEQ ID NO: 4800212 - DNA, 25 bp, Homo sapien
taaagcctggccctaggactggtgg

SEQ ID NO: 4800213 - DNA, 25 bp, Homo sapien
tccacaggcaaaggtgacagtatgc

SEQ ID NO: 4800214 - DNA, 25 bp, Homo sapien
tgtctaaaccaagcgaaagcaccag

SEQ ID NO: 4800215 - DNA, 25 bp, Homo sapien
tacctatgcgctaaggaagccaaag

SEQ ID NO: 4800216 - DNA, 25 bp, Homo sapien
tatagttaacacaatcactcacggg

SEQ ID NO: 4800217 - DNA, 25 bp, Homo sapien
cagagctgaataactgccctattag

SEQ ID NO: 4800218 - DNA, 25 bp, Homo sapien
gaaacaatgtgaagacctgccaacc

SEQ ID NO: 4800219 - DNA, 25 bp, Homo sapien
gacagcacaatcctccccagaatgt

SEQ ID NO: 4800220 - DNA, 25 bp, Homo sapien
ggacaattccctcacttaaaagatg

SEQ ID NO: 4800221 - DNA, 25 bp, Homo sapien
ttcatacctggctgtacagacaagg

SEQ ID NO: 4800222 - DNA, 25 bp, Homo sapien
tttctgctataccagggcaccgctg

SEQ ID NO: 4800223 - DNA, 25 bp, Homo sapien
ttatccgacctgaaagaaaccatga

SEQ ID NO: 4800224 - DNA, 25 bp, Homo sapien
tataagagctaaaccccgtgtgagg

SEQ ID NO: 4800225 - DNA, 25 bp, Homo sapien
gaactttggttcatgcagtcggctg

SEQ ID NO: 4800226 - DNA, 25 bp, Homo sapien
caaagtcagtcagcggtggtggctc

SEQ ID NO: 4800227 - DNA, 25 bp, Homo sapien
gcccctggcaaaacatagataaatg

SEQ ID NO: 4800228 - DNA, 25 bp, Homo sapien
tggtgtaccccattagcatgctgcg

SEQ ID NO: 4800229 - DNA, 25 bp, Homo sapien
ggcatgctggtggcaaagaccaagc

SEQ ID NO: 4800230 - DNA, 25 bp, Homo sapien
aggcatgctggtggcaaagaccaag

SEQ ID NO: 4800231 - DNA, 25 bp, Homo sapien
ggtcaggcatgctggtggcaaagac

SEQ ID NO: 4800232 - DNA, 25 bp, Homo sapien
tcaggcatgctggtggcaaagacca

SEQ ID NO: 4800233 - DNA, 25 bp, Homo sapien
tacaggtagcggttgtcaaacagca

SEQ ID NO: 4800234 - DNA, 25 bp, Homo sapien
taatcaggctctctgtccgcaagtc

SEQ ID NO: 4800235 - DNA, 25 bp, Homo sapien
gtcaaacagcagggcaaagatatct

SEQ ID NO: 4800236 - DNA, 25 bp, Homo sapien
gcagaggccagcgactaatcaggct

SEQ ID NO: 4800237 - DNA, 25 bp, Homo sapien
tacctggtcctagcaactgaagcca

SEQ ID NO: 4800238 - DNA, 25 bp, Homo sapien
tcaaagctaagtagccctacctggt

SEQ ID NO: 4800239 - DNA, 25 bp, Homo sapien
tgttgcagaatagagcacaggtctt

SEQ ID NO: 4800240 - DNA, 25 bp, Homo sapien
gagtctgggtccttgaacctaagta

SEQ ID NO: 4800241 - DNA, 25 bp, Homo sapien
cctcagagacagacaatgtctttaa

SEQ ID NO: 4800242 - DNA, 25 bp, Homo sapien
aggcagatacttctatcctcagaga

SEQ ID NO: 4800243 - DNA, 25 bp, Homo sapien
gagacagacaatgtctttaagcact

SEQ ID NO: 4800244 - DNA, 25 bp, Homo sapien
caggcagatacttctatcctcagag

SEQ ID NO: 4800245 - DNA, 25 bp, Homo sapien
tgcatttgtgaagtcagatagaaag

SEQ ID NO: 4800246 - DNA, 25 bp, Homo sapien
gatcacatcactacagaaaagcttg

SEQ ID NO: 4800247 - DNA, 25 bp, Homo sapien
ccaggttttatagccaagaatcaca

SEQ ID NO: 4800248 - DNA, 25 bp, Homo sapien
caagtcttaattctcctgtgcaatc

SEQ ID NO: 4800249 - DNA, 25 bp, Homo sapien
cacaggacatagagctagcaaatca

SEQ ID NO: 4800250 - DNA, 25 bp, Homo sapien
tacaaatccaagttaagaaactaca

SEQ ID NO: 4800251 - DNA, 25 bp, Homo sapien
aatggcttggactaagacactcccc

SEQ ID NO: 4800252 - DNA, 25 bp, Homo sapien
tcatctcttcttccggtgggtttaa

SEQ ID NO: 4800253 - DNA, 25 bp, Homo sapien
atctcatatttgtctgcacttaaga

SEQ ID NO: 4800254 - DNA, 25 bp, Homo sapien
caggactgtgcaagagagacttgac

SEQ ID NO: 4800255 - DNA, 25 bp, Homo sapien
aggactgtgcaagagagacttgact

SEQ ID NO: 4800256 - DNA, 25 bp, Homo sapien
catatttgtctgcacttaagaggat

SEQ ID NO: 4800257 - DNA, 25 bp, Homo sapien
tatgctgactttgcaaccttggaca

SEQ ID NO: 4800258 - DNA, 25 bp, Homo sapien
cattcgtctagaagcaaacattagg

SEQ ID NO: 4800259 - DNA, 25 bp, Homo sapien
aaaaagcccgtagacactgacgtag

SEQ ID NO: 4800260 - DNA, 25 bp, Homo sapien
tgtctaacgttagccagatgaggtg

SEQ ID NO: 4800261 - DNA, 25 bp, Homo sapien
gctttgtaggtacagcaattccatc

SEQ ID NO: 4800262 - DNA, 25 bp, Homo sapien
tataaggcagtgtctaccatcctcc

SEQ ID NO: 4800263 - DNA, 25 bp, Homo sapien
tgcatgaacacattcagaaaccggt

SEQ ID NO: 4800264 - DNA, 25 bp, Homo sapien
tatgactcacctaacacttataagg

SEQ ID NO: 4800265 - DNA, 25 bp, Homo sapien
aagcccatactttcacagtgaagtc

SEQ ID NO: 4800266 - DNA, 25 bp, Homo sapien
agcccatactttcacagtgaagtct

SEQ ID NO: 4800267 - DNA, 25 bp, Homo sapien
aaagcccatactttcacagtgaagt

SEQ ID NO: 4800268 - DNA, 25 bp, Homo sapien
taatggcattccttcttaggactgc

SEQ ID NO: 4800269 - DNA, 25 bp, Homo sapien
tctaaggtggaaagtcctaggaata

SEQ ID NO: 4800270 - DNA, 25 bp, Homo sapien
gcaggaaaacaaaacgtacatggtc

SEQ ID NO: 4800271 - DNA, 25 bp, Homo sapien
ccagagacaccgtaagaatgatgct

SEQ ID NO: 4800272 - DNA, 25 bp, Homo sapien
cctcagcaatgtctaggcaacagta

SEQ ID NO: 4800273 - DNA, 25 bp, Homo sapien
taaggaactcaatctaagtagggag

SEQ ID NO: 4800274 - DNA, 25 bp, Homo sapien
gcgatattggagatgggccctaaag

SEQ ID NO: 4800275 - DNA, 25 bp, Homo sapien
tctaaaggaacattagggacccaga

SEQ ID NO: 4800276 - DNA, 25 bp, Homo sapien
aagaatcactaagcaccaggtacag

SEQ ID NO: 4800277 - DNA, 25 bp, Homo sapien
taactccagtcacatgggtgaacaa

SEQ ID NO: 4800278 - DNA, 25 bp, Homo sapien
ggtacagtgcaagtaactccagtca

SEQ ID NO: 4800279 - DNA, 25 bp, Homo sapien
tttacttcaaagaatcactaagcac

SEQ ID NO: 4800280 - DNA, 25 bp, Homo sapien
caagtaggatttactcagttcagag

SEQ ID NO: 4800281 - DNA, 25 bp, Homo sapien
gaccacacaatctaagaaccaccgt

SEQ ID NO: 4800282 - DNA, 25 bp, Homo sapien
gatgtaatctgtgtagaccacacaa

SEQ ID NO: 4800283 - DNA, 25 bp, Homo sapien
aactgtcaaccaagctcaaactgga

SEQ ID NO: 4800284 - DNA, 25 bp, Homo sapien
ctgggtaaaacattcgaaataagag

SEQ ID NO: 4800285 - DNA, 25 bp, Homo sapien
caccagaagggtacacacatagaag

SEQ ID NO: 4800286 - DNA, 25 bp, Homo sapien
taaagggaaataactgcaatgacta

SEQ ID NO: 4800287 - DNA, 25 bp, Homo sapien
cctggcttaaaaggatgaggctaag

SEQ ID NO: 4800288 - DNA, 25 bp, Homo sapien
tcaaacttcaccgctgcacaagtgt

SEQ ID NO: 4800289 - DNA, 25 bp, Homo sapien
caaacttcaccgctgcacaagtgtg

SEQ ID NO: 4800290 - DNA, 25 bp, Homo sapien
catcaaacttcaccgctgcacaagt

SEQ ID NO: 4800291 - DNA, 25 bp, Homo sapien
atcaaacttcaccgctgcacaagtg

SEQ ID NO: 4800292 - DNA, 25 bp, Homo sapien
tgcatacactctggcactgtgtcca

SEQ ID NO: 4800293 - DNA, 25 bp, Homo sapien
taatgacgaggtttcaaaggcttca

SEQ ID NO: 4800294 - DNA, 25 bp, Homo sapien
ggcactgtgtccaattaatgacgag

SEQ ID NO: 4800295 - DNA, 25 bp, Homo sapien
ccatctttgtagtaaagtgcataca

SEQ ID NO: 4800296 - DNA, 25 bp, Homo sapien
atgcagtctgccacacctctgtaca

SEQ ID NO: 4800297 - DNA, 25 bp, Homo sapien
gaacagaatcatctatctgccagcc

SEQ ID NO: 4800298 - DNA, 25 bp, Homo sapien
acacctctgtacaggcacttatcac

SEQ ID NO: 4800299 - DNA, 25 bp, Homo sapien
cttcttccagtgcaaagcgtcctga

SEQ ID NO: 4800300 - DNA, 25 bp, Homo sapien
tgtttagagacgaggcagcatgtga

SEQ ID NO: 4800301 - DNA, 25 bp, Homo sapien
tcagactaatcaggtgatccagagt

SEQ ID NO: 4800302 - DNA, 25 bp, Homo sapien
gaagtcccgcttgaggagagtctct

SEQ ID NO: 4800303 - DNA, 25 bp, Homo sapien
taaagtctgaggatcgagccatttt

SEQ ID NO: 4800304 - DNA, 25 bp, Homo sapien
caagtccgtcagagaaagaaatgta

SEQ ID NO: 4800305 - DNA, 25 bp, Homo sapien
atcaagccatgtctcaaagtccttt

SEQ ID NO: 4800306 - DNA, 25 bp, Homo sapien
ctgcaagtccgtcagagaaagaaat

SEQ ID NO: 4800307 - DNA, 25 bp, Homo sapien
tcaagccatgtctcaaagtcctttc

SEQ ID NO: 4800308 - DNA, 25 bp, Homo sapien
aaatattgtattagttctgctcaaa

SEQ ID NO: 4800309 - DNA, 25 bp, Homo sapien
gaagagcacctgtttattggaggct

SEQ ID NO: 4800310 - DNA, 25 bp, Homo sapien
ttagcacagtgtacagtctagcggg

SEQ ID NO: 4800311 - DNA, 25 bp, Homo sapien
tggaggctctagtttcccagtaggt

SEQ ID NO: 4800312 - DNA, 25 bp, Homo sapien
ggaagccatcatccaacttgaaggg

SEQ ID NO: 4800313 - DNA, 25 bp, Homo sapien
tcaagaaactgataaccctggttgc

SEQ ID NO: 4800314 - DNA, 25 bp, Homo sapien
caagaaactgataaccctggttgcc

SEQ ID NO: 4800315 - DNA, 25 bp, Homo sapien
attcaagaaactgataaccctggtt

SEQ ID NO: 4800316 - DNA, 25 bp, Homo sapien
agaaactgataaccctggttgcctc

SEQ ID NO: 4800317 - DNA, 25 bp, Homo sapien
tcatggcatacccacaattatggcg

SEQ ID NO: 4800318 - DNA, 25 bp, Homo sapien
tgttaactcatttcgcagctaagga

SEQ ID NO: 4800319 - DNA, 25 bp, Homo sapien
tcggaatcgtgttccgcgcggcact

SEQ ID NO: 4800320 - DNA, 25 bp, Homo sapien
tcaaacgtttggtagccctgggaca

SEQ ID NO: 4800321 - DNA, 25 bp, Homo sapien
tgagcgagcgccccggggcccggga

SEQ ID NO: 4800322 - DNA, 25 bp, Homo sapien
ccgggacctcgcgccgggttcacag

SEQ ID NO: 4800323 - DNA, 25 bp, Homo sapien
ggacctcgcgccgggttcacagcta

SEQ ID NO: 4800324 - DNA, 25 bp, Homo sapien
ctgagcgagcgccccggggcccggg

SEQ ID NO: 4800325 - DNA, 25 bp, Homo sapien
taggcacgctcggaccgccagagcc

SEQ ID NO: 4800326 - DNA, 25 bp, Homo sapien
gccgggtccgctccgcagccatggc

SEQ ID NO: 4800327 - DNA, 25 bp, Homo sapien
gctcggaccgccagagccttgcagc

SEQ ID NO: 4800328 - DNA, 25 bp, Homo sapien
ggcacgctcggaccgccagagcctt

SEQ ID NO: 4800329 - DNA, 25 bp, Homo sapien
cagagccgcgggcgcctaagagtcc

SEQ ID NO: 4800330 - DNA, 25 bp, Homo sapien
ggtcagcagagccgcgggcgcctaa

SEQ ID NO: 4800331 - DNA, 25 bp, Homo sapien
gccgcgggcgcctaagagtcccctc

SEQ ID NO: 4800332 - DNA, 25 bp, Homo sapien
tcagcagagccgcgggcgcctaaga

SEQ ID NO: 4800333 - DNA, 25 bp, Homo sapien
cagcctcacaggggagcggcttccg

SEQ ID NO: 4800334 - DNA, 25 bp, Homo sapien
tgcggccgctgctcccggtccgcag

SEQ ID NO: 4800335 - DNA, 25 bp, Homo sapien
cggtccgcagcctcacaggggagcg

SEQ ID NO: 4800336 - DNA, 25 bp, Homo sapien
gctgctcccggtccgcagcctcaca

SEQ ID NO: 4800337 - DNA, 25 bp, Homo sapien
tgtgaggaaccgtacctggccagta

SEQ ID NO: 4800338 - DNA, 25 bp, Homo sapien
ccatgatgtatgatagagctcttga

SEQ ID NO: 4800339 - DNA, 25 bp, Homo sapien
tcatgtaacataatgcactccaggt

SEQ ID NO: 4800340 - DNA, 25 bp, Homo sapien
caaaaatgttggatctcttggccat

SEQ ID NO: 4800341 - DNA, 25 bp, Homo sapien
ttcacaagcctgtagagcacaaaca

SEQ ID NO: 4800342 - DNA, 25 bp, Homo sapien
cctgtgaaggaggacaaagtatact

SEQ ID NO: 4800343 - DNA, 25 bp, Homo sapien
gtgtacattccaactgaaccctcag

SEQ ID NO: 4800344 - DNA, 25 bp, Homo sapien
ggttcagatgcccatgccacatatg

SEQ ID NO: 4800345 - DNA, 25 bp, Homo sapien
tgaattttgtgatacacatgctgcc

SEQ ID NO: 4800346 - DNA, 25 bp, Homo sapien
caatctgcctttcatggctgtgctt

SEQ ID NO: 4800347 - DNA, 25 bp, Homo sapien
agatgggtgtctcctagttgggcca

SEQ ID NO: 4800348 - DNA, 25 bp, Homo sapien
ctaacatctgggtgtccatgaacat

SEQ ID NO: 4800349 - DNA, 25 bp, Homo sapien
tgaagctcagggaggttgaagacta

SEQ ID NO: 4800350 - DNA, 25 bp, Homo sapien
cttttctgttctctgaagctcaggg

SEQ ID NO: 4800351 - DNA, 25 bp, Homo sapien
aagctcagggaggttgaagactaac

SEQ ID NO: 4800352 - DNA, 25 bp, Homo sapien
ctcagggaggttgaagactaacaga

SEQ ID NO: 4800353 - DNA, 25 bp, Homo sapien
gataaagtaagaaatgcatgccaag

SEQ ID NO: 4800354 - DNA, 25 bp, Homo sapien
cctttaaatcctaggcgttggtcat

SEQ ID NO: 4800355 - DNA, 25 bp, Homo sapien
gattgcctcctactagttcttcaag

SEQ ID NO: 4800356 - DNA, 25 bp, Homo sapien
tgcatgccaagtgcctaacataaaa

SEQ ID NO: 4800357 - DNA, 25 bp, Homo sapien
aatcaatgtcatgaagcagaatggt

SEQ ID NO: 4800358 - DNA, 25 bp, Homo sapien
gaccatacataggagagagggcatc

SEQ ID NO: 4800359 - DNA, 25 bp, Homo sapien
cccaaaatctgatgttaagtgaata

SEQ ID NO: 4800360 - DNA, 25 bp, Homo sapien
aaaagagggaatagacagttattgt

SEQ ID NO: 4800361 - DNA, 25 bp, Homo sapien
tcaccacggcctaaaagaaatatgc

SEQ ID NO: 4800362 - DNA, 25 bp, Homo sapien
caaaacgtggtcctctacatgagct

SEQ ID NO: 4800363 - DNA, 25 bp, Homo sapien
gggactagtcagcatggaaacacac

SEQ ID NO: 4800364 - DNA, 25 bp, Homo sapien
ccacaacagggcaaagttcattggt

SEQ ID NO: 4800365 - DNA, 25 bp, Homo sapien
tagtatggcccttcactcaggtaag

SEQ ID NO: 4800366 - DNA, 25 bp, Homo sapien
gctttgtcatgctccacagaccggt

SEQ ID NO: 4800367 - DNA, 25 bp, Homo sapien
tcggctccttctactgctgtcgtgg

SEQ ID NO: 4800368 - DNA, 25 bp, Homo sapien
gaccggtccaccacatattctacaa

SEQ ID NO: 4800369 - DNA, 25 bp, Homo sapien
gaagagctccagtggatcccgagat

SEQ ID NO: 4800370 - DNA, 25 bp, Homo sapien
gaaggtcatcagtctgctgctcagg

SEQ ID NO: 4800371 - DNA, 25 bp, Homo sapien
tgtcatcctcagaaggtcatcagtc

SEQ ID NO: 4800372 - DNA, 25 bp, Homo sapien
ggaagggctgactactaatgccacg

SEQ ID NO: 4800373 - DNA, 25 bp, Homo sapien
ttctcataagcaagcgttcaaagcg

SEQ ID NO: 4800374 - DNA, 25 bp, Homo sapien
ataagcaagcgttcaaagcgagttc

SEQ ID NO: 4800375 - DNA, 25 bp, Homo sapien
ctttgattgatgtcctattctcata

SEQ ID NO: 4800376 - DNA, 25 bp, Homo sapien
ctattctcataagcaagcgttcaaa

SEQ ID NO: 4800377 - DNA, 25 bp, Homo sapien
ttgaaggataacagtgagattcttc

SEQ ID NO: 4800378 - DNA, 25 bp, Homo sapien
tgtgaactggactcttttaggcatc

SEQ ID NO: 4800379 - DNA, 25 bp, Homo sapien
ttgggcaaccatcataaccatccat

SEQ ID NO: 4800380 - DNA, 25 bp, Homo sapien
aatgaacattgggttgcttgcacct

SEQ ID NO: 4800381 - DNA, 25 bp, Homo sapien
cataatgttatcagtggcgcaggct

SEQ ID NO: 4800382 - DNA, 25 bp, Homo sapien
ttttaaagtaatagccatcctaatg

SEQ ID NO: 4800383 - DNA, 25 bp, Homo sapien
atcctaacacttattattttatggg

SEQ ID NO: 4800384 - DNA, 25 bp, Homo sapien
catcctaatggatatgaagtgaaaa

SEQ ID NO: 4800385 - DNA, 25 bp, Homo sapien
catcctaacacttattattttatgg

SEQ ID NO: 4800386 - DNA, 25 bp, Homo sapien
agacctttctgactctagcccgtgg

SEQ ID NO: 4800387 - DNA, 25 bp, Homo sapien
tagcccgtggtctttgtaccatgaa

SEQ ID NO: 4800388 - DNA, 25 bp, Homo sapien
tgtagttaacccaccagcaaatgaa

SEQ ID NO: 4800389 - DNA, 25 bp, Homo sapien
gtagacccagccaatcaagaggatg

SEQ ID NO: 4800390 - DNA, 25 bp, Homo sapien
atattgaacccctgtcaaagattaa

SEQ ID NO: 4800391 - DNA, 25 bp, Homo sapien
tattgaacccctgtcaaagattaag

SEQ ID NO: 4800392 - DNA, 25 bp, Homo sapien
ctgaacagggccaagtcataccaac

SEQ ID NO: 4800393 - DNA, 25 bp, Homo sapien
gattccaactgtgtctacagctaca

SEQ ID NO: 4800394 - DNA, 25 bp, Homo sapien
tttccttcaacattggatcccaaga

SEQ ID NO: 4800395 - DNA, 25 bp, Homo sapien
ttccacaaagataggataacgctca

SEQ ID NO: 4800396 - DNA, 25 bp, Homo sapien
cagatctgttgaggactatccatga

SEQ ID NO: 4800397 - DNA, 25 bp, Homo sapien
tactggcatatgcaagagggagaac

SEQ ID NO: 4800398 - DNA, 25 bp, Homo sapien
taggctacctaaggcaggcatacat

SEQ ID NO: 4800399 - DNA, 25 bp, Homo sapien
gctgggaccagctattgaagtactg

SEQ ID NO: 4800400 - DNA, 25 bp, Homo sapien
tcaacagtacgtagctccaagagca

SEQ ID NO: 4800401 - DNA, 25 bp, Homo sapien
cccaaccccctgatgtcagagataa

SEQ ID NO: 4800402 - DNA, 25 bp, Homo sapien
tagatatcttctaaacgaaatcagc

SEQ ID NO: 4800403 - DNA, 25 bp, Homo sapien
cagctcattaaggaaatcagctcta

SEQ ID NO: 4800404 - DNA, 25 bp, Homo sapien
ccctgatgtcagagataactcagaa

SEQ ID NO: 4800405 - DNA, 25 bp, Homo sapien
atcatttccataggcatcagtgttc

SEQ ID NO: 4800406 - DNA, 25 bp, Homo sapien
catcatttccataggcatcagtgtt

SEQ ID NO: 4800407 - DNA, 25 bp, Homo sapien
tcttgagcaagatattgtcgcccat

SEQ ID NO: 4800408 - DNA, 25 bp, Homo sapien
gagtatatgccagtgatgtcaccat

SEQ ID NO: 4800409 - DNA, 25 bp, Homo sapien
gaaagggtctgaatctgccccaaca

SEQ ID NO: 4800410 - DNA, 25 bp, Homo sapien
cagatagaagctagagaaagggtct

SEQ ID NO: 4800411 - DNA, 25 bp, Homo sapien
accacatgattgcaactttttaaga

SEQ ID NO: 4800412 - DNA, 25 bp, Homo sapien
ggctttcccaagttccagtatgttg

SEQ ID NO: 4800413 - DNA, 25 bp, Homo sapien
ggcctagcccatgttttttctatca

SEQ ID NO: 4800414 - DNA, 25 bp, Homo sapien
gaaagtagctgaattgtcatgtggg

SEQ ID NO: 4800415 - DNA, 25 bp, Homo sapien
ctctcaggagctgggttaccaatcc

SEQ ID NO: 4800416 - DNA, 25 bp, Homo sapien
gtagtttaaagattctggtgacacg

SEQ ID NO: 4800417 - DNA, 25 bp, Homo sapien
ccacttgtggtacagtagtttaaag

SEQ ID NO: 4800418 - DNA, 25 bp, Homo sapien
tctggtgacacggaagaaatctcta

SEQ ID NO: 4800419 - DNA, 25 bp, Homo sapien
gagtggcctagaatatacccaaggg

SEQ ID NO: 4800420 - DNA, 25 bp, Homo sapien
taatacccaactaagcagactgtga

SEQ ID NO: 4800421 - DNA, 25 bp, Homo sapien
gattcaacggaggataatgagccag

SEQ ID NO: 4800422 - DNA, 25 bp, Homo sapien
tgcctaggaatgagtagagtaccgt

SEQ ID NO: 4800423 - DNA, 25 bp, Homo sapien
catacaccctgtatcgaacaatgtc

SEQ ID NO: 4800424 - DNA, 25 bp, Homo sapien
gctttcaaataaagcctccagtcca

SEQ ID NO: 4800425 - DNA, 25 bp, Homo sapien
atattcttgacagggatttgatagc

SEQ ID NO: 4800426 - DNA, 25 bp, Homo sapien
gttagtgatattcttgacagggatt

SEQ ID NO: 4800427 - DNA, 25 bp, Homo sapien
atatctcttacattcccaaaatgca

SEQ ID NO: 4800428 - DNA, 25 bp, Homo sapien
taattggaaaagacgcaaggtatcc

SEQ ID NO: 4800429 - DNA, 25 bp, Homo sapien
ggaatgcaccttgcccatgttttag

SEQ ID NO: 4800430 - DNA, 25 bp, Homo sapien
cccatagaattatgatggatactgt

SEQ ID NO: 4800431 - DNA, 25 bp, Homo sapien
acctctcaattcagaaggcctttct

SEQ ID NO: 4800432 - DNA, 25 bp, Homo sapien
tacacaatccatatgaagttgtaaa

SEQ ID NO: 4800433 - DNA, 25 bp, Homo sapien
tgggacaccgatgtctctgcacatt

SEQ ID NO: 4800434 - DNA, 25 bp, Homo sapien
taaattccattacgcaaatcatcca

SEQ ID NO: 4800435 - DNA, 25 bp, Homo sapien
tatttagaatctcagtaacagcatc

SEQ ID NO: 4800436 - DNA, 25 bp, Homo sapien
gatagattctctccaccaatgcaat

SEQ ID NO: 4800437 - DNA, 25 bp, Homo sapien
cgcttttgctacagatagattctct

SEQ ID NO: 4800438 - DNA, 25 bp, Homo sapien
aacaatttgttttagtaattcagca

SEQ ID NO: 4800439 - DNA, 25 bp, Homo sapien
aagagttactgtcttaattgttggt

SEQ ID NO: 4800440 - DNA, 25 bp, Homo sapien
tagtgacctttacaatagcatttgg

SEQ ID NO: 4800441 - DNA, 25 bp, Homo sapien
gcatttggttcatccagtgtaaaga

SEQ ID NO: 4800442 - DNA, 25 bp, Homo sapien
actgtcttaattgttggtttagtga

SEQ ID NO: 4800443 - DNA, 25 bp, Homo sapien
gggtgaattagtcccctctgcaggt

SEQ ID NO: 4800444 - DNA, 25 bp, Homo sapien
gaatcatcagggtgaattagtcccc

SEQ ID NO: 4800445 - DNA, 25 bp, Homo sapien
tgaaccggttccatagcttggagca

SEQ ID NO: 4800446 - DNA, 25 bp, Homo sapien
tgcaggtcaaccctgaggttccggg

SEQ ID NO: 4800447 - DNA, 25 bp, Homo sapien
ctatggttctcgttaagcagggaga

SEQ ID NO: 4800448 - DNA, 25 bp, Homo sapien
gcagctccgccgcttgctggcgaag

SEQ ID NO: 4800449 - DNA, 25 bp, Homo sapien
actgcctgcagcacggagtgaagcg

SEQ ID NO: 4800450 - DNA, 25 bp, Homo sapien
gaagctcgttgagcggcactgcctg

SEQ ID NO: 4800451 - DNA, 25 bp, Homo sapien
ccggggcgctttcctgaacctcgcg

SEQ ID NO: 4800452 - DNA, 25 bp, Homo sapien
cggggcgctttcctgaacctcgcga

SEQ ID NO: 4800453 - DNA, 25 bp, Homo sapien
caaattcccggccagcggagcggcg

SEQ ID NO: 4800454 - DNA, 25 bp, Homo sapien
cagtaggcttacgtgtttaccgcgt

SEQ ID NO: 4800455 - DNA, 25 bp, Homo sapien
taccgcgtagggcaaagccttgcca

SEQ ID NO: 4800456 - DNA, 25 bp, Homo sapien
gactcacgggaagttaaacagcctc

SEQ ID NO: 4800457 - DNA, 25 bp, Homo sapien
tgagtaatagggacgtgcgccgcct

SEQ ID NO: 4800458 - DNA, 25 bp, Homo sapien
gcgccgccttgttggtgttgatcag

SEQ ID NO: 4800459 - DNA, 25 bp, Homo sapien
tgttgatcagtccaccaaggagaag

SEQ ID NO: 4800460 - DNA, 25 bp, Homo sapien
gcggagcgtcatgcctctggaagac

SEQ ID NO: 4800461 - DNA, 25 bp, Homo sapien
caccttactctgaaagaagcatggc

SEQ ID NO: 4800462 - DNA, 25 bp, Homo sapien
tagtgtctgcaaaacaggtgggttt

SEQ ID NO: 4800463 - DNA, 25 bp, Homo sapien
gaaattgaatgctgtctgatgctac

SEQ ID NO: 4800464 - DNA, 25 bp, Homo sapien
tcttaagcttgctggaaactgtggg

SEQ ID NO: 4800465 - DNA, 25 bp, Homo sapien
tactttagcatcctggcactagctg

SEQ ID NO: 4800466 - DNA, 25 bp, Homo sapien
tattcaattagtcgccctgaggatg

SEQ ID NO: 4800467 - DNA, 25 bp, Homo sapien
caaatttggccatgcggtctatccc

SEQ ID NO: 4800468 - DNA, 25 bp, Homo sapien
tgtagtcatagttcccaaatttggc

SEQ ID NO: 4800469 - DNA, 25 bp, Homo sapien
cagtgccagctggtatactgggtaa

SEQ ID NO: 4800470 - DNA, 25 bp, Homo sapien
tgttaattaatcctcagcagtccag

SEQ ID NO: 4800471 - DNA, 25 bp, Homo sapien
tgtaatgaatgcatacagtgccagc

SEQ ID NO: 4800472 - DNA, 25 bp, Homo sapien
tctaaagctatctggcctaactggc

SEQ ID NO: 4800473 - DNA, 25 bp, Homo sapien
tctctccaaaggctgtacatccttt

SEQ ID NO: 4800474 - DNA, 25 bp, Homo sapien
ttctctccaaaggctgtacatcctt

SEQ ID NO: 4800475 - DNA, 25 bp, Homo sapien
agtggcttcaggaaggcatggaaga

SEQ ID NO: 4800476 - DNA, 25 bp, Homo sapien
gatgtgcagtatttaaagtggcttc

SEQ ID NO: 4800477 - DNA, 25 bp, Homo sapien
tgcagtatttaaagtggcttcagga

SEQ ID NO: 4800478 - DNA, 25 bp, Homo sapien
aggagatgtgcagtatttaaagtgg

SEQ ID NO: 4800479 - DNA, 25 bp, Homo sapien
gcatagcagagagaaacggtcacca

SEQ ID NO: 4800480 - DNA, 25 bp, Homo sapien
cagaggctagggctaggacacagac

SEQ ID NO: 4800481 - DNA, 25 bp, Homo sapien
taacgtaccgagttgaaggctacaa

SEQ ID NO: 4800482 - DNA, 25 bp, Homo sapien
catcactagtttgaaagaatccaac

SEQ ID NO: 4800483 - DNA, 25 bp, Homo sapien
gataaagttttacgatgcccggatc

SEQ ID NO: 4800484 - DNA, 25 bp, Homo sapien
ggtcgggtactcacaaaagattcca

SEQ ID NO: 4800485 - DNA, 25 bp, Homo sapien
caggtttagcaagacatggtttccc

SEQ ID NO: 4800486 - DNA, 25 bp, Homo sapien
acatttagttgcagcacctgggccc

SEQ ID NO: 4800487 - DNA, 25 bp, Homo sapien
gtcaatgccttcgtctggccgctcg

SEQ ID NO: 4800488 - DNA, 25 bp, Homo sapien
gatgctctcaaatgtgtggctgtca

SEQ ID NO: 4800489 - DNA, 25 bp, Homo sapien
gacagggatgagtcatcttcactga

SEQ ID NO: 4800490 - DNA, 25 bp, Homo sapien
gtactgaaccttgccctcaggtgtg

SEQ ID NO: 4800491 - DNA, 25 bp, Homo sapien
ctggagtcataggagaggctggtgg

SEQ ID NO: 4800492 - DNA, 25 bp, Homo sapien
cagaggtgctggcagcgtcggtgga

SEQ ID NO: 4800493 - DNA, 25 bp, Homo sapien
cggtggagtcgacatctgagaagaa

SEQ ID NO: 4800494 - DNA, 25 bp, Homo sapien
cagcgtcggtggagtcgacatctga

SEQ ID NO: 4800495 - DNA, 25 bp, Homo sapien
ttcatcccagtggaggcccgtcttc

SEQ ID NO: 4800496 - DNA, 25 bp, Homo sapien
gcaagaccgtgagcctgctggtggc

SEQ ID NO: 4800497 - DNA, 25 bp, Homo sapien
aacatgcatccttcatcccagtgga

SEQ ID NO: 4800498 - DNA, 25 bp, Homo sapien
ctaacatgcatccttcatcccagtg

SEQ ID NO: 4800499 - DNA, 25 bp, Homo sapien
aatatgctagccaggtggtggttgg

SEQ ID NO: 4800500 - DNA, 25 bp, Homo sapien
aactttgaatttcatccagcgtgaa

SEQ ID NO: 4800501 - DNA, 25 bp, Homo sapien
agcgtgaagtcaaatatgctagcca

SEQ ID NO: 4800502 - DNA, 25 bp, Homo sapien
ctttgaatttcatccagcgtgaagt

SEQ ID NO: 4800503 - DNA, 25 bp, Homo sapien
tctgctgctggaattcgtgaggcaa

SEQ ID NO: 4800504 - DNA, 25 bp, Homo sapien
ctgctggaattcgtgaggcaacaaa

SEQ ID NO: 4800505 - DNA, 25 bp, Homo sapien
tgctgctggaattcgtgaggcaaca

SEQ ID NO: 4800506 - DNA, 25 bp, Homo sapien
tttctgctgctggaattcgtgaggc

SEQ ID NO: 4800507 - DNA, 25 bp, Homo sapien
ggtggccccgtcagagcctgagggc

SEQ ID NO: 4800508 - DNA, 25 bp, Homo sapien
aggtggccccgtcagagcctgaggg

SEQ ID NO: 4800509 - DNA, 25 bp, Homo sapien
agaaggtatagtgggcagaaaaaga

SEQ ID NO: 4800510 - DNA, 25 bp, Homo sapien
gagaaggtatagtgggcagaaaaag

SEQ ID NO: 4800511 - DNA, 25 bp, Homo sapien
gagcagtaggggtgggaaggtgtgg

SEQ ID NO: 4800512 - DNA, 25 bp, Homo sapien
gaaggtatagtgggcagaaaaagaa

SEQ ID NO: 4800513 - DNA, 25 bp, Homo sapien
agaaaccgagtttggcggcagccct

SEQ ID NO: 4800514 - DNA, 25 bp, Homo sapien
ccaagtcctaatccagcaaggctgg

SEQ ID NO: 4800515 - DNA, 25 bp, Homo sapien
gggatcccgctcagccactatctag

SEQ ID NO: 4800516 - DNA, 25 bp, Homo sapien
ctctcagggtcctacagctgggact

SEQ ID NO: 4800517 - DNA, 25 bp, Homo sapien
ccaggcttgctctttcctctcttac

SEQ ID NO: 4800518 - DNA, 25 bp, Homo sapien
ggttgggtgggacgcggatgcgcag

SEQ ID NO: 4800519 - DNA, 25 bp, Homo sapien
tttggcagcagtcctttgtcaggca

SEQ ID NO: 4800520 - DNA, 25 bp, Homo sapien
gatgcgcaggcggaagatgcacttc

SEQ ID NO: 4800521 - DNA, 25 bp, Homo sapien
tcttgatctccttgccgcagaggaa

SEQ ID NO: 4800522 - DNA, 25 bp, Homo sapien
gacccagagctaaaatccggatggt

SEQ ID NO: 4800523 - DNA, 25 bp, Homo sapien
agctgagaacacggctggtgcctcc

SEQ ID NO: 4800524 - DNA, 25 bp, Homo sapien
tcctcaaagcccatgggatgcgggg

SEQ ID NO: 4800525 - DNA, 25 bp, Homo sapien
gcttacagtggaactcctatggtca

SEQ ID NO: 4800526 - DNA, 25 bp, Homo sapien
gaggagatgtggtcctcgatctgtc

SEQ ID NO: 4800527 - DNA, 25 bp, Homo sapien
cttttataactgttcagagcgttga

SEQ ID NO: 4800528 - DNA, 25 bp, Homo sapien
taactgttcagagcgttgaggagat

SEQ ID NO: 4800529 - DNA, 25 bp, Homo sapien
gatgtggtcctcgatctgtcactgg

SEQ ID NO: 4800530 - DNA, 25 bp, Homo sapien
ccccagattatagagggccaggtga

SEQ ID NO: 4800531 - DNA, 25 bp, Homo sapien
cagtggtggttgacaaaggccagaa

SEQ ID NO: 4800532 - DNA, 25 bp, Homo sapien
gacaaaggccagaatctcctcaaag

SEQ ID NO: 4800533 - DNA, 25 bp, Homo sapien
ctgtacccccagattatagagggcc

SEQ ID NO: 4800534 - DNA, 25 bp, Homo sapien
atcgcaggggcagcctctcgatgta

SEQ ID NO: 4800535 - DNA, 25 bp, Homo sapien
tggttacacacggagcagaagaaca

SEQ ID NO: 4800536 - DNA, 25 bp, Homo sapien
gcagcctctcgatgtactctgggcc

SEQ ID NO: 4800537 - DNA, 25 bp, Homo sapien
gccctggttacacacggagcagaag

SEQ ID NO: 4800538 - DNA, 25 bp, Homo sapien
aggcctcgtggaaccactgcctgca

SEQ ID NO: 4800539 - DNA, 25 bp, Homo sapien
tgcctgcaccggtaacattgcagca

SEQ ID NO: 4800540 - DNA, 25 bp, Homo sapien
aacattgcagcatccgcaggtacca

SEQ ID NO: 4800541 - DNA, 25 bp, Homo sapien
tccaaacatcatgggctcattgagg

SEQ ID NO: 4800542 - DNA, 25 bp, Homo sapien
ctccctggggccctgcttgggcggt

SEQ ID NO: 4800543 - DNA, 25 bp, Homo sapien
tccctggggccctgcttgggcggtc

SEQ ID NO: 4800544 - DNA, 25 bp, Homo sapien
ggcgatggcgcccttcttcagcgcg

SEQ ID NO: 4800545 - DNA, 25 bp, Homo sapien
ggctggtaggacagcaccatcttca

SEQ ID NO: 4800546 - DNA, 25 bp, Homo sapien
gggcccgccgcagtagcagtagcat

SEQ ID NO: 4800547 - DNA, 25 bp, Homo sapien
cactcgagctcctcgggctggtagg

SEQ ID NO: 4800548 - DNA, 25 bp, Homo sapien
ttaatagtaaagcatcatttattgg

SEQ ID NO: 4800549 - DNA, 25 bp, Homo sapien
ttattcccgacaccaaacccatctc

SEQ ID NO: 4800550 - DNA, 25 bp, Homo sapien
aggtgtggcccttctgcttggagct

SEQ ID NO: 4800551 - DNA, 25 bp, Homo sapien
ccaggtgtggcccttctgcttggag

SEQ ID NO: 4800552 - DNA, 25 bp, Homo sapien
caggtgtggcccttctgcttggagc

SEQ ID NO: 4800553 - DNA, 25 bp, Homo sapien
tgcgaagatgcagcgtcggcagaac

SEQ ID NO: 4800554 - DNA, 25 bp, Homo sapien
cagcgtcggcagaaccaaggtgtga

SEQ ID NO: 4800555 - DNA, 25 bp, Homo sapien
cacagccagtgcgaagatgcagcgt

SEQ ID NO: 4800556 - DNA, 25 bp, Homo sapien
cactgcccgctatggggatgtggca

SEQ ID NO: 4800557 - DNA, 25 bp, Homo sapien
tctccatctagctgggccccaaatt

SEQ ID NO: 4800558 - DNA, 25 bp, Homo sapien
tctgacttcagtgcctgagccccat

SEQ ID NO: 4800559 - DNA, 25 bp, Homo sapien
tgagggaagtcctaggagctctgcc

SEQ ID NO: 4800560 - DNA, 25 bp, Homo sapien
gctgggaactaaatgacagcattgg

SEQ ID NO: 4800561 - DNA, 25 bp, Homo sapien
tcaggggccagtgcgtggggaccta

SEQ ID NO: 4800562 - DNA, 25 bp, Homo sapien
tataggtcggggccttctcagggcc

SEQ ID NO: 4800563 - DNA, 25 bp, Homo sapien
gctgcagcagtacccgtcaggggcc

SEQ ID NO: 4800564 - DNA, 25 bp, Homo sapien
ctcagggccctgctcgctccactca

SEQ ID NO: 4800565 - DNA, 25 bp, Homo sapien
ccacacttcccgcagatgaggatct

SEQ ID NO: 4800566 - DNA, 25 bp, Homo sapien
cagatgaggatctcattcagcggcc

SEQ ID NO: 4800567 - DNA, 25 bp, Homo sapien
cacacttcccgcagatgaggatctc

SEQ ID NO: 4800568 - DNA, 25 bp, Homo sapien
agatgaggatctcattcagcggccc

SEQ ID NO: 4800569 - DNA, 25 bp, Homo sapien
tgatgtcttccctaggcagatgttg

SEQ ID NO: 4800570 - DNA, 25 bp, Homo sapien
gtcttccctaggcagatgttgcact

SEQ ID NO: 4800571 - DNA, 25 bp, Homo sapien
atgtcttccctaggcagatgttgca

SEQ ID NO: 4800572 - DNA, 25 bp, Homo sapien
tcttccctaggcagatgttgcactt

SEQ ID NO: 4800573 - DNA, 25 bp, Homo sapien
aacccatggctgtttgacatcaaac

SEQ ID NO: 4800574 - DNA, 25 bp, Homo sapien
tgcccagcctctaatgtctgctagg

SEQ ID NO: 4800575 - DNA, 25 bp, Homo sapien
ggttaagtcccttgcttagctagta

SEQ ID NO: 4800576 - DNA, 25 bp, Homo sapien
gtcgggtccagctcacaggaatgga

SEQ ID NO: 4800577 - DNA, 25 bp, Homo sapien
gagtaacagcttctctaaaaccaat

SEQ ID NO: 4800578 - DNA, 25 bp, Homo sapien
ttacatggattagcttacctaagcc

SEQ ID NO: 4800579 - DNA, 25 bp, Homo sapien
gaagccagtactttcactatcacct

SEQ ID NO: 4800580 - DNA, 25 bp, Homo sapien
tggtaacaaattcttgagtaacagc

SEQ ID NO: 4800581 - DNA, 25 bp, Homo sapien
cacgaggcagctttgcttagagctg

SEQ ID NO: 4800582 - DNA, 25 bp, Homo sapien
tatcttcgaaagtcacgaggcagct

SEQ ID NO: 4800583 - DNA, 25 bp, Homo sapien
ggaattatcttcgaaagtcacgagg

SEQ ID NO: 4800584 - DNA, 25 bp, Homo sapien
tcgaaagtcacgaggcagctttgct

SEQ ID NO: 4800585 - DNA, 25 bp, Homo sapien
gaaaagccaacctggaacatagtct

SEQ ID NO: 4800586 - DNA, 25 bp, Homo sapien
cccatttttgtctccgtatgttcca

SEQ ID NO: 4800587 - DNA, 25 bp, Homo sapien
tttgtctccgtatgttccagaaagc

SEQ ID NO: 4800588 - DNA, 25 bp, Homo sapien
ggaaaagccaacctggaacatagtc

SEQ ID NO: 4800589 - DNA, 25 bp, Homo sapien
ccagctttgggcatgagggacaaga

SEQ ID NO: 4800590 - DNA, 25 bp, Homo sapien
tgatgttgaccctagggatggtgcc

SEQ ID NO: 4800591 - DNA, 25 bp, Homo sapien
gtcgtacagccagggaccgatggat

SEQ ID NO: 4800592 - DNA, 25 bp, Homo sapien
ccgatggatggcaacttggtcagaa

SEQ ID NO: 4800593 - DNA, 25 bp, Homo sapien
gagtctgagaacaggggccagagag

SEQ ID NO: 4800594 - DNA, 25 bp, Homo sapien
agagattctgagtctgagaacaggg

SEQ ID NO: 4800595 - DNA, 25 bp, Homo sapien
tctgagtctgagaacaggggccaga

SEQ ID NO: 4800596 - DNA, 25 bp, Homo sapien
cagagagattctgagtctgagaaca

SEQ ID NO: 4800597 - DNA, 25 bp, Homo sapien
tcttgatcttcccgaggtagtacag

SEQ ID NO: 4800598 - DNA, 25 bp, Homo sapien
cctcttgatcttcccgaggtagtac

SEQ ID NO: 4800599 - DNA, 25 bp, Homo sapien
ttgatcttcccgaggtagtacaggc

SEQ ID NO: 4800600 - DNA, 25 bp, Homo sapien
cttgatcttcccgaggtagtacagg

SEQ ID NO: 4800601 - DNA, 25 bp, Homo sapien
cgagtccctggatccagagctcgat

SEQ ID NO: 4800602 - DNA, 25 bp, Homo sapien
ttgttcttgaccttcgccagggccc

SEQ ID NO: 4800603 - DNA, 25 bp, Homo sapien
ggtggcaccataggagtcccgagtc

SEQ ID NO: 4800604 - DNA, 25 bp, Homo sapien
catactggccctccgtcagtttgga

SEQ ID NO: 4800605 - DNA, 25 bp, Homo sapien
aagaacagggtttttgcttcttgct

SEQ ID NO: 4800606 - DNA, 25 bp, Homo sapien
gaacagggtttttgcttcttgcttc

SEQ ID NO: 4800607 - DNA, 25 bp, Homo sapien
agaacagggtttttgcttcttgctt

SEQ ID NO: 4800608 - DNA, 25 bp, Homo sapien
tgagatctgtccagagaaaattcac

SEQ ID NO: 4800609 - DNA, 25 bp, Homo sapien
ctgagatctgtccagagaaaattca

SEQ ID NO: 4800610 - DNA, 25 bp, Homo sapien
actgggcaggatgatgtctacggca

SEQ ID NO: 4800611 - DNA, 25 bp, Homo sapien
gatgcggtctgaatccctgtcctct

SEQ ID NO: 4800612 - DNA, 25 bp, Homo sapien
gggccgctgcaggttcacaaactga

SEQ ID NO: 4800613 - DNA, 25 bp, Homo sapien
tcgggtctcctccttgtggccatgg

SEQ ID NO: 4800614 - DNA, 25 bp, Homo sapien
gaggcgttcgggccgccaaagttca

SEQ ID NO: 4800615 - DNA, 25 bp, Homo sapien
agtccgcccaacagcgcagaactca

SEQ ID NO: 4800616 - DNA, 25 bp, Homo sapien
ttcagggagatttcgaaaagagagg

SEQ ID NO: 4800617 - DNA, 25 bp, Homo sapien
cgccaaagttcagggagatttcgaa

SEQ ID NO: 4800618 - DNA, 25 bp, Homo sapien
cgaggctgcgtgtccgccggtccca

SEQ ID NO: 4800619 - DNA, 25 bp, Homo sapien
gaggctgcgtgtccgccggtcccac

SEQ ID NO: 4800620 - DNA, 25 bp, Homo sapien
cgcgaggctgcgtgtccgccggtcc

SEQ ID NO: 4800621 - DNA, 25 bp, Homo sapien
gcgaggctgcgtgtccgccggtccc

SEQ ID NO: 4800622 - DNA, 25 bp, Homo sapien
tgcccggccgagtgtccgcccgtgg

SEQ ID NO: 4800623 - DNA, 25 bp, Homo sapien
ggcgcgcatcctccgcggccactag

SEQ ID NO: 4800624 - DNA, 25 bp, Homo sapien
atcctccgcggccactagccaggac

SEQ ID NO: 4800625 - DNA, 25 bp, Homo sapien
cgggcgcgcatcctccgcggccact

SEQ ID NO: 4800626 - DNA, 25 bp, Homo sapien
cccgcgggcgcgcatcctccgcggc

SEQ ID NO: 4800627 - DNA, 25 bp, Homo sapien
aggagcggccacaccgcggcgcaca

SEQ ID NO: 4800628 - DNA, 25 bp, Homo sapien
ggagcggccacaccgcggcgcacac

SEQ ID NO: 4800629 - DNA, 25 bp, Homo sapien
ggccccccgccgaggagcggccaca

SEQ ID NO: 4800630 - DNA, 25 bp, Homo sapien
ccccgccgaggagcggccacaccgc

SEQ ID NO: 4800631 - DNA, 25 bp, Homo sapien
catgttgttccgacacaggtcagaa

SEQ ID NO: 4800632 - DNA, 25 bp, Homo sapien
gaacatgcatgtaaggtagacggac

SEQ ID NO: 4800633 - DNA, 25 bp, Homo sapien
cgaccgctcgcacacttgttgagga

SEQ ID NO: 4800634 - DNA, 25 bp, Homo sapien
cttgcactaacagcacaggcgttcg

SEQ ID NO: 4800635 - DNA, 25 bp, Homo sapien
agatctgtgtcttatagctgcttct

SEQ ID NO: 4800636 - DNA, 25 bp, Homo sapien
gatctgtgtcttatagctgcttctt

SEQ ID NO: 4800637 - DNA, 25 bp, Homo sapien
tctgtgtcttatagctgcttcttcc

SEQ ID NO: 4800638 - DNA, 25 bp, Homo sapien
tgtgtcttatagctgcttcttccaa

SEQ ID NO: 4800639 - DNA, 25 bp, Homo sapien
aattcaaagtcccagatgcctcccc

SEQ ID NO: 4800640 - DNA, 25 bp, Homo sapien
tacaattcaaagtcccagatgcctc

SEQ ID NO: 4800641 - DNA, 25 bp, Homo sapien
acaattcaaagtcccagatgcctcc

SEQ ID NO: 4800642 - DNA, 25 bp, Homo sapien
ttacaattcaaagtcccagatgcct

SEQ ID NO: 4800643 - DNA, 25 bp, Homo sapien
tcctggtgtgactatggagatccct

SEQ ID NO: 4800644 - DNA, 25 bp, Homo sapien
gaacagacctctgcagcaaggagct

SEQ ID NO: 4800645 - DNA, 25 bp, Homo sapien
caagtagagtttgtatggacaccga

SEQ ID NO: 4800646 - DNA, 25 bp, Homo sapien
tctcacccatgaggcttcgacaggc

SEQ ID NO: 4800647 - DNA, 25 bp, Homo sapien
gaaacctggctacttgtctcaggga

SEQ ID NO: 4800648 - DNA, 25 bp, Homo sapien
ttttgtgagctttaaccgaagccgc

SEQ ID NO: 4800649 - DNA, 25 bp, Homo sapien
ttccgagtcaaaggatgaggccctg

SEQ ID NO: 4800650 - DNA, 25 bp, Homo sapien
ccgaagccgctcatcagaatgtcag

SEQ ID NO: 4800651 - DNA, 25 bp, Homo sapien
tgtttttcgtttgatgcttgtcaca

SEQ ID NO: 4800652 - DNA, 25 bp, Homo sapien
ttttcgtttgatgcttgtcacatga

SEQ ID NO: 4800653 - DNA, 25 bp, Homo sapien
tctgtttttcgtttgatgcttgtca

SEQ ID NO: 4800654 - DNA, 25 bp, Homo sapien
tcgtttgatgcttgtcacatgacca

SEQ ID NO: 4800655 - DNA, 25 bp, Homo sapien
cctcgtctgctttggccgcgctccc

SEQ ID NO: 4800656 - DNA, 25 bp, Homo sapien
tttggccgcgctcccgcgaaggccg

SEQ ID NO: 4800657 - DNA, 25 bp, Homo sapien
cgacgcctcccacccgcctcgtctg

SEQ ID NO: 4800658 - DNA, 25 bp, Homo sapien
gcaagccctttttccacgacgcctc

SEQ ID NO: 4800659 - DNA, 25 bp, Homo sapien
tgggatagggaccacggattaccaa

SEQ ID NO: 4800660 - DNA, 25 bp, Homo sapien
ggattaccaagaccagcatagtgca

SEQ ID NO: 4800661 - DNA, 25 bp, Homo sapien
gaatgaatgctaaatacacgactta

SEQ ID NO: 4800662 - DNA, 25 bp, Homo sapien
cacgtaggaggcatccggaggcttt

SEQ ID NO: 4800663 - DNA, 25 bp, Homo sapien
tagaaggcgtcagagagtcgactcc

SEQ ID NO: 4800664 - DNA, 25 bp, Homo sapien
gagtcgactccttaaataacccagc

SEQ ID NO: 4800665 - DNA, 25 bp, Homo sapien
ccaaaaatcgatgggagcctgccat

SEQ ID NO: 4800666 - DNA, 25 bp, Homo sapien
agcctcggctccaccaaaaatcgat

SEQ ID NO: 4800667 - DNA, 25 bp, Homo sapien
catcaatataaaaatacgaatgaaa

SEQ ID NO: 4800668 - DNA, 25 bp, Homo sapien
gaatgaaatattaaattctcagccg

SEQ ID NO: 4800669 - DNA, 25 bp, Homo sapien
gaaatattaaattctcagccgggca

SEQ ID NO: 4800670 - DNA, 25 bp, Homo sapien
catgtcatcaatataaaaatacgaa

SEQ ID NO: 4800671 - DNA, 25 bp, Homo sapien
caggagacctacttgagcctggaag

SEQ ID NO: 4800672 - DNA, 25 bp, Homo sapien
tcagccacatttcacgtgttgtgtg

SEQ ID NO: 4800673 - DNA, 25 bp, Homo sapien
taaattctctttctgatactaagtc

SEQ ID NO: 4800674 - DNA, 25 bp, Homo sapien
ggtgtatatttcagacagagcatct

SEQ ID NO: 4800675 - DNA, 25 bp, Homo sapien
tgcctgaggattgcctgtggacacc

SEQ ID NO: 4800676 - DNA, 25 bp, Homo sapien
cctctgtgagcaagcttgtatggca

SEQ ID NO: 4800677 - DNA, 25 bp, Homo sapien
taatagttgcccttactgcccaggg

SEQ ID NO: 4800678 - DNA, 25 bp, Homo sapien
tggacacccgtgaggtggcctctgt

SEQ ID NO: 4800679 - DNA, 25 bp, Homo sapien
aatacctgatttctaatgccagtcc

SEQ ID NO: 4800680 - DNA, 25 bp, Homo sapien
agctgcaaatacctgatttctaatg

SEQ ID NO: 4800681 - DNA, 25 bp, Homo sapien
gcaaatacctgatttctaatgccag

SEQ ID NO: 4800682 - DNA, 25 bp, Homo sapien
gatttctaatgccagtcccatccct

SEQ ID NO: 4800683 - DNA, 25 bp, Homo sapien
agtgcagacagtttcccctgagaag

SEQ ID NO: 4800684 - DNA, 25 bp, Homo sapien
aaacctgaatggcttcccgttgcca

SEQ ID NO: 4800685 - DNA, 25 bp, Homo sapien
ggagcttctggtatacacagtgcag

SEQ ID NO: 4800686 - DNA, 25 bp, Homo sapien
ggccagaacagggaggtcttctact

SEQ ID NO: 4800687 - DNA, 25 bp, Homo sapien
cctgaaaacccctagagctggagag

SEQ ID NO: 4800688 - DNA, 25 bp, Homo sapien
gatttgagcaatggagtctggcaca

SEQ ID NO: 4800689 - DNA, 25 bp, Homo sapien
ccaatttgaagtcctagtggagccg

SEQ ID NO: 4800690 - DNA, 25 bp, Homo sapien
tgttcacctccaatgacgagcctgg

SEQ ID NO: 4800691 - DNA, 25 bp, Homo sapien
ccggaaggcgtcaatggcgtgctca

SEQ ID NO: 4800692 - DNA, 25 bp, Homo sapien
cattgtgtcgtccttcacgtaggcg

SEQ ID NO: 4800693 - DNA, 25 bp, Homo sapien
tctggaaggacgctgagcttaggtc

SEQ ID NO: 4800694 - DNA, 25 bp, Homo sapien
aatgcacttgaggaacattgtgtcg

SEQ ID NO: 4800695 - DNA, 25 bp, Homo sapien
ggctgttccatgatgaggatcagat

SEQ ID NO: 4800696 - DNA, 25 bp, Homo sapien
gttctgatgccccagtcaagtgtga

SEQ ID NO: 4800697 - DNA, 25 bp, Homo sapien
ggtgtgactgaagcactgacaaggt

SEQ ID NO: 4800698 - DNA, 25 bp, Homo sapien
gtggaggcaataacctgtaacaccc

SEQ ID NO: 4800699 - DNA, 25 bp, Homo sapien
gctctattcatctctcccggcacct

SEQ ID NO: 4800700 - DNA, 25 bp, Homo sapien
gttttgtaacaattgatgaagctgc

SEQ ID NO: 4800701 - DNA, 25 bp, Homo sapien
tcactgctcccaaaatcccctgtgc

SEQ ID NO: 4800702 - DNA, 25 bp, Homo sapien
cacagtttacattggcatttactct

SEQ ID NO: 4800703 - DNA, 25 bp, Homo sapien
cattcaggtacagccgcaggcacaa

SEQ ID NO: 4800704 - DNA, 25 bp, Homo sapien
cgacagatgggttctctttccagtg

SEQ ID NO: 4800705 - DNA, 25 bp, Homo sapien
cctctcatgatcacgatgaagagcg

SEQ ID NO: 4800706 - DNA, 25 bp, Homo sapien
ctccattcaggtacagccgcaggca

SEQ ID NO: 4800707 - DNA, 25 bp, Homo sapien
tgtagccatacttggcagtgtagaa

SEQ ID NO: 4800708 - DNA, 25 bp, Homo sapien
tagccatacttggcagtgtagaagg

SEQ ID NO: 4800709 - DNA, 25 bp, Homo sapien
cttgtagccatacttggcagtgtag

SEQ ID NO: 4800710 - DNA, 25 bp, Homo sapien
gtagccatacttggcagtgtagaag

SEQ ID NO: 4800711 - DNA, 25 bp, Homo sapien
aagtgccatcgaaggaggcctcctc

SEQ ID NO: 4800712 - DNA, 25 bp, Homo sapien
aggccgactcatggcaccgcctggt

SEQ ID NO: 4800713 - DNA, 25 bp, Homo sapien
ccgcctggtgacattggtgatcttc

SEQ ID NO: 4800714 - DNA, 25 bp, Homo sapien
ggtgatcttccacaggaaagtgcca

SEQ ID NO: 4800715 - DNA, 25 bp, Homo sapien
aatggtcattggctacattaagaaa

SEQ ID NO: 4800716 - DNA, 25 bp, Homo sapien
ggtcattggctacattaagaaaagt

SEQ ID NO: 4800717 - DNA, 25 bp, Homo sapien
attagaatggtcattggctacatta

SEQ ID NO: 4800718 - DNA, 25 bp, Homo sapien
cattggctacattaagaaaagtata

SEQ ID NO: 4800719 - DNA, 25 bp, Homo sapien
tcagccgggcttgaaggcaaacctg

SEQ ID NO: 4800720 - DNA, 25 bp, Homo sapien
caaaggaaccgaagcactggatggg

SEQ ID NO: 4800721 - DNA, 25 bp, Homo sapien
aagacagccctgttggaccaagaac

SEQ ID NO: 4800722 - DNA, 25 bp, Homo sapien
ccaagtggattatctggagtcagcc

SEQ ID NO: 4800723 - DNA, 25 bp, Homo sapien
gcagggtgcccggtagcaatcgacc

SEQ ID NO: 4800724 - DNA, 25 bp, Homo sapien
tcatgctcttgcacagactgtgggc

SEQ ID NO: 4800725 - DNA, 25 bp, Homo sapien
catgaaccccaacagcaggtttagg

SEQ ID NO: 4800726 - DNA, 25 bp, Homo sapien
atgttctcaaacacacgcagcttcc

SEQ ID NO: 4800727 - DNA, 25 bp, Homo sapien
aaaggggcacccaattccagcctca

SEQ ID NO: 4800728 - DNA, 25 bp, Homo sapien
tgcaaaggggcacccaattccagcc

SEQ ID NO: 4800729 - DNA, 25 bp, Homo sapien
gggcacccaattccagcctcagcca

SEQ ID NO: 4800730 - DNA, 25 bp, Homo sapien
ctgcaaaggggcacccaattccagc

SEQ ID NO: 4800731 - DNA, 25 bp, Homo sapien
ggaagatgctatgtgtagacctggc

SEQ ID NO: 4800732 - DNA, 25 bp, Homo sapien
aagtctgtggtgatgaaacctcccc

SEQ ID NO: 4800733 - DNA, 25 bp, Homo sapien
taatctcatggaaccacgtgaaagg

SEQ ID NO: 4800734 - DNA, 25 bp, Homo sapien
gacagaggtctttcggactgagcaa

SEQ ID NO: 4800735 - DNA, 25 bp, Homo sapien
tcctggcgttgtgtgaacagcaaat

SEQ ID NO: 4800736 - DNA, 25 bp, Homo sapien
ggatgtgtctttcagcagcggagct

SEQ ID NO: 4800737 - DNA, 25 bp, Homo sapien
ttccagacatcaccccgcaggtgga

SEQ ID NO: 4800738 - DNA, 25 bp, Homo sapien
ttctaagggtcaaagcttggtggga

SEQ ID NO: 4800739 - DNA, 25 bp, Homo sapien
gagccacgtagcatgaatccagtac

SEQ ID NO: 4800740 - DNA, 25 bp, Homo sapien
cattggaaggacatggagccacgta

SEQ ID NO: 4800741 - DNA, 25 bp, Homo sapien
tccagggataggaggctaagttgcc

SEQ ID NO: 4800742 - DNA, 25 bp, Homo sapien
gactgctcagtgtctttccatggag

SEQ ID NO: 4800743 - DNA, 25 bp, Homo sapien
gaagcaccgtttgacagagctcagg

SEQ ID NO: 4800744 - DNA, 25 bp, Homo sapien
gagggccagggttctaaattgtagc

SEQ ID NO: 4800745 - DNA, 25 bp, Homo sapien
tgtaacctatgagggtccttccagc

SEQ ID NO: 4800746 - DNA, 25 bp, Homo sapien
tctggatagcatgtgggaacctctg

SEQ ID NO: 4800747 - DNA, 25 bp, Homo sapien
cgaagacggcttcctgggcttatag

SEQ ID NO: 4800748 - DNA, 25 bp, Homo sapien
ttctcctgagttcgaagacggcttc

SEQ ID NO: 4800749 - DNA, 25 bp, Homo sapien
gcttatagactggaggtcttcccct

SEQ ID NO: 4800750 - DNA, 25 bp, Homo sapien
ttggggcagatctgatcctcgccat

SEQ ID NO: 4800751 - DNA, 25 bp, Homo sapien
gcttgatggtaaaaccagtgaacct

SEQ ID NO: 4800752 - DNA, 25 bp, Homo sapien
tgacaatccgcttgatggtaaaacc

SEQ ID NO: 4800753 - DNA, 25 bp, Homo sapien
gagcctgagctgaaccctgacaatc

SEQ ID NO: 4800754 - DNA, 25 bp, Homo sapien
tgaaccctgacaatccgcttgatgg

SEQ ID NO: 4800755 - DNA, 25 bp, Homo sapien
agcctctcctcgctattctcacagc

SEQ ID NO: 4800756 - DNA, 25 bp, Homo sapien
ccacagcctctcctcgctattctca

SEQ ID NO: 4800757 - DNA, 25 bp, Homo sapien
cacagcctctcctcgctattctcac

SEQ ID NO: 4800758 - DNA, 25 bp, Homo sapien
acagcctctcctcgctattctcaca

SEQ ID NO: 4800759 - DNA, 25 bp, Homo sapien
gtttgaacttctcacttgcctgatt

SEQ ID NO: 4800760 - DNA, 25 bp, Homo sapien
ctcacttgcctgattcagctttgcc

SEQ ID NO: 4800761 - DNA, 25 bp, Homo sapien
gaacttctcacttgcctgattcagc

SEQ ID NO: 4800762 - DNA, 25 bp, Homo sapien
acttgcctgattcagctttgccacc

SEQ ID NO: 4800763 - DNA, 25 bp, Homo sapien
gcttagggacattagcagagcacca

SEQ ID NO: 4800764 - DNA, 25 bp, Homo sapien
gagaagaaaagtcaccgcctgaagt

SEQ ID NO: 4800765 - DNA, 25 bp, Homo sapien
tacagacaagcgagctgcggcttag

SEQ ID NO: 4800766 - DNA, 25 bp, Homo sapien
cagaaaacagctttacagacaagcg

SEQ ID NO: 4800767 - DNA, 25 bp, Homo sapien
tttgggtcctggcagacggtgggag

SEQ ID NO: 4800768 - DNA, 25 bp, Homo sapien
cctttgggtcctggcagacggtggg

SEQ ID NO: 4800769 - DNA, 25 bp, Homo sapien
tcctttgggtcctggcagacggtgg

SEQ ID NO: 4800770 - DNA, 25 bp, Homo sapien
gcacccaaagggaaactcattctca

SEQ ID NO: 4800771 - DNA, 25 bp, Homo sapien
ggttcaacgtcacagctgagtcaca

SEQ ID NO: 4800772 - DNA, 25 bp, Homo sapien
tgtggcgataaaaatcccctggatg

SEQ ID NO: 4800773 - DNA, 25 bp, Homo sapien
gcaggaattaccctttgtggcgata

SEQ ID NO: 4800774 - DNA, 25 bp, Homo sapien
cagagggcctgtttaagttgctcca

SEQ ID NO: 4800775 - DNA, 25 bp, Homo sapien
tgagcagcctggaattctcagtggg

SEQ ID NO: 4800776 - DNA, 25 bp, Homo sapien
aaatgacccgtgtcacagactctca

SEQ ID NO: 4800777 - DNA, 25 bp, Homo sapien
ctggttgagaatcgcaggctgccgc

SEQ ID NO: 4800778 - DNA, 25 bp, Homo sapien
ctttaggagtgtccagtcatttttt

SEQ ID NO: 4800779 - DNA, 25 bp, Homo sapien
gagaagtcacttcctcacagtgggt

SEQ ID NO: 4800780 - DNA, 25 bp, Homo sapien
tccccagggtgttggagacaggtcc

SEQ ID NO: 4800781 - DNA, 25 bp, Homo sapien
ctcagatggtgactacaggccttcc

SEQ ID NO: 4800782 - DNA, 25 bp, Homo sapien
actcaggaagtcataggtggctaca

SEQ ID NO: 4800783 - DNA, 25 bp, Homo sapien
ctgccctggtgtaacaccagggctg

SEQ ID NO: 4800784 - DNA, 25 bp, Homo sapien
ctggtgtaacaccagggctgccaca

SEQ ID NO: 4800785 - DNA, 25 bp, Homo sapien
ggtgtaacaccagggctgccacagg

SEQ ID NO: 4800786 - DNA, 25 bp, Homo sapien
gccctggtgtaacaccagggctgcc

SEQ ID NO: 4800787 - DNA, 25 bp, Homo sapien
tccaggcctgcatcaagactatcag

SEQ ID NO: 4800788 - DNA, 25 bp, Homo sapien
tctccaagtgtatacgcatgtcggg

SEQ ID NO: 4800789 - DNA, 25 bp, Homo sapien
gacatcaaaacgtgcgcaacctgct

SEQ ID NO: 4800790 - DNA, 25 bp, Homo sapien
tggtggcaaagacagcacggcatct

SEQ ID NO: 4800791 - DNA, 25 bp, Homo sapien
cggcgccgcctccgccaccgcctac

SEQ ID NO: 4800792 - DNA, 25 bp, Homo sapien
tcggcgccgcctccgccaccgccta

SEQ ID NO: 4800793 - DNA, 25 bp, Homo sapien
ctcggcgccgcctccgccaccgcct

SEQ ID NO: 4800794 - DNA, 25 bp, Homo sapien
aggacgcagccgcaccggcggaaac

SEQ ID NO: 4800795 - DNA, 25 bp, Homo sapien
taactgacacgcgtgtacgcagctc

SEQ ID NO: 4800796 - DNA, 25 bp, Homo sapien
ccacgggcactgtgcgcccagttaa

SEQ ID NO: 4800797 - DNA, 25 bp, Homo sapien
cctgcgcgtgtttagtgctcagtaa

SEQ ID NO: 4800798 - DNA, 25 bp, Homo sapien
ccgggctgttcacattgttcatcca

SEQ ID NO: 4800799 - DNA, 25 bp, Homo sapien
gtaaagcaattgttggcgagagcag

SEQ ID NO: 4800800 - DNA, 25 bp, Homo sapien
cagcaaacattcctgagtggtaggt

SEQ ID NO: 4800801 - DNA, 25 bp, Homo sapien
tccaaggccatgttatttcagaaag

SEQ ID NO: 4800802 - DNA, 25 bp, Homo sapien
taaccttggaggagtatctgtcttc

SEQ ID NO: 4800803 - DNA, 25 bp, Homo sapien
atggactgttctttcggccccagca

SEQ ID NO: 4800804 - DNA, 25 bp, Homo sapien
aaaaatgcttgacacgatgaacatg

SEQ ID NO: 4800805 - DNA, 25 bp, Homo sapien
tgtctctaggccagtattcaatcca

SEQ ID NO: 4800806 - DNA, 25 bp, Homo sapien
gatatcttcggcaaattcatctaaa

SEQ ID NO: 4800807 - DNA, 25 bp, Homo sapien
caggtcaaggaatctaaagggtaga

SEQ ID NO: 4800808 - DNA, 25 bp, Homo sapien
aacaaagtgtttgtgaggtggccac

SEQ ID NO: 4800809 - DNA, 25 bp, Homo sapien
agaaacaaagtgtttgtgaggtggc

SEQ ID NO: 4800810 - DNA, 25 bp, Homo sapien
ctaccaagaaacaaagtgtttgtga

SEQ ID NO: 4800811 - DNA, 25 bp, Homo sapien
ttgtgaggtggccacaaaacagaaa

SEQ ID NO: 4800812 - DNA, 25 bp, Homo sapien
tattttatctggagggcttctttac

SEQ ID NO: 4800813 - DNA, 25 bp, Homo sapien
tctttacccataattaagtactgtc

SEQ ID NO: 4800814 - DNA, 25 bp, Homo sapien
gctcagcgttagtacaggttacctt

SEQ ID NO: 4800815 - DNA, 25 bp, Homo sapien
ttccttttaccagctcagcgttagt

SEQ ID NO: 4800816 - DNA, 25 bp, Homo sapien
taatacatgaaaagtgcctggaaca

SEQ ID NO: 4800817 - DNA, 25 bp, Homo sapien
caagtagccagttcccctacctgga

SEQ ID NO: 4800818 - DNA, 25 bp, Homo sapien
taccttgtagaaccatcgtgagatt

SEQ ID NO: 4800819 - DNA, 25 bp, Homo sapien
ttagaccctcatcttaagactgggc

SEQ ID NO: 4800820 - DNA, 25 bp, Homo sapien
tgtagcaaatttgcacacgtatccc

SEQ ID NO: 4800821 - DNA, 25 bp, Homo sapien
atgtagcaaatttgcacacgtatcc

SEQ ID NO: 4800822 - DNA, 25 bp, Homo sapien
aaagaaattggacaattacgcaatt

SEQ ID NO: 4800823 - DNA, 25 bp, Homo sapien
attggacaattacgcaattgaaaaa

SEQ ID NO: 4800824 - DNA, 25 bp, Homo sapien
cttctgtgtttaatataatgcctgg

SEQ ID NO: 4800825 - DNA, 25 bp, Homo sapien
tggcacatagtcagtactaaatagt

SEQ ID NO: 4800826 - DNA, 25 bp, Homo sapien
atcttctgtgtttaatataatgcct

SEQ ID NO: 4800827 - DNA, 25 bp, Homo sapien
cacatagtcagtactaaatagttgc

SEQ ID NO: 4800828 - DNA, 25 bp, Homo sapien
cagtgatggatgtgatgctaacttt

SEQ ID NO: 4800829 - DNA, 25 bp, Homo sapien
tgtagatatccagaagggttgcctt

SEQ ID NO: 4800830 - DNA, 25 bp, Homo sapien
tccagaagggttgccttgtacttga

SEQ ID NO: 4800831 - DNA, 25 bp, Homo sapien
gatggatgtgatgctaactttataa

SEQ ID NO: 4800832 - DNA, 25 bp, Homo sapien
tatgcaatctctggtttacatgctg

SEQ ID NO: 4800833 - DNA, 25 bp, Homo sapien
catatgcaatctctggtttacatgc

SEQ ID NO: 4800834 - DNA, 25 bp, Homo sapien
caatctctggtttacatgctgtttg

SEQ ID NO: 4800835 - DNA, 25 bp, Homo sapien
tcttcctgcatttgcccacaatcag

SEQ ID NO: 4800836 - DNA, 25 bp, Homo sapien
atggaactggacaataaaccgaatt

SEQ ID NO: 4800837 - DNA, 25 bp, Homo sapien
tggacaataaaccgaattccattaa

SEQ ID NO: 4800838 - DNA, 25 bp, Homo sapien
tggaactggacaataaaccgaattc

SEQ ID NO: 4800839 - DNA, 25 bp, Homo sapien
tctacacacttgcacgcggctcctt

SEQ ID NO: 4800840 - DNA, 25 bp, Homo sapien
acacttgcacgcggctccttcacag

SEQ ID NO: 4800841 - DNA, 25 bp, Homo sapien
tacacacttgcacgcggctccttca

SEQ ID NO: 4800842 - DNA, 25 bp, Homo sapien
acttgcacgcggctccttcacagac

SEQ ID NO: 4800843 - DNA, 25 bp, Homo sapien
gtgaaagtggcaggactgagaaacc

SEQ ID NO: 4800844 - DNA, 25 bp, Homo sapien
cttcaaagagttcaaatatccggaa

SEQ ID NO: 4800845 - DNA, 25 bp, Homo sapien
tggtctgtggtattcgtacactgtg

SEQ ID NO: 4800846 - DNA, 25 bp, Homo sapien
ggaatcgtacacaaaggaaatcact

SEQ ID NO: 4800847 - DNA, 25 bp, Homo sapien
gcagaataacatgtccatctttgat

SEQ ID NO: 4800848 - DNA, 25 bp, Homo sapien
cagtgaatagttgatccaccccttc

SEQ ID NO: 4800849 - DNA, 25 bp, Homo sapien
ttgcagaataacatgtccatctttg

SEQ ID NO: 4800850 - DNA, 25 bp, Homo sapien
agtgaatagttgatccaccccttcc

SEQ ID NO: 4800851 - DNA, 25 bp, Homo sapien
gagatgtccatcaccgcatgagagg

SEQ ID NO: 4800852 - DNA, 25 bp, Homo sapien
catcaccgcatgagaggatccagat

SEQ ID NO: 4800853 - DNA, 25 bp, Homo sapien
gtcttcttcatttgcactgattcca

SEQ ID NO: 4800854 - DNA, 25 bp, Homo sapien
tgtccatcaccgcatgagaggatcc

SEQ ID NO: 4800855 - DNA, 25 bp, Homo sapien
agcaaaaccaaggctgttttttatg

SEQ ID NO: 4800856 - DNA, 25 bp, Homo sapien
gagaacttggagtctatgctcccct

SEQ ID NO: 4800857 - DNA, 25 bp, Homo sapien
ttaatattacactgtttgaatcaga

SEQ ID NO: 4800858 - DNA, 25 bp, Homo sapien
caattttgtatcttctggacatacc

SEQ ID NO: 4800859 - DNA, 25 bp, Homo sapien
cacatgctactatgcgtttgtaatc

SEQ ID NO: 4800860 - DNA, 25 bp, Homo sapien
gctactatgcgtttgtaatcagagt

SEQ ID NO: 4800861 - DNA, 25 bp, Homo sapien
tttccgtagcctctgtagtgggatg

SEQ ID NO: 4800862 - DNA, 25 bp, Homo sapien
tgtaatcagagtttccgtagcctct

SEQ ID NO: 4800863 - DNA, 25 bp, Homo sapien
aacaaacagacaaatataagagtaa

SEQ ID NO: 4800864 - DNA, 25 bp, Homo sapien
caaacagacaaatataagagtaaac

SEQ ID NO: 4800865 - DNA, 25 bp, Homo sapien
caaatataagagtaaactgttttca

SEQ ID NO: 4800866 - DNA, 25 bp, Homo sapien
acagacaaatataagagtaaactgt

SEQ ID NO: 4800867 - DNA, 25 bp, Homo sapien
ggttctaatggaaattcatggctat

SEQ ID NO: 4800868 - DNA, 25 bp, Homo sapien
ttgtgatttggaagtttagatactt

SEQ ID NO: 4800869 - DNA, 25 bp, Homo sapien
agtttagatactttcagtggttcta

SEQ ID NO: 4800870 - DNA, 25 bp, Homo sapien
aaattcatggctattgacaatacca

SEQ ID NO: 4800871 - DNA, 25 bp, Homo sapien
aggaagggagaaccaaccagcagag

SEQ ID NO: 4800872 - DNA, 25 bp, Homo sapien
caagtggacttgcttttggaccagg

SEQ ID NO: 4800873 - DNA, 25 bp, Homo sapien
taggaacaggcttctgagcaataga

SEQ ID NO: 4800874 - DNA, 25 bp, Homo sapien
gaacagatgccttaatttgctggta

SEQ ID NO: 4800875 - DNA, 25 bp, Homo sapien
gagtatcgattttcaaataaaagct

SEQ ID NO: 4800876 - DNA, 25 bp, Homo sapien
aatatcctgagtatcgattttcaaa

SEQ ID NO: 4800877 - DNA, 25 bp, Homo sapien
tggttttgtgaactacagttgttac

SEQ ID NO: 4800878 - DNA, 25 bp, Homo sapien
tcctcagaggtactggttttgtgaa

SEQ ID NO: 4800879 - DNA, 25 bp, Homo sapien
caaatcctgtactgacaatgaggtc

SEQ ID NO: 4800880 - DNA, 25 bp, Homo sapien
gccaaatcctgtactgacaatgagg

SEQ ID NO: 4800881 - DNA, 25 bp, Homo sapien
ccactgccaaatcctgtactgacaa

SEQ ID NO: 4800882 - DNA, 25 bp, Homo sapien
atcctgtactgacaatgaggtcatc

SEQ ID NO: 4800883 - DNA, 25 bp, Homo sapien
catcgatgtccatactcaagcggag

SEQ ID NO: 4800884 - DNA, 25 bp, Homo sapien
taaccaggagtgaatattccgtcag

SEQ ID NO: 4800885 - DNA, 25 bp, Homo sapien
taaggcacctttatgcttgtaagaa

SEQ ID NO: 4800886 - DNA, 25 bp, Homo sapien
tcaagcggagttgtttaaccaggag

SEQ ID NO: 4800887 - DNA, 25 bp, Homo sapien
taaagcataggcagttgtttctacc

SEQ ID NO: 4800888 - DNA, 25 bp, Homo sapien
catacgtgccgtaccagtgttaggt

SEQ ID NO: 4800889 - DNA, 25 bp, Homo sapien
aataaaagccacctccatacctctg

SEQ ID NO: 4800890 - DNA, 25 bp, Homo sapien
caagttcagactggtgagtaaagca

SEQ ID NO: 4800891 - DNA, 25 bp, Homo sapien
acttcctgaagatgaccaatgcaaa

SEQ ID NO: 4800892 - DNA, 25 bp, Homo sapien
ttttcttgttagaggaacttcctga

SEQ ID NO: 4800893 - DNA, 25 bp, Homo sapien
ttgacataataattctaccaggtgt

SEQ ID NO: 4800894 - DNA, 25 bp, Homo sapien
gcaaaacgagatcccttaatatggt

SEQ ID NO: 4800895 - DNA, 25 bp, Homo sapien
gcccaggcatttgagatcatccggg

SEQ ID NO: 4800896 - DNA, 25 bp, Homo sapien
ggcatttgagatcatccggggaaac

SEQ ID NO: 4800897 - DNA, 25 bp, Homo sapien
agatcatccggggaaacacagtgag

SEQ ID NO: 4800898 - DNA, 25 bp, Homo sapien
atttgagatcatccggggaaacaca

SEQ ID NO: 4800899 - DNA, 25 bp, Homo sapien
tgaatacatgtatggaacaagttat

SEQ ID NO: 4800900 - DNA, 25 bp, Homo sapien
gaatacatgtatggaacaagttata

SEQ ID NO: 4800901 - DNA, 25 bp, Homo sapien
aatacatgtatggaacaagttatac

SEQ ID NO: 4800902 - DNA, 25 bp, Homo sapien
ctgggctggcagtgtattttcaagc

SEQ ID NO: 4800903 - DNA, 25 bp, Homo sapien
caattgaacgaaactgtgggtgagt

SEQ ID NO: 4800904 - DNA, 25 bp, Homo sapien
ggaaagagcatacgcagaaatggcc

SEQ ID NO: 4800905 - DNA, 25 bp, Homo sapien
gaaatggccaatgtaaaggtgctct

SEQ ID NO: 4800906 - DNA, 25 bp, Homo sapien
tctcgggcttcaacaggcaaggtac

SEQ ID NO: 4800907 - DNA, 25 bp, Homo sapien
gggcatatatcgaaagcctttctaa

SEQ ID NO: 4800908 - DNA, 25 bp, Homo sapien
aagctgttctctcgggcttcaacag

SEQ ID NO: 4800909 - DNA, 25 bp, Homo sapien
cacagtaaaggctgtaagatataag

SEQ ID NO: 4800910 - DNA, 25 bp, Homo sapien
taattctcaactagccacaataaag

SEQ ID NO: 4800911 - DNA, 25 bp, Homo sapien
gaattttggttctgctctacgtatt

SEQ ID NO: 4800912 - DNA, 25 bp, Homo sapien
ccttgaaagatccattatctaattg

SEQ ID NO: 4800913 - DNA, 25 bp, Homo sapien
tactgtgaattttccttgaaagatc

SEQ ID NO: 4800914 - DNA, 25 bp, Homo sapien
tttgagggtatttaggtgctggaca

SEQ ID NO: 4800915 - DNA, 25 bp, Homo sapien
cctgcatcctgggttatcctctggt

SEQ ID NO: 4800916 - DNA, 25 bp, Homo sapien
gctctccaggcatctatttcccagg

SEQ ID NO: 4800917 - DNA, 25 bp, Homo sapien
tgtgtcagtttccagtcttcattga

SEQ ID NO: 4800918 - DNA, 25 bp, Homo sapien
catttctgtaggacataatgctcaa

SEQ ID NO: 4800919 - DNA, 25 bp, Homo sapien
aagtgctagcacttccacccttcca

SEQ ID NO: 4800920 - DNA, 25 bp, Homo sapien
cacacactgtaagagtagtcagcat

SEQ ID NO: 4800921 - DNA, 25 bp, Homo sapien
ctgtaggacataatgctcaacatcc

SEQ ID NO: 4800922 - DNA, 25 bp, Homo sapien
tggccagcattgaacttctcaaagg

SEQ ID NO: 4800923 - DNA, 25 bp, Homo sapien
tcattcgaaaaggaaggaagtgttc

SEQ ID NO: 4800924 - DNA, 25 bp, Homo sapien
tctgtagtttggaatgcaggtgcct

SEQ ID NO: 4800925 - DNA, 25 bp, Homo sapien
aaagaacactttatcaggccctgag

SEQ ID NO: 4800926 - DNA, 25 bp, Homo sapien
ttttcaattaatgggtcagaatgaa

SEQ ID NO: 4800927 - DNA, 25 bp, Homo sapien
tttcaattaatgggtcagaatgaaa

SEQ ID NO: 4800928 - DNA, 25 bp, Homo sapien
tcaattaatgggtcagaatgaaaaa

SEQ ID NO: 4800929 - DNA, 25 bp, Homo sapien
ttcaattaatgggtcagaatgaaaa

SEQ ID NO: 4800930 - DNA, 25 bp, Homo sapien
aatactgggacaacgctcatcagct

SEQ ID NO: 4800931 - DNA, 25 bp, Homo sapien
tagaatactgggacaacgctcatca

SEQ ID NO: 4800932 - DNA, 25 bp, Homo sapien
acatagaatactgggacaacgctca

SEQ ID NO: 4800933 - DNA, 25 bp, Homo sapien
actgggacaacgctcatcagctccg

SEQ ID NO: 4800934 - DNA, 25 bp, Homo sapien
gacaagatctcacctacaagcagtc

SEQ ID NO: 4800935 - DNA, 25 bp, Homo sapien
tattgatgccttcctgacttagaac

SEQ ID NO: 4800936 - DNA, 25 bp, Homo sapien
ggtgggttaggatattgatgccttc

SEQ ID NO: 4800937 - DNA, 25 bp, Homo sapien
ttcctgacttagaactgcagacaag

SEQ ID NO: 4800938 - DNA, 25 bp, Homo sapien
caaccatctagagatggttcttccc

SEQ ID NO: 4800939 - DNA, 25 bp, Homo sapien
tattaacttctaacagtatgttctc

SEQ ID NO: 4800940 - DNA, 25 bp, Homo sapien
agagaagaacaaccatctagagatg

SEQ ID NO: 4800941 - DNA, 25 bp, Homo sapien
gcagttgacttgcttctcagaaacg

SEQ ID NO: 4800942 - DNA, 25 bp, Homo sapien
gaactcctttcgtctgctaatggta

SEQ ID NO: 4800943 - DNA, 25 bp, Homo sapien
atctaagggtatcctgtatgggaac

SEQ ID NO: 4800944 - DNA, 25 bp, Homo sapien
ggaccaaatctaagggtatcctgta

SEQ ID NO: 4800945 - DNA, 25 bp, Homo sapien
aactcctttcgtctgctaatggtac

SEQ ID NO: 4800946 - DNA, 25 bp, Homo sapien
ctatcctgtggccttgatgttcaca

SEQ ID NO: 4800947 - DNA, 25 bp, Homo sapien
tatcctgtggccttgatgttcacac

SEQ ID NO: 4800948 - DNA, 25 bp, Homo sapien
ggatgagtaaggcaagactgctctg

SEQ ID NO: 4800949 - DNA, 25 bp, Homo sapien
tgctctggaaaattgtttgcaataa

SEQ ID NO: 4800950 - DNA, 25 bp, Homo sapien
tgcaataatgtcagcagaagaagca

SEQ ID NO: 4800951 - DNA, 25 bp, Homo sapien
gcaataatgtcagcagaagaagcat

SEQ ID NO: 4800952 - DNA, 25 bp, Homo sapien
cccctaggatccaaagtaacaccag

SEQ ID NO: 4800953 - DNA, 25 bp, Homo sapien
ccctaggatccaaagtaacaccaga

SEQ ID NO: 4800954 - DNA, 25 bp, Homo sapien
tgtgaaggccaatttccagaggaag

SEQ ID NO: 4800955 - DNA, 25 bp, Homo sapien
caccactcgtaatgtttttactaag

SEQ ID NO: 4800956 - DNA, 25 bp, Homo sapien
cagtgaatgtcaccaagtgactgga

SEQ ID NO: 4800957 - DNA, 25 bp, Homo sapien
tccaaaccaagtctccagtgaaaaa

SEQ ID NO: 4800958 - DNA, 25 bp, Homo sapien
gtgccctgatgatcaatgactgggc

SEQ ID NO: 4800959 - DNA, 25 bp, Homo sapien
tgccctgatgatcaatgactgggct

SEQ ID NO: 4800960 - DNA, 25 bp, Homo sapien
ccctgatgatcaatgactgggcttt

SEQ ID NO: 4800961 - DNA, 25 bp, Homo sapien
gccctgatgatcaatgactgggctt

SEQ ID NO: 4800962 - DNA, 25 bp, Homo sapien
taacaggaactaagcccaaaatatc

SEQ ID NO: 4800963 - DNA, 25 bp, Homo sapien
gaaagtgtaacccacactcaggagg

SEQ ID NO: 4800964 - DNA, 25 bp, Homo sapien
gaagattcaatccaaaattactaga

SEQ ID NO: 4800965 - DNA, 25 bp, Homo sapien
tatggcagtatagtgatatgcatga

SEQ ID NO: 4800966 - DNA, 25 bp, Homo sapien
tctttgaacacctttgccttgacag

SEQ ID NO: 4800967 - DNA, 25 bp, Homo sapien
tatggtatattcatttccaggaaga

SEQ ID NO: 4800968 - DNA, 25 bp, Homo sapien
caattggatctgttctcctcgtaca

SEQ ID NO: 4800969 - DNA, 25 bp, Homo sapien
cttgacagtatcagcaacacatata

SEQ ID NO: 4800970 - DNA, 25 bp, Homo sapien
caggtagggcaaactgcaactgttt

SEQ ID NO: 4800971 - DNA, 25 bp, Homo sapien
aaatgccaacgccttgaatttccca

SEQ ID NO: 4800972 - DNA, 25 bp, Homo sapien
ttagagaatcaggtagggcaaactg

SEQ ID NO: 4800973 - DNA, 25 bp, Homo sapien
gtttgaaatgccaacgccttgaatt

SEQ ID NO: 4800974 - DNA, 25 bp, Homo sapien
tctgggaacaagatgaacttcccac

SEQ ID NO: 4800975 - DNA, 25 bp, Homo sapien
tggaaaataactccgaatttctggc

SEQ ID NO: 4800976 - DNA, 25 bp, Homo sapien
agatgaacttcccacaaccagcttt

SEQ ID NO: 4800977 - DNA, 25 bp, Homo sapien
gcttactggtaacagggtcttcatg

SEQ ID NO: 4800978 - DNA, 25 bp, Homo sapien
caaaattccccatattgagcagaat

SEQ ID NO: 4800979 - DNA, 25 bp, Homo sapien
ccccatattgagcagaattctgata

SEQ ID NO: 4800980 - DNA, 25 bp, Homo sapien
attccccatattgagcagaattctg

SEQ ID NO: 4800981 - DNA, 25 bp, Homo sapien
acaaaattccccatattgagcagaa

SEQ ID NO: 4800982 - DNA, 25 bp, Homo sapien
cttcccaattgcatgtctttatgag

SEQ ID NO: 4800983 - DNA, 25 bp, Homo sapien
ggcttgcgacgacacaacattcagt

SEQ ID NO: 4800984 - DNA, 25 bp, Homo sapien
tatgagagatattagcacggagctg

SEQ ID NO: 4800985 - DNA, 25 bp, Homo sapien
ctaaactaatccgtgcagctcgctg

SEQ ID NO: 4800986 - DNA, 25 bp, Homo sapien
tcattattaacgcaggctccatcgt

SEQ ID NO: 4800987 - DNA, 25 bp, Homo sapien
taacgcaggctccatcgtaacaaca

SEQ ID NO: 4800988 - DNA, 25 bp, Homo sapien
gcaggctccatcgtaacaacatttc

SEQ ID NO: 4800989 - DNA, 25 bp, Homo sapien
gtttcatcattattaacgcaggctc

SEQ ID NO: 4800990 - DNA, 25 bp, Homo sapien
ttggcctgagaatttctttacaagg

SEQ ID NO: 4800991 - DNA, 25 bp, Homo sapien
ttttgcagcgttcttcttggcctga

SEQ ID NO: 4800992 - DNA, 25 bp, Homo sapien
ctgagaatttctttacaaggttcat

SEQ ID NO: 4800993 - DNA, 25 bp, Homo sapien
tatcttcttttgcagcgttcttctt

SEQ ID NO: 4800994 - DNA, 25 bp, Homo sapien
tttcttgggagtcatctgcatttgc

SEQ ID NO: 4800995 - DNA, 25 bp, Homo sapien
catctgcatttgcattagtgaggaa

SEQ ID NO: 4800996 - DNA, 25 bp, Homo sapien
tccagctaggtggaacacattggca

SEQ ID NO: 4800997 - DNA, 25 bp, Homo sapien
tggcattgttgaggccaccacctgc

SEQ ID NO: 4800998 - DNA, 25 bp, Homo sapien
tggcctggagaatatgcatctgcat

SEQ ID NO: 4800999 - DNA, 25 bp, Homo sapien
gctaatgccacccaggaatccattc

SEQ ID NO: 4801000 - DNA, 25 bp, Homo sapien
catattaagagacacagtttggcct

SEQ ID NO: 4801001 - DNA, 25 bp, Homo sapien
aatgccacccaggaatccattccag

SEQ ID NO: 4801002 - DNA, 25 bp, Homo sapien
cgatgtaatagaccagaagtcggga

SEQ ID NO: 4801003 - DNA, 25 bp, Homo sapien
tctgttctcctgtgacgatgtaata

SEQ ID NO: 4801004 - DNA, 25 bp, Homo sapien
aagtcgggatgaaggaaccatgttc

SEQ ID NO: 4801005 - DNA, 25 bp, Homo sapien
aaatttctccctcgtgccaaagtgg

SEQ ID NO: 4801006 - DNA, 25 bp, Homo sapien
atgagtatgctattgctcggtaacc

SEQ ID NO: 4801007 - DNA, 25 bp, Homo sapien
caaagccttatggttatcagtccaa

SEQ ID NO: 4801008 - DNA, 25 bp, Homo sapien
ttttgtcaatatatgggcttttggg

SEQ ID NO: 4801009 - DNA, 25 bp, Homo sapien
ctcggtaaccttccctggcctgatt

SEQ ID NO: 4801010 - DNA, 25 bp, Homo sapien
cacgtgttacacttttgcttggatc

SEQ ID NO: 4801011 - DNA, 25 bp, Homo sapien
gaagctactccatcatcaacacgtg

SEQ ID NO: 4801012 - DNA, 25 bp, Homo sapien
caattgtttgtgcattcagtgttac

SEQ ID NO: 4801013 - DNA, 25 bp, Homo sapien
tccagatgggagattaagcacaaag

SEQ ID NO: 4801014 - DNA, 25 bp, Homo sapien
tttgatgccaggtatttctgcctct

SEQ ID NO: 4801015 - DNA, 25 bp, Homo sapien
agggagagaggacatatttgatgcc

SEQ ID NO: 4801016 - DNA, 25 bp, Homo sapien
caaccaaattcagtttgtagggaga

SEQ ID NO: 4801017 - DNA, 25 bp, Homo sapien
gaggagtagcaaccaaattcagttt

SEQ ID NO: 4801018 - DNA, 25 bp, Homo sapien
tgttacagcaatataaaggtacttg

SEQ ID NO: 4801019 - DNA, 25 bp, Homo sapien
cttctaaactgtagtatgacagttc

SEQ ID NO: 4801020 - DNA, 25 bp, Homo sapien
aatcaaatgtgacttgagcaattcc

SEQ ID NO: 4801021 - DNA, 25 bp, Homo sapien
tgtagactctatgactgttacagca

SEQ ID NO: 4801022 - DNA, 25 bp, Homo sapien
ttataggcctctcagcgtacttccg

SEQ ID NO: 4801023 - DNA, 25 bp, Homo sapien
tagaagggtcttgaacatcacatgg

SEQ ID NO: 4801024 - DNA, 25 bp, Homo sapien
taaccgagtccacgattaagcccag

SEQ ID NO: 4801025 - DNA, 25 bp, Homo sapien
ggtaatagctgacaaacacgacttc

SEQ ID NO: 4801026 - DNA, 25 bp, Homo sapien
tgtgatataaacgtcagcctcagtg

SEQ ID NO: 4801027 - DNA, 25 bp, Homo sapien
cttctcttattccaaatgtgatata

SEQ ID NO: 4801028 - DNA, 25 bp, Homo sapien
tccaaatgtgatataaacgtcagcc

SEQ ID NO: 4801029 - DNA, 25 bp, Homo sapien
aatgtgatataaacgtcagcctcag

SEQ ID NO: 4801030 - DNA, 25 bp, Homo sapien
ttctggctcgattgagacagaaaaa

SEQ ID NO: 4801031 - DNA, 25 bp, Homo sapien
tcttgtaaccaatgaaattatattc

SEQ ID NO: 4801032 - DNA, 25 bp, Homo sapien
agttcttgtaaccaatgaaattata

SEQ ID NO: 4801033 - DNA, 25 bp, Homo sapien
tgaaattatattctggctcgattga

SEQ ID NO: 4801034 - DNA, 25 bp, Homo sapien
taacttcaaaatatgcggttccagt

SEQ ID NO: 4801035 - DNA, 25 bp, Homo sapien
tatgcggttccagttgttgaaaagt

SEQ ID NO: 4801036 - DNA, 25 bp, Homo sapien
tagccttgatcgtccacataccata

SEQ ID NO: 4801037 - DNA, 25 bp, Homo sapien
tatatttagccttgatcgtccacat

SEQ ID NO: 4801038 - DNA, 25 bp, Homo sapien
cttcaccaaaagttccgtatgtggt

SEQ ID NO: 4801039 - DNA, 25 bp, Homo sapien
tcttcaccaaaagttccgtatgtgg

SEQ ID NO: 4801040 - DNA, 25 bp, Homo sapien
taggattagacggaatcttgaagtc

SEQ ID NO: 4801041 - DNA, 25 bp, Homo sapien
tttcttctaccatgtcaacttctga

SEQ ID NO: 4801042 - DNA, 25 bp, Homo sapien
tagacggaatcttgaagtcaggaaa

SEQ ID NO: 4801043 - DNA, 25 bp, Homo sapien
gaaaagagataattccaatatgatc

SEQ ID NO: 4801044 - DNA, 25 bp, Homo sapien
taaagagcatacatccacaccccta

SEQ ID NO: 4801045 - DNA, 25 bp, Homo sapien
ttctgcaggttatgccatgattctg

SEQ ID NO: 4801046 - DNA, 25 bp, Homo sapien
gattctgcatcacttaagttcaacc

SEQ ID NO: 4801047 - DNA, 25 bp, Homo sapien
taagttcaaccatgaagacgttgga

SEQ ID NO: 4801048 - DNA, 25 bp, Homo sapien
ttttggctggcttcaagtcgtcatt

SEQ ID NO: 4801049 - DNA, 25 bp, Homo sapien
tcaagtcgtcattcaacgaataaac

SEQ ID NO: 4801050 - DNA, 25 bp, Homo sapien
gctggcttcaagtcgtcattcaacg

SEQ ID NO: 4801051 - DNA, 25 bp, Homo sapien
ggcttcaagtcgtcattcaacgaat

SEQ ID NO: 4801052 - DNA, 25 bp, Homo sapien
ctgtaagaataattgatataatcaa

SEQ ID NO: 4801053 - DNA, 25 bp, Homo sapien
tgtaagaataattgatataatcaaa

SEQ ID NO: 4801054 - DNA, 25 bp, Homo sapien
aagaataattgatataatcaaaaac

SEQ ID NO: 4801055 - DNA, 25 bp, Homo sapien
gtaagaataattgatataatcaaaa

SEQ ID NO: 4801056 - DNA, 25 bp, Homo sapien
aatccattgtcataggttattggca

SEQ ID NO: 4801057 - DNA, 25 bp, Homo sapien
ataaacaggtttgtctgtatgaatg

SEQ ID NO: 4801058 - DNA, 25 bp, Homo sapien
gtctggagtataaacaggtttgtct

SEQ ID NO: 4801059 - DNA, 25 bp, Homo sapien
agaaatccattgtcataggttattg

SEQ ID NO: 4801060 - DNA, 25 bp, Homo sapien
gatacaacttccaaatacacataag

SEQ ID NO: 4801061 - DNA, 25 bp, Homo sapien
ttgatacaacttccaaatacacata

SEQ ID NO: 4801062 - DNA, 25 bp, Homo sapien
tgctttgatacaacttccaaataca

SEQ ID NO: 4801063 - DNA, 25 bp, Homo sapien
tacaacttccaaatacacataagaa

SEQ ID NO: 4801064 - DNA, 25 bp, Homo sapien
ttttgtcctccaggcaattgttttg

SEQ ID NO: 4801065 - DNA, 25 bp, Homo sapien
tttgtcctccaggcaattgttttgg

SEQ ID NO: 4801066 - DNA, 25 bp, Homo sapien
ggcatatgccataaaagtaacactt

SEQ ID NO: 4801067 - DNA, 25 bp, Homo sapien
taagttgcaagtatgtctctaagca

SEQ ID NO: 4801068 - DNA, 25 bp, Homo sapien
gcagagcccattttacgtctgatat

SEQ ID NO: 4801069 - DNA, 25 bp, Homo sapien
gatttttgtgggcaatgtactacag

SEQ ID NO: 4801070 - DNA, 25 bp, Homo sapien
tattttcagatgctccaacacggaa

SEQ ID NO: 4801071 - DNA, 25 bp, Homo sapien
ccaacacggaatatttttggtgctg

SEQ ID NO: 4801072 - DNA, 25 bp, Homo sapien
caaatgcttcagtgtatccataaac

SEQ ID NO: 4801073 - DNA, 25 bp, Homo sapien
gataaatgaacatggcctgaggagt

SEQ ID NO: 4801074 - DNA, 25 bp, Homo sapien
cactctgtgaggaactattactcca

SEQ ID NO: 4801075 - DNA, 25 bp, Homo sapien
tcaagtggcccaacaagcttggagg

SEQ ID NO: 4801076 - DNA, 25 bp, Homo sapien
gaaattttgccctgtgataaggcac

SEQ ID NO: 4801077 - DNA, 25 bp, Homo sapien
tagtgatcgactaattcaagtggcc

SEQ ID NO: 4801078 - DNA, 25 bp, Homo sapien
tgctcctgtccccaggttttcccca

SEQ ID NO: 4801079 - DNA, 25 bp, Homo sapien
caggaaaccacggatataacacttt

SEQ ID NO: 4801080 - DNA, 25 bp, Homo sapien
gaaaccacggatataacacttttga

SEQ ID NO: 4801081 - DNA, 25 bp, Homo sapien
cggatataacacttttgaggatagt

SEQ ID NO: 4801082 - DNA, 25 bp, Homo sapien
ccacggatataacacttttgaggat

SEQ ID NO: 4801083 - DNA, 25 bp, Homo sapien
acccaaataggtccttgctcctcgg

SEQ ID NO: 4801084 - DNA, 25 bp, Homo sapien
aaataggtccttgctcctcggtcat

SEQ ID NO: 4801085 - DNA, 25 bp, Homo sapien
ttcactaccaccacccaaataggtc

SEQ ID NO: 4801086 - DNA, 25 bp, Homo sapien
taccaccacccaaataggtccttgc

SEQ ID NO: 4801087 - DNA, 25 bp, Homo sapien
tcaggctgtcagtgccccggcttgc

SEQ ID NO: 4801088 - DNA, 25 bp, Homo sapien
tctgcaccttgtgagcccactggaa

SEQ ID NO: 4801089 - DNA, 25 bp, Homo sapien
aacaagttcctgttccaatggagaa

SEQ ID NO: 4801090 - DNA, 25 bp, Homo sapien
gattcccactaaacttctgcacctt

SEQ ID NO: 4801091 - DNA, 25 bp, Homo sapien
taataaatgcaggacaacaacagag

SEQ ID NO: 4801092 - DNA, 25 bp, Homo sapien
gcataggttgcatgctcatgaagcc

SEQ ID NO: 4801093 - DNA, 25 bp, Homo sapien
taacacaaggcaaggtattggcaga

SEQ ID NO: 4801094 - DNA, 25 bp, Homo sapien
gataacatcaagctgcttcccttgg

SEQ ID NO: 4801095 - DNA, 25 bp, Homo sapien
gatggtccccatttaacaggataaa

SEQ ID NO: 4801096 - DNA, 25 bp, Homo sapien
gagcaacctggaaaatttgacctgt

SEQ ID NO: 4801097 - DNA, 25 bp, Homo sapien
tttgcagcaatatccagaaaggtca

SEQ ID NO: 4801098 - DNA, 25 bp, Homo sapien
gaatctcaccagcattgacctatga

SEQ ID NO: 4801099 - DNA, 25 bp, Homo sapien
aatcatcccagtataaattagtata

SEQ ID NO: 4801100 - DNA, 25 bp, Homo sapien
aaatcatcccagtataaattagtat

SEQ ID NO: 4801101 - DNA, 25 bp, Homo sapien
tgaaatcatcccagtataaattagt

SEQ ID NO: 4801102 - DNA, 25 bp, Homo sapien
gaaatcatcccagtataaattagta

SEQ ID NO: 4801103 - DNA, 25 bp, Homo sapien
actgcattcgcagcttggttggtga

SEQ ID NO: 4801104 - DNA, 25 bp, Homo sapien
gcattcgcagcttggttggtgacag

SEQ ID NO: 4801105 - DNA, 25 bp, Homo sapien
ccactgcattcgcagcttggttggt

SEQ ID NO: 4801106 - DNA, 25 bp, Homo sapien
tgcattcgcagcttggttggtgaca

SEQ ID NO: 4801107 - DNA, 25 bp, Homo sapien
agctttgtctcagcgaaggccacag

SEQ ID NO: 4801108 - DNA, 25 bp, Homo sapien
tgcctcaggccgtcctcggacacag

SEQ ID NO: 4801109 - DNA, 25 bp, Homo sapien
gcagctgccgcatgaaacctcggct

SEQ ID NO: 4801110 - DNA, 25 bp, Homo sapien
tgagaagcgtgtccgtgtttcagag

SEQ ID NO: 4801111 - DNA, 25 bp, Homo sapien
gcaacgcaatccgaaggcgaaggca

SEQ ID NO: 4801112 - DNA, 25 bp, Homo sapien
ctgcaacgcaatccgaaggcgaagg

SEQ ID NO: 4801113 - DNA, 25 bp, Homo sapien
caacgcaatccgaaggcgaaggcac

SEQ ID NO: 4801114 - DNA, 25 bp, Homo sapien
tgcaacgcaatccgaaggcgaaggc

SEQ ID NO: 4801115 - DNA, 25 bp, Homo sapien
ccttccaacagtaccggagagggag

SEQ ID NO: 4801116 - DNA, 25 bp, Homo sapien
cctgaggaaagagcccgaacttctc

SEQ ID NO: 4801117 - DNA, 25 bp, Homo sapien
gcgtggctgagactagccccgacca

SEQ ID NO: 4801118 - DNA, 25 bp, Homo sapien
tcctagcgcgctggctgcaaaagag

SEQ ID NO: 4801119 - DNA, 25 bp, Homo sapien
ggccggcttgggatggattcggggc

SEQ ID NO: 4801120 - DNA, 25 bp, Homo sapien
gccggcttgggatggattcggggcg

SEQ ID NO: 4801121 - DNA, 25 bp, Homo sapien
gtgggccggcttgggatggattcgg

SEQ ID NO: 4801122 - DNA, 25 bp, Homo sapien
ggtgtgggccggcttgggatggatt

SEQ ID NO: 4801123 - DNA, 25 bp, Homo sapien
agttatattattgacagtgctcagg

SEQ ID NO: 4801124 - DNA, 25 bp, Homo sapien
tatctttcagctcctaggcatgtag

SEQ ID NO: 4801125 - DNA, 25 bp, Homo sapien
gccagatgaacaacttagaaatgat

SEQ ID NO: 4801126 - DNA, 25 bp, Homo sapien
gaaagcccttacattggcaaatcca

SEQ ID NO: 4801127 - DNA, 25 bp, Homo sapien
gaattctggcccaactccgagagtt

SEQ ID NO: 4801128 - DNA, 25 bp, Homo sapien
tgaacctgacctaggtgggacctgg

SEQ ID NO: 4801129 - DNA, 25 bp, Homo sapien
ggatgcatgtcattgaatcaagaag

SEQ ID NO: 4801130 - DNA, 25 bp, Homo sapien
tgcccactggcaactaggtcagctg

SEQ ID NO: 4801131 - DNA, 25 bp, Homo sapien
tgaacactggcgtggagaagcactc

SEQ ID NO: 4801132 - DNA, 25 bp, Homo sapien
gcaatgaggacacttaaatctgagg

SEQ ID NO: 4801133 - DNA, 25 bp, Homo sapien
agcactccgggagaaactgcgtcac

SEQ ID NO: 4801134 - DNA, 25 bp, Homo sapien
tctgggttcgtaggattgaccacct

SEQ ID NO: 4801135 - DNA, 25 bp, Homo sapien
aatacataatcaggagacactccag

SEQ ID NO: 4801136 - DNA, 25 bp, Homo sapien
tgctatagtattgagtggagccctg

SEQ ID NO: 4801137 - DNA, 25 bp, Homo sapien
tagccagaggtagaacattcccatc

SEQ ID NO: 4801138 - DNA, 25 bp, Homo sapien
gacagcgctgctatagactttgaga

SEQ ID NO: 4801139 - DNA, 25 bp, Homo sapien
tgcctgtaccattaatgccaatgtt

SEQ ID NO: 4801140 - DNA, 25 bp, Homo sapien
tttaaaccaacatgtggctgagcct

SEQ ID NO: 4801141 - DNA, 25 bp, Homo sapien
gcatatttgaacctacaaactggta

SEQ ID NO: 4801142 - DNA, 25 bp, Homo sapien
catagtacatatgggaatagttgca

SEQ ID NO: 4801143 - DNA, 25 bp, Homo sapien
tttccaaagtgtactgcccggtgtc

SEQ ID NO: 4801144 - DNA, 25 bp, Homo sapien
ggtccaagggcaatgagcaacctca

SEQ ID NO: 4801145 - DNA, 25 bp, Homo sapien
gatagaatctggctcccggtacagt

SEQ ID NO: 4801146 - DNA, 25 bp, Homo sapien
ccggtacagtcaaaggagaacagca

SEQ ID NO: 4801147 - DNA, 25 bp, Homo sapien
ggtattgcacctcaacaagccgcag

SEQ ID NO: 4801148 - DNA, 25 bp, Homo sapien
gaatccacaaattaaccaaagccta

SEQ ID NO: 4801149 - DNA, 25 bp, Homo sapien
cccttgtgatgcaacagtgtaagca

SEQ ID NO: 4801150 - DNA, 25 bp, Homo sapien
caagccgcagtctttagtttgtgat

SEQ ID NO: 4801151 - DNA, 25 bp, Homo sapien
gaaaagcaggttagcacattgtcga

SEQ ID NO: 4801152 - DNA, 25 bp, Homo sapien
tatacagtaaggcaagaatgcagcc

SEQ ID NO: 4801153 - DNA, 25 bp, Homo sapien
tgtgcaatagtaaacccagcctttt

SEQ ID NO: 4801154 - DNA, 25 bp, Homo sapien
ttcagtggccaaaccacctggtgca

SEQ ID NO: 4801155 - DNA, 25 bp, Homo sapien
aaagtctagatttaccatgcaggag

SEQ ID NO: 4801156 - DNA, 25 bp, Homo sapien
gacatacttatcacgaggacaaggg

SEQ ID NO: 4801157 - DNA, 25 bp, Homo sapien
gagacaaagccttgccaaagggagg

SEQ ID NO: 4801158 - DNA, 25 bp, Homo sapien
tattttccctgtgtgaggctaagac

SEQ ID NO: 4801159 - DNA, 25 bp, Homo sapien
agcagcattcagatccaagcttcca

SEQ ID NO: 4801160 - DNA, 25 bp, Homo sapien
gttcactggttagccggcctccctg

SEQ ID NO: 4801161 - DNA, 25 bp, Homo sapien
tggggttcactggttagccggcctc

SEQ ID NO: 4801162 - DNA, 25 bp, Homo sapien
ttgtgttgtacaccagactcagcag

SEQ ID NO: 4801163 - DNA, 25 bp, Homo sapien
gcactcgcttcgaggaacaataagc

SEQ ID NO: 4801164 - DNA, 25 bp, Homo sapien
tttttgcactcgcttcgaggaacaa

SEQ ID NO: 4801165 - DNA, 25 bp, Homo sapien
tttgcactcgcttcgaggaacaata

SEQ ID NO: 4801166 - DNA, 25 bp, Homo sapien
tgcactcgcttcgaggaacaataag

SEQ ID NO: 4801167 - DNA, 25 bp, Homo sapien
cccaattgtgaccattaagtcttaa

SEQ ID NO: 4801168 - DNA, 25 bp, Homo sapien
accaacaaaactgtcaagcccacct

SEQ ID NO: 4801169 - DNA, 25 bp, Homo sapien
caaaactgtcaagcccacctttcct

SEQ ID NO: 4801170 - DNA, 25 bp, Homo sapien
taaaaattctcccaattgtgaccat

SEQ ID NO: 4801171 - DNA, 25 bp, Homo sapien
cttcatatgtaacatctctctgtgc

SEQ ID NO: 4801172 - DNA, 25 bp, Homo sapien
tcatatgtaacatctctctgtgcct

SEQ ID NO: 4801173 - DNA, 25 bp, Homo sapien
ttcatatgtaacatctctctgtgcc

SEQ ID NO: 4801174 - DNA, 25 bp, Homo sapien
agaaatactgccctgctcctgattc

SEQ ID NO: 4801175 - DNA, 25 bp, Homo sapien
tcaaaacaagaaatactgccctgct

SEQ ID NO: 4801176 - DNA, 25 bp, Homo sapien
cctgctcctgattccctatgaatct

SEQ ID NO: 4801177 - DNA, 25 bp, Homo sapien
acaagaaatactgccctgctcctga

SEQ ID NO: 4801178 - DNA, 25 bp, Homo sapien
gataacacagttcttgaaggaggcc

SEQ ID NO: 4801179 - DNA, 25 bp, Homo sapien
tctgggctactggaaataaagctgc

SEQ ID NO: 4801180 - DNA, 25 bp, Homo sapien
gaaggaggcctctaccaaatgttgg

SEQ ID NO: 4801181 - DNA, 25 bp, Homo sapien
gaaagtttcaggcacagtccctagc

SEQ ID NO: 4801182 - DNA, 25 bp, Homo sapien
gcttaagtggttatatgtacttctt

SEQ ID NO: 4801183 - DNA, 25 bp, Homo sapien
catctgtcaaccagctgcttaagtg

SEQ ID NO: 4801184 - DNA, 25 bp, Homo sapien
atttggattggtgagattccttgca

SEQ ID NO: 4801185 - DNA, 25 bp, Homo sapien
tttggattggtgagattccttgcat

SEQ ID NO: 4801186 - DNA, 25 bp, Homo sapien
caagtccccagatatcagtgaaaaa

SEQ ID NO: 4801187 - DNA, 25 bp, Homo sapien
catttgacaagaattcaagtcccca

SEQ ID NO: 4801188 - DNA, 25 bp, Homo sapien
caagtcacactattataagctggca

SEQ ID NO: 4801189 - DNA, 25 bp, Homo sapien
tattctggaattctaactgcccaag

SEQ ID NO: 4801190 - DNA, 25 bp, Homo sapien
tggccactaacttcgattattcttg

SEQ ID NO: 4801191 - DNA, 25 bp, Homo sapien
tatcatagaccataagagctcccgc

SEQ ID NO: 4801192 - DNA, 25 bp, Homo sapien
gtgtaacagccctaaatcgctcctg

SEQ ID NO: 4801193 - DNA, 25 bp, Homo sapien
gcagctcctctgtagtagctccgtg

SEQ ID NO: 4801194 - DNA, 25 bp, Homo sapien
ctgtaaattgatgaagcaagcaaga

SEQ ID NO: 4801195 - DNA, 25 bp, Homo sapien
caagcaagattttcctactcccatg

SEQ ID NO: 4801196 - DNA, 25 bp, Homo sapien
gcaagattttcctactcccatgtcc

SEQ ID NO: 4801197 - DNA, 25 bp, Homo sapien
tgaagcaagcaagattttcctactc

SEQ ID NO: 4801198 - DNA, 25 bp, Homo sapien
cctgaagtggtactgtttaagtatt

SEQ ID NO: 4801199 - DNA, 25 bp, Homo sapien
cactcagtcctgaagtggtactgtt

SEQ ID NO: 4801200 - DNA, 25 bp, Homo sapien
cagtcctgaagtggtactgtttaag

SEQ ID NO: 4801201 - DNA, 25 bp, Homo sapien
atcactcagtcctgaagtggtactg

SEQ ID NO: 4801202 - DNA, 25 bp, Homo sapien
taagagtagttgtatggtgcagttg

SEQ ID NO: 4801203 - DNA, 25 bp, Homo sapien
gatgtaagagtagttgtatggtgca

SEQ ID NO: 4801204 - DNA, 25 bp, Homo sapien
taaagatgtaagagtagttgtatgg

SEQ ID NO: 4801205 - DNA, 25 bp, Homo sapien
gagtagttgtatggtgcagttgcca

SEQ ID NO: 4801206 - DNA, 25 bp, Homo sapien
cacattctcatgtgctatccacaga

SEQ ID NO: 4801207 - DNA, 25 bp, Homo sapien
gatgactgatatcctttaaaggtag

SEQ ID NO: 4801208 - DNA, 25 bp, Homo sapien
aacaaatgttggttacagtaagtca

SEQ ID NO: 4801209 - DNA, 25 bp, Homo sapien
tacaagtaattcaaacggatgactg

SEQ ID NO: 4801210 - DNA, 25 bp, Homo sapien
ggtttcctgtcaccctcgcaatggg

SEQ ID NO: 4801211 - DNA, 25 bp, Homo sapien
tcttcctcgggctggtccaagatgg

SEQ ID NO: 4801212 - DNA, 25 bp, Homo sapien
agcggtgactgctcctgtgctccct

SEQ ID NO: 4801213 - DNA, 25 bp, Homo sapien
caatgggccggaccacaaaagaagg

SEQ ID NO: 4801214 - DNA, 25 bp, Homo sapien
ggtgtgcaggttgtttgtcacctgc

SEQ ID NO: 4801215 - DNA, 25 bp, Homo sapien
ggaagatgcctggaatcctccaggt

SEQ ID NO: 4801216 - DNA, 25 bp, Homo sapien
aggtgtgcaggttgtttgtcacctg

SEQ ID NO: 4801217 - DNA, 25 bp, Homo sapien
caggtgtgcaggttgtttgtcacct

SEQ ID NO: 4801218 - DNA, 25 bp, Homo sapien
gcttacaatacagccttcaaggttg

SEQ ID NO: 4801219 - DNA, 25 bp, Homo sapien
aatccccagagcatggtatctgcga

SEQ ID NO: 4801220 - DNA, 25 bp, Homo sapien
tgggcattgcttcagtacagattag

SEQ ID NO: 4801221 - DNA, 25 bp, Homo sapien
tctgtaaaataggtatggtggtccc

SEQ ID NO: 4801222 - DNA, 25 bp, Homo sapien
cctcctactccctgattcaagcaat

SEQ ID NO: 4801223 - DNA, 25 bp, Homo sapien
aacctcctactccctgattcaagca

SEQ ID NO: 4801224 - DNA, 25 bp, Homo sapien
actacaggtgcgcaccaccacgcct

SEQ ID NO: 4801225 - DNA, 25 bp, Homo sapien
tacaggtgcgcaccaccacgcctgg

SEQ ID NO: 4801226 - DNA, 25 bp, Homo sapien
catttttgtgttcattctttcaagt

SEQ ID NO: 4801227 - DNA, 25 bp, Homo sapien
ctctgccatgatatcctttgtaaac

SEQ ID NO: 4801228 - DNA, 25 bp, Homo sapien
ctgccatgatatcctttgtaaacat

SEQ ID NO: 4801229 - DNA, 25 bp, Homo sapien
gccatgatatcctttgtaaacattt

SEQ ID NO: 4801230 - DNA, 25 bp, Homo sapien
ttgggtgcgttgtctgcatgcacag

SEQ ID NO: 4801231 - DNA, 25 bp, Homo sapien
ggttgcgttactgttcccctgattc

SEQ ID NO: 4801232 - DNA, 25 bp, Homo sapien
tgctggcagggttgcgttactgttc

SEQ ID NO: 4801233 - DNA, 25 bp, Homo sapien
tcttccctttgggtgcgttgtctgc

SEQ ID NO: 4801234 - DNA, 25 bp, Homo sapien
tagagctgtcattatgatctttgtg

SEQ ID NO: 4801235 - DNA, 25 bp, Homo sapien
ctaggcacggctgttagagctgtca

SEQ ID NO: 4801236 - DNA, 25 bp, Homo sapien
ggcacggctgttagagctgtcatta

SEQ ID NO: 4801237 - DNA, 25 bp, Homo sapien
taggcacggctgttagagctgtcat

SEQ ID NO: 4801238 - DNA, 25 bp, Homo sapien
gatggttagtgggtaggaattctcc

SEQ ID NO: 4801239 - DNA, 25 bp, Homo sapien
ggctttagcaatctcgcacccatgg

SEQ ID NO: 4801240 - DNA, 25 bp, Homo sapien
cccgaatccgagtttggctttagca

SEQ ID NO: 4801241 - DNA, 25 bp, Homo sapien
ggaattctccaagttctctcgcaag

SEQ ID NO: 4801242 - DNA, 25 bp, Homo sapien
tgtccagtggacaatatcagcgtct

SEQ ID NO: 4801243 - DNA, 25 bp, Homo sapien
taagtgtaacctgtgaagcctcatc

SEQ ID NO: 4801244 - DNA, 25 bp, Homo sapien
gctggtccgaatcatgtcctctggg

SEQ ID NO: 4801245 - DNA, 25 bp, Homo sapien
tctttgtgtagtaacccagcagcag

SEQ ID NO: 4801246 - DNA, 25 bp, Homo sapien
gaaccatttactgtcagcctgagaa

SEQ ID NO: 4801247 - DNA, 25 bp, Homo sapien
ggactgagctgcatactccacgatg

SEQ ID NO: 4801248 - DNA, 25 bp, Homo sapien
tctggttttgggtaccgtgactcca

SEQ ID NO: 4801249 - DNA, 25 bp, Homo sapien
tagtggcgaagaacggtgaagatcc

SEQ ID NO: 4801250 - DNA, 25 bp, Homo sapien
ttctggctgacccaaaaggaggcag

SEQ ID NO: 4801251 - DNA, 25 bp, Homo sapien
tagggacaggtttcatctggagcag

SEQ ID NO: 4801252 - DNA, 25 bp, Homo sapien
taccagcaggtacaaggcataagaa

SEQ ID NO: 4801253 - DNA, 25 bp, Homo sapien
caagtactgattgtgtgacccctgg

SEQ ID NO: 4801254 - DNA, 25 bp, Homo sapien
tattctgtagaagagcagagtcccc

SEQ ID NO: 4801255 - DNA, 25 bp, Homo sapien
cacagtggattcagtgggagtccct

SEQ ID NO: 4801256 - DNA, 25 bp, Homo sapien
tcctaataaggctcagagtgcgtct

SEQ ID NO: 4801257 - DNA, 25 bp, Homo sapien
cagagtccccataaagaggaggtgc

SEQ ID NO: 4801258 - DNA, 25 bp, Homo sapien
caaagggctttgtgaccagtgagac

SEQ ID NO: 4801259 - DNA, 25 bp, Homo sapien
tgactatcagattcacaggtgacct

SEQ ID NO: 4801260 - DNA, 25 bp, Homo sapien
cccaacgagcttgtagatgccaaag

SEQ ID NO: 4801261 - DNA, 25 bp, Homo sapien
gagacaggaaggatcactactaggg

SEQ ID NO: 4801262 - DNA, 25 bp, Homo sapien
gaaccttggttcaatcagggaggcc

SEQ ID NO: 4801263 - DNA, 25 bp, Homo sapien
gaggtagccctagtgctgccctaat

SEQ ID NO: 4801264 - DNA, 25 bp, Homo sapien
catcagcggctatccaaaggttctg

SEQ ID NO: 4801265 - DNA, 25 bp, Homo sapien
cctttgagactgagccctgataact

SEQ ID NO: 4801266 - DNA, 25 bp, Homo sapien
caagacggagacagtggaagttaac

SEQ ID NO: 4801267 - DNA, 25 bp, Homo sapien
tgagatccactctaatccaagacgg

SEQ ID NO: 4801268 - DNA, 25 bp, Homo sapien
tagacctctgggaaccattggaagt

SEQ ID NO: 4801269 - DNA, 25 bp, Homo sapien
gaagttaacgcccagagtgctctgt

SEQ ID NO: 4801270 - DNA, 25 bp, Homo sapien
caggcttggccgctggaagagccca

SEQ ID NO: 4801271 - DNA, 25 bp, Homo sapien
accgtaggcacaggcttggccgctg

SEQ ID NO: 4801272 - DNA, 25 bp, Homo sapien
caggcaagaaggcaccgtaggcaca

SEQ ID NO: 4801273 - DNA, 25 bp, Homo sapien
ttggccgctggaagagcccactgcg

SEQ ID NO: 4801274 - DNA, 25 bp, Homo sapien
tcagaacaattagtccatggcaggc

SEQ ID NO: 4801275 - DNA, 25 bp, Homo sapien
cacaaggctggtacagcatggccag

SEQ ID NO: 4801276 - DNA, 25 bp, Homo sapien
tccatgttgtaatctgcccctcagg

SEQ ID NO: 4801277 - DNA, 25 bp, Homo sapien
gaaacatcaccgtagccctgacttg

SEQ ID NO: 4801278 - DNA, 25 bp, Homo sapien
ctgtctgatgagagctgatcttcat

SEQ ID NO: 4801279 - DNA, 25 bp, Homo sapien
agagaggttgtgtcccttgctcagc

SEQ ID NO: 4801280 - DNA, 25 bp, Homo sapien
caaagacacagaggtagagggctag

SEQ ID NO: 4801281 - DNA, 25 bp, Homo sapien
tctggacacatgctgtaggtcatct

SEQ ID NO: 4801282 - DNA, 25 bp, Homo sapien
tatcaagttctggtgagtccgtgag

SEQ ID NO: 4801283 - DNA, 25 bp, Homo sapien
tttgtctttctcagggagttctccc

SEQ ID NO: 4801284 - DNA, 25 bp, Homo sapien
ctcagggagttctccctgcagagtg

SEQ ID NO: 4801285 - DNA, 25 bp, Homo sapien
ctgcccccttttgtctttctcaggg

SEQ ID NO: 4801286 - DNA, 25 bp, Homo sapien
tccctgcagagtgcctttgcggggc

SEQ ID NO: 4801287 - DNA, 25 bp, Homo sapien
tcattgtccccatcgggaaggtggt

SEQ ID NO: 4801288 - DNA, 25 bp, Homo sapien
cctgaagggttcttggacatgggcc

SEQ ID NO: 4801289 - DNA, 25 bp, Homo sapien
ccctggccagatgcacaaacttgtt

SEQ ID NO: 4801290 - DNA, 25 bp, Homo sapien
tcttttagcatccttgagtcccagg

SEQ ID NO: 4801291 - DNA, 25 bp, Homo sapien
tatatgtgcttattctgtaccaagc

SEQ ID NO: 4801292 - DNA, 25 bp, Homo sapien
tccacgatcacataacagaaggttg

SEQ ID NO: 4801293 - DNA, 25 bp, Homo sapien
tgctaagccccaaatgttctttacc

SEQ ID NO: 4801294 - DNA, 25 bp, Homo sapien
caaagccacactgctaataagtgat

SEQ ID NO: 4801295 - DNA, 25 bp, Homo sapien
ctgtgcgtcacatcctgggcttcct

SEQ ID NO: 4801296 - DNA, 25 bp, Homo sapien
ttttggcgagctcctgtgcgtcaca

SEQ ID NO: 4801297 - DNA, 25 bp, Homo sapien
aaactgaggtctggattgcagaagc

SEQ ID NO: 4801298 - DNA, 25 bp, Homo sapien
cagattcgcaaacctgtccacaggg

SEQ ID NO: 4801299 - DNA, 25 bp, Homo sapien
gcaccgtgaggtccagggcttcgag

SEQ ID NO: 4801300 - DNA, 25 bp, Homo sapien
aacggccgggccgtgcagcaccgtg

SEQ ID NO: 4801301 - DNA, 25 bp, Homo sapien
ccgggccgtgcagcaccgtgaggtc

SEQ ID NO: 4801302 - DNA, 25 bp, Homo sapien
agggcttcgagtcggccaccttcct

SEQ ID NO: 4801303 - DNA, 25 bp, Homo sapien
cttgatggattacacagagcgaaca

SEQ ID NO: 4801304 - DNA, 25 bp, Homo sapien
cttttggtggacatacgaacgtact

SEQ ID NO: 4801305 - DNA, 25 bp, Homo sapien
tgaactttatagacacggaaccttg

SEQ ID NO: 4801306 - DNA, 25 bp, Homo sapien
gcgaacacactcacgtaacactgga

SEQ ID NO: 4801307 - DNA, 25 bp, Homo sapien
caatcggtatgaaagactgaaggcc

SEQ ID NO: 4801308 - DNA, 25 bp, Homo sapien
gcactgagcccgaggcgatgctcca

SEQ ID NO: 4801309 - DNA, 25 bp, Homo sapien
accagtggtgtggttccaacagcaa

SEQ ID NO: 4801310 - DNA, 25 bp, Homo sapien
tgtccaagggcatccgggacaacga

SEQ ID NO: 4801311 - DNA, 25 bp, Homo sapien
tgtccgtctccctcgtggctgatga

SEQ ID NO: 4801312 - DNA, 25 bp, Homo sapien
tgttacccctgcgtgtaggtcagca

SEQ ID NO: 4801313 - DNA, 25 bp, Homo sapien
ctaaatgtgtgcgagaggaagccca

SEQ ID NO: 4801314 - DNA, 25 bp, Homo sapien
ggaagcccaggtgttactctacagg

SEQ ID NO: 4801315 - DNA, 25 bp, Homo sapien
tctgctttcccctcgggaggcgagt

SEQ ID NO: 4801316 - DNA, 25 bp, Homo sapien
agcctcaagccaatagtggtcctgg

SEQ ID NO: 4801317 - DNA, 25 bp, Homo sapien
acatccccacggctgaaggacaaga

SEQ ID NO: 4801318 - DNA, 25 bp, Homo sapien
ggagctaatggtcctcatcccgcaa

SEQ ID NO: 4801319 - DNA, 25 bp, Homo sapien
agaagaagaaaagacagaagccttg

SEQ ID NO: 4801320 - DNA, 25 bp, Homo sapien
aagaagaaaagacagaagccttgac

SEQ ID NO: 4801321 - DNA, 25 bp, Homo sapien
gaagaaaagacagaagccttgactt

SEQ ID NO: 4801322 - DNA, 25 bp, Homo sapien
gaaaggattctcaagaagaagaaaa

SEQ ID NO: 4801323 - DNA, 25 bp, Homo sapien
atcaccgtggtgaagcaaggctttg

SEQ ID NO: 4801324 - DNA, 25 bp, Homo sapien
gtctgtggaccccttggacagggcc

SEQ ID NO: 4801325 - DNA, 25 bp, Homo sapien
catgtcaccggtcagtgccttttgg

SEQ ID NO: 4801326 - DNA, 25 bp, Homo sapien
aaagaggccttagagcgagcagagc

SEQ ID NO: 4801327 - DNA, 25 bp, Homo sapien
tctgaaaacggaaatccacagacat

SEQ ID NO: 4801328 - DNA, 25 bp, Homo sapien
tccacagacattcaatacaggccga

SEQ ID NO: 4801329 - DNA, 25 bp, Homo sapien
gaaatccacagacattcaatacagg

SEQ ID NO: 4801330 - DNA, 25 bp, Homo sapien
gacattcaatacaggccgaaacaga

SEQ ID NO: 4801331 - DNA, 25 bp, Homo sapien
tttattatgtacattgttggaaagg

SEQ ID NO: 4801332 - DNA, 25 bp, Homo sapien
actttattatgtacattgttggaaa

SEQ ID NO: 4801333 - DNA, 25 bp, Homo sapien
ctttattatgtacattgttggaaag

SEQ ID NO: 4801334 - DNA, 25 bp, Homo sapien
gatacatggtagttcaaggcttcct

SEQ ID NO: 4801335 - DNA, 25 bp, Homo sapien
tggactacgaattcacaaggcagaa

SEQ ID NO: 4801336 - DNA, 25 bp, Homo sapien
gaactcaaggaaccaaaagcactgt

SEQ ID NO: 4801337 - DNA, 25 bp, Homo sapien
gagaaacttctgcactggcactgtg

SEQ ID NO: 4801338 - DNA, 25 bp, Homo sapien
tgtcaggtggcagttacagcccagg

SEQ ID NO: 4801339 - DNA, 25 bp, Homo sapien
catttagccagtcagcggtgtcagg

SEQ ID NO: 4801340 - DNA, 25 bp, Homo sapien
ttaagactctccaaaccaggtgtgg

SEQ ID NO: 4801341 - DNA, 25 bp, Homo sapien
gactctctggaggtaaggcacatat

SEQ ID NO: 4801342 - DNA, 25 bp, Homo sapien
ttgcagcatatctatgggcagaggg

SEQ ID NO: 4801343 - DNA, 25 bp, Homo sapien
agatggctgtgttttgcccctatga

SEQ ID NO: 4801344 - DNA, 25 bp, Homo sapien
tttgcccctatgattccttgcagca

SEQ ID NO: 4801345 - DNA, 25 bp, Homo sapien
cagcatatctatgggcagagggaag

SEQ ID NO: 4801346 - DNA, 25 bp, Homo sapien
tgtctgcaggtatcggagctgaagg

SEQ ID NO: 4801347 - DNA, 25 bp, Homo sapien
tctgcaggtatcggagctgaagggc

SEQ ID NO: 4801348 - DNA, 25 bp, Homo sapien
cagtgtctgcaggtatcggagctga

SEQ ID NO: 4801349 - DNA, 25 bp, Homo sapien
agtgtctgcaggtatcggagctgaa

SEQ ID NO: 4801350 - DNA, 25 bp, Homo sapien
tacacaatcgcttggctgagaagcc

SEQ ID NO: 4801351 - DNA, 25 bp, Homo sapien
taaatacaggccaagtacactccgt

SEQ ID NO: 4801352 - DNA, 25 bp, Homo sapien
cactccgttgataggatcttagaga

SEQ ID NO: 4801353 - DNA, 25 bp, Homo sapien
gatgtaaacaacaccaccggctttg

SEQ ID NO: 4801354 - DNA, 25 bp, Homo sapien
ggccaagtctaagctcagaggaaaa

SEQ ID NO: 4801355 - DNA, 25 bp, Homo sapien
tctaagcagttgagggttgttaccc

SEQ ID NO: 4801356 - DNA, 25 bp, Homo sapien
cctttgggctctgacattctacgta

SEQ ID NO: 4801357 - DNA, 25 bp, Homo sapien
gataatctctgaggatcctttgggc

SEQ ID NO: 4801358 - DNA, 25 bp, Homo sapien
tgaaaaaagcagagcgcagaacaac

SEQ ID NO: 4801359 - DNA, 25 bp, Homo sapien
tgaccttaatatggaatcgggagaa

SEQ ID NO: 4801360 - DNA, 25 bp, Homo sapien
tgacccacttgctccgaagttggaa

SEQ ID NO: 4801361 - DNA, 25 bp, Homo sapien
tcgggagaataagtatggtacacac

SEQ ID NO: 4801362 - DNA, 25 bp, Homo sapien
tctggagctgcacaggtagtttcac

SEQ ID NO: 4801363 - DNA, 25 bp, Homo sapien
gcttctgcagccatagctctctgga

SEQ ID NO: 4801364 - DNA, 25 bp, Homo sapien
gtttcacatccttaatttccacacg

SEQ ID NO: 4801365 - DNA, 25 bp, Homo sapien
tgcttctgcagccatagctctctgg

SEQ ID NO: 4801366 - DNA, 25 bp, Homo sapien
ggctatactccagtcaaactttact

SEQ ID NO: 4801367 - DNA, 25 bp, Homo sapien
tcctccctttagaatgtcaggaatg

SEQ ID NO: 4801368 - DNA, 25 bp, Homo sapien
tacaatcatagattttacccacgat

SEQ ID NO: 4801369 - DNA, 25 bp, Homo sapien
tgtctcaactatttaacccagctgt

SEQ ID NO: 4801370 - DNA, 25 bp, Homo sapien
caaaagacgggttgctgagtcagcg

SEQ ID NO: 4801371 - DNA, 25 bp, Homo sapien
ttctgaacgcggtaatagaccacac

SEQ ID NO: 4801372 - DNA, 25 bp, Homo sapien
acagccagggttgcattctgaacgc

SEQ ID NO: 4801373 - DNA, 25 bp, Homo sapien
cattcctcagagtagtttgtgccaa

SEQ ID NO: 4801374 - DNA, 25 bp, Homo sapien
taacatggctgtttagccctgccag

SEQ ID NO: 4801375 - DNA, 25 bp, Homo sapien
tgagaacagtgaccgatgaggaaca

SEQ ID NO: 4801376 - DNA, 25 bp, Homo sapien
tgtgagatggcgctaataatactgc

SEQ ID NO: 4801377 - DNA, 25 bp, Homo sapien
taggagacctgaactgagtcccatc

SEQ ID NO: 4801378 - DNA, 25 bp, Homo sapien
actttgatgaagctgtcagtgcatg

SEQ ID NO: 4801379 - DNA, 25 bp, Homo sapien
ctcctgaggaggaatatcaaatgaa

SEQ ID NO: 4801380 - DNA, 25 bp, Homo sapien
cagtgcatggcagaataaaaaacaa

SEQ ID NO: 4801381 - DNA, 25 bp, Homo sapien
gaaatagttctcatgtccactttga

SEQ ID NO: 4801382 - DNA, 25 bp, Homo sapien
tgtaaaatgcgacccaatctaaaga

SEQ ID NO: 4801383 - DNA, 25 bp, Homo sapien
aatgcgacccaatctaaagatgatg

SEQ ID NO: 4801384 - DNA, 25 bp, Homo sapien
gcgacccaatctaaagatgatggct

SEQ ID NO: 4801385 - DNA, 25 bp, Homo sapien
cctccttgtaaaatgcgacccaatc

SEQ ID NO: 4801386 - DNA, 25 bp, Homo sapien
cactgtataaatttaggaaggacag

SEQ ID NO: 4801387 - DNA, 25 bp, Homo sapien
ccaatgtttaccttctcaaagctta

SEQ ID NO: 4801388 - DNA, 25 bp, Homo sapien
gatcatatctataaatcacatgtcc

SEQ ID NO: 4801389 - DNA, 25 bp, Homo sapien
ggaaggacagaatagtatacagaaa

SEQ ID NO: 4801390 - DNA, 25 bp, Homo sapien
aggagttgaccccttcccagaagtg

SEQ ID NO: 4801391 - DNA, 25 bp, Homo sapien
ccttcccagaagtgaatgaaatgtt

SEQ ID NO: 4801392 - DNA, 25 bp, Homo sapien
aggcacacacgaagtaggtttatgg

SEQ ID NO: 4801393 - DNA, 25 bp, Homo sapien
cacacgaagtaggtttatggaggta

SEQ ID NO: 4801394 - DNA, 25 bp, Homo sapien
tccatattgagattgggaaagttat

SEQ ID NO: 4801395 - DNA, 25 bp, Homo sapien
aataagaatgagaacgccaccaaaa

SEQ ID NO: 4801396 - DNA, 25 bp, Homo sapien
gaatgagaacgccaccaaaatccat

SEQ ID NO: 4801397 - DNA, 25 bp, Homo sapien
tgagattgggaaagttataacggtg

SEQ ID NO: 4801398 - DNA, 25 bp, Homo sapien
ccgcaaggtccaaggcccttactgg

SEQ ID NO: 4801399 - DNA, 25 bp, Homo sapien
aggtccaaggcccttactggggctg

SEQ ID NO: 4801400 - DNA, 25 bp, Homo sapien
cgcaaggtccaaggcccttactggg

SEQ ID NO: 4801401 - DNA, 25 bp, Homo sapien
agtaaagattattaggctggccttg

SEQ ID NO: 4801402 - DNA, 25 bp, Homo sapien
catttatatcccttattacactgag

SEQ ID NO: 4801403 - DNA, 25 bp, Homo sapien
agttgcatgatctttacctctttga

SEQ ID NO: 4801404 - DNA, 25 bp, Homo sapien
tacactgagattccctgagaacgag

SEQ ID NO: 4801405 - DNA, 25 bp, Homo sapien
cacttgtgggtattttgctggttga

SEQ ID NO: 4801406 - DNA, 25 bp, Homo sapien
tcctaaaaattagggatcctatgat

SEQ ID NO: 4801407 - DNA, 25 bp, Homo sapien
tttgccatagtttagagcaatggtc

SEQ ID NO: 4801408 - DNA, 25 bp, Homo sapien
tacttggttgtaaatactactttgc

SEQ ID NO: 4801409 - DNA, 25 bp, Homo sapien
tatctctggatgttttttgccttga

SEQ ID NO: 4801410 - DNA, 25 bp, Homo sapien
tttaactaatcaaagaagggtctga

SEQ ID NO: 4801411 - DNA, 25 bp, Homo sapien
tcaagttgggcttacctccaggaaa

SEQ ID NO: 4801412 - DNA, 25 bp, Homo sapien
tctgaatatggacataagcctgtac

SEQ ID NO: 4801413 - DNA, 25 bp, Homo sapien
tgcttatttcctgtgtaagttaatt

SEQ ID NO: 4801414 - DNA, 25 bp, Homo sapien
ctgcttatttcctgtgtaagttaat

SEQ ID NO: 4801415 - DNA, 25 bp, Homo sapien
aaaagactgcctctcacataagaca

SEQ ID NO: 4801416 - DNA, 25 bp, Homo sapien
tatgtaaagggcttgacacttagga

SEQ ID NO: 4801417 - DNA, 25 bp, Homo sapien
gaacatggcccatgtctggaagcac

SEQ ID NO: 4801418 - DNA, 25 bp, Homo sapien
caaccatgacgttagagaattcagg

SEQ ID NO: 4801419 - DNA, 25 bp, Homo sapien
ctaacaatctgcttggggactctat

SEQ ID NO: 4801420 - DNA, 25 bp, Homo sapien
gaaaatatcaactaacaatctgctt

SEQ ID NO: 4801421 - DNA, 25 bp, Homo sapien
aatatcaactaacaatctgcttggg

SEQ ID NO: 4801422 - DNA, 25 bp, Homo sapien
aacaatctgcttggggactctatct

SEQ ID NO: 4801423 - DNA, 25 bp, Homo sapien
gatggtagggtgatctcaacctaaa

SEQ ID NO: 4801424 - DNA, 25 bp, Homo sapien
tggaccatccttcatacaaatctct

SEQ ID NO: 4801425 - DNA, 25 bp, Homo sapien
tagtgctcactttaactggaccaca

SEQ ID NO: 4801426 - DNA, 25 bp, Homo sapien
gagttctaaatgttcttggaccatc

SEQ ID NO: 4801427 - DNA, 25 bp, Homo sapien
tcctggcgaggaacaaaagccggga

SEQ ID NO: 4801428 - DNA, 25 bp, Homo sapien
tacagctcctgccttgaagactggg

SEQ ID NO: 4801429 - DNA, 25 bp, Homo sapien
tccatttgggaagataacctgcaac

SEQ ID NO: 4801430 - DNA, 25 bp, Homo sapien
tctgcaaatcggtctaagtttcggg

SEQ ID NO: 4801431 - DNA, 25 bp, Homo sapien
cccgtgcgatgggaaacgtgccgtt

SEQ ID NO: 4801432 - DNA, 25 bp, Homo sapien
tgacacgagatagtgcagccctggc

SEQ ID NO: 4801433 - DNA, 25 bp, Homo sapien
tcgtgacctcagtctgccaaacagg

SEQ ID NO: 4801434 - DNA, 25 bp, Homo sapien
ctcagtttactagggaggagccgcg

SEQ ID NO: 4801435 - DNA, 25 bp, Homo sapien
ggagccgctgggcttcggagtcccg

SEQ ID NO: 4801436 - DNA, 25 bp, Homo sapien
tcggagtcccgtgtgtgccgcttct

SEQ ID NO: 4801437 - DNA, 25 bp, Homo sapien
tgggcttcggagtcccgtgtgtgcc

SEQ ID NO: 4801438 - DNA, 25 bp, Homo sapien
agtcccgtgtgtgccgcttctcggc

SEQ ID NO: 4801439 - DNA, 25 bp, Homo sapien
gctgcccgagacgcagtcgcactcc

SEQ ID NO: 4801440 - DNA, 25 bp, Homo sapien
gcactcccccgtcctcgttgccaaa

SEQ ID NO: 4801441 - DNA, 25 bp, Homo sapien
tcgcactcccccgtcctcgttgcca

SEQ ID NO: 4801442 - DNA, 25 bp, Homo sapien
tgcccgagacgcagtcgcactcccc

SEQ ID NO: 4801443 - DNA, 25 bp, Homo sapien
gacgtggagcagatggtgaggatag

SEQ ID NO: 4801444 - DNA, 25 bp, Homo sapien
cagaggtacgggaccaaggcgcctc

SEQ ID NO: 4801445 - DNA, 25 bp, Homo sapien
aagaaaagtcgccttgccgggcaga

SEQ ID NO: 4801446 - DNA, 25 bp, Homo sapien
aggatgacccgaggcaaaagtgcaa

SEQ ID NO: 4801447 - DNA, 25 bp, Homo sapien
ttatgcaatagtaaaccgatacgtg

SEQ ID NO: 4801448 - DNA, 25 bp, Homo sapien
tatgcaatagtaaaccgatacgtgt

SEQ ID NO: 4801449 - DNA, 25 bp, Homo sapien
atgcaatagtaaaccgatacgtgtt

SEQ ID NO: 4801450 - DNA, 25 bp, Homo sapien
tgcaatagtaaaccgatacgtgttt

SEQ ID NO: 4801451 - DNA, 25 bp, Homo sapien
tagaagttcacattgggagatatat

SEQ ID NO: 4801452 - DNA, 25 bp, Homo sapien
gattgcagaacagtcatacaagctg

SEQ ID NO: 4801453 - DNA, 25 bp, Homo sapien
tgtttggatatgagctaaacttgcc

SEQ ID NO: 4801454 - DNA, 25 bp, Homo sapien
gctaaacttgccgtttatgtcacag

SEQ ID NO: 4801455 - DNA, 25 bp, Homo sapien
cttgccgtttatgtcacagattgca

SEQ ID NO: 4801456 - DNA, 25 bp, Homo sapien
gaacctgaatgggtgttcctccaga

SEQ ID NO: 4801457 - DNA, 25 bp, Homo sapien
ggttccttgggactctgatcacaca

SEQ ID NO: 4801458 - DNA, 25 bp, Homo sapien
tgaccgagactggaacacaagcaaa

SEQ ID NO: 4801459 - DNA, 25 bp, Homo sapien
gaaggcaggcctatatgataatccc

SEQ ID NO: 4801460 - DNA, 25 bp, Homo sapien
gaatgtatcctgctgactctttcca

SEQ ID NO: 4801461 - DNA, 25 bp, Homo sapien
ggaatgtatcctgctgactctttcc

SEQ ID NO: 4801462 - DNA, 25 bp, Homo sapien
ggtaaagtcatagggatctgccttg

SEQ ID NO: 4801463 - DNA, 25 bp, Homo sapien
ctctcctaggtaaagtcatagggat

SEQ ID NO: 4801464 - DNA, 25 bp, Homo sapien
cctaggtaaagtcatagggatctgc

SEQ ID NO: 4801465 - DNA, 25 bp, Homo sapien
aaagtcatagggatctgccttgtac

SEQ ID NO: 4801466 - DNA, 25 bp, Homo sapien
tccaccccaaaatggtcttggaaga

SEQ ID NO: 4801467 - DNA, 25 bp, Homo sapien
taaacggcagcttggagacatcatc

SEQ ID NO: 4801468 - DNA, 25 bp, Homo sapien
gaggacccagctctataaacggcag

SEQ ID NO: 4801469 - DNA, 25 bp, Homo sapien
gcagatgttatgaactcctccaagt

SEQ ID NO: 4801470 - DNA, 25 bp, Homo sapien
tgtggccaaccatgaagtacctatt

SEQ ID NO: 4801471 - DNA, 25 bp, Homo sapien
caaaacatttatcctctgggattcc

SEQ ID NO: 4801472 - DNA, 25 bp, Homo sapien
tgggattcctgaaagaaaccacaag

SEQ ID NO: 4801473 - DNA, 25 bp, Homo sapien
aagcaaaacatttatcctctgggat

SEQ ID NO: 4801474 - DNA, 25 bp, Homo sapien
aaaagcaaaacatttatcctctggg

SEQ ID NO: 4801475 - DNA, 25 bp, Homo sapien
tcttctagggccaaatcctccatga

SEQ ID NO: 4801476 - DNA, 25 bp, Homo sapien
gcaaatcttctagggccaaatcctc

SEQ ID NO: 4801477 - DNA, 25 bp, Homo sapien
aaatcttctagggccaaatcctcca

SEQ ID NO: 4801478 - DNA, 25 bp, Homo sapien
agcaaatcttctagggccaaatcct

SEQ ID NO: 4801479 - DNA, 25 bp, Homo sapien
caaccgcacggtaattttctgtttg

SEQ ID NO: 4801480 - DNA, 25 bp, Homo sapien
tccaatagcaaaaaccatcaaccgc

SEQ ID NO: 4801481 - DNA, 25 bp, Homo sapien
ataatttcctaggatggctttgttg

SEQ ID NO: 4801482 - DNA, 25 bp, Homo sapien
atggctttgttgaaagtgccttccc

SEQ ID NO: 4801483 - DNA, 25 bp, Homo sapien
aaaacgtagagttccctgagtcagg

SEQ ID NO: 4801484 - DNA, 25 bp, Homo sapien
gtgataaaacgtagagttccctgag

SEQ ID NO: 4801485 - DNA, 25 bp, Homo sapien
gataaaacgtagagttccctgagtc

SEQ ID NO: 4801486 - DNA, 25 bp, Homo sapien
ctggtgataaaacgtagagttccct

SEQ ID NO: 4801487 - DNA, 25 bp, Homo sapien
gcccactagctaagtcttgtaaatg

SEQ ID NO: 4801488 - DNA, 25 bp, Homo sapien
tagtagctctaacatagcccactag

SEQ ID NO: 4801489 - DNA, 25 bp, Homo sapien
aaactctcttgttcgttacacctca

SEQ ID NO: 4801490 - DNA, 25 bp, Homo sapien
tcccatctttgttgaatgacgagat

SEQ ID NO: 4801491 - DNA, 25 bp, Homo sapien
tcatgaccattctatgaagtgggtg

SEQ ID NO: 4801492 - DNA, 25 bp, Homo sapien
ttatataaaagacccaactggagtg

SEQ ID NO: 4801493 - DNA, 25 bp, Homo sapien
gagaagggtatggagccttttgcca

SEQ ID NO: 4801494 - DNA, 25 bp, Homo sapien
aactggagtgtctgatcccctgacc

SEQ ID NO: 4801495 - DNA, 25 bp, Homo sapien
aggtggtccgcctgttacacactcc

SEQ ID NO: 4801496 - DNA, 25 bp, Homo sapien
tgggagaaatgagacccagtccttc

SEQ ID NO: 4801497 - DNA, 25 bp, Homo sapien
cctgctaagcgctgagatgggagaa

SEQ ID NO: 4801498 - DNA, 25 bp, Homo sapien
ttgagaatctcgcagtcccaacagg

SEQ ID NO: 4801499 - DNA, 25 bp, Homo sapien
gagtccagtttagttattcggattc

SEQ ID NO: 4801500 - DNA, 25 bp, Homo sapien
ccagagtccagtttagttattcgga

SEQ ID NO: 4801501 - DNA, 25 bp, Homo sapien
cagagtccagtttagttattcggat

SEQ ID NO: 4801502 - DNA, 25 bp, Homo sapien
agagtccagtttagttattcggatt

SEQ ID NO: 4801503 - DNA, 25 bp, Homo sapien
ctaatatgctaaggctctttctcct

SEQ ID NO: 4801504 - DNA, 25 bp, Homo sapien
ctaaatcaggaatgttctcaatggc

SEQ ID NO: 4801505 - DNA, 25 bp, Homo sapien
cacagggagtgacgccgcttttctt

SEQ ID NO: 4801506 - DNA, 25 bp, Homo sapien
tgctgcacagggagtgacgccgctt

SEQ ID NO: 4801507 - DNA, 25 bp, Homo sapien
tttggattaaaccagtcccatagcc

SEQ ID NO: 4801508 - DNA, 25 bp, Homo sapien
ttccccttgttgataattgtggatc

SEQ ID NO: 4801509 - DNA, 25 bp, Homo sapien
cttcttccccttgttgataattgtg

SEQ ID NO: 4801510 - DNA, 25 bp, Homo sapien
ccatagccgaagctctgttgtgtca

SEQ ID NO: 4801511 - DNA, 25 bp, Homo sapien
gttaaaccagctcagaaaccaccag

SEQ ID NO: 4801512 - DNA, 25 bp, Homo sapien
tttatcagcaagacaggaatgttcc

SEQ ID NO: 4801513 - DNA, 25 bp, Homo sapien
tacagataagtctacggaagctgca

SEQ ID NO: 4801514 - DNA, 25 bp, Homo sapien
gctgccgtgtgaagaatggactgta

SEQ ID NO: 4801515 - DNA, 25 bp, Homo sapien
gatacaagccatggttctatacaga

SEQ ID NO: 4801516 - DNA, 25 bp, Homo sapien
tgatatatccacaagaaagagcctt

SEQ ID NO: 4801517 - DNA, 25 bp, Homo sapien
gagtgatatatccacaagaaagagc

SEQ ID NO: 4801518 - DNA, 25 bp, Homo sapien
tttgagtgatatatccacaagaaag

SEQ ID NO: 4801519 - DNA, 25 bp, Homo sapien
tatccacaagaaagagccttctgtg

SEQ ID NO: 4801520 - DNA, 25 bp, Homo sapien
tatcatgttacttttaattctgaga

SEQ ID NO: 4801521 - DNA, 25 bp, Homo sapien
gcgattttgtaaccattatcactga

SEQ ID NO: 4801522 - DNA, 25 bp, Homo sapien
catgttacttttaattctgagaaag

SEQ ID NO: 4801523 - DNA, 25 bp, Homo sapien
acatatcatgttacttttaattctg

SEQ ID NO: 4801524 - DNA, 25 bp, Homo sapien
catgtggccaattcgtaaagtggca

SEQ ID NO: 4801525 - DNA, 25 bp, Homo sapien
ggctcacctcaacctatcatgtggc

SEQ ID NO: 4801526 - DNA, 25 bp, Homo sapien
gagtccaggtgccagacgattagcc

SEQ ID NO: 4801527 - DNA, 25 bp, Homo sapien
cagaacctgctctggctaccatgca

SEQ ID NO: 4801528 - DNA, 25 bp, Homo sapien
tgagacaaccagcattgacagaatt

SEQ ID NO: 4801529 - DNA, 25 bp, Homo sapien
gagacaaccagcattgacagaatta

SEQ ID NO: 4801530 - DNA, 25 bp, Homo sapien
gacaaccagcattgacagaattact

SEQ ID NO: 4801531 - DNA, 25 bp, Homo sapien
gttgagacaaccagcattgacagaa

SEQ ID NO: 4801532 - DNA, 25 bp, Homo sapien
gccttgtcatagtcctgcaggtcag

SEQ ID NO: 4801533 - DNA, 25 bp, Homo sapien
cagccttgtcatagtcctgcaggtc

SEQ ID NO: 4801534 - DNA, 25 bp, Homo sapien
ctaaactggcgtcacgagtttctct

SEQ ID NO: 4801535 - DNA, 25 bp, Homo sapien
cagctttctaaactggcgtcacgag

SEQ ID NO: 4801536 - DNA, 25 bp, Homo sapien
gtgaagtccctgagccggcatcctt

SEQ ID NO: 4801537 - DNA, 25 bp, Homo sapien
gctggagagacaaggacttggtcct

SEQ ID NO: 4801538 - DNA, 25 bp, Homo sapien
agagtttagggcgatccacccgtga

SEQ ID NO: 4801539 - DNA, 25 bp, Homo sapien
caaaactactgagggggccaccgag

SEQ ID NO: 4801540 - DNA, 25 bp, Homo sapien
tagtccggtgtagaatggaatttgg

SEQ ID NO: 4801541 - DNA, 25 bp, Homo sapien
ttctgcttctggaaaatagtccggt

SEQ ID NO: 4801542 - DNA, 25 bp, Homo sapien
gcttctggaaaatagtccggtgtag

SEQ ID NO: 4801543 - DNA, 25 bp, Homo sapien
gaaaatagtccggtgtagaatggaa

SEQ ID NO: 4801544 - DNA, 25 bp, Homo sapien
agctggcctgccacttgaggactca

SEQ ID NO: 4801545 - DNA, 25 bp, Homo sapien
ggaagagcaggacgattgattctcc

SEQ ID NO: 4801546 - DNA, 25 bp, Homo sapien
tgctcacagatgttgccagccccaa

SEQ ID NO: 4801547 - DNA, 25 bp, Homo sapien
tgccaggagaattcctccagaggac

SEQ ID NO: 4801548 - DNA, 25 bp, Homo sapien
gctcccaccaccaagtctagctaat

SEQ ID NO: 4801549 - DNA, 25 bp, Homo sapien
ggctcccaccaccaagtctagctaa

SEQ ID NO: 4801550 - DNA, 25 bp, Homo sapien
aggctcccaccaccaagtctagcta

SEQ ID NO: 4801551 - DNA, 25 bp, Homo sapien
atccgcagaaccagggcgccgaggg

SEQ ID NO: 4801552 - DNA, 25 bp, Homo sapien
ggcgaagccctacgcgctctgatca

SEQ ID NO: 4801553 - DNA, 25 bp, Homo sapien
agccggcgagcgctgacagcgggct

SEQ ID NO: 4801554 - DNA, 25 bp, Homo sapien
gccggcgcgcggtgagctgggctga

SEQ ID NO: 4801555 - DNA, 25 bp, Homo sapien
aacaaatcttacaaagccttgcatt

SEQ ID NO: 4801556 - DNA, 25 bp, Homo sapien
ttatagacaagaaaagaaactgcgc

SEQ ID NO: 4801557 - DNA, 25 bp, Homo sapien
caagaaaagaaactgcgctagaacc

SEQ ID NO: 4801558 - DNA, 25 bp, Homo sapien
cagaacaattattttgtataagctg

SEQ ID NO: 4801559 - DNA, 25 bp, Homo sapien
ttattcatcatcatcaccttgttct

SEQ ID NO: 4801560 - DNA, 25 bp, Homo sapien
ttcatcatcatcaccttgttcttca

SEQ ID NO: 4801561 - DNA, 25 bp, Homo sapien
atcatcatcaccttgttcttcatct

SEQ ID NO: 4801562 - DNA, 25 bp, Homo sapien
tattcatcatcatcaccttgttctt

SEQ ID NO: 4801563 - DNA, 25 bp, Homo sapien
ctgcttgccatctgcagcaatgtca

SEQ ID NO: 4801564 - DNA, 25 bp, Homo sapien
gaaggctgcttgccatctgcagcaa

SEQ ID NO: 4801565 - DNA, 25 bp, Homo sapien
gcttgccatctgcagcaatgtcatt

SEQ ID NO: 4801566 - DNA, 25 bp, Homo sapien
ttgccatctgcagcaatgtcattcc

SEQ ID NO: 4801567 - DNA, 25 bp, Homo sapien
gcagaacaggaaaagggtcaaagga

SEQ ID NO: 4801568 - DNA, 25 bp, Homo sapien
tcagagcagaacaggaaaagggtca

SEQ ID NO: 4801569 - DNA, 25 bp, Homo sapien
agggtcaaaggaagcctcttgggtg

SEQ ID NO: 4801570 - DNA, 25 bp, Homo sapien
gggtcaaaggaagcctcttgggtgc

SEQ ID NO: 4801571 - DNA, 25 bp, Homo sapien
ctctttcgtaatgggcgttgtccac

SEQ ID NO: 4801572 - DNA, 25 bp, Homo sapien
gtaatgggcgttgtccacctttgcc

SEQ ID NO: 4801573 - DNA, 25 bp, Homo sapien
ttctctttcgtaatgggcgttgtcc

SEQ ID NO: 4801574 - DNA, 25 bp, Homo sapien
tcgtaatgggcgttgtccacctttg

SEQ ID NO: 4801575 - DNA, 25 bp, Homo sapien
tctgctgcatccacttgggtggttg

SEQ ID NO: 4801576 - DNA, 25 bp, Homo sapien
gcttcatttgacaactctgctgcat

SEQ ID NO: 4801577 - DNA, 25 bp, Homo sapien
taaagttgcttgggcctggttggtg

SEQ ID NO: 4801578 - DNA, 25 bp, Homo sapien
ttagcttcatttgacaactctgctg

SEQ ID NO: 4801579 - DNA, 25 bp, Homo sapien
ggtcaccaatgctgacccaatgtga

SEQ ID NO: 4801580 - DNA, 25 bp, Homo sapien
tgacccaatgtgacaaagccatgcg

SEQ ID NO: 4801581 - DNA, 25 bp, Homo sapien
caatgtgacaaagccatgcgtcctg

SEQ ID NO: 4801582 - DNA, 25 bp, Homo sapien
acaaagccatgcgtcctgtggcctc

SEQ ID NO: 4801583 - DNA, 25 bp, Homo sapien
aagaggaggaggtattggcttatct

SEQ ID NO: 4801584 - DNA, 25 bp, Homo sapien
aggtattggcttatctggcttcagg

SEQ ID NO: 4801585 - DNA, 25 bp, Homo sapien
ggaggtattggcttatctggcttca

SEQ ID NO: 4801586 - DNA, 25 bp, Homo sapien
ggaggaggtattggcttatctggct

SEQ ID NO: 4801587 - DNA, 25 bp, Homo sapien
agcgccccgaccacctgccgtcgtg

SEQ ID NO: 4801588 - DNA, 25 bp, Homo sapien
gagaataggatcgatggctgccgtg

SEQ ID NO: 4801589 - DNA, 25 bp, Homo sapien
acgcctgccgatcccgcggtgtcct

SEQ ID NO: 4801590 - DNA, 25 bp, Homo sapien
tgccgtcgtgaccacctcgcccaca

SEQ ID NO: 4801591 - DNA, 25 bp, Homo sapien
gcctctccaggctccgagggcaggg

SEQ ID NO: 4801592 - DNA, 25 bp, Homo sapien
ctgcggggacagcccagcctctcca

SEQ ID NO: 4801593 - DNA, 25 bp, Homo sapien
gggacagcccagcctctccaggctc

SEQ ID NO: 4801594 - DNA, 25 bp, Homo sapien
cggggacagcccagcctctccaggc

SEQ ID NO: 4801595 - DNA, 25 bp, Homo sapien
caccggagtcaaatgggctcgtgtc

SEQ ID NO: 4801596 - DNA, 25 bp, Homo sapien
agtcgcctccgtgggtagctccgga

SEQ ID NO: 4801597 - DNA, 25 bp, Homo sapien
atccggagcgcacgctggcagccag

SEQ ID NO: 4801598 - DNA, 25 bp, Homo sapien
tagctccggagcattcacgcggtgg

SEQ ID NO: 4801599 - DNA, 25 bp, Homo sapien
gagtgacaggtcatgtctggaacct

SEQ ID NO: 4801600 - DNA, 25 bp, Homo sapien
gatgcccactgaaggaccctggtcc

SEQ ID NO: 4801601 - DNA, 25 bp, Homo sapien
atgcccactgaaggaccctggtcca

SEQ ID NO: 4801602 - DNA, 25 bp, Homo sapien
ctttacatggagtgacaggtcatgt

SEQ ID NO: 4801603 - DNA, 25 bp, Homo sapien
gcagctggcctcataacaaggtcag

SEQ ID NO: 4801604 - DNA, 25 bp, Homo sapien
gagagcccctcctgaactgtactta

SEQ ID NO: 4801605 - DNA, 25 bp, Homo sapien
gagccaggccagttgattctcagag

SEQ ID NO: 4801606 - DNA, 25 bp, Homo sapien
tgtgaggaccaagcaggatagatcc

SEQ ID NO: 4801607 - DNA, 25 bp, Homo sapien
actcatccttcgtgcacagccagaa

SEQ ID NO: 4801608 - DNA, 25 bp, Homo sapien
ccactcataggcattcaaaaaactt

SEQ ID NO: 4801609 - DNA, 25 bp, Homo sapien
agaaggggccactcataggcattca

SEQ ID NO: 4801610 - DNA, 25 bp, Homo sapien
ccccaactcatccttcgtgcacagc

SEQ ID NO: 4801611 - DNA, 25 bp, Homo sapien
cattttatgggacatcgtctgcggc

SEQ ID NO: 4801612 - DNA, 25 bp, Homo sapien
tagctcctgagtgatgaccgtgcca

SEQ ID NO: 4801613 - DNA, 25 bp, Homo sapien
ggtttgcgacctggaagagctcaca

SEQ ID NO: 4801614 - DNA, 25 bp, Homo sapien
aagtcgcgccaggtttcagagccaa

SEQ ID NO: 4801615 - DNA, 25 bp, Homo sapien
caaggtgaggacgaacacaggcatc

SEQ ID NO: 4801616 - DNA, 25 bp, Homo sapien
tattcagtcacgcttgctgaagcgg

SEQ ID NO: 4801617 - DNA, 25 bp, Homo sapien
ttagctggaaaacgtcgctgtcccg

SEQ ID NO: 4801618 - DNA, 25 bp, Homo sapien
aaatgggtcaataagatagtcacgc

SEQ ID NO: 4801619 - DNA, 25 bp, Homo sapien
caaactcgcggagggatagttgaaa

SEQ ID NO: 4801620 - DNA, 25 bp, Homo sapien
tgggcaacttctcgcaaactcgcgg

SEQ ID NO: 4801621 - DNA, 25 bp, Homo sapien
cagcagccacgtgcttggaacataa

SEQ ID NO: 4801622 - DNA, 25 bp, Homo sapien
cataaatcttgtcgaggatgttgat

SEQ ID NO: 4801623 - DNA, 25 bp, Homo sapien
ggtcattgttctccaagtttggatc

SEQ ID NO: 4801624 - DNA, 25 bp, Homo sapien
ggttttgtcagatacgctgggctcc

SEQ ID NO: 4801625 - DNA, 25 bp, Homo sapien
gggttttgtcagatacgctgggctc

SEQ ID NO: 4801626 - DNA, 25 bp, Homo sapien
actgccctcgtgtcggggctctgct

SEQ ID NO: 4801627 - DNA, 25 bp, Homo sapien
tcctgtctctctctcgggaggtaag

SEQ ID NO: 4801628 - DNA, 25 bp, Homo sapien
cgtgtcggggctctgctttcctgtc

SEQ ID NO: 4801629 - DNA, 25 bp, Homo sapien
ctctctctcgggaggtaagatttcc

SEQ ID NO: 4801630 - DNA, 25 bp, Homo sapien
tgtttaatgctcacagccttaagag

SEQ ID NO: 4801631 - DNA, 25 bp, Homo sapien
tttaatgctcacagccttaagagtc

SEQ ID NO: 4801632 - DNA, 25 bp, Homo sapien
gaacatcctttgtgggtctcgtcag

SEQ ID NO: 4801633 - DNA, 25 bp, Homo sapien
tatctgctgcgtagaactttctgca

SEQ ID NO: 4801634 - DNA, 25 bp, Homo sapien
gtctcgtcaggcttgggtgccagca

SEQ ID NO: 4801635 - DNA, 25 bp, Homo sapien
tgtgagattgacttagccacccctc

SEQ ID NO: 4801636 - DNA, 25 bp, Homo sapien
gaaaatgccaccatagatgatgtcc

SEQ ID NO: 4801637 - DNA, 25 bp, Homo sapien
cagcattgggtgtgtcctcatggcg

SEQ ID NO: 4801638 - DNA, 25 bp, Homo sapien
gatgatgtccccaagcagcattggg

SEQ ID NO: 4801639 - DNA, 25 bp, Homo sapien
tcttcctgggtaattaatggtgctc

SEQ ID NO: 4801640 - DNA, 25 bp, Homo sapien
aacggagtgaaggaggcactggctt

SEQ ID NO: 4801641 - DNA, 25 bp, Homo sapien
ctggctttgctgccaacatggcctg

SEQ ID NO: 4801642 - DNA, 25 bp, Homo sapien
agggcctgggcatggaaacggagtg

SEQ ID NO: 4801643 - DNA, 25 bp, Homo sapien
tggctttgctgccaacatggcctgt

SEQ ID NO: 4801644 - DNA, 25 bp, Homo sapien
gctggtgtttgaagataactggttg

SEQ ID NO: 4801645 - DNA, 25 bp, Homo sapien
tgtggtgccccacgcatgagcatct

SEQ ID NO: 4801646 - DNA, 25 bp, Homo sapien
ctctgttaagaagccttgggtttct

SEQ ID NO: 4801647 - DNA, 25 bp, Homo sapien
aggtcaaacttgtaaccctcctctg

SEQ ID NO: 4801648 - DNA, 25 bp, Homo sapien
ggctcagctggttggcgatgcccat

SEQ ID NO: 4801649 - DNA, 25 bp, Homo sapien
atgctcggctcagctggttggcgat

SEQ ID NO: 4801650 - DNA, 25 bp, Homo sapien
gatgctcggctcagctggttggcga

SEQ ID NO: 4801651 - DNA, 25 bp, Homo sapien
ctcggctcagctggttggcgatgcc

SEQ ID NO: 4801652 - DNA, 25 bp, Homo sapien
ctcaacatcataaaaccaaaacgtg

SEQ ID NO: 4801653 - DNA, 25 bp, Homo sapien
catcataaaaccaaaacgtgaaatc

SEQ ID NO: 4801654 - DNA, 25 bp, Homo sapien
acctccaaactcaacatcataaaac

SEQ ID NO: 4801655 - DNA, 25 bp, Homo sapien
caaaacgtgaaatcaacatccctca

SEQ ID NO: 4801656 - DNA, 25 bp, Homo sapien
caagaaaaggtacaagcccattggg

SEQ ID NO: 4801657 - DNA, 25 bp, Homo sapien
agctcagagctcacgcagaggtgca

SEQ ID NO: 4801658 - DNA, 25 bp, Homo sapien
cctaagagatatttgtggcggctga

SEQ ID NO: 4801659 - DNA, 25 bp, Homo sapien
gcccattgggataacttgcttgacc

SEQ ID NO: 4801660 - DNA, 25 bp, Homo sapien
tacgtaccccgttttgtgtgcatgt

SEQ ID NO: 4801661 - DNA, 25 bp, Homo sapien
gagacaacaggcagtccggcttctg

SEQ ID NO: 4801662 - DNA, 25 bp, Homo sapien
tcagcgctgggtgcagtcactgcgt

SEQ ID NO: 4801663 - DNA, 25 bp, Homo sapien
tgaaaatctcgcttcccatctttgt

SEQ ID NO: 4801664 - DNA, 25 bp, Homo sapien
gaatctatctggtttatatggctgc

SEQ ID NO: 4801665 - DNA, 25 bp, Homo sapien
catggccttcccgtgtagatgagcg

SEQ ID NO: 4801666 - DNA, 25 bp, Homo sapien
ggcggccacttgagttctgactttg

SEQ ID NO: 4801667 - DNA, 25 bp, Homo sapien
tgttgaatgctgtctgcgtgctccg

SEQ ID NO: 4801668 - DNA, 25 bp, Homo sapien
caggagcacatgattctgagtctca

SEQ ID NO: 4801669 - DNA, 25 bp, Homo sapien
ccaggagcacatgattctgagtctc

SEQ ID NO: 4801670 - DNA, 25 bp, Homo sapien
gcccaggagcacatgattctgagtc

SEQ ID NO: 4801671 - DNA, 25 bp, Homo sapien
aggagcacatgattctgagtctcat

SEQ ID NO: 4801672 - DNA, 25 bp, Homo sapien
agcagatatcccctctgggccacag

SEQ ID NO: 4801673 - DNA, 25 bp, Homo sapien
agcgtgcagcagatatcccctctgg

SEQ ID NO: 4801674 - DNA, 25 bp, Homo sapien
gaagccaccagcgtgcagcagatat

SEQ ID NO: 4801675 - DNA, 25 bp, Homo sapien
acgtccttgtggaagccaccagcgt

SEQ ID NO: 4801676 - DNA, 25 bp, Homo sapien
ggatctgttgacttataatgctggg

SEQ ID NO: 4801677 - DNA, 25 bp, Homo sapien
tcgtggctaggctaagtggccttcc

SEQ ID NO: 4801678 - DNA, 25 bp, Homo sapien
tccaaggtcagaagaacatagaggt

SEQ ID NO: 4801679 - DNA, 25 bp, Homo sapien
gaggtgacttccatcactacccagg

SEQ ID NO: 4801680 - DNA, 25 bp, Homo sapien
gcaggagtaagccttgaatgatggc

SEQ ID NO: 4801681 - DNA, 25 bp, Homo sapien
gccttgaatgatggcattgctggct

SEQ ID NO: 4801682 - DNA, 25 bp, Homo sapien
taagccttgaatgatggcattgctg

SEQ ID NO: 4801683 - DNA, 25 bp, Homo sapien
ggagtaagccttgaatgatggcatt

SEQ ID NO: 4801684 - DNA, 25 bp, Homo sapien
catggataggtttgccggagctctt

SEQ ID NO: 4801685 - DNA, 25 bp, Homo sapien
tgccatggataggtttgccggagct

SEQ ID NO: 4801686 - DNA, 25 bp, Homo sapien
tcttccaggggagccgatggttcct

SEQ ID NO: 4801687 - DNA, 25 bp, Homo sapien
cgttatggatgggtttgccatggat

SEQ ID NO: 4801688 - DNA, 25 bp, Homo sapien
caggtagttgggtatcactgggcac

SEQ ID NO: 4801689 - DNA, 25 bp, Homo sapien
ggcacggggcggctatgtgttgggc

SEQ ID NO: 4801690 - DNA, 25 bp, Homo sapien
cttttgggcatgccaggtagttggg

SEQ ID NO: 4801691 - DNA, 25 bp, Homo sapien
tgggcacggggcggctatgtgttgg

SEQ ID NO: 4801692 - DNA, 25 bp, Homo sapien
ggatggagggcagcagctcctccat

SEQ ID NO: 4801693 - DNA, 25 bp, Homo sapien
tgccttcctgcagtaagggatggag

SEQ ID NO: 4801694 - DNA, 25 bp, Homo sapien
ctgccttcctgcagtaagggatgga

SEQ ID NO: 4801695 - DNA, 25 bp, Homo sapien
aagggatggagggcagcagctcctc

SEQ ID NO: 4801696 - DNA, 25 bp, Homo sapien
tctgtaaaatacctagcgctgggcc

SEQ ID NO: 4801697 - DNA, 25 bp, Homo sapien
tgtcgcatgggtgggaatttactcc

SEQ ID NO: 4801698 - DNA, 25 bp, Homo sapien
tgccagccaaagtcatcaccataag

SEQ ID NO: 4801699 - DNA, 25 bp, Homo sapien
tgttgagggtcctagaatcccagct

SEQ ID NO: 4801700 - DNA, 25 bp, Homo sapien
aggcagctggccgcggaatgtcacc

SEQ ID NO: 4801701 - DNA, 25 bp, Homo sapien
gcagctggccgcggaatgtcacccg

SEQ ID NO: 4801702 - DNA, 25 bp, Homo sapien
ggaggcagctggccgcggaatgtca

SEQ ID NO: 4801703 - DNA, 25 bp, Homo sapien
gctggccgcggaatgtcacccgctg

SEQ ID NO: 4801704 - DNA, 25 bp, Homo sapien
tggacctggaggttgtgccatgtgg

SEQ ID NO: 4801705 - DNA, 25 bp, Homo sapien
agtttgctttcaggagtgtttctcg

SEQ ID NO: 4801706 - DNA, 25 bp, Homo sapien
ccatggctggaagcgatagtttgct

SEQ ID NO: 4801707 - DNA, 25 bp, Homo sapien
cccagagggcgacttgccatggctg

SEQ ID NO: 4801708 - DNA, 25 bp, Homo sapien
tgcatggaagacggtaattttccac

SEQ ID NO: 4801709 - DNA, 25 bp, Homo sapien
ctgcatggaagacggtaattttcca

SEQ ID NO: 4801710 - DNA, 25 bp, Homo sapien
gtgagcaccacccttgggaatgggc

SEQ ID NO: 4801711 - DNA, 25 bp, Homo sapien
tgggtgagcaccacccttgggaatg

SEQ ID NO: 4801712 - DNA, 25 bp, Homo sapien
gggtgagcaccacccttgggaatgg

SEQ ID NO: 4801713 - DNA, 25 bp, Homo sapien
ctgggtgagcaccacccttgggaat

SEQ ID NO: 4801714 - DNA, 25 bp, Homo sapien
tgacaacttcggcaagatcctgggc

SEQ ID NO: 4801715 - DNA, 25 bp, Homo sapien
ttagtgacaacttcggcaagatcct

SEQ ID NO: 4801716 - DNA, 25 bp, Homo sapien
caacttcggcaagatcctgggccgg

SEQ ID NO: 4801717 - DNA, 25 bp, Homo sapien
cttcggcaagatcctgggccgggcc

SEQ ID NO: 4801718 - DNA, 25 bp, Homo sapien
tgcgctcccaccacaaaggtctgtt

SEQ ID NO: 4801719 - DNA, 25 bp, Homo sapien
gctcccaccacaaaggtctgtttga

SEQ ID NO: 4801720 - DNA, 25 bp, Homo sapien
cctcgggggttgcaagtgcccagaa

SEQ ID NO: 4801721 - DNA, 25 bp, Homo sapien
tggagacctggccatcttcggaagc

SEQ ID NO: 4801722 - DNA, 25 bp, Homo sapien
gataggatgaggcaagccttgaacc

SEQ ID NO: 4801723 - DNA, 25 bp, Homo sapien
cacatgcgcaccagatgcattcggc

SEQ ID NO: 4801724 - DNA, 25 bp, Homo sapien
tgtttcctctgatgctcgacacccc

SEQ ID NO: 4801725 - DNA, 25 bp, Homo sapien
cattcggctccaggaagataggatg

SEQ ID NO: 4801726 - DNA, 25 bp, Homo sapien
gggcagctgacatccctaggcccat

SEQ ID NO: 4801727 - DNA, 25 bp, Homo sapien
tcctgctagttacagcctgagaagc

SEQ ID NO: 4801728 - DNA, 25 bp, Homo sapien
tctggtgccccacgcagacttccag

SEQ ID NO: 4801729 - DNA, 25 bp, Homo sapien
tgtctcctgctagttacagcctgag

SEQ ID NO: 4801730 - DNA, 25 bp, Homo sapien
tgcagacatagtggaggcgctcagt

SEQ ID NO: 4801731 - DNA, 25 bp, Homo sapien
cagacatagtggaggcgctcagtgg

SEQ ID NO: 4801732 - DNA, 25 bp, Homo sapien
tcctgcagacatagtggaggcgctc

SEQ ID NO: 4801733 - DNA, 25 bp, Homo sapien
cctgcagacatagtggaggcgctca

SEQ ID NO: 4801734 - DNA, 25 bp, Homo sapien
ctgggttgagagggaccacgcctct

SEQ ID NO: 4801735 - DNA, 25 bp, Homo sapien
agagagtctgctgaagtcctgactg

SEQ ID NO: 4801736 - DNA, 25 bp, Homo sapien
tgcagaaccatcaggtcctgccagc

SEQ ID NO: 4801737 - DNA, 25 bp, Homo sapien
gtcctgccagcctttgggtgggcac

SEQ ID NO: 4801738 - DNA, 25 bp, Homo sapien
ccaactctgtggagacaaaccttgt

SEQ ID NO: 4801739 - DNA, 25 bp, Homo sapien
ttcctctgcccagccatcatgtcgc

SEQ ID NO: 4801740 - DNA, 25 bp, Homo sapien
cctcttcctgcgcttcctctgccca

SEQ ID NO: 4801741 - DNA, 25 bp, Homo sapien
ctcttcctgcgcttcctctgcccag

SEQ ID NO: 4801742 - DNA, 25 bp, Homo sapien
tgcgcttcctctgcccagccatcat

SEQ ID NO: 4801743 - DNA, 25 bp, Homo sapien
gcatgcagcctgttgggaccttcct

SEQ ID NO: 4801744 - DNA, 25 bp, Homo sapien
cacttggcagatcagttggcaggca

SEQ ID NO: 4801745 - DNA, 25 bp, Homo sapien
gtcatgtgggacctggcacttggca

SEQ ID NO: 4801746 - DNA, 25 bp, Homo sapien
ggatctggccgagtgcatgtgtccc

SEQ ID NO: 4801747 - DNA, 25 bp, Homo sapien
cactgcatgggaaatagcggccctg

SEQ ID NO: 4801748 - DNA, 25 bp, Homo sapien
gcttgctcgcttgctggaacacagg

SEQ ID NO: 4801749 - DNA, 25 bp, Homo sapien
taagttgagcgtgcgcactgcatgg

SEQ ID NO: 4801750 - DNA, 25 bp, Homo sapien
cattagaaacaaaagcccgcttgct

SEQ ID NO: 4801751 - DNA, 25 bp, Homo sapien
cgagctgcaggaatcacccctctgc

SEQ ID NO: 4801752 - DNA, 25 bp, Homo sapien
ttgggtctctctcggcccctgtctg

SEQ ID NO: 4801753 - DNA, 25 bp, Homo sapien
gatgtaacctacaattcagttaggc

SEQ ID NO: 4801754 - DNA, 25 bp, Homo sapien
ccagagccatactgcgtccaccctg

SEQ ID NO: 4801755 - DNA, 25 bp, Homo sapien
ccagctgcgacttttaactatgtaa

SEQ ID NO: 4801756 - DNA, 25 bp, Homo sapien
ggtgatggaaactgccaaacctcct

SEQ ID NO: 4801757 - DNA, 25 bp, Homo sapien
gtgaggactctttccgactgcccag

SEQ ID NO: 4801758 - DNA, 25 bp, Homo sapien
gaatctagagaacagtattgggcag

SEQ ID NO: 4801759 - DNA, 25 bp, Homo sapien
ggccctgcattaagcgctttctcat

SEQ ID NO: 4801760 - DNA, 25 bp, Homo sapien
tgcattaagcgctttctcatccact

SEQ ID NO: 4801761 - DNA, 25 bp, Homo sapien
gccaggccctgcattaagcgctttc

SEQ ID NO: 4801762 - DNA, 25 bp, Homo sapien
caggccctgcattaagcgctttctc

SEQ ID NO: 4801763 - DNA, 25 bp, Homo sapien
ggaagcctgcagtggagtccctggg

SEQ ID NO: 4801764 - DNA, 25 bp, Homo sapien
tgaggtgcagggtccctgaggaagc

SEQ ID NO: 4801765 - DNA, 25 bp, Homo sapien
ggcccacacttggtagtgtccagtc

SEQ ID NO: 4801766 - DNA, 25 bp, Homo sapien
ccagtctttgctgatgcgtgaagtt

SEQ ID NO: 4801767 - DNA, 25 bp, Homo sapien
gaagacgtggcctattctgcagagc

SEQ ID NO: 4801768 - DNA, 25 bp, Homo sapien
gaaccttgactttatgcgccatgaa

SEQ ID NO: 4801769 - DNA, 25 bp, Homo sapien
gaaaatatccctgcggtctgcgagg

SEQ ID NO: 4801770 - DNA, 25 bp, Homo sapien
gataacactacgtttgagcagcgcc

SEQ ID NO: 4801771 - DNA, 25 bp, Homo sapien
ctctgtggctctccaagttccttcc

SEQ ID NO: 4801772 - DNA, 25 bp, Homo sapien
tcagctctgtggctctccaagttcc

SEQ ID NO: 4801773 - DNA, 25 bp, Homo sapien
tgtggctctccaagttccttccaga

SEQ ID NO: 4801774 - DNA, 25 bp, Homo sapien
gtggctctccaagttccttccagac

SEQ ID NO: 4801775 - DNA, 25 bp, Homo sapien
caatggaccatttaggagccctgac

SEQ ID NO: 4801776 - DNA, 25 bp, Homo sapien
tgatgacaagtgtgcccagacatgc

SEQ ID NO: 4801777 - DNA, 25 bp, Homo sapien
cattctcacccagggacaaggagcc

SEQ ID NO: 4801778 - DNA, 25 bp, Homo sapien
caagaaatggtgtcacgtgagagct

SEQ ID NO: 4801779 - DNA, 25 bp, Homo sapien
gttatgaaccaggtcaactgctctt

SEQ ID NO: 4801780 - DNA, 25 bp, Homo sapien
gccacgcactacgagcattttctga

SEQ ID NO: 4801781 - DNA, 25 bp, Homo sapien
gcttatttgggatgcacctctgcct

SEQ ID NO: 4801782 - DNA, 25 bp, Homo sapien
cattttctgagtcctacagtgcacc

SEQ ID NO: 4801783 - DNA, 25 bp, Homo sapien
tcagggaggctaaagatgggattcc

SEQ ID NO: 4801784 - DNA, 25 bp, Homo sapien
gatcgattgtgtcctgtgccccaaa

SEQ ID NO: 4801785 - DNA, 25 bp, Homo sapien
caaacaaaatgatctctgaggctcc

SEQ ID NO: 4801786 - DNA, 25 bp, Homo sapien
cacatgactgggatgggagattcgc

SEQ ID NO: 4801787 - DNA, 25 bp, Homo sapien
tatgtccgatgactgatgactcaga

SEQ ID NO: 4801788 - DNA, 25 bp, Homo sapien
ctcagccgcacacagagacagttcg

SEQ ID NO: 4801789 - DNA, 25 bp, Homo sapien
ccagaatagaaggtgccatctgtca

SEQ ID NO: 4801790 - DNA, 25 bp, Homo sapien
gactcagaaacagggtgtatcacca

SEQ ID NO: 4801791 - DNA, 25 bp, Homo sapien
tgggatgggagagcttattggcaca

SEQ ID NO: 4801792 - DNA, 25 bp, Homo sapien
tgtctgggatgggagagcttattgg

SEQ ID NO: 4801793 - DNA, 25 bp, Homo sapien
tcaggacagggtatgtctgggatgg

SEQ ID NO: 4801794 - DNA, 25 bp, Homo sapien
atgggagagcttattggcacagctg

SEQ ID NO: 4801795 - DNA, 25 bp, Homo sapien
ggtcaatcagtgaggccacctgctc

SEQ ID NO: 4801796 - DNA, 25 bp, Homo sapien
actcgcaaaggtcaatcagtgaggc

SEQ ID NO: 4801797 - DNA, 25 bp, Homo sapien
cacctgctcatgaagtggcagcatc

SEQ ID NO: 4801798 - DNA, 25 bp, Homo sapien
tcagtgaggccacctgctcatgaag

SEQ ID NO: 4801799 - DNA, 25 bp, Homo sapien
ctgcttctggcactgggggcagcag

SEQ ID NO: 4801800 - DNA, 25 bp, Homo sapien
ttctggcactgggggcagcagcctg

SEQ ID NO: 4801801 - DNA, 25 bp, Homo sapien
gcttctggcactgggggcagcagcc

SEQ ID NO: 4801802 - DNA, 25 bp, Homo sapien
ctggcactgggggcagcagcctggc

SEQ ID NO: 4801803 - DNA, 25 bp, Homo sapien
catttgcattttgccgaagggtggg

SEQ ID NO: 4801804 - DNA, 25 bp, Homo sapien
aagcagcacaatcaccgtcaccctg

SEQ ID NO: 4801805 - DNA, 25 bp, Homo sapien
gcatttgcattttgccgaagggtgg

SEQ ID NO: 4801806 - DNA, 25 bp, Homo sapien
gaggcccttgaacccttgtttagca

SEQ ID NO: 4801807 - DNA, 25 bp, Homo sapien
gaacagggctcgaccccagctctgg

SEQ ID NO: 4801808 - DNA, 25 bp, Homo sapien
aggaacagggctcgaccccagctct

SEQ ID NO: 4801809 - DNA, 25 bp, Homo sapien
acaggaacagggctcgaccccagct

SEQ ID NO: 4801810 - DNA, 25 bp, Homo sapien
aacagggctcgaccccagctctggg

SEQ ID NO: 4801811 - DNA, 25 bp, Homo sapien
ggcccctgacaaacgatggcctcat

SEQ ID NO: 4801812 - DNA, 25 bp, Homo sapien
aggcggcccctgacaaacgatggcc

SEQ ID NO: 4801813 - DNA, 25 bp, Homo sapien
ttggatattaagaggcggcccctga

SEQ ID NO: 4801814 - DNA, 25 bp, Homo sapien
ctgagaccgcctcttggatattaag

SEQ ID NO: 4801815 - DNA, 25 bp, Homo sapien
tcacaggtcatactgctggccacag

SEQ ID NO: 4801816 - DNA, 25 bp, Homo sapien
agagtggcccagaggtctcagtcca

SEQ ID NO: 4801817 - DNA, 25 bp, Homo sapien
tgacacgaacacaagttcctgagtc

SEQ ID NO: 4801818 - DNA, 25 bp, Homo sapien
acccctgattccatcatgacacgaa

SEQ ID NO: 4801819 - DNA, 25 bp, Homo sapien
ctagtagtacaaaatcttggtgctt

SEQ ID NO: 4801820 - DNA, 25 bp, Homo sapien
tgctgtgggcggtctggcaggtggg

SEQ ID NO: 4801821 - DNA, 25 bp, Homo sapien
ttttcagggtgttagggaacagagc

SEQ ID NO: 4801822 - DNA, 25 bp, Homo sapien
tacaaaatcttggtgctttgaaagg

SEQ ID NO: 4801823 - DNA, 25 bp, Homo sapien
gccgctgtaacccacgcccctgctc

SEQ ID NO: 4801824 - DNA, 25 bp, Homo sapien
tgctctgagggatcgagccccgcct

SEQ ID NO: 4801825 - DNA, 25 bp, Homo sapien
tccagctgccgctgtaacccacgcc

SEQ ID NO: 4801826 - DNA, 25 bp, Homo sapien
ctcccgtcaccctgcgggccttcat

SEQ ID NO: 4801827 - DNA, 25 bp, Homo sapien
tgttggcgtcaatcaccggcagttg

SEQ ID NO: 4801828 - DNA, 25 bp, Homo sapien
gataaatgtagctggtgttggcgtc

SEQ ID NO: 4801829 - DNA, 25 bp, Homo sapien
cctggcctgtgttaggtgcttgata

SEQ ID NO: 4801830 - DNA, 25 bp, Homo sapien
accggcagttgcattaggagagagc

SEQ ID NO: 4801831 - DNA, 25 bp, Homo sapien
tgagcagaggcgtcagatgactcgc

SEQ ID NO: 4801832 - DNA, 25 bp, Homo sapien
tgactgagggattttgctgagagat

SEQ ID NO: 4801833 - DNA, 25 bp, Homo sapien
ctcgcagtcggtgactgagggattt

SEQ ID NO: 4801834 - DNA, 25 bp, Homo sapien
cagatgactcgcagtcggtgactga

SEQ ID NO: 4801835 - DNA, 25 bp, Homo sapien
gacacccatgggattggtgggttgc

SEQ ID NO: 4801836 - DNA, 25 bp, Homo sapien
acacccatgggattggtgggttgcc

SEQ ID NO: 4801837 - DNA, 25 bp, Homo sapien
gattggtgggttgccgcggctgagc

SEQ ID NO: 4801838 - DNA, 25 bp, Homo sapien
catgggattggtgggttgccgcggc

SEQ ID NO: 4801839 - DNA, 25 bp, Homo sapien
caagcatcagggatctggttaaccc

SEQ ID NO: 4801840 - DNA, 25 bp, Homo sapien
tggttaaccccttcagtgggcacca

SEQ ID NO: 4801841 - DNA, 25 bp, Homo sapien
gatccagtccaaatgggcgttcaga

SEQ ID NO: 4801842 - DNA, 25 bp, Homo sapien
ccaaagtcttataacggcagaagga

SEQ ID NO: 4801843 - DNA, 25 bp, Homo sapien
tgaagacgctccatctcacgcctct

SEQ ID NO: 4801844 - DNA, 25 bp, Homo sapien
tcctgaagacgctccatctcacgcc

SEQ ID NO: 4801845 - DNA, 25 bp, Homo sapien
catctcacgcctctcctggttgcca

SEQ ID NO: 4801846 - DNA, 25 bp, Homo sapien
atctcacgcctctcctggttgccag

SEQ ID NO: 4801847 - DNA, 25 bp, Homo sapien
tgttgattcaatgactgctgctatt

SEQ ID NO: 4801848 - DNA, 25 bp, Homo sapien
ttgttgattcaatgactgctgctat

SEQ ID NO: 4801849 - DNA, 25 bp, Homo sapien
tagaggatgtccacggcagccatgg

SEQ ID NO: 4801850 - DNA, 25 bp, Homo sapien
gtcatggagttccacctccgtgtga

SEQ ID NO: 4801851 - DNA, 25 bp, Homo sapien
atgtcaatgtagaggatgtccacgg

SEQ ID NO: 4801852 - DNA, 25 bp, Homo sapien
cacctccgtgtgatgtcaatgtaga

SEQ ID NO: 4801853 - DNA, 25 bp, Homo sapien
ccttgatgcccaggaaccggataaa

SEQ ID NO: 4801854 - DNA, 25 bp, Homo sapien
tgaaggtacgaaagcctgttggccc

SEQ ID NO: 4801855 - DNA, 25 bp, Homo sapien
caccaggcgcaggtagttgaactgt

SEQ ID NO: 4801856 - DNA, 25 bp, Homo sapien
agttgaactgttttgcgtacttggg

SEQ ID NO: 4801857 - DNA, 25 bp, Homo sapien
tggtcagctcgccgtccaaagcatc

SEQ ID NO: 4801858 - DNA, 25 bp, Homo sapien
ttcggggttggcgttgcagtctgga

SEQ ID NO: 4801859 - DNA, 25 bp, Homo sapien
gtcagctcgccgtccaaagcatctt

SEQ ID NO: 4801860 - DNA, 25 bp, Homo sapien
gggttggcgttgcagtctggagcac

SEQ ID NO: 4801861 - DNA, 25 bp, Homo sapien
ttgctaaaaccactgaggactccca

SEQ ID NO: 4801862 - DNA, 25 bp, Homo sapien
gctaaaaccactgaggactcccaag

SEQ ID NO: 4801863 - DNA, 25 bp, Homo sapien
actgaggactcccaagtctgtactg

SEQ ID NO: 4801864 - DNA, 25 bp, Homo sapien
ggactcccaagtctgtactgctcat

SEQ ID NO: 4801865 - DNA, 25 bp, Homo sapien
agtaatgcgtgagagagaactttgc

SEQ ID NO: 4801866 - DNA, 25 bp, Homo sapien
taatgcgtgagagagaactttgctg

SEQ ID NO: 4801867 - DNA, 25 bp, Homo sapien
atgaagtaatgcgtgagagagaact

SEQ ID NO: 4801868 - DNA, 25 bp, Homo sapien
gaggatgaagtaatgcgtgagagag

SEQ ID NO: 4801869 - DNA, 25 bp, Homo sapien
cccgcggtacaggtgttgaacacaa

SEQ ID NO: 4801870 - DNA, 25 bp, Homo sapien
aacacaaaaccagcttcactcagca

SEQ ID NO: 4801871 - DNA, 25 bp, Homo sapien
ctgcgctggcacatcggtcaattcc

SEQ ID NO: 4801872 - DNA, 25 bp, Homo sapien
catcggtcaattcccgcggtacagg

SEQ ID NO: 4801873 - DNA, 25 bp, Homo sapien
gattcccagtttccataagagaccg

SEQ ID NO: 4801874 - DNA, 25 bp, Homo sapien
tgagccaagctcaaaaccctgaagt

SEQ ID NO: 4801875 - DNA, 25 bp, Homo sapien
gctcagggcacaatctacagggcaa

SEQ ID NO: 4801876 - DNA, 25 bp, Homo sapien
tattcaaaaggccagttcaaaccag

SEQ ID NO: 4801877 - DNA, 25 bp, Homo sapien
ccaaagctctaaggggctgggccac

SEQ ID NO: 4801878 - DNA, 25 bp, Homo sapien
tggaactcccattggatgtatgacc

SEQ ID NO: 4801879 - DNA, 25 bp, Homo sapien
gtttcacagtatatctacccgtgga

SEQ ID NO: 4801880 - DNA, 25 bp, Homo sapien
ttactgttgcgaagtcagctgtcag

SEQ ID NO: 4801881 - DNA, 25 bp, Homo sapien
ttcagtgggcttcctgtcaaagatc

SEQ ID NO: 4801882 - DNA, 25 bp, Homo sapien
actcttgtgagattgggcttatggc

SEQ ID NO: 4801883 - DNA, 25 bp, Homo sapien
taagtatccctatattgccctgcgg

SEQ ID NO: 4801884 - DNA, 25 bp, Homo sapien
ggtttttcctggttcactcgctgag

SEQ ID NO: 4801885 - DNA, 25 bp, Homo sapien
tgggaacaccaacaacttagaacag

SEQ ID NO: 4801886 - DNA, 25 bp, Homo sapien
gagaatttcctctcctgatggcgag

SEQ ID NO: 4801887 - DNA, 25 bp, Homo sapien
gaagtgagccaaaatgtctgtaagc

SEQ ID NO: 4801888 - DNA, 25 bp, Homo sapien
cctccagcttgtgagagacatctta

SEQ ID NO: 4801889 - DNA, 25 bp, Homo sapien
tctgtaagcaaagtccaggagctct

SEQ ID NO: 4801890 - DNA, 25 bp, Homo sapien
gatgctactaacacctcttgtgggc

SEQ ID NO: 4801891 - DNA, 25 bp, Homo sapien
caccggcagaattgcagttccaatc

SEQ ID NO: 4801892 - DNA, 25 bp, Homo sapien
tagggatctctaatgtcaccggcag

SEQ ID NO: 4801893 - DNA, 25 bp, Homo sapien
gaacctgacaaacaggatgtgtgct

SEQ ID NO: 4801894 - DNA, 25 bp, Homo sapien
ggtttggatcttaccttagaggcca

SEQ ID NO: 4801895 - DNA, 25 bp, Homo sapien
tggccatgcctgtgattcgataaaa

SEQ ID NO: 4801896 - DNA, 25 bp, Homo sapien
caagctgatgggtctgtacatgtac

SEQ ID NO: 4801897 - DNA, 25 bp, Homo sapien
tgctccaggagccacaatcataaag

SEQ ID NO: 4801898 - DNA, 25 bp, Homo sapien
gacctcaactactattgacaggctg

SEQ ID NO: 4801899 - DNA, 25 bp, Homo sapien
tcaactactattgacaggctgatgg

SEQ ID NO: 4801900 - DNA, 25 bp, Homo sapien
tatgacctcaactactattgacagg

SEQ ID NO: 4801901 - DNA, 25 bp, Homo sapien
cttccgctatgacctcaactactat

SEQ ID NO: 4801902 - DNA, 25 bp, Homo sapien
taacagaatgttagggccaaaaatg

SEQ ID NO: 4801903 - DNA, 25 bp, Homo sapien
ttgctggagttctatcagaacagcc

SEQ ID NO: 4801904 - DNA, 25 bp, Homo sapien
aatgtcctcagtagtcaagcccaag

SEQ ID NO: 4801905 - DNA, 25 bp, Homo sapien
cagccacctgtacaacttgcctgag

SEQ ID NO: 4801906 - DNA, 25 bp, Homo sapien
cctgttcttgataaaggccttcgac

SEQ ID NO: 4801907 - DNA, 25 bp, Homo sapien
catttgttaaatggcaataggctca

SEQ ID NO: 4801908 - DNA, 25 bp, Homo sapien
cgacttctctatggtctggaacaaa

SEQ ID NO: 4801909 - DNA, 25 bp, Homo sapien
caaactaaatggtgcaaagatgacc

SEQ ID NO: 4801910 - DNA, 25 bp, Homo sapien
tcacagaggctacgggcatcaccga

SEQ ID NO: 4801911 - DNA, 25 bp, Homo sapien
cacctcacagaggctacgggcatca

SEQ ID NO: 4801912 - DNA, 25 bp, Homo sapien
ggcatcaccgatccagcctctagca

SEQ ID NO: 4801913 - DNA, 25 bp, Homo sapien
gggcatcaccgatccagcctctagc

SEQ ID NO: 4801914 - DNA, 25 bp, Homo sapien
cctttggaactatgatgggtggtcc

SEQ ID NO: 4801915 - DNA, 25 bp, Homo sapien
catgtgagatcctgctttaagtcac

SEQ ID NO: 4801916 - DNA, 25 bp, Homo sapien
gacattgccattcttgtattccaga

SEQ ID NO: 4801917 - DNA, 25 bp, Homo sapien
tatccaagcccaagctagtgcaagc

SEQ ID NO: 4801918 - DNA, 25 bp, Homo sapien
gctcctgtctgatggccctgtggaa

SEQ ID NO: 4801919 - DNA, 25 bp, Homo sapien
tctgatggccctgtggaatgacact

SEQ ID NO: 4801920 - DNA, 25 bp, Homo sapien
cctgtggaatgacactctcacatca

SEQ ID NO: 4801921 - DNA, 25 bp, Homo sapien
ggctcggctcctgtctgatggccct

SEQ ID NO: 4801922 - DNA, 25 bp, Homo sapien
agtgactttaccaccaagcccaggg

SEQ ID NO: 4801923 - DNA, 25 bp, Homo sapien
gaccatgacaatccagccaaggagg

SEQ ID NO: 4801924 - DNA, 25 bp, Homo sapien
gaaagcctgattgaccacttggtga

SEQ ID NO: 4801925 - DNA, 25 bp, Homo sapien
gagattgagaacattatcccaggcc

SEQ ID NO: 4801926 - DNA, 25 bp, Homo sapien
cactgatcggtggaagaagccacac

SEQ ID NO: 4801927 - DNA, 25 bp, Homo sapien
aggacagctttgaagcactgatcgg

SEQ ID NO: 4801928 - DNA, 25 bp, Homo sapien
tatttggctgccatcgggtctgagc

SEQ ID NO: 4801929 - DNA, 25 bp, Homo sapien
tgccatcgggtctgagctgctcaga

SEQ ID NO: 4801930 - DNA, 25 bp, Homo sapien
gtccatgaggcgcagagtgtctctg

SEQ ID NO: 4801931 - DNA, 25 bp, Homo sapien
gcagagtgtctctgatcacagccac

SEQ ID NO: 4801932 - DNA, 25 bp, Homo sapien
tttcttcttaagtgggtccatgagg

SEQ ID NO: 4801933 - DNA, 25 bp, Homo sapien
ttttcttcttaagtgggtccatgag

SEQ ID NO: 4801934 - DNA, 25 bp, Homo sapien
cttcatcaacgaggctggggacatt

SEQ ID NO: 4801935 - DNA, 25 bp, Homo sapien
catcaacgaggctggggacattttc

SEQ ID NO: 4801936 - DNA, 25 bp, Homo sapien
ttcttcatcaacgaggctggggaca

SEQ ID NO: 4801937 - DNA, 25 bp, Homo sapien
tcatcaacgaggctggggacatttt

SEQ ID NO: 4801938 - DNA, 25 bp, Homo sapien
tgttcgattctcatactgggatttg

SEQ ID NO: 4801939 - DNA, 25 bp, Homo sapien
gttcgattctcatactgggatttgc

SEQ ID NO: 4801940 - DNA, 25 bp, Homo sapien
ctgggcaggataaacacaattcaga

SEQ ID NO: 4801941 - DNA, 25 bp, Homo sapien
tatggtattagggtcattaagttga

SEQ ID NO: 4801942 - DNA, 25 bp, Homo sapien
ttcagaattactgtctctattgagt

SEQ ID NO: 4801943 - DNA, 25 bp, Homo sapien
tgggcaggataaacacaattcagaa

SEQ ID NO: 4801944 - DNA, 25 bp, Homo sapien
catcttgggctctcattgtgctgaa

SEQ ID NO: 4801945 - DNA, 25 bp, Homo sapien
tgcttctactctccacaagtctgtg

SEQ ID NO: 4801946 - DNA, 25 bp, Homo sapien
cttactattactacacatcttgggc

SEQ ID NO: 4801947 - DNA, 25 bp, Homo sapien
gctctatggcctgacatctgtcaac

SEQ ID NO: 4801948 - DNA, 25 bp, Homo sapien
aatgctggacgttgcgatatttcaa

SEQ ID NO: 4801949 - DNA, 25 bp, Homo sapien
cacattctattgctacgtcttcaag

SEQ ID NO: 4801950 - DNA, 25 bp, Homo sapien
ttataattgaatgctggacgttgcg

SEQ ID NO: 4801951 - DNA, 25 bp, Homo sapien
cactaagctcatatgttccttaaaa

SEQ ID NO: 4801952 - DNA, 25 bp, Homo sapien
gacagtttcagtgctggtcttgccc

SEQ ID NO: 4801953 - DNA, 25 bp, Homo sapien
tgtacctatggagtgtctggacacc

SEQ ID NO: 4801954 - DNA, 25 bp, Homo sapien
ccttacgagtggagaggacagtttc

SEQ ID NO: 4801955 - DNA, 25 bp, Homo sapien
tcagggtaatgtctaccccagggct

SEQ ID NO: 4801956 - DNA, 25 bp, Homo sapien
ccaggtttaacacccaagcccacag

SEQ ID NO: 4801957 - DNA, 25 bp, Homo sapien
acagaaagcttggaagttgggccca

SEQ ID NO: 4801958 - DNA, 25 bp, Homo sapien
acagcaccaccaacactgtcccctc

SEQ ID NO: 4801959 - DNA, 25 bp, Homo sapien
accttttaagataggtattcttcat

SEQ ID NO: 4801960 - DNA, 25 bp, Homo sapien
tcttgaggccggtcaaggctggaaa

SEQ ID NO: 4801961 - DNA, 25 bp, Homo sapien
caggctgggaactggcaatggttac

SEQ ID NO: 4801962 - DNA, 25 bp, Homo sapien
aggctggaaacgcaggctgggaact

SEQ ID NO: 4801963 - DNA, 25 bp, Homo sapien
atcctacacgaagccagagagccct

SEQ ID NO: 4801964 - DNA, 25 bp, Homo sapien
gtttcacgataaaagtgggcttcca

SEQ ID NO: 4801965 - DNA, 25 bp, Homo sapien
gatgatgtcagaccagaccttcttg

SEQ ID NO: 4801966 - DNA, 25 bp, Homo sapien
gatatggctcggtacaaaacctaga

SEQ ID NO: 4801967 - DNA, 25 bp, Homo sapien
gatgaccgtcttaatcaccacggag

SEQ ID NO: 4801968 - DNA, 25 bp, Homo sapien
tgggtctgcataattcatcctcgcc

SEQ ID NO: 4801969 - DNA, 25 bp, Homo sapien
agatagtcgatctggacctgtgggt

SEQ ID NO: 4801970 - DNA, 25 bp, Homo sapien
aattaactatccaggcacttgacca

SEQ ID NO: 4801971 - DNA, 25 bp, Homo sapien
gcacttgaccagtccagatagtcga

SEQ ID NO: 4801972 - DNA, 25 bp, Homo sapien
tgggaaactgtagatagttccgacg

SEQ ID NO: 4801973 - DNA, 25 bp, Homo sapien
gcagatgatgtgctgcttcggtggg

SEQ ID NO: 4801974 - DNA, 25 bp, Homo sapien
cttctgggaaactgtagatagttcc

SEQ ID NO: 4801975 - DNA, 25 bp, Homo sapien
tctgggaaactgtagatagttccga

SEQ ID NO: 4801976 - DNA, 25 bp, Homo sapien
ctctcaagctccgtggtgagcgcgg

SEQ ID NO: 4801977 - DNA, 25 bp, Homo sapien
aaccacgggcccgtgagaagtagtg

SEQ ID NO: 4801978 - DNA, 25 bp, Homo sapien
cacgggcccgtgagaagtagtgcct

SEQ ID NO: 4801979 - DNA, 25 bp, Homo sapien
tggagcacaggtatccgaacagacc

SEQ ID NO: 4801980 - DNA, 25 bp, Homo sapien
gcagagataaatctggctgattttc

SEQ ID NO: 4801981 - DNA, 25 bp, Homo sapien
ttatctaaccaaagggtgaaattca

SEQ ID NO: 4801982 - DNA, 25 bp, Homo sapien
tttactagttatgcgccagaaccca

SEQ ID NO: 4801983 - DNA, 25 bp, Homo sapien
tatggagtccttgccagccgctttg

SEQ ID NO: 4801984 - DNA, 25 bp, Homo sapien
cacagatgccagtcgtcatttgggc

SEQ ID NO: 4801985 - DNA, 25 bp, Homo sapien
cagtataatacatccaagcaggagg

SEQ ID NO: 4801986 - DNA, 25 bp, Homo sapien
tgcagacgtgtgagggcgatgtgtg

SEQ ID NO: 4801987 - DNA, 25 bp, Homo sapien
agtttctcatgctccgagcctggcc

SEQ ID NO: 4801988 - DNA, 25 bp, Homo sapien
tggctggtggccacctggcgctccc

SEQ ID NO: 4801989 - DNA, 25 bp, Homo sapien
caccggacggcatcactttggtaag

SEQ ID NO: 4801990 - DNA, 25 bp, Homo sapien
tgaatgaaacccatctggtcactgc

SEQ ID NO: 4801991 - DNA, 25 bp, Homo sapien
ggctaacttttgatgactaaactca

SEQ ID NO: 4801992 - DNA, 25 bp, Homo sapien
ctgggtcctgcagatacccctggcc

SEQ ID NO: 4801993 - DNA, 25 bp, Homo sapien
gaaagaaagtaaaccacagcatatg

SEQ ID NO: 4801994 - DNA, 25 bp, Homo sapien
tgaagaaatgggactgagtcgagga

SEQ ID NO: 4801995 - DNA, 25 bp, Homo sapien
atgggactgagtcgaggagagggaa

SEQ ID NO: 4801996 - DNA, 25 bp, Homo sapien
tgctctaaggctaggatcactttca

SEQ ID NO: 4801997 - DNA, 25 bp, Homo sapien
ctttcatattcaagagatgaagaaa

SEQ ID NO: 4801998 - DNA, 25 bp, Homo sapien
ccacacccggtaaatcgttcatatt

SEQ ID NO: 4801999 - DNA, 25 bp, Homo sapien
caccacacccggtaaatcgttcata

SEQ ID NO: 4802000 - DNA, 25 bp, Homo sapien
accacacccggtaaatcgttcatat

SEQ ID NO: 4802001 - DNA, 25 bp, Homo sapien
gcagaatccatgagcgagggtagaa

SEQ ID NO: 4802002 - DNA, 25 bp, Homo sapien
aacaaagagctggaactcgtcaggc

SEQ ID NO: 4802003 - DNA, 25 bp, Homo sapien
ggtagaagttgtactcctcaggaaa

SEQ ID NO: 4802004 - DNA, 25 bp, Homo sapien
gaaagagattctgcatggttctcac

SEQ ID NO: 4802005 - DNA, 25 bp, Homo sapien
aggccacttgcccttcgatgaacga

SEQ ID NO: 4802006 - DNA, 25 bp, Homo sapien
tgaacgagtaatatgctgaaggcat

SEQ ID NO: 4802007 - DNA, 25 bp, Homo sapien
ccttcgatgaacgagtaatatgctg

SEQ ID NO: 4802008 - DNA, 25 bp, Homo sapien
cacttgcccttcgatgaacgagtaa

SEQ ID NO: 4802009 - DNA, 25 bp, Homo sapien
tgctcccttgtttggcatggggatc

SEQ ID NO: 4802010 - DNA, 25 bp, Homo sapien
gctcccttgtttggcatggggatca

SEQ ID NO: 4802011 - DNA, 25 bp, Homo sapien
ctcccttgtttggcatggggatcag

SEQ ID NO: 4802012 - DNA, 25 bp, Homo sapien
gaaactccatgccagtagatgtcac

SEQ ID NO: 4802013 - DNA, 25 bp, Homo sapien
gtcacaaggcaagcgccggccaaat

SEQ ID NO: 4802014 - DNA, 25 bp, Homo sapien
ccggagaatatgtcattgtcgtgaa

SEQ ID NO: 4802015 - DNA, 25 bp, Homo sapien
cttgttcacttgaccggagaatatg

SEQ ID NO: 4802016 - DNA, 25 bp, Homo sapien
gacaaacccagaatttgaagccatg

SEQ ID NO: 4802017 - DNA, 25 bp, Homo sapien
tttgggaatgcctagggagacgccc

SEQ ID NO: 4802018 - DNA, 25 bp, Homo sapien
caacagcttgattgtagcctcatga

SEQ ID NO: 4802019 - DNA, 25 bp, Homo sapien
ggtaagcaatcggagtcacctgcca

SEQ ID NO: 4802020 - DNA, 25 bp, Homo sapien
tcatgatttccatactgctggtgcc

SEQ ID NO: 4802021 - DNA, 25 bp, Homo sapien
gggaccatgaggagcatgatcatag

SEQ ID NO: 4802022 - DNA, 25 bp, Homo sapien
gatcataggtttcctcgaggcagga

SEQ ID NO: 4802023 - DNA, 25 bp, Homo sapien
cgaggcaggaacaccttcatgattt

SEQ ID NO: 4802024 - DNA, 25 bp, Homo sapien
aagaaaccaagccagtcaacttagc

SEQ ID NO: 4802025 - DNA, 25 bp, Homo sapien
ttctcggtgcaccttgaagaaacca

SEQ ID NO: 4802026 - DNA, 25 bp, Homo sapien
aaatctgatgctttctcggtgcacc

SEQ ID NO: 4802027 - DNA, 25 bp, Homo sapien
catttccatgctgtgataaatctga

SEQ ID NO: 4802028 - DNA, 25 bp, Homo sapien
ctgtataactatgccctcttccagg

SEQ ID NO: 4802029 - DNA, 25 bp, Homo sapien
tagctccaacggtccattttcttgt

SEQ ID NO: 4802030 - DNA, 25 bp, Homo sapien
ttagctccaacggtccattttcttg

SEQ ID NO: 4802031 - DNA, 25 bp, Homo sapien
ttgaagaagaactgtataactatgc

SEQ ID NO: 4802032 - DNA, 25 bp, Homo sapien
caggggagcctgaggcacagcccca

SEQ ID NO: 4802033 - DNA, 25 bp, Homo sapien
aggggagcctgaggcacagccccat

SEQ ID NO: 4802034 - DNA, 25 bp, Homo sapien
ccagcaaaggtcttgggatggactc

SEQ ID NO: 4802035 - DNA, 25 bp, Homo sapien
tgctcattactacccagcaaaggtc

SEQ ID NO: 4802036 - DNA, 25 bp, Homo sapien
tactacccagcaaaggtcttgggat

SEQ ID NO: 4802037 - DNA, 25 bp, Homo sapien
caaaggtcttgggatggactcaaaa

SEQ ID NO: 4802038 - DNA, 25 bp, Homo sapien
gccttcatccggctgtgtgtgcagc

SEQ ID NO: 4802039 - DNA, 25 bp, Homo sapien
cttcatccggctgtgtgtgcagcat

SEQ ID NO: 4802040 - DNA, 25 bp, Homo sapien
ccttcatccggctgtgtgtgcagca

SEQ ID NO: 4802041 - DNA, 25 bp, Homo sapien
cagccttcatccggctgtgtgtgca

SEQ ID NO: 4802042 - DNA, 25 bp, Homo sapien
aagcaatcactgcttgtcttatgga

SEQ ID NO: 4802043 - DNA, 25 bp, Homo sapien
ttcagccttggcacgaaaagcaatc

SEQ ID NO: 4802044 - DNA, 25 bp, Homo sapien
cttcgggcggtgtatggtgtacacg

SEQ ID NO: 4802045 - DNA, 25 bp, Homo sapien
ggcggtgtatggtgtacacgggcac

SEQ ID NO: 4802046 - DNA, 25 bp, Homo sapien
cccctgggtcgctgtctctctctgc

SEQ ID NO: 4802047 - DNA, 25 bp, Homo sapien
agctgccccctgggtcgctgtctct

SEQ ID NO: 4802048 - DNA, 25 bp, Homo sapien
tcagctgccccctgggtcgctgtct

SEQ ID NO: 4802049 - DNA, 25 bp, Homo sapien
tgccccctgggtcgctgtctctctc

SEQ ID NO: 4802050 - DNA, 25 bp, Homo sapien
tcttccagcttcattaagggtgcga

SEQ ID NO: 4802051 - DNA, 25 bp, Homo sapien
aaggaagccgccagaaatgcctgca

SEQ ID NO: 4802052 - DNA, 25 bp, Homo sapien
caaggcacaatttgatacgaggagg

SEQ ID NO: 4802053 - DNA, 25 bp, Homo sapien
ggaatctcagggacgtgactcggct

SEQ ID NO: 4802054 - DNA, 25 bp, Homo sapien
gtagatcaacattaccattatgcgg

SEQ ID NO: 4802055 - DNA, 25 bp, Homo sapien
gggtgaccagtgcaacagtctcatg

SEQ ID NO: 4802056 - DNA, 25 bp, Homo sapien
ggtgaccagtgcaacagtctcatgt

SEQ ID NO: 4802057 - DNA, 25 bp, Homo sapien
caacagtctcatgtagatcaacatt

SEQ ID NO: 4802058 - DNA, 25 bp, Homo sapien
agtatgtttggttcccagggcccag

SEQ ID NO: 4802059 - DNA, 25 bp, Homo sapien
caatgtaatgacctgtaatgaccgc

SEQ ID NO: 4802060 - DNA, 25 bp, Homo sapien
tacctgcgggtacagcaataaacaa

SEQ ID NO: 4802061 - DNA, 25 bp, Homo sapien
catttacggaatgagtgaacgaacc

SEQ ID NO: 4802062 - DNA, 25 bp, Homo sapien
gatactttagaactgagagcctgcc

SEQ ID NO: 4802063 - DNA, 25 bp, Homo sapien
ttttctagccctcatatctctggcc

SEQ ID NO: 4802064 - DNA, 25 bp, Homo sapien
aatctgcctagcctgactccatagc

SEQ ID NO: 4802065 - DNA, 25 bp, Homo sapien
ttaagaccacggcactgacaagttg

SEQ ID NO: 4802066 - DNA, 25 bp, Homo sapien
tggagtcaaacttccccaacggcta

SEQ ID NO: 4802067 - DNA, 25 bp, Homo sapien
gcatctaccatagccaaggcacagg

SEQ ID NO: 4802068 - DNA, 25 bp, Homo sapien
tgttacccgcagcagatccctgtta

SEQ ID NO: 4802069 - DNA, 25 bp, Homo sapien
ccacctggaagtcggttctgcctga

SEQ ID NO: 4802070 - DNA, 25 bp, Homo sapien
aataccttatatgctgcaaataaag

SEQ ID NO: 4802071 - DNA, 25 bp, Homo sapien
tcaaatggctttatccacgtagcca

SEQ ID NO: 4802072 - DNA, 25 bp, Homo sapien
cctctagagtcactggtgctacatt

SEQ ID NO: 4802073 - DNA, 25 bp, Homo sapien
caattgcaacagacacctctagagt

SEQ ID NO: 4802074 - DNA, 25 bp, Homo sapien
gagtcactggtgctacattccatcc

SEQ ID NO: 4802075 - DNA, 25 bp, Homo sapien
cctttcattcactgcttactgacac

SEQ ID NO: 4802076 - DNA, 25 bp, Homo sapien
cattcaccctttcattcactgctta

SEQ ID NO: 4802077 - DNA, 25 bp, Homo sapien
gatgataactcatgtattcattcac

SEQ ID NO: 4802078 - DNA, 25 bp, Homo sapien
aatgggctcagggatgataactcat

SEQ ID NO: 4802079 - DNA, 25 bp, Homo sapien
tgtagtgagaccctaggcctgtctg

SEQ ID NO: 4802080 - DNA, 25 bp, Homo sapien
ctggtggaggagacagacgtacaca

SEQ ID NO: 4802081 - DNA, 25 bp, Homo sapien
gacgtacacatatctacaagcagag

SEQ ID NO: 4802082 - DNA, 25 bp, Homo sapien
taataggctgaagaggtgaagcaac

SEQ ID NO: 4802083 - DNA, 25 bp, Homo sapien
ttggggggtaggccttgaaggatga

SEQ ID NO: 4802084 - DNA, 25 bp, Homo sapien
cccactgtgcccacgcggccgggtc

SEQ ID NO: 4802085 - DNA, 25 bp, Homo sapien
ccactgtgcccacgcggccgggtcg

SEQ ID NO: 4802086 - DNA, 25 bp, Homo sapien
ttccacttgagctggcggatgctga

SEQ ID NO: 4802087 - DNA, 25 bp, Homo sapien
cggatgctgatcttcagggcatcca

SEQ ID NO: 4802088 - DNA, 25 bp, Homo sapien
ctggcggatgctgatcttcagggca

SEQ ID NO: 4802089 - DNA, 25 bp, Homo sapien
cttgagctggcggatgctgatcttc

SEQ ID NO: 4802090 - DNA, 25 bp, Homo sapien
cttggagctgtccacggtgaccggc

SEQ ID NO: 4802091 - DNA, 25 bp, Homo sapien
ttgcagcttcggcccttgtcccggg

SEQ ID NO: 4802092 - DNA, 25 bp, Homo sapien
ttctcgccggaaccgtggcccgagc

SEQ ID NO: 4802093 - DNA, 25 bp, Homo sapien
tgaccggccgctgggagccgttctc

SEQ ID NO: 4802094 - DNA, 25 bp, Homo sapien
ggcggcggccgctgaaggacctggg

SEQ ID NO: 4802095 - DNA, 25 bp, Homo sapien
cggcggccgctgaaggacctgggtg

SEQ ID NO: 4802096 - DNA, 25 bp, Homo sapien
ggcggccgctgaaggacctgggtgt

SEQ ID NO: 4802097 - DNA, 25 bp, Homo sapien
gcggccgctgaaggacctgggtgtt

SEQ ID NO: 4802098 - DNA, 25 bp, Homo sapien
gttccgccaccgtctccgctgtggc

SEQ ID NO: 4802099 - DNA, 25 bp, Homo sapien
ctgccttgcactccggttccccggc

SEQ ID NO: 4802100 - DNA, 25 bp, Homo sapien
gcgtccacgcggacctgttccgcca

SEQ ID NO: 4802101 - DNA, 25 bp, Homo sapien
ctgccccgccgcatggtgctcaggg

SEQ ID NO: 4802102 - DNA, 25 bp, Homo sapien
ccgccccagtccgccaccaaactgc

SEQ ID NO: 4802103 - DNA, 25 bp, Homo sapien
gccccagtccgccaccaaactgccg

SEQ ID NO: 4802104 - DNA, 25 bp, Homo sapien
ccagtccgccaccaaactgccgccg

SEQ ID NO: 4802105 - DNA, 25 bp, Homo sapien
cccagtccgccaccaaactgccgcc

SEQ ID NO: 4802106 - DNA, 25 bp, Homo sapien
acagcggcagtcaccgcatcgagac

SEQ ID NO: 4802107 - DNA, 25 bp, Homo sapien
cgggaagggacaatcgccggccgag

SEQ ID NO: 4802108 - DNA, 25 bp, Homo sapien
gatcgctcaggctcgggttgacagc

SEQ ID NO: 4802109 - DNA, 25 bp, Homo sapien
cagcgacctcataggcgaggctgcc

SEQ ID NO: 4802110 - DNA, 25 bp, Homo sapien
agcgggagggcagattgagcgcgcg

SEQ ID NO: 4802111 - DNA, 25 bp, Homo sapien
ggagggcagattgagcgcgcgtggg

SEQ ID NO: 4802112 - DNA, 25 bp, Homo sapien
cccgcggatgcgctggatctcgagg

SEQ ID NO: 4802113 - DNA, 25 bp, Homo sapien
gcgcagaactcggagtggcgaggag

SEQ ID NO: 4802114 - DNA, 25 bp, Homo sapien
aacaactacctcaagcaggaggctc

SEQ ID NO: 4802115 - DNA, 25 bp, Homo sapien
aaaacaactacctcaagcaggaggc

SEQ ID NO: 4802116 - DNA, 25 bp, Homo sapien
aactacctcaagcaggaggctcagt

SEQ ID NO: 4802117 - DNA, 25 bp, Homo sapien
tacctcaagcaggaggctcagtccc

SEQ ID NO: 4802118 - DNA, 25 bp, Homo sapien
aagaagaggagatgcaccatactct

SEQ ID NO: 4802119 - DNA, 25 bp, Homo sapien
gaagaagaggagatgcaccatactc

SEQ ID NO: 4802120 - DNA, 25 bp, Homo sapien
agaagaggagatgcaccatactcta

SEQ ID NO: 4802121 - DNA, 25 bp, Homo sapien
gaagaggagatgcaccatactctat

SEQ ID NO: 4802122 - DNA, 25 bp, Homo sapien
ggctcaactgatgcttccttcactc

SEQ ID NO: 4802123 - DNA, 25 bp, Homo sapien
ccccggggcctggtgattttctctg

SEQ ID NO: 4802124 - DNA, 25 bp, Homo sapien
acagggatgagtaagacaaggcccc

SEQ ID NO: 4802125 - DNA, 25 bp, Homo sapien
tttctctgtccaccgagaggccagg

SEQ ID NO: 4802126 - DNA, 25 bp, Homo sapien
tgctgaggacaggatgttcaggctc

SEQ ID NO: 4802127 - DNA, 25 bp, Homo sapien
catgctgaggacaggatgttcaggc

SEQ ID NO: 4802128 - DNA, 25 bp, Homo sapien
tgaggacaggatgttcaggctcctg

SEQ ID NO: 4802129 - DNA, 25 bp, Homo sapien
ctgaggacaggatgttcaggctcct

SEQ ID NO: 4802130 - DNA, 25 bp, Homo sapien
tgcattccatgaatctctgcttcct

SEQ ID NO: 4802131 - DNA, 25 bp, Homo sapien
catgcattccatgaatctctgcttc

SEQ ID NO: 4802132 - DNA, 25 bp, Homo sapien
ctcatgcattccatgaatctctgct

SEQ ID NO: 4802133 - DNA, 25 bp, Homo sapien
tctgcttcctggtacctgctggtca

SEQ ID NO: 4802134 - DNA, 25 bp, Homo sapien
tcacagtggaggtgtccgtttgatc

SEQ ID NO: 4802135 - DNA, 25 bp, Homo sapien
gccttgagctggacaccagagcttc

SEQ ID NO: 4802136 - DNA, 25 bp, Homo sapien
ggtgtccgtttgatcagccttgagc

SEQ ID NO: 4802137 - DNA, 25 bp, Homo sapien
caaggacagggagactataccccca

SEQ ID NO: 4802138 - DNA, 25 bp, Homo sapien
aggacgccagtgtaccctgcctgct

SEQ ID NO: 4802139 - DNA, 25 bp, Homo sapien
ggacgccagtgtaccctgcctgctg

SEQ ID NO: 4802140 - DNA, 25 bp, Homo sapien
acgccagtgtaccctgcctgctgct

SEQ ID NO: 4802141 - DNA, 25 bp, Homo sapien
gaaggacgccagtgtaccctgcctg

SEQ ID NO: 4802142 - DNA, 25 bp, Homo sapien
tgctctgagctgtacttgggatgcg

SEQ ID NO: 4802143 - DNA, 25 bp, Homo sapien
ctgtcctgttgcctgcggtggtggg

SEQ ID NO: 4802144 - DNA, 25 bp, Homo sapien
tctgggagggagctgtcctgttgcc

SEQ ID NO: 4802145 - DNA, 25 bp, Homo sapien
acatgcctggacaccagcgtgctct

SEQ ID NO: 4802146 - DNA, 25 bp, Homo sapien
gtccccgttactgcccctgctgtac

SEQ ID NO: 4802147 - DNA, 25 bp, Homo sapien
acggtccccgttactgcccctgctg

SEQ ID NO: 4802148 - DNA, 25 bp, Homo sapien
cagacggtccccgttactgcccctg

SEQ ID NO: 4802149 - DNA, 25 bp, Homo sapien
gagcagacggtccccgttactgccc

SEQ ID NO: 4802150 - DNA, 25 bp, Homo sapien
cttattcattagcgcataaacaatt

SEQ ID NO: 4802151 - DNA, 25 bp, Homo sapien
tttgtttctcggcactcgagcctgt

SEQ ID NO: 4802152 - DNA, 25 bp, Homo sapien
tccaaacaggatcttgcaatcaggg

SEQ ID NO: 4802153 - DNA, 25 bp, Homo sapien
caggatcttgcaatcagggccttat

SEQ ID NO: 4802154 - DNA, 25 bp, Homo sapien
tgcgactctgtctagggaggcctca

SEQ ID NO: 4802155 - DNA, 25 bp, Homo sapien
ttgccctctgtaagatgtgctcagc

SEQ ID NO: 4802156 - DNA, 25 bp, Homo sapien
gcatgcgtgatctcccgtgctggct

SEQ ID NO: 4802157 - DNA, 25 bp, Homo sapien
gaataatggatgctttgggtgctga

SEQ ID NO: 4802158 - DNA, 25 bp, Homo sapien
cactgtcgggcaggtttgcgcccac

SEQ ID NO: 4802159 - DNA, 25 bp, Homo sapien
ccttaaaggctcctcgcactgtcgg

SEQ ID NO: 4802160 - DNA, 25 bp, Homo sapien
ggctcctcgcactgtcgggcaggtt

SEQ ID NO: 4802161 - DNA, 25 bp, Homo sapien
ggtttgcgcccacacatgtgggtct

SEQ ID NO: 4802162 - DNA, 25 bp, Homo sapien
tgttaatgtttgtgatcccggaaag

SEQ ID NO: 4802163 - DNA, 25 bp, Homo sapien
tatcagtcgatgcaaaccgcatggg

SEQ ID NO: 4802164 - DNA, 25 bp, Homo sapien
cgttgtctgagcacatgaccgagtg

SEQ ID NO: 4802165 - DNA, 25 bp, Homo sapien
ggcgttttcatcagtcgttgtctga

SEQ ID NO: 4802166 - DNA, 25 bp, Homo sapien
ggctgcagatctccctcgatctcag

SEQ ID NO: 4802167 - DNA, 25 bp, Homo sapien
aataaaagcggctgccatgtgtggc

SEQ ID NO: 4802168 - DNA, 25 bp, Homo sapien
tgtggcaggctgcagatctccctcg

SEQ ID NO: 4802169 - DNA, 25 bp, Homo sapien
tccagaaataaaagcggctgccatg

SEQ ID NO: 4802170 - DNA, 25 bp, Homo sapien
cggtaaaggtcgatctgttttcact

SEQ ID NO: 4802171 - DNA, 25 bp, Homo sapien
tgatagggattctccggtaaaggtc

SEQ ID NO: 4802172 - DNA, 25 bp, Homo sapien
ctgggatccggtcttggtcttgagt

SEQ ID NO: 4802173 - DNA, 25 bp, Homo sapien
tggtcttgagtgatagggattctcc

SEQ ID NO: 4802174 - DNA, 25 bp, Homo sapien
caaagttgaaagctagggtggagga

SEQ ID NO: 4802175 - DNA, 25 bp, Homo sapien
gcaaagttgaaagctagggtggagg

SEQ ID NO: 4802176 - DNA, 25 bp, Homo sapien
aaagcaaagttgaaagctagggtgg

SEQ ID NO: 4802177 - DNA, 25 bp, Homo sapien
aagcaaagttgaaagctagggtgga

SEQ ID NO: 4802178 - DNA, 25 bp, Homo sapien
gctggaacctaagtcttcaagtcta

SEQ ID NO: 4802179 - DNA, 25 bp, Homo sapien
ttggcatgcctaagataagatacac

SEQ ID NO: 4802180 - DNA, 25 bp, Homo sapien
taatgtcagagctaaagctggaacc

SEQ ID NO: 4802181 - DNA, 25 bp, Homo sapien
gaggcattattatctctagtgcaca

SEQ ID NO: 4802182 - DNA, 25 bp, Homo sapien
tgacgaaataactgctggccagtat

SEQ ID NO: 4802183 - DNA, 25 bp, Homo sapien
taatcaatgcaagtccaatattctg

SEQ ID NO: 4802184 - DNA, 25 bp, Homo sapien
gcacacactcgtcaaactttgcctg

SEQ ID NO: 4802185 - DNA, 25 bp, Homo sapien
tgctgtttgcgacagtgacgaaata

SEQ ID NO: 4802186 - DNA, 25 bp, Homo sapien
tcggtggtttctgcctagccagcag

SEQ ID NO: 4802187 - DNA, 25 bp, Homo sapien
gatatgtatacgaagtccgccagcc

SEQ ID NO: 4802188 - DNA, 25 bp, Homo sapien
cagccaggacaattagactcagtcc

SEQ ID NO: 4802189 - DNA, 25 bp, Homo sapien
gataaagggcacactttgtctaggt

SEQ ID NO: 4802190 - DNA, 25 bp, Homo sapien
tgatgggccgcagctttaagcacag

SEQ ID NO: 4802191 - DNA, 25 bp, Homo sapien
ccttgttgggcttatcacattgagc

SEQ ID NO: 4802192 - DNA, 25 bp, Homo sapien
cattgagctccatagtgatgggccg

SEQ ID NO: 4802193 - DNA, 25 bp, Homo sapien
tcttcccagcggcagagcataaact

SEQ ID NO: 4802194 - DNA, 25 bp, Homo sapien
tcactgaggtggatgagcctgagat

SEQ ID NO: 4802195 - DNA, 25 bp, Homo sapien
tcaccatatcccctcacctgcttct

SEQ ID NO: 4802196 - DNA, 25 bp, Homo sapien
ttcactgagactgatgaattccaac

SEQ ID NO: 4802197 - DNA, 25 bp, Homo sapien
tatcccctcacctgcttcttcactg

SEQ ID NO: 4802198 - DNA, 25 bp, Homo sapien
ttatttataccatgccttgagtttt

SEQ ID NO: 4802199 - DNA, 25 bp, Homo sapien
ttataccatgccttgagttttccta

SEQ ID NO: 4802200 - DNA, 25 bp, Homo sapien
tttatttataccatgccttgagttt

SEQ ID NO: 4802201 - DNA, 25 bp, Homo sapien
ctttatttataccatgccttgagtt

SEQ ID NO: 4802202 - DNA, 25 bp, Homo sapien
ctcatctactttcagctcctctaga

SEQ ID NO: 4802203 - DNA, 25 bp, Homo sapien
gctcctctagagtgggcagctccac

SEQ ID NO: 4802204 - DNA, 25 bp, Homo sapien
ctctagagtgggcagctccactatc

SEQ ID NO: 4802205 - DNA, 25 bp, Homo sapien
tcctctagagtgggcagctccacta

SEQ ID NO: 4802206 - DNA, 25 bp, Homo sapien
cggcaacacgcaggcgtattgccct

SEQ ID NO: 4802207 - DNA, 25 bp, Homo sapien
cgacgagaagccctcagccgcgtcg

SEQ ID NO: 4802208 - DNA, 25 bp, Homo sapien
tttcgaccgccgagtgccacacggc

SEQ ID NO: 4802209 - DNA, 25 bp, Homo sapien
tgcgcatgcgcatccggcaacacgc

SEQ ID NO: 4802210 - DNA, 25 bp, Homo sapien
caggttccatttgccttgagcccac

SEQ ID NO: 4802211 - DNA, 25 bp, Homo sapien
taccagtagggtgatcaaaaccttc

SEQ ID NO: 4802212 - DNA, 25 bp, Homo sapien
agagcgttccctttctcctaatgga

SEQ ID NO: 4802213 - DNA, 25 bp, Homo sapien
tactgtggtcagtggaagtaccaag

SEQ ID NO: 4802214 - DNA, 25 bp, Homo sapien
gggtgtctcttgcaatatgtttctt

SEQ ID NO: 4802215 - DNA, 25 bp, Homo sapien
tttggggtgtctcttgcaatatgtt

SEQ ID NO: 4802216 - DNA, 25 bp, Homo sapien
ctggggtagcccatggtcagatttg

SEQ ID NO: 4802217 - DNA, 25 bp, Homo sapien
aagtttttcactggggtagcccatg

SEQ ID NO: 4802218 - DNA, 25 bp, Homo sapien
tacagagttgtcaatgtaccccacg

SEQ ID NO: 4802219 - DNA, 25 bp, Homo sapien
tcaatctggatgtctgggtctgtga

SEQ ID NO: 4802220 - DNA, 25 bp, Homo sapien
gagaattctcgcaaagatagtacag

SEQ ID NO: 4802221 - DNA, 25 bp, Homo sapien
catgaggatctcaccttttagggag

SEQ ID NO: 4802222 - DNA, 25 bp, Homo sapien
gggagccgcagagaggcgcagggga

SEQ ID NO: 4802223 - DNA, 25 bp, Homo sapien
tgttagtcccctggagaaaccatgg

SEQ ID NO: 4802224 - DNA, 25 bp, Homo sapien
ggctttatagctggacaatcctagg

SEQ ID NO: 4802225 - DNA, 25 bp, Homo sapien
taaggagacactgcgtttagggctt

SEQ ID NO: 4802226 - DNA, 25 bp, Homo sapien
taaaacggtggtgaaggcttgccca

SEQ ID NO: 4802227 - DNA, 25 bp, Homo sapien
taatccacgcaaggaatagaccctg

SEQ ID NO: 4802228 - DNA, 25 bp, Homo sapien
gaaagatttgagctccaaggccagg

SEQ ID NO: 4802229 - DNA, 25 bp, Homo sapien
tcatggtcgtgtgtagcctgagccc

SEQ ID NO: 4802230 - DNA, 25 bp, Homo sapien
gaaaatgcatcaggacaccaggtaa

SEQ ID NO: 4802231 - DNA, 25 bp, Homo sapien
ggcagatgcggaagtgccggcagcg

SEQ ID NO: 4802232 - DNA, 25 bp, Homo sapien
ctccaacccagcagtctctgaagac

SEQ ID NO: 4802233 - DNA, 25 bp, Homo sapien
tccaacccagcagtctctgaagact

SEQ ID NO: 4802234 - DNA, 25 bp, Homo sapien
ccaacccagcagtctctgaagactg

SEQ ID NO: 4802235 - DNA, 25 bp, Homo sapien
caccagacccaacctggctccattt

SEQ ID NO: 4802236 - DNA, 25 bp, Homo sapien
ccagacccaacctggctccatttac

SEQ ID NO: 4802237 - DNA, 25 bp, Homo sapien
accagacccaacctggctccattta

SEQ ID NO: 4802238 - DNA, 25 bp, Homo sapien
ccaccagacccaacctggctccatt

SEQ ID NO: 4802239 - DNA, 25 bp, Homo sapien
gagcggcccatccatatcggctttg

SEQ ID NO: 4802240 - DNA, 25 bp, Homo sapien
ccatatcggctttgaggtggacggg

SEQ ID NO: 4802241 - DNA, 25 bp, Homo sapien
cggcagtgcacctgcccgcactgta

SEQ ID NO: 4802242 - DNA, 25 bp, Homo sapien
cccggttggagagcggcccatccat

SEQ ID NO: 4802243 - DNA, 25 bp, Homo sapien
tagtggatgtcgtcggacagggcgg

SEQ ID NO: 4802244 - DNA, 25 bp, Homo sapien
tgacgcgcccggcagttttgaaacc

SEQ ID NO: 4802245 - DNA, 25 bp, Homo sapien
tcaatgtagccgtgcagggtgacca

SEQ ID NO: 4802246 - DNA, 25 bp, Homo sapien
tgttgcggcgtgtgctttttatgac

SEQ ID NO: 4802247 - DNA, 25 bp, Homo sapien
gcgggactgcctcgtcgcctcctgg

SEQ ID NO: 4802248 - DNA, 25 bp, Homo sapien
tggaacgacagcctcggcagcctca

SEQ ID NO: 4802249 - DNA, 25 bp, Homo sapien
aggaaaagagtcggacgcgccgccg

SEQ ID NO: 4802250 - DNA, 25 bp, Homo sapien
gccgggagaccccaggcgggactgc

SEQ ID NO: 4802251 - DNA, 25 bp, Homo sapien
ggttgttgtcctgcgcgaactgcgc

SEQ ID NO: 4802252 - DNA, 25 bp, Homo sapien
ctggatgactctccggctgaggccc

SEQ ID NO: 4802253 - DNA, 25 bp, Homo sapien
tcctgcgcgaactgcgcctgcataa

SEQ ID NO: 4802254 - DNA, 25 bp, Homo sapien
actctccggctgaggcccgtcatgt

SEQ ID NO: 4802255 - DNA, 25 bp, Homo sapien
ggtgaaggacgtccgcgcgcgcttg

SEQ ID NO: 4802256 - DNA, 25 bp, Homo sapien
gccggcttgggttgactgtcctgtt

SEQ ID NO: 4802257 - DNA, 25 bp, Homo sapien
gactgtcctgttccgagggcactgc

SEQ ID NO: 4802258 - DNA, 25 bp, Homo sapien
ctgcagctgttccgcggtgaaggac

SEQ ID NO: 4802259 - DNA, 25 bp, Homo sapien
cgatagaagcagctgaccacgcgtc

SEQ ID NO: 4802260 - DNA, 25 bp, Homo sapien
gggcgatagaagcagctgaccacgc

SEQ ID NO: 4802261 - DNA, 25 bp, Homo sapien
atagaagcagctgaccacgcgtccc

SEQ ID NO: 4802262 - DNA, 25 bp, Homo sapien
gcgatagaagcagctgaccacgcgt

SEQ ID NO: 4802263 - DNA, 25 bp, Homo sapien
tccctgctggcgaaactgggggaca

SEQ ID NO: 4802264 - DNA, 25 bp, Homo sapien
cctgctggcgaaactgggggacacc

SEQ ID NO: 4802265 - DNA, 25 bp, Homo sapien
tgctggcgaaactgggggacaccaa

SEQ ID NO: 4802266 - DNA, 25 bp, Homo sapien
gctggcgaaactgggggacaccaaa

SEQ ID NO: 4802267 - DNA, 25 bp, Homo sapien
cgggagggcccaatcggtagaggag

SEQ ID NO: 4802268 - DNA, 25 bp, Homo sapien
tgcgggactataccgggagggccca

SEQ ID NO: 4802269 - DNA, 25 bp, Homo sapien
tcggtagaggagtgtgggtggttcc

SEQ ID NO: 4802270 - DNA, 25 bp, Homo sapien
gctgcctgcgggactataccgggag

SEQ ID NO: 4802271 - DNA, 25 bp, Homo sapien
gcaccgggcacacttggtcccgaat

SEQ ID NO: 4802272 - DNA, 25 bp, Homo sapien
aggccgaactcctcaccagtggaca

SEQ ID NO: 4802273 - DNA, 25 bp, Homo sapien
cagctggcgcttgcacgagaagcag

SEQ ID NO: 4802274 - DNA, 25 bp, Homo sapien
gctggcgtagatctgtcggccgcac

SEQ ID NO: 4802275 - DNA, 25 bp, Homo sapien
tgcaggtcgagaggacaggcacggg

SEQ ID NO: 4802276 - DNA, 25 bp, Homo sapien
gacaggcacggggtgtcgagactca

SEQ ID NO: 4802277 - DNA, 25 bp, Homo sapien
gtgtcgagactcagacaggccaacc

SEQ ID NO: 4802278 - DNA, 25 bp, Homo sapien
tgtcgagactcagacaggccaacct

SEQ ID NO: 4802279 - DNA, 25 bp, Homo sapien
agcaactggactggcgacgaggaaa

SEQ ID NO: 4802280 - DNA, 25 bp, Homo sapien
tctccgggccgctgattctggaatc

SEQ ID NO: 4802281 - DNA, 25 bp, Homo sapien
ctgattctggaatctccagcgcggg

SEQ ID NO: 4802282 - DNA, 25 bp, Homo sapien
gaatcccgcatggatgaacaggaag

SEQ ID NO: 4802283 - DNA, 25 bp, Homo sapien
gctccgacagaacgacagactcctt

SEQ ID NO: 4802284 - DNA, 25 bp, Homo sapien
acacagcgaaatcggcggcggagac

SEQ ID NO: 4802285 - DNA, 25 bp, Homo sapien
cgcgaggaggcttatcgatccaggc

SEQ ID NO: 4802286 - DNA, 25 bp, Homo sapien
cactggattccagacacagcgaaat

SEQ ID NO: 4802287 - DNA, 25 bp, Homo sapien
gaccgcagtgacctgatattgacaa

SEQ ID NO: 4802288 - DNA, 25 bp, Homo sapien
tagatcctgtgaggcgaacaaggtg

SEQ ID NO: 4802289 - DNA, 25 bp, Homo sapien
tattgagccgagaggccgaaactca

SEQ ID NO: 4802290 - DNA, 25 bp, Homo sapien
catgaagtcgtttgggcctagctgg

SEQ ID NO: 4802291 - DNA, 25 bp, Homo sapien
tccttgcacactgagtcctaggcca

SEQ ID NO: 4802292 - DNA, 25 bp, Homo sapien
aggcactccttgcacactgagtcct

SEQ ID NO: 4802293 - DNA, 25 bp, Homo sapien
gctttccccagcactactgcacaga

SEQ ID NO: 4802294 - DNA, 25 bp, Homo sapien
cactgagtcctaggccacttggttg

SEQ ID NO: 4802295 - DNA, 25 bp, Homo sapien
tcgggccaaaacaacagcgaagctg

SEQ ID NO: 4802296 - DNA, 25 bp, Homo sapien
ttcatggctagaagcgaggcccagg

SEQ ID NO: 4802297 - DNA, 25 bp, Homo sapien
cataatcaggtcaggtccgggcttc

SEQ ID NO: 4802298 - DNA, 25 bp, Homo sapien
ccagtgcacaggaggagatcgcctt

SEQ ID NO: 4802299 - DNA, 25 bp, Homo sapien
cttgttcttgatgtagcagctgttc

SEQ ID NO: 4802300 - DNA, 25 bp, Homo sapien
ccgcacgtgccagatgaggttgttg

SEQ ID NO: 4802301 - DNA, 25 bp, Homo sapien
ttctgctgcctcagcgacgtgcgac

SEQ ID NO: 4802302 - DNA, 25 bp, Homo sapien
acggagcactcgaggcaccgcacgt

SEQ ID NO: 4802303 - DNA, 25 bp, Homo sapien
ggcctgaccctcgtccttgtccaga

SEQ ID NO: 4802304 - DNA, 25 bp, Homo sapien
tcttgcctgcagacggcacggagga

SEQ ID NO: 4802305 - DNA, 25 bp, Homo sapien
gacagatggcgtgctgggcgtacat

SEQ ID NO: 4802306 - DNA, 25 bp, Homo sapien
ggtccaggatctcgaggccgcagct

SEQ ID NO: 4802307 - DNA, 25 bp, Homo sapien
tcccttcaagacagcgggtggtcgc

SEQ ID NO: 4802308 - DNA, 25 bp, Homo sapien
caagacagcgggtggtcgctttgca

SEQ ID NO: 4802309 - DNA, 25 bp, Homo sapien
tggtcgctttgcagccggaccctgg

SEQ ID NO: 4802310 - DNA, 25 bp, Homo sapien
cgggcggcgcggtcccttcaagaca

SEQ ID NO: 4802311 - DNA, 25 bp, Homo sapien
ggctgctgaactggctccgcacagc

SEQ ID NO: 4802312 - DNA, 25 bp, Homo sapien
gctgctgaactggctccgcacagcc

SEQ ID NO: 4802313 - DNA, 25 bp, Homo sapien
cggctgctgaactggctccgcacag

SEQ ID NO: 4802314 - DNA, 25 bp, Homo sapien
cggggcggcgttctcatgcttccag

SEQ ID NO: 4802315 - DNA, 25 bp, Homo sapien
cgccggggcggcgttctcatgcttc

SEQ ID NO: 4802316 - DNA, 25 bp, Homo sapien
gggcggcgttctcatgcttccagta

SEQ ID NO: 4802317 - DNA, 25 bp, Homo sapien
cggcgttctcatgcttccagtacat

SEQ ID NO: 4802318 - DNA, 25 bp, Homo sapien
cggggaacctcgggctcagcgggcg

SEQ ID NO: 4802319 - DNA, 25 bp, Homo sapien
gctcagcgggcgcgcagcgcggaga

SEQ ID NO: 4802320 - DNA, 25 bp, Homo sapien
ggaacctcgggctcagcgggcgcgc

SEQ ID NO: 4802321 - DNA, 25 bp, Homo sapien
ctcagcgggcgcgcagcgcggagag

SEQ ID NO: 4802322 - DNA, 25 bp, Homo sapien
agggggaccacagccgcagtgggag

SEQ ID NO: 4802323 - DNA, 25 bp, Homo sapien
gccgagggggaccacagccgcagtg

SEQ ID NO: 4802324 - DNA, 25 bp, Homo sapien
gggaccacagccgcagtgggagcag

SEQ ID NO: 4802325 - DNA, 25 bp, Homo sapien
tgcgccgagggggaccacagccgca

SEQ ID NO: 4802326 - DNA, 25 bp, Homo sapien
gtacaggagggacccatggccatac

SEQ ID NO: 4802327 - DNA, 25 bp, Homo sapien
aggtacaggagggacccatggccat

SEQ ID NO: 4802328 - DNA, 25 bp, Homo sapien
acaggagggacccatggccatacca

SEQ ID NO: 4802329 - DNA, 25 bp, Homo sapien
caggagggacccatggccataccat

SEQ ID NO: 4802330 - DNA, 25 bp, Homo sapien
gggcacgaggcaccacacttactct

SEQ ID NO: 4802331 - DNA, 25 bp, Homo sapien
aagaaccagacagtgcaccagctcc

SEQ ID NO: 4802332 - DNA, 25 bp, Homo sapien
tgttcacatcatttacacgggcacg

SEQ ID NO: 4802333 - DNA, 25 bp, Homo sapien
ctctgctctataagaaccagacagt

SEQ ID NO: 4802334 - DNA, 25 bp, Homo sapien
cacatcacacatgtcatcacctcca

SEQ ID NO: 4802335 - DNA, 25 bp, Homo sapien
acatcacacatgtcatcacctccat

SEQ ID NO: 4802336 - DNA, 25 bp, Homo sapien
tcactaaacaggatgtggtcatctg

SEQ ID NO: 4802337 - DNA, 25 bp, Homo sapien
tctcccggtcactaaacaggatgtg

SEQ ID NO: 4802338 - DNA, 25 bp, Homo sapien
ttcttctcccggtcactaaacagga

SEQ ID NO: 4802339 - DNA, 25 bp, Homo sapien
taaacaggatgtggtcatctggtcc

SEQ ID NO: 4802340 - DNA, 25 bp, Homo sapien
aacagccacatgtaaatgcctgggc

SEQ ID NO: 4802341 - DNA, 25 bp, Homo sapien
aagggaccgatagtatatatttcag

SEQ ID NO: 4802342 - DNA, 25 bp, Homo sapien
tatatttcaggttttgtaggccaca

SEQ ID NO: 4802343 - DNA, 25 bp, Homo sapien
tccagtcatggaatattgtttagag

SEQ ID NO: 4802344 - DNA, 25 bp, Homo sapien
gaaagagcgttctaagctaaggcaa

SEQ ID NO: 4802345 - DNA, 25 bp, Homo sapien
cgggctctgcggctatctggagaaa

SEQ ID NO: 4802346 - DNA, 25 bp, Homo sapien
tcagacacgtagtgaaggacaggtc

SEQ ID NO: 4802347 - DNA, 25 bp, Homo sapien
gaatagcaagaaggccaacgtggct

SEQ ID NO: 4802348 - DNA, 25 bp, Homo sapien
gtcctgagtggaaacaagcctgtca

SEQ ID NO: 4802349 - DNA, 25 bp, Homo sapien
ttagaagaagcaccccacgtggaca

SEQ ID NO: 4802350 - DNA, 25 bp, Homo sapien
gagacagagctgcagaatacctggt

SEQ ID NO: 4802351 - DNA, 25 bp, Homo sapien
cagtctatgccagtaagtgaacgag

SEQ ID NO: 4802352 - DNA, 25 bp, Homo sapien
caagaatggcacctggagtaacaaa

SEQ ID NO: 4802353 - DNA, 25 bp, Homo sapien
tctcctcgtcctgcacaagataatg

SEQ ID NO: 4802354 - DNA, 25 bp, Homo sapien
ggagagttacttgcatcatagacag

SEQ ID NO: 4802355 - DNA, 25 bp, Homo sapien
ggtgctgcccaattaaacagtatgt

SEQ ID NO: 4802356 - DNA, 25 bp, Homo sapien
cagttggagggattgccgtagtaaa

SEQ ID NO: 4802357 - DNA, 25 bp, Homo sapien
cagtccagttggagggattgccgta

SEQ ID NO: 4802358 - DNA, 25 bp, Homo sapien
tccagttggagggattgccgtagta

SEQ ID NO: 4802359 - DNA, 25 bp, Homo sapien
ttcagtccagttggagggattgccg

SEQ ID NO: 4802360 - DNA, 25 bp, Homo sapien
gaacatgatttaaaatctgtctctc

SEQ ID NO: 4802361 - DNA, 25 bp, Homo sapien
aacaacagttctgaacatgatttaa

SEQ ID NO: 4802362 - DNA, 25 bp, Homo sapien
catgatttaaaatctgtctctcact

SEQ ID NO: 4802363 - DNA, 25 bp, Homo sapien
acatgatttaaaatctgtctctcac

SEQ ID NO: 4802364 - DNA, 25 bp, Homo sapien
ctggcacactatagaatgtttctgg

SEQ ID NO: 4802365 - DNA, 25 bp, Homo sapien
tttgctctggcacactatagaatgt

SEQ ID NO: 4802366 - DNA, 25 bp, Homo sapien
gccttttgctctggcacactataga

SEQ ID NO: 4802367 - DNA, 25 bp, Homo sapien
ccaaccagccaattagagcatccca

SEQ ID NO: 4802368 - DNA, 25 bp, Homo sapien
gattgtgctccgttgaatagtacca

SEQ ID NO: 4802369 - DNA, 25 bp, Homo sapien
gctcaattccatacatagtttaggg

SEQ ID NO: 4802370 - DNA, 25 bp, Homo sapien
gggatacaacgctatttattctgga

SEQ ID NO: 4802371 - DNA, 25 bp, Homo sapien
cagacgattttaggtgtggagacca

SEQ ID NO: 4802372 - DNA, 25 bp, Homo sapien
tactctgcatcaggattttccgcca

SEQ ID NO: 4802373 - DNA, 25 bp, Homo sapien
tcgagatttccatgctgttctagaa

SEQ ID NO: 4802374 - DNA, 25 bp, Homo sapien
taaagtaggaataaacaggcgctgc

SEQ ID NO: 4802375 - DNA, 25 bp, Homo sapien
caggcgctgctggatactctgcatc

SEQ ID NO: 4802376 - DNA, 25 bp, Homo sapien
tgcaatggctctacatgggttatca

SEQ ID NO: 4802377 - DNA, 25 bp, Homo sapien
tagtcctatattgtacaggaaggga

SEQ ID NO: 4802378 - DNA, 25 bp, Homo sapien
tatgatcaaggttcacacagttaac

SEQ ID NO: 4802379 - DNA, 25 bp, Homo sapien
ttgattgagatcattgctatccctg

SEQ ID NO: 4802380 - DNA, 25 bp, Homo sapien
aaaggtatacatgggcgagaaattt

SEQ ID NO: 4802381 - DNA, 25 bp, Homo sapien
acatgggcttttggagatcctcgaa

SEQ ID NO: 4802382 - DNA, 25 bp, Homo sapien
gagaaacttggaaggagtatataca

SEQ ID NO: 4802383 - DNA, 25 bp, Homo sapien
cttggaaggagtatatacatgggct

SEQ ID NO: 4802384 - DNA, 25 bp, Homo sapien
tcttccattaatgccacagctggtc

SEQ ID NO: 4802385 - DNA, 25 bp, Homo sapien
cactgattttgtataagtcacaggg

SEQ ID NO: 4802386 - DNA, 25 bp, Homo sapien
tctcattaggcatagatgttaatag

SEQ ID NO: 4802387 - DNA, 25 bp, Homo sapien
agggaagcaaccttctctcattagg

SEQ ID NO: 4802388 - DNA, 25 bp, Homo sapien
gaccaccaagcataaatgcagtcat

SEQ ID NO: 4802389 - DNA, 25 bp, Homo sapien
tggcatatacaaatcataagaaact

SEQ ID NO: 4802390 - DNA, 25 bp, Homo sapien
aactaaagacatgttcattgtaaca

SEQ ID NO: 4802391 - DNA, 25 bp, Homo sapien
aaccctaggctatcttgtaaacaag

SEQ ID NO: 4802392 - DNA, 25 bp, Homo sapien
tggctcgagactgattggaagaatc

SEQ ID NO: 4802393 - DNA, 25 bp, Homo sapien
taggctcagtgcttgaggatggctc

SEQ ID NO: 4802394 - DNA, 25 bp, Homo sapien
cttaggttagactgagtaggctcag

SEQ ID NO: 4802395 - DNA, 25 bp, Homo sapien
tggaagaatcttatcattcttgtta

SEQ ID NO: 4802396 - DNA, 25 bp, Homo sapien
tcacaaatctttgtgcaggcaggtt

SEQ ID NO: 4802397 - DNA, 25 bp, Homo sapien
gatcaaaaaccatgcttagagctaa

SEQ ID NO: 4802398 - DNA, 25 bp, Homo sapien
tctctgtgactctttactgggaagt

SEQ ID NO: 4802399 - DNA, 25 bp, Homo sapien
gggtagagagcctctgatcaaaaac

SEQ ID NO: 4802400 - DNA, 25 bp, Homo sapien
acttgagcatgtgcccatcgcacca

SEQ ID NO: 4802401 - DNA, 25 bp, Homo sapien
gagcatgtgcccatcgcaccaccag

SEQ ID NO: 4802402 - DNA, 25 bp, Homo sapien
gcatgtgcccatcgcaccaccagct

SEQ ID NO: 4802403 - DNA, 25 bp, Homo sapien
ttacttgagcatgtgcccatcgcac

SEQ ID NO: 4802404 - DNA, 25 bp, Homo sapien
tatgtcaagaaactgtactccccgc

SEQ ID NO: 4802405 - DNA, 25 bp, Homo sapien
tactccctggattcatagtgaggaa

SEQ ID NO: 4802406 - DNA, 25 bp, Homo sapien
aagggccctggaaccatatcctgga

SEQ ID NO: 4802407 - DNA, 25 bp, Homo sapien
catatatgcacttccgttaggtagg

SEQ ID NO: 4802408 - DNA, 25 bp, Homo sapien
ggctgtactttccatcctgccaaac

SEQ ID NO: 4802409 - DNA, 25 bp, Homo sapien
ctggctgtactttccatcctgccaa

SEQ ID NO: 4802410 - DNA, 25 bp, Homo sapien
tggctgtactttccatcctgccaaa

SEQ ID NO: 4802411 - DNA, 25 bp, Homo sapien
ttcagccaagtgtaacccatgttta

SEQ ID NO: 4802412 - DNA, 25 bp, Homo sapien
taacccatgtttagtgagggtgaag

SEQ ID NO: 4802413 - DNA, 25 bp, Homo sapien
caagtgtaacccatgtttagtgagg

SEQ ID NO: 4802414 - DNA, 25 bp, Homo sapien
acccatgtttagtgagggtgaagaa

SEQ ID NO: 4802415 - DNA, 25 bp, Homo sapien
ggaagtcaaactgctttaccttgcc

SEQ ID NO: 4802416 - DNA, 25 bp, Homo sapien
tttaccttgccaaacttctggagga

SEQ ID NO: 4802417 - DNA, 25 bp, Homo sapien
gttaacaaaacagtagcctcgaggc

SEQ ID NO: 4802418 - DNA, 25 bp, Homo sapien
gaggctgtccctccaaagcacctga

SEQ ID NO: 4802419 - DNA, 25 bp, Homo sapien
gtcatctgatgtgggggtgagacaa

SEQ ID NO: 4802420 - DNA, 25 bp, Homo sapien
ggtgagacaaaccaacagctctccc

SEQ ID NO: 4802421 - DNA, 25 bp, Homo sapien
gacaaaccaacagctctcccgtttc

SEQ ID NO: 4802422 - DNA, 25 bp, Homo sapien
tgagacaaaccaacagctctcccgt

SEQ ID NO: 4802423 - DNA, 25 bp, Homo sapien
tgtgtctttcaacttctccaggatt

SEQ ID NO: 4802424 - DNA, 25 bp, Homo sapien
ccaatccataatcggtgtccttcct

SEQ ID NO: 4802425 - DNA, 25 bp, Homo sapien
ggtccaggttgccaatccataatcg

SEQ ID NO: 4802426 - DNA, 25 bp, Homo sapien
tttggggtccaggttgccaatccat

SEQ ID NO: 4802427 - DNA, 25 bp, Homo sapien
ggttgccaatccataatcggtgtcc

SEQ ID NO: 4802428 - DNA, 25 bp, Homo sapien
tacaggaaccatggaggcagtcaca

SEQ ID NO: 4802429 - DNA, 25 bp, Homo sapien
tcagcactacaggaaccatggaggc

SEQ ID NO: 4802430 - DNA, 25 bp, Homo sapien
tggaggcagtcacaacaactgccat

SEQ ID NO: 4802431 - DNA, 25 bp, Homo sapien
ctcagaggtcagcactacaggaacc

SEQ ID NO: 4802432 - DNA, 25 bp, Homo sapien
ttagcgggcccatcgctgaggtgca

SEQ ID NO: 4802433 - DNA, 25 bp, Homo sapien
agatgcagtcctgcgagggcggcct

SEQ ID NO: 4802434 - DNA, 25 bp, Homo sapien
tcctgtaagacctcttagcgggccc

SEQ ID NO: 4802435 - DNA, 25 bp, Homo sapien
tcggattgttatttccgggccagcg

SEQ ID NO: 4802436 - DNA, 25 bp, Homo sapien
tcagacggacctctagacgcgtccg

SEQ ID NO: 4802437 - DNA, 25 bp, Homo sapien
ggtgctctcagctcatgcccggaaa

SEQ ID NO: 4802438 - DNA, 25 bp, Homo sapien
gacgcgtccgcctcaatgccgccag

SEQ ID NO: 4802439 - DNA, 25 bp, Homo sapien
catgcccggaaaccaggtcccgacg

SEQ ID NO: 4802440 - DNA, 25 bp, Homo sapien
tggatagcaaggaggagaatgtact

SEQ ID NO: 4802441 - DNA, 25 bp, Homo sapien
tcactattcttcctacctcagagag

SEQ ID NO: 4802442 - DNA, 25 bp, Homo sapien
cattgcaagttataatatgccaccc

SEQ ID NO: 4802443 - DNA, 25 bp, Homo sapien
tatgccacccaaatagtacaggatt

SEQ ID NO: 4802444 - DNA, 25 bp, Homo sapien
cttctctgcctgacgcccagatgag

SEQ ID NO: 4802445 - DNA, 25 bp, Homo sapien
cagattagcttagaataacaaaggc

SEQ ID NO: 4802446 - DNA, 25 bp, Homo sapien
ttgatatggcactagcagagttgac

SEQ ID NO: 4802447 - DNA, 25 bp, Homo sapien
aaggacttgttcacctgtctacaaa

SEQ ID NO: 4802448 - DNA, 25 bp, Homo sapien
gcctggccccttagatcagtttctg

SEQ ID NO: 4802449 - DNA, 25 bp, Homo sapien
aaatttgcctcctctgattgatcct

SEQ ID NO: 4802450 - DNA, 25 bp, Homo sapien
ggaaaatttgcctcctctgattgat

SEQ ID NO: 4802451 - DNA, 25 bp, Homo sapien
tgcgcctggccccttagatcagttt

SEQ ID NO: 4802452 - DNA, 25 bp, Homo sapien
cctggcctgcatggtgattattaac

SEQ ID NO: 4802453 - DNA, 25 bp, Homo sapien
tctactgccgtgaggcgtgctgcct

SEQ ID NO: 4802454 - DNA, 25 bp, Homo sapien
tgctgcctgtcatcaagctttctac

SEQ ID NO: 4802455 - DNA, 25 bp, Homo sapien
cctaggatacaagtattgttcaatg

SEQ ID NO: 4802456 - DNA, 25 bp, Homo sapien
aactctttaccatgcagaactgacg

SEQ ID NO: 4802457 - DNA, 25 bp, Homo sapien
ctgacgctctatacccattacacaa

SEQ ID NO: 4802458 - DNA, 25 bp, Homo sapien
gcagaactgacgctctatacccatt

SEQ ID NO: 4802459 - DNA, 25 bp, Homo sapien
ttaccatgcagaactgacgctctat

SEQ ID NO: 4802460 - DNA, 25 bp, Homo sapien
ctaaggctgagtaatctgttgtata

SEQ ID NO: 4802461 - DNA, 25 bp, Homo sapien
tataaagctccttttaacagacact

SEQ ID NO: 4802462 - DNA, 25 bp, Homo sapien
agtatatataaagctccttttaaca

SEQ ID NO: 4802463 - DNA, 25 bp, Homo sapien
tcactgaagcatgatgtccttaaag

SEQ ID NO: 4802464 - DNA, 25 bp, Homo sapien
tttcagtattaacataagtgatttg

SEQ ID NO: 4802465 - DNA, 25 bp, Homo sapien
ttttcagtattaacataagtgattt

SEQ ID NO: 4802466 - DNA, 25 bp, Homo sapien
tgaggaagagggttgcttcacatag

SEQ ID NO: 4802467 - DNA, 25 bp, Homo sapien
gcttcacatagacgaagttcagttt

SEQ ID NO: 4802468 - DNA, 25 bp, Homo sapien
aagagggttgcttcacatagacgaa

SEQ ID NO: 4802469 - DNA, 25 bp, Homo sapien
attagagattagaatgaggaagagg

SEQ ID NO: 4802470 - DNA, 25 bp, Homo sapien
ttattttcactaagagaccagtggg

SEQ ID NO: 4802471 - DNA, 25 bp, Homo sapien
ttgtctgacccgcaactaggcagcc

SEQ ID NO: 4802472 - DNA, 25 bp, Homo sapien
gagaacctgtgctgatccctaacat

SEQ ID NO: 4802473 - DNA, 25 bp, Homo sapien
gacttgtgaggtgctaagtagccag

SEQ ID NO: 4802474 - DNA, 25 bp, Homo sapien
tccctcctccagactgtggtctcca

SEQ ID NO: 4802475 - DNA, 25 bp, Homo sapien
agactgtggtctccaggaatgccgg

SEQ ID NO: 4802476 - DNA, 25 bp, Homo sapien
ctccagactgtggtctccaggaatg

SEQ ID NO: 4802477 - DNA, 25 bp, Homo sapien
tgtggtctccaggaatgccggggcc

SEQ ID NO: 4802478 - DNA, 25 bp, Homo sapien
gaagaggccgctttggtttggtgtc

SEQ ID NO: 4802479 - DNA, 25 bp, Homo sapien
tttggtgtcgactataatttcctgg

SEQ ID NO: 4802480 - DNA, 25 bp, Homo sapien
gtcgactataatttcctggccacca

SEQ ID NO: 4802481 - DNA, 25 bp, Homo sapien
gccgctttggtttggtgtcgactat

SEQ ID NO: 4802482 - DNA, 25 bp, Homo sapien
cacgtgcagcgtgcagtggagactt

SEQ ID NO: 4802483 - DNA, 25 bp, Homo sapien
tgtcggcgcaggcaatgcggctgtg

SEQ ID NO: 4802484 - DNA, 25 bp, Homo sapien
cagaaggcttgtgcgcgcgcctgaa

SEQ ID NO: 4802485 - DNA, 25 bp, Homo sapien
ggagacttaggtgcatggcacagac

SEQ ID NO: 4802486 - DNA, 25 bp, Homo sapien
ggtcccgggctgctgtcatttcccg

SEQ ID NO: 4802487 - DNA, 25 bp, Homo sapien
gggagtgagcgggccgcggcccggc

SEQ ID NO: 4802488 - DNA, 25 bp, Homo sapien
ctgtcatttcccggcggccgcaggg

SEQ ID NO: 4802489 - DNA, 25 bp, Homo sapien
cggcggtcccgggctgctgtcattt

SEQ ID NO: 4802490 - DNA, 25 bp, Homo sapien
ttgaggcgcagattcgaatcccggc

SEQ ID NO: 4802491 - DNA, 25 bp, Homo sapien
tcacttactgggtgaaccggcgtca

SEQ ID NO: 4802492 - DNA, 25 bp, Homo sapien
gaaatgaacgttggctactggaagc

SEQ ID NO: 4802493 - DNA, 25 bp, Homo sapien
gagcggaacgttgtttgcaggcacc

SEQ ID NO: 4802494 - DNA, 25 bp, Homo sapien
cctggccaccctatatgaaccagcc

SEQ ID NO: 4802495 - DNA, 25 bp, Homo sapien
ccctggccaccctatatgaaccagc

SEQ ID NO: 4802496 - DNA, 25 bp, Homo sapien
tccctggccaccctatatgaaccag

SEQ ID NO: 4802497 - DNA, 25 bp, Homo sapien
cctccctggccaccctatatgaacc

SEQ ID NO: 4802498 - DNA, 25 bp, Homo sapien
caaattacggttgacagatcactcc

SEQ ID NO: 4802499 - DNA, 25 bp, Homo sapien
caaagcatgactattctaccaggat

SEQ ID NO: 4802500 - DNA, 25 bp, Homo sapien
tcagacccatcagttcagcatcaag

SEQ ID NO: 4802501 - DNA, 25 bp, Homo sapien
taccaggatagctgagtcttgccaa

SEQ ID NO: 4802502 - DNA, 25 bp, Homo sapien
gcttgggtttcagaacgatgtggca

SEQ ID NO: 4802503 - DNA, 25 bp, Homo sapien
ggtttctgtggcaggtcggtctccc

SEQ ID NO: 4802504 - DNA, 25 bp, Homo sapien
gttggtttccctccacacttggtca

SEQ ID NO: 4802505 - DNA, 25 bp, Homo sapien
gatgtggcagtacacccttgcaggt

SEQ ID NO: 4802506 - DNA, 25 bp, Homo sapien
acatgtaatgtaaagttgatcattt

SEQ ID NO: 4802507 - DNA, 25 bp, Homo sapien
tacatgtaatgtaaagttgatcatt

SEQ ID NO: 4802508 - DNA, 25 bp, Homo sapien
gcttctcctacttgtctgttgtcct

SEQ ID NO: 4802509 - DNA, 25 bp, Homo sapien
cttctcctacttgtctgttgtcctt

SEQ ID NO: 4802510 - DNA, 25 bp, Homo sapien
ttctcctacttgtctgttgtccttt

SEQ ID NO: 4802511 - DNA, 25 bp, Homo sapien
catgctggttcactatatagccgga

SEQ ID NO: 4802512 - DNA, 25 bp, Homo sapien
aaatcaacaaagaggtgcagcatgc

SEQ ID NO: 4802513 - DNA, 25 bp, Homo sapien
catagatcgggtatgctgtacattc

SEQ ID NO: 4802514 - DNA, 25 bp, Homo sapien
tagccggatcctagtttatcataga

SEQ ID NO: 4802515 - DNA, 25 bp, Homo sapien
tacaggcatgtagcagattaagctt

SEQ ID NO: 4802516 - DNA, 25 bp, Homo sapien
gcttcttgtgtccattaccaggtag

SEQ ID NO: 4802517 - DNA, 25 bp, Homo sapien
tgtgtccattaccaggtagaaggca

SEQ ID NO: 4802518 - DNA, 25 bp, Homo sapien
ccattaccaggtagaaggcataggg

SEQ ID NO: 4802519 - DNA, 25 bp, Homo sapien
ggagaaaggaagtgtgggctatatt

SEQ ID NO: 4802520 - DNA, 25 bp, Homo sapien
tggggagaaaggaagtgtgggctat

SEQ ID NO: 4802521 - DNA, 25 bp, Homo sapien
cactgaacatctgtatgtgtttggg

SEQ ID NO: 4802522 - DNA, 25 bp, Homo sapien
tcactgaacatctgtatgtgtttgg

SEQ ID NO: 4802523 - DNA, 25 bp, Homo sapien
atgcaataataatatcaggaaagca

SEQ ID NO: 4802524 - DNA, 25 bp, Homo sapien
aaacagatgcaataataatatcagg

SEQ ID NO: 4802525 - DNA, 25 bp, Homo sapien
gcaataataatatcaggaaagcatt

SEQ ID NO: 4802526 - DNA, 25 bp, Homo sapien
tcaaacagatgcaataataatatca

SEQ ID NO: 4802527 - DNA, 25 bp, Homo sapien
taattgtccgataatagatagtcac

SEQ ID NO: 4802528 - DNA, 25 bp, Homo sapien
gactgctgtgtatatcactgaagca

SEQ ID NO: 4802529 - DNA, 25 bp, Homo sapien
tgtgtatatcactgaagcaattatg

SEQ ID NO: 4802530 - DNA, 25 bp, Homo sapien
gaccaataattgtccgataatagat

SEQ ID NO: 4802531 - DNA, 25 bp, Homo sapien
tgctaactgattgagggaggtgtct

SEQ ID NO: 4802532 - DNA, 25 bp, Homo sapien
taagaaaccaggatgcacaggaatg

SEQ ID NO: 4802533 - DNA, 25 bp, Homo sapien
tgggatccacaagtggacaaggctt

SEQ ID NO: 4802534 - DNA, 25 bp, Homo sapien
catatgcccttggtagagggaatct

SEQ ID NO: 4802535 - DNA, 25 bp, Homo sapien
agcacacgcacaagcgatgacccag

SEQ ID NO: 4802536 - DNA, 25 bp, Homo sapien
acacgcacaagcgatgacccaggac

SEQ ID NO: 4802537 - DNA, 25 bp, Homo sapien
aaagagcacacgcacaagcgatgac

SEQ ID NO: 4802538 - DNA, 25 bp, Homo sapien
tgcaaaagagcacacgcacaagcga

SEQ ID NO: 4802539 - DNA, 25 bp, Homo sapien
acggctaggtgctgagtctgcatgt

SEQ ID NO: 4802540 - DNA, 25 bp, Homo sapien
tcccttgtaaaagacggctaggtgc

SEQ ID NO: 4802541 - DNA, 25 bp, Homo sapien
tgataaggaaactgtctaagtcagc

SEQ ID NO: 4802542 - DNA, 25 bp, Homo sapien
cagcatgacacactggctctgagtc

SEQ ID NO: 4802543 - DNA, 25 bp, Homo sapien
atttgccacatattttgctgcaaat

SEQ ID NO: 4802544 - DNA, 25 bp, Homo sapien
tgccacatattttgctgcaaatgtg

SEQ ID NO: 4802545 - DNA, 25 bp, Homo sapien
ttgccacatattttgctgcaaatgt

SEQ ID NO: 4802546 - DNA, 25 bp, Homo sapien
tttgccacatattttgctgcaaatg

SEQ ID NO: 4802547 - DNA, 25 bp, Homo sapien
tgcttgtctggaggaatcacgcaga

SEQ ID NO: 4802548 - DNA, 25 bp, Homo sapien
gtctggaggaatcacgcagaccttc

SEQ ID NO: 4802549 - DNA, 25 bp, Homo sapien
ctggaggaatcacgcagaccttcat

SEQ ID NO: 4802550 - DNA, 25 bp, Homo sapien
caggatgcttgtctggaggaatcac

SEQ ID NO: 4802551 - DNA, 25 bp, Homo sapien
ctctgaggatgctgaggccttggaa

SEQ ID NO: 4802552 - DNA, 25 bp, Homo sapien
tgaggatgctgaggccttggaagat

SEQ ID NO: 4802553 - DNA, 25 bp, Homo sapien
tctgaggatgctgaggccttggaag

SEQ ID NO: 4802554 - DNA, 25 bp, Homo sapien
ggatgctgaggccttggaagatcat

SEQ ID NO: 4802555 - DNA, 25 bp, Homo sapien
gaagagggtcccatagaacacacaa

SEQ ID NO: 4802556 - DNA, 25 bp, Homo sapien
gaccctcaggatagctggcacaatg

SEQ ID NO: 4802557 - DNA, 25 bp, Homo sapien
gagcaggttcccagtcaaggtgaca

SEQ ID NO: 4802558 - DNA, 25 bp, Homo sapien
caacgatattggtgaggacccagca

SEQ ID NO: 4802559 - DNA, 25 bp, Homo sapien
tagtggaaagggtcacagacggcca

SEQ ID NO: 4802560 - DNA, 25 bp, Homo sapien
tgttgccacgtggtccttgacagcg

SEQ ID NO: 4802561 - DNA, 25 bp, Homo sapien
tcacagaaggtgagacgattcagca

SEQ ID NO: 4802562 - DNA, 25 bp, Homo sapien
ttccataaaagagcgtcaccacggt

SEQ ID NO: 4802563 - DNA, 25 bp, Homo sapien
ctgctggtgtggttgattctttcca

SEQ ID NO: 4802564 - DNA, 25 bp, Homo sapien
ctcggagacactgctggtgtggttg

SEQ ID NO: 4802565 - DNA, 25 bp, Homo sapien
acactgctggtgtggttgattcttt

SEQ ID NO: 4802566 - DNA, 25 bp, Homo sapien
gagacactgctggtgtggttgattc

SEQ ID NO: 4802567 - DNA, 25 bp, Homo sapien
tcaggggtctaccttcacccattca

SEQ ID NO: 4802568 - DNA, 25 bp, Homo sapien
cattcaagcagcctgcagagtgcac

SEQ ID NO: 4802569 - DNA, 25 bp, Homo sapien
ttcacccattcaagcagcctgcaga

SEQ ID NO: 4802570 - DNA, 25 bp, Homo sapien
ggtctaccttcacccattcaagcag

SEQ ID NO: 4802571 - DNA, 25 bp, Homo sapien
tatgtcagaacaagaggctcgcaga

SEQ ID NO: 4802572 - DNA, 25 bp, Homo sapien
gaagccaccatgtcctgatactgag

SEQ ID NO: 4802573 - DNA, 25 bp, Homo sapien
tagcggccccaattcggacataaga

SEQ ID NO: 4802574 - DNA, 25 bp, Homo sapien
tgccgtagaggaaaccaaccatggt

SEQ ID NO: 4802575 - DNA, 25 bp, Homo sapien
ttcacaattcaaagatcacccaatg

SEQ ID NO: 4802576 - DNA, 25 bp, Homo sapien
tgacctttatgaacaaagctatgct

SEQ ID NO: 4802577 - DNA, 25 bp, Homo sapien
caaagctatgcttctgtgaagctac

SEQ ID NO: 4802578 - DNA, 25 bp, Homo sapien
agtgaagtgtataaggcttttgacc

SEQ ID NO: 4802579 - DNA, 25 bp, Homo sapien
tcagcaaacctgtgccctaaaattc

SEQ ID NO: 4802580 - DNA, 25 bp, Homo sapien
aaaagatcatttccctgtaaaggtg

SEQ ID NO: 4802581 - DNA, 25 bp, Homo sapien
cctaaaattcctctcagttacttca

SEQ ID NO: 4802582 - DNA, 25 bp, Homo sapien
tctcttcttacagaattgcccaaga

SEQ ID NO: 4802583 - DNA, 25 bp, Homo sapien
tccaaaggtagtatcaggctgtgcc

SEQ ID NO: 4802584 - DNA, 25 bp, Homo sapien
catcttttgccaagtgccaagcaca

SEQ ID NO: 4802585 - DNA, 25 bp, Homo sapien
caagcacagtgtgggcactagacca

SEQ ID NO: 4802586 - DNA, 25 bp, Homo sapien
tgtgcctagagaccaagcccttact

SEQ ID NO: 4802587 - DNA, 25 bp, Homo sapien
gatctaacattctcggcccgatgcg

SEQ ID NO: 4802588 - DNA, 25 bp, Homo sapien
taaggaaaccaagagcagtgagcac

SEQ ID NO: 4802589 - DNA, 25 bp, Homo sapien
gaagctacaccactagactgccaga

SEQ ID NO: 4802590 - DNA, 25 bp, Homo sapien
aacgatactgatctgtggcccaggg

SEQ ID NO: 4802591 - DNA, 25 bp, Homo sapien
gggactagaggtacaacaccgtgcc

SEQ ID NO: 4802592 - DNA, 25 bp, Homo sapien
gactagaggtacaacaccgtgccca

SEQ ID NO: 4802593 - DNA, 25 bp, Homo sapien
ggactagaggtacaacaccgtgccc

SEQ ID NO: 4802594 - DNA, 25 bp, Homo sapien
ccatctcaaagaaaacaaacaaaat

SEQ ID NO: 4802595 - DNA, 25 bp, Homo sapien
agagactggttaaataaattattat

SEQ ID NO: 4802596 - DNA, 25 bp, Homo sapien
catctcaaagaaaacaaacaaaata

SEQ ID NO: 4802597 - DNA, 25 bp, Homo sapien
taaattattatatatccaaatgatg

SEQ ID NO: 4802598 - DNA, 25 bp, Homo sapien
tgtcttctaacatcaccaggtcagt

SEQ ID NO: 4802599 - DNA, 25 bp, Homo sapien
tctaaccaccgtctaaagctatgga

SEQ ID NO: 4802600 - DNA, 25 bp, Homo sapien
gaattatactctcagacttggcaga

SEQ ID NO: 4802601 - DNA, 25 bp, Homo sapien
cagacttagtcatgctggaggaaga

SEQ ID NO: 4802602 - DNA, 25 bp, Homo sapien
caatgacgtgtattccaacccaaac

SEQ ID NO: 4802603 - DNA, 25 bp, Homo sapien
caacccaaacaatgagaaatctatg

SEQ ID NO: 4802604 - DNA, 25 bp, Homo sapien
gaaatctatgcaactagactatcag

SEQ ID NO: 4802605 - DNA, 25 bp, Homo sapien
aaaataaacaatgacgtgtattcca

SEQ ID NO: 4802606 - DNA, 25 bp, Homo sapien
ccagctggtcagtaacacgaacaaa

SEQ ID NO: 4802607 - DNA, 25 bp, Homo sapien
aacttgacagctgggtactctgcgg

SEQ ID NO: 4802608 - DNA, 25 bp, Homo sapien
gacacgtggcagagttacgcacaga

SEQ ID NO: 4802609 - DNA, 25 bp, Homo sapien
gactgctggcgccaataactgagct

SEQ ID NO: 4802610 - DNA, 25 bp, Homo sapien
tgaacactcgtgataacagttaata

SEQ ID NO: 4802611 - DNA, 25 bp, Homo sapien
ctgaacactcgtgataacagttaat

SEQ ID NO: 4802612 - DNA, 25 bp, Homo sapien
gcggaccagcaagtgagcataaata

SEQ ID NO: 4802613 - DNA, 25 bp, Homo sapien
ctgcaggcggaccagcaagtgagca

SEQ ID NO: 4802614 - DNA, 25 bp, Homo sapien
catttaaccattgaaacaccagatt

SEQ ID NO: 4802615 - DNA, 25 bp, Homo sapien
gtcactagtagcagaactgagatcc

SEQ ID NO: 4802616 - DNA, 25 bp, Homo sapien
caacttcttggaggtcaaatcaagc

SEQ ID NO: 4802617 - DNA, 25 bp, Homo sapien
tttgacagggctctatgatttctcc

SEQ ID NO: 4802618 - DNA, 25 bp, Homo sapien
ttgaagcggcgccagtcattgatca

SEQ ID NO: 4802619 - DNA, 25 bp, Homo sapien
gaagcggcgccagtcattgatcaca

SEQ ID NO: 4802620 - DNA, 25 bp, Homo sapien
gcttgaagcggcgccagtcattgat

SEQ ID NO: 4802621 - DNA, 25 bp, Homo sapien
actgcttgaagcggcgccagtcatt

SEQ ID NO: 4802622 - DNA, 25 bp, Homo sapien
gggaattatggaccagctgacatct

SEQ ID NO: 4802623 - DNA, 25 bp, Homo sapien
cacagggcagagtggcctatacaca

SEQ ID NO: 4802624 - DNA, 25 bp, Homo sapien
gctgacatctgtaggtaggagttca

SEQ ID NO: 4802625 - DNA, 25 bp, Homo sapien
tgaacacggatgtgaccaaggagaa

SEQ ID NO: 4802626 - DNA, 25 bp, Homo sapien
ccccagcaacttatcatcaagggtg

SEQ ID NO: 4802627 - DNA, 25 bp, Homo sapien
cttgtcctcgtggtcactgtcctca

SEQ ID NO: 4802628 - DNA, 25 bp, Homo sapien
tgtgttaactgagatgccttcgcct

SEQ ID NO: 4802629 - DNA, 25 bp, Homo sapien
tatagtagtactgcagtttctcccc

SEQ ID NO: 4802630 - DNA, 25 bp, Homo sapien
aggaatggagcactttcttaagagg

SEQ ID NO: 4802631 - DNA, 25 bp, Homo sapien
tagctcgctccggatccctttgggc

SEQ ID NO: 4802632 - DNA, 25 bp, Homo sapien
gcggaccaatgaggcggccttcctg

SEQ ID NO: 4802633 - DNA, 25 bp, Homo sapien
tgagcgctaaagagaaaagccgccg

SEQ ID NO: 4802634 - DNA, 25 bp, Homo sapien
caatgagttaatagctaaagacacc

SEQ ID NO: 4802635 - DNA, 25 bp, Homo sapien
caatctcgaggttacatatggtgta

SEQ ID NO: 4802636 - DNA, 25 bp, Homo sapien
gatgtaccatggcatattacccagc

SEQ ID NO: 4802637 - DNA, 25 bp, Homo sapien
catgtagtataccatggtaccacgg

SEQ ID NO: 4802638 - DNA, 25 bp, Homo sapien
tttgtagttacaacatctgggcgag

SEQ ID NO: 4802639 - DNA, 25 bp, Homo sapien
tataagttccgatcaccatgaccac

SEQ ID NO: 4802640 - DNA, 25 bp, Homo sapien
taacatctcaaacataagatacggg

SEQ ID NO: 4802641 - DNA, 25 bp, Homo sapien
gcctcagttttatggtcctaagtcg

SEQ ID NO: 4802642 - DNA, 25 bp, Homo sapien
tggaggtcattttacagggaagtac

SEQ ID NO: 4802643 - DNA, 25 bp, Homo sapien
tgttgtgaaggtacagttggaactc

SEQ ID NO: 4802644 - DNA, 25 bp, Homo sapien
catggtgcgatgttatgtagctaaa

SEQ ID NO: 4802645 - DNA, 25 bp, Homo sapien
tccaagacagtacttcaaggaatga

SEQ ID NO: 4802646 - DNA, 25 bp, Homo sapien
cacttgaggcccaatgaaaatggtg

SEQ ID NO: 4802647 - DNA, 25 bp, Homo sapien
gaaaatggtgtctagatccacccaa

SEQ ID NO: 4802648 - DNA, 25 bp, Homo sapien
tccacccaaggcgttctcctgaggt

SEQ ID NO: 4802649 - DNA, 25 bp, Homo sapien
tggacctttaaccttactgaacagc

SEQ ID NO: 4802650 - DNA, 25 bp, Homo sapien
ttctccactagacagtaaactcagt

SEQ ID NO: 4802651 - DNA, 25 bp, Homo sapien
gagtgacctggtagctctgttaagc

SEQ ID NO: 4802652 - DNA, 25 bp, Homo sapien
gatatatagatgaggcatgcaatca

SEQ ID NO: 4802653 - DNA, 25 bp, Homo sapien
gacagaattaaggtatatctcaacc

SEQ ID NO: 4802654 - DNA, 25 bp, Homo sapien
catgtcaagtactgcaaactttttc

SEQ ID NO: 4802655 - DNA, 25 bp, Homo sapien
tatacaggccttataaatcctagtc

SEQ ID NO: 4802656 - DNA, 25 bp, Homo sapien
ttcactatcatcacaaccctcattg

SEQ ID NO: 4802657 - DNA, 25 bp, Homo sapien
tgtgaacagccaaagctaatatctc

SEQ ID NO: 4802658 - DNA, 25 bp, Homo sapien
gcagttgctgcaagctaaccacgat

SEQ ID NO: 4802659 - DNA, 25 bp, Homo sapien
ttaagcccaccatgacagacagaag

SEQ ID NO: 4802660 - DNA, 25 bp, Homo sapien
gcattgaaaataagacgtggcagca

SEQ ID NO: 4802661 - DNA, 25 bp, Homo sapien
ccagcaaagggatacaaggaagacg

SEQ ID NO: 4802662 - DNA, 25 bp, Homo sapien
tggctaaagcaagaagttaccggca

SEQ ID NO: 4802663 - DNA, 25 bp, Homo sapien
tcagtgcaaacgctacatacagggt

SEQ ID NO: 4802664 - DNA, 25 bp, Homo sapien
tccctgagggcacataaggagctct

SEQ ID NO: 4802665 - DNA, 25 bp, Homo sapien
tacatcagctgaaagacttaggcac

SEQ ID NO: 4802666 - DNA, 25 bp, Homo sapien
gataccaagctgtatgtccaagatc

SEQ ID NO: 4802667 - DNA, 25 bp, Homo sapien
tccactgccattccatttagcaact

SEQ ID NO: 4802668 - DNA, 25 bp, Homo sapien
ccattttccactgccattccattta

SEQ ID NO: 4802669 - DNA, 25 bp, Homo sapien
cattttgagaactgataccaagctg

SEQ ID NO: 4802670 - DNA, 25 bp, Homo sapien
cctatcaggtttagtatctgttgca

SEQ ID NO: 4802671 - DNA, 25 bp, Homo sapien
aactcgatatccctatcaggtttag

SEQ ID NO: 4802672 - DNA, 25 bp, Homo sapien
aagtgctgaaagctctaactcgata

SEQ ID NO: 4802673 - DNA, 25 bp, Homo sapien
ggttcatcagtatcaagtgctgaaa

SEQ ID NO: 4802674 - DNA, 25 bp, Homo sapien
aaaatactgattttgctctccctct

SEQ ID NO: 4802675 - DNA, 25 bp, Homo sapien
gaaaaatactgattttgctctccct

SEQ ID NO: 4802676 - DNA, 25 bp, Homo sapien
aagaaaaatactgattttgctctcc

SEQ ID NO: 4802677 - DNA, 25 bp, Homo sapien
ctaagaaaaatactgattttgctct

SEQ ID NO: 4802678 - DNA, 25 bp, Homo sapien
gatctagttaaagaattatttaaga

SEQ ID NO: 4802679 - DNA, 25 bp, Homo sapien
atgatctagttaaagaattatttaa

SEQ ID NO: 4802680 - DNA, 25 bp, Homo sapien
tgatctagttaaagaattatttaag

SEQ ID NO: 4802681 - DNA, 25 bp, Homo sapien
tcagagataggcacaccaaaatgca

SEQ ID NO: 4802682 - DNA, 25 bp, Homo sapien
cagagataggcacaccaaaatgcac

SEQ ID NO: 4802683 - DNA, 25 bp, Homo sapien
atggtataaccaagatgcagcagca

SEQ ID NO: 4802684 - DNA, 25 bp, Homo sapien
tcagtaatggtataaccaagatgca

SEQ ID NO: 4802685 - DNA, 25 bp, Homo sapien
caaatacattaagcatgaagccgaa

SEQ ID NO: 4802686 - DNA, 25 bp, Homo sapien
catgaagccgaaaggttcagtttct

SEQ ID NO: 4802687 - DNA, 25 bp, Homo sapien
tctccatttcttagttcaatttcct

SEQ ID NO: 4802688 - DNA, 25 bp, Homo sapien
attccacttctgttgcatggccaaa

SEQ ID NO: 4802689 - DNA, 25 bp, Homo sapien
ggtgacggccttcatccagggaatt

SEQ ID NO: 4802690 - DNA, 25 bp, Homo sapien
ggccaaagcattggcctctctctga

SEQ ID NO: 4802691 - DNA, 25 bp, Homo sapien
tcaactgtcattctatttctcaaaa

SEQ ID NO: 4802692 - DNA, 25 bp, Homo sapien
tagctttcaactgtcattctatttc

SEQ ID NO: 4802693 - DNA, 25 bp, Homo sapien
caaaaatttatagctgagttacaga

SEQ ID NO: 4802694 - DNA, 25 bp, Homo sapien
tttctcaaaaatttatagctgagtt

SEQ ID NO: 4802695 - DNA, 25 bp, Homo sapien
gctgaagttcaaggctcaaaaggtc

SEQ ID NO: 4802696 - DNA, 25 bp, Homo sapien
agataaatcagtaacaatgaatctg

SEQ ID NO: 4802697 - DNA, 25 bp, Homo sapien
ctatgaccagataaatcagtaacaa

SEQ ID NO: 4802698 - DNA, 25 bp, Homo sapien
ataaatcagtaacaatgaatctgtc

SEQ ID NO: 4802699 - DNA, 25 bp, Homo sapien
atgaccagataaatcagtaacaatg

SEQ ID NO: 4802700 - DNA, 25 bp, Homo sapien
cactcatcgttccaaatttaaatgc

SEQ ID NO: 4802701 - DNA, 25 bp, Homo sapien
cctgaaaacttcactcatcgttcca

SEQ ID NO: 4802702 - DNA, 25 bp, Homo sapien
tgttttatgtgacagatcaaccctg

SEQ ID NO: 4802703 - DNA, 25 bp, Homo sapien
cagtaataaccatatgttttatgtg

SEQ ID NO: 4802704 - DNA, 25 bp, Homo sapien
caacagcattgacataagggacata

SEQ ID NO: 4802705 - DNA, 25 bp, Homo sapien
gatgtggcctcgttgccatatgaac

SEQ ID NO: 4802706 - DNA, 25 bp, Homo sapien
tatgaactccaccttgaatcaacag

SEQ ID NO: 4802707 - DNA, 25 bp, Homo sapien
ctttcaacatagtgtgctgatgatg

SEQ ID NO: 4802708 - DNA, 25 bp, Homo sapien
tatggtaacctgtacgggaagatct

SEQ ID NO: 4802709 - DNA, 25 bp, Homo sapien
gggcttagtcgcacttccttgggaa

SEQ ID NO: 4802710 - DNA, 25 bp, Homo sapien
tgatgggtccatcactaaagggaat

SEQ ID NO: 4802711 - DNA, 25 bp, Homo sapien
gaaatcgcaccccattttgagatga

SEQ ID NO: 4802712 - DNA, 25 bp, Homo sapien
tctttgggctctgaatcaatggcat

SEQ ID NO: 4802713 - DNA, 25 bp, Homo sapien
cagggagaataatgggaaagatgat

SEQ ID NO: 4802714 - DNA, 25 bp, Homo sapien
catttatacaggagcctatggtgcc

SEQ ID NO: 4802715 - DNA, 25 bp, Homo sapien
acagcatttgaattagcaatgacat

SEQ ID NO: 4802716 - DNA, 25 bp, Homo sapien
gactatgccttaacggtcttcagag

SEQ ID NO: 4802717 - DNA, 25 bp, Homo sapien
gacctatccctgcaacattaagtaa

SEQ ID NO: 4802718 - DNA, 25 bp, Homo sapien
tgtactaatacagtgctggcatgag

SEQ ID NO: 4802719 - DNA, 25 bp, Homo sapien
gagtctcataacacctagccgtagt

SEQ ID NO: 4802720 - DNA, 25 bp, Homo sapien
cacgaaagtctacactgaacagagg

SEQ ID NO: 4802721 - DNA, 25 bp, Homo sapien
tgtgttgccacaggaagagttgaag

SEQ ID NO: 4802722 - DNA, 25 bp, Homo sapien
caagaggtgctttctgagtgtggta

SEQ ID NO: 4802723 - DNA, 25 bp, Homo sapien
tcttatctgctcctcgcaactggtc

SEQ ID NO: 4802724 - DNA, 25 bp, Homo sapien
tgtggtgatactgaaaaaaggtcct

SEQ ID NO: 4802725 - DNA, 25 bp, Homo sapien
tgaggcccagttctaagaggtttga

SEQ ID NO: 4802726 - DNA, 25 bp, Homo sapien
gagcattaacatgtatgaggcccag

SEQ ID NO: 4802727 - DNA, 25 bp, Homo sapien
cactcacttttcttgcttagggaag

SEQ ID NO: 4802728 - DNA, 25 bp, Homo sapien
tctcgttggtacataggtgggcgcc

SEQ ID NO: 4802729 - DNA, 25 bp, Homo sapien
ggctgacaagccaccgaataatatc

SEQ ID NO: 4802730 - DNA, 25 bp, Homo sapien
catccattggaggtaaagaattgct

SEQ ID NO: 4802731 - DNA, 25 bp, Homo sapien
cagatgcgcctgctgtcgtacacag

SEQ ID NO: 4802732 - DNA, 25 bp, Homo sapien
tgatcggcatatggcatggaagcag

SEQ ID NO: 4802733 - DNA, 25 bp, Homo sapien
agaagaattcattcgatctcgaggg

SEQ ID NO: 4802734 - DNA, 25 bp, Homo sapien
gactctggaacgttattggacctca

SEQ ID NO: 4802735 - DNA, 25 bp, Homo sapien
cacaccagctggtaccgttggaggt

SEQ ID NO: 4802736 - DNA, 25 bp, Homo sapien
aaattggaaagaggaatatttaatg

SEQ ID NO: 4802737 - DNA, 25 bp, Homo sapien
aatgtaatcttagtacaatccaaca

SEQ ID NO: 4802738 - DNA, 25 bp, Homo sapien
tatttaatgtaatcttagtacaatc

SEQ ID NO: 4802739 - DNA, 25 bp, Homo sapien
gaggaatatttaatgtaatcttagt

SEQ ID NO: 4802740 - DNA, 25 bp, Homo sapien
tctagggcatctattgccactggtt

SEQ ID NO: 4802741 - DNA, 25 bp, Homo sapien
tgctaaagtgctccttaaaacacac

SEQ ID NO: 4802742 - DNA, 25 bp, Homo sapien
gagctattaacagacggatggtaaa

SEQ ID NO: 4802743 - DNA, 25 bp, Homo sapien
gatggtaaatatccttctagggcat

SEQ ID NO: 4802744 - DNA, 25 bp, Homo sapien
cagaatgcggaggatatactggtac

SEQ ID NO: 4802745 - DNA, 25 bp, Homo sapien
agaatgcggaggatatactggtact

SEQ ID NO: 4802746 - DNA, 25 bp, Homo sapien
tcagaatgcggaggatatactggta

SEQ ID NO: 4802747 - DNA, 25 bp, Homo sapien
gctgaggtagctgctacattactta

SEQ ID NO: 4802748 - DNA, 25 bp, Homo sapien
ctctgttccaacattagagggccca

SEQ ID NO: 4802749 - DNA, 25 bp, Homo sapien
ccagctgaggtagctgctacattac

SEQ ID NO: 4802750 - DNA, 25 bp, Homo sapien
gttccaacattagagggcccagctg

SEQ ID NO: 4802751 - DNA, 25 bp, Homo sapien
aggagtcttgggtggagaaccaatt

SEQ ID NO: 4802752 - DNA, 25 bp, Homo sapien
acacagctaattcacgtgatcatcg

SEQ ID NO: 4802753 - DNA, 25 bp, Homo sapien
aaatcactgtctatgactgtcctcc

SEQ ID NO: 4802754 - DNA, 25 bp, Homo sapien
tctgaaaccactaatagaaaacact

SEQ ID NO: 4802755 - DNA, 25 bp, Homo sapien
accttacacagctaattcacgtgat

SEQ ID NO: 4802756 - DNA, 25 bp, Homo sapien
ttgcatctcaaccagattagagggt

SEQ ID NO: 4802757 - DNA, 25 bp, Homo sapien
ggccaaagcttagtcagctggattt

SEQ ID NO: 4802758 - DNA, 25 bp, Homo sapien
agtttatcacagattagtctagcag

SEQ ID NO: 4802759 - DNA, 25 bp, Homo sapien
gttaattatgcaggaactcaataca

SEQ ID NO: 4802760 - DNA, 25 bp, Homo sapien
ttttcagttacagaatctgcagagg

SEQ ID NO: 4802761 - DNA, 25 bp, Homo sapien
ttcagttacagaatctgcagagggc

SEQ ID NO: 4802762 - DNA, 25 bp, Homo sapien
ctgcagagggcccagcagcattctg

SEQ ID NO: 4802763 - DNA, 25 bp, Homo sapien
gcagagggcccagcagcattctgac

SEQ ID NO: 4802764 - DNA, 25 bp, Homo sapien
tcacggtctccagagctcttaaggt

SEQ ID NO: 4802765 - DNA, 25 bp, Homo sapien
cgtgagattagctgggaaacactgt

SEQ ID NO: 4802766 - DNA, 25 bp, Homo sapien
actgtcagtactacgtgagattagc

SEQ ID NO: 4802767 - DNA, 25 bp, Homo sapien
tgaaattccgtttgtacttggaaca

SEQ ID NO: 4802768 - DNA, 25 bp, Homo sapien
tgtggttgtgacagtgttgtttaca

SEQ ID NO: 4802769 - DNA, 25 bp, Homo sapien
gaaatgacatttccggctgtggttg

SEQ ID NO: 4802770 - DNA, 25 bp, Homo sapien
ttccggctgtggttgtgacagtgtt

SEQ ID NO: 4802771 - DNA, 25 bp, Homo sapien
cagtgttgtttacaccaactttatt

SEQ ID NO: 4802772 - DNA, 25 bp, Homo sapien
cattgatctttttgttccttaatcg

SEQ ID NO: 4802773 - DNA, 25 bp, Homo sapien
agtggcattgatctttttgttcctt

SEQ ID NO: 4802774 - DNA, 25 bp, Homo sapien
tgatctttttgttccttaatcgata

SEQ ID NO: 4802775 - DNA, 25 bp, Homo sapien
gatctttttgttccttaatcgatac

SEQ ID NO: 4802776 - DNA, 25 bp, Homo sapien
ttaagttcacgaacagaaagaagac

SEQ ID NO: 4802777 - DNA, 25 bp, Homo sapien
aattaagttcacgaacagaaagaag

SEQ ID NO: 4802778 - DNA, 25 bp, Homo sapien
agttcacgaacagaaagaagactat

SEQ ID NO: 4802779 - DNA, 25 bp, Homo sapien
taagttcacgaacagaaagaagact

SEQ ID NO: 4802780 - DNA, 25 bp, Homo sapien
acttctttcaagaagggcatgagca

SEQ ID NO: 4802781 - DNA, 25 bp, Homo sapien
caggaagacaatctggttgtctgga

SEQ ID NO: 4802782 - DNA, 25 bp, Homo sapien
tacaggtgcacattataggcgcgcg

SEQ ID NO: 4802783 - DNA, 25 bp, Homo sapien
ggcatgagcagacctatatttcagg

SEQ ID NO: 4802784 - DNA, 25 bp, Homo sapien
tcccgaggagctggtactacagttg

SEQ ID NO: 4802785 - DNA, 25 bp, Homo sapien
ccgaggagctggtactacagttgcc

SEQ ID NO: 4802786 - DNA, 25 bp, Homo sapien
cccgaggagctggtactacagttgc

SEQ ID NO: 4802787 - DNA, 25 bp, Homo sapien
gaggagctggtactacagttgccca

SEQ ID NO: 4802788 - DNA, 25 bp, Homo sapien
caagagaccactaagttatgcaggc

SEQ ID NO: 4802789 - DNA, 25 bp, Homo sapien
catttcccatttcagcaagagacca

SEQ ID NO: 4802790 - DNA, 25 bp, Homo sapien
ttccattgctatagtcctacccgag

SEQ ID NO: 4802791 - DNA, 25 bp, Homo sapien
gagctaccaaactcccacctgtgga

SEQ ID NO: 4802792 - DNA, 25 bp, Homo sapien
gcttttgacactccccagaatgtag

SEQ ID NO: 4802793 - DNA, 25 bp, Homo sapien
cagaatgtagcaattctttggaaca

SEQ ID NO: 4802794 - DNA, 25 bp, Homo sapien
cccaacatcctagttctaaaacata

SEQ ID NO: 4802795 - DNA, 25 bp, Homo sapien
gttgagttggttgatccctcgcttt

SEQ ID NO: 4802796 - DNA, 25 bp, Homo sapien
tactgctactattacaagtctggca

SEQ ID NO: 4802797 - DNA, 25 bp, Homo sapien
gttcgattgggtacaaacagcatct

SEQ ID NO: 4802798 - DNA, 25 bp, Homo sapien
gatgcaattaacactgcctagggaa

SEQ ID NO: 4802799 - DNA, 25 bp, Homo sapien
aagctctatttcaggtatggacaag

SEQ ID NO: 4802800 - DNA, 25 bp, Homo sapien
attatgtacagtgcccaagctagcc

SEQ ID NO: 4802801 - DNA, 25 bp, Homo sapien
ctcttctctaggcacttcaagtggg

SEQ ID NO: 4802802 - DNA, 25 bp, Homo sapien
tgaagatatagtccacgggggttac

SEQ ID NO: 4802803 - DNA, 25 bp, Homo sapien
gctcttttcactgcacacacactta

SEQ ID NO: 4802804 - DNA, 25 bp, Homo sapien
tggctaaactgggtacacgaggtga

SEQ ID NO: 4802805 - DNA, 25 bp, Homo sapien
caagggatcgagaaaaggagatgac

SEQ ID NO: 4802806 - DNA, 25 bp, Homo sapien
gatttaagactagtgagaaggcaac

SEQ ID NO: 4802807 - DNA, 25 bp, Homo sapien
gaatatgcccacaaagagttgatag

SEQ ID NO: 4802808 - DNA, 25 bp, Homo sapien
taggtctcgggtaaagggacataga

SEQ ID NO: 4802809 - DNA, 25 bp, Homo sapien
gcagaaagtagaaaagctgggatca

SEQ ID NO: 4802810 - DNA, 25 bp, Homo sapien
aagccgtaaaaaggatatatatctg

SEQ ID NO: 4802811 - DNA, 25 bp, Homo sapien
cctgagactttgctgctaggtttaa

SEQ ID NO: 4802812 - DNA, 25 bp, Homo sapien
cggcacatgctagtcttgtatttgc

SEQ ID NO: 4802813 - DNA, 25 bp, Homo sapien
tcttcctgagaatgggcaaatgtac

SEQ ID NO: 4802814 - DNA, 25 bp, Homo sapien
gtggacaacccccttgctgtcgcaa

SEQ ID NO: 4802815 - DNA, 25 bp, Homo sapien
tacaatttgttcctcgtggacaacc

SEQ ID NO: 4802816 - DNA, 25 bp, Homo sapien
agtccacaaggccatgaactactgt

SEQ ID NO: 4802817 - DNA, 25 bp, Homo sapien
taacagctaccattgcattttccag

SEQ ID NO: 4802818 - DNA, 25 bp, Homo sapien
tgctcccaagttggtgaaacagcgt

SEQ ID NO: 4802819 - DNA, 25 bp, Homo sapien
tactgttttaacagctaccattgca

SEQ ID NO: 4802820 - DNA, 25 bp, Homo sapien
gacactctttgcaaatgactctgga

SEQ ID NO: 4802821 - DNA, 25 bp, Homo sapien
ctatttaagttagctgggtcacctg

SEQ ID NO: 4802822 - DNA, 25 bp, Homo sapien
ggtcacctgttcgttgcaaaacaat

SEQ ID NO: 4802823 - DNA, 25 bp, Homo sapien
tgcaagaagctctaaatgaggcctc

SEQ ID NO: 4802824 - DNA, 25 bp, Homo sapien
tgggcatcatgttctctgcgtaatg

SEQ ID NO: 4802825 - DNA, 25 bp, Homo sapien
gactgcatgtgtgatttatgagcca

SEQ ID NO: 4802826 - DNA, 25 bp, Homo sapien
gagaggaccactgttcaggtgaaat

SEQ ID NO: 4802827 - DNA, 25 bp, Homo sapien
gagtcctgcttccatggcaatatga

SEQ ID NO: 4802828 - DNA, 25 bp, Homo sapien
caagaagctcgatacagtagttgca

SEQ ID NO: 4802829 - DNA, 25 bp, Homo sapien
aaatcttggttctagtctctgcaca

SEQ ID NO: 4802830 - DNA, 25 bp, Homo sapien
ccagaactttccttgagagggcaga

SEQ ID NO: 4802831 - DNA, 25 bp, Homo sapien
gaaccatcttctaatgccagtaaca

SEQ ID NO: 4802832 - DNA, 25 bp, Homo sapien
acagcccctggcaacactagctggc

SEQ ID NO: 4802833 - DNA, 25 bp, Homo sapien
gtcactgttcatacactctatacac

SEQ ID NO: 4802834 - DNA, 25 bp, Homo sapien
gcaacactagctggctgtctggttt

SEQ ID NO: 4802835 - DNA, 25 bp, Homo sapien
ttttaaccacataattcagtggtat

SEQ ID NO: 4802836 - DNA, 25 bp, Homo sapien
tacgcataggcattcaggttgtttc

SEQ ID NO: 4802837 - DNA, 25 bp, Homo sapien
gattgctagaccaaagggtaaacac

SEQ ID NO: 4802838 - DNA, 25 bp, Homo sapien
ggaggtcacaccctagcagaatata

SEQ ID NO: 4802839 - DNA, 25 bp, Homo sapien
taacttaccaacgtatctggaggtc

SEQ ID NO: 4802840 - DNA, 25 bp, Homo sapien
ccgagctccagaaattggcatcctc

SEQ ID NO: 4802841 - DNA, 25 bp, Homo sapien
tggcatcctcaagccccaatagcta

SEQ ID NO: 4802842 - DNA, 25 bp, Homo sapien
tgtacatataaagacgggttgagtc

SEQ ID NO: 4802843 - DNA, 25 bp, Homo sapien
ggttgagtctcaggattcaccgagc

SEQ ID NO: 4802844 - DNA, 25 bp, Homo sapien
tgacagcggcccatagattggcaga

SEQ ID NO: 4802845 - DNA, 25 bp, Homo sapien
tgcactctggttcaagctagctaca

SEQ ID NO: 4802846 - DNA, 25 bp, Homo sapien
cattggacggctcagtgcactctgg

SEQ ID NO: 4802847 - DNA, 25 bp, Homo sapien
taaaaactggcatcctcgagccctg

SEQ ID NO: 4802848 - DNA, 25 bp, Homo sapien
tctgcatttaacgattaagccacaa

SEQ ID NO: 4802849 - DNA, 25 bp, Homo sapien
tgcatttaacgattaagccacaatt

SEQ ID NO: 4802850 - DNA, 25 bp, Homo sapien
ttatctgcatttaacgattaagcca

SEQ ID NO: 4802851 - DNA, 25 bp, Homo sapien
ttaagccacaattcctaatgagtcc

SEQ ID NO: 4802852 - DNA, 25 bp, Homo sapien
cagaaaataggacaacataattttc

SEQ ID NO: 4802853 - DNA, 25 bp, Homo sapien
aacttaatagggtatccacatcaag

SEQ ID NO: 4802854 - DNA, 25 bp, Homo sapien
caaggcatttctcaagcaaactcct

SEQ ID NO: 4802855 - DNA, 25 bp, Homo sapien
tccataacttaatagggtatccaca

SEQ ID NO: 4802856 - DNA, 25 bp, Homo sapien
tggttttaagtagagtgccaaatcc

SEQ ID NO: 4802857 - DNA, 25 bp, Homo sapien
tacttaacttaattgactgatgatc

SEQ ID NO: 4802858 - DNA, 25 bp, Homo sapien
tagtgtttattctcacctagattac

SEQ ID NO: 4802859 - DNA, 25 bp, Homo sapien
aaatcctcaacgcatttctttgcaa

SEQ ID NO: 4802860 - DNA, 25 bp, Homo sapien
gcactggacacagttataggtacca

SEQ ID NO: 4802861 - DNA, 25 bp, Homo sapien
gacacagttataggtaccagggata

SEQ ID NO: 4802862 - DNA, 25 bp, Homo sapien
tttaattagggtggtcaggattggc

SEQ ID NO: 4802863 - DNA, 25 bp, Homo sapien
ggctcccttgagaactgtgagatat

SEQ ID NO: 4802864 - DNA, 25 bp, Homo sapien
ccaactaactggagaagtgcgaagt

SEQ ID NO: 4802865 - DNA, 25 bp, Homo sapien
gcaggtcttgcaaacagtgtgtgaa

SEQ ID NO: 4802866 - DNA, 25 bp, Homo sapien
cattatagcagattggacaggacag

SEQ ID NO: 4802867 - DNA, 25 bp, Homo sapien
tgcgaagttgacaggaagtacatca

SEQ ID NO: 4802868 - DNA, 25 bp, Homo sapien
aagctggatgctcgggttagcagtc

SEQ ID NO: 4802869 - DNA, 25 bp, Homo sapien
ggttagcagtctagcagatcattat

SEQ ID NO: 4802870 - DNA, 25 bp, Homo sapien
gatgctcgggttagcagtctagcag

SEQ ID NO: 4802871 - DNA, 25 bp, Homo sapien
tgtggaagctggatgctcgggttag

SEQ ID NO: 4802872 - DNA, 25 bp, Homo sapien
tggataaccagtaccccaaaacata

SEQ ID NO: 4802873 - DNA, 25 bp, Homo sapien
aaagtatggccaggagttaatgaac

SEQ ID NO: 4802874 - DNA, 25 bp, Homo sapien
gaaattctgcctggaaacaatacct

SEQ ID NO: 4802875 - DNA, 25 bp, Homo sapien
acacaaattactttggactgctggg

SEQ ID NO: 4802876 - DNA, 25 bp, Homo sapien
cgacggcgcggcttggcgacggagg

SEQ ID NO: 4802877 - DNA, 25 bp, Homo sapien
tcggcggaggtttcacgacctcaaa

SEQ ID NO: 4802878 - DNA, 25 bp, Homo sapien
cttggcgacggaggcgcctcgtctc

SEQ ID NO: 4802879 - DNA, 25 bp, Homo sapien
cagagctcggcggaggtttcacgac

SEQ ID NO: 4802880 - DNA, 25 bp, Homo sapien
acagggacagccccgttggcggcgg

SEQ ID NO: 4802881 - DNA, 25 bp, Homo sapien
gcgaaggccgcgacggggcctcctc

SEQ ID NO: 4802882 - DNA, 25 bp, Homo sapien
gcggcgaaggccgcgacggggcctc

SEQ ID NO: 4802883 - DNA, 25 bp, Homo sapien
cagggacagccccgttggcggcggc

SEQ ID NO: 4802884 - DNA, 25 bp, Homo sapien
cacggaggcggacctggagggatcc

SEQ ID NO: 4802885 - DNA, 25 bp, Homo sapien
tatatatttctgataatccgagatt

SEQ ID NO: 4802886 - DNA, 25 bp, Homo sapien
ggtgtcctggtcaccatatttattt

SEQ ID NO: 4802887 - DNA, 25 bp, Homo sapien
gctccctcagttaggctgactgcag

SEQ ID NO: 4802888 - DNA, 25 bp, Homo sapien
caggaatttttgtctgtatacctaa

SEQ ID NO: 4802889 - DNA, 25 bp, Homo sapien
taatagtgacggagaactgttgcca

SEQ ID NO: 4802890 - DNA, 25 bp, Homo sapien
aaaatcaagaaactcgggcccaatg

SEQ ID NO: 4802891 - DNA, 25 bp, Homo sapien
taactagaggaggactagaacagct

SEQ ID NO: 4802892 - DNA, 25 bp, Homo sapien
gatcattccgtgctactgaacagga

SEQ ID NO: 4802893 - DNA, 25 bp, Homo sapien
tttgtatggccgatccccactgtgt

SEQ ID NO: 4802894 - DNA, 25 bp, Homo sapien
tgaagaaagcctcgaggacacctgg

SEQ ID NO: 4802895 - DNA, 25 bp, Homo sapien
taaggtggcgcagatagttttcaac

SEQ ID NO: 4802896 - DNA, 25 bp, Homo sapien
caaaatcaccttgtgcccctggaac

SEQ ID NO: 4802897 - DNA, 25 bp, Homo sapien
ctgtgttcctgcaccgagctcaggg

SEQ ID NO: 4802898 - DNA, 25 bp, Homo sapien
tctgctgaactgaaaccggatgcca

SEQ ID NO: 4802899 - DNA, 25 bp, Homo sapien
ccgtttcaaccagagagagtcagct

SEQ ID NO: 4802900 - DNA, 25 bp, Homo sapien
tgctctctgagcaccgcgagatggt

SEQ ID NO: 4802901 - DNA, 25 bp, Homo sapien
agaaaactagagtcaaggattccgc

SEQ ID NO: 4802902 - DNA, 25 bp, Homo sapien
gatggacttagcctggaagaaaaca

SEQ ID NO: 4802903 - DNA, 25 bp, Homo sapien
aggattccgcggcagcgtctgccca

SEQ ID NO: 4802904 - DNA, 25 bp, Homo sapien
gcgtctgcccaagccggaagatgga

SEQ ID NO: 4802905 - DNA, 25 bp, Homo sapien
gaaacttccccataataagtgaaga

SEQ ID NO: 4802906 - DNA, 25 bp, Homo sapien
tcatagtatgtctaacatacaacag

SEQ ID NO: 4802907 - DNA, 25 bp, Homo sapien
tcttctgggttgtttaggacagtat

SEQ ID NO: 4802908 - DNA, 25 bp, Homo sapien
gaagaggtagttcatagtatgtcta

SEQ ID NO: 4802909 - DNA, 25 bp, Homo sapien
tgaatgtgagcaaacgaagcactcc

SEQ ID NO: 4802910 - DNA, 25 bp, Homo sapien
cacatttttagcgtgcctggagcag

SEQ ID NO: 4802911 - DNA, 25 bp, Homo sapien
gagaaaccgcccatgtaagtgctgt

SEQ ID NO: 4802912 - DNA, 25 bp, Homo sapien
gaagatcccctctgactatgcaagc

SEQ ID NO: 4802913 - DNA, 25 bp, Homo sapien
cacacaagtactatcatttcttaag

SEQ ID NO: 4802914 - DNA, 25 bp, Homo sapien
tcatttcttaagttcaggacagctt

SEQ ID NO: 4802915 - DNA, 25 bp, Homo sapien
ttcttaagttcaggacagcttgggc

SEQ ID NO: 4802916 - DNA, 25 bp, Homo sapien
tcaattcacacaagtactatcattt

SEQ ID NO: 4802917 - DNA, 25 bp, Homo sapien
gtttaattccggcatgcacacgcat

SEQ ID NO: 4802918 - DNA, 25 bp, Homo sapien
cacgcatgtgtcgatgaaggttgcc

SEQ ID NO: 4802919 - DNA, 25 bp, Homo sapien
gctttataaacttccacagggcctg

SEQ ID NO: 4802920 - DNA, 25 bp, Homo sapien
taaatggttggcgtagttctccagg

SEQ ID NO: 4802921 - DNA, 25 bp, Homo sapien
cagggaattccagcacaccactata

SEQ ID NO: 4802922 - DNA, 25 bp, Homo sapien
gggaattccagcacaccactataac

SEQ ID NO: 4802923 - DNA, 25 bp, Homo sapien
ctcagggaattccagcacaccacta

SEQ ID NO: 4802924 - DNA, 25 bp, Homo sapien
aattccagcacaccactataacagg

SEQ ID NO: 4802925 - DNA, 25 bp, Homo sapien
aattgtctccccacttcggaactct

SEQ ID NO: 4802926 - DNA, 25 bp, Homo sapien
cacttcggaactctgtaatatggag

SEQ ID NO: 4802927 - DNA, 25 bp, Homo sapien
cattcagtaaaaattggtctcttaa

SEQ ID NO: 4802928 - DNA, 25 bp, Homo sapien
tgtaatatggagattttcacctctc

SEQ ID NO: 4802929 - DNA, 25 bp, Homo sapien
gtaacattgaatctccataattttc

SEQ ID NO: 4802930 - DNA, 25 bp, Homo sapien
ctcaatatcatctatgagaactgta

SEQ ID NO: 4802931 - DNA, 25 bp, Homo sapien
tatgagaactgtaacatcacaaaat

SEQ ID NO: 4802932 - DNA, 25 bp, Homo sapien
acttgaagtgaaggagatctgatct

SEQ ID NO: 4802933 - DNA, 25 bp, Homo sapien
gaagtgcaatgggcttgccgcaacc

SEQ ID NO: 4802934 - DNA, 25 bp, Homo sapien
aagtgcaatgggcttgccgcaacct

SEQ ID NO: 4802935 - DNA, 25 bp, Homo sapien
tgaagtgcaatgggcttgccgcaac

SEQ ID NO: 4802936 - DNA, 25 bp, Homo sapien
caatccccaactgtaggtaacttct

SEQ ID NO: 4802937 - DNA, 25 bp, Homo sapien
ggactgaaacttaatgccatttgca

SEQ ID NO: 4802938 - DNA, 25 bp, Homo sapien
tagaagacttaaatggcaagcatat

SEQ ID NO: 4802939 - DNA, 25 bp, Homo sapien
agttataacttcaagccaaatttgc

SEQ ID NO: 4802940 - DNA, 25 bp, Homo sapien
gcttggagaaaagtacaaggaagca

SEQ ID NO: 4802941 - DNA, 25 bp, Homo sapien
gaaatgcatgatgcctgcactcatg

SEQ ID NO: 4802942 - DNA, 25 bp, Homo sapien
cactcatgcactgtctaaacttcaa

SEQ ID NO: 4802943 - DNA, 25 bp, Homo sapien
gatcaagacagaatggcatgggcct

SEQ ID NO: 4802944 - DNA, 25 bp, Homo sapien
ccatttaacaccaaaccagctgagg

SEQ ID NO: 4802945 - DNA, 25 bp, Homo sapien
gagtatcacctcatcactgtactaa

SEQ ID NO: 4802946 - DNA, 25 bp, Homo sapien
agtgtctggtatgtaccctataagc

SEQ ID NO: 4802947 - DNA, 25 bp, Homo sapien
gctgaggtacctaatatttcataga

SEQ ID NO: 4802948 - DNA, 25 bp, Homo sapien
ggcctcacctctggcacttcttata

SEQ ID NO: 4802949 - DNA, 25 bp, Homo sapien
cacttcttataagatgccagagtca

SEQ ID NO: 4802950 - DNA, 25 bp, Homo sapien
cctatgaggcggtcccaggggcatc

SEQ ID NO: 4802951 - DNA, 25 bp, Homo sapien
ctggctcccgaggctcgttttctta

SEQ ID NO: 4802952 - DNA, 25 bp, Homo sapien
ggaaggccgccgtcaggatccggca

SEQ ID NO: 4802953 - DNA, 25 bp, Homo sapien
aaggccgccgtcaggatccggcacc

SEQ ID NO: 4802954 - DNA, 25 bp, Homo sapien
aggccgccgtcaggatccggcaccg

SEQ ID NO: 4802955 - DNA, 25 bp, Homo sapien
gaaggccgccgtcaggatccggcac

SEQ ID NO: 4802956 - DNA, 25 bp, Homo sapien
caacggaaccggaagggcagccctg

SEQ ID NO: 4802957 - DNA, 25 bp, Homo sapien
gccggacaaagacaacttccaggtc

SEQ ID NO: 4802958 - DNA, 25 bp, Homo sapien
catggtcctctccgccaatcggaag

SEQ ID NO: 4802959 - DNA, 25 bp, Homo sapien
agccctggccggacaaagacaactt

SEQ ID NO: 4802960 - DNA, 25 bp, Homo sapien
tcggaggacaacaggggccccgaga

SEQ ID NO: 4802961 - DNA, 25 bp, Homo sapien
cggaggacaacaggggccccgagag

SEQ ID NO: 4802962 - DNA, 25 bp, Homo sapien
ctcggaggacaacaggggccccgag

SEQ ID NO: 4802963 - DNA, 25 bp, Homo sapien
tcacagagggattgcaacagaacac

SEQ ID NO: 4802964 - DNA, 25 bp, Homo sapien
gaagcgaaactatttttctgcaggg

SEQ ID NO: 4802965 - DNA, 25 bp, Homo sapien
gaaaacactgtagacgactcactca

SEQ ID NO: 4802966 - DNA, 25 bp, Homo sapien
ttttctctggttgatcgggatgcat

SEQ ID NO: 4802967 - DNA, 25 bp, Homo sapien
caggacttgcacatgaaaggtgagc

SEQ ID NO: 4802968 - DNA, 25 bp, Homo sapien
gttaggctcaacaggtactacccag

SEQ ID NO: 4802969 - DNA, 25 bp, Homo sapien
gggattccttgctcaagcaccagta

SEQ ID NO: 4802970 - DNA, 25 bp, Homo sapien
tgaagtactgattttcaaacaggac

SEQ ID NO: 4802971 - DNA, 25 bp, Homo sapien
tcgcttcccggtattgggccaatag

SEQ ID NO: 4802972 - DNA, 25 bp, Homo sapien
cgcacagtcctgaggcgggctgaaa

SEQ ID NO: 4802973 - DNA, 25 bp, Homo sapien
agccagtgcacttcgcgcaggcgca

SEQ ID NO: 4802974 - DNA, 25 bp, Homo sapien
agaagaggaagctccgcctcgcttc

SEQ ID NO: 4802975 - DNA, 25 bp, Homo sapien
taaggttctgacataggctgcccat

SEQ ID NO: 4802976 - DNA, 25 bp, Homo sapien
taatttcaatataatcaggtatcag

SEQ ID NO: 4802977 - DNA, 25 bp, Homo sapien
tggtttgctaaggttctgacatagg

SEQ ID NO: 4802978 - DNA, 25 bp, Homo sapien
caggtatcagtagacttctcaagca

SEQ ID NO: 4802979 - DNA, 25 bp, Homo sapien
gaacaatcgagataactcactgtct

SEQ ID NO: 4802980 - DNA, 25 bp, Homo sapien
taactgactgaacaatcgagataac

SEQ ID NO: 4802981 - DNA, 25 bp, Homo sapien
acaatcgagataactcactgtcttt

SEQ ID NO: 4802982 - DNA, 25 bp, Homo sapien
actgactgaacaatcgagataactc

SEQ ID NO: 4802983 - DNA, 25 bp, Homo sapien
tctcaagtttttgggataataggca

SEQ ID NO: 4802984 - DNA, 25 bp, Homo sapien
actgctcctggctaattgtgaatct

SEQ ID NO: 4802985 - DNA, 25 bp, Homo sapien
cagcctctcaagtttttgggataat

SEQ ID NO: 4802986 - DNA, 25 bp, Homo sapien
agcgcagtgtctccatcatagttca

SEQ ID NO: 4802987 - DNA, 25 bp, Homo sapien
caatacccctaagtgtcaaaactag

SEQ ID NO: 4802988 - DNA, 25 bp, Homo sapien
tctaagcccattgcaaaacttggcc

SEQ ID NO: 4802989 - DNA, 25 bp, Homo sapien
tacataatgtaagggcactggcagg

SEQ ID NO: 4802990 - DNA, 25 bp, Homo sapien
tcttggtttccaggcaaggagatga

SEQ ID NO: 4802991 - DNA, 25 bp, Homo sapien
tatccctactgctcagttaggcacc

SEQ ID NO: 4802992 - DNA, 25 bp, Homo sapien
cccctaactgggaatcagtgcttcc

SEQ ID NO: 4802993 - DNA, 25 bp, Homo sapien
ggcagcagtggcaaacagttaaaaa

SEQ ID NO: 4802994 - DNA, 25 bp, Homo sapien
ttattttgtcatgtgctcaacagca

SEQ ID NO: 4802995 - DNA, 25 bp, Homo sapien
aagaaaatatgacccagacatcccg

SEQ ID NO: 4802996 - DNA, 25 bp, Homo sapien
tgagggcacaacagtacatttcaac

SEQ ID NO: 4802997 - DNA, 25 bp, Homo sapien
tggaatggaacatcacagtaactga

SEQ ID NO: 4802998 - DNA, 25 bp, Homo sapien
gtttaacacagagctttcaaggtag

SEQ ID NO: 4802999 - DNA, 25 bp, Homo sapien
tgtttatgcagcctactacattttc

SEQ ID NO: 4803000 - DNA, 25 bp, Homo sapien
ggtgctaactgctacaatagggaaa

SEQ ID NO: 4803001 - DNA, 25 bp, Homo sapien
taacttagcatgttcacactacagc

SEQ ID NO: 4803002 - DNA, 25 bp, Homo sapien
tttcaggtgtgtaataatatcagca

SEQ ID NO: 4803003 - DNA, 25 bp, Homo sapien
ggtagaacttgtcagactcagaggg

SEQ ID NO: 4803004 - DNA, 25 bp, Homo sapien
taagtaatccacagagactctcatg

SEQ ID NO: 4803005 - DNA, 25 bp, Homo sapien
cagctgtttggatcttgtgaatcaa

SEQ ID NO: 4803006 - DNA, 25 bp, Homo sapien
caaaggcactttcttgttcccggct

SEQ ID NO: 4803007 - DNA, 25 bp, Homo sapien
tcaaacaagacaaggtattgagctt

SEQ ID NO: 4803008 - DNA, 25 bp, Homo sapien
caagacaaggtattgagcttgtccc

SEQ ID NO: 4803009 - DNA, 25 bp, Homo sapien
caaacaagacaaggtattgagcttg

SEQ ID NO: 4803010 - DNA, 25 bp, Homo sapien
acaaggtattgagcttgtccctaac

SEQ ID NO: 4803011 - DNA, 25 bp, Homo sapien
gtgtctgtcttcttcttgtagtcct

SEQ ID NO: 4803012 - DNA, 25 bp, Homo sapien
agtgtctgtcttcttcttgtagtcc

SEQ ID NO: 4803013 - DNA, 25 bp, Homo sapien
gctgactttccagtgtctgtcttct

SEQ ID NO: 4803014 - DNA, 25 bp, Homo sapien
tttcttggctgactttccagtgtct

SEQ ID NO: 4803015 - DNA, 25 bp, Homo sapien
tgataagcgctatgccatggtcctg

SEQ ID NO: 4803016 - DNA, 25 bp, Homo sapien
ttacaccctggagactacgcctgtg

SEQ ID NO: 4803017 - DNA, 25 bp, Homo sapien
gatatcagcgaaaggcaagcccgct

SEQ ID NO: 4803018 - DNA, 25 bp, Homo sapien
tgatttggctatactcgaccctggt

SEQ ID NO: 4803019 - DNA, 25 bp, Homo sapien
gttcacttttgtcaggtaacagtac

SEQ ID NO: 4803020 - DNA, 25 bp, Homo sapien
ttttgtgtgttcacttttgtcaggt

SEQ ID NO: 4803021 - DNA, 25 bp, Homo sapien
tgtcaggtaacagtacttgagtatt

SEQ ID NO: 4803022 - DNA, 25 bp, Homo sapien
cttttgtcaggtaacagtacttgag

SEQ ID NO: 4803023 - DNA, 25 bp, Homo sapien
caatcacaggcactgggcaggccga

SEQ ID NO: 4803024 - DNA, 25 bp, Homo sapien
tgcaatcacaggcactgggcaggcc

SEQ ID NO: 4803025 - DNA, 25 bp, Homo sapien
gggccaaggcaggcagctggtaggt

SEQ ID NO: 4803026 - DNA, 25 bp, Homo sapien
gtggcggatcactcgcggccaggag

SEQ ID NO: 4803027 - DNA, 25 bp, Homo sapien
taaaatattcatggccttcggaaca

SEQ ID NO: 4803028 - DNA, 25 bp, Homo sapien
catgattacccaaaaggctagagaa

SEQ ID NO: 4803029 - DNA, 25 bp, Homo sapien
taaagttagttcagatcccacaact

SEQ ID NO: 4803030 - DNA, 25 bp, Homo sapien
aaggctagagaaattattggacaag

SEQ ID NO: 4803031 - DNA, 25 bp, Homo sapien
tgtcttagctatgaagacactgcat

SEQ ID NO: 4803032 - DNA, 25 bp, Homo sapien
gacactgcattgttaaagtagaagg

SEQ ID NO: 4803033 - DNA, 25 bp, Homo sapien
gggaatcaactctattgtcttagct

SEQ ID NO: 4803034 - DNA, 25 bp, Homo sapien
tattagaaataactgggtgcttggt

SEQ ID NO: 4803035 - DNA, 25 bp, Homo sapien
gctatcacccgggatattaaccgaa

SEQ ID NO: 4803036 - DNA, 25 bp, Homo sapien
catgactactttaaggacacaggag

SEQ ID NO: 4803037 - DNA, 25 bp, Homo sapien
tgagaagaccttgcctaaacctgaa

SEQ ID NO: 4803038 - DNA, 25 bp, Homo sapien
cctgaagaggcagtaactatgggca

SEQ ID NO: 4803039 - DNA, 25 bp, Homo sapien
acaataccatgaaaactggactggc

SEQ ID NO: 4803040 - DNA, 25 bp, Homo sapien
tcaggacaaagggtattaccgagga

SEQ ID NO: 4803041 - DNA, 25 bp, Homo sapien
tggattgttacaccttcaaagggta

SEQ ID NO: 4803042 - DNA, 25 bp, Homo sapien
tgcagtttgccagtaattaatggcc

SEQ ID NO: 4803043 - DNA, 25 bp, Homo sapien
gacttgactgtgagactggattata

SEQ ID NO: 4803044 - DNA, 25 bp, Homo sapien
catagttgcatctgaagccacctgg

SEQ ID NO: 4803045 - DNA, 25 bp, Homo sapien
caatatgccccgttgacagtgttta

SEQ ID NO: 4803046 - DNA, 25 bp, Homo sapien
tgcttcaatgccagcagaaggtccc

SEQ ID NO: 4803047 - DNA, 25 bp, Homo sapien
tggctgtactaacgcttgctgaggt

SEQ ID NO: 4803048 - DNA, 25 bp, Homo sapien
tatatagtgatatgctgacaggctg

SEQ ID NO: 4803049 - DNA, 25 bp, Homo sapien
ttctgcgttcagtgttgaggcggct

SEQ ID NO: 4803050 - DNA, 25 bp, Homo sapien
tgacaggctgacacgcagatggttt

SEQ ID NO: 4803051 - DNA, 25 bp, Homo sapien
tgctaaggtagtttcagtgtgtcaa

SEQ ID NO: 4803052 - DNA, 25 bp, Homo sapien
tagctgtaagcctatctaatgctag

SEQ ID NO: 4803053 - DNA, 25 bp, Homo sapien
gtaagcctatctaatgctaggtgtg

SEQ ID NO: 4803054 - DNA, 25 bp, Homo sapien
cttgttcagttaccaaaatagctgt

SEQ ID NO: 4803055 - DNA, 25 bp, Homo sapien
gagggtcagtctatggcagagtcca

SEQ ID NO: 4803056 - DNA, 25 bp, Homo sapien
actgatgaccatccacatgtgcagg

SEQ ID NO: 4803057 - DNA, 25 bp, Homo sapien
tccaacatactcagtgcgaaggagc

SEQ ID NO: 4803058 - DNA, 25 bp, Homo sapien
tcagggcattacagacaaactgcag

SEQ ID NO: 4803059 - DNA, 25 bp, Homo sapien
gaaaggtttctatccacgactacgc

SEQ ID NO: 4803060 - DNA, 25 bp, Homo sapien
tgttcctggaagtacgattgcccta

SEQ ID NO: 4803061 - DNA, 25 bp, Homo sapien
gacagagttctgcttggagccgctg

SEQ ID NO: 4803062 - DNA, 25 bp, Homo sapien
catgccatgtgtgtaaccgtgcggt

SEQ ID NO: 4803063 - DNA, 25 bp, Homo sapien
ccctggtatgctggaaaggacgtcc

SEQ ID NO: 4803064 - DNA, 25 bp, Homo sapien
gcagtgctcagtaccccatctaaga

SEQ ID NO: 4803065 - DNA, 25 bp, Homo sapien
acagatgggtccaggatgaaaggcc

SEQ ID NO: 4803066 - DNA, 25 bp, Homo sapien
tgcccaaggaaaggacaacagtagg

SEQ ID NO: 4803067 - DNA, 25 bp, Homo sapien
gagcacgagatacccagaacagagg

SEQ ID NO: 4803068 - DNA, 25 bp, Homo sapien
caaaggctgacaggatccgtgtcca

SEQ ID NO: 4803069 - DNA, 25 bp, Homo sapien
tccgagaggcacttctgtaccagag

SEQ ID NO: 4803070 - DNA, 25 bp, Homo sapien
aagagtctgactcgcaaaagcggca

SEQ ID NO: 4803071 - DNA, 25 bp, Homo sapien
gaccctctggaactcactattgtgg

SEQ ID NO: 4803072 - DNA, 25 bp, Homo sapien
tttcctagcccggtggagatggccc

SEQ ID NO: 4803073 - DNA, 25 bp, Homo sapien
tacctgtgactcctggctggagagc

SEQ ID NO: 4803074 - DNA, 25 bp, Homo sapien
gatgctgataggtcacaagcccctc

SEQ ID NO: 4803075 - DNA, 25 bp, Homo sapien
gtctttcaccctttggaaccacata

SEQ ID NO: 4803076 - DNA, 25 bp, Homo sapien
tgtctttcaccctttggaaccacat

SEQ ID NO: 4803077 - DNA, 25 bp, Homo sapien
ttgtctttcaccctttggaaccaca

SEQ ID NO: 4803078 - DNA, 25 bp, Homo sapien
tccaggattacagcagggtgcacag

SEQ ID NO: 4803079 - DNA, 25 bp, Homo sapien
ggaacaacgatctatgcactgctgc

SEQ ID NO: 4803080 - DNA, 25 bp, Homo sapien
gggccaccagtacagcaagtcatga

SEQ ID NO: 4803081 - DNA, 25 bp, Homo sapien
tgctctagaacacgacagcctggga

SEQ ID NO: 4803082 - DNA, 25 bp, Homo sapien
cagaagaatgtccaagtgcctggca

SEQ ID NO: 4803083 - DNA, 25 bp, Homo sapien
cttgcacttacacctcagacctggg

SEQ ID NO: 4803084 - DNA, 25 bp, Homo sapien
aagtcagagggcctagctaccagca

SEQ ID NO: 4803085 - DNA, 25 bp, Homo sapien
ggaaactcctggcaatgaccactga

SEQ ID NO: 4803086 - DNA, 25 bp, Homo sapien
taagccctgaaggttagattccgga

SEQ ID NO: 4803087 - DNA, 25 bp, Homo sapien
gaatggaagataagacgtgcaccct

SEQ ID NO: 4803088 - DNA, 25 bp, Homo sapien
gattccggaggcagttgtaaccaaa

SEQ ID NO: 4803089 - DNA, 25 bp, Homo sapien
tgcactggttggacacttggactca

SEQ ID NO: 4803090 - DNA, 25 bp, Homo sapien
cagcagactggctggtaatttaact

SEQ ID NO: 4803091 - DNA, 25 bp, Homo sapien
atttacaaacccttggcagcagact

SEQ ID NO: 4803092 - DNA, 25 bp, Homo sapien
gactggctggtaatttaactactgt

SEQ ID NO: 4803093 - DNA, 25 bp, Homo sapien
taactactgtaacagacacatgagc

SEQ ID NO: 4803094 - DNA, 25 bp, Homo sapien
gtgtgtttcttgtctaacccctaga

SEQ ID NO: 4803095 - DNA, 25 bp, Homo sapien
cactagctctcaccaggtctttggg

SEQ ID NO: 4803096 - DNA, 25 bp, Homo sapien
taacccctagataccaggagtcttc

SEQ ID NO: 4803097 - DNA, 25 bp, Homo sapien
ctgcagcaacgccaccacactagct

SEQ ID NO: 4803098 - DNA, 25 bp, Homo sapien
tcagcaccaaggaaccgacacagct

SEQ ID NO: 4803099 - DNA, 25 bp, Homo sapien
caccaaggaaccgacacagctccac

SEQ ID NO: 4803100 - DNA, 25 bp, Homo sapien
caaggaaccgacacagctccaccct

SEQ ID NO: 4803101 - DNA, 25 bp, Homo sapien
atcagcaccaaggaaccgacacagc

SEQ ID NO: 4803102 - DNA, 25 bp, Homo sapien
cctcctcacgttcatcctcacctcg

SEQ ID NO: 4803103 - DNA, 25 bp, Homo sapien
ccttgccctcctcacgttcatcctc

SEQ ID NO: 4803104 - DNA, 25 bp, Homo sapien
tcctcacgttcatcctcacctcggc

SEQ ID NO: 4803105 - DNA, 25 bp, Homo sapien
ttgccctcctcacgttcatcctcac

SEQ ID NO: 4803106 - DNA, 25 bp, Homo sapien
tttaaaaacctccaaagatcgctgc

SEQ ID NO: 4803107 - DNA, 25 bp, Homo sapien
tattgaaacccacctcagcagtagt

SEQ ID NO: 4803108 - DNA, 25 bp, Homo sapien
ctaataacaccgagaaacctgtggt

SEQ ID NO: 4803109 - DNA, 25 bp, Homo sapien
tgagtacgtactctgcaccaggtac

SEQ ID NO: 4803110 - DNA, 25 bp, Homo sapien
attaggggaagaccattcacagagc

SEQ ID NO: 4803111 - DNA, 25 bp, Homo sapien
tggtgtatagggctctggattgctt

SEQ ID NO: 4803112 - DNA, 25 bp, Homo sapien
tgaccctggtgtatagggctctgga

SEQ ID NO: 4803113 - DNA, 25 bp, Homo sapien
ctttaactgctcttaatgaccctgg

SEQ ID NO: 4803114 - DNA, 25 bp, Homo sapien
agcaggggggatctccttagttctt

SEQ ID NO: 4803115 - DNA, 25 bp, Homo sapien
gatctccttagttctttcctctcta

SEQ ID NO: 4803116 - DNA, 25 bp, Homo sapien
gggatctccttagttctttcctctc

SEQ ID NO: 4803117 - DNA, 25 bp, Homo sapien
aagcaggggggatctccttagttct

SEQ ID NO: 4803118 - DNA, 25 bp, Homo sapien
taggcccaattccaacaacaaggag

SEQ ID NO: 4803119 - DNA, 25 bp, Homo sapien
gaggacctggtacctaataggcact

SEQ ID NO: 4803120 - DNA, 25 bp, Homo sapien
cgttcacttattggacagaggtcca

SEQ ID NO: 4803121 - DNA, 25 bp, Homo sapien
tcacttgtacccagaagaggacctg

SEQ ID NO: 4803122 - DNA, 25 bp, Homo sapien
gtctctgcagactcgatattcacca

SEQ ID NO: 4803123 - DNA, 25 bp, Homo sapien
taaaatgtctgcctaaccctcacat

SEQ ID NO: 4803124 - DNA, 25 bp, Homo sapien
taaatgcatttatgggacacaccta

SEQ ID NO: 4803125 - DNA, 25 bp, Homo sapien
tcaccacccgagtcttgctgaagtt

SEQ ID NO: 4803126 - DNA, 25 bp, Homo sapien
ggcactttgatcctcagcttgtgta

SEQ ID NO: 4803127 - DNA, 25 bp, Homo sapien
tgcgatgacatatgacctaagagat

SEQ ID NO: 4803128 - DNA, 25 bp, Homo sapien
ttagggcatacaacacagatcagag

SEQ ID NO: 4803129 - DNA, 25 bp, Homo sapien
gcttaggaaattccactgctttggc

SEQ ID NO: 4803130 - DNA, 25 bp, Homo sapien
tgtatactgagatcacagcttacag

SEQ ID NO: 4803131 - DNA, 25 bp, Homo sapien
cttacagtcactatatctcagccta

SEQ ID NO: 4803132 - DNA, 25 bp, Homo sapien
tacaagtgatatggctacgaaggtc

SEQ ID NO: 4803133 - DNA, 25 bp, Homo sapien
tctcagcctattttatacaagtgat

SEQ ID NO: 4803134 - DNA, 25 bp, Homo sapien
gatatggcttcaaggaggaccccta

SEQ ID NO: 4803135 - DNA, 25 bp, Homo sapien
tatagtaacgctaactgacgcagtc

SEQ ID NO: 4803136 - DNA, 25 bp, Homo sapien
gaataataaatggtgcgacgctcag

SEQ ID NO: 4803137 - DNA, 25 bp, Homo sapien
cagacaccgtggctttgaacaaagt

SEQ ID NO: 4803138 - DNA, 25 bp, Homo sapien
tctagccactaatgcacaggatgag

SEQ ID NO: 4803139 - DNA, 25 bp, Homo sapien
caagaactgggacaatcgaagagca

SEQ ID NO: 4803140 - DNA, 25 bp, Homo sapien
tacagagcgcgtgagttatgaagca

SEQ ID NO: 4803141 - DNA, 25 bp, Homo sapien
tcaaataacaatacagccgcagctg

SEQ ID NO: 4803142 - DNA, 25 bp, Homo sapien
caagtgaatgggcttctagggctaa

SEQ ID NO: 4803143 - DNA, 25 bp, Homo sapien
gcttacaaagtgagtagactggctc

SEQ ID NO: 4803144 - DNA, 25 bp, Homo sapien
tacaacaggagtacaaagggcttac

SEQ ID NO: 4803145 - DNA, 25 bp, Homo sapien
tgctcaaataacagaatggaacctt

SEQ ID NO: 4803146 - DNA, 25 bp, Homo sapien
ttttattggctttattacacacttc

SEQ ID NO: 4803147 - DNA, 25 bp, Homo sapien
caactaagaatcagtgactgcatca

SEQ ID NO: 4803148 - DNA, 25 bp, Homo sapien
aatgaaaagtctctattgtattaaa

SEQ ID NO: 4803149 - DNA, 25 bp, Homo sapien
tgccctggggcaaatacatatcaat

SEQ ID NO: 4803150 - DNA, 25 bp, Homo sapien
aacttaaactttgaactgctagact

SEQ ID NO: 4803151 - DNA, 25 bp, Homo sapien
gagactctatacatccttcacaaat

SEQ ID NO: 4803152 - DNA, 25 bp, Homo sapien
tatttccctagaacagaagggctgg

SEQ ID NO: 4803153 - DNA, 25 bp, Homo sapien
tgaggtaccgttttcacagaactgg

SEQ ID NO: 4803154 - DNA, 25 bp, Homo sapien
gaacaggatatgttggaaatttcat

SEQ ID NO: 4803155 - DNA, 25 bp, Homo sapien
ctaaaagaatgagtagtggggaaca

SEQ ID NO: 4803156 - DNA, 25 bp, Homo sapien
tatgttggaaatttcataacgggta

SEQ ID NO: 4803157 - DNA, 25 bp, Homo sapien
tggaaatttcataacgggtaacaga

SEQ ID NO: 4803158 - DNA, 25 bp, Homo sapien
tcaggatggctacatctaggaagca

SEQ ID NO: 4803159 - DNA, 25 bp, Homo sapien
cattgagtgagctaccatgaattct

SEQ ID NO: 4803160 - DNA, 25 bp, Homo sapien
tttccagatcagtcagtcaacatgt

SEQ ID NO: 4803161 - DNA, 25 bp, Homo sapien
gaggcccataaatcgctcacagatc

SEQ ID NO: 4803162 - DNA, 25 bp, Homo sapien
taatcgactgtagaaatccatattg

SEQ ID NO: 4803163 - DNA, 25 bp, Homo sapien
ggttgtcaaggttcaaagcatagct

SEQ ID NO: 4803164 - DNA, 25 bp, Homo sapien
catagctttccatgcagacctcagc

SEQ ID NO: 4803165 - DNA, 25 bp, Homo sapien
ccatattggttctcaatgtggcata

SEQ ID NO: 4803166 - DNA, 25 bp, Homo sapien
ggagccatggccaggcgtttactta

SEQ ID NO: 4803167 - DNA, 25 bp, Homo sapien
catggccaggcgtttacttaacttc

SEQ ID NO: 4803168 - DNA, 25 bp, Homo sapien
gccatggccaggcgtttacttaact

SEQ ID NO: 4803169 - DNA, 25 bp, Homo sapien
atggccaggcgtttacttaacttct

SEQ ID NO: 4803170 - DNA, 25 bp, Homo sapien
taatacgttcttgtggcctcacaga

SEQ ID NO: 4803171 - DNA, 25 bp, Homo sapien
tctgcatagtcgagcatgatttgaa

SEQ ID NO: 4803172 - DNA, 25 bp, Homo sapien
gcaacagcaggtattcaagagcacc

SEQ ID NO: 4803173 - DNA, 25 bp, Homo sapien
ccagatgatcagagggaaattaccc

SEQ ID NO: 4803174 - DNA, 25 bp, Homo sapien
tacagccaaaataaagcatcgtttt

SEQ ID NO: 4803175 - DNA, 25 bp, Homo sapien
caaaataaagcatcgttttagtagg

SEQ ID NO: 4803176 - DNA, 25 bp, Homo sapien
catcgttttagtaggtttgcatcac

SEQ ID NO: 4803177 - DNA, 25 bp, Homo sapien
ttagtaggtttgcatcacagtaaca

SEQ ID NO: 4803178 - DNA, 25 bp, Homo sapien
cccgagtgtgccagaggatataaag

SEQ ID NO: 4803179 - DNA, 25 bp, Homo sapien
gattctataacatgtagcacctgag

SEQ ID NO: 4803180 - DNA, 25 bp, Homo sapien
tttgctccgaaagtgtgacccttgt

SEQ ID NO: 4803181 - DNA, 25 bp, Homo sapien
aatgcacaatgcgaaggtctgaggc

SEQ ID NO: 4803182 - DNA, 25 bp, Homo sapien
ccttcaatcaggcaaagcggagaga

SEQ ID NO: 4803183 - DNA, 25 bp, Homo sapien
cctgcagcgagcacttaagtaagac

SEQ ID NO: 4803184 - DNA, 25 bp, Homo sapien
aaaactggtaggcagccaagctagc

SEQ ID NO: 4803185 - DNA, 25 bp, Homo sapien
taagtaagactgctggtgaaaccca

SEQ ID NO: 4803186 - DNA, 25 bp, Homo sapien
acaaaaaccctagatagaaactgtg

SEQ ID NO: 4803187 - DNA, 25 bp, Homo sapien
ttgctgtgacagtcgctaagaggag

SEQ ID NO: 4803188 - DNA, 25 bp, Homo sapien
gtgacagtcgctaagaggagatatc

SEQ ID NO: 4803189 - DNA, 25 bp, Homo sapien
aaccctagatagaaactgtgctttg

SEQ ID NO: 4803190 - DNA, 25 bp, Homo sapien
cagctgtgctgtaaccatatggtgt

SEQ ID NO: 4803191 - DNA, 25 bp, Homo sapien
ggcagctgtgctgtaaccatatggt

SEQ ID NO: 4803192 - DNA, 25 bp, Homo sapien
ctgtaaccatatggtgttccatagc

SEQ ID NO: 4803193 - DNA, 25 bp, Homo sapien
tgtgctgtaaccatatggtgttcca

SEQ ID NO: 4803194 - DNA, 25 bp, Homo sapien
aatttctggcccaagtacagggtct

SEQ ID NO: 4803195 - DNA, 25 bp, Homo sapien
cacatgagtcaggtcgtgagcccaa

SEQ ID NO: 4803196 - DNA, 25 bp, Homo sapien
tctggtacctatgaaaaaggctcac

SEQ ID NO: 4803197 - DNA, 25 bp, Homo sapien
caggctgaggtctcaatggccatta

SEQ ID NO: 4803198 - DNA, 25 bp, Homo sapien
agcagctgtcgccccaacaaaagct

SEQ ID NO: 4803199 - DNA, 25 bp, Homo sapien
caggagcagctgtcgccccaacaaa

SEQ ID NO: 4803200 - DNA, 25 bp, Homo sapien
ctgtcgccccaacaaaagctcccct

SEQ ID NO: 4803201 - DNA, 25 bp, Homo sapien
tggagctatgtagccaggagcagct

SEQ ID NO: 4803202 - DNA, 25 bp, Homo sapien
attcgtgacctaacccaaagcaaag

SEQ ID NO: 4803203 - DNA, 25 bp, Homo sapien
caaatttatattattcgtgacctaa

SEQ ID NO: 4803204 - DNA, 25 bp, Homo sapien
tcaccaagtccaagaaaaggaaaca

SEQ ID NO: 4803205 - DNA, 25 bp, Homo sapien
caaagcaaaggtcaccaagtccaag

SEQ ID NO: 4803206 - DNA, 25 bp, Homo sapien
gcagctaaagctgcactcgcctttg

SEQ ID NO: 4803207 - DNA, 25 bp, Homo sapien
ttcttattatttgccgcattgggtc

SEQ ID NO: 4803208 - DNA, 25 bp, Homo sapien
ttgccgcattgggtccagaaaacag

SEQ ID NO: 4803209 - DNA, 25 bp, Homo sapien
aacagtttctccaaggcagctaaag

SEQ ID NO: 4803210 - DNA, 25 bp, Homo sapien
ttgagaagaaagataaggctggctt

SEQ ID NO: 4803211 - DNA, 25 bp, Homo sapien
aggctggcttgtgtctgggtacaca

SEQ ID NO: 4803212 - DNA, 25 bp, Homo sapien
attaagttcaggatatcctatgtct

SEQ ID NO: 4803213 - DNA, 25 bp, Homo sapien
agttcaggatatcctatgtctttga

SEQ ID NO: 4803214 - DNA, 25 bp, Homo sapien
cacttgctgtgaggatagggccctg

SEQ ID NO: 4803215 - DNA, 25 bp, Homo sapien
gcttgtcatggcttccaccagtctc

SEQ ID NO: 4803216 - DNA, 25 bp, Homo sapien
gagctccattacagggtttttgcca

SEQ ID NO: 4803217 - DNA, 25 bp, Homo sapien
gatgagttcatacttgagacctctt

SEQ ID NO: 4803218 - DNA, 25 bp, Homo sapien
gttggatatcccattgcctgcaata

SEQ ID NO: 4803219 - DNA, 25 bp, Homo sapien
ttatctgatttttcatcggaactca

SEQ ID NO: 4803220 - DNA, 25 bp, Homo sapien
cggaactcatacattcaatatctgc

SEQ ID NO: 4803221 - DNA, 25 bp, Homo sapien
tggaggtttcagttgtagaatttcc

SEQ ID NO: 4803222 - DNA, 25 bp, Homo sapien
gaaagtaacatccatggcttctgta

SEQ ID NO: 4803223 - DNA, 25 bp, Homo sapien
tatggatgattatgaccctaaaggt

SEQ ID NO: 4803224 - DNA, 25 bp, Homo sapien
gctgtgactgagaaagatgataccc

SEQ ID NO: 4803225 - DNA, 25 bp, Homo sapien
tacatcatggctctctactcaaaag

SEQ ID NO: 4803226 - DNA, 25 bp, Homo sapien
cttggtgccaggttgttttgagaat

SEQ ID NO: 4803227 - DNA, 25 bp, Homo sapien
attatataggttcaccattccttat

SEQ ID NO: 4803228 - DNA, 25 bp, Homo sapien
cattatataggttcaccattcctta

SEQ ID NO: 4803229 - DNA, 25 bp, Homo sapien
acccttggtgccaggttgttttgag

SEQ ID NO: 4803230 - DNA, 25 bp, Homo sapien
taaggtctattgctttactatccag

SEQ ID NO: 4803231 - DNA, 25 bp, Homo sapien
gataggagcttatactgaagcccag

SEQ ID NO: 4803232 - DNA, 25 bp, Homo sapien
ccaggcctgatctgatttagcctca

SEQ ID NO: 4803233 - DNA, 25 bp, Homo sapien
caccgctacgtgaagttttgctgtt

SEQ ID NO: 4803234 - DNA, 25 bp, Homo sapien
cttcttgttggggtctttatcatcc

SEQ ID NO: 4803235 - DNA, 25 bp, Homo sapien
ggtctttatcatcccctaatccatc

SEQ ID NO: 4803236 - DNA, 25 bp, Homo sapien
tcatcttcttgttggggtctttatc

SEQ ID NO: 4803237 - DNA, 25 bp, Homo sapien
ccttaagtttcgtttcatcttcttg

SEQ ID NO: 4803238 - DNA, 25 bp, Homo sapien
gggtggagcccttatcaattataaa

SEQ ID NO: 4803239 - DNA, 25 bp, Homo sapien
tgagccctcacgagacagcaaatct

SEQ ID NO: 4803240 - DNA, 25 bp, Homo sapien
gatgcctgacagagactgtttgtcc

SEQ ID NO: 4803241 - DNA, 25 bp, Homo sapien
gggatacatagcaggcaccatctat

SEQ ID NO: 4803242 - DNA, 25 bp, Homo sapien
aagcaaaaaggatttgctgacgttt

SEQ ID NO: 4803243 - DNA, 25 bp, Homo sapien
caaaaaggatttgctgacgtttggg

SEQ ID NO: 4803244 - DNA, 25 bp, Homo sapien
gcaaaaaggatttgctgacgtttgg

SEQ ID NO: 4803245 - DNA, 25 bp, Homo sapien
aaaaggatttgctgacgtttgggat

SEQ ID NO: 4803246 - DNA, 25 bp, Homo sapien
tccatgtagcgatattgaggaggca

SEQ ID NO: 4803247 - DNA, 25 bp, Homo sapien
gaggtcccctaaagcatcagtgtaa

SEQ ID NO: 4803248 - DNA, 25 bp, Homo sapien
tctgaggactgaaccctaggacact

SEQ ID NO: 4803249 - DNA, 25 bp, Homo sapien
ggtctgagttcaagagctggtagtc

SEQ ID NO: 4803250 - DNA, 25 bp, Homo sapien
aaggtcgcaagggatacttcaggca

SEQ ID NO: 4803251 - DNA, 25 bp, Homo sapien
tcagatgggagatactgcagcaggt

SEQ ID NO: 4803252 - DNA, 25 bp, Homo sapien
gaagcattcagtagacagggaggaa

SEQ ID NO: 4803253 - DNA, 25 bp, Homo sapien
gaatgtagtaacgtgaaggtcgcaa

SEQ ID NO: 4803254 - DNA, 25 bp, Homo sapien
tctttatcagtaactgaccaggaat

SEQ ID NO: 4803255 - DNA, 25 bp, Homo sapien
tgaaaaggcttactagatggaaggg

SEQ ID NO: 4803256 - DNA, 25 bp, Homo sapien
ccaaaggctgatagtctgagtgcat

SEQ ID NO: 4803257 - DNA, 25 bp, Homo sapien
tctccagcactttgtaaatctggcc

SEQ ID NO: 4803258 - DNA, 25 bp, Homo sapien
tgtgcactgtgggtaatatcttctt

SEQ ID NO: 4803259 - DNA, 25 bp, Homo sapien
tcagagcatctgttgggtctcgctc

SEQ ID NO: 4803260 - DNA, 25 bp, Homo sapien
tgggtctcgctcacaaggatcatga

SEQ ID NO: 4803261 - DNA, 25 bp, Homo sapien
tggatggtcatatagctcagagcat

SEQ ID NO: 4803262 - DNA, 25 bp, Homo sapien
aacactccattactcgtctcaaggc

SEQ ID NO: 4803263 - DNA, 25 bp, Homo sapien
gcgcccaaaggtctattacaagtac

SEQ ID NO: 4803264 - DNA, 25 bp, Homo sapien
gatgccaaacactccattactcgtc

SEQ ID NO: 4803265 - DNA, 25 bp, Homo sapien
caagtacctatagacttttcacata

SEQ ID NO: 4803266 - DNA, 25 bp, Homo sapien
gcggaggacaattacacatgatttt

SEQ ID NO: 4803267 - DNA, 25 bp, Homo sapien
caaatcacgcagaatgcggaggaca

SEQ ID NO: 4803268 - DNA, 25 bp, Homo sapien
cgcagaatgcggaggacaattacac

SEQ ID NO: 4803269 - DNA, 25 bp, Homo sapien
ctgttgcacaaatcacgcagaatgc

SEQ ID NO: 4803270 - DNA, 25 bp, Homo sapien
ccaataagtccggaggatctttcat

SEQ ID NO: 4803271 - DNA, 25 bp, Homo sapien
atttctgcctgtccaataagtccgg

SEQ ID NO: 4803272 - DNA, 25 bp, Homo sapien
acgccaaggcgttcaggcatttctg

SEQ ID NO: 4803273 - DNA, 25 bp, Homo sapien
gaaaccatttggcatgtcgaagaga

SEQ ID NO: 4803274 - DNA, 25 bp, Homo sapien
tctgggaccaatagcattaacaatt

SEQ ID NO: 4803275 - DNA, 25 bp, Homo sapien
tgacagctgctacttaaaatctggg

SEQ ID NO: 4803276 - DNA, 25 bp, Homo sapien
cagagtagttctgtgcacaaataca

SEQ ID NO: 4803277 - DNA, 25 bp, Homo sapien
tccaccccatgattgagaactcaag

SEQ ID NO: 4803278 - DNA, 25 bp, Homo sapien
atcagaatgaccgtgtttcttcatg

SEQ ID NO: 4803279 - DNA, 25 bp, Homo sapien
tcagaatgaccgtgtttcttcatgc

SEQ ID NO: 4803280 - DNA, 25 bp, Homo sapien
catcagaatgaccgtgtttcttcat

SEQ ID NO: 4803281 - DNA, 25 bp, Homo sapien
cagaatgaccgtgtttcttcatgct

SEQ ID NO: 4803282 - DNA, 25 bp, Homo sapien
gccaagaagggcgagttcacactgg

SEQ ID NO: 4803283 - DNA, 25 bp, Homo sapien
atttctgccaagaagggcgagttca

SEQ ID NO: 4803284 - DNA, 25 bp, Homo sapien
tgaagggactctgaggcaacttctc

SEQ ID NO: 4803285 - DNA, 25 bp, Homo sapien
atgaagggactctgaggcaacttct

SEQ ID NO: 4803286 - DNA, 25 bp, Homo sapien
gttctacagttaatggtgaactgta

SEQ ID NO: 4803287 - DNA, 25 bp, Homo sapien
gaaatcattttatagttctacagtt

SEQ ID NO: 4803288 - DNA, 25 bp, Homo sapien
cattttatagttctacagttaatgg

SEQ ID NO: 4803289 - DNA, 25 bp, Homo sapien
tatagttctacagttaatggtgaac

SEQ ID NO: 4803290 - DNA, 25 bp, Homo sapien
agacatgtacaaatcttatgagatt

SEQ ID NO: 4803291 - DNA, 25 bp, Homo sapien
atcccttacactataaaacaaatct

SEQ ID NO: 4803292 - DNA, 25 bp, Homo sapien
catgtacaaatcttatgagattata

SEQ ID NO: 4803293 - DNA, 25 bp, Homo sapien
cccttacactataaaacaaatctag

SEQ ID NO: 4803294 - DNA, 25 bp, Homo sapien
tctgttttggaccacatttaatcct

SEQ ID NO: 4803295 - DNA, 25 bp, Homo sapien
gaataagttggctgatagcaataac

SEQ ID NO: 4803296 - DNA, 25 bp, Homo sapien
acaagacaagcacaagtttttgaaa

SEQ ID NO: 4803297 - DNA, 25 bp, Homo sapien
taatcctgaaatccgaccattaagc

SEQ ID NO: 4803298 - DNA, 25 bp, Homo sapien
atccataaaacattgttaacatagc

SEQ ID NO: 4803299 - DNA, 25 bp, Homo sapien
taaaatactattaaatagagtggca

SEQ ID NO: 4803300 - DNA, 25 bp, Homo sapien
aaaatactattaaatagagtggcat

SEQ ID NO: 4803301 - DNA, 25 bp, Homo sapien
cataaaacattgttaacatagcttt

SEQ ID NO: 4803302 - DNA, 25 bp, Homo sapien
tccaattcgtccctaattagaggtg

SEQ ID NO: 4803303 - DNA, 25 bp, Homo sapien
tcttctccaattcgtccctaattag

SEQ ID NO: 4803304 - DNA, 25 bp, Homo sapien
cgtccctaattagaggtgaggtaag

SEQ ID NO: 4803305 - DNA, 25 bp, Homo sapien
cctaattagaggtgaggtaagtatc

SEQ ID NO: 4803306 - DNA, 25 bp, Homo sapien
gggctcttttgtattccgaattata

SEQ ID NO: 4803307 - DNA, 25 bp, Homo sapien
ccgaattataatagatgcctcattt

SEQ ID NO: 4803308 - DNA, 25 bp, Homo sapien
cacattgttccacttgatatttctc

SEQ ID NO: 4803309 - DNA, 25 bp, Homo sapien
caaagttagcgtgggctcttttgta

SEQ ID NO: 4803310 - DNA, 25 bp, Homo sapien
cctcctcctttgctcaaagaagttc

SEQ ID NO: 4803311 - DNA, 25 bp, Homo sapien
cctttgctcaaagaagttctaaaag

SEQ ID NO: 4803312 - DNA, 25 bp, Homo sapien
cctcctttgctcaaagaagttctaa

SEQ ID NO: 4803313 - DNA, 25 bp, Homo sapien
tgctcaaagaagttctaaaagcatc

SEQ ID NO: 4803314 - DNA, 25 bp, Homo sapien
gctccaagtccatatcatctttaat

SEQ ID NO: 4803315 - DNA, 25 bp, Homo sapien
cttttgcaaccaggccaatcctcat

SEQ ID NO: 4803316 - DNA, 25 bp, Homo sapien
tttgcacattaaaaccagctccaag

SEQ ID NO: 4803317 - DNA, 25 bp, Homo sapien
taggaagattatctttgactgtatt

SEQ ID NO: 4803318 - DNA, 25 bp, Homo sapien
ccggagatggatagattgttgaatg

SEQ ID NO: 4803319 - DNA, 25 bp, Homo sapien
taagagcacattcaacagtagatac

SEQ ID NO: 4803320 - DNA, 25 bp, Homo sapien
aacagcttcaagttcctccggagat

SEQ ID NO: 4803321 - DNA, 25 bp, Homo sapien
ggaatagttttctccggcctcatct

SEQ ID NO: 4803322 - DNA, 25 bp, Homo sapien
atcattagcaaaagatcgaatagat

SEQ ID NO: 4803323 - DNA, 25 bp, Homo sapien
aacatggcgatcatcattagcaaaa

SEQ ID NO: 4803324 - DNA, 25 bp, Homo sapien
tcattagcaaaagatcgaatagatc

SEQ ID NO: 4803325 - DNA, 25 bp, Homo sapien
cattagcaaaagatcgaatagatct

SEQ ID NO: 4803326 - DNA, 25 bp, Homo sapien
tccatcgcaaactaaaacattctca

SEQ ID NO: 4803327 - DNA, 25 bp, Homo sapien
gaagtccatcgcaaactaaaacatt

SEQ ID NO: 4803328 - DNA, 25 bp, Homo sapien
ttgttttgaagtccatcgcaaacta

SEQ ID NO: 4803329 - DNA, 25 bp, Homo sapien
gaaattatatgttagtacatggtaa

SEQ ID NO: 4803330 - DNA, 25 bp, Homo sapien
aatcaccaccaacagaccggctaaa

SEQ ID NO: 4803331 - DNA, 25 bp, Homo sapien
tcccaagttaacatttgttcccaca

SEQ ID NO: 4803332 - DNA, 25 bp, Homo sapien
tttcttctctaaggagtcagctgat

SEQ ID NO: 4803333 - DNA, 25 bp, Homo sapien
gctgattaagttataatccttggca

SEQ ID NO: 4803334 - DNA, 25 bp, Homo sapien
tcgtcttcactagacactgttttgt

SEQ ID NO: 4803335 - DNA, 25 bp, Homo sapien
cttgtcgtcttcactagacactgtt

SEQ ID NO: 4803336 - DNA, 25 bp, Homo sapien
tcttgtcgtcttcactagacactgt

SEQ ID NO: 4803337 - DNA, 25 bp, Homo sapien
tgtcgtcttcactagacactgtttt

SEQ ID NO: 4803338 - DNA, 25 bp, Homo sapien
aatatagcaaatgtctgaaggcttg

SEQ ID NO: 4803339 - DNA, 25 bp, Homo sapien
tatagcaaatgtctgaaggcttgtt

SEQ ID NO: 4803340 - DNA, 25 bp, Homo sapien
tagcaaatgtctgaaggcttgttct

SEQ ID NO: 4803341 - DNA, 25 bp, Homo sapien
atagcaaatgtctgaaggcttgttc

SEQ ID NO: 4803342 - DNA, 25 bp, Homo sapien
cactacgccatcatgatttgtcatt

SEQ ID NO: 4803343 - DNA, 25 bp, Homo sapien
ctgcagccactacgccatcatgatt

SEQ ID NO: 4803344 - DNA, 25 bp, Homo sapien
tggactgcagccactacgccatcat

SEQ ID NO: 4803345 - DNA, 25 bp, Homo sapien
cagccactacgccatcatgatttgt

SEQ ID NO: 4803346 - DNA, 25 bp, Homo sapien
gggaatttctgactcgtcctccata

SEQ ID NO: 4803347 - DNA, 25 bp, Homo sapien
tttctgactcgtcctccataagcac

SEQ ID NO: 4803348 - DNA, 25 bp, Homo sapien
agggaatttctgactcgtcctccat

SEQ ID NO: 4803349 - DNA, 25 bp, Homo sapien
gaatttctgactcgtcctccataag

SEQ ID NO: 4803350 - DNA, 25 bp, Homo sapien
ggacctgagttccaaattcacattc

SEQ ID NO: 4803351 - DNA, 25 bp, Homo sapien
tatcttaccttcaacattcccttgg

SEQ ID NO: 4803352 - DNA, 25 bp, Homo sapien
tggcaatgttatctaggtttgagac

SEQ ID NO: 4803353 - DNA, 25 bp, Homo sapien
tgaagtgcctcaagactcagccctc

SEQ ID NO: 4803354 - DNA, 25 bp, Homo sapien
tttctgtggtgtcaagtgcaatgtc

SEQ ID NO: 4803355 - DNA, 25 bp, Homo sapien
tgttaggtggagctagtttaggcca

SEQ ID NO: 4803356 - DNA, 25 bp, Homo sapien
ttggtagggacaaattcccctggca

SEQ ID NO: 4803357 - DNA, 25 bp, Homo sapien
gacaggaccctaatctcttttggct

SEQ ID NO: 4803358 - DNA, 25 bp, Homo sapien
gtttaggccactgacattcaatgct

SEQ ID NO: 4803359 - DNA, 25 bp, Homo sapien
tctgtattacagttccggctcgact

SEQ ID NO: 4803360 - DNA, 25 bp, Homo sapien
gcggataccctataagcaatgatac

SEQ ID NO: 4803361 - DNA, 25 bp, Homo sapien
gataacgtcaaagatgcggataccc

SEQ ID NO: 4803362 - DNA, 25 bp, Homo sapien
gcaatccagttataagcaagcagta

SEQ ID NO: 4803363 - DNA, 25 bp, Homo sapien
taaatattgtagactggtgggccac

SEQ ID NO: 4803364 - DNA, 25 bp, Homo sapien
tacagaccttagctagcgcacagtt

SEQ ID NO: 4803365 - DNA, 25 bp, Homo sapien
gacagatctatggaaagcccaggat

SEQ ID NO: 4803366 - DNA, 25 bp, Homo sapien
tattcgagggtgctggctaaagtca

SEQ ID NO: 4803367 - DNA, 25 bp, Homo sapien
tcaaatctgctagagaacagagtgc

SEQ ID NO: 4803368 - DNA, 25 bp, Homo sapien
gatgagggaggtttccagatttcaa

SEQ ID NO: 4803369 - DNA, 25 bp, Homo sapien
catgtacactttcccaacgcagaaa

SEQ ID NO: 4803370 - DNA, 25 bp, Homo sapien
aacagagtgcatacatggaagtgac

SEQ ID NO: 4803371 - DNA, 25 bp, Homo sapien
acagatatgggcatcgaaaatgaga

SEQ ID NO: 4803372 - DNA, 25 bp, Homo sapien
tatgggcatcgaaaatgagaaaaac

SEQ ID NO: 4803373 - DNA, 25 bp, Homo sapien
tcaagaacttttggtcatcaaaaaa

SEQ ID NO: 4803374 - DNA, 25 bp, Homo sapien
gatatgggcatcgaaaatgagaaaa

SEQ ID NO: 4803375 - DNA, 25 bp, Homo sapien
tcaaacattcccagatgtccttggc

SEQ ID NO: 4803376 - DNA, 25 bp, Homo sapien
gaacattgaagacaatctagaaata

SEQ ID NO: 4803377 - DNA, 25 bp, Homo sapien
tagatccttcacatgactatcaaga

SEQ ID NO: 4803378 - DNA, 25 bp, Homo sapien
gataagcaggataagaacattgaag

SEQ ID NO: 4803379 - DNA, 25 bp, Homo sapien
ctgagatcaagcagctagtctgcga

SEQ ID NO: 4803380 - DNA, 25 bp, Homo sapien
tagaatcagaccacctgcggccagt

SEQ ID NO: 4803381 - DNA, 25 bp, Homo sapien
cagctagtctgcgacagagccagga

SEQ ID NO: 4803382 - DNA, 25 bp, Homo sapien
gccaggactagaatcagaccacctg

SEQ ID NO: 4803383 - DNA, 25 bp, Homo sapien
ggcatgcaccactggctaactgttt

SEQ ID NO: 4803384 - DNA, 25 bp, Homo sapien
cactggctaactgttttattgtaga

SEQ ID NO: 4803385 - DNA, 25 bp, Homo sapien
gcatgcaccactggctaactgtttt

SEQ ID NO: 4803386 - DNA, 25 bp, Homo sapien
caccactggctaactgttttattgt

SEQ ID NO: 4803387 - DNA, 25 bp, Homo sapien
tgttatggccttctatacacctagg

SEQ ID NO: 4803388 - DNA, 25 bp, Homo sapien
gcagagctagtacgcaggattggaa

SEQ ID NO: 4803389 - DNA, 25 bp, Homo sapien
taagaaacccactaacaggactgta

SEQ ID NO: 4803390 - DNA, 25 bp, Homo sapien
tgtacattgtacaagcagtctgtca

SEQ ID NO: 4803391 - DNA, 25 bp, Homo sapien
tagcctttacaagtgagttcctgtg

SEQ ID NO: 4803392 - DNA, 25 bp, Homo sapien
gatgttccagacttagacagcactc

SEQ ID NO: 4803393 - DNA, 25 bp, Homo sapien
gatatgctcatctctgctggctgcc

SEQ ID NO: 4803394 - DNA, 25 bp, Homo sapien
gtgttcttcagacatgtgccccgag

SEQ ID NO: 4803395 - DNA, 25 bp, Homo sapien
taatctttacaaggtggagccccat

SEQ ID NO: 4803396 - DNA, 25 bp, Homo sapien
ccaaaggtgctagagtagagcaaca

SEQ ID NO: 4803397 - DNA, 25 bp, Homo sapien
caaagaagagtacgcaaggtgctcc

SEQ ID NO: 4803398 - DNA, 25 bp, Homo sapien
ttctttgcgggataagctctcagag

SEQ ID NO: 4803399 - DNA, 25 bp, Homo sapien
atttcacctgacttaattcaatcct

SEQ ID NO: 4803400 - DNA, 25 bp, Homo sapien
gatttcacctgacttaattcaatcc

SEQ ID NO: 4803401 - DNA, 25 bp, Homo sapien
atcagatttcacctgacttaattca

SEQ ID NO: 4803402 - DNA, 25 bp, Homo sapien
cagatttcacctgacttaattcaat

SEQ ID NO: 4803403 - DNA, 25 bp, Homo sapien
tctgggtaccggttataaggatgaa

SEQ ID NO: 4803404 - DNA, 25 bp, Homo sapien
tctagtaagttcctagacaccatgg

SEQ ID NO: 4803405 - DNA, 25 bp, Homo sapien
ggcaaaactagtcaaaaccagtgat

SEQ ID NO: 4803406 - DNA, 25 bp, Homo sapien
ggcaacgttctatttcttctgggta

SEQ ID NO: 4803407 - DNA, 25 bp, Homo sapien
gctactgtgttgagctagactgttg

SEQ ID NO: 4803408 - DNA, 25 bp, Homo sapien
catacagcagaggatctaattagaa

SEQ ID NO: 4803409 - DNA, 25 bp, Homo sapien
tagaaatccatcacaacgatgcagg

SEQ ID NO: 4803410 - DNA, 25 bp, Homo sapien
tgcacccggcctgatctgacatatt

SEQ ID NO: 4803411 - DNA, 25 bp, Homo sapien
tgctgggcataggtcaaacaaaatg

SEQ ID NO: 4803412 - DNA, 25 bp, Homo sapien
tagagatatcaacttgggagccagt

SEQ ID NO: 4803413 - DNA, 25 bp, Homo sapien
gatctccaatggacacgccaatttt

SEQ ID NO: 4803414 - DNA, 25 bp, Homo sapien
tgcagtatcctggaagccaaaagtg

SEQ ID NO: 4803415 - DNA, 25 bp, Homo sapien
tggatgcacgactctgtaaatatac

SEQ ID NO: 4803416 - DNA, 25 bp, Homo sapien
gatgtttcactacaaagaagggcaa

SEQ ID NO: 4803417 - DNA, 25 bp, Homo sapien
tagctggcaatcaaagtgggatcaa

SEQ ID NO: 4803418 - DNA, 25 bp, Homo sapien
tgttataatacgcatgaaccttgaa

SEQ ID NO: 4803419 - DNA, 25 bp, Homo sapien
gcaaggagaaaggactcctccagct

SEQ ID NO: 4803420 - DNA, 25 bp, Homo sapien
cttctagtgtcagcaaggagaaagg

SEQ ID NO: 4803421 - DNA, 25 bp, Homo sapien
aggagaaaggactcctccagctgct

SEQ ID NO: 4803422 - DNA, 25 bp, Homo sapien
agcaaggagaaaggactcctccagc

SEQ ID NO: 4803423 - DNA, 25 bp, Homo sapien
tagtaatttgccagcatagtatatt

SEQ ID NO: 4803424 - DNA, 25 bp, Homo sapien
aatttgccagcatagtatattggac

SEQ ID NO: 4803425 - DNA, 25 bp, Homo sapien
ttgccagcatagtatattggacatt

SEQ ID NO: 4803426 - DNA, 25 bp, Homo sapien
aatgatagtaatttgccagcatagt

SEQ ID NO: 4803427 - DNA, 25 bp, Homo sapien
tataagaagcaacagttgaggccag

SEQ ID NO: 4803428 - DNA, 25 bp, Homo sapien
ttataagaagcaacagttgaggcca

SEQ ID NO: 4803429 - DNA, 25 bp, Homo sapien
caaacttaggaccagggcacagaac

SEQ ID NO: 4803430 - DNA, 25 bp, Homo sapien
caatgacaagcctactctgacctca

SEQ ID NO: 4803431 - DNA, 25 bp, Homo sapien
gacctcatttgtacctgatatcaca

SEQ ID NO: 4803432 - DNA, 25 bp, Homo sapien
tgggccacatttagactcactgcca

SEQ ID NO: 4803433 - DNA, 25 bp, Homo sapien
ttaacagttgttaaggatctggctg

SEQ ID NO: 4803434 - DNA, 25 bp, Homo sapien
ataacgttcctactcggcaatggag

SEQ ID NO: 4803435 - DNA, 25 bp, Homo sapien
gaatgagaatcagtatcctccagag

SEQ ID NO: 4803436 - DNA, 25 bp, Homo sapien
gatctggctgttaacaattcactaa

SEQ ID NO: 4803437 - DNA, 25 bp, Homo sapien
tactgagcccatcgcaaatgtcagg

SEQ ID NO: 4803438 - DNA, 25 bp, Homo sapien
gaacggacggcacttactgagccca

SEQ ID NO: 4803439 - DNA, 25 bp, Homo sapien
cccatcgcaaatgtcaggctctgtg

SEQ ID NO: 4803440 - DNA, 25 bp, Homo sapien
aaatagtacaagagaacggacggca

SEQ ID NO: 4803441 - DNA, 25 bp, Homo sapien
catagtgggacaggataaagtggca

SEQ ID NO: 4803442 - DNA, 25 bp, Homo sapien
gagagtactgaatccctcaaacgag

SEQ ID NO: 4803443 - DNA, 25 bp, Homo sapien
gcaggcaacaaagcactaggagtga

SEQ ID NO: 4803444 - DNA, 25 bp, Homo sapien
gaaggatactctgtttctcactggc

SEQ ID NO: 4803445 - DNA, 25 bp, Homo sapien
cctggcatagaaagctacatcctct

SEQ ID NO: 4803446 - DNA, 25 bp, Homo sapien
aatctaaaagaaccttacactgttg

SEQ ID NO: 4803447 - DNA, 25 bp, Homo sapien
tacactgttgttcttgaatctgcct

SEQ ID NO: 4803448 - DNA, 25 bp, Homo sapien
aaacacctcctgctacagggctctg

SEQ ID NO: 4803449 - DNA, 25 bp, Homo sapien
gtcctcttccaatgtggctctatgt

SEQ ID NO: 4803450 - DNA, 25 bp, Homo sapien
tcctcttccaatgtggctctatgtc

SEQ ID NO: 4803451 - DNA, 25 bp, Homo sapien
ttaaaaggcttgtcctcttccaatg

SEQ ID NO: 4803452 - DNA, 25 bp, Homo sapien
aaaggcttgtcctcttccaatgtgg

SEQ ID NO: 4803453 - DNA, 25 bp, Homo sapien
caaggttactagttgggaacactca

SEQ ID NO: 4803454 - DNA, 25 bp, Homo sapien
gaaaaacaggagtatggtatggcaa

SEQ ID NO: 4803455 - DNA, 25 bp, Homo sapien
taagaaaggcactacttagatatcc

SEQ ID NO: 4803456 - DNA, 25 bp, Homo sapien
ggtatggcaaaagcatgcaaacctt

SEQ ID NO: 4803457 - DNA, 25 bp, Homo sapien
caggctgccaatcaagtaggcttga

SEQ ID NO: 4803458 - DNA, 25 bp, Homo sapien
tgcttatactgagggaaccccaggc

SEQ ID NO: 4803459 - DNA, 25 bp, Homo sapien
gttaccaagttgcaacagttccaag

SEQ ID NO: 4803460 - DNA, 25 bp, Homo sapien
gtaggcttgaaaccctgtagttgtc

SEQ ID NO: 4803461 - DNA, 25 bp, Homo sapien
ttgtttctataaagatgtggtctca

SEQ ID NO: 4803462 - DNA, 25 bp, Homo sapien
cttggaaactgcgacgttagaggaa

SEQ ID NO: 4803463 - DNA, 25 bp, Homo sapien
tcatagctcactacggctttaacct

SEQ ID NO: 4803464 - DNA, 25 bp, Homo sapien
taatcagtgtacagtaagttgtcat

SEQ ID NO: 4803465 - DNA, 25 bp, Homo sapien
gaaacattattcgagaaccagtcgt

SEQ ID NO: 4803466 - DNA, 25 bp, Homo sapien
tatcgtatcgtcaacaaaatgaacc

SEQ ID NO: 4803467 - DNA, 25 bp, Homo sapien
tatttcagtctgtctttccacgtaa

SEQ ID NO: 4803468 - DNA, 25 bp, Homo sapien
gggctttcaaacagagtaaggcttg

SEQ ID NO: 4803469 - DNA, 25 bp, Homo sapien
aatagttcattcaaatactcgggtt

SEQ ID NO: 4803470 - DNA, 25 bp, Homo sapien
tcaaggcgcataatattccaaagaa

SEQ ID NO: 4803471 - DNA, 25 bp, Homo sapien
tactcgggttcctactaaatgccag

SEQ ID NO: 4803472 - DNA, 25 bp, Homo sapien
gacttcaaggcgcataatattccaa

SEQ ID NO: 4803473 - DNA, 25 bp, Homo sapien
tataagagatgtcaggtaggcagta

SEQ ID NO: 4803474 - DNA, 25 bp, Homo sapien
gatagaagatataagagatgtcagg

SEQ ID NO: 4803475 - DNA, 25 bp, Homo sapien
aaaaatttgagagtcagccaggcgc

SEQ ID NO: 4803476 - DNA, 25 bp, Homo sapien
tcaatttgaaataaggatagaagat

SEQ ID NO: 4803477 - DNA, 25 bp, Homo sapien
ctggtggcgctcgcggctccggtct

SEQ ID NO: 4803478 - DNA, 25 bp, Homo sapien
tccggtctccgcttcggcggcggca

SEQ ID NO: 4803479 - DNA, 25 bp, Homo sapien
gctctgcccgcgcccggtacccgct

SEQ ID NO: 4803480 - DNA, 25 bp, Homo sapien
tcgcccgctcgcgtctccggctcct

SEQ ID NO: 4803481 - DNA, 25 bp, Homo sapien
gcgcgtcctgccgcacctgagagcg

SEQ ID NO: 4803482 - DNA, 25 bp, Homo sapien
ggagcgcgcagggagcactcgccgc

SEQ ID NO: 4803483 - DNA, 25 bp, Homo sapien
acctgagagcgccggccagcgcccg

SEQ ID NO: 4803484 - DNA, 25 bp, Homo sapien
ggctgctggggaacggaaagcccgc

SEQ ID NO: 4803485 - DNA, 25 bp, Homo sapien
ctgtgtatttttttccaaagcacct

SEQ ID NO: 4803486 - DNA, 25 bp, Homo sapien
tgtatttttttccaaagcacctgcc

SEQ ID NO: 4803487 - DNA, 25 bp, Homo sapien
tgtgtatttttttccaaagcacctg

SEQ ID NO: 4803488 - DNA, 25 bp, Homo sapien
gtgtatttttttccaaagcacctgc

SEQ ID NO: 4803489 - DNA, 25 bp, Homo sapien
gctgctatgctcaggggcaatggct

SEQ ID NO: 4803490 - DNA, 25 bp, Homo sapien
tgctcaggggcaatggctcatacca

SEQ ID NO: 4803491 - DNA, 25 bp, Homo sapien
gggcaatggctcataccacatctcc

SEQ ID NO: 4803492 - DNA, 25 bp, Homo sapien
aatggctcataccacatctcctcta

SEQ ID NO: 4803493 - DNA, 25 bp, Homo sapien
tgatggagtttatacctagagatcc

SEQ ID NO: 4803494 - DNA, 25 bp, Homo sapien
gatggagtttatacctagagatccc

SEQ ID NO: 4803495 - DNA, 25 bp, Homo sapien
ttgatggagtttatacctagagatc

SEQ ID NO: 4803496 - DNA, 25 bp, Homo sapien
agggtcccagggcttggcgtggagc

SEQ ID NO: 4803497 - DNA, 25 bp, Homo sapien
ctgccattaatggaagggtcccagg

SEQ ID NO: 4803498 - DNA, 25 bp, Homo sapien
ctttgctgccattaatggaagggtc

SEQ ID NO: 4803499 - DNA, 25 bp, Homo sapien
taaggggagggtccttgatgctggc

SEQ ID NO: 4803500 - DNA, 25 bp, Homo sapien
tgaggggatcctgagatttggtttg

SEQ ID NO: 4803501 - DNA, 25 bp, Homo sapien
tcctgagatttggtttggccttgga

SEQ ID NO: 4803502 - DNA, 25 bp, Homo sapien
gggatcctgagatttggtttggcct

SEQ ID NO: 4803503 - DNA, 25 bp, Homo sapien
caaggtgaggggatcctgagatttg

SEQ ID NO: 4803504 - DNA, 25 bp, Homo sapien
gccagggaatgacacgtgagtcccc

SEQ ID NO: 4803505 - DNA, 25 bp, Homo sapien
actgctctccacaaccccatctgat

SEQ ID NO: 4803506 - DNA, 25 bp, Homo sapien
gtcacccccagacttgatcagcaga

SEQ ID NO: 4803507 - DNA, 25 bp, Homo sapien
tgatcagcagatcaagtctcccctc

SEQ ID NO: 4803508 - DNA, 25 bp, Homo sapien
ctggaatccagctggactctccttc

SEQ ID NO: 4803509 - DNA, 25 bp, Homo sapien
tggaatccagctggactctccttct

SEQ ID NO: 4803510 - DNA, 25 bp, Homo sapien
cacagggctgttaagtagtggagct

SEQ ID NO: 4803511 - DNA, 25 bp, Homo sapien
tgagcgctttacatacgttcacaca

SEQ ID NO: 4803512 - DNA, 25 bp, Homo sapien
catatggcgttcacagtgtcctaga

SEQ ID NO: 4803513 - DNA, 25 bp, Homo sapien
ccgcaaggttgccactattatgata

SEQ ID NO: 4803514 - DNA, 25 bp, Homo sapien
actcaccaccccacaatgacccaca

SEQ ID NO: 4803515 - DNA, 25 bp, Homo sapien
tcaagctaccccctagccttaagct

SEQ ID NO: 4803516 - DNA, 25 bp, Homo sapien
acatgattacaattgtgctatgggt

SEQ ID NO: 4803517 - DNA, 25 bp, Homo sapien
tacaattgtgctatgggtctttttt

SEQ ID NO: 4803518 - DNA, 25 bp, Homo sapien
tcaaagttgctggtgctcgcagccc

SEQ ID NO: 4803519 - DNA, 25 bp, Homo sapien
agctcaaactggagggtaaccctgt

SEQ ID NO: 4803520 - DNA, 25 bp, Homo sapien
tatgctgaaacacctaagtgcccag

SEQ ID NO: 4803521 - DNA, 25 bp, Homo sapien
tgtgtatcacaaggcagcccaagac

SEQ ID NO: 4803522 - DNA, 25 bp, Homo sapien
tcactcgaaggtctcccactgcttc

SEQ ID NO: 4803523 - DNA, 25 bp, Homo sapien
actcgaaggtctcccactgcttcct

SEQ ID NO: 4803524 - DNA, 25 bp, Homo sapien
cgaaggtctcccactgcttcctgag

SEQ ID NO: 4803525 - DNA, 25 bp, Homo sapien
tcgaaggtctcccactgcttcctga

SEQ ID NO: 4803526 - DNA, 25 bp, Homo sapien
gggccagggccggactcgggctcac

SEQ ID NO: 4803527 - DNA, 25 bp, Homo sapien
ggggccagggccggactcgggctca

SEQ ID NO: 4803528 - DNA, 25 bp, Homo sapien
gagggcggagaggttgggctgagac

SEQ ID NO: 4803529 - DNA, 25 bp, Homo sapien
tcggatcctcgacggggcaactgct

SEQ ID NO: 4803530 - DNA, 25 bp, Homo sapien
gctcgtgtgggtgcccatgggcatc

SEQ ID NO: 4803531 - DNA, 25 bp, Homo sapien
cttgagcgggccaggggcaacgttc

SEQ ID NO: 4803532 - DNA, 25 bp, Homo sapien
tgggacaaaggggttgagtggtggc

SEQ ID NO: 4803533 - DNA, 25 bp, Homo sapien
ggcgtgacgggagggtgctgcctga

SEQ ID NO: 4803534 - DNA, 25 bp, Homo sapien
tggggtggctacattcggggtggcg

SEQ ID NO: 4803535 - DNA, 25 bp, Homo sapien
ggaagctgaattggggggtgaatgg

SEQ ID NO: 4803536 - DNA, 25 bp, Homo sapien
ctctgagacgtcaccaagtgcggcg

SEQ ID NO: 4803537 - DNA, 25 bp, Homo sapien
ttcaggatgctgtcccggttctggg

SEQ ID NO: 4803538 - DNA, 25 bp, Homo sapien
agggcgtcactgctcgtgcctgcag

SEQ ID NO: 4803539 - DNA, 25 bp, Homo sapien
tgttgtacgggtgggtaagcttcaa

SEQ ID NO: 4803540 - DNA, 25 bp, Homo sapien
aaggtcctctaagctcttggcctgg

SEQ ID NO: 4803541 - DNA, 25 bp, Homo sapien
tgatagtcaaaggtccctggctgct

SEQ ID NO: 4803542 - DNA, 25 bp, Homo sapien
tgaagacgtcttccagaaggtcgat

SEQ ID NO: 4803543 - DNA, 25 bp, Homo sapien
tgtggacttccgcacttgctgctct

SEQ ID NO: 4803544 - DNA, 25 bp, Homo sapien
cagggaaatggaagaaggaaggaga

SEQ ID NO: 4803545 - DNA, 25 bp, Homo sapien
caagccgagctcagggaaatggaag

SEQ ID NO: 4803546 - DNA, 25 bp, Homo sapien
tcagggaaatggaagaaggaaggag

SEQ ID NO: 4803547 - DNA, 25 bp, Homo sapien
ggaaatggaagaaggaaggagagac

SEQ ID NO: 4803548 - DNA, 25 bp, Homo sapien
gcatagtgtcgcaagggctttacca

SEQ ID NO: 4803549 - DNA, 25 bp, Homo sapien
cattcaaagggagcggagaagaaaa

SEQ ID NO: 4803550 - DNA, 25 bp, Homo sapien
agaaaaagctctcggtgaagccaga

SEQ ID NO: 4803551 - DNA, 25 bp, Homo sapien
catcagaggagtcttcggagaggaa

SEQ ID NO: 4803552 - DNA, 25 bp, Homo sapien
aggcactttgagcctgcttggtgtg

SEQ ID NO: 4803553 - DNA, 25 bp, Homo sapien
gagcagacccggggtgttccacacc

SEQ ID NO: 4803554 - DNA, 25 bp, Homo sapien
ggcactttgagcctgcttggtgtga

SEQ ID NO: 4803555 - DNA, 25 bp, Homo sapien
ggtgtgagcagacccggggtgttcc

SEQ ID NO: 4803556 - DNA, 25 bp, Homo sapien
ctctcctggcctcccctgcggccat

SEQ ID NO: 4803557 - DNA, 25 bp, Homo sapien
ccctctcctggcctcccctgcggcc

SEQ ID NO: 4803558 - DNA, 25 bp, Homo sapien
ggccctctcctggcctcccctgcgg

SEQ ID NO: 4803559 - DNA, 25 bp, Homo sapien
gtggccctctcctggcctcccctgc

SEQ ID NO: 4803560 - DNA, 25 bp, Homo sapien
gccctcacgtccaccttggttgcct

SEQ ID NO: 4803561 - DNA, 25 bp, Homo sapien
cagccccggctcgggccaaatggag

SEQ ID NO: 4803562 - DNA, 25 bp, Homo sapien
ggctcggagtagatgcacacgaggg

SEQ ID NO: 4803563 - DNA, 25 bp, Homo sapien
cctctcctgtgagcggggctcggag

SEQ ID NO: 4803564 - DNA, 25 bp, Homo sapien
tgacacgttggtgcaacgccactga

SEQ ID NO: 4803565 - DNA, 25 bp, Homo sapien
ggaatttccggcttcacccaggagc

SEQ ID NO: 4803566 - DNA, 25 bp, Homo sapien
ccaggagcgaggaacctctgcgctg

SEQ ID NO: 4803567 - DNA, 25 bp, Homo sapien
gcacagatcacagcttgacacgttg

SEQ ID NO: 4803568 - DNA, 25 bp, Homo sapien
ttaaattcagctgcccatgttctcc

SEQ ID NO: 4803569 - DNA, 25 bp, Homo sapien
taaaggatgaaccatcgaaaacgtc

SEQ ID NO: 4803570 - DNA, 25 bp, Homo sapien
gtcagatatttgtcagagataaagg

SEQ ID NO: 4803571 - DNA, 25 bp, Homo sapien
catcgaaaacgtccaggcttaaact

SEQ ID NO: 4803572 - DNA, 25 bp, Homo sapien
aaaggctggccgtccgtcatggatc

SEQ ID NO: 4803573 - DNA, 25 bp, Homo sapien
tccgcgtggagttcccatgcagatg

SEQ ID NO: 4803574 - DNA, 25 bp, Homo sapien
aattcagctactcccctgcggtctg

SEQ ID NO: 4803575 - DNA, 25 bp, Homo sapien
tgtgaaaaggcaggttgcggcaaac

SEQ ID NO: 4803576 - DNA, 25 bp, Homo sapien
tcacatcgcgtggacaaatcagcag

SEQ ID NO: 4803577 - DNA, 25 bp, Homo sapien
taatgaggaagatctgcatctcggg

SEQ ID NO: 4803578 - DNA, 25 bp, Homo sapien
gtcacgctggcccaaaatgaaatgc

SEQ ID NO: 4803579 - DNA, 25 bp, Homo sapien
taaataccatgtcagagacacggcg

SEQ ID NO: 4803580 - DNA, 25 bp, Homo sapien
agaagcccttccacgaccactggct

SEQ ID NO: 4803581 - DNA, 25 bp, Homo sapien
actggctggacactcacataggcag

SEQ ID NO: 4803582 - DNA, 25 bp, Homo sapien
ccgtgccccagcatgcccgagaagc

SEQ ID NO: 4803583 - DNA, 25 bp, Homo sapien
tccacgaccactggctggacactca

SEQ ID NO: 4803584 - DNA, 25 bp, Homo sapien
gatggggctgggaatgccttggggg

SEQ ID NO: 4803585 - DNA, 25 bp, Homo sapien
atggggctgggaatgccttgggggc

SEQ ID NO: 4803586 - DNA, 25 bp, Homo sapien
ggggctgggaatgccttgggggcac

SEQ ID NO: 4803587 - DNA, 25 bp, Homo sapien
gctccctcatggctgaatgcccagg

SEQ ID NO: 4803588 - DNA, 25 bp, Homo sapien
gtgcacatcctggactgagggtacg

SEQ ID NO: 4803589 - DNA, 25 bp, Homo sapien
cattccactggctacagccgtggct

SEQ ID NO: 4803590 - DNA, 25 bp, Homo sapien
gactgagggtacgtcattccactgg

SEQ ID NO: 4803591 - DNA, 25 bp, Homo sapien
tcaaataaccaggatgcagccagtc

SEQ ID NO: 4803592 - DNA, 25 bp, Homo sapien
ggaacaaatgactagctgcctggca

SEQ ID NO: 4803593 - DNA, 25 bp, Homo sapien
gattgtctatcaggctaccgggtaa

SEQ ID NO: 4803594 - DNA, 25 bp, Homo sapien
gattttgcacggatctggccagaga

SEQ ID NO: 4803595 - DNA, 25 bp, Homo sapien
caagagggcctagaaatcaatgggt

SEQ ID NO: 4803596 - DNA, 25 bp, Homo sapien
aaaaatcgtccgtgcttgcgcctag

SEQ ID NO: 4803597 - DNA, 25 bp, Homo sapien
caggatgctcagctactccaggaga

SEQ ID NO: 4803598 - DNA, 25 bp, Homo sapien
gaagaaacgatgctagcccaagagg

SEQ ID NO: 4803599 - DNA, 25 bp, Homo sapien
gggttgcactagaaataccactggt

SEQ ID NO: 4803600 - DNA, 25 bp, Homo sapien
cgtgaacagaaacccttggaatgat

SEQ ID NO: 4803601 - DNA, 25 bp, Homo sapien
gaaaaacacatccaagtgctgttgt

SEQ ID NO: 4803602 - DNA, 25 bp, Homo sapien
cactggtattatgggagaacaactt

SEQ ID NO: 4803603 - DNA, 25 bp, Homo sapien
gaaaatgggattatcagacaccggc

SEQ ID NO: 4803604 - DNA, 25 bp, Homo sapien
taaaagtgatactgacacagttcag

SEQ ID NO: 4803605 - DNA, 25 bp, Homo sapien
tctttggcacacactgcgaagtcag

SEQ ID NO: 4803606 - DNA, 25 bp, Homo sapien
cacagttcaggtgataagcaggaaa

SEQ ID NO: 4803607 - DNA, 25 bp, Homo sapien
ttttctgtaggatgtggagtgtagc

SEQ ID NO: 4803608 - DNA, 25 bp, Homo sapien
gatgaagaggtccagcctctcgtcg

SEQ ID NO: 4803609 - DNA, 25 bp, Homo sapien
tctcgtcgggaacttggccgcaaaa

SEQ ID NO: 4803610 - DNA, 25 bp, Homo sapien
tggccgcaaaatgggtaatgctttt

SEQ ID NO: 4803611 - DNA, 25 bp, Homo sapien
tctttcccattttctgagagccaga

SEQ ID NO: 4803612 - DNA, 25 bp, Homo sapien
tttcccattttctgagagccagaca

SEQ ID NO: 4803613 - DNA, 25 bp, Homo sapien
ttcccattttctgagagccagacag

SEQ ID NO: 4803614 - DNA, 25 bp, Homo sapien
cttctttcccattttctgagagcca

SEQ ID NO: 4803615 - DNA, 25 bp, Homo sapien
cccaaaggacttcaggatccctggg

SEQ ID NO: 4803616 - DNA, 25 bp, Homo sapien
cgtgtagccgctgagttgtctggat

SEQ ID NO: 4803617 - DNA, 25 bp, Homo sapien
tccaacaatcctagaccaagacgaa

SEQ ID NO: 4803618 - DNA, 25 bp, Homo sapien
ttttcaaggcatcacaggaagtcag

SEQ ID NO: 4803619 - DNA, 25 bp, Homo sapien
cactgcgatgttgctctttggtctc

SEQ ID NO: 4803620 - DNA, 25 bp, Homo sapien
tgctcagggctcggcacagacgtcc

SEQ ID NO: 4803621 - DNA, 25 bp, Homo sapien
cggccttccactgcgatgttgctct

SEQ ID NO: 4803622 - DNA, 25 bp, Homo sapien
taacaacatgtggacgaggtgggcg

SEQ ID NO: 4803623 - DNA, 25 bp, Homo sapien
aaggagtgagttggaaaagccatac

SEQ ID NO: 4803624 - DNA, 25 bp, Homo sapien
aagaaggagtgagttggaaaagcca

SEQ ID NO: 4803625 - DNA, 25 bp, Homo sapien
gaaggagtgagttggaaaagccata

SEQ ID NO: 4803626 - DNA, 25 bp, Homo sapien
ccaagaaggagtgagttggaaaagc

SEQ ID NO: 4803627 - DNA, 25 bp, Homo sapien
cattctgtggactgcctggtatgtc

SEQ ID NO: 4803628 - DNA, 25 bp, Homo sapien
gcctcgcattctgtggactgcctgg

SEQ ID NO: 4803629 - DNA, 25 bp, Homo sapien
ctgcctcgcattctgtggactgcct

SEQ ID NO: 4803630 - DNA, 25 bp, Homo sapien
ctcgcattctgtggactgcctggta

SEQ ID NO: 4803631 - DNA, 25 bp, Homo sapien
ttacttggcacttaacatgggaaag

SEQ ID NO: 4803632 - DNA, 25 bp, Homo sapien
cgccccttacttggcacttaacatg

SEQ ID NO: 4803633 - DNA, 25 bp, Homo sapien
caccacgccccttacttggcactta

SEQ ID NO: 4803634 - DNA, 25 bp, Homo sapien
ggcacttaacatgggaaagtggatc

SEQ ID NO: 4803635 - DNA, 25 bp, Homo sapien
caaactctggaggtttagtcaggct

SEQ ID NO: 4803636 - DNA, 25 bp, Homo sapien
gctacctatggctctgatctgcaag

SEQ ID NO: 4803637 - DNA, 25 bp, Homo sapien
tggaaacttacaacatcaggacaca

SEQ ID NO: 4803638 - DNA, 25 bp, Homo sapien
gacacactgagaaggctcaatgcat

SEQ ID NO: 4803639 - DNA, 25 bp, Homo sapien
tcagctgacagctacccgggagttg

SEQ ID NO: 4803640 - DNA, 25 bp, Homo sapien
gaacacgatgggatagaatgacacc

SEQ ID NO: 4803641 - DNA, 25 bp, Homo sapien
gaaatcatctcagtggaaggccggc

SEQ ID NO: 4803642 - DNA, 25 bp, Homo sapien
cagacagttttggagagaaccccag

SEQ ID NO: 4803643 - DNA, 25 bp, Homo sapien
gcattgaagaccctccaccctgggg

SEQ ID NO: 4803644 - DNA, 25 bp, Homo sapien
ttatgatgctggagcatatgatggg

SEQ ID NO: 4803645 - DNA, 25 bp, Homo sapien
aggtgaactcccagggggtgcgcat

SEQ ID NO: 4803646 - DNA, 25 bp, Homo sapien
ccagggggtgcgcattgaagaccct

SEQ ID NO: 4803647 - DNA, 25 bp, Homo sapien
agggaacgagggctgctacccattt

SEQ ID NO: 4803648 - DNA, 25 bp, Homo sapien
gacttgcccagggttgcccagagca

SEQ ID NO: 4803649 - DNA, 25 bp, Homo sapien
acttgcccagggttgcccagagcaa

SEQ ID NO: 4803650 - DNA, 25 bp, Homo sapien
tcctctgcagggaacgagggctgct

SEQ ID NO: 4803651 - DNA, 25 bp, Homo sapien
ctgagaagagggccagtgagctcat

SEQ ID NO: 4803652 - DNA, 25 bp, Homo sapien
taatgaggagagtgttcacctggtt

SEQ ID NO: 4803653 - DNA, 25 bp, Homo sapien
tgatatgcctccaaaaaggagtgca

SEQ ID NO: 4803654 - DNA, 25 bp, Homo sapien
tgacctatgcatgaaacagacccgg

SEQ ID NO: 4803655 - DNA, 25 bp, Homo sapien
tagttttacaaagggcctctgcgcc

SEQ ID NO: 4803656 - DNA, 25 bp, Homo sapien
gggctcgccagtcctgtcaacgact

SEQ ID NO: 4803657 - DNA, 25 bp, Homo sapien
gtcaacgactctctccggctgggtc

SEQ ID NO: 4803658 - DNA, 25 bp, Homo sapien
agatgatctccggagagagcgcgct

SEQ ID NO: 4803659 - DNA, 25 bp, Homo sapien
agtgagtgctgagctgaaagacatc

SEQ ID NO: 4803660 - DNA, 25 bp, Homo sapien
aagttggtttagcataatactgtac

SEQ ID NO: 4803661 - DNA, 25 bp, Homo sapien
cgtaaagttggtttagcataatact

SEQ ID NO: 4803662 - DNA, 25 bp, Homo sapien
catcatccttggtggaaatggcctg

SEQ ID NO: 4803663 - DNA, 25 bp, Homo sapien
atactgtacatcatccttggtggaa

SEQ ID NO: 4803664 - DNA, 25 bp, Homo sapien
cggttttaggatccccacaggtctg

SEQ ID NO: 4803665 - DNA, 25 bp, Homo sapien
cctgcatgctctctcggttttagga

SEQ ID NO: 4803666 - DNA, 25 bp, Homo sapien
cccacaggtctggtatgaaccgttc

SEQ ID NO: 4803667 - DNA, 25 bp, Homo sapien
caggtctggtatgaaccgttctctg

SEQ ID NO: 4803668 - DNA, 25 bp, Homo sapien
cttccatggtacatcaggagccctg

SEQ ID NO: 4803669 - DNA, 25 bp, Homo sapien
tggcctcaccgtggagctctctggc

SEQ ID NO: 4803670 - DNA, 25 bp, Homo sapien
tctcagttcttccatggtacatcag

SEQ ID NO: 4803671 - DNA, 25 bp, Homo sapien
ctggattttcactcagctgctgaca

SEQ ID NO: 4803672 - DNA, 25 bp, Homo sapien
gtgtagggacacaggtcagttgcca

SEQ ID NO: 4803673 - DNA, 25 bp, Homo sapien
cacatgtttgactcaggcttgggca

SEQ ID NO: 4803674 - DNA, 25 bp, Homo sapien
atgtgtgcatgcatagggccgcccc

SEQ ID NO: 4803675 - DNA, 25 bp, Homo sapien
tgcgcgctctgagagcctcggtgaa

SEQ ID NO: 4803676 - DNA, 25 bp, Homo sapien
tgtatgttcagaccagaggcctggg

SEQ ID NO: 4803677 - DNA, 25 bp, Homo sapien
gattggcactaaatgacctggctga

SEQ ID NO: 4803678 - DNA, 25 bp, Homo sapien
tacagggagtaccagttaggagcct

SEQ ID NO: 4803679 - DNA, 25 bp, Homo sapien
ttctccatacgcagagacaagccgg

SEQ ID NO: 4803680 - DNA, 25 bp, Homo sapien
ttacacatggtaggtctcaacagac

SEQ ID NO: 4803681 - DNA, 25 bp, Homo sapien
gctgagtggcctaacatatgtctgc

SEQ ID NO: 4803682 - DNA, 25 bp, Homo sapien
aagaaactacgtgatcaggaggcag

SEQ ID NO: 4803683 - DNA, 25 bp, Homo sapien
tcattatgccccacaatggtaggga

SEQ ID NO: 4803684 - DNA, 25 bp, Homo sapien
ggcaggttctctcacgtctctgagc

SEQ ID NO: 4803685 - DNA, 25 bp, Homo sapien
agctctgggtcaataaaatggggct

SEQ ID NO: 4803686 - DNA, 25 bp, Homo sapien
caggttctctcacgtctctgagctc

SEQ ID NO: 4803687 - DNA, 25 bp, Homo sapien
ctgggcaggttctctcacgtctctg

SEQ ID NO: 4803688 - DNA, 25 bp, Homo sapien
caacctaccataagggcaaagctgg

SEQ ID NO: 4803689 - DNA, 25 bp, Homo sapien
agtccttaaaactcatgcctgccgg

SEQ ID NO: 4803690 - DNA, 25 bp, Homo sapien
ccattagggctacgtgagtgcatta

SEQ ID NO: 4803691 - DNA, 25 bp, Homo sapien
ggtcaacagcccatcaaaccaggga

SEQ ID NO: 4803692 - DNA, 25 bp, Homo sapien
ttgtcactttgacagcacgtctcaa

SEQ ID NO: 4803693 - DNA, 25 bp, Homo sapien
cagcagactgtagacctttccagag

SEQ ID NO: 4803694 - DNA, 25 bp, Homo sapien
aattaaggcatctcgcggctgtggg

SEQ ID NO: 4803695 - DNA, 25 bp, Homo sapien
ccggcataagtgagctagctggcag

SEQ ID NO: 4803696 - DNA, 25 bp, Homo sapien
tgccttcctgtacacttgcataatg

SEQ ID NO: 4803697 - DNA, 25 bp, Homo sapien
atcctgccttcctgtacacttgcat

SEQ ID NO: 4803698 - DNA, 25 bp, Homo sapien
cttaatccgcatgcatgcattaaaa

SEQ ID NO: 4803699 - DNA, 25 bp, Homo sapien
taatccgcatgcatgcattaaaaaa

SEQ ID NO: 4803700 - DNA, 25 bp, Homo sapien
cagccacgtgagggaagtgacaaac

SEQ ID NO: 4803701 - DNA, 25 bp, Homo sapien
gacagctcttatttcaacagagttt

SEQ ID NO: 4803702 - DNA, 25 bp, Homo sapien
agacagctcttatttcaacagagtt

SEQ ID NO: 4803703 - DNA, 25 bp, Homo sapien
ccacgtgagggaagtgacaaacagg

SEQ ID NO: 4803704 - DNA, 25 bp, Homo sapien
tcatttatgacctcagccgtgctgt

SEQ ID NO: 4803705 - DNA, 25 bp, Homo sapien
ggcccgggatgctaaagtgttctaa

SEQ ID NO: 4803706 - DNA, 25 bp, Homo sapien
tttactctcagaagcacgactcctg

SEQ ID NO: 4803707 - DNA, 25 bp, Homo sapien
taacagaggcaccttaagcagagtg

SEQ ID NO: 4803708 - DNA, 25 bp, Homo sapien
ccaaagtggactgtgattggccgcc

SEQ ID NO: 4803709 - DNA, 25 bp, Homo sapien
ctgtccaaagtggactgtgattggc

SEQ ID NO: 4803710 - DNA, 25 bp, Homo sapien
gggcgcagccattctcggcaatgtc

SEQ ID NO: 4803711 - DNA, 25 bp, Homo sapien
tggccgccggtcttctcggagcttg

SEQ ID NO: 4803712 - DNA, 25 bp, Homo sapien
caagtcccgtagatgcgaacaatgc

SEQ ID NO: 4803713 - DNA, 25 bp, Homo sapien
tgccaatggtcacacagatatcctg

SEQ ID NO: 4803714 - DNA, 25 bp, Homo sapien
tctgtggaaatctgtacgaccgaag

SEQ ID NO: 4803715 - DNA, 25 bp, Homo sapien
taaattagctcaagaaagggcgctg

SEQ ID NO: 4803716 - DNA, 25 bp, Homo sapien
tattcccatttttgcatgatctttt

SEQ ID NO: 4803717 - DNA, 25 bp, Homo sapien
tgcttcaagcggtttttcacctctt

SEQ ID NO: 4803718 - DNA, 25 bp, Homo sapien
tttgcttcaagcggtttttcacctc

SEQ ID NO: 4803719 - DNA, 25 bp, Homo sapien
tttattcccatttttgcatgatctt

SEQ ID NO: 4803720 - DNA, 25 bp, Homo sapien
cagtggctcacggtcaaattagcaa

SEQ ID NO: 4803721 - DNA, 25 bp, Homo sapien
tacagcttaagcacagagaggacta

SEQ ID NO: 4803722 - DNA, 25 bp, Homo sapien
gccggaacagacacattgctgggtt

SEQ ID NO: 4803723 - DNA, 25 bp, Homo sapien
taccagtaagagtacggcagccgta

SEQ ID NO: 4803724 - DNA, 25 bp, Homo sapien
tcatggccggatttgctttggtctt

SEQ ID NO: 4803725 - DNA, 25 bp, Homo sapien
tcttcatggccggatttgctttggt

SEQ ID NO: 4803726 - DNA, 25 bp, Homo sapien
acttgtagacagtcttcatggccgg

SEQ ID NO: 4803727 - DNA, 25 bp, Homo sapien
gacagtcttcatggccggatttgct

SEQ ID NO: 4803728 - DNA, 25 bp, Homo sapien
gagccactgatggtacagtttgtca

SEQ ID NO: 4803729 - DNA, 25 bp, Homo sapien
gccactgatggtacagtttgtcact

SEQ ID NO: 4803730 - DNA, 25 bp, Homo sapien
cactgatggtacagtttgtcactgc

SEQ ID NO: 4803731 - DNA, 25 bp, Homo sapien
ggagagccactgatggtacagtttg

SEQ ID NO: 4803732 - DNA, 25 bp, Homo sapien
actgtcctggatgactgcacaaacc

SEQ ID NO: 4803733 - DNA, 25 bp, Homo sapien
caaacctttcctcatgtactctgat

SEQ ID NO: 4803734 - DNA, 25 bp, Homo sapien
tcctggatgactgcacaaacctttc

SEQ ID NO: 4803735 - DNA, 25 bp, Homo sapien
tgcacaaacctttcctcatgtactc

SEQ ID NO: 4803736 - DNA, 25 bp, Homo sapien
agcgtactcgcccatgttgatttcc

SEQ ID NO: 4803737 - DNA, 25 bp, Homo sapien
aaaccttcgccggaattgagaagat

SEQ ID NO: 4803738 - DNA, 25 bp, Homo sapien
gcccatgttgatttcctcttcaaaa

SEQ ID NO: 4803739 - DNA, 25 bp, Homo sapien
gagaagatctaatcgaccatcaata

SEQ ID NO: 4803740 - DNA, 25 bp, Homo sapien
ctccggagcggtagtgggacacgaa

SEQ ID NO: 4803741 - DNA, 25 bp, Homo sapien
gcagctgtgtggcgttctgcaggaa

SEQ ID NO: 4803742 - DNA, 25 bp, Homo sapien
gcaggaactgcctcatggctccgga

SEQ ID NO: 4803743 - DNA, 25 bp, Homo sapien
tggctccggagcggtagtgggacac

SEQ ID NO: 4803744 - DNA, 25 bp, Homo sapien
ccagggcggcaggtcagaaaacatg

SEQ ID NO: 4803745 - DNA, 25 bp, Homo sapien
tccagggcggcaggtcagaaaacat

SEQ ID NO: 4803746 - DNA, 25 bp, Homo sapien
tgcgtcctgcaagtaaaaatggcgg

SEQ ID NO: 4803747 - DNA, 25 bp, Homo sapien
tcctgcaagtaaaaatggcggcccc

SEQ ID NO: 4803748 - DNA, 25 bp, Homo sapien
ccacctgcgtcctgcaagtaaaaat

SEQ ID NO: 4803749 - DNA, 25 bp, Homo sapien
agctcgtccacctgcgtcctgcaag

SEQ ID NO: 4803750 - DNA, 25 bp, Homo sapien
gagaagagtaaggcaaggtgtctca

SEQ ID NO: 4803751 - DNA, 25 bp, Homo sapien
agaagagtaaggcaaggtgtctcat

SEQ ID NO: 4803752 - DNA, 25 bp, Homo sapien
ggagaagagtaaggcaaggtgtctc

SEQ ID NO: 4803753 - DNA, 25 bp, Homo sapien
agcagagcattaagccaagcctggg

SEQ ID NO: 4803754 - DNA, 25 bp, Homo sapien
gcctggttcctgagcatgacactca

SEQ ID NO: 4803755 - DNA, 25 bp, Homo sapien
gttaggaatttcaggacggtgacag

SEQ ID NO: 4803756 - DNA, 25 bp, Homo sapien
gcctttcttgcttatgacaccctgt

SEQ ID NO: 4803757 - DNA, 25 bp, Homo sapien
cggtttcaacacaatgacacttgca

SEQ ID NO: 4803758 - DNA, 25 bp, Homo sapien
tcccaagaaaggaagcgccaagctg

SEQ ID NO: 4803759 - DNA, 25 bp, Homo sapien
gacacttgcatccaaagtcccaaga

SEQ ID NO: 4803760 - DNA, 25 bp, Homo sapien
gcgccaagctgattagagatttctg

SEQ ID NO: 4803761 - DNA, 25 bp, Homo sapien
tacaccgctcctggagttgtcgtgg

SEQ ID NO: 4803762 - DNA, 25 bp, Homo sapien
gctccaagcgcagccgtttacaccg

SEQ ID NO: 4803763 - DNA, 25 bp, Homo sapien
ggagttgtcgtggagacaaccacat

SEQ ID NO: 4803764 - DNA, 25 bp, Homo sapien
cagccgtttacaccgctcctggagt

SEQ ID NO: 4803765 - DNA, 25 bp, Homo sapien
taagcgtccagggcatagggccgaa

SEQ ID NO: 4803766 - DNA, 25 bp, Homo sapien
agcgtccagggcatagggccgaagt

SEQ ID NO: 4803767 - DNA, 25 bp, Homo sapien
cgtccagggcatagggccgaagtct

SEQ ID NO: 4803768 - DNA, 25 bp, Homo sapien
aataagcgtccagggcatagggccg

SEQ ID NO: 4803769 - DNA, 25 bp, Homo sapien
tggcagtgctcggcctttattcttt

SEQ ID NO: 4803770 - DNA, 25 bp, Homo sapien
ggcagtgctcggcctttattctttt

SEQ ID NO: 4803771 - DNA, 25 bp, Homo sapien
gtggcagtgctcggcctttattctt

SEQ ID NO: 4803772 - DNA, 25 bp, Homo sapien
caggggctggcatgccgatggtggt

SEQ ID NO: 4803773 - DNA, 25 bp, Homo sapien
tgccgatggtggtccagagatgctg

SEQ ID NO: 4803774 - DNA, 25 bp, Homo sapien
gctgctccagtcctcccttggctgc

SEQ ID NO: 4803775 - DNA, 25 bp, Homo sapien
ctgctgctccagtcctcccttggct

SEQ ID NO: 4803776 - DNA, 25 bp, Homo sapien
gtcctcccttggctgccagatgacc

SEQ ID NO: 4803777 - DNA, 25 bp, Homo sapien
cctcccttggctgccagatgacccc

SEQ ID NO: 4803778 - DNA, 25 bp, Homo sapien
gcaggtctacgaatgcacaaggcat

SEQ ID NO: 4803779 - DNA, 25 bp, Homo sapien
tcagaatcctagcagccatggtggg

SEQ ID NO: 4803780 - DNA, 25 bp, Homo sapien
catgcaagggagcttctgggcaaca

SEQ ID NO: 4803781 - DNA, 25 bp, Homo sapien
tcagtgttcagagagtaagccgccc

SEQ ID NO: 4803782 - DNA, 25 bp, Homo sapien
ctgcactgttcacagacagcgtcac

SEQ ID NO: 4803783 - DNA, 25 bp, Homo sapien
ctcagcttgatacacaccgagactt

SEQ ID NO: 4803784 - DNA, 25 bp, Homo sapien
tgttcacagacagcgtcaccttggc

SEQ ID NO: 4803785 - DNA, 25 bp, Homo sapien
tctgcctcagcttgatacacaccga

SEQ ID NO: 4803786 - DNA, 25 bp, Homo sapien
gaagctgctattgggacaccgttat

SEQ ID NO: 4803787 - DNA, 25 bp, Homo sapien
tataaatacccaaagcgagactccc

SEQ ID NO: 4803788 - DNA, 25 bp, Homo sapien
tatcctgtgaatcggacccacttgg

SEQ ID NO: 4803789 - DNA, 25 bp, Homo sapien
caccgttattgatgcgctggtacac

SEQ ID NO: 4803790 - DNA, 25 bp, Homo sapien
aaactgcaggatcatatggcgactg

SEQ ID NO: 4803791 - DNA, 25 bp, Homo sapien
cctagccttgaagatcagactccaa

SEQ ID NO: 4803792 - DNA, 25 bp, Homo sapien
ctttctctcgtgctagattgtttcc

SEQ ID NO: 4803793 - DNA, 25 bp, Homo sapien
caaaggttctgtgacggttaatact

SEQ ID NO: 4803794 - DNA, 25 bp, Homo sapien
aggtcttgatctattttgagcccac

SEQ ID NO: 4803795 - DNA, 25 bp, Homo sapien
tgctaaaaccagtgtcgtgaagctt

SEQ ID NO: 4803796 - DNA, 25 bp, Homo sapien
tgagcccactaactttctaacatgg

SEQ ID NO: 4803797 - DNA, 25 bp, Homo sapien
tcgtgaagcttttgcccaatgtttt

SEQ ID NO: 4803798 - DNA, 25 bp, Homo sapien
tattcaaagaatacccatttctacc

SEQ ID NO: 4803799 - DNA, 25 bp, Homo sapien
tttattcaaagaatacccatttcta

SEQ ID NO: 4803800 - DNA, 25 bp, Homo sapien
aaaacattggccatactcctttgaa

SEQ ID NO: 4803801 - DNA, 25 bp, Homo sapien
aacattggccatactcctttgaaag

SEQ ID NO: 4803802 - DNA, 25 bp, Homo sapien
cacgggtaactgtgctaagaggaac

SEQ ID NO: 4803803 - DNA, 25 bp, Homo sapien
gattacaagttctccctcccaagta

SEQ ID NO: 4803804 - DNA, 25 bp, Homo sapien
tgcaaggttctaggctgagagccct

SEQ ID NO: 4803805 - DNA, 25 bp, Homo sapien
tgagagcccttccagatatgtgaga

SEQ ID NO: 4803806 - DNA, 25 bp, Homo sapien
tagatgcaggtctcgggcaagaaca

SEQ ID NO: 4803807 - DNA, 25 bp, Homo sapien
ggactagagttccttcgcggcactt

SEQ ID NO: 4803808 - DNA, 25 bp, Homo sapien
cgactgaatgggctggcactcggct

SEQ ID NO: 4803809 - DNA, 25 bp, Homo sapien
cctgggacttggacttggagattca

SEQ ID NO: 4803810 - DNA, 25 bp, Homo sapien
ctccggagtccggtgaggtggccat

SEQ ID NO: 4803811 - DNA, 25 bp, Homo sapien
cttctccggagtccggtgaggtggc

SEQ ID NO: 4803812 - DNA, 25 bp, Homo sapien
tcttctccggagtccggtgaggtgg

SEQ ID NO: 4803813 - DNA, 25 bp, Homo sapien
tctccggagtccggtgaggtggcca

SEQ ID NO: 4803814 - DNA, 25 bp, Homo sapien
tcaagcactgcgaactggagggaga

SEQ ID NO: 4803815 - DNA, 25 bp, Homo sapien
tggactgcagaaagacagacctctt

SEQ ID NO: 4803816 - DNA, 25 bp, Homo sapien
agggagagagtcttccaaccagtca

SEQ ID NO: 4803817 - DNA, 25 bp, Homo sapien
ccatttgctgcacatccatggactg

SEQ ID NO: 4803818 - DNA, 25 bp, Homo sapien
tcagggtgttttgcatggctccagg

SEQ ID NO: 4803819 - DNA, 25 bp, Homo sapien
ccacagagctatagtgatggtccct

SEQ ID NO: 4803820 - DNA, 25 bp, Homo sapien
cttgttgaacaagtatggacaccac

SEQ ID NO: 4803821 - DNA, 25 bp, Homo sapien
taacatctactatcagcaaggcact

SEQ ID NO: 4803822 - DNA, 25 bp, Homo sapien
ttctccaggtgaccgaaaaatgggc

SEQ ID NO: 4803823 - DNA, 25 bp, Homo sapien
aaatgggccacatgcccttgtgatt

SEQ ID NO: 4803824 - DNA, 25 bp, Homo sapien
agaaggacaagttggtttgactgat

SEQ ID NO: 4803825 - DNA, 25 bp, Homo sapien
aaatatcttgggctttgcatctgat

SEQ ID NO: 4803826 - DNA, 25 bp, Homo sapien
tcctgggagaacaggcctgtcggca

SEQ ID NO: 4803827 - DNA, 25 bp, Homo sapien
cagaaagccaagagtaggccgagga

SEQ ID NO: 4803828 - DNA, 25 bp, Homo sapien
cgttcaagacgaaggcagccctgtg

SEQ ID NO: 4803829 - DNA, 25 bp, Homo sapien
ggtgtgacagcgtcactcacccgtt

SEQ ID NO: 4803830 - DNA, 25 bp, Homo sapien
ttcacatccttgcaatcacgagtca

SEQ ID NO: 4803831 - DNA, 25 bp, Homo sapien
catccttgcaatcacgagtcacttc

SEQ ID NO: 4803832 - DNA, 25 bp, Homo sapien
cacatccttgcaatcacgagtcact

SEQ ID NO: 4803833 - DNA, 25 bp, Homo sapien
cttcacatccttgcaatcacgagtc

SEQ ID NO: 4803834 - DNA, 25 bp, Homo sapien
ggccttgaggaacgctctggccaca

SEQ ID NO: 4803835 - DNA, 25 bp, Homo sapien
tagctaccgaagaaagcagcctggg

SEQ ID NO: 4803836 - DNA, 25 bp, Homo sapien
tttcagagcgtttcggtagctaccg

SEQ ID NO: 4803837 - DNA, 25 bp, Homo sapien
ccatccccagtggttgtggagacct

SEQ ID NO: 4803838 - DNA, 25 bp, Homo sapien
taaagtcccatagggaatgtgtgcg

SEQ ID NO: 4803839 - DNA, 25 bp, Homo sapien
tctaaagtcccatagggaatgtgtg

SEQ ID NO: 4803840 - DNA, 25 bp, Homo sapien
ctggataaagtaggcatcaaggctt

SEQ ID NO: 4803841 - DNA, 25 bp, Homo sapien
ataaagtaggcatcaaggctttttt

SEQ ID NO: 4803842 - DNA, 25 bp, Homo sapien
gaatgtctcacaatgactctggcaa

SEQ ID NO: 4803843 - DNA, 25 bp, Homo sapien
cacttgggttgtatttgcactgagc

SEQ ID NO: 4803844 - DNA, 25 bp, Homo sapien
tctgaggcccaaaagatgagcatat

SEQ ID NO: 4803845 - DNA, 25 bp, Homo sapien
gactaacgactttcttcatgagcaa

SEQ ID NO: 4803846 - DNA, 25 bp, Homo sapien
tctgctctctagtgggaacggccaa

SEQ ID NO: 4803847 - DNA, 25 bp, Homo sapien
tctctagtgggaacggccaaatatt

SEQ ID NO: 4803848 - DNA, 25 bp, Homo sapien
catctgctctctagtgggaacggcc

SEQ ID NO: 4803849 - DNA, 25 bp, Homo sapien
tgggaacggccaaatattaagcagt

SEQ ID NO: 4803850 - DNA, 25 bp, Homo sapien
ctcactggatcacgatgctctcttc

SEQ ID NO: 4803851 - DNA, 25 bp, Homo sapien
ggctcactggatcacgatgctctct

SEQ ID NO: 4803852 - DNA, 25 bp, Homo sapien
gcaaggctcactggatcacgatgct

SEQ ID NO: 4803853 - DNA, 25 bp, Homo sapien
aaggctcactggatcacgatgctct

SEQ ID NO: 4803854 - DNA, 25 bp, Homo sapien
acatgaaatcctacagtgctgtgtg

SEQ ID NO: 4803855 - DNA, 25 bp, Homo sapien
cacagtccagtgagttttgaccaat

SEQ ID NO: 4803856 - DNA, 25 bp, Homo sapien
gaaagctacttaatattggaactcc

SEQ ID NO: 4803857 - DNA, 25 bp, Homo sapien
ccacagaaggttggttggtgcccct

SEQ ID NO: 4803858 - DNA, 25 bp, Homo sapien
tgtaccctcatgactaacgatgcgg

SEQ ID NO: 4803859 - DNA, 25 bp, Homo sapien
ttttagccgtaccagtgggtatgca

SEQ ID NO: 4803860 - DNA, 25 bp, Homo sapien
gatcgcctggtcatacagtaaacat

SEQ ID NO: 4803861 - DNA, 25 bp, Homo sapien
tatgcagtagaaccttgttgtgaca

SEQ ID NO: 4803862 - DNA, 25 bp, Homo sapien
aaagatagtacaaagaggacccata

SEQ ID NO: 4803863 - DNA, 25 bp, Homo sapien
tgaaaaagttggtgataagattgtg

SEQ ID NO: 4803864 - DNA, 25 bp, Homo sapien
tggttgggccggcaaagcctcttcc

SEQ ID NO: 4803865 - DNA, 25 bp, Homo sapien
tagagagagaaactaaaagctatgg

SEQ ID NO: 4803866 - DNA, 25 bp, Homo sapien
gacacatatgagcaccacatggcca

SEQ ID NO: 4803867 - DNA, 25 bp, Homo sapien
catggccaggaacaacaacccgttt

SEQ ID NO: 4803868 - DNA, 25 bp, Homo sapien
tgcaggcagagctacggaggccaaa

SEQ ID NO: 4803869 - DNA, 25 bp, Homo sapien
ggcagtgatggtgcaccaatgccca

SEQ ID NO: 4803870 - DNA, 25 bp, Homo sapien
tcaggatcacgacatcatccagggc

SEQ ID NO: 4803871 - DNA, 25 bp, Homo sapien
tctggaggtcatcgaagggggtttc

SEQ ID NO: 4803872 - DNA, 25 bp, Homo sapien
ttggtgtccacattcaggatcacga

SEQ ID NO: 4803873 - DNA, 25 bp, Homo sapien
ggtttccagggtgttggtgtccaca

SEQ ID NO: 4803874 - DNA, 25 bp, Homo sapien
tgtggtcactgcatataaaggatca

SEQ ID NO: 4803875 - DNA, 25 bp, Homo sapien
tgaaatctgccaactcacgtgcctg

SEQ ID NO: 4803876 - DNA, 25 bp, Homo sapien
tttcctaattcaccccagagcatgg

SEQ ID NO: 4803877 - DNA, 25 bp, Homo sapien
aattccattactggtcaacctctga

SEQ ID NO: 4803878 - DNA, 25 bp, Homo sapien
atgatggccattggagagaagcctc

SEQ ID NO: 4803879 - DNA, 25 bp, Homo sapien
ccaaacagaagggagcaggagatga

SEQ ID NO: 4803880 - DNA, 25 bp, Homo sapien
aagcctccagggctgaatggcccca

SEQ ID NO: 4803881 - DNA, 25 bp, Homo sapien
caaatagtcccaaacagaagggagc

SEQ ID NO: 4803882 - DNA, 25 bp, Homo sapien
gctggaggacttgccggttaagctc

SEQ ID NO: 4803883 - DNA, 25 bp, Homo sapien
tgccggttaagctctgtggagtgtt

SEQ ID NO: 4803884 - DNA, 25 bp, Homo sapien
cttgtaggctctccacggctgggct

SEQ ID NO: 4803885 - DNA, 25 bp, Homo sapien
gaatgggatgttgattctggaccag

SEQ ID NO: 4803886 - DNA, 25 bp, Homo sapien
gagctgggacggcacagtttcctct

SEQ ID NO: 4803887 - DNA, 25 bp, Homo sapien
gctgaagaataggaaaaaacctggc

SEQ ID NO: 4803888 - DNA, 25 bp, Homo sapien
tccaaaagggctggcgtggactcaa

SEQ ID NO: 4803889 - DNA, 25 bp, Homo sapien
tttctaacttagcaggccagggtcc

SEQ ID NO: 4803890 - DNA, 25 bp, Homo sapien
cagctcgctggacagtgcccggtcc

SEQ ID NO: 4803891 - DNA, 25 bp, Homo sapien
ggatcaaggcaactaggggaatgaa

SEQ ID NO: 4803892 - DNA, 25 bp, Homo sapien
ccagctcgctggacagtgcccggtc

SEQ ID NO: 4803893 - DNA, 25 bp, Homo sapien
aaggatcaaggcaactaggggaatg

SEQ ID NO: 4803894 - DNA, 25 bp, Homo sapien
cccaccagactctataggctttttc

SEQ ID NO: 4803895 - DNA, 25 bp, Homo sapien
gacagctctccggtagcttgtccca

SEQ ID NO: 4803896 - DNA, 25 bp, Homo sapien
ccagactctataggctttttctcag

SEQ ID NO: 4803897 - DNA, 25 bp, Homo sapien
tagtactgcggcacaccgagacagc

SEQ ID NO: 4803898 - DNA, 25 bp, Homo sapien
aatgactgttgctgggttccaagca

SEQ ID NO: 4803899 - DNA, 25 bp, Homo sapien
ggtgccttgatacagtgtggctctg

SEQ ID NO: 4803900 - DNA, 25 bp, Homo sapien
catcttagtagcttgttaatcaaaa

SEQ ID NO: 4803901 - DNA, 25 bp, Homo sapien
agatctcacgccctcttgtaattcc

SEQ ID NO: 4803902 - DNA, 25 bp, Homo sapien
ctttcaaccctttgatcttcactcg

SEQ ID NO: 4803903 - DNA, 25 bp, Homo sapien
tcaaccctttgatcttcactcggca

SEQ ID NO: 4803904 - DNA, 25 bp, Homo sapien
tttgatcttcactcggcaggtggcc

SEQ ID NO: 4803905 - DNA, 25 bp, Homo sapien
ttgatcttcactcggcaggtggcct

SEQ ID NO: 4803906 - DNA, 25 bp, Homo sapien
cattcggtcagtacaaaatatttgc

SEQ ID NO: 4803907 - DNA, 25 bp, Homo sapien
aagcttcataatttaacccattcgg

SEQ ID NO: 4803908 - DNA, 25 bp, Homo sapien
taatttaacccattcggtcagtaca

SEQ ID NO: 4803909 - DNA, 25 bp, Homo sapien
tgcatatgtacttatcaagcttcat

SEQ ID NO: 4803910 - DNA, 25 bp, Homo sapien
taacagaatgtaggagccacatggc

SEQ ID NO: 4803911 - DNA, 25 bp, Homo sapien
cattttcgtaagcacaatagcacag

SEQ ID NO: 4803912 - DNA, 25 bp, Homo sapien
catggccggcctgtcaaattagaaa

SEQ ID NO: 4803913 - DNA, 25 bp, Homo sapien
gcaacagttagtgaagcaggtggtc

SEQ ID NO: 4803914 - DNA, 25 bp, Homo sapien
ggaggtgctgcttcagcatgctccc

SEQ ID NO: 4803915 - DNA, 25 bp, Homo sapien
tccaccgccacacaatgaaacaaag

SEQ ID NO: 4803916 - DNA, 25 bp, Homo sapien
gccacacaatgaaacaaagccccag

SEQ ID NO: 4803917 - DNA, 25 bp, Homo sapien
tgctcccacgtgcagagctgtgact

SEQ ID NO: 4803918 - DNA, 25 bp, Homo sapien
aaatggattcctatgaggtagggca

SEQ ID NO: 4803919 - DNA, 25 bp, Homo sapien
taaatggattcctatgaggtagggc

SEQ ID NO: 4803920 - DNA, 25 bp, Homo sapien
tccattaaacttaaatggattccta

SEQ ID NO: 4803921 - DNA, 25 bp, Homo sapien
gcagcacatggtagggttttctctg

SEQ ID NO: 4803922 - DNA, 25 bp, Homo sapien
agcagcacatggtagggttttctct

SEQ ID NO: 4803923 - DNA, 25 bp, Homo sapien
gcagcagcacatggtagggttttct

SEQ ID NO: 4803924 - DNA, 25 bp, Homo sapien
cagcagcacatggtagggttttctc

SEQ ID NO: 4803925 - DNA, 25 bp, Homo sapien
tttcccccagataaccagggctctg

SEQ ID NO: 4803926 - DNA, 25 bp, Homo sapien
agataaccagggctctgttaatcat

SEQ ID NO: 4803927 - DNA, 25 bp, Homo sapien
ctttcccccagataaccagggctct

SEQ ID NO: 4803928 - DNA, 25 bp, Homo sapien
ccccagataaccagggctctgttaa

SEQ ID NO: 4803929 - DNA, 25 bp, Homo sapien
agattgcccagtggtggctaacacc

SEQ ID NO: 4803930 - DNA, 25 bp, Homo sapien
tcaaaaacgtgcctatgggatcacc

SEQ ID NO: 4803931 - DNA, 25 bp, Homo sapien
catgtgctgatttgaagggtgactc

SEQ ID NO: 4803932 - DNA, 25 bp, Homo sapien
cccatggtgccatgtgcagagcagg

SEQ ID NO: 4803933 - DNA, 25 bp, Homo sapien
ctggaaatgtcttactcctttcgtt

SEQ ID NO: 4803934 - DNA, 25 bp, Homo sapien
ggcctggaaatgtcttactcctttc

SEQ ID NO: 4803935 - DNA, 25 bp, Homo sapien
gcctggaaatgtcttactcctttcg

SEQ ID NO: 4803936 - DNA, 25 bp, Homo sapien
cctggaaatgtcttactcctttcgt

SEQ ID NO: 4803937 - DNA, 25 bp, Homo sapien
tattgtccactccaaaaataggaag

SEQ ID NO: 4803938 - DNA, 25 bp, Homo sapien
tgtgagttaaaccttctggaaacca

SEQ ID NO: 4803939 - DNA, 25 bp, Homo sapien
ccctgagctctcaaggcaacagaag

SEQ ID NO: 4803940 - DNA, 25 bp, Homo sapien
tcatttactaatggcccctaggtgc

SEQ ID NO: 4803941 - DNA, 25 bp, Homo sapien
gaaaactcctagcagcatgtacctg

SEQ ID NO: 4803942 - DNA, 25 bp, Homo sapien
caatgactgtgacctgtgataccaa

SEQ ID NO: 4803943 - DNA, 25 bp, Homo sapien
tatgcatagaaagggcacctgctgg

SEQ ID NO: 4803944 - DNA, 25 bp, Homo sapien
gacttcatcttcaggcgccatgtaa

SEQ ID NO: 4803945 - DNA, 25 bp, Homo sapien
catgctcccttacggacttctgttg

SEQ ID NO: 4803946 - DNA, 25 bp, Homo sapien
tctgtgtaccatgctcccttacgga

SEQ ID NO: 4803947 - DNA, 25 bp, Homo sapien
cggcacgcagttagtgcctttccct

SEQ ID NO: 4803948 - DNA, 25 bp, Homo sapien
tcctgaagctctcaatatccggcac

SEQ ID NO: 4803949 - DNA, 25 bp, Homo sapien
caactgcattaacaagtgacacacc

SEQ ID NO: 4803950 - DNA, 25 bp, Homo sapien
tttttaatgtagagtcaccaactgc

SEQ ID NO: 4803951 - DNA, 25 bp, Homo sapien
aagtgacacacctaacacgcccagt

SEQ ID NO: 4803952 - DNA, 25 bp, Homo sapien
gagtcaccaactgcattaacaagtg

SEQ ID NO: 4803953 - DNA, 25 bp, Homo sapien
gggatgtacacgtgctgccagtaca

SEQ ID NO: 4803954 - DNA, 25 bp, Homo sapien
cgccgcagacccgtggatgcaggca

SEQ ID NO: 4803955 - DNA, 25 bp, Homo sapien
gtacatggggtagagcatcgccgca

SEQ ID NO: 4803956 - DNA, 25 bp, Homo sapien
tgtacacgtgctgccagtacatggg

SEQ ID NO: 4803957 - DNA, 25 bp, Homo sapien
acaaatccaagggaggagacaccgc

SEQ ID NO: 4803958 - DNA, 25 bp, Homo sapien
atgaacaaatccaagggaggagaca

SEQ ID NO: 4803959 - DNA, 25 bp, Homo sapien
gaacaaatccaagggaggagacacc

SEQ ID NO: 4803960 - DNA, 25 bp, Homo sapien
aaatccaagggaggagacaccgcca

SEQ ID NO: 4803961 - DNA, 25 bp, Homo sapien
gctctgcaacttgacgtgaaataaa

SEQ ID NO: 4803962 - DNA, 25 bp, Homo sapien
caaggccacatcgacagtaagtgac

SEQ ID NO: 4803963 - DNA, 25 bp, Homo sapien
aaagagtgcgtgtgtgttgatacac

SEQ ID NO: 4803964 - DNA, 25 bp, Homo sapien
tcttagataccaatgcctccgctga

SEQ ID NO: 4803965 - DNA, 25 bp, Homo sapien
tagtcaggaggaagcttacacaggc

SEQ ID NO: 4803966 - DNA, 25 bp, Homo sapien
aacagcaatatcacctagtcaggag

SEQ ID NO: 4803967 - DNA, 25 bp, Homo sapien
tcaatacagggacagccaatgtgcc

SEQ ID NO: 4803968 - DNA, 25 bp, Homo sapien
gatactctagcagaaaggcaactta

SEQ ID NO: 4803969 - DNA, 25 bp, Homo sapien
aacatgttgttaacatccacagcca

SEQ ID NO: 4803970 - DNA, 25 bp, Homo sapien
tggcgtacagatgcaacatgttgtt

SEQ ID NO: 4803971 - DNA, 25 bp, Homo sapien
ggcgttcgtacagcatactggcgta

SEQ ID NO: 4803972 - DNA, 25 bp, Homo sapien
caaatgatgagtatccggcgttcgt

SEQ ID NO: 4803973 - DNA, 25 bp, Homo sapien
aaggccaggcgagctcctctcccgt

SEQ ID NO: 4803974 - DNA, 25 bp, Homo sapien
gccaggcgagctcctctcccgtcat

SEQ ID NO: 4803975 - DNA, 25 bp, Homo sapien
ccacgaaggccaggcgagctcctct

SEQ ID NO: 4803976 - DNA, 25 bp, Homo sapien
acccacgaaggccaggcgagctcct

SEQ ID NO: 4803977 - DNA, 25 bp, Homo sapien
tgcagggagcactcgcagttcccat

SEQ ID NO: 4803978 - DNA, 25 bp, Homo sapien
ccatcaagcctcagttcagaagcac

SEQ ID NO: 4803979 - DNA, 25 bp, Homo sapien
gctgcagggagcactcgcagttccc

SEQ ID NO: 4803980 - DNA, 25 bp, Homo sapien
ggagcactcgcagttcccatcaagc

SEQ ID NO: 4803981 - DNA, 25 bp, Homo sapien
ggagtctggcagattggtatcacca

SEQ ID NO: 4803982 - DNA, 25 bp, Homo sapien
ggacaatgggtcatgcacagggaat

SEQ ID NO: 4803983 - DNA, 25 bp, Homo sapien
cagacaggctttggaggtaaggcta

SEQ ID NO: 4803984 - DNA, 25 bp, Homo sapien
tacaaacctgggtcgctacactgtg

SEQ ID NO: 4803985 - DNA, 25 bp, Homo sapien
gaatgtgctaccatcatatagtgag

SEQ ID NO: 4803986 - DNA, 25 bp, Homo sapien
tatagtgagtagagcccagagatgc

SEQ ID NO: 4803987 - DNA, 25 bp, Homo sapien
caaaaagcagatgtgactaacgaag

SEQ ID NO: 4803988 - DNA, 25 bp, Homo sapien
tatcctacgatgtataaaacagccc

SEQ ID NO: 4803989 - DNA, 25 bp, Homo sapien
ttaaagctacggataaggtgggcag

SEQ ID NO: 4803990 - DNA, 25 bp, Homo sapien
caagctgacaagcatgcgactgagg

SEQ ID NO: 4803991 - DNA, 25 bp, Homo sapien
caccaggtacagttgaggacgggca

SEQ ID NO: 4803992 - DNA, 25 bp, Homo sapien
gaactgaaccagaaaggcctggtga

SEQ ID NO: 4803993 - DNA, 25 bp, Homo sapien
aaacatgtcatgcagctagactaga

SEQ ID NO: 4803994 - DNA, 25 bp, Homo sapien
gcttgttcagaaggcaaacatcaac

SEQ ID NO: 4803995 - DNA, 25 bp, Homo sapien
aaagttctggacattgactgtacaa

SEQ ID NO: 4803996 - DNA, 25 bp, Homo sapien
tcaagtgtctaagtggtagacattc

SEQ ID NO: 4803997 - DNA, 25 bp, Homo sapien
agttctctggtatcaggcacagtaa

SEQ ID NO: 4803998 - DNA, 25 bp, Homo sapien
ctgggaagttctctggtatcaggca

SEQ ID NO: 4803999 - DNA, 25 bp, Homo sapien
gtatcaggcacagtaaaataagaat

SEQ ID NO: 4804000 - DNA, 25 bp, Homo sapien
attctcaggtatgctgggaagttct

SEQ ID NO: 4804001 - DNA, 25 bp, Homo sapien
tcggatgtcattacggactgaagtg

SEQ ID NO: 4804002 - DNA, 25 bp, Homo sapien
tcattacggactgaagtggtgagat

SEQ ID NO: 4804003 - DNA, 25 bp, Homo sapien
gatgtcattacggactgaagtggtg

SEQ ID NO: 4804004 - DNA, 25 bp, Homo sapien
ctgtcggatgtcattacggactgaa

SEQ ID NO: 4804005 - DNA, 25 bp, Homo sapien
cagcaaagggacatgtacagcagtg

SEQ ID NO: 4804006 - DNA, 25 bp, Homo sapien
tcagcaaagggacatgtacagcagt

SEQ ID NO: 4804007 - DNA, 25 bp, Homo sapien
cacgctgagatggacagacactcct

SEQ ID NO: 4804008 - DNA, 25 bp, Homo sapien
ggacagacactcctgggtcagggat

SEQ ID NO: 4804009 - DNA, 25 bp, Homo sapien
tcttttacgacagaatcccctgaca

SEQ ID NO: 4804010 - DNA, 25 bp, Homo sapien
aatagatgaacagacccaaggtgac

SEQ ID NO: 4804011 - DNA, 25 bp, Homo sapien
gagtgtagtgatcaaggaagccgtt

SEQ ID NO: 4804012 - DNA, 25 bp, Homo sapien
tttggactggaacatatggagggaa

SEQ ID NO: 4804013 - DNA, 25 bp, Homo sapien
agcttataaaatacctcgaaccagg

SEQ ID NO: 4804014 - DNA, 25 bp, Homo sapien
ctgtctttttgtcgtgtaatctgcc

SEQ ID NO: 4804015 - DNA, 25 bp, Homo sapien
ctttttgtcgtgtaatctgccagga

SEQ ID NO: 4804016 - DNA, 25 bp, Homo sapien
ccaggatgttaagcagcttataaaa

SEQ ID NO: 4804017 - DNA, 25 bp, Homo sapien
cagatatggacacgaggtagcgcac

SEQ ID NO: 4804018 - DNA, 25 bp, Homo sapien
gcctggtcatgtctgccctgctgtg

SEQ ID NO: 4804019 - DNA, 25 bp, Homo sapien
cagcaagcgagaagaaggttgtacc

SEQ ID NO: 4804020 - DNA, 25 bp, Homo sapien
cagagtccaataccgacagatatgg

SEQ ID NO: 4804021 - DNA, 25 bp, Homo sapien
tattaaggccattaattaccactag

SEQ ID NO: 4804022 - DNA, 25 bp, Homo sapien
taccactagagctacagagtaacag

SEQ ID NO: 4804023 - DNA, 25 bp, Homo sapien
gctacagagtaacagtcaaccaact

SEQ ID NO: 4804024 - DNA, 25 bp, Homo sapien
ctctataggttctattaaggccatt

SEQ ID NO: 4804025 - DNA, 25 bp, Homo sapien
gcctccttcgggtacaaagcagaac

SEQ ID NO: 4804026 - DNA, 25 bp, Homo sapien
gaacattaaaataagcgataaggcc

SEQ ID NO: 4804027 - DNA, 25 bp, Homo sapien
taaggccagagattgttccagacag

SEQ ID NO: 4804028 - DNA, 25 bp, Homo sapien
tccagacagctgatgttcaaagcct

SEQ ID NO: 4804029 - DNA, 25 bp, Homo sapien
acgaagcaactctttcactgagaag

SEQ ID NO: 4804030 - DNA, 25 bp, Homo sapien
ttagtgacgaagcaactctttcact

SEQ ID NO: 4804031 - DNA, 25 bp, Homo sapien
tgacgaagcaactctttcactgaga

SEQ ID NO: 4804032 - DNA, 25 bp, Homo sapien
ctttagtgacgaagcaactctttca

SEQ ID NO: 4804033 - DNA, 25 bp, Homo sapien
aaaggagctcctgtcatgtagaaga

SEQ ID NO: 4804034 - DNA, 25 bp, Homo sapien
aagaagggtttcaagcagtggacag

SEQ ID NO: 4804035 - DNA, 25 bp, Homo sapien
catgctggaccatggagtttaactc

SEQ ID NO: 4804036 - DNA, 25 bp, Homo sapien
aaatgagggcctccgtcagtgctct

SEQ ID NO: 4804037 - DNA, 25 bp, Homo sapien
tcccagaggtctggccgtaatacca

SEQ ID NO: 4804038 - DNA, 25 bp, Homo sapien
tcctagctaagaaatcatgcccatc

SEQ ID NO: 4804039 - DNA, 25 bp, Homo sapien
tgagaacctccttattataccaagc

SEQ ID NO: 4804040 - DNA, 25 bp, Homo sapien
accaagtctgtctatgtatgctggg

SEQ ID NO: 4804041 - DNA, 25 bp, Homo sapien
tgtcagcacattactgttaaaagtc

SEQ ID NO: 4804042 - DNA, 25 bp, Homo sapien
aaagttctctaagaatataagcctt

SEQ ID NO: 4804043 - DNA, 25 bp, Homo sapien
gatagactattgtgagaccttgtga

SEQ ID NO: 4804044 - DNA, 25 bp, Homo sapien
gtccatacgctaaatattattgaaa

SEQ ID NO: 4804045 - DNA, 25 bp, Homo sapien
tatgcacaggcaacaactctctctc

SEQ ID NO: 4804046 - DNA, 25 bp, Homo sapien
caaaaaactggcacctttgtctggg

SEQ ID NO: 4804047 - DNA, 25 bp, Homo sapien
tgtctgggtccggagtataaaatca

SEQ ID NO: 4804048 - DNA, 25 bp, Homo sapien
tctctctcatactagtgtgggcaca

SEQ ID NO: 4804049 - DNA, 25 bp, Homo sapien
aagcactgtgaagacagcaagaaca

SEQ ID NO: 4804050 - DNA, 25 bp, Homo sapien
tagtgagccggaagataaacccaga

SEQ ID NO: 4804051 - DNA, 25 bp, Homo sapien
tgctgaaatcccacgcaagatgaat

SEQ ID NO: 4804052 - DNA, 25 bp, Homo sapien
tatttacgacttattggagaaatgc

SEQ ID NO: 4804053 - DNA, 25 bp, Homo sapien
taagttttccgtagatcttgccttc

SEQ ID NO: 4804054 - DNA, 25 bp, Homo sapien
aagataatcctgaggatgggaccca

SEQ ID NO: 4804055 - DNA, 25 bp, Homo sapien
tgactaaattttgatggcaacccat

SEQ ID NO: 4804056 - DNA, 25 bp, Homo sapien
tcccacttgtggagtcatgtccctc

SEQ ID NO: 4804057 - DNA, 25 bp, Homo sapien
acacctcataacacatagcctgaag

SEQ ID NO: 4804058 - DNA, 25 bp, Homo sapien
caaacaactcaaggctagtttaggc

SEQ ID NO: 4804059 - DNA, 25 bp, Homo sapien
tggaattagaagagtaaaccagtct

SEQ ID NO: 4804060 - DNA, 25 bp, Homo sapien
catcttgctgggagtaaacacttgg

SEQ ID NO: 4804061 - DNA, 25 bp, Homo sapien
aaatgatactccaagtgtctgaccc

SEQ ID NO: 4804062 - DNA, 25 bp, Homo sapien
ccccagacttggaaattgagagcca

SEQ ID NO: 4804063 - DNA, 25 bp, Homo sapien
attgagagccacaatagaaaagaag

SEQ ID NO: 4804064 - DNA, 25 bp, Homo sapien
aaaagaagcacaactcgttgaggga

SEQ ID NO: 4804065 - DNA, 25 bp, Homo sapien
aagaagcacaactcgttgagggagg

SEQ ID NO: 4804066 - DNA, 25 bp, Homo sapien
tttcctaatgagacttcagcatgaa

SEQ ID NO: 4804067 - DNA, 25 bp, Homo sapien
aaatagacacactgaattctcaatg

SEQ ID NO: 4804068 - DNA, 25 bp, Homo sapien
aaatctgacttcaactttggcacaa

SEQ ID NO: 4804069 - DNA, 25 bp, Homo sapien
tcagcatgaatctcaacctttagag

SEQ ID NO: 4804070 - DNA, 25 bp, Homo sapien
aacagcacttttccgatcctccaga

SEQ ID NO: 4804071 - DNA, 25 bp, Homo sapien
gtatcctttgaagctacttgctttg

SEQ ID NO: 4804072 - DNA, 25 bp, Homo sapien
tccagatgtatcctttgaagctact

SEQ ID NO: 4804073 - DNA, 25 bp, Homo sapien
gcacttttccgatcctccagatgta

SEQ ID NO: 4804074 - DNA, 25 bp, Homo sapien
tttgcgaaggcacaaggatgactca

SEQ ID NO: 4804075 - DNA, 25 bp, Homo sapien
tactgatggatacgcagaacaatgg

SEQ ID NO: 4804076 - DNA, 25 bp, Homo sapien
ctggaacaactagatgctcatatgc

SEQ ID NO: 4804077 - DNA, 25 bp, Homo sapien
gatccacacaaacactgcgtagtcc

SEQ ID NO: 4804078 - DNA, 25 bp, Homo sapien
tgaacttcccaatattaaccaggtg

SEQ ID NO: 4804079 - DNA, 25 bp, Homo sapien
tcaaagggcacatctatctaaaggc

SEQ ID NO: 4804080 - DNA, 25 bp, Homo sapien
taggaaccagttactactaccaggc

SEQ ID NO: 4804081 - DNA, 25 bp, Homo sapien
gctcatccaggaaggaacgagttca

SEQ ID NO: 4804082 - DNA, 25 bp, Homo sapien
tctcgcaaccctttgaggtgagtcc

SEQ ID NO: 4804083 - DNA, 25 bp, Homo sapien
taagcaaatgcaaacccctctgact

SEQ ID NO: 4804084 - DNA, 25 bp, Homo sapien
aagatcataagtgggcaagagctgg

SEQ ID NO: 4804085 - DNA, 25 bp, Homo sapien
ggtgagtccttatctctgaatgtca

SEQ ID NO: 4804086 - DNA, 25 bp, Homo sapien
caaatgtgagtaaatggactgccat

SEQ ID NO: 4804087 - DNA, 25 bp, Homo sapien
agcccactagtttgacagtcttagc

SEQ ID NO: 4804088 - DNA, 25 bp, Homo sapien
cagtcttagctgagaaaacttccta

SEQ ID NO: 4804089 - DNA, 25 bp, Homo sapien
caagagacaggtataaatcataagc

SEQ ID NO: 4804090 - DNA, 25 bp, Homo sapien
caaacccaagccaggaagttgtcaa

SEQ ID NO: 4804091 - DNA, 25 bp, Homo sapien
tcacagctctgccagttggcaaacc

SEQ ID NO: 4804092 - DNA, 25 bp, Homo sapien
gcgtttaggccatgtagtcctatta

SEQ ID NO: 4804093 - DNA, 25 bp, Homo sapien
tgtcaattccaattgcgtttaggcc

SEQ ID NO: 4804094 - DNA, 25 bp, Homo sapien
gagtacactaaatctgaggaacgca

SEQ ID NO: 4804095 - DNA, 25 bp, Homo sapien
gaatatataccagttgagcaccgct

SEQ ID NO: 4804096 - DNA, 25 bp, Homo sapien
agacctagaattgcaatctctggag

SEQ ID NO: 4804097 - DNA, 25 bp, Homo sapien
gaggaacgcacaagttcatgggagt

SEQ ID NO: 4804098 - DNA, 25 bp, Homo sapien
gattttagcttccaaaccagattcc

SEQ ID NO: 4804099 - DNA, 25 bp, Homo sapien
catatcacgggcaaaaccctgggtt

SEQ ID NO: 4804100 - DNA, 25 bp, Homo sapien
tgcaagggcaaactacccattatgt

SEQ ID NO: 4804101 - DNA, 25 bp, Homo sapien
gaaaattacataaaccagctggcat

SEQ ID NO: 4804102 - DNA, 25 bp, Homo sapien
ctgtgttcatgttaagggaccttga

SEQ ID NO: 4804103 - DNA, 25 bp, Homo sapien
gagtgtgatatctgaagagttttca

SEQ ID NO: 4804104 - DNA, 25 bp, Homo sapien
agtgttatgtattgcccattctggg

SEQ ID NO: 4804105 - DNA, 25 bp, Homo sapien
cattctgggtatatactaggtactc

SEQ ID NO: 4804106 - DNA, 25 bp, Homo sapien
gatgccataactgagagctacatcc

SEQ ID NO: 4804107 - DNA, 25 bp, Homo sapien
gaagtgaagctaaatcctggaacca

SEQ ID NO: 4804108 - DNA, 25 bp, Homo sapien
gggctacgtctgcacagatgccata

SEQ ID NO: 4804109 - DNA, 25 bp, Homo sapien
caaggaggaagtgaagctaaatcct

SEQ ID NO: 4804110 - DNA, 25 bp, Homo sapien
aaacagagccttaagcaagtgtggc

SEQ ID NO: 4804111 - DNA, 25 bp, Homo sapien
tctacagaggtagccaaaatgggac

SEQ ID NO: 4804112 - DNA, 25 bp, Homo sapien
tactaaggcgtgcttgagaacaaca

SEQ ID NO: 4804113 - DNA, 25 bp, Homo sapien
gaaagtgcagagactagtgccgcag

SEQ ID NO: 4804114 - DNA, 25 bp, Homo sapien
tcttcgctcctgaagataagcggca

SEQ ID NO: 4804115 - DNA, 25 bp, Homo sapien
gataagcggcagaacccgaatctct

SEQ ID NO: 4804116 - DNA, 25 bp, Homo sapien
gcagaacccgaatctctgtttgctg

SEQ ID NO: 4804117 - DNA, 25 bp, Homo sapien
cagaagcagctcttcgctcctgaag

SEQ ID NO: 4804118 - DNA, 25 bp, Homo sapien
gaagttctggccaacttggctaact

SEQ ID NO: 4804119 - DNA, 25 bp, Homo sapien
tgagcacgaatgtgaagttctggcc

SEQ ID NO: 4804120 - DNA, 25 bp, Homo sapien
cacgaatgtgaagttctggccaact

SEQ ID NO: 4804121 - DNA, 25 bp, Homo sapien
gtcagtgagcacgaatgtgaagttc

SEQ ID NO: 4804122 - DNA, 25 bp, Homo sapien
gatatgttaagtctgagaagcctgt

SEQ ID NO: 4804123 - DNA, 25 bp, Homo sapien
caagtacagagttgaatacactagt

SEQ ID NO: 4804124 - DNA, 25 bp, Homo sapien
tagttagcagatatgaatgacaggc

SEQ ID NO: 4804125 - DNA, 25 bp, Homo sapien
gatggtggcttaactcatgtaggga

SEQ ID NO: 4804126 - DNA, 25 bp, Homo sapien
cttttaaacaagatagggctaggct

SEQ ID NO: 4804127 - DNA, 25 bp, Homo sapien
gagaatattgcaactctccttggaa

SEQ ID NO: 4804128 - DNA, 25 bp, Homo sapien
ttcttatcattaaccagtggctcgt

SEQ ID NO: 4804129 - DNA, 25 bp, Homo sapien
ggaacacaggtatcttaaatcatgg

SEQ ID NO: 4804130 - DNA, 25 bp, Homo sapien
aacaaaacttggtcaaagtctgtag

SEQ ID NO: 4804131 - DNA, 25 bp, Homo sapien
atttatacatctaatgggaccagta

SEQ ID NO: 4804132 - DNA, 25 bp, Homo sapien
acattaaccacagcacacaatctag

SEQ ID NO: 4804133 - DNA, 25 bp, Homo sapien
tgggaccagtaaatctaacattaac

SEQ ID NO: 4804134 - DNA, 25 bp, Homo sapien
taaccacagcacacaatctagcaac

SEQ ID NO: 4804135 - DNA, 25 bp, Homo sapien
cggttgggttgctgagtgttaacac

SEQ ID NO: 4804136 - DNA, 25 bp, Homo sapien
ttgggttgctgagtgttaacacccc

SEQ ID NO: 4804137 - DNA, 25 bp, Homo sapien
gggagggaggcggttgggttgctga

SEQ ID NO: 4804138 - DNA, 25 bp, Homo sapien
gaggcggttgggttgctgagtgtta

SEQ ID NO: 4804139 - DNA, 25 bp, Homo sapien
cagagtgaataacaccgagccacat

SEQ ID NO: 4804140 - DNA, 25 bp, Homo sapien
tgctggcaccgtttttgcctgttac

SEQ ID NO: 4804141 - DNA, 25 bp, Homo sapien
ataacaccgagccacatgggtttgg

SEQ ID NO: 4804142 - DNA, 25 bp, Homo sapien
gctgttgctggcaccgtttttgcct

SEQ ID NO: 4804143 - DNA, 25 bp, Homo sapien
ttggacattacacgggaggaggctc

SEQ ID NO: 4804144 - DNA, 25 bp, Homo sapien
ggacattacacgggaggaggctcca

SEQ ID NO: 4804145 - DNA, 25 bp, Homo sapien
cttggacattacacgggaggaggct

SEQ ID NO: 4804146 - DNA, 25 bp, Homo sapien
acttggacattacacgggaggaggc

SEQ ID NO: 4804147 - DNA, 25 bp, Homo sapien
gctgaattcgctgctctccacgtct

SEQ ID NO: 4804148 - DNA, 25 bp, Homo sapien
gcagtcgataatgggcccatgctga

SEQ ID NO: 4804149 - DNA, 25 bp, Homo sapien
gggcccatgctgaattcgctgctct

SEQ ID NO: 4804150 - DNA, 25 bp, Homo sapien
tttacaacacacgaaaaagcagtcg

SEQ ID NO: 4804151 - DNA, 25 bp, Homo sapien
ggagtattggaagccccagccttca

SEQ ID NO: 4804152 - DNA, 25 bp, Homo sapien
agggccacgctgcttgttttgacag

SEQ ID NO: 4804153 - DNA, 25 bp, Homo sapien
ggaaaaaggcctccagtatgcagtc

SEQ ID NO: 4804154 - DNA, 25 bp, Homo sapien
atttctgtatagctgtgtttgcctc

SEQ ID NO: 4804155 - DNA, 25 bp, Homo sapien
ttagctcttgtatgagaataatagc

SEQ ID NO: 4804156 - DNA, 25 bp, Homo sapien
gcttattagctcttgtatgagaata

SEQ ID NO: 4804157 - DNA, 25 bp, Homo sapien
ctgcttattagctcttgtatgagaa

SEQ ID NO: 4804158 - DNA, 25 bp, Homo sapien
cttctgcttattagctcttgtatga

SEQ ID NO: 4804159 - DNA, 25 bp, Homo sapien
aaaaggtaaaatgccaatgccagtc

SEQ ID NO: 4804160 - DNA, 25 bp, Homo sapien
tcagaaatcctaaaaggtaaaatgc

SEQ ID NO: 4804161 - DNA, 25 bp, Homo sapien
aaggtaaaatgccaatgccagtcat

SEQ ID NO: 4804162 - DNA, 25 bp, Homo sapien
ctaaaaggtaaaatgccaatgccag

SEQ ID NO: 4804163 - DNA, 25 bp, Homo sapien
cgaagccggcaagaatctctgactt

SEQ ID NO: 4804164 - DNA, 25 bp, Homo sapien
ctagagatctggacacgaagccggc

SEQ ID NO: 4804165 - DNA, 25 bp, Homo sapien
tctggacacgaagccggcaagaatc

SEQ ID NO: 4804166 - DNA, 25 bp, Homo sapien
acacgaagccggcaagaatctctga

SEQ ID NO: 4804167 - DNA, 25 bp, Homo sapien
gagcccccaatctgtcctagctgct

SEQ ID NO: 4804168 - DNA, 25 bp, Homo sapien
ctgctcaaaggggtctgtaacattg

SEQ ID NO: 4804169 - DNA, 25 bp, Homo sapien
atgttgttcactgagcccccaatct

SEQ ID NO: 4804170 - DNA, 25 bp, Homo sapien
ctcaaaggggtctgtaacattggcc

SEQ ID NO: 4804171 - DNA, 25 bp, Homo sapien
tagtcctccgggaattgcctctgca

SEQ ID NO: 4804172 - DNA, 25 bp, Homo sapien
tgtagtcctccgggaattgcctctg

SEQ ID NO: 4804173 - DNA, 25 bp, Homo sapien
gtcctccgggaattgcctctgcacc

SEQ ID NO: 4804174 - DNA, 25 bp, Homo sapien
gtagtcctccgggaattgcctctgc

SEQ ID NO: 4804175 - DNA, 25 bp, Homo sapien
caatggagccattcacatgccagat

SEQ ID NO: 4804176 - DNA, 25 bp, Homo sapien
tcctgctccgatgtgactatttatg

SEQ ID NO: 4804177 - DNA, 25 bp, Homo sapien
gccagattcctcctcagactaacat

SEQ ID NO: 4804178 - DNA, 25 bp, Homo sapien
cagctgttgtacaaataatgagtcc

SEQ ID NO: 4804179 - DNA, 25 bp, Homo sapien
tgctatgcctagaacaatattagac

SEQ ID NO: 4804180 - DNA, 25 bp, Homo sapien
gaacggcacgatggtttctattatc

SEQ ID NO: 4804181 - DNA, 25 bp, Homo sapien
tatcttcctatctgctatgcctaga

SEQ ID NO: 4804182 - DNA, 25 bp, Homo sapien
ccctgcatgttcctccgagtactta

SEQ ID NO: 4804183 - DNA, 25 bp, Homo sapien
agggcagctggcaaagcccttctca

SEQ ID NO: 4804184 - DNA, 25 bp, Homo sapien
ctaagggcagctggcaaagcccttc

SEQ ID NO: 4804185 - DNA, 25 bp, Homo sapien
aagggcagctggcaaagcccttctc

SEQ ID NO: 4804186 - DNA, 25 bp, Homo sapien
gggcagctggcaaagcccttctcat

SEQ ID NO: 4804187 - DNA, 25 bp, Homo sapien
ctgagtagctggggccaaaggcttg

SEQ ID NO: 4804188 - DNA, 25 bp, Homo sapien
gctggggccaaaggcttgcgccacc

SEQ ID NO: 4804189 - DNA, 25 bp, Homo sapien
gagtagctggggccaaaggcttgcg

SEQ ID NO: 4804190 - DNA, 25 bp, Homo sapien
gtagctggggccaaaggcttgcgcc

SEQ ID NO: 4804191 - DNA, 25 bp, Homo sapien
ctgtcagtcccagggcgaactccat

SEQ ID NO: 4804192 - DNA, 25 bp, Homo sapien
aaagctttagctatcgattctagtg

SEQ ID NO: 4804193 - DNA, 25 bp, Homo sapien
tttttaataacaccagcatacctcc

SEQ ID NO: 4804194 - DNA, 25 bp, Homo sapien
aatgggtgtttatagagttcatctg

SEQ ID NO: 4804195 - DNA, 25 bp, Homo sapien
gcatacctcccaatctatatctaag

SEQ ID NO: 4804196 - DNA, 25 bp, Homo sapien
taaaatgtaaagttaatgaggattc

SEQ ID NO: 4804197 - DNA, 25 bp, Homo sapien
gttaatgaggattcagctgaaaaca

SEQ ID NO: 4804198 - DNA, 25 bp, Homo sapien
ttaatgaggattcagctgaaaacag

SEQ ID NO: 4804199 - DNA, 25 bp, Homo sapien
attaaaatgtaaagttaatgaggat

SEQ ID NO: 4804200 - DNA, 25 bp, Homo sapien
gatttatgcaagactcagcaccgcc

SEQ ID NO: 4804201 - DNA, 25 bp, Homo sapien
catggagtaaacagtctcgtgtgac

SEQ ID NO: 4804202 - DNA, 25 bp, Homo sapien
gcacagtgccggtacaaaaatagta

SEQ ID NO: 4804203 - DNA, 25 bp, Homo sapien
ttataacagaactccaatgaggtcg

SEQ ID NO: 4804204 - DNA, 25 bp, Homo sapien
ctcaatgggccggaaaatgtctcag

SEQ ID NO: 4804205 - DNA, 25 bp, Homo sapien
tattaggcagcaataactgaggcag

SEQ ID NO: 4804206 - DNA, 25 bp, Homo sapien
aaagctactgttcctctcaatgggc

SEQ ID NO: 4804207 - DNA, 25 bp, Homo sapien
aatcattcagtagcactccagggca

SEQ ID NO: 4804208 - DNA, 25 bp, Homo sapien
taagcagaagactggcatgattata

SEQ ID NO: 4804209 - DNA, 25 bp, Homo sapien
taccctgtaggtaatgaagaggcat

SEQ ID NO: 4804210 - DNA, 25 bp, Homo sapien
cattataaggtttaagcagaagact

SEQ ID NO: 4804211 - DNA, 25 bp, Homo sapien
tctgtgccacgctaagatttgagta

SEQ ID NO: 4804212 - DNA, 25 bp, Homo sapien
ccttcgaacacttgttaaactcgag

SEQ ID NO: 4804213 - DNA, 25 bp, Homo sapien
cacttgttaaactcgagtgtgctga

SEQ ID NO: 4804214 - DNA, 25 bp, Homo sapien
tgacaaatttgccactgcaatcaca

SEQ ID NO: 4804215 - DNA, 25 bp, Homo sapien
actcgagtgtgctgacaaatttgcc

SEQ ID NO: 4804216 - DNA, 25 bp, Homo sapien
gaatgttccacttagcacttagctg

SEQ ID NO: 4804217 - DNA, 25 bp, Homo sapien
gaattttgacccacatgacctgact

SEQ ID NO: 4804218 - DNA, 25 bp, Homo sapien
cattttacagcatagggaactaaaa

SEQ ID NO: 4804219 - DNA, 25 bp, Homo sapien
tacacagggatatgtcctaagtagg

SEQ ID NO: 4804220 - DNA, 25 bp, Homo sapien
tcatggttctacgactttgtggttg

SEQ ID NO: 4804221 - DNA, 25 bp, Homo sapien
taataaggactcaaggaaagttagc

SEQ ID NO: 4804222 - DNA, 25 bp, Homo sapien
tggttgtccaacctgggcaagtaaa

SEQ ID NO: 4804223 - DNA, 25 bp, Homo sapien
gccatctttagagaattgttcgagc

SEQ ID NO: 4804224 - DNA, 25 bp, Homo sapien
cttctcacagcagggaattaatccc

SEQ ID NO: 4804225 - DNA, 25 bp, Homo sapien
ttctcacagcagggaattaatccct

SEQ ID NO: 4804226 - DNA, 25 bp, Homo sapien
cctgtcctgggataggccacttcaa

SEQ ID NO: 4804227 - DNA, 25 bp, Homo sapien
aaagagtgccacctgtcctgggata

SEQ ID NO: 4804228 - DNA, 25 bp, Homo sapien
tgggataggccacttcaacatatac

SEQ ID NO: 4804229 - DNA, 25 bp, Homo sapien
taggccacttcaacatatacttcaa

SEQ ID NO: 4804230 - DNA, 25 bp, Homo sapien
gctaatttggtacatgtaatgatgc

SEQ ID NO: 4804231 - DNA, 25 bp, Homo sapien
caattttccaatatggacccaagtt

SEQ ID NO: 4804232 - DNA, 25 bp, Homo sapien
taacactcactgctaatttggtaca

SEQ ID NO: 4804233 - DNA, 25 bp, Homo sapien
tatttctgtcctattaacactcact

SEQ ID NO: 4804234 - DNA, 25 bp, Homo sapien
caactgagtaccgttatgtgccaca

SEQ ID NO: 4804235 - DNA, 25 bp, Homo sapien
ccagtgatgataacaaagtgccttc

SEQ ID NO: 4804236 - DNA, 25 bp, Homo sapien
cctaaagcggattgctaaagccaca

SEQ ID NO: 4804237 - DNA, 25 bp, Homo sapien
gatgctcgcttaagggttctcagcc

SEQ ID NO: 4804238 - DNA, 25 bp, Homo sapien
gtggcaataatcaatagtttaccaa

SEQ ID NO: 4804239 - DNA, 25 bp, Homo sapien
tgaaattgtggcaataatcaatagt

SEQ ID NO: 4804240 - DNA, 25 bp, Homo sapien
ttgtggcaataatcaatagtttacc

SEQ ID NO: 4804241 - DNA, 25 bp, Homo sapien
aattgtggcaataatcaatagttta

SEQ ID NO: 4804242 - DNA, 25 bp, Homo sapien
agtgggaagggatagcattggcaga

SEQ ID NO: 4804243 - DNA, 25 bp, Homo sapien
gggagtgggaagggatagcattggc

SEQ ID NO: 4804244 - DNA, 25 bp, Homo sapien
tgggaagggatagcattggcagata

SEQ ID NO: 4804245 - DNA, 25 bp, Homo sapien
gagtgggaagggatagcattggcag

SEQ ID NO: 4804246 - DNA, 25 bp, Homo sapien
aacatcatcagttgccaggttctgc

SEQ ID NO: 4804247 - DNA, 25 bp, Homo sapien
caaaggctgcaaagtagaggtttcc

SEQ ID NO: 4804248 - DNA, 25 bp, Homo sapien
ttctgctggccaaaagctagcaccc

SEQ ID NO: 4804249 - DNA, 25 bp, Homo sapien
caaaagctagcacccaggccaaggc

SEQ ID NO: 4804250 - DNA, 25 bp, Homo sapien
tgccaacatgaggatgaaagcactt

SEQ ID NO: 4804251 - DNA, 25 bp, Homo sapien
ctgccaacatgaggatgaaagcact

SEQ ID NO: 4804252 - DNA, 25 bp, Homo sapien
gccaacatgaggatgaaagcacttg

SEQ ID NO: 4804253 - DNA, 25 bp, Homo sapien
ctgctgtacaatgccctctaagttg

SEQ ID NO: 4804254 - DNA, 25 bp, Homo sapien
tacaatgccctctaagttgactaca

SEQ ID NO: 4804255 - DNA, 25 bp, Homo sapien
atgccctctaagttgactacaatgg

SEQ ID NO: 4804256 - DNA, 25 bp, Homo sapien
ttcctatctgctgtacaatgccctc

SEQ ID NO: 4804257 - DNA, 25 bp, Homo sapien
agacttttattccaccactccaagt

SEQ ID NO: 4804258 - DNA, 25 bp, Homo sapien
gatggagagcttggtcttcaaagag

SEQ ID NO: 4804259 - DNA, 25 bp, Homo sapien
actccaagtctctctacattctcct

SEQ ID NO: 4804260 - DNA, 25 bp, Homo sapien
gagagcttggtcttcaaagagactt

SEQ ID NO: 4804261 - DNA, 25 bp, Homo sapien
tcaccacaagcaatattaaactgcc

SEQ ID NO: 4804262 - DNA, 25 bp, Homo sapien
ggatgtcaccacaagcaatattaaa

SEQ ID NO: 4804263 - DNA, 25 bp, Homo sapien
tgtcaccacaagcaatattaaactg

SEQ ID NO: 4804264 - DNA, 25 bp, Homo sapien
cacaagcaatattaaactgccacat

SEQ ID NO: 4804265 - DNA, 25 bp, Homo sapien
tcgccaccactggacagtagtgagg

SEQ ID NO: 4804266 - DNA, 25 bp, Homo sapien
tccagcatggtacgggacacagaca

SEQ ID NO: 4804267 - DNA, 25 bp, Homo sapien
gaaactggcatcaaggcaggcgtct

SEQ ID NO: 4804268 - DNA, 25 bp, Homo sapien
cttctcaaacaaccatgtgccaggc

SEQ ID NO: 4804269 - DNA, 25 bp, Homo sapien
gaacatcttgaatgccctgccagga

SEQ ID NO: 4804270 - DNA, 25 bp, Homo sapien
tagtcaactgacttgctgcatcaga

SEQ ID NO: 4804271 - DNA, 25 bp, Homo sapien
taagccctactctgcatgttaacag

SEQ ID NO: 4804272 - DNA, 25 bp, Homo sapien
taataaccctacaacctggacacag

SEQ ID NO: 4804273 - DNA, 25 bp, Homo sapien
cccgcccgctcgaggctcgctccct

SEQ ID NO: 4804274 - DNA, 25 bp, Homo sapien
ccaggggttaatgtactcgctccag

SEQ ID NO: 4804275 - DNA, 25 bp, Homo sapien
gaacgccatggtcgccggcgcgcgt

SEQ ID NO: 4804276 - DNA, 25 bp, Homo sapien
cggcctccctctggcgctctccccg

SEQ ID NO: 4804277 - DNA, 25 bp, Homo sapien
atgacagcttaatggactctttacc

SEQ ID NO: 4804278 - DNA, 25 bp, Homo sapien
ttaatggactctttacccttgaatg

SEQ ID NO: 4804279 - DNA, 25 bp, Homo sapien
gcttaatggactctttacccttgaa

SEQ ID NO: 4804280 - DNA, 25 bp, Homo sapien
gacagcttaatggactctttaccct

SEQ ID NO: 4804281 - DNA, 25 bp, Homo sapien
tggatcttgcgtggcctagccagca

SEQ ID NO: 4804282 - DNA, 25 bp, Homo sapien
tgctcattaacaacacgaattgcat

SEQ ID NO: 4804283 - DNA, 25 bp, Homo sapien
tctgcaattctgttgacagcacaaa

SEQ ID NO: 4804284 - DNA, 25 bp, Homo sapien
caaatgtctgcagtcagcttgggag

SEQ ID NO: 4804285 - DNA, 25 bp, Homo sapien
agaaagaaatcaaggccacactggg

SEQ ID NO: 4804286 - DNA, 25 bp, Homo sapien
aaagaaatcaaggccacactggggt

SEQ ID NO: 4804287 - DNA, 25 bp, Homo sapien
aagaaagaaatcaaggccacactgg

SEQ ID NO: 4804288 - DNA, 25 bp, Homo sapien
gaagaaagaaatcaaggccacactg

SEQ ID NO: 4804289 - DNA, 25 bp, Homo sapien
gagaacaagtgcattgctacccaaa

SEQ ID NO: 4804290 - DNA, 25 bp, Homo sapien
tttcttgattccaaaagcccagact

SEQ ID NO: 4804291 - DNA, 25 bp, Homo sapien
tctcagggggtgcttgcatgtgtcc

SEQ ID NO: 4804292 - DNA, 25 bp, Homo sapien
ggtcagctgcaaggataagaaaagt

SEQ ID NO: 4804293 - DNA, 25 bp, Homo sapien
tggacaggctaggtagggccccaca

SEQ ID NO: 4804294 - DNA, 25 bp, Homo sapien
ctctggacaggctaggtagggcccc

SEQ ID NO: 4804295 - DNA, 25 bp, Homo sapien
tcctctggacaggctaggtagggcc

SEQ ID NO: 4804296 - DNA, 25 bp, Homo sapien
tctggacaggctaggtagggcccca

SEQ ID NO: 4804297 - DNA, 25 bp, Homo sapien
tgcatagagaggcacttcaggtggg

SEQ ID NO: 4804298 - DNA, 25 bp, Homo sapien
ctgcatagagaggcacttcaggtgg

SEQ ID NO: 4804299 - DNA, 25 bp, Homo sapien
gcatagagaggcacttcaggtgggc

SEQ ID NO: 4804300 - DNA, 25 bp, Homo sapien
gagtttcttgccacaagctgtacca

SEQ ID NO: 4804301 - DNA, 25 bp, Homo sapien
ggacccttgagagatttctgggaag

SEQ ID NO: 4804302 - DNA, 25 bp, Homo sapien
ccattcaagatgaagtaggttggaa

SEQ ID NO: 4804303 - DNA, 25 bp, Homo sapien
ttggaaacttggacccttgagagat

SEQ ID NO: 4804304 - DNA, 25 bp, Homo sapien
tgttttcggccccacctaatgtgta

SEQ ID NO: 4804305 - DNA, 25 bp, Homo sapien
gatgttttcggccccacctaatgtg

SEQ ID NO: 4804306 - DNA, 25 bp, Homo sapien
tcggccccacctaatgtgtaagaaa

SEQ ID NO: 4804307 - DNA, 25 bp, Homo sapien
tccaggatgttttcggccccaccta

SEQ ID NO: 4804308 - DNA, 25 bp, Homo sapien
ttctttgttggtttcctgccatgac

SEQ ID NO: 4804309 - DNA, 25 bp, Homo sapien
tgcttctttgttggtttcctgccat

SEQ ID NO: 4804310 - DNA, 25 bp, Homo sapien
ctttgttggtttcctgccatgacat

SEQ ID NO: 4804311 - DNA, 25 bp, Homo sapien
gcctgcttctttgttggtttcctgc

SEQ ID NO: 4804312 - DNA, 25 bp, Homo sapien
tcatgctgctaacatgttggagcat

SEQ ID NO: 4804313 - DNA, 25 bp, Homo sapien
gcatctcaacgctttaaccctcttg

SEQ ID NO: 4804314 - DNA, 25 bp, Homo sapien
gttggagcatctcaacgctttaacc

SEQ ID NO: 4804315 - DNA, 25 bp, Homo sapien
ggagcatctcaacgctttaaccctc

SEQ ID NO: 4804316 - DNA, 25 bp, Homo sapien
tgtgtactgatcctgagctttacag

SEQ ID NO: 4804317 - DNA, 25 bp, Homo sapien
tatggataaactggccgcgtcgttt

SEQ ID NO: 4804318 - DNA, 25 bp, Homo sapien
gctctgctatggataaactggccgc

SEQ ID NO: 4804319 - DNA, 25 bp, Homo sapien
tgaggctctgctatggataaactgg

SEQ ID NO: 4804320 - DNA, 25 bp, Homo sapien
agcccggtgtttctcattatacgca

SEQ ID NO: 4804321 - DNA, 25 bp, Homo sapien
cggtgtttctcattatacgcacatg

SEQ ID NO: 4804322 - DNA, 25 bp, Homo sapien
gtgtttctcattatacgcacatgcc

SEQ ID NO: 4804323 - DNA, 25 bp, Homo sapien
ctttcagcccggtgtttctcattat

SEQ ID NO: 4804324 - DNA, 25 bp, Homo sapien
aaagagggtgttgctaaggcagcct

SEQ ID NO: 4804325 - DNA, 25 bp, Homo sapien
gctgggactagagggtcatctttgt

SEQ ID NO: 4804326 - DNA, 25 bp, Homo sapien
cagggctaagcacctggtaggtatt

SEQ ID NO: 4804327 - DNA, 25 bp, Homo sapien
gggtgttgctaaggcagcctcagcc

SEQ ID NO: 4804328 - DNA, 25 bp, Homo sapien
tgagccactgtgcccaactctcctt

SEQ ID NO: 4804329 - DNA, 25 bp, Homo sapien
ccactgtgcccaactctccttctct

SEQ ID NO: 4804330 - DNA, 25 bp, Homo sapien
cactgtgcccaactctccttctctc

SEQ ID NO: 4804331 - DNA, 25 bp, Homo sapien
agccactgtgcccaactctccttct

SEQ ID NO: 4804332 - DNA, 25 bp, Homo sapien
caacttaattaaaatgcgtggagcc

SEQ ID NO: 4804333 - DNA, 25 bp, Homo sapien
tccaaaaatcagagggagctgaggg

SEQ ID NO: 4804334 - DNA, 25 bp, Homo sapien
gagccagcctcttgatgtacatcca

SEQ ID NO: 4804335 - DNA, 25 bp, Homo sapien
caattaggtgcaatctaacagcgac

SEQ ID NO: 4804336 - DNA, 25 bp, Homo sapien
aagagcaaggagtacatcttgatcc

SEQ ID NO: 4804337 - DNA, 25 bp, Homo sapien
acagacggtgtagcctagttttgag

SEQ ID NO: 4804338 - DNA, 25 bp, Homo sapien
agaagagcaaggagtacatcttgat

SEQ ID NO: 4804339 - DNA, 25 bp, Homo sapien
aggagacagacggtgtagcctagtt

SEQ ID NO: 4804340 - DNA, 25 bp, Homo sapien
tcatgaggtggtcgcatcttgtcca

SEQ ID NO: 4804341 - DNA, 25 bp, Homo sapien
gaggtggtcgcatcttgtccacaaa

SEQ ID NO: 4804342 - DNA, 25 bp, Homo sapien
atgaggtggtcgcatcttgtccaca

SEQ ID NO: 4804343 - DNA, 25 bp, Homo sapien
ggtggtcgcatcttgtccacaaaag

SEQ ID NO: 4804344 - DNA, 25 bp, Homo sapien
tggaacccaggtagaaacagacttg

SEQ ID NO: 4804345 - DNA, 25 bp, Homo sapien
ctggaacccaggtagaaacagactt

SEQ ID NO: 4804346 - DNA, 25 bp, Homo sapien
gaaacttggagcagtgtgacttacc

SEQ ID NO: 4804347 - DNA, 25 bp, Homo sapien
taaggacagcgagagagcattgccc

SEQ ID NO: 4804348 - DNA, 25 bp, Homo sapien
gaaccacagtcacttttcaggaggg

SEQ ID NO: 4804349 - DNA, 25 bp, Homo sapien
tcagatccagcttaggttgtgccca

SEQ ID NO: 4804350 - DNA, 25 bp, Homo sapien
gggccgcccgcagagccggccacac

SEQ ID NO: 4804351 - DNA, 25 bp, Homo sapien
agccctcaccctgccgctcccccct

SEQ ID NO: 4804352 - DNA, 25 bp, Homo sapien
ggccgcccgcagagccggccacacc

SEQ ID NO: 4804353 - DNA, 25 bp, Homo sapien
tgccgctcccccctagcccggcacc

SEQ ID NO: 4804354 - DNA, 25 bp, Homo sapien
caaggtaaggaagcgcctcggcgcg

SEQ ID NO: 4804355 - DNA, 25 bp, Homo sapien
aaggtaaggaagcgcctcggcgcgc

SEQ ID NO: 4804356 - DNA, 25 bp, Homo sapien
tttgggcgagttgggcttgtcaaag

SEQ ID NO: 4804357 - DNA, 25 bp, Homo sapien
tgggcgagttgggcttgtcaaaggg

SEQ ID NO: 4804358 - DNA, 25 bp, Homo sapien
ttgggcgagttgggcttgtcaaagg

SEQ ID NO: 4804359 - DNA, 25 bp, Homo sapien
gcagggcaccagcaatccgtagtag

SEQ ID NO: 4804360 - DNA, 25 bp, Homo sapien
gcatttgtttccacggggcaagcaa

SEQ ID NO: 4804361 - DNA, 25 bp, Homo sapien
caatccgtagtagcccgcaggaaag

SEQ ID NO: 4804362 - DNA, 25 bp, Homo sapien
accagcaatccgtagtagcccgcag

SEQ ID NO: 4804363 - DNA, 25 bp, Homo sapien
ccagtgatgcttttgcacagataaa

SEQ ID NO: 4804364 - DNA, 25 bp, Homo sapien
tttcaaacccccacaagctgatgct

SEQ ID NO: 4804365 - DNA, 25 bp, Homo sapien
cagctgtgtctgtttcaaaccccca

SEQ ID NO: 4804366 - DNA, 25 bp, Homo sapien
cccttggtgcaattgtgcttgccat

SEQ ID NO: 4804367 - DNA, 25 bp, Homo sapien
gctcagagatgatcccacctttgcc

SEQ ID NO: 4804368 - DNA, 25 bp, Homo sapien
ctttataacgtagctgaagctcaga

SEQ ID NO: 4804369 - DNA, 25 bp, Homo sapien
tttataacgtagctgaagctcagag

SEQ ID NO: 4804370 - DNA, 25 bp, Homo sapien
cgcccgttcgctcgcttgtcaagaa

SEQ ID NO: 4804371 - DNA, 25 bp, Homo sapien
gcttcaaggttagggagacgttctc

SEQ ID NO: 4804372 - DNA, 25 bp, Homo sapien
tcggaaaggctgcaaaaatctgggc

SEQ ID NO: 4804373 - DNA, 25 bp, Homo sapien
gcttcagaccatacattgacagtga

SEQ ID NO: 4804374 - DNA, 25 bp, Homo sapien
tttctccgggcggcttgcgcttcct

SEQ ID NO: 4804375 - DNA, 25 bp, Homo sapien
gggagccccgcagccttcggggagc

SEQ ID NO: 4804376 - DNA, 25 bp, Homo sapien
cccgggaagtttgcgcgcggcagct

SEQ ID NO: 4804377 - DNA, 25 bp, Homo sapien
tctccgggcggcttgcgcttcctcc

SEQ ID NO: 4804378 - DNA, 25 bp, Homo sapien
gaggcgtggagggagcgcttttgtt

SEQ ID NO: 4804379 - DNA, 25 bp, Homo sapien
ggaggcgtggagggagcgcttttgt

SEQ ID NO: 4804380 - DNA, 25 bp, Homo sapien
ggacttaggcattcgttgccacttt

SEQ ID NO: 4804381 - DNA, 25 bp, Homo sapien
gcaggttcgggggacttaggcattc

SEQ ID NO: 4804382 - DNA, 25 bp, Homo sapien
ttcgggggacttaggcattcgttgc

SEQ ID NO: 4804383 - DNA, 25 bp, Homo sapien
gggggacttaggcattcgttgccac

SEQ ID NO: 4804384 - DNA, 25 bp, Homo sapien
ttagcaaagttacccgcctctggac

SEQ ID NO: 4804385 - DNA, 25 bp, Homo sapien
ggctcagcggttgcgcgacgttccc

SEQ ID NO: 4804386 - DNA, 25 bp, Homo sapien
cttgtttagtctcggcggacagggc

SEQ ID NO: 4804387 - DNA, 25 bp, Homo sapien
ggagattagcaaagttacccgcctc

SEQ ID NO: 4804388 - DNA, 25 bp, Homo sapien
ggcttggagcgtggatatgctggct

SEQ ID NO: 4804389 - DNA, 25 bp, Homo sapien
ctagcgggcttggagcgtggatatg

SEQ ID NO: 4804390 - DNA, 25 bp, Homo sapien
ccctccccgggagtcacagctctcg

SEQ ID NO: 4804391 - DNA, 25 bp, Homo sapien
gctctcgccggtctcgccactcagg

SEQ ID NO: 4804392 - DNA, 25 bp, Homo sapien
caggaggcttgcacggccgcctgca

SEQ ID NO: 4804393 - DNA, 25 bp, Homo sapien
gaaggctcttgcaactctgccacag

SEQ ID NO: 4804394 - DNA, 25 bp, Homo sapien
ccgaaggcggagctcgatgggaaac

SEQ ID NO: 4804395 - DNA, 25 bp, Homo sapien
ccaggcgggtgcctgaggccgcggc

SEQ ID NO: 4804396 - DNA, 25 bp, Homo sapien
gcctcgggcagagtttgcgcccttg

SEQ ID NO: 4804397 - DNA, 25 bp, Homo sapien
gcttcagggtgaaccccgaccgcag

SEQ ID NO: 4804398 - DNA, 25 bp, Homo sapien
cgcggacacctagcggcttcagggt

SEQ ID NO: 4804399 - DNA, 25 bp, Homo sapien
gatgcccgcggcgtgaaagcgcccg

SEQ ID NO: 4804400 - DNA, 25 bp, Homo sapien
ggcgccccgcaatgtagctgcccct

SEQ ID NO: 4804401 - DNA, 25 bp, Homo sapien
tcccgccgcgatgctgttccacagt

SEQ ID NO: 4804402 - DNA, 25 bp, Homo sapien
gcgcctcggcgggaggcgtcctgcc

SEQ ID NO: 4804403 - DNA, 25 bp, Homo sapien
tgcaccgggcccgttagcgccagga

SEQ ID NO: 4804404 - DNA, 25 bp, Homo sapien
gctgaggttacaggagcgcaccatc

SEQ ID NO: 4804405 - DNA, 25 bp, Homo sapien
tgaggttacaggagcgcaccatcac

SEQ ID NO: 4804406 - DNA, 25 bp, Homo sapien
aggttacaggagcgcaccatcacac

SEQ ID NO: 4804407 - DNA, 25 bp, Homo sapien
agctgaggttacaggagcgcaccat

SEQ ID NO: 4804408 - DNA, 25 bp, Homo sapien
tcagcagccatacgtggctcgtggc

SEQ ID NO: 4804409 - DNA, 25 bp, Homo sapien
tattcgggagtacagctcagctctg

SEQ ID NO: 4804410 - DNA, 25 bp, Homo sapien
gactggttgaatttgggctaatgcc

SEQ ID NO: 4804411 - DNA, 25 bp, Homo sapien
gcttaactcagtatagccaaactat

SEQ ID NO: 4804412 - DNA, 25 bp, Homo sapien
cctggtcaacattgcaagaccccgt

SEQ ID NO: 4804413 - DNA, 25 bp, Homo sapien
caggagggatcacttgaagcctgga

SEQ ID NO: 4804414 - DNA, 25 bp, Homo sapien
ggagggatcacttgaagcctggagt

SEQ ID NO: 4804415 - DNA, 25 bp, Homo sapien
tggtcaacattgcaagaccccgtct

SEQ ID NO: 4804416 - DNA, 25 bp, Homo sapien
tcttggcaaaacacagatcagcgtc

SEQ ID NO: 4804417 - DNA, 25 bp, Homo sapien
gaaaacacgggcgtggacaagtcga

SEQ ID NO: 4804418 - DNA, 25 bp, Homo sapien
agcagagctctgagtgaagcagtcg

SEQ ID NO: 4804419 - DNA, 25 bp, Homo sapien
ttcaggcgcaacctcttacggcagg

SEQ ID NO: 4804420 - DNA, 25 bp, Homo sapien
aaaaagaagtgtgcgcccggctaat

SEQ ID NO: 4804421 - DNA, 25 bp, Homo sapien
tggactgagcgaggaaaaacaacaa

SEQ ID NO: 4804422 - DNA, 25 bp, Homo sapien
ggaagatctacctgcaacacaacat

SEQ ID NO: 4804423 - DNA, 25 bp, Homo sapien
aagactgccacgtgccttaggaata

SEQ ID NO: 4804424 - DNA, 25 bp, Homo sapien
tcaggcgatgagggaggcctcctga

SEQ ID NO: 4804425 - DNA, 25 bp, Homo sapien
ctcctgaaaaacctgcagcttttcc

SEQ ID NO: 4804426 - DNA, 25 bp, Homo sapien
gcctcctgaaaaacctgcagctttt

SEQ ID NO: 4804427 - DNA, 25 bp, Homo sapien
aggcctcctgaaaaacctgcagctt

SEQ ID NO: 4804428 - DNA, 25 bp, Homo sapien
aacttgatcatccagatggaaaatc

SEQ ID NO: 4804429 - DNA, 25 bp, Homo sapien
ctgcaatggcccaccaacttgatca

SEQ ID NO: 4804430 - DNA, 25 bp, Homo sapien
atgcccctgcaatggcccaccaact

SEQ ID NO: 4804431 - DNA, 25 bp, Homo sapien
accaacttgatcatccagatggaaa

SEQ ID NO: 4804432 - DNA, 25 bp, Homo sapien
agaagaggctgccaatacagactgg

SEQ ID NO: 4804433 - DNA, 25 bp, Homo sapien
ctttctgagttggaagagcaggcaa

SEQ ID NO: 4804434 - DNA, 25 bp, Homo sapien
tgagttggaagagcaggcaattgac

SEQ ID NO: 4804435 - DNA, 25 bp, Homo sapien
ggctgccaatacagactggtggttg

SEQ ID NO: 4804436 - DNA, 25 bp, Homo sapien
ttgcacactgggtgggctctctgcc

SEQ ID NO: 4804437 - DNA, 25 bp, Homo sapien
gatgtgagggggctcctaaagccac

SEQ ID NO: 4804438 - DNA, 25 bp, Homo sapien
tgtgagggggctcctaaagccacca

SEQ ID NO: 4804439 - DNA, 25 bp, Homo sapien
ctaaagccaccaggtaatgggacat

SEQ ID NO: 4804440 - DNA, 25 bp, Homo sapien
agccaccaggtaatgggacatctgg

SEQ ID NO: 4804441 - DNA, 25 bp, Homo sapien
ggccatcggagctgggacgccgggt

SEQ ID NO: 4804442 - DNA, 25 bp, Homo sapien
ggcaccgcggccatcggagctggga

SEQ ID NO: 4804443 - DNA, 25 bp, Homo sapien
gcggccatcggagctgggacgccgg

SEQ ID NO: 4804444 - DNA, 25 bp, Homo sapien
atcggagctgggacgccgggtctgg

SEQ ID NO: 4804445 - DNA, 25 bp, Homo sapien
ctcgggttgggtgtgatgaggaaac

SEQ ID NO: 4804446 - DNA, 25 bp, Homo sapien
gatcctggcgccagctctcaaagcg

SEQ ID NO: 4804447 - DNA, 25 bp, Homo sapien
gctgcattttaggatcctggcgcca

SEQ ID NO: 4804448 - DNA, 25 bp, Homo sapien
cgttccatgggctggctcgggttgg

SEQ ID NO: 4804449 - DNA, 25 bp, Homo sapien
gtgagcagggccgggcacgcagcag

SEQ ID NO: 4804450 - DNA, 25 bp, Homo sapien
gcagggccgggcacgcagcaggcat

SEQ ID NO: 4804451 - DNA, 25 bp, Homo sapien
agcagggccgggcacgcagcaggca

SEQ ID NO: 4804452 - DNA, 25 bp, Homo sapien
cgccgcccgtgagcagggccgggca

SEQ ID NO: 4804453 - DNA, 25 bp, Homo sapien
gctgctctgctgtgtacgaaaccct

SEQ ID NO: 4804454 - DNA, 25 bp, Homo sapien
gctctgctgtgtacgaaaccctgac

SEQ ID NO: 4804455 - DNA, 25 bp, Homo sapien
gggagctgctctgctgtgtacgaaa

SEQ ID NO: 4804456 - DNA, 25 bp, Homo sapien
gagctgctctgctgtgtacgaaacc

SEQ ID NO: 4804457 - DNA, 25 bp, Homo sapien
ttgagtgatgccacttccaggcagg

SEQ ID NO: 4804458 - DNA, 25 bp, Homo sapien
gagtgatgccacttccaggcaggaa

SEQ ID NO: 4804459 - DNA, 25 bp, Homo sapien
tgagtgatgccacttccaggcagga

SEQ ID NO: 4804460 - DNA, 25 bp, Homo sapien
cagcaggataggcaagtcttgcagg

SEQ ID NO: 4804461 - DNA, 25 bp, Homo sapien
ccagcagggtgtctcctcagggcct

SEQ ID NO: 4804462 - DNA, 25 bp, Homo sapien
tcacagcagcaggataggcaagtct

SEQ ID NO: 4804463 - DNA, 25 bp, Homo sapien
tcctcagggcctgaagtttctccag

SEQ ID NO: 4804464 - DNA, 25 bp, Homo sapien
ctggatactgggcttcagagatatt

SEQ ID NO: 4804465 - DNA, 25 bp, Homo sapien
ctcttctggatactgggcttcagag

SEQ ID NO: 4804466 - DNA, 25 bp, Homo sapien
gttctcttctggatactgggcttca

SEQ ID NO: 4804467 - DNA, 25 bp, Homo sapien
caagttctcttctggatactgggct

SEQ ID NO: 4804468 - DNA, 25 bp, Homo sapien
cttcctggtgcagctcttgagtttc

SEQ ID NO: 4804469 - DNA, 25 bp, Homo sapien
aggagtgcagctagatggtgtacca

SEQ ID NO: 4804470 - DNA, 25 bp, Homo sapien
gagcagccttgttgggtctgcaccc

SEQ ID NO: 4804471 - DNA, 25 bp, Homo sapien
cccggagaccgtgggtgaggagtgc

SEQ ID NO: 4804472 - DNA, 25 bp, Homo sapien
caggcacagcaagattgtccttggc

SEQ ID NO: 4804473 - DNA, 25 bp, Homo sapien
acagcaagattgtccttggctgtcc

SEQ ID NO: 4804474 - DNA, 25 bp, Homo sapien
gccaggcacagcaagattgtccttg

SEQ ID NO: 4804475 - DNA, 25 bp, Homo sapien
cagcaagattgtccttggctgtccc

SEQ ID NO: 4804476 - DNA, 25 bp, Homo sapien
cagagcagctgtatagggcaggcac

SEQ ID NO: 4804477 - DNA, 25 bp, Homo sapien
agcagctgtatagggcaggcacatg

SEQ ID NO: 4804478 - DNA, 25 bp, Homo sapien
atacttcctggtggagtagaaacca

SEQ ID NO: 4804479 - DNA, 25 bp, Homo sapien
cccagagcagctgtatagggcaggc

SEQ ID NO: 4804480 - DNA, 25 bp, Homo sapien
atacaccacatgctcacagatacac

SEQ ID NO: 4804481 - DNA, 25 bp, Homo sapien
caccatgacagcgcacacatacacc

SEQ ID NO: 4804482 - DNA, 25 bp, Homo sapien
tgacagcgcacacatacaccacatg

SEQ ID NO: 4804483 - DNA, 25 bp, Homo sapien
catgacagcgcacacatacaccaca

SEQ ID NO: 4804484 - DNA, 25 bp, Homo sapien
ggcgaaggaggatggcaagaggcat

SEQ ID NO: 4804485 - DNA, 25 bp, Homo sapien
tggcgaaggaggatggcaagaggca

SEQ ID NO: 4804486 - DNA, 25 bp, Homo sapien
agtgttgggattggggtttgctggt

SEQ ID NO: 4804487 - DNA, 25 bp, Homo sapien
ggattggggtttgctggtgggaaca

SEQ ID NO: 4804488 - DNA, 25 bp, Homo sapien
gattggggtttgctggtgggaacat

SEQ ID NO: 4804489 - DNA, 25 bp, Homo sapien
ttgggattggggtttgctggtggga

SEQ ID NO: 4804490 - DNA, 25 bp, Homo sapien
ggctgatgatcagaacataagtact

SEQ ID NO: 4804491 - DNA, 25 bp, Homo sapien
gcatagaggtgttggttgtggctga

SEQ ID NO: 4804492 - DNA, 25 bp, Homo sapien
tcaaactatggacaaagcatagagg

SEQ ID NO: 4804493 - DNA, 25 bp, Homo sapien
gctgatgatcagaacataagtacta

SEQ ID NO: 4804494 - DNA, 25 bp, Homo sapien
ggagaaggccaacctttcacatttg

SEQ ID NO: 4804495 - DNA, 25 bp, Homo sapien
ctgtggtcttggtggtgtggggccc

SEQ ID NO: 4804496 - DNA, 25 bp, Homo sapien
ggagtccatgtgaattccatctgtg

SEQ ID NO: 4804497 - DNA, 25 bp, Homo sapien
cagcatgagagatcggaaggagtcc

SEQ ID NO: 4804498 - DNA, 25 bp, Homo sapien
tgcatgagatagcagaatctcagag

SEQ ID NO: 4804499 - DNA, 25 bp, Homo sapien
gaagttgcaggatgcatgagatagc

SEQ ID NO: 4804500 - DNA, 25 bp, Homo sapien
gaatccacaggaaagcggaggctga

SEQ ID NO: 4804501 - DNA, 25 bp, Homo sapien
tcatctccggcagtgctcaggtctg

SEQ ID NO: 4804502 - DNA, 25 bp, Homo sapien
ctgttggatctttgggtaggtggca

SEQ ID NO: 4804503 - DNA, 25 bp, Homo sapien
cctggaaccaggatggactttggtg

SEQ ID NO: 4804504 - DNA, 25 bp, Homo sapien
ggtctagcctcagctgctccggctt

SEQ ID NO: 4804505 - DNA, 25 bp, Homo sapien
ggaaccaggatggactttggtgtcc

SEQ ID NO: 4804506 - DNA, 25 bp, Homo sapien
gctcaggtcttccacccttctgtgt

SEQ ID NO: 4804507 - DNA, 25 bp, Homo sapien
cctcctgggcaggtatagtcaccag

SEQ ID NO: 4804508 - DNA, 25 bp, Homo sapien
tgcctggaatccactctgggctctg

SEQ ID NO: 4804509 - DNA, 25 bp, Homo sapien
ctaggtaccagaaagtttgcctgga

SEQ ID NO: 4804510 - DNA, 25 bp, Homo sapien
tccatccacaggcaggatggctctg

SEQ ID NO: 4804511 - DNA, 25 bp, Homo sapien
tccttgccaacgtggacatgcccat

SEQ ID NO: 4804512 - DNA, 25 bp, Homo sapien
gccaacgtggacatgcccatctaca

SEQ ID NO: 4804513 - DNA, 25 bp, Homo sapien
caacgtggacatgcccatctacaga

SEQ ID NO: 4804514 - DNA, 25 bp, Homo sapien
ttgccaacgtggacatgcccatcta

SEQ ID NO: 4804515 - DNA, 25 bp, Homo sapien
gagaggtacaaatatggcccctgag

SEQ ID NO: 4804516 - DNA, 25 bp, Homo sapien
tcagctgtcgctaggggagcagaga

SEQ ID NO: 4804517 - DNA, 25 bp, Homo sapien
gaggtacaaatatggcccctgaggt

SEQ ID NO: 4804518 - DNA, 25 bp, Homo sapien
gcagagaggtacaaatatggcccct

SEQ ID NO: 4804519 - DNA, 25 bp, Homo sapien
ggccagcagggctgttcctgggtca

SEQ ID NO: 4804520 - DNA, 25 bp, Homo sapien
ggctgttcctgggtcagttatgtcc

SEQ ID NO: 4804521 - DNA, 25 bp, Homo sapien
gcagggctgttcctgggtcagttat

SEQ ID NO: 4804522 - DNA, 25 bp, Homo sapien
ctgttcctgggtcagttatgtccat

SEQ ID NO: 4804523 - DNA, 25 bp, Homo sapien
tttggctaataaagaaacctctcca

SEQ ID NO: 4804524 - DNA, 25 bp, Homo sapien
tagtcctctgactcaggaatgacct

SEQ ID NO: 4804525 - DNA, 25 bp, Homo sapien
tctcggtttaattggaatagtcctc

SEQ ID NO: 4804526 - DNA, 25 bp, Homo sapien
tctgattgttctcaaaggaatgtcc

SEQ ID NO: 4804527 - DNA, 25 bp, Homo sapien
gagttgcagcgatgtctccctgcag

SEQ ID NO: 4804528 - DNA, 25 bp, Homo sapien
taatggaagttgtaggtattagagc

SEQ ID NO: 4804529 - DNA, 25 bp, Homo sapien
taggtattagagctacacgggcagt

SEQ ID NO: 4804530 - DNA, 25 bp, Homo sapien
cagttactggagttgcagcgatgtc

SEQ ID NO: 4804531 - DNA, 25 bp, Homo sapien
gtgtccggggattactgctaaaata

SEQ ID NO: 4804532 - DNA, 25 bp, Homo sapien
ttactgctaaaataagtagcagctt

SEQ ID NO: 4804533 - DNA, 25 bp, Homo sapien
gctaaaataagtagcagcttcctct

SEQ ID NO: 4804534 - DNA, 25 bp, Homo sapien
ctgctaaaataagtagcagcttcct

SEQ ID NO: 4804535 - DNA, 25 bp, Homo sapien
cagtggcgttcatccagtgcttcat

SEQ ID NO: 4804536 - DNA, 25 bp, Homo sapien
cttcatcatgaatagtggcattcac

SEQ ID NO: 4804537 - DNA, 25 bp, Homo sapien
cattcactgtgacagtggcgttcat

SEQ ID NO: 4804538 - DNA, 25 bp, Homo sapien
catcatgaatagtggcattcactgt

SEQ ID NO: 4804539 - DNA, 25 bp, Homo sapien
tggctgtaaacaatccacagcaccc

SEQ ID NO: 4804540 - DNA, 25 bp, Homo sapien
gtgtctaccagctgatgatgaatgc

SEQ ID NO: 4804541 - DNA, 25 bp, Homo sapien
gaccaatcagaaaggacactggctg

SEQ ID NO: 4804542 - DNA, 25 bp, Homo sapien
tctttaataacctgtttgtcacagt

SEQ ID NO: 4804543 - DNA, 25 bp, Homo sapien
cacgcccagtcaaagtcacttttta

SEQ ID NO: 4804544 - DNA, 25 bp, Homo sapien
ccacgcccagtcaaagtcacttttt

SEQ ID NO: 4804545 - DNA, 25 bp, Homo sapien
accacgcccagtcaaagtcactttt

SEQ ID NO: 4804546 - DNA, 25 bp, Homo sapien
gggaatccgaagacgcacaggagtc

SEQ ID NO: 4804547 - DNA, 25 bp, Homo sapien
cgaagacgcacaggagtccaagggt

SEQ ID NO: 4804548 - DNA, 25 bp, Homo sapien
cacaggagtccaagggttggctgac

SEQ ID NO: 4804549 - DNA, 25 bp, Homo sapien
gctgactgcagaccctcatcataag

SEQ ID NO: 4804550 - DNA, 25 bp, Homo sapien
ggagaagatggggagacgccggcct

SEQ ID NO: 4804551 - DNA, 25 bp, Homo sapien
ctagagccggagaagatggggagac

SEQ ID NO: 4804552 - DNA, 25 bp, Homo sapien
gaagatggggagacgccggcctgcg

SEQ ID NO: 4804553 - DNA, 25 bp, Homo sapien
gagccggagaagatggggagacgcc

SEQ ID NO: 4804554 - DNA, 25 bp, Homo sapien
cgcgcgccggtgagtcgcctggggc

SEQ ID NO: 4804555 - DNA, 25 bp, Homo sapien
tgggacgcaccgctccagccgcccg

SEQ ID NO: 4804556 - DNA, 25 bp, Homo sapien
cgcccgcgggccagcgcaccggtcc

SEQ ID NO: 4804557 - DNA, 25 bp, Homo sapien
gcaccggtcccccagcggcagccga

SEQ ID NO: 4804558 - DNA, 25 bp, Homo sapien
tgagtataacgagtgtgcagggccg

SEQ ID NO: 4804559 - DNA, 25 bp, Homo sapien
ctagaagggcgaaagtatgcctgtg

SEQ ID NO: 4804560 - DNA, 25 bp, Homo sapien
cagggccgtgcgagcgtgtttatta

SEQ ID NO: 4804561 - DNA, 25 bp, Homo sapien
caaaggtcttagagccaggctgcgg

SEQ ID NO: 4804562 - DNA, 25 bp, Homo sapien
tcctaggctccaagtgtgaatccca

SEQ ID NO: 4804563 - DNA, 25 bp, Homo sapien
tgaatcccaggacagtaacaaattg

SEQ ID NO: 4804564 - DNA, 25 bp, Homo sapien
gcacccgaggacgtgtgttttccta

SEQ ID NO: 4804565 - DNA, 25 bp, Homo sapien
tgcctgccctgctaagtagacggat

SEQ ID NO: 4804566 - DNA, 25 bp, Homo sapien
ttcattgaaagggacgcagagccgt

SEQ ID NO: 4804567 - DNA, 25 bp, Homo sapien
gaaaatgtcgccttagtttggtgta

SEQ ID NO: 4804568 - DNA, 25 bp, Homo sapien
tgtacagtacgtgcaggcaggtctt

SEQ ID NO: 4804569 - DNA, 25 bp, Homo sapien
gagtttggactcagcgagtttgagc

SEQ ID NO: 4804570 - DNA, 25 bp, Homo sapien
tggacgtcttcttttagcaaacaaa

SEQ ID NO: 4804571 - DNA, 25 bp, Homo sapien
gaactttggacgtcttcttttagca

SEQ ID NO: 4804572 - DNA, 25 bp, Homo sapien
tttggacgtcttcttttagcaaaca

SEQ ID NO: 4804573 - DNA, 25 bp, Homo sapien
cgaatgaactttggacgtcttcttt

SEQ ID NO: 4804574 - DNA, 25 bp, Homo sapien
atctggctgcctttgtcgtgctttg

SEQ ID NO: 4804575 - DNA, 25 bp, Homo sapien
ggctgcctttgtcgtgctttgctcc

SEQ ID NO: 4804576 - DNA, 25 bp, Homo sapien
tggctgcctttgtcgtgctttgctc

SEQ ID NO: 4804577 - DNA, 25 bp, Homo sapien
ctggctgcctttgtcgtgctttgct

SEQ ID NO: 4804578 - DNA, 25 bp, Homo sapien
cctggctgtccgtgaaatggctttg

SEQ ID NO: 4804579 - DNA, 25 bp, Homo sapien
tagatcttgtgcgaaggctcagcca

SEQ ID NO: 4804580 - DNA, 25 bp, Homo sapien
caaagctgaactaaaccaatggcct

SEQ ID NO: 4804581 - DNA, 25 bp, Homo sapien
cagactcgacttccagacagaggag

SEQ ID NO: 4804582 - DNA, 25 bp, Homo sapien
aggatcacagcaccccaccagacct

SEQ ID NO: 4804583 - DNA, 25 bp, Homo sapien
acttctcgggtgatctggtggtaaa

SEQ ID NO: 4804584 - DNA, 25 bp, Homo sapien
tttttccacagatgacttctcgggt

SEQ ID NO: 4804585 - DNA, 25 bp, Homo sapien
ggtggtaaaggcacaggtcttctag

SEQ ID NO: 4804586 - DNA, 25 bp, Homo sapien
tgggaattgaaagatggggtggccg

SEQ ID NO: 4804587 - DNA, 25 bp, Homo sapien
gggtggccgagatctgaaatgcatt

SEQ ID NO: 4804588 - DNA, 25 bp, Homo sapien
gaaatgcattcagttgcagtggcct

SEQ ID NO: 4804589 - DNA, 25 bp, Homo sapien
tgcattcagttgcagtggcctggat

SEQ ID NO: 4804590 - DNA, 25 bp, Homo sapien
tccatgttccagaggcgcgttctta

SEQ ID NO: 4804591 - DNA, 25 bp, Homo sapien
ctccatgttccagaggcgcgttctt

SEQ ID NO: 4804592 - DNA, 25 bp, Homo sapien
ccatgttccagaggcgcgttcttac

SEQ ID NO: 4804593 - DNA, 25 bp, Homo sapien
tgagtggcagtatgggaattagtcc

SEQ ID NO: 4804594 - DNA, 25 bp, Homo sapien
tatgggaattagtccacaggcccct

SEQ ID NO: 4804595 - DNA, 25 bp, Homo sapien
tcctcaacgtctttgaaacttgggc

SEQ ID NO: 4804596 - DNA, 25 bp, Homo sapien
ctcttgttccttgtcctcaacgtct

SEQ ID NO: 4804597 - DNA, 25 bp, Homo sapien
aggccactaaggatgaggaacgtga

SEQ ID NO: 4804598 - DNA, 25 bp, Homo sapien
ctaaggatgaggaacgtgagctccg

SEQ ID NO: 4804599 - DNA, 25 bp, Homo sapien
cactaaggatgaggaacgtgagctc

SEQ ID NO: 4804600 - DNA, 25 bp, Homo sapien
gaaaggccactaaggatgaggaacg

SEQ ID NO: 4804601 - DNA, 25 bp, Homo sapien
ttcagcaagggacggctgagcacca

SEQ ID NO: 4804602 - DNA, 25 bp, Homo sapien
cattcagcaagggacggctgagcac

SEQ ID NO: 4804603 - DNA, 25 bp, Homo sapien
cactgggaccctgaaatgaggaagc

SEQ ID NO: 4804604 - DNA, 25 bp, Homo sapien
agcaagggacggctgagcaccacat

SEQ ID NO: 4804605 - DNA, 25 bp, Homo sapien
tccgtcttgcctcatacactttggg

SEQ ID NO: 4804606 - DNA, 25 bp, Homo sapien
caacggagggtgaattccagcaaca

SEQ ID NO: 4804607 - DNA, 25 bp, Homo sapien
aaaagcaggttttagcgagtgcggc

SEQ ID NO: 4804608 - DNA, 25 bp, Homo sapien
aaaatgaggcttctgctggcaaaag

SEQ ID NO: 4804609 - DNA, 25 bp, Homo sapien
gaattaccgccatcacttctgtggg

SEQ ID NO: 4804610 - DNA, 25 bp, Homo sapien
tcccattaatggaattaccgccatc

SEQ ID NO: 4804611 - DNA, 25 bp, Homo sapien
ttctgtgggatgagatgggcccttt

SEQ ID NO: 4804612 - DNA, 25 bp, Homo sapien
attcatcttgcttcccattaatgga

SEQ ID NO: 4804613 - DNA, 25 bp, Homo sapien
tcctgcgcatgtcccgtgtgagcct

SEQ ID NO: 4804614 - DNA, 25 bp, Homo sapien
ctgcttcctgcgcatgtcccgtgtg

SEQ ID NO: 4804615 - DNA, 25 bp, Homo sapien
gaggccgcagggcccatccaatctg

SEQ ID NO: 4804616 - DNA, 25 bp, Homo sapien
aatctgcttcctgcgcatgtcccgt

SEQ ID NO: 4804617 - DNA, 25 bp, Homo sapien
tgctttcatgtaagaatgctgatcg

SEQ ID NO: 4804618 - DNA, 25 bp, Homo sapien
tcccaattccccaagaaagtgagca

SEQ ID NO: 4804619 - DNA, 25 bp, Homo sapien
cacctggacatctgatagaatttca

SEQ ID NO: 4804620 - DNA, 25 bp, Homo sapien
tgctgatcgaggacaatgctgaata

SEQ ID NO: 4804621 - DNA, 25 bp, Homo sapien
acccctggatcagggagtaaagaat

SEQ ID NO: 4804622 - DNA, 25 bp, Homo sapien
gacccctggatcagggagtaaagaa

SEQ ID NO: 4804623 - DNA, 25 bp, Homo sapien
gtggctccagagtctcaggaatcat

SEQ ID NO: 4804624 - DNA, 25 bp, Homo sapien
gggcttcagtggctccagagtctca

SEQ ID NO: 4804625 - DNA, 25 bp, Homo sapien
agaaatgctccccaggggcttcagt

SEQ ID NO: 4804626 - DNA, 25 bp, Homo sapien
ctgcaagtcagaagaaatgctcccc

SEQ ID NO: 4804627 - DNA, 25 bp, Homo sapien
gagggtatccccaccattggagcgt

SEQ ID NO: 4804628 - DNA, 25 bp, Homo sapien
ttttccaagcacgaggtgaccagtg

SEQ ID NO: 4804629 - DNA, 25 bp, Homo sapien
tatcatctgagtgaggcttgccgct

SEQ ID NO: 4804630 - DNA, 25 bp, Homo sapien
cagacatgggtgtgacgttttccaa

SEQ ID NO: 4804631 - DNA, 25 bp, Homo sapien
ggttcaggatctccaaacacaggcc

SEQ ID NO: 4804632 - DNA, 25 bp, Homo sapien
tctgaaggctactgagtgaactgaa

SEQ ID NO: 4804633 - DNA, 25 bp, Homo sapien
cactgtgtccaagccgcagatgcaa

SEQ ID NO: 4804634 - DNA, 25 bp, Homo sapien
agcaacagccgagattgaggaggat

SEQ ID NO: 4804635 - DNA, 25 bp, Homo sapien
gctgccccccggctgtgatatgccc

SEQ ID NO: 4804636 - DNA, 25 bp, Homo sapien
caggtgttgatatgtccacctgctg

SEQ ID NO: 4804637 - DNA, 25 bp, Homo sapien
gtgttgatatgtccacctgctgccc

SEQ ID NO: 4804638 - DNA, 25 bp, Homo sapien
gggcacagcaggtgttgatatgtcc

SEQ ID NO: 4804639 - DNA, 25 bp, Homo sapien
ggacagagggacagctggccacacc

SEQ ID NO: 4804640 - DNA, 25 bp, Homo sapien
gggacagctggccacaccgggaagc

SEQ ID NO: 4804641 - DNA, 25 bp, Homo sapien
cagagggacagctggccacaccggg

SEQ ID NO: 4804642 - DNA, 25 bp, Homo sapien
agagggacagctggccacaccggga

SEQ ID NO: 4804643 - DNA, 25 bp, Homo sapien
gctgctgtatgcctgtgtcagtccc

SEQ ID NO: 4804644 - DNA, 25 bp, Homo sapien
ctgtgtcagtcccagtggcgatgag

SEQ ID NO: 4804645 - DNA, 25 bp, Homo sapien
agctgctgtatgcctgtgtcagtcc

SEQ ID NO: 4804646 - DNA, 25 bp, Homo sapien
ctgctgtatgcctgtgtcagtccca

SEQ ID NO: 4804647 - DNA, 25 bp, Homo sapien
tggggcacaggggtggtttgcccag

SEQ ID NO: 4804648 - DNA, 25 bp, Homo sapien
ctgcagatggggcacaggggtggtt

SEQ ID NO: 4804649 - DNA, 25 bp, Homo sapien
agatggggcacaggggtggtttgcc

SEQ ID NO: 4804650 - DNA, 25 bp, Homo sapien
ggcacaggggtggtttgcccagggc

SEQ ID NO: 4804651 - DNA, 25 bp, Homo sapien
ccagcccagagaggcgacccagctc

SEQ ID NO: 4804652 - DNA, 25 bp, Homo sapien
cccagcccagagaggcgacccagct

SEQ ID NO: 4804653 - DNA, 25 bp, Homo sapien
cccagagaggcgacccagctccctg

SEQ ID NO: 4804654 - DNA, 25 bp, Homo sapien
agagaggcgacccagctccctggag

SEQ ID NO: 4804655 - DNA, 25 bp, Homo sapien
cctttgccactagcctgggacaggg

SEQ ID NO: 4804656 - DNA, 25 bp, Homo sapien
cacattgagtaatccctgggcttgg

SEQ ID NO: 4804657 - DNA, 25 bp, Homo sapien
gacaggacctttgccactagcctgg

SEQ ID NO: 4804658 - DNA, 25 bp, Homo sapien
ggctgctttcacattgagtaatccc

SEQ ID NO: 4804659 - DNA, 25 bp, Homo sapien
ggcttccgctgtcatggagctgcag

SEQ ID NO: 4804660 - DNA, 25 bp, Homo sapien
gcagccaggcttccgctgtcatgga

SEQ ID NO: 4804661 - DNA, 25 bp, Homo sapien
gagctgcagaatccgggcaggatgc

SEQ ID NO: 4804662 - DNA, 25 bp, Homo sapien
gaatccgggcaggatgcttggcttt

SEQ ID NO: 4804663 - DNA, 25 bp, Homo sapien
gatgttgaagttggtccggccttga

SEQ ID NO: 4804664 - DNA, 25 bp, Homo sapien
gtgctgccagtaccattcgctcggg

SEQ ID NO: 4804665 - DNA, 25 bp, Homo sapien
tggaccaacagacatcacccctggt

SEQ ID NO: 4804666 - DNA, 25 bp, Homo sapien
cagtgcagtgagctgtccttgccgg

SEQ ID NO: 4804667 - DNA, 25 bp, Homo sapien
gagccaccagtctccatgaagtgtg

SEQ ID NO: 4804668 - DNA, 25 bp, Homo sapien
tgtctgaggtcgtgcttcactggcc

SEQ ID NO: 4804669 - DNA, 25 bp, Homo sapien
ggccgggccacgatgagccaccagt

SEQ ID NO: 4804670 - DNA, 25 bp, Homo sapien
aagtgtggcatttgacaggaggcac

SEQ ID NO: 4804671 - DNA, 25 bp, Homo sapien
gataaagatggaaccttctcactga

SEQ ID NO: 4804672 - DNA, 25 bp, Homo sapien
ccttctcactgaagacagttctcca

SEQ ID NO: 4804673 - DNA, 25 bp, Homo sapien
gccttctgagataaagatggaacct

SEQ ID NO: 4804674 - DNA, 25 bp, Homo sapien
tctgagataaagatggaaccttctc

SEQ ID NO: 4804675 - DNA, 25 bp, Homo sapien
tgcaggaggctcagttttatcttca

SEQ ID NO: 4804676 - DNA, 25 bp, Homo sapien
aaggtgacttgtaggtttctgaact

SEQ ID NO: 4804677 - DNA, 25 bp, Homo sapien
gaaggtgacttgtaggtttctgaac

SEQ ID NO: 4804678 - DNA, 25 bp, Homo sapien
gtttctgaactgccttgtgtacccc

SEQ ID NO: 4804679 - DNA, 25 bp, Homo sapien
ttctgaactgccttgtgtaccccat

SEQ ID NO: 4804680 - DNA, 25 bp, Homo sapien
tcaaacctgcatctcgggaggtggt

SEQ ID NO: 4804681 - DNA, 25 bp, Homo sapien
gggaaacagcactcaactcactggg

SEQ ID NO: 4804682 - DNA, 25 bp, Homo sapien
ctcactgggttacagagagaaccag

SEQ ID NO: 4804683 - DNA, 25 bp, Homo sapien
gaaccaggtggactcctattgatga

SEQ ID NO: 4804684 - DNA, 25 bp, Homo sapien
ggcagcagagccagatacacactca

SEQ ID NO: 4804685 - DNA, 25 bp, Homo sapien
tgtttaagtaatggtcagcttgctg

SEQ ID NO: 4804686 - DNA, 25 bp, Homo sapien
ggatttgctcggcagtttccagcaa

SEQ ID NO: 4804687 - DNA, 25 bp, Homo sapien
gaggcaggaggtgtccttaccacta

SEQ ID NO: 4804688 - DNA, 25 bp, Homo sapien
caccacgtctggcccaccttctttt

SEQ ID NO: 4804689 - DNA, 25 bp, Homo sapien
attttagattcagagggtacacatg

SEQ ID NO: 4804690 - DNA, 25 bp, Homo sapien
ttagattcagagggtacacatgcag

SEQ ID NO: 4804691 - DNA, 25 bp, Homo sapien
ccaccacgtctggcccaccttcttt

SEQ ID NO: 4804692 - DNA, 25 bp, Homo sapien
attgtacctcattgtgtttttttgg

SEQ ID NO: 4804693 - DNA, 25 bp, Homo sapien
gccaccgtgccattcattgtgtttt

SEQ ID NO: 4804694 - DNA, 25 bp, Homo sapien
tcaggtaattcccacacctcggcct

SEQ ID NO: 4804695 - DNA, 25 bp, Homo sapien
taatttgcccttccctgatgagtag

SEQ ID NO: 4804696 - DNA, 25 bp, Homo sapien
taagccagtgacctgctatatttca

SEQ ID NO: 4804697 - DNA, 25 bp, Homo sapien
ccccacattacagattgagactatg

SEQ ID NO: 4804698 - DNA, 25 bp, Homo sapien
tgacaagagggtgggaccccttctc

SEQ ID NO: 4804699 - DNA, 25 bp, Homo sapien
tgcagggtttaaacttcacagcatc

SEQ ID NO: 4804700 - DNA, 25 bp, Homo sapien
tgtcaaggcttatgctaacaggaga

SEQ ID NO: 4804701 - DNA, 25 bp, Homo sapien
gaccgtgtgatttgtgtagtgagcc

SEQ ID NO: 4804702 - DNA, 25 bp, Homo sapien
taacaggagacttgcaggagaccgt

SEQ ID NO: 4804703 - DNA, 25 bp, Homo sapien
taattcctccagtgacctgtcaagg

SEQ ID NO: 4804704 - DNA, 25 bp, Homo sapien
tatagaaaagcgaagggctgtcctt

SEQ ID NO: 4804705 - DNA, 25 bp, Homo sapien
gtgtcacaggcaaaaggcatcggga

SEQ ID NO: 4804706 - DNA, 25 bp, Homo sapien
tgctggcggttcatttcatgatcag

SEQ ID NO: 4804707 - DNA, 25 bp, Homo sapien
ggaacttcgtcacctccttgaatgc

SEQ ID NO: 4804708 - DNA, 25 bp, Homo sapien
actgaagtccatggaccacggaagt

SEQ ID NO: 4804709 - DNA, 25 bp, Homo sapien
taatgtacacctgtatcatgtgtag

SEQ ID NO: 4804710 - DNA, 25 bp, Homo sapien
ccatggaccacggaagtcgagaatt

SEQ ID NO: 4804711 - DNA, 25 bp, Homo sapien
gaagtcgagaattaatgtacacctg

SEQ ID NO: 4804712 - DNA, 25 bp, Homo sapien
cagccgagtttctgccctcatgagg

SEQ ID NO: 4804713 - DNA, 25 bp, Homo sapien
gaggtaattccatcgttctccccag

SEQ ID NO: 4804714 - DNA, 25 bp, Homo sapien
tttccacacgtggactcggatctgc

SEQ ID NO: 4804715 - DNA, 25 bp, Homo sapien
gattcaaaacttaaacagcgtctgc

SEQ ID NO: 4804716 - DNA, 25 bp, Homo sapien
caaacactagccacatgagtgtctt

SEQ ID NO: 4804717 - DNA, 25 bp, Homo sapien
tcggcaaacactagccacatgagtg

SEQ ID NO: 4804718 - DNA, 25 bp, Homo sapien
tcattcggcaaacactagccacatg

SEQ ID NO: 4804719 - DNA, 25 bp, Homo sapien
attcggcaaacactagccacatgag

SEQ ID NO: 4804720 - DNA, 25 bp, Homo sapien
ttccagaaccgcggccagccaccca

SEQ ID NO: 4804721 - DNA, 25 bp, Homo sapien
ccagaaccgcggccagccacccact

SEQ ID NO: 4804722 - DNA, 25 bp, Homo sapien
accaccttccagaaccgcggccagc

SEQ ID NO: 4804723 - DNA, 25 bp, Homo sapien
caccttccagaaccgcggccagcca

SEQ ID NO: 4804724 - DNA, 25 bp, Homo sapien
atctccagaggagtgattttctcag

SEQ ID NO: 4804725 - DNA, 25 bp, Homo sapien
tgcagtagtccctttctcacacctg

SEQ ID NO: 4804726 - DNA, 25 bp, Homo sapien
ctcaatctccagaggagtgattttc

SEQ ID NO: 4804727 - DNA, 25 bp, Homo sapien
tttctcacacctgtaccggccaagc

SEQ ID NO: 4804728 - DNA, 25 bp, Homo sapien
aaataaatattcaggcaacgcagtg

SEQ ID NO: 4804729 - DNA, 25 bp, Homo sapien
tcagttctcaagtgctgcaaaatgg

SEQ ID NO: 4804730 - DNA, 25 bp, Homo sapien
gagttaggattctcctcaaggtgcc

SEQ ID NO: 4804731 - DNA, 25 bp, Homo sapien
attcaggcaacgcagtgagcaggct

SEQ ID NO: 4804732 - DNA, 25 bp, Homo sapien
actgtcaaatggcagcacacaacca

SEQ ID NO: 4804733 - DNA, 25 bp, Homo sapien
ttaggatactgtcaaatggcagcac

SEQ ID NO: 4804734 - DNA, 25 bp, Homo sapien
tgtcaaatggcagcacacaaccaac

SEQ ID NO: 4804735 - DNA, 25 bp, Homo sapien
atactgtcaaatggcagcacacaac

SEQ ID NO: 4804736 - DNA, 25 bp, Homo sapien
ccttcaggaactgccagaaggctgc

SEQ ID NO: 4804737 - DNA, 25 bp, Homo sapien
tgtgccatggccttgtgctcccgga

SEQ ID NO: 4804738 - DNA, 25 bp, Homo sapien
gctggggtaatatctctgtcaaact

SEQ ID NO: 4804739 - DNA, 25 bp, Homo sapien
tctctgtcaaacttgctgtccttca

SEQ ID NO: 4804740 - DNA, 25 bp, Homo sapien
cagtggactgcaagaccgtgtgctg

SEQ ID NO: 4804741 - DNA, 25 bp, Homo sapien
gtgacagtgcccgatttttgcggca

SEQ ID NO: 4804742 - DNA, 25 bp, Homo sapien
cgccttacgtgccagtggactgcaa

SEQ ID NO: 4804743 - DNA, 25 bp, Homo sapien
gcatgcattcagagcttccgcctta

SEQ ID NO: 4804744 - DNA, 25 bp, Homo sapien
gcacgggatgcttcctcaggcctat

SEQ ID NO: 4804745 - DNA, 25 bp, Homo sapien
taaccagcgaagcaggctacatgga

SEQ ID NO: 4804746 - DNA, 25 bp, Homo sapien
ggaagggctcccctaactcaggcag

SEQ ID NO: 4804747 - DNA, 25 bp, Homo sapien
tgtttacaagtggagcagcccatgt

SEQ ID NO: 4804748 - DNA, 25 bp, Homo sapien
cccactgagcttccgcaaggttgag

SEQ ID NO: 4804749 - DNA, 25 bp, Homo sapien
tgctaaaggcccgagggacttcgtg

SEQ ID NO: 4804750 - DNA, 25 bp, Homo sapien
gaaaggtggcttgccttcctgctaa

SEQ ID NO: 4804751 - DNA, 25 bp, Homo sapien
gacttcgtgggctcattagaggtca

SEQ ID NO: 4804752 - DNA, 25 bp, Homo sapien
gcagaaggtggtgctcacttcctcg

SEQ ID NO: 4804753 - DNA, 25 bp, Homo sapien
cagaaggtggtgctcacttcctcgg

SEQ ID NO: 4804754 - DNA, 25 bp, Homo sapien
gaaggtggtgctcacttcctcgggg

SEQ ID NO: 4804755 - DNA, 25 bp, Homo sapien
ctgcagaaggtggtgctcacttcct

SEQ ID NO: 4804756 - DNA, 25 bp, Homo sapien
tgttcttgctgatgacgcagaggtc

SEQ ID NO: 4804757 - DNA, 25 bp, Homo sapien
cagaggtcaatgttgcttccggagc

SEQ ID NO: 4804758 - DNA, 25 bp, Homo sapien
tggcttcgctcaccagattcttggc

SEQ ID NO: 4804759 - DNA, 25 bp, Homo sapien
ttccggagcccaggtcgttgaagat

SEQ ID NO: 4804760 - DNA, 25 bp, Homo sapien
ccctggactccaatgtgcagttcca

SEQ ID NO: 4804761 - DNA, 25 bp, Homo sapien
cctggactccaatgtgcagttccat

SEQ ID NO: 4804762 - DNA, 25 bp, Homo sapien
gccacgtaatggtcaccacagctgt

SEQ ID NO: 4804763 - DNA, 25 bp, Homo sapien
aggtccacgtcggccacgtaatggt

SEQ ID NO: 4804764 - DNA, 25 bp, Homo sapien
atgacaaatgggcagcacttgtaaa

SEQ ID NO: 4804765 - DNA, 25 bp, Homo sapien
cgctacatgacaaatgggcagcact

SEQ ID NO: 4804766 - DNA, 25 bp, Homo sapien
ttaaactgaccagtaatggatcttt

SEQ ID NO: 4804767 - DNA, 25 bp, Homo sapien
tcattaaactgaccagtaatggatc

SEQ ID NO: 4804768 - DNA, 25 bp, Homo sapien
cattaaactgaccagtaatggatct

SEQ ID NO: 4804769 - DNA, 25 bp, Homo sapien
acagacccccaagttcattaaactg

SEQ ID NO: 4804770 - DNA, 25 bp, Homo sapien
tatagtgcaggtccaaaatagtact

SEQ ID NO: 4804771 - DNA, 25 bp, Homo sapien
caggtccaaaatagtactgccaaga

SEQ ID NO: 4804772 - DNA, 25 bp, Homo sapien
ctcggcatccactatagtgcaggtc

SEQ ID NO: 4804773 - DNA, 25 bp, Homo sapien
tccactatagtgcaggtccaaaata

SEQ ID NO: 4804774 - DNA, 25 bp, Homo sapien
tgactgcatctttaacgcctagctg

SEQ ID NO: 4804775 - DNA, 25 bp, Homo sapien
ttctgggtgaatacgcctgcctgtg

SEQ ID NO: 4804776 - DNA, 25 bp, Homo sapien
ttagagccgggagtgagccagtgac

SEQ ID NO: 4804777 - DNA, 25 bp, Homo sapien
tggtgctgggcacgcttagagccgg

SEQ ID NO: 4804778 - DNA, 25 bp, Homo sapien
aaagagtgcccttcgtaagtatgag

SEQ ID NO: 4804779 - DNA, 25 bp, Homo sapien
agatgtcagcggctgcacggccaca

SEQ ID NO: 4804780 - DNA, 25 bp, Homo sapien
acagccctggacagcgggtcactct

SEQ ID NO: 4804781 - DNA, 25 bp, Homo sapien
cacggccacaatgggctggaaaagg

SEQ ID NO: 4804782 - DNA, 25 bp, Homo sapien
gcggtgtgacctcagtgataaaagt

SEQ ID NO: 4804783 - DNA, 25 bp, Homo sapien
aacccccaagcaccaggatggtcat

SEQ ID NO: 4804784 - DNA, 25 bp, Homo sapien
gtgataaaagtcactccacattttt

SEQ ID NO: 4804785 - DNA, 25 bp, Homo sapien
gatgatacgaagtgtcatgcacagg

SEQ ID NO: 4804786 - DNA, 25 bp, Homo sapien
tgtgcaggctctgtgccaagtaccc

SEQ ID NO: 4804787 - DNA, 25 bp, Homo sapien
tgcaggctctgtgccaagtacccaa

SEQ ID NO: 4804788 - DNA, 25 bp, Homo sapien
tgtgtgcaggctctgtgccaagtac

SEQ ID NO: 4804789 - DNA, 25 bp, Homo sapien
ggctctgtgccaagtacccaattcc

SEQ ID NO: 4804790 - DNA, 25 bp, Homo sapien
acagacacccacaagtaacattatc

SEQ ID NO: 4804791 - DNA, 25 bp, Homo sapien
gacacccacaagtaacattatctgt

SEQ ID NO: 4804792 - DNA, 25 bp, Homo sapien
ctaacagacacccacaagtaacatt

SEQ ID NO: 4804793 - DNA, 25 bp, Homo sapien
taacagacacccacaagtaacatta

SEQ ID NO: 4804794 - DNA, 25 bp, Homo sapien
taaatctcaaaggacatctgaaaag

SEQ ID NO: 4804795 - DNA, 25 bp, Homo sapien
taatctcacattccgccatgcacaa

SEQ ID NO: 4804796 - DNA, 25 bp, Homo sapien
tgctggggtctcattacagcaggta

SEQ ID NO: 4804797 - DNA, 25 bp, Homo sapien
caagcacctctaatggaacgtggca

SEQ ID NO: 4804798 - DNA, 25 bp, Homo sapien
cgctgtgaaatatgctggattatca

SEQ ID NO: 4804799 - DNA, 25 bp, Homo sapien
tggattatcaattcaacatctgctg

SEQ ID NO: 4804800 - DNA, 25 bp, Homo sapien
gggagtcccgcagagacactttcaa

SEQ ID NO: 4804801 - DNA, 25 bp, Homo sapien
catctgctgtctttagggtccggga

SEQ ID NO: 4804802 - DNA, 25 bp, Homo sapien
aaggtgcttcggctaaacacggata

SEQ ID NO: 4804803 - DNA, 25 bp, Homo sapien
cactgtctgctgtgtgggttccgcc

SEQ ID NO: 4804804 - DNA, 25 bp, Homo sapien
cagggttcaagttgcacaggaaggt

SEQ ID NO: 4804805 - DNA, 25 bp, Homo sapien
cagcgagtggtcaccttcctatgga

SEQ ID NO: 4804806 - DNA, 25 bp, Homo sapien
gaatacagaattcatatgccgcttg

SEQ ID NO: 4804807 - DNA, 25 bp, Homo sapien
tatgccgcttgtcagggctcctgag

SEQ ID NO: 4804808 - DNA, 25 bp, Homo sapien
ctgagctcagagtcgcacagatgca

SEQ ID NO: 4804809 - DNA, 25 bp, Homo sapien
ggctcctgagctcagagtcgcacag

SEQ ID NO: 4804810 - DNA, 25 bp, Homo sapien
tattacgctttcagataagaaggcc

SEQ ID NO: 4804811 - DNA, 25 bp, Homo sapien
gagggctctaacgtcaggctgacca

SEQ ID NO: 4804812 - DNA, 25 bp, Homo sapien
tggctgaacccatcggagggctcta

SEQ ID NO: 4804813 - DNA, 25 bp, Homo sapien
cacaagctatttagggtggagggca

SEQ ID NO: 4804814 - DNA, 25 bp, Homo sapien
tctagaattctaactgtagggcaca

SEQ ID NO: 4804815 - DNA, 25 bp, Homo sapien
gtctagaattctaactgtagggcac

SEQ ID NO: 4804816 - DNA, 25 bp, Homo sapien
gcttttggcagctctcaacttgaga

SEQ ID NO: 4804817 - DNA, 25 bp, Homo sapien
gatctgatcctctcagcttttggca

SEQ ID NO: 4804818 - DNA, 25 bp, Homo sapien
ccttcagcagccctcgcaagatatt

SEQ ID NO: 4804819 - DNA, 25 bp, Homo sapien
tttgaatcatctccctgtgatgtga

SEQ ID NO: 4804820 - DNA, 25 bp, Homo sapien
agggtcctgcgcacaccactaccct

SEQ ID NO: 4804821 - DNA, 25 bp, Homo sapien
tgcgcacaccactacccttcagcag

SEQ ID NO: 4804822 - DNA, 25 bp, Homo sapien
agctaatgctcccaagttatggaca

SEQ ID NO: 4804823 - DNA, 25 bp, Homo sapien
gctgcgcccagtcgagactctgtct

SEQ ID NO: 4804824 - DNA, 25 bp, Homo sapien
tatcgaaaggatgctgacattcccc

SEQ ID NO: 4804825 - DNA, 25 bp, Homo sapien
tatggacacaactgatctaagaaac

SEQ ID NO: 4804826 - DNA, 25 bp, Homo sapien
tgagctatccccatgtaccgagggt

SEQ ID NO: 4804827 - DNA, 25 bp, Homo sapien
gaaaacccctatctgtcctggctga

SEQ ID NO: 4804828 - DNA, 25 bp, Homo sapien
gagggtaggtatcgcagtttccagc

SEQ ID NO: 4804829 - DNA, 25 bp, Homo sapien
tatccgagaagcgaagaaatcttgc

SEQ ID NO: 4804830 - DNA, 25 bp, Homo sapien
ttatgtgccgaatgctggtttagcg

SEQ ID NO: 4804831 - DNA, 25 bp, Homo sapien
ccgaatgctggtttagcggccagat

SEQ ID NO: 4804832 - DNA, 25 bp, Homo sapien
gccagatgtagtgccgtggaggagt

SEQ ID NO: 4804833 - DNA, 25 bp, Homo sapien
acgtggtaccatgatggatccaggc

SEQ ID NO: 4804834 - DNA, 25 bp, Homo sapien
ctgcgacagtgaccatggaagagct

SEQ ID NO: 4804835 - DNA, 25 bp, Homo sapien
tagacttaagtggagtatcattcag

SEQ ID NO: 4804836 - DNA, 25 bp, Homo sapien
tggcggggtggagacaatctatcat

SEQ ID NO: 4804837 - DNA, 25 bp, Homo sapien
gagacaatctatcattaaagtagac

SEQ ID NO: 4804838 - DNA, 25 bp, Homo sapien
ttaaagtagacttaagtggagtatc

SEQ ID NO: 4804839 - DNA, 25 bp, Homo sapien
ctgagacactagatcattacgctct

SEQ ID NO: 4804840 - DNA, 25 bp, Homo sapien
gaatcccccacatgtgtggtcttgt

SEQ ID NO: 4804841 - DNA, 25 bp, Homo sapien
tcattacgctctgagatgaatcccc

SEQ ID NO: 4804842 - DNA, 25 bp, Homo sapien
tgccagatgcagaatcatctacagg

SEQ ID NO: 4804843 - DNA, 25 bp, Homo sapien
atgtctggcctaaacttatcttcaa

SEQ ID NO: 4804844 - DNA, 25 bp, Homo sapien
ctccatgtctggcctaaacttatct

SEQ ID NO: 4804845 - DNA, 25 bp, Homo sapien
tccatgtctggcctaaacttatctt

SEQ ID NO: 4804846 - DNA, 25 bp, Homo sapien
ttcctgcctagaaacaatattacag

SEQ ID NO: 4804847 - DNA, 25 bp, Homo sapien
taagacaagtaaacataggacttgg

SEQ ID NO: 4804848 - DNA, 25 bp, Homo sapien
taaacccacagactcttggaacaaa

SEQ ID NO: 4804849 - DNA, 25 bp, Homo sapien
gggaggctctctacattatcagaca

SEQ ID NO: 4804850 - DNA, 25 bp, Homo sapien
gagcatttcctttaactgttctgaa

SEQ ID NO: 4804851 - DNA, 25 bp, Homo sapien
gaggaactctctggtggtggaaggg

SEQ ID NO: 4804852 - DNA, 25 bp, Homo sapien
tgaggaactctctggtggtggaagg

SEQ ID NO: 4804853 - DNA, 25 bp, Homo sapien
aggaactctctggtggtggaaggga

SEQ ID NO: 4804854 - DNA, 25 bp, Homo sapien
cccaagatgtagtacaatggcttga

SEQ ID NO: 4804855 - DNA, 25 bp, Homo sapien
gctcatacaatgcttctgcctcagg

SEQ ID NO: 4804856 - DNA, 25 bp, Homo sapien
ttgcccaagatgtagtacaatggct

SEQ ID NO: 4804857 - DNA, 25 bp, Homo sapien
tcctgggctcatacaatgcttctgc

SEQ ID NO: 4804858 - DNA, 25 bp, Homo sapien
gaacacggcctaatctatagtagga

SEQ ID NO: 4804859 - DNA, 25 bp, Homo sapien
taaaatacaaaatcctcgagagcag

SEQ ID NO: 4804860 - DNA, 25 bp, Homo sapien
gctcttcaagagaccatcgtggtaa

SEQ ID NO: 4804861 - DNA, 25 bp, Homo sapien
tatagcaagcacctagaacacggcc

SEQ ID NO: 4804862 - DNA, 25 bp, Homo sapien
gatccatgaggatagatgctgtaga

SEQ ID NO: 4804863 - DNA, 25 bp, Homo sapien
ccatggtgacataaggcaacttatc

SEQ ID NO: 4804864 - DNA, 25 bp, Homo sapien
gaggtgaggtccagtaacatctact

SEQ ID NO: 4804865 - DNA, 25 bp, Homo sapien
gggctgcaccaatgtaaccttgata

SEQ ID NO: 4804866 - DNA, 25 bp, Homo sapien
gaatgaaggtcaggtcaggcaagct

SEQ ID NO: 4804867 - DNA, 25 bp, Homo sapien
tgaaaactgccaagacccatacaaa

SEQ ID NO: 4804868 - DNA, 25 bp, Homo sapien
tacaaataggagacgctaatagtcc

SEQ ID NO: 4804869 - DNA, 25 bp, Homo sapien
gaaatcgtgcataaagcgctttagc

SEQ ID NO: 4804870 - DNA, 25 bp, Homo sapien
gctgtcacaactctgggaagacggc

SEQ ID NO: 4804871 - DNA, 25 bp, Homo sapien
agctccaggttggaagaaatgagct

SEQ ID NO: 4804872 - DNA, 25 bp, Homo sapien
tccgattggctgtcacaactctggg

SEQ ID NO: 4804873 - DNA, 25 bp, Homo sapien
tctgcttcagcatccgattggctgt

SEQ ID NO: 4804874 - DNA, 25 bp, Homo sapien
tattaggagatatgaagtgtatttt

SEQ ID NO: 4804875 - DNA, 25 bp, Homo sapien
gaacagttcttgtcagcaacaacca

SEQ ID NO: 4804876 - DNA, 25 bp, Homo sapien
ttcttgtcagcaacaaccatccctt

SEQ ID NO: 4804877 - DNA, 25 bp, Homo sapien
tcagttgctcttgtatctgctccaa

SEQ ID NO: 4804878 - DNA, 25 bp, Homo sapien
cctttggaagcttgtatcccctctt

SEQ ID NO: 4804879 - DNA, 25 bp, Homo sapien
gatggtcgtgccagttttccggacc

SEQ ID NO: 4804880 - DNA, 25 bp, Homo sapien
ttgcaaaatcggcttccaagacggc

SEQ ID NO: 4804881 - DNA, 25 bp, Homo sapien
tatagaccaccccagcgatggtcgt

SEQ ID NO: 4804882 - DNA, 25 bp, Homo sapien
gttttccaacgaagacagtcttaca

SEQ ID NO: 4804883 - DNA, 25 bp, Homo sapien
agcactgttctcccgttttccaacg

SEQ ID NO: 4804884 - DNA, 25 bp, Homo sapien
cagtcttacaaaggggccgtgacgt

SEQ ID NO: 4804885 - DNA, 25 bp, Homo sapien
ccaacgaagacagtcttacaaaggg

SEQ ID NO: 4804886 - DNA, 25 bp, Homo sapien
tgattcccctgagtcacactagccg

SEQ ID NO: 4804887 - DNA, 25 bp, Homo sapien
gcttcaggagaaacccacgcccagg

SEQ ID NO: 4804888 - DNA, 25 bp, Homo sapien
taggagacggagataaacggtggcc

SEQ ID NO: 4804889 - DNA, 25 bp, Homo sapien
tcagaattctcgtatcacaccttgg

SEQ ID NO: 4804890 - DNA, 25 bp, Homo sapien
aaaagagaagcctccaactggtgga

SEQ ID NO: 4804891 - DNA, 25 bp, Homo sapien
agcctccaactggtggagcatacac

SEQ ID NO: 4804892 - DNA, 25 bp, Homo sapien
gagcatacaccgacacagccgccat

SEQ ID NO: 4804893 - DNA, 25 bp, Homo sapien
gagaagcctccaactggtggagcat

SEQ ID NO: 4804894 - DNA, 25 bp, Homo sapien
gggcaaacgccgcactagaacgatt

SEQ ID NO: 4804895 - DNA, 25 bp, Homo sapien
tcggaggcgggtgcaaacaaaaaga

SEQ ID NO: 4804896 - DNA, 25 bp, Homo sapien
caaaaagagccgagcacttccggcg

SEQ ID NO: 4804897 - DNA, 25 bp, Homo sapien
ccaagaaagcagttccgggtcggag

SEQ ID NO: 4804898 - DNA, 25 bp, Homo sapien
ctgtcacggtaaacacatctgaggg

SEQ ID NO: 4804899 - DNA, 25 bp, Homo sapien
gcatcctctgtcacggtaaacacat

SEQ ID NO: 4804900 - DNA, 25 bp, Homo sapien
tcctctgtcacggtaaacacatctg

SEQ ID NO: 4804901 - DNA, 25 bp, Homo sapien
ctctgtcacggtaaacacatctgag

SEQ ID NO: 4804902 - DNA, 25 bp, Homo sapien
acctaggcgacatagtgcaacccca

SEQ ID NO: 4804903 - DNA, 25 bp, Homo sapien
agctgtgattgtgttcaccgcactc

SEQ ID NO: 4804904 - DNA, 25 bp, Homo sapien
ccaacctaggcgacatagtgcaacc

SEQ ID NO: 4804905 - DNA, 25 bp, Homo sapien
cactccaacctaggcgacatagtgc

SEQ ID NO: 4804906 - DNA, 25 bp, Homo sapien
gaatcttacaatgggcacacctcct

SEQ ID NO: 4804907 - DNA, 25 bp, Homo sapien
gacttggcagcctatctacccagaa

SEQ ID NO: 4804908 - DNA, 25 bp, Homo sapien
tgggaaggctagcagtgtcaccact

SEQ ID NO: 4804909 - DNA, 25 bp, Homo sapien
gaagcaaagaggtactgatgtccca

SEQ ID NO: 4804910 - DNA, 25 bp, Homo sapien
gcagttactcagtcacatcaggtag

SEQ ID NO: 4804911 - DNA, 25 bp, Homo sapien
agaggtgatgtaccccagcagttac

SEQ ID NO: 4804912 - DNA, 25 bp, Homo sapien
cagaggagacttcggctgtgccatg

SEQ ID NO: 4804913 - DNA, 25 bp, Homo sapien
ccatttaaagtgtacggctcaatgt

SEQ ID NO: 4804914 - DNA, 25 bp, Homo sapien
aaccgtcagctgtacttagtggcaa

SEQ ID NO: 4804915 - DNA, 25 bp, Homo sapien
tgacctctgatccaagggacgtcga

SEQ ID NO: 4804916 - DNA, 25 bp, Homo sapien
cagaaaatgaaccatgcggagccag

SEQ ID NO: 4804917 - DNA, 25 bp, Homo sapien
cagtaacatgaaagcgggacggaca

SEQ ID NO: 4804918 - DNA, 25 bp, Homo sapien
tgagcgtctttcaccaggatgtggt

SEQ ID NO: 4804919 - DNA, 25 bp, Homo sapien
catctcgttgcccaggtgcttgtgg

SEQ ID NO: 4804920 - DNA, 25 bp, Homo sapien
gcttgcagcatttcgatgagcaggt

SEQ ID NO: 4804921 - DNA, 25 bp, Homo sapien
gctggaatttgtccccgcagtgcgg

SEQ ID NO: 4804922 - DNA, 25 bp, Homo sapien
agacaaactcctgccggtccagctg

SEQ ID NO: 4804923 - DNA, 25 bp, Homo sapien
ggcagacaaactcctgccggtccag

SEQ ID NO: 4804924 - DNA, 25 bp, Homo sapien
acttgaggcagacaaactcctgccg

SEQ ID NO: 4804925 - DNA, 25 bp, Homo sapien
tcctgcgcccgcaacaccaggctgt

SEQ ID NO: 4804926 - DNA, 25 bp, Homo sapien
gctgagggcatggattggaggtgca

SEQ ID NO: 4804927 - DNA, 25 bp, Homo sapien
gtgcaggtcagatgggctggcgtca

SEQ ID NO: 4804928 - DNA, 25 bp, Homo sapien
ggacagtcagaggacgtgggtccgg

SEQ ID NO: 4804929 - DNA, 25 bp, Homo sapien
agccttggtgccgagccaggcacgg

SEQ ID NO: 4804930 - DNA, 25 bp, Homo sapien
gcaccagcagctcagggggcccctc

SEQ ID NO: 4804931 - DNA, 25 bp, Homo sapien
accagcagctcagggggcccctcta

SEQ ID NO: 4804932 - DNA, 25 bp, Homo sapien
gcagctcagggggcccctctacatg

SEQ ID NO: 4804933 - DNA, 25 bp, Homo sapien
cagcagctcagggggcccctctaca

SEQ ID NO: 4804934 - DNA, 25 bp, Homo sapien
ccatgttcacacctacacgctgggt

SEQ ID NO: 4804935 - DNA, 25 bp, Homo sapien
ctgtgaagtgaaggcacacacgtgt

SEQ ID NO: 4804936 - DNA, 25 bp, Homo sapien
catttacgggttgatgggaagacag

SEQ ID NO: 4804937 - DNA, 25 bp, Homo sapien
ttgtacgctcacactcacggcaaca

SEQ ID NO: 4804938 - DNA, 25 bp, Homo sapien
caaattccgactctgagctctctgg

SEQ ID NO: 4804939 - DNA, 25 bp, Homo sapien
ggcccaaattccgactctgagctct

SEQ ID NO: 4804940 - DNA, 25 bp, Homo sapien
gcaaggtttgcctgctaagccagca

SEQ ID NO: 4804941 - DNA, 25 bp, Homo sapien
tcattcattcgagatttagggcctg

SEQ ID NO: 4804942 - DNA, 25 bp, Homo sapien
gggctccacacttccaccctctctg

SEQ ID NO: 4804943 - DNA, 25 bp, Homo sapien
gcagggcccgggggctccacacttc

SEQ ID NO: 4804944 - DNA, 25 bp, Homo sapien
ctccacacttccaccctctctgagc

SEQ ID NO: 4804945 - DNA, 25 bp, Homo sapien
cagcagggcccgggggctccacact

SEQ ID NO: 4804946 - DNA, 25 bp, Homo sapien
ccagtgtgttatttccagacccagg

SEQ ID NO: 4804947 - DNA, 25 bp, Homo sapien
ccccagccaactccagtgtgttatt

SEQ ID NO: 4804948 - DNA, 25 bp, Homo sapien
ctgcggtagacgtggggactgcccc

SEQ ID NO: 4804949 - DNA, 25 bp, Homo sapien
gtgttatttccagacccagggccac

SEQ ID NO: 4804950 - DNA, 25 bp, Homo sapien
gggctcccaggggccggcgcctctc

SEQ ID NO: 4804951 - DNA, 25 bp, Homo sapien
tgggtgttccatgaacgtggggaaa

SEQ ID NO: 4804952 - DNA, 25 bp, Homo sapien
ggctgataattagggtgcccagagc

SEQ ID NO: 4804953 - DNA, 25 bp, Homo sapien
cagccccgagaggcctgggtcctcc

SEQ ID NO: 4804954 - DNA, 25 bp, Homo sapien
aatcctggaagtgcacagcggggcc

SEQ ID NO: 4804955 - DNA, 25 bp, Homo sapien
aacaccagcagctcgctccagcagt

SEQ ID NO: 4804956 - DNA, 25 bp, Homo sapien
cggtagatgtggtcgaacaccagca

SEQ ID NO: 4804957 - DNA, 25 bp, Homo sapien
ctggacctggcggtagatgtggtcg

SEQ ID NO: 4804958 - DNA, 25 bp, Homo sapien
acctggcggtagatgtggtcgaaca

SEQ ID NO: 4804959 - DNA, 25 bp, Homo sapien
gtaggagatagaagcaccccgctct

SEQ ID NO: 4804960 - DNA, 25 bp, Homo sapien
gagaagtcaggaactgcacacagac

SEQ ID NO: 4804961 - DNA, 25 bp, Homo sapien
ggaactgggccaagcctaatgaaca

SEQ ID NO: 4804962 - DNA, 25 bp, Homo sapien
tgaacagctctgtctcgtaggagat

SEQ ID NO: 4804963 - DNA, 25 bp, Homo sapien
agcaggtcttgtactcactgctttc

SEQ ID NO: 4804964 - DNA, 25 bp, Homo sapien
cccctggggtccgattggtctggct

SEQ ID NO: 4804965 - DNA, 25 bp, Homo sapien
ccggtgggctgtgtaattctctggt

SEQ ID NO: 4804966 - DNA, 25 bp, Homo sapien
tctggctgtgaaggccggtgggctg

SEQ ID NO: 4804967 - DNA, 25 bp, Homo sapien
tggctgacacaccacgggctggcca

SEQ ID NO: 4804968 - DNA, 25 bp, Homo sapien
tactatcgaatctaccatgctggga

SEQ ID NO: 4804969 - DNA, 25 bp, Homo sapien
gacggtcccagaacaatcgtgtgct

SEQ ID NO: 4804970 - DNA, 25 bp, Homo sapien
ttataagcgcaggacaaagtgaccc

SEQ ID NO: 4804971 - DNA, 25 bp, Homo sapien
cggatgtcaaaatgggtcactgggc

SEQ ID NO: 4804972 - DNA, 25 bp, Homo sapien
cccagtccacgatggagatgaaggt

SEQ ID NO: 4804973 - DNA, 25 bp, Homo sapien
gggcggcttttggtgggctcctgca

SEQ ID NO: 4804974 - DNA, 25 bp, Homo sapien
acctgcgtgcccagtccacgatgga

SEQ ID NO: 4804975 - DNA, 25 bp, Homo sapien
tccttgaagaccatgcacctgcgtg

SEQ ID NO: 4804976 - DNA, 25 bp, Homo sapien
tggcataaggctccgggtactcaga

SEQ ID NO: 4804977 - DNA, 25 bp, Homo sapien
gcttgaagccattggcccgaatctg

SEQ ID NO: 4804978 - DNA, 25 bp, Homo sapien
ggtcccgcttgtacatcggcccaaa

SEQ ID NO: 4804979 - DNA, 25 bp, Homo sapien
gatgagctcaggcacgttgggccct

SEQ ID NO: 4804980 - DNA, 25 bp, Homo sapien
agcgcttgcgctgcgtcttgtcgat

SEQ ID NO: 4804981 - DNA, 25 bp, Homo sapien
atccccaccgtcaggcatttctgga

SEQ ID NO: 4804982 - DNA, 25 bp, Homo sapien
tcttgtcgatcttgcagctctggct

SEQ ID NO: 4804983 - DNA, 25 bp, Homo sapien
tctggctctcggtgcacgtgtagtg

SEQ ID NO: 4804984 - DNA, 25 bp, Homo sapien
ggtcctcgtcgtacgaatagtccat

SEQ ID NO: 4804985 - DNA, 25 bp, Homo sapien
cttgcagctctcacacgtgagcagt

SEQ ID NO: 4804986 - DNA, 25 bp, Homo sapien
cacgtgagcagtccgtagtggtagc

SEQ ID NO: 4804987 - DNA, 25 bp, Homo sapien
tagtggtagccggacaccttgtccc

SEQ ID NO: 4804988 - DNA, 25 bp, Homo sapien
ctgcggagggacagcgggtcaggga

SEQ ID NO: 4804989 - DNA, 25 bp, Homo sapien
gccggcggagaccggcagcctgggg

SEQ ID NO: 4804990 - DNA, 25 bp, Homo sapien
tgcggagggacagcgggtcagggag

SEQ ID NO: 4804991 - DNA, 25 bp, Homo sapien
ggcggagaccggcagcctggggtcc

SEQ ID NO: 4804992 - DNA, 25 bp, Homo sapien
ggtgggtccggtgcagtccccgcgc

SEQ ID NO: 4804993 - DNA, 25 bp, Homo sapien
cgcgcagcgtcccggggtgggtccg

SEQ ID NO: 4804994 - DNA, 25 bp, Homo sapien
ccggcacccaccgagcgccccgcgc

SEQ ID NO: 4804995 - DNA, 25 bp, Homo sapien
tctgtgcccaggcgctgccgccggc

SEQ ID NO: 4804996 - DNA, 25 bp, Homo sapien
cgatgcgcttcgattgggattcgtt

SEQ ID NO: 4804997 - DNA, 25 bp, Homo sapien
tgcgcttcgattgggattcgtttgt

SEQ ID NO: 4804998 - DNA, 25 bp, Homo sapien
ggttcgatgcgcttcgattgggatt

SEQ ID NO: 4804999 - DNA, 25 bp, Homo sapien
tcgattgggattcgtttgtctgaga

SEQ ID NO: 4805000 - DNA, 25 bp, Homo sapien
agaaaaagagatgggctcagccgcg

SEQ ID NO: 4805001 - DNA, 25 bp, Homo sapien
tgggaacccgacagagacgaaggag

SEQ ID NO: 4805002 - DNA, 25 bp, Homo sapien
aacccgacagagacgaaggaggcag

SEQ ID NO: 4805003 - DNA, 25 bp, Homo sapien
gctcagccgcggggaagacgccagg

SEQ ID NO: 4805004 - DNA, 25 bp, Homo sapien
gatgacggccgctcgggccggggac

SEQ ID NO: 4805005 - DNA, 25 bp, Homo sapien
cgcgatgacggccgctcgggccggg

SEQ ID NO: 4805006 - DNA, 25 bp, Homo sapien
gccgcccgcccgcgatgacggccgc

SEQ ID NO: 4805007 - DNA, 25 bp, Homo sapien
cccgcccgcgatgacggccgctcgg

SEQ ID NO: 4805008 - DNA, 25 bp, Homo sapien
ggccgctccgaggcgcacctgggac

SEQ ID NO: 4805009 - DNA, 25 bp, Homo sapien
gccgctccgaggcgcacctgggacc

SEQ ID NO: 4805010 - DNA, 25 bp, Homo sapien
gccctgcgccaacccgccgcgccgg

SEQ ID NO: 4805011 - DNA, 25 bp, Homo sapien
gggccgctccgaggcgcacctggga

SEQ ID NO: 4805012 - DNA, 25 bp, Homo sapien
ctctccgcagtccagctcgagtctt

SEQ ID NO: 4805013 - DNA, 25 bp, Homo sapien
cctctccgcagtccagctcgagtct

SEQ ID NO: 4805014 - DNA, 25 bp, Homo sapien
agctcgagtcttcgccctcatcctc

SEQ ID NO: 4805015 - DNA, 25 bp, Homo sapien
agtccagctcgagtcttcgccctca

SEQ ID NO: 4805016 - DNA, 25 bp, Homo sapien
ctgcggagcccgagtgccccgcgat

SEQ ID NO: 4805017 - DNA, 25 bp, Homo sapien
ggcaggtatagggcagtgggggcct

SEQ ID NO: 4805018 - DNA, 25 bp, Homo sapien
gcaggtatagggcagtgggggcctt

SEQ ID NO: 4805019 - DNA, 25 bp, Homo sapien
tcgtgaggatgaacccaagcagtag

SEQ ID NO: 4805020 - DNA, 25 bp, Homo sapien
tcttcctcgctaagggtgggtcgtg

SEQ ID NO: 4805021 - DNA, 25 bp, Homo sapien
tctgtgaagtgggtagatgaccgct

SEQ ID NO: 4805022 - DNA, 25 bp, Homo sapien
aacccagctgggtcgtggcgaatgc

SEQ ID NO: 4805023 - DNA, 25 bp, Homo sapien
ggcagcccaggtgggacggtggcga

SEQ ID NO: 4805024 - DNA, 25 bp, Homo sapien
gcagcgctctcacaccggatgaggg

SEQ ID NO: 4805025 - DNA, 25 bp, Homo sapien
gctccggcagcccaggtgggacggt

SEQ ID NO: 4805026 - DNA, 25 bp, Homo sapien
tctcacaccggatgagggtggcagt

SEQ ID NO: 4805027 - DNA, 25 bp, Homo sapien
ccccctcacaccacggcgggcggca

SEQ ID NO: 4805028 - DNA, 25 bp, Homo sapien
ctgtgggtgcgcagaaaccccctca

SEQ ID NO: 4805029 - DNA, 25 bp, Homo sapien
ccctcacaccacggcgggcggcagc

SEQ ID NO: 4805030 - DNA, 25 bp, Homo sapien
tgtgggtgcgcagaaaccccctcac

SEQ ID NO: 4805031 - DNA, 25 bp, Homo sapien
tcttgccagttatgtaacctcaagc

SEQ ID NO: 4805032 - DNA, 25 bp, Homo sapien
taggtgctcaatcgatgctggttta

SEQ ID NO: 4805033 - DNA, 25 bp, Homo sapien
cctcaagcaaatgacttaccctttc

SEQ ID NO: 4805034 - DNA, 25 bp, Homo sapien
gatcctgccgaatagtaggtgctca

SEQ ID NO: 4805035 - DNA, 25 bp, Homo sapien
ctgggaagccataccaatgtagcgc

SEQ ID NO: 4805036 - DNA, 25 bp, Homo sapien
ccatattattggctggcacccagga

SEQ ID NO: 4805037 - DNA, 25 bp, Homo sapien
aatgtagcgcctgcagtattccaca

SEQ ID NO: 4805038 - DNA, 25 bp, Homo sapien
caggtgggacttctcgagactttaa

SEQ ID NO: 4805039 - DNA, 25 bp, Homo sapien
ggcggtgggccaatgcgtcccttct

SEQ ID NO: 4805040 - DNA, 25 bp, Homo sapien
catgcgtgaagcaccaattacggcg

SEQ ID NO: 4805041 - DNA, 25 bp, Homo sapien
tatgaagattactgagacgacatgc

SEQ ID NO: 4805042 - DNA, 25 bp, Homo sapien
attacggcgcctggactcacgaggc

SEQ ID NO: 4805043 - DNA, 25 bp, Homo sapien
tattggttcaaatacagtacctaac

SEQ ID NO: 4805044 - DNA, 25 bp, Homo sapien
gtagtcaattcacagaacagggccc

SEQ ID NO: 4805045 - DNA, 25 bp, Homo sapien
ttggtcacatttccacaggtagtca

SEQ ID NO: 4805046 - DNA, 25 bp, Homo sapien
tgcagagcccgccagctatcatttg

SEQ ID NO: 4805047 - DNA, 25 bp, Homo sapien
cagggacatcccgtttcctcgattc

SEQ ID NO: 4805048 - DNA, 25 bp, Homo sapien
tcagggacatcccgtttcctcgatt

SEQ ID NO: 4805049 - DNA, 25 bp, Homo sapien
gatgtgtgtgccactagagccctta

SEQ ID NO: 4805050 - DNA, 25 bp, Homo sapien
aacctgggggtaggctcgtggatgt

SEQ ID NO: 4805051 - DNA, 25 bp, Homo sapien
tggaggtggacctagggcaggtaac

SEQ ID NO: 4805052 - DNA, 25 bp, Homo sapien
tgtgccactagagcccttaaaggtg

SEQ ID NO: 4805053 - DNA, 25 bp, Homo sapien
caacacttggtggaatgactgccgt

SEQ ID NO: 4805054 - DNA, 25 bp, Homo sapien
ccaccgtggctcgtgtcgtaggaca

SEQ ID NO: 4805055 - DNA, 25 bp, Homo sapien
gaaacagttcaggtatggctcccaa

SEQ ID NO: 4805056 - DNA, 25 bp, Homo sapien
ttcaggcccagaagacggatgctag

SEQ ID NO: 4805057 - DNA, 25 bp, Homo sapien
tcctcctatccctgggggcttgccc

SEQ ID NO: 4805058 - DNA, 25 bp, Homo sapien
ttcctcctatccctgggggcttgcc

SEQ ID NO: 4805059 - DNA, 25 bp, Homo sapien
ctcctatccctgggggcttgcccac

SEQ ID NO: 4805060 - DNA, 25 bp, Homo sapien
cctcctatccctgggggcttgccca

SEQ ID NO: 4805061 - DNA, 25 bp, Homo sapien
tgtcctctgagccaggttgagcgct

SEQ ID NO: 4805062 - DNA, 25 bp, Homo sapien
gacgagaccaccaaaccttgcaaag

SEQ ID NO: 4805063 - DNA, 25 bp, Homo sapien
gggaatttctccagattaacgacga

SEQ ID NO: 4805064 - DNA, 25 bp, Homo sapien
ccaggttgagcgctttgagacagat

SEQ ID NO: 4805065 - DNA, 25 bp, Homo sapien
catgtttcaatgtagtgcaaggagg

SEQ ID NO: 4805066 - DNA, 25 bp, Homo sapien
tccttttccatgtagctttcagagt

SEQ ID NO: 4805067 - DNA, 25 bp, Homo sapien
gccagagagcatgaataagttccaa

SEQ ID NO: 4805068 - DNA, 25 bp, Homo sapien
ctttcagagtcgtatttttatggca

SEQ ID NO: 4805069 - DNA, 25 bp, Homo sapien
cgtgtccttcaaaccaaattcacaa

SEQ ID NO: 4805070 - DNA, 25 bp, Homo sapien
gaaaacatgcacaacttttctctcc

SEQ ID NO: 4805071 - DNA, 25 bp, Homo sapien
tccactcgcaaaaaggctacctgtt

SEQ ID NO: 4805072 - DNA, 25 bp, Homo sapien
caaatacatctagtggctgacctaa

SEQ ID NO: 4805073 - DNA, 25 bp, Homo sapien
taaagacggtccacaggtcaggctc

SEQ ID NO: 4805074 - DNA, 25 bp, Homo sapien
ggctctcggcaatgaatgggctctt

SEQ ID NO: 4805075 - DNA, 25 bp, Homo sapien
aaagcccacgtcataaaaggactgg

SEQ ID NO: 4805076 - DNA, 25 bp, Homo sapien
ggatttgtacaatggcaacttgcag

SEQ ID NO: 4805077 - DNA, 25 bp, Homo sapien
gttcttgcctcatcagagagcaatt

SEQ ID NO: 4805078 - DNA, 25 bp, Homo sapien
ttcttgcctcatcagagagcaattt

SEQ ID NO: 4805079 - DNA, 25 bp, Homo sapien
taataattggacagatagaggcctc

SEQ ID NO: 4805080 - DNA, 25 bp, Homo sapien
gagttgaggagacagcaaacagcct

SEQ ID NO: 4805081 - DNA, 25 bp, Homo sapien
gacgtgaaaaacatgctagctggag

SEQ ID NO: 4805082 - DNA, 25 bp, Homo sapien
tggactacccagtatgcacacgacg

SEQ ID NO: 4805083 - DNA, 25 bp, Homo sapien
ccaactaagtggtctgcttgccaca

SEQ ID NO: 4805084 - DNA, 25 bp, Homo sapien
aagtggtctgcttgccacactggct

SEQ ID NO: 4805085 - DNA, 25 bp, Homo sapien
actaagtggtctgcttgccacactg

SEQ ID NO: 4805086 - DNA, 25 bp, Homo sapien
caggcatgcagccaactaagtggtc

SEQ ID NO: 4805087 - DNA, 25 bp, Homo sapien
gacaagcacctgaaagagttcaaag

SEQ ID NO: 4805088 - DNA, 25 bp, Homo sapien
ctgggtgtaggcaggacaagcacct

SEQ ID NO: 4805089 - DNA, 25 bp, Homo sapien
ggtgtaggcaggacaagcacctgaa

SEQ ID NO: 4805090 - DNA, 25 bp, Homo sapien
taggcaggacaagcacctgaaagag

SEQ ID NO: 4805091 - DNA, 25 bp, Homo sapien
ctggtgtagcgctggccaaagtcaa

SEQ ID NO: 4805092 - DNA, 25 bp, Homo sapien
tgtagcgctggccaaagtcaagagg

SEQ ID NO: 4805093 - DNA, 25 bp, Homo sapien
gcgctggccaaagtcaagagggtaa

SEQ ID NO: 4805094 - DNA, 25 bp, Homo sapien
ctggccaaagtcaagagggtaagga

SEQ ID NO: 4805095 - DNA, 25 bp, Homo sapien
tccaaggaaaggacgtggctcaatc

SEQ ID NO: 4805096 - DNA, 25 bp, Homo sapien
gaaggccatacattcaactctgtcg

SEQ ID NO: 4805097 - DNA, 25 bp, Homo sapien
agcagccgggccattaggaacctga

SEQ ID NO: 4805098 - DNA, 25 bp, Homo sapien
gggcaacatttctggtcagcagaca

SEQ ID NO: 4805099 - DNA, 25 bp, Homo sapien
ggaatgcagcaccaccttaaagagg

SEQ ID NO: 4805100 - DNA, 25 bp, Homo sapien
tggtcttgcaggaatgcagcaccac

SEQ ID NO: 4805101 - DNA, 25 bp, Homo sapien
tgcagcaccaccttaaagaggaggg

SEQ ID NO: 4805102 - DNA, 25 bp, Homo sapien
tccaggggcacattcaccatctttc

SEQ ID NO: 4805103 - DNA, 25 bp, Homo sapien
tcctggcaaatgtaccagtatcgtt

SEQ ID NO: 4805104 - DNA, 25 bp, Homo sapien
aatatatcgaatctcaggtaagcac

SEQ ID NO: 4805105 - DNA, 25 bp, Homo sapien
catgagatcaggaaagcggttcggc

SEQ ID NO: 4805106 - DNA, 25 bp, Homo sapien
tattcaattgttccagctgtgaggc

SEQ ID NO: 4805107 - DNA, 25 bp, Homo sapien
gaacttgtgatagaggtagatgagc

SEQ ID NO: 4805108 - DNA, 25 bp, Homo sapien
gctgacctttagctgatggaacttg

SEQ ID NO: 4805109 - DNA, 25 bp, Homo sapien
gtagatgagccgctcgatcacctcc

SEQ ID NO: 4805110 - DNA, 25 bp, Homo sapien
tttcatgcaagcatactcctcgttg

SEQ ID NO: 4805111 - DNA, 25 bp, Homo sapien
cctgcaggtgtgtggctatcagcca

SEQ ID NO: 4805112 - DNA, 25 bp, Homo sapien
gtgcctccaggatgctaagacttgc

SEQ ID NO: 4805113 - DNA, 25 bp, Homo sapien
aggctaaccacatactaccacaggg

SEQ ID NO: 4805114 - DNA, 25 bp, Homo sapien
ggctgactcttgacctgagggacac

SEQ ID NO: 4805115 - DNA, 25 bp, Homo sapien
aaatagttctgcctgtgtcacagcg

SEQ ID NO: 4805116 - DNA, 25 bp, Homo sapien
tgtagttcttcatcggagggcgagt

SEQ ID NO: 4805117 - DNA, 25 bp, Homo sapien
tcctgccacgtagagctcaagaggc

SEQ ID NO: 4805118 - DNA, 25 bp, Homo sapien
ctgcttgctgtaaacggtgagggaa

SEQ ID NO: 4805119 - DNA, 25 bp, Homo sapien
tcttcaatcaacatgggcgtgccca

SEQ ID NO: 4805120 - DNA, 25 bp, Homo sapien
gggatccaggctgcgagcttgttgg

SEQ ID NO: 4805121 - DNA, 25 bp, Homo sapien
aatggttccaggtcctcggctgata

SEQ ID NO: 4805122 - DNA, 25 bp, Homo sapien
gcagaagtggtgagtggccagaata

SEQ ID NO: 4805123 - DNA, 25 bp, Homo sapien
cacagacattcccatgtactgttcc

SEQ ID NO: 4805124 - DNA, 25 bp, Homo sapien
taaaaaggtgcggtatatattggta

SEQ ID NO: 4805125 - DNA, 25 bp, Homo sapien
tgtactgttccctgaaggccatgaa

SEQ ID NO: 4805126 - DNA, 25 bp, Homo sapien
tatatattggtaatgtggaggcaca

SEQ ID NO: 4805127 - DNA, 25 bp, Homo sapien
ataccaccagggtccctactacgta

SEQ ID NO: 4805128 - DNA, 25 bp, Homo sapien
tacgtagtagggaccctggtggtat

SEQ ID NO: 4805129 - DNA, 25 bp, Homo sapien
tgagggctggttgctctccgaagcc

SEQ ID NO: 4805130 - DNA, 25 bp, Homo sapien
aactcctgcccagacatgatccttt

SEQ ID NO: 4805131 - DNA, 25 bp, Homo sapien
actgtggtcactatcaccatggttg

SEQ ID NO: 4805132 - DNA, 25 bp, Homo sapien
catggttgctccagtgattggcctc

SEQ ID NO: 4805133 - DNA, 25 bp, Homo sapien
tccaggcatgccatcttctctgata

SEQ ID NO: 4805134 - DNA, 25 bp, Homo sapien
tggcccaatgctcttattccggcct

SEQ ID NO: 4805135 - DNA, 25 bp, Homo sapien
cccaatgctcttattccggcctcca

SEQ ID NO: 4805136 - DNA, 25 bp, Homo sapien
aatgctcttattccggcctccaggc

SEQ ID NO: 4805137 - DNA, 25 bp, Homo sapien
tgtcacgactgcatcgatatacccg

SEQ ID NO: 4805138 - DNA, 25 bp, Homo sapien
cgcggtccccacaaatgagacaggt

SEQ ID NO: 4805139 - DNA, 25 bp, Homo sapien
gagacaggttcgttgttcagcccga

SEQ ID NO: 4805140 - DNA, 25 bp, Homo sapien
ccatctggaggcatttgagcaggcg

SEQ ID NO: 4805141 - DNA, 25 bp, Homo sapien
gtagcctcactgctccccattacat

SEQ ID NO: 4805142 - DNA, 25 bp, Homo sapien
ctatctggttctcctcagtagcctc

SEQ ID NO: 4805143 - DNA, 25 bp, Homo sapien
ggttctcctcagtagcctcactgct

SEQ ID NO: 4805144 - DNA, 25 bp, Homo sapien
gctccccattacatctacctgcagt

SEQ ID NO: 4805145 - DNA, 25 bp, Homo sapien
caccagattcagaataatgggcccc

SEQ ID NO: 4805146 - DNA, 25 bp, Homo sapien
cagattcagaataatgggccccaaa

SEQ ID NO: 4805147 - DNA, 25 bp, Homo sapien
ccagattcagaataatgggccccaa

SEQ ID NO: 4805148 - DNA, 25 bp, Homo sapien
gattcagaataatgggccccaaaca

SEQ ID NO: 4805149 - DNA, 25 bp, Homo sapien
tgtatgactccacagatcaggcctg

SEQ ID NO: 4805150 - DNA, 25 bp, Homo sapien
gaaataagacttcctgcctagcgac

SEQ ID NO: 4805151 - DNA, 25 bp, Homo sapien
ctgccacagtgaaagcttgaataga

SEQ ID NO: 4805152 - DNA, 25 bp, Homo sapien
tagcgactggcagggctgaaagacc

SEQ ID NO: 4805153 - DNA, 25 bp, Homo sapien
tcccatgtctccatttcatgcttct

SEQ ID NO: 4805154 - DNA, 25 bp, Homo sapien
tgtctccatttcatgcttcttgtag

SEQ ID NO: 4805155 - DNA, 25 bp, Homo sapien
gcttcttgtagtctgctgaaaagtt

SEQ ID NO: 4805156 - DNA, 25 bp, Homo sapien
atttcatgcttcttgtagtctgctg

SEQ ID NO: 4805157 - DNA, 25 bp, Homo sapien
ggcatgatcgcttttttgccggatc

SEQ ID NO: 4805158 - DNA, 25 bp, Homo sapien
cggcatgatcgcttttttgccggat

SEQ ID NO: 4805159 - DNA, 25 bp, Homo sapien
gatcgcttttttgccggatcttttc

SEQ ID NO: 4805160 - DNA, 25 bp, Homo sapien
catgatcgcttttttgccggatctt

SEQ ID NO: 4805161 - DNA, 25 bp, Homo sapien
tccaccattggcgtgtagtggttgg

SEQ ID NO: 4805162 - DNA, 25 bp, Homo sapien
caccattggcgtgtagtggttggca

SEQ ID NO: 4805163 - DNA, 25 bp, Homo sapien
tttcagctccaccattggcgtgtag

SEQ ID NO: 4805164 - DNA, 25 bp, Homo sapien
agctccaccattggcgtgtagtggt

SEQ ID NO: 4805165 - DNA, 25 bp, Homo sapien
tctcaatggaagtatcgtggtcttc

SEQ ID NO: 4805166 - DNA, 25 bp, Homo sapien
cgtggtcttcctgagtgtccgtggc

SEQ ID NO: 4805167 - DNA, 25 bp, Homo sapien
tcttcctgagtgtccgtggcagccg

SEQ ID NO: 4805168 - DNA, 25 bp, Homo sapien
aatggaagtatcgtggtcttcctga

SEQ ID NO: 4805169 - DNA, 25 bp, Homo sapien
ccaagatctctggttctcatctgtc

SEQ ID NO: 4805170 - DNA, 25 bp, Homo sapien
tcatctgtcagatccttgatacaga

SEQ ID NO: 4805171 - DNA, 25 bp, Homo sapien
caaaaaacaagagcccaagatctct

SEQ ID NO: 4805172 - DNA, 25 bp, Homo sapien
tctgtcagatccttgatacagacat

SEQ ID NO: 4805173 - DNA, 25 bp, Homo sapien
ggaggcaggtatagtgggctttgga

SEQ ID NO: 4805174 - DNA, 25 bp, Homo sapien
gaggaggcaggtatagtgggctttg

SEQ ID NO: 4805175 - DNA, 25 bp, Homo sapien
aaggaggaggcaggtatagtgggct

SEQ ID NO: 4805176 - DNA, 25 bp, Homo sapien
aggcaggtatagtgggctttggagt

SEQ ID NO: 4805177 - DNA, 25 bp, Homo sapien
atacaaaacttggtaagcagacact

SEQ ID NO: 4805178 - DNA, 25 bp, Homo sapien
agagaagactgattataggttaaaa

SEQ ID NO: 4805179 - DNA, 25 bp, Homo sapien
gagaagactgattataggttaaaat

SEQ ID NO: 4805180 - DNA, 25 bp, Homo sapien
aagagaagactgattataggttaaa

SEQ ID NO: 4805181 - DNA, 25 bp, Homo sapien
tttgcaaagatttccttccaggcaa

SEQ ID NO: 4805182 - DNA, 25 bp, Homo sapien
tccaggcaaatgatgataagttcta

SEQ ID NO: 4805183 - DNA, 25 bp, Homo sapien
gggcaagagttaatgtactcttctc

SEQ ID NO: 4805184 - DNA, 25 bp, Homo sapien
gttctatcgttcttgagggctgtgg

SEQ ID NO: 4805185 - DNA, 25 bp, Homo sapien
ttgccagtcttcataatcacgtgag

SEQ ID NO: 4805186 - DNA, 25 bp, Homo sapien
cattggctaccgtaggtgtctggcc

SEQ ID NO: 4805187 - DNA, 25 bp, Homo sapien
tgggtctccaactgactgagccatc

SEQ ID NO: 4805188 - DNA, 25 bp, Homo sapien
ctgagccatcctgcagattctgtgt

SEQ ID NO: 4805189 - DNA, 25 bp, Homo sapien
ccaaggaactataaatgtagatgga

SEQ ID NO: 4805190 - DNA, 25 bp, Homo sapien
taaatgtagatggaagaaaatacgg

SEQ ID NO: 4805191 - DNA, 25 bp, Homo sapien
aaaatacggtgtgtgtagagagtga

SEQ ID NO: 4805192 - DNA, 25 bp, Homo sapien
aagtacagtggtcccaaggaactat

SEQ ID NO: 4805193 - DNA, 25 bp, Homo sapien
gccaagttctaagtcactcatgtgg

SEQ ID NO: 4805194 - DNA, 25 bp, Homo sapien
taaagtgtaaacagtctgtggccaa

SEQ ID NO: 4805195 - DNA, 25 bp, Homo sapien
tgttggataggcactactgtagcta

SEQ ID NO: 4805196 - DNA, 25 bp, Homo sapien
tcaccagcacaagggaggaactgac

SEQ ID NO: 4805197 - DNA, 25 bp, Homo sapien
tacatacaacgactgtacttcagat

SEQ ID NO: 4805198 - DNA, 25 bp, Homo sapien
ctgaggcatctacatacaacgactg

SEQ ID NO: 4805199 - DNA, 25 bp, Homo sapien
tctacatacaacgactgtacttcag

SEQ ID NO: 4805200 - DNA, 25 bp, Homo sapien
ggcatctacatacaacgactgtact

SEQ ID NO: 4805201 - DNA, 25 bp, Homo sapien
ggcccctggcctatacttttcagag

SEQ ID NO: 4805202 - DNA, 25 bp, Homo sapien
tagcaattaaccctactagagtcag

SEQ ID NO: 4805203 - DNA, 25 bp, Homo sapien
cagccaacattatgtgccgaggaca

SEQ ID NO: 4805204 - DNA, 25 bp, Homo sapien
taaaatgggactatcaggtgtatgc

SEQ ID NO: 4805205 - DNA, 25 bp, Homo sapien
aatctcaggttccttccctggcggg

SEQ ID NO: 4805206 - DNA, 25 bp, Homo sapien
tgtactcgggcactatagtcacaga

SEQ ID NO: 4805207 - DNA, 25 bp, Homo sapien
gaacaccacagatgcttcgtatgta

SEQ ID NO: 4805208 - DNA, 25 bp, Homo sapien
ttttgcctggccatttaagagcttc

SEQ ID NO: 4805209 - DNA, 25 bp, Homo sapien
gtatattgtaacagacatatgcaga

SEQ ID NO: 4805210 - DNA, 25 bp, Homo sapien
gatctagtacggtatcaaaagaaga

SEQ ID NO: 4805211 - DNA, 25 bp, Homo sapien
tatatctacgtaaaaccagattttc

SEQ ID NO: 4805212 - DNA, 25 bp, Homo sapien
gagaattcagctatcctttatgaag

SEQ ID NO: 4805213 - DNA, 25 bp, Homo sapien
tctaatagatgtattagcaaaaaag

SEQ ID NO: 4805214 - DNA, 25 bp, Homo sapien
ccaaaagtcacacggctactaaatg

SEQ ID NO: 4805215 - DNA, 25 bp, Homo sapien
tgccaaaagtcacacggctactaaa

SEQ ID NO: 4805216 - DNA, 25 bp, Homo sapien
aagtcacacggctactaaatggcag

SEQ ID NO: 4805217 - DNA, 25 bp, Homo sapien
tcttgcctgtcaactcaggaaaggc

SEQ ID NO: 4805218 - DNA, 25 bp, Homo sapien
caacagccgggacagtgaaaactct

SEQ ID NO: 4805219 - DNA, 25 bp, Homo sapien
gatgaaggatgcatcaccaacagcc

SEQ ID NO: 4805220 - DNA, 25 bp, Homo sapien
ttttccaggctgatgacatgtgtca

SEQ ID NO: 4805221 - DNA, 25 bp, Homo sapien
tgcaccgagtatataaaccccttag

SEQ ID NO: 4805222 - DNA, 25 bp, Homo sapien
aaatacagtgggcaacaccccatgt

SEQ ID NO: 4805223 - DNA, 25 bp, Homo sapien
gatgaaggccattatgccatgatac

SEQ ID NO: 4805224 - DNA, 25 bp, Homo sapien
taacccttagactttatccttgcac

SEQ ID NO: 4805225 - DNA, 25 bp, Homo sapien
tagtccaacagagagccgttttaaa

SEQ ID NO: 4805226 - DNA, 25 bp, Homo sapien
tagaactgagtcaacaggaatggaa

SEQ ID NO: 4805227 - DNA, 25 bp, Homo sapien
tagggagtcataaggaatggcactg

SEQ ID NO: 4805228 - DNA, 25 bp, Homo sapien
caaggcgcaaagtcaattagtccaa

SEQ ID NO: 4805229 - DNA, 25 bp, Homo sapien
cagcccatcctaccttttagtggaa

SEQ ID NO: 4805230 - DNA, 25 bp, Homo sapien
gaatgtttgtcgacacttggtatac

SEQ ID NO: 4805231 - DNA, 25 bp, Homo sapien
ggcacaatcatagcgtactgcattc

SEQ ID NO: 4805232 - DNA, 25 bp, Homo sapien
tttagtggaatgtttgtcgacactt

SEQ ID NO: 4805233 - DNA, 25 bp, Homo sapien
gataaagttgatcatggcaaatccc

SEQ ID NO: 4805234 - DNA, 25 bp, Homo sapien
tttgacagaattcaccaatggagac

SEQ ID NO: 4805235 - DNA, 25 bp, Homo sapien
gcacccagcatgcttcttttaagtg

SEQ ID NO: 4805236 - DNA, 25 bp, Homo sapien
taactgttataaggtctcattttct

SEQ ID NO: 4805237 - DNA, 25 bp, Homo sapien
tacgttagtgctttaagcctctcct

SEQ ID NO: 4805238 - DNA, 25 bp, Homo sapien
tcttccttatacttgcttcagatgt

SEQ ID NO: 4805239 - DNA, 25 bp, Homo sapien
ccagctacttcggattagtttgtgt

SEQ ID NO: 4805240 - DNA, 25 bp, Homo sapien
tagtttcttacaatggacgcttacg

SEQ ID NO: 4805241 - DNA, 25 bp, Homo sapien
tgatatgttacgttttcatttagtt

SEQ ID NO: 4805242 - DNA, 25 bp, Homo sapien
gatatgttacgttttcatttagtta

SEQ ID NO: 4805243 - DNA, 25 bp, Homo sapien
tttgatatgttacgttttcatttag

SEQ ID NO: 4805244 - DNA, 25 bp, Homo sapien
ttgatatgttacgttttcatttagt

SEQ ID NO: 4805245 - DNA, 25 bp, Homo sapien
gttgctctaggcctcacaacatgca

SEQ ID NO: 4805246 - DNA, 25 bp, Homo sapien
gacagtctaatttagttccaggaaa

SEQ ID NO: 4805247 - DNA, 25 bp, Homo sapien
ggtatcactccctttcagcttgaag

SEQ ID NO: 4805248 - DNA, 25 bp, Homo sapien
gaaactttatccaacatacctccta

SEQ ID NO: 4805249 - DNA, 25 bp, Homo sapien
ggagatacccctctaactgtatagc

SEQ ID NO: 4805250 - DNA, 25 bp, Homo sapien
aaacaatgtgcttttggcaactctg

SEQ ID NO: 4805251 - DNA, 25 bp, Homo sapien
tgagctctttcactacctgctgctg

SEQ ID NO: 4805252 - DNA, 25 bp, Homo sapien
tagtcagagatggtaatcaaccacc

SEQ ID NO: 4805253 - DNA, 25 bp, Homo sapien
taaagccctggctagtctactggcc

SEQ ID NO: 4805254 - DNA, 25 bp, Homo sapien
tgaactactgcactgtcagggctgg

SEQ ID NO: 4805255 - DNA, 25 bp, Homo sapien
tccaacccaggatattcggagagct

SEQ ID NO: 4805256 - DNA, 25 bp, Homo sapien
gatgtgcataaatactccaacccag

SEQ ID NO: 4805257 - DNA, 25 bp, Homo sapien
gacaagtcaacaaaagtctccgcac

SEQ ID NO: 4805258 - DNA, 25 bp, Homo sapien
tagccccatgattctcaaggtataa

SEQ ID NO: 4805259 - DNA, 25 bp, Homo sapien
gggccaaatgatcagacacgagaca

SEQ ID NO: 4805260 - DNA, 25 bp, Homo sapien
ggttcattgcaatgagcctcagcct

SEQ ID NO: 4805261 - DNA, 25 bp, Homo sapien
ttcgccatgttgccttgcccacact

SEQ ID NO: 4805262 - DNA, 25 bp, Homo sapien
tttgaacacttttaagagatgacac

SEQ ID NO: 4805263 - DNA, 25 bp, Homo sapien
acatgaatgaccaataagtacatga

SEQ ID NO: 4805264 - DNA, 25 bp, Homo sapien
tatggtacggtcaaaggaatactcc

SEQ ID NO: 4805265 - DNA, 25 bp, Homo sapien
gctgaaacaagcacgaaagagcaca

SEQ ID NO: 4805266 - DNA, 25 bp, Homo sapien
tagaatgtggattactagggtgcac

SEQ ID NO: 4805267 - DNA, 25 bp, Homo sapien
tctatcatgatggaaaccagaagtt

SEQ ID NO: 4805268 - DNA, 25 bp, Homo sapien
gccaagtgttaaactgtcagtttcc

SEQ ID NO: 4805269 - DNA, 25 bp, Homo sapien
accttggccaagtgttaaactgtca

SEQ ID NO: 4805270 - DNA, 25 bp, Homo sapien
tggccaagtgttaaactgtcagttt

SEQ ID NO: 4805271 - DNA, 25 bp, Homo sapien
cttggccaagtgttaaactgtcagt

SEQ ID NO: 4805272 - DNA, 25 bp, Homo sapien
tgaatttaagcaacccctttcagct

SEQ ID NO: 4805273 - DNA, 25 bp, Homo sapien
tgtattcccttgttatcaagcactg

SEQ ID NO: 4805274 - DNA, 25 bp, Homo sapien
gaagagaagaattcccatgtattcc

SEQ ID NO: 4805275 - DNA, 25 bp, Homo sapien
gttattatagcctcagcatgctaag

SEQ ID NO: 4805276 - DNA, 25 bp, Homo sapien
actgaatatacgcaaagtgcctggc

SEQ ID NO: 4805277 - DNA, 25 bp, Homo sapien
tttgggatcccaagtcacgtgacag

SEQ ID NO: 4805278 - DNA, 25 bp, Homo sapien
tactggaattttagggtacgctagc

SEQ ID NO: 4805279 - DNA, 25 bp, Homo sapien
cagagcaagttcgtggtgccaggct

SEQ ID NO: 4805280 - DNA, 25 bp, Homo sapien
gacacaacctggaaggacatactct

SEQ ID NO: 4805281 - DNA, 25 bp, Homo sapien
tactctcaaacgtgaagcaatggtt

SEQ ID NO: 4805282 - DNA, 25 bp, Homo sapien
taaaagatgagctcggacacaacct

SEQ ID NO: 4805283 - DNA, 25 bp, Homo sapien
tacaccaagatcctcaaccagctgg

SEQ ID NO: 4805284 - DNA, 25 bp, Homo sapien
tttgccatgtgatgaagaccactgt

SEQ ID NO: 4805285 - DNA, 25 bp, Homo sapien
gcactgcaaaactacaacatatgtc

SEQ ID NO: 4805286 - DNA, 25 bp, Homo sapien
gagtaattcaagtatagtgcaatgg

SEQ ID NO: 4805287 - DNA, 25 bp, Homo sapien
taggatggccttactcctttggaga

SEQ ID NO: 4805288 - DNA, 25 bp, Homo sapien
caatgtccttcctagtgttcaaaaa

SEQ ID NO: 4805289 - DNA, 25 bp, Homo sapien
tgaaaggttacagggcatctcaatg

SEQ ID NO: 4805290 - DNA, 25 bp, Homo sapien
ccctagagtctagagaactgggtgt

SEQ ID NO: 4805291 - DNA, 25 bp, Homo sapien
gtggagcagagagaacactcagtgc

SEQ ID NO: 4805292 - DNA, 25 bp, Homo sapien
aaagaatattgggtaacattgagaa

SEQ ID NO: 4805293 - DNA, 25 bp, Homo sapien
caaagaatattgggtaacattgaga

SEQ ID NO: 4805294 - DNA, 25 bp, Homo sapien
gtcaagctctgccaattcatcctga

SEQ ID NO: 4805295 - DNA, 25 bp, Homo sapien
tgggtcaagctctgccaattcatcc

SEQ ID NO: 4805296 - DNA, 25 bp, Homo sapien
caagctctgccaattcatcctgaca

SEQ ID NO: 4805297 - DNA, 25 bp, Homo sapien
gctctgccaattcatcctgacagaa

SEQ ID NO: 4805298 - DNA, 25 bp, Homo sapien
gcctttctgtgagtcctcctcctcc

SEQ ID NO: 4805299 - DNA, 25 bp, Homo sapien
tcttgcctttctgtgagtcctcctc

SEQ ID NO: 4805300 - DNA, 25 bp, Homo sapien
caaacatgccacattctttcttgcc

SEQ ID NO: 4805301 - DNA, 25 bp, Homo sapien
ctttcttgcctttctgtgagtcctc

SEQ ID NO: 4805302 - DNA, 25 bp, Homo sapien
gaaaaatccaagatgcctgtcagaa

SEQ ID NO: 4805303 - DNA, 25 bp, Homo sapien
gcatgttctgcaacagccggatgga

SEQ ID NO: 4805304 - DNA, 25 bp, Homo sapien
taatctcaaagagcaaccctgatgc

SEQ ID NO: 4805305 - DNA, 25 bp, Homo sapien
taaaaccctacctttgcgcagtgca

SEQ ID NO: 4805306 - DNA, 25 bp, Homo sapien
tctaaagcagaacagggaaacagtt

SEQ ID NO: 4805307 - DNA, 25 bp, Homo sapien
tataggtggacccacagagacatgc

SEQ ID NO: 4805308 - DNA, 25 bp, Homo sapien
gatcctaggcataaagtatctcctg

SEQ ID NO: 4805309 - DNA, 25 bp, Homo sapien
taaagcagccaagggttctaaagca

SEQ ID NO: 4805310 - DNA, 25 bp, Homo sapien
gagagcctccctttattcggaaatg

SEQ ID NO: 4805311 - DNA, 25 bp, Homo sapien
ggtgcgagcaccctttgtaatgcag

SEQ ID NO: 4805312 - DNA, 25 bp, Homo sapien
tcagagaactgcgagtttatggcgc

SEQ ID NO: 4805313 - DNA, 25 bp, Homo sapien
ataaatcgggtttgccgccggagcg

SEQ ID NO: 4805314 - DNA, 25 bp, Homo sapien
gccgcctccccctccgctaggcggc

SEQ ID NO: 4805315 - DNA, 25 bp, Homo sapien
gaggctccaggaaccccgccgagcc

SEQ ID NO: 4805316 - DNA, 25 bp, Homo sapien
agcgcggcgggaggctccaggaacc

SEQ ID NO: 4805317 - DNA, 25 bp, Homo sapien
gggagcgcggcgggaggctccagga

SEQ ID NO: 4805318 - DNA, 25 bp, Homo sapien
gggtttgttgctccgccatgaccgg

SEQ ID NO: 4805319 - DNA, 25 bp, Homo sapien
agtcgccgtggtcgtcgtccgccga

SEQ ID NO: 4805320 - DNA, 25 bp, Homo sapien
atgaccggcgccctagtcgccgtgg

SEQ ID NO: 4805321 - DNA, 25 bp, Homo sapien
gcggtggtgcctagggtccgcgccg

SEQ ID NO: 4805322 - DNA, 25 bp, Homo sapien
gttggagtccgctcagcgaggccgg

SEQ ID NO: 4805323 - DNA, 25 bp, Homo sapien
tgcggggcacgctggaagttggagt

SEQ ID NO: 4805324 - DNA, 25 bp, Homo sapien
caggagcccgcgagctcccggccgc

SEQ ID NO: 4805325 - DNA, 25 bp, Homo sapien
cctgacgtcacacgccgctgccgcg

SEQ ID NO: 4805326 - DNA, 25 bp, Homo sapien
ttgaagacaaagaacgagaacgttg

SEQ ID NO: 4805327 - DNA, 25 bp, Homo sapien
agcttcctcggtggccgctcattcg

SEQ ID NO: 4805328 - DNA, 25 bp, Homo sapien
tgctctgccggattatgctgcagct

SEQ ID NO: 4805329 - DNA, 25 bp, Homo sapien
acgttggtgctttgcccacttctgc

SEQ ID NO: 4805330 - DNA, 25 bp, Homo sapien
cagtgccgtcatttgtttctgcagc

SEQ ID NO: 4805331 - DNA, 25 bp, Homo sapien
tgccatgttaggaaggtcagctgca

SEQ ID NO: 4805332 - DNA, 25 bp, Homo sapien
tattctccgcacatggaggctgccc

SEQ ID NO: 4805333 - DNA, 25 bp, Homo sapien
gctccctggatgtctgtatgtttga

SEQ ID NO: 4805334 - DNA, 25 bp, Homo sapien
tgtttgaataccagttgccatgtta

SEQ ID NO: 4805335 - DNA, 25 bp, Homo sapien
ccttgcagcctcacaacagtgggag

SEQ ID NO: 4805336 - DNA, 25 bp, Homo sapien
taaaaagcctgaatgccaagccaag

SEQ ID NO: 4805337 - DNA, 25 bp, Homo sapien
taggtcgctcgtcacataggcagtt

SEQ ID NO: 4805338 - DNA, 25 bp, Homo sapien
tatggtcacattggcgcctagaaca

SEQ ID NO: 4805339 - DNA, 25 bp, Homo sapien
tcttgggctttgttgcttttggcaa

SEQ ID NO: 4805340 - DNA, 25 bp, Homo sapien
tttaatcggctttctctgcggtggg

SEQ ID NO: 4805341 - DNA, 25 bp, Homo sapien
aaagcgtctttaactctgggatagc

SEQ ID NO: 4805342 - DNA, 25 bp, Homo sapien
cattggaagccgctgtcatgacagg

SEQ ID NO: 4805343 - DNA, 25 bp, Homo sapien
ttctgaacaacgtgactcatgaggg

SEQ ID NO: 4805344 - DNA, 25 bp, Homo sapien
cccaaggttccccgcattgttctga

SEQ ID NO: 4805345 - DNA, 25 bp, Homo sapien
aaggttccccgcattgttctgagga

SEQ ID NO: 4805346 - DNA, 25 bp, Homo sapien
caaggttccccgcattgttctgagg

SEQ ID NO: 4805347 - DNA, 25 bp, Homo sapien
ccaaggttccccgcattgttctgag

SEQ ID NO: 4805348 - DNA, 25 bp, Homo sapien
cctgaacttgagaactgggaatgca

SEQ ID NO: 4805349 - DNA, 25 bp, Homo sapien
acccgtgggtgtgagtccctgaact

SEQ ID NO: 4805350 - DNA, 25 bp, Homo sapien
agacccgtgggtgtgagtccctgaa

SEQ ID NO: 4805351 - DNA, 25 bp, Homo sapien
tccctgaacttgagaactgggaatg

SEQ ID NO: 4805352 - DNA, 25 bp, Homo sapien
tttccaatccgtcatcccagagctt

SEQ ID NO: 4805353 - DNA, 25 bp, Homo sapien
tctgaggatcctgatttgctgggct

SEQ ID NO: 4805354 - DNA, 25 bp, Homo sapien
accccagctgggtcaatcacgagct

SEQ ID NO: 4805355 - DNA, 25 bp, Homo sapien
ccttccctggtgtgacagtgttgct

SEQ ID NO: 4805356 - DNA, 25 bp, Homo sapien
gatcgaagtaggttctcagctccag

SEQ ID NO: 4805357 - DNA, 25 bp, Homo sapien
cagactcccggctttggatgcagag

SEQ ID NO: 4805358 - DNA, 25 bp, Homo sapien
tttgctaacccaagaaggatcgaag

SEQ ID NO: 4805359 - DNA, 25 bp, Homo sapien
ctgcctgtaaaaagagccccgggct

SEQ ID NO: 4805360 - DNA, 25 bp, Homo sapien
ggggcgcattgtcaataaagcacag

SEQ ID NO: 4805361 - DNA, 25 bp, Homo sapien
ctgtgctttattgacaatgcgcccc

SEQ ID NO: 4805362 - DNA, 25 bp, Homo sapien
agcagcggaaggagcggctgtaccc

SEQ ID NO: 4805363 - DNA, 25 bp, Homo sapien
cccgctgcggaagtacgcggtcaag

SEQ ID NO: 4805364 - DNA, 25 bp, Homo sapien
tacccgctgcggaagtacgcggtca

SEQ ID NO: 4805365 - DNA, 25 bp, Homo sapien
gctgtacccgctgcggaagtacgcg

SEQ ID NO: 4805366 - DNA, 25 bp, Homo sapien
cgccggctcaacaagcacgaggaga

SEQ ID NO: 4805367 - DNA, 25 bp, Homo sapien
cggctgtacccgctgcggaagtacg

SEQ ID NO: 4805368 - DNA, 25 bp, Homo sapien
tgaccgcgtacttccgcagcgggta

SEQ ID NO: 4805369 - DNA, 25 bp, Homo sapien
tctcctcgtgcttgttgagccggcg

SEQ ID NO: 4805370 - DNA, 25 bp, Homo sapien
cgtacttccgcagcgggtacagccg

SEQ ID NO: 4805371 - DNA, 25 bp, Homo sapien
cttgaccgcgtacttccgcagcggg

SEQ ID NO: 4805372 - DNA, 25 bp, Homo sapien
gaccgcgtacttccgcagcgggtac

SEQ ID NO: 4805373 - DNA, 25 bp, Homo sapien
cgcgtacttccgcagcgggtacagc

SEQ ID NO: 4805374 - DNA, 25 bp, Homo sapien
caagaagtacaagcccctggacctg

SEQ ID NO: 4805375 - DNA, 25 bp, Homo sapien
ggcaagaagtacaagcccctggacc

SEQ ID NO: 4805376 - DNA, 25 bp, Homo sapien
ggacctgcggcctaagaagacacgt

SEQ ID NO: 4805377 - DNA, 25 bp, Homo sapien
gacctgcggcctaagaagacacgtg

SEQ ID NO: 4805378 - DNA, 25 bp, Homo sapien
aagtacaagcccctggacctgcggc

SEQ ID NO: 4805379 - DNA, 25 bp, Homo sapien
gcaagaagtacaagcccctggacct

SEQ ID NO: 4805380 - DNA, 25 bp, Homo sapien
cacgtgtcttcttaggccgcaggtc

SEQ ID NO: 4805381 - DNA, 25 bp, Homo sapien
cgcaggtccaggggcttgtacttct

SEQ ID NO: 4805382 - DNA, 25 bp, Homo sapien
caggtccaggggcttgtacttcttg

SEQ ID NO: 4805383 - DNA, 25 bp, Homo sapien
gccgcaggtccaggggcttgtactt

SEQ ID NO: 4805384 - DNA, 25 bp, Homo sapien
ggtccaggggcttgtacttcttgcc

SEQ ID NO: 4805385 - DNA, 25 bp, Homo sapien
aggtccaggggcttgtacttcttgc

SEQ ID NO: 4805386 - DNA, 25 bp, Homo sapien
gccctgggtccttggattcaccctg

SEQ ID NO: 4805387 - DNA, 25 bp, Homo sapien
ctgggtccttggattcaccctgccg

SEQ ID NO: 4805388 - DNA, 25 bp, Homo sapien
ggtccttggattcaccctgccgtct

SEQ ID NO: 4805389 - DNA, 25 bp, Homo sapien
cccccttagctgctgcagtagctcc

SEQ ID NO: 4805390 - DNA, 25 bp, Homo sapien
agccctgggtccttggattcaccct

SEQ ID NO: 4805391 - DNA, 25 bp, Homo sapien
tgggtccttggattcaccctgccgt

SEQ ID NO: 4805392 - DNA, 25 bp, Homo sapien
acggcagggtgaatccaaggaccca

SEQ ID NO: 4805393 - DNA, 25 bp, Homo sapien
cagggtgaatccaaggacccagggc

SEQ ID NO: 4805394 - DNA, 25 bp, Homo sapien
agacggcagggtgaatccaaggacc

SEQ ID NO: 4805395 - DNA, 25 bp, Homo sapien
ggagctactgcagcagctaaggggg

SEQ ID NO: 4805396 - DNA, 25 bp, Homo sapien
cggcagggtgaatccaaggacccag

SEQ ID NO: 4805397 - DNA, 25 bp, Homo sapien
agggtgaatccaaggacccagggct

SEQ ID NO: 4805398 - DNA, 25 bp, Homo sapien
tgaggatggtcccaccagccttaga

SEQ ID NO: 4805399 - DNA, 25 bp, Homo sapien
ggattaattgagttagtgacatgtg

SEQ ID NO: 4805400 - DNA, 25 bp, Homo sapien
catgaaatgaggatggtcccaccag

SEQ ID NO: 4805401 - DNA, 25 bp, Homo sapien
tacatgaaatgaggatggtcccacc

SEQ ID NO: 4805402 - DNA, 25 bp, Homo sapien
atggtcccaccagccttagatttgg

SEQ ID NO: 4805403 - DNA, 25 bp, Homo sapien
gacttacatgaaatgaggatggtcc

SEQ ID NO: 4805404 - DNA, 25 bp, Homo sapien
ccaaatctaaggctggtgggaccat

SEQ ID NO: 4805405 - DNA, 25 bp, Homo sapien
attaatccccccaaatctaaggctg

SEQ ID NO: 4805406 - DNA, 25 bp, Homo sapien
tgggaccatcctcatttcatgtaag

SEQ ID NO: 4805407 - DNA, 25 bp, Homo sapien
catgtcactaactcaattaatcccc

SEQ ID NO: 4805408 - DNA, 25 bp, Homo sapien
tctaaggctggtgggaccatcctca

SEQ ID NO: 4805409 - DNA, 25 bp, Homo sapien
cacacatgtcactaactcaattaat

SEQ ID NO: 4805410 - DNA, 25 bp, Homo sapien
cagagccgaggtaatggtaactacc

SEQ ID NO: 4805411 - DNA, 25 bp, Homo sapien
catgtgactgtcctcgtgactggga

SEQ ID NO: 4805412 - DNA, 25 bp, Homo sapien
gctgcgtgccctgtactaggttgtc

SEQ ID NO: 4805413 - DNA, 25 bp, Homo sapien
tcttgctaaccagagccgaggtaat

SEQ ID NO: 4805414 - DNA, 25 bp, Homo sapien
actgagatgcaagccccggctcttc

SEQ ID NO: 4805415 - DNA, 25 bp, Homo sapien
ttgggagtcacttgactgagatgca

SEQ ID NO: 4805416 - DNA, 25 bp, Homo sapien
gtcacatgacaacctagtacagggc

SEQ ID NO: 4805417 - DNA, 25 bp, Homo sapien
acaacctagtacagggcacgcagca

SEQ ID NO: 4805418 - DNA, 25 bp, Homo sapien
tgcatctcagtcaagtgactcccaa

SEQ ID NO: 4805419 - DNA, 25 bp, Homo sapien
tacctcggctctggttagcaagagc

SEQ ID NO: 4805420 - DNA, 25 bp, Homo sapien
tcccagtcacgaggacagtcacatg

SEQ ID NO: 4805421 - DNA, 25 bp, Homo sapien
ggtagttaccattacctcggctctg

SEQ ID NO: 4805422 - DNA, 25 bp, Homo sapien
tctcccctaaagttacctgatgagg

SEQ ID NO: 4805423 - DNA, 25 bp, Homo sapien
aggaagccaagtgctagccgtccct

SEQ ID NO: 4805424 - DNA, 25 bp, Homo sapien
gaggcctagacacccacagtcaatg

SEQ ID NO: 4805425 - DNA, 25 bp, Homo sapien
gctgagagtggttagccttcccaat

SEQ ID NO: 4805426 - DNA, 25 bp, Homo sapien
tactggcactgggtgtcagtccctg

SEQ ID NO: 4805427 - DNA, 25 bp, Homo sapien
tacagctgattggatcgggccttct

SEQ ID NO: 4805428 - DNA, 25 bp, Homo sapien
tgcttgaaccccaataagatgaatg

SEQ ID NO: 4805429 - DNA, 25 bp, Homo sapien
gaaggcccgatccaatcagctgtaa

SEQ ID NO: 4805430 - DNA, 25 bp, Homo sapien
gcaacaaattgggaaggctaaccac

SEQ ID NO: 4805431 - DNA, 25 bp, Homo sapien
cagggacggctagcacttggcttcc

SEQ ID NO: 4805432 - DNA, 25 bp, Homo sapien
gactgacacccagtgccagtaagag

SEQ ID NO: 4805433 - DNA, 25 bp, Homo sapien
cattgactgtgggtgtctaggcctc

SEQ ID NO: 4805434 - DNA, 25 bp, Homo sapien
gtcgtccggaaatccattgcccgtg

SEQ ID NO: 4805435 - DNA, 25 bp, Homo sapien
cacagttattaaccagactcagaaa

SEQ ID NO: 4805436 - DNA, 25 bp, Homo sapien
gcccgtgttctcacagttattaacc

SEQ ID NO: 4805437 - DNA, 25 bp, Homo sapien
cgtccggaaatccattgcccgtgtt

SEQ ID NO: 4805438 - DNA, 25 bp, Homo sapien
cggaaatccattgcccgtgttctca

SEQ ID NO: 4805439 - DNA, 25 bp, Homo sapien
tcgtccggaaatccattgcccgtgt

SEQ ID NO: 4805440 - DNA, 25 bp, Homo sapien
aacacgggcaatggatttccggacg

SEQ ID NO: 4805441 - DNA, 25 bp, Homo sapien
agaacacgggcaatggatttccgga

SEQ ID NO: 4805442 - DNA, 25 bp, Homo sapien
acacgggcaatggatttccggacga

SEQ ID NO: 4805443 - DNA, 25 bp, Homo sapien
ggttaataactgtgagaacacgggc

SEQ ID NO: 4805444 - DNA, 25 bp, Homo sapien
cacgggcaatggatttccggacgac

SEQ ID NO: 4805445 - DNA, 25 bp, Homo sapien
tgagaacacgggcaatggatttccg

SEQ ID NO: 4805446 - DNA, 25 bp, Homo sapien
tgctgccctatgtgtgagtcctgag

SEQ ID NO: 4805447 - DNA, 25 bp, Homo sapien
tagccctcaggataaattcgtgttc

SEQ ID NO: 4805448 - DNA, 25 bp, Homo sapien
tgaccagctgtctactaggtgactc

SEQ ID NO: 4805449 - DNA, 25 bp, Homo sapien
cccaaacaaccttagtagaggcagg

SEQ ID NO: 4805450 - DNA, 25 bp, Homo sapien
gaggattggacaagcacagttgcac

SEQ ID NO: 4805451 - DNA, 25 bp, Homo sapien
ggcattggttgggtcttagccctca

SEQ ID NO: 4805452 - DNA, 25 bp, Homo sapien
tcaggctagcttagggaactgcagg

SEQ ID NO: 4805453 - DNA, 25 bp, Homo sapien
tgagggctaagacccaaccaatgcc

SEQ ID NO: 4805454 - DNA, 25 bp, Homo sapien
gagtcacctagtagacagctggtca

SEQ ID NO: 4805455 - DNA, 25 bp, Homo sapien
tgaagcaaacaacgagccagggaga

SEQ ID NO: 4805456 - DNA, 25 bp, Homo sapien
gactcaggactcacacatagggcag

SEQ ID NO: 4805457 - DNA, 25 bp, Homo sapien
gaacacgaatttatcctgagggcta

SEQ ID NO: 4805458 - DNA, 25 bp, Homo sapien
tcatcaacctgggtacaaagtccac

SEQ ID NO: 4805459 - DNA, 25 bp, Homo sapien
gaccttgcggtccttgtgcctggaa

SEQ ID NO: 4805460 - DNA, 25 bp, Homo sapien
tacatggctaagagtgcgggagact

SEQ ID NO: 4805461 - DNA, 25 bp, Homo sapien
catcgggatcgtcggaggatttcaa

SEQ ID NO: 4805462 - DNA, 25 bp, Homo sapien
aggagctggccgcttagatgcccac

SEQ ID NO: 4805463 - DNA, 25 bp, Homo sapien
tgggagacccgttgtgtgcttagcc

SEQ ID NO: 4805464 - DNA, 25 bp, Homo sapien
tcaaggcaggtaagaggctaagcac

SEQ ID NO: 4805465 - DNA, 25 bp, Homo sapien
gaagtggactttgtacccaggttga

SEQ ID NO: 4805466 - DNA, 25 bp, Homo sapien
ttgaaatcctccgacgatcccgatg

SEQ ID NO: 4805467 - DNA, 25 bp, Homo sapien
cacaaggaccgcaaggtcaaggcag

SEQ ID NO: 4805468 - DNA, 25 bp, Homo sapien
gtgggcatctaagcggccagctcct

SEQ ID NO: 4805469 - DNA, 25 bp, Homo sapien
aataacttacgctgccactccaggg

SEQ ID NO: 4805470 - DNA, 25 bp, Homo sapien
aaggctcgagatcttcgcgggaaga

SEQ ID NO: 4805471 - DNA, 25 bp, Homo sapien
gtgcggcctccaagctctctaagat

SEQ ID NO: 4805472 - DNA, 25 bp, Homo sapien
gatcaaggctcgagatcttcgcggg

SEQ ID NO: 4805473 - DNA, 25 bp, Homo sapien
tcaaggctcgagatcttcgcgggaa

SEQ ID NO: 4805474 - DNA, 25 bp, Homo sapien
agatcttcgcgggaagaagaaggag

SEQ ID NO: 4805475 - DNA, 25 bp, Homo sapien
gctcgagatcttcgcgggaagaaga

SEQ ID NO: 4805476 - DNA, 25 bp, Homo sapien
tcttcttcccgcgaagatctcgagc

SEQ ID NO: 4805477 - DNA, 25 bp, Homo sapien
atcttagagagcttggaggccgcac

SEQ ID NO: 4805478 - DNA, 25 bp, Homo sapien
tcccgcgaagatctcgagccttgat

SEQ ID NO: 4805479 - DNA, 25 bp, Homo sapien
tcctccttcttcttcccgcgaagat

SEQ ID NO: 4805480 - DNA, 25 bp, Homo sapien
tcttcccgcgaagatctcgagcctt

SEQ ID NO: 4805481 - DNA, 25 bp, Homo sapien
ttcccgcgaagatctcgagccttga

SEQ ID NO: 4805482 - DNA, 25 bp, Homo sapien
tgaaggggatatggccccgcggcct

SEQ ID NO: 4805483 - DNA, 25 bp, Homo sapien
gctgaggcacactctctcttgcgcg

SEQ ID NO: 4805484 - DNA, 25 bp, Homo sapien
gcctggctgaggcacactctctctt

SEQ ID NO: 4805485 - DNA, 25 bp, Homo sapien
gaggcacactctctcttgcgcgcag

SEQ ID NO: 4805486 - DNA, 25 bp, Homo sapien
tggctgaggcacactctctcttgcg

SEQ ID NO: 4805487 - DNA, 25 bp, Homo sapien
tgaggcacactctctcttgcgcgca

SEQ ID NO: 4805488 - DNA, 25 bp, Homo sapien
cgcgcaagagagagtgtgcctcagc

SEQ ID NO: 4805489 - DNA, 25 bp, Homo sapien
aagagagagtgtgcctcagccaggc

SEQ ID NO: 4805490 - DNA, 25 bp, Homo sapien
tgcgcgcaagagagagtgtgcctca

SEQ ID NO: 4805491 - DNA, 25 bp, Homo sapien
gcaagagagagtgtgcctcagccag

SEQ ID NO: 4805492 - DNA, 25 bp, Homo sapien
gcgcaagagagagtgtgcctcagcc

SEQ ID NO: 4805493 - DNA, 25 bp, Homo sapien
ctgcgcgcaagagagagtgtgcctc

SEQ ID NO: 4805494 - DNA, 25 bp, Homo sapien
gggctccggcgcactcgtagtcgat

SEQ ID NO: 4805495 - DNA, 25 bp, Homo sapien
tagtcgatggcgagtcgcgcgcctt

SEQ ID NO: 4805496 - DNA, 25 bp, Homo sapien
cactcgtagtcgatggcgagtcgcg

SEQ ID NO: 4805497 - DNA, 25 bp, Homo sapien
ccgggcctgggttactctgcccaag

SEQ ID NO: 4805498 - DNA, 25 bp, Homo sapien
gttactctgcccaaggcacggccgg

SEQ ID NO: 4805499 - DNA, 25 bp, Homo sapien
cgcctcttcgcttggcgccgggaga

SEQ ID NO: 4805500 - DNA, 25 bp, Homo sapien
ccggccgtgccttgggcagagtaac

SEQ ID NO: 4805501 - DNA, 25 bp, Homo sapien
gcgcgactcgccatcgactacgagt

SEQ ID NO: 4805502 - DNA, 25 bp, Homo sapien
aaaggcgcgcgactcgccatcgact

SEQ ID NO: 4805503 - DNA, 25 bp, Homo sapien
atcgactacgagtgcgccggagccc

SEQ ID NO: 4805504 - DNA, 25 bp, Homo sapien
tctcccggcgccaagcgaagaggcg

SEQ ID NO: 4805505 - DNA, 25 bp, Homo sapien
cttgggcagagtaacccaggcccgg

SEQ ID NO: 4805506 - DNA, 25 bp, Homo sapien
gctgagcccgcggattctatctgcc

SEQ ID NO: 4805507 - DNA, 25 bp, Homo sapien
tgagcccgcggattctatctgccac

SEQ ID NO: 4805508 - DNA, 25 bp, Homo sapien
ccgcggattctatctgccacctagg

SEQ ID NO: 4805509 - DNA, 25 bp, Homo sapien
gattctatctgccacctaggcctgt

SEQ ID NO: 4805510 - DNA, 25 bp, Homo sapien
tctatctgccacctaggcctgtggg

SEQ ID NO: 4805511 - DNA, 25 bp, Homo sapien
gcggattctatctgccacctaggcc

SEQ ID NO: 4805512 - DNA, 25 bp, Homo sapien
cgccccacaggcctaggtggcagat

SEQ ID NO: 4805513 - DNA, 25 bp, Homo sapien
cacaggcctaggtggcagatagaat

SEQ ID NO: 4805514 - DNA, 25 bp, Homo sapien
cctaggtggcagatagaatccgcgg

SEQ ID NO: 4805515 - DNA, 25 bp, Homo sapien
gtggcagatagaatccgcgggctca

SEQ ID NO: 4805516 - DNA, 25 bp, Homo sapien
cccacaggcctaggtggcagataga

SEQ ID NO: 4805517 - DNA, 25 bp, Homo sapien
ggcctaggtggcagatagaatccgc

SEQ ID NO: 4805518 - DNA, 25 bp, Homo sapien
agctgcggaatcgggcgccatccga

SEQ ID NO: 4805519 - DNA, 25 bp, Homo sapien
cggaatcgggcgccatccgagcgct

SEQ ID NO: 4805520 - DNA, 25 bp, Homo sapien
tgcggaatcgggcgccatccgagcg

SEQ ID NO: 4805521 - DNA, 25 bp, Homo sapien
agagctgcggaatcgggcgccatcc

SEQ ID NO: 4805522 - DNA, 25 bp, Homo sapien
ctgcggaatcgggcgccatccgagc

SEQ ID NO: 4805523 - DNA, 25 bp, Homo sapien
gagctgcggaatcgggcgccatccg

SEQ ID NO: 4805524 - DNA, 25 bp, Homo sapien
gctcggatggcgcccgattccgcag

SEQ ID NO: 4805525 - DNA, 25 bp, Homo sapien
agcgctcggatggcgcccgattccg

SEQ ID NO: 4805526 - DNA, 25 bp, Homo sapien
cggatggcgcccgattccgcagctc

SEQ ID NO: 4805527 - DNA, 25 bp, Homo sapien
cgctcggatggcgcccgattccgca

SEQ ID NO: 4805528 - DNA, 25 bp, Homo sapien
tcggatggcgcccgattccgcagct

SEQ ID NO: 4805529 - DNA, 25 bp, Homo sapien
ggatggcgcccgattccgcagctct

SEQ ID NO: 4805530 - DNA, 25 bp, Homo sapien
cttcctctttccctcggagcgggcg

SEQ ID NO: 4805531 - DNA, 25 bp, Homo sapien
cgcccgctccgagggaaagaggaag

SEQ ID NO: 4805532 - DNA, 25 bp, Homo sapien
ctacttcctctttccctcggagcgg

SEQ ID NO: 4805533 - DNA, 25 bp, Homo sapien
cgcctacttcctctttccctcggag

SEQ ID NO: 4805534 - DNA, 25 bp, Homo sapien
ctctttccctcggagcgggcggcgg

SEQ ID NO: 4805535 - DNA, 25 bp, Homo sapien
ggcggcgttggcggcttgtgcagca

SEQ ID NO: 4805536 - DNA, 25 bp, Homo sapien
cttcctctttccctcggagcgggcg

SEQ ID NO: 4805537 - DNA, 25 bp, Homo sapien
tcctctttccctcggagcgggcggc

SEQ ID NO: 4805538 - DNA, 25 bp, Homo sapien
gccgcccgctccgagggaaagagga

SEQ ID NO: 4805539 - DNA, 25 bp, Homo sapien
ccgctccgagggaaagaggaagtag

SEQ ID NO: 4805540 - DNA, 25 bp, Homo sapien
tgctgcacaagccgccaacgccgcc

SEQ ID NO: 4805541 - DNA, 25 bp, Homo sapien
gctccgagggaaagaggaagtaggc

SEQ ID NO: 4805542 - DNA, 25 bp, Homo sapien
cgcccgctccgagggaaagaggaag

SEQ ID NO: 4805543 - DNA, 25 bp, Homo sapien
ctccgagggaaagaggaagtaggcg

SEQ ID NO: 4805544 - DNA, 25 bp, Homo sapien
cacccggcagtagttgcggaggtca

SEQ ID NO: 4805545 - DNA, 25 bp, Homo sapien
cgctgcggcgccattggccgcgccc

SEQ ID NO: 4805546 - DNA, 25 bp, Homo sapien
ccggcagtagttgcggaggtcagcc

SEQ ID NO: 4805547 - DNA, 25 bp, Homo sapien
ggcgggcagtaccacggcgttcctc

SEQ ID NO: 4805548 - DNA, 25 bp, Homo sapien
cgggcagtaccacggcgttcctcgg

SEQ ID NO: 4805549 - DNA, 25 bp, Homo sapien
gccgccacccggcagtagttgcgga

SEQ ID NO: 4805550 - DNA, 25 bp, Homo sapien
tccgcaactactgccgggtggcggc

SEQ ID NO: 4805551 - DNA, 25 bp, Homo sapien
agggccggagccccgccttgtagtg

SEQ ID NO: 4805552 - DNA, 25 bp, Homo sapien
gaggaacgccgtggtactgcccgcc

SEQ ID NO: 4805553 - DNA, 25 bp, Homo sapien
gggcgcggccaatggcgccgcagcg

SEQ ID NO: 4805554 - DNA, 25 bp, Homo sapien
tgacctccgcaactactgccgggtg

SEQ ID NO: 4805555 - DNA, 25 bp, Homo sapien
ccgaggaacgccgtggtactgcccg

SEQ ID NO: 4805556 - DNA, 25 bp, Homo sapien
attcgaagcagcaaaaatgaatcac

SEQ ID NO: 4805557 - DNA, 25 bp, Homo sapien
ttcgaagcagcaaaaatgaatcaca

SEQ ID NO: 4805558 - DNA, 25 bp, Homo sapien
cagtcatcagctcgaaggtttcttc

SEQ ID NO: 4805559 - DNA, 25 bp, Homo sapien
ggtttctgtcaagatgtgcctctcc

SEQ ID NO: 4805560 - DNA, 25 bp, Homo sapien
tactaagtgtggtggcgttcaaggc

SEQ ID NO: 4805561 - DNA, 25 bp, Homo sapien
tcgagaagtagagccgcgagccttc

SEQ ID NO: 4805562 - DNA, 25 bp, Homo sapien
tgtcctcgcgcttccgccgggtgga

SEQ ID NO: 4805563 - DNA, 25 bp, Homo sapien
gcggcaatatccttccctgacgcgg

SEQ ID NO: 4805564 - DNA, 25 bp, Homo sapien
acaaatttgtggacgagcaggagga

SEQ ID NO: 4805565 - DNA, 25 bp, Homo sapien
ccgggtggacatcgacgaatttgac

SEQ ID NO: 4805566 - DNA, 25 bp, Homo sapien
taaccctcccgcttaatgctgagaa

SEQ ID NO: 4805567 - DNA, 25 bp, Homo sapien
cagtacccttctggtgcaggaagca

SEQ ID NO: 4805568 - DNA, 25 bp, Homo sapien
tctcagccacgctcaacaagtgagt

SEQ ID NO: 4805569 - DNA, 25 bp, Homo sapien
ctttagcagtatgagcgcaggaaac

SEQ ID NO: 4805570 - DNA, 25 bp, Homo sapien
tgttgaaccagttgactcagcttgg

SEQ ID NO: 4805571 - DNA, 25 bp, Homo sapien
cataaatcaggttctcggtgttgaa

SEQ ID NO: 4805572 - DNA, 25 bp, Homo sapien
tagggcctagttcatggacagtcag

SEQ ID NO: 4805573 - DNA, 25 bp, Homo sapien
tcctgagtgtgcctttaaaccgaaa

SEQ ID NO: 4805574 - DNA, 25 bp, Homo sapien
ttgacggtctaccagcgtggcggct

SEQ ID NO: 4805575 - DNA, 25 bp, Homo sapien
gaactgacattttgacggtctacca

SEQ ID NO: 4805576 - DNA, 25 bp, Homo sapien
tctatgcctttgtctccgagtactg

SEQ ID NO: 4805577 - DNA, 25 bp, Homo sapien
ctggtgttggtcagatgcacctgtg

SEQ ID NO: 4805578 - DNA, 25 bp, Homo sapien
gagggatggtttgggcaggtgcaga

SEQ ID NO: 4805579 - DNA, 25 bp, Homo sapien
atggtttgggcaggtgcagatccaa

SEQ ID NO: 4805580 - DNA, 25 bp, Homo sapien
gtttgggcaggtgcagatccaaggg

SEQ ID NO: 4805581 - DNA, 25 bp, Homo sapien
ggggagggatggtttgggcaggtgc

SEQ ID NO: 4805582 - DNA, 25 bp, Homo sapien
gcctgctgcatcaataaagctcttg

SEQ ID NO: 4805583 - DNA, 25 bp, Homo sapien
tcttgggctcattgtaaagtgcctg

SEQ ID NO: 4805584 - DNA, 25 bp, Homo sapien
cccgatgtggaaggagtagacctgt

SEQ ID NO: 4805585 - DNA, 25 bp, Homo sapien
tgggagcgagcatggcaatccacag

SEQ ID NO: 4805586 - DNA, 25 bp, Homo sapien
accaaactagtaaaatccattgtag

SEQ ID NO: 4805587 - DNA, 25 bp, Homo sapien
actgacacaccaaactagtaaaatc

SEQ ID NO: 4805588 - DNA, 25 bp, Homo sapien
tgacacaccaaactagtaaaatcca

SEQ ID NO: 4805589 - DNA, 25 bp, Homo sapien
acaccaaactagtaaaatccattgt

SEQ ID NO: 4805590 - DNA, 25 bp, Homo sapien
tataaagggctatagataccgtcgc

SEQ ID NO: 4805591 - DNA, 25 bp, Homo sapien
tacacctgaaactgccgaggagtgg

SEQ ID NO: 4805592 - DNA, 25 bp, Homo sapien
caagatccatcgctcgtataaaggg

SEQ ID NO: 4805593 - DNA, 25 bp, Homo sapien
gaaagcctagtcagtgaagcctccc

SEQ ID NO: 4805594 - DNA, 25 bp, Homo sapien
tcgtgttctaaacaagggataactg

SEQ ID NO: 4805595 - DNA, 25 bp, Homo sapien
cgtgttctaaacaagggataactgt

SEQ ID NO: 4805596 - DNA, 25 bp, Homo sapien
ttcgtgttcccaccaggtaaatgga

SEQ ID NO: 4805597 - DNA, 25 bp, Homo sapien
ctcctgtttcgtgttcccaccaggt

SEQ ID NO: 4805598 - DNA, 25 bp, Homo sapien
tcgttaggttaacgttgcaaatgcg

SEQ ID NO: 4805599 - DNA, 25 bp, Homo sapien
ggccctaagcatgattgagaaatac

SEQ ID NO: 4805600 - DNA, 25 bp, Homo sapien
gctgggactaaggagatgctgccct

SEQ ID NO: 4805601 - DNA, 25 bp, Homo sapien
gagatgctgccctgacttggttctt

SEQ ID NO: 4805602 - DNA, 25 bp, Homo sapien
tacatggtgactcaggtgtgcctgc

SEQ ID NO: 4805603 - DNA, 25 bp, Homo sapien
gaaaaagtgtcaacccacggagctc

SEQ ID NO: 4805604 - DNA, 25 bp, Homo sapien
gaagaatttcctctggacgctctga

SEQ ID NO: 4805605 - DNA, 25 bp, Homo sapien
gcagcgcagcacagaatcaagacaa

SEQ ID NO: 4805606 - DNA, 25 bp, Homo sapien
ctaggaccatggtatccgagggttt

SEQ ID NO: 4805607 - DNA, 25 bp, Homo sapien
ccatggtatccgagggtttgagata

SEQ ID NO: 4805608 - DNA, 25 bp, Homo sapien
gagatagacggccggatgctgccct

SEQ ID NO: 4805609 - DNA, 25 bp, Homo sapien
tatccgagggtttgagatagacggc

SEQ ID NO: 4805610 - DNA, 25 bp, Homo sapien
acactgacacagcttttataagatg

SEQ ID NO: 4805611 - DNA, 25 bp, Homo sapien
tcagcaacactgacacagcttttat

SEQ ID NO: 4805612 - DNA, 25 bp, Homo sapien
cagcaacactgacacagcttttata

SEQ ID NO: 4805613 - DNA, 25 bp, Homo sapien
gcaacactgacacagcttttataag

SEQ ID NO: 4805614 - DNA, 25 bp, Homo sapien
aggagccagttcctgcacggcctct

SEQ ID NO: 4805615 - DNA, 25 bp, Homo sapien
caggatgtacgaggaaaagagagaa

SEQ ID NO: 4805616 - DNA, 25 bp, Homo sapien
tccgcaggccaacgccagcaggaga

SEQ ID NO: 4805617 - DNA, 25 bp, Homo sapien
acaagggcgtcaaaccaggatgtac

SEQ ID NO: 4805618 - DNA, 25 bp, Homo sapien
tcaaagttgatctcgcgggcatctg

SEQ ID NO: 4805619 - DNA, 25 bp, Homo sapien
gtttctcccggacttcgaagagctc

SEQ ID NO: 4805620 - DNA, 25 bp, Homo sapien
cagtgttattcgtgacggaaggcgc

SEQ ID NO: 4805621 - DNA, 25 bp, Homo sapien
ctcggattcgcgacaagacatgaat

SEQ ID NO: 4805622 - DNA, 25 bp, Homo sapien
tatgatcactatcgtagggcaaaaa

SEQ ID NO: 4805623 - DNA, 25 bp, Homo sapien
aactatgatcactatcgtagggcaa

SEQ ID NO: 4805624 - DNA, 25 bp, Homo sapien
caaactatgatcactatcgtagggc

SEQ ID NO: 4805625 - DNA, 25 bp, Homo sapien
atcactatcgtagggcaaaaagggc

SEQ ID NO: 4805626 - DNA, 25 bp, Homo sapien
tgaagctgctcgcatcccgcatcag

SEQ ID NO: 4805627 - DNA, 25 bp, Homo sapien
ttccatggcaagaacacatgtccct

SEQ ID NO: 4805628 - DNA, 25 bp, Homo sapien
gagggagtgacatcgtttgggtaaa

SEQ ID NO: 4805629 - DNA, 25 bp, Homo sapien
attccgttttccatggcaagaacac

SEQ ID NO: 4805630 - DNA, 25 bp, Homo sapien
cagagtcttccggagctccagcatc

SEQ ID NO: 4805631 - DNA, 25 bp, Homo sapien
gagtcttccggagctccagcatccg

SEQ ID NO: 4805632 - DNA, 25 bp, Homo sapien
gctccttctgcagagtcttccggag

SEQ ID NO: 4805633 - DNA, 25 bp, Homo sapien
ttctgcagagtcttccggagctcca

SEQ ID NO: 4805634 - DNA, 25 bp, Homo sapien
aatcgcgcctcggatagacctcatt

SEQ ID NO: 4805635 - DNA, 25 bp, Homo sapien
tggctacgatactgccactgctgca

SEQ ID NO: 4805636 - DNA, 25 bp, Homo sapien
cgcgcctcggatagacctcattggc

SEQ ID NO: 4805637 - DNA, 25 bp, Homo sapien
ggctacgatactgccactgctgcaa

SEQ ID NO: 4805638 - DNA, 25 bp, Homo sapien
ttcacaggacactttaagaaccagg

SEQ ID NO: 4805639 - DNA, 25 bp, Homo sapien
caatagccggctggcacactaagct

SEQ ID NO: 4805640 - DNA, 25 bp, Homo sapien
tataggacggttcacaaataccttc

SEQ ID NO: 4805641 - DNA, 25 bp, Homo sapien
aatgtcaggccagagcaatagccgg

SEQ ID NO: 4805642 - DNA, 25 bp, Homo sapien
cgaaagaggactgtcgctatggcct

SEQ ID NO: 4805643 - DNA, 25 bp, Homo sapien
gaagtatagacgaaagaggactgtc

SEQ ID NO: 4805644 - DNA, 25 bp, Homo sapien
agaggactgtcgctatggcctggct

SEQ ID NO: 4805645 - DNA, 25 bp, Homo sapien
acagctgtagaaaggaagtatagac

SEQ ID NO: 4805646 - DNA, 25 bp, Homo sapien
gggagggtgtggaggaggacagtgc

SEQ ID NO: 4805647 - DNA, 25 bp, Homo sapien
tggggagggtgtggaggaggacagt

SEQ ID NO: 4805648 - DNA, 25 bp, Homo sapien
ctggggagggtgtggaggaggacag

SEQ ID NO: 4805649 - DNA, 25 bp, Homo sapien
ggagggtgtggaggaggacagtgca

SEQ ID NO: 4805650 - DNA, 25 bp, Homo sapien
tctgtagctgtgtgagatccatggc

SEQ ID NO: 4805651 - DNA, 25 bp, Homo sapien
agctgtgtgagatccatggccccaa

SEQ ID NO: 4805652 - DNA, 25 bp, Homo sapien
ttctccttctgtagctgtgtgagat

SEQ ID NO: 4805653 - DNA, 25 bp, Homo sapien
tggccccaacctcaccatttggtgt

SEQ ID NO: 4805654 - DNA, 25 bp, Homo sapien
agtgcttcggcctgcaatgggcccc

SEQ ID NO: 4805655 - DNA, 25 bp, Homo sapien
tcggcctgcagctggtgtatctgca

SEQ ID NO: 4805656 - DNA, 25 bp, Homo sapien
agcctcctccgccttgagggtcctc

SEQ ID NO: 4805657 - DNA, 25 bp, Homo sapien
gtgcgactcattgactgagagtgct

SEQ ID NO: 4805658 - DNA, 25 bp, Homo sapien
cttcggttttttcccgcagattctg

SEQ ID NO: 4805659 - DNA, 25 bp, Homo sapien
agcacttcggttttttcccgcagat

SEQ ID NO: 4805660 - DNA, 25 bp, Homo sapien
tccctttgcttccgcacctcctcca

SEQ ID NO: 4805661 - DNA, 25 bp, Homo sapien
cttccctttgcttccgcacctcctc

SEQ ID NO: 4805662 - DNA, 25 bp, Homo sapien
tcttccctttgcttccgcacctcct

SEQ ID NO: 4805663 - DNA, 25 bp, Homo sapien
ttccctttgcttccgcacctcctcc

SEQ ID NO: 4805664 - DNA, 25 bp, Homo sapien
caatttctctttggctccattcttc

SEQ ID NO: 4805665 - DNA, 25 bp, Homo sapien
ccacgctcacaatttctctttggct

SEQ ID NO: 4805666 - DNA, 25 bp, Homo sapien
cacaatttctctttggctccattct

SEQ ID NO: 4805667 - DNA, 25 bp, Homo sapien
ggccacgctcacaatttctctttgg

SEQ ID NO: 4805668 - DNA, 25 bp, Homo sapien
tgattttgtaaagaacgttcatatt

SEQ ID NO: 4805669 - DNA, 25 bp, Homo sapien
gcttctttagttcaaattggtgatt

SEQ ID NO: 4805670 - DNA, 25 bp, Homo sapien
tcagcttctttagttcaaattggtg

SEQ ID NO: 4805671 - DNA, 25 bp, Homo sapien
tgtaaagaacgttcatattcattcc

SEQ ID NO: 4805672 - DNA, 25 bp, Homo sapien
ataaaagaagtcttcactaccatat

SEQ ID NO: 4805673 - DNA, 25 bp, Homo sapien
tatctgggcttctagcgcctgggtg

SEQ ID NO: 4805674 - DNA, 25 bp, Homo sapien
tgggtgcgctccaagaactgctgct

SEQ ID NO: 4805675 - DNA, 25 bp, Homo sapien
ggctgctctcctggttggcggcagc

SEQ ID NO: 4805676 - DNA, 25 bp, Homo sapien
catcccttgctctgcggtggtctgg

SEQ ID NO: 4805677 - DNA, 25 bp, Homo sapien
ggctggaccagaaggtgggatgtaa

SEQ ID NO: 4805678 - DNA, 25 bp, Homo sapien
tccccgcccctgattgcaagttgag

SEQ ID NO: 4805679 - DNA, 25 bp, Homo sapien
gcaagttgaggcttgactcctagcg

SEQ ID NO: 4805680 - DNA, 25 bp, Homo sapien
gcttgactcctagcggagctgccac

SEQ ID NO: 4805681 - DNA, 25 bp, Homo sapien
ccctccaccccctgctgctggcctg

SEQ ID NO: 4805682 - DNA, 25 bp, Homo sapien
caccccctgctgctggcctgctcac

SEQ ID NO: 4805683 - DNA, 25 bp, Homo sapien
ctccaccccctgctgctggcctgct

SEQ ID NO: 4805684 - DNA, 25 bp, Homo sapien
cattaggtcctgactccctccaccc

SEQ ID NO: 4805685 - DNA, 25 bp, Homo sapien
aagaactgtatctatgggcaggtcc

SEQ ID NO: 4805686 - DNA, 25 bp, Homo sapien
taccgttgccgaagttcggaatgag

SEQ ID NO: 4805687 - DNA, 25 bp, Homo sapien
tccagcacaagaactgtatctatgg

SEQ ID NO: 4805688 - DNA, 25 bp, Homo sapien
cgaagttcggaatgagtttggagca

SEQ ID NO: 4805689 - DNA, 25 bp, Homo sapien
gagagaaagcattaagggcctggaa

SEQ ID NO: 4805690 - DNA, 25 bp, Homo sapien
agagaaagcattaagggcctggaat

SEQ ID NO: 4805691 - DNA, 25 bp, Homo sapien
agaaagcattaagggcctggaatgc

SEQ ID NO: 4805692 - DNA, 25 bp, Homo sapien
tggagagaaagcattaagggcctgg

SEQ ID NO: 4805693 - DNA, 25 bp, Homo sapien
gccacaatgcccttgctctgttgga

SEQ ID NO: 4805694 - DNA, 25 bp, Homo sapien
gagcagacaatcagaccaatggaca

SEQ ID NO: 4805695 - DNA, 25 bp, Homo sapien
tgcagagacaaacccatgtgcagac

SEQ ID NO: 4805696 - DNA, 25 bp, Homo sapien
caagaggaatcaattcagaaaggac

SEQ ID NO: 4805697 - DNA, 25 bp, Homo sapien
caatacgtgataaagttagcaagag

SEQ ID NO: 4805698 - DNA, 25 bp, Homo sapien
ttaatggccttagcctggctgcttc

SEQ ID NO: 4805699 - DNA, 25 bp, Homo sapien
gttaatggccttagcctggctgctt

SEQ ID NO: 4805700 - DNA, 25 bp, Homo sapien
gttgtctggtatcctccaaattctg

SEQ ID NO: 4805701 - DNA, 25 bp, Homo sapien
caagagctgttgtctggtatcctcc

SEQ ID NO: 4805702 - DNA, 25 bp, Homo sapien
gtgataacgtcttctttctcttgag

SEQ ID NO: 4805703 - DNA, 25 bp, Homo sapien
tctcttgcaaatgtgtgataacgtc

SEQ ID NO: 4805704 - DNA, 25 bp, Homo sapien
tcttgcaagtgttcttctcctgata

SEQ ID NO: 4805705 - DNA, 25 bp, Homo sapien
ctccaaggatgcaaccttctcttgc

SEQ ID NO: 4805706 - DNA, 25 bp, Homo sapien
gatctctcctcaggataagatgcag

SEQ ID NO: 4805707 - DNA, 25 bp, Homo sapien
gatgcagcaaccagggtgtatggtt

SEQ ID NO: 4805708 - DNA, 25 bp, Homo sapien
acttccgttgctccatttcaagcca

SEQ ID NO: 4805709 - DNA, 25 bp, Homo sapien
tcagttgtaacttggccgatctctc

SEQ ID NO: 4805710 - DNA, 25 bp, Homo sapien
ccagggctgtgatcttactttctgc

SEQ ID NO: 4805711 - DNA, 25 bp, Homo sapien
gttccagggctgtgatcttactttc

SEQ ID NO: 4805712 - DNA, 25 bp, Homo sapien
ttccagggctgtgatcttactttct

SEQ ID NO: 4805713 - DNA, 25 bp, Homo sapien
agggctgtgatcttactttctgcac

SEQ ID NO: 4805714 - DNA, 25 bp, Homo sapien
ctgtttttgaagctatcacatgatc

SEQ ID NO: 4805715 - DNA, 25 bp, Homo sapien
tgtttttgaagctatcacatgatct

SEQ ID NO: 4805716 - DNA, 25 bp, Homo sapien
tcctaggcaggtaaggatgtgtcca

SEQ ID NO: 4805717 - DNA, 25 bp, Homo sapien
aagcctttgccagcaccggaatcag

SEQ ID NO: 4805718 - DNA, 25 bp, Homo sapien
aaaagcctcggctctctctgaagca

SEQ ID NO: 4805719 - DNA, 25 bp, Homo sapien
tctgtgtcagggctacaagcatcat

SEQ ID NO: 4805720 - DNA, 25 bp, Homo sapien
tctagcttctggcttaagtctgatg

SEQ ID NO: 4805721 - DNA, 25 bp, Homo sapien
ccagcgttgagtagtgtctctgcaa

SEQ ID NO: 4805722 - DNA, 25 bp, Homo sapien
tcaactcctcctgggtacgactaag

SEQ ID NO: 4805723 - DNA, 25 bp, Homo sapien
gactaagttctctggttcgtgcctc

SEQ ID NO: 4805724 - DNA, 25 bp, Homo sapien
tattcagtatttagctactaaaaca

SEQ ID NO: 4805725 - DNA, 25 bp, Homo sapien
gagagtgatgactagtaaaatcaga

SEQ ID NO: 4805726 - DNA, 25 bp, Homo sapien
tgattaatatcacatattactggtg

SEQ ID NO: 4805727 - DNA, 25 bp, Homo sapien
tattactggtgtatgtttatcagca

SEQ ID NO: 4805728 - DNA, 25 bp, Homo sapien
tggaaaagattcatactctggttct

SEQ ID NO: 4805729 - DNA, 25 bp, Homo sapien
cctttggaaaagattcatactctgg

SEQ ID NO: 4805730 - DNA, 25 bp, Homo sapien
ctgctgctggaacccctctaattca

SEQ ID NO: 4805731 - DNA, 25 bp, Homo sapien
catccatttcatctctcctttggaa

SEQ ID NO: 4805732 - DNA, 25 bp, Homo sapien
tccttatataaaactgttgccaggc

SEQ ID NO: 4805733 - DNA, 25 bp, Homo sapien
tcactttggtctaggagttcaaaac

SEQ ID NO: 4805734 - DNA, 25 bp, Homo sapien
ttatataaaactgttgccaggcaca

SEQ ID NO: 4805735 - DNA, 25 bp, Homo sapien
ttgggacttgacttttctataattc

SEQ ID NO: 4805736 - DNA, 25 bp, Homo sapien
ctatcggcgttcaggtacacagaga

SEQ ID NO: 4805737 - DNA, 25 bp, Homo sapien
gggaggatcagagcttttcaagtca

SEQ ID NO: 4805738 - DNA, 25 bp, Homo sapien
ttttccataccccagagacgagacc

SEQ ID NO: 4805739 - DNA, 25 bp, Homo sapien
tccaagaggtggtatagcaatcagt

SEQ ID NO: 4805740 - DNA, 25 bp, Homo sapien
ttcaagctgatccatcttttctgac

SEQ ID NO: 4805741 - DNA, 25 bp, Homo sapien
aagctgatccatcttttctgaccat

SEQ ID NO: 4805742 - DNA, 25 bp, Homo sapien
cttttcaagctgatccatcttttct

SEQ ID NO: 4805743 - DNA, 25 bp, Homo sapien
caagctgatccatcttttctgacca

SEQ ID NO: 4805744 - DNA, 25 bp, Homo sapien
tccttctgccattttggctctgttg

SEQ ID NO: 4805745 - DNA, 25 bp, Homo sapien
cttctgccattttggctctgttggc

SEQ ID NO: 4805746 - DNA, 25 bp, Homo sapien
ccttctgccattttggctctgttgg

SEQ ID NO: 4805747 - DNA, 25 bp, Homo sapien
ttatcttctgcaagtttcggacctg

SEQ ID NO: 4805748 - DNA, 25 bp, Homo sapien
aagtttcggacctgttcagcatagt

SEQ ID NO: 4805749 - DNA, 25 bp, Homo sapien
tcttctgcaagtttcggacctgttc

SEQ ID NO: 4805750 - DNA, 25 bp, Homo sapien
ctgcaagtttcggacctgttcagca

SEQ ID NO: 4805751 - DNA, 25 bp, Homo sapien
cttgggtgaggagggtgacgcacat

SEQ ID NO: 4805752 - DNA, 25 bp, Homo sapien
accagaaatggacaaacatcaggaa

SEQ ID NO: 4805753 - DNA, 25 bp, Homo sapien
ggacaaacatcaggaaaggaagtta

SEQ ID NO: 4805754 - DNA, 25 bp, Homo sapien
agaaatggacaaacatcaggaaagg

SEQ ID NO: 4805755 - DNA, 25 bp, Homo sapien
aaatggacaaacatcaggaaaggaa

SEQ ID NO: 4805756 - DNA, 25 bp, Homo sapien
ccggtcttagcagtaggatagatca

SEQ ID NO: 4805757 - DNA, 25 bp, Homo sapien
tacacaggaacttggtaacctacgc

SEQ ID NO: 4805758 - DNA, 25 bp, Homo sapien
gcttatagtccacacaactcaggaa

SEQ ID NO: 4805759 - DNA, 25 bp, Homo sapien
gaattaattatctaggtggccaaag

SEQ ID NO: 4805760 - DNA, 25 bp, Homo sapien
agaagctgggatgaaagatcttctc

SEQ ID NO: 4805761 - DNA, 25 bp, Homo sapien
ccttctcagaagctgggatgaaaga

SEQ ID NO: 4805762 - DNA, 25 bp, Homo sapien
attccttctcagaagctgggatgaa

SEQ ID NO: 4805763 - DNA, 25 bp, Homo sapien
gaagctgggatgaaagatcttctct

SEQ ID NO: 4805764 - DNA, 25 bp, Homo sapien
tcctgagtcagctcccattgaggca

SEQ ID NO: 4805765 - DNA, 25 bp, Homo sapien
gagtcagctcccattgaggcaactg

SEQ ID NO: 4805766 - DNA, 25 bp, Homo sapien
ccgtgggatcctagtagcacctcct

SEQ ID NO: 4805767 - DNA, 25 bp, Homo sapien
ggcaactgattccttgctcacagac

SEQ ID NO: 4805768 - DNA, 25 bp, Homo sapien
gacgagctctcagtagtcctggtgc

SEQ ID NO: 4805769 - DNA, 25 bp, Homo sapien
tgtgtggctatcctgcacagatgac

SEQ ID NO: 4805770 - DNA, 25 bp, Homo sapien
cctgcacagatgacgagctctcagt

SEQ ID NO: 4805771 - DNA, 25 bp, Homo sapien
tttgctgtgtggctatcctgcacag

SEQ ID NO: 4805772 - DNA, 25 bp, Homo sapien
tgtgttcaggattcagacagaggcg

SEQ ID NO: 4805773 - DNA, 25 bp, Homo sapien
gctgcattcccacttaaatgtgggc

SEQ ID NO: 4805774 - DNA, 25 bp, Homo sapien
cagaggcgcctacaaagtttcagac

SEQ ID NO: 4805775 - DNA, 25 bp, Homo sapien
gtgggccaagggcttatggcaacac

SEQ ID NO: 4805776 - DNA, 25 bp, Homo sapien
cataacttacatgtacacttataga

SEQ ID NO: 4805777 - DNA, 25 bp, Homo sapien
tcgcatctgagttgttaagttttag

SEQ ID NO: 4805778 - DNA, 25 bp, Homo sapien
gttaaacattggaaagatttcgcat

SEQ ID NO: 4805779 - DNA, 25 bp, Homo sapien
tacatgtacacttatagaacacaat

SEQ ID NO: 4805780 - DNA, 25 bp, Homo sapien
tatctactagatttaaaacagcttg

SEQ ID NO: 4805781 - DNA, 25 bp, Homo sapien
ctagatttaaaacagcttggaggtc

SEQ ID NO: 4805782 - DNA, 25 bp, Homo sapien
tactagatttaaaacagcttggagg

SEQ ID NO: 4805783 - DNA, 25 bp, Homo sapien
ctggcttatctactagatttaaaac

SEQ ID NO: 4805784 - DNA, 25 bp, Homo sapien
gagaataaggggcctgctcgcattc

SEQ ID NO: 4805785 - DNA, 25 bp, Homo sapien
ggagaataaggggcctgctcgcatt

SEQ ID NO: 4805786 - DNA, 25 bp, Homo sapien
gggagaataaggggcctgctcgcat

SEQ ID NO: 4805787 - DNA, 25 bp, Homo sapien
cctcccgggcctctcgtgagccccg

SEQ ID NO: 4805788 - DNA, 25 bp, Homo sapien
tcccgggcctctcgtgagccccggc

SEQ ID NO: 4805789 - DNA, 25 bp, Homo sapien
ctcccgggcctctcgtgagccccgg

SEQ ID NO: 4805790 - DNA, 25 bp, Homo sapien
cgcacgtctcccagcgcgccggaag

SEQ ID NO: 4805791 - DNA, 25 bp, Homo sapien
gagggggttggtccgacgcgcgcat

SEQ ID NO: 4805792 - DNA, 25 bp, Homo sapien
ggaagtgactgcgcggtggggggag

SEQ ID NO: 4805793 - DNA, 25 bp, Homo sapien
cgcccagccggcgagccgagcagcg

SEQ ID NO: 4805794 - DNA, 25 bp, Homo sapien
gaatccgctctgcagaatcacagtg

SEQ ID NO: 4805795 - DNA, 25 bp, Homo sapien
tagtcattggtagtaaatagcccct

SEQ ID NO: 4805796 - DNA, 25 bp, Homo sapien
tttatactggtgctacacaacgaag

SEQ ID NO: 4805797 - DNA, 25 bp, Homo sapien
tagtactgaagtgccctcaaggtgg

SEQ ID NO: 4805798 - DNA, 25 bp, Homo sapien
caatgtataagagcgcaggagactg

SEQ ID NO: 4805799 - DNA, 25 bp, Homo sapien
tatacacccaaaacatcaccaggag

SEQ ID NO: 4805800 - DNA, 25 bp, Homo sapien
gaaaaaatctgtagccggaaatgcc

SEQ ID NO: 4805801 - DNA, 25 bp, Homo sapien
taagtatcatttacggcagccctat

SEQ ID NO: 4805802 - DNA, 25 bp, Homo sapien
tcagggaattctattgcacaaagga

SEQ ID NO: 4805803 - DNA, 25 bp, Homo sapien
caggaaaactccagccacaattgga

SEQ ID NO: 4805804 - DNA, 25 bp, Homo sapien
tatgaatagctttttgggtctcagc

SEQ ID NO: 4805805 - DNA, 25 bp, Homo sapien
tatatcaggctgattacaagtctcc

SEQ ID NO: 4805806 - DNA, 25 bp, Homo sapien
gaggccaacggatcacctcaaatca

SEQ ID NO: 4805807 - DNA, 25 bp, Homo sapien
aggccaacggatcacctcaaatcag

SEQ ID NO: 4805808 - DNA, 25 bp, Homo sapien
ggccaacggatcacctcaaatcagg

SEQ ID NO: 4805809 - DNA, 25 bp, Homo sapien
ccgaggccaacggatcacctcaaat

SEQ ID NO: 4805810 - DNA, 25 bp, Homo sapien
taaaacagctaagtgggacccagat

SEQ ID NO: 4805811 - DNA, 25 bp, Homo sapien
gactaatagggtcatgccaccatgc

SEQ ID NO: 4805812 - DNA, 25 bp, Homo sapien
tgtttgcttccccaatgcccagaag

SEQ ID NO: 4805813 - DNA, 25 bp, Homo sapien
caggagagtctctgtctgtactagt

SEQ ID NO: 4805814 - DNA, 25 bp, Homo sapien
caagaggtcagaaaaccgaagatag

SEQ ID NO: 4805815 - DNA, 25 bp, Homo sapien
tgaacactgttactaaaggaaagct

SEQ ID NO: 4805816 - DNA, 25 bp, Homo sapien
tctattgctgtagttcaatgaacac

SEQ ID NO: 4805817 - DNA, 25 bp, Homo sapien
gaaaaccgaagatagtctattgctg

SEQ ID NO: 4805818 - DNA, 25 bp, Homo sapien
tcttatcacgttagaaaactgcacc

SEQ ID NO: 4805819 - DNA, 25 bp, Homo sapien
tcttgattttcagtagtccatggtg

SEQ ID NO: 4805820 - DNA, 25 bp, Homo sapien
cctcaagtcctcaatcaagatgtag

SEQ ID NO: 4805821 - DNA, 25 bp, Homo sapien
tccagacatttaacttaggtccaag

SEQ ID NO: 4805822 - DNA, 25 bp, Homo sapien
cagaatggatgctaattccaaaatg

SEQ ID NO: 4805823 - DNA, 25 bp, Homo sapien
tcatcaatggtattctcaaagaaca

SEQ ID NO: 4805824 - DNA, 25 bp, Homo sapien
aacacgtttcgaacatccagaatgg

SEQ ID NO: 4805825 - DNA, 25 bp, Homo sapien
gattctccactgtttcatcccttgg

SEQ ID NO: 4805826 - DNA, 25 bp, Homo sapien
caatgcttagtcacagaaggtttac

SEQ ID NO: 4805827 - DNA, 25 bp, Homo sapien
tagccaacactgtacaactgccatg

SEQ ID NO: 4805828 - DNA, 25 bp, Homo sapien
cctgaactgtggtatgctcagacaa

SEQ ID NO: 4805829 - DNA, 25 bp, Homo sapien
tgggtactggactgactaaaaagga

SEQ ID NO: 4805830 - DNA, 25 bp, Homo sapien
ttgcttcatgtataaagtgcaggtc

SEQ ID NO: 4805831 - DNA, 25 bp, Homo sapien
taatatggtataataggcttaaccc

SEQ ID NO: 4805832 - DNA, 25 bp, Homo sapien
ccaatgggaattagagctagcctgt

SEQ ID NO: 4805833 - DNA, 25 bp, Homo sapien
taagtgtacaataaaggacggctgt

SEQ ID NO: 4805834 - DNA, 25 bp, Homo sapien
ttacaaagcacctcctcagctccat

SEQ ID NO: 4805835 - DNA, 25 bp, Homo sapien
gtttacaaagcacctcctcagctcc

SEQ ID NO: 4805836 - DNA, 25 bp, Homo sapien
tttacaaagcacctcctcagctcca

SEQ ID NO: 4805837 - DNA, 25 bp, Homo sapien
cagcgagcacatcatggagggacac

SEQ ID NO: 4805838 - DNA, 25 bp, Homo sapien
agcgagcacatcatggagggacacg

SEQ ID NO: 4805839 - DNA, 25 bp, Homo sapien
agtccagtgattcctccgctagtct

SEQ ID NO: 4805840 - DNA, 25 bp, Homo sapien
tgatcacgtaggttgctagatctct

SEQ ID NO: 4805841 - DNA, 25 bp, Homo sapien
gtaggttgctagatctctacccagt

SEQ ID NO: 4805842 - DNA, 25 bp, Homo sapien
tctacccagtttaccagttaagaca

SEQ ID NO: 4805843 - DNA, 25 bp, Homo sapien
catggaggttcaaactggcatggtg

SEQ ID NO: 4805844 - DNA, 25 bp, Homo sapien
gcaggccacggcgattccagtgcgc

SEQ ID NO: 4805845 - DNA, 25 bp, Homo sapien
cagcagccatagagcggggccaatt

SEQ ID NO: 4805846 - DNA, 25 bp, Homo sapien
ggcgattccagtgcgcaggccccag

SEQ ID NO: 4805847 - DNA, 25 bp, Homo sapien
aatattcctaggctatgtagttcat

SEQ ID NO: 4805848 - DNA, 25 bp, Homo sapien
cacagttggcccatgcagtggtaca

SEQ ID NO: 4805849 - DNA, 25 bp, Homo sapien
tattcctaggctatgtagttcatct

SEQ ID NO: 4805850 - DNA, 25 bp, Homo sapien
atattcctaggctatgtagttcatc

SEQ ID NO: 4805851 - DNA, 25 bp, Homo sapien
atgataaaattcgtctttaataatg

SEQ ID NO: 4805852 - DNA, 25 bp, Homo sapien
aatgataaaattcgtctttaataat

SEQ ID NO: 4805853 - DNA, 25 bp, Homo sapien
gagcaagcgaagaaattcatctcca

SEQ ID NO: 4805854 - DNA, 25 bp, Homo sapien
gaggagcaagcgaagaaattcatct

SEQ ID NO: 4805855 - DNA, 25 bp, Homo sapien
gtgaggagcaagcgaagaaattcat

SEQ ID NO: 4805856 - DNA, 25 bp, Homo sapien
ggagcaagcgaagaaattcatctcc

SEQ ID NO: 4805857 - DNA, 25 bp, Homo sapien
gatttttcgaagatattcttgacac

SEQ ID NO: 4805858 - DNA, 25 bp, Homo sapien
tattgaacgtgaatgagtcagtagc

SEQ ID NO: 4805859 - DNA, 25 bp, Homo sapien
tcagtagctgggcaatatcacggtt

SEQ ID NO: 4805860 - DNA, 25 bp, Homo sapien
ggcaatatcacggttgatttttcga

SEQ ID NO: 4805861 - DNA, 25 bp, Homo sapien
gcttgacaatccagagacaaatagg

SEQ ID NO: 4805862 - DNA, 25 bp, Homo sapien
tgacaatccagagacaaataggaag

SEQ ID NO: 4805863 - DNA, 25 bp, Homo sapien
atccagagacaaataggaaggccat

SEQ ID NO: 4805864 - DNA, 25 bp, Homo sapien
caatccagagacaaataggaaggcc

SEQ ID NO: 4805865 - DNA, 25 bp, Homo sapien
gagtgaagaggctacctcgctgaga

SEQ ID NO: 4805866 - DNA, 25 bp, Homo sapien
tagaggattgttcaaaaagagagtg

SEQ ID NO: 4805867 - DNA, 25 bp, Homo sapien
agagagtgaagaggctacctcgctg

SEQ ID NO: 4805868 - DNA, 25 bp, Homo sapien
aagaggctacctcgctgagattgat

SEQ ID NO: 4805869 - DNA, 25 bp, Homo sapien
taataaatgttgaatagcactttgg

SEQ ID NO: 4805870 - DNA, 25 bp, Homo sapien
aataaatgttgaatagcactttggg

SEQ ID NO: 4805871 - DNA, 25 bp, Homo sapien
agcaagcagactagtggctgtccaa

SEQ ID NO: 4805872 - DNA, 25 bp, Homo sapien
caagcagactagtggctgtccaaac

SEQ ID NO: 4805873 - DNA, 25 bp, Homo sapien
aaagcaagcagactagtggctgtcc

SEQ ID NO: 4805874 - DNA, 25 bp, Homo sapien
gcaagcagactagtggctgtccaaa

SEQ ID NO: 4805875 - DNA, 25 bp, Homo sapien
tacaagagtaggcaggaaaccaatg

SEQ ID NO: 4805876 - DNA, 25 bp, Homo sapien
tgaaagagcctcttagccaggcgcg

SEQ ID NO: 4805877 - DNA, 25 bp, Homo sapien
gactccaaaacatttaggacttatg

SEQ ID NO: 4805878 - DNA, 25 bp, Homo sapien
tacttcataccacacactaggacaa

SEQ ID NO: 4805879 - DNA, 25 bp, Homo sapien
caatgtggtacaagatgttactact

SEQ ID NO: 4805880 - DNA, 25 bp, Homo sapien
tatggtgcaatgtggtacaagatgt

SEQ ID NO: 4805881 - DNA, 25 bp, Homo sapien
gatatggtgcaatgtggtacaagat

SEQ ID NO: 4805882 - DNA, 25 bp, Homo sapien
ggtgcaatgtggtacaagatgttac

SEQ ID NO: 4805883 - DNA, 25 bp, Homo sapien
aatctagcaacttgaatttgggttt

SEQ ID NO: 4805884 - DNA, 25 bp, Homo sapien
tcaatctagcaacttgaatttgggt

SEQ ID NO: 4805885 - DNA, 25 bp, Homo sapien
cttgaatttgggttttgaagatctc

SEQ ID NO: 4805886 - DNA, 25 bp, Homo sapien
tgaatttgggttttgaagatctcat

SEQ ID NO: 4805887 - DNA, 25 bp, Homo sapien
ctgtgcaatagctctcatggaactc

SEQ ID NO: 4805888 - DNA, 25 bp, Homo sapien
cttatacgcaacactattagacgaa

SEQ ID NO: 4805889 - DNA, 25 bp, Homo sapien
ttagacgaatccacaatgatgaaca

SEQ ID NO: 4805890 - DNA, 25 bp, Homo sapien
aaaggatagagatccccgggatgaa

SEQ ID NO: 4805891 - DNA, 25 bp, Homo sapien
gtgaaaggatagagatccccgggat

SEQ ID NO: 4805892 - DNA, 25 bp, Homo sapien
tccattaataatatcccggttacta

SEQ ID NO: 4805893 - DNA, 25 bp, Homo sapien
tactattagtaagtacacctccaaa

SEQ ID NO: 4805894 - DNA, 25 bp, Homo sapien
ttccttgtgggactgatttcgtttg

SEQ ID NO: 4805895 - DNA, 25 bp, Homo sapien
gatttcgtttgtggatggcatctcc

SEQ ID NO: 4805896 - DNA, 25 bp, Homo sapien
ccgacaggtaaatcagaagcacgct

SEQ ID NO: 4805897 - DNA, 25 bp, Homo sapien
cttcactatcagaacgacctgtggg

SEQ ID NO: 4805898 - DNA, 25 bp, Homo sapien
gaagcacgctattggcaggcagctc

SEQ ID NO: 4805899 - DNA, 25 bp, Homo sapien
ggaaaacgccagtggccgacaggta

SEQ ID NO: 4805900 - DNA, 25 bp, Homo sapien
cttaaaagacgctgctaagaaggta

SEQ ID NO: 4805901 - DNA, 25 bp, Homo sapien
tggtttgtagagcagatacttgtgg

SEQ ID NO: 4805902 - DNA, 25 bp, Homo sapien
tatatagctggctgaaggttggttt

SEQ ID NO: 4805903 - DNA, 25 bp, Homo sapien
ggttttctcgtctagtaggcttgtc

SEQ ID NO: 4805904 - DNA, 25 bp, Homo sapien
ccagagcttgtaacatccggaacat

SEQ ID NO: 4805905 - DNA, 25 bp, Homo sapien
aaattcattggctccctttccagag

SEQ ID NO: 4805906 - DNA, 25 bp, Homo sapien
gaagctaaattcattggctcccttt

SEQ ID NO: 4805907 - DNA, 25 bp, Homo sapien
catgtcaacagttagttcactgaac

SEQ ID NO: 4805908 - DNA, 25 bp, Homo sapien
aagacttttatcacgttactagttg

SEQ ID NO: 4805909 - DNA, 25 bp, Homo sapien
aacaaacacaacctagccttaatgc

SEQ ID NO: 4805910 - DNA, 25 bp, Homo sapien
tgcaacacgcagactttaaagactt

SEQ ID NO: 4805911 - DNA, 25 bp, Homo sapien
cacgttactagttgtgactttcaca

SEQ ID NO: 4805912 - DNA, 25 bp, Homo sapien
aactgtcccacaatcatgccctgtt

SEQ ID NO: 4805913 - DNA, 25 bp, Homo sapien
taccaataatgagtgcgtcagccag

SEQ ID NO: 4805914 - DNA, 25 bp, Homo sapien
ctgtttcagcaaggcgattcgatgt

SEQ ID NO: 4805915 - DNA, 25 bp, Homo sapien
gcgattcgatgtgataacaatggta

SEQ ID NO: 4805916 - DNA, 25 bp, Homo sapien
ttgatcttcagtattaaatcggtga

SEQ ID NO: 4805917 - DNA, 25 bp, Homo sapien
tattaaatcggtgagtataatcttc

SEQ ID NO: 4805918 - DNA, 25 bp, Homo sapien
tcttgaagcaccaagttccattcca

SEQ ID NO: 4805919 - DNA, 25 bp, Homo sapien
tacttcttgaagcaccaagttccat

SEQ ID NO: 4805920 - DNA, 25 bp, Homo sapien
tttaccagatcctttacaacatcca

SEQ ID NO: 4805921 - DNA, 25 bp, Homo sapien
ttaccagatcctttacaacatccat

SEQ ID NO: 4805922 - DNA, 25 bp, Homo sapien
ctttaccagatcctttacaacatcc

SEQ ID NO: 4805923 - DNA, 25 bp, Homo sapien
gacaaactactataaatcttgcata

SEQ ID NO: 4805924 - DNA, 25 bp, Homo sapien
tataaatcttgcataatatcgtaac

SEQ ID NO: 4805925 - DNA, 25 bp, Homo sapien
tcttgcataatatcgtaacttctta

SEQ ID NO: 4805926 - DNA, 25 bp, Homo sapien
ctactataaatcttgcataatatcg

SEQ ID NO: 4805927 - DNA, 25 bp, Homo sapien
aagggtccacatcaagccctcttta

SEQ ID NO: 4805928 - DNA, 25 bp, Homo sapien
cagtgccaaagccttcaattttaca

SEQ ID NO: 4805929 - DNA, 25 bp, Homo sapien
tgccaaagccttcaattttacattc

SEQ ID NO: 4805930 - DNA, 25 bp, Homo sapien
tgcaagggtccacatcaagccctct

SEQ ID NO: 4805931 - DNA, 25 bp, Homo sapien
ctcttgggtattcagaatcttcacc

SEQ ID NO: 4805932 - DNA, 25 bp, Homo sapien
ccatatccaaccaggttcagctttg

SEQ ID NO: 4805933 - DNA, 25 bp, Homo sapien
gggtattcagaatcttcaccttctc

SEQ ID NO: 4805934 - DNA, 25 bp, Homo sapien
cttctccatatccaaccaggttcag

SEQ ID NO: 4805935 - DNA, 25 bp, Homo sapien
ggctgtatgtaatatctcctctcct

SEQ ID NO: 4805936 - DNA, 25 bp, Homo sapien
gctgtatgtaatatctcctctccta

SEQ ID NO: 4805937 - DNA, 25 bp, Homo sapien
gatagctggtttccgatgtgcgtaa

SEQ ID NO: 4805938 - DNA, 25 bp, Homo sapien
gcctcattcagatagctggtttccg

SEQ ID NO: 4805939 - DNA, 25 bp, Homo sapien
gagaataatatgatctctgtctgat

SEQ ID NO: 4805940 - DNA, 25 bp, Homo sapien
aataatatgatctctgtctgattgc

SEQ ID NO: 4805941 - DNA, 25 bp, Homo sapien
atgatagtatagctgcccaatcttg

SEQ ID NO: 4805942 - DNA, 25 bp, Homo sapien
atttctcctatttgccagcgcttca

SEQ ID NO: 4805943 - DNA, 25 bp, Homo sapien
gccataccgattatccaagacttgt

SEQ ID NO: 4805944 - DNA, 25 bp, Homo sapien
tttgccagcgcttcaagccataccg

SEQ ID NO: 4805945 - DNA, 25 bp, Homo sapien
tgctgctgctggaacttccagagtt

SEQ ID NO: 4805946 - DNA, 25 bp, Homo sapien
ctgctggaacttccagagtttggtg

SEQ ID NO: 4805947 - DNA, 25 bp, Homo sapien
ctgctgctggaacttccagagtttg

SEQ ID NO: 4805948 - DNA, 25 bp, Homo sapien
cgatgctgctgctggaacttccaga

SEQ ID NO: 4805949 - DNA, 25 bp, Homo sapien
aaaataggactgccactgcttctgt

SEQ ID NO: 4805950 - DNA, 25 bp, Homo sapien
tccaaaataggactgccactgcttc

SEQ ID NO: 4805951 - DNA, 25 bp, Homo sapien
caaaataggactgccactgcttctg

SEQ ID NO: 4805952 - DNA, 25 bp, Homo sapien
ccaaaataggactgccactgcttct

SEQ ID NO: 4805953 - DNA, 25 bp, Homo sapien
ggattagacagtatgtgtggattac

SEQ ID NO: 4805954 - DNA, 25 bp, Homo sapien
tgaataatgggaaaaccgagaagag

SEQ ID NO: 4805955 - DNA, 25 bp, Homo sapien
taacgtaaattcagagggtatggtg

SEQ ID NO: 4805956 - DNA, 25 bp, Homo sapien
tgtggattacttgaaagaggcctgg

SEQ ID NO: 4805957 - DNA, 25 bp, Homo sapien
aaggcaaaggaataagccaacttct

SEQ ID NO: 4805958 - DNA, 25 bp, Homo sapien
tcaggttttcagtcaaagagcacac

SEQ ID NO: 4805959 - DNA, 25 bp, Homo sapien
taagccaacttctctgaatcaggtt

SEQ ID NO: 4805960 - DNA, 25 bp, Homo sapien
tggctcttaggatgctgctgacctc

SEQ ID NO: 4805961 - DNA, 25 bp, Homo sapien
gggcggtgggtgccgaggcaggaga

SEQ ID NO: 4805962 - DNA, 25 bp, Homo sapien
ggggcggtgggtgccgaggcaggag

SEQ ID NO: 4805963 - DNA, 25 bp, Homo sapien
cttaacccattgaacagttgcttag

SEQ ID NO: 4805964 - DNA, 25 bp, Homo sapien
taacccattgaacagttgcttagat

SEQ ID NO: 4805965 - DNA, 25 bp, Homo sapien
acccattgaacagttgcttagattt

SEQ ID NO: 4805966 - DNA, 25 bp, Homo sapien
ctctctccctgtgggatatcatctt

SEQ ID NO: 4805967 - DNA, 25 bp, Homo sapien
tgtaagaaaacatatgttcattcat

SEQ ID NO: 4805968 - DNA, 25 bp, Homo sapien
ctgtaagaaaacatatgttcattca

SEQ ID NO: 4805969 - DNA, 25 bp, Homo sapien
gaaatgttgatatctttccccttga

SEQ ID NO: 4805970 - DNA, 25 bp, Homo sapien
gaatgactgctatcaccagaacctc

SEQ ID NO: 4805971 - DNA, 25 bp, Homo sapien
atgactgctatcaccagaacctctg

SEQ ID NO: 4805972 - DNA, 25 bp, Homo sapien
aatgttgatatctttccccttgaga

SEQ ID NO: 4805973 - DNA, 25 bp, Homo sapien
tgcccggccatgagctcatattttt

SEQ ID NO: 4805974 - DNA, 25 bp, Homo sapien
cgtgcccggccatgagctcatattt

SEQ ID NO: 4805975 - DNA, 25 bp, Homo sapien
ccaatgtctataataaagcccagta

SEQ ID NO: 4805976 - DNA, 25 bp, Homo sapien
agcccagtactaatagttacacaag

SEQ ID NO: 4805977 - DNA, 25 bp, Homo sapien
ctccaatgtctataataaagcccag

SEQ ID NO: 4805978 - DNA, 25 bp, Homo sapien
cagtactaatagttacacaagaaac

SEQ ID NO: 4805979 - DNA, 25 bp, Homo sapien
taaaggcctattacatgtcacgcaa

SEQ ID NO: 4805980 - DNA, 25 bp, Homo sapien
gagtaagcaggccagataggttaat

SEQ ID NO: 4805981 - DNA, 25 bp, Homo sapien
taagatcacaaagcagacgagtgcc

SEQ ID NO: 4805982 - DNA, 25 bp, Homo sapien
gcaccaggactcaatttcggttcta

SEQ ID NO: 4805983 - DNA, 25 bp, Homo sapien
tattctactaggtttcaagaaatga

SEQ ID NO: 4805984 - DNA, 25 bp, Homo sapien
ctttcaattgcccttgaattatagg

SEQ ID NO: 4805985 - DNA, 25 bp, Homo sapien
aggcagatacatattctactaggtt

SEQ ID NO: 4805986 - DNA, 25 bp, Homo sapien
gcccttgaattataggcagatacat

SEQ ID NO: 4805987 - DNA, 25 bp, Homo sapien
ttaatattccaaggcaatggttccc

SEQ ID NO: 4805988 - DNA, 25 bp, Homo sapien
ggtaaatacggtgacatctgtcgga

SEQ ID NO: 4805989 - DNA, 25 bp, Homo sapien
cactctctggaggtaactatgatta

SEQ ID NO: 4805990 - DNA, 25 bp, Homo sapien
tatcacatcaaattcacaaggatgc

SEQ ID NO: 4805991 - DNA, 25 bp, Homo sapien
aaaaaggcttatgtcaacaattcta

SEQ ID NO: 4805992 - DNA, 25 bp, Homo sapien
aaaaaaggcttatgtcaacaattct

SEQ ID NO: 4805993 - DNA, 25 bp, Homo sapien
acatgatgactctatagtttggaaa

SEQ ID NO: 4805994 - DNA, 25 bp, Homo sapien
ctgaaaatctatacatgatgactct

SEQ ID NO: 4805995 - DNA, 25 bp, Homo sapien
gattttaggaaaccacgtgtgagca

SEQ ID NO: 4805996 - DNA, 25 bp, Homo sapien
ttatatattagtcagggctctccag

SEQ ID NO: 4805997 - DNA, 25 bp, Homo sapien
catgcactccccgtctagaaaagaa

SEQ ID NO: 4805998 - DNA, 25 bp, Homo sapien
tacaaacagtggtgcctagccttag

SEQ ID NO: 4805999 - DNA, 25 bp, Homo sapien
catccagctaacaaacagatatttt

SEQ ID NO: 4806000 - DNA, 25 bp, Homo sapien
aaaaattattagcactgggcgcagt

SEQ ID NO: 4806001 - DNA, 25 bp, Homo sapien
aggtgcaagaacaccacatccagct

SEQ ID NO: 4806002 - DNA, 25 bp, Homo sapien
gcaggctgggcattaactcactcct

SEQ ID NO: 4806003 - DNA, 25 bp, Homo sapien
ttttcgaggcggtttctccactgtg

SEQ ID NO: 4806004 - DNA, 25 bp, Homo sapien
cgttttcgaggcggtttctccactg

SEQ ID NO: 4806005 - DNA, 25 bp, Homo sapien
gggggccaggcgactccgcggctgc

SEQ ID NO: 4806006 - DNA, 25 bp, Homo sapien
tgggggccaggcgactccgcggctg

SEQ ID NO: 4806007 - DNA, 25 bp, Homo sapien
ggggccaggcgactccgcggctgct

SEQ ID NO: 4806008 - DNA, 25 bp, Homo sapien
cgcagggctcgctcgggaagctgag

SEQ ID NO: 4806009 - DNA, 25 bp, Homo sapien
tgctccgccgcgggagctgctccgg

SEQ ID NO: 4806010 - DNA, 25 bp, Homo sapien
tcctgctccgccgcgggagctgctc

SEQ ID NO: 4806011 - DNA, 25 bp, Homo sapien
gccgcagggctcgctcgggaagctg

SEQ ID NO: 4806012 - DNA, 25 bp, Homo sapien
gctaacttcttgtcaggacatacta

SEQ ID NO: 4806013 - DNA, 25 bp, Homo sapien
tataaaatgctaacttcttgtcagg

SEQ ID NO: 4806014 - DNA, 25 bp, Homo sapien
tcttgtcaggacatactacagacta

SEQ ID NO: 4806015 - DNA, 25 bp, Homo sapien
aaaatgctaacttcttgtcaggaca

SEQ ID NO: 4806016 - DNA, 25 bp, Homo sapien
tggttctgggcttacaaagcacaca

SEQ ID NO: 4806017 - DNA, 25 bp, Homo sapien
cctagggcttaagacgtcaaaatct

SEQ ID NO: 4806018 - DNA, 25 bp, Homo sapien
ccaagagcatatcggccaaaggagg

SEQ ID NO: 4806019 - DNA, 25 bp, Homo sapien
tccagacagaataggagctgatgca

SEQ ID NO: 4806020 - DNA, 25 bp, Homo sapien
taaaaactatgtaaggagctgggtg

SEQ ID NO: 4806021 - DNA, 25 bp, Homo sapien
gaaatcaggcaaaacagagatggca

SEQ ID NO: 4806022 - DNA, 25 bp, Homo sapien
tctaagctaaggagtgtcaaacagg

SEQ ID NO: 4806023 - DNA, 25 bp, Homo sapien
taacacgaagctactgacccaacat

SEQ ID NO: 4806024 - DNA, 25 bp, Homo sapien
tacagttcacaaatacaagagtcct

SEQ ID NO: 4806025 - DNA, 25 bp, Homo sapien
tacctgaacagatgctaaagtgctt

SEQ ID NO: 4806026 - DNA, 25 bp, Homo sapien
taaggtcaagtgttacagcaagaga

SEQ ID NO: 4806027 - DNA, 25 bp, Homo sapien
tatggcagttatgttctttaggcac

SEQ ID NO: 4806028 - DNA, 25 bp, Homo sapien
taagcaagagctacatgcagcagtg

SEQ ID NO: 4806029 - DNA, 25 bp, Homo sapien
caagtcttctcaaatgagtccaggg

SEQ ID NO: 4806030 - DNA, 25 bp, Homo sapien
caatgaagtttacatctgggacagg

SEQ ID NO: 4806031 - DNA, 25 bp, Homo sapien
atttggagtccatcgtgcccactga

SEQ ID NO: 4806032 - DNA, 25 bp, Homo sapien
gaaatatggcgttgtcgttctggga

SEQ ID NO: 4806033 - DNA, 25 bp, Homo sapien
ggagcagaccatactgtcaccagct

SEQ ID NO: 4806034 - DNA, 25 bp, Homo sapien
cgatagcagtaattaggagcagacc

SEQ ID NO: 4806035 - DNA, 25 bp, Homo sapien
tgaatctggaactgcccggaataac

SEQ ID NO: 4806036 - DNA, 25 bp, Homo sapien
gataacccagtggactatctgtatg

SEQ ID NO: 4806037 - DNA, 25 bp, Homo sapien
tttttgataacccagtggactatct

SEQ ID NO: 4806038 - DNA, 25 bp, Homo sapien
ggactatctgtatgcagagccaggt

SEQ ID NO: 4806039 - DNA, 25 bp, Homo sapien
cagtggactatctgtatgcagagcc

SEQ ID NO: 4806040 - DNA, 25 bp, Homo sapien
gacatggttgacacttgtggcacaa

SEQ ID NO: 4806041 - DNA, 25 bp, Homo sapien
atgtgaaggatctggtggccatcct

SEQ ID NO: 4806042 - DNA, 25 bp, Homo sapien
cagacaggctgaatgtggactttgc

SEQ ID NO: 4806043 - DNA, 25 bp, Homo sapien
aagaaggccaatgaagtcgaccgca

SEQ ID NO: 4806044 - DNA, 25 bp, Homo sapien
tgatgacgaattcagcagaagaccc

SEQ ID NO: 4806045 - DNA, 25 bp, Homo sapien
cagttctccccaaggtctatgctaa

SEQ ID NO: 4806046 - DNA, 25 bp, Homo sapien
gagattaactgctgggacttcctat

SEQ ID NO: 4806047 - DNA, 25 bp, Homo sapien
tatgctaaattatggcaagagccct

SEQ ID NO: 4806048 - DNA, 25 bp, Homo sapien
caccatagttctctatgcagcccat

SEQ ID NO: 4806049 - DNA, 25 bp, Homo sapien
agtttgttatctagggccaccatag

SEQ ID NO: 4806050 - DNA, 25 bp, Homo sapien
tgagtaagctagactacaagtttgt

SEQ ID NO: 4806051 - DNA, 25 bp, Homo sapien
gcccattagcaatccacaaattaca

SEQ ID NO: 4806052 - DNA, 25 bp, Homo sapien
tcatttgtgacctttgctccaaaaa

SEQ ID NO: 4806053 - DNA, 25 bp, Homo sapien
tttgtgacctttgctccaaaaagcc

SEQ ID NO: 4806054 - DNA, 25 bp, Homo sapien
ctcatttgtgacctttgctccaaaa

SEQ ID NO: 4806055 - DNA, 25 bp, Homo sapien
gtgacctttgctccaaaaagccaac

SEQ ID NO: 4806056 - DNA, 25 bp, Homo sapien
gagataaaccaccatggacacacaa

SEQ ID NO: 4806057 - DNA, 25 bp, Homo sapien
gatccagtgttttgatatcaggaga

SEQ ID NO: 4806058 - DNA, 25 bp, Homo sapien
ttcctgattccgttcgatggttcga

SEQ ID NO: 4806059 - DNA, 25 bp, Homo sapien
ggactgatagcccaggtatccacat

SEQ ID NO: 4806060 - DNA, 25 bp, Homo sapien
tttccatatttggtttggcactcat

SEQ ID NO: 4806061 - DNA, 25 bp, Homo sapien
aaaactttggtacagtatctccagg

SEQ ID NO: 4806062 - DNA, 25 bp, Homo sapien
tctccaggcattagcatttccatat

SEQ ID NO: 4806063 - DNA, 25 bp, Homo sapien
ggtacagtatctccaggcattagca

SEQ ID NO: 4806064 - DNA, 25 bp, Homo sapien
tgaaggtctccaaactatagtaacc

SEQ ID NO: 4806065 - DNA, 25 bp, Homo sapien
tgtaatacgatcaggccatttagcc

SEQ ID NO: 4806066 - DNA, 25 bp, Homo sapien
tctcatgatttcctcgcaaaagtgt

SEQ ID NO: 4806067 - DNA, 25 bp, Homo sapien
agtgaaggtctccaaactatagtaa

SEQ ID NO: 4806068 - DNA, 25 bp, Homo sapien
attacaggtacaagccgccaccaca

SEQ ID NO: 4806069 - DNA, 25 bp, Homo sapien
caggtacaagccgccaccacacccg

SEQ ID NO: 4806070 - DNA, 25 bp, Homo sapien
attatagatgtgagccaccacacct

SEQ ID NO: 4806071 - DNA, 25 bp, Homo sapien
ggattatagatgtgagccaccacac

SEQ ID NO: 4806072 - DNA, 25 bp, Homo sapien
tataacagcgttctaggctcagttt

SEQ ID NO: 4806073 - DNA, 25 bp, Homo sapien
tattacaccaataggaaaacagctg

SEQ ID NO: 4806074 - DNA, 25 bp, Homo sapien
gaagagttgcctacttgaagaaaaa

SEQ ID NO: 4806075 - DNA, 25 bp, Homo sapien
ctgacttgggccaatattacaccaa

SEQ ID NO: 4806076 - DNA, 25 bp, Homo sapien
taaaaacaagagatccctgcacagt

SEQ ID NO: 4806077 - DNA, 25 bp, Homo sapien
tgtgggagggactcgatggaaagta

SEQ ID NO: 4806078 - DNA, 25 bp, Homo sapien
agggactcgatggaaagtaattgaa

SEQ ID NO: 4806079 - DNA, 25 bp, Homo sapien
aaaaacaagagatccctgcacagtc

SEQ ID NO: 4806080 - DNA, 25 bp, Homo sapien
gacctccagttctgaacagttcaca

SEQ ID NO: 4806081 - DNA, 25 bp, Homo sapien
aacctgacctccagttctgaacagt

SEQ ID NO: 4806082 - DNA, 25 bp, Homo sapien
cagttctgaacagttcacaaaggtc

SEQ ID NO: 4806083 - DNA, 25 bp, Homo sapien
tgaacagttcacaaaggtcataaaa

SEQ ID NO: 4806084 - DNA, 25 bp, Homo sapien
tttatgtaagttttacaaatcaata

SEQ ID NO: 4806085 - DNA, 25 bp, Homo sapien
catttgtgatcttaaaaaccagagg

SEQ ID NO: 4806086 - DNA, 25 bp, Homo sapien
atttgtgatcttaaaaaccagaggt

SEQ ID NO: 4806087 - DNA, 25 bp, Homo sapien
taacgaatttgtgagctagctgaaa

SEQ ID NO: 4806088 - DNA, 25 bp, Homo sapien
taaggcacgagcagttttaccctcc

SEQ ID NO: 4806089 - DNA, 25 bp, Homo sapien
gcaggcatgttggtgaagaactcaa

SEQ ID NO: 4806090 - DNA, 25 bp, Homo sapien
caactaatatatagccaagccagga

SEQ ID NO: 4806091 - DNA, 25 bp, Homo sapien
tctaagaggaggtcacaaacgtagt

SEQ ID NO: 4806092 - DNA, 25 bp, Homo sapien
ggaggtcacaaacgtagtcacatag

SEQ ID NO: 4806093 - DNA, 25 bp, Homo sapien
ggtcacaaacgtagtcacatagccg

SEQ ID NO: 4806094 - DNA, 25 bp, Homo sapien
taagaggaggtcacaaacgtagtca

SEQ ID NO: 4806095 - DNA, 25 bp, Homo sapien
gacagacagctttacaagaactgta

SEQ ID NO: 4806096 - DNA, 25 bp, Homo sapien
cactaaggttctaggagacagacag

SEQ ID NO: 4806097 - DNA, 25 bp, Homo sapien
aactacctacagagacactaaggtt

SEQ ID NO: 4806098 - DNA, 25 bp, Homo sapien
gctgtcacacagaattcttaatgca

SEQ ID NO: 4806099 - DNA, 25 bp, Homo sapien
cgtgcccagccagtaaaagattttt

SEQ ID NO: 4806100 - DNA, 25 bp, Homo sapien
gcccagccagtaaaagatttttatc

SEQ ID NO: 4806101 - DNA, 25 bp, Homo sapien
cagccagtaaaagatttttatctgg

SEQ ID NO: 4806102 - DNA, 25 bp, Homo sapien
gtgcccagccagtaaaagattttta

SEQ ID NO: 4806103 - DNA, 25 bp, Homo sapien
tataaatactcgcagaagcctaatg

SEQ ID NO: 4806104 - DNA, 25 bp, Homo sapien
gacccagcaactgtagtcttggcaa

SEQ ID NO: 4806105 - DNA, 25 bp, Homo sapien
ctcgcagaagcctaatgcatcatag

SEQ ID NO: 4806106 - DNA, 25 bp, Homo sapien
tctgtatataaatactcgcagaagc

SEQ ID NO: 4806107 - DNA, 25 bp, Homo sapien
aaacatgcaagtgcatgcatcttta

SEQ ID NO: 4806108 - DNA, 25 bp, Homo sapien
aacatgcaagtgcatgcatctttat

SEQ ID NO: 4806109 - DNA, 25 bp, Homo sapien
acatgcaagtgcatgcatctttata

SEQ ID NO: 4806110 - DNA, 25 bp, Homo sapien
gcagacctctatgtctcttctctac

SEQ ID NO: 4806111 - DNA, 25 bp, Homo sapien
tgtttggtgcccaactactttctaa

SEQ ID NO: 4806112 - DNA, 25 bp, Homo sapien
gccctcacaaacactgggttctaaa

SEQ ID NO: 4806113 - DNA, 25 bp, Homo sapien
gggttcatagccatcattcttagca

SEQ ID NO: 4806114 - DNA, 25 bp, Homo sapien
tgaggccgcgttccggtagccggtg

SEQ ID NO: 4806115 - DNA, 25 bp, Homo sapien
gcgctcctgtcacctccggtggagg

SEQ ID NO: 4806116 - DNA, 25 bp, Homo sapien
ggtggcatctcctgtcagacgccgg

SEQ ID NO: 4806117 - DNA, 25 bp, Homo sapien
tggaggcgaccccatcccgagggca

SEQ ID NO: 4806118 - DNA, 25 bp, Homo sapien
cttcaggtcgttctctggcaggtac

SEQ ID NO: 4806119 - DNA, 25 bp, Homo sapien
tcgttctctggcaggtacttgcaca

SEQ ID NO: 4806120 - DNA, 25 bp, Homo sapien
tggcaggtacttgcacagccgcgct

SEQ ID NO: 4806121 - DNA, 25 bp, Homo sapien
tgcacagccgcgctatttccacata

SEQ ID NO: 4806122 - DNA, 25 bp, Homo sapien
cagcgccgttaaagcgcgacccgtt

SEQ ID NO: 4806123 - DNA, 25 bp, Homo sapien
cctgcgtcacgtccggcccgtgagt

SEQ ID NO: 4806124 - DNA, 25 bp, Homo sapien
cgaagccggaactttccctgcgtca

SEQ ID NO: 4806125 - DNA, 25 bp, Homo sapien
tttaagaataacaagccgcggcaac

SEQ ID NO: 4806126 - DNA, 25 bp, Homo sapien
tccatcaaccttatttccaagttgc

SEQ ID NO: 4806127 - DNA, 25 bp, Homo sapien
ttccatcaaccttatttccaagttg

SEQ ID NO: 4806128 - DNA, 25 bp, Homo sapien
attttccatcaaccttatttccaag

SEQ ID NO: 4806129 - DNA, 25 bp, Homo sapien
ctattttccatcaaccttatttcca

SEQ ID NO: 4806130 - DNA, 25 bp, Homo sapien
tgctccagtcttcagtagggaactg

SEQ ID NO: 4806131 - DNA, 25 bp, Homo sapien
ccattcagtggtctgaacagtggga

SEQ ID NO: 4806132 - DNA, 25 bp, Homo sapien
aactgctgaataggcacagaggata

SEQ ID NO: 4806133 - DNA, 25 bp, Homo sapien
tcttccgtggcaggctgagtgctcc

SEQ ID NO: 4806134 - DNA, 25 bp, Homo sapien
acctcaggctgagtaacagtgaact

SEQ ID NO: 4806135 - DNA, 25 bp, Homo sapien
ctcaggctgagtaacagtgaactca

SEQ ID NO: 4806136 - DNA, 25 bp, Homo sapien
ctgagtaacagtgaactcaggagct

SEQ ID NO: 4806137 - DNA, 25 bp, Homo sapien
caggctgagtaacagtgaactcagg

SEQ ID NO: 4806138 - DNA, 25 bp, Homo sapien
tgtcacagccttttcagtagcagct

SEQ ID NO: 4806139 - DNA, 25 bp, Homo sapien
cctcctttgtcacagccttttcagt

SEQ ID NO: 4806140 - DNA, 25 bp, Homo sapien
acagccttttcagtagcagcttgct

SEQ ID NO: 4806141 - DNA, 25 bp, Homo sapien
tttgtcacagccttttcagtagcag

SEQ ID NO: 4806142 - DNA, 25 bp, Homo sapien
aggaaatggtgccacctttgtgcag

SEQ ID NO: 4806143 - DNA, 25 bp, Homo sapien
ttgcatgggatggcaatgtccacat

SEQ ID NO: 4806144 - DNA, 25 bp, Homo sapien
tgagtgagctcccttgttgttgcat

SEQ ID NO: 4806145 - DNA, 25 bp, Homo sapien
tgagctcccttgttgttgcatggga

SEQ ID NO: 4806146 - DNA, 25 bp, Homo sapien
gcatgggatggcaatgtccacatac

SEQ ID NO: 4806147 - DNA, 25 bp, Homo sapien
cataagatgcctctgtttgaggctg

SEQ ID NO: 4806148 - DNA, 25 bp, Homo sapien
atgcctctgtttgaggctggtggtc

SEQ ID NO: 4806149 - DNA, 25 bp, Homo sapien
aacataagatgcctctgtttgaggc

SEQ ID NO: 4806150 - DNA, 25 bp, Homo sapien
taagatgcctctgtttgaggctggt

SEQ ID NO: 4806151 - DNA, 25 bp, Homo sapien
cctaggggatataacactggcatca

SEQ ID NO: 4806152 - DNA, 25 bp, Homo sapien
tattcctaggggatataacactggc

SEQ ID NO: 4806153 - DNA, 25 bp, Homo sapien
taggggatataacactggcatcagc

SEQ ID NO: 4806154 - DNA, 25 bp, Homo sapien
ttcctaggggatataacactggcat

SEQ ID NO: 4806155 - DNA, 25 bp, Homo sapien
gcaggacagcaagggctctggacat

SEQ ID NO: 4806156 - DNA, 25 bp, Homo sapien
gtgccactaagtgggttcctactgc

SEQ ID NO: 4806157 - DNA, 25 bp, Homo sapien
tttgcaggacagcaagggctctgga

SEQ ID NO: 4806158 - DNA, 25 bp, Homo sapien
ccactaagtgggttcctactgcaag

SEQ ID NO: 4806159 - DNA, 25 bp, Homo sapien
tctctagttaagacttgctcctgga

SEQ ID NO: 4806160 - DNA, 25 bp, Homo sapien
gaggcaaagcgtggtggtgtctggc

SEQ ID NO: 4806161 - DNA, 25 bp, Homo sapien
tatatttattgcactcttggcagtc

SEQ ID NO: 4806162 - DNA, 25 bp, Homo sapien
tcttggcagtcgtccctagttgtct

SEQ ID NO: 4806163 - DNA, 25 bp, Homo sapien
cgcaaatcgtttccaagtagccccg

SEQ ID NO: 4806164 - DNA, 25 bp, Homo sapien
atcagctgccgcaggcatctgagtt

SEQ ID NO: 4806165 - DNA, 25 bp, Homo sapien
ccgaacccggcattgcgcaaatcgt

SEQ ID NO: 4806166 - DNA, 25 bp, Homo sapien
tgccgcaggcatctgagttccccaa

SEQ ID NO: 4806167 - DNA, 25 bp, Homo sapien
acttcaattctcttacctgtaaaat

SEQ ID NO: 4806168 - DNA, 25 bp, Homo sapien
ctacttcaattctcttacctgtaaa

SEQ ID NO: 4806169 - DNA, 25 bp, Homo sapien
tttcaagatatggtcttactctttt

SEQ ID NO: 4806170 - DNA, 25 bp, Homo sapien
ctactgaaatgtaatagtattgtct

SEQ ID NO: 4806171 - DNA, 25 bp, Homo sapien
ggggagcgatagtgagcaaagtaga

SEQ ID NO: 4806172 - DNA, 25 bp, Homo sapien
ttagcagatgttagggggagcgata

SEQ ID NO: 4806173 - DNA, 25 bp, Homo sapien
gatgttagggggagcgatagtgagc

SEQ ID NO: 4806174 - DNA, 25 bp, Homo sapien
tagtgggaatgaatgttagcagatg

SEQ ID NO: 4806175 - DNA, 25 bp, Homo sapien
gaagatcgcacttgtgcatcctagc

SEQ ID NO: 4806176 - DNA, 25 bp, Homo sapien
agtgggcgaagatcgcacttgtgca

SEQ ID NO: 4806177 - DNA, 25 bp, Homo sapien
cacttgtgcatcctagcctgagcaa

SEQ ID NO: 4806178 - DNA, 25 bp, Homo sapien
tgcagtgggcgaagatcgcacttgt

SEQ ID NO: 4806179 - DNA, 25 bp, Homo sapien
ccaaatgcttttcgggcagtgcagc

SEQ ID NO: 4806180 - DNA, 25 bp, Homo sapien
gattctgacacagctagggttcaca

SEQ ID NO: 4806181 - DNA, 25 bp, Homo sapien
tccacggtagtgagagcctttgagg

SEQ ID NO: 4806182 - DNA, 25 bp, Homo sapien
gagttacagactaggtggtccacgg

SEQ ID NO: 4806183 - DNA, 25 bp, Homo sapien
catttattggtgtcacttatggtag

SEQ ID NO: 4806184 - DNA, 25 bp, Homo sapien
tgtcacttatggtagaaaaaacttc

SEQ ID NO: 4806185 - DNA, 25 bp, Homo sapien
aaaacttcctacaccagatgcacat

SEQ ID NO: 4806186 - DNA, 25 bp, Homo sapien
aacttcctacaccagatgcacatga

SEQ ID NO: 4806187 - DNA, 25 bp, Homo sapien
cccgctttttaagatggccaattct

SEQ ID NO: 4806188 - DNA, 25 bp, Homo sapien
aggtgaacacacaccctaacccagg

SEQ ID NO: 4806189 - DNA, 25 bp, Homo sapien
aatagaacattttgaaggtgaacac

SEQ ID NO: 4806190 - DNA, 25 bp, Homo sapien
cgctttttaagatggccaattcttc

SEQ ID NO: 4806191 - DNA, 25 bp, Homo sapien
attcgagacttaagttctttcaatt

SEQ ID NO: 4806192 - DNA, 25 bp, Homo sapien
cattcgagacttaagttctttcaat

SEQ ID NO: 4806193 - DNA, 25 bp, Homo sapien
tacattcgagacttaagttctttca

SEQ ID NO: 4806194 - DNA, 25 bp, Homo sapien
acattcgagacttaagttctttcaa

SEQ ID NO: 4806195 - DNA, 25 bp, Homo sapien
gctgtcactcgaagaataccattca

SEQ ID NO: 4806196 - DNA, 25 bp, Homo sapien
tcgaagaataccattcacatctatc

SEQ ID NO: 4806197 - DNA, 25 bp, Homo sapien
tcttcagctgtcactcgaagaatac

SEQ ID NO: 4806198 - DNA, 25 bp, Homo sapien
cagctgtcactcgaagaataccatt

SEQ ID NO: 4806199 - DNA, 25 bp, Homo sapien
accttgattgtaacagttggttgat

SEQ ID NO: 4806200 - DNA, 25 bp, Homo sapien
gaccttgattgtaacagttggttga

SEQ ID NO: 4806201 - DNA, 25 bp, Homo sapien
cagttggttgattatcagaagctgt

SEQ ID NO: 4806202 - DNA, 25 bp, Homo sapien
tgtgaccttgttgctcatattctgg

SEQ ID NO: 4806203 - DNA, 25 bp, Homo sapien
aaacagttgctaatgatcttgagac

SEQ ID NO: 4806204 - DNA, 25 bp, Homo sapien
caagttctccctatgagctatgtaa

SEQ ID NO: 4806205 - DNA, 25 bp, Homo sapien
aaagcaatagctaatgagtcttcca

SEQ ID NO: 4806206 - DNA, 25 bp, Homo sapien
ctgtatcttgatcaccagagagcac

SEQ ID NO: 4806207 - DNA, 25 bp, Homo sapien
tcttgatcaccagagagcacaccag

SEQ ID NO: 4806208 - DNA, 25 bp, Homo sapien
atcaccagagagcacaccagcctgg

SEQ ID NO: 4806209 - DNA, 25 bp, Homo sapien
tatcttgatcaccagagagcacacc

SEQ ID NO: 4806210 - DNA, 25 bp, Homo sapien
tgggtttatgccacgggatggttcc

SEQ ID NO: 4806211 - DNA, 25 bp, Homo sapien
gtttatgccacgggatggttccttg

SEQ ID NO: 4806212 - DNA, 25 bp, Homo sapien
tttatgccacgggatggttccttgc

SEQ ID NO: 4806213 - DNA, 25 bp, Homo sapien
tctgggtttatgccacgggatggtt

SEQ ID NO: 4806214 - DNA, 25 bp, Homo sapien
tggacgggcttcatagtagaccgga

SEQ ID NO: 4806215 - DNA, 25 bp, Homo sapien
cgggcttcatagtagaccggaacag

SEQ ID NO: 4806216 - DNA, 25 bp, Homo sapien
gacgggcttcatagtagaccggaac

SEQ ID NO: 4806217 - DNA, 25 bp, Homo sapien
tctggacgggcttcatagtagaccg

SEQ ID NO: 4806218 - DNA, 25 bp, Homo sapien
tatctagatgcaatgtcctgaattc

SEQ ID NO: 4806219 - DNA, 25 bp, Homo sapien
tctgttatctaagtatctagatgca

SEQ ID NO: 4806220 - DNA, 25 bp, Homo sapien
tatctaagtatctagatgcaatgtc

SEQ ID NO: 4806221 - DNA, 25 bp, Homo sapien
tgtgatgtctgttatctaagtatct

SEQ ID NO: 4806222 - DNA, 25 bp, Homo sapien
ccatgacacgctggtcaaagtcttc

SEQ ID NO: 4806223 - DNA, 25 bp, Homo sapien
tgagaagacagggcccgtttggcct

SEQ ID NO: 4806224 - DNA, 25 bp, Homo sapien
tgtcaatggtgagaagagacacatc

SEQ ID NO: 4806225 - DNA, 25 bp, Homo sapien
gtacagtttgatgaagtgttccatg

SEQ ID NO: 4806226 - DNA, 25 bp, Homo sapien
gggcatcattaaaataggctggtac

SEQ ID NO: 4806227 - DNA, 25 bp, Homo sapien
taacatttaggccagcaatagttcc

SEQ ID NO: 4806228 - DNA, 25 bp, Homo sapien
gtacagtaacaactgcatgggtaac

SEQ ID NO: 4806229 - DNA, 25 bp, Homo sapien
ttccagcgtctttggttgcttggcg

SEQ ID NO: 4806230 - DNA, 25 bp, Homo sapien
gtattgtcacatagtttaaccctta

SEQ ID NO: 4806231 - DNA, 25 bp, Homo sapien
taaattacagtctggccaggcggtg

SEQ ID NO: 4806232 - DNA, 25 bp, Homo sapien
atttaaattacagtctggccaggcg

SEQ ID NO: 4806233 - DNA, 25 bp, Homo sapien
aaagataattaagtgtattgtcaca

SEQ ID NO: 4806234 - DNA, 25 bp, Homo sapien
tagtgagaaccatggcagaaatttc

SEQ ID NO: 4806235 - DNA, 25 bp, Homo sapien
ctccaatatcaacttgaatgtatgg

SEQ ID NO: 4806236 - DNA, 25 bp, Homo sapien
tctttcattttagtgagaaccatgg

SEQ ID NO: 4806237 - DNA, 25 bp, Homo sapien
caaataagcctcagcggtttctttc

SEQ ID NO: 4806238 - DNA, 25 bp, Homo sapien
cactaccatccccacaatttggttt

SEQ ID NO: 4806239 - DNA, 25 bp, Homo sapien
agatacaatgacatctcaaagttta

SEQ ID NO: 4806240 - DNA, 25 bp, Homo sapien
ctagaaatacttcagggagtatagg

SEQ ID NO: 4806241 - DNA, 25 bp, Homo sapien
gtataggtgtcttacaaagttcagt

SEQ ID NO: 4806242 - DNA, 25 bp, Homo sapien
ccgttctctaactggatgagaaaaa

SEQ ID NO: 4806243 - DNA, 25 bp, Homo sapien
ctctaactggatgagaaaaacccgg

SEQ ID NO: 4806244 - DNA, 25 bp, Homo sapien
ttctctaactggatgagaaaaaccc

SEQ ID NO: 4806245 - DNA, 25 bp, Homo sapien
cgttctctaactggatgagaaaaac

SEQ ID NO: 4806246 - DNA, 25 bp, Homo sapien
ctgcacagacgggtcattccacgtg

SEQ ID NO: 4806247 - DNA, 25 bp, Homo sapien
ttcttggcggcatcgccaatcagac

SEQ ID NO: 4806248 - DNA, 25 bp, Homo sapien
tggcggcatcgccaatcagacgttc

SEQ ID NO: 4806249 - DNA, 25 bp, Homo sapien
acagacgggtcattccacgtgcggc

SEQ ID NO: 4806250 - DNA, 25 bp, Homo sapien
accgtgcccacgtcctccttcttgt

SEQ ID NO: 4806251 - DNA, 25 bp, Homo sapien
tcgatgccgaccaccgtgcccacgt

SEQ ID NO: 4806252 - DNA, 25 bp, Homo sapien
gtggtccccaggtcgatgccgacca

SEQ ID NO: 4806253 - DNA, 25 bp, Homo sapien
aggtggtccccaggtcgatgccgac

SEQ ID NO: 4806254 - DNA, 25 bp, Homo sapien
agcgcaatttccgacttgcaggcgg

SEQ ID NO: 4806255 - DNA, 25 bp, Homo sapien
gcacagcgcaatttccgacttgcag

SEQ ID NO: 4806256 - DNA, 25 bp, Homo sapien
aatttccgacttgcaggcggcaggg

SEQ ID NO: 4806257 - DNA, 25 bp, Homo sapien
aggagcacagcgcaatttccgactt

SEQ ID NO: 4806258 - DNA, 25 bp, Homo sapien
accccaataggtcaatctgtctgtg

SEQ ID NO: 4806259 - DNA, 25 bp, Homo sapien
caataggtcaatctgtctgtgctgt

SEQ ID NO: 4806260 - DNA, 25 bp, Homo sapien
ctagaaatacaggccgcggcgcttc

SEQ ID NO: 4806261 - DNA, 25 bp, Homo sapien
cgcgaaacaccccaataggtcaatc

SEQ ID NO: 4806262 - DNA, 25 bp, Homo sapien
cgtcgcctactcggcttatataccc

SEQ ID NO: 4806263 - DNA, 25 bp, Homo sapien
gaggccgccgattggtgaaggccct

SEQ ID NO: 4806264 - DNA, 25 bp, Homo sapien
gcctactcggcttatataccctccc

SEQ ID NO: 4806265 - DNA, 25 bp, Homo sapien
aggccgccgattggtgaaggccctg

SEQ ID NO: 4806266 - DNA, 25 bp, Homo sapien
gcccggccgtcaggtccaactgacc

SEQ ID NO: 4806267 - DNA, 25 bp, Homo sapien
caggggagagatgtggcggcgcgca

SEQ ID NO: 4806268 - DNA, 25 bp, Homo sapien
tcgcggccgggttgctccggcctag

SEQ ID NO: 4806269 - DNA, 25 bp, Homo sapien
tcttcccgtcagtgtcgggcgaggt

SEQ ID NO: 4806270 - DNA, 25 bp, Homo sapien
gaggtctgaaagtgagggagctgtt

SEQ ID NO: 4806271 - DNA, 25 bp, Homo sapien
gctgtcggaggtctgaaagtgaggg

SEQ ID NO: 4806272 - DNA, 25 bp, Homo sapien
ggtctgaaagtgagggagctgttgg

SEQ ID NO: 4806273 - DNA, 25 bp, Homo sapien
tcggaggtctgaaagtgagggagct

SEQ ID NO: 4806274 - DNA, 25 bp, Homo sapien
aaatccgtctcaactggaatttggc

SEQ ID NO: 4806275 - DNA, 25 bp, Homo sapien
tccgtctcaactggaatttggctgc

SEQ ID NO: 4806276 - DNA, 25 bp, Homo sapien
gcactaagtggcacagcactccatc

SEQ ID NO: 4806277 - DNA, 25 bp, Homo sapien
cacgaccaaatccgtctcaactgga

SEQ ID NO: 4806278 - DNA, 25 bp, Homo sapien
tatggcgtagggtagcaggtacagt

SEQ ID NO: 4806279 - DNA, 25 bp, Homo sapien
ctatggcgtagggtagcaggtacag

SEQ ID NO: 4806280 - DNA, 25 bp, Homo sapien
gccggtctctggacagctatggcgt

SEQ ID NO: 4806281 - DNA, 25 bp, Homo sapien
ctctggacagctatggcgtagggta

SEQ ID NO: 4806282 - DNA, 25 bp, Homo sapien
gggggcagatgaaggtaatcccgga

SEQ ID NO: 4806283 - DNA, 25 bp, Homo sapien
cagatgaaggtaatcccggagatac

SEQ ID NO: 4806284 - DNA, 25 bp, Homo sapien
ctccggggggcagatgaaggtaatc

SEQ ID NO: 4806285 - DNA, 25 bp, Homo sapien
gcagatgaaggtaatcccggagata

SEQ ID NO: 4806286 - DNA, 25 bp, Homo sapien
ccttcatgtagccttgagacttgag

SEQ ID NO: 4806287 - DNA, 25 bp, Homo sapien
tgttccttcatgtagccttgagact

SEQ ID NO: 4806288 - DNA, 25 bp, Homo sapien
tcatgtagccttgagacttgagaga

SEQ ID NO: 4806289 - DNA, 25 bp, Homo sapien
ctgttccttcatgtagccttgagac

SEQ ID NO: 4806290 - DNA, 25 bp, Homo sapien
ggatgacagtgtagacgaaagagaa

SEQ ID NO: 4806291 - DNA, 25 bp, Homo sapien
gacagtgtagacgaaagagaatttc

SEQ ID NO: 4806292 - DNA, 25 bp, Homo sapien
cagtgtagacgaaagagaatttcat

SEQ ID NO: 4806293 - DNA, 25 bp, Homo sapien
tgacagtgtagacgaaagagaattt

SEQ ID NO: 4806294 - DNA, 25 bp, Homo sapien
tgtgtgtcatccttgcacaggtgcc

SEQ ID NO: 4806295 - DNA, 25 bp, Homo sapien
atgctaatcttctctgtagagttcc

SEQ ID NO: 4806296 - DNA, 25 bp, Homo sapien
tataatatggaacacttcacaaatt

SEQ ID NO: 4806297 - DNA, 25 bp, Homo sapien
aattttagtatatgtgcttctgaag

SEQ ID NO: 4806298 - DNA, 25 bp, Homo sapien
gggtctcactcacattgaccaggtt

SEQ ID NO: 4806299 - DNA, 25 bp, Homo sapien
gagacaaagtcccaaaatgacacgg

SEQ ID NO: 4806300 - DNA, 25 bp, Homo sapien
ccaaaatgacacggccatttttatt

SEQ ID NO: 4806301 - DNA, 25 bp, Homo sapien
gaaatggtgatttccccagaataaa

SEQ ID NO: 4806302 - DNA, 25 bp, Homo sapien
catatcctagcatataagtccttgc

SEQ ID NO: 4806303 - DNA, 25 bp, Homo sapien
gagcagctaagcctgtcctattcaa

SEQ ID NO: 4806304 - DNA, 25 bp, Homo sapien
caaagagttcagcattacaggtaga

SEQ ID NO: 4806305 - DNA, 25 bp, Homo sapien
gtgtgttgcagtcagctcagcccag

SEQ ID NO: 4806306 - DNA, 25 bp, Homo sapien
cacagccactaagtgatcgtatcac

SEQ ID NO: 4806307 - DNA, 25 bp, Homo sapien
gtgaccatgtagtttgggtgcacac

SEQ ID NO: 4806308 - DNA, 25 bp, Homo sapien
ccagctgttgctgtctaaagtgtgt

SEQ ID NO: 4806309 - DNA, 25 bp, Homo sapien
ccatcgatgaccgaaagtgaccaag

SEQ ID NO: 4806310 - DNA, 25 bp, Homo sapien
caaggcagcagactgttaatcagac

SEQ ID NO: 4806311 - DNA, 25 bp, Homo sapien
caagcaggttctctcgtctttgggc

SEQ ID NO: 4806312 - DNA, 25 bp, Homo sapien
caggttaatgagctaacaagcaggt

SEQ ID NO: 4806313 - DNA, 25 bp, Homo sapien
catggaggcacaccaaagcttcaag

SEQ ID NO: 4806314 - DNA, 25 bp, Homo sapien
taaatacatcacgaggccagctgtg

SEQ ID NO: 4806315 - DNA, 25 bp, Homo sapien
cacaagtcttgtacatgggccatca

SEQ ID NO: 4806316 - DNA, 25 bp, Homo sapien
gaaatccatgtacagagtcgtgcac

SEQ ID NO: 4806317 - DNA, 25 bp, Homo sapien
gaaatacaagttgaagattgtcttt

SEQ ID NO: 4806318 - DNA, 25 bp, Homo sapien
tgaaatcttgtaggattaacttctc

SEQ ID NO: 4806319 - DNA, 25 bp, Homo sapien
tataaagtggatgttaaatggagag

SEQ ID NO: 4806320 - DNA, 25 bp, Homo sapien
gagagagttggctcaggtcccctga

SEQ ID NO: 4806321 - DNA, 25 bp, Homo sapien
tcagcaagggttcaattcaagagag

SEQ ID NO: 4806322 - DNA, 25 bp, Homo sapien
gacgtctccacttggataatggcag

SEQ ID NO: 4806323 - DNA, 25 bp, Homo sapien
cctggattaaaaagctgtactgcct

SEQ ID NO: 4806324 - DNA, 25 bp, Homo sapien
gaaactatcttgaagcccaaaggat

SEQ ID NO: 4806325 - DNA, 25 bp, Homo sapien
ctttccgcaagtacagggctccgta

SEQ ID NO: 4806326 - DNA, 25 bp, Homo sapien
ctgtgtcgcttggactgctgttacg

SEQ ID NO: 4806327 - DNA, 25 bp, Homo sapien
gctgttacgcttgtacccactcaac

SEQ ID NO: 4806328 - DNA, 25 bp, Homo sapien
tgacactagcttcacgagcctgcct

SEQ ID NO: 4806329 - DNA, 25 bp, Homo sapien
tttccttttcgtgtggctgtggcgg

SEQ ID NO: 4806330 - DNA, 25 bp, Homo sapien
ttttccttttcgtgtggctgtggcg

SEQ ID NO: 4806331 - DNA, 25 bp, Homo sapien
gatcatgttgtagattgatttgcag

SEQ ID NO: 4806332 - DNA, 25 bp, Homo sapien
ggtggtcgcttctcgcaaatcttct

SEQ ID NO: 4806333 - DNA, 25 bp, Homo sapien
catccatcggtgatcggtggtcgct

SEQ ID NO: 4806334 - DNA, 25 bp, Homo sapien
gggttcttgagcatccatcggtgat

SEQ ID NO: 4806335 - DNA, 25 bp, Homo sapien
tagcttttctcctactcattttctg

SEQ ID NO: 4806336 - DNA, 25 bp, Homo sapien
aaaatcacgattctcctgtgagctg

SEQ ID NO: 4806337 - DNA, 25 bp, Homo sapien
ttttggttgctaagtagggagatcc

SEQ ID NO: 4806338 - DNA, 25 bp, Homo sapien
gccttgccagcaggtgaacttacac

SEQ ID NO: 4806339 - DNA, 25 bp, Homo sapien
atctaagtcattcgcagtggctccg

SEQ ID NO: 4806340 - DNA, 25 bp, Homo sapien
gataatgctccaattgtccacaggg

SEQ ID NO: 4806341 - DNA, 25 bp, Homo sapien
tgagtgttccatgctgtcacgcaga

SEQ ID NO: 4806342 - DNA, 25 bp, Homo sapien
tcctgtaggccggaagtgccagaaa

SEQ ID NO: 4806343 - DNA, 25 bp, Homo sapien
tgcatcccaccgcatggtgagaagg

SEQ ID NO: 4806344 - DNA, 25 bp, Homo sapien
ctgcatcccaccgcatggtgagaag

SEQ ID NO: 4806345 - DNA, 25 bp, Homo sapien
gcatcccaccgcatggtgagaaggc

SEQ ID NO: 4806346 - DNA, 25 bp, Homo sapien
catcccaccgcatggtgagaaggca

SEQ ID NO: 4806347 - DNA, 25 bp, Homo sapien
agctcccaaatccaaacatgaccat

SEQ ID NO: 4806348 - DNA, 25 bp, Homo sapien
gccaggcagctcccaaatccaaaca

SEQ ID NO: 4806349 - DNA, 25 bp, Homo sapien
ggcagctcccaaatccaaacatgac

SEQ ID NO: 4806350 - DNA, 25 bp, Homo sapien
catgggaccgccaggcagctcccaa

SEQ ID NO: 4806351 - DNA, 25 bp, Homo sapien
cgtgttcagccaagatgagctctga

SEQ ID NO: 4806352 - DNA, 25 bp, Homo sapien
atggaaacaaatcaccccgtccgtg

SEQ ID NO: 4806353 - DNA, 25 bp, Homo sapien
accccgtccgtgttcagccaagatg

SEQ ID NO: 4806354 - DNA, 25 bp, Homo sapien
cgtccgtgttcagccaagatgagct

SEQ ID NO: 4806355 - DNA, 25 bp, Homo sapien
tcagcatgaccccttgtgcaaagaa

SEQ ID NO: 4806356 - DNA, 25 bp, Homo sapien
gaagacattagaaaaggacgctcct

SEQ ID NO: 4806357 - DNA, 25 bp, Homo sapien
acagtaaggacatcaccgcaggagg

SEQ ID NO: 4806358 - DNA, 25 bp, Homo sapien
tgcaggtcctcagtgaaacaccggt

SEQ ID NO: 4806359 - DNA, 25 bp, Homo sapien
gcaggctctgagctacggaacagat

SEQ ID NO: 4806360 - DNA, 25 bp, Homo sapien
tctgtacatcctcgggcagggtggc

SEQ ID NO: 4806361 - DNA, 25 bp, Homo sapien
aggacttcaggacaccgggtggact

SEQ ID NO: 4806362 - DNA, 25 bp, Homo sapien
aaatgtgtgggcacggctctgtaca

SEQ ID NO: 4806363 - DNA, 25 bp, Homo sapien
gctgaagctcgtacgtctgttcagt

SEQ ID NO: 4806364 - DNA, 25 bp, Homo sapien
ctcgcgattccaggatgtagttaac

SEQ ID NO: 4806365 - DNA, 25 bp, Homo sapien
agcaaagtagtcagcccgggcagtg

SEQ ID NO: 4806366 - DNA, 25 bp, Homo sapien
actgctgcccggatttcttctcctt

SEQ ID NO: 4806367 - DNA, 25 bp, Homo sapien
tgacctggacaagcacataacctct

SEQ ID NO: 4806368 - DNA, 25 bp, Homo sapien
tgaaggccgagaacacagggatgaa

SEQ ID NO: 4806369 - DNA, 25 bp, Homo sapien
gaaggagtccagtcatcacagcaac

SEQ ID NO: 4806370 - DNA, 25 bp, Homo sapien
gagccgctgctctacgatgggaaaa

SEQ ID NO: 4806371 - DNA, 25 bp, Homo sapien
cccagcgctacagcgctgagacttg

SEQ ID NO: 4806372 - DNA, 25 bp, Homo sapien
cggagtcgcatgtgcatcttccact

SEQ ID NO: 4806373 - DNA, 25 bp, Homo sapien
gcgctacagcgctgagacttggtcc

SEQ ID NO: 4806374 - DNA, 25 bp, Homo sapien
gagtctgcccggagtcgcatgtgca

SEQ ID NO: 4806375 - DNA, 25 bp, Homo sapien
agaacctgatttgaagagcccgaca

SEQ ID NO: 4806376 - DNA, 25 bp, Homo sapien
tctgctgattctactccgagggcca

SEQ ID NO: 4806377 - DNA, 25 bp, Homo sapien
caataaatcatgaggaccgcagggc

SEQ ID NO: 4806378 - DNA, 25 bp, Homo sapien
gaattagggaccacccatggcttag

SEQ ID NO: 4806379 - DNA, 25 bp, Homo sapien
cgggaaccttctatagagctgcgga

SEQ ID NO: 4806380 - DNA, 25 bp, Homo sapien
ccttctatagagctgcggagtgggt

SEQ ID NO: 4806381 - DNA, 25 bp, Homo sapien
ctgggcccgggaaccttctatagag

SEQ ID NO: 4806382 - DNA, 25 bp, Homo sapien
gtggctggcaagctgcgacactcct

SEQ ID NO: 4806383 - DNA, 25 bp, Homo sapien
gaggtgtttatagtcgtgattgctt

SEQ ID NO: 4806384 - DNA, 25 bp, Homo sapien
gcagcgtccgattcaaagtagaggt

SEQ ID NO: 4806385 - DNA, 25 bp, Homo sapien
tacgtgagtttaaatattgcgtgac

SEQ ID NO: 4806386 - DNA, 25 bp, Homo sapien
caatttcattgacggtagcagcgtc

SEQ ID NO: 4806387 - DNA, 25 bp, Homo sapien
aatgcagacatagatgctaggctgt

SEQ ID NO: 4806388 - DNA, 25 bp, Homo sapien
ggtcaatcggattccctcttctaaa

SEQ ID NO: 4806389 - DNA, 25 bp, Homo sapien
gtccttttatgtccagacaggtcaa

SEQ ID NO: 4806390 - DNA, 25 bp, Homo sapien
ctaaatgcagacatagatgctaggc

SEQ ID NO: 4806391 - DNA, 25 bp, Homo sapien
gaatcttgtcggtgacatccctgtg

SEQ ID NO: 4806392 - DNA, 25 bp, Homo sapien
caatgcgggcacctttgttggccat

SEQ ID NO: 4806393 - DNA, 25 bp, Homo sapien
tgacatccctgtgtggaggaacaat

SEQ ID NO: 4806394 - DNA, 25 bp, Homo sapien
tgtggaggaacaatgcgggcacctt

SEQ ID NO: 4806395 - DNA, 25 bp, Homo sapien
tttggacttgaacaatgacacagct

SEQ ID NO: 4806396 - DNA, 25 bp, Homo sapien
cagagaacgttctgtggagcacttg

SEQ ID NO: 4806397 - DNA, 25 bp, Homo sapien
gaacgttctgtggagcacttgtgtt

SEQ ID NO: 4806398 - DNA, 25 bp, Homo sapien
gtgtttggacttgaacaatgacaca

SEQ ID NO: 4806399 - DNA, 25 bp, Homo sapien
gccgaggcacggtggacagccacag

SEQ ID NO: 4806400 - DNA, 25 bp, Homo sapien
tgcaaggagtgatgagcggaaccct

SEQ ID NO: 4806401 - DNA, 25 bp, Homo sapien
tctctgcaaggagtgatgagcggaa

SEQ ID NO: 4806402 - DNA, 25 bp, Homo sapien
tctgcaaggagtgatgagcggaacc

SEQ ID NO: 4806403 - DNA, 25 bp, Homo sapien
ttgtggcctggacctagcgacttgc

SEQ ID NO: 4806404 - DNA, 25 bp, Homo sapien
tctgccagcaacgactcagtgagct

SEQ ID NO: 4806405 - DNA, 25 bp, Homo sapien
gaccccaagccagaggactcagtta

SEQ ID NO: 4806406 - DNA, 25 bp, Homo sapien
cagttaagctgtgggatacctgacc

SEQ ID NO: 4806407 - DNA, 25 bp, Homo sapien
tgctgtcctttacagagtattgggc

SEQ ID NO: 4806408 - DNA, 25 bp, Homo sapien
caatattacactgtaggtgtctgca

SEQ ID NO: 4806409 - DNA, 25 bp, Homo sapien
ccttggttatgagacacatgttcct

SEQ ID NO: 4806410 - DNA, 25 bp, Homo sapien
aatttttaagcgaatgctggacact

SEQ ID NO: 4806411 - DNA, 25 bp, Homo sapien
tgagcaagcaagagcgcacatgcgt

SEQ ID NO: 4806412 - DNA, 25 bp, Homo sapien
ggagtataactgcaggtgcctcacc

SEQ ID NO: 4806413 - DNA, 25 bp, Homo sapien
cacatgcgtgtgttctctgctagaa

SEQ ID NO: 4806414 - DNA, 25 bp, Homo sapien
cctaacgtctggagtgcctggatct

SEQ ID NO: 4806415 - DNA, 25 bp, Homo sapien
ggtgaggaatgcacatactggcaca

SEQ ID NO: 4806416 - DNA, 25 bp, Homo sapien
gcatgaatccttcagccacagtctc

SEQ ID NO: 4806417 - DNA, 25 bp, Homo sapien
ccagggtgatttcagtaacaagcat

SEQ ID NO: 4806418 - DNA, 25 bp, Homo sapien
tcaggtggcgaggatccgacggata

SEQ ID NO: 4806419 - DNA, 25 bp, Homo sapien
ctacaaacaagtaacaaaatcagtg

SEQ ID NO: 4806420 - DNA, 25 bp, Homo sapien
aaattattccagttggtcacacgtt

SEQ ID NO: 4806421 - DNA, 25 bp, Homo sapien
tccggtcttcggcaagacacttgtg

SEQ ID NO: 4806422 - DNA, 25 bp, Homo sapien
cagttggtcacacgttccggtcttc

SEQ ID NO: 4806423 - DNA, 25 bp, Homo sapien
cacacgttccggtcttcggcaagac

SEQ ID NO: 4806424 - DNA, 25 bp, Homo sapien
tatctaaatctaggcgttcgccgcc

SEQ ID NO: 4806425 - DNA, 25 bp, Homo sapien
ggtgctgacacttccggcatgatgg

SEQ ID NO: 4806426 - DNA, 25 bp, Homo sapien
gatctcttctgtaggaccaggcaag

SEQ ID NO: 4806427 - DNA, 25 bp, Homo sapien
taatttaagcggaggaatgccaacc

SEQ ID NO: 4806428 - DNA, 25 bp, Homo sapien
gctttctgattcgtaacagggtcta

SEQ ID NO: 4806429 - DNA, 25 bp, Homo sapien
ggcacagagcaggtcggaatcgatt

SEQ ID NO: 4806430 - DNA, 25 bp, Homo sapien
tgagatgggtttctgcttaatccaa

SEQ ID NO: 4806431 - DNA, 25 bp, Homo sapien
ccaaaacttagtgctggctttctga

SEQ ID NO: 4806432 - DNA, 25 bp, Homo sapien
cacaagttgcatagtctggtttcct

SEQ ID NO: 4806433 - DNA, 25 bp, Homo sapien
tctgaaattgcatgaacgtgagctc

SEQ ID NO: 4806434 - DNA, 25 bp, Homo sapien
cataaggacactccaaatggcacac

SEQ ID NO: 4806435 - DNA, 25 bp, Homo sapien
ccacgggcttcctgagacaaacata

SEQ ID NO: 4806436 - DNA, 25 bp, Homo sapien
catgtgtcagcactcggcctgaggc

SEQ ID NO: 4806437 - DNA, 25 bp, Homo sapien
gcttcttaaggcagcgcaggcagca

SEQ ID NO: 4806438 - DNA, 25 bp, Homo sapien
gcagcaccctatctgctcctgccgc

SEQ ID NO: 4806439 - DNA, 25 bp, Homo sapien
gagcacccccgggaagagtgcacac

SEQ ID NO: 4806440 - DNA, 25 bp, Homo sapien
caagagcaaaggtgcaaccctggta

SEQ ID NO: 4806441 - DNA, 25 bp, Homo sapien
tagctcagactccttaaggcaaagg

SEQ ID NO: 4806442 - DNA, 25 bp, Homo sapien
gggcaccagcgatcattcagtacaa

SEQ ID NO: 4806443 - DNA, 25 bp, Homo sapien
gagccctcggtagtcttcttggtta

SEQ ID NO: 4806444 - DNA, 25 bp, Homo sapien
gaaaacattgcctgattgctgtcct

SEQ ID NO: 4806445 - DNA, 25 bp, Homo sapien
cctggtgcccctctcaaaactggag

SEQ ID NO: 4806446 - DNA, 25 bp, Homo sapien
tagcagttctagtggtatgccaggg

SEQ ID NO: 4806447 - DNA, 25 bp, Homo sapien
tatcacaccaactgtcaaaggcaga

SEQ ID NO: 4806448 - DNA, 25 bp, Homo sapien
aattggagggcgagaagaattctcc

SEQ ID NO: 4806449 - DNA, 25 bp, Homo sapien
tattatcagaagtcaggcactgggt

SEQ ID NO: 4806450 - DNA, 25 bp, Homo sapien
caccaggatccagtttgggagacaa

SEQ ID NO: 4806451 - DNA, 25 bp, Homo sapien
gttatcctgggcaaagtcactgctc

SEQ ID NO: 4806452 - DNA, 25 bp, Homo sapien
attctgaggttaggtccgggcccag

SEQ ID NO: 4806453 - DNA, 25 bp, Homo sapien
ttctgaggttaggtccgggcccaga

SEQ ID NO: 4806454 - DNA, 25 bp, Homo sapien
ggttgcttataggactgtgttggaa

SEQ ID NO: 4806455 - DNA, 25 bp, Homo sapien
aggactgtgttggaacaaattctga

SEQ ID NO: 4806456 - DNA, 25 bp, Homo sapien
ctgtggctatgtcaatttgcgaatc

SEQ ID NO: 4806457 - DNA, 25 bp, Homo sapien
agctgtacgtcggttgtgaatcgca

SEQ ID NO: 4806458 - DNA, 25 bp, Homo sapien
gaatcgcagtctgtggatcatgctg

SEQ ID NO: 4806459 - DNA, 25 bp, Homo sapien
gctgctaagcatatcctgtactgtg

SEQ ID NO: 4806460 - DNA, 25 bp, Homo sapien
ggaggaaaaggcagtttaacacata

SEQ ID NO: 4806461 - DNA, 25 bp, Homo sapien
agccgccacaggctttctgatccat

SEQ ID NO: 4806462 - DNA, 25 bp, Homo sapien
agtccagccgccacaggctttctga

SEQ ID NO: 4806463 - DNA, 25 bp, Homo sapien
tctgcagtccagccgccacaggctt

SEQ ID NO: 4806464 - DNA, 25 bp, Homo sapien
gcagtccagccgccacaggctttct

SEQ ID NO: 4806465 - DNA, 25 bp, Homo sapien
cgtaaattcatatcccatttgagga

SEQ ID NO: 4806466 - DNA, 25 bp, Homo sapien
gttctgagccttgccccaactgaca

SEQ ID NO: 4806467 - DNA, 25 bp, Homo sapien
cttctactctctgatagcgtaaatt

SEQ ID NO: 4806468 - DNA, 25 bp, Homo sapien
gagttctgagccttgccccaactga

SEQ ID NO: 4806469 - DNA, 25 bp, Homo sapien
gaactgggtctcctcgtgaatgaca

SEQ ID NO: 4806470 - DNA, 25 bp, Homo sapien
gccttcaaagacttcacaatgtatt

SEQ ID NO: 4806471 - DNA, 25 bp, Homo sapien
tgtcaaagtcgggagggttaatgtc

SEQ ID NO: 4806472 - DNA, 25 bp, Homo sapien
gataaattgttatggtgccttcaaa

SEQ ID NO: 4806473 - DNA, 25 bp, Homo sapien
tggaagattccttgtactcatagat

SEQ ID NO: 4806474 - DNA, 25 bp, Homo sapien
ttgtactcatagatacaaactgcat

SEQ ID NO: 4806475 - DNA, 25 bp, Homo sapien
ccttgtactcatagatacaaactgc

SEQ ID NO: 4806476 - DNA, 25 bp, Homo sapien
gattccttgtactcatagatacaaa

SEQ ID NO: 4806477 - DNA, 25 bp, Homo sapien
tacccagaatcttgtcaaccagaga

SEQ ID NO: 4806478 - DNA, 25 bp, Homo sapien
gaaagtcatgcatgctcaccttaga

SEQ ID NO: 4806479 - DNA, 25 bp, Homo sapien
aaattccgataagcaagtcacatag

SEQ ID NO: 4806480 - DNA, 25 bp, Homo sapien
caccttagaaactctggaacgaaca

SEQ ID NO: 4806481 - DNA, 25 bp, Homo sapien
gatagcctcttaaaacaaattggag

SEQ ID NO: 4806482 - DNA, 25 bp, Homo sapien
caaaatagttatgagaatattcagg

SEQ ID NO: 4806483 - DNA, 25 bp, Homo sapien
cagtggatataggattggagttatt

SEQ ID NO: 4806484 - DNA, 25 bp, Homo sapien
tggtaccaagattatgatagcctct

SEQ ID NO: 4806485 - DNA, 25 bp, Homo sapien
tttcattggaagtgtatcgattttg

SEQ ID NO: 4806486 - DNA, 25 bp, Homo sapien
caggatctacagtgtacctcctttt

SEQ ID NO: 4806487 - DNA, 25 bp, Homo sapien
atttcttgagctgaatgcttagctc

SEQ ID NO: 4806488 - DNA, 25 bp, Homo sapien
tgtatcgattttgttggccttttca

SEQ ID NO: 4806489 - DNA, 25 bp, Homo sapien
aagggcaacttggtatgggccaggg

SEQ ID NO: 4806490 - DNA, 25 bp, Homo sapien
gcagatctatatgaagggcaacttg

SEQ ID NO: 4806491 - DNA, 25 bp, Homo sapien
gcaacttggtatgggccagggtcat

SEQ ID NO: 4806492 - DNA, 25 bp, Homo sapien
acagcagatctatatgaagggcaac

SEQ ID NO: 4806493 - DNA, 25 bp, Homo sapien
ttgcaacggacaaagcgggcatgga

SEQ ID NO: 4806494 - DNA, 25 bp, Homo sapien
aagtttgcaacggacaaagcgggca

SEQ ID NO: 4806495 - DNA, 25 bp, Homo sapien
gcaagtttgcaacggacaaagcggg

SEQ ID NO: 4806496 - DNA, 25 bp, Homo sapien
ctaagcaagtttgcaacggacaaag

SEQ ID NO: 4806497 - DNA, 25 bp, Homo sapien
aagtgctgtccaggtcaacggcgac

SEQ ID NO: 4806498 - DNA, 25 bp, Homo sapien
cagaactcccatgcgctctggctct

SEQ ID NO: 4806499 - DNA, 25 bp, Homo sapien
attgggctcgctctgcttctccagg

SEQ ID NO: 4806500 - DNA, 25 bp, Homo sapien
catgcgctctggctctccaaagtgc

SEQ ID NO: 4806501 - DNA, 25 bp, Homo sapien
atggtagcccccttagcgattctcc

SEQ ID NO: 4806502 - DNA, 25 bp, Homo sapien
cagcacttcggggggaccaattgaa

SEQ ID NO: 4806503 - DNA, 25 bp, Homo sapien
aatgcaggtaattcttgtagtctct

SEQ ID NO: 4806504 - DNA, 25 bp, Homo sapien
aggcatggtagcccccttagcgatt

SEQ ID NO: 4806505 - DNA, 25 bp, Homo sapien
tatcacctgtccatgccaacaattt

SEQ ID NO: 4806506 - DNA, 25 bp, Homo sapien
caattaataggtgcatctggtattg

SEQ ID NO: 4806507 - DNA, 25 bp, Homo sapien
gatcagtggatgctggcacgtaata

SEQ ID NO: 4806508 - DNA, 25 bp, Homo sapien
taatactgggtagaaggaatctcag

SEQ ID NO: 4806509 - DNA, 25 bp, Homo sapien
agcagaggaaagggagttacccctg

SEQ ID NO: 4806510 - DNA, 25 bp, Homo sapien
gcagaggaaagggagttacccctga

SEQ ID NO: 4806511 - DNA, 25 bp, Homo sapien
tggtagtaccattccctcttacgaa

SEQ ID NO: 4806512 - DNA, 25 bp, Homo sapien
ctcttacgaagacatgaccagacat

SEQ ID NO: 4806513 - DNA, 25 bp, Homo sapien
ttccctcttacgaagacatgaccag

SEQ ID NO: 4806514 - DNA, 25 bp, Homo sapien
ttctgagtccatggtagtaccattc

SEQ ID NO: 4806515 - DNA, 25 bp, Homo sapien
cctgcttgggcattccaatgatgta

SEQ ID NO: 4806516 - DNA, 25 bp, Homo sapien
cagtaataccatgtcaccgaatggc

SEQ ID NO: 4806517 - DNA, 25 bp, Homo sapien
gattctgggaagcagttactctgca

SEQ ID NO: 4806518 - DNA, 25 bp, Homo sapien
tactctgcagcgacgggaaaacctg

SEQ ID NO: 4806519 - DNA, 25 bp, Homo sapien
tctgatcagcatagcgctgatctag

SEQ ID NO: 4806520 - DNA, 25 bp, Homo sapien
gatctaggctgtagcccagaaatcc

SEQ ID NO: 4806521 - DNA, 25 bp, Homo sapien
caggcgttttgacctgcacgtttcc

SEQ ID NO: 4806522 - DNA, 25 bp, Homo sapien
tgcacgtttccaacatgggccggtt

SEQ ID NO: 4806523 - DNA, 25 bp, Homo sapien
catccccatcagtctggttctctta

SEQ ID NO: 4806524 - DNA, 25 bp, Homo sapien
ttggctggagaatggaagaccatca

SEQ ID NO: 4806525 - DNA, 25 bp, Homo sapien
tcatccccatcagtctggttctctt

SEQ ID NO: 4806526 - DNA, 25 bp, Homo sapien
ccatcattgacagggtccaatccct

SEQ ID NO: 4806527 - DNA, 25 bp, Homo sapien
cagacagtaaatccagagtgacaga

SEQ ID NO: 4806528 - DNA, 25 bp, Homo sapien
cagaatttcccgtgatggcaaaggt

SEQ ID NO: 4806529 - DNA, 25 bp, Homo sapien
aatcacactgcagaggaatttagct

SEQ ID NO: 4806530 - DNA, 25 bp, Homo sapien
ggatccagggtgctaaatcacactg

SEQ ID NO: 4806531 - DNA, 25 bp, Homo sapien
tgcagttcccccgctgtccttatgg

SEQ ID NO: 4806532 - DNA, 25 bp, Homo sapien
tctaaccctggataagctgtggctc

SEQ ID NO: 4806533 - DNA, 25 bp, Homo sapien
tgatctaaccctggataagctgtgg

SEQ ID NO: 4806534 - DNA, 25 bp, Homo sapien
ccctggataagctgtggctcttggt

SEQ ID NO: 4806535 - DNA, 25 bp, Homo sapien
tcgtgatctgcctgcctcagcctcc

SEQ ID NO: 4806536 - DNA, 25 bp, Homo sapien
ctcgtgatctgcctgcctcagcctc

SEQ ID NO: 4806537 - DNA, 25 bp, Homo sapien
ttaatagaggtagggtttcactgtg

SEQ ID NO: 4806538 - DNA, 25 bp, Homo sapien
tcctaaacacaaagtggtggcctca

SEQ ID NO: 4806539 - DNA, 25 bp, Homo sapien
gctggtagcccaattaggagatgcg

SEQ ID NO: 4806540 - DNA, 25 bp, Homo sapien
aacatggcctgtttcccttgatggc

SEQ ID NO: 4806541 - DNA, 25 bp, Homo sapien
gaaagaatgaagttatgcctgagcc

SEQ ID NO: 4806542 - DNA, 25 bp, Homo sapien
cctatagatatatggtatggttcac

SEQ ID NO: 4806543 - DNA, 25 bp, Homo sapien
caacagggtctgtgagctactaaac

SEQ ID NO: 4806544 - DNA, 25 bp, Homo sapien
tatctgataaataaggcttgtgacc

SEQ ID NO: 4806545 - DNA, 25 bp, Homo sapien
gcttgtgaccattaatccatcccta

SEQ ID NO: 4806546 - DNA, 25 bp, Homo sapien
tgttcaaccctatagccagaagatt

SEQ ID NO: 4806547 - DNA, 25 bp, Homo sapien
ccttcagagggcatttcaggctaga

SEQ ID NO: 4806548 - DNA, 25 bp, Homo sapien
cacaaatttgtgtccctggcttaca

SEQ ID NO: 4806549 - DNA, 25 bp, Homo sapien
caattgcatgtgaagtaggactctc

SEQ ID NO: 4806550 - DNA, 25 bp, Homo sapien
tcctaaactgttcatagcttaaatg

SEQ ID NO: 4806551 - DNA, 25 bp, Homo sapien
gagctcccctgcatcctattattct

SEQ ID NO: 4806552 - DNA, 25 bp, Homo sapien
agagagctcccctgcatcctattat

SEQ ID NO: 4806553 - DNA, 25 bp, Homo sapien
gttcatagcttaaatgtgaaggtca

SEQ ID NO: 4806554 - DNA, 25 bp, Homo sapien
caaacattaggactgccattaggcc

SEQ ID NO: 4806555 - DNA, 25 bp, Homo sapien
caaacagttgtgtagtcagtctgga

SEQ ID NO: 4806556 - DNA, 25 bp, Homo sapien
tagaccttagcagagaattgactga

SEQ ID NO: 4806557 - DNA, 25 bp, Homo sapien
gaaggagtgccagactgaaggacaa

SEQ ID NO: 4806558 - DNA, 25 bp, Homo sapien
tatatgcattgtttcctctcccaac

SEQ ID NO: 4806559 - DNA, 25 bp, Homo sapien
ttatatgcattgtttcctctcccaa

SEQ ID NO: 4806560 - DNA, 25 bp, Homo sapien
ccagagagctggttatcaaacggcg

SEQ ID NO: 4806561 - DNA, 25 bp, Homo sapien
caaaagccgaaacgtgcagttggca

SEQ ID NO: 4806562 - DNA, 25 bp, Homo sapien
cagttggcacatctggacggagccg

SEQ ID NO: 4806563 - DNA, 25 bp, Homo sapien
cacagccgagggtgaacaatgactc

SEQ ID NO: 4806564 - DNA, 25 bp, Homo sapien
gcatccaaattgcttgcagacgcta

SEQ ID NO: 4806565 - DNA, 25 bp, Homo sapien
aattgcttgcagacgctagcaggtc

SEQ ID NO: 4806566 - DNA, 25 bp, Homo sapien
gcttgcagacgctagcaggtctcat

SEQ ID NO: 4806567 - DNA, 25 bp, Homo sapien
tccaaattgcttgcagacgctagca

SEQ ID NO: 4806568 - DNA, 25 bp, Homo sapien
tcactgtgttatctcttctaacttt

SEQ ID NO: 4806569 - DNA, 25 bp, Homo sapien
tgagacagctcatccgtgtccttca

SEQ ID NO: 4806570 - DNA, 25 bp, Homo sapien
tggaatatggccttgagacagctca

SEQ ID NO: 4806571 - DNA, 25 bp, Homo sapien
cagctcatccgtgtccttcactgtg

SEQ ID NO: 4806572 - DNA, 25 bp, Homo sapien
ctttgtgttgtccacctgaataagg

SEQ ID NO: 4806573 - DNA, 25 bp, Homo sapien
gatttccttcatggtaacctttgtg

SEQ ID NO: 4806574 - DNA, 25 bp, Homo sapien
tgtccacctgaataagggagaatcc

SEQ ID NO: 4806575 - DNA, 25 bp, Homo sapien
aagatttccttcatggtaacctttg

SEQ ID NO: 4806576 - DNA, 25 bp, Homo sapien
ccagagagatgttactgcaatcttc

SEQ ID NO: 4806577 - DNA, 25 bp, Homo sapien
ttcatccagagagatgttactgcaa

SEQ ID NO: 4806578 - DNA, 25 bp, Homo sapien
catccagagagatgttactgcaatc

SEQ ID NO: 4806579 - DNA, 25 bp, Homo sapien
acattcatccagagagatgttactg

SEQ ID NO: 4806580 - DNA, 25 bp, Homo sapien
cacaaggagtttggtcgcattccca

SEQ ID NO: 4806581 - DNA, 25 bp, Homo sapien
ggaacatgggaattgccacaaggag

SEQ ID NO: 4806582 - DNA, 25 bp, Homo sapien
tagctcatgtaacaaacgggaccca

SEQ ID NO: 4806583 - DNA, 25 bp, Homo sapien
tacacttgggcactggaacaaaaca

SEQ ID NO: 4806584 - DNA, 25 bp, Homo sapien
tgcttccctaatacagagacatctc

SEQ ID NO: 4806585 - DNA, 25 bp, Homo sapien
tgctgtttaatccttgacattccat

SEQ ID NO: 4806586 - DNA, 25 bp, Homo sapien
gagacatctccacaaccctcctctc

SEQ ID NO: 4806587 - DNA, 25 bp, Homo sapien
tctcaaaaccaaggacctaatttgc

SEQ ID NO: 4806588 - DNA, 25 bp, Homo sapien
cctggcacttatcatccacaggcat

SEQ ID NO: 4806589 - DNA, 25 bp, Homo sapien
agcagaggaaatccctggcacttat

SEQ ID NO: 4806590 - DNA, 25 bp, Homo sapien
taaagcaagcagaggaaatccctgg

SEQ ID NO: 4806591 - DNA, 25 bp, Homo sapien
tgggtgacaaggttaaagcaagcag

SEQ ID NO: 4806592 - DNA, 25 bp, Homo sapien
ttgagatgccagtaagagagacagc

SEQ ID NO: 4806593 - DNA, 25 bp, Homo sapien
tgggacttgccaaatccggtcatgc

SEQ ID NO: 4806594 - DNA, 25 bp, Homo sapien
ttagcttgctcgactgattgtgcca

SEQ ID NO: 4806595 - DNA, 25 bp, Homo sapien
cataactcgctagactaatgggcag

SEQ ID NO: 4806596 - DNA, 25 bp, Homo sapien
gagagtcctggacaaaccatcacaa

SEQ ID NO: 4806597 - DNA, 25 bp, Homo sapien
cagggagtgctcatagattcaggac

SEQ ID NO: 4806598 - DNA, 25 bp, Homo sapien
tcaggcagagcccacttatgtatag

SEQ ID NO: 4806599 - DNA, 25 bp, Homo sapien
tactaacagaaagcgtggtgggcca

SEQ ID NO: 4806600 - DNA, 25 bp, Homo sapien
tggacatgccgttcagagatctgct

SEQ ID NO: 4806601 - DNA, 25 bp, Homo sapien
aaagcagtctgcgtagcctaggtgc

SEQ ID NO: 4806602 - DNA, 25 bp, Homo sapien
tagtgtgtattcctcgcagagaagg

SEQ ID NO: 4806603 - DNA, 25 bp, Homo sapien
tacaatgcgaatgtcgtcctcagca

SEQ ID NO: 4806604 - DNA, 25 bp, Homo sapien
tctttggatgtcagaccaggagatg

SEQ ID NO: 4806605 - DNA, 25 bp, Homo sapien
gccaaacttatgaatgggctcattg

SEQ ID NO: 4806606 - DNA, 25 bp, Homo sapien
cgaacaaagagtgactctttggatg

SEQ ID NO: 4806607 - DNA, 25 bp, Homo sapien
tcctcagcaatatgcaggcagtagg

SEQ ID NO: 4806608 - DNA, 25 bp, Homo sapien
gacagtactcccagattgcagtctt

SEQ ID NO: 4806609 - DNA, 25 bp, Homo sapien
gcacacttcccactccctagaatgt

SEQ ID NO: 4806610 - DNA, 25 bp, Homo sapien
ctagaatgtccagacagtactccca

SEQ ID NO: 4806611 - DNA, 25 bp, Homo sapien
gattgcagtcttgcccagtttagaa

SEQ ID NO: 4806612 - DNA, 25 bp, Homo sapien
ctttcacaaagcgacagaagcctgt

SEQ ID NO: 4806613 - DNA, 25 bp, Homo sapien
gcctgtagcccatatatagatagca

SEQ ID NO: 4806614 - DNA, 25 bp, Homo sapien
tcccaaatgtgatctggcatgttca

SEQ ID NO: 4806615 - DNA, 25 bp, Homo sapien
aatccatatgtgagaattcaggagc

SEQ ID NO: 4806616 - DNA, 25 bp, Homo sapien
aacctatttctataggatatcccat

SEQ ID NO: 4806617 - DNA, 25 bp, Homo sapien
gagaaacctatttctataggatatc

SEQ ID NO: 4806618 - DNA, 25 bp, Homo sapien
actgagaaacctatttctataggat

SEQ ID NO: 4806619 - DNA, 25 bp, Homo sapien
gaaacctatttctataggatatccc

SEQ ID NO: 4806620 - DNA, 25 bp, Homo sapien
aagaccatggtttagactcaatata

SEQ ID NO: 4806621 - DNA, 25 bp, Homo sapien
gggattcactttatagactgtatta

SEQ ID NO: 4806622 - DNA, 25 bp, Homo sapien
gactgtattacaccaaacaaacctg

SEQ ID NO: 4806623 - DNA, 25 bp, Homo sapien
acctgagaaatccaacgtcactaag

SEQ ID NO: 4806624 - DNA, 25 bp, Homo sapien
tggttgctgttgtacctacatgacc

SEQ ID NO: 4806625 - DNA, 25 bp, Homo sapien
tgcagagggaggtagacatcgatct

SEQ ID NO: 4806626 - DNA, 25 bp, Homo sapien
ccgtccttcgcttgtatactgccag

SEQ ID NO: 4806627 - DNA, 25 bp, Homo sapien
attggcagcagtctgtcctggctcg

SEQ ID NO: 4806628 - DNA, 25 bp, Homo sapien
aaagcacactgccagttatacagac

SEQ ID NO: 4806629 - DNA, 25 bp, Homo sapien
gcaaagcacactgccagttatacag

SEQ ID NO: 4806630 - DNA, 25 bp, Homo sapien
caaacacgtgagagcaaagcacact

SEQ ID NO: 4806631 - DNA, 25 bp, Homo sapien
aaacacgtgagagcaaagcacactg

SEQ ID NO: 4806632 - DNA, 25 bp, Homo sapien
gctctccaggcctgtgggcagcaca

SEQ ID NO: 4806633 - DNA, 25 bp, Homo sapien
tgctctccaggcctgtgggcagcac

SEQ ID NO: 4806634 - DNA, 25 bp, Homo sapien
actgctctccaggcctgtgggcagc

SEQ ID NO: 4806635 - DNA, 25 bp, Homo sapien
cccactgctctccaggcctgtgggc

SEQ ID NO: 4806636 - DNA, 25 bp, Homo sapien
caggtgacgtggctgcttgaactcc

SEQ ID NO: 4806637 - DNA, 25 bp, Homo sapien
tcaggtgacgtggctgcttgaactc

SEQ ID NO: 4806638 - DNA, 25 bp, Homo sapien
ctcaggtgacgtggctgcttgaact

SEQ ID NO: 4806639 - DNA, 25 bp, Homo sapien
cgaattttcaaagccatgatgggat

SEQ ID NO: 4806640 - DNA, 25 bp, Homo sapien
ggacaacagggaaaggtctctatct

SEQ ID NO: 4806641 - DNA, 25 bp, Homo sapien
gttactcagaccaggcagatttttg

SEQ ID NO: 4806642 - DNA, 25 bp, Homo sapien
ctcatccagccttgggacagttaca

SEQ ID NO: 4806643 - DNA, 25 bp, Homo sapien
tgacatcaacatggcatcgagctcc

SEQ ID NO: 4806644 - DNA, 25 bp, Homo sapien
ggtggcagtacccaattgtgctcta

SEQ ID NO: 4806645 - DNA, 25 bp, Homo sapien
tgggcgagcaagcacatgacatcaa

SEQ ID NO: 4806646 - DNA, 25 bp, Homo sapien
tcgagctccaacacaagcaaagggt

SEQ ID NO: 4806647 - DNA, 25 bp, Homo sapien
caggccaggtttacttgtgaacaaa

SEQ ID NO: 4806648 - DNA, 25 bp, Homo sapien
caggcccggccaaaaaagagcaatt

SEQ ID NO: 4806649 - DNA, 25 bp, Homo sapien
aataatcatattaaagctaggcgtg

SEQ ID NO: 4806650 - DNA, 25 bp, Homo sapien
tagaatatttgatgaccaaagctga

SEQ ID NO: 4806651 - DNA, 25 bp, Homo sapien
cactgaacccttaatcatggaaaga

SEQ ID NO: 4806652 - DNA, 25 bp, Homo sapien
tggctagattcctactcagcacaag

SEQ ID NO: 4806653 - DNA, 25 bp, Homo sapien
cagccctggtatgtcaatgcaagtc

SEQ ID NO: 4806654 - DNA, 25 bp, Homo sapien
tggaaagatgattaacacctctgct

SEQ ID NO: 4806655 - DNA, 25 bp, Homo sapien
aggtgtgattactgccaagtgctgc

SEQ ID NO: 4806656 - DNA, 25 bp, Homo sapien
caaggctttataaagaagtctgtat

SEQ ID NO: 4806657 - DNA, 25 bp, Homo sapien
tactgccaagtgctgctgataagag

SEQ ID NO: 4806658 - DNA, 25 bp, Homo sapien
ctgctgataagaggtttgagaaaac

SEQ ID NO: 4806659 - DNA, 25 bp, Homo sapien
tatccctgtcagtgtgctgactctg

SEQ ID NO: 4806660 - DNA, 25 bp, Homo sapien
atccctgtcagtgtgctgactctgg

SEQ ID NO: 4806661 - DNA, 25 bp, Homo sapien
tcacttttcaccacgatctacttca

SEQ ID NO: 4806662 - DNA, 25 bp, Homo sapien
ttcacttttcaccacgatctacttc

SEQ ID NO: 4806663 - DNA, 25 bp, Homo sapien
gcttcacttttcaccacgatctact

SEQ ID NO: 4806664 - DNA, 25 bp, Homo sapien
gagcttcacttttcaccacgatcta

SEQ ID NO: 4806665 - DNA, 25 bp, Homo sapien
aacatttgttcataattatccgaca

SEQ ID NO: 4806666 - DNA, 25 bp, Homo sapien
gagagctatttaatgccaatgattg

SEQ ID NO: 4806667 - DNA, 25 bp, Homo sapien
ttatccgacatagactggaacaatg

SEQ ID NO: 4806668 - DNA, 25 bp, Homo sapien
gagtttgcaacatttctcggtggct

SEQ ID NO: 4806669 - DNA, 25 bp, Homo sapien
gccagacagcaaacatcatggcaat

SEQ ID NO: 4806670 - DNA, 25 bp, Homo sapien
gacagcaaacatcatggcaataaat

SEQ ID NO: 4806671 - DNA, 25 bp, Homo sapien
accactgccagacagcaaacatcat

SEQ ID NO: 4806672 - DNA, 25 bp, Homo sapien
tacaaaaatcaaccgctactgtctt

SEQ ID NO: 4806673 - DNA, 25 bp, Homo sapien
ccagaaattggaggcttctctttga

SEQ ID NO: 4806674 - DNA, 25 bp, Homo sapien
gataatatcgactgcttcccagaaa

SEQ ID NO: 4806675 - DNA, 25 bp, Homo sapien
aaattggaggcttctctttgagaga

SEQ ID NO: 4806676 - DNA, 25 bp, Homo sapien
tgttctaggcgtacagataatatcg

SEQ ID NO: 4806677 - DNA, 25 bp, Homo sapien
ctctcttttcggagtcgttctaatc

SEQ ID NO: 4806678 - DNA, 25 bp, Homo sapien
tgcatttgatctggttttgtctctc

SEQ ID NO: 4806679 - DNA, 25 bp, Homo sapien
tttcggagtcgttctaatctttgag

SEQ ID NO: 4806680 - DNA, 25 bp, Homo sapien
tatttttgcatttgatctggttttg

SEQ ID NO: 4806681 - DNA, 25 bp, Homo sapien
ctaataccaaagtcccaacttgagg

SEQ ID NO: 4806682 - DNA, 25 bp, Homo sapien
ctgtgtttgagcgtcttctaatacc

SEQ ID NO: 4806683 - DNA, 25 bp, Homo sapien
ggcatatacatagccctgagtctca

SEQ ID NO: 4806684 - DNA, 25 bp, Homo sapien
aatatcgactgactgggcatataca

SEQ ID NO: 4806685 - DNA, 25 bp, Homo sapien
tgagaaccatctcacacattcccgt

SEQ ID NO: 4806686 - DNA, 25 bp, Homo sapien
gactgtcgaatatgagctagaatga

SEQ ID NO: 4806687 - DNA, 25 bp, Homo sapien
cacattcccgtgtcatcactggtca

SEQ ID NO: 4806688 - DNA, 25 bp, Homo sapien
tctctaggtcaacatcatgatcaat

SEQ ID NO: 4806689 - DNA, 25 bp, Homo sapien
ctcttcatattgtttcacgagctca

SEQ ID NO: 4806690 - DNA, 25 bp, Homo sapien
catattgtttcacgagctcacctac

SEQ ID NO: 4806691 - DNA, 25 bp, Homo sapien
tcatattgtttcacgagctcaccta

SEQ ID NO: 4806692 - DNA, 25 bp, Homo sapien
cttcatattgtttcacgagctcacc

SEQ ID NO: 4806693 - DNA, 25 bp, Homo sapien
tacaatgctcacgtctatccaatgg

SEQ ID NO: 4806694 - DNA, 25 bp, Homo sapien
cgttgttgacctgaaatcacagagg

SEQ ID NO: 4806695 - DNA, 25 bp, Homo sapien
gcccgaggcttcacaaaggtctgca

SEQ ID NO: 4806696 - DNA, 25 bp, Homo sapien
cctgagataggcaacaatacgactt

SEQ ID NO: 4806697 - DNA, 25 bp, Homo sapien
gaactagactgtttctcaatgtgaa

SEQ ID NO: 4806698 - DNA, 25 bp, Homo sapien
taggagcttaagctgtaactagcac

SEQ ID NO: 4806699 - DNA, 25 bp, Homo sapien
caatgtgaaattaccggtttaggag

SEQ ID NO: 4806700 - DNA, 25 bp, Homo sapien
ggcaccaaagatacactgctgagca

SEQ ID NO: 4806701 - DNA, 25 bp, Homo sapien
gacgaagaattgtaatagtatcaag

SEQ ID NO: 4806702 - DNA, 25 bp, Homo sapien
taattcaaactcagaggtacgagga

SEQ ID NO: 4806703 - DNA, 25 bp, Homo sapien
tagtatcaagatgttgccggtacac

SEQ ID NO: 4806704 - DNA, 25 bp, Homo sapien
cgaggaatctcttttttgacgaaga

SEQ ID NO: 4806705 - DNA, 25 bp, Homo sapien
gttttgccacatctagagttccacg

SEQ ID NO: 4806706 - DNA, 25 bp, Homo sapien
cacgttgctgtcacaggctatggat

SEQ ID NO: 4806707 - DNA, 25 bp, Homo sapien
taaagagactagctatgggatgact

SEQ ID NO: 4806708 - DNA, 25 bp, Homo sapien
taggagagtcagtgcttccgactgt

SEQ ID NO: 4806709 - DNA, 25 bp, Homo sapien
ggttcatgcttacaatcccaacaat

SEQ ID NO: 4806710 - DNA, 25 bp, Homo sapien
ctacctcagcctggaactacagatg

SEQ ID NO: 4806711 - DNA, 25 bp, Homo sapien
ctcctacctcagcctggaactacag

SEQ ID NO: 4806712 - DNA, 25 bp, Homo sapien
tcctacctcagcctggaactacaga

SEQ ID NO: 4806713 - DNA, 25 bp, Homo sapien
tgcgccaccatgcctggctaatatt

SEQ ID NO: 4806714 - DNA, 25 bp, Homo sapien
gaagcactacagtacttacaaggta

SEQ ID NO: 4806715 - DNA, 25 bp, Homo sapien
aaatccaagcgggtctgcccaaagc

SEQ ID NO: 4806716 - DNA, 25 bp, Homo sapien
tgtgagattggcattactgtcccca

SEQ ID NO: 4806717 - DNA, 25 bp, Homo sapien
cattttgcagactgtccagcttaca

SEQ ID NO: 4806718 - DNA, 25 bp, Homo sapien
ccacttatttcacaagcaattacta

SEQ ID NO: 4806719 - DNA, 25 bp, Homo sapien
taacacagtaccttaaaatgagtcc

SEQ ID NO: 4806720 - DNA, 25 bp, Homo sapien
gagtccataaggaactggaaaatgt

SEQ ID NO: 4806721 - DNA, 25 bp, Homo sapien
tcataaaagtatactcacgtatagg

SEQ ID NO: 4806722 - DNA, 25 bp, Homo sapien
ctgacagcctccagttctggaaatg

SEQ ID NO: 4806723 - DNA, 25 bp, Homo sapien
gccgggcagcgctgaaactggaggg

SEQ ID NO: 4806724 - DNA, 25 bp, Homo sapien
atggccaggaaacgaacgcgcccgg

SEQ ID NO: 4806725 - DNA, 25 bp, Homo sapien
ggccacctgaacaagggcccggcag

SEQ ID NO: 4806726 - DNA, 25 bp, Homo sapien
gggttagccctcatgcccctgctgc

SEQ ID NO: 4806727 - DNA, 25 bp, Homo sapien
tcagctgccgcttcccgggttagcc

SEQ ID NO: 4806728 - DNA, 25 bp, Homo sapien
tgcactctcgggatccacggggacc

SEQ ID NO: 4806729 - DNA, 25 bp, Homo sapien
tgcttccacactacgggccgggtcg

SEQ ID NO: 4806730 - DNA, 25 bp, Homo sapien
gccaaactcgtttggaactcctgag

SEQ ID NO: 4806731 - DNA, 25 bp, Homo sapien
tggccaaactcgtttggaactcctg

SEQ ID NO: 4806732 - DNA, 25 bp, Homo sapien
atgttggccaaactcgtttggaact

SEQ ID NO: 4806733 - DNA, 25 bp, Homo sapien
tgttggccaaactcgtttggaactc

SEQ ID NO: 4806734 - DNA, 25 bp, Homo sapien
cactcttttaggcacttgaggcaga

SEQ ID NO: 4806735 - DNA, 25 bp, Homo sapien
gtggactgatcctcataatagcctg

SEQ ID NO: 4806736 - DNA, 25 bp, Homo sapien
tgtcggtttggatcctgtggcccca

SEQ ID NO: 4806737 - DNA, 25 bp, Homo sapien
cataaaaaatcctgccgtggactga

SEQ ID NO: 4806738 - DNA, 25 bp, Homo sapien
gagatcacgcaacattctacatgag

SEQ ID NO: 4806739 - DNA, 25 bp, Homo sapien
ctggcacgagcaccaagagatcctg

SEQ ID NO: 4806740 - DNA, 25 bp, Homo sapien
cagactcgggtactcagggaacttc

SEQ ID NO: 4806741 - DNA, 25 bp, Homo sapien
gaaggcatcaaccttgtgactcaga

SEQ ID NO: 4806742 - DNA, 25 bp, Homo sapien
gttcggagtgggctagaaataacca

SEQ ID NO: 4806743 - DNA, 25 bp, Homo sapien
gcttgtcctacattaaaccctgcag

SEQ ID NO: 4806744 - DNA, 25 bp, Homo sapien
tatgaaaggttgaccgcttgctcct

SEQ ID NO: 4806745 - DNA, 25 bp, Homo sapien
aaagaacctggaaccgagtagcctg

SEQ ID NO: 4806746 - DNA, 25 bp, Homo sapien
gaaccaaaggactcatctagggtga

SEQ ID NO: 4806747 - DNA, 25 bp, Homo sapien
gactcatctagggtgagctcaatga

SEQ ID NO: 4806748 - DNA, 25 bp, Homo sapien
aaaggactcatctagggtgagctca

SEQ ID NO: 4806749 - DNA, 25 bp, Homo sapien
cgaaccaccgaaccaaaggactcat

SEQ ID NO: 4806750 - DNA, 25 bp, Homo sapien
caaacgctgccaaaggagtagtccc

SEQ ID NO: 4806751 - DNA, 25 bp, Homo sapien
tctggaggcatcgaatagcaaacgc

SEQ ID NO: 4806752 - DNA, 25 bp, Homo sapien
caagaggcggaggtccatattccaa

SEQ ID NO: 4806753 - DNA, 25 bp, Homo sapien
aatctcaagtctccacaagaggcgg

SEQ ID NO: 4806754 - DNA, 25 bp, Homo sapien
caagtatgtgagaccacaggttccc

SEQ ID NO: 4806755 - DNA, 25 bp, Homo sapien
tcaagtatgtgagaccacaggttcc

SEQ ID NO: 4806756 - DNA, 25 bp, Homo sapien
agtatgtgagaccacaggttcccac

SEQ ID NO: 4806757 - DNA, 25 bp, Homo sapien
aagtatgtgagaccacaggttccca

SEQ ID NO: 4806758 - DNA, 25 bp, Homo sapien
tttcgaacgctccaattgggacgac

SEQ ID NO: 4806759 - DNA, 25 bp, Homo sapien
ggctttgcagcgagttgcccactgt

SEQ ID NO: 4806760 - DNA, 25 bp, Homo sapien
taactggtcacccattgagggacag

SEQ ID NO: 4806761 - DNA, 25 bp, Homo sapien
taagcgctttgcgattggcccggga

SEQ ID NO: 4806762 - DNA, 25 bp, Homo sapien
gacgaggttggagcgaggatccggc

SEQ ID NO: 4806763 - DNA, 25 bp, Homo sapien
gcacactccggagcgcggagtatca

SEQ ID NO: 4806764 - DNA, 25 bp, Homo sapien
tgcgggcacaccgtttgtgggccgg

SEQ ID NO: 4806765 - DNA, 25 bp, Homo sapien
tatcagaggccagagggaacgggcc

SEQ ID NO: 4806766 - DNA, 25 bp, Homo sapien
cagagcttggacgaggcgcaagcaa

SEQ ID NO: 4806767 - DNA, 25 bp, Homo sapien
gatggacgatcaatccaggatgctg

SEQ ID NO: 4806768 - DNA, 25 bp, Homo sapien
agatcatgaccatcaccgaccagag

SEQ ID NO: 4806769 - DNA, 25 bp, Homo sapien
tgaacctggctggccactcggtgca

SEQ ID NO: 4806770 - DNA, 25 bp, Homo sapien
gaccccagtagcatgcttgaattag

SEQ ID NO: 4806771 - DNA, 25 bp, Homo sapien
taagcttcagctgcacggatagaag

SEQ ID NO: 4806772 - DNA, 25 bp, Homo sapien
tagatgcaattgaacagaccccagt

SEQ ID NO: 4806773 - DNA, 25 bp, Homo sapien
gaaggctactttagagaatcgagga

SEQ ID NO: 4806774 - DNA, 25 bp, Homo sapien
acttctgtgtatgggcttgtgcacc

SEQ ID NO: 4806775 - DNA, 25 bp, Homo sapien
tgggcttgtgcaccaatgtcactaa

SEQ ID NO: 4806776 - DNA, 25 bp, Homo sapien
ccaatgtcactaaattgaacttcac

SEQ ID NO: 4806777 - DNA, 25 bp, Homo sapien
agtgtaaacttctgtgtatgggctt

SEQ ID NO: 4806778 - DNA, 25 bp, Homo sapien
gctccatcagttgcctcagagcaag

SEQ ID NO: 4806779 - DNA, 25 bp, Homo sapien
tgtcaagtgccgctgagcagctctg

SEQ ID NO: 4806780 - DNA, 25 bp, Homo sapien
ctaggagcagtttgtggaccgcgtc

SEQ ID NO: 4806781 - DNA, 25 bp, Homo sapien
caaatgagcttttatggcaactggc

SEQ ID NO: 4806782 - DNA, 25 bp, Homo sapien
tgcaagctcttgttacatggaaggg

SEQ ID NO: 4806783 - DNA, 25 bp, Homo sapien
gcaccccagggataaaggcctctaa

SEQ ID NO: 4806784 - DNA, 25 bp, Homo sapien
catggaagggttgggcctgttctca

SEQ ID NO: 4806785 - DNA, 25 bp, Homo sapien
aacctgccaaagctaggtgcaagct

SEQ ID NO: 4806786 - DNA, 25 bp, Homo sapien
aatgaggagcgaacggtgctgtaac

SEQ ID NO: 4806787 - DNA, 25 bp, Homo sapien
ctgctcagtgtagggaaactggtaa

SEQ ID NO: 4806788 - DNA, 25 bp, Homo sapien
tactcgatgatgtttgggatgacag

SEQ ID NO: 4806789 - DNA, 25 bp, Homo sapien
taacaactggtggtgaatgaggagc

SEQ ID NO: 4806790 - DNA, 25 bp, Homo sapien
acttgttagatcatttcccttcatg

SEQ ID NO: 4806791 - DNA, 25 bp, Homo sapien
gttagatcatttcccttcatgtcag

SEQ ID NO: 4806792 - DNA, 25 bp, Homo sapien
ttcacttgttagatcatttcccttc

SEQ ID NO: 4806793 - DNA, 25 bp, Homo sapien
ccttcatgtcagaataattagtgta

SEQ ID NO: 4806794 - DNA, 25 bp, Homo sapien
ggtacttgcacttgtcagcagcttt

SEQ ID NO: 4806795 - DNA, 25 bp, Homo sapien
aagcctgaaataacagaactgtact

SEQ ID NO: 4806796 - DNA, 25 bp, Homo sapien
tctttatcctacaagaaagcctgaa

SEQ ID NO: 4806797 - DNA, 25 bp, Homo sapien
tttgcaaggtacttgcacttgtcag

SEQ ID NO: 4806798 - DNA, 25 bp, Homo sapien
cagattatgtcttaaggcacaaagc

SEQ ID NO: 4806799 - DNA, 25 bp, Homo sapien
gatatatcttttggatccgacagga

SEQ ID NO: 4806800 - DNA, 25 bp, Homo sapien
gatcattgcttagagttgcctttgc

SEQ ID NO: 4806801 - DNA, 25 bp, Homo sapien
catggttcttggcattgtcagccta

SEQ ID NO: 4806802 - DNA, 25 bp, Homo sapien
aagaaacaggtttttagtatgctga

SEQ ID NO: 4806803 - DNA, 25 bp, Homo sapien
agaaacaggtttttagtatgctgat

SEQ ID NO: 4806804 - DNA, 25 bp, Homo sapien
aaagaaacaggtttttagtatgctg

SEQ ID NO: 4806805 - DNA, 25 bp, Homo sapien
gaaacaggtttttagtatgctgatc

SEQ ID NO: 4806806 - DNA, 25 bp, Homo sapien
ctggtctgcatgatattaatattac

SEQ ID NO: 4806807 - DNA, 25 bp, Homo sapien
aatcagatagaagtattgtggctta

SEQ ID NO: 4806808 - DNA, 25 bp, Homo sapien
cagatagaagtattgtggcttattt

SEQ ID NO: 4806809 - DNA, 25 bp, Homo sapien
tggtctgcatgatattaatattact

SEQ ID NO: 4806810 - DNA, 25 bp, Homo sapien
cagggcataccaccatagatgagtt

SEQ ID NO: 4806811 - DNA, 25 bp, Homo sapien
gatcatcagggagagttccagggca

SEQ ID NO: 4806812 - DNA, 25 bp, Homo sapien
ctaagagaggagatttgagctacac

SEQ ID NO: 4806813 - DNA, 25 bp, Homo sapien
tagaggcagaaaaccaatgggcaca

SEQ ID NO: 4806814 - DNA, 25 bp, Homo sapien
gagatttgagcattaggtttggagt

SEQ ID NO: 4806815 - DNA, 25 bp, Homo sapien
tatatggacaggagatttgagcatt

SEQ ID NO: 4806816 - DNA, 25 bp, Homo sapien
tttgagcattaggtttggagttgtg

SEQ ID NO: 4806817 - DNA, 25 bp, Homo sapien
tactcttttatatggacaggagatt

SEQ ID NO: 4806818 - DNA, 25 bp, Homo sapien
gccctgggagcttgtgtgtcaaagt

SEQ ID NO: 4806819 - DNA, 25 bp, Homo sapien
caaagtgaaatggagctaaaggtca

SEQ ID NO: 4806820 - DNA, 25 bp, Homo sapien
cagactcatggaattacttgggata

SEQ ID NO: 4806821 - DNA, 25 bp, Homo sapien
taaccaacagtggatgctaccttgc

SEQ ID NO: 4806822 - DNA, 25 bp, Homo sapien
gcagaccagccttttactaatggtg

SEQ ID NO: 4806823 - DNA, 25 bp, Homo sapien
tggtgtacaaatagccactggcttc

SEQ ID NO: 4806824 - DNA, 25 bp, Homo sapien
tactaatggtggtgtacaaatagcc

SEQ ID NO: 4806825 - DNA, 25 bp, Homo sapien
aacttttctgcctccggcagaccag

SEQ ID NO: 4806826 - DNA, 25 bp, Homo sapien
aaattgttccttaccactatcatgg

SEQ ID NO: 4806827 - DNA, 25 bp, Homo sapien
gatatattgtctgcagtagggaggc

SEQ ID NO: 4806828 - DNA, 25 bp, Homo sapien
gacaagcctttaaagttgagtggaa

SEQ ID NO: 4806829 - DNA, 25 bp, Homo sapien
taaagacttgtgagtgggtagccta

SEQ ID NO: 4806830 - DNA, 25 bp, Homo sapien
gtttccttcttgtggcccgagctgg

SEQ ID NO: 4806831 - DNA, 25 bp, Homo sapien
tttccttcttgtggcccgagctgga

SEQ ID NO: 4806832 - DNA, 25 bp, Homo sapien
gagtttccttcttgtggcccgagct

SEQ ID NO: 4806833 - DNA, 25 bp, Homo sapien
ccttcttgtggcccgagctggagtg

SEQ ID NO: 4806834 - DNA, 25 bp, Homo sapien
tagaccttatttcagtgatttttcc

SEQ ID NO: 4806835 - DNA, 25 bp, Homo sapien
atttcagtgatttttcccactaatg

SEQ ID NO: 4806836 - DNA, 25 bp, Homo sapien
tatagaccttatttcagtgattttt

SEQ ID NO: 4806837 - DNA, 25 bp, Homo sapien
agtgatttttcccactaatgtcttt

SEQ ID NO: 4806838 - DNA, 25 bp, Homo sapien
cttatgaaatgtcagggccatgtgc

SEQ ID NO: 4806839 - DNA, 25 bp, Homo sapien
gactctacatgtcgtaaaaggtgaa

SEQ ID NO: 4806840 - DNA, 25 bp, Homo sapien
ggccatgtgctagcctggtttgcta

SEQ ID NO: 4806841 - DNA, 25 bp, Homo sapien
caagaatgatgctttgtcctcagtc

SEQ ID NO: 4806842 - DNA, 25 bp, Homo sapien
tccttctcattgtagatttgggcct

SEQ ID NO: 4806843 - DNA, 25 bp, Homo sapien
ctcattgtagatttgggcctccttc

SEQ ID NO: 4806844 - DNA, 25 bp, Homo sapien
actgtgatgcacttgtcattgtggt

SEQ ID NO: 4806845 - DNA, 25 bp, Homo sapien
ggcctccttcactgtgatgcacttg

SEQ ID NO: 4806846 - DNA, 25 bp, Homo sapien
tgtgattctgtctgacgtgtgaaga

SEQ ID NO: 4806847 - DNA, 25 bp, Homo sapien
gtcttgacaagttgtggtggagcac

SEQ ID NO: 4806848 - DNA, 25 bp, Homo sapien
gaagaatttcatattgtgacaacac

SEQ ID NO: 4806849 - DNA, 25 bp, Homo sapien
gctgtcaacagaccaaaacaccaag

SEQ ID NO: 4806850 - DNA, 25 bp, Homo sapien
caagataactctagtctccaaggta

SEQ ID NO: 4806851 - DNA, 25 bp, Homo sapien
gatacagtctttcagactaacaggt

SEQ ID NO: 4806852 - DNA, 25 bp, Homo sapien
agtctccagaaatggctgatctcag

SEQ ID NO: 4806853 - DNA, 25 bp, Homo sapien
taacagggtctagaaagatacagtc

SEQ ID NO: 4806854 - DNA, 25 bp, Homo sapien
cgacatctggaaccagttgcaatac

SEQ ID NO: 4806855 - DNA, 25 bp, Homo sapien
tgtcaaaactgctttctatacgtat

SEQ ID NO: 4806856 - DNA, 25 bp, Homo sapien
aaaactgctttctatacgtatctgc

SEQ ID NO: 4806857 - DNA, 25 bp, Homo sapien
gaaccagttgcaatacatcactgtc

SEQ ID NO: 4806858 - DNA, 25 bp, Homo sapien
gcagtgtctcgcgtcactgtctgct

SEQ ID NO: 4806859 - DNA, 25 bp, Homo sapien
cttgtggaactgcaaaggtgaactg

SEQ ID NO: 4806860 - DNA, 25 bp, Homo sapien
caaaggtgaactgaagttgggaggc

SEQ ID NO: 4806861 - DNA, 25 bp, Homo sapien
tcttgacatggtgtcccttgtggaa

SEQ ID NO: 4806862 - DNA, 25 bp, Homo sapien
atgcttttagtagtcatttcggcca

SEQ ID NO: 4806863 - DNA, 25 bp, Homo sapien
tgcttttagtagtcatttcggccat

SEQ ID NO: 4806864 - DNA, 25 bp, Homo sapien
ggaattccgtctctgttatgctttt

SEQ ID NO: 4806865 - DNA, 25 bp, Homo sapien
aattccgtctctgttatgcttttag

SEQ ID NO: 4806866 - DNA, 25 bp, Homo sapien
ggagctgtaccattcgctgaaccat

SEQ ID NO: 4806867 - DNA, 25 bp, Homo sapien
ttaaggtcggccatgtgaacatccc

SEQ ID NO: 4806868 - DNA, 25 bp, Homo sapien
aatgaagtttagtaggttcagcacc

SEQ ID NO: 4806869 - DNA, 25 bp, Homo sapien
gactgtgaccgtcctggatcactgg

SEQ ID NO: 4806870 - DNA, 25 bp, Homo sapien
ccagggatatgatgaggacaaaatg

SEQ ID NO: 4806871 - DNA, 25 bp, Homo sapien
aagggtcagcatagaatgatcatga

SEQ ID NO: 4806872 - DNA, 25 bp, Homo sapien
gcatagaatgatcatgagccaggga

SEQ ID NO: 4806873 - DNA, 25 bp, Homo sapien
aaagagtgaccagcatgtagctgtt

SEQ ID NO: 4806874 - DNA, 25 bp, Homo sapien
tttttcccctgtttggatagatgca

SEQ ID NO: 4806875 - DNA, 25 bp, Homo sapien
gatagatgcatctagaaccaaatga

SEQ ID NO: 4806876 - DNA, 25 bp, Homo sapien
ccaaatgagggcaataaagtctaat

SEQ ID NO: 4806877 - DNA, 25 bp, Homo sapien
ggcaataaagtctaatagaaagctt

SEQ ID NO: 4806878 - DNA, 25 bp, Homo sapien
gggaaatcatactgatcaatagttc

SEQ ID NO: 4806879 - DNA, 25 bp, Homo sapien
cctgggaaatcatactgatcaatag

SEQ ID NO: 4806880 - DNA, 25 bp, Homo sapien
aatcatactgatcaatagttcccat

SEQ ID NO: 4806881 - DNA, 25 bp, Homo sapien
gaaatcatactgatcaatagttccc

SEQ ID NO: 4806882 - DNA, 25 bp, Homo sapien
tagcagacgtgtggcagtagtaatt

SEQ ID NO: 4806883 - DNA, 25 bp, Homo sapien
gactggccttgcatctgtatttgca

SEQ ID NO: 4806884 - DNA, 25 bp, Homo sapien
taacacgcatattaaatagggactg

SEQ ID NO: 4806885 - DNA, 25 bp, Homo sapien
caagcaccagcccaattaataattt

SEQ ID NO: 4806886 - DNA, 25 bp, Homo sapien
tatacttctgtaattcttgtttcaa

SEQ ID NO: 4806887 - DNA, 25 bp, Homo sapien
tgcttttggttggtatgcctgccca

SEQ ID NO: 4806888 - DNA, 25 bp, Homo sapien
tcatggttgcctctaaattatcaaa

SEQ ID NO: 4806889 - DNA, 25 bp, Homo sapien
tattggtgccatatgtcctgttcca

SEQ ID NO: 4806890 - DNA, 25 bp, Homo sapien
cattgatgtcgttaggaccattcac

SEQ ID NO: 4806891 - DNA, 25 bp, Homo sapien
tcaccctacattgatgtcgttagga

SEQ ID NO: 4806892 - DNA, 25 bp, Homo sapien
ccctacattgatgtcgttaggacca

SEQ ID NO: 4806893 - DNA, 25 bp, Homo sapien
tgtcgttaggaccattcaccataga

SEQ ID NO: 4806894 - DNA, 25 bp, Homo sapien
cctcaagaatatgtaggaacactga

SEQ ID NO: 4806895 - DNA, 25 bp, Homo sapien
tggaaagaatcagcatgacacatac

SEQ ID NO: 4806896 - DNA, 25 bp, Homo sapien
gaacagctagataaacccaaaggaa

SEQ ID NO: 4806897 - DNA, 25 bp, Homo sapien
gacatgtggagaatatatcaccagc

SEQ ID NO: 4806898 - DNA, 25 bp, Homo sapien
ttctgattcttctcatttctttata

SEQ ID NO: 4806899 - DNA, 25 bp, Homo sapien
tattctgattcttctcatttcttta

SEQ ID NO: 4806900 - DNA, 25 bp, Homo sapien
tgattcttctcatttctttatacat

SEQ ID NO: 4806901 - DNA, 25 bp, Homo sapien
ctgattcttctcatttctttataca

SEQ ID NO: 4806902 - DNA, 25 bp, Homo sapien
tgaaggctcattaaggctaactagg

SEQ ID NO: 4806903 - DNA, 25 bp, Homo sapien
tgccagatgctggtgatagttacaa

SEQ ID NO: 4806904 - DNA, 25 bp, Homo sapien
tctactttaagagaacgagtgcaga

SEQ ID NO: 4806905 - DNA, 25 bp, Homo sapien
gataacctaccaactagaattcttg

SEQ ID NO: 4806906 - DNA, 25 bp, Homo sapien
tatacccttcagactgtaaccaaaa

SEQ ID NO: 4806907 - DNA, 25 bp, Homo sapien
cattggatgtccatataagggtcag

SEQ ID NO: 4806908 - DNA, 25 bp, Homo sapien
gggtcagtatgcataacctctcctg

SEQ ID NO: 4806909 - DNA, 25 bp, Homo sapien
gctgactgggtgtatacccttcaga

SEQ ID NO: 4806910 - DNA, 25 bp, Homo sapien
gatcccagttgcatggtcatatgtt

SEQ ID NO: 4806911 - DNA, 25 bp, Homo sapien
gcaagtggttgtcctaaactgagca

SEQ ID NO: 4806912 - DNA, 25 bp, Homo sapien
tggaactatttcaaactgtgatggg

SEQ ID NO: 4806913 - DNA, 25 bp, Homo sapien
tagcaactgcaaacattcctccttg

SEQ ID NO: 4806914 - DNA, 25 bp, Homo sapien
tgtgtttatacatggcttgtatggc

SEQ ID NO: 4806915 - DNA, 25 bp, Homo sapien
gaaaggactgtcgagtttctgagag

SEQ ID NO: 4806916 - DNA, 25 bp, Homo sapien
tgcttgagggctgagtgatagattc

SEQ ID NO: 4806917 - DNA, 25 bp, Homo sapien
gatagattcgcctgcctgaagcatc

SEQ ID NO: 4806918 - DNA, 25 bp, Homo sapien
taggatgcgcagtattcagcagctt

SEQ ID NO: 4806919 - DNA, 25 bp, Homo sapien
caggaaattaagctgcagctggaga

SEQ ID NO: 4806920 - DNA, 25 bp, Homo sapien
agtaattaggcaagtcacaggaaat

SEQ ID NO: 4806921 - DNA, 25 bp, Homo sapien
cagcattactaggatgcgcagtatt

SEQ ID NO: 4806922 - DNA, 25 bp, Homo sapien
ttcagggcacaacaagaagttgggc

SEQ ID NO: 4806923 - DNA, 25 bp, Homo sapien
ccctgtaagtaccttgtaagagatg

SEQ ID NO: 4806924 - DNA, 25 bp, Homo sapien
caagcaaagcaaccactccatagag

SEQ ID NO: 4806925 - DNA, 25 bp, Homo sapien
tactagttgcctttcccagttaagc

SEQ ID NO: 4806926 - DNA, 25 bp, Homo sapien
catttgaaggttcaaacagtttcaa

SEQ ID NO: 4806927 - DNA, 25 bp, Homo sapien
tactgcccatggattgttcttgaca

SEQ ID NO: 4806928 - DNA, 25 bp, Homo sapien
cccgaatggtaaatttgagctgtgg

SEQ ID NO: 4806929 - DNA, 25 bp, Homo sapien
ttccctcatttgaaggttcaaacag

SEQ ID NO: 4806930 - DNA, 25 bp, Homo sapien
tcatgaaaagcagtgtgctctgtag

SEQ ID NO: 4806931 - DNA, 25 bp, Homo sapien
gtaatttgacacttaagttgtgccc

SEQ ID NO: 4806932 - DNA, 25 bp, Homo sapien
tgcaaagtggttttgtatagcatat

SEQ ID NO: 4806933 - DNA, 25 bp, Homo sapien
gctctgtagtaattgctaagcaaac

SEQ ID NO: 4806934 - DNA, 25 bp, Homo sapien
taataatggtctgacgggctgcttc

SEQ ID NO: 4806935 - DNA, 25 bp, Homo sapien
ctgtctaaagtaaaccttttgatcg

SEQ ID NO: 4806936 - DNA, 25 bp, Homo sapien
gtaataatggtctgacgggctgctt

SEQ ID NO: 4806937 - DNA, 25 bp, Homo sapien
taaaccttttgatcggcatgtccat

SEQ ID NO: 4806938 - DNA, 25 bp, Homo sapien
aacaatcttgaagccgctccgctct

SEQ ID NO: 4806939 - DNA, 25 bp, Homo sapien
gatgaaacaatcttgaagccgctcc

SEQ ID NO: 4806940 - DNA, 25 bp, Homo sapien
cttgatgaaacaatcttgaagccgc

SEQ ID NO: 4806941 - DNA, 25 bp, Homo sapien
gaaacaatcttgaagccgctccgct

SEQ ID NO: 4806942 - DNA, 25 bp, Homo sapien
aatgtcacacacaccagcaaaatgt

SEQ ID NO: 4806943 - DNA, 25 bp, Homo sapien
gttatgccatccaatcaaactgaag

SEQ ID NO: 4806944 - DNA, 25 bp, Homo sapien
cgtaagacagtttgcttgttatgcc

SEQ ID NO: 4806945 - DNA, 25 bp, Homo sapien
aaaactgctatttgagggcatctga

SEQ ID NO: 4806946 - DNA, 25 bp, Homo sapien
cctgtggtctcttagctagaaaaaa

SEQ ID NO: 4806947 - DNA, 25 bp, Homo sapien
ccttctttaacggatatggccattt

SEQ ID NO: 4806948 - DNA, 25 bp, Homo sapien
actattctcaccagtaaggttgcca

SEQ ID NO: 4806949 - DNA, 25 bp, Homo sapien
tctcctttggattgtgatgcaccct

SEQ ID NO: 4806950 - DNA, 25 bp, Homo sapien
cctctacaggcaggtggctttacac

SEQ ID NO: 4806951 - DNA, 25 bp, Homo sapien
gacgttcagctcattcacagtgtag

SEQ ID NO: 4806952 - DNA, 25 bp, Homo sapien
gtagcctctacaggcaggtggcttt

SEQ ID NO: 4806953 - DNA, 25 bp, Homo sapien
ctaggataaactgctgacgttcagc

SEQ ID NO: 4806954 - DNA, 25 bp, Homo sapien
acaccactgggtattgacagggtga

SEQ ID NO: 4806955 - DNA, 25 bp, Homo sapien
cagggtatcagtcagcagaattata

SEQ ID NO: 4806956 - DNA, 25 bp, Homo sapien
cagggtgattccagggtatcagtca

SEQ ID NO: 4806957 - DNA, 25 bp, Homo sapien
tcagcagaattatagctgcccagag

SEQ ID NO: 4806958 - DNA, 25 bp, Homo sapien
tatcaagcgctccaacaagatgcag

SEQ ID NO: 4806959 - DNA, 25 bp, Homo sapien
ctgacagtgcttatatatcaagcgc

SEQ ID NO: 4806960 - DNA, 25 bp, Homo sapien
gatgcagctccatttaacaaaaaag

SEQ ID NO: 4806961 - DNA, 25 bp, Homo sapien
tctcttcttgtgtagctgacagtgc

SEQ ID NO: 4806962 - DNA, 25 bp, Homo sapien
cagtgcattgccgtgttatatttaa

SEQ ID NO: 4806963 - DNA, 25 bp, Homo sapien
tgacatgaaaaacgtgcacacacca

SEQ ID NO: 4806964 - DNA, 25 bp, Homo sapien
gagaatgagtcaagcgaaagtgaca

SEQ ID NO: 4806965 - DNA, 25 bp, Homo sapien
aactaggttggcgtggaaatgtgca

SEQ ID NO: 4806966 - DNA, 25 bp, Homo sapien
ggcaggtgcacagcatgttgaaaga

SEQ ID NO: 4806967 - DNA, 25 bp, Homo sapien
gagtgggctttaggtacttttcaca

SEQ ID NO: 4806968 - DNA, 25 bp, Homo sapien
gaagggtatgcgtttattcggagaa

SEQ ID NO: 4806969 - DNA, 25 bp, Homo sapien
caaatgcagtcgtctatgcagatgc

SEQ ID NO: 4806970 - DNA, 25 bp, Homo sapien
tcaatttgaagatatcaagatattt

SEQ ID NO: 4806971 - DNA, 25 bp, Homo sapien
aatttgaagatatcaagatattttg

SEQ ID NO: 4806972 - DNA, 25 bp, Homo sapien
gtttcaatttgaagatatcaagata

SEQ ID NO: 4806973 - DNA, 25 bp, Homo sapien
tgtttcaatttgaagatatcaagat

SEQ ID NO: 4806974 - DNA, 25 bp, Homo sapien
taaagtaccttataagcacagccac

SEQ ID NO: 4806975 - DNA, 25 bp, Homo sapien
caaagctaagcagacagactagagc

SEQ ID NO: 4806976 - DNA, 25 bp, Homo sapien
ggcaaaggcttcaacagaaaattgt

SEQ ID NO: 4806977 - DNA, 25 bp, Homo sapien
tcctaaaagtgaacatgggtactct

SEQ ID NO: 4806978 - DNA, 25 bp, Homo sapien
tctgaacctggtacagatgatgctg

SEQ ID NO: 4806979 - DNA, 25 bp, Homo sapien
tagagtaatgagctaaagtgcacac

SEQ ID NO: 4806980 - DNA, 25 bp, Homo sapien
gcatctttcttaagggtgtacccag

SEQ ID NO: 4806981 - DNA, 25 bp, Homo sapien
taatatgtggttgggtggcccttcc

SEQ ID NO: 4806982 - DNA, 25 bp, Homo sapien
aaactgaagggtagagttggtcaca

SEQ ID NO: 4806983 - DNA, 25 bp, Homo sapien
taacattctatggaactagctgtag

SEQ ID NO: 4806984 - DNA, 25 bp, Homo sapien
catctccttagggaaagttcaagaa

SEQ ID NO: 4806985 - DNA, 25 bp, Homo sapien
ggaatcactcaaactcagaaggcgg

SEQ ID NO: 4806986 - DNA, 25 bp, Homo sapien
gcttcagagaatgtgcgatatcctt

SEQ ID NO: 4806987 - DNA, 25 bp, Homo sapien
cttcactgatgaggcttgataaggc

SEQ ID NO: 4806988 - DNA, 25 bp, Homo sapien
taaggcgctgttgtataatacagtg

SEQ ID NO: 4806989 - DNA, 25 bp, Homo sapien
tgaaactgtgattgcctgcagcatt

SEQ ID NO: 4806990 - DNA, 25 bp, Homo sapien
gcccagagtctgctcggtaataaaa

SEQ ID NO: 4806991 - DNA, 25 bp, Homo sapien
tgaaaacgagattgatccgtctggg

SEQ ID NO: 4806992 - DNA, 25 bp, Homo sapien
caaggtttgctacgtcctctgggca

SEQ ID NO: 4806993 - DNA, 25 bp, Homo sapien
tacttgctgctgatagaggtgaaaa

SEQ ID NO: 4806994 - DNA, 25 bp, Homo sapien
tcagtactgtatatttcaccctgtg

SEQ ID NO: 4806995 - DNA, 25 bp, Homo sapien
tgcgattctgaaactgattgagtca

SEQ ID NO: 4806996 - DNA, 25 bp, Homo sapien
gaaaataatttgtggcggtgattct

SEQ ID NO: 4806997 - DNA, 25 bp, Homo sapien
tacaccctggattgaaaaagtcttc

SEQ ID NO: 4806998 - DNA, 25 bp, Homo sapien
tcatccccgggggttgaggatcacg

SEQ ID NO: 4806999 - DNA, 25 bp, Homo sapien
cacggggaagccccgagtggccagg

SEQ ID NO: 4807000 - DNA, 25 bp, Homo sapien
atcacggggaagccccgagtggcca

SEQ ID NO: 4807001 - DNA, 25 bp, Homo sapien
gaggatcacggggaagccccgagtg

SEQ ID NO: 4807002 - DNA, 25 bp, Homo sapien
gacctcaggagttgatgcgtctgtg

SEQ ID NO: 4807003 - DNA, 25 bp, Homo sapien
acctcaggagttgatgcgtctgtgg

SEQ ID NO: 4807004 - DNA, 25 bp, Homo sapien
tcactcccggtgagtggtgacgggc

SEQ ID NO: 4807005 - DNA, 25 bp, Homo sapien
ggtgagtggtgacgggcaccaggac

SEQ ID NO: 4807006 - DNA, 25 bp, Homo sapien
ggcttcctgagatccttggccttgg

SEQ ID NO: 4807007 - DNA, 25 bp, Homo sapien
gtggcttcctgagatccttggcctt

SEQ ID NO: 4807008 - DNA, 25 bp, Homo sapien
tcacagccctagtggcttcctgaga

SEQ ID NO: 4807009 - DNA, 25 bp, Homo sapien
agccctagtggcttcctgagatcct

SEQ ID NO: 4807010 - DNA, 25 bp, Homo sapien
aatgatccgtgggttggcagctgat

SEQ ID NO: 4807011 - DNA, 25 bp, Homo sapien
taaatgagtgggccgagaatgatcc

SEQ ID NO: 4807012 - DNA, 25 bp, Homo sapien
aataaatgagtgggccgagaatgat

SEQ ID NO: 4807013 - DNA, 25 bp, Homo sapien
aatgagtgggccgagaatgatccgt

SEQ ID NO: 4807014 - DNA, 25 bp, Homo sapien
gggctgcaggcacgctgaagtgcgc

SEQ ID NO: 4807015 - DNA, 25 bp, Homo sapien
cagagtccatctagggggtgaccac

SEQ ID NO: 4807016 - DNA, 25 bp, Homo sapien
cagcaggcggttctggggtctctga

SEQ ID NO: 4807017 - DNA, 25 bp, Homo sapien
cgctgaagtgcgctcctggcagcag

SEQ ID NO: 4807018 - DNA, 25 bp, Homo sapien
ttatggggcttgtaaaagccgctga

SEQ ID NO: 4807019 - DNA, 25 bp, Homo sapien
tatggggcttgtaaaagccgctgac

SEQ ID NO: 4807020 - DNA, 25 bp, Homo sapien
ctgctccctggacttaacgaggtga

SEQ ID NO: 4807021 - DNA, 25 bp, Homo sapien
tccctggacttaacgaggtgagcag

SEQ ID NO: 4807022 - DNA, 25 bp, Homo sapien
gccctggcagtttgcaataaccttc

SEQ ID NO: 4807023 - DNA, 25 bp, Homo sapien
ccctggcagtttgcaataaccttca

SEQ ID NO: 4807024 - DNA, 25 bp, Homo sapien
tctcccgctcccattttacaccgga

SEQ ID NO: 4807025 - DNA, 25 bp, Homo sapien
gctcccattttacaccggagcttgt

SEQ ID NO: 4807026 - DNA, 25 bp, Homo sapien
gcctccttctgagggtgtccttttc

SEQ ID NO: 4807027 - DNA, 25 bp, Homo sapien
tttacaccggagcttgtttgccagg

SEQ ID NO: 4807028 - DNA, 25 bp, Homo sapien
ctgggattcgcttctcactgatgag

SEQ ID NO: 4807029 - DNA, 25 bp, Homo sapien
gctggggcaggttgagggtcccttc

SEQ ID NO: 4807030 - DNA, 25 bp, Homo sapien
ggtgggaggcactccaggcagggct

SEQ ID NO: 4807031 - DNA, 25 bp, Homo sapien
caggttgagggtcccttctggccat

SEQ ID NO: 4807032 - DNA, 25 bp, Homo sapien
tggtgggaggcactccaggcagggc

SEQ ID NO: 4807033 - DNA, 25 bp, Homo sapien
gcacccagtgacctttcgcacacct

SEQ ID NO: 4807034 - DNA, 25 bp, Homo sapien
cccagtgacctttcgcacacctcct

SEQ ID NO: 4807035 - DNA, 25 bp, Homo sapien
gctccagttttctgcacccagtgac

SEQ ID NO: 4807036 - DNA, 25 bp, Homo sapien
tgacctttcgcacacctccttgctt

SEQ ID NO: 4807037 - DNA, 25 bp, Homo sapien
gagtttgagattcaatcagatgtcc

SEQ ID NO: 4807038 - DNA, 25 bp, Homo sapien
ctctaaagcagccacctggtgccga

SEQ ID NO: 4807039 - DNA, 25 bp, Homo sapien
cagatgtccagtcatagcatggtgg

SEQ ID NO: 4807040 - DNA, 25 bp, Homo sapien
ctgcgggaatctggcggtgctgggc

SEQ ID NO: 4807041 - DNA, 25 bp, Homo sapien
taatgagggtcttcagcaagattcg

SEQ ID NO: 4807042 - DNA, 25 bp, Homo sapien
agattcgataacatgtggccctgtg

SEQ ID NO: 4807043 - DNA, 25 bp, Homo sapien
tatttcatgtccgtaatgagggtct

SEQ ID NO: 4807044 - DNA, 25 bp, Homo sapien
ttgggatttgtgaggtgctttctca

SEQ ID NO: 4807045 - DNA, 25 bp, Homo sapien
cgatggtgtcaccatcggcaaccgg

SEQ ID NO: 4807046 - DNA, 25 bp, Homo sapien
ctgaaacgatggtgtcaccatcggc

SEQ ID NO: 4807047 - DNA, 25 bp, Homo sapien
gaaacgatggtgtcaccatcggcaa

SEQ ID NO: 4807048 - DNA, 25 bp, Homo sapien
atggtgtcaccatcggcaaccggag

SEQ ID NO: 4807049 - DNA, 25 bp, Homo sapien
tcctcactccgcttgggggatggtg

SEQ ID NO: 4807050 - DNA, 25 bp, Homo sapien
tttaaagaaggtatcgactggcata

SEQ ID NO: 4807051 - DNA, 25 bp, Homo sapien
ggtatcgactggcatatgctgaact

SEQ ID NO: 4807052 - DNA, 25 bp, Homo sapien
gaaggtatcgactggcatatgctga

SEQ ID NO: 4807053 - DNA, 25 bp, Homo sapien
cagaaattggaagaccctgaatcct

SEQ ID NO: 4807054 - DNA, 25 bp, Homo sapien
ttcctccatagcagactttggagct

SEQ ID NO: 4807055 - DNA, 25 bp, Homo sapien
gcagaaattggaagaccctgaatcc

SEQ ID NO: 4807056 - DNA, 25 bp, Homo sapien
ccatagcagactttggagctgcaga

SEQ ID NO: 4807057 - DNA, 25 bp, Homo sapien
tccagctaaagaggcggagttggca

SEQ ID NO: 4807058 - DNA, 25 bp, Homo sapien
aggcggagttggcaaggcttctcct

SEQ ID NO: 4807059 - DNA, 25 bp, Homo sapien
cagctccagctaaagaggcggagtt

SEQ ID NO: 4807060 - DNA, 25 bp, Homo sapien
cagcagctccagctaaagaggcgga

SEQ ID NO: 4807061 - DNA, 25 bp, Homo sapien
agtgtacgtagtatcatagggaggc

SEQ ID NO: 4807062 - DNA, 25 bp, Homo sapien
catagggaggctggattttgattgc

SEQ ID NO: 4807063 - DNA, 25 bp, Homo sapien
ttaagtgtacgtagtatcataggga

SEQ ID NO: 4807064 - DNA, 25 bp, Homo sapien
cgtagtatcatagggaggctggatt

SEQ ID NO: 4807065 - DNA, 25 bp, Homo sapien
gggctgaacttgtaaagtccctgaa

SEQ ID NO: 4807066 - DNA, 25 bp, Homo sapien
cttccaccgatcaaagtacctctga

SEQ ID NO: 4807067 - DNA, 25 bp, Homo sapien
accctatccagggttgggtcagagc

SEQ ID NO: 4807068 - DNA, 25 bp, Homo sapien
cgatcaaagtacctctgaccctcgg

SEQ ID NO: 4807069 - DNA, 25 bp, Homo sapien
gagtcctttggtgcaaggagggctg

SEQ ID NO: 4807070 - DNA, 25 bp, Homo sapien
acaggagaatgttgcgggtggtctc

SEQ ID NO: 4807071 - DNA, 25 bp, Homo sapien
ggctggcagccttgttggtatcgga

SEQ ID NO: 4807072 - DNA, 25 bp, Homo sapien
cagctcattgagggctgcagacaac

SEQ ID NO: 4807073 - DNA, 25 bp, Homo sapien
tctgggatcaaacagagggacagct

SEQ ID NO: 4807074 - DNA, 25 bp, Homo sapien
ctctggagtagtctgggatcaaaca

SEQ ID NO: 4807075 - DNA, 25 bp, Homo sapien
caggtttgggagcttgtcaggtcca

SEQ ID NO: 4807076 - DNA, 25 bp, Homo sapien
tgtcaggtccactctggagtagtct

SEQ ID NO: 4807077 - DNA, 25 bp, Homo sapien
ctttgtcttggtcggggtctctctc

SEQ ID NO: 4807078 - DNA, 25 bp, Homo sapien
tttgtcttggtcggggtctctctct

SEQ ID NO: 4807079 - DNA, 25 bp, Homo sapien
cccacattcctggaccagggtgtga

SEQ ID NO: 4807080 - DNA, 25 bp, Homo sapien
ctgtctctctcagaggattctgaca

SEQ ID NO: 4807081 - DNA, 25 bp, Homo sapien
gggtctctctcccagtacgggccat

SEQ ID NO: 4807082 - DNA, 25 bp, Homo sapien
ctgttccagggttccacgtctgtgt

SEQ ID NO: 4807083 - DNA, 25 bp, Homo sapien
agggttccacgtctgtgtcctgggt

SEQ ID NO: 4807084 - DNA, 25 bp, Homo sapien
cttggtccaatgcctcgtttccagg

SEQ ID NO: 4807085 - DNA, 25 bp, Homo sapien
ttcttagtagctttagctcctagac

SEQ ID NO: 4807086 - DNA, 25 bp, Homo sapien
ctttcttagtagctttagctcctag

SEQ ID NO: 4807087 - DNA, 25 bp, Homo sapien
ccagctgtctctttcttagtagctt

SEQ ID NO: 4807088 - DNA, 25 bp, Homo sapien
gtctctttcttagtagctttagctc

SEQ ID NO: 4807089 - DNA, 25 bp, Homo sapien
gctgatggctatccaagccctcagg

SEQ ID NO: 4807090 - DNA, 25 bp, Homo sapien
ctggggctgatggctatccaagccc

SEQ ID NO: 4807091 - DNA, 25 bp, Homo sapien
ctggtggcctgtttaggggggcctg

SEQ ID NO: 4807092 - DNA, 25 bp, Homo sapien
gggctgatggctatccaagccctca

SEQ ID NO: 4807093 - DNA, 25 bp, Homo sapien
tgccctccaggggaatgtatggagc

SEQ ID NO: 4807094 - DNA, 25 bp, Homo sapien
gatgactccatcagggtagaggatg

SEQ ID NO: 4807095 - DNA, 25 bp, Homo sapien
catgagcttgactgctgccccatag

SEQ ID NO: 4807096 - DNA, 25 bp, Homo sapien
ctgctgccccatagacactagggat

SEQ ID NO: 4807097 - DNA, 25 bp, Homo sapien
gggacagccaaagatccaatgtatg

SEQ ID NO: 4807098 - DNA, 25 bp, Homo sapien
ctacagggcagtccttttggggaca

SEQ ID NO: 4807099 - DNA, 25 bp, Homo sapien
cagccaaagatccaatgtatggagg

SEQ ID NO: 4807100 - DNA, 25 bp, Homo sapien
ccttttggggacagccaaagatcca

SEQ ID NO: 4807101 - DNA, 25 bp, Homo sapien
tcgtggacattacaccccagtgcag

SEQ ID NO: 4807102 - DNA, 25 bp, Homo sapien
tcccagtgatcgtggacattacacc

SEQ ID NO: 4807103 - DNA, 25 bp, Homo sapien
tgatcgtggacattacaccccagtg

SEQ ID NO: 4807104 - DNA, 25 bp, Homo sapien
cttcttcccagtgatcgtggacatt

SEQ ID NO: 4807105 - DNA, 25 bp, Homo sapien
gggtgtgaagcagcatctcattgtg

SEQ ID NO: 4807106 - DNA, 25 bp, Homo sapien
tgggtgtgaagcagcatctcattgt

SEQ ID NO: 4807107 - DNA, 25 bp, Homo sapien
actgcgccccgccagtttctgtatt

SEQ ID NO: 4807108 - DNA, 25 bp, Homo sapien
tattttaaatcaatctggatcattc

SEQ ID NO: 4807109 - DNA, 25 bp, Homo sapien
ccagctcagtctccttaccgaagta

SEQ ID NO: 4807110 - DNA, 25 bp, Homo sapien
agctcagtctccttaccgaagtaag

SEQ ID NO: 4807111 - DNA, 25 bp, Homo sapien
cttaccgaagtaagcccagtcggtg

SEQ ID NO: 4807112 - DNA, 25 bp, Homo sapien
agtctccttaccgaagtaagcccag

SEQ ID NO: 4807113 - DNA, 25 bp, Homo sapien
catccccaaatttagctcctacctc

SEQ ID NO: 4807114 - DNA, 25 bp, Homo sapien
ggtccccgaagttccggcattctgc

SEQ ID NO: 4807115 - DNA, 25 bp, Homo sapien
gtccccgaagttccggcattctgct

SEQ ID NO: 4807116 - DNA, 25 bp, Homo sapien
ccaaatttagctcctacctccacca

SEQ ID NO: 4807117 - DNA, 25 bp, Homo sapien
caaggataatcctccaatcagagca

SEQ ID NO: 4807118 - DNA, 25 bp, Homo sapien
tggtgagaaccaccggccaaggata

SEQ ID NO: 4807119 - DNA, 25 bp, Homo sapien
tcagattgacgtggcttcagcgaca

SEQ ID NO: 4807120 - DNA, 25 bp, Homo sapien
aaagtccacagcaattaccgagtca

SEQ ID NO: 4807121 - DNA, 25 bp, Homo sapien
tgggccgtgccaggcacgatgccat

SEQ ID NO: 4807122 - DNA, 25 bp, Homo sapien
gatgccataagaacagggacagttg

SEQ ID NO: 4807123 - DNA, 25 bp, Homo sapien
tcagctgtcagtggcccacgatcca

SEQ ID NO: 4807124 - DNA, 25 bp, Homo sapien
tcagtggcccacgatccagggatgt

SEQ ID NO: 4807125 - DNA, 25 bp, Homo sapien
ggatatgaagctcaaattgcacatc

SEQ ID NO: 4807126 - DNA, 25 bp, Homo sapien
taagctgttacaacgacttctcaat

SEQ ID NO: 4807127 - DNA, 25 bp, Homo sapien
cacatggaaaggtggctctttccgc

SEQ ID NO: 4807128 - DNA, 25 bp, Homo sapien
cactctgcctgagatcgctctgtct

SEQ ID NO: 4807129 - DNA, 25 bp, Homo sapien
gctactgtccttaaacttgtcagcc

SEQ ID NO: 4807130 - DNA, 25 bp, Homo sapien
cctgctctgcggtaactgatatggg

SEQ ID NO: 4807131 - DNA, 25 bp, Homo sapien
ggtggatctggttgctgttcccact

SEQ ID NO: 4807132 - DNA, 25 bp, Homo sapien
tgacaaagatacaggcttgccgccc

SEQ ID NO: 4807133 - DNA, 25 bp, Homo sapien
cttgctttgacagccgccttcgcag

SEQ ID NO: 4807134 - DNA, 25 bp, Homo sapien
cagacagtctgctttccgggaggct

SEQ ID NO: 4807135 - DNA, 25 bp, Homo sapien
acagcccagcctgctaatgagtagc

SEQ ID NO: 4807136 - DNA, 25 bp, Homo sapien
aatccagactcggatgaagccctgg

SEQ ID NO: 4807137 - DNA, 25 bp, Homo sapien
tctgtccaggtacatagagctccat

SEQ ID NO: 4807138 - DNA, 25 bp, Homo sapien
tgttcatcttcatacgattctgcat

SEQ ID NO: 4807139 - DNA, 25 bp, Homo sapien
ctctcagttgttgaagcacaatgat

SEQ ID NO: 4807140 - DNA, 25 bp, Homo sapien
tctcagttgttgaagcacaatgatt

SEQ ID NO: 4807141 - DNA, 25 bp, Homo sapien
tcatgcacaagcgtacagacgtgtg

SEQ ID NO: 4807142 - DNA, 25 bp, Homo sapien
tgtggagtcatcactacagacaccc

SEQ ID NO: 4807143 - DNA, 25 bp, Homo sapien
cgtacagacgtgtggagtcatcact

SEQ ID NO: 4807144 - DNA, 25 bp, Homo sapien
acagccgtgcaccagttcacacgca

SEQ ID NO: 4807145 - DNA, 25 bp, Homo sapien
gaggagttgcattctgcagatagta

SEQ ID NO: 4807146 - DNA, 25 bp, Homo sapien
aaactggaccagacagaacggcaga

SEQ ID NO: 4807147 - DNA, 25 bp, Homo sapien
cattctgcagatagtaattgtccat

SEQ ID NO: 4807148 - DNA, 25 bp, Homo sapien
ctgggattgagaggatccagaggaa

SEQ ID NO: 4807149 - DNA, 25 bp, Homo sapien
tgggacagcataaggtttcatggca

SEQ ID NO: 4807150 - DNA, 25 bp, Homo sapien
tgagaaatttgctcccagggaaatt

SEQ ID NO: 4807151 - DNA, 25 bp, Homo sapien
tttcatggcaggatgtgccagggaa

SEQ ID NO: 4807152 - DNA, 25 bp, Homo sapien
tgagcccacgaagagatcccatata

SEQ ID NO: 4807153 - DNA, 25 bp, Homo sapien
tcaggagacgcccagatacggccaa

SEQ ID NO: 4807154 - DNA, 25 bp, Homo sapien
tgccgactccacatcaggagacgcc

SEQ ID NO: 4807155 - DNA, 25 bp, Homo sapien
cacatcaggagacgcccagatacgg

SEQ ID NO: 4807156 - DNA, 25 bp, Homo sapien
agacgcccagatacggccaactgca

SEQ ID NO: 4807157 - DNA, 25 bp, Homo sapien
ctgctccgtgatgcacggggcatgg

SEQ ID NO: 4807158 - DNA, 25 bp, Homo sapien
gggcatggggacagagtggccactg

SEQ ID NO: 4807159 - DNA, 25 bp, Homo sapien
tggggacagagtggccactggggac

SEQ ID NO: 4807160 - DNA, 25 bp, Homo sapien
tgctccgtgatgcacggggcatggg

SEQ ID NO: 4807161 - DNA, 25 bp, Homo sapien
tcgcaggtcccacagagtgtgagca

SEQ ID NO: 4807162 - DNA, 25 bp, Homo sapien
tcaaggcaatgtgtccaggacccat

SEQ ID NO: 4807163 - DNA, 25 bp, Homo sapien
aggagcccggtcgtgtcaaggcaat

SEQ ID NO: 4807164 - DNA, 25 bp, Homo sapien
tgagcaagagagctccgctgggtcc

SEQ ID NO: 4807165 - DNA, 25 bp, Homo sapien
gccgctgttctaggctgcctcccat

SEQ ID NO: 4807166 - DNA, 25 bp, Homo sapien
gatgtgccgctgttctaggctgcct

SEQ ID NO: 4807167 - DNA, 25 bp, Homo sapien
aggatgtgccgctgttctaggctgc

SEQ ID NO: 4807168 - DNA, 25 bp, Homo sapien
tgtgccgctgttctaggctgcctcc

SEQ ID NO: 4807169 - DNA, 25 bp, Homo sapien
catgcagcctgccccatcggcagac

SEQ ID NO: 4807170 - DNA, 25 bp, Homo sapien
tcatgcagcctgccccatcggcaga

SEQ ID NO: 4807171 - DNA, 25 bp, Homo sapien
gtcaaaggcaaatgagggacttcca

SEQ ID NO: 4807172 - DNA, 25 bp, Homo sapien
ctgtctggatgccagccgggaagcc

SEQ ID NO: 4807173 - DNA, 25 bp, Homo sapien
tgtctggatgccagccgggaagccc

SEQ ID NO: 4807174 - DNA, 25 bp, Homo sapien
cgggtcaaaggcaaatgagggactt

SEQ ID NO: 4807175 - DNA, 25 bp, Homo sapien
gagcagaaagcgtctgcggaggaga

SEQ ID NO: 4807176 - DNA, 25 bp, Homo sapien
agcagaaagcgtctgcggaggagac

SEQ ID NO: 4807177 - DNA, 25 bp, Homo sapien
agagcagaaagcgtctgcggaggag

SEQ ID NO: 4807178 - DNA, 25 bp, Homo sapien
cagagcagaaagcgtctgcggagga

SEQ ID NO: 4807179 - DNA, 25 bp, Homo sapien
tttcagctcatttagctttgtgtcc

SEQ ID NO: 4807180 - DNA, 25 bp, Homo sapien
cagctcatttagctttgtgtccaca

SEQ ID NO: 4807181 - DNA, 25 bp, Homo sapien
gttttcagctcatttagctttgtgt

SEQ ID NO: 4807182 - DNA, 25 bp, Homo sapien
ttgtgtccacatacattcttgtcat

SEQ ID NO: 4807183 - DNA, 25 bp, Homo sapien
agtcttgtggataaggattaaatcc

SEQ ID NO: 4807184 - DNA, 25 bp, Homo sapien
gattaaatccttcaggatttagacc

SEQ ID NO: 4807185 - DNA, 25 bp, Homo sapien
ggatttagacctctcatagaattca

SEQ ID NO: 4807186 - DNA, 25 bp, Homo sapien
atgagtcttgtggataaggattaaa

SEQ ID NO: 4807187 - DNA, 25 bp, Homo sapien
tgtccagtactttctggtactccca

SEQ ID NO: 4807188 - DNA, 25 bp, Homo sapien
tccagtactttctggtactcccagg

SEQ ID NO: 4807189 - DNA, 25 bp, Homo sapien
gtccagtactttctggtactcccag

SEQ ID NO: 4807190 - DNA, 25 bp, Homo sapien
ccagtactttctggtactcccagga

SEQ ID NO: 4807191 - DNA, 25 bp, Homo sapien
ttctggaacttcagtgatgaactgg

SEQ ID NO: 4807192 - DNA, 25 bp, Homo sapien
tcagtgatgaactggacgtgggctc

SEQ ID NO: 4807193 - DNA, 25 bp, Homo sapien
tgctgtcccatagaagctgccgttt

SEQ ID NO: 4807194 - DNA, 25 bp, Homo sapien
ggctctatctaatgacacagcctcc

SEQ ID NO: 4807195 - DNA, 25 bp, Homo sapien
taggcccaatgtgtcagctaggaac

SEQ ID NO: 4807196 - DNA, 25 bp, Homo sapien
taatcaccagggtccttctaagagg

SEQ ID NO: 4807197 - DNA, 25 bp, Homo sapien
gaatgtgcagacttagccaccctaa

SEQ ID NO: 4807198 - DNA, 25 bp, Homo sapien
tctggagggagcgtgactatgcacc

SEQ ID NO: 4807199 - DNA, 25 bp, Homo sapien
tctggaaagtcagccccaaacgttg

SEQ ID NO: 4807200 - DNA, 25 bp, Homo sapien
ggtcaatcttgggtaattctggaaa

SEQ ID NO: 4807201 - DNA, 25 bp, Homo sapien
tcatttgccatggagcccccattga

SEQ ID NO: 4807202 - DNA, 25 bp, Homo sapien
cattgatccgcacctggtcttcaac

SEQ ID NO: 4807203 - DNA, 25 bp, Homo sapien
caaaacactggtttatactgctagt

SEQ ID NO: 4807204 - DNA, 25 bp, Homo sapien
cttcaaaacactggtttatactgct

SEQ ID NO: 4807205 - DNA, 25 bp, Homo sapien
acagccactttacatgcgttcactg

SEQ ID NO: 4807206 - DNA, 25 bp, Homo sapien
tttacatgcgttcactgatatcttc

SEQ ID NO: 4807207 - DNA, 25 bp, Homo sapien
agctgagcccgtccctgggatccct

SEQ ID NO: 4807208 - DNA, 25 bp, Homo sapien
agtagctgagcccgtccctgggatc

SEQ ID NO: 4807209 - DNA, 25 bp, Homo sapien
ctgagtagctgagcccgtccctggg

SEQ ID NO: 4807210 - DNA, 25 bp, Homo sapien
tgagcccgtccctgggatcccttcc

SEQ ID NO: 4807211 - DNA, 25 bp, Homo sapien
cgtggcgtaccagatggtggcattc

SEQ ID NO: 4807212 - DNA, 25 bp, Homo sapien
aatcggcgtgcacaactggcagaca

SEQ ID NO: 4807213 - DNA, 25 bp, Homo sapien
tatgatgtccacgtggcgtaccaga

SEQ ID NO: 4807214 - DNA, 25 bp, Homo sapien
atagtaatcggcgtgcacaactggc

SEQ ID NO: 4807215 - DNA, 25 bp, Homo sapien
tctgcccagcagctagaaccgagct

SEQ ID NO: 4807216 - DNA, 25 bp, Homo sapien
ggctaaaggcttttcacagtgagca

SEQ ID NO: 4807217 - DNA, 25 bp, Homo sapien
ggagtctgcttctgaacccgtgcct

SEQ ID NO: 4807218 - DNA, 25 bp, Homo sapien
tacgcactgagctgtcttaagggag

SEQ ID NO: 4807219 - DNA, 25 bp, Homo sapien
tcacctggccggttggctgatgacc

SEQ ID NO: 4807220 - DNA, 25 bp, Homo sapien
taatcacctggccggttggctgatg

SEQ ID NO: 4807221 - DNA, 25 bp, Homo sapien
aatcacctggccggttggctgatga

SEQ ID NO: 4807222 - DNA, 25 bp, Homo sapien
atcacctggccggttggctgatgac

SEQ ID NO: 4807223 - DNA, 25 bp, Homo sapien
tgcagagggagctcgataaagaccc

SEQ ID NO: 4807224 - DNA, 25 bp, Homo sapien
tgccccagatgaatgggctcccatc

SEQ ID NO: 4807225 - DNA, 25 bp, Homo sapien
tcgataaagaccctttatcagcaga

SEQ ID NO: 4807226 - DNA, 25 bp, Homo sapien
gtcccgtgaatgatgcagcccacat

SEQ ID NO: 4807227 - DNA, 25 bp, Homo sapien
ggccagccatcggaccccagctccc

SEQ ID NO: 4807228 - DNA, 25 bp, Homo sapien
gctcccctgtcacgctactcccctg

SEQ ID NO: 4807229 - DNA, 25 bp, Homo sapien
cctgtcacgctactcccctggagct

SEQ ID NO: 4807230 - DNA, 25 bp, Homo sapien
tgtcacgctactcccctggagctga

SEQ ID NO: 4807231 - DNA, 25 bp, Homo sapien
gctgaaacaaatctgtgcgccccaa

SEQ ID NO: 4807232 - DNA, 25 bp, Homo sapien
cagctgaaacaaatctgtgcgcccc

SEQ ID NO: 4807233 - DNA, 25 bp, Homo sapien
aaacaaatctgtgcgccccaaggcc

SEQ ID NO: 4807234 - DNA, 25 bp, Homo sapien
ctgaaacaaatctgtgcgccccaag

SEQ ID NO: 4807235 - DNA, 25 bp, Homo sapien
cacgtgggtgcagaccaacgtgcac

SEQ ID NO: 4807236 - DNA, 25 bp, Homo sapien
gtcaatcgtttgaccggcctggcct

SEQ ID NO: 4807237 - DNA, 25 bp, Homo sapien
ggcacagactgggaacagtcaatcg

SEQ ID NO: 4807238 - DNA, 25 bp, Homo sapien
tctctggtcacgtgggtgcagacca

SEQ ID NO: 4807239 - DNA, 25 bp, Homo sapien
cttcctggatgggtcgactgcagcc

SEQ ID NO: 4807240 - DNA, 25 bp, Homo sapien
gcggcccggagccatttgtccatat

SEQ ID NO: 4807241 - DNA, 25 bp, Homo sapien
ctttgagtgatggcccctgccatgg

SEQ ID NO: 4807242 - DNA, 25 bp, Homo sapien
aaatatgtaattcagggcaagcggc

SEQ ID NO: 4807243 - DNA, 25 bp, Homo sapien
gagggagaacggctggcgttggaga

SEQ ID NO: 4807244 - DNA, 25 bp, Homo sapien
ttgtctgcctcagccgggggccgcc

SEQ ID NO: 4807245 - DNA, 25 bp, Homo sapien
gggagaacggctggcgttggagatg

SEQ ID NO: 4807246 - DNA, 25 bp, Homo sapien
cgttggagatgctctgcgcgcagct

SEQ ID NO: 4807247 - DNA, 25 bp, Homo sapien
tgggaaacagaggtgatttgaattc

SEQ ID NO: 4807248 - DNA, 25 bp, Homo sapien
aacagaggtgatttgaattcttgac

SEQ ID NO: 4807249 - DNA, 25 bp, Homo sapien
gaaacagaggtgatttgaattcttg

SEQ ID NO: 4807250 - DNA, 25 bp, Homo sapien
ctgagaagagtgggaaacagaggtg

SEQ ID NO: 4807251 - DNA, 25 bp, Homo sapien
cagaataatgatcttgagattcatt

SEQ ID NO: 4807252 - DNA, 25 bp, Homo sapien
aatggcctaatacaagccatcactc

SEQ ID NO: 4807253 - DNA, 25 bp, Homo sapien
tccctgagactagcaatgcaagaat

SEQ ID NO: 4807254 - DNA, 25 bp, Homo sapien
tcatattgttgagtgtgtccttgtt

SEQ ID NO: 4807255 - DNA, 25 bp, Homo sapien
ccagctggataaggtcctcacaagt

SEQ ID NO: 4807256 - DNA, 25 bp, Homo sapien
ggataaggtcctcacaagtcttgac

SEQ ID NO: 4807257 - DNA, 25 bp, Homo sapien
cacaagtcttgacgcgggtagtttc

SEQ ID NO: 4807258 - DNA, 25 bp, Homo sapien
ggtagtttcttctaagcagtctctg

SEQ ID NO: 4807259 - DNA, 25 bp, Homo sapien
ccgcaaggcaacctctaggctgctg

SEQ ID NO: 4807260 - DNA, 25 bp, Homo sapien
tacttcagccactgatgcgtcactg

SEQ ID NO: 4807261 - DNA, 25 bp, Homo sapien
aggtccagggccgtgtcatagcttg

SEQ ID NO: 4807262 - DNA, 25 bp, Homo sapien
cagtgccgtggtagaccaggtatcc

SEQ ID NO: 4807263 - DNA, 25 bp, Homo sapien
ggttattaggcacctttatgtgact

SEQ ID NO: 4807264 - DNA, 25 bp, Homo sapien
tgacactgtgacttcagccgcatag

SEQ ID NO: 4807265 - DNA, 25 bp, Homo sapien
ggtagaccctgccttgagtcagtgg

SEQ ID NO: 4807266 - DNA, 25 bp, Homo sapien
agatcattagctctcctgacttggg

SEQ ID NO: 4807267 - DNA, 25 bp, Homo sapien
gagttctccagtggagcgggattta

SEQ ID NO: 4807268 - DNA, 25 bp, Homo sapien
gagcgggatttaatgctggccagca

SEQ ID NO: 4807269 - DNA, 25 bp, Homo sapien
gtagtgcggcagtgagagttctcca

SEQ ID NO: 4807270 - DNA, 25 bp, Homo sapien
caacagatcacagggtagtgcggca

SEQ ID NO: 4807271 - DNA, 25 bp, Homo sapien
tcagcgcctgggttgttacggtctt

SEQ ID NO: 4807272 - DNA, 25 bp, Homo sapien
agatctggatcaaactgccaccccg

SEQ ID NO: 4807273 - DNA, 25 bp, Homo sapien
gtagagtcccttgggcccgctgtaa

SEQ ID NO: 4807274 - DNA, 25 bp, Homo sapien
ggctgctgatgtctagaaacttcca

SEQ ID NO: 4807275 - DNA, 25 bp, Homo sapien
tatcacggcatagtaatgacaatga

SEQ ID NO: 4807276 - DNA, 25 bp, Homo sapien
tacagtttgcaaaactatcacggca

SEQ ID NO: 4807277 - DNA, 25 bp, Homo sapien
gatttcccggaactgatattagact

SEQ ID NO: 4807278 - DNA, 25 bp, Homo sapien
accgaatgacaattaacagattgca

SEQ ID NO: 4807279 - DNA, 25 bp, Homo sapien
atgttcttgttgtgtgtcgagtttc

SEQ ID NO: 4807280 - DNA, 25 bp, Homo sapien
gccctggacctgcatgaggttgtgc

SEQ ID NO: 4807281 - DNA, 25 bp, Homo sapien
tgtcgagtttcttgtgggtgtggac

SEQ ID NO: 4807282 - DNA, 25 bp, Homo sapien
ctggacctgcatgaggttgtgcagc

SEQ ID NO: 4807283 - DNA, 25 bp, Homo sapien
aggaacaagaatgccagagcaggaa

SEQ ID NO: 4807284 - DNA, 25 bp, Homo sapien
gaaagccaaagagcggaaggtgcca

SEQ ID NO: 4807285 - DNA, 25 bp, Homo sapien
tccaatcatagtggaggcaaatcca

SEQ ID NO: 4807286 - DNA, 25 bp, Homo sapien
gaacaggctcatcacatggccagag

SEQ ID NO: 4807287 - DNA, 25 bp, Homo sapien
ttttcggacctacactacgagactc

SEQ ID NO: 4807288 - DNA, 25 bp, Homo sapien
tggcccacgatcacaactttttgag

SEQ ID NO: 4807289 - DNA, 25 bp, Homo sapien
gctccgtttaaatagtcagatcacg

SEQ ID NO: 4807290 - DNA, 25 bp, Homo sapien
tcttcatgggtctctagtgaactcc

SEQ ID NO: 4807291 - DNA, 25 bp, Homo sapien
ctgtctgtctagcaggcaagagaag

SEQ ID NO: 4807292 - DNA, 25 bp, Homo sapien
ctgttcgggacttttgtcccatctc

SEQ ID NO: 4807293 - DNA, 25 bp, Homo sapien
atctcttccgtcagctcacagcagg

SEQ ID NO: 4807294 - DNA, 25 bp, Homo sapien
aagtgttgcctgttcgggacttttg

SEQ ID NO: 4807295 - DNA, 25 bp, Homo sapien
tgcctgttcgggacttttgtcccat

SEQ ID NO: 4807296 - DNA, 25 bp, Homo sapien
ccttcaggaccatgcgggccctggg

SEQ ID NO: 4807297 - DNA, 25 bp, Homo sapien
ggaaacccctgctggcttcgcggag

SEQ ID NO: 4807298 - DNA, 25 bp, Homo sapien
gaaacccctgctggcttcgcggagg

SEQ ID NO: 4807299 - DNA, 25 bp, Homo sapien
ccgcccttcaggaccatgcgggccc

SEQ ID NO: 4807300 - DNA, 25 bp, Homo sapien
caaaccttgcctgcgtgttctgctg

SEQ ID NO: 4807301 - DNA, 25 bp, Homo sapien
tgaagcaggccagccacggtcagtc

SEQ ID NO: 4807302 - DNA, 25 bp, Homo sapien
tagctgcagcgagaaagagcaaacc

SEQ ID NO: 4807303 - DNA, 25 bp, Homo sapien
cctccggggagagcttgggcacctc

SEQ ID NO: 4807304 - DNA, 25 bp, Homo sapien
cttcatgaggtcagggtaccgtcca

SEQ ID NO: 4807305 - DNA, 25 bp, Homo sapien
catgaggtcagggtaccgtccactg

SEQ ID NO: 4807306 - DNA, 25 bp, Homo sapien
tcatgaggtcagggtaccgtccact

SEQ ID NO: 4807307 - DNA, 25 bp, Homo sapien
ttcatgaggtcagggtaccgtccac

SEQ ID NO: 4807308 - DNA, 25 bp, Homo sapien
cactgtcccgctgctctgttgctgg

SEQ ID NO: 4807309 - DNA, 25 bp, Homo sapien
acagagaagggcgtgagtcggcaca

SEQ ID NO: 4807310 - DNA, 25 bp, Homo sapien
gtcaccatcgttaccgttctccttg

SEQ ID NO: 4807311 - DNA, 25 bp, Homo sapien
acagccaccaccgtcaccatcgtta

SEQ ID NO: 4807312 - DNA, 25 bp, Homo sapien
gggatgtttctgaatcgaagccgaa

SEQ ID NO: 4807313 - DNA, 25 bp, Homo sapien
cacagttgccaccattcggcttcag

SEQ ID NO: 4807314 - DNA, 25 bp, Homo sapien
gaatcgaagccgaagcacagttgcc

SEQ ID NO: 4807315 - DNA, 25 bp, Homo sapien
ctccaacaaaccgtgtgaccctgtg

SEQ ID NO: 4807316 - DNA, 25 bp, Homo sapien
tcatgttaaagtgttagccatctat

SEQ ID NO: 4807317 - DNA, 25 bp, Homo sapien
caagcatattaatacggtggattgt

SEQ ID NO: 4807318 - DNA, 25 bp, Homo sapien
gttaaagtgttagccatctatttct

SEQ ID NO: 4807319 - DNA, 25 bp, Homo sapien
ctccccaagcatattaatacggtgg

SEQ ID NO: 4807320 - DNA, 25 bp, Homo sapien
gggcccagccatgccctccccgtga

SEQ ID NO: 4807321 - DNA, 25 bp, Homo sapien
ggcgcaatctgtgcgccctcgcggg

SEQ ID NO: 4807322 - DNA, 25 bp, Homo sapien
gcggggaccggcgtggtgcaggcag

SEQ ID NO: 4807323 - DNA, 25 bp, Homo sapien
ggtgggtggcgcttttctccagcca

SEQ ID NO: 4807324 - DNA, 25 bp, Homo sapien
catgaaaactgtcccgctgggtggg

SEQ ID NO: 4807325 - DNA, 25 bp, Homo sapien
tgggtgggaggccatgacagtcagc

SEQ ID NO: 4807326 - DNA, 25 bp, Homo sapien
ggcggcaccgtggttttacacactg

SEQ ID NO: 4807327 - DNA, 25 bp, Homo sapien
agcaggggcatgaaaactgtcccgc

SEQ ID NO: 4807328 - DNA, 25 bp, Homo sapien
gggacctgacatctttgggtcccca

SEQ ID NO: 4807329 - DNA, 25 bp, Homo sapien
gctgcactacctgcgtccgtggaag

SEQ ID NO: 4807330 - DNA, 25 bp, Homo sapien
tccgtggaagcctctgcctcagcgg

SEQ ID NO: 4807331 - DNA, 25 bp, Homo sapien
tgtggaggcttgatgctgcggttgg

SEQ ID NO: 4807332 - DNA, 25 bp, Homo sapien
tatgtctgccgtggctcctcgggtg

SEQ ID NO: 4807333 - DNA, 25 bp, Homo sapien
tggctgccgatgctccgttcacata

SEQ ID NO: 4807334 - DNA, 25 bp, Homo sapien
atttctgtggataagggaagcggcc

SEQ ID NO: 4807335 - DNA, 25 bp, Homo sapien
caggaccttgtcatgggactgatgc

SEQ ID NO: 4807336 - DNA, 25 bp, Homo sapien
cagttgctggatggatagggacacc

SEQ ID NO: 4807337 - DNA, 25 bp, Homo sapien
caaggacgcagaataagcagtgagg

SEQ ID NO: 4807338 - DNA, 25 bp, Homo sapien
gaggacaaactgcatggactcaagc

SEQ ID NO: 4807339 - DNA, 25 bp, Homo sapien
ggactcaagcgagctggagccatct

SEQ ID NO: 4807340 - DNA, 25 bp, Homo sapien
gggttgccaccagagacggctttgt

SEQ ID NO: 4807341 - DNA, 25 bp, Homo sapien
cagcggctgagctcatgaacttggt

SEQ ID NO: 4807342 - DNA, 25 bp, Homo sapien
tagggatgacgtccccgctgcatat

SEQ ID NO: 4807343 - DNA, 25 bp, Homo sapien
cttgtacttggcaagggaagtccac

SEQ ID NO: 4807344 - DNA, 25 bp, Homo sapien
ttgagcaaacccattacatacttgg

SEQ ID NO: 4807345 - DNA, 25 bp, Homo sapien
tgagcaaacccattacatacttggc

SEQ ID NO: 4807346 - DNA, 25 bp, Homo sapien
gccctggccagtatcggtgttcaag

SEQ ID NO: 4807347 - DNA, 25 bp, Homo sapien
gccagtatcggtgttcaagcccact

SEQ ID NO: 4807348 - DNA, 25 bp, Homo sapien
tcagcttgccctggccagtatcggt

SEQ ID NO: 4807349 - DNA, 25 bp, Homo sapien
agcctctccgtcagcttgccctggc

SEQ ID NO: 4807350 - DNA, 25 bp, Homo sapien
cacgctgtcatcatgaagtgaccag

SEQ ID NO: 4807351 - DNA, 25 bp, Homo sapien
tggaaagaacgttctgccgggtaca

SEQ ID NO: 4807352 - DNA, 25 bp, Homo sapien
tctttcggacgggagcatgaagctg

SEQ ID NO: 4807353 - DNA, 25 bp, Homo sapien
ggtacacgggcaggaatatgcaact

SEQ ID NO: 4807354 - DNA, 25 bp, Homo sapien
gtattaatccattaaggcaatcaaa

SEQ ID NO: 4807355 - DNA, 25 bp, Homo sapien
tgtcaatgaacaagcggtaaaactt

SEQ ID NO: 4807356 - DNA, 25 bp, Homo sapien
tgatttcaaagccatattgcccacg

SEQ ID NO: 4807357 - DNA, 25 bp, Homo sapien
gctgatggtactcgggtattaatcc

SEQ ID NO: 4807358 - DNA, 25 bp, Homo sapien
cacagaaggtgaaggcgcggtgcgt

SEQ ID NO: 4807359 - DNA, 25 bp, Homo sapien
ggaggccctttgtggacaggtgcat

SEQ ID NO: 4807360 - DNA, 25 bp, Homo sapien
tgaaggcgcggtgcgtggaggccct

SEQ ID NO: 4807361 - DNA, 25 bp, Homo sapien
tgcgggcgtcccgaggggcaggctg

SEQ ID NO: 4807362 - DNA, 25 bp, Homo sapien
tcttcctccgatccaaaagatctgg

SEQ ID NO: 4807363 - DNA, 25 bp, Homo sapien
tgcccctggcttaatactctcctgt

SEQ ID NO: 4807364 - DNA, 25 bp, Homo sapien
ggtactgaccttgagatgaccctga

SEQ ID NO: 4807365 - DNA, 25 bp, Homo sapien
agtaattctggagcggacattccca

SEQ ID NO: 4807366 - DNA, 25 bp, Homo sapien
acaagatttaaagcccacagggcgg

SEQ ID NO: 4807367 - DNA, 25 bp, Homo sapien
caagatttaaagcccacagggcggg

SEQ ID NO: 4807368 - DNA, 25 bp, Homo sapien
gaacaagatttaaagcccacagggc

SEQ ID NO: 4807369 - DNA, 25 bp, Homo sapien
aacaagatttaaagcccacagggcg

SEQ ID NO: 4807370 - DNA, 25 bp, Homo sapien
caagacatgaagatcgtttgagacc

SEQ ID NO: 4807371 - DNA, 25 bp, Homo sapien
ccaagggcattgtgtatcgagggct

SEQ ID NO: 4807372 - DNA, 25 bp, Homo sapien
cgaatctccgcagtcagatgctgga

SEQ ID NO: 4807373 - DNA, 25 bp, Homo sapien
gattcctgctattggactggcttga

SEQ ID NO: 4807374 - DNA, 25 bp, Homo sapien
gcaagatggctttgtagcagctcct

SEQ ID NO: 4807375 - DNA, 25 bp, Homo sapien
gacacgggcccatgagatagagacc

SEQ ID NO: 4807376 - DNA, 25 bp, Homo sapien
ttcaatccaccaagccacagcattt

SEQ ID NO: 4807377 - DNA, 25 bp, Homo sapien
gatcaaataggatgggcactggccc

SEQ ID NO: 4807378 - DNA, 25 bp, Homo sapien
tggtttcaaatacgatcctgggtct

SEQ ID NO: 4807379 - DNA, 25 bp, Homo sapien
ggagctgtgttctccccaagtcttg

SEQ ID NO: 4807380 - DNA, 25 bp, Homo sapien
catcttgagaatcccacgtggttgc

SEQ ID NO: 4807381 - DNA, 25 bp, Homo sapien
cttttgatgtaatgggctaacgccc

SEQ ID NO: 4807382 - DNA, 25 bp, Homo sapien
ccaagtcttggtagcatggcccctc

SEQ ID NO: 4807383 - DNA, 25 bp, Homo sapien
tatgtatagaggcctggtaggtgct

SEQ ID NO: 4807384 - DNA, 25 bp, Homo sapien
tgtggtgagcacttatgtttcagcc

SEQ ID NO: 4807385 - DNA, 25 bp, Homo sapien
ggtgttgtggtgagcacttatgttt

SEQ ID NO: 4807386 - DNA, 25 bp, Homo sapien
gcacttatgtttcagcctctcgaca

SEQ ID NO: 4807387 - DNA, 25 bp, Homo sapien
ggctctaagggagcaccgtctcctg

SEQ ID NO: 4807388 - DNA, 25 bp, Homo sapien
gccactgcgagacctcagcactggg

SEQ ID NO: 4807389 - DNA, 25 bp, Homo sapien
ttgaccactcctagccactgcgaga

SEQ ID NO: 4807390 - DNA, 25 bp, Homo sapien
cttgtgctggaaagtcatgggtctg

SEQ ID NO: 4807391 - DNA, 25 bp, Homo sapien
gctctgcctcaccagcaaattctgc

SEQ ID NO: 4807392 - DNA, 25 bp, Homo sapien
tctgcctcaccagcaaattctgcca

SEQ ID NO: 4807393 - DNA, 25 bp, Homo sapien
ctgcctcaccagcaaattctgccac

SEQ ID NO: 4807394 - DNA, 25 bp, Homo sapien
cagctctgcctcaccagcaaattct

SEQ ID NO: 4807395 - DNA, 25 bp, Homo sapien
tctcccatcaggctggaaaacccca

SEQ ID NO: 4807396 - DNA, 25 bp, Homo sapien
gctgtgaggtctcccaccggcacag

SEQ ID NO: 4807397 - DNA, 25 bp, Homo sapien
tgaggtctcccaccggcacagcaag

SEQ ID NO: 4807398 - DNA, 25 bp, Homo sapien
gtcgctgtgaggtctcccaccggca

SEQ ID NO: 4807399 - DNA, 25 bp, Homo sapien
ggtcgctgtgaggtctcccaccggc

SEQ ID NO: 4807400 - DNA, 25 bp, Homo sapien
tgggtgttcccgctccacttccgga

SEQ ID NO: 4807401 - DNA, 25 bp, Homo sapien
tccgggcagagtggaatagagacac

SEQ ID NO: 4807402 - DNA, 25 bp, Homo sapien
gtgtggttctcccaggaccctagac

SEQ ID NO: 4807403 - DNA, 25 bp, Homo sapien
tctggccgcctgtcaaggatctgag

SEQ ID NO: 4807404 - DNA, 25 bp, Homo sapien
gcttcttcgcttcttcggcaaggga

SEQ ID NO: 4807405 - DNA, 25 bp, Homo sapien
agaatctgcgggtcacggatcacac

SEQ ID NO: 4807406 - DNA, 25 bp, Homo sapien
gaatccgaggctgtttctgccgctg

SEQ ID NO: 4807407 - DNA, 25 bp, Homo sapien
aaatctgagcgggagagcatcccga

SEQ ID NO: 4807408 - DNA, 25 bp, Homo sapien
ggcctgtgacgagagagtattacca

SEQ ID NO: 4807409 - DNA, 25 bp, Homo sapien
tgagaccaggccttcgagtggtccg

SEQ ID NO: 4807410 - DNA, 25 bp, Homo sapien
actggacgccaacccgagttagaga

SEQ ID NO: 4807411 - DNA, 25 bp, Homo sapien
ctatatccgccttggtggcgtggga

SEQ ID NO: 4807412 - DNA, 25 bp, Homo sapien
tggaaggttgcagggacacacatac

SEQ ID NO: 4807413 - DNA, 25 bp, Homo sapien
cccggagataagcacagatacgcaa

SEQ ID NO: 4807414 - DNA, 25 bp, Homo sapien
acataccgtgtgtgcagagccaagg

SEQ ID NO: 4807415 - DNA, 25 bp, Homo sapien
tgagacacgcacaaagacttaggcc

SEQ ID NO: 4807416 - DNA, 25 bp, Homo sapien
ggtagggcgggagcctctaatcctc

SEQ ID NO: 4807417 - DNA, 25 bp, Homo sapien
ggcgcagggggccacttctgaccaa

SEQ ID NO: 4807418 - DNA, 25 bp, Homo sapien
cgacacacacgcaggtagggtaggg

SEQ ID NO: 4807419 - DNA, 25 bp, Homo sapien
caggttccaaatccgatccgccctt

SEQ ID NO: 4807420 - DNA, 25 bp, Homo sapien
cagctttcgcgtcccgttgccgagg

SEQ ID NO: 4807421 - DNA, 25 bp, Homo sapien
gagcactgtccttgatccgcgcgtc

SEQ ID NO: 4807422 - DNA, 25 bp, Homo sapien
ctggcgcggaagtcggcagctccat

SEQ ID NO: 4807423 - DNA, 25 bp, Homo sapien
ttgccgaggtccactttgcccaggc

SEQ ID NO: 4807424 - DNA, 25 bp, Homo sapien
tcctcgtagcgctggagctttacaa

SEQ ID NO: 4807425 - DNA, 25 bp, Homo sapien
cagagggatttgtttcgaagacgat

SEQ ID NO: 4807426 - DNA, 25 bp, Homo sapien
tcaatttttcaagggggtggagcag

SEQ ID NO: 4807427 - DNA, 25 bp, Homo sapien
ctgccgtccgcgcagtctggcctcg

SEQ ID NO: 4807428 - DNA, 25 bp, Homo sapien
cagcttcttcagtgcagtccggtgt

SEQ ID NO: 4807429 - DNA, 25 bp, Homo sapien
ttggcacagggcgaatctcaggtcc

SEQ ID NO: 4807430 - DNA, 25 bp, Homo sapien
ttgccttagagatgagcggctcacc

SEQ ID NO: 4807431 - DNA, 25 bp, Homo sapien
tcaggcacagaatggtaaagtcacg

SEQ ID NO: 4807432 - DNA, 25 bp, Homo sapien
tattgtcgagtctgtgcgtcagcgg

SEQ ID NO: 4807433 - DNA, 25 bp, Homo sapien
cctcttgtacatccttggcgggcag

SEQ ID NO: 4807434 - DNA, 25 bp, Homo sapien
gagttgcagggctccgtccttaaaa

SEQ ID NO: 4807435 - DNA, 25 bp, Homo sapien
gccaagttgtcttacgcaccacggg

SEQ ID NO: 4807436 - DNA, 25 bp, Homo sapien
caggagcagcgccttactgaacagg

SEQ ID NO: 4807437 - DNA, 25 bp, Homo sapien
tactgagacacgtaggtcccatttt

SEQ ID NO: 4807438 - DNA, 25 bp, Homo sapien
ccttactgaacagggaggcagcctg

SEQ ID NO: 4807439 - DNA, 25 bp, Homo sapien
gtcagtgtagatgtgaacttgcagg

SEQ ID NO: 4807440 - DNA, 25 bp, Homo sapien
tctcggcggttcgtgcagcatgttc

SEQ ID NO: 4807441 - DNA, 25 bp, Homo sapien
gacaccatgcataggctcctgggct

SEQ ID NO: 4807442 - DNA, 25 bp, Homo sapien
caccagcggcggttgatgaatttcg

SEQ ID NO: 4807443 - DNA, 25 bp, Homo sapien
tagcccggatttgggaaccgcgcgc

SEQ ID NO: 4807444 - DNA, 25 bp, Homo sapien
caaaggctccagtcagtggaaccgg

SEQ ID NO: 4807445 - DNA, 25 bp, Homo sapien
cctggcctcctattagaactcgtag

SEQ ID NO: 4807446 - DNA, 25 bp, Homo sapien
gttttgctcccctcatggacatggg

SEQ ID NO: 4807447 - DNA, 25 bp, Homo sapien
gaatttgtctctgatgtcccggctc

SEQ ID NO: 4807448 - DNA, 25 bp, Homo sapien
ccagctctggttctagtcggcaggc

SEQ ID NO: 4807449 - DNA, 25 bp, Homo sapien
cattattagctgtgctcttcggagc

SEQ ID NO: 4807450 - DNA, 25 bp, Homo sapien
gagtgattgccaggcccgcttggca

SEQ ID NO: 4807451 - DNA, 25 bp, Homo sapien
gcggctcggagctcccattattagc

SEQ ID NO: 4807452 - DNA, 25 bp, Homo sapien
gagacagccagtgcttagcagtctg

SEQ ID NO: 4807453 - DNA, 25 bp, Homo sapien
ggtgggcccgcgctggtctctccgg

SEQ ID NO: 4807454 - DNA, 25 bp, Homo sapien
tctgctgaagtcgtttcccaggctg

SEQ ID NO: 4807455 - DNA, 25 bp, Homo sapien
ccccaccggggggtatctgctgaag

SEQ ID NO: 4807456 - DNA, 25 bp, Homo sapien
gggtatctgctgaagtcgtttccca

SEQ ID NO: 4807457 - DNA, 25 bp, Homo sapien
acttgatccctggcagacccgttca

SEQ ID NO: 4807458 - DNA, 25 bp, Homo sapien
tgatccctggcagacccgttcactg

SEQ ID NO: 4807459 - DNA, 25 bp, Homo sapien
tgcacttgatccctggcagacccgt

SEQ ID NO: 4807460 - DNA, 25 bp, Homo sapien
ttgatccctggcagacccgttcact

SEQ ID NO: 4807461 - DNA, 25 bp, Homo sapien
ttttttcagcacgttgtgaaattca

SEQ ID NO: 4807462 - DNA, 25 bp, Homo sapien
tcccagtaatgacttcctcactgaa

SEQ ID NO: 4807463 - DNA, 25 bp, Homo sapien
gtgaaattcataactcccagtaatg

SEQ ID NO: 4807464 - DNA, 25 bp, Homo sapien
gcacgttgtgaaattcataactccc

SEQ ID NO: 4807465 - DNA, 25 bp, Homo sapien
tataggcgcattaaggaggcttcga

SEQ ID NO: 4807466 - DNA, 25 bp, Homo sapien
taatagccgggaacattagtgaacc

SEQ ID NO: 4807467 - DNA, 25 bp, Homo sapien
acccagggaatgagttataggcgca

SEQ ID NO: 4807468 - DNA, 25 bp, Homo sapien
aaaaatgaaccgtggcaggcgtgga

SEQ ID NO: 4807469 - DNA, 25 bp, Homo sapien
catcccatggtcttcgtgtgtgcag

SEQ ID NO: 4807470 - DNA, 25 bp, Homo sapien
acgtggctaccgctaatgctacgtg

SEQ ID NO: 4807471 - DNA, 25 bp, Homo sapien
gtgtgtgtgtccacacgggaacgtg

SEQ ID NO: 4807472 - DNA, 25 bp, Homo sapien
tgctacgtgaatgtgcatcccatgg

SEQ ID NO: 4807473 - DNA, 25 bp, Homo sapien
tgggcactgcttggcgtccacatga

SEQ ID NO: 4807474 - DNA, 25 bp, Homo sapien
tgtgtggatgggcacagagtacatc

SEQ ID NO: 4807475 - DNA, 25 bp, Homo sapien
acagagtacatctgccctcggcaca

SEQ ID NO: 4807476 - DNA, 25 bp, Homo sapien
cactgcttggcgtccacatgatggg

SEQ ID NO: 4807477 - DNA, 25 bp, Homo sapien
catggatgctgaggtgtagccccag

SEQ ID NO: 4807478 - DNA, 25 bp, Homo sapien
tagccccagcgggtgttgatggaga

SEQ ID NO: 4807479 - DNA, 25 bp, Homo sapien
ggccaaggcacgggccagatcaggg

SEQ ID NO: 4807480 - DNA, 25 bp, Homo sapien
cacagttcacttgtgggcacagcag

SEQ ID NO: 4807481 - DNA, 25 bp, Homo sapien
gtcctggctgccctagaccacccct

SEQ ID NO: 4807482 - DNA, 25 bp, Homo sapien
tggtggcccccttcgatgagggcat

SEQ ID NO: 4807483 - DNA, 25 bp, Homo sapien
ttcgatgagggcatctgagggtcct

SEQ ID NO: 4807484 - DNA, 25 bp, Homo sapien
ccgatgtggtggcccccttcgatga

SEQ ID NO: 4807485 - DNA, 25 bp, Homo sapien
tgcggggcccgagttgagcaggcac

SEQ ID NO: 4807486 - DNA, 25 bp, Homo sapien
gctgcggggcccgagttgagcaggc

SEQ ID NO: 4807487 - DNA, 25 bp, Homo sapien
gggcccgagttgagcaggcacctga

SEQ ID NO: 4807488 - DNA, 25 bp, Homo sapien
gcccgagttgagcaggcacctgaga

SEQ ID NO: 4807489 - DNA, 25 bp, Homo sapien
acagccccaacaaggccagcgtggg

SEQ ID NO: 4807490 - DNA, 25 bp, Homo sapien
acccagcaggcagcatgtgcggaga

SEQ ID NO: 4807491 - DNA, 25 bp, Homo sapien
ccgagggctacaccattgtctccag

SEQ ID NO: 4807492 - DNA, 25 bp, Homo sapien
tgtctccagggtgaatgcaaacgct

SEQ ID NO: 4807493 - DNA, 25 bp, Homo sapien
aggaagtgcccatcgaatccagcct

SEQ ID NO: 4807494 - DNA, 25 bp, Homo sapien
cagcctggaaggatgaaaagcattc

SEQ ID NO: 4807495 - DNA, 25 bp, Homo sapien
ctccctgaaggaagtgcccatcgaa

SEQ ID NO: 4807496 - DNA, 25 bp, Homo sapien
atccagcctggaaggatgaaaagca

SEQ ID NO: 4807497 - DNA, 25 bp, Homo sapien
tgtacgctgataacacactgggtag

SEQ ID NO: 4807498 - DNA, 25 bp, Homo sapien
gtgctttacgtacgcatgttctatg

SEQ ID NO: 4807499 - DNA, 25 bp, Homo sapien
cctgttgcgtgtaagtggagagact

SEQ ID NO: 4807500 - DNA, 25 bp, Homo sapien
cactgggtagtcagggctgccctgt

SEQ ID NO: 4807501 - DNA, 25 bp, Homo sapien
gtatgtggccagtatgtgtgcatat

SEQ ID NO: 4807502 - DNA, 25 bp, Homo sapien
catccttggtgcgtatgagcatgca

SEQ ID NO: 4807503 - DNA, 25 bp, Homo sapien
gatttgccggcatattgtgctggca

SEQ ID NO: 4807504 - DNA, 25 bp, Homo sapien
tgtgcatatgggtgcagacgcgctc

SEQ ID NO: 4807505 - DNA, 25 bp, Homo sapien
ctggttcccgtgagtgtaacgtcta

SEQ ID NO: 4807506 - DNA, 25 bp, Homo sapien
cagtgaggcccctgagtgtgaagct

SEQ ID NO: 4807507 - DNA, 25 bp, Homo sapien
tgagcacagggctgaactggttccc

SEQ ID NO: 4807508 - DNA, 25 bp, Homo sapien
tagtaggagcgtctgccagcttcat

SEQ ID NO: 4807509 - DNA, 25 bp, Homo sapien
cactgagcgcttactgtccgacatg

SEQ ID NO: 4807510 - DNA, 25 bp, Homo sapien
cgcccggaatgataaggacgcggca

SEQ ID NO: 4807511 - DNA, 25 bp, Homo sapien
ggcggctccctctctaagtgacagg

SEQ ID NO: 4807512 - DNA, 25 bp, Homo sapien
tcctgtcgcctagctcctgtgaact

SEQ ID NO: 4807513 - DNA, 25 bp, Homo sapien
cgtgtacttctgttccgtgtcccgt

SEQ ID NO: 4807514 - DNA, 25 bp, Homo sapien
tgcatcttccggaccagtagaacca

SEQ ID NO: 4807515 - DNA, 25 bp, Homo sapien
tgggcagtaccagctgcaatcttgc

SEQ ID NO: 4807516 - DNA, 25 bp, Homo sapien
caaatttctgttccgtgtacttctg

SEQ ID NO: 4807517 - DNA, 25 bp, Homo sapien
tttaggcagtgactcctcagaccct

SEQ ID NO: 4807518 - DNA, 25 bp, Homo sapien
tctaagacaggtggcttgggagtca

SEQ ID NO: 4807519 - DNA, 25 bp, Homo sapien
agttatatctgtggcagctagctgt

SEQ ID NO: 4807520 - DNA, 25 bp, Homo sapien
caaatcctgacttattcgctctgtg

SEQ ID NO: 4807521 - DNA, 25 bp, Homo sapien
gcttagcatcttgttcggccactga

SEQ ID NO: 4807522 - DNA, 25 bp, Homo sapien
cactcaggaagagggtttgactacc

SEQ ID NO: 4807523 - DNA, 25 bp, Homo sapien
cgcgttgctgccatttgattcccat

SEQ ID NO: 4807524 - DNA, 25 bp, Homo sapien
gttaccatggttacaggcaccgcat

SEQ ID NO: 4807525 - DNA, 25 bp, Homo sapien
aagggccgctgtgtcgagtcaaaac

SEQ ID NO: 4807526 - DNA, 25 bp, Homo sapien
taaaaaatcacgcattgaacatggg

SEQ ID NO: 4807527 - DNA, 25 bp, Homo sapien
accgcaattccggtgggtgctggcc

SEQ ID NO: 4807528 - DNA, 25 bp, Homo sapien
ctgattgtgccggatataagatcga

SEQ ID NO: 4807529 - DNA, 25 bp, Homo sapien
aaggcatgaggagagggtcaaccac

SEQ ID NO: 4807530 - DNA, 25 bp, Homo sapien
tcatttgtttgagccaacgtgcgtt

SEQ ID NO: 4807531 - DNA, 25 bp, Homo sapien
tctgttatctacacagcccaacaca

SEQ ID NO: 4807532 - DNA, 25 bp, Homo sapien
tgaccaataatggtaaccaactggg

SEQ ID NO: 4807533 - DNA, 25 bp, Homo sapien
tcgaaacgtgcaacaaaaaacagga

SEQ ID NO: 4807534 - DNA, 25 bp, Homo sapien
agtcgaaacgtgcaacaaaaaacag

SEQ ID NO: 4807535 - DNA, 25 bp, Homo sapien
ctcttcaggaagtcgaaacgtgcaa

SEQ ID NO: 4807536 - DNA, 25 bp, Homo sapien
caggaagtcgaaacgtgcaacaaaa

SEQ ID NO: 4807537 - DNA, 25 bp, Homo sapien
taatctccgccaggcatactgaggt

SEQ ID NO: 4807538 - DNA, 25 bp, Homo sapien
tagagagatcgtttctgtcccacca

SEQ ID NO: 4807539 - DNA, 25 bp, Homo sapien
gagtatactcaactaggctgggtgc

SEQ ID NO: 4807540 - DNA, 25 bp, Homo sapien
tcttctacaaagagggcacttggtc

SEQ ID NO: 4807541 - DNA, 25 bp, Homo sapien
ctgaatctgttgcggcagctgaggc

SEQ ID NO: 4807542 - DNA, 25 bp, Homo sapien
aagcactgtcagtttcggggggcgg

SEQ ID NO: 4807543 - DNA, 25 bp, Homo sapien
cccggaagcactgtcagtttcgggg

SEQ ID NO: 4807544 - DNA, 25 bp, Homo sapien
acaggctgaatctgttgcggcagct

SEQ ID NO: 4807545 - DNA, 25 bp, Homo sapien
caggaccacgggcggcaagggtagg

SEQ ID NO: 4807546 - DNA, 25 bp, Homo sapien
cccttggcaggtactgcgtggccag

SEQ ID NO: 4807547 - DNA, 25 bp, Homo sapien
tgggggagttaagggctcctcagca

SEQ ID NO: 4807548 - DNA, 25 bp, Homo sapien
aggcccattccgtggaccggcatac

SEQ ID NO: 4807549 - DNA, 25 bp, Homo sapien
cagaccgcgataccgaggcctttgg

SEQ ID NO: 4807550 - DNA, 25 bp, Homo sapien
tccagctccgaatcccgcagtcttc

SEQ ID NO: 4807551 - DNA, 25 bp, Homo sapien
tccgccggccacagcgcttagagat

SEQ ID NO: 4807552 - DNA, 25 bp, Homo sapien
atcccgcagtcttctgcccacacgg

SEQ ID NO: 4807553 - DNA, 25 bp, Homo sapien
gctaggtcgctgtcaacctgatatt

SEQ ID NO: 4807554 - DNA, 25 bp, Homo sapien
tgtctctgtcacctgttgtaacctg

SEQ ID NO: 4807555 - DNA, 25 bp, Homo sapien
gaaagactgcgcctggacttagctg

SEQ ID NO: 4807556 - DNA, 25 bp, Homo sapien
gccaccaatgcctgaggcctgacga

SEQ ID NO: 4807557 - DNA, 25 bp, Homo sapien
tgaagagatgttacaccttctaagg

SEQ ID NO: 4807558 - DNA, 25 bp, Homo sapien
gaagagatgttacaccttctaaggc

SEQ ID NO: 4807559 - DNA, 25 bp, Homo sapien
ctgaagagatgttacaccttctaag

SEQ ID NO: 4807560 - DNA, 25 bp, Homo sapien
tctgaagagatgttacaccttctaa

SEQ ID NO: 4807561 - DNA, 25 bp, Homo sapien
ttctgtgtcagttgagatgatacgt

SEQ ID NO: 4807562 - DNA, 25 bp, Homo sapien
tgtcagttgagatgatacgtgtttt

SEQ ID NO: 4807563 - DNA, 25 bp, Homo sapien
tgagatgatacgtgttttatgtgtt

SEQ ID NO: 4807564 - DNA, 25 bp, Homo sapien
taatgtgctgtgttacattgattga

SEQ ID NO: 4807565 - DNA, 25 bp, Homo sapien
aaaatgaagcaccatctcgtgggcc

SEQ ID NO: 4807566 - DNA, 25 bp, Homo sapien
caagagtcagagagatcggcacatg

SEQ ID NO: 4807567 - DNA, 25 bp, Homo sapien
aagagttttccggagagaggtcaga

SEQ ID NO: 4807568 - DNA, 25 bp, Homo sapien
gggaatctaattgggcacagacagg

SEQ ID NO: 4807569 - DNA, 25 bp, Homo sapien
tacggtacaaggctgacatagtgcc

SEQ ID NO: 4807570 - DNA, 25 bp, Homo sapien
ctatggagatgctaagagagtgact

SEQ ID NO: 4807571 - DNA, 25 bp, Homo sapien
gatgccactactgtcacaaggtgtt

SEQ ID NO: 4807572 - DNA, 25 bp, Homo sapien
ccttctgactggttgtgatcgaaac

SEQ ID NO: 4807573 - DNA, 25 bp, Homo sapien
taatgtaatagacattgctggcaat

SEQ ID NO: 4807574 - DNA, 25 bp, Homo sapien
gtaatgtaatagacattgctggcaa

SEQ ID NO: 4807575 - DNA, 25 bp, Homo sapien
ctgtaatgtaatagacattgctggc

SEQ ID NO: 4807576 - DNA, 25 bp, Homo sapien
tgtaatgtaatagacattgctggca

SEQ ID NO: 4807577 - DNA, 25 bp, Homo sapien
cacgttgagttggaggaatagtctc

SEQ ID NO: 4807578 - DNA, 25 bp, Homo sapien
caagctatttgtcccctactttgag

SEQ ID NO: 4807579 - DNA, 25 bp, Homo sapien
tctttcagggatcacgtcaatggcc

SEQ ID NO: 4807580 - DNA, 25 bp, Homo sapien
catgggaaagggcttcaaggcacca

SEQ ID NO: 4807581 - DNA, 25 bp, Homo sapien
gggctgtaggttgcctgcaggcgct

SEQ ID NO: 4807582 - DNA, 25 bp, Homo sapien
cctgttgattccgatttctaggtct

SEQ ID NO: 4807583 - DNA, 25 bp, Homo sapien
agggctgtaggttgcctgcaggcgc

SEQ ID NO: 4807584 - DNA, 25 bp, Homo sapien
gttgattccgatttctaggtctcat

SEQ ID NO: 4807585 - DNA, 25 bp, Homo sapien
tgaggttcccaatgtttcgtccaga

SEQ ID NO: 4807586 - DNA, 25 bp, Homo sapien
caagtcaggtgactcttaggccaca

SEQ ID NO: 4807587 - DNA, 25 bp, Homo sapien
gggttttgccacctgagaatacagt

SEQ ID NO: 4807588 - DNA, 25 bp, Homo sapien
tgatccaatgggcagtgagtgactg

SEQ ID NO: 4807589 - DNA, 25 bp, Homo sapien
ttcagtaagtgccagagtgttccca

SEQ ID NO: 4807590 - DNA, 25 bp, Homo sapien
agtgcttgacttctcggcccggaag

SEQ ID NO: 4807591 - DNA, 25 bp, Homo sapien
taatggttgtcacatgtcacatgcg

SEQ ID NO: 4807592 - DNA, 25 bp, Homo sapien
tgtaatggtttcctgtgaagcctcc

SEQ ID NO: 4807593 - DNA, 25 bp, Homo sapien
gaatggaagactccctgcagaagtc

SEQ ID NO: 4807594 - DNA, 25 bp, Homo sapien
caggccacatgacacgttgcagttc

SEQ ID NO: 4807595 - DNA, 25 bp, Homo sapien
agttcaggaaaacactgcctgtggg

SEQ ID NO: 4807596 - DNA, 25 bp, Homo sapien
gcttgacttgaccagcatctgttgg

SEQ ID NO: 4807597 - DNA, 25 bp, Homo sapien
gtcttctggtgttttgaagcaggtc

SEQ ID NO: 4807598 - DNA, 25 bp, Homo sapien
ttgaagcaggtcatggaaataattg

SEQ ID NO: 4807599 - DNA, 25 bp, Homo sapien
gcaggtcatggaaataattggcagc

SEQ ID NO: 4807600 - DNA, 25 bp, Homo sapien
tcttctggtgttttgaagcaggtca

SEQ ID NO: 4807601 - DNA, 25 bp, Homo sapien
cagagcatccacaagtaggatgttc

SEQ ID NO: 4807602 - DNA, 25 bp, Homo sapien
accaggtagatttggtcatctggtg

SEQ ID NO: 4807603 - DNA, 25 bp, Homo sapien
ttaccagataatgaggaccaaggct

SEQ ID NO: 4807604 - DNA, 25 bp, Homo sapien
taggatgttcggagtagcaaagcag

SEQ ID NO: 4807605 - DNA, 25 bp, Homo sapien
gaagggcagcgtacccaggaagagg

SEQ ID NO: 4807606 - DNA, 25 bp, Homo sapien
ccaggaagggcagcgtacccaggaa

SEQ ID NO: 4807607 - DNA, 25 bp, Homo sapien
ggcagcgtacccaggaagaggccca

SEQ ID NO: 4807608 - DNA, 25 bp, Homo sapien
cagcgtacccaggaagaggcccatc

SEQ ID NO: 4807609 - DNA, 25 bp, Homo sapien
tacattatctatacggccggtggag

SEQ ID NO: 4807610 - DNA, 25 bp, Homo sapien
tacacatacgtgcacaagggaggct

SEQ ID NO: 4807611 - DNA, 25 bp, Homo sapien
ccttcttggcaatagtcccgggagt

SEQ ID NO: 4807612 - DNA, 25 bp, Homo sapien
gatgcggactctagtcagcctgaga

SEQ ID NO: 4807613 - DNA, 25 bp, Homo sapien
aaacagaatccagcatcccggtcct

SEQ ID NO: 4807614 - DNA, 25 bp, Homo sapien
cgattcagttccatcatccgctgca

SEQ ID NO: 4807615 - DNA, 25 bp, Homo sapien
gggacagaaaacaccgtatcgattc

SEQ ID NO: 4807616 - DNA, 25 bp, Homo sapien
tcctggcaatggccacgagaggtca

SEQ ID NO: 4807617 - DNA, 25 bp, Homo sapien
gagtgagtaagagcctcctcggaac

SEQ ID NO: 4807618 - DNA, 25 bp, Homo sapien
ctggtagcggctccggtaatggccc

SEQ ID NO: 4807619 - DNA, 25 bp, Homo sapien
tgggcacaggcgttataccaccagc

SEQ ID NO: 4807620 - DNA, 25 bp, Homo sapien
gggttcggtcggatcatcatcacca

SEQ ID NO: 4807621 - DNA, 25 bp, Homo sapien
tggcccagagcctacgcagttggtt

SEQ ID NO: 4807622 - DNA, 25 bp, Homo sapien
gatttagcagtatgcccaaggacac

SEQ ID NO: 4807623 - DNA, 25 bp, Homo sapien
aagccagtttgtatggagccctcgc

SEQ ID NO: 4807624 - DNA, 25 bp, Homo sapien
ggttagctctataccaggtgcctgg

SEQ ID NO: 4807625 - DNA, 25 bp, Homo sapien
aatgccactgtgacccagctttgtg

SEQ ID NO: 4807626 - DNA, 25 bp, Homo sapien
ggacctgtgggcaggagaagggacc

SEQ ID NO: 4807627 - DNA, 25 bp, Homo sapien
cactgtgacccagctttgtgaaggg

SEQ ID NO: 4807628 - DNA, 25 bp, Homo sapien
gtaaatgccactgtgacccagcttt

SEQ ID NO: 4807629 - DNA, 25 bp, Homo sapien
gatcttcccgtttccaagccctgga

SEQ ID NO: 4807630 - DNA, 25 bp, Homo sapien
ccctaccctgcacctgggtttgact

SEQ ID NO: 4807631 - DNA, 25 bp, Homo sapien
tcaccctgggatcttcccgtttcca

SEQ ID NO: 4807632 - DNA, 25 bp, Homo sapien
tgcacctgggtttgactccactttt

SEQ ID NO: 4807633 - DNA, 25 bp, Homo sapien
tgtaaaggagtcacccgcattgcca

SEQ ID NO: 4807634 - DNA, 25 bp, Homo sapien
tagttgccttggttcgtcagccagt

SEQ ID NO: 4807635 - DNA, 25 bp, Homo sapien
gaactgcttgccgttgtgccatgta

SEQ ID NO: 4807636 - DNA, 25 bp, Homo sapien
tataatactcgctctcaggttccag

SEQ ID NO: 4807637 - DNA, 25 bp, Homo sapien
agtgttaatgtggagcctgcagcac

SEQ ID NO: 4807638 - DNA, 25 bp, Homo sapien
aacccaggagagtgttaatgtggag

SEQ ID NO: 4807639 - DNA, 25 bp, Homo sapien
gacactcagccctggatagaggggc

SEQ ID NO: 4807640 - DNA, 25 bp, Homo sapien
agagtgttaatgtggagcctgcagc

SEQ ID NO: 4807641 - DNA, 25 bp, Homo sapien
tatgtagagtgcctaccctgtgcca

SEQ ID NO: 4807642 - DNA, 25 bp, Homo sapien
tgtgagctgtgacgcatgtgtccca

SEQ ID NO: 4807643 - DNA, 25 bp, Homo sapien
taagctgtaacgcaccagacgggtg

SEQ ID NO: 4807644 - DNA, 25 bp, Homo sapien
ggtcagcagctgagttacggccact

SEQ ID NO: 4807645 - DNA, 25 bp, Homo sapien
tccctagtatggatgaactgaggcc

SEQ ID NO: 4807646 - DNA, 25 bp, Homo sapien
agaggctcagggtctcagaatgcct

SEQ ID NO: 4807647 - DNA, 25 bp, Homo sapien
tcagggtctcagaatgcctgagggt

SEQ ID NO: 4807648 - DNA, 25 bp, Homo sapien
agtgctatcattatcctccctagta

SEQ ID NO: 4807649 - DNA, 25 bp, Homo sapien
ggagactcaagaaggggcatggcag

SEQ ID NO: 4807650 - DNA, 25 bp, Homo sapien
atgtgtgcaaggcatcatggcttca

SEQ ID NO: 4807651 - DNA, 25 bp, Homo sapien
gacaaccaggacaggagactcaaga

SEQ ID NO: 4807652 - DNA, 25 bp, Homo sapien
aaaaaagcagagacacaggctgttc

SEQ ID NO: 4807653 - DNA, 25 bp, Homo sapien
ccctcaggaggttgatacgagatta

SEQ ID NO: 4807654 - DNA, 25 bp, Homo sapien
gggtccataacagaacctccctcag

SEQ ID NO: 4807655 - DNA, 25 bp, Homo sapien
tccacactttcatctgtaagctggg

SEQ ID NO: 4807656 - DNA, 25 bp, Homo sapien
cctggctttgcaaccctgagcaaat

SEQ ID NO: 4807657 - DNA, 25 bp, Homo sapien
caactttccctgctacacagatgag

SEQ ID NO: 4807658 - DNA, 25 bp, Homo sapien
gatgagcatttcaactccctgggaa

SEQ ID NO: 4807659 - DNA, 25 bp, Homo sapien
gggacttgcgccttctgggctttga

SEQ ID NO: 4807660 - DNA, 25 bp, Homo sapien
tttgagagcgggtctttccccatgg

SEQ ID NO: 4807661 - DNA, 25 bp, Homo sapien
gaggcgctggtcctcactacccctg

SEQ ID NO: 4807662 - DNA, 25 bp, Homo sapien
aggaggcgctggtcctcactacccc

SEQ ID NO: 4807663 - DNA, 25 bp, Homo sapien
ggcgctggtcctcactacccctggt

SEQ ID NO: 4807664 - DNA, 25 bp, Homo sapien
cgctggtcctcactacccctggtgg

SEQ ID NO: 4807665 - DNA, 25 bp, Homo sapien
ccagtcaccttgtgggcagcacaga

SEQ ID NO: 4807666 - DNA, 25 bp, Homo sapien
ttgtgggcagcacagacatcccctg

SEQ ID NO: 4807667 - DNA, 25 bp, Homo sapien
gggtgggccagtcaccttgtgggca

SEQ ID NO: 4807668 - DNA, 25 bp, Homo sapien
acagacatcccctgccgagtctcac

SEQ ID NO: 4807669 - DNA, 25 bp, Homo sapien
tggagctggtgtcgtggccatcctc

SEQ ID NO: 4807670 - DNA, 25 bp, Homo sapien
cctgaagaagttaacagagccatcc

SEQ ID NO: 4807671 - DNA, 25 bp, Homo sapien
gcaccacacctgcatgaggcggttg

SEQ ID NO: 4807672 - DNA, 25 bp, Homo sapien
ggtgttctccggcttcaccaggtag

SEQ ID NO: 4807673 - DNA, 25 bp, Homo sapien
ctcttactaggaaaacatggctccg

SEQ ID NO: 4807674 - DNA, 25 bp, Homo sapien
tcaagctgagttagaaccggcacct

SEQ ID NO: 4807675 - DNA, 25 bp, Homo sapien
tgacagggattaggcacacaaggac

SEQ ID NO: 4807676 - DNA, 25 bp, Homo sapien
cgtgaatatctgaccttgaggctgg

SEQ ID NO: 4807677 - DNA, 25 bp, Homo sapien
tacagtggaaacagcacacgctctg

SEQ ID NO: 4807678 - DNA, 25 bp, Homo sapien
ttaggaagaagctagcaaagagtgc

SEQ ID NO: 4807679 - DNA, 25 bp, Homo sapien
aataccctgagcatttagccaagtg

SEQ ID NO: 4807680 - DNA, 25 bp, Homo sapien
gcaaagcaataagggagctggccct

SEQ ID NO: 4807681 - DNA, 25 bp, Homo sapien
cccaagggaaggtcatgtctactga

SEQ ID NO: 4807682 - DNA, 25 bp, Homo sapien
gcccaatagcccatctgttgtgaga

SEQ ID NO: 4807683 - DNA, 25 bp, Homo sapien
cagttgggtccatttgctgggagtc

SEQ ID NO: 4807684 - DNA, 25 bp, Homo sapien
tagagatagaaggtcaggtccctgt

SEQ ID NO: 4807685 - DNA, 25 bp, Homo sapien
gattgaaccatttgaggtgccagga

SEQ ID NO: 4807686 - DNA, 25 bp, Homo sapien
gcaacaaagaagtgccacgtctatc

SEQ ID NO: 4807687 - DNA, 25 bp, Homo sapien
ggtgccaggaatagaactgtgcccc

SEQ ID NO: 4807688 - DNA, 25 bp, Homo sapien
tcagggacccactagtcacttgggt

SEQ ID NO: 4807689 - DNA, 25 bp, Homo sapien
tacttccccaagtctagtgctgcga

SEQ ID NO: 4807690 - DNA, 25 bp, Homo sapien
gacggatcccagatgcattcatgca

SEQ ID NO: 4807691 - DNA, 25 bp, Homo sapien
tagcacaccagggtatcaccacagt

SEQ ID NO: 4807692 - DNA, 25 bp, Homo sapien
gaaattttggcctcgacggatactc

SEQ ID NO: 4807693 - DNA, 25 bp, Homo sapien
gactggatgtgtgctgacattctga

SEQ ID NO: 4807694 - DNA, 25 bp, Homo sapien
cactgacttggagtagatacatggt

SEQ ID NO: 4807695 - DNA, 25 bp, Homo sapien
tatacaatgaaatggtaccgaaagc

SEQ ID NO: 4807696 - DNA, 25 bp, Homo sapien
tagttctcatatggcagcccactgg

SEQ ID NO: 4807697 - DNA, 25 bp, Homo sapien
tattcatcctgtccgcaaggagctc

SEQ ID NO: 4807698 - DNA, 25 bp, Homo sapien
gacctgaatgcaaatctagcctgaa

SEQ ID NO: 4807699 - DNA, 25 bp, Homo sapien
gaaatgtccggtgccagtatcttgg

SEQ ID NO: 4807700 - DNA, 25 bp, Homo sapien
cccataacggtattcggagaattgc

SEQ ID NO: 4807701 - DNA, 25 bp, Homo sapien
tgaacatttacagaaggccaaccct

SEQ ID NO: 4807702 - DNA, 25 bp, Homo sapien
gctctgagacccacatgtaacacga

SEQ ID NO: 4807703 - DNA, 25 bp, Homo sapien
cacacgggatctcatgcagagccta

SEQ ID NO: 4807704 - DNA, 25 bp, Homo sapien
taaggaatgtggttcccctgccacc

SEQ ID NO: 4807705 - DNA, 25 bp, Homo sapien
ccttggagttgacgcagatggcacc

SEQ ID NO: 4807706 - DNA, 25 bp, Homo sapien
taaatgaactctcttggcgagccct

SEQ ID NO: 4807707 - DNA, 25 bp, Homo sapien
gctgcatgtagagctgcgtgacccg

SEQ ID NO: 4807708 - DNA, 25 bp, Homo sapien
cggatgatctcgtgcaggagctgca

SEQ ID NO: 4807709 - DNA, 25 bp, Homo sapien
ggtccttgcaaaatggtggttattc

SEQ ID NO: 4807710 - DNA, 25 bp, Homo sapien
tattctttgtgaatagaatctatga

SEQ ID NO: 4807711 - DNA, 25 bp, Homo sapien
caaaatggtggttattctttgtgaa

SEQ ID NO: 4807712 - DNA, 25 bp, Homo sapien
ccttgcaaaatggtggttattcttt

SEQ ID NO: 4807713 - DNA, 25 bp, Homo sapien
tttacatgccgccagaggaaactgt

SEQ ID NO: 4807714 - DNA, 25 bp, Homo sapien
ttctttccctcacagtagcgtcagc

SEQ ID NO: 4807715 - DNA, 25 bp, Homo sapien
aggccgtccgcagcagcctcatttg

SEQ ID NO: 4807716 - DNA, 25 bp, Homo sapien
tggttggctgcaggcgcttctctcc

SEQ ID NO: 4807717 - DNA, 25 bp, Homo sapien
ttggcacagtgtcaaggacgcctcc

SEQ ID NO: 4807718 - DNA, 25 bp, Homo sapien
gatggcactggaccccatgatgcaa

SEQ ID NO: 4807719 - DNA, 25 bp, Homo sapien
cctgggagaaggtacagtcagtgca

SEQ ID NO: 4807720 - DNA, 25 bp, Homo sapien
cttgaactgagcttaggactctgga

SEQ ID NO: 4807721 - DNA, 25 bp, Homo sapien
gggcttctggcaaaagactgataga

SEQ ID NO: 4807722 - DNA, 25 bp, Homo sapien
tctgactagtaggtctgatgttggg

SEQ ID NO: 4807723 - DNA, 25 bp, Homo sapien
tgattagataaacgagggcttctgg

SEQ ID NO: 4807724 - DNA, 25 bp, Homo sapien
gactgatagagtgagcctctcagga

SEQ ID NO: 4807725 - DNA, 25 bp, Homo sapien
catgacccagcgcttggagcgtctg

SEQ ID NO: 4807726 - DNA, 25 bp, Homo sapien
ccagtagtggaagcttgtcaggaga

SEQ ID NO: 4807727 - DNA, 25 bp, Homo sapien
tgcccagacaaacaggaccagtagt

SEQ ID NO: 4807728 - DNA, 25 bp, Homo sapien
tcaggagatggtgcccaatgactag

SEQ ID NO: 4807729 - DNA, 25 bp, Homo sapien
tgttgtcacccttatcacagcagtg

SEQ ID NO: 4807730 - DNA, 25 bp, Homo sapien
gagatgacatgtgttgatggcttgt

SEQ ID NO: 4807731 - DNA, 25 bp, Homo sapien
ctttgggaaacgcagagatgacatg

SEQ ID NO: 4807732 - DNA, 25 bp, Homo sapien
tgtcacccttatcacagcagtgaga

SEQ ID NO: 4807733 - DNA, 25 bp, Homo sapien
tattgttgtcttccaatgttggagc

SEQ ID NO: 4807734 - DNA, 25 bp, Homo sapien
gttctgagtctagttcatccactgg

SEQ ID NO: 4807735 - DNA, 25 bp, Homo sapien
catccactggttgacactggtgtct

SEQ ID NO: 4807736 - DNA, 25 bp, Homo sapien
ctgctgctattgcagagtgcggcag

SEQ ID NO: 4807737 - DNA, 25 bp, Homo sapien
ggctgctacaagctgctacgtggtg

SEQ ID NO: 4807738 - DNA, 25 bp, Homo sapien
aaatactatttggaaggcactcggc

SEQ ID NO: 4807739 - DNA, 25 bp, Homo sapien
ctacaagctgctacgtggtgccaca

SEQ ID NO: 4807740 - DNA, 25 bp, Homo sapien
agagtctgatgtgccctgtttgtaa

SEQ ID NO: 4807741 - DNA, 25 bp, Homo sapien
aagcaggagcgagcagagaaaaatc

SEQ ID NO: 4807742 - DNA, 25 bp, Homo sapien
taaagcatggcgaggcacccatggg

SEQ ID NO: 4807743 - DNA, 25 bp, Homo sapien
gaagaagtgttaccaatcccaggga

SEQ ID NO: 4807744 - DNA, 25 bp, Homo sapien
tggagccctaggctaaagggcatgg

SEQ ID NO: 4807745 - DNA, 25 bp, Homo sapien
cagggctgtcccgttcactggctgc

SEQ ID NO: 4807746 - DNA, 25 bp, Homo sapien
ctgtcccgttcactggctgctcaac

SEQ ID NO: 4807747 - DNA, 25 bp, Homo sapien
agggctgtcccgttcactggctgct

SEQ ID NO: 4807748 - DNA, 25 bp, Homo sapien
ggctgtcccgttcactggctgctca

SEQ ID NO: 4807749 - DNA, 25 bp, Homo sapien
aggaaaagtttgtcacgtgaaggag

SEQ ID NO: 4807750 - DNA, 25 bp, Homo sapien
gatgctgtatggcttactcctcaca

SEQ ID NO: 4807751 - DNA, 25 bp, Homo sapien
taatccagtgtagtatctccagctc

SEQ ID NO: 4807752 - DNA, 25 bp, Homo sapien
ctctctcccacacttgactggaaac

SEQ ID NO: 4807753 - DNA, 25 bp, Homo sapien
ggaattcttctgcttccgcgtcaga

SEQ ID NO: 4807754 - DNA, 25 bp, Homo sapien
ccgaaagaagaggtggcagatccag

SEQ ID NO: 4807755 - DNA, 25 bp, Homo sapien
gcgtcagacccaggctgttggtcaa

SEQ ID NO: 4807756 - DNA, 25 bp, Homo sapien
tcagctttgaaacggtgcccaggga

SEQ ID NO: 4807757 - DNA, 25 bp, Homo sapien
gacttggagcctccgcgtctcactg

SEQ ID NO: 4807758 - DNA, 25 bp, Homo sapien
agcctccgcgtctcactgcacccct

SEQ ID NO: 4807759 - DNA, 25 bp, Homo sapien
agagacttggagcctccgcgtctca

SEQ ID NO: 4807760 - DNA, 25 bp, Homo sapien
gcctccgcgtctcactgcacccctc

SEQ ID NO: 4807761 - DNA, 25 bp, Homo sapien
ttgattacgaaacccttggccacca

SEQ ID NO: 4807762 - DNA, 25 bp, Homo sapien
caaagtggattgtagcggcgatcat

SEQ ID NO: 4807763 - DNA, 25 bp, Homo sapien
caacagggaagggagcgtttagtca

SEQ ID NO: 4807764 - DNA, 25 bp, Homo sapien
aggatgatctccaaccaacctcggg

SEQ ID NO: 4807765 - DNA, 25 bp, Homo sapien
tctggaccggattagcagtggtttc

SEQ ID NO: 4807766 - DNA, 25 bp, Homo sapien
tggccagggtccatggatggaattc

SEQ ID NO: 4807767 - DNA, 25 bp, Homo sapien
ggattagcagtggtttcttaaggaa

SEQ ID NO: 4807768 - DNA, 25 bp, Homo sapien
ctccctcaacagtctggaccggatt

SEQ ID NO: 4807769 - DNA, 25 bp, Homo sapien
tacaagtttcagactggttcccgat

SEQ ID NO: 4807770 - DNA, 25 bp, Homo sapien
tgcatgtaaaagcaacaggcctcag

SEQ ID NO: 4807771 - DNA, 25 bp, Homo sapien
cgatttcatgcaatactgtggcaca

SEQ ID NO: 4807772 - DNA, 25 bp, Homo sapien
tcttttacagtgcagtatcggaccg

SEQ ID NO: 4807773 - DNA, 25 bp, Homo sapien
cacgtggcacagtcacagacttcct

SEQ ID NO: 4807774 - DNA, 25 bp, Homo sapien
ctgaagggaggtctctagtgacagt

SEQ ID NO: 4807775 - DNA, 25 bp, Homo sapien
agtgacaggtcctagggctctgtgc

SEQ ID NO: 4807776 - DNA, 25 bp, Homo sapien
gtgacagtgacaggtcctagggctc

SEQ ID NO: 4807777 - DNA, 25 bp, Homo sapien
gacagaaatgcatctattcacaagg

SEQ ID NO: 4807778 - DNA, 25 bp, Homo sapien
catccgtgtgatggaatgccaggag

SEQ ID NO: 4807779 - DNA, 25 bp, Homo sapien
tgtggaactgcatgtcctaaacttg

SEQ ID NO: 4807780 - DNA, 25 bp, Homo sapien
acaaggaaacatcgcagtgactaga

SEQ ID NO: 4807781 - DNA, 25 bp, Homo sapien
cacttgcaagcaacatctgctctgt

SEQ ID NO: 4807782 - DNA, 25 bp, Homo sapien
ggaagccacttgcaagcaacatctg

SEQ ID NO: 4807783 - DNA, 25 bp, Homo sapien
gccacttgcaagcaacatctgctct

SEQ ID NO: 4807784 - DNA, 25 bp, Homo sapien
ttgcaagcaacatctgctctgttcc

SEQ ID NO: 4807785 - DNA, 25 bp, Homo sapien
aaatctgttgcactctcctgggctg

SEQ ID NO: 4807786 - DNA, 25 bp, Homo sapien
tatgctgcacaagcgtgtacacccc

SEQ ID NO: 4807787 - DNA, 25 bp, Homo sapien
caactacaatatgagcgagaactgc

SEQ ID NO: 4807788 - DNA, 25 bp, Homo sapien
tatccattgctgaacgactgtgact

SEQ ID NO: 4807789 - DNA, 25 bp, Homo sapien
catggcccaatgcttccttgatgca

SEQ ID NO: 4807790 - DNA, 25 bp, Homo sapien
cagtaaggtcatatgcggtcttggt

SEQ ID NO: 4807791 - DNA, 25 bp, Homo sapien
ggtcttgagggtgcttcagtgtcac

SEQ ID NO: 4807792 - DNA, 25 bp, Homo sapien
tactccgcggacttaactgattgct

SEQ ID NO: 4807793 - DNA, 25 bp, Homo sapien
caggcctttgttatggtgtatgata

SEQ ID NO: 4807794 - DNA, 25 bp, Homo sapien
tgtatgataatactcggatgaatga

SEQ ID NO: 4807795 - DNA, 25 bp, Homo sapien
cagccagatgcaacaacacggttga

SEQ ID NO: 4807796 - DNA, 25 bp, Homo sapien
gataatactcggatgaatgaataag

SEQ ID NO: 4807797 - DNA, 25 bp, Homo sapien
aagatggacccggtagtctcgcggg

SEQ ID NO: 4807798 - DNA, 25 bp, Homo sapien
actgcctctcaggtgaataagatat

SEQ ID NO: 4807799 - DNA, 25 bp, Homo sapien
gggaatttcaaatttcaggcgatac

SEQ ID NO: 4807800 - DNA, 25 bp, Homo sapien
tattgaatgtctccttgatctgaaa

SEQ ID NO: 4807801 - DNA, 25 bp, Homo sapien
ttgaagttggtgcttcttagggagt

SEQ ID NO: 4807802 - DNA, 25 bp, Homo sapien
aagttggtgcttcttagggagtggt

SEQ ID NO: 4807803 - DNA, 25 bp, Homo sapien
tgaagttggtgcttcttagggagtg

SEQ ID NO: 4807804 - DNA, 25 bp, Homo sapien
tttgaagttggtgcttcttagggag

SEQ ID NO: 4807805 - DNA, 25 bp, Homo sapien
tttagagatttaacatggaggtcct

SEQ ID NO: 4807806 - DNA, 25 bp, Homo sapien
atcatggaaatctgtctagcttcta

SEQ ID NO: 4807807 - DNA, 25 bp, Homo sapien
gagatttaacatggaggtcctcagc

SEQ ID NO: 4807808 - DNA, 25 bp, Homo sapien
catggaaatctgtctagcttctaca

SEQ ID NO: 4807809 - DNA, 25 bp, Homo sapien
tattgatcacctcgtttgtacccag

SEQ ID NO: 4807810 - DNA, 25 bp, Homo sapien
tgcattcttgccagttggagcttaa

SEQ ID NO: 4807811 - DNA, 25 bp, Homo sapien
cccaagagcagtggaagatttttct

SEQ ID NO: 4807812 - DNA, 25 bp, Homo sapien
cactgttccgggcactggagagaca

SEQ ID NO: 4807813 - DNA, 25 bp, Homo sapien
tcttgtggctactaagcagcagggc

SEQ ID NO: 4807814 - DNA, 25 bp, Homo sapien
gcatcgggtgctctcttgactccag

SEQ ID NO: 4807815 - DNA, 25 bp, Homo sapien
gcagcaggctcggttattatcccca

SEQ ID NO: 4807816 - DNA, 25 bp, Homo sapien
tccaggatgcgccagtgatgacaat

SEQ ID NO: 4807817 - DNA, 25 bp, Homo sapien
ccagaataattggatagacatgtgc

SEQ ID NO: 4807818 - DNA, 25 bp, Homo sapien
tgttttttaatcaagtgagtcacat

SEQ ID NO: 4807819 - DNA, 25 bp, Homo sapien
caaattggtcaattgaacaaaataa

SEQ ID NO: 4807820 - DNA, 25 bp, Homo sapien
gacaaaggtgcgaaggcagttcaat

SEQ ID NO: 4807821 - DNA, 25 bp, Homo sapien
ccagcaggccttctttgtgagtgtg

SEQ ID NO: 4807822 - DNA, 25 bp, Homo sapien
aggaccttggtctgacagattttat

SEQ ID NO: 4807823 - DNA, 25 bp, Homo sapien
gagaactgagtttgacaggaccttg

SEQ ID NO: 4807824 - DNA, 25 bp, Homo sapien
cagattttatagaagtttgggtcgt

SEQ ID NO: 4807825 - DNA, 25 bp, Homo sapien
catgcagtctcggaaaggtgaagtc

SEQ ID NO: 4807826 - DNA, 25 bp, Homo sapien
tcgaccctgggaaggatcctactgt

SEQ ID NO: 4807827 - DNA, 25 bp, Homo sapien
cctggcttcgggtcaatgactgcaa

SEQ ID NO: 4807828 - DNA, 25 bp, Homo sapien
aagtcctttgcccaggcgaggtcca

SEQ ID NO: 4807829 - DNA, 25 bp, Homo sapien
ggccattggggttggcacctactga

SEQ ID NO: 4807830 - DNA, 25 bp, Homo sapien
ttggggttggcacctactgagcctg

SEQ ID NO: 4807831 - DNA, 25 bp, Homo sapien
cattggggttggcacctactgagcc

SEQ ID NO: 4807832 - DNA, 25 bp, Homo sapien
ggatcccagggctaagccagcaacc

SEQ ID NO: 4807833 - DNA, 25 bp, Homo sapien
tgaggcccaattgttgccttagcaa

SEQ ID NO: 4807834 - DNA, 25 bp, Homo sapien
ttgaggcccaattgttgccttagca

SEQ ID NO: 4807835 - DNA, 25 bp, Homo sapien
aattgaggcccaattgttgccttag

SEQ ID NO: 4807836 - DNA, 25 bp, Homo sapien
gaggcccaattgttgccttagcaac

SEQ ID NO: 4807837 - DNA, 25 bp, Homo sapien
ggcggaagcctctctgggaagtaca

SEQ ID NO: 4807838 - DNA, 25 bp, Homo sapien
aatagattccgggagcaagcacagg

SEQ ID NO: 4807839 - DNA, 25 bp, Homo sapien
tttagtacggctcaagaggaccctg

SEQ ID NO: 4807840 - DNA, 25 bp, Homo sapien
gattgccctgagtggaaggccaacg

SEQ ID NO: 4807841 - DNA, 25 bp, Homo sapien
ggacagcggttcttgagctctcgcg

SEQ ID NO: 4807842 - DNA, 25 bp, Homo sapien
tcgcggttgccggtagattgttgcc

SEQ ID NO: 4807843 - DNA, 25 bp, Homo sapien
gattgttgccagttgccagttgcca

SEQ ID NO: 4807844 - DNA, 25 bp, Homo sapien
cgtttttcggaaagctggcagcggc

SEQ ID NO: 4807845 - DNA, 25 bp, Homo sapien
ggcatgaactcccagttggaacaaa

SEQ ID NO: 4807846 - DNA, 25 bp, Homo sapien
cagcctggcatgaactcccagttgg

SEQ ID NO: 4807847 - DNA, 25 bp, Homo sapien
tgaactcccagttggaacaaaggga

SEQ ID NO: 4807848 - DNA, 25 bp, Homo sapien
gcctggcatgaactcccagttggaa

SEQ ID NO: 4807849 - DNA, 25 bp, Homo sapien
tttattgaaatgttttcctttgtgc

SEQ ID NO: 4807850 - DNA, 25 bp, Homo sapien
tgatcctttattgaaatgttttcct

SEQ ID NO: 4807851 - DNA, 25 bp, Homo sapien
ctttattgaaatgttttcctttgtg

SEQ ID NO: 4807852 - DNA, 25 bp, Homo sapien
caaatgatcctttattgaaatgttt

SEQ ID NO: 4807853 - DNA, 25 bp, Homo sapien
tcacccctactgtaacaatgaaaat

SEQ ID NO: 4807854 - DNA, 25 bp, Homo sapien
cctttcacccctactgtaacaatga

SEQ ID NO: 4807855 - DNA, 25 bp, Homo sapien
cctactgtaacaatgaaaatgtcac

SEQ ID NO: 4807856 - DNA, 25 bp, Homo sapien
aaaacttcccagcttatctctgtga

SEQ ID NO: 4807857 - DNA, 25 bp, Homo sapien
catcaacattacagcccactgactg

SEQ ID NO: 4807858 - DNA, 25 bp, Homo sapien
caacattacagcccactgactgggc

SEQ ID NO: 4807859 - DNA, 25 bp, Homo sapien
tgtcatcgatgatgtcatgaggatg

SEQ ID NO: 4807860 - DNA, 25 bp, Homo sapien
catcgatgatgtcatgaggatggcg

SEQ ID NO: 4807861 - DNA, 25 bp, Homo sapien
cagttatggcggttacatgttgtcc

SEQ ID NO: 4807862 - DNA, 25 bp, Homo sapien
ggctcagtccctcacaatctgcaga

SEQ ID NO: 4807863 - DNA, 25 bp, Homo sapien
tccataacccggaatgcaaagcttc

SEQ ID NO: 4807864 - DNA, 25 bp, Homo sapien
gtccttgatgcccagattaaacaca

SEQ ID NO: 4807865 - DNA, 25 bp, Homo sapien
ggatcggtgccgcatctgtcgagca

SEQ ID NO: 4807866 - DNA, 25 bp, Homo sapien
tctggctaaggatcggtgccgcatc

SEQ ID NO: 4807867 - DNA, 25 bp, Homo sapien
gctaaggatcggtgccgcatctgtc

SEQ ID NO: 4807868 - DNA, 25 bp, Homo sapien
tctctggctaaggatcggtgccgca

SEQ ID NO: 4807869 - DNA, 25 bp, Homo sapien
agccaaagcagatcatgtgtccttc

SEQ ID NO: 4807870 - DNA, 25 bp, Homo sapien
ccaaagcagatcatgtgtccttcat

SEQ ID NO: 4807871 - DNA, 25 bp, Homo sapien
gaagccaaagcagatcatgtgtcct

SEQ ID NO: 4807872 - DNA, 25 bp, Homo sapien
aaagcagatcatgtgtccttcattt

SEQ ID NO: 4807873 - DNA, 25 bp, Homo sapien
tgttcccatgctttcggcacagagt

SEQ ID NO: 4807874 - DNA, 25 bp, Homo sapien
ggtttactatcagctcaccactgga

SEQ ID NO: 4807875 - DNA, 25 bp, Homo sapien
tcatccacatgaagaacaaccctgt

SEQ ID NO: 4807876 - DNA, 25 bp, Homo sapien
gcaccagccaacagagacctggtca

SEQ ID NO: 4807877 - DNA, 25 bp, Homo sapien
gtggcactttttcatactacctggc

SEQ ID NO: 4807878 - DNA, 25 bp, Homo sapien
tatcaacacccaatacccatgtcaa

SEQ ID NO: 4807879 - DNA, 25 bp, Homo sapien
tgtgagccacccagcatacgtggca

SEQ ID NO: 4807880 - DNA, 25 bp, Homo sapien
gctctagcagccctaaccatatcaa

SEQ ID NO: 4807881 - DNA, 25 bp, Homo sapien
tttctgtctcttggtggttccttga

SEQ ID NO: 4807882 - DNA, 25 bp, Homo sapien
ccttgagggctttgatgatcagggc

SEQ ID NO: 4807883 - DNA, 25 bp, Homo sapien
tgtctcttggtggttccttgagggc

SEQ ID NO: 4807884 - DNA, 25 bp, Homo sapien
tctgtctcttggtggttccttgagg

SEQ ID NO: 4807885 - DNA, 25 bp, Homo sapien
atcctcaggcccttccagtcacccg

SEQ ID NO: 4807886 - DNA, 25 bp, Homo sapien
tcaggcccttccagtcacccgttgc

SEQ ID NO: 4807887 - DNA, 25 bp, Homo sapien
cctcaggcccttccagtcacccgtt

SEQ ID NO: 4807888 - DNA, 25 bp, Homo sapien
aatcctcaggcccttccagtcaccc

SEQ ID NO: 4807889 - DNA, 25 bp, Homo sapien
taagggcaccttctcaatcagagca

SEQ ID NO: 4807890 - DNA, 25 bp, Homo sapien
gctatctcaagtacctaagggcacc

SEQ ID NO: 4807891 - DNA, 25 bp, Homo sapien
tgtccagaggtgaaccacagccttg

SEQ ID NO: 4807892 - DNA, 25 bp, Homo sapien
tagtacttgttcagtggctcaggcc

SEQ ID NO: 4807893 - DNA, 25 bp, Homo sapien
gcagaagtggcaccgacttcacctc

SEQ ID NO: 4807894 - DNA, 25 bp, Homo sapien
agtggcaccgacttcacctccggtg

SEQ ID NO: 4807895 - DNA, 25 bp, Homo sapien
agaagtggcaccgacttcacctccg

SEQ ID NO: 4807896 - DNA, 25 bp, Homo sapien
ccgacttcacctccggtgcacctca

SEQ ID NO: 4807897 - DNA, 25 bp, Homo sapien
aagagttagtgtctgtgcagaggga

SEQ ID NO: 4807898 - DNA, 25 bp, Homo sapien
tcttctcgaaacagcacagagcgcg

SEQ ID NO: 4807899 - DNA, 25 bp, Homo sapien
acagccctctcagcgtctttccggg

SEQ ID NO: 4807900 - DNA, 25 bp, Homo sapien
ctcgggtgtgggcagctccgaaact

SEQ ID NO: 4807901 - DNA, 25 bp, Homo sapien
gggaaagctttgcacgcgcggcagg

SEQ ID NO: 4807902 - DNA, 25 bp, Homo sapien
agcggctttaagagccccatacggg

SEQ ID NO: 4807903 - DNA, 25 bp, Homo sapien
tacacgtgaagaagctaaggcccag

SEQ ID NO: 4807904 - DNA, 25 bp, Homo sapien
gggccgagggatgctccatcccgca

SEQ ID NO: 4807905 - DNA, 25 bp, Homo sapien
tttgatctcgttggggtcgaacttc

SEQ ID NO: 4807906 - DNA, 25 bp, Homo sapien
atctcgttggggtcgaacttcggcg

SEQ ID NO: 4807907 - DNA, 25 bp, Homo sapien
tcgttggggtcgaacttcggcggca

SEQ ID NO: 4807908 - DNA, 25 bp, Homo sapien
cgttggggtcgaacttcggcggcat

SEQ ID NO: 4807909 - DNA, 25 bp, Homo sapien
ttcgggacgaccgaaggaagttgca

SEQ ID NO: 4807910 - DNA, 25 bp, Homo sapien
tcggatgaacccggattcgggacga

SEQ ID NO: 4807911 - DNA, 25 bp, Homo sapien
tcgggacgaccgaaggaagttgcac

SEQ ID NO: 4807912 - DNA, 25 bp, Homo sapien
gctggtgtcggatgaacccggattc

SEQ ID NO: 4807913 - DNA, 25 bp, Homo sapien
ccgagccgaaagccgagaggccgga

SEQ ID NO: 4807914 - DNA, 25 bp, Homo sapien
cgagccgaaagccgagaggccggaa

SEQ ID NO: 4807915 - DNA, 25 bp, Homo sapien
ctccgagccgaaagccgagaggccg

SEQ ID NO: 4807916 - DNA, 25 bp, Homo sapien
tccgagccgaaagccgagaggccgg

SEQ ID NO: 4807917 - DNA, 25 bp, Homo sapien
cacattttcagcgtggcagaggccc

SEQ ID NO: 4807918 - DNA, 25 bp, Homo sapien
tgtgtccccgtgaatgcaccagatg

SEQ ID NO: 4807919 - DNA, 25 bp, Homo sapien
ccagggcaggccgtttgataagctt

SEQ ID NO: 4807920 - DNA, 25 bp, Homo sapien
ccctgatgggtttgacactggcaca

SEQ ID NO: 4807921 - DNA, 25 bp, Homo sapien
tactggctgattcagtatcaacggc

SEQ ID NO: 4807922 - DNA, 25 bp, Homo sapien
tatcaacggcttttgaaccagaagc

SEQ ID NO: 4807923 - DNA, 25 bp, Homo sapien
cagacggagttagaagccaaaagtg

SEQ ID NO: 4807924 - DNA, 25 bp, Homo sapien
ttgcctgcttcattcctggcagacg

SEQ ID NO: 4807925 - DNA, 25 bp, Homo sapien
tcaatacaatatcagggagggatga

SEQ ID NO: 4807926 - DNA, 25 bp, Homo sapien
aatacaatatcagggagggatgatg

SEQ ID NO: 4807927 - DNA, 25 bp, Homo sapien
caatacaatatcagggagggatgat

SEQ ID NO: 4807928 - DNA, 25 bp, Homo sapien
ttcaatacaatatcagggagggatg

SEQ ID NO: 4807929 - DNA, 25 bp, Homo sapien
gcactagaggcgcagatcttcggga

SEQ ID NO: 4807930 - DNA, 25 bp, Homo sapien
ctcaaaaggcactagaggcgcagat

SEQ ID NO: 4807931 - DNA, 25 bp, Homo sapien
cagatcttcgggacaagagggaaga

SEQ ID NO: 4807932 - DNA, 25 bp, Homo sapien
tagaggcgcagatcttcgggacaag

SEQ ID NO: 4807933 - DNA, 25 bp, Homo sapien
gagtgactcacaaggacatccaaag

SEQ ID NO: 4807934 - DNA, 25 bp, Homo sapien
gcagaggccaaagcctgaccccaga

SEQ ID NO: 4807935 - DNA, 25 bp, Homo sapien
gaggtgacttggtgactgagaggca

SEQ ID NO: 4807936 - DNA, 25 bp, Homo sapien
gaagacagaacccagccccattaca

SEQ ID NO: 4807937 - DNA, 25 bp, Homo sapien
gaaggggatacacaggcccataaaa

SEQ ID NO: 4807938 - DNA, 25 bp, Homo sapien
tccggaagggaacggcctgtgccat

SEQ ID NO: 4807939 - DNA, 25 bp, Homo sapien
ccctaactgcggaaggagcagggcc

SEQ ID NO: 4807940 - DNA, 25 bp, Homo sapien
tgcatctgagatcatcccacagaag

SEQ ID NO: 4807941 - DNA, 25 bp, Homo sapien
gaacccaataaagtgactcaggtgg

SEQ ID NO: 4807942 - DNA, 25 bp, Homo sapien
tcggatctcagtgacaccgtccggg

SEQ ID NO: 4807943 - DNA, 25 bp, Homo sapien
cctgcactgtcctcggtggtggtgt

SEQ ID NO: 4807944 - DNA, 25 bp, Homo sapien
cgcgccgtcgcttttccgagagggt

SEQ ID NO: 4807945 - DNA, 25 bp, Homo sapien
ctccagtctcctggtcgctgggctt

SEQ ID NO: 4807946 - DNA, 25 bp, Homo sapien
gggctgccgcccccgccgctgttgc

SEQ ID NO: 4807947 - DNA, 25 bp, Homo sapien
gccgcccccgccgctgttgctgtac

SEQ ID NO: 4807948 - DNA, 25 bp, Homo sapien
ctgccgcccccgccgctgttgctgt

SEQ ID NO: 4807949 - DNA, 25 bp, Homo sapien
ctggggctgccgcccccgccgctgt

SEQ ID NO: 4807950 - DNA, 25 bp, Homo sapien
gtgcatgaccatgctgtcccggtag

SEQ ID NO: 4807951 - DNA, 25 bp, Homo sapien
cggtagaggttgtgcttcctctgca

SEQ ID NO: 4807952 - DNA, 25 bp, Homo sapien
catgaccatgctgtcccggtagagg

SEQ ID NO: 4807953 - DNA, 25 bp, Homo sapien
tgaccatgctgtcccggtagaggtt

SEQ ID NO: 4807954 - DNA, 25 bp, Homo sapien
cctgtgctggactctgctcaaagaa

SEQ ID NO: 4807955 - DNA, 25 bp, Homo sapien
cacagcgaagagtgggcttcaccca

SEQ ID NO: 4807956 - DNA, 25 bp, Homo sapien
tgtgactcattccaggcctcgttgc

SEQ ID NO: 4807957 - DNA, 25 bp, Homo sapien
cacagagacgcaaggctaaggctgc

SEQ ID NO: 4807958 - DNA, 25 bp, Homo sapien
gcaggatgtccttcatgacggtctg

SEQ ID NO: 4807959 - DNA, 25 bp, Homo sapien
ctcctcgtacgtgttttccaccagg

SEQ ID NO: 4807960 - DNA, 25 bp, Homo sapien
tcctcgtacgtgttttccaccagga

SEQ ID NO: 4807961 - DNA, 25 bp, Homo sapien
cctgcaggatgtccttcatgacggt

SEQ ID NO: 4807962 - DNA, 25 bp, Homo sapien
tcctcgaagatcagctcctggaacc

SEQ ID NO: 4807963 - DNA, 25 bp, Homo sapien
tggcaaagtcctcgaagatcagctc

SEQ ID NO: 4807964 - DNA, 25 bp, Homo sapien
ctggcaaagtcctcgaagatcagct

SEQ ID NO: 4807965 - DNA, 25 bp, Homo sapien
gcaaagtcctcgaagatcagctcct

SEQ ID NO: 4807966 - DNA, 25 bp, Homo sapien
tggggcggcagagatgagaggtcag

SEQ ID NO: 4807967 - DNA, 25 bp, Homo sapien
gtggggcggcagagatgagaggtca

SEQ ID NO: 4807968 - DNA, 25 bp, Homo sapien
ttagggcccaaacggctggagcagg

SEQ ID NO: 4807969 - DNA, 25 bp, Homo sapien
gggcccaaacggctggagcaggtgg

SEQ ID NO: 4807970 - DNA, 25 bp, Homo sapien
gctggagcaggtgggggctgctcac

SEQ ID NO: 4807971 - DNA, 25 bp, Homo sapien
ggctggagcaggtgggggctgctca

SEQ ID NO: 4807972 - DNA, 25 bp, Homo sapien
gcctcccggaagaacctcttccgca

SEQ ID NO: 4807973 - DNA, 25 bp, Homo sapien
gatgctgatctgcagcagcgcctcc

SEQ ID NO: 4807974 - DNA, 25 bp, Homo sapien
cagagctgctgtcgtagtcgtattt

SEQ ID NO: 4807975 - DNA, 25 bp, Homo sapien
gaacgggatgctgatctgcagcagc

SEQ ID NO: 4807976 - DNA, 25 bp, Homo sapien
cgaacgtatacacggcattgtccat

SEQ ID NO: 4807977 - DNA, 25 bp, Homo sapien
ccaggacccgctggatggacttgca

SEQ ID NO: 4807978 - DNA, 25 bp, Homo sapien
aggagggtctcgaacgtatacacgg

SEQ ID NO: 4807979 - DNA, 25 bp, Homo sapien
cgctggatggacttgcacagctcct

SEQ ID NO: 4807980 - DNA, 25 bp, Homo sapien
tggacacatcaaatcgctgctgcag

SEQ ID NO: 4807981 - DNA, 25 bp, Homo sapien
tcccgcatgtggatctgggctcgct

SEQ ID NO: 4807982 - DNA, 25 bp, Homo sapien
tggtacgccagccgggacagcttct

SEQ ID NO: 4807983 - DNA, 25 bp, Homo sapien
ttgaacacggacgtgctggacacat

SEQ ID NO: 4807984 - DNA, 25 bp, Homo sapien
cccgtctacagggacggccttggag

SEQ ID NO: 4807985 - DNA, 25 bp, Homo sapien
tgggacagaccagacctactctcag

SEQ ID NO: 4807986 - DNA, 25 bp, Homo sapien
gaacggctgcccggagtcacgcagc

SEQ ID NO: 4807987 - DNA, 25 bp, Homo sapien
agaccagacctactctcaggagacc

SEQ ID NO: 4807988 - DNA, 25 bp, Homo sapien
agggctggacatggttccgcacgca

SEQ ID NO: 4807989 - DNA, 25 bp, Homo sapien
cagcttgtcaatgccgccctcgttg

SEQ ID NO: 4807990 - DNA, 25 bp, Homo sapien
ccctcgttgatgacgttcaggttca

SEQ ID NO: 4807991 - DNA, 25 bp, Homo sapien
atctcgcacctcagtgaagccctgg

SEQ ID NO: 4807992 - DNA, 25 bp, Homo sapien
tcgaagcgcgccttggcctgctcgt

SEQ ID NO: 4807993 - DNA, 25 bp, Homo sapien
tcagttcggatgacggcctgcatgg

SEQ ID NO: 4807994 - DNA, 25 bp, Homo sapien
gtacaccatgtggtacacggcgtcc

SEQ ID NO: 4807995 - DNA, 25 bp, Homo sapien
gctccttggaggtgataatttggtc

SEQ ID NO: 4807996 - DNA, 25 bp, Homo sapien
cgctcctgcggtttccccttcagcc

SEQ ID NO: 4807997 - DNA, 25 bp, Homo sapien
ggccctctaccttggagtcctcagg

SEQ ID NO: 4807998 - DNA, 25 bp, Homo sapien
ggcatctgtgaacgcagggccctct

SEQ ID NO: 4807999 - DNA, 25 bp, Homo sapien
tcggtacatgcggatggcatctgtg

SEQ ID NO: 4808000 - DNA, 25 bp, Homo sapien
caggtgccgtacagctccttggact

SEQ ID NO: 4808001 - DNA, 25 bp, Homo sapien
acacaggcacacagaggcatgaccc

SEQ ID NO: 4808002 - DNA, 25 bp, Homo sapien
gaggcatgaccctgtgaggactcag

SEQ ID NO: 4808003 - DNA, 25 bp, Homo sapien
agaaaagtacatttcttcttgaaag

SEQ ID NO: 4808004 - DNA, 25 bp, Homo sapien
gcacacagaggcatgaccctgtgag

SEQ ID NO: 4808005 - DNA, 25 bp, Homo sapien
aactttctcacagtccgcagggtgg

SEQ ID NO: 4808006 - DNA, 25 bp, Homo sapien
ctcacagtccgcagggtggaaggaa

SEQ ID NO: 4808007 - DNA, 25 bp, Homo sapien
cagcctccaagacggaggaagcaga

SEQ ID NO: 4808008 - DNA, 25 bp, Homo sapien
agagaactttctcacagtccgcagg

SEQ ID NO: 4808009 - DNA, 25 bp, Homo sapien
cgcgcataaggatgccagaggatga

SEQ ID NO: 4808010 - DNA, 25 bp, Homo sapien
tgccggatgcagtcctgcagcacag

SEQ ID NO: 4808011 - DNA, 25 bp, Homo sapien
gggcactgcccgactttgccgtggt

SEQ ID NO: 4808012 - DNA, 25 bp, Homo sapien
tcatgcagaagtagtagtgacgcgc

SEQ ID NO: 4808013 - DNA, 25 bp, Homo sapien
catccacagctctaagcctagttgg

SEQ ID NO: 4808014 - DNA, 25 bp, Homo sapien
tgctgacccacaggtttacgaggga

SEQ ID NO: 4808015 - DNA, 25 bp, Homo sapien
tagttggtctctccgcaaacatggg

SEQ ID NO: 4808016 - DNA, 25 bp, Homo sapien
tacgagggaaggtcactgaacatct

SEQ ID NO: 4808017 - DNA, 25 bp, Homo sapien
tgtagcctgcactgttgatgacggc

SEQ ID NO: 4808018 - DNA, 25 bp, Homo sapien
tattggtccacggacgtgaggattt

SEQ ID NO: 4808019 - DNA, 25 bp, Homo sapien
tgcactgttgatgacggctcgtggt

SEQ ID NO: 4808020 - DNA, 25 bp, Homo sapien
gacgtgaggattttgtagcctgcac

SEQ ID NO: 4808021 - DNA, 25 bp, Homo sapien
gaagacgatgcgctcgtccagtggc

SEQ ID NO: 4808022 - DNA, 25 bp, Homo sapien
ggcacgaggctgaagcggtttctcc

SEQ ID NO: 4808023 - DNA, 25 bp, Homo sapien
ttgttttcgtagagcaccagcccgt

SEQ ID NO: 4808024 - DNA, 25 bp, Homo sapien
gaggctgaagcggtttctccacttc

SEQ ID NO: 4808025 - DNA, 25 bp, Homo sapien
cgtgccctcaatctcatggcgcatg

SEQ ID NO: 4808026 - DNA, 25 bp, Homo sapien
gccacgccatactggtcttcataga

SEQ ID NO: 4808027 - DNA, 25 bp, Homo sapien
cgcatgctgttgaagagagccacgc

SEQ ID NO: 4808028 - DNA, 25 bp, Homo sapien
aggaactccgtcaggatcttcccgg

SEQ ID NO: 4808029 - DNA, 25 bp, Homo sapien
tctatcaacgtggtcggcaggatgg

SEQ ID NO: 4808030 - DNA, 25 bp, Homo sapien
cattctatcaacgtggtcggcagga

SEQ ID NO: 4808031 - DNA, 25 bp, Homo sapien
caggcattctatcaacgtggtcggc

SEQ ID NO: 4808032 - DNA, 25 bp, Homo sapien
cccacaggcattctatcaacgtggt

SEQ ID NO: 4808033 - DNA, 25 bp, Homo sapien
cagaggaagtaacccagagacgcag

SEQ ID NO: 4808034 - DNA, 25 bp, Homo sapien
agacgcagaagatgaggactcgggt

SEQ ID NO: 4808035 - DNA, 25 bp, Homo sapien
ggggtagccccgagcacattcttga

SEQ ID NO: 4808036 - DNA, 25 bp, Homo sapien
agcatggaaggaaccgccacgtgct

SEQ ID NO: 4808037 - DNA, 25 bp, Homo sapien
tgaggcatgcctgccgtctgggaac

SEQ ID NO: 4808038 - DNA, 25 bp, Homo sapien
gcaaatatttaaccagggctgggcc

SEQ ID NO: 4808039 - DNA, 25 bp, Homo sapien
gggaggaagtccattcccatcttga

SEQ ID NO: 4808040 - DNA, 25 bp, Homo sapien
cagtgattgtgtagacacgaccctc

SEQ ID NO: 4808041 - DNA, 25 bp, Homo sapien
tcacgcttcgaggaatacaggcagg

SEQ ID NO: 4808042 - DNA, 25 bp, Homo sapien
cacatggcttcgtgcctgcgggtct

SEQ ID NO: 4808043 - DNA, 25 bp, Homo sapien
tgaacagcacacctctaagatgggt

SEQ ID NO: 4808044 - DNA, 25 bp, Homo sapien
ctcaaggacaagaatgaagggctca

SEQ ID NO: 4808045 - DNA, 25 bp, Homo sapien
gagggtgacacatggttagtagcaa

SEQ ID NO: 4808046 - DNA, 25 bp, Homo sapien
gcaaggtcactctactaccagaggc

SEQ ID NO: 4808047 - DNA, 25 bp, Homo sapien
ccatctacagagctggactcccaga

SEQ ID NO: 4808048 - DNA, 25 bp, Homo sapien
agaggcaggagttcacccaaggcca

SEQ ID NO: 4808049 - DNA, 25 bp, Homo sapien
cagggccataggctggtgctcctct

SEQ ID NO: 4808050 - DNA, 25 bp, Homo sapien
acagccccatcccaccgtcctccag

SEQ ID NO: 4808051 - DNA, 25 bp, Homo sapien
caggaactcgctgaataccccaggg

SEQ ID NO: 4808052 - DNA, 25 bp, Homo sapien
gtcctccaggaactcgctgaatacc

SEQ ID NO: 4808053 - DNA, 25 bp, Homo sapien
ggcgccgggcgtcgtccaggtgcgt

SEQ ID NO: 4808054 - DNA, 25 bp, Homo sapien
cgccgggcgtcgtccaggtgcgtgg

SEQ ID NO: 4808055 - DNA, 25 bp, Homo sapien
tggcgccgggcgtcgtccaggtgcg

SEQ ID NO: 4808056 - DNA, 25 bp, Homo sapien
gcgccgggcgtcgtccaggtgcgtg

SEQ ID NO: 4808057 - DNA, 25 bp, Homo sapien
ccgcgctgctcaggcggacgccgct

SEQ ID NO: 4808058 - DNA, 25 bp, Homo sapien
tgtcgcggcccgatccggccgacgc

SEQ ID NO: 4808059 - DNA, 25 bp, Homo sapien
ggccaggaggtgtcgcggcccgatc

SEQ ID NO: 4808060 - DNA, 25 bp, Homo sapien
cgatccggccgacgccgccgctgtt

SEQ ID NO: 4808061 - DNA, 25 bp, Homo sapien
tggaggccattttgatgtccccttg

SEQ ID NO: 4808062 - DNA, 25 bp, Homo sapien
aactctctctactatatgttaagaa

SEQ ID NO: 4808063 - DNA, 25 bp, Homo sapien
caggaagtttgacatcagagaattt

SEQ ID NO: 4808064 - DNA, 25 bp, Homo sapien
gtcatcagcactatgaaggattcca

SEQ ID NO: 4808065 - DNA, 25 bp, Homo sapien
cctccagagtgagagccccaaaagg

SEQ ID NO: 4808066 - DNA, 25 bp, Homo sapien
tccagagtgagagccccaaaaggaa

SEQ ID NO: 4808067 - DNA, 25 bp, Homo sapien
agagtgagagccccaaaaggaaggg

SEQ ID NO: 4808068 - DNA, 25 bp, Homo sapien
cagagtgagagccccaaaaggaagg

SEQ ID NO: 4808069 - DNA, 25 bp, Homo sapien
gaagtcctagtgcttggtgcccagg

SEQ ID NO: 4808070 - DNA, 25 bp, Homo sapien
gggaatccgacctctcactttggga

SEQ ID NO: 4808071 - DNA, 25 bp, Homo sapien
tgtggccctagagactgaagtccta

SEQ ID NO: 4808072 - DNA, 25 bp, Homo sapien
caagggcttacacagtctgggcaaa

SEQ ID NO: 4808073 - DNA, 25 bp, Homo sapien
cacgtgacccgtgcgtaaatcgcag

SEQ ID NO: 4808074 - DNA, 25 bp, Homo sapien
ggacaagcttgtgataccgcgtgaa

SEQ ID NO: 4808075 - DNA, 25 bp, Homo sapien
cagggctctgcaacaggctccagtt

SEQ ID NO: 4808076 - DNA, 25 bp, Homo sapien
tgctgatactctcccaacgagctgt

SEQ ID NO: 4808077 - DNA, 25 bp, Homo sapien
tcctttctgccgctgggtctttgta

SEQ ID NO: 4808078 - DNA, 25 bp, Homo sapien
ggtgccttgctatccactcttacag

SEQ ID NO: 4808079 - DNA, 25 bp, Homo sapien
agtcactcaatgctgtaacaccttg

SEQ ID NO: 4808080 - DNA, 25 bp, Homo sapien
taagaagtcctggatcctggcatcc

SEQ ID NO: 4808081 - DNA, 25 bp, Homo sapien
gactgaagtaggacatgtagcctct

SEQ ID NO: 4808082 - DNA, 25 bp, Homo sapien
aaaattcctccttagttctcagcag

SEQ ID NO: 4808083 - DNA, 25 bp, Homo sapien
catagagagttgacacattaacgcc

SEQ ID NO: 4808084 - DNA, 25 bp, Homo sapien
aatggttcagaattcagatcctaga

SEQ ID NO: 4808085 - DNA, 25 bp, Homo sapien
atcggagccgggagactcgcgcagc

SEQ ID NO: 4808086 - DNA, 25 bp, Homo sapien
acgaggagatcggagccgggagact

SEQ ID NO: 4808087 - DNA, 25 bp, Homo sapien
gggtccgcaggcgtcgcgggacgag

SEQ ID NO: 4808088 - DNA, 25 bp, Homo sapien
tcgcgggacgaggagatcggagccg

SEQ ID NO: 4808089 - DNA, 25 bp, Homo sapien
tttgcaaaacggcatccacagtgct

SEQ ID NO: 4808090 - DNA, 25 bp, Homo sapien
tacttgtactcgagatgtttagggc

SEQ ID NO: 4808091 - DNA, 25 bp, Homo sapien
tgattctctcctatcgtagcgcgcg

SEQ ID NO: 4808092 - DNA, 25 bp, Homo sapien
cgcgcgctcgctgtggaatgctttt

SEQ ID NO: 4808093 - DNA, 25 bp, Homo sapien
tgtagattcccatatcatcccctag

SEQ ID NO: 4808094 - DNA, 25 bp, Homo sapien
aaatgtatccagacaatgctgacct

SEQ ID NO: 4808095 - DNA, 25 bp, Homo sapien
ccagatgagcttgtgccttgtggga

SEQ ID NO: 4808096 - DNA, 25 bp, Homo sapien
agcattcctgacctctacttgtaga

SEQ ID NO: 4808097 - DNA, 25 bp, Homo sapien
tctccactagccctggtttgagatt

SEQ ID NO: 4808098 - DNA, 25 bp, Homo sapien
ttctcccgcagttcaggtgaacctc

SEQ ID NO: 4808099 - DNA, 25 bp, Homo sapien
tcatctccactagccctggtttgag

SEQ ID NO: 4808100 - DNA, 25 bp, Homo sapien
cactagccctggtttgagatttttt

SEQ ID NO: 4808101 - DNA, 25 bp, Homo sapien
ttacaatacgcggtctctgcaaggt

SEQ ID NO: 4808102 - DNA, 25 bp, Homo sapien
tatctcccaggcctattgcgacggg

SEQ ID NO: 4808103 - DNA, 25 bp, Homo sapien
gagtgaattagaaacgcagctgccc

SEQ ID NO: 4808104 - DNA, 25 bp, Homo sapien
cagaggtcagtggattctcccaggg

SEQ ID NO: 4808105 - DNA, 25 bp, Homo sapien
gccgctgcattctcgtgttcagtga

SEQ ID NO: 4808106 - DNA, 25 bp, Homo sapien
taaccctgggtgacgtgcacattgc

SEQ ID NO: 4808107 - DNA, 25 bp, Homo sapien
ttgtgaccttgtacataaccctggg

SEQ ID NO: 4808108 - DNA, 25 bp, Homo sapien
gagaagctcatgtgcaattggtgca

SEQ ID NO: 4808109 - DNA, 25 bp, Homo sapien
ccacagtgctgtgatcccgagggaa

SEQ ID NO: 4808110 - DNA, 25 bp, Homo sapien
tctcaaagtgctgtacgcgagctcg

SEQ ID NO: 4808111 - DNA, 25 bp, Homo sapien
ggaccaaacagtgctcatgcttcag

SEQ ID NO: 4808112 - DNA, 25 bp, Homo sapien
ggtgagaagcaaactcccgctggaa

SEQ ID NO: 4808113 - DNA, 25 bp, Homo sapien
cttttctaacgcaggcactgcaggg

SEQ ID NO: 4808114 - DNA, 25 bp, Homo sapien
gaatgcttttctaacgcaggcactg

SEQ ID NO: 4808115 - DNA, 25 bp, Homo sapien
cacctcagccttagaatgcttttct

SEQ ID NO: 4808116 - DNA, 25 bp, Homo sapien
ccttagaatgcttttctaacgcagg

SEQ ID NO: 4808117 - DNA, 25 bp, Homo sapien
tgttgacgatgagtccaagccaagc

SEQ ID NO: 4808118 - DNA, 25 bp, Homo sapien
ctgctgttgacgatgagtccaagcc

SEQ ID NO: 4808119 - DNA, 25 bp, Homo sapien
tctttccacatgatcctgacaggtg

SEQ ID NO: 4808120 - DNA, 25 bp, Homo sapien
cagtgagggctcagccattgatgat

SEQ ID NO: 4808121 - DNA, 25 bp, Homo sapien
tcccttgagctgagatatcaggtag

SEQ ID NO: 4808122 - DNA, 25 bp, Homo sapien
ggacatgttactaggttttgaccac

SEQ ID NO: 4808123 - DNA, 25 bp, Homo sapien
gacaagggccaacttacaggagcac

SEQ ID NO: 4808124 - DNA, 25 bp, Homo sapien
gaaaacaccaaggttactggatgga

SEQ ID NO: 4808125 - DNA, 25 bp, Homo sapien
cctagcccagagaatatatacagtc

SEQ ID NO: 4808126 - DNA, 25 bp, Homo sapien
gtcagatggcattagaacctagccc

SEQ ID NO: 4808127 - DNA, 25 bp, Homo sapien
taattgtcccagcaatcctacgaag

SEQ ID NO: 4808128 - DNA, 25 bp, Homo sapien
gatgaagtgtcgtgaccaaggtccc

SEQ ID NO: 4808129 - DNA, 25 bp, Homo sapien
tgggccagaaacctggctcgccgaa

SEQ ID NO: 4808130 - DNA, 25 bp, Homo sapien
tgctgtcatatatcacccgtgtggg

SEQ ID NO: 4808131 - DNA, 25 bp, Homo sapien
actgtggccacgagacctcagaagg

SEQ ID NO: 4808132 - DNA, 25 bp, Homo sapien
cccaaggagaggtaagcaagtggcc

SEQ ID NO: 4808133 - DNA, 25 bp, Homo sapien
tacgtcccaagtaggacacagagag

SEQ ID NO: 4808134 - DNA, 25 bp, Homo sapien
taatcttacagatgcgtgcccctgg

SEQ ID NO: 4808135 - DNA, 25 bp, Homo sapien
ctactccagaaatggactggtccag

SEQ ID NO: 4808136 - DNA, 25 bp, Homo sapien
cacagagagaagaacctactccaga

SEQ ID NO: 4808137 - DNA, 25 bp, Homo sapien
tggtgggcactacagtcaggcaggc

SEQ ID NO: 4808138 - DNA, 25 bp, Homo sapien
cactttaatccgcaggcagcctgga

SEQ ID NO: 4808139 - DNA, 25 bp, Homo sapien
cagtctagaggagatttgtataaaa

SEQ ID NO: 4808140 - DNA, 25 bp, Homo sapien
gataccaaggctggcgtggcagctc

SEQ ID NO: 4808141 - DNA, 25 bp, Homo sapien
gcttcgctcacggatgtggtccaag

SEQ ID NO: 4808142 - DNA, 25 bp, Homo sapien
gtccaagatcaggtcggtggctcga

SEQ ID NO: 4808143 - DNA, 25 bp, Homo sapien
ggtcggtggctcgatccagcaacag

SEQ ID NO: 4808144 - DNA, 25 bp, Homo sapien
gagggcccctggcttcgctcacgga

SEQ ID NO: 4808145 - DNA, 25 bp, Homo sapien
ccgggcgcccgatacccacccgcag

SEQ ID NO: 4808146 - DNA, 25 bp, Homo sapien
ggcctgaaccgcctcagggtgcgcc

SEQ ID NO: 4808147 - DNA, 25 bp, Homo sapien
tgaaccgcctcagggtgcgccgggc

SEQ ID NO: 4808148 - DNA, 25 bp, Homo sapien
ctgaaccgcctcagggtgcgccggg

SEQ ID NO: 4808149 - DNA, 25 bp, Homo sapien
aatgcaggaacggactccattgtgg

SEQ ID NO: 4808150 - DNA, 25 bp, Homo sapien
tgcaggaacggactccattgtggcc

SEQ ID NO: 4808151 - DNA, 25 bp, Homo sapien
gcaggaacggactccattgtggccc

SEQ ID NO: 4808152 - DNA, 25 bp, Homo sapien
taatgcaggaacggactccattgtg

SEQ ID NO: 4808153 - DNA, 25 bp, Homo sapien
caggtagacttcctcggcagtcagc

SEQ ID NO: 4808154 - DNA, 25 bp, Homo sapien
agacttcctcggcagtcagcccaaa

SEQ ID NO: 4808155 - DNA, 25 bp, Homo sapien
cttgtccagctcatcatgcaccagg

SEQ ID NO: 4808156 - DNA, 25 bp, Homo sapien
cagctcatcatgcaccaggtagact

SEQ ID NO: 4808157 - DNA, 25 bp, Homo sapien
tcataagccgccgtggccggagcag

SEQ ID NO: 4808158 - DNA, 25 bp, Homo sapien
ggcacagtgccggtcgcgcgtccaa

SEQ ID NO: 4808159 - DNA, 25 bp, Homo sapien
ccggagcaggaccagttgggcatcc

SEQ ID NO: 4808160 - DNA, 25 bp, Homo sapien
cacgctgcgcccgttggcgttcata

SEQ ID NO: 4808161 - DNA, 25 bp, Homo sapien
ctcggctcccgggacataatggccg

SEQ ID NO: 4808162 - DNA, 25 bp, Homo sapien
cccgggacataatggccgaactgaa

SEQ ID NO: 4808163 - DNA, 25 bp, Homo sapien
gggcactcggctcccgggacataat

SEQ ID NO: 4808164 - DNA, 25 bp, Homo sapien
cataatggccgaactgaagctaggg

SEQ ID NO: 4808165 - DNA, 25 bp, Homo sapien
tccaaaacacatcggctcatggctc

SEQ ID NO: 4808166 - DNA, 25 bp, Homo sapien
gggcgaggctccaaaacacatcggc

SEQ ID NO: 4808167 - DNA, 25 bp, Homo sapien
gaggctccaaaacacatcggctcat

SEQ ID NO: 4808168 - DNA, 25 bp, Homo sapien
atggctctactcagccgctgtccgg

SEQ ID NO: 4808169 - DNA, 25 bp, Homo sapien
aaagatccttgtaaggctcggcggc

SEQ ID NO: 4808170 - DNA, 25 bp, Homo sapien
ccttcgggacttgtgtgggacgctc

SEQ ID NO: 4808171 - DNA, 25 bp, Homo sapien
tgatggtgcctagcaacgtcagggc

SEQ ID NO: 4808172 - DNA, 25 bp, Homo sapien
tggcaagtcctttccccgctgtagg

SEQ ID NO: 4808173 - DNA, 25 bp, Homo sapien
tgttgtaagcatgaggaccctgatc

SEQ ID NO: 4808174 - DNA, 25 bp, Homo sapien
cacgggacatcccaaagccatgggt

SEQ ID NO: 4808175 - DNA, 25 bp, Homo sapien
tgatccctgaccttgaccacaggag

SEQ ID NO: 4808176 - DNA, 25 bp, Homo sapien
gcagcacatctttgggaccagccac

SEQ ID NO: 4808177 - DNA, 25 bp, Homo sapien
gaaatgttgccttagacaaactggc

SEQ ID NO: 4808178 - DNA, 25 bp, Homo sapien
tgcccagacgcccagaaaactagag

SEQ ID NO: 4808179 - DNA, 25 bp, Homo sapien
ggctccagactccttaaaatgctca

SEQ ID NO: 4808180 - DNA, 25 bp, Homo sapien
aaaactagagaggacggagactgcg

SEQ ID NO: 4808181 - DNA, 25 bp, Homo sapien
aacctggcctttgccgaggcggact

SEQ ID NO: 4808182 - DNA, 25 bp, Homo sapien
gcctccggaccctagattgcttctt

SEQ ID NO: 4808183 - DNA, 25 bp, Homo sapien
agggcgccaacacgcgcatgggcct

SEQ ID NO: 4808184 - DNA, 25 bp, Homo sapien
tgagccctcaggacgagggcgccaa

SEQ ID NO: 4808185 - DNA, 25 bp, Homo sapien
aaccaggcccaagtggcagcttgag

SEQ ID NO: 4808186 - DNA, 25 bp, Homo sapien
cgttcatctcacttggtgctctggg

SEQ ID NO: 4808187 - DNA, 25 bp, Homo sapien
agcttgagtccctccatttctggaa

SEQ ID NO: 4808188 - DNA, 25 bp, Homo sapien
gaaggctccacctggcttgatatgg

SEQ ID NO: 4808189 - DNA, 25 bp, Homo sapien
aaggcgattcgggaggccacggtct

SEQ ID NO: 4808190 - DNA, 25 bp, Homo sapien
gaggaagaaggcgattcgggaggcc

SEQ ID NO: 4808191 - DNA, 25 bp, Homo sapien
tcttgcagccgttggaggagaagag

SEQ ID NO: 4808192 - DNA, 25 bp, Homo sapien
ttcgggaggccacggtcttgcagcc

SEQ ID NO: 4808193 - DNA, 25 bp, Homo sapien
ggcaccactgcgtctaggaggcgct

SEQ ID NO: 4808194 - DNA, 25 bp, Homo sapien
gctgggccagctcgttgagcacgca

SEQ ID NO: 4808195 - DNA, 25 bp, Homo sapien
tctaggaggcgctcttccatgatgc

SEQ ID NO: 4808196 - DNA, 25 bp, Homo sapien
tcgttgagcacgcagtgccggacgt

SEQ ID NO: 4808197 - DNA, 25 bp, Homo sapien
agaactgccgggtcagtgggcaaag

SEQ ID NO: 4808198 - DNA, 25 bp, Homo sapien
ttcacaagaggggagaagccggccc

SEQ ID NO: 4808199 - DNA, 25 bp, Homo sapien
ggggctgtaaggctcacccaaagtc

SEQ ID NO: 4808200 - DNA, 25 bp, Homo sapien
aactgccgggtcagtgggcaaagca

SEQ ID NO: 4808201 - DNA, 25 bp, Homo sapien
cgcgggagatgaccggctccagctc

SEQ ID NO: 4808202 - DNA, 25 bp, Homo sapien
tgcaggaggatctcctcgcggtccc

SEQ ID NO: 4808203 - DNA, 25 bp, Homo sapien
gttgatctgcttgccacccgtgttg

SEQ ID NO: 4808204 - DNA, 25 bp, Homo sapien
ggtgcgggttgtccagcaccgcgcg

SEQ ID NO: 4808205 - DNA, 25 bp, Homo sapien
tattggccccgctgttcagaagcag

SEQ ID NO: 4808206 - DNA, 25 bp, Homo sapien
gctgggactaaaggacaagaactct

SEQ ID NO: 4808207 - DNA, 25 bp, Homo sapien
cctgaggaaacacagcgaggattct

SEQ ID NO: 4808208 - DNA, 25 bp, Homo sapien
actcagatgaggactagcgcagggc

SEQ ID NO: 4808209 - DNA, 25 bp, Homo sapien
gcggaatgacaatgtcatctctgag

SEQ ID NO: 4808210 - DNA, 25 bp, Homo sapien
tgtgcccactgcaaagccgggcccc

SEQ ID NO: 4808211 - DNA, 25 bp, Homo sapien
ggctaaggctgtagagctgaacctc

SEQ ID NO: 4808212 - DNA, 25 bp, Homo sapien
tcaaccaggcggaatgacaatgtca

SEQ ID NO: 4808213 - DNA, 25 bp, Homo sapien
cggccacaggcagtgaggttccctt

SEQ ID NO: 4808214 - DNA, 25 bp, Homo sapien
tgaggttcccttggacccagctctt

SEQ ID NO: 4808215 - DNA, 25 bp, Homo sapien
tgcggtaattggtcccgtataccac

SEQ ID NO: 4808216 - DNA, 25 bp, Homo sapien
tgtccatctcatcgaagaggaagag

SEQ ID NO: 4808217 - DNA, 25 bp, Homo sapien
tcaggacttactccctagggtggca

SEQ ID NO: 4808218 - DNA, 25 bp, Homo sapien
ccaagttctgtgcaggatgggtcct

SEQ ID NO: 4808219 - DNA, 25 bp, Homo sapien
ggtgggtaccctgcaatcaacaaca

SEQ ID NO: 4808220 - DNA, 25 bp, Homo sapien
gcatgtaggtactgccagggttcct

SEQ ID NO: 4808221 - DNA, 25 bp, Homo sapien
ccttggccagatgctggccggccag

SEQ ID NO: 4808222 - DNA, 25 bp, Homo sapien
ccctggaagaggtagtgcgccagca

SEQ ID NO: 4808223 - DNA, 25 bp, Homo sapien
gacataggatttgccggtgccggtc

SEQ ID NO: 4808224 - DNA, 25 bp, Homo sapien
ctgggtcccgcacaaaggccttcag

SEQ ID NO: 4808225 - DNA, 25 bp, Homo sapien
tatgcacatggcacgcaaaccttgg

SEQ ID NO: 4808226 - DNA, 25 bp, Homo sapien
gaaaagagccaccttcgggcctgat

SEQ ID NO: 4808227 - DNA, 25 bp, Homo sapien
tacgtttgtccaagctgcctatgca

SEQ ID NO: 4808228 - DNA, 25 bp, Homo sapien
caggcggtcctctagattgcactca

SEQ ID NO: 4808229 - DNA, 25 bp, Homo sapien
ggccggaagtcgcattcgcaaaagg

SEQ ID NO: 4808230 - DNA, 25 bp, Homo sapien
gcattcgcaaaaggcgcccaaggtg

SEQ ID NO: 4808231 - DNA, 25 bp, Homo sapien
aaaaggcgcccaaggtgcagcgcag

SEQ ID NO: 4808232 - DNA, 25 bp, Homo sapien
caagtcgggccggaagtcgcattcg

SEQ ID NO: 4808233 - DNA, 25 bp, Homo sapien
ccgggtgaggcccgagctcgttgtg

SEQ ID NO: 4808234 - DNA, 25 bp, Homo sapien
ggcccgagctcgttgtggggcagtc

SEQ ID NO: 4808235 - DNA, 25 bp, Homo sapien
gcccgagctcgttgtggggcagtca

SEQ ID NO: 4808236 - DNA, 25 bp, Homo sapien
gaggcccgagctcgttgtggggcag

SEQ ID NO: 4808237 - DNA, 25 bp, Homo sapien
tagctatttatctctcccgctggtc

SEQ ID NO: 4808238 - DNA, 25 bp, Homo sapien
tggactgtcccaggtgctaaagaag

SEQ ID NO: 4808239 - DNA, 25 bp, Homo sapien
gtgggaactgttgccatggcatcca

SEQ ID NO: 4808240 - DNA, 25 bp, Homo sapien
tcatatttgctgtaaccctggctcc

SEQ ID NO: 4808241 - DNA, 25 bp, Homo sapien
cctttcgcctgagaaaaggtgcttc

SEQ ID NO: 4808242 - DNA, 25 bp, Homo sapien
tctacctttcgcctgagaaaaggtg

SEQ ID NO: 4808243 - DNA, 25 bp, Homo sapien
tacctttcgcctgagaaaaggtgct

SEQ ID NO: 4808244 - DNA, 25 bp, Homo sapien
acctttcgcctgagaaaaggtgctt

SEQ ID NO: 4808245 - DNA, 25 bp, Homo sapien
cattctcgggttgatcacagtgtcc

SEQ ID NO: 4808246 - DNA, 25 bp, Homo sapien
gggaaagttgtgtgcccctctgccc

SEQ ID NO: 4808247 - DNA, 25 bp, Homo sapien
tgcctcccatggctcgaaaacaggg

SEQ ID NO: 4808248 - DNA, 25 bp, Homo sapien
ttcttcctcaatggagacctggtga

SEQ ID NO: 4808249 - DNA, 25 bp, Homo sapien
tctggaactccgtgctgaacacctc

SEQ ID NO: 4808250 - DNA, 25 bp, Homo sapien
tcacagctcgctggagcggacagca

SEQ ID NO: 4808251 - DNA, 25 bp, Homo sapien
cagagaaggcgcatctggaactccg

SEQ ID NO: 4808252 - DNA, 25 bp, Homo sapien
tgtcgaacttctcatagcgccgggc

SEQ ID NO: 4808253 - DNA, 25 bp, Homo sapien
gacttcagcattggtgtggtacagg

SEQ ID NO: 4808254 - DNA, 25 bp, Homo sapien
gtgcgggcggcctccaggtgagcca

SEQ ID NO: 4808255 - DNA, 25 bp, Homo sapien
cacatgaggaaacgtggtgttgctc

SEQ ID NO: 4808256 - DNA, 25 bp, Homo sapien
tctggtggggccgagtcacactcca

SEQ ID NO: 4808257 - DNA, 25 bp, Homo sapien
tctgtgtgtcgctgccgcagggtca

SEQ ID NO: 4808258 - DNA, 25 bp, Homo sapien
gcagggtcacccatgtctgctccag

SEQ ID NO: 4808259 - DNA, 25 bp, Homo sapien
gagaaaaggcttgagcttcttctcg

SEQ ID NO: 4808260 - DNA, 25 bp, Homo sapien
gcttcttctcgtacaggatggcacc

SEQ ID NO: 4808261 - DNA, 25 bp, Homo sapien
ctcggccgccagctgaatggtcttg

SEQ ID NO: 4808262 - DNA, 25 bp, Homo sapien
tgaccgccgcgaagctgaacatgtt

SEQ ID NO: 4808263 - DNA, 25 bp, Homo sapien
gagccggtgcagcccaggatgtcca

SEQ ID NO: 4808264 - DNA, 25 bp, Homo sapien
ccaggatgtccacggccagcatgat

SEQ ID NO: 4808265 - DNA, 25 bp, Homo sapien
cgcggccagagcgtggaaagcaagg

SEQ ID NO: 4808266 - DNA, 25 bp, Homo sapien
tctgattggtcagcataaatcaggg

SEQ ID NO: 4808267 - DNA, 25 bp, Homo sapien
gcggccagagcgtggaaagcaaggc

SEQ ID NO: 4808268 - DNA, 25 bp, Homo sapien
aaggcctcgggcttctgattggtca

SEQ ID NO: 4808269 - DNA, 25 bp, Homo sapien
atcagggcttgcgattggtcaatgg

SEQ ID NO: 4808270 - DNA, 25 bp, Homo sapien
tttagagcgggttatcagggcttgc

SEQ ID NO: 4808271 - DNA, 25 bp, Homo sapien
gcgagtccccgggtgccggcgctgt

SEQ ID NO: 4808272 - DNA, 25 bp, Homo sapien
tgaggctgtgattggccaacccgcc

SEQ ID NO: 4808273 - DNA, 25 bp, Homo sapien
gagggtgagcagttccatgccccag

SEQ ID NO: 4808274 - DNA, 25 bp, Homo sapien
cagcggactcccattagggtctgca

SEQ ID NO: 4808275 - DNA, 25 bp, Homo sapien
tggtaacgcccagtatcctagcaac

SEQ ID NO: 4808276 - DNA, 25 bp, Homo sapien
aggtctaggcgtagctgccggccat

SEQ ID NO: 4808277 - DNA, 25 bp, Homo sapien
cagagtccgggtcactgtagctgct

SEQ ID NO: 4808278 - DNA, 25 bp, Homo sapien
ggcccttgtctgactccccatgggt

SEQ ID NO: 4808279 - DNA, 25 bp, Homo sapien
gtccaccttggtgacatgccgggcc

SEQ ID NO: 4808280 - DNA, 25 bp, Homo sapien
gggactgtgaaggtcttgccccagt

SEQ ID NO: 4808281 - DNA, 25 bp, Homo sapien
ctcactggaacggcgggcgacaggg

SEQ ID NO: 4808282 - DNA, 25 bp, Homo sapien
gggctcactggaacggcgggcgaca

SEQ ID NO: 4808283 - DNA, 25 bp, Homo sapien
ggctcactggaacggcgggcgacag

SEQ ID NO: 4808284 - DNA, 25 bp, Homo sapien
tcactggaacggcgggcgacagggg

SEQ ID NO: 4808285 - DNA, 25 bp, Homo sapien
gctgcaggggcggcatggacacggg

SEQ ID NO: 4808286 - DNA, 25 bp, Homo sapien
gcaggggcggcatggacacgggtta

SEQ ID NO: 4808287 - DNA, 25 bp, Homo sapien
ggggctgcaggggcggcatggacac

SEQ ID NO: 4808288 - DNA, 25 bp, Homo sapien
gaaggggctgcaggggcggcatgga

SEQ ID NO: 4808289 - DNA, 25 bp, Homo sapien
gagagaggccccgttatagcagctc

SEQ ID NO: 4808290 - DNA, 25 bp, Homo sapien
gagagagaggccccgttatagcagc

SEQ ID NO: 4808291 - DNA, 25 bp, Homo sapien
agagagaggccccgttatagcagct

SEQ ID NO: 4808292 - DNA, 25 bp, Homo sapien
tagagagagaggccccgttatagca

SEQ ID NO: 4808293 - DNA, 25 bp, Homo sapien
tgagggcacagctgcggatggagtc

SEQ ID NO: 4808294 - DNA, 25 bp, Homo sapien
caggtctgggatctggtccatgctg

SEQ ID NO: 4808295 - DNA, 25 bp, Homo sapien
tagggctctcggagatgggcgacat

SEQ ID NO: 4808296 - DNA, 25 bp, Homo sapien
gagatgggcgacatgggtgagtgca

SEQ ID NO: 4808297 - DNA, 25 bp, Homo sapien
tagtcaactacaaccattctctggg

SEQ ID NO: 4808298 - DNA, 25 bp, Homo sapien
acaggtgcccgttaccaagcgtggc

SEQ ID NO: 4808299 - DNA, 25 bp, Homo sapien
taggccagaattcaactaccccatg

SEQ ID NO: 4808300 - DNA, 25 bp, Homo sapien
taccccatgaggtgcctttgtgcaa

SEQ ID NO: 4808301 - DNA, 25 bp, Homo sapien
ttgtcagcagtgagcccatcggtca

SEQ ID NO: 4808302 - DNA, 25 bp, Homo sapien
tgcgttgtaccaaggtctccgagac

SEQ ID NO: 4808303 - DNA, 25 bp, Homo sapien
tcccggatgaggaagtcgccgttgc

SEQ ID NO: 4808304 - DNA, 25 bp, Homo sapien
ttcaccgggcagtagatgatggcac

SEQ ID NO: 4808305 - DNA, 25 bp, Homo sapien
tggctgcggagatccgtgctgctga

SEQ ID NO: 4808306 - DNA, 25 bp, Homo sapien
cctcctccaattccttgtggagttt

SEQ ID NO: 4808307 - DNA, 25 bp, Homo sapien
ccttgtggagtttctctggcgatga

SEQ ID NO: 4808308 - DNA, 25 bp, Homo sapien
tctctggcgatgagtccaggatgta

SEQ ID NO: 4808309 - DNA, 25 bp, Homo sapien
cagctgggctgggagagacccgcgc

SEQ ID NO: 4808310 - DNA, 25 bp, Homo sapien
gcggcgccgtcctgcactgcccggc

SEQ ID NO: 4808311 - DNA, 25 bp, Homo sapien
gcgccccaggcatgtccaagcccac

SEQ ID NO: 4808312 - DNA, 25 bp, Homo sapien
cgccgcggcgccgtcctgcactgcc

SEQ ID NO: 4808313 - DNA, 25 bp, Homo sapien
acctgcacgaaggagccgcggtaga

SEQ ID NO: 4808314 - DNA, 25 bp, Homo sapien
ggcactccacaggctgcaccgctcg

SEQ ID NO: 4808315 - DNA, 25 bp, Homo sapien
ctgcacgaaggagccgcggtagaag

SEQ ID NO: 4808316 - DNA, 25 bp, Homo sapien
cactccacaggctgcaccgctcggt

SEQ ID NO: 4808317 - DNA, 25 bp, Homo sapien
tgcgcgtgcctctcagcggcgcgat

SEQ ID NO: 4808318 - DNA, 25 bp, Homo sapien
gcgtgcctctcagcggcgcgattac

SEQ ID NO: 4808319 - DNA, 25 bp, Homo sapien
gcgcagggaccaaccggctaggcac

SEQ ID NO: 4808320 - DNA, 25 bp, Homo sapien
aaccggctaggcaccggctgcgcgt

SEQ ID NO: 4808321 - DNA, 25 bp, Homo sapien
ctcatcgccttgtcgggggaggagc

SEQ ID NO: 4808322 - DNA, 25 bp, Homo sapien
tcatcgccttgtcgggggaggagcg

SEQ ID NO: 4808323 - DNA, 25 bp, Homo sapien
ggagaccccaccctccagccggcca

SEQ ID NO: 4808324 - DNA, 25 bp, Homo sapien
cccaccctccagccggccaggggag

SEQ ID NO: 4808325 - DNA, 25 bp, Homo sapien
tcctactgtggcctcccagttgctg

SEQ ID NO: 4808326 - DNA, 25 bp, Homo sapien
cagttctactgagcaggtattattt

SEQ ID NO: 4808327 - DNA, 25 bp, Homo sapien
tgtttaatcagttctactgagcagg

SEQ ID NO: 4808328 - DNA, 25 bp, Homo sapien
gactttgtcctttggcagactgttt

SEQ ID NO: 4808329 - DNA, 25 bp, Homo sapien
tgcaaaaaacaagcgcaaagcacta

SEQ ID NO: 4808330 - DNA, 25 bp, Homo sapien
tcttcctcataatatcaggttggtg

SEQ ID NO: 4808331 - DNA, 25 bp, Homo sapien
catggaccgggagccctttgaattc

SEQ ID NO: 4808332 - DNA, 25 bp, Homo sapien
ctatagtcctggcatcaaacttggg

SEQ ID NO: 4808333 - DNA, 25 bp, Homo sapien
tcacatagtcgctgccagcctctgg

SEQ ID NO: 4808334 - DNA, 25 bp, Homo sapien
ttcacatagtcgctgccagcctctg

SEQ ID NO: 4808335 - DNA, 25 bp, Homo sapien
cttcacatagtcgctgccagcctct

SEQ ID NO: 4808336 - DNA, 25 bp, Homo sapien
tgagcctgcatttcgtatctgtaaa

SEQ ID NO: 4808337 - DNA, 25 bp, Homo sapien
taatgacagcctctgcctaatggca

SEQ ID NO: 4808338 - DNA, 25 bp, Homo sapien
taatggcattgactcaaggacccag

SEQ ID NO: 4808339 - DNA, 25 bp, Homo sapien
gacccagggcgtgatgaacattaca

SEQ ID NO: 4808340 - DNA, 25 bp, Homo sapien
cctagggtagagtgacccagtcacg

SEQ ID NO: 4808341 - DNA, 25 bp, Homo sapien
cactgccggtgctagagggctacag

SEQ ID NO: 4808342 - DNA, 25 bp, Homo sapien
gctagagggctacagaattgattct

SEQ ID NO: 4808343 - DNA, 25 bp, Homo sapien
tgcccagctgactgcggagccactg

SEQ ID NO: 4808344 - DNA, 25 bp, Homo sapien
gcagcctggacctgcccctccaacc

SEQ ID NO: 4808345 - DNA, 25 bp, Homo sapien
tgcccctccaaccccagacttggaa

SEQ ID NO: 4808346 - DNA, 25 bp, Homo sapien
aggcagcctggacctgcccctccaa

SEQ ID NO: 4808347 - DNA, 25 bp, Homo sapien
cctgcccctccaaccccagacttgg

SEQ ID NO: 4808348 - DNA, 25 bp, Homo sapien
gacggtaccatgattatgccagaaa

SEQ ID NO: 4808349 - DNA, 25 bp, Homo sapien
caacctaagcatttgatggcaaacg

SEQ ID NO: 4808350 - DNA, 25 bp, Homo sapien
gacgcctccccttggatatctgaag

SEQ ID NO: 4808351 - DNA, 25 bp, Homo sapien
tcagcggctcccatctctagaagaa

SEQ ID NO: 4808352 - DNA, 25 bp, Homo sapien
ggtggcgctacaacactctgacatg

SEQ ID NO: 4808353 - DNA, 25 bp, Homo sapien
gacagggtgcctgcacaagagatca

SEQ ID NO: 4808354 - DNA, 25 bp, Homo sapien
tgttcaaaggaaggccagatcacag

SEQ ID NO: 4808355 - DNA, 25 bp, Homo sapien
ggtcctggaaacagccttgcacact

SEQ ID NO: 4808356 - DNA, 25 bp, Homo sapien
tcctctcatgcagggactagctcct

SEQ ID NO: 4808357 - DNA, 25 bp, Homo sapien
gacttagcacgcatttcctctcatg

SEQ ID NO: 4808358 - DNA, 25 bp, Homo sapien
cagggactagctcctctcactagaa

SEQ ID NO: 4808359 - DNA, 25 bp, Homo sapien
ttcagttcttcactaaaatgtcccc

SEQ ID NO: 4808360 - DNA, 25 bp, Homo sapien
tccaccgtctggagccctcagtttt

SEQ ID NO: 4808361 - DNA, 25 bp, Homo sapien
gagcttctcagtccttaaaggccct

SEQ ID NO: 4808362 - DNA, 25 bp, Homo sapien
ctcaggacgggcgacagccttgtga

SEQ ID NO: 4808363 - DNA, 25 bp, Homo sapien
attccctgccgggaaggctcttggc

SEQ ID NO: 4808364 - DNA, 25 bp, Homo sapien
ggggcaccttcggcccacagcagtc

SEQ ID NO: 4808365 - DNA, 25 bp, Homo sapien
cggggcaccttcggcccacagcagt

SEQ ID NO: 4808366 - DNA, 25 bp, Homo sapien
gaccccagcgcggggcaccttcggc

SEQ ID NO: 4808367 - DNA, 25 bp, Homo sapien
ctcctgcctttctcgggccactgag

SEQ ID NO: 4808368 - DNA, 25 bp, Homo sapien
ggagactgacctgtagaccacgccc

SEQ ID NO: 4808369 - DNA, 25 bp, Homo sapien
acctcctaaacccagcggctcctgc

SEQ ID NO: 4808370 - DNA, 25 bp, Homo sapien
gggcggagactgacctgtagaccac

SEQ ID NO: 4808371 - DNA, 25 bp, Homo sapien
taatgtggtacataagtgtgcagcc

SEQ ID NO: 4808372 - DNA, 25 bp, Homo sapien
ttagcaaatatgcaccctgactgag

SEQ ID NO: 4808373 - DNA, 25 bp, Homo sapien
gaggctaactgggactttgaaggca

SEQ ID NO: 4808374 - DNA, 25 bp, Homo sapien
tacctggtctacagtaagcacctgg

SEQ ID NO: 4808375 - DNA, 25 bp, Homo sapien
tttctgagtgcacgtccctgggagg

SEQ ID NO: 4808376 - DNA, 25 bp, Homo sapien
ttctgagtgcacgtccctgggaggt

SEQ ID NO: 4808377 - DNA, 25 bp, Homo sapien
ctttctgagtgcacgtccctgggag

SEQ ID NO: 4808378 - DNA, 25 bp, Homo sapien
tctgatggggtctacctccactgct

SEQ ID NO: 4808379 - DNA, 25 bp, Homo sapien
tgctgaagggttgggttccattgct

SEQ ID NO: 4808380 - DNA, 25 bp, Homo sapien
tacgtctcctgtggggacctcaggc

SEQ ID NO: 4808381 - DNA, 25 bp, Homo sapien
agttgggcttgggacccgcctcctg

SEQ ID NO: 4808382 - DNA, 25 bp, Homo sapien
tcctgcgtggcttcaaaggtgtcag

SEQ ID NO: 4808383 - DNA, 25 bp, Homo sapien
tacatgtcactggagcgggcatagg

SEQ ID NO: 4808384 - DNA, 25 bp, Homo sapien
gatcgtctcagagtgaaggaccgag

SEQ ID NO: 4808385 - DNA, 25 bp, Homo sapien
tccaaatgggactgcctactgatgg

SEQ ID NO: 4808386 - DNA, 25 bp, Homo sapien
ttgctggtcttcttggtcccctctg

SEQ ID NO: 4808387 - DNA, 25 bp, Homo sapien
gctggtcttcttggtcccctctgtc

SEQ ID NO: 4808388 - DNA, 25 bp, Homo sapien
ttttgctggtcttcttggtcccctc

SEQ ID NO: 4808389 - DNA, 25 bp, Homo sapien
tggtcttcttggtcccctctgtcat

SEQ ID NO: 4808390 - DNA, 25 bp, Homo sapien
ggccagcttgcgagtggccactcaa

SEQ ID NO: 4808391 - DNA, 25 bp, Homo sapien
ccactcaaggctcgggacatcaaag

SEQ ID NO: 4808392 - DNA, 25 bp, Homo sapien
cccttggccagcttgcgagtggcca

SEQ ID NO: 4808393 - DNA, 25 bp, Homo sapien
cgagtggccactcaaggctcgggac

SEQ ID NO: 4808394 - DNA, 25 bp, Homo sapien
caggaccagcggctctcttggggca

SEQ ID NO: 4808395 - DNA, 25 bp, Homo sapien
ttaaatggcagcaggaccagcggct

SEQ ID NO: 4808396 - DNA, 25 bp, Homo sapien
tggcagcaggaccagcggctctctt

SEQ ID NO: 4808397 - DNA, 25 bp, Homo sapien
tctctgttaaatggcagcaggacca

SEQ ID NO: 4808398 - DNA, 25 bp, Homo sapien
agtgccctttttgtgatgaagtttc

SEQ ID NO: 4808399 - DNA, 25 bp, Homo sapien
atggcaaagcagtacgactcggtgg

SEQ ID NO: 4808400 - DNA, 25 bp, Homo sapien
acgactcggtggagtgccctttttg

SEQ ID NO: 4808401 - DNA, 25 bp, Homo sapien
cggcgcgttggaggcggccatggca

SEQ ID NO: 4808402 - DNA, 25 bp, Homo sapien
tgggctcgcccaccagtgacttttt

SEQ ID NO: 4808403 - DNA, 25 bp, Homo sapien
gctgtttttggcctaaccctcagaa

SEQ ID NO: 4808404 - DNA, 25 bp, Homo sapien
ccacaatcctattctcgggctgaga

SEQ ID NO: 4808405 - DNA, 25 bp, Homo sapien
ctttttctaagagctcccggcgtgg

SEQ ID NO: 4808406 - DNA, 25 bp, Homo sapien
ccttgggaacctttgaggagcggca

SEQ ID NO: 4808407 - DNA, 25 bp, Homo sapien
ggtgccttccagaacgcatctcatg

SEQ ID NO: 4808408 - DNA, 25 bp, Homo sapien
gacaatttgacctgtcacctgagaa

SEQ ID NO: 4808409 - DNA, 25 bp, Homo sapien
tacatcctcttacaggcggagacct

SEQ ID NO: 4808410 - DNA, 25 bp, Homo sapien
tatgtgtctgtcttgtatggacacc

SEQ ID NO: 4808411 - DNA, 25 bp, Homo sapien
gtatggacaccagtctggatttagg

SEQ ID NO: 4808412 - DNA, 25 bp, Homo sapien
cagtctggatttaggggccacccta

SEQ ID NO: 4808413 - DNA, 25 bp, Homo sapien
cacgcccggcctatgtgtctgtctt

SEQ ID NO: 4808414 - DNA, 25 bp, Homo sapien
gtaagctgagatgacaccactgcat

SEQ ID NO: 4808415 - DNA, 25 bp, Homo sapien
aagctgagatgacaccactgcatgc

SEQ ID NO: 4808416 - DNA, 25 bp, Homo sapien
ggaggcaagagattgcagtaagctg

SEQ ID NO: 4808417 - DNA, 25 bp, Homo sapien
aggcaagagattgcagtaagctgag

SEQ ID NO: 4808418 - DNA, 25 bp, Homo sapien
ctcctaaagaggagactaggggtca

SEQ ID NO: 4808419 - DNA, 25 bp, Homo sapien
gagactaggggtcagacaggatcac

SEQ ID NO: 4808420 - DNA, 25 bp, Homo sapien
tcacacagcagttcgacagcagaga

SEQ ID NO: 4808421 - DNA, 25 bp, Homo sapien
atggtcacacagcagttcgacagca

SEQ ID NO: 4808422 - DNA, 25 bp, Homo sapien
aaatagaaaatgtccgcgggcgctg

SEQ ID NO: 4808423 - DNA, 25 bp, Homo sapien
gcgctgtgtcaagagccggttgccc

SEQ ID NO: 4808424 - DNA, 25 bp, Homo sapien
ccaggattcagaagattggggatcc

SEQ ID NO: 4808425 - DNA, 25 bp, Homo sapien
cgggtggcactggtttgatgagggt

SEQ ID NO: 4808426 - DNA, 25 bp, Homo sapien
ctgccttcctggctgagtgacccct

SEQ ID NO: 4808427 - DNA, 25 bp, Homo sapien
gccttcctggctgagtgacccctgg

SEQ ID NO: 4808428 - DNA, 25 bp, Homo sapien
tgccttcctggctgagtgacccctg

SEQ ID NO: 4808429 - DNA, 25 bp, Homo sapien
ccttcctggctgagtgacccctggc

SEQ ID NO: 4808430 - DNA, 25 bp, Homo sapien
ggcaaagccttcgactgacccttga

SEQ ID NO: 4808431 - DNA, 25 bp, Homo sapien
cacatgccttgcaatggatcagcca

SEQ ID NO: 4808432 - DNA, 25 bp, Homo sapien
tggaaccacctggacgaagagcagg

SEQ ID NO: 4808433 - DNA, 25 bp, Homo sapien
tgaagcctgttcaccatatgccagg

SEQ ID NO: 4808434 - DNA, 25 bp, Homo sapien
tgttcggaaccccagagtgagagtg

SEQ ID NO: 4808435 - DNA, 25 bp, Homo sapien
ttgaacttagagcagtcgagggcct

SEQ ID NO: 4808436 - DNA, 25 bp, Homo sapien
tgctttcttgcagcctagaccctgg

SEQ ID NO: 4808437 - DNA, 25 bp, Homo sapien
acagtcacaggccaacaaggtggca

SEQ ID NO: 4808438 - DNA, 25 bp, Homo sapien
ccctggctttgaatgtcactgccct

SEQ ID NO: 4808439 - DNA, 25 bp, Homo sapien
ctacaaaagcagccctgtcctgtgc

SEQ ID NO: 4808440 - DNA, 25 bp, Homo sapien
ccagtgggggccaactacaaaagca

SEQ ID NO: 4808441 - DNA, 25 bp, Homo sapien
tcaccccaccctggctttgaatgtc

SEQ ID NO: 4808442 - DNA, 25 bp, Homo sapien
tggtgaatacacaggggcaggccca

SEQ ID NO: 4808443 - DNA, 25 bp, Homo sapien
tctgctggctgcccgaccggcagag

SEQ ID NO: 4808444 - DNA, 25 bp, Homo sapien
agcttggctactccccctctgctgg

SEQ ID NO: 4808445 - DNA, 25 bp, Homo sapien
cccaggacaagcagcttggctactc

SEQ ID NO: 4808446 - DNA, 25 bp, Homo sapien
ggctccgctaggctcctgtctcccc

SEQ ID NO: 4808447 - DNA, 25 bp, Homo sapien
tccgctaggctcctgtctcccctgc

SEQ ID NO: 4808448 - DNA, 25 bp, Homo sapien
ctaggctcccaacgcccactgttct

SEQ ID NO: 4808449 - DNA, 25 bp, Homo sapien
tcccaacgcccactgttcttgccac

SEQ ID NO: 4808450 - DNA, 25 bp, Homo sapien
tcagttcaccagtgctggatccagg

SEQ ID NO: 4808451 - DNA, 25 bp, Homo sapien
cttgggtttttacaacagcgtggca

SEQ ID NO: 4808452 - DNA, 25 bp, Homo sapien
tccaggttcaaatgacagggacttg

SEQ ID NO: 4808453 - DNA, 25 bp, Homo sapien
accccaaggtgttccaagccagtgg

SEQ ID NO: 4808454 - DNA, 25 bp, Homo sapien
tctgggtgctcccgatgctgtggtt

SEQ ID NO: 4808455 - DNA, 25 bp, Homo sapien
ctctgggtgctcccgatgctgtggt

SEQ ID NO: 4808456 - DNA, 25 bp, Homo sapien
gggtgctcccgatgctgtggttggt

SEQ ID NO: 4808457 - DNA, 25 bp, Homo sapien
ctgggtgctcccgatgctgtggttg

SEQ ID NO: 4808458 - DNA, 25 bp, Homo sapien
agccaccgccaccacgggctcccgc

SEQ ID NO: 4808459 - DNA, 25 bp, Homo sapien
tccgaggaggccggggcagccaccg

SEQ ID NO: 4808460 - DNA, 25 bp, Homo sapien
caccgccaccacgggctcccgcttg

SEQ ID NO: 4808461 - DNA, 25 bp, Homo sapien
aggaggccggggcagccaccgccac

SEQ ID NO: 4808462 - DNA, 25 bp, Homo sapien
cttcactgggctcccccgggtggat

SEQ ID NO: 4808463 - DNA, 25 bp, Homo sapien
cctcagaggcttcactgggctcccc

SEQ ID NO: 4808464 - DNA, 25 bp, Homo sapien
agaggcttcactgggctcccccggg

SEQ ID NO: 4808465 - DNA, 25 bp, Homo sapien
gcttcactgggctcccccgggtgga

SEQ ID NO: 4808466 - DNA, 25 bp, Homo sapien
cgtgtgcgagtagatgtaccagagt

SEQ ID NO: 4808467 - DNA, 25 bp, Homo sapien
ggcaccaaaggtgatgcccagcacg

SEQ ID NO: 4808468 - DNA, 25 bp, Homo sapien
gaggaaggcaccaaaggtgatgccc

SEQ ID NO: 4808469 - DNA, 25 bp, Homo sapien
gagtagatgtaccagagtgcagcag

SEQ ID NO: 4808470 - DNA, 25 bp, Homo sapien
ccagcaaggtcagccaataactgtg

SEQ ID NO: 4808471 - DNA, 25 bp, Homo sapien
tcctgactcctgtgtggctatgggc

SEQ ID NO: 4808472 - DNA, 25 bp, Homo sapien
ggccaagcagtctttccttgagcct

SEQ ID NO: 4808473 - DNA, 25 bp, Homo sapien
tgagcctctgacatccgattctgtg

SEQ ID NO: 4808474 - DNA, 25 bp, Homo sapien
tgatgatgttcaagcgcatgaagac

SEQ ID NO: 4808475 - DNA, 25 bp, Homo sapien
cagggctgatgatgttcaagcgcat

SEQ ID NO: 4808476 - DNA, 25 bp, Homo sapien
tgttcaagcgcatgaagacagtcct

SEQ ID NO: 4808477 - DNA, 25 bp, Homo sapien
gcgcatgaagacagtcctatggact

SEQ ID NO: 4808478 - DNA, 25 bp, Homo sapien
ttttgggtatgggtactgtgtagaa

SEQ ID NO: 4808479 - DNA, 25 bp, Homo sapien
gggacagcaggctcacacagttgcc

SEQ ID NO: 4808480 - DNA, 25 bp, Homo sapien
caggtggcagctgtctaactggagc

SEQ ID NO: 4808481 - DNA, 25 bp, Homo sapien
ccggccctggatgagttccacggtg

SEQ ID NO: 4808482 - DNA, 25 bp, Homo sapien
aagagaggctgtccatgttgaggca

SEQ ID NO: 4808483 - DNA, 25 bp, Homo sapien
ctgctgccccggctcgatggtgttg

SEQ ID NO: 4808484 - DNA, 25 bp, Homo sapien
cccggctcgatggtgttggaggcct

SEQ ID NO: 4808485 - DNA, 25 bp, Homo sapien
tggaaagagaggctgtccatgttga

SEQ ID NO: 4808486 - DNA, 25 bp, Homo sapien
ttgagagaccaagagcgtcaccctc

SEQ ID NO: 4808487 - DNA, 25 bp, Homo sapien
gtcctgctccggtcatacagaaggg

SEQ ID NO: 4808488 - DNA, 25 bp, Homo sapien
cctgtggcgcagagtcctttcttag

SEQ ID NO: 4808489 - DNA, 25 bp, Homo sapien
caggtgggttagcacgtgactgtcc

SEQ ID NO: 4808490 - DNA, 25 bp, Homo sapien
ctgtggtgatgagctcgacaggata

SEQ ID NO: 4808491 - DNA, 25 bp, Homo sapien
tgatgagctcgacaggatattgacc

SEQ ID NO: 4808492 - DNA, 25 bp, Homo sapien
agctcgacaggatattgaccaccgc

SEQ ID NO: 4808493 - DNA, 25 bp, Homo sapien
tggtgatgagctcgacaggatattg

SEQ ID NO: 4808494 - DNA, 25 bp, Homo sapien
aaccaatggccaagcttgtcttgtg

SEQ ID NO: 4808495 - DNA, 25 bp, Homo sapien
tgcagatggggagactaagccaacc

SEQ ID NO: 4808496 - DNA, 25 bp, Homo sapien
cagagggtatcccacccaatacgcc

SEQ ID NO: 4808497 - DNA, 25 bp, Homo sapien
gggagactaagccaaccaatggcca

SEQ ID NO: 4808498 - DNA, 25 bp, Homo sapien
aagcactgcgcaagacaaacttgtc

SEQ ID NO: 4808499 - DNA, 25 bp, Homo sapien
tggagtaagcactgcgcaagacaaa

SEQ ID NO: 4808500 - DNA, 25 bp, Homo sapien
ggcccgtgatggtgcacttcaaatg

SEQ ID NO: 4808501 - DNA, 25 bp, Homo sapien
aggtcaggcccgtgatggtgcactt

SEQ ID NO: 4808502 - DNA, 25 bp, Homo sapien
tcatggcgtcgtcggcacactttgt

SEQ ID NO: 4808503 - DNA, 25 bp, Homo sapien
cactttgtctggatcaaggacatga

SEQ ID NO: 4808504 - DNA, 25 bp, Homo sapien
cagctccgggctacaagtgtccttg

SEQ ID NO: 4808505 - DNA, 25 bp, Homo sapien
tctttagtaccagggtcatggcgtc

SEQ ID NO: 4808506 - DNA, 25 bp, Homo sapien
cagctggaggcatgaagtgagacaa

SEQ ID NO: 4808507 - DNA, 25 bp, Homo sapien
tagctccacgaaggatgccacaatg

SEQ ID NO: 4808508 - DNA, 25 bp, Homo sapien
acaatgctggccagcggtagctcca

SEQ ID NO: 4808509 - DNA, 25 bp, Homo sapien
aatgctggcattgagcatccgggcc

SEQ ID NO: 4808510 - DNA, 25 bp, Homo sapien
tcagttccaccttcaccgtcaccgt

SEQ ID NO: 4808511 - DNA, 25 bp, Homo sapien
agatccccgggtgcgcagctcagtt

SEQ ID NO: 4808512 - DNA, 25 bp, Homo sapien
cctgcaggatgaggacggcatcgag

SEQ ID NO: 4808513 - DNA, 25 bp, Homo sapien
ttggcgtcgatgagccaggacacgt

SEQ ID NO: 4808514 - DNA, 25 bp, Homo sapien
ctcgagcgtgcggcccatgtcctgg

SEQ ID NO: 4808515 - DNA, 25 bp, Homo sapien
aggaccctcaggatgtgcgcctcct

SEQ ID NO: 4808516 - DNA, 25 bp, Homo sapien
aaggctggagtacgcggccgccact

SEQ ID NO: 4808517 - DNA, 25 bp, Homo sapien
ggccgccactcgagcgtgcggccca

SEQ ID NO: 4808518 - DNA, 25 bp, Homo sapien
tgacacatgttaggctgcagccccg

SEQ ID NO: 4808519 - DNA, 25 bp, Homo sapien
ccgggcctccgtgtgttaacataag

SEQ ID NO: 4808520 - DNA, 25 bp, Homo sapien
catcacagtatcagctccaggaagg

SEQ ID NO: 4808521 - DNA, 25 bp, Homo sapien
catgatagggctttggcacatagta

SEQ ID NO: 4808522 - DNA, 25 bp, Homo sapien
cagctctgtggtgttgacccccggg

SEQ ID NO: 4808523 - DNA, 25 bp, Homo sapien
tggcagctctgtggtgttgaccccc

SEQ ID NO: 4808524 - DNA, 25 bp, Homo sapien
ttggcccagtcggaggaggatgctc

SEQ ID NO: 4808525 - DNA, 25 bp, Homo sapien
ggcccagtcggaggaggatgctctg

SEQ ID NO: 4808526 - DNA, 25 bp, Homo sapien
atcctgacatgccagcgtcaccctg

SEQ ID NO: 4808527 - DNA, 25 bp, Homo sapien
gtagtacgcactgagagagatttgt

SEQ ID NO: 4808528 - DNA, 25 bp, Homo sapien
gagagatttgtctgactttgtgctg

SEQ ID NO: 4808529 - DNA, 25 bp, Homo sapien
agtgcttgacacgtagtacgcactg

SEQ ID NO: 4808530 - DNA, 25 bp, Homo sapien
actgctgtttacactgaggaccaga

SEQ ID NO: 4808531 - DNA, 25 bp, Homo sapien
aggaagacactgctgtttacactga

SEQ ID NO: 4808532 - DNA, 25 bp, Homo sapien
gccattttgcttggatgcctggaga

SEQ ID NO: 4808533 - DNA, 25 bp, Homo sapien
caagtgcagtgggattcccagggcc

SEQ ID NO: 4808534 - DNA, 25 bp, Homo sapien
aatgagagtggagaaggaacaaagc

SEQ ID NO: 4808535 - DNA, 25 bp, Homo sapien
gatcaattacttgtaaacacaattg

SEQ ID NO: 4808536 - DNA, 25 bp, Homo sapien
taggctcgtcaagtgaagcaatgag

SEQ ID NO: 4808537 - DNA, 25 bp, Homo sapien
ggctcgtcaagtgaagcaatgagag

SEQ ID NO: 4808538 - DNA, 25 bp, Homo sapien
caagccagtgtctattgaaagaatg

SEQ ID NO: 4808539 - DNA, 25 bp, Homo sapien
tgaacaggtgagtgctgagactaag

SEQ ID NO: 4808540 - DNA, 25 bp, Homo sapien
gaacacagcaatctacaagccagtg

SEQ ID NO: 4808541 - DNA, 25 bp, Homo sapien
gactaagacaggtagaccaggcgtg

SEQ ID NO: 4808542 - DNA, 25 bp, Homo sapien
taggctcctcaagtgaagcagtgag

SEQ ID NO: 4808543 - DNA, 25 bp, Homo sapien
aatctgtaactggttgtgatcaatt

SEQ ID NO: 4808544 - DNA, 25 bp, Homo sapien
gctcctcaagtgaagcagtgagtgt

SEQ ID NO: 4808545 - DNA, 25 bp, Homo sapien
agtgagtgtggagaaggaacaaagc

SEQ ID NO: 4808546 - DNA, 25 bp, Homo sapien
ccttcgagacctggctagtggtata

SEQ ID NO: 4808547 - DNA, 25 bp, Homo sapien
acgcagcccttcgagacctggctag

SEQ ID NO: 4808548 - DNA, 25 bp, Homo sapien
aaggtcacaatggactgtttctgca

SEQ ID NO: 4808549 - DNA, 25 bp, Homo sapien
cctgagccacgcagcccttcgagac

SEQ ID NO: 4808550 - DNA, 25 bp, Homo sapien
cgtgcccggccagcctcctatattt

SEQ ID NO: 4808551 - DNA, 25 bp, Homo sapien
tgcccggccagcctcctatattttt

SEQ ID NO: 4808552 - DNA, 25 bp, Homo sapien
gcccggccagcctcctatattttta

SEQ ID NO: 4808553 - DNA, 25 bp, Homo sapien
ccggccagcctcctatatttttatt

SEQ ID NO: 4808554 - DNA, 25 bp, Homo sapien
cactgcagcctcagcctcaacctcc

SEQ ID NO: 4808555 - DNA, 25 bp, Homo sapien
gagacagactctgctctgttgctca

SEQ ID NO: 4808556 - DNA, 25 bp, Homo sapien
gctcactgcagcctcagcctcaacc

SEQ ID NO: 4808557 - DNA, 25 bp, Homo sapien
agacagactctgctctgttgctcag

SEQ ID NO: 4808558 - DNA, 25 bp, Homo sapien
agtgagatggtcaccccttgccatg

SEQ ID NO: 4808559 - DNA, 25 bp, Homo sapien
cttgccatggcaacgccattcccag

SEQ ID NO: 4808560 - DNA, 25 bp, Homo sapien
tcagcaaaggaagtgagatggtcac

SEQ ID NO: 4808561 - DNA, 25 bp, Homo sapien
ctgggccccagaagtcagcaaagga

SEQ ID NO: 4808562 - DNA, 25 bp, Homo sapien
actcaggaacactcttcaatcccag

SEQ ID NO: 4808563 - DNA, 25 bp, Homo sapien
gcatggggactttaagtcctccagc

SEQ ID NO: 4808564 - DNA, 25 bp, Homo sapien
cagcagcatggggactttaagtcct

SEQ ID NO: 4808565 - DNA, 25 bp, Homo sapien
cacaggccacgagccgctgcagcct

SEQ ID NO: 4808566 - DNA, 25 bp, Homo sapien
cagggcaacagccagagggagcgtg

SEQ ID NO: 4808567 - DNA, 25 bp, Homo sapien
gcaacagccagagggagcgtgccgc

SEQ ID NO: 4808568 - DNA, 25 bp, Homo sapien
agcagcagggcaacagccagaggga

SEQ ID NO: 4808569 - DNA, 25 bp, Homo sapien
ccagagggagcgtgccgcggtccat

SEQ ID NO: 4808570 - DNA, 25 bp, Homo sapien
gctgggccttatcctgtgtccagtg

SEQ ID NO: 4808571 - DNA, 25 bp, Homo sapien
tgtccacgtgggggcctgtgcgctg

SEQ ID NO: 4808572 - DNA, 25 bp, Homo sapien
agcaggcggccggagcgacggcgtc

SEQ ID NO: 4808573 - DNA, 25 bp, Homo sapien
ggcgtgggctcgcacggggacccga

SEQ ID NO: 4808574 - DNA, 25 bp, Homo sapien
atgaaggctgtggtatgaccggcag

SEQ ID NO: 4808575 - DNA, 25 bp, Homo sapien
ggtggcggccgaggggtcaggagaa

SEQ ID NO: 4808576 - DNA, 25 bp, Homo sapien
tggtatgaccggcagcagggagctc

SEQ ID NO: 4808577 - DNA, 25 bp, Homo sapien
ggagttgctgtccgaaggatgggcg

SEQ ID NO: 4808578 - DNA, 25 bp, Homo sapien
accaggcggctgactgtctccagca

SEQ ID NO: 4808579 - DNA, 25 bp, Homo sapien
tgaaggaatttcaggcggcccccag

SEQ ID NO: 4808580 - DNA, 25 bp, Homo sapien
cactgaaggaatttcaggcggcccc

SEQ ID NO: 4808581 - DNA, 25 bp, Homo sapien
caggcggctgactgtctccagcact

SEQ ID NO: 4808582 - DNA, 25 bp, Homo sapien
tagaggctctaatcccactggctgg

SEQ ID NO: 4808583 - DNA, 25 bp, Homo sapien
ccactgcctggagtgtccctagaga

SEQ ID NO: 4808584 - DNA, 25 bp, Homo sapien
gacagcattgacgttatccaaccca

SEQ ID NO: 4808585 - DNA, 25 bp, Homo sapien
tccctagagataagaagcgtgtgac

SEQ ID NO: 4808586 - DNA, 25 bp, Homo sapien
ctagctccgctgaactcctgtttat

SEQ ID NO: 4808587 - DNA, 25 bp, Homo sapien
agaatggctccccctacatgccttg

SEQ ID NO: 4808588 - DNA, 25 bp, Homo sapien
agctccgctgaactcctgtttattt

SEQ ID NO: 4808589 - DNA, 25 bp, Homo sapien
ctccccctacatgccttgtcttctg

SEQ ID NO: 4808590 - DNA, 25 bp, Homo sapien
ggaagccaattcactacccactggg

SEQ ID NO: 4808591 - DNA, 25 bp, Homo sapien
tagaattggaaacggctcacagagg

SEQ ID NO: 4808592 - DNA, 25 bp, Homo sapien
tcatggccgtggcaatggacagcgt

SEQ ID NO: 4808593 - DNA, 25 bp, Homo sapien
caactgttcggatttcattcgggca

SEQ ID NO: 4808594 - DNA, 25 bp, Homo sapien
tactttagggcgtccaggtgggtgc

SEQ ID NO: 4808595 - DNA, 25 bp, Homo sapien
gggagaagacactgtccacggagcc

SEQ ID NO: 4808596 - DNA, 25 bp, Homo sapien
actgtccacggagccctcagcgttg

SEQ ID NO: 4808597 - DNA, 25 bp, Homo sapien
ctactttagggcgtccaggtgggtg

SEQ ID NO: 4808598 - DNA, 25 bp, Homo sapien
cacgtttctcatagaaggcgatgac

SEQ ID NO: 4808599 - DNA, 25 bp, Homo sapien
ttgcgcacaatgccacgtttctcat

SEQ ID NO: 4808600 - DNA, 25 bp, Homo sapien
cttgcgcacaatgccacgtttctca

SEQ ID NO: 4808601 - DNA, 25 bp, Homo sapien
gccacgtttctcatagaaggcgatg

SEQ ID NO: 4808602 - DNA, 25 bp, Homo sapien
tctccagccgctttttgatggtctc

SEQ ID NO: 4808603 - DNA, 25 bp, Homo sapien
ggccttgtaataggtctccagccgc

SEQ ID NO: 4808604 - DNA, 25 bp, Homo sapien
attgtcgtccacacgcccgctggtc

SEQ ID NO: 4808605 - DNA, 25 bp, Homo sapien
tccacgtttcaagagccgctgggtc

SEQ ID NO: 4808606 - DNA, 25 bp, Homo sapien
ctgcgtccacatacagcagcagtgt

SEQ ID NO: 4808607 - DNA, 25 bp, Homo sapien
gcgtccacatacagcagcagtgtgg

SEQ ID NO: 4808608 - DNA, 25 bp, Homo sapien
acagcagcagtgtgggctgtccaat

SEQ ID NO: 4808609 - DNA, 25 bp, Homo sapien
gtccacatacagcagcagtgtgggc

SEQ ID NO: 4808610 - DNA, 25 bp, Homo sapien
gccaagaagaccagctgcccggaca

SEQ ID NO: 4808611 - DNA, 25 bp, Homo sapien
tgtccagagccaagaagaccagctg

SEQ ID NO: 4808612 - DNA, 25 bp, Homo sapien
tccttcggtgaagccctggcgcccc

SEQ ID NO: 4808613 - DNA, 25 bp, Homo sapien
ctccctccttcggtgaagccctggc

SEQ ID NO: 4808614 - DNA, 25 bp, Homo sapien
tcccggagcatgtccaacactgtct

SEQ ID NO: 4808615 - DNA, 25 bp, Homo sapien
cacctcccgcgggtagccatcaatc

SEQ ID NO: 4808616 - DNA, 25 bp, Homo sapien
attgactttggccaccatggcatcc

SEQ ID NO: 4808617 - DNA, 25 bp, Homo sapien
gaagcctttggaagtattgactttg

SEQ ID NO: 4808618 - DNA, 25 bp, Homo sapien
ccttctccatgatttccgacagctt

SEQ ID NO: 4808619 - DNA, 25 bp, Homo sapien
agctgacctcggaccgcaggaggtc

SEQ ID NO: 4808620 - DNA, 25 bp, Homo sapien
tgtagccatacttctgcacgatctt

SEQ ID NO: 4808621 - DNA, 25 bp, Homo sapien
ttctcacactgggtgcccttccctg

SEQ ID NO: 4808622 - DNA, 25 bp, Homo sapien
ctccagtgccagtgaagacccttgc

SEQ ID NO: 4808623 - DNA, 25 bp, Homo sapien
tgcaaacgcccacccattcataaac

SEQ ID NO: 4808624 - DNA, 25 bp, Homo sapien
ctgcaaacgcccacccattcataaa

SEQ ID NO: 4808625 - DNA, 25 bp, Homo sapien
gcaaacgcccacccattcataaacc

SEQ ID NO: 4808626 - DNA, 25 bp, Homo sapien
caccacaaagatgatcttggttttc

SEQ ID NO: 4808627 - DNA, 25 bp, Homo sapien
gagggacagacaccgctggcgctcc

SEQ ID NO: 4808628 - DNA, 25 bp, Homo sapien
ggctaagtactctccacacagccag

SEQ ID NO: 4808629 - DNA, 25 bp, Homo sapien
gatgtgagtgagctcggagcctggg

SEQ ID NO: 4808630 - DNA, 25 bp, Homo sapien
gcagggctcagtcactcgctggacc

SEQ ID NO: 4808631 - DNA, 25 bp, Homo sapien
cctgctcaagggatgtcagaaccaa

SEQ ID NO: 4808632 - DNA, 25 bp, Homo sapien
taagtcccagcccataggaactagg

SEQ ID NO: 4808633 - DNA, 25 bp, Homo sapien
ggaggcctcgtcacgtctaaaatta

SEQ ID NO: 4808634 - DNA, 25 bp, Homo sapien
tgtgacttaggaaaggcctgcccct

SEQ ID NO: 4808635 - DNA, 25 bp, Homo sapien
actgaggcccaggcaatgggcaaaa

SEQ ID NO: 4808636 - DNA, 25 bp, Homo sapien
ctgaggcccaggcaatgggcaaaag

SEQ ID NO: 4808637 - DNA, 25 bp, Homo sapien
aatgggcaaaaggagaggaggctca

SEQ ID NO: 4808638 - DNA, 25 bp, Homo sapien
gggcaaaaggagaggaggctcatac

SEQ ID NO: 4808639 - DNA, 25 bp, Homo sapien
gaggtcccgggagccgtgtcagtgc

SEQ ID NO: 4808640 - DNA, 25 bp, Homo sapien
cctgccgaggtcccgggagccgtgt

SEQ ID NO: 4808641 - DNA, 25 bp, Homo sapien
tgccgaggtcccgggagccgtgtca

SEQ ID NO: 4808642 - DNA, 25 bp, Homo sapien
ccgaggtcccgggagccgtgtcagt

SEQ ID NO: 4808643 - DNA, 25 bp, Homo sapien
ctgggacagtgaggatggcaccgag

SEQ ID NO: 4808644 - DNA, 25 bp, Homo sapien
gaggatggcaccgagggacataaac

SEQ ID NO: 4808645 - DNA, 25 bp, Homo sapien
caccgagggacataaacagcggcca

SEQ ID NO: 4808646 - DNA, 25 bp, Homo sapien
ataaacagcggccacacaactgcag

SEQ ID NO: 4808647 - DNA, 25 bp, Homo sapien
gactatttataaggctgtcagcgcg

SEQ ID NO: 4808648 - DNA, 25 bp, Homo sapien
cggcggccggcaaaggcgactattt

SEQ ID NO: 4808649 - DNA, 25 bp, Homo sapien
tttataaggctgtcagcgcgcggca

SEQ ID NO: 4808650 - DNA, 25 bp, Homo sapien
caaaggcgactatttataaggctgt

SEQ ID NO: 4808651 - DNA, 25 bp, Homo sapien
caacctcagatgatctgctggcctt

SEQ ID NO: 4808652 - DNA, 25 bp, Homo sapien
ctcagatgatctgctggccttggcc

SEQ ID NO: 4808653 - DNA, 25 bp, Homo sapien
atctccattcgccgcaacctctgcc

SEQ ID NO: 4808654 - DNA, 25 bp, Homo sapien
cctcagatgatctgctggccttggc

SEQ ID NO: 4808655 - DNA, 25 bp, Homo sapien
ggagatcaccctggctcacactcct

SEQ ID NO: 4808656 - DNA, 25 bp, Homo sapien
tctgggagaaattctacctcgaaac

SEQ ID NO: 4808657 - DNA, 25 bp, Homo sapien
tgggagatcaccctggctcacactc

SEQ ID NO: 4808658 - DNA, 25 bp, Homo sapien
cattctgggagaaattctacctcga

SEQ ID NO: 4808659 - DNA, 25 bp, Homo sapien
tgaggccgcatgcagcgctggacca

SEQ ID NO: 4808660 - DNA, 25 bp, Homo sapien
cccaaccggaagacgtggtcctgag

SEQ ID NO: 4808661 - DNA, 25 bp, Homo sapien
aggccgcatgcagcgctggaccaga

SEQ ID NO: 4808662 - DNA, 25 bp, Homo sapien
tgaggatcgctttactgggagcccc

SEQ ID NO: 4808663 - DNA, 25 bp, Homo sapien
aagggtctcagactccgcactggaa

SEQ ID NO: 4808664 - DNA, 25 bp, Homo sapien
gaaagacacccctgattaaccgcat

SEQ ID NO: 4808665 - DNA, 25 bp, Homo sapien
cagttggaaaacctccctgctagag

SEQ ID NO: 4808666 - DNA, 25 bp, Homo sapien
cttgattggccagaagatggtccct

SEQ ID NO: 4808667 - DNA, 25 bp, Homo sapien
gatgtaggtgacacattcgtccggc

SEQ ID NO: 4808668 - DNA, 25 bp, Homo sapien
gccccttgggctcgtagtagtggta

SEQ ID NO: 4808669 - DNA, 25 bp, Homo sapien
gacccttttctcggtgatgaagcgg

SEQ ID NO: 4808670 - DNA, 25 bp, Homo sapien
tggtggttgcccttgcgactgtgct

SEQ ID NO: 4808671 - DNA, 25 bp, Homo sapien
gaagaagcctagatctctgaagaac

SEQ ID NO: 4808672 - DNA, 25 bp, Homo sapien
taagtgagagactacatgtggccat

SEQ ID NO: 4808673 - DNA, 25 bp, Homo sapien
tcctttccctaagaaggcggcagtg

SEQ ID NO: 4808674 - DNA, 25 bp, Homo sapien
taaagtatagctgtcccctagtggg

SEQ ID NO: 4808675 - DNA, 25 bp, Homo sapien
ggaccatgccatagacatgcacgtg

SEQ ID NO: 4808676 - DNA, 25 bp, Homo sapien
aactccaccgcgatcaccatggtaa

SEQ ID NO: 4808677 - DNA, 25 bp, Homo sapien
gtaaaccagcctgtgctcaaccacg

SEQ ID NO: 4808678 - DNA, 25 bp, Homo sapien
gacatgcacgtggtcacacaactcc

SEQ ID NO: 4808679 - DNA, 25 bp, Homo sapien
ttcatgcggattgtacactcagccc

SEQ ID NO: 4808680 - DNA, 25 bp, Homo sapien
gaagaggtcgtcaaattgccgcatg

SEQ ID NO: 4808681 - DNA, 25 bp, Homo sapien
ccagtggtgggtgcatcattcatgc

SEQ ID NO: 4808682 - DNA, 25 bp, Homo sapien
cgggagagacggcatatgcttccat

SEQ ID NO: 4808683 - DNA, 25 bp, Homo sapien
tgacaatcacacactggtggcaccg

SEQ ID NO: 4808684 - DNA, 25 bp, Homo sapien
gacaatcacacactggtggcaccga

SEQ ID NO: 4808685 - DNA, 25 bp, Homo sapien
ctgctgacaatcacacactggtggc

SEQ ID NO: 4808686 - DNA, 25 bp, Homo sapien
gctgacaatcacacactggtggcac

SEQ ID NO: 4808687 - DNA, 25 bp, Homo sapien
gaatgcacataatacatgccaggaa

SEQ ID NO: 4808688 - DNA, 25 bp, Homo sapien
gcacacattgatagcaagctggtta

SEQ ID NO: 4808689 - DNA, 25 bp, Homo sapien
gaaaatagtggcaaatggctaagca

SEQ ID NO: 4808690 - DNA, 25 bp, Homo sapien
caggacccaggaattgttatgccca

SEQ ID NO: 4808691 - DNA, 25 bp, Homo sapien
ttcttgaggttgacaggtcggcggc

SEQ ID NO: 4808692 - DNA, 25 bp, Homo sapien
gggacatagccgtcagtgatgctcc

SEQ ID NO: 4808693 - DNA, 25 bp, Homo sapien
ccgcagggagccgtaatggaagacc

SEQ ID NO: 4808694 - DNA, 25 bp, Homo sapien
cgtcagtgatgctccacttcttgag

SEQ ID NO: 4808695 - DNA, 25 bp, Homo sapien
atcacgaacactgctgaccgctgct

SEQ ID NO: 4808696 - DNA, 25 bp, Homo sapien
ggcaaagaggatcacgaacactgct

SEQ ID NO: 4808697 - DNA, 25 bp, Homo sapien
aagaggatcacgaacactgctgacc

SEQ ID NO: 4808698 - DNA, 25 bp, Homo sapien
tgagggcaaagaggatcacgaacac

SEQ ID NO: 4808699 - DNA, 25 bp, Homo sapien
tctgctgaggggtaggtgtcggcgt

SEQ ID NO: 4808700 - DNA, 25 bp, Homo sapien
tgaggggtaggtgtcggcgtcctgc

SEQ ID NO: 4808701 - DNA, 25 bp, Homo sapien
tgctgaggggtaggtgtcggcgtcc

SEQ ID NO: 4808702 - DNA, 25 bp, Homo sapien
gctgaggggtaggtgtcggcgtcct

SEQ ID NO: 4808703 - DNA, 25 bp, Homo sapien
ctgacctccacgcagtaggagcccc

SEQ ID NO: 4808704 - DNA, 25 bp, Homo sapien
tgacctccacgcagtaggagcccca

SEQ ID NO: 4808705 - DNA, 25 bp, Homo sapien
gacctccacgcagtaggagccccat

SEQ ID NO: 4808706 - DNA, 25 bp, Homo sapien
agccctttgacctagccgctgttta

SEQ ID NO: 4808707 - DNA, 25 bp, Homo sapien
tctgagccctttgacctagccgctg

SEQ ID NO: 4808708 - DNA, 25 bp, Homo sapien
tcctcagctccgtcccctgctccag

SEQ ID NO: 4808709 - DNA, 25 bp, Homo sapien
gacctagccgctgtttactcctaca

SEQ ID NO: 4808710 - DNA, 25 bp, Homo sapien
ggaggcccagactcctatctagtcc

SEQ ID NO: 4808711 - DNA, 25 bp, Homo sapien
tcggcttcgggtttctccagcggct

SEQ ID NO: 4808712 - DNA, 25 bp, Homo sapien
agactcctatctagtccaggccctg

SEQ ID NO: 4808713 - DNA, 25 bp, Homo sapien
gagctcggcttcgggtttctccagc

SEQ ID NO: 4808714 - DNA, 25 bp, Homo sapien
tgtcagctgccagtgcgaatcccgg

SEQ ID NO: 4808715 - DNA, 25 bp, Homo sapien
tgcgaatcccggtttcaccacttac

SEQ ID NO: 4808716 - DNA, 25 bp, Homo sapien
tggtccgccccgtcacaatcctgct

SEQ ID NO: 4808717 - DNA, 25 bp, Homo sapien
gctgccagtgcgaatcccggtttca

SEQ ID NO: 4808718 - DNA, 25 bp, Homo sapien
ggctggggggcctcgagcaagccat

SEQ ID NO: 4808719 - DNA, 25 bp, Homo sapien
tggctggggggcctcgagcaagcca

SEQ ID NO: 4808720 - DNA, 25 bp, Homo sapien
agcggaccccgcgacagaccctggg

SEQ ID NO: 4808721 - DNA, 25 bp, Homo sapien
gctgacggggtagtcggcggcaaga

SEQ ID NO: 4808722 - DNA, 25 bp, Homo sapien
gtcggcggcaagaggcccagcggac

SEQ ID NO: 4808723 - DNA, 25 bp, Homo sapien
ctgggcgcgaggaccggaacctcgg

SEQ ID NO: 4808724 - DNA, 25 bp, Homo sapien
ccccctcacatggcgccgggagccg

SEQ ID NO: 4808725 - DNA, 25 bp, Homo sapien
cccctcacatggcgccgggagccga

SEQ ID NO: 4808726 - DNA, 25 bp, Homo sapien
tgcggttaacccactttccagagga

SEQ ID NO: 4808727 - DNA, 25 bp, Homo sapien
tctggaaggacccacaaggactacc

SEQ ID NO: 4808728 - DNA, 25 bp, Homo sapien
gacccgaatcaaacacccagaagtg

SEQ ID NO: 4808729 - DNA, 25 bp, Homo sapien
caggacggttgggtgctaccttcac

SEQ ID NO: 4808730 - DNA, 25 bp, Homo sapien
gaagtagggtaggtcctcagccact

SEQ ID NO: 4808731 - DNA, 25 bp, Homo sapien
ggtctggaacgaggaagtactgcct

SEQ ID NO: 4808732 - DNA, 25 bp, Homo sapien
gacatattctacacggaagccttgg

SEQ ID NO: 4808733 - DNA, 25 bp, Homo sapien
tagatgagcctagacgctgggtccc

SEQ ID NO: 4808734 - DNA, 25 bp, Homo sapien
gaaccagccaccagacctgtcaagg

SEQ ID NO: 4808735 - DNA, 25 bp, Homo sapien
ccgaaccagccaccagacctgtcaa

SEQ ID NO: 4808736 - DNA, 25 bp, Homo sapien
tagaccccgaaccagccaccagacc

SEQ ID NO: 4808737 - DNA, 25 bp, Homo sapien
accagccaccagacctgtcaaggat

SEQ ID NO: 4808738 - DNA, 25 bp, Homo sapien
tgccaagaccactacagcagaaagt

SEQ ID NO: 4808739 - DNA, 25 bp, Homo sapien
tggctccacatgtcaagtgcctgct

SEQ ID NO: 4808740 - DNA, 25 bp, Homo sapien
gatgaaccccacgaaaaatgctggc

SEQ ID NO: 4808741 - DNA, 25 bp, Homo sapien
tgcctgctatgtcctaagccatggg

SEQ ID NO: 4808742 - DNA, 25 bp, Homo sapien
agagcattagcatagggccctgatc

SEQ ID NO: 4808743 - DNA, 25 bp, Homo sapien
gatgacgaaagtaaggcctgagcca

SEQ ID NO: 4808744 - DNA, 25 bp, Homo sapien
tgtaaaaccagctagcaccagtcct

SEQ ID NO: 4808745 - DNA, 25 bp, Homo sapien
aaagcggtgctgtgaaccaagtgcc

SEQ ID NO: 4808746 - DNA, 25 bp, Homo sapien
caatatgggtggagaaatttccctc

SEQ ID NO: 4808747 - DNA, 25 bp, Homo sapien
tcagggattccagtcaacagcttct

SEQ ID NO: 4808748 - DNA, 25 bp, Homo sapien
gcccaaccccagatttaatggctaa

SEQ ID NO: 4808749 - DNA, 25 bp, Homo sapien
aaagaagcctccgacttagggtcag

SEQ ID NO: 4808750 - DNA, 25 bp, Homo sapien
ccaaatgccgtgaattactcaggga

SEQ ID NO: 4808751 - DNA, 25 bp, Homo sapien
tgaccacgctagagacagcatccag

SEQ ID NO: 4808752 - DNA, 25 bp, Homo sapien
caggactggcacaaggtcatgatgc

SEQ ID NO: 4808753 - DNA, 25 bp, Homo sapien
aaaggccacttgacagacctggagg

SEQ ID NO: 4808754 - DNA, 25 bp, Homo sapien
cctccactccccttcaagtcatgag

SEQ ID NO: 4808755 - DNA, 25 bp, Homo sapien
ctccaagtgtcgccagaatggggcg

SEQ ID NO: 4808756 - DNA, 25 bp, Homo sapien
tggctccaagtgtcgccagaatggg

SEQ ID NO: 4808757 - DNA, 25 bp, Homo sapien
ccaagtgtcgccagaatggggcggg

SEQ ID NO: 4808758 - DNA, 25 bp, Homo sapien
gatggctccaagtgtcgccagaatg

SEQ ID NO: 4808759 - DNA, 25 bp, Homo sapien
ggaggcaggatccataaattaaatg

SEQ ID NO: 4808760 - DNA, 25 bp, Homo sapien
aggcaggatccataaattaaatgtt

SEQ ID NO: 4808761 - DNA, 25 bp, Homo sapien
gcaggaggcaggatccataaattaa

SEQ ID NO: 4808762 - DNA, 25 bp, Homo sapien
caggaggcaggatccataaattaaa

SEQ ID NO: 4808763 - DNA, 25 bp, Homo sapien
ctcgcaacggcatggcgactggcag

SEQ ID NO: 4808764 - DNA, 25 bp, Homo sapien
atcccggaggcctcgcaacggcatg

SEQ ID NO: 4808765 - DNA, 25 bp, Homo sapien
cttgggatgggacatcccggaggcc

SEQ ID NO: 4808766 - DNA, 25 bp, Homo sapien
tgggacatcccggaggcctcgcaac

SEQ ID NO: 4808767 - DNA, 25 bp, Homo sapien
gcccagcgggagaagaccgccttct

SEQ ID NO: 4808768 - DNA, 25 bp, Homo sapien
tctcagtgatgaagcggtgggcgct

SEQ ID NO: 4808769 - DNA, 25 bp, Homo sapien
gatgggcgaacacgatgggcctctt

SEQ ID NO: 4808770 - DNA, 25 bp, Homo sapien
gctcgtgtgccaggtacatctgaca

SEQ ID NO: 4808771 - DNA, 25 bp, Homo sapien
tcatctagccggcccttctcaaagt

SEQ ID NO: 4808772 - DNA, 25 bp, Homo sapien
ctcaaagtagtggtaaggcactgag

SEQ ID NO: 4808773 - DNA, 25 bp, Homo sapien
cccttctcaaagtagtggtaaggca

SEQ ID NO: 4808774 - DNA, 25 bp, Homo sapien
ttctcaaagtagtggtaaggcactg

SEQ ID NO: 4808775 - DNA, 25 bp, Homo sapien
cacataggggagtagcagatcccga

SEQ ID NO: 4808776 - DNA, 25 bp, Homo sapien
tgggacagaacccactcgcctccgg

SEQ ID NO: 4808777 - DNA, 25 bp, Homo sapien
aggcccatgggctcgtgaagaccca

SEQ ID NO: 4808778 - DNA, 25 bp, Homo sapien
gtagcagatcccgagagccagggtt

SEQ ID NO: 4808779 - DNA, 25 bp, Homo sapien
gctccagcgcgaggatcatggtgaa

SEQ ID NO: 4808780 - DNA, 25 bp, Homo sapien
tgctgaggaaggagcccgactgcct

SEQ ID NO: 4808781 - DNA, 25 bp, Homo sapien
tagctgtcgctgaccatcccataga

SEQ ID NO: 4808782 - DNA, 25 bp, Homo sapien
atagaccacgatctcctcacacagc

SEQ ID NO: 4808783 - DNA, 25 bp, Homo sapien
tcgggcccagctacgctttgcaggg

SEQ ID NO: 4808784 - DNA, 25 bp, Homo sapien
ggtttgagcaaacccctggatgatg

SEQ ID NO: 4808785 - DNA, 25 bp, Homo sapien
agcagggcaccgtggtttgaagtca

SEQ ID NO: 4808786 - DNA, 25 bp, Homo sapien
ccctggctctgctatgggcatcaca

SEQ ID NO: 4808787 - DNA, 25 bp, Homo sapien
atgtagagcgtgtctcgggccttct

SEQ ID NO: 4808788 - DNA, 25 bp, Homo sapien
gggccttctggaagtagtgtgaata

SEQ ID NO: 4808789 - DNA, 25 bp, Homo sapien
cagcggcacgcttgtgtgtgagacg

SEQ ID NO: 4808790 - DNA, 25 bp, Homo sapien
tagtgtgaatagttgcgcagcagca

SEQ ID NO: 4808791 - DNA, 25 bp, Homo sapien
ggcactgtcgatctcagcacccagg

SEQ ID NO: 4808792 - DNA, 25 bp, Homo sapien
ggaacacgcactcggcactgtcgat

SEQ ID NO: 4808793 - DNA, 25 bp, Homo sapien
tgggcgcctggttcatgcggaacac

SEQ ID NO: 4808794 - DNA, 25 bp, Homo sapien
atccgcctcaaagcccacggtgggc

SEQ ID NO: 4808795 - DNA, 25 bp, Homo sapien
gccggagctggacaccacggcacag

SEQ ID NO: 4808796 - DNA, 25 bp, Homo sapien
tgcggcagggctcgcggaccagcgg

SEQ ID NO: 4808797 - DNA, 25 bp, Homo sapien
gagctggacaccacggcacagctgc

SEQ ID NO: 4808798 - DNA, 25 bp, Homo sapien
acagctgcggcagggctcgcggacc

SEQ ID NO: 4808799 - DNA, 25 bp, Homo sapien
tgaagtgcaggggtcccggcacagt

SEQ ID NO: 4808800 - DNA, 25 bp, Homo sapien
ggcacactgctatatccactgaagt

SEQ ID NO: 4808801 - DNA, 25 bp, Homo sapien
agcacaggaggatgtagacggcaga

SEQ ID NO: 4808802 - DNA, 25 bp, Homo sapien
atgtagacggcagagaagaccacgg

SEQ ID NO: 4808803 - DNA, 25 bp, Homo sapien
gccacacggtctgcaagaacagggt

SEQ ID NO: 4808804 - DNA, 25 bp, Homo sapien
caagcagttggctggtgctctccaa

SEQ ID NO: 4808805 - DNA, 25 bp, Homo sapien
caggtttctagactcgaggcacaag

SEQ ID NO: 4808806 - DNA, 25 bp, Homo sapien
caagagcggctgaactgaacttcac

SEQ ID NO: 4808807 - DNA, 25 bp, Homo sapien
ctgtcgctgtccctcagtagtctag

SEQ ID NO: 4808808 - DNA, 25 bp, Homo sapien
tgtcgctgtccctcagtagtctagg

SEQ ID NO: 4808809 - DNA, 25 bp, Homo sapien
gctgtcgctgtccctcagtagtcta

SEQ ID NO: 4808810 - DNA, 25 bp, Homo sapien
gtcgctgtccctcagtagtctaggg

SEQ ID NO: 4808811 - DNA, 25 bp, Homo sapien
gctgggaaggggtgggagccgggca

SEQ ID NO: 4808812 - DNA, 25 bp, Homo sapien
aatcagcgacgtttgcgagacctcc

SEQ ID NO: 4808813 - DNA, 25 bp, Homo sapien
ttgacgtctccaaacaccggaaggc

SEQ ID NO: 4808814 - DNA, 25 bp, Homo sapien
ggtgaaagcacatggcacccgggaa

SEQ ID NO: 4808815 - DNA, 25 bp, Homo sapien
aatgtccccatcctaaaggagcagg

SEQ ID NO: 4808816 - DNA, 25 bp, Homo sapien
gcgagggcaggacgtaggtttttca

SEQ ID NO: 4808817 - DNA, 25 bp, Homo sapien
tttttcaccgcccttccagattcca

SEQ ID NO: 4808818 - DNA, 25 bp, Homo sapien
gacgaatggagaggccgggcgaggg

SEQ ID NO: 4808819 - DNA, 25 bp, Homo sapien
tctctacccgggggacgaatggaga

SEQ ID NO: 4808820 - DNA, 25 bp, Homo sapien
ggctggggttcgcaggaggctcgcg

SEQ ID NO: 4808821 - DNA, 25 bp, Homo sapien
ttcgcaggaggctcgcgatccgccg

SEQ ID NO: 4808822 - DNA, 25 bp, Homo sapien
cgccgctcggagctccatggccccc

SEQ ID NO: 4808823 - DNA, 25 bp, Homo sapien
gaggctcgcgatccgccgctcggag

SEQ ID NO: 4808824 - DNA, 25 bp, Homo sapien
gaagctgatccgcgcggccagaggc

SEQ ID NO: 4808825 - DNA, 25 bp, Homo sapien
agctgatccgcgcggccagaggcag

SEQ ID NO: 4808826 - DNA, 25 bp, Homo sapien
ctggaagctgatccgcgcggccaga

SEQ ID NO: 4808827 - DNA, 25 bp, Homo sapien
ctgatccgcgcggccagaggcaggg

SEQ ID NO: 4808828 - DNA, 25 bp, Homo sapien
cagatgctgcagtgtgtcctattgg

SEQ ID NO: 4808829 - DNA, 25 bp, Homo sapien
tcgaaggctccctcgctggaatgtc

SEQ ID NO: 4808830 - DNA, 25 bp, Homo sapien
caggaagtttcactccagacccggg

SEQ ID NO: 4808831 - DNA, 25 bp, Homo sapien
agaggcaactgccttcaagcgccag

SEQ ID NO: 4808832 - DNA, 25 bp, Homo sapien
attagaccagcgaggcacagagagg

SEQ ID NO: 4808833 - DNA, 25 bp, Homo sapien
cttgggcatggtcggattgaactgg

SEQ ID NO: 4808834 - DNA, 25 bp, Homo sapien
gggcttgggcatggtcggattgaac

SEQ ID NO: 4808835 - DNA, 25 bp, Homo sapien
aatgagttaatgaggtctgtttcca

SEQ ID NO: 4808836 - DNA, 25 bp, Homo sapien
gccaagaccttggtcggaccacgga

SEQ ID NO: 4808837 - DNA, 25 bp, Homo sapien
agccaagaccttggtcggaccacgg

SEQ ID NO: 4808838 - DNA, 25 bp, Homo sapien
aagccaagaccttggtcggaccacg

SEQ ID NO: 4808839 - DNA, 25 bp, Homo sapien
ctgagatcagtagtagaccccgttc

SEQ ID NO: 4808840 - DNA, 25 bp, Homo sapien
aggcctgggtactcagggccgacct

SEQ ID NO: 4808841 - DNA, 25 bp, Homo sapien
gtagtagaccccgttcagaatgcct

SEQ ID NO: 4808842 - DNA, 25 bp, Homo sapien
tgcatccctagagtatcaggccagg

SEQ ID NO: 4808843 - DNA, 25 bp, Homo sapien
ggtggttaagaatacaggctccgga

SEQ ID NO: 4808844 - DNA, 25 bp, Homo sapien
gtgcttacgccccttaaagtctctg

SEQ ID NO: 4808845 - DNA, 25 bp, Homo sapien
tgcttacgccccttaaagtctctgg

SEQ ID NO: 4808846 - DNA, 25 bp, Homo sapien
aagaatacaggctccggaatccaaa

SEQ ID NO: 4808847 - DNA, 25 bp, Homo sapien
gctgaatgatcttgatcagtccctt

SEQ ID NO: 4808848 - DNA, 25 bp, Homo sapien
gagtcctggttccagcatttattgc

SEQ ID NO: 4808849 - DNA, 25 bp, Homo sapien
tattgctgaatgatcttgatcagtc

SEQ ID NO: 4808850 - DNA, 25 bp, Homo sapien
cctggttccagcatttattgctgaa

SEQ ID NO: 4808851 - DNA, 25 bp, Homo sapien
gagtccttggcacgatgctgggcac

SEQ ID NO: 4808852 - DNA, 25 bp, Homo sapien
tctggcgaccatcaggaggaagcgc

SEQ ID NO: 4808853 - DNA, 25 bp, Homo sapien
gcccatcgtccagatccggagagtg

SEQ ID NO: 4808854 - DNA, 25 bp, Homo sapien
gactgcgcggttacggtattagtta

SEQ ID NO: 4808855 - DNA, 25 bp, Homo sapien
gggtagcgcagtgtcttccacaggt

SEQ ID NO: 4808856 - DNA, 25 bp, Homo sapien
gacgcccaggaaatagcgctgctcg

SEQ ID NO: 4808857 - DNA, 25 bp, Homo sapien
tttgggctctcgactcttccgggct

SEQ ID NO: 4808858 - DNA, 25 bp, Homo sapien
tgctcgggcccgtccaggatgtgta

SEQ ID NO: 4808859 - DNA, 25 bp, Homo sapien
ggctatcaggaggctgtaatccagc

SEQ ID NO: 4808860 - DNA, 25 bp, Homo sapien
ctcccggaggaaggtggtatccagt

SEQ ID NO: 4808861 - DNA, 25 bp, Homo sapien
gagacgttggaaggctatcaggagg

SEQ ID NO: 4808862 - DNA, 25 bp, Homo sapien
ggaggaaggtggtatccagttccat

SEQ ID NO: 4808863 - DNA, 25 bp, Homo sapien
gcggaggaaccagctccgctggggc

SEQ ID NO: 4808864 - DNA, 25 bp, Homo sapien
cggaggaaccagctccgctggggcc

SEQ ID NO: 4808865 - DNA, 25 bp, Homo sapien
tggcggaggaaccagctccgctggg

SEQ ID NO: 4808866 - DNA, 25 bp, Homo sapien
ctggcggaggaaccagctccgctgg

SEQ ID NO: 4808867 - DNA, 25 bp, Homo sapien
ccccacctgagcgctcatcatgtgc

SEQ ID NO: 4808868 - DNA, 25 bp, Homo sapien
ccacctgagcgctcatcatgtgcca

SEQ ID NO: 4808869 - DNA, 25 bp, Homo sapien
gcccccacctgagcgctcatcatgt

SEQ ID NO: 4808870 - DNA, 25 bp, Homo sapien
cccacctgagcgctcatcatgtgcc

SEQ ID NO: 4808871 - DNA, 25 bp, Homo sapien
ggcgcccggccgaatctgggctctt

SEQ ID NO: 4808872 - DNA, 25 bp, Homo sapien
ccggccgaatctgggctcttaataa

SEQ ID NO: 4808873 - DNA, 25 bp, Homo sapien
tctgggctcttaataactcaggcag

SEQ ID NO: 4808874 - DNA, 25 bp, Homo sapien
gcagggacacccttctaaacttcac

SEQ ID NO: 4808875 - DNA, 25 bp, Homo sapien
tccttcagcaccagaacaagggggc

SEQ ID NO: 4808876 - DNA, 25 bp, Homo sapien
cctgaaagttgaggtccttcagcac

SEQ ID NO: 4808877 - DNA, 25 bp, Homo sapien
cttgccctgaaagttgaggtccttc

SEQ ID NO: 4808878 - DNA, 25 bp, Homo sapien
tgccctgaaagttgaggtccttcag

SEQ ID NO: 4808879 - DNA, 25 bp, Homo sapien
gcattcacactcaggccactggtgg

SEQ ID NO: 4808880 - DNA, 25 bp, Homo sapien
gaattaaaaagcatgcgaagggccc

SEQ ID NO: 4808881 - DNA, 25 bp, Homo sapien
taggaaggaggataagagctgcccc

SEQ ID NO: 4808882 - DNA, 25 bp, Homo sapien
tggacaccttgtcacccctgagggt

SEQ ID NO: 4808883 - DNA, 25 bp, Homo sapien
cggcggggtagaagacgctctgcat

SEQ ID NO: 4808884 - DNA, 25 bp, Homo sapien
atgcggccggcggggtagaagacgc

SEQ ID NO: 4808885 - DNA, 25 bp, Homo sapien
gccggcggggtagaagacgctctgc

SEQ ID NO: 4808886 - DNA, 25 bp, Homo sapien
cggccggcggggtagaagacgctct

SEQ ID NO: 4808887 - DNA, 25 bp, Homo sapien
cggtccacccgcagactgtgcactc

SEQ ID NO: 4808888 - DNA, 25 bp, Homo sapien
ccccggtccacccgcagactgtgca

SEQ ID NO: 4808889 - DNA, 25 bp, Homo sapien
ttccccggtccacccgcagactgtg

SEQ ID NO: 4808890 - DNA, 25 bp, Homo sapien
ctttccccggtccacccgcagactg

SEQ ID NO: 4808891 - DNA, 25 bp, Homo sapien
aacccggggtgcatccggcgccaat

SEQ ID NO: 4808892 - DNA, 25 bp, Homo sapien
cttccttggctggtccggatcccga

SEQ ID NO: 4808893 - DNA, 25 bp, Homo sapien
caggccacgcctccttctcaagatc

SEQ ID NO: 4808894 - DNA, 25 bp, Homo sapien
ttctcaagatccgcggcacctggac

SEQ ID NO: 4808895 - DNA, 25 bp, Homo sapien
cagcaaccgcgccagcagcgagtgc

SEQ ID NO: 4808896 - DNA, 25 bp, Homo sapien
ccagcagcgagtgcgggtgccgctg

SEQ ID NO: 4808897 - DNA, 25 bp, Homo sapien
tgcaggtgctgcacgtagcggggca

SEQ ID NO: 4808898 - DNA, 25 bp, Homo sapien
gcgccagcagcgagtgcgggtgccg

SEQ ID NO: 4808899 - DNA, 25 bp, Homo sapien
ccttccccgacctgtgcacgtggat

SEQ ID NO: 4808900 - DNA, 25 bp, Homo sapien
gtggatctcgctcccaggtctcggc

SEQ ID NO: 4808901 - DNA, 25 bp, Homo sapien
gccttccccgccactgggaattctg

SEQ ID NO: 4808902 - DNA, 25 bp, Homo sapien
cctcccagattagggccgctctgtt

SEQ ID NO: 4808903 - DNA, 25 bp, Homo sapien
gcgcagccaggcaaaggcggggccg

SEQ ID NO: 4808904 - DNA, 25 bp, Homo sapien
agcggcgcagccaggcaaaggcggg

SEQ ID NO: 4808905 - DNA, 25 bp, Homo sapien
gagcggcgcagccaggcaaaggcgg

SEQ ID NO: 4808906 - DNA, 25 bp, Homo sapien
tgaacctgggttaggacctccgaga

SEQ ID NO: 4808907 - DNA, 25 bp, Homo sapien
ccacggcaaggcctgagtgtatctc

SEQ ID NO: 4808908 - DNA, 25 bp, Homo sapien
gggggacaagagtgacccacggcaa

SEQ ID NO: 4808909 - DNA, 25 bp, Homo sapien
tgccagggggacaagagtgacccac

SEQ ID NO: 4808910 - DNA, 25 bp, Homo sapien
cggcaaggcctgagtgtatctcatc

SEQ ID NO: 4808911 - DNA, 25 bp, Homo sapien
tgcacgtcatcccatgcagttcatg

SEQ ID NO: 4808912 - DNA, 25 bp, Homo sapien
gcatcatgcacgtcatcccatgcag

SEQ ID NO: 4808913 - DNA, 25 bp, Homo sapien
ctcaaacaggcccaggcgagactgc

SEQ ID NO: 4808914 - DNA, 25 bp, Homo sapien
tgcttgtctcggaggcgccagagaa

SEQ ID NO: 4808915 - DNA, 25 bp, Homo sapien
gggctttggccgcattccccgccgc

SEQ ID NO: 4808916 - DNA, 25 bp, Homo sapien
ggctttggccgcattccccgccgcc

SEQ ID NO: 4808917 - DNA, 25 bp, Homo sapien
gctttggccgcattccccgccgccc

SEQ ID NO: 4808918 - DNA, 25 bp, Homo sapien
cgggctttggccgcattccccgccg

SEQ ID NO: 4808919 - DNA, 25 bp, Homo sapien
gaccaatagcatggcgccgactgcg

SEQ ID NO: 4808920 - DNA, 25 bp, Homo sapien
gaggcgctggcgatcgcctgcgggt

SEQ ID NO: 4808921 - DNA, 25 bp, Homo sapien
atccttcagacctcggtccggctgg

SEQ ID NO: 4808922 - DNA, 25 bp, Homo sapien
tgcggctgcatccaatccacgcggg

SEQ ID NO: 4808923 - DNA, 25 bp, Homo sapien
gcagtagcgcggtcttagctaactg

SEQ ID NO: 4808924 - DNA, 25 bp, Homo sapien
tgcagtagcgcggtcttagctaact

SEQ ID NO: 4808925 - DNA, 25 bp, Homo sapien
ttgttatgcatagttggactggtgg

SEQ ID NO: 4808926 - DNA, 25 bp, Homo sapien
ttgaagggcactggttgttatgcat

SEQ ID NO: 4808927 - DNA, 25 bp, Homo sapien
ccatctgtgacttagggcagaggat

SEQ ID NO: 4808928 - DNA, 25 bp, Homo sapien
gcatcaggaaggtggctagaggcca

SEQ ID NO: 4808929 - DNA, 25 bp, Homo sapien
accatcagtgtttattggtcagctg

SEQ ID NO: 4808930 - DNA, 25 bp, Homo sapien
atcagtgtttattggtcagctgtcc

SEQ ID NO: 4808931 - DNA, 25 bp, Homo sapien
catcagtgtttattggtcagctgtc

SEQ ID NO: 4808932 - DNA, 25 bp, Homo sapien
caccatcagtgtttattggtcagct

SEQ ID NO: 4808933 - DNA, 25 bp, Homo sapien
ctggggtctgtcagtccttccccag

SEQ ID NO: 4808934 - DNA, 25 bp, Homo sapien
gctgtgtcagggtaaggaaagctgc

SEQ ID NO: 4808935 - DNA, 25 bp, Homo sapien
ggctgtgtcagggtaaggaaagctg

SEQ ID NO: 4808936 - DNA, 25 bp, Homo sapien
tgaccggagtcttccaggtatccct

SEQ ID NO: 4808937 - DNA, 25 bp, Homo sapien
ggaccagcatcttttaggccctgag

SEQ ID NO: 4808938 - DNA, 25 bp, Homo sapien
tcagtcaggtgtaagctccatgcca

SEQ ID NO: 4808939 - DNA, 25 bp, Homo sapien
gctaagtccaacgtcagcatgtgac

SEQ ID NO: 4808940 - DNA, 25 bp, Homo sapien
tcagcatcacataggagatgaacag

SEQ ID NO: 4808941 - DNA, 25 bp, Homo sapien
agcatcacataggagatgaacagtc

SEQ ID NO: 4808942 - DNA, 25 bp, Homo sapien
tcttcagcatcacataggagatgaa

SEQ ID NO: 4808943 - DNA, 25 bp, Homo sapien
gtcttcagcatcacataggagatga

SEQ ID NO: 4808944 - DNA, 25 bp, Homo sapien
cataagatctaagctcagggctgct

SEQ ID NO: 4808945 - DNA, 25 bp, Homo sapien
cagcaccgccaaagtgtggaagcat

SEQ ID NO: 4808946 - DNA, 25 bp, Homo sapien
tgactggcagcctcgaaggatgaac

SEQ ID NO: 4808947 - DNA, 25 bp, Homo sapien
tgcaggaattagaagccagggtgac

SEQ ID NO: 4808948 - DNA, 25 bp, Homo sapien
tgcagccagtgggatggcgacagca

SEQ ID NO: 4808949 - DNA, 25 bp, Homo sapien
gggatggcgacagcataggctcggg

SEQ ID NO: 4808950 - DNA, 25 bp, Homo sapien
ttgtggatgacatgctgactgtcga

SEQ ID NO: 4808951 - DNA, 25 bp, Homo sapien
tgacatgctgactgtcgatgaatgg

SEQ ID NO: 4808952 - DNA, 25 bp, Homo sapien
ctggcatcgagggaagagctctggt

SEQ ID NO: 4808953 - DNA, 25 bp, Homo sapien
agagctctggtgtgtcttgcttgcc

SEQ ID NO: 4808954 - DNA, 25 bp, Homo sapien
cttgcttgccttgccgagcccccaa

SEQ ID NO: 4808955 - DNA, 25 bp, Homo sapien
catcgagggaagagctctggtgtgt

SEQ ID NO: 4808956 - DNA, 25 bp, Homo sapien
tataaaatgcggtaccactggcatc

SEQ ID NO: 4808957 - DNA, 25 bp, Homo sapien
tttgccatgcctaagagtcagcagg

SEQ ID NO: 4808958 - DNA, 25 bp, Homo sapien
caaagcaagccggaaacagagttat

SEQ ID NO: 4808959 - DNA, 25 bp, Homo sapien
tgtagcggctaaggatgcaatcttg

SEQ ID NO: 4808960 - DNA, 25 bp, Homo sapien
tatagtagttgctctggcggtgcca

SEQ ID NO: 4808961 - DNA, 25 bp, Homo sapien
aggcaatgaagccagcgccgtgcct

SEQ ID NO: 4808962 - DNA, 25 bp, Homo sapien
gcctagagcctatatagtagttgct

SEQ ID NO: 4808963 - DNA, 25 bp, Homo sapien
cagcgccgtgcctagagcctatata

SEQ ID NO: 4808964 - DNA, 25 bp, Homo sapien
ggccgagtcccaccacctggtctgt

SEQ ID NO: 4808965 - DNA, 25 bp, Homo sapien
tcacccaggcggtgtagtaggtgaa

SEQ ID NO: 4808966 - DNA, 25 bp, Homo sapien
agatgatcaggctaacggcgacgag

SEQ ID NO: 4808967 - DNA, 25 bp, Homo sapien
aagagaatcacccaggcggtgtagt

SEQ ID NO: 4808968 - DNA, 25 bp, Homo sapien
ttcaacagatggtagagggctgact

SEQ ID NO: 4808969 - DNA, 25 bp, Homo sapien
tatttcggcgcactaatggaagcgg

SEQ ID NO: 4808970 - DNA, 25 bp, Homo sapien
aaaagggaggtctcagctgacgaag

SEQ ID NO: 4808971 - DNA, 25 bp, Homo sapien
agaatgctaggcctccgcgttgtcg

SEQ ID NO: 4808972 - DNA, 25 bp, Homo sapien
tccggctttggactgcggagcacgc

SEQ ID NO: 4808973 - DNA, 25 bp, Homo sapien
ccacatccggttccgggtccacgct

SEQ ID NO: 4808974 - DNA, 25 bp, Homo sapien
acgctcttccggctttggactgcgg

SEQ ID NO: 4808975 - DNA, 25 bp, Homo sapien
gggagtcgtagtccccaggcctgct

SEQ ID NO: 4808976 - DNA, 25 bp, Homo sapien
tggggccggttgctgcccgaatctc

SEQ ID NO: 4808977 - DNA, 25 bp, Homo sapien
ctcgtcggagacgagcaggaaccgc

SEQ ID NO: 4808978 - DNA, 25 bp, Homo sapien
tcttctttgcatatcggcgaagtgt

SEQ ID NO: 4808979 - DNA, 25 bp, Homo sapien
gaagtgtagttctcaagagcattgt

SEQ ID NO: 4808980 - DNA, 25 bp, Homo sapien
aaaagccaatctctaagtatcccag

SEQ ID NO: 4808981 - DNA, 25 bp, Homo sapien
cattccgagtcagtggtgaagccga

SEQ ID NO: 4808982 - DNA, 25 bp, Homo sapien
ggctcagagaaaggtagatcccatt

SEQ ID NO: 4808983 - DNA, 25 bp, Homo sapien
agaacgttcactttccagcctaggg

SEQ ID NO: 4808984 - DNA, 25 bp, Homo sapien
cttccttcaccgactgtctctcgca

SEQ ID NO: 4808985 - DNA, 25 bp, Homo sapien
tccttcaccgactgtctctcgcagc

SEQ ID NO: 4808986 - DNA, 25 bp, Homo sapien
ccttcaccgactgtctctcgcagca

SEQ ID NO: 4808987 - DNA, 25 bp, Homo sapien
ttccttcaccgactgtctctcgcag

SEQ ID NO: 4808988 - DNA, 25 bp, Homo sapien
tattttctacaacagaagctgggac

SEQ ID NO: 4808989 - DNA, 25 bp, Homo sapien
aacacagcccactcaagcagtggtg

SEQ ID NO: 4808990 - DNA, 25 bp, Homo sapien
ccatgtggtcagtttgtgcggtaaa

SEQ ID NO: 4808991 - DNA, 25 bp, Homo sapien
aaaccaagacgctgacactagcctg

SEQ ID NO: 4808992 - DNA, 25 bp, Homo sapien
tgggcacctggtgggaattcactga

SEQ ID NO: 4808993 - DNA, 25 bp, Homo sapien
caattcgtctggacactgtgcggtc

SEQ ID NO: 4808994 - DNA, 25 bp, Homo sapien
tggttccagccagcatcaatttggt

SEQ ID NO: 4808995 - DNA, 25 bp, Homo sapien
ctcctaggctgggtgaggtcacgca

SEQ ID NO: 4808996 - DNA, 25 bp, Homo sapien
ttttctggtaaggaagccagctccg

SEQ ID NO: 4808997 - DNA, 25 bp, Homo sapien
tctctacatttaggagccgctgcat

SEQ ID NO: 4808998 - DNA, 25 bp, Homo sapien
ctaagacgtgaccaaagccagtgct

SEQ ID NO: 4808999 - DNA, 25 bp, Homo sapien
taagcagtcagacagtcacaggtgg

SEQ ID NO: 4809000 - DNA, 25 bp, Homo sapien
tggctttcaatcacaactggctcgt

SEQ ID NO: 4809001 - DNA, 25 bp, Homo sapien
aactggctcgtagaccccagaagag

SEQ ID NO: 4809002 - DNA, 25 bp, Homo sapien
tcacaactggctcgtagaccccaga

SEQ ID NO: 4809003 - DNA, 25 bp, Homo sapien
ttcaatcacaactggctcgtagacc

SEQ ID NO: 4809004 - DNA, 25 bp, Homo sapien
tgatagctgccattccaggccgtgg

SEQ ID NO: 4809005 - DNA, 25 bp, Homo sapien
taaataaatgcgtgtgaggcccctg

SEQ ID NO: 4809006 - DNA, 25 bp, Homo sapien
aaaaccgtgccccagcgatggtaag

SEQ ID NO: 4809007 - DNA, 25 bp, Homo sapien
gcgacaagatttggcgttcaaggcc

SEQ ID NO: 4809008 - DNA, 25 bp, Homo sapien
gcgtggcagagccatcgcggctcac

SEQ ID NO: 4809009 - DNA, 25 bp, Homo sapien
ggctcacgaacagccggaggttgct

SEQ ID NO: 4809010 - DNA, 25 bp, Homo sapien
tggcaagctggatgccgctcagcgt

SEQ ID NO: 4809011 - DNA, 25 bp, Homo sapien
ctggtggcaagctggatgccgctca

SEQ ID NO: 4809012 - DNA, 25 bp, Homo sapien
cgcgtgtcgtccacccaggtcgggt

SEQ ID NO: 4809013 - DNA, 25 bp, Homo sapien
acgatcttctccacgatggcatccg

SEQ ID NO: 4809014 - DNA, 25 bp, Homo sapien
caggtcgggtggctctccaccgagt

SEQ ID NO: 4809015 - DNA, 25 bp, Homo sapien
gcatccgcatcgatccgcgtgtcgt

SEQ ID NO: 4809016 - DNA, 25 bp, Homo sapien
ggtctgttctccagggggcaccaag

SEQ ID NO: 4809017 - DNA, 25 bp, Homo sapien
gggggcaccaagcagtaggcctcac

SEQ ID NO: 4809018 - DNA, 25 bp, Homo sapien
ttctccagggggcaccaagcagtag

SEQ ID NO: 4809019 - DNA, 25 bp, Homo sapien
tccagggggcaccaagcagtaggcc

SEQ ID NO: 4809020 - DNA, 25 bp, Homo sapien
tgaaagagcgatcggacagatgcag

SEQ ID NO: 4809021 - DNA, 25 bp, Homo sapien
ctggaggagcgcgagtgctctgtgc

SEQ ID NO: 4809022 - DNA, 25 bp, Homo sapien
gagcgcgagtgctctgtgctgtagc

SEQ ID NO: 4809023 - DNA, 25 bp, Homo sapien
cgtgttgcggcggtgcgtcaggtct

SEQ ID NO: 4809024 - DNA, 25 bp, Homo sapien
gcgacgcaggggagcatcacaatgg

SEQ ID NO: 4809025 - DNA, 25 bp, Homo sapien
gagcatcacaatgggggatcccgag

SEQ ID NO: 4809026 - DNA, 25 bp, Homo sapien
ctgtcaggggcgacgcaggggagca

SEQ ID NO: 4809027 - DNA, 25 bp, Homo sapien
aggggcgacgcaggggagcatcaca

SEQ ID NO: 4809028 - DNA, 25 bp, Homo sapien
ggctggacaggttctggtcgggttc

SEQ ID NO: 4809029 - DNA, 25 bp, Homo sapien
tggacaggttctggtcgggttcctc

SEQ ID NO: 4809030 - DNA, 25 bp, Homo sapien
gttctggtcgggttcctctggcagc

SEQ ID NO: 4809031 - DNA, 25 bp, Homo sapien
tcagggctggacaggttctggtcgg

SEQ ID NO: 4809032 - DNA, 25 bp, Homo sapien
tgagctgagaatagtgggccgagcc

SEQ ID NO: 4809033 - DNA, 25 bp, Homo sapien
ctgagctgagaatagtgggccgagc

SEQ ID NO: 4809034 - DNA, 25 bp, Homo sapien
agctgagaatagtgggccgagcctt

SEQ ID NO: 4809035 - DNA, 25 bp, Homo sapien
gctgagaatagtgggccgagccttg

SEQ ID NO: 4809036 - DNA, 25 bp, Homo sapien
gatggacttggcagtcgatggtggc

SEQ ID NO: 4809037 - DNA, 25 bp, Homo sapien
tcagctgcagggaggaatcctggcc

SEQ ID NO: 4809038 - DNA, 25 bp, Homo sapien
ggatggagatggacttggcagtcga

SEQ ID NO: 4809039 - DNA, 25 bp, Homo sapien
atcctggcctgggatggagatggac

SEQ ID NO: 4809040 - DNA, 25 bp, Homo sapien
ttgaagcagggatctccagagagca

SEQ ID NO: 4809041 - DNA, 25 bp, Homo sapien
gtcttgaagcagggatctccagaga

SEQ ID NO: 4809042 - DNA, 25 bp, Homo sapien
cttgaagcagggatctccagagagc

SEQ ID NO: 4809043 - DNA, 25 bp, Homo sapien
gaagcagggatctccagagagcagg

SEQ ID NO: 4809044 - DNA, 25 bp, Homo sapien
gagcccgcaaactcggccaggttca

SEQ ID NO: 4809045 - DNA, 25 bp, Homo sapien
tcggccaggttcaagtcagcgaagc

SEQ ID NO: 4809046 - DNA, 25 bp, Homo sapien
gtcatatccctcgagcaggcagcag

SEQ ID NO: 4809047 - DNA, 25 bp, Homo sapien
cctggcgagtgttcttcgtgtcata

SEQ ID NO: 4809048 - DNA, 25 bp, Homo sapien
gctcctggctggcggaagcccagaa

SEQ ID NO: 4809049 - DNA, 25 bp, Homo sapien
cagaagggtaacttggcaaaagttg

SEQ ID NO: 4809050 - DNA, 25 bp, Homo sapien
gaggtgagaggagcgtgtgggaggg

SEQ ID NO: 4809051 - DNA, 25 bp, Homo sapien
cgactgactgttgcataactgggac

SEQ ID NO: 4809052 - DNA, 25 bp, Homo sapien
aaagcaccctttgtgccacgtcccg

SEQ ID NO: 4809053 - DNA, 25 bp, Homo sapien
gaaaggacattgttgtccgtgacac

SEQ ID NO: 4809054 - DNA, 25 bp, Homo sapien
tgacacagatgcattgttccctggg

SEQ ID NO: 4809055 - DNA, 25 bp, Homo sapien
ggccagtgcgcctgacatgaaagga

SEQ ID NO: 4809056 - DNA, 25 bp, Homo sapien
acatctccggttccctctgcaaagg

SEQ ID NO: 4809057 - DNA, 25 bp, Homo sapien
gcatgcgctaagaaggccctgtgga

SEQ ID NO: 4809058 - DNA, 25 bp, Homo sapien
cagggtctgaacaggcccttgggac

SEQ ID NO: 4809059 - DNA, 25 bp, Homo sapien
ggatggaggccaagtctgctagacc

SEQ ID NO: 4809060 - DNA, 25 bp, Homo sapien
gaggcttcccttgtgcctgtcccat

SEQ ID NO: 4809061 - DNA, 25 bp, Homo sapien
taacacatctcaggtagggctgagt

SEQ ID NO: 4809062 - DNA, 25 bp, Homo sapien
tattgcaacaaccatatgctgcctt

SEQ ID NO: 4809063 - DNA, 25 bp, Homo sapien
tgagtgcaaagaccatcaataaaga

SEQ ID NO: 4809064 - DNA, 25 bp, Homo sapien
caagttgactgcagaatcccaggga

SEQ ID NO: 4809065 - DNA, 25 bp, Homo sapien
gggagacacaagcagcaagttgact

SEQ ID NO: 4809066 - DNA, 25 bp, Homo sapien
gaatcccagggacctcatgcatctc

SEQ ID NO: 4809067 - DNA, 25 bp, Homo sapien
ggagacacaagcagcaagttgactg

SEQ ID NO: 4809068 - DNA, 25 bp, Homo sapien
aaggtgaacctctttcgccaccgca

SEQ ID NO: 4809069 - DNA, 25 bp, Homo sapien
acagacacacggaagacacaggggt

SEQ ID NO: 4809070 - DNA, 25 bp, Homo sapien
ccggtggccgggttagcactcatct

SEQ ID NO: 4809071 - DNA, 25 bp, Homo sapien
tcatcttacacacgaaggtgaacct

SEQ ID NO: 4809072 - DNA, 25 bp, Homo sapien
accaacactaagcagagggctctgg

SEQ ID NO: 4809073 - DNA, 25 bp, Homo sapien
caacactaagcagagggctctggtc

SEQ ID NO: 4809074 - DNA, 25 bp, Homo sapien
agggctctggtcttctagccccccg

SEQ ID NO: 4809075 - DNA, 25 bp, Homo sapien
agagggctctggtcttctagccccc

SEQ ID NO: 4809076 - DNA, 25 bp, Homo sapien
ggctccacaaggctttgaggatgtg

SEQ ID NO: 4809077 - DNA, 25 bp, Homo sapien
gtgtatgcgactggtcacagcagca

SEQ ID NO: 4809078 - DNA, 25 bp, Homo sapien
gcaaaagtgggaagtaatgaggact

SEQ ID NO: 4809079 - DNA, 25 bp, Homo sapien
acccagcaggcaacgccagaagaga

SEQ ID NO: 4809080 - DNA, 25 bp, Homo sapien
taatgaggactgctccgatggcacc

SEQ ID NO: 4809081 - DNA, 25 bp, Homo sapien
gagaagagaatacagccgcctggga

SEQ ID NO: 4809082 - DNA, 25 bp, Homo sapien
gctctgacaggcgtgtggaactcca

SEQ ID NO: 4809083 - DNA, 25 bp, Homo sapien
ccaggccagagagcgagagtctaat

SEQ ID NO: 4809084 - DNA, 25 bp, Homo sapien
caaacgaagattcccagtgagccct

SEQ ID NO: 4809085 - DNA, 25 bp, Homo sapien
gagactgatcttcaagggaaacccc

SEQ ID NO: 4809086 - DNA, 25 bp, Homo sapien
gccaacactggagcactcagagcag

SEQ ID NO: 4809087 - DNA, 25 bp, Homo sapien
ggatcccagagtcagacacatctag

SEQ ID NO: 4809088 - DNA, 25 bp, Homo sapien
gacacccctattagcagtggcctgg

SEQ ID NO: 4809089 - DNA, 25 bp, Homo sapien
aagagactgggactggaggactgct

SEQ ID NO: 4809090 - DNA, 25 bp, Homo sapien
tcaagagactgggactggaggactg

SEQ ID NO: 4809091 - DNA, 25 bp, Homo sapien
ctactcaagagactgggactggagg

SEQ ID NO: 4809092 - DNA, 25 bp, Homo sapien
actcaagagactgggactggaggac

SEQ ID NO: 4809093 - DNA, 25 bp, Homo sapien
ggcttccttagatcttaaacctggc

SEQ ID NO: 4809094 - DNA, 25 bp, Homo sapien
gtggttgattcacccaaggaggaag

SEQ ID NO: 4809095 - DNA, 25 bp, Homo sapien
ggcccctcgaatgactagactcaag

SEQ ID NO: 4809096 - DNA, 25 bp, Homo sapien
tgggacaccctggttgggacatcca

SEQ ID NO: 4809097 - DNA, 25 bp, Homo sapien
ggtagggccatattctctgcagagt

SEQ ID NO: 4809098 - DNA, 25 bp, Homo sapien
gagataattgtgaatcgctccgcca

SEQ ID NO: 4809099 - DNA, 25 bp, Homo sapien
gggcacacggtaggtcagtaactaa

SEQ ID NO: 4809100 - DNA, 25 bp, Homo sapien
taactaatgactaaatgagcgccct

SEQ ID NO: 4809101 - DNA, 25 bp, Homo sapien
tgaccctgccataactctgcctgga

SEQ ID NO: 4809102 - DNA, 25 bp, Homo sapien
ccagcctgggtccaccaagcaggga

SEQ ID NO: 4809103 - DNA, 25 bp, Homo sapien
caagggacaagaaaacacgcagacc

SEQ ID NO: 4809104 - DNA, 25 bp, Homo sapien
ctgccccgagtgcaaagtgtcctct

SEQ ID NO: 4809105 - DNA, 25 bp, Homo sapien
ggcagcaagtagcagaagcaggatg

SEQ ID NO: 4809106 - DNA, 25 bp, Homo sapien
caggatggaaatgtctcctgcaggc

SEQ ID NO: 4809107 - DNA, 25 bp, Homo sapien
gcagaagcaggatggaaatgtctcc

SEQ ID NO: 4809108 - DNA, 25 bp, Homo sapien
caggcagcaagtagcagaagcagga

SEQ ID NO: 4809109 - DNA, 25 bp, Homo sapien
ctccatccagcagccggaccttgca

SEQ ID NO: 4809110 - DNA, 25 bp, Homo sapien
cgttcacgaagggaaccgcagtcag

SEQ ID NO: 4809111 - DNA, 25 bp, Homo sapien
aagggaaccgcagtcagctcctcca

SEQ ID NO: 4809112 - DNA, 25 bp, Homo sapien
atccagcagccggaccttgcagaag

SEQ ID NO: 4809113 - DNA, 25 bp, Homo sapien
caagaaagccatgagcgagttccct

SEQ ID NO: 4809114 - DNA, 25 bp, Homo sapien
aaagccatgagcgagttccctgagt

SEQ ID NO: 4809115 - DNA, 25 bp, Homo sapien
aagaaagccatgagcgagttccctg

SEQ ID NO: 4809116 - DNA, 25 bp, Homo sapien
agaaagccatgagcgagttccctga

SEQ ID NO: 4809117 - DNA, 25 bp, Homo sapien
ggacctcaccggcatgtaaacagca

SEQ ID NO: 4809118 - DNA, 25 bp, Homo sapien
atcccgccctgatggtggcggagac

SEQ ID NO: 4809119 - DNA, 25 bp, Homo sapien
agcatcccgagacgcgatgtccggg

SEQ ID NO: 4809120 - DNA, 25 bp, Homo sapien
tctgagagatccaccagtccagttc

SEQ ID NO: 4809121 - DNA, 25 bp, Homo sapien
cagcgcaggtgaagccggggaaggt

SEQ ID NO: 4809122 - DNA, 25 bp, Homo sapien
gccagcgcaggtgaagccggggaag

SEQ ID NO: 4809123 - DNA, 25 bp, Homo sapien
cggccagcgcaggtgaagccgggga

SEQ ID NO: 4809124 - DNA, 25 bp, Homo sapien
tcgctgcgggccgggaacgtccggc

SEQ ID NO: 4809125 - DNA, 25 bp, Homo sapien
gcccggcacccttcgagcagcagcg

SEQ ID NO: 4809126 - DNA, 25 bp, Homo sapien
ctcgcccggcacccttcgagcagca

SEQ ID NO: 4809127 - DNA, 25 bp, Homo sapien
cggcacccttcgagcagcagcgccg

SEQ ID NO: 4809128 - DNA, 25 bp, Homo sapien
gcggagctgaggcgcccttcggccc

SEQ ID NO: 4809129 - DNA, 25 bp, Homo sapien
gctagtgagcttgcaggctgctgct

SEQ ID NO: 4809130 - DNA, 25 bp, Homo sapien
cagcttttcctagagggtagaagac

SEQ ID NO: 4809131 - DNA, 25 bp, Homo sapien
agagggtagaagaccgttggtcctg

SEQ ID NO: 4809132 - DNA, 25 bp, Homo sapien
gacgttcatagtgacagtcctgctg

SEQ ID NO: 4809133 - DNA, 25 bp, Homo sapien
tgctcagctgatcaatatgacccct

SEQ ID NO: 4809134 - DNA, 25 bp, Homo sapien
tgacccctatttgttctgagcagtg

SEQ ID NO: 4809135 - DNA, 25 bp, Homo sapien
cagtgcctgacccatgagagctgcg

SEQ ID NO: 4809136 - DNA, 25 bp, Homo sapien
cagctgccacatagggaggcaccat

SEQ ID NO: 4809137 - DNA, 25 bp, Homo sapien
tctgagagtaggttacgaaaggacc

SEQ ID NO: 4809138 - DNA, 25 bp, Homo sapien
gactcagccgggatgtcacttctga

SEQ ID NO: 4809139 - DNA, 25 bp, Homo sapien
caggaacatgagagatgccttggcc

SEQ ID NO: 4809140 - DNA, 25 bp, Homo sapien
caacagctgtcgaggagctaagccc

SEQ ID NO: 4809141 - DNA, 25 bp, Homo sapien
tatcatctactatacattgtgaata

SEQ ID NO: 4809142 - DNA, 25 bp, Homo sapien
gctcctgtctgtaattgaaggtact

SEQ ID NO: 4809143 - DNA, 25 bp, Homo sapien
taattgaaggtacttgagaagctga

SEQ ID NO: 4809144 - DNA, 25 bp, Homo sapien
tcatctactatacattgtgaataca

SEQ ID NO: 4809145 - DNA, 25 bp, Homo sapien
taaggtaaggggacagctcagcagt

SEQ ID NO: 4809146 - DNA, 25 bp, Homo sapien
tcttggttacgccagcatagtaagc

SEQ ID NO: 4809147 - DNA, 25 bp, Homo sapien
tcactgttactttcactgtagcctg

SEQ ID NO: 4809148 - DNA, 25 bp, Homo sapien
catagtaagcaattacaggcttcac

SEQ ID NO: 4809149 - DNA, 25 bp, Homo sapien
tctttttagctgaggtctggagccc

SEQ ID NO: 4809150 - DNA, 25 bp, Homo sapien
gcattctaaacgttcgtgcccagga

SEQ ID NO: 4809151 - DNA, 25 bp, Homo sapien
cattggtcatatgtggctgaggcac

SEQ ID NO: 4809152 - DNA, 25 bp, Homo sapien
tcccttttagctggcactgcacgaa

SEQ ID NO: 4809153 - DNA, 25 bp, Homo sapien
cattggagtcccctgagaactgagg

SEQ ID NO: 4809154 - DNA, 25 bp, Homo sapien
catgtattacggaggcgtcccagca

SEQ ID NO: 4809155 - DNA, 25 bp, Homo sapien
tattaaagagggagctgtgcacgtg

SEQ ID NO: 4809156 - DNA, 25 bp, Homo sapien
ccctactcgaaaggatggcacctgg

SEQ ID NO: 4809157 - DNA, 25 bp, Homo sapien
atggcagaaggctggcctgacccct

SEQ ID NO: 4809158 - DNA, 25 bp, Homo sapien
tccatggagttttcatcccatcatg

SEQ ID NO: 4809159 - DNA, 25 bp, Homo sapien
catggagttttcatcccatcatggc

SEQ ID NO: 4809160 - DNA, 25 bp, Homo sapien
aagtccatggagttttcatcccatc

SEQ ID NO: 4809161 - DNA, 25 bp, Homo sapien
tcttgagcgcttgcggcttgaccga

SEQ ID NO: 4809162 - DNA, 25 bp, Homo sapien
tcactggatgatgctgtctggctgc

SEQ ID NO: 4809163 - DNA, 25 bp, Homo sapien
tctttgatcataggccggaggacct

SEQ ID NO: 4809164 - DNA, 25 bp, Homo sapien
ttcacatgcaggttggtgacccgct

SEQ ID NO: 4809165 - DNA, 25 bp, Homo sapien
tcctcaaaatgacaccaagaggttg

SEQ ID NO: 4809166 - DNA, 25 bp, Homo sapien
gggctgctcctagctaagaaaggca

SEQ ID NO: 4809167 - DNA, 25 bp, Homo sapien
caggcactttgtactcattagctca

SEQ ID NO: 4809168 - DNA, 25 bp, Homo sapien
tctacttggtaatcaaagggccagc

SEQ ID NO: 4809169 - DNA, 25 bp, Homo sapien
tcacggtcatcacaaacgagcagag

SEQ ID NO: 4809170 - DNA, 25 bp, Homo sapien
gaaccacggaaaggatcctggctgg

SEQ ID NO: 4809171 - DNA, 25 bp, Homo sapien
catgtgggagaggtcaagctcctcc

SEQ ID NO: 4809172 - DNA, 25 bp, Homo sapien
cactgaatgatccagctcacggtca

SEQ ID NO: 4809173 - DNA, 25 bp, Homo sapien
gaatcgttgtctcacttgggcagta

SEQ ID NO: 4809174 - DNA, 25 bp, Homo sapien
ggaccacccagttcggcaagtggag

SEQ ID NO: 4809175 - DNA, 25 bp, Homo sapien
caagtggaggtaagtcatggacaaa

SEQ ID NO: 4809176 - DNA, 25 bp, Homo sapien
tatggcctggctgtctactacaagc

SEQ ID NO: 4809177 - DNA, 25 bp, Homo sapien
acggcgttgacccttctcaggatgc

SEQ ID NO: 4809178 - DNA, 25 bp, Homo sapien
gcaggttgcagatacgttgttgcat

SEQ ID NO: 4809179 - DNA, 25 bp, Homo sapien
tcagaccacttcttcttgacctcag

SEQ ID NO: 4809180 - DNA, 25 bp, Homo sapien
aaccttgcgacggacctcggtcttg

SEQ ID NO: 4809181 - DNA, 25 bp, Homo sapien
gtctaaaattgtgtccgtcgcccag

SEQ ID NO: 4809182 - DNA, 25 bp, Homo sapien
tacttagtgctttcggccgtgaccc

SEQ ID NO: 4809183 - DNA, 25 bp, Homo sapien
gccttcccggttggtagctgctcaa

SEQ ID NO: 4809184 - DNA, 25 bp, Homo sapien
taagatcccgcagtctaaacagagt

SEQ ID NO: 4809185 - DNA, 25 bp, Homo sapien
caccccattgatccgggtagtccgt

SEQ ID NO: 4809186 - DNA, 25 bp, Homo sapien
cgcctccctcagtttgaatcggccc

SEQ ID NO: 4809187 - DNA, 25 bp, Homo sapien
cattgatccgggtagtccgtggcgc

SEQ ID NO: 4809188 - DNA, 25 bp, Homo sapien
ctcagtttgaatcggccccaggcgg

SEQ ID NO: 4809189 - DNA, 25 bp, Homo sapien
cctgtgtgtcaacgacctggcggtg

SEQ ID NO: 4809190 - DNA, 25 bp, Homo sapien
cacaggtgggcatcctatgggcttt

SEQ ID NO: 4809191 - DNA, 25 bp, Homo sapien
tgagccgggttcttcgtggacacag

SEQ ID NO: 4809192 - DNA, 25 bp, Homo sapien
ttcagacgctcgacgtcaaccggga

SEQ ID NO: 4809193 - DNA, 25 bp, Homo sapien
gagaaggaattggaaccatcttctg

SEQ ID NO: 4809194 - DNA, 25 bp, Homo sapien
gattttcactccattttactaggga

SEQ ID NO: 4809195 - DNA, 25 bp, Homo sapien
ttactagggaaggaacaatggttca

SEQ ID NO: 4809196 - DNA, 25 bp, Homo sapien
catttgatcgcaaggaaattggacc

SEQ ID NO: 4809197 - DNA, 25 bp, Homo sapien
ggtgttgcacttgatggtgaatgcc

SEQ ID NO: 4809198 - DNA, 25 bp, Homo sapien
gagaaaactggatcttgaaacaagg

SEQ ID NO: 4809199 - DNA, 25 bp, Homo sapien
gctcttaggacatgctgccaaggac

SEQ ID NO: 4809200 - DNA, 25 bp, Homo sapien
gctgtgatgtggcatgtgctctgct

SEQ ID NO: 4809201 - DNA, 25 bp, Homo sapien
agtggattctgtaagctgagcctca

SEQ ID NO: 4809202 - DNA, 25 bp, Homo sapien
cgaggacagctgaataactgggagc

SEQ ID NO: 4809203 - DNA, 25 bp, Homo sapien
cagggagttacttttgctacggagc

SEQ ID NO: 4809204 - DNA, 25 bp, Homo sapien
tcatctggagcttgagtccgcacct

SEQ ID NO: 4809205 - DNA, 25 bp, Homo sapien
tcaagaggacctcctagtttagggc

SEQ ID NO: 4809206 - DNA, 25 bp, Homo sapien
ttttgctggtggttggacctgcaga

SEQ ID NO: 4809207 - DNA, 25 bp, Homo sapien
cctcctagtttagggcctggtctgg

SEQ ID NO: 4809208 - DNA, 25 bp, Homo sapien
gcagtttcctaaggtaatgttggcc

SEQ ID NO: 4809209 - DNA, 25 bp, Homo sapien
aaaggaaattgccacttggctcaga

SEQ ID NO: 4809210 - DNA, 25 bp, Homo sapien
cctgctgtaggagtgacctcgttca

SEQ ID NO: 4809211 - DNA, 25 bp, Homo sapien
aagtggtagtatccccatttcgtag

SEQ ID NO: 4809212 - DNA, 25 bp, Homo sapien
cctcacaagagccaaggtaagtggt

SEQ ID NO: 4809213 - DNA, 25 bp, Homo sapien
tgccctcagcggcattcaagctttc

SEQ ID NO: 4809214 - DNA, 25 bp, Homo sapien
gaggtgccctcagcggcattcaagc

SEQ ID NO: 4809215 - DNA, 25 bp, Homo sapien
cctcagcggcattcaagctttcaaa

SEQ ID NO: 4809216 - DNA, 25 bp, Homo sapien
tgggaggtgccctcagcggcattca

SEQ ID NO: 4809217 - DNA, 25 bp, Homo sapien
gcctggctgcacagaaggcaagtgc

SEQ ID NO: 4809218 - DNA, 25 bp, Homo sapien
gcctggaccctgtcaggatgggccc

SEQ ID NO: 4809219 - DNA, 25 bp, Homo sapien
aacctacagcattgacgccaacttg

SEQ ID NO: 4809220 - DNA, 25 bp, Homo sapien
gctctcgggcatgcttgggagtgca

SEQ ID NO: 4809221 - DNA, 25 bp, Homo sapien
tatttgaacagagttatgtcctaac

SEQ ID NO: 4809222 - DNA, 25 bp, Homo sapien
atttatttgaacagagttatgtcct

SEQ ID NO: 4809223 - DNA, 25 bp, Homo sapien
cagagttatgtcctaactattttta

SEQ ID NO: 4809224 - DNA, 25 bp, Homo sapien
tgaacagagttatgtcctaactatt

SEQ ID NO: 4809225 - DNA, 25 bp, Homo sapien
gtttcaaagctgatcatggagccag

SEQ ID NO: 4809226 - DNA, 25 bp, Homo sapien
ttgggccgctgcagtcacatctgtc

SEQ ID NO: 4809227 - DNA, 25 bp, Homo sapien
gcgctgcgagggtttctttatttca

SEQ ID NO: 4809228 - DNA, 25 bp, Homo sapien
ttgcttaacaatgccggccaactgg

SEQ ID NO: 4809229 - DNA, 25 bp, Homo sapien
gacacgtgaggcatacatccaggta

SEQ ID NO: 4809230 - DNA, 25 bp, Homo sapien
tgctactcagcaacgaatgggaggg

SEQ ID NO: 4809231 - DNA, 25 bp, Homo sapien
catcaacaggtgaaaagatccccaa

SEQ ID NO: 4809232 - DNA, 25 bp, Homo sapien
taactaactatacctgggtgctggg

SEQ ID NO: 4809233 - DNA, 25 bp, Homo sapien
tttctccccggcacttttcaagtca

SEQ ID NO: 4809234 - DNA, 25 bp, Homo sapien
gcagtgtctgttggctttgttcact

SEQ ID NO: 4809235 - DNA, 25 bp, Homo sapien
tatgctacttactttcattgccggg

SEQ ID NO: 4809236 - DNA, 25 bp, Homo sapien
tctgttccctcgcccatgaacgtga

SEQ ID NO: 4809237 - DNA, 25 bp, Homo sapien
tcaggacagttgcagagcggcttcc

SEQ ID NO: 4809238 - DNA, 25 bp, Homo sapien
gccctctggtggagataaaatcccc

SEQ ID NO: 4809239 - DNA, 25 bp, Homo sapien
ccattagagaagagcaagacgagcc

SEQ ID NO: 4809240 - DNA, 25 bp, Homo sapien
taatcagccgaccttcaaacaggga

SEQ ID NO: 4809241 - DNA, 25 bp, Homo sapien
taggatgcagtggacccccgactgg

SEQ ID NO: 4809242 - DNA, 25 bp, Homo sapien
tcaccaagttagacgtgcccaaggg

SEQ ID NO: 4809243 - DNA, 25 bp, Homo sapien
atcggacccggcaagctggaaccat

SEQ ID NO: 4809244 - DNA, 25 bp, Homo sapien
gggagtgaagctgcggcgggctctg

SEQ ID NO: 4809245 - DNA, 25 bp, Homo sapien
aggcacgacgccttctgacagctca

SEQ ID NO: 4809246 - DNA, 25 bp, Homo sapien
ctcagaagggtggcacctggtccct

SEQ ID NO: 4809247 - DNA, 25 bp, Homo sapien
tgacagctcactgcggaagcggctg

SEQ ID NO: 4809248 - DNA, 25 bp, Homo sapien
cactagcaagacaggcacgacgcct

SEQ ID NO: 4809249 - DNA, 25 bp, Homo sapien
tgggtaatgagcgtgccgagattca

SEQ ID NO: 4809250 - DNA, 25 bp, Homo sapien
ttcattcccggaattggccgctagg

SEQ ID NO: 4809251 - DNA, 25 bp, Homo sapien
gatgggcagagtcgctgggtaatga

SEQ ID NO: 4809252 - DNA, 25 bp, Homo sapien
tgccatctcctacgaggcttggcgg

SEQ ID NO: 4809253 - DNA, 25 bp, Homo sapien
aagagagaggtgagtcagtccccgt

SEQ ID NO: 4809254 - DNA, 25 bp, Homo sapien
ggaacattcaaaaggcctgggagca

SEQ ID NO: 4809255 - DNA, 25 bp, Homo sapien
ctaagtaagaccaggacctcgaggg

SEQ ID NO: 4809256 - DNA, 25 bp, Homo sapien
caggtctgattagcactcgggaggc

SEQ ID NO: 4809257 - DNA, 25 bp, Homo sapien
atggaggggtacagggatggagggt

SEQ ID NO: 4809258 - DNA, 25 bp, Homo sapien
tggaaggatggaggggtacagggat

SEQ ID NO: 4809259 - DNA, 25 bp, Homo sapien
tggagggatggaagggtacagggat

SEQ ID NO: 4809260 - DNA, 25 bp, Homo sapien
ggatggagggatggaagggtacagg

SEQ ID NO: 4809261 - DNA, 25 bp, Homo sapien
tccactgaaaacaaaccgtcctgct

SEQ ID NO: 4809262 - DNA, 25 bp, Homo sapien
gcagggctggaactcgtccctaaca

SEQ ID NO: 4809263 - DNA, 25 bp, Homo sapien
caggtgccctgtgttagaagcgaga

SEQ ID NO: 4809264 - DNA, 25 bp, Homo sapien
acaggatgtagccatgggacagcca

SEQ ID NO: 4809265 - DNA, 25 bp, Homo sapien
ggggaggcctcggtgatggccctct

SEQ ID NO: 4809266 - DNA, 25 bp, Homo sapien
gggaggcctcggtgatggccctctc

SEQ ID NO: 4809267 - DNA, 25 bp, Homo sapien
tggggaggcctcggtgatggccctc

SEQ ID NO: 4809268 - DNA, 25 bp, Homo sapien
gatgtgcgtgtgctgcatcaggtca

SEQ ID NO: 4809269 - DNA, 25 bp, Homo sapien
atcacacgcagcacgccatacaccg

SEQ ID NO: 4809270 - DNA, 25 bp, Homo sapien
tgtgctgcatcaggtcatcgaacgc

SEQ ID NO: 4809271 - DNA, 25 bp, Homo sapien
atcaggtcatcgaacgcatccagcc

SEQ ID NO: 4809272 - DNA, 25 bp, Homo sapien
cctcgcgcacgttgtcctggaggcg

SEQ ID NO: 4809273 - DNA, 25 bp, Homo sapien
aaatcagcgagattcggcttctggc

SEQ ID NO: 4809274 - DNA, 25 bp, Homo sapien
ttgtcagcagcctcatagaggtcct

SEQ ID NO: 4809275 - DNA, 25 bp, Homo sapien
atgaagggccggtccttgcccacag

SEQ ID NO: 4809276 - DNA, 25 bp, Homo sapien
gcagacgcctcagggagcatccgtc

SEQ ID NO: 4809277 - DNA, 25 bp, Homo sapien
aggacggcaccccaggtgagagcat

SEQ ID NO: 4809278 - DNA, 25 bp, Homo sapien
ccaggacggcaccccaggtgagagc

SEQ ID NO: 4809279 - DNA, 25 bp, Homo sapien
ctcagggagcatccgtcccagacgg

SEQ ID NO: 4809280 - DNA, 25 bp, Homo sapien
caggcttccggcttcaaggccagcc

SEQ ID NO: 4809281 - DNA, 25 bp, Homo sapien
gggtccaagtcccatcttggccaag

SEQ ID NO: 4809282 - DNA, 25 bp, Homo sapien
aatccataatgcgtttcccacctgc

SEQ ID NO: 4809283 - DNA, 25 bp, Homo sapien
tcggcctcccgctggtctcctgagg

SEQ ID NO: 4809284 - DNA, 25 bp, Homo sapien
cactgctcgtggcaccggaggctcg

SEQ ID NO: 4809285 - DNA, 25 bp, Homo sapien
ctgctcgtggcaccggaggctcggg

SEQ ID NO: 4809286 - DNA, 25 bp, Homo sapien
actgctcgtggcaccggaggctcgg

SEQ ID NO: 4809287 - DNA, 25 bp, Homo sapien
gctcttgagtcgcttgctgatgagg

SEQ ID NO: 4809288 - DNA, 25 bp, Homo sapien
tcttgagtcgcttgctgatgaggta

SEQ ID NO: 4809289 - DNA, 25 bp, Homo sapien
ctgctcttgagtcgcttgctgatga

SEQ ID NO: 4809290 - DNA, 25 bp, Homo sapien
cttgagtcgcttgctgatgaggtac

SEQ ID NO: 4809291 - DNA, 25 bp, Homo sapien
atggccgctgcacccatgtacttgg

SEQ ID NO: 4809292 - DNA, 25 bp, Homo sapien
tgtagtcaaaggacgccagagcctc

SEQ ID NO: 4809293 - DNA, 25 bp, Homo sapien
acattgggggagatcaggtgcacca

SEQ ID NO: 4809294 - DNA, 25 bp, Homo sapien
tccgaacttgccctcgcggacaatg

SEQ ID NO: 4809295 - DNA, 25 bp, Homo sapien
gagcatgagccagtacttattgccg

SEQ ID NO: 4809296 - DNA, 25 bp, Homo sapien
ctccttctcgttgagcatgagccag

SEQ ID NO: 4809297 - DNA, 25 bp, Homo sapien
tacttattgccgaactcggtcacct

SEQ ID NO: 4809298 - DNA, 25 bp, Homo sapien
gccagtacttattgccgaactcggt

SEQ ID NO: 4809299 - DNA, 25 bp, Homo sapien
ctgggtagtaggtgatgatctcttc

SEQ ID NO: 4809300 - DNA, 25 bp, Homo sapien
gggtagtaggtgatgatctcttcca

SEQ ID NO: 4809301 - DNA, 25 bp, Homo sapien
tagtaggtgatgatctcttccaggg

SEQ ID NO: 4809302 - DNA, 25 bp, Homo sapien
ggctgggtagtaggtgatgatctct

SEQ ID NO: 4809303 - DNA, 25 bp, Homo sapien
taggtcttgagggcgctgatgatga

SEQ ID NO: 4809304 - DNA, 25 bp, Homo sapien
ggtaggtcttgagggcgctgatgat

SEQ ID NO: 4809305 - DNA, 25 bp, Homo sapien
tcttgagggcgctgatgatgacaga

SEQ ID NO: 4809306 - DNA, 25 bp, Homo sapien
ggtcttgagggcgctgatgatgaca

SEQ ID NO: 4809307 - DNA, 25 bp, Homo sapien
gggttctggaagctacatactagac

SEQ ID NO: 4809308 - DNA, 25 bp, Homo sapien
ggtgggttctggaagctacatacta

SEQ ID NO: 4809309 - DNA, 25 bp, Homo sapien
gctacatactagaccccaagcactg

SEQ ID NO: 4809310 - DNA, 25 bp, Homo sapien
cagggtgggttctggaagctacata

SEQ ID NO: 4809311 - DNA, 25 bp, Homo sapien
taggaggagaacttgatctcagccc

SEQ ID NO: 4809312 - DNA, 25 bp, Homo sapien
ggaggagaacttgatctcagccctg

SEQ ID NO: 4809313 - DNA, 25 bp, Homo sapien
gaggagaacttgatctcagccctgc

SEQ ID NO: 4809314 - DNA, 25 bp, Homo sapien
aggagaacttgatctcagccctgcg

SEQ ID NO: 4809315 - DNA, 25 bp, Homo sapien
gggcagggcatggaagtcgaggaag

SEQ ID NO: 4809316 - DNA, 25 bp, Homo sapien
ttgtactggtacagggtcagctgca

SEQ ID NO: 4809317 - DNA, 25 bp, Homo sapien
gtcttgtactggtacagggtcagct

SEQ ID NO: 4809318 - DNA, 25 bp, Homo sapien
tggaagtcgaggaaggctcggacct

SEQ ID NO: 4809319 - DNA, 25 bp, Homo sapien
caccgcgccgtgtggtacagcccca

SEQ ID NO: 4809320 - DNA, 25 bp, Homo sapien
aggtgccaccgcgccgtgtggtaca

SEQ ID NO: 4809321 - DNA, 25 bp, Homo sapien
gctgagcgctctgcgtggaggtcct

SEQ ID NO: 4809322 - DNA, 25 bp, Homo sapien
tgcgtggaggtcctgggcgcgcagg

SEQ ID NO: 4809323 - DNA, 25 bp, Homo sapien
cgcccgccgcccccgcgaagccagc

SEQ ID NO: 4809324 - DNA, 25 bp, Homo sapien
ccgccgcccccgcgaagccagcccg

SEQ ID NO: 4809325 - DNA, 25 bp, Homo sapien
gccgcccccgcgaagccagcccggc

SEQ ID NO: 4809326 - DNA, 25 bp, Homo sapien
ccgcccccgcgaagccagcccggct

SEQ ID NO: 4809327 - DNA, 25 bp, Homo sapien
gcgtgggtagcagcggctgggggcg

SEQ ID NO: 4809328 - DNA, 25 bp, Homo sapien
gcctcccagcctccaggccaaggcg

SEQ ID NO: 4809329 - DNA, 25 bp, Homo sapien
tcccagcctccaggccaaggcgcac

SEQ ID NO: 4809330 - DNA, 25 bp, Homo sapien
ctgcgtgggtagcagcggctggggg

SEQ ID NO: 4809331 - DNA, 25 bp, Homo sapien
gcccgcaccacccgcgcagccgggt

SEQ ID NO: 4809332 - DNA, 25 bp, Homo sapien
ccacagcgcccgcaccacccgcgca

SEQ ID NO: 4809333 - DNA, 25 bp, Homo sapien
gcggcgtggccgtctgtaacacgta

SEQ ID NO: 4809334 - DNA, 25 bp, Homo sapien
tttgcagaccgttccatgcttccgc

SEQ ID NO: 4809335 - DNA, 25 bp, Homo sapien
ccaaaggctcttgggtagtgacccg

SEQ ID NO: 4809336 - DNA, 25 bp, Homo sapien
aggcccgctcgggaacgtttgcaga

SEQ ID NO: 4809337 - DNA, 25 bp, Homo sapien
ctactgtgacccgaaccataaaatt

SEQ ID NO: 4809338 - DNA, 25 bp, Homo sapien
gggcgcccattcaaaacaactccag

SEQ ID NO: 4809339 - DNA, 25 bp, Homo sapien
caggtgttgcggttctctctgccct

SEQ ID NO: 4809340 - DNA, 25 bp, Homo sapien
ttcctagagtcagtacaggcgccgc

SEQ ID NO: 4809341 - DNA, 25 bp, Homo sapien
gccgaccccgagatttccagggaga

SEQ ID NO: 4809342 - DNA, 25 bp, Homo sapien
ggccttggaaaccacgtgtctctga

SEQ ID NO: 4809343 - DNA, 25 bp, Homo sapien
tgccaggctgctcggtccttctgct

SEQ ID NO: 4809344 - DNA, 25 bp, Homo sapien
tctgatttcgcccacgcgaagcggc

SEQ ID NO: 4809345 - DNA, 25 bp, Homo sapien
ccttggtctcaagctggcagctgag

SEQ ID NO: 4809346 - DNA, 25 bp, Homo sapien
gactttaagatgcagccgatttccc

SEQ ID NO: 4809347 - DNA, 25 bp, Homo sapien
cgggtgccctttcctagaacacagg

SEQ ID NO: 4809348 - DNA, 25 bp, Homo sapien
tgagtttcggctgttaccaacctgg

SEQ ID NO: 4809349 - DNA, 25 bp, Homo sapien
tgggctcccggtggtgacatccata

SEQ ID NO: 4809350 - DNA, 25 bp, Homo sapien
acttgaaggatgagtgggactcatc

SEQ ID NO: 4809351 - DNA, 25 bp, Homo sapien
tgacatccatactgagacttgaagg

SEQ ID NO: 4809352 - DNA, 25 bp, Homo sapien
tagaggcctgatccagtctggggca

SEQ ID NO: 4809353 - DNA, 25 bp, Homo sapien
cattagccccaaggagacacaggat

SEQ ID NO: 4809354 - DNA, 25 bp, Homo sapien
ggcatctggcaggacttcccatgta

SEQ ID NO: 4809355 - DNA, 25 bp, Homo sapien
aagcagtagggacttgcacaaagcc

SEQ ID NO: 4809356 - DNA, 25 bp, Homo sapien
gaggccttgaatgcccaactcagga

SEQ ID NO: 4809357 - DNA, 25 bp, Homo sapien
aggcagactcctaaaaagcattagc

SEQ ID NO: 4809358 - DNA, 25 bp, Homo sapien
tccaggcagactcctaaaaagcatt

SEQ ID NO: 4809359 - DNA, 25 bp, Homo sapien
tttccaggcagactcctaaaaagca

SEQ ID NO: 4809360 - DNA, 25 bp, Homo sapien
aagcattagcagatctggacccagg

SEQ ID NO: 4809361 - DNA, 25 bp, Homo sapien
ccgctggaggtgaacagggctgtca

SEQ ID NO: 4809362 - DNA, 25 bp, Homo sapien
ttttgaggcgggttgagcgccgagg

SEQ ID NO: 4809363 - DNA, 25 bp, Homo sapien
gagggtcgagccgtcaccttgctgg

SEQ ID NO: 4809364 - DNA, 25 bp, Homo sapien
gctgtcaaagcgttccgggcgttga

SEQ ID NO: 4809365 - DNA, 25 bp, Homo sapien
cttggattaagactaagtctgtggc

SEQ ID NO: 4809366 - DNA, 25 bp, Homo sapien
cactagccacccgaatcagcttgga

SEQ ID NO: 4809367 - DNA, 25 bp, Homo sapien
cccgaatcagcttggattaagacta

SEQ ID NO: 4809368 - DNA, 25 bp, Homo sapien
gattaagactaagtctgtggccagg

SEQ ID NO: 4809369 - DNA, 25 bp, Homo sapien
tgctgtgatagaacttgtggcagat

SEQ ID NO: 4809370 - DNA, 25 bp, Homo sapien
gagctgtgcccctgagttgctgtga

SEQ ID NO: 4809371 - DNA, 25 bp, Homo sapien
tgtgatagaacttgtggcagatgcg

SEQ ID NO: 4809372 - DNA, 25 bp, Homo sapien
gagttgctgtgatagaacttgtggc

SEQ ID NO: 4809373 - DNA, 25 bp, Homo sapien
cagatatagcccatcacgggcacca

SEQ ID NO: 4809374 - DNA, 25 bp, Homo sapien
ctgtaccagcgaggtgtccctccct

SEQ ID NO: 4809375 - DNA, 25 bp, Homo sapien
cagccagaatgccatggctgggata

SEQ ID NO: 4809376 - DNA, 25 bp, Homo sapien
ccatggctgggatatgggagggtca

SEQ ID NO: 4809377 - DNA, 25 bp, Homo sapien
aggcttcccagccagaatgccatgg

SEQ ID NO: 4809378 - DNA, 25 bp, Homo sapien
tattggggctgtaggtctccgagcc

SEQ ID NO: 4809379 - DNA, 25 bp, Homo sapien
cagtattggggctgtaggtctccga

SEQ ID NO: 4809380 - DNA, 25 bp, Homo sapien
tgcagtattggggctgtaggtctcc

SEQ ID NO: 4809381 - DNA, 25 bp, Homo sapien
catatgcagtattggggctgtaggt

SEQ ID NO: 4809382 - DNA, 25 bp, Homo sapien
ctctggatatatctctggacctcac

SEQ ID NO: 4809383 - DNA, 25 bp, Homo sapien
cctctctggatatatctctggacct

SEQ ID NO: 4809384 - DNA, 25 bp, Homo sapien
ctcctctctggatatatctctggac

SEQ ID NO: 4809385 - DNA, 25 bp, Homo sapien
tctctggatatatctctggacctca

SEQ ID NO: 4809386 - DNA, 25 bp, Homo sapien
caagtgtgggcctcggatctggctt

SEQ ID NO: 4809387 - DNA, 25 bp, Homo sapien
cacagaatccccttgatttccagga

SEQ ID NO: 4809388 - DNA, 25 bp, Homo sapien
gcctttgcacatggtgatcctgcct

SEQ ID NO: 4809389 - DNA, 25 bp, Homo sapien
ataatccacgccaggtgtgcccaag

SEQ ID NO: 4809390 - DNA, 25 bp, Homo sapien
cattcatgagagacagggtagctgc

SEQ ID NO: 4809391 - DNA, 25 bp, Homo sapien
gactactgagcaatgaagctgggcc

SEQ ID NO: 4809392 - DNA, 25 bp, Homo sapien
tcagccaggatagtgcttggtacac

SEQ ID NO: 4809393 - DNA, 25 bp, Homo sapien
cttcctaggaccaagctgtgggccc

SEQ ID NO: 4809394 - DNA, 25 bp, Homo sapien
tctcttcttcatcctcatcatcctc

SEQ ID NO: 4809395 - DNA, 25 bp, Homo sapien
tcttcatcctcatcatcctcttcct

SEQ ID NO: 4809396 - DNA, 25 bp, Homo sapien
ttcatcctcatcatcctcttcctct

SEQ ID NO: 4809397 - DNA, 25 bp, Homo sapien
cttcttcatcctcatcatcctcttc

SEQ ID NO: 4809398 - DNA, 25 bp, Homo sapien
ccacagcgtccactgtaatgaagtg

SEQ ID NO: 4809399 - DNA, 25 bp, Homo sapien
ggtcctcatcttggccagcaatttc

SEQ ID NO: 4809400 - DNA, 25 bp, Homo sapien
cactgtaatgaagtggtcctcatct

SEQ ID NO: 4809401 - DNA, 25 bp, Homo sapien
tcatcttggccagcaatttctttct

SEQ ID NO: 4809402 - DNA, 25 bp, Homo sapien
tgggctgggataaacctcaacttgc

SEQ ID NO: 4809403 - DNA, 25 bp, Homo sapien
ctcaacttgctacacagccttggcc

SEQ ID NO: 4809404 - DNA, 25 bp, Homo sapien
gagtttgggctgggataaacctcaa

SEQ ID NO: 4809405 - DNA, 25 bp, Homo sapien
aaacctcaacttgctacacagcctt

SEQ ID NO: 4809406 - DNA, 25 bp, Homo sapien
gaagggtcgcaaggattgtttggca

SEQ ID NO: 4809407 - DNA, 25 bp, Homo sapien
ggctttgtccttatgcccctgggac

SEQ ID NO: 4809408 - DNA, 25 bp, Homo sapien
cctgggacttcacgtgctccacaaa

SEQ ID NO: 4809409 - DNA, 25 bp, Homo sapien
ttgaagtagcggttgcaaacggtgc

SEQ ID NO: 4809410 - DNA, 25 bp, Homo sapien
aaaaggcaggccaaccaagcagtgt

SEQ ID NO: 4809411 - DNA, 25 bp, Homo sapien
aagccccctgactagcacccaggca

SEQ ID NO: 4809412 - DNA, 25 bp, Homo sapien
gggcccagcaagagctcacctcccc

SEQ ID NO: 4809413 - DNA, 25 bp, Homo sapien
ctgactagcacccaggcagggccca

SEQ ID NO: 4809414 - DNA, 25 bp, Homo sapien
acccctgcactggaacgtgggcaaa

SEQ ID NO: 4809415 - DNA, 25 bp, Homo sapien
gaacgtgggcaaacacatctcttcg

SEQ ID NO: 4809416 - DNA, 25 bp, Homo sapien
catatctgtaacaagccgggctgtg

SEQ ID NO: 4809417 - DNA, 25 bp, Homo sapien
aacacatctcttcgtggtgtgggtg

SEQ ID NO: 4809418 - DNA, 25 bp, Homo sapien
gcagctgcccaaataacccctgtga

SEQ ID NO: 4809419 - DNA, 25 bp, Homo sapien
agctgcccaaataacccctgtgagc

SEQ ID NO: 4809420 - DNA, 25 bp, Homo sapien
taacccctgtgagccccgtggctga

SEQ ID NO: 4809421 - DNA, 25 bp, Homo sapien
caaataacccctgtgagccccgtgg

SEQ ID NO: 4809422 - DNA, 25 bp, Homo sapien
gttggatcaggtcccccatgtagta

SEQ ID NO: 4809423 - DNA, 25 bp, Homo sapien
ggtgttggatcaggtcccccatgta

SEQ ID NO: 4809424 - DNA, 25 bp, Homo sapien
ctgcggtgttggatcaggtccccca

SEQ ID NO: 4809425 - DNA, 25 bp, Homo sapien
tgcggtgttggatcaggtcccccat

SEQ ID NO: 4809426 - DNA, 25 bp, Homo sapien
gttgcaccagcgccttggtggaggc

SEQ ID NO: 4809427 - DNA, 25 bp, Homo sapien
ctggcaggtgttgcaccagcgcctt

SEQ ID NO: 4809428 - DNA, 25 bp, Homo sapien
ttgcaccagcgccttggtggaggct

SEQ ID NO: 4809429 - DNA, 25 bp, Homo sapien
caggtgttgcaccagcgccttggtg

SEQ ID NO: 4809430 - DNA, 25 bp, Homo sapien
cgtgaccactgactcaagggaccgt

SEQ ID NO: 4809431 - DNA, 25 bp, Homo sapien
aaattaggacagagcccgtgaccac

SEQ ID NO: 4809432 - DNA, 25 bp, Homo sapien
tcaaggacgctcttctcaaagggag

SEQ ID NO: 4809433 - DNA, 25 bp, Homo sapien
aagggaccgtccagcctatgaaagt

SEQ ID NO: 4809434 - DNA, 25 bp, Homo sapien
ggatctcccctagccgctgctggtg

SEQ ID NO: 4809435 - DNA, 25 bp, Homo sapien
gcaggcttggctcatgtgctggatc

SEQ ID NO: 4809436 - DNA, 25 bp, Homo sapien
tggctcatgtgctggatctccccta

SEQ ID NO: 4809437 - DNA, 25 bp, Homo sapien
tgctgaggctccgacatgtggtcct

SEQ ID NO: 4809438 - DNA, 25 bp, Homo sapien
tacagtgctaaaggcccggctgtca

SEQ ID NO: 4809439 - DNA, 25 bp, Homo sapien
cttagagggagtgctggtagccgca

SEQ ID NO: 4809440 - DNA, 25 bp, Homo sapien
tgtcaggggtacagtgctaaaggcc

SEQ ID NO: 4809441 - DNA, 25 bp, Homo sapien
tgctctgcagaatggtgaccttcag

SEQ ID NO: 4809442 - DNA, 25 bp, Homo sapien
aatctcttccatgctgacttgggtg

SEQ ID NO: 4809443 - DNA, 25 bp, Homo sapien
ccacatctaggccacaggccgactc

SEQ ID NO: 4809444 - DNA, 25 bp, Homo sapien
tcttccatgctgacttgggtgccca

SEQ ID NO: 4809445 - DNA, 25 bp, Homo sapien
ttccatgctgacttgggtgcccaca

SEQ ID NO: 4809446 - DNA, 25 bp, Homo sapien
aggcccccagcatggatggccctgg

SEQ ID NO: 4809447 - DNA, 25 bp, Homo sapien
gtgctgtatttcccagagtccccag

SEQ ID NO: 4809448 - DNA, 25 bp, Homo sapien
tccgtccgcagccagaaccttgagg

SEQ ID NO: 4809449 - DNA, 25 bp, Homo sapien
gttccaggcctagccctcagtccca

SEQ ID NO: 4809450 - DNA, 25 bp, Homo sapien
gctctggtggctgtactgacacctg

SEQ ID NO: 4809451 - DNA, 25 bp, Homo sapien
ggagccagcaacgacacctgcggct

SEQ ID NO: 4809452 - DNA, 25 bp, Homo sapien
ccgcagacatgaaccacaactggtg

SEQ ID NO: 4809453 - DNA, 25 bp, Homo sapien
cacctgcgctggaggatgctcctgt

SEQ ID NO: 4809454 - DNA, 25 bp, Homo sapien
tggatatgtctgtgtctggacctgc

SEQ ID NO: 4809455 - DNA, 25 bp, Homo sapien
atatgtctgtgtctggacctgcttc

SEQ ID NO: 4809456 - DNA, 25 bp, Homo sapien
ctgtggatatgtctgtgtctggacc

SEQ ID NO: 4809457 - DNA, 25 bp, Homo sapien
ggatatgtctgtgtctggacctgct

SEQ ID NO: 4809458 - DNA, 25 bp, Homo sapien
gccttgggccctgtgaatgtgcctg

SEQ ID NO: 4809459 - DNA, 25 bp, Homo sapien
tggctgcacctgcttcagcggctct

SEQ ID NO: 4809460 - DNA, 25 bp, Homo sapien
ccctgtgaatgtgcctgtggctgta

SEQ ID NO: 4809461 - DNA, 25 bp, Homo sapien
tgcacctgccttgggccctgtgaat

SEQ ID NO: 4809462 - DNA, 25 bp, Homo sapien
tctgtggctctgcctcctgctgcag

SEQ ID NO: 4809463 - DNA, 25 bp, Homo sapien
cttctgtggctctgcctcctgctgc

SEQ ID NO: 4809464 - DNA, 25 bp, Homo sapien
ctgtggctgcacctgcttctgtggc

SEQ ID NO: 4809465 - DNA, 25 bp, Homo sapien
tgtggctctgcctcctgctgcagct

SEQ ID NO: 4809466 - DNA, 25 bp, Homo sapien
ctgcttctgttgcagcactaagtgc

SEQ ID NO: 4809467 - DNA, 25 bp, Homo sapien
tgcagcactaagtgctctggagagg

SEQ ID NO: 4809468 - DNA, 25 bp, Homo sapien
gagaggtctgtgtttgcgcctgctt

SEQ ID NO: 4809469 - DNA, 25 bp, Homo sapien
aggtctgtgtttgcgcctgcttctg

SEQ ID NO: 4809470 - DNA, 25 bp, Homo sapien
tgtctgtggatggtatccgcggctg

SEQ ID NO: 4809471 - DNA, 25 bp, Homo sapien
gggtgtctgtggatggtatccgcgg

SEQ ID NO: 4809472 - DNA, 25 bp, Homo sapien
tgtggatggtatccgcggctgagtc

SEQ ID NO: 4809473 - DNA, 25 bp, Homo sapien
tggtatccgcggctgagtctgtgac

SEQ ID NO: 4809474 - DNA, 25 bp, Homo sapien
gtctgtgtctgtttcggtactgtca

SEQ ID NO: 4809475 - DNA, 25 bp, Homo sapien
aatcgtggcagcacttgggcttcca

SEQ ID NO: 4809476 - DNA, 25 bp, Homo sapien
acccgtggctggaatcgtggcagca

SEQ ID NO: 4809477 - DNA, 25 bp, Homo sapien
tgtttcggtactgtcatccgggcct

SEQ ID NO: 4809478 - DNA, 25 bp, Homo sapien
cctggaggttccttctctgtgggct

SEQ ID NO: 4809479 - DNA, 25 bp, Homo sapien
aactgccctggaggttccttctctg

SEQ ID NO: 4809480 - DNA, 25 bp, Homo sapien
ctgtaactgccctggaggttccttc

SEQ ID NO: 4809481 - DNA, 25 bp, Homo sapien
taactgccctggaggttccttctct

SEQ ID NO: 4809482 - DNA, 25 bp, Homo sapien
tctttgctggcagctcggacgcctc

SEQ ID NO: 4809483 - DNA, 25 bp, Homo sapien
ctcaggtgctggagtgcgtttttcc

SEQ ID NO: 4809484 - DNA, 25 bp, Homo sapien
tgcgtttttccttggcgatgtcctc

SEQ ID NO: 4809485 - DNA, 25 bp, Homo sapien
tctgggcagggcggtaaatcttggt

SEQ ID NO: 4809486 - DNA, 25 bp, Homo sapien
gtgtgtccatccggggctctgcggc

SEQ ID NO: 4809487 - DNA, 25 bp, Homo sapien
cttctggtgtgtccatccggggctc

SEQ ID NO: 4809488 - DNA, 25 bp, Homo sapien
tctggtgtgtccatccggggctctg

SEQ ID NO: 4809489 - DNA, 25 bp, Homo sapien
tggtgtgtccatccggggctctgcg

SEQ ID NO: 4809490 - DNA, 25 bp, Homo sapien
tttcagaaactatgttgacatccaa

SEQ ID NO: 4809491 - DNA, 25 bp, Homo sapien
cagaaactatgttgacatccaatac

SEQ ID NO: 4809492 - DNA, 25 bp, Homo sapien
gaaactatgttgacatccaataccc

SEQ ID NO: 4809493 - DNA, 25 bp, Homo sapien
actatgttgacatccaatacccacc

SEQ ID NO: 4809494 - DNA, 25 bp, Homo sapien
gatgccatgccatagcctcggaggt

SEQ ID NO: 4809495 - DNA, 25 bp, Homo sapien
gaactgttgcaaatttggagtggcc

SEQ ID NO: 4809496 - DNA, 25 bp, Homo sapien
tccgtcctgaaaggttgaactggga

SEQ ID NO: 4809497 - DNA, 25 bp, Homo sapien
gaccccaacaggaggaggtcccagc

SEQ ID NO: 4809498 - DNA, 25 bp, Homo sapien
ggctggtggcattgcaaactggtcc

SEQ ID NO: 4809499 - DNA, 25 bp, Homo sapien
catacgtggctggtggcattgcaaa

SEQ ID NO: 4809500 - DNA, 25 bp, Homo sapien
tgagaccggcagtgtcatacgtggc

SEQ ID NO: 4809501 - DNA, 25 bp, Homo sapien
ccagtgttgctgtgggcatggtgag

SEQ ID NO: 4809502 - DNA, 25 bp, Homo sapien
ttggtgccctggagattcagaagcg

SEQ ID NO: 4809503 - DNA, 25 bp, Homo sapien
tggtgccctggagattcagaagcgg

SEQ ID NO: 4809504 - DNA, 25 bp, Homo sapien
gttggtgccctggagattcagaagc

SEQ ID NO: 4809505 - DNA, 25 bp, Homo sapien
gtgccctggagattcagaagcggct

SEQ ID NO: 4809506 - DNA, 25 bp, Homo sapien
ctgtggtggggactgctggagcagc

SEQ ID NO: 4809507 - DNA, 25 bp, Homo sapien
tgtggtggggactgctggagcagct

SEQ ID NO: 4809508 - DNA, 25 bp, Homo sapien
gtggggactgctggagcagctgctg

SEQ ID NO: 4809509 - DNA, 25 bp, Homo sapien
gggactgctggagcagctgctggag

SEQ ID NO: 4809510 - DNA, 25 bp, Homo sapien
gctgctgcaattgctgctgctggag

SEQ ID NO: 4809511 - DNA, 25 bp, Homo sapien
ctgcagtaactgctgctgctgcaat

SEQ ID NO: 4809512 - DNA, 25 bp, Homo sapien
tgctgctgcaattgctgctgctgga

SEQ ID NO: 4809513 - DNA, 25 bp, Homo sapien
gctgcaattgctgctgctggagctg

SEQ ID NO: 4809514 - DNA, 25 bp, Homo sapien
tccaagttacctccagtcctgctag

SEQ ID NO: 4809515 - DNA, 25 bp, Homo sapien
gtgtcaataacatcggcacccgtcc

SEQ ID NO: 4809516 - DNA, 25 bp, Homo sapien
ttttcaataccgcaaccctctctgg

SEQ ID NO: 4809517 - DNA, 25 bp, Homo sapien
tcctgagctccgtgggacggcttct

SEQ ID NO: 4809518 - DNA, 25 bp, Homo sapien
cacggatgggccggccccgcagccc

SEQ ID NO: 4809519 - DNA, 25 bp, Homo sapien
gcgcgccctcaacgctcaagtcgcc

SEQ ID NO: 4809520 - DNA, 25 bp, Homo sapien
tcaagtcgcccccacggatgggccg

SEQ ID NO: 4809521 - DNA, 25 bp, Homo sapien
cccacgcctcggccgggcggctccg

SEQ ID NO: 4809522 - DNA, 25 bp, Homo sapien
cctctgtcccgcgtcctccgcatcg

SEQ ID NO: 4809523 - DNA, 25 bp, Homo sapien
ctctgtcccgcgtcctccgcatcgc

SEQ ID NO: 4809524 - DNA, 25 bp, Homo sapien
acattcattcgagggacccaggcca

SEQ ID NO: 4809525 - DNA, 25 bp, Homo sapien
agagggcggccaaggtcttacagtc

SEQ ID NO: 4809526 - DNA, 25 bp, Homo sapien
tccgtcaggagtttgcccacggagg

SEQ ID NO: 4809527 - DNA, 25 bp, Homo sapien
gcgcagttggcggatgtacattcat

SEQ ID NO: 4809528 - DNA, 25 bp, Homo sapien
gcaaaatggcgaaatccctctctac

SEQ ID NO: 4809529 - DNA, 25 bp, Homo sapien
atccccgcgccgtaacaatccttgg

SEQ ID NO: 4809530 - DNA, 25 bp, Homo sapien
atcctgcacctaaaatggtcctgcc

SEQ ID NO: 4809531 - DNA, 25 bp, Homo sapien
gccacctctcctggactaagtagca

SEQ ID NO: 4809532 - DNA, 25 bp, Homo sapien
gagccctgctcccttatcctgcacc

SEQ ID NO: 4809533 - DNA, 25 bp, Homo sapien
agggcgctcgggcagcagaattcgc

SEQ ID NO: 4809534 - DNA, 25 bp, Homo sapien
ccgggcaggcggagcgcgttgacgg

SEQ ID NO: 4809535 - DNA, 25 bp, Homo sapien
cgcgttgacggagggcgctcgggca

SEQ ID NO: 4809536 - DNA, 25 bp, Homo sapien
cgggcagcagaattcgcgcgtccat

SEQ ID NO: 4809537 - DNA, 25 bp, Homo sapien
gcaatgtcgtgtgcccttgatggta

SEQ ID NO: 4809538 - DNA, 25 bp, Homo sapien
gcacctggccgcgaatgtctctatt

SEQ ID NO: 4809539 - DNA, 25 bp, Homo sapien
caagccttgcagtaagttagtttca

SEQ ID NO: 4809540 - DNA, 25 bp, Homo sapien
gtagaaagtacctgccaagttgtcc

SEQ ID NO: 4809541 - DNA, 25 bp, Homo sapien
cgccgccatccgtgcgcagcgcggc

SEQ ID NO: 4809542 - DNA, 25 bp, Homo sapien
gcctgtcagtgtcgccctccccttg

SEQ ID NO: 4809543 - DNA, 25 bp, Homo sapien
agccggccccttgcttcgccacggc

SEQ ID NO: 4809544 - DNA, 25 bp, Homo sapien
gtggggggcgcctgtcagtgtcgcc

SEQ ID NO: 4809545 - DNA, 25 bp, Homo sapien
tgagcagccggccccttgcttcgcc

SEQ ID NO: 4809546 - DNA, 25 bp, Homo sapien
tggcaagaaggacattaccgccgcc

SEQ ID NO: 4809547 - DNA, 25 bp, Homo sapien
acttggctgaccgtatgggcacgcc

SEQ ID NO: 4809548 - DNA, 25 bp, Homo sapien
ccagaaggacattgatggcaagaag

SEQ ID NO: 4809549 - DNA, 25 bp, Homo sapien
acattggagtggtgaaccggagcca

SEQ ID NO: 4809550 - DNA, 25 bp, Homo sapien
gggacttcaagcactaaccaccaca

SEQ ID NO: 4809551 - DNA, 25 bp, Homo sapien
gttacaatgaacatccttatagatg

SEQ ID NO: 4809552 - DNA, 25 bp, Homo sapien
aacgatgttacaatgaacatcctta

SEQ ID NO: 4809553 - DNA, 25 bp, Homo sapien
caagtagtgggacttcaagcactaa

SEQ ID NO: 4809554 - DNA, 25 bp, Homo sapien
cctaaggaaacaatcgcagagaaag

SEQ ID NO: 4809555 - DNA, 25 bp, Homo sapien
gaaaagcaaaactatccacagagat

SEQ ID NO: 4809556 - DNA, 25 bp, Homo sapien
taaggaaacaatcgcagagaaagaa

SEQ ID NO: 4809557 - DNA, 25 bp, Homo sapien
tttggaatgagagtcaaagtgtttc

SEQ ID NO: 4809558 - DNA, 25 bp, Homo sapien
gaagttgcccaggtaggccagtgaa

SEQ ID NO: 4809559 - DNA, 25 bp, Homo sapien
accaggaagacccttgaatcaccat

SEQ ID NO: 4809560 - DNA, 25 bp, Homo sapien
atcaccatttggaacccacacttgg

SEQ ID NO: 4809561 - DNA, 25 bp, Homo sapien
cttggtgccatcagcgtcctgggac

SEQ ID NO: 4809562 - DNA, 25 bp, Homo sapien
gatagtctaaacactgggtagacgg

SEQ ID NO: 4809563 - DNA, 25 bp, Homo sapien
gagtcctgaacagatagtctaaaca

SEQ ID NO: 4809564 - DNA, 25 bp, Homo sapien
ctaaacactgggtagacggagtgga

SEQ ID NO: 4809565 - DNA, 25 bp, Homo sapien
agtcctgaacagatagtctaaacac

SEQ ID NO: 4809566 - DNA, 25 bp, Homo sapien
aggcaagtccatcccgtcctgagag

SEQ ID NO: 4809567 - DNA, 25 bp, Homo sapien
agtccatcccgtcctgagagcccca

SEQ ID NO: 4809568 - DNA, 25 bp, Homo sapien
cagctctctcctcgcttttctctcc

SEQ ID NO: 4809569 - DNA, 25 bp, Homo sapien
caagtccatcccgtcctgagagccc

SEQ ID NO: 4809570 - DNA, 25 bp, Homo sapien
ggccaattatatgagcctctggcta

SEQ ID NO: 4809571 - DNA, 25 bp, Homo sapien
cctggccaaggtggctaagggtcta

SEQ ID NO: 4809572 - DNA, 25 bp, Homo sapien
caacctctgctaggtatgatacagg

SEQ ID NO: 4809573 - DNA, 25 bp, Homo sapien
tccagaaatttaaggagtcagccct

SEQ ID NO: 4809574 - DNA, 25 bp, Homo sapien
tcatcattctcgtcagcccggtaaa

SEQ ID NO: 4809575 - DNA, 25 bp, Homo sapien
catcattctcgtcagcccggtaaaa

SEQ ID NO: 4809576 - DNA, 25 bp, Homo sapien
atcattctcgtcagcccggtaaaaa

SEQ ID NO: 4809577 - DNA, 25 bp, Homo sapien
tcattctcgtcagcccggtaaaaaa

SEQ ID NO: 4809578 - DNA, 25 bp, Homo sapien
cacactgccggcgaggctcacctcg

SEQ ID NO: 4809579 - DNA, 25 bp, Homo sapien
ctgccggcgaggctcacctcgcaaa

SEQ ID NO: 4809580 - DNA, 25 bp, Homo sapien
acactgccggcgaggctcacctcgc

SEQ ID NO: 4809581 - DNA, 25 bp, Homo sapien
ccggcgaggctcacctcgcaaagat

SEQ ID NO: 4809582 - DNA, 25 bp, Homo sapien
tcgttgcggtcgcccacaagccgta

SEQ ID NO: 4809583 - DNA, 25 bp, Homo sapien
tgcggtcgcccacaagccgtaagac

SEQ ID NO: 4809584 - DNA, 25 bp, Homo sapien
ggtcgcccacaagccgtaagaccag

SEQ ID NO: 4809585 - DNA, 25 bp, Homo sapien
cactcgttgcggtcgcccacaagcc

SEQ ID NO: 4809586 - DNA, 25 bp, Homo sapien
ttgggccagcctgctgatgtactcc

SEQ ID NO: 4809587 - DNA, 25 bp, Homo sapien
tcccggtgccgctccttcagcactg

SEQ ID NO: 4809588 - DNA, 25 bp, Homo sapien
cctctggctctggtacagtgcaatg

SEQ ID NO: 4809589 - DNA, 25 bp, Homo sapien
ctccttgtcttgggccagcctgctg

SEQ ID NO: 4809590 - DNA, 25 bp, Homo sapien
gaaagctggatgcagcgatgttcca

SEQ ID NO: 4809591 - DNA, 25 bp, Homo sapien
tgtctctccagaaagctggatgcag

SEQ ID NO: 4809592 - DNA, 25 bp, Homo sapien
tccagaaagctggatgcagcgatgt

SEQ ID NO: 4809593 - DNA, 25 bp, Homo sapien
gatgcagcgatgttccagttcctct

SEQ ID NO: 4809594 - DNA, 25 bp, Homo sapien
ttctcctgcatgagctccataaagc

SEQ ID NO: 4809595 - DNA, 25 bp, Homo sapien
gccttctcctgcatgagctccataa

SEQ ID NO: 4809596 - DNA, 25 bp, Homo sapien
cctgcatgagctccataaagcggct

SEQ ID NO: 4809597 - DNA, 25 bp, Homo sapien
ggtctgccttctcctgcatgagctc

SEQ ID NO: 4809598 - DNA, 25 bp, Homo sapien
ggagtcatatatcggcagcgacctg

SEQ ID NO: 4809599 - DNA, 25 bp, Homo sapien
aaaataatggagtcatatatcggca

SEQ ID NO: 4809600 - DNA, 25 bp, Homo sapien
aataatggagtcatatatcggcagc

SEQ ID NO: 4809601 - DNA, 25 bp, Homo sapien
aatggagtcatatatcggcagcgac

SEQ ID NO: 4809602 - DNA, 25 bp, Homo sapien
aggtgagccaggcgccggcagcgca

SEQ ID NO: 4809603 - DNA, 25 bp, Homo sapien
ttcagctgcccacgtagccttgcct

SEQ ID NO: 4809604 - DNA, 25 bp, Homo sapien
acacacagaatcacccccggtccct

SEQ ID NO: 4809605 - DNA, 25 bp, Homo sapien
ccaggcgccggcagcgcaccctttg

SEQ ID NO: 4809606 - DNA, 25 bp, Homo sapien
tccgggatgcttggcatgggctgag

SEQ ID NO: 4809607 - DNA, 25 bp, Homo sapien
cggctctccaggtcctccgggatgc

SEQ ID NO: 4809608 - DNA, 25 bp, Homo sapien
caggtcctccgggatgcttggcatg

SEQ ID NO: 4809609 - DNA, 25 bp, Homo sapien
ctccaggtcctccgggatgcttggc

SEQ ID NO: 4809610 - DNA, 25 bp, Homo sapien
cctcctcctcccggtccagtccatc

SEQ ID NO: 4809611 - DNA, 25 bp, Homo sapien
ctcctcctcccggtccagtccatct

SEQ ID NO: 4809612 - DNA, 25 bp, Homo sapien
tcctcctcctcccggtccagtccat

SEQ ID NO: 4809613 - DNA, 25 bp, Homo sapien
tcctcctcccggtccagtccatctc

SEQ ID NO: 4809614 - DNA, 25 bp, Homo sapien
catccttaggtaagctggtagtgcc

SEQ ID NO: 4809615 - DNA, 25 bp, Homo sapien
ccatccttaggtaagctggtagtgc

SEQ ID NO: 4809616 - DNA, 25 bp, Homo sapien
cccatccttaggtaagctggtagtg

SEQ ID NO: 4809617 - DNA, 25 bp, Homo sapien
atccttaggtaagctggtagtgccc

SEQ ID NO: 4809618 - DNA, 25 bp, Homo sapien
tcaattctacgctgctaacagtccc

SEQ ID NO: 4809619 - DNA, 25 bp, Homo sapien
cctcaattctacgctgctaacagtc

SEQ ID NO: 4809620 - DNA, 25 bp, Homo sapien
ctcaattctacgctgctaacagtcc

SEQ ID NO: 4809621 - DNA, 25 bp, Homo sapien
aactgggcccgtagctgctgattct

SEQ ID NO: 4809622 - DNA, 25 bp, Homo sapien
tcaactgggcccgtagctgctgatt

SEQ ID NO: 4809623 - DNA, 25 bp, Homo sapien
actgggcccgtagctgctgattctg

SEQ ID NO: 4809624 - DNA, 25 bp, Homo sapien
tgggcccgtagctgctgattctgct

SEQ ID NO: 4809625 - DNA, 25 bp, Homo sapien
tctgcagcagtagctgattatgcag

SEQ ID NO: 4809626 - DNA, 25 bp, Homo sapien
agcagtagctgattatgcagcacct

SEQ ID NO: 4809627 - DNA, 25 bp, Homo sapien
tgcagcagtagctgattatgcagca

SEQ ID NO: 4809628 - DNA, 25 bp, Homo sapien
gcagcagtagctgattatgcagcac

SEQ ID NO: 4809629 - DNA, 25 bp, Homo sapien
cctcttgacgtgctgctccgactgc

SEQ ID NO: 4809630 - DNA, 25 bp, Homo sapien
tgacgtgctgctccgactgcagtgc

SEQ ID NO: 4809631 - DNA, 25 bp, Homo sapien
tcttgacgtgctgctccgactgcag

SEQ ID NO: 4809632 - DNA, 25 bp, Homo sapien
ttgacgtgctgctccgactgcagtg

SEQ ID NO: 4809633 - DNA, 25 bp, Homo sapien
cctccagaagtaccatttcaagtga

SEQ ID NO: 4809634 - DNA, 25 bp, Homo sapien
ctccagaagtaccatttcaagtgag

SEQ ID NO: 4809635 - DNA, 25 bp, Homo sapien
gcctccagaagtaccatttcaagtg

SEQ ID NO: 4809636 - DNA, 25 bp, Homo sapien
ttacaaatccgctctgcagctcagc

SEQ ID NO: 4809637 - DNA, 25 bp, Homo sapien
cggttctgggagagtgcgcggctga

SEQ ID NO: 4809638 - DNA, 25 bp, Homo sapien
tgatggtagtgcggtcgttctgcat

SEQ ID NO: 4809639 - DNA, 25 bp, Homo sapien
tgctccttgagctcccggttctggg

SEQ ID NO: 4809640 - DNA, 25 bp, Homo sapien
ggtctccaggatttgcctgcgcgcc

SEQ ID NO: 4809641 - DNA, 25 bp, Homo sapien
tccaggatttgcctgcgcgcctccg

SEQ ID NO: 4809642 - DNA, 25 bp, Homo sapien
caggatttgcctgcgcgcctccgcc

SEQ ID NO: 4809643 - DNA, 25 bp, Homo sapien
tctccaggatttgcctgcgcgcctc

SEQ ID NO: 4809644 - DNA, 25 bp, Homo sapien
ctcattgtcttgcacctgggcttga

SEQ ID NO: 4809645 - DNA, 25 bp, Homo sapien
ttgtcttgcacctgggcttgaagct

SEQ ID NO: 4809646 - DNA, 25 bp, Homo sapien
cattgtcttgcacctgggcttgaag

SEQ ID NO: 4809647 - DNA, 25 bp, Homo sapien
cgcaggtgctcagcctccgcttgta

SEQ ID NO: 4809648 - DNA, 25 bp, Homo sapien
tgagaaaggacgcagacaataaaag

SEQ ID NO: 4809649 - DNA, 25 bp, Homo sapien
gaaaggacgcagacaataaaagcct

SEQ ID NO: 4809650 - DNA, 25 bp, Homo sapien
aaggacgcagacaataaaagcctct

SEQ ID NO: 4809651 - DNA, 25 bp, Homo sapien
gacgcagacaataaaagcctctgga

SEQ ID NO: 4809652 - DNA, 25 bp, Homo sapien
tccgatagcgacaactgtgggtggc

SEQ ID NO: 4809653 - DNA, 25 bp, Homo sapien
tgctgatgattcctcgcacccggat

SEQ ID NO: 4809654 - DNA, 25 bp, Homo sapien
gctcatggagatgacgagacttgcc

SEQ ID NO: 4809655 - DNA, 25 bp, Homo sapien
gggtggctgacaacgggcactcctt

SEQ ID NO: 4809656 - DNA, 25 bp, Homo sapien
gtacccgactcatgctacattcctt

SEQ ID NO: 4809657 - DNA, 25 bp, Homo sapien
cctgtacccgactcatgctacattc

SEQ ID NO: 4809658 - DNA, 25 bp, Homo sapien
tgtacccgactcatgctacattcct

SEQ ID NO: 4809659 - DNA, 25 bp, Homo sapien
tacccgactcatgctacattccttc

SEQ ID NO: 4809660 - DNA, 25 bp, Homo sapien
tctcctttgagattctccgcatatt

SEQ ID NO: 4809661 - DNA, 25 bp, Homo sapien
ctcctttgagattctccgcatattt

SEQ ID NO: 4809662 - DNA, 25 bp, Homo sapien
tctctcctttgagattctccgcata

SEQ ID NO: 4809663 - DNA, 25 bp, Homo sapien
ctctcctttgagattctccgcatat

SEQ ID NO: 4809664 - DNA, 25 bp, Homo sapien
cccgctcctccatggcctgctgtaa

SEQ ID NO: 4809665 - DNA, 25 bp, Homo sapien
gcccgctcctccatggcctgctgta

SEQ ID NO: 4809666 - DNA, 25 bp, Homo sapien
caggtgtgcttccagctgtgcccgc

SEQ ID NO: 4809667 - DNA, 25 bp, Homo sapien
ctgccccaggtgtgcttccagctgt

SEQ ID NO: 4809668 - DNA, 25 bp, Homo sapien
caggggcttcacaccggcttgaaaa

SEQ ID NO: 4809669 - DNA, 25 bp, Homo sapien
gcatcaggggcttcacaccggcttg

SEQ ID NO: 4809670 - DNA, 25 bp, Homo sapien
tcaggggcttcacaccggcttgaaa

SEQ ID NO: 4809671 - DNA, 25 bp, Homo sapien
ctgctggttagcatcaggggcttca

SEQ ID NO: 4809672 - DNA, 25 bp, Homo sapien
atggtgaagagcgagaagtttagat

SEQ ID NO: 4809673 - DNA, 25 bp, Homo sapien
tggatggtgaagagcgagaagttta

SEQ ID NO: 4809674 - DNA, 25 bp, Homo sapien
ggatggtgaagagcgagaagtttag

SEQ ID NO: 4809675 - DNA, 25 bp, Homo sapien
ctggatggtgaagagcgagaagttt

SEQ ID NO: 4809676 - DNA, 25 bp, Homo sapien
caggccgttccaaatagtgcccctt

SEQ ID NO: 4809677 - DNA, 25 bp, Homo sapien
tcaatgtgcaactcagtcaatacaa

SEQ ID NO: 4809678 - DNA, 25 bp, Homo sapien
ggcaaagccccgtatctacaaatac

SEQ ID NO: 4809679 - DNA, 25 bp, Homo sapien
caactcagtcaatacaactctgctg

SEQ ID NO: 4809680 - DNA, 25 bp, Homo sapien
cacccatggggctgcagcctcttgc

SEQ ID NO: 4809681 - DNA, 25 bp, Homo sapien
gttgaagcaggagttccgtcatctc

SEQ ID NO: 4809682 - DNA, 25 bp, Homo sapien
tgttgaagcaggagttccgtcatct

SEQ ID NO: 4809683 - DNA, 25 bp, Homo sapien
aagcaggagttccgtcatctctaac

SEQ ID NO: 4809684 - DNA, 25 bp, Homo sapien
tgaagcaggagttccgtcatctcta

SEQ ID NO: 4809685 - DNA, 25 bp, Homo sapien
cagtcactaggacccgaagcttctc

SEQ ID NO: 4809686 - DNA, 25 bp, Homo sapien
agccttctcagtcactaggacccga

SEQ ID NO: 4809687 - DNA, 25 bp, Homo sapien
tctcagtcactaggacccgaagctt

SEQ ID NO: 4809688 - DNA, 25 bp, Homo sapien
ttctcagtcactaggacccgaagct

SEQ ID NO: 4809689 - DNA, 25 bp, Homo sapien
acaggccagagaaaagatacgagtt

SEQ ID NO: 4809690 - DNA, 25 bp, Homo sapien
acacctctatgactacctcatcatg

SEQ ID NO: 4809691 - DNA, 25 bp, Homo sapien
aagatacgagttacccaaggctaca

SEQ ID NO: 4809692 - DNA, 25 bp, Homo sapien
cccaaggctacaccatgagtcagtg

SEQ ID NO: 4809693 - DNA, 25 bp, Homo sapien
gtgttcttgtataactccagcctga

SEQ ID NO: 4809694 - DNA, 25 bp, Homo sapien
tcttgtataactccagcctgagggc

SEQ ID NO: 4809695 - DNA, 25 bp, Homo sapien
aactccagcctgagggcgtctctct

SEQ ID NO: 4809696 - DNA, 25 bp, Homo sapien
gttcttgtataactccagcctgagg

SEQ ID NO: 4809697 - DNA, 25 bp, Homo sapien
cgagctctgcgtccagtgttcactc

SEQ ID NO: 4809698 - DNA, 25 bp, Homo sapien
cacagccaggtaacggcacagcggg

SEQ ID NO: 4809699 - DNA, 25 bp, Homo sapien
caggtaacggcacagcgggcacttg

SEQ ID NO: 4809700 - DNA, 25 bp, Homo sapien
gcgggcacttggcctccgagctctg

SEQ ID NO: 4809701 - DNA, 25 bp, Homo sapien
cacgccgccgggaatactgcaggcg

SEQ ID NO: 4809702 - DNA, 25 bp, Homo sapien
gccttcttctgctgcgtggagacag

SEQ ID NO: 4809703 - DNA, 25 bp, Homo sapien
caggcggctggccagatcttcagac

SEQ ID NO: 4809704 - DNA, 25 bp, Homo sapien
aactctcccacacgccgccgggaat

SEQ ID NO: 4809705 - DNA, 25 bp, Homo sapien
gctttctctgatacgaggatcccta

SEQ ID NO: 4809706 - DNA, 25 bp, Homo sapien
tttctctgatacgaggatccctatg

SEQ ID NO: 4809707 - DNA, 25 bp, Homo sapien
tctctgatacgaggatccctatggt

SEQ ID NO: 4809708 - DNA, 25 bp, Homo sapien
agctttctctgatacgaggatccct

SEQ ID NO: 4809709 - DNA, 25 bp, Homo sapien
tgggaggaaacccaagcaagtgctg

SEQ ID NO: 4809710 - DNA, 25 bp, Homo sapien
ctttgggaggaaacccaagcaagtg

SEQ ID NO: 4809711 - DNA, 25 bp, Homo sapien
gggaggaaacccaagcaagtgctga

SEQ ID NO: 4809712 - DNA, 25 bp, Homo sapien
acccaagcaagtgctgaaaaagaag

SEQ ID NO: 4809713 - DNA, 25 bp, Homo sapien
tgtaactgctcccttagggctccct

SEQ ID NO: 4809714 - DNA, 25 bp, Homo sapien
ctgtaactgctcccttagggctccc

SEQ ID NO: 4809715 - DNA, 25 bp, Homo sapien
ccaactgatccgtaatttcttggtt

SEQ ID NO: 4809716 - DNA, 25 bp, Homo sapien
tcttccaactgatccgtaatttctt

SEQ ID NO: 4809717 - DNA, 25 bp, Homo sapien
tccaactgatccgtaatttcttggt

SEQ ID NO: 4809718 - DNA, 25 bp, Homo sapien
cttccaactgatccgtaatttcttg

SEQ ID NO: 4809719 - DNA, 25 bp, Homo sapien
gaatctcgattctcttgaaaggaca

SEQ ID NO: 4809720 - DNA, 25 bp, Homo sapien
ggagaggtggcttgtcccaaatcaa

SEQ ID NO: 4809721 - DNA, 25 bp, Homo sapien
cttaatagcagggataccagacaga

SEQ ID NO: 4809722 - DNA, 25 bp, Homo sapien
gcccaggattagcagcatggaatca

SEQ ID NO: 4809723 - DNA, 25 bp, Homo sapien
ctaccgctagctgttggtaccggct

SEQ ID NO: 4809724 - DNA, 25 bp, Homo sapien
tggagtccagggctaccgctagctg

SEQ ID NO: 4809725 - DNA, 25 bp, Homo sapien
caatttctctatcgtgatattgagt

SEQ ID NO: 4809726 - DNA, 25 bp, Homo sapien
ctctatcgtgatattgagttgtttg

SEQ ID NO: 4809727 - DNA, 25 bp, Homo sapien
agagagagcaatcattagggttggg

SEQ ID NO: 4809728 - DNA, 25 bp, Homo sapien
gagttggaggaggattggggggaga

SEQ ID NO: 4809729 - DNA, 25 bp, Homo sapien
agagcaatcattagggttggggggt

SEQ ID NO: 4809730 - DNA, 25 bp, Homo sapien
gtagagagagcaatcattagggttg

SEQ ID NO: 4809731 - DNA, 25 bp, Homo sapien
tcaggttagcagacgatgcagggcc

SEQ ID NO: 4809732 - DNA, 25 bp, Homo sapien
cctccccattgacacatgtcgcaga

SEQ ID NO: 4809733 - DNA, 25 bp, Homo sapien
gatccttcaggttagcagacgatgc

SEQ ID NO: 4809734 - DNA, 25 bp, Homo sapien
gggccctccccattgacacatgtcg

SEQ ID NO: 4809735 - DNA, 25 bp, Homo sapien
caagaccattgagctgttgggagag

SEQ ID NO: 4809736 - DNA, 25 bp, Homo sapien
cgcaggctctcggttgatgagaaag

SEQ ID NO: 4809737 - DNA, 25 bp, Homo sapien
ctgttgggagagttgtcgcaggctc

SEQ ID NO: 4809738 - DNA, 25 bp, Homo sapien
acaaacaagaccattgagctgttgg

SEQ ID NO: 4809739 - DNA, 25 bp, Homo sapien
catccatgagattagggacattgtc

SEQ ID NO: 4809740 - DNA, 25 bp, Homo sapien
tccatgagattagggacattgtcag

SEQ ID NO: 4809741 - DNA, 25 bp, Homo sapien
catgagattagggacattgtcagca

SEQ ID NO: 4809742 - DNA, 25 bp, Homo sapien
ttcatccatgagattagggacattg

SEQ ID NO: 4809743 - DNA, 25 bp, Homo sapien
taacacggtgtcatcagatggttgt

SEQ ID NO: 4809744 - DNA, 25 bp, Homo sapien
tcagatggttgtagagtagcagcat

SEQ ID NO: 4809745 - DNA, 25 bp, Homo sapien
aacacggtgtcatcagatggttgta

SEQ ID NO: 4809746 - DNA, 25 bp, Homo sapien
agggacaccgccaggtaacacggtg

SEQ ID NO: 4809747 - DNA, 25 bp, Homo sapien
gtgtagtggcgagatctccactcac

SEQ ID NO: 4809748 - DNA, 25 bp, Homo sapien
tggagtgtagtggcgagatctccac

SEQ ID NO: 4809749 - DNA, 25 bp, Homo sapien
gctggagtgtagtggcgagatctcc

SEQ ID NO: 4809750 - DNA, 25 bp, Homo sapien
gagtgtagtggcgagatctccactc

SEQ ID NO: 4809751 - DNA, 25 bp, Homo sapien
cagagcattaggaaacaggctgaag

SEQ ID NO: 4809752 - DNA, 25 bp, Homo sapien
taacaggtatgagactggacaactc

SEQ ID NO: 4809753 - DNA, 25 bp, Homo sapien
ttttggctgcaggtcacctctaagc

SEQ ID NO: 4809754 - DNA, 25 bp, Homo sapien
aacaggatcaggctctattcgtgcc

SEQ ID NO: 4809755 - DNA, 25 bp, Homo sapien
ctagtctgagagtacccacactggg

SEQ ID NO: 4809756 - DNA, 25 bp, Homo sapien
tctaggtggtttactgatctttgcc

SEQ ID NO: 4809757 - DNA, 25 bp, Homo sapien
gggcagaacgtcttggtcactcatc

SEQ ID NO: 4809758 - DNA, 25 bp, Homo sapien
caaagtgcctttgttgtcaagagcc

SEQ ID NO: 4809759 - DNA, 25 bp, Homo sapien
gaacggttaaggtcggacaccagca

SEQ ID NO: 4809760 - DNA, 25 bp, Homo sapien
cttgtccaatggggggagcgctacc

SEQ ID NO: 4809761 - DNA, 25 bp, Homo sapien
cggttaaggtcggacaccagcacct

SEQ ID NO: 4809762 - DNA, 25 bp, Homo sapien
gagcgctaccccattggaacggtta

SEQ ID NO: 4809763 - DNA, 25 bp, Homo sapien
tcttccacaatcataacaattaccc

SEQ ID NO: 4809764 - DNA, 25 bp, Homo sapien
gtaggatacaaacccagaactctta

SEQ ID NO: 4809765 - DNA, 25 bp, Homo sapien
ctcttaatcagtacccaacagttct

SEQ ID NO: 4809766 - DNA, 25 bp, Homo sapien
aatcacatccctagcagatggacag

SEQ ID NO: 4809767 - DNA, 25 bp, Homo sapien
gtggcaaccaccagaagtggttgtc

SEQ ID NO: 4809768 - DNA, 25 bp, Homo sapien
gcaaccaccagaagtggttgtctca

SEQ ID NO: 4809769 - DNA, 25 bp, Homo sapien
ccaccagaagtggttgtctcagggt

SEQ ID NO: 4809770 - DNA, 25 bp, Homo sapien
accagaagtggttgtctcagggtta

SEQ ID NO: 4809771 - DNA, 25 bp, Homo sapien
tcctgtaggaacaccagggctattc

SEQ ID NO: 4809772 - DNA, 25 bp, Homo sapien
cgctcctgtaggaacaccagggcta

SEQ ID NO: 4809773 - DNA, 25 bp, Homo sapien
gtaggaacaccagggctattcctct

SEQ ID NO: 4809774 - DNA, 25 bp, Homo sapien
tttttcgctcctgtaggaacaccag

SEQ ID NO: 4809775 - DNA, 25 bp, Homo sapien
ttttcttcgctgcggccaatttgct

SEQ ID NO: 4809776 - DNA, 25 bp, Homo sapien
ttcttcgctgcggccaatttgctct

SEQ ID NO: 4809777 - DNA, 25 bp, Homo sapien
tgctctgtcgggtttcttccgacat

SEQ ID NO: 4809778 - DNA, 25 bp, Homo sapien
tttgctctgtcgggtttcttccgac

SEQ ID NO: 4809779 - DNA, 25 bp, Homo sapien
ggaggcggggttggggccacatcag

SEQ ID NO: 4809780 - DNA, 25 bp, Homo sapien
gggaggcggggttggggccacatca

SEQ ID NO: 4809781 - DNA, 25 bp, Homo sapien
tcccagtcgactgagaaccgccagg

SEQ ID NO: 4809782 - DNA, 25 bp, Homo sapien
ccaacagcagccaatccccgcttgg

SEQ ID NO: 4809783 - DNA, 25 bp, Homo sapien
catcctcgaccttcccttgtgcgct

SEQ ID NO: 4809784 - DNA, 25 bp, Homo sapien
tcgaccttcccttgtgcgctcccgg

SEQ ID NO: 4809785 - DNA, 25 bp, Homo sapien
gcagctgcgagatgtggattcctca

SEQ ID NO: 4809786 - DNA, 25 bp, Homo sapien
tttgtcatccggcacctacggagtt

SEQ ID NO: 4809787 - DNA, 25 bp, Homo sapien
aaatgtgtcacagagcagtgtcgcc

SEQ ID NO: 4809788 - DNA, 25 bp, Homo sapien
gccccactctagttttgctcagaag

SEQ ID NO: 4809789 - DNA, 25 bp, Homo sapien
aacttctgagtatcacaattatctg

SEQ ID NO: 4809790 - DNA, 25 bp, Homo sapien
cagactcagagtttgaaggggtttc

SEQ ID NO: 4809791 - DNA, 25 bp, Homo sapien
caggtactaattcccaaacttctga

SEQ ID NO: 4809792 - DNA, 25 bp, Homo sapien
cttgctctttaaaggccaggtacta

SEQ ID NO: 4809793 - DNA, 25 bp, Homo sapien
taaagtaggacttcaatgagctgac

SEQ ID NO: 4809794 - DNA, 25 bp, Homo sapien
ttatagcttaaagtaggacttcaat

SEQ ID NO: 4809795 - DNA, 25 bp, Homo sapien
tagcttaaagtaggacttcaatgag

SEQ ID NO: 4809796 - DNA, 25 bp, Homo sapien
cttaaagtaggacttcaatgagctg

SEQ ID NO: 4809797 - DNA, 25 bp, Homo sapien
taatctctgtgagacctagagcctc

SEQ ID NO: 4809798 - DNA, 25 bp, Homo sapien
gcaagtgagtgtcgttttaatcccc

SEQ ID NO: 4809799 - DNA, 25 bp, Homo sapien
tggcctacaggagcacgcgattaac

SEQ ID NO: 4809800 - DNA, 25 bp, Homo sapien
ttcagaggccacattacccagtcag

SEQ ID NO: 4809801 - DNA, 25 bp, Homo sapien
atcctcctgtgtggggatcgcaaag

SEQ ID NO: 4809802 - DNA, 25 bp, Homo sapien
tcctgtgtggggatcgcaaagtgct

SEQ ID NO: 4809803 - DNA, 25 bp, Homo sapien
ctcctgtgtggggatcgcaaagtgc

SEQ ID NO: 4809804 - DNA, 25 bp, Homo sapien
atctccatttactgccgccttgact

SEQ ID NO: 4809805 - DNA, 25 bp, Homo sapien
tcctgagatcatgagaggccatcac

SEQ ID NO: 4809806 - DNA, 25 bp, Homo sapien
gagttcccctatcctgctatcctga

SEQ ID NO: 4809807 - DNA, 25 bp, Homo sapien
gcccatgtgccctacgttcaagtta

SEQ ID NO: 4809808 - DNA, 25 bp, Homo sapien
tacagaagtgcgtcaccatagctgg

SEQ ID NO: 4809809 - DNA, 25 bp, Homo sapien
aggatgacggtgcagtgagtcatgt

SEQ ID NO: 4809810 - DNA, 25 bp, Homo sapien
agccagatactgtgtgcacgcctgc

SEQ ID NO: 4809811 - DNA, 25 bp, Homo sapien
ttagccagatactgtgtgcacgcct

SEQ ID NO: 4809812 - DNA, 25 bp, Homo sapien
agcctgggaggatgacggtgcagtg

SEQ ID NO: 4809813 - DNA, 25 bp, Homo sapien
caatgggtagactttgagtcacgct

SEQ ID NO: 4809814 - DNA, 25 bp, Homo sapien
gagtcacgctgattatccaccacaa

SEQ ID NO: 4809815 - DNA, 25 bp, Homo sapien
caccacaattgtgggcggagctcat

SEQ ID NO: 4809816 - DNA, 25 bp, Homo sapien
tttcaatcagtcaatgggtagactt

SEQ ID NO: 4809817 - DNA, 25 bp, Homo sapien
cctgggcaacaacagaaaaacaaca

SEQ ID NO: 4809818 - DNA, 25 bp, Homo sapien
cttctcagttgggtcaagtccattg

SEQ ID NO: 4809819 - DNA, 25 bp, Homo sapien
cacgcctggtctgccaatactttct

SEQ ID NO: 4809820 - DNA, 25 bp, Homo sapien
tgtgtcttacgtagaaaaggtgccc

SEQ ID NO: 4809821 - DNA, 25 bp, Homo sapien
gccgtctagcgcactacaaccttaa

SEQ ID NO: 4809822 - DNA, 25 bp, Homo sapien
gaccatcccggactggggagctgct

SEQ ID NO: 4809823 - DNA, 25 bp, Homo sapien
ggaccatcccggactggggagctgc

SEQ ID NO: 4809824 - DNA, 25 bp, Homo sapien
ccctgggagtcccaggaccatcccg

SEQ ID NO: 4809825 - DNA, 25 bp, Homo sapien
ccatcccggactggggagctgcttg

SEQ ID NO: 4809826 - DNA, 25 bp, Homo sapien
tagcagcccggatagcatcctggat

SEQ ID NO: 4809827 - DNA, 25 bp, Homo sapien
tcctggatgttggttaggtcccact

SEQ ID NO: 4809828 - DNA, 25 bp, Homo sapien
cactgtctagcgtgaagaagccgtc

SEQ ID NO: 4809829 - DNA, 25 bp, Homo sapien
tagttccaggccgatttcatgaacc

SEQ ID NO: 4809830 - DNA, 25 bp, Homo sapien
ctaagaggaattccggaggtgcaaa

SEQ ID NO: 4809831 - DNA, 25 bp, Homo sapien
gtgcaaagtagaggcatcggatgcc

SEQ ID NO: 4809832 - DNA, 25 bp, Homo sapien
ttcatgggccggatcaggcctctca

SEQ ID NO: 4809833 - DNA, 25 bp, Homo sapien
tcggatgccagttatcagcatcggg

SEQ ID NO: 4809834 - DNA, 25 bp, Homo sapien
ttagatcatatactctcagcaggac

SEQ ID NO: 4809835 - DNA, 25 bp, Homo sapien
caccaggtgcctggtagagtcagga

SEQ ID NO: 4809836 - DNA, 25 bp, Homo sapien
gaaacaggtagctcccgtctggttc

SEQ ID NO: 4809837 - DNA, 25 bp, Homo sapien
tccaatgatgtggtccctggtttcc

SEQ ID NO: 4809838 - DNA, 25 bp, Homo sapien
atcaccagggccttctgatgggagc

SEQ ID NO: 4809839 - DNA, 25 bp, Homo sapien
cttggataacggccagaatgcggtc

SEQ ID NO: 4809840 - DNA, 25 bp, Homo sapien
gccagaatgcggtccagcttctctc

SEQ ID NO: 4809841 - DNA, 25 bp, Homo sapien
catctgtagctttgcccaggaggcc

SEQ ID NO: 4809842 - DNA, 25 bp, Homo sapien
agcctcccgtcctcacggaagtcat

SEQ ID NO: 4809843 - DNA, 25 bp, Homo sapien
cccaggaggccacgcactgtgtaat

SEQ ID NO: 4809844 - DNA, 25 bp, Homo sapien
taggttgtcttctctaccagcctcc

SEQ ID NO: 4809845 - DNA, 25 bp, Homo sapien
gtgaccccattctaagccctagtag

SEQ ID NO: 4809846 - DNA, 25 bp, Homo sapien
cagtaacagggccagtctcacagta

SEQ ID NO: 4809847 - DNA, 25 bp, Homo sapien
tccctcaggaagctcatgtgcccag

SEQ ID NO: 4809848 - DNA, 25 bp, Homo sapien
ggtaaagatccgtcagtgaccccat

SEQ ID NO: 4809849 - DNA, 25 bp, Homo sapien
ggcttcctacaagactgctggctgg

SEQ ID NO: 4809850 - DNA, 25 bp, Homo sapien
ccagtcagcaggcttcctacaagac

SEQ ID NO: 4809851 - DNA, 25 bp, Homo sapien
ttcctacaagactgctggctggttt

SEQ ID NO: 4809852 - DNA, 25 bp, Homo sapien
tcagcaggcttcctacaagactgct

SEQ ID NO: 4809853 - DNA, 25 bp, Homo sapien
gcagcctccaaaggtactgaccgct

SEQ ID NO: 4809854 - DNA, 25 bp, Homo sapien
tccaaaggtactgaccgctgacagc

SEQ ID NO: 4809855 - DNA, 25 bp, Homo sapien
caaaggtactgaccgctgacagcca

SEQ ID NO: 4809856 - DNA, 25 bp, Homo sapien
accgctgacagccaccctgtggcca

SEQ ID NO: 4809857 - DNA, 25 bp, Homo sapien
gaagcaggctgtccccagaccctcg

SEQ ID NO: 4809858 - DNA, 25 bp, Homo sapien
gcaggctgtccccagaccctcgtac

SEQ ID NO: 4809859 - DNA, 25 bp, Homo sapien
ccaggaaaggaccaagggagaagca

SEQ ID NO: 4809860 - DNA, 25 bp, Homo sapien
ggagaagcaggctgtccccagaccc

SEQ ID NO: 4809861 - DNA, 25 bp, Homo sapien
gagcattgtacatatcggtgaggag

SEQ ID NO: 4809862 - DNA, 25 bp, Homo sapien
gtaagatgagcattgtacatatcgg

SEQ ID NO: 4809863 - DNA, 25 bp, Homo sapien
gatgagcattgtacatatcggtgag

SEQ ID NO: 4809864 - DNA, 25 bp, Homo sapien
cattgtacatatcggtgaggagcct

SEQ ID NO: 4809865 - DNA, 25 bp, Homo sapien
catcagaatactcccttttctgatg

SEQ ID NO: 4809866 - DNA, 25 bp, Homo sapien
tgaaaagcagccagcgtcatctcac

SEQ ID NO: 4809867 - DNA, 25 bp, Homo sapien
gctgccaaaggcaacaagaaggcaa

SEQ ID NO: 4809868 - DNA, 25 bp, Homo sapien
gcaggtgcacccctctgggtatata

SEQ ID NO: 4809869 - DNA, 25 bp, Homo sapien
agggggcctaggatccctgccaagc

SEQ ID NO: 4809870 - DNA, 25 bp, Homo sapien
cctgccaagctctccacaggattct

SEQ ID NO: 4809871 - DNA, 25 bp, Homo sapien
tgactcatggttggagggggcctag

SEQ ID NO: 4809872 - DNA, 25 bp, Homo sapien
ccatatgcactgaatctgactcatg

SEQ ID NO: 4809873 - DNA, 25 bp, Homo sapien
tctggctgagggacagaataactct

SEQ ID NO: 4809874 - DNA, 25 bp, Homo sapien
cacagatggctcatgactagggctt

SEQ ID NO: 4809875 - DNA, 25 bp, Homo sapien
gaataactctgcattcactcgtggg

SEQ ID NO: 4809876 - DNA, 25 bp, Homo sapien
tggccattaggtccagagtcacgcg

SEQ ID NO: 4809877 - DNA, 25 bp, Homo sapien
gatgtcccacgccaaccttgagatg

SEQ ID NO: 4809878 - DNA, 25 bp, Homo sapien
aagcctgggcatccaaccgatgtcc

SEQ ID NO: 4809879 - DNA, 25 bp, Homo sapien
gagatgggcgaatgctggtccacat

SEQ ID NO: 4809880 - DNA, 25 bp, Homo sapien
cagaagcctgggcatccaaccgatg

SEQ ID NO: 4809881 - DNA, 25 bp, Homo sapien
gggcccagcaagaagcgaacacgct

SEQ ID NO: 4809882 - DNA, 25 bp, Homo sapien
tgaaagagggtacgctggtggctgt

SEQ ID NO: 4809883 - DNA, 25 bp, Homo sapien
ccagtggatggttgatgaaagaggg

SEQ ID NO: 4809884 - DNA, 25 bp, Homo sapien
gtttaggagcgggaggcttcctggc

SEQ ID NO: 4809885 - DNA, 25 bp, Homo sapien
gcaccacgatgctgaccaggaatat

SEQ ID NO: 4809886 - DNA, 25 bp, Homo sapien
tccaagagaacgagagcgggaacgt

SEQ ID NO: 4809887 - DNA, 25 bp, Homo sapien
caggcggattcaaacagactctaca

SEQ ID NO: 4809888 - DNA, 25 bp, Homo sapien
tctgcccaggtgaataggtcacgtg

SEQ ID NO: 4809889 - DNA, 25 bp, Homo sapien
cttcagaagttgtagctccactgta

SEQ ID NO: 4809890 - DNA, 25 bp, Homo sapien
gaaaagcccatgcagccgcgacaag

SEQ ID NO: 4809891 - DNA, 25 bp, Homo sapien
tcccgcaggtgcttccattttagcc

SEQ ID NO: 4809892 - DNA, 25 bp, Homo sapien
ttatagaccgcgaaaagcccatgca

SEQ ID NO: 4809893 - DNA, 25 bp, Homo sapien
tggacgtagacggtagacagttcgc

SEQ ID NO: 4809894 - DNA, 25 bp, Homo sapien
tctgcccgtgaagcgatgtttcccc

SEQ ID NO: 4809895 - DNA, 25 bp, Homo sapien
acttgaagatcacagcacccgctgg

SEQ ID NO: 4809896 - DNA, 25 bp, Homo sapien
aatgtggtcctttccacgggcgccg

SEQ ID NO: 4809897 - DNA, 25 bp, Homo sapien
atgggcgtgaaaccgaaagtctgtc

SEQ ID NO: 4809898 - DNA, 25 bp, Homo sapien
tggttgcagctcgtaaccactcgga

SEQ ID NO: 4809899 - DNA, 25 bp, Homo sapien
tactagaaagtcaactccgaggtcg

SEQ ID NO: 4809900 - DNA, 25 bp, Homo sapien
tggatcccacctaaacgcactgaat

SEQ ID NO: 4809901 - DNA, 25 bp, Homo sapien
cctgtagtcctagcagtgagctatg

SEQ ID NO: 4809902 - DNA, 25 bp, Homo sapien
gcctgtagtcctagcagtgagctat

SEQ ID NO: 4809903 - DNA, 25 bp, Homo sapien
taaaaaactagctgcatgcctgtag

SEQ ID NO: 4809904 - DNA, 25 bp, Homo sapien
atttaaaaaactagctgcatgcctg

SEQ ID NO: 4809905 - DNA, 25 bp, Homo sapien
cagctgaccccgtagagattaggga

SEQ ID NO: 4809906 - DNA, 25 bp, Homo sapien
tgctgtgagcaccactggcctttcc

SEQ ID NO: 4809907 - DNA, 25 bp, Homo sapien
catcctggagtgtttagcctggctt

SEQ ID NO: 4809908 - DNA, 25 bp, Homo sapien
ctgcactaatggagcagcagagccc

SEQ ID NO: 4809909 - DNA, 25 bp, Homo sapien
tggtactgctttggtttctccagtg

SEQ ID NO: 4809910 - DNA, 25 bp, Homo sapien
aggcctgatccaatgtccggtggta

SEQ ID NO: 4809911 - DNA, 25 bp, Homo sapien
cctgatccaatgtccggtggtactg

SEQ ID NO: 4809912 - DNA, 25 bp, Homo sapien
caatgtccggtggtactgctttggt

SEQ ID NO: 4809913 - DNA, 25 bp, Homo sapien
cacttgcatatgacctcagtagttg

SEQ ID NO: 4809914 - DNA, 25 bp, Homo sapien
tatgacctcagtagttgatgtggaa

SEQ ID NO: 4809915 - DNA, 25 bp, Homo sapien
tgcccacttgcatatgacctcagta

SEQ ID NO: 4809916 - DNA, 25 bp, Homo sapien
tgcatatgacctcagtagttgatgt

SEQ ID NO: 4809917 - DNA, 25 bp, Homo sapien
atgaccacactaggctcagctagaa

SEQ ID NO: 4809918 - DNA, 25 bp, Homo sapien
acaacctttgaatgaccacactagg

SEQ ID NO: 4809919 - DNA, 25 bp, Homo sapien
actaggctcagctagaagtccaatg

SEQ ID NO: 4809920 - DNA, 25 bp, Homo sapien
cctttgaatgaccacactaggctca

SEQ ID NO: 4809921 - DNA, 25 bp, Homo sapien
ccttccaaagaaacgattgaacagg

SEQ ID NO: 4809922 - DNA, 25 bp, Homo sapien
tccaaagaaacgattgaacaggaga

SEQ ID NO: 4809923 - DNA, 25 bp, Homo sapien
gccttccaaagaaacgattgaacag

SEQ ID NO: 4809924 - DNA, 25 bp, Homo sapien
ttccaaagaaacgattgaacaggag

SEQ ID NO: 4809925 - DNA, 25 bp, Homo sapien
aggctgtaatgcagtttaatcagag

SEQ ID NO: 4809926 - DNA, 25 bp, Homo sapien
gctggcccaaggtgtcctgcaggct

SEQ ID NO: 4809927 - DNA, 25 bp, Homo sapien
tgtaatgcagtttaatcagagtgcc

SEQ ID NO: 4809928 - DNA, 25 bp, Homo sapien
taatgcagtttaatcagagtgccat

SEQ ID NO: 4809929 - DNA, 25 bp, Homo sapien
gaaagtctcatgtccaagttccgtc

SEQ ID NO: 4809930 - DNA, 25 bp, Homo sapien
caggcgaggagaagctgtgattccc

SEQ ID NO: 4809931 - DNA, 25 bp, Homo sapien
gactgacgggttttctcaggatgat

SEQ ID NO: 4809932 - DNA, 25 bp, Homo sapien
gagcagggagcttataaatggaacc

SEQ ID NO: 4809933 - DNA, 25 bp, Homo sapien
cccgctagactgtgagtgccctaaa

SEQ ID NO: 4809934 - DNA, 25 bp, Homo sapien
gataagcagctacgtggctcacggt

SEQ ID NO: 4809935 - DNA, 25 bp, Homo sapien
gcccaagcggtgtgtagactgaaga

SEQ ID NO: 4809936 - DNA, 25 bp, Homo sapien
tccaaccagacgagtagatgggctg

SEQ ID NO: 4809937 - DNA, 25 bp, Homo sapien
tcagtctaaacatggagtggccgct

SEQ ID NO: 4809938 - DNA, 25 bp, Homo sapien
ttggactagcaagtagaagcctggg

SEQ ID NO: 4809939 - DNA, 25 bp, Homo sapien
tacccaaagactggaggcttctcag

SEQ ID NO: 4809940 - DNA, 25 bp, Homo sapien
gagatacttgatggcgcgaatgtcc

SEQ ID NO: 4809941 - DNA, 25 bp, Homo sapien
ccaattaatactgaagagtagggca

SEQ ID NO: 4809942 - DNA, 25 bp, Homo sapien
catgtccaaggcacaccagacgatt

SEQ ID NO: 4809943 - DNA, 25 bp, Homo sapien
caagcactgtggttgaaattggcca

SEQ ID NO: 4809944 - DNA, 25 bp, Homo sapien
ggcacaccagacgatttcaggtcat

SEQ ID NO: 4809945 - DNA, 25 bp, Homo sapien
actggtcacccgcagagaaggaaga

SEQ ID NO: 4809946 - DNA, 25 bp, Homo sapien
caactgcgaaacgagttagcgggcg

SEQ ID NO: 4809947 - DNA, 25 bp, Homo sapien
tgaaaggaggaaaaacgacgcgatc

SEQ ID NO: 4809948 - DNA, 25 bp, Homo sapien
ccaaagccgaggagattgccgggct

SEQ ID NO: 4809949 - DNA, 25 bp, Homo sapien
agccacaattctcggttggccgcag

SEQ ID NO: 4809950 - DNA, 25 bp, Homo sapien
tttggacaatcagtggcgaagcccc

SEQ ID NO: 4809951 - DNA, 25 bp, Homo sapien
gactcgtacaagaattgcgtttgga

SEQ ID NO: 4809952 - DNA, 25 bp, Homo sapien
acaatcagtggcgaagcccctgagt

SEQ ID NO: 4809953 - DNA, 25 bp, Homo sapien
gcgggcttttagtgggccgctccaa

SEQ ID NO: 4809954 - DNA, 25 bp, Homo sapien
gcgctctccgctttcctgtggctga

SEQ ID NO: 4809955 - DNA, 25 bp, Homo sapien
ggctcggctgcaattggtactggat

SEQ ID NO: 4809956 - DNA, 25 bp, Homo sapien
ctggcgtggctccttcgatcgcggc

SEQ ID NO: 4809957 - DNA, 25 bp, Homo sapien
tttgaccaaacattgtgctcagcac

SEQ ID NO: 4809958 - DNA, 25 bp, Homo sapien
cgcaccaggcctttaccaaggattt

SEQ ID NO: 4809959 - DNA, 25 bp, Homo sapien
ttaccaaggatttgaccaaacattg

SEQ ID NO: 4809960 - DNA, 25 bp, Homo sapien
ccgcaccaggcctttaccaaggatt

SEQ ID NO: 4809961 - DNA, 25 bp, Homo sapien
gagatggatcccattccctaaaggt

SEQ ID NO: 4809962 - DNA, 25 bp, Homo sapien
ggactgcagatcctgtcagacctgg

SEQ ID NO: 4809963 - DNA, 25 bp, Homo sapien
gaggtaaagcaggacccttgcagac

SEQ ID NO: 4809964 - DNA, 25 bp, Homo sapien
gacctgtctttcatcgggagaaacc

SEQ ID NO: 4809965 - DNA, 25 bp, Homo sapien
tctactcttcggtcattgtggctgg

SEQ ID NO: 4809966 - DNA, 25 bp, Homo sapien
actaaccaatgtggccaccagaggg

SEQ ID NO: 4809967 - DNA, 25 bp, Homo sapien
gtatagagtggcctagcctgagccc

SEQ ID NO: 4809968 - DNA, 25 bp, Homo sapien
tcatctcttgtgcagctgaaaccct

SEQ ID NO: 4809969 - DNA, 25 bp, Homo sapien
gctgaagtagagtgggtccctaatc

SEQ ID NO: 4809970 - DNA, 25 bp, Homo sapien
gagttatgctgccaaggaaccacca

SEQ ID NO: 4809971 - DNA, 25 bp, Homo sapien
cacacacagaacaccagatggaggt

SEQ ID NO: 4809972 - DNA, 25 bp, Homo sapien
ttagaacaaggttgggaatacatcc

SEQ ID NO: 4809973 - DNA, 25 bp, Homo sapien
taggtaatgttccatcacaagggtt

SEQ ID NO: 4809974 - DNA, 25 bp, Homo sapien
ggttaagtgacctctctacagaaga

SEQ ID NO: 4809975 - DNA, 25 bp, Homo sapien
gggtccccgagttagctgttacagc

SEQ ID NO: 4809976 - DNA, 25 bp, Homo sapien
taagcctccagtggtggaactcgtg

SEQ ID NO: 4809977 - DNA, 25 bp, Homo sapien
aacaggagaaggagtgcctcatgtc

SEQ ID NO: 4809978 - DNA, 25 bp, Homo sapien
caggagaaggagtgcctcatgtcca

SEQ ID NO: 4809979 - DNA, 25 bp, Homo sapien
tggtggaggcggaaatggatggggc

SEQ ID NO: 4809980 - DNA, 25 bp, Homo sapien
gctggtggaggcggaaatggatggg

SEQ ID NO: 4809981 - DNA, 25 bp, Homo sapien
caactataagagtcaggtaggcctc

SEQ ID NO: 4809982 - DNA, 25 bp, Homo sapien
tgaacaaagagattgaggcggtact

SEQ ID NO: 4809983 - DNA, 25 bp, Homo sapien
tgttggtccctaggtgatgaagacc

SEQ ID NO: 4809984 - DNA, 25 bp, Homo sapien
tcatcaaaacgtggctctacctaag

SEQ ID NO: 4809985 - DNA, 25 bp, Homo sapien
gcaggacagccagtagacattttta

SEQ ID NO: 4809986 - DNA, 25 bp, Homo sapien
tgaactgtcaggagggaacaaactg

SEQ ID NO: 4809987 - DNA, 25 bp, Homo sapien
gcacttcacaatagaccctcgaggg

SEQ ID NO: 4809988 - DNA, 25 bp, Homo sapien
taaagtacttggtgcctgaaacatc

SEQ ID NO: 4809989 - DNA, 25 bp, Homo sapien
caggaccttagcctcttgaaaaaat

SEQ ID NO: 4809990 - DNA, 25 bp, Homo sapien
gtcaggaccttagcctcttgaaaaa

SEQ ID NO: 4809991 - DNA, 25 bp, Homo sapien
ccagtcaggaccttagcctcttgaa

SEQ ID NO: 4809992 - DNA, 25 bp, Homo sapien
accttagcctcttgaaaaaatagca

SEQ ID NO: 4809993 - DNA, 25 bp, Homo sapien
tttaaattagcaatagagatctcac

SEQ ID NO: 4809994 - DNA, 25 bp, Homo sapien
taaattagcaatagagatctcacta

SEQ ID NO: 4809995 - DNA, 25 bp, Homo sapien
ttaaattagcaatagagatctcact

SEQ ID NO: 4809996 - DNA, 25 bp, Homo sapien
cagtgtgtgttgacctttgagggcc

SEQ ID NO: 4809997 - DNA, 25 bp, Homo sapien
tctcagacctccaggtgaaggtaca

SEQ ID NO: 4809998 - DNA, 25 bp, Homo sapien
gatcacttcgtgtcccaaaggaatg

SEQ ID NO: 4809999 - DNA, 25 bp, Homo sapien
tttgagggcctgaccaacagcaagg

SEQ ID NO: 4810000 - DNA, 25 bp, Homo sapien
tgcaactggaacactcctctgacgc

SEQ ID NO: 4810001 - DNA, 25 bp, Homo sapien
tctgacgcatcgtgggttccgttcc

SEQ ID NO: 4810002 - DNA, 25 bp, Homo sapien
cgttccccgactcacttctcattgc

SEQ ID NO: 4810003 - DNA, 25 bp, Homo sapien
gaacactcctctgacgcatcgtggg

SEQ ID NO: 4810004 - DNA, 25 bp, Homo sapien
gctttgacttgccagcccaattaat

SEQ ID NO: 4810005 - DNA, 25 bp, Homo sapien
gggctttgacttgccagcccaatta

SEQ ID NO: 4810006 - DNA, 25 bp, Homo sapien
gcccaattaatttctcagggaatac

SEQ ID NO: 4810007 - DNA, 25 bp, Homo sapien
caattaatttctcagggaatacaga

SEQ ID NO: 4810008 - DNA, 25 bp, Homo sapien
gtgccaatagttcctagttacctta

SEQ ID NO: 4810009 - DNA, 25 bp, Homo sapien
agccaagaagacacttcttatagaa

SEQ ID NO: 4810010 - DNA, 25 bp, Homo sapien
gggtacatgccataacaaatctgga

SEQ ID NO: 4810011 - DNA, 25 bp, Homo sapien
taccttaatagctcctgacgtcagc

SEQ ID NO: 4810012 - DNA, 25 bp, Homo sapien
tccatagggctgaaatatggtgttc

SEQ ID NO: 4810013 - DNA, 25 bp, Homo sapien
catgcagaagtggacatcttataca

SEQ ID NO: 4810014 - DNA, 25 bp, Homo sapien
ttgggaacactgttatcagaaactc

SEQ ID NO: 4810015 - DNA, 25 bp, Homo sapien
ttgtctggagcagatcatgcagaag

SEQ ID NO: 4810016 - DNA, 25 bp, Homo sapien
tagttgaggccagatacttacatgc

SEQ ID NO: 4810017 - DNA, 25 bp, Homo sapien
gatggctagggatccatgaaccagg

SEQ ID NO: 4810018 - DNA, 25 bp, Homo sapien
ggtagttccttaagagatccacgtg

SEQ ID NO: 4810019 - DNA, 25 bp, Homo sapien
acaaatgcactctgagctggaggga

SEQ ID NO: 4810020 - DNA, 25 bp, Homo sapien
tggcataattcatccgggtgtggtg

SEQ ID NO: 4810021 - DNA, 25 bp, Homo sapien
ggcataattcatccgggtgtggtgg

SEQ ID NO: 4810022 - DNA, 25 bp, Homo sapien
gcaggcagcagtacgagcagtgcat

SEQ ID NO: 4810023 - DNA, 25 bp, Homo sapien
tgttttgcctcctcgggtagtgtgc

SEQ ID NO: 4810024 - DNA, 25 bp, Homo sapien
gcagctcttctaccgggacactgag

SEQ ID NO: 4810025 - DNA, 25 bp, Homo sapien
tcctttccgaggagagagcggcgct

SEQ ID NO: 4810026 - DNA, 25 bp, Homo sapien
gcaggacacgcataactaaggaggc

SEQ ID NO: 4810027 - DNA, 25 bp, Homo sapien
gagtcttgcagagcaccaatgtcca

SEQ ID NO: 4810028 - DNA, 25 bp, Homo sapien
taaggaggccggcagtgtatctctg

SEQ ID NO: 4810029 - DNA, 25 bp, Homo sapien
ggcagacccgccaggaaaatgaagg

SEQ ID NO: 4810030 - DNA, 25 bp, Homo sapien
tcccgagggttagaatattctttga

SEQ ID NO: 4810031 - DNA, 25 bp, Homo sapien
aacagaatggcacagatactcagta

SEQ ID NO: 4810032 - DNA, 25 bp, Homo sapien
ggagataaaacatcctatatgagga

SEQ ID NO: 4810033 - DNA, 25 bp, Homo sapien
tgaacttgccaaaactttctgagag

SEQ ID NO: 4810034 - DNA, 25 bp, Homo sapien
tgtttgatacactacacattgtttt

SEQ ID NO: 4810035 - DNA, 25 bp, Homo sapien
ttttgtagcacataccagtactcca

SEQ ID NO: 4810036 - DNA, 25 bp, Homo sapien
atttcactgtttgatacactacaca

SEQ ID NO: 4810037 - DNA, 25 bp, Homo sapien
tagcacataccagtactccattcct

SEQ ID NO: 4810038 - DNA, 25 bp, Homo sapien
cagactggaggtcagtggcttttca

SEQ ID NO: 4810039 - DNA, 25 bp, Homo sapien
cagcccagaaattgatttctatttg

SEQ ID NO: 4810040 - DNA, 25 bp, Homo sapien
tctatttgccattctccaaaagaca

SEQ ID NO: 4810041 - DNA, 25 bp, Homo sapien
ggcttttcacagctgcagttatagc

SEQ ID NO: 4810042 - DNA, 25 bp, Homo sapien
tccaacagttcagccgggatgtgga

SEQ ID NO: 4810043 - DNA, 25 bp, Homo sapien
ggagaatctcaaaccctccaacagt

SEQ ID NO: 4810044 - DNA, 25 bp, Homo sapien
caaacagcgagtgatgagtcgtaca

SEQ ID NO: 4810045 - DNA, 25 bp, Homo sapien
caaagctaggagaatctcaaaccct

SEQ ID NO: 4810046 - DNA, 25 bp, Homo sapien
ccttgaactaggattgctgtgcatt

SEQ ID NO: 4810047 - DNA, 25 bp, Homo sapien
actgaccgagtggagagagtgtctc

SEQ ID NO: 4810048 - DNA, 25 bp, Homo sapien
taagtttatcatagagccatgccat

SEQ ID NO: 4810049 - DNA, 25 bp, Homo sapien
tctggagtctaggtttgactgaccg

SEQ ID NO: 4810050 - DNA, 25 bp, Homo sapien
tccttaaaaggaatgtgaggttgcc

SEQ ID NO: 4810051 - DNA, 25 bp, Homo sapien
gggagaaatgctccctgccatccct

SEQ ID NO: 4810052 - DNA, 25 bp, Homo sapien
cattaggtaaagatggccagttgca

SEQ ID NO: 4810053 - DNA, 25 bp, Homo sapien
tgtcaggtgtcagggtgtgccatcc

SEQ ID NO: 4810054 - DNA, 25 bp, Homo sapien
gagaaaatggtgcttcactaacccg

SEQ ID NO: 4810055 - DNA, 25 bp, Homo sapien
ggagttcacccgctcgcttttcgtg

SEQ ID NO: 4810056 - DNA, 25 bp, Homo sapien
tcagaaaatcgaagcagctggctcc

SEQ ID NO: 4810057 - DNA, 25 bp, Homo sapien
ttttcgtgaactgagccactccctg

SEQ ID NO: 4810058 - DNA, 25 bp, Homo sapien
agaaacacaaggctcggcacagcga

SEQ ID NO: 4810059 - DNA, 25 bp, Homo sapien
aggctcggcacagcgaaggcttgca

SEQ ID NO: 4810060 - DNA, 25 bp, Homo sapien
tttggcttgcgtcagaaacacaagg

SEQ ID NO: 4810061 - DNA, 25 bp, Homo sapien
tcttcatttggcttgcgtcagaaac

SEQ ID NO: 4810062 - DNA, 25 bp, Homo sapien
tttctggagatcaaacagctgcacg

SEQ ID NO: 4810063 - DNA, 25 bp, Homo sapien
ggcccttgttccgtgaactctgtgc

SEQ ID NO: 4810064 - DNA, 25 bp, Homo sapien
tcgcccgcagccaagagctgagtct

SEQ ID NO: 4810065 - DNA, 25 bp, Homo sapien
gttgaactccagacagtagacaggg

SEQ ID NO: 4810066 - DNA, 25 bp, Homo sapien
gagacagatacgtggagtaagagaa

SEQ ID NO: 4810067 - DNA, 25 bp, Homo sapien
tacgtggagtaagagaaactctaga

SEQ ID NO: 4810068 - DNA, 25 bp, Homo sapien
aaagagagacagatacgtggagtaa

SEQ ID NO: 4810069 - DNA, 25 bp, Homo sapien
agtaagagaaactctagagaccaac

SEQ ID NO: 4810070 - DNA, 25 bp, Homo sapien
accagcgcacagcaaacagatactt

SEQ ID NO: 4810071 - DNA, 25 bp, Homo sapien
aggcagctgcaaaaaccaagggccg

SEQ ID NO: 4810072 - DNA, 25 bp, Homo sapien
gagagctgcagcgaagtcaagggag

SEQ ID NO: 4810073 - DNA, 25 bp, Homo sapien
gcaaacagatacttgagggagagct

SEQ ID NO: 4810074 - DNA, 25 bp, Homo sapien
tgcagcatggagtacaggtggacat

SEQ ID NO: 4810075 - DNA, 25 bp, Homo sapien
agtcccagcgctcaggaagagattc

SEQ ID NO: 4810076 - DNA, 25 bp, Homo sapien
gcccgtcagtcccagcgctcaggaa

SEQ ID NO: 4810077 - DNA, 25 bp, Homo sapien
tcagtcccagcgctcaggaagagat

SEQ ID NO: 4810078 - DNA, 25 bp, Homo sapien
ggagctgggcatccgcgtgagggct

SEQ ID NO: 4810079 - DNA, 25 bp, Homo sapien
ccagggaacacttgagcgggaagcc

SEQ ID NO: 4810080 - DNA, 25 bp, Homo sapien
cgggaagccgccttccgtgcccaga

SEQ ID NO: 4810081 - DNA, 25 bp, Homo sapien
gaacagctcacagagtagatgggac

SEQ ID NO: 4810082 - DNA, 25 bp, Homo sapien
tgtggagaaatggcagcagcagggt

SEQ ID NO: 4810083 - DNA, 25 bp, Homo sapien
gtcagagccaagggcatcagatggc

SEQ ID NO: 4810084 - DNA, 25 bp, Homo sapien
cagcagggtcagagccaagggcatc

SEQ ID NO: 4810085 - DNA, 25 bp, Homo sapien
agcagcagggtcagagccaagggca

SEQ ID NO: 4810086 - DNA, 25 bp, Homo sapien
cggcgcaggccagggcagtttccgg

SEQ ID NO: 4810087 - DNA, 25 bp, Homo sapien
cgcaggccagggcagtttccgggtg

SEQ ID NO: 4810088 - DNA, 25 bp, Homo sapien
caggccagggcagtttccgggtgcc

SEQ ID NO: 4810089 - DNA, 25 bp, Homo sapien
ccagggcagtttccgggtgcccacg

SEQ ID NO: 4810090 - DNA, 25 bp, Homo sapien
gaccagggcgaagccctctgtgagc

SEQ ID NO: 4810091 - DNA, 25 bp, Homo sapien
ctgcatgaccagggcgaagccctct

SEQ ID NO: 4810092 - DNA, 25 bp, Homo sapien
gctgcagctggcctaccccgatgcc

SEQ ID NO: 4810093 - DNA, 25 bp, Homo sapien
agctgcagctggcctaccccgatgc

SEQ ID NO: 4810094 - DNA, 25 bp, Homo sapien
acctggaagcggtggctgtgcccag

SEQ ID NO: 4810095 - DNA, 25 bp, Homo sapien
gagtagcaccttcccgtcggtggcc

SEQ ID NO: 4810096 - DNA, 25 bp, Homo sapien
tgccagagtagcaccttcccgtcgg

SEQ ID NO: 4810097 - DNA, 25 bp, Homo sapien
ccagagtagcaccttcccgtcggtg

SEQ ID NO: 4810098 - DNA, 25 bp, Homo sapien
gttaacagcatgcagggccaggatg

SEQ ID NO: 4810099 - DNA, 25 bp, Homo sapien
attctccgggaggccccagaaccag

SEQ ID NO: 4810100 - DNA, 25 bp, Homo sapien
aggatggagacaagggacacctgcc

SEQ ID NO: 4810101 - DNA, 25 bp, Homo sapien
acacctgcccaggtgtcacgctcca

SEQ ID NO: 4810102 - DNA, 25 bp, Homo sapien
caccccgcccggcagcccctgccct

SEQ ID NO: 4810103 - DNA, 25 bp, Homo sapien
tcagggcccaccccgcccggcagcc

SEQ ID NO: 4810104 - DNA, 25 bp, Homo sapien
tctgcctcagggcccaccccgcccg

SEQ ID NO: 4810105 - DNA, 25 bp, Homo sapien
gcccaccccgcccggcagcccctgc

SEQ ID NO: 4810106 - DNA, 25 bp, Homo sapien
tgtcatccgtcaggcctgtgcgcca

SEQ ID NO: 4810107 - DNA, 25 bp, Homo sapien
aggcctgtgcgccacagcagcgggt

SEQ ID NO: 4810108 - DNA, 25 bp, Homo sapien
cagcgggtcctcaagacggctcagg

SEQ ID NO: 4810109 - DNA, 25 bp, Homo sapien
tgtgggtgtcatccgtcaggcctgt

SEQ ID NO: 4810110 - DNA, 25 bp, Homo sapien
ccccagcccacctacagggccaggg

SEQ ID NO: 4810111 - DNA, 25 bp, Homo sapien
cttcctggccaaacacccgccccag

SEQ ID NO: 4810112 - DNA, 25 bp, Homo sapien
taccactgacggcttcccaagggca

SEQ ID NO: 4810113 - DNA, 25 bp, Homo sapien
agagggagagtcctagcccccagct

SEQ ID NO: 4810114 - DNA, 25 bp, Homo sapien
ggctccagactgagagggtcagggc

SEQ ID NO: 4810115 - DNA, 25 bp, Homo sapien
gggctccagactgagagggtcaggg

SEQ ID NO: 4810116 - DNA, 25 bp, Homo sapien
gagaggaggcggacacagcaggcag

SEQ ID NO: 4810117 - DNA, 25 bp, Homo sapien
ctgagaggagaggaggcggacacag

SEQ ID NO: 4810118 - DNA, 25 bp, Homo sapien
aggagaggaggcggacacagcaggc

SEQ ID NO: 4810119 - DNA, 25 bp, Homo sapien
gaggcggacacagcaggcagctcac

SEQ ID NO: 4810120 - DNA, 25 bp, Homo sapien
gttccaggcacacacgaaggactta

SEQ ID NO: 4810121 - DNA, 25 bp, Homo sapien
tccaccacggccgacggctgctggg

SEQ ID NO: 4810122 - DNA, 25 bp, Homo sapien
ttaagcgtgctccagtccccatggt

SEQ ID NO: 4810123 - DNA, 25 bp, Homo sapien
gggacgcaggtctcgccggtccagg

SEQ ID NO: 4810124 - DNA, 25 bp, Homo sapien
ctagccccggacacactcgctgtgt

SEQ ID NO: 4810125 - DNA, 25 bp, Homo sapien
tgtcaccaccagacactactctggg

SEQ ID NO: 4810126 - DNA, 25 bp, Homo sapien
tgaagtggcccacactccactctag

SEQ ID NO: 4810127 - DNA, 25 bp, Homo sapien
tccactctagcaccccaagggtgtg

SEQ ID NO: 4810128 - DNA, 25 bp, Homo sapien
ggcgggtagcccagggtatacagac

SEQ ID NO: 4810129 - DNA, 25 bp, Homo sapien
ggctggcgggtagcccagggtatac

SEQ ID NO: 4810130 - DNA, 25 bp, Homo sapien
gcagaccctgcgcttgggctggcgg

SEQ ID NO: 4810131 - DNA, 25 bp, Homo sapien
tgcgcttgggctggcgggtagccca

SEQ ID NO: 4810132 - DNA, 25 bp, Homo sapien
catctgctgctgctcggtccagttc

SEQ ID NO: 4810133 - DNA, 25 bp, Homo sapien
gccatcaaacgcgtggctctgccaa

SEQ ID NO: 4810134 - DNA, 25 bp, Homo sapien
tcgaagccatcaaacgcgtggctct

SEQ ID NO: 4810135 - DNA, 25 bp, Homo sapien
ctcgaagccatcaaacgcgtggctc

SEQ ID NO: 4810136 - DNA, 25 bp, Homo sapien
gaagccatcaaacgcgtggctctgc

SEQ ID NO: 4810137 - DNA, 25 bp, Homo sapien
ccactctccgaagaaaggctgcgag

SEQ ID NO: 4810138 - DNA, 25 bp, Homo sapien
cactctccgaagaaaggctgcgagc

SEQ ID NO: 4810139 - DNA, 25 bp, Homo sapien
acaggcacgggggcctccgtctgca

SEQ ID NO: 4810140 - DNA, 25 bp, Homo sapien
gtcatactgggacgggggctgcacg

SEQ ID NO: 4810141 - DNA, 25 bp, Homo sapien
ctgggtatgtcatactgggacgggg

SEQ ID NO: 4810142 - DNA, 25 bp, Homo sapien
ctgacaggcacgggggcctccgtct

SEQ ID NO: 4810143 - DNA, 25 bp, Homo sapien
tgggcgtccacatgattcctggcct

SEQ ID NO: 4810144 - DNA, 25 bp, Homo sapien
cagtggcaatgctggccgtctggca

SEQ ID NO: 4810145 - DNA, 25 bp, Homo sapien
cctgggcggatgcactggcagtggc

SEQ ID NO: 4810146 - DNA, 25 bp, Homo sapien
ggcgtccacatgattcctggcctgg

SEQ ID NO: 4810147 - DNA, 25 bp, Homo sapien
tgtgccaagaacttcacccacatca

SEQ ID NO: 4810148 - DNA, 25 bp, Homo sapien
gacagtgccagttggtaagagctca

SEQ ID NO: 4810149 - DNA, 25 bp, Homo sapien
ttctgatgacagtgccagttggtaa

SEQ ID NO: 4810150 - DNA, 25 bp, Homo sapien
aaccaccctatgaagtaaatcctat

SEQ ID NO: 4810151 - DNA, 25 bp, Homo sapien
agcggatgccctggacggccctcca

SEQ ID NO: 4810152 - DNA, 25 bp, Homo sapien
cccagcggatgccctggacggccct

SEQ ID NO: 4810153 - DNA, 25 bp, Homo sapien
cagcggatgccctggacggccctcc

SEQ ID NO: 4810154 - DNA, 25 bp, Homo sapien
ccagcggatgccctggacggccctc

SEQ ID NO: 4810155 - DNA, 25 bp, Homo sapien
ctgcgagggcacggacgccacaccc

SEQ ID NO: 4810156 - DNA, 25 bp, Homo sapien
cgagggcacggacgccacacccagg

SEQ ID NO: 4810157 - DNA, 25 bp, Homo sapien
agggcacggacgccacacccagggt

SEQ ID NO: 4810158 - DNA, 25 bp, Homo sapien
gggcacggacgccacacccagggtc

SEQ ID NO: 4810159 - DNA, 25 bp, Homo sapien
ctgcagcggccctggccgccccggc

SEQ ID NO: 4810160 - DNA, 25 bp, Homo sapien
gcagcggccctggccgccccggccc

SEQ ID NO: 4810161 - DNA, 25 bp, Homo sapien
tgcagcggccctggccgccccggcc

SEQ ID NO: 4810162 - DNA, 25 bp, Homo sapien
ggctgcgcgcgggttgccatggaga

SEQ ID NO: 4810163 - DNA, 25 bp, Homo sapien
catggagacggttccgccctctcgt

SEQ ID NO: 4810164 - DNA, 25 bp, Homo sapien
gccagcgccgcaacaccagcgcttc

SEQ ID NO: 4810165 - DNA, 25 bp, Homo sapien
acaccagcgcttcccgcctggctga

SEQ ID NO: 4810166 - DNA, 25 bp, Homo sapien
gaggctgacggcgccatgtttgaat

SEQ ID NO: 4810167 - DNA, 25 bp, Homo sapien
cccctacgccgccatgagcggaaaa

SEQ ID NO: 4810168 - DNA, 25 bp, Homo sapien
gacggcgccatgtttgaattggtcg

SEQ ID NO: 4810169 - DNA, 25 bp, Homo sapien
ttgaattggtcgcagcgcctcctgc

SEQ ID NO: 4810170 - DNA, 25 bp, Homo sapien
attacagtggaacaacgtggcccct

SEQ ID NO: 4810171 - DNA, 25 bp, Homo sapien
tttatggtcaattcaggccccactc

SEQ ID NO: 4810172 - DNA, 25 bp, Homo sapien
cttctgctgcagtgtagggacctca

SEQ ID NO: 4810173 - DNA, 25 bp, Homo sapien
gggattgtctgacctagtgcaggga

SEQ ID NO: 4810174 - DNA, 25 bp, Homo sapien
gagggtgtgctaggatgagatgggg

SEQ ID NO: 4810175 - DNA, 25 bp, Homo sapien
ggagggtgtgctaggatgagatggg

SEQ ID NO: 4810176 - DNA, 25 bp, Homo sapien
tatccttccccgatggtcacaatgc

SEQ ID NO: 4810177 - DNA, 25 bp, Homo sapien
cccacgtccttgatgtctctgttca

SEQ ID NO: 4810178 - DNA, 25 bp, Homo sapien
cactgctgcctcacatatattagac

SEQ ID NO: 4810179 - DNA, 25 bp, Homo sapien
tattttgttcaaagcactgattaca

SEQ ID NO: 4810180 - DNA, 25 bp, Homo sapien
tcatgaatgaaatacactggtatag

SEQ ID NO: 4810181 - DNA, 25 bp, Homo sapien
tgaaatacactggtatagcaatccc

SEQ ID NO: 4810182 - DNA, 25 bp, Homo sapien
aatacactggtatagcaatccccat

SEQ ID NO: 4810183 - DNA, 25 bp, Homo sapien
catatataaaatctggcaaacctaa

SEQ ID NO: 4810184 - DNA, 25 bp, Homo sapien
gcgcccggctgggaccttgtcttaa

SEQ ID NO: 4810185 - DNA, 25 bp, Homo sapien
actgcgcccggctgggaccttgtct

SEQ ID NO: 4810186 - DNA, 25 bp, Homo sapien
ctgcgcccggctgggaccttgtctt

SEQ ID NO: 4810187 - DNA, 25 bp, Homo sapien
tcactgcgcccggctgggaccttgt

SEQ ID NO: 4810188 - DNA, 25 bp, Homo sapien
gaatgttccaagcttaggtgaggca

SEQ ID NO: 4810189 - DNA, 25 bp, Homo sapien
ggtgaggcaacagcacgtgtttaaa

SEQ ID NO: 4810190 - DNA, 25 bp, Homo sapien
aaaagaggataagttctcagtaggg

SEQ ID NO: 4810191 - DNA, 25 bp, Homo sapien
tctatcccttcaagcagagacaagg

SEQ ID NO: 4810192 - DNA, 25 bp, Homo sapien
accggaggagacatcggcctctgca

SEQ ID NO: 4810193 - DNA, 25 bp, Homo sapien
tgcaaggattgactctctgattttt

SEQ ID NO: 4810194 - DNA, 25 bp, Homo sapien
gaagggaggtacgtttctgcgctaa

SEQ ID NO: 4810195 - DNA, 25 bp, Homo sapien
ctctgcaggcttgccgaagaaggga

SEQ ID NO: 4810196 - DNA, 25 bp, Homo sapien
tcagatctgtccacctctctctctg

SEQ ID NO: 4810197 - DNA, 25 bp, Homo sapien
ccgacggcggcccacaactctggcc

SEQ ID NO: 4810198 - DNA, 25 bp, Homo sapien
tctcagatctgtccacctctctctc

SEQ ID NO: 4810199 - DNA, 25 bp, Homo sapien
cagtaagtgctccaaagtcgtgtgg

SEQ ID NO: 4810200 - DNA, 25 bp, Homo sapien
catgttctgagaaggcgaaggccag

SEQ ID NO: 4810201 - DNA, 25 bp, Homo sapien
taccggaaatgaaccgcgcgatctg

SEQ ID NO: 4810202 - DNA, 25 bp, Homo sapien
tctcatagttgctcccagtaagtgc

SEQ ID NO: 4810203 - DNA, 25 bp, Homo sapien
gacctggtgctctaatgccaagtta

SEQ ID NO: 4810204 - DNA, 25 bp, Homo sapien
tccatagctgggaaacgtgggttca

SEQ ID NO: 4810205 - DNA, 25 bp, Homo sapien
taaattaattgtgcctgccaccacc

SEQ ID NO: 4810206 - DNA, 25 bp, Homo sapien
gttatacacgggacagttgctggca

SEQ ID NO: 4810207 - DNA, 25 bp, Homo sapien
cctttgggtacatagcgggttctag

SEQ ID NO: 4810208 - DNA, 25 bp, Homo sapien
cagagtgtccttaagtcggttctcc

SEQ ID NO: 4810209 - DNA, 25 bp, Homo sapien
gaatcccgcggaattttggatccga

SEQ ID NO: 4810210 - DNA, 25 bp, Homo sapien
gcagagcagacctgatctccgggtt

SEQ ID NO: 4810211 - DNA, 25 bp, Homo sapien
tggagcagctgcatggcgagctgcg

SEQ ID NO: 4810212 - DNA, 25 bp, Homo sapien
ctggagcagctgcatggcgagctgc

SEQ ID NO: 4810213 - DNA, 25 bp, Homo sapien
gagcagctgcatggcgagctgcggg

SEQ ID NO: 4810214 - DNA, 25 bp, Homo sapien
gcagctgcatggcgagctgcgggag

SEQ ID NO: 4810215 - DNA, 25 bp, Homo sapien
ttctgcgatcctgtcattgagaggc

SEQ ID NO: 4810216 - DNA, 25 bp, Homo sapien
cttctgcgatcctgtcattgagagg

SEQ ID NO: 4810217 - DNA, 25 bp, Homo sapien
gcgcaccaaacgtccccatatggag

SEQ ID NO: 4810218 - DNA, 25 bp, Homo sapien
agcgcaccaaacgtccccatatgga

SEQ ID NO: 4810219 - DNA, 25 bp, Homo sapien
cgcaccaaacgtccccatatggagc

SEQ ID NO: 4810220 - DNA, 25 bp, Homo sapien
ccgtggttttcaggcacaagacggt

SEQ ID NO: 4810221 - DNA, 25 bp, Homo sapien
gtctgacttgaagctccgttctggg

SEQ ID NO: 4810222 - DNA, 25 bp, Homo sapien
ctgtctgacttgaagctccgttctg

SEQ ID NO: 4810223 - DNA, 25 bp, Homo sapien
tttcaggcacaagacggtagcccgg

SEQ ID NO: 4810224 - DNA, 25 bp, Homo sapien
ctgagggccatccacagaagaagtg

SEQ ID NO: 4810225 - DNA, 25 bp, Homo sapien
cctgagggccatccacagaagaagt

SEQ ID NO: 4810226 - DNA, 25 bp, Homo sapien
ggttgcgggtcaggcctcggtcgaa

SEQ ID NO: 4810227 - DNA, 25 bp, Homo sapien
tgcgggtcaggcctcggtcgaaggg

SEQ ID NO: 4810228 - DNA, 25 bp, Homo sapien
caggttgcgggtcaggcctcggtcg

SEQ ID NO: 4810229 - DNA, 25 bp, Homo sapien
gccaggttgcgggtcaggcctcggt

SEQ ID NO: 4810230 - DNA, 25 bp, Homo sapien
ggcgatgcggtgtgaggagatgaat

SEQ ID NO: 4810231 - DNA, 25 bp, Homo sapien
aggtagaggtgcgagacgaggagca

SEQ ID NO: 4810232 - DNA, 25 bp, Homo sapien
gggcgctggcggagataggcgatgc

SEQ ID NO: 4810233 - DNA, 25 bp, Homo sapien
gtagaggtgcgagacgaggagcagg

SEQ ID NO: 4810234 - DNA, 25 bp, Homo sapien
agcccgctggaccgcaaccactgac

SEQ ID NO: 4810235 - DNA, 25 bp, Homo sapien
cccgctggaccgcaaccactgaccc

SEQ ID NO: 4810236 - DNA, 25 bp, Homo sapien
ccgctggaccgcaaccactgacccc

SEQ ID NO: 4810237 - DNA, 25 bp, Homo sapien
ggagcccgctggaccgcaaccactg

SEQ ID NO: 4810238 - DNA, 25 bp, Homo sapien
cggtgcaggggacaggggcctggtg

SEQ ID NO: 4810239 - DNA, 25 bp, Homo sapien
gcggtgcaggggacaggggcctggt

SEQ ID NO: 4810240 - DNA, 25 bp, Homo sapien
ctgcggtgcaggggacaggggcctg

SEQ ID NO: 4810241 - DNA, 25 bp, Homo sapien
tgcggtgcaggggacaggggcctgg

SEQ ID NO: 4810242 - DNA, 25 bp, Homo sapien
aagagtgggtggttgcgctctccca

SEQ ID NO: 4810243 - DNA, 25 bp, Homo sapien
agcgccaggtagaccacaaagagtg

SEQ ID NO: 4810244 - DNA, 25 bp, Homo sapien
gcaacggcggcactcacggcagtgc

SEQ ID NO: 4810245 - DNA, 25 bp, Homo sapien
ggcagtggtggtcgtagcggcggac

SEQ ID NO: 4810246 - DNA, 25 bp, Homo sapien
ggaaccatggctgtctgctcctctt

SEQ ID NO: 4810247 - DNA, 25 bp, Homo sapien
tctgcagcgccgaagagggatggct

SEQ ID NO: 4810248 - DNA, 25 bp, Homo sapien
agtatctgcagcgccgaagagggat

SEQ ID NO: 4810249 - DNA, 25 bp, Homo sapien
ggcagtatctgcagcgccgaagagg

SEQ ID NO: 4810250 - DNA, 25 bp, Homo sapien
atgaggggtggggtgtaagacaggg

SEQ ID NO: 4810251 - DNA, 25 bp, Homo sapien
gaatgaggggtggggtgtaagacag

SEQ ID NO: 4810252 - DNA, 25 bp, Homo sapien
tggaatgaggggtggggtgtaagac

SEQ ID NO: 4810253 - DNA, 25 bp, Homo sapien
ctggaatgaggggtggggtgtaaga

SEQ ID NO: 4810254 - DNA, 25 bp, Homo sapien
agtgacacagcgaggtagagcagca

SEQ ID NO: 4810255 - DNA, 25 bp, Homo sapien
tgcacattcacgtagccagggtcca

SEQ ID NO: 4810256 - DNA, 25 bp, Homo sapien
gggctgcacattcacgtagccaggg

SEQ ID NO: 4810257 - DNA, 25 bp, Homo sapien
cattcacgtagccagggtccatgag

SEQ ID NO: 4810258 - DNA, 25 bp, Homo sapien
ggaagtgtgttcctggctgagcaaa

SEQ ID NO: 4810259 - DNA, 25 bp, Homo sapien
aggctgggccgggtagaacaggagt

SEQ ID NO: 4810260 - DNA, 25 bp, Homo sapien
ctgggccgggtagaacaggagtggg

SEQ ID NO: 4810261 - DNA, 25 bp, Homo sapien
gctgggccgggtagaacaggagtgg

SEQ ID NO: 4810262 - DNA, 25 bp, Homo sapien
gacccagtgtgaccagaacgtctgg

SEQ ID NO: 4810263 - DNA, 25 bp, Homo sapien
aagagagtcgctacaaaggcctggc

SEQ ID NO: 4810264 - DNA, 25 bp, Homo sapien
tagttgagcctcctaatcgtatgga

SEQ ID NO: 4810265 - DNA, 25 bp, Homo sapien
ggttttctgatacggagacctgagc

SEQ ID NO: 4810266 - DNA, 25 bp, Homo sapien
aggtcagcacggtgtgcccggtccg

SEQ ID NO: 4810267 - DNA, 25 bp, Homo sapien
tcagcacggtgtgcccggtccgcac

SEQ ID NO: 4810268 - DNA, 25 bp, Homo sapien
aggaagagcaccagcgtgattcccc

SEQ ID NO: 4810269 - DNA, 25 bp, Homo sapien
ggaagagcaccagcgtgattcccca

SEQ ID NO: 4810270 - DNA, 25 bp, Homo sapien
ccggaagaagcgcccagaggggcgg

SEQ ID NO: 4810271 - DNA, 25 bp, Homo sapien
cccggaagaagcgcccagaggggcg

SEQ ID NO: 4810272 - DNA, 25 bp, Homo sapien
aatggcaagtatcaggccagcgagc

SEQ ID NO: 4810273 - DNA, 25 bp, Homo sapien
catggaggtgcacgtttgttgtccc

SEQ ID NO: 4810274 - DNA, 25 bp, Homo sapien
gcacatctgaggatcttgttttccc

SEQ ID NO: 4810275 - DNA, 25 bp, Homo sapien
gaggtaataagtcatgtcaggccag

SEQ ID NO: 4810276 - DNA, 25 bp, Homo sapien
cagtgggtcaggatgctcgatacgc

SEQ ID NO: 4810277 - DNA, 25 bp, Homo sapien
ctcagttctgctggtgggagcgcct

SEQ ID NO: 4810278 - DNA, 25 bp, Homo sapien
caagtgtccgatgagaagcaatgca

SEQ ID NO: 4810279 - DNA, 25 bp, Homo sapien
caaaggctgtcatgggacctctgcc

SEQ ID NO: 4810280 - DNA, 25 bp, Homo sapien
tacacacaaaacttcacacttccta

SEQ ID NO: 4810281 - DNA, 25 bp, Homo sapien
aggactcaggagtgttgcttttgtt

SEQ ID NO: 4810282 - DNA, 25 bp, Homo sapien
gagtgtgtgtgtcagcgatgaaggc

SEQ ID NO: 4810283 - DNA, 25 bp, Homo sapien
aaggctgagtgggtttgagaatggc

SEQ ID NO: 4810284 - DNA, 25 bp, Homo sapien
gttgtgcaaaagtcccccatgtctc

SEQ ID NO: 4810285 - DNA, 25 bp, Homo sapien
cccatgtctcttcactccgtgggag

SEQ ID NO: 4810286 - DNA, 25 bp, Homo sapien
cattaaggaaaagcgtcggttgtgc

SEQ ID NO: 4810287 - DNA, 25 bp, Homo sapien
ttcactccgtgggaggctccctcgg

SEQ ID NO: 4810288 - DNA, 25 bp, Homo sapien
tccagagcggtggcggccatgggga

SEQ ID NO: 4810289 - DNA, 25 bp, Homo sapien
cagagcggtggcggccatggggacg

SEQ ID NO: 4810290 - DNA, 25 bp, Homo sapien
gtccagagcggtggcggccatgggg

SEQ ID NO: 4810291 - DNA, 25 bp, Homo sapien
gagcggtggcggccatggggacgga

SEQ ID NO: 4810292 - DNA, 25 bp, Homo sapien
ctatctagacgtgtccatgttctcc

SEQ ID NO: 4810293 - DNA, 25 bp, Homo sapien
tcctctttaaagttactgcagtgct

SEQ ID NO: 4810294 - DNA, 25 bp, Homo sapien
ttaaagttactgcagtgctcaatca

SEQ ID NO: 4810295 - DNA, 25 bp, Homo sapien
gttactgcagtgctcaatcaccttg

SEQ ID NO: 4810296 - DNA, 25 bp, Homo sapien
atcttaattatgtccctcagaaggg

SEQ ID NO: 4810297 - DNA, 25 bp, Homo sapien
tcctgccgtgcggtcgccatcttaa

SEQ ID NO: 4810298 - DNA, 25 bp, Homo sapien
gccatcttaattatgtccctcagaa

SEQ ID NO: 4810299 - DNA, 25 bp, Homo sapien
tgcggtcgccatcttaattatgtcc

SEQ ID NO: 4810300 - DNA, 25 bp, Homo sapien
cgaggttatacagggcccaggttgc

SEQ ID NO: 4810301 - DNA, 25 bp, Homo sapien
ggtagacagacacgaggttatacag

SEQ ID NO: 4810302 - DNA, 25 bp, Homo sapien
gaaggaggcggagaattggttcaaa

SEQ ID NO: 4810303 - DNA, 25 bp, Homo sapien
gctggctgacaggagagattccctg

SEQ ID NO: 4810304 - DNA, 25 bp, Homo sapien
tagagcatcattttgctgttggcca

SEQ ID NO: 4810305 - DNA, 25 bp, Homo sapien
agctaatttttggttagagcatcat

SEQ ID NO: 4810306 - DNA, 25 bp, Homo sapien
gaccttccaggccatgcaagtgttc

SEQ ID NO: 4810307 - DNA, 25 bp, Homo sapien
ccaggccatgcaagtgttcctccca

SEQ ID NO: 4810308 - DNA, 25 bp, Homo sapien
aatgacgagggagatccatgcctgg

SEQ ID NO: 4810309 - DNA, 25 bp, Homo sapien
tgactgctcttctgacgagggcctt

SEQ ID NO: 4810310 - DNA, 25 bp, Homo sapien
caaaagcctgaaacacgtgtgtgca

SEQ ID NO: 4810311 - DNA, 25 bp, Homo sapien
tggcacactggcaacgctaccaatg

SEQ ID NO: 4810312 - DNA, 25 bp, Homo sapien
caccgcgcctgaccttcttcttttt

SEQ ID NO: 4810313 - DNA, 25 bp, Homo sapien
tagcatgatgttggctcactacagc

SEQ ID NO: 4810314 - DNA, 25 bp, Homo sapien
taaagaaatggtctcattctgtccc

SEQ ID NO: 4810315 - DNA, 25 bp, Homo sapien
tttttaaagaaatggtctcattctg

SEQ ID NO: 4810316 - DNA, 25 bp, Homo sapien
tgtaggaaacctcgatcccatcggc

SEQ ID NO: 4810317 - DNA, 25 bp, Homo sapien
tttctccgagagtttatgtcccagc

SEQ ID NO: 4810318 - DNA, 25 bp, Homo sapien
ccaggcctcgggtccatcaaacatg

SEQ ID NO: 4810319 - DNA, 25 bp, Homo sapien
tgtcccagctctggatggcagccca

SEQ ID NO: 4810320 - DNA, 25 bp, Homo sapien
acattccccaaaagtcctagcatat

SEQ ID NO: 4810321 - DNA, 25 bp, Homo sapien
gcatattcctatgcagttcctgctt

SEQ ID NO: 4810322 - DNA, 25 bp, Homo sapien
tgatgaactgggaagtcattagttg

SEQ ID NO: 4810323 - DNA, 25 bp, Homo sapien
gaagtcattagttgaggcctcagct

SEQ ID NO: 4810324 - DNA, 25 bp, Homo sapien
gccgttgaaattgaggaacatctcg

SEQ ID NO: 4810325 - DNA, 25 bp, Homo sapien
catctcgcagttgtcaggagtttca

SEQ ID NO: 4810326 - DNA, 25 bp, Homo sapien
gaagagcttcatgccgttgaaattg

SEQ ID NO: 4810327 - DNA, 25 bp, Homo sapien
tccaggagaactccatgacctggtc

SEQ ID NO: 4810328 - DNA, 25 bp, Homo sapien
agcagcttcttctgaatcagcttca

SEQ ID NO: 4810329 - DNA, 25 bp, Homo sapien
gcagcttcttctgaatcagcttcag

SEQ ID NO: 4810330 - DNA, 25 bp, Homo sapien
agcttcttctgaatcagcttcagca

SEQ ID NO: 4810331 - DNA, 25 bp, Homo sapien
ccagcagcttcttctgaatcagctt

SEQ ID NO: 4810332 - DNA, 25 bp, Homo sapien
cattgcacaggtgcacggcgatccg

SEQ ID NO: 4810333 - DNA, 25 bp, Homo sapien
tgacccggcggtactggaattccag

SEQ ID NO: 4810334 - DNA, 25 bp, Homo sapien
gatccgctggatagactcgtcctgc

SEQ ID NO: 4810335 - DNA, 25 bp, Homo sapien
tgaagttgcagagcgtcaggcagca

SEQ ID NO: 4810336 - DNA, 25 bp, Homo sapien
ggagcagggctctaggaactatcta

SEQ ID NO: 4810337 - DNA, 25 bp, Homo sapien
actatctagaggtatgagctcatcc

SEQ ID NO: 4810338 - DNA, 25 bp, Homo sapien
gaggaggctatacaagtcttctcta

SEQ ID NO: 4810339 - DNA, 25 bp, Homo sapien
catccagagttgtggcagtccagcc

SEQ ID NO: 4810340 - DNA, 25 bp, Homo sapien
tgggatttctgggtatgtgccatca

SEQ ID NO: 4810341 - DNA, 25 bp, Homo sapien
ttatttttaagacgcggtctctctg

SEQ ID NO: 4810342 - DNA, 25 bp, Homo sapien
agcttccaaggtggctgggatttct

SEQ ID NO: 4810343 - DNA, 25 bp, Homo sapien
caagaaatttttcacacctcagctt

SEQ ID NO: 4810344 - DNA, 25 bp, Homo sapien
gaatcttagttcactgactgcagcc

SEQ ID NO: 4810345 - DNA, 25 bp, Homo sapien
gtagaatcttagttcactgactgca

SEQ ID NO: 4810346 - DNA, 25 bp, Homo sapien
tagaatcttagttcactgactgcag

SEQ ID NO: 4810347 - DNA, 25 bp, Homo sapien
agaatcttagttcactgactgcagc

SEQ ID NO: 4810348 - DNA, 25 bp, Homo sapien
cacttgaggctaggaggagttccag

SEQ ID NO: 4810349 - DNA, 25 bp, Homo sapien
cttgaggctaggaggagttccagac

SEQ ID NO: 4810350 - DNA, 25 bp, Homo sapien
tcatcttttaagcatttaggtatct

SEQ ID NO: 4810351 - DNA, 25 bp, Homo sapien
gtcagcagtcatgaaagtgagcctt

SEQ ID NO: 4810352 - DNA, 25 bp, Homo sapien
gtgagccttaacaccagctgcatct

SEQ ID NO: 4810353 - DNA, 25 bp, Homo sapien
gtgagattgtaagtggctttcgctc

SEQ ID NO: 4810354 - DNA, 25 bp, Homo sapien
accaatatggtaaaatcccatcttt

SEQ ID NO: 4810355 - DNA, 25 bp, Homo sapien
cctgaccaatatggtaaaatcccat

SEQ ID NO: 4810356 - DNA, 25 bp, Homo sapien
gcctgaccaatatggtaaaatccca

SEQ ID NO: 4810357 - DNA, 25 bp, Homo sapien
tgaccaatatggtaaaatcccatct

SEQ ID NO: 4810358 - DNA, 25 bp, Homo sapien
ccaggagtgatggactgtgggaagg

SEQ ID NO: 4810359 - DNA, 25 bp, Homo sapien
ccccagcagagtgtatgggcagaag

SEQ ID NO: 4810360 - DNA, 25 bp, Homo sapien
aaatcccccagcagagtgtatgggc

SEQ ID NO: 4810361 - DNA, 25 bp, Homo sapien
taagaaatcccccagcagagtgtat

SEQ ID NO: 4810362 - DNA, 25 bp, Homo sapien
ctgcctgtcacttgaatgttcctgt

SEQ ID NO: 4810363 - DNA, 25 bp, Homo sapien
tcctggtaggattccatgccattca

SEQ ID NO: 4810364 - DNA, 25 bp, Homo sapien
gcttcacactctgctctgagcggta

SEQ ID NO: 4810365 - DNA, 25 bp, Homo sapien
tcctgtcatatttgtggcacttgag

SEQ ID NO: 4810366 - DNA, 25 bp, Homo sapien
tgtaggcctcgatggcattcagcac

SEQ ID NO: 4810367 - DNA, 25 bp, Homo sapien
ttgatggcccgcgaggtgatctcag

SEQ ID NO: 4810368 - DNA, 25 bp, Homo sapien
gcaacgctcgatgcgggcgatgtca

SEQ ID NO: 4810369 - DNA, 25 bp, Homo sapien
tcaggccggtgctccgtgtaggcct

SEQ ID NO: 4810370 - DNA, 25 bp, Homo sapien
agagcccgaggaactgcagcggcct

SEQ ID NO: 4810371 - DNA, 25 bp, Homo sapien
cgtgaggcggcacagagagttctca

SEQ ID NO: 4810372 - DNA, 25 bp, Homo sapien
ttgtaggctggaatgtgcgtgaggc

SEQ ID NO: 4810373 - DNA, 25 bp, Homo sapien
acagagagttctcaaagagcccgag

SEQ ID NO: 4810374 - DNA, 25 bp, Homo sapien
ggagatgctgcagttctctaggatc

SEQ ID NO: 4810375 - DNA, 25 bp, Homo sapien
cccgagtcagcttgaacttgtagta

SEQ ID NO: 4810376 - DNA, 25 bp, Homo sapien
cattaggttccccagcttctgcaca

SEQ ID NO: 4810377 - DNA, 25 bp, Homo sapien
tctaggatcatgtggccagagatgt

SEQ ID NO: 4810378 - DNA, 25 bp, Homo sapien
gaaaatgtttgtacagccgaagagg

SEQ ID NO: 4810379 - DNA, 25 bp, Homo sapien
tctcgcagttagtcaggtacagctc

SEQ ID NO: 4810380 - DNA, 25 bp, Homo sapien
gtgaaatccttaaccagcacctggc

SEQ ID NO: 4810381 - DNA, 25 bp, Homo sapien
catgttgtagaggacgagggacacc

SEQ ID NO: 4810382 - DNA, 25 bp, Homo sapien
tcctcacggaggtggatccgcgtga

SEQ ID NO: 4810383 - DNA, 25 bp, Homo sapien
tgcaccaggtcctcacggaggtgga

SEQ ID NO: 4810384 - DNA, 25 bp, Homo sapien
gaagttacaggcagcgttcaccagc

SEQ ID NO: 4810385 - DNA, 25 bp, Homo sapien
ctgaagaagctctcgtgtggctcga

SEQ ID NO: 4810386 - DNA, 25 bp, Homo sapien
tgtagccgcagggtctccttgtcca

SEQ ID NO: 4810387 - DNA, 25 bp, Homo sapien
caagcagaagtcagtacagagggcc

SEQ ID NO: 4810388 - DNA, 25 bp, Homo sapien
tgccatccaggttgcgcaagcagaa

SEQ ID NO: 4810389 - DNA, 25 bp, Homo sapien
tctcgctgggcaagaagatgtccgg

SEQ ID NO: 4810390 - DNA, 25 bp, Homo sapien
tactcacaggatcattggcagagcc

SEQ ID NO: 4810391 - DNA, 25 bp, Homo sapien
caggacaaggatccccaggggcaac

SEQ ID NO: 4810392 - DNA, 25 bp, Homo sapien
tgaatactcacaggatcattggcag

SEQ ID NO: 4810393 - DNA, 25 bp, Homo sapien
gattcctgaatactcacaggatcat

SEQ ID NO: 4810394 - DNA, 25 bp, Homo sapien
tctgagttcaactgtggcaccactg

SEQ ID NO: 4810395 - DNA, 25 bp, Homo sapien
tacgtgtcgcccaagacagttcctt

SEQ ID NO: 4810396 - DNA, 25 bp, Homo sapien
tgtggattcaggcaggcatagctca

SEQ ID NO: 4810397 - DNA, 25 bp, Homo sapien
tcacgaggagacaaacttgggcaag

SEQ ID NO: 4810398 - DNA, 25 bp, Homo sapien
tactggctccggagggagacagatc

SEQ ID NO: 4810399 - DNA, 25 bp, Homo sapien
taactgggaccagtgtcttgcagga

SEQ ID NO: 4810400 - DNA, 25 bp, Homo sapien
tgagcgagccggacaaggtccttga

SEQ ID NO: 4810401 - DNA, 25 bp, Homo sapien
cataagcgcctgtcgcgtaactggg

SEQ ID NO: 4810402 - DNA, 25 bp, Homo sapien
cagagggagctctggttatgaccga

SEQ ID NO: 4810403 - DNA, 25 bp, Homo sapien
cacactgggagaaccctgtgtcttt

SEQ ID NO: 4810404 - DNA, 25 bp, Homo sapien
tactaggtctatcatgaacattcga

SEQ ID NO: 4810405 - DNA, 25 bp, Homo sapien
cagtcacaggccatctggaattcca

SEQ ID NO: 4810406 - DNA, 25 bp, Homo sapien
tgcttcgcaggcgaggaggagcaga

SEQ ID NO: 4810407 - DNA, 25 bp, Homo sapien
cctcagcgtcgggaagcggacgtga

SEQ ID NO: 4810408 - DNA, 25 bp, Homo sapien
agagaatgcagcccgggagaatccg

SEQ ID NO: 4810409 - DNA, 25 bp, Homo sapien
ttggggatctcgtcaggctagagcc

SEQ ID NO: 4810410 - DNA, 25 bp, Homo sapien
cgatccggctcctacggctcggagc

SEQ ID NO: 4810411 - DNA, 25 bp, Homo sapien
atccggctcctacggctcggagcct

SEQ ID NO: 4810412 - DNA, 25 bp, Homo sapien
cccgatccggctcctacggctcgga

SEQ ID NO: 4810413 - DNA, 25 bp, Homo sapien
cggctcctacggctcggagcctgca

SEQ ID NO: 4810414 - DNA, 25 bp, Homo sapien
catgcgccaccaggcaaccgagctt

SEQ ID NO: 4810415 - DNA, 25 bp, Homo sapien
gccaccaggcaaccgagcttccaaa

SEQ ID NO: 4810416 - DNA, 25 bp, Homo sapien
ctccatctagggcatgcgccaccag

SEQ ID NO: 4810417 - DNA, 25 bp, Homo sapien
tgcgccaccaggcaaccgagcttcc

SEQ ID NO: 4810418 - DNA, 25 bp, Homo sapien
tgtgtcggaaatgctttaggcactg

SEQ ID NO: 4810419 - DNA, 25 bp, Homo sapien
ggtggctagaagcagagagcgagtg

SEQ ID NO: 4810420 - DNA, 25 bp, Homo sapien
tttacagcagtgtaagcagggcagt

SEQ ID NO: 4810421 - DNA, 25 bp, Homo sapien
taattcacatctgcttgtgtcggaa

SEQ ID NO: 4810422 - DNA, 25 bp, Homo sapien
tccgtgcctcacttagagggttctg

SEQ ID NO: 4810423 - DNA, 25 bp, Homo sapien
ccctacacagaaatcttggaaacca

SEQ ID NO: 4810424 - DNA, 25 bp, Homo sapien
ggcccctggaggtcaagcttggcct

SEQ ID NO: 4810425 - DNA, 25 bp, Homo sapien
aaccaaatgctgctgagtaaggatg

SEQ ID NO: 4810426 - DNA, 25 bp, Homo sapien
ccccaaagctttccgagtctggtgg

SEQ ID NO: 4810427 - DNA, 25 bp, Homo sapien
tgaggaccctcgtcctccagactgg

SEQ ID NO: 4810428 - DNA, 25 bp, Homo sapien
tgtacaaggtttgcgtccggaagcc

SEQ ID NO: 4810429 - DNA, 25 bp, Homo sapien
tctggtgggcaggacttctcgctgc

SEQ ID NO: 4810430 - DNA, 25 bp, Homo sapien
tactttgcctcgctggcagagttgg

SEQ ID NO: 4810431 - DNA, 25 bp, Homo sapien
ccttcataagcttgggccactgcct

SEQ ID NO: 4810432 - DNA, 25 bp, Homo sapien
ggactctttagtgcactcactcttg

SEQ ID NO: 4810433 - DNA, 25 bp, Homo sapien
ttctccccatgcttctaggaactgc

SEQ ID NO: 4810434 - DNA, 25 bp, Homo sapien
aaacgtctatgtctgcacagggcca

SEQ ID NO: 4810435 - DNA, 25 bp, Homo sapien
ttcaggcagtttcgaggcagacacc

SEQ ID NO: 4810436 - DNA, 25 bp, Homo sapien
gaaatatagccgcagcttgacccgc

SEQ ID NO: 4810437 - DNA, 25 bp, Homo sapien
ttttcaaaagaagcgcgcaacctcc

SEQ ID NO: 4810438 - DNA, 25 bp, Homo sapien
tgggtcaataccagttccctactca

SEQ ID NO: 4810439 - DNA, 25 bp, Homo sapien
tgaggcccctactgccactcacagg

SEQ ID NO: 4810440 - DNA, 25 bp, Homo sapien
agacctgtcgggtacccctgaccat

SEQ ID NO: 4810441 - DNA, 25 bp, Homo sapien
cacctccacagccaaagacctgtcg

SEQ ID NO: 4810442 - DNA, 25 bp, Homo sapien
ccacccaatcttgttctgccaatat

SEQ ID NO: 4810443 - DNA, 25 bp, Homo sapien
ccagtgcaccgagctctcacgcctt

SEQ ID NO: 4810444 - DNA, 25 bp, Homo sapien
ctctgcaggtccgaggtgcaccgag

SEQ ID NO: 4810445 - DNA, 25 bp, Homo sapien
tcttggcatgcccacccaatcttgt

SEQ ID NO: 4810446 - DNA, 25 bp, Homo sapien
tgaatctagatctgcctgacccagg

SEQ ID NO: 4810447 - DNA, 25 bp, Homo sapien
tggtccatggtaagggctcggcata

SEQ ID NO: 4810448 - DNA, 25 bp, Homo sapien
tcattagcaggtgcctcctagggcc

SEQ ID NO: 4810449 - DNA, 25 bp, Homo sapien
tgctgtgggcaaatgacctgtgtcc

SEQ ID NO: 4810450 - DNA, 25 bp, Homo sapien
ccctcagacgaatgtgaatattcag

SEQ ID NO: 4810451 - DNA, 25 bp, Homo sapien
ggagagatggacagtcgttaagtct

SEQ ID NO: 4810452 - DNA, 25 bp, Homo sapien
ttaagtctcccctcagacgaatgtg

SEQ ID NO: 4810453 - DNA, 25 bp, Homo sapien
gacagtcgttaagtctcccctcaga

SEQ ID NO: 4810454 - DNA, 25 bp, Homo sapien
gatgcccaacgcacctgtggatgag

SEQ ID NO: 4810455 - DNA, 25 bp, Homo sapien
tttgtgccaaacatcctggcgcggg

SEQ ID NO: 4810456 - DNA, 25 bp, Homo sapien
ccatcgagagcattgagcgggcttc

SEQ ID NO: 4810457 - DNA, 25 bp, Homo sapien
tcatcggcaagaaccacgtggcagt

SEQ ID NO: 4810458 - DNA, 25 bp, Homo sapien
tcaggtgtgccgggcacccgcctgg

SEQ ID NO: 4810459 - DNA, 25 bp, Homo sapien
aggtgtgccgggcacccgcctggat

SEQ ID NO: 4810460 - DNA, 25 bp, Homo sapien
gtgtgccgggcacccgcctggatga

SEQ ID NO: 4810461 - DNA, 25 bp, Homo sapien
tgtgccgggcacccgcctggatgag

SEQ ID NO: 4810462 - DNA, 25 bp, Homo sapien
cccggcgagactgatgggagtacca

SEQ ID NO: 4810463 - DNA, 25 bp, Homo sapien
agttcccgtagcacagcgtcctatg

SEQ ID NO: 4810464 - DNA, 25 bp, Homo sapien
gggtacacaggttccatgaggccag

SEQ ID NO: 4810465 - DNA, 25 bp, Homo sapien
ccccgtgggacagatgcaagtgaga

SEQ ID NO: 4810466 - DNA, 25 bp, Homo sapien
gcacaggacgggcactagcacccat

SEQ ID NO: 4810467 - DNA, 25 bp, Homo sapien
ggttgactcccagctacactcatgt

SEQ ID NO: 4810468 - DNA, 25 bp, Homo sapien
caggacgggcactagcacccatggt

SEQ ID NO: 4810469 - DNA, 25 bp, Homo sapien
atggttgactcccagctacactcat

SEQ ID NO: 4810470 - DNA, 25 bp, Homo sapien
gacgtacaggtcaaagaggacactg

SEQ ID NO: 4810471 - DNA, 25 bp, Homo sapien
tccgtgcggatggtacggctaccct

SEQ ID NO: 4810472 - DNA, 25 bp, Homo sapien
agaggacactgggttcagccacctc

SEQ ID NO: 4810473 - DNA, 25 bp, Homo sapien
cctggccaggacaggtattgacgta

SEQ ID NO: 4810474 - DNA, 25 bp, Homo sapien
ggcccccgaacaccacaagagcatg

SEQ ID NO: 4810475 - DNA, 25 bp, Homo sapien
gcccccgaacaccacaagagcatgc

SEQ ID NO: 4810476 - DNA, 25 bp, Homo sapien
gaggcccccgaacaccacaagagca

SEQ ID NO: 4810477 - DNA, 25 bp, Homo sapien
aggcccccgaacaccacaagagcat

SEQ ID NO: 4810478 - DNA, 25 bp, Homo sapien
cgcgctctgacgtcccgatggtcag

SEQ ID NO: 4810479 - DNA, 25 bp, Homo sapien
tcaggtcatacccatcttggaaggg

SEQ ID NO: 4810480 - DNA, 25 bp, Homo sapien
gatggtcaggtcatacccatcttgg

SEQ ID NO: 4810481 - DNA, 25 bp, Homo sapien
cgtcccgatggtcaggtcataccca

SEQ ID NO: 4810482 - DNA, 25 bp, Homo sapien
gaagccagtcggacggtgtagcccc

SEQ ID NO: 4810483 - DNA, 25 bp, Homo sapien
gccccagtagagaccagctttggtg

SEQ ID NO: 4810484 - DNA, 25 bp, Homo sapien
gagggtcctgcgatgataccacttt

SEQ ID NO: 4810485 - DNA, 25 bp, Homo sapien
cactttgccatggtaggtcttgcag

SEQ ID NO: 4810486 - DNA, 25 bp, Homo sapien
tgctggttcagtcgcacagtcaccc

SEQ ID NO: 4810487 - DNA, 25 bp, Homo sapien
tggttcagtcgcacagtcacccgaa

SEQ ID NO: 4810488 - DNA, 25 bp, Homo sapien
gttcagtcgcacagtcacccgaagc

SEQ ID NO: 4810489 - DNA, 25 bp, Homo sapien
ctgctgctggttcagtcgcacagtc

SEQ ID NO: 4810490 - DNA, 25 bp, Homo sapien
tgccacagttgacaaaggagccgtg

SEQ ID NO: 4810491 - DNA, 25 bp, Homo sapien
cacagttgacaaaggagccgtggcc

SEQ ID NO: 4810492 - DNA, 25 bp, Homo sapien
acagttgacaaaggagccgtggcct

SEQ ID NO: 4810493 - DNA, 25 bp, Homo sapien
ttcatgccacagttgacaaaggagc

SEQ ID NO: 4810494 - DNA, 25 bp, Homo sapien
atgccctctcggaactcggattcct

SEQ ID NO: 4810495 - DNA, 25 bp, Homo sapien
tcctcatcctgacgcatgtggtggg

SEQ ID NO: 4810496 - DNA, 25 bp, Homo sapien
cacgatgccctctcggaactcggat

SEQ ID NO: 4810497 - DNA, 25 bp, Homo sapien
acgatgccctctcggaactcggatt

SEQ ID NO: 4810498 - DNA, 25 bp, Homo sapien
gaccctggagcggagtaccggctct

SEQ ID NO: 4810499 - DNA, 25 bp, Homo sapien
tggagcggagtaccggctctgccac

SEQ ID NO: 4810500 - DNA, 25 bp, Homo sapien
cacagacctgcgtcttggcatcaga

SEQ ID NO: 4810501 - DNA, 25 bp, Homo sapien
ggacagcgcagggtaggactgggtg

SEQ ID NO: 4810502 - DNA, 25 bp, Homo sapien
caaactgtagatcctggtgcttggg

SEQ ID NO: 4810503 - DNA, 25 bp, Homo sapien
tgcaaactgtagatcctggtgcttg

SEQ ID NO: 4810504 - DNA, 25 bp, Homo sapien
actgtagatcctggtgcttggggaa

SEQ ID NO: 4810505 - DNA, 25 bp, Homo sapien
tggggaagaacgccttcctcaggta

SEQ ID NO: 4810506 - DNA, 25 bp, Homo sapien
gggccagctgtacgcacgcctgccc

SEQ ID NO: 4810507 - DNA, 25 bp, Homo sapien
ctgtacgcacgcctgccccttcttc

SEQ ID NO: 4810508 - DNA, 25 bp, Homo sapien
gatccgggccagctgtacgcacgcc

SEQ ID NO: 4810509 - DNA, 25 bp, Homo sapien
cagctgtacgcacgcctgccccttc

SEQ ID NO: 4810510 - DNA, 25 bp, Homo sapien
atggagcccggcagggctacgctca

SEQ ID NO: 4810511 - DNA, 25 bp, Homo sapien
aagtaggtgcgaagctccggcgact

SEQ ID NO: 4810512 - DNA, 25 bp, Homo sapien
tccggcgactgagcattgtccagga

SEQ ID NO: 4810513 - DNA, 25 bp, Homo sapien
ggctctggcaatctgaccggccaag

SEQ ID NO: 4810514 - DNA, 25 bp, Homo sapien
gtgtgtgcacattaacccgatagcc

SEQ ID NO: 4810515 - DNA, 25 bp, Homo sapien
gcaatggcctaagttcacatcctgg

SEQ ID NO: 4810516 - DNA, 25 bp, Homo sapien
tcagccccgggaagtcaaatacatg

SEQ ID NO: 4810517 - DNA, 25 bp, Homo sapien
gatccctagtgaggatactgccatt

SEQ ID NO: 4810518 - DNA, 25 bp, Homo sapien
tccaggcgctttgcctgttcctcct

SEQ ID NO: 4810519 - DNA, 25 bp, Homo sapien
tgcccgctgccgctccagttttttc

SEQ ID NO: 4810520 - DNA, 25 bp, Homo sapien
tcttccaggcgctttgcctgttcct

SEQ ID NO: 4810521 - DNA, 25 bp, Homo sapien
gcccgctgccgctccagttttttca

SEQ ID NO: 4810522 - DNA, 25 bp, Homo sapien
tgttgcttccattttcgccactcaa

SEQ ID NO: 4810523 - DNA, 25 bp, Homo sapien
ttgcttccattttcgccactcaatc

SEQ ID NO: 4810524 - DNA, 25 bp, Homo sapien
tctgttgcttccattttcgccactc

SEQ ID NO: 4810525 - DNA, 25 bp, Homo sapien
gttgcttccattttcgccactcaat

SEQ ID NO: 4810526 - DNA, 25 bp, Homo sapien
cgggccgcacggccgcttcctgccg

SEQ ID NO: 4810527 - DNA, 25 bp, Homo sapien
gccgcttcctgccgcgctccgccat

SEQ ID NO: 4810528 - DNA, 25 bp, Homo sapien
ggccgcttcctgccgcgctccgcca

SEQ ID NO: 4810529 - DNA, 25 bp, Homo sapien
gccgcacggccgcttcctgccgcgc

SEQ ID NO: 4810530 - DNA, 25 bp, Homo sapien
tccgcacacaccgtcggtcccgcct

SEQ ID NO: 4810531 - DNA, 25 bp, Homo sapien
cgcacacaccgtcggtcccgcctct

SEQ ID NO: 4810532 - DNA, 25 bp, Homo sapien
cacaccgtcggtcccgcctctgcca

SEQ ID NO: 4810533 - DNA, 25 bp, Homo sapien
gttccgcacacaccgtcggtcccgc

SEQ ID NO: 4810534 - DNA, 25 bp, Homo sapien
acctccattaagctgtccaatcgga

SEQ ID NO: 4810535 - DNA, 25 bp, Homo sapien
tgtccaatcggagagccaatatcgc

SEQ ID NO: 4810536 - DNA, 25 bp, Homo sapien
atcggagagccaatatcgcccaggg

SEQ ID NO: 4810537 - DNA, 25 bp, Homo sapien
cattaagctgtccaatcggagagcc

SEQ ID NO: 4810538 - DNA, 25 bp, Homo sapien
gagtaggtgtccaaataggcggcat

SEQ ID NO: 4810539 - DNA, 25 bp, Homo sapien
cagagtaggtgtccaaataggcggc

SEQ ID NO: 4810540 - DNA, 25 bp, Homo sapien
ggcagagtaggtgtccaaataggcg

SEQ ID NO: 4810541 - DNA, 25 bp, Homo sapien
tgggcagagtaggtgtccaaatagg

SEQ ID NO: 4810542 - DNA, 25 bp, Homo sapien
gcctggttgtgccactatgtgacta

SEQ ID NO: 4810543 - DNA, 25 bp, Homo sapien
gccttgggtgctaggcctggttgtg

SEQ ID NO: 4810544 - DNA, 25 bp, Homo sapien
tacagtaaccatttgtacaaagttg

SEQ ID NO: 4810545 - DNA, 25 bp, Homo sapien
tagtgaggaattcatttgagggcct

SEQ ID NO: 4810546 - DNA, 25 bp, Homo sapien
taagatgaagaagggcggctcccac

SEQ ID NO: 4810547 - DNA, 25 bp, Homo sapien
tctgtgtcacggagaagaggtttcc

SEQ ID NO: 4810548 - DNA, 25 bp, Homo sapien
cactcaaagaggatctctgcgggca

SEQ ID NO: 4810549 - DNA, 25 bp, Homo sapien
ctttcagacaggaggcacttggttc

SEQ ID NO: 4810550 - DNA, 25 bp, Homo sapien
ttccgcagcttctcgtccatggcct

SEQ ID NO: 4810551 - DNA, 25 bp, Homo sapien
cacttccgcagcttctcgtccatgg

SEQ ID NO: 4810552 - DNA, 25 bp, Homo sapien
gcagcttctcgtccatggcctggag

SEQ ID NO: 4810553 - DNA, 25 bp, Homo sapien
ccatggcctggagcgtggcttcatc

SEQ ID NO: 4810554 - DNA, 25 bp, Homo sapien
ctgcgccagcacagattagtcctac

SEQ ID NO: 4810555 - DNA, 25 bp, Homo sapien
gattagtcctacactctccccatgt

SEQ ID NO: 4810556 - DNA, 25 bp, Homo sapien
agcacagattagtcctacactctcc

SEQ ID NO: 4810557 - DNA, 25 bp, Homo sapien
cgccagcacagattagtcctacact

SEQ ID NO: 4810558 - DNA, 25 bp, Homo sapien
tcacaaaacagaagcggatatagtg

SEQ ID NO: 4810559 - DNA, 25 bp, Homo sapien
cacaaaacagaagcggatatagtgg

SEQ ID NO: 4810560 - DNA, 25 bp, Homo sapien
caaaacagaagcggatatagtggtc

SEQ ID NO: 4810561 - DNA, 25 bp, Homo sapien
acaaaacagaagcggatatagtggt

SEQ ID NO: 4810562 - DNA, 25 bp, Homo sapien
ctatagaagatggagacagggatgg

SEQ ID NO: 4810563 - DNA, 25 bp, Homo sapien
gatggagacagggatggccaccaag

SEQ ID NO: 4810564 - DNA, 25 bp, Homo sapien
tggagacagggatggccaccaagcc

SEQ ID NO: 4810565 - DNA, 25 bp, Homo sapien
tagaagatggagacagggatggcca

SEQ ID NO: 4810566 - DNA, 25 bp, Homo sapien
gggacagagaggttcccacgaccag

SEQ ID NO: 4810567 - DNA, 25 bp, Homo sapien
gcatcaaagtcagaggaacaaggcc

SEQ ID NO: 4810568 - DNA, 25 bp, Homo sapien
gggaaggagagttagctccaatcca

SEQ ID NO: 4810569 - DNA, 25 bp, Homo sapien
aaggacatgtctcaacacggcctcg

SEQ ID NO: 4810570 - DNA, 25 bp, Homo sapien
tgccccaaggttgacggcagaggct

SEQ ID NO: 4810571 - DNA, 25 bp, Homo sapien
ggactaagatctagcccaggagcct

SEQ ID NO: 4810572 - DNA, 25 bp, Homo sapien
agaggctggactaagatctagccca

SEQ ID NO: 4810573 - DNA, 25 bp, Homo sapien
acccttgagcagcacacaacctgtg

SEQ ID NO: 4810574 - DNA, 25 bp, Homo sapien
gcgtctgtcatagggctcatccaca

SEQ ID NO: 4810575 - DNA, 25 bp, Homo sapien
gatcatccacttgacgaagcgtctg

SEQ ID NO: 4810576 - DNA, 25 bp, Homo sapien
gacgaagcgtctgtcatagggctca

SEQ ID NO: 4810577 - DNA, 25 bp, Homo sapien
ttgttcttgatcatccacttgacga

SEQ ID NO: 4810578 - DNA, 25 bp, Homo sapien
atcatgtggtcacggcagcgctgca

SEQ ID NO: 4810579 - DNA, 25 bp, Homo sapien
cgttcaaagctctcggctactgcag

SEQ ID NO: 4810580 - DNA, 25 bp, Homo sapien
tcaggcccactgactgtaggctacg

SEQ ID NO: 4810581 - DNA, 25 bp, Homo sapien
tgcgggaactgcacaaagtagctgc

SEQ ID NO: 4810582 - DNA, 25 bp, Homo sapien
gggcagtggaagacggagttctggt

SEQ ID NO: 4810583 - DNA, 25 bp, Homo sapien
ttctggtgcacggtccgcaggtgct

SEQ ID NO: 4810584 - DNA, 25 bp, Homo sapien
cacggtccgcaggtgcttcatgatg

SEQ ID NO: 4810585 - DNA, 25 bp, Homo sapien
aagacggagttctggtgcacggtcc

SEQ ID NO: 4810586 - DNA, 25 bp, Homo sapien
cagccagtggcgctgaaggtcttgc

SEQ ID NO: 4810587 - DNA, 25 bp, Homo sapien
ggcgctgaaggtcttgccggcgctg

SEQ ID NO: 4810588 - DNA, 25 bp, Homo sapien
cagtggcgctgaaggtcttgccggc

SEQ ID NO: 4810589 - DNA, 25 bp, Homo sapien
agccagtggcgctgaaggtcttgcc

SEQ ID NO: 4810590 - DNA, 25 bp, Homo sapien
tcagggtccgttcccacatgccagg

SEQ ID NO: 4810591 - DNA, 25 bp, Homo sapien
tccgttcccacatgccagggaggct

SEQ ID NO: 4810592 - DNA, 25 bp, Homo sapien
cgttcccacatgccagggaggctgg

SEQ ID NO: 4810593 - DNA, 25 bp, Homo sapien
agggtccgttcccacatgccaggga

SEQ ID NO: 4810594 - DNA, 25 bp, Homo sapien
ccaaggccgaacagaacagctgctg

SEQ ID NO: 4810595 - DNA, 25 bp, Homo sapien
catccactggtagacttcatcagtg

SEQ ID NO: 4810596 - DNA, 25 bp, Homo sapien
tcagtgatacacaccacgtcatgct

SEQ ID NO: 4810597 - DNA, 25 bp, Homo sapien
gctggtgcccgtcgtagaccatcca

SEQ ID NO: 4810598 - DNA, 25 bp, Homo sapien
acaccacgtcatgctgctggcaaag

SEQ ID NO: 4810599 - DNA, 25 bp, Homo sapien
gtgcgtgatgtgaatttgccggcca

SEQ ID NO: 4810600 - DNA, 25 bp, Homo sapien
tgatgtgaatttgccggccagctcc

SEQ ID NO: 4810601 - DNA, 25 bp, Homo sapien
ccagggctttggtgcgtgatgtgaa

SEQ ID NO: 4810602 - DNA, 25 bp, Homo sapien
ctttggtgcgtgatgtgaatttgcc

SEQ ID NO: 4810603 - DNA, 25 bp, Homo sapien
gtcaaaaaagggttcgatgatgatg

SEQ ID NO: 4810604 - DNA, 25 bp, Homo sapien
cattgtcatgggctcgtagcagtca

SEQ ID NO: 4810605 - DNA, 25 bp, Homo sapien
tgggctcgtagcagtcaaaaaaggg

SEQ ID NO: 4810606 - DNA, 25 bp, Homo sapien
cgtagcagtcaaaaaagggttcgat

SEQ ID NO: 4810607 - DNA, 25 bp, Homo sapien
tcctgagcgggtctatctcctgacc

SEQ ID NO: 4810608 - DNA, 25 bp, Homo sapien
tgtgaacagggccccatagccacca

SEQ ID NO: 4810609 - DNA, 25 bp, Homo sapien
cccatagccaccaacagtcaccagc

SEQ ID NO: 4810610 - DNA, 25 bp, Homo sapien
gcacattcctgagcgggtctatctc

SEQ ID NO: 4810611 - DNA, 25 bp, Homo sapien
ttgccaggatcttcgtcagtggtgg

SEQ ID NO: 4810612 - DNA, 25 bp, Homo sapien
ggatcttcgtcagtggtgggtaacc

SEQ ID NO: 4810613 - DNA, 25 bp, Homo sapien
cttgccaggatcttcgtcagtggtg

SEQ ID NO: 4810614 - DNA, 25 bp, Homo sapien
ccaggatcttcgtcagtggtgggta

SEQ ID NO: 4810615 - DNA, 25 bp, Homo sapien
gaaggaactttccaaccagctctga

SEQ ID NO: 4810616 - DNA, 25 bp, Homo sapien
tttggatcaaagaaggaactttcca

SEQ ID NO: 4810617 - DNA, 25 bp, Homo sapien
aggaactttccaaccagctctgaga

SEQ ID NO: 4810618 - DNA, 25 bp, Homo sapien
aagaaggaactttccaaccagctct

SEQ ID NO: 4810619 - DNA, 25 bp, Homo sapien
agttcacgacgtcatgctcactggc

SEQ ID NO: 4810620 - DNA, 25 bp, Homo sapien
tgacagcgtgctgaaaggcttccac

SEQ ID NO: 4810621 - DNA, 25 bp, Homo sapien
gaagtctccactgacagcgtgctga

SEQ ID NO: 4810622 - DNA, 25 bp, Homo sapien
cttccacggcaaagtctggtggtgg

SEQ ID NO: 4810623 - DNA, 25 bp, Homo sapien
taaagcctcccagctagtacaaggc

SEQ ID NO: 4810624 - DNA, 25 bp, Homo sapien
gcatcatcaaccctgtggagcacaa

SEQ ID NO: 4810625 - DNA, 25 bp, Homo sapien
tcatatagccttcacaatggcctgt

SEQ ID NO: 4810626 - DNA, 25 bp, Homo sapien
gtacagattgcatgactcctccttg

SEQ ID NO: 4810627 - DNA, 25 bp, Homo sapien
cttggtgcctgggtagaatggcttt

SEQ ID NO: 4810628 - DNA, 25 bp, Homo sapien
tccccaacgctctccaggtgggtat

SEQ ID NO: 4810629 - DNA, 25 bp, Homo sapien
gaaaacaatatcaacctctgcaaat

SEQ ID NO: 4810630 - DNA, 25 bp, Homo sapien
caggtgggtataactcttcattttg

SEQ ID NO: 4810631 - DNA, 25 bp, Homo sapien
atcccgtctagccttcgggcctgca

SEQ ID NO: 4810632 - DNA, 25 bp, Homo sapien
agtccgagcttgcacacaggaggga

SEQ ID NO: 4810633 - DNA, 25 bp, Homo sapien
ggacagctgctttcaggccacagcg

SEQ ID NO: 4810634 - DNA, 25 bp, Homo sapien
gggtgcagcagtccgagcttgcaca

SEQ ID NO: 4810635 - DNA, 25 bp, Homo sapien
ggagggacagctgctttcaggccac

SEQ ID NO: 4810636 - DNA, 25 bp, Homo sapien
ggtgaccctggataggtaatttggc

SEQ ID NO: 4810637 - DNA, 25 bp, Homo sapien
ccctggataggtaatttggctcctc

SEQ ID NO: 4810638 - DNA, 25 bp, Homo sapien
gataggtaatttggctcctcctgtc

SEQ ID NO: 4810639 - DNA, 25 bp, Homo sapien
gggatccaacattcttctcagccac

SEQ ID NO: 4810640 - DNA, 25 bp, Homo sapien
ctgctgcagtcctgaacatgcctcc

SEQ ID NO: 4810641 - DNA, 25 bp, Homo sapien
gccagaaaatgcctccgagctcagg

SEQ ID NO: 4810642 - DNA, 25 bp, Homo sapien
gaaaatgcctccgagctcaggactt

SEQ ID NO: 4810643 - DNA, 25 bp, Homo sapien
tctggtgcaagaaccaagtgagtgg

SEQ ID NO: 4810644 - DNA, 25 bp, Homo sapien
gacattcgtcagttgcagttcaggt

SEQ ID NO: 4810645 - DNA, 25 bp, Homo sapien
ttcaggttttcccacccaggtgctg

SEQ ID NO: 4810646 - DNA, 25 bp, Homo sapien
gaagagcctagagttttgatatcca

SEQ ID NO: 4810647 - DNA, 25 bp, Homo sapien
gccgtgaaccaattgcatactgcca

SEQ ID NO: 4810648 - DNA, 25 bp, Homo sapien
ttaaattgtagagacaggctggccg

SEQ ID NO: 4810649 - DNA, 25 bp, Homo sapien
aaattgtagagacaggctggccgcg

SEQ ID NO: 4810650 - DNA, 25 bp, Homo sapien
tgtagagacaggctggccgcggtga

SEQ ID NO: 4810651 - DNA, 25 bp, Homo sapien
tagagacaggctggccgcggtgact

SEQ ID NO: 4810652 - DNA, 25 bp, Homo sapien
cagtttcttagtggacaccaaggcc

SEQ ID NO: 4810653 - DNA, 25 bp, Homo sapien
ggattataaaatcaggcgccctact

SEQ ID NO: 4810654 - DNA, 25 bp, Homo sapien
tggcacctaatggaggcattctccg

SEQ ID NO: 4810655 - DNA, 25 bp, Homo sapien
gagttacagtgactgcctcatggct

SEQ ID NO: 4810656 - DNA, 25 bp, Homo sapien
cagtgtccgagcgagaatcagcgag

SEQ ID NO: 4810657 - DNA, 25 bp, Homo sapien
tagcacaaccaagctcggaaccgtt

SEQ ID NO: 4810658 - DNA, 25 bp, Homo sapien
cagccagggaatttgcgaggaccca

SEQ ID NO: 4810659 - DNA, 25 bp, Homo sapien
ccgcgggcggctcaatcattctgtg

SEQ ID NO: 4810660 - DNA, 25 bp, Homo sapien
agcagggcgctagcgcggaggcgag

SEQ ID NO: 4810661 - DNA, 25 bp, Homo sapien
gcttcacccctcgttcccaagtaca

SEQ ID NO: 4810662 - DNA, 25 bp, Homo sapien
caagtacaccccgtaggttgcagca

SEQ ID NO: 4810663 - DNA, 25 bp, Homo sapien
gcgagagcgggagaaagcgccgcta

SEQ ID NO: 4810664 - DNA, 25 bp, Homo sapien
tgcccggagtctccggggcaccacc

SEQ ID NO: 4810665 - DNA, 25 bp, Homo sapien
gtgcccggagtctccggggcaccac

SEQ ID NO: 4810666 - DNA, 25 bp, Homo sapien
ccttgatctggaccggggtgaaccg

SEQ ID NO: 4810667 - DNA, 25 bp, Homo sapien
ctggggtcatggagttcatgatgat

SEQ ID NO: 4810668 - DNA, 25 bp, Homo sapien
ggttctcagctgttgcgattgttgc

SEQ ID NO: 4810669 - DNA, 25 bp, Homo sapien
ggtgaaccgaggtctgccggttctc

SEQ ID NO: 4810670 - DNA, 25 bp, Homo sapien
tcttctgttagtagtactcttaacc

SEQ ID NO: 4810671 - DNA, 25 bp, Homo sapien
gacagacaggctgtaagaagcggga

SEQ ID NO: 4810672 - DNA, 25 bp, Homo sapien
ttctgccctttggagcagacaacct

SEQ ID NO: 4810673 - DNA, 25 bp, Homo sapien
taacccctgccaaactgtattctgc

SEQ ID NO: 4810674 - DNA, 25 bp, Homo sapien
cacacttatttgatcgtgtagacat

SEQ ID NO: 4810675 - DNA, 25 bp, Homo sapien
ggattgagctgatcacgataaggga

SEQ ID NO: 4810676 - DNA, 25 bp, Homo sapien
tgatcacgataagggagctagcgac

SEQ ID NO: 4810677 - DNA, 25 bp, Homo sapien
gcgactcgtgtttccccacacttat

SEQ ID NO: 4810678 - DNA, 25 bp, Homo sapien
tcctggcatcactaggaggactgac

SEQ ID NO: 4810679 - DNA, 25 bp, Homo sapien
gatgttcccagaccaagcacggagt

SEQ ID NO: 4810680 - DNA, 25 bp, Homo sapien
catcaaggatgaccctaggagggcc

SEQ ID NO: 4810681 - DNA, 25 bp, Homo sapien
taaattagtccagtgtgaggcccag

SEQ ID NO: 4810682 - DNA, 25 bp, Homo sapien
gacagacacatttgacacaggcatt

SEQ ID NO: 4810683 - DNA, 25 bp, Homo sapien
tattaacattatcagtaatcaaaga

SEQ ID NO: 4810684 - DNA, 25 bp, Homo sapien
aaaatctaggttctgggttacagtg

SEQ ID NO: 4810685 - DNA, 25 bp, Homo sapien
gaaaggtggcccatcatctgggcac

SEQ ID NO: 4810686 - DNA, 25 bp, Homo sapien
caagtcacggatcgagcagggtatc

SEQ ID NO: 4810687 - DNA, 25 bp, Homo sapien
gaagaagttccggacccatgtggag

SEQ ID NO: 4810688 - DNA, 25 bp, Homo sapien
tcaacaacgagtggacgctggacaa

SEQ ID NO: 4810689 - DNA, 25 bp, Homo sapien
gactgcaccgtggacattgagagcc

SEQ ID NO: 4810690 - DNA, 25 bp, Homo sapien
aattgttgttaagctgggcagaacc

SEQ ID NO: 4810691 - DNA, 25 bp, Homo sapien
cagagtttggcccagattgtgctga

SEQ ID NO: 4810692 - DNA, 25 bp, Homo sapien
tgagacctggtgcacaggcagatgt

SEQ ID NO: 4810693 - DNA, 25 bp, Homo sapien
ggccaatgcgatatacttcccaggg

SEQ ID NO: 4810694 - DNA, 25 bp, Homo sapien
ggcagtttcccttgagcaaagcagc

SEQ ID NO: 4810695 - DNA, 25 bp, Homo sapien
taatccccggatgaacggtgctcca

SEQ ID NO: 4810696 - DNA, 25 bp, Homo sapien
gatcaatcacgtggacactaaggca

SEQ ID NO: 4810697 - DNA, 25 bp, Homo sapien
cacgcacagtgttaaggagccaaga

SEQ ID NO: 4810698 - DNA, 25 bp, Homo sapien
gagcctgagctgcacttactgctcc

SEQ ID NO: 4810699 - DNA, 25 bp, Homo sapien
agcagctcccagagcggtggcccag

SEQ ID NO: 4810700 - DNA, 25 bp, Homo sapien
aaacacgacttgactcgaggccaag

SEQ ID NO: 4810701 - DNA, 25 bp, Homo sapien
tcctgcctctagtgaacctcgtggt

SEQ ID NO: 4810702 - DNA, 25 bp, Homo sapien
cctctcctctcagatggaactctgg

SEQ ID NO: 4810703 - DNA, 25 bp, Homo sapien
ggttattatggtgttagttatcgaa

SEQ ID NO: 4810704 - DNA, 25 bp, Homo sapien
ctactgccccaacatagccttgagg

SEQ ID NO: 4810705 - DNA, 25 bp, Homo sapien
ctgccccaacatagccttgaggagg

SEQ ID NO: 4810706 - DNA, 25 bp, Homo sapien
gctcttcatgcccaagtagctgtct

SEQ ID NO: 4810707 - DNA, 25 bp, Homo sapien
tgcccaagtagctgtctgctgtggg

SEQ ID NO: 4810708 - DNA, 25 bp, Homo sapien
ttcatgcccaagtagctgtctgctg

SEQ ID NO: 4810709 - DNA, 25 bp, Homo sapien
tcttcatgcccaagtagctgtctgc

SEQ ID NO: 4810710 - DNA, 25 bp, Homo sapien
cattcggaactggaagacggcgctt

SEQ ID NO: 4810711 - DNA, 25 bp, Homo sapien
tgtagtgtatgcttccaggagggac

SEQ ID NO: 4810712 - DNA, 25 bp, Homo sapien
gaagctccgtagagtgtgacccaaa

SEQ ID NO: 4810713 - DNA, 25 bp, Homo sapien
catacggttgcgtggatgctcagca

SEQ ID NO: 4810714 - DNA, 25 bp, Homo sapien
gccagcaccgatccactcagcggag

SEQ ID NO: 4810715 - DNA, 25 bp, Homo sapien
agcaccgatccactcagcggagccc

SEQ ID NO: 4810716 - DNA, 25 bp, Homo sapien
ccgatccactcagcggagccccagg

SEQ ID NO: 4810717 - DNA, 25 bp, Homo sapien
tctgccagcaccgatccactcagcg

SEQ ID NO: 4810718 - DNA, 25 bp, Homo sapien
ggcgactacggacgccctagacttc

SEQ ID NO: 4810719 - DNA, 25 bp, Homo sapien
aacctacggcgtagacgtcgccact

SEQ ID NO: 4810720 - DNA, 25 bp, Homo sapien
caggtcacttctgcggcctgggagc

SEQ ID NO: 4810721 - DNA, 25 bp, Homo sapien
tcagccccgtcaagcagagggaggc

SEQ ID NO: 4810722 - DNA, 25 bp, Homo sapien
ctctttgggcctcgccatcttggca

SEQ ID NO: 4810723 - DNA, 25 bp, Homo sapien
gggttagggcgagcgggcgcgcgaa

SEQ ID NO: 4810724 - DNA, 25 bp, Homo sapien
cccgcggcaacgtcacgtgacgaaa

SEQ ID NO: 4810725 - DNA, 25 bp, Homo sapien
gcaacgtcacgtgacgaaatccccg

SEQ ID NO: 4810726 - DNA, 25 bp, Homo sapien
caaccccggctggatggacgggcac

SEQ ID NO: 4810727 - DNA, 25 bp, Homo sapien
aattggaggcgggatgtggcgacag

SEQ ID NO: 4810728 - DNA, 25 bp, Homo sapien
ctgtgaagcgcggtgtcaaagccga

SEQ ID NO: 4810729 - DNA, 25 bp, Homo sapien
tggcgacagtggcagggccaacccc

SEQ ID NO: 4810730 - DNA, 25 bp, Homo sapien
gatgccttcctgacccgattgcaga

SEQ ID NO: 4810731 - DNA, 25 bp, Homo sapien
ggtgatgtcccttttagcccagagc

SEQ ID NO: 4810732 - DNA, 25 bp, Homo sapien
gaaccaagtaagtctgcctctggga

SEQ ID NO: 4810733 - DNA, 25 bp, Homo sapien
ggtggccccaatgtcagtgtatgct

SEQ ID NO: 4810734 - DNA, 25 bp, Homo sapien
ttctcagggaagtgccagctttctg

SEQ ID NO: 4810735 - DNA, 25 bp, Homo sapien
ttgtggacctgacgcctctgctctt

SEQ ID NO: 4810736 - DNA, 25 bp, Homo sapien
gaaacatcagaggtaagctgtggca

SEQ ID NO: 4810737 - DNA, 25 bp, Homo sapien
cattcagttggagacgttgtggacc

SEQ ID NO: 4810738 - DNA, 25 bp, Homo sapien
gccctgagtacttagtggctatagg

SEQ ID NO: 4810739 - DNA, 25 bp, Homo sapien
gacagtccagtcctgagccctgctg

SEQ ID NO: 4810740 - DNA, 25 bp, Homo sapien
cctgctggcccaagtttgtagccct

SEQ ID NO: 4810741 - DNA, 25 bp, Homo sapien
ctttaggaccttacaatataccagg

SEQ ID NO: 4810742 - DNA, 25 bp, Homo sapien
ctgatggatggctagttcaccagca

SEQ ID NO: 4810743 - DNA, 25 bp, Homo sapien
gatgtttaacttcaaagcccaggga

SEQ ID NO: 4810744 - DNA, 25 bp, Homo sapien
ggatgacaacgtggctctcagaacc

SEQ ID NO: 4810745 - DNA, 25 bp, Homo sapien
tcagaacctagaaaactcccctggc

SEQ ID NO: 4810746 - DNA, 25 bp, Homo sapien
tccttgtgcggcttcatgtccagga

SEQ ID NO: 4810747 - DNA, 25 bp, Homo sapien
agggctgcacttcttcccaactaga

SEQ ID NO: 4810748 - DNA, 25 bp, Homo sapien
ataaaacgttccttgtgcggcttca

SEQ ID NO: 4810749 - DNA, 25 bp, Homo sapien
acttcttcccaactagagagctggg

SEQ ID NO: 4810750 - DNA, 25 bp, Homo sapien
gggcagagggtgagtctacctttcc

SEQ ID NO: 4810751 - DNA, 25 bp, Homo sapien
gggccaggccctgacaggagcccag

SEQ ID NO: 4810752 - DNA, 25 bp, Homo sapien
tggggcagagggtgagtctaccttt

SEQ ID NO: 4810753 - DNA, 25 bp, Homo sapien
gagtggggcagagggtgagtctacc

SEQ ID NO: 4810754 - DNA, 25 bp, Homo sapien
aagactgcggccgctggacttggct

SEQ ID NO: 4810755 - DNA, 25 bp, Homo sapien
agactgcggccgctggacttggctt

SEQ ID NO: 4810756 - DNA, 25 bp, Homo sapien
tgaagactgcggccgctggacttgg

SEQ ID NO: 4810757 - DNA, 25 bp, Homo sapien
gactgcggccgctggacttggcttg

SEQ ID NO: 4810758 - DNA, 25 bp, Homo sapien
gatagcaccggaagatgctgctccg

SEQ ID NO: 4810759 - DNA, 25 bp, Homo sapien
acaaacaagttaagtggcagggctg

SEQ ID NO: 4810760 - DNA, 25 bp, Homo sapien
ccctgatgcagcttttggcaactga

SEQ ID NO: 4810761 - DNA, 25 bp, Homo sapien
caccctggcctaggtgctgagtgca

SEQ ID NO: 4810762 - DNA, 25 bp, Homo sapien
tctctcgccaatgagccagtcaggg

SEQ ID NO: 4810763 - DNA, 25 bp, Homo sapien
tgagcagttccaagtaggtgacagg

SEQ ID NO: 4810764 - DNA, 25 bp, Homo sapien
cttgttgcctctctcgccaatgagc

SEQ ID NO: 4810765 - DNA, 25 bp, Homo sapien
tgccaggcaggctgtagacagtgat

SEQ ID NO: 4810766 - DNA, 25 bp, Homo sapien
gccccaccttgcggcaccgggccca

SEQ ID NO: 4810767 - DNA, 25 bp, Homo sapien
ctgccccaccttgcggcaccgggcc

SEQ ID NO: 4810768 - DNA, 25 bp, Homo sapien
tgccccaccttgcggcaccgggccc

SEQ ID NO: 4810769 - DNA, 25 bp, Homo sapien
cctgccccaccttgcggcaccgggc

SEQ ID NO: 4810770 - DNA, 25 bp, Homo sapien
gagcacccgagctttgcgggtccca

SEQ ID NO: 4810771 - DNA, 25 bp, Homo sapien
actgctgtcggctgcctcgtagtca

SEQ ID NO: 4810772 - DNA, 25 bp, Homo sapien
cgagctttgcgggtcccactggcag

SEQ ID NO: 4810773 - DNA, 25 bp, Homo sapien
gctgtcggctgcctcgtagtcatag

SEQ ID NO: 4810774 - DNA, 25 bp, Homo sapien
agagggcaccacaggcatagtggcc

SEQ ID NO: 4810775 - DNA, 25 bp, Homo sapien
gcaccacaggcatagtggccgcagc

SEQ ID NO: 4810776 - DNA, 25 bp, Homo sapien
gggcaccacaggcatagtggccgca

SEQ ID NO: 4810777 - DNA, 25 bp, Homo sapien
gagggcaccacaggcatagtggccg

SEQ ID NO: 4810778 - DNA, 25 bp, Homo sapien
tggagaggagggatacatcttagca

SEQ ID NO: 4810779 - DNA, 25 bp, Homo sapien
agaggagggatacatcttagcaggt

SEQ ID NO: 4810780 - DNA, 25 bp, Homo sapien
gaggagggatacatcttagcaggtg

SEQ ID NO: 4810781 - DNA, 25 bp, Homo sapien
gagaggagggatacatcttagcagg

SEQ ID NO: 4810782 - DNA, 25 bp, Homo sapien
gctttgtgtcacaggacttgcccag

SEQ ID NO: 4810783 - DNA, 25 bp, Homo sapien
gagatgcccgcacccagagtgggtt

SEQ ID NO: 4810784 - DNA, 25 bp, Homo sapien
ccccagtgggttcagcagtgctggc

SEQ ID NO: 4810785 - DNA, 25 bp, Homo sapien
acttggccgtcagtaaggccagcca

SEQ ID NO: 4810786 - DNA, 25 bp, Homo sapien
ctgcccagctgcttctgcaagtcca

SEQ ID NO: 4810787 - DNA, 25 bp, Homo sapien
tgcccagctgcttctgcaagtccag

SEQ ID NO: 4810788 - DNA, 25 bp, Homo sapien
ccagctgcttctgcaagtccagcat

SEQ ID NO: 4810789 - DNA, 25 bp, Homo sapien
gcccagctgcttctgcaagtccagc

SEQ ID NO: 4810790 - DNA, 25 bp, Homo sapien
cttgacgaactcgtggaggcagcgc

SEQ ID NO: 4810791 - DNA, 25 bp, Homo sapien
tgtctgagacttgacgaactcgtgg

SEQ ID NO: 4810792 - DNA, 25 bp, Homo sapien
gtagcactgtgcgtagtaggttgtc

SEQ ID NO: 4810793 - DNA, 25 bp, Homo sapien
gtaggttgtctgagacttgacgaac

SEQ ID NO: 4810794 - DNA, 25 bp, Homo sapien
ccctccagcaagagacgggtcactt

SEQ ID NO: 4810795 - DNA, 25 bp, Homo sapien
agcaagagacgggtcacttctgctt

SEQ ID NO: 4810796 - DNA, 25 bp, Homo sapien
tctgtctgggccacgcggagctcct

SEQ ID NO: 4810797 - DNA, 25 bp, Homo sapien
gattccctccagcaagagacgggtc

SEQ ID NO: 4810798 - DNA, 25 bp, Homo sapien
agagagccttctgggtctatgcctg

SEQ ID NO: 4810799 - DNA, 25 bp, Homo sapien
tctatgcctgacttcacacctggag

SEQ ID NO: 4810800 - DNA, 25 bp, Homo sapien
tctcctggagcctacctgggagccg

SEQ ID NO: 4810801 - DNA, 25 bp, Homo sapien
agcttccccgcagtcttctcctgga

SEQ ID NO: 4810802 - DNA, 25 bp, Homo sapien
cagcagcaagtgtgcctgcaccccg

SEQ ID NO: 4810803 - DNA, 25 bp, Homo sapien
acagggtactgtggagaaaacattt

SEQ ID NO: 4810804 - DNA, 25 bp, Homo sapien
gagtgagaaacagatcagaccccac

SEQ ID NO: 4810805 - DNA, 25 bp, Homo sapien
cagcaagtgtgcctgcaccccgcca

SEQ ID NO: 4810806 - DNA, 25 bp, Homo sapien
ggaggacagctggaccctagagcct

SEQ ID NO: 4810807 - DNA, 25 bp, Homo sapien
agaggaggacagctggaccctagag

SEQ ID NO: 4810808 - DNA, 25 bp, Homo sapien
aggacagctggaccctagagcctgt

SEQ ID NO: 4810809 - DNA, 25 bp, Homo sapien
aggaggacagctggaccctagagcc

SEQ ID NO: 4810810 - DNA, 25 bp, Homo sapien
gagcagccagcaggagtcctgctta

SEQ ID NO: 4810811 - DNA, 25 bp, Homo sapien
gcttatatttctcctacagtgtcag

SEQ ID NO: 4810812 - DNA, 25 bp, Homo sapien
cctctaacatgcctcatgcaggagg

SEQ ID NO: 4810813 - DNA, 25 bp, Homo sapien
tctcaagagagacggagtgtcccca

SEQ ID NO: 4810814 - DNA, 25 bp, Homo sapien
gcctgaaatagggaatgcggaccca

SEQ ID NO: 4810815 - DNA, 25 bp, Homo sapien
tctgacccgagacaacagcctgaaa

SEQ ID NO: 4810816 - DNA, 25 bp, Homo sapien
aagtccccgtccaggagcactggaa

SEQ ID NO: 4810817 - DNA, 25 bp, Homo sapien
cacactgggactcaatggcaaaaga

SEQ ID NO: 4810818 - DNA, 25 bp, Homo sapien
caggactgacctgatcacatggcag

SEQ ID NO: 4810819 - DNA, 25 bp, Homo sapien
cagacaaggtgtagcagtggtgaca

SEQ ID NO: 4810820 - DNA, 25 bp, Homo sapien
taagcctcaggacaagacatgccct

SEQ ID NO: 4810821 - DNA, 25 bp, Homo sapien
tgtgaactccagaaaggcacggcca

SEQ ID NO: 4810822 - DNA, 25 bp, Homo sapien
tacgaggtctagtctcctgaaagtc

SEQ ID NO: 4810823 - DNA, 25 bp, Homo sapien
ccgagagaatgtaattacgaggtct

SEQ ID NO: 4810824 - DNA, 25 bp, Homo sapien
aatgtaattacgaggtctagtctcc

SEQ ID NO: 4810825 - DNA, 25 bp, Homo sapien
aggcgctggccgagagaatgtaatt

SEQ ID NO: 4810826 - DNA, 25 bp, Homo sapien
ggcccctcccgacaatgaaggtgga

SEQ ID NO: 4810827 - DNA, 25 bp, Homo sapien
acagcgcgtgggacaggtatactca

SEQ ID NO: 4810828 - DNA, 25 bp, Homo sapien
gagtgacaggcgtccaacatttgca

SEQ ID NO: 4810829 - DNA, 25 bp, Homo sapien
aggaggctaccccagagtcttgcac

SEQ ID NO: 4810830 - DNA, 25 bp, Homo sapien
cacacacttgagtgacctgagacgg

SEQ ID NO: 4810831 - DNA, 25 bp, Homo sapien
aagaggtcatcccaataggcacagg

SEQ ID NO: 4810832 - DNA, 25 bp, Homo sapien
tcctgaagagtcctaacgtgtgcgt

SEQ ID NO: 4810833 - DNA, 25 bp, Homo sapien
tgagccaagttacccaaagcaggac

SEQ ID NO: 4810834 - DNA, 25 bp, Homo sapien
tcttcagcctcgctttgcaggcatc

SEQ ID NO: 4810835 - DNA, 25 bp, Homo sapien
ccaagtccagacgccggttttggag

SEQ ID NO: 4810836 - DNA, 25 bp, Homo sapien
cttcagcctcgctttgcaggcatcc

SEQ ID NO: 4810837 - DNA, 25 bp, Homo sapien
gtccagacgccggttttggaggagc

SEQ ID NO: 4810838 - DNA, 25 bp, Homo sapien
caggaagcggaatagtcccagggcc

SEQ ID NO: 4810839 - DNA, 25 bp, Homo sapien
gaagcggaatagtcccagggccctc

SEQ ID NO: 4810840 - DNA, 25 bp, Homo sapien
aagcggaatagtcccagggccctca

SEQ ID NO: 4810841 - DNA, 25 bp, Homo sapien
agcggaatagtcccagggccctcac

SEQ ID NO: 4810842 - DNA, 25 bp, Homo sapien
aggaagttgcgcaagggtgtgagga

SEQ ID NO: 4810843 - DNA, 25 bp, Homo sapien
atggaggccgtgtggataaaatccc

SEQ ID NO: 4810844 - DNA, 25 bp, Homo sapien
ctccaggaagttgcgcaagggtgtg

SEQ ID NO: 4810845 - DNA, 25 bp, Homo sapien
tggataaaatccctctccgcggctc

SEQ ID NO: 4810846 - DNA, 25 bp, Homo sapien
agtttgaggctatagtagtaagcta

SEQ ID NO: 4810847 - DNA, 25 bp, Homo sapien
tttgaggctatagtagtaagctatg

SEQ ID NO: 4810848 - DNA, 25 bp, Homo sapien
ggcccaggcggaaggatcatttgaa

SEQ ID NO: 4810849 - DNA, 25 bp, Homo sapien
gaggcccaggcggaaggatcatttg

SEQ ID NO: 4810850 - DNA, 25 bp, Homo sapien
cgcgtctgccatgtactgagccagc

SEQ ID NO: 4810851 - DNA, 25 bp, Homo sapien
atagggggtggtcggccccagctca

SEQ ID NO: 4810852 - DNA, 25 bp, Homo sapien
tcactggccgcgtctgccatgtact

SEQ ID NO: 4810853 - DNA, 25 bp, Homo sapien
cagcttctcatacaggaactcctcc

SEQ ID NO: 4810854 - DNA, 25 bp, Homo sapien
gggcatcaagctcagtcttctcagc

SEQ ID NO: 4810855 - DNA, 25 bp, Homo sapien
ggccagaaggttttcaaagtgggca

SEQ ID NO: 4810856 - DNA, 25 bp, Homo sapien
acctctgtctgcctcaagatcttct

SEQ ID NO: 4810857 - DNA, 25 bp, Homo sapien
gaaggttttcaaagtgggcatcaag

SEQ ID NO: 4810858 - DNA, 25 bp, Homo sapien
ggctgaggtgggagcccaggaggcg

SEQ ID NO: 4810859 - DNA, 25 bp, Homo sapien
tgggtgacagaccaagaacctgcct

SEQ ID NO: 4810860 - DNA, 25 bp, Homo sapien
ggtgacagaccaagaacctgcctta

SEQ ID NO: 4810861 - DNA, 25 bp, Homo sapien
tgacagaccaagaacctgccttaaa

SEQ ID NO: 4810862 - DNA, 25 bp, Homo sapien
cgcgtccgacgccagcttcttcatg

SEQ ID NO: 4810863 - DNA, 25 bp, Homo sapien
caccgcccgggtgaagaagatgccc

SEQ ID NO: 4810864 - DNA, 25 bp, Homo sapien
ggtgaagaagatgcccgcgtccgac

SEQ ID NO: 4810865 - DNA, 25 bp, Homo sapien
cccgggtgaagaagatgcccgcgtc

SEQ ID NO: 4810866 - DNA, 25 bp, Homo sapien
agccctccgcgcacccgcctgccgg

SEQ ID NO: 4810867 - DNA, 25 bp, Homo sapien
ccgccaaccgcaccccgcccacctg

SEQ ID NO: 4810868 - DNA, 25 bp, Homo sapien
ccgcccacctgctgcggggcaccag

SEQ ID NO: 4810869 - DNA, 25 bp, Homo sapien
acggcccgagcgcagccggcagccc

SEQ ID NO: 4810870 - DNA, 25 bp, Homo sapien
attcctctacccgtgtgtcccattg

SEQ ID NO: 4810871 - DNA, 25 bp, Homo sapien
gtcccattggccgagagccagctgg

SEQ ID NO: 4810872 - DNA, 25 bp, Homo sapien
tctacccgtgtgtcccattggccga

SEQ ID NO: 4810873 - DNA, 25 bp, Homo sapien
gccacttttggcagcggaggtagaa

SEQ ID NO: 4810874 - DNA, 25 bp, Homo sapien
acatcagcccgtgtggttgcctggc

SEQ ID NO: 4810875 - DNA, 25 bp, Homo sapien
gccccagtttagaaccaacatggtg

SEQ ID NO: 4810876 - DNA, 25 bp, Homo sapien
cagcttcaaggagacggtgggtcac

SEQ ID NO: 4810877 - DNA, 25 bp, Homo sapien
tgcggaaccgctggctgtcagacag

SEQ ID NO: 4810878 - DNA, 25 bp, Homo sapien
gattggctgttatgctccctgttcg

SEQ ID NO: 4810879 - DNA, 25 bp, Homo sapien
cccggtctccgggtaagatggcagc

SEQ ID NO: 4810880 - DNA, 25 bp, Homo sapien
ctatattggcctccgattgggtgca

SEQ ID NO: 4810881 - DNA, 25 bp, Homo sapien
tccccggcgtgataggtcaggacca

SEQ ID NO: 4810882 - DNA, 25 bp, Homo sapien
tgtggagtttcctaacctgctgctg

SEQ ID NO: 4810883 - DNA, 25 bp, Homo sapien
tttgaggactgaactgggtcactcg

SEQ ID NO: 4810884 - DNA, 25 bp, Homo sapien
gcagttagtcttcatccccacgtga

SEQ ID NO: 4810885 - DNA, 25 bp, Homo sapien
ccaggtggcgtgagaagtacacact

SEQ ID NO: 4810886 - DNA, 25 bp, Homo sapien
gatgacccacggaaggcacttggct

SEQ ID NO: 4810887 - DNA, 25 bp, Homo sapien
cattaatatcatacagcagggcggg

SEQ ID NO: 4810888 - DNA, 25 bp, Homo sapien
ggctcgctagcaatgttatccacag

SEQ ID NO: 4810889 - DNA, 25 bp, Homo sapien
gatgcggtccgtggctcagtagatt

SEQ ID NO: 4810890 - DNA, 25 bp, Homo sapien
gcatgtccaggagcgccttctccag

SEQ ID NO: 4810891 - DNA, 25 bp, Homo sapien
tggtctccgcgcagctgttgtaggc

SEQ ID NO: 4810892 - DNA, 25 bp, Homo sapien
gaacatgacacagtctgtcttggca

SEQ ID NO: 4810893 - DNA, 25 bp, Homo sapien
ttatagcagacaccgtagccgtcgg

SEQ ID NO: 4810894 - DNA, 25 bp, Homo sapien
aggtgtccatgaagatgtcgggcat

SEQ ID NO: 4810895 - DNA, 25 bp, Homo sapien
tgtccatgaagatgtcgggcatgct

SEQ ID NO: 4810896 - DNA, 25 bp, Homo sapien
tggcgatggcgtaggaggtgtccat

SEQ ID NO: 4810897 - DNA, 25 bp, Homo sapien
ccatgaagatgtcgggcatgctcac

SEQ ID NO: 4810898 - DNA, 25 bp, Homo sapien
agcaggtgtcgatcaaaggcctccc

SEQ ID NO: 4810899 - DNA, 25 bp, Homo sapien
gatcaaaggcctccccgcggatggc

SEQ ID NO: 4810900 - DNA, 25 bp, Homo sapien
ggcccagcaggtgtcgatcaaaggc

SEQ ID NO: 4810901 - DNA, 25 bp, Homo sapien
aggtgtcgatcaaaggcctccccgc

SEQ ID NO: 4810902 - DNA, 25 bp, Homo sapien
tgtagcctcggtgggcctgcacggc

SEQ ID NO: 4810903 - DNA, 25 bp, Homo sapien
gcctcggtgggcctgcacggccttc

SEQ ID NO: 4810904 - DNA, 25 bp, Homo sapien
ggtcggtgtagcctcggtgggcctg

SEQ ID NO: 4810905 - DNA, 25 bp, Homo sapien
tcggtgtagcctcggtgggcctgca

SEQ ID NO: 4810906 - DNA, 25 bp, Homo sapien
tgagtccatggaagccgagcggatg

SEQ ID NO: 4810907 - DNA, 25 bp, Homo sapien
tgcggcccaggtgaaacatgcgcag

SEQ ID NO: 4810908 - DNA, 25 bp, Homo sapien
gccttgacaaaggtgagtgagtcca

SEQ ID NO: 4810909 - DNA, 25 bp, Homo sapien
gggaggcactttcataggtggcaca

SEQ ID NO: 4810910 - DNA, 25 bp, Homo sapien
tttccaaaatggtggaacaccatca

SEQ ID NO: 4810911 - DNA, 25 bp, Homo sapien
ctgggcttagcttctccgacttggg

SEQ ID NO: 4810912 - DNA, 25 bp, Homo sapien
aaggcatctgggcttagcttctccg

SEQ ID NO: 4810913 - DNA, 25 bp, Homo sapien
caaaatggtggaacaccatcacggt

SEQ ID NO: 4810914 - DNA, 25 bp, Homo sapien
ttctcgatgtcgctcttgatctcgg

SEQ ID NO: 4810915 - DNA, 25 bp, Homo sapien
gggtgatgttgaaccgcagcttctt

SEQ ID NO: 4810916 - DNA, 25 bp, Homo sapien
ttgatctcgggggtgatgttgaacc

SEQ ID NO: 4810917 - DNA, 25 bp, Homo sapien
gcaccaggggagaccgcacaagctc

SEQ ID NO: 4810918 - DNA, 25 bp, Homo sapien
tcatgctggtgcctctagagcctgg

SEQ ID NO: 4810919 - DNA, 25 bp, Homo sapien
gggcctcaggctcatgctggtgcct

SEQ ID NO: 4810920 - DNA, 25 bp, Homo sapien
tgctggtgcctctagagcctgggtc

SEQ ID NO: 4810921 - DNA, 25 bp, Homo sapien
tgcacagtaaacggggcctcaggct

SEQ ID NO: 4810922 - DNA, 25 bp, Homo sapien
tgctcgtacacaagcccacaggagc

SEQ ID NO: 4810923 - DNA, 25 bp, Homo sapien
gtgtactcgatgacatagtccagaa

SEQ ID NO: 4810924 - DNA, 25 bp, Homo sapien
agcatgctcgtacacaagcccacag

SEQ ID NO: 4810925 - DNA, 25 bp, Homo sapien
cgatgacatagtccagaagggtgac

SEQ ID NO: 4810926 - DNA, 25 bp, Homo sapien
gtaattacggcagcgtccagcctgc

SEQ ID NO: 4810927 - DNA, 25 bp, Homo sapien
ctgctttacaagctaggaggctggg

SEQ ID NO: 4810928 - DNA, 25 bp, Homo sapien
actggtgatgacaggctggctgcct

SEQ ID NO: 4810929 - DNA, 25 bp, Homo sapien
tactctaccggtgaggttgaccatc

SEQ ID NO: 4810930 - DNA, 25 bp, Homo sapien
ggcctgccacgtggctgcggtacac

SEQ ID NO: 4810931 - DNA, 25 bp, Homo sapien
cagcggttgccgctgttgagcctgc

SEQ ID NO: 4810932 - DNA, 25 bp, Homo sapien
tgccacgtggctgcggtacacgtct

SEQ ID NO: 4810933 - DNA, 25 bp, Homo sapien
gttgccgctgttgagcctgctgccg

SEQ ID NO: 4810934 - DNA, 25 bp, Homo sapien
tgagaccctgggcatggttgcatct

SEQ ID NO: 4810935 - DNA, 25 bp, Homo sapien
ccctgggcatggttgcatctaggca

SEQ ID NO: 4810936 - DNA, 25 bp, Homo sapien
gaccctgggcatggttgcatctagg

SEQ ID NO: 4810937 - DNA, 25 bp, Homo sapien
cctgggcatggttgcatctaggcac

SEQ ID NO: 4810938 - DNA, 25 bp, Homo sapien
tggagcgcacggaatcccggttcac

SEQ ID NO: 4810939 - DNA, 25 bp, Homo sapien
atggagcgcacggaatcccggttca

SEQ ID NO: 4810940 - DNA, 25 bp, Homo sapien
agcgcacggaatcccggttcacctt

SEQ ID NO: 4810941 - DNA, 25 bp, Homo sapien
tggatggagcgcacggaatcccggt

SEQ ID NO: 4810942 - DNA, 25 bp, Homo sapien
tctgggatgaggagaccccccacct

SEQ ID NO: 4810943 - DNA, 25 bp, Homo sapien
ggtgtgggttcagagcttcgaactc

SEQ ID NO: 4810944 - DNA, 25 bp, Homo sapien
gctcttctgacccatttgtacctct

SEQ ID NO: 4810945 - DNA, 25 bp, Homo sapien
cttcgaactcaacaggaccctgcag

SEQ ID NO: 4810946 - DNA, 25 bp, Homo sapien
tgagggtgttgtatgccttggccca

SEQ ID NO: 4810947 - DNA, 25 bp, Homo sapien
ttgttggtctgtagggatgagttcc

SEQ ID NO: 4810948 - DNA, 25 bp, Homo sapien
acaaagatctgatccgcagtgaggg

SEQ ID NO: 4810949 - DNA, 25 bp, Homo sapien
tgtggtacacatccagctcaaaaaa

SEQ ID NO: 4810950 - DNA, 25 bp, Homo sapien
gaggacaagatctgatagtactggt

SEQ ID NO: 4810951 - DNA, 25 bp, Homo sapien
gtagttgtgtaccacggtgatgtgc

SEQ ID NO: 4810952 - DNA, 25 bp, Homo sapien
tagtactggttcatgcacagtggct

SEQ ID NO: 4810953 - DNA, 25 bp, Homo sapien
ctgaagttgctgactgtgtcctgct

SEQ ID NO: 4810954 - DNA, 25 bp, Homo sapien
ttgtcaatcatgaccttgaaatcca

SEQ ID NO: 4810955 - DNA, 25 bp, Homo sapien
tccaacacaccctcaatgagtttgg

SEQ ID NO: 4810956 - DNA, 25 bp, Homo sapien
tcaatcatgaccttgaaatccaaca

SEQ ID NO: 4810957 - DNA, 25 bp, Homo sapien
ccaacacaccctcaatgagtttggc

SEQ ID NO: 4810958 - DNA, 25 bp, Homo sapien
ctggcggtactggaggtaggcggtc

SEQ ID NO: 4810959 - DNA, 25 bp, Homo sapien
ggctcgagtagatgaccacaggctg

SEQ ID NO: 4810960 - DNA, 25 bp, Homo sapien
gaggtaggcggtcttgagccaccac

SEQ ID NO: 4810961 - DNA, 25 bp, Homo sapien
tgcttgggtagcatcacgcctgggc

SEQ ID NO: 4810962 - DNA, 25 bp, Homo sapien
cgcgcccggcaaggtgaacaaattc

SEQ ID NO: 4810963 - DNA, 25 bp, Homo sapien
ctctgtcaatgactgtcatatgtta

SEQ ID NO: 4810964 - DNA, 25 bp, Homo sapien
taaagtgccacggtgctatctcagc

SEQ ID NO: 4810965 - DNA, 25 bp, Homo sapien
aaaaacaaagtccaatgagtgactt

SEQ ID NO: 4810966 - DNA, 25 bp, Homo sapien
gcgtctggcccaataagtgagtttt

SEQ ID NO: 4810967 - DNA, 25 bp, Homo sapien
gatgctccctgcaaggatgaatcct

SEQ ID NO: 4810968 - DNA, 25 bp, Homo sapien
tgtggcctcggggagtagataccca

SEQ ID NO: 4810969 - DNA, 25 bp, Homo sapien
cctcggggagtagatacccactttg

SEQ ID NO: 4810970 - DNA, 25 bp, Homo sapien
gatacagaacctgggcgatcggtca

SEQ ID NO: 4810971 - DNA, 25 bp, Homo sapien
tacttgaatgttagctccaaggagc

SEQ ID NO: 4810972 - DNA, 25 bp, Homo sapien
tatgtgctcacgaaactctgggcag

SEQ ID NO: 4810973 - DNA, 25 bp, Homo sapien
tatctggttgtacctgccgtgcacc

SEQ ID NO: 4810974 - DNA, 25 bp, Homo sapien
ccagttctccgtcttcctggcccga

SEQ ID NO: 4810975 - DNA, 25 bp, Homo sapien
ttcctggcccgacgctccagcccct

SEQ ID NO: 4810976 - DNA, 25 bp, Homo sapien
ggcgctcccctacacctcctgaggc

SEQ ID NO: 4810977 - DNA, 25 bp, Homo sapien
tcctgaggcctgaaactcatccacc

SEQ ID NO: 4810978 - DNA, 25 bp, Homo sapien
gcagcgccttcaggtagtggtccag

SEQ ID NO: 4810979 - DNA, 25 bp, Homo sapien
tgcagcgccttcaggtagtggtcca

SEQ ID NO: 4810980 - DNA, 25 bp, Homo sapien
ccgtggcagtgcatcctggtgtgcc

SEQ ID NO: 4810981 - DNA, 25 bp, Homo sapien
atcctggtgtgccttgaagcggctg

SEQ ID NO: 4810982 - DNA, 25 bp, Homo sapien
caaggagaagggcttcaggaagccc

SEQ ID NO: 4810983 - DNA, 25 bp, Homo sapien
gggcttcaggaagcccagaggcttc

SEQ ID NO: 4810984 - DNA, 25 bp, Homo sapien
aagggcttcaggaagcccagaggct

SEQ ID NO: 4810985 - DNA, 25 bp, Homo sapien
agaagggcttcaggaagcccagagg

SEQ ID NO: 4810986 - DNA, 25 bp, Homo sapien
ctgcaggtagcagaacatcctgttc

SEQ ID NO: 4810987 - DNA, 25 bp, Homo sapien
aggtagcagaacatcctgttcattc

SEQ ID NO: 4810988 - DNA, 25 bp, Homo sapien
gcaggtagcagaacatcctgttcat

SEQ ID NO: 4810989 - DNA, 25 bp, Homo sapien
tgcaggtagcagaacatcctgttca

SEQ ID NO: 4810990 - DNA, 25 bp, Homo sapien
agtggtgactgtccctcttggaggt

SEQ ID NO: 4810991 - DNA, 25 bp, Homo sapien
tctctctctgctgcccgtcctcctc

SEQ ID NO: 4810992 - DNA, 25 bp, Homo sapien
ctctctgctgcccgtcctcctccat

SEQ ID NO: 4810993 - DNA, 25 bp, Homo sapien
tctctctgctgcccgtcctcctcca

SEQ ID NO: 4810994 - DNA, 25 bp, Homo sapien
cttctctctctgctgcccgtcctcc

SEQ ID NO: 4810995 - DNA, 25 bp, Homo sapien
gatggctgtggtggaatcgggggtt

SEQ ID NO: 4810996 - DNA, 25 bp, Homo sapien
cgatggctgtggtggaatcgggggt

SEQ ID NO: 4810997 - DNA, 25 bp, Homo sapien
gacaagagccaagattcagcgggag

SEQ ID NO: 4810998 - DNA, 25 bp, Homo sapien
aagagccaagattcagcgggaggca

SEQ ID NO: 4810999 - DNA, 25 bp, Homo sapien
ctgtcagaatctgcgaagatcgttt

SEQ ID NO: 4811000 - DNA, 25 bp, Homo sapien
tgcctggccgctgaggttacaccac

SEQ ID NO: 4811001 - DNA, 25 bp, Homo sapien
tggccgctgaggttacaccacagcc

SEQ ID NO: 4811002 - DNA, 25 bp, Homo sapien
gaatctgcgaagatcgttttgatga

SEQ ID NO: 4811003 - DNA, 25 bp, Homo sapien
cggacgcaaccgcacggcccgccca

SEQ ID NO: 4811004 - DNA, 25 bp, Homo sapien
tcccggacgcaaccgcacggcccgc

SEQ ID NO: 4811005 - DNA, 25 bp, Homo sapien
ggacgcaaccgcacggcccgcccag

SEQ ID NO: 4811006 - DNA, 25 bp, Homo sapien
acggtcctggcagcgaaggctaaca

SEQ ID NO: 4811007 - DNA, 25 bp, Homo sapien
cacggtcctggcagcgaaggctaac

SEQ ID NO: 4811008 - DNA, 25 bp, Homo sapien
cggtcctggcagcgaaggctaacat

SEQ ID NO: 4811009 - DNA, 25 bp, Homo sapien
ttacagccgccagccggtagaggca

SEQ ID NO: 4811010 - DNA, 25 bp, Homo sapien
cggtgggtccttgctagagccttcg

SEQ ID NO: 4811011 - DNA, 25 bp, Homo sapien
ccttcgggccaaggtcgctgagtta

SEQ ID NO: 4811012 - DNA, 25 bp, Homo sapien
caaggtcgctgagttacagccgcca

SEQ ID NO: 4811013 - DNA, 25 bp, Homo sapien
ctaatattccttgggttagggtcag

SEQ ID NO: 4811014 - DNA, 25 bp, Homo sapien
tgtgcacctttccaactccgtctgg

SEQ ID NO: 4811015 - DNA, 25 bp, Homo sapien
taactcttagagtgataggaaaaca

SEQ ID NO: 4811016 - DNA, 25 bp, Homo sapien
taggaaaacacaaccatgttgaccg

SEQ ID NO: 4811017 - DNA, 25 bp, Homo sapien
tctgctacctttgcgctgctgtgag

SEQ ID NO: 4811018 - DNA, 25 bp, Homo sapien
taagggtaacctagccaatggaagc

SEQ ID NO: 4811019 - DNA, 25 bp, Homo sapien
tcctcttggcagtcttaggcccggc

SEQ ID NO: 4811020 - DNA, 25 bp, Homo sapien
tgctgggtttcctgactgtagccac

SEQ ID NO: 4811021 - DNA, 25 bp, Homo sapien
gctgggtcaggagtcccaaaggtca

SEQ ID NO: 4811022 - DNA, 25 bp, Homo sapien
tcagcctgggatccggtgatggtct

SEQ ID NO: 4811023 - DNA, 25 bp, Homo sapien
tcaggagtcccaaaggtcagtgaca

SEQ ID NO: 4811024 - DNA, 25 bp, Homo sapien
ctcagcctgggatccggtgatggtc

SEQ ID NO: 4811025 - DNA, 25 bp, Homo sapien
catgaaatgcaaccgaaggctgaac

SEQ ID NO: 4811026 - DNA, 25 bp, Homo sapien
caaagtctccaacgcagtcggcggt

SEQ ID NO: 4811027 - DNA, 25 bp, Homo sapien
ccttacccagtgtccgagagtgtcg

SEQ ID NO: 4811028 - DNA, 25 bp, Homo sapien
ggcaactcgttttggagtccacacg

SEQ ID NO: 4811029 - DNA, 25 bp, Homo sapien
tttataaaacatcagccgcctgccc

SEQ ID NO: 4811030 - DNA, 25 bp, Homo sapien
ttataaaacatcagccgcctgcccc

SEQ ID NO: 4811031 - DNA, 25 bp, Homo sapien
tctcgcccctttgccgagtctttgt

SEQ ID NO: 4811032 - DNA, 25 bp, Homo sapien
cgcccctttgccgagtctttgtctg

SEQ ID NO: 4811033 - DNA, 25 bp, Homo sapien
ggcgcccgctcgttccctcctctcg

SEQ ID NO: 4811034 - DNA, 25 bp, Homo sapien
ctcctctcgcccctttgccgagtct

SEQ ID NO: 4811035 - DNA, 25 bp, Homo sapien
gctgctccgaggagtccggctgtcg

SEQ ID NO: 4811036 - DNA, 25 bp, Homo sapien
ctagaaggcgacaatggctcgagtc

SEQ ID NO: 4811037 - DNA, 25 bp, Homo sapien
caatggctcgagtccaggcgccgag

SEQ ID NO: 4811038 - DNA, 25 bp, Homo sapien
cgagcgcctgcttggcgcacagctg

SEQ ID NO: 4811039 - DNA, 25 bp, Homo sapien
agtttgagatgttggacgcgtccgg

SEQ ID NO: 4811040 - DNA, 25 bp, Homo sapien
acgagtccgggcagaagtcctcgaa

SEQ ID NO: 4811041 - DNA, 25 bp, Homo sapien
gcgtccggggacgagtccgggcaga

SEQ ID NO: 4811042 - DNA, 25 bp, Homo sapien
gtttgagatgttggacgcgtccggg

SEQ ID NO: 4811043 - DNA, 25 bp, Homo sapien
ctcctcctcctggccagggtaatac

SEQ ID NO: 4811044 - DNA, 25 bp, Homo sapien
cctcctcctcctggccagggtaata

SEQ ID NO: 4811045 - DNA, 25 bp, Homo sapien
gacgccaggcccggtcccggagcgc

SEQ ID NO: 4811046 - DNA, 25 bp, Homo sapien
ggcagtgggcggaggcgcagcagtc

SEQ ID NO: 4811047 - DNA, 25 bp, Homo sapien
gtcccggagcgccctggccacagca

SEQ ID NO: 4811048 - DNA, 25 bp, Homo sapien
ttgcgcttgcagccggcggcggacg

SEQ ID NO: 4811049 - DNA, 25 bp, Homo sapien
cgtggtcaccacgtgagtgtctagg

SEQ ID NO: 4811050 - DNA, 25 bp, Homo sapien
gtggtcaccacgtgagtgtctaggt

SEQ ID NO: 4811051 - DNA, 25 bp, Homo sapien
tggtcaccacgtgagtgtctaggtc

SEQ ID NO: 4811052 - DNA, 25 bp, Homo sapien
gtagggtatgcgccccggtagaagc

SEQ ID NO: 4811053 - DNA, 25 bp, Homo sapien
ctgcagtgcaagccgaagtccgaag

SEQ ID NO: 4811054 - DNA, 25 bp, Homo sapien
gcagtgcaagccgaagtccgaaggg

SEQ ID NO: 4811055 - DNA, 25 bp, Homo sapien
tgcaagccgaagtccgaaggggtag

SEQ ID NO: 4811056 - DNA, 25 bp, Homo sapien
aggcgggcggagaagcggcggcggc

SEQ ID NO: 4811057 - DNA, 25 bp, Homo sapien
gggcggagaagcggcggcggccgga

SEQ ID NO: 4811058 - DNA, 25 bp, Homo sapien
gcgggcggagaagcggcggcggccg

SEQ ID NO: 4811059 - DNA, 25 bp, Homo sapien
ggcgggcggagaagcggcggcggcc

SEQ ID NO: 4811060 - DNA, 25 bp, Homo sapien
gggcgcgagggtcccgcgggcagag

SEQ ID NO: 4811061 - DNA, 25 bp, Homo sapien
cgagggtcccgcgggcagagcgcag

SEQ ID NO: 4811062 - DNA, 25 bp, Homo sapien
agggtcccgcgggcagagcgcagcg

SEQ ID NO: 4811063 - DNA, 25 bp, Homo sapien
cgcgagggtcccgcgggcagagcgc

SEQ ID NO: 4811064 - DNA, 25 bp, Homo sapien
gtggggcgcgccgtgcggcggctgg

SEQ ID NO: 4811065 - DNA, 25 bp, Homo sapien
gctgcccgcggtggggcgcgccgtg

SEQ ID NO: 4811066 - DNA, 25 bp, Homo sapien
gggctgcccgcggtggggcgcgccg

SEQ ID NO: 4811067 - DNA, 25 bp, Homo sapien
ccaagggctgcccgcggtggggcgc

SEQ ID NO: 4811068 - DNA, 25 bp, Homo sapien
gcagcccctgggcgccgggtgctgg

SEQ ID NO: 4811069 - DNA, 25 bp, Homo sapien
cctgggcgccgggtgctggtgctgg

SEQ ID NO: 4811070 - DNA, 25 bp, Homo sapien
gccgccgccgcgcagcccctgggcg

SEQ ID NO: 4811071 - DNA, 25 bp, Homo sapien
cgccgccgcgcagcccctgggcgcc

SEQ ID NO: 4811072 - DNA, 25 bp, Homo sapien
ccccgccgccgccaagttggagcgg

SEQ ID NO: 4811073 - DNA, 25 bp, Homo sapien
agcgggccgaagtcggccgcgctgg

SEQ ID NO: 4811074 - DNA, 25 bp, Homo sapien
cgccaagttggagcgggccgaagtc

SEQ ID NO: 4811075 - DNA, 25 bp, Homo sapien
gcgctggccggcatgcccggcgccg

SEQ ID NO: 4811076 - DNA, 25 bp, Homo sapien
agagctcggcgtagcgctcgctcag

SEQ ID NO: 4811077 - DNA, 25 bp, Homo sapien
gtagagctcggcgtagcgctcgctc

SEQ ID NO: 4811078 - DNA, 25 bp, Homo sapien
ctcaggtagagctggcgcgcgttgc

SEQ ID NO: 4811079 - DNA, 25 bp, Homo sapien
tcggcgtagcgctcgctcaggtaga

SEQ ID NO: 4811080 - DNA, 25 bp, Homo sapien
gagctgtggatcttgcgcagggaga

SEQ ID NO: 4811081 - DNA, 25 bp, Homo sapien
agctgtggatcttgcgcagggagat

SEQ ID NO: 4811082 - DNA, 25 bp, Homo sapien
gggagctgtggatcttgcgcaggga

SEQ ID NO: 4811083 - DNA, 25 bp, Homo sapien
ttcgggagctgtggatcttgcgcag

SEQ ID NO: 4811084 - DNA, 25 bp, Homo sapien
ccgcggagacggcggcggagcagcc

SEQ ID NO: 4811085 - DNA, 25 bp, Homo sapien
ggagacggcggcggagcagccgccg

SEQ ID NO: 4811086 - DNA, 25 bp, Homo sapien
ctcccgcggagacggcggcggagca

SEQ ID NO: 4811087 - DNA, 25 bp, Homo sapien
gcggagacggcggcggagcagccgc

SEQ ID NO: 4811088 - DNA, 25 bp, Homo sapien
tcagaggttcggctgcgctccgaaa

SEQ ID NO: 4811089 - DNA, 25 bp, Homo sapien
tccgggtcagaggttcggctgcgct

SEQ ID NO: 4811090 - DNA, 25 bp, Homo sapien
ttcggctgcgctccgaaaggagccg

SEQ ID NO: 4811091 - DNA, 25 bp, Homo sapien
cggagtccgggtcagaggttcggct

SEQ ID NO: 4811092 - DNA, 25 bp, Homo sapien
aacgccgctgctgcctcgaatgttc

SEQ ID NO: 4811093 - DNA, 25 bp, Homo sapien
tcctttgtgctattcaaataccgaa

SEQ ID NO: 4811094 - DNA, 25 bp, Homo sapien
tgctattcaaataccgaacggaccc

SEQ ID NO: 4811095 - DNA, 25 bp, Homo sapien
aaggcggttcctttgtgctattcaa

SEQ ID NO: 4811096 - DNA, 25 bp, Homo sapien
tgagggcagacatagggcattcgct

SEQ ID NO: 4811097 - DNA, 25 bp, Homo sapien
gagtgtgcaattttcgaggccccga

SEQ ID NO: 4811098 - DNA, 25 bp, Homo sapien
ggccccgagccctgtgttttcactg

SEQ ID NO: 4811099 - DNA, 25 bp, Homo sapien
cattcgctgtctttgcccgtggagc

SEQ ID NO: 4811100 - DNA, 25 bp, Homo sapien
gatgtgctccgtggccctggtcatg

SEQ ID NO: 4811101 - DNA, 25 bp, Homo sapien
ctagcggtgatggccgtgagatcct

SEQ ID NO: 4811102 - DNA, 25 bp, Homo sapien
tgcgctagcggtgatggccgtgaga

SEQ ID NO: 4811103 - DNA, 25 bp, Homo sapien
cttaactgggttggctgcgctagcg

SEQ ID NO: 4811104 - DNA, 25 bp, Homo sapien
cccactgaaaacgtcgggtgtctgt

SEQ ID NO: 4811105 - DNA, 25 bp, Homo sapien
cactgaaaacgtcgggtgtctgtgc

SEQ ID NO: 4811106 - DNA, 25 bp, Homo sapien
ccactgaaaacgtcgggtgtctgtg

SEQ ID NO: 4811107 - DNA, 25 bp, Homo sapien
actgaaaacgtcgggtgtctgtgcc

SEQ ID NO: 4811108 - DNA, 25 bp, Homo sapien
ggaagctgattggatttccggactc

SEQ ID NO: 4811109 - DNA, 25 bp, Homo sapien
attggatttccggactcagaggagg

SEQ ID NO: 4811110 - DNA, 25 bp, Homo sapien
tcttgttgaaagagaggggactccc

SEQ ID NO: 4811111 - DNA, 25 bp, Homo sapien
gcctgcaggtgaatatcttgttgaa

SEQ ID NO: 4811112 - DNA, 25 bp, Homo sapien
cccctgcctcagtgtacgggaatgt

SEQ ID NO: 4811113 - DNA, 25 bp, Homo sapien
cgggcagtgggcgtttctccttcac

SEQ ID NO: 4811114 - DNA, 25 bp, Homo sapien
acgggaatgtttggtgcaggttcca

SEQ ID NO: 4811115 - DNA, 25 bp, Homo sapien
ggctgattggtgtacatctcccctg

SEQ ID NO: 4811116 - DNA, 25 bp, Homo sapien
ccgtggcctgcagcgaaatcgagct

SEQ ID NO: 4811117 - DNA, 25 bp, Homo sapien
gcgaaatcgagctgacccacagaat

SEQ ID NO: 4811118 - DNA, 25 bp, Homo sapien
agggactcatggagctgacccgaat

SEQ ID NO: 4811119 - DNA, 25 bp, Homo sapien
gagctgacccgaatctgatccgtgg

SEQ ID NO: 4811120 - DNA, 25 bp, Homo sapien
taggaccgccgttctctgatacttg

SEQ ID NO: 4811121 - DNA, 25 bp, Homo sapien
acttcttgtcctttacgggaggcag

SEQ ID NO: 4811122 - DNA, 25 bp, Homo sapien
caaagctcgggcactgcgtgcaggt

SEQ ID NO: 4811123 - DNA, 25 bp, Homo sapien
cagtgcacgggagagcacaaagctc

SEQ ID NO: 4811124 - DNA, 25 bp, Homo sapien
gactgaataccccttggtgcacagg

SEQ ID NO: 4811125 - DNA, 25 bp, Homo sapien
gaaatgaaccagtcagtgtctttgg

SEQ ID NO: 4811126 - DNA, 25 bp, Homo sapien
caggcgttcagggaccaacgtgttc

SEQ ID NO: 4811127 - DNA, 25 bp, Homo sapien
tcacctaagtagttttccctctgca

SEQ ID NO: 4811128 - DNA, 25 bp, Homo sapien
gtaaaatgcagacaccatgaatgga

SEQ ID NO: 4811129 - DNA, 25 bp, Homo sapien
tagtaaaatgcagacaccatgaatg

SEQ ID NO: 4811130 - DNA, 25 bp, Homo sapien
aaaatgcagacaccatgaatggacc

SEQ ID NO: 4811131 - DNA, 25 bp, Homo sapien
ttagtaaaatgcagacaccatgaat

SEQ ID NO: 4811132 - DNA, 25 bp, Homo sapien
cactgtgttgtcagggggtgggtag

SEQ ID NO: 4811133 - DNA, 25 bp, Homo sapien
gtgggtaggggatgcagaaagtgaa

SEQ ID NO: 4811134 - DNA, 25 bp, Homo sapien
tcagggggtgggtaggggatgcaga

SEQ ID NO: 4811135 - DNA, 25 bp, Homo sapien
gggtgggtaggggatgcagaaagtg

SEQ ID NO: 4811136 - DNA, 25 bp, Homo sapien
cagaaggctgcttgtggccgggccg

SEQ ID NO: 4811137 - DNA, 25 bp, Homo sapien
cacagaaggctgcttgtggccgggc

SEQ ID NO: 4811138 - DNA, 25 bp, Homo sapien
tgggcgctgactcctgcggccccgc

SEQ ID NO: 4811139 - DNA, 25 bp, Homo sapien
aataggtcccgctgggcgctgactc

SEQ ID NO: 4811140 - DNA, 25 bp, Homo sapien
gaggtcactgttggaagatccctgg

SEQ ID NO: 4811141 - DNA, 25 bp, Homo sapien
ggaggtcactgttggaagatccctg

SEQ ID NO: 4811142 - DNA, 25 bp, Homo sapien
agcttggaggtcactgttggaagat

SEQ ID NO: 4811143 - DNA, 25 bp, Homo sapien
ttggaggtcactgttggaagatccc

SEQ ID NO: 4811144 - DNA, 25 bp, Homo sapien
ttttcccagtctggtcaggatcttt

SEQ ID NO: 4811145 - DNA, 25 bp, Homo sapien
ccagtctggtcaggatctttcaggg

SEQ ID NO: 4811146 - DNA, 25 bp, Homo sapien
tcccagtctggtcaggatctttcag

SEQ ID NO: 4811147 - DNA, 25 bp, Homo sapien
ttcccagtctggtcaggatctttca

SEQ ID NO: 4811148 - DNA, 25 bp, Homo sapien
gaggctgagatgcacacttgctggg

SEQ ID NO: 4811149 - DNA, 25 bp, Homo sapien
agaggctgagatgcacacttgctgg

SEQ ID NO: 4811150 - DNA, 25 bp, Homo sapien
gaaacgcacagactgactattcctc

SEQ ID NO: 4811151 - DNA, 25 bp, Homo sapien
gcacagactgactattcctctcttg

SEQ ID NO: 4811152 - DNA, 25 bp, Homo sapien
acagactgactattcctctcttgct

SEQ ID NO: 4811153 - DNA, 25 bp, Homo sapien
gtttgaaacgcacagactgactatt

SEQ ID NO: 4811154 - DNA, 25 bp, Homo sapien
aggccgtttgtcgtaagggtcactg

SEQ ID NO: 4811155 - DNA, 25 bp, Homo sapien
tctgggtgcgagtcctgggctaatc

SEQ ID NO: 4811156 - DNA, 25 bp, Homo sapien
ggctaatcgcatatcttgcgggacc

SEQ ID NO: 4811157 - DNA, 25 bp, Homo sapien
cgtttgtcgtaagggtcactgctgt

SEQ ID NO: 4811158 - DNA, 25 bp, Homo sapien
tctcgagcttggtggcatagccgtc

SEQ ID NO: 4811159 - DNA, 25 bp, Homo sapien
gatattcgaatcatgagacccaagg

SEQ ID NO: 4811160 - DNA, 25 bp, Homo sapien
aagaatcgggtacgcgggcatctga

SEQ ID NO: 4811161 - DNA, 25 bp, Homo sapien
cctgattgtgatgacgaatgcaccc

SEQ ID NO: 4811162 - DNA, 25 bp, Homo sapien
tcccccggggcttctgagtgcatcc

SEQ ID NO: 4811163 - DNA, 25 bp, Homo sapien
ctgcagggggatgctcttgggtctc

SEQ ID NO: 4811164 - DNA, 25 bp, Homo sapien
ccagggctcatcacaagctgcaggg

SEQ ID NO: 4811165 - DNA, 25 bp, Homo sapien
gggcttctgagtgcatccaggctgc

SEQ ID NO: 4811166 - DNA, 25 bp, Homo sapien
tccggatggcagaacagtactacag

SEQ ID NO: 4811167 - DNA, 25 bp, Homo sapien
ggcagaacagtactacagacatcat

SEQ ID NO: 4811168 - DNA, 25 bp, Homo sapien
ggatggcagaacagtactacagaca

SEQ ID NO: 4811169 - DNA, 25 bp, Homo sapien
gaacagtactacagacatcatggtc

SEQ ID NO: 4811170 - DNA, 25 bp, Homo sapien
ttctgcaacagaatccgagatagag

SEQ ID NO: 4811171 - DNA, 25 bp, Homo sapien
cagaatccgagatagaggtagaagt

SEQ ID NO: 4811172 - DNA, 25 bp, Homo sapien
gtgatacctcgccacattctgcaac

SEQ ID NO: 4811173 - DNA, 25 bp, Homo sapien
tacgtcgtggctgtcagggcagctt

SEQ ID NO: 4811174 - DNA, 25 bp, Homo sapien
acatccacacctgctccgtgcacac

SEQ ID NO: 4811175 - DNA, 25 bp, Homo sapien
ctccacatccacacctgctccgtgc

SEQ ID NO: 4811176 - DNA, 25 bp, Homo sapien
tccacatccacacctgctccgtgca

SEQ ID NO: 4811177 - DNA, 25 bp, Homo sapien
ttcctccacatccacacctgctccg

SEQ ID NO: 4811178 - DNA, 25 bp, Homo sapien
agcatcttgggctgactgtggaggg

SEQ ID NO: 4811179 - DNA, 25 bp, Homo sapien
ggcttggcaggtgggcatcaggatg

SEQ ID NO: 4811180 - DNA, 25 bp, Homo sapien
gactgtggagggcctttgctgggct

SEQ ID NO: 4811181 - DNA, 25 bp, Homo sapien
cgggtcctgggtctggcagcatctt

SEQ ID NO: 4811182 - DNA, 25 bp, Homo sapien
ggtcccaggagtcgccagcacctgg

SEQ ID NO: 4811183 - DNA, 25 bp, Homo sapien
gaagaggtcccaggagtcgccagca

SEQ ID NO: 4811184 - DNA, 25 bp, Homo sapien
agccacggtctgtgcacgtggaccc

SEQ ID NO: 4811185 - DNA, 25 bp, Homo sapien
ccaggagtcgccagcacctggttct

SEQ ID NO: 4811186 - DNA, 25 bp, Homo sapien
tctcaggggcctaccacctggctta

SEQ ID NO: 4811187 - DNA, 25 bp, Homo sapien
atgggtatctcaggggcctaccacc

SEQ ID NO: 4811188 - DNA, 25 bp, Homo sapien
tatctcaggggcctaccacctggct

SEQ ID NO: 4811189 - DNA, 25 bp, Homo sapien
agaatgggtatctcaggggcctacc

SEQ ID NO: 4811190 - DNA, 25 bp, Homo sapien
cacagggtctggtggttcagtagaa

SEQ ID NO: 4811191 - DNA, 25 bp, Homo sapien
tctacacacatcaggtctgagctca

SEQ ID NO: 4811192 - DNA, 25 bp, Homo sapien
gaccaccctgtgtgattatcctgtg

SEQ ID NO: 4811193 - DNA, 25 bp, Homo sapien
tcttttgcagccactagctctctgc

SEQ ID NO: 4811194 - DNA, 25 bp, Homo sapien
cgcatgtaccgtgtggacactcgtg

SEQ ID NO: 4811195 - DNA, 25 bp, Homo sapien
gggctctctccagtcagctcgggtg

SEQ ID NO: 4811196 - DNA, 25 bp, Homo sapien
gttctttgagaacggcgcatgtacc

SEQ ID NO: 4811197 - DNA, 25 bp, Homo sapien
ccgaggctgctttaaagaaggttct

SEQ ID NO: 4811198 - DNA, 25 bp, Homo sapien
tctgggcagggcggtccgcagctcg

SEQ ID NO: 4811199 - DNA, 25 bp, Homo sapien
gcggagatgagagccggctgcaggg

SEQ ID NO: 4811200 - DNA, 25 bp, Homo sapien
gctggcggagatgagagccggctgc

SEQ ID NO: 4811201 - DNA, 25 bp, Homo sapien
cgggtgtttgcatccaaggtgccca

SEQ ID NO: 4811202 - DNA, 25 bp, Homo sapien
cctgttcattaatatgtggctcagt

SEQ ID NO: 4811203 - DNA, 25 bp, Homo sapien
ccaaatgtcctgaattcctgttcat

SEQ ID NO: 4811204 - DNA, 25 bp, Homo sapien
cagtacagtgcttgtcccggcagca

SEQ ID NO: 4811205 - DNA, 25 bp, Homo sapien
gcagcaggagcttggttggtgttag

SEQ ID NO: 4811206 - DNA, 25 bp, Homo sapien
gcactctcctgaccagtatctccaa

SEQ ID NO: 4811207 - DNA, 25 bp, Homo sapien
tttgcactctcctgaccagtatctc

SEQ ID NO: 4811208 - DNA, 25 bp, Homo sapien
cctttgcactctcctgaccagtatc

SEQ ID NO: 4811209 - DNA, 25 bp, Homo sapien
tgcactctcctgaccagtatctcca

SEQ ID NO: 4811210 - DNA, 25 bp, Homo sapien
tgtagacatgagtaacattgggaag

SEQ ID NO: 4811211 - DNA, 25 bp, Homo sapien
gagtaacattgggaagtgaacctgt

SEQ ID NO: 4811212 - DNA, 25 bp, Homo sapien
catgagtaacattgggaagtgaacc

SEQ ID NO: 4811213 - DNA, 25 bp, Homo sapien
taacattgggaagtgaacctgttaa

SEQ ID NO: 4811214 - DNA, 25 bp, Homo sapien
ttcccagcggccaatgtgcagtgag

SEQ ID NO: 4811215 - DNA, 25 bp, Homo sapien
tgctagtgttcctgggcaagtaacc

SEQ ID NO: 4811216 - DNA, 25 bp, Homo sapien
aaatgggatcgtgatggcacctccc

SEQ ID NO: 4811217 - DNA, 25 bp, Homo sapien
tcaggctgaagtgttgtggaaccac

SEQ ID NO: 4811218 - DNA, 25 bp, Homo sapien
ctctgtctgcttgccctggcggtgg

SEQ ID NO: 4811219 - DNA, 25 bp, Homo sapien
ctttgctctgtctgcttgccctggc

SEQ ID NO: 4811220 - DNA, 25 bp, Homo sapien
tgctctgtctgcttgccctggcggt

SEQ ID NO: 4811221 - DNA, 25 bp, Homo sapien
tttgctctgtctgcttgccctggcg

SEQ ID NO: 4811222 - DNA, 25 bp, Homo sapien
gtgtgcagtgctgcggttgttggcc

SEQ ID NO: 4811223 - DNA, 25 bp, Homo sapien
gtgcagtgctgcggttgttggccat

SEQ ID NO: 4811224 - DNA, 25 bp, Homo sapien
ctcctggctgagcgggacccagtgt

SEQ ID NO: 4811225 - DNA, 25 bp, Homo sapien
cagtgtgcagtgctgcggttgttgg

SEQ ID NO: 4811226 - DNA, 25 bp, Homo sapien
taggctgcaccccaatactgattag

SEQ ID NO: 4811227 - DNA, 25 bp, Homo sapien
ggcatagtcaacttcagcccagagc

SEQ ID NO: 4811228 - DNA, 25 bp, Homo sapien
gagcttagcaccagcacccaactgg

SEQ ID NO: 4811229 - DNA, 25 bp, Homo sapien
gcctcctggcaggtcgtcatattga

SEQ ID NO: 4811230 - DNA, 25 bp, Homo sapien
tgatcagtctctgggctatatacgt

SEQ ID NO: 4811231 - DNA, 25 bp, Homo sapien
gcaagaatggaatccctgagataac

SEQ ID NO: 4811232 - DNA, 25 bp, Homo sapien
tatatacgtctgtggaagggcatcc

SEQ ID NO: 4811233 - DNA, 25 bp, Homo sapien
tactcctgccaattggcatggatgc

SEQ ID NO: 4811234 - DNA, 25 bp, Homo sapien
ggctatgctcaagctcctggagcct

SEQ ID NO: 4811235 - DNA, 25 bp, Homo sapien
ggaggaggcgtcaagcatgcaatct

SEQ ID NO: 4811236 - DNA, 25 bp, Homo sapien
gccacataccatggctatgctcaag

SEQ ID NO: 4811237 - DNA, 25 bp, Homo sapien
aatggggttaagagccctgtgctca

SEQ ID NO: 4811238 - DNA, 25 bp, Homo sapien
tgaggcacggtgacagccccaaaag

SEQ ID NO: 4811239 - DNA, 25 bp, Homo sapien
ggtacttgaggcacggtgacagccc

SEQ ID NO: 4811240 - DNA, 25 bp, Homo sapien
cagttccaacaaggagggtacttga

SEQ ID NO: 4811241 - DNA, 25 bp, Homo sapien
agttccaacaaggagggtacttgag

SEQ ID NO: 4811242 - DNA, 25 bp, Homo sapien
aacaggaagcggcagaaatagcagc

SEQ ID NO: 4811243 - DNA, 25 bp, Homo sapien
gtgagtaacaccgttgccatggcga

SEQ ID NO: 4811244 - DNA, 25 bp, Homo sapien
ccatggcgacgtggccacgaggaac

SEQ ID NO: 4811245 - DNA, 25 bp, Homo sapien
ccagagcgaggctgcgcgggcggcc

SEQ ID NO: 4811246 - DNA, 25 bp, Homo sapien
gacatagcagttcccccgacctttg

SEQ ID NO: 4811247 - DNA, 25 bp, Homo sapien
cttgaacaaatccaactgatgacgt

SEQ ID NO: 4811248 - DNA, 25 bp, Homo sapien
gcttttatgcagacatagcagttcc

SEQ ID NO: 4811249 - DNA, 25 bp, Homo sapien
caaatccaactgatgacgtttgctt

SEQ ID NO: 4811250 - DNA, 25 bp, Homo sapien
gtcaatgacccccatacctggtctg

SEQ ID NO: 4811251 - DNA, 25 bp, Homo sapien
attgggggaggtatgaggccaagca

SEQ ID NO: 4811252 - DNA, 25 bp, Homo sapien
tttgtgctagcaaggggactcctga

SEQ ID NO: 4811253 - DNA, 25 bp, Homo sapien
gtccactgggatcttttatttagta

SEQ ID NO: 4811254 - DNA, 25 bp, Homo sapien
cttaaaaagagaaaagaagatggct

SEQ ID NO: 4811255 - DNA, 25 bp, Homo sapien
aaaagagaaaagaagatggctttat

SEQ ID NO: 4811256 - DNA, 25 bp, Homo sapien
tcttaaaaagagaaaagaagatggc

SEQ ID NO: 4811257 - DNA, 25 bp, Homo sapien
tatgaatacgcagtccccgagatgg

SEQ ID NO: 4811258 - DNA, 25 bp, Homo sapien
tgtttttgtggctacccttccagat

SEQ ID NO: 4811259 - DNA, 25 bp, Homo sapien
tctaggtcgtcatttctcaggagga

SEQ ID NO: 4811260 - DNA, 25 bp, Homo sapien
aaacacgtcccataaccagctcgaa

SEQ ID NO: 4811261 - DNA, 25 bp, Homo sapien
gtcacattcgccatcccgcccccag

SEQ ID NO: 4811262 - DNA, 25 bp, Homo sapien
aataaccattctgtatccttaggaa

SEQ ID NO: 4811263 - DNA, 25 bp, Homo sapien
ctctcacccaaataaccattctgta

SEQ ID NO: 4811264 - DNA, 25 bp, Homo sapien
agcgccggtgggcccctctcaccca

SEQ ID NO: 4811265 - DNA, 25 bp, Homo sapien
tatctgtatgttcttgatatctggg

SEQ ID NO: 4811266 - DNA, 25 bp, Homo sapien
gaagtggatgaagccggcctcaccc

SEQ ID NO: 4811267 - DNA, 25 bp, Homo sapien
cggcctcaccctgaagaagagcatc

SEQ ID NO: 4811268 - DNA, 25 bp, Homo sapien
gggtcccgctataaccgctacagga

SEQ ID NO: 4811269 - DNA, 25 bp, Homo sapien
actgtagccatcagtgcctggcaaa

SEQ ID NO: 4811270 - DNA, 25 bp, Homo sapien
ggcactgagtcctaatggagcactt

SEQ ID NO: 4811271 - DNA, 25 bp, Homo sapien
gggatcatctgtcccagggtcactg

SEQ ID NO: 4811272 - DNA, 25 bp, Homo sapien
cgtgtcgcatgctggaggcctgaga

SEQ ID NO: 4811273 - DNA, 25 bp, Homo sapien
tgtcctcatagtcataagatgcctg

SEQ ID NO: 4811274 - DNA, 25 bp, Homo sapien
aattcaggaagggaaactatcctcg

SEQ ID NO: 4811275 - DNA, 25 bp, Homo sapien
ggcagccttgatacaagagttccca

SEQ ID NO: 4811276 - DNA, 25 bp, Homo sapien
caaagatccaggtatccttggcttc

SEQ ID NO: 4811277 - DNA, 25 bp, Homo sapien
tgtcggagctccatgagttgagctt

SEQ ID NO: 4811278 - DNA, 25 bp, Homo sapien
gcccgctgtcggagctccatgagtt

SEQ ID NO: 4811279 - DNA, 25 bp, Homo sapien
gtacttgggtgtacctgttatcacc

SEQ ID NO: 4811280 - DNA, 25 bp, Homo sapien
cacctctagcaggtacttgggtgta

SEQ ID NO: 4811281 - DNA, 25 bp, Homo sapien
cgtggcctccttcttgattctgttg

SEQ ID NO: 4811282 - DNA, 25 bp, Homo sapien
gaagtctggccaacctccatcggtt

SEQ ID NO: 4811283 - DNA, 25 bp, Homo sapien
ggtttgcaagctctggcacctcgga

SEQ ID NO: 4811284 - DNA, 25 bp, Homo sapien
tctgttgtttgtgcctcaaagggaa

SEQ ID NO: 4811285 - DNA, 25 bp, Homo sapien
gccccagctgcacttgagtcctgga

SEQ ID NO: 4811286 - DNA, 25 bp, Homo sapien
cccgccccagctgcacttgagtcct

SEQ ID NO: 4811287 - DNA, 25 bp, Homo sapien
agcgcccgccccagctgcacttgag

SEQ ID NO: 4811288 - DNA, 25 bp, Homo sapien
cccagctgcacttgagtcctggatc

SEQ ID NO: 4811289 - DNA, 25 bp, Homo sapien
gactggggacactcgctgcttgcgt

SEQ ID NO: 4811290 - DNA, 25 bp, Homo sapien
acactcgctgcttgcgttttgctgg

SEQ ID NO: 4811291 - DNA, 25 bp, Homo sapien
agaagcgttgactggggacactcgc

SEQ ID NO: 4811292 - DNA, 25 bp, Homo sapien
catggcggggtttttcacggtggct

SEQ ID NO: 4811293 - DNA, 25 bp, Homo sapien
caccacgcccatgcaagagacggga

SEQ ID NO: 4811294 - DNA, 25 bp, Homo sapien
cacgcccatgcaagagacgggagtg

SEQ ID NO: 4811295 - DNA, 25 bp, Homo sapien
ggaaaagactccaggtcttgctgag

SEQ ID NO: 4811296 - DNA, 25 bp, Homo sapien
gagagtaatgactaagaatctgcag

SEQ ID NO: 4811297 - DNA, 25 bp, Homo sapien
agcagagaggcgctgcttcacgtcc

SEQ ID NO: 4811298 - DNA, 25 bp, Homo sapien
tgcctcctccctccgacttatttcc

SEQ ID NO: 4811299 - DNA, 25 bp, Homo sapien
gaggcgctgcttcacgtccccctgg

SEQ ID NO: 4811300 - DNA, 25 bp, Homo sapien
ggcgctgcttcacgtccccctgggc

SEQ ID NO: 4811301 - DNA, 25 bp, Homo sapien
cacaactcttcacccgtgggtgtct

SEQ ID NO: 4811302 - DNA, 25 bp, Homo sapien
tgccgactggtctgattactggcga

SEQ ID NO: 4811303 - DNA, 25 bp, Homo sapien
ctggatgggacccactgggcactgc

SEQ ID NO: 4811304 - DNA, 25 bp, Homo sapien
tgcagccggagatgtaactggcacc

SEQ ID NO: 4811305 - DNA, 25 bp, Homo sapien
tagggcttgtgctggcaccgaggcc

SEQ ID NO: 4811306 - DNA, 25 bp, Homo sapien
cagggccggcgggtgatagggcttg

SEQ ID NO: 4811307 - DNA, 25 bp, Homo sapien
caccgaggcccagccaagagctgga

SEQ ID NO: 4811308 - DNA, 25 bp, Homo sapien
ggctggctggcctcgtaaacaggcg

SEQ ID NO: 4811309 - DNA, 25 bp, Homo sapien
tcttggaagtagaacgccttgacac

SEQ ID NO: 4811310 - DNA, 25 bp, Homo sapien
ataacgaccttcaaatgtgtgggcc

SEQ ID NO: 4811311 - DNA, 25 bp, Homo sapien
aatcctgggtcgcaaacggaagcct

SEQ ID NO: 4811312 - DNA, 25 bp, Homo sapien
tctaattgggaggtctccgagccgt

SEQ ID NO: 4811313 - DNA, 25 bp, Homo sapien
taaataactgattggggtcgcgcac

SEQ ID NO: 4811314 - DNA, 25 bp, Homo sapien
gtggtctccgcgtcgcatggcccct

SEQ ID NO: 4811315 - DNA, 25 bp, Homo sapien
ggcagctttctcacaacgggatcct

SEQ ID NO: 4811316 - DNA, 25 bp, Homo sapien
gcagctacataattaattcgcccat

SEQ ID NO: 4811317 - DNA, 25 bp, Homo sapien
gagatggcaaaaggaccgtccaagg

SEQ ID NO: 4811318 - DNA, 25 bp, Homo sapien
cagcaaatcttcctagactcacggg

SEQ ID NO: 4811319 - DNA, 25 bp, Homo sapien
tacagttgggtaaatcgaggcccag

SEQ ID NO: 4811320 - DNA, 25 bp, Homo sapien
tgccagttggcagacgctcagcaaa

SEQ ID NO: 4811321 - DNA, 25 bp, Homo sapien
cagacacactgcatgacgcagatca

SEQ ID NO: 4811322 - DNA, 25 bp, Homo sapien
tccatccgagctaggatcttcccct

SEQ ID NO: 4811323 - DNA, 25 bp, Homo sapien
ccctggagagtgtcccggttagcac

SEQ ID NO: 4811324 - DNA, 25 bp, Homo sapien
cactccatatgccaatacacttatc

SEQ ID NO: 4811325 - DNA, 25 bp, Homo sapien
catctctgagctgtgctttcacatt

SEQ ID NO: 4811326 - DNA, 25 bp, Homo sapien
tgtgctttcacattggggtcccccc

SEQ ID NO: 4811327 - DNA, 25 bp, Homo sapien
ctctgagctgtgctttcacattggg

SEQ ID NO: 4811328 - DNA, 25 bp, Homo sapien
agctgtgctttcacattggggtccc

SEQ ID NO: 4811329 - DNA, 25 bp, Homo sapien
tggcagatccatcggtgagctcccg

SEQ ID NO: 4811330 - DNA, 25 bp, Homo sapien
aatgtcagacagtgcgagtccacgc

SEQ ID NO: 4811331 - DNA, 25 bp, Homo sapien
caggccatcgatggaaatgtcagac

SEQ ID NO: 4811332 - DNA, 25 bp, Homo sapien
cctgcattgcggtgatagggccaag

SEQ ID NO: 4811333 - DNA, 25 bp, Homo sapien
gcctcccattgcactggtgagcctg

SEQ ID NO: 4811334 - DNA, 25 bp, Homo sapien
ggaaagattctaaataggctctgaa

SEQ ID NO: 4811335 - DNA, 25 bp, Homo sapien
catctctacaatggggcagtgatgg

SEQ ID NO: 4811336 - DNA, 25 bp, Homo sapien
cctgaccaccccgtctctttcctct

SEQ ID NO: 4811337 - DNA, 25 bp, Homo sapien
tgctcaacaagaagccgtcaaaaaa

SEQ ID NO: 4811338 - DNA, 25 bp, Homo sapien
aatttcaattaaggccactctaggc

SEQ ID NO: 4811339 - DNA, 25 bp, Homo sapien
ccactctaggcacatggcctgtggg

SEQ ID NO: 4811340 - DNA, 25 bp, Homo sapien
caggaatctacaatgattgtaacaa

SEQ ID NO: 4811341 - DNA, 25 bp, Homo sapien
agtataaccaccacgaaagcatccg

SEQ ID NO: 4811342 - DNA, 25 bp, Homo sapien
tatggagcaaccagaactctcagac

SEQ ID NO: 4811343 - DNA, 25 bp, Homo sapien
aaccacagtgagctaccgcttcaga

SEQ ID NO: 4811344 - DNA, 25 bp, Homo sapien
gcacccagccgattaagtcttaacg

SEQ ID NO: 4811345 - DNA, 25 bp, Homo sapien
ccacttgactcacccactccctttc

SEQ ID NO: 4811346 - DNA, 25 bp, Homo sapien
ctgactggtgaatgtgggaaccgta

SEQ ID NO: 4811347 - DNA, 25 bp, Homo sapien
tggtgaatgtgggaaccgtaaaatg

SEQ ID NO: 4811348 - DNA, 25 bp, Homo sapien
tgaatgtgggaaccgtaaaatgggc

SEQ ID NO: 4811349 - DNA, 25 bp, Homo sapien
ttgtttcacgtggactcctaagttc

SEQ ID NO: 4811350 - DNA, 25 bp, Homo sapien
ttccttaggcacattcggcttggtg

SEQ ID NO: 4811351 - DNA, 25 bp, Homo sapien
gtttcacgtggactcctaagttctc

SEQ ID NO: 4811352 - DNA, 25 bp, Homo sapien
cttaggcacattcggcttggtgtct

SEQ ID NO: 4811353 - DNA, 25 bp, Homo sapien
ttgagctgcccgctgcaatgtcctc

SEQ ID NO: 4811354 - DNA, 25 bp, Homo sapien
tcctccctattggtaggttctgaat

SEQ ID NO: 4811355 - DNA, 25 bp, Homo sapien
aatgtcctcccccagttggatatgt

SEQ ID NO: 4811356 - DNA, 25 bp, Homo sapien
tatgtgacccattcagagcgaccct

SEQ ID NO: 4811357 - DNA, 25 bp, Homo sapien
tcacagaaattttcacccgctcgca

SEQ ID NO: 4811358 - DNA, 25 bp, Homo sapien
caaagatgcccgttccatgtgctta

SEQ ID NO: 4811359 - DNA, 25 bp, Homo sapien
ccgcagccacaaagatgcccgttcc

SEQ ID NO: 4811360 - DNA, 25 bp, Homo sapien
attttcacccgctcgcaaatgtgca

SEQ ID NO: 4811361 - DNA, 25 bp, Homo sapien
acagatctccatgccgccactgcat

SEQ ID NO: 4811362 - DNA, 25 bp, Homo sapien
agccatggcagtagttctgtgccac

SEQ ID NO: 4811363 - DNA, 25 bp, Homo sapien
ccatctggagatgtgggatcctgcc

SEQ ID NO: 4811364 - DNA, 25 bp, Homo sapien
tccagaatgcagctcggaatgcccc

SEQ ID NO: 4811365 - DNA, 25 bp, Homo sapien
agctaaggggatggcggctagagac

SEQ ID NO: 4811366 - DNA, 25 bp, Homo sapien
cttccccatccagcggaagggccca

SEQ ID NO: 4811367 - DNA, 25 bp, Homo sapien
atggcggctagagacaccagaaggg

SEQ ID NO: 4811368 - DNA, 25 bp, Homo sapien
caggggcccaaggaacgagctaagg

SEQ ID NO: 4811369 - DNA, 25 bp, Homo sapien
ctcaggttatctgcccaccacagcc

SEQ ID NO: 4811370 - DNA, 25 bp, Homo sapien
ctgacctcaggttatctgcccacca

SEQ ID NO: 4811371 - DNA, 25 bp, Homo sapien
caggttatctgcccaccacagcctc

SEQ ID NO: 4811372 - DNA, 25 bp, Homo sapien
acctcaggttatctgcccaccacag

SEQ ID NO: 4811373 - DNA, 25 bp, Homo sapien
ctggaagggtgtctctgcgtggggc

SEQ ID NO: 4811374 - DNA, 25 bp, Homo sapien
ccactcgcaccaaacactgcatggt

SEQ ID NO: 4811375 - DNA, 25 bp, Homo sapien
actcgcaccaaacactgcatggttc

SEQ ID NO: 4811376 - DNA, 25 bp, Homo sapien
aagggtgtctctgcgtggggcctaa

SEQ ID NO: 4811377 - DNA, 25 bp, Homo sapien
gggcagttttaacgggcttccagca

SEQ ID NO: 4811378 - DNA, 25 bp, Homo sapien
taacgggcttccagcatgatgctga

SEQ ID NO: 4811379 - DNA, 25 bp, Homo sapien
ggacaagtgcccaggtatctagcag

SEQ ID NO: 4811380 - DNA, 25 bp, Homo sapien
gggacaagtgcccaggtatctagca

SEQ ID NO: 4811381 - DNA, 25 bp, Homo sapien
gcggactccggcttcagtgctcggc

SEQ ID NO: 4811382 - DNA, 25 bp, Homo sapien
ctgccgcacggctgcaagcctagca

SEQ ID NO: 4811383 - DNA, 25 bp, Homo sapien
gactccggcttcagtgctcggcgct

SEQ ID NO: 4811384 - DNA, 25 bp, Homo sapien
cccggcgcgagcaagggcgtggagt

SEQ ID NO: 4811385 - DNA, 25 bp, Homo sapien
ggaaggacgctcctcattgcctggc

SEQ ID NO: 4811386 - DNA, 25 bp, Homo sapien
tggtgtgacacctactggcaggtcc

SEQ ID NO: 4811387 - DNA, 25 bp, Homo sapien
tggccttgggttcgcgagtgttcac

SEQ ID NO: 4811388 - DNA, 25 bp, Homo sapien
cctgggatgtgcctttatttgtggg

SEQ ID NO: 4811389 - DNA, 25 bp, Homo sapien
gctgcagtgttgcggaggccaggag

SEQ ID NO: 4811390 - DNA, 25 bp, Homo sapien
aggagatggtaccccttagggcagc

SEQ ID NO: 4811391 - DNA, 25 bp, Homo sapien
tggctgcagtgttgcggaggccagg

SEQ ID NO: 4811392 - DNA, 25 bp, Homo sapien
ggaggagatggtaccccttagggca

SEQ ID NO: 4811393 - DNA, 25 bp, Homo sapien
tccaggagcaagaccatttgcccac

SEQ ID NO: 4811394 - DNA, 25 bp, Homo sapien
tgctccaggtttctgtgcgggtcca

SEQ ID NO: 4811395 - DNA, 25 bp, Homo sapien
caagaaggctcggaggctgcttcgc

SEQ ID NO: 4811396 - DNA, 25 bp, Homo sapien
ttctgtgcgggtccaagaaggctcg

SEQ ID NO: 4811397 - DNA, 25 bp, Homo sapien
tccaagaaggctcggaggctgcttc

SEQ ID NO: 4811398 - DNA, 25 bp, Homo sapien
cagaaaggtagccctgtgtcttctg

SEQ ID NO: 4811399 - DNA, 25 bp, Homo sapien
tcctcagaaaggtagccctgtgtct

SEQ ID NO: 4811400 - DNA, 25 bp, Homo sapien
ctcagaaaggtagccctgtgtcttc

SEQ ID NO: 4811401 - DNA, 25 bp, Homo sapien
cctcagaaaggtagccctgtgtctt

SEQ ID NO: 4811402 - DNA, 25 bp, Homo sapien
ggcaaactctccagccgttttccga

SEQ ID NO: 4811403 - DNA, 25 bp, Homo sapien
agtcccaacacgaggagctggccag

SEQ ID NO: 4811404 - DNA, 25 bp, Homo sapien
cagcgcagtcccaacacgaggagct

SEQ ID NO: 4811405 - DNA, 25 bp, Homo sapien
cagggtacagggctttgggcaaact

SEQ ID NO: 4811406 - DNA, 25 bp, Homo sapien
cagtagcggagcgttgtgtcctgca

SEQ ID NO: 4811407 - DNA, 25 bp, Homo sapien
tgagcgtctgcgctcccagtagcgg

SEQ ID NO: 4811408 - DNA, 25 bp, Homo sapien
tgcagggtctcgtcagcgaatcgca

SEQ ID NO: 4811409 - DNA, 25 bp, Homo sapien
tgtgggtcagcgcagccttgagcct

SEQ ID NO: 4811410 - DNA, 25 bp, Homo sapien
ctggagcgaaatcttcgtaagacta

SEQ ID NO: 4811411 - DNA, 25 bp, Homo sapien
tatcctggaggtgcgatgactggcc

SEQ ID NO: 4811412 - DNA, 25 bp, Homo sapien
tgtgagtgatcacccttcaggggcc

SEQ ID NO: 4811413 - DNA, 25 bp, Homo sapien
ggccccagaataggtgtctgctgga

SEQ ID NO: 4811414 - DNA, 25 bp, Homo sapien
ctgggcagtgctctaatacacccct

SEQ ID NO: 4811415 - DNA, 25 bp, Homo sapien
acccctttgatgttgcggtgctggg

SEQ ID NO: 4811416 - DNA, 25 bp, Homo sapien
tgaacagttgggacaccgcggagac

SEQ ID NO: 4811417 - DNA, 25 bp, Homo sapien
aggaatgaacagttgggacaccgcg

SEQ ID NO: 4811418 - DNA, 25 bp, Homo sapien
tcagtggctccggctcctcggcgca

SEQ ID NO: 4811419 - DNA, 25 bp, Homo sapien
cagtggctccggctcctcggcgcac

SEQ ID NO: 4811420 - DNA, 25 bp, Homo sapien
tcggaagtctccgtcgccagggagc

SEQ ID NO: 4811421 - DNA, 25 bp, Homo sapien
cagggagccccttgggcgccaggtc

SEQ ID NO: 4811422 - DNA, 25 bp, Homo sapien
aggaactcacggaacctgctgggga

SEQ ID NO: 4811423 - DNA, 25 bp, Homo sapien
cctgggcgaagtcgacgccagaaca

SEQ ID NO: 4811424 - DNA, 25 bp, Homo sapien
accgcaccctcagcgcgcgtgggtg

SEQ ID NO: 4811425 - DNA, 25 bp, Homo sapien
gcagcgcggtgcggggtgaacgcca

SEQ ID NO: 4811426 - DNA, 25 bp, Homo sapien
agccccaggccatagtgccccgggc

SEQ ID NO: 4811427 - DNA, 25 bp, Homo sapien
ttggccccgcactcagctcaccgca

SEQ ID NO: 4811428 - DNA, 25 bp, Homo sapien
gcctgcagcctccaaacgaactgtt

SEQ ID NO: 4811429 - DNA, 25 bp, Homo sapien
agagggcgacgctgcggctcttttc

SEQ ID NO: 4811430 - DNA, 25 bp, Homo sapien
aaagcccgcacaacacactcgtttt

SEQ ID NO: 4811431 - DNA, 25 bp, Homo sapien
cgtttttagaagtccagcctgcagc

SEQ ID NO: 4811432 - DNA, 25 bp, Homo sapien
tgacgttggcggacaaaggcagcgc

SEQ ID NO: 4811433 - DNA, 25 bp, Homo sapien
gagctgtcgcgtctggtcgtggtct

SEQ ID NO: 4811434 - DNA, 25 bp, Homo sapien
tctggcggagctgcggttggcttgt

SEQ ID NO: 4811435 - DNA, 25 bp, Homo sapien
cggttggcttgtggcgtctccgccg

SEQ ID NO: 4811436 - DNA, 25 bp, Homo sapien
ctctgccgtttgcatgtggcctgct

SEQ ID NO: 4811437 - DNA, 25 bp, Homo sapien
gagcactctgccgtttgcatgtggc

SEQ ID NO: 4811438 - DNA, 25 bp, Homo sapien
cactctgccgtttgcatgtggcctg

SEQ ID NO: 4811439 - DNA, 25 bp, Homo sapien
cttagagcactctgccgtttgcatg

SEQ ID NO: 4811440 - DNA, 25 bp, Homo sapien
aaaagtctgccggtgacagtttcag

SEQ ID NO: 4811441 - DNA, 25 bp, Homo sapien
gactgcaaaagtctgccggtgacag

SEQ ID NO: 4811442 - DNA, 25 bp, Homo sapien
tgccggtgacagtttcagcactgtt

SEQ ID NO: 4811443 - DNA, 25 bp, Homo sapien
agatgactgcaaaagtctgccggtg

SEQ ID NO: 4811444 - DNA, 25 bp, Homo sapien
agagatgcagtaccttgggtctgaa

SEQ ID NO: 4811445 - DNA, 25 bp, Homo sapien
gagaagagatgcagtaccttgggtc

SEQ ID NO: 4811446 - DNA, 25 bp, Homo sapien
gaagagatgcagtaccttgggtctg

SEQ ID NO: 4811447 - DNA, 25 bp, Homo sapien
tgggagaagagatgcagtaccttgg

SEQ ID NO: 4811448 - DNA, 25 bp, Homo sapien
ctgattggtgaagtgactgctgcct

SEQ ID NO: 4811449 - DNA, 25 bp, Homo sapien
ccaaagggctccctgattggtgaag

SEQ ID NO: 4811450 - DNA, 25 bp, Homo sapien
cccaaagggctccctgattggtgaa

SEQ ID NO: 4811451 - DNA, 25 bp, Homo sapien
attggtgaagtgactgctgcctttc

SEQ ID NO: 4811452 - DNA, 25 bp, Homo sapien
cactctccgccctctgatggcccat

SEQ ID NO: 4811453 - DNA, 25 bp, Homo sapien
tagattgtggacttagcctcagggt

SEQ ID NO: 4811454 - DNA, 25 bp, Homo sapien
cctcagggttaccagacaggagctg

SEQ ID NO: 4811455 - DNA, 25 bp, Homo sapien
ggctattctggacgaagactcctag

SEQ ID NO: 4811456 - DNA, 25 bp, Homo sapien
tgccgttgtttacctggagactcag

SEQ ID NO: 4811457 - DNA, 25 bp, Homo sapien
taacagcacacctcgagcgctgtgc

SEQ ID NO: 4811458 - DNA, 25 bp, Homo sapien
tgctgtggacactctaggtctggcc

SEQ ID NO: 4811459 - DNA, 25 bp, Homo sapien
ttaagcttcgtgtctagccctgcac

SEQ ID NO: 4811460 - DNA, 25 bp, Homo sapien
gcaggccgctagcagcagtcggcca

SEQ ID NO: 4811461 - DNA, 25 bp, Homo sapien
catcatggtgtgtaggtatcaggca

SEQ ID NO: 4811462 - DNA, 25 bp, Homo sapien
tgggagcctctatcctgaactatgg

SEQ ID NO: 4811463 - DNA, 25 bp, Homo sapien
agcctgcagcaagggaagttccccg

SEQ ID NO: 4811464 - DNA, 25 bp, Homo sapien
taaatatagctgtctgccgtccact

SEQ ID NO: 4811465 - DNA, 25 bp, Homo sapien
tagtcacctcagcttatccccagag

SEQ ID NO: 4811466 - DNA, 25 bp, Homo sapien
gccagcttggcttgcaacaccatga

SEQ ID NO: 4811467 - DNA, 25 bp, Homo sapien
cagtcggctcttcagtggctccaaa

SEQ ID NO: 4811468 - DNA, 25 bp, Homo sapien
gcagaagtcatggtcgctgaggccc

SEQ ID NO: 4811469 - DNA, 25 bp, Homo sapien
tcagatgtcatcttccacggagcca

SEQ ID NO: 4811470 - DNA, 25 bp, Homo sapien
cagatgtcatcttccacggagccac

SEQ ID NO: 4811471 - DNA, 25 bp, Homo sapien
tgctcgctaaggaggtaccacttca

SEQ ID NO: 4811472 - DNA, 25 bp, Homo sapien
taccacttcagcctgtcgggcagag

SEQ ID NO: 4811473 - DNA, 25 bp, Homo sapien
ccacagggtggatatcgaagttttc

SEQ ID NO: 4811474 - DNA, 25 bp, Homo sapien
gagttggtcaccatgagatccagga

SEQ ID NO: 4811475 - DNA, 25 bp, Homo sapien
agatgatgtgaaagccagaccagca

SEQ ID NO: 4811476 - DNA, 25 bp, Homo sapien
aagatgatgtgaaagccagaccagc

SEQ ID NO: 4811477 - DNA, 25 bp, Homo sapien
agttgtaggcggctccggactccag

SEQ ID NO: 4811478 - DNA, 25 bp, Homo sapien
gctccggactccaggaggaagcgca

SEQ ID NO: 4811479 - DNA, 25 bp, Homo sapien
gcagcagccgtgtgacttggaagca

SEQ ID NO: 4811480 - DNA, 25 bp, Homo sapien
ggaagtgcagtttaaagctcttcag

SEQ ID NO: 4811481 - DNA, 25 bp, Homo sapien
gatgcaggtgaacactgtgtcccca

SEQ ID NO: 4811482 - DNA, 25 bp, Homo sapien
ccttccagtaagagacgaatgttct

SEQ ID NO: 4811483 - DNA, 25 bp, Homo sapien
tgtggatctgcaccccgtcgctgct

SEQ ID NO: 4811484 - DNA, 25 bp, Homo sapien
tgttctcagtattgtggatctgcac

SEQ ID NO: 4811485 - DNA, 25 bp, Homo sapien
cagtaagagacgaatgttctcagta

SEQ ID NO: 4811486 - DNA, 25 bp, Homo sapien
gggccagcatccagtctgcccacct

SEQ ID NO: 4811487 - DNA, 25 bp, Homo sapien
cctgggtgtcccccacaaggtgcct

SEQ ID NO: 4811488 - DNA, 25 bp, Homo sapien
tctgcccacctagctgttgtcctgg

SEQ ID NO: 4811489 - DNA, 25 bp, Homo sapien
ttgtcctggggcaccctgggtgtcc

SEQ ID NO: 4811490 - DNA, 25 bp, Homo sapien
cttgtcagcggcattgacatcagct

SEQ ID NO: 4811491 - DNA, 25 bp, Homo sapien
catgcttgtcagcggcattgacatc

SEQ ID NO: 4811492 - DNA, 25 bp, Homo sapien
ctggccaggtccaaggggctactct

SEQ ID NO: 4811493 - DNA, 25 bp, Homo sapien
cgctggccaggtccaaggggctact

SEQ ID NO: 4811494 - DNA, 25 bp, Homo sapien
catgtccggctggttccgcaggacg

SEQ ID NO: 4811495 - DNA, 25 bp, Homo sapien
tgcaaggccgtgtagtaggtgactg

SEQ ID NO: 4811496 - DNA, 25 bp, Homo sapien
tccgattaacgtcggccccgtgatg

SEQ ID NO: 4811497 - DNA, 25 bp, Homo sapien
cgcaggacggcgatgtgcaaggccg

SEQ ID NO: 4811498 - DNA, 25 bp, Homo sapien
gcagggcgttgctcacgccttcctg

SEQ ID NO: 4811499 - DNA, 25 bp, Homo sapien
agattggccccatgccgcaagagaa

SEQ ID NO: 4811500 - DNA, 25 bp, Homo sapien
tcagccatcttgagcagggcgttgc

SEQ ID NO: 4811501 - DNA, 25 bp, Homo sapien
ctcagtgagaacaaggattcggctc

SEQ ID NO: 4811502 - DNA, 25 bp, Homo sapien
ctatcatcatcagcaagcagggccc

SEQ ID NO: 4811503 - DNA, 25 bp, Homo sapien
tcttaatacgggagcagactgggat

SEQ ID NO: 4811504 - DNA, 25 bp, Homo sapien
gcccagagtccggtcgcagacttag

SEQ ID NO: 4811505 - DNA, 25 bp, Homo sapien
gcagacttaggtacaaagcctcaca

SEQ ID NO: 4811506 - DNA, 25 bp, Homo sapien
accaccagcctggaggccaagagcc

SEQ ID NO: 4811507 - DNA, 25 bp, Homo sapien
cttccatcctcaaacccgcaggacc

SEQ ID NO: 4811508 - DNA, 25 bp, Homo sapien
gaggccaagagcccaagcccgactt

SEQ ID NO: 4811509 - DNA, 25 bp, Homo sapien
caagcccgactttgatgcttcttcc

SEQ ID NO: 4811510 - DNA, 25 bp, Homo sapien
tctggagcacatgcgccaagaaggc

SEQ ID NO: 4811511 - DNA, 25 bp, Homo sapien
tttgctgagccactgatggacccca

SEQ ID NO: 4811512 - DNA, 25 bp, Homo sapien
tagtaccatgggcagtgaatgcaga

SEQ ID NO: 4811513 - DNA, 25 bp, Homo sapien
tcgcgtgccgccgtacaattacttg

SEQ ID NO: 4811514 - DNA, 25 bp, Homo sapien
cctggatccccagggagcccagaat

SEQ ID NO: 4811515 - DNA, 25 bp, Homo sapien
tccggaagccgtgcaggaacggcat

SEQ ID NO: 4811516 - DNA, 25 bp, Homo sapien
cagcggctggtactcgaagatgatc

SEQ ID NO: 4811517 - DNA, 25 bp, Homo sapien
ggtccagagactcctgccgctcggg

SEQ ID NO: 4811518 - DNA, 25 bp, Homo sapien
ggccccgcgcagcagggccgtcgcg

SEQ ID NO: 4811519 - DNA, 25 bp, Homo sapien
cgggccccgcgcagcagggccgtcg

SEQ ID NO: 4811520 - DNA, 25 bp, Homo sapien
ccgcgcagcagggccgtcgcgcttt

SEQ ID NO: 4811521 - DNA, 25 bp, Homo sapien
ccccgcgcagcagggccgtcgcgct

SEQ ID NO: 4811522 - DNA, 25 bp, Homo sapien
gactcgggcgatgtccagtgggcgg

SEQ ID NO: 4811523 - DNA, 25 bp, Homo sapien
cgcgccgactcagggtgggccatat

SEQ ID NO: 4811524 - DNA, 25 bp, Homo sapien
agtggaggatcgagccaagccagat

SEQ ID NO: 4811525 - DNA, 25 bp, Homo sapien
gagatgcccagacgccgaccggaac

SEQ ID NO: 4811526 - DNA, 25 bp, Homo sapien
gagccagcgcactgtaattgttggt

SEQ ID NO: 4811527 - DNA, 25 bp, Homo sapien
cagcgcactgtaattgttggtggaa

SEQ ID NO: 4811528 - DNA, 25 bp, Homo sapien
ctgtaattgttggtggaagtggaat

SEQ ID NO: 4811529 - DNA, 25 bp, Homo sapien
atgctggagccagcgcactgtaatt

SEQ ID NO: 4811530 - DNA, 25 bp, Homo sapien
tgaagaggggtttcccgccccagca

SEQ ID NO: 4811531 - DNA, 25 bp, Homo sapien
gtccacatcacagcgttggcctcct

SEQ ID NO: 4811532 - DNA, 25 bp, Homo sapien
agtccacatcacagcgttggcctcc

SEQ ID NO: 4811533 - DNA, 25 bp, Homo sapien
atgtgcaaaacaaactgtacaagaa

SEQ ID NO: 4811534 - DNA, 25 bp, Homo sapien
tgcaaaacaaactgtacaagaaaac

SEQ ID NO: 4811535 - DNA, 25 bp, Homo sapien
tgtgcaaaacaaactgtacaagaaa

SEQ ID NO: 4811536 - DNA, 25 bp, Homo sapien
catgtgcaaaacaaactgtacaaga

SEQ ID NO: 4811537 - DNA, 25 bp, Homo sapien
tccaatgacaggctctcggaaaacc

SEQ ID NO: 4811538 - DNA, 25 bp, Homo sapien
caggcattcagagtgcctcagtttg

SEQ ID NO: 4811539 - DNA, 25 bp, Homo sapien
gcaacgagcctcaaccggcaaggtt

SEQ ID NO: 4811540 - DNA, 25 bp, Homo sapien
gttaaagctgttgtcagatccaatg

SEQ ID NO: 4811541 - DNA, 25 bp, Homo sapien
cagagatcttcagcaggatgggggt

SEQ ID NO: 4811542 - DNA, 25 bp, Homo sapien
agagatcttcagcaggatgggggtc

SEQ ID NO: 4811543 - DNA, 25 bp, Homo sapien
ctccagagatcttcagcaggatggg

SEQ ID NO: 4811544 - DNA, 25 bp, Homo sapien
tccagagatcttcagcaggatgggg

SEQ ID NO: 4811545 - DNA, 25 bp, Homo sapien
agggaagaccagtggccgggagagc

SEQ ID NO: 4811546 - DNA, 25 bp, Homo sapien
ccgggagagcaagccagactgcagg

SEQ ID NO: 4811547 - DNA, 25 bp, Homo sapien
ctgcactgaactccccgggagggag

SEQ ID NO: 4811548 - DNA, 25 bp, Homo sapien
accagtggccgggagagcaagccag

SEQ ID NO: 4811549 - DNA, 25 bp, Homo sapien
ggccaaagtacagtccaccaccctg

SEQ ID NO: 4811550 - DNA, 25 bp, Homo sapien
caaagtacagtccaccaccctggtg

SEQ ID NO: 4811551 - DNA, 25 bp, Homo sapien
acagcccccacaggattggccaaag

SEQ ID NO: 4811552 - DNA, 25 bp, Homo sapien
taacagcccccacaggattggccaa

SEQ ID NO: 4811553 - DNA, 25 bp, Homo sapien
gcccaggcgcgcaagaacttctcgg

SEQ ID NO: 4811554 - DNA, 25 bp, Homo sapien
aagaacttctcggtgagccacctcc

SEQ ID NO: 4811555 - DNA, 25 bp, Homo sapien
cgcgcaagaacttctcggtgagcca

SEQ ID NO: 4811556 - DNA, 25 bp, Homo sapien
gggagggcgcagcacgggagccgtc

SEQ ID NO: 4811557 - DNA, 25 bp, Homo sapien
tgtggtatccctcaaagggcgtgtc

SEQ ID NO: 4811558 - DNA, 25 bp, Homo sapien
ctgcgagtcagtgttgccatctgtg

SEQ ID NO: 4811559 - DNA, 25 bp, Homo sapien
tgaaaagaaccctgcgagtcagtgt

SEQ ID NO: 4811560 - DNA, 25 bp, Homo sapien
catctgtgggataggaacaagggct

SEQ ID NO: 4811561 - DNA, 25 bp, Homo sapien
ccagctgcccggatgcacgagagct

SEQ ID NO: 4811562 - DNA, 25 bp, Homo sapien
tctccagctgcccggatgcacgaga

SEQ ID NO: 4811563 - DNA, 25 bp, Homo sapien
tgtctccagctgcccggatgcacga

SEQ ID NO: 4811564 - DNA, 25 bp, Homo sapien
tccagctgcccggatgcacgagagc

SEQ ID NO: 4811565 - DNA, 25 bp, Homo sapien
gtggccgtgccccacgtcgcagtcc

SEQ ID NO: 4811566 - DNA, 25 bp, Homo sapien
accacgtgcaggacggcagcaccaa

SEQ ID NO: 4811567 - DNA, 25 bp, Homo sapien
cgtgcaggacggcagcaccaatcag

SEQ ID NO: 4811568 - DNA, 25 bp, Homo sapien
caggacggcagcaccaatcagggag

SEQ ID NO: 4811569 - DNA, 25 bp, Homo sapien
gaatggagggagtccggggtgctgc

SEQ ID NO: 4811570 - DNA, 25 bp, Homo sapien
cagttgagctgggtgacggtggcag

SEQ ID NO: 4811571 - DNA, 25 bp, Homo sapien
ctgcagagtcggaacagttgagctg

SEQ ID NO: 4811572 - DNA, 25 bp, Homo sapien
ctgctgcagagtcggaacagttgag

SEQ ID NO: 4811573 - DNA, 25 bp, Homo sapien
tccacgtcaggacaaggtctcttga

SEQ ID NO: 4811574 - DNA, 25 bp, Homo sapien
atccacgtcaggacaaggtctcttg

SEQ ID NO: 4811575 - DNA, 25 bp, Homo sapien
ctcacgtttctcccaagaagcatca

SEQ ID NO: 4811576 - DNA, 25 bp, Homo sapien
cacgtcaggacaaggtctcttgact

SEQ ID NO: 4811577 - DNA, 25 bp, Homo sapien
taatcgggggttggattcccttgca

SEQ ID NO: 4811578 - DNA, 25 bp, Homo sapien
cttgcactcggtgccaggataggaa

SEQ ID NO: 4811579 - DNA, 25 bp, Homo sapien
ccggagctggacacgtaggaactgc

SEQ ID NO: 4811580 - DNA, 25 bp, Homo sapien
gggttggattcccttgcactcggtg

SEQ ID NO: 4811581 - DNA, 25 bp, Homo sapien
gagcgggagtggagagggaggtgtc

SEQ ID NO: 4811582 - DNA, 25 bp, Homo sapien
cgggagtggagagggaggtgtctga

SEQ ID NO: 4811583 - DNA, 25 bp, Homo sapien
gggagtggagagggaggtgtctgag

SEQ ID NO: 4811584 - DNA, 25 bp, Homo sapien
ctggagagcgggagtggagagggag

SEQ ID NO: 4811585 - DNA, 25 bp, Homo sapien
gctcgcacgcactggctggcgcgca

SEQ ID NO: 4811586 - DNA, 25 bp, Homo sapien
ctcgcacgcactggctggcgcgcac

SEQ ID NO: 4811587 - DNA, 25 bp, Homo sapien
cgcgctcgcacgcactggctggcgc

SEQ ID NO: 4811588 - DNA, 25 bp, Homo sapien
cgctcgcacgcactggctggcgcgc

SEQ ID NO: 4811589 - DNA, 25 bp, Homo sapien
gctaagtccagagctgtgggttcga

SEQ ID NO: 4811590 - DNA, 25 bp, Homo sapien
tgctttaagcccaagcacggagtcc

SEQ ID NO: 4811591 - DNA, 25 bp, Homo sapien
aatatccggcacatccgctcggagg

SEQ ID NO: 4811592 - DNA, 25 bp, Homo sapien
cagggacgaaaggatcatggagaaa

SEQ ID NO: 4811593 - DNA, 25 bp, Homo sapien
tccatgtcgccacacagcttaactg

SEQ ID NO: 4811594 - DNA, 25 bp, Homo sapien
ggctctggctgagcgcatcccatca

SEQ ID NO: 4811595 - DNA, 25 bp, Homo sapien
gacttgggaagcagtgaggacgcca

SEQ ID NO: 4811596 - DNA, 25 bp, Homo sapien
ctgcatgaggattttggctccatgt

SEQ ID NO: 4811597 - DNA, 25 bp, Homo sapien
gggcccgagaccatagcctctctga

SEQ ID NO: 4811598 - DNA, 25 bp, Homo sapien
gaacttgggcccgagaccatagcct

SEQ ID NO: 4811599 - DNA, 25 bp, Homo sapien
agatccttccaccaacaatgactcc

SEQ ID NO: 4811600 - DNA, 25 bp, Homo sapien
gaccttgaacttgggcccgagacca

SEQ ID NO: 4811601 - DNA, 25 bp, Homo sapien
cagccagtaactgagggtgccacca

SEQ ID NO: 4811602 - DNA, 25 bp, Homo sapien
ccacccatttgcagccagtaactga

SEQ ID NO: 4811603 - DNA, 25 bp, Homo sapien
tcaacccacccatttgcagccagta

SEQ ID NO: 4811604 - DNA, 25 bp, Homo sapien
ccatttgcagccagtaactgagggt

SEQ ID NO: 4811605 - DNA, 25 bp, Homo sapien
tacacccctgaatactcttccccat

SEQ ID NO: 4811606 - DNA, 25 bp, Homo sapien
accacagaacgtggccccttcagat

SEQ ID NO: 4811607 - DNA, 25 bp, Homo sapien
tgcccccaatacacccctgaatact

SEQ ID NO: 4811608 - DNA, 25 bp, Homo sapien
tccccatactccatccggatttcca

SEQ ID NO: 4811609 - DNA, 25 bp, Homo sapien
tgtgacttcttccttcggtggctgg

SEQ ID NO: 4811610 - DNA, 25 bp, Homo sapien
cccggtcgctgtgtgacttcttcct

SEQ ID NO: 4811611 - DNA, 25 bp, Homo sapien
ttccttcggtggctggacggcttcc

SEQ ID NO: 4811612 - DNA, 25 bp, Homo sapien
agtgaccgcccggtcgctgtgtgac

SEQ ID NO: 4811613 - DNA, 25 bp, Homo sapien
agctggggacccaaatcaacttggt

SEQ ID NO: 4811614 - DNA, 25 bp, Homo sapien
ccgttcctttgatgtccactagcct

SEQ ID NO: 4811615 - DNA, 25 bp, Homo sapien
tgtccactagccttaggagccccag

SEQ ID NO: 4811616 - DNA, 25 bp, Homo sapien
ctttgatgtccactagccttaggag

SEQ ID NO: 4811617 - DNA, 25 bp, Homo sapien
ccagggctggcaacgggctcctgac

SEQ ID NO: 4811618 - DNA, 25 bp, Homo sapien
ggttcccgcgatgtggccgcacaca

SEQ ID NO: 4811619 - DNA, 25 bp, Homo sapien
ctggactgggttcccgcgatgtggc

SEQ ID NO: 4811620 - DNA, 25 bp, Homo sapien
tccgctctcctgggagatctccagg

SEQ ID NO: 4811621 - DNA, 25 bp, Homo sapien
gcactgtcacagttcatgccactga

SEQ ID NO: 4811622 - DNA, 25 bp, Homo sapien
aaatgatgagggtctccaggatgat

SEQ ID NO: 4811623 - DNA, 25 bp, Homo sapien
gatgtaccgtgcaagggcactgtca

SEQ ID NO: 4811624 - DNA, 25 bp, Homo sapien
aatcaattatccaacaacgagggct

SEQ ID NO: 4811625 - DNA, 25 bp, Homo sapien
cattcacatccgtttcttcacttaa

SEQ ID NO: 4811626 - DNA, 25 bp, Homo sapien
tggcgtctccccgatgctgagaagc

SEQ ID NO: 4811627 - DNA, 25 bp, Homo sapien
tccatcctgaatatagtcttcaatt

SEQ ID NO: 4811628 - DNA, 25 bp, Homo sapien
cactcatcattcacatccgtttctt

SEQ ID NO: 4811629 - DNA, 25 bp, Homo sapien
aggagtcccagagcgcccggagccc

SEQ ID NO: 4811630 - DNA, 25 bp, Homo sapien
tgcaaggcgcttgaacaggagtccc

SEQ ID NO: 4811631 - DNA, 25 bp, Homo sapien
aacaggagtcccagagcgcccggag

SEQ ID NO: 4811632 - DNA, 25 bp, Homo sapien
gcccggcctgggtcagcctccgcat

SEQ ID NO: 4811633 - DNA, 25 bp, Homo sapien
caggttcgatccctgcctcgcagac

SEQ ID NO: 4811634 - DNA, 25 bp, Homo sapien
cccaggttcgatccctgcctcgcag

SEQ ID NO: 4811635 - DNA, 25 bp, Homo sapien
ccccaggttcgatccctgcctcgca

SEQ ID NO: 4811636 - DNA, 25 bp, Homo sapien
ccaggttcgatccctgcctcgcaga

SEQ ID NO: 4811637 - DNA, 25 bp, Homo sapien
agcatccaaggcggtgaacagcagg

SEQ ID NO: 4811638 - DNA, 25 bp, Homo sapien
gcatccaaggcggtgaacagcaggt

SEQ ID NO: 4811639 - DNA, 25 bp, Homo sapien
cagcatccaaggcggtgaacagcag

SEQ ID NO: 4811640 - DNA, 25 bp, Homo sapien
taacctgtttgtcgagggagcccca

SEQ ID NO: 4811641 - DNA, 25 bp, Homo sapien
gactcattaacctgtttgtcgaggg

SEQ ID NO: 4811642 - DNA, 25 bp, Homo sapien
tcagaagccttgagacattagactc

SEQ ID NO: 4811643 - DNA, 25 bp, Homo sapien
tcctcacgcaccagggaggttctca

SEQ ID NO: 4811644 - DNA, 25 bp, Homo sapien
agccaggggactgtccaagccactg

SEQ ID NO: 4811645 - DNA, 25 bp, Homo sapien
agtagccaggggactgtccaagcca

SEQ ID NO: 4811646 - DNA, 25 bp, Homo sapien
tagccaggggactgtccaagccact

SEQ ID NO: 4811647 - DNA, 25 bp, Homo sapien
gtagccaggggactgtccaagccac

SEQ ID NO: 4811648 - DNA, 25 bp, Homo sapien
caggtcacgggtctaggagaaaaca

SEQ ID NO: 4811649 - DNA, 25 bp, Homo sapien
catctcaggtcacgggtctaggaga

SEQ ID NO: 4811650 - DNA, 25 bp, Homo sapien
acatctcaggtcacgggtctaggag

SEQ ID NO: 4811651 - DNA, 25 bp, Homo sapien
tctcaggtcacgggtctaggagaaa

SEQ ID NO: 4811652 - DNA, 25 bp, Homo sapien
gaaaagtctgcattcttagcccggg

SEQ ID NO: 4811653 - DNA, 25 bp, Homo sapien
cagccttgcttccacagagaactgg

SEQ ID NO: 4811654 - DNA, 25 bp, Homo sapien
catcacagggactcacatgggagcc

SEQ ID NO: 4811655 - DNA, 25 bp, Homo sapien
caaagccaacggcaagggaagcgtc

SEQ ID NO: 4811656 - DNA, 25 bp, Homo sapien
tgcccagagacccacacgcgcagca

SEQ ID NO: 4811657 - DNA, 25 bp, Homo sapien
cccaggtatagccacggcggctctt

SEQ ID NO: 4811658 - DNA, 25 bp, Homo sapien
caggtatagccacggcggctcttgg

SEQ ID NO: 4811659 - DNA, 25 bp, Homo sapien
ggaaggaacatcaagtccccaggta

SEQ ID NO: 4811660 - DNA, 25 bp, Homo sapien
gaagtgcatccaggcgacaaaaggg

SEQ ID NO: 4811661 - DNA, 25 bp, Homo sapien
gatggtctccatgtcgttccggtgg

SEQ ID NO: 4811662 - DNA, 25 bp, Homo sapien
agaaaggagtagacgaagcccagga

SEQ ID NO: 4811663 - DNA, 25 bp, Homo sapien
ccaggtaggccacggtgtgtgccac

SEQ ID NO: 4811664 - DNA, 25 bp, Homo sapien
aaggcagctccaagcttatgcttgc

SEQ ID NO: 4811665 - DNA, 25 bp, Homo sapien
agaaggcagctccaagcttatgctt

SEQ ID NO: 4811666 - DNA, 25 bp, Homo sapien
gaaggcagctccaagcttatgcttg

SEQ ID NO: 4811667 - DNA, 25 bp, Homo sapien
ggcagctccaagcttatgcttgcaa

SEQ ID NO: 4811668 - DNA, 25 bp, Homo sapien
catacctctatggcttgccgggacc

SEQ ID NO: 4811669 - DNA, 25 bp, Homo sapien
tatggcttgccgggaccccactcct

SEQ ID NO: 4811670 - DNA, 25 bp, Homo sapien
atacctctatggcttgccgggaccc

SEQ ID NO: 4811671 - DNA, 25 bp, Homo sapien
ggcttgccgggaccccactcctgcc

SEQ ID NO: 4811672 - DNA, 25 bp, Homo sapien
caaggacaggccacgcgtgtgaggt

SEQ ID NO: 4811673 - DNA, 25 bp, Homo sapien
ccaaggacaggccacgcgtgtgagg

SEQ ID NO: 4811674 - DNA, 25 bp, Homo sapien
cccaaggacaggccacgcgtgtgag

SEQ ID NO: 4811675 - DNA, 25 bp, Homo sapien
ccccaaggacaggccacgcgtgtga

SEQ ID NO: 4811676 - DNA, 25 bp, Homo sapien
ttctccactgtccaggagggccgcc

SEQ ID NO: 4811677 - DNA, 25 bp, Homo sapien
catccttctccactgtccaggaggg

SEQ ID NO: 4811678 - DNA, 25 bp, Homo sapien
cctggacagctcatcccatccttct

SEQ ID NO: 4811679 - DNA, 25 bp, Homo sapien
tggacagctcatcccatccttctcc

SEQ ID NO: 4811680 - DNA, 25 bp, Homo sapien
cccctgtgtgcagaagaagttctga

SEQ ID NO: 4811681 - DNA, 25 bp, Homo sapien
gaagaagttctgaaagggcaggcca

SEQ ID NO: 4811682 - DNA, 25 bp, Homo sapien
agaagttctgaaagggcaggccatg

SEQ ID NO: 4811683 - DNA, 25 bp, Homo sapien
tccaagtcccctgtgtgcagaagaa

SEQ ID NO: 4811684 - DNA, 25 bp, Homo sapien
ctgcaatactgggggcctccgtgtc

SEQ ID NO: 4811685 - DNA, 25 bp, Homo sapien
cagggcatcctcggggttggcaaag

SEQ ID NO: 4811686 - DNA, 25 bp, Homo sapien
agggcatcctcggggttggcaaagg

SEQ ID NO: 4811687 - DNA, 25 bp, Homo sapien
gggcatcctcggggttggcaaaggc

SEQ ID NO: 4811688 - DNA, 25 bp, Homo sapien
tcagggcatcctcggggttggcaaa

SEQ ID NO: 4811689 - DNA, 25 bp, Homo sapien
gaggctacaatgagccgtgatcttg

SEQ ID NO: 4811690 - DNA, 25 bp, Homo sapien
aggctacaatgagccgtgatcttgc

SEQ ID NO: 4811691 - DNA, 25 bp, Homo sapien
tcgaggctacaatgagccgtgatct

SEQ ID NO: 4811692 - DNA, 25 bp, Homo sapien
gctacaatgagccgtgatcttgcca

SEQ ID NO: 4811693 - DNA, 25 bp, Homo sapien
aggatccacccgcatgcagtgccag

SEQ ID NO: 4811694 - DNA, 25 bp, Homo sapien
tccccaggatccacccgcatgcagt

SEQ ID NO: 4811695 - DNA, 25 bp, Homo sapien
gagccagccttgcctcacctcgcct

SEQ ID NO: 4811696 - DNA, 25 bp, Homo sapien
gatccacccgcatgcagtgccagag

SEQ ID NO: 4811697 - DNA, 25 bp, Homo sapien
tggccatgtttccctatcccggggc

SEQ ID NO: 4811698 - DNA, 25 bp, Homo sapien
cttggccatgtttccctatcccggg

SEQ ID NO: 4811699 - DNA, 25 bp, Homo sapien
agagcaggaaggccgggagggccgg

SEQ ID NO: 4811700 - DNA, 25 bp, Homo sapien
ccgggctgctcatcaccaggctgtg

SEQ ID NO: 4811701 - DNA, 25 bp, Homo sapien
agggccgggctgctcatcaccaggc

SEQ ID NO: 4811702 - DNA, 25 bp, Homo sapien
tggccaccacgtacatcttgatgac

SEQ ID NO: 4811703 - DNA, 25 bp, Homo sapien
ctggccagcgcagctcaactgtggg

SEQ ID NO: 4811704 - DNA, 25 bp, Homo sapien
ctctggccagcgcagctcaactgtg

SEQ ID NO: 4811705 - DNA, 25 bp, Homo sapien
tgtgggtgtgatcagctcgacagag

SEQ ID NO: 4811706 - DNA, 25 bp, Homo sapien
gtgggtgtgatcagctcgacagagg

SEQ ID NO: 4811707 - DNA, 25 bp, Homo sapien
tgaaaacttaacataggcccggtgc

SEQ ID NO: 4811708 - DNA, 25 bp, Homo sapien
ccaaaattacctgagcacggtggca

SEQ ID NO: 4811709 - DNA, 25 bp, Homo sapien
gctattatctcgtctgcaggccagt

SEQ ID NO: 4811710 - DNA, 25 bp, Homo sapien
gctccactgagttaaggcacactta

SEQ ID NO: 4811711 - DNA, 25 bp, Homo sapien
gtaccaggcaagagaacccgctatt

SEQ ID NO: 4811712 - DNA, 25 bp, Homo sapien
gacggagtgtcttaccgcaaagcca

SEQ ID NO: 4811713 - DNA, 25 bp, Homo sapien
atctttctcaggtcagcgggaggcg

SEQ ID NO: 4811714 - DNA, 25 bp, Homo sapien
cagttacagaagtggatccgcggta

SEQ ID NO: 4811715 - DNA, 25 bp, Homo sapien
tagactactacgagcaggttgacgg

SEQ ID NO: 4811716 - DNA, 25 bp, Homo sapien
gaatttgagtcgttggttcccatgg

SEQ ID NO: 4811717 - DNA, 25 bp, Homo sapien
cccatggtgagatgcttgttaagac

SEQ ID NO: 4811718 - DNA, 25 bp, Homo sapien
tgacatgggcccagactgaacaagt

SEQ ID NO: 4811719 - DNA, 25 bp, Homo sapien
gaatcacaatgagaccgttggcttt

SEQ ID NO: 4811720 - DNA, 25 bp, Homo sapien
ggtaatacatggtcacaaccgtgga

SEQ ID NO: 4811721 - DNA, 25 bp, Homo sapien
aaaaggctacggttgatcatgaccc

SEQ ID NO: 4811722 - DNA, 25 bp, Homo sapien
ggtcagtctaaagtggcaggtccta

SEQ ID NO: 4811723 - DNA, 25 bp, Homo sapien
tgatccctgggacgtgagacttagc

SEQ ID NO: 4811724 - DNA, 25 bp, Homo sapien
ggctggctgcagctcaataccaaga

SEQ ID NO: 4811725 - DNA, 25 bp, Homo sapien
gaagccataaggcagagggttcctg

SEQ ID NO: 4811726 - DNA, 25 bp, Homo sapien
tctaactagggacttctggtgcctg

SEQ ID NO: 4811727 - DNA, 25 bp, Homo sapien
ggagccatctttaggtgccctgggc

SEQ ID NO: 4811728 - DNA, 25 bp, Homo sapien
tgctaggtcttcactcgcagcctta

SEQ ID NO: 4811729 - DNA, 25 bp, Homo sapien
tgtacttgaactccgtggctgggtg

SEQ ID NO: 4811730 - DNA, 25 bp, Homo sapien
ggatcctcagatccctgtgtgagac

SEQ ID NO: 4811731 - DNA, 25 bp, Homo sapien
gacagagccatcctaggatcctcag

SEQ ID NO: 4811732 - DNA, 25 bp, Homo sapien
gggattctgattgaacgtaacaaat

SEQ ID NO: 4811733 - DNA, 25 bp, Homo sapien
cagctaagctttataggaggtttcg

SEQ ID NO: 4811734 - DNA, 25 bp, Homo sapien
catttataaagaaagacaccgttct

SEQ ID NO: 4811735 - DNA, 25 bp, Homo sapien
tattgtaaaacggtagccatttgca

SEQ ID NO: 4811736 - DNA, 25 bp, Homo sapien
cttatctgtggtgcctgaaggcgtc

SEQ ID NO: 4811737 - DNA, 25 bp, Homo sapien
ccttttgcaaaacggagtgactggc

SEQ ID NO: 4811738 - DNA, 25 bp, Homo sapien
gaatggacagtgaagggccaccttt

SEQ ID NO: 4811739 - DNA, 25 bp, Homo sapien
gatgccctcctgtggaacaaatgcc

SEQ ID NO: 4811740 - DNA, 25 bp, Homo sapien
caccgttttgcagcctttatctgag

SEQ ID NO: 4811741 - DNA, 25 bp, Homo sapien
tcttcatcaatttcatagcctcggg

SEQ ID NO: 4811742 - DNA, 25 bp, Homo sapien
taataatctaacttggtgaacaccg

SEQ ID NO: 4811743 - DNA, 25 bp, Homo sapien
catagcctcgggactgcatttccac

SEQ ID NO: 4811744 - DNA, 25 bp, Homo sapien
ttccggtcaattaagctgctgtgcc

SEQ ID NO: 4811745 - DNA, 25 bp, Homo sapien
aaataatcaatgaggttccggtcaa

SEQ ID NO: 4811746 - DNA, 25 bp, Homo sapien
aatgaggttccggtcaattaagctg

SEQ ID NO: 4811747 - DNA, 25 bp, Homo sapien
gtcaattaagctgctgtgccagaag

SEQ ID NO: 4811748 - DNA, 25 bp, Homo sapien
tgggcaccaaaactagcctggagag

SEQ ID NO: 4811749 - DNA, 25 bp, Homo sapien
gaaggcagagttccacagaaagcgg

SEQ ID NO: 4811750 - DNA, 25 bp, Homo sapien
ttcagcagctggactagcaacaggg

SEQ ID NO: 4811751 - DNA, 25 bp, Homo sapien
cagccacgcctctgtatttgggaac

SEQ ID NO: 4811752 - DNA, 25 bp, Homo sapien
gagtgacggcagaacaggtgacctc

SEQ ID NO: 4811753 - DNA, 25 bp, Homo sapien
taagactcaaggttcaccatggccc

SEQ ID NO: 4811754 - DNA, 25 bp, Homo sapien
tgcaggaagtcttacaggttctacc

SEQ ID NO: 4811755 - DNA, 25 bp, Homo sapien
cacacagcagaacggacatggagag

SEQ ID NO: 4811756 - DNA, 25 bp, Homo sapien
ggtgatgctgacagtgaccctgatg

SEQ ID NO: 4811757 - DNA, 25 bp, Homo sapien
cctcatgactcggaaggggactgag

SEQ ID NO: 4811758 - DNA, 25 bp, Homo sapien
gactggcggtggatggccctactca

SEQ ID NO: 4811759 - DNA, 25 bp, Homo sapien
ttttaacacttagggtgcaggatta

SEQ ID NO: 4811760 - DNA, 25 bp, Homo sapien
aaagccacatctgtgatcctttctg

SEQ ID NO: 4811761 - DNA, 25 bp, Homo sapien
acatctgtgatcctttctgctccag

SEQ ID NO: 4811762 - DNA, 25 bp, Homo sapien
aaaaccgacacagacaacgcgtgtt

SEQ ID NO: 4811763 - DNA, 25 bp, Homo sapien
agacaacgcgtgttcaatgtctttg

SEQ ID NO: 4811764 - DNA, 25 bp, Homo sapien
caggtcataatagtcgaggaaaggc

SEQ ID NO: 4811765 - DNA, 25 bp, Homo sapien
cgaggaaaggcttgatggcatctat

SEQ ID NO: 4811766 - DNA, 25 bp, Homo sapien
gaccccatccaccaggtcataatag

SEQ ID NO: 4811767 - DNA, 25 bp, Homo sapien
tggcatctatgaggcctgcatgcat

SEQ ID NO: 4811768 - DNA, 25 bp, Homo sapien
tcatcaaatatgaagatggacctcg

SEQ ID NO: 4811769 - DNA, 25 bp, Homo sapien
tgcctcgaatccacaactgtaactg

SEQ ID NO: 4811770 - DNA, 25 bp, Homo sapien
aggcactcacgttgcctcgaatcca

SEQ ID NO: 4811771 - DNA, 25 bp, Homo sapien
ggacctcgcacaggcactcacgttg

SEQ ID NO: 4811772 - DNA, 25 bp, Homo sapien
gagctccctggattgttacaagcaa

SEQ ID NO: 4811773 - DNA, 25 bp, Homo sapien
ttatgcacttgacagacagagctcc

SEQ ID NO: 4811774 - DNA, 25 bp, Homo sapien
agatgtgtctgctgccaaagcccaa

SEQ ID NO: 4811775 - DNA, 25 bp, Homo sapien
gagtctcaggtcaggcaactttcct

SEQ ID NO: 4811776 - DNA, 25 bp, Homo sapien
cactggaccgattttcagaacccac

SEQ ID NO: 4811777 - DNA, 25 bp, Homo sapien
tcactggaccgattttcagaaccca

SEQ ID NO: 4811778 - DNA, 25 bp, Homo sapien
tttgatggtattaactgctccacgc

SEQ ID NO: 4811779 - DNA, 25 bp, Homo sapien
ttgatggtattaactgctccacgca

SEQ ID NO: 4811780 - DNA, 25 bp, Homo sapien
ctttgatggtattaactgctccacg

SEQ ID NO: 4811781 - DNA, 25 bp, Homo sapien
ttttccgggctcactcatttcaaca

SEQ ID NO: 4811782 - DNA, 25 bp, Homo sapien
gacatgaaccgttttccgggctcac

SEQ ID NO: 4811783 - DNA, 25 bp, Homo sapien
atgaaccgttttccgggctcactca

SEQ ID NO: 4811784 - DNA, 25 bp, Homo sapien
gaactgagacatgaaccgttttccg

SEQ ID NO: 4811785 - DNA, 25 bp, Homo sapien
tgacatccaggaagggattccaaac

SEQ ID NO: 4811786 - DNA, 25 bp, Homo sapien
cgatgacatccaggaagggattcca

SEQ ID NO: 4811787 - DNA, 25 bp, Homo sapien
gatgacatccaggaagggattccaa

SEQ ID NO: 4811788 - DNA, 25 bp, Homo sapien
ccgatgacatccaggaagggattcc

SEQ ID NO: 4811789 - DNA, 25 bp, Homo sapien
gcatgtggaaagtgcaatgtggcca

SEQ ID NO: 4811790 - DNA, 25 bp, Homo sapien
caaggtgatgtttgaagcatgtgga

SEQ ID NO: 4811791 - DNA, 25 bp, Homo sapien
tggaaagtgcaatgtggccacaaac

SEQ ID NO: 4811792 - DNA, 25 bp, Homo sapien
tgtggaaagtgcaatgtggccacaa

SEQ ID NO: 4811793 - DNA, 25 bp, Homo sapien
agtcactgttcagaccaccctcgta

SEQ ID NO: 4811794 - DNA, 25 bp, Homo sapien
gatgatcttgctgacgaaatttttg

SEQ ID NO: 4811795 - DNA, 25 bp, Homo sapien
gacgaaatttttgccggtgcctgtc

SEQ ID NO: 4811796 - DNA, 25 bp, Homo sapien
gaccaccctcgtaaatattctctgc

SEQ ID NO: 4811797 - DNA, 25 bp, Homo sapien
aaccaaacacggcatttaagatgat

SEQ ID NO: 4811798 - DNA, 25 bp, Homo sapien
aaagaggttgtcgtccagatccttc

SEQ ID NO: 4811799 - DNA, 25 bp, Homo sapien
gatgctgtccaaagaggttgtcgtc

SEQ ID NO: 4811800 - DNA, 25 bp, Homo sapien
ttgcaagatgctgtccaaagaggtt

SEQ ID NO: 4811801 - DNA, 25 bp, Homo sapien
gctcctcaggtctccgacttaagtc

SEQ ID NO: 4811802 - DNA, 25 bp, Homo sapien
cgacttaagtctggcacgtctgtgg

SEQ ID NO: 4811803 - DNA, 25 bp, Homo sapien
gcaggccggccgcttggcttccggg

SEQ ID NO: 4811804 - DNA, 25 bp, Homo sapien
cacgtctgtggtcatggccgaggag

SEQ ID NO: 4811805 - DNA, 25 bp, Homo sapien
gaggcagtagagacgcgggtagatg

SEQ ID NO: 4811806 - DNA, 25 bp, Homo sapien
gcttctgcccgcagcactcggcgaa

SEQ ID NO: 4811807 - DNA, 25 bp, Homo sapien
actcggcgaagaggcagtagagacg

SEQ ID NO: 4811808 - DNA, 25 bp, Homo sapien
cctcccggctaaggctccgcttctg

SEQ ID NO: 4811809 - DNA, 25 bp, Homo sapien
gcttccggttcctcctctcgcggag

SEQ ID NO: 4811810 - DNA, 25 bp, Homo sapien
ggtgcagccgccagacccacgcttc

SEQ ID NO: 4811811 - DNA, 25 bp, Homo sapien
ggttcctcctctcgcggaggccatc

SEQ ID NO: 4811812 - DNA, 25 bp, Homo sapien
tgcttgttctcgcgccgaccgcgaa

SEQ ID NO: 4811813 - DNA, 25 bp, Homo sapien
tggaggatgcatttctgaccccatc

SEQ ID NO: 4811814 - DNA, 25 bp, Homo sapien
caatctaaagagtattatcacaccg

SEQ ID NO: 4811815 - DNA, 25 bp, Homo sapien
cccatcccagacacgtgaaagcaga

SEQ ID NO: 4811816 - DNA, 25 bp, Homo sapien
gcagaagacatgatgcatctataat

SEQ ID NO: 4811817 - DNA, 25 bp, Homo sapien
tgtccgccagcaaatgagcatgctc

SEQ ID NO: 4811818 - DNA, 25 bp, Homo sapien
tgctcacaagaatagagtttgcccc

SEQ ID NO: 4811819 - DNA, 25 bp, Homo sapien
aggaagccatttttcatgggaggga

SEQ ID NO: 4811820 - DNA, 25 bp, Homo sapien
gaggaaggcgatatttacatcccac

SEQ ID NO: 4811821 - DNA, 25 bp, Homo sapien
tgccttctcgttagcaggacgcttg

SEQ ID NO: 4811822 - DNA, 25 bp, Homo sapien
tcgttagcaggacgcttgcggttag

SEQ ID NO: 4811823 - DNA, 25 bp, Homo sapien
tttcttgaacttctcataatgatag

SEQ ID NO: 4811824 - DNA, 25 bp, Homo sapien
catcagttgccttctcgttagcagg

SEQ ID NO: 4811825 - DNA, 25 bp, Homo sapien
catggactggaacccatatgccccg

SEQ ID NO: 4811826 - DNA, 25 bp, Homo sapien
tgcacccagctaaccttatgagtag

SEQ ID NO: 4811827 - DNA, 25 bp, Homo sapien
gaaggcacatagtcatggtccagag

SEQ ID NO: 4811828 - DNA, 25 bp, Homo sapien
agccccgaggcctttgttgcactca

SEQ ID NO: 4811829 - DNA, 25 bp, Homo sapien
gtttctccgtatgggcgcgttgagc

SEQ ID NO: 4811830 - DNA, 25 bp, Homo sapien
ctttgtttctccgtatgggcgcgtt

SEQ ID NO: 4811831 - DNA, 25 bp, Homo sapien
acctactctcaagggccgggccttg

SEQ ID NO: 4811832 - DNA, 25 bp, Homo sapien
cgtatgggcgcgttgagctcctcat

SEQ ID NO: 4811833 - DNA, 25 bp, Homo sapien
tgctctgccagcagacgggccttgg

SEQ ID NO: 4811834 - DNA, 25 bp, Homo sapien
gctctgccagcagacgggccttggc

SEQ ID NO: 4811835 - DNA, 25 bp, Homo sapien
ctgctctgccagcagacgggccttg

SEQ ID NO: 4811836 - DNA, 25 bp, Homo sapien
gaaacttctagcaacaacctgccag

SEQ ID NO: 4811837 - DNA, 25 bp, Homo sapien
gactctcacggctgtcggagaacca

SEQ ID NO: 4811838 - DNA, 25 bp, Homo sapien
tggcagcccagcagtacataagaaa

SEQ ID NO: 4811839 - DNA, 25 bp, Homo sapien
gctgtaacacgctaaagaaccactt

SEQ ID NO: 4811840 - DNA, 25 bp, Homo sapien
tggttggaaagcatctcctcggtct

SEQ ID NO: 4811841 - DNA, 25 bp, Homo sapien
ttggaaagcatctcctcggtcttct

SEQ ID NO: 4811842 - DNA, 25 bp, Homo sapien
tttgctgaggaaacacggatgtttt

SEQ ID NO: 4811843 - DNA, 25 bp, Homo sapien
catctggttggaaagcatctcctcg

SEQ ID NO: 4811844 - DNA, 25 bp, Homo sapien
agttcataaagacagtcctctgcat

SEQ ID NO: 4811845 - DNA, 25 bp, Homo sapien
tgttcctcatgttccacgatccctt

SEQ ID NO: 4811846 - DNA, 25 bp, Homo sapien
tagctctgtctcaatgtacttcatc

SEQ ID NO: 4811847 - DNA, 25 bp, Homo sapien
cctctgcattctttggcttaacttt

SEQ ID NO: 4811848 - DNA, 25 bp, Homo sapien
ctacaggtgagagctaccgtgcccg

SEQ ID NO: 4811849 - DNA, 25 bp, Homo sapien
gggactacaggtgagagctaccgtg

SEQ ID NO: 4811850 - DNA, 25 bp, Homo sapien
gcgagatcttggctcgccgcaagct

SEQ ID NO: 4811851 - DNA, 25 bp, Homo sapien
ggcgagatcttggctcgccgcaagc

SEQ ID NO: 4811852 - DNA, 25 bp, Homo sapien
tcatcccttcggttggtttctgcag

SEQ ID NO: 4811853 - DNA, 25 bp, Homo sapien
ctgcagaaaacgatgtccccaggtg

SEQ ID NO: 4811854 - DNA, 25 bp, Homo sapien
catcctcatcccttcggttggtttc

SEQ ID NO: 4811855 - DNA, 25 bp, Homo sapien
gcagaaaacgatgtccccaggtgca

SEQ ID NO: 4811856 - DNA, 25 bp, Homo sapien
caagatgtcctactaatgctgctgc

SEQ ID NO: 4811857 - DNA, 25 bp, Homo sapien
ccctttgcaaagcacaaaacctgct

SEQ ID NO: 4811858 - DNA, 25 bp, Homo sapien
tacaaaaggagtctaccaacttggc

SEQ ID NO: 4811859 - DNA, 25 bp, Homo sapien
gccgctaaaggtgaatttgcatcta

SEQ ID NO: 4811860 - DNA, 25 bp, Homo sapien
ccttcagtttcttcatatccaccat

SEQ ID NO: 4811861 - DNA, 25 bp, Homo sapien
ctttccttcagtttcttcatatcca

SEQ ID NO: 4811862 - DNA, 25 bp, Homo sapien
ttccttcagtttcttcatatccacc

SEQ ID NO: 4811863 - DNA, 25 bp, Homo sapien
ttgcccctttccttcagtttcttca

SEQ ID NO: 4811864 - DNA, 25 bp, Homo sapien
cacctgtcttcatctgaaagggatc

SEQ ID NO: 4811865 - DNA, 25 bp, Homo sapien
acctgtcttcatctgaaagggatca

SEQ ID NO: 4811866 - DNA, 25 bp, Homo sapien
accacctgtcttcatctgaaaggga

SEQ ID NO: 4811867 - DNA, 25 bp, Homo sapien
ctgtcttcatctgaaagggatcatc

SEQ ID NO: 4811868 - DNA, 25 bp, Homo sapien
tgaagcacgctcactcactgaagag

SEQ ID NO: 4811869 - DNA, 25 bp, Homo sapien
tactcagggaagaccccataactta

SEQ ID NO: 4811870 - DNA, 25 bp, Homo sapien
caaacacagttaagaggaagcatct

SEQ ID NO: 4811871 - DNA, 25 bp, Homo sapien
gagggctgccataactactcaggga

SEQ ID NO: 4811872 - DNA, 25 bp, Homo sapien
actagagtggtctcctcttgtacct

SEQ ID NO: 4811873 - DNA, 25 bp, Homo sapien
agagtggtctcctcttgtaccttct

SEQ ID NO: 4811874 - DNA, 25 bp, Homo sapien
cactagagtggtctcctcttgtacc

SEQ ID NO: 4811875 - DNA, 25 bp, Homo sapien
tagagtggtctcctcttgtaccttc

SEQ ID NO: 4811876 - DNA, 25 bp, Homo sapien
cataagacagggctcaacgagcacc

SEQ ID NO: 4811877 - DNA, 25 bp, Homo sapien
atttaagagaatatccactgcagcc

SEQ ID NO: 4811878 - DNA, 25 bp, Homo sapien
ggaggaaccctctcaggtatgcgga

SEQ ID NO: 4811879 - DNA, 25 bp, Homo sapien
cactgatcatttccggatgggagaa

SEQ ID NO: 4811880 - DNA, 25 bp, Homo sapien
tcttcctcaagttctgtacctctct

SEQ ID NO: 4811881 - DNA, 25 bp, Homo sapien
tcaagttctgtacctctctggtctc

SEQ ID NO: 4811882 - DNA, 25 bp, Homo sapien
cctcaagttctgtacctctctggtc

SEQ ID NO: 4811883 - DNA, 25 bp, Homo sapien
ttcctcaagttctgtacctctctgg

SEQ ID NO: 4811884 - DNA, 25 bp, Homo sapien
tatctttaccaagcctatgggagcc

SEQ ID NO: 4811885 - DNA, 25 bp, Homo sapien
gttaacaatgtcagcgaagcgccga

SEQ ID NO: 4811886 - DNA, 25 bp, Homo sapien
aataaggcaccttcgagggcatccc

SEQ ID NO: 4811887 - DNA, 25 bp, Homo sapien
gaggcatctctctcaaccgttcgag

SEQ ID NO: 4811888 - DNA, 25 bp, Homo sapien
tcctctgactccgagtcgccccggc

SEQ ID NO: 4811889 - DNA, 25 bp, Homo sapien
ctgactccgagtcgccccggcggcg

SEQ ID NO: 4811890 - DNA, 25 bp, Homo sapien
tcttcctctgactccgagtcgcccc

SEQ ID NO: 4811891 - DNA, 25 bp, Homo sapien
ctctgactccgagtcgccccggcgg

SEQ ID NO: 4811892 - DNA, 25 bp, Homo sapien
acaacggccgagttgtacagccgcc

SEQ ID NO: 4811893 - DNA, 25 bp, Homo sapien
gacaacggccgagttgtacagccgc

SEQ ID NO: 4811894 - DNA, 25 bp, Homo sapien
gtgacaacggccgagttgtacagcc

SEQ ID NO: 4811895 - DNA, 25 bp, Homo sapien
acggccgagttgtacagccgccgcg

SEQ ID NO: 4811896 - DNA, 25 bp, Homo sapien
tgtggttggggtcagcgtgggcagg

SEQ ID NO: 4811897 - DNA, 25 bp, Homo sapien
aatgtggttggggtcagcgtgggca

SEQ ID NO: 4811898 - DNA, 25 bp, Homo sapien
ggctaatgtggttggggtcagcgtg

SEQ ID NO: 4811899 - DNA, 25 bp, Homo sapien
gctaatgtggttggggtcagcgtgg

SEQ ID NO: 4811900 - DNA, 25 bp, Homo sapien
cactcccggcctagaaactttcaca

SEQ ID NO: 4811901 - DNA, 25 bp, Homo sapien
actcccggcctagaaactttcacat

SEQ ID NO: 4811902 - DNA, 25 bp, Homo sapien
ctcccggcctagaaactttcacatt

SEQ ID NO: 4811903 - DNA, 25 bp, Homo sapien
agaagtgtgcttaggagccatccag

SEQ ID NO: 4811904 - DNA, 25 bp, Homo sapien
gaaaaccaccctgtgtaggctcagg

SEQ ID NO: 4811905 - DNA, 25 bp, Homo sapien
tgtcccctatggtgccctcaggagt

SEQ ID NO: 4811906 - DNA, 25 bp, Homo sapien
gagcaacatacctaggaagccagat

SEQ ID NO: 4811907 - DNA, 25 bp, Homo sapien
taagtgtttggaaaaacatctatgt

SEQ ID NO: 4811908 - DNA, 25 bp, Homo sapien
gtaagtgtttggaaaaacatctatg

SEQ ID NO: 4811909 - DNA, 25 bp, Homo sapien
tgacttggtgccctctctcggtagc

SEQ ID NO: 4811910 - DNA, 25 bp, Homo sapien
cagtgagacagctatggctcctgcc

SEQ ID NO: 4811911 - DNA, 25 bp, Homo sapien
gcttgtccgcaccaaggaaggcacg

SEQ ID NO: 4811912 - DNA, 25 bp, Homo sapien
tcggtagcctcagcacatgttgtct

SEQ ID NO: 4811913 - DNA, 25 bp, Homo sapien
ggcgttacgtagctgcttcctcaga

SEQ ID NO: 4811914 - DNA, 25 bp, Homo sapien
gtttgtcctcgcaggcgttacgtag

SEQ ID NO: 4811915 - DNA, 25 bp, Homo sapien
ttcctcagacgtaaacatcttaggt

SEQ ID NO: 4811916 - DNA, 25 bp, Homo sapien
acatcttaggttgtgactggcctgg

SEQ ID NO: 4811917 - DNA, 25 bp, Homo sapien
cgaatacatttgcaaggcgcagcca

SEQ ID NO: 4811918 - DNA, 25 bp, Homo sapien
ggcgcagccacccaaaaagtgtagt

SEQ ID NO: 4811919 - DNA, 25 bp, Homo sapien
gagttcagactgagatgccaagatc

SEQ ID NO: 4811920 - DNA, 25 bp, Homo sapien
cttcttagaggagccggaaaggcgc

SEQ ID NO: 4811921 - DNA, 25 bp, Homo sapien
caggctgtcccatacatttcacgat

SEQ ID NO: 4811922 - DNA, 25 bp, Homo sapien
ctcagagggcgctggcaacacagat

SEQ ID NO: 4811923 - DNA, 25 bp, Homo sapien
ctgcctcccctatcgggaaagcgtt

SEQ ID NO: 4811924 - DNA, 25 bp, Homo sapien
gaacccgtctggatggtggctcttt

SEQ ID NO: 4811925 - DNA, 25 bp, Homo sapien
taacatatagttacaaggtcaatac

SEQ ID NO: 4811926 - DNA, 25 bp, Homo sapien
ttaacatatagttacaaggtcaata

SEQ ID NO: 4811927 - DNA, 25 bp, Homo sapien
attaacatatagttacaaggtcaat

SEQ ID NO: 4811928 - DNA, 25 bp, Homo sapien
gattaacatatagttacaaggtcaa

SEQ ID NO: 4811929 - DNA, 25 bp, Homo sapien
tgagcttttcatggagccacgcaga

SEQ ID NO: 4811930 - DNA, 25 bp, Homo sapien
caacagtattctagcacggtggcga

SEQ ID NO: 4811931 - DNA, 25 bp, Homo sapien
gatgtgacgcacatgcattcccgag

SEQ ID NO: 4811932 - DNA, 25 bp, Homo sapien
taggacctttacagtggcgatcggc

SEQ ID NO: 4811933 - DNA, 25 bp, Homo sapien
ccgtttcacatcctcgtggagtgga

SEQ ID NO: 4811934 - DNA, 25 bp, Homo sapien
taaagaaccgtttcacatcctcgtg

SEQ ID NO: 4811935 - DNA, 25 bp, Homo sapien
tggagagtggtccacttgacttggt

SEQ ID NO: 4811936 - DNA, 25 bp, Homo sapien
tcacatcctcgtggagtggagagtg

SEQ ID NO: 4811937 - DNA, 25 bp, Homo sapien
gatgggtgcaccacgcttaggtcac

SEQ ID NO: 4811938 - DNA, 25 bp, Homo sapien
gagaggctcacgctcacctacttta

SEQ ID NO: 4811939 - DNA, 25 bp, Homo sapien
cccgttgcagggaccggaagtccat

SEQ ID NO: 4811940 - DNA, 25 bp, Homo sapien
tctgtcaagtcagtcctcctgcgtg

SEQ ID NO: 4811941 - DNA, 25 bp, Homo sapien
tggtgtgtggtcaaccttggttggc

SEQ ID NO: 4811942 - DNA, 25 bp, Homo sapien
tctgcgcttgtggtttctcgtcccc

SEQ ID NO: 4811943 - DNA, 25 bp, Homo sapien
gtggtttctcgtccccgagggctga

SEQ ID NO: 4811944 - DNA, 25 bp, Homo sapien
gcgcttgtggtttctcgtccccgag

SEQ ID NO: 4811945 - DNA, 25 bp, Homo sapien
caatgtttagtatgaggtgcaagcc

SEQ ID NO: 4811946 - DNA, 25 bp, Homo sapien
tggtttccacaagtaaagacagccc

SEQ ID NO: 4811947 - DNA, 25 bp, Homo sapien
tggtgatgaaagtgctaacctcggc

SEQ ID NO: 4811948 - DNA, 25 bp, Homo sapien
tgatctacagttctcagggacagga

SEQ ID NO: 4811949 - DNA, 25 bp, Homo sapien
gtgggcgctggcgagacttgtcccc

SEQ ID NO: 4811950 - DNA, 25 bp, Homo sapien
ggggtgggcgctggcgagacttgtc

SEQ ID NO: 4811951 - DNA, 25 bp, Homo sapien
gggcgctggcgagacttgtccccca

SEQ ID NO: 4811952 - DNA, 25 bp, Homo sapien
gctggcgagacttgtcccccacgag

SEQ ID NO: 4811953 - DNA, 25 bp, Homo sapien
gtgggaacaagcagacggaggctcc

SEQ ID NO: 4811954 - DNA, 25 bp, Homo sapien
caggaaggctcacccgaggctcgca

SEQ ID NO: 4811955 - DNA, 25 bp, Homo sapien
acccgaggctcgcaggcactcccct

SEQ ID NO: 4811956 - DNA, 25 bp, Homo sapien
gggaacaagcagacggaggctcctc

SEQ ID NO: 4811957 - DNA, 25 bp, Homo sapien
tctctcagaaggaaactcttggctc

SEQ ID NO: 4811958 - DNA, 25 bp, Homo sapien
aagcattgggctagaaaatccccta

SEQ ID NO: 4811959 - DNA, 25 bp, Homo sapien
tgctcttggctacaaactgcaccgc

SEQ ID NO: 4811960 - DNA, 25 bp, Homo sapien
tagagcaatcggttaccacagggcg

SEQ ID NO: 4811961 - DNA, 25 bp, Homo sapien
gttatgggcctaagaaaacagtggc

SEQ ID NO: 4811962 - DNA, 25 bp, Homo sapien
ttagagaagcagatacgagggtaca

SEQ ID NO: 4811963 - DNA, 25 bp, Homo sapien
taataaactcaagtgcggagccgca

SEQ ID NO: 4811964 - DNA, 25 bp, Homo sapien
acagagtaggcaggaaaagcttctc

SEQ ID NO: 4811965 - DNA, 25 bp, Homo sapien
gccaacagagcgaacccgtctctac

SEQ ID NO: 4811966 - DNA, 25 bp, Homo sapien
tactcgggaggctgaggcaggagaa

SEQ ID NO: 4811967 - DNA, 25 bp, Homo sapien
ctactcgggaggctgaggcaggaga

SEQ ID NO: 4811968 - DNA, 25 bp, Homo sapien
cctggccaacagagcgaacccgtct

SEQ ID NO: 4811969 - DNA, 25 bp, Homo sapien
gatggaacagggtactcgtgatgcc

SEQ ID NO: 4811970 - DNA, 25 bp, Homo sapien
tactgctttagtcaagaaggagatg

SEQ ID NO: 4811971 - DNA, 25 bp, Homo sapien
ggtcaattcaccaaacttttccaga

SEQ ID NO: 4811972 - DNA, 25 bp, Homo sapien
tcgtgatgccctaccaaggatgctg

SEQ ID NO: 4811973 - DNA, 25 bp, Homo sapien
aagtctttggcacctgcatgatgcg

SEQ ID NO: 4811974 - DNA, 25 bp, Homo sapien
tacaggagaacgtgcattatggtgc

SEQ ID NO: 4811975 - DNA, 25 bp, Homo sapien
tagacaaggcaattcaggtgcccag

SEQ ID NO: 4811976 - DNA, 25 bp, Homo sapien
gatgcgtgccggcttttaaattcag

SEQ ID NO: 4811977 - DNA, 25 bp, Homo sapien
cttcctctatgacatacaatgtttc

SEQ ID NO: 4811978 - DNA, 25 bp, Homo sapien
catcttcatttctccgaatgcgggt

SEQ ID NO: 4811979 - DNA, 25 bp, Homo sapien
tgcgggtccagccatcgcctttgtc

SEQ ID NO: 4811980 - DNA, 25 bp, Homo sapien
aacagacttcgacatatgaagtggg

SEQ ID NO: 4811981 - DNA, 25 bp, Homo sapien
gagaaaggtaccctcgtggctccaa

SEQ ID NO: 4811982 - DNA, 25 bp, Homo sapien
caagtgtcgtcgaagatgaagtcca

SEQ ID NO: 4811983 - DNA, 25 bp, Homo sapien
gcaaacagtggccttcgcaatgaaa

SEQ ID NO: 4811984 - DNA, 25 bp, Homo sapien
tgtctcacttggatctctctcagga

SEQ ID NO: 4811985 - DNA, 25 bp, Homo sapien
caggaatgcaactctgggagccgtc

SEQ ID NO: 4811986 - DNA, 25 bp, Homo sapien
tgatcagccccgaatatatgcagtt

SEQ ID NO: 4811987 - DNA, 25 bp, Homo sapien
tgtgatgccacttgtcccgggttca

SEQ ID NO: 4811988 - DNA, 25 bp, Homo sapien
tgtcaatggcggcatctctgtatcc

SEQ ID NO: 4811989 - DNA, 25 bp, Homo sapien
gctcctctgtgtaactgccatctgg

SEQ ID NO: 4811990 - DNA, 25 bp, Homo sapien
ctcatcatcaaactcgtcgtcaaaa

SEQ ID NO: 4811991 - DNA, 25 bp, Homo sapien
gagctttgcacgtccctatggcagg

SEQ ID NO: 4811992 - DNA, 25 bp, Homo sapien
tcgtcgtcaaaatccgtggccagca

SEQ ID NO: 4811993 - DNA, 25 bp, Homo sapien
ctcaagaaaggaaaacacaaagcaa

SEQ ID NO: 4811994 - DNA, 25 bp, Homo sapien
gtgggttctggctgtcgtacagtcc

SEQ ID NO: 4811995 - DNA, 25 bp, Homo sapien
tctcacggtcctgggcgcagttgtt

SEQ ID NO: 4811996 - DNA, 25 bp, Homo sapien
gctgtcgtacagtccgctctgccgg

SEQ ID NO: 4811997 - DNA, 25 bp, Homo sapien
ctctcacggtcctgggcgcagttgt

SEQ ID NO: 4811998 - DNA, 25 bp, Homo sapien
ggctgggtctcccatctgaggattc

SEQ ID NO: 4811999 - DNA, 25 bp, Homo sapien
ggattctttaggtagacatctttca

SEQ ID NO: 4812000 - DNA, 25 bp, Homo sapien
ggtctctactcgcagtttctctata

SEQ ID NO: 4812001 - DNA, 25 bp, Homo sapien
gacttctgctaatttgtgatccaaa

SEQ ID NO: 4812002 - DNA, 25 bp, Homo sapien
caataaatctctctatatgcgtggc

SEQ ID NO: 4812003 - DNA, 25 bp, Homo sapien
tgaggatctaagtgagctaaggctc

SEQ ID NO: 4812004 - DNA, 25 bp, Homo sapien
ccgacttcttgagatagatcgtaag

SEQ ID NO: 4812005 - DNA, 25 bp, Homo sapien
taaggctcagtgatttttacctctg

SEQ ID NO: 4812006 - DNA, 25 bp, Homo sapien
tttatttcgcagacacttatgtgcc

SEQ ID NO: 4812007 - DNA, 25 bp, Homo sapien
tgattggcccttgcatggtatatct

SEQ ID NO: 4812008 - DNA, 25 bp, Homo sapien
gccaggcacggttccaagcatgtta

SEQ ID NO: 4812009 - DNA, 25 bp, Homo sapien
tgatagagccagatttgaccccagg

SEQ ID NO: 4812010 - DNA, 25 bp, Homo sapien
aataagtcatattgatgcactatac

SEQ ID NO: 4812011 - DNA, 25 bp, Homo sapien
taataagtcatattgatgcactata

SEQ ID NO: 4812012 - DNA, 25 bp, Homo sapien
ttcttaataagtcatattgatgcac

SEQ ID NO: 4812013 - DNA, 25 bp, Homo sapien
cttaataagtcatattgatgcacta

SEQ ID NO: 4812014 - DNA, 25 bp, Homo sapien
ttcaggtgggaggttgctgaaatcc

SEQ ID NO: 4812015 - DNA, 25 bp, Homo sapien
tatttaactcatcgactttctgctg

SEQ ID NO: 4812016 - DNA, 25 bp, Homo sapien
tgctgaaatcctccggtgttgcacc

SEQ ID NO: 4812017 - DNA, 25 bp, Homo sapien
aactcatcgactttctgctgcagct

SEQ ID NO: 4812018 - DNA, 25 bp, Homo sapien
atcccagctacttgggaggctgagg

SEQ ID NO: 4812019 - DNA, 25 bp, Homo sapien
ctgctaaaaatataaaaaactagct

SEQ ID NO: 4812020 - DNA, 25 bp, Homo sapien
ctgggcgtggtggcgagcgcctata

SEQ ID NO: 4812021 - DNA, 25 bp, Homo sapien
tggccaacaatgtgaaacaccgtct

SEQ ID NO: 4812022 - DNA, 25 bp, Homo sapien
caggatcagccactatctccaggta

SEQ ID NO: 4812023 - DNA, 25 bp, Homo sapien
ccatcagaagtcctggaagcctgga

SEQ ID NO: 4812024 - DNA, 25 bp, Homo sapien
caacttgaagctagtccatcagaag

SEQ ID NO: 4812025 - DNA, 25 bp, Homo sapien
tagcggaagcctccacatatttggt

SEQ ID NO: 4812026 - DNA, 25 bp, Homo sapien
gaaggcctcctagtcaatagatcca

SEQ ID NO: 4812027 - DNA, 25 bp, Homo sapien
aaggcaccaacatatctacgtcgca

SEQ ID NO: 4812028 - DNA, 25 bp, Homo sapien
ggaaataaggaaaccctggcagctg

SEQ ID NO: 4812029 - DNA, 25 bp, Homo sapien
ttgaatcagctatgcacaaggcacc

SEQ ID NO: 4812030 - DNA, 25 bp, Homo sapien
gcctcaaacctgggtagcagctgct

SEQ ID NO: 4812031 - DNA, 25 bp, Homo sapien
ggcctcaaacctgggtagcagctgc

SEQ ID NO: 4812032 - DNA, 25 bp, Homo sapien
tacttctatggttctctaatagcaa

SEQ ID NO: 4812033 - DNA, 25 bp, Homo sapien
ctccaggctcccagattttttcatc

SEQ ID NO: 4812034 - DNA, 25 bp, Homo sapien
caggctcccagattttttcatctac

SEQ ID NO: 4812035 - DNA, 25 bp, Homo sapien
ttcatctacttctatggttctctaa

SEQ ID NO: 4812036 - DNA, 25 bp, Homo sapien
aaaatgacttgtagcagatctgtgc

SEQ ID NO: 4812037 - DNA, 25 bp, Homo sapien
taaaataacacacacgtctacccgc

SEQ ID NO: 4812038 - DNA, 25 bp, Homo sapien
ccacattgccagagccaaagatcag

SEQ ID NO: 4812039 - DNA, 25 bp, Homo sapien
tgtgcaaaagttcacaagaagggct

SEQ ID NO: 4812040 - DNA, 25 bp, Homo sapien
ttaagcattccacagacagagttct

SEQ ID NO: 4812041 - DNA, 25 bp, Homo sapien
tccagcccgcctgtgaacttgagca

SEQ ID NO: 4812042 - DNA, 25 bp, Homo sapien
tgggcagtctacagtgattccagcc

SEQ ID NO: 4812043 - DNA, 25 bp, Homo sapien
cagacaagacttatggtgcacagca

SEQ ID NO: 4812044 - DNA, 25 bp, Homo sapien
cctggtgtccagttctctcaattaa

SEQ ID NO: 4812045 - DNA, 25 bp, Homo sapien
gaatttcatttcgtagtgtggaagc

SEQ ID NO: 4812046 - DNA, 25 bp, Homo sapien
gtggctgtgccatgactgtatgacc

SEQ ID NO: 4812047 - DNA, 25 bp, Homo sapien
gtgtggaagcataacaagtgcctct

SEQ ID NO: 4812048 - DNA, 25 bp, Homo sapien
cgtcctcttcatgagttctttgtga

SEQ ID NO: 4812049 - DNA, 25 bp, Homo sapien
aacatagtccctagcctcaaaggca

SEQ ID NO: 4812050 - DNA, 25 bp, Homo sapien
caaaggcatacgtgggtttccctat

SEQ ID NO: 4812051 - DNA, 25 bp, Homo sapien
gggtttccctatcgtcctcttcatg

SEQ ID NO: 4812052 - DNA, 25 bp, Homo sapien
gacaaacaactggtaaggattttca

SEQ ID NO: 4812053 - DNA, 25 bp, Homo sapien
ctgccaataaccagcaagagaacaa

SEQ ID NO: 4812054 - DNA, 25 bp, Homo sapien
tcccctttgtagactgcaaatggag

SEQ ID NO: 4812055 - DNA, 25 bp, Homo sapien
tccttacaaatgtcaacagcttaca

SEQ ID NO: 4812056 - DNA, 25 bp, Homo sapien
atgttggtcacggaagctgtcagcc

SEQ ID NO: 4812057 - DNA, 25 bp, Homo sapien
agccatgccatggatgtcccatgca

SEQ ID NO: 4812058 - DNA, 25 bp, Homo sapien
ttggtcacggaagctgtcagccatg

SEQ ID NO: 4812059 - DNA, 25 bp, Homo sapien
tgtcagccatgccatggatgtccca

SEQ ID NO: 4812060 - DNA, 25 bp, Homo sapien
gagcacacgtttgaggagtaagaaa

SEQ ID NO: 4812061 - DNA, 25 bp, Homo sapien
gaaccagtttccgattcccatttca

SEQ ID NO: 4812062 - DNA, 25 bp, Homo sapien
tttgcactgctatgtcctagaggaa

SEQ ID NO: 4812063 - DNA, 25 bp, Homo sapien
tctttacgattgcttctagtgggta

SEQ ID NO: 4812064 - DNA, 25 bp, Homo sapien
cagttgacactcaagaaaggatggc

SEQ ID NO: 4812065 - DNA, 25 bp, Homo sapien
taacccaaccgtcagttgactggag

SEQ ID NO: 4812066 - DNA, 25 bp, Homo sapien
taattagccggacattaaccatgcc

SEQ ID NO: 4812067 - DNA, 25 bp, Homo sapien
tactggatatgttaacgctgctggg

SEQ ID NO: 4812068 - DNA, 25 bp, Homo sapien
caaagcacgccagagagacaggatt

SEQ ID NO: 4812069 - DNA, 25 bp, Homo sapien
tgagacactgcgcttgtcctattaa

SEQ ID NO: 4812070 - DNA, 25 bp, Homo sapien
aactatcacgcccagtctcaggtcg

SEQ ID NO: 4812071 - DNA, 25 bp, Homo sapien
gacaggattccggagcagaacttac

SEQ ID NO: 4812072 - DNA, 25 bp, Homo sapien
tggaggtcatgaactcgttgaagcg

SEQ ID NO: 4812073 - DNA, 25 bp, Homo sapien
ttgggtttggaggtcatgaactcgt

SEQ ID NO: 4812074 - DNA, 25 bp, Homo sapien
catgaactcgttgaagcgatgggag

SEQ ID NO: 4812075 - DNA, 25 bp, Homo sapien
ccacgctttaggctcctgaagcagt

SEQ ID NO: 4812076 - DNA, 25 bp, Homo sapien
ggccgttgggaacagcagagggtga

SEQ ID NO: 4812077 - DNA, 25 bp, Homo sapien
ctgggggccgttgggaacagcagag

SEQ ID NO: 4812078 - DNA, 25 bp, Homo sapien
gccgttgggaacagcagagggtgag

SEQ ID NO: 4812079 - DNA, 25 bp, Homo sapien
tgggggccgttgggaacagcagagg

SEQ ID NO: 4812080 - DNA, 25 bp, Homo sapien
tgatggggggatgttaaaagggaca

SEQ ID NO: 4812081 - DNA, 25 bp, Homo sapien
gaagctcgtgcagactttcccatgc

SEQ ID NO: 4812082 - DNA, 25 bp, Homo sapien
gatcatattctacgtccccaggtta

SEQ ID NO: 4812083 - DNA, 25 bp, Homo sapien
tctaaaccagcttaagccagagggt

SEQ ID NO: 4812084 - DNA, 25 bp, Homo sapien
tacatgtaagagatggagccgtgac

SEQ ID NO: 4812085 - DNA, 25 bp, Homo sapien
ctgttagtgtgggagtcacggtacg

SEQ ID NO: 4812086 - DNA, 25 bp, Homo sapien
tagtgtgggagtcacggtacgagga

SEQ ID NO: 4812087 - DNA, 25 bp, Homo sapien
gagtcacggtacgaggataatgcat

SEQ ID NO: 4812088 - DNA, 25 bp, Homo sapien
gtgggagtcacggtacgaggataat

SEQ ID NO: 4812089 - DNA, 25 bp, Homo sapien
taagacacagggccatggcaaagat

SEQ ID NO: 4812090 - DNA, 25 bp, Homo sapien
tgaaactacaggtttaggatcttag

SEQ ID NO: 4812091 - DNA, 25 bp, Homo sapien
caacataaggtagcacactagcttc

SEQ ID NO: 4812092 - DNA, 25 bp, Homo sapien
tttctaagactaaaagatcaagtca

SEQ ID NO: 4812093 - DNA, 25 bp, Homo sapien
tataagcttctattaccagctgtga

SEQ ID NO: 4812094 - DNA, 25 bp, Homo sapien
gaaaggctgttatctgacacagtgc

SEQ ID NO: 4812095 - DNA, 25 bp, Homo sapien
gacacagtgcgcttcattggctgag

SEQ ID NO: 4812096 - DNA, 25 bp, Homo sapien
atttgccaccaaatttgaggtctgg

SEQ ID NO: 4812097 - DNA, 25 bp, Homo sapien
tgcatatgtcttcatggactctccc

SEQ ID NO: 4812098 - DNA, 25 bp, Homo sapien
caatgattgggatcacctgccgatc

SEQ ID NO: 4812099 - DNA, 25 bp, Homo sapien
gcttttactattccatccaggcact

SEQ ID NO: 4812100 - DNA, 25 bp, Homo sapien
gatcaattgattcggctgcttttac

SEQ ID NO: 4812101 - DNA, 25 bp, Homo sapien
tgtataaagtaagtttggtccatta

SEQ ID NO: 4812102 - DNA, 25 bp, Homo sapien
tgtttttcggcagcattgttacctc

SEQ ID NO: 4812103 - DNA, 25 bp, Homo sapien
cggcagcattgttacctctaacaag

SEQ ID NO: 4812104 - DNA, 25 bp, Homo sapien
caaagttgtttttcggcagcattgt

SEQ ID NO: 4812105 - DNA, 25 bp, Homo sapien
aaaatgggttagagttagagcggct

SEQ ID NO: 4812106 - DNA, 25 bp, Homo sapien
aatggatgagtaatctgctttgctg

SEQ ID NO: 4812107 - DNA, 25 bp, Homo sapien
tcatgctgctcatggttgaatttct

SEQ ID NO: 4812108 - DNA, 25 bp, Homo sapien
ttgaatttctggagaatggatgagt

SEQ ID NO: 4812109 - DNA, 25 bp, Homo sapien
tggggatgtgagtatggtaatattc

SEQ ID NO: 4812110 - DNA, 25 bp, Homo sapien
tgacgtatttgagcttgttgtcggg

SEQ ID NO: 4812111 - DNA, 25 bp, Homo sapien
gacgtatttgagcttgttgtcgggc

SEQ ID NO: 4812112 - DNA, 25 bp, Homo sapien
ttggtgacgtatttgagcttgttgt

SEQ ID NO: 4812113 - DNA, 25 bp, Homo sapien
ggtgacgtatttgagcttgttgtcg

SEQ ID NO: 4812114 - DNA, 25 bp, Homo sapien
cacaatttgaggtccacacaaggca

SEQ ID NO: 4812115 - DNA, 25 bp, Homo sapien
gattgatcacatacctaaaaaaggg

SEQ ID NO: 4812116 - DNA, 25 bp, Homo sapien
taggctgtcttccaacataaccagg

SEQ ID NO: 4812117 - DNA, 25 bp, Homo sapien
tatgaaccactgacctaaggagact

SEQ ID NO: 4812118 - DNA, 25 bp, Homo sapien
tgaggcaccatatgccaggcctgtt

SEQ ID NO: 4812119 - DNA, 25 bp, Homo sapien
tggtagcccaaacaacagtcaatgt

SEQ ID NO: 4812120 - DNA, 25 bp, Homo sapien
tattttacagtatcgctggtagccc

SEQ ID NO: 4812121 - DNA, 25 bp, Homo sapien
catgaggcatgtggtataaccgagt

SEQ ID NO: 4812122 - DNA, 25 bp, Homo sapien
tagaaattcagcacgagcttggaga

SEQ ID NO: 4812123 - DNA, 25 bp, Homo sapien
ccagtattgtaggtggagggccact

SEQ ID NO: 4812124 - DNA, 25 bp, Homo sapien
tggtttctcacgcatggtcattggc

SEQ ID NO: 4812125 - DNA, 25 bp, Homo sapien
ggagcttgccaaaacaatgagtctg

SEQ ID NO: 4812126 - DNA, 25 bp, Homo sapien
tgtctggcagaaacactataaaacc

SEQ ID NO: 4812127 - DNA, 25 bp, Homo sapien
tacagatggtgcaagattccccaag

SEQ ID NO: 4812128 - DNA, 25 bp, Homo sapien
gcttcagcctgtgctagtacagatg

SEQ ID NO: 4812129 - DNA, 25 bp, Homo sapien
aaccaccatgagagctgatgcgata

SEQ ID NO: 4812130 - DNA, 25 bp, Homo sapien
tttaaatatctttcacaaactgttc

SEQ ID NO: 4812131 - DNA, 25 bp, Homo sapien
ctgcatccggcccatttggctttaa

SEQ ID NO: 4812132 - DNA, 25 bp, Homo sapien
aatatctttcacaaactgttctcat

SEQ ID NO: 4812133 - DNA, 25 bp, Homo sapien
catccggcccatttggctttaaata

SEQ ID NO: 4812134 - DNA, 25 bp, Homo sapien
agctaggtcccacagagtcccctgt

SEQ ID NO: 4812135 - DNA, 25 bp, Homo sapien
gcaggcaggtcaacgtcggcaacat

SEQ ID NO: 4812136 - DNA, 25 bp, Homo sapien
ctggcaggcaggtcaacgtcggcaa

SEQ ID NO: 4812137 - DNA, 25 bp, Homo sapien
tgtcctggcaggcaggtcaacgtcg

SEQ ID NO: 4812138 - DNA, 25 bp, Homo sapien
gccctggatgaagttgtctctacct

SEQ ID NO: 4812139 - DNA, 25 bp, Homo sapien
cctcagtgccctggatgaagttgtc

SEQ ID NO: 4812140 - DNA, 25 bp, Homo sapien
gtgccctggatgaagttgtctctac

SEQ ID NO: 4812141 - DNA, 25 bp, Homo sapien
tcagtgccctggatgaagttgtctc

SEQ ID NO: 4812142 - DNA, 25 bp, Homo sapien
catggttccttgagttttccctgcc

SEQ ID NO: 4812143 - DNA, 25 bp, Homo sapien
cccaaaacagagagtaaggatgtct

SEQ ID NO: 4812144 - DNA, 25 bp, Homo sapien
gatgacctatcccaacatgtactgc

SEQ ID NO: 4812145 - DNA, 25 bp, Homo sapien
gatgtctagtccacctcgttgaaag

SEQ ID NO: 4812146 - DNA, 25 bp, Homo sapien
cgttcccagtgctgtgtggctggct

SEQ ID NO: 4812147 - DNA, 25 bp, Homo sapien
gttcccagtgctgtgtggctggctg

SEQ ID NO: 4812148 - DNA, 25 bp, Homo sapien
gcttgacgctgacataagccttcac

SEQ ID NO: 4812149 - DNA, 25 bp, Homo sapien
tcagaaatcataatgggagatgaca

SEQ ID NO: 4812150 - DNA, 25 bp, Homo sapien
aaactgcctccagttagcttgacgc

SEQ ID NO: 4812151 - DNA, 25 bp, Homo sapien
taaaaaactgacagaacagtcaaag

SEQ ID NO: 4812152 - DNA, 25 bp, Homo sapien
tttagtataacccagaagtcttgct

SEQ ID NO: 4812153 - DNA, 25 bp, Homo sapien
attttagtataacccagaagtcttg

SEQ ID NO: 4812154 - DNA, 25 bp, Homo sapien
tgacttgtaccttcttatataattt

SEQ ID NO: 4812155 - DNA, 25 bp, Homo sapien
ggtgacttgtaccttcttatataat

SEQ ID NO: 4812156 - DNA, 25 bp, Homo sapien
tctggtccccacaatggttgacaca

SEQ ID NO: 4812157 - DNA, 25 bp, Homo sapien
gattccccatgtagcgccttttgtg

SEQ ID NO: 4812158 - DNA, 25 bp, Homo sapien
ctaagtctccactttatcaccctgg

SEQ ID NO: 4812159 - DNA, 25 bp, Homo sapien
attctaacaccgaagattccccaca

SEQ ID NO: 4812160 - DNA, 25 bp, Homo sapien
gcaatcgcgttcaaatcgcctttta

SEQ ID NO: 4812161 - DNA, 25 bp, Homo sapien
ttcaacatccgcttttgtgacattg

SEQ ID NO: 4812162 - DNA, 25 bp, Homo sapien
tctcaaagtactgctgcgccctgtc

SEQ ID NO: 4812163 - DNA, 25 bp, Homo sapien
tgtccgcctctttgcaatcgcgttc

SEQ ID NO: 4812164 - DNA, 25 bp, Homo sapien
ttccagcaagtctcgatgtgctgct

SEQ ID NO: 4812165 - DNA, 25 bp, Homo sapien
gcttccagcaagtctcgatgtgctg

SEQ ID NO: 4812166 - DNA, 25 bp, Homo sapien
tgtgctgctgtgctttacggccatc

SEQ ID NO: 4812167 - DNA, 25 bp, Homo sapien
tgcttccagcaagtctcgatgtgct

SEQ ID NO: 4812168 - DNA, 25 bp, Homo sapien
aggtaagcattggtgttaggggtgc

SEQ ID NO: 4812169 - DNA, 25 bp, Homo sapien
ggtaagcattggtgttaggggtgca

SEQ ID NO: 4812170 - DNA, 25 bp, Homo sapien
aaggtaagcattggtgttaggggtg

SEQ ID NO: 4812171 - DNA, 25 bp, Homo sapien
ttaggagattgtgggtgatgcccat

SEQ ID NO: 4812172 - DNA, 25 bp, Homo sapien
ctgcaattatcatcgtaccatttca

SEQ ID NO: 4812173 - DNA, 25 bp, Homo sapien
gggcttaggagattgtgggtgatgc

SEQ ID NO: 4812174 - DNA, 25 bp, Homo sapien
actgcaattatcatcgtaccatttc

SEQ ID NO: 4812175 - DNA, 25 bp, Homo sapien
cactgcaattaggtacaacagctgc

SEQ ID NO: 4812176 - DNA, 25 bp, Homo sapien
tgctatgagaatgtttagtattcac

SEQ ID NO: 4812177 - DNA, 25 bp, Homo sapien
acagacagaacagacaaactcacac

SEQ ID NO: 4812178 - DNA, 25 bp, Homo sapien
cagaacagacaaactcacacaaatg

SEQ ID NO: 4812179 - DNA, 25 bp, Homo sapien
tgtttgaggaacagctggatgccag

SEQ ID NO: 4812180 - DNA, 25 bp, Homo sapien
tagagacttgcataaaacgtgggag

SEQ ID NO: 4812181 - DNA, 25 bp, Homo sapien
gccagtgccactagaccaaggtaaa

SEQ ID NO: 4812182 - DNA, 25 bp, Homo sapien
aagggtctgaggaataccctccaag

SEQ ID NO: 4812183 - DNA, 25 bp, Homo sapien
catctcagataagctaattccacac

SEQ ID NO: 4812184 - DNA, 25 bp, Homo sapien
tcatgtatgctttgacctcacagtc

SEQ ID NO: 4812185 - DNA, 25 bp, Homo sapien
tgactcaatgttcaaaagttgctga

SEQ ID NO: 4812186 - DNA, 25 bp, Homo sapien
cacccatgttgatcatttcagtgac

SEQ ID NO: 4812187 - DNA, 25 bp, Homo sapien
aagtggaacccactaggtgaagaag

SEQ ID NO: 4812188 - DNA, 25 bp, Homo sapien
gtgaagaagctataggacctccttg

SEQ ID NO: 4812189 - DNA, 25 bp, Homo sapien
aatgcaattgccctaagtggaaccc

SEQ ID NO: 4812190 - DNA, 25 bp, Homo sapien
gaagctataggacctccttgtccag

SEQ ID NO: 4812191 - DNA, 25 bp, Homo sapien
ctagatacttaagtagaagtagtaa

SEQ ID NO: 4812192 - DNA, 25 bp, Homo sapien
gaccttttgatatgcccacctccgc

SEQ ID NO: 4812193 - DNA, 25 bp, Homo sapien
aatacagtatatgtgcagaataaaa

SEQ ID NO: 4812194 - DNA, 25 bp, Homo sapien
aaatgaactgcgttgtgatacaaaa

SEQ ID NO: 4812195 - DNA, 25 bp, Homo sapien
aactctgttatgctgtgtgcgccaa

SEQ ID NO: 4812196 - DNA, 25 bp, Homo sapien
taacaagccctgatcgagaagctct

SEQ ID NO: 4812197 - DNA, 25 bp, Homo sapien
taaggtggctataatcagcctcagc

SEQ ID NO: 4812198 - DNA, 25 bp, Homo sapien
agtatactggaacgttgtgctggga

SEQ ID NO: 4812199 - DNA, 25 bp, Homo sapien
aaggggtttcatcacgttgccaggc

SEQ ID NO: 4812200 - DNA, 25 bp, Homo sapien
agaaggggtttcatcacgttgccag

SEQ ID NO: 4812201 - DNA, 25 bp, Homo sapien
gaaggggtttcatcacgttgccagg

SEQ ID NO: 4812202 - DNA, 25 bp, Homo sapien
gagaaggggtttcatcacgttgcca

SEQ ID NO: 4812203 - DNA, 25 bp, Homo sapien
cagcatccttgaaggtatgtcgaaa

SEQ ID NO: 4812204 - DNA, 25 bp, Homo sapien
ctccagcatccttgaaggtatgtcg

SEQ ID NO: 4812205 - DNA, 25 bp, Homo sapien
gatgttcatactgtttactccagca

SEQ ID NO: 4812206 - DNA, 25 bp, Homo sapien
atgaggatgttcatactgtttactc

SEQ ID NO: 4812207 - DNA, 25 bp, Homo sapien
aaaaaaccatgcctacaaacacgca

SEQ ID NO: 4812208 - DNA, 25 bp, Homo sapien
tacaaacacgcactgccccgagagg

SEQ ID NO: 4812209 - DNA, 25 bp, Homo sapien
actgccccgagagggaagcagcctg

SEQ ID NO: 4812210 - DNA, 25 bp, Homo sapien
aaaccatgcctacaaacacgcactg

SEQ ID NO: 4812211 - DNA, 25 bp, Homo sapien
tgtgctccagggtccatatcttggg

SEQ ID NO: 4812212 - DNA, 25 bp, Homo sapien
ccagggtccatatcttgggtaaaat

SEQ ID NO: 4812213 - DNA, 25 bp, Homo sapien
ctgtgctccagggtccatatcttgg

SEQ ID NO: 4812214 - DNA, 25 bp, Homo sapien
gctccagggtccatatcttgggtaa

SEQ ID NO: 4812215 - DNA, 25 bp, Homo sapien
tgtgtttggtccatcttttaggaag

SEQ ID NO: 4812216 - DNA, 25 bp, Homo sapien
tgtttggtccatcttttaggaagaa

SEQ ID NO: 4812217 - DNA, 25 bp, Homo sapien
gtgtttggtccatcttttaggaaga

SEQ ID NO: 4812218 - DNA, 25 bp, Homo sapien
gatctgtgatgccatgttctcggag

SEQ ID NO: 4812219 - DNA, 25 bp, Homo sapien
taatcattcatttcgttcaggttgg

SEQ ID NO: 4812220 - DNA, 25 bp, Homo sapien
tctcggagataacttcatgctgccc

SEQ ID NO: 4812221 - DNA, 25 bp, Homo sapien
ttcctgaacatagcgtgccaagtcc

SEQ ID NO: 4812222 - DNA, 25 bp, Homo sapien
gtattcttcttcctccttcgagttc

SEQ ID NO: 4812223 - DNA, 25 bp, Homo sapien
attcttcttcctccttcgagttctt

SEQ ID NO: 4812224 - DNA, 25 bp, Homo sapien
ttgtattcttcttcctccttcgagt

SEQ ID NO: 4812225 - DNA, 25 bp, Homo sapien
tgtattcttcttcctccttcgagtt

SEQ ID NO: 4812226 - DNA, 25 bp, Homo sapien
agtgatccccctgcacctgggtgat

SEQ ID NO: 4812227 - DNA, 25 bp, Homo sapien
ccctcaggtgagtggaggaaaatct

SEQ ID NO: 4812228 - DNA, 25 bp, Homo sapien
ggtgatgctagggtttttgacctaa

SEQ ID NO: 4812229 - DNA, 25 bp, Homo sapien
aggaaggatgcagctaccctcaggt

SEQ ID NO: 4812230 - DNA, 25 bp, Homo sapien
gtttactgagaaacaagctgctcca

SEQ ID NO: 4812231 - DNA, 25 bp, Homo sapien
cctgggtgcccggttacatgagtgt

SEQ ID NO: 4812232 - DNA, 25 bp, Homo sapien
gagtgtgttcacactgtcaaaattc

SEQ ID NO: 4812233 - DNA, 25 bp, Homo sapien
aaactcagcaaatatcttgttgaaa

SEQ ID NO: 4812234 - DNA, 25 bp, Homo sapien
atagctgagttcaatctctgtcctt

SEQ ID NO: 4812235 - DNA, 25 bp, Homo sapien
tagctgagttcaatctctgtccttt

SEQ ID NO: 4812236 - DNA, 25 bp, Homo sapien
gagaagttatggtctttccctgtga

SEQ ID NO: 4812237 - DNA, 25 bp, Homo sapien
actgctgcagcactgacttgacagc

SEQ ID NO: 4812238 - DNA, 25 bp, Homo sapien
ctgctgcagcactgacttgacagca

SEQ ID NO: 4812239 - DNA, 25 bp, Homo sapien
aactgctgcagcactgacttgacag

SEQ ID NO: 4812240 - DNA, 25 bp, Homo sapien
gaactgctgcagcactgacttgaca

SEQ ID NO: 4812241 - DNA, 25 bp, Homo sapien
acactgctccttgaattcaaaccaa

SEQ ID NO: 4812242 - DNA, 25 bp, Homo sapien
aaaccaaccaaaggtgtgtgccagg

SEQ ID NO: 4812243 - DNA, 25 bp, Homo sapien
ttcaaaccaaccaaaggtgtgtgcc

SEQ ID NO: 4812244 - DNA, 25 bp, Homo sapien
actgctccttgaattcaaaccaacc

SEQ ID NO: 4812245 - DNA, 25 bp, Homo sapien
ttggcattgttcaggtagttctaac

SEQ ID NO: 4812246 - DNA, 25 bp, Homo sapien
aggtgctcttggcattgttcaggta

SEQ ID NO: 4812247 - DNA, 25 bp, Homo sapien
caggaggtgctcttggcattgttca

SEQ ID NO: 4812248 - DNA, 25 bp, Homo sapien
tgctcttggcattgttcaggtagtt

SEQ ID NO: 4812249 - DNA, 25 bp, Homo sapien
tcacaatacctgattcatcacatcc

SEQ ID NO: 4812250 - DNA, 25 bp, Homo sapien
tttcttcttcacaatacctgattca

SEQ ID NO: 4812251 - DNA, 25 bp, Homo sapien
caatacctgattcatcacatccccc

SEQ ID NO: 4812252 - DNA, 25 bp, Homo sapien
gagtttcttcttcacaatacctgat

SEQ ID NO: 4812253 - DNA, 25 bp, Homo sapien
atcagtcaagacatactgcactacc

SEQ ID NO: 4812254 - DNA, 25 bp, Homo sapien
agtcaagacatactgcactaccaat

SEQ ID NO: 4812255 - DNA, 25 bp, Homo sapien
tcaagacatactgcactaccaatct

SEQ ID NO: 4812256 - DNA, 25 bp, Homo sapien
tcagtcaagacatactgcactacca

SEQ ID NO: 4812257 - DNA, 25 bp, Homo sapien
ctgggcccggctaatactcttccct

SEQ ID NO: 4812258 - DNA, 25 bp, Homo sapien
ggtgtgcgttagcacgcccaactaa

SEQ ID NO: 4812259 - DNA, 25 bp, Homo sapien
ttgatagagacaggggttggccgtg

SEQ ID NO: 4812260 - DNA, 25 bp, Homo sapien
tgccgccttgatctcctcaggctcg

SEQ ID NO: 4812261 - DNA, 25 bp, Homo sapien
gccgtgttgcccagtgtaatcccag

SEQ ID NO: 4812262 - DNA, 25 bp, Homo sapien
catggtagctttgtccttgaataaa

SEQ ID NO: 4812263 - DNA, 25 bp, Homo sapien
aatgtccccttttgtgactcagtgg

SEQ ID NO: 4812264 - DNA, 25 bp, Homo sapien
attggcatggctcatatttcaagga

SEQ ID NO: 4812265 - DNA, 25 bp, Homo sapien
taaatcactcccaaaacttgatggg

SEQ ID NO: 4812266 - DNA, 25 bp, Homo sapien
cggaaaaaccaggattccaggtatg

SEQ ID NO: 4812267 - DNA, 25 bp, Homo sapien
aaaccaggattccaggtatgggcca

SEQ ID NO: 4812268 - DNA, 25 bp, Homo sapien
ccaggattccaggtatgggccacca

SEQ ID NO: 4812269 - DNA, 25 bp, Homo sapien
caggattccaggtatgggccaccat

SEQ ID NO: 4812270 - DNA, 25 bp, Homo sapien
tccttcaggactccacttggatgcc

SEQ ID NO: 4812271 - DNA, 25 bp, Homo sapien
cttcaggactccacttggatgccat

SEQ ID NO: 4812272 - DNA, 25 bp, Homo sapien
tagtccttcaggactccacttggat

SEQ ID NO: 4812273 - DNA, 25 bp, Homo sapien
gtccttcaggactccacttggatgc

SEQ ID NO: 4812274 - DNA, 25 bp, Homo sapien
tacacatatacacttatgaaatcta

SEQ ID NO: 4812275 - DNA, 25 bp, Homo sapien
ttccagaaatttccatatctgttcc

SEQ ID NO: 4812276 - DNA, 25 bp, Homo sapien
aatgtccttgcccaaacatttccag

SEQ ID NO: 4812277 - DNA, 25 bp, Homo sapien
ttaaaagtcagtcatggtgaagaat

SEQ ID NO: 4812278 - DNA, 25 bp, Homo sapien
gcccaagtatactgctaaaaattag

SEQ ID NO: 4812279 - DNA, 25 bp, Homo sapien
catgctattaatatgacctcctgaa

SEQ ID NO: 4812280 - DNA, 25 bp, Homo sapien
ctgcttaccgcaggagagttctaca

SEQ ID NO: 4812281 - DNA, 25 bp, Homo sapien
tgtccaaagcaacgatttccaggca

SEQ ID NO: 4812282 - DNA, 25 bp, Homo sapien
ttctcatggagaagtaaggatggca

SEQ ID NO: 4812283 - DNA, 25 bp, Homo sapien
ccaccatggttcagggagtattatc

SEQ ID NO: 4812284 - DNA, 25 bp, Homo sapien
tagctgcttagtgggtgatacttga

SEQ ID NO: 4812285 - DNA, 25 bp, Homo sapien
tctgtctaatgtacaaagtgagggc

SEQ ID NO: 4812286 - DNA, 25 bp, Homo sapien
gaataatgcaagcaattgccgctgt

SEQ ID NO: 4812287 - DNA, 25 bp, Homo sapien
ccagatattccccaagctgttcttg

SEQ ID NO: 4812288 - DNA, 25 bp, Homo sapien
tcactgaactgtccaccaaggtatt

SEQ ID NO: 4812289 - DNA, 25 bp, Homo sapien
ggtgctggcaatataggcctgagcc

SEQ ID NO: 4812290 - DNA, 25 bp, Homo sapien
ctcctgctcgggccaaggcggacga

SEQ ID NO: 4812291 - DNA, 25 bp, Homo sapien
caaggcggacgaggggcattggaac

SEQ ID NO: 4812292 - DNA, 25 bp, Homo sapien
gcggggaaacgcagcgcgcgccccg

SEQ ID NO: 4812293 - DNA, 25 bp, Homo sapien
ggaccccgaccagcgcgccctcgcc

SEQ ID NO: 4812294 - DNA, 25 bp, Homo sapien
gcgaaggggcgctccgcgcggcggg

SEQ ID NO: 4812295 - DNA, 25 bp, Homo sapien
tccccgccgctccacagcaaaatgg

SEQ ID NO: 4812296 - DNA, 25 bp, Homo sapien
gagatccccgcgacggcggaaagcc

SEQ ID NO: 4812297 - DNA, 25 bp, Homo sapien
ggcgatccctttgccccccgagatc

SEQ ID NO: 4812298 - DNA, 25 bp, Homo sapien
gatgcacttggaggcattcccgaca

SEQ ID NO: 4812299 - DNA, 25 bp, Homo sapien
caagttatacactagggtcgtcagg

SEQ ID NO: 4812300 - DNA, 25 bp, Homo sapien
ggaccgcctgcctgaacttacagtt

SEQ ID NO: 4812301 - DNA, 25 bp, Homo sapien
tactagggactcaagaaagcaatca

SEQ ID NO: 4812302 - DNA, 25 bp, Homo sapien
taggagatcagtctttccagcccct

SEQ ID NO: 4812303 - DNA, 25 bp, Homo sapien
tgttgccaggagaagcaggcataac

SEQ ID NO: 4812304 - DNA, 25 bp, Homo sapien
cagcactggtatgaccctatgtagg

SEQ ID NO: 4812305 - DNA, 25 bp, Homo sapien
gatatcctcttaaacccctggacag

SEQ ID NO: 4812306 - DNA, 25 bp, Homo sapien
ggagcccaaggtcgcttccaaagct

SEQ ID NO: 4812307 - DNA, 25 bp, Homo sapien
gacttcctaggtcgcaatctccagg

SEQ ID NO: 4812308 - DNA, 25 bp, Homo sapien
ttccaaagctcagcgaggcggaggt

SEQ ID NO: 4812309 - DNA, 25 bp, Homo sapien
tctccaggaaaacgaccacagggtc

SEQ ID NO: 4812310 - DNA, 25 bp, Homo sapien
cccggccgataggtaggcttttgtg

SEQ ID NO: 4812311 - DNA, 25 bp, Homo sapien
ggccgataggtaggcttttgtgccc

SEQ ID NO: 4812312 - DNA, 25 bp, Homo sapien
tgcgcccggccgataggtaggcttt

SEQ ID NO: 4812313 - DNA, 25 bp, Homo sapien
gataggtaggcttttgtgcccatct

SEQ ID NO: 4812314 - DNA, 25 bp, Homo sapien
gctcatatcaccgttctctgggaag

SEQ ID NO: 4812315 - DNA, 25 bp, Homo sapien
gtgtaggttaatgcctgtgcaccat

SEQ ID NO: 4812316 - DNA, 25 bp, Homo sapien
gtctgtccaacttgactgcagttaa

SEQ ID NO: 4812317 - DNA, 25 bp, Homo sapien
aaactatgtcgttcagtctgtccaa

SEQ ID NO: 4812318 - DNA, 25 bp, Homo sapien
ctcctgactcgtctacctgttcggt

SEQ ID NO: 4812319 - DNA, 25 bp, Homo sapien
gcccgttgatgaattcctcccttct

SEQ ID NO: 4812320 - DNA, 25 bp, Homo sapien
tgactcgtctacctgttcggtcctc

SEQ ID NO: 4812321 - DNA, 25 bp, Homo sapien
tgtgtttctctttgctcgatcctgc

SEQ ID NO: 4812322 - DNA, 25 bp, Homo sapien
taaggaagcacccatttctcatcag

SEQ ID NO: 4812323 - DNA, 25 bp, Homo sapien
gaagcacccatttctcatcagcaaa

SEQ ID NO: 4812324 - DNA, 25 bp, Homo sapien
ctcatcagcaaatatcacaaatact

SEQ ID NO: 4812325 - DNA, 25 bp, Homo sapien
ttctcatcagcaaatatcacaaata

SEQ ID NO: 4812326 - DNA, 25 bp, Homo sapien
gatgtattctgaagagccttagctt

SEQ ID NO: 4812327 - DNA, 25 bp, Homo sapien
aacggcttcattccgaggtgccgcc

SEQ ID NO: 4812328 - DNA, 25 bp, Homo sapien
taaacaatcccggttggctggctgc

SEQ ID NO: 4812329 - DNA, 25 bp, Homo sapien
cagagttgatggaggaacggcttca

SEQ ID NO: 4812330 - DNA, 25 bp, Homo sapien
taatattctgtgagacagcatggga

SEQ ID NO: 4812331 - DNA, 25 bp, Homo sapien
catgcgaggcatttgttagggcagc

SEQ ID NO: 4812332 - DNA, 25 bp, Homo sapien
caggctgtggtaccagaatctgcca

SEQ ID NO: 4812333 - DNA, 25 bp, Homo sapien
gaaattgccggcaccgtcacgtgat

SEQ ID NO: 4812334 - DNA, 25 bp, Homo sapien
ggttgcgtcccaagtctcactggca

SEQ ID NO: 4812335 - DNA, 25 bp, Homo sapien
ggcatagctcacagcattgcggctg

SEQ ID NO: 4812336 - DNA, 25 bp, Homo sapien
cccagctgcagggttgcgtcccaag

SEQ ID NO: 4812337 - DNA, 25 bp, Homo sapien
ccaagtctcactggcatagctcaca

SEQ ID NO: 4812338 - DNA, 25 bp, Homo sapien
catccactcctcgatcgctctgcat

SEQ ID NO: 4812339 - DNA, 25 bp, Homo sapien
ctgtcttcaacttcattgccttgtt

SEQ ID NO: 4812340 - DNA, 25 bp, Homo sapien
ttcaacttcattgccttgttgctct

SEQ ID NO: 4812341 - DNA, 25 bp, Homo sapien
cctagcagccactgaggtgggatca

SEQ ID NO: 4812342 - DNA, 25 bp, Homo sapien
gatgaggcgatagactccttggcaa

SEQ ID NO: 4812343 - DNA, 25 bp, Homo sapien
gattccacgcgtatgtctgggctca

SEQ ID NO: 4812344 - DNA, 25 bp, Homo sapien
gccagcgttgggtgttcagattcca

SEQ ID NO: 4812345 - DNA, 25 bp, Homo sapien
catgctgggttttgcaagcgaggaa

SEQ ID NO: 4812346 - DNA, 25 bp, Homo sapien
ggcatctacctgagttgacgctaat

SEQ ID NO: 4812347 - DNA, 25 bp, Homo sapien
tctggcagggcgtttttaaaaggca

SEQ ID NO: 4812348 - DNA, 25 bp, Homo sapien
gaacgtagttatcggtcggcaggct

SEQ ID NO: 4812349 - DNA, 25 bp, Homo sapien
taatggcttcctcgctatagaagtg

SEQ ID NO: 4812350 - DNA, 25 bp, Homo sapien
tgtcttgtgaaccagtgtcggggca

SEQ ID NO: 4812351 - DNA, 25 bp, Homo sapien
tactgctgtcctgcttacgctggag

SEQ ID NO: 4812352 - DNA, 25 bp, Homo sapien
tggaggcgggcgatgtcttgtgaac

SEQ ID NO: 4812353 - DNA, 25 bp, Homo sapien
tgtggcagcgcaattaagacccaga

SEQ ID NO: 4812354 - DNA, 25 bp, Homo sapien
aatgcaccttctgcatcggttagca

SEQ ID NO: 4812355 - DNA, 25 bp, Homo sapien
tgtgacaggcgcaaatgcaccttct

SEQ ID NO: 4812356 - DNA, 25 bp, Homo sapien
gcgcagagcccgcactgtgacaggc

SEQ ID NO: 4812357 - DNA, 25 bp, Homo sapien
ccttctgcatcggttagcaatagct

SEQ ID NO: 4812358 - DNA, 25 bp, Homo sapien
atgtgaatgaaactgcgccgggtgc

SEQ ID NO: 4812359 - DNA, 25 bp, Homo sapien
aaaatggctctgttggttactgccg

SEQ ID NO: 4812360 - DNA, 25 bp, Homo sapien
aatcaagatgaaacgtgcccgtcac

SEQ ID NO: 4812361 - DNA, 25 bp, Homo sapien
gattccagcgtagtctcatttgcct

SEQ ID NO: 4812362 - DNA, 25 bp, Homo sapien
tttctggagaccttgcctgtgccgc

SEQ ID NO: 4812363 - DNA, 25 bp, Homo sapien
caaggtttcccagttagtggccatg

SEQ ID NO: 4812364 - DNA, 25 bp, Homo sapien
cctgtgccgcaaagcatgagtagga

SEQ ID NO: 4812365 - DNA, 25 bp, Homo sapien
tccagtggtcctcaaacagcaagca

SEQ ID NO: 4812366 - DNA, 25 bp, Homo sapien
ttacgggacagaagtcggcggctct

SEQ ID NO: 4812367 - DNA, 25 bp, Homo sapien
cacacagctcttacgggacagaagt

SEQ ID NO: 4812368 - DNA, 25 bp, Homo sapien
cttgcacacagctcttacgggacag

SEQ ID NO: 4812369 - DNA, 25 bp, Homo sapien
cagctcttacgggacagaagtcggc

SEQ ID NO: 4812370 - DNA, 25 bp, Homo sapien
cagtcgggaccaggtgagagaccgc

SEQ ID NO: 4812371 - DNA, 25 bp, Homo sapien
tgcagtcgggaccaggtgagagacc

SEQ ID NO: 4812372 - DNA, 25 bp, Homo sapien
ggcattgcagtcgggaccaggtgag

SEQ ID NO: 4812373 - DNA, 25 bp, Homo sapien
gtgagagaccgcaggcaggtgctgg

SEQ ID NO: 4812374 - DNA, 25 bp, Homo sapien
gggtccccttgcagttcaggtctct

SEQ ID NO: 4812375 - DNA, 25 bp, Homo sapien
ggggtccccttgcagttcaggtctc

SEQ ID NO: 4812376 - DNA, 25 bp, Homo sapien
tgaacctacaccagcgtcctgggag

SEQ ID NO: 4812377 - DNA, 25 bp, Homo sapien
ccttcagtgcctatggcgggctgga

SEQ ID NO: 4812378 - DNA, 25 bp, Homo sapien
gaagacgcaggtcatacgaagctgg

SEQ ID NO: 4812379 - DNA, 25 bp, Homo sapien
tccagtaagaccacccctgagggtg

SEQ ID NO: 4812380 - DNA, 25 bp, Homo sapien
cctaaggaaagaaagcgcagacttc

SEQ ID NO: 4812381 - DNA, 25 bp, Homo sapien
gaggctggcattggctttgccctcc

SEQ ID NO: 4812382 - DNA, 25 bp, Homo sapien
ggaaagaaagcgcagacttcctgga

SEQ ID NO: 4812383 - DNA, 25 bp, Homo sapien
agaaagcgcagacttcctggaggct

SEQ ID NO: 4812384 - DNA, 25 bp, Homo sapien
gggtcggtgtgacccacttgggagc

SEQ ID NO: 4812385 - DNA, 25 bp, Homo sapien
catggtggggcgtttctgagaatcc

SEQ ID NO: 4812386 - DNA, 25 bp, Homo sapien
gtttctgagaatccgtcctgagccc

SEQ ID NO: 4812387 - DNA, 25 bp, Homo sapien
ttgggagctgcaccttaaactgctc

SEQ ID NO: 4812388 - DNA, 25 bp, Homo sapien
caggaatcgagcttgcgccctgcat

SEQ ID NO: 4812389 - DNA, 25 bp, Homo sapien
gatgaaatgatgagtaagcctggct

SEQ ID NO: 4812390 - DNA, 25 bp, Homo sapien
taaggttcaacatcgttcagcacac

SEQ ID NO: 4812391 - DNA, 25 bp, Homo sapien
tgccacacgggagagaacagtactg

SEQ ID NO: 4812392 - DNA, 25 bp, Homo sapien
ctgtccctcggtccccttactctgc

SEQ ID NO: 4812393 - DNA, 25 bp, Homo sapien
ttgcagccatctcgctgtccctcgg

SEQ ID NO: 4812394 - DNA, 25 bp, Homo sapien
ctttgcagccatctcgctgtccctc

SEQ ID NO: 4812395 - DNA, 25 bp, Homo sapien
tgcagccatctcgctgtccctcggt

SEQ ID NO: 4812396 - DNA, 25 bp, Homo sapien
gctagagtgactcgcaacctctggg

SEQ ID NO: 4812397 - DNA, 25 bp, Homo sapien
tatgctccgtcgaccaaattcaact

SEQ ID NO: 4812398 - DNA, 25 bp, Homo sapien
ccggcgcactgtgggctggtttcca

SEQ ID NO: 4812399 - DNA, 25 bp, Homo sapien
tagcagcttataacacagtgggaga

SEQ ID NO: 4812400 - DNA, 25 bp, Homo sapien
gaggcgtcggggagcctgagggtct

SEQ ID NO: 4812401 - DNA, 25 bp, Homo sapien
ctccccagataatgttggggcagaa

SEQ ID NO: 4812402 - DNA, 25 bp, Homo sapien
tccccagataatgttggggcagaat

SEQ ID NO: 4812403 - DNA, 25 bp, Homo sapien
ggctccccagataatgttggggcag

SEQ ID NO: 4812404 - DNA, 25 bp, Homo sapien
gctccccagataatgttggggcaga

SEQ ID NO: 4812405 - DNA, 25 bp, Homo sapien
cttaaggatggacttcatgtcattg

SEQ ID NO: 4812406 - DNA, 25 bp, Homo sapien
taaggatggacttcatgtcattgcc

SEQ ID NO: 4812407 - DNA, 25 bp, Homo sapien
ggatggacttcatgtcattgccaaa

SEQ ID NO: 4812408 - DNA, 25 bp, Homo sapien
gacttcatgtcattgccaaagggca

SEQ ID NO: 4812409 - DNA, 25 bp, Homo sapien
cgaagcctcgatactcactggggaa

SEQ ID NO: 4812410 - DNA, 25 bp, Homo sapien
aagcctcgatactcactggggaagg

SEQ ID NO: 4812411 - DNA, 25 bp, Homo sapien
cctcgatactcactggggaaggtga

SEQ ID NO: 4812412 - DNA, 25 bp, Homo sapien
gcctcgatactcactggggaaggtg

SEQ ID NO: 4812413 - DNA, 25 bp, Homo sapien
tcacgatagcgcctatcagcgttaa

SEQ ID NO: 4812414 - DNA, 25 bp, Homo sapien
aggaggtcacgatagcgcctatcag

SEQ ID NO: 4812415 - DNA, 25 bp, Homo sapien
tagcgcctatcagcgttaaatgcca

SEQ ID NO: 4812416 - DNA, 25 bp, Homo sapien
gaggtcacgatagcgcctatcagcg

SEQ ID NO: 4812417 - DNA, 25 bp, Homo sapien
tgggccacatcttgtggtctttggt

SEQ ID NO: 4812418 - DNA, 25 bp, Homo sapien
ccccgtgacttttagctccttgagg

SEQ ID NO: 4812419 - DNA, 25 bp, Homo sapien
tgaggtctgggccacatcttgtggt

SEQ ID NO: 4812420 - DNA, 25 bp, Homo sapien
catcttgtggtctttggtgtctgtg

SEQ ID NO: 4812421 - DNA, 25 bp, Homo sapien
agctccttgcccaggaggggtgcag

SEQ ID NO: 4812422 - DNA, 25 bp, Homo sapien
gtgcagggcagttgctggctttggc

SEQ ID NO: 4812423 - DNA, 25 bp, Homo sapien
tttggcacttctgagccaccgaggg

SEQ ID NO: 4812424 - DNA, 25 bp, Homo sapien
aagctggtgaggcatccaggccact

SEQ ID NO: 4812425 - DNA, 25 bp, Homo sapien
cccagcggctacttccaggggggat

SEQ ID NO: 4812426 - DNA, 25 bp, Homo sapien
tcgcatcaaagcccagcggctactt

SEQ ID NO: 4812427 - DNA, 25 bp, Homo sapien
atggatgggacccatcctcgtccac

SEQ ID NO: 4812428 - DNA, 25 bp, Homo sapien
atcctcgtccacactcgcatcaaag

SEQ ID NO: 4812429 - DNA, 25 bp, Homo sapien
agagcccagacccaccgagggaggc

SEQ ID NO: 4812430 - DNA, 25 bp, Homo sapien
gctggaacggtcagaggaactccag

SEQ ID NO: 4812431 - DNA, 25 bp, Homo sapien
aggccctgttaatttcacatgcagt

SEQ ID NO: 4812432 - DNA, 25 bp, Homo sapien
tgcaaggactgcctgcgttcctacc

SEQ ID NO: 4812433 - DNA, 25 bp, Homo sapien
tgttcatgtcttgccagtgaaagag

SEQ ID NO: 4812434 - DNA, 25 bp, Homo sapien
ctgttcatgtcttgccagtgaaaga

SEQ ID NO: 4812435 - DNA, 25 bp, Homo sapien
aggggaggccccccagcgaatgtct

SEQ ID NO: 4812436 - DNA, 25 bp, Homo sapien
cgttgcccggggacatggccgtggg

SEQ ID NO: 4812437 - DNA, 25 bp, Homo sapien
gggaggccccccagcgaatgtctgc

SEQ ID NO: 4812438 - DNA, 25 bp, Homo sapien
cagagcaggccgttgcccggggaca

SEQ ID NO: 4812439 - DNA, 25 bp, Homo sapien
ctgtcggcactctgagggctggcta

SEQ ID NO: 4812440 - DNA, 25 bp, Homo sapien
aggtaagcattttgtccctctctgc

SEQ ID NO: 4812441 - DNA, 25 bp, Homo sapien
cagcaggtaagcattttgtccctct

SEQ ID NO: 4812442 - DNA, 25 bp, Homo sapien
gcatcctgtcggcactctgagggct

SEQ ID NO: 4812443 - DNA, 25 bp, Homo sapien
ctgtgagctctgtaatcacctggaa

SEQ ID NO: 4812444 - DNA, 25 bp, Homo sapien
actgtgagctctgtaatcacctgga

SEQ ID NO: 4812445 - DNA, 25 bp, Homo sapien
gagcagctgccgcagtatcatcagc

SEQ ID NO: 4812446 - DNA, 25 bp, Homo sapien
gcagctgccgcagtatcatcagcat

SEQ ID NO: 4812447 - DNA, 25 bp, Homo sapien
agcagctgccgcagtatcatcagca

SEQ ID NO: 4812448 - DNA, 25 bp, Homo sapien
tcatcatatgccagcagctcactcg

SEQ ID NO: 4812449 - DNA, 25 bp, Homo sapien
gatcttcatcatatgccagcagctc

SEQ ID NO: 4812450 - DNA, 25 bp, Homo sapien
tatgccagcagctcactcgggtgcc

SEQ ID NO: 4812451 - DNA, 25 bp, Homo sapien
catcctggggacaaaattcttgggc

SEQ ID NO: 4812452 - DNA, 25 bp, Homo sapien
aaacaactaccttctgtcctagaag

SEQ ID NO: 4812453 - DNA, 25 bp, Homo sapien
cctgcgtggctaggatgattaatta

SEQ ID NO: 4812454 - DNA, 25 bp, Homo sapien
gctctcttgcgcgtgtgcttttgtt

SEQ ID NO: 4812455 - DNA, 25 bp, Homo sapien
tctgcctggtcaacgttatttgtcg

SEQ ID NO: 4812456 - DNA, 25 bp, Homo sapien
aggccactttgaagggtggattctt

SEQ ID NO: 4812457 - DNA, 25 bp, Homo sapien
tggattctttgaggcccctgccagt

SEQ ID NO: 4812458 - DNA, 25 bp, Homo sapien
cccaccaacatcctgcagggatggg

SEQ ID NO: 4812459 - DNA, 25 bp, Homo sapien
gatggggtcagtggttccaccttca

SEQ ID NO: 4812460 - DNA, 25 bp, Homo sapien
agcaccaacggctgaagtttctcag

SEQ ID NO: 4812461 - DNA, 25 bp, Homo sapien
tcagcaccaacggctgaagtttctc

SEQ ID NO: 4812462 - DNA, 25 bp, Homo sapien
cagcaccaacggctgaagtttctca

SEQ ID NO: 4812463 - DNA, 25 bp, Homo sapien
tgagggaggtctttcccaggtcaaa

SEQ ID NO: 4812464 - DNA, 25 bp, Homo sapien
ggaacgaacatggtggctttgggct

SEQ ID NO: 4812465 - DNA, 25 bp, Homo sapien
ggtccaatgggactgacactgttgt

SEQ ID NO: 4812466 - DNA, 25 bp, Homo sapien
gaggctcgatttgcctctctggtcc

SEQ ID NO: 4812467 - DNA, 25 bp, Homo sapien
aatgcggctcgcttcagatgctctg

SEQ ID NO: 4812468 - DNA, 25 bp, Homo sapien
cagatggtatgcttgcggaccgcag

SEQ ID NO: 4812469 - DNA, 25 bp, Homo sapien
taagcatgtggaccccttcggtgtg

SEQ ID NO: 4812470 - DNA, 25 bp, Homo sapien
cagtgatgccgcagaatcctgagcc

SEQ ID NO: 4812471 - DNA, 25 bp, Homo sapien
taacatcaaggcaagcgtacgtgtc

SEQ ID NO: 4812472 - DNA, 25 bp, Homo sapien
gcaagcgtacgtgtcaccctctgta

SEQ ID NO: 4812473 - DNA, 25 bp, Homo sapien
gtcaccctctgtactgacatctctt

SEQ ID NO: 4812474 - DNA, 25 bp, Homo sapien
gtacgtgtcaccctctgtactgaca

SEQ ID NO: 4812475 - DNA, 25 bp, Homo sapien
ctggtggtggtaagccgccaacgca

SEQ ID NO: 4812476 - DNA, 25 bp, Homo sapien
caccacatttctggcagcgtttccc

SEQ ID NO: 4812477 - DNA, 25 bp, Homo sapien
ttaagggcactgtgatgggaagcct

SEQ ID NO: 4812478 - DNA, 25 bp, Homo sapien
ccatccctggatagcaagtgaatta

SEQ ID NO: 4812479 - DNA, 25 bp, Homo sapien
tctgcggaataaacccaatggttaa

SEQ ID NO: 4812480 - DNA, 25 bp, Homo sapien
tgactcggtggctggcttccttcag

SEQ ID NO: 4812481 - DNA, 25 bp, Homo sapien
cctgttgtccctgttcctgcagtgg

SEQ ID NO: 4812482 - DNA, 25 bp, Homo sapien
ttggcatcttagcatccaggctcag

SEQ ID NO: 4812483 - DNA, 25 bp, Homo sapien
gctgtttccaccgaagcactgaaag

SEQ ID NO: 4812484 - DNA, 25 bp, Homo sapien
gcacgggcgcctgtctttggaaata

SEQ ID NO: 4812485 - DNA, 25 bp, Homo sapien
ataccaagctctggttcagaaggcc

SEQ ID NO: 4812486 - DNA, 25 bp, Homo sapien
gaaagtaaatctgtgcacgggcgcc

SEQ ID NO: 4812487 - DNA, 25 bp, Homo sapien
ctccaggttcattggtctggaggaa

SEQ ID NO: 4812488 - DNA, 25 bp, Homo sapien
cctccaggttcattggtctggagga

SEQ ID NO: 4812489 - DNA, 25 bp, Homo sapien
ctggcagatggtacccggacccatg

SEQ ID NO: 4812490 - DNA, 25 bp, Homo sapien
tacccggacccatggcttgcatgct

SEQ ID NO: 4812491 - DNA, 25 bp, Homo sapien
atggtacccggacccatggcttgca

SEQ ID NO: 4812492 - DNA, 25 bp, Homo sapien
agatggtacccggacccatggcttg

SEQ ID NO: 4812493 - DNA, 25 bp, Homo sapien
agggagcaccagcttggaggacaca

SEQ ID NO: 4812494 - DNA, 25 bp, Homo sapien
gaggacacatagccactcccagagc

SEQ ID NO: 4812495 - DNA, 25 bp, Homo sapien
ttgtcagttcctccgacttcctgct

SEQ ID NO: 4812496 - DNA, 25 bp, Homo sapien
tccaggccctcgcttaattctttaa

SEQ ID NO: 4812497 - DNA, 25 bp, Homo sapien
gacttcctgctagccttgttttcca

SEQ ID NO: 4812498 - DNA, 25 bp, Homo sapien
agcccatcctcggtagcttcatctt

SEQ ID NO: 4812499 - DNA, 25 bp, Homo sapien
tgtggccaatgcccagctgccaagc

SEQ ID NO: 4812500 - DNA, 25 bp, Homo sapien
ctgtggccaatgcccagctgccaag

SEQ ID NO: 4812501 - DNA, 25 bp, Homo sapien
gggatgcagcatccacacatgcagc

SEQ ID NO: 4812502 - DNA, 25 bp, Homo sapien
gtgggatgcagcatccacacatgca

SEQ ID NO: 4812503 - DNA, 25 bp, Homo sapien
ggtggatgggcaggaggatagccct

SEQ ID NO: 4812504 - DNA, 25 bp, Homo sapien
ggatgggcaggaggatagccctcat

SEQ ID NO: 4812505 - DNA, 25 bp, Homo sapien
tcctgcaaagaacacggcatgtatg

SEQ ID NO: 4812506 - DNA, 25 bp, Homo sapien
gcagcgagctgaagtatagcaagga

SEQ ID NO: 4812507 - DNA, 25 bp, Homo sapien
aagtatagcaaggagatggtcgatg

SEQ ID NO: 4812508 - DNA, 25 bp, Homo sapien
tcgatgaggaggcagggcattcctg

SEQ ID NO: 4812509 - DNA, 25 bp, Homo sapien
ccatagaacctagggtcttgaaggc

SEQ ID NO: 4812510 - DNA, 25 bp, Homo sapien
taggtgcctaggaccatagaaccta

SEQ ID NO: 4812511 - DNA, 25 bp, Homo sapien
taggaccatagaacctagggtcttg

SEQ ID NO: 4812512 - DNA, 25 bp, Homo sapien
ggttggcataggtgcctaggaccat

SEQ ID NO: 4812513 - DNA, 25 bp, Homo sapien
tggccactactcctgcattgcagcc

SEQ ID NO: 4812514 - DNA, 25 bp, Homo sapien
cgctgttggggagaagaccaaacac

SEQ ID NO: 4812515 - DNA, 25 bp, Homo sapien
ctgcattgcagccaacgctgttggg

SEQ ID NO: 4812516 - DNA, 25 bp, Homo sapien
gcaggtcctccaggcaaacctgtcc

SEQ ID NO: 4812517 - DNA, 25 bp, Homo sapien
acttgcagagcttgtgacagtggac

SEQ ID NO: 4812518 - DNA, 25 bp, Homo sapien
cacagagctctcatgtacggtgtct

SEQ ID NO: 4812519 - DNA, 25 bp, Homo sapien
gaggactaagaagagtcacctgcac

SEQ ID NO: 4812520 - DNA, 25 bp, Homo sapien
tacggtgtctgagcgatgaatgctc

SEQ ID NO: 4812521 - DNA, 25 bp, Homo sapien
tgcaaagctggcaccgtccctgact

SEQ ID NO: 4812522 - DNA, 25 bp, Homo sapien
cccaagcccgtggaccaggctttgt

SEQ ID NO: 4812523 - DNA, 25 bp, Homo sapien
agctggcaccgtccctgactcagag

SEQ ID NO: 4812524 - DNA, 25 bp, Homo sapien
tgaaacagacgcacagagaggctgg

SEQ ID NO: 4812525 - DNA, 25 bp, Homo sapien
tgtggcaagcggagcgtcatcgtct

SEQ ID NO: 4812526 - DNA, 25 bp, Homo sapien
ggtggtgtcattctgaaccctgttg

SEQ ID NO: 4812527 - DNA, 25 bp, Homo sapien
tgacctcacagagggaggcgtccag

SEQ ID NO: 4812528 - DNA, 25 bp, Homo sapien
gagaccttgggtcaacacgaccctg

SEQ ID NO: 4812529 - DNA, 25 bp, Homo sapien
agaggcagagcatccagtctcgctg

SEQ ID NO: 4812530 - DNA, 25 bp, Homo sapien
ggagtgcacgagctggattccagtc

SEQ ID NO: 4812531 - DNA, 25 bp, Homo sapien
tcaccatcttgggaatgagcctgag

SEQ ID NO: 4812532 - DNA, 25 bp, Homo sapien
ttccagtcgggcgtcatcaagggtg

SEQ ID NO: 4812533 - DNA, 25 bp, Homo sapien
gaggtgaccgtgaccaacactagga

SEQ ID NO: 4812534 - DNA, 25 bp, Homo sapien
tccacgggtgactatggtgggccca

SEQ ID NO: 4812535 - DNA, 25 bp, Homo sapien
caggagtatcaaggagggcttctta

SEQ ID NO: 4812536 - DNA, 25 bp, Homo sapien
gggcagtccccagaagacaggtaaa

SEQ ID NO: 4812537 - DNA, 25 bp, Homo sapien
tgagtgtaccattacctgaacagtg

SEQ ID NO: 4812538 - DNA, 25 bp, Homo sapien
gatgcatttattatggcctaccagc

SEQ ID NO: 4812539 - DNA, 25 bp, Homo sapien
tgtcttcaaacaatccaagctccgc

SEQ ID NO: 4812540 - DNA, 25 bp, Homo sapien
tatgatgcagcaacacagataattg

SEQ ID NO: 4812541 - DNA, 25 bp, Homo sapien
gctgtatcgggactccatcagagag

SEQ ID NO: 4812542 - DNA, 25 bp, Homo sapien
tgcactcctacaacagcgcttgagg

SEQ ID NO: 4812543 - DNA, 25 bp, Homo sapien
cagcagcttgcagtgttcaggccgg

SEQ ID NO: 4812544 - DNA, 25 bp, Homo sapien
ttgaggacggctctgtccgctggcc

SEQ ID NO: 4812545 - DNA, 25 bp, Homo sapien
gcctccaggatcctgcagctgggct

SEQ ID NO: 4812546 - DNA, 25 bp, Homo sapien
cctgctgcacctgcctcaccatggc

SEQ ID NO: 4812547 - DNA, 25 bp, Homo sapien
aggatcctgcagctgggctctgatt

SEQ ID NO: 4812548 - DNA, 25 bp, Homo sapien
gcagctgggctctgattggctgttc

SEQ ID NO: 4812549 - DNA, 25 bp, Homo sapien
catgcaggtgctatgaaagcctgac

SEQ ID NO: 4812550 - DNA, 25 bp, Homo sapien
ccccatgcaggtgctatgaaagcct

SEQ ID NO: 4812551 - DNA, 25 bp, Homo sapien
tccccatgcaggtgctatgaaagcc

SEQ ID NO: 4812552 - DNA, 25 bp, Homo sapien
ctgtccccatgcaggtgctatgaaa

SEQ ID NO: 4812553 - DNA, 25 bp, Homo sapien
ctctctcttcctggtcccaagctgc

SEQ ID NO: 4812554 - DNA, 25 bp, Homo sapien
cttcctggtcccaagctgccagccg

SEQ ID NO: 4812555 - DNA, 25 bp, Homo sapien
gctgccagccgccatcgaccaccca

SEQ ID NO: 4812556 - DNA, 25 bp, Homo sapien
aagctgccagccgccatcgaccacc

SEQ ID NO: 4812557 - DNA, 25 bp, Homo sapien
ttgagtgacaaaacgggcccatcag

SEQ ID NO: 4812558 - DNA, 25 bp, Homo sapien
tggttaacggccctcatggagcacg

SEQ ID NO: 4812559 - DNA, 25 bp, Homo sapien
tctccttggttaacggccctcatgg

SEQ ID NO: 4812560 - DNA, 25 bp, Homo sapien
gacctccttgaccagtttgttgagt

SEQ ID NO: 4812561 - DNA, 25 bp, Homo sapien
cccgggctcgtaggtggattcacat

SEQ ID NO: 4812562 - DNA, 25 bp, Homo sapien
ggcaatttccctcgcggtagctcag

SEQ ID NO: 4812563 - DNA, 25 bp, Homo sapien
gaaacattgtgcacggaagggctac

SEQ ID NO: 4812564 - DNA, 25 bp, Homo sapien
gaagggctaccgcaattcgctcatg

SEQ ID NO: 4812565 - DNA, 25 bp, Homo sapien
tacaacttacatttgggccaatagc

SEQ ID NO: 4812566 - DNA, 25 bp, Homo sapien
cagtgaacatgacaagctcagggtc

SEQ ID NO: 4812567 - DNA, 25 bp, Homo sapien
tttatactcatagggaaagccagct

SEQ ID NO: 4812568 - DNA, 25 bp, Homo sapien
taagtgacctgctcaaagttaacca

SEQ ID NO: 4812569 - DNA, 25 bp, Homo sapien
tgtgccacaccctagggatacaggg

SEQ ID NO: 4812570 - DNA, 25 bp, Homo sapien
gcaatacagttgtgactcagccggt

SEQ ID NO: 4812571 - DNA, 25 bp, Homo sapien
tcgtgctaacacaaaaatgggcgcc

SEQ ID NO: 4812572 - DNA, 25 bp, Homo sapien
tctgagattccaaacggccgacagc

SEQ ID NO: 4812573 - DNA, 25 bp, Homo sapien
tgtacctgcacaggctatggtgtgg

SEQ ID NO: 4812574 - DNA, 25 bp, Homo sapien
tcttgtacctgcacaggctatggtg

SEQ ID NO: 4812575 - DNA, 25 bp, Homo sapien
ggtgtggtggcttaaccatagctca

SEQ ID NO: 4812576 - DNA, 25 bp, Homo sapien
tacctgcacaggctatggtgtggtg

SEQ ID NO: 4812577 - DNA, 25 bp, Homo sapien
tttgttgcataagcgaaccctgtga

SEQ ID NO: 4812578 - DNA, 25 bp, Homo sapien
ttgcataagcgaaccctgtgagaaa

SEQ ID NO: 4812579 - DNA, 25 bp, Homo sapien
gggaatttgttgcataagcgaaccc

SEQ ID NO: 4812580 - DNA, 25 bp, Homo sapien
gaatttgttgcataagcgaaccctg

SEQ ID NO: 4812581 - DNA, 25 bp, Homo sapien
tgcccctgaaggttatgcccttcct

SEQ ID NO: 4812582 - DNA, 25 bp, Homo sapien
cttttggtgtacagtgggcggtcac

SEQ ID NO: 4812583 - DNA, 25 bp, Homo sapien
gaaggttatgcccttcctgccacgc

SEQ ID NO: 4812584 - DNA, 25 bp, Homo sapien
gcctttctgagagtcacgtctgccc

SEQ ID NO: 4812585 - DNA, 25 bp, Homo sapien
agggtagagccttggtaagaaacag

SEQ ID NO: 4812586 - DNA, 25 bp, Homo sapien
cagtggttccgtgtgggtgccagcc

SEQ ID NO: 4812587 - DNA, 25 bp, Homo sapien
gccagtggttccgtgtgggtgccag

SEQ ID NO: 4812588 - DNA, 25 bp, Homo sapien
ctggccagtggttccgtgtgggtgc

SEQ ID NO: 4812589 - DNA, 25 bp, Homo sapien
ggtgccagcccgtgctggctgtgct

SEQ ID NO: 4812590 - DNA, 25 bp, Homo sapien
tatgctggaattgctccaacgggac

SEQ ID NO: 4812591 - DNA, 25 bp, Homo sapien
cagcccaggcagttcgtattatata

SEQ ID NO: 4812592 - DNA, 25 bp, Homo sapien
gggaaacgagaactacacctgtata

SEQ ID NO: 4812593 - DNA, 25 bp, Homo sapien
tatcgtaggatgactcacagcccag

SEQ ID NO: 4812594 - DNA, 25 bp, Homo sapien
tttcagtgacctgggattgatggcc

SEQ ID NO: 4812595 - DNA, 25 bp, Homo sapien
taaccaggcagaatgaggcaacact

SEQ ID NO: 4812596 - DNA, 25 bp, Homo sapien
caacagtgattacgcctccatcgga

SEQ ID NO: 4812597 - DNA, 25 bp, Homo sapien
gaccagacggttcattacgtgacac

SEQ ID NO: 4812598 - DNA, 25 bp, Homo sapien
tataacttttaacacacactgtgga

SEQ ID NO: 4812599 - DNA, 25 bp, Homo sapien
aatgtgctcgtgtgtttagcctacg

SEQ ID NO: 4812600 - DNA, 25 bp, Homo sapien
tcatgcctccattaccagttgcaat

SEQ ID NO: 4812601 - DNA, 25 bp, Homo sapien
ttgcaattgtgtatctaagacctcc

SEQ ID NO: 4812602 - DNA, 25 bp, Homo sapien
gcccggccatatgttgtcctttaaa

SEQ ID NO: 4812603 - DNA, 25 bp, Homo sapien
tgtctcctatgagcttttcatgcac

SEQ ID NO: 4812604 - DNA, 25 bp, Homo sapien
aatgtaatgaaggtgcccacatttt

SEQ ID NO: 4812605 - DNA, 25 bp, Homo sapien
cgtaagtcaaatgcatcgtgtctcc

SEQ ID NO: 4812606 - DNA, 25 bp, Homo sapien
taccagggtgcaccgcttggaaggt

SEQ ID NO: 4812607 - DNA, 25 bp, Homo sapien
caatgcaatgattccccatgaggca

SEQ ID NO: 4812608 - DNA, 25 bp, Homo sapien
agggccttgtatgggacctggtaca

SEQ ID NO: 4812609 - DNA, 25 bp, Homo sapien
taggagaagctctggcctaccaggg

SEQ ID NO: 4812610 - DNA, 25 bp, Homo sapien
gggatacaatcactacggacacagg

SEQ ID NO: 4812611 - DNA, 25 bp, Homo sapien
cacgggtgcttccttgccaatagta

SEQ ID NO: 4812612 - DNA, 25 bp, Homo sapien
caatagtagacatggcagctcggct

SEQ ID NO: 4812613 - DNA, 25 bp, Homo sapien
tgggccgcgacactaagaaacatct

SEQ ID NO: 4812614 - DNA, 25 bp, Homo sapien
tgccaagcacgattgagttccccag

SEQ ID NO: 4812615 - DNA, 25 bp, Homo sapien
taagataactgacctagtccctggc

SEQ ID NO: 4812616 - DNA, 25 bp, Homo sapien
cccgaaagagggagcagttggcata

SEQ ID NO: 4812617 - DNA, 25 bp, Homo sapien
caagatattaatgacaggccgagtg

SEQ ID NO: 4812618 - DNA, 25 bp, Homo sapien
cagtgttacagtcgaatgggctccc

SEQ ID NO: 4812619 - DNA, 25 bp, Homo sapien
tcctgtcctaacaccaagcctgggt

SEQ ID NO: 4812620 - DNA, 25 bp, Homo sapien
ttgccagctgagtcccggtattagg

SEQ ID NO: 4812621 - DNA, 25 bp, Homo sapien
cctgggtggcagatgaacagtgctt

SEQ ID NO: 4812622 - DNA, 25 bp, Homo sapien
ttctgttgcgtgttccttgtagcca

SEQ ID NO: 4812623 - DNA, 25 bp, Homo sapien
accgggctgccttaatctgtcctgc

SEQ ID NO: 4812624 - DNA, 25 bp, Homo sapien
tgtgattatgtccacaccgggctgc

SEQ ID NO: 4812625 - DNA, 25 bp, Homo sapien
gttctgggtccatgtactcagataa

SEQ ID NO: 4812626 - DNA, 25 bp, Homo sapien
gtgtttttagtggagatcgtttcac

SEQ ID NO: 4812627 - DNA, 25 bp, Homo sapien
tggagatcgtttcaccatgttgagc

SEQ ID NO: 4812628 - DNA, 25 bp, Homo sapien
gagatcgtttcaccatgttgagcag

SEQ ID NO: 4812629 - DNA, 25 bp, Homo sapien
ttgtgtttttagtggagatcgtttc

SEQ ID NO: 4812630 - DNA, 25 bp, Homo sapien
ttttgtttttcggcagagatgaagt

SEQ ID NO: 4812631 - DNA, 25 bp, Homo sapien
tcaaccagtttccaacttcagcctt

SEQ ID NO: 4812632 - DNA, 25 bp, Homo sapien
tcctggtctcaaccagtttccaact

SEQ ID NO: 4812633 - DNA, 25 bp, Homo sapien
ggtctcaaccagtttccaacttcag

SEQ ID NO: 4812634 - DNA, 25 bp, Homo sapien
tttccccagggccatatgtcagctt

SEQ ID NO: 4812635 - DNA, 25 bp, Homo sapien
gattatttccttgcagtggcccact

SEQ ID NO: 4812636 - DNA, 25 bp, Homo sapien
catggctcactatagacttgggctc

SEQ ID NO: 4812637 - DNA, 25 bp, Homo sapien
tgttgcagctttagatggatcgacc

SEQ ID NO: 4812638 - DNA, 25 bp, Homo sapien
cggctaatatagaggatgttttcat

SEQ ID NO: 4812639 - DNA, 25 bp, Homo sapien
cccaaccatctgggcattttctcgg

SEQ ID NO: 4812640 - DNA, 25 bp, Homo sapien
ttctggggcaaacatctgatagcgc

SEQ ID NO: 4812641 - DNA, 25 bp, Homo sapien
taggtcattggttctgccgacttgc

SEQ ID NO: 4812642 - DNA, 25 bp, Homo sapien
gccttttctgtaatgagtaagcctc

SEQ ID NO: 4812643 - DNA, 25 bp, Homo sapien
gttcccgggtcctgcggctgaggag

SEQ ID NO: 4812644 - DNA, 25 bp, Homo sapien
gccgggctttcgcaggcagtgggac

SEQ ID NO: 4812645 - DNA, 25 bp, Homo sapien
cgtaatccatcatggcggccgcggg

SEQ ID NO: 4812646 - DNA, 25 bp, Homo sapien
gcctcgttgtggagcggctcgtaat

SEQ ID NO: 4812647 - DNA, 25 bp, Homo sapien
gcgagagtccttcgtcccttacagc

SEQ ID NO: 4812648 - DNA, 25 bp, Homo sapien
gacactgcgggtggtctgtttcccc

SEQ ID NO: 4812649 - DNA, 25 bp, Homo sapien
gccttccgctgtctgggccgcgaga

SEQ ID NO: 4812650 - DNA, 25 bp, Homo sapien
ttctgaggcgtggaagagcgtcgcc

SEQ ID NO: 4812651 - DNA, 25 bp, Homo sapien
tccttttcgtcagagtcgagggcaa

SEQ ID NO: 4812652 - DNA, 25 bp, Homo sapien
tcgtcagagtcgagggcaaactcgc

SEQ ID NO: 4812653 - DNA, 25 bp, Homo sapien
ggcaatgcattccttttcgtcagag

SEQ ID NO: 4812654 - DNA, 25 bp, Homo sapien
gcaaactcgctgaaatctgggtgac

SEQ ID NO: 4812655 - DNA, 25 bp, Homo sapien
agagaagcgagagcggccactagtt

SEQ ID NO: 4812656 - DNA, 25 bp, Homo sapien
gagcggccactagttcggcaggaaa

SEQ ID NO: 4812657 - DNA, 25 bp, Homo sapien
caaagcagagaagcgagagcggcca

SEQ ID NO: 4812658 - DNA, 25 bp, Homo sapien
cggcaggaaatttgttggaagatga

SEQ ID NO: 4812659 - DNA, 25 bp, Homo sapien
taagatagggggttggtgacttcca

SEQ ID NO: 4812660 - DNA, 25 bp, Homo sapien
agatagggggttggtgacttccaca

SEQ ID NO: 4812661 - DNA, 25 bp, Homo sapien
gatagggggttggtgacttccacag

SEQ ID NO: 4812662 - DNA, 25 bp, Homo sapien
gacttcaattgctgacttgtggaga

SEQ ID NO: 4812663 - DNA, 25 bp, Homo sapien
tacatgaaattgataaccgcgaaaa

SEQ ID NO: 4812664 - DNA, 25 bp, Homo sapien
gaactcctgcttgcaagtgtcaacc

SEQ ID NO: 4812665 - DNA, 25 bp, Homo sapien
ccgcgaaaataattggaactcctgc

SEQ ID NO: 4812666 - DNA, 25 bp, Homo sapien
ggagtaatctcttcctcgttgatga

SEQ ID NO: 4812667 - DNA, 25 bp, Homo sapien
gtcttctccctgtttagaatgatat

SEQ ID NO: 4812668 - DNA, 25 bp, Homo sapien
gcatttgaatgctgcccgtacattt

SEQ ID NO: 4812669 - DNA, 25 bp, Homo sapien
tatttgggccaataaaggttatctg

SEQ ID NO: 4812670 - DNA, 25 bp, Homo sapien
aggcacgcgtcactgacgcccggct

SEQ ID NO: 4812671 - DNA, 25 bp, Homo sapien
cacgcgtcactgacgcccggctaat

SEQ ID NO: 4812672 - DNA, 25 bp, Homo sapien
ctacaggcacgcgtcactgacgccc

SEQ ID NO: 4812673 - DNA, 25 bp, Homo sapien
acaggcacgcgtcactgacgcccgg

SEQ ID NO: 4812674 - DNA, 25 bp, Homo sapien
tgtggcctttagtcttttagccttg

SEQ ID NO: 4812675 - DNA, 25 bp, Homo sapien
ttatggaaatccacgccgcttcatt

SEQ ID NO: 4812676 - DNA, 25 bp, Homo sapien
ctgtggcctttagtcttttagcctt

SEQ ID NO: 4812677 - DNA, 25 bp, Homo sapien
atccacgccgcttcattcgcccagt

SEQ ID NO: 4812678 - DNA, 25 bp, Homo sapien
cagtggccgcacaacgtgtgcatca

SEQ ID NO: 4812679 - DNA, 25 bp, Homo sapien
ccacagtggccgcacaacgtgtgca

SEQ ID NO: 4812680 - DNA, 25 bp, Homo sapien
gccacaggtagacttcggaaggtga

SEQ ID NO: 4812681 - DNA, 25 bp, Homo sapien
cacaggtagacttcggaaggtgaca

SEQ ID NO: 4812682 - DNA, 25 bp, Homo sapien
attgcaacgcttttcaaacgataac

SEQ ID NO: 4812683 - DNA, 25 bp, Homo sapien
tgcaacgcttttcaaacgataacgt

SEQ ID NO: 4812684 - DNA, 25 bp, Homo sapien
ttgcaacgcttttcaaacgataacg

SEQ ID NO: 4812685 - DNA, 25 bp, Homo sapien
cctgtttaggtgtataactcagtgg

SEQ ID NO: 4812686 - DNA, 25 bp, Homo sapien
taacctgtttaggtgtataactcag

SEQ ID NO: 4812687 - DNA, 25 bp, Homo sapien
ttaacctgtttaggtgtataactca

SEQ ID NO: 4812688 - DNA, 25 bp, Homo sapien
acctgtttaggtgtataactcagtg

SEQ ID NO: 4812689 - DNA, 25 bp, Homo sapien
taagttaagtgatgaagtgcccaga

SEQ ID NO: 4812690 - DNA, 25 bp, Homo sapien
tcctcagaagaacatggccaacatg

SEQ ID NO: 4812691 - DNA, 25 bp, Homo sapien
gaatgcctctatggtgaatgcctgg

SEQ ID NO: 4812692 - DNA, 25 bp, Homo sapien
tctgttaagaataccccttggtggc

SEQ ID NO: 4812693 - DNA, 25 bp, Homo sapien
caggcctcatctcctcttaaatgtc

SEQ ID NO: 4812694 - DNA, 25 bp, Homo sapien
gcctcatctcctcttaaatgtcttt

SEQ ID NO: 4812695 - DNA, 25 bp, Homo sapien
ctcatctcctcttaaatgtctttag

SEQ ID NO: 4812696 - DNA, 25 bp, Homo sapien
ggcctcatctcctcttaaatgtctt

SEQ ID NO: 4812697 - DNA, 25 bp, Homo sapien
gataggctctaagatcagcagcatc

SEQ ID NO: 4812698 - DNA, 25 bp, Homo sapien
tcagaacttggtgagaatgaggtac

SEQ ID NO: 4812699 - DNA, 25 bp, Homo sapien
gcatcagcccactcgggaagagctc

SEQ ID NO: 4812700 - DNA, 25 bp, Homo sapien
gaggtactttaagataggctctaag

SEQ ID NO: 4812701 - DNA, 25 bp, Homo sapien
ccgtggcatgcgttggtgcgctctc

SEQ ID NO: 4812702 - DNA, 25 bp, Homo sapien
cgttggtgcgctctcaagaatgcgg

SEQ ID NO: 4812703 - DNA, 25 bp, Homo sapien
cgctctcaagaatgcggccatggca

SEQ ID NO: 4812704 - DNA, 25 bp, Homo sapien
cccgggccgtggcatgcgttggtgc

SEQ ID NO: 4812705 - DNA, 25 bp, Homo sapien
gcatgcggatgactggagcctggaa

SEQ ID NO: 4812706 - DNA, 25 bp, Homo sapien
acacataccaagaagcctcggcccc

SEQ ID NO: 4812707 - DNA, 25 bp, Homo sapien
ccagcctgctcaggggcatgcggat

SEQ ID NO: 4812708 - DNA, 25 bp, Homo sapien
atgcggatgactggagcctggaagg

SEQ ID NO: 4812709 - DNA, 25 bp, Homo sapien
cgcagacagacttctgcgtagggcc

SEQ ID NO: 4812710 - DNA, 25 bp, Homo sapien
gatccatgaccgcagacagacttct

SEQ ID NO: 4812711 - DNA, 25 bp, Homo sapien
gaccgcagacagacttctgcgtagg

SEQ ID NO: 4812712 - DNA, 25 bp, Homo sapien
aggaagagatccatgaccgcagaca

SEQ ID NO: 4812713 - DNA, 25 bp, Homo sapien
ggacttggggacaaggccacagcct

SEQ ID NO: 4812714 - DNA, 25 bp, Homo sapien
gggacaaggccacagcctgtgaccc

SEQ ID NO: 4812715 - DNA, 25 bp, Homo sapien
tgtttttgatgccttaggacttggg

SEQ ID NO: 4812716 - DNA, 25 bp, Homo sapien
cctggccttgtctgtttttgatgcc

SEQ ID NO: 4812717 - DNA, 25 bp, Homo sapien
ttaattacttggcacatatagtgct

SEQ ID NO: 4812718 - DNA, 25 bp, Homo sapien
atgtttaaaagattgacaatacagt

SEQ ID NO: 4812719 - DNA, 25 bp, Homo sapien
ccataggaaaggagcggcacgaaat

SEQ ID NO: 4812720 - DNA, 25 bp, Homo sapien
ggaaaggagcggcacgaaatgcaaa

SEQ ID NO: 4812721 - DNA, 25 bp, Homo sapien
gctgtctggatctgaccagtctcca

SEQ ID NO: 4812722 - DNA, 25 bp, Homo sapien
tcgtatctgtactcgtacctgctat

SEQ ID NO: 4812723 - DNA, 25 bp, Homo sapien
caactttcgtttttggatagtgctc

SEQ ID NO: 4812724 - DNA, 25 bp, Homo sapien
tccagatgaaaactcttgcaacttt

SEQ ID NO: 4812725 - DNA, 25 bp, Homo sapien
gtttgggagggcactggtacagtaa

SEQ ID NO: 4812726 - DNA, 25 bp, Homo sapien
tagggtgattggtttgggagggcac

SEQ ID NO: 4812727 - DNA, 25 bp, Homo sapien
taattctccacctctcacttgcccg

SEQ ID NO: 4812728 - DNA, 25 bp, Homo sapien
gaaacaggatacacagtagggtgat

SEQ ID NO: 4812729 - DNA, 25 bp, Homo sapien
tatgactggtatggaggcctaaagc

SEQ ID NO: 4812730 - DNA, 25 bp, Homo sapien
tcccttttgctgtccgtgagtccct

SEQ ID NO: 4812731 - DNA, 25 bp, Homo sapien
ggctggcctagttagtgttacccaa

SEQ ID NO: 4812732 - DNA, 25 bp, Homo sapien
ggtttcttgtgagcatccatttgca

SEQ ID NO: 4812733 - DNA, 25 bp, Homo sapien
gaaacaatagggtctgtctatcgga

SEQ ID NO: 4812734 - DNA, 25 bp, Homo sapien
ctgctggtgtagtttgaaggcctga

SEQ ID NO: 4812735 - DNA, 25 bp, Homo sapien
tgatggagcttaagaagtcccacag

SEQ ID NO: 4812736 - DNA, 25 bp, Homo sapien
gaattacaccagaacatttgtcatg

SEQ ID NO: 4812737 - DNA, 25 bp, Homo sapien
ccaggttgcctttggaagcaaaact

SEQ ID NO: 4812738 - DNA, 25 bp, Homo sapien
gaatacagatcttaggcaccagctc

SEQ ID NO: 4812739 - DNA, 25 bp, Homo sapien
tcttaggcaccagctcgtaggaggg

SEQ ID NO: 4812740 - DNA, 25 bp, Homo sapien
tgttgctgtaaagaatacagatctt

SEQ ID NO: 4812741 - DNA, 25 bp, Homo sapien
ctttcaaaagcgtcaaaagctggat

SEQ ID NO: 4812742 - DNA, 25 bp, Homo sapien
tcttaggctgattagaaggaatcct

SEQ ID NO: 4812743 - DNA, 25 bp, Homo sapien
gaatgctcttcgtatctttcaaaag

SEQ ID NO: 4812744 - DNA, 25 bp, Homo sapien
ctaatagcttttgggtcttaggctg

SEQ ID NO: 4812745 - DNA, 25 bp, Homo sapien
ggtgtgcgccagtaacacgactgtg

SEQ ID NO: 4812746 - DNA, 25 bp, Homo sapien
gccttaatcacaggacgcgcgttga

SEQ ID NO: 4812747 - DNA, 25 bp, Homo sapien
tgacctagatttctgggtgtgcgcc

SEQ ID NO: 4812748 - DNA, 25 bp, Homo sapien
tatcctggtctggatgtgcggcctc

SEQ ID NO: 4812749 - DNA, 25 bp, Homo sapien
gttgcacagggttgaagaccagacc

SEQ ID NO: 4812750 - DNA, 25 bp, Homo sapien
gattccaagcgcaaaataccctaga

SEQ ID NO: 4812751 - DNA, 25 bp, Homo sapien
caacttgacatttgaggaaacgcta

SEQ ID NO: 4812752 - DNA, 25 bp, Homo sapien
gaagaaggattgcagcgcagcagtc

SEQ ID NO: 4812753 - DNA, 25 bp, Homo sapien
tttatctggtcgttttatactgatt

SEQ ID NO: 4812754 - DNA, 25 bp, Homo sapien
gtgatttttatctggtcgttttata

SEQ ID NO: 4812755 - DNA, 25 bp, Homo sapien
atctggtcgttttatactgattaca

SEQ ID NO: 4812756 - DNA, 25 bp, Homo sapien
tttttatctggtcgttttatactga

SEQ ID NO: 4812757 - DNA, 25 bp, Homo sapien
tctaagtggcgtgtgcatagcgtcc

SEQ ID NO: 4812758 - DNA, 25 bp, Homo sapien
tccatgaggtactggtcccttcctt

SEQ ID NO: 4812759 - DNA, 25 bp, Homo sapien
tccttttgttaacgtgatgtgccac

SEQ ID NO: 4812760 - DNA, 25 bp, Homo sapien
tagtcaccgacagcggccttgaaga

SEQ ID NO: 4812761 - DNA, 25 bp, Homo sapien
cgagatccacccacctcagcctccc

SEQ ID NO: 4812762 - DNA, 25 bp, Homo sapien
ctacaggtgcccgacaccactcccg

SEQ ID NO: 4812763 - DNA, 25 bp, Homo sapien
gagatccacccacctcagcctccca

SEQ ID NO: 4812764 - DNA, 25 bp, Homo sapien
tcgagatccacccacctcagcctcc

SEQ ID NO: 4812765 - DNA, 25 bp, Homo sapien
tgaacatgtgaaatgcaaccttgct

SEQ ID NO: 4812766 - DNA, 25 bp, Homo sapien
catttgcactctgatgtcagccgca

SEQ ID NO: 4812767 - DNA, 25 bp, Homo sapien
tcagccgcagtcgtgcctatagaga

SEQ ID NO: 4812768 - DNA, 25 bp, Homo sapien
ggatcgttcatcgtaaccaagccta

SEQ ID NO: 4812769 - DNA, 25 bp, Homo sapien
cgaagcggaatctgcagccagcatg

SEQ ID NO: 4812770 - DNA, 25 bp, Homo sapien
accgccgaccgaagcggaagctgaa

SEQ ID NO: 4812771 - DNA, 25 bp, Homo sapien
agccaggttccctaacgggccgctg

SEQ ID NO: 4812772 - DNA, 25 bp, Homo sapien
ccatggcgtctgtgggctctcttct

SEQ ID NO: 4812773 - DNA, 25 bp, Homo sapien
gcagcgtagatgtgagcagggggct

SEQ ID NO: 4812774 - DNA, 25 bp, Homo sapien
cagcgtagatgtgagcagggggctc

SEQ ID NO: 4812775 - DNA, 25 bp, Homo sapien
ggctggtggatcgctgggctccggg

SEQ ID NO: 4812776 - DNA, 25 bp, Homo sapien
gctggtggatcgctgggctccgggg

SEQ ID NO: 4812777 - DNA, 25 bp, Homo sapien
gggcagtgctgaccgcgttgataaa

SEQ ID NO: 4812778 - DNA, 25 bp, Homo sapien
gctgcgcattcctgaccctgggatt

SEQ ID NO: 4812779 - DNA, 25 bp, Homo sapien
caacctcacacaggatgtagtctga

SEQ ID NO: 4812780 - DNA, 25 bp, Homo sapien
cctgctttatatggcccgcggtgcg

SEQ ID NO: 4812781 - DNA, 25 bp, Homo sapien
tcttgagcaattgggggtgacaact

SEQ ID NO: 4812782 - DNA, 25 bp, Homo sapien
caccagcagccgagataggcagggt

SEQ ID NO: 4812783 - DNA, 25 bp, Homo sapien
ttctgctgtcgggtaaatgcaggga

SEQ ID NO: 4812784 - DNA, 25 bp, Homo sapien
tccaagagtggcagtacccatcggg

SEQ ID NO: 4812785 - DNA, 25 bp, Homo sapien
tgggaagctgtcctgacataggtcc

SEQ ID NO: 4812786 - DNA, 25 bp, Homo sapien
gaagctgtcctgacataggtccagg

SEQ ID NO: 4812787 - DNA, 25 bp, Homo sapien
agctgtcctgacataggtccaggcc

SEQ ID NO: 4812788 - DNA, 25 bp, Homo sapien
ggaagctgtcctgacataggtccag

SEQ ID NO: 4812789 - DNA, 25 bp, Homo sapien
gctgtgtggcccgagtcagacacac

SEQ ID NO: 4812790 - DNA, 25 bp, Homo sapien
gtgctggccctctgagctccctctg

SEQ ID NO: 4812791 - DNA, 25 bp, Homo sapien
ctccaccagtcgctgtgctggccct

SEQ ID NO: 4812792 - DNA, 25 bp, Homo sapien
tagcgatgctcccataccaggcttc

SEQ ID NO: 4812793 - DNA, 25 bp, Homo sapien
ctgtcagcgcatgaggggccaacgt

SEQ ID NO: 4812794 - DNA, 25 bp, Homo sapien
cgacctcagccctctgggtttgcca

SEQ ID NO: 4812795 - DNA, 25 bp, Homo sapien
ttgggccacacagtttggggacatc

SEQ ID NO: 4812796 - DNA, 25 bp, Homo sapien
acactccctacaaatcccaccgagg

SEQ ID NO: 4812797 - DNA, 25 bp, Homo sapien
ctggccacaggcgttctttatgtcc

SEQ ID NO: 4812798 - DNA, 25 bp, Homo sapien
ggagccagcgtcctcatggtttgag

SEQ ID NO: 4812799 - DNA, 25 bp, Homo sapien
tcagacacgcccctgggtgacaggg

SEQ ID NO: 4812800 - DNA, 25 bp, Homo sapien
gcgatacagcttttgtcccaaagac

SEQ ID NO: 4812801 - DNA, 25 bp, Homo sapien
ccatcctctggaccttggtgctcag

SEQ ID NO: 4812802 - DNA, 25 bp, Homo sapien
ccagctgaatgtgctgaggccacca

SEQ ID NO: 4812803 - DNA, 25 bp, Homo sapien
ccagcatggaaaccaaggttccttc

SEQ ID NO: 4812804 - DNA, 25 bp, Homo sapien
ttggtgctcaggcagtcagctgcgt

SEQ ID NO: 4812805 - DNA, 25 bp, Homo sapien
cccttggcctggtcactcagcccac

SEQ ID NO: 4812806 - DNA, 25 bp, Homo sapien
ctagcccttggcctggtcactcagc

SEQ ID NO: 4812807 - DNA, 25 bp, Homo sapien
agcccttggcctggtcactcagccc

SEQ ID NO: 4812808 - DNA, 25 bp, Homo sapien
tagcccttggcctggtcactcagcc

SEQ ID NO: 4812809 - DNA, 25 bp, Homo sapien
agcaggtgcgcagggaccgtttttc

SEQ ID NO: 4812810 - DNA, 25 bp, Homo sapien
tgtctcagatgagagccatttgcac

SEQ ID NO: 4812811 - DNA, 25 bp, Homo sapien
aggtctcgagctgtccctcgcccag

SEQ ID NO: 4812812 - DNA, 25 bp, Homo sapien
catttgcactggtatcagaccgtag

SEQ ID NO: 4812813 - DNA, 25 bp, Homo sapien
aaggaagcgctgcagacatctgcgc

SEQ ID NO: 4812814 - DNA, 25 bp, Homo sapien
tgccactgcctgattcttggctgta

SEQ ID NO: 4812815 - DNA, 25 bp, Homo sapien
gaagcgctgcagacatctgcgcatg

SEQ ID NO: 4812816 - DNA, 25 bp, Homo sapien
tatctgcgtccagctgaggaccgag

SEQ ID NO: 4812817 - DNA, 25 bp, Homo sapien
ctgggacagagagccaggtcacacg

SEQ ID NO: 4812818 - DNA, 25 bp, Homo sapien
ggacagagagccaggtcacacggcc

SEQ ID NO: 4812819 - DNA, 25 bp, Homo sapien
gacagagagccaggtcacacggcct

SEQ ID NO: 4812820 - DNA, 25 bp, Homo sapien
agagagccaggtcacacggcctctc

SEQ ID NO: 4812821 - DNA, 25 bp, Homo sapien
aaggctgactccagccctttcggag

SEQ ID NO: 4812822 - DNA, 25 bp, Homo sapien
acctgccatcgggtgtcctttggag

SEQ ID NO: 4812823 - DNA, 25 bp, Homo sapien
aggaggccttggaaaagccgccctg

SEQ ID NO: 4812824 - DNA, 25 bp, Homo sapien
tgcatctgggcctgacgtaacgcac

SEQ ID NO: 4812825 - DNA, 25 bp, Homo sapien
gtggccacggtcaatggcaagggtt

SEQ ID NO: 4812826 - DNA, 25 bp, Homo sapien
cagcgtgctgggtgttgggaggatt

SEQ ID NO: 4812827 - DNA, 25 bp, Homo sapien
aacaagaaagtgtccaggtggtgcc

SEQ ID NO: 4812828 - DNA, 25 bp, Homo sapien
tttgcccggtgaggtggtccctgtc

SEQ ID NO: 4812829 - DNA, 25 bp, Homo sapien
gtggtgggggttgtacaagcctcat

SEQ ID NO: 4812830 - DNA, 25 bp, Homo sapien
ggtggtgggggttgtacaagcctca

SEQ ID NO: 4812831 - DNA, 25 bp, Homo sapien
tggtggtgggggttgtacaagcctc

SEQ ID NO: 4812832 - DNA, 25 bp, Homo sapien
gaactggtctcagccttggagcgtg

SEQ ID NO: 4812833 - DNA, 25 bp, Homo sapien
gaaggcgatgtgtgacttcaccggc

SEQ ID NO: 4812834 - DNA, 25 bp, Homo sapien
tgacgttccccacgatctgctagga

SEQ ID NO: 4812835 - DNA, 25 bp, Homo sapien
caaacagcaccggagtcacagtggg

SEQ ID NO: 4812836 - DNA, 25 bp, Homo sapien
ggtggagaacattcacgaaagagtg

SEQ ID NO: 4812837 - DNA, 25 bp, Homo sapien
aacattcacgaaagagtgaggtggg

SEQ ID NO: 4812838 - DNA, 25 bp, Homo sapien
caggtgggtggagaacattcacgaa

SEQ ID NO: 4812839 - DNA, 25 bp, Homo sapien
agggccaaggacaaggtgcaccagt

SEQ ID NO: 4812840 - DNA, 25 bp, Homo sapien
ttgagtgagtactgccagccggtcc

SEQ ID NO: 4812841 - DNA, 25 bp, Homo sapien
cggccggatcttcatctcagagaac

SEQ ID NO: 4812842 - DNA, 25 bp, Homo sapien
catctcagagaacttgagtgagtac

SEQ ID NO: 4812843 - DNA, 25 bp, Homo sapien
actgccagccggtccaggaggacca

SEQ ID NO: 4812844 - DNA, 25 bp, Homo sapien
tcatgccgctgtgcttcaggaggga

SEQ ID NO: 4812845 - DNA, 25 bp, Homo sapien
caggtactgcccattgaggttggac

SEQ ID NO: 4812846 - DNA, 25 bp, Homo sapien
caccgcggtagaaggcggcacagtt

SEQ ID NO: 4812847 - DNA, 25 bp, Homo sapien
cacggtccttggtggtgaacctcat

SEQ ID NO: 4812848 - DNA, 25 bp, Homo sapien
cgtagcgggcataggccgtgccatt

SEQ ID NO: 4812849 - DNA, 25 bp, Homo sapien
ggtgagcgggtacccgtcttcctca

SEQ ID NO: 4812850 - DNA, 25 bp, Homo sapien
cgtgcagctcgtaggcagcctgtgt

SEQ ID NO: 4812851 - DNA, 25 bp, Homo sapien
cagtgccggaatagtcagccacggt

SEQ ID NO: 4812852 - DNA, 25 bp, Homo sapien
ggcagccgctctccctctctgggcc

SEQ ID NO: 4812853 - DNA, 25 bp, Homo sapien
tctgggccccagctcggctggcgca

SEQ ID NO: 4812854 - DNA, 25 bp, Homo sapien
actctcctgctgctgagtctcaggg

SEQ ID NO: 4812855 - DNA, 25 bp, Homo sapien
agtctcagggcagccgctctccctc

SEQ ID NO: 4812856 - DNA, 25 bp, Homo sapien
agtgctccccggtgagcctgccaaa

SEQ ID NO: 4812857 - DNA, 25 bp, Homo sapien
cggaagaagttcacggagccgtcct

SEQ ID NO: 4812858 - DNA, 25 bp, Homo sapien
aaagccgtctcggtacgcatcccag

SEQ ID NO: 4812859 - DNA, 25 bp, Homo sapien
atcccagccccggaagaagttcacg

SEQ ID NO: 4812860 - DNA, 25 bp, Homo sapien
aaagtcctcaggagtgaccggctcg

SEQ ID NO: 4812861 - DNA, 25 bp, Homo sapien
ggaaggaaattcgatcaggctcagg

SEQ ID NO: 4812862 - DNA, 25 bp, Homo sapien
ggtggaaggaaattcgatcaggctc

SEQ ID NO: 4812863 - DNA, 25 bp, Homo sapien
gaaagtcctcaggagtgaccggctc

SEQ ID NO: 4812864 - DNA, 25 bp, Homo sapien
agccgtattgatggccgcatattgg

SEQ ID NO: 4812865 - DNA, 25 bp, Homo sapien
tggagagccgtattgatggccgcat

SEQ ID NO: 4812866 - DNA, 25 bp, Homo sapien
gagagccgtattgatggccgcatat

SEQ ID NO: 4812867 - DNA, 25 bp, Homo sapien
ggagcggtggagagccgtattgatg

SEQ ID NO: 4812868 - DNA, 25 bp, Homo sapien
gaagtgccgcttagaggggctctgc

SEQ ID NO: 4812869 - DNA, 25 bp, Homo sapien
aagtgccgcttagaggggctctgcc

SEQ ID NO: 4812870 - DNA, 25 bp, Homo sapien
ttggaagtgccgcttagaggggctc

SEQ ID NO: 4812871 - DNA, 25 bp, Homo sapien
gtgccgcttagaggggctctgccaa

SEQ ID NO: 4812872 - DNA, 25 bp, Homo sapien
ggaaagacagagtagacgccatcgt

SEQ ID NO: 4812873 - DNA, 25 bp, Homo sapien
ttaggaggacgtccagacagtctcg

SEQ ID NO: 4812874 - DNA, 25 bp, Homo sapien
tcctgctgtccgcttaggaggacgt

SEQ ID NO: 4812875 - DNA, 25 bp, Homo sapien
cgtccgtgcgcatgtcacagtacac

SEQ ID NO: 4812876 - DNA, 25 bp, Homo sapien
ctctctgaaggtcggccttgttgcg

SEQ ID NO: 4812877 - DNA, 25 bp, Homo sapien
caggatgtcgctgacggagttcacc

SEQ ID NO: 4812878 - DNA, 25 bp, Homo sapien
gctgacggagttcaccaggtgagcc

SEQ ID NO: 4812879 - DNA, 25 bp, Homo sapien
cccgggcaggcgctctctgaaggtc

SEQ ID NO: 4812880 - DNA, 25 bp, Homo sapien
tggatgaggcggccctgctcactct

SEQ ID NO: 4812881 - DNA, 25 bp, Homo sapien
ccagcgtgccatgccccttccgcag

SEQ ID NO: 4812882 - DNA, 25 bp, Homo sapien
ctggatgaggcggccctgctcactc

SEQ ID NO: 4812883 - DNA, 25 bp, Homo sapien
tgaggccctggcccagcgtgccatg

SEQ ID NO: 4812884 - DNA, 25 bp, Homo sapien
tccacagtgaccagggcgctgttgg

SEQ ID NO: 4812885 - DNA, 25 bp, Homo sapien
gagctgtccgccctttccacagtga

SEQ ID NO: 4812886 - DNA, 25 bp, Homo sapien
ctctccaggcgtgcgaagctgtcgg

SEQ ID NO: 4812887 - DNA, 25 bp, Homo sapien
aagagcacggcaccggtgacagcta

SEQ ID NO: 4812888 - DNA, 25 bp, Homo sapien
aggcccgcccgggacgcacagacac

SEQ ID NO: 4812889 - DNA, 25 bp, Homo sapien
gcccgcccgggacgcacagacacag

SEQ ID NO: 4812890 - DNA, 25 bp, Homo sapien
tgcaggcccgcccgggacgcacaga

SEQ ID NO: 4812891 - DNA, 25 bp, Homo sapien
ctgcaggcccgcccgggacgcacag

SEQ ID NO: 4812892 - DNA, 25 bp, Homo sapien
tgcgaagaaatctgcccgagataac

SEQ ID NO: 4812893 - DNA, 25 bp, Homo sapien
tgccgtttacgtgccttgcgaagaa

SEQ ID NO: 4812894 - DNA, 25 bp, Homo sapien
tactgttcgcttttatgggctgccg

SEQ ID NO: 4812895 - DNA, 25 bp, Homo sapien
gaggctggagctgattcatccgtcc

SEQ ID NO: 4812896 - DNA, 25 bp, Homo sapien
tggtgtctcagttacagggtgacct

SEQ ID NO: 4812897 - DNA, 25 bp, Homo sapien
cttggccaaaaggaggataaagctc

SEQ ID NO: 4812898 - DNA, 25 bp, Homo sapien
tgggaccacactccacagatgaaag

SEQ ID NO: 4812899 - DNA, 25 bp, Homo sapien
gaagggatttgatgccaaggcgctc

SEQ ID NO: 4812900 - DNA, 25 bp, Homo sapien
aaggtggcggggtcctgtgggctct

SEQ ID NO: 4812901 - DNA, 25 bp, Homo sapien
cagaggcttgcacagagcctgggca

SEQ ID NO: 4812902 - DNA, 25 bp, Homo sapien
ggatccagcagaggcttgcacagag

SEQ ID NO: 4812903 - DNA, 25 bp, Homo sapien
cagggggcttatgggctctgtgggt

SEQ ID NO: 4812904 - DNA, 25 bp, Homo sapien
atggctcccagtaagggctgaactc

SEQ ID NO: 4812905 - DNA, 25 bp, Homo sapien
tcccagtaagggctgaactctgagc

SEQ ID NO: 4812906 - DNA, 25 bp, Homo sapien
cagtaagggctgaactctgagccct

SEQ ID NO: 4812907 - DNA, 25 bp, Homo sapien
taagggctgaactctgagccctggc

SEQ ID NO: 4812908 - DNA, 25 bp, Homo sapien
ctggcagagggagggtcccagagac

SEQ ID NO: 4812909 - DNA, 25 bp, Homo sapien
cagagggagggtcccagagactccc

SEQ ID NO: 4812910 - DNA, 25 bp, Homo sapien
agggagggtcccagagactcccctg

SEQ ID NO: 4812911 - DNA, 25 bp, Homo sapien
ggcagagggagggtcccagagactc

SEQ ID NO: 4812912 - DNA, 25 bp, Homo sapien
tctgagcgggaaccgccataccgct

SEQ ID NO: 4812913 - DNA, 25 bp, Homo sapien
tggggacccttcagcagaaccctgc

SEQ ID NO: 4812914 - DNA, 25 bp, Homo sapien
ttcagcagaaccctgccgagggcca

SEQ ID NO: 4812915 - DNA, 25 bp, Homo sapien
tctgtgagatctgagcgggaaccgc

SEQ ID NO: 4812916 - DNA, 25 bp, Homo sapien
agtggagattctgtgggtagttaag

SEQ ID NO: 4812917 - DNA, 25 bp, Homo sapien
ctggcacagggtagcgcccagagtg

SEQ ID NO: 4812918 - DNA, 25 bp, Homo sapien
tctgtgggtagttaagatgcccatt

SEQ ID NO: 4812919 - DNA, 25 bp, Homo sapien
tggcacagggtagcgcccagagtgg

SEQ ID NO: 4812920 - DNA, 25 bp, Homo sapien
gcccatggtcttccaccggtcgttg

SEQ ID NO: 4812921 - DNA, 25 bp, Homo sapien
gcgcggccggtcctcaagttgggca

SEQ ID NO: 4812922 - DNA, 25 bp, Homo sapien
ccatggtcttccaccggtcgttgac

SEQ ID NO: 4812923 - DNA, 25 bp, Homo sapien
tcaagttgggcagcgccgcccatgg

SEQ ID NO: 4812924 - DNA, 25 bp, Homo sapien
tccggcaggactggcgggggcgccg

SEQ ID NO: 4812925 - DNA, 25 bp, Homo sapien
ttccggcaggactggcgggggcgcc

SEQ ID NO: 4812926 - DNA, 25 bp, Homo sapien
cttccggcaggactggcgggggcgc

SEQ ID NO: 4812927 - DNA, 25 bp, Homo sapien
gagcgggagcgcgaaagccgccagc

SEQ ID NO: 4812928 - DNA, 25 bp, Homo sapien
gggagcgcgaaagccgccagcccaa

SEQ ID NO: 4812929 - DNA, 25 bp, Homo sapien
gcgccgctgtgtgcgggcgggagca

SEQ ID NO: 4812930 - DNA, 25 bp, Homo sapien
agcgggcgggcgtgtgaggatgagc

SEQ ID NO: 4812931 - DNA, 25 bp, Homo sapien
cacccgcggacttggatactaaact

SEQ ID NO: 4812932 - DNA, 25 bp, Homo sapien
ctcacacccgcggacttggatacta

SEQ ID NO: 4812933 - DNA, 25 bp, Homo sapien
ggacttggatactaaactccgcctc

SEQ ID NO: 4812934 - DNA, 25 bp, Homo sapien
tggatactaaactccgcctccgaaa

SEQ ID NO: 4812935 - DNA, 25 bp, Homo sapien
atgcgcggggcgggccccgagggcg

SEQ ID NO: 4812936 - DNA, 25 bp, Homo sapien
agtcaccatgcgcggggcgggcccc

SEQ ID NO: 4812937 - DNA, 25 bp, Homo sapien
tcaccatgcgcggggcgggccccga

SEQ ID NO: 4812938 - DNA, 25 bp, Homo sapien
accatgcgcggggcgggccccgagg

SEQ ID NO: 4812939 - DNA, 25 bp, Homo sapien
tctgtgcctccgaggatgttggcgt

SEQ ID NO: 4812940 - DNA, 25 bp, Homo sapien
tgcctccgaggatgttggcgtctga

SEQ ID NO: 4812941 - DNA, 25 bp, Homo sapien
ggcgtctgagtcaaacctcagaaac

SEQ ID NO: 4812942 - DNA, 25 bp, Homo sapien
atgttggcgtctgagtcaaacctca

SEQ ID NO: 4812943 - DNA, 25 bp, Homo sapien
tcatcttgtctcctgcccaagactg

SEQ ID NO: 4812944 - DNA, 25 bp, Homo sapien
ttgtctcctgcccaagactgcatct

SEQ ID NO: 4812945 - DNA, 25 bp, Homo sapien
tgcccaagactgcatctcctcttgt

SEQ ID NO: 4812946 - DNA, 25 bp, Homo sapien
cggttcacctctgtcatcttgtctc

SEQ ID NO: 4812947 - DNA, 25 bp, Homo sapien
gaaatgaggtgtctggattcgactg

SEQ ID NO: 4812948 - DNA, 25 bp, Homo sapien
tggaatactctgttcaaatgtgact

SEQ ID NO: 4812949 - DNA, 25 bp, Homo sapien
atgtgacttcatacagaaccacccc

SEQ ID NO: 4812950 - DNA, 25 bp, Homo sapien
gattcgactgtggttggaatactct

SEQ ID NO: 4812951 - DNA, 25 bp, Homo sapien
gcaagagcttggaatgccaagtttt

SEQ ID NO: 4812952 - DNA, 25 bp, Homo sapien
gtggcccgtcagacattctcataat

SEQ ID NO: 4812953 - DNA, 25 bp, Homo sapien
ggcaagagcttggaatgccaagttt

SEQ ID NO: 4812954 - DNA, 25 bp, Homo sapien
ttaaatgaccctccagcagacctcg

SEQ ID NO: 4812955 - DNA, 25 bp, Homo sapien
catcattgtctgtttgggtggcccc

SEQ ID NO: 4812956 - DNA, 25 bp, Homo sapien
gggcgtaacggtcgccatcattgtc

SEQ ID NO: 4812957 - DNA, 25 bp, Homo sapien
gggtggcccctgagcaactcaaagt

SEQ ID NO: 4812958 - DNA, 25 bp, Homo sapien
gggatccgccaagggagctgcaatt

SEQ ID NO: 4812959 - DNA, 25 bp, Homo sapien
aattcttttctgagccgtgcagtca

SEQ ID NO: 4812960 - DNA, 25 bp, Homo sapien
gaaaatgttcccaaagctcatcaca

SEQ ID NO: 4812961 - DNA, 25 bp, Homo sapien
agctgcaattcttttctgagccgtg

SEQ ID NO: 4812962 - DNA, 25 bp, Homo sapien
gaaagtctccatcgtcaatgcccct

SEQ ID NO: 4812963 - DNA, 25 bp, Homo sapien
ggtgagtggcttttacagatgtgaa

SEQ ID NO: 4812964 - DNA, 25 bp, Homo sapien
gagtgcatacaggtgagtggctttt

SEQ ID NO: 4812965 - DNA, 25 bp, Homo sapien
cagcaggtacctccaccctgagagt

SEQ ID NO: 4812966 - DNA, 25 bp, Homo sapien
tgaataatggatcaatggcggacgt

SEQ ID NO: 4812967 - DNA, 25 bp, Homo sapien
tctgtatccttttgagtacaaggga

SEQ ID NO: 4812968 - DNA, 25 bp, Homo sapien
aatggcggacgtgctcttgcctgag

SEQ ID NO: 4812969 - DNA, 25 bp, Homo sapien
acgtgctcttgcctgagagcgggca

SEQ ID NO: 4812970 - DNA, 25 bp, Homo sapien
catggtttgttcgtttcatgggtga

SEQ ID NO: 4812971 - DNA, 25 bp, Homo sapien
tgttcgtttcatgggtgacactaga

SEQ ID NO: 4812972 - DNA, 25 bp, Homo sapien
gagggcacgtgaaggccctgtccat

SEQ ID NO: 4812973 - DNA, 25 bp, Homo sapien
ctgtccatggtttgttcgtttcatg

SEQ ID NO: 4812974 - DNA, 25 bp, Homo sapien
gccaacattgctgggtaggtaaggc

SEQ ID NO: 4812975 - DNA, 25 bp, Homo sapien
gccttcttggagacatcgcttggtt

SEQ ID NO: 4812976 - DNA, 25 bp, Homo sapien
tcttccgcatagccggccttcttgg

SEQ ID NO: 4812977 - DNA, 25 bp, Homo sapien
gagacatcgcttggtttctgcagca

SEQ ID NO: 4812978 - DNA, 25 bp, Homo sapien
gctgccacgggcgtccaggcgagca

SEQ ID NO: 4812979 - DNA, 25 bp, Homo sapien
ggctgccacgggcgtccaggcgagc

SEQ ID NO: 4812980 - DNA, 25 bp, Homo sapien
ctgccacgggcgtccaggcgagcag

SEQ ID NO: 4812981 - DNA, 25 bp, Homo sapien
agggctgtgctgttggaccgagaaa

SEQ ID NO: 4812982 - DNA, 25 bp, Homo sapien
gctgtgctgttggaccgagaaatgt

SEQ ID NO: 4812983 - DNA, 25 bp, Homo sapien
tgctgttggaccgagaaatgtcgcc

SEQ ID NO: 4812984 - DNA, 25 bp, Homo sapien
ttggaccgagaaatgtcgccgcagg

SEQ ID NO: 4812985 - DNA, 25 bp, Homo sapien
gctgccagcattttatagggaagtg

SEQ ID NO: 4812986 - DNA, 25 bp, Homo sapien
tgccaggcccaacggaagctgctgg

SEQ ID NO: 4812987 - DNA, 25 bp, Homo sapien
tgggtgacacgtggcactgtgagct

SEQ ID NO: 4812988 - DNA, 25 bp, Homo sapien
ctgtatcagtgtggacgtggctgcc

SEQ ID NO: 4812989 - DNA, 25 bp, Homo sapien
cgtccccgtattgtggccaacatcg

SEQ ID NO: 4812990 - DNA, 25 bp, Homo sapien
tcccgggtgaacttgagcagctgga

SEQ ID NO: 4812991 - DNA, 25 bp, Homo sapien
agaaagcagcctcgggaaggagctt

SEQ ID NO: 4812992 - DNA, 25 bp, Homo sapien
agctttgtccgatggagctccgcgc

SEQ ID NO: 4812993 - DNA, 25 bp, Homo sapien
tgggacaccgcagaactgacccacc

SEQ ID NO: 4812994 - DNA, 25 bp, Homo sapien
tgaggctgccaccgctgttggctct

SEQ ID NO: 4812995 - DNA, 25 bp, Homo sapien
ccgcagaactgacccaccagggaag

SEQ ID NO: 4812996 - DNA, 25 bp, Homo sapien
ggacaccgcagaactgacccaccag

SEQ ID NO: 4812997 - DNA, 25 bp, Homo sapien
agggcagaagatggcctctgcccac

SEQ ID NO: 4812998 - DNA, 25 bp, Homo sapien
gaagggcagaagatggcctctgccc

SEQ ID NO: 4812999 - DNA, 25 bp, Homo sapien
aagggcagaagatggcctctgccca

SEQ ID NO: 4813000 - DNA, 25 bp, Homo sapien
ctgagctctggagggtccagaacaa

SEQ ID NO: 4813001 - DNA, 25 bp, Homo sapien
gctctggagggtccagaacaaagct

SEQ ID NO: 4813002 - DNA, 25 bp, Homo sapien
gagctctggagggtccagaacaaag

SEQ ID NO: 4813003 - DNA, 25 bp, Homo sapien
tcctgagctctggagggtccagaac

SEQ ID NO: 4813004 - DNA, 25 bp, Homo sapien
tacatgggttgctaagccacttgcc

SEQ ID NO: 4813005 - DNA, 25 bp, Homo sapien
caatcttgctacatggtccatctgc

SEQ ID NO: 4813006 - DNA, 25 bp, Homo sapien
tgccaccaatcttgctacatgggtt

SEQ ID NO: 4813007 - DNA, 25 bp, Homo sapien
ttgccactgtccacgagtttctgtg

SEQ ID NO: 4813008 - DNA, 25 bp, Homo sapien
gcctggaagtcatgatccctggatg

SEQ ID NO: 4813009 - DNA, 25 bp, Homo sapien
tagactcgaggcaggatttgtacct

SEQ ID NO: 4813010 - DNA, 25 bp, Homo sapien
gcttgcccgatgaatgagtagactc

SEQ ID NO: 4813011 - DNA, 25 bp, Homo sapien
gatgagtctctgtttcacactagcc

SEQ ID NO: 4813012 - DNA, 25 bp, Homo sapien
acagccaagtgtccgaggatggtga

SEQ ID NO: 4813013 - DNA, 25 bp, Homo sapien
ctctggttcaggctcgagacgaact

SEQ ID NO: 4813014 - DNA, 25 bp, Homo sapien
ttcaggctcgagacgaactcacagc

SEQ ID NO: 4813015 - DNA, 25 bp, Homo sapien
ggctcgagacgaactcacagccaag

SEQ ID NO: 4813016 - DNA, 25 bp, Homo sapien
taacaagacacgaattcattccaat

SEQ ID NO: 4813017 - DNA, 25 bp, Homo sapien
gagttcatgctaagatcctcgcatt

SEQ ID NO: 4813018 - DNA, 25 bp, Homo sapien
cagtgatgtttgagcgccgactccc

SEQ ID NO: 4813019 - DNA, 25 bp, Homo sapien
ttccaattgatttgacgggccactg

SEQ ID NO: 4813020 - DNA, 25 bp, Homo sapien
tcagtaagttccacagttctacaag

SEQ ID NO: 4813021 - DNA, 25 bp, Homo sapien
tctacaagactgcaggaattctcct

SEQ ID NO: 4813022 - DNA, 25 bp, Homo sapien
caggctgggacctttgaggaagata

SEQ ID NO: 4813023 - DNA, 25 bp, Homo sapien
gggtctcaagagttgtccctggaag

SEQ ID NO: 4813024 - DNA, 25 bp, Homo sapien
ccaggtagtggtggtgcgctatcca

SEQ ID NO: 4813025 - DNA, 25 bp, Homo sapien
gagcaaagcacctttgcatacaaga

SEQ ID NO: 4813026 - DNA, 25 bp, Homo sapien
tggtgcgctatccacttgtagattt

SEQ ID NO: 4813027 - DNA, 25 bp, Homo sapien
gaaggagcaaagcacctttgcatac

SEQ ID NO: 4813028 - DNA, 25 bp, Homo sapien
tttaagcctaccctggaaagcacac

SEQ ID NO: 4813029 - DNA, 25 bp, Homo sapien
tctgctgtcaaagtcaaccttagtg

SEQ ID NO: 4813030 - DNA, 25 bp, Homo sapien
tcatattccagtggctccgacagct

SEQ ID NO: 4813031 - DNA, 25 bp, Homo sapien
gaagtcatctgctacggtcactggg

SEQ ID NO: 4813032 - DNA, 25 bp, Homo sapien
cagaccttggacatagtaattggga

SEQ ID NO: 4813033 - DNA, 25 bp, Homo sapien
gaattttacgagaacctggctgggc

SEQ ID NO: 4813034 - DNA, 25 bp, Homo sapien
gatagtaaataccaaagtgcgaggt

SEQ ID NO: 4813035 - DNA, 25 bp, Homo sapien
cataccttggtaactagcatccaga

SEQ ID NO: 4813036 - DNA, 25 bp, Homo sapien
acaccagtagtagctttccaacacg

SEQ ID NO: 4813037 - DNA, 25 bp, Homo sapien
tttccaatgggtaagtagcactaac

SEQ ID NO: 4813038 - DNA, 25 bp, Homo sapien
aaaccagatgtttgcacaagcccca

SEQ ID NO: 4813039 - DNA, 25 bp, Homo sapien
tgtcacatgtcataagcccacagct

SEQ ID NO: 4813040 - DNA, 25 bp, Homo sapien
ttatggttcttaatatagaagtatt

SEQ ID NO: 4813041 - DNA, 25 bp, Homo sapien
tatggttcttaatatagaagtattt

SEQ ID NO: 4813042 - DNA, 25 bp, Homo sapien
cattatggttcttaatatagaagta

SEQ ID NO: 4813043 - DNA, 25 bp, Homo sapien
tcattatggttcttaatatagaagt

SEQ ID NO: 4813044 - DNA, 25 bp, Homo sapien
tcggcgccttcatcagtatgtgaaa

SEQ ID NO: 4813045 - DNA, 25 bp, Homo sapien
gatgttctagacttggagtgggatc

SEQ ID NO: 4813046 - DNA, 25 bp, Homo sapien
ttcttataggaaattcggcgccttc

SEQ ID NO: 4813047 - DNA, 25 bp, Homo sapien
tctagacttggagtgggatcagcat

SEQ ID NO: 4813048 - DNA, 25 bp, Homo sapien
tacacgttgattggatctaggatcc

SEQ ID NO: 4813049 - DNA, 25 bp, Homo sapien
tcttgttccacatcaggcttgtaag

SEQ ID NO: 4813050 - DNA, 25 bp, Homo sapien
catccgtgttgttgcctctagctgt

SEQ ID NO: 4813051 - DNA, 25 bp, Homo sapien
gattctgcattgtgtaagttgtcat

SEQ ID NO: 4813052 - DNA, 25 bp, Homo sapien
ccccttttgaagtggagcaaggcca

SEQ ID NO: 4813053 - DNA, 25 bp, Homo sapien
tctgtaaaggagaagatggcacacc

SEQ ID NO: 4813054 - DNA, 25 bp, Homo sapien
taatgtagaatgtgaaagctgccct

SEQ ID NO: 4813055 - DNA, 25 bp, Homo sapien
gaacccagagttcttaccgtggcag

SEQ ID NO: 4813056 - DNA, 25 bp, Homo sapien
taaagctagtttgaaatctgcaatt

SEQ ID NO: 4813057 - DNA, 25 bp, Homo sapien
tgggcaaaggtgtctaagttattac

SEQ ID NO: 4813058 - DNA, 25 bp, Homo sapien
caatggcttgacactattagataaa

SEQ ID NO: 4813059 - DNA, 25 bp, Homo sapien
tgtgcttggttcgttatattttaaa

SEQ ID NO: 4813060 - DNA, 25 bp, Homo sapien
tcaagccagccggacgcattctcat

SEQ ID NO: 4813061 - DNA, 25 bp, Homo sapien
tccactaaagagtcaagccagccgg

SEQ ID NO: 4813062 - DNA, 25 bp, Homo sapien
tgctaggggcaacaccctccactaa

SEQ ID NO: 4813063 - DNA, 25 bp, Homo sapien
gggtcatcttttgctaaatccaacc

SEQ ID NO: 4813064 - DNA, 25 bp, Homo sapien
ttctagaggagcaacagtcagccca

SEQ ID NO: 4813065 - DNA, 25 bp, Homo sapien
tgctatctcaagtgcaggccctgtg

SEQ ID NO: 4813066 - DNA, 25 bp, Homo sapien
gtgttagggaagcacacggagcccc

SEQ ID NO: 4813067 - DNA, 25 bp, Homo sapien
tgtggccgtcgaaacatcaagtacc

SEQ ID NO: 4813068 - DNA, 25 bp, Homo sapien
atgatttctatcagtcccctgcctg

SEQ ID NO: 4813069 - DNA, 25 bp, Homo sapien
tcaaacgatcctccacgcctgacca

SEQ ID NO: 4813070 - DNA, 25 bp, Homo sapien
tctatcagtcccctgcctgttaggc

SEQ ID NO: 4813071 - DNA, 25 bp, Homo sapien
tatcagtcccctgcctgttaggcca

SEQ ID NO: 4813072 - DNA, 25 bp, Homo sapien
aatgaatggaattctctctcaccca

SEQ ID NO: 4813073 - DNA, 25 bp, Homo sapien
gacaaaatctgacaggccatgagtt

SEQ ID NO: 4813074 - DNA, 25 bp, Homo sapien
gatttgctccactgtaataaaggat

SEQ ID NO: 4813075 - DNA, 25 bp, Homo sapien
tctggagggttcattatactcttct

SEQ ID NO: 4813076 - DNA, 25 bp, Homo sapien
gtatgattcaatagtgaaagggaca

SEQ ID NO: 4813077 - DNA, 25 bp, Homo sapien
gcatcatttgatgctttgagcacca

SEQ ID NO: 4813078 - DNA, 25 bp, Homo sapien
tcctggactgtatgaactgattctc

SEQ ID NO: 4813079 - DNA, 25 bp, Homo sapien
actcaggatcgtttctgcagaatca

SEQ ID NO: 4813080 - DNA, 25 bp, Homo sapien
tacaatagtagccagcgtgaggcag

SEQ ID NO: 4813081 - DNA, 25 bp, Homo sapien
cacagccaagaagattgccccgttt

SEQ ID NO: 4813082 - DNA, 25 bp, Homo sapien
tgtatcaggaccatccaaggacgca

SEQ ID NO: 4813083 - DNA, 25 bp, Homo sapien
gataaacagcatcgaatgtgccgtg

SEQ ID NO: 4813084 - DNA, 25 bp, Homo sapien
ctgacgcctgaactgtcaggatatc

SEQ ID NO: 4813085 - DNA, 25 bp, Homo sapien
gatatccggctggaatgcacagtcg

SEQ ID NO: 4813086 - DNA, 25 bp, Homo sapien
ctgcatcccctgacgcctgaactgt

SEQ ID NO: 4813087 - DNA, 25 bp, Homo sapien
ggctggaatgcacagtcgctcccac

SEQ ID NO: 4813088 - DNA, 25 bp, Homo sapien
gctttcagctttgcgttctctgtgg

SEQ ID NO: 4813089 - DNA, 25 bp, Homo sapien
tcagctttgcgttctctgtggcagc

SEQ ID NO: 4813090 - DNA, 25 bp, Homo sapien
ctttgcgttctctgtggcagcctcc

SEQ ID NO: 4813091 - DNA, 25 bp, Homo sapien
tgctttcagctttgcgttctctgtg

SEQ ID NO: 4813092 - DNA, 25 bp, Homo sapien
ttccaaagaaatcttgccggctggt

SEQ ID NO: 4813093 - DNA, 25 bp, Homo sapien
tccaaagaaatcttgccggctggtg

SEQ ID NO: 4813094 - DNA, 25 bp, Homo sapien
gctgaaccccttaccgaccagcaga

SEQ ID NO: 4813095 - DNA, 25 bp, Homo sapien
gcaacactgctgaaccccttaccga

SEQ ID NO: 4813096 - DNA, 25 bp, Homo sapien
tggcagttgctgcattgttataaat

SEQ ID NO: 4813097 - DNA, 25 bp, Homo sapien
cagttgctgcattgttataaataga

SEQ ID NO: 4813098 - DNA, 25 bp, Homo sapien
agtcccaccagaggtcaggccacag

SEQ ID NO: 4813099 - DNA, 25 bp, Homo sapien
cagagtcccaccagaggtcaggcca

SEQ ID NO: 4813100 - DNA, 25 bp, Homo sapien
cccggccggccggagattctctgca

SEQ ID NO: 4813101 - DNA, 25 bp, Homo sapien
ccccggccggccggagattctctgc

SEQ ID NO: 4813102 - DNA, 25 bp, Homo sapien
ccggccggccggagattctctgcat

SEQ ID NO: 4813103 - DNA, 25 bp, Homo sapien
cagaggccacaggcaggggtggggg

SEQ ID NO: 4813104 - DNA, 25 bp, Homo sapien
acaggcaggggtggggggagcgagt

SEQ ID NO: 4813105 - DNA, 25 bp, Homo sapien
cacaggcaggggtggggggagcgag

SEQ ID NO: 4813106 - DNA, 25 bp, Homo sapien
aggcaggggtggggggagcgagtgg

SEQ ID NO: 4813107 - DNA, 25 bp, Homo sapien
gagcccggtcctggctagaggcgac

SEQ ID NO: 4813108 - DNA, 25 bp, Homo sapien
ctgtggatggaaggcgggagcccca

SEQ ID NO: 4813109 - DNA, 25 bp, Homo sapien
gccccagcatatgagacaagagccg

SEQ ID NO: 4813110 - DNA, 25 bp, Homo sapien
atatgagacaagagccgagcccggt

SEQ ID NO: 4813111 - DNA, 25 bp, Homo sapien
tggctttctcgacctcacctagtgc

SEQ ID NO: 4813112 - DNA, 25 bp, Homo sapien
gcccatcggatgttggctttctcga

SEQ ID NO: 4813113 - DNA, 25 bp, Homo sapien
catcctggcccgtgagggtacagaa

SEQ ID NO: 4813114 - DNA, 25 bp, Homo sapien
cacctagtgcctttccatctggaag

SEQ ID NO: 4813115 - DNA, 25 bp, Homo sapien
aacgtcactacacatcccttggata

SEQ ID NO: 4813116 - DNA, 25 bp, Homo sapien
tagccagactgatcaggaaaaaagc

SEQ ID NO: 4813117 - DNA, 25 bp, Homo sapien
aaaagctatcttaggaactagagga

SEQ ID NO: 4813118 - DNA, 25 bp, Homo sapien
aagatatagatcaccaatgtcaagg

SEQ ID NO: 4813119 - DNA, 25 bp, Homo sapien
aatgctgggatctccgctggctgta

SEQ ID NO: 4813120 - DNA, 25 bp, Homo sapien
cacattgcacaggaggttctagcca

SEQ ID NO: 4813121 - DNA, 25 bp, Homo sapien
ttctagccaatgcacttaggcaagg

SEQ ID NO: 4813122 - DNA, 25 bp, Homo sapien
tgctttcaccccaagatagggaacg

SEQ ID NO: 4813123 - DNA, 25 bp, Homo sapien
agtactctccacgaccaaggacggt

SEQ ID NO: 4813124 - DNA, 25 bp, Homo sapien
tgtgcctcctggtaagtgcattggt

SEQ ID NO: 4813125 - DNA, 25 bp, Homo sapien
tcagctgagcgtccgtggccggacc

SEQ ID NO: 4813126 - DNA, 25 bp, Homo sapien
gtgttcctagcccttcttcggtgag

SEQ ID NO: 4813127 - DNA, 25 bp, Homo sapien
tgtccctgctttagtgcaacaaaga

SEQ ID NO: 4813128 - DNA, 25 bp, Homo sapien
tccaggaataaaccagcggcctgag

SEQ ID NO: 4813129 - DNA, 25 bp, Homo sapien
tcactcaagaaatgcgggttcgggg

SEQ ID NO: 4813130 - DNA, 25 bp, Homo sapien
tggctcctgcctcgagtgtttgctc

SEQ ID NO: 4813131 - DNA, 25 bp, Homo sapien
aattattaggctgagtgtgggtccc

SEQ ID NO: 4813132 - DNA, 25 bp, Homo sapien
cagggatgggcttccagacgtctgt

SEQ ID NO: 4813133 - DNA, 25 bp, Homo sapien
caagacttccctagagcttgggtgc

SEQ ID NO: 4813134 - DNA, 25 bp, Homo sapien
gcaatagcccgtggacaaaggagca

SEQ ID NO: 4813135 - DNA, 25 bp, Homo sapien
ttggcaaagcaagtctacataaggc

SEQ ID NO: 4813136 - DNA, 25 bp, Homo sapien
agctggtttcgggtctaaatgccca

SEQ ID NO: 4813137 - DNA, 25 bp, Homo sapien
tacataaggccgcatgacagagggc

SEQ ID NO: 4813138 - DNA, 25 bp, Homo sapien
tatttgtgagtctaacctagcgggt

SEQ ID NO: 4813139 - DNA, 25 bp, Homo sapien
tgaagctctggtcccggtagatatt

SEQ ID NO: 4813140 - DNA, 25 bp, Homo sapien
ttggccacgttgctctcgctgacgg

SEQ ID NO: 4813141 - DNA, 25 bp, Homo sapien
gatggcttggatcttgccctcctgg

SEQ ID NO: 4813142 - DNA, 25 bp, Homo sapien
gggttcacctcgatgctgagctgca

SEQ ID NO: 4813143 - DNA, 25 bp, Homo sapien
ggaaggccagttcactcactcggtc

SEQ ID NO: 4813144 - DNA, 25 bp, Homo sapien
aaggccagttcactcactcggtcac

SEQ ID NO: 4813145 - DNA, 25 bp, Homo sapien
actcggtcactcaaggagggctttc

SEQ ID NO: 4813146 - DNA, 25 bp, Homo sapien
tcactcggtcactcaaggagggctt

SEQ ID NO: 4813147 - DNA, 25 bp, Homo sapien
aatcataaccctcagacagaagaag

SEQ ID NO: 4813148 - DNA, 25 bp, Homo sapien
cactgctgctgttacaatcataacc

SEQ ID NO: 4813149 - DNA, 25 bp, Homo sapien
acagaagaaggtggccggcctggcc

SEQ ID NO: 4813150 - DNA, 25 bp, Homo sapien
gggtcagacagtagctcggagtcac

SEQ ID NO: 4813151 - DNA, 25 bp, Homo sapien
tggaatgttcttcagccttaagaag

SEQ ID NO: 4813152 - DNA, 25 bp, Homo sapien
aatggaatgttcttcagccttaaga

SEQ ID NO: 4813153 - DNA, 25 bp, Homo sapien
cagccttaagaaggaaggatgttcc

SEQ ID NO: 4813154 - DNA, 25 bp, Homo sapien
gccttaagaaggaaggatgttccaa

SEQ ID NO: 4813155 - DNA, 25 bp, Homo sapien
taaaatgttacataggctttaccat

SEQ ID NO: 4813156 - DNA, 25 bp, Homo sapien
gcattcccctacttatgcatcatat

SEQ ID NO: 4813157 - DNA, 25 bp, Homo sapien
cctgagtacccagactcagggaacc

SEQ ID NO: 4813158 - DNA, 25 bp, Homo sapien
agctcactcattagagtaacacctg

SEQ ID NO: 4813159 - DNA, 25 bp, Homo sapien
cggaagtacccagcaattcctaaga

SEQ ID NO: 4813160 - DNA, 25 bp, Homo sapien
ggaagtacccagcaattcctaagat

SEQ ID NO: 4813161 - DNA, 25 bp, Homo sapien
tgtccggaagtacccagcaattcct

SEQ ID NO: 4813162 - DNA, 25 bp, Homo sapien
tccggaagtacccagcaattcctaa

SEQ ID NO: 4813163 - DNA, 25 bp, Homo sapien
agggccaaatcgtcaccaggctgcg

SEQ ID NO: 4813164 - DNA, 25 bp, Homo sapien
gggcctagtctcctatttcagaagg

SEQ ID NO: 4813165 - DNA, 25 bp, Homo sapien
tgtggtccagtcacagacgcgctga

SEQ ID NO: 4813166 - DNA, 25 bp, Homo sapien
gcctgcccggtttttgtgatgatta

SEQ ID NO: 4813167 - DNA, 25 bp, Homo sapien
gcctggtgcagccaacagcagtcag

SEQ ID NO: 4813168 - DNA, 25 bp, Homo sapien
cagtcagtggaagcttctggagacc

SEQ ID NO: 4813169 - DNA, 25 bp, Homo sapien
acagcagtcagtggaagcttctgga

SEQ ID NO: 4813170 - DNA, 25 bp, Homo sapien
ctggtgcagccaacagcagtcagtg

SEQ ID NO: 4813171 - DNA, 25 bp, Homo sapien
ccaggtagccctgatttgacccaaa

SEQ ID NO: 4813172 - DNA, 25 bp, Homo sapien
tctcccagaccaggtagccctgatt

SEQ ID NO: 4813173 - DNA, 25 bp, Homo sapien
ttgagggtggcatcagcagttagaa

SEQ ID NO: 4813174 - DNA, 25 bp, Homo sapien
ctttgagggtggcatcagcagttag

SEQ ID NO: 4813175 - DNA, 25 bp, Homo sapien
cactgggcacgactgatctttttca

SEQ ID NO: 4813176 - DNA, 25 bp, Homo sapien
caaacaacaggtgaagacgcttcct

SEQ ID NO: 4813177 - DNA, 25 bp, Homo sapien
tactacggctgttgagtgacgcctc

SEQ ID NO: 4813178 - DNA, 25 bp, Homo sapien
tttcaatgcacccaactccaatcag

SEQ ID NO: 4813179 - DNA, 25 bp, Homo sapien
aatgtttgtttccagtgcttggaag

SEQ ID NO: 4813180 - DNA, 25 bp, Homo sapien
atgtttgtttccagtgcttggaagg

SEQ ID NO: 4813181 - DNA, 25 bp, Homo sapien
ttctcccacacaggcgagaaattgt

SEQ ID NO: 4813182 - DNA, 25 bp, Homo sapien
cagggacaacgtggaacttctccca

SEQ ID NO: 4813183 - DNA, 25 bp, Homo sapien
acttgtcacttagaagactctgtgc

SEQ ID NO: 4813184 - DNA, 25 bp, Homo sapien
caggcgagaaattgtgacttgtcac

SEQ ID NO: 4813185 - DNA, 25 bp, Homo sapien
ttgtctgcataaagcggtcttctgc

SEQ ID NO: 4813186 - DNA, 25 bp, Homo sapien
tcctgttagggcctcgccagaggga

SEQ ID NO: 4813187 - DNA, 25 bp, Homo sapien
cccaataccctaggcacactctgga

SEQ ID NO: 4813188 - DNA, 25 bp, Homo sapien
cagagggacactggacttgtctgca

SEQ ID NO: 4813189 - DNA, 25 bp, Homo sapien
ctcaaacacagtgccgtttggaacg

SEQ ID NO: 4813190 - DNA, 25 bp, Homo sapien
tgccgtttggaacggggaagcactc

SEQ ID NO: 4813191 - DNA, 25 bp, Homo sapien
gctctcaaacacagtgccgtttgga

SEQ ID NO: 4813192 - DNA, 25 bp, Homo sapien
tgtgctctcaaacacagtgccgttt

SEQ ID NO: 4813193 - DNA, 25 bp, Homo sapien
cctgctcgccgtactggttgtagaa

SEQ ID NO: 4813194 - DNA, 25 bp, Homo sapien
ctccatgtggctgcacgcctggatc

SEQ ID NO: 4813195 - DNA, 25 bp, Homo sapien
tggatccagccaactacccaagtct

SEQ ID NO: 4813196 - DNA, 25 bp, Homo sapien
cgatggaggctttcacatcaatcac

SEQ ID NO: 4813197 - DNA, 25 bp, Homo sapien
taattatgcggttctgacatccagc

SEQ ID NO: 4813198 - DNA, 25 bp, Homo sapien
tgcatatatcactaccgcggcctgt

SEQ ID NO: 4813199 - DNA, 25 bp, Homo sapien
aaccaggcattgaaaggacagaggc

SEQ ID NO: 4813200 - DNA, 25 bp, Homo sapien
gagcgccggcagactcataaataag

SEQ ID NO: 4813201 - DNA, 25 bp, Homo sapien
cggcgccctcggggcgagcgccgac

SEQ ID NO: 4813202 - DNA, 25 bp, Homo sapien
ccggcgccctcggggcgagcgccga

SEQ ID NO: 4813203 - DNA, 25 bp, Homo sapien
ccgcggcttccaggaggcgagctca

SEQ ID NO: 4813204 - DNA, 25 bp, Homo sapien
gccgccgcctgcttcgccgcggccg

SEQ ID NO: 4813205 - DNA, 25 bp, Homo sapien
gctccggccgctcgccggtgacggg

SEQ ID NO: 4813206 - DNA, 25 bp, Homo sapien
cccgtcggcgcccactcgcgggcgc

SEQ ID NO: 4813207 - DNA, 25 bp, Homo sapien
acgcgtgtgcgctgggcgcgggctg

SEQ ID NO: 4813208 - DNA, 25 bp, Homo sapien
gcgggctgcggagctgacggcgcag

SEQ ID NO: 4813209 - DNA, 25 bp, Homo sapien
cagcctcaaagttaagccgaacttt

SEQ ID NO: 4813210 - DNA, 25 bp, Homo sapien
aagttaagccgaactttgctgcggg

SEQ ID NO: 4813211 - DNA, 25 bp, Homo sapien
cgctgataccgtcccggacgggcgg

SEQ ID NO: 4813212 - DNA, 25 bp, Homo sapien
gcccgtgacatctccgctgataccg

SEQ ID NO: 4813213 - DNA, 25 bp, Homo sapien
cagcgaataatagccgcccgtgaca

SEQ ID NO: 4813214 - DNA, 25 bp, Homo sapien
gtgacatctccgctgataccgtccc

SEQ ID NO: 4813215 - DNA, 25 bp, Homo sapien
gtgttgggcacagacccacggcagc

SEQ ID NO: 4813216 - DNA, 25 bp, Homo sapien
acggcagcctcagcatatgtggaag

SEQ ID NO: 4813217 - DNA, 25 bp, Homo sapien
tatgtggaaggctcatgacgcatcc

SEQ ID NO: 4813218 - DNA, 25 bp, Homo sapien
catccacgcgcgtgtgaagtgccgg

SEQ ID NO: 4813219 - DNA, 25 bp, Homo sapien
ggcatcaccgtgagctggggctttg

SEQ ID NO: 4813220 - DNA, 25 bp, Homo sapien
catcaccgtgagctggggctttgca

SEQ ID NO: 4813221 - DNA, 25 bp, Homo sapien
aggcatcaccgtgagctggggcttt

SEQ ID NO: 4813222 - DNA, 25 bp, Homo sapien
gcatcaccgtgagctggggctttgc

SEQ ID NO: 4813223 - DNA, 25 bp, Homo sapien
ccctgagatgtcggggataatgcca

SEQ ID NO: 4813224 - DNA, 25 bp, Homo sapien
agatgtcggggataatgccaggagc

SEQ ID NO: 4813225 - DNA, 25 bp, Homo sapien
tgtcggggataatgccaggagccat

SEQ ID NO: 4813226 - DNA, 25 bp, Homo sapien
tgagatgtcggggataatgccagga

SEQ ID NO: 4813227 - DNA, 25 bp, Homo sapien
gaatatcttgtgtcctaggaaaccc

SEQ ID NO: 4813228 - DNA, 25 bp, Homo sapien
taggaaacccctctgtcccagtgaa

SEQ ID NO: 4813229 - DNA, 25 bp, Homo sapien
tgcgacttccatgctttagcactga

SEQ ID NO: 4813230 - DNA, 25 bp, Homo sapien
tgaaaccttgtcaccctgcagtcag

SEQ ID NO: 4813231 - DNA, 25 bp, Homo sapien
ggatattaataagcctggccggttc

SEQ ID NO: 4813232 - DNA, 25 bp, Homo sapien
caggatattaataagcctggccggt

SEQ ID NO: 4813233 - DNA, 25 bp, Homo sapien
tcagcaggatattaataagcctggc

SEQ ID NO: 4813234 - DNA, 25 bp, Homo sapien
attaataagcctggccggttcccag

SEQ ID NO: 4813235 - DNA, 25 bp, Homo sapien
agcaaacaggaactgcgcgctgagc

SEQ ID NO: 4813236 - DNA, 25 bp, Homo sapien
caagctcacggtctagccgaggaga

SEQ ID NO: 4813237 - DNA, 25 bp, Homo sapien
gggacaagtggcaatggccccaaac

SEQ ID NO: 4813238 - DNA, 25 bp, Homo sapien
gacctcagctcatgggttcccgggt

SEQ ID NO: 4813239 - DNA, 25 bp, Homo sapien
cttgcgagtcttccatttaacttct

SEQ ID NO: 4813240 - DNA, 25 bp, Homo sapien
taacaacttcacgatgatctttgca

SEQ ID NO: 4813241 - DNA, 25 bp, Homo sapien
cagataagctcattcccacagaggt

SEQ ID NO: 4813242 - DNA, 25 bp, Homo sapien
tgatgaatttcttgcgagtcttcca

SEQ ID NO: 4813243 - DNA, 25 bp, Homo sapien
agaattatgtcgaggacagggagtt

SEQ ID NO: 4813244 - DNA, 25 bp, Homo sapien
acagagaattatgtcgaggacaggg

SEQ ID NO: 4813245 - DNA, 25 bp, Homo sapien
attatgtcgaggacagggagttttt

SEQ ID NO: 4813246 - DNA, 25 bp, Homo sapien
ctacagagaattatgtcgaggacag

SEQ ID NO: 4813247 - DNA, 25 bp, Homo sapien
ttcctctcaatctcacgagccaaag

SEQ ID NO: 4813248 - DNA, 25 bp, Homo sapien
ctcgagccggactgtcgctgcactg

SEQ ID NO: 4813249 - DNA, 25 bp, Homo sapien
gggttacacagaccacggcgtctga

SEQ ID NO: 4813250 - DNA, 25 bp, Homo sapien
ttggacagtctttcccggggcagcg

SEQ ID NO: 4813251 - DNA, 25 bp, Homo sapien
atctcctccacttcccaaactttgg

SEQ ID NO: 4813252 - DNA, 25 bp, Homo sapien
tcctccacttcccaaactttggcaa

SEQ ID NO: 4813253 - DNA, 25 bp, Homo sapien
ggtactgtcatctcctccacttccc

SEQ ID NO: 4813254 - DNA, 25 bp, Homo sapien
ctccacttcccaaactttggcaaag

SEQ ID NO: 4813255 - DNA, 25 bp, Homo sapien
ggtcggagcccacctttaggcaaga

SEQ ID NO: 4813256 - DNA, 25 bp, Homo sapien
taataaacaggatgtcgccactcgg

SEQ ID NO: 4813257 - DNA, 25 bp, Homo sapien
tctaaatatcgtgggaggtcggagc

SEQ ID NO: 4813258 - DNA, 25 bp, Homo sapien
ttttcgaaatgctgaatgctccatg

SEQ ID NO: 4813259 - DNA, 25 bp, Homo sapien
tagcatggtttttccgaatctcgct

SEQ ID NO: 4813260 - DNA, 25 bp, Homo sapien
catttagtcatgtctatgcacagcg

SEQ ID NO: 4813261 - DNA, 25 bp, Homo sapien
tccgaatctcgctgcagccatttag

SEQ ID NO: 4813262 - DNA, 25 bp, Homo sapien
gcagccatttagtcatgtctatgca

SEQ ID NO: 4813263 - DNA, 25 bp, Homo sapien
tagagccaaactgtgcccatggatg

SEQ ID NO: 4813264 - DNA, 25 bp, Homo sapien
gcacagttagtggttcctcctacgg

SEQ ID NO: 4813265 - DNA, 25 bp, Homo sapien
ggtataactgctgtcaagtcctagg

SEQ ID NO: 4813266 - DNA, 25 bp, Homo sapien
tcttccgtaaacctagtgactctgg

SEQ ID NO: 4813267 - DNA, 25 bp, Homo sapien
cctgggccttgccattggcgatatt

SEQ ID NO: 4813268 - DNA, 25 bp, Homo sapien
tgggccttgccattggcgatattac

SEQ ID NO: 4813269 - DNA, 25 bp, Homo sapien
gccttgccattggcgatattactgt

SEQ ID NO: 4813270 - DNA, 25 bp, Homo sapien
ggccttgccattggcgatattactg

SEQ ID NO: 4813271 - DNA, 25 bp, Homo sapien
aatctcttttgtgctgggaggtagg

SEQ ID NO: 4813272 - DNA, 25 bp, Homo sapien
ggcacgtgggaaatctcttttgtgc

SEQ ID NO: 4813273 - DNA, 25 bp, Homo sapien
ctgggaggtaggtttgtcttagtgt

SEQ ID NO: 4813274 - DNA, 25 bp, Homo sapien
ggtggcacgtgggaaatctcttttg

SEQ ID NO: 4813275 - DNA, 25 bp, Homo sapien
cagctgtacttgttggttttctgtg

SEQ ID NO: 4813276 - DNA, 25 bp, Homo sapien
gagctttgttctcagctgtacttgt

SEQ ID NO: 4813277 - DNA, 25 bp, Homo sapien
cttgagccagaagttgtggttgagc

SEQ ID NO: 4813278 - DNA, 25 bp, Homo sapien
gaagttgtggttgagctttgttctc

SEQ ID NO: 4813279 - DNA, 25 bp, Homo sapien
aagcattgcgtgcagcaggagtagc

SEQ ID NO: 4813280 - DNA, 25 bp, Homo sapien
gaacaaagcctatctcaagttgctg

SEQ ID NO: 4813281 - DNA, 25 bp, Homo sapien
gctggcggtctttcacatcttgtac

SEQ ID NO: 4813282 - DNA, 25 bp, Homo sapien
tccgttcttacctctgcagccagtt

SEQ ID NO: 4813283 - DNA, 25 bp, Homo sapien
ggccactggaggagttgctctgggt

SEQ ID NO: 4813284 - DNA, 25 bp, Homo sapien
cttgggcagacagcgatcagacaca

SEQ ID NO: 4813285 - DNA, 25 bp, Homo sapien
tactgtttgcggctttctgtggtga

SEQ ID NO: 4813286 - DNA, 25 bp, Homo sapien
cacagtgcagaagcggccactggag

SEQ ID NO: 4813287 - DNA, 25 bp, Homo sapien
ctgtacatctctccacaatgaacac

SEQ ID NO: 4813288 - DNA, 25 bp, Homo sapien
cctgtgtctagtctgttgtgttgtg

SEQ ID NO: 4813289 - DNA, 25 bp, Homo sapien
cactgcggatgtctgttcccacgag

SEQ ID NO: 4813290 - DNA, 25 bp, Homo sapien
tgttcccacgagcaagggcgtttga

SEQ ID NO: 4813291 - DNA, 25 bp, Homo sapien
gcgtttgatagctggcagctgccct

SEQ ID NO: 4813292 - DNA, 25 bp, Homo sapien
cttctggtgatagtcattgttggcc

SEQ ID NO: 4813293 - DNA, 25 bp, Homo sapien
taacgggaggcattgcatccaggtt

SEQ ID NO: 4813294 - DNA, 25 bp, Homo sapien
cagctgaactgtgggagtgccacag

SEQ ID NO: 4813295 - DNA, 25 bp, Homo sapien
gctgaggagtccttcggtgcttctg

SEQ ID NO: 4813296 - DNA, 25 bp, Homo sapien
gggcgtctgactcccatgtaattta

SEQ ID NO: 4813297 - DNA, 25 bp, Homo sapien
tgcggggttacaggtctcaactctt

SEQ ID NO: 4813298 - DNA, 25 bp, Homo sapien
taatttacctaatgagaggtctcgg

SEQ ID NO: 4813299 - DNA, 25 bp, Homo sapien
tgcctgtctgggcatttgctgccga

SEQ ID NO: 4813300 - DNA, 25 bp, Homo sapien
gctccaggcttcgtattccacgcag

SEQ ID NO: 4813301 - DNA, 25 bp, Homo sapien
tccaggcttcgtattccacgcagac

SEQ ID NO: 4813302 - DNA, 25 bp, Homo sapien
gctgctccaggcttcgtattccacg

SEQ ID NO: 4813303 - DNA, 25 bp, Homo sapien
gagctgctccaggcttcgtattcca

SEQ ID NO: 4813304 - DNA, 25 bp, Homo sapien
gaaagagccatgaaatctctaggtg

SEQ ID NO: 4813305 - DNA, 25 bp, Homo sapien
gcctgggctgacttatatcagaacc

SEQ ID NO: 4813306 - DNA, 25 bp, Homo sapien
gatttgccttgggtgagaatctggc

SEQ ID NO: 4813307 - DNA, 25 bp, Homo sapien
tctaggtgcccacatgtgaagagtg

SEQ ID NO: 4813308 - DNA, 25 bp, Homo sapien
aatgtatttctggtcagttttcaga

SEQ ID NO: 4813309 - DNA, 25 bp, Homo sapien
tatttctggtcagttttcagaatta

SEQ ID NO: 4813310 - DNA, 25 bp, Homo sapien
cagaattaaatgacattttagctgg

SEQ ID NO: 4813311 - DNA, 25 bp, Homo sapien
caaatgtatttctggtcagttttca

SEQ ID NO: 4813312 - DNA, 25 bp, Homo sapien
tccagtgagaagtgatgatcactta

SEQ ID NO: 4813313 - DNA, 25 bp, Homo sapien
gagaagtgatgatcacttatacaag

SEQ ID NO: 4813314 - DNA, 25 bp, Homo sapien
tgatgatcacttatacaagtgtttt

SEQ ID NO: 4813315 - DNA, 25 bp, Homo sapien
tttccagtgagaagtgatgatcact

SEQ ID NO: 4813316 - DNA, 25 bp, Homo sapien
tgagaatcacacagggtccctgtcc

SEQ ID NO: 4813317 - DNA, 25 bp, Homo sapien
ttcttgagggcaccgattgcgagca

SEQ ID NO: 4813318 - DNA, 25 bp, Homo sapien
tcctctaaagccagtggatgtgctg

SEQ ID NO: 4813319 - DNA, 25 bp, Homo sapien
tagtttgatacgtcactgcagtacc

SEQ ID NO: 4813320 - DNA, 25 bp, Homo sapien
gcagtaggcatcagtctcgtttgtc

SEQ ID NO: 4813321 - DNA, 25 bp, Homo sapien
gctcatcgtgaacaccacttggtga

SEQ ID NO: 4813322 - DNA, 25 bp, Homo sapien
cagccagaggcttgtgtgagccatc

SEQ ID NO: 4813323 - DNA, 25 bp, Homo sapien
ctgaccaaggtccaaagggcctgcg

SEQ ID NO: 4813324 - DNA, 25 bp, Homo sapien
gttaaagttgccctcctgacgctgg

SEQ ID NO: 4813325 - DNA, 25 bp, Homo sapien
tcagagcgcagatacatgcagaggc

SEQ ID NO: 4813326 - DNA, 25 bp, Homo sapien
ccttagtgggaacaggtggagacca

SEQ ID NO: 4813327 - DNA, 25 bp, Homo sapien
ccactagagtgggatgaagtccaga

SEQ ID NO: 4813328 - DNA, 25 bp, Homo sapien
ttgacatcagtgctctccagccgtg

SEQ ID NO: 4813329 - DNA, 25 bp, Homo sapien
acacaggtgcacagccatgctgtgg

SEQ ID NO: 4813330 - DNA, 25 bp, Homo sapien
tctggatctgccttcgcgatggtca

SEQ ID NO: 4813331 - DNA, 25 bp, Homo sapien
gcctgctacggcagcatggcagctc

SEQ ID NO: 4813332 - DNA, 25 bp, Homo sapien
gttcccctgtgccaagtagctgcag

SEQ ID NO: 4813333 - DNA, 25 bp, Homo sapien
cctgtgccaagtagctgcaggctgc

SEQ ID NO: 4813334 - DNA, 25 bp, Homo sapien
ttggttcccctgtgccaagtagctg

SEQ ID NO: 4813335 - DNA, 25 bp, Homo sapien
tgtgccaagtagctgcaggctgccc

SEQ ID NO: 4813336 - DNA, 25 bp, Homo sapien
gatgaatgggaaacgtaggcttcca

SEQ ID NO: 4813337 - DNA, 25 bp, Homo sapien
gaatcgtggattcaccaggccggtg

SEQ ID NO: 4813338 - DNA, 25 bp, Homo sapien
ctccaggatggtagtggcaccctca

SEQ ID NO: 4813339 - DNA, 25 bp, Homo sapien
gaaatgtgacggacctaagcaggaa

SEQ ID NO: 4813340 - DNA, 25 bp, Homo sapien
tcccttgagccctggtggtcaaagc

SEQ ID NO: 4813341 - DNA, 25 bp, Homo sapien
gatcccttgagccctggtggtcaaa

SEQ ID NO: 4813342 - DNA, 25 bp, Homo sapien
tgggcatggtggcacccaccttttg

SEQ ID NO: 4813343 - DNA, 25 bp, Homo sapien
ggcatggtggcacccaccttttgtc

SEQ ID NO: 4813344 - DNA, 25 bp, Homo sapien
tgccaggtgcgcttgaggctctgcc

SEQ ID NO: 4813345 - DNA, 25 bp, Homo sapien
aggctctgccaggtgaaagttctcc

SEQ ID NO: 4813346 - DNA, 25 bp, Homo sapien
tttcacagggaaccgatgcgtcttc

SEQ ID NO: 4813347 - DNA, 25 bp, Homo sapien
tttgctccatgttgggtgccaggtg

SEQ ID NO: 4813348 - DNA, 25 bp, Homo sapien
tactggaccatgttgccatctgaat

SEQ ID NO: 4813349 - DNA, 25 bp, Homo sapien
tctgaatctaaggacatggacacta

SEQ ID NO: 4813350 - DNA, 25 bp, Homo sapien
ccatgttgccatctgaatctaagga

SEQ ID NO: 4813351 - DNA, 25 bp, Homo sapien
agtcttctgttactggaccatgttg

SEQ ID NO: 4813352 - DNA, 25 bp, Homo sapien
tccctgtggtcctgcagcacatcag

SEQ ID NO: 4813353 - DNA, 25 bp, Homo sapien
cttccaaatccttctgctccctgtg

SEQ ID NO: 4813354 - DNA, 25 bp, Homo sapien
gctccctgtggtcctgcagcacatc

SEQ ID NO: 4813355 - DNA, 25 bp, Homo sapien
tccaaatccttctgctccctgtggt

SEQ ID NO: 4813356 - DNA, 25 bp, Homo sapien
ttgttatttattgattctccctcca

SEQ ID NO: 4813357 - DNA, 25 bp, Homo sapien
tgttatttattgattctccctccaa

SEQ ID NO: 4813358 - DNA, 25 bp, Homo sapien
ttatttattgattctccctccaaag

SEQ ID NO: 4813359 - DNA, 25 bp, Homo sapien
gttatttattgattctccctccaaa

SEQ ID NO: 4813360 - DNA, 25 bp, Homo sapien
caagggatgctttccagagacagcc

SEQ ID NO: 4813361 - DNA, 25 bp, Homo sapien
ttaaaccgcaacgagcctaagtggc

SEQ ID NO: 4813362 - DNA, 25 bp, Homo sapien
gacctagagggatctttaaaccgca

SEQ ID NO: 4813363 - DNA, 25 bp, Homo sapien
tcagtccctgaacacacatgccggg

SEQ ID NO: 4813364 - DNA, 25 bp, Homo sapien
ggtccgcttgtagctccgcccattg

SEQ ID NO: 4813365 - DNA, 25 bp, Homo sapien
aatgtgaccgtttgccagaggtcag

SEQ ID NO: 4813366 - DNA, 25 bp, Homo sapien
tggactccaaatgtgaccgtttgcc

SEQ ID NO: 4813367 - DNA, 25 bp, Homo sapien
tccgcccattggaccctcctcggtg

SEQ ID NO: 4813368 - DNA, 25 bp, Homo sapien
tgctgcacgatcaggttgatggcaa

SEQ ID NO: 4813369 - DNA, 25 bp, Homo sapien
gatgtgctgcacgatcaggttgatg

SEQ ID NO: 4813370 - DNA, 25 bp, Homo sapien
tgtgctgcacgatcaggttgatggc

SEQ ID NO: 4813371 - DNA, 25 bp, Homo sapien
ctggatgtgctgcacgatcaggttg

SEQ ID NO: 4813372 - DNA, 25 bp, Homo sapien
ggcaccgcgcccagctacatacatt

SEQ ID NO: 4813373 - DNA, 25 bp, Homo sapien
gctcagtaactgcacactggtggaa

SEQ ID NO: 4813374 - DNA, 25 bp, Homo sapien
agcatattttaaccctgtgccgcag

SEQ ID NO: 4813375 - DNA, 25 bp, Homo sapien
tcaacactggcaggccgcgtgcgca

SEQ ID NO: 4813376 - DNA, 25 bp, Homo sapien
cactcctcgcgggatgatcacatcg

SEQ ID NO: 4813377 - DNA, 25 bp, Homo sapien
ccatattgtccactcctcgcgggat

SEQ ID NO: 4813378 - DNA, 25 bp, Homo sapien
tattgtccactcctcgcgggatgat

SEQ ID NO: 4813379 - DNA, 25 bp, Homo sapien
cgcgggatgatcacatcggcatact

SEQ ID NO: 4813380 - DNA, 25 bp, Homo sapien
taacgactcaattcactgggccaag

SEQ ID NO: 4813381 - DNA, 25 bp, Homo sapien
tactgcaggcagagacgctgatggt

SEQ ID NO: 4813382 - DNA, 25 bp, Homo sapien
cagccgccgccgtgcataattactg

SEQ ID NO: 4813383 - DNA, 25 bp, Homo sapien
gacagctggctacgctaacgactca

SEQ ID NO: 4813384 - DNA, 25 bp, Homo sapien
cattggctcaatgctgactctcatt

SEQ ID NO: 4813385 - DNA, 25 bp, Homo sapien
gctgactctcattccctgtcagatg

SEQ ID NO: 4813386 - DNA, 25 bp, Homo sapien
caaccactcattggctcaatgctga

SEQ ID NO: 4813387 - DNA, 25 bp, Homo sapien
tcatccaaccactcattggctcaat

SEQ ID NO: 4813388 - DNA, 25 bp, Homo sapien
caagggcgagggctgctttctattc

SEQ ID NO: 4813389 - DNA, 25 bp, Homo sapien
tctcatgaaagcacgagcgcaaggg

SEQ ID NO: 4813390 - DNA, 25 bp, Homo sapien
tccaggcagaggactgcacaagcca

SEQ ID NO: 4813391 - DNA, 25 bp, Homo sapien
aaaaggaggctcaagaacggctctg

SEQ ID NO: 4813392 - DNA, 25 bp, Homo sapien
tcagttcctttgtgctgtattttta

SEQ ID NO: 4813393 - DNA, 25 bp, Homo sapien
gtcctacattatcaaaggcaggaat

SEQ ID NO: 4813394 - DNA, 25 bp, Homo sapien
ggcaggaatcttggtttcagttcct

SEQ ID NO: 4813395 - DNA, 25 bp, Homo sapien
cagttcctttgtgctgtatttttac

SEQ ID NO: 4813396 - DNA, 25 bp, Homo sapien
tctctgcgagccagctgggatctgg

SEQ ID NO: 4813397 - DNA, 25 bp, Homo sapien
gcacccaggacgtgtcagatgatgg

SEQ ID NO: 4813398 - DNA, 25 bp, Homo sapien
gatcccggccttggcagtgaacaga

SEQ ID NO: 4813399 - DNA, 25 bp, Homo sapien
cagatgatggtaagtgccccggaaa

SEQ ID NO: 4813400 - DNA, 25 bp, Homo sapien
agatcactgtcacccagcactaagc

SEQ ID NO: 4813401 - DNA, 25 bp, Homo sapien
gtcacccagcactaagccctctcac

SEQ ID NO: 4813402 - DNA, 25 bp, Homo sapien
tcagatcactgtcacccagcactaa

SEQ ID NO: 4813403 - DNA, 25 bp, Homo sapien
aatcagatcactgtcacccagcact

SEQ ID NO: 4813404 - DNA, 25 bp, Homo sapien
gggctctgaagcagcgagcacaggt

SEQ ID NO: 4813405 - DNA, 25 bp, Homo sapien
gctctgaagcagcgagcacaggtac

SEQ ID NO: 4813406 - DNA, 25 bp, Homo sapien
cttgtgaaaggggaaaatgggctct

SEQ ID NO: 4813407 - DNA, 25 bp, Homo sapien
ggctctgaagcagcgagcacaggta

SEQ ID NO: 4813408 - DNA, 25 bp, Homo sapien
cggcttcacgaaggtggtgtactgc

SEQ ID NO: 4813409 - DNA, 25 bp, Homo sapien
cggcaggcagaactcctcgaaggcc

SEQ ID NO: 4813410 - DNA, 25 bp, Homo sapien
ctcgaaggccggcttcacgaaggtg

SEQ ID NO: 4813411 - DNA, 25 bp, Homo sapien
aaggtggtgtactgcgtcagaatct

SEQ ID NO: 4813412 - DNA, 25 bp, Homo sapien
caaggggcaggcgtgcttcagacct

SEQ ID NO: 4813413 - DNA, 25 bp, Homo sapien
ctgcagcggcaaggggcaggcgtgc

SEQ ID NO: 4813414 - DNA, 25 bp, Homo sapien
aggcgtgcttcagacctcaggacct

SEQ ID NO: 4813415 - DNA, 25 bp, Homo sapien
ggcaggcgtgcttcagacctcagga

SEQ ID NO: 4813416 - DNA, 25 bp, Homo sapien
ttcgagacagcctgacgtcggagtc

SEQ ID NO: 4813417 - DNA, 25 bp, Homo sapien
tccgcagggtagaccaccgtggtct

SEQ ID NO: 4813418 - DNA, 25 bp, Homo sapien
gaacaccaagatgccctcaaacaga

SEQ ID NO: 4813419 - DNA, 25 bp, Homo sapien
tcccggatctcctggctgtagaaca

SEQ ID NO: 4813420 - DNA, 25 bp, Homo sapien
cgaggggacgtcctagctggcccct

SEQ ID NO: 4813421 - DNA, 25 bp, Homo sapien
ggccctccctagaaccacctgctta

SEQ ID NO: 4813422 - DNA, 25 bp, Homo sapien
gcttccattgcagggacactgactg

SEQ ID NO: 4813423 - DNA, 25 bp, Homo sapien
ctctcctcggccctccctagaacca

SEQ ID NO: 4813424 - DNA, 25 bp, Homo sapien
acaaaatcataggtcggcacctcca

SEQ ID NO: 4813425 - DNA, 25 bp, Homo sapien
taggtcggcacctccaccgttttgc

SEQ ID NO: 4813426 - DNA, 25 bp, Homo sapien
atcataggtcggcacctccaccgtt

SEQ ID NO: 4813427 - DNA, 25 bp, Homo sapien
accgttttgccctccacgatgttct

SEQ ID NO: 4813428 - DNA, 25 bp, Homo sapien
gcggacagcagggaaccctctctgc

SEQ ID NO: 4813429 - DNA, 25 bp, Homo sapien
caggcagatgccctcgtgcagcgga

SEQ ID NO: 4813430 - DNA, 25 bp, Homo sapien
ggtgctggggacaccgagaacccta

SEQ ID NO: 4813431 - DNA, 25 bp, Homo sapien
ggggacaccgagaaccctagcacag

SEQ ID NO: 4813432 - DNA, 25 bp, Homo sapien
ggatggtcaaaattgtactgtcctt

SEQ ID NO: 4813433 - DNA, 25 bp, Homo sapien
tactgtcctttcaaggccttggcct

SEQ ID NO: 4813434 - DNA, 25 bp, Homo sapien
ttgtactgtcctttcaaggccttgg

SEQ ID NO: 4813435 - DNA, 25 bp, Homo sapien
ctggatggtcaaaattgtactgtcc

SEQ ID NO: 4813436 - DNA, 25 bp, Homo sapien
ttccgctgccgctgttccacctcgt

SEQ ID NO: 4813437 - DNA, 25 bp, Homo sapien
agcaactccatgatcttctcacaca

SEQ ID NO: 4813438 - DNA, 25 bp, Homo sapien
tgccgctgttccacctcgttctgtc

SEQ ID NO: 4813439 - DNA, 25 bp, Homo sapien
gttccacctcgttctgtcccagcaa

SEQ ID NO: 4813440 - DNA, 25 bp, Homo sapien
ggattcccgcctggaaccgctcgtc

SEQ ID NO: 4813441 - DNA, 25 bp, Homo sapien
gcgggattcccgcctggaaccgctc

SEQ ID NO: 4813442 - DNA, 25 bp, Homo sapien
cgggattcccgcctggaaccgctcg

SEQ ID NO: 4813443 - DNA, 25 bp, Homo sapien
agcgggattcccgcctggaaccgct

SEQ ID NO: 4813444 - DNA, 25 bp, Homo sapien
atggtctcagcggaagggccgcggg

SEQ ID NO: 4813445 - DNA, 25 bp, Homo sapien
tgtggatggtctcagcggaagggcc

SEQ ID NO: 4813446 - DNA, 25 bp, Homo sapien
aggtgtggatggtctcagcggaagg

SEQ ID NO: 4813447 - DNA, 25 bp, Homo sapien
tggatggtctcagcggaagggccgc

SEQ ID NO: 4813448 - DNA, 25 bp, Homo sapien
ttcccgctggcagtgccgccgctca

SEQ ID NO: 4813449 - DNA, 25 bp, Homo sapien
cttcccgctggcagtgccgccgctc

SEQ ID NO: 4813450 - DNA, 25 bp, Homo sapien
tcccgctggcagtgccgccgctcac

SEQ ID NO: 4813451 - DNA, 25 bp, Homo sapien
ggaagggccgctggtgcggacggtc

SEQ ID NO: 4813452 - DNA, 25 bp, Homo sapien
cagtcttcgcctcccgccgaagcca

SEQ ID NO: 4813453 - DNA, 25 bp, Homo sapien
tggtgcggacggtcggcctccggcg

SEQ ID NO: 4813454 - DNA, 25 bp, Homo sapien
tccggcgcggggctctcgcagtctt

SEQ ID NO: 4813455 - DNA, 25 bp, Homo sapien
gctcccgcgcatcgggtccccgcgc

SEQ ID NO: 4813456 - DNA, 25 bp, Homo sapien
tcccgcgcatcgggtccccgcgccc

SEQ ID NO: 4813457 - DNA, 25 bp, Homo sapien
tccgctcccgcgcatcgggtccccg

SEQ ID NO: 4813458 - DNA, 25 bp, Homo sapien
cgctcccgcgcatcgggtccccgcg

SEQ ID NO: 4813459 - DNA, 25 bp, Homo sapien
atttatgttatgattacattggcat

SEQ ID NO: 4813460 - DNA, 25 bp, Homo sapien
tgttatgattacattggcatatata

SEQ ID NO: 4813461 - DNA, 25 bp, Homo sapien
tatgttatgattacattggcatata

SEQ ID NO: 4813462 - DNA, 25 bp, Homo sapien
tttatgttatgattacattggcata

SEQ ID NO: 4813463 - DNA, 25 bp, Homo sapien
tttggaccagagctctttcctagag

SEQ ID NO: 4813464 - DNA, 25 bp, Homo sapien
ctgggcctcttgtcagcttggatgg

SEQ ID NO: 4813465 - DNA, 25 bp, Homo sapien
tgaggattctcttggctacgtggga

SEQ ID NO: 4813466 - DNA, 25 bp, Homo sapien
aaatcaagccctagactctgagacc

SEQ ID NO: 4813467 - DNA, 25 bp, Homo sapien
gcgggctcggaccatggaggcagga

SEQ ID NO: 4813468 - DNA, 25 bp, Homo sapien
ggtagataccagagggtcggctgct

SEQ ID NO: 4813469 - DNA, 25 bp, Homo sapien
tttagcgggtagataactgcgggcc

SEQ ID NO: 4813470 - DNA, 25 bp, Homo sapien
caggcaccaggaaacctgagcccgc

SEQ ID NO: 4813471 - DNA, 25 bp, Homo sapien
ctggagggtcagggatcggcagggc

SEQ ID NO: 4813472 - DNA, 25 bp, Homo sapien
cggaggccggcggtagcaagatggg

SEQ ID NO: 4813473 - DNA, 25 bp, Homo sapien
tctggagggtcagggatcggcaggg

SEQ ID NO: 4813474 - DNA, 25 bp, Homo sapien
cggggctgtggtgccccggaggccg

SEQ ID NO: 4813475 - DNA, 25 bp, Homo sapien
ttcacacggacacgagtgaaacccg

SEQ ID NO: 4813476 - DNA, 25 bp, Homo sapien
agccatgttcgcctctctaaaaatg

SEQ ID NO: 4813477 - DNA, 25 bp, Homo sapien
aatggaggcatggaaagtttgtcac

SEQ ID NO: 4813478 - DNA, 25 bp, Homo sapien
tacgcaaatcctataagacggccca

SEQ ID NO: 4813479 - DNA, 25 bp, Homo sapien
agttttgactccactccgcaacctc

SEQ ID NO: 4813480 - DNA, 25 bp, Homo sapien
agaaactctacacccttgaaacact

SEQ ID NO: 4813481 - DNA, 25 bp, Homo sapien
accacttctaagtgtgcgattcagt

SEQ ID NO: 4813482 - DNA, 25 bp, Homo sapien
ctctgggacgctttctcatcttccc

SEQ ID NO: 4813483 - DNA, 25 bp, Homo sapien
atcgccatcgtctactcccacgagg

SEQ ID NO: 4813484 - DNA, 25 bp, Homo sapien
gccatcgtctactcccacgaggtag

SEQ ID NO: 4813485 - DNA, 25 bp, Homo sapien
tcgtctactcccacgaggtaggtgc

SEQ ID NO: 4813486 - DNA, 25 bp, Homo sapien
tctactcccacgaggtaggtgcggg

SEQ ID NO: 4813487 - DNA, 25 bp, Homo sapien
gaaggaaaaatatgcgaagattgct

SEQ ID NO: 4813488 - DNA, 25 bp, Homo sapien
aataatcaaaatggcatggcattgc

SEQ ID NO: 4813489 - DNA, 25 bp, Homo sapien
gcattgccacagagttaaatcagtg

SEQ ID NO: 4813490 - DNA, 25 bp, Homo sapien
agttgaatgagaggagactttcttc

SEQ ID NO: 4813491 - DNA, 25 bp, Homo sapien
acttcccactagaatcatagattta

SEQ ID NO: 4813492 - DNA, 25 bp, Homo sapien
atttctccttgtagtactgtcagct

SEQ ID NO: 4813493 - DNA, 25 bp, Homo sapien
tcctcatatgtttgggagatgtgtg

SEQ ID NO: 4813494 - DNA, 25 bp, Homo sapien
actccgcccggctaagatttgatgt

SEQ ID NO: 4813495 - DNA, 25 bp, Homo sapien
taacccgacgagaagagaaactgtg

SEQ ID NO: 4813496 - DNA, 25 bp, Homo sapien
ggactgatcaggagacatagagagt

SEQ ID NO: 4813497 - DNA, 25 bp, Homo sapien
cttgatgcttccagtcaaggactga

SEQ ID NO: 4813498 - DNA, 25 bp, Homo sapien
tagggctgaaggtgagtacccaaga

SEQ ID NO: 4813499 - DNA, 25 bp, Homo sapien
catgtgtcagctcattcctctggat

SEQ ID NO: 4813500 - DNA, 25 bp, Homo sapien
cctctggattgctaaagtgttccac

SEQ ID NO: 4813501 - DNA, 25 bp, Homo sapien
acactgatgtacacgggagtcattc

SEQ ID NO: 4813502 - DNA, 25 bp, Homo sapien
cctttttggccagtgtgaataatcc

SEQ ID NO: 4813503 - DNA, 25 bp, Homo sapien
tgcaaagtgcttggtaccccaaaat

SEQ ID NO: 4813504 - DNA, 25 bp, Homo sapien
ggacccagattgtcgacctactgca

SEQ ID NO: 4813505 - DNA, 25 bp, Homo sapien
tgcagagtcaggacacagccctttg

SEQ ID NO: 4813506 - DNA, 25 bp, Homo sapien
taatgcacccctagtgaatgaatga

SEQ ID NO: 4813507 - DNA, 25 bp, Homo sapien
cagctcagacaccttcggggggacc

SEQ ID NO: 4813508 - DNA, 25 bp, Homo sapien
agctcagacaccttcggggggaccg

SEQ ID NO: 4813509 - DNA, 25 bp, Homo sapien
cgcagttcttggttggagcaggcat

SEQ ID NO: 4813510 - DNA, 25 bp, Homo sapien
cttggttggagcaggcatctgagcc

SEQ ID NO: 4813511 - DNA, 25 bp, Homo sapien
ctggctaagcatgcacactcgcagg

SEQ ID NO: 4813512 - DNA, 25 bp, Homo sapien
ggctaagcatgcacactcgcaggtc

SEQ ID NO: 4813513 - DNA, 25 bp, Homo sapien
ttactggctaagcatgcacactcgc

SEQ ID NO: 4813514 - DNA, 25 bp, Homo sapien
tactggctaagcatgcacactcgca

SEQ ID NO: 4813515 - DNA, 25 bp, Homo sapien
gccaaggtgtttcctccgtgactat

SEQ ID NO: 4813516 - DNA, 25 bp, Homo sapien
atctcgcggtctgccggtcaccaaa

SEQ ID NO: 4813517 - DNA, 25 bp, Homo sapien
aaagaccagggtgggtcgcagcagc

SEQ ID NO: 4813518 - DNA, 25 bp, Homo sapien
gactatggcggctcccttggtgaat

SEQ ID NO: 4813519 - DNA, 25 bp, Homo sapien
agtggactggtctctctcgggcttc

SEQ ID NO: 4813520 - DNA, 25 bp, Homo sapien
catgagtggctgagcaatctgcccg

SEQ ID NO: 4813521 - DNA, 25 bp, Homo sapien
tatcagatcttgtgatcagcccagg

SEQ ID NO: 4813522 - DNA, 25 bp, Homo sapien
tcacctacgaggttcatggaggctt

SEQ ID NO: 4813523 - DNA, 25 bp, Homo sapien
cacgatcaggtacagagagatgcag

SEQ ID NO: 4813524 - DNA, 25 bp, Homo sapien
ctgaaagttggggactgggaaccag

SEQ ID NO: 4813525 - DNA, 25 bp, Homo sapien
ccagggtgaatatgagggctggccc

SEQ ID NO: 4813526 - DNA, 25 bp, Homo sapien
ctctgcacgatcaggtacagagaga

SEQ ID NO: 4813527 - DNA, 25 bp, Homo sapien
cctctggagcacgagcaattctttg

SEQ ID NO: 4813528 - DNA, 25 bp, Homo sapien
tgaatgcttctagggcacaaggcct

SEQ ID NO: 4813529 - DNA, 25 bp, Homo sapien
tctcaggtgctaggatggaaacaat

SEQ ID NO: 4813530 - DNA, 25 bp, Homo sapien
tcttgtgcatgaaccgacctctgga

SEQ ID NO: 4813531 - DNA, 25 bp, Homo sapien
agagctcagcaataaccagggccag

SEQ ID NO: 4813532 - DNA, 25 bp, Homo sapien
tggagtttaaggcacacagcgagcg

SEQ ID NO: 4813533 - DNA, 25 bp, Homo sapien
taataaagtgacaggtcccggctgg

SEQ ID NO: 4813534 - DNA, 25 bp, Homo sapien
cctaaacccgggacaagtgagcact

SEQ ID NO: 4813535 - DNA, 25 bp, Homo sapien
gacagttcccatagggcctcctcag

SEQ ID NO: 4813536 - DNA, 25 bp, Homo sapien
tatgttcctgggtttaattttcaga

SEQ ID NO: 4813537 - DNA, 25 bp, Homo sapien
agagacagttcccatagggcctcct

SEQ ID NO: 4813538 - DNA, 25 bp, Homo sapien
gaagaagtttataatgtcgtcgttc

SEQ ID NO: 4813539 - DNA, 25 bp, Homo sapien
tggtgcaggggatggggagcagtca

SEQ ID NO: 4813540 - DNA, 25 bp, Homo sapien
gcaggggatggggagcagtcagtga

SEQ ID NO: 4813541 - DNA, 25 bp, Homo sapien
gggatggggagcagtcagtgagcac

SEQ ID NO: 4813542 - DNA, 25 bp, Homo sapien
ggggatggggagcagtcagtgagca

SEQ ID NO: 4813543 - DNA, 25 bp, Homo sapien
agcctcgcagcaaacggatgctgca

SEQ ID NO: 4813544 - DNA, 25 bp, Homo sapien
cacagcctcgcagcaaacggatgct

SEQ ID NO: 4813545 - DNA, 25 bp, Homo sapien
aggtgccgcggggaccatccccaca

SEQ ID NO: 4813546 - DNA, 25 bp, Homo sapien
ctggatggcccgatggcgccaccct

SEQ ID NO: 4813547 - DNA, 25 bp, Homo sapien
ccgttgaccaatgtgacagagggga

SEQ ID NO: 4813548 - DNA, 25 bp, Homo sapien
cgttgaccaatgtgacagaggggac

SEQ ID NO: 4813549 - DNA, 25 bp, Homo sapien
taccgttgaccaatgtgacagaggg

SEQ ID NO: 4813550 - DNA, 25 bp, Homo sapien
ctaccgttgaccaatgtgacagagg

SEQ ID NO: 4813551 - DNA, 25 bp, Homo sapien
gagaagttcactttcccgtcgatgt

SEQ ID NO: 4813552 - DNA, 25 bp, Homo sapien
tcccaggtgaacgaaggtcaggtcc

SEQ ID NO: 4813553 - DNA, 25 bp, Homo sapien
ccgtcgatgtagtctgggtttccca

SEQ ID NO: 4813554 - DNA, 25 bp, Homo sapien
cgcatgctgtcgaggatgttgaact

SEQ ID NO: 4813555 - DNA, 25 bp, Homo sapien
acctcggaagccagtatgctgatga

SEQ ID NO: 4813556 - DNA, 25 bp, Homo sapien
agcctgagggtgatgcggctgccat

SEQ ID NO: 4813557 - DNA, 25 bp, Homo sapien
gggacctcggaagccagtatgctga

SEQ ID NO: 4813558 - DNA, 25 bp, Homo sapien
ctcaacccataagggcgaagctgtg

SEQ ID NO: 4813559 - DNA, 25 bp, Homo sapien
aggacgagctgtcgatcagtgtgca

SEQ ID NO: 4813560 - DNA, 25 bp, Homo sapien
atcagtgtgcagtactcggccaggc

SEQ ID NO: 4813561 - DNA, 25 bp, Homo sapien
gtacgggatgcacggcggttccacc

SEQ ID NO: 4813562 - DNA, 25 bp, Homo sapien
gcggttccacctccgagagggcggc

SEQ ID NO: 4813563 - DNA, 25 bp, Homo sapien
tggtggcatgagtgacacttcctct

SEQ ID NO: 4813564 - DNA, 25 bp, Homo sapien
tgcagatggtggcatgagtgacact

SEQ ID NO: 4813565 - DNA, 25 bp, Homo sapien
tggcatgagtgacacttcctctggg

SEQ ID NO: 4813566 - DNA, 25 bp, Homo sapien
gatggtggcatgagtgacacttcct

SEQ ID NO: 4813567 - DNA, 25 bp, Homo sapien
gagaggatggccaagtaggagttga

SEQ ID NO: 4813568 - DNA, 25 bp, Homo sapien
cagcctgcggatgggcgccgagtcc

SEQ ID NO: 4813569 - DNA, 25 bp, Homo sapien
caagtaggagttgaagttattcagc

SEQ ID NO: 4813570 - DNA, 25 bp, Homo sapien
cggatgggcgccgagtccagggcag

SEQ ID NO: 4813571 - DNA, 25 bp, Homo sapien
gcctgggaaggacttggccaccatt

SEQ ID NO: 4813572 - DNA, 25 bp, Homo sapien
agagaggggcggtgccgtgaggcag

SEQ ID NO: 4813573 - DNA, 25 bp, Homo sapien
cagagcagggactgatgatgggggc

SEQ ID NO: 4813574 - DNA, 25 bp, Homo sapien
ggcggtgccgtgaggcaggagggca

SEQ ID NO: 4813575 - DNA, 25 bp, Homo sapien
gccttttcctgtaacatgattatgg

SEQ ID NO: 4813576 - DNA, 25 bp, Homo sapien
cttttcctgtaacatgattatggac

SEQ ID NO: 4813577 - DNA, 25 bp, Homo sapien
tgaacttcaagagcagccgttccct

SEQ ID NO: 4813578 - DNA, 25 bp, Homo sapien
acttcaagagcagccgttccctgtc

SEQ ID NO: 4813579 - DNA, 25 bp, Homo sapien
tgtgtgcagcttccgtctgctttag

SEQ ID NO: 4813580 - DNA, 25 bp, Homo sapien
cctgttgggcaaaaccctacgctgg

SEQ ID NO: 4813581 - DNA, 25 bp, Homo sapien
gctttagaaaccacatcctgttggg

SEQ ID NO: 4813582 - DNA, 25 bp, Homo sapien
cctgtggagtgtgcccctgagcttc

SEQ ID NO: 4813583 - DNA, 25 bp, Homo sapien
agtaggacatgttgttgaagtgctc

SEQ ID NO: 4813584 - DNA, 25 bp, Homo sapien
ctcttttgcccaaagcaaaacctca

SEQ ID NO: 4813585 - DNA, 25 bp, Homo sapien
gacatgttgttgaagtgctccgtga

SEQ ID NO: 4813586 - DNA, 25 bp, Homo sapien
tgctccgtgaactgggtcaagttgg

SEQ ID NO: 4813587 - DNA, 25 bp, Homo sapien
tcagcatccagcagcgttagctgct

SEQ ID NO: 4813588 - DNA, 25 bp, Homo sapien
gctccgctatctcatggctgtgaaa

SEQ ID NO: 4813589 - DNA, 25 bp, Homo sapien
gctgtgaaagtcgtgcaaggtcccc

SEQ ID NO: 4813590 - DNA, 25 bp, Homo sapien
cagcgttagctgctccgctatctca

SEQ ID NO: 4813591 - DNA, 25 bp, Homo sapien
tggctgctaccccccgggctgccag

SEQ ID NO: 4813592 - DNA, 25 bp, Homo sapien
ctggctgctaccccccgggctgcca

SEQ ID NO: 4813593 - DNA, 25 bp, Homo sapien
ctgctaccccccgggctgccagggg

SEQ ID NO: 4813594 - DNA, 25 bp, Homo sapien
gctgctaccccccgggctgccaggg

SEQ ID NO: 4813595 - DNA, 25 bp, Homo sapien
tccccattgcacaccaggcggaaga

SEQ ID NO: 4813596 - DNA, 25 bp, Homo sapien
caggatgttcttccggagcacacgg

SEQ ID NO: 4813597 - DNA, 25 bp, Homo sapien
agtagcttcttctggtccaccttgt

SEQ ID NO: 4813598 - DNA, 25 bp, Homo sapien
acaccaggcggaagaccagttccat

SEQ ID NO: 4813599 - DNA, 25 bp, Homo sapien
gaagaacgtgttcttgctgacgcgc

SEQ ID NO: 4813600 - DNA, 25 bp, Homo sapien
tgctgacgcgcttcttgaatgtgtc

SEQ ID NO: 4813601 - DNA, 25 bp, Homo sapien
cacccgtaccagcacgaagaacgtg

SEQ ID NO: 4813602 - DNA, 25 bp, Homo sapien
cgcgcttcttgaatgtgtcggcaaa

SEQ ID NO: 4813603 - DNA, 25 bp, Homo sapien
gagcacgggttaaagaaatagccat

SEQ ID NO: 4813604 - DNA, 25 bp, Homo sapien
gtggagcacgggttaaagaaatagc

SEQ ID NO: 4813605 - DNA, 25 bp, Homo sapien
gttaaagaaatagccatgtggtcgg

SEQ ID NO: 4813606 - DNA, 25 bp, Homo sapien
gggttaaagaaatagccatgtggtc

SEQ ID NO: 4813607 - DNA, 25 bp, Homo sapien
agtggaggactgactcctggtgacc

SEQ ID NO: 4813608 - DNA, 25 bp, Homo sapien
gagtggaggactgactcctggtgac

SEQ ID NO: 4813609 - DNA, 25 bp, Homo sapien
tggagtggaggactgactcctggtg

SEQ ID NO: 4813610 - DNA, 25 bp, Homo sapien
ggagtggaggactgactcctggtga

SEQ ID NO: 4813611 - DNA, 25 bp, Homo sapien
gagcgctcacaatgtgcccatcttc

SEQ ID NO: 4813612 - DNA, 25 bp, Homo sapien
tgagcgctcacaatgtgcccatctt

SEQ ID NO: 4813613 - DNA, 25 bp, Homo sapien
gcacgggactagcgcagtggaacaa

SEQ ID NO: 4813614 - DNA, 25 bp, Homo sapien
ctggcatccagaaacgagggcacgg

SEQ ID NO: 4813615 - DNA, 25 bp, Homo sapien
atccagaaacgagggcacgggacta

SEQ ID NO: 4813616 - DNA, 25 bp, Homo sapien
agcactggcatccagaaacgagggc

SEQ ID NO: 4813617 - DNA, 25 bp, Homo sapien
gaggtcgggctctgctttgtggtca

SEQ ID NO: 4813618 - DNA, 25 bp, Homo sapien
cgtgacaccgggccgggtctctctt

SEQ ID NO: 4813619 - DNA, 25 bp, Homo sapien
agggcagcacttcaagcacccgatc

SEQ ID NO: 4813620 - DNA, 25 bp, Homo sapien
agctgcagcacgctccacattggct

SEQ ID NO: 4813621 - DNA, 25 bp, Homo sapien
cctgagctcaaagctggaatgcggg

SEQ ID NO: 4813622 - DNA, 25 bp, Homo sapien
gctgacccctgagctgtctatttgg

SEQ ID NO: 4813623 - DNA, 25 bp, Homo sapien
gacaggagcccattccagttgtgga

SEQ ID NO: 4813624 - DNA, 25 bp, Homo sapien
tctcagaggcgtctgcaggaccggc

SEQ ID NO: 4813625 - DNA, 25 bp, Homo sapien
tctctccaaaatgcccatggtgcag

SEQ ID NO: 4813626 - DNA, 25 bp, Homo sapien
ctctctccaaaatgcccatggtgca

SEQ ID NO: 4813627 - DNA, 25 bp, Homo sapien
gtcaggaatgcctcgcagtacaaca

SEQ ID NO: 4813628 - DNA, 25 bp, Homo sapien
ggaatgcctcgcagtacaacaccaa

SEQ ID NO: 4813629 - DNA, 25 bp, Homo sapien
tcaggaatgcctcgcagtacaacac

SEQ ID NO: 4813630 - DNA, 25 bp, Homo sapien
aatgcctcgcagtacaacaccaaat

SEQ ID NO: 4813631 - DNA, 25 bp, Homo sapien
gatgggcgagggagccgagggcttg

SEQ ID NO: 4813632 - DNA, 25 bp, Homo sapien
tgcatgtcccagagaagtcacacgt

SEQ ID NO: 4813633 - DNA, 25 bp, Homo sapien
aaactgcttgtctgggtgcagagtg

SEQ ID NO: 4813634 - DNA, 25 bp, Homo sapien
ccctctggtgtctccgcctgcatgt

SEQ ID NO: 4813635 - DNA, 25 bp, Homo sapien
tacttttagatggtagggtccaatc

SEQ ID NO: 4813636 - DNA, 25 bp, Homo sapien
acttttagatggtagggtccaatca

SEQ ID NO: 4813637 - DNA, 25 bp, Homo sapien
accgtgcctggtcagtacttttaga

SEQ ID NO: 4813638 - DNA, 25 bp, Homo sapien
gagatggcaccagcatagacccata

SEQ ID NO: 4813639 - DNA, 25 bp, Homo sapien
agatggcaccagcatagacccatac

SEQ ID NO: 4813640 - DNA, 25 bp, Homo sapien
cagagatggcaccagcatagaccca

SEQ ID NO: 4813641 - DNA, 25 bp, Homo sapien
agagatggcaccagcatagacccat

SEQ ID NO: 4813642 - DNA, 25 bp, Homo sapien
cccaagtcaactggcctttgcgggt

SEQ ID NO: 4813643 - DNA, 25 bp, Homo sapien
gggcccaagtcaactggcctttgcg

SEQ ID NO: 4813644 - DNA, 25 bp, Homo sapien
agtcaactggcctttgcgggtgcat

SEQ ID NO: 4813645 - DNA, 25 bp, Homo sapien
aagtcaactggcctttgcgggtgca

SEQ ID NO: 4813646 - DNA, 25 bp, Homo sapien
tagccatgacaacttcgtgggactc

SEQ ID NO: 4813647 - DNA, 25 bp, Homo sapien
agccatgacaacttcgtgggactcg

SEQ ID NO: 4813648 - DNA, 25 bp, Homo sapien
gtagccatgacaacttcgtgggact

SEQ ID NO: 4813649 - DNA, 25 bp, Homo sapien
agagtcctgttaccctaccgagaga

SEQ ID NO: 4813650 - DNA, 25 bp, Homo sapien
ttgagacagccctaaaaggccccga

SEQ ID NO: 4813651 - DNA, 25 bp, Homo sapien
cctcctaaggaatcggaagctccgg

SEQ ID NO: 4813652 - DNA, 25 bp, Homo sapien
gattatggcagatgggacagcgcct

SEQ ID NO: 4813653 - DNA, 25 bp, Homo sapien
ggtcacatgttttgggaaacgtgct

SEQ ID NO: 4813654 - DNA, 25 bp, Homo sapien
gcagagtccacccaacaagacgttt

SEQ ID NO: 4813655 - DNA, 25 bp, Homo sapien
agaaattccccgagtcactctgggt

SEQ ID NO: 4813656 - DNA, 25 bp, Homo sapien
ggacagagtcccttacagaaatgaa

SEQ ID NO: 4813657 - DNA, 25 bp, Homo sapien
cttcaagaatttcctcgtggagtat

SEQ ID NO: 4813658 - DNA, 25 bp, Homo sapien
agaatttcctcgtggagtatgtgag

SEQ ID NO: 4813659 - DNA, 25 bp, Homo sapien
cctcgtggagtatgtgagtgaagtc

SEQ ID NO: 4813660 - DNA, 25 bp, Homo sapien
tgtgagtgaagtccggtctaatggt

SEQ ID NO: 4813661 - DNA, 25 bp, Homo sapien
tgctgatcagacctgctcagggctg

SEQ ID NO: 4813662 - DNA, 25 bp, Homo sapien
caggactgctgatcagacctgctca

SEQ ID NO: 4813663 - DNA, 25 bp, Homo sapien
tgatcagacctgctcagggctgtgg

SEQ ID NO: 4813664 - DNA, 25 bp, Homo sapien
aggactgctgatcagacctgctcag

SEQ ID NO: 4813665 - DNA, 25 bp, Homo sapien
tccccagatcctccgcggacgtccg

SEQ ID NO: 4813666 - DNA, 25 bp, Homo sapien
ctccgcggacgtccggcccgtcatc

SEQ ID NO: 4813667 - DNA, 25 bp, Homo sapien
ttcctgtcagtctcagtagcatgga

SEQ ID NO: 4813668 - DNA, 25 bp, Homo sapien
ctgtcagtctcagtagcatggacca

SEQ ID NO: 4813669 - DNA, 25 bp, Homo sapien
ggcacaaactggactgtgtctggga

SEQ ID NO: 4813670 - DNA, 25 bp, Homo sapien
tgggagctgccccggcaccaaggca

SEQ ID NO: 4813671 - DNA, 25 bp, Homo sapien
ccccggcaccaaggcaccagggcat

SEQ ID NO: 4813672 - DNA, 25 bp, Homo sapien
caggcacaaactggactgtgtctgg

SEQ ID NO: 4813673 - DNA, 25 bp, Homo sapien
ttgaaagacttggtctctaagcctc

SEQ ID NO: 4813674 - DNA, 25 bp, Homo sapien
gacagcacacttcccctggagtcta

SEQ ID NO: 4813675 - DNA, 25 bp, Homo sapien
gggttgttctgcttatgacaagatc

SEQ ID NO: 4813676 - DNA, 25 bp, Homo sapien
gtttcccattagtgagggccggcca

SEQ ID NO: 4813677 - DNA, 25 bp, Homo sapien
ccgactccagagcatctggtgactt

SEQ ID NO: 4813678 - DNA, 25 bp, Homo sapien
tcctgcttgagcgtcagcctggaca

SEQ ID NO: 4813679 - DNA, 25 bp, Homo sapien
aatttcgttgtggtcaatgagggac

SEQ ID NO: 4813680 - DNA, 25 bp, Homo sapien
tccgactgagccgactccagagcat

SEQ ID NO: 4813681 - DNA, 25 bp, Homo sapien
ggcccaccgcacagttagcatttag

SEQ ID NO: 4813682 - DNA, 25 bp, Homo sapien
acgggaccctttgcttggcgctaag

SEQ ID NO: 4813683 - DNA, 25 bp, Homo sapien
aaagctgcattgctcttgaggctgc

SEQ ID NO: 4813684 - DNA, 25 bp, Homo sapien
cgatggcagctacgtcactatggac

SEQ ID NO: 4813685 - DNA, 25 bp, Homo sapien
tgagccgaggcttgcagtactgagc

SEQ ID NO: 4813686 - DNA, 25 bp, Homo sapien
ggtgtccaagatgagtctcccagct

SEQ ID NO: 4813687 - DNA, 25 bp, Homo sapien
tctggcctcgtctaaaggtcgggag

SEQ ID NO: 4813688 - DNA, 25 bp, Homo sapien
tactgagcctaagttgccggctgaa

SEQ ID NO: 4813689 - DNA, 25 bp, Homo sapien
tctcactgccgtctctgctgtcctt

SEQ ID NO: 4813690 - DNA, 25 bp, Homo sapien
tccttcccagggacgccgctgaccg

SEQ ID NO: 4813691 - DNA, 25 bp, Homo sapien
gctgtccttcccagggacgccgctg

SEQ ID NO: 4813692 - DNA, 25 bp, Homo sapien
ctcactgccgtctctgctgtccttc

SEQ ID NO: 4813693 - DNA, 25 bp, Homo sapien
cagcttcctcactggcgttttcact

SEQ ID NO: 4813694 - DNA, 25 bp, Homo sapien
gaggaatacagattgacatattcac

SEQ ID NO: 4813695 - DNA, 25 bp, Homo sapien
atacagattgacatattcaccctca

SEQ ID NO: 4813696 - DNA, 25 bp, Homo sapien
gccagaggaatacagattgacatat

SEQ ID NO: 4813697 - DNA, 25 bp, Homo sapien
gatggccccactgtagtggagacag

SEQ ID NO: 4813698 - DNA, 25 bp, Homo sapien
ccccagtgtggcgggaaacgattat

SEQ ID NO: 4813699 - DNA, 25 bp, Homo sapien
ctaaatcatcctggagagatggccc

SEQ ID NO: 4813700 - DNA, 25 bp, Homo sapien
catcaagacaatcccacatactggg

SEQ ID NO: 4813701 - DNA, 25 bp, Homo sapien
cgagtcagtgaaagaggtttcggaa

SEQ ID NO: 4813702 - DNA, 25 bp, Homo sapien
gacagtattcccatgaaagctgctc

SEQ ID NO: 4813703 - DNA, 25 bp, Homo sapien
ttggcacggctaagtcagagctctg

SEQ ID NO: 4813704 - DNA, 25 bp, Homo sapien
tcctgagaagccgagagaggcccgt

SEQ ID NO: 4813705 - DNA, 25 bp, Homo sapien
gcttggtggtgaggcacgaaatcct

SEQ ID NO: 4813706 - DNA, 25 bp, Homo sapien
gcacgaaatcctgggagtaggacct

SEQ ID NO: 4813707 - DNA, 25 bp, Homo sapien
gagtaggacctaaacacagacttat

SEQ ID NO: 4813708 - DNA, 25 bp, Homo sapien
ggcggaacggaagcttggtggtgag

SEQ ID NO: 4813709 - DNA, 25 bp, Homo sapien
gtgcctgcagttttagctgctctgg

SEQ ID NO: 4813710 - DNA, 25 bp, Homo sapien
gaggcaagatcaagtcactgtactc

SEQ ID NO: 4813711 - DNA, 25 bp, Homo sapien
tgaggcaagatcaagtcactgtact

SEQ ID NO: 4813712 - DNA, 25 bp, Homo sapien
ggtggtgagtgcctgcagttttagc

SEQ ID NO: 4813713 - DNA, 25 bp, Homo sapien
tggccctcaggatgcgtgtcagtgc

SEQ ID NO: 4813714 - DNA, 25 bp, Homo sapien
cagaataggaaggaaggccctcgat

SEQ ID NO: 4813715 - DNA, 25 bp, Homo sapien
tgtcagtgcacgacctttacaagga

SEQ ID NO: 4813716 - DNA, 25 bp, Homo sapien
gccctcgatagggaaacagtagcct

SEQ ID NO: 4813717 - DNA, 25 bp, Homo sapien
gactggtagaccacacccttgaggg

SEQ ID NO: 4813718 - DNA, 25 bp, Homo sapien
gcagtatcagcaagacatggtggga

SEQ ID NO: 4813719 - DNA, 25 bp, Homo sapien
gagagaagcctgcactcaaacagct

SEQ ID NO: 4813720 - DNA, 25 bp, Homo sapien
ggtatgaacttgtagactctgcccc

SEQ ID NO: 4813721 - DNA, 25 bp, Homo sapien
caagaaagtagtgtgcagtatggag

SEQ ID NO: 4813722 - DNA, 25 bp, Homo sapien
caacttgggtctgctagcagtttta

SEQ ID NO: 4813723 - DNA, 25 bp, Homo sapien
tataacttctactcacaacttgggt

SEQ ID NO: 4813724 - DNA, 25 bp, Homo sapien
ccaaatagacctcttagtgagagta

SEQ ID NO: 4813725 - DNA, 25 bp, Homo sapien
tcccctcattaccttattctaagtg

SEQ ID NO: 4813726 - DNA, 25 bp, Homo sapien
gatgaccttcccgaatggatgctgg

SEQ ID NO: 4813727 - DNA, 25 bp, Homo sapien
gcttttcctggagtggaggttctgg

SEQ ID NO: 4813728 - DNA, 25 bp, Homo sapien
cagcaaacagtcgagtccaggcccg

SEQ ID NO: 4813729 - DNA, 25 bp, Homo sapien
gtggaaataatcgtccactgtgcca

SEQ ID NO: 4813730 - DNA, 25 bp, Homo sapien
ggaaataatcgtccactgtgccaag

SEQ ID NO: 4813731 - DNA, 25 bp, Homo sapien
ttagtggaaataatcgtccactgtg

SEQ ID NO: 4813732 - DNA, 25 bp, Homo sapien
tagtggaaataatcgtccactgtgc

SEQ ID NO: 4813733 - DNA, 25 bp, Homo sapien
tatgaaggacatgttggcaccgtac

SEQ ID NO: 4813734 - DNA, 25 bp, Homo sapien
taaggctcttgtatgtcccagggat

SEQ ID NO: 4813735 - DNA, 25 bp, Homo sapien
ggtgctgaatgtcccaaacctggcc

SEQ ID NO: 4813736 - DNA, 25 bp, Homo sapien
ttctctgaggttccggcatactggg

SEQ ID NO: 4813737 - DNA, 25 bp, Homo sapien
ctgctcaaaagggatattgtggaaa

SEQ ID NO: 4813738 - DNA, 25 bp, Homo sapien
tcattcatagtcctctaaccctaac

SEQ ID NO: 4813739 - DNA, 25 bp, Homo sapien
gctcaaaagggatattgtggaaact

SEQ ID NO: 4813740 - DNA, 25 bp, Homo sapien
gtcctctaaccctaactgctcaaaa

SEQ ID NO: 4813741 - DNA, 25 bp, Homo sapien
ggattgtctaaaggccaagtttcgc

SEQ ID NO: 4813742 - DNA, 25 bp, Homo sapien
tctaaaggccaagtttcgcaagatt

SEQ ID NO: 4813743 - DNA, 25 bp, Homo sapien
aacaaaaatctagctcagtcaagag

SEQ ID NO: 4813744 - DNA, 25 bp, Homo sapien
gctcagtcaagagctcggattgtct

SEQ ID NO: 4813745 - DNA, 25 bp, Homo sapien
ggaccatcttggtcgaaggcactgg

SEQ ID NO: 4813746 - DNA, 25 bp, Homo sapien
tcagtacccattgggagaatgcact

SEQ ID NO: 4813747 - DNA, 25 bp, Homo sapien
caggaccatcttggtcgaaggcact

SEQ ID NO: 4813748 - DNA, 25 bp, Homo sapien
cattgggagaatgcactccaaggtc

SEQ ID NO: 4813749 - DNA, 25 bp, Homo sapien
agaacacatggctgaggcacacgct

SEQ ID NO: 4813750 - DNA, 25 bp, Homo sapien
tgatccaaggtccaaagcgagattg

SEQ ID NO: 4813751 - DNA, 25 bp, Homo sapien
ttatgccagactggtgatgctccca

SEQ ID NO: 4813752 - DNA, 25 bp, Homo sapien
atagccttcccatctaggtgtaggg

SEQ ID NO: 4813753 - DNA, 25 bp, Homo sapien
cacgggcaagctgccgtgccggctg

SEQ ID NO: 4813754 - DNA, 25 bp, Homo sapien
agttagagacggacacactgaggcc

SEQ ID NO: 4813755 - DNA, 25 bp, Homo sapien
cctgagcggcactgccgtcctcggg

SEQ ID NO: 4813756 - DNA, 25 bp, Homo sapien
gccgtgccggctgagaaaggagtta

SEQ ID NO: 4813757 - DNA, 25 bp, Homo sapien
ctggacacagtgggagacagaggag

SEQ ID NO: 4813758 - DNA, 25 bp, Homo sapien
gaggagaaggaagaagcagcacagg

SEQ ID NO: 4813759 - DNA, 25 bp, Homo sapien
aggagaaggaagaagcagcacagga

SEQ ID NO: 4813760 - DNA, 25 bp, Homo sapien
agaaggaagaagcagcacaggaggc

SEQ ID NO: 4813761 - DNA, 25 bp, Homo sapien
cacggctaacaagtggcaggactgg

SEQ ID NO: 4813762 - DNA, 25 bp, Homo sapien
aaacagcttgcttggttagccacag

SEQ ID NO: 4813763 - DNA, 25 bp, Homo sapien
gctgagccccaggtgattgattata

SEQ ID NO: 4813764 - DNA, 25 bp, Homo sapien
tgaaaatggcacgtgcgacacggct

SEQ ID NO: 4813765 - DNA, 25 bp, Homo sapien
tctgtggcgtctggtagaacataga

SEQ ID NO: 4813766 - DNA, 25 bp, Homo sapien
cctccagcaactgcatgtaggccag

SEQ ID NO: 4813767 - DNA, 25 bp, Homo sapien
tccaccccactgaaggagtcgctga

SEQ ID NO: 4813768 - DNA, 25 bp, Homo sapien
gctgaagccgtatacctccatgagg

SEQ ID NO: 4813769 - DNA, 25 bp, Homo sapien
cacttcctctttaatgctgcacaac

SEQ ID NO: 4813770 - DNA, 25 bp, Homo sapien
ttaatgctgcacaaccaatgtcacc

SEQ ID NO: 4813771 - DNA, 25 bp, Homo sapien
cacacttcctctttaatgctgcaca

SEQ ID NO: 4813772 - DNA, 25 bp, Homo sapien
cctctttaatgctgcacaaccaatg

SEQ ID NO: 4813773 - DNA, 25 bp, Homo sapien
aggaggtctttctgaactcttgatg

SEQ ID NO: 4813774 - DNA, 25 bp, Homo sapien
ctttctgaactcttgatgttgaagt

SEQ ID NO: 4813775 - DNA, 25 bp, Homo sapien
ctcttcaggaggtctttctgaactc

SEQ ID NO: 4813776 - DNA, 25 bp, Homo sapien
gtaaaactgtgatctcttcaggagg

SEQ ID NO: 4813777 - DNA, 25 bp, Homo sapien
tgggaaggttcagccgccagtgctc

SEQ ID NO: 4813778 - DNA, 25 bp, Homo sapien
catttcaaaagcagcccagaggctg

SEQ ID NO: 4813779 - DNA, 25 bp, Homo sapien
gccttctagaaatgaggaggaccca

SEQ ID NO: 4813780 - DNA, 25 bp, Homo sapien
ttagaggccttgctcctaacacagc

SEQ ID NO: 4813781 - DNA, 25 bp, Homo sapien
caaagactctggcaacgggctaagg

SEQ ID NO: 4813782 - DNA, 25 bp, Homo sapien
gctaaggttccaggccgtctgctga

SEQ ID NO: 4813783 - DNA, 25 bp, Homo sapien
gcagaatagcagcaaagggcgcgta

SEQ ID NO: 4813784 - DNA, 25 bp, Homo sapien
tgttgtcatactgcgagggatgccg

SEQ ID NO: 4813785 - DNA, 25 bp, Homo sapien
cagctgctcgtctgacttgctgagc

SEQ ID NO: 4813786 - DNA, 25 bp, Homo sapien
gacagctgctcgtctgacttgctga

SEQ ID NO: 4813787 - DNA, 25 bp, Homo sapien
tgttccgggagcactgcccactgtc

SEQ ID NO: 4813788 - DNA, 25 bp, Homo sapien
aggacagctgctcgtctgacttgct

SEQ ID NO: 4813789 - DNA, 25 bp, Homo sapien
ctccaccatatgagtggctgcctcc

SEQ ID NO: 4813790 - DNA, 25 bp, Homo sapien
ggcggggcgactctccaccatatga

SEQ ID NO: 4813791 - DNA, 25 bp, Homo sapien
gaggcggggcgactctccaccatat

SEQ ID NO: 4813792 - DNA, 25 bp, Homo sapien
gagaggcggggcgactctccaccat

SEQ ID NO: 4813793 - DNA, 25 bp, Homo sapien
gtgcgtaacagtcaacatcaaaatc

SEQ ID NO: 4813794 - DNA, 25 bp, Homo sapien
ctgtgcgtaacagtcaacatcaaaa

SEQ ID NO: 4813795 - DNA, 25 bp, Homo sapien
tgtgcgtaacagtcaacatcaaaat

SEQ ID NO: 4813796 - DNA, 25 bp, Homo sapien
agccactggtggctcggctcatggg

SEQ ID NO: 4813797 - DNA, 25 bp, Homo sapien
caccacagccactcgggtaggggac

SEQ ID NO: 4813798 - DNA, 25 bp, Homo sapien
ggacggcgccgactgtcttttcttg

SEQ ID NO: 4813799 - DNA, 25 bp, Homo sapien
ggctcggctcatgggggccaccaca

SEQ ID NO: 4813800 - DNA, 25 bp, Homo sapien
gacatcccagtcgtcttgtttagga

SEQ ID NO: 4813801 - DNA, 25 bp, Homo sapien
ggatctctacctcgcggtctgtcag

SEQ ID NO: 4813802 - DNA, 25 bp, Homo sapien
tattatcaaccacccgaatgccagg

SEQ ID NO: 4813803 - DNA, 25 bp, Homo sapien
cttcatccgtggcatctgggaggag

SEQ ID NO: 4813804 - DNA, 25 bp, Homo sapien
gctcgtcggagacggacgtccctgc

SEQ ID NO: 4813805 - DNA, 25 bp, Homo sapien
gcttctcgatggtgagcctgaccag

SEQ ID NO: 4813806 - DNA, 25 bp, Homo sapien
tggcaggggaactgggcttcacggg

SEQ ID NO: 4813807 - DNA, 25 bp, Homo sapien
ggagacggacgtccctgcttctcga

SEQ ID NO: 4813808 - DNA, 25 bp, Homo sapien
gaaaaaggcaatgagcaaagctccc

SEQ ID NO: 4813809 - DNA, 25 bp, Homo sapien
gtggtttcccaaggcgagctggcca

SEQ ID NO: 4813810 - DNA, 25 bp, Homo sapien
cacgatgatggcatgggtggtttcc

SEQ ID NO: 4813811 - DNA, 25 bp, Homo sapien
tcaagtttcaaatgcgtaaaggcac

SEQ ID NO: 4813812 - DNA, 25 bp, Homo sapien
tccagacatggtaggtgggagcacc

SEQ ID NO: 4813813 - DNA, 25 bp, Homo sapien
gcaacacagtaaccagagaccctga

SEQ ID NO: 4813814 - DNA, 25 bp, Homo sapien
tccagcgcaagggttctttcgaaaa

SEQ ID NO: 4813815 - DNA, 25 bp, Homo sapien
cgagctcagcgtcaacagctgtgct

SEQ ID NO: 4813816 - DNA, 25 bp, Homo sapien
gaatcaattcgatagaaggaaacct

SEQ ID NO: 4813817 - DNA, 25 bp, Homo sapien
ccttaacaatgttacctgaagaata

SEQ ID NO: 4813818 - DNA, 25 bp, Homo sapien
taacaatgttacctgaagaataaca

SEQ ID NO: 4813819 - DNA, 25 bp, Homo sapien
catctcatcagaatcaattcgatag

SEQ ID NO: 4813820 - DNA, 25 bp, Homo sapien
gggactgtctggaacctgcaccggt

SEQ ID NO: 4813821 - DNA, 25 bp, Homo sapien
gactgtctggaacctgcaccggtac

SEQ ID NO: 4813822 - DNA, 25 bp, Homo sapien
caggcaggctgctctaagtccctga

SEQ ID NO: 4813823 - DNA, 25 bp, Homo sapien
aggcaggctgctctaagtccctgac

SEQ ID NO: 4813824 - DNA, 25 bp, Homo sapien
tcagaccagcgaatgaggttggcga

SEQ ID NO: 4813825 - DNA, 25 bp, Homo sapien
aggttggcgaggctttggtacactc

SEQ ID NO: 4813826 - DNA, 25 bp, Homo sapien
ttcacagtcgtcaccatctccttgt

SEQ ID NO: 4813827 - DNA, 25 bp, Homo sapien
tccagcatcacttggtcagaccagc

SEQ ID NO: 4813828 - DNA, 25 bp, Homo sapien
atggtcttaaagtagcgcagggcac

SEQ ID NO: 4813829 - DNA, 25 bp, Homo sapien
tccagtaccttcttatcaattgcca

SEQ ID NO: 4813830 - DNA, 25 bp, Homo sapien
caggggtaagatggcctccagcacc

SEQ ID NO: 4813831 - DNA, 25 bp, Homo sapien
attcgaggatcgttctgcaccaggg

SEQ ID NO: 4813832 - DNA, 25 bp, Homo sapien
cagagaaagagggcctaggatggga

SEQ ID NO: 4813833 - DNA, 25 bp, Homo sapien
tgccagtaataaagcagagaaagag

SEQ ID NO: 4813834 - DNA, 25 bp, Homo sapien
gaaagagggcctaggatgggaacat

SEQ ID NO: 4813835 - DNA, 25 bp, Homo sapien
gagaaagagggcctaggatgggaac

SEQ ID NO: 4813836 - DNA, 25 bp, Homo sapien
gggcctccacgaagcaagaggttcg

SEQ ID NO: 4813837 - DNA, 25 bp, Homo sapien
ggacataatcctctaagtccacgta

SEQ ID NO: 4813838 - DNA, 25 bp, Homo sapien
cgtactctgggaagtttctcaatgc

SEQ ID NO: 4813839 - DNA, 25 bp, Homo sapien
ttcgcatttacttgtcccacgcagg

SEQ ID NO: 4813840 - DNA, 25 bp, Homo sapien
taaattcacgagatattaaaaattc

SEQ ID NO: 4813841 - DNA, 25 bp, Homo sapien
tcataaagaggaaacgtagcatctc

SEQ ID NO: 4813842 - DNA, 25 bp, Homo sapien
tttttatgtaatgagtcaggattaa

SEQ ID NO: 4813843 - DNA, 25 bp, Homo sapien
catctcgacaattcagactctgacg

SEQ ID NO: 4813844 - DNA, 25 bp, Homo sapien
gcaaacccaattgttcttaatgtta

SEQ ID NO: 4813845 - DNA, 25 bp, Homo sapien
aaggcaaggcaaacccaattgttct

SEQ ID NO: 4813846 - DNA, 25 bp, Homo sapien
ggtcaccacccagttgaacataata

SEQ ID NO: 4813847 - DNA, 25 bp, Homo sapien
ggaccaggattctgcagtagaaggc

SEQ ID NO: 4813848 - DNA, 25 bp, Homo sapien
tgcctttgagacctggaagccacag

SEQ ID NO: 4813849 - DNA, 25 bp, Homo sapien
gagggtagccctctggtagaaatct

SEQ ID NO: 4813850 - DNA, 25 bp, Homo sapien
cacagcactggtggacataaattct

SEQ ID NO: 4813851 - DNA, 25 bp, Homo sapien
ctggtggacataaattctactgcct

SEQ ID NO: 4813852 - DNA, 25 bp, Homo sapien
aggccaggagaaacatccagagtca

SEQ ID NO: 4813853 - DNA, 25 bp, Homo sapien
gccaggagaaacatccagagtcagc

SEQ ID NO: 4813854 - DNA, 25 bp, Homo sapien
ggccaggagaaacatccagagtcag

SEQ ID NO: 4813855 - DNA, 25 bp, Homo sapien
ccaggagaaacatccagagtcagct

SEQ ID NO: 4813856 - DNA, 25 bp, Homo sapien
tacggacacctcagctggttttccc

SEQ ID NO: 4813857 - DNA, 25 bp, Homo sapien
ctctggaatctttacggacacctca

SEQ ID NO: 4813858 - DNA, 25 bp, Homo sapien
tcttgattttgggtgagtggaattt

SEQ ID NO: 4813859 - DNA, 25 bp, Homo sapien
gtgagtggaatttgtccatcagctt

SEQ ID NO: 4813860 - DNA, 25 bp, Homo sapien
atgcttcaatttttgcaattttcat

SEQ ID NO: 4813861 - DNA, 25 bp, Homo sapien
aagattcacaactgcgccgtcatga

SEQ ID NO: 4813862 - DNA, 25 bp, Homo sapien
tcgaggacagcactaactaggacag

SEQ ID NO: 4813863 - DNA, 25 bp, Homo sapien
tctcaacgctggaaatcgaggacag

SEQ ID NO: 4813864 - DNA, 25 bp, Homo sapien
ttgggcaaggctgggaaaacatgtc

SEQ ID NO: 4813865 - DNA, 25 bp, Homo sapien
tttcttgggcaaccatcgcaggcta

SEQ ID NO: 4813866 - DNA, 25 bp, Homo sapien
aattgactgtgatgttaccaacagc

SEQ ID NO: 4813867 - DNA, 25 bp, Homo sapien
tgtataaattgactgtgatgttacc

SEQ ID NO: 4813868 - DNA, 25 bp, Homo sapien
agatctggctgtcggatgaatgtcc

SEQ ID NO: 4813869 - DNA, 25 bp, Homo sapien
tcctctgtcttacttaatatacaac

SEQ ID NO: 4813870 - DNA, 25 bp, Homo sapien
aacatggaaagatcctctgtcttac

SEQ ID NO: 4813871 - DNA, 25 bp, Homo sapien
actttaacatggaaagatcctctgt

SEQ ID NO: 4813872 - DNA, 25 bp, Homo sapien
atatacaactattcctgttaaaaca

SEQ ID NO: 4813873 - DNA, 25 bp, Homo sapien
tggatgcgacatagtcaaactgccc

SEQ ID NO: 4813874 - DNA, 25 bp, Homo sapien
aacaatgctgcgttgatgaacaccc

SEQ ID NO: 4813875 - DNA, 25 bp, Homo sapien
cagtgtatttatgcagtcaggcccc

SEQ ID NO: 4813876 - DNA, 25 bp, Homo sapien
tgctggacggcaaccacagtgtatt

SEQ ID NO: 4813877 - DNA, 25 bp, Homo sapien
ccagaatgagtatcttccctaagaa

SEQ ID NO: 4813878 - DNA, 25 bp, Homo sapien
gatacaaaggtctaagattcttcgg

SEQ ID NO: 4813879 - DNA, 25 bp, Homo sapien
tatatgggtcagattaacaactgca

SEQ ID NO: 4813880 - DNA, 25 bp, Homo sapien
tgaattgactatctcaggaagagcc

SEQ ID NO: 4813881 - DNA, 25 bp, Homo sapien
tgcttggtaaacacagttcctgggt

SEQ ID NO: 4813882 - DNA, 25 bp, Homo sapien
tcccttatctagtctggaggcagga

SEQ ID NO: 4813883 - DNA, 25 bp, Homo sapien
aaaagtgcctgccagttgtcttgga

SEQ ID NO: 4813884 - DNA, 25 bp, Homo sapien
gcctgttccctgtcatgagattcgg

SEQ ID NO: 4813885 - DNA, 25 bp, Homo sapien
ctatgtcctttcagtggacacagct

SEQ ID NO: 4813886 - DNA, 25 bp, Homo sapien
gttaatactgttatttcttactgca

SEQ ID NO: 4813887 - DNA, 25 bp, Homo sapien
ctttaatgtaccctagctccttttg

SEQ ID NO: 4813888 - DNA, 25 bp, Homo sapien
tatttcttactgcaagccaacacca

SEQ ID NO: 4813889 - DNA, 25 bp, Homo sapien
tgaagggtccctcaagtgtgctccc

SEQ ID NO: 4813890 - DNA, 25 bp, Homo sapien
tgtgctaagatctccaagatgggca

SEQ ID NO: 4813891 - DNA, 25 bp, Homo sapien
catgggacatgggaatcacctgtgt

SEQ ID NO: 4813892 - DNA, 25 bp, Homo sapien
gagaaaacttaacttggctcccagc

SEQ ID NO: 4813893 - DNA, 25 bp, Homo sapien
tgtggtcctgaaccaacaacgacgg

SEQ ID NO: 4813894 - DNA, 25 bp, Homo sapien
tgagaggacaaacctggccttctgt

SEQ ID NO: 4813895 - DNA, 25 bp, Homo sapien
gcattagcctagtcagcggttctca

SEQ ID NO: 4813896 - DNA, 25 bp, Homo sapien
cagactgccagttagggacatcaga

SEQ ID NO: 4813897 - DNA, 25 bp, Homo sapien
ttacaaagtttctactatgtgctag

SEQ ID NO: 4813898 - DNA, 25 bp, Homo sapien
tatttacaaagtttctactatgtgc

SEQ ID NO: 4813899 - DNA, 25 bp, Homo sapien
tatgtgctaggaactggggacacca

SEQ ID NO: 4813900 - DNA, 25 bp, Homo sapien
atgtgctaggaactggggacaccag

SEQ ID NO: 4813901 - DNA, 25 bp, Homo sapien
taaagagctctgcatgcaagtagag

SEQ ID NO: 4813902 - DNA, 25 bp, Homo sapien
aataaacgtgcacgcagcttgttgg

SEQ ID NO: 4813903 - DNA, 25 bp, Homo sapien
cagcaacttgcctctttagccatga

SEQ ID NO: 4813904 - DNA, 25 bp, Homo sapien
tgttcactgagtaagcagcacaact

SEQ ID NO: 4813905 - DNA, 25 bp, Homo sapien
aagagattatggatgtccaattaac

SEQ ID NO: 4813906 - DNA, 25 bp, Homo sapien
caattaacataagcacaggaatcaa

SEQ ID NO: 4813907 - DNA, 25 bp, Homo sapien
taacataagcacaggaatcaactgg

SEQ ID NO: 4813908 - DNA, 25 bp, Homo sapien
gattatggatgtccaattaacataa

SEQ ID NO: 4813909 - DNA, 25 bp, Homo sapien
tttagtgactcacagtgctcacggg

SEQ ID NO: 4813910 - DNA, 25 bp, Homo sapien
caccaagtgacatttttagcagtcc

SEQ ID NO: 4813911 - DNA, 25 bp, Homo sapien
tctaccctaagaggaaagacgcaac

SEQ ID NO: 4813912 - DNA, 25 bp, Homo sapien
tgctcacgggtcttgaatgttattc

SEQ ID NO: 4813913 - DNA, 25 bp, Homo sapien
taaaaagatgactgcagattcggct

SEQ ID NO: 4813914 - DNA, 25 bp, Homo sapien
cagggatccaaagaaccatacgttg

SEQ ID NO: 4813915 - DNA, 25 bp, Homo sapien
ttagatgcacaactcatcatgccgg

SEQ ID NO: 4813916 - DNA, 25 bp, Homo sapien
caggcccaacctcgaattaatataa

SEQ ID NO: 4813917 - DNA, 25 bp, Homo sapien
ttataaaaacagaccgccaactgga

SEQ ID NO: 4813918 - DNA, 25 bp, Homo sapien
tgaagggcaacatacgaaacaatgg

SEQ ID NO: 4813919 - DNA, 25 bp, Homo sapien
gaaacaatggacttcgtgggccata

SEQ ID NO: 4813920 - DNA, 25 bp, Homo sapien
tgtgggtctccgacaaggattctct

SEQ ID NO: 4813921 - DNA, 25 bp, Homo sapien
ccacacaaggagctgcccaattggc

SEQ ID NO: 4813922 - DNA, 25 bp, Homo sapien
gcagctccactacacaactgggcag

SEQ ID NO: 4813923 - DNA, 25 bp, Homo sapien
cacaactgggcagccacacaaggag

SEQ ID NO: 4813924 - DNA, 25 bp, Homo sapien
tatggaatgcagctccactacacaa

SEQ ID NO: 4813925 - DNA, 25 bp, Homo sapien
gaaataactctgtatgtgagggaaa

SEQ ID NO: 4813926 - DNA, 25 bp, Homo sapien
tagaggacaaaacagaatcgatcag

SEQ ID NO: 4813927 - DNA, 25 bp, Homo sapien
cactagaaattaaggttaccaagag

SEQ ID NO: 4813928 - DNA, 25 bp, Homo sapien
gagtgacggttcttccaaaacgaga

SEQ ID NO: 4813929 - DNA, 25 bp, Homo sapien
aacaccggacgttataatcacaggc

SEQ ID NO: 4813930 - DNA, 25 bp, Homo sapien
tatgagggacaggtctcatacctga

SEQ ID NO: 4813931 - DNA, 25 bp, Homo sapien
ggtctcatacctgatatgtgggcca

SEQ ID NO: 4813932 - DNA, 25 bp, Homo sapien
ccaaacaccggacgttataatcaca

SEQ ID NO: 4813933 - DNA, 25 bp, Homo sapien
ggctaaaacaggtagattccccatc

SEQ ID NO: 4813934 - DNA, 25 bp, Homo sapien
gaaaaaacggatctgtcatgccaaa

SEQ ID NO: 4813935 - DNA, 25 bp, Homo sapien
taatgctacattgccggaattgcac

SEQ ID NO: 4813936 - DNA, 25 bp, Homo sapien
gccaaacctagtcatgggatggtag

SEQ ID NO: 4813937 - DNA, 25 bp, Homo sapien
tgactgtctattgtgtattttcacc

SEQ ID NO: 4813938 - DNA, 25 bp, Homo sapien
cactaacggataatgttgactgtct

SEQ ID NO: 4813939 - DNA, 25 bp, Homo sapien
gtattttcacctactagcaatatag

SEQ ID NO: 4813940 - DNA, 25 bp, Homo sapien
gcaatataggtttcatgaggatatc

SEQ ID NO: 4813941 - DNA, 25 bp, Homo sapien
tgtcaagcattctcgtattcacgcc

SEQ ID NO: 4813942 - DNA, 25 bp, Homo sapien
tatcgagggctaactctatgccaag

SEQ ID NO: 4813943 - DNA, 25 bp, Homo sapien
catgcctgagatgagcttgctgaaa

SEQ ID NO: 4813944 - DNA, 25 bp, Homo sapien
ttaacagctgaaatttatcgagggc

SEQ ID NO: 4813945 - DNA, 25 bp, Homo sapien
gaagtccagttggttgaaaagacag

SEQ ID NO: 4813946 - DNA, 25 bp, Homo sapien
gctcttggaaagcttgaagtccagt

SEQ ID NO: 4813947 - DNA, 25 bp, Homo sapien
tccagttggttgaaaagacagttga

SEQ ID NO: 4813948 - DNA, 25 bp, Homo sapien
gaaaagacagttgatgatgacaagt

SEQ ID NO: 4813949 - DNA, 25 bp, Homo sapien
gaaggtctttcgaggtttctgctgg

SEQ ID NO: 4813950 - DNA, 25 bp, Homo sapien
gtcttggtcctcaagggatttgacc

SEQ ID NO: 4813951 - DNA, 25 bp, Homo sapien
gtatctcacccagtctcatagcttt

SEQ ID NO: 4813952 - DNA, 25 bp, Homo sapien
tatgttactgaatgccaaggccaag

SEQ ID NO: 4813953 - DNA, 25 bp, Homo sapien
tcccagggtaaagcatatccgaaaa

SEQ ID NO: 4813954 - DNA, 25 bp, Homo sapien
gaggcaaacttctcggtagtccaca

SEQ ID NO: 4813955 - DNA, 25 bp, Homo sapien
tgagcaaccccagtcaaacaggagg

SEQ ID NO: 4813956 - DNA, 25 bp, Homo sapien
atgtattttacgcacgttcccaggg

SEQ ID NO: 4813957 - DNA, 25 bp, Homo sapien
gagaaccagagacaatccaaacgta

SEQ ID NO: 4813958 - DNA, 25 bp, Homo sapien
tcgatgacctggactctaacacttg

SEQ ID NO: 4813959 - DNA, 25 bp, Homo sapien
gcccacacggtgctgaattcagaag

SEQ ID NO: 4813960 - DNA, 25 bp, Homo sapien
taaataccggtgtctgctaaggccc

SEQ ID NO: 4813961 - DNA, 25 bp, Homo sapien
cgtgtatacagggaaaatcacagag

SEQ ID NO: 4813962 - DNA, 25 bp, Homo sapien
atcacagagtgattatgattttaga

SEQ ID NO: 4813963 - DNA, 25 bp, Homo sapien
attatagatagcataactcttcacc

SEQ ID NO: 4813964 - DNA, 25 bp, Homo sapien
tcagcatgactattcaaaaaagcac

SEQ ID NO: 4813965 - DNA, 25 bp, Homo sapien
tcaaagctttgacctgggatatttc

SEQ ID NO: 4813966 - DNA, 25 bp, Homo sapien
ctagatatcaaagctttgacctggg

SEQ ID NO: 4813967 - DNA, 25 bp, Homo sapien
aaatatcacaaaagcctcaaactcc

SEQ ID NO: 4813968 - DNA, 25 bp, Homo sapien
ctcaaactcctagatatcaaagctt

SEQ ID NO: 4813969 - DNA, 25 bp, Homo sapien
cagccaaaccaagccatcatattga

SEQ ID NO: 4813970 - DNA, 25 bp, Homo sapien
gaaatcatgttggactacctgtgct

SEQ ID NO: 4813971 - DNA, 25 bp, Homo sapien
tcagagaaaactgcctccttgcttc

SEQ ID NO: 4813972 - DNA, 25 bp, Homo sapien
gaaacatctcgagctgaactaaact

SEQ ID NO: 4813973 - DNA, 25 bp, Homo sapien
ggtacagatgacttcgtttcaaggg

SEQ ID NO: 4813974 - DNA, 25 bp, Homo sapien
cagatgacttcgtttcaagggcttc

SEQ ID NO: 4813975 - DNA, 25 bp, Homo sapien
gtacagatgacttcgtttcaagggc

SEQ ID NO: 4813976 - DNA, 25 bp, Homo sapien
tacagatgacttcgtttcaagggct

SEQ ID NO: 4813977 - DNA, 25 bp, Homo sapien
gaagaaagggcttgttatcgcccta

SEQ ID NO: 4813978 - DNA, 25 bp, Homo sapien
gcctctcaggcatggtctatattaa

SEQ ID NO: 4813979 - DNA, 25 bp, Homo sapien
gcacaacagcggcttgcaagatgaa

SEQ ID NO: 4813980 - DNA, 25 bp, Homo sapien
caactgaggaccgagtcactggctg

SEQ ID NO: 4813981 - DNA, 25 bp, Homo sapien
cgagaacgctgtggctgtacgaact

SEQ ID NO: 4813982 - DNA, 25 bp, Homo sapien
ggcagggatcaacgctaggcattta

SEQ ID NO: 4813983 - DNA, 25 bp, Homo sapien
tccttggctaggaaaacctctgcta

SEQ ID NO: 4813984 - DNA, 25 bp, Homo sapien
tcagacccgacctggccatgtgtta

SEQ ID NO: 4813985 - DNA, 25 bp, Homo sapien
taaggtgccggcaaaccacgtgttc

SEQ ID NO: 4813986 - DNA, 25 bp, Homo sapien
gaaatcatcgaaggcaaaggccacc

SEQ ID NO: 4813987 - DNA, 25 bp, Homo sapien
gacgcatgtctagcagggcgaccta

SEQ ID NO: 4813988 - DNA, 25 bp, Homo sapien
cataggaaatacaagctcagggact

SEQ ID NO: 4813989 - DNA, 25 bp, Homo sapien
cacgataagagaaggatactgttac

SEQ ID NO: 4813990 - DNA, 25 bp, Homo sapien
gttcatctgactattgcccacacag

SEQ ID NO: 4813991 - DNA, 25 bp, Homo sapien
ggcacttagcccatgcagtaccagg

SEQ ID NO: 4813992 - DNA, 25 bp, Homo sapien
tactctcgtggttgcattagatcct

SEQ ID NO: 4813993 - DNA, 25 bp, Homo sapien
cacctccttccagtgcttttgagag

SEQ ID NO: 4813994 - DNA, 25 bp, Homo sapien
acctccttccagtgcttttgagagg

SEQ ID NO: 4813995 - DNA, 25 bp, Homo sapien
gtcctgccaacagcgcacaagtgtt

SEQ ID NO: 4813996 - DNA, 25 bp, Homo sapien
gatgctgctacagagatggtacaca

SEQ ID NO: 4813997 - DNA, 25 bp, Homo sapien
ttcttttgcgtacacacccataggt

SEQ ID NO: 4813998 - DNA, 25 bp, Homo sapien
tattccatgtatgaacagcccacgt

SEQ ID NO: 4813999 - DNA, 25 bp, Homo sapien
ggatgaaatgagttctgaccagcaa

SEQ ID NO: 4814000 - DNA, 25 bp, Homo sapien
tgttgcagaaagacggcctcatcct

SEQ ID NO: 4814001 - DNA, 25 bp, Homo sapien
gacacacagatattggcaaaccctg

SEQ ID NO: 4814002 - DNA, 25 bp, Homo sapien
gttattttcagcatccacggcctgg

SEQ ID NO: 4814003 - DNA, 25 bp, Homo sapien
tcaccccttgttaagcaacgtggta

SEQ ID NO: 4814004 - DNA, 25 bp, Homo sapien
tacagacaccaggtaggcatggtgc

SEQ ID NO: 4814005 - DNA, 25 bp, Homo sapien
ttagtacagacaccaggtaggcatg

SEQ ID NO: 4814006 - DNA, 25 bp, Homo sapien
gtcccagaggttaacatattgatgc

SEQ ID NO: 4814007 - DNA, 25 bp, Homo sapien
caatccgggctactttgggagacat

SEQ ID NO: 4814008 - DNA, 25 bp, Homo sapien
cagggaggctctaaccagtgctcta

SEQ ID NO: 4814009 - DNA, 25 bp, Homo sapien
gtattacgagtatcagacgcagtct

SEQ ID NO: 4814010 - DNA, 25 bp, Homo sapien
tcagctggcctgaggtaagacccag

SEQ ID NO: 4814011 - DNA, 25 bp, Homo sapien
ttagaaggtatggcccaggaggccg

SEQ ID NO: 4814012 - DNA, 25 bp, Homo sapien
ctccgtgaggcaggcgatgagtgaa

SEQ ID NO: 4814013 - DNA, 25 bp, Homo sapien
tgctccgtgaggcaggcgatgagtg

SEQ ID NO: 4814014 - DNA, 25 bp, Homo sapien
aggaggccgggatctttgctgtgtc

SEQ ID NO: 4814015 - DNA, 25 bp, Homo sapien
cttagaaactgtgctaggttagaca

SEQ ID NO: 4814016 - DNA, 25 bp, Homo sapien
cacggtcgctcggtctggcagcctg

SEQ ID NO: 4814017 - DNA, 25 bp, Homo sapien
aggttagacaagcttctctgggagc

SEQ ID NO: 4814018 - DNA, 25 bp, Homo sapien
cagcacggtcgctcggtctggcagc

SEQ ID NO: 4814019 - DNA, 25 bp, Homo sapien
tgctttctcgatcttgccggacatt

SEQ ID NO: 4814020 - DNA, 25 bp, Homo sapien
ctgctttctcgatcttgccggacat

SEQ ID NO: 4814021 - DNA, 25 bp, Homo sapien
tgccggacatttccgggctgcgccg

SEQ ID NO: 4814022 - DNA, 25 bp, Homo sapien
tcttgccggacatttccgggctgcg

SEQ ID NO: 4814023 - DNA, 25 bp, Homo sapien
acgcctcagacccgcgccggcatgg

SEQ ID NO: 4814024 - DNA, 25 bp, Homo sapien
cggccctgcgctcggcgaccgcgct

SEQ ID NO: 4814025 - DNA, 25 bp, Homo sapien
gcctcagacccgcgccggcatggcg

SEQ ID NO: 4814026 - DNA, 25 bp, Homo sapien
cgcctcagacccgcgccggcatggc

SEQ ID NO: 4814027 - DNA, 25 bp, Homo sapien
aagggataaatcctgtgtccagcac

SEQ ID NO: 4814028 - DNA, 25 bp, Homo sapien
tatcccaagggataaatcctgtgtc

SEQ ID NO: 4814029 - DNA, 25 bp, Homo sapien
ccaagggataaatcctgtgtccagc

SEQ ID NO: 4814030 - DNA, 25 bp, Homo sapien
attatcccaagggataaatcctgtg

SEQ ID NO: 4814031 - DNA, 25 bp, Homo sapien
tgtagcaggactggcaaaacgtttc

SEQ ID NO: 4814032 - DNA, 25 bp, Homo sapien
tagcaggactggcaaaacgtttcat

SEQ ID NO: 4814033 - DNA, 25 bp, Homo sapien
cactgcttgtagcaggactggcaaa

SEQ ID NO: 4814034 - DNA, 25 bp, Homo sapien
tgcttgtagcaggactggcaaaacg

SEQ ID NO: 4814035 - DNA, 25 bp, Homo sapien
ccatcgaatggggtgtccccagggt

SEQ ID NO: 4814036 - DNA, 25 bp, Homo sapien
cagctgcacaaaggtacttggaggc

SEQ ID NO: 4814037 - DNA, 25 bp, Homo sapien
cacaaaggtacttggaggccctctc

SEQ ID NO: 4814038 - DNA, 25 bp, Homo sapien
ctgcaatggcttctggccctctgtg

SEQ ID NO: 4814039 - DNA, 25 bp, Homo sapien
gtagaagttctcgatgttttgaaaa

SEQ ID NO: 4814040 - DNA, 25 bp, Homo sapien
tagaagttctcgatgttttgaaaag

SEQ ID NO: 4814041 - DNA, 25 bp, Homo sapien
gaagttctcgatgttttgaaaagtc

SEQ ID NO: 4814042 - DNA, 25 bp, Homo sapien
tgtagaagttctcgatgttttgaaa

SEQ ID NO: 4814043 - DNA, 25 bp, Homo sapien
ctcgactgattctgtggatatagtt

SEQ ID NO: 4814044 - DNA, 25 bp, Homo sapien
tcgactgattctgtggatatagttt

SEQ ID NO: 4814045 - DNA, 25 bp, Homo sapien
gactgattctgtggatatagttttc

SEQ ID NO: 4814046 - DNA, 25 bp, Homo sapien
actgattctgtggatatagttttcc

SEQ ID NO: 4814047 - DNA, 25 bp, Homo sapien
gaaacctgctgcacatcaatgcctc

SEQ ID NO: 4814048 - DNA, 25 bp, Homo sapien
aggtcatggttgactaaagaaacct

SEQ ID NO: 4814049 - DNA, 25 bp, Homo sapien
tgttggtgggaaggtcatggttgac

SEQ ID NO: 4814050 - DNA, 25 bp, Homo sapien
gggaaggtcatggttgactaaagaa

SEQ ID NO: 4814051 - DNA, 25 bp, Homo sapien
aaataagcatccctgttccccaaag

SEQ ID NO: 4814052 - DNA, 25 bp, Homo sapien
aggaaataagcatccctgttcccca

SEQ ID NO: 4814053 - DNA, 25 bp, Homo sapien
ataagcatccctgttccccaaagac

SEQ ID NO: 4814054 - DNA, 25 bp, Homo sapien
tccgtgtaggcagacaaggaaggca

SEQ ID NO: 4814055 - DNA, 25 bp, Homo sapien
ctgtgggcaggtaaaactgtaccca

SEQ ID NO: 4814056 - DNA, 25 bp, Homo sapien
ctgtacccacaaggccattcatgaa

SEQ ID NO: 4814057 - DNA, 25 bp, Homo sapien
taaaactgtacccacaaggccattc

SEQ ID NO: 4814058 - DNA, 25 bp, Homo sapien
gcaggtaaaactgtacccacaaggc

SEQ ID NO: 4814059 - DNA, 25 bp, Homo sapien
caggaactcagtgagcgtgcacggc

SEQ ID NO: 4814060 - DNA, 25 bp, Homo sapien
gcacaggccacggtgctcaggttca

SEQ ID NO: 4814061 - DNA, 25 bp, Homo sapien
cacaggccacggtgctcaggttcat

SEQ ID NO: 4814062 - DNA, 25 bp, Homo sapien
gtgcacggcggtggagggcacaggc

SEQ ID NO: 4814063 - DNA, 25 bp, Homo sapien
cccaggtccggactgtgggtagagg

SEQ ID NO: 4814064 - DNA, 25 bp, Homo sapien
aggtccggactgtgggtagaggcca

SEQ ID NO: 4814065 - DNA, 25 bp, Homo sapien
gggctgcggctgaaaccgctgtagg

SEQ ID NO: 4814066 - DNA, 25 bp, Homo sapien
ctgaaaccgctgtaggggcatgcat

SEQ ID NO: 4814067 - DNA, 25 bp, Homo sapien
ggtcagccagcttagtgcctgtgtt

SEQ ID NO: 4814068 - DNA, 25 bp, Homo sapien
tcagccagcttagtgcctgtgttaa

SEQ ID NO: 4814069 - DNA, 25 bp, Homo sapien
agccagcttagtgcctgtgttaaca

SEQ ID NO: 4814070 - DNA, 25 bp, Homo sapien
aggtcagccagcttagtgcctgtgt

SEQ ID NO: 4814071 - DNA, 25 bp, Homo sapien
tcccatagtcgctcggacctggtgg

SEQ ID NO: 4814072 - DNA, 25 bp, Homo sapien
tggacatcccatagtcgctcggacc

SEQ ID NO: 4814073 - DNA, 25 bp, Homo sapien
acatcccatagtcgctcggacctgg

SEQ ID NO: 4814074 - DNA, 25 bp, Homo sapien
tagtcgctcggacctggtggcctat

SEQ ID NO: 4814075 - DNA, 25 bp, Homo sapien
gatttcgaccaagaggaattgaggg

SEQ ID NO: 4814076 - DNA, 25 bp, Homo sapien
ttgagatttcgaccaagaggaattg

SEQ ID NO: 4814077 - DNA, 25 bp, Homo sapien
ttctctcttgagatttcgaccaaga

SEQ ID NO: 4814078 - DNA, 25 bp, Homo sapien
tctcttgagatttcgaccaagagga

SEQ ID NO: 4814079 - DNA, 25 bp, Homo sapien
cctggtgacctctgcgaggagctgc

SEQ ID NO: 4814080 - DNA, 25 bp, Homo sapien
agagacctggaaggcgttcgggcca

SEQ ID NO: 4814081 - DNA, 25 bp, Homo sapien
aggcgttcgggccacgggctgcagg

SEQ ID NO: 4814082 - DNA, 25 bp, Homo sapien
acctctgcgaggagctgcctctgct

SEQ ID NO: 4814083 - DNA, 25 bp, Homo sapien
tcagcaccgtgaactcagaaccatc

SEQ ID NO: 4814084 - DNA, 25 bp, Homo sapien
cctagcagcatccaggtagcttccc

SEQ ID NO: 4814085 - DNA, 25 bp, Homo sapien
atccagttctaagttcctagcagca

SEQ ID NO: 4814086 - DNA, 25 bp, Homo sapien
agcaccgtgaactcagaaccatcca

SEQ ID NO: 4814087 - DNA, 25 bp, Homo sapien
gatcttgagagagttgccaccattc

SEQ ID NO: 4814088 - DNA, 25 bp, Homo sapien
actaagatagcgtgcttgagaccgc

SEQ ID NO: 4814089 - DNA, 25 bp, Homo sapien
tccctggtagacgacacttcgactg

SEQ ID NO: 4814090 - DNA, 25 bp, Homo sapien
gactgtgctgctacaacacgttgca

SEQ ID NO: 4814091 - DNA, 25 bp, Homo sapien
atgaatcgtgtctgtaggccagaca

SEQ ID NO: 4814092 - DNA, 25 bp, Homo sapien
tgaatcgtgtctgtaggccagacat

SEQ ID NO: 4814093 - DNA, 25 bp, Homo sapien
ggtttcagcattccggctcctccaa

SEQ ID NO: 4814094 - DNA, 25 bp, Homo sapien
cctcggcaaagttggcttccagacg

SEQ ID NO: 4814095 - DNA, 25 bp, Homo sapien
tctgctccgaggatgtcggtttcag

SEQ ID NO: 4814096 - DNA, 25 bp, Homo sapien
gcgctgcttttgatgtctgctccga

SEQ ID NO: 4814097 - DNA, 25 bp, Homo sapien
atctctggctggcgtagactctggt

SEQ ID NO: 4814098 - DNA, 25 bp, Homo sapien
tagactctggttggaccagtctccc

SEQ ID NO: 4814099 - DNA, 25 bp, Homo sapien
gttggaccagtctccccaggcaaag

SEQ ID NO: 4814100 - DNA, 25 bp, Homo sapien
gctggcgtagactctggttggacca

SEQ ID NO: 4814101 - DNA, 25 bp, Homo sapien
cagaggaagcttcggagagaaaatc

SEQ ID NO: 4814102 - DNA, 25 bp, Homo sapien
tcctgcacaaaagcaggatcaatta

SEQ ID NO: 4814103 - DNA, 25 bp, Homo sapien
aactttctatccacggagccggaag

SEQ ID NO: 4814104 - DNA, 25 bp, Homo sapien
gaaaatcaggctccagagggagacg

SEQ ID NO: 4814105 - DNA, 25 bp, Homo sapien
ctttctctcatttcacgtccctggg

SEQ ID NO: 4814106 - DNA, 25 bp, Homo sapien
caggacacagcaggcgagcgctggc

SEQ ID NO: 4814107 - DNA, 25 bp, Homo sapien
gtgcagatgacaggcttccggggct

SEQ ID NO: 4814108 - DNA, 25 bp, Homo sapien
agatgacaggcttccggggctggac

SEQ ID NO: 4814109 - DNA, 25 bp, Homo sapien
gcagatgacaggcttccggggctgg

SEQ ID NO: 4814110 - DNA, 25 bp, Homo sapien
cgtgcagatgacaggcttccggggc

SEQ ID NO: 4814111 - DNA, 25 bp, Homo sapien
agcaacgtttgctgccgtcagtgaa

SEQ ID NO: 4814112 - DNA, 25 bp, Homo sapien
gaggccccgggctgaacacacagcg

SEQ ID NO: 4814113 - DNA, 25 bp, Homo sapien
acccaccgagcctgagcaacgtttg

SEQ ID NO: 4814114 - DNA, 25 bp, Homo sapien
tcccacgctggctgacaccagcacg

SEQ ID NO: 4814115 - DNA, 25 bp, Homo sapien
gagcgggcctcgagggagtgagtgg

SEQ ID NO: 4814116 - DNA, 25 bp, Homo sapien
gaggactgagcgggcctcgagggag

SEQ ID NO: 4814117 - DNA, 25 bp, Homo sapien
actgagcgggcctcgagggagtgag

SEQ ID NO: 4814118 - DNA, 25 bp, Homo sapien
gactgagcgggcctcgagggagtga

SEQ ID NO: 4814119 - DNA, 25 bp, Homo sapien
gggggcactgagcaaactgagaacc

SEQ ID NO: 4814120 - DNA, 25 bp, Homo sapien
tcggggacgtcgctgctctaactgc

SEQ ID NO: 4814121 - DNA, 25 bp, Homo sapien
tgggcctgcgacctcacagaggcca

SEQ ID NO: 4814122 - DNA, 25 bp, Homo sapien
ggccataaggacctgatctcaggtg

SEQ ID NO: 4814123 - DNA, 25 bp, Homo sapien
gaggcggcctggccgtaacaccggc

SEQ ID NO: 4814124 - DNA, 25 bp, Homo sapien
cctatggtgggttcaggatagagcc

SEQ ID NO: 4814125 - DNA, 25 bp, Homo sapien
gccgagcacatttgagcagcctcat

SEQ ID NO: 4814126 - DNA, 25 bp, Homo sapien
gggtttatgacaacagattatctgg

SEQ ID NO: 4814127 - DNA, 25 bp, Homo sapien
cattttgaaagctgggcccctatgg

SEQ ID NO: 4814128 - DNA, 25 bp, Homo sapien
gccaccaggccaagttggataatgt

SEQ ID NO: 4814129 - DNA, 25 bp, Homo sapien
ccaggccaagttggataatgtttta

SEQ ID NO: 4814130 - DNA, 25 bp, Homo sapien
caccaggccaagttggataatgttt

SEQ ID NO: 4814131 - DNA, 25 bp, Homo sapien
aggccaccaggccaagttggataat

SEQ ID NO: 4814132 - DNA, 25 bp, Homo sapien
aaattccacgcagccatcccatgaa

SEQ ID NO: 4814133 - DNA, 25 bp, Homo sapien
aagtaaattccacgcagccatccca

SEQ ID NO: 4814134 - DNA, 25 bp, Homo sapien
gtaaattccacgcagccatcccatg

SEQ ID NO: 4814135 - DNA, 25 bp, Homo sapien
taagtaaattccacgcagccatccc

SEQ ID NO: 4814136 - DNA, 25 bp, Homo sapien
gtcagggcacacatcggaggcttct

SEQ ID NO: 4814137 - DNA, 25 bp, Homo sapien
tcaacgtgggtttggtggaaatcgc

SEQ ID NO: 4814138 - DNA, 25 bp, Homo sapien
gacctctggcgggttctctgcttct

SEQ ID NO: 4814139 - DNA, 25 bp, Homo sapien
aagcagctgtggacctctggcgggt

SEQ ID NO: 4814140 - DNA, 25 bp, Homo sapien
gttaatgatcatagggaagacagcc

SEQ ID NO: 4814141 - DNA, 25 bp, Homo sapien
agagaggctggtagactcgggtgga

SEQ ID NO: 4814142 - DNA, 25 bp, Homo sapien
gaggctggtagactcgggtggaacc

SEQ ID NO: 4814143 - DNA, 25 bp, Homo sapien
ggaaccggggtgttaatgatcatag

SEQ ID NO: 4814144 - DNA, 25 bp, Homo sapien
cggccggagcgcccagtccaggcaa

SEQ ID NO: 4814145 - DNA, 25 bp, Homo sapien
gcggccggagcgcccagtccaggca

SEQ ID NO: 4814146 - DNA, 25 bp, Homo sapien
gcagcggccggagcgcccagtccag

SEQ ID NO: 4814147 - DNA, 25 bp, Homo sapien
gggcggccgtggttcgatcgtgcgt

SEQ ID NO: 4814148 - DNA, 25 bp, Homo sapien
gccagggcggccgtggttcgatcgt

SEQ ID NO: 4814149 - DNA, 25 bp, Homo sapien
gcggccgtggttcgatcgtgcgtct

SEQ ID NO: 4814150 - DNA, 25 bp, Homo sapien
ccgtggttcgatcgtgcgtctgctg

SEQ ID NO: 4814151 - DNA, 25 bp, Homo sapien
gaacctcccaatttctggtgagaga

SEQ ID NO: 4814152 - DNA, 25 bp, Homo sapien
cctcccaatttctggtgagagaggc

SEQ ID NO: 4814153 - DNA, 25 bp, Homo sapien
ggaacctcccaatttctggtgagag

SEQ ID NO: 4814154 - DNA, 25 bp, Homo sapien
aacctcccaatttctggtgagagag

SEQ ID NO: 4814155 - DNA, 25 bp, Homo sapien
gctcttcaagtactaataacagggc

SEQ ID NO: 4814156 - DNA, 25 bp, Homo sapien
tgtgaacctcaaggtttagctcttc

SEQ ID NO: 4814157 - DNA, 25 bp, Homo sapien
gatgtgctgtgaacctcaaggttta

SEQ ID NO: 4814158 - DNA, 25 bp, Homo sapien
caaggtttagctcttcaagtactaa

SEQ ID NO: 4814159 - DNA, 25 bp, Homo sapien
tgtcccatcaggcccggaaccatga

SEQ ID NO: 4814160 - DNA, 25 bp, Homo sapien
gtgagaatcctggtgtcgtccctgc

SEQ ID NO: 4814161 - DNA, 25 bp, Homo sapien
gtgcccttaaaaggctctcgatgta

SEQ ID NO: 4814162 - DNA, 25 bp, Homo sapien
gacctgatggccgaacagtgcctcc

SEQ ID NO: 4814163 - DNA, 25 bp, Homo sapien
gtagcagcaggcccacactctgaca

SEQ ID NO: 4814164 - DNA, 25 bp, Homo sapien
gaagcattggcaagacggggtaacc

SEQ ID NO: 4814165 - DNA, 25 bp, Homo sapien
cgtcccggcctctggtggccacggg

SEQ ID NO: 4814166 - DNA, 25 bp, Homo sapien
ggcgtcccggcctctggtggccacg

SEQ ID NO: 4814167 - DNA, 25 bp, Homo sapien
gggtaacccggccagcagacagcgt

SEQ ID NO: 4814168 - DNA, 25 bp, Homo sapien
tctggcttaggccacgttcgatgcg

SEQ ID NO: 4814169 - DNA, 25 bp, Homo sapien
cgttcgatgcggcacactcgggcac

SEQ ID NO: 4814170 - DNA, 25 bp, Homo sapien
ttcgatgcggcacactcgggcacgg

SEQ ID NO: 4814171 - DNA, 25 bp, Homo sapien
ttaggccacgttcgatgcggcacac

SEQ ID NO: 4814172 - DNA, 25 bp, Homo sapien
aggatacaaaaggtttattgcttat

SEQ ID NO: 4814173 - DNA, 25 bp, Homo sapien
ggatacaaaaggtttattgcttata

SEQ ID NO: 4814174 - DNA, 25 bp, Homo sapien
gatacaaaaggtttattgcttataa

SEQ ID NO: 4814175 - DNA, 25 bp, Homo sapien
caggatacaaaaggtttattgctta

SEQ ID NO: 4814176 - DNA, 25 bp, Homo sapien
cacagagggagtctgctcttcaaga

SEQ ID NO: 4814177 - DNA, 25 bp, Homo sapien
gcggagacgacagacaccagcactg

SEQ ID NO: 4814178 - DNA, 25 bp, Homo sapien
cagagggagtctgctcttcaagagt

SEQ ID NO: 4814179 - DNA, 25 bp, Homo sapien
ctcattccagtaacagctcgcggag

SEQ ID NO: 4814180 - DNA, 25 bp, Homo sapien
gggaaggccgtcctgcagaaacttc

SEQ ID NO: 4814181 - DNA, 25 bp, Homo sapien
atccctccatgtcgggggaaggccg

SEQ ID NO: 4814182 - DNA, 25 bp, Homo sapien
gaaggccgtcctgcagaaacttccc

SEQ ID NO: 4814183 - DNA, 25 bp, Homo sapien
catggaaggcttcgagggttcggaa

SEQ ID NO: 4814184 - DNA, 25 bp, Homo sapien
cgtgttaggctcaaaagcaagtctt

SEQ ID NO: 4814185 - DNA, 25 bp, Homo sapien
tctatctgaaattggagctcttgct

SEQ ID NO: 4814186 - DNA, 25 bp, Homo sapien
ctgagtggagtcactgggattcaaa

SEQ ID NO: 4814187 - DNA, 25 bp, Homo sapien
aatcccacagtcagttaccaaaggg

SEQ ID NO: 4814188 - DNA, 25 bp, Homo sapien
gccagcatcatgaagccaatcaacg

SEQ ID NO: 4814189 - DNA, 25 bp, Homo sapien
tggctgtgttgtgcccactctgcca

SEQ ID NO: 4814190 - DNA, 25 bp, Homo sapien
agcatcatgaagccaatcaacgcac

SEQ ID NO: 4814191 - DNA, 25 bp, Homo sapien
actctgccagcatcatgaagccaat

SEQ ID NO: 4814192 - DNA, 25 bp, Homo sapien
ccatgtgataagatgcacactgatt

SEQ ID NO: 4814193 - DNA, 25 bp, Homo sapien
cactgatttggccttgctaacaggt

SEQ ID NO: 4814194 - DNA, 25 bp, Homo sapien
gagtcggttctctaaccggcagact

SEQ ID NO: 4814195 - DNA, 25 bp, Homo sapien
taacaggtctttggagtcggttctc

SEQ ID NO: 4814196 - DNA, 25 bp, Homo sapien
gcagttttaaactggcagccccatc

SEQ ID NO: 4814197 - DNA, 25 bp, Homo sapien
caagtagagaaagcaccagtgaatg

SEQ ID NO: 4814198 - DNA, 25 bp, Homo sapien
agtctgaagatgcaacggctgccct

SEQ ID NO: 4814199 - DNA, 25 bp, Homo sapien
ggtttctcccagatcccttcgcagt

SEQ ID NO: 4814200 - DNA, 25 bp, Homo sapien
catgaaggatcggaccacgacatcc

SEQ ID NO: 4814201 - DNA, 25 bp, Homo sapien
gcagctgatagtggagcagggcagt

SEQ ID NO: 4814202 - DNA, 25 bp, Homo sapien
cggaccacgacatccggcatctggg

SEQ ID NO: 4814203 - DNA, 25 bp, Homo sapien
aggatcggaccacgacatccggcat

SEQ ID NO: 4814204 - DNA, 25 bp, Homo sapien
ggacaaagacgagttagcggccact

SEQ ID NO: 4814205 - DNA, 25 bp, Homo sapien
gaagattccagcaacggaaagcctg

SEQ ID NO: 4814206 - DNA, 25 bp, Homo sapien
gcacatacgacaaggagcacttccg

SEQ ID NO: 4814207 - DNA, 25 bp, Homo sapien
cagatctgagtatctcgtggaggaa

SEQ ID NO: 4814208 - DNA, 25 bp, Homo sapien
cccaacagggcaattggtctctttc

SEQ ID NO: 4814209 - DNA, 25 bp, Homo sapien
gatggttttcccaacagggcaattg

SEQ ID NO: 4814210 - DNA, 25 bp, Homo sapien
ttcccaacagggcaattggtctctt

SEQ ID NO: 4814211 - DNA, 25 bp, Homo sapien
cctgcgatggttttcccaacagggc

SEQ ID NO: 4814212 - DNA, 25 bp, Homo sapien
caggagaagtttatcagcaaggcca

SEQ ID NO: 4814213 - DNA, 25 bp, Homo sapien
tcaccgttgctaggatggcccttcg

SEQ ID NO: 4814214 - DNA, 25 bp, Homo sapien
aacactgtgtatgtggctgaaccca

SEQ ID NO: 4814215 - DNA, 25 bp, Homo sapien
tgtgaattgttaatgcccgccgtca

SEQ ID NO: 4814216 - DNA, 25 bp, Homo sapien
tgcgataggaacgtcagtccctggg

SEQ ID NO: 4814217 - DNA, 25 bp, Homo sapien
tgtgtgacaccttccctgcgatagg

SEQ ID NO: 4814218 - DNA, 25 bp, Homo sapien
tgtagcccctgttggaatagccgag

SEQ ID NO: 4814219 - DNA, 25 bp, Homo sapien
gcaaagcaaactgggctcgaacggt

SEQ ID NO: 4814220 - DNA, 25 bp, Homo sapien
gaagcgtgtgctggtcagaaaacat

SEQ ID NO: 4814221 - DNA, 25 bp, Homo sapien
taatgacagagtgcctaccacaggg

SEQ ID NO: 4814222 - DNA, 25 bp, Homo sapien
tctcaacacggctcagagggaacat

SEQ ID NO: 4814223 - DNA, 25 bp, Homo sapien
cttctagcagtgacgccttgggcga

SEQ ID NO: 4814224 - DNA, 25 bp, Homo sapien
aggacagtctgtcttctcatgaatc

SEQ ID NO: 4814225 - DNA, 25 bp, Homo sapien
gtctgtcttctcatgaatcaaaatg

SEQ ID NO: 4814226 - DNA, 25 bp, Homo sapien
gacagtctgtcttctcatgaatcaa

SEQ ID NO: 4814227 - DNA, 25 bp, Homo sapien
gaatcaaaatgaatggtaccagttt

SEQ ID NO: 4814228 - DNA, 25 bp, Homo sapien
aagtctttgggaagctacagttccg

SEQ ID NO: 4814229 - DNA, 25 bp, Homo sapien
gaggagtgaggatgtccagaagttg

SEQ ID NO: 4814230 - DNA, 25 bp, Homo sapien
gcagcagtgtgggagcccgaacact

SEQ ID NO: 4814231 - DNA, 25 bp, Homo sapien
cagaagttgggaagatgcacatagt

SEQ ID NO: 4814232 - DNA, 25 bp, Homo sapien
gtcttgtcaaagcactccaccttca

SEQ ID NO: 4814233 - DNA, 25 bp, Homo sapien
tttgctcagcatccaagacttggaa

SEQ ID NO: 4814234 - DNA, 25 bp, Homo sapien
caggagaacttcacctacagtgatc

SEQ ID NO: 4814235 - DNA, 25 bp, Homo sapien
gaaacagagctgatgaactcgccat

SEQ ID NO: 4814236 - DNA, 25 bp, Homo sapien
ggcgattcacccaccagtgagtgca

SEQ ID NO: 4814237 - DNA, 25 bp, Homo sapien
ttcggtcccattgtgcggcaaagct

SEQ ID NO: 4814238 - DNA, 25 bp, Homo sapien
caaagctaatgagattccgctggga

SEQ ID NO: 4814239 - DNA, 25 bp, Homo sapien
gccaggaagggcactaatgctccca

SEQ ID NO: 4814240 - DNA, 25 bp, Homo sapien
aacagctgccagtcaacgtgctgga

SEQ ID NO: 4814241 - DNA, 25 bp, Homo sapien
tcctgtgcaagagctggtctacgct

SEQ ID NO: 4814242 - DNA, 25 bp, Homo sapien
ttagctaaacccagagtggcactgc

SEQ ID NO: 4814243 - DNA, 25 bp, Homo sapien
gacctcaagtgtacgacgcatggca

SEQ ID NO: 4814244 - DNA, 25 bp, Homo sapien
gacagtaggaatctcttggaaggag

SEQ ID NO: 4814245 - DNA, 25 bp, Homo sapien
acagtaggaatctcttggaaggaga

SEQ ID NO: 4814246 - DNA, 25 bp, Homo sapien
ggactgagatctggcctgaggtctt

SEQ ID NO: 4814247 - DNA, 25 bp, Homo sapien
gtgcagggcaccgaacagggaatgg

SEQ ID NO: 4814248 - DNA, 25 bp, Homo sapien
ggtcttagaacttttgtcacaacca

SEQ ID NO: 4814249 - DNA, 25 bp, Homo sapien
ggaatgggactgagatctggcctga

SEQ ID NO: 4814250 - DNA, 25 bp, Homo sapien
gaacctgttagcagccatagaccca

SEQ ID NO: 4814251 - DNA, 25 bp, Homo sapien
tctaatgaggaagagtgaaaagggc

SEQ ID NO: 4814252 - DNA, 25 bp, Homo sapien
gggaccacagtaaatgatgggaacc

SEQ ID NO: 4814253 - DNA, 25 bp, Homo sapien
gaaaagggcttgctgatggcatgaa

SEQ ID NO: 4814254 - DNA, 25 bp, Homo sapien
gcaagacaaggataatgagcagcat

SEQ ID NO: 4814255 - DNA, 25 bp, Homo sapien
gagggaactcattgcaataccacag

SEQ ID NO: 4814256 - DNA, 25 bp, Homo sapien
gccctcaagaagtcatcattggcct

SEQ ID NO: 4814257 - DNA, 25 bp, Homo sapien
cattggccttttgtggagactggag

SEQ ID NO: 4814258 - DNA, 25 bp, Homo sapien
cagtaaacacctctagagggtggtc

SEQ ID NO: 4814259 - DNA, 25 bp, Homo sapien
atgacgcccctctgatccactaagt

SEQ ID NO: 4814260 - DNA, 25 bp, Homo sapien
ccagggtagcacattgcatttagct

SEQ ID NO: 4814261 - DNA, 25 bp, Homo sapien
gctcaatgcacaccagattttcttg

SEQ ID NO: 4814262 - DNA, 25 bp, Homo sapien
tgactagcctaatcagaaggaggcc

SEQ ID NO: 4814263 - DNA, 25 bp, Homo sapien
gccacagggcctgagttagtccagg

SEQ ID NO: 4814264 - DNA, 25 bp, Homo sapien
taaaatccgaattctgcaccagggc

SEQ ID NO: 4814265 - DNA, 25 bp, Homo sapien
gggataactcggaccaagctttcaa

SEQ ID NO: 4814266 - DNA, 25 bp, Homo sapien
gacatttcccataacagtttttcat

SEQ ID NO: 4814267 - DNA, 25 bp, Homo sapien
gagaccgctagggctctgagaaacc

SEQ ID NO: 4814268 - DNA, 25 bp, Homo sapien
ttggcccatcccttgggcaccagtg

SEQ ID NO: 4814269 - DNA, 25 bp, Homo sapien
caccagtggagaccgctagggctct

SEQ ID NO: 4814270 - DNA, 25 bp, Homo sapien
gtgagggagtgccagcctgcttccc

SEQ ID NO: 4814271 - DNA, 25 bp, Homo sapien
tcacgttttcctaatgccgcttgag

SEQ ID NO: 4814272 - DNA, 25 bp, Homo sapien
aagcctctgatttgagaccaatgtt

SEQ ID NO: 4814273 - DNA, 25 bp, Homo sapien
taaacctcaaagcattcacgttttc

SEQ ID NO: 4814274 - DNA, 25 bp, Homo sapien
gccgcttgagtaagaagcaaaaagt

SEQ ID NO: 4814275 - DNA, 25 bp, Homo sapien
cttctggaatacttgatagttggat

SEQ ID NO: 4814276 - DNA, 25 bp, Homo sapien
agttggatttggaccatatatcaag

SEQ ID NO: 4814277 - DNA, 25 bp, Homo sapien
tgatagttggatttggaccatatat

SEQ ID NO: 4814278 - DNA, 25 bp, Homo sapien
gatagttggatttggaccatatatc

SEQ ID NO: 4814279 - DNA, 25 bp, Homo sapien
ggtcttagaattcgggacttcaaga

SEQ ID NO: 4814280 - DNA, 25 bp, Homo sapien
catcggtcttagaattcgggacttc

SEQ ID NO: 4814281 - DNA, 25 bp, Homo sapien
gcatcggtcttagaattcgggactt

SEQ ID NO: 4814282 - DNA, 25 bp, Homo sapien
tcggtcttagaattcgggacttcaa

SEQ ID NO: 4814283 - DNA, 25 bp, Homo sapien
agcacagacacgtctgttctcaggg

SEQ ID NO: 4814284 - DNA, 25 bp, Homo sapien
cttgcagatgaccaattgcttcagc

SEQ ID NO: 4814285 - DNA, 25 bp, Homo sapien
tgcttcagcacagacacgtctgttc

SEQ ID NO: 4814286 - DNA, 25 bp, Homo sapien
tcagcacagacacgtctgttctcag

SEQ ID NO: 4814287 - DNA, 25 bp, Homo sapien
ctgtgtagacattctcgttatatcc

SEQ ID NO: 4814288 - DNA, 25 bp, Homo sapien
gacattctcgttatatccctttact

SEQ ID NO: 4814289 - DNA, 25 bp, Homo sapien
cgatcaatgaacaggctccgcatga

SEQ ID NO: 4814290 - DNA, 25 bp, Homo sapien
ccctttactattgttcgatcaatga

SEQ ID NO: 4814291 - DNA, 25 bp, Homo sapien
caccctgcctaataagacgtgtttt

SEQ ID NO: 4814292 - DNA, 25 bp, Homo sapien
actgcggccagtctgttatccttgt

SEQ ID NO: 4814293 - DNA, 25 bp, Homo sapien
aacaccctgcctaataagacgtgtt

SEQ ID NO: 4814294 - DNA, 25 bp, Homo sapien
gcggccagtctgttatccttgtttt

SEQ ID NO: 4814295 - DNA, 25 bp, Homo sapien
taaagagccatcaatgttaacaagt

SEQ ID NO: 4814296 - DNA, 25 bp, Homo sapien
tgttaacaagttgggcagcacttcc

SEQ ID NO: 4814297 - DNA, 25 bp, Homo sapien
gcacttccaattttccttagctctt

SEQ ID NO: 4814298 - DNA, 25 bp, Homo sapien
gggtcatttgctaaagagccatcaa

SEQ ID NO: 4814299 - DNA, 25 bp, Homo sapien
tctcctctcttctaaattcagaata

SEQ ID NO: 4814300 - DNA, 25 bp, Homo sapien
attctcctctcttctaaattcagaa

SEQ ID NO: 4814301 - DNA, 25 bp, Homo sapien
ttctcctctcttctaaattcagaat

SEQ ID NO: 4814302 - DNA, 25 bp, Homo sapien
tcctctcttctaaattcagaatatc

SEQ ID NO: 4814303 - DNA, 25 bp, Homo sapien
ggtcatccatgcccagtgccggagc

SEQ ID NO: 4814304 - DNA, 25 bp, Homo sapien
gtcatccatgcccagtgccggagca

SEQ ID NO: 4814305 - DNA, 25 bp, Homo sapien
aaggtcatccatgcccagtgccgga

SEQ ID NO: 4814306 - DNA, 25 bp, Homo sapien
aggtcatccatgcccagtgccggag

SEQ ID NO: 4814307 - DNA, 25 bp, Homo sapien
acagttgcatccctccctcaatggt

SEQ ID NO: 4814308 - DNA, 25 bp, Homo sapien
cacagttgcatccctccctcaatgg

SEQ ID NO: 4814309 - DNA, 25 bp, Homo sapien
ttgcatccctccctcaatggtccag

SEQ ID NO: 4814310 - DNA, 25 bp, Homo sapien
tccctccctcaatggtccagtcatg

SEQ ID NO: 4814311 - DNA, 25 bp, Homo sapien
tactttccggcacagcaagatgctc

SEQ ID NO: 4814312 - DNA, 25 bp, Homo sapien
caatcgcagtccaacacactgaggg

SEQ ID NO: 4814313 - DNA, 25 bp, Homo sapien
taagaaggtatgctcagagtcaggc

SEQ ID NO: 4814314 - DNA, 25 bp, Homo sapien
cagaattgggaaacgtgcactcctg

SEQ ID NO: 4814315 - DNA, 25 bp, Homo sapien
tgccacctgcatcatactcaatttc

SEQ ID NO: 4814316 - DNA, 25 bp, Homo sapien
catgtacttgggtctatgtctaggc

SEQ ID NO: 4814317 - DNA, 25 bp, Homo sapien
tgttctcacgcttacccaatagatg

SEQ ID NO: 4814318 - DNA, 25 bp, Homo sapien
tgcttgacagggctagctcccttgg

SEQ ID NO: 4814319 - DNA, 25 bp, Homo sapien
agtctgattcagttaagctcttaaa

SEQ ID NO: 4814320 - DNA, 25 bp, Homo sapien
gtctgattcagttaagctcttaaaa

SEQ ID NO: 4814321 - DNA, 25 bp, Homo sapien
cagtctgattcagttaagctcttaa

SEQ ID NO: 4814322 - DNA, 25 bp, Homo sapien
tgtgtaagccacaagactctgtcca

SEQ ID NO: 4814323 - DNA, 25 bp, Homo sapien
tacagacggctggttcctctaggga

SEQ ID NO: 4814324 - DNA, 25 bp, Homo sapien
taatacggaatcatttgggccatgg

SEQ ID NO: 4814325 - DNA, 25 bp, Homo sapien
aaggagcaactgcaggctaggccag

SEQ ID NO: 4814326 - DNA, 25 bp, Homo sapien
ctggccctgtaagtaagcaccagct

SEQ ID NO: 4814327 - DNA, 25 bp, Homo sapien
ggccctgtaagtaagcaccagcttc

SEQ ID NO: 4814328 - DNA, 25 bp, Homo sapien
cactggccctgtaagtaagcaccag

SEQ ID NO: 4814329 - DNA, 25 bp, Homo sapien
ccctgtaagtaagcaccagcttctg

SEQ ID NO: 4814330 - DNA, 25 bp, Homo sapien
gcggctgatcacatcatcaacatat

SEQ ID NO: 4814331 - DNA, 25 bp, Homo sapien
agcattgctgatgttccattgggtc

SEQ ID NO: 4814332 - DNA, 25 bp, Homo sapien
tccattgggtctggataagtggatg

SEQ ID NO: 4814333 - DNA, 25 bp, Homo sapien
tttcaggaaacatcctgtcaatgcg

SEQ ID NO: 4814334 - DNA, 25 bp, Homo sapien
ctggaaaactagtctccttaggagg

SEQ ID NO: 4814335 - DNA, 25 bp, Homo sapien
cttgaaggcgtcaagatacattctg

SEQ ID NO: 4814336 - DNA, 25 bp, Homo sapien
caacaggtggtctgcataaataccc

SEQ ID NO: 4814337 - DNA, 25 bp, Homo sapien
gaattaaagaacaccaggacctcag

SEQ ID NO: 4814338 - DNA, 25 bp, Homo sapien
gccctagctgcggtaagactctcaa

SEQ ID NO: 4814339 - DNA, 25 bp, Homo sapien
tcaatgagctggcttgatggtccaa

SEQ ID NO: 4814340 - DNA, 25 bp, Homo sapien
tgctacggggtgtcaagtcgccctt

SEQ ID NO: 4814341 - DNA, 25 bp, Homo sapien
tcctgctacggggtgtcaagtcgcc

SEQ ID NO: 4814342 - DNA, 25 bp, Homo sapien
cttcttcctgctacggggtgtcaag

SEQ ID NO: 4814343 - DNA, 25 bp, Homo sapien
cggggtgtcaagtcgccctttgagt

SEQ ID NO: 4814344 - DNA, 25 bp, Homo sapien
gtttgccgcacacgtgtagaaccat

SEQ ID NO: 4814345 - DNA, 25 bp, Homo sapien
aatgctcggatgtggtgactgcttc

SEQ ID NO: 4814346 - DNA, 25 bp, Homo sapien
tcttggcaatgctcggatgtggtga

SEQ ID NO: 4814347 - DNA, 25 bp, Homo sapien
tgactgcttccagttactcagtttg

SEQ ID NO: 4814348 - DNA, 25 bp, Homo sapien
ctgtccttcatagtacacatcacag

SEQ ID NO: 4814349 - DNA, 25 bp, Homo sapien
caagtgtcatcaatcacggtatcct

SEQ ID NO: 4814350 - DNA, 25 bp, Homo sapien
ccttcatagtacacatcacagtcta

SEQ ID NO: 4814351 - DNA, 25 bp, Homo sapien
cagacaagtgtcatcaatcacggta

SEQ ID NO: 4814352 - DNA, 25 bp, Homo sapien
gctggagagctttcgtttgtccctc

SEQ ID NO: 4814353 - DNA, 25 bp, Homo sapien
gaagtgagctggagtaaatggatct

SEQ ID NO: 4814354 - DNA, 25 bp, Homo sapien
tagaacagggactatgctggagagc

SEQ ID NO: 4814355 - DNA, 25 bp, Homo sapien
aatggatctggcttctagaacaggg

SEQ ID NO: 4814356 - DNA, 25 bp, Homo sapien
tagttaggattacaggcccctacca

SEQ ID NO: 4814357 - DNA, 25 bp, Homo sapien
tcctgggtagttaggattacaggcc

SEQ ID NO: 4814358 - DNA, 25 bp, Homo sapien
taagcaagggctgccagtgatcaat

SEQ ID NO: 4814359 - DNA, 25 bp, Homo sapien
cctctacaggtttaaggtggcctca

SEQ ID NO: 4814360 - DNA, 25 bp, Homo sapien
cacactgggatgcatgtctgggaat

SEQ ID NO: 4814361 - DNA, 25 bp, Homo sapien
ggtaagcagcaccactaagcaaggg

SEQ ID NO: 4814362 - DNA, 25 bp, Homo sapien
cccaaaacagtagaaggtacatcct

SEQ ID NO: 4814363 - DNA, 25 bp, Homo sapien
gacttgaacagggttaacccaatga

SEQ ID NO: 4814364 - DNA, 25 bp, Homo sapien
taagccgggtctcgaaacatgcaga

SEQ ID NO: 4814365 - DNA, 25 bp, Homo sapien
gtacatcctttccaagtgcacctgg

SEQ ID NO: 4814366 - DNA, 25 bp, Homo sapien
ccgccctcctcaggtgattcggcct

SEQ ID NO: 4814367 - DNA, 25 bp, Homo sapien
tccgccctcctcaggtgattcggcc

SEQ ID NO: 4814368 - DNA, 25 bp, Homo sapien
ccacagcatataggtgggcagcacc

SEQ ID NO: 4814369 - DNA, 25 bp, Homo sapien
gtgggcagcaccacccagcatcagc

SEQ ID NO: 4814370 - DNA, 25 bp, Homo sapien
ggtgggcagcaccacccagcatcag

SEQ ID NO: 4814371 - DNA, 25 bp, Homo sapien
gatcctgagcaggttgacactatcc

SEQ ID NO: 4814372 - DNA, 25 bp, Homo sapien
tatcccctccaggataactctgggt

SEQ ID NO: 4814373 - DNA, 25 bp, Homo sapien
tgaacaaaaccctgcctgtgacaat

SEQ ID NO: 4814374 - DNA, 25 bp, Homo sapien
ctgtgacaattatcccctttcaggg

SEQ ID NO: 4814375 - DNA, 25 bp, Homo sapien
gtcttgtctgactggacgggctgca

SEQ ID NO: 4814376 - DNA, 25 bp, Homo sapien
tgtcttgtctgactggacgggctgc

SEQ ID NO: 4814377 - DNA, 25 bp, Homo sapien
gagttgactgcagttcaccctagtg

SEQ ID NO: 4814378 - DNA, 25 bp, Homo sapien
catcttacaggtggtgacatctcag

SEQ ID NO: 4814379 - DNA, 25 bp, Homo sapien
tagtggaacatagtaccagggcaca

SEQ ID NO: 4814380 - DNA, 25 bp, Homo sapien
tacttgcagaagaaggtaccaggct

SEQ ID NO: 4814381 - DNA, 25 bp, Homo sapien
aaggtggaagactctgatacagatg

SEQ ID NO: 4814382 - DNA, 25 bp, Homo sapien
gaaggtggaagactctgatacagat

SEQ ID NO: 4814383 - DNA, 25 bp, Homo sapien
tcctgacaattacttggccttggct

SEQ ID NO: 4814384 - DNA, 25 bp, Homo sapien
ggaagagcctaatgatgcatgactg

SEQ ID NO: 4814385 - DNA, 25 bp, Homo sapien
cctaggtgtgccgtgggttctacca

SEQ ID NO: 4814386 - DNA, 25 bp, Homo sapien
tcactatggtaccatgctgtagagg

SEQ ID NO: 4814387 - DNA, 25 bp, Homo sapien
gacagctgtggaactgtaatcttct

SEQ ID NO: 4814388 - DNA, 25 bp, Homo sapien
tgtgactgactaatgctggtgcatc

SEQ ID NO: 4814389 - DNA, 25 bp, Homo sapien
taatcttctgtgataacttcccttg

SEQ ID NO: 4814390 - DNA, 25 bp, Homo sapien
gcctcctggtattaaatgacagctg

SEQ ID NO: 4814391 - DNA, 25 bp, Homo sapien
tggctgaactgcacctcctggagga

SEQ ID NO: 4814392 - DNA, 25 bp, Homo sapien
gaggatgtggtctctcagttcaccc

SEQ ID NO: 4814393 - DNA, 25 bp, Homo sapien
ggattcccattagtgcagcagctgt

SEQ ID NO: 4814394 - DNA, 25 bp, Homo sapien
tcccaggaacgtgggttctgaccag

SEQ ID NO: 4814395 - DNA, 25 bp, Homo sapien
aagtctcttggtgtggttaccgaag

SEQ ID NO: 4814396 - DNA, 25 bp, Homo sapien
tctggaaaagtctcttggtgtggtt

SEQ ID NO: 4814397 - DNA, 25 bp, Homo sapien
catgatgtgtccatcaatgtcagag

SEQ ID NO: 4814398 - DNA, 25 bp, Homo sapien
ccaaagccggtcctgtcctatcatg

SEQ ID NO: 4814399 - DNA, 25 bp, Homo sapien
ggaatttgcagctgcggtgagctat

SEQ ID NO: 4814400 - DNA, 25 bp, Homo sapien
taccacgcctagtcaaaagccagat

SEQ ID NO: 4814401 - DNA, 25 bp, Homo sapien
caaaccagtatatgctaggccatct

SEQ ID NO: 4814402 - DNA, 25 bp, Homo sapien
catgagaaaaccttcagggtaagaa

SEQ ID NO: 4814403 - DNA, 25 bp, Homo sapien
tgcagaatcaccaaatcgacacatg

SEQ ID NO: 4814404 - DNA, 25 bp, Homo sapien
gcctcagtagacaatccatgcaggg

SEQ ID NO: 4814405 - DNA, 25 bp, Homo sapien
ggcccattagactttagagagctga

SEQ ID NO: 4814406 - DNA, 25 bp, Homo sapien
caatagcatgtcacctgtaaacagg

SEQ ID NO: 4814407 - DNA, 25 bp, Homo sapien
gcagatactcccatctgattagcgg

SEQ ID NO: 4814408 - DNA, 25 bp, Homo sapien
ttaaaaggccagatgctagtcctgc

SEQ ID NO: 4814409 - DNA, 25 bp, Homo sapien
ggacaagagttgtgggctgagcctt

SEQ ID NO: 4814410 - DNA, 25 bp, Homo sapien
tcccatctgattagcggaacgcttc

SEQ ID NO: 4814411 - DNA, 25 bp, Homo sapien
aggcagctcctgtccaactggatta

SEQ ID NO: 4814412 - DNA, 25 bp, Homo sapien
ggcagctcctgtccaactggattat

SEQ ID NO: 4814413 - DNA, 25 bp, Homo sapien
cagctcctgtccaactggattatac

SEQ ID NO: 4814414 - DNA, 25 bp, Homo sapien
gctcctgtccaactggattatacat

SEQ ID NO: 4814415 - DNA, 25 bp, Homo sapien
gcaaattcactcaaggttgtagaaa

SEQ ID NO: 4814416 - DNA, 25 bp, Homo sapien
taagcttggccgctgctagctgcat

SEQ ID NO: 4814417 - DNA, 25 bp, Homo sapien
ggtttttacaatagcagatgccttc

SEQ ID NO: 4814418 - DNA, 25 bp, Homo sapien
cactggtgggcactgccatcagaag

SEQ ID NO: 4814419 - DNA, 25 bp, Homo sapien
cgcataaaggtaagaggaagccact

SEQ ID NO: 4814420 - DNA, 25 bp, Homo sapien
tgcttttgtcagtgtaacttagatc

SEQ ID NO: 4814421 - DNA, 25 bp, Homo sapien
gtgtctccagattctatttcgcata

SEQ ID NO: 4814422 - DNA, 25 bp, Homo sapien
cagtgtaacttagatctttggtgtt

SEQ ID NO: 4814423 - DNA, 25 bp, Homo sapien
cccttaaccgccactgtgtgctccg

SEQ ID NO: 4814424 - DNA, 25 bp, Homo sapien
ccttaaccgccactgtgtgctccgt

SEQ ID NO: 4814425 - DNA, 25 bp, Homo sapien
ctgcccagcactaaacaaagctgct

SEQ ID NO: 4814426 - DNA, 25 bp, Homo sapien
agcatcagtccccgcatatgggctg

SEQ ID NO: 4814427 - DNA, 25 bp, Homo sapien
cagcatcagtccccgcatatgggct

SEQ ID NO: 4814428 - DNA, 25 bp, Homo sapien
gggctgcccagcactaaacaaagct

SEQ ID NO: 4814429 - DNA, 25 bp, Homo sapien
cactccagaggcaaggcgtacaatt

SEQ ID NO: 4814430 - DNA, 25 bp, Homo sapien
actccagaggcaaggcgtacaattt

SEQ ID NO: 4814431 - DNA, 25 bp, Homo sapien
ctccagaggcaaggcgtacaattta

SEQ ID NO: 4814432 - DNA, 25 bp, Homo sapien
tccagaggcaaggcgtacaatttat

SEQ ID NO: 4814433 - DNA, 25 bp, Homo sapien
attaatcatgtgtacattacctttg

SEQ ID NO: 4814434 - DNA, 25 bp, Homo sapien
gtgtacattacctttgccaactcta

SEQ ID NO: 4814435 - DNA, 25 bp, Homo sapien
caattaatcatgtgtacattacctt

SEQ ID NO: 4814436 - DNA, 25 bp, Homo sapien
taatcatgtgtacattacctttgcc

SEQ ID NO: 4814437 - DNA, 25 bp, Homo sapien
ccttcagggcaactggcaaagactg

SEQ ID NO: 4814438 - DNA, 25 bp, Homo sapien
gtgcaaaagatgacatgcaggtccc

SEQ ID NO: 4814439 - DNA, 25 bp, Homo sapien
atctgcttcagtgatcaaaagcagt

SEQ ID NO: 4814440 - DNA, 25 bp, Homo sapien
tcagtgatcaaaagcagtccacatt

SEQ ID NO: 4814441 - DNA, 25 bp, Homo sapien
tgcttcagtgatcaaaagcagtcca

SEQ ID NO: 4814442 - DNA, 25 bp, Homo sapien
gcttcagtgatcaaaagcagtccac

SEQ ID NO: 4814443 - DNA, 25 bp, Homo sapien
gccacggcccgtccttcatccgaca

SEQ ID NO: 4814444 - DNA, 25 bp, Homo sapien
tgtggccacggcccgtccttcatcc

SEQ ID NO: 4814445 - DNA, 25 bp, Homo sapien
cccgtccttcatccgacacctgcat

SEQ ID NO: 4814446 - DNA, 25 bp, Homo sapien
acggcccgtccttcatccgacacct

SEQ ID NO: 4814447 - DNA, 25 bp, Homo sapien
agcagagcctaaccacctcattgtg

SEQ ID NO: 4814448 - DNA, 25 bp, Homo sapien
gcagcagagcctaaccacctcattg

SEQ ID NO: 4814449 - DNA, 25 bp, Homo sapien
caggacactaaaggtcggtcttggc

SEQ ID NO: 4814450 - DNA, 25 bp, Homo sapien
caacctcagcaggacactaaaggtc

SEQ ID NO: 4814451 - DNA, 25 bp, Homo sapien
aagctgtagacacaagcttgacctc

SEQ ID NO: 4814452 - DNA, 25 bp, Homo sapien
aaaagctgtagacacaagcttgacc

SEQ ID NO: 4814453 - DNA, 25 bp, Homo sapien
aaaaagctgtagacacaagcttgac

SEQ ID NO: 4814454 - DNA, 25 bp, Homo sapien
gctgtagacacaagcttgacctctt

SEQ ID NO: 4814455 - DNA, 25 bp, Homo sapien
gaccagatgtaagacagggctcagt

SEQ ID NO: 4814456 - DNA, 25 bp, Homo sapien
catctgggttgcttatgggaggcct

SEQ ID NO: 4814457 - DNA, 25 bp, Homo sapien
taggaagtgccttccagagcacgcc

SEQ ID NO: 4814458 - DNA, 25 bp, Homo sapien
gaagctgttgcaagtgtcctagtga

SEQ ID NO: 4814459 - DNA, 25 bp, Homo sapien
gaacccagcatacccggaggaggtg

SEQ ID NO: 4814460 - DNA, 25 bp, Homo sapien
caagagaatacagagcatccgggaa

SEQ ID NO: 4814461 - DNA, 25 bp, Homo sapien
gccggtctcatgcacgggcaaaatc

SEQ ID NO: 4814462 - DNA, 25 bp, Homo sapien
aagtcagggaataaggccggtctca

SEQ ID NO: 4814463 - DNA, 25 bp, Homo sapien
gccctgagcaataatggaggcccgg

SEQ ID NO: 4814464 - DNA, 25 bp, Homo sapien
taggtggctggctaaggcatcccac

SEQ ID NO: 4814465 - DNA, 25 bp, Homo sapien
gagaggcagtaccagtcaagatgga

SEQ ID NO: 4814466 - DNA, 25 bp, Homo sapien
ggcatcccaccacgagaagcaggtt

SEQ ID NO: 4814467 - DNA, 25 bp, Homo sapien
aagaggcgaatgctgtctgcagaac

SEQ ID NO: 4814468 - DNA, 25 bp, Homo sapien
tcacaagaggcgaatgctgtctgca

SEQ ID NO: 4814469 - DNA, 25 bp, Homo sapien
gtctgcagaacctttgcaaggtaat

SEQ ID NO: 4814470 - DNA, 25 bp, Homo sapien
gcagaacctttgcaaggtaattttc

SEQ ID NO: 4814471 - DNA, 25 bp, Homo sapien
caattcagaagggtgctcaatccta

SEQ ID NO: 4814472 - DNA, 25 bp, Homo sapien
tttctctcctattatattctgaagg

SEQ ID NO: 4814473 - DNA, 25 bp, Homo sapien
gctacgaaggttagatttaggtgaa

SEQ ID NO: 4814474 - DNA, 25 bp, Homo sapien
cctaaagtcatgatgattaaattgt

SEQ ID NO: 4814475 - DNA, 25 bp, Homo sapien
tccctaaaggaaaggctctgcgttg

SEQ ID NO: 4814476 - DNA, 25 bp, Homo sapien
gcaatgtaaaacgattccaaccctg

SEQ ID NO: 4814477 - DNA, 25 bp, Homo sapien
caaccctgttagttccatgatgcaa

SEQ ID NO: 4814478 - DNA, 25 bp, Homo sapien
gaatgattacagtgtaccaggcgcc

SEQ ID NO: 4814479 - DNA, 25 bp, Homo sapien
tattcttataatctactttaaatcc

SEQ ID NO: 4814480 - DNA, 25 bp, Homo sapien
gtgtattcttataatctactttaaa

SEQ ID NO: 4814481 - DNA, 25 bp, Homo sapien
gtattcttataatctactttaaatc

SEQ ID NO: 4814482 - DNA, 25 bp, Homo sapien
tgtgtattcttataatctactttaa

SEQ ID NO: 4814483 - DNA, 25 bp, Homo sapien
tgaatagcccttgtcactgtagcct

SEQ ID NO: 4814484 - DNA, 25 bp, Homo sapien
tttccaaacacctatctgtgtagag

SEQ ID NO: 4814485 - DNA, 25 bp, Homo sapien
tagagctggaacagtcccacgtctg

SEQ ID NO: 4814486 - DNA, 25 bp, Homo sapien
gaacagtcccacgtctggcctaaaa

SEQ ID NO: 4814487 - DNA, 25 bp, Homo sapien
caggatccaggcttaacagcccact

SEQ ID NO: 4814488 - DNA, 25 bp, Homo sapien
acagcccactgttatgaagaggatg

SEQ ID NO: 4814489 - DNA, 25 bp, Homo sapien
gatggcttgcctaccagattgctca

SEQ ID NO: 4814490 - DNA, 25 bp, Homo sapien
tatagagaggagttttgtcctgcac

SEQ ID NO: 4814491 - DNA, 25 bp, Homo sapien
gtaagttgtcctggaagtgcgcaat

SEQ ID NO: 4814492 - DNA, 25 bp, Homo sapien
tgaccgaatgtaagttgtcctggaa

SEQ ID NO: 4814493 - DNA, 25 bp, Homo sapien
ttgaggtcccggttgaccgaatgta

SEQ ID NO: 4814494 - DNA, 25 bp, Homo sapien
cggttgaccgaatgtaagttgtcct

SEQ ID NO: 4814495 - DNA, 25 bp, Homo sapien
ccaggttcacactgacatttatcac

SEQ ID NO: 4814496 - DNA, 25 bp, Homo sapien
ggttcacactgacatttatcacgtc

SEQ ID NO: 4814497 - DNA, 25 bp, Homo sapien
gagcgcagcgcctggatggcactaa

SEQ ID NO: 4814498 - DNA, 25 bp, Homo sapien
cgcctggatggcactaatggcctgg

SEQ ID NO: 4814499 - DNA, 25 bp, Homo sapien
taaagtacaaatagactttgctccc

SEQ ID NO: 4814500 - DNA, 25 bp, Homo sapien
gggaaactcagaaattgatcagtgg

SEQ ID NO: 4814501 - DNA, 25 bp, Homo sapien
gaatgttggcacttacacgcctgca

SEQ ID NO: 4814502 - DNA, 25 bp, Homo sapien
gactctgattggtgcaataaagtac

SEQ ID NO: 4814503 - DNA, 25 bp, Homo sapien
gatgctgacgatggttaccatgagg

SEQ ID NO: 4814504 - DNA, 25 bp, Homo sapien
ctatgatgattttgacacgatgctg

SEQ ID NO: 4814505 - DNA, 25 bp, Homo sapien
gattttgacacgatgctgatgctga

SEQ ID NO: 4814506 - DNA, 25 bp, Homo sapien
ccacatgatcccagggacaaagcgg

SEQ ID NO: 4814507 - DNA, 25 bp, Homo sapien
gccttggccccactggtatttctca

SEQ ID NO: 4814508 - DNA, 25 bp, Homo sapien
tcttcatagactagggccttggccc

SEQ ID NO: 4814509 - DNA, 25 bp, Homo sapien
aaatcttcatagactagggccttgg

SEQ ID NO: 4814510 - DNA, 25 bp, Homo sapien
ggccttggccccactggtatttctc

SEQ ID NO: 4814511 - DNA, 25 bp, Homo sapien
caggtgaagtgggggtagaggtaag

SEQ ID NO: 4814512 - DNA, 25 bp, Homo sapien
aggccacctcaatagtgaccactgg

SEQ ID NO: 4814513 - DNA, 25 bp, Homo sapien
gatcaaggccacctcaatagtgacc

SEQ ID NO: 4814514 - DNA, 25 bp, Homo sapien
agtctgtctgcaggacattctgaga

SEQ ID NO: 4814515 - DNA, 25 bp, Homo sapien
tctgcaggacattctgagagtccac

SEQ ID NO: 4814516 - DNA, 25 bp, Homo sapien
ctgtctgcaggacattctgagagtc

SEQ ID NO: 4814517 - DNA, 25 bp, Homo sapien
gcaggacattctgagagtccacaaa

SEQ ID NO: 4814518 - DNA, 25 bp, Homo sapien
gagcggttttagacccacacgaagc

SEQ ID NO: 4814519 - DNA, 25 bp, Homo sapien
ttgaactccagaattgagctgagcg

SEQ ID NO: 4814520 - DNA, 25 bp, Homo sapien
ttagacccacacgaagccagcagct

SEQ ID NO: 4814521 - DNA, 25 bp, Homo sapien
ttgagctgagcggttttagacccac

SEQ ID NO: 4814522 - DNA, 25 bp, Homo sapien
tctaaaatcatacgttgtttggttc

SEQ ID NO: 4814523 - DNA, 25 bp, Homo sapien
tcttctaaaatcatacgttgtttgg

SEQ ID NO: 4814524 - DNA, 25 bp, Homo sapien
aatcatacgttgtttggttctcttg

SEQ ID NO: 4814525 - DNA, 25 bp, Homo sapien
taaaatcatacgttgtttggttctc

SEQ ID NO: 4814526 - DNA, 25 bp, Homo sapien
catgcagatgtaacctgtgatgtca

SEQ ID NO: 4814527 - DNA, 25 bp, Homo sapien
ccatgcagatgtaacctgtgatgtc

SEQ ID NO: 4814528 - DNA, 25 bp, Homo sapien
tgagtgaaacacagacccagttggg

SEQ ID NO: 4814529 - DNA, 25 bp, Homo sapien
agtgaaacacagacccagttgggag

SEQ ID NO: 4814530 - DNA, 25 bp, Homo sapien
gctgagtgaaacacagacccagttg

SEQ ID NO: 4814531 - DNA, 25 bp, Homo sapien
ccagggctgagtgaaacacagaccc

SEQ ID NO: 4814532 - DNA, 25 bp, Homo sapien
ccgacttaacccagcccgccacagt

SEQ ID NO: 4814533 - DNA, 25 bp, Homo sapien
cagtttccatcaccccagcatccga

SEQ ID NO: 4814534 - DNA, 25 bp, Homo sapien
gctccacgagggccgacttaaccca

SEQ ID NO: 4814535 - DNA, 25 bp, Homo sapien
ttcagtttccatcaccccagcatcc

SEQ ID NO: 4814536 - DNA, 25 bp, Homo sapien
attgctggagagcccgcagtcttca

SEQ ID NO: 4814537 - DNA, 25 bp, Homo sapien
cccgcagtcttcagggtgccctctg

SEQ ID NO: 4814538 - DNA, 25 bp, Homo sapien
gcagtcttcagggtgccctctgagt

SEQ ID NO: 4814539 - DNA, 25 bp, Homo sapien
ccgcagtcttcagggtgccctctga

SEQ ID NO: 4814540 - DNA, 25 bp, Homo sapien
ctaataggcgcctcctcgggtcatc

SEQ ID NO: 4814541 - DNA, 25 bp, Homo sapien
gcgcctcctcgggtcatcaatacag

SEQ ID NO: 4814542 - DNA, 25 bp, Homo sapien
atacagtggtagaaatgtcatcttc

SEQ ID NO: 4814543 - DNA, 25 bp, Homo sapien
ttcaacttcatactggccccagggc

SEQ ID NO: 4814544 - DNA, 25 bp, Homo sapien
tcttcccagctaacatacaagctcg

SEQ ID NO: 4814545 - DNA, 25 bp, Homo sapien
tggcatcgaaggtacaagtcaggaa

SEQ ID NO: 4814546 - DNA, 25 bp, Homo sapien
gctgaggggcgttcatggtcatcca

SEQ ID NO: 4814547 - DNA, 25 bp, Homo sapien
tactcatctgttgtgtccttgaact

SEQ ID NO: 4814548 - DNA, 25 bp, Homo sapien
tcaagtggaggagcgaatgttgtgg

SEQ ID NO: 4814549 - DNA, 25 bp, Homo sapien
gggccgtggggagtttcagcgattg

SEQ ID NO: 4814550 - DNA, 25 bp, Homo sapien
gtttcagcgattgggggcggctcac

SEQ ID NO: 4814551 - DNA, 25 bp, Homo sapien
gaggagcgaatgttgtgggtgctca

SEQ ID NO: 4814552 - DNA, 25 bp, Homo sapien
gctgtcagcaccgtctaccccctcc

SEQ ID NO: 4814553 - DNA, 25 bp, Homo sapien
ctgtcagcaccgtctaccccctccc

SEQ ID NO: 4814554 - DNA, 25 bp, Homo sapien
tgctgtcagcaccgtctaccccctc

SEQ ID NO: 4814555 - DNA, 25 bp, Homo sapien
tgtcagcaccgtctaccccctcccc

SEQ ID NO: 4814556 - DNA, 25 bp, Homo sapien
ctggccccttgtctccagttgccat

SEQ ID NO: 4814557 - DNA, 25 bp, Homo sapien
tcttcctcctctagggcaggtaaaa

SEQ ID NO: 4814558 - DNA, 25 bp, Homo sapien
ccccttgtctccagttgccatggtt

SEQ ID NO: 4814559 - DNA, 25 bp, Homo sapien
ggccccttgtctccagttgccatgg

SEQ ID NO: 4814560 - DNA, 25 bp, Homo sapien
tcccacccccagaaatgggggcagc

SEQ ID NO: 4814561 - DNA, 25 bp, Homo sapien
ccacccccagaaatgggggcagcat

SEQ ID NO: 4814562 - DNA, 25 bp, Homo sapien
cccacccccagaaatgggggcagca

SEQ ID NO: 4814563 - DNA, 25 bp, Homo sapien
ccactttatgtgtctcttgttgtag

SEQ ID NO: 4814564 - DNA, 25 bp, Homo sapien
actttatgtgtctcttgttgtaggc

SEQ ID NO: 4814565 - DNA, 25 bp, Homo sapien
cactttatgtgtctcttgttgtagg

SEQ ID NO: 4814566 - DNA, 25 bp, Homo sapien
ttccactttatgtgtctcttgttgt

SEQ ID NO: 4814567 - DNA, 25 bp, Homo sapien
agacctggttctgagtatggaacac

SEQ ID NO: 4814568 - DNA, 25 bp, Homo sapien
aggaagaaaccctcggaggtcgcag

SEQ ID NO: 4814569 - DNA, 25 bp, Homo sapien
gctgtgtctactcctaagacctggt

SEQ ID NO: 4814570 - DNA, 25 bp, Homo sapien
gcaggccccgtccatcgggtgctgt

SEQ ID NO: 4814571 - DNA, 25 bp, Homo sapien
gccctcaggtcctccgaaaggatct

SEQ ID NO: 4814572 - DNA, 25 bp, Homo sapien
gtcctccgaaaggatctcagggtgt

SEQ ID NO: 4814573 - DNA, 25 bp, Homo sapien
agggcagcccaatgccctcaggtcc

SEQ ID NO: 4814574 - DNA, 25 bp, Homo sapien
ctcaggtcctccgaaaggatctcag

SEQ ID NO: 4814575 - DNA, 25 bp, Homo sapien
gcaggggcggtcgccgtggctttgg

SEQ ID NO: 4814576 - DNA, 25 bp, Homo sapien
caggggcggtcgccgtggctttggg

SEQ ID NO: 4814577 - DNA, 25 bp, Homo sapien
agcaggggcggtcgccgtggctttg

SEQ ID NO: 4814578 - DNA, 25 bp, Homo sapien
ggcggtcgccgtggctttgggaggc

SEQ ID NO: 4814579 - DNA, 25 bp, Homo sapien
tgctgtctgttgtccagggcctgtg

SEQ ID NO: 4814580 - DNA, 25 bp, Homo sapien
gttgtccagggcctgtgcacgaaga

SEQ ID NO: 4814581 - DNA, 25 bp, Homo sapien
tgtccagggcctgtgcacgaagaga

SEQ ID NO: 4814582 - DNA, 25 bp, Homo sapien
tccagggcctgtgcacgaagagaat

SEQ ID NO: 4814583 - DNA, 25 bp, Homo sapien
cctctggtctttggctctgctccac

SEQ ID NO: 4814584 - DNA, 25 bp, Homo sapien
ggttgacccctggacctgcggtctc

SEQ ID NO: 4814585 - DNA, 25 bp, Homo sapien
tctggtctttggctctgctccactg

SEQ ID NO: 4814586 - DNA, 25 bp, Homo sapien
gcaggtggttgacccctggacctgc

SEQ ID NO: 4814587 - DNA, 25 bp, Homo sapien
caggggtcagggaaggccctccagg

SEQ ID NO: 4814588 - DNA, 25 bp, Homo sapien
gagacctggacccaggggtcaggga

SEQ ID NO: 4814589 - DNA, 25 bp, Homo sapien
ctgagacctggacccaggggtcagg

SEQ ID NO: 4814590 - DNA, 25 bp, Homo sapien
ccaggggtcagggaaggccctccag

SEQ ID NO: 4814591 - DNA, 25 bp, Homo sapien
tttgggcctctgagtgtgaagcgca

SEQ ID NO: 4814592 - DNA, 25 bp, Homo sapien
ctgagctccgcggtgacgatgacgc

SEQ ID NO: 4814593 - DNA, 25 bp, Homo sapien
gcgttttggaggcatccggagcatt

SEQ ID NO: 4814594 - DNA, 25 bp, Homo sapien
aagcgcaggcgagactgggcgcggg

SEQ ID NO: 4814595 - DNA, 25 bp, Homo sapien
cttccgagaggagagccggggagcc

SEQ ID NO: 4814596 - DNA, 25 bp, Homo sapien
ccggggagccgggcgggctgcagcc

SEQ ID NO: 4814597 - DNA, 25 bp, Homo sapien
agagccggggagccgggcgggctgc

SEQ ID NO: 4814598 - DNA, 25 bp, Homo sapien
agccggggagccgggcgggctgcag

SEQ ID NO: 4814599 - DNA, 25 bp, Homo sapien
tctgggctaccacctgggcctggtc

SEQ ID NO: 4814600 - DNA, 25 bp, Homo sapien
gagaaatgggcctctctgggctacc

SEQ ID NO: 4814601 - DNA, 25 bp, Homo sapien
ttttccttgtgtgagaaatgggcct

SEQ ID NO: 4814602 - DNA, 25 bp, Homo sapien
tctctgggctaccacctgggcctgg

SEQ ID NO: 4814603 - DNA, 25 bp, Homo sapien
ttgaggccgtccatcgtccatccat

SEQ ID NO: 4814604 - DNA, 25 bp, Homo sapien
aggccgtccatcgtccatccattgg

SEQ ID NO: 4814605 - DNA, 25 bp, Homo sapien
cttgaggccgtccatcgtccatcca

SEQ ID NO: 4814606 - DNA, 25 bp, Homo sapien
atcgtccatccattggccacggcca

SEQ ID NO: 4814607 - DNA, 25 bp, Homo sapien
gtgaacactctgaaatccccgtggg

SEQ ID NO: 4814608 - DNA, 25 bp, Homo sapien
gagccattgccgtgaacactctgaa

SEQ ID NO: 4814609 - DNA, 25 bp, Homo sapien
tgccgtgaacactctgaaatccccg

SEQ ID NO: 4814610 - DNA, 25 bp, Homo sapien
ttcagagccattgccgtgaacactc

SEQ ID NO: 4814611 - DNA, 25 bp, Homo sapien
agcaggtgctccatgccggttgctg

SEQ ID NO: 4814612 - DNA, 25 bp, Homo sapien
gctccatgccggttgctgcacacag

SEQ ID NO: 4814613 - DNA, 25 bp, Homo sapien
caggtgctccatgccggttgctgca

SEQ ID NO: 4814614 - DNA, 25 bp, Homo sapien
gtgctccatgccggttgctgcacac

SEQ ID NO: 4814615 - DNA, 25 bp, Homo sapien
cgagagggcgccagaaagaagctgg

SEQ ID NO: 4814616 - DNA, 25 bp, Homo sapien
gctggtctgcacagccgtcgtaagt

SEQ ID NO: 4814617 - DNA, 25 bp, Homo sapien
cgtcgtaagttgcttctctgtggtg

SEQ ID NO: 4814618 - DNA, 25 bp, Homo sapien
acagccgtcgtaagttgcttctctg

SEQ ID NO: 4814619 - DNA, 25 bp, Homo sapien
ataggaactgatgtaaattggtgaa

SEQ ID NO: 4814620 - DNA, 25 bp, Homo sapien
ggaataggaactgatgtaaattggt

SEQ ID NO: 4814621 - DNA, 25 bp, Homo sapien
gaggaataggaactgatgtaaattg

SEQ ID NO: 4814622 - DNA, 25 bp, Homo sapien
gaataggaactgatgtaaattggtg

SEQ ID NO: 4814623 - DNA, 25 bp, Homo sapien
agcaaaccaaatggcagacgaaatg

SEQ ID NO: 4814624 - DNA, 25 bp, Homo sapien
gacgaaatgatgttagtaccttgta

SEQ ID NO: 4814625 - DNA, 25 bp, Homo sapien
tacataacctctaatccatgtccat

SEQ ID NO: 4814626 - DNA, 25 bp, Homo sapien
aaatccccaccaagtaatttcagca

SEQ ID NO: 4814627 - DNA, 25 bp, Homo sapien
taactaatattgaaagaagacaggg

SEQ ID NO: 4814628 - DNA, 25 bp, Homo sapien
tcatttacaggaggttattcacatg

SEQ ID NO: 4814629 - DNA, 25 bp, Homo sapien
gggctgtttgccaaatcgcagctat

SEQ ID NO: 4814630 - DNA, 25 bp, Homo sapien
aaactgtgcacaataaatccaaggc

SEQ ID NO: 4814631 - DNA, 25 bp, Homo sapien
tctagatggtcccacgagctggtca

SEQ ID NO: 4814632 - DNA, 25 bp, Homo sapien
tgtgaggtacaactgcattccgctg

SEQ ID NO: 4814633 - DNA, 25 bp, Homo sapien
cagatctgctgagtggtgaaccaac

SEQ ID NO: 4814634 - DNA, 25 bp, Homo sapien
taacataaccgtgctgcccaaagtg

SEQ ID NO: 4814635 - DNA, 25 bp, Homo sapien
gatgggtctcggaaccacacttctc

SEQ ID NO: 4814636 - DNA, 25 bp, Homo sapien
tcctcttccgggtcatcacatttgc

SEQ ID NO: 4814637 - DNA, 25 bp, Homo sapien
ttgtcccacctagagttcctcctgg

SEQ ID NO: 4814638 - DNA, 25 bp, Homo sapien
cttccgggtcatcacatttgctctg

SEQ ID NO: 4814639 - DNA, 25 bp, Homo sapien
tcgggactggcagctggaggttcgc

SEQ ID NO: 4814640 - DNA, 25 bp, Homo sapien
aagcctcgggactggcagctggagg

SEQ ID NO: 4814641 - DNA, 25 bp, Homo sapien
actggcagctggaggttcgccccgc

SEQ ID NO: 4814642 - DNA, 25 bp, Homo sapien
tggcagctggaggttcgccccgcac

SEQ ID NO: 4814643 - DNA, 25 bp, Homo sapien
tcgcccgtaggaggtgttgctccag

SEQ ID NO: 4814644 - DNA, 25 bp, Homo sapien
agagcagccactacagcagcgggct

SEQ ID NO: 4814645 - DNA, 25 bp, Homo sapien
gggctcgagggttgtggatcccaaa

SEQ ID NO: 4814646 - DNA, 25 bp, Homo sapien
cagcgggctgctgtatatggctcag

SEQ ID NO: 4814647 - DNA, 25 bp, Homo sapien
taataatggcaccacgcttctgagc

SEQ ID NO: 4814648 - DNA, 25 bp, Homo sapien
cagggtcctttgaagtaacagtaag

SEQ ID NO: 4814649 - DNA, 25 bp, Homo sapien
tccactgtctagcttgctgctgggc

SEQ ID NO: 4814650 - DNA, 25 bp, Homo sapien
cagtcgtgggtcctgaagttggtca

SEQ ID NO: 4814651 - DNA, 25 bp, Homo sapien
tgaatcagctgattccaatgctggt

SEQ ID NO: 4814652 - DNA, 25 bp, Homo sapien
tcagctgattccaatgctggttttc

SEQ ID NO: 4814653 - DNA, 25 bp, Homo sapien
ctgaatcagctgattccaatgctgg

SEQ ID NO: 4814654 - DNA, 25 bp, Homo sapien
aatcagctgattccaatgctggttt

SEQ ID NO: 4814655 - DNA, 25 bp, Homo sapien
tagaattcgggtctctttagaaaga

SEQ ID NO: 4814656 - DNA, 25 bp, Homo sapien
gcagtgaggctgcacagtatttact

SEQ ID NO: 4814657 - DNA, 25 bp, Homo sapien
ctcctgtactgttcataaaggtatg

SEQ ID NO: 4814658 - DNA, 25 bp, Homo sapien
aaaaggatagctaccctctcatggg

SEQ ID NO: 4814659 - DNA, 25 bp, Homo sapien
tacatgatgaggcaattataaccct

SEQ ID NO: 4814660 - DNA, 25 bp, Homo sapien
tctgataagacaagataacaccagc

SEQ ID NO: 4814661 - DNA, 25 bp, Homo sapien
taatggattctaaagtgcacgttgc

SEQ ID NO: 4814662 - DNA, 25 bp, Homo sapien
taaaacttatgcactgggccaggtg

SEQ ID NO: 4814663 - DNA, 25 bp, Homo sapien
caagttatacagaaatttttgtgag

SEQ ID NO: 4814664 - DNA, 25 bp, Homo sapien
gattaccccagtgaatcttagccta

SEQ ID NO: 4814665 - DNA, 25 bp, Homo sapien
ccactggatatatttaagagtgatg

SEQ ID NO: 4814666 - DNA, 25 bp, Homo sapien
tcagtgagattaacttaaaggcttt

SEQ ID NO: 4814667 - DNA, 25 bp, Homo sapien
tgagagcccagtgtagatacttggg

SEQ ID NO: 4814668 - DNA, 25 bp, Homo sapien
gttcacgtgtacacaaaagctccta

SEQ ID NO: 4814669 - DNA, 25 bp, Homo sapien
tctgggctgaaaaaaggcgaatggt

SEQ ID NO: 4814670 - DNA, 25 bp, Homo sapien
cagtgtagatacttgggttctgggc

SEQ ID NO: 4814671 - DNA, 25 bp, Homo sapien
tgaagaggctgtacttggctcgtgt

SEQ ID NO: 4814672 - DNA, 25 bp, Homo sapien
tcaaatgtccgaggatgaagaggct

SEQ ID NO: 4814673 - DNA, 25 bp, Homo sapien
tgatggtgacattcaatctctgcaa

SEQ ID NO: 4814674 - DNA, 25 bp, Homo sapien
tgtacttggctcgtgtgatggtgac

SEQ ID NO: 4814675 - DNA, 25 bp, Homo sapien
cgtaacaataacacaatccttctgc

SEQ ID NO: 4814676 - DNA, 25 bp, Homo sapien
tgaaccttggatgctatttgctctg

SEQ ID NO: 4814677 - DNA, 25 bp, Homo sapien
tatttgctctgacacacgtaacaat

SEQ ID NO: 4814678 - DNA, 25 bp, Homo sapien
aatgcatccacagtgtctacttctg

SEQ ID NO: 4814679 - DNA, 25 bp, Homo sapien
aacacctgagctccgtctcagcctc

SEQ ID NO: 4814680 - DNA, 25 bp, Homo sapien
tgaacacctgagctccgtctcagcc

SEQ ID NO: 4814681 - DNA, 25 bp, Homo sapien
ttttggtttttgacagtctagcctc

SEQ ID NO: 4814682 - DNA, 25 bp, Homo sapien
gaacacctgagctccgtctcagcct

SEQ ID NO: 4814683 - DNA, 25 bp, Homo sapien
ggtggcagcgctccccaaattgatc

SEQ ID NO: 4814684 - DNA, 25 bp, Homo sapien
tctacagatgtaatccaactgcctt

SEQ ID NO: 4814685 - DNA, 25 bp, Homo sapien
gaaatggtcacgctgatactaagtc

SEQ ID NO: 4814686 - DNA, 25 bp, Homo sapien
acttagtgttaaggtggcagcgctc

SEQ ID NO: 4814687 - DNA, 25 bp, Homo sapien
tacttaactgctctggctaaaacct

SEQ ID NO: 4814688 - DNA, 25 bp, Homo sapien
gccacctatgaagagagagttttac

SEQ ID NO: 4814689 - DNA, 25 bp, Homo sapien
tttattggaagcatgtgagaatgac

SEQ ID NO: 4814690 - DNA, 25 bp, Homo sapien
tactgagctgattatgtgggtctcc

SEQ ID NO: 4814691 - DNA, 25 bp, Homo sapien
cctcgtgccgtatcaccaatttgca

SEQ ID NO: 4814692 - DNA, 25 bp, Homo sapien
tactgctgaggtaagaaggaaacaa

SEQ ID NO: 4814693 - DNA, 25 bp, Homo sapien
caggaagtaacctgtctacccagga

SEQ ID NO: 4814694 - DNA, 25 bp, Homo sapien
ggagccacacagcacaagtctatga

SEQ ID NO: 4814695 - DNA, 25 bp, Homo sapien
aatccttctgaatcatcgtcttctg

SEQ ID NO: 4814696 - DNA, 25 bp, Homo sapien
tatgccaatgtttcgaaaactaaca

SEQ ID NO: 4814697 - DNA, 25 bp, Homo sapien
tctatcgaactctttgtccaaatcc

SEQ ID NO: 4814698 - DNA, 25 bp, Homo sapien
cttctgggccttgtaatgagttatt

SEQ ID NO: 4814699 - DNA, 25 bp, Homo sapien
caatctgatgaacatcgaatggctt

SEQ ID NO: 4814700 - DNA, 25 bp, Homo sapien
aacacaaggtatggctgaaatggcc

SEQ ID NO: 4814701 - DNA, 25 bp, Homo sapien
cattatcccgtctttctgaaccatc

SEQ ID NO: 4814702 - DNA, 25 bp, Homo sapien
tgaacatcgaatggcttctgtctgt

SEQ ID NO: 4814703 - DNA, 25 bp, Homo sapien
tggtcgtagccatactcctgtgctt

SEQ ID NO: 4814704 - DNA, 25 bp, Homo sapien
gcagtctgcagaagcgagccatcat

SEQ ID NO: 4814705 - DNA, 25 bp, Homo sapien
tctggatgcatcctgtactgaacag

SEQ ID NO: 4814706 - DNA, 25 bp, Homo sapien
gaatgggcagcctgctgatcatgtt

SEQ ID NO: 4814707 - DNA, 25 bp, Homo sapien
gaggatgtccctgatttactgattg

SEQ ID NO: 4814708 - DNA, 25 bp, Homo sapien
cactgaagacgtgcaaagcctgaat

SEQ ID NO: 4814709 - DNA, 25 bp, Homo sapien
caaaagtttatctgcgttagctcac

SEQ ID NO: 4814710 - DNA, 25 bp, Homo sapien
tgtgaaagatactggcactgaagac

SEQ ID NO: 4814711 - DNA, 25 bp, Homo sapien
gaagaacaactatgaccaaatggac

SEQ ID NO: 4814712 - DNA, 25 bp, Homo sapien
ctacacacacgggttttcactgggt

SEQ ID NO: 4814713 - DNA, 25 bp, Homo sapien
tacctgcgctcaaatgtcatacaaa

SEQ ID NO: 4814714 - DNA, 25 bp, Homo sapien
tccgtgaacaaagttacctgcagca

SEQ ID NO: 4814715 - DNA, 25 bp, Homo sapien
gatgactgtcggagggagctgctta

SEQ ID NO: 4814716 - DNA, 25 bp, Homo sapien
ggatctcctactaggatgagcttat

SEQ ID NO: 4814717 - DNA, 25 bp, Homo sapien
gatgagtggagtaagagtctcaatt

SEQ ID NO: 4814718 - DNA, 25 bp, Homo sapien
cttattgcagcgatggatgagtgga

SEQ ID NO: 4814719 - DNA, 25 bp, Homo sapien
agggcaatgacatgatcgttgttca

SEQ ID NO: 4814720 - DNA, 25 bp, Homo sapien
aatgacatgatcgttgttcaccgcc

SEQ ID NO: 4814721 - DNA, 25 bp, Homo sapien
tggagggcaatgacatgatcgttgt

SEQ ID NO: 4814722 - DNA, 25 bp, Homo sapien
atgatcgttgttcaccgcctcccgg

SEQ ID NO: 4814723 - DNA, 25 bp, Homo sapien
cgttctgacaaacagtacgtaccca

SEQ ID NO: 4814724 - DNA, 25 bp, Homo sapien
catactgtggctcaaagctatccaa

SEQ ID NO: 4814725 - DNA, 25 bp, Homo sapien
ccactttcactatggagggtcatta

SEQ ID NO: 4814726 - DNA, 25 bp, Homo sapien
tcaaagttgtatggctgaccgttca

SEQ ID NO: 4814727 - DNA, 25 bp, Homo sapien
accaccacttgtgctcaacgtgcag

SEQ ID NO: 4814728 - DNA, 25 bp, Homo sapien
gatgatatgggactctaagatgatg

SEQ ID NO: 4814729 - DNA, 25 bp, Homo sapien
caacgtgcagcagatgatatgggac

SEQ ID NO: 4814730 - DNA, 25 bp, Homo sapien
ccttgcccacggaaagcagactcaa

SEQ ID NO: 4814731 - DNA, 25 bp, Homo sapien
taattttagaagcaagttcctgcct

SEQ ID NO: 4814732 - DNA, 25 bp, Homo sapien
ttttagaagcaagttcctgcctttc

SEQ ID NO: 4814733 - DNA, 25 bp, Homo sapien
tggaaatgttttcatctaattcttg

SEQ ID NO: 4814734 - DNA, 25 bp, Homo sapien
aaatgttttcatctaattcttgcct

SEQ ID NO: 4814735 - DNA, 25 bp, Homo sapien
tcgctgccgggaaagctcatccagc

SEQ ID NO: 4814736 - DNA, 25 bp, Homo sapien
tcggcatagagctcgctgccgggaa

SEQ ID NO: 4814737 - DNA, 25 bp, Homo sapien
cgggaaagctcatccagctgataat

SEQ ID NO: 4814738 - DNA, 25 bp, Homo sapien
tgtatttcccgtccacctcggcata

SEQ ID NO: 4814739 - DNA, 25 bp, Homo sapien
ctagaaattcctttcttttatgcat

SEQ ID NO: 4814740 - DNA, 25 bp, Homo sapien
tcgtactaaatttatatctccacag

SEQ ID NO: 4814741 - DNA, 25 bp, Homo sapien
ctttagaacctcactattaatagac

SEQ ID NO: 4814742 - DNA, 25 bp, Homo sapien
tctggacccagtcgtactaaattta

SEQ ID NO: 4814743 - DNA, 25 bp, Homo sapien
aaactgaactttagaacctcactat

SEQ ID NO: 4814744 - DNA, 25 bp, Homo sapien
aacaatcctataaggcaagtagtta

SEQ ID NO: 4814745 - DNA, 25 bp, Homo sapien
cagatattgttcctaacaatcctat

SEQ ID NO: 4814746 - DNA, 25 bp, Homo sapien
ggcaagtagttatcatttctaccta

SEQ ID NO: 4814747 - DNA, 25 bp, Homo sapien
attatttcagatattgttcctaaca

SEQ ID NO: 4814748 - DNA, 25 bp, Homo sapien
taaaataaacgaagcagttctctca

SEQ ID NO: 4814749 - DNA, 25 bp, Homo sapien
tatgttcagtaggacattccatagc

SEQ ID NO: 4814750 - DNA, 25 bp, Homo sapien
ctatctataaacactgtgctcaagg

SEQ ID NO: 4814751 - DNA, 25 bp, Homo sapien
tcccatgaccagaatgtgacctgct

SEQ ID NO: 4814752 - DNA, 25 bp, Homo sapien
tggcattggagttttcgtctgaatg

SEQ ID NO: 4814753 - DNA, 25 bp, Homo sapien
cacacacgaggacacggttttgttt

SEQ ID NO: 4814754 - DNA, 25 bp, Homo sapien
cacgaggacacggttttgtttgatt

SEQ ID NO: 4814755 - DNA, 25 bp, Homo sapien
ggagttttcgtctgaatgccccttc

SEQ ID NO: 4814756 - DNA, 25 bp, Homo sapien
gagtgtttcaccatagcatatgcag

SEQ ID NO: 4814757 - DNA, 25 bp, Homo sapien
cagtagacgatagaggaggccaaca

SEQ ID NO: 4814758 - DNA, 25 bp, Homo sapien
gcatatgcagtttctattgctttct

SEQ ID NO: 4814759 - DNA, 25 bp, Homo sapien
tcattgaaatctcttaagtacgcaa

SEQ ID NO: 4814760 - DNA, 25 bp, Homo sapien
tcttttgtacagaagtccatagggt

SEQ ID NO: 4814761 - DNA, 25 bp, Homo sapien
tggttccgactacccaacagagaca

SEQ ID NO: 4814762 - DNA, 25 bp, Homo sapien
gattcagaacagctctagccagttg

SEQ ID NO: 4814763 - DNA, 25 bp, Homo sapien
aaattggccggaaagttctcttgag

SEQ ID NO: 4814764 - DNA, 25 bp, Homo sapien
gactgacgtgcggcgaaatttatga

SEQ ID NO: 4814765 - DNA, 25 bp, Homo sapien
ctgacgtgcggcgaaatttatgaac

SEQ ID NO: 4814766 - DNA, 25 bp, Homo sapien
gacgtgcggcgaaatttatgaacat

SEQ ID NO: 4814767 - DNA, 25 bp, Homo sapien
tgacgtgcggcgaaatttatgaaca

SEQ ID NO: 4814768 - DNA, 25 bp, Homo sapien
tcgtggagatcttgtatgtcatttc

SEQ ID NO: 4814769 - DNA, 25 bp, Homo sapien
tattcgtggagatcttgtatgtcat

SEQ ID NO: 4814770 - DNA, 25 bp, Homo sapien
tctctcaggagctaaaaacaccaaa

SEQ ID NO: 4814771 - DNA, 25 bp, Homo sapien
ttattctctcaggagctaaaaacac

SEQ ID NO: 4814772 - DNA, 25 bp, Homo sapien
tacctgaattggatcaatcctctag

SEQ ID NO: 4814773 - DNA, 25 bp, Homo sapien
tccagaccatgattaactctataaa

SEQ ID NO: 4814774 - DNA, 25 bp, Homo sapien
ccattgggtggactactttggatct

SEQ ID NO: 4814775 - DNA, 25 bp, Homo sapien
ccaggtatcaatatacaggaaacac

SEQ ID NO: 4814776 - DNA, 25 bp, Homo sapien
ttatataatcggcaggaaattttcg

SEQ ID NO: 4814777 - DNA, 25 bp, Homo sapien
tatttggagagttgagccattcttg

SEQ ID NO: 4814778 - DNA, 25 bp, Homo sapien
gatagaaattctctctatttggaga

SEQ ID NO: 4814779 - DNA, 25 bp, Homo sapien
ggaaattttcgtacttgcaactgat

SEQ ID NO: 4814780 - DNA, 25 bp, Homo sapien
ctcccagtctgtcaaagctccaaac

SEQ ID NO: 4814781 - DNA, 25 bp, Homo sapien
aactcagaagtacccttaaggatct

SEQ ID NO: 4814782 - DNA, 25 bp, Homo sapien
caacatgtcatcctgccagtttata

SEQ ID NO: 4814783 - DNA, 25 bp, Homo sapien
aaaatgctctatacccatctcccag

SEQ ID NO: 4814784 - DNA, 25 bp, Homo sapien
aagtgatgatccgcctactgtggcc

SEQ ID NO: 4814785 - DNA, 25 bp, Homo sapien
tcaagtgatgatccgcctactgtgg

SEQ ID NO: 4814786 - DNA, 25 bp, Homo sapien
gtgatgatccgcctactgtggcctt

SEQ ID NO: 4814787 - DNA, 25 bp, Homo sapien
cctcaagtgatgatccgcctactgt

SEQ ID NO: 4814788 - DNA, 25 bp, Homo sapien
catagaaccctcatagacaggcgtg

SEQ ID NO: 4814789 - DNA, 25 bp, Homo sapien
aatgacatcctaagacatagaaccc

SEQ ID NO: 4814790 - DNA, 25 bp, Homo sapien
tatatgttcttctgacgaggctacg

SEQ ID NO: 4814791 - DNA, 25 bp, Homo sapien
gaataagactgctagatcataaagg

SEQ ID NO: 4814792 - DNA, 25 bp, Homo sapien
tatttctggcaggtaacattgttcc

SEQ ID NO: 4814793 - DNA, 25 bp, Homo sapien
taacttgtgggagatctgagtggac

SEQ ID NO: 4814794 - DNA, 25 bp, Homo sapien
tgagtggacattctagcttgcctac

SEQ ID NO: 4814795 - DNA, 25 bp, Homo sapien
tacacgttcttcagttgtatccaca

SEQ ID NO: 4814796 - DNA, 25 bp, Homo sapien
ttctcacttccttggttacaataat

SEQ ID NO: 4814797 - DNA, 25 bp, Homo sapien
tctcacttccttggttacaataatt

SEQ ID NO: 4814798 - DNA, 25 bp, Homo sapien
aattctcacttccttggttacaata

SEQ ID NO: 4814799 - DNA, 25 bp, Homo sapien
ctcacttccttggttacaataattc

SEQ ID NO: 4814800 - DNA, 25 bp, Homo sapien
aagagcatttgccacaactgactgc

SEQ ID NO: 4814801 - DNA, 25 bp, Homo sapien
tccctgtccatgcaacctacaatga

SEQ ID NO: 4814802 - DNA, 25 bp, Homo sapien
ctacaatgacctctacacaggagag

SEQ ID NO: 4814803 - DNA, 25 bp, Homo sapien
tgtctaagggtactccttgcctgcc

SEQ ID NO: 4814804 - DNA, 25 bp, Homo sapien
gatggactgacaaagacttgcaggg

SEQ ID NO: 4814805 - DNA, 25 bp, Homo sapien
gagatggactgacaaagacttgcag

SEQ ID NO: 4814806 - DNA, 25 bp, Homo sapien
cttgagatggactgacaaagacttg

SEQ ID NO: 4814807 - DNA, 25 bp, Homo sapien
tgagatggactgacaaagacttgca

SEQ ID NO: 4814808 - DNA, 25 bp, Homo sapien
ctctttaacgaaggtgtcagagaca

SEQ ID NO: 4814809 - DNA, 25 bp, Homo sapien
taagacctctttaacgaaggtgtca

SEQ ID NO: 4814810 - DNA, 25 bp, Homo sapien
acctctttaacgaaggtgtcagaga

SEQ ID NO: 4814811 - DNA, 25 bp, Homo sapien
agacctctttaacgaaggtgtcaga

SEQ ID NO: 4814812 - DNA, 25 bp, Homo sapien
gaggaagatggaaaatatttgcttt

SEQ ID NO: 4814813 - DNA, 25 bp, Homo sapien
aggaagatggaaaatatttgctttc

SEQ ID NO: 4814814 - DNA, 25 bp, Homo sapien
ttgctttcaccaaatggaactttgc

SEQ ID NO: 4814815 - DNA, 25 bp, Homo sapien
gaagaacattgcacgaattcttcat

SEQ ID NO: 4814816 - DNA, 25 bp, Homo sapien
caaaatcgactgtatcccctttgac

SEQ ID NO: 4814817 - DNA, 25 bp, Homo sapien
ggaattattcggagactgaggatga

SEQ ID NO: 4814818 - DNA, 25 bp, Homo sapien
gggaactggctgtggtactttcaaa

SEQ ID NO: 4814819 - DNA, 25 bp, Homo sapien
tctcaaaggtttagatgcaggagga

SEQ ID NO: 4814820 - DNA, 25 bp, Homo sapien
gcaattcgtgaagtactctttgagc

SEQ ID NO: 4814821 - DNA, 25 bp, Homo sapien
gatttagaaagaccagcaattcgtg

SEQ ID NO: 4814822 - DNA, 25 bp, Homo sapien
ggcaagccaggtttacgaaatacat

SEQ ID NO: 4814823 - DNA, 25 bp, Homo sapien
aagattccaactgaggccgacttac

SEQ ID NO: 4814824 - DNA, 25 bp, Homo sapien
gtgccactcaaagattccaactgag

SEQ ID NO: 4814825 - DNA, 25 bp, Homo sapien
actttgtgccactcaaagattccaa

SEQ ID NO: 4814826 - DNA, 25 bp, Homo sapien
actcaaagattccaactgaggccga

SEQ ID NO: 4814827 - DNA, 25 bp, Homo sapien
tgttggatcacctccacccagaggg

SEQ ID NO: 4814828 - DNA, 25 bp, Homo sapien
aattctgtgctgtatgtgaccctgc

SEQ ID NO: 4814829 - DNA, 25 bp, Homo sapien
aagctgccatctctatatgacgtgc

SEQ ID NO: 4814830 - DNA, 25 bp, Homo sapien
ggttcaaagggcaagcatcatcagt

SEQ ID NO: 4814831 - DNA, 25 bp, Homo sapien
cactgacgaaatttctttggcggca

SEQ ID NO: 4814832 - DNA, 25 bp, Homo sapien
tttggcggcactatagcaggagttg

SEQ ID NO: 4814833 - DNA, 25 bp, Homo sapien
gaccgctgggacaactcatatgcct

SEQ ID NO: 4814834 - DNA, 25 bp, Homo sapien
gctacataatccaaagaccgctggg

SEQ ID NO: 4814835 - DNA, 25 bp, Homo sapien
tcttttgtgaaaccgtagtggctct

SEQ ID NO: 4814836 - DNA, 25 bp, Homo sapien
gatgggaacgtaataacactggctt

SEQ ID NO: 4814837 - DNA, 25 bp, Homo sapien
tatcatccagaacaccactagggtc

SEQ ID NO: 4814838 - DNA, 25 bp, Homo sapien
taagcatgacccagctaagagatgg

SEQ ID NO: 4814839 - DNA, 25 bp, Homo sapien
agatgcaggagagattttacatgca

SEQ ID NO: 4814840 - DNA, 25 bp, Homo sapien
gatgcaggagagattttacatgcag

SEQ ID NO: 4814841 - DNA, 25 bp, Homo sapien
agcaactttgtagctcatgggtttc

SEQ ID NO: 4814842 - DNA, 25 bp, Homo sapien
aatcgcttgcaaagagactgctgcc

SEQ ID NO: 4814843 - DNA, 25 bp, Homo sapien
gcttggcacatttgacgacggcttc

SEQ ID NO: 4814844 - DNA, 25 bp, Homo sapien
taagttgagcttatcccagaatcgc

SEQ ID NO: 4814845 - DNA, 25 bp, Homo sapien
cgtgtaaacgcagtggtaggaagct

SEQ ID NO: 4814846 - DNA, 25 bp, Homo sapien
caataatctgggcaaatggctgttc

SEQ ID NO: 4814847 - DNA, 25 bp, Homo sapien
cacagcatctgtttggttgaggact

SEQ ID NO: 4814848 - DNA, 25 bp, Homo sapien
ccaaatccttaagatccatgaggga

SEQ ID NO: 4814849 - DNA, 25 bp, Homo sapien
gctgttatgaacacgcatgtcttga

SEQ ID NO: 4814850 - DNA, 25 bp, Homo sapien
gacaggttcaacacccaagtcgtta

SEQ ID NO: 4814851 - DNA, 25 bp, Homo sapien
gataaataagcaccacttatgacag

SEQ ID NO: 4814852 - DNA, 25 bp, Homo sapien
ccacttatgacaggttcaacaccca

SEQ ID NO: 4814853 - DNA, 25 bp, Homo sapien
catcattattatgctatacaatggt

SEQ ID NO: 4814854 - DNA, 25 bp, Homo sapien
tgagttttcataaaaagacaaattg

SEQ ID NO: 4814855 - DNA, 25 bp, Homo sapien
tataaattgaattttgagttttcat

SEQ ID NO: 4814856 - DNA, 25 bp, Homo sapien
tgaattttgagttttcataaaaaga

SEQ ID NO: 4814857 - DNA, 25 bp, Homo sapien
taaattgaattttgagttttcataa

SEQ ID NO: 4814858 - DNA, 25 bp, Homo sapien
cacaatacatctgctgttcaatgag

SEQ ID NO: 4814859 - DNA, 25 bp, Homo sapien
aaaatagtctacacaatataaaggc

SEQ ID NO: 4814860 - DNA, 25 bp, Homo sapien
gtatgcatactgtagttagagtcca

SEQ ID NO: 4814861 - DNA, 25 bp, Homo sapien
caatgagaagggcttttacatagca

SEQ ID NO: 4814862 - DNA, 25 bp, Homo sapien
tctggctgcaagtcaccatatcatc

SEQ ID NO: 4814863 - DNA, 25 bp, Homo sapien
ggattataattgtatacgatctggc

SEQ ID NO: 4814864 - DNA, 25 bp, Homo sapien
catccaaataggactccggttctaa

SEQ ID NO: 4814865 - DNA, 25 bp, Homo sapien
catatcatccaaataggactccggt

SEQ ID NO: 4814866 - DNA, 25 bp, Homo sapien
cctcttgttaagtaatctagctgga

SEQ ID NO: 4814867 - DNA, 25 bp, Homo sapien
tcttgttaagtaatctagctggaac

SEQ ID NO: 4814868 - DNA, 25 bp, Homo sapien
gttaagtaatctagctggaacacac

SEQ ID NO: 4814869 - DNA, 25 bp, Homo sapien
gaaacacctcttgttaagtaatcta

SEQ ID NO: 4814870 - DNA, 25 bp, Homo sapien
aaatcctgacattagctgaactaac

SEQ ID NO: 4814871 - DNA, 25 bp, Homo sapien
taaatcctgacattagctgaactaa

SEQ ID NO: 4814872 - DNA, 25 bp, Homo sapien
taggatccataagttgaccccagac

SEQ ID NO: 4814873 - DNA, 25 bp, Homo sapien
tacagagctgttccgtatatgtcgg

SEQ ID NO: 4814874 - DNA, 25 bp, Homo sapien
gatctctctattgtagcttgcgttg

SEQ ID NO: 4814875 - DNA, 25 bp, Homo sapien
gtttgaaatgccacaataggatcca

SEQ ID NO: 4814876 - DNA, 25 bp, Homo sapien
ggccagaaaggatccacactatcat

SEQ ID NO: 4814877 - DNA, 25 bp, Homo sapien
acgctggccagaaaggatccacact

SEQ ID NO: 4814878 - DNA, 25 bp, Homo sapien
cttagatccaaggcgatccagaatc

SEQ ID NO: 4814879 - DNA, 25 bp, Homo sapien
ccataaaacagtgtaacgctggcca

SEQ ID NO: 4814880 - DNA, 25 bp, Homo sapien
ttctttatctggtgagtagcaaccc

SEQ ID NO: 4814881 - DNA, 25 bp, Homo sapien
caatggcacaatcgttgaattacta

SEQ ID NO: 4814882 - DNA, 25 bp, Homo sapien
tagcaacccaactaaaagccaagga

SEQ ID NO: 4814883 - DNA, 25 bp, Homo sapien
ctgaaatacaatggcacaatcgttg

SEQ ID NO: 4814884 - DNA, 25 bp, Homo sapien
attcaacaacattcagcaagtaaag

SEQ ID NO: 4814885 - DNA, 25 bp, Homo sapien
tcactatattcaacaacattcagca

SEQ ID NO: 4814886 - DNA, 25 bp, Homo sapien
aacattcagcaagtaaagtttatta

SEQ ID NO: 4814887 - DNA, 25 bp, Homo sapien
catcatcatcactatattcaacaac

SEQ ID NO: 4814888 - DNA, 25 bp, Homo sapien
atcattttgtttgtctgagcccaac

SEQ ID NO: 4814889 - DNA, 25 bp, Homo sapien
tgagcccaacaacagggaatccatg

SEQ ID NO: 4814890 - DNA, 25 bp, Homo sapien
ttcctcaagaatggtcagcaacatg

SEQ ID NO: 4814891 - DNA, 25 bp, Homo sapien
ccatagtgtgaagtatcgattgcat

SEQ ID NO: 4814892 - DNA, 25 bp, Homo sapien
taaatgtctggactctctaaaagcc

SEQ ID NO: 4814893 - DNA, 25 bp, Homo sapien
tagtatcatacatgtgtgagggcag

SEQ ID NO: 4814894 - DNA, 25 bp, Homo sapien
ttgcagtcaagatagcccaacgccg

SEQ ID NO: 4814895 - DNA, 25 bp, Homo sapien
cagtttacccttctctaggacagaa

SEQ ID NO: 4814896 - DNA, 25 bp, Homo sapien
cttcacctggatcagatcttttagt

SEQ ID NO: 4814897 - DNA, 25 bp, Homo sapien
cagatttggatgcaggttttattca

SEQ ID NO: 4814898 - DNA, 25 bp, Homo sapien
gatcagatcttttagttgagaacag

SEQ ID NO: 4814899 - DNA, 25 bp, Homo sapien
tcttttagttgagaacagatttgga

SEQ ID NO: 4814900 - DNA, 25 bp, Homo sapien
tatcaaacacctgaaaggagcaatt

SEQ ID NO: 4814901 - DNA, 25 bp, Homo sapien
caaagtgcttcaacacataactcgt

SEQ ID NO: 4814902 - DNA, 25 bp, Homo sapien
tggcttgttccatccgacaaagtgc

SEQ ID NO: 4814903 - DNA, 25 bp, Homo sapien
gactaaaaacaaatagatccctgga

SEQ ID NO: 4814904 - DNA, 25 bp, Homo sapien
tatgagacgtaaggtttctaattcc

SEQ ID NO: 4814905 - DNA, 25 bp, Homo sapien
cagtgatgtcaaacagtggcatctc

SEQ ID NO: 4814906 - DNA, 25 bp, Homo sapien
ttcaaagtcttgcccagtgatgtca

SEQ ID NO: 4814907 - DNA, 25 bp, Homo sapien
agaggaactcgaagcttattttcaa

SEQ ID NO: 4814908 - DNA, 25 bp, Homo sapien
cactccaagcagtagcagaggtctt

SEQ ID NO: 4814909 - DNA, 25 bp, Homo sapien
ttaggaagtcaatggtggaagcacc

SEQ ID NO: 4814910 - DNA, 25 bp, Homo sapien
cagaggtcttcgtcggctgtttgaa

SEQ ID NO: 4814911 - DNA, 25 bp, Homo sapien
tgtttgaaattcaccggacggagtg

SEQ ID NO: 4814912 - DNA, 25 bp, Homo sapien
gcgtacaccaacaacatgtgctcat

SEQ ID NO: 4814913 - DNA, 25 bp, Homo sapien
cttgaagctccaaatgttgtgtact

SEQ ID NO: 4814914 - DNA, 25 bp, Homo sapien
gaagctccaaatgttgtgtacttta

SEQ ID NO: 4814915 - DNA, 25 bp, Homo sapien
gctccaaatgttgtgtactttaaaa

SEQ ID NO: 4814916 - DNA, 25 bp, Homo sapien
ttacttgaagctccaaatgttgtgt

SEQ ID NO: 4814917 - DNA, 25 bp, Homo sapien
tggacaaatggcctacagaaaagtg

SEQ ID NO: 4814918 - DNA, 25 bp, Homo sapien
gcattcatatatgcccagactctgg

SEQ ID NO: 4814919 - DNA, 25 bp, Homo sapien
gaaaagtgatcgtctcagctgggct

SEQ ID NO: 4814920 - DNA, 25 bp, Homo sapien
tagttgtgaacaaacacggatttgc

SEQ ID NO: 4814921 - DNA, 25 bp, Homo sapien
gctcagccccaaggaaactacgcag

SEQ ID NO: 4814922 - DNA, 25 bp, Homo sapien
gccccaaggaaactacgcagtatcc

SEQ ID NO: 4814923 - DNA, 25 bp, Homo sapien
cccaaggaaactacgcagtatccac

SEQ ID NO: 4814924 - DNA, 25 bp, Homo sapien
tcagccccaaggaaactacgcagta

SEQ ID NO: 4814925 - DNA, 25 bp, Homo sapien
acgagaccgcagtgtagacaacgga

SEQ ID NO: 4814926 - DNA, 25 bp, Homo sapien
agcggccgggtccagcgcgcaggaa

SEQ ID NO: 4814927 - DNA, 25 bp, Homo sapien
gaccgcagtgtagacaacggaagga

SEQ ID NO: 4814928 - DNA, 25 bp, Homo sapien
cgcagtgtagacaacggaaggacag

SEQ ID NO: 4814929 - DNA, 25 bp, Homo sapien
ctgcaagcacaagccgcgcctgcgc

SEQ ID NO: 4814930 - DNA, 25 bp, Homo sapien
tggttccccgaagcggccctgcaag

SEQ ID NO: 4814931 - DNA, 25 bp, Homo sapien
ggacctaggcgccgcgatggttccc

SEQ ID NO: 4814932 - DNA, 25 bp, Homo sapien
taggcgccgcgatggttccccgaag

SEQ ID NO: 4814933 - DNA, 25 bp, Homo sapien
agccgcagctaccaaccagctgttg

SEQ ID NO: 4814934 - DNA, 25 bp, Homo sapien
ccgctctaggccaccagcggaagtg

SEQ ID NO: 4814935 - DNA, 25 bp, Homo sapien
caaccagctgttgccgcgaggtagg

SEQ ID NO: 4814936 - DNA, 25 bp, Homo sapien
ctctaggccaccagcggaagtgcgg

SEQ ID NO: 4814937 - DNA, 25 bp, Homo sapien
ggggcatgggaagagcggccgcggt

SEQ ID NO: 4814938 - DNA, 25 bp, Homo sapien
ggcatgggaagagcggccgcggtgc

SEQ ID NO: 4814939 - DNA, 25 bp, Homo sapien
ggcggggcatgggaagagcggccgc

SEQ ID NO: 4814940 - DNA, 25 bp, Homo sapien
gggggcggggcatgggaagagcggc

SEQ ID NO: 4814941 - DNA, 25 bp, Homo sapien
cacattcaaatacgttttaatagga

SEQ ID NO: 4814942 - DNA, 25 bp, Homo sapien
ttttaataggaatggcaatatattt

SEQ ID NO: 4814943 - DNA, 25 bp, Homo sapien
tttaataggaatggcaatatatttt

SEQ ID NO: 4814944 - DNA, 25 bp, Homo sapien
attcaaatacgttttaataggaatg

SEQ ID NO: 4814945 - DNA, 25 bp, Homo sapien
acatcaatactgaaaacagatttac

SEQ ID NO: 4814946 - DNA, 25 bp, Homo sapien
ccttcactatcgtcttcataataaa

SEQ ID NO: 4814947 - DNA, 25 bp, Homo sapien
tgcatggcgcctggccttcgctttc

SEQ ID NO: 4814948 - DNA, 25 bp, Homo sapien
agatgtctcgaaatgggaaaacttg

SEQ ID NO: 4814949 - DNA, 25 bp, Homo sapien
tatgtcctctccttcactatcgtct

SEQ ID NO: 4814950 - DNA, 25 bp, Homo sapien
tagagtcgtctcataaaggtagtcg

SEQ ID NO: 4814951 - DNA, 25 bp, Homo sapien
cgtctcataaaggtagtcgatgatc

SEQ ID NO: 4814952 - DNA, 25 bp, Homo sapien
aaggtagagtcgtctcataaaggta

SEQ ID NO: 4814953 - DNA, 25 bp, Homo sapien
gagtcgtctcataaaggtagtcgat

SEQ ID NO: 4814954 - DNA, 25 bp, Homo sapien
aatttagtttgaacgtaagatggag

SEQ ID NO: 4814955 - DNA, 25 bp, Homo sapien
tagtttgaacgtaagatggaggaac

SEQ ID NO: 4814956 - DNA, 25 bp, Homo sapien
gtttgaacgtaagatggaggaacat

SEQ ID NO: 4814957 - DNA, 25 bp, Homo sapien
ttgaacgtaagatggaggaacatca

SEQ ID NO: 4814958 - DNA, 25 bp, Homo sapien
gcaaagtataatgccggctaacggg

SEQ ID NO: 4814959 - DNA, 25 bp, Homo sapien
tcctcacgacaactcaaggagggag

SEQ ID NO: 4814960 - DNA, 25 bp, Homo sapien
taacttgtatcactagtcgagaagg

SEQ ID NO: 4814961 - DNA, 25 bp, Homo sapien
taacgggctgatgcttaccttgtgc

SEQ ID NO: 4814962 - DNA, 25 bp, Homo sapien
gacagcctattaaaccataatgcag

SEQ ID NO: 4814963 - DNA, 25 bp, Homo sapien
ggaacaactgcccacagactttaag

SEQ ID NO: 4814964 - DNA, 25 bp, Homo sapien
gagtccctggactctatgccaaatc

SEQ ID NO: 4814965 - DNA, 25 bp, Homo sapien
caaaggctcagacaaatagggaaca

SEQ ID NO: 4814966 - DNA, 25 bp, Homo sapien
tcaccacgtgcagcttaataatcag

SEQ ID NO: 4814967 - DNA, 25 bp, Homo sapien
cctcattaggtggagatgctatcct

SEQ ID NO: 4814968 - DNA, 25 bp, Homo sapien
caggaagcaacaagaactgatctgg

SEQ ID NO: 4814969 - DNA, 25 bp, Homo sapien
gatctggacgttttaaaaccaagca

SEQ ID NO: 4814970 - DNA, 25 bp, Homo sapien
gtggtgggccctccaatcgcaggaa

SEQ ID NO: 4814971 - DNA, 25 bp, Homo sapien
caagcagtaagttgagatatcgaga

SEQ ID NO: 4814972 - DNA, 25 bp, Homo sapien
gccccatgatgctcggcaacacgta

SEQ ID NO: 4814973 - DNA, 25 bp, Homo sapien
gcaacacgtagagggcctgtgctct

SEQ ID NO: 4814974 - DNA, 25 bp, Homo sapien
ttgtagagacggagttgaaccatgt

SEQ ID NO: 4814975 - DNA, 25 bp, Homo sapien
gtgatctgcccaccttggcctccca

SEQ ID NO: 4814976 - DNA, 25 bp, Homo sapien
tgatctgcccaccttggcctcccaa

SEQ ID NO: 4814977 - DNA, 25 bp, Homo sapien
tttttgtagagacggagttgaacca

SEQ ID NO: 4814978 - DNA, 25 bp, Homo sapien
tgtatggtaatacttccttacacga

SEQ ID NO: 4814979 - DNA, 25 bp, Homo sapien
ggtcaactcgactgtatggtaatac

SEQ ID NO: 4814980 - DNA, 25 bp, Homo sapien
tgccaaggtcaactcgactgtatgg

SEQ ID NO: 4814981 - DNA, 25 bp, Homo sapien
caatgcctgccaaggtcaactcgac

SEQ ID NO: 4814982 - DNA, 25 bp, Homo sapien
ctatggcactagcaagatcttccca

SEQ ID NO: 4814983 - DNA, 25 bp, Homo sapien
cctatggcactagcaagatcttccc

SEQ ID NO: 4814984 - DNA, 25 bp, Homo sapien
cacgccgagccaagttaagacctta

SEQ ID NO: 4814985 - DNA, 25 bp, Homo sapien
ggctccagattgcatgactaatagg

SEQ ID NO: 4814986 - DNA, 25 bp, Homo sapien
cccaggcctgcttgacttgagatgc

SEQ ID NO: 4814987 - DNA, 25 bp, Homo sapien
caagagacacagtcatgggctccag

SEQ ID NO: 4814988 - DNA, 25 bp, Homo sapien
ctcgtcacccttcaacactttaggg

SEQ ID NO: 4814989 - DNA, 25 bp, Homo sapien
cactagtctcacacgcatcacgaaa

SEQ ID NO: 4814990 - DNA, 25 bp, Homo sapien
ttcctcagtcgacatgggccaggtc

SEQ ID NO: 4814991 - DNA, 25 bp, Homo sapien
ggaatgaaggcggacagcaaggcca

SEQ ID NO: 4814992 - DNA, 25 bp, Homo sapien
caaagacaagcaagggtgacaccaa

SEQ ID NO: 4814993 - DNA, 25 bp, Homo sapien
ccaaagacaagcaagggtgacacca

SEQ ID NO: 4814994 - DNA, 25 bp, Homo sapien
aaccaaagacaagcaagggtgacac

SEQ ID NO: 4814995 - DNA, 25 bp, Homo sapien
aagacaagcaagggtgacaccaaca

SEQ ID NO: 4814996 - DNA, 25 bp, Homo sapien
tggcccgcagggcattcatgccata

SEQ ID NO: 4814997 - DNA, 25 bp, Homo sapien
catcctcttggttagaatttctgtc

SEQ ID NO: 4814998 - DNA, 25 bp, Homo sapien
tagatacgccgaccattagtcatcc

SEQ ID NO: 4814999 - DNA, 25 bp, Homo sapien
tcaataaggctgaccttggcccgca

SEQ ID NO: 4815000 - DNA, 25 bp, Homo sapien
tcgacagccttgattagtttccggg

SEQ ID NO: 4815001 - DNA, 25 bp, Homo sapien
tccgggtttcagacttactccaagc

SEQ ID NO: 4815002 - DNA, 25 bp, Homo sapien
gaacaattgataggcaactttcagg

SEQ ID NO: 4815003 - DNA, 25 bp, Homo sapien
tgtagagtttttcccgaacaattga

SEQ ID NO: 4815004 - DNA, 25 bp, Homo sapien
tgtgtggccggagtgtgtgagcccc

SEQ ID NO: 4815005 - DNA, 25 bp, Homo sapien
cagaaaacccggtcaggactgtctt

SEQ ID NO: 4815006 - DNA, 25 bp, Homo sapien
tgtgagcccctgtgctaaacagaaa

SEQ ID NO: 4815007 - DNA, 25 bp, Homo sapien
aactggctgcaaggcactagctgtg

SEQ ID NO: 4815008 - DNA, 25 bp, Homo sapien
ggagaggctacttcgggccaccatc

SEQ ID NO: 4815009 - DNA, 25 bp, Homo sapien
taacttctcagtatctccttcgcta

SEQ ID NO: 4815010 - DNA, 25 bp, Homo sapien
tctcaccaatcgtcttccagtcatt

SEQ ID NO: 4815011 - DNA, 25 bp, Homo sapien
gactgctgatctgtgagaacttgag

SEQ ID NO: 4815012 - DNA, 25 bp, Homo sapien
tcttctttgctcgatagtatataag

SEQ ID NO: 4815013 - DNA, 25 bp, Homo sapien
acatcttctttgctcgatagtatat

SEQ ID NO: 4815014 - DNA, 25 bp, Homo sapien
ctttgctcgatagtatataagtttc

SEQ ID NO: 4815015 - DNA, 25 bp, Homo sapien
ttgctcgatagtatataagtttcca

SEQ ID NO: 4815016 - DNA, 25 bp, Homo sapien
ttgtctgcactctcaatgcctgtca

SEQ ID NO: 4815017 - DNA, 25 bp, Homo sapien
tttttaagttggtgatcacagattt

SEQ ID NO: 4815018 - DNA, 25 bp, Homo sapien
tctgtccgtgtacagcagcttgtct

SEQ ID NO: 4815019 - DNA, 25 bp, Homo sapien
tgtgtaatctaaacgagtatctcct

SEQ ID NO: 4815020 - DNA, 25 bp, Homo sapien
ggtacatccgcttgattgtgctggt

SEQ ID NO: 4815021 - DNA, 25 bp, Homo sapien
caaatccgcatctgaatcatcggca

SEQ ID NO: 4815022 - DNA, 25 bp, Homo sapien
tgaagctgtttcacggcagaaccca

SEQ ID NO: 4815023 - DNA, 25 bp, Homo sapien
ccttgatgttaggaatgaactcctg

SEQ ID NO: 4815024 - DNA, 25 bp, Homo sapien
taagtatcttatttcggaatcttca

SEQ ID NO: 4815025 - DNA, 25 bp, Homo sapien
tcctgaatctgcagataagtatctt

SEQ ID NO: 4815026 - DNA, 25 bp, Homo sapien
agctgtttccacattgtgttcttca

SEQ ID NO: 4815027 - DNA, 25 bp, Homo sapien
tcttatttcggaatcttcagctgtt

SEQ ID NO: 4815028 - DNA, 25 bp, Homo sapien
gagactgttcattcaccagggagga

SEQ ID NO: 4815029 - DNA, 25 bp, Homo sapien
gattcctgcatatcagtcccggcct

SEQ ID NO: 4815030 - DNA, 25 bp, Homo sapien
ttcagggtatgcactctcgaggctc

SEQ ID NO: 4815031 - DNA, 25 bp, Homo sapien
catggccagtgtctcatattcccgg

SEQ ID NO: 4815032 - DNA, 25 bp, Homo sapien
cctccgaaagcgccgccacctttct

SEQ ID NO: 4815033 - DNA, 25 bp, Homo sapien
tttctcccaacccggaagtgctgct

SEQ ID NO: 4815034 - DNA, 25 bp, Homo sapien
cgaaagcgccgccacctttctccca

SEQ ID NO: 4815035 - DNA, 25 bp, Homo sapien
cctttctcccaacccggaagtgctg

SEQ ID NO: 4815036 - DNA, 25 bp, Homo sapien
caacagcaaagtggtacagacgtgg

SEQ ID NO: 4815037 - DNA, 25 bp, Homo sapien
tgggatccatgcccagcactgaggg

SEQ ID NO: 4815038 - DNA, 25 bp, Homo sapien
gtggtacagacgtggccacagccat

SEQ ID NO: 4815039 - DNA, 25 bp, Homo sapien
ccacagccatctggatgggatccat

SEQ ID NO: 4815040 - DNA, 25 bp, Homo sapien
ccagaagttgactgcacaaggctga

SEQ ID NO: 4815041 - DNA, 25 bp, Homo sapien
gccagaagttgactgcacaaggctg

SEQ ID NO: 4815042 - DNA, 25 bp, Homo sapien
ggccagaagttgactgcacaaggct

SEQ ID NO: 4815043 - DNA, 25 bp, Homo sapien
cagaagttgactgcacaaggctgaa

SEQ ID NO: 4815044 - DNA, 25 bp, Homo sapien
gataaagacgcatagataccgggtt

SEQ ID NO: 4815045 - DNA, 25 bp, Homo sapien
taaagaagagactcgggataaagac

SEQ ID NO: 4815046 - DNA, 25 bp, Homo sapien
catagataccgggtttcccacggat

SEQ ID NO: 4815047 - DNA, 25 bp, Homo sapien
cccacggatgttggatttcaggtta

SEQ ID NO: 4815048 - DNA, 25 bp, Homo sapien
ctgaagcattcacaagccggccagt

SEQ ID NO: 4815049 - DNA, 25 bp, Homo sapien
tgaagcattcacaagccggccagtc

SEQ ID NO: 4815050 - DNA, 25 bp, Homo sapien
gaagcattcacaagccggccagtca

SEQ ID NO: 4815051 - DNA, 25 bp, Homo sapien
aagcattcacaagccggccagtcat

SEQ ID NO: 4815052 - DNA, 25 bp, Homo sapien
tattacgggttcaaactcgacgcag

SEQ ID NO: 4815053 - DNA, 25 bp, Homo sapien
gttcaaactcgacgcaggacgtggc

SEQ ID NO: 4815054 - DNA, 25 bp, Homo sapien
cagaaagacggccagtattacgggt

SEQ ID NO: 4815055 - DNA, 25 bp, Homo sapien
cagaaagacattaaggtgcactcca

SEQ ID NO: 4815056 - DNA, 25 bp, Homo sapien
tattaacccaagacgtaggaagcat

SEQ ID NO: 4815057 - DNA, 25 bp, Homo sapien
tatgtagtagcagtttttcaagata

SEQ ID NO: 4815058 - DNA, 25 bp, Homo sapien
agatattaacccaagacgtaggaag

SEQ ID NO: 4815059 - DNA, 25 bp, Homo sapien
acccaagacgtaggaagcattcttc

SEQ ID NO: 4815060 - DNA, 25 bp, Homo sapien
ctcccgaaatcgtgcagtgtttgga

SEQ ID NO: 4815061 - DNA, 25 bp, Homo sapien
tggtctcccgaaatcgtgcagtgtt

SEQ ID NO: 4815062 - DNA, 25 bp, Homo sapien
ggctgtggtctcccgaaatcgtgca

SEQ ID NO: 4815063 - DNA, 25 bp, Homo sapien
tgtggtctcccgaaatcgtgcagtg

SEQ ID NO: 4815064 - DNA, 25 bp, Homo sapien
ggggcgcttgcacagatccgggccc

SEQ ID NO: 4815065 - DNA, 25 bp, Homo sapien
ggcgcttgcacagatccgggcccct

SEQ ID NO: 4815066 - DNA, 25 bp, Homo sapien
cgcttgcacagatccgggcccctgg

SEQ ID NO: 4815067 - DNA, 25 bp, Homo sapien
gggcgcttgcacagatccgggcccc

SEQ ID NO: 4815068 - DNA, 25 bp, Homo sapien
gtcgcagcgacaagcttttgatttc

SEQ ID NO: 4815069 - DNA, 25 bp, Homo sapien
ggtcgcagcgacaagcttttgattt

SEQ ID NO: 4815070 - DNA, 25 bp, Homo sapien
gtatggaaggctcagctcatcccca

SEQ ID NO: 4815071 - DNA, 25 bp, Homo sapien
ggggtgtgtatggaaggctcagctc

SEQ ID NO: 4815072 - DNA, 25 bp, Homo sapien
gtgtgtatggaaggctcagctcatc

SEQ ID NO: 4815073 - DNA, 25 bp, Homo sapien
ggggggggtgtgtatggaaggctca

SEQ ID NO: 4815074 - DNA, 25 bp, Homo sapien
tgaattttcccatcgttgctgcatc

SEQ ID NO: 4815075 - DNA, 25 bp, Homo sapien
tttcccatcgttgctgcatctgtcc

SEQ ID NO: 4815076 - DNA, 25 bp, Homo sapien
tatggaatttcgactgaattttccc

SEQ ID NO: 4815077 - DNA, 25 bp, Homo sapien
cttttctccacatatggaatttcga

SEQ ID NO: 4815078 - DNA, 25 bp, Homo sapien
tagctgctatccagcagtccagagt

SEQ ID NO: 4815079 - DNA, 25 bp, Homo sapien
ctagctgctatccagcagtccagag

SEQ ID NO: 4815080 - DNA, 25 bp, Homo sapien
agctgctatccagcagtccagagtg

SEQ ID NO: 4815081 - DNA, 25 bp, Homo sapien
atggtggagagtggtgaccccagtg

SEQ ID NO: 4815082 - DNA, 25 bp, Homo sapien
cagtgggcaccgtctcttcccattc

SEQ ID NO: 4815083 - DNA, 25 bp, Homo sapien
agatggtggagagtggtgaccccag

SEQ ID NO: 4815084 - DNA, 25 bp, Homo sapien
ccccagtgggcaccgtctcttccca

SEQ ID NO: 4815085 - DNA, 25 bp, Homo sapien
agttcccggtcatggctgggtgaca

SEQ ID NO: 4815086 - DNA, 25 bp, Homo sapien
cggaaagaggctgctttccctcatt

SEQ ID NO: 4815087 - DNA, 25 bp, Homo sapien
tgggaatcacggaaagaggctgctt

SEQ ID NO: 4815088 - DNA, 25 bp, Homo sapien
ctgggagccgcctgatggttttagt

SEQ ID NO: 4815089 - DNA, 25 bp, Homo sapien
cattaataccatttgaacttgaaaa

SEQ ID NO: 4815090 - DNA, 25 bp, Homo sapien
acattaataccatttgaacttgaaa

SEQ ID NO: 4815091 - DNA, 25 bp, Homo sapien
tttgccgctgcctgcatttctgtcc

SEQ ID NO: 4815092 - DNA, 25 bp, Homo sapien
gctggatcatttgccgctgcctgca

SEQ ID NO: 4815093 - DNA, 25 bp, Homo sapien
ggtctgctggatcatttgccgctgc

SEQ ID NO: 4815094 - DNA, 25 bp, Homo sapien
gatcatttgccgctgcctgcatttc

SEQ ID NO: 4815095 - DNA, 25 bp, Homo sapien
gcctgctctgtgaaatcctgcacca

SEQ ID NO: 4815096 - DNA, 25 bp, Homo sapien
cctgctctgtgaaatcctgcaccat

SEQ ID NO: 4815097 - DNA, 25 bp, Homo sapien
tggcctgctctgtgaaatcctgcac

SEQ ID NO: 4815098 - DNA, 25 bp, Homo sapien
cttggcctgctctgtgaaatcctgc

SEQ ID NO: 4815099 - DNA, 25 bp, Homo sapien
gatggccccgttggctttgctcagg

SEQ ID NO: 4815100 - DNA, 25 bp, Homo sapien
cctccaaggatggccccgttggctt

SEQ ID NO: 4815101 - DNA, 25 bp, Homo sapien
cctgctgcagcgcattgaacctgct

SEQ ID NO: 4815102 - DNA, 25 bp, Homo sapien
gcagcgcattgaacctgctgatcca

SEQ ID NO: 4815103 - DNA, 25 bp, Homo sapien
tgaaagcgtgtgggcaggtgggccg

SEQ ID NO: 4815104 - DNA, 25 bp, Homo sapien
aaagcgtgtgggcaggtgggccgag

SEQ ID NO: 4815105 - DNA, 25 bp, Homo sapien
ctggttgaaagcgtgtgggcaggtg

SEQ ID NO: 4815106 - DNA, 25 bp, Homo sapien
ggttgaaagcgtgtgggcaggtggg

SEQ ID NO: 4815107 - DNA, 25 bp, Homo sapien
ctgccgcagagtgagacgtggcaga

SEQ ID NO: 4815108 - DNA, 25 bp, Homo sapien
ttctcacggaggctacagagtccgg

SEQ ID NO: 4815109 - DNA, 25 bp, Homo sapien
gatccattcatctcaaagacgtggg

SEQ ID NO: 4815110 - DNA, 25 bp, Homo sapien
aggaaggaaaataggtgacatcctg

SEQ ID NO: 4815111 - DNA, 25 bp, Homo sapien
gcgagagggcataagatgaggccaa

SEQ ID NO: 4815112 - DNA, 25 bp, Homo sapien
gcagaaagcggacggtgagcgagag

SEQ ID NO: 4815113 - DNA, 25 bp, Homo sapien
ggccaaggctaggagcagaggtgcc

SEQ ID NO: 4815114 - DNA, 25 bp, Homo sapien
ttccaggagccgaaagaaggcccag

SEQ ID NO: 4815115 - DNA, 25 bp, Homo sapien
gaagctgatattgcaggaggagccc

SEQ ID NO: 4815116 - DNA, 25 bp, Homo sapien
ggcttggttcccagcatgggtttcc

SEQ ID NO: 4815117 - DNA, 25 bp, Homo sapien
cagcccggcttggttcccagcatgg

SEQ ID NO: 4815118 - DNA, 25 bp, Homo sapien
aagctgatattgcaggaggagcccg

SEQ ID NO: 4815119 - DNA, 25 bp, Homo sapien
ccagccaagccactttgtgatggag

SEQ ID NO: 4815120 - DNA, 25 bp, Homo sapien
tccagccaagccactttgtgatgga

SEQ ID NO: 4815121 - DNA, 25 bp, Homo sapien
acccagagctgtattccagccaagc

SEQ ID NO: 4815122 - DNA, 25 bp, Homo sapien
cccagagctgtattccagccaagcc

SEQ ID NO: 4815123 - DNA, 25 bp, Homo sapien
ttctcctgtgtataaggctctgtgc

SEQ ID NO: 4815124 - DNA, 25 bp, Homo sapien
acctgttccatatgagccaaacccc

SEQ ID NO: 4815125 - DNA, 25 bp, Homo sapien
tctgtgctgtgcaccgttgtgtggg

SEQ ID NO: 4815126 - DNA, 25 bp, Homo sapien
tcctgtgtataaggctctgtgctgt

SEQ ID NO: 4815127 - DNA, 25 bp, Homo sapien
tgtggacagtgggatttcaggcctt

SEQ ID NO: 4815128 - DNA, 25 bp, Homo sapien
atttcaggccttggaggtatccggg

SEQ ID NO: 4815129 - DNA, 25 bp, Homo sapien
aaggttgccgaggactcccacggct

SEQ ID NO: 4815130 - DNA, 25 bp, Homo sapien
ctaaagggctggattgtggacagtg

SEQ ID NO: 4815131 - DNA, 25 bp, Homo sapien
tgggaggccgagaatatcagataaa

SEQ ID NO: 4815132 - DNA, 25 bp, Homo sapien
agtcacagggtaagttctgaggttc

SEQ ID NO: 4815133 - DNA, 25 bp, Homo sapien
gataaaagctgtggattctctccct

SEQ ID NO: 4815134 - DNA, 25 bp, Homo sapien
gatgaaagtctttacatagctgcac

SEQ ID NO: 4815135 - DNA, 25 bp, Homo sapien
ggaatcaacgtagcgggactcttgg

SEQ ID NO: 4815136 - DNA, 25 bp, Homo sapien
caggtgaggaacttaatcagctgtc

SEQ ID NO: 4815137 - DNA, 25 bp, Homo sapien
gcaggccaaggtcatcagatatcag

SEQ ID NO: 4815138 - DNA, 25 bp, Homo sapien
tcatcagcctatgtgagggacctgt

SEQ ID NO: 4815139 - DNA, 25 bp, Homo sapien
ccagtgcagggctaaatgcgggccc

SEQ ID NO: 4815140 - DNA, 25 bp, Homo sapien
taaggctcggaagcttaaagtcacg

SEQ ID NO: 4815141 - DNA, 25 bp, Homo sapien
gttaatagctagcatgtggccaggt

SEQ ID NO: 4815142 - DNA, 25 bp, Homo sapien
aagtcacgtgcccaaggttaatagc

SEQ ID NO: 4815143 - DNA, 25 bp, Homo sapien
tgtcaaccgaggaaccatgtggctg

SEQ ID NO: 4815144 - DNA, 25 bp, Homo sapien
caataaagtactgacgggcactgca

SEQ ID NO: 4815145 - DNA, 25 bp, Homo sapien
catggacggctcagcaaaggactta

SEQ ID NO: 4815146 - DNA, 25 bp, Homo sapien
tgggccgaggacaccaaacatctga

SEQ ID NO: 4815147 - DNA, 25 bp, Homo sapien
gtacacgataccgagaatcaacatg

SEQ ID NO: 4815148 - DNA, 25 bp, Homo sapien
ggttccgcgcacagatagatgatcc

SEQ ID NO: 4815149 - DNA, 25 bp, Homo sapien
gagtcacactcaggttccgcgcaca

SEQ ID NO: 4815150 - DNA, 25 bp, Homo sapien
aaaacatacagtccctggcatcagg

SEQ ID NO: 4815151 - DNA, 25 bp, Homo sapien
tgcttccaattaggagccgaggccg

SEQ ID NO: 4815152 - DNA, 25 bp, Homo sapien
tcagggaactgaggcaaatcctccg

SEQ ID NO: 4815153 - DNA, 25 bp, Homo sapien
tcattttgggcccacgagctgtcag

SEQ ID NO: 4815154 - DNA, 25 bp, Homo sapien
gattctcaagcaggcatcgtcagca

SEQ ID NO: 4815155 - DNA, 25 bp, Homo sapien
tcaagcttcacaagcgatggcgcgg

SEQ ID NO: 4815156 - DNA, 25 bp, Homo sapien
gctcggctaaggcaagtgttgacct

SEQ ID NO: 4815157 - DNA, 25 bp, Homo sapien
aagtttcgtggctccggcgctaaat

SEQ ID NO: 4815158 - DNA, 25 bp, Homo sapien
gatggcgcggcggttatcatttgca

SEQ ID NO: 4815159 - DNA, 25 bp, Homo sapien
tgctggctaccccaggaacgggtga

SEQ ID NO: 4815160 - DNA, 25 bp, Homo sapien
gctggctaccccaggaacgggtgac

SEQ ID NO: 4815161 - DNA, 25 bp, Homo sapien
ctgctggctaccccaggaacgggtg

SEQ ID NO: 4815162 - DNA, 25 bp, Homo sapien
ggaggaacggccaatgcctcatctc

SEQ ID NO: 4815163 - DNA, 25 bp, Homo sapien
tccaggtagagcctctgcgtcttgg

SEQ ID NO: 4815164 - DNA, 25 bp, Homo sapien
cccgcttttcagcttgtggaccaga

SEQ ID NO: 4815165 - DNA, 25 bp, Homo sapien
ctggtgccgcctcgcaaggaggaac

SEQ ID NO: 4815166 - DNA, 25 bp, Homo sapien
ctctcgaacttcgagtttaagcgat

SEQ ID NO: 4815167 - DNA, 25 bp, Homo sapien
gctctcgaacttcgagtttaagcga

SEQ ID NO: 4815168 - DNA, 25 bp, Homo sapien
ctgctctcgaacttcgagtttaagc

SEQ ID NO: 4815169 - DNA, 25 bp, Homo sapien
tctcgaacttcgagtttaagcgatt

SEQ ID NO: 4815170 - DNA, 25 bp, Homo sapien
acatccagaagctgaaggatatttt

SEQ ID NO: 4815171 - DNA, 25 bp, Homo sapien
cgagcccactctttcgctctgaaat

SEQ ID NO: 4815172 - DNA, 25 bp, Homo sapien
aaggatattttgaatcgagcccact

SEQ ID NO: 4815173 - DNA, 25 bp, Homo sapien
tccagaagctgaaggatattttgaa

SEQ ID NO: 4815174 - DNA, 25 bp, Homo sapien
tagtcttgggctccaagaagcccgg

SEQ ID NO: 4815175 - DNA, 25 bp, Homo sapien
caggaggtccggctttggtgttctt

SEQ ID NO: 4815176 - DNA, 25 bp, Homo sapien
caagcttcgctttcgctgggtccgg

SEQ ID NO: 4815177 - DNA, 25 bp, Homo sapien
gatagtgtactgacaacccgctaat

SEQ ID NO: 4815178 - DNA, 25 bp, Homo sapien
cgtgccggaacaggcgggggtcagc

SEQ ID NO: 4815179 - DNA, 25 bp, Homo sapien
agcgaggccagctcgttgttcccct

SEQ ID NO: 4815180 - DNA, 25 bp, Homo sapien
tctccatctggttcctagcggctcc

SEQ ID NO: 4815181 - DNA, 25 bp, Homo sapien
ctacagcgaggccagctcgttgttc

SEQ ID NO: 4815182 - DNA, 25 bp, Homo sapien
ggcagctggtgaccggcccgccggg

SEQ ID NO: 4815183 - DNA, 25 bp, Homo sapien
ggccgacagatgggctccgaggctg

SEQ ID NO: 4815184 - DNA, 25 bp, Homo sapien
ctggccgcgacaagggccccggcag

SEQ ID NO: 4815185 - DNA, 25 bp, Homo sapien
gccgcgacaagggccccggcagctg

SEQ ID NO: 4815186 - DNA, 25 bp, Homo sapien
ggcgatttcatatcctacattaatg

SEQ ID NO: 4815187 - DNA, 25 bp, Homo sapien
tcagaggcgatttcatatcctacat

SEQ ID NO: 4815188 - DNA, 25 bp, Homo sapien
tacctcagaggcgatttcatatcct

SEQ ID NO: 4815189 - DNA, 25 bp, Homo sapien
ttgtacctcagaggcgatttcatat

SEQ ID NO: 4815190 - DNA, 25 bp, Homo sapien
tagaagagaaagagatttattttaa

SEQ ID NO: 4815191 - DNA, 25 bp, Homo sapien
caagaaaccctcaccataagagtta

SEQ ID NO: 4815192 - DNA, 25 bp, Homo sapien
acagacccacatagcatctatggca

SEQ ID NO: 4815193 - DNA, 25 bp, Homo sapien
ggaattatcgtcactcacacgttgc

SEQ ID NO: 4815194 - DNA, 25 bp, Homo sapien
gggtaatatagtgattctacttaga

SEQ ID NO: 4815195 - DNA, 25 bp, Homo sapien
cccagggatgccgaactctgccaat

SEQ ID NO: 4815196 - DNA, 25 bp, Homo sapien
cagggatgccgaactctgccaattc

SEQ ID NO: 4815197 - DNA, 25 bp, Homo sapien
caattcgccctttagtggaatgagt

SEQ ID NO: 4815198 - DNA, 25 bp, Homo sapien
gaactctgccaattcgccctttagt

SEQ ID NO: 4815199 - DNA, 25 bp, Homo sapien
ttgcccaacgccaggctgacatgtg

SEQ ID NO: 4815200 - DNA, 25 bp, Homo sapien
tgttagaaacgtcacccacagtccc

SEQ ID NO: 4815201 - DNA, 25 bp, Homo sapien
tccacctgcagaggatccagtctca

SEQ ID NO: 4815202 - DNA, 25 bp, Homo sapien
tttgtatgtgacagccaactctgag

SEQ ID NO: 4815203 - DNA, 25 bp, Homo sapien
tcacactggagtctccgccagtgtg

SEQ ID NO: 4815204 - DNA, 25 bp, Homo sapien
cactggagtctccgccagtgtgggt

SEQ ID NO: 4815205 - DNA, 25 bp, Homo sapien
cagtgtgggtgcccactgacattca

SEQ ID NO: 4815206 - DNA, 25 bp, Homo sapien
ccagtgtgggtgcccactgacattc

SEQ ID NO: 4815207 - DNA, 25 bp, Homo sapien
ctagaacggaggcaaggatgctgac

SEQ ID NO: 4815208 - DNA, 25 bp, Homo sapien
gaggcaaggatgctgaccccccgtg

SEQ ID NO: 4815209 - DNA, 25 bp, Homo sapien
tgaccccccgtggtccctgcaggaa

SEQ ID NO: 4815210 - DNA, 25 bp, Homo sapien
gcaaggatgctgaccccccgtggtc

SEQ ID NO: 4815211 - DNA, 25 bp, Homo sapien
ccctctcgtggccactcagaccttc

SEQ ID NO: 4815212 - DNA, 25 bp, Homo sapien
gaagtggtgcctcaacactggtcct

SEQ ID NO: 4815213 - DNA, 25 bp, Homo sapien
gggatctactgaagtggtgcctcaa

SEQ ID NO: 4815214 - DNA, 25 bp, Homo sapien
tactgaagtggtgcctcaacactgg

SEQ ID NO: 4815215 - DNA, 25 bp, Homo sapien
aggagcggtgcccacaggtgtggag

SEQ ID NO: 4815216 - DNA, 25 bp, Homo sapien
acaggagcggtgcccacaggtgtgg

SEQ ID NO: 4815217 - DNA, 25 bp, Homo sapien
gacaggagcggtgcccacaggtgtg

SEQ ID NO: 4815218 - DNA, 25 bp, Homo sapien
caggagcggtgcccacaggtgtgga

SEQ ID NO: 4815219 - DNA, 25 bp, Homo sapien
ccaatgtatgcgctgataggctgaa

SEQ ID NO: 4815220 - DNA, 25 bp, Homo sapien
cgcgcagggcgttcttacatcacat

SEQ ID NO: 4815221 - DNA, 25 bp, Homo sapien
gacgtggtattcaggcaaaggcgca

SEQ ID NO: 4815222 - DNA, 25 bp, Homo sapien
gaaaataagagggaccacgagcctg

SEQ ID NO: 4815223 - DNA, 25 bp, Homo sapien
ggaagtcttgctgtcccgctgtaca

SEQ ID NO: 4815224 - DNA, 25 bp, Homo sapien
taaactttctgggaagtcttgctgt

SEQ ID NO: 4815225 - DNA, 25 bp, Homo sapien
tttctgggaagtcttgctgtcccgc

SEQ ID NO: 4815226 - DNA, 25 bp, Homo sapien
gaagtcttgctgtcccgctgtacac

SEQ ID NO: 4815227 - DNA, 25 bp, Homo sapien
gcagggtgtcggctgcagactgtgc

SEQ ID NO: 4815228 - DNA, 25 bp, Homo sapien
ctttttgaccttggcgatgtcggcc

SEQ ID NO: 4815229 - DNA, 25 bp, Homo sapien
tccaggtgcgttttgctttttgacc

SEQ ID NO: 4815230 - DNA, 25 bp, Homo sapien
caggctctccaggtgcgttttgctt

SEQ ID NO: 4815231 - DNA, 25 bp, Homo sapien
cgaacgtaggatttcagcgaggctg

SEQ ID NO: 4815232 - DNA, 25 bp, Homo sapien
cagcgaggctgtgtttactctgggt

SEQ ID NO: 4815233 - DNA, 25 bp, Homo sapien
ctgggtcttcttatgaaggtcaggc

SEQ ID NO: 4815234 - DNA, 25 bp, Homo sapien
gccgcttgagtattccgaacgtagg

SEQ ID NO: 4815235 - DNA, 25 bp, Homo sapien
gctccagcagtgaatgtgcccgtct

SEQ ID NO: 4815236 - DNA, 25 bp, Homo sapien
tgtggttcccgctgtctgcaggtga

SEQ ID NO: 4815237 - DNA, 25 bp, Homo sapien
tgcatgactgaaagcacgccctgtg

SEQ ID NO: 4815238 - DNA, 25 bp, Homo sapien
taattaaaccagagcccgaaaagca

SEQ ID NO: 4815239 - DNA, 25 bp, Homo sapien
tactctcggttccgcgggtactcgc

SEQ ID NO: 4815240 - DNA, 25 bp, Homo sapien
tccgcgggtactcgcgacaatgatg

SEQ ID NO: 4815241 - DNA, 25 bp, Homo sapien
gttccgcgggtactcgcgacaatga

SEQ ID NO: 4815242 - DNA, 25 bp, Homo sapien
tcggttccgcgggtactcgcgacaa

SEQ ID NO: 4815243 - DNA, 25 bp, Homo sapien
cctgaccacaattatacggtccatg

SEQ ID NO: 4815244 - DNA, 25 bp, Homo sapien
catgtgcagattagctgcaaagtca

SEQ ID NO: 4815245 - DNA, 25 bp, Homo sapien
taactactgtatcctcgagtgcccg

SEQ ID NO: 4815246 - DNA, 25 bp, Homo sapien
cacaattatacggtccatgtgcaga

SEQ ID NO: 4815247 - DNA, 25 bp, Homo sapien
tgatgagcgctcaccactggaggtg

SEQ ID NO: 4815248 - DNA, 25 bp, Homo sapien
gctcttgccttgatgagcgctcacc

SEQ ID NO: 4815249 - DNA, 25 bp, Homo sapien
tcaccactggaggtgcaactcagca

SEQ ID NO: 4815250 - DNA, 25 bp, Homo sapien
gtgcaactcagcagcaaggagccca

SEQ ID NO: 4815251 - DNA, 25 bp, Homo sapien
gctttcctcttctttctagtcaagg

SEQ ID NO: 4815252 - DNA, 25 bp, Homo sapien
cttttcacgtgtgctttcctcttct

SEQ ID NO: 4815253 - DNA, 25 bp, Homo sapien
ttcctcttctttctagtcaaggcac

SEQ ID NO: 4815254 - DNA, 25 bp, Homo sapien
tgctttcctcttctttctagtcaag

SEQ ID NO: 4815255 - DNA, 25 bp, Homo sapien
caaggtggagggatcggacgtggaa

SEQ ID NO: 4815256 - DNA, 25 bp, Homo sapien
gaagctcttcgccacatgcccaagg

SEQ ID NO: 4815257 - DNA, 25 bp, Homo sapien
gggcatctcttagtccgaagctctt

SEQ ID NO: 4815258 - DNA, 25 bp, Homo sapien
ggcgtaggcttggatgaaggactgc

SEQ ID NO: 4815259 - DNA, 25 bp, Homo sapien
gagagcggggagggaagctgtcagg

SEQ ID NO: 4815260 - DNA, 25 bp, Homo sapien
aaaagagagcggggagggaagctgt

SEQ ID NO: 4815261 - DNA, 25 bp, Homo sapien
ctgaaagaaaagagagcggggaggg

SEQ ID NO: 4815262 - DNA, 25 bp, Homo sapien
aagagagcggggagggaagctgtca

SEQ ID NO: 4815263 - DNA, 25 bp, Homo sapien
caaagacgctgcagtagctgtctgc

SEQ ID NO: 4815264 - DNA, 25 bp, Homo sapien
ggactcccatgtttggataattcag

SEQ ID NO: 4815265 - DNA, 25 bp, Homo sapien
agcaggaatttcaaagacgctgcag

SEQ ID NO: 4815266 - DNA, 25 bp, Homo sapien
tgcagaacctttcaaggagcaggaa

SEQ ID NO: 4815267 - DNA, 25 bp, Homo sapien
tggcagcgtcgagaatgtgcagaag

SEQ ID NO: 4815268 - DNA, 25 bp, Homo sapien
gttggcagcgtcgagaatgtgcaga

SEQ ID NO: 4815269 - DNA, 25 bp, Homo sapien
ttggcagcgtcgagaatgtgcagaa

SEQ ID NO: 4815270 - DNA, 25 bp, Homo sapien
ggcagcgtcgagaatgtgcagaagg

SEQ ID NO: 4815271 - DNA, 25 bp, Homo sapien
cgtctgcaagactgtggctcgctct

SEQ ID NO: 4815272 - DNA, 25 bp, Homo sapien
cctcctctcactggagtgcacgtaa

SEQ ID NO: 4815273 - DNA, 25 bp, Homo sapien
gtaatcttcaaataccgtctgcaag

SEQ ID NO: 4815274 - DNA, 25 bp, Homo sapien
caagactgtggctcgctctcggatt

SEQ ID NO: 4815275 - DNA, 25 bp, Homo sapien
aagagacctcaagcttaagtgacag

SEQ ID NO: 4815276 - DNA, 25 bp, Homo sapien
gaaattagcgaggatgccctttccc

SEQ ID NO: 4815277 - DNA, 25 bp, Homo sapien
tcctttcgttaagccacctcagcag

SEQ ID NO: 4815278 - DNA, 25 bp, Homo sapien
tttcccctggcggacagaatcctct

SEQ ID NO: 4815279 - DNA, 25 bp, Homo sapien
aaaaatgccctttgggccgcgtgtg

SEQ ID NO: 4815280 - DNA, 25 bp, Homo sapien
gagtatacctgagacgacgtttgat

SEQ ID NO: 4815281 - DNA, 25 bp, Homo sapien
cacagtgatcaactccctggagaga

SEQ ID NO: 4815282 - DNA, 25 bp, Homo sapien
taaagactgacaccaatgccaggcc

SEQ ID NO: 4815283 - DNA, 25 bp, Homo sapien
ttccagaatggaccgtagcccactc

SEQ ID NO: 4815284 - DNA, 25 bp, Homo sapien
catgctgtctgggataggcaggtct

SEQ ID NO: 4815285 - DNA, 25 bp, Homo sapien
cattctggcctggacctcctttctg

SEQ ID NO: 4815286 - DNA, 25 bp, Homo sapien
tggcactgcctccagactcattctg

SEQ ID NO: 4815287 - DNA, 25 bp, Homo sapien
catcgtttccctttaaaacaatcat

SEQ ID NO: 4815288 - DNA, 25 bp, Homo sapien
aacaatcatctcttgtcagaacaca

SEQ ID NO: 4815289 - DNA, 25 bp, Homo sapien
catctcttgtcagaacacacaaaat

SEQ ID NO: 4815290 - DNA, 25 bp, Homo sapien
aaaatatcttccatcttaatctcag

SEQ ID NO: 4815291 - DNA, 25 bp, Homo sapien
ccactcccttgatttgagcagatga

SEQ ID NO: 4815292 - DNA, 25 bp, Homo sapien
cactcccttgatttgagcagatgat

SEQ ID NO: 4815293 - DNA, 25 bp, Homo sapien
actcccttgatttgagcagatgatg

SEQ ID NO: 4815294 - DNA, 25 bp, Homo sapien
aatgcatgggtattgaactcgcctc

SEQ ID NO: 4815295 - DNA, 25 bp, Homo sapien
cacagccctatggatgagtgaagcc

SEQ ID NO: 4815296 - DNA, 25 bp, Homo sapien
taatgccgtttgcagtcaggaacag

SEQ ID NO: 4815297 - DNA, 25 bp, Homo sapien
gagtgaagcctttttacagcagcaa

SEQ ID NO: 4815298 - DNA, 25 bp, Homo sapien
cactgcgcactttgcaactagttaa

SEQ ID NO: 4815299 - DNA, 25 bp, Homo sapien
tatagatacagccaatgtagggcct

SEQ ID NO: 4815300 - DNA, 25 bp, Homo sapien
taggagtcgaccttttggattctag

SEQ ID NO: 4815301 - DNA, 25 bp, Homo sapien
tgttctcaggcacgaaacatgcaca

SEQ ID NO: 4815302 - DNA, 25 bp, Homo sapien
tggtacacccgccctggtgggtgtc

SEQ ID NO: 4815303 - DNA, 25 bp, Homo sapien
ctggtacacccgccctggtgggtgt

SEQ ID NO: 4815304 - DNA, 25 bp, Homo sapien
ggtacacccgccctggtgggtgtca

SEQ ID NO: 4815305 - DNA, 25 bp, Homo sapien
gtgtagtgtggatttcaactgcctc

SEQ ID NO: 4815306 - DNA, 25 bp, Homo sapien
aagtctagaatccagggctttacgc

SEQ ID NO: 4815307 - DNA, 25 bp, Homo sapien
tacgcagaggtatgaggtgctgaac

SEQ ID NO: 4815308 - DNA, 25 bp, Homo sapien
ggtatgaggtgctgaactgtgacac

SEQ ID NO: 4815309 - DNA, 25 bp, Homo sapien
gagttgacatattctgcctccgaag

SEQ ID NO: 4815310 - DNA, 25 bp, Homo sapien
tcccatggcagccaatccgggcggt

SEQ ID NO: 4815311 - DNA, 25 bp, Homo sapien
caatccgggcggttcttccaatccg

SEQ ID NO: 4815312 - DNA, 25 bp, Homo sapien
tttgtgagaagccaacgagttgaca

SEQ ID NO: 4815313 - DNA, 25 bp, Homo sapien
ctgcaggtgaagatggagcgttgta

SEQ ID NO: 4815314 - DNA, 25 bp, Homo sapien
cagggaccgaggtaattcccattat

SEQ ID NO: 4815315 - DNA, 25 bp, Homo sapien
tctccttctggacacaatgaggcct

SEQ ID NO: 4815316 - DNA, 25 bp, Homo sapien
tctcggacagctgagccatctcctt

SEQ ID NO: 4815317 - DNA, 25 bp, Homo sapien
cacgaattagtctagaagcaggaga

SEQ ID NO: 4815318 - DNA, 25 bp, Homo sapien
agggagatctaagccccgagctgca

SEQ ID NO: 4815319 - DNA, 25 bp, Homo sapien
ctgaacaatccacgtgacttgaggg

SEQ ID NO: 4815320 - DNA, 25 bp, Homo sapien
gacttgagggagatctaagccccga

SEQ ID NO: 4815321 - DNA, 25 bp, Homo sapien
gaacaatccacgtgacttgagggag

SEQ ID NO: 4815322 - DNA, 25 bp, Homo sapien
agggggcctgccgtctctctgagaa

SEQ ID NO: 4815323 - DNA, 25 bp, Homo sapien
ccccgttgtccgggtgacagattgg

SEQ ID NO: 4815324 - DNA, 25 bp, Homo sapien
gagaagggacgcagcacactcgcct

SEQ ID NO: 4815325 - DNA, 25 bp, Homo sapien
tgccgtgtgtggaaagccatcagca

SEQ ID NO: 4815326 - DNA, 25 bp, Homo sapien
tagcctcctggcacggtggaaattc

SEQ ID NO: 4815327 - DNA, 25 bp, Homo sapien
tctgaaaaagaaatgcacgcgccgg

SEQ ID NO: 4815328 - DNA, 25 bp, Homo sapien
gatgccaagggacagttggcgccca

SEQ ID NO: 4815329 - DNA, 25 bp, Homo sapien
tccatccagggacaatcaaggacag

SEQ ID NO: 4815330 - DNA, 25 bp, Homo sapien
ccatctgtctcgtcctgaagtggcc

SEQ ID NO: 4815331 - DNA, 25 bp, Homo sapien
ggctcctggagagtgttcggatagc

SEQ ID NO: 4815332 - DNA, 25 bp, Homo sapien
ggccctcgttcctcattaacaccaa

SEQ ID NO: 4815333 - DNA, 25 bp, Homo sapien
gtctcgtcctgaagtggccctcgtt

SEQ ID NO: 4815334 - DNA, 25 bp, Homo sapien
gagagtccccagaatatcggcatgc

SEQ ID NO: 4815335 - DNA, 25 bp, Homo sapien
tattacagcgtgtgtgtcccactcg

SEQ ID NO: 4815336 - DNA, 25 bp, Homo sapien
gtctagctgataccacgtgcctgca

SEQ ID NO: 4815337 - DNA, 25 bp, Homo sapien
gacccaggcatgatctattacagcg

SEQ ID NO: 4815338 - DNA, 25 bp, Homo sapien
tgggccctgtaggactgaccacagg

SEQ ID NO: 4815339 - DNA, 25 bp, Homo sapien
ctgggccctgtaggactgaccacag

SEQ ID NO: 4815340 - DNA, 25 bp, Homo sapien
gggccctgtaggactgaccacagga

SEQ ID NO: 4815341 - DNA, 25 bp, Homo sapien
ggccctgtaggactgaccacaggac

SEQ ID NO: 4815342 - DNA, 25 bp, Homo sapien
tgcaaagaaggacgcctcttctgga

SEQ ID NO: 4815343 - DNA, 25 bp, Homo sapien
gcaaagaaggacgcctcttctggaa

SEQ ID NO: 4815344 - DNA, 25 bp, Homo sapien
aaagaaggacgcctcttctggaatg

SEQ ID NO: 4815345 - DNA, 25 bp, Homo sapien
cgtgcaaagaaggacgcctcttctg

SEQ ID NO: 4815346 - DNA, 25 bp, Homo sapien
tcagtatgagcctgaaacggcgcat

SEQ ID NO: 4815347 - DNA, 25 bp, Homo sapien
tgcacttgagttggtcacattcacc

SEQ ID NO: 4815348 - DNA, 25 bp, Homo sapien
tcctagaaacagactcgctggacca

SEQ ID NO: 4815349 - DNA, 25 bp, Homo sapien
cgctggaccaaaaggtgagcatcct

SEQ ID NO: 4815350 - DNA, 25 bp, Homo sapien
cagtggccagggtaataagtcagga

SEQ ID NO: 4815351 - DNA, 25 bp, Homo sapien
cacacctggtaaagggccggaatga

SEQ ID NO: 4815352 - DNA, 25 bp, Homo sapien
gagaccatgctaaggccttgtagga

SEQ ID NO: 4815353 - DNA, 25 bp, Homo sapien
gaatgatatccgaacccagggagct

SEQ ID NO: 4815354 - DNA, 25 bp, Homo sapien
cctctcccaaccgaaagtgttctga

SEQ ID NO: 4815355 - DNA, 25 bp, Homo sapien
gatccacaatttagctccattaatg

SEQ ID NO: 4815356 - DNA, 25 bp, Homo sapien
acaatgacagcagccgtgctcagca

SEQ ID NO: 4815357 - DNA, 25 bp, Homo sapien
ccgtgctcagcagtaccatatggga

SEQ ID NO: 4815358 - DNA, 25 bp, Homo sapien
agtgttgtcgctgcacagggagatc

SEQ ID NO: 4815359 - DNA, 25 bp, Homo sapien
cagtgttgtcgctgcacagggagat

SEQ ID NO: 4815360 - DNA, 25 bp, Homo sapien
tgccgccatgcagccgtaggaattt

SEQ ID NO: 4815361 - DNA, 25 bp, Homo sapien
aggaattttaatcgcatggaggcag

SEQ ID NO: 4815362 - DNA, 25 bp, Homo sapien
gaagaggctgtagtggaactccacc

SEQ ID NO: 4815363 - DNA, 25 bp, Homo sapien
cagatggcaactgccctgatgccgg

SEQ ID NO: 4815364 - DNA, 25 bp, Homo sapien
agcctcagtttgctgggaaccacag

SEQ ID NO: 4815365 - DNA, 25 bp, Homo sapien
tgagactctctggtattgcaaagct

SEQ ID NO: 4815366 - DNA, 25 bp, Homo sapien
ttctgaaggatgaaggccgctaggc

SEQ ID NO: 4815367 - DNA, 25 bp, Homo sapien
tcctttgggttcaactggtcatggc

SEQ ID NO: 4815368 - DNA, 25 bp, Homo sapien
cagcattaagtatcactgtgatgtc

SEQ ID NO: 4815369 - DNA, 25 bp, Homo sapien
cttctgtgagtgtcgctgatagcaa

SEQ ID NO: 4815370 - DNA, 25 bp, Homo sapien
cattcagcatttacagcattaagta

SEQ ID NO: 4815371 - DNA, 25 bp, Homo sapien
attctgtcgtttttggcattcagca

SEQ ID NO: 4815372 - DNA, 25 bp, Homo sapien
atccaccaggcgtccaggagttgag

SEQ ID NO: 4815373 - DNA, 25 bp, Homo sapien
accaccgcagccgactaaaatgaat

SEQ ID NO: 4815374 - DNA, 25 bp, Homo sapien
ccaggagttgagataaggatattta

SEQ ID NO: 4815375 - DNA, 25 bp, Homo sapien
gcagccgactaaaatgaatgttctt

SEQ ID NO: 4815376 - DNA, 25 bp, Homo sapien
cactccaggcacaatccaggtgaaa

SEQ ID NO: 4815377 - DNA, 25 bp, Homo sapien
tcctcccattaacactccaggcaca

SEQ ID NO: 4815378 - DNA, 25 bp, Homo sapien
cattaacactccaggcacaatccag

SEQ ID NO: 4815379 - DNA, 25 bp, Homo sapien
taacactccaggcacaatccaggtg

SEQ ID NO: 4815380 - DNA, 25 bp, Homo sapien
acagtgtcaaagctttgtagagcta

SEQ ID NO: 4815381 - DNA, 25 bp, Homo sapien
cagtgtcaaagctttgtagagctag

SEQ ID NO: 4815382 - DNA, 25 bp, Homo sapien
ctcgttggcacgagcaccagggcat

SEQ ID NO: 4815383 - DNA, 25 bp, Homo sapien
tctctcgttggcacgagcaccaggg

SEQ ID NO: 4815384 - DNA, 25 bp, Homo sapien
ctctctcgttggcacgagcaccagg

SEQ ID NO: 4815385 - DNA, 25 bp, Homo sapien
cgttggcacgagcaccagggcatag

SEQ ID NO: 4815386 - DNA, 25 bp, Homo sapien
cttcacacaagagtaaggagcttgg

SEQ ID NO: 4815387 - DNA, 25 bp, Homo sapien
caaacagaactgaggtagaaatcca

SEQ ID NO: 4815388 - DNA, 25 bp, Homo sapien
cattctgtaaaaggtcccacgttag

SEQ ID NO: 4815389 - DNA, 25 bp, Homo sapien
acaggagccaggaattaaccttcac

SEQ ID NO: 4815390 - DNA, 25 bp, Homo sapien
cagggatgcaataggcaagagtttt

SEQ ID NO: 4815391 - DNA, 25 bp, Homo sapien
atttttgactccattgcttgaaggg

SEQ ID NO: 4815392 - DNA, 25 bp, Homo sapien
tttttgactccattgcttgaaggga

SEQ ID NO: 4815393 - DNA, 25 bp, Homo sapien
cttgaagggactggaccacagggat

SEQ ID NO: 4815394 - DNA, 25 bp, Homo sapien
ctctgccttccagcaacacaggaat

SEQ ID NO: 4815395 - DNA, 25 bp, Homo sapien
tgccttccagcaacacaggaatact

SEQ ID NO: 4815396 - DNA, 25 bp, Homo sapien
gatctcacgagagcatctctgcctt

SEQ ID NO: 4815397 - DNA, 25 bp, Homo sapien
ctgagcccgtctgggatctcacgag

SEQ ID NO: 4815398 - DNA, 25 bp, Homo sapien
agacacaaatttgctctgccttgca

SEQ ID NO: 4815399 - DNA, 25 bp, Homo sapien
ggcactgtgttccaacgccaagaca

SEQ ID NO: 4815400 - DNA, 25 bp, Homo sapien
gcacacacaggtttcgtccggttat

SEQ ID NO: 4815401 - DNA, 25 bp, Homo sapien
cccacgtaatgcctaagaaatcaag

SEQ ID NO: 4815402 - DNA, 25 bp, Homo sapien
catttttaagaccgtatttattgtg

SEQ ID NO: 4815403 - DNA, 25 bp, Homo sapien
tcatactagacatttttaagaccgt

SEQ ID NO: 4815404 - DNA, 25 bp, Homo sapien
ctggtcatactagacatttttaaga

SEQ ID NO: 4815405 - DNA, 25 bp, Homo sapien
atactagacatttttaagaccgtat

SEQ ID NO: 4815406 - DNA, 25 bp, Homo sapien
agcagctgaagtaaacactttttct

SEQ ID NO: 4815407 - DNA, 25 bp, Homo sapien
tgaaaagcagctgaagtaaacactt

SEQ ID NO: 4815408 - DNA, 25 bp, Homo sapien
gctcatgaaaagcagctgaagtaaa

SEQ ID NO: 4815409 - DNA, 25 bp, Homo sapien
tttcttgcacctgctttaccacagg

SEQ ID NO: 4815410 - DNA, 25 bp, Homo sapien
tttaaacagtgatgaagtcttaatg

SEQ ID NO: 4815411 - DNA, 25 bp, Homo sapien
ttttaaacagtgatgaagtcttaat

SEQ ID NO: 4815412 - DNA, 25 bp, Homo sapien
ttaaacagtgatgaagtcttaatgc

SEQ ID NO: 4815413 - DNA, 25 bp, Homo sapien
tgcgttccccttaaaagtcctctga

SEQ ID NO: 4815414 - DNA, 25 bp, Homo sapien
tggtttctatcacttgtgctaaccg

SEQ ID NO: 4815415 - DNA, 25 bp, Homo sapien
cctccgtttcgctgggggagcctca

SEQ ID NO: 4815416 - DNA, 25 bp, Homo sapien
tgctaaccgaatgcttctttggaga

SEQ ID NO: 4815417 - DNA, 25 bp, Homo sapien
attttcttttcgtagcctttgcttg

SEQ ID NO: 4815418 - DNA, 25 bp, Homo sapien
gatcaacaagagatgcattagtcca

SEQ ID NO: 4815419 - DNA, 25 bp, Homo sapien
tgaagcctgactgcccacagaattg

SEQ ID NO: 4815420 - DNA, 25 bp, Homo sapien
tgcgttgttcccagaaggaaagatc

SEQ ID NO: 4815421 - DNA, 25 bp, Homo sapien
tgaaaacagagctcggagtgaagcc

SEQ ID NO: 4815422 - DNA, 25 bp, Homo sapien
caatcaagataaggtaaggatgaag

SEQ ID NO: 4815423 - DNA, 25 bp, Homo sapien
gtgtttcggcgcaacttgtcccgaa

SEQ ID NO: 4815424 - DNA, 25 bp, Homo sapien
ttgtcccgaagctgcccggtgtctt

SEQ ID NO: 4815425 - DNA, 25 bp, Homo sapien
tttctcccgcttaactccgtgaatg

SEQ ID NO: 4815426 - DNA, 25 bp, Homo sapien
aatgactcgaaacccgactccaagg

SEQ ID NO: 4815427 - DNA, 25 bp, Homo sapien
ggctgggggacgtctggagaacgtc

SEQ ID NO: 4815428 - DNA, 25 bp, Homo sapien
actcgcctgggctgggggacgtctg

SEQ ID NO: 4815429 - DNA, 25 bp, Homo sapien
cctgggctgggggacgtctggagaa

SEQ ID NO: 4815430 - DNA, 25 bp, Homo sapien
ctcgcctgggctgggggacgtctgg

SEQ ID NO: 4815431 - DNA, 25 bp, Homo sapien
tcgaagagcgaaccgtcggcggctg

SEQ ID NO: 4815432 - DNA, 25 bp, Homo sapien
agagcgaaccgtcggcggctgccat

SEQ ID NO: 4815433 - DNA, 25 bp, Homo sapien
gttgtcgaagagcgaaccgtcggcg

SEQ ID NO: 4815434 - DNA, 25 bp, Homo sapien
aagagcgaaccgtcggcggctgcca

SEQ ID NO: 4815435 - DNA, 25 bp, Homo sapien
aatgcctctgagaagcgagatccgg

SEQ ID NO: 4815436 - DNA, 25 bp, Homo sapien
tacattcggccgagagttcacgctg

SEQ ID NO: 4815437 - DNA, 25 bp, Homo sapien
tccctcgcggcctggcaaaattaca

SEQ ID NO: 4815438 - DNA, 25 bp, Homo sapien
gtagggacaagactaccgcgcgtgc

SEQ ID NO: 4815439 - DNA, 25 bp, Homo sapien
ttaccgccccgtgcgtttcctcagc

SEQ ID NO: 4815440 - DNA, 25 bp, Homo sapien
ctttaggaactaaagcctgtctggg

SEQ ID NO: 4815441 - DNA, 25 bp, Homo sapien
ctgggtagctccctaacaggctctg

SEQ ID NO: 4815442 - DNA, 25 bp, Homo sapien
taaagcctgtctgggtagctcccta

SEQ ID NO: 4815443 - DNA, 25 bp, Homo sapien
tcagagtttgtgaattgctgcaatt

SEQ ID NO: 4815444 - DNA, 25 bp, Homo sapien
cagagtttgtgaattgctgcaattc

SEQ ID NO: 4815445 - DNA, 25 bp, Homo sapien
gtccatgtctcattgataggatgta

SEQ ID NO: 4815446 - DNA, 25 bp, Homo sapien
ctgccatctgcatagatggtttaac

SEQ ID NO: 4815447 - DNA, 25 bp, Homo sapien
tagatggtttaacatggtgctgttt

SEQ ID NO: 4815448 - DNA, 25 bp, Homo sapien
tcaggacttgttagccagtccatgt

SEQ ID NO: 4815449 - DNA, 25 bp, Homo sapien
gatgaaatgtggttcacttcccctg

SEQ ID NO: 4815450 - DNA, 25 bp, Homo sapien
tacaaagctactcctgccagaagag

SEQ ID NO: 4815451 - DNA, 25 bp, Homo sapien
caatgcattttgcttggaatacccc

SEQ ID NO: 4815452 - DNA, 25 bp, Homo sapien
gggttgaaccagatcatcccacatc

SEQ ID NO: 4815453 - DNA, 25 bp, Homo sapien
gagattctcagcatcactacaccag

SEQ ID NO: 4815454 - DNA, 25 bp, Homo sapien
ctgagattctcagcatcactacacc

SEQ ID NO: 4815455 - DNA, 25 bp, Homo sapien
ttctcagcatcactacaccagttac

SEQ ID NO: 4815456 - DNA, 25 bp, Homo sapien
gattctcagcatcactacaccagtt

SEQ ID NO: 4815457 - DNA, 25 bp, Homo sapien
agccctccacagctaacgacagagg

SEQ ID NO: 4815458 - DNA, 25 bp, Homo sapien
cacagctaacgacagaggtggttgt

SEQ ID NO: 4815459 - DNA, 25 bp, Homo sapien
tgtgtccgtcttcaggttttgttcc

SEQ ID NO: 4815460 - DNA, 25 bp, Homo sapien
gaggaaagcccagaactccgagctc

SEQ ID NO: 4815461 - DNA, 25 bp, Homo sapien
tagcggcgagtcaatccagggactc

SEQ ID NO: 4815462 - DNA, 25 bp, Homo sapien
cgaggacatcgatttcaatacggcg

SEQ ID NO: 4815463 - DNA, 25 bp, Homo sapien
aagtacaagaggtagcggcgagtca

SEQ ID NO: 4815464 - DNA, 25 bp, Homo sapien
tcgatttcaatacggcgctccgaga

SEQ ID NO: 4815465 - DNA, 25 bp, Homo sapien
gtttctcaaagtggtgcctcggccc

SEQ ID NO: 4815466 - DNA, 25 bp, Homo sapien
tttctcaaagtggtgcctcggcccg

SEQ ID NO: 4815467 - DNA, 25 bp, Homo sapien
tgtttctcaaagtggtgcctcggcc

SEQ ID NO: 4815468 - DNA, 25 bp, Homo sapien
ttctcaaagtggtgcctcggcccgt

SEQ ID NO: 4815469 - DNA, 25 bp, Homo sapien
ccatctggagatcagtggagtatct

SEQ ID NO: 4815470 - DNA, 25 bp, Homo sapien
ctgggcccatagagaggtccacagt

SEQ ID NO: 4815471 - DNA, 25 bp, Homo sapien
ttttgagaataaccaactggtgccc

SEQ ID NO: 4815472 - DNA, 25 bp, Homo sapien
gagaggtccacagtttttgttcttc

SEQ ID NO: 4815473 - DNA, 25 bp, Homo sapien
cagggcaccccctggtgaaggctgt

SEQ ID NO: 4815474 - DNA, 25 bp, Homo sapien
ggcctgggcttggaactgagacaga

SEQ ID NO: 4815475 - DNA, 25 bp, Homo sapien
gggcaccccctggtgaaggctgtgg

SEQ ID NO: 4815476 - DNA, 25 bp, Homo sapien
gcctgggcttggaactgagacagaa

SEQ ID NO: 4815477 - DNA, 25 bp, Homo sapien
ctcacagcccaggtttgggagagtg

SEQ ID NO: 4815478 - DNA, 25 bp, Homo sapien
ttgggagagtggtccccacgtgccc

SEQ ID NO: 4815479 - DNA, 25 bp, Homo sapien
tttgggagagtggtccccatgtgcc

SEQ ID NO: 4815480 - DNA, 25 bp, Homo sapien
tttgggagagtggtccccacgtgcc

SEQ ID NO: 4815481 - DNA, 25 bp, Homo sapien
tggctttttaggggagctgtgccga

SEQ ID NO: 4815482 - DNA, 25 bp, Homo sapien
gctttttaggggagctgtgccgagg

SEQ ID NO: 4815483 - DNA, 25 bp, Homo sapien
ggctttttaggggagctgtgccgag

SEQ ID NO: 4815484 - DNA, 25 bp, Homo sapien
agcaggctttattggctttttaggg

SEQ ID NO: 4815485 - DNA, 25 bp, Homo sapien
aagactgtgtatgggtcctggtccc

SEQ ID NO: 4815486 - DNA, 25 bp, Homo sapien
tgatggccgacccatacaactgctc

SEQ ID NO: 4815487 - DNA, 25 bp, Homo sapien
gattaatgatcccactctcgatgta

SEQ ID NO: 4815488 - DNA, 25 bp, Homo sapien
catcctttgggttctgcaggaggcg

SEQ ID NO: 4815489 - DNA, 25 bp, Homo sapien
cagtgactggatcaattcttctcag

SEQ ID NO: 4815490 - DNA, 25 bp, Homo sapien
attcttctcagagtcagccgctcca

SEQ ID NO: 4815491 - DNA, 25 bp, Homo sapien
cccagtgactggatcaattcttctc

SEQ ID NO: 4815492 - DNA, 25 bp, Homo sapien
tggatcaattcttctcagagtcagc

SEQ ID NO: 4815493 - DNA, 25 bp, Homo sapien
gatggaatcaaatggcacattcagg

SEQ ID NO: 4815494 - DNA, 25 bp, Homo sapien
aaatggcacattcaggaaaaacacc

SEQ ID NO: 4815495 - DNA, 25 bp, Homo sapien
tcaaatggcacattcaggaaaaaca

SEQ ID NO: 4815496 - DNA, 25 bp, Homo sapien
ggaatcaaatggcacattcaggaaa

SEQ ID NO: 4815497 - DNA, 25 bp, Homo sapien
aaggaaataaaccatattaataatg

SEQ ID NO: 4815498 - DNA, 25 bp, Homo sapien
tataaggaaataaaccatattaata

SEQ ID NO: 4815499 - DNA, 25 bp, Homo sapien
ctataaggaaataaaccatattaat

SEQ ID NO: 4815500 - DNA, 25 bp, Homo sapien
aggaaataaaccatattaataatgg

SEQ ID NO: 4815501 - DNA, 25 bp, Homo sapien
caacggcaacaccaaaacacggctg

SEQ ID NO: 4815502 - DNA, 25 bp, Homo sapien
ttgcacccccggtactgcaaggccc

SEQ ID NO: 4815503 - DNA, 25 bp, Homo sapien
gtactgcaaggcccaacggcaacac

SEQ ID NO: 4815504 - DNA, 25 bp, Homo sapien
tgtgaacacgcggccccccttgcac

SEQ ID NO: 4815505 - DNA, 25 bp, Homo sapien
gatgccgacgccagtagaaaggaag

SEQ ID NO: 4815506 - DNA, 25 bp, Homo sapien
gcggctctggatgccgacgccagta

SEQ ID NO: 4815507 - DNA, 25 bp, Homo sapien
tctggatgccgacgccagtagaaag

SEQ ID NO: 4815508 - DNA, 25 bp, Homo sapien
ctggcggctctggatgccgacgcca

SEQ ID NO: 4815509 - DNA, 25 bp, Homo sapien
gctgcttcataaacaagccccattt

SEQ ID NO: 4815510 - DNA, 25 bp, Homo sapien
gaagctgcttcataaacaagcccca

SEQ ID NO: 4815511 - DNA, 25 bp, Homo sapien
gcttcataaacaagccccatttgaa

SEQ ID NO: 4815512 - DNA, 25 bp, Homo sapien
catttgaaagacttttaacccagcg

SEQ ID NO: 4815513 - DNA, 25 bp, Homo sapien
caccaaatgggtgcttggagcacgc

SEQ ID NO: 4815514 - DNA, 25 bp, Homo sapien
tgtgacgcacaaggacaccaaatgg

SEQ ID NO: 4815515 - DNA, 25 bp, Homo sapien
gctggaagcttctgattatcctggc

SEQ ID NO: 4815516 - DNA, 25 bp, Homo sapien
caagactgcttgtcgtcattcaagg

SEQ ID NO: 4815517 - DNA, 25 bp, Homo sapien
tgcactcctcatcagatgcatttgg

SEQ ID NO: 4815518 - DNA, 25 bp, Homo sapien
caggccttggaaagtacagttgatg

SEQ ID NO: 4815519 - DNA, 25 bp, Homo sapien
ttgatgaacggtcatcttcatctcc

SEQ ID NO: 4815520 - DNA, 25 bp, Homo sapien
gcacggtgggcccaggcgaggaacc

SEQ ID NO: 4815521 - DNA, 25 bp, Homo sapien
aagatccattggtcagcaacagccc

SEQ ID NO: 4815522 - DNA, 25 bp, Homo sapien
gtggccgatgccaagaggccccact

SEQ ID NO: 4815523 - DNA, 25 bp, Homo sapien
gtgaacatttcctccgtgtcctgag

SEQ ID NO: 4815524 - DNA, 25 bp, Homo sapien
tcctgaggtgtggccgatgccaaga

SEQ ID NO: 4815525 - DNA, 25 bp, Homo sapien
gctagccaaccaatggatttttaac

SEQ ID NO: 4815526 - DNA, 25 bp, Homo sapien
ggtgctagccaaccaatggattttt

SEQ ID NO: 4815527 - DNA, 25 bp, Homo sapien
cacggtgctagccaaccaatggatt

SEQ ID NO: 4815528 - DNA, 25 bp, Homo sapien
gagccacggtgctagccaaccaatg

SEQ ID NO: 4815529 - DNA, 25 bp, Homo sapien
tgtgccaggtctgcgtcatgatcca

SEQ ID NO: 4815530 - DNA, 25 bp, Homo sapien
cgcagccctctgaggggctgtgcca

SEQ ID NO: 4815531 - DNA, 25 bp, Homo sapien
atttctgcccctcgcagccctctga

SEQ ID NO: 4815532 - DNA, 25 bp, Homo sapien
ggctgtgccaggtctgcgtcatgat

SEQ ID NO: 4815533 - DNA, 25 bp, Homo sapien
gccccacaggcacgggtctgagagc

SEQ ID NO: 4815534 - DNA, 25 bp, Homo sapien
agggtgtgcagatccaggatccctg

SEQ ID NO: 4815535 - DNA, 25 bp, Homo sapien
agcagggtgtgcagatccaggatcc

SEQ ID NO: 4815536 - DNA, 25 bp, Homo sapien
cggccccacaggcacgggtctgaga

SEQ ID NO: 4815537 - DNA, 25 bp, Homo sapien
tatataaacgtgctgcagagaaacc

SEQ ID NO: 4815538 - DNA, 25 bp, Homo sapien
gacttctctgctatgtatgtaccta

SEQ ID NO: 4815539 - DNA, 25 bp, Homo sapien
acctatctatataaacgtgctgcag

SEQ ID NO: 4815540 - DNA, 25 bp, Homo sapien
gctacccaccgccagattccccagc

SEQ ID NO: 4815541 - DNA, 25 bp, Homo sapien
gacaagcctccatatgaatccgcca

SEQ ID NO: 4815542 - DNA, 25 bp, Homo sapien
ggcttgatgtttaaagacggttgac

SEQ ID NO: 4815543 - DNA, 25 bp, Homo sapien
atatgaatccgccagtcacttcccg

SEQ ID NO: 4815544 - DNA, 25 bp, Homo sapien
gacggttgacaagcctccatatgaa

SEQ ID NO: 4815545 - DNA, 25 bp, Homo sapien
tcaattgtgtgcgtccgtgtcgcgg

SEQ ID NO: 4815546 - DNA, 25 bp, Homo sapien
aatacttcaattgtgtgcgtccgtg

SEQ ID NO: 4815547 - DNA, 25 bp, Homo sapien
ctcaaatacttcaattgtgtgcgtc

SEQ ID NO: 4815548 - DNA, 25 bp, Homo sapien
acttcaattgtgtgcgtccgtgtcg

SEQ ID NO: 4815549 - DNA, 25 bp, Homo sapien
ttttgcgagtagggcctgggcagca

SEQ ID NO: 4815550 - DNA, 25 bp, Homo sapien
gaatgcatggccaagggcagcccca

SEQ ID NO: 4815551 - DNA, 25 bp, Homo sapien
ccaggaatgcatggccaagggcagc

SEQ ID NO: 4815552 - DNA, 25 bp, Homo sapien
caccaggaatgcatggccaagggca

SEQ ID NO: 4815553 - DNA, 25 bp, Homo sapien
gacaccaggaatgcatggccaaggg

SEQ ID NO: 4815554 - DNA, 25 bp, Homo sapien
aggacaaggctaggatgggctcccc

SEQ ID NO: 4815555 - DNA, 25 bp, Homo sapien
aacgaggccgtgtccaacccgctgg

SEQ ID NO: 4815556 - DNA, 25 bp, Homo sapien
cctcactgcaccaacgaggccgtgt

SEQ ID NO: 4815557 - DNA, 25 bp, Homo sapien
agcaggacaaggctaggatgggctc

SEQ ID NO: 4815558 - DNA, 25 bp, Homo sapien
caaaatagaactgccgtgggtaata

SEQ ID NO: 4815559 - DNA, 25 bp, Homo sapien
tagaactgccgtgggtaatatagcc

SEQ ID NO: 4815560 - DNA, 25 bp, Homo sapien
ctatcaaaatagaactgccgtgggt

SEQ ID NO: 4815561 - DNA, 25 bp, Homo sapien
cgtgggtaatatagccattcctgaa

SEQ ID NO: 4815562 - DNA, 25 bp, Homo sapien
aagaaacatcggcagtgagggctcc

SEQ ID NO: 4815563 - DNA, 25 bp, Homo sapien
caaagagccgagactttcagcgagg

SEQ ID NO: 4815564 - DNA, 25 bp, Homo sapien
ttgactcgaatctgaaacctctggg

SEQ ID NO: 4815565 - DNA, 25 bp, Homo sapien
tgcaatacagttcctgcccgcatgg

SEQ ID NO: 4815566 - DNA, 25 bp, Homo sapien
gctatgcaaatgagaggctcttctc

SEQ ID NO: 4815567 - DNA, 25 bp, Homo sapien
cctccgcttgccagcaattaactta

SEQ ID NO: 4815568 - DNA, 25 bp, Homo sapien
tcctctctggtcattagtatccttt

SEQ ID NO: 4815569 - DNA, 25 bp, Homo sapien
gctgtcaggtggctcgtcctctctg

SEQ ID NO: 4815570 - DNA, 25 bp, Homo sapien
cacgaatgttaatcgcataattggg

SEQ ID NO: 4815571 - DNA, 25 bp, Homo sapien
cagggtaattagacacgatttcctc

SEQ ID NO: 4815572 - DNA, 25 bp, Homo sapien
tcgcataattgggtcttcaacaggg

SEQ ID NO: 4815573 - DNA, 25 bp, Homo sapien
tagcttatagccacgaatgttaatc

SEQ ID NO: 4815574 - DNA, 25 bp, Homo sapien
ttcgggcgcatcgtccgccaggtaa

SEQ ID NO: 4815575 - DNA, 25 bp, Homo sapien
aaggctaattattgttgagcggaga

SEQ ID NO: 4815576 - DNA, 25 bp, Homo sapien
catctggttaaagcgaattcgggcg

SEQ ID NO: 4815577 - DNA, 25 bp, Homo sapien
cagcagtcgcgatccattgtcacag

SEQ ID NO: 4815578 - DNA, 25 bp, Homo sapien
ggggggtcacactcgtgccccttgc

SEQ ID NO: 4815579 - DNA, 25 bp, Homo sapien
ggtcacactcgtgccccttgcctgg

SEQ ID NO: 4815580 - DNA, 25 bp, Homo sapien
ctgggggggtcacactcgtgcccct

SEQ ID NO: 4815581 - DNA, 25 bp, Homo sapien
ggggtcacactcgtgccccttgcct

SEQ ID NO: 4815582 - DNA, 25 bp, Homo sapien
atgaggaccgcgctcgatggcgtcc

SEQ ID NO: 4815583 - DNA, 25 bp, Homo sapien
ggtttgactttcatggctatgaatc

SEQ ID NO: 4815584 - DNA, 25 bp, Homo sapien
ctcagtgccatgaggaccgcgctcg

SEQ ID NO: 4815585 - DNA, 25 bp, Homo sapien
atctcggaatgaataaagagcccag

SEQ ID NO: 4815586 - DNA, 25 bp, Homo sapien
tactgctcagtggaatataatttag

SEQ ID NO: 4815587 - DNA, 25 bp, Homo sapien
tatgtgccatgggtttatgaggtag

SEQ ID NO: 4815588 - DNA, 25 bp, Homo sapien
gaatcaagagattgatactgctcag

SEQ ID NO: 4815589 - DNA, 25 bp, Homo sapien
ggtaggagtcagacaaaacattgca

SEQ ID NO: 4815590 - DNA, 25 bp, Homo sapien
caaagaggtctatttttgtgtccaa

SEQ ID NO: 4815591 - DNA, 25 bp, Homo sapien
cactgagtagcttacccttccccga

SEQ ID NO: 4815592 - DNA, 25 bp, Homo sapien
tgttttctgataagccaaagaggtc

SEQ ID NO: 4815593 - DNA, 25 bp, Homo sapien
tatttgacaaggagacaatagcttt

SEQ ID NO: 4815594 - DNA, 25 bp, Homo sapien
taagattactttctgagttaatcat

SEQ ID NO: 4815595 - DNA, 25 bp, Homo sapien
gtatctgaacttgaaggtttacggc

SEQ ID NO: 4815596 - DNA, 25 bp, Homo sapien
tctgaacttgaaggtttacggctaa

SEQ ID NO: 4815597 - DNA, 25 bp, Homo sapien
gattactttctgagttaatcataaa

SEQ ID NO: 4815598 - DNA, 25 bp, Homo sapien
gaaaatataccttcaatgactacga

SEQ ID NO: 4815599 - DNA, 25 bp, Homo sapien
tcctgcctgtccttcgccctagggt

SEQ ID NO: 4815600 - DNA, 25 bp, Homo sapien
taaattggcattctttactaagtct

SEQ ID NO: 4815601 - DNA, 25 bp, Homo sapien
cgaaaggatgatcaacagcagcata

SEQ ID NO: 4815602 - DNA, 25 bp, Homo sapien
ataacggcagtaaaacaggatgctc

SEQ ID NO: 4815603 - DNA, 25 bp, Homo sapien
caggatgctcaggttaacactatca

SEQ ID NO: 4815604 - DNA, 25 bp, Homo sapien
gctgccctgggcctaaacaggtttc

SEQ ID NO: 4815605 - DNA, 25 bp, Homo sapien
ggttaacactatcagatccccgctg

SEQ ID NO: 4815606 - DNA, 25 bp, Homo sapien
ctggggctcactgttggttgaattc

SEQ ID NO: 4815607 - DNA, 25 bp, Homo sapien
gggctcactgttggttgaattcatt

SEQ ID NO: 4815608 - DNA, 25 bp, Homo sapien
tctcacattttccacggcccccatc

SEQ ID NO: 4815609 - DNA, 25 bp, Homo sapien
ggctcactgttggttgaattcattt

SEQ ID NO: 4815610 - DNA, 25 bp, Homo sapien
tgtataacaattccccaaggaaggc

SEQ ID NO: 4815611 - DNA, 25 bp, Homo sapien
aaaacatccattgatttgtataaca

SEQ ID NO: 4815612 - DNA, 25 bp, Homo sapien
gggtccatcaaggagggtgaaagcc

SEQ ID NO: 4815613 - DNA, 25 bp, Homo sapien
cagatgagggtccatcaaggagggt

SEQ ID NO: 4815614 - DNA, 25 bp, Homo sapien
cgtgaaggcttgtgtaacctggacc

SEQ ID NO: 4815615 - DNA, 25 bp, Homo sapien
aatggggatgaccaggagacattcc

SEQ ID NO: 4815616 - DNA, 25 bp, Homo sapien
tgaaggcttgtgtaacctggacccc

SEQ ID NO: 4815617 - DNA, 25 bp, Homo sapien
aacacgtgaaggcttgtgtaacctg

SEQ ID NO: 4815618 - DNA, 25 bp, Homo sapien
ggcttggccagggctgctggcttgg

SEQ ID NO: 4815619 - DNA, 25 bp, Homo sapien
gcttggccagggctgctggcttggc

SEQ ID NO: 4815620 - DNA, 25 bp, Homo sapien
ctggagagggggtgcccaggggctt

SEQ ID NO: 4815621 - DNA, 25 bp, Homo sapien
ggtgcccaggggcttggccagggct

SEQ ID NO: 4815622 - DNA, 25 bp, Homo sapien
cagcaggtgtgcctggtcgaggtcc

SEQ ID NO: 4815623 - DNA, 25 bp, Homo sapien
ggacgccgtgtagcacccagccttt

SEQ ID NO: 4815624 - DNA, 25 bp, Homo sapien
ccagcctttctggatgcagtcctgc

SEQ ID NO: 4815625 - DNA, 25 bp, Homo sapien
agcaccttcatgaggaggctgtcag

SEQ ID NO: 4815626 - DNA, 25 bp, Homo sapien
aaggggggcaagtgagtaccctgct

SEQ ID NO: 4815627 - DNA, 25 bp, Homo sapien
gtgagtaccctgctggccggcagcc

SEQ ID NO: 4815628 - DNA, 25 bp, Homo sapien
gggggcaagtgagtaccctgctggc

SEQ ID NO: 4815629 - DNA, 25 bp, Homo sapien
gaaggggggcaagtgagtaccctgc

SEQ ID NO: 4815630 - DNA, 25 bp, Homo sapien
tccctttcctggacacgacaccatc

SEQ ID NO: 4815631 - DNA, 25 bp, Homo sapien
ttccctttcctggacacgacaccat

SEQ ID NO: 4815632 - DNA, 25 bp, Homo sapien
cctttcctggacacgacaccatccc

SEQ ID NO: 4815633 - DNA, 25 bp, Homo sapien
tttccctttcctggacacgacacca

SEQ ID NO: 4815634 - DNA, 25 bp, Homo sapien
tcacccagtgggtagttgctgacca

SEQ ID NO: 4815635 - DNA, 25 bp, Homo sapien
ccccagaaggagtcggagtcagagt

SEQ ID NO: 4815636 - DNA, 25 bp, Homo sapien
gagtcagagtcggttccttccagag

SEQ ID NO: 4815637 - DNA, 25 bp, Homo sapien
tacggtctacgcagcaagcctgact

SEQ ID NO: 4815638 - DNA, 25 bp, Homo sapien
ttgatgtcaagatgagcatcagtgt

SEQ ID NO: 4815639 - DNA, 25 bp, Homo sapien
tcatccctcacattcgcttcaaact

SEQ ID NO: 4815640 - DNA, 25 bp, Homo sapien
tcgcttcaaactgcccggtgtaact

SEQ ID NO: 4815641 - DNA, 25 bp, Homo sapien
agccctccttgaaattgatgtcaag

SEQ ID NO: 4815642 - DNA, 25 bp, Homo sapien
aaggatcccaataggacccaggagg

SEQ ID NO: 4815643 - DNA, 25 bp, Homo sapien
ggatcccaataggacccaggaggtc

SEQ ID NO: 4815644 - DNA, 25 bp, Homo sapien
ctgaaggatcccaataggacccagg

SEQ ID NO: 4815645 - DNA, 25 bp, Homo sapien
tgaaggatcccaataggacccagga

SEQ ID NO: 4815646 - DNA, 25 bp, Homo sapien
agtgaacgccgccagcaacgcacag

SEQ ID NO: 4815647 - DNA, 25 bp, Homo sapien
gctggtgaaacatgggttctgcatc

SEQ ID NO: 4815648 - DNA, 25 bp, Homo sapien
aggacctggcgccaggtgtttctgt

SEQ ID NO: 4815649 - DNA, 25 bp, Homo sapien
agaaatcctgcgtgccctgaaggcc

SEQ ID NO: 4815650 - DNA, 25 bp, Homo sapien
gcttcaagctgcacctgccgttggg

SEQ ID NO: 4815651 - DNA, 25 bp, Homo sapien
caatgagaaagaacccgtgtcagct

SEQ ID NO: 4815652 - DNA, 25 bp, Homo sapien
ctccctgatcataagtgtagaggct

SEQ ID NO: 4815653 - DNA, 25 bp, Homo sapien
gtgtcagctcccgtcaggcgaggat

SEQ ID NO: 4815654 - DNA, 25 bp, Homo sapien
aaggctttttgatcttttggtgacg

SEQ ID NO: 4815655 - DNA, 25 bp, Homo sapien
aagacaaggcacactttcaaaatca

SEQ ID NO: 4815656 - DNA, 25 bp, Homo sapien
aaagcatcattttcataccggagaa

SEQ ID NO: 4815657 - DNA, 25 bp, Homo sapien
tttccccactggactagccattgag

SEQ ID NO: 4815658 - DNA, 25 bp, Homo sapien
gcttgctggaaacgggcagagggtc

SEQ ID NO: 4815659 - DNA, 25 bp, Homo sapien
cttgctggaaacgggcagagggtcc

SEQ ID NO: 4815660 - DNA, 25 bp, Homo sapien
ggcttgctggaaacgggcagagggt

SEQ ID NO: 4815661 - DNA, 25 bp, Homo sapien
tctggaagttctgaaagcctcaggg

SEQ ID NO: 4815662 - DNA, 25 bp, Homo sapien
gcagtgttcggaagctgaattccac

SEQ ID NO: 4815663 - DNA, 25 bp, Homo sapien
ggggaatctgggatgtctccaatga

SEQ ID NO: 4815664 - DNA, 25 bp, Homo sapien
ccaaaggtatatgggagagcaccaa

SEQ ID NO: 4815665 - DNA, 25 bp, Homo sapien
ccctgttagtggttatgaatgtaaa

SEQ ID NO: 4815666 - DNA, 25 bp, Homo sapien
tgggtggttccagcgctcctgctct

SEQ ID NO: 4815667 - DNA, 25 bp, Homo sapien
tgctctgcgagctgagcgctttggt

SEQ ID NO: 4815668 - DNA, 25 bp, Homo sapien
gcgagctgagcgctttggttttctc

SEQ ID NO: 4815669 - DNA, 25 bp, Homo sapien
gagctcgccaaacgtggtcctatct

SEQ ID NO: 4815670 - DNA, 25 bp, Homo sapien
ccaaacgtggtcctatctgccacag

SEQ ID NO: 4815671 - DNA, 25 bp, Homo sapien
gctggatgagctcgccaaacgtggt

SEQ ID NO: 4815672 - DNA, 25 bp, Homo sapien
gatgagctcgccaaacgtggtccta

SEQ ID NO: 4815673 - DNA, 25 bp, Homo sapien
agtacgatggttgctttggacatag

SEQ ID NO: 4815674 - DNA, 25 bp, Homo sapien
cgagcagcagcaccctcggggtgaa

SEQ ID NO: 4815675 - DNA, 25 bp, Homo sapien
tggttgctttggacataggtcagag

SEQ ID NO: 4815676 - DNA, 25 bp, Homo sapien
gggcattagtacgatggttgctttg

SEQ ID NO: 4815677 - DNA, 25 bp, Homo sapien
gaagccccggaactaggctggtctc

SEQ ID NO: 4815678 - DNA, 25 bp, Homo sapien
cacccgctggctgattgctcccttc

SEQ ID NO: 4815679 - DNA, 25 bp, Homo sapien
tagcaatgaggtttaagcaccgagt

SEQ ID NO: 4815680 - DNA, 25 bp, Homo sapien
ccgcatctccgagctcagtgtagca

SEQ ID NO: 4815681 - DNA, 25 bp, Homo sapien
aggctgttcaatccacgccggcaaa

SEQ ID NO: 4815682 - DNA, 25 bp, Homo sapien
agtggctcccgagctgctgtgaaca

SEQ ID NO: 4815683 - DNA, 25 bp, Homo sapien
gtggctcccgagctgctgtgaacat

SEQ ID NO: 4815684 - DNA, 25 bp, Homo sapien
cagtggctcccgagctgctgtgaac

SEQ ID NO: 4815685 - DNA, 25 bp, Homo sapien
gatgttcctatgatactccagcagt

SEQ ID NO: 4815686 - DNA, 25 bp, Homo sapien
tcagattcgggtggccagtcaaagg

SEQ ID NO: 4815687 - DNA, 25 bp, Homo sapien
tctggcaccatgagacggttctgga

SEQ ID NO: 4815688 - DNA, 25 bp, Homo sapien
ggtagaagacgtccacacatggctg

SEQ ID NO: 4815689 - DNA, 25 bp, Homo sapien
tgccagccactctgataggcacctg

SEQ ID NO: 4815690 - DNA, 25 bp, Homo sapien
actctgataggcacctgcagactcc

SEQ ID NO: 4815691 - DNA, 25 bp, Homo sapien
catcccatcacccattaggttggta

SEQ ID NO: 4815692 - DNA, 25 bp, Homo sapien
tttcatcctcaagtacagataagaa

SEQ ID NO: 4815693 - DNA, 25 bp, Homo sapien
ctgtggcagccttcctcgtgtccct

SEQ ID NO: 4815694 - DNA, 25 bp, Homo sapien
ttgccagtgtcttccagctcagagc

SEQ ID NO: 4815695 - DNA, 25 bp, Homo sapien
cagagcccagcctgtggcagccttc

SEQ ID NO: 4815696 - DNA, 25 bp, Homo sapien
tgccagtgtcttccagctcagagcc

SEQ ID NO: 4815697 - DNA, 25 bp, Homo sapien
tcaggaaatggtagacgggctgtca

SEQ ID NO: 4815698 - DNA, 25 bp, Homo sapien
gtgcccagagcagaatgcgaggtca

SEQ ID NO: 4815699 - DNA, 25 bp, Homo sapien
tagacgggctgtcatcaccatggac

SEQ ID NO: 4815700 - DNA, 25 bp, Homo sapien
tcaccatggactctgaaaccccatg

SEQ ID NO: 4815701 - DNA, 25 bp, Homo sapien
ttccccaagtttctctcgatcagga

SEQ ID NO: 4815702 - DNA, 25 bp, Homo sapien
tctctcgatcaggaccgtgtctgga

SEQ ID NO: 4815703 - DNA, 25 bp, Homo sapien
tttgagggtcgattctcttccccaa

SEQ ID NO: 4815704 - DNA, 25 bp, Homo sapien
tccagtttgagggtcgattctcttc

SEQ ID NO: 4815705 - DNA, 25 bp, Homo sapien
cagagaagaaaaggagcaaaaccag

SEQ ID NO: 4815706 - DNA, 25 bp, Homo sapien
gcagagaagaaaaggagcaaaacca

SEQ ID NO: 4815707 - DNA, 25 bp, Homo sapien
gagaagaaaaggagcaaaaccaggc

SEQ ID NO: 4815708 - DNA, 25 bp, Homo sapien
gaagaaaaggagcaaaaccaggcat

SEQ ID NO: 4815709 - DNA, 25 bp, Homo sapien
atccccagggtctggatcctcagag

SEQ ID NO: 4815710 - DNA, 25 bp, Homo sapien
tgacgtgtctgggtgtgatccccag

SEQ ID NO: 4815711 - DNA, 25 bp, Homo sapien
ccagggtctggatcctcagagcctg

SEQ ID NO: 4815712 - DNA, 25 bp, Homo sapien
gtctggatcctcagagcctgctcac

SEQ ID NO: 4815713 - DNA, 25 bp, Homo sapien
gcgtctcagggatgccatccagaat

SEQ ID NO: 4815714 - DNA, 25 bp, Homo sapien
tcagggatgccatccagaatccagc

SEQ ID NO: 4815715 - DNA, 25 bp, Homo sapien
tctcagggatgccatccagaatcca

SEQ ID NO: 4815716 - DNA, 25 bp, Homo sapien
cagggatgccatccagaatccagcc

SEQ ID NO: 4815717 - DNA, 25 bp, Homo sapien
tgaatcgctgctttcgtctttggat

SEQ ID NO: 4815718 - DNA, 25 bp, Homo sapien
gaatcgctgctttcgtctttggatt

SEQ ID NO: 4815719 - DNA, 25 bp, Homo sapien
atgaatcgctgctttcgtctttgga

SEQ ID NO: 4815720 - DNA, 25 bp, Homo sapien
aatcgctgctttcgtctttggattc

SEQ ID NO: 4815721 - DNA, 25 bp, Homo sapien
tttatcacacatcaaaaaggccgta

SEQ ID NO: 4815722 - DNA, 25 bp, Homo sapien
aaaggccgtatgctcagggcactcc

SEQ ID NO: 4815723 - DNA, 25 bp, Homo sapien
cacacatcaaaaaggccgtatgctc

SEQ ID NO: 4815724 - DNA, 25 bp, Homo sapien
atcaaaaaggccgtatgctcagggc

SEQ ID NO: 4815725 - DNA, 25 bp, Homo sapien
ctgcgaggggtatggtatcacagga

SEQ ID NO: 4815726 - DNA, 25 bp, Homo sapien
aggggtatggtatcacaggagggac

SEQ ID NO: 4815727 - DNA, 25 bp, Homo sapien
cgaggggtatggtatcacaggaggg

SEQ ID NO: 4815728 - DNA, 25 bp, Homo sapien
gggtatggtatcacaggagggacaa

SEQ ID NO: 4815729 - DNA, 25 bp, Homo sapien
caacgatgtacctaaagtggtggca

SEQ ID NO: 4815730 - DNA, 25 bp, Homo sapien
tcatagcgtttagggttacaggcaa

SEQ ID NO: 4815731 - DNA, 25 bp, Homo sapien
tactgtggattcaccccaaggtggg

SEQ ID NO: 4815732 - DNA, 25 bp, Homo sapien
tggtggcacaacgtctggcagatag

SEQ ID NO: 4815733 - DNA, 25 bp, Homo sapien
tatgcagacacatgatccacacgtg

SEQ ID NO: 4815734 - DNA, 25 bp, Homo sapien
gaacacgcgttcctgtccacatgga

SEQ ID NO: 4815735 - DNA, 25 bp, Homo sapien
tccacatggagtgctacggctctgt

SEQ ID NO: 4815736 - DNA, 25 bp, Homo sapien
tgatgcgggccatacgtttcctgag

SEQ ID NO: 4815737 - DNA, 25 bp, Homo sapien
acctgactccagggatctgcggaca

SEQ ID NO: 4815738 - DNA, 25 bp, Homo sapien
cctgactccagggatctgcggacat

SEQ ID NO: 4815739 - DNA, 25 bp, Homo sapien
ggtcagcagatgtgaacccgagcca

SEQ ID NO: 4815740 - DNA, 25 bp, Homo sapien
taagaatcacattcccggtgcgtga

SEQ ID NO: 4815741 - DNA, 25 bp, Homo sapien
gagccacgtgtggagcccataagaa

SEQ ID NO: 4815742 - DNA, 25 bp, Homo sapien
aaaattctccgcacatgacgagccg

SEQ ID NO: 4815743 - DNA, 25 bp, Homo sapien
actcagatactggaattagcggatg

SEQ ID NO: 4815744 - DNA, 25 bp, Homo sapien
aagcggctattacaagaaacttcca

SEQ ID NO: 4815745 - DNA, 25 bp, Homo sapien
gatgaaaactcgaaagcggctatta

SEQ ID NO: 4815746 - DNA, 25 bp, Homo sapien
gatgtcaccaccacgtaactcagat

SEQ ID NO: 4815747 - DNA, 25 bp, Homo sapien
agccaggcgttcctgaatcagctgg

SEQ ID NO: 4815748 - DNA, 25 bp, Homo sapien
caggcgttcctgaatcagctggacg

SEQ ID NO: 4815749 - DNA, 25 bp, Homo sapien
aatcagctggacgagcagcgcgctg

SEQ ID NO: 4815750 - DNA, 25 bp, Homo sapien
tcctgaatcagctggacgagcagcg

SEQ ID NO: 4815751 - DNA, 25 bp, Homo sapien
tatttcagaaaccactgggaaatgc

SEQ ID NO: 4815752 - DNA, 25 bp, Homo sapien
taggaagtatttcagaaaccactgg

SEQ ID NO: 4815753 - DNA, 25 bp, Homo sapien
gaagtatttcagaaaccactgggaa

SEQ ID NO: 4815754 - DNA, 25 bp, Homo sapien
gcagttaggaagtatttcagaaacc

SEQ ID NO: 4815755 - DNA, 25 bp, Homo sapien
aagccttctggcttcggtggccgta

SEQ ID NO: 4815756 - DNA, 25 bp, Homo sapien
gttcagatgtttgcagagccacatt

SEQ ID NO: 4815757 - DNA, 25 bp, Homo sapien
tcagatgtttgcagagccacattgc

SEQ ID NO: 4815758 - DNA, 25 bp, Homo sapien
gtggccgtataggaaaactcattta

SEQ ID NO: 4815759 - DNA, 25 bp, Homo sapien
ttcagccatgctgggacttgccgaa

SEQ ID NO: 4815760 - DNA, 25 bp, Homo sapien
gacaaactcgatcgcttcagccatg

SEQ ID NO: 4815761 - DNA, 25 bp, Homo sapien
ggtctctgcgttctgaatctgctct

SEQ ID NO: 4815762 - DNA, 25 bp, Homo sapien
gacttgccgaaagcaggtctctgcg

SEQ ID NO: 4815763 - DNA, 25 bp, Homo sapien
ggcgggtggacctaatattacaatc

SEQ ID NO: 4815764 - DNA, 25 bp, Homo sapien
ggacctaatattacaatcctgggca

SEQ ID NO: 4815765 - DNA, 25 bp, Homo sapien
tgttgttttccctgaggcgggtgga

SEQ ID NO: 4815766 - DNA, 25 bp, Homo sapien
tgaggcgggtggacctaatattaca

SEQ ID NO: 4815767 - DNA, 25 bp, Homo sapien
tgccgccatcaaccatgctgccctt

SEQ ID NO: 4815768 - DNA, 25 bp, Homo sapien
cacatgtgggcatggtgccgccatc

SEQ ID NO: 4815769 - DNA, 25 bp, Homo sapien
gcctgtgactccgactctggactcg

SEQ ID NO: 4815770 - DNA, 25 bp, Homo sapien
gcccgtgcccatgatgctgctgtca

SEQ ID NO: 4815771 - DNA, 25 bp, Homo sapien
tggaagctaggaaggtgttttcagc

SEQ ID NO: 4815772 - DNA, 25 bp, Homo sapien
gggcccagccctgactgtcatggaa

SEQ ID NO: 4815773 - DNA, 25 bp, Homo sapien
atggaagctaggaaggtgttttcag

SEQ ID NO: 4815774 - DNA, 25 bp, Homo sapien
ctgtcatggaagctaggaaggtgtt

SEQ ID NO: 4815775 - DNA, 25 bp, Homo sapien
tactaaatctgcctttctggcggcg

SEQ ID NO: 4815776 - DNA, 25 bp, Homo sapien
taaatctgcctttctggcggcgaag

SEQ ID NO: 4815777 - DNA, 25 bp, Homo sapien
cctctgctccctcgtgtgctcgctc

SEQ ID NO: 4815778 - DNA, 25 bp, Homo sapien
aatctgcctttctggcggcgaaggg

SEQ ID NO: 4815779 - DNA, 25 bp, Homo sapien
tctttctctctacaccagtcaccag

SEQ ID NO: 4815780 - DNA, 25 bp, Homo sapien
tctctctacaccagtcaccagccat

SEQ ID NO: 4815781 - DNA, 25 bp, Homo sapien
gccttctttctctctacaccagtca

SEQ ID NO: 4815782 - DNA, 25 bp, Homo sapien
ggatgagtccggggccttctttctc

SEQ ID NO: 4815783 - DNA, 25 bp, Homo sapien
tgtcctcagctgtaccaagcactaa

SEQ ID NO: 4815784 - DNA, 25 bp, Homo sapien
ggtgcactggtagctccttcaaagc

SEQ ID NO: 4815785 - DNA, 25 bp, Homo sapien
gctgtaccaagcactaatttcactg

SEQ ID NO: 4815786 - DNA, 25 bp, Homo sapien
cactaatttcactggtgcactggta

SEQ ID NO: 4815787 - DNA, 25 bp, Homo sapien
ctgcaccggccaactgcaaaggttt

SEQ ID NO: 4815788 - DNA, 25 bp, Homo sapien
tcggaaaagcccaagagcttgcctg

SEQ ID NO: 4815789 - DNA, 25 bp, Homo sapien
ttaacaggctccgataatgagaccg

SEQ ID NO: 4815790 - DNA, 25 bp, Homo sapien
gggagctcggaaactcattaacagg

SEQ ID NO: 4815791 - DNA, 25 bp, Homo sapien
ggatcaggagttgctccagcatgtt

SEQ ID NO: 4815792 - DNA, 25 bp, Homo sapien
cattgtcgttgtctctatgcaagtg

SEQ ID NO: 4815793 - DNA, 25 bp, Homo sapien
ggatcttcgggctggtggatcagga

SEQ ID NO: 4815794 - DNA, 25 bp, Homo sapien
ttgtctctatgcaagtgctggatca

SEQ ID NO: 4815795 - DNA, 25 bp, Homo sapien
gtgcagggcagacacccaggtggtt

SEQ ID NO: 4815796 - DNA, 25 bp, Homo sapien
gggtgcagggcagacacccaggtgg

SEQ ID NO: 4815797 - DNA, 25 bp, Homo sapien
gggcagacacccaggtggttaatac

SEQ ID NO: 4815798 - DNA, 25 bp, Homo sapien
cagggcagacacccaggtggttaat

SEQ ID NO: 4815799 - DNA, 25 bp, Homo sapien
ttagaaatataagtacatcaaatca

SEQ ID NO: 4815800 - DNA, 25 bp, Homo sapien
ataatttcaaggatatcacttagga

SEQ ID NO: 4815801 - DNA, 25 bp, Homo sapien
cacgggtttcttcgtctgggctcag

SEQ ID NO: 4815802 - DNA, 25 bp, Homo sapien
cagatggtaattgtcagcgccggga

SEQ ID NO: 4815803 - DNA, 25 bp, Homo sapien
gatggagatgccagcttgaactcgg

SEQ ID NO: 4815804 - DNA, 25 bp, Homo sapien
gttctctagagcagacaacagggct

SEQ ID NO: 4815805 - DNA, 25 bp, Homo sapien
gccccctcggggtcacggcgacaca

SEQ ID NO: 4815806 - DNA, 25 bp, Homo sapien
gaatcgtacatcccgagttgggctg

SEQ ID NO: 4815807 - DNA, 25 bp, Homo sapien
gcgactcggccccagctgcgggtcc

SEQ ID NO: 4815808 - DNA, 25 bp, Homo sapien
acatcccgagttgggctgcttcgtg

SEQ ID NO: 4815809 - DNA, 25 bp, Homo sapien
tcgtacatcccgagttgggctgctt

SEQ ID NO: 4815810 - DNA, 25 bp, Homo sapien
cgccagcgtcgcgacgggcaggggt

SEQ ID NO: 4815811 - DNA, 25 bp, Homo sapien
ccagcgtcgcgacgggcaggggtgt

SEQ ID NO: 4815812 - DNA, 25 bp, Homo sapien
ccgccgccagcgtcgcgacgggcag

SEQ ID NO: 4815813 - DNA, 25 bp, Homo sapien
gccgccagcgtcgcgacgggcaggg

SEQ ID NO: 4815814 - DNA, 25 bp, Homo sapien
catctcgggggggatacggtgcggg

SEQ ID NO: 4815815 - DNA, 25 bp, Homo sapien
ggtgcggggcgatagtggcgtccat

SEQ ID NO: 4815816 - DNA, 25 bp, Homo sapien
ctgcatcaactcgaagatgtggttc

SEQ ID NO: 4815817 - DNA, 25 bp, Homo sapien
atgtggttctcctccccgtactggg

SEQ ID NO: 4815818 - DNA, 25 bp, Homo sapien
ttctggttctgtcagtgctccccgg

SEQ ID NO: 4815819 - DNA, 25 bp, Homo sapien
gatcgggtggaaatcctcagcccaa

SEQ ID NO: 4815820 - DNA, 25 bp, Homo sapien
cgctctgcggctcgggcaagttctt

SEQ ID NO: 4815821 - DNA, 25 bp, Homo sapien
cctagtaaccgcgtcgctagggccg

SEQ ID NO: 4815822 - DNA, 25 bp, Homo sapien
gctgggtaactttgggtgagtcact

SEQ ID NO: 4815823 - DNA, 25 bp, Homo sapien
ggaaatcttggctagggccactggt

SEQ ID NO: 4815824 - DNA, 25 bp, Homo sapien
catacagccttagaaccagaaggcc

SEQ ID NO: 4815825 - DNA, 25 bp, Homo sapien
agagccagggcatgaactctgcatc

SEQ ID NO: 4815826 - DNA, 25 bp, Homo sapien
aaagcaacgacttaagcagcctcag

SEQ ID NO: 4815827 - DNA, 25 bp, Homo sapien
acaacctcctggagaaatgcaaaac

SEQ ID NO: 4815828 - DNA, 25 bp, Homo sapien
gcagcctcagagcaaagtaagtccc

SEQ ID NO: 4815829 - DNA, 25 bp, Homo sapien
gcaaaaccctcgttagccaaagcaa

SEQ ID NO: 4815830 - DNA, 25 bp, Homo sapien
ggcccttggattagaacacactgcg

SEQ ID NO: 4815831 - DNA, 25 bp, Homo sapien
tgatgggacccctttaaactgcaag

SEQ ID NO: 4815832 - DNA, 25 bp, Homo sapien
tataaagctgagtaaaaggacaccc

SEQ ID NO: 4815833 - DNA, 25 bp, Homo sapien
caagaggcgtatgcacacaaaggga

SEQ ID NO: 4815834 - DNA, 25 bp, Homo sapien
tcgtctcccaccgactgctgaatgg

SEQ ID NO: 4815835 - DNA, 25 bp, Homo sapien
tttaggctctcagaaaggctactgg

SEQ ID NO: 4815836 - DNA, 25 bp, Homo sapien
gctactggtcatgccgtcctcatca

SEQ ID NO: 4815837 - DNA, 25 bp, Homo sapien
tagtccatgatatgtagctgtccaa

SEQ ID NO: 4815838 - DNA, 25 bp, Homo sapien
ctggggtagaaagctcgctgctgct

SEQ ID NO: 4815839 - DNA, 25 bp, Homo sapien
tggggtagaaagctcgctgctgctg

SEQ ID NO: 4815840 - DNA, 25 bp, Homo sapien
gcttccactactgccccgggcgctg

SEQ ID NO: 4815841 - DNA, 25 bp, Homo sapien
ctctgcttccactactgccccgggc

SEQ ID NO: 4815842 - DNA, 25 bp, Homo sapien
ttccactactgccccgggcgctgct

SEQ ID NO: 4815843 - DNA, 25 bp, Homo sapien
tctgcttccactactgccccgggcg

SEQ ID NO: 4815844 - DNA, 25 bp, Homo sapien
gcctcttcattgtgccctaccatgg

SEQ ID NO: 4815845 - DNA, 25 bp, Homo sapien
cttcattgtgccctaccatggaatc

SEQ ID NO: 4815846 - DNA, 25 bp, Homo sapien
gcacccgtcattacaacagtcaagc

SEQ ID NO: 4815847 - DNA, 25 bp, Homo sapien
atggaatctgagcacccgtcattac

SEQ ID NO: 4815848 - DNA, 25 bp, Homo sapien
aagatctccaattcaaacacctggg

SEQ ID NO: 4815849 - DNA, 25 bp, Homo sapien
tgagcctcatacctgctctctgcgg

SEQ ID NO: 4815850 - DNA, 25 bp, Homo sapien
cctgccatataaatctaagatctcc

SEQ ID NO: 4815851 - DNA, 25 bp, Homo sapien
caaacacctgggttatccttttctg

SEQ ID NO: 4815852 - DNA, 25 bp, Homo sapien
tttctagctctttccgataggcggc

SEQ ID NO: 4815853 - DNA, 25 bp, Homo sapien
gagtctgctggagaacatggcttct

SEQ ID NO: 4815854 - DNA, 25 bp, Homo sapien
cgtttttgggaggtatcaagcctct

SEQ ID NO: 4815855 - DNA, 25 bp, Homo sapien
cttgcctggagtttgacatcctcta

SEQ ID NO: 4815856 - DNA, 25 bp, Homo sapien
ccaaatagttggcactgtaggcatg

SEQ ID NO: 4815857 - DNA, 25 bp, Homo sapien
ggcccaggcacgtttcagcagcttt

SEQ ID NO: 4815858 - DNA, 25 bp, Homo sapien
ggcagctactcaaggtcccaaacag

SEQ ID NO: 4815859 - DNA, 25 bp, Homo sapien
ttggaggccgcccatctaggcttct

SEQ ID NO: 4815860 - DNA, 25 bp, Homo sapien
tctgctgctggaccgactcactgtt

SEQ ID NO: 4815861 - DNA, 25 bp, Homo sapien
tgttcaagaactccatctgctgctg

SEQ ID NO: 4815862 - DNA, 25 bp, Homo sapien
caaatagagctcgttgacctcccca

SEQ ID NO: 4815863 - DNA, 25 bp, Homo sapien
ctgcagttgttccaaatagagctcg

SEQ ID NO: 4815864 - DNA, 25 bp, Homo sapien
tgtgacacaccttgttgttggcctt

SEQ ID NO: 4815865 - DNA, 25 bp, Homo sapien
cagctccgcaatcatgttcctgcag

SEQ ID NO: 4815866 - DNA, 25 bp, Homo sapien
agttctatccgcagctccgcaatca

SEQ ID NO: 4815867 - DNA, 25 bp, Homo sapien
ttttgggaaacctgactgagcagca

SEQ ID NO: 4815868 - DNA, 25 bp, Homo sapien
taccatagtgtcacgctgctcctgg

SEQ ID NO: 4815869 - DNA, 25 bp, Homo sapien
tgcagactaaccttccacatctgga

SEQ ID NO: 4815870 - DNA, 25 bp, Homo sapien
gaattcctctcggtcatgctgcagc

SEQ ID NO: 4815871 - DNA, 25 bp, Homo sapien
cacatctggatgtccttctcttgta

SEQ ID NO: 4815872 - DNA, 25 bp, Homo sapien
taaaagcaactggtctcggagggtg

SEQ ID NO: 4815873 - DNA, 25 bp, Homo sapien
catgctgctgcctcttaaaacgctc

SEQ ID NO: 4815874 - DNA, 25 bp, Homo sapien
cgcctgttccggagggcatgctgct

SEQ ID NO: 4815875 - DNA, 25 bp, Homo sapien
tttgatcaccttgcggaggagccgc

SEQ ID NO: 4815876 - DNA, 25 bp, Homo sapien
ctgattgtaaagcagagggagggtg

SEQ ID NO: 4815877 - DNA, 25 bp, Homo sapien
agcagagggagggtggcagaaatgc

SEQ ID NO: 4815878 - DNA, 25 bp, Homo sapien
gtaaagcagagggagggtggcagaa

SEQ ID NO: 4815879 - DNA, 25 bp, Homo sapien
aaagcagagggagggtggcagaaat

SEQ ID NO: 4815880 - DNA, 25 bp, Homo sapien
ctccaaagtgggtccagtcgacaga

SEQ ID NO: 4815881 - DNA, 25 bp, Homo sapien
cgagtgggtcttccgctgagaacct

SEQ ID NO: 4815882 - DNA, 25 bp, Homo sapien
gaggtagagggcacaccatcttcct

SEQ ID NO: 4815883 - DNA, 25 bp, Homo sapien
ctctcgtcggaggtggaattttaca

SEQ ID NO: 4815884 - DNA, 25 bp, Homo sapien
caggcccaagcttgtccagggagga

SEQ ID NO: 4815885 - DNA, 25 bp, Homo sapien
cacttagagtgacagaacctttgct

SEQ ID NO: 4815886 - DNA, 25 bp, Homo sapien
gaggccagatcacctaaaaaccctg

SEQ ID NO: 4815887 - DNA, 25 bp, Homo sapien
gtgacagaacctttgctgccaggtg

SEQ ID NO: 4815888 - DNA, 25 bp, Homo sapien
cctggaagatcacttagagtgacag

SEQ ID NO: 4815889 - DNA, 25 bp, Homo sapien
tgatcctctgtcattcagaagatgg

SEQ ID NO: 4815890 - DNA, 25 bp, Homo sapien
cctctgtcattcagaagatggtgtt

SEQ ID NO: 4815891 - DNA, 25 bp, Homo sapien
gtagacatggtcttgcagaatccat

SEQ ID NO: 4815892 - DNA, 25 bp, Homo sapien
tggtgttgtctgtgtagacatggtc

SEQ ID NO: 4815893 - DNA, 25 bp, Homo sapien
gatgtcagggaagaatgcaaggcct

SEQ ID NO: 4815894 - DNA, 25 bp, Homo sapien
cagtgggaagggcaaatgacagctt

SEQ ID NO: 4815895 - DNA, 25 bp, Homo sapien
tatttgtgccatcattgcagatgcc

SEQ ID NO: 4815896 - DNA, 25 bp, Homo sapien
ggcctcttgggataggacacttcaa

SEQ ID NO: 4815897 - DNA, 25 bp, Homo sapien
atgcaggaggattgcatgagtctgg

SEQ ID NO: 4815898 - DNA, 25 bp, Homo sapien
ctgatgcaggaggattgcatgagtc

SEQ ID NO: 4815899 - DNA, 25 bp, Homo sapien
aggcccaggtaggaggatcgtttga

SEQ ID NO: 4815900 - DNA, 25 bp, Homo sapien
gaggcccaggtaggaggatcgtttg

SEQ ID NO: 4815901 - DNA, 25 bp, Homo sapien
ttaggtcagaattctatctggcata

SEQ ID NO: 4815902 - DNA, 25 bp, Homo sapien
cattgcattttaggtcagaattcta

SEQ ID NO: 4815903 - DNA, 25 bp, Homo sapien
caaagtgaggcttgcaagtgagtca

SEQ ID NO: 4815904 - DNA, 25 bp, Homo sapien
ggatagcagacgagctggatcgcac

SEQ ID NO: 4815905 - DNA, 25 bp, Homo sapien
gggagtgaaatgtgcacgtagtcat

SEQ ID NO: 4815906 - DNA, 25 bp, Homo sapien
gtagtcatccgaatgacagagtggg

SEQ ID NO: 4815907 - DNA, 25 bp, Homo sapien
tgaaatgtgcacgtagtcatccgaa

SEQ ID NO: 4815908 - DNA, 25 bp, Homo sapien
gcacgtagtcatccgaatgacagag

SEQ ID NO: 4815909 - DNA, 25 bp, Homo sapien
tatgaacactgagcccaactattag

SEQ ID NO: 4815910 - DNA, 25 bp, Homo sapien
aagccccagggatttgcaataagtg

SEQ ID NO: 4815911 - DNA, 25 bp, Homo sapien
ccttagatctaaaagagagctcctc

SEQ ID NO: 4815912 - DNA, 25 bp, Homo sapien
caagtttacaacagcaagtggtccc

SEQ ID NO: 4815913 - DNA, 25 bp, Homo sapien
ccaaagactttactgtaagggtgtg

SEQ ID NO: 4815914 - DNA, 25 bp, Homo sapien
cacaaaccatagatgggctccaaag

SEQ ID NO: 4815915 - DNA, 25 bp, Homo sapien
tactgtaagggtgtgacagatcagg

SEQ ID NO: 4815916 - DNA, 25 bp, Homo sapien
aagttggaggagtggtcataccaca

SEQ ID NO: 4815917 - DNA, 25 bp, Homo sapien
gatgaatctaagaggcaacagtaac

SEQ ID NO: 4815918 - DNA, 25 bp, Homo sapien
ggcatcttattaaaagcgtatcaag

SEQ ID NO: 4815919 - DNA, 25 bp, Homo sapien
cgaggtttatatccatggccagtgt

SEQ ID NO: 4815920 - DNA, 25 bp, Homo sapien
gaatgctaagtcatccacgaggttt

SEQ ID NO: 4815921 - DNA, 25 bp, Homo sapien
agcaggcacactagttgacaccata

SEQ ID NO: 4815922 - DNA, 25 bp, Homo sapien
aaatctgacccaaagggtcagcttc

SEQ ID NO: 4815923 - DNA, 25 bp, Homo sapien
gcaggcacactagttgacaccatac

SEQ ID NO: 4815924 - DNA, 25 bp, Homo sapien
ctaaatctgacccaaagggtcagct

SEQ ID NO: 4815925 - DNA, 25 bp, Homo sapien
acaacatcagccgagacgtggagta

SEQ ID NO: 4815926 - DNA, 25 bp, Homo sapien
gagtaaggggtagaagtagcacacc

SEQ ID NO: 4815927 - DNA, 25 bp, Homo sapien
tatcagccgtgtcgatggggaactc

SEQ ID NO: 4815928 - DNA, 25 bp, Homo sapien
agtctgaggtagctgccctggcata

SEQ ID NO: 4815929 - DNA, 25 bp, Homo sapien
gagattttggcacactcgatcacaa

SEQ ID NO: 4815930 - DNA, 25 bp, Homo sapien
catcggctgaacgatgaggaaagcg

SEQ ID NO: 4815931 - DNA, 25 bp, Homo sapien
ctcgatcacaacatcatgagtttct

SEQ ID NO: 4815932 - DNA, 25 bp, Homo sapien
gccatcttcatatgaggcttctgtg

SEQ ID NO: 4815933 - DNA, 25 bp, Homo sapien
cattagatgacataaaacgcttata

SEQ ID NO: 4815934 - DNA, 25 bp, Homo sapien
aatcatgctttccacgtgcctgtac

SEQ ID NO: 4815935 - DNA, 25 bp, Homo sapien
catagcaagactgtgccgcaaaaaa

SEQ ID NO: 4815936 - DNA, 25 bp, Homo sapien
gagacacacccgcaaatatatctga

SEQ ID NO: 4815937 - DNA, 25 bp, Homo sapien
cttcgagggtccagttcatggtcct

SEQ ID NO: 4815938 - DNA, 25 bp, Homo sapien
cagttcatggtccttggatccagtc

SEQ ID NO: 4815939 - DNA, 25 bp, Homo sapien
ggatccagtcactaattccggatga

SEQ ID NO: 4815940 - DNA, 25 bp, Homo sapien
ggatgaattcgcacatgctccatca

SEQ ID NO: 4815941 - DNA, 25 bp, Homo sapien
tgaccacttcttcaaaagtctccag

SEQ ID NO: 4815942 - DNA, 25 bp, Homo sapien
ccacttcttcaaaagtctccaggtt

SEQ ID NO: 4815943 - DNA, 25 bp, Homo sapien
gaccacttcttcaaaagtctccagg

SEQ ID NO: 4815944 - DNA, 25 bp, Homo sapien
cttgaccacttcttcaaaagtctcc

SEQ ID NO: 4815945 - DNA, 25 bp, Homo sapien
gacgagatagacttccgccacgtgg

SEQ ID NO: 4815946 - DNA, 25 bp, Homo sapien
taatgagaacgcaaaaaggagacga

SEQ ID NO: 4815947 - DNA, 25 bp, Homo sapien
gagtgcgtacacactggcatggaga

SEQ ID NO: 4815948 - DNA, 25 bp, Homo sapien
caagggtacattccataaaggcgat

SEQ ID NO: 4815949 - DNA, 25 bp, Homo sapien
caacaggtatatgaggagatctgta

SEQ ID NO: 4815950 - DNA, 25 bp, Homo sapien
aacaggtatatgaggagatctgtac

SEQ ID NO: 4815951 - DNA, 25 bp, Homo sapien
caagaagatgctgtttcccagactg

SEQ ID NO: 4815952 - DNA, 25 bp, Homo sapien
ggttatcaacaccaagacgcctgtt

SEQ ID NO: 4815953 - DNA, 25 bp, Homo sapien
ggaatcattggtagcatggttatca

SEQ ID NO: 4815954 - DNA, 25 bp, Homo sapien
ttcaggcaccatgatgacagacggc

SEQ ID NO: 4815955 - DNA, 25 bp, Homo sapien
cctaaggattactgaagggataaca

SEQ ID NO: 4815956 - DNA, 25 bp, Homo sapien
cattgtacagtacatgaagaggctc

SEQ ID NO: 4815957 - DNA, 25 bp, Homo sapien
cacaaatcacaagttgactcacgta

SEQ ID NO: 4815958 - DNA, 25 bp, Homo sapien
gtactcatttccctatccctaagga

SEQ ID NO: 4815959 - DNA, 25 bp, Homo sapien
catattcgttaatcctgtccaagag

SEQ ID NO: 4815960 - DNA, 25 bp, Homo sapien
tatgacatgacccagtaacgagagg

SEQ ID NO: 4815961 - DNA, 25 bp, Homo sapien
tggataaacgagtggcggctttgcc

SEQ ID NO: 4815962 - DNA, 25 bp, Homo sapien
ggtgcttgagagagcttatgcttcc

SEQ ID NO: 4815963 - DNA, 25 bp, Homo sapien
atcagtggcgcacagaaatcaaaag

SEQ ID NO: 4815964 - DNA, 25 bp, Homo sapien
cagaagctgttgtactcatgaagaa

SEQ ID NO: 4815965 - DNA, 25 bp, Homo sapien
taagctcaggacaagttgcacagtg

SEQ ID NO: 4815966 - DNA, 25 bp, Homo sapien
caagaatcatgggtcctacaaagta

SEQ ID NO: 4815967 - DNA, 25 bp, Homo sapien
gctggtttccaggtaataatccacc

SEQ ID NO: 4815968 - DNA, 25 bp, Homo sapien
caaggtggtcaggatgtgcaatgcc

SEQ ID NO: 4815969 - DNA, 25 bp, Homo sapien
atgtggctcttgcaaggtggtcagg

SEQ ID NO: 4815970 - DNA, 25 bp, Homo sapien
tccaccaaggtgtttacaagcatag

SEQ ID NO: 4815971 - DNA, 25 bp, Homo sapien
catggcaagaagctccccgacattt

SEQ ID NO: 4815972 - DNA, 25 bp, Homo sapien
tccccgacatttgcttgttgggcca

SEQ ID NO: 4815973 - DNA, 25 bp, Homo sapien
agcatggcaagaagctccccgacat

SEQ ID NO: 4815974 - DNA, 25 bp, Homo sapien
taaagacagctgtcacgtcgtcccg

SEQ ID NO: 4815975 - DNA, 25 bp, Homo sapien
gaaggttcttcattggggccactac

SEQ ID NO: 4815976 - DNA, 25 bp, Homo sapien
tggctccaggacgtgtgctacaggt

SEQ ID NO: 4815977 - DNA, 25 bp, Homo sapien
tctctcgctcgaaggcgctgtgctg

SEQ ID NO: 4815978 - DNA, 25 bp, Homo sapien
ccaggacgtgtgctacaggttctga

SEQ ID NO: 4815979 - DNA, 25 bp, Homo sapien
tctgtgtagtcagaagacgataatg

SEQ ID NO: 4815980 - DNA, 25 bp, Homo sapien
tatttgtctagggagactctgagtt

SEQ ID NO: 4815981 - DNA, 25 bp, Homo sapien
gataatgtcatatctggtcctccaa

SEQ ID NO: 4815982 - DNA, 25 bp, Homo sapien
tactatttgtctagggagactctga

SEQ ID NO: 4815983 - DNA, 25 bp, Homo sapien
tgtagagctgtaagacaaaaatccc

SEQ ID NO: 4815984 - DNA, 25 bp, Homo sapien
tcaagaccctacttatgaaccaatg

SEQ ID NO: 4815985 - DNA, 25 bp, Homo sapien
gagtaacctagcagccggtagtgcc

SEQ ID NO: 4815986 - DNA, 25 bp, Homo sapien
gacatagtgaccacaggagtaacct

SEQ ID NO: 4815987 - DNA, 25 bp, Homo sapien
tgagcctcggcatgagtcacagagc

SEQ ID NO: 4815988 - DNA, 25 bp, Homo sapien
ttccatccgtggaaatgccggcgcc

SEQ ID NO: 4815989 - DNA, 25 bp, Homo sapien
taaatccctgaatgcacgaccatgg

SEQ ID NO: 4815990 - DNA, 25 bp, Homo sapien
tgccggcgcctcaacatttatgaag

SEQ ID NO: 4815991 - DNA, 25 bp, Homo sapien
tagcgacaactggtacttcagtttc

SEQ ID NO: 4815992 - DNA, 25 bp, Homo sapien
ctgttctagcgacaactggtacttc

SEQ ID NO: 4815993 - DNA, 25 bp, Homo sapien
tggtacttcagtttccagtgctgtc

SEQ ID NO: 4815994 - DNA, 25 bp, Homo sapien
agtgctgtcaacctggtgtctttca

SEQ ID NO: 4815995 - DNA, 25 bp, Homo sapien
gcttagcagtctatccatttaacaa

SEQ ID NO: 4815996 - DNA, 25 bp, Homo sapien
taaaatggatacagttcaagtttgt

SEQ ID NO: 4815997 - DNA, 25 bp, Homo sapien
caaaaatggattgctgggtacataa

SEQ ID NO: 4815998 - DNA, 25 bp, Homo sapien
tttgaaacattgatacaaccattgt

SEQ ID NO: 4815999 - DNA, 25 bp, Homo sapien
ccgtctcctccccctcagctgttta

SEQ ID NO: 4816000 - DNA, 25 bp, Homo sapien
ccaccgtctcctccccctcagctgt

SEQ ID NO: 4816001 - DNA, 25 bp, Homo sapien
accgtctcctccccctcagctgttt

SEQ ID NO: 4816002 - DNA, 25 bp, Homo sapien
cgtctcctccccctcagctgtttac

SEQ ID NO: 4816003 - DNA, 25 bp, Homo sapien
cctccagcctacagggcgccgccat

SEQ ID NO: 4816004 - DNA, 25 bp, Homo sapien
ccgccatcttggacgtacagcacct

SEQ ID NO: 4816005 - DNA, 25 bp, Homo sapien
gaaagactgatcctactctgctcaa

SEQ ID NO: 4816006 - DNA, 25 bp, Homo sapien
gactgatcctactctgctcaaggcc

SEQ ID NO: 4816007 - DNA, 25 bp, Homo sapien
gacatgggaaagactgatcctactc

SEQ ID NO: 4816008 - DNA, 25 bp, Homo sapien
gatcctactctgctcaaggccaggt

SEQ ID NO: 4816009 - DNA, 25 bp, Homo sapien
gagcagatgggctttacgacagtag

SEQ ID NO: 4816010 - DNA, 25 bp, Homo sapien
cagatgggctttacgacagtaggac

SEQ ID NO: 4816011 - DNA, 25 bp, Homo sapien
tgggctttacgacagtaggacccag

SEQ ID NO: 4816012 - DNA, 25 bp, Homo sapien
tttgcttctggtttcatcaagaatt

SEQ ID NO: 4816013 - DNA, 25 bp, Homo sapien
ctgcagcccccggtaaggagcctgg

SEQ ID NO: 4816014 - DNA, 25 bp, Homo sapien
gatgaccaggtggacgtttcctact

SEQ ID NO: 4816015 - DNA, 25 bp, Homo sapien
aagaggtccgtagccgccgatgacc

SEQ ID NO: 4816016 - DNA, 25 bp, Homo sapien
cctggaaagaggtccgtagccgccg

SEQ ID NO: 4816017 - DNA, 25 bp, Homo sapien
ggcaccaagatgtacatagagcaga

SEQ ID NO: 4816018 - DNA, 25 bp, Homo sapien
cacttttctggcaccaagatgtaca

SEQ ID NO: 4816019 - DNA, 25 bp, Homo sapien
atagagcagacgagccccaatgccc

SEQ ID NO: 4816020 - DNA, 25 bp, Homo sapien
tcagcgcactcgcagcgggacagag

SEQ ID NO: 4816021 - DNA, 25 bp, Homo sapien
tggagggcagggaccaccgggtcca

SEQ ID NO: 4816022 - DNA, 25 bp, Homo sapien
ccggcctcagcagtggtggttccca

SEQ ID NO: 4816023 - DNA, 25 bp, Homo sapien
tgtccttatagagggcccgtggccc

SEQ ID NO: 4816024 - DNA, 25 bp, Homo sapien
cggcctcagcagtggtggttcccat

SEQ ID NO: 4816025 - DNA, 25 bp, Homo sapien
gccggagctgtccttatagagggcc

SEQ ID NO: 4816026 - DNA, 25 bp, Homo sapien
gatcagtctgtaggtgcccacctct

SEQ ID NO: 4816027 - DNA, 25 bp, Homo sapien
acggtcccagcccaggatcagtctg

SEQ ID NO: 4816028 - DNA, 25 bp, Homo sapien
gggaacggtcccagcccaggatcag

SEQ ID NO: 4816029 - DNA, 25 bp, Homo sapien
gcccaggatcagtctgtaggtgccc

SEQ ID NO: 4816030 - DNA, 25 bp, Homo sapien
gtttgccgccagaacacaggtgtcg

SEQ ID NO: 4816031 - DNA, 25 bp, Homo sapien
tatcaacattgtcgtcattggacac

SEQ ID NO: 4816032 - DNA, 25 bp, Homo sapien
tgccgccagaacacaggtgtcgtga

SEQ ID NO: 4816033 - DNA, 25 bp, Homo sapien
cgccagaacacaggtgtcgtgaaaa

SEQ ID NO: 4816034 - DNA, 25 bp, Homo sapien
ggccatctgatctataaatgcggtg

SEQ ID NO: 4816035 - DNA, 25 bp, Homo sapien
tactggccatctgatctataaatgc

SEQ ID NO: 4816036 - DNA, 25 bp, Homo sapien
atctgatctataaatgcggtggcat

SEQ ID NO: 4816037 - DNA, 25 bp, Homo sapien
tctataaatgcggtggcatcgacaa

SEQ ID NO: 4816038 - DNA, 25 bp, Homo sapien
ctctggactgcatcctaccaccaac

SEQ ID NO: 4816039 - DNA, 25 bp, Homo sapien
tctggactgcatcctaccaccaact

SEQ ID NO: 4816040 - DNA, 25 bp, Homo sapien
ctggactgcatcctaccaccaactc

SEQ ID NO: 4816041 - DNA, 25 bp, Homo sapien
ggctctggactgcatcctaccacca

SEQ ID NO: 4816042 - DNA, 25 bp, Homo sapien
gtaaaatctgtcgaaatgcaccatg

SEQ ID NO: 4816043 - DNA, 25 bp, Homo sapien
gaagtaaaatctgtcgaaatgcacc

SEQ ID NO: 4816044 - DNA, 25 bp, Homo sapien
taaaatctgtcgaaatgcaccatga

SEQ ID NO: 4816045 - DNA, 25 bp, Homo sapien
aaatctgtcgaaatgcaccatgaag

SEQ ID NO: 4816046 - DNA, 25 bp, Homo sapien
tgagagcttctcagactatccacct

SEQ ID NO: 4816047 - DNA, 25 bp, Homo sapien
agcttctcagactatccacctttgg

SEQ ID NO: 4816048 - DNA, 25 bp, Homo sapien
tgatcgccgttctggtaaaaagctg

SEQ ID NO: 4816049 - DNA, 25 bp, Homo sapien
aaggaaaagattgatcgccgttctg

SEQ ID NO: 4816050 - DNA, 25 bp, Homo sapien
gcatcgtaaaaccttcagaaggaaa

SEQ ID NO: 4816051 - DNA, 25 bp, Homo sapien
tggttaatgataacaatgcatcgta

SEQ ID NO: 4816052 - DNA, 25 bp, Homo sapien
taatgataacaatgcatcgtaaaac

SEQ ID NO: 4816053 - DNA, 25 bp, Homo sapien
taacaatgcatcgtaaaaccttcag

SEQ ID NO: 4816054 - DNA, 25 bp, Homo sapien
ttttgcgtgtggcagttttaagtta

SEQ ID NO: 4816055 - DNA, 25 bp, Homo sapien
aaatttgtcacagaagtttgagacc

SEQ ID NO: 4816056 - DNA, 25 bp, Homo sapien
tgaccaaaaatttgtcacagaagtt

SEQ ID NO: 4816057 - DNA, 25 bp, Homo sapien
cttgaccaaaaatttgtcacagaag

SEQ ID NO: 4816058 - DNA, 25 bp, Homo sapien
aaacagtcagaagactggtgaacat

SEQ ID NO: 4816059 - DNA, 25 bp, Homo sapien
atggaatgaggacaaaaggacacaa

SEQ ID NO: 4816060 - DNA, 25 bp, Homo sapien
catctcaaggcatggtaaattctgg

SEQ ID NO: 4816061 - DNA, 25 bp, Homo sapien
tattgatttacaattgcaggcaagg

SEQ ID NO: 4816062 - DNA, 25 bp, Homo sapien
tctcaggaggtgttctttcaaagct

SEQ ID NO: 4816063 - DNA, 25 bp, Homo sapien
gctggtggttgatttcccactgtac

SEQ ID NO: 4816064 - DNA, 25 bp, Homo sapien
ggaaacacgtggttcttctagctca

SEQ ID NO: 4816065 - DNA, 25 bp, Homo sapien
gacccagccttccaattacaataca

SEQ ID NO: 4816066 - DNA, 25 bp, Homo sapien
ggcctccaactgctgggctcaactg

SEQ ID NO: 4816067 - DNA, 25 bp, Homo sapien
agtagttgggactactgtggcatgc

SEQ ID NO: 4816068 - DNA, 25 bp, Homo sapien
tagaaatggggtcttcccctgttgc

SEQ ID NO: 4816069 - DNA, 25 bp, Homo sapien
atgcaccaccatggccggctaattt

SEQ ID NO: 4816070 - DNA, 25 bp, Homo sapien
aagcaggcggatcatttgaggtcaa

SEQ ID NO: 4816071 - DNA, 25 bp, Homo sapien
ccgaagcaggcggatcatttgaggt

SEQ ID NO: 4816072 - DNA, 25 bp, Homo sapien
aggccgaagcaggcggatcatttga

SEQ ID NO: 4816073 - DNA, 25 bp, Homo sapien
gaggccgaagcaggcggatcatttg

SEQ ID NO: 4816074 - DNA, 25 bp, Homo sapien
tccccgcctgggtcttgagtagggc

SEQ ID NO: 4816075 - DNA, 25 bp, Homo sapien
gcaagcgccgttggaaacctagtcc

SEQ ID NO: 4816076 - DNA, 25 bp, Homo sapien
ggcgatggttacagcacagttcccc

SEQ ID NO: 4816077 - DNA, 25 bp, Homo sapien
cagtaggcgcttaatgtctgcctgc

SEQ ID NO: 4816078 - DNA, 25 bp, Homo sapien
cgtgccgcccacgggtgactccggg

SEQ ID NO: 4816079 - DNA, 25 bp, Homo sapien
cccgtgccgcccacgggtgactccg

SEQ ID NO: 4816080 - DNA, 25 bp, Homo sapien
cccgtgccgcccacgggtgactccg

SEQ ID NO: 4816081 - DNA, 25 bp, Homo sapien
gatgcctgcagtcattaggttttag

SEQ ID NO: 4816082 - DNA, 25 bp, Homo sapien
tagcgtcccatgagccttggtatca

SEQ ID NO: 4816083 - DNA, 25 bp, Homo sapien
cattaggttttagcgtcccatgagc

SEQ ID NO: 4816084 - DNA, 25 bp, Homo sapien
cttggtatcaagaggccacaagagt

SEQ ID NO: 4816085 - DNA, 25 bp, Homo sapien
cttaattctgcgtcaagagacaagt

SEQ ID NO: 4816086 - DNA, 25 bp, Homo sapien
tatagctgattgaatgcttctagca

SEQ ID NO: 4816087 - DNA, 25 bp, Homo sapien
ggaacatgggcgaattttctcattc

SEQ ID NO: 4816088 - DNA, 25 bp, Homo sapien
tagaaggcctcactattacttaatt

SEQ ID NO: 4816089 - DNA, 25 bp, Homo sapien
tcctaggtaaagacttagaaggtca

SEQ ID NO: 4816090 - DNA, 25 bp, Homo sapien
ggagattgagcacagcaacggaaca

SEQ ID NO: 4816091 - DNA, 25 bp, Homo sapien
taagtatagaataatagagtcctag

SEQ ID NO: 4816092 - DNA, 25 bp, Homo sapien
tcctgaccctgtagtgtgtgtacaa

SEQ ID NO: 4816093 - DNA, 25 bp, Homo sapien
tgtttaatgcgtatacacgggagcc

SEQ ID NO: 4816094 - DNA, 25 bp, Homo sapien
tatgtagaccagacaatgtagccgc

SEQ ID NO: 4816095 - DNA, 25 bp, Homo sapien
taaattttcctggtgcatgacgaca

SEQ ID NO: 4816096 - DNA, 25 bp, Homo sapien
caagtttgggctagatgcctccgca

SEQ ID NO: 4816097 - DNA, 25 bp, Homo sapien
ccaagccctgtgaacaaaccagaag

SEQ ID NO: 4816098 - DNA, 25 bp, Homo sapien
caagccctgtgaacaaaccagaagg

SEQ ID NO: 4816099 - DNA, 25 bp, Homo sapien
gccctgtgaacaaaccagaaggcag

SEQ ID NO: 4816100 - DNA, 25 bp, Homo sapien
acaccaagccctgtgaacaaaccag

SEQ ID NO: 4816101 - DNA, 25 bp, Homo sapien
ggatgacatcaatcacacaaggagt

SEQ ID NO: 4816102 - DNA, 25 bp, Homo sapien
caaggagttgtaggaatgctggcat

SEQ ID NO: 4816103 - DNA, 25 bp, Homo sapien
ttcacgggtagacgccagaggatgc

SEQ ID NO: 4816104 - DNA, 25 bp, Homo sapien
tcatgaggctccagcaggacgagtg

SEQ ID NO: 4816105 - DNA, 25 bp, Homo sapien
ccttggcaaaagtcagctagtcctc

SEQ ID NO: 4816106 - DNA, 25 bp, Homo sapien
catggtctcgtaaagcccaggacgc

SEQ ID NO: 4816107 - DNA, 25 bp, Homo sapien
gatggaatctttggtgcagcctgag

SEQ ID NO: 4816108 - DNA, 25 bp, Homo sapien
gcagaaggcacctaaggcagcgagt

SEQ ID NO: 4816109 - DNA, 25 bp, Homo sapien
catagttggcggtagagttcatggc

SEQ ID NO: 4816110 - DNA, 25 bp, Homo sapien
tgaaggtccgcttcttgaggacaaa

SEQ ID NO: 4816111 - DNA, 25 bp, Homo sapien
ctttctgcttcatgcgagggagggt

SEQ ID NO: 4816112 - DNA, 25 bp, Homo sapien
gagctggctccgtgcttgaccttca

SEQ ID NO: 4816113 - DNA, 25 bp, Homo sapien
tactcaggacaagggatccaaggac

SEQ ID NO: 4816114 - DNA, 25 bp, Homo sapien
gcaggatacccctaccgcttgagag

SEQ ID NO: 4816115 - DNA, 25 bp, Homo sapien
gacagactctgctgaggtcctcaca

SEQ ID NO: 4816116 - DNA, 25 bp, Homo sapien
taaccgaaatggtgcaagaagctgc

SEQ ID NO: 4816117 - DNA, 25 bp, Homo sapien
gagcctgcactggttcttgacactt

SEQ ID NO: 4816118 - DNA, 25 bp, Homo sapien
gcacagagggcttaaggagcttgcc

SEQ ID NO: 4816119 - DNA, 25 bp, Homo sapien
tggcctcctagtagcctgttctgct

SEQ ID NO: 4816120 - DNA, 25 bp, Homo sapien
tatgatgaacacactggctactttc

SEQ ID NO: 4816121 - DNA, 25 bp, Homo sapien
ctgatgtgagctttgaactgcctgt

SEQ ID NO: 4816122 - DNA, 25 bp, Homo sapien
gatgtgagctttgaactgcctgttc

SEQ ID NO: 4816123 - DNA, 25 bp, Homo sapien
cactgatgtgagctttgaactgcct

SEQ ID NO: 4816124 - DNA, 25 bp, Homo sapien
tcctcactgatgtgagctttgaact

SEQ ID NO: 4816125 - DNA, 25 bp, Homo sapien
gccaaaggcttccaacctggggctg

SEQ ID NO: 4816126 - DNA, 25 bp, Homo sapien
caagcagacaatgggggcagccagg

SEQ ID NO: 4816127 - DNA, 25 bp, Homo sapien
gacagcaagcagacaatgggggcag

SEQ ID NO: 4816128 - DNA, 25 bp, Homo sapien
ccaaaggcttccaacctggggctgg

SEQ ID NO: 4816129 - DNA, 25 bp, Homo sapien
cctctgccatcgccctctggtcttc

SEQ ID NO: 4816130 - DNA, 25 bp, Homo sapien
tgccatcgccctctggtcttctgac

SEQ ID NO: 4816131 - DNA, 25 bp, Homo sapien
tctgccatcgccctctggtcttctg

SEQ ID NO: 4816132 - DNA, 25 bp, Homo sapien
tgccccctctgccatcgccctctgg

SEQ ID NO: 4816133 - DNA, 25 bp, Homo sapien
agccggagccttatcttggctggtc

SEQ ID NO: 4816134 - DNA, 25 bp, Homo sapien
ccaggttgtgtttgtccatggcctt

SEQ ID NO: 4816135 - DNA, 25 bp, Homo sapien
tgtccatggccttgcggattacagc

SEQ ID NO: 4816136 - DNA, 25 bp, Homo sapien
cttgcggattacagccggagcctta

SEQ ID NO: 4816137 - DNA, 25 bp, Homo sapien
atcgcggcgggggatggaccatcag

SEQ ID NO: 4816138 - DNA, 25 bp, Homo sapien
tcagggaaaagaccctggagcggct

SEQ ID NO: 4816139 - DNA, 25 bp, Homo sapien
agtgcagtggccaaggaccctctgg

SEQ ID NO: 4816140 - DNA, 25 bp, Homo sapien
gatggaccatcagggaaaagaccct

SEQ ID NO: 4816141 - DNA, 25 bp, Homo sapien
tagtccaagccctggaggtaagaaa

SEQ ID NO: 4816142 - DNA, 25 bp, Homo sapien
agagcacaggcggaactcggacata

SEQ ID NO: 4816143 - DNA, 25 bp, Homo sapien
ggataacagcatcactgagcctggg

SEQ ID NO: 4816144 - DNA, 25 bp, Homo sapien
ttaatgacaaccatgctagctcctg

SEQ ID NO: 4816145 - DNA, 25 bp, Homo sapien
cccaggcaaacccattctgtgagca

SEQ ID NO: 4816146 - DNA, 25 bp, Homo sapien
actgtgttcagggtgcatttgccgc

SEQ ID NO: 4816147 - DNA, 25 bp, Homo sapien
tccccgagaaagtcgaggtcctggc

SEQ ID NO: 4816148 - DNA, 25 bp, Homo sapien
tcttcatttctgtacctggctgaca

SEQ ID NO: 4816149 - DNA, 25 bp, Homo sapien
cttgtacatgttgccattgtccacg

SEQ ID NO: 4816150 - DNA, 25 bp, Homo sapien
gatgatacagcagtcgcccacctgc

SEQ ID NO: 4816151 - DNA, 25 bp, Homo sapien
gctggttgtagagcggcagcgcgga

SEQ ID NO: 4816152 - DNA, 25 bp, Homo sapien
cgtccaggctgacgcggatgataca

SEQ ID NO: 4816153 - DNA, 25 bp, Homo sapien
ctgagggagacggtaagatcagcag

SEQ ID NO: 4816154 - DNA, 25 bp, Homo sapien
ctgccagatggggaaccttctagaa

SEQ ID NO: 4816155 - DNA, 25 bp, Homo sapien
gatcagcagatcccactgccctgtg

SEQ ID NO: 4816156 - DNA, 25 bp, Homo sapien
tgccagatggggaaccttctagaag

SEQ ID NO: 4816157 - DNA, 25 bp, Homo sapien
agctgccactggtactgagctcagt

SEQ ID NO: 4816158 - DNA, 25 bp, Homo sapien
gcgtcagcgatgtccccgctgctga

SEQ ID NO: 4816159 - DNA, 25 bp, Homo sapien
gagactccgggacgaagctgatgtt

SEQ ID NO: 4816160 - DNA, 25 bp, Homo sapien
gatctcctccacgtcggagctagag

SEQ ID NO: 4816161 - DNA, 25 bp, Homo sapien
gctccagctcgcacgacaggttgta

SEQ ID NO: 4816162 - DNA, 25 bp, Homo sapien
ggtgttgctggctgactcggatggg

SEQ ID NO: 4816163 - DNA, 25 bp, Homo sapien
ctcggatgggggctccagctcgcac

SEQ ID NO: 4816164 - DNA, 25 bp, Homo sapien
tcgctccagcgcttgacaatggctg

SEQ ID NO: 4816165 - DNA, 25 bp, Homo sapien
tgatctgggcgatcacctcgaactc

SEQ ID NO: 4816166 - DNA, 25 bp, Homo sapien
actgcagcagcttgatctgggcgat

SEQ ID NO: 4816167 - DNA, 25 bp, Homo sapien
caaattgctcatctggcgcgatgct

SEQ ID NO: 4816168 - DNA, 25 bp, Homo sapien
tcagtctcgctgagccgctccacgg

SEQ ID NO: 4816169 - DNA, 25 bp, Homo sapien
cctcctcttctcaaagttgatgagt

SEQ ID NO: 4816170 - DNA, 25 bp, Homo sapien
tcctcctcttctcaaagttgatgag

SEQ ID NO: 4816171 - DNA, 25 bp, Homo sapien
tcctcttctcaaagttgatgagtct

SEQ ID NO: 4816172 - DNA, 25 bp, Homo sapien
ctcttctcaaagttgatgagtctgc

SEQ ID NO: 4816173 - DNA, 25 bp, Homo sapien
acgcacacccctggattgaagccgg

SEQ ID NO: 4816174 - DNA, 25 bp, Homo sapien
gcacgcacacccctggattgaagcc

SEQ ID NO: 4816175 - DNA, 25 bp, Homo sapien
ggcacgcacacccctggattgaagc

SEQ ID NO: 4816176 - DNA, 25 bp, Homo sapien
cgcacacccctggattgaagccggt

SEQ ID NO: 4816177 - DNA, 25 bp, Homo sapien
ctccagccccgcccggcacactcac

SEQ ID NO: 4816178 - DNA, 25 bp, Homo sapien
tactccagccccgcccggcacactc

SEQ ID NO: 4816179 - DNA, 25 bp, Homo sapien
cctactccagccccgcccggcacac

SEQ ID NO: 4816180 - DNA, 25 bp, Homo sapien
ggccctactccagccccgcccggca

SEQ ID NO: 4816181 - DNA, 25 bp, Homo sapien
gtagggaacggtgccctggatgatg

SEQ ID NO: 4816182 - DNA, 25 bp, Homo sapien
tgcccaggtagggaacggtgccctg

SEQ ID NO: 4816183 - DNA, 25 bp, Homo sapien
aggtagggaacggtgccctggatga

SEQ ID NO: 4816184 - DNA, 25 bp, Homo sapien
ccaggtagggaacggtgccctggat

SEQ ID NO: 4816185 - DNA, 25 bp, Homo sapien
tctccttcggccgtttctgggctct

SEQ ID NO: 4816186 - DNA, 25 bp, Homo sapien
cgtctccttcggccgtttctgggct

SEQ ID NO: 4816187 - DNA, 25 bp, Homo sapien
ccttcggccgtttctgggctctctt

SEQ ID NO: 4816188 - DNA, 25 bp, Homo sapien
tccttcggccgtttctgggctctct

SEQ ID NO: 4816189 - DNA, 25 bp, Homo sapien
cccctctggaaagtgcggatgagaa

SEQ ID NO: 4816190 - DNA, 25 bp, Homo sapien
ctgtatcaatactcactagtgtggg

SEQ ID NO: 4816191 - DNA, 25 bp, Homo sapien
ccgcctgctgcatggtgcggtggct

SEQ ID NO: 4816192 - DNA, 25 bp, Homo sapien
tgctgccagtgtggtcgggttccag

SEQ ID NO: 4816193 - DNA, 25 bp, Homo sapien
cttctgaaagatccggaaactgtcc

SEQ ID NO: 4816194 - DNA, 25 bp, Homo sapien
gagtagttgttctcatctgagaaga

SEQ ID NO: 4816195 - DNA, 25 bp, Homo sapien
agcagctcccggctcaatgagtagt

SEQ ID NO: 4816196 - DNA, 25 bp, Homo sapien
acagcttctgaaagatccggaaact

SEQ ID NO: 4816197 - DNA, 25 bp, Homo sapien
cttcagacggtggatggagttgctc

SEQ ID NO: 4816198 - DNA, 25 bp, Homo sapien
ctggaaacgtcttcccacgtcttct

SEQ ID NO: 4816199 - DNA, 25 bp, Homo sapien
agaagttcttgaggatccggcactc

SEQ ID NO: 4816200 - DNA, 25 bp, Homo sapien
ggatggcatacagtgacgagaagtt

SEQ ID NO: 4816201 - DNA, 25 bp, Homo sapien
tcgtgcttcggttcccgaggcaggt

SEQ ID NO: 4816202 - DNA, 25 bp, Homo sapien
tggtgatgacacagttggccacact

SEQ ID NO: 4816203 - DNA, 25 bp, Homo sapien
caggcagtggtagggcaccaccttc

SEQ ID NO: 4816204 - DNA, 25 bp, Homo sapien
tcttgtcccgctgggaccagatgga

SEQ ID NO: 4816205 - DNA, 25 bp, Homo sapien
ccatcagtgtaaactgctctgccac

SEQ ID NO: 4816206 - DNA, 25 bp, Homo sapien
tccatcagtgtaaactgctctgcca

SEQ ID NO: 4816207 - DNA, 25 bp, Homo sapien
catccatcagtgtaaactgctctgc

SEQ ID NO: 4816208 - DNA, 25 bp, Homo sapien
cgcatccatcagtgtaaactgctct

SEQ ID NO: 4816209 - DNA, 25 bp, Homo sapien
tggagggaacaccaagaggtgaggc

SEQ ID NO: 4816210 - DNA, 25 bp, Homo sapien
gaggtgaggcttctcctcactcagc

SEQ ID NO: 4816211 - DNA, 25 bp, Homo sapien
caagaggtgaggcttctcctcactc

SEQ ID NO: 4816212 - DNA, 25 bp, Homo sapien
ggaacaccaagaggtgaggcttctc

SEQ ID NO: 4816213 - DNA, 25 bp, Homo sapien
aggccaggaaggctgtaatgatgga

SEQ ID NO: 4816214 - DNA, 25 bp, Homo sapien
tgctggagctacttctagctctgaa

SEQ ID NO: 4816215 - DNA, 25 bp, Homo sapien
ctctggagcctgctggagctccgga

SEQ ID NO: 4816216 - DNA, 25 bp, Homo sapien
agctggtgttagagctagctcgagc

SEQ ID NO: 4816217 - DNA, 25 bp, Homo sapien
cgctggagccgattctagtcccaca

SEQ ID NO: 4816218 - DNA, 25 bp, Homo sapien
tggagcctcctcttcgtgtggccca

SEQ ID NO: 4816219 - DNA, 25 bp, Homo sapien
ggagcctcctcttcgtgtggcccag

SEQ ID NO: 4816220 - DNA, 25 bp, Homo sapien
gagcctcctcttcgtgtggcccagc

SEQ ID NO: 4816221 - DNA, 25 bp, Homo sapien
gaaagtccggaggttgacagaaatc

SEQ ID NO: 4816222 - DNA, 25 bp, Homo sapien
caggctctgcctcaatgggttccga

SEQ ID NO: 4816223 - DNA, 25 bp, Homo sapien
atgttgagctgcacgtaggccacca

SEQ ID NO: 4816224 - DNA, 25 bp, Homo sapien
gaaatcctccgagtactggtccagc

SEQ ID NO: 4816225 - DNA, 25 bp, Homo sapien
ctggtcagtggcgaacacctctccc

SEQ ID NO: 4816226 - DNA, 25 bp, Homo sapien
cagtgctggtgagctgccttactct

SEQ ID NO: 4816227 - DNA, 25 bp, Homo sapien
aactccatgagggatcggtcctcct

SEQ ID NO: 4816228 - DNA, 25 bp, Homo sapien
agggcccactgagccaaggccagct

SEQ ID NO: 4816229 - DNA, 25 bp, Homo sapien
ctggggtccaccatcctcgtcggaa

SEQ ID NO: 4816230 - DNA, 25 bp, Homo sapien
gtccaccatcctcgtcggaataggg

SEQ ID NO: 4816231 - DNA, 25 bp, Homo sapien
tcggaataggggaggatgcagccgt

SEQ ID NO: 4816232 - DNA, 25 bp, Homo sapien
tcctggggtccaccatcctcgtcgg

SEQ ID NO: 4816233 - DNA, 25 bp, Homo sapien
gaggccgtgagggcgtcacatctac

SEQ ID NO: 4816234 - DNA, 25 bp, Homo sapien
ggccgtgagggcgtcacatctaccg

SEQ ID NO: 4816235 - DNA, 25 bp, Homo sapien
cgtgagggcgtcacatctaccgtac

SEQ ID NO: 4816236 - DNA, 25 bp, Homo sapien
aggaggccgtgagggcgtcacatct

SEQ ID NO: 4816237 - DNA, 25 bp, Homo sapien
tcaatgaataagtcccaaccagctc

SEQ ID NO: 4816238 - DNA, 25 bp, Homo sapien
tgggaaaactgcttcgcccaaggcc

SEQ ID NO: 4816239 - DNA, 25 bp, Homo sapien
caggcgttgagggagcactttccac

SEQ ID NO: 4816240 - DNA, 25 bp, Homo sapien
tctttcatatgagcaaagcgaggct

SEQ ID NO: 4816241 - DNA, 25 bp, Homo sapien
aagatggtgacgtaggagaggtcgc

SEQ ID NO: 4816242 - DNA, 25 bp, Homo sapien
caagtctcataaaggttcagggccg

SEQ ID NO: 4816243 - DNA, 25 bp, Homo sapien
ttcacggtccgcaccttgcaagtct

SEQ ID NO: 4816244 - DNA, 25 bp, Homo sapien
tggtgaaggctctataggtacacag

SEQ ID NO: 4816245 - DNA, 25 bp, Homo sapien
cccttgttgcctccgtggtgcagct

SEQ ID NO: 4816246 - DNA, 25 bp, Homo sapien
gatgactccgttgatcagctcctca

SEQ ID NO: 4816247 - DNA, 25 bp, Homo sapien
tggagtagatgactccgttgatcag

SEQ ID NO: 4816248 - DNA, 25 bp, Homo sapien
gagatggagtagatgactccgttga

SEQ ID NO: 4816249 - DNA, 25 bp, Homo sapien
gggcgcggggacgtcaagggcctgc

SEQ ID NO: 4816250 - DNA, 25 bp, Homo sapien
gtttcccagatagggcacagactgg

SEQ ID NO: 4816251 - DNA, 25 bp, Homo sapien
agactggcggctgcacagacctaca

SEQ ID NO: 4816252 - DNA, 25 bp, Homo sapien
ctgtgaagacaacgcccggcagccg

SEQ ID NO: 4816253 - DNA, 25 bp, Homo sapien
gacaggccagcaggatgccgtgtcc

SEQ ID NO: 4816254 - DNA, 25 bp, Homo sapien
caggccagcaggatgccgtgtccct

SEQ ID NO: 4816255 - DNA, 25 bp, Homo sapien
ctgatcagccttctcagagtgacag

SEQ ID NO: 4816256 - DNA, 25 bp, Homo sapien
ttctcagagtgacaggccagcagga

SEQ ID NO: 4816257 - DNA, 25 bp, Homo sapien
aggaggaagccacaggccaaaccca

SEQ ID NO: 4816258 - DNA, 25 bp, Homo sapien
agaaggaggaagccacaggccaaac

SEQ ID NO: 4816259 - DNA, 25 bp, Homo sapien
ctgacagaaggaggaagccacaggc

SEQ ID NO: 4816260 - DNA, 25 bp, Homo sapien
gaagccacaggccaaacccagactc

SEQ ID NO: 4816261 - DNA, 25 bp, Homo sapien
acctgatggcgtggtaccggacaac

SEQ ID NO: 4816262 - DNA, 25 bp, Homo sapien
cactgggacctgatggcgtggtacc

SEQ ID NO: 4816263 - DNA, 25 bp, Homo sapien
tcggtgaccggcactgggacctgat

SEQ ID NO: 4816264 - DNA, 25 bp, Homo sapien
taccggacaacacctgacatcatat

SEQ ID NO: 4816265 - DNA, 25 bp, Homo sapien
tccgagaggtttgtggacgtgccct

SEQ ID NO: 4816266 - DNA, 25 bp, Homo sapien
ctgcatctccgagaggtttgtggac

SEQ ID NO: 4816267 - DNA, 25 bp, Homo sapien
catctccgagaggtttgtggacgtg

SEQ ID NO: 4816268 - DNA, 25 bp, Homo sapien
tctccgagaggtttgtggacgtgcc

SEQ ID NO: 4816269 - DNA, 25 bp, Homo sapien
aaataaggcacaggccaccgatgta

SEQ ID NO: 4816270 - DNA, 25 bp, Homo sapien
ctgcatcgtaaaggctaacgacgcg

SEQ ID NO: 4816271 - DNA, 25 bp, Homo sapien
aaaggctaacgacgcgctgcgggcc

SEQ ID NO: 4816272 - DNA, 25 bp, Homo sapien
tgaaataaggcacaggccaccgatg

SEQ ID NO: 4816273 - DNA, 25 bp, Homo sapien
accccagccgtggtccctactgttg

SEQ ID NO: 4816274 - DNA, 25 bp, Homo sapien
cctggaacggtattgaggggcgcaa

SEQ ID NO: 4816275 - DNA, 25 bp, Homo sapien
agcggccttggtgacagcaggccct

SEQ ID NO: 4816276 - DNA, 25 bp, Homo sapien
agccgtggtccctactgttggacgg

SEQ ID NO: 4816277 - DNA, 25 bp, Homo sapien
cctcggcccacatgcgctgcaccat

SEQ ID NO: 4816278 - DNA, 25 bp, Homo sapien
gcacggcgtcccacacgctgcggct

SEQ ID NO: 4816279 - DNA, 25 bp, Homo sapien
gagcccggaaacagcggctcggcgc

SEQ ID NO: 4816280 - DNA, 25 bp, Homo sapien
tgaagctgtgcagcaccaccgggca

SEQ ID NO: 4816281 - DNA, 25 bp, Homo sapien
ccgcgcggctgggctttgccaccgc

SEQ ID NO: 4816282 - DNA, 25 bp, Homo sapien
cccgcgcggctgggctttgccaccg

SEQ ID NO: 4816283 - DNA, 25 bp, Homo sapien
tggccagtacatccttggccggtac

SEQ ID NO: 4816284 - DNA, 25 bp, Homo sapien
tgtctggctggtgcgtccctccttc

SEQ ID NO: 4816285 - DNA, 25 bp, Homo sapien
ccttggccagtacatccttggccgg

SEQ ID NO: 4816286 - DNA, 25 bp, Homo sapien
ttcatgccgccccttctgtctggct

SEQ ID NO: 4816287 - DNA, 25 bp, Homo sapien
tttctgtctcttgtgatctatattt

SEQ ID NO: 4816288 - DNA, 25 bp, Homo sapien
tctgtctcttgtgatctatatttag

SEQ ID NO: 4816289 - DNA, 25 bp, Homo sapien
ctgtctcttgtgatctatatttaga

SEQ ID NO: 4816290 - DNA, 25 bp, Homo sapien
gtctcttgtgatctatatttagagc

SEQ ID NO: 4816291 - DNA, 25 bp, Homo sapien
cagcaacgtctatcccacagctgtg

SEQ ID NO: 4816292 - DNA, 25 bp, Homo sapien
tcacaaggcagcaacgtctatccca

SEQ ID NO: 4816293 - DNA, 25 bp, Homo sapien
aggtggggcacatcacaccccgagg

SEQ ID NO: 4816294 - DNA, 25 bp, Homo sapien
gataggtggggcacatcacaccccg

SEQ ID NO: 4816295 - DNA, 25 bp, Homo sapien
tctcctctctcatacccgagatggg

SEQ ID NO: 4816296 - DNA, 25 bp, Homo sapien
gaagactcccctgtgagttccaaac

SEQ ID NO: 4816297 - DNA, 25 bp, Homo sapien
aggccaagcgtgtgcacacgggcac

SEQ ID NO: 4816298 - DNA, 25 bp, Homo sapien
tacccgagatgggagatgaagactc

SEQ ID NO: 4816299 - DNA, 25 bp, Homo sapien
ggcactggttgccctggaaactcac

SEQ ID NO: 4816300 - DNA, 25 bp, Homo sapien
gcccctccccggcagaggcactggt

SEQ ID NO: 4816301 - DNA, 25 bp, Homo sapien
cctccccggcagaggcactggttgc

SEQ ID NO: 4816302 - DNA, 25 bp, Homo sapien
cagcccctccccggcagaggcactg

SEQ ID NO: 4816303 - DNA, 25 bp, Homo sapien
tttggagagcggcacgacgggcgac

SEQ ID NO: 4816304 - DNA, 25 bp, Homo sapien
ctcggtggtggccggtgctggcaga

SEQ ID NO: 4816305 - DNA, 25 bp, Homo sapien
caaggtgtcgggctttggagagcgg

SEQ ID NO: 4816306 - DNA, 25 bp, Homo sapien
ggtgccagccaaggtgtcgggcttt

SEQ ID NO: 4816307 - DNA, 25 bp, Homo sapien
ctggcggtcaccacagagacacagg

SEQ ID NO: 4816308 - DNA, 25 bp, Homo sapien
cttcctccccctgggcacggcaggc

SEQ ID NO: 4816309 - DNA, 25 bp, Homo sapien
ctgggcacggcaggcctggcacaaa

SEQ ID NO: 4816310 - DNA, 25 bp, Homo sapien
ggcaaagaacacagagcccttcctc

SEQ ID NO: 4816311 - DNA, 25 bp, Homo sapien
cgtcgcctgcgtgccctagtggagt

SEQ ID NO: 4816312 - DNA, 25 bp, Homo sapien
aggaattcccgcttgtaccaggcca

SEQ ID NO: 4816313 - DNA, 25 bp, Homo sapien
tggagtggagcacccgagtgcctgg

SEQ ID NO: 4816314 - DNA, 25 bp, Homo sapien
gcgtggctgtcatacctgctgctgt

SEQ ID NO: 4816315 - DNA, 25 bp, Homo sapien
tgcaatggtgactgaccacgccact

SEQ ID NO: 4816316 - DNA, 25 bp, Homo sapien
gctgagcagatacaagggacacttt

SEQ ID NO: 4816317 - DNA, 25 bp, Homo sapien
cctgaccgttggaaggccactgtaa

SEQ ID NO: 4816318 - DNA, 25 bp, Homo sapien
actctgtggagaatagtcctgtggc

SEQ ID NO: 4816319 - DNA, 25 bp, Homo sapien
tatgggagcatcttccaatgggaac

SEQ ID NO: 4816320 - DNA, 25 bp, Homo sapien
gacacagcccggaatacaagtcgga

SEQ ID NO: 4816321 - DNA, 25 bp, Homo sapien
gggacatcaccacgctaatgtgaga

SEQ ID NO: 4816322 - DNA, 25 bp, Homo sapien
aaactagccattgtgcctttcaggg

SEQ ID NO: 4816323 - DNA, 25 bp, Homo sapien
catgttgctgggtactggatgcccc

SEQ ID NO: 4816324 - DNA, 25 bp, Homo sapien
tagaggctgtcattcccaaagcaaa

SEQ ID NO: 4816325 - DNA, 25 bp, Homo sapien
tgtgagcatgtatgcgcaggcctgc

SEQ ID NO: 4816326 - DNA, 25 bp, Homo sapien
gaagcccaggcaaatgagcccacat

SEQ ID NO: 4816327 - DNA, 25 bp, Homo sapien
tgcggggctcatggcgcggcctccg

SEQ ID NO: 4816328 - DNA, 25 bp, Homo sapien
ggcgggacccggggctcgcagaggc

SEQ ID NO: 4816329 - DNA, 25 bp, Homo sapien
gactctgcggccctcggggccgccc

SEQ ID NO: 4816330 - DNA, 25 bp, Homo sapien
ctcagcctcggtggcacatcgccgg

SEQ ID NO: 4816331 - DNA, 25 bp, Homo sapien
tagggcgccttcacaccagggtatt

SEQ ID NO: 4816332 - DNA, 25 bp, Homo sapien
tcttaagaaggaggtggctagtccc

SEQ ID NO: 4816333 - DNA, 25 bp, Homo sapien
tccggttgaattcgcctgactgaca

SEQ ID NO: 4816334 - DNA, 25 bp, Homo sapien
tggtctgcacgctagtgaagcactg

SEQ ID NO: 4816335 - DNA, 25 bp, Homo sapien
gtagaaaagcggatcagcttcaggc

SEQ ID NO: 4816336 - DNA, 25 bp, Homo sapien
cagctgatatccttgtccagtgtag

SEQ ID NO: 4816337 - DNA, 25 bp, Homo sapien
tcctcaggcagctgatatccttgtc

SEQ ID NO: 4816338 - DNA, 25 bp, Homo sapien
tatccttgtccagtgtagaaaagcg

SEQ ID NO: 4816339 - DNA, 25 bp, Homo sapien
ccttggacggcttgtttgagatgaa

SEQ ID NO: 4816340 - DNA, 25 bp, Homo sapien
gaagactgccccaccataatagaag

SEQ ID NO: 4816341 - DNA, 25 bp, Homo sapien
tagtaaactcatataccctggccac

SEQ ID NO: 4816342 - DNA, 25 bp, Homo sapien
tgtccgccaggatggccatgtggca

SEQ ID NO: 4816343 - DNA, 25 bp, Homo sapien
gtacccacgcatgaagaactcctcg

SEQ ID NO: 4816344 - DNA, 25 bp, Homo sapien
tagtagcttgggtgaatggcagcca

SEQ ID NO: 4816345 - DNA, 25 bp, Homo sapien
gaagatgtagtagtgcacccggtac

SEQ ID NO: 4816346 - DNA, 25 bp, Homo sapien
tcaaggcagaagaggtagtccacct

SEQ ID NO: 4816347 - DNA, 25 bp, Homo sapien
ctagtgatgatcacccggtcaccca

SEQ ID NO: 4816348 - DNA, 25 bp, Homo sapien
cggtcacccactgctacaccagcag

SEQ ID NO: 4816349 - DNA, 25 bp, Homo sapien
tagtgatgatcacccggtcacccac

SEQ ID NO: 4816350 - DNA, 25 bp, Homo sapien
cactgctacaccagcagcctgccag

SEQ ID NO: 4816351 - DNA, 25 bp, Homo sapien
tgagcaatttctaagtgcccagcga

SEQ ID NO: 4816352 - DNA, 25 bp, Homo sapien
tgcccagcgacgttctaagaattct

SEQ ID NO: 4816353 - DNA, 25 bp, Homo sapien
taagtggacgaatcaagggaaggca

SEQ ID NO: 4816354 - DNA, 25 bp, Homo sapien
gattcttatgctcctaggccaggtg

SEQ ID NO: 4816355 - DNA, 25 bp, Homo sapien
ttccaggaaggagtcccagaggccc

SEQ ID NO: 4816356 - DNA, 25 bp, Homo sapien
atctggtcatgctttagggccccag

SEQ ID NO: 4816357 - DNA, 25 bp, Homo sapien
tctggtcatgctttagggccccagg

SEQ ID NO: 4816358 - DNA, 25 bp, Homo sapien
ccaggaaggagtcccagaggcccag

SEQ ID NO: 4816359 - DNA, 25 bp, Homo sapien
tctgcttggcacctggttccgagcc

SEQ ID NO: 4816360 - DNA, 25 bp, Homo sapien
gagccagatcccctactccaggaag

SEQ ID NO: 4816361 - DNA, 25 bp, Homo sapien
ctgtgtgcacgtctggtctggtctc

SEQ ID NO: 4816362 - DNA, 25 bp, Homo sapien
gcatcctgtctatgctagagccaga

SEQ ID NO: 4816363 - DNA, 25 bp, Homo sapien
acggcaaacaccgtgaccccaatgg

SEQ ID NO: 4816364 - DNA, 25 bp, Homo sapien
tctgggttgaaggttccctcggaga

SEQ ID NO: 4816365 - DNA, 25 bp, Homo sapien
ctcggagacgatgggcgccaaccag

SEQ ID NO: 4816366 - DNA, 25 bp, Homo sapien
cgtgaccccaatggtcaggttcagt

SEQ ID NO: 4816367 - DNA, 25 bp, Homo sapien
gcagcttgggctgagggtactgtga

SEQ ID NO: 4816368 - DNA, 25 bp, Homo sapien
agcagcttgggctgagggtactgtg

SEQ ID NO: 4816369 - DNA, 25 bp, Homo sapien
cagcttgggctgagggtactgtgac

SEQ ID NO: 4816370 - DNA, 25 bp, Homo sapien
aggagagccaccaccctcacggcca

SEQ ID NO: 4816371 - DNA, 25 bp, Homo sapien
caccctcacggccacaaaagaggaa

SEQ ID NO: 4816372 - DNA, 25 bp, Homo sapien
caaccaagaaggaccagtgatggag

SEQ ID NO: 4816373 - DNA, 25 bp, Homo sapien
ctgcaaccaagaaggaccagtgatg

SEQ ID NO: 4816374 - DNA, 25 bp, Homo sapien
cttctccctcttgtagtgcagcttc

SEQ ID NO: 4816375 - DNA, 25 bp, Homo sapien
gcaagaaagagccatcatcatgggt

SEQ ID NO: 4816376 - DNA, 25 bp, Homo sapien
gaggcaagaaagagccatcatcatg

SEQ ID NO: 4816377 - DNA, 25 bp, Homo sapien
cagaggcaagaaagagccatcatca

SEQ ID NO: 4816378 - DNA, 25 bp, Homo sapien
gtggcagaggcaagaaagagccatc

SEQ ID NO: 4816379 - DNA, 25 bp, Homo sapien
gaacttgagtatggaaagtacttcc

SEQ ID NO: 4816380 - DNA, 25 bp, Homo sapien
gtcatgcaaccatccaacatttgtg

SEQ ID NO: 4816381 - DNA, 25 bp, Homo sapien
taaacaacagcttgccgttgccccg

SEQ ID NO: 4816382 - DNA, 25 bp, Homo sapien
tcatcccaaaaggaagctcggtcct

SEQ ID NO: 4816383 - DNA, 25 bp, Homo sapien
taaagtcagttcgtcaaattggccc

SEQ ID NO: 4816384 - DNA, 25 bp, Homo sapien
tgccctagtttcctacaagaaagca

SEQ ID NO: 4816385 - DNA, 25 bp, Homo sapien
gaaagcatgtttcagggccctgctc

SEQ ID NO: 4816386 - DNA, 25 bp, Homo sapien
tacacccagccaagttgctactctt

SEQ ID NO: 4816387 - DNA, 25 bp, Homo sapien
cgaagcctggccgaagggggcaaag

SEQ ID NO: 4816388 - DNA, 25 bp, Homo sapien
tgagggggcgaagcctggccgaagg

SEQ ID NO: 4816389 - DNA, 25 bp, Homo sapien
gggaggccgatgagggggcgaagcc

SEQ ID NO: 4816390 - DNA, 25 bp, Homo sapien
aatgagagtctcactagtaataata

SEQ ID NO: 4816391 - DNA, 25 bp, Homo sapien
caacagcaggctgtttatgggcatc

SEQ ID NO: 4816392 - DNA, 25 bp, Homo sapien
ccttagttgaggaggactttggtca

SEQ ID NO: 4816393 - DNA, 25 bp, Homo sapien
tgtgcaacatgtggacggtcagacc

SEQ ID NO: 4816394 - DNA, 25 bp, Homo sapien
caagcaaggctcacagctgtgcaac

SEQ ID NO: 4816395 - DNA, 25 bp, Homo sapien
acataggagactggcagccagttct

SEQ ID NO: 4816396 - DNA, 25 bp, Homo sapien
caggggagataataggggacatagg

SEQ ID NO: 4816397 - DNA, 25 bp, Homo sapien
gacataggagactggcagccagttc

SEQ ID NO: 4816398 - DNA, 25 bp, Homo sapien
taataggggacataggagactggca

SEQ ID NO: 4816399 - DNA, 25 bp, Homo sapien
cactgaggcttgtgcccgccaacag

SEQ ID NO: 4816400 - DNA, 25 bp, Homo sapien
ccgccaacaggcagaaccccagacc

SEQ ID NO: 4816401 - DNA, 25 bp, Homo sapien
ccagggccagtctccggcgatgcat

SEQ ID NO: 4816402 - DNA, 25 bp, Homo sapien
ggacactgaggcttgtgcccgccaa

SEQ ID NO: 4816403 - DNA, 25 bp, Homo sapien
aggctgtcccctcgcagggatgtca

SEQ ID NO: 4816404 - DNA, 25 bp, Homo sapien
tgtcccctcgcagggatgtcaggct

SEQ ID NO: 4816405 - DNA, 25 bp, Homo sapien
gagcctgggcacttgtagagacccc

SEQ ID NO: 4816406 - DNA, 25 bp, Homo sapien
tgaggctgtcccctcgcagggatgt

SEQ ID NO: 4816407 - DNA, 25 bp, Homo sapien
ggccgcgggccagacagaaaagagg

SEQ ID NO: 4816408 - DNA, 25 bp, Homo sapien
cgcggaaaacggactcagctggcct

SEQ ID NO: 4816409 - DNA, 25 bp, Homo sapien
cgatacccgggcgatcggcggcgca

SEQ ID NO: 4816410 - DNA, 25 bp, Homo sapien
gatcggcggcgcaggtggagcctgg

SEQ ID NO: 4816411 - DNA, 25 bp, Homo sapien
ctctggagctgatgcgagagccagt

SEQ ID NO: 4816412 - DNA, 25 bp, Homo sapien
gagctagatctacctccgctgatgg

SEQ ID NO: 4816413 - DNA, 25 bp, Homo sapien
ccgctgatggtgctagagctgtttc

SEQ ID NO: 4816414 - DNA, 25 bp, Homo sapien
acttggcactgggtctagctccatg

SEQ ID NO: 4816415 - DNA, 25 bp, Homo sapien
tccgggccgatgtggatgacgtggc

SEQ ID NO: 4816416 - DNA, 25 bp, Homo sapien
atgtggatgacgtggcgtcgcctac

SEQ ID NO: 4816417 - DNA, 25 bp, Homo sapien
tcttgtccttgtccgggccgatgtg

SEQ ID NO: 4816418 - DNA, 25 bp, Homo sapien
gtcttgtccttgtccgggccgatgt

SEQ ID NO: 4816419 - DNA, 25 bp, Homo sapien
gagtcggagttggtgccggaggtcc

SEQ ID NO: 4816420 - DNA, 25 bp, Homo sapien
atttgaaggtgggtttagcagccgt

SEQ ID NO: 4816421 - DNA, 25 bp, Homo sapien
gagaatttgaaggtgggtttagcag

SEQ ID NO: 4816422 - DNA, 25 bp, Homo sapien
ggtgggtttagcagccgtggtgtgc

SEQ ID NO: 4816423 - DNA, 25 bp, Homo sapien
ctgcggatgacagcaaggtcgattc

SEQ ID NO: 4816424 - DNA, 25 bp, Homo sapien
gatgacagcaaggtcgattcccaga

SEQ ID NO: 4816425 - DNA, 25 bp, Homo sapien
cggatgacagcaaggtcgattccca

SEQ ID NO: 4816426 - DNA, 25 bp, Homo sapien
atgacagcaaggtcgattcccagaa

SEQ ID NO: 4816427 - DNA, 25 bp, Homo sapien
ggtctcagggcttgagtggaagctg

SEQ ID NO: 4816428 - DNA, 25 bp, Homo sapien
tctcagggcttgagtggaagctgcc

SEQ ID NO: 4816429 - DNA, 25 bp, Homo sapien
tcagggcttgagtggaagctgcctc

SEQ ID NO: 4816430 - DNA, 25 bp, Homo sapien
cagggcttgagtggaagctgcctct

SEQ ID NO: 4816431 - DNA, 25 bp, Homo sapien
tcagcggtagagttcacggttgaaa

SEQ ID NO: 4816432 - DNA, 25 bp, Homo sapien
tcatagtcagcggtagagttcacgg

SEQ ID NO: 4816433 - DNA, 25 bp, Homo sapien
ctgtgtccccttgctaagcgttgct

SEQ ID NO: 4816434 - DNA, 25 bp, Homo sapien
gttgaaaacgtgttggcgttgtcag

SEQ ID NO: 4816435 - DNA, 25 bp, Homo sapien
ggggaagggcagaaggatggtcagc

SEQ ID NO: 4816436 - DNA, 25 bp, Homo sapien
gaagggcagaaggatggtcagctgt

SEQ ID NO: 4816437 - DNA, 25 bp, Homo sapien
gggaagggcagaaggatggtcagct

SEQ ID NO: 4816438 - DNA, 25 bp, Homo sapien
ggtggggaagggcagaaggatggtc

SEQ ID NO: 4816439 - DNA, 25 bp, Homo sapien
gcgggcgccaaaccagtaacgcgcc

SEQ ID NO: 4816440 - DNA, 25 bp, Homo sapien
aaaggaacgcagctcgtgagtggcc

SEQ ID NO: 4816441 - DNA, 25 bp, Homo sapien
acgcagctcgtgagtggcccagaga

SEQ ID NO: 4816442 - DNA, 25 bp, Homo sapien
cccagagagcgggaaccagagcgcc

SEQ ID NO: 4816443 - DNA, 25 bp, Homo sapien
tgcattgacaataaacctccaggaa

SEQ ID NO: 4816444 - DNA, 25 bp, Homo sapien
gagagaataaacctcccggctctgg

SEQ ID NO: 4816445 - DNA, 25 bp, Homo sapien
ccaagggaagatgcataggagctga

SEQ ID NO: 4816446 - DNA, 25 bp, Homo sapien
ggcagcaagtggcaacggaatcccc

SEQ ID NO: 4816447 - DNA, 25 bp, Homo sapien
ggctctgtgtctggtggtagggtgg

SEQ ID NO: 4816448 - DNA, 25 bp, Homo sapien
gggtcatggctggagggtaggtcca

SEQ ID NO: 4816449 - DNA, 25 bp, Homo sapien
aaggactttatttggagtcaggtgg

SEQ ID NO: 4816450 - DNA, 25 bp, Homo sapien
cagggaagggtcatggctggagggt

SEQ ID NO: 4816451 - DNA, 25 bp, Homo sapien
ccagggcctcccggttggtatcaga

SEQ ID NO: 4816452 - DNA, 25 bp, Homo sapien
cagggcctcccggttggtatcagaa

SEQ ID NO: 4816453 - DNA, 25 bp, Homo sapien
cagggagcagatgccgaaaggagac

SEQ ID NO: 4816454 - DNA, 25 bp, Homo sapien
aaaggagacgaccacggcccagcac

SEQ ID NO: 4816455 - DNA, 25 bp, Homo sapien
gatgccgaaaggagacgaccacggc

SEQ ID NO: 4816456 - DNA, 25 bp, Homo sapien
agcagatgccgaaaggagacgacca

SEQ ID NO: 4816457 - DNA, 25 bp, Homo sapien
acaagctttcccatgtggagcaggc

SEQ ID NO: 4816458 - DNA, 25 bp, Homo sapien
tgtagtggtccctcctgggcagctc

SEQ ID NO: 4816459 - DNA, 25 bp, Homo sapien
atggtgctggtctttgcagtaaaag

SEQ ID NO: 4816460 - DNA, 25 bp, Homo sapien
gctcctgcaggtacatgagcttcct

SEQ ID NO: 4816461 - DNA, 25 bp, Homo sapien
aggcgtgatctggtccatctcgact

SEQ ID NO: 4816462 - DNA, 25 bp, Homo sapien
tgtgtcaatggctagggcctcccag

SEQ ID NO: 4816463 - DNA, 25 bp, Homo sapien
tcagcttcctcaatgtgtcaatggc

SEQ ID NO: 4816464 - DNA, 25 bp, Homo sapien
tggtccatctcgactgcggacaagc

SEQ ID NO: 4816465 - DNA, 25 bp, Homo sapien
ctccgtcttccgcatcaggattttc

SEQ ID NO: 4816466 - DNA, 25 bp, Homo sapien
tcctccgtcttccgcatcaggattt

SEQ ID NO: 4816467 - DNA, 25 bp, Homo sapien
ccgtcttccgcatcaggattttctt

SEQ ID NO: 4816468 - DNA, 25 bp, Homo sapien
tccgtcttccgcatcaggattttct

SEQ ID NO: 4816469 - DNA, 25 bp, Homo sapien
tccggaaagtccttatcgaccacca

SEQ ID NO: 4816470 - DNA, 25 bp, Homo sapien
caccatggccttcacgtaccaggtc

SEQ ID NO: 4816471 - DNA, 25 bp, Homo sapien
gaaagtccttatcgaccaccatggc

SEQ ID NO: 4816472 - DNA, 25 bp, Homo sapien
tcctgtcctccggaaagtccttatc

SEQ ID NO: 4816473 - DNA, 25 bp, Homo sapien
aggccgagcgtgacacccaggaaca

SEQ ID NO: 4816474 - DNA, 25 bp, Homo sapien
ggccgagcgtgacacccaggaacag

SEQ ID NO: 4816475 - DNA, 25 bp, Homo sapien
caggccgagcgtgacacccaggaac

SEQ ID NO: 4816476 - DNA, 25 bp, Homo sapien
gatgttctttatagccccctggcca

SEQ ID NO: 4816477 - DNA, 25 bp, Homo sapien
cactgggcgtctgaacaaggctgtg

SEQ ID NO: 4816478 - DNA, 25 bp, Homo sapien
gctgtgctggctcctctcgagatgt

SEQ ID NO: 4816479 - DNA, 25 bp, Homo sapien
aggtcactgggcgtctgaacaaggc

SEQ ID NO: 4816480 - DNA, 25 bp, Homo sapien
ctaatcgctccctggagagcaggtt

SEQ ID NO: 4816481 - DNA, 25 bp, Homo sapien
taatcgctccctggagagcaggttt

SEQ ID NO: 4816482 - DNA, 25 bp, Homo sapien
tccccatgcggggacatggggggct

SEQ ID NO: 4816483 - DNA, 25 bp, Homo sapien
cccatgcggggacatggggggctct

SEQ ID NO: 4816484 - DNA, 25 bp, Homo sapien
gggctctgcagggccatgcctccta

SEQ ID NO: 4816485 - DNA, 25 bp, Homo sapien
gggggctctgcagggccatgcctcc

SEQ ID NO: 4816486 - DNA, 25 bp, Homo sapien
tgaggatgctctccgtgctgagtcc

SEQ ID NO: 4816487 - DNA, 25 bp, Homo sapien
atgaggatgctctccgtgctgagtc

SEQ ID NO: 4816488 - DNA, 25 bp, Homo sapien
ccctcggatcggcttcccgtgcagc

SEQ ID NO: 4816489 - DNA, 25 bp, Homo sapien
tcgcccctcggatcggcttcccgtg

SEQ ID NO: 4816490 - DNA, 25 bp, Homo sapien
agcttcgcccctcggatcggcttcc

SEQ ID NO: 4816491 - DNA, 25 bp, Homo sapien
ccacgagcttcgcccctcggatcgg

SEQ ID NO: 4816492 - DNA, 25 bp, Homo sapien
gatgatgtatgccacgtgcttgccc

SEQ ID NO: 4816493 - DNA, 25 bp, Homo sapien
ctgatgatgtatgccacgtgcttgc

SEQ ID NO: 4816494 - DNA, 25 bp, Homo sapien
atgatgtatgccacgtgcttgcccc

SEQ ID NO: 4816495 - DNA, 25 bp, Homo sapien
acctgatgatgtatgccacgtgctt

SEQ ID NO: 4816496 - DNA, 25 bp, Homo sapien
gccgtgtattttcccggctcgtcag

SEQ ID NO: 4816497 - DNA, 25 bp, Homo sapien
ggccgtgtattttcccggctcgtca

SEQ ID NO: 4816498 - DNA, 25 bp, Homo sapien
tgtccaccgtcatggccttcagata

SEQ ID NO: 4816499 - DNA, 25 bp, Homo sapien
tgagggtcatgggtgtcaccgattc

SEQ ID NO: 4816500 - DNA, 25 bp, Homo sapien
accgattccagattcatctcaggga

SEQ ID NO: 4816501 - DNA, 25 bp, Homo sapien
ccgtcatggccttcagataccacgt

SEQ ID NO: 4816502 - DNA, 25 bp, Homo sapien
atcctgaatctcctcgtctgaggcc

SEQ ID NO: 4816503 - DNA, 25 bp, Homo sapien
tgcagggcagcaatgaggctgaggc

SEQ ID NO: 4816504 - DNA, 25 bp, Homo sapien
ggcctgcagggcagcaatgaggctg

SEQ ID NO: 4816505 - DNA, 25 bp, Homo sapien
cctgaatctcctcgtctgaggccag

SEQ ID NO: 4816506 - DNA, 25 bp, Homo sapien
gcagagcctgccctttgtagctaca

SEQ ID NO: 4816507 - DNA, 25 bp, Homo sapien
ttggtggtcacctcgcaaaggagaa

SEQ ID NO: 4816508 - DNA, 25 bp, Homo sapien
aagtcctagctgtgaaaagttctcg

SEQ ID NO: 4816509 - DNA, 25 bp, Homo sapien
ttcacagaactaacgcagcagagcc

SEQ ID NO: 4816510 - DNA, 25 bp, Homo sapien
gagattttctaatgccgggcatgga

SEQ ID NO: 4816511 - DNA, 25 bp, Homo sapien
ccctgggtgctgaaatagtcaggat

SEQ ID NO: 4816512 - DNA, 25 bp, Homo sapien
aacaatgagattttctaatgccggg

SEQ ID NO: 4816513 - DNA, 25 bp, Homo sapien
attaggacagcggaccatggagaaa

SEQ ID NO: 4816514 - DNA, 25 bp, Homo sapien
tgtccccgtcacagagggtgcctgt

SEQ ID NO: 4816515 - DNA, 25 bp, Homo sapien
tacctggacgctgccatccttcaaa

SEQ ID NO: 4816516 - DNA, 25 bp, Homo sapien
tcagtctacctggacgctgccatcc

SEQ ID NO: 4816517 - DNA, 25 bp, Homo sapien
tcaaaacccagcccagtcccacctc

SEQ ID NO: 4816518 - DNA, 25 bp, Homo sapien
gagtcgccggcatctggaagcctgg

SEQ ID NO: 4816519 - DNA, 25 bp, Homo sapien
tgatgctgtggacatggccgtcccc

SEQ ID NO: 4816520 - DNA, 25 bp, Homo sapien
tccccacttatggagctcctcatgg

SEQ ID NO: 4816521 - DNA, 25 bp, Homo sapien
agcctggcaggcctccgcagcgtgg

SEQ ID NO: 4816522 - DNA, 25 bp, Homo sapien
taggacaactcgaaggtggagcggg

SEQ ID NO: 4816523 - DNA, 25 bp, Homo sapien
gatctgggcacagcctaattgtata

SEQ ID NO: 4816524 - DNA, 25 bp, Homo sapien
tgcaagatccacattgcttctgtcc

SEQ ID NO: 4816525 - DNA, 25 bp, Homo sapien
tctgagccgaatctgagtgaccaat

SEQ ID NO: 4816526 - DNA, 25 bp, Homo sapien
ttcaagctgcgaacatcataagcca

SEQ ID NO: 4816527 - DNA, 25 bp, Homo sapien
taaatgccactaatcagacttaagg

SEQ ID NO: 4816528 - DNA, 25 bp, Homo sapien
ttaacatgtgataggaggtgccacc

SEQ ID NO: 4816529 - DNA, 25 bp, Homo sapien
gctaggcagctacttgtcatcagga

SEQ ID NO: 4816530 - DNA, 25 bp, Homo sapien
aaaacgcttctcagaaggcggcggg

SEQ ID NO: 4816531 - DNA, 25 bp, Homo sapien
ttttctaatgttgctaatagactta

SEQ ID NO: 4816532 - DNA, 25 bp, Homo sapien
aaaatggctaaacatggctgagcgt

SEQ ID NO: 4816533 - DNA, 25 bp, Homo sapien
taaaggctaattcttgctagagtca

SEQ ID NO: 4816534 - DNA, 25 bp, Homo sapien
gactgtgtgctggaaaagccagcaa

SEQ ID NO: 4816535 - DNA, 25 bp, Homo sapien
tgactgtgtgctggaaaagccagca

SEQ ID NO: 4816536 - DNA, 25 bp, Homo sapien
actgtgtgctggaaaagccagcaac

SEQ ID NO: 4816537 - DNA, 25 bp, Homo sapien
gtgactgtgtgctggaaaagccagc

SEQ ID NO: 4816538 - DNA, 25 bp, Homo sapien
cctaagtctgtgtgcgtgagtctgt

SEQ ID NO: 4816539 - DNA, 25 bp, Homo sapien
gaaagctgtcccatatctgagatca

SEQ ID NO: 4816540 - DNA, 25 bp, Homo sapien
gagagcccggaagtgaatccatgca

SEQ ID NO: 4816541 - DNA, 25 bp, Homo sapien
attcgtatgagggagtaacacctgc

SEQ ID NO: 4816542 - DNA, 25 bp, Homo sapien
tttctgtggccggaagggcgtatct

SEQ ID NO: 4816543 - DNA, 25 bp, Homo sapien
ggtgtgtttctgtggccggaagggc

SEQ ID NO: 4816544 - DNA, 25 bp, Homo sapien
gtatctgcgattgcgtgtctgtgta

SEQ ID NO: 4816545 - DNA, 25 bp, Homo sapien
gggctgcgtgtgattgtgtgtctgt

SEQ ID NO: 4816546 - DNA, 25 bp, Homo sapien
gggctgccggcagccctcccagagc

SEQ ID NO: 4816547 - DNA, 25 bp, Homo sapien
gctgccggcagccctcccagagccc

SEQ ID NO: 4816548 - DNA, 25 bp, Homo sapien
ggagggggacggggctgccggcagc

SEQ ID NO: 4816549 - DNA, 25 bp, Homo sapien
ggggacggggctgccggcagccctc

SEQ ID NO: 4816550 - DNA, 25 bp, Homo sapien
ggaccgcctggtggttcttgggcac

SEQ ID NO: 4816551 - DNA, 25 bp, Homo sapien
cggaccgcctggtggttcttgggca

SEQ ID NO: 4816552 - DNA, 25 bp, Homo sapien
caggtagtagaaatcgccctcgtcc

SEQ ID NO: 4816553 - DNA, 25 bp, Homo sapien
actgatcatctccatgcggcgcatg

SEQ ID NO: 4816554 - DNA, 25 bp, Homo sapien
tgtggcgcagcaggtacttgttcag

SEQ ID NO: 4816555 - DNA, 25 bp, Homo sapien
gctgctggtcccacaagtactcggg

SEQ ID NO: 4816556 - DNA, 25 bp, Homo sapien
acccctgggctgcaggaggcccgtc

SEQ ID NO: 4816557 - DNA, 25 bp, Homo sapien
tgcacccctgggctgcaggaggccc

SEQ ID NO: 4816558 - DNA, 25 bp, Homo sapien
gtgcacccctgggctgcaggaggcc

SEQ ID NO: 4816559 - DNA, 25 bp, Homo sapien
cacccctgggctgcaggaggcccgt

SEQ ID NO: 4816560 - DNA, 25 bp, Homo sapien
ctggagcctgaactgctcgttgagg

SEQ ID NO: 4816561 - DNA, 25 bp, Homo sapien
gaactgctcgttgaggatgtcgatg

SEQ ID NO: 4816562 - DNA, 25 bp, Homo sapien
taacccaatggtggtgttctggagc

SEQ ID NO: 4816563 - DNA, 25 bp, Homo sapien
tggcaaacacagttaacccaatggt

SEQ ID NO: 4816564 - DNA, 25 bp, Homo sapien
ccagacaatgggagccagccaaggg

SEQ ID NO: 4816565 - DNA, 25 bp, Homo sapien
aatgcgactccaaccgggcaaatca

SEQ ID NO: 4816566 - DNA, 25 bp, Homo sapien
accagaggcaaatgcgactccaacc

SEQ ID NO: 4816567 - DNA, 25 bp, Homo sapien
accacccttccagaggcagccgccc

SEQ ID NO: 4816568 - DNA, 25 bp, Homo sapien
agaggcaaatgcgactccaaccggg

SEQ ID NO: 4816569 - DNA, 25 bp, Homo sapien
tgtcagcacctttgactgggggtag

SEQ ID NO: 4816570 - DNA, 25 bp, Homo sapien
gcacctttgactgggggtagaccat

SEQ ID NO: 4816571 - DNA, 25 bp, Homo sapien
tcagcacctttgactgggggtagac

SEQ ID NO: 4816572 - DNA, 25 bp, Homo sapien
cacggtgtcagcacctttgactggg

SEQ ID NO: 4816573 - DNA, 25 bp, Homo sapien
tggaaagcgtgggatgcaggtaagc

SEQ ID NO: 4816574 - DNA, 25 bp, Homo sapien
tgcaagcacaaagcgccgccacgtg

SEQ ID NO: 4816575 - DNA, 25 bp, Homo sapien
ccacgtgagtttgcatggaaagcgt

SEQ ID NO: 4816576 - DNA, 25 bp, Homo sapien
acaaagcgccgccacgtgagtttgc

SEQ ID NO: 4816577 - DNA, 25 bp, Homo sapien
cagagcccggcttcctctctgagaa

SEQ ID NO: 4816578 - DNA, 25 bp, Homo sapien
tgggcctccttgtgggctgctggct

SEQ ID NO: 4816579 - DNA, 25 bp, Homo sapien
tgggcccgaagcctgctgggcctcc

SEQ ID NO: 4816580 - DNA, 25 bp, Homo sapien
cctctctgagaagtgggagagtgac

SEQ ID NO: 4816581 - DNA, 25 bp, Homo sapien
atggtcaggttccctaacagccatg

SEQ ID NO: 4816582 - DNA, 25 bp, Homo sapien
cttggcaacgagacatgctgcagat

SEQ ID NO: 4816583 - DNA, 25 bp, Homo sapien
aacgagacatgctgcagatggtcag

SEQ ID NO: 4816584 - DNA, 25 bp, Homo sapien
gcaacgagacatgctgcagatggtc

SEQ ID NO: 4816585 - DNA, 25 bp, Homo sapien
cacgagtgggaattagcagacacag

SEQ ID NO: 4816586 - DNA, 25 bp, Homo sapien
gacaggccacgttggctggagcaca

SEQ ID NO: 4816587 - DNA, 25 bp, Homo sapien
gattgtgattgttttccatggatgg

SEQ ID NO: 4816588 - DNA, 25 bp, Homo sapien
aagagtggtcccaacagaggccata

SEQ ID NO: 4816589 - DNA, 25 bp, Homo sapien
tatgttctggaaagatcactccagc

SEQ ID NO: 4816590 - DNA, 25 bp, Homo sapien
tgttctggaaagatcactccagcta

SEQ ID NO: 4816591 - DNA, 25 bp, Homo sapien
ttatgttctggaaagatcactccag

SEQ ID NO: 4816592 - DNA, 25 bp, Homo sapien
cttatgttctggaaagatcactcca

SEQ ID NO: 4816593 - DNA, 25 bp, Homo sapien
aacccagtgtaggggtgagagcaaa

SEQ ID NO: 4816594 - DNA, 25 bp, Homo sapien
agtgggcacgcgagctgctgaagag

SEQ ID NO: 4816595 - DNA, 25 bp, Homo sapien
ctggagcaggacgtcgaaggcaggg

SEQ ID NO: 4816596 - DNA, 25 bp, Homo sapien
ggccagtgggcacgcgagctgctga

SEQ ID NO: 4816597 - DNA, 25 bp, Homo sapien
ccaggcttcctggcattagacttct

SEQ ID NO: 4816598 - DNA, 25 bp, Homo sapien
gcttcctggcattagacttctgggg

SEQ ID NO: 4816599 - DNA, 25 bp, Homo sapien
aggcttcctggcattagacttctgg

SEQ ID NO: 4816600 - DNA, 25 bp, Homo sapien
ggcttcctggcattagacttctggg

SEQ ID NO: 4816601 - DNA, 25 bp, Homo sapien
ggccagcctcgatggtcaaatgtgt

SEQ ID NO: 4816602 - DNA, 25 bp, Homo sapien
gataactgtgatacttggggagctc

SEQ ID NO: 4816603 - DNA, 25 bp, Homo sapien
gctggacgcaggcaataactgtcct

SEQ ID NO: 4816604 - DNA, 25 bp, Homo sapien
gtccttaggaccctgataactgtga

SEQ ID NO: 4816605 - DNA, 25 bp, Homo sapien
ttaggaaaaggatcataggtcgaag

SEQ ID NO: 4816606 - DNA, 25 bp, Homo sapien
tcataggtcgaagtgcgtggcattt

SEQ ID NO: 4816607 - DNA, 25 bp, Homo sapien
agacaagcattattaggaaaaggat

SEQ ID NO: 4816608 - DNA, 25 bp, Homo sapien
cgaagtgcgtggcattttggttttc

SEQ ID NO: 4816609 - DNA, 25 bp, Homo sapien
cagctcatcagcccgactgctcctg

SEQ ID NO: 4816610 - DNA, 25 bp, Homo sapien
caaacccagtccagatctggccctc

SEQ ID NO: 4816611 - DNA, 25 bp, Homo sapien
aagagggaggcggtctgctcctccc

SEQ ID NO: 4816612 - DNA, 25 bp, Homo sapien
gactctgagagccaccccggcttcc

SEQ ID NO: 4816613 - DNA, 25 bp, Homo sapien
ccttcaatgtggcaaaaatggttcc

SEQ ID NO: 4816614 - DNA, 25 bp, Homo sapien
aaatgtgcccactttaggtatacgg

SEQ ID NO: 4816615 - DNA, 25 bp, Homo sapien
tgtaatcaccccagtaaggtccctc

SEQ ID NO: 4816616 - DNA, 25 bp, Homo sapien
gaagcacgccattgttaatccgcca

SEQ ID NO: 4816617 - DNA, 25 bp, Homo sapien
tcttccctcaatggatatccagtca

SEQ ID NO: 4816618 - DNA, 25 bp, Homo sapien
gagattatgtggactctgtagatcc

SEQ ID NO: 4816619 - DNA, 25 bp, Homo sapien
gtattgtgtgaaaggctaaagtccc

SEQ ID NO: 4816620 - DNA, 25 bp, Homo sapien
cagtttagcaatgtaagtcttccaa

SEQ ID NO: 4816621 - DNA, 25 bp, Homo sapien
tgacatctctagaacactccacctg

SEQ ID NO: 4816622 - DNA, 25 bp, Homo sapien
cactccacctggcaagagccgaagt

SEQ ID NO: 4816623 - DNA, 25 bp, Homo sapien
accaaaatcctaccccactctcaat

SEQ ID NO: 4816624 - DNA, 25 bp, Homo sapien
aatcctaccccactctcaataatgg

SEQ ID NO: 4816625 - DNA, 25 bp, Homo sapien
caattcctctgctgggtatcaaccc

SEQ ID NO: 4816626 - DNA, 25 bp, Homo sapien
gctgcgtgcagtttaaaatagctaa

SEQ ID NO: 4816627 - DNA, 25 bp, Homo sapien
attagaaccgttatacactgctgat

SEQ ID NO: 4816628 - DNA, 25 bp, Homo sapien
tgttcatagcagtgctgcgtgcagt

SEQ ID NO: 4816629 - DNA, 25 bp, Homo sapien
ttggtccaggaacagtttgatctct

SEQ ID NO: 4816630 - DNA, 25 bp, Homo sapien
ttgggccacgagagatagcagcccc

SEQ ID NO: 4816631 - DNA, 25 bp, Homo sapien
acccaccagaatggaggagagccgg

SEQ ID NO: 4816632 - DNA, 25 bp, Homo sapien
ggtcttctccttgtaactggttaca

SEQ ID NO: 4816633 - DNA, 25 bp, Homo sapien
gccagcgtccgcaacacctcggcca

SEQ ID NO: 4816634 - DNA, 25 bp, Homo sapien
cggccagcgtccgcaacacctcggc

SEQ ID NO: 4816635 - DNA, 25 bp, Homo sapien
ccagcgtccgcaacacctcggccat

SEQ ID NO: 4816636 - DNA, 25 bp, Homo sapien
ggccagcgtccgcaacacctcggcc

SEQ ID NO: 4816637 - DNA, 25 bp, Homo sapien
ggagctcccggcttgctcatggcaa

SEQ ID NO: 4816638 - DNA, 25 bp, Homo sapien
cctacccacgttactgtcagagtga

SEQ ID NO: 4816639 - DNA, 25 bp, Homo sapien
agtgccacggaaagagacagctgtg

SEQ ID NO: 4816640 - DNA, 25 bp, Homo sapien
tcagagtgaggaatgcgctcagcct

SEQ ID NO: 4816641 - DNA, 25 bp, Homo sapien
tctggaatactgcaaccgttgagga

SEQ ID NO: 4816642 - DNA, 25 bp, Homo sapien
aattcgtcaggtatcacaaaagcag

SEQ ID NO: 4816643 - DNA, 25 bp, Homo sapien
actataggcataggcgtgggcaacc

SEQ ID NO: 4816644 - DNA, 25 bp, Homo sapien
ggctgggtctcattcgctcctgaaa

SEQ ID NO: 4816645 - DNA, 25 bp, Homo sapien
tctaaaatcttgacattggtatttg

SEQ ID NO: 4816646 - DNA, 25 bp, Homo sapien
attgtctaaaatcttgacattggta

SEQ ID NO: 4816647 - DNA, 25 bp, Homo sapien
cttgacattggtatttgtagggacc

SEQ ID NO: 4816648 - DNA, 25 bp, Homo sapien
agaccactactaccaatgctcggag

SEQ ID NO: 4816649 - DNA, 25 bp, Homo sapien
gctgctttagctctgttccacaaat

SEQ ID NO: 4816650 - DNA, 25 bp, Homo sapien
ttgttccaacttaagctgcatgctt

SEQ ID NO: 4816651 - DNA, 25 bp, Homo sapien
ttcatcagtgattacaactcaggct

SEQ ID NO: 4816652 - DNA, 25 bp, Homo sapien
ggcactatttatctgtagatgcaca

SEQ ID NO: 4816653 - DNA, 25 bp, Homo sapien
tcttttctggacaaagtaggtggtc

SEQ ID NO: 4816654 - DNA, 25 bp, Homo sapien
tcagataacgacactgattccttga

SEQ ID NO: 4816655 - DNA, 25 bp, Homo sapien
gacattgggatacggtcagataacg

SEQ ID NO: 4816656 - DNA, 25 bp, Homo sapien
tcacagggctttttcatcagttgcc

SEQ ID NO: 4816657 - DNA, 25 bp, Homo sapien
aactcacatgcgtggactccgggaa

SEQ ID NO: 4816658 - DNA, 25 bp, Homo sapien
ttctgagcagtaaaatgccgccccg

SEQ ID NO: 4816659 - DNA, 25 bp, Homo sapien
tctgttcgggtgagctgcggactaa

SEQ ID NO: 4816660 - DNA, 25 bp, Homo sapien
aaggtcccggatcctgcgttcaagg

SEQ ID NO: 4816661 - DNA, 25 bp, Homo sapien
caggcgttcgtcgtcacggatcttc

SEQ ID NO: 4816662 - DNA, 25 bp, Homo sapien
caggatgcggcccttcttgcgggct

SEQ ID NO: 4816663 - DNA, 25 bp, Homo sapien
ccttgtagaggaggttggtccactt

SEQ ID NO: 4816664 - DNA, 25 bp, Homo sapien
gtcagcggcgtgaggttccccttca

SEQ ID NO: 4816665 - DNA, 25 bp, Homo sapien
tggccttctctttcgcccgcagctc

SEQ ID NO: 4816666 - DNA, 25 bp, Homo sapien
ttcctgctttctccgccgccttttc

SEQ ID NO: 4816667 - DNA, 25 bp, Homo sapien
tattgaagatcagcccgggcggctc

SEQ ID NO: 4816668 - DNA, 25 bp, Homo sapien
cggctccgtgcaggccccctctggg

SEQ ID NO: 4816669 - DNA, 25 bp, Homo sapien
gagaaaatcctcacgcaaacaaggg

SEQ ID NO: 4816670 - DNA, 25 bp, Homo sapien
gggcccgcggagttcaatgttccac

SEQ ID NO: 4816671 - DNA, 25 bp, Homo sapien
cctggcccatagtcgagaagaatca

SEQ ID NO: 4816672 - DNA, 25 bp, Homo sapien
ttaaagttctctcgatcccagggtc

SEQ ID NO: 4816673 - DNA, 25 bp, Homo sapien
atgcagtcgctgtcgcagaacatcc

SEQ ID NO: 4816674 - DNA, 25 bp, Homo sapien
gatcttctcatgcagtcgctgtcgc

SEQ ID NO: 4816675 - DNA, 25 bp, Homo sapien
ttctcatgcagtcgctgtcgcagaa

SEQ ID NO: 4816676 - DNA, 25 bp, Homo sapien
tcatgcagtcgctgtcgcagaacat

SEQ ID NO: 4816677 - DNA, 25 bp, Homo sapien
gaacaagttggctctcacaaggccc

SEQ ID NO: 4816678 - DNA, 25 bp, Homo sapien
caccgtggtatgagaaaacacttcc

SEQ ID NO: 4816679 - DNA, 25 bp, Homo sapien
gacaggtaactcagtgcctcacgag

SEQ ID NO: 4816680 - DNA, 25 bp, Homo sapien
gacatcctgctagccatgtggcctg

SEQ ID NO: 4816681 - DNA, 25 bp, Homo sapien
ctcgcttccggaatttcttttgtgt

SEQ ID NO: 4816682 - DNA, 25 bp, Homo sapien
ttctcttctcgcttccggaatttct

SEQ ID NO: 4816683 - DNA, 25 bp, Homo sapien
cttctcgcttccggaatttcttttg

SEQ ID NO: 4816684 - DNA, 25 bp, Homo sapien
tctcttctcgcttccggaatttctt

SEQ ID NO: 4816685 - DNA, 25 bp, Homo sapien
tgcgcgcctgctgttccggggccga

SEQ ID NO: 4816686 - DNA, 25 bp, Homo sapien
ggcgtccttggcgagtagagaggcc

SEQ ID NO: 4816687 - DNA, 25 bp, Homo sapien
cgtccttggcgagtagagaggccat

SEQ ID NO: 4816688 - DNA, 25 bp, Homo sapien
ttccggggccgaatgggagcagatc

SEQ ID NO: 4816689 - DNA, 25 bp, Homo sapien
gctcgattagccaagcctgactccg

SEQ ID NO: 4816690 - DNA, 25 bp, Homo sapien
ggaaaccaccacacgggcaggcgcg

SEQ ID NO: 4816691 - DNA, 25 bp, Homo sapien
aatctccgcccggagtcggtgcagc

SEQ ID NO: 4816692 - DNA, 25 bp, Homo sapien
aggcgcggccaaacgaacgccgagc

SEQ ID NO: 4816693 - DNA, 25 bp, Homo sapien
taaggttaattagttctgacatccc

SEQ ID NO: 4816694 - DNA, 25 bp, Homo sapien
ttagttctgacatcccactgccatt

SEQ ID NO: 4816695 - DNA, 25 bp, Homo sapien
gacactaaggttaattagttctgac

SEQ ID NO: 4816696 - DNA, 25 bp, Homo sapien
tgggggtcgaatgccaactatagtg

SEQ ID NO: 4816697 - DNA, 25 bp, Homo sapien
caacggcagaattaggaatgagtcc

SEQ ID NO: 4816698 - DNA, 25 bp, Homo sapien
caacgggccagacctagcttggaaa

SEQ ID NO: 4816699 - DNA, 25 bp, Homo sapien
tgttcctgagaacgaagcgtggccc

SEQ ID NO: 4816700 - DNA, 25 bp, Homo sapien
ccaaatgggaacctaggctgagaga

SEQ ID NO: 4816701 - DNA, 25 bp, Homo sapien
ggccaccagcatgggagtgggcagg

SEQ ID NO: 4816702 - DNA, 25 bp, Homo sapien
caggcgtgctcagtggggccagggc

SEQ ID NO: 4816703 - DNA, 25 bp, Homo sapien
ccagggccaccagcatgggagtggg

SEQ ID NO: 4816704 - DNA, 25 bp, Homo sapien
tcaggcgtgctcagtggggccaggg

SEQ ID NO: 4816705 - DNA, 25 bp, Homo sapien
agagtctgtgtcgaggtccagcctc

SEQ ID NO: 4816706 - DNA, 25 bp, Homo sapien
agcctcccgtaagcttcgcacagag

SEQ ID NO: 4816707 - DNA, 25 bp, Homo sapien
gcttcgcacagaggcaggtcattag

SEQ ID NO: 4816708 - DNA, 25 bp, Homo sapien
cagcagagtctgtgtcgaggtccag

SEQ ID NO: 4816709 - DNA, 25 bp, Homo sapien
tgtctgtcggtcaaacgctctggcc

SEQ ID NO: 4816710 - DNA, 25 bp, Homo sapien
gagagccaccctagcattctgaaag

SEQ ID NO: 4816711 - DNA, 25 bp, Homo sapien
tgttcagtctcagaaccgtcctggg

SEQ ID NO: 4816712 - DNA, 25 bp, Homo sapien
tccctgcctgagacttagcctgaag

SEQ ID NO: 4816713 - DNA, 25 bp, Homo sapien
gaagtcattgaggatcaggaactgc

SEQ ID NO: 4816714 - DNA, 25 bp, Homo sapien
tggtcaatggcctcgttcacggagg

SEQ ID NO: 4816715 - DNA, 25 bp, Homo sapien
tcaatggagatctcgtctcgcagcg

SEQ ID NO: 4816716 - DNA, 25 bp, Homo sapien
cgtgatgagcttccggtcgcactcc

SEQ ID NO: 4816717 - DNA, 25 bp, Homo sapien
tctcgtaattgtcctgttcaccctg

SEQ ID NO: 4816718 - DNA, 25 bp, Homo sapien
gatgttggcggctcgcacatgcatc

SEQ ID NO: 4816719 - DNA, 25 bp, Homo sapien
gtgacacctgcgtctcgtcctcaat

SEQ ID NO: 4816720 - DNA, 25 bp, Homo sapien
ctgagtggcccgtgacacctgcgtc

SEQ ID NO: 4816721 - DNA, 25 bp, Homo sapien
tgtccatgatggacttaatgtcgtc

SEQ ID NO: 4816722 - DNA, 25 bp, Homo sapien
tgttgtaggactgcagcagcgtctc

SEQ ID NO: 4816723 - DNA, 25 bp, Homo sapien
gatgatctcggtgaagttgtccatg

SEQ ID NO: 4816724 - DNA, 25 bp, Homo sapien
ccttcagccgcttgttgtaggactg

SEQ ID NO: 4816725 - DNA, 25 bp, Homo sapien
cctcaagcagcgcagcggggagacc

SEQ ID NO: 4816726 - DNA, 25 bp, Homo sapien
ctcaagcagcgcagcggggagacct

SEQ ID NO: 4816727 - DNA, 25 bp, Homo sapien
agcctcaagcagcgcagcggggaga

SEQ ID NO: 4816728 - DNA, 25 bp, Homo sapien
gagcctcaagcagcgcagcggggag

SEQ ID NO: 4816729 - DNA, 25 bp, Homo sapien
gaggtcctaaaaagtggtcattcca

SEQ ID NO: 4816730 - DNA, 25 bp, Homo sapien
cctccagtctctgcgcggcagggaa

SEQ ID NO: 4816731 - DNA, 25 bp, Homo sapien
agtggtcattccaaccgggcgcggt

SEQ ID NO: 4816732 - DNA, 25 bp, Homo sapien
tcatccctgcactgcgggccccgct

SEQ ID NO: 4816733 - DNA, 25 bp, Homo sapien
cctaggttcggagtctggcgcacga

SEQ ID NO: 4816734 - DNA, 25 bp, Homo sapien
actggacggcctcggcgctggagtt

SEQ ID NO: 4816735 - DNA, 25 bp, Homo sapien
gacaaggggctcaagttccgcgccg

SEQ ID NO: 4816736 - DNA, 25 bp, Homo sapien
catggttccccggtgcgccgggaca

SEQ ID NO: 4816737 - DNA, 25 bp, Homo sapien
gtggtcaagtgcctctgcgacccgc

SEQ ID NO: 4816738 - DNA, 25 bp, Homo sapien
gcgccgcggtccgaaaacctagtca

SEQ ID NO: 4816739 - DNA, 25 bp, Homo sapien
cgcggtccgaaaacctagtcagccg

SEQ ID NO: 4816740 - DNA, 25 bp, Homo sapien
gcactttcccgcgtctctcccacgg

SEQ ID NO: 4816741 - DNA, 25 bp, Homo sapien
ggccccagctgtcgtgaagaagcag

SEQ ID NO: 4816742 - DNA, 25 bp, Homo sapien
gaaagaaggtggctccggccccagc

SEQ ID NO: 4816743 - DNA, 25 bp, Homo sapien
ggctaagaaagtggtgaatcccctg

SEQ ID NO: 4816744 - DNA, 25 bp, Homo sapien
aagcaggaggctaagaaagtggtga

SEQ ID NO: 4816745 - DNA, 25 bp, Homo sapien
cgctttgtgaaatggccccgctata

SEQ ID NO: 4816746 - DNA, 25 bp, Homo sapien
gagagccatcctctataagcggctg

SEQ ID NO: 4816747 - DNA, 25 bp, Homo sapien
ccaaaagagacctcacccgctttgt

SEQ ID NO: 4816748 - DNA, 25 bp, Homo sapien
ggccccgctatatcaggttgcagcg

SEQ ID NO: 4816749 - DNA, 25 bp, Homo sapien
acgtcccaacgaagagaccacctgt

SEQ ID NO: 4816750 - DNA, 25 bp, Homo sapien
agagactgttggcccgggccgagaa

SEQ ID NO: 4816751 - DNA, 25 bp, Homo sapien
ccgggccgagaagaaggctgctggc

SEQ ID NO: 4816752 - DNA, 25 bp, Homo sapien
ttggcccgggccgagaagaaggctg

SEQ ID NO: 4816753 - DNA, 25 bp, Homo sapien
caccgtcaccaccttggtggagaac

SEQ ID NO: 4816754 - DNA, 25 bp, Homo sapien
gtggtgattgcacacgacgtggatc

SEQ ID NO: 4816755 - DNA, 25 bp, Homo sapien
acaccgtcaccaccttggtggagaa

SEQ ID NO: 4816756 - DNA, 25 bp, Homo sapien
tgcacacgacgtggatcccatcgag

SEQ ID NO: 4816757 - DNA, 25 bp, Homo sapien
tgtaacttgcatatcaagttttggg

SEQ ID NO: 4816758 - DNA, 25 bp, Homo sapien
aaattttccttcagccagtgtctgt

SEQ ID NO: 4816759 - DNA, 25 bp, Homo sapien
tcccaggtttaggatattctggtgc

SEQ ID NO: 4816760 - DNA, 25 bp, Homo sapien
tatctcgggttgaatcttacttggg

SEQ ID NO: 4816761 - DNA, 25 bp, Homo sapien
aaaccacaggtaggatgtagctgca

SEQ ID NO: 4816762 - DNA, 25 bp, Homo sapien
cacaggtaggatgtagctgcagaga

SEQ ID NO: 4816763 - DNA, 25 bp, Homo sapien
tcttaaaccacaggtaggatgtagc

SEQ ID NO: 4816764 - DNA, 25 bp, Homo sapien
accacaggtaggatgtagctgcaga

SEQ ID NO: 4816765 - DNA, 25 bp, Homo sapien
cagagtaactctggtttgccctcca

SEQ ID NO: 4816766 - DNA, 25 bp, Homo sapien
gatgctcgttcctcagagtaactct

SEQ ID NO: 4816767 - DNA, 25 bp, Homo sapien
caggtcacgatgtactgcagatgct

SEQ ID NO: 4816768 - DNA, 25 bp, Homo sapien
ggtttgccctccaatgggtcctcca

SEQ ID NO: 4816769 - DNA, 25 bp, Homo sapien
tacttgttccgagatgggctggtcc

SEQ ID NO: 4816770 - DNA, 25 bp, Homo sapien
ttgtccgctcagtacttgcctaggt

SEQ ID NO: 4816771 - DNA, 25 bp, Homo sapien
tggcctttacgttgggtgaccatcc

SEQ ID NO: 4816772 - DNA, 25 bp, Homo sapien
tcatttttgcgtggccagttggaag

SEQ ID NO: 4816773 - DNA, 25 bp, Homo sapien
cttccaggtctcgataatgccagtg

SEQ ID NO: 4816774 - DNA, 25 bp, Homo sapien
gaagttggcatcaatgaagatgggc

SEQ ID NO: 4816775 - DNA, 25 bp, Homo sapien
ttgttctcagggacaaaaggctgcc

SEQ ID NO: 4816776 - DNA, 25 bp, Homo sapien
gaagatgggctctgcgcctgtgatt

SEQ ID NO: 4816777 - DNA, 25 bp, Homo sapien
agtaggaagagtccatgtcccttac

SEQ ID NO: 4816778 - DNA, 25 bp, Homo sapien
aaggtgtgtgagattgcatggagcc

SEQ ID NO: 4816779 - DNA, 25 bp, Homo sapien
tctctaaagtaggaagagtccatgt

SEQ ID NO: 4816780 - DNA, 25 bp, Homo sapien
tgtgagattgcatggagcctggtgg

SEQ ID NO: 4816781 - DNA, 25 bp, Homo sapien
acgaaccctctatttaccaggatgg

SEQ ID NO: 4816782 - DNA, 25 bp, Homo sapien
aacgaaccctctatttaccaggatg

SEQ ID NO: 4816783 - DNA, 25 bp, Homo sapien
ctggcctttctgccgggtttcagga

SEQ ID NO: 4816784 - DNA, 25 bp, Homo sapien
tgccgggtttcaggattcactttct

SEQ ID NO: 4816785 - DNA, 25 bp, Homo sapien
agggagtgaccacataggccccact

SEQ ID NO: 4816786 - DNA, 25 bp, Homo sapien
agtgaccacataggccccactctga

SEQ ID NO: 4816787 - DNA, 25 bp, Homo sapien
ggaggagatgaggccgccctcccgg

SEQ ID NO: 4816788 - DNA, 25 bp, Homo sapien
ggagtgaccacataggccccactct

SEQ ID NO: 4816789 - DNA, 25 bp, Homo sapien
ctccttggaatggtcaaagcacccc

SEQ ID NO: 4816790 - DNA, 25 bp, Homo sapien
ttcactggcctatactccagatttt

SEQ ID NO: 4816791 - DNA, 25 bp, Homo sapien
ggtccggggcatcatatacagctcc

SEQ ID NO: 4816792 - DNA, 25 bp, Homo sapien
ccttcactggcctatactccagatt

SEQ ID NO: 4816793 - DNA, 25 bp, Homo sapien
gtcaggtgtcaacagcaagcccaac

SEQ ID NO: 4816794 - DNA, 25 bp, Homo sapien
cagatgactgataatgagagctccc

SEQ ID NO: 4816795 - DNA, 25 bp, Homo sapien
tcagggcactttttcaaacgaccac

SEQ ID NO: 4816796 - DNA, 25 bp, Homo sapien
caggaggcggtctcaggtagcttca

SEQ ID NO: 4816797 - DNA, 25 bp, Homo sapien
gtcccaccaaaaggggcaagctggc

SEQ ID NO: 4816798 - DNA, 25 bp, Homo sapien
ctgttgaactcaagtaaaacaggcc

SEQ ID NO: 4816799 - DNA, 25 bp, Homo sapien
gtcaaggcagtgactaaaagtccca

SEQ ID NO: 4816800 - DNA, 25 bp, Homo sapien
aaggcagtgactaaaagtcccacca

SEQ ID NO: 4816801 - DNA, 25 bp, Homo sapien
ttcagcttccacttccgacgctgga

SEQ ID NO: 4816802 - DNA, 25 bp, Homo sapien
tcaggttcagcttccacttccgacg

SEQ ID NO: 4816803 - DNA, 25 bp, Homo sapien
actctgcaatcaggttcagcttcca

SEQ ID NO: 4816804 - DNA, 25 bp, Homo sapien
actccaactctgcaatcaggttcag

SEQ ID NO: 4816805 - DNA, 25 bp, Homo sapien
cagatggcagcaaggtcaagggccc

SEQ ID NO: 4816806 - DNA, 25 bp, Homo sapien
ctacagtgacagagcataaggccaa

SEQ ID NO: 4816807 - DNA, 25 bp, Homo sapien
gtcaagggcccagagttacgcacac

SEQ ID NO: 4816808 - DNA, 25 bp, Homo sapien
cagtgacagagcataaggccaagca

SEQ ID NO: 4816809 - DNA, 25 bp, Homo sapien
gaagaaaggagtcatcttccgcttt

SEQ ID NO: 4816810 - DNA, 25 bp, Homo sapien
tcttccgcttttgtggcagatgctt

SEQ ID NO: 4816811 - DNA, 25 bp, Homo sapien
caagccaaaggcagtcacagggatg

SEQ ID NO: 4816812 - DNA, 25 bp, Homo sapien
ggagcaggacccactgaagaaagga

SEQ ID NO: 4816813 - DNA, 25 bp, Homo sapien
ctgccacatctgcttggcctccagg

SEQ ID NO: 4816814 - DNA, 25 bp, Homo sapien
catctgcttggcctccaggccaccc

SEQ ID NO: 4816815 - DNA, 25 bp, Homo sapien
cacatctgcttggcctccaggccac

SEQ ID NO: 4816816 - DNA, 25 bp, Homo sapien
gccacatctgcttggcctccaggcc

SEQ ID NO: 4816817 - DNA, 25 bp, Homo sapien
gagagtttcacaacactgacatgga

SEQ ID NO: 4816818 - DNA, 25 bp, Homo sapien
tggagagtttcacaacactgacatg

SEQ ID NO: 4816819 - DNA, 25 bp, Homo sapien
gccagaagccctcgaacacagacct

SEQ ID NO: 4816820 - DNA, 25 bp, Homo sapien
acactgacatggagccagaagccct

SEQ ID NO: 4816821 - DNA, 25 bp, Homo sapien
gagctctcttaacagctttccattt

SEQ ID NO: 4816822 - DNA, 25 bp, Homo sapien
agagctctcttaacagctttccatt

SEQ ID NO: 4816823 - DNA, 25 bp, Homo sapien
acagctttccatttttacaactcat

SEQ ID NO: 4816824 - DNA, 25 bp, Homo sapien
tcttaacagctttccatttttacaa

SEQ ID NO: 4816825 - DNA, 25 bp, Homo sapien
cattagctggatgggacgttcggaa

SEQ ID NO: 4816826 - DNA, 25 bp, Homo sapien
tgcacactgagaggaacacgtaagc

SEQ ID NO: 4816827 - DNA, 25 bp, Homo sapien
cgttgtgaggacaaagcgctcgcta

SEQ ID NO: 4816828 - DNA, 25 bp, Homo sapien
aatacggaacttgtcactcccaggg

SEQ ID NO: 4816829 - DNA, 25 bp, Homo sapien
gggagaccctgaggacgctcctcca

SEQ ID NO: 4816830 - DNA, 25 bp, Homo sapien
cgcggggagaccctgaggacgctcc

SEQ ID NO: 4816831 - DNA, 25 bp, Homo sapien
cggggagaccctgaggacgctcctc

SEQ ID NO: 4816832 - DNA, 25 bp, Homo sapien
gagaccctgaggacgctcctccagg

SEQ ID NO: 4816833 - DNA, 25 bp, Homo sapien
gccccagctgcaacgcagccaccgc

SEQ ID NO: 4816834 - DNA, 25 bp, Homo sapien
agccccagctgcaacgcagccaccg

SEQ ID NO: 4816835 - DNA, 25 bp, Homo sapien
gcagccccagctgcaacgcagccac

SEQ ID NO: 4816836 - DNA, 25 bp, Homo sapien
cagccccagctgcaacgcagccacc

SEQ ID NO: 4816837 - DNA, 25 bp, Homo sapien
catgagcgagttgccgggcgacgtg

SEQ ID NO: 4816838 - DNA, 25 bp, Homo sapien
ggctccaggttctgcgagcggcttc

SEQ ID NO: 4816839 - DNA, 25 bp, Homo sapien
cgtttctgcgggagcacccgagcct

SEQ ID NO: 4816840 - DNA, 25 bp, Homo sapien
ggcgcttccgggacgcaggaggcat

SEQ ID NO: 4816841 - DNA, 25 bp, Homo sapien
tgttttgccagaatcaattggtaga

SEQ ID NO: 4816842 - DNA, 25 bp, Homo sapien
ggcatcttcccgaatcaggccctag

SEQ ID NO: 4816843 - DNA, 25 bp, Homo sapien
aatgagatttagatctgtttcccac

SEQ ID NO: 4816844 - DNA, 25 bp, Homo sapien
aacaggaacacccactaggacggag

SEQ ID NO: 4816845 - DNA, 25 bp, Homo sapien
tgtcatacggcactaacagggagcg

SEQ ID NO: 4816846 - DNA, 25 bp, Homo sapien
catttactatggtgcagacgacagg

SEQ ID NO: 4816847 - DNA, 25 bp, Homo sapien
caaacggacaatctgagtgagcgac

SEQ ID NO: 4816848 - DNA, 25 bp, Homo sapien
caaacgcgttgggactagttcggct

SEQ ID NO: 4816849 - DNA, 25 bp, Homo sapien
gttcactccaaagcctcggcgtggg

SEQ ID NO: 4816850 - DNA, 25 bp, Homo sapien
gcctgcactgaagggtcagacgcca

SEQ ID NO: 4816851 - DNA, 25 bp, Homo sapien
taataccaatgcgtctgctcacagt

SEQ ID NO: 4816852 - DNA, 25 bp, Homo sapien
tgagatgccacagccaagcgggctg

SEQ ID NO: 4816853 - DNA, 25 bp, Homo sapien
tgacggccacgggtcttagccaggc

SEQ ID NO: 4816854 - DNA, 25 bp, Homo sapien
ttgttgaatccaccccgaaccagtc

SEQ ID NO: 4816855 - DNA, 25 bp, Homo sapien
catctgtgcctttaccaagggaggg

SEQ ID NO: 4816856 - DNA, 25 bp, Homo sapien
gggaagaggatacataaaagctggc

SEQ ID NO: 4816857 - DNA, 25 bp, Homo sapien
aaatatacgttgatggcaaagagcc

SEQ ID NO: 4816858 - DNA, 25 bp, Homo sapien
tcaccgacatggtctggaagaagtc

SEQ ID NO: 4816859 - DNA, 25 bp, Homo sapien
tatttcaggaagtcatgcatgggct

SEQ ID NO: 4816860 - DNA, 25 bp, Homo sapien
catgggcttgtagactggaatggtc

SEQ ID NO: 4816861 - DNA, 25 bp, Homo sapien
gatgtagctactgctgagacggctg

SEQ ID NO: 4816862 - DNA, 25 bp, Homo sapien
tccatcaggctgatgtagctactgc

SEQ ID NO: 4816863 - DNA, 25 bp, Homo sapien
gctgctgcacgtcatgaagtctcta

SEQ ID NO: 4816864 - DNA, 25 bp, Homo sapien
gcataggttgaaacgtaagaaattc

SEQ ID NO: 4816865 - DNA, 25 bp, Homo sapien
taaattcccaagtgcttcttggccc

SEQ ID NO: 4816866 - DNA, 25 bp, Homo sapien
aaaaagtttgctccgccgagcacgg

SEQ ID NO: 4816867 - DNA, 25 bp, Homo sapien
tctcagtcagctccggaggtgtgct

SEQ ID NO: 4816868 - DNA, 25 bp, Homo sapien
gaagttcccaactagtaacaggctg

SEQ ID NO: 4816869 - DNA, 25 bp, Homo sapien
gaaaagaagctggcgtcaaagtgaa

SEQ ID NO: 4816870 - DNA, 25 bp, Homo sapien
aaagaagctggcgtcaaagtgaagg

SEQ ID NO: 4816871 - DNA, 25 bp, Homo sapien
agaaaagaagctggcgtcaaagtga

SEQ ID NO: 4816872 - DNA, 25 bp, Homo sapien
aagaagctggcgtcaaagtgaagga

SEQ ID NO: 4816873 - DNA, 25 bp, Homo sapien
tggggacgcccgcaaacatgctctt

SEQ ID NO: 4816874 - DNA, 25 bp, Homo sapien
aacgggattctgctaggagcagcaa

SEQ ID NO: 4816875 - DNA, 25 bp, Homo sapien
agctctcacgcatggtggggacgcc

SEQ ID NO: 4816876 - DNA, 25 bp, Homo sapien
cttcagaacgggattctgctaggag

SEQ ID NO: 4816877 - DNA, 25 bp, Homo sapien
aatgctcaacctgtagaaggagcgt

SEQ ID NO: 4816878 - DNA, 25 bp, Homo sapien
caacctgtagaaggagcgtatacta

SEQ ID NO: 4816879 - DNA, 25 bp, Homo sapien
tagaaggagcgtatactaaaaccaa

SEQ ID NO: 4816880 - DNA, 25 bp, Homo sapien
tgtagaaggagcgtatactaaaacc

SEQ ID NO: 4816881 - DNA, 25 bp, Homo sapien
cccataaaatgctgtaggcaatcgt

SEQ ID NO: 4816882 - DNA, 25 bp, Homo sapien
aagtcccataaaatgctgtaggcaa

SEQ ID NO: 4816883 - DNA, 25 bp, Homo sapien
gtcccataaaatgctgtaggcaatc

SEQ ID NO: 4816884 - DNA, 25 bp, Homo sapien
tcatcaaaaacttcaagtcccataa

SEQ ID NO: 4816885 - DNA, 25 bp, Homo sapien
caaaaccattgtaggagaccgagga

SEQ ID NO: 4816886 - DNA, 25 bp, Homo sapien
aaagatggcccagtaccgaatgacc

SEQ ID NO: 4816887 - DNA, 25 bp, Homo sapien
tgaagcaacgtgataacaagacagc

SEQ ID NO: 4816888 - DNA, 25 bp, Homo sapien
taggccgtctctccaatgtcagctg

SEQ ID NO: 4816889 - DNA, 25 bp, Homo sapien
tgcagagctatgattccaaagagcc

SEQ ID NO: 4816890 - DNA, 25 bp, Homo sapien
aaagagcccgaagcaggcgtactgc

SEQ ID NO: 4816891 - DNA, 25 bp, Homo sapien
ccgaagcaggcgtactgcacgaagt

SEQ ID NO: 4816892 - DNA, 25 bp, Homo sapien
tactgcacgaagttcctgctcaaca

SEQ ID NO: 4816893 - DNA, 25 bp, Homo sapien
tgaggaagacgaaggacgaggccag

SEQ ID NO: 4816894 - DNA, 25 bp, Homo sapien
agtcgcgctgctcgctccactggaa

SEQ ID NO: 4816895 - DNA, 25 bp, Homo sapien
cactggaaccacatacggatgccgt

SEQ ID NO: 4816896 - DNA, 25 bp, Homo sapien
ttccaggtggtgtcgatgtagtcgc

SEQ ID NO: 4816897 - DNA, 25 bp, Homo sapien
acagaaacccaagggtgaggtggct

SEQ ID NO: 4816898 - DNA, 25 bp, Homo sapien
tgcagggccacagaaacccaagggt

SEQ ID NO: 4816899 - DNA, 25 bp, Homo sapien
gggcggggtgtgtgaggaacagacg

SEQ ID NO: 4816900 - DNA, 25 bp, Homo sapien
aggccgctgccaggcacgtccttgg

SEQ ID NO: 4816901 - DNA, 25 bp, Homo sapien
tactatcctgcagtagagtgaggcc

SEQ ID NO: 4816902 - DNA, 25 bp, Homo sapien
tactcagcctttgactccacggaag

SEQ ID NO: 4816903 - DNA, 25 bp, Homo sapien
cagagtctaaagagcacccgagagg

SEQ ID NO: 4816904 - DNA, 25 bp, Homo sapien
gcagagattacaaagccaggtggcc

SEQ ID NO: 4816905 - DNA, 25 bp, Homo sapien
agagagaaagcacaccaccgtggca

SEQ ID NO: 4816906 - DNA, 25 bp, Homo sapien
catggccccgttgctctctaaatgc

SEQ ID NO: 4816907 - DNA, 25 bp, Homo sapien
cacccatattccatggaagagagaa

SEQ ID NO: 4816908 - DNA, 25 bp, Homo sapien
ccagcaacagtgtaatcacccatat

SEQ ID NO: 4816909 - DNA, 25 bp, Homo sapien
tgtgaacatcgacgaaaaaggcagg

SEQ ID NO: 4816910 - DNA, 25 bp, Homo sapien
gacgtaactgagaacgactgggccc

SEQ ID NO: 4816911 - DNA, 25 bp, Homo sapien
aggatgtcgccagcccaatgtggga

SEQ ID NO: 4816912 - DNA, 25 bp, Homo sapien
aaagcagcttgcaaattcgtggtga

SEQ ID NO: 4816913 - DNA, 25 bp, Homo sapien
gtctcagcagtttctacagagcatg

SEQ ID NO: 4816914 - DNA, 25 bp, Homo sapien
ggtgttcatcgggaccctcacagtg

SEQ ID NO: 4816915 - DNA, 25 bp, Homo sapien
tgtctaataggcaatgaggagcagc

SEQ ID NO: 4816916 - DNA, 25 bp, Homo sapien
tgccaagctcctgcatagagcacgt

SEQ ID NO: 4816917 - DNA, 25 bp, Homo sapien
cagactgctcgtccccgtggaccag

SEQ ID NO: 4816918 - DNA, 25 bp, Homo sapien
gcaggccagaaggaaagatcagtca

SEQ ID NO: 4816919 - DNA, 25 bp, Homo sapien
ctgcaggccagaaggaaagatcagt

SEQ ID NO: 4816920 - DNA, 25 bp, Homo sapien
tgcaggccagaaggaaagatcagtc

SEQ ID NO: 4816921 - DNA, 25 bp, Homo sapien
gcaaagccacacgaacacattaagt

SEQ ID NO: 4816922 - DNA, 25 bp, Homo sapien
tccgataagtctaggcctcagagtt

SEQ ID NO: 4816923 - DNA, 25 bp, Homo sapien
aaggcataaatctgcgtaaccacca

SEQ ID NO: 4816924 - DNA, 25 bp, Homo sapien
gaaaaaacggcaagtgggccacaca

SEQ ID NO: 4816925 - DNA, 25 bp, Homo sapien
tcggccgtgcccatcaggtcgttct

SEQ ID NO: 4816926 - DNA, 25 bp, Homo sapien
aagtcctcggccgtgcccatcaggt

SEQ ID NO: 4816927 - DNA, 25 bp, Homo sapien
gccgtgcccatcaggtcgttctggc

SEQ ID NO: 4816928 - DNA, 25 bp, Homo sapien
tggtcggcgaagtcctcggccgtgc

SEQ ID NO: 4816929 - DNA, 25 bp, Homo sapien
cctccacaggaagtgcccggcggcc

SEQ ID NO: 4816930 - DNA, 25 bp, Homo sapien
ctcgctggctctcgcccgtcggcgc

SEQ ID NO: 4816931 - DNA, 25 bp, Homo sapien
ctcgctcgctggctctcgcccgtcg

SEQ ID NO: 4816932 - DNA, 25 bp, Homo sapien
tggctctcgcccgtcggcgcccgca

SEQ ID NO: 4816933 - DNA, 25 bp, Homo sapien
ttcttgcaactagaccatcctctcg

SEQ ID NO: 4816934 - DNA, 25 bp, Homo sapien
tgcaactagaccatcctctcgggat

SEQ ID NO: 4816935 - DNA, 25 bp, Homo sapien
tagaccatcctctcgggatgatggg

SEQ ID NO: 4816936 - DNA, 25 bp, Homo sapien
ccatcctctcgggatgatgggagac

SEQ ID NO: 4816937 - DNA, 25 bp, Homo sapien
tccatggagtacgtccctgggtgtg

SEQ ID NO: 4816938 - DNA, 25 bp, Homo sapien
agtgtccagtgtccgcaccaatggg

SEQ ID NO: 4816939 - DNA, 25 bp, Homo sapien
tcctctgctagggacgtggtgcaca

SEQ ID NO: 4816940 - DNA, 25 bp, Homo sapien
tatgagagaccctgccaaatgaatc

SEQ ID NO: 4816941 - DNA, 25 bp, Homo sapien
tcttcgaccccttttgtagctcagc

SEQ ID NO: 4816942 - DNA, 25 bp, Homo sapien
ttgcttagaaatgggcttgcagccc

SEQ ID NO: 4816943 - DNA, 25 bp, Homo sapien
gagagactttgcctccctggggaaa

SEQ ID NO: 4816944 - DNA, 25 bp, Homo sapien
ctccctggggaaactagggaagctg

SEQ ID NO: 4816945 - DNA, 25 bp, Homo sapien
gtctccattccatagggcccagtgg

SEQ ID NO: 4816946 - DNA, 25 bp, Homo sapien
tcggtttccttcatgcaaagtggag

SEQ ID NO: 4816947 - DNA, 25 bp, Homo sapien
catgctaggcgcagctgtgggcttc

SEQ ID NO: 4816948 - DNA, 25 bp, Homo sapien
tcgagagagcctaaggacagttgcc

SEQ ID NO: 4816949 - DNA, 25 bp, Homo sapien
taagaccaggtttcagaccacaaag

SEQ ID NO: 4816950 - DNA, 25 bp, Homo sapien
tgacagcaccgtatggactggcggc

SEQ ID NO: 4816951 - DNA, 25 bp, Homo sapien
caccccagggtgtcaccgaagatgg

SEQ ID NO: 4816952 - DNA, 25 bp, Homo sapien
tcagcagtcggtaaagcgtggccag

SEQ ID NO: 4816953 - DNA, 25 bp, Homo sapien
agtcagcagggggcgcctgtctcgg

SEQ ID NO: 4816954 - DNA, 25 bp, Homo sapien
taggcgtcgtcactgcagtggtctg

SEQ ID NO: 4816955 - DNA, 25 bp, Homo sapien
gggcgcctgtctcgggccatgctct

SEQ ID NO: 4816956 - DNA, 25 bp, Homo sapien
ctaggcgtcgtcactgcagtggtct

SEQ ID NO: 4816957 - DNA, 25 bp, Homo sapien
atgacgtacagcctcattgctgcct

SEQ ID NO: 4816958 - DNA, 25 bp, Homo sapien
accatgacgtacagcctcattgctg

SEQ ID NO: 4816959 - DNA, 25 bp, Homo sapien
ttcaccatgacgtacagcctcattg

SEQ ID NO: 4816960 - DNA, 25 bp, Homo sapien
ccttcttcaccatgacgtacagcct

SEQ ID NO: 4816961 - DNA, 25 bp, Homo sapien
agtagtctcagagacggccttccac

SEQ ID NO: 4816962 - DNA, 25 bp, Homo sapien
tgaacagtgctccgcctgctggacc

SEQ ID NO: 4816963 - DNA, 25 bp, Homo sapien
ctctgaaagtagtctcagagacggc

SEQ ID NO: 4816964 - DNA, 25 bp, Homo sapien
tgaaagtagtctcagagacggcctt

SEQ ID NO: 4816965 - DNA, 25 bp, Homo sapien
tgtgtgtcccgaatcttcttttttg

SEQ ID NO: 4816966 - DNA, 25 bp, Homo sapien
atttctgtgtgtcccgaatcttctt

SEQ ID NO: 4816967 - DNA, 25 bp, Homo sapien
tctgtgtgtcccgaatcttcttttt

SEQ ID NO: 4816968 - DNA, 25 bp, Homo sapien
tatatttctgtgtgtcccgaatctt

SEQ ID NO: 4816969 - DNA, 25 bp, Homo sapien
gccacttccttctgaacaacttcaa

SEQ ID NO: 4816970 - DNA, 25 bp, Homo sapien
tccttctgaacaacttcaagctctt

SEQ ID NO: 4816971 - DNA, 25 bp, Homo sapien
gagcgtgccccactagaattctgcc

SEQ ID NO: 4816972 - DNA, 25 bp, Homo sapien
ggtcattatgcagagcgtgccccac

SEQ ID NO: 4816973 - DNA, 25 bp, Homo sapien
gctgtcctatagtccgtcacgggct

SEQ ID NO: 4816974 - DNA, 25 bp, Homo sapien
catactggttcacgatggacacacg

SEQ ID NO: 4816975 - DNA, 25 bp, Homo sapien
ttgaggttctcaggccgaatcccac

SEQ ID NO: 4816976 - DNA, 25 bp, Homo sapien
tcataaacgcacttcccatactggt

SEQ ID NO: 4816977 - DNA, 25 bp, Homo sapien
gccctccacggctaagcatccccag

SEQ ID NO: 4816978 - DNA, 25 bp, Homo sapien
gaccccactccctgagaccagcgta

SEQ ID NO: 4816979 - DNA, 25 bp, Homo sapien
cttgaagaagccccgccctccacgg

SEQ ID NO: 4816980 - DNA, 25 bp, Homo sapien
acggctaagcatccccagcagaccc

SEQ ID NO: 4816981 - DNA, 25 bp, Homo sapien
gaaggcctgctctttcacgaggctg

SEQ ID NO: 4816982 - DNA, 25 bp, Homo sapien
tgccctcgctctgacccaactgttt

SEQ ID NO: 4816983 - DNA, 25 bp, Homo sapien
ggcctgctctttcacgaggctgagg

SEQ ID NO: 4816984 - DNA, 25 bp, Homo sapien
tcgctctgacccaactgtttcctcg

SEQ ID NO: 4816985 - DNA, 25 bp, Homo sapien
ggacacgtccctcttgttccaggca

SEQ ID NO: 4816986 - DNA, 25 bp, Homo sapien
tgaaccattcagagaaggccactga

SEQ ID NO: 4816987 - DNA, 25 bp, Homo sapien
ctaggaagctcacacaggcacgtaa

SEQ ID NO: 4816988 - DNA, 25 bp, Homo sapien
tatgaacacgtcacctccagctgaa

SEQ ID NO: 4816989 - DNA, 25 bp, Homo sapien
tatgctcgatgtcccctcgttctgg

SEQ ID NO: 4816990 - DNA, 25 bp, Homo sapien
ccatcttggaacctgaaggaacaga

SEQ ID NO: 4816991 - DNA, 25 bp, Homo sapien
ccttggtgcgaggtactggcgccct

SEQ ID NO: 4816992 - DNA, 25 bp, Homo sapien
tcccttcacttgaggcgaggtctct

SEQ ID NO: 4816993 - DNA, 25 bp, Homo sapien
gatgacaagaggcttttctggggcc

SEQ ID NO: 4816994 - DNA, 25 bp, Homo sapien
gggcctgagatttttgtttcagcag

SEQ ID NO: 4816995 - DNA, 25 bp, Homo sapien
aagaggcttttctggggcctgagat

SEQ ID NO: 4816996 - DNA, 25 bp, Homo sapien
ctgagagatgacaagaggcttttct

SEQ ID NO: 4816997 - DNA, 25 bp, Homo sapien
aagaaaagcttctgtcaaactggag

SEQ ID NO: 4816998 - DNA, 25 bp, Homo sapien
tcaaatccccagtgggagtgggcgc

SEQ ID NO: 4816999 - DNA, 25 bp, Homo sapien
ctggagtggctgaagaactgctagc

SEQ ID NO: 4817000 - DNA, 25 bp, Homo sapien
ccaccacagtgcgatgatgaggcgg

SEQ ID NO: 4817001 - DNA, 25 bp, Homo sapien
aaagtttccctatagcacacatccc

SEQ ID NO: 4817002 - DNA, 25 bp, Homo sapien
gctgcccacgggaatttgactggtc

SEQ ID NO: 4817003 - DNA, 25 bp, Homo sapien
agagttggtgttcaagaaatcccac

SEQ ID NO: 4817004 - DNA, 25 bp, Homo sapien
gaagagttggtgttcaagaaatccc

SEQ ID NO: 4817005 - DNA, 25 bp, Homo sapien
aaccagctctcaaatgaaccagcag

SEQ ID NO: 4817006 - DNA, 25 bp, Homo sapien
aagaaaaaacgtttatgtagctcat

SEQ ID NO: 4817007 - DNA, 25 bp, Homo sapien
gaatacctgtgtttggtaatttata

SEQ ID NO: 4817008 - DNA, 25 bp, Homo sapien
tggtgaggccgaaggaagcttccca

SEQ ID NO: 4817009 - DNA, 25 bp, Homo sapien
gtcttgacaggacccggcttagcca

SEQ ID NO: 4817010 - DNA, 25 bp, Homo sapien
ggtgcctttggaggtcgcaccacag

SEQ ID NO: 4817011 - DNA, 25 bp, Homo sapien
tggtgcctttggaggtcgcaccaca

SEQ ID NO: 4817012 - DNA, 25 bp, Homo sapien
agcgtcttgacaggacccggcttag

SEQ ID NO: 4817013 - DNA, 25 bp, Homo sapien
agagaccccgcacgcgttgcgcata

SEQ ID NO: 4817014 - DNA, 25 bp, Homo sapien
cgtccaggaaaagactccggaagag

SEQ ID NO: 4817015 - DNA, 25 bp, Homo sapien
gttgcgcatacctcagcacgcacgc

SEQ ID NO: 4817016 - DNA, 25 bp, Homo sapien
aggccaggccgaaacacacccaccg

SEQ ID NO: 4817017 - DNA, 25 bp, Homo sapien
agcctcctgaagacattgcccccag

SEQ ID NO: 4817018 - DNA, 25 bp, Homo sapien
gggagcggccagtgcgctgcgtgga

SEQ ID NO: 4817019 - DNA, 25 bp, Homo sapien
agtgcgctgcgtggaggcccagggc

SEQ ID NO: 4817020 - DNA, 25 bp, Homo sapien
tgggagacttcggcccatgcagcgc

SEQ ID NO: 4817021 - DNA, 25 bp, Homo sapien
ccccgaagtccttcagtgaggagga

SEQ ID NO: 4817022 - DNA, 25 bp, Homo sapien
ctgtacggactctctgctctgggca

SEQ ID NO: 4817023 - DNA, 25 bp, Homo sapien
ggcggtcgttcccatcgtcatcagc

SEQ ID NO: 4817024 - DNA, 25 bp, Homo sapien
gctgggcaacgccatcgcctttgct

SEQ ID NO: 4817025 - DNA, 25 bp, Homo sapien
agatgccaccagatcagagcgcgat

SEQ ID NO: 4817026 - DNA, 25 bp, Homo sapien
gggttgtatgcactcctgcggccca

SEQ ID NO: 4817027 - DNA, 25 bp, Homo sapien
gatatgactacgttacttggctgcc

SEQ ID NO: 4817028 - DNA, 25 bp, Homo sapien
tgaacacagtttgcagataggagct

SEQ ID NO: 4817029 - DNA, 25 bp, Homo sapien
cagatggccgcgaagaagaagaaag

SEQ ID NO: 4817030 - DNA, 25 bp, Homo sapien
ggaccgtcccttggtctcgggcaca

SEQ ID NO: 4817031 - DNA, 25 bp, Homo sapien
gcctgtgaacaccaggctcaccaag

SEQ ID NO: 4817032 - DNA, 25 bp, Homo sapien
tctccccgtgcggaagaaggactcg

SEQ ID NO: 4817033 - DNA, 25 bp, Homo sapien
cgcaggggcaggacctcagacatga

SEQ ID NO: 4817034 - DNA, 25 bp, Homo sapien
agccctgaggccacgccacgggcac

SEQ ID NO: 4817035 - DNA, 25 bp, Homo sapien
gagccctgaggccacgccacgggca

SEQ ID NO: 4817036 - DNA, 25 bp, Homo sapien
gcacgcaggggcaggacctcagaca

SEQ ID NO: 4817037 - DNA, 25 bp, Homo sapien
agtcaggttggcagcaaacatgatg

SEQ ID NO: 4817038 - DNA, 25 bp, Homo sapien
caccagggtgaggtagccagcgggt

SEQ ID NO: 4817039 - DNA, 25 bp, Homo sapien
ggccaaagtggatgtacagccccag

SEQ ID NO: 4817040 - DNA, 25 bp, Homo sapien
gtgaggtagccagcgggtgctgcca

SEQ ID NO: 4817041 - DNA, 25 bp, Homo sapien
ggagccccagcggacctttctggac

SEQ ID NO: 4817042 - DNA, 25 bp, Homo sapien
cagccctgacccatgcggaggagtg

SEQ ID NO: 4817043 - DNA, 25 bp, Homo sapien
gcgtgttaggctcccaccgtggagt

SEQ ID NO: 4817044 - DNA, 25 bp, Homo sapien
tgatacttgcgtggtccagctcgtg

SEQ ID NO: 4817045 - DNA, 25 bp, Homo sapien
atcagcacggacaggagccgcacgg

SEQ ID NO: 4817046 - DNA, 25 bp, Homo sapien
ccaacgatggctgcgtcgtccttgg

SEQ ID NO: 4817047 - DNA, 25 bp, Homo sapien
ctgagacgaagagcagcaccttgcg

SEQ ID NO: 4817048 - DNA, 25 bp, Homo sapien
accttgcggcctgcgaggtccatgg

SEQ ID NO: 4817049 - DNA, 25 bp, Homo sapien
caggatgggcgtgatgcccgtcagc

SEQ ID NO: 4817050 - DNA, 25 bp, Homo sapien
gcccgtgcctcagcccacgatactc

SEQ ID NO: 4817051 - DNA, 25 bp, Homo sapien
acagcggtgctgtcgaagatggact

SEQ ID NO: 4817052 - DNA, 25 bp, Homo sapien
gcgcatcagcaaggccacggtgatg

SEQ ID NO: 4817053 - DNA, 25 bp, Homo sapien
ctgaaacacaaggccgccgctgagg

SEQ ID NO: 4817054 - DNA, 25 bp, Homo sapien
caaggccgccgctgagggcgttggg

SEQ ID NO: 4817055 - DNA, 25 bp, Homo sapien
gggcgttgggccagcctctccagca

SEQ ID NO: 4817056 - DNA, 25 bp, Homo sapien
acacaaggccgccgctgagggcgtt

SEQ ID NO: 4817057 - DNA, 25 bp, Homo sapien
aactcccagtggacatcgacgtccg

SEQ ID NO: 4817058 - DNA, 25 bp, Homo sapien
atctgctcgaactcccagtggacat

SEQ ID NO: 4817059 - DNA, 25 bp, Homo sapien
tgtctccggacgttgtcctggatct

SEQ ID NO: 4817060 - DNA, 25 bp, Homo sapien
agtggacatcgacgtccgtcccacg

SEQ ID NO: 4817061 - DNA, 25 bp, Homo sapien
ctgccccgagagagcaggaagcgcg

SEQ ID NO: 4817062 - DNA, 25 bp, Homo sapien
atgatgagcacaggcgcctccccgg

SEQ ID NO: 4817063 - DNA, 25 bp, Homo sapien
gcagcaggatcatgatgagcacagg

SEQ ID NO: 4817064 - DNA, 25 bp, Homo sapien
aagcgcggcgagttgggcatgaagc

SEQ ID NO: 4817065 - DNA, 25 bp, Homo sapien
cacgtctaccttggcggcacccacc

SEQ ID NO: 4817066 - DNA, 25 bp, Homo sapien
ccacgtctaccttggcggcacccac

SEQ ID NO: 4817067 - DNA, 25 bp, Homo sapien
gagggacagggatccgaacactgcc

SEQ ID NO: 4817068 - DNA, 25 bp, Homo sapien
gatccgaacactgccatgagctggg

SEQ ID NO: 4817069 - DNA, 25 bp, Homo sapien
cgtagagggacagggatccgaacac

SEQ ID NO: 4817070 - DNA, 25 bp, Homo sapien
cagggatccgaacactgccatgagc

SEQ ID NO: 4817071 - DNA, 25 bp, Homo sapien
tgggggagcaatctcagacacgtac

SEQ ID NO: 4817072 - DNA, 25 bp, Homo sapien
gaacgcctgggggagcaatctcaga

SEQ ID NO: 4817073 - DNA, 25 bp, Homo sapien
cctgggggagcaatctcagacacgt

SEQ ID NO: 4817074 - DNA, 25 bp, Homo sapien
cgcctgggggagcaatctcagacac

SEQ ID NO: 4817075 - DNA, 25 bp, Homo sapien
caggttttgctgaaaatactggttc

SEQ ID NO: 4817076 - DNA, 25 bp, Homo sapien
aagcccgtcagcgtccttccgagca

SEQ ID NO: 4817077 - DNA, 25 bp, Homo sapien
cgaagcccgtcagcgtccttccgag

SEQ ID NO: 4817078 - DNA, 25 bp, Homo sapien
ccggcgaagcccgtcagcgtccttc

SEQ ID NO: 4817079 - DNA, 25 bp, Homo sapien
cccgtcagcgtccttccgagcagca

SEQ ID NO: 4817080 - DNA, 25 bp, Homo sapien
agcttccggcccaggaggtcgttga

SEQ ID NO: 4817081 - DNA, 25 bp, Homo sapien
ccgacggcacagctgagaacatgat

SEQ ID NO: 4817082 - DNA, 25 bp, Homo sapien
cacagctgagaacatgatgctcagc

SEQ ID NO: 4817083 - DNA, 25 bp, Homo sapien
gaggtcgttgaggatcatggcactc

SEQ ID NO: 4817084 - DNA, 25 bp, Homo sapien
gatgtgtagaccagggcatacccaa

SEQ ID NO: 4817085 - DNA, 25 bp, Homo sapien
accaggatgcctgggatttggtcag

SEQ ID NO: 4817086 - DNA, 25 bp, Homo sapien
aaagctgaaattgccgagcactgcg

SEQ ID NO: 4817087 - DNA, 25 bp, Homo sapien
aggtcaggatccaaggagcgctcca

SEQ ID NO: 4817088 - DNA, 25 bp, Homo sapien
caggccattgttagctcatccgcag

SEQ ID NO: 4817089 - DNA, 25 bp, Homo sapien
tgggcccggtactctcgtggatcgt

SEQ ID NO: 4817090 - DNA, 25 bp, Homo sapien
tgatggtggcggacaaaaagaccag

SEQ ID NO: 4817091 - DNA, 25 bp, Homo sapien
ccttaaataggagtagcgtgtctgg

SEQ ID NO: 4817092 - DNA, 25 bp, Homo sapien
cctggcgacgggggcggcttctcgg

SEQ ID NO: 4817093 - DNA, 25 bp, Homo sapien
ctggcgacgggggcggcttctcggg

SEQ ID NO: 4817094 - DNA, 25 bp, Homo sapien
gcttctcggggaaggtgtcgtagtc

SEQ ID NO: 4817095 - DNA, 25 bp, Homo sapien
gtgtcgtagtccgggccctcggctc

SEQ ID NO: 4817096 - DNA, 25 bp, Homo sapien
gcggagggcgctcagactggagcag

SEQ ID NO: 4817097 - DNA, 25 bp, Homo sapien
gctcagactggagcagccgcccggg

SEQ ID NO: 4817098 - DNA, 25 bp, Homo sapien
gcgagcggagggcgctcagactgga

SEQ ID NO: 4817099 - DNA, 25 bp, Homo sapien
gagcggagggcgctcagactggagc

SEQ ID NO: 4817100 - DNA, 25 bp, Homo sapien
tggctggtgtgggacggaccttgcc

SEQ ID NO: 4817101 - DNA, 25 bp, Homo sapien
gtgtgggacggaccttgccaaagct

SEQ ID NO: 4817102 - DNA, 25 bp, Homo sapien
ctggtgccttccgtgaccctggcgc

SEQ ID NO: 4817103 - DNA, 25 bp, Homo sapien
ctggcgccttccgtgaccctggctg

SEQ ID NO: 4817104 - DNA, 25 bp, Homo sapien
ctgtctctgggcagaccatagtcca

SEQ ID NO: 4817105 - DNA, 25 bp, Homo sapien
ccggggggctgtacgcttcctctgt

SEQ ID NO: 4817106 - DNA, 25 bp, Homo sapien
tctctgggcagaccatagtccagcg

SEQ ID NO: 4817107 - DNA, 25 bp, Homo sapien
ggcagaccatagtccagcgtgctgc

SEQ ID NO: 4817108 - DNA, 25 bp, Homo sapien
gctgtaacctcagggggttcgcgcc

SEQ ID NO: 4817109 - DNA, 25 bp, Homo sapien
tgcagcgaccttgggctgtaacctc

SEQ ID NO: 4817110 - DNA, 25 bp, Homo sapien
gccagatgtgcagcgaccttgggct

SEQ ID NO: 4817111 - DNA, 25 bp, Homo sapien
gatgtgcagcgaccttgggctgtaa

SEQ ID NO: 4817112 - DNA, 25 bp, Homo sapien
atgttccactggaaggcctgagggc

SEQ ID NO: 4817113 - DNA, 25 bp, Homo sapien
tccccggaatagatctctggggttg

SEQ ID NO: 4817114 - DNA, 25 bp, Homo sapien
aaatgttccactggaaggcctgagg

SEQ ID NO: 4817115 - DNA, 25 bp, Homo sapien
caaaaatgttccactggaaggcctg

SEQ ID NO: 4817116 - DNA, 25 bp, Homo sapien
tctcgagcctgaaggaccagcaggg

SEQ ID NO: 4817117 - DNA, 25 bp, Homo sapien
tgtggacatcgtgttctcgagcctg

SEQ ID NO: 4817118 - DNA, 25 bp, Homo sapien
tcgtgttctcgagcctgaaggacca

SEQ ID NO: 4817119 - DNA, 25 bp, Homo sapien
gagcctgtggacatcgtgttctcga

SEQ ID NO: 4817120 - DNA, 25 bp, Homo sapien
cctgggatgccacacgtattgtaat

SEQ ID NO: 4817121 - DNA, 25 bp, Homo sapien
ctgtgttcacatggctagggtccgg

SEQ ID NO: 4817122 - DNA, 25 bp, Homo sapien
ttgcccatatcgacagagaagcccg

SEQ ID NO: 4817123 - DNA, 25 bp, Homo sapien
cttcttgcgcatggaggatgggtac

SEQ ID NO: 4817124 - DNA, 25 bp, Homo sapien
aagcccccagagctcaactctcctg

SEQ ID NO: 4817125 - DNA, 25 bp, Homo sapien
gtggcccatcagggatgctgtcgcc

SEQ ID NO: 4817126 - DNA, 25 bp, Homo sapien
atcagggatgctgtcgcctccacca

SEQ ID NO: 4817127 - DNA, 25 bp, Homo sapien
ggatgctgtcgcctccaccactgag

SEQ ID NO: 4817128 - DNA, 25 bp, Homo sapien
aagtccagacacaatgtgtctcggt

SEQ ID NO: 4817129 - DNA, 25 bp, Homo sapien
tgagaaatggaactcgtccccagac

SEQ ID NO: 4817130 - DNA, 25 bp, Homo sapien
gacacaatgtgtctcggtcaggcat

SEQ ID NO: 4817131 - DNA, 25 bp, Homo sapien
aggcgagtgcccgttgggcccttct

SEQ ID NO: 4817132 - DNA, 25 bp, Homo sapien
cctgaagccggttggcctgaaatgc

SEQ ID NO: 4817133 - DNA, 25 bp, Homo sapien
aatgcagagtcgatgacctggagcc

SEQ ID NO: 4817134 - DNA, 25 bp, Homo sapien
cataagttgagggtggcgctgtcac

SEQ ID NO: 4817135 - DNA, 25 bp, Homo sapien
tccatcggaggctgaaatccacgac

SEQ ID NO: 4817136 - DNA, 25 bp, Homo sapien
ctgggggtggagcggcgtccaggca

SEQ ID NO: 4817137 - DNA, 25 bp, Homo sapien
tgggggtggagcggcgtccaggcat

SEQ ID NO: 4817138 - DNA, 25 bp, Homo sapien
agaggctgtcatggtcatcaagagg

SEQ ID NO: 4817139 - DNA, 25 bp, Homo sapien
tggtcatcaagagggaggaggtggt

SEQ ID NO: 4817140 - DNA, 25 bp, Homo sapien
tcagaggctgtcatggtcatcaaga

SEQ ID NO: 4817141 - DNA, 25 bp, Homo sapien
aggctgtcatggtcatcaagaggga

SEQ ID NO: 4817142 - DNA, 25 bp, Homo sapien
tgcagctgggcctctagattcctgc

SEQ ID NO: 4817143 - DNA, 25 bp, Homo sapien
gctgggcctctagattcctgcagtt

SEQ ID NO: 4817144 - DNA, 25 bp, Homo sapien
cagctgggcctctagattcctgcag

SEQ ID NO: 4817145 - DNA, 25 bp, Homo sapien
ctgggcctctagattcctgcagttc

SEQ ID NO: 4817146 - DNA, 25 bp, Homo sapien
tcagggcgcgtctcagaaggcttga

SEQ ID NO: 4817147 - DNA, 25 bp, Homo sapien
cagaaggcttgactaaagctgggac

SEQ ID NO: 4817148 - DNA, 25 bp, Homo sapien
accatggcgtcagggcgcgtctcag

SEQ ID NO: 4817149 - DNA, 25 bp, Homo sapien
ttgactaaagctgggacctggcact

SEQ ID NO: 4817150 - DNA, 25 bp, Homo sapien
cctcctcgtgaggaacggagatgga

SEQ ID NO: 4817151 - DNA, 25 bp, Homo sapien
agggccagcctgttgcacacagaaa

SEQ ID NO: 4817152 - DNA, 25 bp, Homo sapien
aaactgtggacctcctcgtgaggaa

SEQ ID NO: 4817153 - DNA, 25 bp, Homo sapien
tgttgcacacagaaactgtggacct

SEQ ID NO: 4817154 - DNA, 25 bp, Homo sapien
caacccccagcaagcggggattggg

SEQ ID NO: 4817155 - DNA, 25 bp, Homo sapien
cccccagcaagcggggattgggcca

SEQ ID NO: 4817156 - DNA, 25 bp, Homo sapien
ccccagcaagcggggattgggccaa

SEQ ID NO: 4817157 - DNA, 25 bp, Homo sapien
cccagcaagcggggattgggccaag

SEQ ID NO: 4817158 - DNA, 25 bp, Homo sapien
agtgccaagtgtggcagcagctggc

SEQ ID NO: 4817159 - DNA, 25 bp, Homo sapien
cagtgccaagtgtggcagcagctgg

SEQ ID NO: 4817160 - DNA, 25 bp, Homo sapien
gctggcagagaagccccccagcccc

SEQ ID NO: 4817161 - DNA, 25 bp, Homo sapien
agcagctggcagagaagccccccag

SEQ ID NO: 4817162 - DNA, 25 bp, Homo sapien
gttgccccggtgtcccatgtgccag

SEQ ID NO: 4817163 - DNA, 25 bp, Homo sapien
gcctctgtagggtggtccccaggac

SEQ ID NO: 4817164 - DNA, 25 bp, Homo sapien
gatgcggaatgatgcacccgtggtc

SEQ ID NO: 4817165 - DNA, 25 bp, Homo sapien
gccaggctcacggttgccccggtgt

SEQ ID NO: 4817166 - DNA, 25 bp, Homo sapien
aggtgggtagagccctggtcacctc

SEQ ID NO: 4817167 - DNA, 25 bp, Homo sapien
tgagtttcttgtctcagagccatcg

SEQ ID NO: 4817168 - DNA, 25 bp, Homo sapien
gccatcggggttgctacgggacaca

SEQ ID NO: 4817169 - DNA, 25 bp, Homo sapien
ggttgctacgggacacacactggca

SEQ ID NO: 4817170 - DNA, 25 bp, Homo sapien
agtttcttgtctcagagccatcggg

SEQ ID NO: 4817171 - DNA, 25 bp, Homo sapien
cctcctcggggatgcgctttgaggg

SEQ ID NO: 4817172 - DNA, 25 bp, Homo sapien
ccggccgcgaggacttgggcgcacg

SEQ ID NO: 4817173 - DNA, 25 bp, Homo sapien
ccgcgaggacttgggcgcacgtgac

SEQ ID NO: 4817174 - DNA, 25 bp, Homo sapien
tagcggcggccgctcatgcccaggc

SEQ ID NO: 4817175 - DNA, 25 bp, Homo sapien
gggcagggcgcagctagcggcggcc

SEQ ID NO: 4817176 - DNA, 25 bp, Homo sapien
tggagtcaggccgaagctgctgctt

SEQ ID NO: 4817177 - DNA, 25 bp, Homo sapien
cacaacgttgggatctggagtcagg

SEQ ID NO: 4817178 - DNA, 25 bp, Homo sapien
caagtcccttatcctggttgagcgg

SEQ ID NO: 4817179 - DNA, 25 bp, Homo sapien
gcttatccgcagtagggcaagtccc

SEQ ID NO: 4817180 - DNA, 25 bp, Homo sapien
taatccccttcttctagaacttcta

SEQ ID NO: 4817181 - DNA, 25 bp, Homo sapien
tctagaacttctacatccttcccaa

SEQ ID NO: 4817182 - DNA, 25 bp, Homo sapien
ctaatccccttcttctagaacttct

SEQ ID NO: 4817183 - DNA, 25 bp, Homo sapien
cttcttctagaacttctacatcctt

SEQ ID NO: 4817184 - DNA, 25 bp, Homo sapien
ctcgaatggagggaacgacgttctt

SEQ ID NO: 4817185 - DNA, 25 bp, Homo sapien
acagtcccctgcacactcgaatgga

SEQ ID NO: 4817186 - DNA, 25 bp, Homo sapien
tcttgggaacaaaggatgtgagcag

SEQ ID NO: 4817187 - DNA, 25 bp, Homo sapien
ttgggaacaaaggatgtgagcagct

SEQ ID NO: 4817188 - DNA, 25 bp, Homo sapien
cgttctgcagttgattgactgagcc

SEQ ID NO: 4817189 - DNA, 25 bp, Homo sapien
ggccttgccgcagttactagattaa

SEQ ID NO: 4817190 - DNA, 25 bp, Homo sapien
gcctgcagccataagacgttctgca

SEQ ID NO: 4817191 - DNA, 25 bp, Homo sapien
ttgatccgttttcactgaacctgtg

SEQ ID NO: 4817192 - DNA, 25 bp, Homo sapien
ctgtgcaggtcaagatcaagcccat

SEQ ID NO: 4817193 - DNA, 25 bp, Homo sapien
aatctgtacaattccttccaaccca

SEQ ID NO: 4817194 - DNA, 25 bp, Homo sapien
taccaatctgtacaattccttccaa

SEQ ID NO: 4817195 - DNA, 25 bp, Homo sapien
catcccagatgttaccaatctgtac

SEQ ID NO: 4817196 - DNA, 25 bp, Homo sapien
atgttaccaatctgtacaattcctt

SEQ ID NO: 4817197 - DNA, 25 bp, Homo sapien
taagggttgacttggcgtttgctgc

SEQ ID NO: 4817198 - DNA, 25 bp, Homo sapien
aatgacctcttaagggttgacttgg

SEQ ID NO: 4817199 - DNA, 25 bp, Homo sapien
ctgggtagaaaatgacctcttaagg

SEQ ID NO: 4817200 - DNA, 25 bp, Homo sapien
cttggcgtttgctgccggcaggtaa

SEQ ID NO: 4817201 - DNA, 25 bp, Homo sapien
ccgaagggcgtgttcacctggatgc

SEQ ID NO: 4817202 - DNA, 25 bp, Homo sapien
gactgaaggccaagaatatcattga

SEQ ID NO: 4817203 - DNA, 25 bp, Homo sapien
cgtgttcacctggatgcccaaggga

SEQ ID NO: 4817204 - DNA, 25 bp, Homo sapien
tatcattgaacacactccgaagggc

SEQ ID NO: 4817205 - DNA, 25 bp, Homo sapien
ccggcagacaaaggcaagagttgca

SEQ ID NO: 4817206 - DNA, 25 bp, Homo sapien
ggtggcataacagccagcgtctgag

SEQ ID NO: 4817207 - DNA, 25 bp, Homo sapien
gactgatgctatagagccgtgggta

SEQ ID NO: 4817208 - DNA, 25 bp, Homo sapien
acaagtgtatgagggccggcagaca

SEQ ID NO: 4817209 - DNA, 25 bp, Homo sapien
ggtcctgggctgggtggcgccggtc

SEQ ID NO: 4817210 - DNA, 25 bp, Homo sapien
cctttgccaggcagctcactcgaac

SEQ ID NO: 4817211 - DNA, 25 bp, Homo sapien
ggtgaagtggcccataagccctgag

SEQ ID NO: 4817212 - DNA, 25 bp, Homo sapien
accctgcccgcccactctgaggctg

SEQ ID NO: 4817213 - DNA, 25 bp, Homo sapien
gctggtcgctggcattgtagccttt

SEQ ID NO: 4817214 - DNA, 25 bp, Homo sapien
gaacgcccagtgcctgcatgctcgc

SEQ ID NO: 4817215 - DNA, 25 bp, Homo sapien
tcacgagaacgcccagtgcctgcat

SEQ ID NO: 4817216 - DNA, 25 bp, Homo sapien
gagaacgcccagtgcctgcatgctc

SEQ ID NO: 4817217 - DNA, 25 bp, Homo sapien
acgagaacgcccagtgcctgcatgc

SEQ ID NO: 4817218 - DNA, 25 bp, Homo sapien
tgggcctgcccaaggcaactggtac

SEQ ID NO: 4817219 - DNA, 25 bp, Homo sapien
gctctgataccccaggagcgtcctt

SEQ ID NO: 4817220 - DNA, 25 bp, Homo sapien
caaggcaactggtaccccacaactt

SEQ ID NO: 4817221 - DNA, 25 bp, Homo sapien
gctgtgtgagtggacttggcccacc

SEQ ID NO: 4817222 - DNA, 25 bp, Homo sapien
tgaggttaggacgtcagcagaagcc

SEQ ID NO: 4817223 - DNA, 25 bp, Homo sapien
accgtcgctccacttggggttgtca

SEQ ID NO: 4817224 - DNA, 25 bp, Homo sapien
ttgtcactgcctgaggttaggacgt

SEQ ID NO: 4817225 - DNA, 25 bp, Homo sapien
agctccagtctgcaccaccgtcgct

SEQ ID NO: 4817226 - DNA, 25 bp, Homo sapien
ggcagaggcgatggggaattacagc

SEQ ID NO: 4817227 - DNA, 25 bp, Homo sapien
tggcagaggcgatggggaattacag

SEQ ID NO: 4817228 - DNA, 25 bp, Homo sapien
gtggcagaggcgatggggaattaca

SEQ ID NO: 4817229 - DNA, 25 bp, Homo sapien
ccggccccagtctccgcagattttc

SEQ ID NO: 4817230 - DNA, 25 bp, Homo sapien
attaatgcaaggaagggcgcagcca

SEQ ID NO: 4817231 - DNA, 25 bp, Homo sapien
ggccatccgattggattcgctccct

SEQ ID NO: 4817232 - DNA, 25 bp, Homo sapien
tcggattgctcccttttaaaatcca

SEQ ID NO: 4817233 - DNA, 25 bp, Homo sapien
cctgtgagctcaggcgcattgtctc

SEQ ID NO: 4817234 - DNA, 25 bp, Homo sapien
tgtgagctcaggcgcattgtctcgc

SEQ ID NO: 4817235 - DNA, 25 bp, Homo sapien
tgagctcaggcgcattgtctcgcct

SEQ ID NO: 4817236 - DNA, 25 bp, Homo sapien
agctcaggcgcattgtctcgcctct

SEQ ID NO: 4817237 - DNA, 25 bp, Homo sapien
gctgggttggaaagcgcttctctga

SEQ ID NO: 4817238 - DNA, 25 bp, Homo sapien
gctgcgcattcaggagggcggagca

SEQ ID NO: 4817239 - DNA, 25 bp, Homo sapien
agggcggagcaggatatgaccccag

SEQ ID NO: 4817240 - DNA, 25 bp, Homo sapien
tgtcatccaacttcctgtgtctgta

SEQ ID NO: 4817241 - DNA, 25 bp, Homo sapien
tccccagtcccgagagtgaatgtcc

SEQ ID NO: 4817242 - DNA, 25 bp, Homo sapien
tgaatgtccgggatgcagcagacac

SEQ ID NO: 4817243 - DNA, 25 bp, Homo sapien
ggaggctcttcgtatcaccggctcg

SEQ ID NO: 4817244 - DNA, 25 bp, Homo sapien
ctggcttttgttatcccgtgctggg

SEQ ID NO: 4817245 - DNA, 25 bp, Homo sapien
tacaaggcacaggtgaggaggtttt

SEQ ID NO: 4817246 - DNA, 25 bp, Homo sapien
aggttttggaactaatctgaggcat

SEQ ID NO: 4817247 - DNA, 25 bp, Homo sapien
cacaggtgaggaggttttggaacta

SEQ ID NO: 4817248 - DNA, 25 bp, Homo sapien
ctgcttacaaggcacaggtgaggag

SEQ ID NO: 4817249 - DNA, 25 bp, Homo sapien
cggtgcccctctgggtgcaatcagt

SEQ ID NO: 4817250 - DNA, 25 bp, Homo sapien
tgcccctctgggtgcaatcagtggg

SEQ ID NO: 4817251 - DNA, 25 bp, Homo sapien
aacggtgcccctctgggtgcaatca

SEQ ID NO: 4817252 - DNA, 25 bp, Homo sapien
cgaacggtgcccctctgggtgcaat

SEQ ID NO: 4817253 - DNA, 25 bp, Homo sapien
acagccccatatgcatgaggacggc

SEQ ID NO: 4817254 - DNA, 25 bp, Homo sapien
gagtgtccagggtcacatagcaaga

SEQ ID NO: 4817255 - DNA, 25 bp, Homo sapien
caaaggcgatagctgtcgagtgtcc

SEQ ID NO: 4817256 - DNA, 25 bp, Homo sapien
tgtccactatgccactagtcccggg

SEQ ID NO: 4817257 - DNA, 25 bp, Homo sapien
catgctctttgtctgcacgggagga

SEQ ID NO: 4817258 - DNA, 25 bp, Homo sapien
ggtgtaagtgccacgccaagctttg

SEQ ID NO: 4817259 - DNA, 25 bp, Homo sapien
cagtgaacagacgagtggacgcagt

SEQ ID NO: 4817260 - DNA, 25 bp, Homo sapien
tcagagccacgttggagaaatgact

SEQ ID NO: 4817261 - DNA, 25 bp, Homo sapien
tgcactgcaacaagtcctcagccgt

SEQ ID NO: 4817262 - DNA, 25 bp, Homo sapien
actgaaggccctgtacagcttcgcg

SEQ ID NO: 4817263 - DNA, 25 bp, Homo sapien
atctccatgcactgcaacaagtcct

SEQ ID NO: 4817264 - DNA, 25 bp, Homo sapien
tggaactccttcaaccgcgacgtac

SEQ ID NO: 4817265 - DNA, 25 bp, Homo sapien
cactggaggtgggtatgtttgcact

SEQ ID NO: 4817266 - DNA, 25 bp, Homo sapien
tgccgtgcgggctaatgagccaata

SEQ ID NO: 4817267 - DNA, 25 bp, Homo sapien
ttctgccacttagggagtgtgcctt

SEQ ID NO: 4817268 - DNA, 25 bp, Homo sapien
tctgtaaaaccaggctgatgccgtg

SEQ ID NO: 4817269 - DNA, 25 bp, Homo sapien
ggttttcgcaggactaggcctaggc

SEQ ID NO: 4817270 - DNA, 25 bp, Homo sapien
cttacaggtttgctttctgggagga

SEQ ID NO: 4817271 - DNA, 25 bp, Homo sapien
ggtctctgtccgtatctggtttggg

SEQ ID NO: 4817272 - DNA, 25 bp, Homo sapien
cttctagaagcttggaaagggctac

SEQ ID NO: 4817273 - DNA, 25 bp, Homo sapien
gggcaccataggtcacccccattct

SEQ ID NO: 4817274 - DNA, 25 bp, Homo sapien
ttgttggggtcgaagggcgacttca

SEQ ID NO: 4817275 - DNA, 25 bp, Homo sapien
gtcgaagggcgacttcaggtgagcc

SEQ ID NO: 4817276 - DNA, 25 bp, Homo sapien
tccagggcatagtccccgctcttca

SEQ ID NO: 4817277 - DNA, 25 bp, Homo sapien
tctggaggagggggtcttggtcttg

SEQ ID NO: 4817278 - DNA, 25 bp, Homo sapien
ctgcctgcttctctggaggaggggg

SEQ ID NO: 4817279 - DNA, 25 bp, Homo sapien
gaggagggggtcttggtcttgctac

SEQ ID NO: 4817280 - DNA, 25 bp, Homo sapien
gcctgcttctctggaggagggggtc

SEQ ID NO: 4817281 - DNA, 25 bp, Homo sapien
ccagagcaggtgcagttcgtgtcca

SEQ ID NO: 4817282 - DNA, 25 bp, Homo sapien
gtgatcttgagttggacatgggcat

SEQ ID NO: 4817283 - DNA, 25 bp, Homo sapien
gcagttcgtgtccatgtgatcttga

SEQ ID NO: 4817284 - DNA, 25 bp, Homo sapien
gcaggtgcagttcgtgtccatgtga

SEQ ID NO: 4817285 - DNA, 25 bp, Homo sapien
ggtcatggatgtaaccgtaggcgat

SEQ ID NO: 4817286 - DNA, 25 bp, Homo sapien
ggccgttcctccagatggcctccag

SEQ ID NO: 4817287 - DNA, 25 bp, Homo sapien
ggtcttgtcgatggcgaacccaaag

SEQ ID NO: 4817288 - DNA, 25 bp, Homo sapien
cctccaggccaaacatgggtacttt

SEQ ID NO: 4817289 - DNA, 25 bp, Homo sapien
gcagggtggggacgcgtccacagcg

SEQ ID NO: 4817290 - DNA, 25 bp, Homo sapien
cgcagggtggggacgcgtccacagc

SEQ ID NO: 4817291 - DNA, 25 bp, Homo sapien
cagggtggggacgcgtccacagcgg

SEQ ID NO: 4817292 - DNA, 25 bp, Homo sapien
agggtggggacgcgtccacagcggc

SEQ ID NO: 4817293 - DNA, 25 bp, Homo sapien
aatggggggctgcatgatgcacacc

SEQ ID NO: 4817294 - DNA, 25 bp, Homo sapien
gcagatagggctggcctactaggac

SEQ ID NO: 4817295 - DNA, 25 bp, Homo sapien
actaggactacgctggtccccagag

SEQ ID NO: 4817296 - DNA, 25 bp, Homo sapien
cagggctcgggcttcgagtgagtaa

SEQ ID NO: 4817297 - DNA, 25 bp, Homo sapien
gcagacttctccctgtgcaatgggt

SEQ ID NO: 4817298 - DNA, 25 bp, Homo sapien
gcaatgggttatcacggcggcagct

SEQ ID NO: 4817299 - DNA, 25 bp, Homo sapien
ggagtcactgtttgggtcccacctg

SEQ ID NO: 4817300 - DNA, 25 bp, Homo sapien
ccatcagattaggacgaggctggaa

SEQ ID NO: 4817301 - DNA, 25 bp, Homo sapien
tctggccgcaggtccgcgtgccagt

SEQ ID NO: 4817302 - DNA, 25 bp, Homo sapien
gcaccggcgacttgagcttgcaggt

SEQ ID NO: 4817303 - DNA, 25 bp, Homo sapien
aagggcaccggcgacttgagcttgc

SEQ ID NO: 4817304 - DNA, 25 bp, Homo sapien
atggtgaagcacaccaggcgccggc

SEQ ID NO: 4817305 - DNA, 25 bp, Homo sapien
taccctgcgttgatgaggccgtgct

SEQ ID NO: 4817306 - DNA, 25 bp, Homo sapien
ctcagggagtcgatggcgcggtacc

SEQ ID NO: 4817307 - DNA, 25 bp, Homo sapien
cacgcaggacgcctttggaatgtgc

SEQ ID NO: 4817308 - DNA, 25 bp, Homo sapien
acagcccggtacacaggcacgcagg

SEQ ID NO: 4817309 - DNA, 25 bp, Homo sapien
ggttgggagcccagctttatctgtt

SEQ ID NO: 4817310 - DNA, 25 bp, Homo sapien
gggttgggagcccagctttatctgt

SEQ ID NO: 4817311 - DNA, 25 bp, Homo sapien
gagcccagctttatctgtttcagaa

SEQ ID NO: 4817312 - DNA, 25 bp, Homo sapien
tgggagcccagctttatctgtttca

SEQ ID NO: 4817313 - DNA, 25 bp, Homo sapien
agccaggtgccaagcccgttgtccg

SEQ ID NO: 4817314 - DNA, 25 bp, Homo sapien
accaattctggtcagccccggccca

SEQ ID NO: 4817315 - DNA, 25 bp, Homo sapien
gaggagcccgtcacccaccaattct

SEQ ID NO: 4817316 - DNA, 25 bp, Homo sapien
agcccgttgtccgaggagcccgtca

SEQ ID NO: 4817317 - DNA, 25 bp, Homo sapien
ctaagtgaccggcactttctcgaca

SEQ ID NO: 4817318 - DNA, 25 bp, Homo sapien
taagtgaccggcactttctcgacat

SEQ ID NO: 4817319 - DNA, 25 bp, Homo sapien
aagtgaccggcactttctcgacatc

SEQ ID NO: 4817320 - DNA, 25 bp, Homo sapien
cagcttgagggtcggaccagagcag

SEQ ID NO: 4817321 - DNA, 25 bp, Homo sapien
ggtgcagcttgagggtcggaccaga

SEQ ID NO: 4817322 - DNA, 25 bp, Homo sapien
tgggtgcagcttgagggtcggacca

SEQ ID NO: 4817323 - DNA, 25 bp, Homo sapien
ttgagggtcggaccagagcagatac

SEQ ID NO: 4817324 - DNA, 25 bp, Homo sapien
ccacagtcgtcctccagacacacgc

SEQ ID NO: 4817325 - DNA, 25 bp, Homo sapien
cacagtcgtcctccagacacacgca

SEQ ID NO: 4817326 - DNA, 25 bp, Homo sapien
aacgggaaggcctcgttgctcaggt

SEQ ID NO: 4817327 - DNA, 25 bp, Homo sapien
cctgcggctctcagtagcttgtggg

SEQ ID NO: 4817328 - DNA, 25 bp, Homo sapien
ttgctcaggtctgcgtccagcacct

SEQ ID NO: 4817329 - DNA, 25 bp, Homo sapien
tgtgggtggagaacgggaaggcctc

SEQ ID NO: 4817330 - DNA, 25 bp, Homo sapien
tctggacaagctgttctgcccaagg

SEQ ID NO: 4817331 - DNA, 25 bp, Homo sapien
tctggtttaccagagcgcttaacta

SEQ ID NO: 4817332 - DNA, 25 bp, Homo sapien
gagcgcttaactattcagaatggcc

SEQ ID NO: 4817333 - DNA, 25 bp, Homo sapien
caagggcctgttggaggacctgggt

SEQ ID NO: 4817334 - DNA, 25 bp, Homo sapien
gcccatggccaggtagtaaccgtcc

SEQ ID NO: 4817335 - DNA, 25 bp, Homo sapien
ggctgggccctggatactgatcata

SEQ ID NO: 4817336 - DNA, 25 bp, Homo sapien
gaccagttgtgctgggccacggccc

SEQ ID NO: 4817337 - DNA, 25 bp, Homo sapien
gagctgtcgatgagctggcactggg

SEQ ID NO: 4817338 - DNA, 25 bp, Homo sapien
ttgagcatgcacgtgtacacggtgg

SEQ ID NO: 4817339 - DNA, 25 bp, Homo sapien
ccccacggtggttgagcatgcacgt

SEQ ID NO: 4817340 - DNA, 25 bp, Homo sapien
tgacagtcaggtcactctcggtgcc

SEQ ID NO: 4817341 - DNA, 25 bp, Homo sapien
ggctgacagtcaggtcactctcggt

SEQ ID NO: 4817342 - DNA, 25 bp, Homo sapien
tgacatctgcggagaagagccagtc

SEQ ID NO: 4817343 - DNA, 25 bp, Homo sapien
caccaggtagaacttcccgaagtag

SEQ ID NO: 4817344 - DNA, 25 bp, Homo sapien
gggtcggctgacatctgcggagaag

SEQ ID NO: 4817345 - DNA, 25 bp, Homo sapien
atctgcggagaagagccagtcggca

SEQ ID NO: 4817346 - DNA, 25 bp, Homo sapien
gtcaaacacagcggcggcccctctg

SEQ ID NO: 4817347 - DNA, 25 bp, Homo sapien
caaacacagcggcggcccctctgca

SEQ ID NO: 4817348 - DNA, 25 bp, Homo sapien
tctgcaggccaggcactccttcttg

SEQ ID NO: 4817349 - DNA, 25 bp, Homo sapien
tgcaggccaggcactccttcttgat

SEQ ID NO: 4817350 - DNA, 25 bp, Homo sapien
acaggtgggaatgccacgggggcct

SEQ ID NO: 4817351 - DNA, 25 bp, Homo sapien
aaagttccagacaggtgggaatgcc

SEQ ID NO: 4817352 - DNA, 25 bp, Homo sapien
ctgaaaagttccagacaggtgggaa

SEQ ID NO: 4817353 - DNA, 25 bp, Homo sapien
ttccagacaggtgggaatgccacgg

SEQ ID NO: 4817354 - DNA, 25 bp, Homo sapien
ctcccctttgtcggtttctgctgta

SEQ ID NO: 4817355 - DNA, 25 bp, Homo sapien
tcccctttgtcggtttctgctgtac

SEQ ID NO: 4817356 - DNA, 25 bp, Homo sapien
gctcccctttgtcggtttctgctgt

SEQ ID NO: 4817357 - DNA, 25 bp, Homo sapien
ggctcccctttgtcggtttctgctg

SEQ ID NO: 4817358 - DNA, 25 bp, Homo sapien
cacgtgtttcgtgctttaggacggc

SEQ ID NO: 4817359 - DNA, 25 bp, Homo sapien
ttgcggaggccggatgaagccacaa

SEQ ID NO: 4817360 - DNA, 25 bp, Homo sapien
cagcgccaagaacaagcacgtgttt

SEQ ID NO: 4817361 - DNA, 25 bp, Homo sapien
ttaggacggcttcaggcgcgtttgc

SEQ ID NO: 4817362 - DNA, 25 bp, Homo sapien
taagccccgtagtagtcgtactcga

SEQ ID NO: 4817363 - DNA, 25 bp, Homo sapien
gcgaaggtgtactcgtctgccagca

SEQ ID NO: 4817364 - DNA, 25 bp, Homo sapien
cagcagcctgcggtaggcgtagtcc

SEQ ID NO: 4817365 - DNA, 25 bp, Homo sapien
cctgcggtaggcgtagtcctcgtgc

SEQ ID NO: 4817366 - DNA, 25 bp, Homo sapien
gaagttatatctcgcccaagggcac

SEQ ID NO: 4817367 - DNA, 25 bp, Homo sapien
gaagcgtcttacactcctaccaggt

SEQ ID NO: 4817368 - DNA, 25 bp, Homo sapien
tggacctggcagtggcacgaagcca

SEQ ID NO: 4817369 - DNA, 25 bp, Homo sapien
gggcacagacaagtcctggacctgg

SEQ ID NO: 4817370 - DNA, 25 bp, Homo sapien
acacacaagtgggagccagtgtgag

SEQ ID NO: 4817371 - DNA, 25 bp, Homo sapien
ccagtgtgaggttgtaagggagtca

SEQ ID NO: 4817372 - DNA, 25 bp, Homo sapien
ctcctcttcacacacaagtgggagc

SEQ ID NO: 4817373 - DNA, 25 bp, Homo sapien
tgtaagggagtcaggctttgctggc

SEQ ID NO: 4817374 - DNA, 25 bp, Homo sapien
ttcccgtgtgcagaataactgatca

SEQ ID NO: 4817375 - DNA, 25 bp, Homo sapien
tgcgtgaacggcacaaagaatgcac

SEQ ID NO: 4817376 - DNA, 25 bp, Homo sapien
aataactgatcacgacagtggaacc

SEQ ID NO: 4817377 - DNA, 25 bp, Homo sapien
gtcggcagggctcggcttcccgtgt

SEQ ID NO: 4817378 - DNA, 25 bp, Homo sapien
gtcgctcccagccatgccgctcctg

SEQ ID NO: 4817379 - DNA, 25 bp, Homo sapien
gggatgaaaccatcccggtcgctcc

SEQ ID NO: 4817380 - DNA, 25 bp, Homo sapien
cctggaacacgcagccttgtccaag

SEQ ID NO: 4817381 - DNA, 25 bp, Homo sapien
ctcggggatgaaaccatcccggtcg

SEQ ID NO: 4817382 - DNA, 25 bp, Homo sapien
cctctccaatgtacgccgtgttctg

SEQ ID NO: 4817383 - DNA, 25 bp, Homo sapien
aatacgtggctgcatacacccacca

SEQ ID NO: 4817384 - DNA, 25 bp, Homo sapien
tgtacgccgtgttctggctgctctc

SEQ ID NO: 4817385 - DNA, 25 bp, Homo sapien
tggctgctctcccaatacgtggctg

SEQ ID NO: 4817386 - DNA, 25 bp, Homo sapien
cgctgccctgaggacgtcccagacc

SEQ ID NO: 4817387 - DNA, 25 bp, Homo sapien
ctgcggttggggtacaccttgcatt

SEQ ID NO: 4817388 - DNA, 25 bp, Homo sapien
tgccctgaggacgtcccagaccctc

SEQ ID NO: 4817389 - DNA, 25 bp, Homo sapien
ttgcatttctgtcactccgctgccc

SEQ ID NO: 4817390 - DNA, 25 bp, Homo sapien
tcctcatgttgcgcccggccagcgg

SEQ ID NO: 4817391 - DNA, 25 bp, Homo sapien
ctcgtgcagcgggtctctcctcatg

SEQ ID NO: 4817392 - DNA, 25 bp, Homo sapien
gtctctcctcatgttgcgcccggcc

SEQ ID NO: 4817393 - DNA, 25 bp, Homo sapien
tctcctcatgttgcgcccggccagc

SEQ ID NO: 4817394 - DNA, 25 bp, Homo sapien
gtccgtgagcgagtgatggaagcgc

SEQ ID NO: 4817395 - DNA, 25 bp, Homo sapien
tcttggcgtaggactcatggcttcg

SEQ ID NO: 4817396 - DNA, 25 bp, Homo sapien
tggcttcgctctcggatccagcggg

SEQ ID NO: 4817397 - DNA, 25 bp, Homo sapien
aagacgacggagtagttcttggcgt

SEQ ID NO: 4817398 - DNA, 25 bp, Homo sapien
gtgatgcgtcagaacaccagtgtcc

SEQ ID NO: 4817399 - DNA, 25 bp, Homo sapien
gatgggctcagatccccagaatgct

SEQ ID NO: 4817400 - DNA, 25 bp, Homo sapien
gagtcccctttgtggctcagcattg

SEQ ID NO: 4817401 - DNA, 25 bp, Homo sapien
aaagctgggcctcgtctgtgggtca

SEQ ID NO: 4817402 - DNA, 25 bp, Homo sapien
ggcagcagtgaggtgcacgtcgggt

SEQ ID NO: 4817403 - DNA, 25 bp, Homo sapien
gcaggagcagcgagtgacctacaga

SEQ ID NO: 4817404 - DNA, 25 bp, Homo sapien
gcagtgaggtgcacgtcgggtggca

SEQ ID NO: 4817405 - DNA, 25 bp, Homo sapien
cgagtgacctacagagtcccagctg

SEQ ID NO: 4817406 - DNA, 25 bp, Homo sapien
agcccggagcccagacaggccccgc

SEQ ID NO: 4817407 - DNA, 25 bp, Homo sapien
cccggagcccagacaggccccgcac

SEQ ID NO: 4817408 - DNA, 25 bp, Homo sapien
cagcccggagcccagacaggccccg

SEQ ID NO: 4817409 - DNA, 25 bp, Homo sapien
gcgcagcccggagcccagacaggcc

SEQ ID NO: 4817410 - DNA, 25 bp, Homo sapien
ccatgtgtatgatgaaggacgaccc

SEQ ID NO: 4817411 - DNA, 25 bp, Homo sapien
tgtctcccatgtgtatgatgaagga

SEQ ID NO: 4817412 - DNA, 25 bp, Homo sapien
atgatgaaggacgacccacgcgtgt

SEQ ID NO: 4817413 - DNA, 25 bp, Homo sapien
gaaggacgacccacgcgtgttctgg

SEQ ID NO: 4817414 - DNA, 25 bp, Homo sapien
cagggaggctgtccaccagcagcag

SEQ ID NO: 4817415 - DNA, 25 bp, Homo sapien
tgcctccccagggaggctgtccacc

SEQ ID NO: 4817416 - DNA, 25 bp, Homo sapien
gcagcagcagccgggagcagagtgg

SEQ ID NO: 4817417 - DNA, 25 bp, Homo sapien
cccagggaggctgtccaccagcagc

SEQ ID NO: 4817418 - DNA, 25 bp, Homo sapien
ttgccggggagcgcctgcaccactg

SEQ ID NO: 4817419 - DNA, 25 bp, Homo sapien
gtgtgggtcggagaggccaccgcca

SEQ ID NO: 4817420 - DNA, 25 bp, Homo sapien
ggggagcgcctgcaccactgtcctg

SEQ ID NO: 4817421 - DNA, 25 bp, Homo sapien
ccaccgccatgaggacgagacacag

SEQ ID NO: 4817422 - DNA, 25 bp, Homo sapien
atgtccttctccgggcgcccatgga

SEQ ID NO: 4817423 - DNA, 25 bp, Homo sapien
ctccgggcgcccatggatgatccag

SEQ ID NO: 4817424 - DNA, 25 bp, Homo sapien
cttctccgggcgcccatggatgatc

SEQ ID NO: 4817425 - DNA, 25 bp, Homo sapien
atgcatgtccttctccgggcgccca

SEQ ID NO: 4817426 - DNA, 25 bp, Homo sapien
cggagctcaggtgcctcccccatca

SEQ ID NO: 4817427 - DNA, 25 bp, Homo sapien
ctcggagctcaggtgcctcccccat

SEQ ID NO: 4817428 - DNA, 25 bp, Homo sapien
tcggagctcaggtgcctcccccatc

SEQ ID NO: 4817429 - DNA, 25 bp, Homo sapien
tccaagagagcagtgatcaggcagg

SEQ ID NO: 4817430 - DNA, 25 bp, Homo sapien
cttttgcagtgcacatactcttggg

SEQ ID NO: 4817431 - DNA, 25 bp, Homo sapien
ggtcccgctgtcttgtggccgttgt

SEQ ID NO: 4817432 - DNA, 25 bp, Homo sapien
gttgtcctgccgacaaggagccctt

SEQ ID NO: 4817433 - DNA, 25 bp, Homo sapien
atcaggagcaagtgccgtcccgctc

SEQ ID NO: 4817434 - DNA, 25 bp, Homo sapien
caagtctggggggtcatcctctgca

SEQ ID NO: 4817435 - DNA, 25 bp, Homo sapien
tgatacggggatggctccaagtctg

SEQ ID NO: 4817436 - DNA, 25 bp, Homo sapien
cgttcgtgaacgatgatacggggat

SEQ ID NO: 4817437 - DNA, 25 bp, Homo sapien
gaccctgttgatggcgccttcaatg

SEQ ID NO: 4817438 - DNA, 25 bp, Homo sapien
gggccgcagaccgtggacttgattc

SEQ ID NO: 4817439 - DNA, 25 bp, Homo sapien
gaggccgaaggcaaacttgtctgac

SEQ ID NO: 4817440 - DNA, 25 bp, Homo sapien
gctgggtgaacacctcccagtccag

SEQ ID NO: 4817441 - DNA, 25 bp, Homo sapien
aaagtagccactcagtcgttccatg

SEQ ID NO: 4817442 - DNA, 25 bp, Homo sapien
tctgtggatgttttgaggcaaagcc

SEQ ID NO: 4817443 - DNA, 25 bp, Homo sapien
tgcatatacacatagaacagggctg

SEQ ID NO: 4817444 - DNA, 25 bp, Homo sapien
tcatttgctgaaggacgtaggactt

SEQ ID NO: 4817445 - DNA, 25 bp, Homo sapien
catgatcacggacattgggcatgtt

SEQ ID NO: 4817446 - DNA, 25 bp, Homo sapien
caaaagatggggttggcctcatagc

SEQ ID NO: 4817447 - DNA, 25 bp, Homo sapien
ggaggcggaggtagacagaggcatc

SEQ ID NO: 4817448 - DNA, 25 bp, Homo sapien
acaaggcatccccttggaggcggag

SEQ ID NO: 4817449 - DNA, 25 bp, Homo sapien
cagatttgggattgcctaagtctgg

SEQ ID NO: 4817450 - DNA, 25 bp, Homo sapien
caaaaagttggacactacttgctca

SEQ ID NO: 4817451 - DNA, 25 bp, Homo sapien
catcgaggcagaaatcagatttggg

SEQ ID NO: 4817452 - DNA, 25 bp, Homo sapien
cagaataggaaactccatcgaggca

SEQ ID NO: 4817453 - DNA, 25 bp, Homo sapien
tgtggtgacgggcacatttaatccc

SEQ ID NO: 4817454 - DNA, 25 bp, Homo sapien
ccgggtgtggtgacgggcacattta

SEQ ID NO: 4817455 - DNA, 25 bp, Homo sapien
tttggaagtccgagatgggtggatt

SEQ ID NO: 4817456 - DNA, 25 bp, Homo sapien
ttggaagtccgagatgggtggattg

SEQ ID NO: 4817457 - DNA, 25 bp, Homo sapien
gagcacagggagatacgacccctgt

SEQ ID NO: 4817458 - DNA, 25 bp, Homo sapien
atgagcacagggagatacgacccct

SEQ ID NO: 4817459 - DNA, 25 bp, Homo sapien
agggagatacgacccctgtcctgtc

SEQ ID NO: 4817460 - DNA, 25 bp, Homo sapien
cacagggagatacgacccctgtcct

SEQ ID NO: 4817461 - DNA, 25 bp, Homo sapien
acagctctgcccacggatggagcag

SEQ ID NO: 4817462 - DNA, 25 bp, Homo sapien
cacagctctgcccacggatggagca

SEQ ID NO: 4817463 - DNA, 25 bp, Homo sapien
ccacagctctgcccacggatggagc

SEQ ID NO: 4817464 - DNA, 25 bp, Homo sapien
gatctggactggctttgtaagtaac

SEQ ID NO: 4817465 - DNA, 25 bp, Homo sapien
cttttcctgtgctccggtaccagag

SEQ ID NO: 4817466 - DNA, 25 bp, Homo sapien
tctggactggctttgtaagtaacac

SEQ ID NO: 4817467 - DNA, 25 bp, Homo sapien
ccagaggcacgctgggatctggact

SEQ ID NO: 4817468 - DNA, 25 bp, Homo sapien
taggcatggtgcatggccaccagcg

SEQ ID NO: 4817469 - DNA, 25 bp, Homo sapien
ctcggtgacgacataggcatggtgc

SEQ ID NO: 4817470 - DNA, 25 bp, Homo sapien
tgcatggccaccagcgggaccttga

SEQ ID NO: 4817471 - DNA, 25 bp, Homo sapien
ctgaatcccctcgatgcgctcggtg

SEQ ID NO: 4817472 - DNA, 25 bp, Homo sapien
gcacagttgaccacgcagggtgtct

SEQ ID NO: 4817473 - DNA, 25 bp, Homo sapien
aaaatcatccgtccacacacgaatg

SEQ ID NO: 4817474 - DNA, 25 bp, Homo sapien
cacgaatgccggtcactgggcagtt

SEQ ID NO: 4817475 - DNA, 25 bp, Homo sapien
cagggtgtctggatggaaccatgct

SEQ ID NO: 4817476 - DNA, 25 bp, Homo sapien
catggtaccgtcgtgcggcacatac

SEQ ID NO: 4817477 - DNA, 25 bp, Homo sapien
agagtcttggtctctgccgggctca

SEQ ID NO: 4817478 - DNA, 25 bp, Homo sapien
tacagggtcccgtagaggtcgtcca

SEQ ID NO: 4817479 - DNA, 25 bp, Homo sapien
tccacattcatcagcgggtacagag

SEQ ID NO: 4817480 - DNA, 25 bp, Homo sapien
cttgccccccgcaggggagcacaca

SEQ ID NO: 4817481 - DNA, 25 bp, Homo sapien
tccttgccccccgcaggggagcaca

SEQ ID NO: 4817482 - DNA, 25 bp, Homo sapien
cctccttgccccccgcaggggagca

SEQ ID NO: 4817483 - DNA, 25 bp, Homo sapien
ttgccccccgcaggggagcacacac

SEQ ID NO: 4817484 - DNA, 25 bp, Homo sapien
cattctggatccagcccgtgtgtag

SEQ ID NO: 4817485 - DNA, 25 bp, Homo sapien
atgagcctcttgtactcgtccaggc

SEQ ID NO: 4817486 - DNA, 25 bp, Homo sapien
cggttggacgcgatgaagaggcccc

SEQ ID NO: 4817487 - DNA, 25 bp, Homo sapien
accacccgccgagtgtgggccagaa

SEQ ID NO: 4817488 - DNA, 25 bp, Homo sapien
gccaggtggtacagggtctggcagc

SEQ ID NO: 4817489 - DNA, 25 bp, Homo sapien
ttcagggtccgctgatatggcacac

SEQ ID NO: 4817490 - DNA, 25 bp, Homo sapien
ccagctgcgctggacaggttgcatg

SEQ ID NO: 4817491 - DNA, 25 bp, Homo sapien
tatggcacactcttctcggctgtgg

SEQ ID NO: 4817492 - DNA, 25 bp, Homo sapien
cagccacacgtagggctcggctcag

SEQ ID NO: 4817493 - DNA, 25 bp, Homo sapien
gggtgggcagcagccacacgtaggg

SEQ ID NO: 4817494 - DNA, 25 bp, Homo sapien
tgggcagcagccacacgtagggctc

SEQ ID NO: 4817495 - DNA, 25 bp, Homo sapien
cagcagccacacgtagggctcggct

SEQ ID NO: 4817496 - DNA, 25 bp, Homo sapien
ctccaggcctcagcgaaacagggag

SEQ ID NO: 4817497 - DNA, 25 bp, Homo sapien
ggaaagccagcttgagtggcaccga

SEQ ID NO: 4817498 - DNA, 25 bp, Homo sapien
cttgaaggtccacagtcttccagga

SEQ ID NO: 4817499 - DNA, 25 bp, Homo sapien
agtccttgaaggtccacagtcttcc

SEQ ID NO: 4817500 - DNA, 25 bp, Homo sapien
gtggcaccgaggaaggccctccaag

SEQ ID NO: 4817501 - DNA, 25 bp, Homo sapien
gcccctcggccctaagagtgcttgg

SEQ ID NO: 4817502 - DNA, 25 bp, Homo sapien
gtgcccctcggccctaagagtgctt

SEQ ID NO: 4817503 - DNA, 25 bp, Homo sapien
cggccctaagagtgcttggcccagc

SEQ ID NO: 4817504 - DNA, 25 bp, Homo sapien
ctcggccctaagagtgcttggccca

SEQ ID NO: 4817505 - DNA, 25 bp, Homo sapien
gtggcctggccggaactccaggcct

SEQ ID NO: 4817506 - DNA, 25 bp, Homo sapien
agcagtggcctggccggaactccag

SEQ ID NO: 4817507 - DNA, 25 bp, Homo sapien
aagcagtggcctggccggaactcca

SEQ ID NO: 4817508 - DNA, 25 bp, Homo sapien
cagtggcctggccggaactccaggc

SEQ ID NO: 4817509 - DNA, 25 bp, Homo sapien
caaggaaggagtgtggcccaagttc

SEQ ID NO: 4817510 - DNA, 25 bp, Homo sapien
cacccaacagggtgacgaatgagct

SEQ ID NO: 4817511 - DNA, 25 bp, Homo sapien
tgagctagggctgtgctcacccaac

SEQ ID NO: 4817512 - DNA, 25 bp, Homo sapien
caggagtcctggacgtgcaagtgca

SEQ ID NO: 4817513 - DNA, 25 bp, Homo sapien
tgtccctgcactcaaagacaagttg

SEQ ID NO: 4817514 - DNA, 25 bp, Homo sapien
aaaactgttacaagccaagagggca

SEQ ID NO: 4817515 - DNA, 25 bp, Homo sapien
agtggccgggtagcccacacttctc

SEQ ID NO: 4817516 - DNA, 25 bp, Homo sapien
caagagggcagcacaatgaacctgc

SEQ ID NO: 4817517 - DNA, 25 bp, Homo sapien
tcctgagggccggaatgcagatcct

SEQ ID NO: 4817518 - DNA, 25 bp, Homo sapien
ggaatgcagatcctcattccccgga

SEQ ID NO: 4817519 - DNA, 25 bp, Homo sapien
cactccatggcctaacactgtttgt

SEQ ID NO: 4817520 - DNA, 25 bp, Homo sapien
cctggggccgttgtgggctcgggct

SEQ ID NO: 4817521 - DNA, 25 bp, Homo sapien
gggagctttgcccttccagcactga

SEQ ID NO: 4817522 - DNA, 25 bp, Homo sapien
atctgggagctttgcccttccagca

SEQ ID NO: 4817523 - DNA, 25 bp, Homo sapien
gcccttttgcatttcccgctggcat

SEQ ID NO: 4817524 - DNA, 25 bp, Homo sapien
tgcccttttgcatttcccgctggca

SEQ ID NO: 4817525 - DNA, 25 bp, Homo sapien
ttctaacaagtgctccctgagtaac

SEQ ID NO: 4817526 - DNA, 25 bp, Homo sapien
tcattgtacatttcccagagtagac

SEQ ID NO: 4817527 - DNA, 25 bp, Homo sapien
tgtttccagagattccggttccaca

SEQ ID NO: 4817528 - DNA, 25 bp, Homo sapien
tttccagtcatccagccggagtttg

SEQ ID NO: 4817529 - DNA, 25 bp, Homo sapien
tgctgaaaaccatcggactcccagg

SEQ ID NO: 4817530 - DNA, 25 bp, Homo sapien
cagtgtccttcgtgatcatgatgac

SEQ ID NO: 4817531 - DNA, 25 bp, Homo sapien
agatccctgacccacatgcatcggg

SEQ ID NO: 4817532 - DNA, 25 bp, Homo sapien
cccattggcaaatgtacagtttgtg

SEQ ID NO: 4817533 - DNA, 25 bp, Homo sapien
aagatgtactgatctggcagcgcgg

SEQ ID NO: 4817534 - DNA, 25 bp, Homo sapien
taccaggtctcatgcaacatcaggg

SEQ ID NO: 4817535 - DNA, 25 bp, Homo sapien
gaaaatctgcgagtcttgtccacgt

SEQ ID NO: 4817536 - DNA, 25 bp, Homo sapien
gcacttattttgagtcgcccgaggc

SEQ ID NO: 4817537 - DNA, 25 bp, Homo sapien
tcctcttctacgtacgttgaaggaa

SEQ ID NO: 4817538 - DNA, 25 bp, Homo sapien
cctcctcttctacgtacgttgaagg

SEQ ID NO: 4817539 - DNA, 25 bp, Homo sapien
tctacgtacgttgaaggaaaccagc

SEQ ID NO: 4817540 - DNA, 25 bp, Homo sapien
tacgtacgttgaaggaaaccagcca

SEQ ID NO: 4817541 - DNA, 25 bp, Homo sapien
gaaagtgccaacgtccccattgtgg

SEQ ID NO: 4817542 - DNA, 25 bp, Homo sapien
tactatgctggctgagaaatttcca

SEQ ID NO: 4817543 - DNA, 25 bp, Homo sapien
taacaggacactacggcactgagaa

SEQ ID NO: 4817544 - DNA, 25 bp, Homo sapien
taaagagagttaaggatcacagcaa

SEQ ID NO: 4817545 - DNA, 25 bp, Homo sapien
aaaaatgggtcagacttgagggcct

SEQ ID NO: 4817546 - DNA, 25 bp, Homo sapien
ctatagggcagttgggtaaaaaatg

SEQ ID NO: 4817547 - DNA, 25 bp, Homo sapien
cctccaaggggcagactgataggtg

SEQ ID NO: 4817548 - DNA, 25 bp, Homo sapien
cagactgataggtgaaggcagagct

SEQ ID NO: 4817549 - DNA, 25 bp, Homo sapien
gaaagctccctcatatctcgggcgg

SEQ ID NO: 4817550 - DNA, 25 bp, Homo sapien
gcggcaaagttatacctggccacag

SEQ ID NO: 4817551 - DNA, 25 bp, Homo sapien
tggccacagctgtgccgatgacgcg

SEQ ID NO: 4817552 - DNA, 25 bp, Homo sapien
tggtctccgccgatgcggctgtaga

SEQ ID NO: 4817553 - DNA, 25 bp, Homo sapien
caggaggagcccaaccagtgatcca

SEQ ID NO: 4817554 - DNA, 25 bp, Homo sapien
gttgagggagatgggcagcatcaca

SEQ ID NO: 4817555 - DNA, 25 bp, Homo sapien
cctgctctgtacccagagaggaagg

SEQ ID NO: 4817556 - DNA, 25 bp, Homo sapien
aggatgtcaagcagaaaggctctgg

SEQ ID NO: 4817557 - DNA, 25 bp, Homo sapien
aaagaaaagttgtaggaagcacagg

SEQ ID NO: 4817558 - DNA, 25 bp, Homo sapien
tgaccagaagggagcggaggggccc

SEQ ID NO: 4817559 - DNA, 25 bp, Homo sapien
tgaggccctgaggactgagaaaaga

SEQ ID NO: 4817560 - DNA, 25 bp, Homo sapien
ccctgagaagcaaagctgaggccct

SEQ ID NO: 4817561 - DNA, 25 bp, Homo sapien
tggcactggtagtactccaccaact

SEQ ID NO: 4817562 - DNA, 25 bp, Homo sapien
gaagctctccttcagtgagtggcac

SEQ ID NO: 4817563 - DNA, 25 bp, Homo sapien
tgagtggcactggtagtactccacc

SEQ ID NO: 4817564 - DNA, 25 bp, Homo sapien
taggggtacttgagtgtggtgtcca

SEQ ID NO: 4817565 - DNA, 25 bp, Homo sapien
tacgctcagcccgagattatggatt

SEQ ID NO: 4817566 - DNA, 25 bp, Homo sapien
gctgtttgaagccatacatgtgtaa

SEQ ID NO: 4817567 - DNA, 25 bp, Homo sapien
tggatttctgcttgaccttgtgctt

SEQ ID NO: 4817568 - DNA, 25 bp, Homo sapien
ttcaaggactatgcctctaactgca

SEQ ID NO: 4817569 - DNA, 25 bp, Homo sapien
ggaggctgtcgaatttcttggcctc

SEQ ID NO: 4817570 - DNA, 25 bp, Homo sapien
aggaggctgtcgaatttcttggcct

SEQ ID NO: 4817571 - DNA, 25 bp, Homo sapien
ttgcaaagcgctcagcctcggcagg

SEQ ID NO: 4817572 - DNA, 25 bp, Homo sapien
tcccgctggcgtgggacttgagcag

SEQ ID NO: 4817573 - DNA, 25 bp, Homo sapien
tccctgatcaggtaggtcccgctgg

SEQ ID NO: 4817574 - DNA, 25 bp, Homo sapien
ttgatgcttattgcaaagcgctcag

SEQ ID NO: 4817575 - DNA, 25 bp, Homo sapien
gggtatgcagtgtagtcgatctccc

SEQ ID NO: 4817576 - DNA, 25 bp, Homo sapien
agtgtagtcgatctcccgggatggc

SEQ ID NO: 4817577 - DNA, 25 bp, Homo sapien
tgcagtgtagtcgatctcccgggat

SEQ ID NO: 4817578 - DNA, 25 bp, Homo sapien
ccgggatggcggccggctgatgggc

SEQ ID NO: 4817579 - DNA, 25 bp, Homo sapien
gacttcctggtttgtaccagacgac

SEQ ID NO: 4817580 - DNA, 25 bp, Homo sapien
acagatgagctggggaaataccctg

SEQ ID NO: 4817581 - DNA, 25 bp, Homo sapien
tgacttcctggtttgtaccagacga

SEQ ID NO: 4817582 - DNA, 25 bp, Homo sapien
tcacagatgagctggggaaataccc

SEQ ID NO: 4817583 - DNA, 25 bp, Homo sapien
tcagggtcgcccctcagcagctcaa

SEQ ID NO: 4817584 - DNA, 25 bp, Homo sapien
acgtcgcccgtctggaaggtcagca

SEQ ID NO: 4817585 - DNA, 25 bp, Homo sapien
agctcaagcacgtcgcccgtctgga

SEQ ID NO: 4817586 - DNA, 25 bp, Homo sapien
gccatggtaattctgcatggccacc

SEQ ID NO: 4817587 - DNA, 25 bp, Homo sapien
ggagcctggagcgtctggtggctgg

SEQ ID NO: 4817588 - DNA, 25 bp, Homo sapien
gcctggagcgtctggtggctgggca

SEQ ID NO: 4817589 - DNA, 25 bp, Homo sapien
ccaaggaggtgccatagaggccaga

SEQ ID NO: 4817590 - DNA, 25 bp, Homo sapien
gaggtgccatagaggccagagaggc

SEQ ID NO: 4817591 - DNA, 25 bp, Homo sapien
gacatgggtgatagcagagggccca

SEQ ID NO: 4817592 - DNA, 25 bp, Homo sapien
acatgggtgatagcagagggcccag

SEQ ID NO: 4817593 - DNA, 25 bp, Homo sapien
aggacaaggacagaacacagagatg

SEQ ID NO: 4817594 - DNA, 25 bp, Homo sapien
ctgtgaggacaaggacagaacacag

SEQ ID NO: 4817595 - DNA, 25 bp, Homo sapien
tgaggacaaggacagaacacagaga

SEQ ID NO: 4817596 - DNA, 25 bp, Homo sapien
tgtgaggacaaggacagaacacaga

SEQ ID NO: 4817597 - DNA, 25 bp, Homo sapien
cagacaccacagaacaggttccagc

SEQ ID NO: 4817598 - DNA, 25 bp, Homo sapien
gactgtgcctgatgggggcttccca

SEQ ID NO: 4817599 - DNA, 25 bp, Homo sapien
acagacaccacagaacaggttccag

SEQ ID NO: 4817600 - DNA, 25 bp, Homo sapien
ccacaggaaaggctctcaggagagg

SEQ ID NO: 4817601 - DNA, 25 bp, Homo sapien
aagcaaaaaaagattctaagtagct

SEQ ID NO: 4817602 - DNA, 25 bp, Homo sapien
gggacatgcgaccacgagagggcag

SEQ ID NO: 4817603 - DNA, 25 bp, Homo sapien
cgtctggggacatgcgaccacgaga

SEQ ID NO: 4817604 - DNA, 25 bp, Homo sapien
ccatcgtctggggacatgcgaccac

SEQ ID NO: 4817605 - DNA, 25 bp, Homo sapien
acaggctgcctgcggaatcctccag

SEQ ID NO: 4817606 - DNA, 25 bp, Homo sapien
ctgtgcacagctagggggctgcatt

SEQ ID NO: 4817607 - DNA, 25 bp, Homo sapien
tgcctgcggaatcctccagcactaa

SEQ ID NO: 4817608 - DNA, 25 bp, Homo sapien
ggctgcgggatcctgtgcacagcta

SEQ ID NO: 4817609 - DNA, 25 bp, Homo sapien
caatggcgtctctgggtgacaatct

SEQ ID NO: 4817610 - DNA, 25 bp, Homo sapien
ctccccaggttagggtactgggctg

SEQ ID NO: 4817611 - DNA, 25 bp, Homo sapien
tctgccttaagacaccttcaggagg

SEQ ID NO: 4817612 - DNA, 25 bp, Homo sapien
tcaaaatgtattctgggcaatggcg

SEQ ID NO: 4817613 - DNA, 25 bp, Homo sapien
acccagggtgaccggtgtttctgtg

SEQ ID NO: 4817614 - DNA, 25 bp, Homo sapien
ccagggtgaccggtgtttctgtgat

SEQ ID NO: 4817615 - DNA, 25 bp, Homo sapien
tctgtgatgagaaacctccatgcac

SEQ ID NO: 4817616 - DNA, 25 bp, Homo sapien
agggtgaccggtgtttctgtgatga

SEQ ID NO: 4817617 - DNA, 25 bp, Homo sapien
ttgagaatgttctgtgccgtgtttg

SEQ ID NO: 4817618 - DNA, 25 bp, Homo sapien
ctgttgagaatgttctgtgccgtgt

SEQ ID NO: 4817619 - DNA, 25 bp, Homo sapien
gggtggagattctagaagcttcctc

SEQ ID NO: 4817620 - DNA, 25 bp, Homo sapien
ctgtgccgtgtttgggggtggagat

SEQ ID NO: 4817621 - DNA, 25 bp, Homo sapien
gggggcagaagtgagcaggcgtggc

SEQ ID NO: 4817622 - DNA, 25 bp, Homo sapien
caggtggtagggggcagaagtgagc

SEQ ID NO: 4817623 - DNA, 25 bp, Homo sapien
ccaggtggtagggggcagaagtgag

SEQ ID NO: 4817624 - DNA, 25 bp, Homo sapien
cagaagtgagcaggcgtggccaggg

SEQ ID NO: 4817625 - DNA, 25 bp, Homo sapien
tgtgtgccccgacgccacacttggt

SEQ ID NO: 4817626 - DNA, 25 bp, Homo sapien
catgtatccctggtagaaggtgccc

SEQ ID NO: 4817627 - DNA, 25 bp, Homo sapien
cacttggtacacatgtatccctggt

SEQ ID NO: 4817628 - DNA, 25 bp, Homo sapien
aggcactccttgtgtgccccgacgc

SEQ ID NO: 4817629 - DNA, 25 bp, Homo sapien
gaggaacattttgcaggctttgcag

SEQ ID NO: 4817630 - DNA, 25 bp, Homo sapien
tctggaaactgtggtggttggcatt

SEQ ID NO: 4817631 - DNA, 25 bp, Homo sapien
cattttgcaggctttgcagttggtg

SEQ ID NO: 4817632 - DNA, 25 bp, Homo sapien
gaaactgtggtggttggcattggct

SEQ ID NO: 4817633 - DNA, 25 bp, Homo sapien
ttccttgaaggtgaattaggtagaa

SEQ ID NO: 4817634 - DNA, 25 bp, Homo sapien
actggaagccctgctttccttgaag

SEQ ID NO: 4817635 - DNA, 25 bp, Homo sapien
tccttgaaggtgaattaggtagaag

SEQ ID NO: 4817636 - DNA, 25 bp, Homo sapien
aaaactggaagccctgctttccttg

SEQ ID NO: 4817637 - DNA, 25 bp, Homo sapien
gaagacggtcagtgagaggctaagc

SEQ ID NO: 4817638 - DNA, 25 bp, Homo sapien
gggaagacggtcagtgagaggctaa

SEQ ID NO: 4817639 - DNA, 25 bp, Homo sapien
ggaaggggaagacggtcagtgagag

SEQ ID NO: 4817640 - DNA, 25 bp, Homo sapien
agacggtcagtgagaggctaagccc

SEQ ID NO: 4817641 - DNA, 25 bp, Homo sapien
agcaggcctgctatgagcagtggtc

SEQ ID NO: 4817642 - DNA, 25 bp, Homo sapien
ctatgagcagtggtcacgacggcga

SEQ ID NO: 4817643 - DNA, 25 bp, Homo sapien
tcacgacggcgaggcagtgactcag

SEQ ID NO: 4817644 - DNA, 25 bp, Homo sapien
cctgctatgagcagtggtcacgacg

SEQ ID NO: 4817645 - DNA, 25 bp, Homo sapien
atcagcggctgacttcgagtcccct

SEQ ID NO: 4817646 - DNA, 25 bp, Homo sapien
cagcatcagcggctgacttcgagtc

SEQ ID NO: 4817647 - DNA, 25 bp, Homo sapien
ggccagcatcagcggctgacttcga

SEQ ID NO: 4817648 - DNA, 25 bp, Homo sapien
gcatcagcggctgacttcgagtccc

SEQ ID NO: 4817649 - DNA, 25 bp, Homo sapien
tcgtcggtcatcttgtggaacagca

SEQ ID NO: 4817650 - DNA, 25 bp, Homo sapien
tccttgagctcgtagctgtagccct

SEQ ID NO: 4817651 - DNA, 25 bp, Homo sapien
tagcccttccgcttgcagacgatga

SEQ ID NO: 4817652 - DNA, 25 bp, Homo sapien
tcttgacgtccttgttgttcatggg

SEQ ID NO: 4817653 - DNA, 25 bp, Homo sapien
tccccgtcaatctttggtcttccaa

SEQ ID NO: 4817654 - DNA, 25 bp, Homo sapien
ctgtcctgcttggtgtggttgacta

SEQ ID NO: 4817655 - DNA, 25 bp, Homo sapien
ttcagttccccgtcaatctttggtc

SEQ ID NO: 4817656 - DNA, 25 bp, Homo sapien
gactatggaccggactttcagttcc

SEQ ID NO: 4817657 - DNA, 25 bp, Homo sapien
cagacccctgtgtggttcgctgagg

SEQ ID NO: 4817658 - DNA, 25 bp, Homo sapien
tgcttcaagacacgaacagggccct

SEQ ID NO: 4817659 - DNA, 25 bp, Homo sapien
caaacagcgcctatctgctgcaggg

SEQ ID NO: 4817660 - DNA, 25 bp, Homo sapien
caagggtgaggcttcgactcagacc

SEQ ID NO: 4817661 - DNA, 25 bp, Homo sapien
gtcctgctcactgtacgcatttgtg

SEQ ID NO: 4817662 - DNA, 25 bp, Homo sapien
aggagctcacggcagcacggacccg

SEQ ID NO: 4817663 - DNA, 25 bp, Homo sapien
tgtacgcatttgtgaccgcctcgcg

SEQ ID NO: 4817664 - DNA, 25 bp, Homo sapien
tcgcgcaggagctcacggcagcacg

SEQ ID NO: 4817665 - DNA, 25 bp, Homo sapien
tatcgcaggtgcttttccgtgcccc

SEQ ID NO: 4817666 - DNA, 25 bp, Homo sapien
caaaggaccctctggtaatgtccag

SEQ ID NO: 4817667 - DNA, 25 bp, Homo sapien
cacgttcgcggagggcattctcttt

SEQ ID NO: 4817668 - DNA, 25 bp, Homo sapien
gaaccagcagatcctcgggaagtcg

SEQ ID NO: 4817669 - DNA, 25 bp, Homo sapien
gagcagaggcgactgccggccccac

SEQ ID NO: 4817670 - DNA, 25 bp, Homo sapien
ctgcctgatggggtccgaggagcag

SEQ ID NO: 4817671 - DNA, 25 bp, Homo sapien
tgggcccaaaccctgtccattgccc

SEQ ID NO: 4817672 - DNA, 25 bp, Homo sapien
ctgatggggtccgaggagcagaggc

SEQ ID NO: 4817673 - DNA, 25 bp, Homo sapien
ttcgctgattttcctcaaggtctcc

SEQ ID NO: 4817674 - DNA, 25 bp, Homo sapien
ctatagaactctgaaattcgctgat

SEQ ID NO: 4817675 - DNA, 25 bp, Homo sapien
tgtcccgtttaacttcattgatgta

SEQ ID NO: 4817676 - DNA, 25 bp, Homo sapien
tccttgtcccgtttaacttcattga

SEQ ID NO: 4817677 - DNA, 25 bp, Homo sapien
tgttccgttttcttgtcgttgtcca

SEQ ID NO: 4817678 - DNA, 25 bp, Homo sapien
cgttttcttgtcgttgtccacttgc

SEQ ID NO: 4817679 - DNA, 25 bp, Homo sapien
ccgttttcttgtcgttgtccacttg

SEQ ID NO: 4817680 - DNA, 25 bp, Homo sapien
gttccgcagaatggctcagaagctc

SEQ ID NO: 4817681 - DNA, 25 bp, Homo sapien
ctctcaggccgttccgcagaatggc

SEQ ID NO: 4817682 - DNA, 25 bp, Homo sapien
ggccgttccgcagaatggctcagaa

SEQ ID NO: 4817683 - DNA, 25 bp, Homo sapien
cttccagtgcttctttgagctgctg

SEQ ID NO: 4817684 - DNA, 25 bp, Homo sapien
ggtatttgagcaccctctgcatggg

SEQ ID NO: 4817685 - DNA, 25 bp, Homo sapien
tggtatttgagcaccctctgcatgg

SEQ ID NO: 4817686 - DNA, 25 bp, Homo sapien
ggtggtatttgagcaccctctgcat

SEQ ID NO: 4817687 - DNA, 25 bp, Homo sapien
caggtggtatttgagcaccctctgc

SEQ ID NO: 4817688 - DNA, 25 bp, Homo sapien
ctagatgttgacagagacttgccct

SEQ ID NO: 4817689 - DNA, 25 bp, Homo sapien
aacactagatgttgacagagacttg

SEQ ID NO: 4817690 - DNA, 25 bp, Homo sapien
tgagaaacactagatgttgacagag

SEQ ID NO: 4817691 - DNA, 25 bp, Homo sapien
cactagatgttgacagagacttgcc

SEQ ID NO: 4817692 - DNA, 25 bp, Homo sapien
gcagtactccccgtagatcagaagc

SEQ ID NO: 4817693 - DNA, 25 bp, Homo sapien
atgtggctgcagtactccccgtaga

SEQ ID NO: 4817694 - DNA, 25 bp, Homo sapien
tgttctgggcgtgctccatgtggct

SEQ ID NO: 4817695 - DNA, 25 bp, Homo sapien
tgtgttctgggcgtgctccatgtgg

SEQ ID NO: 4817696 - DNA, 25 bp, Homo sapien
cacagatttaatgagcagctcgggg

SEQ ID NO: 4817697 - DNA, 25 bp, Homo sapien
acacagatttaatgagcagctcggg

SEQ ID NO: 4817698 - DNA, 25 bp, Homo sapien
cacacagatttaatgagcagctcgg

SEQ ID NO: 4817699 - DNA, 25 bp, Homo sapien
cagatttaatgagcagctcggggct

SEQ ID NO: 4817700 - DNA, 25 bp, Homo sapien
ccttgttgcttccacatggtgtctg

SEQ ID NO: 4817701 - DNA, 25 bp, Homo sapien
aagcaggggacaacagcagtgacag

SEQ ID NO: 4817702 - DNA, 25 bp, Homo sapien
tgacagccccgtcttcagggatgca

SEQ ID NO: 4817703 - DNA, 25 bp, Homo sapien
tggtgtctggattccacaagcaggg

SEQ ID NO: 4817704 - DNA, 25 bp, Homo sapien
gccctcggggagaagcgtcctgatg

SEQ ID NO: 4817705 - DNA, 25 bp, Homo sapien
tgctttgccgtagggcacccggcct

SEQ ID NO: 4817706 - DNA, 25 bp, Homo sapien
gggacaggtttccatccaagtggct

SEQ ID NO: 4817707 - DNA, 25 bp, Homo sapien
tgagagctgctttgccgtagggcac

SEQ ID NO: 4817708 - DNA, 25 bp, Homo sapien
agcgctgcgcgtggggtccagtgac

SEQ ID NO: 4817709 - DNA, 25 bp, Homo sapien
cgtggggtccagtgactggtacttc

SEQ ID NO: 4817710 - DNA, 25 bp, Homo sapien
ggtacttcctcaggccgcccgagaa

SEQ ID NO: 4817711 - DNA, 25 bp, Homo sapien
cgcccgagaatcctccctcacaagc

SEQ ID NO: 4817712 - DNA, 25 bp, Homo sapien
tgatgacaccagaccagaagcaagg

SEQ ID NO: 4817713 - DNA, 25 bp, Homo sapien
aagggaatcacaccaacagtcaccg

SEQ ID NO: 4817714 - DNA, 25 bp, Homo sapien
tcagagagccccgtagctgagaagg

SEQ ID NO: 4817715 - DNA, 25 bp, Homo sapien
gtgactgtcgccgttctacccatgg

SEQ ID NO: 4817716 - DNA, 25 bp, Homo sapien
gcaggcacttgaagcaaacaggaga

SEQ ID NO: 4817717 - DNA, 25 bp, Homo sapien
gataagaggatgcaggaggttgggg

SEQ ID NO: 4817718 - DNA, 25 bp, Homo sapien
aaagcgctcacctgtctcggatcct

SEQ ID NO: 4817719 - DNA, 25 bp, Homo sapien
tgggcttcgggtaggaaccatccac

SEQ ID NO: 4817720 - DNA, 25 bp, Homo sapien
agggcagcctcactcgttccaggat

SEQ ID NO: 4817721 - DNA, 25 bp, Homo sapien
gattccgagtggaagtctcggtgca

SEQ ID NO: 4817722 - DNA, 25 bp, Homo sapien
cctggcgggtgatgcaggggaccct

SEQ ID NO: 4817723 - DNA, 25 bp, Homo sapien
gtgtgagctgtgctgacggccacct

SEQ ID NO: 4817724 - DNA, 25 bp, Homo sapien
gcaacgtgcctgagaatccagccct

SEQ ID NO: 4817725 - DNA, 25 bp, Homo sapien
agggcttcccaggcaacgtgcctga

SEQ ID NO: 4817726 - DNA, 25 bp, Homo sapien
atcacggacacgtcgatggccctca

SEQ ID NO: 4817727 - DNA, 25 bp, Homo sapien
ctttccttgaaatcgaggaagacct

SEQ ID NO: 4817728 - DNA, 25 bp, Homo sapien
gaaatcgaggaagaccttggccagc

SEQ ID NO: 4817729 - DNA, 25 bp, Homo sapien
ggaagctgtgatgcaccttgatcag

SEQ ID NO: 4817730 - DNA, 25 bp, Homo sapien
ccatcagacacgcagcggccgactc

SEQ ID NO: 4817731 - DNA, 25 bp, Homo sapien
cagcccatcagacacgcagcggccg

SEQ ID NO: 4817732 - DNA, 25 bp, Homo sapien
atcagacacgcagcggccgactcgg

SEQ ID NO: 4817733 - DNA, 25 bp, Homo sapien
gcccatcagacacgcagcggccgac

SEQ ID NO: 4817734 - DNA, 25 bp, Homo sapien
aggacacagccaccgcacgggctgc

SEQ ID NO: 4817735 - DNA, 25 bp, Homo sapien
ccttgcagctaatgagacggccagg

SEQ ID NO: 4817736 - DNA, 25 bp, Homo sapien
ttgcagctaatgagacggccaggga

SEQ ID NO: 4817737 - DNA, 25 bp, Homo sapien
cagctaatgagacggccagggaggc

SEQ ID NO: 4817738 - DNA, 25 bp, Homo sapien
ccgcagacaagcggagcccagaaac

SEQ ID NO: 4817739 - DNA, 25 bp, Homo sapien
cgcagacaagcggagcccagaaacc

SEQ ID NO: 4817740 - DNA, 25 bp, Homo sapien
cctccttccggccagcacgagccac

SEQ ID NO: 4817741 - DNA, 25 bp, Homo sapien
ctggctcctaaatccaaagaccctg

SEQ ID NO: 4817742 - DNA, 25 bp, Homo sapien
tccaaagaccctggagagagcggtg

SEQ ID NO: 4817743 - DNA, 25 bp, Homo sapien
cacgagccaccacggagccacaggg

SEQ ID NO: 4817744 - DNA, 25 bp, Homo sapien
ccatgtccgccgggctcagcaccag

SEQ ID NO: 4817745 - DNA, 25 bp, Homo sapien
ctccaggttaatgaagacagctgcc

SEQ ID NO: 4817746 - DNA, 25 bp, Homo sapien
ctgctgttgcccaccctctcaaggt

SEQ ID NO: 4817747 - DNA, 25 bp, Homo sapien
gttgcccaccctctcaaggtcacag

SEQ ID NO: 4817748 - DNA, 25 bp, Homo sapien
gaagagagaagtccacctctgccac

SEQ ID NO: 4817749 - DNA, 25 bp, Homo sapien
ctggaagagagaagtccacctctgc

SEQ ID NO: 4817750 - DNA, 25 bp, Homo sapien
gattctaacgctcccagcgtgacgg

SEQ ID NO: 4817751 - DNA, 25 bp, Homo sapien
gtgttctggccacatcgggctccat

SEQ ID NO: 4817752 - DNA, 25 bp, Homo sapien
gccacatcgggctccattctttgga

SEQ ID NO: 4817753 - DNA, 25 bp, Homo sapien
gggtaaagattctaacgctcccagc

SEQ ID NO: 4817754 - DNA, 25 bp, Homo sapien
acacagggtggacttgggcactatg

SEQ ID NO: 4817755 - DNA, 25 bp, Homo sapien
ggtggacttgggcactatggctgcc

SEQ ID NO: 4817756 - DNA, 25 bp, Homo sapien
acagggtggacttgggcactatggc

SEQ ID NO: 4817757 - DNA, 25 bp, Homo sapien
cagggtggacttgggcactatggct

SEQ ID NO: 4817758 - DNA, 25 bp, Homo sapien
gcgttggggttgtggcttgcggtga

SEQ ID NO: 4817759 - DNA, 25 bp, Homo sapien
ttggggttgtggcttgcggtgaggg

SEQ ID NO: 4817760 - DNA, 25 bp, Homo sapien
gttggggttgtggcttgcggtgagg

SEQ ID NO: 4817761 - DNA, 25 bp, Homo sapien
cgttggggttgtggcttgcggtgag

SEQ ID NO: 4817762 - DNA, 25 bp, Homo sapien
ctcctgagcatgaccccaaaactgt

SEQ ID NO: 4817763 - DNA, 25 bp, Homo sapien
tgtgctcctgagcatgaccccaaaa

SEQ ID NO: 4817764 - DNA, 25 bp, Homo sapien
gcttgtgctcctgagcatgacccca

SEQ ID NO: 4817765 - DNA, 25 bp, Homo sapien
tctccaccccgaggagtgccggtgg

SEQ ID NO: 4817766 - DNA, 25 bp, Homo sapien
gcagggcttcgagggaactggaagg

SEQ ID NO: 4817767 - DNA, 25 bp, Homo sapien
tacagatgtgcgtgcagaaaggccg

SEQ ID NO: 4817768 - DNA, 25 bp, Homo sapien
ggtgtacagatgtgcgtgcagaaag

SEQ ID NO: 4817769 - DNA, 25 bp, Homo sapien
tgtacagatgtgcgtgcagaaaggc

SEQ ID NO: 4817770 - DNA, 25 bp, Homo sapien
gtgcggtagtacttggcctcggtct

SEQ ID NO: 4817771 - DNA, 25 bp, Homo sapien
gcggtagtacttggcctcggtctcc

SEQ ID NO: 4817772 - DNA, 25 bp, Homo sapien
ctccagggtgcggtagtacttggcc

SEQ ID NO: 4817773 - DNA, 25 bp, Homo sapien
ccagggtgcggtagtacttggcctc

SEQ ID NO: 4817774 - DNA, 25 bp, Homo sapien
cacccggacacctccacaaaagagg

SEQ ID NO: 4817775 - DNA, 25 bp, Homo sapien
tgcacatctgcaccgcgacacccgg

SEQ ID NO: 4817776 - DNA, 25 bp, Homo sapien
ttggccacgaggtcactgagtgtgc

SEQ ID NO: 4817777 - DNA, 25 bp, Homo sapien
aggactccttgggtttggccacgag

SEQ ID NO: 4817778 - DNA, 25 bp, Homo sapien
tgtcggccctaagaccatcatcatc

SEQ ID NO: 4817779 - DNA, 25 bp, Homo sapien
ctcgtgtcggccctaagaccatcat

SEQ ID NO: 4817780 - DNA, 25 bp, Homo sapien
caggctgcaggtctctaaggcaacg

SEQ ID NO: 4817781 - DNA, 25 bp, Homo sapien
ccaagggtccgcttgggtctgccag

SEQ ID NO: 4817782 - DNA, 25 bp, Homo sapien
gagacccttcgaggacaagcagaga

SEQ ID NO: 4817783 - DNA, 25 bp, Homo sapien
gctggttactcccacactaaaggaa

SEQ ID NO: 4817784 - DNA, 25 bp, Homo sapien
tgaagtttacctgcaggacgcccag

SEQ ID NO: 4817785 - DNA, 25 bp, Homo sapien
catcaaaagcctccacggttggcaa

SEQ ID NO: 4817786 - DNA, 25 bp, Homo sapien
agctgctggcaataaacccacgcgg

SEQ ID NO: 4817787 - DNA, 25 bp, Homo sapien
gagcaaactggcgtccgagagatta

SEQ ID NO: 4817788 - DNA, 25 bp, Homo sapien
aaacccacgcggagcaaactggcgt

SEQ ID NO: 4817789 - DNA, 25 bp, Homo sapien
cgtccgagagattattcgccagtgc

SEQ ID NO: 4817790 - DNA, 25 bp, Homo sapien
acatcctccaaacataaaagacgca

SEQ ID NO: 4817791 - DNA, 25 bp, Homo sapien
acagctggctaattgggccaatatt

SEQ ID NO: 4817792 - DNA, 25 bp, Homo sapien
cataaaagacgcacagctggctaat

SEQ ID NO: 4817793 - DNA, 25 bp, Homo sapien
ggctaattgggccaatattggtctc

SEQ ID NO: 4817794 - DNA, 25 bp, Homo sapien
aaatgacgcgtgctgttagaccatg

SEQ ID NO: 4817795 - DNA, 25 bp, Homo sapien
acaaagggggaaaatgacgcgtgct

SEQ ID NO: 4817796 - DNA, 25 bp, Homo sapien
ggaaaatgacgcgtgctgttagacc

SEQ ID NO: 4817797 - DNA, 25 bp, Homo sapien
gacgcgtgctgttagaccatgcgcc

SEQ ID NO: 4817798 - DNA, 25 bp, Homo sapien
ggacgcagtcgtagatgtcctcccc

SEQ ID NO: 4817799 - DNA, 25 bp, Homo sapien
tcacacgggacgcagtcgtagatgt

SEQ ID NO: 4817800 - DNA, 25 bp, Homo sapien
atcctcacacgggacgcagtcgtag

SEQ ID NO: 4817801 - DNA, 25 bp, Homo sapien
cctccatcctcacacgggacgcagt

SEQ ID NO: 4817802 - DNA, 25 bp, Homo sapien
tctggactcttgcagacgctcgtgt

SEQ ID NO: 4817803 - DNA, 25 bp, Homo sapien
cccacttggtctgtgatctggactc

SEQ ID NO: 4817804 - DNA, 25 bp, Homo sapien
tcgtgtactcgatgcagctccttgg

SEQ ID NO: 4817805 - DNA, 25 bp, Homo sapien
ggatccccacttggtctgtgatctg

SEQ ID NO: 4817806 - DNA, 25 bp, Homo sapien
atcagcaactgagccaatccaacca

SEQ ID NO: 4817807 - DNA, 25 bp, Homo sapien
gaatcagcaactgagccaatccaac

SEQ ID NO: 4817808 - DNA, 25 bp, Homo sapien
gggctcagcaagtctttcactgaat

SEQ ID NO: 4817809 - DNA, 25 bp, Homo sapien
gcaagtctttcactgaatcagcaac

SEQ ID NO: 4817810 - DNA, 25 bp, Homo sapien
gggttgttctcagcggctgccagcc

SEQ ID NO: 4817811 - DNA, 25 bp, Homo sapien
aaagcctctgtcgaaaactcttgac

SEQ ID NO: 4817812 - DNA, 25 bp, Homo sapien
cgaggctggcggcaaagcctctgtc

SEQ ID NO: 4817813 - DNA, 25 bp, Homo sapien
caggctaccagggatgcaggcaagt

SEQ ID NO: 4817814 - DNA, 25 bp, Homo sapien
tcaggagcctgttcataaaggcccc

SEQ ID NO: 4817815 - DNA, 25 bp, Homo sapien
tgcagggatggcaaacggccacact

SEQ ID NO: 4817816 - DNA, 25 bp, Homo sapien
gggcctggagatcgtcccgtgcagg

SEQ ID NO: 4817817 - DNA, 25 bp, Homo sapien
cactcaggagcctgttcataaaggc

SEQ ID NO: 4817818 - DNA, 25 bp, Homo sapien
gacgtgcccggctctgacaaggcct

SEQ ID NO: 4817819 - DNA, 25 bp, Homo sapien
tccgggaaatacaggatacgatcca

SEQ ID NO: 4817820 - DNA, 25 bp, Homo sapien
tacgatccactgatcccgggatgga

SEQ ID NO: 4817821 - DNA, 25 bp, Homo sapien
ttactgaggactctacgacgtgccc

SEQ ID NO: 4817822 - DNA, 25 bp, Homo sapien
tagagtattttcatctcaccggagc

SEQ ID NO: 4817823 - DNA, 25 bp, Homo sapien
cctttctgacaagtggctacacctg

SEQ ID NO: 4817824 - DNA, 25 bp, Homo sapien
ttcttcaccacagacgagccttgtc

SEQ ID NO: 4817825 - DNA, 25 bp, Homo sapien
tacgcccttagtggtacctttctga

SEQ ID NO: 4817826 - DNA, 25 bp, Homo sapien
tcagaaaccaattgaccaaataagg

SEQ ID NO: 4817827 - DNA, 25 bp, Homo sapien
attgcttggatctctgtcagaaacc

SEQ ID NO: 4817828 - DNA, 25 bp, Homo sapien
taagggtgagtctattttggaataa

SEQ ID NO: 4817829 - DNA, 25 bp, Homo sapien
caaaacgcctctttttcgagcaggg

SEQ ID NO: 4817830 - DNA, 25 bp, Homo sapien
tgattaagccattccaaggtcctct

SEQ ID NO: 4817831 - DNA, 25 bp, Homo sapien
cattgagtctacagtgtaatttggg

SEQ ID NO: 4817832 - DNA, 25 bp, Homo sapien
ggatcatggtagacactgcattgag

SEQ ID NO: 4817833 - DNA, 25 bp, Homo sapien
tagtattacgacagaggctttggaa

SEQ ID NO: 4817834 - DNA, 25 bp, Homo sapien
ggcccagtgtacctgagggccacag

SEQ ID NO: 4817835 - DNA, 25 bp, Homo sapien
cagcaggcccagtgtacctgagggc

SEQ ID NO: 4817836 - DNA, 25 bp, Homo sapien
gcaggcccagtgtacctgagggcca

SEQ ID NO: 4817837 - DNA, 25 bp, Homo sapien
caggcccagtgtacctgagggccac

SEQ ID NO: 4817838 - DNA, 25 bp, Homo sapien
tagacatgagcttgacgagaactca

SEQ ID NO: 4817839 - DNA, 25 bp, Homo sapien
agaactcagcgaagacgcggcacac

SEQ ID NO: 4817840 - DNA, 25 bp, Homo sapien
gcggcacacggaaccagagcgccag

SEQ ID NO: 4817841 - DNA, 25 bp, Homo sapien
ttgacgagaactcagcgaagacgcg

SEQ ID NO: 4817842 - DNA, 25 bp, Homo sapien
gtgcaaatgaggcaccacggccagt

SEQ ID NO: 4817843 - DNA, 25 bp, Homo sapien
ggccgagcacgcagtcttaaagggt

SEQ ID NO: 4817844 - DNA, 25 bp, Homo sapien
agctccaaggagacaatgccacggt

SEQ ID NO: 4817845 - DNA, 25 bp, Homo sapien
ccttggcagcatttgagggagccac

SEQ ID NO: 4817846 - DNA, 25 bp, Homo sapien
ctctcccggttgtcattctcagtct

SEQ ID NO: 4817847 - DNA, 25 bp, Homo sapien
tcccggttgtcattctcagtctgtg

SEQ ID NO: 4817848 - DNA, 25 bp, Homo sapien
tctcccggttgtcattctcagtctg

SEQ ID NO: 4817849 - DNA, 25 bp, Homo sapien
ccggttgtcattctcagtctgtgct

SEQ ID NO: 4817850 - DNA, 25 bp, Homo sapien
acggtcccgatggggccctggtgct

SEQ ID NO: 4817851 - DNA, 25 bp, Homo sapien
ccacggtcccgatggggccctggtg

SEQ ID NO: 4817852 - DNA, 25 bp, Homo sapien
cacggtcccgatggggccctggtgc

SEQ ID NO: 4817853 - DNA, 25 bp, Homo sapien
caggctgcggtagacgtcatcgtca

SEQ ID NO: 4817854 - DNA, 25 bp, Homo sapien
ggctgcggtagacgtcatcgtcatt

SEQ ID NO: 4817855 - DNA, 25 bp, Homo sapien
tgcggtagacgtcatcgtcattctc

SEQ ID NO: 4817856 - DNA, 25 bp, Homo sapien
ccaggctgcggtagacgtcatcgtc

SEQ ID NO: 4817857 - DNA, 25 bp, Homo sapien
cacttccagggggttcacagtggag

SEQ ID NO: 4817858 - DNA, 25 bp, Homo sapien
tctgtcacagacctgcagggactgg

SEQ ID NO: 4817859 - DNA, 25 bp, Homo sapien
ggctctgtcacagacctgcagggac

SEQ ID NO: 4817860 - DNA, 25 bp, Homo sapien
tcacagacctgcagggactgggcca

SEQ ID NO: 4817861 - DNA, 25 bp, Homo sapien
cacagacctgcagggactgggccat

SEQ ID NO: 4817862 - DNA, 25 bp, Homo sapien
ccatccctgtctccaacctcgtcag

SEQ ID NO: 4817863 - DNA, 25 bp, Homo sapien
tccctgtctccaacctcgtcagtca

SEQ ID NO: 4817864 - DNA, 25 bp, Homo sapien
ccctgtctccaacctcgtcagtcat

SEQ ID NO: 4817865 - DNA, 25 bp, Homo sapien
atgcagccatccctgtctccaacct

SEQ ID NO: 4817866 - DNA, 25 bp, Homo sapien
ctgctttttctaaattttcagtgat

SEQ ID NO: 4817867 - DNA, 25 bp, Homo sapien
ctttttctaaattttcagtgatgat

SEQ ID NO: 4817868 - DNA, 25 bp, Homo sapien
tttcagtgatgattggtatgacttc

SEQ ID NO: 4817869 - DNA, 25 bp, Homo sapien
cagtgatgattggtatgacttccat

SEQ ID NO: 4817870 - DNA, 25 bp, Homo sapien
gaaatgcgaggtcactgcttccagt

SEQ ID NO: 4817871 - DNA, 25 bp, Homo sapien
ttgtcgtgcttagattcaatacggg

SEQ ID NO: 4817872 - DNA, 25 bp, Homo sapien
tccagttcctaatgctttgtcgtgc

SEQ ID NO: 4817873 - DNA, 25 bp, Homo sapien
caaaaggtgggtccttgaagccata

SEQ ID NO: 4817874 - DNA, 25 bp, Homo sapien
atcccccacggatcacatcagggta

SEQ ID NO: 4817875 - DNA, 25 bp, Homo sapien
tgagaatccaacaacggaagtcccc

SEQ ID NO: 4817876 - DNA, 25 bp, Homo sapien
ccaaagtcagggcaccctcatgatg

SEQ ID NO: 4817877 - DNA, 25 bp, Homo sapien
agctccagtaccatcgtcctgggac

SEQ ID NO: 4817878 - DNA, 25 bp, Homo sapien
aaagagattttgcagccgtcagtaa

SEQ ID NO: 4817879 - DNA, 25 bp, Homo sapien
cttgcaagatttccccggtgtgagc

SEQ ID NO: 4817880 - DNA, 25 bp, Homo sapien
catttaggtaggcaatgatctgtga

SEQ ID NO: 4817881 - DNA, 25 bp, Homo sapien
cgccaacgggttacgcgacaacacg

SEQ ID NO: 4817882 - DNA, 25 bp, Homo sapien
gagatgaaaggacccggccttggca

SEQ ID NO: 4817883 - DNA, 25 bp, Homo sapien
ttggcagcgcactccggagagctca

SEQ ID NO: 4817884 - DNA, 25 bp, Homo sapien
tctgtgacaaggcacgctggtgtcg

SEQ ID NO: 4817885 - DNA, 25 bp, Homo sapien
tcgatggagatgaaaggacccggcc

SEQ ID NO: 4817886 - DNA, 25 bp, Homo sapien
tgcagggagagcctcgacaccgcgg

SEQ ID NO: 4817887 - DNA, 25 bp, Homo sapien
gatccctttgttctgcgcgatgctg

SEQ ID NO: 4817888 - DNA, 25 bp, Homo sapien
tttgttctgcgcgatgctgtgcagg

SEQ ID NO: 4817889 - DNA, 25 bp, Homo sapien
agagcctcgacaccgcggagatgac

SEQ ID NO: 4817890 - DNA, 25 bp, Homo sapien
ctgggggagacaagaagagacgctc

SEQ ID NO: 4817891 - DNA, 25 bp, Homo sapien
tcctggcattgaaagcccaacacag

SEQ ID NO: 4817892 - DNA, 25 bp, Homo sapien
aggtggctagcaggccggagacaga

SEQ ID NO: 4817893 - DNA, 25 bp, Homo sapien
gcattgaaagcccaacacagccact

SEQ ID NO: 4817894 - DNA, 25 bp, Homo sapien
gggacaggtggctagcaggccggag

SEQ ID NO: 4817895 - DNA, 25 bp, Homo sapien
cctgcggcagacgtggctgatcaat

SEQ ID NO: 4817896 - DNA, 25 bp, Homo sapien
agacgtggctgatcaatccctccga

SEQ ID NO: 4817897 - DNA, 25 bp, Homo sapien
tgatcaatccctccgaggagccggg

SEQ ID NO: 4817898 - DNA, 25 bp, Homo sapien
tggctgatcaatccctccgaggagc

SEQ ID NO: 4817899 - DNA, 25 bp, Homo sapien
cagttaacaaacgaatgaagacgca

SEQ ID NO: 4817900 - DNA, 25 bp, Homo sapien
aacgaatgaagacgcacagctgcat

SEQ ID NO: 4817901 - DNA, 25 bp, Homo sapien
ccgagtcccagttaacaaacgaatg

SEQ ID NO: 4817902 - DNA, 25 bp, Homo sapien
tcgtctgttccgagtcccagttaac

SEQ ID NO: 4817903 - DNA, 25 bp, Homo sapien
gctactccagggagcgcatgcccca

SEQ ID NO: 4817904 - DNA, 25 bp, Homo sapien
tgctactccagggagcgcatgcccc

SEQ ID NO: 4817905 - DNA, 25 bp, Homo sapien
aagctggattttcagaggtgtggac

SEQ ID NO: 4817906 - DNA, 25 bp, Homo sapien
cccagcagaagctggattttcagag

SEQ ID NO: 4817907 - DNA, 25 bp, Homo sapien
caggtgtcccgggttggctgcatgg

SEQ ID NO: 4817908 - DNA, 25 bp, Homo sapien
gaaagctgacactcattagagcacc

SEQ ID NO: 4817909 - DNA, 25 bp, Homo sapien
tgtgctgctaggaagtgaggcctcc

SEQ ID NO: 4817910 - DNA, 25 bp, Homo sapien
caaacaagcctctgtttattttgga

SEQ ID NO: 4817911 - DNA, 25 bp, Homo sapien
gtgcacacacctctgtctataagca

SEQ ID NO: 4817912 - DNA, 25 bp, Homo sapien
agtgcacacacctctgtctataagc

SEQ ID NO: 4817913 - DNA, 25 bp, Homo sapien
cagtgcacacacctctgtctataag

SEQ ID NO: 4817914 - DNA, 25 bp, Homo sapien
gcacacacctctgtctataagcaca

SEQ ID NO: 4817915 - DNA, 25 bp, Homo sapien
cattgcagacgagaaaagcggacct

SEQ ID NO: 4817916 - DNA, 25 bp, Homo sapien
catgacgctatgaccctaggcaggg

SEQ ID NO: 4817917 - DNA, 25 bp, Homo sapien
tgaatgctttactggacctcacgga

SEQ ID NO: 4817918 - DNA, 25 bp, Homo sapien
gaagtcaacggtgcctgcagaacag

SEQ ID NO: 4817919 - DNA, 25 bp, Homo sapien
taacgagcataacactaaaatcttt

SEQ ID NO: 4817920 - DNA, 25 bp, Homo sapien
ctcttaacgagcataacactaaaat

SEQ ID NO: 4817921 - DNA, 25 bp, Homo sapien
tattaacgttagtaggtcgggcgca

SEQ ID NO: 4817922 - DNA, 25 bp, Homo sapien
attaacgttagtaggtcgggcgcag

SEQ ID NO: 4817923 - DNA, 25 bp, Homo sapien
tcaccggaggatggtccaagaaggc

SEQ ID NO: 4817924 - DNA, 25 bp, Homo sapien
ggtgaacttagatcagctgcggcta

SEQ ID NO: 4817925 - DNA, 25 bp, Homo sapien
tccaacacacgtgggagaagggctg

SEQ ID NO: 4817926 - DNA, 25 bp, Homo sapien
gaacacgaggctatgtccgtccaaa

SEQ ID NO: 4817927 - DNA, 25 bp, Homo sapien
tcaatcgcggaacacaaattacacg

SEQ ID NO: 4817928 - DNA, 25 bp, Homo sapien
gaggttcctgcaccctaacgtgttg

SEQ ID NO: 4817929 - DNA, 25 bp, Homo sapien
taaaatcagagtcgtcctgtgagcc

SEQ ID NO: 4817930 - DNA, 25 bp, Homo sapien
taaaatcacaatcgtcctgtcctcg

SEQ ID NO: 4817931 - DNA, 25 bp, Homo sapien
gatatgcccacagtattaggacagc

SEQ ID NO: 4817932 - DNA, 25 bp, Homo sapien
ctagcctgcctgagagagtgccatc

SEQ ID NO: 4817933 - DNA, 25 bp, Homo sapien
cttagggaggaaagcgactggccca

SEQ ID NO: 4817934 - DNA, 25 bp, Homo sapien
gccgggcatccagttgaaggactaa

SEQ ID NO: 4817935 - DNA, 25 bp, Homo sapien
aattgtcaggctccaacagacacaa

SEQ ID NO: 4817936 - DNA, 25 bp, Homo sapien
gcttttttgctgcaaacatcaaatt

SEQ ID NO: 4817937 - DNA, 25 bp, Homo sapien
gcaaacatcaaattgtcaggctcca

SEQ ID NO: 4817938 - DNA, 25 bp, Homo sapien
caacagacacaattaatgtcttggg

SEQ ID NO: 4817939 - DNA, 25 bp, Homo sapien
acctcctctgctcctagtgcgtcct

SEQ ID NO: 4817940 - DNA, 25 bp, Homo sapien
cctagtgcgtcctgaagcgtgggct

SEQ ID NO: 4817941 - DNA, 25 bp, Homo sapien
tgctcctagtgcgtcctgaagcgtg

SEQ ID NO: 4817942 - DNA, 25 bp, Homo sapien
cctctgctcctagtgcgtcctgaag

SEQ ID NO: 4817943 - DNA, 25 bp, Homo sapien
gctcccagagcttgaactcaggtct

SEQ ID NO: 4817944 - DNA, 25 bp, Homo sapien
gtcttgaaatcacagcctcctagga

SEQ ID NO: 4817945 - DNA, 25 bp, Homo sapien
cactggcatggagatcaagggatcc

SEQ ID NO: 4817946 - DNA, 25 bp, Homo sapien
aagggatccactcatgggccaaggc

SEQ ID NO: 4817947 - DNA, 25 bp, Homo sapien
agttaatgacgggcatggctcccgc

SEQ ID NO: 4817948 - DNA, 25 bp, Homo sapien
agtgtgaagttaatgacgggcatgg

SEQ ID NO: 4817949 - DNA, 25 bp, Homo sapien
tgaagttaatgacgggcatggctcc

SEQ ID NO: 4817950 - DNA, 25 bp, Homo sapien
tgtgaagttaatgacgggcatggct

SEQ ID NO: 4817951 - DNA, 25 bp, Homo sapien
tcaaataaaccaggcagtaaatatc

SEQ ID NO: 4817952 - DNA, 25 bp, Homo sapien
caaataaaccaggcagtaaatatct

SEQ ID NO: 4817953 - DNA, 25 bp, Homo sapien
aataaaccaggcagtaaatatcttg

SEQ ID NO: 4817954 - DNA, 25 bp, Homo sapien
aaataaaccaggcagtaaatatctt

SEQ ID NO: 4817955 - DNA, 25 bp, Homo sapien
gtggaaatccattctcccggtggtc

SEQ ID NO: 4817956 - DNA, 25 bp, Homo sapien
tccattctcccggtggtccaggaag

SEQ ID NO: 4817957 - DNA, 25 bp, Homo sapien
aggtggaaatccattctcccggtgg

SEQ ID NO: 4817958 - DNA, 25 bp, Homo sapien
gaaatccattctcccggtggtccag

SEQ ID NO: 4817959 - DNA, 25 bp, Homo sapien
cagccccgaatccatcaggaagcta

SEQ ID NO: 4817960 - DNA, 25 bp, Homo sapien
ttaaaaagagtaaccgtggagctgc

SEQ ID NO: 4817961 - DNA, 25 bp, Homo sapien
accctgatcccatccatttaaaaag

SEQ ID NO: 4817962 - DNA, 25 bp, Homo sapien
aatccatcaggaagctattgagacc

SEQ ID NO: 4817963 - DNA, 25 bp, Homo sapien
gaatcaagattcagggcaggaggta

SEQ ID NO: 4817964 - DNA, 25 bp, Homo sapien
gcccaataccttcccagagtcagag

SEQ ID NO: 4817965 - DNA, 25 bp, Homo sapien
gactggtgccatgtgaggcttcctg

SEQ ID NO: 4817966 - DNA, 25 bp, Homo sapien
tactaacttcgacccattctcagag

SEQ ID NO: 4817967 - DNA, 25 bp, Homo sapien
tcccggacatgagggtgcagaaatc

SEQ ID NO: 4817968 - DNA, 25 bp, Homo sapien
ctgtgttggagccaatcaggctgct

SEQ ID NO: 4817969 - DNA, 25 bp, Homo sapien
tgcagaaatccactggctctgtgtt

SEQ ID NO: 4817970 - DNA, 25 bp, Homo sapien
atggatctggcccacctgccgctga

SEQ ID NO: 4817971 - DNA, 25 bp, Homo sapien
cagctcgctgttccttaatccaaat

SEQ ID NO: 4817972 - DNA, 25 bp, Homo sapien
aatttatcgtggcagactttcagga

SEQ ID NO: 4817973 - DNA, 25 bp, Homo sapien
gtcaaaggggtcaaacagctcgctg

SEQ ID NO: 4817974 - DNA, 25 bp, Homo sapien
tccaaagtctcgcacatcgaagagg

SEQ ID NO: 4817975 - DNA, 25 bp, Homo sapien
tattaaaactgtaagctctgtaaaa

SEQ ID NO: 4817976 - DNA, 25 bp, Homo sapien
acttattaaaactgtaagctctgta

SEQ ID NO: 4817977 - DNA, 25 bp, Homo sapien
cttattaaaactgtaagctctgtaa

SEQ ID NO: 4817978 - DNA, 25 bp, Homo sapien
aaacttattaaaactgtaagctctg

SEQ ID NO: 4817979 - DNA, 25 bp, Homo sapien
ttaatcatgtgccctgatgaccaga

SEQ ID NO: 4817980 - DNA, 25 bp, Homo sapien
ggattaatcatgtgccctgatgacc

SEQ ID NO: 4817981 - DNA, 25 bp, Homo sapien
gggattaatcatgtgccctgatgac

SEQ ID NO: 4817982 - DNA, 25 bp, Homo sapien
gattaatcatgtgccctgatgacca

SEQ ID NO: 4817983 - DNA, 25 bp, Homo sapien
gcttaggtggcaacctcgcttccag

SEQ ID NO: 4817984 - DNA, 25 bp, Homo sapien
cacgatgccttccaagacgtcaggg

SEQ ID NO: 4817985 - DNA, 25 bp, Homo sapien
tcctcaagcagcagagagtccacga

SEQ ID NO: 4817986 - DNA, 25 bp, Homo sapien
cccaaggacagccactgctgcttag

SEQ ID NO: 4817987 - DNA, 25 bp, Homo sapien
caatggaatgaatagggcttggatg

SEQ ID NO: 4817988 - DNA, 25 bp, Homo sapien
caacatctagaacctccagaggcag

SEQ ID NO: 4817989 - DNA, 25 bp, Homo sapien
ggctttgggatgaatgggcacacaa

SEQ ID NO: 4817990 - DNA, 25 bp, Homo sapien
tctttgttgggcaactccggtggcc

SEQ ID NO: 4817991 - DNA, 25 bp, Homo sapien
gagacagtcacaacccgaggttccc

SEQ ID NO: 4817992 - DNA, 25 bp, Homo sapien
gggaagtgagaggtgccgagaaaca

SEQ ID NO: 4817993 - DNA, 25 bp, Homo sapien
agacagtcacaacccgaggttccca

SEQ ID NO: 4817994 - DNA, 25 bp, Homo sapien
tgagaggtgccgagaaacagcacag

SEQ ID NO: 4817995 - DNA, 25 bp, Homo sapien
ggaatggtgaccacaggtctgccgc

SEQ ID NO: 4817996 - DNA, 25 bp, Homo sapien
aagggtgctcgagccggccttggag

SEQ ID NO: 4817997 - DNA, 25 bp, Homo sapien
caggaggccgtcatgggaagggtgc

SEQ ID NO: 4817998 - DNA, 25 bp, Homo sapien
aggtctgccgccttgcaatgcgacg

SEQ ID NO: 4817999 - DNA, 25 bp, Homo sapien
gaccccagattcaatgaccagtgtc

SEQ ID NO: 4818000 - DNA, 25 bp, Homo sapien
aggggtaacaggtaaggatctcaag

SEQ ID NO: 4818001 - DNA, 25 bp, Homo sapien
ccccagattcaatgaccagtgtctt

SEQ ID NO: 4818002 - DNA, 25 bp, Homo sapien
gggtaacaggtaaggatctcaagat

SEQ ID NO: 4818003 - DNA, 25 bp, Homo sapien
ttcacacttcccccgagagctggat

SEQ ID NO: 4818004 - DNA, 25 bp, Homo sapien
ctgcgaggacgagcctctgcacctg

SEQ ID NO: 4818005 - DNA, 25 bp, Homo sapien
actgcggcttctcacggctgcgctg

SEQ ID NO: 4818006 - DNA, 25 bp, Homo sapien
cctcctgccggatgaactgcggctt

SEQ ID NO: 4818007 - DNA, 25 bp, Homo sapien
ttggcccctcggtgtttaactgatc

SEQ ID NO: 4818008 - DNA, 25 bp, Homo sapien
tctccaaagcttgcagatggaacag

SEQ ID NO: 4818009 - DNA, 25 bp, Homo sapien
tgatcctgatcgtcaccatctgggt

SEQ ID NO: 4818010 - DNA, 25 bp, Homo sapien
gatggaacagtcgtaactgctgctg

SEQ ID NO: 4818011 - DNA, 25 bp, Homo sapien
tggcgcagacgagctgacagtgccc

SEQ ID NO: 4818012 - DNA, 25 bp, Homo sapien
tctccccggaaggccatctgcaaag

SEQ ID NO: 4818013 - DNA, 25 bp, Homo sapien
agacgagctgacagtgcccaaccca

SEQ ID NO: 4818014 - DNA, 25 bp, Homo sapien
acccaaagaagctggcgcagacgag

SEQ ID NO: 4818015 - DNA, 25 bp, Homo sapien
tctcccgtcccagcagaaagatgag

SEQ ID NO: 4818016 - DNA, 25 bp, Homo sapien
cagcccagcagctgtagatggaaca

SEQ ID NO: 4818017 - DNA, 25 bp, Homo sapien
tccggcatccaatgggtgcctggtg

SEQ ID NO: 4818018 - DNA, 25 bp, Homo sapien
gtgtccatttgaggagcagcccagc

SEQ ID NO: 4818019 - DNA, 25 bp, Homo sapien
gcagcgcgcccagggcttcaccttc

SEQ ID NO: 4818020 - DNA, 25 bp, Homo sapien
tatacccgtgcagtgtccaggtgcg

SEQ ID NO: 4818021 - DNA, 25 bp, Homo sapien
ccagaatgcctccttctgcagacag

SEQ ID NO: 4818022 - DNA, 25 bp, Homo sapien
tgcagacaggcactagtgaccacga

SEQ ID NO: 4818023 - DNA, 25 bp, Homo sapien
ccagcgtccttccaggaagacaagg

SEQ ID NO: 4818024 - DNA, 25 bp, Homo sapien
gacaaggaagatttcctccaggagg

SEQ ID NO: 4818025 - DNA, 25 bp, Homo sapien
cccagcgtccttccaggaagacaag

SEQ ID NO: 4818026 - DNA, 25 bp, Homo sapien
caaagagtttcattacacgaggcca

SEQ ID NO: 4818027 - DNA, 25 bp, Homo sapien
gctgctgagttttgcagaaggagca

SEQ ID NO: 4818028 - DNA, 25 bp, Homo sapien
tatcgtgtgatgaaacaaagagttt

SEQ ID NO: 4818029 - DNA, 25 bp, Homo sapien
cagcaagggtatcgtgtgatgaaac

SEQ ID NO: 4818030 - DNA, 25 bp, Homo sapien
gcagccgtccccgtgcaggcaacag

SEQ ID NO: 4818031 - DNA, 25 bp, Homo sapien
cagaggagtggatggcaagatcagc

SEQ ID NO: 4818032 - DNA, 25 bp, Homo sapien
ccgtgcaggcaacagccgtacaaag

SEQ ID NO: 4818033 - DNA, 25 bp, Homo sapien
agatcagcctcagcgacacagggca

SEQ ID NO: 4818034 - DNA, 25 bp, Homo sapien
tcgtattgctgcctggccaatggct

SEQ ID NO: 4818035 - DNA, 25 bp, Homo sapien
cgtattgctgcctggccaatggctc

SEQ ID NO: 4818036 - DNA, 25 bp, Homo sapien
ttcgtattgctgcctggccaatggc

SEQ ID NO: 4818037 - DNA, 25 bp, Homo sapien
gtattgctgcctggccaatggctcc

SEQ ID NO: 4818038 - DNA, 25 bp, Homo sapien
agcgcctgcgccaggtcgaagacca

SEQ ID NO: 4818039 - DNA, 25 bp, Homo sapien
tctgcggccggaagttgatgtcctt

SEQ ID NO: 4818040 - DNA, 25 bp, Homo sapien
ttgggcggcaggaccttgcaatcga

SEQ ID NO: 4818041 - DNA, 25 bp, Homo sapien
aatcgatgagccagcggccgcactg

SEQ ID NO: 4818042 - DNA, 25 bp, Homo sapien
tgcggcctcgggactgtgatacact

SEQ ID NO: 4818043 - DNA, 25 bp, Homo sapien
tcgggactgtgatacactgcggcct

SEQ ID NO: 4818044 - DNA, 25 bp, Homo sapien
ggcctcgggactgtgaaacactgcg

SEQ ID NO: 4818045 - DNA, 25 bp, Homo sapien
gaggcctcgggactgtgatacactg

SEQ ID NO: 4818046 - DNA, 25 bp, Homo sapien
cagcagaagttggagtcggtgccac

SEQ ID NO: 4818047 - DNA, 25 bp, Homo sapien
caagctcgaggtctctagggacaca

SEQ ID NO: 4818048 - DNA, 25 bp, Homo sapien
gacacagggcagtccaagttttgca

SEQ ID NO: 4818049 - DNA, 25 bp, Homo sapien
taattccgatgtgagcacctgaacc

SEQ ID NO: 4818050 - DNA, 25 bp, Homo sapien
gaaacccgagagttgtaagttgcac

SEQ ID NO: 4818051 - DNA, 25 bp, Homo sapien
catgtgtggcctacagtgacttcca

SEQ ID NO: 4818052 - DNA, 25 bp, Homo sapien
gacttccatgtagtaacagggctga

SEQ ID NO: 4818053 - DNA, 25 bp, Homo sapien
ggccacctgtgttcagtctccatga

SEQ ID NO: 4818054 - DNA, 25 bp, Homo sapien
tcttgctcaactgtacagactgggc

SEQ ID NO: 4818055 - DNA, 25 bp, Homo sapien
tcatcctgcaccatgcctcttgtat

SEQ ID NO: 4818056 - DNA, 25 bp, Homo sapien
cacacacggtcacgtgattctgacg

SEQ ID NO: 4818057 - DNA, 25 bp, Homo sapien
tacagactgggcattcacttaatgc

SEQ ID NO: 4818058 - DNA, 25 bp, Homo sapien
caaggagctggcactaagccgctta

SEQ ID NO: 4818059 - DNA, 25 bp, Homo sapien
agctggcactaagccgcttaggctg

SEQ ID NO: 4818060 - DNA, 25 bp, Homo sapien
ggagctggcactaagccgcttaggc

SEQ ID NO: 4818061 - DNA, 25 bp, Homo sapien
aaggagctggcactaagccgcttag

SEQ ID NO: 4818062 - DNA, 25 bp, Homo sapien
gaagggtccatgattaccagaaaca

SEQ ID NO: 4818063 - DNA, 25 bp, Homo sapien
gagaagggtccatgattaccagaaa

SEQ ID NO: 4818064 - DNA, 25 bp, Homo sapien
agggtccatgattaccagaaacatc

SEQ ID NO: 4818065 - DNA, 25 bp, Homo sapien
ggagaagggtccatgattaccagaa

SEQ ID NO: 4818066 - DNA, 25 bp, Homo sapien
gctaaactacttacattggactcat

SEQ ID NO: 4818067 - DNA, 25 bp, Homo sapien
gcattgcaataaacaagctaaacta

SEQ ID NO: 4818068 - DNA, 25 bp, Homo sapien
ttggactcattttcagtaactgaca

SEQ ID NO: 4818069 - DNA, 25 bp, Homo sapien
tctgttgtgttgaggccagcattgc

SEQ ID NO: 4818070 - DNA, 25 bp, Homo sapien
gaacagtgctactctggatgtgaca

SEQ ID NO: 4818071 - DNA, 25 bp, Homo sapien
ttatgccagtattaaggaacagtgc

SEQ ID NO: 4818072 - DNA, 25 bp, Homo sapien
aacttcctggaagcattatgccagt

SEQ ID NO: 4818073 - DNA, 25 bp, Homo sapien
gagtgttctcaaatccaattccgac

SEQ ID NO: 4818074 - DNA, 25 bp, Homo sapien
tcaccgcagccttctaatacagaag

SEQ ID NO: 4818075 - DNA, 25 bp, Homo sapien
ctaatacagaagaaacggacgtgac

SEQ ID NO: 4818076 - DNA, 25 bp, Homo sapien
atctaattgaatcaccgcagccttc

SEQ ID NO: 4818077 - DNA, 25 bp, Homo sapien
taatacagaagaaacggacgtgact

SEQ ID NO: 4818078 - DNA, 25 bp, Homo sapien
aggaagtcattaatccttcgaaact

SEQ ID NO: 4818079 - DNA, 25 bp, Homo sapien
gaggaagtcattaatccttcgaaac

SEQ ID NO: 4818080 - DNA, 25 bp, Homo sapien
cctcagcccgccagcaagggcgctg

SEQ ID NO: 4818081 - DNA, 25 bp, Homo sapien
aaggaaaggccccacgatgctcctg

SEQ ID NO: 4818082 - DNA, 25 bp, Homo sapien
gtgctggcagcacgttaccaaccag

SEQ ID NO: 4818083 - DNA, 25 bp, Homo sapien
aaccagcctgcgtgaagacctgtca

SEQ ID NO: 4818084 - DNA, 25 bp, Homo sapien
tagggtgtacgtatcacccagccct

SEQ ID NO: 4818085 - DNA, 25 bp, Homo sapien
tttccggactaactgtgacaacgcg

SEQ ID NO: 4818086 - DNA, 25 bp, Homo sapien
taactctggcattcctggccggagc

SEQ ID NO: 4818087 - DNA, 25 bp, Homo sapien
cccgtactcaaagaccatatggcag

SEQ ID NO: 4818088 - DNA, 25 bp, Homo sapien
cctacatctgtaagggtcagtggac

SEQ ID NO: 4818089 - DNA, 25 bp, Homo sapien
caccgcgcggtggcaggagttagca

SEQ ID NO: 4818090 - DNA, 25 bp, Homo sapien
accgcgcggtggcaggagttagcac

SEQ ID NO: 4818091 - DNA, 25 bp, Homo sapien
gagctatcgaccaggttgggcctaa

SEQ ID NO: 4818092 - DNA, 25 bp, Homo sapien
ttgggcctaagcaaagggattccac

SEQ ID NO: 4818093 - DNA, 25 bp, Homo sapien
agagtctcggcgtgtgcgacatcca

SEQ ID NO: 4818094 - DNA, 25 bp, Homo sapien
cacagcgggctggacttccgtagaa

SEQ ID NO: 4818095 - DNA, 25 bp, Homo sapien
cctgagggtgctgagccgggcttct

SEQ ID NO: 4818096 - DNA, 25 bp, Homo sapien
gctgtcagagctggacccgctggag

SEQ ID NO: 4818097 - DNA, 25 bp, Homo sapien
ctgtcagagctggacccgctggagc

SEQ ID NO: 4818098 - DNA, 25 bp, Homo sapien
gggtggcacagcggccgccagcggt

SEQ ID NO: 4818099 - DNA, 25 bp, Homo sapien
ctaaagaggggtggcacagcggccg

SEQ ID NO: 4818100 - DNA, 25 bp, Homo sapien
aggggtggcacagcggccgccagcg

SEQ ID NO: 4818101 - DNA, 25 bp, Homo sapien
gtggcacagcggccgccagcggtac

SEQ ID NO: 4818102 - DNA, 25 bp, Homo sapien
gacatcctgcagacgcttttccagc

SEQ ID NO: 4818103 - DNA, 25 bp, Homo sapien
tcctctttcgacttggctgcctgtt

SEQ ID NO: 4818104 - DNA, 25 bp, Homo sapien
ctttccgggcgggcttcttgctgct

SEQ ID NO: 4818105 - DNA, 25 bp, Homo sapien
ttcttttcctgagctagctcctctt

SEQ ID NO: 4818106 - DNA, 25 bp, Homo sapien
cagcagtgactcgttcctgccactg

SEQ ID NO: 4818107 - DNA, 25 bp, Homo sapien
cgttcctgccactgacttcagggaa

SEQ ID NO: 4818108 - DNA, 25 bp, Homo sapien
ccagggtccgtcctgtgaggcttct

SEQ ID NO: 4818109 - DNA, 25 bp, Homo sapien
gggtgtccttgttataagacaagct

SEQ ID NO: 4818110 - DNA, 25 bp, Homo sapien
ggagtgacaggaggggcaggccaag

SEQ ID NO: 4818111 - DNA, 25 bp, Homo sapien
gaggggagaggaacttcaagcacca

SEQ ID NO: 4818112 - DNA, 25 bp, Homo sapien
caccacgctccacgcaggcaactta

SEQ ID NO: 4818113 - DNA, 25 bp, Homo sapien
agaggaacttcaagcaccacgctcc

SEQ ID NO: 4818114 - DNA, 25 bp, Homo sapien
tctgagtcgtaggaggcagatgcct

SEQ ID NO: 4818115 - DNA, 25 bp, Homo sapien
gccggttgatgtccaggctaagctg

SEQ ID NO: 4818116 - DNA, 25 bp, Homo sapien
ctccagttcccgcaaagtggtgggt

SEQ ID NO: 4818117 - DNA, 25 bp, Homo sapien
ggcgcttttcatcgtagctcatggg

SEQ ID NO: 4818118 - DNA, 25 bp, Homo sapien
aacgtggtgttgagtctccgtctac

SEQ ID NO: 4818119 - DNA, 25 bp, Homo sapien
agacagagcaacgtggtgttgagtc

SEQ ID NO: 4818120 - DNA, 25 bp, Homo sapien
caggagacagagcaacgtggtgttg

SEQ ID NO: 4818121 - DNA, 25 bp, Homo sapien
cagagcaacgtggtgttgagtctcc

SEQ ID NO: 4818122 - DNA, 25 bp, Homo sapien
gctctctgggaccaagctttcttcc

SEQ ID NO: 4818123 - DNA, 25 bp, Homo sapien
ttagaaaagtcgctcccagctgcgg

SEQ ID NO: 4818124 - DNA, 25 bp, Homo sapien
tgccccaaggcagaaaatccaaggt

SEQ ID NO: 4818125 - DNA, 25 bp, Homo sapien
ttggccaggaaacaattacagaggt

SEQ ID NO: 4818126 - DNA, 25 bp, Homo sapien
tcaaactccacaggtcaagaaatga

SEQ ID NO: 4818127 - DNA, 25 bp, Homo sapien
aactccacaggtcaagaaatgatct

SEQ ID NO: 4818128 - DNA, 25 bp, Homo sapien
caaactccacaggtcaagaaatgat

SEQ ID NO: 4818129 - DNA, 25 bp, Homo sapien
aaactccacaggtcaagaaatgatc

SEQ ID NO: 4818130 - DNA, 25 bp, Homo sapien
cataagtttgacaatccgagtggaa

SEQ ID NO: 4818131 - DNA, 25 bp, Homo sapien
tacagacaataaaaggctaatagag

SEQ ID NO: 4818132 - DNA, 25 bp, Homo sapien
cgagtggaatggattaacgccttag

SEQ ID NO: 4818133 - DNA, 25 bp, Homo sapien
gatggttctgctagtgaatcctacc

SEQ ID NO: 4818134 - DNA, 25 bp, Homo sapien
ttttttctctgaggccaagtcttgc

SEQ ID NO: 4818135 - DNA, 25 bp, Homo sapien
tttctctgaggccaagtcttgctct

SEQ ID NO: 4818136 - DNA, 25 bp, Homo sapien
tttttctctgaggccaagtcttgct

SEQ ID NO: 4818137 - DNA, 25 bp, Homo sapien
ctttttttctctgaggccaagtctt

SEQ ID NO: 4818138 - DNA, 25 bp, Homo sapien
ctgccggccgtggtcgtgctgttgg

SEQ ID NO: 4818139 - DNA, 25 bp, Homo sapien
ccggccgtggtcgtgctgttggcct

SEQ ID NO: 4818140 - DNA, 25 bp, Homo sapien
tgccggccgtggtcgtgctgttggc

SEQ ID NO: 4818141 - DNA, 25 bp, Homo sapien
gccgtggtcgtgctgttggccttct

SEQ ID NO: 4818142 - DNA, 25 bp, Homo sapien
ttcctcggccttcactttgtgcttc

SEQ ID NO: 4818143 - DNA, 25 bp, Homo sapien
tcttcctcggccttcactttgtgct

SEQ ID NO: 4818144 - DNA, 25 bp, Homo sapien
ttctcttcctcggccttcactttgt

SEQ ID NO: 4818145 - DNA, 25 bp, Homo sapien
tctcttcctcggccttcactttgtg

SEQ ID NO: 4818146 - DNA, 25 bp, Homo sapien
agggcggccagctgctcgtgcacgg

SEQ ID NO: 4818147 - DNA, 25 bp, Homo sapien
ccagctgctcgtgcacggccttcag

SEQ ID NO: 4818148 - DNA, 25 bp, Homo sapien
gcggccagctgctcgtgcacggcct

SEQ ID NO: 4818149 - DNA, 25 bp, Homo sapien
gggcctgagacagggcggccagctg

SEQ ID NO: 4818150 - DNA, 25 bp, Homo sapien
gaaaagagcgggcggctgagcaggt

SEQ ID NO: 4818151 - DNA, 25 bp, Homo sapien
ctggaaaagagcgggcggctgagca

SEQ ID NO: 4818152 - DNA, 25 bp, Homo sapien
tgctgggcacggcccacaccactgg

SEQ ID NO: 4818153 - DNA, 25 bp, Homo sapien
ctgggcacggcccacaccactgggg

SEQ ID NO: 4818154 - DNA, 25 bp, Homo sapien
acaggctcagcactgcgcgggtggc

SEQ ID NO: 4818155 - DNA, 25 bp, Homo sapien
acaacagggactcggtgagggcagc

SEQ ID NO: 4818156 - DNA, 25 bp, Homo sapien
cctcggcttcttcgcctgcagtggg

SEQ ID NO: 4818157 - DNA, 25 bp, Homo sapien
ggcgatgtcggagctgcctcagctg

SEQ ID NO: 4818158 - DNA, 25 bp, Homo sapien
agagctctcctcactgctacggctg

SEQ ID NO: 4818159 - DNA, 25 bp, Homo sapien
gctgcctgagtccgaagagctctcc

SEQ ID NO: 4818160 - DNA, 25 bp, Homo sapien
ccggtgcctccacgggctcatctgg

SEQ ID NO: 4818161 - DNA, 25 bp, Homo sapien
tcactgctacggctgctctcagcgc

SEQ ID NO: 4818162 - DNA, 25 bp, Homo sapien
tccctccccaggcaattcctgcgga

SEQ ID NO: 4818163 - DNA, 25 bp, Homo sapien
ccaggcaattcctgcggacaggcct

SEQ ID NO: 4818164 - DNA, 25 bp, Homo sapien
tccccaggcaattcctgcggacagg

SEQ ID NO: 4818165 - DNA, 25 bp, Homo sapien
cctccccaggcaattcctgcggaca

SEQ ID NO: 4818166 - DNA, 25 bp, Homo sapien
gacttcctatcaaaattgactttgg

SEQ ID NO: 4818167 - DNA, 25 bp, Homo sapien
tccgtcacccctctcagcaaacatc

SEQ ID NO: 4818168 - DNA, 25 bp, Homo sapien
caggctcactgaagacagggaggca

SEQ ID NO: 4818169 - DNA, 25 bp, Homo sapien
tgactttggaaagcctttggaccag

SEQ ID NO: 4818170 - DNA, 25 bp, Homo sapien
aaccagggttctgacggcttcctct

SEQ ID NO: 4818171 - DNA, 25 bp, Homo sapien
tcctctggatgtagtgggacctcca

SEQ ID NO: 4818172 - DNA, 25 bp, Homo sapien
cagtaagcgaggtctcagtataaaa

SEQ ID NO: 4818173 - DNA, 25 bp, Homo sapien
tcaagacacagtaagcgaggtctca

SEQ ID NO: 4818174 - DNA, 25 bp, Homo sapien
agagaaagagcatctgccgtcccac

SEQ ID NO: 4818175 - DNA, 25 bp, Homo sapien
ctaattcatccaccggctgcactga

SEQ ID NO: 4818176 - DNA, 25 bp, Homo sapien
actacagtcagggaagccgcaagag

SEQ ID NO: 4818177 - DNA, 25 bp, Homo sapien
gctgcactgacaggctagtgtccaa

SEQ ID NO: 4818178 - DNA, 25 bp, Homo sapien
ttggcactcgggaaaaaggtgttga

SEQ ID NO: 4818179 - DNA, 25 bp, Homo sapien
ctggttggcactcgggaaaaaggtg

SEQ ID NO: 4818180 - DNA, 25 bp, Homo sapien
ggacattcacctgggcgcttacccc

SEQ ID NO: 4818181 - DNA, 25 bp, Homo sapien
ctctctaaggccttcctcggctgga

SEQ ID NO: 4818182 - DNA, 25 bp, Homo sapien
ggccatggccacaacctcgtggtct

SEQ ID NO: 4818183 - DNA, 25 bp, Homo sapien
tctgggtactctcggccatccatct

SEQ ID NO: 4818184 - DNA, 25 bp, Homo sapien
tgtagcaattcgagaacatcagccg

SEQ ID NO: 4818185 - DNA, 25 bp, Homo sapien
gcagcaaagccctgtgcgtctgggt

SEQ ID NO: 4818186 - DNA, 25 bp, Homo sapien
agtgacaggggccagtgagcgtggc

SEQ ID NO: 4818187 - DNA, 25 bp, Homo sapien
tgagcgtggcccgtggcatcaggac

SEQ ID NO: 4818188 - DNA, 25 bp, Homo sapien
agcgtggcccgtggcatcaggactc

SEQ ID NO: 4818189 - DNA, 25 bp, Homo sapien
tgacaggggccagtgagcgtggccc

SEQ ID NO: 4818190 - DNA, 25 bp, Homo sapien
gcatgtgccgggataaaccatcccc

SEQ ID NO: 4818191 - DNA, 25 bp, Homo sapien
cacagtcgcgggcagcaagtgctgc

SEQ ID NO: 4818192 - DNA, 25 bp, Homo sapien
ctgtataatctagaggtcctgaggc

SEQ ID NO: 4818193 - DNA, 25 bp, Homo sapien
tagttttccgttttagcatgtgccg

SEQ ID NO: 4818194 - DNA, 25 bp, Homo sapien
taactgtgctatggtagagacacac

SEQ ID NO: 4818195 - DNA, 25 bp, Homo sapien
tgaccaaaatggaattaagctgagc

SEQ ID NO: 4818196 - DNA, 25 bp, Homo sapien
gggcaaatcagaccctttgaccaaa

SEQ ID NO: 4818197 - DNA, 25 bp, Homo sapien
caaacactggaaccccccatgatgt

SEQ ID NO: 4818198 - DNA, 25 bp, Homo sapien
cgctcgtcactttcacctgactgtg

SEQ ID NO: 4818199 - DNA, 25 bp, Homo sapien
caggcggccccgctcgtcactttca

SEQ ID NO: 4818200 - DNA, 25 bp, Homo sapien
tcactttcacctgactgtgcaccgg

SEQ ID NO: 4818201 - DNA, 25 bp, Homo sapien
cacctgactgtgcaccgggctctgg

SEQ ID NO: 4818202 - DNA, 25 bp, Homo sapien
gaggaggcaggtcacacctctgcca

SEQ ID NO: 4818203 - DNA, 25 bp, Homo sapien
aatgactgcgactggcttcccagga

SEQ ID NO: 4818204 - DNA, 25 bp, Homo sapien
tgcccgagatccagtcaatcaagga

SEQ ID NO: 4818205 - DNA, 25 bp, Homo sapien
gcctcaggtaggcagaatgactgcg

SEQ ID NO: 4818206 - DNA, 25 bp, Homo sapien
ggttcgatgggaataaacaacaaca

SEQ ID NO: 4818207 - DNA, 25 bp, Homo sapien
taaacaacaacagagccacagactc

SEQ ID NO: 4818208 - DNA, 25 bp, Homo sapien
ataaacaacaacagagccacagact

SEQ ID NO: 4818209 - DNA, 25 bp, Homo sapien
aaacaacaacagagccacagactcc

SEQ ID NO: 4818210 - DNA, 25 bp, Homo sapien
gcacgccttcctcgctgagccttgc

SEQ ID NO: 4818211 - DNA, 25 bp, Homo sapien
gagcacgccttcctcgctgagcctt

SEQ ID NO: 4818212 - DNA, 25 bp, Homo sapien
agcacgccttcctcgctgagccttg

SEQ ID NO: 4818213 - DNA, 25 bp, Homo sapien
agggtgcgcttctccggcaagcgag

SEQ ID NO: 4818214 - DNA, 25 bp, Homo sapien
cgcttctccggcaagcgagaccctg

SEQ ID NO: 4818215 - DNA, 25 bp, Homo sapien
ccactcagccggcacaagacatcag

SEQ ID NO: 4818216 - DNA, 25 bp, Homo sapien
actcagccggcacaagacatcagca

SEQ ID NO: 4818217 - DNA, 25 bp, Homo sapien
agagcagggcctgccgcgcggccac

SEQ ID NO: 4818218 - DNA, 25 bp, Homo sapien
gcagagcagggcctgccgcgcggcc

SEQ ID NO: 4818219 - DNA, 25 bp, Homo sapien
cagggcctgccgcgcggccacgtac

SEQ ID NO: 4818220 - DNA, 25 bp, Homo sapien
agcagggcctgccgcgcggccacgt

SEQ ID NO: 4818221 - DNA, 25 bp, Homo sapien
tagcgtaggtgctccgacagcttgc

SEQ ID NO: 4818222 - DNA, 25 bp, Homo sapien
gatgtcgtggtagtcgtgcagctcc

SEQ ID NO: 4818223 - DNA, 25 bp, Homo sapien
ttcacggtgctgaggtccatcgggt

SEQ ID NO: 4818224 - DNA, 25 bp, Homo sapien
gcttcttggatagcatctccctgag

SEQ ID NO: 4818225 - DNA, 25 bp, Homo sapien
cgacgtgacgtttgcagtgatggtt

SEQ ID NO: 4818226 - DNA, 25 bp, Homo sapien
ttgacgacaggcggcgtaggaggga

SEQ ID NO: 4818227 - DNA, 25 bp, Homo sapien
gactgggaccgacgtgacgtttgca

SEQ ID NO: 4818228 - DNA, 25 bp, Homo sapien
ggtggcagcgatgacgggcgtctgg

SEQ ID NO: 4818229 - DNA, 25 bp, Homo sapien
aggacacggccgccacttgctgtgt

SEQ ID NO: 4818230 - DNA, 25 bp, Homo sapien
gacacggccgccacttgctgtgtac

SEQ ID NO: 4818231 - DNA, 25 bp, Homo sapien
agaggacacggccgccacttgctgt

SEQ ID NO: 4818232 - DNA, 25 bp, Homo sapien
agacagaggacacggccgccacttg

SEQ ID NO: 4818233 - DNA, 25 bp, Homo sapien
ccaggcaggtgatagtgactctcag

SEQ ID NO: 4818234 - DNA, 25 bp, Homo sapien
gactctcaggtcacagagaatcaaa

SEQ ID NO: 4818235 - DNA, 25 bp, Homo sapien
aatgagtgctaaagagacaaagccc

SEQ ID NO: 4818236 - DNA, 25 bp, Homo sapien
gccccacgcgtcgtggaagaagtga

SEQ ID NO: 4818237 - DNA, 25 bp, Homo sapien
aagcttgggccattagcactatgtc

SEQ ID NO: 4818238 - DNA, 25 bp, Homo sapien
ccattagcactatgtcatctgtggg

SEQ ID NO: 4818239 - DNA, 25 bp, Homo sapien
tgggccattagcactatgtcatctg

SEQ ID NO: 4818240 - DNA, 25 bp, Homo sapien
cagccggcttccgacctttgccctt

SEQ ID NO: 4818241 - DNA, 25 bp, Homo sapien
gcggcgtgccaggcccgcatcttct

SEQ ID NO: 4818242 - DNA, 25 bp, Homo sapien
ggcgtgccaggcccgcatcttctta

SEQ ID NO: 4818243 - DNA, 25 bp, Homo sapien
aagcggcgtgccaggcccgcatctt

SEQ ID NO: 4818244 - DNA, 25 bp, Homo sapien
tgcaagcggcgtgccaggcccgcat

SEQ ID NO: 4818245 - DNA, 25 bp, Homo sapien
cattcgcttgcactccaataataat

SEQ ID NO: 4818246 - DNA, 25 bp, Homo sapien
ttgaagtcctgcatacattcgcttg

SEQ ID NO: 4818247 - DNA, 25 bp, Homo sapien
agtctcttcttaatagtccccatat

SEQ ID NO: 4818248 - DNA, 25 bp, Homo sapien
ttaatagtccccatatccattgggt

SEQ ID NO: 4818249 - DNA, 25 bp, Homo sapien
ggtgacgtgagtacttggccagctc

SEQ ID NO: 4818250 - DNA, 25 bp, Homo sapien
cggagttagggcagaccccaggaca

SEQ ID NO: 4818251 - DNA, 25 bp, Homo sapien
gagcccacggagttagggcagaccc

SEQ ID NO: 4818252 - DNA, 25 bp, Homo sapien
gtgacgtgagtacttggccagctcc

SEQ ID NO: 4818253 - DNA, 25 bp, Homo sapien
gagatggggccaaaccttccaggga

SEQ ID NO: 4818254 - DNA, 25 bp, Homo sapien
tggagatggggccaaaccttccagg

SEQ ID NO: 4818255 - DNA, 25 bp, Homo sapien
cagatgagggcaccatcacctggaa

SEQ ID NO: 4818256 - DNA, 25 bp, Homo sapien
aaagcaggcctcaacatacactcgg

SEQ ID NO: 4818257 - DNA, 25 bp, Homo sapien
aatgagcatgcagatgagggcacca

SEQ ID NO: 4818258 - DNA, 25 bp, Homo sapien
tacactcggcctctaactccaagtg

SEQ ID NO: 4818259 - DNA, 25 bp, Homo sapien
ggtgtttccagagcgtcttcaccac

SEQ ID NO: 4818260 - DNA, 25 bp, Homo sapien
tgattgcgtccacgggctggtagaa

SEQ ID NO: 4818261 - DNA, 25 bp, Homo sapien
cggcaggttcaatttgattgcgtcc

SEQ ID NO: 4818262 - DNA, 25 bp, Homo sapien
agggccaggcgaactggtgtttcca

SEQ ID NO: 4818263 - DNA, 25 bp, Homo sapien
cgcgggggcgactgtcgtggcggtg

SEQ ID NO: 4818264 - DNA, 25 bp, Homo sapien
gatccccgcgggggcgactgtcgtg

SEQ ID NO: 4818265 - DNA, 25 bp, Homo sapien
atccccgcgggggcgactgtcgtgg

SEQ ID NO: 4818266 - DNA, 25 bp, Homo sapien
gggcgactgtcgtggcggtggacat

SEQ ID NO: 4818267 - DNA, 25 bp, Homo sapien
agaaagcgcgacgtcccatttccgg

SEQ ID NO: 4818268 - DNA, 25 bp, Homo sapien
tggctgcttctacgctccctgagaa

SEQ ID NO: 4818269 - DNA, 25 bp, Homo sapien
tacgctccctgagaaagcgcgacgt

SEQ ID NO: 4818270 - DNA, 25 bp, Homo sapien
ctgagaaagcgcgacgtcccatttc

SEQ ID NO: 4818271 - DNA, 25 bp, Homo sapien
ttgggcctttcctgcagtcgtgtaa

SEQ ID NO: 4818272 - DNA, 25 bp, Homo sapien
ctggaggctcccctcggagcacagg

SEQ ID NO: 4818273 - DNA, 25 bp, Homo sapien
aggtcacggctggaggctcccctcg

SEQ ID NO: 4818274 - DNA, 25 bp, Homo sapien
taactgacagttagacaggtcacgg

SEQ ID NO: 4818275 - DNA, 25 bp, Homo sapien
gtttcaaaccggagactgagaagga

SEQ ID NO: 4818276 - DNA, 25 bp, Homo sapien
gcttatgctgccgtcaggatcccac

SEQ ID NO: 4818277 - DNA, 25 bp, Homo sapien
tcctccaagcatgaggatggacggt

SEQ ID NO: 4818278 - DNA, 25 bp, Homo sapien
gatggacggtcacagctcaacatgg

SEQ ID NO: 4818279 - DNA, 25 bp, Homo sapien
tagaccccgttggaagccagtaaca

SEQ ID NO: 4818280 - DNA, 25 bp, Homo sapien
gatcgcaaccactcaaggattgggt

SEQ ID NO: 4818281 - DNA, 25 bp, Homo sapien
caggcatactacatggacccaggaa

SEQ ID NO: 4818282 - DNA, 25 bp, Homo sapien
ttgtatcacgttgtcactccggcgc

SEQ ID NO: 4818283 - DNA, 25 bp, Homo sapien
tcccggcccgcgcggccggctcctc

SEQ ID NO: 4818284 - DNA, 25 bp, Homo sapien
ttggcctcgcggctccggcggccgt

SEQ ID NO: 4818285 - DNA, 25 bp, Homo sapien
cccggcccgcgcggccggctcctct

SEQ ID NO: 4818286 - DNA, 25 bp, Homo sapien
tcgcggctccggcggccgtcccctc

SEQ ID NO: 4818287 - DNA, 25 bp, Homo sapien
catggaagaagcgggcacgcagcca

SEQ ID NO: 4818288 - DNA, 25 bp, Homo sapien
gaggcccgcgggagccaccctcgaa

SEQ ID NO: 4818289 - DNA, 25 bp, Homo sapien
ggacggcatggaagaagcgggcacg

SEQ ID NO: 4818290 - DNA, 25 bp, Homo sapien
attttccggtgccccaggacggcat

SEQ ID NO: 4818291 - DNA, 25 bp, Homo sapien
ctgcattgctgtcctgcgacaccat

SEQ ID NO: 4818292 - DNA, 25 bp, Homo sapien
attcaggaagtagcagatgagctgc

SEQ ID NO: 4818293 - DNA, 25 bp, Homo sapien
ggtggtcaagacagaattaggcctc

SEQ ID NO: 4818294 - DNA, 25 bp, Homo sapien
gcattacttccagaatacccagggt

SEQ ID NO: 4818295 - DNA, 25 bp, Homo sapien
agaacacttgtttcacagtacggga

SEQ ID NO: 4818296 - DNA, 25 bp, Homo sapien
aggtcactggactggcacacgggct

SEQ ID NO: 4818297 - DNA, 25 bp, Homo sapien
gcaccgatgatgagctcaacacaag

SEQ ID NO: 4818298 - DNA, 25 bp, Homo sapien
tcaaatcggtactttaaatctaggc

SEQ ID NO: 4818299 - DNA, 25 bp, Homo sapien
cacacgggctcattttaggagactc

SEQ ID NO: 4818300 - DNA, 25 bp, Homo sapien
gacttaaagatgaagcgggagtaga

SEQ ID NO: 4818301 - DNA, 25 bp, Homo sapien
ctgccttgcggtttgacttaaagat

SEQ ID NO: 4818302 - DNA, 25 bp, Homo sapien
gatgaagcgggagtagacccggtgt

SEQ ID NO: 4818303 - DNA, 25 bp, Homo sapien
tgccttgcggtttgacttaaagatg

SEQ ID NO: 4818304 - DNA, 25 bp, Homo sapien
tctggcctggtgacgtctctggaca

SEQ ID NO: 4818305 - DNA, 25 bp, Homo sapien
ctctggcctggtgacgtctctggac

SEQ ID NO: 4818306 - DNA, 25 bp, Homo sapien
agtaggcgctcagtgggtgtgctct

SEQ ID NO: 4818307 - DNA, 25 bp, Homo sapien
ccatgaacacattgcaatcatcatt

SEQ ID NO: 4818308 - DNA, 25 bp, Homo sapien
catcatgtcacccatgaacacattg

SEQ ID NO: 4818309 - DNA, 25 bp, Homo sapien
tgtcacccatgaacacattgcaatc

SEQ ID NO: 4818310 - DNA, 25 bp, Homo sapien
tcacccatgaacacattgcaatcat

SEQ ID NO: 4818311 - DNA, 25 bp, Homo sapien
cccaagtccacctggctggggttgt

SEQ ID NO: 4818312 - DNA, 25 bp, Homo sapien
gtggaggaggccacatggcacggcc

SEQ ID NO: 4818313 - DNA, 25 bp, Homo sapien
gaggaggccacatggcacggccact

SEQ ID NO: 4818314 - DNA, 25 bp, Homo sapien
gaggccacatggcacggccactgtg

SEQ ID NO: 4818315 - DNA, 25 bp, Homo sapien
tcagagccgatttgtcaaacgggtt

SEQ ID NO: 4818316 - DNA, 25 bp, Homo sapien
caggcactattcatcagagccgatt

SEQ ID NO: 4818317 - DNA, 25 bp, Homo sapien
ctattcatcagagccgatttgtcaa

SEQ ID NO: 4818318 - DNA, 25 bp, Homo sapien
gatgctccgacacggcccaggcact

SEQ ID NO: 4818319 - DNA, 25 bp, Homo sapien
gggagccagcatggacggatggccc

SEQ ID NO: 4818320 - DNA, 25 bp, Homo sapien
ccagcatggacggatggcccgtcgt

SEQ ID NO: 4818321 - DNA, 25 bp, Homo sapien
tcaggctctgttgtcagggagccag

SEQ ID NO: 4818322 - DNA, 25 bp, Homo sapien
gcatggacggatggcccgtcgtagg

SEQ ID NO: 4818323 - DNA, 25 bp, Homo sapien
ccgaagcgatcgtatcagggcctga

SEQ ID NO: 4818324 - DNA, 25 bp, Homo sapien
tcaaaagctgcctcgatcaagcacc

SEQ ID NO: 4818325 - DNA, 25 bp, Homo sapien
ccctgtggccgcagctcaaaagctg

SEQ ID NO: 4818326 - DNA, 25 bp, Homo sapien
caagcacccgggacattccaatttc

SEQ ID NO: 4818327 - DNA, 25 bp, Homo sapien
gctggcaccctgtcattccattctt

SEQ ID NO: 4818328 - DNA, 25 bp, Homo sapien
agctcatcactagctggcaccctgt

SEQ ID NO: 4818329 - DNA, 25 bp, Homo sapien
ggaacaaagggagtctcgggccatg

SEQ ID NO: 4818330 - DNA, 25 bp, Homo sapien
atgctgcccgtaatcgtctccctga

SEQ ID NO: 4818331 - DNA, 25 bp, Homo sapien
ggatgtcagcgcacagccgctcatt

SEQ ID NO: 4818332 - DNA, 25 bp, Homo sapien
atgatcgcccggatgtcagcgcaca

SEQ ID NO: 4818333 - DNA, 25 bp, Homo sapien
agcgcacagccgctcatttgtaaag

SEQ ID NO: 4818334 - DNA, 25 bp, Homo sapien
ggggatctccatgatcgcccggatg

SEQ ID NO: 4818335 - DNA, 25 bp, Homo sapien
agccgggagaggacctcacgccgtt

SEQ ID NO: 4818336 - DNA, 25 bp, Homo sapien
gagaggacctcacgccgtttgtccc

SEQ ID NO: 4818337 - DNA, 25 bp, Homo sapien
tttgtcccttcatccctcgctgggc

SEQ ID NO: 4818338 - DNA, 25 bp, Homo sapien
cgtgacagccgggagaggacctcac

SEQ ID NO: 4818339 - DNA, 25 bp, Homo sapien
gcctggctgcccgtggacaacagtg

SEQ ID NO: 4818340 - DNA, 25 bp, Homo sapien
cctggctgcccgtggacaacagtgg

SEQ ID NO: 4818341 - DNA, 25 bp, Homo sapien
ctggctgcccgtggacaacagtggg

SEQ ID NO: 4818342 - DNA, 25 bp, Homo sapien
tgtctggctggaatcgccgcctggc

SEQ ID NO: 4818343 - DNA, 25 bp, Homo sapien
tctggctggaatcgccgcctggccc

SEQ ID NO: 4818344 - DNA, 25 bp, Homo sapien
atctgtctggctggaatcgccgcct

SEQ ID NO: 4818345 - DNA, 25 bp, Homo sapien
tctgtctggctggaatcgccgcctg

SEQ ID NO: 4818346 - DNA, 25 bp, Homo sapien
ttcgtgccgagttgcccgggtttgc

SEQ ID NO: 4818347 - DNA, 25 bp, Homo sapien
ctgtgttattggctcgtttttcatt

SEQ ID NO: 4818348 - DNA, 25 bp, Homo sapien
gagttgcccgggtttgctgtgttat

SEQ ID NO: 4818349 - DNA, 25 bp, Homo sapien
tgtgttattggctcgtttttcattc

SEQ ID NO: 4818350 - DNA, 25 bp, Homo sapien
cgttgccgtagctgtaatatgttat

SEQ ID NO: 4818351 - DNA, 25 bp, Homo sapien
gcacggagcggccattccataagca

SEQ ID NO: 4818352 - DNA, 25 bp, Homo sapien
tccataagcatcgttgccgtagctg

SEQ ID NO: 4818353 - DNA, 25 bp, Homo sapien
ttgcagagttctacggcgcggcacg

SEQ ID NO: 4818354 - DNA, 25 bp, Homo sapien
tgacatgaattgagtagcaggtgcg

SEQ ID NO: 4818355 - DNA, 25 bp, Homo sapien
tgcttggggtcccacggtcatgaca

SEQ ID NO: 4818356 - DNA, 25 bp, Homo sapien
aggctgaggcccgagtgaacatggg

SEQ ID NO: 4818357 - DNA, 25 bp, Homo sapien
agagaccggcattgcccacccagaa

SEQ ID NO: 4818358 - DNA, 25 bp, Homo sapien
tcacacaccagcttcttaggcccct

SEQ ID NO: 4818359 - DNA, 25 bp, Homo sapien
agtcacacaccagcttcttaggccc

SEQ ID NO: 4818360 - DNA, 25 bp, Homo sapien
acacaccagcttcttaggcccctct

SEQ ID NO: 4818361 - DNA, 25 bp, Homo sapien
cacaccagcttcttaggcccctctc

SEQ ID NO: 4818362 - DNA, 25 bp, Homo sapien
ttcatgtccagtgtaatggctgagg

SEQ ID NO: 4818363 - DNA, 25 bp, Homo sapien
tgtccagtgtaatggctgaggagtt

SEQ ID NO: 4818364 - DNA, 25 bp, Homo sapien
gtaatggctgaggagttgaccaccc

SEQ ID NO: 4818365 - DNA, 25 bp, Homo sapien
ccagtgtaatggctgaggagttgac

SEQ ID NO: 4818366 - DNA, 25 bp, Homo sapien
gtctagggtgctgtgcaagcactgt

SEQ ID NO: 4818367 - DNA, 25 bp, Homo sapien
tctagggtgctgtgcaagcactgtg

SEQ ID NO: 4818368 - DNA, 25 bp, Homo sapien
cacccagcgacggtaggtctagggt

SEQ ID NO: 4818369 - DNA, 25 bp, Homo sapien
tctgtggcacccagcgacggtaggt

SEQ ID NO: 4818370 - DNA, 25 bp, Homo sapien
ctgagggacggagggacagccagtc

SEQ ID NO: 4818371 - DNA, 25 bp, Homo sapien
gggacggagggacagccagtcctgt

SEQ ID NO: 4818372 - DNA, 25 bp, Homo sapien
agccagtcctgtcctgtgaacacct

SEQ ID NO: 4818373 - DNA, 25 bp, Homo sapien
cagtcctgtcctgtgaacacctggt

SEQ ID NO: 4818374 - DNA, 25 bp, Homo sapien
ccggctggaacaaggctctcgttgc

SEQ ID NO: 4818375 - DNA, 25 bp, Homo sapien
accggctggaacaaggctctcgttg

SEQ ID NO: 4818376 - DNA, 25 bp, Homo sapien
ccaccggctggaacaaggctctcgt

SEQ ID NO: 4818377 - DNA, 25 bp, Homo sapien
ccccaccggctggaacaaggctctc

SEQ ID NO: 4818378 - DNA, 25 bp, Homo sapien
ccctgctgatgccatagatgcgggc

SEQ ID NO: 4818379 - DNA, 25 bp, Homo sapien
gcccctgctgatgccatagatgcgg

SEQ ID NO: 4818380 - DNA, 25 bp, Homo sapien
cctgctgatgccatagatgcgggca

SEQ ID NO: 4818381 - DNA, 25 bp, Homo sapien
ctgctgatgccatagatgcgggcag

SEQ ID NO: 4818382 - DNA, 25 bp, Homo sapien
actcgccagatcgacagagggtgcc

SEQ ID NO: 4818383 - DNA, 25 bp, Homo sapien
aggccacccaacagctggcgacact

SEQ ID NO: 4818384 - DNA, 25 bp, Homo sapien
agagccactcgccagatcgacagag

SEQ ID NO: 4818385 - DNA, 25 bp, Homo sapien
ctgatctggcctcgggactggtccc

SEQ ID NO: 4818386 - DNA, 25 bp, Homo sapien
cccagtgcctggccgatccccaggg

SEQ ID NO: 4818387 - DNA, 25 bp, Homo sapien
ccagtgcctggccgatccccagggg

SEQ ID NO: 4818388 - DNA, 25 bp, Homo sapien
ggctgtatccgcactcaggagccct

SEQ ID NO: 4818389 - DNA, 25 bp, Homo sapien
ttctgccctcaaagcgtgctgctcg

SEQ ID NO: 4818390 - DNA, 25 bp, Homo sapien
cagccccggctgagaatgacgttaa

SEQ ID NO: 4818391 - DNA, 25 bp, Homo sapien
gtcctagaggagctaaggaccgccc

SEQ ID NO: 4818392 - DNA, 25 bp, Homo sapien
tcctccagagcccaactgtgtggac

SEQ ID NO: 4818393 - DNA, 25 bp, Homo sapien
ctccagagcccaactgtgtggacct

SEQ ID NO: 4818394 - DNA, 25 bp, Homo sapien
ctcagggtggatgcttcaggcagaa

SEQ ID NO: 4818395 - DNA, 25 bp, Homo sapien
agggtggatgcttcaggcagaacac

SEQ ID NO: 4818396 - DNA, 25 bp, Homo sapien
tgtggcatccccaggacatgctggg

SEQ ID NO: 4818397 - DNA, 25 bp, Homo sapien
cactgaggtggaggaaacccgtttg

SEQ ID NO: 4818398 - DNA, 25 bp, Homo sapien
ttcctaaccagtagagactgccggg

SEQ ID NO: 4818399 - DNA, 25 bp, Homo sapien
tcagaggctgttaggatggacctgc

SEQ ID NO: 4818400 - DNA, 25 bp, Homo sapien
ggcctgggtctcctgtccaccgctc

SEQ ID NO: 4818401 - DNA, 25 bp, Homo sapien
caccgctctggcccggtggcctggg

SEQ ID NO: 4818402 - DNA, 25 bp, Homo sapien
tgcctgccacgcatctgtctttgtt

SEQ ID NO: 4818403 - DNA, 25 bp, Homo sapien
gggcccctgcactgaacaacttggc

SEQ ID NO: 4818404 - DNA, 25 bp, Homo sapien
tcaggtcgggcacctgccttctccc

SEQ ID NO: 4818405 - DNA, 25 bp, Homo sapien
agccccactcaatcaggtcgggcac

SEQ ID NO: 4818406 - DNA, 25 bp, Homo sapien
tctgatgggagcaccgccgctggag

SEQ ID NO: 4818407 - DNA, 25 bp, Homo sapien
tcctggccgtacagcctggggaagt

SEQ ID NO: 4818408 - DNA, 25 bp, Homo sapien
tggggaagtgtcctcgctccctcgc

SEQ ID NO: 4818409 - DNA, 25 bp, Homo sapien
cttcctggccgtacagcctggggaa

SEQ ID NO: 4818410 - DNA, 25 bp, Homo sapien
cccttcctggccgtacagcctgggg

SEQ ID NO: 4818411 - DNA, 25 bp, Homo sapien
tctcccccggagactggtggcccag

SEQ ID NO: 4818412 - DNA, 25 bp, Homo sapien
tcacacgttgagcgctgacggcaca

SEQ ID NO: 4818413 - DNA, 25 bp, Homo sapien
gttgagcgctgacggcacacgcctg

SEQ ID NO: 4818414 - DNA, 25 bp, Homo sapien
ttctgcgccttcctcgccgtggtgg

SEQ ID NO: 4818415 - DNA, 25 bp, Homo sapien
tggctgtcgggtcccttacgtttca

SEQ ID NO: 4818416 - DNA, 25 bp, Homo sapien
tcaaggtagccaaaaattgagtggc

SEQ ID NO: 4818417 - DNA, 25 bp, Homo sapien
ggtagccaaaaattgagtggcgatc

SEQ ID NO: 4818418 - DNA, 25 bp, Homo sapien
tgtcaaggtagccaaaaattgagtg

SEQ ID NO: 4818419 - DNA, 25 bp, Homo sapien
caaaaattgagtggcgatctgaaga

SEQ ID NO: 4818420 - DNA, 25 bp, Homo sapien
tggcagggtgctcggtctcccgact

SEQ ID NO: 4818421 - DNA, 25 bp, Homo sapien
gggtacaagagcgagtactccgtcc

SEQ ID NO: 4818422 - DNA, 25 bp, Homo sapien
taggcttagcaattaaagaaccagg

SEQ ID NO: 4818423 - DNA, 25 bp, Homo sapien
ctccactgggcactgtctccaggcc

SEQ ID NO: 4818424 - DNA, 25 bp, Homo sapien
cggatagacagcgatgacttcaggc

SEQ ID NO: 4818425 - DNA, 25 bp, Homo sapien
cacggatagacagcgatgactttgc

SEQ ID NO: 4818426 - DNA, 25 bp, Homo sapien
cataaattgacgagagtcacagctc

SEQ ID NO: 4818427 - DNA, 25 bp, Homo sapien
gcacggatagacagcgatgacttcg

SEQ ID NO: 4818428 - DNA, 25 bp, Homo sapien
cacctgctgtcagctgtgcagggcc

SEQ ID NO: 4818429 - DNA, 25 bp, Homo sapien
tgcacctgctgtcagctgtgcaggg

SEQ ID NO: 4818430 - DNA, 25 bp, Homo sapien
gtgcagggcccctagcagccctcat

SEQ ID NO: 4818431 - DNA, 25 bp, Homo sapien
tgtgcacctgctgtcagctgtgcag

SEQ ID NO: 4818432 - DNA, 25 bp, Homo sapien
agggctcgcaatgcccattccacag

SEQ ID NO: 4818433 - DNA, 25 bp, Homo sapien
ggtgcactctctggccattttgctg

SEQ ID NO: 4818434 - DNA, 25 bp, Homo sapien
gctgccccattgctagggctcgcaa

SEQ ID NO: 4818435 - DNA, 25 bp, Homo sapien
ttccttctggaaatacggctcaggg

SEQ ID NO: 4818436 - DNA, 25 bp, Homo sapien
tggcagagcgggatgggccgtgggc

SEQ ID NO: 4818437 - DNA, 25 bp, Homo sapien
agatggcagagcgggatgggccgtg

SEQ ID NO: 4818438 - DNA, 25 bp, Homo sapien
gcagatggcagagcgggatgggccg

SEQ ID NO: 4818439 - DNA, 25 bp, Homo sapien
atggcagagcgggatgggccgtggg

SEQ ID NO: 4818440 - DNA, 25 bp, Homo sapien
caagccccaggcccccatgcctcgg

SEQ ID NO: 4818441 - DNA, 25 bp, Homo sapien
cccaggcccccatgcctcggggctc

SEQ ID NO: 4818442 - DNA, 25 bp, Homo sapien
tgcctcggggctccctgtccacata

SEQ ID NO: 4818443 - DNA, 25 bp, Homo sapien
atgcctcggggctccctgtccacat

SEQ ID NO: 4818444 - DNA, 25 bp, Homo sapien
cttctgatgggtgcccgtgtggtgc

SEQ ID NO: 4818445 - DNA, 25 bp, Homo sapien
cactgcttctgatgggtgcccgtgt

SEQ ID NO: 4818446 - DNA, 25 bp, Homo sapien
atgggtgcccgtgtggtgccagccc

SEQ ID NO: 4818447 - DNA, 25 bp, Homo sapien
tgatgggtgcccgtgtggtgccagc

SEQ ID NO: 4818448 - DNA, 25 bp, Homo sapien
cttgaacacccccaagagcgaaggc

SEQ ID NO: 4818449 - DNA, 25 bp, Homo sapien
ttgaacacccccaagagcgaaggcc

SEQ ID NO: 4818450 - DNA, 25 bp, Homo sapien
gaacacccccaagagcgaaggccat

SEQ ID NO: 4818451 - DNA, 25 bp, Homo sapien
tgaacacccccaagagcgaaggcca

SEQ ID NO: 4818452 - DNA, 25 bp, Homo sapien
ttccgggagcctcgatggagctcag

SEQ ID NO: 4818453 - DNA, 25 bp, Homo sapien
gtctacaagaccagtgagtgcccgg

SEQ ID NO: 4818454 - DNA, 25 bp, Homo sapien
catataggagccaccgccggtggtc

SEQ ID NO: 4818455 - DNA, 25 bp, Homo sapien
gccccagagcagctcatacttcatg

SEQ ID NO: 4818456 - DNA, 25 bp, Homo sapien
tcttggcggagttcccttttgagaa

SEQ ID NO: 4818457 - DNA, 25 bp, Homo sapien
aagcccggctaggaaaggtgcttgc

SEQ ID NO: 4818458 - DNA, 25 bp, Homo sapien
agccccaagagtgctgactccggtg

SEQ ID NO: 4818459 - DNA, 25 bp, Homo sapien
atcaccctgaccctcagagagtgga

SEQ ID NO: 4818460 - DNA, 25 bp, Homo sapien
agggcccagggtcacctgcatcctc

SEQ ID NO: 4818461 - DNA, 25 bp, Homo sapien
catgggctggtttcaggagctcagc

SEQ ID NO: 4818462 - DNA, 25 bp, Homo sapien
ccccatgggctggtttcaggagctc

SEQ ID NO: 4818463 - DNA, 25 bp, Homo sapien
tcctctgcggtttgcgttggtctgg

SEQ ID NO: 4818464 - DNA, 25 bp, Homo sapien
acaatagcccgagaccccttgaagg

SEQ ID NO: 4818465 - DNA, 25 bp, Homo sapien
tgcagggcgcgtggcagactggctt

SEQ ID NO: 4818466 - DNA, 25 bp, Homo sapien
cgacaatagcccgagaccccttgaa

SEQ ID NO: 4818467 - DNA, 25 bp, Homo sapien
tgcagcctctcgacaatagcccgag

SEQ ID NO: 4818468 - DNA, 25 bp, Homo sapien
tctggacctggctccgtgctagtga

SEQ ID NO: 4818469 - DNA, 25 bp, Homo sapien
aactcgctcatcatgaaaataagcc

SEQ ID NO: 4818470 - DNA, 25 bp, Homo sapien
cagcacggagcagaagatgcaggga

SEQ ID NO: 4818471 - DNA, 25 bp, Homo sapien
tccgtgctagtgaggagcaaactcg

SEQ ID NO: 4818472 - DNA, 25 bp, Homo sapien
ggtgcccatgctgttatgtgccgcc

SEQ ID NO: 4818473 - DNA, 25 bp, Homo sapien
tctcagtaggctgccctgcagtgtc

SEQ ID NO: 4818474 - DNA, 25 bp, Homo sapien
gccgccagtaggatgctgcattcag

SEQ ID NO: 4818475 - DNA, 25 bp, Homo sapien
atgctgttatgtgccgccagtagga

SEQ ID NO: 4818476 - DNA, 25 bp, Homo sapien
tggagcacttgggttcactggtgat

SEQ ID NO: 4818477 - DNA, 25 bp, Homo sapien
ctggagcacttgggttcactggtga

SEQ ID NO: 4818478 - DNA, 25 bp, Homo sapien
tgaggcaagctgtgttcaacgccat

SEQ ID NO: 4818479 - DNA, 25 bp, Homo sapien
agcacttgggttcactggtgatgga

SEQ ID NO: 4818480 - DNA, 25 bp, Homo sapien
tcacagactggtggacggctgctgc

SEQ ID NO: 4818481 - DNA, 25 bp, Homo sapien
cacagactggtggacggctgctgca

SEQ ID NO: 4818482 - DNA, 25 bp, Homo sapien
acccgaaaggcgatccaacagccca

SEQ ID NO: 4818483 - DNA, 25 bp, Homo sapien
tcacccgaaaggcgatccaacagcc

SEQ ID NO: 4818484 - DNA, 25 bp, Homo sapien
cacccgaaaggcgatccaacagccc

SEQ ID NO: 4818485 - DNA, 25 bp, Homo sapien
aatggcagagaggagaatgatgtta

SEQ ID NO: 4818486 - DNA, 25 bp, Homo sapien
ctgctaatggcagagaggagaatga

SEQ ID NO: 4818487 - DNA, 25 bp, Homo sapien
ctaatggcagagaggagaatgatgt

SEQ ID NO: 4818488 - DNA, 25 bp, Homo sapien
tggcagagaggagaatgatgttatt

SEQ ID NO: 4818489 - DNA, 25 bp, Homo sapien
ctggacagggaaccctaggtctgtc

SEQ ID NO: 4818490 - DNA, 25 bp, Homo sapien
taggtctgtcacaaacagcctctca

SEQ ID NO: 4818491 - DNA, 25 bp, Homo sapien
tttggggcacaactaagctggacag

SEQ ID NO: 4818492 - DNA, 25 bp, Homo sapien
gctcgaggatttgcacaaggaccat

SEQ ID NO: 4818493 - DNA, 25 bp, Homo sapien
ctgaagatagtggacatggcagagc

SEQ ID NO: 4818494 - DNA, 25 bp, Homo sapien
ggcagagctgctgtcactgtcacct

SEQ ID NO: 4818495 - DNA, 25 bp, Homo sapien
agagctgctgtcactgtcaccttca

SEQ ID NO: 4818496 - DNA, 25 bp, Homo sapien
tgaagatagtggacatggcagagct

SEQ ID NO: 4818497 - DNA, 25 bp, Homo sapien
gcataggctcacaggcaccgtcgtc

SEQ ID NO: 4818498 - DNA, 25 bp, Homo sapien
tcgttcagcttcgtccaccgtagct

SEQ ID NO: 4818499 - DNA, 25 bp, Homo sapien
gagtccagcccattgcataggctca

SEQ ID NO: 4818500 - DNA, 25 bp, Homo sapien
catggagcatgaccctcgttcagct

SEQ ID NO: 4818501 - DNA, 25 bp, Homo sapien
tgggtggtgtgtttgcacacttccg

SEQ ID NO: 4818502 - DNA, 25 bp, Homo sapien
ggagtgtgcgcgtactcatgagtac

SEQ ID NO: 4818503 - DNA, 25 bp, Homo sapien
acacttccgggcttgtacaccacac

SEQ ID NO: 4818504 - DNA, 25 bp, Homo sapien
tcatgagtactgctctgggtggtgt

SEQ ID NO: 4818505 - DNA, 25 bp, Homo sapien
caccccactgggccgaggcctgcac

SEQ ID NO: 4818506 - DNA, 25 bp, Homo sapien
ctcccccagggaaagaccagagaca

SEQ ID NO: 4818507 - DNA, 25 bp, Homo sapien
atcaccccactgggccgaggcctgc

SEQ ID NO: 4818508 - DNA, 25 bp, Homo sapien
tcaccccactgggccgaggcctgca

SEQ ID NO: 4818509 - DNA, 25 bp, Homo sapien
tgctctgtatgagcggcccaggctg

SEQ ID NO: 4818510 - DNA, 25 bp, Homo sapien
ccgtgtccacggcgtggcggagctt

SEQ ID NO: 4818511 - DNA, 25 bp, Homo sapien
gtgtgtgctctgtatgagcggccca

SEQ ID NO: 4818512 - DNA, 25 bp, Homo sapien
atggtgtgtgctctgtatgagcggc

SEQ ID NO: 4818513 - DNA, 25 bp, Homo sapien
tctgtaggctgcctcattccggcca

SEQ ID NO: 4818514 - DNA, 25 bp, Homo sapien
ggctccacgtctccgtctgtaggct

SEQ ID NO: 4818515 - DNA, 25 bp, Homo sapien
tccggccaccaggactccaatagtt

SEQ ID NO: 4818516 - DNA, 25 bp, Homo sapien
tccaatagttacatctggagtgccc

SEQ ID NO: 4818517 - DNA, 25 bp, Homo sapien
gactatccttgtggttacctttgtc

SEQ ID NO: 4818518 - DNA, 25 bp, Homo sapien
tgcaggtcgttccaccgccttgtcc

SEQ ID NO: 4818519 - DNA, 25 bp, Homo sapien
gacgcagccgtaaggggctggtgga

SEQ ID NO: 4818520 - DNA, 25 bp, Homo sapien
ctggtggagaggaaccctggcctca

SEQ ID NO: 4818521 - DNA, 25 bp, Homo sapien
ctgacgcagccgtaaggggctggtg

SEQ ID NO: 4818522 - DNA, 25 bp, Homo sapien
tggagaggaaccctggcctcagccc

SEQ ID NO: 4818523 - DNA, 25 bp, Homo sapien
gtctgttcacgcacacggaaacgca

SEQ ID NO: 4818524 - DNA, 25 bp, Homo sapien
acacaagccgccttcacgtccaaat

SEQ ID NO: 4818525 - DNA, 25 bp, Homo sapien
tctctgcttccgtagactctgttgg

SEQ ID NO: 4818526 - DNA, 25 bp, Homo sapien
cggaaacgcacacacaagccgcctt

SEQ ID NO: 4818527 - DNA, 25 bp, Homo sapien
gggctgtctcttgctccgtctgggc

SEQ ID NO: 4818528 - DNA, 25 bp, Homo sapien
cccgggccacctgtgaggaatgtga

SEQ ID NO: 4818529 - DNA, 25 bp, Homo sapien
tcctggtgaacgtggagggcttcat

SEQ ID NO: 4818530 - DNA, 25 bp, Homo sapien
ggctgcgctttgcatccggaacaga

SEQ ID NO: 4818531 - DNA, 25 bp, Homo sapien
caatgccgacgccgccccacatccc

SEQ ID NO: 4818532 - DNA, 25 bp, Homo sapien
ctgaggcggacgatggtgaagactt

SEQ ID NO: 4818533 - DNA, 25 bp, Homo sapien
cgatggtgaagactttgggggcctt

SEQ ID NO: 4818534 - DNA, 25 bp, Homo sapien
gaggcggacgatggtgaagactttg

SEQ ID NO: 4818535 - DNA, 25 bp, Homo sapien
gacgatggtgaagactttgggggcc

SEQ ID NO: 4818536 - DNA, 25 bp, Homo sapien
tcgtggccacttttgtgatgcctcg

SEQ ID NO: 4818537 - DNA, 25 bp, Homo sapien
ccacttttgtgatgcctcgtagtcc

SEQ ID NO: 4818538 - DNA, 25 bp, Homo sapien
ttttgtgatgcctcgtagtcctcag

SEQ ID NO: 4818539 - DNA, 25 bp, Homo sapien
cctctcgtggccacttttgtgatgc

SEQ ID NO: 4818540 - DNA, 25 bp, Homo sapien
gctcgttaggaagaaatcctaaatc

SEQ ID NO: 4818541 - DNA, 25 bp, Homo sapien
ctgagagctcgttaggaagaaatcc

SEQ ID NO: 4818542 - DNA, 25 bp, Homo sapien
ccaggtgactgactgagagctcgtt

SEQ ID NO: 4818543 - DNA, 25 bp, Homo sapien
gactgactgagagctcgttaggaag

SEQ ID NO: 4818544 - DNA, 25 bp, Homo sapien
cagctcccctctatctccaccggcc

SEQ ID NO: 4818545 - DNA, 25 bp, Homo sapien
tccagctcccctctatctccaccgg

SEQ ID NO: 4818546 - DNA, 25 bp, Homo sapien
ccagctcccctctatctccaccggc

SEQ ID NO: 4818547 - DNA, 25 bp, Homo sapien
ggtcccctctatctccaccggcctc

SEQ ID NO: 4818548 - DNA, 25 bp, Homo sapien
cagtccccttggaggtagccacagt

SEQ ID NO: 4818549 - DNA, 25 bp, Homo sapien
cacatcgatgagagtgtccacctga

SEQ ID NO: 4818550 - DNA, 25 bp, Homo sapien
ttggcaggtacacgggacatccgac

SEQ ID NO: 4818551 - DNA, 25 bp, Homo sapien
gatattcaggctcgttccaagtcgg

SEQ ID NO: 4818552 - DNA, 25 bp, Homo sapien
agctggctgtctggccaggctgtct

SEQ ID NO: 4818553 - DNA, 25 bp, Homo sapien
tggttctgcacttcagcacggcccc

SEQ ID NO: 4818554 - DNA, 25 bp, Homo sapien
ttcagcacggcccccagcagtgtgg

SEQ ID NO: 4818555 - DNA, 25 bp, Homo sapien
tctggccaggctgtctgtccagcac

SEQ ID NO: 4818556 - DNA, 25 bp, Homo sapien
ttgcctgctggaccgaaatccagct

SEQ ID NO: 4818557 - DNA, 25 bp, Homo sapien
ctttgcctgctggaccgaaatccag

SEQ ID NO: 4818558 - DNA, 25 bp, Homo sapien
cctgctggaccgaaatccagctgag

SEQ ID NO: 4818559 - DNA, 25 bp, Homo sapien
gcctgctggaccgaaatccagctga

SEQ ID NO: 4818560 - DNA, 25 bp, Homo sapien
aaagccattcagagtagctcaggct

SEQ ID NO: 4818561 - DNA, 25 bp, Homo sapien
aagccattcagagtagctcaggctg

SEQ ID NO: 4818562 - DNA, 25 bp, Homo sapien
gtgggtgtgtgtagcagctccccag

SEQ ID NO: 4818563 - DNA, 25 bp, Homo sapien
agtgacacagcagcgcgaagcaagt

SEQ ID NO: 4818564 - DNA, 25 bp, Homo sapien
ggctctgcattgctcttggtcctct

SEQ ID NO: 4818565 - DNA, 25 bp, Homo sapien
gtggtcttgggcatccgagtcttgc

SEQ ID NO: 4818566 - DNA, 25 bp, Homo sapien
agatcagggacaagtctatcagtac

SEQ ID NO: 4818567 - DNA, 25 bp, Homo sapien
tctatcagtaccaggacagtctgga

SEQ ID NO: 4818568 - DNA, 25 bp, Homo sapien
tatcagtaccaggacagtctggaag

SEQ ID NO: 4818569 - DNA, 25 bp, Homo sapien
gtctatcagtaccaggacagtctgg

SEQ ID NO: 4818570 - DNA, 25 bp, Homo sapien
cctggccacgggcaagcttgccttt

SEQ ID NO: 4818571 - DNA, 25 bp, Homo sapien
tgcctttcgcacaactgctggactc

SEQ ID NO: 4818572 - DNA, 25 bp, Homo sapien
cacgggcaagcttgcctttcgcaca

SEQ ID NO: 4818573 - DNA, 25 bp, Homo sapien
ggcaagcttgcctttcgcacaactg

SEQ ID NO: 4818574 - DNA, 25 bp, Homo sapien
ccgcagaggccacatagatcatatt

SEQ ID NO: 4818575 - DNA, 25 bp, Homo sapien
tgccatctcctcgccgccgcagagg

SEQ ID NO: 4818576 - DNA, 25 bp, Homo sapien
ttacggcccgtcaataaccgctgcc

SEQ ID NO: 4818577 - DNA, 25 bp, Homo sapien
acggcccgtcaataaccgctgccat

SEQ ID NO: 4818578 - DNA, 25 bp, Homo sapien
ggcaccggctgctttggctggccga

SEQ ID NO: 4818579 - DNA, 25 bp, Homo sapien
gcaccggctgctttggctggccgac

SEQ ID NO: 4818580 - DNA, 25 bp, Homo sapien
ctggcaccggctgctttggctggcc

SEQ ID NO: 4818581 - DNA, 25 bp, Homo sapien
tggcaccggctgctttggctggccg

SEQ ID NO: 4818582 - DNA, 25 bp, Homo sapien
tttggctcacgccaccattcagctc

SEQ ID NO: 4818583 - DNA, 25 bp, Homo sapien
gaactctttggctcacgccaccatt

SEQ ID NO: 4818584 - DNA, 25 bp, Homo sapien
ctgaactctttggctcacgccacca

SEQ ID NO: 4818585 - DNA, 25 bp, Homo sapien
tggctcacgccaccattcagctccc

SEQ ID NO: 4818586 - DNA, 25 bp, Homo sapien
cagggcagacgctgtcagtggtgac

SEQ ID NO: 4818587 - DNA, 25 bp, Homo sapien
gccagctgactgctaccagggcaga

SEQ ID NO: 4818588 - DNA, 25 bp, Homo sapien
gctgactgctaccagggcagacgct

SEQ ID NO: 4818589 - DNA, 25 bp, Homo sapien
cagctgactgctaccagggcagacg

SEQ ID NO: 4818590 - DNA, 25 bp, Homo sapien
gtgggctcgtgggtctctccgtggg

SEQ ID NO: 4818591 - DNA, 25 bp, Homo sapien
tgtcctctgccgttggggcacatcg

SEQ ID NO: 4818592 - DNA, 25 bp, Homo sapien
tgcgaggtatgggtgccgcggccat

SEQ ID NO: 4818593 - DNA, 25 bp, Homo sapien
tccccggacgaggagcttgtcctct

SEQ ID NO: 4818594 - DNA, 25 bp, Homo sapien
ttgggtgtgtgtccgcccaggaaac

SEQ ID NO: 4818595 - DNA, 25 bp, Homo sapien
cagaggcgcgtagggtcagtttccc

SEQ ID NO: 4818596 - DNA, 25 bp, Homo sapien
tatgaacagaacgtcagacctggga

SEQ ID NO: 4818597 - DNA, 25 bp, Homo sapien
ccaggaaacagactgggaccctgtt

SEQ ID NO: 4818598 - DNA, 25 bp, Homo sapien
ggatcccagtcggtgtccaccgagc

SEQ ID NO: 4818599 - DNA, 25 bp, Homo sapien
agtcggtgtccaccgagccgctcag

SEQ ID NO: 4818600 - DNA, 25 bp, Homo sapien
agggcagggatgagtgcagcgtcca

SEQ ID NO: 4818601 - DNA, 25 bp, Homo sapien
ccaccgagccgctcagtgagggcag

SEQ ID NO: 4818602 - DNA, 25 bp, Homo sapien
ccatctcccccgtggctgtgtggga

SEQ ID NO: 4818603 - DNA, 25 bp, Homo sapien
gaaagggtgcctgcaggatttgctg

SEQ ID NO: 4818604 - DNA, 25 bp, Homo sapien
ggaggtcgctgtcagtggtctttgt

SEQ ID NO: 4818605 - DNA, 25 bp, Homo sapien
ctgggaaagggtgcctgcaggattt

SEQ ID NO: 4818606 - DNA, 25 bp, Homo sapien
tgggcgggtggtcaggccacctggg

SEQ ID NO: 4818607 - DNA, 25 bp, Homo sapien
tgtcccattgctgggcgggtggtca

SEQ ID NO: 4818608 - DNA, 25 bp, Homo sapien
gtgtcccattgctgggcgggtggtc

SEQ ID NO: 4818609 - DNA, 25 bp, Homo sapien
tgtggaggtgtcacagagacaagcc

SEQ ID NO: 4818610 - DNA, 25 bp, Homo sapien
ttttctccggcacttgactggcggg

SEQ ID NO: 4818611 - DNA, 25 bp, Homo sapien
ggacactgaaccctgggtgaggtct

SEQ ID NO: 4818612 - DNA, 25 bp, Homo sapien
gagacaagcccacttagtggatggg

SEQ ID NO: 4818613 - DNA, 25 bp, Homo sapien
gggcagcactgtctgcagcaaattc

SEQ ID NO: 4818614 - DNA, 25 bp, Homo sapien
cagggcagcactgtctgcagcaaat

SEQ ID NO: 4818615 - DNA, 25 bp, Homo sapien
accagggcagcactgtctgcagcaa

SEQ ID NO: 4818616 - DNA, 25 bp, Homo sapien
ccaccagggcagcactgtctgcagc

SEQ ID NO: 4818617 - DNA, 25 bp, Homo sapien
ttgtccacacgtggcttagggagcg

SEQ ID NO: 4818618 - DNA, 25 bp, Homo sapien
acacgtggcttagggagcgcccgct

SEQ ID NO: 4818619 - DNA, 25 bp, Homo sapien
tgggcttgtccacacgtggcttagg

SEQ ID NO: 4818620 - DNA, 25 bp, Homo sapien
gtccacacgtggcttagggagcgcc

SEQ ID NO: 4818621 - DNA, 25 bp, Homo sapien
ggtgatgggtgtcggcgcagactgc

SEQ ID NO: 4818622 - DNA, 25 bp, Homo sapien
tgtcggcgcagactgctgccgtgcg

SEQ ID NO: 4818623 - DNA, 25 bp, Homo sapien
gccatagtaatttccagctgggcct

SEQ ID NO: 4818624 - DNA, 25 bp, Homo sapien
tctgttggccctctaagccatagta

SEQ ID NO: 4818625 - DNA, 25 bp, Homo sapien
ggccaggccgtgtgtaaatcctcca

SEQ ID NO: 4818626 - DNA, 25 bp, Homo sapien
gaccaatttagcttaagtgtccaca

SEQ ID NO: 4818627 - DNA, 25 bp, Homo sapien
tctaagtatcctgtaattgaccaat

SEQ ID NO: 4818628 - DNA, 25 bp, Homo sapien
ggttactgattcaacaggcttcctg

SEQ ID NO: 4818629 - DNA, 25 bp, Homo sapien
agagcctgcattcagctcccgctgg

SEQ ID NO: 4818630 - DNA, 25 bp, Homo sapien
ttcccttgcatcagacagcagtgcg

SEQ ID NO: 4818631 - DNA, 25 bp, Homo sapien
cagagactcttggatgtcctcggag

SEQ ID NO: 4818632 - DNA, 25 bp, Homo sapien
ttgcgtcgtcgaaggtttccagggc

SEQ ID NO: 4818633 - DNA, 25 bp, Homo sapien
cagacgtagaatgcaaaacttgaac

SEQ ID NO: 4818634 - DNA, 25 bp, Homo sapien
tggggcggagtgagagcacagatgg

SEQ ID NO: 4818635 - DNA, 25 bp, Homo sapien
ttggggcggagtgagagcacagatg

SEQ ID NO: 4818636 - DNA, 25 bp, Homo sapien
cttggggcggagtgagagcacagat

SEQ ID NO: 4818637 - DNA, 25 bp, Homo sapien
ggtggcagagctcctctctttctgg

SEQ ID NO: 4818638 - DNA, 25 bp, Homo sapien
ttcccgccctccatggggagcacca

SEQ ID NO: 4818639 - DNA, 25 bp, Homo sapien
gggcggctggcctcttcccgccctc

SEQ ID NO: 4818640 - DNA, 25 bp, Homo sapien
tggtggcagagctcctctctttctg

SEQ ID NO: 4818641 - DNA, 25 bp, Homo sapien
gtgtgtgactgtttgttgccacccc

SEQ ID NO: 4818642 - DNA, 25 bp, Homo sapien
gtgactgtttgttgccacccctcct

SEQ ID NO: 4818643 - DNA, 25 bp, Homo sapien
ttggtgtgtgactgtttgttgccac

SEQ ID NO: 4818644 - DNA, 25 bp, Homo sapien
gaatgtcttggtgtgtgactgtttg

SEQ ID NO: 4818645 - DNA, 25 bp, Homo sapien
tggtagtgatgggacgcagcctctg

SEQ ID NO: 4818646 - DNA, 25 bp, Homo sapien
ttaggttccctcgacgctctatggg

SEQ ID NO: 4818647 - DNA, 25 bp, Homo sapien
tgtctgtgtgctgccttccgtagga

SEQ ID NO: 4818648 - DNA, 25 bp, Homo sapien
ccactctgaccggtgtctgtctgtg

SEQ ID NO: 4818649 - DNA, 25 bp, Homo sapien
acgaggcccagtgctcgagctgcag

SEQ ID NO: 4818650 - DNA, 25 bp, Homo sapien
ccagtgctcgagctgcagtgtggat

SEQ ID NO: 4818651 - DNA, 25 bp, Homo sapien
ggacagcggccagaatcacgaggcc

SEQ ID NO: 4818652 - DNA, 25 bp, Homo sapien
gcggccagaatcacgaggcccagtg

SEQ ID NO: 4818653 - DNA, 25 bp, Homo sapien
tcacatgtctggcctggctgcaccc

SEQ ID NO: 4818654 - DNA, 25 bp, Homo sapien
cacatgtctggcctggctgcaccca

SEQ ID NO: 4818655 - DNA, 25 bp, Homo sapien
acatgtctggcctggctgcacccac

SEQ ID NO: 4818656 - DNA, 25 bp, Homo sapien
ctgctggtagccccggcagaggctg

SEQ ID NO: 4818657 - DNA, 25 bp, Homo sapien
cctgcctccattctccataggaact

SEQ ID NO: 4818658 - DNA, 25 bp, Homo sapien
tgcctccattctccataggaacttg

SEQ ID NO: 4818659 - DNA, 25 bp, Homo sapien
ggagctgctggtagccccggcagag

SEQ ID NO: 4818660 - DNA, 25 bp, Homo sapien
ctgccagtggctggccgttcccggg

SEQ ID NO: 4818661 - DNA, 25 bp, Homo sapien
ctcgttaatcttcttgaccaggacc

SEQ ID NO: 4818662 - DNA, 25 bp, Homo sapien
gggctctcgttaatcttcttgacca

SEQ ID NO: 4818663 - DNA, 25 bp, Homo sapien
tgttgggggctctcgttaatcttct

SEQ ID NO: 4818664 - DNA, 25 bp, Homo sapien
cagcgcttcactgctcccatcttac

SEQ ID NO: 4818665 - DNA, 25 bp, Homo sapien
gggggcagcttgagaggcactgctt

SEQ ID NO: 4818666 - DNA, 25 bp, Homo sapien
gtggggggcagcttgagaggcactg

SEQ ID NO: 4818667 - DNA, 25 bp, Homo sapien
gggcagcttgagaggcactgcttcc

SEQ ID NO: 4818668 - DNA, 25 bp, Homo sapien
gaggcactgcttccaggcaccacat

SEQ ID NO: 4818669 - DNA, 25 bp, Homo sapien
tttctagggacatgaggcaccaagg

SEQ ID NO: 4818670 - DNA, 25 bp, Homo sapien
cttggaacattttggcggcaggacc

SEQ ID NO: 4818671 - DNA, 25 bp, Homo sapien
tgtagcccagttttgtcccgaggtc

SEQ ID NO: 4818672 - DNA, 25 bp, Homo sapien
tgaccatgtggtttgggcctgcaca

SEQ ID NO: 4818673 - DNA, 25 bp, Homo sapien
ggcctcggagagatttatggaggcc

SEQ ID NO: 4818674 - DNA, 25 bp, Homo sapien
tgtgtgttgggtcagatgggtgctc

SEQ ID NO: 4818675 - DNA, 25 bp, Homo sapien
agctgcggctctggcggggcgtggg

SEQ ID NO: 4818676 - DNA, 25 bp, Homo sapien
catgtggcatatgtgtgttgggacc

SEQ ID NO: 4818677 - DNA, 25 bp, Homo sapien
gcctgcatgggtcatggtgctggag

SEQ ID NO: 4818678 - DNA, 25 bp, Homo sapien
ggagggagcgaggctgcacaggctg

SEQ ID NO: 4818679 - DNA, 25 bp, Homo sapien
ttgcctgcatgggtcatggtgctgg

SEQ ID NO: 4818680 - DNA, 25 bp, Homo sapien
ggggagggagcgaggctgcacaggc

SEQ ID NO: 4818681 - DNA, 25 bp, Homo sapien
aaacagcaaattgagctctcccggc

SEQ ID NO: 4818682 - DNA, 25 bp, Homo sapien
tgttttcttcggtggatttcctgga

SEQ ID NO: 4818683 - DNA, 25 bp, Homo sapien
tgggatctctgatggcccatggttg

SEQ ID NO: 4818684 - DNA, 25 bp, Homo sapien
tcttcggtggatttcctggagtcct

SEQ ID NO: 4818685 - DNA, 25 bp, Homo sapien
acgagtccacgagcccctgtacctc

SEQ ID NO: 4818686 - DNA, 25 bp, Homo sapien
tttcaaaggcgtgttcattgcccag

SEQ ID NO: 4818687 - DNA, 25 bp, Homo sapien
gccccacgagtccacgagcccctgt

SEQ ID NO: 4818688 - DNA, 25 bp, Homo sapien
cttccacggccccacgagtccacga

SEQ ID NO: 4818689 - DNA, 25 bp, Homo sapien
tcctcctgctttccccagggtggca

SEQ ID NO: 4818690 - DNA, 25 bp, Homo sapien
gaggacgttggcagcttttctgcct

SEQ ID NO: 4818691 - DNA, 25 bp, Homo sapien
ctagcggggaggacgttggcagctt

SEQ ID NO: 4818692 - DNA, 25 bp, Homo sapien
gggaggacgttggcagcttttctgc

SEQ ID NO: 4818693 - DNA, 25 bp, Homo sapien
cggtgagctcggacagcctggctgc

SEQ ID NO: 4818694 - DNA, 25 bp, Homo sapien
ccagcagccgtactcatccacgagc

SEQ ID NO: 4818695 - DNA, 25 bp, Homo sapien
cacgagccctgctggcggtgagctc

SEQ ID NO: 4818696 - DNA, 25 bp, Homo sapien
gctgcatttggggaacgtgtcccca

SEQ ID NO: 4818697 - DNA, 25 bp, Homo sapien
ggtgccaggtgtatgagaagtacct

SEQ ID NO: 4818698 - DNA, 25 bp, Homo sapien
tctgtgtctctttgcgctccccggc

SEQ ID NO: 4818699 - DNA, 25 bp, Homo sapien
tacctagtgtgcctgggcccggcat

SEQ ID NO: 4818700 - DNA, 25 bp, Homo sapien
gtgtatgagaagtacctagtgtgcc

SEQ ID NO: 4818701 - DNA, 25 bp, Homo sapien
agtctgcatttttcggaaagctccg

SEQ ID NO: 4818702 - DNA, 25 bp, Homo sapien
gctccgcaggtaccctctcagtggg

SEQ ID NO: 4818703 - DNA, 25 bp, Homo sapien
ctgccctggagtctgcatttttcgg

SEQ ID NO: 4818704 - DNA, 25 bp, Homo sapien
catttttcggaaagctccgcaggta

SEQ ID NO: 4818705 - DNA, 25 bp, Homo sapien
caccagggctttcggggtatataga

SEQ ID NO: 4818706 - DNA, 25 bp, Homo sapien
tgcccaccagggctttcggggtata

SEQ ID NO: 4818707 - DNA, 25 bp, Homo sapien
tgggctggggattgcatgctggccg

SEQ ID NO: 4818708 - DNA, 25 bp, Homo sapien
ttcggggtatatagagcagcacggt

SEQ ID NO: 4818709 - DNA, 25 bp, Homo sapien
gcaggggattgcacagagctgattc

SEQ ID NO: 4818710 - DNA, 25 bp, Homo sapien
ggggattgcacagagctgattcgca

SEQ ID NO: 4818711 - DNA, 25 bp, Homo sapien
caggggattgcacagagctgattcg

SEQ ID NO: 4818712 - DNA, 25 bp, Homo sapien
gggattgcacagagctgattcgcac

SEQ ID NO: 4818713 - DNA, 25 bp, Homo sapien
gaagtcaggcgctttgtgggcctca

SEQ ID NO: 4818714 - DNA, 25 bp, Homo sapien
ccctctgctgtagccgcgtgaagtc

SEQ ID NO: 4818715 - DNA, 25 bp, Homo sapien
gtagccgcgtgaagtcaggcgcttt

SEQ ID NO: 4818716 - DNA, 25 bp, Homo sapien
agccgcgtgaagtcaggcgctttgt

SEQ ID NO: 4818717 - DNA, 25 bp, Homo sapien
gttggtgaggtccgtatgtctacga

SEQ ID NO: 4818718 - DNA, 25 bp, Homo sapien
tggtgaggtccgtatgtctacgagg

SEQ ID NO: 4818719 - DNA, 25 bp, Homo sapien
ggtgaggtccgtatgtctacgagga

SEQ ID NO: 4818720 - DNA, 25 bp, Homo sapien
ttggtgaggtccgtatgtctacgag

SEQ ID NO: 4818721 - DNA, 25 bp, Homo sapien
gcaccatctccacgggaggccgtgg

SEQ ID NO: 4818722 - DNA, 25 bp, Homo sapien
tgtgctccccgacatccctgctgct

SEQ ID NO: 4818723 - DNA, 25 bp, Homo sapien
cagcaccatctccacgggaggccgt

SEQ ID NO: 4818724 - DNA, 25 bp, Homo sapien
ggccgcttccaagagggctgctgct

SEQ ID NO: 4818725 - DNA, 25 bp, Homo sapien
tggctgtgagatgggtgtgctgctg

SEQ ID NO: 4818726 - DNA, 25 bp, Homo sapien
tgggcttcgaaagctttggaggccc

SEQ ID NO: 4818727 - DNA, 25 bp, Homo sapien
gctctgaagtgggcttcgaaagctt

SEQ ID NO: 4818728 - DNA, 25 bp, Homo sapien
ctgtgagatgggtgtgctgctgccg

SEQ ID NO: 4818729 - DNA, 25 bp, Homo sapien
cataagtcatcgcattattcctggg

SEQ ID NO: 4818730 - DNA, 25 bp, Homo sapien
gaacatcaattccataagtcatcgc

SEQ ID NO: 4818731 - DNA, 25 bp, Homo sapien
cctcacctcggtgtgaacatcaatt

SEQ ID NO: 4818732 - DNA, 25 bp, Homo sapien
accgggtgcgccctcacctcggtgt

SEQ ID NO: 4818733 - DNA, 25 bp, Homo sapien
gaaagtggcgccctttggctgctca

SEQ ID NO: 4818734 - DNA, 25 bp, Homo sapien
tcagcctggcgttgcatgggggaca

SEQ ID NO: 4818735 - DNA, 25 bp, Homo sapien
gtctgcgggaggctcttttgaaagt

SEQ ID NO: 4818736 - DNA, 25 bp, Homo sapien
ccttcgtgtattgggggtgaatcca

SEQ ID NO: 4818737 - DNA, 25 bp, Homo sapien
gccgaccctgtcgtttctctttgtc

SEQ ID NO: 4818738 - DNA, 25 bp, Homo sapien
gtgccgaccctgtcgtttctctttg

SEQ ID NO: 4818739 - DNA, 25 bp, Homo sapien
ctggtgccgaccctgtcgtttctct

SEQ ID NO: 4818740 - DNA, 25 bp, Homo sapien
ttctctttgtctcccggctgggtgg

SEQ ID NO: 4818741 - DNA, 25 bp, Homo sapien
ccctgcagaccctctgggccacttc

SEQ ID NO: 4818742 - DNA, 25 bp, Homo sapien
ggcccctgcagaccctctgggccac

SEQ ID NO: 4818743 - DNA, 25 bp, Homo sapien
ctgcccttctggccttggcccctgc

SEQ ID NO: 4818744 - DNA, 25 bp, Homo sapien
tgcccttctggccttggcccctgca

SEQ ID NO: 4818745 - DNA, 25 bp, Homo sapien
ccatctcccggagttctcttgaggg

SEQ ID NO: 4818746 - DNA, 25 bp, Homo sapien
ggagggctgatggcacgctgggccc

SEQ ID NO: 4818747 - DNA, 25 bp, Homo sapien
tgggccatctcccggagttctcttg

SEQ ID NO: 4818748 - DNA, 25 bp, Homo sapien
aaagcccctcgtgggccatctcccg

SEQ ID NO: 4818749 - DNA, 25 bp, Homo sapien
gatagaggttgaggatcacagcccc

SEQ ID NO: 4818750 - DNA, 25 bp, Homo sapien
tcctggtgtgagacccggtgttctt

SEQ ID NO: 4818751 - DNA, 25 bp, Homo sapien
taacgctcgtggtgtgtcctggtgt

SEQ ID NO: 4818752 - DNA, 25 bp, Homo sapien
agcctgcaggcgctcgagctgaaag

SEQ ID NO: 4818753 - DNA, 25 bp, Homo sapien
tctggaggtgccagcttgcagggcc

SEQ ID NO: 4818754 - DNA, 25 bp, Homo sapien
tgttattaaacaccacagctcgcgc

SEQ ID NO: 4818755 - DNA, 25 bp, Homo sapien
cagctgatggtatcggccttgccgg

SEQ ID NO: 4818756 - DNA, 25 bp, Homo sapien
gccttgccggagatgctcggccgat

SEQ ID NO: 4818757 - DNA, 25 bp, Homo sapien
tggtcttctgatgtcccgggtcgga

SEQ ID NO: 4818758 - DNA, 25 bp, Homo sapien
tgagcagggtgtactcagagcctcg

SEQ ID NO: 4818759 - DNA, 25 bp, Homo sapien
gaaggatgactgtctgtcccatggc

SEQ ID NO: 4818760 - DNA, 25 bp, Homo sapien
tgtgtttgcacacgtgggagctcgc

SEQ ID NO: 4818761 - DNA, 25 bp, Homo sapien
ctccctggtcgtccttcctcgccac

SEQ ID NO: 4818762 - DNA, 25 bp, Homo sapien
ctgcaagccatccccgtgtgctggc

SEQ ID NO: 4818763 - DNA, 25 bp, Homo sapien
ccccatgcagttcgctgtgtggcgg

SEQ ID NO: 4818764 - DNA, 25 bp, Homo sapien
ggcgccgggtgggccttgtgcacag

SEQ ID NO: 4818765 - DNA, 25 bp, Homo sapien
cagcgtccaccccatgcagttcgct

SEQ ID NO: 4818766 - DNA, 25 bp, Homo sapien
gagagaacgctgccaagagaagggt

SEQ ID NO: 4818767 - DNA, 25 bp, Homo sapien
gatgagtgctctcactccaggagag

SEQ ID NO: 4818768 - DNA, 25 bp, Homo sapien
gagaacgctgccaagagaagggtgg

SEQ ID NO: 4818769 - DNA, 25 bp, Homo sapien
gaacgctgccaagagaagggtggct

SEQ ID NO: 4818770 - DNA, 25 bp, Homo sapien
ttcaggcacgctcctcagctggtca

SEQ ID NO: 4818771 - DNA, 25 bp, Homo sapien
ccctaggctgcgtcgggcatgcttg

SEQ ID NO: 4818772 - DNA, 25 bp, Homo sapien
tcaggagtgaagatgccacagagcc

SEQ ID NO: 4818773 - DNA, 25 bp, Homo sapien
aacatcagctcattagccacctgtg

SEQ ID NO: 4818774 - DNA, 25 bp, Homo sapien
aagcacacggcctctgggaaggaca

SEQ ID NO: 4818775 - DNA, 25 bp, Homo sapien
agcacacggcctctgggaaggacag

SEQ ID NO: 4818776 - DNA, 25 bp, Homo sapien
ggaagcacacggcctctgggaagga

SEQ ID NO: 4818777 - DNA, 25 bp, Homo sapien
ctggaagcacacggcctctgggaag

SEQ ID NO: 4818778 - DNA, 25 bp, Homo sapien
agggccctgccggaatgtgcagcct

SEQ ID NO: 4818779 - DNA, 25 bp, Homo sapien
tctggtgctcgtccacgcaggtgtg

SEQ ID NO: 4818780 - DNA, 25 bp, Homo sapien
ttccgagcacggtgtttcccaagaa

SEQ ID NO: 4818781 - DNA, 25 bp, Homo sapien
tagtcggctggtgtccctgtcgtgg

SEQ ID NO: 4818782 - DNA, 25 bp, Homo sapien
aaagcttcgtccgagaaacgccagg

SEQ ID NO: 4818783 - DNA, 25 bp, Homo sapien
gagcagacagctttagccgttccca

SEQ ID NO: 4818784 - DNA, 25 bp, Homo sapien
tagcaatgccttagctgggacgcat

SEQ ID NO: 4818785 - DNA, 25 bp, Homo sapien
taagcaagtacataaggaccctcct

SEQ ID NO: 4818786 - DNA, 25 bp, Homo sapien
tgcggcgaggctggcatcctctgtg

SEQ ID NO: 4818787 - DNA, 25 bp, Homo sapien
gtgcggcgaggctggcatcctctgt

SEQ ID NO: 4818788 - DNA, 25 bp, Homo sapien
tcaggcaacgacagcaagccagtgt

SEQ ID NO: 4818789 - DNA, 25 bp, Homo sapien
gttcttcaccgtcactctcaggcaa

SEQ ID NO: 4818790 - DNA, 25 bp, Homo sapien
tgggcctcccttcggcatttggttg

SEQ ID NO: 4818791 - DNA, 25 bp, Homo sapien
catttggttgccacggtgactcctg

SEQ ID NO: 4818792 - DNA, 25 bp, Homo sapien
taaagatgcccggagggagcccgca

SEQ ID NO: 4818793 - DNA, 25 bp, Homo sapien
tgcctttctgcagcgagccccctct

SEQ ID NO: 4818794 - DNA, 25 bp, Homo sapien
agcgagccccctctgtaaagatgcc

SEQ ID NO: 4818795 - DNA, 25 bp, Homo sapien
tttctgcagcgagccccctctgtaa

SEQ ID NO: 4818796 - DNA, 25 bp, Homo sapien
acagtgctcgctcacggcaggtaac

SEQ ID NO: 4818797 - DNA, 25 bp, Homo sapien
gagtcacttgaggatcctggcccag

SEQ ID NO: 4818798 - DNA, 25 bp, Homo sapien
tgtggaagaaccgtagcccaggttc

SEQ ID NO: 4818799 - DNA, 25 bp, Homo sapien
gtgcgagtcacttgaggatcctggc

SEQ ID NO: 4818800 - DNA, 25 bp, Homo sapien
cctgattccgtcttagctgaagggt

SEQ ID NO: 4818801 - DNA, 25 bp, Homo sapien
gccaagatgctgccccagaatggac

SEQ ID NO: 4818802 - DNA, 25 bp, Homo sapien
ggacccgcatatgaacatccctgat

SEQ ID NO: 4818803 - DNA, 25 bp, Homo sapien
tcctccagtgcttgtgtttcccaca

SEQ ID NO: 4818804 - DNA, 25 bp, Homo sapien
caatggcgtgaccgagtagtgcagt

SEQ ID NO: 4818805 - DNA, 25 bp, Homo sapien
gtgaccgagtagtgcagtggctgga

SEQ ID NO: 4818806 - DNA, 25 bp, Homo sapien
cttggcaatggcgtgaccgagtagt

SEQ ID NO: 4818807 - DNA, 25 bp, Homo sapien
tggcgtgaccgagtagtgcagtggc

SEQ ID NO: 4818808 - DNA, 25 bp, Homo sapien
tccgaatctgtttcctggtggactc

SEQ ID NO: 4818809 - DNA, 25 bp, Homo sapien
tgtgtgatggaaaacattctgggca

SEQ ID NO: 4818810 - DNA, 25 bp, Homo sapien
gacgctcatgtggtccatccctggg

SEQ ID NO: 4818811 - DNA, 25 bp, Homo sapien
tctggtggcctctctaggacacgac

SEQ ID NO: 4818812 - DNA, 25 bp, Homo sapien
gggccacgtcgcttcctcttatcag

SEQ ID NO: 4818813 - DNA, 25 bp, Homo sapien
ggcgtgacctgctccgtgaattcgg

SEQ ID NO: 4818814 - DNA, 25 bp, Homo sapien
gcagaaacagcgacagcctctttgc

SEQ ID NO: 4818815 - DNA, 25 bp, Homo sapien
ctttcttttctcatcggcgtgctcg

SEQ ID NO: 4818816 - DNA, 25 bp, Homo sapien
ctgagatcaccacctccccctccat

SEQ ID NO: 4818817 - DNA, 25 bp, Homo sapien
gaattggcaggcctgggcaccgtcc

SEQ ID NO: 4818818 - DNA, 25 bp, Homo sapien
atccccacgcgtctagggagggaag

SEQ ID NO: 4818819 - DNA, 25 bp, Homo sapien
ggcaccgtccgctgaggccaggtct

SEQ ID NO: 4818820 - DNA, 25 bp, Homo sapien
ggaagccatttctccccagccactg

SEQ ID NO: 4818821 - DNA, 25 bp, Homo sapien
ccaatagcctctgtgggtcgggcat

SEQ ID NO: 4818822 - DNA, 25 bp, Homo sapien
taacatttcttcacgtaggcctgtg

SEQ ID NO: 4818823 - DNA, 25 bp, Homo sapien
cctttgcacgtgctccaggcttttg

SEQ ID NO: 4818824 - DNA, 25 bp, Homo sapien
gaacgtcttggcattttacagctga

SEQ ID NO: 4818825 - DNA, 25 bp, Homo sapien
ggatgctcgtagttcctcctgcctc

SEQ ID NO: 4818826 - DNA, 25 bp, Homo sapien
caggtgaacaccgagggcagagcta

SEQ ID NO: 4818827 - DNA, 25 bp, Homo sapien
aggaactcggccaagacccaggtga

SEQ ID NO: 4818828 - DNA, 25 bp, Homo sapien
ggtctctggcactcctgtgaagtga

SEQ ID NO: 4818829 - DNA, 25 bp, Homo sapien
cgacttggtgcgtgtgttgatcgct

SEQ ID NO: 4818830 - DNA, 25 bp, Homo sapien
tacgtgcagctgtgcgacttggtgc

SEQ ID NO: 4818831 - DNA, 25 bp, Homo sapien
tgatcgcttggaaacggtgtgtgaa

SEQ ID NO: 4818832 - DNA, 25 bp, Homo sapien
gaattgagttgaggttgtacgtgca

SEQ ID NO: 4818833 - DNA, 25 bp, Homo sapien
caggccttccttggtatctaaccca

SEQ ID NO: 4818834 - DNA, 25 bp, Homo sapien
ctgcccgttccgtggtggttccctg

SEQ ID NO: 4818835 - DNA, 25 bp, Homo sapien
tctcctgcccgttccgtggtggttc

SEQ ID NO: 4818836 - DNA, 25 bp, Homo sapien
cagaatctggcggtggatccataca

SEQ ID NO: 4818837 - DNA, 25 bp, Homo sapien
tcttaaccagcacgcgtccatgccg

SEQ ID NO: 4818838 - DNA, 25 bp, Homo sapien
gcacgcgtccatgccggtcaaactg

SEQ ID NO: 4818839 - DNA, 25 bp, Homo sapien
tcctctgcagacagaatctggcggt

SEQ ID NO: 4818840 - DNA, 25 bp, Homo sapien
tcatgttttgaaacccctgttaaca

SEQ ID NO: 4818841 - DNA, 25 bp, Homo sapien
tgaaacccctgttaacagaagccca

SEQ ID NO: 4818842 - DNA, 25 bp, Homo sapien
catgttttgaaacccctgttaacag

SEQ ID NO: 4818843 - DNA, 25 bp, Homo sapien
gatgacgggctgagtcgaggaagag

SEQ ID NO: 4818844 - DNA, 25 bp, Homo sapien
gacgggctgagtcgaggaagagcag

SEQ ID NO: 4818845 - DNA, 25 bp, Homo sapien
tcagatgacgggctgagtcgaggaa

SEQ ID NO: 4818846 - DNA, 25 bp, Homo sapien
ttttcagatgacgggctgagtcgag

SEQ ID NO: 4818847 - DNA, 25 bp, Homo sapien
gaatggcttctcatccagacacacg

SEQ ID NO: 4818848 - DNA, 25 bp, Homo sapien
tggcttctcatccagacacacgggc

SEQ ID NO: 4818849 - DNA, 25 bp, Homo sapien
ttctcatccagacacacgggccaag

SEQ ID NO: 4818850 - DNA, 25 bp, Homo sapien
tcatccagacacacgggccaagtct

SEQ ID NO: 4818851 - DNA, 25 bp, Homo sapien
tgaacgacttctgaggggccggggc

SEQ ID NO: 4818852 - DNA, 25 bp, Homo sapien
acatgaacgacttctgaggggccgg

SEQ ID NO: 4818853 - DNA, 25 bp, Homo sapien
catgaacgacttctgaggggccggg

SEQ ID NO: 4818854 - DNA, 25 bp, Homo sapien
atgaacgacttctgaggggccgggg

SEQ ID NO: 4818855 - DNA, 25 bp, Homo sapien
gtgccagcagagggatctcatcctc

SEQ ID NO: 4818856 - DNA, 25 bp, Homo sapien
tgccagcagagggatctcatcctct

SEQ ID NO: 4818857 - DNA, 25 bp, Homo sapien
cccaagtgccagcagagggatctca

SEQ ID NO: 4818858 - DNA, 25 bp, Homo sapien
ggcaccagccagggccaatttgcat

SEQ ID NO: 4818859 - DNA, 25 bp, Homo sapien
cttctcgtctttctcctcctggggg

SEQ ID NO: 4818860 - DNA, 25 bp, Homo sapien
ggggcaccagccagggccaatttgc

SEQ ID NO: 4818861 - DNA, 25 bp, Homo sapien
caccagccagggccaatttgcatat

SEQ ID NO: 4818862 - DNA, 25 bp, Homo sapien
tcgggacccgttgtccttgctcgat

SEQ ID NO: 4818863 - DNA, 25 bp, Homo sapien
agccaggccgggtgacggcacggcc

SEQ ID NO: 4818864 - DNA, 25 bp, Homo sapien
ttgtccttgctcgatgcctgcggtc

SEQ ID NO: 4818865 - DNA, 25 bp, Homo sapien
ttgctcgatgcctgcggtccctgct

SEQ ID NO: 4818866 - DNA, 25 bp, Homo sapien
tcaagagctgggcatgtattctcct

SEQ ID NO: 4818867 - DNA, 25 bp, Homo sapien
tctacgatttgatgcgaacgtgggc

SEQ ID NO: 4818868 - DNA, 25 bp, Homo sapien
gaaagttaacacgacacctctgaga

SEQ ID NO: 4818869 - DNA, 25 bp, Homo sapien
cctgggacgtactgatggtcagaca

SEQ ID NO: 4818870 - DNA, 25 bp, Homo sapien
catggtctcattaacggtgcacaac

SEQ ID NO: 4818871 - DNA, 25 bp, Homo sapien
tcacggcgcagggtacctgagacag

SEQ ID NO: 4818872 - DNA, 25 bp, Homo sapien
ctcattttccttggcgcgaggcgtg

SEQ ID NO: 4818873 - DNA, 25 bp, Homo sapien
tggatccccgtgttccaaactggca

SEQ ID NO: 4818874 - DNA, 25 bp, Homo sapien
cgggctcttacaacattgagctttg

SEQ ID NO: 4818875 - DNA, 25 bp, Homo sapien
cccgccgggctcttacaacattgag

SEQ ID NO: 4818876 - DNA, 25 bp, Homo sapien
gttgacaggcgggtggacgccacgt

SEQ ID NO: 4818877 - DNA, 25 bp, Homo sapien
gcgggtggacgccacgtcaccatct

SEQ ID NO: 4818878 - DNA, 25 bp, Homo sapien
agaaattcgtgcctcatggctgcct

SEQ ID NO: 4818879 - DNA, 25 bp, Homo sapien
gtgcctcatggctgcctcggctgat

SEQ ID NO: 4818880 - DNA, 25 bp, Homo sapien
ttcgtgcctcatggctgcctcggct

SEQ ID NO: 4818881 - DNA, 25 bp, Homo sapien
aattcgtgcctcatggctgcctcgg

SEQ ID NO: 4818882 - DNA, 25 bp, Homo sapien
gagtcgctgccccagcgtttgaata

SEQ ID NO: 4818883 - DNA, 25 bp, Homo sapien
acccctgcccagctcgcatttctgg

SEQ ID NO: 4818884 - DNA, 25 bp, Homo sapien
cgtttgaataacatcctgggcaggg

SEQ ID NO: 4818885 - DNA, 25 bp, Homo sapien
gaagcccgcagtcccctgtggcgtg

SEQ ID NO: 4818886 - DNA, 25 bp, Homo sapien
agatgagcggccgtgtattctcagg

SEQ ID NO: 4818887 - DNA, 25 bp, Homo sapien
cgtgtattctcagggtctgcccggg

SEQ ID NO: 4818888 - DNA, 25 bp, Homo sapien
gtaaatatgcatcccacagtgaagc

SEQ ID NO: 4818889 - DNA, 25 bp, Homo sapien
atgtaaatatgcatcccacagtgaa

SEQ ID NO: 4818890 - DNA, 25 bp, Homo sapien
gatgttcccgtccaagcacatggag

SEQ ID NO: 4818891 - DNA, 25 bp, Homo sapien
gaagtttagtctccacccagaagag

SEQ ID NO: 4818892 - DNA, 25 bp, Homo sapien
ggttgacacgtaggccacagtcttg

SEQ ID NO: 4818893 - DNA, 25 bp, Homo sapien
tggcccagggtttgcaaatcgttct

SEQ ID NO: 4818894 - DNA, 25 bp, Homo sapien
tcatccttcgagcatggccagaggg

SEQ ID NO: 4818895 - DNA, 25 bp, Homo sapien
ccactggaaatgcaggcgtggcggg

SEQ ID NO: 4818896 - DNA, 25 bp, Homo sapien
gctgtccactggagatgcaggcact

SEQ ID NO: 4818897 - DNA, 25 bp, Homo sapien
caggcgcgggggggagccaccagca

SEQ ID NO: 4818898 - DNA, 25 bp, Homo sapien
aaagtaagattgcatttggggctgc

SEQ ID NO: 4818899 - DNA, 25 bp, Homo sapien
aagattgcatttggggctgctgaac

SEQ ID NO: 4818900 - DNA, 25 bp, Homo sapien
gaaacatgaccccaatatttggaaa

SEQ ID NO: 4818901 - DNA, 25 bp, Homo sapien
tatgggaaatgaaacatgaccccaa

SEQ ID NO: 4818902 - DNA, 25 bp, Homo sapien
gttcttgtagggaaattagctcttc

SEQ ID NO: 4818903 - DNA, 25 bp, Homo sapien
ccgtgttcttgtagggaaattagct

SEQ ID NO: 4818904 - DNA, 25 bp, Homo sapien
ccaggacctcggcaatagggtttct

SEQ ID NO: 4818905 - DNA, 25 bp, Homo sapien
tcggcaatagggtttctggtggcct

SEQ ID NO: 4818906 - DNA, 25 bp, Homo sapien
ggtcgactaggtcaaaaagtactgc

SEQ ID NO: 4818907 - DNA, 25 bp, Homo sapien
actgcttgagcagtggagatactca

SEQ ID NO: 4818908 - DNA, 25 bp, Homo sapien
agcaggcagacccagtgtaacacgg

SEQ ID NO: 4818909 - DNA, 25 bp, Homo sapien
aaggttgagaacacacagggcgtcc

SEQ ID NO: 4818910 - DNA, 25 bp, Homo sapien
tggctcattgtcagacaggagggag

SEQ ID NO: 4818911 - DNA, 25 bp, Homo sapien
gccgggtccagcgtttctcctcatg

SEQ ID NO: 4818912 - DNA, 25 bp, Homo sapien
gcctcttcttaggccgggtccagcg

SEQ ID NO: 4818913 - DNA, 25 bp, Homo sapien
gtccagcgtttctcctcatggtgta

SEQ ID NO: 4818914 - DNA, 25 bp, Homo sapien
tcccctccatccgtactgtgctcgg

SEQ ID NO: 4818915 - DNA, 25 bp, Homo sapien
tactgtgctcggtccacaggaccag

SEQ ID NO: 4818916 - DNA, 25 bp, Homo sapien
ccgtctgtgcgtctcccaagggcgc

SEQ ID NO: 4818917 - DNA, 25 bp, Homo sapien
agagccagggatctgtaggactgca

SEQ ID NO: 4818918 - DNA, 25 bp, Homo sapien
cttgcagcttcagattgagggtctg

SEQ ID NO: 4818919 - DNA, 25 bp, Homo sapien
tcgtcctgcccgcccagtgcagcgg

SEQ ID NO: 4818920 - DNA, 25 bp, Homo sapien
ttgcagcttcagattgagggtctga

SEQ ID NO: 4818921 - DNA, 25 bp, Homo sapien
cctgcccgcccagtgcagcggcagt

SEQ ID NO: 4818922 - DNA, 25 bp, Homo sapien
gaaagcagctccgaagtgcagacac

SEQ ID NO: 4818923 - DNA, 25 bp, Homo sapien
ggaaagcagctccgaagtgcagaca

SEQ ID NO: 4818924 - DNA, 25 bp, Homo sapien
ggccgcagcctgactcagtcgtctg

SEQ ID NO: 4818925 - DNA, 25 bp, Homo sapien
tgaaataccacaaggccgggaggga

SEQ ID NO: 4818926 - DNA, 25 bp, Homo sapien
tgcactaaacgcatgtgcctgggcc

SEQ ID NO: 4818927 - DNA, 25 bp, Homo sapien
tgctgtgaggagacgtgaagtcggg

SEQ ID NO: 4818928 - DNA, 25 bp, Homo sapien
aaagtggctcccctcggatgggtgt

SEQ ID NO: 4818929 - DNA, 25 bp, Homo sapien
taataggtgctaaaccatctcccgg

SEQ ID NO: 4818930 - DNA, 25 bp, Homo sapien
gtaatgaaaccgtaaaggcaagtgc

SEQ ID NO: 4818931 - DNA, 25 bp, Homo sapien
tgaggaaccacacatctggacgagt

SEQ ID NO: 4818932 - DNA, 25 bp, Homo sapien
catggagtgctctggttgtggtttg

SEQ ID NO: 4818933 - DNA, 25 bp, Homo sapien
gagtgctctggttgtggtttgctgg

SEQ ID NO: 4818934 - DNA, 25 bp, Homo sapien
aggccatggagtgctctggttgtgg

SEQ ID NO: 4818935 - DNA, 25 bp, Homo sapien
gggacaccaggaagcggcggtccat

SEQ ID NO: 4818936 - DNA, 25 bp, Homo sapien
gccctttcttggtcagaagaagcag

SEQ ID NO: 4818937 - DNA, 25 bp, Homo sapien
taatgatcagaacagcacatcttgt

SEQ ID NO: 4818938 - DNA, 25 bp, Homo sapien
gatgattatcggtgactgctcacca

SEQ ID NO: 4818939 - DNA, 25 bp, Homo sapien
ccacatgggagtttgcatactgagt

SEQ ID NO: 4818940 - DNA, 25 bp, Homo sapien
ccagcagggccttttcgggcagaaa

SEQ ID NO: 4818941 - DNA, 25 bp, Homo sapien
ggtcaatgaccttcgaaaagcccca

SEQ ID NO: 4818942 - DNA, 25 bp, Homo sapien
gaacgacacatttggagactgaact

SEQ ID NO: 4818943 - DNA, 25 bp, Homo sapien
tgacgacgttggatgcatcagtccc

SEQ ID NO: 4818944 - DNA, 25 bp, Homo sapien
cccagccccaaggcaaatgagagct

SEQ ID NO: 4818945 - DNA, 25 bp, Homo sapien
tgccttgcgaggcttgccctgggtt

SEQ ID NO: 4818946 - DNA, 25 bp, Homo sapien
gcagtgagggccctctcatttccac

SEQ ID NO: 4818947 - DNA, 25 bp, Homo sapien
ctcaggagtgagatggttgtatatg

SEQ ID NO: 4818948 - DNA, 25 bp, Homo sapien
ttttagttccgtataggagcaggcg

SEQ ID NO: 4818949 - DNA, 25 bp, Homo sapien
tttttagacgtgactgtggccagcg

SEQ ID NO: 4818950 - DNA, 25 bp, Homo sapien
ggagcaggcgttcggatttgccata

SEQ ID NO: 4818951 - DNA, 25 bp, Homo sapien
tagaagacaaacatagacagcgagt

SEQ ID NO: 4818952 - DNA, 25 bp, Homo sapien
tgaccatgatgtaaagcttcctgtg

SEQ ID NO: 4818953 - DNA, 25 bp, Homo sapien
gctcatcggtcctccgggtgaacag

SEQ ID NO: 4818954 - DNA, 25 bp, Homo sapien
tcatccaggcctgatcgggctcatc

SEQ ID NO: 4818955 - DNA, 25 bp, Homo sapien
gagcatgaggcgtggctccctcaaa

SEQ ID NO: 4818956 - DNA, 25 bp, Homo sapien
agctgctggacgacgggaatggcga

SEQ ID NO: 4818957 - DNA, 25 bp, Homo sapien
ccgggagaggtcatccagcccctgc

SEQ ID NO: 4818958 - DNA, 25 bp, Homo sapien
tccaggacgcggcggaacatcgacg

SEQ ID NO: 4818959 - DNA, 25 bp, Homo sapien
aggacgcggcggaacatcgacgcca

SEQ ID NO: 4818960 - DNA, 25 bp, Homo sapien
cattgaaaagcaggtaccagtgccc

SEQ ID NO: 4818961 - DNA, 25 bp, Homo sapien
tcaaatgtcctggatgcgagcgtca

SEQ ID NO: 4818962 - DNA, 25 bp, Homo sapien
tgttccaagccgttcagtcatgcca

SEQ ID NO: 4818963 - DNA, 25 bp, Homo sapien
cgcagagcctgatgggagaatgtcc

SEQ ID NO: 4818964 - DNA, 25 bp, Homo sapien
ggaaaggcgatctcttcactgtgaa

SEQ ID NO: 4818965 - DNA, 25 bp, Homo sapien
cactgtgaaaagttgcccgggtgca

SEQ ID NO: 4818966 - DNA, 25 bp, Homo sapien
tctaccatgggaaatgcaggctggg

SEQ ID NO: 4818967 - DNA, 25 bp, Homo sapien
caccagaatgcagttccagcttagg

SEQ ID NO: 4818968 - DNA, 25 bp, Homo sapien
gttgatgggtctgaaggtccttgcc

SEQ ID NO: 4818969 - DNA, 25 bp, Homo sapien
agtcgtcaaaggttgatgggtctga

SEQ ID NO: 4818970 - DNA, 25 bp, Homo sapien
tgggcggacagtcggcgtggtgcct

SEQ ID NO: 4818971 - DNA, 25 bp, Homo sapien
tgccatcgaatccagaagaggagag

SEQ ID NO: 4818972 - DNA, 25 bp, Homo sapien
caccatcatcgcagaaggcaaagga

SEQ ID NO: 4818973 - DNA, 25 bp, Homo sapien
ggcctcaccatcatcgcagaaggca

SEQ ID NO: 4818974 - DNA, 25 bp, Homo sapien
cctcaccatcatcgcagaaggcaaa

SEQ ID NO: 4818975 - DNA, 25 bp, Homo sapien
tcaccatcatcgcagaaggcaaagg

SEQ ID NO: 4818976 - DNA, 25 bp, Homo sapien
aaatgtatcatagcatggcggcaag

SEQ ID NO: 4818977 - DNA, 25 bp, Homo sapien
gatgtccacgaatgcccaaatgttg

SEQ ID NO: 4818978 - DNA, 25 bp, Homo sapien
tatgagacacgagcaaacattggcc

SEQ ID NO: 4818979 - DNA, 25 bp, Homo sapien
tcagaggagcaacaagactttcagc

SEQ ID NO: 4818980 - DNA, 25 bp, Homo sapien
cctgatgggtatgtcggctgattcc

SEQ ID NO: 4818981 - DNA, 25 bp, Homo sapien
tcatggctgtatggcgttctaccca

SEQ ID NO: 4818982 - DNA, 25 bp, Homo sapien
tcaccacctgggtcaagaaacagag

SEQ ID NO: 4818983 - DNA, 25 bp, Homo sapien
gaaacagagcattgccagaacccca

SEQ ID NO: 4818984 - DNA, 25 bp, Homo sapien
ttaggtcgtggttgagaaatctccc

SEQ ID NO: 4818985 - DNA, 25 bp, Homo sapien
taatacacacaaagtcagagcctgc

SEQ ID NO: 4818986 - DNA, 25 bp, Homo sapien
aaactaaagatttgtgtgccgcacg

SEQ ID NO: 4818987 - DNA, 25 bp, Homo sapien
ccatttgtggtgactggttgcggca

SEQ ID NO: 4818988 - DNA, 25 bp, Homo sapien
tgacttccacgacgcagcgcttgtg

SEQ ID NO: 4818989 - DNA, 25 bp, Homo sapien
tgccatctgctaaataagggtcctg

SEQ ID NO: 4818990 - DNA, 25 bp, Homo sapien
ggaaaatcctcgcaaaagtcactca

SEQ ID NO: 4818991 - DNA, 25 bp, Homo sapien
gatcgccctgtgtcaattactggag

SEQ ID NO: 4818992 - DNA, 25 bp, Homo sapien
tcccatgaggtagagaccattgagg

SEQ ID NO: 4818993 - DNA, 25 bp, Homo sapien
caccaggctccttggaacttctcag

SEQ ID NO: 4818994 - DNA, 25 bp, Homo sapien
tttgaagcatgacagtcggcgtacc

SEQ ID NO: 4818995 - DNA, 25 bp, Homo sapien
gataccattggcatagctctcatgg

SEQ ID NO: 4818996 - DNA, 25 bp, Homo sapien
ttgttgttgtggcccgttagagaat

SEQ ID NO: 4818997 - DNA, 25 bp, Homo sapien
ttgttgtggcccgttagagaattac

SEQ ID NO: 4818998 - DNA, 25 bp, Homo sapien
gttgttgtggcccgttagagaatta

SEQ ID NO: 4818999 - DNA, 25 bp, Homo sapien
tgttgttgtggcccgttagagaatt

SEQ ID NO: 4819000 - DNA, 25 bp, Homo sapien
tatctcaagccctgagccggaagct

SEQ ID NO: 4819001 - DNA, 25 bp, Homo sapien
cccttggtaggttcaggacagccct

SEQ ID NO: 4819002 - DNA, 25 bp, Homo sapien
tccccagatcgtgtagccagagact

SEQ ID NO: 4819003 - DNA, 25 bp, Homo sapien
taagcagacgccctgtaggaaatgc

SEQ ID NO: 4819004 - DNA, 25 bp, Homo sapien
ccaaggtcaccaggggagacagagc

SEQ ID NO: 4819005 - DNA, 25 bp, Homo sapien
ttcagagagaggagggcccaaggtc

SEQ ID NO: 4819006 - DNA, 25 bp, Homo sapien
ggagacagagccaggttctctctgc

SEQ ID NO: 4819007 - DNA, 25 bp, Homo sapien
gccaccagccccaagcagacactca

SEQ ID NO: 4819008 - DNA, 25 bp, Homo sapien
gtccaccaggtctacacggagctcg

SEQ ID NO: 4819009 - DNA, 25 bp, Homo sapien
aaagtccaccaggtctacacggagc

SEQ ID NO: 4819010 - DNA, 25 bp, Homo sapien
aagtccaccaggtctacacggagct

SEQ ID NO: 4819011 - DNA, 25 bp, Homo sapien
caccaggtctacacggagctcgctg

SEQ ID NO: 4819012 - DNA, 25 bp, Homo sapien
gcctttaagatctttctgtcaccag

SEQ ID NO: 4819013 - DNA, 25 bp, Homo sapien
gccccagcctttaagatctttctgt

SEQ ID NO: 4819014 - DNA, 25 bp, Homo sapien
aggccccagcctttaagatctttct

SEQ ID NO: 4819015 - DNA, 25 bp, Homo sapien
tttaagatctttctgtcaccaggca

SEQ ID NO: 4819016 - DNA, 25 bp, Homo sapien
acgcagcccttagaggtcccagtgc

SEQ ID NO: 4819017 - DNA, 25 bp, Homo sapien
gtgcttatgttgcagatggcccagg

SEQ ID NO: 4819018 - DNA, 25 bp, Homo sapien
gggacgcagcccttagaggtcccag

SEQ ID NO: 4819019 - DNA, 25 bp, Homo sapien
cctgtgggccaagaggtgcttatgt

SEQ ID NO: 4819020 - DNA, 25 bp, Homo sapien
ttgtatgcggcccagtcccgataga

SEQ ID NO: 4819021 - DNA, 25 bp, Homo sapien
tgtatgcggcccagtcccgatagaa

SEQ ID NO: 4819022 - DNA, 25 bp, Homo sapien
gcttgtatgcggcccagtcccgata

SEQ ID NO: 4819023 - DNA, 25 bp, Homo sapien
tatgcggcccagtcccgatagaagt

SEQ ID NO: 4819024 - DNA, 25 bp, Homo sapien
gaattccagagtgtgttctacaacc

SEQ ID NO: 4819025 - DNA, 25 bp, Homo sapien
tgtccccatccaggggaatagagaa

SEQ ID NO: 4819026 - DNA, 25 bp, Homo sapien
ccatccaggggaatagagaattcca

SEQ ID NO: 4819027 - DNA, 25 bp, Homo sapien
tgttctacaaccaggtgtgcagcct

SEQ ID NO: 4819028 - DNA, 25 bp, Homo sapien
gtccgtgtccatgtcacagagcaca

SEQ ID NO: 4819029 - DNA, 25 bp, Homo sapien
caggtagatggtgtgccagccgctc

SEQ ID NO: 4819030 - DNA, 25 bp, Homo sapien
gtccatgtcacagagcacagtcagg

SEQ ID NO: 4819031 - DNA, 25 bp, Homo sapien
gggccggcagtcgggcaggtagatg

SEQ ID NO: 4819032 - DNA, 25 bp, Homo sapien
ggaacccggggaatggctgcaggac

SEQ ID NO: 4819033 - DNA, 25 bp, Homo sapien
gaagggaacccggggaatggctgca

SEQ ID NO: 4819034 - DNA, 25 bp, Homo sapien
aacccggggaatggctgcaggacgg

SEQ ID NO: 4819035 - DNA, 25 bp, Homo sapien
ccggggaatggctgcaggacggggg

SEQ ID NO: 4819036 - DNA, 25 bp, Homo sapien
gtagataatagtagagcccaggttg

SEQ ID NO: 4819037 - DNA, 25 bp, Homo sapien
gattccgtagcgtgaacgtgtgcag

SEQ ID NO: 4819038 - DNA, 25 bp, Homo sapien
gcacccggccttctagggtagataa

SEQ ID NO: 4819039 - DNA, 25 bp, Homo sapien
ggattcaggtgatagctgcccatta

SEQ ID NO: 4819040 - DNA, 25 bp, Homo sapien
tgtcgcacacgactgagactgccca

SEQ ID NO: 4819041 - DNA, 25 bp, Homo sapien
ctgtcgcacacgactgagactgccc

SEQ ID NO: 4819042 - DNA, 25 bp, Homo sapien
gtcgcacacgactgagactgcccag

SEQ ID NO: 4819043 - DNA, 25 bp, Homo sapien
ccacgcatccccttctctcctcggt

SEQ ID NO: 4819044 - DNA, 25 bp, Homo sapien
cgcatccccttctctcctcggtctc

SEQ ID NO: 4819045 - DNA, 25 bp, Homo sapien
ctttctctccacgcatccccttctc

SEQ ID NO: 4819046 - DNA, 25 bp, Homo sapien
tttctctccacgcatccccttctct

SEQ ID NO: 4819047 - DNA, 25 bp, Homo sapien
ttgggccccactggtcctgcctttc

SEQ ID NO: 4819048 - DNA, 25 bp, Homo sapien
ggggctccagggagaccgcgttctc

SEQ ID NO: 4819049 - DNA, 25 bp, Homo sapien
gtcctgcctttccaggggctccagg

SEQ ID NO: 4819050 - DNA, 25 bp, Homo sapien
cactggtcctgcctttccaggggct

SEQ ID NO: 4819051 - DNA, 25 bp, Homo sapien
tgccccaagtggttaagtcctgacc

SEQ ID NO: 4819052 - DNA, 25 bp, Homo sapien
tctactgcctagcaagggaccaggt

SEQ ID NO: 4819053 - DNA, 25 bp, Homo sapien
tgttgaccataagcctggacccaag

SEQ ID NO: 4819054 - DNA, 25 bp, Homo sapien
caaagaatgcgtcctcagagagcct

SEQ ID NO: 4819055 - DNA, 25 bp, Homo sapien
tcgtgccagtagctgagcaaagctg

SEQ ID NO: 4819056 - DNA, 25 bp, Homo sapien
acagagcttagaagtcgtgccagta

SEQ ID NO: 4819057 - DNA, 25 bp, Homo sapien
tggatcaaggactaggagacagagc

SEQ ID NO: 4819058 - DNA, 25 bp, Homo sapien
ggtgcagaagaaagcggtcacctca

SEQ ID NO: 4819059 - DNA, 25 bp, Homo sapien
tctctctccaatgacacctgcctct

SEQ ID NO: 4819060 - DNA, 25 bp, Homo sapien
tggtgagcttgtcagagccctccag

SEQ ID NO: 4819061 - DNA, 25 bp, Homo sapien
cctcggagaatggtgagcttgtcag

SEQ ID NO: 4819062 - DNA, 25 bp, Homo sapien
gccccgggcagcctcggagaatggt

SEQ ID NO: 4819063 - DNA, 25 bp, Homo sapien
ggaacaagactagcaggacagcgag

SEQ ID NO: 4819064 - DNA, 25 bp, Homo sapien
acaagactagcaggacagcgagccc

SEQ ID NO: 4819065 - DNA, 25 bp, Homo sapien
caggaacaagactagcaggacagcg

SEQ ID NO: 4819066 - DNA, 25 bp, Homo sapien
tgcaggaacaagactagcaggacag

SEQ ID NO: 4819067 - DNA, 25 bp, Homo sapien
aggaaaccagctctcgccttgtgcc

SEQ ID NO: 4819068 - DNA, 25 bp, Homo sapien
cagaggaaaccagctctcgccttgt

SEQ ID NO: 4819069 - DNA, 25 bp, Homo sapien
gaggaaaccagctctcgccttgtgc

SEQ ID NO: 4819070 - DNA, 25 bp, Homo sapien
gaaaccagctctcgccttgtgccac

SEQ ID NO: 4819071 - DNA, 25 bp, Homo sapien
tcatctctgatgcgagccaccagcc

SEQ ID NO: 4819072 - DNA, 25 bp, Homo sapien
tctgatgcgagccaccagccaccga

SEQ ID NO: 4819073 - DNA, 25 bp, Homo sapien
tgatgcgagccaccagccaccgagg

SEQ ID NO: 4819074 - DNA, 25 bp, Homo sapien
atctctgatgcgagccaccagccac

SEQ ID NO: 4819075 - DNA, 25 bp, Homo sapien
ctggcacctgcttcgtatgggaagt

SEQ ID NO: 4819076 - DNA, 25 bp, Homo sapien
ctcatcctggcggtccccaggctgc

SEQ ID NO: 4819077 - DNA, 25 bp, Homo sapien
gctcatcctggcggtccccaggctg

SEQ ID NO: 4819078 - DNA, 25 bp, Homo sapien
tctgctcatcctggcggtccccagg

SEQ ID NO: 4819079 - DNA, 25 bp, Homo sapien
tgctcatcctggcggtccccaggct

SEQ ID NO: 4819080 - DNA, 25 bp, Homo sapien
aaagcccatgttgtccctggaccac

SEQ ID NO: 4819081 - DNA, 25 bp, Homo sapien
taaagtccaaaacctcactatgggc

SEQ ID NO: 4819082 - DNA, 25 bp, Homo sapien
caaaacctcactatgggcctttcca

SEQ ID NO: 4819083 - DNA, 25 bp, Homo sapien
gcatagagcagatttccaggttact

SEQ ID NO: 4819084 - DNA, 25 bp, Homo sapien
tctctgtgcccagtacggcaccgtg

SEQ ID NO: 4819085 - DNA, 25 bp, Homo sapien
ttcaatggccagcactctctctgtg

SEQ ID NO: 4819086 - DNA, 25 bp, Homo sapien
agtacggcaccgtggaaagtctttg

SEQ ID NO: 4819087 - DNA, 25 bp, Homo sapien
tgcccagtacggcaccgtggaaagt

SEQ ID NO: 4819088 - DNA, 25 bp, Homo sapien
ggcatgaagcctgtcctagacctcc

SEQ ID NO: 4819089 - DNA, 25 bp, Homo sapien
gcgctggcgaatgcaacggcagaca

SEQ ID NO: 4819090 - DNA, 25 bp, Homo sapien
cctagacctccagggattagagcag

SEQ ID NO: 4819091 - DNA, 25 bp, Homo sapien
tggcgaatgcaacggcagacagacc

SEQ ID NO: 4819092 - DNA, 25 bp, Homo sapien
ttgttgtaaatgcaatgccgtagtt

SEQ ID NO: 4819093 - DNA, 25 bp, Homo sapien
ttatgcgatgattgttgtaaatgca

SEQ ID NO: 4819094 - DNA, 25 bp, Homo sapien
aaatgcaatgccgtagtttggatta

SEQ ID NO: 4819095 - DNA, 25 bp, Homo sapien
gcaatgccgtagtttggattaataa

SEQ ID NO: 4819096 - DNA, 25 bp, Homo sapien
cgctcccatgggtgccattcaccca

SEQ ID NO: 4819097 - DNA, 25 bp, Homo sapien
ccgctcccatgggtgccattcaccc

SEQ ID NO: 4819098 - DNA, 25 bp, Homo sapien
gctcccatgggtgccattcacccag

SEQ ID NO: 4819099 - DNA, 25 bp, Homo sapien
tcccatgggtgccattcacccagca

SEQ ID NO: 4819100 - DNA, 25 bp, Homo sapien
gacaatactattttggacttgggcc

SEQ ID NO: 4819101 - DNA, 25 bp, Homo sapien
gctgggcagctcaatcaatgaaatg

SEQ ID NO: 4819102 - DNA, 25 bp, Homo sapien
ggcttccactgaatgtcaccttagg

SEQ ID NO: 4819103 - DNA, 25 bp, Homo sapien
ttccggaagccagaactctaagatc

SEQ ID NO: 4819104 - DNA, 25 bp, Homo sapien
ttctcctcctcctcacactgggcca

SEQ ID NO: 4819105 - DNA, 25 bp, Homo sapien
tctcctcctcctcacactgggccat

SEQ ID NO: 4819106 - DNA, 25 bp, Homo sapien
gcggctgccgggagcgtcggtgtga

SEQ ID NO: 4819107 - DNA, 25 bp, Homo sapien
gggagcgtcggtgtgaagtgtgtgc

SEQ ID NO: 4819108 - DNA, 25 bp, Homo sapien
acagccaagtggacggcggctgccg

SEQ ID NO: 4819109 - DNA, 25 bp, Homo sapien
tgacagccaagtggacggcggctgc

SEQ ID NO: 4819110 - DNA, 25 bp, Homo sapien
cactggtccccaattgggtggactc

SEQ ID NO: 4819111 - DNA, 25 bp, Homo sapien
cctggcattgaggagttccggccca

SEQ ID NO: 4819112 - DNA, 25 bp, Homo sapien
caattggagccatctgaggtcaccg

SEQ ID NO: 4819113 - DNA, 25 bp, Homo sapien
gaggtcaccgtgtccaatgtgatga

SEQ ID NO: 4819114 - DNA, 25 bp, Homo sapien
ctgatgcctcgggagacaggcagca

SEQ ID NO: 4819115 - DNA, 25 bp, Homo sapien
cacagttagttcttgctgcagtcaa

SEQ ID NO: 4819116 - DNA, 25 bp, Homo sapien
gcggtggtcctgactgagagtccca

SEQ ID NO: 4819117 - DNA, 25 bp, Homo sapien
agttggcagcctcacctgtcttggg

SEQ ID NO: 4819118 - DNA, 25 bp, Homo sapien
tgtcatttcggcagctgcgctcctg

SEQ ID NO: 4819119 - DNA, 25 bp, Homo sapien
ctgtcgtccagagggggcccacgta

SEQ ID NO: 4819120 - DNA, 25 bp, Homo sapien
agctcctgccggttctgtcatttcg

SEQ ID NO: 4819121 - DNA, 25 bp, Homo sapien
gcccacgtagtgcacagggagccgc

SEQ ID NO: 4819122 - DNA, 25 bp, Homo sapien
ctgaacatgtcagggcatcggtgcc

SEQ ID NO: 4819123 - DNA, 25 bp, Homo sapien
gccgggtacagtccaggcatagaaa

SEQ ID NO: 4819124 - DNA, 25 bp, Homo sapien
catggttcactgtcaccgtgggggc

SEQ ID NO: 4819125 - DNA, 25 bp, Homo sapien
catcggtgccgggtacagtccaggc

SEQ ID NO: 4819126 - DNA, 25 bp, Homo sapien
gctggcattgaaggccagggaactt

SEQ ID NO: 4819127 - DNA, 25 bp, Homo sapien
ccttggtccagtccactgaagctgc

SEQ ID NO: 4819128 - DNA, 25 bp, Homo sapien
ccactgaagctgctggcattgaagg

SEQ ID NO: 4819129 - DNA, 25 bp, Homo sapien
cttggtccagtccactgaagctgct

SEQ ID NO: 4819130 - DNA, 25 bp, Homo sapien
ggtttgtcattcacgcccttgttga

SEQ ID NO: 4819131 - DNA, 25 bp, Homo sapien
tcgttgaggatactggatggcagct

SEQ ID NO: 4819132 - DNA, 25 bp, Homo sapien
gcctgagacaggaatgaccgcatct

SEQ ID NO: 4819133 - DNA, 25 bp, Homo sapien
gccaacattgtaagaggcggccacg

SEQ ID NO: 4819134 - DNA, 25 bp, Homo sapien
agcgctgcctcgtaccacgagctca

SEQ ID NO: 4819135 - DNA, 25 bp, Homo sapien
tcgtaccacgagctcatcttcctcc

SEQ ID NO: 4819136 - DNA, 25 bp, Homo sapien
ggaacatcagcgctgcctcgtacca

SEQ ID NO: 4819137 - DNA, 25 bp, Homo sapien
gactccagaggaacatcagcgctgc

SEQ ID NO: 4819138 - DNA, 25 bp, Homo sapien
gtacacatggacatgtctgctcatc

SEQ ID NO: 4819139 - DNA, 25 bp, Homo sapien
tgtacacatggacatgtctgctcat

SEQ ID NO: 4819140 - DNA, 25 bp, Homo sapien
cgtgcttacatcacagccctgtgga

SEQ ID NO: 4819141 - DNA, 25 bp, Homo sapien
gatagcaccccgtgcttacatcaca

SEQ ID NO: 4819142 - DNA, 25 bp, Homo sapien
gccctgtggacaactatgagcagga

SEQ ID NO: 4819143 - DNA, 25 bp, Homo sapien
agagactgccctcgctctcgatagc

SEQ ID NO: 4819144 - DNA, 25 bp, Homo sapien
gaactgcattctggcctttgtcaca

SEQ ID NO: 4819145 - DNA, 25 bp, Homo sapien
agccgccactggacacgctgaactg

SEQ ID NO: 4819146 - DNA, 25 bp, Homo sapien
atgtccttggcaagcccggccttgg

SEQ ID NO: 4819147 - DNA, 25 bp, Homo sapien
tgttcctattcctcggagggaagtg

SEQ ID NO: 4819148 - DNA, 25 bp, Homo sapien
ttgtcagagacggtgacagtagtgg

SEQ ID NO: 4819149 - DNA, 25 bp, Homo sapien
tcagagacggtgacagtagtggtac

SEQ ID NO: 4819150 - DNA, 25 bp, Homo sapien
gttttcaggaattgtcagagacggt

SEQ ID NO: 4819151 - DNA, 25 bp, Homo sapien
cagttttcaggaattgtcagagacg

SEQ ID NO: 4819152 - DNA, 25 bp, Homo sapien
gaaggtgtgggcttccgatcgccca

SEQ ID NO: 4819153 - DNA, 25 bp, Homo sapien
aaggtgtgggcttccgatcgcccat

SEQ ID NO: 4819154 - DNA, 25 bp, Homo sapien
tgggcagaacatcaagggatactcg

SEQ ID NO: 4819155 - DNA, 25 bp, Homo sapien
tatgctcacttaatccagggaggtc

SEQ ID NO: 4819156 - DNA, 25 bp, Homo sapien
tctacacatatgcatgggccgggct

SEQ ID NO: 4819157 - DNA, 25 bp, Homo sapien
tcgagaaggcccaaggcaagactct

SEQ ID NO: 4819158 - DNA, 25 bp, Homo sapien
tgacatgcagagacttctgagcccc

SEQ ID NO: 4819159 - DNA, 25 bp, Homo sapien
ctgacatgcagagacttctgagccc

SEQ ID NO: 4819160 - DNA, 25 bp, Homo sapien
ggcccacccgaaatccaggatgctt

SEQ ID NO: 4819161 - DNA, 25 bp, Homo sapien
tggcgtcctctccagcagtcattgg

SEQ ID NO: 4819162 - DNA, 25 bp, Homo sapien
cctcaagttctacgtgagcaggaga

SEQ ID NO: 4819163 - DNA, 25 bp, Homo sapien
tgagatccgctgagctcatttaggc

SEQ ID NO: 4819164 - DNA, 25 bp, Homo sapien
tttcaggagagttgatgggtgccac

SEQ ID NO: 4819165 - DNA, 25 bp, Homo sapien
gacgaaaggcattgggcatcgtgcc

SEQ ID NO: 4819166 - DNA, 25 bp, Homo sapien
gagatgccacatgctaaggtgcctt

SEQ ID NO: 4819167 - DNA, 25 bp, Homo sapien
gagttatgccggaatgaaccctgca

SEQ ID NO: 4819168 - DNA, 25 bp, Homo sapien
ctttgatcaatcagtgtccagcagg

SEQ ID NO: 4819169 - DNA, 25 bp, Homo sapien
caccgtcagtgctggtctgaataga

SEQ ID NO: 4819170 - DNA, 25 bp, Homo sapien
gaaagttgcaaaaatccacgatccc

SEQ ID NO: 4819171 - DNA, 25 bp, Homo sapien
cagagccgggctgtttgatccttga

SEQ ID NO: 4819172 - DNA, 25 bp, Homo sapien
gcgaccaaggtgatgccaactgcat

SEQ ID NO: 4819173 - DNA, 25 bp, Homo sapien
ggcgacggcggtgatgccaaccata

SEQ ID NO: 4819174 - DNA, 25 bp, Homo sapien
tgtatgtgggacactcggacactcc

SEQ ID NO: 4819175 - DNA, 25 bp, Homo sapien
tctgcaaaatggttggagaaaggcc

SEQ ID NO: 4819176 - DNA, 25 bp, Homo sapien
agatgaacctctcaagcctgaggcg

SEQ ID NO: 4819177 - DNA, 25 bp, Homo sapien
tctccaggagaacccgccttgctgg

SEQ ID NO: 4819178 - DNA, 25 bp, Homo sapien
gttagtttctttcagcggcgcagga

SEQ ID NO: 4819179 - DNA, 25 bp, Homo sapien
ggcagaacacggtttcctctccagg

SEQ ID NO: 4819180 - DNA, 25 bp, Homo sapien
cacttcctgtgggtagcctactctg

SEQ ID NO: 4819181 - DNA, 25 bp, Homo sapien
tctctggcattgcataggtggcctt

SEQ ID NO: 4819182 - DNA, 25 bp, Homo sapien
tagcctactctggtcctcccagaag

SEQ ID NO: 4819183 - DNA, 25 bp, Homo sapien
tcccagaagctgaggcaaagagctc

SEQ ID NO: 4819184 - DNA, 25 bp, Homo sapien
atcagcccgagcttggcacagcact

SEQ ID NO: 4819185 - DNA, 25 bp, Homo sapien
tctctgtgggtcatcagcccgagct

SEQ ID NO: 4819186 - DNA, 25 bp, Homo sapien
caggaggggcttcatctccctgttc

SEQ ID NO: 4819187 - DNA, 25 bp, Homo sapien
tgttctctgtgggtcatcagcccga

SEQ ID NO: 4819188 - DNA, 25 bp, Homo sapien
tcgctgtggacaggcgtgggttcca

SEQ ID NO: 4819189 - DNA, 25 bp, Homo sapien
gggttccatgaacgtcccaccctga

SEQ ID NO: 4819190 - DNA, 25 bp, Homo sapien
gggtgccatgaacgccgcagctgat

SEQ ID NO: 4819191 - DNA, 25 bp, Homo sapien
acaggcgtgggttccatgaacgtcc

SEQ ID NO: 4819192 - DNA, 25 bp, Homo sapien
tgaataatgccgggatgacccatgg

SEQ ID NO: 4819193 - DNA, 25 bp, Homo sapien
ttgaataatgccgggatgacccatg

SEQ ID NO: 4819194 - DNA, 25 bp, Homo sapien
cttgaataatgccgggatgacccat

SEQ ID NO: 4819195 - DNA, 25 bp, Homo sapien
gaataatgccgggatgacccatggt

SEQ ID NO: 4819196 - DNA, 25 bp, Homo sapien
cctacagcctcaaaggtgacttcca

SEQ ID NO: 4819197 - DNA, 25 bp, Homo sapien
tgccttgcagagatcagaccctaga

SEQ ID NO: 4819198 - DNA, 25 bp, Homo sapien
tattaccagtgagtccaacaaaggc

SEQ ID NO: 4819199 - DNA, 25 bp, Homo sapien
tgttggctctataccaggacaggga

SEQ ID NO: 4819200 - DNA, 25 bp, Homo sapien
gaggagcctccatgacctgttaccg

SEQ ID NO: 4819201 - DNA, 25 bp, Homo sapien
tacaattacagacacgtgtcaccgc

SEQ ID NO: 4819202 - DNA, 25 bp, Homo sapien
agctacaattacagacacgtgtcac

SEQ ID NO: 4819203 - DNA, 25 bp, Homo sapien
aattacagacacgtgtcaccgcgcc

SEQ ID NO: 4819204 - DNA, 25 bp, Homo sapien
caattacagacacgtgtcaccgcgc

SEQ ID NO: 4819205 - DNA, 25 bp, Homo sapien
aatgtgagtggtggcccacgacgca

SEQ ID NO: 4819206 - DNA, 25 bp, Homo sapien
cacgacgcaacttgtgattgtggtt

SEQ ID NO: 4819207 - DNA, 25 bp, Homo sapien
ccagcgaggacctggcacagttggc

SEQ ID NO: 4819208 - DNA, 25 bp, Homo sapien
ggtggagtaacaacacctcgtccac

SEQ ID NO: 4819209 - DNA, 25 bp, Homo sapien
ggttacactcttcacgcggattatc

SEQ ID NO: 4819210 - DNA, 25 bp, Homo sapien
gattatctcgtgtgacacctggccc

SEQ ID NO: 4819211 - DNA, 25 bp, Homo sapien
ccgtccgtggaatgctgcaggccag

SEQ ID NO: 4819212 - DNA, 25 bp, Homo sapien
acacccgtccgtggaatgctgcagg

SEQ ID NO: 4819213 - DNA, 25 bp, Homo sapien
cagctgtggacgtgaggggcagcag

SEQ ID NO: 4819214 - DNA, 25 bp, Homo sapien
ccaccagctgtggacgtgaggggca

SEQ ID NO: 4819215 - DNA, 25 bp, Homo sapien
ctgtggacgtgaggggcagcagcgc

SEQ ID NO: 4819216 - DNA, 25 bp, Homo sapien
caccagctgtggacgtgaggggcag

SEQ ID NO: 4819217 - DNA, 25 bp, Homo sapien
actctgggaggactgcgaccctgac

SEQ ID NO: 4819218 - DNA, 25 bp, Homo sapien
gggccccactctgggaggactgcga

SEQ ID NO: 4819219 - DNA, 25 bp, Homo sapien
ggaggactgcgaccctgaccagtcc

SEQ ID NO: 4819220 - DNA, 25 bp, Homo sapien
ccactctgggaggactgcgaccctg

SEQ ID NO: 4819221 - DNA, 25 bp, Homo sapien
agctgcctatgggtcaggacactgc

SEQ ID NO: 4819222 - DNA, 25 bp, Homo sapien
catccagctgcctatgggtcaggac

SEQ ID NO: 4819223 - DNA, 25 bp, Homo sapien
gcccctggaatccatccagctgcct

SEQ ID NO: 4819224 - DNA, 25 bp, Homo sapien
agcccctggaatccatccagctgcc

SEQ ID NO: 4819225 - DNA, 25 bp, Homo sapien
acgagctcatccaccacacgccagg

SEQ ID NO: 4819226 - DNA, 25 bp, Homo sapien
gacctgccatgacggacaaacatct

SEQ ID NO: 4819227 - DNA, 25 bp, Homo sapien
ttgtcccccaggaagacgagctcat

SEQ ID NO: 4819228 - DNA, 25 bp, Homo sapien
gtggggacctgccatgacggacaaa

SEQ ID NO: 4819229 - DNA, 25 bp, Homo sapien
acagctgtgggccctgagttacatc

SEQ ID NO: 4819230 - DNA, 25 bp, Homo sapien
atacacagctgtgggccctgagtta

SEQ ID NO: 4819231 - DNA, 25 bp, Homo sapien
tacacagctgtgggccctgagttac

SEQ ID NO: 4819232 - DNA, 25 bp, Homo sapien
ctggcatacacagctgtgggccctg

SEQ ID NO: 4819233 - DNA, 25 bp, Homo sapien
gactgagtgtaggtgccacccgtgt

SEQ ID NO: 4819234 - DNA, 25 bp, Homo sapien
ctgagtgtaggtgccacccgtgtct

SEQ ID NO: 4819235 - DNA, 25 bp, Homo sapien
gtgactgagtgtaggtgccacccgt

SEQ ID NO: 4819236 - DNA, 25 bp, Homo sapien
accaccactgccgagtcccgtacgt

SEQ ID NO: 4819237 - DNA, 25 bp, Homo sapien
tcgtgcccccaaggggattccagct

SEQ ID NO: 4819238 - DNA, 25 bp, Homo sapien
gctgccatcgccattgctcgtggga

SEQ ID NO: 4819239 - DNA, 25 bp, Homo sapien
tgccgagggctctcgtgcccccaag

SEQ ID NO: 4819240 - DNA, 25 bp, Homo sapien
tccagctgccatcgccattgctcgt

SEQ ID NO: 4819241 - DNA, 25 bp, Homo sapien
gggtctatgtctcccacatatgatg

SEQ ID NO: 4819242 - DNA, 25 bp, Homo sapien
gggatgccgagggtctatgtctccc

SEQ ID NO: 4819243 - DNA, 25 bp, Homo sapien
gccgagggtctatgtctcccacata

SEQ ID NO: 4819244 - DNA, 25 bp, Homo sapien
ctgacagagggatgccgagggtcta

SEQ ID NO: 4819245 - DNA, 25 bp, Homo sapien
tccatggacagacggccctggtgac

SEQ ID NO: 4819246 - DNA, 25 bp, Homo sapien
ctccatggacagacggccctggtga

SEQ ID NO: 4819247 - DNA, 25 bp, Homo sapien
catggacagacggccctggtgaccc

SEQ ID NO: 4819248 - DNA, 25 bp, Homo sapien
ggcctccatggacagacggccctgg

SEQ ID NO: 4819249 - DNA, 25 bp, Homo sapien
tagaatatatagggaactcctaaga

SEQ ID NO: 4819250 - DNA, 25 bp, Homo sapien
gaatatatagggaactcctaagatt

SEQ ID NO: 4819251 - DNA, 25 bp, Homo sapien
tatagggaactcctaagatttaaca

SEQ ID NO: 4819252 - DNA, 25 bp, Homo sapien
tatatagggaactcctaagatttaa

SEQ ID NO: 4819253 - DNA, 25 bp, Homo sapien
gaccgcggtcacctgcttgtgctgc

SEQ ID NO: 4819254 - DNA, 25 bp, Homo sapien
aggaccgcggtcacctgcttgtgct

SEQ ID NO: 4819255 - DNA, 25 bp, Homo sapien
gagaggaccgcggtcacctgcttgt

SEQ ID NO: 4819256 - DNA, 25 bp, Homo sapien
agagaagagaggaccgcggtcacct

SEQ ID NO: 4819257 - DNA, 25 bp, Homo sapien
ggacgtggtattcctggatggttct

SEQ ID NO: 4819258 - DNA, 25 bp, Homo sapien
tggacgtggtattcctggatggttc

SEQ ID NO: 4819259 - DNA, 25 bp, Homo sapien
ctggacgtggtattcctggatggtt

SEQ ID NO: 4819260 - DNA, 25 bp, Homo sapien
gaaatgggagcttagtccagcctgg

SEQ ID NO: 4819261 - DNA, 25 bp, Homo sapien
tctgagttgcacatccccttccagg

SEQ ID NO: 4819262 - DNA, 25 bp, Homo sapien
tggacatttcacagagacgattggc

SEQ ID NO: 4819263 - DNA, 25 bp, Homo sapien
gacagaatggtcatgacttaggaac

SEQ ID NO: 4819264 - DNA, 25 bp, Homo sapien
gatgatgccaactagacctccggat

SEQ ID NO: 4819265 - DNA, 25 bp, Homo sapien
cattttgggcatgagactgtagtca

SEQ ID NO: 4819266 - DNA, 25 bp, Homo sapien
ctccggatgggcaattactcaagac

SEQ ID NO: 4819267 - DNA, 25 bp, Homo sapien
ccttcacgcagtccaaaaagctgag

SEQ ID NO: 4819268 - DNA, 25 bp, Homo sapien
ggaagatgcaatcagccaagatcgt

SEQ ID NO: 4819269 - DNA, 25 bp, Homo sapien
gaagatgcaatcagccaagatcgtg

SEQ ID NO: 4819270 - DNA, 25 bp, Homo sapien
tatctctatctttaaacatgacagt

SEQ ID NO: 4819271 - DNA, 25 bp, Homo sapien
ccaaagtcatcaccgtcctgacagg

SEQ ID NO: 4819272 - DNA, 25 bp, Homo sapien
tttttgtcaccaccacgcaagccaa

SEQ ID NO: 4819273 - DNA, 25 bp, Homo sapien
cttcatggactttgatagggcagac

SEQ ID NO: 4819274 - DNA, 25 bp, Homo sapien
tcaattaagtctcgaccccagtggg

SEQ ID NO: 4819275 - DNA, 25 bp, Homo sapien
caaggtctcaggttccgtgttatgc

SEQ ID NO: 4819276 - DNA, 25 bp, Homo sapien
tcagggtagagatgaaaccgccgtt

SEQ ID NO: 4819277 - DNA, 25 bp, Homo sapien
cgttaggctggaaagtgaaccctct

SEQ ID NO: 4819278 - DNA, 25 bp, Homo sapien
tggcgctatctacacagcaggcaag

SEQ ID NO: 4819279 - DNA, 25 bp, Homo sapien
tacggttaggtgtcatgtcgctgga

SEQ ID NO: 4819280 - DNA, 25 bp, Homo sapien
gaatctcaggtttggagcaggacat

SEQ ID NO: 4819281 - DNA, 25 bp, Homo sapien
tgctcccggagataaaatcacgatt

SEQ ID NO: 4819282 - DNA, 25 bp, Homo sapien
aaagacaggactagaagtcttccct

SEQ ID NO: 4819283 - DNA, 25 bp, Homo sapien
cacgggagacaaacgcatctttgac

SEQ ID NO: 4819284 - DNA, 25 bp, Homo sapien
ctccgctcacgggagacaaacgcat

SEQ ID NO: 4819285 - DNA, 25 bp, Homo sapien
agacaggactagaagtcttccctcc

SEQ ID NO: 4819286 - DNA, 25 bp, Homo sapien
tcaccaagggtatgcacggcttttc

SEQ ID NO: 4819287 - DNA, 25 bp, Homo sapien
tgcagataataatcacagcctggga

SEQ ID NO: 4819288 - DNA, 25 bp, Homo sapien
gaatgccttcacctgatgccgagca

SEQ ID NO: 4819289 - DNA, 25 bp, Homo sapien
tgtgaaacttactcccgaatgcctt

SEQ ID NO: 4819290 - DNA, 25 bp, Homo sapien
cacttctgcccaactgttaaccagg

SEQ ID NO: 4819291 - DNA, 25 bp, Homo sapien
ttctgcccaactgttaaccaggcag

SEQ ID NO: 4819292 - DNA, 25 bp, Homo sapien
gcacaacaataggtcacttctgccc

SEQ ID NO: 4819293 - DNA, 25 bp, Homo sapien
cagagcacaacaataggtcacttct

SEQ ID NO: 4819294 - DNA, 25 bp, Homo sapien
cacactaagaactacatctagggtt

SEQ ID NO: 4819295 - DNA, 25 bp, Homo sapien
cctctttggttgtaaccagagacgc

SEQ ID NO: 4819296 - DNA, 25 bp, Homo sapien
gagtgtgactgagcaacctctttgg

SEQ ID NO: 4819297 - DNA, 25 bp, Homo sapien
ggcgatccccgtggccacattggaa

SEQ ID NO: 4819298 - DNA, 25 bp, Homo sapien
agtagcaccccgctcatcggttcca

SEQ ID NO: 4819299 - DNA, 25 bp, Homo sapien
tgtgggggcaaccacacagtagcac

SEQ ID NO: 4819300 - DNA, 25 bp, Homo sapien
cccatcctgggcactgaggtgagtc

SEQ ID NO: 4819301 - DNA, 25 bp, Homo sapien
cacttggggcagtgaaacaaaacac

SEQ ID NO: 4819302 - DNA, 25 bp, Homo sapien
cacatggagagtgaccttcatgtgg

SEQ ID NO: 4819303 - DNA, 25 bp, Homo sapien
ggcttttctttatgagctcagactt

SEQ ID NO: 4819304 - DNA, 25 bp, Homo sapien
tatgacaatgtaactaattctgtaa

SEQ ID NO: 4819305 - DNA, 25 bp, Homo sapien
gagtgaccttcatgtggtcccactg

SEQ ID NO: 4819306 - DNA, 25 bp, Homo sapien
cggatcccagaaacataactccggg

SEQ ID NO: 4819307 - DNA, 25 bp, Homo sapien
tcgccgatcccagcggctagggtga

SEQ ID NO: 4819308 - DNA, 25 bp, Homo sapien
gcaggccgtgagtagcccaagcttg

SEQ ID NO: 4819309 - DNA, 25 bp, Homo sapien
aagctcgctagtcctcggatcccag

SEQ ID NO: 4819310 - DNA, 25 bp, Homo sapien
ttgccttcagttcccaagcacagga

SEQ ID NO: 4819311 - DNA, 25 bp, Homo sapien
gttcccaagcacaggaaatggcggt

SEQ ID NO: 4819312 - DNA, 25 bp, Homo sapien
caggaaatggcggtgcagctttgct

SEQ ID NO: 4819313 - DNA, 25 bp, Homo sapien
agcacaggaaatggcggtgcagctt

SEQ ID NO: 4819314 - DNA, 25 bp, Homo sapien
acctccgcagatccgggtgtgacga

SEQ ID NO: 4819315 - DNA, 25 bp, Homo sapien
gaggccaagatccaaggttcgtcca

SEQ ID NO: 4819316 - DNA, 25 bp, Homo sapien
acgcggctgcatcccatgaatacgg

SEQ ID NO: 4819317 - DNA, 25 bp, Homo sapien
gatgagtcggttggtgccttctttc

SEQ ID NO: 4819318 - DNA, 25 bp, Homo sapien
aaatgcgtagtaggttaggactgaa

SEQ ID NO: 4819319 - DNA, 25 bp, Homo sapien
taggttaggactgaatctgcggctc

SEQ ID NO: 4819320 - DNA, 25 bp, Homo sapien
taggactgaatctgcggctctagtg

SEQ ID NO: 4819321 - DNA, 25 bp, Homo sapien
tgcggctctagtgccgatggcctcc

SEQ ID NO: 4819322 - DNA, 25 bp, Homo sapien
tcctgcctgttcagcctcgacttgg

SEQ ID NO: 4819323 - DNA, 25 bp, Homo sapien
gaagaccctgtagctcatagtaaac

SEQ ID NO: 4819324 - DNA, 25 bp, Homo sapien
gtaatctcacacagtaacggcccct

SEQ ID NO: 4819325 - DNA, 25 bp, Homo sapien
cgacttggctgacgaggcatctgct

SEQ ID NO: 4819326 - DNA, 25 bp, Homo sapien
tctgtgccgtcacaatcgggcgact

SEQ ID NO: 4819327 - DNA, 25 bp, Homo sapien
gcatattttcctactccgcagacga

SEQ ID NO: 4819328 - DNA, 25 bp, Homo sapien
ggatgatgattttccaggaggccct

SEQ ID NO: 4819329 - DNA, 25 bp, Homo sapien
tgtgaaatggcaggacttcacggcc

SEQ ID NO: 4819330 - DNA, 25 bp, Homo sapien
ggtggaagttgagccggtcacagga

SEQ ID NO: 4819331 - DNA, 25 bp, Homo sapien
agccggtcacaggaggtgatgcagt

SEQ ID NO: 4819332 - DNA, 25 bp, Homo sapien
tcgcagatggatggcctgttgatgt

SEQ ID NO: 4819333 - DNA, 25 bp, Homo sapien
tcaatcgcagatggatggcctgttg

SEQ ID NO: 4819334 - DNA, 25 bp, Homo sapien
ccaggtaaacattgagagtattgtt

SEQ ID NO: 4819335 - DNA, 25 bp, Homo sapien
cattgagagtattgttccggaacat

SEQ ID NO: 4819336 - DNA, 25 bp, Homo sapien
ggtaaacattgagagtattgttccg

SEQ ID NO: 4819337 - DNA, 25 bp, Homo sapien
gagagtattgttccggaacattcca

SEQ ID NO: 4819338 - DNA, 25 bp, Homo sapien
tgcaagttgttgggaaaatttattc

SEQ ID NO: 4819339 - DNA, 25 bp, Homo sapien
ctgcaagttgttgggaaaatttatt

SEQ ID NO: 4819340 - DNA, 25 bp, Homo sapien
taatactcttgagcaatccgttgaa

SEQ ID NO: 4819341 - DNA, 25 bp, Homo sapien
ctcactgtgctactctgggaaagct

SEQ ID NO: 4819342 - DNA, 25 bp, Homo sapien
tgcctggcacttgctgttaacactg

SEQ ID NO: 4819343 - DNA, 25 bp, Homo sapien
atcctaatccatgcccgatgcctgg

SEQ ID NO: 4819344 - DNA, 25 bp, Homo sapien
cctgtacacggagacagccttctgg

SEQ ID NO: 4819345 - DNA, 25 bp, Homo sapien
cctggttactggtcctgtacacgga

SEQ ID NO: 4819346 - DNA, 25 bp, Homo sapien
tctgctcccgtaagcctggttactg

SEQ ID NO: 4819347 - DNA, 25 bp, Homo sapien
ggctctgctcccgtaagcctggtta

SEQ ID NO: 4819348 - DNA, 25 bp, Homo sapien
catggaaagagcaatatgcccgggc

SEQ ID NO: 4819349 - DNA, 25 bp, Homo sapien
gtgatgtggcctcgaaggcagcctc

SEQ ID NO: 4819350 - DNA, 25 bp, Homo sapien
tgtatttggttgacggcactcccct

SEQ ID NO: 4819351 - DNA, 25 bp, Homo sapien
gagtacctggctgatgaccgttctg

SEQ ID NO: 4819352 - DNA, 25 bp, Homo sapien
tgagaccacaactgggctttctccc

SEQ ID NO: 4819353 - DNA, 25 bp, Homo sapien
ctgagaccacaactgggctttctcc

SEQ ID NO: 4819354 - DNA, 25 bp, Homo sapien
gctgagaccacaactgggctttctc

SEQ ID NO: 4819355 - DNA, 25 bp, Homo sapien
cccggatgaccactcgatcttcttg

SEQ ID NO: 4819356 - DNA, 25 bp, Homo sapien
tctgtagctaggaccttgggggtct

SEQ ID NO: 4819357 - DNA, 25 bp, Homo sapien
gggccccggatgaccactcgatctt

SEQ ID NO: 4819358 - DNA, 25 bp, Homo sapien
cgggcgatgacagcgcgggccccgg

SEQ ID NO: 4819359 - DNA, 25 bp, Homo sapien
gtagtagtcgctggtcctctccggc

SEQ ID NO: 4819360 - DNA, 25 bp, Homo sapien
ggttgttgaacctgcccggcaggtc

SEQ ID NO: 4819361 - DNA, 25 bp, Homo sapien
gggccgtggccttgggcgccacagg

SEQ ID NO: 4819362 - DNA, 25 bp, Homo sapien
gcaggtccgcgctcacgcggtagta

SEQ ID NO: 4819363 - DNA, 25 bp, Homo sapien
tcggcggcgtcctgttgccaagcga

SEQ ID NO: 4819364 - DNA, 25 bp, Homo sapien
gactcggcggcgtcctgttgccaag

SEQ ID NO: 4819365 - DNA, 25 bp, Homo sapien
cggcgtcctgttgccaagcgacggc

SEQ ID NO: 4819366 - DNA, 25 bp, Homo sapien
gtcctgttgccaagcgacggccagg

SEQ ID NO: 4819367 - DNA, 25 bp, Homo sapien
ggtttaagcactgcaggtccactcg

SEQ ID NO: 4819368 - DNA, 25 bp, Homo sapien
ttcacagctcacttggcgggaggcg

SEQ ID NO: 4819369 - DNA, 25 bp, Homo sapien
tctaaattgagacccgagatctggc

SEQ ID NO: 4819370 - DNA, 25 bp, Homo sapien
cactcggcaggcaacgattggactt

SEQ ID NO: 4819371 - DNA, 25 bp, Homo sapien
tgatccgcgagtcggaggacagcac

SEQ ID NO: 4819372 - DNA, 25 bp, Homo sapien
tgcattcgggactcggcgccaggac

SEQ ID NO: 4819373 - DNA, 25 bp, Homo sapien
ttggaagcgcgacggcccttatgat

SEQ ID NO: 4819374 - DNA, 25 bp, Homo sapien
ccccgtcgcgctggttgggctttct

SEQ ID NO: 4819375 - DNA, 25 bp, Homo sapien
aggagcaaggtcgggatcagaacct

SEQ ID NO: 4819376 - DNA, 25 bp, Homo sapien
ccaggagcaaggtcgggatcagaac

SEQ ID NO: 4819377 - DNA, 25 bp, Homo sapien
gagcaaggtcgggatcagaacctgg

SEQ ID NO: 4819378 - DNA, 25 bp, Homo sapien
caggagcaaggtcgggatcagaacc

SEQ ID NO: 4819379 - DNA, 25 bp, Homo sapien
tcttgtttataagccgcaaccggca

SEQ ID NO: 4819380 - DNA, 25 bp, Homo sapien
gacatcatcgacctggaacagacag

SEQ ID NO: 4819381 - DNA, 25 bp, Homo sapien
gccgtacatctttgggagccgcctg

SEQ ID NO: 4819382 - DNA, 25 bp, Homo sapien
taagccacgagacgaggcatgcaga

SEQ ID NO: 4819383 - DNA, 25 bp, Homo sapien
tgaggctctctatcgcctgcagggc

SEQ ID NO: 4819384 - DNA, 25 bp, Homo sapien
tgtacccggcaatgacgactctccg

SEQ ID NO: 4819385 - DNA, 25 bp, Homo sapien
ggtcagcggcatcctcagtcgttgt

SEQ ID NO: 4819386 - DNA, 25 bp, Homo sapien
cacagccaagcctgtctgagctggg

SEQ ID NO: 4819387 - DNA, 25 bp, Homo sapien
atccaccgttccaccacagaaccag

SEQ ID NO: 4819388 - DNA, 25 bp, Homo sapien
gaccaacgttgccatgtgcgtttgc

SEQ ID NO: 4819389 - DNA, 25 bp, Homo sapien
gagcggaccaacgttgccatgtgcg

SEQ ID NO: 4819390 - DNA, 25 bp, Homo sapien
aaccagtggctgagcggaccaacgt

SEQ ID NO: 4819391 - DNA, 25 bp, Homo sapien
gagcacagagggtgagcgacatgtg

SEQ ID NO: 4819392 - DNA, 25 bp, Homo sapien
agcacagagggtgagcgacatgtgc

SEQ ID NO: 4819393 - DNA, 25 bp, Homo sapien
agagcacagagggtgagcgacatgt

SEQ ID NO: 4819394 - DNA, 25 bp, Homo sapien
gcacagagggtgagcgacatgtgca

SEQ ID NO: 4819395 - DNA, 25 bp, Homo sapien
tgcaggccccattagaggtggcctt

SEQ ID NO: 4819396 - DNA, 25 bp, Homo sapien
tacgagtgggcgcttgctgggcttc

SEQ ID NO: 4819397 - DNA, 25 bp, Homo sapien
ggatgacccagtggataagcaggca

SEQ ID NO: 4819398 - DNA, 25 bp, Homo sapien
cccagaagaggccaacggagatgat

SEQ ID NO: 4819399 - DNA, 25 bp, Homo sapien
ttcctggggtctcctaacgcctgtg

SEQ ID NO: 4819400 - DNA, 25 bp, Homo sapien
gctctccagggagcgattagggtga

SEQ ID NO: 4819401 - DNA, 25 bp, Homo sapien
ggccccggtcctgactgcattcctg

SEQ ID NO: 4819402 - DNA, 25 bp, Homo sapien
gaacagctttagaggacatttgaga

SEQ ID NO: 4819403 - DNA, 25 bp, Homo sapien
ggacggcaccatccagcacctccgt

SEQ ID NO: 4819404 - DNA, 25 bp, Homo sapien
cagggacatggaaaaagctccccac

SEQ ID NO: 4819405 - DNA, 25 bp, Homo sapien
tgcagaacgcggctggctgcacccc

SEQ ID NO: 4819406 - DNA, 25 bp, Homo sapien
acctccgtcattcacagggacatgg

SEQ ID NO: 4819407 - DNA, 25 bp, Homo sapien
tggaaaggaggtcactggccactct

SEQ ID NO: 4819408 - DNA, 25 bp, Homo sapien
gatcatgtgctgaagaacgccacac

SEQ ID NO: 4819409 - DNA, 25 bp, Homo sapien
ttctaacagtttcagtcagcaggtc

SEQ ID NO: 4819410 - DNA, 25 bp, Homo sapien
taaagtctggtaggagattacgcat

SEQ ID NO: 4819411 - DNA, 25 bp, Homo sapien
ccctggtgctgatccctatagaaga

SEQ ID NO: 4819412 - DNA, 25 bp, Homo sapien
ggttttctaaccctggtgctgatcc

SEQ ID NO: 4819413 - DNA, 25 bp, Homo sapien
tgctgatccctatagaagagcaggg

SEQ ID NO: 4819414 - DNA, 25 bp, Homo sapien
tctaaccctggtgctgatccctata

SEQ ID NO: 4819415 - DNA, 25 bp, Homo sapien
ggtcttaagacttccctcatttata

SEQ ID NO: 4819416 - DNA, 25 bp, Homo sapien
ttcctttgcgtgaactacttttcca

SEQ ID NO: 4819417 - DNA, 25 bp, Homo sapien
tattcgtcataaacctcatggcgta

SEQ ID NO: 4819418 - DNA, 25 bp, Homo sapien
tacattagccaaataagatggctca

SEQ ID NO: 4819419 - DNA, 25 bp, Homo sapien
cctctgggaatcatgtgcgaccttg

SEQ ID NO: 4819420 - DNA, 25 bp, Homo sapien
gatgtcatgaataactccgttcaga

SEQ ID NO: 4819421 - DNA, 25 bp, Homo sapien
gagaaaatgcaagatcccagctgta

SEQ ID NO: 4819422 - DNA, 25 bp, Homo sapien
gaccttgacgtattggatctgtgga

SEQ ID NO: 4819423 - DNA, 25 bp, Homo sapien
cggcctcctctcataagggaagttc

SEQ ID NO: 4819424 - DNA, 25 bp, Homo sapien
tctggaagacctggttggcagccat

SEQ ID NO: 4819425 - DNA, 25 bp, Homo sapien
taatagaaatctccctgtccaaacg

SEQ ID NO: 4819426 - DNA, 25 bp, Homo sapien
tgtccaaacgggatgcaagctgctg

SEQ ID NO: 4819427 - DNA, 25 bp, Homo sapien
gaggaagtccacctcgtcctggatg

SEQ ID NO: 4819428 - DNA, 25 bp, Homo sapien
tttgaacgttcgaagaggactgggc

SEQ ID NO: 4819429 - DNA, 25 bp, Homo sapien
cggtgcccactttaaatgctttgaa

SEQ ID NO: 4819430 - DNA, 25 bp, Homo sapien
tgactggcgatgtgttcacccaggc

SEQ ID NO: 4819431 - DNA, 25 bp, Homo sapien
actcggtagcctgtcatgaagtgct

SEQ ID NO: 4819432 - DNA, 25 bp, Homo sapien
catgatgtagaagatcactcggtag

SEQ ID NO: 4819433 - DNA, 25 bp, Homo sapien
tatttgcggagtgtaggaacggcct

SEQ ID NO: 4819434 - DNA, 25 bp, Homo sapien
aacggcctcaggtactcctctgcaa

SEQ ID NO: 4819435 - DNA, 25 bp, Homo sapien
gcctgtcgaaagtcccttcccatag

SEQ ID NO: 4819436 - DNA, 25 bp, Homo sapien
ttcccataggacaggagcgagccag

SEQ ID NO: 4819437 - DNA, 25 bp, Homo sapien
tgttttcgttataacatcagggcgt

SEQ ID NO: 4819438 - DNA, 25 bp, Homo sapien
caggcccacagtgatattccgcctt

SEQ ID NO: 4819439 - DNA, 25 bp, Homo sapien
ctaggatgaaaccagtctgagagcc

SEQ ID NO: 4819440 - DNA, 25 bp, Homo sapien
gatgaaaccagtctgagagccgaag

SEQ ID NO: 4819441 - DNA, 25 bp, Homo sapien
tctgagagccgaagttcttctactt

SEQ ID NO: 4819442 - DNA, 25 bp, Homo sapien
accagtctgagagccgaagttcttc

SEQ ID NO: 4819443 - DNA, 25 bp, Homo sapien
aataacgctcaaccaacatcagtga

SEQ ID NO: 4819444 - DNA, 25 bp, Homo sapien
aaataacgctcaaccaacatcagtg

SEQ ID NO: 4819445 - DNA, 25 bp, Homo sapien
ctgaaataacgctcaaccaacatca

SEQ ID NO: 4819446 - DNA, 25 bp, Homo sapien
aacgctcaaccaacatcagtgaaaa

SEQ ID NO: 4819447 - DNA, 25 bp, Homo sapien
gactgttccccgtgggtcagctgca

SEQ ID NO: 4819448 - DNA, 25 bp, Homo sapien
gtctctccccgtgttcacatcaaag

SEQ ID NO: 4819449 - DNA, 25 bp, Homo sapien
caaagtctgcgttgattgcatgaaa

SEQ ID NO: 4819450 - DNA, 25 bp, Homo sapien
acgcaataaatctctccactgcagg

SEQ ID NO: 4819451 - DNA, 25 bp, Homo sapien
aaatgccatgtggatggggtaagac

SEQ ID NO: 4819452 - DNA, 25 bp, Homo sapien
actgaccaccttttaagttcaagat

SEQ ID NO: 4819453 - DNA, 25 bp, Homo sapien
ctctgcaattggaaactgaccacct

SEQ ID NO: 4819454 - DNA, 25 bp, Homo sapien
agttcaagatcactagaaatgccat

SEQ ID NO: 4819455 - DNA, 25 bp, Homo sapien
ccctgggctggatcccccggccagg

SEQ ID NO: 4819456 - DNA, 25 bp, Homo sapien
caggccaaccactaagcacaccctg

SEQ ID NO: 4819457 - DNA, 25 bp, Homo sapien
caaccactaagcacaccctgctcac

SEQ ID NO: 4819458 - DNA, 25 bp, Homo sapien
ccccggccaggccaaccactaagca

SEQ ID NO: 4819459 - DNA, 25 bp, Homo sapien
tcaggtttcactagcagctgaacag

SEQ ID NO: 4819460 - DNA, 25 bp, Homo sapien
tatgttctacatgggtcgcggcctc

SEQ ID NO: 4819461 - DNA, 25 bp, Homo sapien
tgtgggcagcatcgttttcctggct

SEQ ID NO: 4819462 - DNA, 25 bp, Homo sapien
cgctgttgtagcaggtcaggtttca

SEQ ID NO: 4819463 - DNA, 25 bp, Homo sapien
cagcacccttctacaaaggttagaa

SEQ ID NO: 4819464 - DNA, 25 bp, Homo sapien
gcacccttctacaaaggttagaatg

SEQ ID NO: 4819465 - DNA, 25 bp, Homo sapien
agcacccttctacaaaggttagaat

SEQ ID NO: 4819466 - DNA, 25 bp, Homo sapien
cagaggcaggcgaagccccaggagg

SEQ ID NO: 4819467 - DNA, 25 bp, Homo sapien
gaagccggagctaggagcagaggca

SEQ ID NO: 4819468 - DNA, 25 bp, Homo sapien
ggaagccggagctaggagcagaggc

SEQ ID NO: 4819469 - DNA, 25 bp, Homo sapien
cagggaagccggagctaggagcaga

SEQ ID NO: 4819470 - DNA, 25 bp, Homo sapien
tggctctccaacatccagtggactg

SEQ ID NO: 4819471 - DNA, 25 bp, Homo sapien
cacagcctggctgctagcaggcaaa

SEQ ID NO: 4819472 - DNA, 25 bp, Homo sapien
ataaaatgcccaagcacgcgacagg

SEQ ID NO: 4819473 - DNA, 25 bp, Homo sapien
gctcaaattagggtgcagctgcaac

SEQ ID NO: 4819474 - DNA, 25 bp, Homo sapien
gggtcggaggaacagagctcccacc

SEQ ID NO: 4819475 - DNA, 25 bp, Homo sapien
caaacaggacacatcggcagggcag

SEQ ID NO: 4819476 - DNA, 25 bp, Homo sapien
ctggaagcaaacaggacacatcggc

SEQ ID NO: 4819477 - DNA, 25 bp, Homo sapien
gtcggaggaacagagctcccacctc

SEQ ID NO: 4819478 - DNA, 25 bp, Homo sapien
gaccagaaccaggaacgggctccca

SEQ ID NO: 4819479 - DNA, 25 bp, Homo sapien
tataacgctcaataccagacacggc

SEQ ID NO: 4819480 - DNA, 25 bp, Homo sapien
agctcatatcaggtgcttacgcggg

SEQ ID NO: 4819481 - DNA, 25 bp, Homo sapien
taaatggaatggacacacgccatgt

SEQ ID NO: 4819482 - DNA, 25 bp, Homo sapien
ccaacagctaagcaccaacggtgga

SEQ ID NO: 4819483 - DNA, 25 bp, Homo sapien
gtccacatcagaccccaacgcagac

SEQ ID NO: 4819484 - DNA, 25 bp, Homo sapien
ggacgtcccatcgtccacatcagac

SEQ ID NO: 4819485 - DNA, 25 bp, Homo sapien
ggaaggacgtcccatcgtccacatc

SEQ ID NO: 4819486 - DNA, 25 bp, Homo sapien
cgtccacatcagaccccaacgcaga

SEQ ID NO: 4819487 - DNA, 25 bp, Homo sapien
ctcacagccttaggaagactccggc

SEQ ID NO: 4819488 - DNA, 25 bp, Homo sapien
tctgctgctgcgagaacggaggcca

SEQ ID NO: 4819489 - DNA, 25 bp, Homo sapien
agggcctccccgctcatcacgggca

SEQ ID NO: 4819490 - DNA, 25 bp, Homo sapien
cgctcatcacgggcaaggtctgctg

SEQ ID NO: 4819491 - DNA, 25 bp, Homo sapien
ctgcctggaggacgcaaggatgtgc

SEQ ID NO: 4819492 - DNA, 25 bp, Homo sapien
acacttgtccgtgcccagggacgtg

SEQ ID NO: 4819493 - DNA, 25 bp, Homo sapien
ctggccgacgctggatccagggacc

SEQ ID NO: 4819494 - DNA, 25 bp, Homo sapien
tccagaaacgccttcacatctgggg

SEQ ID NO: 4819495 - DNA, 25 bp, Homo sapien
tggccacctgagttggcagggccct

SEQ ID NO: 4819496 - DNA, 25 bp, Homo sapien
cccttgctggagctcgcccatgttg

SEQ ID NO: 4819497 - DNA, 25 bp, Homo sapien
atgttggtcacctcacacctggcca

SEQ ID NO: 4819498 - DNA, 25 bp, Homo sapien
caggccctcaattctgctgaccgcg

SEQ ID NO: 4819499 - DNA, 25 bp, Homo sapien
caacgagtgccacatttccttggag

SEQ ID NO: 4819500 - DNA, 25 bp, Homo sapien
cgacaacgtcaactgtaaaacatcc

SEQ ID NO: 4819501 - DNA, 25 bp, Homo sapien
cctgcttgaatctgactcgacaacg

SEQ ID NO: 4819502 - DNA, 25 bp, Homo sapien
tggacgctcccgtcccagggtctgg

SEQ ID NO: 4819503 - DNA, 25 bp, Homo sapien
gcaaggtggtgagatgtcccatcac

SEQ ID NO: 4819504 - DNA, 25 bp, Homo sapien
gtgagatgtcccatcaccgtgatgc

SEQ ID NO: 4819505 - DNA, 25 bp, Homo sapien
catcaccgtgatgccggaggactga

SEQ ID NO: 4819506 - DNA, 25 bp, Homo sapien
ccggaggactgacggcgtctaccct

SEQ ID NO: 4819507 - DNA, 25 bp, Homo sapien
gtgctgctcctgactgggccccagg

SEQ ID NO: 4819508 - DNA, 25 bp, Homo sapien
ccagggcgctggcaagccgcaggaa

SEQ ID NO: 4819509 - DNA, 25 bp, Homo sapien
gcgtgctgctcctgactgggcccca

SEQ ID NO: 4819510 - DNA, 25 bp, Homo sapien
gggcgctggcaagccgcaggaactg

SEQ ID NO: 4819511 - DNA, 25 bp, Homo sapien
cagcagggcccgcagacgctcacag

SEQ ID NO: 4819512 - DNA, 25 bp, Homo sapien
atgtcctcccgccggccatcgaact

SEQ ID NO: 4819513 - DNA, 25 bp, Homo sapien
cgccggccatcgaactggggcagca

SEQ ID NO: 4819514 - DNA, 25 bp, Homo sapien
gctcacagctcaacgacatccgctt

SEQ ID NO: 4819515 - DNA, 25 bp, Homo sapien
tctcgctgatcacgttccgccgaag

SEQ ID NO: 4819516 - DNA, 25 bp, Homo sapien
gccgagtcctcgcagcaggagaggg

SEQ ID NO: 4819517 - DNA, 25 bp, Homo sapien
tgcgctccctctcgctgatcacgtt

SEQ ID NO: 4819518 - DNA, 25 bp, Homo sapien
tcacgttccgccgaaggcaggagct

SEQ ID NO: 4819519 - DNA, 25 bp, Homo sapien
ctgccgagaaagccaagagcaccgg

SEQ ID NO: 4819520 - DNA, 25 bp, Homo sapien
gccgagaaagccaagagcaccgggc

SEQ ID NO: 4819521 - DNA, 25 bp, Homo sapien
tgccgagaaagccaagagcaccggg

SEQ ID NO: 4819522 - DNA, 25 bp, Homo sapien
ccgagaaagccaagagcaccgggcc

SEQ ID NO: 4819523 - DNA, 25 bp, Homo sapien
ttctggagacctccgggtagggctc

SEQ ID NO: 4819524 - DNA, 25 bp, Homo sapien
tcggagcaccgggacgccatgaact

SEQ ID NO: 4819525 - DNA, 25 bp, Homo sapien
ttgcatcccctgacggtagggattc

SEQ ID NO: 4819526 - DNA, 25 bp, Homo sapien
ccatgaactcgcagctgcggagcga

SEQ ID NO: 4819527 - DNA, 25 bp, Homo sapien
cggttcccacttatgcggtggtctc

SEQ ID NO: 4819528 - DNA, 25 bp, Homo sapien
gcactttggagatgcgggctctgcc

SEQ ID NO: 4819529 - DNA, 25 bp, Homo sapien
cacttatgcggtggtctcggtgccc

SEQ ID NO: 4819530 - DNA, 25 bp, Homo sapien
ttatgcggtggtctcggtgcccttg

SEQ ID NO: 4819531 - DNA, 25 bp, Homo sapien
tggacgtgctctgagggactatccg

SEQ ID NO: 4819532 - DNA, 25 bp, Homo sapien
gggagtccggggtacagcgtgtgtg

SEQ ID NO: 4819533 - DNA, 25 bp, Homo sapien
cctggacgtgctctgagggactatc

SEQ ID NO: 4819534 - DNA, 25 bp, Homo sapien
gggtacagcgtgtgtgaggagcagg

SEQ ID NO: 4819535 - DNA, 25 bp, Homo sapien
aaaattacttgggacgagcctggtg

SEQ ID NO: 4819536 - DNA, 25 bp, Homo sapien
tatggggagctcttgattaacacag

SEQ ID NO: 4819537 - DNA, 25 bp, Homo sapien
gggccatctcatgccctcggagggt

SEQ ID NO: 4819538 - DNA, 25 bp, Homo sapien
acgagcctggtgtggcagtagtggg

SEQ ID NO: 4819539 - DNA, 25 bp, Homo sapien
cctccctaacttctctgtcaaacat

SEQ ID NO: 4819540 - DNA, 25 bp, Homo sapien
ccctcctccctaacttctctgtcaa

SEQ ID NO: 4819541 - DNA, 25 bp, Homo sapien
tcatctccctcctccctaacttctc

SEQ ID NO: 4819542 - DNA, 25 bp, Homo sapien
tcctccctaacttctctgtcaaaca

SEQ ID NO: 4819543 - DNA, 25 bp, Homo sapien
cagcctccatggtagggttgggtga

SEQ ID NO: 4819544 - DNA, 25 bp, Homo sapien
ctcatgaccccgatgctggaatggg

SEQ ID NO: 4819545 - DNA, 25 bp, Homo sapien
ctatccataaggacacgcacgtggg

SEQ ID NO: 4819546 - DNA, 25 bp, Homo sapien
gaatgggtgggcaacaatgagggaa

SEQ ID NO: 4819547 - DNA, 25 bp, Homo sapien
gaagcaaggactggagcgatgggag

SEQ ID NO: 4819548 - DNA, 25 bp, Homo sapien
agccctgccggcacttcaggcttgg

SEQ ID NO: 4819549 - DNA, 25 bp, Homo sapien
tcaggcttgggatttcggacctccg

SEQ ID NO: 4819550 - DNA, 25 bp, Homo sapien
tccgggatggtgtgcttaaaacact

SEQ ID NO: 4819551 - DNA, 25 bp, Homo sapien
ctgggtggcctctcatgtcccccac

SEQ ID NO: 4819552 - DNA, 25 bp, Homo sapien
ccccaggcgaggggggctgcacagc

SEQ ID NO: 4819553 - DNA, 25 bp, Homo sapien
tggcctctcatgtcccccacaccct

SEQ ID NO: 4819554 - DNA, 25 bp, Homo sapien
cacaccctggcccccaggcgagggg

SEQ ID NO: 4819555 - DNA, 25 bp, Homo sapien
agccgtggacacaggtggcacccag

SEQ ID NO: 4819556 - DNA, 25 bp, Homo sapien
tgaatcctcccgtgggcaaagctgg

SEQ ID NO: 4819557 - DNA, 25 bp, Homo sapien
cagcttgcacagtcatgacatcagg

SEQ ID NO: 4819558 - DNA, 25 bp, Homo sapien
ctgctccgcctggagctcatgcggg

SEQ ID NO: 4819559 - DNA, 25 bp, Homo sapien
tggcacatggttttacagccggcag

SEQ ID NO: 4819560 - DNA, 25 bp, Homo sapien
ttttacagccggcagtgtggccagc

SEQ ID NO: 4819561 - DNA, 25 bp, Homo sapien
agccggcagtgtggccagccagttc

SEQ ID NO: 4819562 - DNA, 25 bp, Homo sapien
tccaggctggagggttttaaagtga

SEQ ID NO: 4819563 - DNA, 25 bp, Homo sapien
gggcactgaggcacggccgctgcag

SEQ ID NO: 4819564 - DNA, 25 bp, Homo sapien
cagggcaagggcttctccttgagca

SEQ ID NO: 4819565 - DNA, 25 bp, Homo sapien
tccttgagcagaagagtcaggcagg

SEQ ID NO: 4819566 - DNA, 25 bp, Homo sapien
gcatgcatggaaggcacagaggacc

SEQ ID NO: 4819567 - DNA, 25 bp, Homo sapien
tgccacagatccagggacgtgacgc

SEQ ID NO: 4819568 - DNA, 25 bp, Homo sapien
acagatccagggacgtgacgcccaa

SEQ ID NO: 4819569 - DNA, 25 bp, Homo sapien
catgtgccacagatccagggacgtg

SEQ ID NO: 4819570 - DNA, 25 bp, Homo sapien
atccagggacgtgacgcccaaagtc

SEQ ID NO: 4819571 - DNA, 25 bp, Homo sapien
caacggactggaagtactgaaacaa

SEQ ID NO: 4819572 - DNA, 25 bp, Homo sapien
agaccaacggactggaagtactgaa

SEQ ID NO: 4819573 - DNA, 25 bp, Homo sapien
cagagaccaacggactggaagtact

SEQ ID NO: 4819574 - DNA, 25 bp, Homo sapien
ccaacggactggaagtactgaaaca

SEQ ID NO: 4819575 - DNA, 25 bp, Homo sapien
tgggcgtagtgtccggagataccaa

SEQ ID NO: 4819576 - DNA, 25 bp, Homo sapien
gtccggagataccaacagccatgtg

SEQ ID NO: 4819577 - DNA, 25 bp, Homo sapien
ctgcttacgcggtgactccggtgtg

SEQ ID NO: 4819578 - DNA, 25 bp, Homo sapien
tggaggtgggcgtagtgtccggaga

SEQ ID NO: 4819579 - DNA, 25 bp, Homo sapien
acgctccaccaagacccgggcccag

SEQ ID NO: 4819580 - DNA, 25 bp, Homo sapien
aaggaggcttccaggcacagacgct

SEQ ID NO: 4819581 - DNA, 25 bp, Homo sapien
gaggcttccaggcacagacgctcca

SEQ ID NO: 4819582 - DNA, 25 bp, Homo sapien
agcaaggaggcttccaggcacagac

SEQ ID NO: 4819583 - DNA, 25 bp, Homo sapien
tttgccctccaagtgacaactacaa

SEQ ID NO: 4819584 - DNA, 25 bp, Homo sapien
attttgccctccaagtgacaactac

SEQ ID NO: 4819585 - DNA, 25 bp, Homo sapien
gccctccaagtgacaactacaattt

SEQ ID NO: 4819586 - DNA, 25 bp, Homo sapien
ccaagtgacaactacaatttcaggg

SEQ ID NO: 4819587 - DNA, 25 bp, Homo sapien
gaattgattcagacgtcccatggga

SEQ ID NO: 4819588 - DNA, 25 bp, Homo sapien
tgtgtccaagcatgaagaacgcagg

SEQ ID NO: 4819589 - DNA, 25 bp, Homo sapien
cactgacttcgatagggccatggta

SEQ ID NO: 4819590 - DNA, 25 bp, Homo sapien
tataaagcaaggagttggtgtcgcc

SEQ ID NO: 4819591 - DNA, 25 bp, Homo sapien
tatggtaacagaaagctcactcagg

SEQ ID NO: 4819592 - DNA, 25 bp, Homo sapien
taaagcccacgtgtgaaagtatggt

SEQ ID NO: 4819593 - DNA, 25 bp, Homo sapien
gagagcggctgtgtcgaacacgata

SEQ ID NO: 4819594 - DNA, 25 bp, Homo sapien
gaatcttccggcagctggtcagttg

SEQ ID NO: 4819595 - DNA, 25 bp, Homo sapien
gaagggactgtcagcttaagtgcat

SEQ ID NO: 4819596 - DNA, 25 bp, Homo sapien
ttaagtgcatcaccttttgggacaa

SEQ ID NO: 4819597 - DNA, 25 bp, Homo sapien
gacaagccgtgacctaacaaaacca

SEQ ID NO: 4819598 - DNA, 25 bp, Homo sapien
gaaacggcacgctcctctgagagca

SEQ ID NO: 4819599 - DNA, 25 bp, Homo sapien
ttaatgaatgatggctgcagttggc

SEQ ID NO: 4819600 - DNA, 25 bp, Homo sapien
cctcatgaccgcgtgccagaagtca

SEQ ID NO: 4819601 - DNA, 25 bp, Homo sapien
gctcggcttgcctactttaaatgag

SEQ ID NO: 4819602 - DNA, 25 bp, Homo sapien
tagagcactacccaaaacttaatga

SEQ ID NO: 4819603 - DNA, 25 bp, Homo sapien
agatttcggtgcttttagtgaactg

SEQ ID NO: 4819604 - DNA, 25 bp, Homo sapien
tgcttttagtgaactggtgttttcc

SEQ ID NO: 4819605 - DNA, 25 bp, Homo sapien
ttctagcggaagacaggctttgcag

SEQ ID NO: 4819606 - DNA, 25 bp, Homo sapien
tcggtgcttttagtgaactggtgtt

SEQ ID NO: 4819607 - DNA, 25 bp, Homo sapien
tgcgagccactgcaaaagcggcatc

SEQ ID NO: 4819608 - DNA, 25 bp, Homo sapien
ttcaagtaagggagctccgtggccc

SEQ ID NO: 4819609 - DNA, 25 bp, Homo sapien
tacagctggccaatatgagggtgtc

SEQ ID NO: 4819610 - DNA, 25 bp, Homo sapien
tcccatagtcacgagattacagctg

SEQ ID NO: 4819611 - DNA, 25 bp, Homo sapien
catcatttacgagtctgggtcaccc

SEQ ID NO: 4819612 - DNA, 25 bp, Homo sapien
tgggtcaccctttggacgccagctg

SEQ ID NO: 4819613 - DNA, 25 bp, Homo sapien
gcacacttcgtacccaaatagatga

SEQ ID NO: 4819614 - DNA, 25 bp, Homo sapien
tcctctgcgtgagatgagcgctgag

SEQ ID NO: 4819615 - DNA, 25 bp, Homo sapien
tggcagccagcatcacgaaacagta

SEQ ID NO: 4819616 - DNA, 25 bp, Homo sapien
tggtgatgttctttggccccgtgcc

SEQ ID NO: 4819617 - DNA, 25 bp, Homo sapien
cagtaaagcgccctgaactggcagc

SEQ ID NO: 4819618 - DNA, 25 bp, Homo sapien
gattgtgagtgcgtccacactgaca

SEQ ID NO: 4819619 - DNA, 25 bp, Homo sapien
tattgctgcctgcacgataaggaag

SEQ ID NO: 4819620 - DNA, 25 bp, Homo sapien
gacaaactgctgatgcctgtcgccg

SEQ ID NO: 4819621 - DNA, 25 bp, Homo sapien
taatttgtagcgacagcgggactgt

SEQ ID NO: 4819622 - DNA, 25 bp, Homo sapien
gataaggaagcgtgtggtgcccaca

SEQ ID NO: 4819623 - DNA, 25 bp, Homo sapien
gtctgcacgctgacgctggtttcct

SEQ ID NO: 4819624 - DNA, 25 bp, Homo sapien
ggtttcctcccaggcgtcaggcaca

SEQ ID NO: 4819625 - DNA, 25 bp, Homo sapien
tatctgcagagctcgctcccagtca

SEQ ID NO: 4819626 - DNA, 25 bp, Homo sapien
gcctgaactgctggtctgcacgctg

SEQ ID NO: 4819627 - DNA, 25 bp, Homo sapien
cacctctccgtgtggaaatctaagc

SEQ ID NO: 4819628 - DNA, 25 bp, Homo sapien
gaataaatctaagccctgggtcgac

SEQ ID NO: 4819629 - DNA, 25 bp, Homo sapien
tccactgctggaagaacgagagcag

SEQ ID NO: 4819630 - DNA, 25 bp, Homo sapien
catctccgcatgcagggtgatcctg

SEQ ID NO: 4819631 - DNA, 25 bp, Homo sapien
atggaattcttgtggggttcgttca

SEQ ID NO: 4819632 - DNA, 25 bp, Homo sapien
tggaattcttgtggggttcgttcac

SEQ ID NO: 4819633 - DNA, 25 bp, Homo sapien
taatcggcttgtttgatttactact

SEQ ID NO: 4819634 - DNA, 25 bp, Homo sapien
ggcttgtttgatttactactgggct

SEQ ID NO: 4819635 - DNA, 25 bp, Homo sapien
cattgtgaataatcggcttgtttga

SEQ ID NO: 4819636 - DNA, 25 bp, Homo sapien
ggcattgtgaataatcggcttgttt

SEQ ID NO: 4819637 - DNA, 25 bp, Homo sapien
cttgggttacggctcagtatgggca

SEQ ID NO: 4819638 - DNA, 25 bp, Homo sapien
aggccagggaagatgccgccgacgc

SEQ ID NO: 4819639 - DNA, 25 bp, Homo sapien
tgtgctcctgcttgggttacggctc

SEQ ID NO: 4819640 - DNA, 25 bp, Homo sapien
gccgacgcggtctcccagtctcggt

SEQ ID NO: 4819641 - DNA, 25 bp, Homo sapien
ctggtattcctgatgacatgattgc

SEQ ID NO: 4819642 - DNA, 25 bp, Homo sapien
ggcactggtattcctgatgacatga

SEQ ID NO: 4819643 - DNA, 25 bp, Homo sapien
tattcctgatgacatgattgcaact

SEQ ID NO: 4819644 - DNA, 25 bp, Homo sapien
tcctgatgacatgattgcaactatt

SEQ ID NO: 4819645 - DNA, 25 bp, Homo sapien
tgcccccggaatgaacgctctcggg

SEQ ID NO: 4819646 - DNA, 25 bp, Homo sapien
agggtgtgcccccggaatgaacgct

SEQ ID NO: 4819647 - DNA, 25 bp, Homo sapien
tgtcgtcgccgcagaggccaaggac

SEQ ID NO: 4819648 - DNA, 25 bp, Homo sapien
aacgctctcgggttctgtcgtcgcc

SEQ ID NO: 4819649 - DNA, 25 bp, Homo sapien
gacggttcatgaacggattccgaca

SEQ ID NO: 4819650 - DNA, 25 bp, Homo sapien
gaacggattccgacagacaagtacc

SEQ ID NO: 4819651 - DNA, 25 bp, Homo sapien
gacaagtacctgtcccctgtacctg

SEQ ID NO: 4819652 - DNA, 25 bp, Homo sapien
acagaaacagacgacggttcatgaa

SEQ ID NO: 4819653 - DNA, 25 bp, Homo sapien
tcggccgcggcttcttcggctttga

SEQ ID NO: 4819654 - DNA, 25 bp, Homo sapien
ttgacttgggcttgccgagcccctg

SEQ ID NO: 4819655 - DNA, 25 bp, Homo sapien
gcttgatgagctcgcgccgcgcctt

SEQ ID NO: 4819656 - DNA, 25 bp, Homo sapien
gagtcgctgcacgactcttcccggt

SEQ ID NO: 4819657 - DNA, 25 bp, Homo sapien
aggaaggccgcccgcttcttggcga

SEQ ID NO: 4819658 - DNA, 25 bp, Homo sapien
agctgctgcttgcgcacgcgggcct

SEQ ID NO: 4819659 - DNA, 25 bp, Homo sapien
ttcttggcgagctcatcttccgctt

SEQ ID NO: 4819660 - DNA, 25 bp, Homo sapien
cgggcttcgtcacgcttgagctcca

SEQ ID NO: 4819661 - DNA, 25 bp, Homo sapien
ttttcccgagacatctgaggagctg

SEQ ID NO: 4819662 - DNA, 25 bp, Homo sapien
tctgctccgaaagaatgttggcatc

SEQ ID NO: 4819663 - DNA, 25 bp, Homo sapien
tcggagaggtccacttcaatgaggc

SEQ ID NO: 4819664 - DNA, 25 bp, Homo sapien
taagcttctcgatggaaaggtcaca

SEQ ID NO: 4819665 - DNA, 25 bp, Homo sapien
agagccacagggtcttttgctttat

SEQ ID NO: 4819666 - DNA, 25 bp, Homo sapien
cagcggagatcaccttatttctctc

SEQ ID NO: 4819667 - DNA, 25 bp, Homo sapien
agccacagggtcttttgctttatgt

SEQ ID NO: 4819668 - DNA, 25 bp, Homo sapien
ggcagcggagatcaccttatttctc

SEQ ID NO: 4819669 - DNA, 25 bp, Homo sapien
catctggcgtggtcttctgggagct

SEQ ID NO: 4819670 - DNA, 25 bp, Homo sapien
gcatttgctgtaaggcctaaggccc

SEQ ID NO: 4819671 - DNA, 25 bp, Homo sapien
caactcgcagcgtgatgtagagcaa

SEQ ID NO: 4819672 - DNA, 25 bp, Homo sapien
tccccgttgtgctgagagtactcct

SEQ ID NO: 4819673 - DNA, 25 bp, Homo sapien
ccaggctattgctgctcctcgaggc

SEQ ID NO: 4819674 - DNA, 25 bp, Homo sapien
tcgaggctgaccatcaactcgggtc

SEQ ID NO: 4819675 - DNA, 25 bp, Homo sapien
ggctattgctgctcctcgaggctga

SEQ ID NO: 4819676 - DNA, 25 bp, Homo sapien
caaagaattcgatcgatgtcgctga

SEQ ID NO: 4819677 - DNA, 25 bp, Homo sapien
ttctgtctcagtggcaataaaggat

SEQ ID NO: 4819678 - DNA, 25 bp, Homo sapien
cctgtatggatttctgctgtttctg

SEQ ID NO: 4819679 - DNA, 25 bp, Homo sapien
ctcagtggcaataaaggatgggatg

SEQ ID NO: 4819680 - DNA, 25 bp, Homo sapien
cagggatgtcctctccctgtatgga

SEQ ID NO: 4819681 - DNA, 25 bp, Homo sapien
acagacacgcaaagaccgaagggag

SEQ ID NO: 4819682 - DNA, 25 bp, Homo sapien
aagggaggacgccaagtgtccacgc

SEQ ID NO: 4819683 - DNA, 25 bp, Homo sapien
agagcagcgtgtacacgggcaccag

SEQ ID NO: 4819684 - DNA, 25 bp, Homo sapien
ctggccccatgtgagggacggctca

SEQ ID NO: 4819685 - DNA, 25 bp, Homo sapien
gcctaggaaactgcgtttggtcgcg

SEQ ID NO: 4819686 - DNA, 25 bp, Homo sapien
tattcaggttcttccgggtgcaggt

SEQ ID NO: 4819687 - DNA, 25 bp, Homo sapien
tttggtcgcgttggagatcggtaca

SEQ ID NO: 4819688 - DNA, 25 bp, Homo sapien
tagtgcctgtgacagccttccgccg

SEQ ID NO: 4819689 - DNA, 25 bp, Homo sapien
tgcctgtaatcccagcactctggga

SEQ ID NO: 4819690 - DNA, 25 bp, Homo sapien
gggatcaatgcaataagaagagctg

SEQ ID NO: 4819691 - DNA, 25 bp, Homo sapien
agagctggcagggcgcagtggttca

SEQ ID NO: 4819692 - DNA, 25 bp, Homo sapien
atcaatgcaataagaagagctggca

SEQ ID NO: 4819693 - DNA, 25 bp, Homo sapien
tctgctgtgcgagaaacatggaacc

SEQ ID NO: 4819694 - DNA, 25 bp, Homo sapien
ttagagctgtgattcgtaaccgaat

SEQ ID NO: 4819695 - DNA, 25 bp, Homo sapien
ttctgatactctaggctctcaagga

SEQ ID NO: 4819696 - DNA, 25 bp, Homo sapien
caacctggggaatatctgtcactca

SEQ ID NO: 4819697 - DNA, 25 bp, Homo sapien
gaaccaccaaaaaagctccgcaata

SEQ ID NO: 4819698 - DNA, 25 bp, Homo sapien
cctgaacatccctgggctgaacaaa

SEQ ID NO: 4819699 - DNA, 25 bp, Homo sapien
aatctggcttgacattctcgaacca

SEQ ID NO: 4819700 - DNA, 25 bp, Homo sapien
atccctgggctgaacaaaatctggc

SEQ ID NO: 4819701 - DNA, 25 bp, Homo sapien
gtatgataagcagtttattcacaca

SEQ ID NO: 4819702 - DNA, 25 bp, Homo sapien
gcagtttattcacacatggttttaa

SEQ ID NO: 4819703 - DNA, 25 bp, Homo sapien
gataagcagtttattcacacatggt

SEQ ID NO: 4819704 - DNA, 25 bp, Homo sapien
ccaaagtatgataagcagtttattc

SEQ ID NO: 4819705 - DNA, 25 bp, Homo sapien
gaattctctcagaagccgaatatta

SEQ ID NO: 4819706 - DNA, 25 bp, Homo sapien
gaatattatacagactgtcggccat

SEQ ID NO: 4819707 - DNA, 25 bp, Homo sapien
tacagcatatcttccaaggtgagat

SEQ ID NO: 4819708 - DNA, 25 bp, Homo sapien
ttcaacactaatggcgcatacagca

SEQ ID NO: 4819709 - DNA, 25 bp, Homo sapien
cgacgttacctcctttaagcatata

SEQ ID NO: 4819710 - DNA, 25 bp, Homo sapien
gacgttacctcctttaagcatatat

SEQ ID NO: 4819711 - DNA, 25 bp, Homo sapien
ttagaagtacgtacaaactggagcc

SEQ ID NO: 4819712 - DNA, 25 bp, Homo sapien
ctttaaagctgaggaactgtgcaca

SEQ ID NO: 4819713 - DNA, 25 bp, Homo sapien
gatcaagtgacaatgcatagcccaa

SEQ ID NO: 4819714 - DNA, 25 bp, Homo sapien
gggtggccctcagacaaagagccct

SEQ ID NO: 4819715 - DNA, 25 bp, Homo sapien
tgttcagagtccagatatatcttag

SEQ ID NO: 4819716 - DNA, 25 bp, Homo sapien
aaatacctactcaacaccaactggc

SEQ ID NO: 4819717 - DNA, 25 bp, Homo sapien
tccttgtttgggagtgacttctgac

SEQ ID NO: 4819718 - DNA, 25 bp, Homo sapien
tgttgagctcacactagcaagtccc

SEQ ID NO: 4819719 - DNA, 25 bp, Homo sapien
tttaagccttttcggatctgtttca

SEQ ID NO: 4819720 - DNA, 25 bp, Homo sapien
taagccttttcggatctgtttcagg

SEQ ID NO: 4819721 - DNA, 25 bp, Homo sapien
ttaagccttttcggatctgtttcag

SEQ ID NO: 4819722 - DNA, 25 bp, Homo sapien
aagccttttcggatctgtttcaggg

SEQ ID NO: 4819723 - DNA, 25 bp, Homo sapien
tgaatcacagctaagagagcagcac

SEQ ID NO: 4819724 - DNA, 25 bp, Homo sapien
aatagtgaatcacagctaagagagc

SEQ ID NO: 4819725 - DNA, 25 bp, Homo sapien
ctctgggcaataatagtgaatcaca

SEQ ID NO: 4819726 - DNA, 25 bp, Homo sapien
tgggcaataatagtgaatcacagct

SEQ ID NO: 4819727 - DNA, 25 bp, Homo sapien
ccaacaacgggaagtagggtgactg

SEQ ID NO: 4819728 - DNA, 25 bp, Homo sapien
tcactgccgtctctcatcaaatcct

SEQ ID NO: 4819729 - DNA, 25 bp, Homo sapien
gcagaaaggtgctctcgtcgatagc

SEQ ID NO: 4819730 - DNA, 25 bp, Homo sapien
aaaggtgctctcgtcgatagcggac

SEQ ID NO: 4819731 - DNA, 25 bp, Homo sapien
tgatgtctcttcactaccatatatg

SEQ ID NO: 4819732 - DNA, 25 bp, Homo sapien
tgtctcttcactaccatatatgtta

SEQ ID NO: 4819733 - DNA, 25 bp, Homo sapien
tcttcactaccatatatgttacagg

SEQ ID NO: 4819734 - DNA, 25 bp, Homo sapien
cactaccatatatgttacaggcaca

SEQ ID NO: 4819735 - DNA, 25 bp, Homo sapien
tggtgaacatcctgacgctcagaag

SEQ ID NO: 4819736 - DNA, 25 bp, Homo sapien
taccgaaagccgacgtactagacac

SEQ ID NO: 4819737 - DNA, 25 bp, Homo sapien
tgggcttcatggctacactgggtaa

SEQ ID NO: 4819738 - DNA, 25 bp, Homo sapien
tacttgctagcaataccagagccag

SEQ ID NO: 4819739 - DNA, 25 bp, Homo sapien
gcccctgtatctgcatgtcagcgaa

SEQ ID NO: 4819740 - DNA, 25 bp, Homo sapien
caaggtgctccagaagacaagtgtc

SEQ ID NO: 4819741 - DNA, 25 bp, Homo sapien
tcaggaggcgaaatccatgcaaggt

SEQ ID NO: 4819742 - DNA, 25 bp, Homo sapien
tcagcgaacaagagcacagacacag

SEQ ID NO: 4819743 - DNA, 25 bp, Homo sapien
ggcacacactacaaaacgtgacccg

SEQ ID NO: 4819744 - DNA, 25 bp, Homo sapien
cttgtttctcgggagcccacggcac

SEQ ID NO: 4819745 - DNA, 25 bp, Homo sapien
ggagcccacggcacacactacaaaa

SEQ ID NO: 4819746 - DNA, 25 bp, Homo sapien
actacaaaacgtgacccgcctcata

SEQ ID NO: 4819747 - DNA, 25 bp, Homo sapien
cacgcgtgcaaactccacgggttcc

SEQ ID NO: 4819748 - DNA, 25 bp, Homo sapien
accacgcgtgcaaactccacgggtt

SEQ ID NO: 4819749 - DNA, 25 bp, Homo sapien
taccacgcgtgcaaactccacgggt

SEQ ID NO: 4819750 - DNA, 25 bp, Homo sapien
tgtaccacgcgtgcaaactccacgg

SEQ ID NO: 4819751 - DNA, 25 bp, Homo sapien
caggtgaaacactccggaactacaa

SEQ ID NO: 4819752 - DNA, 25 bp, Homo sapien
cacacagacagcagacacgtgaggg

SEQ ID NO: 4819753 - DNA, 25 bp, Homo sapien
ggaacacaggcatgcgggaaagcac

SEQ ID NO: 4819754 - DNA, 25 bp, Homo sapien
aatcaggtgctgtgaacctctaggc

SEQ ID NO: 4819755 - DNA, 25 bp, Homo sapien
aggcactaacttccaataccacttg

SEQ ID NO: 4819756 - DNA, 25 bp, Homo sapien
acttccaataccacttggagggaga

SEQ ID NO: 4819757 - DNA, 25 bp, Homo sapien
aacttccaataccacttggagggag

SEQ ID NO: 4819758 - DNA, 25 bp, Homo sapien
cactaacttccaataccacttggag

SEQ ID NO: 4819759 - DNA, 25 bp, Homo sapien
cccacccagctaacaaatgcatggc

SEQ ID NO: 4819760 - DNA, 25 bp, Homo sapien
cattaacttagtgcattccagaaaa

SEQ ID NO: 4819761 - DNA, 25 bp, Homo sapien
aattgggaccaacattaacttagtg

SEQ ID NO: 4819762 - DNA, 25 bp, Homo sapien
gggaccaacattaacttagtgcatt

SEQ ID NO: 4819763 - DNA, 25 bp, Homo sapien
ccaacattaacttagtgcattccag

SEQ ID NO: 4819764 - DNA, 25 bp, Homo sapien
atgagctggactttccaataactgt

SEQ ID NO: 4819765 - DNA, 25 bp, Homo sapien
ttgatgagctggactttccaataac

SEQ ID NO: 4819766 - DNA, 25 bp, Homo sapien
ttttgatgagctggactttccaata

SEQ ID NO: 4819767 - DNA, 25 bp, Homo sapien
gatgagctggactttccaataactg

SEQ ID NO: 4819768 - DNA, 25 bp, Homo sapien
ttcaagtattcctataaaccagaca

SEQ ID NO: 4819769 - DNA, 25 bp, Homo sapien
acacaaaggatatggctggaagact

SEQ ID NO: 4819770 - DNA, 25 bp, Homo sapien
accagacacaaagatcggtggaacc

SEQ ID NO: 4819771 - DNA, 25 bp, Homo sapien
cggtggaaccgaatagaatccagaa

SEQ ID NO: 4819772 - DNA, 25 bp, Homo sapien
cttctcgatgctgatcatctccaca

SEQ ID NO: 4819773 - DNA, 25 bp, Homo sapien
ccttctcgatgctgatcatctccac

SEQ ID NO: 4819774 - DNA, 25 bp, Homo sapien
atcctcgaggtcgtacggaagttct

SEQ ID NO: 4819775 - DNA, 25 bp, Homo sapien
aggaggcaccgagaatggccctgac

SEQ ID NO: 4819776 - DNA, 25 bp, Homo sapien
caaccaaacaaaggcagtgcaggag

SEQ ID NO: 4819777 - DNA, 25 bp, Homo sapien
ggcacaccagtagcaaggcttcaga

SEQ ID NO: 4819778 - DNA, 25 bp, Homo sapien
gaacgctctggaaaaggcacaccag

SEQ ID NO: 4819779 - DNA, 25 bp, Homo sapien
tgcaccaggtgcgccacacgagagc

SEQ ID NO: 4819780 - DNA, 25 bp, Homo sapien
aggtgcgccacacgagagcccacgg

SEQ ID NO: 4819781 - DNA, 25 bp, Homo sapien
cacacgagagcccacggctccagag

SEQ ID NO: 4819782 - DNA, 25 bp, Homo sapien
accaggtgcgccacacgagagccca

SEQ ID NO: 4819783 - DNA, 25 bp, Homo sapien
ggggcggccaccgcagaccactcac

SEQ ID NO: 4819784 - DNA, 25 bp, Homo sapien
tgggggcggccaccgcagaccactc

SEQ ID NO: 4819785 - DNA, 25 bp, Homo sapien
ctgggggcggccaccgcagaccact

SEQ ID NO: 4819786 - DNA, 25 bp, Homo sapien
gggggcggccaccgcagaccactca

SEQ ID NO: 4819787 - DNA, 25 bp, Homo sapien
actggtgtccctgtaaggcggccac

SEQ ID NO: 4819788 - DNA, 25 bp, Homo sapien
catactggtcaacgtagaaagggtc

SEQ ID NO: 4819789 - DNA, 25 bp, Homo sapien
tctgtcacgggggtgtcatcactct

SEQ ID NO: 4819790 - DNA, 25 bp, Homo sapien
gatgaggctgcagacacggcagtac

SEQ ID NO: 4819791 - DNA, 25 bp, Homo sapien
gaaaccagcacaggctaggaccatg

SEQ ID NO: 4819792 - DNA, 25 bp, Homo sapien
ccactaaagacggaggacgagggat

SEQ ID NO: 4819793 - DNA, 25 bp, Homo sapien
gcagcatacacacgggacaccgaat

SEQ ID NO: 4819794 - DNA, 25 bp, Homo sapien
ccatttttggaccaggcagcatcaa

SEQ ID NO: 4819795 - DNA, 25 bp, Homo sapien
cagctgtggcagtactaagtgggaa

SEQ ID NO: 4819796 - DNA, 25 bp, Homo sapien
ctgagtaaagggtaccaaggatctc

SEQ ID NO: 4819797 - DNA, 25 bp, Homo sapien
ggccacagttgaccaaaggttactg

SEQ ID NO: 4819798 - DNA, 25 bp, Homo sapien
agggcaacagtagaggtcctcctgg

SEQ ID NO: 4819799 - DNA, 25 bp, Homo sapien
ccactgcaggttggcggcgatcttg

SEQ ID NO: 4819800 - DNA, 25 bp, Homo sapien
atcttggcgcgcgccgcgtcgtagc

SEQ ID NO: 4819801 - DNA, 25 bp, Homo sapien
aggccttggcgcagatccactgcag

SEQ ID NO: 4819802 - DNA, 25 bp, Homo sapien
tcggccgtaggccttggcgcagatc

SEQ ID NO: 4819803 - DNA, 25 bp, Homo sapien
cctaatataataccggcggagtttg

SEQ ID NO: 4819804 - DNA, 25 bp, Homo sapien
gttacagtgttttgggcgtaagcaa

SEQ ID NO: 4819805 - DNA, 25 bp, Homo sapien
gagaaagttatccttaaccaagatg

SEQ ID NO: 4819806 - DNA, 25 bp, Homo sapien
ttattgaagccatttgggtctgggc

SEQ ID NO: 4819807 - DNA, 25 bp, Homo sapien
agcgggccggcccatcagaccctcc

SEQ ID NO: 4819808 - DNA, 25 bp, Homo sapien
ccagatatccccagcgggccggccc

SEQ ID NO: 4819809 - DNA, 25 bp, Homo sapien
gagcccttcgccttctcagtggccc

SEQ ID NO: 4819810 - DNA, 25 bp, Homo sapien
tctgagcccttcgccttctcagtgg

SEQ ID NO: 4819811 - DNA, 25 bp, Homo sapien
agtttgggggcatcgattagttcat

SEQ ID NO: 4819812 - DNA, 25 bp, Homo sapien
catagaggatgtaaaacggagggat

SEQ ID NO: 4819813 - DNA, 25 bp, Homo sapien
ttttcatgaactttctgggaaatga

SEQ ID NO: 4819814 - DNA, 25 bp, Homo sapien
ttggtttttcatgaactttctggga

SEQ ID NO: 4819815 - DNA, 25 bp, Homo sapien
agaacactgtcatgccctgggaagg

SEQ ID NO: 4819816 - DNA, 25 bp, Homo sapien
tgccttcaaggttcacgcgtgtcgc

SEQ ID NO: 4819817 - DNA, 25 bp, Homo sapien
caaactcagccgtgctaaggtggac

SEQ ID NO: 4819818 - DNA, 25 bp, Homo sapien
accaatgggcttcgtgttgtcgcca

SEQ ID NO: 4819819 - DNA, 25 bp, Homo sapien
ttccaagcctccactgggcacagaa

SEQ ID NO: 4819820 - DNA, 25 bp, Homo sapien
agctgcttgcaggtgccacacccga

SEQ ID NO: 4819821 - DNA, 25 bp, Homo sapien
actgggcacagaaagctgcttgcag

SEQ ID NO: 4819822 - DNA, 25 bp, Homo sapien
ttgcaggtgccacacccgactcccg

SEQ ID NO: 4819823 - DNA, 25 bp, Homo sapien
ccgcctgttccagcgagtgttttcc

SEQ ID NO: 4819824 - DNA, 25 bp, Homo sapien
ttccagcgagtgttttccaagtgcc

SEQ ID NO: 4819825 - DNA, 25 bp, Homo sapien
tgttccagcgagtgttttccaagtg

SEQ ID NO: 4819826 - DNA, 25 bp, Homo sapien
cctgttccagcgagtgttttccaag

SEQ ID NO: 4819827 - DNA, 25 bp, Homo sapien
agaacccatctacggacggcccgca

SEQ ID NO: 4819828 - DNA, 25 bp, Homo sapien
gagcagaaaccacattcaccagggc

SEQ ID NO: 4819829 - DNA, 25 bp, Homo sapien
accagggcagctgcgacgtgctcca

SEQ ID NO: 4819830 - DNA, 25 bp, Homo sapien
acgtgctccagaacccatctacgga

SEQ ID NO: 4819831 - DNA, 25 bp, Homo sapien
cgaggaaaggcactggcacacactt

SEQ ID NO: 4819832 - DNA, 25 bp, Homo sapien
ccaccttgtggacgctcaggccaca

SEQ ID NO: 4819833 - DNA, 25 bp, Homo sapien
gaacccgtggaaagcacggctccac

SEQ ID NO: 4819834 - DNA, 25 bp, Homo sapien
cgggagcgaacgcagcatctccgag

SEQ ID NO: 4819835 - DNA, 25 bp, Homo sapien
tctcattttaagacaccggtcatgt

SEQ ID NO: 4819836 - DNA, 25 bp, Homo sapien
ttcaaaacaaacagctcggaactga

SEQ ID NO: 4819837 - DNA, 25 bp, Homo sapien
gactgcttccagcaacaataatgag

SEQ ID NO: 4819838 - DNA, 25 bp, Homo sapien
cagctacaatgcaagcagagttcag

SEQ ID NO: 4819839 - DNA, 25 bp, Homo sapien
tgtgtcccaggaatacgggctcagc

SEQ ID NO: 4819840 - DNA, 25 bp, Homo sapien
aacacgaggctttgccaaccaaaca

SEQ ID NO: 4819841 - DNA, 25 bp, Homo sapien
cgggctcagctccagtcccttaaac

SEQ ID NO: 4819842 - DNA, 25 bp, Homo sapien
cttaaacccaatacaacacgaggct

SEQ ID NO: 4819843 - DNA, 25 bp, Homo sapien
cctgatagccgagtggaacaacgcc

SEQ ID NO: 4819844 - DNA, 25 bp, Homo sapien
tacctccgtcaaataacaagtggac

SEQ ID NO: 4819845 - DNA, 25 bp, Homo sapien
tgtctacacggcaattcaagcagca

SEQ ID NO: 4819846 - DNA, 25 bp, Homo sapien
catgcttgacattaactctgggttg

SEQ ID NO: 4819847 - DNA, 25 bp, Homo sapien
tgggtgctgttcagtgggttctcca

SEQ ID NO: 4819848 - DNA, 25 bp, Homo sapien
aggccccgtttctggatcattcatc

SEQ ID NO: 4819849 - DNA, 25 bp, Homo sapien
ggccccgtttctggatcattcatcc

SEQ ID NO: 4819850 - DNA, 25 bp, Homo sapien
ctgttcagtgggttctccagcatgt

SEQ ID NO: 4819851 - DNA, 25 bp, Homo sapien
tgggtacaaagaagatccctacctc

SEQ ID NO: 4819852 - DNA, 25 bp, Homo sapien
cctaaggtatacaaacagctggaga

SEQ ID NO: 4819853 - DNA, 25 bp, Homo sapien
ggcagcacacactaacatcctaagg

SEQ ID NO: 4819854 - DNA, 25 bp, Homo sapien
agatcttgcatggacagtggcgcca

SEQ ID NO: 4819855 - DNA, 25 bp, Homo sapien
tccccgacccgagacttagcataaa

SEQ ID NO: 4819856 - DNA, 25 bp, Homo sapien
tcagcgctggatcctccgtatcgcc

SEQ ID NO: 4819857 - DNA, 25 bp, Homo sapien
gtatcgcctccgcagcacctatttg

SEQ ID NO: 4819858 - DNA, 25 bp, Homo sapien
cttagcataaagaaggcgcacatac

SEQ ID NO: 4819859 - DNA, 25 bp, Homo sapien
tgcaccaccgggttatccaggatgg

SEQ ID NO: 4819860 - DNA, 25 bp, Homo sapien
ctgcaccaccgggttatccaggatg

SEQ ID NO: 4819861 - DNA, 25 bp, Homo sapien
gcaccaccgggttatccaggatggc

SEQ ID NO: 4819862 - DNA, 25 bp, Homo sapien
agctgcaccaccgggttatccagga

SEQ ID NO: 4819863 - DNA, 25 bp, Homo sapien
gctcctccggagagggcttccggtc

SEQ ID NO: 4819864 - DNA, 25 bp, Homo sapien
gactgtcggggtcgatgcccttgtc

SEQ ID NO: 4819865 - DNA, 25 bp, Homo sapien
ccagctcctccggagagggcttccg

SEQ ID NO: 4819866 - DNA, 25 bp, Homo sapien
tgtcggggtcgatgcccttgtccag

SEQ ID NO: 4819867 - DNA, 25 bp, Homo sapien
gttgttgttcactctgagggcatct

SEQ ID NO: 4819868 - DNA, 25 bp, Homo sapien
tttctcgtcgaaccccatctccatc

SEQ ID NO: 4819869 - DNA, 25 bp, Homo sapien
gggcatctatcacctctttctcgtc

SEQ ID NO: 4819870 - DNA, 25 bp, Homo sapien
tggttgttgttcactctgagggcat

SEQ ID NO: 4819871 - DNA, 25 bp, Homo sapien
tgtgacaggtagaaacgcatcgctt

SEQ ID NO: 4819872 - DNA, 25 bp, Homo sapien
ttatgtggacacgaggcagtcaggc

SEQ ID NO: 4819873 - DNA, 25 bp, Homo sapien
gcattagggaaaggccacgtcagta

SEQ ID NO: 4819874 - DNA, 25 bp, Homo sapien
ccttgttacccaaagagaagtggca

SEQ ID NO: 4819875 - DNA, 25 bp, Homo sapien
acacgagagtgcgaagtccaacctc

SEQ ID NO: 4819876 - DNA, 25 bp, Homo sapien
aacctcagagcacaagggacccagc

SEQ ID NO: 4819877 - DNA, 25 bp, Homo sapien
tccaagagaccgtgcaggaccacaa

SEQ ID NO: 4819878 - DNA, 25 bp, Homo sapien
aagggacccagctggagagtgactg

SEQ ID NO: 4819879 - DNA, 25 bp, Homo sapien
gaaacgatcagtgccacacgagacg

SEQ ID NO: 4819880 - DNA, 25 bp, Homo sapien
cgagacgacagcatgcagatggagc

SEQ ID NO: 4819881 - DNA, 25 bp, Homo sapien
tccatggaaaacacgagctccgcag

SEQ ID NO: 4819882 - DNA, 25 bp, Homo sapien
gaaaagcatttgtctccacggaacc

SEQ ID NO: 4819883 - DNA, 25 bp, Homo sapien
ggtcttctgcgtgttcaattagcca

SEQ ID NO: 4819884 - DNA, 25 bp, Homo sapien
ggatcttcttgaagatttccgtcag

SEQ ID NO: 4819885 - DNA, 25 bp, Homo sapien
tctggcctcctcatcggtggcgctg

SEQ ID NO: 4819886 - DNA, 25 bp, Homo sapien
gcgtgtctatggtcgggtcttctgc

SEQ ID NO: 4819887 - DNA, 25 bp, Homo sapien
catgtctaaggagaggcaagcggac

SEQ ID NO: 4819888 - DNA, 25 bp, Homo sapien
tgagttctcatacaacggcccaaag

SEQ ID NO: 4819889 - DNA, 25 bp, Homo sapien
cagaagcagggcaagtaactcacac

SEQ ID NO: 4819890 - DNA, 25 bp, Homo sapien
tgctgagggcttagatagggaccac

SEQ ID NO: 4819891 - DNA, 25 bp, Homo sapien
gcctcgtccacacgctcatcctcgt

SEQ ID NO: 4819892 - DNA, 25 bp, Homo sapien
tccggaaagcccatctccgtgagct

SEQ ID NO: 4819893 - DNA, 25 bp, Homo sapien
gctctgttctccggaaagcccatct

SEQ ID NO: 4819894 - DNA, 25 bp, Homo sapien
tgagctgccgcagggcagcctcgtc

SEQ ID NO: 4819895 - DNA, 25 bp, Homo sapien
ttcagcgctaacagcttctgcgcca

SEQ ID NO: 4819896 - DNA, 25 bp, Homo sapien
ccttcttaaacaattccactgcatc

SEQ ID NO: 4819897 - DNA, 25 bp, Homo sapien
tcttaaacaattccactgcatctgg

SEQ ID NO: 4819898 - DNA, 25 bp, Homo sapien
cactgcatctgggttcagcgctaac

SEQ ID NO: 4819899 - DNA, 25 bp, Homo sapien
gacaccagtatcttccggagttctg

SEQ ID NO: 4819900 - DNA, 25 bp, Homo sapien
gagagacaccagtatcttccggagt

SEQ ID NO: 4819901 - DNA, 25 bp, Homo sapien
gtatcttccggagttctgtctggaa

SEQ ID NO: 4819902 - DNA, 25 bp, Homo sapien
ctcgatgagagacaccagtatcttc

SEQ ID NO: 4819903 - DNA, 25 bp, Homo sapien
tggaagacaccccaagaggttcatt

SEQ ID NO: 4819904 - DNA, 25 bp, Homo sapien
ggaagacaccccaagaggttcattc

SEQ ID NO: 4819905 - DNA, 25 bp, Homo sapien
ctctggaagacaccccaagaggttc

SEQ ID NO: 4819906 - DNA, 25 bp, Homo sapien
actctctggaagacaccccaagagg

SEQ ID NO: 4819907 - DNA, 25 bp, Homo sapien
cagagaatctcctcttgctgccccg

SEQ ID NO: 4819908 - DNA, 25 bp, Homo sapien
tgcacccgccgccgctctgggctga

SEQ ID NO: 4819909 - DNA, 25 bp, Homo sapien
caatcccccacacggggaccccatg

SEQ ID NO: 4819910 - DNA, 25 bp, Homo sapien
gggaccccatgcacccgccgccgct

SEQ ID NO: 4819911 - DNA, 25 bp, Homo sapien
ccgcggcccggtccatgttgtagga

SEQ ID NO: 4819912 - DNA, 25 bp, Homo sapien
gcggtggcccgcagtatggcctctt

SEQ ID NO: 4819913 - DNA, 25 bp, Homo sapien
gtctctcatgttggtctggaccgcg

SEQ ID NO: 4819914 - DNA, 25 bp, Homo sapien
catgttgtaggagggcaggttggcg

SEQ ID NO: 4819915 - DNA, 25 bp, Homo sapien
aggcagaactcgaggacggccgcac

SEQ ID NO: 4819916 - DNA, 25 bp, Homo sapien
cgtgcgtggctgcacagcatgagca

SEQ ID NO: 4819917 - DNA, 25 bp, Homo sapien
ccccgggcctggcagttgcccgtgc

SEQ ID NO: 4819918 - DNA, 25 bp, Homo sapien
agaactcgaggacggccgcacgctc

SEQ ID NO: 4819919 - DNA, 25 bp, Homo sapien
aggacacgccacttgcagaacgcat

SEQ ID NO: 4819920 - DNA, 25 bp, Homo sapien
caaaacatgagcttctagggcagcc

SEQ ID NO: 4819921 - DNA, 25 bp, Homo sapien
tgggcctagcccaaaagagtttgac

SEQ ID NO: 4819922 - DNA, 25 bp, Homo sapien
tagcttatgcactaccaggcatggg

SEQ ID NO: 4819923 - DNA, 25 bp, Homo sapien
ggccactctctgcatgcgcagccct

SEQ ID NO: 4819924 - DNA, 25 bp, Homo sapien
cactttcctccgtttttctgtcagg

SEQ ID NO: 4819925 - DNA, 25 bp, Homo sapien
tctgcatgcgcagcccttattctgt

SEQ ID NO: 4819926 - DNA, 25 bp, Homo sapien
cactctctgcatgcgcagcccttat

SEQ ID NO: 4819927 - DNA, 25 bp, Homo sapien
cttgggaagtggtgatggagcacgc

SEQ ID NO: 4819928 - DNA, 25 bp, Homo sapien
gatggagcacgcttttttatcaata

SEQ ID NO: 4819929 - DNA, 25 bp, Homo sapien
acatcagccatcttgggaagtggtg

SEQ ID NO: 4819930 - DNA, 25 bp, Homo sapien
ttctgctgagacatcagccatcttg

SEQ ID NO: 4819931 - DNA, 25 bp, Homo sapien
ggatggtcctggcatcactcagcac

SEQ ID NO: 4819932 - DNA, 25 bp, Homo sapien
gatcttctaagctcccatgagcaca

SEQ ID NO: 4819933 - DNA, 25 bp, Homo sapien
cctctctgaggcagcgtggattaat

SEQ ID NO: 4819934 - DNA, 25 bp, Homo sapien
gatgggttatacttttgggatcttc

SEQ ID NO: 4819935 - DNA, 25 bp, Homo sapien
cgaaagtactgtatgcgagcagcta

SEQ ID NO: 4819936 - DNA, 25 bp, Homo sapien
aacataccggcccttgaacgcagga

SEQ ID NO: 4819937 - DNA, 25 bp, Homo sapien
cccgatggttgttcagacggcaaaa

SEQ ID NO: 4819938 - DNA, 25 bp, Homo sapien
gccaagcttgcctctgacagttcca

SEQ ID NO: 4819939 - DNA, 25 bp, Homo sapien
gtcccgcagcggcactatttcaggg

SEQ ID NO: 4819940 - DNA, 25 bp, Homo sapien
cagcggcactatttcagggactcca

SEQ ID NO: 4819941 - DNA, 25 bp, Homo sapien
tcagggactccagctaaaaggcaca

SEQ ID NO: 4819942 - DNA, 25 bp, Homo sapien
ccgcagcggcactatttcagggact

SEQ ID NO: 4819943 - DNA, 25 bp, Homo sapien
ttgaggcagcgctccttgagcttct

SEQ ID NO: 4819944 - DNA, 25 bp, Homo sapien
gtcggacgcgcagatgtgcagccgc

SEQ ID NO: 4819945 - DNA, 25 bp, Homo sapien
cttgcccgcgaagatcttctcctcc

SEQ ID NO: 4819946 - DNA, 25 bp, Homo sapien
ttgagcttctccaccgaggtgtcct

SEQ ID NO: 4819947 - DNA, 25 bp, Homo sapien
ggccgccgtcactctccgcggcctc

SEQ ID NO: 4819948 - DNA, 25 bp, Homo sapien
cgcgcgctccttcgctgggccgccg

SEQ ID NO: 4819949 - DNA, 25 bp, Homo sapien
accgcccgcgcgctccttcgctggg

SEQ ID NO: 4819950 - DNA, 25 bp, Homo sapien
gcggcctcagcggtcgcctcgctcc

SEQ ID NO: 4819951 - DNA, 25 bp, Homo sapien
taaaggtaaaatacacgctggatcc

SEQ ID NO: 4819952 - DNA, 25 bp, Homo sapien
cgctggatcccaaagaagtaacggg

SEQ ID NO: 4819953 - DNA, 25 bp, Homo sapien
cacgtgggacctcatgggttctaaa

SEQ ID NO: 4819954 - DNA, 25 bp, Homo sapien
tgtggccaccgcaaaggaagtgcgt

SEQ ID NO: 4819955 - DNA, 25 bp, Homo sapien
ggaggtggtggtagtatcgtggaag

SEQ ID NO: 4819956 - DNA, 25 bp, Homo sapien
caccaggatacagtcctggaatggg

SEQ ID NO: 4819957 - DNA, 25 bp, Homo sapien
taccgactgttagagaccgcagtgg

SEQ ID NO: 4819958 - DNA, 25 bp, Homo sapien
gggcatttttaacgcaggaagcaga

SEQ ID NO: 4819959 - DNA, 25 bp, Homo sapien
ccctgcctcgtttggtctgggcgta

SEQ ID NO: 4819960 - DNA, 25 bp, Homo sapien
gcggtggcgtcagccctcggaactc

SEQ ID NO: 4819961 - DNA, 25 bp, Homo sapien
tttggtctgggcgtagctgcccaag

SEQ ID NO: 4819962 - DNA, 25 bp, Homo sapien
caggccaggtgcgttgtcctggagc

SEQ ID NO: 4819963 - DNA, 25 bp, Homo sapien
cagggtattgtcatgcaggtcccgg

SEQ ID NO: 4819964 - DNA, 25 bp, Homo sapien
aaatgtgacttcgatggtagggacc

SEQ ID NO: 4819965 - DNA, 25 bp, Homo sapien
gacttcgatggtagggacccacagg

SEQ ID NO: 4819966 - DNA, 25 bp, Homo sapien
tcccagcaaccagggtattgtcatg

SEQ ID NO: 4819967 - DNA, 25 bp, Homo sapien
tctgagcgggcctactttccggaag

SEQ ID NO: 4819968 - DNA, 25 bp, Homo sapien
tctgcgtgctctgggctgaaatggc

SEQ ID NO: 4819969 - DNA, 25 bp, Homo sapien
aatcatgtcacagcgtctgagcggg

SEQ ID NO: 4819970 - DNA, 25 bp, Homo sapien
gaaatggcattcgtggaacttgcag

SEQ ID NO: 4819971 - DNA, 25 bp, Homo sapien
acttgtcagctaagccgcaggaggc

SEQ ID NO: 4819972 - DNA, 25 bp, Homo sapien
gatgcaggaagcattcggcaccatt

SEQ ID NO: 4819973 - DNA, 25 bp, Homo sapien
tgtgataatggcctctgaagatgca

SEQ ID NO: 4819974 - DNA, 25 bp, Homo sapien
accgtctgcggtgatgacctaatgc

SEQ ID NO: 4819975 - DNA, 25 bp, Homo sapien
gtgacttccttgctgaatatttcat

SEQ ID NO: 4819976 - DNA, 25 bp, Homo sapien
cactgaactctaccagagggaggcc

SEQ ID NO: 4819977 - DNA, 25 bp, Homo sapien
gcagagccgagctgccggaaaccag

SEQ ID NO: 4819978 - DNA, 25 bp, Homo sapien
ccgagctgccggaaaccagcaacag

SEQ ID NO: 4819979 - DNA, 25 bp, Homo sapien
gccctttgaaggcatgacaatcggg

SEQ ID NO: 4819980 - DNA, 25 bp, Homo sapien
ccagctagtgatgggggtcatcccc

SEQ ID NO: 4819981 - DNA, 25 bp, Homo sapien
cacccagggaacacccatggctgaa

SEQ ID NO: 4819982 - DNA, 25 bp, Homo sapien
catggctgaaccagcacagccggag

SEQ ID NO: 4819983 - DNA, 25 bp, Homo sapien
gcaggcaatgcaggaccacggccct

SEQ ID NO: 4819984 - DNA, 25 bp, Homo sapien
cccgcaggagccactgtgatgtcct

SEQ ID NO: 4819985 - DNA, 25 bp, Homo sapien
ttggctcggcccgtggaaaccatga

SEQ ID NO: 4819986 - DNA, 25 bp, Homo sapien
gctccaggtggacgcttcgttcttg

SEQ ID NO: 4819987 - DNA, 25 bp, Homo sapien
atgctccaggtggacgcttcgttct

SEQ ID NO: 4819988 - DNA, 25 bp, Homo sapien
ccatgaaaagtggaggtcctgtgtg

SEQ ID NO: 4819989 - DNA, 25 bp, Homo sapien
agcaacaccacgggcaccgtttcca

SEQ ID NO: 4819990 - DNA, 25 bp, Homo sapien
acagcaacaccacgggcaccgtttc

SEQ ID NO: 4819991 - DNA, 25 bp, Homo sapien
acacagcaacaccacgggcaccgtt

SEQ ID NO: 4819992 - DNA, 25 bp, Homo sapien
caacaccacgggcaccgtttccacg

SEQ ID NO: 4819993 - DNA, 25 bp, Homo sapien
caagggtcgggccggagagaggcct

SEQ ID NO: 4819994 - DNA, 25 bp, Homo sapien
catgacaagggtcgggccggagaga

SEQ ID NO: 4819995 - DNA, 25 bp, Homo sapien
gacaagggtcgggccggagagaggc

SEQ ID NO: 4819996 - DNA, 25 bp, Homo sapien
atgacaagggtcgggccggagagag

SEQ ID NO: 4819997 - DNA, 25 bp, Homo sapien
ggcttggcccgttcacgttcacgga

SEQ ID NO: 4819998 - DNA, 25 bp, Homo sapien
taaagcagccctaaggttggccggc

SEQ ID NO: 4819999 - DNA, 25 bp, Homo sapien
tcagcaagaacgtggcttcagcttc

SEQ ID NO: 4820000 - DNA, 25 bp, Homo sapien
tcgcccgctgtcagcaagaacgtgg

SEQ ID NO: 4820001 - DNA, 25 bp, Homo sapien
agctgcggacattcctgggctgctg

SEQ ID NO: 4820002 - DNA, 25 bp, Homo sapien
ccagagctgcggacattcctgggct

SEQ ID NO: 4820003 - DNA, 25 bp, Homo sapien
tcctggccgactgatgagggacatg

SEQ ID NO: 4820004 - DNA, 25 bp, Homo sapien
tctccaggaagggtcctggccgact

SEQ ID NO: 4820005 - DNA, 25 bp, Homo sapien
aaagccgtgggtcctgctgacacag

SEQ ID NO: 4820006 - DNA, 25 bp, Homo sapien
cctgatgcctcagccggtttctgtc

SEQ ID NO: 4820007 - DNA, 25 bp, Homo sapien
agccgtgggtcctgctgacacagcg

SEQ ID NO: 4820008 - DNA, 25 bp, Homo sapien
ggacaaagccgtgggtcctgctgac

SEQ ID NO: 4820009 - DNA, 25 bp, Homo sapien
gactggaacactccgtgttccctgg

SEQ ID NO: 4820010 - DNA, 25 bp, Homo sapien
cggatacacttaccctggaggcctg

SEQ ID NO: 4820011 - DNA, 25 bp, Homo sapien
tgcaggtgtgcatccaagctgtctg

SEQ ID NO: 4820012 - DNA, 25 bp, Homo sapien
tctccaggaagttgagtcggataca

SEQ ID NO: 4820013 - DNA, 25 bp, Homo sapien
ttccactgtctgaaacggctctgag

SEQ ID NO: 4820014 - DNA, 25 bp, Homo sapien
cagccatggctaaaaagtaacagtc

SEQ ID NO: 4820015 - DNA, 25 bp, Homo sapien
cggctctgagcacgcttgaagccct

SEQ ID NO: 4820016 - DNA, 25 bp, Homo sapien
agttattgatacaatgtcagccatg

SEQ ID NO: 4820017 - DNA, 25 bp, Homo sapien
taaatgctccggtggtgacgtgcac

SEQ ID NO: 4820018 - DNA, 25 bp, Homo sapien
ttagtgcaaaatgctcggcctggcc

SEQ ID NO: 4820019 - DNA, 25 bp, Homo sapien
ctaacaatggaagcgactgatcgga

SEQ ID NO: 4820020 - DNA, 25 bp, Homo sapien
gacagaattcaagtaccgaggcacc

SEQ ID NO: 4820021 - DNA, 25 bp, Homo sapien
aggaaggcttggtccaggttcccag

SEQ ID NO: 4820022 - DNA, 25 bp, Homo sapien
aaggcttggtccaggttcccagcgg

SEQ ID NO: 4820023 - DNA, 25 bp, Homo sapien
gcggcttcctcccatctccgaggaa

SEQ ID NO: 4820024 - DNA, 25 bp, Homo sapien
ggcttcctcccatctccgaggaagg

SEQ ID NO: 4820025 - DNA, 25 bp, Homo sapien
gccgcccagtgggaatgcgtctaac

SEQ ID NO: 4820026 - DNA, 25 bp, Homo sapien
gagaaaggctccctctaggctgggt

SEQ ID NO: 4820027 - DNA, 25 bp, Homo sapien
ccgaggttagcgtccacagtgcctg

SEQ ID NO: 4820028 - DNA, 25 bp, Homo sapien
tgagctcagcttcacacgtactagt

SEQ ID NO: 4820029 - DNA, 25 bp, Homo sapien
gtttgtattagtaacgcatgcaagc

SEQ ID NO: 4820030 - DNA, 25 bp, Homo sapien
tctcaggcaacagtagcagttcagt

SEQ ID NO: 4820031 - DNA, 25 bp, Homo sapien
gtaacgcatgcaagcagctctagta

SEQ ID NO: 4820032 - DNA, 25 bp, Homo sapien
taagtggcttgatcacatttgtttg

SEQ ID NO: 4820033 - DNA, 25 bp, Homo sapien
ggccgccggcgtctggggcctgctg

SEQ ID NO: 4820034 - DNA, 25 bp, Homo sapien
gctctggccatcggcgggcagcggc

SEQ ID NO: 4820035 - DNA, 25 bp, Homo sapien
gccgccggcgtctggggcctgctgg

SEQ ID NO: 4820036 - DNA, 25 bp, Homo sapien
tggccatcggcgggcagcggctcgg

SEQ ID NO: 4820037 - DNA, 25 bp, Homo sapien
tcagttctcagagccacgatggtgg

SEQ ID NO: 4820038 - DNA, 25 bp, Homo sapien
atgcgttgctcgaacacctgtgccg

SEQ ID NO: 4820039 - DNA, 25 bp, Homo sapien
tcaggtcaacattcacggcgtcagt

SEQ ID NO: 4820040 - DNA, 25 bp, Homo sapien
catgtccgcggcgatcacgttcatc

SEQ ID NO: 4820041 - DNA, 25 bp, Homo sapien
caccccattcctctggaacagtctc

SEQ ID NO: 4820042 - DNA, 25 bp, Homo sapien
gaggtcacgtttctcactgctcggc

SEQ ID NO: 4820043 - DNA, 25 bp, Homo sapien
gggcggcgtgagctcagccacctgc

SEQ ID NO: 4820044 - DNA, 25 bp, Homo sapien
tcacgtttctcactgctcggcctgg

SEQ ID NO: 4820045 - DNA, 25 bp, Homo sapien
taacacctcgagacctggcttctga

SEQ ID NO: 4820046 - DNA, 25 bp, Homo sapien
gaagccggccgaacagatggcaaag

SEQ ID NO: 4820047 - DNA, 25 bp, Homo sapien
ttaaaatagtttcgcagctgaattc

SEQ ID NO: 4820048 - DNA, 25 bp, Homo sapien
atagtgcttcttgggccgagggcca

SEQ ID NO: 4820049 - DNA, 25 bp, Homo sapien
ccacccgagagacccccaggctctt

SEQ ID NO: 4820050 - DNA, 25 bp, Homo sapien
cacccgagagacccccaggctctta

SEQ ID NO: 4820051 - DNA, 25 bp, Homo sapien
tcgctggtggacgagcggatgccag

SEQ ID NO: 4820052 - DNA, 25 bp, Homo sapien
ggctgtccagcggcttccggctggg

SEQ ID NO: 4820053 - DNA, 25 bp, Homo sapien
atttcacagcgttcaggacccggct

SEQ ID NO: 4820054 - DNA, 25 bp, Homo sapien
acgagcggatgccagtcccgcagct

SEQ ID NO: 4820055 - DNA, 25 bp, Homo sapien
ccttggctggtctgcgtgtgtccca

SEQ ID NO: 4820056 - DNA, 25 bp, Homo sapien
ctggtctgcgtgtgtcccagtggca

SEQ ID NO: 4820057 - DNA, 25 bp, Homo sapien
agtggcaggagccggcccagccacc

SEQ ID NO: 4820058 - DNA, 25 bp, Homo sapien
cccagtggcaggagccggcccagcc

SEQ ID NO: 4820059 - DNA, 25 bp, Homo sapien
tggccgcgtgtgatgtagaccccag

SEQ ID NO: 4820060 - DNA, 25 bp, Homo sapien
agcaagaccttatgcttcacccctg

SEQ ID NO: 4820061 - DNA, 25 bp, Homo sapien
aggagcctccgcagcaagaccttat

SEQ ID NO: 4820062 - DNA, 25 bp, Homo sapien
ttatgcttcacccctgcacacaggt

SEQ ID NO: 4820063 - DNA, 25 bp, Homo sapien
tttgcatacaatagatgggtgggag

SEQ ID NO: 4820064 - DNA, 25 bp, Homo sapien
gtgatgagtacattgttcagagctc

SEQ ID NO: 4820065 - DNA, 25 bp, Homo sapien
ttttgactgattggtgatgagtaca

SEQ ID NO: 4820066 - DNA, 25 bp, Homo sapien
aataaatgaggacatttgcatacaa

SEQ ID NO: 4820067 - DNA, 25 bp, Homo sapien
ggtatccgatctggctgatgaggct

SEQ ID NO: 4820068 - DNA, 25 bp, Homo sapien
ccccttccgagtagagcttgggatg

SEQ ID NO: 4820069 - DNA, 25 bp, Homo sapien
ggctggcaggtagggccacgaggtc

SEQ ID NO: 4820070 - DNA, 25 bp, Homo sapien
acgcaggagcggctctccagcggca

SEQ ID NO: 4820071 - DNA, 25 bp, Homo sapien
tggcagagacaggacggctcatccc

SEQ ID NO: 4820072 - DNA, 25 bp, Homo sapien
cctgagcctgggtctcgggtactgg

SEQ ID NO: 4820073 - DNA, 25 bp, Homo sapien
caggagctgagcttcaaggtccagg

SEQ ID NO: 4820074 - DNA, 25 bp, Homo sapien
tgggctttaacggagaacccgcaga

SEQ ID NO: 4820075 - DNA, 25 bp, Homo sapien
gaggctgacctggcacatgccctgc

SEQ ID NO: 4820076 - DNA, 25 bp, Homo sapien
cctgcactatctctgcagctgccgg

SEQ ID NO: 4820077 - DNA, 25 bp, Homo sapien
ggcttggcacagaccagctctggca

SEQ ID NO: 4820078 - DNA, 25 bp, Homo sapien
gcctgcacgactctaggtggcctct

SEQ ID NO: 4820079 - DNA, 25 bp, Homo sapien
ccaggccctggctctgcattcccac

SEQ ID NO: 4820080 - DNA, 25 bp, Homo sapien
gcctccaggccctggctctgcattc

SEQ ID NO: 4820081 - DNA, 25 bp, Homo sapien
tccaggccctggctctgcattccca

SEQ ID NO: 4820082 - DNA, 25 bp, Homo sapien
atggcttttactgctgcctccaggc

SEQ ID NO: 4820083 - DNA, 25 bp, Homo sapien
ctcctctaactgtgaggttttggca

SEQ ID NO: 4820084 - DNA, 25 bp, Homo sapien
tcctctaactgtgaggttttggcat

SEQ ID NO: 4820085 - DNA, 25 bp, Homo sapien
tatgggcagctgttaacagctttcc

SEQ ID NO: 4820086 - DNA, 25 bp, Homo sapien
gttaacagctttcccgatgctaggg

SEQ ID NO: 4820087 - DNA, 25 bp, Homo sapien
tttcccgatgctagggcctggtgct

SEQ ID NO: 4820088 - DNA, 25 bp, Homo sapien
gcagctgttaacagctttcccgatg

SEQ ID NO: 4820089 - DNA, 25 bp, Homo sapien
ccgtcacgggcccacgggccctgtg

SEQ ID NO: 4820090 - DNA, 25 bp, Homo sapien
gtcacgggcccacgggccctgtggc

SEQ ID NO: 4820091 - DNA, 25 bp, Homo sapien
ctgccaggaaagggttaccgtcacg

SEQ ID NO: 4820092 - DNA, 25 bp, Homo sapien
cgtcacgggcccacgggccctgtgg

SEQ ID NO: 4820093 - DNA, 25 bp, Homo sapien
tgctggacgttcagatgcccccgag

SEQ ID NO: 4820094 - DNA, 25 bp, Homo sapien
ccggtgtccctgctggacgttcaga

SEQ ID NO: 4820095 - DNA, 25 bp, Homo sapien
gtgtccctgctggacgttcagatgc

SEQ ID NO: 4820096 - DNA, 25 bp, Homo sapien
ccggccggctgccttgccggggaag

SEQ ID NO: 4820097 - DNA, 25 bp, Homo sapien
ctgcgtgggtgtgaggacgttcccc

SEQ ID NO: 4820098 - DNA, 25 bp, Homo sapien
gacgagcccgggacacggagggcac

SEQ ID NO: 4820099 - DNA, 25 bp, Homo sapien
ggacgagcccgggacacggagggca

SEQ ID NO: 4820100 - DNA, 25 bp, Homo sapien
tgtgaggacgttccccggacgagcc

SEQ ID NO: 4820101 - DNA, 25 bp, Homo sapien
ctggcatcagcgacacccgtgcaaa

SEQ ID NO: 4820102 - DNA, 25 bp, Homo sapien
tgcaaaggcagagaatgccgcgcag

SEQ ID NO: 4820103 - DNA, 25 bp, Homo sapien
aaggcagagaatgccgcgcagcacc

SEQ ID NO: 4820104 - DNA, 25 bp, Homo sapien
tcagcgacacccgtgcaaaggcaga

SEQ ID NO: 4820105 - DNA, 25 bp, Homo sapien
tgacccgtcggcaacccgtcggcag

SEQ ID NO: 4820106 - DNA, 25 bp, Homo sapien
gcaacccgtcggcagggccctgtct

SEQ ID NO: 4820107 - DNA, 25 bp, Homo sapien
tctggctgccattgtcggcagggca

SEQ ID NO: 4820108 - DNA, 25 bp, Homo sapien
gaagatgtttggatacgatgggtct

SEQ ID NO: 4820109 - DNA, 25 bp, Homo sapien
tccaccatggtgtcgtaggcctcgt

SEQ ID NO: 4820110 - DNA, 25 bp, Homo sapien
ctgctggcgcctggactggtccgct

SEQ ID NO: 4820111 - DNA, 25 bp, Homo sapien
cgtcctcctcgttgtggtacgaggt

SEQ ID NO: 4820112 - DNA, 25 bp, Homo sapien
tgatgtacatctggccgtactgctc

SEQ ID NO: 4820113 - DNA, 25 bp, Homo sapien
gctgggcaccccgtagtaggagaca

SEQ ID NO: 4820114 - DNA, 25 bp, Homo sapien
cacggggcagtttgagaggggctgt

SEQ ID NO: 4820115 - DNA, 25 bp, Homo sapien
gccaggctgggcaccccgtagtagg

SEQ ID NO: 4820116 - DNA, 25 bp, Homo sapien
tgggcaccccgtagtaggagacacg

SEQ ID NO: 4820117 - DNA, 25 bp, Homo sapien
ggccggccggcggcagctccatggc

SEQ ID NO: 4820118 - DNA, 25 bp, Homo sapien
ccggcggcagctccatggcttcatg

SEQ ID NO: 4820119 - DNA, 25 bp, Homo sapien
ccggccggcggcagctccatggctt

SEQ ID NO: 4820120 - DNA, 25 bp, Homo sapien
ggccggcggcagctccatggcttca

SEQ ID NO: 4820121 - DNA, 25 bp, Homo sapien
tcggagccggcgtcctcgatcacag

SEQ ID NO: 4820122 - DNA, 25 bp, Homo sapien
tcgatcacagcggtctgcgagtcgc

SEQ ID NO: 4820123 - DNA, 25 bp, Homo sapien
tcacagcggtctgcgagtcgcagtg

SEQ ID NO: 4820124 - DNA, 25 bp, Homo sapien
gtcctcgatcacagcggtctgcgag

SEQ ID NO: 4820125 - DNA, 25 bp, Homo sapien
tgtacatgaccacgagctgctcgct

SEQ ID NO: 4820126 - DNA, 25 bp, Homo sapien
catggtgagcctgcccgtgtagcag

SEQ ID NO: 4820127 - DNA, 25 bp, Homo sapien
tggacacatcgcagtagaggcccag

SEQ ID NO: 4820128 - DNA, 25 bp, Homo sapien
tggcccttgaccacgatggacacat

SEQ ID NO: 4820129 - DNA, 25 bp, Homo sapien
gcggggcggccctagcggggctcat

SEQ ID NO: 4820130 - DNA, 25 bp, Homo sapien
agcgcggggcggccctagcggggct

SEQ ID NO: 4820131 - DNA, 25 bp, Homo sapien
cgcggggcggccctagcggggctca

SEQ ID NO: 4820132 - DNA, 25 bp, Homo sapien
cagctgctccgcgaatgcagcaaac

SEQ ID NO: 4820133 - DNA, 25 bp, Homo sapien
tccgcgaatgcagcaaacggagcgg

SEQ ID NO: 4820134 - DNA, 25 bp, Homo sapien
gctgctccgcgaatgcagcaaacgg

SEQ ID NO: 4820135 - DNA, 25 bp, Homo sapien
tgctccgcgaatgcagcaaacggag

SEQ ID NO: 4820136 - DNA, 25 bp, Homo sapien
gatgcagacgaacgttccggcggct

SEQ ID NO: 4820137 - DNA, 25 bp, Homo sapien
gaatagccgcctttgatttgggagc

SEQ ID NO: 4820138 - DNA, 25 bp, Homo sapien
cgttccggcggctcgggaatgaata

SEQ ID NO: 4820139 - DNA, 25 bp, Homo sapien
ttgggagccgaagtaaatgccagct

SEQ ID NO: 4820140 - DNA, 25 bp, Homo sapien
gggatcgaggacaactggagctttt

SEQ ID NO: 4820141 - DNA, 25 bp, Homo sapien
tccctggggatcgaggacaactgga

SEQ ID NO: 4820142 - DNA, 25 bp, Homo sapien
aggacaactggagcttttgctggct

SEQ ID NO: 4820143 - DNA, 25 bp, Homo sapien
gagaagggaccattattccctttga

SEQ ID NO: 4820144 - DNA, 25 bp, Homo sapien
ttccctttcccatacggtgcaggct

SEQ ID NO: 4820145 - DNA, 25 bp, Homo sapien
gatttgctttgaccctataccttca

SEQ ID NO: 4820146 - DNA, 25 bp, Homo sapien
gctttgaccctataccttcagaaaa

SEQ ID NO: 4820147 - DNA, 25 bp, Homo sapien
aggaggatttgctttgaccctatac

SEQ ID NO: 4820148 - DNA, 25 bp, Homo sapien
ccatggcatttggccgcaggaaggg

SEQ ID NO: 4820149 - DNA, 25 bp, Homo sapien
gggcccatggcatttggccgcagga

SEQ ID NO: 4820150 - DNA, 25 bp, Homo sapien
cattgaggggcccatggcatttggc

SEQ ID NO: 4820151 - DNA, 25 bp, Homo sapien
gcccatggcatttggccgcaggaag

SEQ ID NO: 4820152 - DNA, 25 bp, Homo sapien
ttctcaaacagatcgcgcagctggg

SEQ ID NO: 4820153 - DNA, 25 bp, Homo sapien
gaggacgcatcttcttttatcgggc

SEQ ID NO: 4820154 - DNA, 25 bp, Homo sapien
tgctgcgaactgactgaagcgctca

SEQ ID NO: 4820155 - DNA, 25 bp, Homo sapien
cataggcccacattcagggttcggg

SEQ ID NO: 4820156 - DNA, 25 bp, Homo sapien
tagggcacgtaacctgaaatctact

SEQ ID NO: 4820157 - DNA, 25 bp, Homo sapien
agctcttgccaagagggctaagggc

SEQ ID NO: 4820158 - DNA, 25 bp, Homo sapien
tactcacgtatgtctgtgcgtcccg

SEQ ID NO: 4820159 - DNA, 25 bp, Homo sapien
ccttaacaagagaaagcttgagctc

SEQ ID NO: 4820160 - DNA, 25 bp, Homo sapien
tgccgtggccggcactccccgaatg

SEQ ID NO: 4820161 - DNA, 25 bp, Homo sapien
actccccgaatgcactccagggtca

SEQ ID NO: 4820162 - DNA, 25 bp, Homo sapien
gccctcaaccgagggcagaagagag

SEQ ID NO: 4820163 - DNA, 25 bp, Homo sapien
ggccacttggccctcaaccgagggc

SEQ ID NO: 4820164 - DNA, 25 bp, Homo sapien
gatgtccaccaagaacctggctggc

SEQ ID NO: 4820165 - DNA, 25 bp, Homo sapien
gggcagatcttctcagacagacgat

SEQ ID NO: 4820166 - DNA, 25 bp, Homo sapien
gacattcatctcgaccgctgctgag

SEQ ID NO: 4820167 - DNA, 25 bp, Homo sapien
cacctgttagtggtggcacgttccg

SEQ ID NO: 4820168 - DNA, 25 bp, Homo sapien
cgggttgctggagggctgcttccga

SEQ ID NO: 4820169 - DNA, 25 bp, Homo sapien
ggctgcttccgagactcatccatca

SEQ ID NO: 4820170 - DNA, 25 bp, Homo sapien
agacacctcctacgcaatgtccggt

SEQ ID NO: 4820171 - DNA, 25 bp, Homo sapien
ggccttcaccaaaggcgggttgctg

SEQ ID NO: 4820172 - DNA, 25 bp, Homo sapien
ggtaggtccctccacaatcctgaac

SEQ ID NO: 4820173 - DNA, 25 bp, Homo sapien
gggtaggtccctccacaatcctgaa

SEQ ID NO: 4820174 - DNA, 25 bp, Homo sapien
gtaggtccctccacaatcctgaact

SEQ ID NO: 4820175 - DNA, 25 bp, Homo sapien
aggtccctccacaatcctgaactca

SEQ ID NO: 4820176 - DNA, 25 bp, Homo sapien
caagattaatgcctaaagggtttca

SEQ ID NO: 4820177 - DNA, 25 bp, Homo sapien
caaagttaatggacatgacacaggc

SEQ ID NO: 4820178 - DNA, 25 bp, Homo sapien
ttaatcttctctcaccctaatggat

SEQ ID NO: 4820179 - DNA, 25 bp, Homo sapien
taacaaaggcgcttagctgtgcaat

SEQ ID NO: 4820180 - DNA, 25 bp, Homo sapien
cccagccggcatgaaggcagaaagg

SEQ ID NO: 4820181 - DNA, 25 bp, Homo sapien
aaaggccgggctgcccacattcagc

SEQ ID NO: 4820182 - DNA, 25 bp, Homo sapien
ccccagccggcatgaaggcagaaag

SEQ ID NO: 4820183 - DNA, 25 bp, Homo sapien
ggcagaaaggccgggctgcccacat

SEQ ID NO: 4820184 - DNA, 25 bp, Homo sapien
ctggatctcggaacccactgcgtga

SEQ ID NO: 4820185 - DNA, 25 bp, Homo sapien
ggttctccggagaaacatgctggtg

SEQ ID NO: 4820186 - DNA, 25 bp, Homo sapien
cagggacatgtgctaccaaggtgaa

SEQ ID NO: 4820187 - DNA, 25 bp, Homo sapien
ttgtcctcagaaccacaatgggagg

SEQ ID NO: 4820188 - DNA, 25 bp, Homo sapien
gtgaaacacctccaatccggaggcc

SEQ ID NO: 4820189 - DNA, 25 bp, Homo sapien
gcggccttcagacccacaggtttaa

SEQ ID NO: 4820190 - DNA, 25 bp, Homo sapien
aaggaacgcgcagcagagaacacag

SEQ ID NO: 4820191 - DNA, 25 bp, Homo sapien
tttaagcggctccacgacgagagtc

SEQ ID NO: 4820192 - DNA, 25 bp, Homo sapien
aagtgcttggcgtcccggcgctccg

SEQ ID NO: 4820193 - DNA, 25 bp, Homo sapien
gccgcccgcggcaggaagtgcttgg

SEQ ID NO: 4820194 - DNA, 25 bp, Homo sapien
cgcgccgcccgcggcaggaagtgct

SEQ ID NO: 4820195 - DNA, 25 bp, Homo sapien
ggcgcgccgcccgcggcaggaagtg

SEQ ID NO: 4820196 - DNA, 25 bp, Homo sapien
gcgttgacagtcattccggcaccgg

SEQ ID NO: 4820197 - DNA, 25 bp, Homo sapien
tggggcgttgacagtcattccggca

SEQ ID NO: 4820198 - DNA, 25 bp, Homo sapien
caccggccacgcagctctccatctg

SEQ ID NO: 4820199 - DNA, 25 bp, Homo sapien
ttgacagtcattccggcaccggcca

SEQ ID NO: 4820200 - DNA, 25 bp, Homo sapien
ctcttcccggtcctcagagtgtccg

SEQ ID NO: 4820201 - DNA, 25 bp, Homo sapien
gagtgtccggggagctcggtcagca

SEQ ID NO: 4820202 - DNA, 25 bp, Homo sapien
gcccgagttctgatgcctcttcccg

SEQ ID NO: 4820203 - DNA, 25 bp, Homo sapien
ctcggtcagcagaaagggaagtagc

SEQ ID NO: 4820204 - DNA, 25 bp, Homo sapien
gccagagtgcgcctctgcacccctg

SEQ ID NO: 4820205 - DNA, 25 bp, Homo sapien
tgcccactctctcgcttgcgtctcg

SEQ ID NO: 4820206 - DNA, 25 bp, Homo sapien
gcacaggctctctcggctgtgcttc

SEQ ID NO: 4820207 - DNA, 25 bp, Homo sapien
cagcacaggctctctcggctgtgct

SEQ ID NO: 4820208 - DNA, 25 bp, Homo sapien
cgtaggaagtcaacccaggagccca

SEQ ID NO: 4820209 - DNA, 25 bp, Homo sapien
aggagcccagggtggtgcctgctga

SEQ ID NO: 4820210 - DNA, 25 bp, Homo sapien
ccaggagcccagggtggtgcctgct

SEQ ID NO: 4820211 - DNA, 25 bp, Homo sapien
agcccagggtggtgcctgctgagtc

SEQ ID NO: 4820212 - DNA, 25 bp, Homo sapien
cagaaggaccccgtttgccctgtag

SEQ ID NO: 4820213 - DNA, 25 bp, Homo sapien
cccgtttgccctgtagtgaaactgt

SEQ ID NO: 4820214 - DNA, 25 bp, Homo sapien
gatctcgcccactcttcagccttgg

SEQ ID NO: 4820215 - DNA, 25 bp, Homo sapien
cagcctgagctgctgatctcgccca

SEQ ID NO: 4820216 - DNA, 25 bp, Homo sapien
gtctcttgcagtacactggggctct

SEQ ID NO: 4820217 - DNA, 25 bp, Homo sapien
agctgctgacacaggacctttgcac

SEQ ID NO: 4820218 - DNA, 25 bp, Homo sapien
tgtctcttgcagtacactggggctc

SEQ ID NO: 4820219 - DNA, 25 bp, Homo sapien
ctgctgacacaggacctttgcaccc

SEQ ID NO: 4820220 - DNA, 25 bp, Homo sapien
ctggctccgggcagggcgtgccagc

SEQ ID NO: 4820221 - DNA, 25 bp, Homo sapien
cagaacggcccctgctttagtgtcc

SEQ ID NO: 4820222 - DNA, 25 bp, Homo sapien
tccgtgacagaacggcccctgcttt

SEQ ID NO: 4820223 - DNA, 25 bp, Homo sapien
gaggtggctgctccgtgacagaacg

SEQ ID NO: 4820224 - DNA, 25 bp, Homo sapien
tcccgggaggcacggcagagcccct

SEQ ID NO: 4820225 - DNA, 25 bp, Homo sapien
cgggaggcacggcagagccccttgg

SEQ ID NO: 4820226 - DNA, 25 bp, Homo sapien
gggaggcacggcagagccccttggc

SEQ ID NO: 4820227 - DNA, 25 bp, Homo sapien
ctcctcccgggaggcacggcagagc

SEQ ID NO: 4820228 - DNA, 25 bp, Homo sapien
gattgatagcttcaaagggcagccc

SEQ ID NO: 4820229 - DNA, 25 bp, Homo sapien
gacagccagggttatcacagcacaa

SEQ ID NO: 4820230 - DNA, 25 bp, Homo sapien
aagcagttcaggtcagaggagtcca

SEQ ID NO: 4820231 - DNA, 25 bp, Homo sapien
agggtctagcagcactcgagttctg

SEQ ID NO: 4820232 - DNA, 25 bp, Homo sapien
ctggaaatccatgtgctcccgttct

SEQ ID NO: 4820233 - DNA, 25 bp, Homo sapien
tgtgctcccgttctgcgaatccctt

SEQ ID NO: 4820234 - DNA, 25 bp, Homo sapien
tgcgaatcccttcaccagggcgtcg

SEQ ID NO: 4820235 - DNA, 25 bp, Homo sapien
cgttctgcgaatcccttcaccaggg

SEQ ID NO: 4820236 - DNA, 25 bp, Homo sapien
gggcaggcccaaggtgctaggggct

SEQ ID NO: 4820237 - DNA, 25 bp, Homo sapien
gtgctaggggctcccgggaggactg

SEQ ID NO: 4820238 - DNA, 25 bp, Homo sapien
caggcccaaggtgctaggggctccc

SEQ ID NO: 4820239 - DNA, 25 bp, Homo sapien
tgggggcaggcccaaggtgctaggg

SEQ ID NO: 4820240 - DNA, 25 bp, Homo sapien
ctcccaggacgagggcagtcactaa

SEQ ID NO: 4820241 - DNA, 25 bp, Homo sapien
ttcatacagcattctgctgggaccg

SEQ ID NO: 4820242 - DNA, 25 bp, Homo sapien
gccagcccaggcttgattgagctcc

SEQ ID NO: 4820243 - DNA, 25 bp, Homo sapien
gagctggcggagacttacggccaca

SEQ ID NO: 4820244 - DNA, 25 bp, Homo sapien
aagcggcaagaatgcccgtccccat

SEQ ID NO: 4820245 - DNA, 25 bp, Homo sapien
catggtcaacgtgctgctgacacga

SEQ ID NO: 4820246 - DNA, 25 bp, Homo sapien
taatattctgaggaagcggcaagaa

SEQ ID NO: 4820247 - DNA, 25 bp, Homo sapien
tccccatgtcgtgagccatggtcaa

SEQ ID NO: 4820248 - DNA, 25 bp, Homo sapien
gcctttgcctaccaccgtgtcctta

SEQ ID NO: 4820249 - DNA, 25 bp, Homo sapien
tttttcggatgcaattgtcaggcct

SEQ ID NO: 4820250 - DNA, 25 bp, Homo sapien
gtgtccttacctgacccaacctcga

SEQ ID NO: 4820251 - DNA, 25 bp, Homo sapien
atcctctgaccacggacctcccagg

SEQ ID NO: 4820252 - DNA, 25 bp, Homo sapien
aggaggccatacaaggactgcacgg

SEQ ID NO: 4820253 - DNA, 25 bp, Homo sapien
cattagtcgggtaggactcttgggc

SEQ ID NO: 4820254 - DNA, 25 bp, Homo sapien
tctcttttgggaaccgtcaggaggc

SEQ ID NO: 4820255 - DNA, 25 bp, Homo sapien
cctgctgcatgggaagtgcggctca

SEQ ID NO: 4820256 - DNA, 25 bp, Homo sapien
gcccccgcctccgagggcatgagcg

SEQ ID NO: 4820257 - DNA, 25 bp, Homo sapien
ccccgcctccgagggcatgagcgga

SEQ ID NO: 4820258 - DNA, 25 bp, Homo sapien
cagcccccgcctccgagggcatgag

SEQ ID NO: 4820259 - DNA, 25 bp, Homo sapien
cgcctccgagggcatgagcggaggc

SEQ ID NO: 4820260 - DNA, 25 bp, Homo sapien
cagatcgaagcacgtttgtctcccc

SEQ ID NO: 4820261 - DNA, 25 bp, Homo sapien
ctggcctctgcagatcgaagcacgt

SEQ ID NO: 4820262 - DNA, 25 bp, Homo sapien
gaagagaaacgcactggcctctgca

SEQ ID NO: 4820263 - DNA, 25 bp, Homo sapien
agaagagaaacgcactggcctctgc

SEQ ID NO: 4820264 - DNA, 25 bp, Homo sapien
agccggtcatctgggacctcaaggg

SEQ ID NO: 4820265 - DNA, 25 bp, Homo sapien
tctgggtgtctgtcactgtggacaa

SEQ ID NO: 4820266 - DNA, 25 bp, Homo sapien
ttgcacagctcagccggtcatctgg

SEQ ID NO: 4820267 - DNA, 25 bp, Homo sapien
tagctccggccttccttggagccgt

SEQ ID NO: 4820268 - DNA, 25 bp, Homo sapien
tgacttagtgcaaaagattctctgc

SEQ ID NO: 4820269 - DNA, 25 bp, Homo sapien
ttcaccctcagccaagaggcttggg

SEQ ID NO: 4820270 - DNA, 25 bp, Homo sapien
tgcagcaagaaatgaggcccacgca

SEQ ID NO: 4820271 - DNA, 25 bp, Homo sapien
catgacgaatttcacaggcaccggg

SEQ ID NO: 4820272 - DNA, 25 bp, Homo sapien
catgggcagtccaccatagtgctgc

SEQ ID NO: 4820273 - DNA, 25 bp, Homo sapien
aattagagagcacggtttacggcca

SEQ ID NO: 4820274 - DNA, 25 bp, Homo sapien
tgtcctgctctagggtagcctctgc

SEQ ID NO: 4820275 - DNA, 25 bp, Homo sapien
tgcaatcattattcagggcgccctc

SEQ ID NO: 4820276 - DNA, 25 bp, Homo sapien
ggacacgcgtttccatcctggctca

SEQ ID NO: 4820277 - DNA, 25 bp, Homo sapien
tgctccggacacttgggacacgcgt

SEQ ID NO: 4820278 - DNA, 25 bp, Homo sapien
cgctagactgcatctacacaatcca

SEQ ID NO: 4820279 - DNA, 25 bp, Homo sapien
tgtgtttgccgcactgaggcctctg

SEQ ID NO: 4820280 - DNA, 25 bp, Homo sapien
tcccagggtgatgtctaaagtccct

SEQ ID NO: 4820281 - DNA, 25 bp, Homo sapien
tcttttctctccgtgggcgccgggc

SEQ ID NO: 4820282 - DNA, 25 bp, Homo sapien
tacgacccgaagacatgtgagcagg

SEQ ID NO: 4820283 - DNA, 25 bp, Homo sapien
acaggccgggacgatacatcaagct

SEQ ID NO: 4820284 - DNA, 25 bp, Homo sapien
taggaagcggatgaagccgtacagc

SEQ ID NO: 4820285 - DNA, 25 bp, Homo sapien
cgcgtcttgatgtacacgtcgaagt

SEQ ID NO: 4820286 - DNA, 25 bp, Homo sapien
gaacgcccaggtactgtaggcagaa

SEQ ID NO: 4820287 - DNA, 25 bp, Homo sapien
tggatgccatagacgagcagctcgt

SEQ ID NO: 4820288 - DNA, 25 bp, Homo sapien
tgtccaggcggctgttggcgtaggg

SEQ ID NO: 4820289 - DNA, 25 bp, Homo sapien
gcggcgctaggtcgcagtggcggcg

SEQ ID NO: 4820290 - DNA, 25 bp, Homo sapien
gtcatgggcgcctaggcctgggagc

SEQ ID NO: 4820291 - DNA, 25 bp, Homo sapien
gcggcggtgtccaggcggctgttgg

SEQ ID NO: 4820292 - DNA, 25 bp, Homo sapien
tctgtagacggaatgaactcaaagg

SEQ ID NO: 4820293 - DNA, 25 bp, Homo sapien
cttgccgaaataatctgtagacgga

SEQ ID NO: 4820294 - DNA, 25 bp, Homo sapien
gaatgaactcaaaggtcaggaaata

SEQ ID NO: 4820295 - DNA, 25 bp, Homo sapien
aataatctgtagacggaatgaactc

SEQ ID NO: 4820296 - DNA, 25 bp, Homo sapien
ccgcctgaccctcccgtgcccgcag

SEQ ID NO: 4820297 - DNA, 25 bp, Homo sapien
ggccgcctgaccctcccgtgcccgc

SEQ ID NO: 4820298 - DNA, 25 bp, Homo sapien
gcctgaccctcccgtgcccgcaggg

SEQ ID NO: 4820299 - DNA, 25 bp, Homo sapien
tgaccctcccgtgcccgcaggggcc

SEQ ID NO: 4820300 - DNA, 25 bp, Homo sapien
atggcggtgccactcaaacgcgact

SEQ ID NO: 4820301 - DNA, 25 bp, Homo sapien
tgcgtttctgcagacgcccgctcgg

SEQ ID NO: 4820302 - DNA, 25 bp, Homo sapien
cagagcggccctatttaaggccggc

SEQ ID NO: 4820303 - DNA, 25 bp, Homo sapien
catggacccaggactgtttcctcgg

SEQ ID NO: 4820304 - DNA, 25 bp, Homo sapien
cctagcgtgggagccgtagcgccgt

SEQ ID NO: 4820305 - DNA, 25 bp, Homo sapien
cgtggttcacgcgtcgccggctggg

SEQ ID NO: 4820306 - DNA, 25 bp, Homo sapien
gctccgtgcgcagggcggccgcatg

SEQ ID NO: 4820307 - DNA, 25 bp, Homo sapien
gggcgctggcaaggcggctgagggc

SEQ ID NO: 4820308 - DNA, 25 bp, Homo sapien
ctaccgcatcccgtggagaggcagt

SEQ ID NO: 4820309 - DNA, 25 bp, Homo sapien
cagcagagggcttgaccgtggtcct

SEQ ID NO: 4820310 - DNA, 25 bp, Homo sapien
cgcgcttccgtggagcagtcctttg

SEQ ID NO: 4820311 - DNA, 25 bp, Homo sapien
gtcctggccccggactgaggtgtct

SEQ ID NO: 4820312 - DNA, 25 bp, Homo sapien
cgaggaatgtgttggggagcgctcc

SEQ ID NO: 4820313 - DNA, 25 bp, Homo sapien
ttcgtacaggctggcggttgtcctg

SEQ ID NO: 4820314 - DNA, 25 bp, Homo sapien
gcctggttcgtacaggctggcggtt

SEQ ID NO: 4820315 - DNA, 25 bp, Homo sapien
ctgggggtttccagcgaggaatgtg

SEQ ID NO: 4820316 - DNA, 25 bp, Homo sapien
cgcctttacccgacatgagcaggag

SEQ ID NO: 4820317 - DNA, 25 bp, Homo sapien
ttacccgacatgagcaggagttcga

SEQ ID NO: 4820318 - DNA, 25 bp, Homo sapien
gagagccgcctttacccgacatgag

SEQ ID NO: 4820319 - DNA, 25 bp, Homo sapien
acaggagagagagccgcctttaccc

SEQ ID NO: 4820320 - DNA, 25 bp, Homo sapien
tgtgcttgatttcagaagtgtcccc

SEQ ID NO: 4820321 - DNA, 25 bp, Homo sapien
tctgggggccttgtaagtggtgtca

SEQ ID NO: 4820322 - DNA, 25 bp, Homo sapien
cttgatttcagaagtgtccccatcc

SEQ ID NO: 4820323 - DNA, 25 bp, Homo sapien
ggcagccctggcaccatgtgcccag

SEQ ID NO: 4820324 - DNA, 25 bp, Homo sapien
tggagctccttccacagcagagcac

SEQ ID NO: 4820325 - DNA, 25 bp, Homo sapien
cttccacagcagagcacagacgtcc

SEQ ID NO: 4820326 - DNA, 25 bp, Homo sapien
tgaggcctggagctccttccacagc

SEQ ID NO: 4820327 - DNA, 25 bp, Homo sapien
tccttccacagcagagcacagacgt

SEQ ID NO: 4820328 - DNA, 25 bp, Homo sapien
tggagactctagcttggcccagtca

SEQ ID NO: 4820329 - DNA, 25 bp, Homo sapien
cacaggcaggagtccgagctccttt

SEQ ID NO: 4820330 - DNA, 25 bp, Homo sapien
ctgcagttgcctcccactcagaggg

SEQ ID NO: 4820331 - DNA, 25 bp, Homo sapien
ctcagagggaaccttctcaaaggca

SEQ ID NO: 4820332 - DNA, 25 bp, Homo sapien
gaatgagagaaacgctctccaggca

SEQ ID NO: 4820333 - DNA, 25 bp, Homo sapien
tcttggcaaccgtgctgtcttggtt

SEQ ID NO: 4820334 - DNA, 25 bp, Homo sapien
caggcatctctgacaaaaggttctt

SEQ ID NO: 4820335 - DNA, 25 bp, Homo sapien
ggctggacctacctctaggagtgct

SEQ ID NO: 4820336 - DNA, 25 bp, Homo sapien
actgaaagagcgtttgtcttcggca

SEQ ID NO: 4820337 - DNA, 25 bp, Homo sapien
tgcatacccagcatccgactcagca

SEQ ID NO: 4820338 - DNA, 25 bp, Homo sapien
gatactgaaagagcgtttgtcttcg

SEQ ID NO: 4820339 - DNA, 25 bp, Homo sapien
tcagcaactgggcaggaaaagatac

SEQ ID NO: 4820340 - DNA, 25 bp, Homo sapien
gaggcatgggttggtgcgaagcccg

SEQ ID NO: 4820341 - DNA, 25 bp, Homo sapien
gcatgggttggtgcgaagcccgggt

SEQ ID NO: 4820342 - DNA, 25 bp, Homo sapien
ggttggtgcgaagcccgggtgtgca

SEQ ID NO: 4820343 - DNA, 25 bp, Homo sapien
gggttggtgcgaagcccgggtgtgc

SEQ ID NO: 4820344 - DNA, 25 bp, Homo sapien
ggaagtgatttgtctccgcgctgac

SEQ ID NO: 4820345 - DNA, 25 bp, Homo sapien
agtgatttgtctccgcgctgacagg

SEQ ID NO: 4820346 - DNA, 25 bp, Homo sapien
gaagtgatttgtctccgcgctgaca

SEQ ID NO: 4820347 - DNA, 25 bp, Homo sapien
ggaggaagtgatttgtctccgcgct

SEQ ID NO: 4820348 - DNA, 25 bp, Homo sapien
aggttggcaggccagcaatggctga

SEQ ID NO: 4820349 - DNA, 25 bp, Homo sapien
caggccagcaatggctgacgatgct

SEQ ID NO: 4820350 - DNA, 25 bp, Homo sapien
ttggcaggccagcaatggctgacga

SEQ ID NO: 4820351 - DNA, 25 bp, Homo sapien
cagcaatggctgacgatgctccggg

SEQ ID NO: 4820352 - DNA, 25 bp, Homo sapien
tggaagcgtggcttagccccatcct

SEQ ID NO: 4820353 - DNA, 25 bp, Homo sapien
ctggaagcgtggcttagccccatcc

SEQ ID NO: 4820354 - DNA, 25 bp, Homo sapien
gaagcgtggcttagccccatcctgt

SEQ ID NO: 4820355 - DNA, 25 bp, Homo sapien
agcgtggcttagccccatcctgtgg

SEQ ID NO: 4820356 - DNA, 25 bp, Homo sapien
ctgttctgttgtggaacgtgaaggt

SEQ ID NO: 4820357 - DNA, 25 bp, Homo sapien
cccttggcacaatcgtggccgtggg

SEQ ID NO: 4820358 - DNA, 25 bp, Homo sapien
tgcacgccccttggcacaatcgtgg

SEQ ID NO: 4820359 - DNA, 25 bp, Homo sapien
tctgttgtggaacgtgaaggtcatg

SEQ ID NO: 4820360 - DNA, 25 bp, Homo sapien
tgtgtcttcaggatccagtgcaccg

SEQ ID NO: 4820361 - DNA, 25 bp, Homo sapien
tgtcttcaggatccagtgcaccgac

SEQ ID NO: 4820362 - DNA, 25 bp, Homo sapien
ctgtgtcttcaggatccagtgcacc

SEQ ID NO: 4820363 - DNA, 25 bp, Homo sapien
tcttcaggatccagtgcaccgacat

SEQ ID NO: 4820364 - DNA, 25 bp, Homo sapien
tctctggaagcgctgtgcgttagct

SEQ ID NO: 4820365 - DNA, 25 bp, Homo sapien
tagattgcggtgtggtggccgccca

SEQ ID NO: 4820366 - DNA, 25 bp, Homo sapien
tgcgagaaagcggagaaagtgtctc

SEQ ID NO: 4820367 - DNA, 25 bp, Homo sapien
acaggacgccgtgcggaggagctgc

SEQ ID NO: 4820368 - DNA, 25 bp, Homo sapien
atctggcctgtgacggggatcaggg

SEQ ID NO: 4820369 - DNA, 25 bp, Homo sapien
gatcaggacctggtctgagacagga

SEQ ID NO: 4820370 - DNA, 25 bp, Homo sapien
acctgcgtcccttccggctggcggg

SEQ ID NO: 4820371 - DNA, 25 bp, Homo sapien
cctgcgtcccttccggctggcgggg

SEQ ID NO: 4820372 - DNA, 25 bp, Homo sapien
cacctgcgtcccttccggctggcgg

SEQ ID NO: 4820373 - DNA, 25 bp, Homo sapien
cacagggccactcgtggacaaaaga

SEQ ID NO: 4820374 - DNA, 25 bp, Homo sapien
ctgtcccctgaggttgctttgttcc

SEQ ID NO: 4820375 - DNA, 25 bp, Homo sapien
aagaccttgggagcaagggtacaga

SEQ ID NO: 4820376 - DNA, 25 bp, Homo sapien
gctgtcccctgaggttgctttgttc

SEQ ID NO: 4820377 - DNA, 25 bp, Homo sapien
agggtctgtttcttgagggtcactg

SEQ ID NO: 4820378 - DNA, 25 bp, Homo sapien
gtctgtttcttgagggtcactgcgt

SEQ ID NO: 4820379 - DNA, 25 bp, Homo sapien
ttcttgagggtcactgcgtgtctcc

SEQ ID NO: 4820380 - DNA, 25 bp, Homo sapien
ggtctgtttcttgagggtcactgcg

SEQ ID NO: 4820381 - DNA, 25 bp, Homo sapien
ctgggccagataactccaggaaaag

SEQ ID NO: 4820382 - DNA, 25 bp, Homo sapien
atctgtcagagcaggtgcatgcagc

SEQ ID NO: 4820383 - DNA, 25 bp, Homo sapien
cttgctctgggccagataactccag

SEQ ID NO: 4820384 - DNA, 25 bp, Homo sapien
ccatctgtcagagcaggtgcatgca

SEQ ID NO: 4820385 - DNA, 25 bp, Homo sapien
ctgtgaggccgttgaacactggcct

SEQ ID NO: 4820386 - DNA, 25 bp, Homo sapien
tgaggccgttgaacactggcctcct

SEQ ID NO: 4820387 - DNA, 25 bp, Homo sapien
actggcctccttgggcgtttgtgca

SEQ ID NO: 4820388 - DNA, 25 bp, Homo sapien
aggccgttgaacactggcctccttg

SEQ ID NO: 4820389 - DNA, 25 bp, Homo sapien
agggtcttcgccagtgtgggaccac

SEQ ID NO: 4820390 - DNA, 25 bp, Homo sapien
cccagggtcttcgccagtgtgggac

SEQ ID NO: 4820391 - DNA, 25 bp, Homo sapien
gtcttcgccagtgtgggaccacggc

SEQ ID NO: 4820392 - DNA, 25 bp, Homo sapien
cagggtcttcgccagtgtgggacca

SEQ ID NO: 4820393 - DNA, 25 bp, Homo sapien
agctgaggggcagccttggagaagc

SEQ ID NO: 4820394 - DNA, 25 bp, Homo sapien
ctgcagggaaggccgggccagctga

SEQ ID NO: 4820395 - DNA, 25 bp, Homo sapien
gccgggccagctgaggggcagcctt

SEQ ID NO: 4820396 - DNA, 25 bp, Homo sapien
gaaggccgggccagctgaggggcag

SEQ ID NO: 4820397 - DNA, 25 bp, Homo sapien
ttccagcaggcactgcgagggctca

SEQ ID NO: 4820398 - DNA, 25 bp, Homo sapien
ctggaatctcgggaccttggacagt

SEQ ID NO: 4820399 - DNA, 25 bp, Homo sapien
cagagtccgaaactggggcctggaa

SEQ ID NO: 4820400 - DNA, 25 bp, Homo sapien
cgggaggttccagagtccgaaactg

SEQ ID NO: 4820401 - DNA, 25 bp, Homo sapien
ctccattcgccagaacgttctgcag

SEQ ID NO: 4820402 - DNA, 25 bp, Homo sapien
tccattcgccagaacgttctgcagg

SEQ ID NO: 4820403 - DNA, 25 bp, Homo sapien
gtacaagttgatgcgatatcctgat

SEQ ID NO: 4820404 - DNA, 25 bp, Homo sapien
ctgtacaagttgatgcgatatcctg

SEQ ID NO: 4820405 - DNA, 25 bp, Homo sapien
tgtacaagttgatgcgatatcctga

SEQ ID NO: 4820406 - DNA, 25 bp, Homo sapien
actcggcataaaacgaagaaatttg

SEQ ID NO: 4820407 - DNA, 25 bp, Homo sapien
gagagtagagactgtctgtgctgga

SEQ ID NO: 4820408 - DNA, 25 bp, Homo sapien
tgagagtagagactgtctgtgctgg

SEQ ID NO: 4820409 - DNA, 25 bp, Homo sapien
cggcataaaacgaagaaatttgtgc

SEQ ID NO: 4820410 - DNA, 25 bp, Homo sapien
tcattaggagtatccgcggcagctg

SEQ ID NO: 4820411 - DNA, 25 bp, Homo sapien
ccgcccagaggagcaatttcattag

SEQ ID NO: 4820412 - DNA, 25 bp, Homo sapien
tgtgggcggccaccctgcacggcac

SEQ ID NO: 4820413 - DNA, 25 bp, Homo sapien
aggccaaccggtgaggcccgcgagt

SEQ ID NO: 4820414 - DNA, 25 bp, Homo sapien
tattggcggatttgggaggccaggg

SEQ ID NO: 4820415 - DNA, 25 bp, Homo sapien
ccaaccacccgcagccaataaaaag

SEQ ID NO: 4820416 - DNA, 25 bp, Homo sapien
tcaggggaccgaggcgtgatgggcg

SEQ ID NO: 4820417 - DNA, 25 bp, Homo sapien
caggacaggggtcattgctgccaag

SEQ ID NO: 4820418 - DNA, 25 bp, Homo sapien
ccacacgcctgcctcagggtaggag

SEQ ID NO: 4820419 - DNA, 25 bp, Homo sapien
acacgcctgcctcagggtaggagga

SEQ ID NO: 4820420 - DNA, 25 bp, Homo sapien
cagccacacgcctgcctcagggtag

SEQ ID NO: 4820421 - DNA, 25 bp, Homo sapien
agccacacgcctgcctcagggtagg

SEQ ID NO: 4820422 - DNA, 25 bp, Homo sapien
ccttcctccgtcaaccgtgtcattg

SEQ ID NO: 4820423 - DNA, 25 bp, Homo sapien
aaccgtgtcattgccgcacccaaga

SEQ ID NO: 4820424 - DNA, 25 bp, Homo sapien
caagaagtccatgcccgtcgcgctg

SEQ ID NO: 4820425 - DNA, 25 bp, Homo sapien
tgggagctgtaggaaccctgggtac

SEQ ID NO: 4820426 - DNA, 25 bp, Homo sapien
aatgtgcatgtgtaccgtgtaggaa

SEQ ID NO: 4820427 - DNA, 25 bp, Homo sapien
tgcatgtgtaccgtgtaggaaaacc

SEQ ID NO: 4820428 - DNA, 25 bp, Homo sapien
aaatgtgcatgtgtaccgtgtagga

SEQ ID NO: 4820429 - DNA, 25 bp, Homo sapien
tgtgcatgtgtaccgtgtaggaaaa

SEQ ID NO: 4820430 - DNA, 25 bp, Homo sapien
gacgcattgggcgtctcgggcacaa

SEQ ID NO: 4820431 - DNA, 25 bp, Homo sapien
tttcgtcaggcctaggagtctcagg

SEQ ID NO: 4820432 - DNA, 25 bp, Homo sapien
gccacagccaaaaaggagctttcgt

SEQ ID NO: 4820433 - DNA, 25 bp, Homo sapien
tgaagaggcgacttcaagggccctc

SEQ ID NO: 4820434 - DNA, 25 bp, Homo sapien
aggtgggtaaggacatcctgtccga

SEQ ID NO: 4820435 - DNA, 25 bp, Homo sapien
tccgacacaggccagccgtgatcag

SEQ ID NO: 4820436 - DNA, 25 bp, Homo sapien
ctgtctgggctctcccaagtgaagg

SEQ ID NO: 4820437 - DNA, 25 bp, Homo sapien
gaaggcaaacctgtggagacgcaag

SEQ ID NO: 4820438 - DNA, 25 bp, Homo sapien
attcggggctgacaacccgcaggcg

SEQ ID NO: 4820439 - DNA, 25 bp, Homo sapien
ggcgcgcggctaaagcttccaccgt

SEQ ID NO: 4820440 - DNA, 25 bp, Homo sapien
agcttccaccgtccgcgagaaggcg

SEQ ID NO: 4820441 - DNA, 25 bp, Homo sapien
tgacaacccgcaggcgcgcggctaa

SEQ ID NO: 4820442 - DNA, 25 bp, Homo sapien
tgattctgggttcgccctcgcgggt

SEQ ID NO: 4820443 - DNA, 25 bp, Homo sapien
ctcgcgggtacggagcaggagccgg

SEQ ID NO: 4820444 - DNA, 25 bp, Homo sapien
gaggtcggagcccgcgtttctgtcc

SEQ ID NO: 4820445 - DNA, 25 bp, Homo sapien
gggccgcggcccgaagtctgattct

SEQ ID NO: 4820446 - DNA, 25 bp, Homo sapien
cagggctccccccaggcccgcgcgg

SEQ ID NO: 4820447 - DNA, 25 bp, Homo sapien
gggcgcggggaggtcacagggctcc

SEQ ID NO: 4820448 - DNA, 25 bp, Homo sapien
ctggggcgcggggaggtcacagggc

SEQ ID NO: 4820449 - DNA, 25 bp, Homo sapien
ggcgcggggaggtcacagggctccc

SEQ ID NO: 4820450 - DNA, 25 bp, Homo sapien
cacgggctccgggattatcgacgcg

SEQ ID NO: 4820451 - DNA, 25 bp, Homo sapien
ggcgaggtcacgcagacgcgctctc

SEQ ID NO: 4820452 - DNA, 25 bp, Homo sapien
acgcgctctccagggcaccgcgggt

SEQ ID NO: 4820453 - DNA, 25 bp, Homo sapien
cgctgcgctccgatcgggaaccgga

SEQ ID NO: 4820454 - DNA, 25 bp, Homo sapien
aacctcgcactttcccgccggcgcg

SEQ ID NO: 4820455 - DNA, 25 bp, Homo sapien
ccggcgcgcctttgcccgcactggt

SEQ ID NO: 4820456 - DNA, 25 bp, Homo sapien
actggtcgccgtcgccacgcgccat

SEQ ID NO: 4820457 - DNA, 25 bp, Homo sapien
caggccggccccgaacctcgcactt

SEQ ID NO: 4820458 - DNA, 25 bp, Homo sapien
tgttgccgccattcccagtggccgt

SEQ ID NO: 4820459 - DNA, 25 bp, Homo sapien
ggtgctcggtgcctccttagacaca

SEQ ID NO: 4820460 - DNA, 25 bp, Homo sapien
tgcttccacgctcggctccagtgtt

SEQ ID NO: 4820461 - DNA, 25 bp, Homo sapien
gggaccgccctggtgatccgcgcgt

SEQ ID NO: 4820462 - DNA, 25 bp, Homo sapien
gggtggggcgcatacaacttctttc

SEQ ID NO: 4820463 - DNA, 25 bp, Homo sapien
gtttgcgggagtgactttgacttac

SEQ ID NO: 4820464 - DNA, 25 bp, Homo sapien
aagagctgatcacccgagaataaat

SEQ ID NO: 4820465 - DNA, 25 bp, Homo sapien
tagctcgagattcaggtttgcggga

SEQ ID NO: 4820466 - DNA, 25 bp, Homo sapien
cagaacattcacagaaccaataggt

SEQ ID NO: 4820467 - DNA, 25 bp, Homo sapien
gctgcgggcatctcccagaaacttc

SEQ ID NO: 4820468 - DNA, 25 bp, Homo sapien
cacagctgcgggcatctcccagaaa

SEQ ID NO: 4820469 - DNA, 25 bp, Homo sapien
ggcacgcacagctgcgggcatctcc

SEQ ID NO: 4820470 - DNA, 25 bp, Homo sapien
ctttgtgtctggggcacgcacagct

SEQ ID NO: 4820471 - DNA, 25 bp, Homo sapien
ttctccagcggggagacttcccaat

SEQ ID NO: 4820472 - DNA, 25 bp, Homo sapien
ccacccttctccagcggggagactt

SEQ ID NO: 4820473 - DNA, 25 bp, Homo sapien
tccagcggggagacttcccaatctg

SEQ ID NO: 4820474 - DNA, 25 bp, Homo sapien
cagcggggagacttcccaatctggg

SEQ ID NO: 4820475 - DNA, 25 bp, Homo sapien
ctgaggggcttagagaattgagctt

SEQ ID NO: 4820476 - DNA, 25 bp, Homo sapien
gaatgatctagagacctggggattg

SEQ ID NO: 4820477 - DNA, 25 bp, Homo sapien
tcctccacaggatactcgagaacag

SEQ ID NO: 4820478 - DNA, 25 bp, Homo sapien
gaaggggcgccaggcatttttgcct

SEQ ID NO: 4820479 - DNA, 25 bp, Homo sapien
caatctccgacctaaagagggagcc

SEQ ID NO: 4820480 - DNA, 25 bp, Homo sapien
tgcagcctcttgcctcgacaggcaa

SEQ ID NO: 4820481 - DNA, 25 bp, Homo sapien
agagatgaaagcgtttttccagccc

SEQ ID NO: 4820482 - DNA, 25 bp, Homo sapien
cagagagggagctgtgcggtcggca

SEQ ID NO: 4820483 - DNA, 25 bp, Homo sapien
gtagaggccattggccgggcccatt

SEQ ID NO: 4820484 - DNA, 25 bp, Homo sapien
ccgggacgcagctctcggtactgct

SEQ ID NO: 4820485 - DNA, 25 bp, Homo sapien
gcccatttccgccaaggaaggctca

SEQ ID NO: 4820486 - DNA, 25 bp, Homo sapien
gctccccgtggataggtcagaactg

SEQ ID NO: 4820487 - DNA, 25 bp, Homo sapien
acagaagcagaggctcagtcagcgc

SEQ ID NO: 4820488 - DNA, 25 bp, Homo sapien
aagcagaggctcagtcagcgcctgc

SEQ ID NO: 4820489 - DNA, 25 bp, Homo sapien
agaagcagaggctcagtcagcgcct

SEQ ID NO: 4820490 - DNA, 25 bp, Homo sapien
ctgcaacagaagcagaggctcagtc

SEQ ID NO: 4820491 - DNA, 25 bp, Homo sapien
gtccttgtccgacttggagccgccg

SEQ ID NO: 4820492 - DNA, 25 bp, Homo sapien
ggaaggagacctcagcgtcgctgtc

SEQ ID NO: 4820493 - DNA, 25 bp, Homo sapien
cttcatgttgcggaaatactgcccc

SEQ ID NO: 4820494 - DNA, 25 bp, Homo sapien
cgggagcgcttcatgttgcggaaat

SEQ ID NO: 4820495 - DNA, 25 bp, Homo sapien
gagggaagcaggggcgagcgctgac

SEQ ID NO: 4820496 - DNA, 25 bp, Homo sapien
cggggtgagcggccgcccggctctg

SEQ ID NO: 4820497 - DNA, 25 bp, Homo sapien
gctctgcgggggcccccaaggccgc

SEQ ID NO: 4820498 - DNA, 25 bp, Homo sapien
caaggccgcgggcgggagggaagca

SEQ ID NO: 4820499 - DNA, 25 bp, Homo sapien
tcggacgagagctgctcgcgcacgt

SEQ ID NO: 4820500 - DNA, 25 bp, Homo sapien
atgtccaggcccgtctcggacgaga

SEQ ID NO: 4820501 - DNA, 25 bp, Homo sapien
agctgcttggcggtgatggtcgtgc

SEQ ID NO: 4820502 - DNA, 25 bp, Homo sapien
ggcgaggtgttgtaagcgctcttca

SEQ ID NO: 4820503 - DNA, 25 bp, Homo sapien
ttgcacacgacgcaggcaaagcagt

SEQ ID NO: 4820504 - DNA, 25 bp, Homo sapien
ttcgtagtccgccttgcacacgagc

SEQ ID NO: 4820505 - DNA, 25 bp, Homo sapien
acgcggcgcacttggtcccgaagcg

SEQ ID NO: 4820506 - DNA, 25 bp, Homo sapien
acacgagccggctgtcctccatgag

SEQ ID NO: 4820507 - DNA, 25 bp, Homo sapien
gtcgctgcacttgagacacttgctg

SEQ ID NO: 4820508 - DNA, 25 bp, Homo sapien
cacttgctgtgccagtggcggtcca

SEQ ID NO: 4820509 - DNA, 25 bp, Homo sapien
tgaaaaagtcgtccttgcagtaaac

SEQ ID NO: 4820510 - DNA, 25 bp, Homo sapien
tcacagccagcgcacagcgggatct

SEQ ID NO: 4820511 - DNA, 25 bp, Homo sapien
gtcacctcgtagaccaggaggcagt

SEQ ID NO: 4820512 - DNA, 25 bp, Homo sapien
tcgtagaccaggaggcagtgaagcc

SEQ ID NO: 4820513 - DNA, 25 bp, Homo sapien
ctgtgggcacgaggaagttctgggt

SEQ ID NO: 4820514 - DNA, 25 bp, Homo sapien
agttctgggtcacctcgtagaccag

SEQ ID NO: 4820515 - DNA, 25 bp, Homo sapien
tccagcccatctcccagtgggtgag

SEQ ID NO: 4820516 - DNA, 25 bp, Homo sapien
ctggctgtggaccccgccggctcca

SEQ ID NO: 4820517 - DNA, 25 bp, Homo sapien
gcccatctcccagtgggtgagagac

SEQ ID NO: 4820518 - DNA, 25 bp, Homo sapien
cggctccagcccatctcccagtggg

SEQ ID NO: 4820519 - DNA, 25 bp, Homo sapien
caggaaggggctccctcgacctccg

SEQ ID NO: 4820520 - DNA, 25 bp, Homo sapien
tccggcggaaaaaactgggctgcgc

SEQ ID NO: 4820521 - DNA, 25 bp, Homo sapien
ctccggcggaaaaaactgggctgcg

SEQ ID NO: 4820522 - DNA, 25 bp, Homo sapien
gacaggccgacacagcgcggattca

SEQ ID NO: 4820523 - DNA, 25 bp, Homo sapien
cccatcgtgggcagcgatcgcaggc

SEQ ID NO: 4820524 - DNA, 25 bp, Homo sapien
gggaaaccggcgatgaatgcgcccc

SEQ ID NO: 4820525 - DNA, 25 bp, Homo sapien
ctccgggtgcggagcgtcgaggacc

SEQ ID NO: 4820526 - DNA, 25 bp, Homo sapien
cccgggagtcgaggagaactgccca

SEQ ID NO: 4820527 - DNA, 25 bp, Homo sapien
agtcgaggagaactgcccaggttcc

SEQ ID NO: 4820528 - DNA, 25 bp, Homo sapien
ggagtcgaggagaactgcccaggtt

SEQ ID NO: 4820529 - DNA, 25 bp, Homo sapien
tggcccgggagtcgaggagaactgc

SEQ ID NO: 4820530 - DNA, 25 bp, Homo sapien
tccctgacaacccaggccaggggcc

SEQ ID NO: 4820531 - DNA, 25 bp, Homo sapien
cactccctgacaacccaggccaggg

SEQ ID NO: 4820532 - DNA, 25 bp, Homo sapien
tcactccctgacaacccaggccagg

SEQ ID NO: 4820533 - DNA, 25 bp, Homo sapien
actccctgacaacccaggccagggg

SEQ ID NO: 4820534 - DNA, 25 bp, Homo sapien
gcagtgctagcagcaggtcgcctcc

SEQ ID NO: 4820535 - DNA, 25 bp, Homo sapien
cagtgctagcagcaggtcgcctccc

SEQ ID NO: 4820536 - DNA, 25 bp, Homo sapien
gtgctagcagcaggtcgcctcccgc

SEQ ID NO: 4820537 - DNA, 25 bp, Homo sapien
agtgctagcagcaggtcgcctcccg

SEQ ID NO: 4820538 - DNA, 25 bp, Homo sapien
gcaatagccccgaaccggcgtccaa

SEQ ID NO: 4820539 - DNA, 25 bp, Homo sapien
gcccagcgacgccaccccgcaatag

SEQ ID NO: 4820540 - DNA, 25 bp, Homo sapien
accggcgtccaagcgactccgggtg

SEQ ID NO: 4820541 - DNA, 25 bp, Homo sapien
cgtccaagcgactccgggtgctgct

SEQ ID NO: 4820542 - DNA, 25 bp, Homo sapien
agcgatcaggggtcgtgtgtggcag

SEQ ID NO: 4820543 - DNA, 25 bp, Homo sapien
tcagctgctgccgaagcgatcaggg

SEQ ID NO: 4820544 - DNA, 25 bp, Homo sapien
cgatcaggggtcgtgtgtggcagga

SEQ ID NO: 4820545 - DNA, 25 bp, Homo sapien
gaagcgatcaggggtcgtgtgtggc

SEQ ID NO: 4820546 - DNA, 25 bp, Homo sapien
agtcccgcccaaggtgcagacggcg

SEQ ID NO: 4820547 - DNA, 25 bp, Homo sapien
ggcctcgctcggtcgcgctcgagcc

SEQ ID NO: 4820548 - DNA, 25 bp, Homo sapien
ggtcgcgctcgagccccgtttccag

SEQ ID NO: 4820549 - DNA, 25 bp, Homo sapien
gagtcccgcccaaggtgcagacggc

SEQ ID NO: 4820550 - DNA, 25 bp, Homo sapien
ctaggtcagcgtcccctggagggtt

SEQ ID NO: 4820551 - DNA, 25 bp, Homo sapien
gagtggcgcgagacgcgctcctcct

SEQ ID NO: 4820552 - DNA, 25 bp, Homo sapien
ggccaccaggccgagtggcgcgaga

SEQ ID NO: 4820553 - DNA, 25 bp, Homo sapien
agacgcgctcctcctaggtcagcgt

SEQ ID NO: 4820554 - DNA, 25 bp, Homo sapien
gactctaaacattgcctaaaggtgg

SEQ ID NO: 4820555 - DNA, 25 bp, Homo sapien
gacgcaagcttgttccccaaatagt

SEQ ID NO: 4820556 - DNA, 25 bp, Homo sapien
caaatagtggtgacctcaaactgca

SEQ ID NO: 4820557 - DNA, 25 bp, Homo sapien
tgagtatggccatatgactcctggg

SEQ ID NO: 4820558 - DNA, 25 bp, Homo sapien
gacattcaacaccagccaaaaggct

SEQ ID NO: 4820559 - DNA, 25 bp, Homo sapien
ggtgtcttcaataacccaggcctgc

SEQ ID NO: 4820560 - DNA, 25 bp, Homo sapien
tgaaacccacgtgtaaacctgcctg

SEQ ID NO: 4820561 - DNA, 25 bp, Homo sapien
tggttttcaaactggaagagaaaca

SEQ ID NO: 4820562 - DNA, 25 bp, Homo sapien
agcaatgaaggcaaggtcacggctg

SEQ ID NO: 4820563 - DNA, 25 bp, Homo sapien
tgaagcaatgaaggcaaggtcacgg

SEQ ID NO: 4820564 - DNA, 25 bp, Homo sapien
gatgaagcaatgaaggcaaggtcac

SEQ ID NO: 4820565 - DNA, 25 bp, Homo sapien
ctggatgaagcaatgaaggcaaggt

SEQ ID NO: 4820566 - DNA, 25 bp, Homo sapien
gagacacgaagcagcaggctgacgc

SEQ ID NO: 4820567 - DNA, 25 bp, Homo sapien
aagcagcaggctgacgcaccagaca

SEQ ID NO: 4820568 - DNA, 25 bp, Homo sapien
caactctcgagtgagacacgaagca

SEQ ID NO: 4820569 - DNA, 25 bp, Homo sapien
ccagaagcaactctcgagtgagaca

SEQ ID NO: 4820570 - DNA, 25 bp, Homo sapien
agggccctgggcagcgttctcagcc

SEQ ID NO: 4820571 - DNA, 25 bp, Homo sapien
cctgggcagcgttctcagcccagcc

SEQ ID NO: 4820572 - DNA, 25 bp, Homo sapien
tgggcagcgttctcagcccagccat

SEQ ID NO: 4820573 - DNA, 25 bp, Homo sapien
gccctgggcagcgttctcagcccag

SEQ ID NO: 4820574 - DNA, 25 bp, Homo sapien
cgatgtgaaaccaggcccgcatgtt

SEQ ID NO: 4820575 - DNA, 25 bp, Homo sapien
tcagaggcaacggaccactaaatgt

SEQ ID NO: 4820576 - DNA, 25 bp, Homo sapien
caccagatagacagacaaaggcgct

SEQ ID NO: 4820577 - DNA, 25 bp, Homo sapien
cagacttgagtacgccaggaatgca

SEQ ID NO: 4820578 - DNA, 25 bp, Homo sapien
tggtgcttgaccttccaccgcctgg

SEQ ID NO: 4820579 - DNA, 25 bp, Homo sapien
ggtggtgcttgaccttccaccgcct

SEQ ID NO: 4820580 - DNA, 25 bp, Homo sapien
ggtgcttgaccttccaccgcctgga

SEQ ID NO: 4820581 - DNA, 25 bp, Homo sapien
tgcttgaccttccaccgcctggacc

SEQ ID NO: 4820582 - DNA, 25 bp, Homo sapien
cacagagactcatgtccaggctgga

SEQ ID NO: 4820583 - DNA, 25 bp, Homo sapien
aagccacgtacagcacgacacagag

SEQ ID NO: 4820584 - DNA, 25 bp, Homo sapien
ctggagaagtcaaccccgaggaagg

SEQ ID NO: 4820585 - DNA, 25 bp, Homo sapien
aagaagaagtacatcaccatgagga

SEQ ID NO: 4820586 - DNA, 25 bp, Homo sapien
tgatgcaagctctctggaagggcag

SEQ ID NO: 4820587 - DNA, 25 bp, Homo sapien
cggacgctctgggtgtctcggtctc

SEQ ID NO: 4820588 - DNA, 25 bp, Homo sapien
caagctgtgatgcaagctctctgga

SEQ ID NO: 4820589 - DNA, 25 bp, Homo sapien
ctggagtttcccgtccaagctgtga

SEQ ID NO: 4820590 - DNA, 25 bp, Homo sapien
tacgtgtctaagaggttgtcgcggc

SEQ ID NO: 4820591 - DNA, 25 bp, Homo sapien
ccctggtctgcggaatacgtgtcta

SEQ ID NO: 4820592 - DNA, 25 bp, Homo sapien
catagtgctgcttcaagaatgtgag

SEQ ID NO: 4820593 - DNA, 25 bp, Homo sapien
gctggccaggcccttaatttcctca

SEQ ID NO: 4820594 - DNA, 25 bp, Homo sapien
gctgtaaggcccctttctgttgcag

SEQ ID NO: 4820595 - DNA, 25 bp, Homo sapien
gcccctttctgttgcagtctcatga

SEQ ID NO: 4820596 - DNA, 25 bp, Homo sapien
tgggctgtaaggcccctttctgttg

SEQ ID NO: 4820597 - DNA, 25 bp, Homo sapien
gtaaggcccctttctgttgcagtct

SEQ ID NO: 4820598 - DNA, 25 bp, Homo sapien
agctctgtgggcggcggcgatgcag

SEQ ID NO: 4820599 - DNA, 25 bp, Homo sapien
gtagtgggggcacatgcgggctggg

SEQ ID NO: 4820600 - DNA, 25 bp, Homo sapien
aggcctggcgagggtcctggtccca

SEQ ID NO: 4820601 - DNA, 25 bp, Homo sapien
cactgcctcagagccgagggctcgg

SEQ ID NO: 4820602 - DNA, 25 bp, Homo sapien
catactactaaaattcctcatcaaa

SEQ ID NO: 4820603 - DNA, 25 bp, Homo sapien
taattacgttccaagctttccagag

SEQ ID NO: 4820604 - DNA, 25 bp, Homo sapien
aaaacatcttcagagtctaacgggc

SEQ ID NO: 4820605 - DNA, 25 bp, Homo sapien
aacgggctaccagtgggtaccgatg

SEQ ID NO: 4820606 - DNA, 25 bp, Homo sapien
gaagagcccccggagtgagagaagc

SEQ ID NO: 4820607 - DNA, 25 bp, Homo sapien
tcgaagagcccccggagtgagagaa

SEQ ID NO: 4820608 - DNA, 25 bp, Homo sapien
agagcccccggagtgagagaagcat

SEQ ID NO: 4820609 - DNA, 25 bp, Homo sapien
gggtcgaagagcccccggagtgaga

SEQ ID NO: 4820610 - DNA, 25 bp, Homo sapien
gcacgaggccgcaaagctcagggac

SEQ ID NO: 4820611 - DNA, 25 bp, Homo sapien
aagctcagggacaagccccacggca

SEQ ID NO: 4820612 - DNA, 25 bp, Homo sapien
gccacccaagtcctgatcccgtcag

SEQ ID NO: 4820613 - DNA, 25 bp, Homo sapien
tccttgctgtcccaggaccagggcc

SEQ ID NO: 4820614 - DNA, 25 bp, Homo sapien
cgagtccatggattctttagccatt

SEQ ID NO: 4820615 - DNA, 25 bp, Homo sapien
aagaaggtgtgaacgtacctcctca

SEQ ID NO: 4820616 - DNA, 25 bp, Homo sapien
cacagcctgggggtcgtcttcaaag

SEQ ID NO: 4820617 - DNA, 25 bp, Homo sapien
gtgtgaacgtacctcctcattgtct

SEQ ID NO: 4820618 - DNA, 25 bp, Homo sapien
tccaacacgcccacgggtgctgcag

SEQ ID NO: 4820619 - DNA, 25 bp, Homo sapien
caagatgtccaacacgcccacgggt

SEQ ID NO: 4820620 - DNA, 25 bp, Homo sapien
agatgtccaacacgcccacgggtgc

SEQ ID NO: 4820621 - DNA, 25 bp, Homo sapien
aacacgcccacgggtgctgcaggct

SEQ ID NO: 4820622 - DNA, 25 bp, Homo sapien
tctcaccacgaatttaggctgggtc

SEQ ID NO: 4820623 - DNA, 25 bp, Homo sapien
caggtttgcatggtctagctgggca

SEQ ID NO: 4820624 - DNA, 25 bp, Homo sapien
tctggctgggcattcggtcggaatc

SEQ ID NO: 4820625 - DNA, 25 bp, Homo sapien
gacactctcccattaacaggtggaa

SEQ ID NO: 4820626 - DNA, 25 bp, Homo sapien
ggtgggtcgaggcttcaacagtcaa

SEQ ID NO: 4820627 - DNA, 25 bp, Homo sapien
acgggtaacccctcaactcagatcg

SEQ ID NO: 4820628 - DNA, 25 bp, Homo sapien
caaccagtgcatctgggtgggtcga

SEQ ID NO: 4820629 - DNA, 25 bp, Homo sapien
caacagtcaaagtgtggaacagttt

SEQ ID NO: 4820630 - DNA, 25 bp, Homo sapien
caagcagcacgctgggtttactgcc

SEQ ID NO: 4820631 - DNA, 25 bp, Homo sapien
cgtcggacaagcagcacgctgggtt

SEQ ID NO: 4820632 - DNA, 25 bp, Homo sapien
accacgcgggcgtcggacaagcagc

SEQ ID NO: 4820633 - DNA, 25 bp, Homo sapien
gctgggtttactgcccgcgagtaaa

SEQ ID NO: 4820634 - DNA, 25 bp, Homo sapien
gccacagagaagctgctgatctgga

SEQ ID NO: 4820635 - DNA, 25 bp, Homo sapien
ggggccacagagaagctgctgatct

SEQ ID NO: 4820636 - DNA, 25 bp, Homo sapien
gggccacagagaagctgctgatctg

SEQ ID NO: 4820637 - DNA, 25 bp, Homo sapien
ctgggggccacagagaagctgctga

SEQ ID NO: 4820638 - DNA, 25 bp, Homo sapien
tgttgttgaccaggtcaagcacggc

SEQ ID NO: 4820639 - DNA, 25 bp, Homo sapien
gaccaggtcaagcacggcgttgtag

SEQ ID NO: 4820640 - DNA, 25 bp, Homo sapien
agcttcttgactggcggccgtccag

SEQ ID NO: 4820641 - DNA, 25 bp, Homo sapien
ccgcatcttgttgttgaccaggtca

SEQ ID NO: 4820642 - DNA, 25 bp, Homo sapien
ggaacagcagtggacgcaggaggca

SEQ ID NO: 4820643 - DNA, 25 bp, Homo sapien
cactcgggaaatgggtggaatgagt

SEQ ID NO: 4820644 - DNA, 25 bp, Homo sapien
gacgcaggaggcactcgggaaatgg

SEQ ID NO: 4820645 - DNA, 25 bp, Homo sapien
aacagcagtggacgcaggaggcact

SEQ ID NO: 4820646 - DNA, 25 bp, Homo sapien
cagctccacccgcaggaggtagtgt

SEQ ID NO: 4820647 - DNA, 25 bp, Homo sapien
ggaggtagtgtagccctgactccag

SEQ ID NO: 4820648 - DNA, 25 bp, Homo sapien
tccacccgcaggaggtagtgtagcc

SEQ ID NO: 4820649 - DNA, 25 bp, Homo sapien
cccgcaggaggtagtgtagccctga

SEQ ID NO: 4820650 - DNA, 25 bp, Homo sapien
atggcagcgtcagggaatgcccaac

SEQ ID NO: 4820651 - DNA, 25 bp, Homo sapien
acgggatatggcagcgtcagggaat

SEQ ID NO: 4820652 - DNA, 25 bp, Homo sapien
gatatggcagcgtcagggaatgccc

SEQ ID NO: 4820653 - DNA, 25 bp, Homo sapien
ctaggacgggatatggcagcgtcag

SEQ ID NO: 4820654 - DNA, 25 bp, Homo sapien
gagggctcctgagcggccctcactg

SEQ ID NO: 4820655 - DNA, 25 bp, Homo sapien
cccctgggagggctcctgagcggcc

SEQ ID NO: 4820656 - DNA, 25 bp, Homo sapien
tgggagggctcctgagcggccctca

SEQ ID NO: 4820657 - DNA, 25 bp, Homo sapien
cctgggagggctcctgagcggccct

SEQ ID NO: 4820658 - DNA, 25 bp, Homo sapien
tgtctccgggggcttcagttcaaga

SEQ ID NO: 4820659 - DNA, 25 bp, Homo sapien
tctccgggggcttcagttcaagagg

SEQ ID NO: 4820660 - DNA, 25 bp, Homo sapien
ctccgggggcttcagttcaagagga

SEQ ID NO: 4820661 - DNA, 25 bp, Homo sapien
tccgggggcttcagttcaagaggaa

SEQ ID NO: 4820662 - DNA, 25 bp, Homo sapien
ccggcaatgacttcaaataagacga

SEQ ID NO: 4820663 - DNA, 25 bp, Homo sapien
aattctctccaaaccacgatttctg

SEQ ID NO: 4820664 - DNA, 25 bp, Homo sapien
aataagacgaaaagaaggcccgcag

SEQ ID NO: 4820665 - DNA, 25 bp, Homo sapien
tcacatccggcaatgacttcaaata

SEQ ID NO: 4820666 - DNA, 25 bp, Homo sapien
catacgggatcaggtctaagatcac

SEQ ID NO: 4820667 - DNA, 25 bp, Homo sapien
gggtcaccacgatgctttcatacgg

SEQ ID NO: 4820668 - DNA, 25 bp, Homo sapien
taatcaatccatgcgacccatttgg

SEQ ID NO: 4820669 - DNA, 25 bp, Homo sapien
agaaatgctttgtccccgtccagtg

SEQ ID NO: 4820670 - DNA, 25 bp, Homo sapien
gccttcccaagtgcgtctccaaaag

SEQ ID NO: 4820671 - DNA, 25 bp, Homo sapien
ggcacaaagcgagacggtcacagtg

SEQ ID NO: 4820672 - DNA, 25 bp, Homo sapien
tttcctacattcaccgcaaggcccc

SEQ ID NO: 4820673 - DNA, 25 bp, Homo sapien
ccctcgcaggggcaaagctgtttcc

SEQ ID NO: 4820674 - DNA, 25 bp, Homo sapien
ttcaaagacaatagccacgtaatgg

SEQ ID NO: 4820675 - DNA, 25 bp, Homo sapien
caaggtaggagctgttgctttcaaa

SEQ ID NO: 4820676 - DNA, 25 bp, Homo sapien
gctgccacggttgtcaagaagggaa

SEQ ID NO: 4820677 - DNA, 25 bp, Homo sapien
aatagccacgtaatggctgccacgg

SEQ ID NO: 4820678 - DNA, 25 bp, Homo sapien
gccggcttccttccgtgtggttctg

SEQ ID NO: 4820679 - DNA, 25 bp, Homo sapien
cggcttccttccgtgtggttctgca

SEQ ID NO: 4820680 - DNA, 25 bp, Homo sapien
aggaagtcaatcatcgtctgtctga

SEQ ID NO: 4820681 - DNA, 25 bp, Homo sapien
gtctgtctgactgttcgcagctctc

SEQ ID NO: 4820682 - DNA, 25 bp, Homo sapien
gtcctcgtggggcaggcatacaccc

SEQ ID NO: 4820683 - DNA, 25 bp, Homo sapien
tgtcctcgtggggcaggcatacacc

SEQ ID NO: 4820684 - DNA, 25 bp, Homo sapien
ctgtcctcgtggggcaggcatacac

SEQ ID NO: 4820685 - DNA, 25 bp, Homo sapien
tcctcgtggggcaggcatacaccca

SEQ ID NO: 4820686 - DNA, 25 bp, Homo sapien
ttctccagttgtaaactcctttgta

SEQ ID NO: 4820687 - DNA, 25 bp, Homo sapien
agttgtaaactcctttgtaaatgct

SEQ ID NO: 4820688 - DNA, 25 bp, Homo sapien
ccagttgtaaactcctttgtaaatg

SEQ ID NO: 4820689 - DNA, 25 bp, Homo sapien
tgtaaactcctttgtaaatgcttta

SEQ ID NO: 4820690 - DNA, 25 bp, Homo sapien
aaatgcaaacgaagccgccagtgct

SEQ ID NO: 4820691 - DNA, 25 bp, Homo sapien
aaacgaagccgccagtgcttcctgc

SEQ ID NO: 4820692 - DNA, 25 bp, Homo sapien
gccagggaaatgcaaacgaagccgc

SEQ ID NO: 4820693 - DNA, 25 bp, Homo sapien
gcagccgccagggaaatgcaaacga

SEQ ID NO: 4820694 - DNA, 25 bp, Homo sapien
agctgcgacgcgaatggcactggcc

SEQ ID NO: 4820695 - DNA, 25 bp, Homo sapien
gcagtccagagctgcgacgcgaatg

SEQ ID NO: 4820696 - DNA, 25 bp, Homo sapien
atggcacacggcctggttcttctct

SEQ ID NO: 4820697 - DNA, 25 bp, Homo sapien
tagaagtggatgtcgtagtcatggc

SEQ ID NO: 4820698 - DNA, 25 bp, Homo sapien
tggctcgtgcttcagtcaccagtat

SEQ ID NO: 4820699 - DNA, 25 bp, Homo sapien
tgcctggctcgtgcttcagtcacca

SEQ ID NO: 4820700 - DNA, 25 bp, Homo sapien
ggagtgcctggctcgtgcttcagtc

SEQ ID NO: 4820701 - DNA, 25 bp, Homo sapien
tcgtgcttcagtcaccagtatcaaa

SEQ ID NO: 4820702 - DNA, 25 bp, Homo sapien
tggaatgcagaatcccaggtgccaa

SEQ ID NO: 4820703 - DNA, 25 bp, Homo sapien
ccaggtgccaaagggctgagcccag

SEQ ID NO: 4820704 - DNA, 25 bp, Homo sapien
atgcagaatcccaggtgccaaaggg

SEQ ID NO: 4820705 - DNA, 25 bp, Homo sapien
aatcccaggtgccaaagggctgagc

SEQ ID NO: 4820706 - DNA, 25 bp, Homo sapien
tctgtttattgatagaaaacaggcc

SEQ ID NO: 4820707 - DNA, 25 bp, Homo sapien
taatgtctgtttattgatagaaaac

SEQ ID NO: 4820708 - DNA, 25 bp, Homo sapien
tattgatagaaaacaggccacgtcc

SEQ ID NO: 4820709 - DNA, 25 bp, Homo sapien
tgatagaaaacaggccacgtccaga

SEQ ID NO: 4820710 - DNA, 25 bp, Homo sapien
aaggccgaagtcccacagtgccggg

SEQ ID NO: 4820711 - DNA, 25 bp, Homo sapien
cccacagtgccggggagcgcaggag

SEQ ID NO: 4820712 - DNA, 25 bp, Homo sapien
gaaggccgaagtcccacagtgccgg

SEQ ID NO: 4820713 - DNA, 25 bp, Homo sapien
ggaaggccgaagtcccacagtgccg

SEQ ID NO: 4820714 - DNA, 25 bp, Homo sapien
agctcggctccgtcttgccagggct

SEQ ID NO: 4820715 - DNA, 25 bp, Homo sapien
gctcggctccgtcttgccagggctg

SEQ ID NO: 4820716 - DNA, 25 bp, Homo sapien
ctcggctccgtcttgccagggctgg

SEQ ID NO: 4820717 - DNA, 25 bp, Homo sapien
ggccgtcaggatctcttcgatattt

SEQ ID NO: 4820718 - DNA, 25 bp, Homo sapien
tcgcctctggccgtcaggatctctt

SEQ ID NO: 4820719 - DNA, 25 bp, Homo sapien
cgccacacggtgcacctgctcgcct

SEQ ID NO: 4820720 - DNA, 25 bp, Homo sapien
cctgctcgcctctggccgtcaggat

SEQ ID NO: 4820721 - DNA, 25 bp, Homo sapien
ttcccattcaggtccgagaaccagc

SEQ ID NO: 4820722 - DNA, 25 bp, Homo sapien
ccagcccaggttgtcagcgatgata

SEQ ID NO: 4820723 - DNA, 25 bp, Homo sapien
tgataggccagcttggagatgcgct

SEQ ID NO: 4820724 - DNA, 25 bp, Homo sapien
gcaggtcacaatgaccacgccttgg

SEQ ID NO: 4820725 - DNA, 25 bp, Homo sapien
ccgtgtagcgtcagatacgggtctg

SEQ ID NO: 4820726 - DNA, 25 bp, Homo sapien
tagcgtcagatacgggtctgtcccc

SEQ ID NO: 4820727 - DNA, 25 bp, Homo sapien
tcagatacgggtctgtccccggttc

SEQ ID NO: 4820728 - DNA, 25 bp, Homo sapien
ccgcaggccgtgtagcgtcagatac

SEQ ID NO: 4820729 - DNA, 25 bp, Homo sapien
gcccctgctcggagcttgagcgccg

SEQ ID NO: 4820730 - DNA, 25 bp, Homo sapien
ccccggcccctgctcggagcttgag

SEQ ID NO: 4820731 - DNA, 25 bp, Homo sapien
ttgcaggtgtagacgagctggtagt

SEQ ID NO: 4820732 - DNA, 25 bp, Homo sapien
acgagctggtagtgcgccgcctcca

SEQ ID NO: 4820733 - DNA, 25 bp, Homo sapien
cacagccgcctcaggcagggcgccc

SEQ ID NO: 4820734 - DNA, 25 bp, Homo sapien
acagccgcctcaggcagggcgcccg

SEQ ID NO: 4820735 - DNA, 25 bp, Homo sapien
gcgccgcgcagcgcagtccgcagca

SEQ ID NO: 4820736 - DNA, 25 bp, Homo sapien
ggcgcgccgcgcagcgcagtccgca

SEQ ID NO: 4820737 - DNA, 25 bp, Homo sapien
cgccgcgcagcgcagtccgcagcat

SEQ ID NO: 4820738 - DNA, 25 bp, Homo sapien
ctcggcgcgccgcgcagcgcagtcc

SEQ ID NO: 4820739 - DNA, 25 bp, Homo sapien
catcttggaagtgggcgccgggcgg

SEQ ID NO: 4820740 - DNA, 25 bp, Homo sapien
gcggaagcggcgttcttgggcttcc

SEQ ID NO: 4820741 - DNA, 25 bp, Homo sapien
ggccgcagcgaggagggacggccgc

SEQ ID NO: 4820742 - DNA, 25 bp, Homo sapien
ctgcgcgcgagtgtccgagcgggaa

SEQ ID NO: 4820743 - DNA, 25 bp, Homo sapien
tgtgttacatggtgaaacagaacag

SEQ ID NO: 4820744 - DNA, 25 bp, Homo sapien
gcgggtcacccgtgctgtttattta

SEQ ID NO: 4820745 - DNA, 25 bp, Homo sapien
cagaacagatcctgaagttacacag

SEQ ID NO: 4820746 - DNA, 25 bp, Homo sapien
gcatggcctccgcaaaatgagtgcc

SEQ ID NO: 4820747 - DNA, 25 bp, Homo sapien
aacggccccaatgcccggcagtccg

SEQ ID NO: 4820748 - DNA, 25 bp, Homo sapien
acaaacggccccaatgcccggcagt

SEQ ID NO: 4820749 - DNA, 25 bp, Homo sapien
ggccccaatgcccggcagtccggct

SEQ ID NO: 4820750 - DNA, 25 bp, Homo sapien
taacaaacggccccaatgcccggca

SEQ ID NO: 4820751 - DNA, 25 bp, Homo sapien
caccagattcctcgttccaggccaa

SEQ ID NO: 4820752 - DNA, 25 bp, Homo sapien
ctcgttccaggccaagtcagcgacg

SEQ ID NO: 4820753 - DNA, 25 bp, Homo sapien
gttccaggccaagtcagcgacggct

SEQ ID NO: 4820754 - DNA, 25 bp, Homo sapien
ccaggccaagtcagcgacggctcgg

SEQ ID NO: 4820755 - DNA, 25 bp, Homo sapien
cgggccggtgggtgtgccctggtcg

SEQ ID NO: 4820756 - DNA, 25 bp, Homo sapien
gcaggaggccgggccggtgggtgtg

SEQ ID NO: 4820757 - DNA, 25 bp, Homo sapien
gggtgtgccctggtcggggcctgcg

SEQ ID NO: 4820758 - DNA, 25 bp, Homo sapien
caggaggccgggccggtgggtgtgc

SEQ ID NO: 4820759 - DNA, 25 bp, Homo sapien
aggagccctcagtgtcggtgttgtc

SEQ ID NO: 4820760 - DNA, 25 bp, Homo sapien
cctcagtgtcggtgttgtcgctgcc

SEQ ID NO: 4820761 - DNA, 25 bp, Homo sapien
tgttgtcgctgcccgtggtgttctc

SEQ ID NO: 4820762 - DNA, 25 bp, Homo sapien
cagtgtcggtgttgtcgctgcccgt

SEQ ID NO: 4820763 - DNA, 25 bp, Homo sapien
aaactctctttgaggcgccgccgct

SEQ ID NO: 4820764 - DNA, 25 bp, Homo sapien
aaaactctctttgaggcgccgccgc

SEQ ID NO: 4820765 - DNA, 25 bp, Homo sapien
ctggcccctgtaactgcagactggt

SEQ ID NO: 4820766 - DNA, 25 bp, Homo sapien
tggttgggaggcgaggagcccagac

SEQ ID NO: 4820767 - DNA, 25 bp, Homo sapien
tgtgggacctgcctgtacccctgga

SEQ ID NO: 4820768 - DNA, 25 bp, Homo sapien
cctgtacccctggaggtgagccggt

SEQ ID NO: 4820769 - DNA, 25 bp, Homo sapien
aagcccgaggtggtgcttgctctca

SEQ ID NO: 4820770 - DNA, 25 bp, Homo sapien
tgtttctacaacaaagcccgaggtg

SEQ ID NO: 4820771 - DNA, 25 bp, Homo sapien
ttctacaacaaagcccgaggtggtg

SEQ ID NO: 4820772 - DNA, 25 bp, Homo sapien
acaacaaagcccgaggtggtgcttg

SEQ ID NO: 4820773 - DNA, 25 bp, Homo sapien
ctcatccactgtaaaggccctcgga

SEQ ID NO: 4820774 - DNA, 25 bp, Homo sapien
accgcaccccgagcactgtgggcag

SEQ ID NO: 4820775 - DNA, 25 bp, Homo sapien
ggatccacttcgcagcccagacacc

SEQ ID NO: 4820776 - DNA, 25 bp, Homo sapien
ggaaaaccaggaccaggcacatcca

SEQ ID NO: 4820777 - DNA, 25 bp, Homo sapien
ctgtgatcggtcaccctgaggccca

SEQ ID NO: 4820778 - DNA, 25 bp, Homo sapien
ccactctccctgtgatcggtcaccc

SEQ ID NO: 4820779 - DNA, 25 bp, Homo sapien
tccctgtgatcggtcaccctgaggc

SEQ ID NO: 4820780 - DNA, 25 bp, Homo sapien
tctccctgtgatcggtcaccctgag

SEQ ID NO: 4820781 - DNA, 25 bp, Homo sapien
tgcaaagggctgtttcgggctcccc

SEQ ID NO: 4820782 - DNA, 25 bp, Homo sapien
tcctggtgcagagctgcaaagggct

SEQ ID NO: 4820783 - DNA, 25 bp, Homo sapien
aaaacctgctcctggtgcagagctg

SEQ ID NO: 4820784 - DNA, 25 bp, Homo sapien
ggttccgcaaaacctgctcctggtg

SEQ ID NO: 4820785 - DNA, 25 bp, Homo sapien
tactgcagcaattgggagagaacct

SEQ ID NO: 4820786 - DNA, 25 bp, Homo sapien
tgctgggccacgtatagcacggctg

SEQ ID NO: 4820787 - DNA, 25 bp, Homo sapien
ggaagcttgtccaactccggtgcag

SEQ ID NO: 4820788 - DNA, 25 bp, Homo sapien
gcctgtgctgaagatgggcctcact

SEQ ID NO: 4820789 - DNA, 25 bp, Homo sapien
ctttgtctgagagctgggtgtcctc

SEQ ID NO: 4820790 - DNA, 25 bp, Homo sapien
tttgtctgagagctgggtgtcctcc

SEQ ID NO: 4820791 - DNA, 25 bp, Homo sapien
gggtgagccatcttccaggtcggag

SEQ ID NO: 4820792 - DNA, 25 bp, Homo sapien
tgggtgagccatcttccaggtcgga

SEQ ID NO: 4820793 - DNA, 25 bp, Homo sapien
agaacaacctgctaggctgcctgat

SEQ ID NO: 4820794 - DNA, 25 bp, Homo sapien
acagagcgggatcctccagggagcc

SEQ ID NO: 4820795 - DNA, 25 bp, Homo sapien
ggaccctgaactgctcgtgtgccct

SEQ ID NO: 4820796 - DNA, 25 bp, Homo sapien
tccatgcccagaacaacctgctagg

SEQ ID NO: 4820797 - DNA, 25 bp, Homo sapien
cggccagtagctgcgcctcacactg

SEQ ID NO: 4820798 - DNA, 25 bp, Homo sapien
tgtgcgtgcagctcctcccgcgtgg

SEQ ID NO: 4820799 - DNA, 25 bp, Homo sapien
agctcatccgccttctcgcccagct

SEQ ID NO: 4820800 - DNA, 25 bp, Homo sapien
acctgcttgcgcagcgcgtccttct

SEQ ID NO: 4820801 - DNA, 25 bp, Homo sapien
ggccgaccctcagtgagggccccaa

SEQ ID NO: 4820802 - DNA, 25 bp, Homo sapien
caactccaagcagaggctccggagg

SEQ ID NO: 4820803 - DNA, 25 bp, Homo sapien
tgacgggacagcacaaggccgaccc

SEQ ID NO: 4820804 - DNA, 25 bp, Homo sapien
gctccggaggacgtcaagccgctgg

SEQ ID NO: 4820805 - DNA, 25 bp, Homo sapien
ggcactgcagctcgaacatctcctt

SEQ ID NO: 4820806 - DNA, 25 bp, Homo sapien
gatggcctcgatgcggtccttgtac

SEQ ID NO: 4820807 - DNA, 25 bp, Homo sapien
ctggtcccgctcaatggcgacctcc

SEQ ID NO: 4820808 - DNA, 25 bp, Homo sapien
ggagtccttacgtagtgccaggcac

SEQ ID NO: 4820809 - DNA, 25 bp, Homo sapien
ctcaggcaccatgagcccagaggtt

SEQ ID NO: 4820810 - DNA, 25 bp, Homo sapien
tgcacttccagaccgcggcaggaca

SEQ ID NO: 4820811 - DNA, 25 bp, Homo sapien
gctcagaagcatgtggtcaggccag

SEQ ID NO: 4820812 - DNA, 25 bp, Homo sapien
ggagagggcaccgtccactgtgcct

SEQ ID NO: 4820813 - DNA, 25 bp, Homo sapien
cctggcggaggtccttgcgcaggga

SEQ ID NO: 4820814 - DNA, 25 bp, Homo sapien
ctccagtacctggatgtaggggctg

SEQ ID NO: 4820815 - DNA, 25 bp, Homo sapien
tcctccagtacctggatgtaggggc

SEQ ID NO: 4820816 - DNA, 25 bp, Homo sapien
gaggtccttgcgcagggagaagatg

SEQ ID NO: 4820817 - DNA, 25 bp, Homo sapien
gcaaaaggcaatggcctggctggga

SEQ ID NO: 4820818 - DNA, 25 bp, Homo sapien
tgcacctgccctgcctacggcccca

SEQ ID NO: 4820819 - DNA, 25 bp, Homo sapien
ctgaagggggcaaaaggcaatggcc

SEQ ID NO: 4820820 - DNA, 25 bp, Homo sapien
aggcaatggcctggctgggaaggcc

SEQ ID NO: 4820821 - DNA, 25 bp, Homo sapien
tggcgtgcctgagcttcagcgtgtg

SEQ ID NO: 4820822 - DNA, 25 bp, Homo sapien
gcttcagcgtgtgcttgcgctccac

SEQ ID NO: 4820823 - DNA, 25 bp, Homo sapien
ccatggcgtgcctgagcttcagcgt

SEQ ID NO: 4820824 - DNA, 25 bp, Homo sapien
cttcagcgtgtgcttgcgctccacc

SEQ ID NO: 4820825 - DNA, 25 bp, Homo sapien
ggccttcatgaggctgtgcttgagc

SEQ ID NO: 4820826 - DNA, 25 bp, Homo sapien
tcggccttcatgaggctgtgcttga

SEQ ID NO: 4820827 - DNA, 25 bp, Homo sapien
ctcggccttcatgaggctgtgcttg

SEQ ID NO: 4820828 - DNA, 25 bp, Homo sapien
cggccttcatgaggctgtgcttgag

SEQ ID NO: 4820829 - DNA, 25 bp, Homo sapien
gcgcatggccaggtcgtagttctcc

SEQ ID NO: 4820830 - DNA, 25 bp, Homo sapien
agctgcaggtcacggttccgcatga

SEQ ID NO: 4820831 - DNA, 25 bp, Homo sapien
ttctgcagcttcatgacctcagtca

SEQ ID NO: 4820832 - DNA, 25 bp, Homo sapien
tgagtcaggcctgactccccggacg

SEQ ID NO: 4820833 - DNA, 25 bp, Homo sapien
gtgtcagatggtgccgtgttccccg

SEQ ID NO: 4820834 - DNA, 25 bp, Homo sapien
gccagtgtcagatggtgccgtgttc

SEQ ID NO: 4820835 - DNA, 25 bp, Homo sapien
tggtgccgtgttccccggtggccca

SEQ ID NO: 4820836 - DNA, 25 bp, Homo sapien
tcagatggtgccgtgttccccggtg

SEQ ID NO: 4820837 - DNA, 25 bp, Homo sapien
cgaggaaggccacgtagcccttgtg

SEQ ID NO: 4820838 - DNA, 25 bp, Homo sapien
gtacagctgcgggtagtagagctcc

SEQ ID NO: 4820839 - DNA, 25 bp, Homo sapien
ccttcttgtacagctgcgggtagta

SEQ ID NO: 4820840 - DNA, 25 bp, Homo sapien
ccttgtggccggtccgctgcaggat

SEQ ID NO: 4820841 - DNA, 25 bp, Homo sapien
tccagcactcgtcatcgttctcgta

SEQ ID NO: 4820842 - DNA, 25 bp, Homo sapien
tgcactgccgcaggtaaggtgtgat

SEQ ID NO: 4820843 - DNA, 25 bp, Homo sapien
gtcgatgaccgaggtgagcgtcacc

SEQ ID NO: 4820844 - DNA, 25 bp, Homo sapien
ttccgtttgcggatgaccaggttgg

SEQ ID NO: 4820845 - DNA, 25 bp, Homo sapien
tcagggcatcgagggggatcagccc

SEQ ID NO: 4820846 - DNA, 25 bp, Homo sapien
ccagggctctcgtcagggcatcgag

SEQ ID NO: 4820847 - DNA, 25 bp, Homo sapien
agtgctgagagcgatgccggctcct

SEQ ID NO: 4820848 - DNA, 25 bp, Homo sapien
cactccttctcagacgctgggccag

SEQ ID NO: 4820849 - DNA, 25 bp, Homo sapien
gcaggttggccagtggccctcccac

SEQ ID NO: 4820850 - DNA, 25 bp, Homo sapien
gtctgagagaggaactccccctaca

SEQ ID NO: 4820851 - DNA, 25 bp, Homo sapien
atccatgtcacccagatacgcagcg

SEQ ID NO: 4820852 - DNA, 25 bp, Homo sapien
ctggagcctgcaaggttagccacct

SEQ ID NO: 4820853 - DNA, 25 bp, Homo sapien
gagccggttcttgtgggacttcctc

SEQ ID NO: 4820854 - DNA, 25 bp, Homo sapien
gccggttcttgtgggacttcctcat

SEQ ID NO: 4820855 - DNA, 25 bp, Homo sapien
gctgggggagccggttcttgtggga

SEQ ID NO: 4820856 - DNA, 25 bp, Homo sapien
cagctgggggagccggttcttgtgg

SEQ ID NO: 4820857 - DNA, 25 bp, Homo sapien
ggagacatagttgccccaggcttgg

SEQ ID NO: 4820858 - DNA, 25 bp, Homo sapien
gctgatgatgcaagagtggccaccc

SEQ ID NO: 4820859 - DNA, 25 bp, Homo sapien
aaaacactggccacacggtagacag

SEQ ID NO: 4820860 - DNA, 25 bp, Homo sapien
gaaacgctggtttccagcccagagg

SEQ ID NO: 4820861 - DNA, 25 bp, Homo sapien
aggagcacgccggacgcctgtgcac

SEQ ID NO: 4820862 - DNA, 25 bp, Homo sapien
ggagcacgccggacgcctgtgcact

SEQ ID NO: 4820863 - DNA, 25 bp, Homo sapien
gagcacgccggacgcctgtgcactt

SEQ ID NO: 4820864 - DNA, 25 bp, Homo sapien
gaggagcacgccggacgcctgtgca

SEQ ID NO: 4820865 - DNA, 25 bp, Homo sapien
agtcagtcggcaggcccgcctctgt

SEQ ID NO: 4820866 - DNA, 25 bp, Homo sapien
tgctccatgccacacagtcagtcgg

SEQ ID NO: 4820867 - DNA, 25 bp, Homo sapien
aggtgtgcacttggggaacagccat

SEQ ID NO: 4820868 - DNA, 25 bp, Homo sapien
atgccacacagtcagtcggcaggcc

SEQ ID NO: 4820869 - DNA, 25 bp, Homo sapien
gtgggctgtctctcgtcagcagggc

SEQ ID NO: 4820870 - DNA, 25 bp, Homo sapien
gggctgtctctcgtcagcagggcca

SEQ ID NO: 4820871 - DNA, 25 bp, Homo sapien
tgggctgtctctcgtcagcagggcc

SEQ ID NO: 4820872 - DNA, 25 bp, Homo sapien
ggtgggctgtctctcgtcagcaggg

SEQ ID NO: 4820873 - DNA, 25 bp, Homo sapien
agaccccaagcagggctgggacaga

SEQ ID NO: 4820874 - DNA, 25 bp, Homo sapien
gctgggacagacaaacaggaaccaa

SEQ ID NO: 4820875 - DNA, 25 bp, Homo sapien
ctggaacacaggaacaccaggtggg

SEQ ID NO: 4820876 - DNA, 25 bp, Homo sapien
cggccacgcccagtctgcttggtaa

SEQ ID NO: 4820877 - DNA, 25 bp, Homo sapien
atgcacgggaacagggcaccaccag

SEQ ID NO: 4820878 - DNA, 25 bp, Homo sapien
gttttacaagctgggagacgacgca

SEQ ID NO: 4820879 - DNA, 25 bp, Homo sapien
acgacgcagcaatgcacgggaacag

SEQ ID NO: 4820880 - DNA, 25 bp, Homo sapien
gggatggtgatcgttttacaagctg

SEQ ID NO: 4820881 - DNA, 25 bp, Homo sapien
gagggcctccatgaccctggacctg

SEQ ID NO: 4820882 - DNA, 25 bp, Homo sapien
acagtggtgccaaggcccgaggcat

SEQ ID NO: 4820883 - DNA, 25 bp, Homo sapien
tcccctgggttgtagggcagtggcc

SEQ ID NO: 4820884 - DNA, 25 bp, Homo sapien
acacctgctgtgagcgccaaagagc

SEQ ID NO: 4820885 - DNA, 25 bp, Homo sapien
cagggtcattagaagtatccaggca

SEQ ID NO: 4820886 - DNA, 25 bp, Homo sapien
agcacgtccaggtcgtcagggtcat

SEQ ID NO: 4820887 - DNA, 25 bp, Homo sapien
atgccgggttctgagcacgtccagg

SEQ ID NO: 4820888 - DNA, 25 bp, Homo sapien
tgtgcctggcatgccgggttctgag

SEQ ID NO: 4820889 - DNA, 25 bp, Homo sapien
catggtttcacctacagagattgga

SEQ ID NO: 4820890 - DNA, 25 bp, Homo sapien
gagattggaaaactctccccaagga

SEQ ID NO: 4820891 - DNA, 25 bp, Homo sapien
agaatctacacgcaactgggcaggc

SEQ ID NO: 4820892 - DNA, 25 bp, Homo sapien
gctcctgcacgagaatgaggcctct

SEQ ID NO: 4820893 - DNA, 25 bp, Homo sapien
tgtctgcaagttccagctcactcag

SEQ ID NO: 4820894 - DNA, 25 bp, Homo sapien
tgtggctgtcgtgcagcccggctgc

SEQ ID NO: 4820895 - DNA, 25 bp, Homo sapien
tctgcaagttccagctcactcagga

SEQ ID NO: 4820896 - DNA, 25 bp, Homo sapien
tgaatggggcatgtggctgtcgtgc

SEQ ID NO: 4820897 - DNA, 25 bp, Homo sapien
gaaccgcgcccgcaacaggaggtag

SEQ ID NO: 4820898 - DNA, 25 bp, Homo sapien
gaggtaggccgggttgtcctggagc

SEQ ID NO: 4820899 - DNA, 25 bp, Homo sapien
tcagagcccaccctcgaaggtactg

SEQ ID NO: 4820900 - DNA, 25 bp, Homo sapien
ggtactgagagggtggtgcggacgc

SEQ ID NO: 4820901 - DNA, 25 bp, Homo sapien
agggccttcttgtggagtaggagac

SEQ ID NO: 4820902 - DNA, 25 bp, Homo sapien
ttcttgtggagtaggagaccggaca

SEQ ID NO: 4820903 - DNA, 25 bp, Homo sapien
ccggacagagctcgcaggctgcaca

SEQ ID NO: 4820904 - DNA, 25 bp, Homo sapien
agaccggacagagctcgcaggctgc

SEQ ID NO: 4820905 - DNA, 25 bp, Homo sapien
ctggggtaggggcggcttctccagg

SEQ ID NO: 4820906 - DNA, 25 bp, Homo sapien
gctggggtaggggcggcttctccag

SEQ ID NO: 4820907 - DNA, 25 bp, Homo sapien
tcccccttggctcagttgctgggat

SEQ ID NO: 4820908 - DNA, 25 bp, Homo sapien
ggtcagcgtgggaggacgtcctggg

SEQ ID NO: 4820909 - DNA, 25 bp, Homo sapien
gcgtgggaggacgtcctgggctcag

SEQ ID NO: 4820910 - DNA, 25 bp, Homo sapien
ccccttggctcagttgctgggatga

SEQ ID NO: 4820911 - DNA, 25 bp, Homo sapien
ccaggcccagagagcggtacattta

SEQ ID NO: 4820912 - DNA, 25 bp, Homo sapien
ttcttgagccggcacgtttgggaag

SEQ ID NO: 4820913 - DNA, 25 bp, Homo sapien
catgtggccctcctatgtgcgtcag

SEQ ID NO: 4820914 - DNA, 25 bp, Homo sapien
ctggaggatcacagacgaggagacc

SEQ ID NO: 4820915 - DNA, 25 bp, Homo sapien
ctggggtgctctgggcacttgagga

SEQ ID NO: 4820916 - DNA, 25 bp, Homo sapien
ggggtgctctgggcacttgaggatg

SEQ ID NO: 4820917 - DNA, 25 bp, Homo sapien
tggggtgctctgggcacttgaggat

SEQ ID NO: 4820918 - DNA, 25 bp, Homo sapien
gggtgctctgggcacttgaggatgc

SEQ ID NO: 4820919 - DNA, 25 bp, Homo sapien
tgttcctgctcctccaatgagtgac

SEQ ID NO: 4820920 - DNA, 25 bp, Homo sapien
ccaatgagtgacactgctttgtcac

SEQ ID NO: 4820921 - DNA, 25 bp, Homo sapien
tgctcctccaatgagtgacactgct

SEQ ID NO: 4820922 - DNA, 25 bp, Homo sapien
tcctccaatgagtgacactgctttg

SEQ ID NO: 4820923 - DNA, 25 bp, Homo sapien
aggaggcctcgctgaacttctgtga

SEQ ID NO: 4820924 - DNA, 25 bp, Homo sapien
cccatgtccatgaccgcccagcggg

SEQ ID NO: 4820925 - DNA, 25 bp, Homo sapien
cggcagacagcgcccatgtccatga

SEQ ID NO: 4820926 - DNA, 25 bp, Homo sapien
tgtgagtttggtttctggagcagaa

SEQ ID NO: 4820927 - DNA, 25 bp, Homo sapien
tggtgggtcccgagcaccagcctgg

SEQ ID NO: 4820928 - DNA, 25 bp, Homo sapien
cttcctctctcggacgacctccaag

SEQ ID NO: 4820929 - DNA, 25 bp, Homo sapien
cagccggcagtatcgatgtggaaca

SEQ ID NO: 4820930 - DNA, 25 bp, Homo sapien
acctccaagcagccggcagtatcga

SEQ ID NO: 4820931 - DNA, 25 bp, Homo sapien
agggtaaacacaggggtgctggcca

SEQ ID NO: 4820932 - DNA, 25 bp, Homo sapien
gtgctggccaggcgggcctgctgca

SEQ ID NO: 4820933 - DNA, 25 bp, Homo sapien
aaacagggtaaacacaggggtgctg

SEQ ID NO: 4820934 - DNA, 25 bp, Homo sapien
acagggtaaacacaggggtgctggc

SEQ ID NO: 4820935 - DNA, 25 bp, Homo sapien
ggataagtggaaagcagccccagct

SEQ ID NO: 4820936 - DNA, 25 bp, Homo sapien
ctgcgggcacagggggataagtgga

SEQ ID NO: 4820937 - DNA, 25 bp, Homo sapien
atgggcacagggggatgggtggaaa

SEQ ID NO: 4820938 - DNA, 25 bp, Homo sapien
agctcccacgtgcctttcgaggcgg

SEQ ID NO: 4820939 - DNA, 25 bp, Homo sapien
agcctgcggttcaggagcctccggt

SEQ ID NO: 4820940 - DNA, 25 bp, Homo sapien
tgtgcagggcacgacaacgtcccct

SEQ ID NO: 4820941 - DNA, 25 bp, Homo sapien
tgcagagcgtgtctccagcgccgct

SEQ ID NO: 4820942 - DNA, 25 bp, Homo sapien
cttgagtctgcactacggcgggtct

SEQ ID NO: 4820943 - DNA, 25 bp, Homo sapien
gccgtagccactgcacatgggatcg

SEQ ID NO: 4820944 - DNA, 25 bp, Homo sapien
gggtggctctgtgccgtagccactg

SEQ ID NO: 4820945 - DNA, 25 bp, Homo sapien
gatcgggccacgctgtcaccagagc

SEQ ID NO: 4820946 - DNA, 25 bp, Homo sapien
ctgcacatgggatcgggccacgctg

SEQ ID NO: 4820947 - DNA, 25 bp, Homo sapien
ggggtggctgcctcagctgctcttt

SEQ ID NO: 4820948 - DNA, 25 bp, Homo sapien
gtgggcaggggtggctgcctcagct

SEQ ID NO: 4820949 - DNA, 25 bp, Homo sapien
gggatgaggtgggcaggggtggctg

SEQ ID NO: 4820950 - DNA, 25 bp, Homo sapien
gcaggggtggctgcctcagctgctc

SEQ ID NO: 4820951 - DNA, 25 bp, Homo sapien
ctgagcaccctcagcacggtctcca

SEQ ID NO: 4820952 - DNA, 25 bp, Homo sapien
gcacggtctccacaggcactgtcag

SEQ ID NO: 4820953 - DNA, 25 bp, Homo sapien
ccgagcagccgtgttggccctgagc

SEQ ID NO: 4820954 - DNA, 25 bp, Homo sapien
agcagccgtgttggccctgagcacc

SEQ ID NO: 4820955 - DNA, 25 bp, Homo sapien
cctggcagggacctgcaccggactc

SEQ ID NO: 4820956 - DNA, 25 bp, Homo sapien
tgcaccggactcgtctcctctccag

SEQ ID NO: 4820957 - DNA, 25 bp, Homo sapien
ccgcggctgtggtggaagcttcctt

SEQ ID NO: 4820958 - DNA, 25 bp, Homo sapien
gcgcccgccgggcgagtgtctgctg

SEQ ID NO: 4820959 - DNA, 25 bp, Homo sapien
ccacaggtccatgtccgggaccatg

SEQ ID NO: 4820960 - DNA, 25 bp, Homo sapien
catgtccgggaccatgtactgtggg

SEQ ID NO: 4820961 - DNA, 25 bp, Homo sapien
agctccaccggacgctgtgacgggc

SEQ ID NO: 4820962 - DNA, 25 bp, Homo sapien
tgctggtagagctccaccggacgct

SEQ ID NO: 4820963 - DNA, 25 bp, Homo sapien
gcagctcagaagctatttttgccca

SEQ ID NO: 4820964 - DNA, 25 bp, Homo sapien
ggagccagaccgatggggcagctca

SEQ ID NO: 4820965 - DNA, 25 bp, Homo sapien
gggcagctcagaagctatttttgcc

SEQ ID NO: 4820966 - DNA, 25 bp, Homo sapien
tgatcttccacttgctcagacactg

SEQ ID NO: 4820967 - DNA, 25 bp, Homo sapien
gaaatgccttcatccaaagattctt

SEQ ID NO: 4820968 - DNA, 25 bp, Homo sapien
tggaaatgccttcatccaaagattc

SEQ ID NO: 4820969 - DNA, 25 bp, Homo sapien
ggaaatgccttcatccaaagattct

SEQ ID NO: 4820970 - DNA, 25 bp, Homo sapien
aatgccttcatccaaagattcttcc

SEQ ID NO: 4820971 - DNA, 25 bp, Homo sapien
atatctgctccccccaggcttccgc

SEQ ID NO: 4820972 - DNA, 25 bp, Homo sapien
atctgctccccccaggcttccgcac

SEQ ID NO: 4820973 - DNA, 25 bp, Homo sapien
tatctgctccccccaggcttccgca

SEQ ID NO: 4820974 - DNA, 25 bp, Homo sapien
ggcagagccacagtatctggtgtgt

SEQ ID NO: 4820975 - DNA, 25 bp, Homo sapien
tgtgtccttgaacgtggcaatacca

SEQ ID NO: 4820976 - DNA, 25 bp, Homo sapien
cacagtatctggtgtgtccttgaac

SEQ ID NO: 4820977 - DNA, 25 bp, Homo sapien
ggcaataccacagctaggatttact

SEQ ID NO: 4820978 - DNA, 25 bp, Homo sapien
ttccaccgaccctttttcaagctga

SEQ ID NO: 4820979 - DNA, 25 bp, Homo sapien
attaattcaattaactgttcctctt

SEQ ID NO: 4820980 - DNA, 25 bp, Homo sapien
attccaccgaccctttttcaagctg

SEQ ID NO: 4820981 - DNA, 25 bp, Homo sapien
ttaattcaattaactgttcctcttc

SEQ ID NO: 4820982 - DNA, 25 bp, Homo sapien
cctggccttctacacttcattttaa

SEQ ID NO: 4820983 - DNA, 25 bp, Homo sapien
tccggcagacagcaatacagaagtc

SEQ ID NO: 4820984 - DNA, 25 bp, Homo sapien
taaatgaacgcatcgcatggtgtgt

SEQ ID NO: 4820985 - DNA, 25 bp, Homo sapien
ttctgagagaactgagacaactagg

SEQ ID NO: 4820986 - DNA, 25 bp, Homo sapien
tgcgcccagcttcggaaatatacac

SEQ ID NO: 4820987 - DNA, 25 bp, Homo sapien
atctcggcactgggcatcgctccta

SEQ ID NO: 4820988 - DNA, 25 bp, Homo sapien
cgatctcggcactgggcatcgctcc

SEQ ID NO: 4820989 - DNA, 25 bp, Homo sapien
tctcggcactgggcatcgctcctac

SEQ ID NO: 4820990 - DNA, 25 bp, Homo sapien
gatctcggcactgggcatcgctcct

SEQ ID NO: 4820991 - DNA, 25 bp, Homo sapien
atcctgctccccgtatttggcaaca

SEQ ID NO: 4820992 - DNA, 25 bp, Homo sapien
ctgctccccgtatttggcaacagct

SEQ ID NO: 4820993 - DNA, 25 bp, Homo sapien
gctccccgtatttggcaacagcttg

SEQ ID NO: 4820994 - DNA, 25 bp, Homo sapien
aaaccaatcctgctccccgtatttg

SEQ ID NO: 4820995 - DNA, 25 bp, Homo sapien
gcctctgcaggtacggctgcagcct

SEQ ID NO: 4820996 - DNA, 25 bp, Homo sapien
gaagcctctgcaggtacggctgcag

SEQ ID NO: 4820997 - DNA, 25 bp, Homo sapien
cctctgcaggtacggctgcagcctc

SEQ ID NO: 4820998 - DNA, 25 bp, Homo sapien
gaacacagccgcgttaccttcccag

SEQ ID NO: 4820999 - DNA, 25 bp, Homo sapien
agagcccagttctcctagggtcccg

SEQ ID NO: 4821000 - DNA, 25 bp, Homo sapien
agcagccgctgaacacagccgcgtt

SEQ ID NO: 4821001 - DNA, 25 bp, Homo sapien
acagccgcgttaccttcccagagcc

SEQ ID NO: 4821002 - DNA, 25 bp, Homo sapien
gagtctctcccttccatatagtaga

SEQ ID NO: 4821003 - DNA, 25 bp, Homo sapien
ggatccaagctcttggtccatcggt

SEQ ID NO: 4821004 - DNA, 25 bp, Homo sapien
ggtccatcggtagatcagctgcatg

SEQ ID NO: 4821005 - DNA, 25 bp, Homo sapien
ccagtaacccttcttcagaccagga

SEQ ID NO: 4821006 - DNA, 25 bp, Homo sapien
gatgtggctgccgacgcgcatctcc

SEQ ID NO: 4821007 - DNA, 25 bp, Homo sapien
tgcaccagctgcgtgagcatgcggt

SEQ ID NO: 4821008 - DNA, 25 bp, Homo sapien
tctgtccactccttgcgtttcagag

SEQ ID NO: 4821009 - DNA, 25 bp, Homo sapien
cgtttcagagctttgttgtgctgct

SEQ ID NO: 4821010 - DNA, 25 bp, Homo sapien
ggcccaaacaaaagcaaatgagtgt

SEQ ID NO: 4821011 - DNA, 25 bp, Homo sapien
tcccaggcccaaacaaaagcaaatg

SEQ ID NO: 4821012 - DNA, 25 bp, Homo sapien
cccaaacaaaagcaaatgagtgtta

SEQ ID NO: 4821013 - DNA, 25 bp, Homo sapien
caggcccaaacaaaagcaaatgagt

SEQ ID NO: 4821014 - DNA, 25 bp, Homo sapien
agaaactcccagcttggcaagggct

SEQ ID NO: 4821015 - DNA, 25 bp, Homo sapien
gaaactcccagcttggcaagggctg

SEQ ID NO: 4821016 - DNA, 25 bp, Homo sapien
catgtggcatgctctctaaatgcag

SEQ ID NO: 4821017 - DNA, 25 bp, Homo sapien
tctctcccttctcgagctctagagt

SEQ ID NO: 4821018 - DNA, 25 bp, Homo sapien
tctcgagctctagagtatctctcag

SEQ ID NO: 4821019 - DNA, 25 bp, Homo sapien
taaatgcagttgctagcaccttctc

SEQ ID NO: 4821020 - DNA, 25 bp, Homo sapien
ttccggatctcctctgcactgcggc

SEQ ID NO: 4821021 - DNA, 25 bp, Homo sapien
atgctggggtgctccgagttctgcc

SEQ ID NO: 4821022 - DNA, 25 bp, Homo sapien
ttctgccagaacttccggatctcct

SEQ ID NO: 4821023 - DNA, 25 bp, Homo sapien
gtgtgcagccgcgatcgcctgcagc

SEQ ID NO: 4821024 - DNA, 25 bp, Homo sapien
cagtcgtggctgtccagcctgtttc

SEQ ID NO: 4821025 - DNA, 25 bp, Homo sapien
agcctgtttcccagcaaggcctctt

SEQ ID NO: 4821026 - DNA, 25 bp, Homo sapien
gttaatattggaaatcttctcccag

SEQ ID NO: 4821027 - DNA, 25 bp, Homo sapien
cccagcaaggcctcttctggaagct

SEQ ID NO: 4821028 - DNA, 25 bp, Homo sapien
ccagctcactggagactttgctctg

SEQ ID NO: 4821029 - DNA, 25 bp, Homo sapien
ctccagctcactggagactttgctc

SEQ ID NO: 4821030 - DNA, 25 bp, Homo sapien
tccagctcactggagactttgctct

SEQ ID NO: 4821031 - DNA, 25 bp, Homo sapien
aagcaatcgctgcaggcggtcactc

SEQ ID NO: 4821032 - DNA, 25 bp, Homo sapien
tcaccactgactttcggagcaaggc

SEQ ID NO: 4821033 - DNA, 25 bp, Homo sapien
tgggctgaagcaatcgctgcaggcg

SEQ ID NO: 4821034 - DNA, 25 bp, Homo sapien
gctgcaggcggtcactcaccactga

SEQ ID NO: 4821035 - DNA, 25 bp, Homo sapien
gtcacaaggagctcctcgaaagcct

SEQ ID NO: 4821036 - DNA, 25 bp, Homo sapien
ccttctctcgtgtgtcctcgttggc

SEQ ID NO: 4821037 - DNA, 25 bp, Homo sapien
tcacaaggagctcctcgaaagcctt

SEQ ID NO: 4821038 - DNA, 25 bp, Homo sapien
tggtcacaaggagctcctcgaaagc

SEQ ID NO: 4821039 - DNA, 25 bp, Homo sapien
gcttcatgaagtgccccatgtatgt

SEQ ID NO: 4821040 - DNA, 25 bp, Homo sapien
cttgaaatacggcttcatgaagtgc

SEQ ID NO: 4821041 - DNA, 25 bp, Homo sapien
aaatacggcttcatgaagtgcccca

SEQ ID NO: 4821042 - DNA, 25 bp, Homo sapien
tacggcttcatgaagtgccccatgt

SEQ ID NO: 4821043 - DNA, 25 bp, Homo sapien
ggcagggacccctctatggaccagc

SEQ ID NO: 4821044 - DNA, 25 bp, Homo sapien
tatggaccagcagcaatgactctcc

SEQ ID NO: 4821045 - DNA, 25 bp, Homo sapien
cagggacccctctatggaccagcag

SEQ ID NO: 4821046 - DNA, 25 bp, Homo sapien
ggacccctctatggaccagcagcaa

SEQ ID NO: 4821047 - DNA, 25 bp, Homo sapien
cctggatgacctcctggtagaccat

SEQ ID NO: 4821048 - DNA, 25 bp, Homo sapien
tttatccttgggatcgtcctcgtca

SEQ ID NO: 4821049 - DNA, 25 bp, Homo sapien
ctcgtcattgctggcttcgccccac

SEQ ID NO: 4821050 - DNA, 25 bp, Homo sapien
gacctcctggtagaccatgttcagc

SEQ ID NO: 4821051 - DNA, 25 bp, Homo sapien
cagaaatggcatgtgacgagatgag

SEQ ID NO: 4821052 - DNA, 25 bp, Homo sapien
gacgtggatgctcccctgtcctcgg

SEQ ID NO: 4821053 - DNA, 25 bp, Homo sapien
ctggtaacgagccagaaatggcatg

SEQ ID NO: 4821054 - DNA, 25 bp, Homo sapien
tgacgagatgagacgtggatgctcc

SEQ ID NO: 4821055 - DNA, 25 bp, Homo sapien
tggcatagcaacacccaatgtggaa

SEQ ID NO: 4821056 - DNA, 25 bp, Homo sapien
tctggcatagcaacacccaatgtgg

SEQ ID NO: 4821057 - DNA, 25 bp, Homo sapien
ctggcatagcaacacccaatgtgga

SEQ ID NO: 4821058 - DNA, 25 bp, Homo sapien
ggcatagcaacacccaatgtggaag

SEQ ID NO: 4821059 - DNA, 25 bp, Homo sapien
tggcacagccagatcaggccaacag

SEQ ID NO: 4821060 - DNA, 25 bp, Homo sapien
cacagccagatcaggccaacagtta

SEQ ID NO: 4821061 - DNA, 25 bp, Homo sapien
acagccagatcaggccaacagttac

SEQ ID NO: 4821062 - DNA, 25 bp, Homo sapien
cagtggcacagccagatcaggccaa

SEQ ID NO: 4821063 - DNA, 25 bp, Homo sapien
cgagatcgggggatcggcaggatcc

SEQ ID NO: 4821064 - DNA, 25 bp, Homo sapien
ggggatcggcaggatccaagtcctc

SEQ ID NO: 4821065 - DNA, 25 bp, Homo sapien
gatcggcaggatccaagtcctcaga

SEQ ID NO: 4821066 - DNA, 25 bp, Homo sapien
tcgggggatcggcaggatccaagtc

SEQ ID NO: 4821067 - DNA, 25 bp, Homo sapien
caagcaacaccgtgttggtaaccag

SEQ ID NO: 4821068 - DNA, 25 bp, Homo sapien
tgttggtaaccagcgtcttgggcag

SEQ ID NO: 4821069 - DNA, 25 bp, Homo sapien
caccgtgttggtaaccagcgtcttg

SEQ ID NO: 4821070 - DNA, 25 bp, Homo sapien
gaaacacaagcaacaccgtgttggt

SEQ ID NO: 4821071 - DNA, 25 bp, Homo sapien
gggttgtgaggtagtgacagcgcct

SEQ ID NO: 4821072 - DNA, 25 bp, Homo sapien
ggctggcggtgagcggaccttccct

SEQ ID NO: 4821073 - DNA, 25 bp, Homo sapien
gctggcggtgagcggaccttccctc

SEQ ID NO: 4821074 - DNA, 25 bp, Homo sapien
tgaggtagtgacagcgcctcaggct

SEQ ID NO: 4821075 - DNA, 25 bp, Homo sapien
agatagcaggttgcctcagaggcag

SEQ ID NO: 4821076 - DNA, 25 bp, Homo sapien
aaagatagcaggttgcctcagaggc

SEQ ID NO: 4821077 - DNA, 25 bp, Homo sapien
cacaggagaaagatagcaggttgcc

SEQ ID NO: 4821078 - DNA, 25 bp, Homo sapien
gagaaagatagcaggttgcctcaga

SEQ ID NO: 4821079 - DNA, 25 bp, Homo sapien
ccaggaggctaggtacaaggggctt

SEQ ID NO: 4821080 - DNA, 25 bp, Homo sapien
cccaggaggctaggtacaaggggct

SEQ ID NO: 4821081 - DNA, 25 bp, Homo sapien
cgaggagccgggatccaaaatcctt

SEQ ID NO: 4821082 - DNA, 25 bp, Homo sapien
caaaatcctttccagctccttgatc

SEQ ID NO: 4821083 - DNA, 25 bp, Homo sapien
tgactcgagacttgattctgagatc

SEQ ID NO: 4821084 - DNA, 25 bp, Homo sapien
ctgagatctccacgtgggagcccga

SEQ ID NO: 4821085 - DNA, 25 bp, Homo sapien
ccagagaaagattaataggccaggc

SEQ ID NO: 4821086 - DNA, 25 bp, Homo sapien
aactggccacccagcgtagaaggtg

SEQ ID NO: 4821087 - DNA, 25 bp, Homo sapien
tagaaaccaagaccgtgccgggatc

SEQ ID NO: 4821088 - DNA, 25 bp, Homo sapien
cacaccccgagatgttagaaaccaa

SEQ ID NO: 4821089 - DNA, 25 bp, Homo sapien
ttaggaactgtggtccaggaagtct

SEQ ID NO: 4821090 - DNA, 25 bp, Homo sapien
caggaagtctgaagggagaaggacg

SEQ ID NO: 4821091 - DNA, 25 bp, Homo sapien
ggaactgtggtccaggaagtctgaa

SEQ ID NO: 4821092 - DNA, 25 bp, Homo sapien
gaactgtggtccaggaagtctgaag

SEQ ID NO: 4821093 - DNA, 25 bp, Homo sapien
tggggccctgcccaactggaacaaa

SEQ ID NO: 4821094 - DNA, 25 bp, Homo sapien
gcagactcgacgcttccggcggctg

SEQ ID NO: 4821095 - DNA, 25 bp, Homo sapien
gtcgcccgggcgactgcagactcga

SEQ ID NO: 4821096 - DNA, 25 bp, Homo sapien
cggctgcagaacaagagcgccgcgc

SEQ ID NO: 4821097 - DNA, 25 bp, Homo sapien
ttccggcggctgcagaacaagagcg

SEQ ID NO: 4821098 - DNA, 25 bp, Homo sapien
ggccgtcagaaaggcaactgggacc

SEQ ID NO: 4821099 - DNA, 25 bp, Homo sapien
aaagcatttagtgctcatcgccgtc

SEQ ID NO: 4821100 - DNA, 25 bp, Homo sapien
cgggcacatacttgaaattcctgaa

SEQ ID NO: 4821101 - DNA, 25 bp, Homo sapien
aactgggacctgacagacccgggca

SEQ ID NO: 4821102 - DNA, 25 bp, Homo sapien
tgccacttgaaacgtccaccagaac

SEQ ID NO: 4821103 - DNA, 25 bp, Homo sapien
aatgccacttgaaacgtccaccaga

SEQ ID NO: 4821104 - DNA, 25 bp, Homo sapien
atgccacttgaaacgtccaccagaa

SEQ ID NO: 4821105 - DNA, 25 bp, Homo sapien
gatgggactggaaaacattgattcc

SEQ ID NO: 4821106 - DNA, 25 bp, Homo sapien
tctacttatgaaatcaaggacaacc

SEQ ID NO: 4821107 - DNA, 25 bp, Homo sapien
tcttacaactgatgttctgggatgg

SEQ ID NO: 4821108 - DNA, 25 bp, Homo sapien
taagatcgcaggaatttcgccaaga

SEQ ID NO: 4821109 - DNA, 25 bp, Homo sapien
cacatttagatcgagcggtggtgac

SEQ ID NO: 4821110 - DNA, 25 bp, Homo sapien
catttagatcgagcggtggtgacct

SEQ ID NO: 4821111 - DNA, 25 bp, Homo sapien
ttagatcgagcggtggtgacctcag

SEQ ID NO: 4821112 - DNA, 25 bp, Homo sapien
tttagatcgagcggtggtgacctca

SEQ ID NO: 4821113 - DNA, 25 bp, Homo sapien
tcggcaacaagattcagtgtctcag

SEQ ID NO: 4821114 - DNA, 25 bp, Homo sapien
aaggatttcggcaacaagattcagt

SEQ ID NO: 4821115 - DNA, 25 bp, Homo sapien
ggcaacaagattcagtgtctcagct

SEQ ID NO: 4821116 - DNA, 25 bp, Homo sapien
gatttcggcaacaagattcagtgtc

SEQ ID NO: 4821117 - DNA, 25 bp, Homo sapien
tggcagcagctactcagcagcaaca

SEQ ID NO: 4821118 - DNA, 25 bp, Homo sapien
caagcatggatatcaggatgggtgg

SEQ ID NO: 4821119 - DNA, 25 bp, Homo sapien
tactcagcagcaacagggttctggg

SEQ ID NO: 4821120 - DNA, 25 bp, Homo sapien
catggatatcaggatgggtggcagc

SEQ ID NO: 4821121 - DNA, 25 bp, Homo sapien
ccgccaggcttcccggtgcctccca

SEQ ID NO: 4821122 - DNA, 25 bp, Homo sapien
ttgatggaagcctgtgcactgttca

SEQ ID NO: 4821123 - DNA, 25 bp, Homo sapien
tctcgctggaagttggagacctgcg

SEQ ID NO: 4821124 - DNA, 25 bp, Homo sapien
ggcgttctgcttcaccacggtcagg

SEQ ID NO: 4821125 - DNA, 25 bp, Homo sapien
tgttcatgaccacccggaggttctg

SEQ ID NO: 4821126 - DNA, 25 bp, Homo sapien
cacgacgtggttttctgcctttaca

SEQ ID NO: 4821127 - DNA, 25 bp, Homo sapien
ttagtttcacgacgtggttttctgc

SEQ ID NO: 4821128 - DNA, 25 bp, Homo sapien
tgatttcctgttttagtttcacgac

SEQ ID NO: 4821129 - DNA, 25 bp, Homo sapien
ctggagcaaactgatttcctgtttt

SEQ ID NO: 4821130 - DNA, 25 bp, Homo sapien
gaagggctcatcgtgcagtgtctgt

SEQ ID NO: 4821131 - DNA, 25 bp, Homo sapien
aggagggcacccaacctggctgtgg

SEQ ID NO: 4821132 - DNA, 25 bp, Homo sapien
aggcacagcgagacagcgacgtcaa

SEQ ID NO: 4821133 - DNA, 25 bp, Homo sapien
tcctcacattcataccggacacggg

SEQ ID NO: 4821134 - DNA, 25 bp, Homo sapien
ccagctcgtccgattcagagaagaa

SEQ ID NO: 4821135 - DNA, 25 bp, Homo sapien
cagctcgtccgattcagagaagaaa

SEQ ID NO: 4821136 - DNA, 25 bp, Homo sapien
ggtcatcagctccaggttctgctcc

SEQ ID NO: 4821137 - DNA, 25 bp, Homo sapien
gtcatcagctccaggttctgctcca

SEQ ID NO: 4821138 - DNA, 25 bp, Homo sapien
tcatcagctccaggttctgctccac

SEQ ID NO: 4821139 - DNA, 25 bp, Homo sapien
cgtggtagtcgctttcctccttgat

SEQ ID NO: 4821140 - DNA, 25 bp, Homo sapien
tgcttctaacttccgctcaagcgtc

SEQ ID NO: 4821141 - DNA, 25 bp, Homo sapien
ttttgcttctaacttccgctcaagc

SEQ ID NO: 4821142 - DNA, 25 bp, Homo sapien
ccaccgactccaggtcgtggtagtc

SEQ ID NO: 4821143 - DNA, 25 bp, Homo sapien
acccgagttgttaatttctgtggct

SEQ ID NO: 4821144 - DNA, 25 bp, Homo sapien
tacctcatgagccagataaaacccg

SEQ ID NO: 4821145 - DNA, 25 bp, Homo sapien
agatacctcatgagccagataaaac

SEQ ID NO: 4821146 - DNA, 25 bp, Homo sapien
gagccagataaaacccgctaagagc

SEQ ID NO: 4821147 - DNA, 25 bp, Homo sapien
cagcactgctgctccaacaaggtgt

SEQ ID NO: 4821148 - DNA, 25 bp, Homo sapien
cctggacctgtagccaccaggcagg

SEQ ID NO: 4821149 - DNA, 25 bp, Homo sapien
cagggagcggctctcacagcactgc

SEQ ID NO: 4821150 - DNA, 25 bp, Homo sapien
caacaaggtgtttggtggctttttg

SEQ ID NO: 4821151 - DNA, 25 bp, Homo sapien
tgttgtggattgcattcctaactaa

SEQ ID NO: 4821152 - DNA, 25 bp, Homo sapien
aaacccagatctggtttgactctga

SEQ ID NO: 4821153 - DNA, 25 bp, Homo sapien
aaacggatttccctgtgtattagat

SEQ ID NO: 4821154 - DNA, 25 bp, Homo sapien
ccagatctggtttgactctgattac

SEQ ID NO: 4821155 - DNA, 25 bp, Homo sapien
gagcttcagagaagctctgaacctc

SEQ ID NO: 4821156 - DNA, 25 bp, Homo sapien
tcagcttagaattttcatctttcag

SEQ ID NO: 4821157 - DNA, 25 bp, Homo sapien
ttcttctcagcttagaattttcatc

SEQ ID NO: 4821158 - DNA, 25 bp, Homo sapien
gctctgaacctcattcagctttctt

SEQ ID NO: 4821159 - DNA, 25 bp, Homo sapien
ccagttaattttactcagaggccgg

SEQ ID NO: 4821160 - DNA, 25 bp, Homo sapien
tcaaaagggcgtgtgcttctgcggt

SEQ ID NO: 4821161 - DNA, 25 bp, Homo sapien
cagacggaggcaggcacttttcaaa

SEQ ID NO: 4821162 - DNA, 25 bp, Homo sapien
tcaaagacctgtggtcacagatgcc

SEQ ID NO: 4821163 - DNA, 25 bp, Homo sapien
tgaaacagagtttcgcccgtcgcct

SEQ ID NO: 4821164 - DNA, 25 bp, Homo sapien
tgagacactgtctcaggaagaaaat

SEQ ID NO: 4821165 - DNA, 25 bp, Homo sapien
agacactgtctcaggaagaaaataa

SEQ ID NO: 4821166 - DNA, 25 bp, Homo sapien
tttgaaacagagtttcgcccgtcgc

SEQ ID NO: 4821167 - DNA, 25 bp, Homo sapien
gaatacttagcaagctggcgactgc

SEQ ID NO: 4821168 - DNA, 25 bp, Homo sapien
gatagcaggctgtcacgcaaatcgc

SEQ ID NO: 4821169 - DNA, 25 bp, Homo sapien
ccacccaagaggtaggatggctcca

SEQ ID NO: 4821170 - DNA, 25 bp, Homo sapien
ggtacagccctgtaagtgcccaact

SEQ ID NO: 4821171 - DNA, 25 bp, Homo sapien
ccggagaggccggagacacgcgaga

SEQ ID NO: 4821172 - DNA, 25 bp, Homo sapien
aggccggagacacgcgagaatcagt

SEQ ID NO: 4821173 - DNA, 25 bp, Homo sapien
ggagacacgcgagaatcagtgtcac

SEQ ID NO: 4821174 - DNA, 25 bp, Homo sapien
agaggccggagacacgcgagaatca

SEQ ID NO: 4821175 - DNA, 25 bp, Homo sapien
tcggatcctcgaaaaatggctgctg

SEQ ID NO: 4821176 - DNA, 25 bp, Homo sapien
ctccaggccatacccgccggtttgg

SEQ ID NO: 4821177 - DNA, 25 bp, Homo sapien
tgctgatactccaggccatacccgc

SEQ ID NO: 4821178 - DNA, 25 bp, Homo sapien
aagtcccagggaatgcctcgaggct

SEQ ID NO: 4821179 - DNA, 25 bp, Homo sapien
aacaatggaggccatgcttctgact

SEQ ID NO: 4821180 - DNA, 25 bp, Homo sapien
gccatgcttctgactcggagcgcat

SEQ ID NO: 4821181 - DNA, 25 bp, Homo sapien
atggaggccatgcttctgactcgga

SEQ ID NO: 4821182 - DNA, 25 bp, Homo sapien
gaggccatgcttctgactcggagcg

SEQ ID NO: 4821183 - DNA, 25 bp, Homo sapien
cctctttcgagaggccgaggttctt

SEQ ID NO: 4821184 - DNA, 25 bp, Homo sapien
tcgagaggccgaggttcttggtctt

SEQ ID NO: 4821185 - DNA, 25 bp, Homo sapien
gccggatcctctttcgagaggccga

SEQ ID NO: 4821186 - DNA, 25 bp, Homo sapien
tctgctggccggatcctctttcgag

SEQ ID NO: 4821187 - DNA, 25 bp, Homo sapien
atagccagtcacattgacagtccca

SEQ ID NO: 4821188 - DNA, 25 bp, Homo sapien
agtcacattgacagtcccaccagac

SEQ ID NO: 4821189 - DNA, 25 bp, Homo sapien
gtcccaccagacacgtgcctggcac

SEQ ID NO: 4821190 - DNA, 25 bp, Homo sapien
agtcccaccagacacgtgcctggca

SEQ ID NO: 4821191 - DNA, 25 bp, Homo sapien
ccgtgggctcctgacgggctctgct

SEQ ID NO: 4821192 - DNA, 25 bp, Homo sapien
ctccaaaatgtgtcccgtgggctcc

SEQ ID NO: 4821193 - DNA, 25 bp, Homo sapien
gaacatttcccctttccatagccaa

SEQ ID NO: 4821194 - DNA, 25 bp, Homo sapien
gacgggctctgcttagaacatttcc

SEQ ID NO: 4821195 - DNA, 25 bp, Homo sapien
tgcacatggagtctccactgcagtg

SEQ ID NO: 4821196 - DNA, 25 bp, Homo sapien
ctttatgacctcacatttggttttt

SEQ ID NO: 4821197 - DNA, 25 bp, Homo sapien
tctcacagtctagagaacttttttt

SEQ ID NO: 4821198 - DNA, 25 bp, Homo sapien
tcttttgcacatggagtctccactg

SEQ ID NO: 4821199 - DNA, 25 bp, Homo sapien
tctgaaagcggctcctcagcagatt

SEQ ID NO: 4821200 - DNA, 25 bp, Homo sapien
gcaagcgcgtcctcttgtcttgtga

SEQ ID NO: 4821201 - DNA, 25 bp, Homo sapien
acttctgcttgggtagaacgaggac

SEQ ID NO: 4821202 - DNA, 25 bp, Homo sapien
aacgaggacgaaccagatctggcca

SEQ ID NO: 4821203 - DNA, 25 bp, Homo sapien
cctgtactggaactgtctgtcttgg

SEQ ID NO: 4821204 - DNA, 25 bp, Homo sapien
caatggacgagctcgtgctgcagcg

SEQ ID NO: 4821205 - DNA, 25 bp, Homo sapien
tgagcgctctgcacattgatgggtc

SEQ ID NO: 4821206 - DNA, 25 bp, Homo sapien
tttgaattccgagtgcctggcacgc

SEQ ID NO: 4821207 - DNA, 25 bp, Homo sapien
tgtctcccacggaagccagcaccgg

SEQ ID NO: 4821208 - DNA, 25 bp, Homo sapien
ctgtgtctcccacggaagccagcac

SEQ ID NO: 4821209 - DNA, 25 bp, Homo sapien
tctcccacggaagccagcaccgggc

SEQ ID NO: 4821210 - DNA, 25 bp, Homo sapien
gtgtctcccacggaagccagcaccg

SEQ ID NO: 4821211 - DNA, 25 bp, Homo sapien
aaaggccggccgaatgccgaagaag

SEQ ID NO: 4821212 - DNA, 25 bp, Homo sapien
gaccggcgctcatagaacgctggag

SEQ ID NO: 4821213 - DNA, 25 bp, Homo sapien
catgggggcgctcacaatttagctg

SEQ ID NO: 4821214 - DNA, 25 bp, Homo sapien
gagacaagaccggcgctcatagaac

SEQ ID NO: 4821215 - DNA, 25 bp, Homo sapien
gacaacagcgactttactgcgtgcc

SEQ ID NO: 4821216 - DNA, 25 bp, Homo sapien
gcaacgacaacagcgactttactgc

SEQ ID NO: 4821217 - DNA, 25 bp, Homo sapien
ctggaagcaacgacaacagcgactt

SEQ ID NO: 4821218 - DNA, 25 bp, Homo sapien
aacagcgactttactgcgtgccggg

SEQ ID NO: 4821219 - DNA, 25 bp, Homo sapien
cgtcgggaatggcgaggctccgggc

SEQ ID NO: 4821220 - DNA, 25 bp, Homo sapien
ggggcacgacctgcctagcccggca

SEQ ID NO: 4821221 - DNA, 25 bp, Homo sapien
acgacctgcctagcccggcagcggc

SEQ ID NO: 4821222 - DNA, 25 bp, Homo sapien
cccggcggggcacgacctgcctagc

SEQ ID NO: 4821223 - DNA, 25 bp, Homo sapien
cgcccgtgccgcggcccgcgtcgcc

SEQ ID NO: 4821224 - DNA, 25 bp, Homo sapien
ttctccgaggccatgcctcatattt

SEQ ID NO: 4821225 - DNA, 25 bp, Homo sapien
ggtcgacgggccttctccgaggcca

SEQ ID NO: 4821226 - DNA, 25 bp, Homo sapien
atatttgcccccgcgcttcacctac

SEQ ID NO: 4821227 - DNA, 25 bp, Homo sapien
ctccgaggccatgcctcatatttgc

SEQ ID NO: 4821228 - DNA, 25 bp, Homo sapien
gttagacccgcagggttctgacacc

SEQ ID NO: 4821229 - DNA, 25 bp, Homo sapien
tgctgcggtctgtccgttgatctct

SEQ ID NO: 4821230 - DNA, 25 bp, Homo sapien
cagggtccaggctctcggttgctgc

SEQ ID NO: 4821231 - DNA, 25 bp, Homo sapien
cccagctctgttagacccgcagggt

SEQ ID NO: 4821232 - DNA, 25 bp, Homo sapien
tctggagaggcagattttactcttt

SEQ ID NO: 4821233 - DNA, 25 bp, Homo sapien
gagtcaccgcactcagcttagaaca

SEQ ID NO: 4821234 - DNA, 25 bp, Homo sapien
gctattgccagagtgcaagtaaaat

SEQ ID NO: 4821235 - DNA, 25 bp, Homo sapien
tctttataaatacgcacgcagctgc

SEQ ID NO: 4821236 - DNA, 25 bp, Homo sapien
ccacgcccagcttatatgtatatac

SEQ ID NO: 4821237 - DNA, 25 bp, Homo sapien
cacgcccagcttatatgtatataca

SEQ ID NO: 4821238 - DNA, 25 bp, Homo sapien
tactgcccagagttgttaaagagca

SEQ ID NO: 4821239 - DNA, 25 bp, Homo sapien
taaagagcactcaagttagtaggcg

SEQ ID NO: 4821240 - DNA, 25 bp, Homo sapien
gaggactgctacattgtacgtggag

SEQ ID NO: 4821241 - DNA, 25 bp, Homo sapien
gaagggctcagtagaggactgctac

SEQ ID NO: 4821242 - DNA, 25 bp, Homo sapien
cagcgtgagtgagtggtacagacca

SEQ ID NO: 4821243 - DNA, 25 bp, Homo sapien
gaactcaacgtctgtcacttgtgga

SEQ ID NO: 4821244 - DNA, 25 bp, Homo sapien
gagtcgcttctaagatgctccgagg

SEQ ID NO: 4821245 - DNA, 25 bp, Homo sapien
tctgcactaggcaacgtgaagccgg

SEQ ID NO: 4821246 - DNA, 25 bp, Homo sapien
tcagtatcgagcctgaccaccgcaa

SEQ ID NO: 4821247 - DNA, 25 bp, Homo sapien
gaagcaggtgaagtgcccagcgctg

SEQ ID NO: 4821248 - DNA, 25 bp, Homo sapien
tggagtgcagcgtgccacgaggagg

SEQ ID NO: 4821249 - DNA, 25 bp, Homo sapien
gagggcggtcggtgcttccctcctc

SEQ ID NO: 4821250 - DNA, 25 bp, Homo sapien
ggtaataaagagctggcatctttct

SEQ ID NO: 4821251 - DNA, 25 bp, Homo sapien
gagaaggtaagggcccggtcagctc

SEQ ID NO: 4821252 - DNA, 25 bp, Homo sapien
tcagctccaaggagcgcgctccacg

SEQ ID NO: 4821253 - DNA, 25 bp, Homo sapien
cacagcttccctggtaataaagagc

SEQ ID NO: 4821254 - DNA, 25 bp, Homo sapien
gcttctgaagattccggtgaagcac

SEQ ID NO: 4821255 - DNA, 25 bp, Homo sapien
cacctaccgagtagcccgaggacat

SEQ ID NO: 4821256 - DNA, 25 bp, Homo sapien
tgttcagctgcacagtgaacgcaga

SEQ ID NO: 4821257 - DNA, 25 bp, Homo sapien
gtgaagcacagtcctgctccaccta

SEQ ID NO: 4821258 - DNA, 25 bp, Homo sapien
tgccaagggaatcacctgactttcg

SEQ ID NO: 4821259 - DNA, 25 bp, Homo sapien
tcgatccatgatcttactagacacg

SEQ ID NO: 4821260 - DNA, 25 bp, Homo sapien
tggagcctcttactgtcaagccacg

SEQ ID NO: 4821261 - DNA, 25 bp, Homo sapien
cagggtcggaccagaatctctttaa

SEQ ID NO: 4821262 - DNA, 25 bp, Homo sapien
agagactcatttttatcaagagact

SEQ ID NO: 4821263 - DNA, 25 bp, Homo sapien
ccaagagactcatttttatcaagag

SEQ ID NO: 4821264 - DNA, 25 bp, Homo sapien
tttatcaagagactgggtgtttgtt

SEQ ID NO: 4821265 - DNA, 25 bp, Homo sapien
tatcaagagactgggtgtttgtttc

SEQ ID NO: 4821266 - DNA, 25 bp, Homo sapien
aggtggtggcatcctgaacttccag

SEQ ID NO: 4821267 - DNA, 25 bp, Homo sapien
cactaatgtcattccgcggctggag

SEQ ID NO: 4821268 - DNA, 25 bp, Homo sapien
gccttgctctggatacccgtgtgac

SEQ ID NO: 4821269 - DNA, 25 bp, Homo sapien
ggtttcacacaataggcttggccta

SEQ ID NO: 4821270 - DNA, 25 bp, Homo sapien
gactctgtagtgcttgctgcctctg

SEQ ID NO: 4821271 - DNA, 25 bp, Homo sapien
caagaaacggagcagatggtgctgg

SEQ ID NO: 4821272 - DNA, 25 bp, Homo sapien
cagatggtgctggagttctgactct

SEQ ID NO: 4821273 - DNA, 25 bp, Homo sapien
tgaatctccttcgaaatccgtcttt

SEQ ID NO: 4821274 - DNA, 25 bp, Homo sapien
ctctatcaaatttgccagctgccaa

SEQ ID NO: 4821275 - DNA, 25 bp, Homo sapien
tatcaaatttgccagctgccaacgg

SEQ ID NO: 4821276 - DNA, 25 bp, Homo sapien
ctagtaagtacagttctctatcaaa

SEQ ID NO: 4821277 - DNA, 25 bp, Homo sapien
aaatttgccagctgccaacggaatg

SEQ ID NO: 4821278 - DNA, 25 bp, Homo sapien
tggcggcttctgtacaagacgcggt

SEQ ID NO: 4821279 - DNA, 25 bp, Homo sapien
acacagggcggtggtcggacgtctt

SEQ ID NO: 4821280 - DNA, 25 bp, Homo sapien
ggcaggaagagtagctcacaggaca

SEQ ID NO: 4821281 - DNA, 25 bp, Homo sapien
tttcacccggaagaggccatacaca

SEQ ID NO: 4821282 - DNA, 25 bp, Homo sapien
cttctgggacccctgacactcatgc

SEQ ID NO: 4821283 - DNA, 25 bp, Homo sapien
attttgttgcctggcgtctgtggcc

SEQ ID NO: 4821284 - DNA, 25 bp, Homo sapien
cagatatcgggacatgcccagagat

SEQ ID NO: 4821285 - DNA, 25 bp, Homo sapien
tgaggcttccagcagatatccagat

SEQ ID NO: 4821286 - DNA, 25 bp, Homo sapien
ccaaaggggacttgccacaaggcca

SEQ ID NO: 4821287 - DNA, 25 bp, Homo sapien
agctgagtttcaagtccaggccgtc

SEQ ID NO: 4821288 - DNA, 25 bp, Homo sapien
tgacgccaggcatcggttcccggct

SEQ ID NO: 4821289 - DNA, 25 bp, Homo sapien
tgaaaacacccatggagagggcgcc

SEQ ID NO: 4821290 - DNA, 25 bp, Homo sapien
cgatgtcaaacttgtatgatgggag

SEQ ID NO: 4821291 - DNA, 25 bp, Homo sapien
tctgcttggaggtgctgtcgtacgt

SEQ ID NO: 4821292 - DNA, 25 bp, Homo sapien
cgtacgtgtccttcccgatgtcaaa

SEQ ID NO: 4821293 - DNA, 25 bp, Homo sapien
tgtatgagggcgtcctctgcttgga

SEQ ID NO: 4821294 - DNA, 25 bp, Homo sapien
ccacaggatgggcactcggactggc

SEQ ID NO: 4821295 - DNA, 25 bp, Homo sapien
tgccacaggatgggcactcggactg

SEQ ID NO: 4821296 - DNA, 25 bp, Homo sapien
ctgccacaggatgggcactcggact

SEQ ID NO: 4821297 - DNA, 25 bp, Homo sapien
cactcggactggctcagaccagctt

SEQ ID NO: 4821298 - DNA, 25 bp, Homo sapien
gaagtctccaaaccagaacacctca

SEQ ID NO: 4821299 - DNA, 25 bp, Homo sapien
gcccgccactcaggcggaagttgaa

SEQ ID NO: 4821300 - DNA, 25 bp, Homo sapien
cacaggagggcgtccacgactgtgc

SEQ ID NO: 4821301 - DNA, 25 bp, Homo sapien
cacctcatcgaagcgggtggtgacg

SEQ ID NO: 4821302 - DNA, 25 bp, Homo sapien
gaccagggcttgtacagtcctggtg

SEQ ID NO: 4821303 - DNA, 25 bp, Homo sapien
gcttgtacagtcctggtgtagtcca

SEQ ID NO: 4821304 - DNA, 25 bp, Homo sapien
ggttggtgtcgggcacatttctggg

SEQ ID NO: 4821305 - DNA, 25 bp, Homo sapien
cagggcttgtacagtcctggtgtag

SEQ ID NO: 4821306 - DNA, 25 bp, Homo sapien
tgaagtgggacgtgatgaagaggaa

SEQ ID NO: 4821307 - DNA, 25 bp, Homo sapien
tcttgatctgagacacgatgcgtgt

SEQ ID NO: 4821308 - DNA, 25 bp, Homo sapien
acacgatgcgtgtggtcaccgtgga

SEQ ID NO: 4821309 - DNA, 25 bp, Homo sapien
tgtggtcaccgtggagcactccacc

SEQ ID NO: 4821310 - DNA, 25 bp, Homo sapien
cgccgaggacagcagcacatagtgc

SEQ ID NO: 4821311 - DNA, 25 bp, Homo sapien
tccctgcggatgaagagcgacatgt

SEQ ID NO: 4821312 - DNA, 25 bp, Homo sapien
acatgtagagcacgccgtgggccgc

SEQ ID NO: 4821313 - DNA, 25 bp, Homo sapien
cagaaccagatgaggtccctgcgga

SEQ ID NO: 4821314 - DNA, 25 bp, Homo sapien
tgtcttgcgcggagaagcaattgcc

SEQ ID NO: 4821315 - DNA, 25 bp, Homo sapien
tcgaggagctaccagggaaacccca

SEQ ID NO: 4821316 - DNA, 25 bp, Homo sapien
gcccctcgaggagctaccagggaaa

SEQ ID NO: 4821317 - DNA, 25 bp, Homo sapien
ggccttggtgtcttgcgcggagaag

SEQ ID NO: 4821318 - DNA, 25 bp, Homo sapien
ggcaggcactgcagacccgtgccca

SEQ ID NO: 4821319 - DNA, 25 bp, Homo sapien
gaaccgggtatcagcgcccagcagc

SEQ ID NO: 4821320 - DNA, 25 bp, Homo sapien
aggcgtggaggctgcccgtgcccgg

SEQ ID NO: 4821321 - DNA, 25 bp, Homo sapien
ggcactgcagatctgtgcccggcca

SEQ ID NO: 4821322 - DNA, 25 bp, Homo sapien
gtcctgggcatagtcggcctcggct

SEQ ID NO: 4821323 - DNA, 25 bp, Homo sapien
tcctgggcatagtcggcctcggctg

SEQ ID NO: 4821324 - DNA, 25 bp, Homo sapien
tggaccccgatgacatacaggtcct

SEQ ID NO: 4821325 - DNA, 25 bp, Homo sapien
accccgatgacatacaggtcctggg

SEQ ID NO: 4821326 - DNA, 25 bp, Homo sapien
cttgagcaggtgattctcggccagg

SEQ ID NO: 4821327 - DNA, 25 bp, Homo sapien
gagcaggtgattctcggccaggccc

SEQ ID NO: 4821328 - DNA, 25 bp, Homo sapien
ttctcggccaggcccgttgccccaa

SEQ ID NO: 4821329 - DNA, 25 bp, Homo sapien
tctcggccaggcccgttgccccaac

SEQ ID NO: 4821330 - DNA, 25 bp, Homo sapien
ggaagtagcgggccagctcatccgc

SEQ ID NO: 4821331 - DNA, 25 bp, Homo sapien
aagagtgccacgttccggtctggga

SEQ ID NO: 4821332 - DNA, 25 bp, Homo sapien
ccacgttccggtctgggaagtagcg

SEQ ID NO: 4821333 - DNA, 25 bp, Homo sapien
ttccaggtggccacgaagagtgcca

SEQ ID NO: 4821334 - DNA, 25 bp, Homo sapien
tgcccgagacgcttgatttacagac

SEQ ID NO: 4821335 - DNA, 25 bp, Homo sapien
taaacaccgtgtggcacagcaacgt

SEQ ID NO: 4821336 - DNA, 25 bp, Homo sapien
ggctggtaacccgtcaagaggcaac

SEQ ID NO: 4821337 - DNA, 25 bp, Homo sapien
cagattttaatacggcggtgcacac

SEQ ID NO: 4821338 - DNA, 25 bp, Homo sapien
tcaagtgatcccgggcccagcaggg

SEQ ID NO: 4821339 - DNA, 25 bp, Homo sapien
cagcagccacgtggtcagtctgccc

SEQ ID NO: 4821340 - DNA, 25 bp, Homo sapien
agcagccacgtggtcagtctgccca

SEQ ID NO: 4821341 - DNA, 25 bp, Homo sapien
caagtgatcccgggcccagcagggg

SEQ ID NO: 4821342 - DNA, 25 bp, Homo sapien
tggtcatgagttacaacggccccag

SEQ ID NO: 4821343 - DNA, 25 bp, Homo sapien
actgagaccccaagacaagaccagg

SEQ ID NO: 4821344 - DNA, 25 bp, Homo sapien
gtcatagtgggagcatctcaggaca

SEQ ID NO: 4821345 - DNA, 25 bp, Homo sapien
cgcggctgacagacaagacttgggc

SEQ ID NO: 4821346 - DNA, 25 bp, Homo sapien
ggcctcttgccgcagaaaaaaacaa

SEQ ID NO: 4821347 - DNA, 25 bp, Homo sapien
tgagcaagtggctaaacgaaagtag

SEQ ID NO: 4821348 - DNA, 25 bp, Homo sapien
ccaaaggggcggatcgtatacattg

SEQ ID NO: 4821349 - DNA, 25 bp, Homo sapien
gctggagcccaccaaaatgttcctc

SEQ ID NO: 4821350 - DNA, 25 bp, Homo sapien
tgctgcggacgtccttgctgcggat

SEQ ID NO: 4821351 - DNA, 25 bp, Homo sapien
atttggccgagcgaagggaacagtc

SEQ ID NO: 4821352 - DNA, 25 bp, Homo sapien
gatccgagtcgaccttgtttgctgt

SEQ ID NO: 4821353 - DNA, 25 bp, Homo sapien
tgcgcgcggagcttgtagtctgcaa

SEQ ID NO: 4821354 - DNA, 25 bp, Homo sapien
ccgcggggcgatgggtgctgctcgg

SEQ ID NO: 4821355 - DNA, 25 bp, Homo sapien
tgctcgggctggcgggtcctcgccg

SEQ ID NO: 4821356 - DNA, 25 bp, Homo sapien
gctgctcgggctggcgggtcctcgc

SEQ ID NO: 4821357 - DNA, 25 bp, Homo sapien
cgcggggcgatgggtgctgctcggg

SEQ ID NO: 4821358 - DNA, 25 bp, Homo sapien
tctcggagcccggagcatcgggtgg

SEQ ID NO: 4821359 - DNA, 25 bp, Homo sapien
gccgcagattctccgccttggacgg

SEQ ID NO: 4821360 - DNA, 25 bp, Homo sapien
agcgtcctcccttccggcggctgcg

SEQ ID NO: 4821361 - DNA, 25 bp, Homo sapien
ggaagctgtccttggagcgtcctcc

SEQ ID NO: 4821362 - DNA, 25 bp, Homo sapien
ggcaggcctcggcgcgaggccgcag

SEQ ID NO: 4821363 - DNA, 25 bp, Homo sapien
gggcaggcctcggcgcgaggccgca

SEQ ID NO: 4821364 - DNA, 25 bp, Homo sapien
cccgcttgggccggggatggtcgcg

SEQ ID NO: 4821365 - DNA, 25 bp, Homo sapien
cagcgaggagcagaaacgccgctgc

SEQ ID NO: 4821366 - DNA, 25 bp, Homo sapien
acgccgttcccagggcggtccgcag

SEQ ID NO: 4821367 - DNA, 25 bp, Homo sapien
tcggggctcccagacgccgttccca

SEQ ID NO: 4821368 - DNA, 25 bp, Homo sapien
gcggctgggcgcctgtcgcggggga

SEQ ID NO: 4821369 - DNA, 25 bp, Homo sapien
cctggctgggctcgcagactccgaa

SEQ ID NO: 4821370 - DNA, 25 bp, Homo sapien
cagactccgaagtcgacccggtact

SEQ ID NO: 4821371 - DNA, 25 bp, Homo sapien
cggccgcccagaagcggagtcagcc

SEQ ID NO: 4821372 - DNA, 25 bp, Homo sapien
catttaggaaaaatagccgctcccg

SEQ ID NO: 4821373 - DNA, 25 bp, Homo sapien
tcttgaatcaaaagtcgtggcagtc

SEQ ID NO: 4821374 - DNA, 25 bp, Homo sapien
aaaaatagccgctcccgcctggagg

SEQ ID NO: 4821375 - DNA, 25 bp, Homo sapien
gtcgaccccagaacagcgggcagag

SEQ ID NO: 4821376 - DNA, 25 bp, Homo sapien
atccagcgggacacgcctgtggaac

SEQ ID NO: 4821377 - DNA, 25 bp, Homo sapien
ggacaaatggatccagcgggacacg

SEQ ID NO: 4821378 - DNA, 25 bp, Homo sapien
aggattcacacgagctgaccgaggg

SEQ ID NO: 4821379 - DNA, 25 bp, Homo sapien
acatcctgggtggtctgggctaaat

SEQ ID NO: 4821380 - DNA, 25 bp, Homo sapien
cagtttgtattcctccagcagaacc

SEQ ID NO: 4821381 - DNA, 25 bp, Homo sapien
caggaaggatctgtgctaattccac

SEQ ID NO: 4821382 - DNA, 25 bp, Homo sapien
gatctgtgctaattccacattctac

SEQ ID NO: 4821383 - DNA, 25 bp, Homo sapien
cattctacaatttctacacttaaat

SEQ ID NO: 4821384 - DNA, 25 bp, Homo sapien
gaaaagtgctcacggaaagtgcagc

SEQ ID NO: 4821385 - DNA, 25 bp, Homo sapien
gaccatgtggctctcctgtggcaga

SEQ ID NO: 4821386 - DNA, 25 bp, Homo sapien
caccttaaaggaagcgcgggactca

SEQ ID NO: 4821387 - DNA, 25 bp, Homo sapien
caagtgcaagttcacagcagggcaa

SEQ ID NO: 4821388 - DNA, 25 bp, Homo sapien
ctagccttgagctcccggaggtggc

SEQ ID NO: 4821389 - DNA, 25 bp, Homo sapien
tagttcagcaccaggtgcttcctct

SEQ ID NO: 4821390 - DNA, 25 bp, Homo sapien
aggtgcttcctctggccaatcctcc

SEQ ID NO: 4821391 - DNA, 25 bp, Homo sapien
tctggccaatcctccctagccttga

SEQ ID NO: 4821392 - DNA, 25 bp, Homo sapien
cattggcgctgacaagctgaaggct

SEQ ID NO: 4821393 - DNA, 25 bp, Homo sapien
taatgaaccacacgggccattggcg

SEQ ID NO: 4821394 - DNA, 25 bp, Homo sapien
agcagtgctcggctgcagcgtggca

SEQ ID NO: 4821395 - DNA, 25 bp, Homo sapien
gctgaaggcttcgtttttgtttcca

SEQ ID NO: 4821396 - DNA, 25 bp, Homo sapien
tttgtaaaggcactaaccacatggt

SEQ ID NO: 4821397 - DNA, 25 bp, Homo sapien
tcagttgcagacagctggccaatgc

SEQ ID NO: 4821398 - DNA, 25 bp, Homo sapien
gaaaccgacaagtcagtgccaagtc

SEQ ID NO: 4821399 - DNA, 25 bp, Homo sapien
gccaggcctggcctactgcatggga

SEQ ID NO: 4821400 - DNA, 25 bp, Homo sapien
cagtctatactccacaggcaaggga

SEQ ID NO: 4821401 - DNA, 25 bp, Homo sapien
gaaacggaccctgaaaggggctgca

SEQ ID NO: 4821402 - DNA, 25 bp, Homo sapien
gaaacctaaggccacttgcagttct

SEQ ID NO: 4821403 - DNA, 25 bp, Homo sapien
cttgcagttctgaagaaagtgactt

SEQ ID NO: 4821404 - DNA, 25 bp, Homo sapien
gccagccagataggccggaggagaa

SEQ ID NO: 4821405 - DNA, 25 bp, Homo sapien
agccagccagataggccggaggaga

SEQ ID NO: 4821406 - DNA, 25 bp, Homo sapien
gagaaaggcagctccagacgtgaaa

SEQ ID NO: 4821407 - DNA, 25 bp, Homo sapien
aggcagctccagacgtgaaaggcat

SEQ ID NO: 4821408 - DNA, 25 bp, Homo sapien
gtgtcgacagagctccacacgggag

SEQ ID NO: 4821409 - DNA, 25 bp, Homo sapien
agcacggagggcctcgtgtcgacag

SEQ ID NO: 4821410 - DNA, 25 bp, Homo sapien
cagagctccacacgggagcacggcg

SEQ ID NO: 4821411 - DNA, 25 bp, Homo sapien
gcaaagcgaatacaggagcacggag

SEQ ID NO: 4821412 - DNA, 25 bp, Homo sapien
cagtgggcgtgttagggtctcgtag

SEQ ID NO: 4821413 - DNA, 25 bp, Homo sapien
gtcaggtcgtcagtgggcgtgttag

SEQ ID NO: 4821414 - DNA, 25 bp, Homo sapien
tcgtcagtgggcgtgttagggtctc

SEQ ID NO: 4821415 - DNA, 25 bp, Homo sapien
caggtcgtcagtgggcgtgttaggg

SEQ ID NO: 4821416 - DNA, 25 bp, Homo sapien
tgtgccagctgagcagggttgtaga

SEQ ID NO: 4821417 - DNA, 25 bp, Homo sapien
cagctgagcagggttgtagaagggc

SEQ ID NO: 4821418 - DNA, 25 bp, Homo sapien
ctgagcagggttgtagaagggcatg

SEQ ID NO: 4821419 - DNA, 25 bp, Homo sapien
ccagctgagcagggttgtagaaggg

SEQ ID NO: 4821420 - DNA, 25 bp, Homo sapien
ctgcagcagggaggtcgccaggagc

SEQ ID NO: 4821421 - DNA, 25 bp, Homo sapien
gacacttcttgcaacactggattta

SEQ ID NO: 4821422 - DNA, 25 bp, Homo sapien
gtcacttcaagtgcagatacagaca

SEQ ID NO: 4821423 - DNA, 25 bp, Homo sapien
agctacagaagcagatccaagacac

SEQ ID NO: 4821424 - DNA, 25 bp, Homo sapien
ccgcttctgggtgggatttacagta

SEQ ID NO: 4821425 - DNA, 25 bp, Homo sapien
aatgaactcattgaactacagcgcg

SEQ ID NO: 4821426 - DNA, 25 bp, Homo sapien
aaatgctggctcacttcacgtgata

SEQ ID NO: 4821427 - DNA, 25 bp, Homo sapien
tcacttcacgtgataatgaactcat

SEQ ID NO: 4821428 - DNA, 25 bp, Homo sapien
aactcattgaactacagcgcgaaag

SEQ ID NO: 4821429 - DNA, 25 bp, Homo sapien
caattcccgtgctgttgaagggaga

SEQ ID NO: 4821430 - DNA, 25 bp, Homo sapien
tgcacgtcactgtccaatccaagct

SEQ ID NO: 4821431 - DNA, 25 bp, Homo sapien
ccataaaggaagaggcgcctggaca

SEQ ID NO: 4821432 - DNA, 25 bp, Homo sapien
tcctggagctcccaaacagttttgt

SEQ ID NO: 4821433 - DNA, 25 bp, Homo sapien
ctctcctccctgggaaccctcaggc

SEQ ID NO: 4821434 - DNA, 25 bp, Homo sapien
cagggagtgacgctgcagagcttaa

SEQ ID NO: 4821435 - DNA, 25 bp, Homo sapien
ttcagagccagggagtgacgctgca

SEQ ID NO: 4821436 - DNA, 25 bp, Homo sapien
ggagtgacgctgcagagcttaaaac

SEQ ID NO: 4821437 - DNA, 25 bp, Homo sapien
cagagccagggagtgacgctgcaga

SEQ ID NO: 4821438 - DNA, 25 bp, Homo sapien
ggaacactctacgtacacattggat

SEQ ID NO: 4821439 - DNA, 25 bp, Homo sapien
cattggatactgacttgcagaaggc

SEQ ID NO: 4821440 - DNA, 25 bp, Homo sapien
tctaccatacataagtgtgaggcgt

SEQ ID NO: 4821441 - DNA, 25 bp, Homo sapien
tgaggcgtttaaggcggaacactct

SEQ ID NO: 4821442 - DNA, 25 bp, Homo sapien
gctctggattggccaggcccctagc

SEQ ID NO: 4821443 - DNA, 25 bp, Homo sapien
gccaggcccctagctgctgcaggcc

SEQ ID NO: 4821444 - DNA, 25 bp, Homo sapien
ttccctgccagtcccgtctggaagc

SEQ ID NO: 4821445 - DNA, 25 bp, Homo sapien
ctggattggccaggcccctagctgc

SEQ ID NO: 4821446 - DNA, 25 bp, Homo sapien
gaggccatcattccgtcccgaacgt

SEQ ID NO: 4821447 - DNA, 25 bp, Homo sapien
ccatcattccgtcccgaacgtccct

SEQ ID NO: 4821448 - DNA, 25 bp, Homo sapien
atcattccgtcccgaacgtccctgg

SEQ ID NO: 4821449 - DNA, 25 bp, Homo sapien
aggaggccatcattccgtcccgaac

SEQ ID NO: 4821450 - DNA, 25 bp, Homo sapien
gccaggtcattcttttaacgggaga

SEQ ID NO: 4821451 - DNA, 25 bp, Homo sapien
taacgggagatttaggagagactca

SEQ ID NO: 4821452 - DNA, 25 bp, Homo sapien
gagagactcatagaaagaggatcaa

SEQ ID NO: 4821453 - DNA, 25 bp, Homo sapien
agagtttcacactgcacacgcggca

SEQ ID NO: 4821454 - DNA, 25 bp, Homo sapien
ttagaaggaattgggagtggcgcga

SEQ ID NO: 4821455 - DNA, 25 bp, Homo sapien
ggttggcacgaacaagttagaagga

SEQ ID NO: 4821456 - DNA, 25 bp, Homo sapien
gacgtcaacgtagcgagctctggtt

SEQ ID NO: 4821457 - DNA, 25 bp, Homo sapien
cgacaaagtccgcaggagcgagagc

SEQ ID NO: 4821458 - DNA, 25 bp, Homo sapien
gaagcaaattgaggtgaacgcgcca

SEQ ID NO: 4821459 - DNA, 25 bp, Homo sapien
agttaatcgttcaagcaagctccca

SEQ ID NO: 4821460 - DNA, 25 bp, Homo sapien
tcactgcgtcagaggaaaagcacgc

SEQ ID NO: 4821461 - DNA, 25 bp, Homo sapien
ttccaaatgctctgcgctcactgcg

SEQ ID NO: 4821462 - DNA, 25 bp, Homo sapien
agtacatgttcacgggggctccagg

SEQ ID NO: 4821463 - DNA, 25 bp, Homo sapien
tagagtacatgttcacgggggctcc

SEQ ID NO: 4821464 - DNA, 25 bp, Homo sapien
tgctcttctagagtacatgttcacg

SEQ ID NO: 4821465 - DNA, 25 bp, Homo sapien
ctcttctagagtacatgttcacggg

SEQ ID NO: 4821466 - DNA, 25 bp, Homo sapien
aggcggggcagcttgcacagtcttg

SEQ ID NO: 4821467 - DNA, 25 bp, Homo sapien
ggcagcttgcacagtcttgggcatc

SEQ ID NO: 4821468 - DNA, 25 bp, Homo sapien
acagtcttgggcatcgaggttggag

SEQ ID NO: 4821469 - DNA, 25 bp, Homo sapien
cagtcttgggcatcgaggttggagg

SEQ ID NO: 4821470 - DNA, 25 bp, Homo sapien
ctgcagagggaaacacagcttcaga

SEQ ID NO: 4821471 - DNA, 25 bp, Homo sapien
cagagggaaacacagcttcagacac

SEQ ID NO: 4821472 - DNA, 25 bp, Homo sapien
tgcagagggaaacacagcttcagac

SEQ ID NO: 4821473 - DNA, 25 bp, Homo sapien
agggaaacacagcttcagacaccca

SEQ ID NO: 4821474 - DNA, 25 bp, Homo sapien
cacacccaacaggaactagaatgac

SEQ ID NO: 4821475 - DNA, 25 bp, Homo sapien
acctcacacccaacaggaactagaa

SEQ ID NO: 4821476 - DNA, 25 bp, Homo sapien
cacatgaggctgttccctccactca

SEQ ID NO: 4821477 - DNA, 25 bp, Homo sapien
cccaacaggaactagaatgacaatt

SEQ ID NO: 4821478 - DNA, 25 bp, Homo sapien
ctcatttaaattcacccactggttt

SEQ ID NO: 4821479 - DNA, 25 bp, Homo sapien
tctggctcatttaaattcacccact

SEQ ID NO: 4821480 - DNA, 25 bp, Homo sapien
ggctcatttaaattcacccactggt

SEQ ID NO: 4821481 - DNA, 25 bp, Homo sapien
tggctcatttaaattcacccactgg

SEQ ID NO: 4821482 - DNA, 25 bp, Homo sapien
aaacttcaggaaacacctactcagg

SEQ ID NO: 4821483 - DNA, 25 bp, Homo sapien
gacgtcccgtgcgtatttgacagca

SEQ ID NO: 4821484 - DNA, 25 bp, Homo sapien
aaatcattacaattcttcggacgtc

SEQ ID NO: 4821485 - DNA, 25 bp, Homo sapien
ggtcagcagactgaacctaaacaga

SEQ ID NO: 4821486 - DNA, 25 bp, Homo sapien
ttccaggtagccaacgaaagaacca

SEQ ID NO: 4821487 - DNA, 25 bp, Homo sapien
gtagccaacgaaagaaccaggattc

SEQ ID NO: 4821488 - DNA, 25 bp, Homo sapien
gccaacgaaagaaccaggattcacc

SEQ ID NO: 4821489 - DNA, 25 bp, Homo sapien
caggtagccaacgaaagaaccagga

SEQ ID NO: 4821490 - DNA, 25 bp, Homo sapien
aaaagacaaattctacatgacccac

SEQ ID NO: 4821491 - DNA, 25 bp, Homo sapien
tcgtttcaaggagacagagtttctg

SEQ ID NO: 4821492 - DNA, 25 bp, Homo sapien
taggtcagaacagtaacgtgccttc

SEQ ID NO: 4821493 - DNA, 25 bp, Homo sapien
tgtgtcggaggcagatacagccctc

SEQ ID NO: 4821494 - DNA, 25 bp, Homo sapien
taaacactgacaaagcttccgacgt

SEQ ID NO: 4821495 - DNA, 25 bp, Homo sapien
aaccatttaggacaactgctcagca

SEQ ID NO: 4821496 - DNA, 25 bp, Homo sapien
caacggatagagacttgaacaagca

SEQ ID NO: 4821497 - DNA, 25 bp, Homo sapien
tgagatggtaacagggacacgagaa

SEQ ID NO: 4821498 - DNA, 25 bp, Homo sapien
taagttaaagaaccggcactgccca

SEQ ID NO: 4821499 - DNA, 25 bp, Homo sapien
tcgccaatagataggcaaggaggct

SEQ ID NO: 4821500 - DNA, 25 bp, Homo sapien
ctaagaaaaacaagcgcattcgcca

SEQ ID NO: 4821501 - DNA, 25 bp, Homo sapien
gaaaaacaagcgcattcgccaatag

SEQ ID NO: 4821502 - DNA, 25 bp, Homo sapien
aagcgcattcgccaatagataggca

SEQ ID NO: 4821503 - DNA, 25 bp, Homo sapien
ggtcccttgcgggtgggtctgacag

SEQ ID NO: 4821504 - DNA, 25 bp, Homo sapien
caggtagtggccagaggcgacctct

SEQ ID NO: 4821505 - DNA, 25 bp, Homo sapien
cgggtgggtctgacaggtagtggcc

SEQ ID NO: 4821506 - DNA, 25 bp, Homo sapien
cctgggtgggctattatcctattat

SEQ ID NO: 4821507 - DNA, 25 bp, Homo sapien
agacagaggtggctgcgtgggaccc

SEQ ID NO: 4821508 - DNA, 25 bp, Homo sapien
cttggctgcctgtccgggtctcttt

SEQ ID NO: 4821509 - DNA, 25 bp, Homo sapien
gtctctttgtttcgggagcgggtga

SEQ ID NO: 4821510 - DNA, 25 bp, Homo sapien
gtgggacccgagtcggcacgatccc

SEQ ID NO: 4821511 - DNA, 25 bp, Homo sapien
tgcaattccccaggcgtgtttccta

SEQ ID NO: 4821512 - DNA, 25 bp, Homo sapien
gggctcctcacaggaaccgaaagag

SEQ ID NO: 4821513 - DNA, 25 bp, Homo sapien
gctcctcacaggaaccgaaagagag

SEQ ID NO: 4821514 - DNA, 25 bp, Homo sapien
tcctcacaggaaccgaaagagagag

SEQ ID NO: 4821515 - DNA, 25 bp, Homo sapien
ctctacctggcctgactagagaaga

SEQ ID NO: 4821516 - DNA, 25 bp, Homo sapien
tagagaagagccagccgcacttaat

SEQ ID NO: 4821517 - DNA, 25 bp, Homo sapien
aatgagggcgttcgatggagattcc

SEQ ID NO: 4821518 - DNA, 25 bp, Homo sapien
taataagcagctccgtctgggagca

SEQ ID NO: 4821519 - DNA, 25 bp, Homo sapien
gcttagctcggaaagtgagtttcca

SEQ ID NO: 4821520 - DNA, 25 bp, Homo sapien
tcttcgcttagctcggaaagtgagt

SEQ ID NO: 4821521 - DNA, 25 bp, Homo sapien
tgagtttccaacaggcgcctcctgc

SEQ ID NO: 4821522 - DNA, 25 bp, Homo sapien
aattttcttcgcttagctcggaaag

SEQ ID NO: 4821523 - DNA, 25 bp, Homo sapien
gtgtctcctttcctgcagaggtggc

SEQ ID NO: 4821524 - DNA, 25 bp, Homo sapien
ggcttcctggagcaagtgtctcctt

SEQ ID NO: 4821525 - DNA, 25 bp, Homo sapien
ctcctttcctgcagaggtggcacac

SEQ ID NO: 4821526 - DNA, 25 bp, Homo sapien
ctggcttcctggagcaagtgtctcc

SEQ ID NO: 4821527 - DNA, 25 bp, Homo sapien
gtgggaggccaggcccggagggctc

SEQ ID NO: 4821528 - DNA, 25 bp, Homo sapien
ggaggccaggcccggagggctccag

SEQ ID NO: 4821529 - DNA, 25 bp, Homo sapien
caggtgggaggccaggcccggaggg

SEQ ID NO: 4821530 - DNA, 25 bp, Homo sapien
aggccaggcccggagggctccagga

SEQ ID NO: 4821531 - DNA, 25 bp, Homo sapien
tccaggggccccgggggcagtggca

SEQ ID NO: 4821532 - DNA, 25 bp, Homo sapien
gaacatcggcactctggcaggactg

SEQ ID NO: 4821533 - DNA, 25 bp, Homo sapien
tgggaacatcggcactctggcagga

SEQ ID NO: 4821534 - DNA, 25 bp, Homo sapien
tggcaggactggccaatgggccgtc

SEQ ID NO: 4821535 - DNA, 25 bp, Homo sapien
ggaacatcggcactctggcaggact

SEQ ID NO: 4821536 - DNA, 25 bp, Homo sapien
gcatgggaacggtggagaagaggtc

SEQ ID NO: 4821537 - DNA, 25 bp, Homo sapien
catgggaacggtggagaagaggtct

SEQ ID NO: 4821538 - DNA, 25 bp, Homo sapien
ctgcatgggaacggtggagaagagg

SEQ ID NO: 4821539 - DNA, 25 bp, Homo sapien
tgggaacggtggagaagaggtctgg

SEQ ID NO: 4821540 - DNA, 25 bp, Homo sapien
tgggccctggatgcttcaacaacaa

SEQ ID NO: 4821541 - DNA, 25 bp, Homo sapien
tcaaccaggaagtggtaacggtgtc

SEQ ID NO: 4821542 - DNA, 25 bp, Homo sapien
tcttccgactcaacataaaacctga

SEQ ID NO: 4821543 - DNA, 25 bp, Homo sapien
gagaaagcgctaaggacagcaatca

SEQ ID NO: 4821544 - DNA, 25 bp, Homo sapien
gcgtgcaggccgcgctggtgaggtt

SEQ ID NO: 4821545 - DNA, 25 bp, Homo sapien
ctgcgtgcaggccgcgctggtgagg

SEQ ID NO: 4821546 - DNA, 25 bp, Homo sapien
cgtgcaggccgcgctggtgaggttc

SEQ ID NO: 4821547 - DNA, 25 bp, Homo sapien
gtgcaggccgcgctggtgaggttca

SEQ ID NO: 4821548 - DNA, 25 bp, Homo sapien
gggcatctggacttgactccctgga

SEQ ID NO: 4821549 - DNA, 25 bp, Homo sapien
ctgacgaaggaagccgagaagcgcg

SEQ ID NO: 4821550 - DNA, 25 bp, Homo sapien
tctgggctggcccttccaccgacgg

SEQ ID NO: 4821551 - DNA, 25 bp, Homo sapien
aaggaagccgagaagcgcgagagag

SEQ ID NO: 4821552 - DNA, 25 bp, Homo sapien
agggttggcgatccccagggctcct

SEQ ID NO: 4821553 - DNA, 25 bp, Homo sapien
tccatctcggaactcggagtgccag

SEQ ID NO: 4821554 - DNA, 25 bp, Homo sapien
cgcacgctcgggctcgagtgctcag

SEQ ID NO: 4821555 - DNA, 25 bp, Homo sapien
ccaggacactgctgcgggagggctc

SEQ ID NO: 4821556 - DNA, 25 bp, Homo sapien
tgaaccagccacgtgggtgcggcca

SEQ ID NO: 4821557 - DNA, 25 bp, Homo sapien
cgaagagtcgtaactgggaagccat

SEQ ID NO: 4821558 - DNA, 25 bp, Homo sapien
gtgggtgcggccaaggactcctctt

SEQ ID NO: 4821559 - DNA, 25 bp, Homo sapien
ctttcagctggggatcgaagagtcg

SEQ ID NO: 4821560 - DNA, 25 bp, Homo sapien
cagcatcccgaggacaggcgccagg

SEQ ID NO: 4821561 - DNA, 25 bp, Homo sapien
acagcatcccgaggacaggcgccag

SEQ ID NO: 4821562 - DNA, 25 bp, Homo sapien
tcagcacagcatcccgaggacaggc

SEQ ID NO: 4821563 - DNA, 25 bp, Homo sapien
agcacagcatcccgaggacaggcgc

SEQ ID NO: 4821564 - DNA, 25 bp, Homo sapien
ttcgcgatggcctcacagtagtgga

SEQ ID NO: 4821565 - DNA, 25 bp, Homo sapien
cgccaggcggcaggagtagatgaac

SEQ ID NO: 4821566 - DNA, 25 bp, Homo sapien
gaaggcttgcgtggccagccccatt

SEQ ID NO: 4821567 - DNA, 25 bp, Homo sapien
ggctgcgtcaggatgctcttcgcga

SEQ ID NO: 4821568 - DNA, 25 bp, Homo sapien
ggacaaagccttgtactgccctgag

SEQ ID NO: 4821569 - DNA, 25 bp, Homo sapien
cgcgtccgagcatcgccgatggaca

SEQ ID NO: 4821570 - DNA, 25 bp, Homo sapien
gagcatcgccgatggacaaagcctt

SEQ ID NO: 4821571 - DNA, 25 bp, Homo sapien
gacaaagccttgtactgccctgagg

SEQ ID NO: 4821572 - DNA, 25 bp, Homo sapien
ttagcactgagtgcctgcccagcca

SEQ ID NO: 4821573 - DNA, 25 bp, Homo sapien
aatctaagtagccaaaagcttgtta

SEQ ID NO: 4821574 - DNA, 25 bp, Homo sapien
acaatctaagtagccaaaagcttgt

SEQ ID NO: 4821575 - DNA, 25 bp, Homo sapien
ttgttagcactgagtgcctgcccag

SEQ ID NO: 4821576 - DNA, 25 bp, Homo sapien
cacccagggactgggcgtactcata

SEQ ID NO: 4821577 - DNA, 25 bp, Homo sapien
cctctggattgcttcgttggttgcg

SEQ ID NO: 4821578 - DNA, 25 bp, Homo sapien
ttggttgcgaactttaagaatggca

SEQ ID NO: 4821579 - DNA, 25 bp, Homo sapien
tactcataggcttccgtcctctgga

SEQ ID NO: 4821580 - DNA, 25 bp, Homo sapien
tattggcatagtcaaccttggagca

SEQ ID NO: 4821581 - DNA, 25 bp, Homo sapien
ggactacactgacttggttctttac

SEQ ID NO: 4821582 - DNA, 25 bp, Homo sapien
agtgtgtcccaccacgtgacaaata

SEQ ID NO: 4821583 - DNA, 25 bp, Homo sapien
gacaaataaagacatgattctggcc

SEQ ID NO: 4821584 - DNA, 25 bp, Homo sapien
cgtgtaaacaccaaatcccgcctgg

SEQ ID NO: 4821585 - DNA, 25 bp, Homo sapien
ctgtgattggatccgattaagacaa

SEQ ID NO: 4821586 - DNA, 25 bp, Homo sapien
gatccgattaagacaagctttgtag

SEQ ID NO: 4821587 - DNA, 25 bp, Homo sapien
tgtagttttcttcgtgtaaacacca

SEQ ID NO: 4821588 - DNA, 25 bp, Homo sapien
aacgccacagacaaccgggccttcg

SEQ ID NO: 4821589 - DNA, 25 bp, Homo sapien
cgcttgcagaagtcaaggacgcgca

SEQ ID NO: 4821590 - DNA, 25 bp, Homo sapien
ctcagcgaccgggagcgcttgcaga

SEQ ID NO: 4821591 - DNA, 25 bp, Homo sapien
aggacgcgcacagaaggcaccagag

SEQ ID NO: 4821592 - DNA, 25 bp, Homo sapien
cccatggtagccatcgtcctggact

SEQ ID NO: 4821593 - DNA, 25 bp, Homo sapien
tgttcaagttggacaagaccatggc

SEQ ID NO: 4821594 - DNA, 25 bp, Homo sapien
accatggcgaggtgcggcctccaat

SEQ ID NO: 4821595 - DNA, 25 bp, Homo sapien
gactcgacgtccatgttgttgttca

SEQ ID NO: 4821596 - DNA, 25 bp, Homo sapien
gacgcggcaggcatccgtccggaca

SEQ ID NO: 4821597 - DNA, 25 bp, Homo sapien
cgttgattgggaggctgttagcaaa

SEQ ID NO: 4821598 - DNA, 25 bp, Homo sapien
gcaggcatccgtccggacatgagct

SEQ ID NO: 4821599 - DNA, 25 bp, Homo sapien
tgtctgcagagggtcgttgattggg

SEQ ID NO: 4821600 - DNA, 25 bp, Homo sapien
gcgtgtgtccggctgtccatcttac

SEQ ID NO: 4821601 - DNA, 25 bp, Homo sapien
tccggctgtccatcttacttgcaag

SEQ ID NO: 4821602 - DNA, 25 bp, Homo sapien
cttgcaagtagcagagcgtgacccc

SEQ ID NO: 4821603 - DNA, 25 bp, Homo sapien
tcatgactcgggcgtgtgtccggct

SEQ ID NO: 4821604 - DNA, 25 bp, Homo sapien
ctgcagcgcggatgctcccaagagg

SEQ ID NO: 4821605 - DNA, 25 bp, Homo sapien
cactgcagcgcggatgctcccaaga

SEQ ID NO: 4821606 - DNA, 25 bp, Homo sapien
gaaacagcaagacccgaagccccac

SEQ ID NO: 4821607 - DNA, 25 bp, Homo sapien
cacactgcagcgcggatgctcccaa

SEQ ID NO: 4821608 - DNA, 25 bp, Homo sapien
caggcccgacccagtggacatgtgc

SEQ ID NO: 4821609 - DNA, 25 bp, Homo sapien
gcccgacccagtggacatgtgcagg

SEQ ID NO: 4821610 - DNA, 25 bp, Homo sapien
ggcgccaggtgccatgatgaggagg

SEQ ID NO: 4821611 - DNA, 25 bp, Homo sapien
caggtgccatgatgaggaggcgcac

SEQ ID NO: 4821612 - DNA, 25 bp, Homo sapien
tgtggtctcgtaacagaagctccgc

SEQ ID NO: 4821613 - DNA, 25 bp, Homo sapien
tctctctctcgagcgagctggcggc

SEQ ID NO: 4821614 - DNA, 25 bp, Homo sapien
tcttacggccatacagcaacagctc

SEQ ID NO: 4821615 - DNA, 25 bp, Homo sapien
ggtttgcttcattgggcgacttccc

SEQ ID NO: 4821616 - DNA, 25 bp, Homo sapien
gttctgtgcaaaattaatgacatcc

SEQ ID NO: 4821617 - DNA, 25 bp, Homo sapien
tcatagctttgttctgtgcaaaatt

SEQ ID NO: 4821618 - DNA, 25 bp, Homo sapien
gctttgttctgtgcaaaattaatga

SEQ ID NO: 4821619 - DNA, 25 bp, Homo sapien
cataagagaacaataaaattccaaa

SEQ ID NO: 4821620 - DNA, 25 bp, Homo sapien
tgcaaggccgggctcacaaagaaat

SEQ ID NO: 4821621 - DNA, 25 bp, Homo sapien
tcctgctcagacgtgtgctgcagca

SEQ ID NO: 4821622 - DNA, 25 bp, Homo sapien
atctcctcctgctcagacgtgtgct

SEQ ID NO: 4821623 - DNA, 25 bp, Homo sapien
tcccgggaacgcccgcatctcctcc

SEQ ID NO: 4821624 - DNA, 25 bp, Homo sapien
tgctcagacgtgtgctgcagcaagg

SEQ ID NO: 4821625 - DNA, 25 bp, Homo sapien
tggacctccaccaaggccggctgtc

SEQ ID NO: 4821626 - DNA, 25 bp, Homo sapien
ggacctccaccaaggccggctgtcc

SEQ ID NO: 4821627 - DNA, 25 bp, Homo sapien
gtggacctccaccaaggccggctgt

SEQ ID NO: 4821628 - DNA, 25 bp, Homo sapien
gacctccaccaaggccggctgtcct

SEQ ID NO: 4821629 - DNA, 25 bp, Homo sapien
tgaaggcagattgggaatcactttg

SEQ ID NO: 4821630 - DNA, 25 bp, Homo sapien
gccagggccaaacctggcacagaca

SEQ ID NO: 4821631 - DNA, 25 bp, Homo sapien
ccaaacctggcacagacatgaggca

SEQ ID NO: 4821632 - DNA, 25 bp, Homo sapien
ctgaaggcagattgggaatcacttt

SEQ ID NO: 4821633 - DNA, 25 bp, Homo sapien
ctgaaaatttttcaggagaagttgg

SEQ ID NO: 4821634 - DNA, 25 bp, Homo sapien
tgctccatggcaggccagacggtgt

SEQ ID NO: 4821635 - DNA, 25 bp, Homo sapien
ctccatggcaggccagacggtgtcg

SEQ ID NO: 4821636 - DNA, 25 bp, Homo sapien
tccatggcaggccagacggtgtcgg

SEQ ID NO: 4821637 - DNA, 25 bp, Homo sapien
cttgctccatggcaggccagacggt

SEQ ID NO: 4821638 - DNA, 25 bp, Homo sapien
taggaaccggcagccacattgtggc

SEQ ID NO: 4821639 - DNA, 25 bp, Homo sapien
gcaaaatcgccgtgaaaggagcctg

SEQ ID NO: 4821640 - DNA, 25 bp, Homo sapien
ggtaggtgccgtaggcaaaatcgcc

SEQ ID NO: 4821641 - DNA, 25 bp, Homo sapien
tgctgaaattgctgcggtaggtgcc

SEQ ID NO: 4821642 - DNA, 25 bp, Homo sapien
gatcgtacctccagttgttgtcacg

SEQ ID NO: 4821643 - DNA, 25 bp, Homo sapien
tccccgtgaagcgaggatcgtacct

SEQ ID NO: 4821644 - DNA, 25 bp, Homo sapien
tccgtgccgagtgctcgctgtggac

SEQ ID NO: 4821645 - DNA, 25 bp, Homo sapien
cccataagggtctctgtgcggatcg

SEQ ID NO: 4821646 - DNA, 25 bp, Homo sapien
tctcctgtatgcgtcatactctgca

SEQ ID NO: 4821647 - DNA, 25 bp, Homo sapien
cacaccaatacctccggtcataggt

SEQ ID NO: 4821648 - DNA, 25 bp, Homo sapien
caatacctccggtcataggtgcggg

SEQ ID NO: 4821649 - DNA, 25 bp, Homo sapien
gcgtcatactctgcatcacaccaat

SEQ ID NO: 4821650 - DNA, 25 bp, Homo sapien
tgtagtggtaacgatcccagtgacc

SEQ ID NO: 4821651 - DNA, 25 bp, Homo sapien
tagtggtaacgatcccagtgacctg

SEQ ID NO: 4821652 - DNA, 25 bp, Homo sapien
ctgtagtggtaacgatcccagtgac

SEQ ID NO: 4821653 - DNA, 25 bp, Homo sapien
gtggtaacgatcccagtgacctgga

SEQ ID NO: 4821654 - DNA, 25 bp, Homo sapien
ctgctaaggccagctgcttggagtt

SEQ ID NO: 4821655 - DNA, 25 bp, Homo sapien
gccagctgcttggagttccttgaca

SEQ ID NO: 4821656 - DNA, 25 bp, Homo sapien
tgctaaggccagctgcttggagttc

SEQ ID NO: 4821657 - DNA, 25 bp, Homo sapien
agctgcttggagttccttgacatac

SEQ ID NO: 4821658 - DNA, 25 bp, Homo sapien
tggaactatagtatccttcaggata

SEQ ID NO: 4821659 - DNA, 25 bp, Homo sapien
tagtaatcgctctgactgctccatc

SEQ ID NO: 4821660 - DNA, 25 bp, Homo sapien
tccataatcgtactggctggagtaa

SEQ ID NO: 4821661 - DNA, 25 bp, Homo sapien
gctggagtaatagcttgcatagtaa

SEQ ID NO: 4821662 - DNA, 25 bp, Homo sapien
catcatagggcctgtatcgaggctc

SEQ ID NO: 4821663 - DNA, 25 bp, Homo sapien
aagcagacgcagcaccatcataggg

SEQ ID NO: 4821664 - DNA, 25 bp, Homo sapien
tcgaggctcatagaggctgtagaca

SEQ ID NO: 4821665 - DNA, 25 bp, Homo sapien
tcgggctcgggatagcggtagttct

SEQ ID NO: 4821666 - DNA, 25 bp, Homo sapien
taggcatcgtacaaaggccggtagt

SEQ ID NO: 4821667 - DNA, 25 bp, Homo sapien
tacggcaaagagtactgaggctggt

SEQ ID NO: 4821668 - DNA, 25 bp, Homo sapien
tggacaccagagacacgctagagga

SEQ ID NO: 4821669 - DNA, 25 bp, Homo sapien
acggctgctctgacggcacagctgc

SEQ ID NO: 4821670 - DNA, 25 bp, Homo sapien
taaagtctagggctccgtaagtgtc

SEQ ID NO: 4821671 - DNA, 25 bp, Homo sapien
gatttgacagctccgaaaacatggc

SEQ ID NO: 4821672 - DNA, 25 bp, Homo sapien
tagaaaccatttcggaagcaccaga

SEQ ID NO: 4821673 - DNA, 25 bp, Homo sapien
tactttgggcaacactgctaggcag

SEQ ID NO: 4821674 - DNA, 25 bp, Homo sapien
tctggaggctgaacaacaggtggct

SEQ ID NO: 4821675 - DNA, 25 bp, Homo sapien
ttttgcacacacataaagcgccggg

SEQ ID NO: 4821676 - DNA, 25 bp, Homo sapien
tcctacgggagaagaatcgatttgc

SEQ ID NO: 4821677 - DNA, 25 bp, Homo sapien
taaacttgcataaccagaactcgcc

SEQ ID NO: 4821678 - DNA, 25 bp, Homo sapien
cgcttgaccagataagcctgctttt

SEQ ID NO: 4821679 - DNA, 25 bp, Homo sapien
tgcctgcccccacgtgtgtaggtgc

SEQ ID NO: 4821680 - DNA, 25 bp, Homo sapien
tggagcagaaatcgtcaaagtccgc

SEQ ID NO: 4821681 - DNA, 25 bp, Homo sapien
gaaaaacatcgccagagctcctgaa

SEQ ID NO: 4821682 - DNA, 25 bp, Homo sapien
ggcgggccggtgctcattcttcact

SEQ ID NO: 4821683 - DNA, 25 bp, Homo sapien
tttgcaagtggctcacctcgtctct

SEQ ID NO: 4821684 - DNA, 25 bp, Homo sapien
ttttctgggctatctccccgggcga

SEQ ID NO: 4821685 - DNA, 25 bp, Homo sapien
tctcttccgtcactgggcaaggctg

SEQ ID NO: 4821686 - DNA, 25 bp, Homo sapien
gctggggtgaccacaccgtcatgtg

SEQ ID NO: 4821687 - DNA, 25 bp, Homo sapien
tcaggggtcggtcgagcccaggcat

SEQ ID NO: 4821688 - DNA, 25 bp, Homo sapien
tgggttttgcctgctcaggggtcgg

SEQ ID NO: 4821689 - DNA, 25 bp, Homo sapien
ctgctggggtgaccacaccgtcatg

SEQ ID NO: 4821690 - DNA, 25 bp, Homo sapien
gggtccctgagagctatctctggca

SEQ ID NO: 4821691 - DNA, 25 bp, Homo sapien
tcaatgcaccagaaaacggactggc

SEQ ID NO: 4821692 - DNA, 25 bp, Homo sapien
acaggtggactgcttttggacgaac

SEQ ID NO: 4821693 - DNA, 25 bp, Homo sapien
catgagacgtttcaggatccactcc

SEQ ID NO: 4821694 - DNA, 25 bp, Homo sapien
taaaagcaaatggatccgtgaccgg

SEQ ID NO: 4821695 - DNA, 25 bp, Homo sapien
tggtgtactttggagcgcctgtcta

SEQ ID NO: 4821696 - DNA, 25 bp, Homo sapien
caagttgtcggagccactgctgcat

SEQ ID NO: 4821697 - DNA, 25 bp, Homo sapien
tattattagcccgtctcctgtaagg

SEQ ID NO: 4821698 - DNA, 25 bp, Homo sapien
gactgaacccttgcacaagtcgatg

SEQ ID NO: 4821699 - DNA, 25 bp, Homo sapien
cagaaggaagcaggatatagctgtt

SEQ ID NO: 4821700 - DNA, 25 bp, Homo sapien
ggatatagctgttccttaattggag

SEQ ID NO: 4821701 - DNA, 25 bp, Homo sapien
aggaagcaggatatagctgttcctt

SEQ ID NO: 4821702 - DNA, 25 bp, Homo sapien
tgcttacagaaggaagcaggatata

SEQ ID NO: 4821703 - DNA, 25 bp, Homo sapien
gaacacctgtccctgaggaactgtt

SEQ ID NO: 4821704 - DNA, 25 bp, Homo sapien
cagcagagaacacctgtccctgagg

SEQ ID NO: 4821705 - DNA, 25 bp, Homo sapien
gagaacacctgtccctgaggaactg

SEQ ID NO: 4821706 - DNA, 25 bp, Homo sapien
cccagcagagaacacctgtccctga

SEQ ID NO: 4821707 - DNA, 25 bp, Homo sapien
gaggccagcagcctaacactgatga

SEQ ID NO: 4821708 - DNA, 25 bp, Homo sapien
cagcagcctaacactgatgaaaatg

SEQ ID NO: 4821709 - DNA, 25 bp, Homo sapien
ggccagcagcctaacactgatgaaa

SEQ ID NO: 4821710 - DNA, 25 bp, Homo sapien
aggccagcagcctaacactgatgaa

SEQ ID NO: 4821711 - DNA, 25 bp, Homo sapien
aagatgtgagaagagatgggattct

SEQ ID NO: 4821712 - DNA, 25 bp, Homo sapien
gatgggattcttcaatcaaggccac

SEQ ID NO: 4821713 - DNA, 25 bp, Homo sapien
tcaaggccacaagcgggaaatcagt

SEQ ID NO: 4821714 - DNA, 25 bp, Homo sapien
ttcaatcaaggccacaagcgggaaa

SEQ ID NO: 4821715 - DNA, 25 bp, Homo sapien
tcgcattcttccgttgggctgggag

SEQ ID NO: 4821716 - DNA, 25 bp, Homo sapien
gcgctcctcgcattcttccgttggg

SEQ ID NO: 4821717 - DNA, 25 bp, Homo sapien
actccgcccagctgagaagcgcggg

SEQ ID NO: 4821718 - DNA, 25 bp, Homo sapien
gagaacggctactccgcccagctga

SEQ ID NO: 4821719 - DNA, 25 bp, Homo sapien
gcgcctgcgcgctggttgcctggtt

SEQ ID NO: 4821720 - DNA, 25 bp, Homo sapien
ctgcgggacgcggagggccgactgc

SEQ ID NO: 4821721 - DNA, 25 bp, Homo sapien
gcctgcgcgctggttgcctggttac

SEQ ID NO: 4821722 - DNA, 25 bp, Homo sapien
gcgggacgcggagggccgactgcgc

SEQ ID NO: 4821723 - DNA, 25 bp, Homo sapien
ccgccagtccctggccagcgtcctg

SEQ ID NO: 4821724 - DNA, 25 bp, Homo sapien
cgagcggcgccggaagttggtcgat

SEQ ID NO: 4821725 - DNA, 25 bp, Homo sapien
aagttggtcgatggctgccgccagt

SEQ ID NO: 4821726 - DNA, 25 bp, Homo sapien
tggggtttccccgacgcatcctcta

SEQ ID NO: 4821727 - DNA, 25 bp, Homo sapien
gcaccagggccaatctgctcagcta

SEQ ID NO: 4821728 - DNA, 25 bp, Homo sapien
gcccgatggcatcgcgggaggctga

SEQ ID NO: 4821729 - DNA, 25 bp, Homo sapien
cagggagagcttcagtccggctgac

SEQ ID NO: 4821730 - DNA, 25 bp, Homo sapien
gggtgatatccgtgccacgccagca

SEQ ID NO: 4821731 - DNA, 25 bp, Homo sapien
agcagtctcagtgaacgcaggacgg

SEQ ID NO: 4821732 - DNA, 25 bp, Homo sapien
tttgctgacaactggcgggccagtg

SEQ ID NO: 4821733 - DNA, 25 bp, Homo sapien
gctctttgctgacaactggcgggcc

SEQ ID NO: 4821734 - DNA, 25 bp, Homo sapien
gcaggacggcccctcactgtgagct

SEQ ID NO: 4821735 - DNA, 25 bp, Homo sapien
taaaatagcagtggcgagtatgtct

SEQ ID NO: 4821736 - DNA, 25 bp, Homo sapien
tctgggtgcttgtggaggtttactg

SEQ ID NO: 4821737 - DNA, 25 bp, Homo sapien
tcctggacgctgaagctggaggctt

SEQ ID NO: 4821738 - DNA, 25 bp, Homo sapien
gacccttagtcctggacgctgaagc

SEQ ID NO: 4821739 - DNA, 25 bp, Homo sapien
cctcatagaggagaggaagtcacct

SEQ ID NO: 4821740 - DNA, 25 bp, Homo sapien
gtcacagtaacctgggaccgcaggc

SEQ ID NO: 4821741 - DNA, 25 bp, Homo sapien
gaaagctcaaggctgatgtcgatgt

SEQ ID NO: 4821742 - DNA, 25 bp, Homo sapien
aagctcaaggctgatgtcgatgtca

SEQ ID NO: 4821743 - DNA, 25 bp, Homo sapien
gatgtcgatgtcacagtaacctggg

SEQ ID NO: 4821744 - DNA, 25 bp, Homo sapien
cccatgcccagcgtgcaccagcagc

SEQ ID NO: 4821745 - DNA, 25 bp, Homo sapien
atgcccagcgtgcaccagcagctca

SEQ ID NO: 4821746 - DNA, 25 bp, Homo sapien
tgcccagcgtgcaccagcagctcac

SEQ ID NO: 4821747 - DNA, 25 bp, Homo sapien
ccatgcccagcgtgcaccagcagct

SEQ ID NO: 4821748 - DNA, 25 bp, Homo sapien
gccagcacccaggtccccacttgac

SEQ ID NO: 4821749 - DNA, 25 bp, Homo sapien
cagcacccaggtccccacttgaccc

SEQ ID NO: 4821750 - DNA, 25 bp, Homo sapien
gggccagcacccaggtccccacttg

SEQ ID NO: 4821751 - DNA, 25 bp, Homo sapien
cccagggccagcacccaggtcccca

SEQ ID NO: 4821752 - DNA, 25 bp, Homo sapien
acacaaagcagccagatcgggagtc

SEQ ID NO: 4821753 - DNA, 25 bp, Homo sapien
cgccaggtggaaagcaaagacacaa

SEQ ID NO: 4821754 - DNA, 25 bp, Homo sapien
tcacgtcggggcaggcgactgaggc

SEQ ID NO: 4821755 - DNA, 25 bp, Homo sapien
cagccagatcgggagtcacgtcggg

SEQ ID NO: 4821756 - DNA, 25 bp, Homo sapien
cacggacaccctttgcaagtgagac

SEQ ID NO: 4821757 - DNA, 25 bp, Homo sapien
gaatacgtcggtgtcccaccaggaa

SEQ ID NO: 4821758 - DNA, 25 bp, Homo sapien
gataaggagccacacagaacgaaat

SEQ ID NO: 4821759 - DNA, 25 bp, Homo sapien
tacacttggtgttttcctgcgctgg

SEQ ID NO: 4821760 - DNA, 25 bp, Homo sapien
tccccagtgcatgggcggctaaggc

SEQ ID NO: 4821761 - DNA, 25 bp, Homo sapien
tggcatgacacacaacagactcatt

SEQ ID NO: 4821762 - DNA, 25 bp, Homo sapien
caacatcttgggacgcatctggtca

SEQ ID NO: 4821763 - DNA, 25 bp, Homo sapien
tctgacgtccctcactggcatgaca

SEQ ID NO: 4821764 - DNA, 25 bp, Homo sapien
cccagaaaagggtaggatgcctccg

SEQ ID NO: 4821765 - DNA, 25 bp, Homo sapien
gctggagcatcttcttcggaacctg

SEQ ID NO: 4821766 - DNA, 25 bp, Homo sapien
tggcaagtctcctacaaaacacggg

SEQ ID NO: 4821767 - DNA, 25 bp, Homo sapien
gttgcacagctcaatgtgcccggct

SEQ ID NO: 4821768 - DNA, 25 bp, Homo sapien
gatgcaaattaatccgcgtgcggaa

SEQ ID NO: 4821769 - DNA, 25 bp, Homo sapien
tgcagcttctcctaacaggcaggtg

SEQ ID NO: 4821770 - DNA, 25 bp, Homo sapien
catgggtgcactcttggcatacaca

SEQ ID NO: 4821771 - DNA, 25 bp, Homo sapien
gcctacatttcaagaacgggcaggg

SEQ ID NO: 4821772 - DNA, 25 bp, Homo sapien
gatccgtgatgtcccggttggcaaa

SEQ ID NO: 4821773 - DNA, 25 bp, Homo sapien
cctcggaccagtcggagacgttgga

SEQ ID NO: 4821774 - DNA, 25 bp, Homo sapien
cacgatgtcgtgatgcatgcgctcc

SEQ ID NO: 4821775 - DNA, 25 bp, Homo sapien
cagagggttgtattggttcggcacc

SEQ ID NO: 4821776 - DNA, 25 bp, Homo sapien
tgaggggggccaggccaggcgtggg

SEQ ID NO: 4821777 - DNA, 25 bp, Homo sapien
gccggtgaggggggccaggccaggc

SEQ ID NO: 4821778 - DNA, 25 bp, Homo sapien
cggtgaggggggccaggccaggcgt

SEQ ID NO: 4821779 - DNA, 25 bp, Homo sapien
ggccaggccaggcgtggggaccctc

SEQ ID NO: 4821780 - DNA, 25 bp, Homo sapien
tcgtcatctggacggccatcaagcc

SEQ ID NO: 4821781 - DNA, 25 bp, Homo sapien
gacggccatcaagccaccctggtgg

SEQ ID NO: 4821782 - DNA, 25 bp, Homo sapien
agggagggagctcgtcatctggacg

SEQ ID NO: 4821783 - DNA, 25 bp, Homo sapien
ttcctggagcggttcagaggcaccg

SEQ ID NO: 4821784 - DNA, 25 bp, Homo sapien
ctgtgccctgagcacccaggggaaa

SEQ ID NO: 4821785 - DNA, 25 bp, Homo sapien
tgtgccctgagcacccaggggaaac

SEQ ID NO: 4821786 - DNA, 25 bp, Homo sapien
cccttggatatagtcctgagacttc

SEQ ID NO: 4821787 - DNA, 25 bp, Homo sapien
ggggtggctccccttggatatagtc

SEQ ID NO: 4821788 - DNA, 25 bp, Homo sapien
ttggatatagtcctgagacttcttc

SEQ ID NO: 4821789 - DNA, 25 bp, Homo sapien
ggtggctccccttggatatagtcct

SEQ ID NO: 4821790 - DNA, 25 bp, Homo sapien
gcgtgttctggctcaatctgcacca

SEQ ID NO: 4821791 - DNA, 25 bp, Homo sapien
cgcgtgttctggctcaatctgcacc

SEQ ID NO: 4821792 - DNA, 25 bp, Homo sapien
cccgcagggagctgccgccacgcgt

SEQ ID NO: 4821793 - DNA, 25 bp, Homo sapien
gggagctgccgccacgcgtgttctg

SEQ ID NO: 4821794 - DNA, 25 bp, Homo sapien
cctgcacttggaagggctccataaa

SEQ ID NO: 4821795 - DNA, 25 bp, Homo sapien
gagccgccgtgtcctgacagctgga

SEQ ID NO: 4821796 - DNA, 25 bp, Homo sapien
atgactgccgcccaggagggtaggg

SEQ ID NO: 4821797 - DNA, 25 bp, Homo sapien
caggtgacggtgacacagcagtggc

SEQ ID NO: 4821798 - DNA, 25 bp, Homo sapien
gttctgcatatctttgttagccccg

SEQ ID NO: 4821799 - DNA, 25 bp, Homo sapien
tcttcaggagcacaactgcggcatc

SEQ ID NO: 4821800 - DNA, 25 bp, Homo sapien
tgttagccccgttcttcaggagcac

SEQ ID NO: 4821801 - DNA, 25 bp, Homo sapien
gcatccacattgttcacggcggcgg

SEQ ID NO: 4821802 - DNA, 25 bp, Homo sapien
agagcagccgtgcccccgtgggctc

SEQ ID NO: 4821803 - DNA, 25 bp, Homo sapien
cagagcagccgtgcccccgtgggct

SEQ ID NO: 4821804 - DNA, 25 bp, Homo sapien
agcagccgtgcccccgtgggctcac

SEQ ID NO: 4821805 - DNA, 25 bp, Homo sapien
gacagagcagccgtgcccccgtggg

SEQ ID NO: 4821806 - DNA, 25 bp, Homo sapien
agccaggatcagtggcgtcgtgcca

SEQ ID NO: 4821807 - DNA, 25 bp, Homo sapien
tcatctacggcgttgacgtcggcgt

SEQ ID NO: 4821808 - DNA, 25 bp, Homo sapien
gccatcatgcatgcgggcatccagg

SEQ ID NO: 4821809 - DNA, 25 bp, Homo sapien
tctgtggctcggttccggatcagga

SEQ ID NO: 4821810 - DNA, 25 bp, Homo sapien
tgcccagaacgaacgcctggacggg

SEQ ID NO: 4821811 - DNA, 25 bp, Homo sapien
agacgagaccctcctgagatcggca

SEQ ID NO: 4821812 - DNA, 25 bp, Homo sapien
cactgtcttccggacacagacgaga

SEQ ID NO: 4821813 - DNA, 25 bp, Homo sapien
tgctgggcagacgtacaccgatgcc

SEQ ID NO: 4821814 - DNA, 25 bp, Homo sapien
tggcctgattcctgcaaagcacctg

SEQ ID NO: 4821815 - DNA, 25 bp, Homo sapien
ttggcctgattcctgcaaagcacct

SEQ ID NO: 4821816 - DNA, 25 bp, Homo sapien
gaagacaccttgtgcgtcggcagac

SEQ ID NO: 4821817 - DNA, 25 bp, Homo sapien
gatgttggcatctgcgctggcctcc

SEQ ID NO: 4821818 - DNA, 25 bp, Homo sapien
cccgctgcaggaggcgatcatgagc

SEQ ID NO: 4821819 - DNA, 25 bp, Homo sapien
cccgtgcggtctgtctggttgtgca

SEQ ID NO: 4821820 - DNA, 25 bp, Homo sapien
aggtcagcggcatccaggtgctgct

SEQ ID NO: 4821821 - DNA, 25 bp, Homo sapien
caggcccgcggacattgacgtccat

SEQ ID NO: 4821822 - DNA, 25 bp, Homo sapien
ccatggcagacatgcgcaggtcagc

SEQ ID NO: 4821823 - DNA, 25 bp, Homo sapien
tgtctggtcgtccaggtcaggcaga

SEQ ID NO: 4821824 - DNA, 25 bp, Homo sapien
cattctggttgtcgtccatgagggc

SEQ ID NO: 4821825 - DNA, 25 bp, Homo sapien
gcaccgtctgaagcgttcttcaggg

SEQ ID NO: 4821826 - DNA, 25 bp, Homo sapien
actcattctggttgtcgtccatgag

SEQ ID NO: 4821827 - DNA, 25 bp, Homo sapien
catgagggcaccgtctgaagcgttc

SEQ ID NO: 4821828 - DNA, 25 bp, Homo sapien
cagacactttgaagccctcagggaa

SEQ ID NO: 4821829 - DNA, 25 bp, Homo sapien
cagcccacgaagaacagaagcacaa

SEQ ID NO: 4821830 - DNA, 25 bp, Homo sapien
ttgaggcccacggagtcctcgccga

SEQ ID NO: 4821831 - DNA, 25 bp, Homo sapien
acgtacatgaagtgcagctgcgccg

SEQ ID NO: 4821832 - DNA, 25 bp, Homo sapien
gtcaacttcaaatcgctgcactcgc

SEQ ID NO: 4821833 - DNA, 25 bp, Homo sapien
ggtcattttctacgcgattaatcag

SEQ ID NO: 4821834 - DNA, 25 bp, Homo sapien
tgcaccagccgactctatctggaga

SEQ ID NO: 4821835 - DNA, 25 bp, Homo sapien
gtgcccggacatcaggcagcggcta

SEQ ID NO: 4821836 - DNA, 25 bp, Homo sapien
aggcacccactttcccgtggctgga

SEQ ID NO: 4821837 - DNA, 25 bp, Homo sapien
tggctggactcgttcccaggtggct

SEQ ID NO: 4821838 - DNA, 25 bp, Homo sapien
gcaacgctcacacccgtgggtagca

SEQ ID NO: 4821839 - DNA, 25 bp, Homo sapien
tgggtagcaactggcacaaacagcc

SEQ ID NO: 4821840 - DNA, 25 bp, Homo sapien
tctgcacggcctcgatcttgtaggg

SEQ ID NO: 4821841 - DNA, 25 bp, Homo sapien
tgtcaatctccaggtagacgatgga

SEQ ID NO: 4821842 - DNA, 25 bp, Homo sapien
gcctgcacacactgccggttgtcaa

SEQ ID NO: 4821843 - DNA, 25 bp, Homo sapien
cgtcggtggcactctggaagcactg

SEQ ID NO: 4821844 - DNA, 25 bp, Homo sapien
cccgcccaccggccagggatgctgc

SEQ ID NO: 4821845 - DNA, 25 bp, Homo sapien
tgaagtggtccttgcagtactggtc

SEQ ID NO: 4821846 - DNA, 25 bp, Homo sapien
gtgtgcgtcacgcttgaagaccacg

SEQ ID NO: 4821847 - DNA, 25 bp, Homo sapien
tcgcagtgcccgtcgctgaagtggt

SEQ ID NO: 4821848 - DNA, 25 bp, Homo sapien
tctcgggtacatgctccgcacagtc

SEQ ID NO: 4821849 - DNA, 25 bp, Homo sapien
tacgagcgtcattctcacacgtggc

SEQ ID NO: 4821850 - DNA, 25 bp, Homo sapien
ttgaagttgagggagcagtcaccgc

SEQ ID NO: 4821851 - DNA, 25 bp, Homo sapien
gaagctgtagtccaggatgtggcac

SEQ ID NO: 4821852 - DNA, 25 bp, Homo sapien
cacaagagcccgttgaatttggcgg

SEQ ID NO: 4821853 - DNA, 25 bp, Homo sapien
agggcttgcctttgcagccattgat

SEQ ID NO: 4821854 - DNA, 25 bp, Homo sapien
attgatgacggactcgcagcggcgc

SEQ ID NO: 4821855 - DNA, 25 bp, Homo sapien
gcagccattgatgacggactcgcag

SEQ ID NO: 4821856 - DNA, 25 bp, Homo sapien
cccgcgggcggtgttggaggccacg

SEQ ID NO: 4821857 - DNA, 25 bp, Homo sapien
tggaagtcattgacgcgctgcacgc

SEQ ID NO: 4821858 - DNA, 25 bp, Homo sapien
ggattggacaggcactcgttgacat

SEQ ID NO: 4821859 - DNA, 25 bp, Homo sapien
cagtcgtccacgttgatctcacagt

SEQ ID NO: 4821860 - DNA, 25 bp, Homo sapien
cacgcaggtgccgttgttaaagcac

SEQ ID NO: 4821861 - DNA, 25 bp, Homo sapien
gtgggagaggcactcgtcgatctcc

SEQ ID NO: 4821862 - DNA, 25 bp, Homo sapien
gagaggcactcgtcgatctcctcag

SEQ ID NO: 4821863 - DNA, 25 bp, Homo sapien
agagcagttcaccccgtggtagccg

SEQ ID NO: 4821864 - DNA, 25 bp, Homo sapien
gcactcgtcgatctcctcagagcag

SEQ ID NO: 4821865 - DNA, 25 bp, Homo sapien
accaggtcctcacagtagctgcctg

SEQ ID NO: 4821866 - DNA, 25 bp, Homo sapien
gagtagccgcccaggtagtccgtgc

SEQ ID NO: 4821867 - DNA, 25 bp, Homo sapien
gtagctgcctgtgtagcccgcctgg

SEQ ID NO: 4821868 - DNA, 25 bp, Homo sapien
agtggtgcgtgttgcccgcgtccac

SEQ ID NO: 4821869 - DNA, 25 bp, Homo sapien
gtgggtctgccagcatttgccgccg

SEQ ID NO: 4821870 - DNA, 25 bp, Homo sapien
cagtaaaggccggtccagccgctgg

SEQ ID NO: 4821871 - DNA, 25 bp, Homo sapien
gaggagtcacaccagtgcacaaggt

SEQ ID NO: 4821872 - DNA, 25 bp, Homo sapien
acaggacacgctgggcacgtcgcag

SEQ ID NO: 4821873 - DNA, 25 bp, Homo sapien
gtgagtcgcactcattgacatcgtg

SEQ ID NO: 4821874 - DNA, 25 bp, Homo sapien
ctggcagtagctgcccgtgaagccg

SEQ ID NO: 4821875 - DNA, 25 bp, Homo sapien
caggtgaacgagttgatgccgtcca

SEQ ID NO: 4821876 - DNA, 25 bp, Homo sapien
tgaacgagttgatgccgtccacgca

SEQ ID NO: 4821877 - DNA, 25 bp, Homo sapien
taattacgtcagaaaccagggacga

SEQ ID NO: 4821878 - DNA, 25 bp, Homo sapien
taacacgggaggtaattacgtcaga

SEQ ID NO: 4821879 - DNA, 25 bp, Homo sapien
tacgtcagaaaccagggacgagact

SEQ ID NO: 4821880 - DNA, 25 bp, Homo sapien
cagaaaccagggacgagactgacgt

SEQ ID NO: 4821881 - DNA, 25 bp, Homo sapien
gagttctcgttgtctaatagaagga

SEQ ID NO: 4821882 - DNA, 25 bp, Homo sapien
gaaacaagaacggacagagttctcg

SEQ ID NO: 4821883 - DNA, 25 bp, Homo sapien
tggcaaacacggcaaaaaggaaaca

SEQ ID NO: 4821884 - DNA, 25 bp, Homo sapien
aaggaagcgcaccagttcttcagga

SEQ ID NO: 4821885 - DNA, 25 bp, Homo sapien
tgaacaatgtctggactcaatgcag

SEQ ID NO: 4821886 - DNA, 25 bp, Homo sapien
tcacaatggccctctcaggagggac

SEQ ID NO: 4821887 - DNA, 25 bp, Homo sapien
gggacaggtcggtacaatgaacaat

SEQ ID NO: 4821888 - DNA, 25 bp, Homo sapien
ctcaatgcagccagcgctaagtgcc

SEQ ID NO: 4821889 - DNA, 25 bp, Homo sapien
tctgtgcagtcaggcgtgttgttct

SEQ ID NO: 4821890 - DNA, 25 bp, Homo sapien
ctctgtgcagtcaggcgtgttgttc

SEQ ID NO: 4821891 - DNA, 25 bp, Homo sapien
tctctgtgcagtcaggcgtgttgtt

SEQ ID NO: 4821892 - DNA, 25 bp, Homo sapien
ctctctgtgcagtcaggcgtgttgt

SEQ ID NO: 4821893 - DNA, 25 bp, Homo sapien
ggcaggtgcacgtgtagctgtccac

SEQ ID NO: 4821894 - DNA, 25 bp, Homo sapien
cgggcaggcagtcgcagaaggccgt

SEQ ID NO: 4821895 - DNA, 25 bp, Homo sapien
agaaggccgtgttgatgccgtctgt

SEQ ID NO: 4821896 - DNA, 25 bp, Homo sapien
tgtccacgcagtccgtgcagttggc

SEQ ID NO: 4821897 - DNA, 25 bp, Homo sapien
gaggacggaagggtgagtgtgaggg

SEQ ID NO: 4821898 - DNA, 25 bp, Homo sapien
gagaggacggaagggtgagtgtgag

SEQ ID NO: 4821899 - DNA, 25 bp, Homo sapien
gggagaggacggaagggtgagtgtg

SEQ ID NO: 4821900 - DNA, 25 bp, Homo sapien
ggagaggacggaagggtgagtgtga

SEQ ID NO: 4821901 - DNA, 25 bp, Homo sapien
agggctgggaggcctgagagccctg

SEQ ID NO: 4821902 - DNA, 25 bp, Homo sapien
caacctctgtgaagcagggctggga

SEQ ID NO: 4821903 - DNA, 25 bp, Homo sapien
ggctgggaggcctgagagccctggc

SEQ ID NO: 4821904 - DNA, 25 bp, Homo sapien
ctcaacctctgtgaagcagggctgg

SEQ ID NO: 4821905 - DNA, 25 bp, Homo sapien
ggcagtcgtcgatgtcggtctcgca

SEQ ID NO: 4821906 - DNA, 25 bp, Homo sapien
tcgttgatgtcgacctcacaggtct

SEQ ID NO: 4821907 - DNA, 25 bp, Homo sapien
ggtctcgcagttgcgcccactgtag

SEQ ID NO: 4821908 - DNA, 25 bp, Homo sapien
acgggctcagaacgcactcgttgat

SEQ ID NO: 4821909 - DNA, 25 bp, Homo sapien
atagtcctcggattgcctgcactcc

SEQ ID NO: 4821910 - DNA, 25 bp, Homo sapien
aagctctcatagtcctcggattgcc

SEQ ID NO: 4821911 - DNA, 25 bp, Homo sapien
tcatagtcctcggattgcctgcact

SEQ ID NO: 4821912 - DNA, 25 bp, Homo sapien
tctcatagtcctcggattgcctgca

SEQ ID NO: 4821913 - DNA, 25 bp, Homo sapien
gcaggcaggaactgcgccagagttt

SEQ ID NO: 4821914 - DNA, 25 bp, Homo sapien
gccagagtttccgacaattgtgcga

SEQ ID NO: 4821915 - DNA, 25 bp, Homo sapien
tttttctgcacaagcccatggccga

SEQ ID NO: 4821916 - DNA, 25 bp, Homo sapien
ccatggccgagcttcctgtttatag

SEQ ID NO: 4821917 - DNA, 25 bp, Homo sapien
aacgtcgtcaatacacgtgccctgg

SEQ ID NO: 4821918 - DNA, 25 bp, Homo sapien
cttgtacccggcaacgtcgtcaata

SEQ ID NO: 4821919 - DNA, 25 bp, Homo sapien
cagcaggcagttgcacttgtacccg

SEQ ID NO: 4821920 - DNA, 25 bp, Homo sapien
gttcagacatgggttggacgcacac

SEQ ID NO: 4821921 - DNA, 25 bp, Homo sapien
tgggtcccgatcctgtgtctccagc

SEQ ID NO: 4821922 - DNA, 25 bp, Homo sapien
gcggccctctgcactgagaaacgcg

SEQ ID NO: 4821923 - DNA, 25 bp, Homo sapien
gagggcggccctctgcactgagaaa

SEQ ID NO: 4821924 - DNA, 25 bp, Homo sapien
gccctctgcactgagaaacgcgcag

SEQ ID NO: 4821925 - DNA, 25 bp, Homo sapien
ggtgcacacgtagccactggtcatg

SEQ ID NO: 4821926 - DNA, 25 bp, Homo sapien
cacccagggtcacagtcgcacttgt

SEQ ID NO: 4821927 - DNA, 25 bp, Homo sapien
caggtgccgccgttgacacaagggt

SEQ ID NO: 4821928 - DNA, 25 bp, Homo sapien
gacacaagggttggattcacactca

SEQ ID NO: 4821929 - DNA, 25 bp, Homo sapien
tcgatgttgatgttacacatgctcc

SEQ ID NO: 4821930 - DNA, 25 bp, Homo sapien
gcactcattgacctcagacaggcag

SEQ ID NO: 4821931 - DNA, 25 bp, Homo sapien
tgaagccattgatgccgtcctcgca

SEQ ID NO: 4821932 - DNA, 25 bp, Homo sapien
agcggcaggtgaagccattgatgcc

SEQ ID NO: 4821933 - DNA, 25 bp, Homo sapien
tccaggttgatctcgcagttgggtc

SEQ ID NO: 4821934 - DNA, 25 bp, Homo sapien
tagccatcgatcttgtccagacagg

SEQ ID NO: 4821935 - DNA, 25 bp, Homo sapien
tcacaggcacactcgtagccatcga

SEQ ID NO: 4821936 - DNA, 25 bp, Homo sapien
gtccagacaggtgcccgagtcgcag

SEQ ID NO: 4821937 - DNA, 25 bp, Homo sapien
cgtccttgcaggagccgtagtggca

SEQ ID NO: 4821938 - DNA, 25 bp, Homo sapien
gctggctggagcactcgttgatgtt

SEQ ID NO: 4821939 - DNA, 25 bp, Homo sapien
cagaagcagaggtaggcgttgtcgc

SEQ ID NO: 4821940 - DNA, 25 bp, Homo sapien
tgaaggtggcgacgccgtccttgca

SEQ ID NO: 4821941 - DNA, 25 bp, Homo sapien
cacaggtgtaagtgttgggtccgtc

SEQ ID NO: 4821942 - DNA, 25 bp, Homo sapien
caccattcttgcagggggtgctggc

SEQ ID NO: 4821943 - DNA, 25 bp, Homo sapien
tccacatcgtactggcacagatgcc

SEQ ID NO: 4821944 - DNA, 25 bp, Homo sapien
tgtaagtgttgggtccgtccaggca

SEQ ID NO: 4821945 - DNA, 25 bp, Homo sapien
ggcacactcgtctgtgttgacctcg

SEQ ID NO: 4821946 - DNA, 25 bp, Homo sapien
attgatcttgtccaggcagcggcca

SEQ ID NO: 4821947 - DNA, 25 bp, Homo sapien
ggcagcggccattgtgcaggcaggg

SEQ ID NO: 4821948 - DNA, 25 bp, Homo sapien
tggggcactcgcactggaactcatt

SEQ ID NO: 4821949 - DNA, 25 bp, Homo sapien
gcaacagtgaggggggcacgcgcgg

SEQ ID NO: 4821950 - DNA, 25 bp, Homo sapien
tggggcaacagtgaggggggcacgc

SEQ ID NO: 4821951 - DNA, 25 bp, Homo sapien
gggcaacagtgaggggggcacgcgc

SEQ ID NO: 4821952 - DNA, 25 bp, Homo sapien
ggcaacagtgaggggggcacgcgcg

SEQ ID NO: 4821953 - DNA, 25 bp, Homo sapien
cagcctcgactcggtttcccgccct

SEQ ID NO: 4821954 - DNA, 25 bp, Homo sapien
agcctcgactcggtttcccgccctg

SEQ ID NO: 4821955 - DNA, 25 bp, Homo sapien
gctgcccagcctcgactcggtttcc

SEQ ID NO: 4821956 - DNA, 25 bp, Homo sapien
gcccagcctcgactcggtttcccgc

SEQ ID NO: 4821957 - DNA, 25 bp, Homo sapien
tcgttgacgtcgatctcgcatcggg

SEQ ID NO: 4821958 - DNA, 25 bp, Homo sapien
tgcagacactggcactcgaaggagc

SEQ ID NO: 4821959 - DNA, 25 bp, Homo sapien
gaactccccaatctggtccaggcag

SEQ ID NO: 4821960 - DNA, 25 bp, Homo sapien
gagcccagcgtgttgatgcacttgc

SEQ ID NO: 4821961 - DNA, 25 bp, Homo sapien
cattgacagggttggtgtcgcagtt

SEQ ID NO: 4821962 - DNA, 25 bp, Homo sapien
gtcgcagttggagccctcgttacag

SEQ ID NO: 4821963 - DNA, 25 bp, Homo sapien
agatggccttgccattgacagggtt

SEQ ID NO: 4821964 - DNA, 25 bp, Homo sapien
catgcgtcgttgaggtggcacagca

SEQ ID NO: 4821965 - DNA, 25 bp, Homo sapien
gcagcggcggtcagtgggcacggcc

SEQ ID NO: 4821966 - DNA, 25 bp, Homo sapien
gacactcgcagtagaaggaggccac

SEQ ID NO: 4821967 - DNA, 25 bp, Homo sapien
ggtcccgccgttctggcaggcattt

SEQ ID NO: 4821968 - DNA, 25 bp, Homo sapien
agccgttgacacacacgcagttgta

SEQ ID NO: 4821969 - DNA, 25 bp, Homo sapien
cagttgtagccaccgtgggtgttgt

SEQ ID NO: 4821970 - DNA, 25 bp, Homo sapien
tgcagggaacaggagctgtcggccc

SEQ ID NO: 4821971 - DNA, 25 bp, Homo sapien
ggaacaggagctgtcggccccgggc

SEQ ID NO: 4821972 - DNA, 25 bp, Homo sapien
agggaacaggagctgtcggccccgg

SEQ ID NO: 4821973 - DNA, 25 bp, Homo sapien
gcagctgccactccctgagctccct

SEQ ID NO: 4821974 - DNA, 25 bp, Homo sapien
caggcacccccgttcttgcagttgt

SEQ ID NO: 4821975 - DNA, 25 bp, Homo sapien
tcctcacagttctggccggtgaagc

SEQ ID NO: 4821976 - DNA, 25 bp, Homo sapien
agttgtaggtgttcacgccgtccac

SEQ ID NO: 4821977 - DNA, 25 bp, Homo sapien
gacaatcgtcgatattttcctcaca

SEQ ID NO: 4821978 - DNA, 25 bp, Homo sapien
ccggggacagtctgaagctggggtc

SEQ ID NO: 4821979 - DNA, 25 bp, Homo sapien
gggaggcccccggatggtcatctca

SEQ ID NO: 4821980 - DNA, 25 bp, Homo sapien
gtctggcaggcctgagtcatttggg

SEQ ID NO: 4821981 - DNA, 25 bp, Homo sapien
gggtctggcaggcctgagtcatttg

SEQ ID NO: 4821982 - DNA, 25 bp, Homo sapien
acacggggatcggggagcactgggg

SEQ ID NO: 4821983 - DNA, 25 bp, Homo sapien
aacacggggatcggggagcactggg

SEQ ID NO: 4821984 - DNA, 25 bp, Homo sapien
gacaccacacgcagtctggggaact

SEQ ID NO: 4821985 - DNA, 25 bp, Homo sapien
tgcaccccggccagcgggcagcact

SEQ ID NO: 4821986 - DNA, 25 bp, Homo sapien
acacgggctggcacctggaccctgt

SEQ ID NO: 4821987 - DNA, 25 bp, Homo sapien
aaactccagagacacgggctggcac

SEQ ID NO: 4821988 - DNA, 25 bp, Homo sapien
taggagccgacctcgttgtggcagg

SEQ ID NO: 4821989 - DNA, 25 bp, Homo sapien
actcgttgacatcctgccggcaggt

SEQ ID NO: 4821990 - DNA, 25 bp, Homo sapien
caggcacactcgtgggtgacgtcgc

SEQ ID NO: 4821991 - DNA, 25 bp, Homo sapien
ccgtggcggcaaagcccgggcttct

SEQ ID NO: 4821992 - DNA, 25 bp, Homo sapien
actccgtcagcgtgagcaggtcgca

SEQ ID NO: 4821993 - DNA, 25 bp, Homo sapien
cacagctgcaggcatagtctgccac

SEQ ID NO: 4821994 - DNA, 25 bp, Homo sapien
gcgggcagcggcacttgtactccgt

SEQ ID NO: 4821995 - DNA, 25 bp, Homo sapien
tctgcggtccaccacgtggcatgtc

SEQ ID NO: 4821996 - DNA, 25 bp, Homo sapien
tcctggccttgcgctccgggaaaag

SEQ ID NO: 4821997 - DNA, 25 bp, Homo sapien
cctggccttgcgctccgggaaaagg

SEQ ID NO: 4821998 - DNA, 25 bp, Homo sapien
ctggccttgcgctccgggaaaaggt

SEQ ID NO: 4821999 - DNA, 25 bp, Homo sapien
tttcccagccgctgaagtcggcagg

SEQ ID NO: 4822000 - DNA, 25 bp, Homo sapien
cacagctcccgcttggagaaaaggc

SEQ ID NO: 4822001 - DNA, 25 bp, Homo sapien
ccctcgaggctccaaggagcgggaa

SEQ ID NO: 4822002 - DNA, 25 bp, Homo sapien
acagagggcgctcggtcatcaaagc

SEQ ID NO: 4822003 - DNA, 25 bp, Homo sapien
agagctggagcaccctacagacggc

SEQ ID NO: 4822004 - DNA, 25 bp, Homo sapien
ggagcaccctacagacggcgaacac

SEQ ID NO: 4822005 - DNA, 25 bp, Homo sapien
agctggagcaccctacagacggcga

SEQ ID NO: 4822006 - DNA, 25 bp, Homo sapien
gctggagcaccctacagacggcgaa

SEQ ID NO: 4822007 - DNA, 25 bp, Homo sapien
tcccggcccactgtcctgccacaga

SEQ ID NO: 4822008 - DNA, 25 bp, Homo sapien
tccttgggcctcactgccaatcccg

SEQ ID NO: 4822009 - DNA, 25 bp, Homo sapien
tggcagcagtgtggtccctcacagg

SEQ ID NO: 4822010 - DNA, 25 bp, Homo sapien
ctcactgccaatcccggcccactgt

SEQ ID NO: 4822011 - DNA, 25 bp, Homo sapien
ctcacccgacatgggaacggctgtc

SEQ ID NO: 4822012 - DNA, 25 bp, Homo sapien
tgaccgacagaaggcccgtggagat

SEQ ID NO: 4822013 - DNA, 25 bp, Homo sapien
tgtctgcatctgaccgacagaaggc

SEQ ID NO: 4822014 - DNA, 25 bp, Homo sapien
cgcagccgggaaaacaatgccctca

SEQ ID NO: 4822015 - DNA, 25 bp, Homo sapien
aagtctggagcagacaaagcattct

SEQ ID NO: 4822016 - DNA, 25 bp, Homo sapien
tgatctcccaggaccgggaagtctg

SEQ ID NO: 4822017 - DNA, 25 bp, Homo sapien
tcttacagctccaccgaaacacaaa

SEQ ID NO: 4822018 - DNA, 25 bp, Homo sapien
ccagacggtctggatgttttgcctg

SEQ ID NO: 4822019 - DNA, 25 bp, Homo sapien
gccatgactccgtagccaactcaaa

SEQ ID NO: 4822020 - DNA, 25 bp, Homo sapien
tccgtagccaactcaaaagaaggcg

SEQ ID NO: 4822021 - DNA, 25 bp, Homo sapien
aaggcgcaacaattcgcggcagtcg

SEQ ID NO: 4822022 - DNA, 25 bp, Homo sapien
caactcaaaagaaggcgcaacaatt

SEQ ID NO: 4822023 - DNA, 25 bp, Homo sapien
caggcccgtccaccagagagctgca

SEQ ID NO: 4822024 - DNA, 25 bp, Homo sapien
aggcccgtccaccagagagctgcag

SEQ ID NO: 4822025 - DNA, 25 bp, Homo sapien
tggaggcccaggacaggacctcgcc

SEQ ID NO: 4822026 - DNA, 25 bp, Homo sapien
aggacaggacctcgccacggcctga

SEQ ID NO: 4822027 - DNA, 25 bp, Homo sapien
ggcccaggacaggacctcgccacgg

SEQ ID NO: 4822028 - DNA, 25 bp, Homo sapien
ccaggacaggacctcgccacggcct

SEQ ID NO: 4822029 - DNA, 25 bp, Homo sapien
aatgaagccagtcccggctcctgtg

SEQ ID NO: 4822030 - DNA, 25 bp, Homo sapien
ggaatgaggaatgaagccagtcccg

SEQ ID NO: 4822031 - DNA, 25 bp, Homo sapien
tgtggggtctccagtttgccgcccg

SEQ ID NO: 4822032 - DNA, 25 bp, Homo sapien
gtttgccgcccgcatctgggggtcc

SEQ ID NO: 4822033 - DNA, 25 bp, Homo sapien
ccagagaccaaccatcctccgccca

SEQ ID NO: 4822034 - DNA, 25 bp, Homo sapien
agagaccaaccatcctccgcccacc

SEQ ID NO: 4822035 - DNA, 25 bp, Homo sapien
tgcccagagaccaaccatcctccgc

SEQ ID NO: 4822036 - DNA, 25 bp, Homo sapien
agaccaaccatcctccgcccaccag

SEQ ID NO: 4822037 - DNA, 25 bp, Homo sapien
tgaccaggccacggcgacactctga

SEQ ID NO: 4822038 - DNA, 25 bp, Homo sapien
ggaaggcattttgcaccaacaaaac

SEQ ID NO: 4822039 - DNA, 25 bp, Homo sapien
gcagcttccggtgaaggttccttct

SEQ ID NO: 4822040 - DNA, 25 bp, Homo sapien
cctgcaaccacctgattggcagctt

SEQ ID NO: 4822041 - DNA, 25 bp, Homo sapien
acaagccgggctcggctgtggccct

SEQ ID NO: 4822042 - DNA, 25 bp, Homo sapien
aagcaggagcctgaggacgcgcttc

SEQ ID NO: 4822043 - DNA, 25 bp, Homo sapien
tggcctccaactctgcggcccagaa

SEQ ID NO: 4822044 - DNA, 25 bp, Homo sapien
ctgtgcctccacaagccgggctcgg

SEQ ID NO: 4822045 - DNA, 25 bp, Homo sapien
cttctcgttggacttgtggggtgtg

SEQ ID NO: 4822046 - DNA, 25 bp, Homo sapien
ggggtgtgcacaatggggtctctgt

SEQ ID NO: 4822047 - DNA, 25 bp, Homo sapien
ctcgttggacttgtggggtgtgcac

SEQ ID NO: 4822048 - DNA, 25 bp, Homo sapien
gggtgtgcacaatggggtctctgtg

SEQ ID NO: 4822049 - DNA, 25 bp, Homo sapien
catgacaccagtgttttgcggccct

SEQ ID NO: 4822050 - DNA, 25 bp, Homo sapien
caccagtgttttgcggccctgtggc

SEQ ID NO: 4822051 - DNA, 25 bp, Homo sapien
aagtgggcccatgacaccagtgttt

SEQ ID NO: 4822052 - DNA, 25 bp, Homo sapien
ggcccatgacaccagtgttttgcgg

SEQ ID NO: 4822053 - DNA, 25 bp, Homo sapien
tggccgcttcacacttcccgccatt

SEQ ID NO: 4822054 - DNA, 25 bp, Homo sapien
cctccgtgccattggccgcttcaca

SEQ ID NO: 4822055 - DNA, 25 bp, Homo sapien
aggcctccgtgccattggccgcttc

SEQ ID NO: 4822056 - DNA, 25 bp, Homo sapien
tgccattggccgcttcacacttccc

SEQ ID NO: 4822057 - DNA, 25 bp, Homo sapien
gcgccaggcagagcaggggcgccag

SEQ ID NO: 4822058 - DNA, 25 bp, Homo sapien
ctcgtgcggcgagcgcgggcagcag

SEQ ID NO: 4822059 - DNA, 25 bp, Homo sapien
gagcaggggcgccaggagcggcggc

SEQ ID NO: 4822060 - DNA, 25 bp, Homo sapien
gcaggggcgccaggagcggcggcat

SEQ ID NO: 4822061 - DNA, 25 bp, Homo sapien
aggcctggtgctgatcgggtgcggg

SEQ ID NO: 4822062 - DNA, 25 bp, Homo sapien
cccaggccagaagtaatggcccatg

SEQ ID NO: 4822063 - DNA, 25 bp, Homo sapien
gcctccattggcatctctgcctgtg

SEQ ID NO: 4822064 - DNA, 25 bp, Homo sapien
tgcgggtgcgactgcctgtgtgcct

SEQ ID NO: 4822065 - DNA, 25 bp, Homo sapien
ctggactcggtgcagggaccatggc

SEQ ID NO: 4822066 - DNA, 25 bp, Homo sapien
ggaccatggcttggcgtggccaggt

SEQ ID NO: 4822067 - DNA, 25 bp, Homo sapien
catggcttggcgtggccaggttgga

SEQ ID NO: 4822068 - DNA, 25 bp, Homo sapien
tctgttcaccgcccaaggcagcagg

SEQ ID NO: 4822069 - DNA, 25 bp, Homo sapien
cagagaacggcccttgttctgagga

SEQ ID NO: 4822070 - DNA, 25 bp, Homo sapien
ttgctctaggatggattcgggccgg

SEQ ID NO: 4822071 - DNA, 25 bp, Homo sapien
gggccggcccttgttctgagaacag

SEQ ID NO: 4822072 - DNA, 25 bp, Homo sapien
ctaggatggattcgggccggccctt

SEQ ID NO: 4822073 - DNA, 25 bp, Homo sapien
gctgaaggaatgtgggcgcagaccc

SEQ ID NO: 4822074 - DNA, 25 bp, Homo sapien
gtgcaaagtcaactggctgtccatg

SEQ ID NO: 4822075 - DNA, 25 bp, Homo sapien
tttcttggtgcaaagtcaactggct

SEQ ID NO: 4822076 - DNA, 25 bp, Homo sapien
ctgtccatgcaagcctgctgctgtg

SEQ ID NO: 4822077 - DNA, 25 bp, Homo sapien
ccctggttggcgtgccgtttgaggg

SEQ ID NO: 4822078 - DNA, 25 bp, Homo sapien
ctggggttgggtcacttgggagcca

SEQ ID NO: 4822079 - DNA, 25 bp, Homo sapien
gcagcccacagagcgtgggtggagc

SEQ ID NO: 4822080 - DNA, 25 bp, Homo sapien
acagaggcggcttagcaccagggct

SEQ ID NO: 4822081 - DNA, 25 bp, Homo sapien
agggaggctgtcacgatgcctggct

SEQ ID NO: 4822082 - DNA, 25 bp, Homo sapien
cagggaggctgtcacgatgcctggc

SEQ ID NO: 4822083 - DNA, 25 bp, Homo sapien
ttgagaagatccaaacagcagcagg

SEQ ID NO: 4822084 - DNA, 25 bp, Homo sapien
ccgacttaggttttgagaagatcca

SEQ ID NO: 4822085 - DNA, 25 bp, Homo sapien
acactgggcacagatgaccgactta

SEQ ID NO: 4822086 - DNA, 25 bp, Homo sapien
cagatgaccgacttaggttttgaga

SEQ ID NO: 4822087 - DNA, 25 bp, Homo sapien
tatgtcctcaagaggctccctggag

SEQ ID NO: 4822088 - DNA, 25 bp, Homo sapien
catagaaaggtcctagcagggctgt

SEQ ID NO: 4822089 - DNA, 25 bp, Homo sapien
cccaggaggatagcaacaggactta

SEQ ID NO: 4822090 - DNA, 25 bp, Homo sapien
gagtccactgtgagaagtccagccc

SEQ ID NO: 4822091 - DNA, 25 bp, Homo sapien
tgggacccgtcagctgcaagaaggc

SEQ ID NO: 4822092 - DNA, 25 bp, Homo sapien
ggaacctctgctgggacccgtcagc

SEQ ID NO: 4822093 - DNA, 25 bp, Homo sapien
ctcccgtggaatggctcctcccgag

SEQ ID NO: 4822094 - DNA, 25 bp, Homo sapien
ggctcctcccgagcagggaacctct

SEQ ID NO: 4822095 - DNA, 25 bp, Homo sapien
ccgtggtcagatcaccgtggccggg

SEQ ID NO: 4822096 - DNA, 25 bp, Homo sapien
cactgagtctcttgagaacagcctt

SEQ ID NO: 4822097 - DNA, 25 bp, Homo sapien
gatgctctgtgctccaaaagtcact

SEQ ID NO: 4822098 - DNA, 25 bp, Homo sapien
tgctggacggtagccttgttttctc

SEQ ID NO: 4822099 - DNA, 25 bp, Homo sapien
cgacagggcctggaccatgccctcc

SEQ ID NO: 4822100 - DNA, 25 bp, Homo sapien
acagggcctggaccatgccctccat

SEQ ID NO: 4822101 - DNA, 25 bp, Homo sapien
gacagggcctggaccatgccctcca

SEQ ID NO: 4822102 - DNA, 25 bp, Homo sapien
ccgacagggcctggaccatgccctc

SEQ ID NO: 4822103 - DNA, 25 bp, Homo sapien
gggtaacagcaaacgactgggcagc

SEQ ID NO: 4822104 - DNA, 25 bp, Homo sapien
tcttttgtctgactcgtcatcacaa

SEQ ID NO: 4822105 - DNA, 25 bp, Homo sapien
acagcaaacgactgggcagccgagg

SEQ ID NO: 4822106 - DNA, 25 bp, Homo sapien
ggctctcacggcagcaaggggtaac

SEQ ID NO: 4822107 - DNA, 25 bp, Homo sapien
gtgcgaggatgatctacagccccag

SEQ ID NO: 4822108 - DNA, 25 bp, Homo sapien
gacttgagtgcgaggatgatctaca

SEQ ID NO: 4822109 - DNA, 25 bp, Homo sapien
tctcccggcaaacaatctgtccttt

SEQ ID NO: 4822110 - DNA, 25 bp, Homo sapien
gctgggctttgtacatctcccggca

SEQ ID NO: 4822111 - DNA, 25 bp, Homo sapien
atggccttcggcctgtcggtcagga

SEQ ID NO: 4822112 - DNA, 25 bp, Homo sapien
gagtgaaggtctgcacgatggaccc

SEQ ID NO: 4822113 - DNA, 25 bp, Homo sapien
tcacgtccttagtggatttcctccc

SEQ ID NO: 4822114 - DNA, 25 bp, Homo sapien
taggagcccgcagggacttctgagc

SEQ ID NO: 4822115 - DNA, 25 bp, Homo sapien
caacgtggaacttagagacagtccc

SEQ ID NO: 4822116 - DNA, 25 bp, Homo sapien
cctcggtcttttctttgctcgtcga

SEQ ID NO: 4822117 - DNA, 25 bp, Homo sapien
tttgctcgtcgaatattctgctgtg

SEQ ID NO: 4822118 - DNA, 25 bp, Homo sapien
ttatcacagcccgaaaacctccttc

SEQ ID NO: 4822119 - DNA, 25 bp, Homo sapien
cctctctcgtaaggctgggcctgag

SEQ ID NO: 4822120 - DNA, 25 bp, Homo sapien
tgttgtctggttttaccctctctcg

SEQ ID NO: 4822121 - DNA, 25 bp, Homo sapien
tcagcaccggagtttattgggcacc

SEQ ID NO: 4822122 - DNA, 25 bp, Homo sapien
gaggacctgccgttgttgtctggtt

SEQ ID NO: 4822123 - DNA, 25 bp, Homo sapien
gggcaaggcgcggagaggcagtgga

SEQ ID NO: 4822124 - DNA, 25 bp, Homo sapien
tggcgagaagggcaaggcgcggaga

SEQ ID NO: 4822125 - DNA, 25 bp, Homo sapien
caaggcgcggagaggcagtggactg

SEQ ID NO: 4822126 - DNA, 25 bp, Homo sapien
aggccgcaccaccagcggggcgggg

SEQ ID NO: 4822127 - DNA, 25 bp, Homo sapien
tccaaggccgcgtgtctgcaggttg

SEQ ID NO: 4822128 - DNA, 25 bp, Homo sapien
ccagccccacttgaatccaaggccg

SEQ ID NO: 4822129 - DNA, 25 bp, Homo sapien
gggggtatcagggagcaagtccagc

SEQ ID NO: 4822130 - DNA, 25 bp, Homo sapien
acttgaatccaaggccgcgtgtctg

SEQ ID NO: 4822131 - DNA, 25 bp, Homo sapien
ctgaaatccccacaaacacggccgg

SEQ ID NO: 4822132 - DNA, 25 bp, Homo sapien
caaacacccagacagcacctcctgc

SEQ ID NO: 4822133 - DNA, 25 bp, Homo sapien
ctcccggataccaaacacccagaca

SEQ ID NO: 4822134 - DNA, 25 bp, Homo sapien
agcacctcctgctgaaatccccaca

SEQ ID NO: 4822135 - DNA, 25 bp, Homo sapien
gaagcccagccgggaagctctgttg

SEQ ID NO: 4822136 - DNA, 25 bp, Homo sapien
cacccagcaacgttcaggggcctgg

SEQ ID NO: 4822137 - DNA, 25 bp, Homo sapien
gcccagccgggaagctctgttgggg

SEQ ID NO: 4822138 - DNA, 25 bp, Homo sapien
acccagcaacgttcaggggcctggc

SEQ ID NO: 4822139 - DNA, 25 bp, Homo sapien
ctgcctttagctccgattcagggct

SEQ ID NO: 4822140 - DNA, 25 bp, Homo sapien
tgcctttagctccgattcagggctc

SEQ ID NO: 4822141 - DNA, 25 bp, Homo sapien
cctctgtatccagtgccctgtgggc

SEQ ID NO: 4822142 - DNA, 25 bp, Homo sapien
gggaaggttgccacccgtgtcacag

SEQ ID NO: 4822143 - DNA, 25 bp, Homo sapien
tgcaccgtggaagcctgaaacgggt

SEQ ID NO: 4822144 - DNA, 25 bp, Homo sapien
ttgagtctctcctggtaggcaccat

SEQ ID NO: 4822145 - DNA, 25 bp, Homo sapien
ggccactgggggctggatgcaaccc

SEQ ID NO: 4822146 - DNA, 25 bp, Homo sapien
ttgaggccactgggggctggatgca

SEQ ID NO: 4822147 - DNA, 25 bp, Homo sapien
gaggccactgggggctggatgcaac

SEQ ID NO: 4822148 - DNA, 25 bp, Homo sapien
aggccactgggggctggatgcaacc

SEQ ID NO: 4822149 - DNA, 25 bp, Homo sapien
cagacaaacagaccagaaccctggg

SEQ ID NO: 4822150 - DNA, 25 bp, Homo sapien
agcgaggtgccccagacaaacagac

SEQ ID NO: 4822151 - DNA, 25 bp, Homo sapien
tcacgtaagccaccagaggggacag

SEQ ID NO: 4822152 - DNA, 25 bp, Homo sapien
gatggatggggtcacgtaagccacc

SEQ ID NO: 4822153 - DNA, 25 bp, Homo sapien
caggcggggctgcaggaactgagcc

SEQ ID NO: 4822154 - DNA, 25 bp, Homo sapien
gcagggggcaggctcttccaggcgg

SEQ ID NO: 4822155 - DNA, 25 bp, Homo sapien
caggctcttccaggcggggctgcag

SEQ ID NO: 4822156 - DNA, 25 bp, Homo sapien
ctcttccaggcggggctgcaggaac

SEQ ID NO: 4822157 - DNA, 25 bp, Homo sapien
gtcacacccacaaagccggcgtggg

SEQ ID NO: 4822158 - DNA, 25 bp, Homo sapien
caaagtgggctaggaaaaggacagg

SEQ ID NO: 4822159 - DNA, 25 bp, Homo sapien
gttcccggggagaatgacattcagg

SEQ ID NO: 4822160 - DNA, 25 bp, Homo sapien
gtgcacgtgtgagaacgtgtgcgtg

SEQ ID NO: 4822161 - DNA, 25 bp, Homo sapien
catctggttggcgtttccagcaaag

SEQ ID NO: 4822162 - DNA, 25 bp, Homo sapien
gtgagaaccagcactagccggatgg

SEQ ID NO: 4822163 - DNA, 25 bp, Homo sapien
ccggatggttgcgttcccagtgcag

SEQ ID NO: 4822164 - DNA, 25 bp, Homo sapien
cagctgcggacagtgtgggagtctc

SEQ ID NO: 4822165 - DNA, 25 bp, Homo sapien
cccccaggagcgcaccacaggctag

SEQ ID NO: 4822166 - DNA, 25 bp, Homo sapien
gcttgcagaggccgggccgatgaga

SEQ ID NO: 4822167 - DNA, 25 bp, Homo sapien
cgggccgatgagagtctgcccccag

SEQ ID NO: 4822168 - DNA, 25 bp, Homo sapien
gtctgttcctagaggccctgctgtg

SEQ ID NO: 4822169 - DNA, 25 bp, Homo sapien
caaaaacagaagaaattcggacgca

SEQ ID NO: 4822170 - DNA, 25 bp, Homo sapien
ttcggacgcaggcttcagtacggac

SEQ ID NO: 4822171 - DNA, 25 bp, Homo sapien
tgtgtacgccacagtccgtgtgtga

SEQ ID NO: 4822172 - DNA, 25 bp, Homo sapien
ggtttaaagttgtgatgtgtacgcc

SEQ ID NO: 4822173 - DNA, 25 bp, Homo sapien
ctttagggtgatccgcttccacgtg

SEQ ID NO: 4822174 - DNA, 25 bp, Homo sapien
atgaaaaagaccaggatgaagacct

SEQ ID NO: 4822175 - DNA, 25 bp, Homo sapien
tccttaggattttccgaatggcatt

SEQ ID NO: 4822176 - DNA, 25 bp, Homo sapien
cacgtggagacgaggaaatgcatcc

SEQ ID NO: 4822177 - DNA, 25 bp, Homo sapien
gggtcccagatgctgcccggagcct

SEQ ID NO: 4822178 - DNA, 25 bp, Homo sapien
acccgaaggtcgagcagggacccag

SEQ ID NO: 4822179 - DNA, 25 bp, Homo sapien
ctgcccggagcctggaactgcgagt

SEQ ID NO: 4822180 - DNA, 25 bp, Homo sapien
ggctgtgctgctcttatacgggaca

SEQ ID NO: 4822181 - DNA, 25 bp, Homo sapien
taccttgacaacctttacctgtctc

SEQ ID NO: 4822182 - DNA, 25 bp, Homo sapien
gattctcctggaagcccgagatcca

SEQ ID NO: 4822183 - DNA, 25 bp, Homo sapien
gtggcttcaactgcaggaactgatt

SEQ ID NO: 4822184 - DNA, 25 bp, Homo sapien
tctccaaacacagtagcacactggg

SEQ ID NO: 4822185 - DNA, 25 bp, Homo sapien
acacatacgactgttcctggggctg

SEQ ID NO: 4822186 - DNA, 25 bp, Homo sapien
tggctgctgacaactccatgtccag

SEQ ID NO: 4822187 - DNA, 25 bp, Homo sapien
tgtggctgctgacaactccatgtcc

SEQ ID NO: 4822188 - DNA, 25 bp, Homo sapien
tcacacatacgactgttcctggggc

SEQ ID NO: 4822189 - DNA, 25 bp, Homo sapien
gaaatacaagtttcgaggccaccat

SEQ ID NO: 4822190 - DNA, 25 bp, Homo sapien
acaaagacaattcctggcccagatg

SEQ ID NO: 4822191 - DNA, 25 bp, Homo sapien
ggatctggcagaagaagtttcatca

SEQ ID NO: 4822192 - DNA, 25 bp, Homo sapien
caaaatggccctagatctagtaaag

SEQ ID NO: 4822193 - DNA, 25 bp, Homo sapien
tgccttgaaatcagcggccactggc

SEQ ID NO: 4822194 - DNA, 25 bp, Homo sapien
tggcagctgcggtgacctggaccca

SEQ ID NO: 4822195 - DNA, 25 bp, Homo sapien
tggagctgcacaacgttcatggaaa

SEQ ID NO: 4822196 - DNA, 25 bp, Homo sapien
ggccgctgggcactttgccttgaaa

SEQ ID NO: 4822197 - DNA, 25 bp, Homo sapien
catcgagctgtggttctacttaact

SEQ ID NO: 4822198 - DNA, 25 bp, Homo sapien
ctacttaacttctgaacagagggaa

SEQ ID NO: 4822199 - DNA, 25 bp, Homo sapien
aaaacgactgcttcaatgcccacct

SEQ ID NO: 4822200 - DNA, 25 bp, Homo sapien
catctgtgtcaactttgggatggtt

SEQ ID NO: 4822201 - DNA, 25 bp, Homo sapien
tcatgcaatccggcgactctgctgc

SEQ ID NO: 4822202 - DNA, 25 bp, Homo sapien
atgcaatccggcgactctgctgcag

SEQ ID NO: 4822203 - DNA, 25 bp, Homo sapien
cagatgctgggactcgtgggccccc

SEQ ID NO: 4822204 - DNA, 25 bp, Homo sapien
gatgctgggactcgtgggcccccac

SEQ ID NO: 4822205 - DNA, 25 bp, Homo sapien
cgtcgcgggagccagtgtctgtaaa

SEQ ID NO: 4822206 - DNA, 25 bp, Homo sapien
ccaccgtcgcgggagccagtgtctg

SEQ ID NO: 4822207 - DNA, 25 bp, Homo sapien
cgcgggagccagtgtctgtaaactc

SEQ ID NO: 4822208 - DNA, 25 bp, Homo sapien
cataaactctgccgtcgcgggggcc

SEQ ID NO: 4822209 - DNA, 25 bp, Homo sapien
gccggtgtccgtaaactccacagtg

SEQ ID NO: 4822210 - DNA, 25 bp, Homo sapien
agaagtggcctggttggttccccat

SEQ ID NO: 4822211 - DNA, 25 bp, Homo sapien
taaactccacagtgcactcacagtg

SEQ ID NO: 4822212 - DNA, 25 bp, Homo sapien
cagcaggtgataattttctggagaa

SEQ ID NO: 4822213 - DNA, 25 bp, Homo sapien
atgtacaattcagtccgggctcggt

SEQ ID NO: 4822214 - DNA, 25 bp, Homo sapien
tgtacaattcagtccgggctcggtg

SEQ ID NO: 4822215 - DNA, 25 bp, Homo sapien
tccagacagaagtaacttctaaaac

SEQ ID NO: 4822216 - DNA, 25 bp, Homo sapien
tttttccagacagaagtaacttcta

SEQ ID NO: 4822217 - DNA, 25 bp, Homo sapien
gacagaagtaacttctaaaacattg

SEQ ID NO: 4822218 - DNA, 25 bp, Homo sapien
cagacagaagtaacttctaaaacat

SEQ ID NO: 4822219 - DNA, 25 bp, Homo sapien
tagggaaacgctctgacatcttccg

SEQ ID NO: 4822220 - DNA, 25 bp, Homo sapien
agttcaagttcagccgcaggctctt

SEQ ID NO: 4822221 - DNA, 25 bp, Homo sapien
catcttccgtagaggtgaaaaagca

SEQ ID NO: 4822222 - DNA, 25 bp, Homo sapien
tcttccccaaggtgctggtcttcgc

SEQ ID NO: 4822223 - DNA, 25 bp, Homo sapien
tgcaaagagcagcacggcgcgcaca

SEQ ID NO: 4822224 - DNA, 25 bp, Homo sapien
ctgcaaagagcagcacggcgcgcac

SEQ ID NO: 4822225 - DNA, 25 bp, Homo sapien
aagggaacagtaagtgtgtcctgga

SEQ ID NO: 4822226 - DNA, 25 bp, Homo sapien
agtgtgtcctggaggcgctcgccat

SEQ ID NO: 4822227 - DNA, 25 bp, Homo sapien
gtcctggaggcgctcgccatgcact

SEQ ID NO: 4822228 - DNA, 25 bp, Homo sapien
cagtaagtgtgtcctggaggcgctc

SEQ ID NO: 4822229 - DNA, 25 bp, Homo sapien
tctctgcgtctggagaacacaggac

SEQ ID NO: 4822230 - DNA, 25 bp, Homo sapien
agtgacctccccctcggttgatgag

SEQ ID NO: 4822231 - DNA, 25 bp, Homo sapien
acgccatctgtggattcggaagtga

SEQ ID NO: 4822232 - DNA, 25 bp, Homo sapien
caggacgtccacaggaaagttctcc

SEQ ID NO: 4822233 - DNA, 25 bp, Homo sapien
aaattatgaagtaagttgaatgctc

SEQ ID NO: 4822234 - DNA, 25 bp, Homo sapien
gaagtaagttgaatgctctgagggc

SEQ ID NO: 4822235 - DNA, 25 bp, Homo sapien
ttgaatgctctgagggcttaattcc

SEQ ID NO: 4822236 - DNA, 25 bp, Homo sapien
ctgaaaattatgaagtaagttgaat

SEQ ID NO: 4822237 - DNA, 25 bp, Homo sapien
ctgcttcctgaacgctccggccacc

SEQ ID NO: 4822238 - DNA, 25 bp, Homo sapien
ttcctgaacgctccggccacccagg

SEQ ID NO: 4822239 - DNA, 25 bp, Homo sapien
gcttcctgaacgctccggccaccca

SEQ ID NO: 4822240 - DNA, 25 bp, Homo sapien
tcctgaacgctccggccacccaggc

SEQ ID NO: 4822241 - DNA, 25 bp, Homo sapien
ggccaggatggtggccagtggcagc

SEQ ID NO: 4822242 - DNA, 25 bp, Homo sapien
ccaggatggtggccagtggcagcag

SEQ ID NO: 4822243 - DNA, 25 bp, Homo sapien
tgggccaggatggtggccagtggca

SEQ ID NO: 4822244 - DNA, 25 bp, Homo sapien
gtggcagcagcaaggatataggcat

SEQ ID NO: 4822245 - DNA, 25 bp, Homo sapien
cgggatcccagaagctggacactgg

SEQ ID NO: 4822246 - DNA, 25 bp, Homo sapien
gagcgggatcccagaagctggacac

SEQ ID NO: 4822247 - DNA, 25 bp, Homo sapien
gcgggatcccagaagctggacactg

SEQ ID NO: 4822248 - DNA, 25 bp, Homo sapien
gatcccagaagctggacactgggac

SEQ ID NO: 4822249 - DNA, 25 bp, Homo sapien
tgaggaccccgaagggacacgcgag

SEQ ID NO: 4822250 - DNA, 25 bp, Homo sapien
ctgaggaccccgaagggacacgcga

SEQ ID NO: 4822251 - DNA, 25 bp, Homo sapien
tccaagtcacctcttccaggtccgg

SEQ ID NO: 4822252 - DNA, 25 bp, Homo sapien
caagtcacctcttccaggtccgggt

SEQ ID NO: 4822253 - DNA, 25 bp, Homo sapien
tgctccaagtcacctcttccaggtc

SEQ ID NO: 4822254 - DNA, 25 bp, Homo sapien
ctgctccaagtcacctcttccaggt

SEQ ID NO: 4822255 - DNA, 25 bp, Homo sapien
tctgcccgcaggcacccctgcctgg

SEQ ID NO: 4822256 - DNA, 25 bp, Homo sapien
gttccaccacatccgtggctgacag

SEQ ID NO: 4822257 - DNA, 25 bp, Homo sapien
cgtcgggtccgggacgtcctctgat

SEQ ID NO: 4822258 - DNA, 25 bp, Homo sapien
caaaccctcgctcgggagcagacgg

SEQ ID NO: 4822259 - DNA, 25 bp, Homo sapien
ccaggctatgggatagggcaaagct

SEQ ID NO: 4822260 - DNA, 25 bp, Homo sapien
cccaagagagtggagtgcccctcct

SEQ ID NO: 4822261 - DNA, 25 bp, Homo sapien
aagagagtggagtgcccctcctgtg

SEQ ID NO: 4822262 - DNA, 25 bp, Homo sapien
ggtggctccaggctatgggataggg

SEQ ID NO: 4822263 - DNA, 25 bp, Homo sapien
ctgtggcccagggtgcgtgagtctg

SEQ ID NO: 4822264 - DNA, 25 bp, Homo sapien
cctggatagggaacacgggtgggtg

SEQ ID NO: 4822265 - DNA, 25 bp, Homo sapien
ctgggaagacacagcgtcgcctcca

SEQ ID NO: 4822266 - DNA, 25 bp, Homo sapien
aaaaaacagcaacggagtacagtgc

SEQ ID NO: 4822267 - DNA, 25 bp, Homo sapien
gcagagggctcggacagtgtgcgtc

SEQ ID NO: 4822268 - DNA, 25 bp, Homo sapien
gcggctgagcagagggctcggacag

SEQ ID NO: 4822269 - DNA, 25 bp, Homo sapien
ggcggctgagcagagggctcggaca

SEQ ID NO: 4822270 - DNA, 25 bp, Homo sapien
gggctcggacagtgtgcgtctggcc

SEQ ID NO: 4822271 - DNA, 25 bp, Homo sapien
ccacagccgcaagcctcatctttat

SEQ ID NO: 4822272 - DNA, 25 bp, Homo sapien
aggccagtgacagaaggggcttcct

SEQ ID NO: 4822273 - DNA, 25 bp, Homo sapien
ccttgtggctcagcccaccagcggg

SEQ ID NO: 4822274 - DNA, 25 bp, Homo sapien
gagccggacagagtggtatttggaa

SEQ ID NO: 4822275 - DNA, 25 bp, Homo sapien
tccgccgcagtgaggccgctggtgg

SEQ ID NO: 4822276 - DNA, 25 bp, Homo sapien
tgtccacgagcgcagggacgtccgc

SEQ ID NO: 4822277 - DNA, 25 bp, Homo sapien
ggaaggtggtcctcatggcccggtg

SEQ ID NO: 4822278 - DNA, 25 bp, Homo sapien
gcaggtgtccacgagcgcagggacg

SEQ ID NO: 4822279 - DNA, 25 bp, Homo sapien
ggaagagtacaccacggggacgatg

SEQ ID NO: 4822280 - DNA, 25 bp, Homo sapien
ttcttcttggtgttgtagaaggagg

SEQ ID NO: 4822281 - DNA, 25 bp, Homo sapien
tcttcttggtgttgtagaaggagga

SEQ ID NO: 4822282 - DNA, 25 bp, Homo sapien
gagaaggaagagtacaccacgggga

SEQ ID NO: 4822283 - DNA, 25 bp, Homo sapien
tgcgagtaccctcgggatagatcca

SEQ ID NO: 4822284 - DNA, 25 bp, Homo sapien
cagcaggtccccattgtcgttgcga

SEQ ID NO: 4822285 - DNA, 25 bp, Homo sapien
gaaggcgcccttcttaaaaggcagc

SEQ ID NO: 4822286 - DNA, 25 bp, Homo sapien
cctggactgccaggtagaaggcgcc

SEQ ID NO: 4822287 - DNA, 25 bp, Homo sapien
cagctggcatgggaccccatctgcg

SEQ ID NO: 4822288 - DNA, 25 bp, Homo sapien
tgggaccccatctgcggagcatgga

SEQ ID NO: 4822289 - DNA, 25 bp, Homo sapien
catctgcggagcatggatgatgtag

SEQ ID NO: 4822290 - DNA, 25 bp, Homo sapien
ctaagaagccccacttcgcaaagca

SEQ ID NO: 4822291 - DNA, 25 bp, Homo sapien
ccgaggtacatgatgaggcccacgg

SEQ ID NO: 4822292 - DNA, 25 bp, Homo sapien
cgcttggcgatctgcacgcagcgct

SEQ ID NO: 4822293 - DNA, 25 bp, Homo sapien
tgctagagcgctgccggttgatgaa

SEQ ID NO: 4822294 - DNA, 25 bp, Homo sapien
tcactgtcatggcagtgctagagcg

SEQ ID NO: 4822295 - DNA, 25 bp, Homo sapien
gtgtggcctccgagcctctgtgtct

SEQ ID NO: 4822296 - DNA, 25 bp, Homo sapien
cagcgtgcgctggaagacagctgct

SEQ ID NO: 4822297 - DNA, 25 bp, Homo sapien
gtactgaggccgagctcgcccaggc

SEQ ID NO: 4822298 - DNA, 25 bp, Homo sapien
ctacctggacgggtcgtgtggcctc

SEQ ID NO: 4822299 - DNA, 25 bp, Homo sapien
cacctcgaagcggagcccgtaaaag

SEQ ID NO: 4822300 - DNA, 25 bp, Homo sapien
taaaagtacttgaagcttcgcacga

SEQ ID NO: 4822301 - DNA, 25 bp, Homo sapien
ctggtggttggagacgatgacacag

SEQ ID NO: 4822302 - DNA, 25 bp, Homo sapien
gatgacacagggacgggcctcctgc

SEQ ID NO: 4822303 - DNA, 25 bp, Homo sapien
atgaacacgggtcccacagatcccg

SEQ ID NO: 4822304 - DNA, 25 bp, Homo sapien
aggggaggccaccatgaacacgggt

SEQ ID NO: 4822305 - DNA, 25 bp, Homo sapien
gaggccaccatgaacacgggtccca

SEQ ID NO: 4822306 - DNA, 25 bp, Homo sapien
caccatgaacacgggtcccacagat

SEQ ID NO: 4822307 - DNA, 25 bp, Homo sapien
tcggcgccagtggagacctctgaaa

SEQ ID NO: 4822308 - DNA, 25 bp, Homo sapien
agaaaagagccgagaccgagaccct

SEQ ID NO: 4822309 - DNA, 25 bp, Homo sapien
agacctctgaaacgacctccgaaag

SEQ ID NO: 4822310 - DNA, 25 bp, Homo sapien
acatcaggaagaaagtgtcggcgcc

SEQ ID NO: 4822311 - DNA, 25 bp, Homo sapien
cagcccgtcatggttgggaccaggg

SEQ ID NO: 4822312 - DNA, 25 bp, Homo sapien
cctttccccgtgaagaggcggcgag

SEQ ID NO: 4822313 - DNA, 25 bp, Homo sapien
tgtctgaggtcacaccaggagcagc

SEQ ID NO: 4822314 - DNA, 25 bp, Homo sapien
aagactctgaccagctccgagcgtc

SEQ ID NO: 4822315 - DNA, 25 bp, Homo sapien
ggatggccggggcaaggctgtgcca

SEQ ID NO: 4822316 - DNA, 25 bp, Homo sapien
gaggacggagctccactccgaagct

SEQ ID NO: 4822317 - DNA, 25 bp, Homo sapien
tcccctctccatgcagactagtgcc

SEQ ID NO: 4822318 - DNA, 25 bp, Homo sapien
ccagatagggcaccccatcacaggg

SEQ ID NO: 4822319 - DNA, 25 bp, Homo sapien
ggccccacactttctacagatgagt

SEQ ID NO: 4822320 - DNA, 25 bp, Homo sapien
gcagagattcaaagccggggccttc

SEQ ID NO: 4822321 - DNA, 25 bp, Homo sapien
agtctgagtaactgccccaggccac

SEQ ID NO: 4822322 - DNA, 25 bp, Homo sapien
tacagatgagtctgagtaactgccc

SEQ ID NO: 4822323 - DNA, 25 bp, Homo sapien
gctggtagcacccgcacactcaggg

SEQ ID NO: 4822324 - DNA, 25 bp, Homo sapien
ccgggctggtagcacccgcacactc

SEQ ID NO: 4822325 - DNA, 25 bp, Homo sapien
ctggtagcacccgcacactcagggg

SEQ ID NO: 4822326 - DNA, 25 bp, Homo sapien
ggctggtagcacccgcacactcagg

SEQ ID NO: 4822327 - DNA, 25 bp, Homo sapien
tgcctgcaggaggctcgggccacat

SEQ ID NO: 4822328 - DNA, 25 bp, Homo sapien
gaagaaagttgaagttgatgtcctc

SEQ ID NO: 4822329 - DNA, 25 bp, Homo sapien
ctgcttaggggttggatcgtgcact

SEQ ID NO: 4822330 - DNA, 25 bp, Homo sapien
cagctgtgaaagacacggggtacaa

SEQ ID NO: 4822331 - DNA, 25 bp, Homo sapien
cactgatacttctctcagctgtgaa

SEQ ID NO: 4822332 - DNA, 25 bp, Homo sapien
tcgctggggccaccggggacaggga

SEQ ID NO: 4822333 - DNA, 25 bp, Homo sapien
atctggtgttttccgacaagtgtca

SEQ ID NO: 4822334 - DNA, 25 bp, Homo sapien
tgttttccgacaagtgtcatccaag

SEQ ID NO: 4822335 - DNA, 25 bp, Homo sapien
gctcgctggggccaccggggacagg

SEQ ID NO: 4822336 - DNA, 25 bp, Homo sapien
agcccacacaaacacccggatgtgg

SEQ ID NO: 4822337 - DNA, 25 bp, Homo sapien
tcaggacagctccaatttctgggcc

SEQ ID NO: 4822338 - DNA, 25 bp, Homo sapien
cagcacaaggcgggatgggtccata

SEQ ID NO: 4822339 - DNA, 25 bp, Homo sapien
tccccgtgactcctcaaagcggatg

SEQ ID NO: 4822340 - DNA, 25 bp, Homo sapien
agcgctctggaggaccaaggtcacg

SEQ ID NO: 4822341 - DNA, 25 bp, Homo sapien
agggcccccgatggcatctgtcatc

SEQ ID NO: 4822342 - DNA, 25 bp, Homo sapien
aggaccaaggtcacggtctcccttg

SEQ ID NO: 4822343 - DNA, 25 bp, Homo sapien
tgctgtggtgacacagggcccccga

SEQ ID NO: 4822344 - DNA, 25 bp, Homo sapien
aggacccgggaccatgcactggccg

SEQ ID NO: 4822345 - DNA, 25 bp, Homo sapien
cactggccggcaaatctgggtcaaa

SEQ ID NO: 4822346 - DNA, 25 bp, Homo sapien
ctgtcagaggacccgggaccatgca

SEQ ID NO: 4822347 - DNA, 25 bp, Homo sapien
ggaccatgcactggccggcaaatct

SEQ ID NO: 4822348 - DNA, 25 bp, Homo sapien
caagtcccctgtgcgttctccccac

SEQ ID NO: 4822349 - DNA, 25 bp, Homo sapien
cttgcccgacatcccaagtcccctg

SEQ ID NO: 4822350 - DNA, 25 bp, Homo sapien
gtcccctgtgcgttctccccacact

SEQ ID NO: 4822351 - DNA, 25 bp, Homo sapien
ccaagtcccctgtgcgttctcccca

SEQ ID NO: 4822352 - DNA, 25 bp, Homo sapien
taagaggaagagcaccccttttctg

SEQ ID NO: 4822353 - DNA, 25 bp, Homo sapien
caattcggggagcatccttaagagg

SEQ ID NO: 4822354 - DNA, 25 bp, Homo sapien
cctccagataccagcagagcgtggg

SEQ ID NO: 4822355 - DNA, 25 bp, Homo sapien
tggggttcaattcggggagcatcct

SEQ ID NO: 4822356 - DNA, 25 bp, Homo sapien
gctccagggtctcctaagtcaggtg

SEQ ID NO: 4822357 - DNA, 25 bp, Homo sapien
ctcacacgaggaggccgccgatgaa

SEQ ID NO: 4822358 - DNA, 25 bp, Homo sapien
tggctcagtagtggggtctgctcca

SEQ ID NO: 4822359 - DNA, 25 bp, Homo sapien
cacaagccatttcctcggggtgggg

SEQ ID NO: 4822360 - DNA, 25 bp, Homo sapien
gggctccgttggaagccatgactgt

SEQ ID NO: 4822361 - DNA, 25 bp, Homo sapien
tctccatgctcaccatcaggcccag

SEQ ID NO: 4822362 - DNA, 25 bp, Homo sapien
gccatgactgtaggcccgttccagc

SEQ ID NO: 4822363 - DNA, 25 bp, Homo sapien
agccagcaggcccttctcggactct

SEQ ID NO: 4822364 - DNA, 25 bp, Homo sapien
ggcgcgctccccagcacggaagcag

SEQ ID NO: 4822365 - DNA, 25 bp, Homo sapien
cccggagctgtaggccaggggcgcg

SEQ ID NO: 4822366 - DNA, 25 bp, Homo sapien
cttcccttcgcttggaagctgggcc

SEQ ID NO: 4822367 - DNA, 25 bp, Homo sapien
ttcccttcgcttggaagctgggccc

SEQ ID NO: 4822368 - DNA, 25 bp, Homo sapien
aagcacagcgcgcagtacagggcga

SEQ ID NO: 4822369 - DNA, 25 bp, Homo sapien
gccacggcggacaccgtgaagcaca

SEQ ID NO: 4822370 - DNA, 25 bp, Homo sapien
cagtacagggcgaccttggcgtaga

SEQ ID NO: 4822371 - DNA, 25 bp, Homo sapien
gaccttggcgtagaactcggccgcg

SEQ ID NO: 4822372 - DNA, 25 bp, Homo sapien
ggcgcccgacggcgccgccagctcg

SEQ ID NO: 4822373 - DNA, 25 bp, Homo sapien
cggcgcccgacggcgccgccagctc

SEQ ID NO: 4822374 - DNA, 25 bp, Homo sapien
ccgcgcgctcaggccccttattgcg

SEQ ID NO: 4822375 - DNA, 25 bp, Homo sapien
gcgcccgacggcgccgccagctcgc

SEQ ID NO: 4822376 - DNA, 25 bp, Homo sapien
ggcagccgggctttgaagaccagtc

SEQ ID NO: 4822377 - DNA, 25 bp, Homo sapien
agcgccctgtctgacccttgagatg

SEQ ID NO: 4822378 - DNA, 25 bp, Homo sapien
ctgtacccacccaaggacagctgag

SEQ ID NO: 4822379 - DNA, 25 bp, Homo sapien
atgagtgcttctcacccagggaggg

SEQ ID NO: 4822380 - DNA, 25 bp, Homo sapien
tcccacggccacccgggtggtgcac

SEQ ID NO: 4822381 - DNA, 25 bp, Homo sapien
ctgggccgtgggcatccgtgctgcc

SEQ ID NO: 4822382 - DNA, 25 bp, Homo sapien
tgtcctggggccgtgtcaggcctgg

SEQ ID NO: 4822383 - DNA, 25 bp, Homo sapien
aggcagcccccagtggacctggtgt

SEQ ID NO: 4822384 - DNA, 25 bp, Homo sapien
ggagcatatttagaccccaggcagt

SEQ ID NO: 4822385 - DNA, 25 bp, Homo sapien
cccaggcagttctgtaacagggctc

SEQ ID NO: 4822386 - DNA, 25 bp, Homo sapien
tgttccacacgtctctgcctttgct

SEQ ID NO: 4822387 - DNA, 25 bp, Homo sapien
tggagtgcgcgttcatgttccacac

SEQ ID NO: 4822388 - DNA, 25 bp, Homo sapien
ttctgtcgaggagggctgagcgtcc

SEQ ID NO: 4822389 - DNA, 25 bp, Homo sapien
ctccgcagggctggtgaacctgttc

SEQ ID NO: 4822390 - DNA, 25 bp, Homo sapien
ctgcacgcacggctctccgcagggc

SEQ ID NO: 4822391 - DNA, 25 bp, Homo sapien
cccgcggagtcgagcacagcagggc

SEQ ID NO: 4822392 - DNA, 25 bp, Homo sapien
ggaggaatttacacaccacgggctc

SEQ ID NO: 4822393 - DNA, 25 bp, Homo sapien
ggctcacacggccagtgccgatgtg

SEQ ID NO: 4822394 - DNA, 25 bp, Homo sapien
ggccagtgccgatgtgcactgctcc

SEQ ID NO: 4822395 - DNA, 25 bp, Homo sapien
ctggaggaatttacacaccacgggc

SEQ ID NO: 4822396 - DNA, 25 bp, Homo sapien
tgctgtctttgcacgtccatgtgcc

SEQ ID NO: 4822397 - DNA, 25 bp, Homo sapien
tgtgccctgagtgtctccggccagg

SEQ ID NO: 4822398 - DNA, 25 bp, Homo sapien
tgttcggccgcctgctgtctttgca

SEQ ID NO: 4822399 - DNA, 25 bp, Homo sapien
catgggacggtgacaggtgttcggc

SEQ ID NO: 4822400 - DNA, 25 bp, Homo sapien
agccccgacagcagggtgggctcca

SEQ ID NO: 4822401 - DNA, 25 bp, Homo sapien
cgcagccccgacagcagggtgggct

SEQ ID NO: 4822402 - DNA, 25 bp, Homo sapien
gcagccccgacagcagggtgggctc

SEQ ID NO: 4822403 - DNA, 25 bp, Homo sapien
ccccgacagcagggtgggctccagg

SEQ ID NO: 4822404 - DNA, 25 bp, Homo sapien
tgtgttccctgtgactcggacgctg

SEQ ID NO: 4822405 - DNA, 25 bp, Homo sapien
tgacagcatggagacggtttcaccg

SEQ ID NO: 4822406 - DNA, 25 bp, Homo sapien
ggacatccgaattttctccaggagg

SEQ ID NO: 4822407 - DNA, 25 bp, Homo sapien
ggtttcaccgtctgctactttcgag

SEQ ID NO: 4822408 - DNA, 25 bp, Homo sapien
tggtggcgtagaaacaagggcccca

SEQ ID NO: 4822409 - DNA, 25 bp, Homo sapien
tggccacggacagtgtgcaggttct

SEQ ID NO: 4822410 - DNA, 25 bp, Homo sapien
gaactagacccattcaaactgaact

SEQ ID NO: 4822411 - DNA, 25 bp, Homo sapien
tgtcacccattggtggcgtagaaac

SEQ ID NO: 4822412 - DNA, 25 bp, Homo sapien
aggcactcctcccagggcgggccat

SEQ ID NO: 4822413 - DNA, 25 bp, Homo sapien
caggcactcctcccagggcgggcca

SEQ ID NO: 4822414 - DNA, 25 bp, Homo sapien
actgaaaagtctgggcagcgcctgc

SEQ ID NO: 4822415 - DNA, 25 bp, Homo sapien
gaatctgcaaagctgcctcaggctg

SEQ ID NO: 4822416 - DNA, 25 bp, Homo sapien
cctggtatgtgaccctggagaggca

SEQ ID NO: 4822417 - DNA, 25 bp, Homo sapien
tgcactactcgtcctactcggagcg

SEQ ID NO: 4822418 - DNA, 25 bp, Homo sapien
accgatgtgcggcaagggccctgag

SEQ ID NO: 4822419 - DNA, 25 bp, Homo sapien
gctaggtgctggtaggtgcccagga

SEQ ID NO: 4822420 - DNA, 25 bp, Homo sapien
aggtgctggtaggtgcccaggacca

SEQ ID NO: 4822421 - DNA, 25 bp, Homo sapien
gggaccgatgtgcggcaagggccct

SEQ ID NO: 4822422 - DNA, 25 bp, Homo sapien
agtggactccggtggcaaagggcct

SEQ ID NO: 4822423 - DNA, 25 bp, Homo sapien
cgggagtggactccggtggcaaagg

SEQ ID NO: 4822424 - DNA, 25 bp, Homo sapien
gggacgggagtggactccggtggca

SEQ ID NO: 4822425 - DNA, 25 bp, Homo sapien
gagtggactccggtggcaaagggcc

SEQ ID NO: 4822426 - DNA, 25 bp, Homo sapien
tggtactgtttgacaagcccacccg

SEQ ID NO: 4822427 - DNA, 25 bp, Homo sapien
tgacttcaacaaggacaaccgggtg

SEQ ID NO: 4822428 - DNA, 25 bp, Homo sapien
gaattctagttcaccggccaatgcc

SEQ ID NO: 4822429 - DNA, 25 bp, Homo sapien
tgggacccctaacctggcagatgtg

SEQ ID NO: 4822430 - DNA, 25 bp, Homo sapien
cggctcttacgggactttctacatg

SEQ ID NO: 4822431 - DNA, 25 bp, Homo sapien
ccatcggcctgctggagttcgtgga

SEQ ID NO: 4822432 - DNA, 25 bp, Homo sapien
acgacttcaagatggccgacctgca

SEQ ID NO: 4822433 - DNA, 25 bp, Homo sapien
acactggccaacgtgggctacacag

SEQ ID NO: 4822434 - DNA, 25 bp, Homo sapien
atgagaccccagctcggagcaaagg

SEQ ID NO: 4822435 - DNA, 25 bp, Homo sapien
cccagctcggagcaaaggcggacat

SEQ ID NO: 4822436 - DNA, 25 bp, Homo sapien
cggacatggacatcccggcaggaga

SEQ ID NO: 4822437 - DNA, 25 bp, Homo sapien
gacatgagaccccagctcggagcaa

SEQ ID NO: 4822438 - DNA, 25 bp, Homo sapien
aatccagccatgagatgtacaactc

SEQ ID NO: 4822439 - DNA, 25 bp, Homo sapien
ccatcccctaggagaacaggcaagg

SEQ ID NO: 4822440 - DNA, 25 bp, Homo sapien
cacagcaacacctttcttcagggcg

SEQ ID NO: 4822441 - DNA, 25 bp, Homo sapien
gctccgcaatgtgtgagtcaagaca

SEQ ID NO: 4822442 - DNA, 25 bp, Homo sapien
tcagggtcttaggttccaggcagtt

SEQ ID NO: 4822443 - DNA, 25 bp, Homo sapien
cagaataccacaatagcagaactta

SEQ ID NO: 4822444 - DNA, 25 bp, Homo sapien
tttttctccaccagaataccacaat

SEQ ID NO: 4822445 - DNA, 25 bp, Homo sapien
agttcaaaaacagccacgcggttct

SEQ ID NO: 4822446 - DNA, 25 bp, Homo sapien
gatatgaaaagggaggcgtggtcct

SEQ ID NO: 4822447 - DNA, 25 bp, Homo sapien
gcagtggcccctggccggcaggaat

SEQ ID NO: 4822448 - DNA, 25 bp, Homo sapien
gaatcgggatatgaaaagggaggcg

SEQ ID NO: 4822449 - DNA, 25 bp, Homo sapien
gcaggaatacacagcaacacccagg

SEQ ID NO: 4822450 - DNA, 25 bp, Homo sapien
aggctgcaaacaccctgagtgccag

SEQ ID NO: 4822451 - DNA, 25 bp, Homo sapien
ctgcaaacaccctgagtgccagtgg

SEQ ID NO: 4822452 - DNA, 25 bp, Homo sapien
gctctgaggctgcaaacaccctgag

SEQ ID NO: 4822453 - DNA, 25 bp, Homo sapien
tctgaggctgcaaacaccctgagtg

SEQ ID NO: 4822454 - DNA, 25 bp, Homo sapien
tgggcccacatcctggcctctgcat

SEQ ID NO: 4822455 - DNA, 25 bp, Homo sapien
cagccagcctcctggcacagggctg

SEQ ID NO: 4822456 - DNA, 25 bp, Homo sapien
agggctgggcccacatcctggcctc

SEQ ID NO: 4822457 - DNA, 25 bp, Homo sapien
ggctgggcccacatcctggcctctg

SEQ ID NO: 4822458 - DNA, 25 bp, Homo sapien
caggcctccagaaagtgtattttga

SEQ ID NO: 4822459 - DNA, 25 bp, Homo sapien
gaagttatctttcttgatactgtct

SEQ ID NO: 4822460 - DNA, 25 bp, Homo sapien
ccgcgccaggcctccagaaagtgta

SEQ ID NO: 4822461 - DNA, 25 bp, Homo sapien
gcctccagaaagtgtattttgaagt

SEQ ID NO: 4822462 - DNA, 25 bp, Homo sapien
catgcagctgcgtctttggcctctg

SEQ ID NO: 4822463 - DNA, 25 bp, Homo sapien
gggccacatcactcttcactacggg

SEQ ID NO: 4822464 - DNA, 25 bp, Homo sapien
acatttgggccacatcactcttcac

SEQ ID NO: 4822465 - DNA, 25 bp, Homo sapien
aggacatgcagctgcgtctttggcc

SEQ ID NO: 4822466 - DNA, 25 bp, Homo sapien
ccctgggatgactagtgctggacaa

SEQ ID NO: 4822467 - DNA, 25 bp, Homo sapien
ggaacagcctgtttatccagctcga

SEQ ID NO: 4822468 - DNA, 25 bp, Homo sapien
tcgtttccagaacgaggcctgggag

SEQ ID NO: 4822469 - DNA, 25 bp, Homo sapien
caagtgcccgagcttcagatacaca

SEQ ID NO: 4822470 - DNA, 25 bp, Homo sapien
ccactggttcccgagcactgagtgt

SEQ ID NO: 4822471 - DNA, 25 bp, Homo sapien
gtgcccactggttcccgagcactga

SEQ ID NO: 4822472 - DNA, 25 bp, Homo sapien
ctggttcccgagcactgagtgtaga

SEQ ID NO: 4822473 - DNA, 25 bp, Homo sapien
tgcccactggttcccgagcactgag

SEQ ID NO: 4822474 - DNA, 25 bp, Homo sapien
ctgtggtgccaacaggtccaggaca

SEQ ID NO: 4822475 - DNA, 25 bp, Homo sapien
tcacacgcacccggcaggcagggaa

SEQ ID NO: 4822476 - DNA, 25 bp, Homo sapien
gcatccgcagggcagccgctcacac

SEQ ID NO: 4822477 - DNA, 25 bp, Homo sapien
ggaaggagggcaagcctccgcctca

SEQ ID NO: 4822478 - DNA, 25 bp, Homo sapien
gaaggagggcaagcctccgcctcac

SEQ ID NO: 4822479 - DNA, 25 bp, Homo sapien
gtgctggtcagcctggtcactctgg

SEQ ID NO: 4822480 - DNA, 25 bp, Homo sapien
gctcacactggaagtccatcacagg

SEQ ID NO: 4822481 - DNA, 25 bp, Homo sapien
tggaagtccatcacaggcgaagtca

SEQ ID NO: 4822482 - DNA, 25 bp, Homo sapien
gctggtgctggtcagcctggtcact

SEQ ID NO: 4822483 - DNA, 25 bp, Homo sapien
cttcccgtgttaaataacaagaatg

SEQ ID NO: 4822484 - DNA, 25 bp, Homo sapien
tagcccagcgcgagagttagaaagc

SEQ ID NO: 4822485 - DNA, 25 bp, Homo sapien
tgacacggtgtacggcatgatccag

SEQ ID NO: 4822486 - DNA, 25 bp, Homo sapien
ccagataccagcgaaggaaaacaga

SEQ ID NO: 4822487 - DNA, 25 bp, Homo sapien
tactgctattaaccgagacgccagc

SEQ ID NO: 4822488 - DNA, 25 bp, Homo sapien
tcaaacattcaaacgttcacggggc

SEQ ID NO: 4822489 - DNA, 25 bp, Homo sapien
ttcaaacgttcacggggcagaacgc

SEQ ID NO: 4822490 - DNA, 25 bp, Homo sapien
gagtgtgagactatcaaacattcaa

SEQ ID NO: 4822491 - DNA, 25 bp, Homo sapien
ttcacggggcagaacgctgagcgta

SEQ ID NO: 4822492 - DNA, 25 bp, Homo sapien
aatgacacagatgtgacacggcagc

SEQ ID NO: 4822493 - DNA, 25 bp, Homo sapien
tgacacagatgtgacacggcagcca

SEQ ID NO: 4822494 - DNA, 25 bp, Homo sapien
cacggcagccacagctgcaacgcct

SEQ ID NO: 4822495 - DNA, 25 bp, Homo sapien
ctaatgacacagatgtgacacggca

SEQ ID NO: 4822496 - DNA, 25 bp, Homo sapien
tacattggaggattgaccctgttcc

SEQ ID NO: 4822497 - DNA, 25 bp, Homo sapien
tggagacagcttctagcctcaatgt

SEQ ID NO: 4822498 - DNA, 25 bp, Homo sapien
cacaggagggcttagttacattgga

SEQ ID NO: 4822499 - DNA, 25 bp, Homo sapien
aatgtgaacacaagaccgactggtc

SEQ ID NO: 4822500 - DNA, 25 bp, Homo sapien
caccccacgcacgtgtcatctccag

SEQ ID NO: 4822501 - DNA, 25 bp, Homo sapien
ccaacaccccacgcacgtgtcatct

SEQ ID NO: 4822502 - DNA, 25 bp, Homo sapien
acaccccacgcacgtgtcatctcca

SEQ ID NO: 4822503 - DNA, 25 bp, Homo sapien
aacaccccacgcacgtgtcatctcc

SEQ ID NO: 4822504 - DNA, 25 bp, Homo sapien
tcactgtcacaagggccgttctaga

SEQ ID NO: 4822505 - DNA, 25 bp, Homo sapien
tgcaggtatcaagggaccaggacca

SEQ ID NO: 4822506 - DNA, 25 bp, Homo sapien
ttggagttacaacacagtggccacg

SEQ ID NO: 4822507 - DNA, 25 bp, Homo sapien
ggaaaccacctgacgcagcataaga

SEQ ID NO: 4822508 - DNA, 25 bp, Homo sapien
accaagggacacaccagcggcgcct

SEQ ID NO: 4822509 - DNA, 25 bp, Homo sapien
ttcctggctggaaaccgcgcagggc

SEQ ID NO: 4822510 - DNA, 25 bp, Homo sapien
aggacgccccaggtcggagcctgcc

SEQ ID NO: 4822511 - DNA, 25 bp, Homo sapien
tcccgaagcttcctggctggaaacc

SEQ ID NO: 4822512 - DNA, 25 bp, Homo sapien
ggagaagtcaggcggcccacccgcc

SEQ ID NO: 4822513 - DNA, 25 bp, Homo sapien
gagaagtcaggcggcccacccgcca

SEQ ID NO: 4822514 - DNA, 25 bp, Homo sapien
aagtcaggcggcccacccgccacgg

SEQ ID NO: 4822515 - DNA, 25 bp, Homo sapien
tcaggcggcccacccgccacggcag

SEQ ID NO: 4822516 - DNA, 25 bp, Homo sapien
gggtacacaccaggcgcctaatgag

SEQ ID NO: 4822517 - DNA, 25 bp, Homo sapien
gctctgccggtgtcggccatgggcg

SEQ ID NO: 4822518 - DNA, 25 bp, Homo sapien
ggctcccgtgactgtcgagcagcgc

SEQ ID NO: 4822519 - DNA, 25 bp, Homo sapien
aggacgctccacgagcccgtgggtc

SEQ ID NO: 4822520 - DNA, 25 bp, Homo sapien
actgggctgcaactgcgcggtctga

SEQ ID NO: 4822521 - DNA, 25 bp, Homo sapien
ggctcctaagaaaagccccagcgca

SEQ ID NO: 4822522 - DNA, 25 bp, Homo sapien
ggacactttgcaactgggctgcaac

SEQ ID NO: 4822523 - DNA, 25 bp, Homo sapien
tgcaactgcgcggtctgaggctcct

SEQ ID NO: 4822524 - DNA, 25 bp, Homo sapien
tgtcagagctggtcctagctctgga

SEQ ID NO: 4822525 - DNA, 25 bp, Homo sapien
acacggttgttggagacaagctggc

SEQ ID NO: 4822526 - DNA, 25 bp, Homo sapien
gatatggtgctagagctggttcttg

SEQ ID NO: 4822527 - DNA, 25 bp, Homo sapien
tctgtcctagcactgacacggttgt

SEQ ID NO: 4822528 - DNA, 25 bp, Homo sapien
tctgagatggctgtagctctggagc

SEQ ID NO: 4822529 - DNA, 25 bp, Homo sapien
ggttgtggaatcagccatcgcttta

SEQ ID NO: 4822530 - DNA, 25 bp, Homo sapien
gcagtcaccggaggtggcaccagat

SEQ ID NO: 4822531 - DNA, 25 bp, Homo sapien
agatttggtgatagagctgcctctg

SEQ ID NO: 4822532 - DNA, 25 bp, Homo sapien
gtacaggaacccgcactggtgtgag

SEQ ID NO: 4822533 - DNA, 25 bp, Homo sapien
aggaacccgcactggtgtgagccgc

SEQ ID NO: 4822534 - DNA, 25 bp, Homo sapien
ctggtacaggaacccgcactggtgt

SEQ ID NO: 4822535 - DNA, 25 bp, Homo sapien
acaggaacccgcactggtgtgagcc

SEQ ID NO: 4822536 - DNA, 25 bp, Homo sapien
tgtagccggagctggctctaccttc

SEQ ID NO: 4822537 - DNA, 25 bp, Homo sapien
tctgatcctggaactagcacccgag

SEQ ID NO: 4822538 - DNA, 25 bp, Homo sapien
cggatgctggagctatagtggagcc

SEQ ID NO: 4822539 - DNA, 25 bp, Homo sapien
caggagttggctgtagctctgtagc

SEQ ID NO: 4822540 - DNA, 25 bp, Homo sapien
tttgaaggagccgtgtgaacatcct

SEQ ID NO: 4822541 - DNA, 25 bp, Homo sapien
gaattgctttgttgattggcgctga

SEQ ID NO: 4822542 - DNA, 25 bp, Homo sapien
gaacatccttcaggtcaaggcctgg

SEQ ID NO: 4822543 - DNA, 25 bp, Homo sapien
ccctacacgaagtccaaatgcagag

SEQ ID NO: 4822544 - DNA, 25 bp, Homo sapien
tgggtggttcagaggcccacactcg

SEQ ID NO: 4822545 - DNA, 25 bp, Homo sapien
cacactcggggttctcaaggccgga

SEQ ID NO: 4822546 - DNA, 25 bp, Homo sapien
ttctcaaggccggacagcagtttgg

SEQ ID NO: 4822547 - DNA, 25 bp, Homo sapien
tgctcagctcgtgtcctgcctctgc

SEQ ID NO: 4822548 - DNA, 25 bp, Homo sapien
gagcagagacatcgaaggggggccg

SEQ ID NO: 4822549 - DNA, 25 bp, Homo sapien
gggagcagagacatcgaaggggggc

SEQ ID NO: 4822550 - DNA, 25 bp, Homo sapien
agcagagacatcgaaggggggccgg

SEQ ID NO: 4822551 - DNA, 25 bp, Homo sapien
gagggagcagagacatcgaaggggg

SEQ ID NO: 4822552 - DNA, 25 bp, Homo sapien
tcaactctgggactgcgtttgccga

SEQ ID NO: 4822553 - DNA, 25 bp, Homo sapien
cgtcatggctgaggactcgggttca

SEQ ID NO: 4822554 - DNA, 25 bp, Homo sapien
cataagagattgcagccagcagggc

SEQ ID NO: 4822555 - DNA, 25 bp, Homo sapien
tatactcgagtatccaggtgaccac

SEQ ID NO: 4822556 - DNA, 25 bp, Homo sapien
tcaatgacctagagtcaccaaacac

SEQ ID NO: 4822557 - DNA, 25 bp, Homo sapien
caacaagccgtggtctccacttgac

SEQ ID NO: 4822558 - DNA, 25 bp, Homo sapien
tctccacttgacatctggaacaacg

SEQ ID NO: 4822559 - DNA, 25 bp, Homo sapien
acatctggaacaacgctcctcgggt

SEQ ID NO: 4822560 - DNA, 25 bp, Homo sapien
aacaagccgtggtctccacttgaca

SEQ ID NO: 4822561 - DNA, 25 bp, Homo sapien
aggaccacgcgtcgaaagggaagag

SEQ ID NO: 4822562 - DNA, 25 bp, Homo sapien
gaccacgcgtcgaaagggaagagca

SEQ ID NO: 4822563 - DNA, 25 bp, Homo sapien
accacgcgtcgaaagggaagagcag

SEQ ID NO: 4822564 - DNA, 25 bp, Homo sapien
gaggaccacgcgtcgaaagggaaga

SEQ ID NO: 4822565 - DNA, 25 bp, Homo sapien
catggcaggatggtgtgtgtacggg

SEQ ID NO: 4822566 - DNA, 25 bp, Homo sapien
tggcaggatggtgtgtgtacgggac

SEQ ID NO: 4822567 - DNA, 25 bp, Homo sapien
tcatggcaggatggtgtgtgtacgg

SEQ ID NO: 4822568 - DNA, 25 bp, Homo sapien
ggcaggatggtgtgtgtacgggacg

SEQ ID NO: 4822569 - DNA, 25 bp, Homo sapien
caatgaatcagctccccaatgggac

SEQ ID NO: 4822570 - DNA, 25 bp, Homo sapien
ttgggcaccacgagaacacagccat

SEQ ID NO: 4822571 - DNA, 25 bp, Homo sapien
tgggcggatctttcaaatggcacct

SEQ ID NO: 4822572 - DNA, 25 bp, Homo sapien
ggagacacatgagccgtgaacacgt

SEQ ID NO: 4822573 - DNA, 25 bp, Homo sapien
ctttcgggaggatgacggcggcctt

SEQ ID NO: 4822574 - DNA, 25 bp, Homo sapien
caagcgtccatgaattccttcagac

SEQ ID NO: 4822575 - DNA, 25 bp, Homo sapien
ccccagaatgtcacaagcgtccatg

SEQ ID NO: 4822576 - DNA, 25 bp, Homo sapien
gactctggaagctcgaaacattctg

SEQ ID NO: 4822577 - DNA, 25 bp, Homo sapien
taccccaagtggttggtgtctagaa

SEQ ID NO: 4822578 - DNA, 25 bp, Homo sapien
tatccttgcttcagcgacctccagg

SEQ ID NO: 4822579 - DNA, 25 bp, Homo sapien
gactgctgtggtctcggcttccatt

SEQ ID NO: 4822580 - DNA, 25 bp, Homo sapien
tgagatcaggatcacatcagagact

SEQ ID NO: 4822581 - DNA, 25 bp, Homo sapien
caggttcttgtagttttgggttgca

SEQ ID NO: 4822582 - DNA, 25 bp, Homo sapien
tagctgtagtcagtggacagcacgt

SEQ ID NO: 4822583 - DNA, 25 bp, Homo sapien
ggaggtagaccaagccgtagctgta

SEQ ID NO: 4822584 - DNA, 25 bp, Homo sapien
ttgcacgccccaggcggaggtagac

SEQ ID NO: 4822585 - DNA, 25 bp, Homo sapien
tgaaagagatgcccagagatgcccg

SEQ ID NO: 4822586 - DNA, 25 bp, Homo sapien
ctgaaagagatgcccagagatgccc

SEQ ID NO: 4822587 - DNA, 25 bp, Homo sapien
ctggttcccggatggcgtggctgtg

SEQ ID NO: 4822588 - DNA, 25 bp, Homo sapien
ccttccctcgggcccgccgcgtatg

SEQ ID NO: 4822589 - DNA, 25 bp, Homo sapien
tccctcgggcccgccgcgtatgcac

SEQ ID NO: 4822590 - DNA, 25 bp, Homo sapien
ttccctcgggcccgccgcgtatgca

SEQ ID NO: 4822591 - DNA, 25 bp, Homo sapien
ctgtccttccctcgggcccgccgcg

SEQ ID NO: 4822592 - DNA, 25 bp, Homo sapien
ggcttcttcccgtctttcctcagga

SEQ ID NO: 4822593 - DNA, 25 bp, Homo sapien
cggcttcttcccgtctttcctcagg

SEQ ID NO: 4822594 - DNA, 25 bp, Homo sapien
gcttcttcccgtctttcctcaggat

SEQ ID NO: 4822595 - DNA, 25 bp, Homo sapien
ccggcttcttcccgtctttcctcag

SEQ ID NO: 4822596 - DNA, 25 bp, Homo sapien
tgaggattttccaattcggactggg

SEQ ID NO: 4822597 - DNA, 25 bp, Homo sapien
tgcttcactatccaactcgtgtcaa

SEQ ID NO: 4822598 - DNA, 25 bp, Homo sapien
ctcgtgtcaatctgaggctctgtgg

SEQ ID NO: 4822599 - DNA, 25 bp, Homo sapien
tttgaggattttccaattcggactg

SEQ ID NO: 4822600 - DNA, 25 bp, Homo sapien
ttcctcccaacacccacccatgtgg

SEQ ID NO: 4822601 - DNA, 25 bp, Homo sapien
tgcaggcagcttcctcccaacaccc

SEQ ID NO: 4822602 - DNA, 25 bp, Homo sapien
tgtggggtcccaaggtctgcaggca

SEQ ID NO: 4822603 - DNA, 25 bp, Homo sapien
cacccacccatgtggggtcccaggg

SEQ ID NO: 4822604 - DNA, 25 bp, Homo sapien
cggcaagaatccctgggcatcagtg

SEQ ID NO: 4822605 - DNA, 25 bp, Homo sapien
gccggcaagaatccctgggcatcag

SEQ ID NO: 4822606 - DNA, 25 bp, Homo sapien
agcttcctcttgtccctggccggca

SEQ ID NO: 4822607 - DNA, 25 bp, Homo sapien
gcagtggccagaatgtaccagaacc

SEQ ID NO: 4822608 - DNA, 25 bp, Homo sapien
tgcgcagcggatgtgtgggcgggga

SEQ ID NO: 4822609 - DNA, 25 bp, Homo sapien
cgcagcggatgtgtgggcggggaca

SEQ ID NO: 4822610 - DNA, 25 bp, Homo sapien
gcgcagcggatgtgtgggcggggac

SEQ ID NO: 4822611 - DNA, 25 bp, Homo sapien
ctgcgcagcggatgtgtgggcgggg

SEQ ID NO: 4822612 - DNA, 25 bp, Homo sapien
tcggtcccggccactcaagccctgg

SEQ ID NO: 4822613 - DNA, 25 bp, Homo sapien
agagaagcaggtgcccggctggtca

SEQ ID NO: 4822614 - DNA, 25 bp, Homo sapien
tctgtgagccggagtcccagctccg

SEQ ID NO: 4822615 - DNA, 25 bp, Homo sapien
caaatgacccttctgtgagccggag

SEQ ID NO: 4822616 - DNA, 25 bp, Homo sapien
tcagaggccccggctccttcccaca

SEQ ID NO: 4822617 - DNA, 25 bp, Homo sapien
cagaggccccggctccttcccacat

SEQ ID NO: 4822618 - DNA, 25 bp, Homo sapien
ctcagaggccccggctccttcccac

SEQ ID NO: 4822619 - DNA, 25 bp, Homo sapien
tcagggaccagtggcacatggctca

SEQ ID NO: 4822620 - DNA, 25 bp, Homo sapien
ggcagcgcccgtgcctggaactgct

SEQ ID NO: 4822621 - DNA, 25 bp, Homo sapien
cgctacagaatatgccccgcttgct

SEQ ID NO: 4822622 - DNA, 25 bp, Homo sapien
tgggcaccgccgtgccaatgagtgc

SEQ ID NO: 4822623 - DNA, 25 bp, Homo sapien
tccagttgagggcgtgggactccct

SEQ ID NO: 4822624 - DNA, 25 bp, Homo sapien
cttgttccagttgagggcgtgggac

SEQ ID NO: 4822625 - DNA, 25 bp, Homo sapien
ttccagttgagggcgtgggactccc

SEQ ID NO: 4822626 - DNA, 25 bp, Homo sapien
tgttccagttgagggcgtgggactc

SEQ ID NO: 4822627 - DNA, 25 bp, Homo sapien
ctgcagccagcactagcaccagcac

SEQ ID NO: 4822628 - DNA, 25 bp, Homo sapien
agcaccagcaccagcgccagcacca

SEQ ID NO: 4822629 - DNA, 25 bp, Homo sapien
ccagcaccagcagcccctgcctcat

SEQ ID NO: 4822630 - DNA, 25 bp, Homo sapien
tgcagccagcactagcaccagcacc

SEQ ID NO: 4822631 - DNA, 25 bp, Homo sapien
cctccctcagccgccaaggccagtg

SEQ ID NO: 4822632 - DNA, 25 bp, Homo sapien
ctcagccgccaaggccagtgtttaa

SEQ ID NO: 4822633 - DNA, 25 bp, Homo sapien
tccctcagccgccaaggccagtgtt

SEQ ID NO: 4822634 - DNA, 25 bp, Homo sapien
cctcagccgccaaggccagtgttta

SEQ ID NO: 4822635 - DNA, 25 bp, Homo sapien
aagggctggtcgtggcccttctggg

SEQ ID NO: 4822636 - DNA, 25 bp, Homo sapien
cctggggtcactgtgtgtgcccctg

SEQ ID NO: 4822637 - DNA, 25 bp, Homo sapien
tgtgtgcccctgagactcattaagc

SEQ ID NO: 4822638 - DNA, 25 bp, Homo sapien
gagactcattaagccctggccctca

SEQ ID NO: 4822639 - DNA, 25 bp, Homo sapien
agccgctgagcgaggtgggtggaca

SEQ ID NO: 4822640 - DNA, 25 bp, Homo sapien
gctgtggaatcgctttattctgagc

SEQ ID NO: 4822641 - DNA, 25 bp, Homo sapien
ccctgtgggcgccatccctactggg

SEQ ID NO: 4822642 - DNA, 25 bp, Homo sapien
ggcgccatccctactggggacgcag

SEQ ID NO: 4822643 - DNA, 25 bp, Homo sapien
cctcagctgccttagagacagtgga

SEQ ID NO: 4822644 - DNA, 25 bp, Homo sapien
catgaaccccgtgggcttgggcaga

SEQ ID NO: 4822645 - DNA, 25 bp, Homo sapien
acccactgtgcgtagggtggcctcc

SEQ ID NO: 4822646 - DNA, 25 bp, Homo sapien
ctcccacccactgtgcgtagggtgg

SEQ ID NO: 4822647 - DNA, 25 bp, Homo sapien
agaaggatcttgtgagcacaggtga

SEQ ID NO: 4822648 - DNA, 25 bp, Homo sapien
ctccttcagggcgactgagtcaggc

SEQ ID NO: 4822649 - DNA, 25 bp, Homo sapien
tgtgggctccagaacttgccccaag

SEQ ID NO: 4822650 - DNA, 25 bp, Homo sapien
caagactcgcctgccgtggggacaa

SEQ ID NO: 4822651 - DNA, 25 bp, Homo sapien
ccgaggctgctccggtggacactca

SEQ ID NO: 4822652 - DNA, 25 bp, Homo sapien
tgacaggaagcccaggctcctgctc

SEQ ID NO: 4822653 - DNA, 25 bp, Homo sapien
tcctgctccacttggtgaagagccc

SEQ ID NO: 4822654 - DNA, 25 bp, Homo sapien
ctactgtgacaggaagcccaggctc

SEQ ID NO: 4822655 - DNA, 25 bp, Homo sapien
tcctggctggctgtctccgtcagac

SEQ ID NO: 4822656 - DNA, 25 bp, Homo sapien
tgcagggggaagcaacctctgagag

SEQ ID NO: 4822657 - DNA, 25 bp, Homo sapien
cagtgcagggggaagcaacctctga

SEQ ID NO: 4822658 - DNA, 25 bp, Homo sapien
ccagggcagtgcagggggaagcaac

SEQ ID NO: 4822659 - DNA, 25 bp, Homo sapien
ggcagtgcagggggaagcaacctct

SEQ ID NO: 4822660 - DNA, 25 bp, Homo sapien
ccagctgagtgaagatgatggcata

SEQ ID NO: 4822661 - DNA, 25 bp, Homo sapien
acccagagctccagcacgcctattg

SEQ ID NO: 4822662 - DNA, 25 bp, Homo sapien
tccacggtgttgaagggctcgtccc

SEQ ID NO: 4822663 - DNA, 25 bp, Homo sapien
tctgaagttggtggccagcacccag

SEQ ID NO: 4822664 - DNA, 25 bp, Homo sapien
gtgccagcatcaaggggctttcaga

SEQ ID NO: 4822665 - DNA, 25 bp, Homo sapien
tgccagcatcaaggggctttcagac

SEQ ID NO: 4822666 - DNA, 25 bp, Homo sapien
gccagcatcaaggggctttcagaca

SEQ ID NO: 4822667 - DNA, 25 bp, Homo sapien
ggagtttcgctttatcaggtccatg

SEQ ID NO: 4822668 - DNA, 25 bp, Homo sapien
tcaaacacccatccggagtttcgct

SEQ ID NO: 4822669 - DNA, 25 bp, Homo sapien
gggattctcaaacacccatccggag

SEQ ID NO: 4822670 - DNA, 25 bp, Homo sapien
atgacactctggtcacaccctccca

SEQ ID NO: 4822671 - DNA, 25 bp, Homo sapien
gggcctgtcacccactcagggtcaa

SEQ ID NO: 4822672 - DNA, 25 bp, Homo sapien
caagcacgtaccagggcccaagaag

SEQ ID NO: 4822673 - DNA, 25 bp, Homo sapien
ccccacgacgttcttcatgtccttc

SEQ ID NO: 4822674 - DNA, 25 bp, Homo sapien
acagcgtccgcaggttgttttctgg

SEQ ID NO: 4822675 - DNA, 25 bp, Homo sapien
ttttctggagtgagggtcaccacca

SEQ ID NO: 4822676 - DNA, 25 bp, Homo sapien
agtcttcccaaccacacggcctggg

SEQ ID NO: 4822677 - DNA, 25 bp, Homo sapien
gccctgggcaccgagaccaaagcca

SEQ ID NO: 4822678 - DNA, 25 bp, Homo sapien
tcttcccaaccacacggcctgggcc

SEQ ID NO: 4822679 - DNA, 25 bp, Homo sapien
ccctgggcaccgagaccaaagccag

SEQ ID NO: 4822680 - DNA, 25 bp, Homo sapien
ccttctgcgaatgggcaggaagccc

SEQ ID NO: 4822681 - DNA, 25 bp, Homo sapien
gaaactgcactttccggcaccttaa

SEQ ID NO: 4822682 - DNA, 25 bp, Homo sapien
caggacgttgttgatgacggcagcc

SEQ ID NO: 4822683 - DNA, 25 bp, Homo sapien
caaaattcctgcgttgaagccccag

SEQ ID NO: 4822684 - DNA, 25 bp, Homo sapien
catatgtggggaccggctgattccc

SEQ ID NO: 4822685 - DNA, 25 bp, Homo sapien
ggcgcagaacctccgggctgacact

SEQ ID NO: 4822686 - DNA, 25 bp, Homo sapien
tcacctgcatatgtggggaccggct

SEQ ID NO: 4822687 - DNA, 25 bp, Homo sapien
ggagaaagtgatgcagtcggctggt

SEQ ID NO: 4822688 - DNA, 25 bp, Homo sapien
gcgctccgaaccttgtggtctgagg

SEQ ID NO: 4822689 - DNA, 25 bp, Homo sapien
gtgggcgggcgctccgaaccttgtg

SEQ ID NO: 4822690 - DNA, 25 bp, Homo sapien
ggcgggcgctccgaaccttgtggtc

SEQ ID NO: 4822691 - DNA, 25 bp, Homo sapien
ctccgaaccttgtggtctgaggcag

SEQ ID NO: 4822692 - DNA, 25 bp, Homo sapien
ccacggggcttcgatgagggccaca

SEQ ID NO: 4822693 - DNA, 25 bp, Homo sapien
acacggcgggacttctgtcctcgct

SEQ ID NO: 4822694 - DNA, 25 bp, Homo sapien
cctgagcgccttctcaatctgcaaa

SEQ ID NO: 4822695 - DNA, 25 bp, Homo sapien
ctggttttgcgcaaagcacccagct

SEQ ID NO: 4822696 - DNA, 25 bp, Homo sapien
gacaaagcgaggtgagggagacact

SEQ ID NO: 4822697 - DNA, 25 bp, Homo sapien
cacagaacaccgaagaaaaggcgcc

SEQ ID NO: 4822698 - DNA, 25 bp, Homo sapien
tgggttctcgcagtgcccaacatgg

SEQ ID NO: 4822699 - DNA, 25 bp, Homo sapien
aaaaggcgccatttctgctcccctg

SEQ ID NO: 4822700 - DNA, 25 bp, Homo sapien
acgggggctcctgacagggccaggg

SEQ ID NO: 4822701 - DNA, 25 bp, Homo sapien
agccacgggggctcctgacagggcc

SEQ ID NO: 4822702 - DNA, 25 bp, Homo sapien
ggggctcctgacagggccagggact

SEQ ID NO: 4822703 - DNA, 25 bp, Homo sapien
ccacgggggctcctgacagggccag

SEQ ID NO: 4822704 - DNA, 25 bp, Homo sapien
ctccttcaggagctcggcacaccgc

SEQ ID NO: 4822705 - DNA, 25 bp, Homo sapien
tccttcaggagctcggcacaccgcc

SEQ ID NO: 4822706 - DNA, 25 bp, Homo sapien
tgcaggataggccagcatgaggagc

SEQ ID NO: 4822707 - DNA, 25 bp, Homo sapien
gcatgaggagctgcagagtcagccc

SEQ ID NO: 4822708 - DNA, 25 bp, Homo sapien
aggagctgcagagtcagcccacagg

SEQ ID NO: 4822709 - DNA, 25 bp, Homo sapien
gcaggataggccagcatgaggagct

SEQ ID NO: 4822710 - DNA, 25 bp, Homo sapien
ctgtcagctcccgaaacttccagaa

SEQ ID NO: 4822711 - DNA, 25 bp, Homo sapien
tgtcagctcccgaaacttccagaac

SEQ ID NO: 4822712 - DNA, 25 bp, Homo sapien
gtagagaccagtgtctgctgtcagc

SEQ ID NO: 4822713 - DNA, 25 bp, Homo sapien
ggccgccaggtagagaccagtgtct

SEQ ID NO: 4822714 - DNA, 25 bp, Homo sapien
cacaggggggctgggcgggcagtcc

SEQ ID NO: 4822715 - DNA, 25 bp, Homo sapien
tggggcacaggggggctgggcgggc

SEQ ID NO: 4822716 - DNA, 25 bp, Homo sapien
ctgtggggcacaggggggctgggcg

SEQ ID NO: 4822717 - DNA, 25 bp, Homo sapien
ggcacaggggggctgggcgggcagt

SEQ ID NO: 4822718 - DNA, 25 bp, Homo sapien
tgggcagagccccccagggccaagc

SEQ ID NO: 4822719 - DNA, 25 bp, Homo sapien
cagctgggcagagccccccagggcc

SEQ ID NO: 4822720 - DNA, 25 bp, Homo sapien
cagagccccccagggccaagcttac

SEQ ID NO: 4822721 - DNA, 25 bp, Homo sapien
ggcagagccccccagggccaagctt

SEQ ID NO: 4822722 - DNA, 25 bp, Homo sapien
gcgtagccctcgtagtcggtgtcca

SEQ ID NO: 4822723 - DNA, 25 bp, Homo sapien
ccctcgtagtcggtgtccagcacgt

SEQ ID NO: 4822724 - DNA, 25 bp, Homo sapien
tgaggacgcgaaagttcctgccccg

SEQ ID NO: 4822725 - DNA, 25 bp, Homo sapien
agtacttgaggacgcgaaagttcct

SEQ ID NO: 4822726 - DNA, 25 bp, Homo sapien
ccagcacttgagtggttggagacac

SEQ ID NO: 4822727 - DNA, 25 bp, Homo sapien
tgagtggttggagacactacagaag

SEQ ID NO: 4822728 - DNA, 25 bp, Homo sapien
gacggacctcgaaggccagggtctg

SEQ ID NO: 4822729 - DNA, 25 bp, Homo sapien
cacttgagtggttggagacactaca

SEQ ID NO: 4822730 - DNA, 25 bp, Homo sapien
gatccagtgtgttggtgggagaatg

SEQ ID NO: 4822731 - DNA, 25 bp, Homo sapien
gatgatccagtgtgttggtgggaga

SEQ ID NO: 4822732 - DNA, 25 bp, Homo sapien
aggatgatccagtgtgttggtggga

SEQ ID NO: 4822733 - DNA, 25 bp, Homo sapien
tgaaggatgatccagtgtgttggtg

SEQ ID NO: 4822734 - DNA, 25 bp, Homo sapien
ggaatgcatggggaacggcacagag

SEQ ID NO: 4822735 - DNA, 25 bp, Homo sapien
tgcatggggaacggcacagagaaaa

SEQ ID NO: 4822736 - DNA, 25 bp, Homo sapien
gggaacagcatggggaatagtgcag

SEQ ID NO: 4822737 - DNA, 25 bp, Homo sapien
aatgcatggggaacggcacagagaa

SEQ ID NO: 4822738 - DNA, 25 bp, Homo sapien
gggaacagcatggggaatagtgcag

SEQ ID NO: 4822739 - DNA, 25 bp, Homo sapien
agggaacagcatgtggaacagcgca

SEQ ID NO: 4822740 - DNA, 25 bp, Homo sapien
agcatggggaacagcgcagggaaca

SEQ ID NO: 4822741 - DNA, 25 bp, Homo sapien
agcatgtggaacagcgcagggaaca

SEQ ID NO: 4822742 - DNA, 25 bp, Homo sapien
aacagcatgtggaacagcgcaggga

SEQ ID NO: 4822743 - DNA, 25 bp, Homo sapien
aacagcatgtggaacagtgcaggga

SEQ ID NO: 4822744 - DNA, 25 bp, Homo sapien
cagggagcagtgcagggaacaacat

SEQ ID NO: 4822745 - DNA, 25 bp, Homo sapien
gaacaacatggggaacagcacaggg

SEQ ID NO: 4822746 - DNA, 25 bp, Homo sapien
gggaatagtgcaggaaacagcatgt

SEQ ID NO: 4822747 - DNA, 25 bp, Homo sapien
gccgggttccacctgccatcacagg

SEQ ID NO: 4822748 - DNA, 25 bp, Homo sapien
agccgggttccacctgccatcacag

SEQ ID NO: 4822749 - DNA, 25 bp, Homo sapien
acagccgggttccacctgccatcac

SEQ ID NO: 4822750 - DNA, 25 bp, Homo sapien
gcacagccgggttccacctgccatc

SEQ ID NO: 4822751 - DNA, 25 bp, Homo sapien
tcttctctatctcacagcttcctga

SEQ ID NO: 4822752 - DNA, 25 bp, Homo sapien
cacgatcttctctatctcacagctt

SEQ ID NO: 4822753 - DNA, 25 bp, Homo sapien
cccgtactgtctatttctgagccca

SEQ ID NO: 4822754 - DNA, 25 bp, Homo sapien
aagcgaattttcccgtactgtctat

SEQ ID NO: 4822755 - DNA, 25 bp, Homo sapien
gctttgatcggaggccacaccgact

SEQ ID NO: 4822756 - DNA, 25 bp, Homo sapien
gttatatgcaaccttcacggtcagg

SEQ ID NO: 4822757 - DNA, 25 bp, Homo sapien
ccgctcaaggtgaggaacaagccct

SEQ ID NO: 4822758 - DNA, 25 bp, Homo sapien
agcaccaggctttgatcggaggcca

SEQ ID NO: 4822759 - DNA, 25 bp, Homo sapien
tccctagggcttctgcgacatgtcg

SEQ ID NO: 4822760 - DNA, 25 bp, Homo sapien
cagactcagcggagaagaaaatgcc

SEQ ID NO: 4822761 - DNA, 25 bp, Homo sapien
gaaaatgccgctaacaggaagtgtc

SEQ ID NO: 4822762 - DNA, 25 bp, Homo sapien
actgggccatctagagctgcggaac

SEQ ID NO: 4822763 - DNA, 25 bp, Homo sapien
cggagcaccacgaggacacccagga

SEQ ID NO: 4822764 - DNA, 25 bp, Homo sapien
ggcagcctggcctccgtggcggggt

SEQ ID NO: 4822765 - DNA, 25 bp, Homo sapien
acctgcgcccggagcaccacgagga

SEQ ID NO: 4822766 - DNA, 25 bp, Homo sapien
gcaccacgaggacacccaggatggt

SEQ ID NO: 4822767 - DNA, 25 bp, Homo sapien
ctatacggacagtgcaggcttgtgc

SEQ ID NO: 4822768 - DNA, 25 bp, Homo sapien
acggacagtgcaggcttgtgcgccc

SEQ ID NO: 4822769 - DNA, 25 bp, Homo sapien
atacggacagtgcaggcttgtgcgc

SEQ ID NO: 4822770 - DNA, 25 bp, Homo sapien
ggacagtgcaggcttgtgcgcccac

SEQ ID NO: 4822771 - DNA, 25 bp, Homo sapien
tggcagctcagagacgtgggtttct

SEQ ID NO: 4822772 - DNA, 25 bp, Homo sapien
aggggttagcctggcctagacagca

SEQ ID NO: 4822773 - DNA, 25 bp, Homo sapien
acgcccaccgcaggggttagcctgg

SEQ ID NO: 4822774 - DNA, 25 bp, Homo sapien
tcctggcatatggacagcggtggac

SEQ ID NO: 4822775 - DNA, 25 bp, Homo sapien
agccaccctcctggcatatggacag

SEQ ID NO: 4822776 - DNA, 25 bp, Homo sapien
gccagcgaccagagtgacagtgaca

SEQ ID NO: 4822777 - DNA, 25 bp, Homo sapien
gaggcacagcgccagcgaccagagt

SEQ ID NO: 4822778 - DNA, 25 bp, Homo sapien
acagcgccagcgaccagagtgacag

SEQ ID NO: 4822779 - DNA, 25 bp, Homo sapien
cagcgaccagagtgacagtgacagt

SEQ ID NO: 4822780 - DNA, 25 bp, Homo sapien
agacgtcccacaaggcatcccacag

SEQ ID NO: 4822781 - DNA, 25 bp, Homo sapien
gctgtgggtcttgactccaggggca

SEQ ID NO: 4822782 - DNA, 25 bp, Homo sapien
tttattgaatagaaagagacgtccc

SEQ ID NO: 4822783 - DNA, 25 bp, Homo sapien
aggcatcccacaggcggggggtgga

SEQ ID NO: 4822784 - DNA, 25 bp, Homo sapien
gtgagccatggcctctgcctggtcc

SEQ ID NO: 4822785 - DNA, 25 bp, Homo sapien
catggcctctgcctggtcctcggtg

SEQ ID NO: 4822786 - DNA, 25 bp, Homo sapien
cccagtccctggctgagtggcagtg

SEQ ID NO: 4822787 - DNA, 25 bp, Homo sapien
ggaggacccagtgccatgccccagt

SEQ ID NO: 4822788 - DNA, 25 bp, Homo sapien
tcagggcgcctccttgctctcaggg

SEQ ID NO: 4822789 - DNA, 25 bp, Homo sapien
cagggcgcctccttgctctcagggt

SEQ ID NO: 4822790 - DNA, 25 bp, Homo sapien
gcatgaccatcatgtccttggggag

SEQ ID NO: 4822791 - DNA, 25 bp, Homo sapien
cagggtcgggtagaagtcctggaag

SEQ ID NO: 4822792 - DNA, 25 bp, Homo sapien
catgaccatcatgtccttggggagc

SEQ ID NO: 4822793 - DNA, 25 bp, Homo sapien
ccttgtagatgtaaaggacggcgaa

SEQ ID NO: 4822794 - DNA, 25 bp, Homo sapien
gtctgtgtccacgatgcgcacgtcc

SEQ ID NO: 4822795 - DNA, 25 bp, Homo sapien
cgatgcgcacgtccaggtagcccaa

SEQ ID NO: 4822796 - DNA, 25 bp, Homo sapien
cggcgaaggagctgtagtctgtgtc

SEQ ID NO: 4822797 - DNA, 25 bp, Homo sapien
gtactcggcatccacctggttacag

SEQ ID NO: 4822798 - DNA, 25 bp, Homo sapien
tcggcatccacctggttacagccgt

SEQ ID NO: 4822799 - DNA, 25 bp, Homo sapien
ccgggactctgaagtgtccctcgga

SEQ ID NO: 4822800 - DNA, 25 bp, Homo sapien
tgaagtgtccctcggagcccacctt

SEQ ID NO: 4822801 - DNA, 25 bp, Homo sapien
gtggacatggacaggtggtccttct

SEQ ID NO: 4822802 - DNA, 25 bp, Homo sapien
agaccacgtaccagaggcctgagaa

SEQ ID NO: 4822803 - DNA, 25 bp, Homo sapien
catggagaccacgtaccagaggcct

SEQ ID NO: 4822804 - DNA, 25 bp, Homo sapien
atgtggacgtggaggccgccctcct

SEQ ID NO: 4822805 - DNA, 25 bp, Homo sapien
taagcgcagagtgggtctatagcac

SEQ ID NO: 4822806 - DNA, 25 bp, Homo sapien
ggtgcagtaatgatccattcacagg

SEQ ID NO: 4822807 - DNA, 25 bp, Homo sapien
caggaactcatcttgggtaggtcac

SEQ ID NO: 4822808 - DNA, 25 bp, Homo sapien
aattatcacgttgtctctggcaggg

SEQ ID NO: 4822809 - DNA, 25 bp, Homo sapien
gagcagggtcaggattgcgccgagc

SEQ ID NO: 4822810 - DNA, 25 bp, Homo sapien
agggtcaggattgcgccgagcagga

SEQ ID NO: 4822811 - DNA, 25 bp, Homo sapien
caggattgcgccgagcaggaatgac

SEQ ID NO: 4822812 - DNA, 25 bp, Homo sapien
agcctgagccgtgggcgcccagagc

SEQ ID NO: 4822813 - DNA, 25 bp, Homo sapien
tacgtagggctcataccgagtacat

SEQ ID NO: 4822814 - DNA, 25 bp, Homo sapien
aactggaaacactaacgatgacggg

SEQ ID NO: 4822815 - DNA, 25 bp, Homo sapien
gcgtgacagtatgctcagccgagaa

SEQ ID NO: 4822816 - DNA, 25 bp, Homo sapien
gattacggcattggataccgcctta

SEQ ID NO: 4822817 - DNA, 25 bp, Homo sapien
atactagatctagatcatagacatg

SEQ ID NO: 4822818 - DNA, 25 bp, Homo sapien
ctagatctagatcatagacatgatt

SEQ ID NO: 4822819 - DNA, 25 bp, Homo sapien
gatctagatcatagacatgattata

SEQ ID NO: 4822820 - DNA, 25 bp, Homo sapien
tactagatctagatcatagacatga

SEQ ID NO: 4822821 - DNA, 25 bp, Homo sapien
tagggtaccccagtcgtatcctctg

SEQ ID NO: 4822822 - DNA, 25 bp, Homo sapien
acctgcagatggctgctgccccaac

SEQ ID NO: 4822823 - DNA, 25 bp, Homo sapien
tctgtccgcatgtgtggccaggcct

SEQ ID NO: 4822824 - DNA, 25 bp, Homo sapien
gagtctggaacacagccttcatgcc

SEQ ID NO: 4822825 - DNA, 25 bp, Homo sapien
gacaatctgagtggcggctctgagc

SEQ ID NO: 4822826 - DNA, 25 bp, Homo sapien
tcactcagctccagggtgagcctgc

SEQ ID NO: 4822827 - DNA, 25 bp, Homo sapien
gagacagatgtggaagagcagaccc

SEQ ID NO: 4822828 - DNA, 25 bp, Homo sapien
gaggctttgaggtacacagggtccc

SEQ ID NO: 4822829 - DNA, 25 bp, Homo sapien
aagtccttgcacctttgagggtccg

SEQ ID NO: 4822830 - DNA, 25 bp, Homo sapien
gcagtccgattgtgagggaagaccc

SEQ ID NO: 4822831 - DNA, 25 bp, Homo sapien
tgtaagcagggcttgctgccgtccc

SEQ ID NO: 4822832 - DNA, 25 bp, Homo sapien
cgccgaggcatgtggaaaacgtttt

SEQ ID NO: 4822833 - DNA, 25 bp, Homo sapien
gaaatggaataccagtcgggcgtga

SEQ ID NO: 4822834 - DNA, 25 bp, Homo sapien
gatgagcatcctgacccctaagctg

SEQ ID NO: 4822835 - DNA, 25 bp, Homo sapien
cacggagaccctgaaatgtaagcgc

SEQ ID NO: 4822836 - DNA, 25 bp, Homo sapien
gatgacggttttagctgcccaaggg

SEQ ID NO: 4822837 - DNA, 25 bp, Homo sapien
cattagggtcgtgtgcaatgacatc

SEQ ID NO: 4822838 - DNA, 25 bp, Homo sapien
taggccttgagctcctaaccactgc

SEQ ID NO: 4822839 - DNA, 25 bp, Homo sapien
cacagagaaagtgcactagcgtcta

SEQ ID NO: 4822840 - DNA, 25 bp, Homo sapien
aagtgactcaagtgacacaacgtcc

SEQ ID NO: 4822841 - DNA, 25 bp, Homo sapien
aggacatcactagccgcttcctggc

SEQ ID NO: 4822842 - DNA, 25 bp, Homo sapien
cccggactggccaggacatcactag

SEQ ID NO: 4822843 - DNA, 25 bp, Homo sapien
tggccaggacatcactagccgcttc

SEQ ID NO: 4822844 - DNA, 25 bp, Homo sapien
gactggccaggacatcactagccgc

SEQ ID NO: 4822845 - DNA, 25 bp, Homo sapien
cttcaagtccgttgagaagaaaatg

SEQ ID NO: 4822846 - DNA, 25 bp, Homo sapien
tctgcagcttcaagtccgttgagaa

SEQ ID NO: 4822847 - DNA, 25 bp, Homo sapien
cagcacccaactcaggactgggctc

SEQ ID NO: 4822848 - DNA, 25 bp, Homo sapien
cttctgagtccctgattctggcaca

SEQ ID NO: 4822849 - DNA, 25 bp, Homo sapien
tcctcgactctgatggagaagtaca

SEQ ID NO: 4822850 - DNA, 25 bp, Homo sapien
caggctcccgttcagagtgtctgca

SEQ ID NO: 4822851 - DNA, 25 bp, Homo sapien
ggatatgatcggtacaggccccgga

SEQ ID NO: 4822852 - DNA, 25 bp, Homo sapien
gagaagtacaacaccaggatcagct

SEQ ID NO: 4822853 - DNA, 25 bp, Homo sapien
tctagaaaagctccagaaggcacgg

SEQ ID NO: 4822854 - DNA, 25 bp, Homo sapien
gacttgcgactgtaggagacatccc

SEQ ID NO: 4822855 - DNA, 25 bp, Homo sapien
tagagcctccgtgatatttccatgg

SEQ ID NO: 4822856 - DNA, 25 bp, Homo sapien
caagttcatgaattcgcgtgccgtg

SEQ ID NO: 4822857 - DNA, 25 bp, Homo sapien
gcctccttggcgcttttggcatcct

SEQ ID NO: 4822858 - DNA, 25 bp, Homo sapien
tgttgccatctacagagccaaagcc

SEQ ID NO: 4822859 - DNA, 25 bp, Homo sapien
tggtgactacccttgcccaacaaag

SEQ ID NO: 4822860 - DNA, 25 bp, Homo sapien
gacaaagggacagaagccgttcaaa

SEQ ID NO: 4822861 - DNA, 25 bp, Homo sapien
gacagacagttttagatggctggct

SEQ ID NO: 4822862 - DNA, 25 bp, Homo sapien
tgacagacagttttagatggctggc

SEQ ID NO: 4822863 - DNA, 25 bp, Homo sapien
ctgttccctgcgtttcttcagaagt

SEQ ID NO: 4822864 - DNA, 25 bp, Homo sapien
ctttctctccatgatagtgcaggga

SEQ ID NO: 4822865 - DNA, 25 bp, Homo sapien
tgcagggaaatagatcggccatcca

SEQ ID NO: 4822866 - DNA, 25 bp, Homo sapien
ttgctgactaatccaatctccacag

SEQ ID NO: 4822867 - DNA, 25 bp, Homo sapien
caaaagtattctcacatcttgctct

SEQ ID NO: 4822868 - DNA, 25 bp, Homo sapien
gccaaaagtattctcacatcttgct

SEQ ID NO: 4822869 - DNA, 25 bp, Homo sapien
tgtagccaaaagtattctcacatct

SEQ ID NO: 4822870 - DNA, 25 bp, Homo sapien
tagccaaaagtattctcacatcttg

SEQ ID NO: 4822871 - DNA, 25 bp, Homo sapien
gatttccttgtcatacccattctga

SEQ ID NO: 4822872 - DNA, 25 bp, Homo sapien
ttcaaaccagcgagttccaaggctc

SEQ ID NO: 4822873 - DNA, 25 bp, Homo sapien
aaccagcgagttccaaggctctttc

SEQ ID NO: 4822874 - DNA, 25 bp, Homo sapien
cagcagcttgaaaatccacatagtc

SEQ ID NO: 4822875 - DNA, 25 bp, Homo sapien
tcaggagcagacttgttaaagttca

SEQ ID NO: 4822876 - DNA, 25 bp, Homo sapien
gagcagacttgttaaagttcaggtt

SEQ ID NO: 4822877 - DNA, 25 bp, Homo sapien
aagttcaggtttccaacaaagattg

SEQ ID NO: 4822878 - DNA, 25 bp, Homo sapien
gttcaggtttccaacaaagattgaa

SEQ ID NO: 4822879 - DNA, 25 bp, Homo sapien
ttggttctgtgcttctcactctcca

SEQ ID NO: 4822880 - DNA, 25 bp, Homo sapien
ggttctgtgcttctcactctccact

SEQ ID NO: 4822881 - DNA, 25 bp, Homo sapien
gtgtttcttggcttcagaagctgct

SEQ ID NO: 4822882 - DNA, 25 bp, Homo sapien
agttggttctgtgcttctcactctc

SEQ ID NO: 4822883 - DNA, 25 bp, Homo sapien
caggtgtggcgactgctttgcctgg

SEQ ID NO: 4822884 - DNA, 25 bp, Homo sapien
gtggcgactgctttgcctggagtga

SEQ ID NO: 4822885 - DNA, 25 bp, Homo sapien
gcacccgctgctgccttcatcactg

SEQ ID NO: 4822886 - DNA, 25 bp, Homo sapien
ttcttggcaggtgtggcgactgctt

SEQ ID NO: 4822887 - DNA, 25 bp, Homo sapien
cagagtaggatccagagttcacaca

SEQ ID NO: 4822888 - DNA, 25 bp, Homo sapien
ccagtcgtcagatatttggtcagta

SEQ ID NO: 4822889 - DNA, 25 bp, Homo sapien
taacctgaccgtagtacctaatgta

SEQ ID NO: 4822890 - DNA, 25 bp, Homo sapien
caaagagttcttccagtcgtcagat

SEQ ID NO: 4822891 - DNA, 25 bp, Homo sapien
tggacacatgtacgctggtgcctgc

SEQ ID NO: 4822892 - DNA, 25 bp, Homo sapien
cccgcatgggcgcttctctgttgaa

SEQ ID NO: 4822893 - DNA, 25 bp, Homo sapien
ctcacgggaaggtccagttgctgcc

SEQ ID NO: 4822894 - DNA, 25 bp, Homo sapien
tgtgcctcagaacagatccgaagtg

SEQ ID NO: 4822895 - DNA, 25 bp, Homo sapien
gaaggcagcatgtgaggcctctcct

SEQ ID NO: 4822896 - DNA, 25 bp, Homo sapien
acgctagaaggctggcgagaccgaa

SEQ ID NO: 4822897 - DNA, 25 bp, Homo sapien
tggcgactacgaggagctctaggcc

SEQ ID NO: 4822898 - DNA, 25 bp, Homo sapien
tgtgagcctgctctgcaagaaggga

SEQ ID NO: 4822899 - DNA, 25 bp, Homo sapien
tcacggacctggtcatcgactcgcg

SEQ ID NO: 4822900 - DNA, 25 bp, Homo sapien
agctggacgagctcatcacggacct

SEQ ID NO: 4822901 - DNA, 25 bp, Homo sapien
tgtccgagacgtcgctgacggagaa

SEQ ID NO: 4822902 - DNA, 25 bp, Homo sapien
tgggccgcaactggtacgtgacgcc

SEQ ID NO: 4822903 - DNA, 25 bp, Homo sapien
ctggacgacatcatgtgaggcgccg

SEQ ID NO: 4822904 - DNA, 25 bp, Homo sapien
gcggcgtcttcctgcgccacgagtt

SEQ ID NO: 4822905 - DNA, 25 bp, Homo sapien
gcgtctacgagcagctttgcgagtt

SEQ ID NO: 4822906 - DNA, 25 bp, Homo sapien
ttgcgagttcgtcgaggccaacagg

SEQ ID NO: 4822907 - DNA, 25 bp, Homo sapien
ggtgacgtgctgtccaccaggcctt

SEQ ID NO: 4822908 - DNA, 25 bp, Homo sapien
gagacaggctagcctggccacagaa

SEQ ID NO: 4822909 - DNA, 25 bp, Homo sapien
gactacgaggtcacctgggctaacg

SEQ ID NO: 4822910 - DNA, 25 bp, Homo sapien
ctgcggcagcctctggtgacgtgct

SEQ ID NO: 4822911 - DNA, 25 bp, Homo sapien
aggaggtctggcaagcccttgcgag

SEQ ID NO: 4822912 - DNA, 25 bp, Homo sapien
tggcaagcccttgcgagaggagtca

SEQ ID NO: 4822913 - DNA, 25 bp, Homo sapien
gcccgctgatggcctgactgctctt

SEQ ID NO: 4822914 - DNA, 25 bp, Homo sapien
ggccatcgtcctccagggcatcttg

SEQ ID NO: 4822915 - DNA, 25 bp, Homo sapien
ctgcgctcgccaaccctgcgagagg

SEQ ID NO: 4822916 - DNA, 25 bp, Homo sapien
tgacccatggcgcagagaccctgac

SEQ ID NO: 4822917 - DNA, 25 bp, Homo sapien
aggctggtacatggccgttggaacc

SEQ ID NO: 4822918 - DNA, 25 bp, Homo sapien
catggccgttggaacccaccgaggg

SEQ ID NO: 4822919 - DNA, 25 bp, Homo sapien
gagcgcactgatttcgaggctttgt

SEQ ID NO: 4822920 - DNA, 25 bp, Homo sapien
gtgaggagaacggaactggcggcca

SEQ ID NO: 4822921 - DNA, 25 bp, Homo sapien
tgttccgttcggcccgtgaggagaa

SEQ ID NO: 4822922 - DNA, 25 bp, Homo sapien
ggaacgagatcagctggagcgcact

SEQ ID NO: 4822923 - DNA, 25 bp, Homo sapien
tcatttcgccctaggccccttctcg

SEQ ID NO: 4822924 - DNA, 25 bp, Homo sapien
gccctaggccccttctcgatgggct

SEQ ID NO: 4822925 - DNA, 25 bp, Homo sapien
ccaatgtcctttccccggagcttga

SEQ ID NO: 4822926 - DNA, 25 bp, Homo sapien
tcgccctaggccccttctcgatggg

SEQ ID NO: 4822927 - DNA, 25 bp, Homo sapien
ctgggctctcagcacacgagcactc

SEQ ID NO: 4822928 - DNA, 25 bp, Homo sapien
acgccgctcccgtgcctcactgggc

SEQ ID NO: 4822929 - DNA, 25 bp, Homo sapien
tctcagcacacgagcactcctggtt

SEQ ID NO: 4822930 - DNA, 25 bp, Homo sapien
acacgagcactcctggttcccacat

SEQ ID NO: 4822931 - DNA, 25 bp, Homo sapien
ggctcagagaaccatcgccaacagc

SEQ ID NO: 4822932 - DNA, 25 bp, Homo sapien
tgatcaccttagacagcagagcatg

SEQ ID NO: 4822933 - DNA, 25 bp, Homo sapien
ggacccgctgtgctcaggctcagag

SEQ ID NO: 4822934 - DNA, 25 bp, Homo sapien
gcatgaacacccctctccggaagaa

SEQ ID NO: 4822935 - DNA, 25 bp, Homo sapien
gcaaagctccagaattcagagaaca

SEQ ID NO: 4822936 - DNA, 25 bp, Homo sapien
cagaattcagagaacaggggacccc

SEQ ID NO: 4822937 - DNA, 25 bp, Homo sapien
ccagaattcagagaacaggggaccc

SEQ ID NO: 4822938 - DNA, 25 bp, Homo sapien
aagctccagaattcagagaacaggg

SEQ ID NO: 4822939 - DNA, 25 bp, Homo sapien
tcagcggacccggcgaagggtggag

SEQ ID NO: 4822940 - DNA, 25 bp, Homo sapien
gctcgattttgccaagcacctggtt

SEQ ID NO: 4822941 - DNA, 25 bp, Homo sapien
caatggcccgctcgattttgccaag

SEQ ID NO: 4822942 - DNA, 25 bp, Homo sapien
aagcacctggttattgggtatggcc

SEQ ID NO: 4822943 - DNA, 25 bp, Homo sapien
ttgggtatggcccgtccgctctcat

SEQ ID NO: 4822944 - DNA, 25 bp, Homo sapien
atcacctgtggcttctcattgattt

SEQ ID NO: 4822945 - DNA, 25 bp, Homo sapien
tccgcgatcacctgtggcttctcat

SEQ ID NO: 4822946 - DNA, 25 bp, Homo sapien
gcgatcacctgtggcttctcattga

SEQ ID NO: 4822947 - DNA, 25 bp, Homo sapien
agtccgcgatcacctgtggcttctc

SEQ ID NO: 4822948 - DNA, 25 bp, Homo sapien
taatagaatgttgtttgttctggcc

SEQ ID NO: 4822949 - DNA, 25 bp, Homo sapien
tgccgaccttgctggatcaccttgc

SEQ ID NO: 4822950 - DNA, 25 bp, Homo sapien
gcttggccgtgttcttggtaataga

SEQ ID NO: 4822951 - DNA, 25 bp, Homo sapien
cagggtcaccctgtcatggtgcagc

SEQ ID NO: 4822952 - DNA, 25 bp, Homo sapien
cctcgtctctgtgccgctaagatag

SEQ ID NO: 4822953 - DNA, 25 bp, Homo sapien
ctcgtctctgtgccgctaagatagc

SEQ ID NO: 4822954 - DNA, 25 bp, Homo sapien
cctcggatccatcagccacattggt

SEQ ID NO: 4822955 - DNA, 25 bp, Homo sapien
acaagtactgttcagggcacgccca

SEQ ID NO: 4822956 - DNA, 25 bp, Homo sapien
cattggtaatctccttccacaagta

SEQ ID NO: 4822957 - DNA, 25 bp, Homo sapien
tactgttcagggcacgcccatcttc

SEQ ID NO: 4822958 - DNA, 25 bp, Homo sapien
gcggccgtagggcccttcttgcgca

SEQ ID NO: 4822959 - DNA, 25 bp, Homo sapien
ccttcttgcgcagcaccgtcaccgt

SEQ ID NO: 4822960 - DNA, 25 bp, Homo sapien
gccgtagggcccttcttgcgcagca

SEQ ID NO: 4822961 - DNA, 25 bp, Homo sapien
cccttcttgcgcagcaccgtcaccg

SEQ ID NO: 4822962 - DNA, 25 bp, Homo sapien
aagacgagcgtccgtccggcggctc

SEQ ID NO: 4822963 - DNA, 25 bp, Homo sapien
cgaagacgagcgtccgtccggcggc

SEQ ID NO: 4822964 - DNA, 25 bp, Homo sapien
gaagacgagcgtccgtccggcggct

SEQ ID NO: 4822965 - DNA, 25 bp, Homo sapien
agacgagcgtccgtccggcggctca

SEQ ID NO: 4822966 - DNA, 25 bp, Homo sapien
gctttcggcgtcccattggctggct

SEQ ID NO: 4822967 - DNA, 25 bp, Homo sapien
gcgccggcgacgtagggaaggcgac

SEQ ID NO: 4822968 - DNA, 25 bp, Homo sapien
tcgtctgagggacgtcgtggccggg

SEQ ID NO: 4822969 - DNA, 25 bp, Homo sapien
ccattcggcgttcggctcgtctgag

SEQ ID NO: 4822970 - DNA, 25 bp, Homo sapien
cgtgatccgcaggtgggactcttta

SEQ ID NO: 4822971 - DNA, 25 bp, Homo sapien
tcgtgatccgcaggtgggactcttt

SEQ ID NO: 4822972 - DNA, 25 bp, Homo sapien
tgatccgcaggtgggactctttaag

SEQ ID NO: 4822973 - DNA, 25 bp, Homo sapien
atccgcaggtgggactctttaagaa

SEQ ID NO: 4822974 - DNA, 25 bp, Homo sapien
tatctgtggctttaagtgaaagaca

SEQ ID NO: 4822975 - DNA, 25 bp, Homo sapien
gtgtatctgtggctttaagtgaaag

SEQ ID NO: 4822976 - DNA, 25 bp, Homo sapien
gtatctgtggctttaagtgaaagac

SEQ ID NO: 4822977 - DNA, 25 bp, Homo sapien
ttgtgtatctgtggctttaagtgaa

SEQ ID NO: 4822978 - DNA, 25 bp, Homo sapien
gaggaaaaataggtggataaacata

SEQ ID NO: 4822979 - DNA, 25 bp, Homo sapien
aggaaaaataggtggataaacatag

SEQ ID NO: 4822980 - DNA, 25 bp, Homo sapien
gagcaagtggactgcggctatttga

SEQ ID NO: 4822981 - DNA, 25 bp, Homo sapien
tgaaaaagaggcaagctctcggtgt

SEQ ID NO: 4822982 - DNA, 25 bp, Homo sapien
caagggtcccttgttcatggtcccg

SEQ ID NO: 4822983 - DNA, 25 bp, Homo sapien
aagctgggctctgtcgtcccaagac

SEQ ID NO: 4822984 - DNA, 25 bp, Homo sapien
actggcaccctcgtcaggacacgga

SEQ ID NO: 4822985 - DNA, 25 bp, Homo sapien
tggcaccctcgtcaggacacggagc

SEQ ID NO: 4822986 - DNA, 25 bp, Homo sapien
ctgctgtggtccatggtcatgccgc

SEQ ID NO: 4822987 - DNA, 25 bp, Homo sapien
tgtggtccatggtcatgccgcccct

SEQ ID NO: 4822988 - DNA, 25 bp, Homo sapien
caggtgcggacttgggacgtttcca

SEQ ID NO: 4822989 - DNA, 25 bp, Homo sapien
tgagagctcagttagttcctgggct

SEQ ID NO: 4822990 - DNA, 25 bp, Homo sapien
tgggcttgagcaacctcactgagcc

SEQ ID NO: 4822991 - DNA, 25 bp, Homo sapien
tgatggaatccgatggcttcctgag

SEQ ID NO: 4822992 - DNA, 25 bp, Homo sapien
tggtgtgtccagtgctagcccgtgc

SEQ ID NO: 4822993 - DNA, 25 bp, Homo sapien
catttcaccaaaggctggatggaga

SEQ ID NO: 4822994 - DNA, 25 bp, Homo sapien
tcccgttctcctgggcagatgacag

SEQ ID NO: 4822995 - DNA, 25 bp, Homo sapien
accgccagagagaacctgctgcagc

SEQ ID NO: 4822996 - DNA, 25 bp, Homo sapien
cactgtgtcagttggtcaccgcatg

SEQ ID NO: 4822997 - DNA, 25 bp, Homo sapien
tgttcagctcgtcaccgcgtgtgtg

SEQ ID NO: 4822998 - DNA, 25 bp, Homo sapien
tttgtgacagtcatccccgcatgct

SEQ ID NO: 4822999 - DNA, 25 bp, Homo sapien
acttgtgtgagagtcgcccctgcat

SEQ ID NO: 4823000 - DNA, 25 bp, Homo sapien
gctacgttcccgctctcagggctgg

SEQ ID NO: 4823001 - DNA, 25 bp, Homo sapien
caggtgtgctacgttcccgctctca

SEQ ID NO: 4823002 - DNA, 25 bp, Homo sapien
gtgtgctacgttcccgctctcaggg

SEQ ID NO: 4823003 - DNA, 25 bp, Homo sapien
ccccaggtgcgccacattcctgctc

SEQ ID NO: 4823004 - DNA, 25 bp, Homo sapien
ctggagttgctacagcccggcttct

SEQ ID NO: 4823005 - DNA, 25 bp, Homo sapien
gatgtgctccagttatcgatactcc

SEQ ID NO: 4823006 - DNA, 25 bp, Homo sapien
gctaggctggttttagagccacgct

SEQ ID NO: 4823007 - DNA, 25 bp, Homo sapien
cagagccgggtccagcttagatgtg

SEQ ID NO: 4823008 - DNA, 25 bp, Homo sapien
gctcagccgattgtatatgctggga

SEQ ID NO: 4823009 - DNA, 25 bp, Homo sapien
gagctctgcactaagcgttgggtga

SEQ ID NO: 4823010 - DNA, 25 bp, Homo sapien
gcagggaccagaaacaaaactcaca

SEQ ID NO: 4823011 - DNA, 25 bp, Homo sapien
actgctttctggtggcgaccttccc

SEQ ID NO: 4823012 - DNA, 25 bp, Homo sapien
tgaggcgttccggttctctttgggc

SEQ ID NO: 4823013 - DNA, 25 bp, Homo sapien
ccaggccacgtggcgggaattgagg

SEQ ID NO: 4823014 - DNA, 25 bp, Homo sapien
cacgtggcgggaattgaggcgttcc

SEQ ID NO: 4823015 - DNA, 25 bp, Homo sapien
aattgaggcgttccggttctctttg

SEQ ID NO: 4823016 - DNA, 25 bp, Homo sapien
acattcaattccatggatgttcaca

SEQ ID NO: 4823017 - DNA, 25 bp, Homo sapien
tcaattccatggatgttcacacctg

SEQ ID NO: 4823018 - DNA, 25 bp, Homo sapien
aattccatggatgttcacacctgtg

SEQ ID NO: 4823019 - DNA, 25 bp, Homo sapien
tccatggatgttcacacctgtgcag

SEQ ID NO: 4823020 - DNA, 25 bp, Homo sapien
tggggccatggcataatgttcatct

SEQ ID NO: 4823021 - DNA, 25 bp, Homo sapien
gggccatggcataatgttcatctgc

SEQ ID NO: 4823022 - DNA, 25 bp, Homo sapien
ggggccatggcataatgttcatctg

SEQ ID NO: 4823023 - DNA, 25 bp, Homo sapien
ctggggccatggcataatgttcatc

SEQ ID NO: 4823024 - DNA, 25 bp, Homo sapien
cccgcatgagtatctttggttagca

SEQ ID NO: 4823025 - DNA, 25 bp, Homo sapien
cctgtgaaggttgggcccacattgt

SEQ ID NO: 4823026 - DNA, 25 bp, Homo sapien
tgttgaagtctggttagcaggcact

SEQ ID NO: 4823027 - DNA, 25 bp, Homo sapien
tcgtgtgtcaagcaattttgggcta

SEQ ID NO: 4823028 - DNA, 25 bp, Homo sapien
ctttggttagcaggcacttggtcct

SEQ ID NO: 4823029 - DNA, 25 bp, Homo sapien
tctttggttagcaggcacttggtcc

SEQ ID NO: 4823030 - DNA, 25 bp, Homo sapien
tccccacgctgggtttggttgctgg

SEQ ID NO: 4823031 - DNA, 25 bp, Homo sapien
ggtgtgatcattagacccatgtgtc

SEQ ID NO: 4823032 - DNA, 25 bp, Homo sapien
actgagctgtgagggactttctggc

SEQ ID NO: 4823033 - DNA, 25 bp, Homo sapien
tgacatgcccttgactgggccgcgt

SEQ ID NO: 4823034 - DNA, 25 bp, Homo sapien
tgttgccaactgtttattcagggcc

SEQ ID NO: 4823035 - DNA, 25 bp, Homo sapien
acgggtggtgcgtggacatgcaaca

SEQ ID NO: 4823036 - DNA, 25 bp, Homo sapien
cccgggcgcacaaccacagccagga

SEQ ID NO: 4823037 - DNA, 25 bp, Homo sapien
acagcagcgtgaccggccgctccca

SEQ ID NO: 4823038 - DNA, 25 bp, Homo sapien
tgcgtggacatgcaacacactcggg

SEQ ID NO: 4823039 - DNA, 25 bp, Homo sapien
ccagctgggtcaggtgtacccctag

SEQ ID NO: 4823040 - DNA, 25 bp, Homo sapien
cagctgggtcaggtgtacccctagc

SEQ ID NO: 4823041 - DNA, 25 bp, Homo sapien
cccacaggaccagccgaaggtgccc

SEQ ID NO: 4823042 - DNA, 25 bp, Homo sapien
acaggaccagccgaaggtgccccgg

SEQ ID NO: 4823043 - DNA, 25 bp, Homo sapien
ggcgtaactgctataagcatctcca

SEQ ID NO: 4823044 - DNA, 25 bp, Homo sapien
agcggcacccccagtatcctgtgta

SEQ ID NO: 4823045 - DNA, 25 bp, Homo sapien
tgtccccttcctaaggcgtaactgc

SEQ ID NO: 4823046 - DNA, 25 bp, Homo sapien
cgtgccaagcatcacagctgcgtga

SEQ ID NO: 4823047 - DNA, 25 bp, Homo sapien
aaggggtcccggtggctccagtgca

SEQ ID NO: 4823048 - DNA, 25 bp, Homo sapien
gggtcccggtggctccagtgcaccc

SEQ ID NO: 4823049 - DNA, 25 bp, Homo sapien
aggggtcccggtggctccagtgcac

SEQ ID NO: 4823050 - DNA, 25 bp, Homo sapien
tcaaggggtcccggtggctccagtg

SEQ ID NO: 4823051 - DNA, 25 bp, Homo sapien
gaccactgagttgaccacatcctcg

SEQ ID NO: 4823052 - DNA, 25 bp, Homo sapien
aggagaagaaggtgcgaggccgtgg

SEQ ID NO: 4823053 - DNA, 25 bp, Homo sapien
ctggaggacgcgcatggtgcgtggg

SEQ ID NO: 4823054 - DNA, 25 bp, Homo sapien
caggctttgatggtggcgtcgtcgc

SEQ ID NO: 4823055 - DNA, 25 bp, Homo sapien
ttgtagtggcggtcccagatgtagc

SEQ ID NO: 4823056 - DNA, 25 bp, Homo sapien
atgttgtagtggcggtcccagatgt

SEQ ID NO: 4823057 - DNA, 25 bp, Homo sapien
cggtcccagatgtagccgtgccggt

SEQ ID NO: 4823058 - DNA, 25 bp, Homo sapien
tagtggcggtcccagatgtagccgt

SEQ ID NO: 4823059 - DNA, 25 bp, Homo sapien
ccgccctgcaccacgccgcgccctg

SEQ ID NO: 4823060 - DNA, 25 bp, Homo sapien
aacagcgcctgggtgagccggccgc

SEQ ID NO: 4823061 - DNA, 25 bp, Homo sapien
ctgcagaacagcgcctgggtgagcc

SEQ ID NO: 4823062 - DNA, 25 bp, Homo sapien
gcagaacagcgcctgggtgagccgg

SEQ ID NO: 4823063 - DNA, 25 bp, Homo sapien
caggcgcggctgttcacgtacaggt

SEQ ID NO: 4823064 - DNA, 25 bp, Homo sapien
atggtcttgaggtcgaacaccagca

SEQ ID NO: 4823065 - DNA, 25 bp, Homo sapien
gatgaagaagcactcgtcgttgggc

SEQ ID NO: 4823066 - DNA, 25 bp, Homo sapien
gcaggtcaatctcctccgcgattgg

SEQ ID NO: 4823067 - DNA, 25 bp, Homo sapien
tgcgggcaccccgcctgggacactg

SEQ ID NO: 4823068 - DNA, 25 bp, Homo sapien
cgcctgcgggcaccccgcctgggac

SEQ ID NO: 4823069 - DNA, 25 bp, Homo sapien
cctgcgggcaccccgcctgggacac

SEQ ID NO: 4823070 - DNA, 25 bp, Homo sapien
gccgcctgcgggcaccccgcctggg

SEQ ID NO: 4823071 - DNA, 25 bp, Homo sapien
tatgacgtggtccagcgcgtcgaag

SEQ ID NO: 4823072 - DNA, 25 bp, Homo sapien
tcgaagaaggcatcggagccccggc

SEQ ID NO: 4823073 - DNA, 25 bp, Homo sapien
tgtccgtgtatgtctatgacgtggt

SEQ ID NO: 4823074 - DNA, 25 bp, Homo sapien
ccagcgcgtcgaagaaggcatcgga

SEQ ID NO: 4823075 - DNA, 25 bp, Homo sapien
tggtgtggcaggatctgcttgatgc

SEQ ID NO: 4823076 - DNA, 25 bp, Homo sapien
ctggtgtggcaggatctgcttgatg

SEQ ID NO: 4823077 - DNA, 25 bp, Homo sapien
tgcagggagggctacggtgagggtc

SEQ ID NO: 4823078 - DNA, 25 bp, Homo sapien
gcagggagggctacggtgagggtcc

SEQ ID NO: 4823079 - DNA, 25 bp, Homo sapien
ctgcagggagggctacggtgagggt

SEQ ID NO: 4823080 - DNA, 25 bp, Homo sapien
ggcgagtgaacgatcccagctttgc

SEQ ID NO: 4823081 - DNA, 25 bp, Homo sapien
cagacctgaatcaggcccgtcggtt

SEQ ID NO: 4823082 - DNA, 25 bp, Homo sapien
cggttgcttgctggccagcggccct

SEQ ID NO: 4823083 - DNA, 25 bp, Homo sapien
gccctgcctgcgtttgttttcactg

SEQ ID NO: 4823084 - DNA, 25 bp, Homo sapien
tctggtgtggggagtaggtgaggca

SEQ ID NO: 4823085 - DNA, 25 bp, Homo sapien
gagtaggtgaggcagccagtggtga

SEQ ID NO: 4823086 - DNA, 25 bp, Homo sapien
atctggtgtggggagtaggtgaggc

SEQ ID NO: 4823087 - DNA, 25 bp, Homo sapien
gcagccagtggtgaagatgaggtac

SEQ ID NO: 4823088 - DNA, 25 bp, Homo sapien
cgcctgtggcactgcgctcgggtgg

SEQ ID NO: 4823089 - DNA, 25 bp, Homo sapien
tcttggcgcctgtggcactgcgctc

SEQ ID NO: 4823090 - DNA, 25 bp, Homo sapien
cttggcgcctgtggcactgcgctcg

SEQ ID NO: 4823091 - DNA, 25 bp, Homo sapien
tggcgcctgtggcactgcgctcggg

SEQ ID NO: 4823092 - DNA, 25 bp, Homo sapien
ggccctgggccagcagctcggccac

SEQ ID NO: 4823093 - DNA, 25 bp, Homo sapien
cttggtgtggccctgggccagcagc

SEQ ID NO: 4823094 - DNA, 25 bp, Homo sapien
tggccctgggccagcagctcggcca

SEQ ID NO: 4823095 - DNA, 25 bp, Homo sapien
gtgtggccctgggccagcagctcgg

SEQ ID NO: 4823096 - DNA, 25 bp, Homo sapien
ctctagcatgcgctccgacagctgt

SEQ ID NO: 4823097 - DNA, 25 bp, Homo sapien
gcatgcgctccgacagctgtggctg

SEQ ID NO: 4823098 - DNA, 25 bp, Homo sapien
ctccagcacgcggtccagaaagtgc

SEQ ID NO: 4823099 - DNA, 25 bp, Homo sapien
ggtccagaaagtgccgcaagccctc

SEQ ID NO: 4823100 - DNA, 25 bp, Homo sapien
tgggcgggggccgggccagccacca

SEQ ID NO: 4823101 - DNA, 25 bp, Homo sapien
tggcgtgggcgggggccgggccagc

SEQ ID NO: 4823102 - DNA, 25 bp, Homo sapien
gcgtgggcgggggccgggccagcca

SEQ ID NO: 4823103 - DNA, 25 bp, Homo sapien
gacgtggccgggtcaccggcttcca

SEQ ID NO: 4823104 - DNA, 25 bp, Homo sapien
tgctggcattgaggttctggatctt

SEQ ID NO: 4823105 - DNA, 25 bp, Homo sapien
agcaggtcagggctgtcgaagcggc

SEQ ID NO: 4823106 - DNA, 25 bp, Homo sapien
tcaccgtgcggacggtgctggcatt

SEQ ID NO: 4823107 - DNA, 25 bp, Homo sapien
accacgttgacgttctctgactcca

SEQ ID NO: 4823108 - DNA, 25 bp, Homo sapien
ccacgttgacgttctctgactccac

SEQ ID NO: 4823109 - DNA, 25 bp, Homo sapien
caccacgttgacgttctctgactcc

SEQ ID NO: 4823110 - DNA, 25 bp, Homo sapien
tcaccacgttgacgttctctgactc

SEQ ID NO: 4823111 - DNA, 25 bp, Homo sapien
gcacgtgccaggtgggcgccgggcg

SEQ ID NO: 4823112 - DNA, 25 bp, Homo sapien
tgggggcgggggcacgtgccaggtg

SEQ ID NO: 4823113 - DNA, 25 bp, Homo sapien
gcgccgggcgccaggccccaggagg

SEQ ID NO: 4823114 - DNA, 25 bp, Homo sapien
gccccgcccctagccccgcacgcac

SEQ ID NO: 4823115 - DNA, 25 bp, Homo sapien
gaggtgatatctccgatgcggtgca

SEQ ID NO: 4823116 - DNA, 25 bp, Homo sapien
cacagcaccgagcaggaggtgatat

SEQ ID NO: 4823117 - DNA, 25 bp, Homo sapien
gctggtctcggtgagccaacagcca

SEQ ID NO: 4823118 - DNA, 25 bp, Homo sapien
caggttccccgagatgaggctggtc

SEQ ID NO: 4823119 - DNA, 25 bp, Homo sapien
agggcttgttccgcacgcgggacag

SEQ ID NO: 4823120 - DNA, 25 bp, Homo sapien
atagggcttgttccgcacgcgggac

SEQ ID NO: 4823121 - DNA, 25 bp, Homo sapien
tcatagggcttgttccgcacgcggg

SEQ ID NO: 4823122 - DNA, 25 bp, Homo sapien
catagggcttgttccgcacgcggga

SEQ ID NO: 4823123 - DNA, 25 bp, Homo sapien
ggacaggctgtcggcgtggggcggg

SEQ ID NO: 4823124 - DNA, 25 bp, Homo sapien
gacaggctgtcggcgtggggcgggg

SEQ ID NO: 4823125 - DNA, 25 bp, Homo sapien
ggcagggtcaacccgccgcccgtgc

SEQ ID NO: 4823126 - DNA, 25 bp, Homo sapien
agggtcaacccgccgcccgtgctca

SEQ ID NO: 4823127 - DNA, 25 bp, Homo sapien
taggctgatgacagcaatctcgccg

SEQ ID NO: 4823128 - DNA, 25 bp, Homo sapien
tagctccagttgtagggccgcatgt

SEQ ID NO: 4823129 - DNA, 25 bp, Homo sapien
gaggccagcagtagcgagtcgtcct

SEQ ID NO: 4823130 - DNA, 25 bp, Homo sapien
gcgagatggtcaggtcgttgctcca

SEQ ID NO: 4823131 - DNA, 25 bp, Homo sapien
ttcggcaggggcggctgtagtgatc

SEQ ID NO: 4823132 - DNA, 25 bp, Homo sapien
cggcaggggcggctgtagtgatcgc

SEQ ID NO: 4823133 - DNA, 25 bp, Homo sapien
ctgttcggcaggggcggctgtagtg

SEQ ID NO: 4823134 - DNA, 25 bp, Homo sapien
tgttcggcaggggcggctgtagtga

SEQ ID NO: 4823135 - DNA, 25 bp, Homo sapien
caggtcgcggggcgggggcctgcta

SEQ ID NO: 4823136 - DNA, 25 bp, Homo sapien
gccaggtcgcggggcgggggcctgc

SEQ ID NO: 4823137 - DNA, 25 bp, Homo sapien
ccaggtcgcggggcgggggcctgct

SEQ ID NO: 4823138 - DNA, 25 bp, Homo sapien
ccttggagcaggacgcgaactggta

SEQ ID NO: 4823139 - DNA, 25 bp, Homo sapien
gccgctggaactcctcgtaccagga

SEQ ID NO: 4823140 - DNA, 25 bp, Homo sapien
actggtacccggaatgggagaagct

SEQ ID NO: 4823141 - DNA, 25 bp, Homo sapien
ggcaccgtgtcatacagccgctgga

SEQ ID NO: 4823142 - DNA, 25 bp, Homo sapien
acgtcgcgggccacctggtagtagc

SEQ ID NO: 4823143 - DNA, 25 bp, Homo sapien
gacacggcctgccattggcggcaca

SEQ ID NO: 4823144 - DNA, 25 bp, Homo sapien
ctccacaggaactcgtcccgcgaca

SEQ ID NO: 4823145 - DNA, 25 bp, Homo sapien
acaggaactcgtcccgcgacacggc

SEQ ID NO: 4823146 - DNA, 25 bp, Homo sapien
tgtcggggagcaggggcgtgccgcc

SEQ ID NO: 4823147 - DNA, 25 bp, Homo sapien
ctgtcggggagcaggggcgtgccgc

SEQ ID NO: 4823148 - DNA, 25 bp, Homo sapien
ggagcaggggcgtgccgccctcgtc

SEQ ID NO: 4823149 - DNA, 25 bp, Homo sapien
cggggagcaggggcgtgccgccctc

SEQ ID NO: 4823150 - DNA, 25 bp, Homo sapien
gggaggccgagagcgggcgtcctgt

SEQ ID NO: 4823151 - DNA, 25 bp, Homo sapien
gccgagagcgggcgtcctgttcctc

SEQ ID NO: 4823152 - DNA, 25 bp, Homo sapien
ggaagggaggccgagagcgggcgtc

SEQ ID NO: 4823153 - DNA, 25 bp, Homo sapien
agagcgggcgtcctgttcctccagc

SEQ ID NO: 4823154 - DNA, 25 bp, Homo sapien
caggcccgacgccacgagccccgag

SEQ ID NO: 4823155 - DNA, 25 bp, Homo sapien
gccacgagccccgaggcatcgatgg

SEQ ID NO: 4823156 - DNA, 25 bp, Homo sapien
ctgcgcgacccggacccgcttccgc

SEQ ID NO: 4823157 - DNA, 25 bp, Homo sapien
gcgcgacccggacccgcttccgctg

SEQ ID NO: 4823158 - DNA, 25 bp, Homo sapien
cctgcagggccctgattgggcggcg

SEQ ID NO: 4823159 - DNA, 25 bp, Homo sapien
aatcacgttagacgggaggagcagc

SEQ ID NO: 4823160 - DNA, 25 bp, Homo sapien
ttgggcggcggaggtcacgtgccca

SEQ ID NO: 4823161 - DNA, 25 bp, Homo sapien
aacccattgtcgtgtccgggaggct

SEQ ID NO: 4823162 - DNA, 25 bp, Homo sapien
ggcacacacagaccccccagggcgg

SEQ ID NO: 4823163 - DNA, 25 bp, Homo sapien
cccccagggcggcaggagtgggtct

SEQ ID NO: 4823164 - DNA, 25 bp, Homo sapien
acagaccccccagggcggcaggagt

SEQ ID NO: 4823165 - DNA, 25 bp, Homo sapien
tggaggcacacacagaccccccagg

SEQ ID NO: 4823166 - DNA, 25 bp, Homo sapien
tgcagcaggggatggcttctgcatg

SEQ ID NO: 4823167 - DNA, 25 bp, Homo sapien
cagcaggggatggcttctgcatggg

SEQ ID NO: 4823168 - DNA, 25 bp, Homo sapien
gcagcaggggatggcttctgcatgg

SEQ ID NO: 4823169 - DNA, 25 bp, Homo sapien
ggctggcttccgtgcctccagtggc

SEQ ID NO: 4823170 - DNA, 25 bp, Homo sapien
ctgtgcctgcgacggtgaccacagg

SEQ ID NO: 4823171 - DNA, 25 bp, Homo sapien
gcctgtgcctgcgacggtgaccaca

SEQ ID NO: 4823172 - DNA, 25 bp, Homo sapien
cctgtgcctgcgacggtgaccacag

SEQ ID NO: 4823173 - DNA, 25 bp, Homo sapien
gcgggggttgaatgttctatggcca

SEQ ID NO: 4823174 - DNA, 25 bp, Homo sapien
gggcgggggttgaatgttctatggc

SEQ ID NO: 4823175 - DNA, 25 bp, Homo sapien
gggttgaatgttctatggccagggt

SEQ ID NO: 4823176 - DNA, 25 bp, Homo sapien
ttgaatgttctatggccagggtgag

SEQ ID NO: 4823177 - DNA, 25 bp, Homo sapien
tcatcgaggtgtgcgactcaggtgc

SEQ ID NO: 4823178 - DNA, 25 bp, Homo sapien
cgtattgctgtgagacggctcccac

SEQ ID NO: 4823179 - DNA, 25 bp, Homo sapien
cccacggtgggacatggtgatgcca

SEQ ID NO: 4823180 - DNA, 25 bp, Homo sapien
tcttgccgtgtgtgggtgaaactcc

SEQ ID NO: 4823181 - DNA, 25 bp, Homo sapien
gcctggggctgttgcacagagatga

SEQ ID NO: 4823182 - DNA, 25 bp, Homo sapien
caggaactcgagtggaagccccacc

SEQ ID NO: 4823183 - DNA, 25 bp, Homo sapien
ctcaggaactcgagtggaagcccca

SEQ ID NO: 4823184 - DNA, 25 bp, Homo sapien
tcaggaactcgagtggaagccccac

SEQ ID NO: 4823185 - DNA, 25 bp, Homo sapien
tctctttatcttggccgagagcagc

SEQ ID NO: 4823186 - DNA, 25 bp, Homo sapien
gatccggtctctttatcttggccga

SEQ ID NO: 4823187 - DNA, 25 bp, Homo sapien
ctgcctgatccggtctctttatctt

SEQ ID NO: 4823188 - DNA, 25 bp, Homo sapien
ccggtctctttatcttggccgagag

SEQ ID NO: 4823189 - DNA, 25 bp, Homo sapien
tccctgcctgactcgggacacagag

SEQ ID NO: 4823190 - DNA, 25 bp, Homo sapien
tgggaggatgccgatgagcgtcttg

SEQ ID NO: 4823191 - DNA, 25 bp, Homo sapien
agatgccagcatgaggacggcccag

SEQ ID NO: 4823192 - DNA, 25 bp, Homo sapien
atgccgatgagcgtcttgccccgtc

SEQ ID NO: 4823193 - DNA, 25 bp, Homo sapien
gggtccttccgcattcaaggcaggc

SEQ ID NO: 4823194 - DNA, 25 bp, Homo sapien
gtgaagccggcgggtccttccgcat

SEQ ID NO: 4823195 - DNA, 25 bp, Homo sapien
ttcaaggcaggcgtcctctttctgt

SEQ ID NO: 4823196 - DNA, 25 bp, Homo sapien
tctttctgtcgatggggccccaggc

SEQ ID NO: 4823197 - DNA, 25 bp, Homo sapien
actggacgcgaagccccagaaagcc

SEQ ID NO: 4823198 - DNA, 25 bp, Homo sapien
tcatctccagcgacggaaacacagc

SEQ ID NO: 4823199 - DNA, 25 bp, Homo sapien
tccagcgacggaaacacagcagtgg

SEQ ID NO: 4823200 - DNA, 25 bp, Homo sapien
tcaggcagcgagaaaggtggtgcac

SEQ ID NO: 4823201 - DNA, 25 bp, Homo sapien
ggggctggcggtcaacactttcagg

SEQ ID NO: 4823202 - DNA, 25 bp, Homo sapien
aattcaggatgttggtggcagccgt

SEQ ID NO: 4823203 - DNA, 25 bp, Homo sapien
gtggtcatgtccagcctgctcacct

SEQ ID NO: 4823204 - DNA, 25 bp, Homo sapien
ggtcccaattcaggatgttggtggc

SEQ ID NO: 4823205 - DNA, 25 bp, Homo sapien
aggggaagatcagggcagggtgcag

SEQ ID NO: 4823206 - DNA, 25 bp, Homo sapien
cagcacagctgtggggcccctgctt

SEQ ID NO: 4823207 - DNA, 25 bp, Homo sapien
gaggagcctgtcctgagacccaggg

SEQ ID NO: 4823208 - DNA, 25 bp, Homo sapien
ccccggggcctgcagtttggaggag

SEQ ID NO: 4823209 - DNA, 25 bp, Homo sapien
ttgtccatgtgcaagtctgtggtgg

SEQ ID NO: 4823210 - DNA, 25 bp, Homo sapien
ctgccacggatggtggcctcaacct

SEQ ID NO: 4823211 - DNA, 25 bp, Homo sapien
ctggctccgggagaagaaggcggcg

SEQ ID NO: 4823212 - DNA, 25 bp, Homo sapien
accggaggagtagacggcagaggcg

SEQ ID NO: 4823213 - DNA, 25 bp, Homo sapien
ctgcggctgcaccaggaatcctggt

SEQ ID NO: 4823214 - DNA, 25 bp, Homo sapien
ggctgagtccccgacagggttgtct

SEQ ID NO: 4823215 - DNA, 25 bp, Homo sapien
cagtggtggagaccgactacgacca

SEQ ID NO: 4823216 - DNA, 25 bp, Homo sapien
tcttcacttccggttctggcagcga

SEQ ID NO: 4823217 - DNA, 25 bp, Homo sapien
gcccttcagatgtcaggacaccctc

SEQ ID NO: 4823218 - DNA, 25 bp, Homo sapien
ctttattgggcgacagacgcggggt

SEQ ID NO: 4823219 - DNA, 25 bp, Homo sapien
tgcctttattgggcgacagacgcgg

SEQ ID NO: 4823220 - DNA, 25 bp, Homo sapien
agatgcctttattgggcgacagacg

SEQ ID NO: 4823221 - DNA, 25 bp, Homo sapien
tttattgggcgacagacgcggggtg

SEQ ID NO: 4823222 - DNA, 25 bp, Homo sapien
atctcggcgctgtgcggacacgtgt

SEQ ID NO: 4823223 - DNA, 25 bp, Homo sapien
atcgcgctgtccaggtagcggcgta

SEQ ID NO: 4823224 - DNA, 25 bp, Homo sapien
cctggcggaagtgcgcgcacaccgt

SEQ ID NO: 4823225 - DNA, 25 bp, Homo sapien
gacacgtgtatttgaactctttctc

SEQ ID NO: 4823226 - DNA, 25 bp, Homo sapien
cggggcgcggtcaggacctgccgtc

SEQ ID NO: 4823227 - DNA, 25 bp, Homo sapien
aggcgcgccgcggtcaccctcccgc

SEQ ID NO: 4823228 - DNA, 25 bp, Homo sapien
ggcgcggtcaggacctgccgtcccc

SEQ ID NO: 4823229 - DNA, 25 bp, Homo sapien
cccaggcgcgccgcggtcaccctcc

SEQ ID NO: 4823230 - DNA, 25 bp, Homo sapien
agctcgtgctccaggggcgcgcgca

SEQ ID NO: 4823231 - DNA, 25 bp, Homo sapien
cgcaggtagctgtccagcctggcga

SEQ ID NO: 4823232 - DNA, 25 bp, Homo sapien
gcgcgcgcaggtagctgtccagcct

SEQ ID NO: 4823233 - DNA, 25 bp, Homo sapien
tcggccagcgtgagcctgtcgccgt

SEQ ID NO: 4823234 - DNA, 25 bp, Homo sapien
caggcggcgcggtgaggaccaggcc

SEQ ID NO: 4823235 - DNA, 25 bp, Homo sapien
gatgaacgcggagaacttgtggaaa

SEQ ID NO: 4823236 - DNA, 25 bp, Homo sapien
cttgtggaaaacgtcgttgccggcg

SEQ ID NO: 4823237 - DNA, 25 bp, Homo sapien
cgggcaccgggttcttgatgaacgc

SEQ ID NO: 4823238 - DNA, 25 bp, Homo sapien
tcctgcgcgggcaccgggttcttga

SEQ ID NO: 4823239 - DNA, 25 bp, Homo sapien
tgtaacgaggcgccaggctggggaa

SEQ ID NO: 4823240 - DNA, 25 bp, Homo sapien
gtaacgaggcgccaggctggggaag

SEQ ID NO: 4823241 - DNA, 25 bp, Homo sapien
ctgtaacgaggcgccaggctgggga

SEQ ID NO: 4823242 - DNA, 25 bp, Homo sapien
gatctgcagcgtgtctgtcttggcg

SEQ ID NO: 4823243 - DNA, 25 bp, Homo sapien
tcttggcgtcgctgtcatagagcag

SEQ ID NO: 4823244 - DNA, 25 bp, Homo sapien
ggcgaagtccttcagcacgtccggg

SEQ ID NO: 4823245 - DNA, 25 bp, Homo sapien
gagcaggatgggcagctgcgagccg

SEQ ID NO: 4823246 - DNA, 25 bp, Homo sapien
cgggggtccacaggatggggcctca

SEQ ID NO: 4823247 - DNA, 25 bp, Homo sapien
gggggtccacaggatggggcctcac

SEQ ID NO: 4823248 - DNA, 25 bp, Homo sapien
gcgggggtccacaggatggggcctc

SEQ ID NO: 4823249 - DNA, 25 bp, Homo sapien
caccgtggtgagggtgaaaggtacg

SEQ ID NO: 4823250 - DNA, 25 bp, Homo sapien
gtgagggtgaaaggtacgcccttga

SEQ ID NO: 4823251 - DNA, 25 bp, Homo sapien
gtgaaaggtacgcccttgaggagca

SEQ ID NO: 4823252 - DNA, 25 bp, Homo sapien
gaaaggtacgcccttgaggagcagg

SEQ ID NO: 4823253 - DNA, 25 bp, Homo sapien
gggcagtgacccacgctctccccgt

SEQ ID NO: 4823254 - DNA, 25 bp, Homo sapien
gaggggcagtgacccacgctctccc

SEQ ID NO: 4823255 - DNA, 25 bp, Homo sapien
ggggcagtgacccacgctctccccg

SEQ ID NO: 4823256 - DNA, 25 bp, Homo sapien
aggggcagtgacccacgctctcccc

SEQ ID NO: 4823257 - DNA, 25 bp, Homo sapien
cacagcctgccacagaaagcaaagc

SEQ ID NO: 4823258 - DNA, 25 bp, Homo sapien
tcagacattactgggaggcccaccc

SEQ ID NO: 4823259 - DNA, 25 bp, Homo sapien
ctccccgcagctgagtccgccctgc

SEQ ID NO: 4823260 - DNA, 25 bp, Homo sapien
tttactcagcctctgtagggctgcc

SEQ ID NO: 4823261 - DNA, 25 bp, Homo sapien
cttgacaaacagctggagcttggtc

SEQ ID NO: 4823262 - DNA, 25 bp, Homo sapien
caaacagctggagcttggtctccgc

SEQ ID NO: 4823263 - DNA, 25 bp, Homo sapien
acagctggagcttggtctccgccat

SEQ ID NO: 4823264 - DNA, 25 bp, Homo sapien
gacaaacagctggagcttggtctcc

SEQ ID NO: 4823265 - DNA, 25 bp, Homo sapien
agctgccgcggtcaggcgcgggtgg

SEQ ID NO: 4823266 - DNA, 25 bp, Homo sapien
tgacctcagggtggcggaatggtgt

SEQ ID NO: 4823267 - DNA, 25 bp, Homo sapien
cacctaggcgggcagatgaagctgc

SEQ ID NO: 4823268 - DNA, 25 bp, Homo sapien
ctttaagtctccctgtgcgccccgc

SEQ ID NO: 4823269 - DNA, 25 bp, Homo sapien
aataaatacgggactgacccagctc

SEQ ID NO: 4823270 - DNA, 25 bp, Homo sapien
cagaccccgaggctttaaggcaaag

SEQ ID NO: 4823271 - DNA, 25 bp, Homo sapien
gcatcagccttcatcgtaagagaga

SEQ ID NO: 4823272 - DNA, 25 bp, Homo sapien
tctgtgcgctatgtacaggcccggc

SEQ ID NO: 4823273 - DNA, 25 bp, Homo sapien
cagcagagcgtgtccgtgttgaagg

SEQ ID NO: 4823274 - DNA, 25 bp, Homo sapien
agcagagcgtgtccgtgttgaagga

SEQ ID NO: 4823275 - DNA, 25 bp, Homo sapien
tcagcagagcgtgtccgtgttgaag

SEQ ID NO: 4823276 - DNA, 25 bp, Homo sapien
tgcagttacgtctctccaggcctat

SEQ ID NO: 4823277 - DNA, 25 bp, Homo sapien
gctctgtgcccctcaaagactctag

SEQ ID NO: 4823278 - DNA, 25 bp, Homo sapien
gacctctggacagcaagcatcctgg

SEQ ID NO: 4823279 - DNA, 25 bp, Homo sapien
gactctagcaagtctggaccatgca

SEQ ID NO: 4823280 - DNA, 25 bp, Homo sapien
tcgaagctgatgaggccctcgtcct

SEQ ID NO: 4823281 - DNA, 25 bp, Homo sapien
gcggatggcggctccgtctcctgct

SEQ ID NO: 4823282 - DNA, 25 bp, Homo sapien
gtcctcgggctcgtctgccacaagt

SEQ ID NO: 4823283 - DNA, 25 bp, Homo sapien
gtgtccaggtcctcgggctcgtctg

SEQ ID NO: 4823284 - DNA, 25 bp, Homo sapien
tgcttcttggcaaagttcacgaaca

SEQ ID NO: 4823285 - DNA, 25 bp, Homo sapien
ctgcttcttggcaaagttcacgaac

SEQ ID NO: 4823286 - DNA, 25 bp, Homo sapien
gcttcttggcaaagttcacgaacac

SEQ ID NO: 4823287 - DNA, 25 bp, Homo sapien
tgcgcagtgcccttggggcgctcac

SEQ ID NO: 4823288 - DNA, 25 bp, Homo sapien
ctggtgggtggcgcaggcgtgtggg

SEQ ID NO: 4823289 - DNA, 25 bp, Homo sapien
ggaggggcaggtgtggtgcgcagtg

SEQ ID NO: 4823290 - DNA, 25 bp, Homo sapien
aggtgtggtgcgcagtgcccttggg

SEQ ID NO: 4823291 - DNA, 25 bp, Homo sapien
gggccagcgagatgtgctccgactt

SEQ ID NO: 4823292 - DNA, 25 bp, Homo sapien
tactgcacctttgtgtggtgccgct

SEQ ID NO: 4823293 - DNA, 25 bp, Homo sapien
gtctggctgaccgagtagtcctcga

SEQ ID NO: 4823294 - DNA, 25 bp, Homo sapien
gatgtgctccgacttgagctggtac

SEQ ID NO: 4823295 - DNA, 25 bp, Homo sapien
gttgaagaaccgcaccacgtccttc

SEQ ID NO: 4823296 - DNA, 25 bp, Homo sapien
ccgcaccgtgatcatgtagccatct

SEQ ID NO: 4823297 - DNA, 25 bp, Homo sapien
tctggctgctcttggtccgcaccgt

SEQ ID NO: 4823298 - DNA, 25 bp, Homo sapien
gaagttgcggttgaagaaccgcacc

SEQ ID NO: 4823299 - DNA, 25 bp, Homo sapien
gcaggcgaccgttcaccatgatggc

SEQ ID NO: 4823300 - DNA, 25 bp, Homo sapien
ggccagccgcgtgcacagcgcctcg

SEQ ID NO: 4823301 - DNA, 25 bp, Homo sapien
ccaggcaccgcaggcgaccgttcac

SEQ ID NO: 4823302 - DNA, 25 bp, Homo sapien
ggcaccgcaggcgaccgttcaccat

SEQ ID NO: 4823303 - DNA, 25 bp, Homo sapien
cagcaccactgaacgccctgtcttg

SEQ ID NO: 4823304 - DNA, 25 bp, Homo sapien
ccactgaacgccctgtcttgatgag

SEQ ID NO: 4823305 - DNA, 25 bp, Homo sapien
gcaccactgaacgccctgtcttgat

SEQ ID NO: 4823306 - DNA, 25 bp, Homo sapien
accactgaacgccctgtcttgatga

SEQ ID NO: 4823307 - DNA, 25 bp, Homo sapien
ggtgccagccggcttgtctgcgtac

SEQ ID NO: 4823308 - DNA, 25 bp, Homo sapien
tgtctgcgtacttggtcagctccag

SEQ ID NO: 4823309 - DNA, 25 bp, Homo sapien
ttgttgccgccgctgtaggtgccag

SEQ ID NO: 4823310 - DNA, 25 bp, Homo sapien
ggtacccaatgagggcgatggccgt

SEQ ID NO: 4823311 - DNA, 25 bp, Homo sapien
agccgcgtgtacagctgcaggtgct

SEQ ID NO: 4823312 - DNA, 25 bp, Homo sapien
gctcccgggccgtgagctcgtcgaa

SEQ ID NO: 4823313 - DNA, 25 bp, Homo sapien
gctcgtcgaacagcgcgtcacactg

SEQ ID NO: 4823314 - DNA, 25 bp, Homo sapien
tcgtccttccaggagatcccacgca

SEQ ID NO: 4823315 - DNA, 25 bp, Homo sapien
accgttgacgcccaggagcccgaag

SEQ ID NO: 4823316 - DNA, 25 bp, Homo sapien
ctctcgtcgccggtcagcatcttga

SEQ ID NO: 4823317 - DNA, 25 bp, Homo sapien
gcacaggcggtcaacggccaggata

SEQ ID NO: 4823318 - DNA, 25 bp, Homo sapien
tgtgtccattgacgaaggcctcgcc

SEQ ID NO: 4823319 - DNA, 25 bp, Homo sapien
caggccccaccctacatgcccagag

SEQ ID NO: 4823320 - DNA, 25 bp, Homo sapien
ccaggccccaccctacatgcccaga

SEQ ID NO: 4823321 - DNA, 25 bp, Homo sapien
aggccccaccctacatgcccagagc

SEQ ID NO: 4823322 - DNA, 25 bp, Homo sapien
gaccatgtcattgtcggcgtctccc

SEQ ID NO: 4823323 - DNA, 25 bp, Homo sapien
tctccccggagcactcgctgccgct

SEQ ID NO: 4823324 - DNA, 25 bp, Homo sapien
ggagcactcgctgccgctcactggc

SEQ ID NO: 4823325 - DNA, 25 bp, Homo sapien
tgaccatgtcattgtcggcgtctcc

SEQ ID NO: 4823326 - DNA, 25 bp, Homo sapien
cacatgatggtcaggaggaagccca

SEQ ID NO: 4823327 - DNA, 25 bp, Homo sapien
gggtgacaatgtcccactcgaacgg

SEQ ID NO: 4823328 - DNA, 25 bp, Homo sapien
catggccaccagtccgcgggtgaca

SEQ ID NO: 4823329 - DNA, 25 bp, Homo sapien
gccgccgcaggaagttgtactggca

SEQ ID NO: 4823330 - DNA, 25 bp, Homo sapien
catgagcccgtggcccaggttgtag

SEQ ID NO: 4823331 - DNA, 25 bp, Homo sapien
ggtaactgttgacaaccttcaggtc

SEQ ID NO: 4823332 - DNA, 25 bp, Homo sapien
caatcttggcgtagtactcgttgat

SEQ ID NO: 4823333 - DNA, 25 bp, Homo sapien
gtactcgttgtaggccatctccatg

SEQ ID NO: 4823334 - DNA, 25 bp, Homo sapien
cgaaccagaaggaggccgggtacat

SEQ ID NO: 4823335 - DNA, 25 bp, Homo sapien
cttgtcgtgctcgaagagctgtagc

SEQ ID NO: 4823336 - DNA, 25 bp, Homo sapien
cggtgatgccgatgaagagattgat

SEQ ID NO: 4823337 - DNA, 25 bp, Homo sapien
tgatgacaatgaggaacacgtaggc

SEQ ID NO: 4823338 - DNA, 25 bp, Homo sapien
ctgaggccgctcccccctccgcttc

SEQ ID NO: 4823339 - DNA, 25 bp, Homo sapien
tgaggccgctcccccctccgcttcc

SEQ ID NO: 4823340 - DNA, 25 bp, Homo sapien
gtgtaggccggcaggtcgaacacaa

SEQ ID NO: 4823341 - DNA, 25 bp, Homo sapien
caggatgatgacacagcaggtagcg

SEQ ID NO: 4823342 - DNA, 25 bp, Homo sapien
ggcaggtcgaacacaaacaggatga

SEQ ID NO: 4823343 - DNA, 25 bp, Homo sapien
cagggaagttggtgggcgacgtgta

SEQ ID NO: 4823344 - DNA, 25 bp, Homo sapien
caccccatggccacgccgggcgcac

SEQ ID NO: 4823345 - DNA, 25 bp, Homo sapien
gcaccccatggccacgccgggcgca

SEQ ID NO: 4823346 - DNA, 25 bp, Homo sapien
ggccacgaggaagacaacgaagctg

SEQ ID NO: 4823347 - DNA, 25 bp, Homo sapien
gccttggtggacttctcggccacga

SEQ ID NO: 4823348 - DNA, 25 bp, Homo sapien
gatggcgatgacgacatccgtgccc

SEQ ID NO: 4823349 - DNA, 25 bp, Homo sapien
cgtagttcgccagccagtagatgat

SEQ ID NO: 4823350 - DNA, 25 bp, Homo sapien
ggctggcgctggtcttattcatggg

SEQ ID NO: 4823351 - DNA, 25 bp, Homo sapien
agaggctggcgctggtcttattcat

SEQ ID NO: 4823352 - DNA, 25 bp, Homo sapien
tggcgctggtcttattcatggggtg

SEQ ID NO: 4823353 - DNA, 25 bp, Homo sapien
gaggctggcgctggtcttattcatg

SEQ ID NO: 4823354 - DNA, 25 bp, Homo sapien
gccgggttgcccttgctcttgggca

SEQ ID NO: 4823355 - DNA, 25 bp, Homo sapien
ctcttgggcaggttggcacgcagga

SEQ ID NO: 4823356 - DNA, 25 bp, Homo sapien
tgggcatgctgtgatagcccttgtt

SEQ ID NO: 4823357 - DNA, 25 bp, Homo sapien
tgtgatagcccttgttgttgtagaa

SEQ ID NO: 4823358 - DNA, 25 bp, Homo sapien
ggcagccctgcgcaccgcgatcttc

SEQ ID NO: 4823359 - DNA, 25 bp, Homo sapien
ctgggatggacttcaggacgtttcc

SEQ ID NO: 4823360 - DNA, 25 bp, Homo sapien
cttcaggacgtttccaaaggtgatg

SEQ ID NO: 4823361 - DNA, 25 bp, Homo sapien
gatcttccgcaccatgggtggggcc

SEQ ID NO: 4823362 - DNA, 25 bp, Homo sapien
ctgggcaggcaggtgggaggggcgg

SEQ ID NO: 4823363 - DNA, 25 bp, Homo sapien
caggcaggtgggaggggcggtgagg

SEQ ID NO: 4823364 - DNA, 25 bp, Homo sapien
gggcaggcaggtgggaggggcggtg

SEQ ID NO: 4823365 - DNA, 25 bp, Homo sapien
gcaggcaggtgggaggggcggtgag

SEQ ID NO: 4823366 - DNA, 25 bp, Homo sapien
ctgcgcagagcaggtgcagcggacg

SEQ ID NO: 4823367 - DNA, 25 bp, Homo sapien
acattgtggccggtgatgtcggtca

SEQ ID NO: 4823368 - DNA, 25 bp, Homo sapien
cagtcggaagcggtcggaggtgaag

SEQ ID NO: 4823369 - DNA, 25 bp, Homo sapien
aggtgaagagcaggtactcagagac

SEQ ID NO: 4823370 - DNA, 25 bp, Homo sapien
acatgctgtcgaagaaccgagccgc

SEQ ID NO: 4823371 - DNA, 25 bp, Homo sapien
ccgctgctcaggttcaacgtgggcc

SEQ ID NO: 4823372 - DNA, 25 bp, Homo sapien
ggcacgaaattggacagtggcagcc

SEQ ID NO: 4823373 - DNA, 25 bp, Homo sapien
gccggaacgtgctcacgagctgctg

SEQ ID NO: 4823374 - DNA, 25 bp, Homo sapien
ggatgaaattgccacggggctgggt

SEQ ID NO: 4823375 - DNA, 25 bp, Homo sapien
ggaaggtgacaggaccagcgggggc

SEQ ID NO: 4823376 - DNA, 25 bp, Homo sapien
ggtactcgcggcgctcctcgttggc

SEQ ID NO: 4823377 - DNA, 25 bp, Homo sapien
gttgtggtactgggaaggtgacagg

SEQ ID NO: 4823378 - DNA, 25 bp, Homo sapien
gccacgcagacgaagaaggctggca

SEQ ID NO: 4823379 - DNA, 25 bp, Homo sapien
cagtggaagcgtttgaccagcagcc

SEQ ID NO: 4823380 - DNA, 25 bp, Homo sapien
agggccacggtcatggccacgcaga

SEQ ID NO: 4823381 - DNA, 25 bp, Homo sapien
gtggaactggcgcaccttcagccac

SEQ ID NO: 4823382 - DNA, 25 bp, Homo sapien
ccatagacgtcggtgtagccagctc

SEQ ID NO: 4823383 - DNA, 25 bp, Homo sapien
acagatgacgccgactgcagcgatg

SEQ ID NO: 4823384 - DNA, 25 bp, Homo sapien
tgcagcgatgcctgcgactgggtca

SEQ ID NO: 4823385 - DNA, 25 bp, Homo sapien
gacattgtctgggtcctgtgggtta

SEQ ID NO: 4823386 - DNA, 25 bp, Homo sapien
atcagcccgaagctgctgaggtgca

SEQ ID NO: 4823387 - DNA, 25 bp, Homo sapien
tcactgttctccagcgactgatcct

SEQ ID NO: 4823388 - DNA, 25 bp, Homo sapien
tgctgaggtgcagtgcatccaggct

SEQ ID NO: 4823389 - DNA, 25 bp, Homo sapien
gacaccttgaggaacacttcctcca

SEQ ID NO: 4823390 - DNA, 25 bp, Homo sapien
caggaggccacatgcttgcggatga

SEQ ID NO: 4823391 - DNA, 25 bp, Homo sapien
taggagagctccgtgcttgtgtctg

SEQ ID NO: 4823392 - DNA, 25 bp, Homo sapien
ggccacatgcttgcggatgaactgg

SEQ ID NO: 4823393 - DNA, 25 bp, Homo sapien
tggaagaggcgctcgaaagccccct

SEQ ID NO: 4823394 - DNA, 25 bp, Homo sapien
gcggtccccaagcaggtcagcctca

SEQ ID NO: 4823395 - DNA, 25 bp, Homo sapien
ccgtcgccataggtgcccttgagga

SEQ ID NO: 4823396 - DNA, 25 bp, Homo sapien
tcatccatgtggtgggtggacagaa

SEQ ID NO: 4823397 - DNA, 25 bp, Homo sapien
cgcttgaccagcgtgaggcggtacc

SEQ ID NO: 4823398 - DNA, 25 bp, Homo sapien
cctgcccacacggcaccccactcac

SEQ ID NO: 4823399 - DNA, 25 bp, Homo sapien
ggccacggacagcttgcgcttcatg

SEQ ID NO: 4823400 - DNA, 25 bp, Homo sapien
cacccgacaatgtctgcaccagtga

SEQ ID NO: 4823401 - DNA, 25 bp, Homo sapien
gcttgtacttcaggatgaggtccca

SEQ ID NO: 4823402 - DNA, 25 bp, Homo sapien
cgtccaggatgatggcgcgagagcc

SEQ ID NO: 4823403 - DNA, 25 bp, Homo sapien
tccgtgcggatgtcgtgcccgtaga

SEQ ID NO: 4823404 - DNA, 25 bp, Homo sapien
catgcccaggttcttgcggatctca

SEQ ID NO: 4823405 - DNA, 25 bp, Homo sapien
ccgtgagccggtcaaagagcacatt

SEQ ID NO: 4823406 - DNA, 25 bp, Homo sapien
gagcacattgtgctgcgggcacatg

SEQ ID NO: 4823407 - DNA, 25 bp, Homo sapien
tagaccttggtgagtttgtccacgc

SEQ ID NO: 4823408 - DNA, 25 bp, Homo sapien
tgtccacgcagacaaccagaggcag

SEQ ID NO: 4823409 - DNA, 25 bp, Homo sapien
ttcttgtcgtccttgtagaccttgg

SEQ ID NO: 4823410 - DNA, 25 bp, Homo sapien
ggtgagtttgtccacgcagacaacc

SEQ ID NO: 4823411 - DNA, 25 bp, Homo sapien
ctgcaccagggctgtggatcagcag

SEQ ID NO: 4823412 - DNA, 25 bp, Homo sapien
actctgaacccagcgcccaccccag

SEQ ID NO: 4823413 - DNA, 25 bp, Homo sapien
agccaccattctgatgccagcctca

SEQ ID NO: 4823414 - DNA, 25 bp, Homo sapien
gccaaggccacccaggactctgaac

SEQ ID NO: 4823415 - DNA, 25 bp, Homo sapien
aagcgccggctctccatggcacagg

SEQ ID NO: 4823416 - DNA, 25 bp, Homo sapien
actcccaggcttctgtccgcccact

SEQ ID NO: 4823417 - DNA, 25 bp, Homo sapien
caaagcgccggctctccatggcaca

SEQ ID NO: 4823418 - DNA, 25 bp, Homo sapien
tccatgacactgaggcggggggtgc

SEQ ID NO: 4823419 - DNA, 25 bp, Homo sapien
aatgtaccacgtgaggatgccatag

SEQ ID NO: 4823420 - DNA, 25 bp, Homo sapien
ggccacctcatacagcgcgaagtac

SEQ ID NO: 4823421 - DNA, 25 bp, Homo sapien
gaccaaaggccgtcgtggacatgag

SEQ ID NO: 4823422 - DNA, 25 bp, Homo sapien
cgcgaagtacttagagcccagacca

SEQ ID NO: 4823423 - DNA, 25 bp, Homo sapien
tggccttggagtacagcacagacac

SEQ ID NO: 4823424 - DNA, 25 bp, Homo sapien
gaaggccgtgatcttatcatgcgcc

SEQ ID NO: 4823425 - DNA, 25 bp, Homo sapien
tctcggatcgccacgtacatgtagg

SEQ ID NO: 4823426 - DNA, 25 bp, Homo sapien
agtagatgatgccaccgcaggccga

SEQ ID NO: 4823427 - DNA, 25 bp, Homo sapien
agtgcaccgcgttgttcaggcccat

SEQ ID NO: 4823428 - DNA, 25 bp, Homo sapien
gaccacgtggctgtgcataagcacc

SEQ ID NO: 4823429 - DNA, 25 bp, Homo sapien
tgcacaaagccggtgatgaaccagg

SEQ ID NO: 4823430 - DNA, 25 bp, Homo sapien
accgcgtagactgccaggaagagcc

SEQ ID NO: 4823431 - DNA, 25 bp, Homo sapien
ccagcccgcgcctccagggagagtc

SEQ ID NO: 4823432 - DNA, 25 bp, Homo sapien
agcccgcgcctccagggagagtccc

SEQ ID NO: 4823433 - DNA, 25 bp, Homo sapien
cgcgcctccagggagagtcccggcc

SEQ ID NO: 4823434 - DNA, 25 bp, Homo sapien
cccgcgcctccagggagagtcccgg

SEQ ID NO: 4823435 - DNA, 25 bp, Homo sapien
ggagatcaccatgcacagcggcatc

SEQ ID NO: 4823436 - DNA, 25 bp, Homo sapien
cacagcggcatcatgtgctcaatga

SEQ ID NO: 4823437 - DNA, 25 bp, Homo sapien
gtcatggccacggagtagacccagg

SEQ ID NO: 4823438 - DNA, 25 bp, Homo sapien
ggtgctccttctccgccacgatgtg

SEQ ID NO: 4823439 - DNA, 25 bp, Homo sapien
gcgctcaggcgccactcagccccag

SEQ ID NO: 4823440 - DNA, 25 bp, Homo sapien
aggccgcgctcaggcgccactcagc

SEQ ID NO: 4823441 - DNA, 25 bp, Homo sapien
ggggaggccgcgctcaggcgccact

SEQ ID NO: 4823442 - DNA, 25 bp, Homo sapien
ggaggccgcgctcaggcgccactca

SEQ ID NO: 4823443 - DNA, 25 bp, Homo sapien
aaaagtgtcgatgatggcgcgctcc

SEQ ID NO: 4823444 - DNA, 25 bp, Homo sapien
aacatctgcacgtagctgcctggct

SEQ ID NO: 4823445 - DNA, 25 bp, Homo sapien
gtgccccacaaaagtgtcgatgatg

SEQ ID NO: 4823446 - DNA, 25 bp, Homo sapien
gggaacatctgcacgtagctgcctg

SEQ ID NO: 4823447 - DNA, 25 bp, Homo sapien
cgttggttttctcggtgaagctgga

SEQ ID NO: 4823448 - DNA, 25 bp, Homo sapien
agaagcggccgccagtattgggccc

SEQ ID NO: 4823449 - DNA, 25 bp, Homo sapien
tggatccagacgaagccgtagagga

SEQ ID NO: 4823450 - DNA, 25 bp, Homo sapien
tccttccgggtctggaagatcacac

SEQ ID NO: 4823451 - DNA, 25 bp, Homo sapien
cagtgacgttgtcctggtaggcctg

SEQ ID NO: 4823452 - DNA, 25 bp, Homo sapien
tggcaaaaacagtgacgttgtcctg

SEQ ID NO: 4823453 - DNA, 25 bp, Homo sapien
gacaatgctctcctcgtcgtggaag

SEQ ID NO: 4823454 - DNA, 25 bp, Homo sapien
gtagttgacaatgctctcctcgtcg

SEQ ID NO: 4823455 - DNA, 25 bp, Homo sapien
catgccactgggcagcgagaagttg

SEQ ID NO: 4823456 - DNA, 25 bp, Homo sapien
gcagcgagaagttgtcctgtctcag

SEQ ID NO: 4823457 - DNA, 25 bp, Homo sapien
caggccgcgttgtcaatggtatcca

SEQ ID NO: 4823458 - DNA, 25 bp, Homo sapien
ttggacatgaactggatccagccgc

SEQ ID NO: 4823459 - DNA, 25 bp, Homo sapien
catccagtgacaggttcagtgcctc

SEQ ID NO: 4823460 - DNA, 25 bp, Homo sapien
tccagtgacaggttcagtgcctcgg

SEQ ID NO: 4823461 - DNA, 25 bp, Homo sapien
tcatccagtgacaggttcagtgcct

SEQ ID NO: 4823462 - DNA, 25 bp, Homo sapien
ctcatccagtgacaggttcagtgcc

SEQ ID NO: 4823463 - DNA, 25 bp, Homo sapien
ggaagctgcggatctccgccgagat

SEQ ID NO: 4823464 - DNA, 25 bp, Homo sapien
gtcacgttgcccacaaaagcaaaag

SEQ ID NO: 4823465 - DNA, 25 bp, Homo sapien
agatgttgagccagacctgggcata

SEQ ID NO: 4823466 - DNA, 25 bp, Homo sapien
gacctgggcatagtgagtcacgttg

SEQ ID NO: 4823467 - DNA, 25 bp, Homo sapien
ggcatggagtttctggacggacccc

SEQ ID NO: 4823468 - DNA, 25 bp, Homo sapien
ggggcatggagtttctggacggacc

SEQ ID NO: 4823469 - DNA, 25 bp, Homo sapien
gggcatggagtttctggacggaccc

SEQ ID NO: 4823470 - DNA, 25 bp, Homo sapien
catggagtttctggacggaccccca

SEQ ID NO: 4823471 - DNA, 25 bp, Homo sapien
gacgggcttccgctatgttgctcgg

SEQ ID NO: 4823472 - DNA, 25 bp, Homo sapien
agctcctttgctggacctgtctcca

SEQ ID NO: 4823473 - DNA, 25 bp, Homo sapien
gcggcgctcaggtgaaacctgcttt

SEQ ID NO: 4823474 - DNA, 25 bp, Homo sapien
tttcaagcgtgagtcccacgcccgg

SEQ ID NO: 4823475 - DNA, 25 bp, Homo sapien
acatggagcgtcccagacccgtgca

SEQ ID NO: 4823476 - DNA, 25 bp, Homo sapien
catggagcgtcccagacccgtgcac

SEQ ID NO: 4823477 - DNA, 25 bp, Homo sapien
aacatggagcgtcccagacccgtgc

SEQ ID NO: 4823478 - DNA, 25 bp, Homo sapien
cccgcaggcgcgtacaggattttgg

SEQ ID NO: 4823479 - DNA, 25 bp, Homo sapien
gggttgctggtcatgaggtgcacga

SEQ ID NO: 4823480 - DNA, 25 bp, Homo sapien
ggaggcccaggttccgctgctcctt

SEQ ID NO: 4823481 - DNA, 25 bp, Homo sapien
aggatgacgcggtcgacctcagagc

SEQ ID NO: 4823482 - DNA, 25 bp, Homo sapien
tgctgcagcagagggtgcgccctcc

SEQ ID NO: 4823483 - DNA, 25 bp, Homo sapien
ggttgttgccacacaagatgggctg

SEQ ID NO: 4823484 - DNA, 25 bp, Homo sapien
gggccgacaggacatccacatcctg

SEQ ID NO: 4823485 - DNA, 25 bp, Homo sapien
cagagctgtacgaaggctgagcact

SEQ ID NO: 4823486 - DNA, 25 bp, Homo sapien
agcatcccggtagccctgcagggct

SEQ ID NO: 4823487 - DNA, 25 bp, Homo sapien
gagcccggcgtgcaggtgagctgct

SEQ ID NO: 4823488 - DNA, 25 bp, Homo sapien
ccagagaagcgcctggcacgcgcag

SEQ ID NO: 4823489 - DNA, 25 bp, Homo sapien
tgcagacagcatcccggtagccctg

SEQ ID NO: 4823490 - DNA, 25 bp, Homo sapien
tcctcacccacggagcagaagcacc

SEQ ID NO: 4823491 - DNA, 25 bp, Homo sapien
cctttcctcacccacggagcagaag

SEQ ID NO: 4823492 - DNA, 25 bp, Homo sapien
ccatcccacacatggatgccctcac

SEQ ID NO: 4823493 - DNA, 25 bp, Homo sapien
tttcctcacccacggagcagaagca

SEQ ID NO: 4823494 - DNA, 25 bp, Homo sapien
gactgtgaatccagggcagatgagg

SEQ ID NO: 4823495 - DNA, 25 bp, Homo sapien
tccatccggaacaggggattgcccc

SEQ ID NO: 4823496 - DNA, 25 bp, Homo sapien
agggaccaaagagcaggtggtagac

SEQ ID NO: 4823497 - DNA, 25 bp, Homo sapien
gattgccccctaggcggctccaggg

SEQ ID NO: 4823498 - DNA, 25 bp, Homo sapien
tgcttgggccgtgctattgggcagc

SEQ ID NO: 4823499 - DNA, 25 bp, Homo sapien
cacacgggcggccaagagtgcttgg

SEQ ID NO: 4823500 - DNA, 25 bp, Homo sapien
cgtgctattgggcagcgacaagttt

SEQ ID NO: 4823501 - DNA, 25 bp, Homo sapien
caagttttgcgtcaggaaacgccag

SEQ ID NO: 4823502 - DNA, 25 bp, Homo sapien
tgcccgggcccgcactgagggcctc

SEQ ID NO: 4823503 - DNA, 25 bp, Homo sapien
gcctccagatgctggcgtagggcct

SEQ ID NO: 4823504 - DNA, 25 bp, Homo sapien
cgctgggtcaaacaggttgccttcc

SEQ ID NO: 4823505 - DNA, 25 bp, Homo sapien
caggcgctcaagcagctgcgtgacc

SEQ ID NO: 4823506 - DNA, 25 bp, Homo sapien
catggcggatgtcactcactggatg

SEQ ID NO: 4823507 - DNA, 25 bp, Homo sapien
ctccgaggggcgggtgggcactcac

SEQ ID NO: 4823508 - DNA, 25 bp, Homo sapien
caccatggcggatgtcactcactgg

SEQ ID NO: 4823509 - DNA, 25 bp, Homo sapien
ccatggcggatgtcactcactggat

SEQ ID NO: 4823510 - DNA, 25 bp, Homo sapien
ctgcaggaagccgaactcgtctcgc

SEQ ID NO: 4823511 - DNA, 25 bp, Homo sapien
gtggagttggcgtactgcaggaagc

SEQ ID NO: 4823512 - DNA, 25 bp, Homo sapien
ggcacagcgattgcatgacaggcag

SEQ ID NO: 4823513 - DNA, 25 bp, Homo sapien
gaactcgtctcgctggccgtccggg

SEQ ID NO: 4823514 - DNA, 25 bp, Homo sapien
tcagaggtcaaagagccactcacca

SEQ ID NO: 4823515 - DNA, 25 bp, Homo sapien
ggcgaatgactccagcaggtcagag

SEQ ID NO: 4823516 - DNA, 25 bp, Homo sapien
ccgaaaacgtttcaggtgtggcact

SEQ ID NO: 4823517 - DNA, 25 bp, Homo sapien
ttctgccataactcccagagcattc

SEQ ID NO: 4823518 - DNA, 25 bp, Homo sapien
cagctggttagcagagtgagtgcaa

SEQ ID NO: 4823519 - DNA, 25 bp, Homo sapien
gctggttagcagagtgagtgcaaga

SEQ ID NO: 4823520 - DNA, 25 bp, Homo sapien
tggttagcagagtgagtgcaagagc

SEQ ID NO: 4823521 - DNA, 25 bp, Homo sapien
ctctggccagctggttagcagagtg

SEQ ID NO: 4823522 - DNA, 25 bp, Homo sapien
gggcgctcaagccaggacggcccat

SEQ ID NO: 4823523 - DNA, 25 bp, Homo sapien
caggcagagagatgccgcctcagct

SEQ ID NO: 4823524 - DNA, 25 bp, Homo sapien
ggagagtagccaggccgctccagcc

SEQ ID NO: 4823525 - DNA, 25 bp, Homo sapien
ctgtgcctttaggtggccgggcctt

SEQ ID NO: 4823526 - DNA, 25 bp, Homo sapien
ggtgggcttcttctgtcgcagcccc

SEQ ID NO: 4823527 - DNA, 25 bp, Homo sapien
gatggtgggcttcttctgtcgcagc

SEQ ID NO: 4823528 - DNA, 25 bp, Homo sapien
caccagggggatgaagatctcgaag

SEQ ID NO: 4823529 - DNA, 25 bp, Homo sapien
cagggggatgaagatctcgaaggcc

SEQ ID NO: 4823530 - DNA, 25 bp, Homo sapien
ttgagcgtcacgttcttccagagca

SEQ ID NO: 4823531 - DNA, 25 bp, Homo sapien
ggcgtttgagcgtcacgttcttcca

SEQ ID NO: 4823532 - DNA, 25 bp, Homo sapien
ggctccggcgtttgagcgtcacgtt

SEQ ID NO: 4823533 - DNA, 25 bp, Homo sapien
gagcgtcacgttcttccagagcagc

SEQ ID NO: 4823534 - DNA, 25 bp, Homo sapien
cgcctcagcgccgcggcccgctcct

SEQ ID NO: 4823535 - DNA, 25 bp, Homo sapien
gccgcctcagcgccgcggcccgctc

SEQ ID NO: 4823536 - DNA, 25 bp, Homo sapien
ggcggggccacgctccgccgcctca

SEQ ID NO: 4823537 - DNA, 25 bp, Homo sapien
ccgccgcctcagcgccgcggcccgc

SEQ ID NO: 4823538 - DNA, 25 bp, Homo sapien
gtccgggacccgatccgcgctggct

SEQ ID NO: 4823539 - DNA, 25 bp, Homo sapien
ggcgtccgggacccgatccgcgctg

SEQ ID NO: 4823540 - DNA, 25 bp, Homo sapien
gcgtccgggacccgatccgcgctgg

SEQ ID NO: 4823541 - DNA, 25 bp, Homo sapien
cgtccgggacccgatccgcgctggc

SEQ ID NO: 4823542 - DNA, 25 bp, Homo sapien
accgcgctggcgactctgcagaggc

SEQ ID NO: 4823543 - DNA, 25 bp, Homo sapien
gaccctcgggcgctgcgctcttctc

SEQ ID NO: 4823544 - DNA, 25 bp, Homo sapien
taaaccagcacttggagtccaggtg

SEQ ID NO: 4823545 - DNA, 25 bp, Homo sapien
cgcgccgagcggacgctggcgaggg

SEQ ID NO: 4823546 - DNA, 25 bp, Homo sapien
caggtgggtccgtcccgcgattccg

SEQ ID NO: 4823547 - DNA, 25 bp, Homo sapien
tgctgcacgcggctcgtttttctcc

SEQ ID NO: 4823548 - DNA, 25 bp, Homo sapien
aaactcgaggccccaggaacgctcg

SEQ ID NO: 4823549 - DNA, 25 bp, Homo sapien
cgcgattccgagcagccagcggaag

SEQ ID NO: 4823550 - DNA, 25 bp, Homo sapien
aggtggggcagttcctccgcgtggc

SEQ ID NO: 4823551 - DNA, 25 bp, Homo sapien
tcaggcggttctgcggctgtggctt

SEQ ID NO: 4823552 - DNA, 25 bp, Homo sapien
ttcgggcgagtctggtctctgcaca

SEQ ID NO: 4823553 - DNA, 25 bp, Homo sapien
ctgcacagggagttcgggatcaggc

SEQ ID NO: 4823554 - DNA, 25 bp, Homo sapien
ccagcccgcagcctcaaggcacttg

SEQ ID NO: 4823555 - DNA, 25 bp, Homo sapien
ccgcagcctcaaggcacttgctttt

SEQ ID NO: 4823556 - DNA, 25 bp, Homo sapien
ttttctctgctcagtccacagggct

SEQ ID NO: 4823557 - DNA, 25 bp, Homo sapien
gcttttctctgctcagtccacaggg

SEQ ID NO: 4823558 - DNA, 25 bp, Homo sapien
aggtctttcccacaagccacagcca

SEQ ID NO: 4823559 - DNA, 25 bp, Homo sapien
cagcaggtctttcccacaagccaca

SEQ ID NO: 4823560 - DNA, 25 bp, Homo sapien
ggtctttcccacaagccacagccat

SEQ ID NO: 4823561 - DNA, 25 bp, Homo sapien
gcaggtctttcccacaagccacagc

SEQ ID NO: 4823562 - DNA, 25 bp, Homo sapien
tcagaactatggacgtggcagggac

SEQ ID NO: 4823563 - DNA, 25 bp, Homo sapien
tcagatgtttattgtccaccgccct

SEQ ID NO: 4823564 - DNA, 25 bp, Homo sapien
gatgcctggtggtttgatttcgaca

SEQ ID NO: 4823565 - DNA, 25 bp, Homo sapien
cagggcctctgctaccgaggaagct

SEQ ID NO: 4823566 - DNA, 25 bp, Homo sapien
cattcatgccagtgaggaaagccgc

SEQ ID NO: 4823567 - DNA, 25 bp, Homo sapien
tagggcacaaagatgtccgagtcgc

SEQ ID NO: 4823568 - DNA, 25 bp, Homo sapien
cacccagttgaagatgcctcggagg

SEQ ID NO: 4823569 - DNA, 25 bp, Homo sapien
tcatccacatgcacgaaggcgtcag

SEQ ID NO: 4823570 - DNA, 25 bp, Homo sapien
taccccgaggggctgaccccagcag

SEQ ID NO: 4823571 - DNA, 25 bp, Homo sapien
gcgagcagagccaccccggccagga

SEQ ID NO: 4823572 - DNA, 25 bp, Homo sapien
agccacaggagccagagggcagcga

SEQ ID NO: 4823573 - DNA, 25 bp, Homo sapien
cccaagcctcgcagcctccgggtgg

SEQ ID NO: 4823574 - DNA, 25 bp, Homo sapien
tagacaccgctgactataggctggg

SEQ ID NO: 4823575 - DNA, 25 bp, Homo sapien
agattctcaaatcacggcagccgcc

SEQ ID NO: 4823576 - DNA, 25 bp, Homo sapien
gcctggtcccggaatgaactgtgga

SEQ ID NO: 4823577 - DNA, 25 bp, Homo sapien
gaagctaaagctcccaattgggcca

SEQ ID NO: 4823578 - DNA, 25 bp, Homo sapien
ctggagatctcaatgcaggtcaggc

SEQ ID NO: 4823579 - DNA, 25 bp, Homo sapien
gacccagacgtcctggagatctcaa

SEQ ID NO: 4823580 - DNA, 25 bp, Homo sapien
ggagatctcaatgcaggtcaggctt

SEQ ID NO: 4823581 - DNA, 25 bp, Homo sapien
gatctcaatgcaggtcaggcttggt

SEQ ID NO: 4823582 - DNA, 25 bp, Homo sapien
gacccactctgcaccccaagttttg

SEQ ID NO: 4823583 - DNA, 25 bp, Homo sapien
ctccagggacccactctgcacccca

SEQ ID NO: 4823584 - DNA, 25 bp, Homo sapien
tctgcaccccaagttttgccgggac

SEQ ID NO: 4823585 - DNA, 25 bp, Homo sapien
gggacccgctcctctgtgttgtgtg

SEQ ID NO: 4823586 - DNA, 25 bp, Homo sapien
attaacactagagtcagtgggctgc

SEQ ID NO: 4823587 - DNA, 25 bp, Homo sapien
cgtgaaaaggagacgacaggcctcg

SEQ ID NO: 4823588 - DNA, 25 bp, Homo sapien
acactagagtcagtgggctgcggaa

SEQ ID NO: 4823589 - DNA, 25 bp, Homo sapien
gctgccagcgaatgtcaaccagaaa

SEQ ID NO: 4823590 - DNA, 25 bp, Homo sapien
tgggcacttttgaccacatgattcc

SEQ ID NO: 4823591 - DNA, 25 bp, Homo sapien
gattaataacacgaacacgccaggg

SEQ ID NO: 4823592 - DNA, 25 bp, Homo sapien
gcacgctgacctggtactggcctga

SEQ ID NO: 4823593 - DNA, 25 bp, Homo sapien
tccagactcctaacaaccactgagg

SEQ ID NO: 4823594 - DNA, 25 bp, Homo sapien
cacgggatgggaaggtcctcctaat

SEQ ID NO: 4823595 - DNA, 25 bp, Homo sapien
tgggaaggtcctcctaatgagcgaa

SEQ ID NO: 4823596 - DNA, 25 bp, Homo sapien
gaaggtcctcctaatgagcgaacag

SEQ ID NO: 4823597 - DNA, 25 bp, Homo sapien
tcctcctaatgagcgaacagaaagg

SEQ ID NO: 4823598 - DNA, 25 bp, Homo sapien
tttaattggcttttgtctctagaat

SEQ ID NO: 4823599 - DNA, 25 bp, Homo sapien
ctttaattggcttttgtctctagaa

SEQ ID NO: 4823600 - DNA, 25 bp, Homo sapien
taattggcttttgtctctagaatta

SEQ ID NO: 4823601 - DNA, 25 bp, Homo sapien
aattggcttttgtctctagaattac

SEQ ID NO: 4823602 - DNA, 25 bp, Homo sapien
ccgttcctgcgctctacggttctcc

SEQ ID NO: 4823603 - DNA, 25 bp, Homo sapien
tgcgctctacggttctccatgcccc

SEQ ID NO: 4823604 - DNA, 25 bp, Homo sapien
ggtctaaaccgaacaggagaggtgc

SEQ ID NO: 4823605 - DNA, 25 bp, Homo sapien
ttcctgcgctctacggttctccatg

SEQ ID NO: 4823606 - DNA, 25 bp, Homo sapien
aacatgtttttagtgggaagctcca

SEQ ID NO: 4823607 - DNA, 25 bp, Homo sapien
agccaaaagcacacagcatcaaaac

SEQ ID NO: 4823608 - DNA, 25 bp, Homo sapien
gcaggtgggcgtctgtctgcctcca

SEQ ID NO: 4823609 - DNA, 25 bp, Homo sapien
aaagcacacagcatcaaaacatgtt

SEQ ID NO: 4823610 - DNA, 25 bp, Homo sapien
gggcgcggacagtgcggcgtggtcg

SEQ ID NO: 4823611 - DNA, 25 bp, Homo sapien
cgtggtcgaacagagggttgcgcac

SEQ ID NO: 4823612 - DNA, 25 bp, Homo sapien
tcatggcagtgcaggcggtgagctg

SEQ ID NO: 4823613 - DNA, 25 bp, Homo sapien
ggacagtgcggcgtggtcgaacaga

SEQ ID NO: 4823614 - DNA, 25 bp, Homo sapien
ctgcgaatgtgggtgtcaggctggg

SEQ ID NO: 4823615 - DNA, 25 bp, Homo sapien
gtgggtgtcaggctgggcagtgggt

SEQ ID NO: 4823616 - DNA, 25 bp, Homo sapien
gggtgtcaggctgggcagtgggtgg

SEQ ID NO: 4823617 - DNA, 25 bp, Homo sapien
atgtgggtgtcaggctgggcagtgg

SEQ ID NO: 4823618 - DNA, 25 bp, Homo sapien
cactcgtacaccgtgaagtctccgt

SEQ ID NO: 4823619 - DNA, 25 bp, Homo sapien
tctcctcatccgaggaggccgtgtc

SEQ ID NO: 4823620 - DNA, 25 bp, Homo sapien
aggcccgggcactcgtacaccgtga

SEQ ID NO: 4823621 - DNA, 25 bp, Homo sapien
accgtgaagtctccgtcctcattct

SEQ ID NO: 4823622 - DNA, 25 bp, Homo sapien
cccatgccctcgaggtgccagtggc

SEQ ID NO: 4823623 - DNA, 25 bp, Homo sapien
ccatgccctcgaggtgccagtggcc

SEQ ID NO: 4823624 - DNA, 25 bp, Homo sapien
atgccctcgaggtgccagtggccca

SEQ ID NO: 4823625 - DNA, 25 bp, Homo sapien
gccctcgaggtgccagtggcccagt

SEQ ID NO: 4823626 - DNA, 25 bp, Homo sapien
gaagtgggcactcagcccacctcag

SEQ ID NO: 4823627 - DNA, 25 bp, Homo sapien
ggaagtgggcactcagcccacctca

SEQ ID NO: 4823628 - DNA, 25 bp, Homo sapien
ctggaagtgggcactcagcccacct

SEQ ID NO: 4823629 - DNA, 25 bp, Homo sapien
agtgggcactcagcccacctcagcc

SEQ ID NO: 4823630 - DNA, 25 bp, Homo sapien
cgggggaggtgaaggttagcgtgca

SEQ ID NO: 4823631 - DNA, 25 bp, Homo sapien
ggaggtgaaggttagcgtgcaggtg

SEQ ID NO: 4823632 - DNA, 25 bp, Homo sapien
aggtgaaggttagcgtgcaggtgag

SEQ ID NO: 4823633 - DNA, 25 bp, Homo sapien
ggggaggtgaaggttagcgtgcagg

SEQ ID NO: 4823634 - DNA, 25 bp, Homo sapien
acagcatctgttgccgttggtgctg

SEQ ID NO: 4823635 - DNA, 25 bp, Homo sapien
gtggtacatctccgcgctctgtgcc

SEQ ID NO: 4823636 - DNA, 25 bp, Homo sapien
catctgttgccgttggtgctggtag

SEQ ID NO: 4823637 - DNA, 25 bp, Homo sapien
acatctccgcgctctgtgccagccg

SEQ ID NO: 4823638 - DNA, 25 bp, Homo sapien
gcggccagagttgggcgggagcctc

SEQ ID NO: 4823639 - DNA, 25 bp, Homo sapien
tggcggccagagttgggcgggagcc

SEQ ID NO: 4823640 - DNA, 25 bp, Homo sapien
aaggaggaggcgagggtcagttggc

SEQ ID NO: 4823641 - DNA, 25 bp, Homo sapien
aggcgagggtcagttggcggccaga

SEQ ID NO: 4823642 - DNA, 25 bp, Homo sapien
tagtcggccttctgagtcaggcgga

SEQ ID NO: 4823643 - DNA, 25 bp, Homo sapien
cagtggcgtagtcggccttctgagt

SEQ ID NO: 4823644 - DNA, 25 bp, Homo sapien
cttcgcagtggcgtagtcggccttc

SEQ ID NO: 4823645 - DNA, 25 bp, Homo sapien
gggccttcgcagtggcgtagtcggc

SEQ ID NO: 4823646 - DNA, 25 bp, Homo sapien
tgcaccggccacacagaacgccagg

SEQ ID NO: 4823647 - DNA, 25 bp, Homo sapien
ggcggctgcaccggccacacagaac

SEQ ID NO: 4823648 - DNA, 25 bp, Homo sapien
accggccacacagaacgccaggatc

SEQ ID NO: 4823649 - DNA, 25 bp, Homo sapien
ggccacacagaacgccaggatcagc

SEQ ID NO: 4823650 - DNA, 25 bp, Homo sapien
gacatgtgcaccgggtcggatgaca

SEQ ID NO: 4823651 - DNA, 25 bp, Homo sapien
gggcgacatgtgcaccgggtcggat

SEQ ID NO: 4823652 - DNA, 25 bp, Homo sapien
ggctccaggggcgacatgtgcaccg

SEQ ID NO: 4823653 - DNA, 25 bp, Homo sapien
atgtgcaccgggtcggatgacacag

SEQ ID NO: 4823654 - DNA, 25 bp, Homo sapien
agcccctgcccccgtgccgagaagc

SEQ ID NO: 4823655 - DNA, 25 bp, Homo sapien
gcccctgcccccgtgccgagaagcc

SEQ ID NO: 4823656 - DNA, 25 bp, Homo sapien
ctgcccccgtgccgagaagcccagg

SEQ ID NO: 4823657 - DNA, 25 bp, Homo sapien
ccccgtgccgagaagcccagggtgg

SEQ ID NO: 4823658 - DNA, 25 bp, Homo sapien
gagagaggacaggttagaatgagag

SEQ ID NO: 4823659 - DNA, 25 bp, Homo sapien
caggttagaatgagagcactgggct

SEQ ID NO: 4823660 - DNA, 25 bp, Homo sapien
gaggacaggttagaatgagagcact

SEQ ID NO: 4823661 - DNA, 25 bp, Homo sapien
gaatgagagcactgggctagggaca

SEQ ID NO: 4823662 - DNA, 25 bp, Homo sapien
gcggagttgagtgtccagactcctt

SEQ ID NO: 4823663 - DNA, 25 bp, Homo sapien
agccgctgtcggtccttgggtaggg

SEQ ID NO: 4823664 - DNA, 25 bp, Homo sapien
taggggcggagttgagtgtccagac

SEQ ID NO: 4823665 - DNA, 25 bp, Homo sapien
ctccgggagccgctgtcggtccttg

SEQ ID NO: 4823666 - DNA, 25 bp, Homo sapien
gaggcgctagggaaacgtccaaaga

SEQ ID NO: 4823667 - DNA, 25 bp, Homo sapien
tccaagcaccttctcgggtagaggg

SEQ ID NO: 4823668 - DNA, 25 bp, Homo sapien
tccataaagggctggccagcacagc

SEQ ID NO: 4823669 - DNA, 25 bp, Homo sapien
cagtgcttcccggaaagtggaggca

SEQ ID NO: 4823670 - DNA, 25 bp, Homo sapien
tggccatcccgacagatgcggctca

SEQ ID NO: 4823671 - DNA, 25 bp, Homo sapien
atcccgacagatgcggctcaggctg

SEQ ID NO: 4823672 - DNA, 25 bp, Homo sapien
gccagtgctggcacccttcaacatt

SEQ ID NO: 4823673 - DNA, 25 bp, Homo sapien
catttgccaacaggcggacaggaca

SEQ ID NO: 4823674 - DNA, 25 bp, Homo sapien
ccagccggccgcttcttacagggag

SEQ ID NO: 4823675 - DNA, 25 bp, Homo sapien
cggccgcttcttacagggagaggtt

SEQ ID NO: 4823676 - DNA, 25 bp, Homo sapien
gagaggttcatgcagggacatcccc

SEQ ID NO: 4823677 - DNA, 25 bp, Homo sapien
tcttacagggagaggttcatgcagg

SEQ ID NO: 4823678 - DNA, 25 bp, Homo sapien
aggccggcgcatcctgggcacacag

SEQ ID NO: 4823679 - DNA, 25 bp, Homo sapien
acacagagcccttgctggtcctcct

SEQ ID NO: 4823680 - DNA, 25 bp, Homo sapien
ggcacacagagcccttgctggtcct

SEQ ID NO: 4823681 - DNA, 25 bp, Homo sapien
tggaggccggcgcatcctgggcaca

SEQ ID NO: 4823682 - DNA, 25 bp, Homo sapien
aggctcccgggacaggcggctacat

SEQ ID NO: 4823683 - DNA, 25 bp, Homo sapien
tccaggctcccgggacaggcggcta

SEQ ID NO: 4823684 - DNA, 25 bp, Homo sapien
ggaggacaccttgcccgcctcttca

SEQ ID NO: 4823685 - DNA, 25 bp, Homo sapien
accaggaggacaccttgcccgcctc

SEQ ID NO: 4823686 - DNA, 25 bp, Homo sapien
tcaaagctaaggaatgtccccagtc

SEQ ID NO: 4823687 - DNA, 25 bp, Homo sapien
caggaaccccgtccagattgggagt

SEQ ID NO: 4823688 - DNA, 25 bp, Homo sapien
taagatggagtctgctgacctcact

SEQ ID NO: 4823689 - DNA, 25 bp, Homo sapien
tcttatcctggtgctggagaacggg

SEQ ID NO: 4823690 - DNA, 25 bp, Homo sapien
ggctaaccaggactcttcctctctg

SEQ ID NO: 4823691 - DNA, 25 bp, Homo sapien
tggctaaccaggactcttcctctct

SEQ ID NO: 4823692 - DNA, 25 bp, Homo sapien
tctggctaaccaggactcttcctct

SEQ ID NO: 4823693 - DNA, 25 bp, Homo sapien
ctggctaaccaggactcttcctctc

SEQ ID NO: 4823694 - DNA, 25 bp, Homo sapien
caaagctggctctagggtctgggtt

SEQ ID NO: 4823695 - DNA, 25 bp, Homo sapien
cctccagtatcagtgggccgggact

SEQ ID NO: 4823696 - DNA, 25 bp, Homo sapien
gaaaagaggtcgcaggaacaagagc

SEQ ID NO: 4823697 - DNA, 25 bp, Homo sapien
taaacattaaacctgtgccagcagg

SEQ ID NO: 4823698 - DNA, 25 bp, Homo sapien
tctgattctcggaagcctctcctgt

SEQ ID NO: 4823699 - DNA, 25 bp, Homo sapien
actctgattctcggaagcctctcct

SEQ ID NO: 4823700 - DNA, 25 bp, Homo sapien
ctgattctcggaagcctctcctgtt

SEQ ID NO: 4823701 - DNA, 25 bp, Homo sapien
cacactctgattctcggaagcctct

SEQ ID NO: 4823702 - DNA, 25 bp, Homo sapien
tattgaagctagaacagcaccccga

SEQ ID NO: 4823703 - DNA, 25 bp, Homo sapien
gtcccaaagacagaatgccagtgcc

SEQ ID NO: 4823704 - DNA, 25 bp, Homo sapien
gaatgcagtcgcaaagtctcccagt

SEQ ID NO: 4823705 - DNA, 25 bp, Homo sapien
tgtaaaacgggctcacagcacctct

SEQ ID NO: 4823706 - DNA, 25 bp, Homo sapien
ggcgccgaggacgaggccggagagc

SEQ ID NO: 4823707 - DNA, 25 bp, Homo sapien
gcggctccacgcagggcggcgccga

SEQ ID NO: 4823708 - DNA, 25 bp, Homo sapien
gccgaggacgaggccggagagcagc

SEQ ID NO: 4823709 - DNA, 25 bp, Homo sapien
gcagccgcaggtgccgcggggaggg

SEQ ID NO: 4823710 - DNA, 25 bp, Homo sapien
ctcagggtgtctcggcacctgcggt

SEQ ID NO: 4823711 - DNA, 25 bp, Homo sapien
tgacgctgcagcaaggatccgggat

SEQ ID NO: 4823712 - DNA, 25 bp, Homo sapien
cagaagtccggctgggtttgggccg

SEQ ID NO: 4823713 - DNA, 25 bp, Homo sapien
tggcctcttcccggtaggactccga

SEQ ID NO: 4823714 - DNA, 25 bp, Homo sapien
aggaacattccctcgggccagccat

SEQ ID NO: 4823715 - DNA, 25 bp, Homo sapien
tggtcaccaacgcagatctggatgt

SEQ ID NO: 4823716 - DNA, 25 bp, Homo sapien
tggccagagaagactcaagggccca

SEQ ID NO: 4823717 - DNA, 25 bp, Homo sapien
ccaaccttcagtctggccttggtca

SEQ ID NO: 4823718 - DNA, 25 bp, Homo sapien
tttttacaagtaggtgctgggctgg

SEQ ID NO: 4823719 - DNA, 25 bp, Homo sapien
ttttacaagtaggtgctgggctggc

SEQ ID NO: 4823720 - DNA, 25 bp, Homo sapien
aatttttacaagtaggtgctgggct

SEQ ID NO: 4823721 - DNA, 25 bp, Homo sapien
ttacaagtaggtgctgggctggctg

SEQ ID NO: 4823722 - DNA, 25 bp, Homo sapien
gctgattctcaggaccaaggcccca

SEQ ID NO: 4823723 - DNA, 25 bp, Homo sapien
tctaagggctgattctcaggaccaa

SEQ ID NO: 4823724 - DNA, 25 bp, Homo sapien
aaggagcctctaagggctgattctc

SEQ ID NO: 4823725 - DNA, 25 bp, Homo sapien
ctacacagaaggagcctctaagggc

SEQ ID NO: 4823726 - DNA, 25 bp, Homo sapien
ctggattgagcgctctttgcccacc

SEQ ID NO: 4823727 - DNA, 25 bp, Homo sapien
tgggtggaggaatgcaggatacagg

SEQ ID NO: 4823728 - DNA, 25 bp, Homo sapien
gttcaaggagctggattgagcgctc

SEQ ID NO: 4823729 - DNA, 25 bp, Homo sapien
gggtaccagagtctcagttcctatt

SEQ ID NO: 4823730 - DNA, 25 bp, Homo sapien
tgcttggcagcttggcggagtgcac

SEQ ID NO: 4823731 - DNA, 25 bp, Homo sapien
aatggtgcttggcagcttggcggag

SEQ ID NO: 4823732 - DNA, 25 bp, Homo sapien
tggtgcttggcagcttggcggagtg

SEQ ID NO: 4823733 - DNA, 25 bp, Homo sapien
ctaaatggtgcttggcagcttggcg

SEQ ID NO: 4823734 - DNA, 25 bp, Homo sapien
aagtctgtgcccttgcgcagccccg

SEQ ID NO: 4823735 - DNA, 25 bp, Homo sapien
gttcagcatgtagccgagcgcccag

SEQ ID NO: 4823736 - DNA, 25 bp, Homo sapien
acaagcgcagccaggagcgcggagg

SEQ ID NO: 4823737 - DNA, 25 bp, Homo sapien
gcaggaggacgacccaggagctgaa

SEQ ID NO: 4823738 - DNA, 25 bp, Homo sapien
aggcgcgctcgtcgaagccgtagcc

SEQ ID NO: 4823739 - DNA, 25 bp, Homo sapien
tggaagatcacgccgccgaaggcgc

SEQ ID NO: 4823740 - DNA, 25 bp, Homo sapien
ccgaaggcgcgctcgtcgaagccgt

SEQ ID NO: 4823741 - DNA, 25 bp, Homo sapien
agccgtagccgcgactcagcagctg

SEQ ID NO: 4823742 - DNA, 25 bp, Homo sapien
gttgccctggcacccgagcttgcag

SEQ ID NO: 4823743 - DNA, 25 bp, Homo sapien
atggccccggcgcagtagtcggcca

SEQ ID NO: 4823744 - DNA, 25 bp, Homo sapien
tagtcggccaggcgggcccgttgcc

SEQ ID NO: 4823745 - DNA, 25 bp, Homo sapien
gaacatggccccggcgcagtagtcg

SEQ ID NO: 4823746 - DNA, 25 bp, Homo sapien
ggacgcgggcgggacaccgtcaggc

SEQ ID NO: 4823747 - DNA, 25 bp, Homo sapien
gggcgggacaccgtcaggcaggcga

SEQ ID NO: 4823748 - DNA, 25 bp, Homo sapien
caggaggtctcggccccacggggag

SEQ ID NO: 4823749 - DNA, 25 bp, Homo sapien
gggacaccgtcaggcaggcgaccac

SEQ ID NO: 4823750 - DNA, 25 bp, Homo sapien
acgaatggcaagaccgagtccgagg

SEQ ID NO: 4823751 - DNA, 25 bp, Homo sapien
gacacgaatggcaagaccgagtccg

SEQ ID NO: 4823752 - DNA, 25 bp, Homo sapien
cacacaggcccggacacgaatggca

SEQ ID NO: 4823753 - DNA, 25 bp, Homo sapien
gcccggacacgaatggcaagaccga

SEQ ID NO: 4823754 - DNA, 25 bp, Homo sapien
gtctgtctgagactaggccctggga

SEQ ID NO: 4823755 - DNA, 25 bp, Homo sapien
ttggagtctccggtgggcacactcc

SEQ ID NO: 4823756 - DNA, 25 bp, Homo sapien
gagcaggaggcagcaacaccttggt

SEQ ID NO: 4823757 - DNA, 25 bp, Homo sapien
gacgactcgtacgtttctcttggag

SEQ ID NO: 4823758 - DNA, 25 bp, Homo sapien
ctggttgcagacattcactgcggct

SEQ ID NO: 4823759 - DNA, 25 bp, Homo sapien
tccgcaaaaagtccacagtgtagaa

SEQ ID NO: 4823760 - DNA, 25 bp, Homo sapien
ttgcagacattcactgcggctgcct

SEQ ID NO: 4823761 - DNA, 25 bp, Homo sapien
gggcagccccatcgaagtccgcaaa

SEQ ID NO: 4823762 - DNA, 25 bp, Homo sapien
gtgaccgaaccccagcggctcagag

SEQ ID NO: 4823763 - DNA, 25 bp, Homo sapien
ctgtagggggcgcagtcacactgtg

SEQ ID NO: 4823764 - DNA, 25 bp, Homo sapien
ggcgcagtcacactgtgaccgaacc

SEQ ID NO: 4823765 - DNA, 25 bp, Homo sapien
actgtgaccgaaccccagcggctca

SEQ ID NO: 4823766 - DNA, 25 bp, Homo sapien
gaagagcccagaaaccagatctcgg

SEQ ID NO: 4823767 - DNA, 25 bp, Homo sapien
gctggaagaccccattgaaagagca

SEQ ID NO: 4823768 - DNA, 25 bp, Homo sapien
ccattgaaagagcatcgggagaagg

SEQ ID NO: 4823769 - DNA, 25 bp, Homo sapien
tgggggtcactgctccctgacaggc

SEQ ID NO: 4823770 - DNA, 25 bp, Homo sapien
gtgactggtacacatccccgagcag

SEQ ID NO: 4823771 - DNA, 25 bp, Homo sapien
ccgagcagcacttgggtggaaaagc

SEQ ID NO: 4823772 - DNA, 25 bp, Homo sapien
tgggtggaaaagcccctcggccagc

SEQ ID NO: 4823773 - DNA, 25 bp, Homo sapien
gtgcatggtgactggtacacatccc

SEQ ID NO: 4823774 - DNA, 25 bp, Homo sapien
gtctttccagccaattaaagcccag

SEQ ID NO: 4823775 - DNA, 25 bp, Homo sapien
ctttccagccaattaaagcccagcc

SEQ ID NO: 4823776 - DNA, 25 bp, Homo sapien
ctgtctttccagccaattaaagccc

SEQ ID NO: 4823777 - DNA, 25 bp, Homo sapien
tctttccagccaattaaagcccagc

SEQ ID NO: 4823778 - DNA, 25 bp, Homo sapien
tgtagactcggtagtgctggccgta

SEQ ID NO: 4823779 - DNA, 25 bp, Homo sapien
tcacggccatagcagaggaagctgt

SEQ ID NO: 4823780 - DNA, 25 bp, Homo sapien
gatgcagctggacctcgctggctct

SEQ ID NO: 4823781 - DNA, 25 bp, Homo sapien
tgtctcaaaagtgatctgggtagag

SEQ ID NO: 4823782 - DNA, 25 bp, Homo sapien
tgagcacactggtcgaggcctctgg

SEQ ID NO: 4823783 - DNA, 25 bp, Homo sapien
agtcactgccatgagcacactggtc

SEQ ID NO: 4823784 - DNA, 25 bp, Homo sapien
aggatgcgtgcaccccggaagtcaa

SEQ ID NO: 4823785 - DNA, 25 bp, Homo sapien
tggcccgagaggatgcgtgcacccc

SEQ ID NO: 4823786 - DNA, 25 bp, Homo sapien
gctgtaggggtgctcggagtccgcc

SEQ ID NO: 4823787 - DNA, 25 bp, Homo sapien
cctgctgtaggggtgctcggagtcc

SEQ ID NO: 4823788 - DNA, 25 bp, Homo sapien
agcctgctgtaggggtgctcggagt

SEQ ID NO: 4823789 - DNA, 25 bp, Homo sapien
tgctgtaggggtgctcggagtccgc

SEQ ID NO: 4823790 - DNA, 25 bp, Homo sapien
ttgtctgcatagctggagatgcccc

SEQ ID NO: 4823791 - DNA, 25 bp, Homo sapien
ggtgtgcccgcgtgtctctctttgg

SEQ ID NO: 4823792 - DNA, 25 bp, Homo sapien
tctttgggcacatcctgaagcgcct

SEQ ID NO: 4823793 - DNA, 25 bp, Homo sapien
gaggcatccaacaagactctggctg

SEQ ID NO: 4823794 - DNA, 25 bp, Homo sapien
aaacatggacgtgtgtgaagaacca

SEQ ID NO: 4823795 - DNA, 25 bp, Homo sapien
tgtctgccggccacttgtagataaa

SEQ ID NO: 4823796 - DNA, 25 bp, Homo sapien
caatgcctgtgtcgttctccttgtc

SEQ ID NO: 4823797 - DNA, 25 bp, Homo sapien
gctgtgctggcccacaatgcctgtg

SEQ ID NO: 4823798 - DNA, 25 bp, Homo sapien
agtcgatgtggctctaaccgcaccc

SEQ ID NO: 4823799 - DNA, 25 bp, Homo sapien
gggcttgtggatccccatctgggct

SEQ ID NO: 4823800 - DNA, 25 bp, Homo sapien
actctcgtgtcctggcgggggccct

SEQ ID NO: 4823801 - DNA, 25 bp, Homo sapien
gggctgaatacccagtcgatgtggc

SEQ ID NO: 4823802 - DNA, 25 bp, Homo sapien
gggcgggcgtccggcagcacccagg

SEQ ID NO: 4823803 - DNA, 25 bp, Homo sapien
gcgggcgtccggcagcacccagggg

SEQ ID NO: 4823804 - DNA, 25 bp, Homo sapien
ggcgggcgtccggcagcacccaggg

SEQ ID NO: 4823805 - DNA, 25 bp, Homo sapien
cggacgtcgcgggtggggacgcaca

SEQ ID NO: 4823806 - DNA, 25 bp, Homo sapien
cgtcgcgggtggggacgcacagcag

SEQ ID NO: 4823807 - DNA, 25 bp, Homo sapien
gggacgcacagcagtaggaggccgg

SEQ ID NO: 4823808 - DNA, 25 bp, Homo sapien
ggacgcacagcagtaggaggccggc

SEQ ID NO: 4823809 - DNA, 25 bp, Homo sapien
gacccggagagtgcggggagccgga

SEQ ID NO: 4823810 - DNA, 25 bp, Homo sapien
cgggaggacgatgcgtggacccgga

SEQ ID NO: 4823811 - DNA, 25 bp, Homo sapien
ggcgcgcgggaggacgatgcgtgga

SEQ ID NO: 4823812 - DNA, 25 bp, Homo sapien
ggaggacgatgcgtggacccggaga

SEQ ID NO: 4823813 - DNA, 25 bp, Homo sapien
ttccagccacacagcgtcagggagc

SEQ ID NO: 4823814 - DNA, 25 bp, Homo sapien
aggcgaagcgcagctggccccagac

SEQ ID NO: 4823815 - DNA, 25 bp, Homo sapien
cctttgcgcctgctgcaaagtggga

SEQ ID NO: 4823816 - DNA, 25 bp, Homo sapien
ccacgacatggctggcctttcggct

SEQ ID NO: 4823817 - DNA, 25 bp, Homo sapien
tcaagctgtaaactgggaggaccta

SEQ ID NO: 4823818 - DNA, 25 bp, Homo sapien
tttccgggtgtcatcacagtgtgca

SEQ ID NO: 4823819 - DNA, 25 bp, Homo sapien
tcaacatcctgagacatttccgggt

SEQ ID NO: 4823820 - DNA, 25 bp, Homo sapien
ccagctctatgtgggcggtctcctg

SEQ ID NO: 4823821 - DNA, 25 bp, Homo sapien
ggccctgcgccccccacgcactgac

SEQ ID NO: 4823822 - DNA, 25 bp, Homo sapien
cccgcatcggcatcgggggccctgc

SEQ ID NO: 4823823 - DNA, 25 bp, Homo sapien
gggccctgcgccccccacgcactga

SEQ ID NO: 4823824 - DNA, 25 bp, Homo sapien
catcggcatcgggggccctgcgccc

SEQ ID NO: 4823825 - DNA, 25 bp, Homo sapien
tctgctgcccgttgttggaagtgca

SEQ ID NO: 4823826 - DNA, 25 bp, Homo sapien
caggatgttgtgtgggactcaacgt

SEQ ID NO: 4823827 - DNA, 25 bp, Homo sapien
tgcctatgacgtgcctgggagctgt

SEQ ID NO: 4823828 - DNA, 25 bp, Homo sapien
tctgtgggaggcacatgcaggccaa

SEQ ID NO: 4823829 - DNA, 25 bp, Homo sapien
gtgatgcgctcactcttctcggtca

SEQ ID NO: 4823830 - DNA, 25 bp, Homo sapien
tcaaacagctgcttaatgagcgccg

SEQ ID NO: 4823831 - DNA, 25 bp, Homo sapien
tggaatccagaggtcccccgtcctg

SEQ ID NO: 4823832 - DNA, 25 bp, Homo sapien
ctagatgaaggtggaatccagaggt

SEQ ID NO: 4823833 - DNA, 25 bp, Homo sapien
aggtgcacagttggtcaaggcctgc

SEQ ID NO: 4823834 - DNA, 25 bp, Homo sapien
gcaggtgcacagttggtcaaggcct

SEQ ID NO: 4823835 - DNA, 25 bp, Homo sapien
gggcaggtgcacagttggtcaaggc

SEQ ID NO: 4823836 - DNA, 25 bp, Homo sapien
ctgggcaggtgcacagttggtcaag

SEQ ID NO: 4823837 - DNA, 25 bp, Homo sapien
gaggagtcggttctgctccttcagc

SEQ ID NO: 4823838 - DNA, 25 bp, Homo sapien
tccttcagcatgaggatggtctgct

SEQ ID NO: 4823839 - DNA, 25 bp, Homo sapien
tgctccttcagcatgaggatggtct

SEQ ID NO: 4823840 - DNA, 25 bp, Homo sapien
ctgggtgaggagtcggttctgctcc

SEQ ID NO: 4823841 - DNA, 25 bp, Homo sapien
tgccagaccgggggtgaggtggacg

SEQ ID NO: 4823842 - DNA, 25 bp, Homo sapien
cagaccgggggtgaggtggacgtca

SEQ ID NO: 4823843 - DNA, 25 bp, Homo sapien
agaccgggggtgaggtggacgtcag

SEQ ID NO: 4823844 - DNA, 25 bp, Homo sapien
ctgccagaccgggggtgaggtggac

SEQ ID NO: 4823845 - DNA, 25 bp, Homo sapien
cgggccacctcttgtaccttgggca

SEQ ID NO: 4823846 - DNA, 25 bp, Homo sapien
ccttgggcagtagccgccccagtgg

SEQ ID NO: 4823847 - DNA, 25 bp, Homo sapien
ccccaggcaccgggccacctcttgt

SEQ ID NO: 4823848 - DNA, 25 bp, Homo sapien
cacctcttgtaccttgggcagtagc

SEQ ID NO: 4823849 - DNA, 25 bp, Homo sapien
gctcctgcactcgttgcagctgctg

SEQ ID NO: 4823850 - DNA, 25 bp, Homo sapien
ggcgctggcgctcctgcactcgttg

SEQ ID NO: 4823851 - DNA, 25 bp, Homo sapien
tgctctggcccaggcggcgctggcg

SEQ ID NO: 4823852 - DNA, 25 bp, Homo sapien
tggcgctcctgcactcgttgcagct

SEQ ID NO: 4823853 - DNA, 25 bp, Homo sapien
cagtccacgccgctggcgatggtgt

SEQ ID NO: 4823854 - DNA, 25 bp, Homo sapien
ctggcgatggtgtgcctccgacgtt

SEQ ID NO: 4823855 - DNA, 25 bp, Homo sapien
gcgatggtgtgcctccgacgttccc

SEQ ID NO: 4823856 - DNA, 25 bp, Homo sapien
aggccgcagtccacgccgctggcga

SEQ ID NO: 4823857 - DNA, 25 bp, Homo sapien
cgggcacggggagcccgccgggcat

SEQ ID NO: 4823858 - DNA, 25 bp, Homo sapien
gggcacggggagcccgccgggcatc

SEQ ID NO: 4823859 - DNA, 25 bp, Homo sapien
gcacggggagcccgccgggcatccc

SEQ ID NO: 4823860 - DNA, 25 bp, Homo sapien
tcgggcacggggagcccgccgggca

SEQ ID NO: 4823861 - DNA, 25 bp, Homo sapien
gctctgctgaggtgcagcggcctcc

SEQ ID NO: 4823862 - DNA, 25 bp, Homo sapien
tgctgaggtgcagcggcctccacat

SEQ ID NO: 4823863 - DNA, 25 bp, Homo sapien
ggctctgctgaggtgcagcggcctc

SEQ ID NO: 4823864 - DNA, 25 bp, Homo sapien
tctgctgaggtgcagcggcctccac

SEQ ID NO: 4823865 - DNA, 25 bp, Homo sapien
catagaactaggggtcccccagcct

SEQ ID NO: 4823866 - DNA, 25 bp, Homo sapien
cccccagcctggtgtggctgctgga

SEQ ID NO: 4823867 - DNA, 25 bp, Homo sapien
atagaactaggggtcccccagcctg

SEQ ID NO: 4823868 - DNA, 25 bp, Homo sapien
ggtcccccagcctggtgtggctgct

SEQ ID NO: 4823869 - DNA, 25 bp, Homo sapien
ccaaacaccagctgtagggctggag

SEQ ID NO: 4823870 - DNA, 25 bp, Homo sapien
tccaaacaccagctgtagggctgga

SEQ ID NO: 4823871 - DNA, 25 bp, Homo sapien
gctcccggtgggttttctgagtcac

SEQ ID NO: 4823872 - DNA, 25 bp, Homo sapien
aaggaagcacttctgcctgagcagc

SEQ ID NO: 4823873 - DNA, 25 bp, Homo sapien
tcaggcttggtacaggttgggctcc

SEQ ID NO: 4823874 - DNA, 25 bp, Homo sapien
ggctaagctgtcacactgagaaggg

SEQ ID NO: 4823875 - DNA, 25 bp, Homo sapien
tctggcttgcctccctaagcaagcc

SEQ ID NO: 4823876 - DNA, 25 bp, Homo sapien
gcttgcctccctaagcaagcccctg

SEQ ID NO: 4823877 - DNA, 25 bp, Homo sapien
gcctccctaagcaagcccctgggct

SEQ ID NO: 4823878 - DNA, 25 bp, Homo sapien
ttgcctccctaagcaagcccctggg

SEQ ID NO: 4823879 - DNA, 25 bp, Homo sapien
gcgacaagcatgaagccctttccct

SEQ ID NO: 4823880 - DNA, 25 bp, Homo sapien
tgtgggactgcggtttctggcccgg

SEQ ID NO: 4823881 - DNA, 25 bp, Homo sapien
aggatccggagtccacgaagagccg

SEQ ID NO: 4823882 - DNA, 25 bp, Homo sapien
gtcccttgtgggaaatgcacgggca

SEQ ID NO: 4823883 - DNA, 25 bp, Homo sapien
gtccgcgctggagctcggttccagc

SEQ ID NO: 4823884 - DNA, 25 bp, Homo sapien
tccgcgctggagctcggttccagcg

SEQ ID NO: 4823885 - DNA, 25 bp, Homo sapien
gctggagctcggttccagcgccgcg

SEQ ID NO: 4823886 - DNA, 25 bp, Homo sapien
cgcgctggagctcggttccagcgcc

SEQ ID NO: 4823887 - DNA, 25 bp, Homo sapien
ctcagcagggaggtgcgcaggccgg

SEQ ID NO: 4823888 - DNA, 25 bp, Homo sapien
gcgctcagcagggaggtgcgcaggc

SEQ ID NO: 4823889 - DNA, 25 bp, Homo sapien
ccgtcggcgctcagcagggaggtgc

SEQ ID NO: 4823890 - DNA, 25 bp, Homo sapien
tcggcgctcagcagggaggtgcgca

SEQ ID NO: 4823891 - DNA, 25 bp, Homo sapien
tcaggtagccgctggccggggccac

SEQ ID NO: 4823892 - DNA, 25 bp, Homo sapien
ctcgaaggtcaggtagccgctggcc

SEQ ID NO: 4823893 - DNA, 25 bp, Homo sapien
aagcgctcgaaggtcaggtagccgc

SEQ ID NO: 4823894 - DNA, 25 bp, Homo sapien
cgaaggtcaggtagccgctggccgg

SEQ ID NO: 4823895 - DNA, 25 bp, Homo sapien
cgggactcgatctcgcgcaggtgca

SEQ ID NO: 4823896 - DNA, 25 bp, Homo sapien
tcccgcgcgtcggtgccctgccagc

SEQ ID NO: 4823897 - DNA, 25 bp, Homo sapien
gccgccggtcgtccaggatgtcgaa

SEQ ID NO: 4823898 - DNA, 25 bp, Homo sapien
tccaggatgtcgaacagggtgcgca

SEQ ID NO: 4823899 - DNA, 25 bp, Homo sapien
tcagcccacggcgacaatagcgact

SEQ ID NO: 4823900 - DNA, 25 bp, Homo sapien
cccacggcgacaatagcgactactt

SEQ ID NO: 4823901 - DNA, 25 bp, Homo sapien
gcgagctcagcccacggcgacaata

SEQ ID NO: 4823902 - DNA, 25 bp, Homo sapien
acaatagcgactacttttgaatggg

SEQ ID NO: 4823903 - DNA, 25 bp, Homo sapien
agaaccagtgggatcaatgccggcg

SEQ ID NO: 4823904 - DNA, 25 bp, Homo sapien
tccatggtcggtttaggctgctgag

SEQ ID NO: 4823905 - DNA, 25 bp, Homo sapien
tgctgcttctgacggatcttggtgc

SEQ ID NO: 4823906 - DNA, 25 bp, Homo sapien
taatccgggatttcatgagtcagag

SEQ ID NO: 4823907 - DNA, 25 bp, Homo sapien
cgccgggccggttgctggcatctta

SEQ ID NO: 4823908 - DNA, 25 bp, Homo sapien
ggcatcttaatgttctgtaggtgga

SEQ ID NO: 4823909 - DNA, 25 bp, Homo sapien
tgctggcatcttaatgttctgtagg

SEQ ID NO: 4823910 - DNA, 25 bp, Homo sapien
gccggttgctggcatcttaatgttc

SEQ ID NO: 4823911 - DNA, 25 bp, Homo sapien
catttgggtaccagcaagtgtcaca

SEQ ID NO: 4823912 - DNA, 25 bp, Homo sapien
ccaaggttaccgagttcgagggctg

SEQ ID NO: 4823913 - DNA, 25 bp, Homo sapien
ggaacagagttagacgagccacgtg

SEQ ID NO: 4823914 - DNA, 25 bp, Homo sapien
ttagaagggtttgccgcaggcgctc

SEQ ID NO: 4823915 - DNA, 25 bp, Homo sapien
gagtacaggtcggtggtgttacatg

SEQ ID NO: 4823916 - DNA, 25 bp, Homo sapien
tacaggtcggtggtgttacacgtgc

SEQ ID NO: 4823917 - DNA, 25 bp, Homo sapien
tgttacacgtgctgttgcaggtgtg

SEQ ID NO: 4823918 - DNA, 25 bp, Homo sapien
gtacaggtcggtggtgttacatgct

SEQ ID NO: 4823919 - DNA, 25 bp, Homo sapien
aggtcggtggtgttacacacattca

SEQ ID NO: 4823920 - DNA, 25 bp, Homo sapien
caggcgtgcaggtcggtggtgttac

SEQ ID NO: 4823921 - DNA, 25 bp, Homo sapien
gcgtgcaggtcggtggtgttacaca

SEQ ID NO: 4823922 - DNA, 25 bp, Homo sapien
actgttgcaggcgtgcaggtcggtg

SEQ ID NO: 4823923 - DNA, 25 bp, Homo sapien
tgttgcagacgtgcaggtcagtgct

SEQ ID NO: 4823924 - DNA, 25 bp, Homo sapien
cacgctgttgcagacgtgcaggtca

SEQ ID NO: 4823925 - DNA, 25 bp, Homo sapien
cgtgcaggtcagtgctgttacacac

SEQ ID NO: 4823926 - DNA, 25 bp, Homo sapien
attcacgctgttgcagacgtgcagg

SEQ ID NO: 4823927 - DNA, 25 bp, Homo sapien
gctgttgcaggcgtgcaggttggtg

SEQ ID NO: 4823928 - DNA, 25 bp, Homo sapien
tgcaggcgtgcaggtcggtggtgtt

SEQ ID NO: 4823929 - DNA, 25 bp, Homo sapien
caggcgtgcaggtcggtggtgttac

SEQ ID NO: 4823930 - DNA, 25 bp, Homo sapien
ctgttgcaggcgtgcaggtcggtgg

SEQ ID NO: 4823931 - DNA, 25 bp, Homo sapien
cgtgcaggtcggtggtgttacacac

SEQ ID NO: 4823932 - DNA, 25 bp, Homo sapien
cattctgttgcaggcgtgcaggtca

SEQ ID NO: 4823933 - DNA, 25 bp, Homo sapien
ttgcaggcgtgcaggtcagtgttac

SEQ ID NO: 4823934 - DNA, 25 bp, Homo sapien
caggcgtgcaggtcagtgttacaca

SEQ ID NO: 4823935 - DNA, 25 bp, Homo sapien
attcattctgttgcaggcgtgcagg

SEQ ID NO: 4823936 - DNA, 25 bp, Homo sapien
tcacgctgttgcaggcgtgcaggtc

SEQ ID NO: 4823937 - DNA, 25 bp, Homo sapien
gttacacacattcacgctgttgcag

SEQ ID NO: 4823938 - DNA, 25 bp, Homo sapien
attcacgctgttgcaggcgtgcagg

SEQ ID NO: 4823939 - DNA, 25 bp, Homo sapien
cgtgcaggtcggtggtgttacacac

SEQ ID NO: 4823940 - DNA, 25 bp, Homo sapien
ggcgtgcaggtcggtggtgttacac

SEQ ID NO: 4823941 - DNA, 25 bp, Homo sapien
gcgtgcaggtcggtggtgttacaca

SEQ ID NO: 4823942 - DNA, 25 bp, Homo sapien
cgtgcaggtcggtggtgttacacac

SEQ ID NO: 4823943 - DNA, 25 bp, Homo sapien
acattcacactgttgcaggcgtgca

SEQ ID NO: 4823944 - DNA, 25 bp, Homo sapien
tgcaggtcggtggtgttacacacat

SEQ ID NO: 4823945 - DNA, 25 bp, Homo sapien
caggtcggtgctgttacacacattc

SEQ ID NO: 4823946 - DNA, 25 bp, Homo sapien
cgtgcaggtcggtggtgttacacac

SEQ ID NO: 4823947 - DNA, 25 bp, Homo sapien
aggtcggtggtgttacacacattca

SEQ ID NO: 4823948 - DNA, 25 bp, Homo sapien
gcaggtcggtggtgttacacacatt

SEQ ID NO: 4823949 - DNA, 25 bp, Homo sapien
tgcaggtcggtggtgttacacacat

SEQ ID NO: 4823950 - DNA, 25 bp, Homo sapien
caggtcggtggtgttacacacattc

SEQ ID NO: 4823951 - DNA, 25 bp, Homo sapien
aggcgtgcaggtcggtggtgttaca

SEQ ID NO: 4823952 - DNA, 25 bp, Homo sapien
acattcacactgttgcaggcgtgca

SEQ ID NO: 4823953 - DNA, 25 bp, Homo sapien
ttcacacttgcaggcgtgcaggtcg

SEQ ID NO: 4823954 - DNA, 25 bp, Homo sapien
tgcaggtcggtggtgttacacacat

SEQ ID NO: 4823955 - DNA, 25 bp, Homo sapien
tgcaggcgtgcaggtcggtggtaca

SEQ ID NO: 4823956 - DNA, 25 bp, Homo sapien
ctgttgcaggcgtgcaggtcggtgg

SEQ ID NO: 4823957 - DNA, 25 bp, Homo sapien
ttgcaggcgtgcaggtcggtggtac

SEQ ID NO: 4823958 - DNA, 25 bp, Homo sapien
tgttgcaggcgtgcaggtcggtggt

SEQ ID NO: 4823959 - DNA, 25 bp, Homo sapien
caggcgtgcaggtcggtggtgttac

SEQ ID NO: 4823960 - DNA, 25 bp, Homo sapien
tgttgcaggcgtgcaggtcggtggt

SEQ ID NO: 4823961 - DNA, 25 bp, Homo sapien
ggtcggtggtgttacacacattcat

SEQ ID NO: 4823962 - DNA, 25 bp, Homo sapien
cgtgcaggtcggtggtgttacacac

SEQ ID NO: 4823963 - DNA, 25 bp, Homo sapien
gctgttgcaggcgtgcaggtcggtg

SEQ ID NO: 4823964 - DNA, 25 bp, Homo sapien
tgcaggcgtgcaggtcggtggtaca

SEQ ID NO: 4823965 - DNA, 25 bp, Homo sapien
ttgcaggcgtgcaggtcggtggtac

SEQ ID NO: 4823966 - DNA, 25 bp, Homo sapien
tgttgcaggcgtgcaggtcggtggt

SEQ ID NO: 4823967 - DNA, 25 bp, Homo sapien
gcttcatggttgtgggacccagagt

SEQ ID NO: 4823968 - DNA, 25 bp, Homo sapien
gagagcctgttctacctgtaccgcg

SEQ ID NO: 4823969 - DNA, 25 bp, Homo sapien
tgagtcccgagatcgtgcacttcaa

SEQ ID NO: 4823970 - DNA, 25 bp, Homo sapien
tgcagagcttcagccgattcacacg

SEQ ID NO: 4823971 - DNA, 25 bp, Homo sapien
caagtgaggccgtcagtcttggtgt

SEQ ID NO: 4823972 - DNA, 25 bp, Homo sapien
gccgtcagtcttggtgtgatgcggg

SEQ ID NO: 4823973 - DNA, 25 bp, Homo sapien
acaccgtgaggacaagtgaggccgt

SEQ ID NO: 4823974 - DNA, 25 bp, Homo sapien
tgaggacaagtgaggccgtcagtct

SEQ ID NO: 4823975 - DNA, 25 bp, Homo sapien
gaggggctgccgtgactccagaggc

SEQ ID NO: 4823976 - DNA, 25 bp, Homo sapien
gggctggctctggtgtttacaagct

SEQ ID NO: 4823977 - DNA, 25 bp, Homo sapien
ctggctctggtgtttacaagctgga

SEQ ID NO: 4823978 - DNA, 25 bp, Homo sapien
cagggctggctctggtgtttacaag

SEQ ID NO: 4823979 - DNA, 25 bp, Homo sapien
gggaggcatccttgcgcctgcgttt

SEQ ID NO: 4823980 - DNA, 25 bp, Homo sapien
cgcctgcgtttcacacagggcctgt

SEQ ID NO: 4823981 - DNA, 25 bp, Homo sapien
atccttgcgcctgcgtttcacacag

SEQ ID NO: 4823982 - DNA, 25 bp, Homo sapien
cagatgcttggcgggaggcatcctt

SEQ ID NO: 4823983 - DNA, 25 bp, Homo sapien
tgccgccagctgcttgagtgaagcc

SEQ ID NO: 4823984 - DNA, 25 bp, Homo sapien
tgaggagccttgagacccctccagt

SEQ ID NO: 4823985 - DNA, 25 bp, Homo sapien
ccccactccatgaggagccttgaga

SEQ ID NO: 4823986 - DNA, 25 bp, Homo sapien
caggcctccaggcgtttattcagcc

SEQ ID NO: 4823987 - DNA, 25 bp, Homo sapien
gctgagtctgggccccccacgcaga

SEQ ID NO: 4823988 - DNA, 25 bp, Homo sapien
gagtctgggccccccacgcagagct

SEQ ID NO: 4823989 - DNA, 25 bp, Homo sapien
ctgggccccccacgcagagctggct

SEQ ID NO: 4823990 - DNA, 25 bp, Homo sapien
gtctgggccccccacgcagagctgg

SEQ ID NO: 4823991 - DNA, 25 bp, Homo sapien
agcttccgcgcctcaaccacggaag

SEQ ID NO: 4823992 - DNA, 25 bp, Homo sapien
gcctccagcttccgcgcctcaacca

SEQ ID NO: 4823993 - DNA, 25 bp, Homo sapien
ccagcttccgcgcctcaaccacgga

SEQ ID NO: 4823994 - DNA, 25 bp, Homo sapien
ctccagcttccgcgcctcaaccacg

SEQ ID NO: 4823995 - DNA, 25 bp, Homo sapien
ctgaggtcgaggtggtgcgctcccc

SEQ ID NO: 4823996 - DNA, 25 bp, Homo sapien
ctgaggcactcaggttcctccgaat

SEQ ID NO: 4823997 - DNA, 25 bp, Homo sapien
acggcgatgactgaggcactcaggt

SEQ ID NO: 4823998 - DNA, 25 bp, Homo sapien
cgaggtggtgcgctcccccctggat

SEQ ID NO: 4823999 - DNA, 25 bp, Homo sapien
atgatgttgctggcggctctgagat

SEQ ID NO: 4824000 - DNA, 25 bp, Homo sapien
gccggggccacacgccccaggtgtc

SEQ ID NO: 4824001 - DNA, 25 bp, Homo sapien
ctggtcagcagccagtcgggccggg

SEQ ID NO: 4824002 - DNA, 25 bp, Homo sapien
cccagaagctggtcagcagccagtc

SEQ ID NO: 4824003 - DNA, 25 bp, Homo sapien
acacgccccaggtgtccaggcagta

SEQ ID NO: 4824004 - DNA, 25 bp, Homo sapien
catatcggtcacattgttgctggcg

SEQ ID NO: 4824005 - DNA, 25 bp, Homo sapien
ctggcggagctcgtcagtgaagggc

SEQ ID NO: 4824006 - DNA, 25 bp, Homo sapien
ggcaggtccgggaacatatcggtca

SEQ ID NO: 4824007 - DNA, 25 bp, Homo sapien
tgctggcgaaggtcaggttgatctc

SEQ ID NO: 4824008 - DNA, 25 bp, Homo sapien
tgtcgtagcagtgctcggagcccga

SEQ ID NO: 4824009 - DNA, 25 bp, Homo sapien
acagctgtggtagagccggtagatg

SEQ ID NO: 4824010 - DNA, 25 bp, Homo sapien
tagagccggtagatgtcgtagcagt

SEQ ID NO: 4824011 - DNA, 25 bp, Homo sapien
gagcccgaggcgttgtagaccagcc

SEQ ID NO: 4824012 - DNA, 25 bp, Homo sapien
ggatctgtaggtcccagtgaggaag

SEQ ID NO: 4824013 - DNA, 25 bp, Homo sapien
ggccctccaggctacctgcttggag

SEQ ID NO: 4824014 - DNA, 25 bp, Homo sapien
ttctgggaaggtcgtgctgtccacc

SEQ ID NO: 4824015 - DNA, 25 bp, Homo sapien
ggcctggctacagccagtgctgaga

SEQ ID NO: 4824016 - DNA, 25 bp, Homo sapien
tgggcctcactcagcagccgatcac

SEQ ID NO: 4824017 - DNA, 25 bp, Homo sapien
tcgcagccccgtgatcctctgggcc

SEQ ID NO: 4824018 - DNA, 25 bp, Homo sapien
gtgctcgcagccccgtgatcctctg

SEQ ID NO: 4824019 - DNA, 25 bp, Homo sapien
ggcctcactcagcagccgatcacag

SEQ ID NO: 4824020 - DNA, 25 bp, Homo sapien
ctgaccaccagcctcgggacactcc

SEQ ID NO: 4824021 - DNA, 25 bp, Homo sapien
gaccaccagcctcgggacactccag

SEQ ID NO: 4824022 - DNA, 25 bp, Homo sapien
tgaccaccagcctcgggacactcca

SEQ ID NO: 4824023 - DNA, 25 bp, Homo sapien
cttctcgtctgacagcggctggcag

SEQ ID NO: 4824024 - DNA, 25 bp, Homo sapien
aactcccagcggaccgtgtcgtagg

SEQ ID NO: 4824025 - DNA, 25 bp, Homo sapien
cattccgggcgaacatgaagagctg

SEQ ID NO: 4824026 - DNA, 25 bp, Homo sapien
ggtagtccatcatggccagcacggt

SEQ ID NO: 4824027 - DNA, 25 bp, Homo sapien
gaacaagtccttgatctgtcggaac

SEQ ID NO: 4824028 - DNA, 25 bp, Homo sapien
gatctgtcggaacgcttcccgcaca

SEQ ID NO: 4824029 - DNA, 25 bp, Homo sapien
tccttgatctgtcggaacgcttccc

SEQ ID NO: 4824030 - DNA, 25 bp, Homo sapien
caagtccttgatctgtcggaacgct

SEQ ID NO: 4824031 - DNA, 25 bp, Homo sapien
tgccacagctagaacgggcgcgctg

SEQ ID NO: 4824032 - DNA, 25 bp, Homo sapien
ccacagctagaacgggcgcgctggc

SEQ ID NO: 4824033 - DNA, 25 bp, Homo sapien
ggtggggatacttcatcctcaggta

SEQ ID NO: 4824034 - DNA, 25 bp, Homo sapien
aggcctgccacagctagaacgggcg

SEQ ID NO: 4824035 - DNA, 25 bp, Homo sapien
agctctcactgggaaaggccgctag

SEQ ID NO: 4824036 - DNA, 25 bp, Homo sapien
aggaggacgacacttctgagaccca

SEQ ID NO: 4824037 - DNA, 25 bp, Homo sapien
gcccacaggtgccacaaggaggacg

SEQ ID NO: 4824038 - DNA, 25 bp, Homo sapien
gtggccgcacatccaagctgagcag

SEQ ID NO: 4824039 - DNA, 25 bp, Homo sapien
cggagcagctctgcgaagtcggcca

SEQ ID NO: 4824040 - DNA, 25 bp, Homo sapien
gtcagcagctccgtgtgcccgcgct

SEQ ID NO: 4824041 - DNA, 25 bp, Homo sapien
aggtcgcgtcgtagcgcgcggagca

SEQ ID NO: 4824042 - DNA, 25 bp, Homo sapien
actgcgcaccgaacggcagcgactt

SEQ ID NO: 4824043 - DNA, 25 bp, Homo sapien
acgtcgccctcgttcccagtgtaga

SEQ ID NO: 4824044 - DNA, 25 bp, Homo sapien
gctccgcgacgaaggccgagttgtt

SEQ ID NO: 4824045 - DNA, 25 bp, Homo sapien
tgctccgcgaagaccagtagagccc

SEQ ID NO: 4824046 - DNA, 25 bp, Homo sapien
gagttgttggcgaaggcccacacgt

SEQ ID NO: 4824047 - DNA, 25 bp, Homo sapien
gaagcgctcgaagttgaagtggtcc

SEQ ID NO: 4824048 - DNA, 25 bp, Homo sapien
gaaggtcttgttgccgaagcgctcg

SEQ ID NO: 4824049 - DNA, 25 bp, Homo sapien
agcgctgagggaaggtcttgttgcc

SEQ ID NO: 4824050 - DNA, 25 bp, Homo sapien
ttgaagtggtccagacgctgctgga

SEQ ID NO: 4824051 - DNA, 25 bp, Homo sapien
ctgtggggggacgcgaacctcagag

SEQ ID NO: 4824052 - DNA, 25 bp, Homo sapien
tggggggacgcgaacctcagaggcg

SEQ ID NO: 4824053 - DNA, 25 bp, Homo sapien
gtggggggacgcgaacctcagaggc

SEQ ID NO: 4824054 - DNA, 25 bp, Homo sapien
tgtggggggacgcgaacctcagagg

SEQ ID NO: 4824055 - DNA, 25 bp, Homo sapien
gcctggaggccgcgcagcccgagcg

SEQ ID NO: 4824056 - DNA, 25 bp, Homo sapien
cgccagcagcaggaccggggcccag

SEQ ID NO: 4824057 - DNA, 25 bp, Homo sapien
tggaggccgcgcagcccgagcgcca

SEQ ID NO: 4824058 - DNA, 25 bp, Homo sapien
ccggggcccagggagcggagcccat

SEQ ID NO: 4824059 - DNA, 25 bp, Homo sapien
ggagagggtcccaaacagagtgctg

SEQ ID NO: 4824060 - DNA, 25 bp, Homo sapien
cccatccggagctgcgctagggcga

SEQ ID NO: 4824061 - DNA, 25 bp, Homo sapien
ccgttctgctgccctaagggcggga

SEQ ID NO: 4824062 - DNA, 25 bp, Homo sapien
aaacagagtgctggccccccgaaga

SEQ ID NO: 4824063 - DNA, 25 bp, Homo sapien
ctgcccttccgactggcacccagtg

SEQ ID NO: 4824064 - DNA, 25 bp, Homo sapien
ttccgactggcacccagtgtgccca

SEQ ID NO: 4824065 - DNA, 25 bp, Homo sapien
ccttccgactggcacccagtgtgcc

SEQ ID NO: 4824066 - DNA, 25 bp, Homo sapien
actggcacccagtgtgcccacacag

SEQ ID NO: 4824067 - DNA, 25 bp, Homo sapien
tgtctccgacatgcccctgggaacg

SEQ ID NO: 4824068 - DNA, 25 bp, Homo sapien
gtgacctactgcatccgcacttggg

SEQ ID NO: 4824069 - DNA, 25 bp, Homo sapien
ctcagactgaaaggctatcggcggg

SEQ ID NO: 4824070 - DNA, 25 bp, Homo sapien
acttccgcgtgtgaaatttggtggc

SEQ ID NO: 4824071 - DNA, 25 bp, Homo sapien
aattgaccacttaaccacttccgcg

SEQ ID NO: 4824072 - DNA, 25 bp, Homo sapien
ggtaaggcgctgactttgtaagaag

SEQ ID NO: 4824073 - DNA, 25 bp, Homo sapien
ctaggtcacagagcggtcaaggaac

SEQ ID NO: 4824074 - DNA, 25 bp, Homo sapien
caggacaagagaaacggcaagtgga

SEQ ID NO: 4824075 - DNA, 25 bp, Homo sapien
gaaccctacgtttctgtcaggacaa

SEQ ID NO: 4824076 - DNA, 25 bp, Homo sapien
cctcaggcagtttcgctcaggctca

SEQ ID NO: 4824077 - DNA, 25 bp, Homo sapien
tccaggacctgtaggaccacggatg

SEQ ID NO: 4824078 - DNA, 25 bp, Homo sapien
tcagatcttgccttcagtgccgcag

SEQ ID NO: 4824079 - DNA, 25 bp, Homo sapien
tcagaactaaaacggcaactggcca

SEQ ID NO: 4824080 - DNA, 25 bp, Homo sapien
tatgatcgctgcatgtgacagggtg

SEQ ID NO: 4824081 - DNA, 25 bp, Homo sapien
gactaagcgagaccttgccacaaaa

SEQ ID NO: 4824082 - DNA, 25 bp, Homo sapien
aacacaccaggttgagacgttgagg

SEQ ID NO: 4824083 - DNA, 25 bp, Homo sapien
ttctagattagacgcacgctggagc

SEQ ID NO: 4824084 - DNA, 25 bp, Homo sapien
acagcaacgcgtcaggggccgcttg

SEQ ID NO: 4824085 - DNA, 25 bp, Homo sapien
cactttgtcgtggtgtctgcgtggc

SEQ ID NO: 4824086 - DNA, 25 bp, Homo sapien
aacatgggctggctacgagggtcaa

SEQ ID NO: 4824087 - DNA, 25 bp, Homo sapien
gaggcttccgctccaagagggactg

SEQ ID NO: 4824088 - DNA, 25 bp, Homo sapien
aaagcaaacgaagcccagacaacct

SEQ ID NO: 4824089 - DNA, 25 bp, Homo sapien
tgccgaaaagcaaacgaagcccaga

SEQ ID NO: 4824090 - DNA, 25 bp, Homo sapien
cttgccgaaaagcaaacgaagccca

SEQ ID NO: 4824091 - DNA, 25 bp, Homo sapien
ccgaaaagcaaacgaagcccagaca

SEQ ID NO: 4824092 - DNA, 25 bp, Homo sapien
gccccggcccggaaagcagatttgc

SEQ ID NO: 4824093 - DNA, 25 bp, Homo sapien
cggaaagcagatttgcccctttttg

SEQ ID NO: 4824094 - DNA, 25 bp, Homo sapien
tcggggggagtcgagtctgcccgcc

SEQ ID NO: 4824095 - DNA, 25 bp, Homo sapien
gcgtcggggggagtcgagtctgccc

SEQ ID NO: 4824096 - DNA, 25 bp, Homo sapien
cgcagcgaccccgggcctcggtccg

SEQ ID NO: 4824097 - DNA, 25 bp, Homo sapien
gcagcgaccccgggcctcggtccgc

SEQ ID NO: 4824098 - DNA, 25 bp, Homo sapien
tgcagcacaagagccgccggcagtt

SEQ ID NO: 4824099 - DNA, 25 bp, Homo sapien
ttgccgtagctctcgccaaagctct

SEQ ID NO: 4824100 - DNA, 25 bp, Homo sapien
gagccgccggcagttcttgctgttg

SEQ ID NO: 4824101 - DNA, 25 bp, Homo sapien
cagttcttgctgttgccgtagctct

SEQ ID NO: 4824102 - DNA, 25 bp, Homo sapien
cgggcagccattgcggcgcacagaa

SEQ ID NO: 4824103 - DNA, 25 bp, Homo sapien
cctgtaaaagactgagagctccgcc

SEQ ID NO: 4824104 - DNA, 25 bp, Homo sapien
gcactgagagctcacggcttgcggc

SEQ ID NO: 4824105 - DNA, 25 bp, Homo sapien
gcacagaaccgtccgcgtgtgagca

SEQ ID NO: 4824106 - DNA, 25 bp, Homo sapien
ccgagctaagctggccgcgccgcat

SEQ ID NO: 4824107 - DNA, 25 bp, Homo sapien
gagctaagctggccgcgccgcatct

SEQ ID NO: 4824108 - DNA, 25 bp, Homo sapien
cccgagctaagctggccgcgccgca

SEQ ID NO: 4824109 - DNA, 25 bp, Homo sapien
ctaagctggccgcgccgcatctcac

SEQ ID NO: 4824110 - DNA, 25 bp, Homo sapien
tgcgcctggaccggcgccgagcgag

SEQ ID NO: 4824111 - DNA, 25 bp, Homo sapien
ctgcgcctggaccggcgccgagcga

SEQ ID NO: 4824112 - DNA, 25 bp, Homo sapien
gcgcctggaccggcgccgagcgagg

SEQ ID NO: 4824113 - DNA, 25 bp, Homo sapien
accacgttccatttgtaagtgcagg

SEQ ID NO: 4824114 - DNA, 25 bp, Homo sapien
ctgggagtcacgcaccattacctct

SEQ ID NO: 4824115 - DNA, 25 bp, Homo sapien
gggagtcacgcaccattacctctac

SEQ ID NO: 4824116 - DNA, 25 bp, Homo sapien
cattacctctaccacgttccatttg

SEQ ID NO: 4824117 - DNA, 25 bp, Homo sapien
tatgtagagcaaacaccgaagggct

SEQ ID NO: 4824118 - DNA, 25 bp, Homo sapien
tgggcactttgatagcgggcatgct

SEQ ID NO: 4824119 - DNA, 25 bp, Homo sapien
cctgaattgcgtcaagaagacgggc

SEQ ID NO: 4824120 - DNA, 25 bp, Homo sapien
catgctgtgccatgacacgtgtggt

SEQ ID NO: 4824121 - DNA, 25 bp, Homo sapien
gcagctgcttatgcagactccaggg

SEQ ID NO: 4824122 - DNA, 25 bp, Homo sapien
ggacgctggatccaccaatatctca

SEQ ID NO: 4824123 - DNA, 25 bp, Homo sapien
gccctgcagagaaaggtctgacaga

SEQ ID NO: 4824124 - DNA, 25 bp, Homo sapien
cacatgtttgaacatagaggaccag

SEQ ID NO: 4824125 - DNA, 25 bp, Homo sapien
tcaacggcgacccagtcaagaaggt

SEQ ID NO: 4824126 - DNA, 25 bp, Homo sapien
tcaagaaggtgatctgcaccgggcc

SEQ ID NO: 4824127 - DNA, 25 bp, Homo sapien
caaggaggagttcacagtcaacggc

SEQ ID NO: 4824128 - DNA, 25 bp, Homo sapien
cacttgggctcgtgaagaagctcca

SEQ ID NO: 4824129 - DNA, 25 bp, Homo sapien
agtgagcggagcctgcgggctgggt

SEQ ID NO: 4824130 - DNA, 25 bp, Homo sapien
gcctgacatgggaggggcctgacgt

SEQ ID NO: 4824131 - DNA, 25 bp, Homo sapien
cctgacgtgggggtcggagtgggtg

SEQ ID NO: 4824132 - DNA, 25 bp, Homo sapien
gtggggcctgacatgggaggggcct

SEQ ID NO: 4824133 - DNA, 25 bp, Homo sapien
gctgggtggggcctgacatgggagg

SEQ ID NO: 4824134 - DNA, 25 bp, Homo sapien
tctggagtgggcgggacgtggagtg

SEQ ID NO: 4824135 - DNA, 25 bp, Homo sapien
ggtctggagtgggcgggacgtggag

SEQ ID NO: 4824136 - DNA, 25 bp, Homo sapien
gtctggagtgggcgggacgtggagt

SEQ ID NO: 4824137 - DNA, 25 bp, Homo sapien
gggtctggagtgggcgggacgtgga

SEQ ID NO: 4824138 - DNA, 25 bp, Homo sapien
catccaggccgtgagagacaagtga

SEQ ID NO: 4824139 - DNA, 25 bp, Homo sapien
gacaagtttatctacgccacggtga

SEQ ID NO: 4824140 - DNA, 25 bp, Homo sapien
gagcgcgcgcagtacatcgagtttt

SEQ ID NO: 4824141 - DNA, 25 bp, Homo sapien
gagctgagcaccatgtaccggcata

SEQ ID NO: 4824142 - DNA, 25 bp, Homo sapien
ttttgagaacatggccggtgcgttc

SEQ ID NO: 4824143 - DNA, 25 bp, Homo sapien
catcgtggccgggatcttcctgatt

SEQ ID NO: 4824144 - DNA, 25 bp, Homo sapien
tcttcctgattttcatcgagattgc

SEQ ID NO: 4824145 - DNA, 25 bp, Homo sapien
ccattctcgggtgggttctccgtgg

SEQ ID NO: 4824146 - DNA, 25 bp, Homo sapien
gccaccctcgaacgtccgctgtcgg

SEQ ID NO: 4824147 - DNA, 25 bp, Homo sapien
ggccaccctcgaacgtccgctgtcg

SEQ ID NO: 4824148 - DNA, 25 bp, Homo sapien
aggccaccctcgaacgtccgctgtc

SEQ ID NO: 4824149 - DNA, 25 bp, Homo sapien
caccctcgaacgtccgctgtcggcc

SEQ ID NO: 4824150 - DNA, 25 bp, Homo sapien
agaaagagtggtagagcagagcctg

SEQ ID NO: 4824151 - DNA, 25 bp, Homo sapien
tagaaagagtggtagagcagagcct

SEQ ID NO: 4824152 - DNA, 25 bp, Homo sapien
gaaagagtggtagagcagagcctga

SEQ ID NO: 4824153 - DNA, 25 bp, Homo sapien
tggagttggaactggccccggccac

SEQ ID NO: 4824154 - DNA, 25 bp, Homo sapien
cttcatgtggtctctgtgtgggccg

SEQ ID NO: 4824155 - DNA, 25 bp, Homo sapien
cagagccatgcgtgttgcatcttca

SEQ ID NO: 4824156 - DNA, 25 bp, Homo sapien
cctgggtccgtctgggtggacggct

SEQ ID NO: 4824157 - DNA, 25 bp, Homo sapien
cccagagggtctgagaatgggtagg

SEQ ID NO: 4824158 - DNA, 25 bp, Homo sapien
ccagagggtctgagaatgggtaggg

SEQ ID NO: 4824159 - DNA, 25 bp, Homo sapien
gagggtctgagaatgggtaggggcg

SEQ ID NO: 4824160 - DNA, 25 bp, Homo sapien
cagagggtctgagaatgggtagggg

SEQ ID NO: 4824161 - DNA, 25 bp, Homo sapien
ggatatgcacactcggaccagaggc

SEQ ID NO: 4824162 - DNA, 25 bp, Homo sapien
tccctgtagcggatatgcacactcg

SEQ ID NO: 4824163 - DNA, 25 bp, Homo sapien
ggcagcttgtccctgtagcggatat

SEQ ID NO: 4824164 - DNA, 25 bp, Homo sapien
ccagccttgctagaggcaccccagg

SEQ ID NO: 4824165 - DNA, 25 bp, Homo sapien
tggccccgccctgcaaggctgaact

SEQ ID NO: 4824166 - DNA, 25 bp, Homo sapien
gcaaggctgaactgtggggggcact

SEQ ID NO: 4824167 - DNA, 25 bp, Homo sapien
tgcaaggctgaactgtggggggcac

SEQ ID NO: 4824168 - DNA, 25 bp, Homo sapien
cccgccctgcaaggctgaactgtgg

SEQ ID NO: 4824169 - DNA, 25 bp, Homo sapien
ggcaggggagggcagcccagctccc

SEQ ID NO: 4824170 - DNA, 25 bp, Homo sapien
caggggagggcagcccagctcccac

SEQ ID NO: 4824171 - DNA, 25 bp, Homo sapien
ctgggcaggggagggcagcccagct

SEQ ID NO: 4824172 - DNA, 25 bp, Homo sapien
tgggcaggggagggcagcccagctc

SEQ ID NO: 4824173 - DNA, 25 bp, Homo sapien
tggttcttatttatagagcaccggg

SEQ ID NO: 4824174 - DNA, 25 bp, Homo sapien
tggacgcggcgctttgcaaaaccaa

SEQ ID NO: 4824175 - DNA, 25 bp, Homo sapien
accaaaaagacacagtgctgccgcg

SEQ ID NO: 4824176 - DNA, 25 bp, Homo sapien
tgcgagcttattcagagggaggcgt

SEQ ID NO: 4824177 - DNA, 25 bp, Homo sapien
agttagcccggccaaggacactgat

SEQ ID NO: 4824178 - DNA, 25 bp, Homo sapien
tgcccagttagcccggccaaggaca

SEQ ID NO: 4824179 - DNA, 25 bp, Homo sapien
cccagttagcccggccaaggacact

SEQ ID NO: 4824180 - DNA, 25 bp, Homo sapien
cagttagcccggccaaggacactga

SEQ ID NO: 4824181 - DNA, 25 bp, Homo sapien
ggcccgtgcgcagccgcgctctgcc

SEQ ID NO: 4824182 - DNA, 25 bp, Homo sapien
ccgtgcgcagccgcgctctgcccct

SEQ ID NO: 4824183 - DNA, 25 bp, Homo sapien
agcgcgtgccttccccgtgcggccc

SEQ ID NO: 4824184 - DNA, 25 bp, Homo sapien
cgagcgcgtgccttccccgtgcggc

SEQ ID NO: 4824185 - DNA, 25 bp, Homo sapien
ttttcggtctgtgtcgcttgttgac

SEQ ID NO: 4824186 - DNA, 25 bp, Homo sapien
aagcttcgagcgctccaggcggccg

SEQ ID NO: 4824187 - DNA, 25 bp, Homo sapien
catgggggaagcttcgagcgctcca

SEQ ID NO: 4824188 - DNA, 25 bp, Homo sapien
ttgacgccggcagacagtgtaaagg

SEQ ID NO: 4824189 - DNA, 25 bp, Homo sapien
gcgggcgaggcacagccgtgggggt

SEQ ID NO: 4824190 - DNA, 25 bp, Homo sapien
gggcgaggcacagccgtgggggtcg

SEQ ID NO: 4824191 - DNA, 25 bp, Homo sapien
ccgcgggcgaggcacagccgtgggg

SEQ ID NO: 4824192 - DNA, 25 bp, Homo sapien
cgggcgaggcacagccgtgggggtc

SEQ ID NO: 4824193 - DNA, 25 bp, Homo sapien
ctggcggtctcggcgggcggagggc

SEQ ID NO: 4824194 - DNA, 25 bp, Homo sapien
tggcggtctcggcgggcggagggcg

SEQ ID NO: 4824195 - DNA, 25 bp, Homo sapien
cggagggcggcggtgcggaggcggc

SEQ ID NO: 4824196 - DNA, 25 bp, Homo sapien
gggcggagggcggcggtgcggaggc

SEQ ID NO: 4824197 - DNA, 25 bp, Homo sapien
gcgccaggcaggaagccaggctgac

SEQ ID NO: 4824198 - DNA, 25 bp, Homo sapien
ccagcgccaggcaggaagccaggct

SEQ ID NO: 4824199 - DNA, 25 bp, Homo sapien
agagcccagcgccaggcaggaagcc

SEQ ID NO: 4824200 - DNA, 25 bp, Homo sapien
ggcaggcggtgagcccagagcccag

SEQ ID NO: 4824201 - DNA, 25 bp, Homo sapien
gctaaaggcggcgtcggaaaaggca

SEQ ID NO: 4824202 - DNA, 25 bp, Homo sapien
gaggccggcccgagcgtgtaaacca

SEQ ID NO: 4824203 - DNA, 25 bp, Homo sapien
gagcgtgtaaaccacggccaggtcc

SEQ ID NO: 4824204 - DNA, 25 bp, Homo sapien
gcggctgcgcgcaatggctaaaggc

SEQ ID NO: 4824205 - DNA, 25 bp, Homo sapien
gacacagacaaaggcgcggcgtcag

SEQ ID NO: 4824206 - DNA, 25 bp, Homo sapien
ctgtgggacacagacaaaggcgcgg

SEQ ID NO: 4824207 - DNA, 25 bp, Homo sapien
ggcggctgccgcaccgccctgcaga

SEQ ID NO: 4824208 - DNA, 25 bp, Homo sapien
gcggcgtcaggtggcggctgccgca

SEQ ID NO: 4824209 - DNA, 25 bp, Homo sapien
ttgccggccaatgagaggttgcgca

SEQ ID NO: 4824210 - DNA, 25 bp, Homo sapien
gagtgcagcccgttctcgcgcaggt

SEQ ID NO: 4824211 - DNA, 25 bp, Homo sapien
cggcgcgaaagtccctggtgccagt

SEQ ID NO: 4824212 - DNA, 25 bp, Homo sapien
aaggctcgcacatgcaccgagtgca

SEQ ID NO: 4824213 - DNA, 25 bp, Homo sapien
agacaggccaaggcgacagcagcag

SEQ ID NO: 4824214 - DNA, 25 bp, Homo sapien
ggccgaggccgcgaccaggaagggc

SEQ ID NO: 4824215 - DNA, 25 bp, Homo sapien
gccgaggccgcgaccaggaagggcc

SEQ ID NO: 4824216 - DNA, 25 bp, Homo sapien
agcggccgaggccgcgaccaggaag

SEQ ID NO: 4824217 - DNA, 25 bp, Homo sapien
tgggaggcccgctgcctgtgcgtcc

SEQ ID NO: 4824218 - DNA, 25 bp, Homo sapien
gtcgtccgcggagcccgttcctgcg

SEQ ID NO: 4824219 - DNA, 25 bp, Homo sapien
gcggcgcctgcacaaatattaactc

SEQ ID NO: 4824220 - DNA, 25 bp, Homo sapien
tccctggagcccgtcgtccgcggag

SEQ ID NO: 4824221 - DNA, 25 bp, Homo sapien
agctttaattcccctcccccagctg

SEQ ID NO: 4824222 - DNA, 25 bp, Homo sapien
tcccccagctgccctcaggagggcc

SEQ ID NO: 4824223 - DNA, 25 bp, Homo sapien
ccagctgccctcaggagggcctgca

SEQ ID NO: 4824224 - DNA, 25 bp, Homo sapien
ccccagctgccctcaggagggcctg

SEQ ID NO: 4824225 - DNA, 25 bp, Homo sapien
tcagccctctactcaggtggtaggg

SEQ ID NO: 4824226 - DNA, 25 bp, Homo sapien
atggggatggccacaaggctctgat

SEQ ID NO: 4824227 - DNA, 25 bp, Homo sapien
ggcggctcctctgaagaagcctcca

SEQ ID NO: 4824228 - DNA, 25 bp, Homo sapien
ggctctgatcctctagtggtggcac

SEQ ID NO: 4824229 - DNA, 25 bp, Homo sapien
taaaccgggtgcaggtccatgagat

SEQ ID NO: 4824230 - DNA, 25 bp, Homo sapien
cgtaaaccgggtgcaggtccatgag

SEQ ID NO: 4824231 - DNA, 25 bp, Homo sapien
tgggactccacgtaaaccgggtgca

SEQ ID NO: 4824232 - DNA, 25 bp, Homo sapien
cacgtaaaccgggtgcaggtccatg

SEQ ID NO: 4824233 - DNA, 25 bp, Homo sapien
cagcacacgcctaggaaacgccatt

SEQ ID NO: 4824234 - DNA, 25 bp, Homo sapien
gggacgaaggccaacatgagtcctg

SEQ ID NO: 4824235 - DNA, 25 bp, Homo sapien
gacgaaggccaacatgagtcctgga

SEQ ID NO: 4824236 - DNA, 25 bp, Homo sapien
aggccaacatgagtcctggaacagt

SEQ ID NO: 4824237 - DNA, 25 bp, Homo sapien
ccaggtgacagcccacccagggggt

SEQ ID NO: 4824238 - DNA, 25 bp, Homo sapien
caggtgacagcccacccagggggta

SEQ ID NO: 4824239 - DNA, 25 bp, Homo sapien
ccccaggtgacagcccacccagggg

SEQ ID NO: 4824240 - DNA, 25 bp, Homo sapien
accccaggtgacagcccacccaggg

SEQ ID NO: 4824241 - DNA, 25 bp, Homo sapien
ctgatgcccgccagcaccacaagga

SEQ ID NO: 4824242 - DNA, 25 bp, Homo sapien
ccaattgccacgatgacgagggcac

SEQ ID NO: 4824243 - DNA, 25 bp, Homo sapien
caaggagggcgatgagggcctcgcg

SEQ ID NO: 4824244 - DNA, 25 bp, Homo sapien
ccttggcccgcaagacaccaattgc

SEQ ID NO: 4824245 - DNA, 25 bp, Homo sapien
acatggccatgggccggtcacctgc

SEQ ID NO: 4824246 - DNA, 25 bp, Homo sapien
gcagagggcccccaagtctgcccct

SEQ ID NO: 4824247 - DNA, 25 bp, Homo sapien
cagagggcccccaagtctgcccctg

SEQ ID NO: 4824248 - DNA, 25 bp, Homo sapien
tggctgggagtggagtgcgggggca

SEQ ID NO: 4824249 - DNA, 25 bp, Homo sapien
atggctgggagtggagtgcgggggc

SEQ ID NO: 4824250 - DNA, 25 bp, Homo sapien
gcagaagggacaaatatgtgaggcc

SEQ ID NO: 4824251 - DNA, 25 bp, Homo sapien
cagaagggacaaatatgtgaggccc

SEQ ID NO: 4824252 - DNA, 25 bp, Homo sapien
ggaccgggggccatgtccagccctg

SEQ ID NO: 4824253 - DNA, 25 bp, Homo sapien
aactgttggaaggtgctgacttcac

SEQ ID NO: 4824254 - DNA, 25 bp, Homo sapien
gaactgttggaaggtgctgacttca

SEQ ID NO: 4824255 - DNA, 25 bp, Homo sapien
tccttctaaaggccagaggcgcagg

SEQ ID NO: 4824256 - DNA, 25 bp, Homo sapien
gctccttctaaaggccagaggcgca

SEQ ID NO: 4824257 - DNA, 25 bp, Homo sapien
gggctccttctaaaggccagaggcg

SEQ ID NO: 4824258 - DNA, 25 bp, Homo sapien
cttctaaaggccagaggcgcaggaa

SEQ ID NO: 4824259 - DNA, 25 bp, Homo sapien
cagatgtgtaggcctaggtggcccc

SEQ ID NO: 4824260 - DNA, 25 bp, Homo sapien
tgtgtaggcctaggtggcccctcac

SEQ ID NO: 4824261 - DNA, 25 bp, Homo sapien
gatgtgtaggcctaggtggcccctc

SEQ ID NO: 4824262 - DNA, 25 bp, Homo sapien
gtgtaggcctaggtggcccctcacc

SEQ ID NO: 4824263 - DNA, 25 bp, Homo sapien
gtgcattctgggacacgggcgggcg

SEQ ID NO: 4824264 - DNA, 25 bp, Homo sapien
gggcatgctcctcagcagtgcattc

SEQ ID NO: 4824265 - DNA, 25 bp, Homo sapien
tttaatctgcacactgcgggggtgg

SEQ ID NO: 4824266 - DNA, 25 bp, Homo sapien
taatctgcacactgcgggggtgggg

SEQ ID NO: 4824267 - DNA, 25 bp, Homo sapien
gcagttcttgggcaggcggtagacg

SEQ ID NO: 4824268 - DNA, 25 bp, Homo sapien
ccgagtagacgagctgctggtcccg

SEQ ID NO: 4824269 - DNA, 25 bp, Homo sapien
gcaggcggtagacgccggccgagta

SEQ ID NO: 4824270 - DNA, 25 bp, Homo sapien
tagacgccggccgagtagacgagct

SEQ ID NO: 4824271 - DNA, 25 bp, Homo sapien
caaacatgcggagcatgttgtagat

SEQ ID NO: 4824272 - DNA, 25 bp, Homo sapien
agcatggcctggatgtacgtccaga

SEQ ID NO: 4824273 - DNA, 25 bp, Homo sapien
tgcaggtcaatctcggccagtgcag

SEQ ID NO: 4824274 - DNA, 25 bp, Homo sapien
cagtcaccacaaacatgcggagcat

SEQ ID NO: 4824275 - DNA, 25 bp, Homo sapien
ctgcggacacaggccagcccccgtc

SEQ ID NO: 4824276 - DNA, 25 bp, Homo sapien
cggacacaggccagcccccgtcagg

SEQ ID NO: 4824277 - DNA, 25 bp, Homo sapien
gcggacacaggccagcccccgtcag

SEQ ID NO: 4824278 - DNA, 25 bp, Homo sapien
acacaggccagcccccgtcaggcac

SEQ ID NO: 4824279 - DNA, 25 bp, Homo sapien
tggccccccgtggggcctgcacgcg

SEQ ID NO: 4824280 - DNA, 25 bp, Homo sapien
ggccccccgtggggcctgcacgcgc

SEQ ID NO: 4824281 - DNA, 25 bp, Homo sapien
gccccccgtggggcctgcacgcgca

SEQ ID NO: 4824282 - DNA, 25 bp, Homo sapien
ccccccgtggggcctgcacgcgcac

SEQ ID NO: 4824283 - DNA, 25 bp, Homo sapien
gaggccatgccggagtcgctctcgt

SEQ ID NO: 4824284 - DNA, 25 bp, Homo sapien
tgagcaccatgttgtcccggtcctg

SEQ ID NO: 4824285 - DNA, 25 bp, Homo sapien
tcttcaccgccttgctcagttcctc

SEQ ID NO: 4824286 - DNA, 25 bp, Homo sapien
ctctcgtcgtcactgtcaatgagca

SEQ ID NO: 4824287 - DNA, 25 bp, Homo sapien
cgtgcagagtcaccgggacgctggg

SEQ ID NO: 4824288 - DNA, 25 bp, Homo sapien
gcagagtcaccgggacgctgggcag

SEQ ID NO: 4824289 - DNA, 25 bp, Homo sapien
cagagtcaccgggacgctgggcagc

SEQ ID NO: 4824290 - DNA, 25 bp, Homo sapien
ctgcgtgcagagtcaccgggacgct

SEQ ID NO: 4824291 - DNA, 25 bp, Homo sapien
gaagggtgccgcctgctggcgcagc

SEQ ID NO: 4824292 - DNA, 25 bp, Homo sapien
aaagggaagggtgccgcctgctggc

SEQ ID NO: 4824293 - DNA, 25 bp, Homo sapien
cctcccctgcctcccgtcagccgag

SEQ ID NO: 4824294 - DNA, 25 bp, Homo sapien
tgcctcccgtcagccgagaggtcgg

SEQ ID NO: 4824295 - DNA, 25 bp, Homo sapien
tgtgcttccaactgagggtccgcat

SEQ ID NO: 4824296 - DNA, 25 bp, Homo sapien
tgaaaatacagcaagatcaccgcct

SEQ ID NO: 4824297 - DNA, 25 bp, Homo sapien
ggcccagggtgtgcttccaactgag

SEQ ID NO: 4824298 - DNA, 25 bp, Homo sapien
accgccacagacagcgtgcggtcgg

SEQ ID NO: 4824299 - DNA, 25 bp, Homo sapien
tgccacctggtaccagtgagaaagg

SEQ ID NO: 4824300 - DNA, 25 bp, Homo sapien
ctgccacctggtaccagtgagaaag

SEQ ID NO: 4824301 - DNA, 25 bp, Homo sapien
tctgccacctggtaccagtgagaaa

SEQ ID NO: 4824302 - DNA, 25 bp, Homo sapien
gccacctggtaccagtgagaaaggg

SEQ ID NO: 4824303 - DNA, 25 bp, Homo sapien
ggtgcatcctaacccaactgactgg

SEQ ID NO: 4824304 - DNA, 25 bp, Homo sapien
acgaagacagagaccacctggagca

SEQ ID NO: 4824305 - DNA, 25 bp, Homo sapien
caagggctgtggcaaacaccagaag

SEQ ID NO: 4824306 - DNA, 25 bp, Homo sapien
tctctaagagggttcagagggaacg

SEQ ID NO: 4824307 - DNA, 25 bp, Homo sapien
tgtatcacaggccagagctcgaggt

SEQ ID NO: 4824308 - DNA, 25 bp, Homo sapien
gggtgctcctttccaccgagagcag

SEQ ID NO: 4824309 - DNA, 25 bp, Homo sapien
cggagccgggccacacggatgattt

SEQ ID NO: 4824310 - DNA, 25 bp, Homo sapien
cacggatgatttgtaccagaacaca

SEQ ID NO: 4824311 - DNA, 25 bp, Homo sapien
ccggtcctcaagtaccactggagcc

SEQ ID NO: 4824312 - DNA, 25 bp, Homo sapien
tcctactcccaccacagacccatag

SEQ ID NO: 4824313 - DNA, 25 bp, Homo sapien
atagccccggtcctcaagtaccact

SEQ ID NO: 4824314 - DNA, 25 bp, Homo sapien
accacagacccatagccccggtcct

SEQ ID NO: 4824315 - DNA, 25 bp, Homo sapien
tcctcctcccggatgttggcattga

SEQ ID NO: 4824316 - DNA, 25 bp, Homo sapien
ttctcgtccttgaagggcggccaga

SEQ ID NO: 4824317 - DNA, 25 bp, Homo sapien
aactcactggacaggatgacagcgt

SEQ ID NO: 4824318 - DNA, 25 bp, Homo sapien
atgacagcgtagaccccgaacggtg

SEQ ID NO: 4824319 - DNA, 25 bp, Homo sapien
tcacagaagtgcattggggcctcgc

SEQ ID NO: 4824320 - DNA, 25 bp, Homo sapien
cttcagcatgacttcacagaagtgc

SEQ ID NO: 4824321 - DNA, 25 bp, Homo sapien
tcagcatgacttcacagaagtgcat

SEQ ID NO: 4824322 - DNA, 25 bp, Homo sapien
cacagaagtgcattggggcctcgcc

SEQ ID NO: 4824323 - DNA, 25 bp, Homo sapien
tcagcagctccacgttgcggatctc

SEQ ID NO: 4824324 - DNA, 25 bp, Homo sapien
cagcagctccacgttgcggatctcc

SEQ ID NO: 4824325 - DNA, 25 bp, Homo sapien
tctgggcagggggtcgtgatgagcc

SEQ ID NO: 4824326 - DNA, 25 bp, Homo sapien
ctggaaagacgagtgtctgggcagg

SEQ ID NO: 4824327 - DNA, 25 bp, Homo sapien
ggcagggggtcgtgatgagccccag

SEQ ID NO: 4824328 - DNA, 25 bp, Homo sapien
gggcagggggtcgtgatgagcccca

SEQ ID NO: 4824329 - DNA, 25 bp, Homo sapien
tgtcccgagagaggctgggcaaagg

SEQ ID NO: 4824330 - DNA, 25 bp, Homo sapien
ctggagatggccagcgcgtcacagg

SEQ ID NO: 4824331 - DNA, 25 bp, Homo sapien
gggccctgtcccgagagaggctggg

SEQ ID NO: 4824332 - DNA, 25 bp, Homo sapien
tgtgggcaccccaatggctagcaca

SEQ ID NO: 4824333 - DNA, 25 bp, Homo sapien
ctgatgatgtccgatgaacgccgct

SEQ ID NO: 4824334 - DNA, 25 bp, Homo sapien
gaagaggtccttgctgccgtagatg

SEQ ID NO: 4824335 - DNA, 25 bp, Homo sapien
cagcagcgagcggtactcattgatg

SEQ ID NO: 4824336 - DNA, 25 bp, Homo sapien
gctgccgtagatgctgaccagcagg

SEQ ID NO: 4824337 - DNA, 25 bp, Homo sapien
cagggtccgggacccagtcctctgg

SEQ ID NO: 4824338 - DNA, 25 bp, Homo sapien
atcggcatccacagggtccgggacc

SEQ ID NO: 4824339 - DNA, 25 bp, Homo sapien
cacagggtccgggacccagtcctct

SEQ ID NO: 4824340 - DNA, 25 bp, Homo sapien
gcatccacagggtccgggacccagt

SEQ ID NO: 4824341 - DNA, 25 bp, Homo sapien
ggtcggtcttggacagctcaacagc

SEQ ID NO: 4824342 - DNA, 25 bp, Homo sapien
gtctccaggctcgccgggtcggtct

SEQ ID NO: 4824343 - DNA, 25 bp, Homo sapien
tcttggacagctcaacagccaggtc

SEQ ID NO: 4824344 - DNA, 25 bp, Homo sapien
ctcgccgggtcggtcttggacagct

SEQ ID NO: 4824345 - DNA, 25 bp, Homo sapien
tagcggcggataggctcacaggcca

SEQ ID NO: 4824346 - DNA, 25 bp, Homo sapien
cacgcgcagcgccttgatggcagag

SEQ ID NO: 4824347 - DNA, 25 bp, Homo sapien
ccatggaagggtccagcacgcgcag

SEQ ID NO: 4824348 - DNA, 25 bp, Homo sapien
gtgatgatgtcacacgtgttgacgc

SEQ ID NO: 4824349 - DNA, 25 bp, Homo sapien
acttgaggtcctcgatggctggccg

SEQ ID NO: 4824350 - DNA, 25 bp, Homo sapien
agtacttgaggtcctcgatggctgg

SEQ ID NO: 4824351 - DNA, 25 bp, Homo sapien
tgaggtcctcgatggctggccggga

SEQ ID NO: 4824352 - DNA, 25 bp, Homo sapien
gaggtcctcgatggctggccgggag

SEQ ID NO: 4824353 - DNA, 25 bp, Homo sapien
tgccctgatccaggcacgggggacg

SEQ ID NO: 4824354 - DNA, 25 bp, Homo sapien
ccctgatccaggcacgggggacgcc

SEQ ID NO: 4824355 - DNA, 25 bp, Homo sapien
gccctgatccaggcacgggggacgc

SEQ ID NO: 4824356 - DNA, 25 bp, Homo sapien
tgttgccggcctcgggagatgcggg

SEQ ID NO: 4824357 - DNA, 25 bp, Homo sapien
acctttgcacgtggcagcgccagcg

SEQ ID NO: 4824358 - DNA, 25 bp, Homo sapien
ggcgtagatgcggtagaagaacctt

SEQ ID NO: 4824359 - DNA, 25 bp, Homo sapien
gctcctcgatgcgcaggctggcgta

SEQ ID NO: 4824360 - DNA, 25 bp, Homo sapien
ccgaaggccacctgcgtctggaggc

SEQ ID NO: 4824361 - DNA, 25 bp, Homo sapien
cccgaaggccacctgcgtctggagg

SEQ ID NO: 4824362 - DNA, 25 bp, Homo sapien
agcccgaaggccacctgcgtctgga

SEQ ID NO: 4824363 - DNA, 25 bp, Homo sapien
gggagcccgaaggccacctgcgtct

SEQ ID NO: 4824364 - DNA, 25 bp, Homo sapien
cggcccccctgcagtcttcgtgcct

SEQ ID NO: 4824365 - DNA, 25 bp, Homo sapien
tgcagtcttcgtgcctctcacacgc

SEQ ID NO: 4824366 - DNA, 25 bp, Homo sapien
ttcgtgcctctcacacgcgccagtg

SEQ ID NO: 4824367 - DNA, 25 bp, Homo sapien
cccctgcagtcttcgtgcctctcac

SEQ ID NO: 4824368 - DNA, 25 bp, Homo sapien
caggaaggagcgctcgtactcgccc

SEQ ID NO: 4824369 - DNA, 25 bp, Homo sapien
ggtggtcacagcctcggcactgacc

SEQ ID NO: 4824370 - DNA, 25 bp, Homo sapien
actcgccccggcaacggtcctccat

SEQ ID NO: 4824371 - DNA, 25 bp, Homo sapien
gcactgacccgctccagcagactga

SEQ ID NO: 4824372 - DNA, 25 bp, Homo sapien
tccccaggatcgacaaaaggcacag

SEQ ID NO: 4824373 - DNA, 25 bp, Homo sapien
tgtcgacgagggtgagaatcattcc

SEQ ID NO: 4824374 - DNA, 25 bp, Homo sapien
cacatagggccttaccagggtcaag

SEQ ID NO: 4824375 - DNA, 25 bp, Homo sapien
gacacgctgcacaggaatccctggg

SEQ ID NO: 4824376 - DNA, 25 bp, Homo sapien
tctaggctacgcaggtagggatcca

SEQ ID NO: 4824377 - DNA, 25 bp, Homo sapien
aagaagcacccatacagacgctgga

SEQ ID NO: 4824378 - DNA, 25 bp, Homo sapien
caagactccgcgcaacatagtgtgg

SEQ ID NO: 4824379 - DNA, 25 bp, Homo sapien
tagtgtggacttcttctcgcagccc

SEQ ID NO: 4824380 - DNA, 25 bp, Homo sapien
tttggcgggactgcaccgctggtcc

SEQ ID NO: 4824381 - DNA, 25 bp, Homo sapien
ctgcaccgctggtccgggaagacac

SEQ ID NO: 4824382 - DNA, 25 bp, Homo sapien
ctttggcgggactgcaccgctggtc

SEQ ID NO: 4824383 - DNA, 25 bp, Homo sapien
ggactgcaccgctggtccgggaaga

SEQ ID NO: 4824384 - DNA, 25 bp, Homo sapien
aggccactaacaactcctgtccggg

SEQ ID NO: 4824385 - DNA, 25 bp, Homo sapien
caggccggtgctcacggtgttccag

SEQ ID NO: 4824386 - DNA, 25 bp, Homo sapien
actcctgtccgggccgggagtcgct

SEQ ID NO: 4824387 - DNA, 25 bp, Homo sapien
tgttccaggccactaacaactcctg

SEQ ID NO: 4824388 - DNA, 25 bp, Homo sapien
gactccgagattcgctcggcgcggc

SEQ ID NO: 4824389 - DNA, 25 bp, Homo sapien
cgatgacgcacgtctgcacgcgcag

SEQ ID NO: 4824390 - DNA, 25 bp, Homo sapien
gcacccaccgactccgagattcgct

SEQ ID NO: 4824391 - DNA, 25 bp, Homo sapien
cgcgcggcgatgacgcacgtctgca

SEQ ID NO: 4824392 - DNA, 25 bp, Homo sapien
tcatgctcacacaggctatggggat

SEQ ID NO: 4824393 - DNA, 25 bp, Homo sapien
gacaggaggacaggggttctccttc

SEQ ID NO: 4824394 - DNA, 25 bp, Homo sapien
cacagaacccaaacctcaggtctca

SEQ ID NO: 4824395 - DNA, 25 bp, Homo sapien
agctctgcaaggggcttgtctctgt

SEQ ID NO: 4824396 - DNA, 25 bp, Homo sapien
gaggcaccctagctgcttccagggc

SEQ ID NO: 4824397 - DNA, 25 bp, Homo sapien
gggatacagtgaggccaaacaaggc

SEQ ID NO: 4824398 - DNA, 25 bp, Homo sapien
cagaagcgggtgcagtagtccctgg

SEQ ID NO: 4824399 - DNA, 25 bp, Homo sapien
tggctactgcccagcttccgggact

SEQ ID NO: 4824400 - DNA, 25 bp, Homo sapien
aagtccgagaggtcattctgactgg

SEQ ID NO: 4824401 - DNA, 25 bp, Homo sapien
tgcggaagtccgagaggtcattctg

SEQ ID NO: 4824402 - DNA, 25 bp, Homo sapien
agggctggctcgctgcggaagtccg

SEQ ID NO: 4824403 - DNA, 25 bp, Homo sapien
ctcgctgcggaagtccgagaggtca

SEQ ID NO: 4824404 - DNA, 25 bp, Homo sapien
agtgagaggacagaatgtggacaca

SEQ ID NO: 4824405 - DNA, 25 bp, Homo sapien
gacacatgggctcgcccgggtgtca

SEQ ID NO: 4824406 - DNA, 25 bp, Homo sapien
gggtgtcagactccccccagcgctc

SEQ ID NO: 4824407 - DNA, 25 bp, Homo sapien
aatgtggacacatgggctcgcccgg

SEQ ID NO: 4824408 - DNA, 25 bp, Homo sapien
catggcctccacgggcgggggctct

SEQ ID NO: 4824409 - DNA, 25 bp, Homo sapien
ctgaaggccacagagtgcttcgggg

SEQ ID NO: 4824410 - DNA, 25 bp, Homo sapien
tgcttcggggtgtagctggacaggc

SEQ ID NO: 4824411 - DNA, 25 bp, Homo sapien
ccacagagtgcttcggggtgtagct

SEQ ID NO: 4824412 - DNA, 25 bp, Homo sapien
tctcgggtctcacgctgctcacaaa

SEQ ID NO: 4824413 - DNA, 25 bp, Homo sapien
acgctgctcacaaacgtggcccggg

SEQ ID NO: 4824414 - DNA, 25 bp, Homo sapien
cctctggcagccgagagctctcggg

SEQ ID NO: 4824415 - DNA, 25 bp, Homo sapien
ggcagccgagagctctcgggtctca

SEQ ID NO: 4824416 - DNA, 25 bp, Homo sapien
gcttttgtcgttgaaggagatcttc

SEQ ID NO: 4824417 - DNA, 25 bp, Homo sapien
ctcggaagggtactcaaatgtggtc

SEQ ID NO: 4824418 - DNA, 25 bp, Homo sapien
aaatgtggtctgcaggcttttgtcg

SEQ ID NO: 4824419 - DNA, 25 bp, Homo sapien
tctagggagctctcggaagggtact

SEQ ID NO: 4824420 - DNA, 25 bp, Homo sapien
gagtcacgtgaacgagggctgaggg

SEQ ID NO: 4824421 - DNA, 25 bp, Homo sapien
tgaggctgacccaagtggggcgcca

SEQ ID NO: 4824422 - DNA, 25 bp, Homo sapien
gggctcaggttcagccctcaggatg

SEQ ID NO: 4824423 - DNA, 25 bp, Homo sapien
ctgggagtgagagtcacgtgaacga

SEQ ID NO: 4824424 - DNA, 25 bp, Homo sapien
catcaaccgttccgggggctccagg

SEQ ID NO: 4824425 - DNA, 25 bp, Homo sapien
tccaggagggggcacagagctctcc

SEQ ID NO: 4824426 - DNA, 25 bp, Homo sapien
agagctctccagctggaccctgcag

SEQ ID NO: 4824427 - DNA, 25 bp, Homo sapien
ccagctggaccctgcaggcgtccat

SEQ ID NO: 4824428 - DNA, 25 bp, Homo sapien
tcatgtcctggcttactggatgcct

SEQ ID NO: 4824429 - DNA, 25 bp, Homo sapien
catccccacttcgtaggctgcaaga

SEQ ID NO: 4824430 - DNA, 25 bp, Homo sapien
catagttgagagttggcctgcggct

SEQ ID NO: 4824431 - DNA, 25 bp, Homo sapien
gaccaatggtcaggactctccacct

SEQ ID NO: 4824432 - DNA, 25 bp, Homo sapien
gcagccctgagggagctcgaaatat

SEQ ID NO: 4824433 - DNA, 25 bp, Homo sapien
cggccccagtggtccctaatgaata

SEQ ID NO: 4824434 - DNA, 25 bp, Homo sapien
gtccctaatgaatatgagcggcccc

SEQ ID NO: 4824435 - DNA, 25 bp, Homo sapien
gcccccgcttgcagcagatggaagc

SEQ ID NO: 4824436 - DNA, 25 bp, Homo sapien
caggcacaggacgagacggcctctc

SEQ ID NO: 4824437 - DNA, 25 bp, Homo sapien
acaggacgagacggcctctcaggag

SEQ ID NO: 4824438 - DNA, 25 bp, Homo sapien
ggcacaggacgagacggcctctcag

SEQ ID NO: 4824439 - DNA, 25 bp, Homo sapien
cacaggacgagacggcctctcagga

SEQ ID NO: 4824440 - DNA, 25 bp, Homo sapien
gcctgtgcacacctagctttggtta

SEQ ID NO: 4824441 - DNA, 25 bp, Homo sapien
tggccgcagcctatcagggactttg

SEQ ID NO: 4824442 - DNA, 25 bp, Homo sapien
cctaggcggcacctatgggaagagc

SEQ ID NO: 4824443 - DNA, 25 bp, Homo sapien
tgcacgagtgcaatgcccagagcag

SEQ ID NO: 4824444 - DNA, 25 bp, Homo sapien
agagagcgaggccttgggagtggag

SEQ ID NO: 4824445 - DNA, 25 bp, Homo sapien
gagcgaggccttgggagtggaggcg

SEQ ID NO: 4824446 - DNA, 25 bp, Homo sapien
gcacagcaggtgagggcggacggcc

SEQ ID NO: 4824447 - DNA, 25 bp, Homo sapien
cacagcaggtgagggcggacggccc

SEQ ID NO: 4824448 - DNA, 25 bp, Homo sapien
gggagatagacccacgtggctccag

SEQ ID NO: 4824449 - DNA, 25 bp, Homo sapien
tggggtgatgctcgggcgagggtcg

SEQ ID NO: 4824450 - DNA, 25 bp, Homo sapien
caagcccccactggaagcacctcag

SEQ ID NO: 4824451 - DNA, 25 bp, Homo sapien
gcgagggtcggggagatagacccac

SEQ ID NO: 4824452 - DNA, 25 bp, Homo sapien
tagagccggcaggggcaccaacgcc

SEQ ID NO: 4824453 - DNA, 25 bp, Homo sapien
gggccggcagatagagccggcaggg

SEQ ID NO: 4824454 - DNA, 25 bp, Homo sapien
aggtagccgccaatcacctcgatct

SEQ ID NO: 4824455 - DNA, 25 bp, Homo sapien
gtagcgcttcttcaacgtgggcccc

SEQ ID NO: 4824456 - DNA, 25 bp, Homo sapien
tcccgtggccgaggctccctgttgg

SEQ ID NO: 4824457 - DNA, 25 bp, Homo sapien
cagccttggtgaggcaggacttctg

SEQ ID NO: 4824458 - DNA, 25 bp, Homo sapien
aggtagggtagtttggctgcttggg

SEQ ID NO: 4824459 - DNA, 25 bp, Homo sapien
ctggcagggtgcgggaggtagggta

SEQ ID NO: 4824460 - DNA, 25 bp, Homo sapien
ccacgcacccgggcctggcagggtg

SEQ ID NO: 4824461 - DNA, 25 bp, Homo sapien
gcgggaggtagggtagtttggctgc

SEQ ID NO: 4824462 - DNA, 25 bp, Homo sapien
cccggctattcttggccaagccagg

SEQ ID NO: 4824463 - DNA, 25 bp, Homo sapien
cctaatagcccggtcagcgagggcg

SEQ ID NO: 4824464 - DNA, 25 bp, Homo sapien
ggcctcacatattcccggctattct

SEQ ID NO: 4824465 - DNA, 25 bp, Homo sapien
aatttcgagagtttgcgcggaggct

SEQ ID NO: 4824466 - DNA, 25 bp, Homo sapien
ccgagtgcccgttggagagcaggcg

SEQ ID NO: 4824467 - DNA, 25 bp, Homo sapien
gtggctgcggagacgcactggcgct

SEQ ID NO: 4824468 - DNA, 25 bp, Homo sapien
gccggccgtatctcgaaggagtcgt

SEQ ID NO: 4824469 - DNA, 25 bp, Homo sapien
actggcgctggctaggagtggcact

SEQ ID NO: 4824470 - DNA, 25 bp, Homo sapien
gtcgctgcgccgggccccggggctc

SEQ ID NO: 4824471 - DNA, 25 bp, Homo sapien
tcgctgcgccgggccccggggctcg

SEQ ID NO: 4824472 - DNA, 25 bp, Homo sapien
agtcgctgcgccgggccccggggct

SEQ ID NO: 4824473 - DNA, 25 bp, Homo sapien
cggcgcggcgcggcgggcgggtcga

SEQ ID NO: 4824474 - DNA, 25 bp, Homo sapien
gggcgcgctcggggctcccgcggcg

SEQ ID NO: 4824475 - DNA, 25 bp, Homo sapien
gggcgggcgcgctcggggctcccgc

SEQ ID NO: 4824476 - DNA, 25 bp, Homo sapien
gcgcggcgcggcgggcgggtcgaac

SEQ ID NO: 4824477 - DNA, 25 bp, Homo sapien
ccagtaggcggctgacgcggccggg

SEQ ID NO: 4824478 - DNA, 25 bp, Homo sapien
ctctccagtaggcggctgacgcggc

SEQ ID NO: 4824479 - DNA, 25 bp, Homo sapien
ggcggcgccccgtacaccagcacct

SEQ ID NO: 4824480 - DNA, 25 bp, Homo sapien
gggcggcgccccgtacaccagcacc

SEQ ID NO: 4824481 - DNA, 25 bp, Homo sapien
cgtctcgatgatgaggacgctgtcg

SEQ ID NO: 4824482 - DNA, 25 bp, Homo sapien
gcgcggagggcgcgcacgccaggca

SEQ ID NO: 4824483 - DNA, 25 bp, Homo sapien
gcacgccaggcacgcggcggtaccg

SEQ ID NO: 4824484 - DNA, 25 bp, Homo sapien
tgaggacgctgtcggcgcggagggc

SEQ ID NO: 4824485 - DNA, 25 bp, Homo sapien
ccgccgcgccgccgctcggcctcca

SEQ ID NO: 4824486 - DNA, 25 bp, Homo sapien
ccgctcggcctccagcagcatgaac

SEQ ID NO: 4824487 - DNA, 25 bp, Homo sapien
ccgcgccgccgctcggcctccagca

SEQ ID NO: 4824488 - DNA, 25 bp, Homo sapien
ccgccgctcggcctccagcagcatg

SEQ ID NO: 4824489 - DNA, 25 bp, Homo sapien
tagcttggcccgcttccgctccagg

SEQ ID NO: 4824490 - DNA, 25 bp, Homo sapien
gcttccgctccaggatctcacgctt

SEQ ID NO: 4824491 - DNA, 25 bp, Homo sapien
ggatctcacgcttccaagcgggcac

SEQ ID NO: 4824492 - DNA, 25 bp, Homo sapien
cgcccagcgcggctagcttggcccg

SEQ ID NO: 4824493 - DNA, 25 bp, Homo sapien
ctgcgaacgcggcagcggacggctg

SEQ ID NO: 4824494 - DNA, 25 bp, Homo sapien
cggacggctggactgagggccggag

SEQ ID NO: 4824495 - DNA, 25 bp, Homo sapien
ggcagcggacggctggactgagggc

SEQ ID NO: 4824496 - DNA, 25 bp, Homo sapien
gactgagggccggagtggcagccgc

SEQ ID NO: 4824497 - DNA, 25 bp, Homo sapien
agaagccaagtgtctcctcccttag

SEQ ID NO: 4824498 - DNA, 25 bp, Homo sapien
ttcatttcagctttccagaagccaa

SEQ ID NO: 4824499 - DNA, 25 bp, Homo sapien
cttagggccctcctcaaatcacctt

SEQ ID NO: 4824500 - DNA, 25 bp, Homo sapien
ctaaaggaagcatctgatgttcatc

SEQ ID NO: 4824501 - DNA, 25 bp, Homo sapien
caggtgtgctaagagtgccagccca

SEQ ID NO: 4824502 - DNA, 25 bp, Homo sapien
tgcctatgagtatctgacacctgtt

SEQ ID NO: 4824503 - DNA, 25 bp, Homo sapien
tgtggcacctgactggcatcaaacc

SEQ ID NO: 4824504 - DNA, 25 bp, Homo sapien
gcatcaaaccaaagttcgtaggcca

SEQ ID NO: 4824505 - DNA, 25 bp, Homo sapien
ctgggatagtaagccaagcagtgcc

SEQ ID NO: 4824506 - DNA, 25 bp, Homo sapien
tgtgcaacagtactttcccaggatc

SEQ ID NO: 4824507 - DNA, 25 bp, Homo sapien
gaagtctggtctggatagacggcac

SEQ ID NO: 4824508 - DNA, 25 bp, Homo sapien
caatctctctcgtggcacagggaag

SEQ ID NO: 4824509 - DNA, 25 bp, Homo sapien
tcggctcgaggtcaacattctagtt

SEQ ID NO: 4824510 - DNA, 25 bp, Homo sapien
ttggaatagggaaacccggcactca

SEQ ID NO: 4824511 - DNA, 25 bp, Homo sapien
ctccggtgcgctgcaagtagggcct

SEQ ID NO: 4824512 - DNA, 25 bp, Homo sapien
tctactcaaagcattaaacaaaagg

SEQ ID NO: 4824513 - DNA, 25 bp, Homo sapien
ttgagactcaggaccgtaagtaccc

SEQ ID NO: 4824514 - DNA, 25 bp, Homo sapien
tgcacgaagatctcgaaggtggcga

SEQ ID NO: 4824515 - DNA, 25 bp, Homo sapien
taagtacccagaaaaggcggagcac

SEQ ID NO: 4824516 - DNA, 25 bp, Homo sapien
ggcacaacagcatctcgaagacgaa

SEQ ID NO: 4824517 - DNA, 25 bp, Homo sapien
acgcccgcctcgatcggacgccatg

SEQ ID NO: 4824518 - DNA, 25 bp, Homo sapien
tggccgcccgtgaacgcccgcctcg

SEQ ID NO: 4824519 - DNA, 25 bp, Homo sapien
cccggccgagcgtgccacccgcggg

SEQ ID NO: 4824520 - DNA, 25 bp, Homo sapien
ctcggccctgatgcgccggcaatcc

SEQ ID NO: 4824521 - DNA, 25 bp, Homo sapien
ccaggtagtcacgagagtgcatcca

SEQ ID NO: 4824522 - DNA, 25 bp, Homo sapien
aaaagccattgtgcgatcgggccac

SEQ ID NO: 4824523 - DNA, 25 bp, Homo sapien
caataagcctcgtgagcatcggatc

SEQ ID NO: 4824524 - DNA, 25 bp, Homo sapien
catcgatgtgaagcgtgacccagtc

SEQ ID NO: 4824525 - DNA, 25 bp, Homo sapien
aacacagagtctacaggcatttggt

SEQ ID NO: 4824526 - DNA, 25 bp, Homo sapien
cacagagtctacaggcatttggtat

SEQ ID NO: 4824527 - DNA, 25 bp, Homo sapien
actgaataacacagagtctacaggc

SEQ ID NO: 4824528 - DNA, 25 bp, Homo sapien
gaataacacagagtctacaggcatt

SEQ ID NO: 4824529 - DNA, 25 bp, Homo sapien
ggatcaggtttaatggtcactatga

SEQ ID NO: 4824530 - DNA, 25 bp, Homo sapien
gtatcgtacatcgttccaagcccgg

SEQ ID NO: 4824531 - DNA, 25 bp, Homo sapien
ggtatcgtacatcgttccaagcccg

SEQ ID NO: 4824532 - DNA, 25 bp, Homo sapien
gggtatcgtacatcgttccaagccc

SEQ ID NO: 4824533 - DNA, 25 bp, Homo sapien
tatcgtacatcgttccaagcccggc

SEQ ID NO: 4824534 - DNA, 25 bp, Homo sapien
ggctctgcacaaggggggcctgccc

SEQ ID NO: 4824535 - DNA, 25 bp, Homo sapien
agctatatacacgacagcccatcct

SEQ ID NO: 4824536 - DNA, 25 bp, Homo sapien
tatatacacgacagcccatcctgct

SEQ ID NO: 4824537 - DNA, 25 bp, Homo sapien
ccctcgccccagctatatacacgac

SEQ ID NO: 4824538 - DNA, 25 bp, Homo sapien
tatttctatgaaccccatggaggga

SEQ ID NO: 4824539 - DNA, 25 bp, Homo sapien
tgagcaacgtctgaggtgccctgaa

SEQ ID NO: 4824540 - DNA, 25 bp, Homo sapien
gagactcggccagtgtagacagacc

SEQ ID NO: 4824541 - DNA, 25 bp, Homo sapien
cactgtggtgccagcgagtttctca

SEQ ID NO: 4824542 - DNA, 25 bp, Homo sapien
cgatacaaccggaagtcaaagtacg

SEQ ID NO: 4824543 - DNA, 25 bp, Homo sapien
tcacaggacgtcgtcaaagtccagc

SEQ ID NO: 4824544 - DNA, 25 bp, Homo sapien
aaagtccagcagcttcgagtgctgg

SEQ ID NO: 4824545 - DNA, 25 bp, Homo sapien
tcttccacaggcgatacaaccggaa

SEQ ID NO: 4824546 - DNA, 25 bp, Homo sapien
gactcgaaggtgaccctataaggag

SEQ ID NO: 4824547 - DNA, 25 bp, Homo sapien
tcgaaggtgaccctataaggagtca

SEQ ID NO: 4824548 - DNA, 25 bp, Homo sapien
tataaggagtcatgagggtcctgag

SEQ ID NO: 4824549 - DNA, 25 bp, Homo sapien
ggtgaccctataaggagtcatgagg

SEQ ID NO: 4824550 - DNA, 25 bp, Homo sapien
gatgacgttcggctctgggttcact

SEQ ID NO: 4824551 - DNA, 25 bp, Homo sapien
ccagaatgtagcagcccatgatgtg

SEQ ID NO: 4824552 - DNA, 25 bp, Homo sapien
gttcactttgctcatcaggcggctc

SEQ ID NO: 4824553 - DNA, 25 bp, Homo sapien
tgggttcactttgctcatcaggcgg

SEQ ID NO: 4824554 - DNA, 25 bp, Homo sapien
cccactccacagagcggaccgtgga

SEQ ID NO: 4824555 - DNA, 25 bp, Homo sapien
ccccactccacagagcggaccgtgg

SEQ ID NO: 4824556 - DNA, 25 bp, Homo sapien
ccactccacagagcggaccgtggag

SEQ ID NO: 4824557 - DNA, 25 bp, Homo sapien
tccactttggcaaaggtggccacct

SEQ ID NO: 4824558 - DNA, 25 bp, Homo sapien
cttctccactttggcaaaggtggcc

SEQ ID NO: 4824559 - DNA, 25 bp, Homo sapien
ctttggcaaaggtggccaccttgtt

SEQ ID NO: 4824560 - DNA, 25 bp, Homo sapien
cactttggcaaaggtggccaccttg

SEQ ID NO: 4824561 - DNA, 25 bp, Homo sapien
ggagatagaggtgtccaggacctcc

SEQ ID NO: 4824562 - DNA, 25 bp, Homo sapien
aggagatagaggtgtccaggacctc

SEQ ID NO: 4824563 - DNA, 25 bp, Homo sapien
cttgaggagatagaggtgtccagga

SEQ ID NO: 4824564 - DNA, 25 bp, Homo sapien
tgaggagatagaggtgtccaggacc

SEQ ID NO: 4824565 - DNA, 25 bp, Homo sapien
ggtagacgttcagcttcctctctat

SEQ ID NO: 4824566 - DNA, 25 bp, Homo sapien
tcccttgtggtagacgttcagcttc

SEQ ID NO: 4824567 - DNA, 25 bp, Homo sapien
cttggctcccttgtggtagacgttc

SEQ ID NO: 4824568 - DNA, 25 bp, Homo sapien
tgtggtagacgttcagcttcctctc

SEQ ID NO: 4824569 - DNA, 25 bp, Homo sapien
agagagaaggccaatgaggcacata

SEQ ID NO: 4824570 - DNA, 25 bp, Homo sapien
cagagagaaggccaatgaggcacat

SEQ ID NO: 4824571 - DNA, 25 bp, Homo sapien
gagagaaggccaatgaggcacatac

SEQ ID NO: 4824572 - DNA, 25 bp, Homo sapien
tcctcgaaggttgcgtgctcatggt

SEQ ID NO: 4824573 - DNA, 25 bp, Homo sapien
caaggatgtcctcgaaggttgcgtg

SEQ ID NO: 4824574 - DNA, 25 bp, Homo sapien
aaggatgtcctcgaaggttgcgtgc

SEQ ID NO: 4824575 - DNA, 25 bp, Homo sapien
gatgtcctcgaaggttgcgtgctca

SEQ ID NO: 4824576 - DNA, 25 bp, Homo sapien
cacatcaaggctgcgtcagagccag

SEQ ID NO: 4824577 - DNA, 25 bp, Homo sapien
catcaaggctgcgtcagagccagca

SEQ ID NO: 4824578 - DNA, 25 bp, Homo sapien
ccacatcaaggctgcgtcagagcca

SEQ ID NO: 4824579 - DNA, 25 bp, Homo sapien
ggccacatcaaggctgcgtcagagc

SEQ ID NO: 4824580 - DNA, 25 bp, Homo sapien
gggccgcaagagggcatctgttggg

SEQ ID NO: 4824581 - DNA, 25 bp, Homo sapien
tggggccgcaagagggcatctgttg

SEQ ID NO: 4824582 - DNA, 25 bp, Homo sapien
ccgcaagagggcatctgttgggggc

SEQ ID NO: 4824583 - DNA, 25 bp, Homo sapien
gccgcaagagggcatctgttggggg

SEQ ID NO: 4824584 - DNA, 25 bp, Homo sapien
ggtcatcccggcggatgatagtggg

SEQ ID NO: 4824585 - DNA, 25 bp, Homo sapien
gatggaggggtcatcccggcggatg

SEQ ID NO: 4824586 - DNA, 25 bp, Homo sapien
tggggatgtactcagccttgggcac

SEQ ID NO: 4824587 - DNA, 25 bp, Homo sapien
gatgatagtggggatgtactcagcc

SEQ ID NO: 4824588 - DNA, 25 bp, Homo sapien
ggcccatccaaaagccaaggggctg

SEQ ID NO: 4824589 - DNA, 25 bp, Homo sapien
gcccatccaaaagccaaggggctgt

SEQ ID NO: 4824590 - DNA, 25 bp, Homo sapien
aggcccatccaaaagccaaggggct

SEQ ID NO: 4824591 - DNA, 25 bp, Homo sapien
ggtatagccctgtgagacaccctcc

SEQ ID NO: 4824592 - DNA, 25 bp, Homo sapien
gtgtagaggagcactgcccgggctg

SEQ ID NO: 4824593 - DNA, 25 bp, Homo sapien
aagggtatagccctgtgagacaccc

SEQ ID NO: 4824594 - DNA, 25 bp, Homo sapien
ccaggcagcccaagggtatagccct

SEQ ID NO: 4824595 - DNA, 25 bp, Homo sapien
tcgaaggcctcgtccagcgtgcagt

SEQ ID NO: 4824596 - DNA, 25 bp, Homo sapien
catgacctttggtggcacgaagcct

SEQ ID NO: 4824597 - DNA, 25 bp, Homo sapien
aagccttcggtgtcgcaggccacag

SEQ ID NO: 4824598 - DNA, 25 bp, Homo sapien
ctttggtggcacgaagccttcggtg

SEQ ID NO: 4824599 - DNA, 25 bp, Homo sapien
ggaagggagaccctggtgcgaggcc

SEQ ID NO: 4824600 - DNA, 25 bp, Homo sapien
aaggcgcgtgcaggcatcagctcca

SEQ ID NO: 4824601 - DNA, 25 bp, Homo sapien
tcctccaagcaagtgggaggaccat

SEQ ID NO: 4824602 - DNA, 25 bp, Homo sapien
aggaccatacagaggtcgccgccag

SEQ ID NO: 4824603 - DNA, 25 bp, Homo sapien
atcggagatgctgagggcgtcccca

SEQ ID NO: 4824604 - DNA, 25 bp, Homo sapien
agcactgccgcggccgttgttagcc

SEQ ID NO: 4824605 - DNA, 25 bp, Homo sapien
tgttagccccgcctttgcgatcgga

SEQ ID NO: 4824606 - DNA, 25 bp, Homo sapien
ttcaggagtgcaaaagcgcagccca

SEQ ID NO: 4824607 - DNA, 25 bp, Homo sapien
tctggggaaggtgggcgggcctgtg

SEQ ID NO: 4824608 - DNA, 25 bp, Homo sapien
gaaggtgggcgggcctgtgcggggc

SEQ ID NO: 4824609 - DNA, 25 bp, Homo sapien
aggtgggcgggcctgtgcggggcac

SEQ ID NO: 4824610 - DNA, 25 bp, Homo sapien
gtctggggtctaggggaggctctgg

SEQ ID NO: 4824611 - DNA, 25 bp, Homo sapien
ctccgctcgcgccgctcagcgaacg

SEQ ID NO: 4824612 - DNA, 25 bp, Homo sapien
cgtgggaagtgtcggctttcatggg

SEQ ID NO: 4824613 - DNA, 25 bp, Homo sapien
caggaccggctgaagctccgctcgc

SEQ ID NO: 4824614 - DNA, 25 bp, Homo sapien
gtcgtgggaagtgtcggctttcatg

SEQ ID NO: 4824615 - DNA, 25 bp, Homo sapien
catgcgcaggtgtttgcggaagttc

SEQ ID NO: 4824616 - DNA, 25 bp, Homo sapien
cgaccatgcgcaggtgtttgcggaa

SEQ ID NO: 4824617 - DNA, 25 bp, Homo sapien
tccggctgccgaccatgcgcaggtg

SEQ ID NO: 4824618 - DNA, 25 bp, Homo sapien
gctgccgaccatgcgcaggtgtttg

SEQ ID NO: 4824619 - DNA, 25 bp, Homo sapien
tgctcttcccgcgacagccttccag

SEQ ID NO: 4824620 - DNA, 25 bp, Homo sapien
caaaggcaaatcccacccagtgctc

SEQ ID NO: 4824621 - DNA, 25 bp, Homo sapien
agtgctcttcccgcgacagccttcc

SEQ ID NO: 4824622 - DNA, 25 bp, Homo sapien
tcttcccgcgacagccttccagggc

SEQ ID NO: 4824623 - DNA, 25 bp, Homo sapien
caaggcccaacatccaaaacgggca

SEQ ID NO: 4824624 - DNA, 25 bp, Homo sapien
agaggatccagcctgcctgcgctgc

SEQ ID NO: 4824625 - DNA, 25 bp, Homo sapien
agagacacgtgccctcggagtgcag

SEQ ID NO: 4824626 - DNA, 25 bp, Homo sapien
caccaaactttggaccctgccaagg

SEQ ID NO: 4824627 - DNA, 25 bp, Homo sapien
attacagacgcggaatcattctccc

SEQ ID NO: 4824628 - DNA, 25 bp, Homo sapien
ctctggattacagacgcggaatcat

SEQ ID NO: 4824629 - DNA, 25 bp, Homo sapien
cagacgcggaatcattctcccgttt

SEQ ID NO: 4824630 - DNA, 25 bp, Homo sapien
cattctcccgtttccggcgcttcct

SEQ ID NO: 4824631 - DNA, 25 bp, Homo sapien
ggagggacacagacgtcgggacagt

SEQ ID NO: 4824632 - DNA, 25 bp, Homo sapien
ggacacagacgtcgggacagtggtg

SEQ ID NO: 4824633 - DNA, 25 bp, Homo sapien
gggacacagacgtcgggacagtggt

SEQ ID NO: 4824634 - DNA, 25 bp, Homo sapien
gagggacacagacgtcgggacagtg

SEQ ID NO: 4824635 - DNA, 25 bp, Homo sapien
gggcacggggcccggcagaggagtc

SEQ ID NO: 4824636 - DNA, 25 bp, Homo sapien
ggcacggggcccggcagaggagtcc

SEQ ID NO: 4824637 - DNA, 25 bp, Homo sapien
ctggggcacggggcccggcagagga

SEQ ID NO: 4824638 - DNA, 25 bp, Homo sapien
cacggggcccggcagaggagtccca

SEQ ID NO: 4824639 - DNA, 25 bp, Homo sapien
gccctgctgcgacctcggtgcccgc

SEQ ID NO: 4824640 - DNA, 25 bp, Homo sapien
gagagcggcactccctcaagaccca

SEQ ID NO: 4824641 - DNA, 25 bp, Homo sapien
agagagcggcactccctcaagaccc

SEQ ID NO: 4824642 - DNA, 25 bp, Homo sapien
tgcgacctcggtgcccgctgggagc

SEQ ID NO: 4824643 - DNA, 25 bp, Homo sapien
ggcaccaagtcatacaggtacttac

SEQ ID NO: 4824644 - DNA, 25 bp, Homo sapien
ttaggcaccaagtcatacaggtact

SEQ ID NO: 4824645 - DNA, 25 bp, Homo sapien
acagctgtgcccttaggcaccaagt

SEQ ID NO: 4824646 - DNA, 25 bp, Homo sapien
tgcccttaggcaccaagtcatacag

SEQ ID NO: 4824647 - DNA, 25 bp, Homo sapien
cacagtgagctcaaccccgggcctc

SEQ ID NO: 4824648 - DNA, 25 bp, Homo sapien
aagggatggcgtgagagagaagaca

SEQ ID NO: 4824649 - DNA, 25 bp, Homo sapien
aataggtccctcacaggtaacccag

SEQ ID NO: 4824650 - DNA, 25 bp, Homo sapien
ctacagttcccttcttgtcactgac

SEQ ID NO: 4824651 - DNA, 25 bp, Homo sapien
ggaaccaggtacgaatagggatgtc

SEQ ID NO: 4824652 - DNA, 25 bp, Homo sapien
aaccaggtacgaatagggatgtcgt

SEQ ID NO: 4824653 - DNA, 25 bp, Homo sapien
gaaccaggtacgaatagggatgtcg

SEQ ID NO: 4824654 - DNA, 25 bp, Homo sapien
gaagcctgccggttttaatcttgag

SEQ ID NO: 4824655 - DNA, 25 bp, Homo sapien
tcttgagtccgctggcatgctgtga

SEQ ID NO: 4824656 - DNA, 25 bp, Homo sapien
catgctgtgacctgagcacctgttc

SEQ ID NO: 4824657 - DNA, 25 bp, Homo sapien
gagctcacagctcatagggtgtgga

SEQ ID NO: 4824658 - DNA, 25 bp, Homo sapien
cagacacacggtcaacgctgtacat

SEQ ID NO: 4824659 - DNA, 25 bp, Homo sapien
ccagagatggtgtacactcgaggct

SEQ ID NO: 4824660 - DNA, 25 bp, Homo sapien
cttcttgcggcgaccggaggtctca

SEQ ID NO: 4824661 - DNA, 25 bp, Homo sapien
gtggccagagtaggcatcagccagc

SEQ ID NO: 4824662 - DNA, 25 bp, Homo sapien
tgccctcgtagcagccgttggagac

SEQ ID NO: 4824663 - DNA, 25 bp, Homo sapien
gcccccagaggcagtggtgccagcc

SEQ ID NO: 4824664 - DNA, 25 bp, Homo sapien
cagctggcccccagaggcagtggtg

SEQ ID NO: 4824665 - DNA, 25 bp, Homo sapien
gctggcccccagaggcagtggtgcc

SEQ ID NO: 4824666 - DNA, 25 bp, Homo sapien
ctggcccccagaggcagtggtgcca

SEQ ID NO: 4824667 - DNA, 25 bp, Homo sapien
cgttgcggttctcagggtgactctg

SEQ ID NO: 4824668 - DNA, 25 bp, Homo sapien
ggtactctccaaacgctcgggctgc

SEQ ID NO: 4824669 - DNA, 25 bp, Homo sapien
tgactctgggacaggtactctccaa

SEQ ID NO: 4824670 - DNA, 25 bp, Homo sapien
cgccgttgcggttctcagggtgact

SEQ ID NO: 4824671 - DNA, 25 bp, Homo sapien
cgccaccgaggacatggcctcgctc

SEQ ID NO: 4824672 - DNA, 25 bp, Homo sapien
ttggccgccaccgaggacatggcct

SEQ ID NO: 4824673 - DNA, 25 bp, Homo sapien
ccgccaccgaggacatggcctcgct

SEQ ID NO: 4824674 - DNA, 25 bp, Homo sapien
ggccgccaccgaggacatggcctcg

SEQ ID NO: 4824675 - DNA, 25 bp, Homo sapien
cgggagagcgctgcccgaaccgagg

SEQ ID NO: 4824676 - DNA, 25 bp, Homo sapien
tcccgggagagcgctgcccgaaccg

SEQ ID NO: 4824677 - DNA, 25 bp, Homo sapien
agagcgctgcccgaaccgagggccg

SEQ ID NO: 4824678 - DNA, 25 bp, Homo sapien
gagcgctgcccgaaccgagggccgg

SEQ ID NO: 4824679 - DNA, 25 bp, Homo sapien
tgcatccgggctctttagcagaggc

SEQ ID NO: 4824680 - DNA, 25 bp, Homo sapien
ggcaggtacagaggcccctaggact

SEQ ID NO: 4824681 - DNA, 25 bp, Homo sapien
tgaaacatcacacggcagcatcagg

SEQ ID NO: 4824682 - DNA, 25 bp, Homo sapien
agtcccacggaagacgctgcatccg

SEQ ID NO: 4824683 - DNA, 25 bp, Homo sapien
ggtgtcgatgccgcagtgaggactc

SEQ ID NO: 4824684 - DNA, 25 bp, Homo sapien
actggggtgtcgatgccgcagtgag

SEQ ID NO: 4824685 - DNA, 25 bp, Homo sapien
ggagccctcagacagttttgggaaa

SEQ ID NO: 4824686 - DNA, 25 bp, Homo sapien
acagttttgggaaagccagactggg

SEQ ID NO: 4824687 - DNA, 25 bp, Homo sapien
cagggagggagtggccggcacaggg

SEQ ID NO: 4824688 - DNA, 25 bp, Homo sapien
gcaagcagaccgcatgttccaggtg

SEQ ID NO: 4824689 - DNA, 25 bp, Homo sapien
gaccgcatgttccaggtgaggacca

SEQ ID NO: 4824690 - DNA, 25 bp, Homo sapien
ctctgcagcgctggtaacccggtgg

SEQ ID NO: 4824691 - DNA, 25 bp, Homo sapien
ggtgggaccatgcccagctcctcac

SEQ ID NO: 4824692 - DNA, 25 bp, Homo sapien
tgggcaccaggtgggaccatgccca

SEQ ID NO: 4824693 - DNA, 25 bp, Homo sapien
aggtgggaccatgcccagctcctca

SEQ ID NO: 4824694 - DNA, 25 bp, Homo sapien
ctgtgggcaccaggtgggaccatgc

SEQ ID NO: 4824695 - DNA, 25 bp, Homo sapien
tggaagtctgcgtatgcatccctgg

SEQ ID NO: 4824696 - DNA, 25 bp, Homo sapien
ggaagtctgcgtatgcatccctggg

SEQ ID NO: 4824697 - DNA, 25 bp, Homo sapien
cctcctcgtactccgtctggtagtc

SEQ ID NO: 4824698 - DNA, 25 bp, Homo sapien
tcgtactccgtctggtagtcagatt

SEQ ID NO: 4824699 - DNA, 25 bp, Homo sapien
aaggaagggaccgtacccagcatag

SEQ ID NO: 4824700 - DNA, 25 bp, Homo sapien
cacatcacttcgtgggtcttccaca

SEQ ID NO: 4824701 - DNA, 25 bp, Homo sapien
tgcgtcagtcccctcccaaggaagg

SEQ ID NO: 4824702 - DNA, 25 bp, Homo sapien
ctcagaggcagaaccggccacagat

SEQ ID NO: 4824703 - DNA, 25 bp, Homo sapien
cggcagccatgaagacgtctcccag

SEQ ID NO: 4824704 - DNA, 25 bp, Homo sapien
ggccctctcggcctgcggcagccat

SEQ ID NO: 4824705 - DNA, 25 bp, Homo sapien
ccctctcggcctgcggcagccatga

SEQ ID NO: 4824706 - DNA, 25 bp, Homo sapien
gcccagggccctctcggcctgcggc

SEQ ID NO: 4824707 - DNA, 25 bp, Homo sapien
ctgaaggcccaagcgcagggccctg

SEQ ID NO: 4824708 - DNA, 25 bp, Homo sapien
ggaggcaaaacgtggttctacttca

SEQ ID NO: 4824709 - DNA, 25 bp, Homo sapien
catggagggtagtggacccgccctt

SEQ ID NO: 4824710 - DNA, 25 bp, Homo sapien
ggttctacttcaggcctgaggtgtg

SEQ ID NO: 4824711 - DNA, 25 bp, Homo sapien
ctccacggcttcgtcttgcgcctcc

SEQ ID NO: 4824712 - DNA, 25 bp, Homo sapien
cacggcttcgtcttgcgcctccact

SEQ ID NO: 4824713 - DNA, 25 bp, Homo sapien
tccacggcttcgtcttgcgcctcca

SEQ ID NO: 4824714 - DNA, 25 bp, Homo sapien
cggcttcgtcttgcgcctccactca

SEQ ID NO: 4824715 - DNA, 25 bp, Homo sapien
gcttggcgggctcaatgcgagacac

SEQ ID NO: 4824716 - DNA, 25 bp, Homo sapien
gctcaatgcgagacacaatttcggc

SEQ ID NO: 4824717 - DNA, 25 bp, Homo sapien
caatttcggcaaggtccgtgaagga

SEQ ID NO: 4824718 - DNA, 25 bp, Homo sapien
aggaggcgttgggacaggtgaggac

SEQ ID NO: 4824719 - DNA, 25 bp, Homo sapien
tgaggacagcacgttgcctgtggac

SEQ ID NO: 4824720 - DNA, 25 bp, Homo sapien
ggcgtggtccggacgcccgtactca

SEQ ID NO: 4824721 - DNA, 25 bp, Homo sapien
tggcccgaagaactgggcgcggtcc

SEQ ID NO: 4824722 - DNA, 25 bp, Homo sapien
gggagatgcgcagtcctgagcaatc

SEQ ID NO: 4824723 - DNA, 25 bp, Homo sapien
cgcactcgcgggcttcttgctcggc

SEQ ID NO: 4824724 - DNA, 25 bp, Homo sapien
gtcaaacaccgtgcgcccgtgctgg

SEQ ID NO: 4824725 - DNA, 25 bp, Homo sapien
ctgctggtcgcggagcatcttctcc

SEQ ID NO: 4824726 - DNA, 25 bp, Homo sapien
cagatgtcaaacaccgtgcgcccgt

SEQ ID NO: 4824727 - DNA, 25 bp, Homo sapien
cagccaccagagtgcctccgcccgc

SEQ ID NO: 4824728 - DNA, 25 bp, Homo sapien
gccaccagagtgcctccgcccgcct

SEQ ID NO: 4824729 - DNA, 25 bp, Homo sapien
ggcagccaccagagtgcctccgccc

SEQ ID NO: 4824730 - DNA, 25 bp, Homo sapien
gcagccaccagagtgcctccgcccg

SEQ ID NO: 4824731 - DNA, 25 bp, Homo sapien
ccagggtgctgtagctgtcgatggg

SEQ ID NO: 4824732 - DNA, 25 bp, Homo sapien
gcagatctcgttgaacttgccgaag

SEQ ID NO: 4824733 - DNA, 25 bp, Homo sapien
tgaacttgccgaagtccagggtgct

SEQ ID NO: 4824734 - DNA, 25 bp, Homo sapien
tcgcagtagtcactgctcttcacca

SEQ ID NO: 4824735 - DNA, 25 bp, Homo sapien
ggccaggcgcgtctgaatctctgcc

SEQ ID NO: 4824736 - DNA, 25 bp, Homo sapien
ctgccgcacgcaacacacgtaggcc

SEQ ID NO: 4824737 - DNA, 25 bp, Homo sapien
acgtaggccaggcgcgtctgaatct

SEQ ID NO: 4824738 - DNA, 25 bp, Homo sapien
cgcacgcaacacacgtaggccaggc

SEQ ID NO: 4824739 - DNA, 25 bp, Homo sapien
acagccgcctgagtctcctgccccg

SEQ ID NO: 4824740 - DNA, 25 bp, Homo sapien
ctgccgtcacagccgcctgagtctc

SEQ ID NO: 4824741 - DNA, 25 bp, Homo sapien
agccgcctgagtctcctgccccggc

SEQ ID NO: 4824742 - DNA, 25 bp, Homo sapien
gtcacagccgcctgagtctcctgcc

SEQ ID NO: 4824743 - DNA, 25 bp, Homo sapien
tggcccgtggcgcaggacaggttct

SEQ ID NO: 4824744 - DNA, 25 bp, Homo sapien
ggcccgtggcgcaggacaggttctg

SEQ ID NO: 4824745 - DNA, 25 bp, Homo sapien
agcctggcccgtggcgcaggacagg

SEQ ID NO: 4824746 - DNA, 25 bp, Homo sapien
cccagcctggcccgtggcgcaggac

SEQ ID NO: 4824747 - DNA, 25 bp, Homo sapien
tcccctgccgcaggacaggtgtgga

SEQ ID NO: 4824748 - DNA, 25 bp, Homo sapien
ccttcgcccgagttgggctcaggca

SEQ ID NO: 4824749 - DNA, 25 bp, Homo sapien
cttcaggcccgtccggcctcgtgcc

SEQ ID NO: 4824750 - DNA, 25 bp, Homo sapien
tcgtgccttccttcgcccgagttgg

SEQ ID NO: 4824751 - DNA, 25 bp, Homo sapien
cgtcaatggcgatcaccacttttgc

SEQ ID NO: 4824752 - DNA, 25 bp, Homo sapien
cagacagcgcatccccatagttggt

SEQ ID NO: 4824753 - DNA, 25 bp, Homo sapien
gaggtccgtctcatctcggctgccc

SEQ ID NO: 4824754 - DNA, 25 bp, Homo sapien
ctttcgtggccaaggggttccagcg

SEQ ID NO: 4824755 - DNA, 25 bp, Homo sapien
tagggagaagccagccctggttacc

SEQ ID NO: 4824756 - DNA, 25 bp, Homo sapien
ctagggagaagccagccctggttac

SEQ ID NO: 4824757 - DNA, 25 bp, Homo sapien
tgggcctttctgaccgtatatccca

SEQ ID NO: 4824758 - DNA, 25 bp, Homo sapien
cgccattacaccttctagaggcaga

SEQ ID NO: 4824759 - DNA, 25 bp, Homo sapien
gaccgtatatcccacaggtgacagg

SEQ ID NO: 4824760 - DNA, 25 bp, Homo sapien
gttgtggggtctcctctccgccatt

SEQ ID NO: 4824761 - DNA, 25 bp, Homo sapien
cacgcgtgtgcatgttctcggagct

SEQ ID NO: 4824762 - DNA, 25 bp, Homo sapien
tggagcacatgctgccggtgcctgc

SEQ ID NO: 4824763 - DNA, 25 bp, Homo sapien
taattgctcccagttcctcgacttg

SEQ ID NO: 4824764 - DNA, 25 bp, Homo sapien
aggaaaacgtgttccagcccaggct

SEQ ID NO: 4824765 - DNA, 25 bp, Homo sapien
tgccgggcgtggtccccccaccgca

SEQ ID NO: 4824766 - DNA, 25 bp, Homo sapien
ggccgtggggcggcgtgacccagga

SEQ ID NO: 4824767 - DNA, 25 bp, Homo sapien
gccgtggggcggcgtgacccaggag

SEQ ID NO: 4824768 - DNA, 25 bp, Homo sapien
gtccatcagcaggtgtccgtccttc

SEQ ID NO: 4824769 - DNA, 25 bp, Homo sapien
gtgtccgtccttcgggtcacagaga

SEQ ID NO: 4824770 - DNA, 25 bp, Homo sapien
ggttgttgatgtagcccccgtccat

SEQ ID NO: 4824771 - DNA, 25 bp, Homo sapien
gcaggtgtccgtccttcgggtcaca

SEQ ID NO: 4824772 - DNA, 25 bp, Homo sapien
gtggtgatggcgaaataaggaatcc

SEQ ID NO: 4824773 - DNA, 25 bp, Homo sapien
gtcggtggtgatggcgaaataagga

SEQ ID NO: 4824774 - DNA, 25 bp, Homo sapien
cgtcggtgtggacccgcatggccga

SEQ ID NO: 4824775 - DNA, 25 bp, Homo sapien
tgtggacccgcatggccgaggctgt

SEQ ID NO: 4824776 - DNA, 25 bp, Homo sapien
tctcccatcacgctcctgtcctgtg

SEQ ID NO: 4824777 - DNA, 25 bp, Homo sapien
gccctctcccatcacgctcctgtcc

SEQ ID NO: 4824778 - DNA, 25 bp, Homo sapien
ggacggggctcagatgggccctctc

SEQ ID NO: 4824779 - DNA, 25 bp, Homo sapien
ctgcgggcggacggggctcagatgg

SEQ ID NO: 4824780 - DNA, 25 bp, Homo sapien
ccggctccggagaacatggacgtga

SEQ ID NO: 4824781 - DNA, 25 bp, Homo sapien
taggtgaggtccagcgcggccttca

SEQ ID NO: 4824782 - DNA, 25 bp, Homo sapien
tgttgaagccggctccggagaacat

SEQ ID NO: 4824783 - DNA, 25 bp, Homo sapien
cggccttcatcaaggacgtcatgcc

SEQ ID NO: 4824784 - DNA, 25 bp, Homo sapien
gtggaatttacagaaggcttccacc

SEQ ID NO: 4824785 - DNA, 25 bp, Homo sapien
acacgtggcgtgctgagggcctctc

SEQ ID NO: 4824786 - DNA, 25 bp, Homo sapien
acggtcctgaggcttggcgccctgg

SEQ ID NO: 4824787 - DNA, 25 bp, Homo sapien
gggtccagagtgtccttgggcccca

SEQ ID NO: 4824788 - DNA, 25 bp, Homo sapien
ttcctgatccctaagccctcgctgg

SEQ ID NO: 4824789 - DNA, 25 bp, Homo sapien
gcactccgccaaggccttgagaacg

SEQ ID NO: 4824790 - DNA, 25 bp, Homo sapien
tgtagttccgctcctcagagtacag

SEQ ID NO: 4824791 - DNA, 25 bp, Homo sapien
acgaaggccccgatggacgtgcctc

SEQ ID NO: 4824792 - DNA, 25 bp, Homo sapien
cccggatccgcatctggctgtagtt

SEQ ID NO: 4824793 - DNA, 25 bp, Homo sapien
gaaggtggtgtctgacgacaaggca

SEQ ID NO: 4824794 - DNA, 25 bp, Homo sapien
aagggccaacaagcaaccgcttctt

SEQ ID NO: 4824795 - DNA, 25 bp, Homo sapien
gggcagcggtaggaggctccgccct

SEQ ID NO: 4824796 - DNA, 25 bp, Homo sapien
gatcattctttatcaagtattggag

SEQ ID NO: 4824797 - DNA, 25 bp, Homo sapien
ggcaatggcgttgcccgtcagcacc

SEQ ID NO: 4824798 - DNA, 25 bp, Homo sapien
ggccgctggaagacatgcttgtaca

SEQ ID NO: 4824799 - DNA, 25 bp, Homo sapien
caagcaccagggcaatggcgttgcc

SEQ ID NO: 4824800 - DNA, 25 bp, Homo sapien
ggagaagtctgagtgtcggtccggg

SEQ ID NO: 4824801 - DNA, 25 bp, Homo sapien
ggctgcctgaggacaccggaattaa

SEQ ID NO: 4824802 - DNA, 25 bp, Homo sapien
gagacctcgcatcctggcttgactg

SEQ ID NO: 4824803 - DNA, 25 bp, Homo sapien
ttcgaggaaatgaaccacggagcca

SEQ ID NO: 4824804 - DNA, 25 bp, Homo sapien
gggtccctctatcctgcagcagatg

SEQ ID NO: 4824805 - DNA, 25 bp, Homo sapien
gaggtgcaggtggccggagcaccag

SEQ ID NO: 4824806 - DNA, 25 bp, Homo sapien
gctcctcctggagaagacgcggcgc

SEQ ID NO: 4824807 - DNA, 25 bp, Homo sapien
cggagcaccagctccgcatgttgag

SEQ ID NO: 4824808 - DNA, 25 bp, Homo sapien
tccgcatgttgagccactccacggt

SEQ ID NO: 4824809 - DNA, 25 bp, Homo sapien
aaggcagagcccacgtgtctgccag

SEQ ID NO: 4824810 - DNA, 25 bp, Homo sapien
gcccacgtgtctgccagccgggtga

SEQ ID NO: 4824811 - DNA, 25 bp, Homo sapien
ctgaaaggcagagcccacgtgtctg

SEQ ID NO: 4824812 - DNA, 25 bp, Homo sapien
agagcccacgtgtctgccagccggg

SEQ ID NO: 4824813 - DNA, 25 bp, Homo sapien
tcctgggttctgcaaagcaacttgg

SEQ ID NO: 4824814 - DNA, 25 bp, Homo sapien
ctgccttggcgctgccgaagctctg

SEQ ID NO: 4824815 - DNA, 25 bp, Homo sapien
ctgggactcgggacaggacggagct

SEQ ID NO: 4824816 - DNA, 25 bp, Homo sapien
ggacaggacggagctgaaggccagc

SEQ ID NO: 4824817 - DNA, 25 bp, Homo sapien
ggactgggtggccatgagcccgagg

SEQ ID NO: 4824818 - DNA, 25 bp, Homo sapien
gaaggaagcaatcaggtcagtgatc

SEQ ID NO: 4824819 - DNA, 25 bp, Homo sapien
ggccagcgtcccgaaggtgcctgca

SEQ ID NO: 4824820 - DNA, 25 bp, Homo sapien
agcgtcccgaaggtgcctgcagaag

SEQ ID NO: 4824821 - DNA, 25 bp, Homo sapien
gctgggtccagggtgtgagcgtgcc

SEQ ID NO: 4824822 - DNA, 25 bp, Homo sapien
tagagcacgatcctgtgggtgtcct

SEQ ID NO: 4824823 - DNA, 25 bp, Homo sapien
tgagcgtgccatctacctggtagag

SEQ ID NO: 4824824 - DNA, 25 bp, Homo sapien
gctggacagccggtactcgtgaaca

SEQ ID NO: 4824825 - DNA, 25 bp, Homo sapien
cctaggcagtcacgcagaggctgca

SEQ ID NO: 4824826 - DNA, 25 bp, Homo sapien
gcagcacgcagagggagtacctcac

SEQ ID NO: 4824827 - DNA, 25 bp, Homo sapien
cagtgagttattcagggcctaggca

SEQ ID NO: 4824828 - DNA, 25 bp, Homo sapien
gccatcgctagttcgcagtgagtta

SEQ ID NO: 4824829 - DNA, 25 bp, Homo sapien
cacatctcagggctgcgttgggccg

SEQ ID NO: 4824830 - DNA, 25 bp, Homo sapien
tcagggctgcgttgggccggctggg

SEQ ID NO: 4824831 - DNA, 25 bp, Homo sapien
aggagtcggggctggcggcacgcac

SEQ ID NO: 4824832 - DNA, 25 bp, Homo sapien
gggctgcgttgggccggctgggagg

SEQ ID NO: 4824833 - DNA, 25 bp, Homo sapien
cgttttatgttgtcactagtcagca

SEQ ID NO: 4824834 - DNA, 25 bp, Homo sapien
ccaaggcgccgttttatgttgtcac

SEQ ID NO: 4824835 - DNA, 25 bp, Homo sapien
cagcggagccaaggcgccgttttat

SEQ ID NO: 4824836 - DNA, 25 bp, Homo sapien
tatgttgtcactagtcagcagcagg

SEQ ID NO: 4824837 - DNA, 25 bp, Homo sapien
tgcgatgggagataacgtaatttcc

SEQ ID NO: 4824838 - DNA, 25 bp, Homo sapien
catgggcacggctgtcagggccctt

SEQ ID NO: 4824839 - DNA, 25 bp, Homo sapien
cctgaaggaggcctcgggtagcctc

SEQ ID NO: 4824840 - DNA, 25 bp, Homo sapien
aaaacccagatcatcgaggtgccag

SEQ ID NO: 4824841 - DNA, 25 bp, Homo sapien
tggacaggttgacagccgggttccc

SEQ ID NO: 4824842 - DNA, 25 bp, Homo sapien
actgccaccgtggacaggttgacag

SEQ ID NO: 4824843 - DNA, 25 bp, Homo sapien
tgacacgggcatcactgccaccgtg

SEQ ID NO: 4824844 - DNA, 25 bp, Homo sapien
cacttcctctgacacgggcatcact

SEQ ID NO: 4824845 - DNA, 25 bp, Homo sapien
tgggacagcccacacgctcacagat

SEQ ID NO: 4824846 - DNA, 25 bp, Homo sapien
ggacagcccacacgctcacagatgc

SEQ ID NO: 4824847 - DNA, 25 bp, Homo sapien
gctgggacagcccacacgctcacag

SEQ ID NO: 4824848 - DNA, 25 bp, Homo sapien
tggagcaaaggacccacgtcagctg

SEQ ID NO: 4824849 - DNA, 25 bp, Homo sapien
tgtgaccaagcagcgctggagacgt

SEQ ID NO: 4824850 - DNA, 25 bp, Homo sapien
cactgcgggtaagagcctgtgaacg

SEQ ID NO: 4824851 - DNA, 25 bp, Homo sapien
tgagcacagaaagacggagaaccgc

SEQ ID NO: 4824852 - DNA, 25 bp, Homo sapien
gtaaaggaccctgcctgacgcatgt

SEQ ID NO: 4824853 - DNA, 25 bp, Homo sapien
ggtaggagatcaagaaagcctcgaa

SEQ ID NO: 4824854 - DNA, 25 bp, Homo sapien
caactgtgcacccctgcagagaaag

SEQ ID NO: 4824855 - DNA, 25 bp, Homo sapien
aatgaagacgcagcctgtgccaggg

SEQ ID NO: 4824856 - DNA, 25 bp, Homo sapien
aatctgtaatgaagacgcagcctgt

SEQ ID NO: 4824857 - DNA, 25 bp, Homo sapien
agctgaagatggcgcagaatgcagc

SEQ ID NO: 4824858 - DNA, 25 bp, Homo sapien
tgaagatggcgcagaatgcagcctt

SEQ ID NO: 4824859 - DNA, 25 bp, Homo sapien
cagaccagggtcagttcacgttcaa

SEQ ID NO: 4824860 - DNA, 25 bp, Homo sapien
ggtcagttcacgttcaaaccacact

SEQ ID NO: 4824861 - DNA, 25 bp, Homo sapien
ccacaaacgttggccaggacatgcc

SEQ ID NO: 4824862 - DNA, 25 bp, Homo sapien
aggcagaccagggtcagttcacgtt

SEQ ID NO: 4824863 - DNA, 25 bp, Homo sapien
caggatcttctcacccaagagatga

SEQ ID NO: 4824864 - DNA, 25 bp, Homo sapien
caagagatgaatcagccgagtcacc

SEQ ID NO: 4824865 - DNA, 25 bp, Homo sapien
agagatgaatcagccgagtcaccac

SEQ ID NO: 4824866 - DNA, 25 bp, Homo sapien
gatcttctcacccaagagatgaatc

SEQ ID NO: 4824867 - DNA, 25 bp, Homo sapien
ctgggccatggctgtttaggccttg

SEQ ID NO: 4824868 - DNA, 25 bp, Homo sapien
ccaggtaagccatacggctgccttt

SEQ ID NO: 4824869 - DNA, 25 bp, Homo sapien
tcttgatgcccaggtaagccatacg

SEQ ID NO: 4824870 - DNA, 25 bp, Homo sapien
catggctgtttaggccttgcagcct

SEQ ID NO: 4824871 - DNA, 25 bp, Homo sapien
cctgcagcggcctctaaagggtggg

SEQ ID NO: 4824872 - DNA, 25 bp, Homo sapien
agcggcctctaaagggtgggccagg

SEQ ID NO: 4824873 - DNA, 25 bp, Homo sapien
ctcctgctccgaggcgctcatgaga

SEQ ID NO: 4824874 - DNA, 25 bp, Homo sapien
tcctgctccgaggcgctcatgagaa

SEQ ID NO: 4824875 - DNA, 25 bp, Homo sapien
gggcaagtacagcaagcgccaggac

SEQ ID NO: 4824876 - DNA, 25 bp, Homo sapien
ccaggctctcctggtccataagtgg

SEQ ID NO: 4824877 - DNA, 25 bp, Homo sapien
caagtacagcaagcgccaggaccta

SEQ ID NO: 4824878 - DNA, 25 bp, Homo sapien
tacagcaagcgccaggacctaggat

SEQ ID NO: 4824879 - DNA, 25 bp, Homo sapien
ccaattctgagtcccgaacggcatg

SEQ ID NO: 4824880 - DNA, 25 bp, Homo sapien
gcttggccaattctgagtcccgaac

SEQ ID NO: 4824881 - DNA, 25 bp, Homo sapien
gaacggcatgcaccgtggtcgcccg

SEQ ID NO: 4824882 - DNA, 25 bp, Homo sapien
ctgtgggtacctgcgcttgatggac

SEQ ID NO: 4824883 - DNA, 25 bp, Homo sapien
gccgcgggcttgggagggccgagcc

SEQ ID NO: 4824884 - DNA, 25 bp, Homo sapien
ggccgcgggcttgggagggccgagc

SEQ ID NO: 4824885 - DNA, 25 bp, Homo sapien
gccgagccagctggacctgtccctg

SEQ ID NO: 4824886 - DNA, 25 bp, Homo sapien
ccgcgggcttgggagggccgagcca

SEQ ID NO: 4824887 - DNA, 25 bp, Homo sapien
tggggcttttgctcccaagtaactg

SEQ ID NO: 4824888 - DNA, 25 bp, Homo sapien
ctggggcttttgctcccaagtaact

SEQ ID NO: 4824889 - DNA, 25 bp, Homo sapien
atcactactaccatccactcctggg

SEQ ID NO: 4824890 - DNA, 25 bp, Homo sapien
agcaaagcggctgcggggcatcact

SEQ ID NO: 4824891 - DNA, 25 bp, Homo sapien
tgtacgtgcagtcggacttgtcccc

SEQ ID NO: 4824892 - DNA, 25 bp, Homo sapien
ccgacgaggtctcctcggccgtact

SEQ ID NO: 4824893 - DNA, 25 bp, Homo sapien
tcatccttccggatcacagagcgca

SEQ ID NO: 4824894 - DNA, 25 bp, Homo sapien
cagccggccgctgagcatgatgtac

SEQ ID NO: 4824895 - DNA, 25 bp, Homo sapien
cccagtccagggcaaagtcgatttg

SEQ ID NO: 4824896 - DNA, 25 bp, Homo sapien
acgaaggacgacatcctcttcacca

SEQ ID NO: 4824897 - DNA, 25 bp, Homo sapien
acacccaggacgacggtcggctgct

SEQ ID NO: 4824898 - DNA, 25 bp, Homo sapien
acgacggtcggctgcttccgcatga

SEQ ID NO: 4824899 - DNA, 25 bp, Homo sapien
acacagaacggctcaagccaccaga

SEQ ID NO: 4824900 - DNA, 25 bp, Homo sapien
gcgagagctggggttaaactgaacc

SEQ ID NO: 4824901 - DNA, 25 bp, Homo sapien
tatgagggtgcggaggacttccaga

SEQ ID NO: 4824902 - DNA, 25 bp, Homo sapien
tctggacctgacagagcagaatgcc

SEQ ID NO: 4824903 - DNA, 25 bp, Homo sapien
agcctggaaggcgacacgggcacat

SEQ ID NO: 4824904 - DNA, 25 bp, Homo sapien
ctggggtcaagtggacagatgtctt

SEQ ID NO: 4824905 - DNA, 25 bp, Homo sapien
cagcccggagcctggaaggcgacac

SEQ ID NO: 4824906 - DNA, 25 bp, Homo sapien
tggacagatgtcttccagcccggag

SEQ ID NO: 4824907 - DNA, 25 bp, Homo sapien
tgaggaacaagcaggtgtcctcctg

SEQ ID NO: 4824908 - DNA, 25 bp, Homo sapien
aagctgcagtccctgttggccttga

SEQ ID NO: 4824909 - DNA, 25 bp, Homo sapien
gagaccacgaacaggatgctggcgt

SEQ ID NO: 4824910 - DNA, 25 bp, Homo sapien
gccgatcttccgctggtacacgtgc

SEQ ID NO: 4824911 - DNA, 25 bp, Homo sapien
cctgccttgacaccaccgtgcctgc

SEQ ID NO: 4824912 - DNA, 25 bp, Homo sapien
ctgcaggaacgtgcagaagcgccac

SEQ ID NO: 4824913 - DNA, 25 bp, Homo sapien
tccctgccttgacaccaccgtgcct

SEQ ID NO: 4824914 - DNA, 25 bp, Homo sapien
aggaacgtgcagaagcgccacccgg

SEQ ID NO: 4824915 - DNA, 25 bp, Homo sapien
tctctgagtgctgggagaccgtgga

SEQ ID NO: 4824916 - DNA, 25 bp, Homo sapien
tgctggccagggtctcatccgtgtg

SEQ ID NO: 4824917 - DNA, 25 bp, Homo sapien
tctgaagatggcatccgacttcctg

SEQ ID NO: 4824918 - DNA, 25 bp, Homo sapien
gggtatctctgcaaccatcacgctt

SEQ ID NO: 4824919 - DNA, 25 bp, Homo sapien
tggagaagaacggagataccggcaa

SEQ ID NO: 4824920 - DNA, 25 bp, Homo sapien
aacatcgcacaagggtgtggtcagg

SEQ ID NO: 4824921 - DNA, 25 bp, Homo sapien
ggaacatcgcacaagggtgtggtca

SEQ ID NO: 4824922 - DNA, 25 bp, Homo sapien
taccggcaattcgaagggatgtggt

SEQ ID NO: 4824923 - DNA, 25 bp, Homo sapien
ggtgagaatgacagccagggcctac

SEQ ID NO: 4824924 - DNA, 25 bp, Homo sapien
aatcgcacagtgcggaaaggccggc

SEQ ID NO: 4824925 - DNA, 25 bp, Homo sapien
cccaatgcaccagcaagccacggag

SEQ ID NO: 4824926 - DNA, 25 bp, Homo sapien
ggtgccacatgacaccaaagccggc

SEQ ID NO: 4824927 - DNA, 25 bp, Homo sapien
tcccggggtgctcgtccgagtgcag

SEQ ID NO: 4824928 - DNA, 25 bp, Homo sapien
catgccatccccagatcagaagtgg

SEQ ID NO: 4824929 - DNA, 25 bp, Homo sapien
ggtcacatgccatccccagatcaga

SEQ ID NO: 4824930 - DNA, 25 bp, Homo sapien
gcacggtcacatgccatccccagat

SEQ ID NO: 4824931 - DNA, 25 bp, Homo sapien
ctggcacggtcacatgccatcccca

SEQ ID NO: 4824932 - DNA, 25 bp, Homo sapien
gcaacacccatttctcagcggaata

SEQ ID NO: 4824933 - DNA, 25 bp, Homo sapien
ttcgtgtgcagctgcgcatgcgagc

SEQ ID NO: 4824934 - DNA, 25 bp, Homo sapien
cggaatacagaggaaccgcgcagac

SEQ ID NO: 4824935 - DNA, 25 bp, Homo sapien
cgagcgagtcatctgcactgcggtt

SEQ ID NO: 4824936 - DNA, 25 bp, Homo sapien
aaggaaccaggcccaggagcacagc

SEQ ID NO: 4824937 - DNA, 25 bp, Homo sapien
ggcgctgcgggaaggaaccaggccc

SEQ ID NO: 4824938 - DNA, 25 bp, Homo sapien
gcgctgcgggaaggaaccaggccca

SEQ ID NO: 4824939 - DNA, 25 bp, Homo sapien
gaaccaggcccaggagcacagccat

SEQ ID NO: 4824940 - DNA, 25 bp, Homo sapien
cacagttcatcaagaagacagaatc

SEQ ID NO: 4824941 - DNA, 25 bp, Homo sapien
tgggccggaagtggccgctaaccat

SEQ ID NO: 4824942 - DNA, 25 bp, Homo sapien
gaaggctatccaaggtgctcggcct

SEQ ID NO: 4824943 - DNA, 25 bp, Homo sapien
cacctgaagtgtggctggcatgagt

SEQ ID NO: 4824944 - DNA, 25 bp, Homo sapien
gtttagctgacatgagtgagttagc

SEQ ID NO: 4824945 - DNA, 25 bp, Homo sapien
agctgacatgagtgagttagctggc

SEQ ID NO: 4824946 - DNA, 25 bp, Homo sapien
agtttagctgacatgagtgagttag

SEQ ID NO: 4824947 - DNA, 25 bp, Homo sapien
ttagctggcgtgaatttagctggca

SEQ ID NO: 4824948 - DNA, 25 bp, Homo sapien
actggcgtgaatgagtttagctggc

SEQ ID NO: 4824949 - DNA, 25 bp, Homo sapien
gcagccacagcagtcggatgaggct

SEQ ID NO: 4824950 - DNA, 25 bp, Homo sapien
tcaacagtcacatgaggcttgtggc

SEQ ID NO: 4824951 - DNA, 25 bp, Homo sapien
accaggcggatcatggtccagcggt

SEQ ID NO: 4824952 - DNA, 25 bp, Homo sapien
ggggccactacaggtctctgcacat

SEQ ID NO: 4824953 - DNA, 25 bp, Homo sapien
tcggggccactacaggtctctgcac

SEQ ID NO: 4824954 - DNA, 25 bp, Homo sapien
catggtccagcggtagcaaaaggtg

SEQ ID NO: 4824955 - DNA, 25 bp, Homo sapien
gtaaacattcacacggcgaagcctg

SEQ ID NO: 4824956 - DNA, 25 bp, Homo sapien
tacacgctcgtgcagtggacgcaca

SEQ ID NO: 4824957 - DNA, 25 bp, Homo sapien
caataaatagcagtgcgtccaggcc

SEQ ID NO: 4824958 - DNA, 25 bp, Homo sapien
ggaggcttctccacatgacggcatg

SEQ ID NO: 4824959 - DNA, 25 bp, Homo sapien
aggagccaatgagcttgccggtgac

SEQ ID NO: 4824960 - DNA, 25 bp, Homo sapien
gagggacgcccagatggaaccgaat

SEQ ID NO: 4824961 - DNA, 25 bp, Homo sapien
agatggaaccgaatacagcaggagc

SEQ ID NO: 4824962 - DNA, 25 bp, Homo sapien
ggcagagaatacgaccagacaatct

SEQ ID NO: 4824963 - DNA, 25 bp, Homo sapien
ggtctgcggcaggagcacggctgca

SEQ ID NO: 4824964 - DNA, 25 bp, Homo sapien
gggggcaggtctgcggcaggagcac

SEQ ID NO: 4824965 - DNA, 25 bp, Homo sapien
gggcaggtctgcggcaggagcacgg

SEQ ID NO: 4824966 - DNA, 25 bp, Homo sapien
gcaggtctgcggcaggagcacggct

SEQ ID NO: 4824967 - DNA, 25 bp, Homo sapien
cgggtcactcggatgttgatgtgcc

SEQ ID NO: 4824968 - DNA, 25 bp, Homo sapien
cgggtcacccggatgttgaggtgcc

SEQ ID NO: 4824969 - DNA, 25 bp, Homo sapien
caggcgggtcactcggatgttgatg

SEQ ID NO: 4824970 - DNA, 25 bp, Homo sapien
tgcgggcgggtcacccggatgttga

SEQ ID NO: 4824971 - DNA, 25 bp, Homo sapien
ggcgggtcacccggatgttgaggtg

SEQ ID NO: 4824972 - DNA, 25 bp, Homo sapien
tgcgggcgggtcacccggatgttga

SEQ ID NO: 4824973 - DNA, 25 bp, Homo sapien
gcgggcgggtcacccggatgttgag

SEQ ID NO: 4824974 - DNA, 25 bp, Homo sapien
cgggtcacccggatgttgaggtgcc

SEQ ID NO: 4824975 - DNA, 25 bp, Homo sapien
aggcgggtcactcggatgttgatgt

SEQ ID NO: 4824976 - DNA, 25 bp, Homo sapien
cgggtcactcggatgttgatgtgcc

SEQ ID NO: 4824977 - DNA, 25 bp, Homo sapien
caggcgggtcactcggatgttgatg

SEQ ID NO: 4824978 - DNA, 25 bp, Homo sapien
gcgggtcactcggatgttgatgtgc

SEQ ID NO: 4824979 - DNA, 25 bp, Homo sapien
ctgggcagccgtcgaggttctttac

SEQ ID NO: 4824980 - DNA, 25 bp, Homo sapien
ggctgggcagccgtcgaggttcttt

SEQ ID NO: 4824981 - DNA, 25 bp, Homo sapien
tggctgggcagccgtcgaggttctt

SEQ ID NO: 4824982 - DNA, 25 bp, Homo sapien
gctgggcagccgtcgaggttcttta

SEQ ID NO: 4824983 - DNA, 25 bp, Homo sapien
tgtggggccgaagggtcagggtcac

SEQ ID NO: 4824984 - DNA, 25 bp, Homo sapien
ttgtggggccgaagggtcagggtca

SEQ ID NO: 4824985 - DNA, 25 bp, Homo sapien
gccccgggcttctccagctcctcca

SEQ ID NO: 4824986 - DNA, 25 bp, Homo sapien
ctgccccgggcttctccagctcctc

SEQ ID NO: 4824987 - DNA, 25 bp, Homo sapien
cccgggcttctccagctcctccaag

SEQ ID NO: 4824988 - DNA, 25 bp, Homo sapien
cgggcttctccagctcctccaagat

SEQ ID NO: 4824989 - DNA, 25 bp, Homo sapien
tttgcgaatggaaggcgcggggacg

SEQ ID NO: 4824990 - DNA, 25 bp, Homo sapien
tgtttgcgaatggaaggcgcgggga

SEQ ID NO: 4824991 - DNA, 25 bp, Homo sapien
ggaaggcgcggggacggagtggctc

SEQ ID NO: 4824992 - DNA, 25 bp, Homo sapien
aaggcgcggggacggagtggctcct

SEQ ID NO: 4824993 - DNA, 25 bp, Homo sapien
gacatccgggcctcatgtgaggaga

SEQ ID NO: 4824994 - DNA, 25 bp, Homo sapien
gatgggcacacctgatgagacctgg

SEQ ID NO: 4824995 - DNA, 25 bp, Homo sapien
ggagacgggcacacgtaatgagacc

SEQ ID NO: 4824996 - DNA, 25 bp, Homo sapien
cacacgtaatgagaccgttggaggt

SEQ ID NO: 4824997 - DNA, 25 bp, Homo sapien
gctacagacacgagagggatggcct

SEQ ID NO: 4824998 - DNA, 25 bp, Homo sapien
gagccgcggtggctttttaagccgc

SEQ ID NO: 4824999 - DNA, 25 bp, Homo sapien
tcttcgccatagaacacctgcttct

SEQ ID NO: 4825000 - DNA, 25 bp, Homo sapien
ctttttaagccgctcttcttcgcca

SEQ ID NO: 4825001 - DNA, 25 bp, Homo sapien
cgaggtagttgtgcagagccagaaa

SEQ ID NO: 4825002 - DNA, 25 bp, Homo sapien
agccagaaaggtcaccctctgcagc

SEQ ID NO: 4825003 - DNA, 25 bp, Homo sapien
tgtggtcaggccgaggtagttgtgc

SEQ ID NO: 4825004 - DNA, 25 bp, Homo sapien
gaagagctctgtggtcaggccgagg

SEQ ID NO: 4825005 - DNA, 25 bp, Homo sapien
gcaagaacacgccagctgcgcggtg

SEQ ID NO: 4825006 - DNA, 25 bp, Homo sapien
ctgcaagaacacgccagctgcgcgg

SEQ ID NO: 4825007 - DNA, 25 bp, Homo sapien
agaacacgccagctgcgcggtgacc

SEQ ID NO: 4825008 - DNA, 25 bp, Homo sapien
aagaacacgccagctgcgcggtgac

SEQ ID NO: 4825009 - DNA, 25 bp, Homo sapien
gacggagaccgttttgtaaggtgca

SEQ ID NO: 4825010 - DNA, 25 bp, Homo sapien
cctcaccagagtttccggatatttc

SEQ ID NO: 4825011 - DNA, 25 bp, Homo sapien
actccatgaaaagccgcagctggaa

SEQ ID NO: 4825012 - DNA, 25 bp, Homo sapien
cagagtttccggatatttctcaaaa

SEQ ID NO: 4825013 - DNA, 25 bp, Homo sapien
ccacgcctggctcagattattctgg

SEQ ID NO: 4825014 - DNA, 25 bp, Homo sapien
tggaaattagttggctctagagaga

SEQ ID NO: 4825015 - DNA, 25 bp, Homo sapien
tgcatgcagaggcagattcaccctt

SEQ ID NO: 4825016 - DNA, 25 bp, Homo sapien
tctgtttacatcacgccgtcacctg

SEQ ID NO: 4825017 - DNA, 25 bp, Homo sapien
agtgtctcctcgtgaaggcctcgca

SEQ ID NO: 4825018 - DNA, 25 bp, Homo sapien
tcatccctcttgctaaatacctagg

SEQ ID NO: 4825019 - DNA, 25 bp, Homo sapien
tctccgtccattcagcagtcgaagg

SEQ ID NO: 4825020 - DNA, 25 bp, Homo sapien
ggtctccgtccattcagcagtcgag

SEQ ID NO: 4825021 - DNA, 25 bp, Homo sapien
cttgccgcccacaaggaggatggca

SEQ ID NO: 4825022 - DNA, 25 bp, Homo sapien
acacgggagcctcatggctggacca

SEQ ID NO: 4825023 - DNA, 25 bp, Homo sapien
tctatattctagttccagtataact

SEQ ID NO: 4825024 - DNA, 25 bp, Homo sapien
catggctggaccatgccagacctca

SEQ ID NO: 4825025 - DNA, 25 bp, Homo sapien
caaggcaaggccatgagtaacagaa

SEQ ID NO: 4825026 - DNA, 25 bp, Homo sapien
cataactgggctaccatcaaggcaa

SEQ ID NO: 4825027 - DNA, 25 bp, Homo sapien
tgagccttgtacaggttcacagaca

SEQ ID NO: 4825028 - DNA, 25 bp, Homo sapien
caaagtctttgttatgctgctctgg

SEQ ID NO: 4825029 - DNA, 25 bp, Homo sapien
tcactgtggagaactggcctttaac

SEQ ID NO: 4825030 - DNA, 25 bp, Homo sapien
cactgtggagaactggcctttaacc

SEQ ID NO: 4825031 - DNA, 25 bp, Homo sapien
catcactgtggagaactggccttta

SEQ ID NO: 4825032 - DNA, 25 bp, Homo sapien
ctgtggagaactggcctttaaccac

SEQ ID NO: 4825033 - DNA, 25 bp, Homo sapien
gagcaggctgtggacgctgtctccc

SEQ ID NO: 4825034 - DNA, 25 bp, Homo sapien
agcaggctgtggacgctgtctcccg

SEQ ID NO: 4825035 - DNA, 25 bp, Homo sapien
agcagagtgggtgccgtcaggtctg

SEQ ID NO: 4825036 - DNA, 25 bp, Homo sapien
cttggagagcagagtgggtgccgtc

SEQ ID NO: 4825037 - DNA, 25 bp, Homo sapien
agagcagagtgggtgccgtcaggtc

SEQ ID NO: 4825038 - DNA, 25 bp, Homo sapien
tggagagcagagtgggtgccgtcag

SEQ ID NO: 4825039 - DNA, 25 bp, Homo sapien
cctctgaggcgccatgagagcagca

SEQ ID NO: 4825040 - DNA, 25 bp, Homo sapien
acctctgaggcgccatgagagcagc

SEQ ID NO: 4825041 - DNA, 25 bp, Homo sapien
cagcagcgcttttggtctagaaacc

SEQ ID NO: 4825042 - DNA, 25 bp, Homo sapien
gaaaccccgacaggcagtgccggag

SEQ ID NO: 4825043 - DNA, 25 bp, Homo sapien
tctagaaaccccgacaggcagtgcc

SEQ ID NO: 4825044 - DNA, 25 bp, Homo sapien
aataatttgcccagcagcgcttttg

SEQ ID NO: 4825045 - DNA, 25 bp, Homo sapien
gtgatgatcacacaaagcccagggt

SEQ ID NO: 4825046 - DNA, 25 bp, Homo sapien
ctgggctggaagacgtgctcccctt

SEQ ID NO: 4825047 - DNA, 25 bp, Homo sapien
gtcctggatgcagacctccagccgc

SEQ ID NO: 4825048 - DNA, 25 bp, Homo sapien
cacacagatgctggggtccggctcc

SEQ ID NO: 4825049 - DNA, 25 bp, Homo sapien
cacaaagacgatgtgtttgcaaagc

SEQ ID NO: 4825050 - DNA, 25 bp, Homo sapien
ggcaggtgagaattcttcacgtcaa

SEQ ID NO: 4825051 - DNA, 25 bp, Homo sapien
gtcaaactccgtgaggtcggcctcc

SEQ ID NO: 4825052 - DNA, 25 bp, Homo sapien
gcagggccgggtattccttcttgaa

SEQ ID NO: 4825053 - DNA, 25 bp, Homo sapien
tacagaacttccgatggcaggtgag

SEQ ID NO: 4825054 - DNA, 25 bp, Homo sapien
cttggccaaagacagcaccttggtc

SEQ ID NO: 4825055 - DNA, 25 bp, Homo sapien
gcagtgttctccacaagggtgttgg

SEQ ID NO: 4825056 - DNA, 25 bp, Homo sapien
cagtgttctccacaagggtgttggg

SEQ ID NO: 4825057 - DNA, 25 bp, Homo sapien
aaagacagcaccttggtcctcttcc

SEQ ID NO: 4825058 - DNA, 25 bp, Homo sapien
agttcagagatgactctacccctcc

SEQ ID NO: 4825059 - DNA, 25 bp, Homo sapien
ggagttcagagatgactctacccct

SEQ ID NO: 4825060 - DNA, 25 bp, Homo sapien
gagttcagagatgactctacccctc

SEQ ID NO: 4825061 - DNA, 25 bp, Homo sapien
cttccggaaccggtactgaggagtg

SEQ ID NO: 4825062 - DNA, 25 bp, Homo sapien
cttccggccgtaaaacatcactttg

SEQ ID NO: 4825063 - DNA, 25 bp, Homo sapien
catgatcttccggccgtaaaacatc

SEQ ID NO: 4825064 - DNA, 25 bp, Homo sapien
gtctctcttccggaaccggtactga

SEQ ID NO: 4825065 - DNA, 25 bp, Homo sapien
agggatggcctgaggtagagccgtg

SEQ ID NO: 4825066 - DNA, 25 bp, Homo sapien
gcctgaggtagagccgtggcacagg

SEQ ID NO: 4825067 - DNA, 25 bp, Homo sapien
gatggcctgaggtagagccgtggca

SEQ ID NO: 4825068 - DNA, 25 bp, Homo sapien
tggcctgaggtagagccgtggcaca

SEQ ID NO: 4825069 - DNA, 25 bp, Homo sapien
ggagggctccaactgcaatccccgt

SEQ ID NO: 4825070 - DNA, 25 bp, Homo sapien
ggccaggagggctccaactgcaatc

SEQ ID NO: 4825071 - DNA, 25 bp, Homo sapien
gaaattgtctaagccttctgaacat

SEQ ID NO: 4825072 - DNA, 25 bp, Homo sapien
aaaggatgaggacaccaaccaaggc

SEQ ID NO: 4825073 - DNA, 25 bp, Homo sapien
ccccaagagtgcagggcggtgccca

SEQ ID NO: 4825074 - DNA, 25 bp, Homo sapien
cttcctccgtgaaccacagtcccca

SEQ ID NO: 4825075 - DNA, 25 bp, Homo sapien
tcctccgtgaaccacagtccccaag

SEQ ID NO: 4825076 - DNA, 25 bp, Homo sapien
ccacagtccccaagagtgcagggcg

SEQ ID NO: 4825077 - DNA, 25 bp, Homo sapien
tgtgggctgtcatctttctcttcct

SEQ ID NO: 4825078 - DNA, 25 bp, Homo sapien
ggctgtcatctttctcttcctccat

SEQ ID NO: 4825079 - DNA, 25 bp, Homo sapien
ctgtgggctgtcatctttctcttcc

SEQ ID NO: 4825080 - DNA, 25 bp, Homo sapien
tgggctgtcatctttctcttcctcc

SEQ ID NO: 4825081 - DNA, 25 bp, Homo sapien
acctctacccgctcatgctcacacc

SEQ ID NO: 4825082 - DNA, 25 bp, Homo sapien
cagtcaggggcgaaaagcagacagc

SEQ ID NO: 4825083 - DNA, 25 bp, Homo sapien
agcctgaagcaaacaagggcacacc

SEQ ID NO: 4825084 - DNA, 25 bp, Homo sapien
tgaagcaaacaagggcacacctcta

SEQ ID NO: 4825085 - DNA, 25 bp, Homo sapien
gagccggggccgcttggagctcgtg

SEQ ID NO: 4825086 - DNA, 25 bp, Homo sapien
tggagctcgtgtggggtctccggtc

SEQ ID NO: 4825087 - DNA, 25 bp, Homo sapien
ccgcttggagctcgtgtggggtctc

SEQ ID NO: 4825088 - DNA, 25 bp, Homo sapien
cggggccgcttggagctcgtgtggg

SEQ ID NO: 4825089 - DNA, 25 bp, Homo sapien
caaggagatggtcccggagttcgtc

SEQ ID NO: 4825090 - DNA, 25 bp, Homo sapien
ggaaaagtacggcttcgagcccaca

SEQ ID NO: 4825091 - DNA, 25 bp, Homo sapien
tcaaggacggtaccttcgaccctga

SEQ ID NO: 4825092 - DNA, 25 bp, Homo sapien
tggcgcctgccatcgaaaaggactt

SEQ ID NO: 4825093 - DNA, 25 bp, Homo sapien
catgagttcagctgcgggattttcc

SEQ ID NO: 4825094 - DNA, 25 bp, Homo sapien
gctctgttgcccctggctcattgca

SEQ ID NO: 4825095 - DNA, 25 bp, Homo sapien
tttaataatatatgcaacccgtcac

SEQ ID NO: 4825096 - DNA, 25 bp, Homo sapien
tatgcaacccgtcacatgagttcag

SEQ ID NO: 4825097 - DNA, 25 bp, Homo sapien
gcttaaacaagtatgaaaggctgaa

SEQ ID NO: 4825098 - DNA, 25 bp, Homo sapien
ctgtggattccatcagtgcacaggc

SEQ ID NO: 4825099 - DNA, 25 bp, Homo sapien
agaatcacccagtccactttcaggg

SEQ ID NO: 4825100 - DNA, 25 bp, Homo sapien
gaaacttaacaaatctgcaagctgg

SEQ ID NO: 4825101 - DNA, 25 bp, Homo sapien
ggtggagcgcatggtcatagaagga

SEQ ID NO: 4825102 - DNA, 25 bp, Homo sapien
cgcatggtcatagaaggagcaggtg

SEQ ID NO: 4825103 - DNA, 25 bp, Homo sapien
ccagaggtggagcgcatggtcatag

SEQ ID NO: 4825104 - DNA, 25 bp, Homo sapien
gagcgcatggtcatagaaggagcag

SEQ ID NO: 4825105 - DNA, 25 bp, Homo sapien
tcatgacagggtgttggcaactcgc

SEQ ID NO: 4825106 - DNA, 25 bp, Homo sapien
ggcaactcgcttgcacccttcaggt

SEQ ID NO: 4825107 - DNA, 25 bp, Homo sapien
taggttgctaggaaaggaccacgag

SEQ ID NO: 4825108 - DNA, 25 bp, Homo sapien
cacagtcacgtgtggtggctgctgt

SEQ ID NO: 4825109 - DNA, 25 bp, Homo sapien
gagatgtcaggaccgtcgcctcctg

SEQ ID NO: 4825110 - DNA, 25 bp, Homo sapien
aggaccagtcggctccatacaccag

SEQ ID NO: 4825111 - DNA, 25 bp, Homo sapien
tacaccagcgagtcgggcaatgtgt

SEQ ID NO: 4825112 - DNA, 25 bp, Homo sapien
tgtgagatgtcaggaccgtcgcctc

SEQ ID NO: 4825113 - DNA, 25 bp, Homo sapien
ggattgatgccagcagtgaccggaa

SEQ ID NO: 4825114 - DNA, 25 bp, Homo sapien
gggctgccatcgctacctctgaagt

SEQ ID NO: 4825115 - DNA, 25 bp, Homo sapien
tgtcccttgggaggtagcgtcacag

SEQ ID NO: 4825116 - DNA, 25 bp, Homo sapien
tcctgaggagccgttgtgtcatgca

SEQ ID NO: 4825117 - DNA, 25 bp, Homo sapien
cagcgaatgagtggacggaagacac

SEQ ID NO: 4825118 - DNA, 25 bp, Homo sapien
gacactgttgcgaccccaagaatgg

SEQ ID NO: 4825119 - DNA, 25 bp, Homo sapien
tgtaatcccgacactgaggactgag

SEQ ID NO: 4825120 - DNA, 25 bp, Homo sapien
gagtacctgacaaaactggcctgga

SEQ ID NO: 4825121 - DNA, 25 bp, Homo sapien
taagcgtctctcaggaggcaagctc

SEQ ID NO: 4825122 - DNA, 25 bp, Homo sapien
ggcaagctctatccaaacaggcggt

SEQ ID NO: 4825123 - DNA, 25 bp, Homo sapien
agttaaaaggcaggagacccagtgt

SEQ ID NO: 4825124 - DNA, 25 bp, Homo sapien
tcaagggattaatgggcaagttctc

SEQ ID NO: 4825125 - DNA, 25 bp, Homo sapien
ggtttcctggcaaaaatgcacgacc

SEQ ID NO: 4825126 - DNA, 25 bp, Homo sapien
ggaacaatgtggcatcataggccct

SEQ ID NO: 4825127 - DNA, 25 bp, Homo sapien
ggttcaaagattctcaccacagatt

SEQ ID NO: 4825128 - DNA, 25 bp, Homo sapien
ggcacagcgccactttcacaggttt

SEQ ID NO: 4825129 - DNA, 25 bp, Homo sapien
tgcacaggcgtatctgccaacggct

SEQ ID NO: 4825130 - DNA, 25 bp, Homo sapien
gcttcatgtttcgtgtgtcccacag

SEQ ID NO: 4825131 - DNA, 25 bp, Homo sapien
tgtcccacagtaggatgtgttcatc

SEQ ID NO: 4825132 - DNA, 25 bp, Homo sapien
gaaagggtgccacttgattctccat

SEQ ID NO: 4825133 - DNA, 25 bp, Homo sapien
accacaggaggcatataaggaaagc

SEQ ID NO: 4825134 - DNA, 25 bp, Homo sapien
aatgctgcaatggtgccaggaggaa

SEQ ID NO: 4825135 - DNA, 25 bp, Homo sapien
catatacctacactccggcgaagca

SEQ ID NO: 4825136 - DNA, 25 bp, Homo sapien
catgcatccctcgaggacaaagtcc

SEQ ID NO: 4825137 - DNA, 25 bp, Homo sapien
tgtgctcccgatgagggctgctctg

SEQ ID NO: 4825138 - DNA, 25 bp, Homo sapien
gtgctcccgatgagggctgctctgg

SEQ ID NO: 4825139 - DNA, 25 bp, Homo sapien
atgtgctcccgatgagggctgctct

SEQ ID NO: 4825140 - DNA, 25 bp, Homo sapien
gatgtgctcccgatgagggctgctc

SEQ ID NO: 4825141 - DNA, 25 bp, Homo sapien
gtgtgggcaccgagtgctggccctt

SEQ ID NO: 4825142 - DNA, 25 bp, Homo sapien
caagcagaggcggcttctgaaccag

SEQ ID NO: 4825143 - DNA, 25 bp, Homo sapien
gtgggcaccgagtgctggcccttgg

SEQ ID NO: 4825144 - DNA, 25 bp, Homo sapien
aagcagaggcggcttctgaaccagt

SEQ ID NO: 4825145 - DNA, 25 bp, Homo sapien
ccagcccctcagaaggccatcgtcg

SEQ ID NO: 4825146 - DNA, 25 bp, Homo sapien
tgctggtgaagagaaatttgccggg

SEQ ID NO: 4825147 - DNA, 25 bp, Homo sapien
agcccctcagaaggccatcgtcgcc

SEQ ID NO: 4825148 - DNA, 25 bp, Homo sapien
tggtgaagagaaatttgccgggtac

SEQ ID NO: 4825149 - DNA, 25 bp, Homo sapien
aatgagtgttctcagttaggccgtt

SEQ ID NO: 4825150 - DNA, 25 bp, Homo sapien
gaagcatcaacaccactaatgacag

SEQ ID NO: 4825151 - DNA, 25 bp, Homo sapien
agcatcaacaccactaatgacagga

SEQ ID NO: 4825152 - DNA, 25 bp, Homo sapien
tgttctcagttaggccgttgatgtc

SEQ ID NO: 4825153 - DNA, 25 bp, Homo sapien
ggtgactgtctgtgaggaagctccc

SEQ ID NO: 4825154 - DNA, 25 bp, Homo sapien
tctgtgaggaagctcccctgggtga

SEQ ID NO: 4825155 - DNA, 25 bp, Homo sapien
gactctgtctgtgaggaagctcccc

SEQ ID NO: 4825156 - DNA, 25 bp, Homo sapien
tgactctgtctgtgaggaagctccc

SEQ ID NO: 4825157 - DNA, 25 bp, Homo sapien
cagtaattgaaagcagcaatccagg

SEQ ID NO: 4825158 - DNA, 25 bp, Homo sapien
aatccaggcctcgaattgatgtgcc

SEQ ID NO: 4825159 - DNA, 25 bp, Homo sapien
tctggatgccagtaattgaaagcag

SEQ ID NO: 4825160 - DNA, 25 bp, Homo sapien
tctcattcaccatcaggaggtggag

SEQ ID NO: 4825161 - DNA, 25 bp, Homo sapien
cctgggatgcggatatgccccttaa

SEQ ID NO: 4825162 - DNA, 25 bp, Homo sapien
gaagcccggcagaatgttattcgtc

SEQ ID NO: 4825163 - DNA, 25 bp, Homo sapien
cacagggaacccatgaagaagcccg

SEQ ID NO: 4825164 - DNA, 25 bp, Homo sapien
gagactggcggctaagatcacaacc

SEQ ID NO: 4825165 - DNA, 25 bp, Homo sapien
ttttttcataataggactggcagtg

SEQ ID NO: 4825166 - DNA, 25 bp, Homo sapien
tcagggctgaggagcacagtcgcag

SEQ ID NO: 4825167 - DNA, 25 bp, Homo sapien
atgatgtcagggctgaggagcacag

SEQ ID NO: 4825168 - DNA, 25 bp, Homo sapien
ctttttttcataataggactggcag

SEQ ID NO: 4825169 - DNA, 25 bp, Homo sapien
gaaagactcaggacccctgaccaag

SEQ ID NO: 4825170 - DNA, 25 bp, Homo sapien
ctcagagaaagactcaggacccctg

SEQ ID NO: 4825171 - DNA, 25 bp, Homo sapien
aaagtggaagtggttctcagagaaa

SEQ ID NO: 4825172 - DNA, 25 bp, Homo sapien
ctgaaaagtggaagtggttctcaga

SEQ ID NO: 4825173 - DNA, 25 bp, Homo sapien
agtggaccaatctagggacaaagcc

SEQ ID NO: 4825174 - DNA, 25 bp, Homo sapien
ccagtggaccaatctagggacaaag

SEQ ID NO: 4825175 - DNA, 25 bp, Homo sapien
tcccagtggaccaatctagggacaa

SEQ ID NO: 4825176 - DNA, 25 bp, Homo sapien
gaccaatctagggacaaagccagac

SEQ ID NO: 4825177 - DNA, 25 bp, Homo sapien
aacctatgcgaatgaagtacatcag

SEQ ID NO: 4825178 - DNA, 25 bp, Homo sapien
tgctgtcgagatgcctgtgcaggct

SEQ ID NO: 4825179 - DNA, 25 bp, Homo sapien
tccttgcgctcctagatgctgtcga

SEQ ID NO: 4825180 - DNA, 25 bp, Homo sapien
aactccatcaaagggaagtagccgc

SEQ ID NO: 4825181 - DNA, 25 bp, Homo sapien
tcctttctaagacagggcaactgct

SEQ ID NO: 4825182 - DNA, 25 bp, Homo sapien
catttcctaaacagcctggccagtg

SEQ ID NO: 4825183 - DNA, 25 bp, Homo sapien
ggcaactgctctaagctgccttaag

SEQ ID NO: 4825184 - DNA, 25 bp, Homo sapien
gcagccatgagaacgtggttgctct

SEQ ID NO: 4825185 - DNA, 25 bp, Homo sapien
tcggaaaaattcacacaggactcac

SEQ ID NO: 4825186 - DNA, 25 bp, Homo sapien
ggctgtttacatcaccccactacgg

SEQ ID NO: 4825187 - DNA, 25 bp, Homo sapien
tcactttgttaatgcatggctccag

SEQ ID NO: 4825188 - DNA, 25 bp, Homo sapien
tcctccccgacagctatcagatgaa

SEQ ID NO: 4825189 - DNA, 25 bp, Homo sapien
cactgacaggtcaatgaacatcctg

SEQ ID NO: 4825190 - DNA, 25 bp, Homo sapien
tcaacctaagaatgcttgcccaggc

SEQ ID NO: 4825191 - DNA, 25 bp, Homo sapien
cacaggatgctcactgctactctgg

SEQ ID NO: 4825192 - DNA, 25 bp, Homo sapien
ccaataatcagtgagaaatgccatc

SEQ ID NO: 4825193 - DNA, 25 bp, Homo sapien
ctcttggagttggatgtagaacgca

SEQ ID NO: 4825194 - DNA, 25 bp, Homo sapien
tagactccacattatcttagaacgt

SEQ ID NO: 4825195 - DNA, 25 bp, Homo sapien
caccattgaagagagatcgttttag

SEQ ID NO: 4825196 - DNA, 25 bp, Homo sapien
ttagaacgtttatatatagctcacc

SEQ ID NO: 4825197 - DNA, 25 bp, Homo sapien
catgtccagccaccgggatgtgaca

SEQ ID NO: 4825198 - DNA, 25 bp, Homo sapien
ccaagagggcatgtccagccaccgg

SEQ ID NO: 4825199 - DNA, 25 bp, Homo sapien
caccaggcggagcagttgtatggat

SEQ ID NO: 4825200 - DNA, 25 bp, Homo sapien
ccaccaggcggagcagttgtatgga

SEQ ID NO: 4825201 - DNA, 25 bp, Homo sapien
catgttactgcaggcaagtgtgaca

SEQ ID NO: 4825202 - DNA, 25 bp, Homo sapien
cagcatgttactgcaggcaagtgtg

SEQ ID NO: 4825203 - DNA, 25 bp, Homo sapien
gcatgttactgcaggcaagtgtgac

SEQ ID NO: 4825204 - DNA, 25 bp, Homo sapien
atgttactgcaggcaagtgtgacac

SEQ ID NO: 4825205 - DNA, 25 bp, Homo sapien
gacctcgaccagagggtgaatagag

SEQ ID NO: 4825206 - DNA, 25 bp, Homo sapien
atcttttctttggacctcgaccaga

SEQ ID NO: 4825207 - DNA, 25 bp, Homo sapien
tccaggattgcagaagtatcttttc

SEQ ID NO: 4825208 - DNA, 25 bp, Homo sapien
tcatgtccaggattgcagaagtatc

SEQ ID NO: 4825209 - DNA, 25 bp, Homo sapien
ggacctgaggctccttaacttccat

SEQ ID NO: 4825210 - DNA, 25 bp, Homo sapien
cggacctgaggctccttaacttcca

SEQ ID NO: 4825211 - DNA, 25 bp, Homo sapien
gaggctccttaacttccattccacc

SEQ ID NO: 4825212 - DNA, 25 bp, Homo sapien
cctgaggctccttaacttccattcc

SEQ ID NO: 4825213 - DNA, 25 bp, Homo sapien
tggtaggtcccgcacgccagcaggt

SEQ ID NO: 4825214 - DNA, 25 bp, Homo sapien
gagtccgcggtcagctcggtgtcca

SEQ ID NO: 4825215 - DNA, 25 bp, Homo sapien
tccaccgtttgcagggcgaaacagc

SEQ ID NO: 4825216 - DNA, 25 bp, Homo sapien
gcagctggtaggtcccgcacgccag

SEQ ID NO: 4825217 - DNA, 25 bp, Homo sapien
gcgcggagccggcagtagaggcggg

SEQ ID NO: 4825218 - DNA, 25 bp, Homo sapien
gagccggcagtagaggcgggtcggc

SEQ ID NO: 4825219 - DNA, 25 bp, Homo sapien
gcggagccggcagtagaggcgggtc

SEQ ID NO: 4825220 - DNA, 25 bp, Homo sapien
gccggcagtagaggcgggtcggcgg

SEQ ID NO: 4825221 - DNA, 25 bp, Homo sapien
gggacaccgtcagcgcgggccgcct

SEQ ID NO: 4825222 - DNA, 25 bp, Homo sapien
gcctctctcgcgactccttccgggg

SEQ ID NO: 4825223 - DNA, 25 bp, Homo sapien
agggacaccgtcagcgcgggccgcc

SEQ ID NO: 4825224 - DNA, 25 bp, Homo sapien
cgcctctctcgcgactccttccggg

SEQ ID NO: 4825225 - DNA, 25 bp, Homo sapien
agcacctcagagagcatccttaaca

SEQ ID NO: 4825226 - DNA, 25 bp, Homo sapien
aatccacggtctgaatgtgtgcagc

SEQ ID NO: 4825227 - DNA, 25 bp, Homo sapien
ccttgggccgttacaggttgaactg

SEQ ID NO: 4825228 - DNA, 25 bp, Homo sapien
agcaggagtccgcagaagagaaagc

SEQ ID NO: 4825229 - DNA, 25 bp, Homo sapien
aatgagaaccgtcctggtgggagcc

SEQ ID NO: 4825230 - DNA, 25 bp, Homo sapien
gacagtttttagtcacgtggcctga

SEQ ID NO: 4825231 - DNA, 25 bp, Homo sapien
tgtgacatcgggagtctcacggcag

SEQ ID NO: 4825232 - DNA, 25 bp, Homo sapien
tttgtggacacaactcccgtgcagg

SEQ ID NO: 4825233 - DNA, 25 bp, Homo sapien
tcatcgctctggctcaagctcatgc

SEQ ID NO: 4825234 - DNA, 25 bp, Homo sapien
actgggagccgcagtaccgggccac

SEQ ID NO: 4825235 - DNA, 25 bp, Homo sapien
ttcctctcccgacagtgcttcttgt

SEQ ID NO: 4825236 - DNA, 25 bp, Homo sapien
gcactgggagccgcagtaccgggcc

SEQ ID NO: 4825237 - DNA, 25 bp, Homo sapien
ggccagtccttctgctggcactggg

SEQ ID NO: 4825238 - DNA, 25 bp, Homo sapien
tctatagggtctgtaggcagctgct

SEQ ID NO: 4825239 - DNA, 25 bp, Homo sapien
catccccgttggcattataataccg

SEQ ID NO: 4825240 - DNA, 25 bp, Homo sapien
catagtaggtgcaagagttctcctc

SEQ ID NO: 4825241 - DNA, 25 bp, Homo sapien
tataataccgggtcacatttaggac

SEQ ID NO: 4825242 - DNA, 25 bp, Homo sapien
tacagcgagccaaggtcgcgctact

SEQ ID NO: 4825243 - DNA, 25 bp, Homo sapien
gaacgaaagacacttcaggctctgc

SEQ ID NO: 4825244 - DNA, 25 bp, Homo sapien
ttcaacaatcgtaagaggcctggct

SEQ ID NO: 4825245 - DNA, 25 bp, Homo sapien
taatattagagcaaggaccgggcgt

SEQ ID NO: 4825246 - DNA, 25 bp, Homo sapien
cgattgtccacggtcacagcgttga

SEQ ID NO: 4825247 - DNA, 25 bp, Homo sapien
tcacagcgttgaggtgcaccacctg

SEQ ID NO: 4825248 - DNA, 25 bp, Homo sapien
gcaggttgtccaggcgattgtccac

SEQ ID NO: 4825249 - DNA, 25 bp, Homo sapien
agccccacggcaccagttgcaggtt

SEQ ID NO: 4825250 - DNA, 25 bp, Homo sapien
ggcagagacagcttggaaacaccca

SEQ ID NO: 4825251 - DNA, 25 bp, Homo sapien
atgtgatctgatcgggcccctggtc

SEQ ID NO: 4825252 - DNA, 25 bp, Homo sapien
gagaaacccaagcacctgatctgtg

SEQ ID NO: 4825253 - DNA, 25 bp, Homo sapien
taagcagatggcctcgagacagctc

SEQ ID NO: 4825254 - DNA, 25 bp, Homo sapien
gagccccttcctcggttcttgtcaa

SEQ ID NO: 4825255 - DNA, 25 bp, Homo sapien
agagccccttcctcggttcttgtca

SEQ ID NO: 4825256 - DNA, 25 bp, Homo sapien
cagagccccttcctcggttcttgtc

SEQ ID NO: 4825257 - DNA, 25 bp, Homo sapien
tgaccacgagcatcaggggagggaa

SEQ ID NO: 4825258 - DNA, 25 bp, Homo sapien
tgggcactgaccacgagcatcaggg

SEQ ID NO: 4825259 - DNA, 25 bp, Homo sapien
gcactgaccacgagcatcaggggag

SEQ ID NO: 4825260 - DNA, 25 bp, Homo sapien
accacgagcatcaggggagggaaca

SEQ ID NO: 4825261 - DNA, 25 bp, Homo sapien
cctgctcatcgatcagcgtgtattt

SEQ ID NO: 4825262 - DNA, 25 bp, Homo sapien
gtcctgctcatcgatcagcgtgtat

SEQ ID NO: 4825263 - DNA, 25 bp, Homo sapien
agcgggatgtcctgctcatcgatca

SEQ ID NO: 4825264 - DNA, 25 bp, Homo sapien
gctcatcgatcagcgtgtatttggt

SEQ ID NO: 4825265 - DNA, 25 bp, Homo sapien
cacatgtttcaaatcattacatttg

SEQ ID NO: 4825266 - DNA, 25 bp, Homo sapien
ctggaagttaaccacatgtttcaaa

SEQ ID NO: 4825267 - DNA, 25 bp, Homo sapien
tgtttcaaatcattacatttgggat

SEQ ID NO: 4825268 - DNA, 25 bp, Homo sapien
tggaagttaaccacatgtttcaaat

SEQ ID NO: 4825269 - DNA, 25 bp, Homo sapien
aaccagaacaggcaggagcctgttg

SEQ ID NO: 4825270 - DNA, 25 bp, Homo sapien
cttataaccagaacaggcaggagcc

SEQ ID NO: 4825271 - DNA, 25 bp, Homo sapien
cagaacaggcaggagcctgttgcat

SEQ ID NO: 4825272 - DNA, 25 bp, Homo sapien
ttataaccagaacaggcaggagcct

SEQ ID NO: 4825273 - DNA, 25 bp, Homo sapien
gcagtctacgacaaaacacaggcag

SEQ ID NO: 4825274 - DNA, 25 bp, Homo sapien
ggtatcaggcttcatcctcgcaggg

SEQ ID NO: 4825275 - DNA, 25 bp, Homo sapien
gggctaaccccaacagtggcactga

SEQ ID NO: 4825276 - DNA, 25 bp, Homo sapien
caaagactgtttcactgagctgagg

SEQ ID NO: 4825277 - DNA, 25 bp, Homo sapien
gtggctccgagaaaccgccaagcct

SEQ ID NO: 4825278 - DNA, 25 bp, Homo sapien
caccaaaagccgcagccgctggtga

SEQ ID NO: 4825279 - DNA, 25 bp, Homo sapien
ctggtgacgggaacagggctcccat

SEQ ID NO: 4825280 - DNA, 25 bp, Homo sapien
gacgccgcctgacactgcctcggct

SEQ ID NO: 4825281 - DNA, 25 bp, Homo sapien
tgctccgagtctgaggctcagccta

SEQ ID NO: 4825282 - DNA, 25 bp, Homo sapien
ggagggctccgggagaacgcggctc

SEQ ID NO: 4825283 - DNA, 25 bp, Homo sapien
cccggatcgccgacaccactgggag

SEQ ID NO: 4825284 - DNA, 25 bp, Homo sapien
ccggacgccgcgctaggccccggat

SEQ ID NO: 4825285 - DNA, 25 bp, Homo sapien
ggctcgggctcgagccacgcatctc

SEQ ID NO: 4825286 - DNA, 25 bp, Homo sapien
gagccgaggggtgcgtgcccgccgg

SEQ ID NO: 4825287 - DNA, 25 bp, Homo sapien
ccagagccgaggggtgcgtgcccgc

SEQ ID NO: 4825288 - DNA, 25 bp, Homo sapien
ccggcctgcgagaggaagctgcacc

SEQ ID NO: 4825289 - DNA, 25 bp, Homo sapien
gccggcctgcgagaggaagctgcac

SEQ ID NO: 4825290 - DNA, 25 bp, Homo sapien
ggccacccggccgagccgcacgata

SEQ ID NO: 4825291 - DNA, 25 bp, Homo sapien
ggccgagccgcacgatacccaattt

SEQ ID NO: 4825292 - DNA, 25 bp, Homo sapien
gagccgcacgatacccaatttgaag

SEQ ID NO: 4825293 - DNA, 25 bp, Homo sapien
ccgagccgcacgatacccaatttga

SEQ ID NO: 4825294 - DNA, 25 bp, Homo sapien
tgcgctctcggccggcagcgccgct

SEQ ID NO: 4825295 - DNA, 25 bp, Homo sapien
cctgcgctctcggccggcagcgccg

SEQ ID NO: 4825296 - DNA, 25 bp, Homo sapien
gcgctctcggccggcagcgccgctc

SEQ ID NO: 4825297 - DNA, 25 bp, Homo sapien
gggcctgcgctctcggccggcagcg

SEQ ID NO: 4825298 - DNA, 25 bp, Homo sapien
gctccgggcgggacgaggctgggcc

SEQ ID NO: 4825299 - DNA, 25 bp, Homo sapien
ccggggtcggggtagcagccaggcg

SEQ ID NO: 4825300 - DNA, 25 bp, Homo sapien
cccgccggacctgccacgcgccgcc

SEQ ID NO: 4825301 - DNA, 25 bp, Homo sapien
gagccggggtcggggtagcagccag

SEQ ID NO: 4825302 - DNA, 25 bp, Homo sapien
taacataatattacaggcgcaggca

SEQ ID NO: 4825303 - DNA, 25 bp, Homo sapien
cacatggttgtatgaggtctccgct

SEQ ID NO: 4825304 - DNA, 25 bp, Homo sapien
gcgcaggcataagggcgtgacacct

SEQ ID NO: 4825305 - DNA, 25 bp, Homo sapien
gtggtacaatctcgggtcgctgcca

SEQ ID NO: 4825306 - DNA, 25 bp, Homo sapien
cttttaggatatagggcaggaggct

SEQ ID NO: 4825307 - DNA, 25 bp, Homo sapien
tgaagatgccgaccagagcgaaggt

SEQ ID NO: 4825308 - DNA, 25 bp, Homo sapien
tgagaaccacgagtactaaatcctt

SEQ ID NO: 4825309 - DNA, 25 bp, Homo sapien
gaagcactgagtttccacacttgga

SEQ ID NO: 4825310 - DNA, 25 bp, Homo sapien
gatagggtcagaatcaaggatgtgc

SEQ ID NO: 4825311 - DNA, 25 bp, Homo sapien
ccaggttttcatgagagtgcagcta

SEQ ID NO: 4825312 - DNA, 25 bp, Homo sapien
tagagggatcctgcgaaaagatatc

SEQ ID NO: 4825313 - DNA, 25 bp, Homo sapien
tccatctcagtagcttgcaatacag

SEQ ID NO: 4825314 - DNA, 25 bp, Homo sapien
acgtcgttttgtgctggtcaggccc

SEQ ID NO: 4825315 - DNA, 25 bp, Homo sapien
tgtcctctgaagtggcatgggctgc

SEQ ID NO: 4825316 - DNA, 25 bp, Homo sapien
ttctcataggcgctgggtggctgaa

SEQ ID NO: 4825317 - DNA, 25 bp, Homo sapien
tggaacactgtgtctgcctaggcgg

SEQ ID NO: 4825318 - DNA, 25 bp, Homo sapien
tcaggctaccatgcctgggcggagc

SEQ ID NO: 4825319 - DNA, 25 bp, Homo sapien
tcgccttgggcaccctccagcctct

SEQ ID NO: 4825320 - DNA, 25 bp, Homo sapien
ggcgcgctcaggctaccatgcctgg

SEQ ID NO: 4825321 - DNA, 25 bp, Homo sapien
gggctggctccctttaacagaggac

SEQ ID NO: 4825322 - DNA, 25 bp, Homo sapien
gctcctgttgcgtttaggcacccag

SEQ ID NO: 4825323 - DNA, 25 bp, Homo sapien
taaggacacgtccttggagcccggc

SEQ ID NO: 4825324 - DNA, 25 bp, Homo sapien
tatctataaaatgcacaggaccagg

SEQ ID NO: 4825325 - DNA, 25 bp, Homo sapien
tcccaagcggtgtggtgtggacctc

SEQ ID NO: 4825326 - DNA, 25 bp, Homo sapien
gcacccggcccagtcaacaaatatt

SEQ ID NO: 4825327 - DNA, 25 bp, Homo sapien
cgcacccggcccagtcaacaaatat

SEQ ID NO: 4825328 - DNA, 25 bp, Homo sapien
ccaccgcacccggcccagtcaacaa

SEQ ID NO: 4825329 - DNA, 25 bp, Homo sapien
accgcacccggcccagtcaacaaat

SEQ ID NO: 4825330 - DNA, 25 bp, Homo sapien
gctcagggtgctcggcctgtcataa

SEQ ID NO: 4825331 - DNA, 25 bp, Homo sapien
tgtctatgtgcgctgtctatgctgg

SEQ ID NO: 4825332 - DNA, 25 bp, Homo sapien
gggaagccacaaagacactcgaaat

SEQ ID NO: 4825333 - DNA, 25 bp, Homo sapien
atgaaggcgctcgtgtctcctgcga

SEQ ID NO: 4825334 - DNA, 25 bp, Homo sapien
tcgggtgtcacccagattgaccttc

SEQ ID NO: 4825335 - DNA, 25 bp, Homo sapien
ggtgtcacccagattgaccttcaag

SEQ ID NO: 4825336 - DNA, 25 bp, Homo sapien
caggagactcgggtgtcacccagat

SEQ ID NO: 4825337 - DNA, 25 bp, Homo sapien
gagactcgggtgtcacccagattga

SEQ ID NO: 4825338 - DNA, 25 bp, Homo sapien
ctcggttcacacgaccatccagaaa

SEQ ID NO: 4825339 - DNA, 25 bp, Homo sapien
tttcttgtcagtccagtacccgtcc

SEQ ID NO: 4825340 - DNA, 25 bp, Homo sapien
tcatttcttgtcagtccagtacccg

SEQ ID NO: 4825341 - DNA, 25 bp, Homo sapien
aacctcaaattcagtccatgcttct

SEQ ID NO: 4825342 - DNA, 25 bp, Homo sapien
ccagggaaggctacttggtctgcag

SEQ ID NO: 4825343 - DNA, 25 bp, Homo sapien
ctacttggtctgcagaaaaggcctt

SEQ ID NO: 4825344 - DNA, 25 bp, Homo sapien
agaaaaggccttgacttgtgcatac

SEQ ID NO: 4825345 - DNA, 25 bp, Homo sapien
aaggctacttggtctgcagaaaagg

SEQ ID NO: 4825346 - DNA, 25 bp, Homo sapien
gtggcagcgagagcggggtaaccag

SEQ ID NO: 4825347 - DNA, 25 bp, Homo sapien
ctatgagtggcagcgagagcggggt

SEQ ID NO: 4825348 - DNA, 25 bp, Homo sapien
gagcggggtaaccagagagggcaca

SEQ ID NO: 4825349 - DNA, 25 bp, Homo sapien
accggagcgccccccaggttggcat

SEQ ID NO: 4825350 - DNA, 25 bp, Homo sapien
atcagggcaaccctcccgattggga

SEQ ID NO: 4825351 - DNA, 25 bp, Homo sapien
cagtccaggtattcccgccgttagg

SEQ ID NO: 4825352 - DNA, 25 bp, Homo sapien
gcagaacacccatgcttagccggag

SEQ ID NO: 4825353 - DNA, 25 bp, Homo sapien
cagccggagcataccctcggcaggg

SEQ ID NO: 4825354 - DNA, 25 bp, Homo sapien
gggtctttctccttcttcggccagc

SEQ ID NO: 4825355 - DNA, 25 bp, Homo sapien
caagccggcgaaatcaaagtgcgtc

SEQ ID NO: 4825356 - DNA, 25 bp, Homo sapien
catccactactacgactctggcggg

SEQ ID NO: 4825357 - DNA, 25 bp, Homo sapien
catgtgttgaaaatgggacggctac

SEQ ID NO: 4825358 - DNA, 25 bp, Homo sapien
gccgctgcgcccgtgatttgcccac

SEQ ID NO: 4825359 - DNA, 25 bp, Homo sapien
gcccggcccttttgcagaggttctg

SEQ ID NO: 4825360 - DNA, 25 bp, Homo sapien
ttcttgaaggatccctcaatttctt

SEQ ID NO: 4825361 - DNA, 25 bp, Homo sapien
ttggttttcttgaaggatccctcaa

SEQ ID NO: 4825362 - DNA, 25 bp, Homo sapien
tgtctgacgtgcattcgtatcttca

SEQ ID NO: 4825363 - DNA, 25 bp, Homo sapien
cgtgcattcgtatcttcagtgtttt

SEQ ID NO: 4825364 - DNA, 25 bp, Homo sapien
cctctgtcccgtattgtctgacgtg

SEQ ID NO: 4825365 - DNA, 25 bp, Homo sapien
ccgtattgtctgacgtgcattcgta

SEQ ID NO: 4825366 - DNA, 25 bp, Homo sapien
ttggccaagtatggtctttgctgac

SEQ ID NO: 4825367 - DNA, 25 bp, Homo sapien
atccatgtgtgttctattagttatc

SEQ ID NO: 4825368 - DNA, 25 bp, Homo sapien
cttatcccgttcctcatcagtgtct

SEQ ID NO: 4825369 - DNA, 25 bp, Homo sapien
ttgggaaccaaggagcactgtgatg

SEQ ID NO: 4825370 - DNA, 25 bp, Homo sapien
aacctgtctggttcctcaggatgcc

SEQ ID NO: 4825371 - DNA, 25 bp, Homo sapien
tcctcaggatgcctcttcctactgg

SEQ ID NO: 4825372 - DNA, 25 bp, Homo sapien
ttgaagagtttcctttccagatttc

SEQ ID NO: 4825373 - DNA, 25 bp, Homo sapien
aggtgaagaacctgtctggttcctc

SEQ ID NO: 4825374 - DNA, 25 bp, Homo sapien
gtcacttcagcactggtcaaacaat

SEQ ID NO: 4825375 - DNA, 25 bp, Homo sapien
tggggattttgggaatcaattctca

SEQ ID NO: 4825376 - DNA, 25 bp, Homo sapien
caaatgttattacccagaaattggg

SEQ ID NO: 4825377 - DNA, 25 bp, Homo sapien
cttcagcactggtcaaacaatgcag

SEQ ID NO: 4825378 - DNA, 25 bp, Homo sapien
cgtgggcttggttgccgcttgttct

SEQ ID NO: 4825379 - DNA, 25 bp, Homo sapien
ttgtgctgtgcttcctcgtgggctt

SEQ ID NO: 4825380 - DNA, 25 bp, Homo sapien
tgtgcttcctcgtgggcttggttgc

SEQ ID NO: 4825381 - DNA, 25 bp, Homo sapien
tcctcgtgggcttggttgccgcttg

SEQ ID NO: 4825382 - DNA, 25 bp, Homo sapien
taaactctttgaggttagggctcta

SEQ ID NO: 4825383 - DNA, 25 bp, Homo sapien
tgctggcccctgattgagatctagt

SEQ ID NO: 4825384 - DNA, 25 bp, Homo sapien
tcatatcactcttgaaacagtcaca

SEQ ID NO: 4825385 - DNA, 25 bp, Homo sapien
tcagtttgtacagaaacaggtggca

SEQ ID NO: 4825386 - DNA, 25 bp, Homo sapien
ctgggagccacatgagaatgcacat

SEQ ID NO: 4825387 - DNA, 25 bp, Homo sapien
tgcactgggagccacatgagaatgc

SEQ ID NO: 4825388 - DNA, 25 bp, Homo sapien
catggcgtctgccttgtacttacag

SEQ ID NO: 4825389 - DNA, 25 bp, Homo sapien
cttgtacttacagaagcccttgtgt

SEQ ID NO: 4825390 - DNA, 25 bp, Homo sapien
caagtttgtgctgcgggcaagaatc

SEQ ID NO: 4825391 - DNA, 25 bp, Homo sapien
gcctgaggaacatttcaagtttgtg

SEQ ID NO: 4825392 - DNA, 25 bp, Homo sapien
aggaacatttcaagtttgtgctgcg

SEQ ID NO: 4825393 - DNA, 25 bp, Homo sapien
acatttcaagtttgtgctgcgggca

SEQ ID NO: 4825394 - DNA, 25 bp, Homo sapien
cgagggactcattctctggacaatg

SEQ ID NO: 4825395 - DNA, 25 bp, Homo sapien
agggactcattctctggacaatggg

SEQ ID NO: 4825396 - DNA, 25 bp, Homo sapien
gagggactcattctctggacaatgg

SEQ ID NO: 4825397 - DNA, 25 bp, Homo sapien
gacgagggactcattctctggacaa

SEQ ID NO: 4825398 - DNA, 25 bp, Homo sapien
cgctagacaccatctgtagaatggc

SEQ ID NO: 4825399 - DNA, 25 bp, Homo sapien
tgcccagcatgaaacgcagctctct

SEQ ID NO: 4825400 - DNA, 25 bp, Homo sapien
gcagctctcttggtctgcctctcgc

SEQ ID NO: 4825401 - DNA, 25 bp, Homo sapien
aaaactgataggcaccttctgccca

SEQ ID NO: 4825402 - DNA, 25 bp, Homo sapien
tgggcaaagtgtacacggagtctct

SEQ ID NO: 4825403 - DNA, 25 bp, Homo sapien
ccaagtgttgcgaaccagggagtga

SEQ ID NO: 4825404 - DNA, 25 bp, Homo sapien
cataagaggacacagactcagggaa

SEQ ID NO: 4825405 - DNA, 25 bp, Homo sapien
gagtgagaagatggcctacaccacc

SEQ ID NO: 4825406 - DNA, 25 bp, Homo sapien
cgccgagctgggctactgtgatttc

SEQ ID NO: 4825407 - DNA, 25 bp, Homo sapien
gccgccgagctgggctactgtgatt

SEQ ID NO: 4825408 - DNA, 25 bp, Homo sapien
tttctctgcagttggccgcagtcaa

SEQ ID NO: 4825409 - DNA, 25 bp, Homo sapien
cagttggccgcagtcaacaattgca

SEQ ID NO: 4825410 - DNA, 25 bp, Homo sapien
tgggcctgaatcctatacttggaat

SEQ ID NO: 4825411 - DNA, 25 bp, Homo sapien
tgaatcctatacttggaatcctgat

SEQ ID NO: 4825412 - DNA, 25 bp, Homo sapien
tcctgatgaaataaggaccccaacc

SEQ ID NO: 4825413 - DNA, 25 bp, Homo sapien
gatgaaataaggaccccaaccctgc

SEQ ID NO: 4825414 - DNA, 25 bp, Homo sapien
ccgttgctcacgttgctcttctgat

SEQ ID NO: 4825415 - DNA, 25 bp, Homo sapien
ttacttgtgtgctagtctgggtgcc

SEQ ID NO: 4825416 - DNA, 25 bp, Homo sapien
tatttctgataggaccgttgctcac

SEQ ID NO: 4825417 - DNA, 25 bp, Homo sapien
ggtccctcaccattctcgactgctg

SEQ ID NO: 4825418 - DNA, 25 bp, Homo sapien
ccgtgatgagctgcaagggccatct

SEQ ID NO: 4825419 - DNA, 25 bp, Homo sapien
gcccgtgatgagctgcaagggccat

SEQ ID NO: 4825420 - DNA, 25 bp, Homo sapien
cagcccgtgatgagctgcaagggcc

SEQ ID NO: 4825421 - DNA, 25 bp, Homo sapien
tgatgagctgcaagggccatctgag

SEQ ID NO: 4825422 - DNA, 25 bp, Homo sapien
cattgtgcctagagtcaggagttcc

SEQ ID NO: 4825423 - DNA, 25 bp, Homo sapien
ttcagggctgtcaggtattttttcc

SEQ ID NO: 4825424 - DNA, 25 bp, Homo sapien
cctcagtgtctcagtgagtgtttga

SEQ ID NO: 4825425 - DNA, 25 bp, Homo sapien
tgtttttagatgaaagtcttgtggc

SEQ ID NO: 4825426 - DNA, 25 bp, Homo sapien
gagctctgatctgctattgtggatg

SEQ ID NO: 4825427 - DNA, 25 bp, Homo sapien
tcacatccgcggatggccgtggtga

SEQ ID NO: 4825428 - DNA, 25 bp, Homo sapien
aggagtgactgacagtgactgcttg

SEQ ID NO: 4825429 - DNA, 25 bp, Homo sapien
gagtgactgacagtgaccgcttgtt

SEQ ID NO: 4825430 - DNA, 25 bp, Homo sapien
tgttcccttacacactgccgctgag

SEQ ID NO: 4825431 - DNA, 25 bp, Homo sapien
cacaagccccaggttattccattac

SEQ ID NO: 4825432 - DNA, 25 bp, Homo sapien
acgtcctcgccaccatttcttagtg

SEQ ID NO: 4825433 - DNA, 25 bp, Homo sapien
tccattacgctttaggctttgcctg

SEQ ID NO: 4825434 - DNA, 25 bp, Homo sapien
ccagcttatagattcaatttgaggg

SEQ ID NO: 4825435 - DNA, 25 bp, Homo sapien
ttgaggggacttgacagctttgtaa

SEQ ID NO: 4825436 - DNA, 25 bp, Homo sapien
gttcaagcgatcatgcctccttggc

SEQ ID NO: 4825437 - DNA, 25 bp, Homo sapien
ggctttgagtaatcttggcaaattt

SEQ ID NO: 4825438 - DNA, 25 bp, Homo sapien
catctgctgcaggatttggtatgag

SEQ ID NO: 4825439 - DNA, 25 bp, Homo sapien
taaatgattgtgtcagatgcaggtg

SEQ ID NO: 4825440 - DNA, 25 bp, Homo sapien
tatgaggaagtttccacttactctg

SEQ ID NO: 4825441 - DNA, 25 bp, Homo sapien
gcactgcctttttatgtcagacact

SEQ ID NO: 4825442 - DNA, 25 bp, Homo sapien
catttcgatggtcagtcgtgaagca

SEQ ID NO: 4825443 - DNA, 25 bp, Homo sapien
gatcaagcagcctcttataaagaag

SEQ ID NO: 4825444 - DNA, 25 bp, Homo sapien
taagaaacctgtccagtgacatgaa

SEQ ID NO: 4825445 - DNA, 25 bp, Homo sapien
gaaaactcctgtcaaagccgactga

SEQ ID NO: 4825446 - DNA, 25 bp, Homo sapien
agaacagctcccatcaagatcctag

SEQ ID NO: 4825447 - DNA, 25 bp, Homo sapien
cagggagcctgtgacatgtataaag

SEQ ID NO: 4825448 - DNA, 25 bp, Homo sapien
gatcctagcaggacttttgtgtaac

SEQ ID NO: 4825449 - DNA, 25 bp, Homo sapien
tactcaggagcgctgaggcggttaa

SEQ ID NO: 4825450 - DNA, 25 bp, Homo sapien
ttttttggtagcacaaggctgctga

SEQ ID NO: 4825451 - DNA, 25 bp, Homo sapien
taatgagacattggctgaacttgcc

SEQ ID NO: 4825452 - DNA, 25 bp, Homo sapien
gtggcatgaacacgacacagtgcag

SEQ ID NO: 4825453 - DNA, 25 bp, Homo sapien
cagcccttaaagaggttactcgagt

SEQ ID NO: 4825454 - DNA, 25 bp, Homo sapien
gttttccttagagctaatcattgcc

SEQ ID NO: 4825455 - DNA, 25 bp, Homo sapien
tataaacccattcccaaactgatag

SEQ ID NO: 4825456 - DNA, 25 bp, Homo sapien
tctctcatgtcacggacactgtggc

SEQ ID NO: 4825457 - DNA, 25 bp, Homo sapien
cacagctgcctggattgcctttcct

SEQ ID NO: 4825458 - DNA, 25 bp, Homo sapien
caaggccaaagaggtgacgatagct

SEQ ID NO: 4825459 - DNA, 25 bp, Homo sapien
gtgcctctcgagtcaataacgccag

SEQ ID NO: 4825460 - DNA, 25 bp, Homo sapien
cacagtcctgttggtacacaagcga

SEQ ID NO: 4825461 - DNA, 25 bp, Homo sapien
ttttatggagtgtcagcccgagagc

SEQ ID NO: 4825462 - DNA, 25 bp, Homo sapien
gcagtgaggcttgcggtgcctcctc

SEQ ID NO: 4825463 - DNA, 25 bp, Homo sapien
gtaccatctgctgacgccaacaggc

SEQ ID NO: 4825464 - DNA, 25 bp, Homo sapien
gattgtgttagtctgcttttgtgtc

SEQ ID NO: 4825465 - DNA, 25 bp, Homo sapien
tgagcctgctcttgaagcgacggta

SEQ ID NO: 4825466 - DNA, 25 bp, Homo sapien
aagtaaaatcataccacgttcgcgg

SEQ ID NO: 4825467 - DNA, 25 bp, Homo sapien
cggcatttaccacggcctttgagaa

SEQ ID NO: 4825468 - DNA, 25 bp, Homo sapien
cctttgagaagagcatgccgccatt

SEQ ID NO: 4825469 - DNA, 25 bp, Homo sapien
tccgtagtgctgtgaatcgggcaca

SEQ ID NO: 4825470 - DNA, 25 bp, Homo sapien
tgctgttcccgaacacagccaggaa

SEQ ID NO: 4825471 - DNA, 25 bp, Homo sapien
tatggtgaggacctcgtgctgttcc

SEQ ID NO: 4825472 - DNA, 25 bp, Homo sapien
gagaggcgtggctccatcttcacag

SEQ ID NO: 4825473 - DNA, 25 bp, Homo sapien
tagtgccagccttttgaagccaata

SEQ ID NO: 4825474 - DNA, 25 bp, Homo sapien
tgagatgatgatgggggagccaagc

SEQ ID NO: 4825475 - DNA, 25 bp, Homo sapien
gagtgaactggggtccagtaagcca

SEQ ID NO: 4825476 - DNA, 25 bp, Homo sapien
agtgaactggggtccagtaagccag

SEQ ID NO: 4825477 - DNA, 25 bp, Homo sapien
gactgaatgagatgatgatggggga

SEQ ID NO: 4825478 - DNA, 25 bp, Homo sapien
tgagaagcgctgagccgaggtaggc

SEQ ID NO: 4825479 - DNA, 25 bp, Homo sapien
ttcatggtgagaccatgagggaagt

SEQ ID NO: 4825480 - DNA, 25 bp, Homo sapien
gaagtggctgatctggtgggaacag

SEQ ID NO: 4825481 - DNA, 25 bp, Homo sapien
cctcaagacgagtcatgtgggctgt

SEQ ID NO: 4825482 - DNA, 25 bp, Homo sapien
caggagtgatgccaggacgttcata

SEQ ID NO: 4825483 - DNA, 25 bp, Homo sapien
gagtgatgccaggacgttcataggt

SEQ ID NO: 4825484 - DNA, 25 bp, Homo sapien
tgatgccaggacgttcataggtggg

SEQ ID NO: 4825485 - DNA, 25 bp, Homo sapien
agtgatgccaggacgttcataggtg

SEQ ID NO: 4825486 - DNA, 25 bp, Homo sapien
caagtgcctcgcatagcagggttcc

SEQ ID NO: 4825487 - DNA, 25 bp, Homo sapien
gattctgttctgttgcggatggacc

SEQ ID NO: 4825488 - DNA, 25 bp, Homo sapien
aacagcagccgttttggtctcaccg

SEQ ID NO: 4825489 - DNA, 25 bp, Homo sapien
ctgtatgagtgctaccccgatggcc

SEQ ID NO: 4825490 - DNA, 25 bp, Homo sapien
agagcactgagcgaggtgccacacg

SEQ ID NO: 4825491 - DNA, 25 bp, Homo sapien
gcaagatttcatgccgtgtctgcag

SEQ ID NO: 4825492 - DNA, 25 bp, Homo sapien
ccttcggtgtcctggtccctcgtgt

SEQ ID NO: 4825493 - DNA, 25 bp, Homo sapien
gacactcatgttttcatcggtctgc

SEQ ID NO: 4825494 - DNA, 25 bp, Homo sapien
gctgcctggtgtttcgaggctgctg

SEQ ID NO: 4825495 - DNA, 25 bp, Homo sapien
tgctgcctggtgtttcgaggctgct

SEQ ID NO: 4825496 - DNA, 25 bp, Homo sapien
ctgcctggtgtttcgaggctgctgt

SEQ ID NO: 4825497 - DNA, 25 bp, Homo sapien
gccaggtccccagggtgccaccgaa

SEQ ID NO: 4825498 - DNA, 25 bp, Homo sapien
aggctgcaccgggagagcagcccgc

SEQ ID NO: 4825499 - DNA, 25 bp, Homo sapien
gcaccgggagagcagcccgcctggg

SEQ ID NO: 4825500 - DNA, 25 bp, Homo sapien
ggccgccaggtccccagggtgccac

SEQ ID NO: 4825501 - DNA, 25 bp, Homo sapien
taggcagagctggttgacggtggac

SEQ ID NO: 4825502 - DNA, 25 bp, Homo sapien
taccacattgggagtgtagattggc

SEQ ID NO: 4825503 - DNA, 25 bp, Homo sapien
tggacattggggataggaggtgggt

SEQ ID NO: 4825504 - DNA, 25 bp, Homo sapien
cattgggagtgtagattggcaagta

SEQ ID NO: 4825505 - DNA, 25 bp, Homo sapien
ggagtcccctagcagggactgcatg

SEQ ID NO: 4825506 - DNA, 25 bp, Homo sapien
cattgctgggcggtggcagatgacc

SEQ ID NO: 4825507 - DNA, 25 bp, Homo sapien
gccctggccaggatgctcctccctg

SEQ ID NO: 4825508 - DNA, 25 bp, Homo sapien
gcagatgaccgagcggctggtagga

SEQ ID NO: 4825509 - DNA, 25 bp, Homo sapien
ctcacgcaggtgtaaggaggttgca

SEQ ID NO: 4825510 - DNA, 25 bp, Homo sapien
gcgaaggctccacccgcaccgcctt

SEQ ID NO: 4825511 - DNA, 25 bp, Homo sapien
tcagggggcccaggacgttggcgaa

SEQ ID NO: 4825512 - DNA, 25 bp, Homo sapien
ctcagccggggtgacgctcacgcag

SEQ ID NO: 4825513 - DNA, 25 bp, Homo sapien
aggttgcaggcgtacggaggttgca

SEQ ID NO: 4825514 - DNA, 25 bp, Homo sapien
agttgcaggtgtaggggtccttgca

SEQ ID NO: 4825515 - DNA, 25 bp, Homo sapien
gattgcaggtgtagggaagttgcag

SEQ ID NO: 4825516 - DNA, 25 bp, Homo sapien
tgcagggatcttgtaggtgaaggga

SEQ ID NO: 4825517 - DNA, 25 bp, Homo sapien
ggcctgcaggcgggagtcgctgcgg

SEQ ID NO: 4825518 - DNA, 25 bp, Homo sapien
ggtgtaggggattgccgtgctgcag

SEQ ID NO: 4825519 - DNA, 25 bp, Homo sapien
gactgggagagcgactgtgcctctg

SEQ ID NO: 4825520 - DNA, 25 bp, Homo sapien
ggcgggagtcgctgcgggcccaatg

SEQ ID NO: 4825521 - DNA, 25 bp, Homo sapien
cgcgggtgtcgctctgactcttcct

SEQ ID NO: 4825522 - DNA, 25 bp, Homo sapien
ggtctgtttggaaatgccgccgcgc

SEQ ID NO: 4825523 - DNA, 25 bp, Homo sapien
ttggtcagtgtcagccgctccgctt

SEQ ID NO: 4825524 - DNA, 25 bp, Homo sapien
cgcgacctgtttcttggcgctggca

SEQ ID NO: 4825525 - DNA, 25 bp, Homo sapien
gccgccgagagctgcccgagccctc

SEQ ID NO: 4825526 - DNA, 25 bp, Homo sapien
tgggtctgagggcaacgccctgggg

SEQ ID NO: 4825527 - DNA, 25 bp, Homo sapien
cctgggcgcggtgtgggtctgaggg

SEQ ID NO: 4825528 - DNA, 25 bp, Homo sapien
ccgtttcctgtgggccgccgagagc

SEQ ID NO: 4825529 - DNA, 25 bp, Homo sapien
gaagcgcgcttgcacgtggcaagca

SEQ ID NO: 4825530 - DNA, 25 bp, Homo sapien
caggtgaatccgaggagaggcaaat

SEQ ID NO: 4825531 - DNA, 25 bp, Homo sapien
ggcaaattacgaagcctggaagacc

SEQ ID NO: 4825532 - DNA, 25 bp, Homo sapien
ttccaacacgaagacgccagccagg

SEQ ID NO: 4825533 - DNA, 25 bp, Homo sapien
gaaactctatgactgctacacggac

SEQ ID NO: 4825534 - DNA, 25 bp, Homo sapien
tgaacactagccgtgtgggaaccgg

SEQ ID NO: 4825535 - DNA, 25 bp, Homo sapien
tattccagcgattaaagacacttga

SEQ ID NO: 4825536 - DNA, 25 bp, Homo sapien
tgccagcagttaggagattgtcagc

SEQ ID NO: 4825537 - DNA, 25 bp, Homo sapien
tgtgagagtctgcatgtgtgagtca

SEQ ID NO: 4825538 - DNA, 25 bp, Homo sapien
gtcagtcgtccacatgtgagagtct

SEQ ID NO: 4825539 - DNA, 25 bp, Homo sapien
tctctcatccgcatgtgtgagtcca

SEQ ID NO: 4825540 - DNA, 25 bp, Homo sapien
gtcagtcgtccacatgtgtcagtcc

SEQ ID NO: 4825541 - DNA, 25 bp, Homo sapien
ttccgctggcctcactccctttacc

SEQ ID NO: 4825542 - DNA, 25 bp, Homo sapien
ccttcttccaggtttcaggcgattc

SEQ ID NO: 4825543 - DNA, 25 bp, Homo sapien
ttctgtggtgttggtctgcttgtga

SEQ ID NO: 4825544 - DNA, 25 bp, Homo sapien
gtgttggtctgcttgtgatgagctc

SEQ ID NO: 4825545 - DNA, 25 bp, Homo sapien
aggccactcggtttctgttctgctt

SEQ ID NO: 4825546 - DNA, 25 bp, Homo sapien
aagggaacagtgaagcccatgccgg

SEQ ID NO: 4825547 - DNA, 25 bp, Homo sapien
gtcaagggaacagtgaagcccatgc

SEQ ID NO: 4825548 - DNA, 25 bp, Homo sapien
ctggccgtttgtggatgaagatgct

SEQ ID NO: 4825549 - DNA, 25 bp, Homo sapien
gacggtgctgcacggtgtggagttg

SEQ ID NO: 4825550 - DNA, 25 bp, Homo sapien
ctggaagggttgacggtgctgcacg

SEQ ID NO: 4825551 - DNA, 25 bp, Homo sapien
tgctgcacggtgtggagttgggagg

SEQ ID NO: 4825552 - DNA, 25 bp, Homo sapien
ggttgacggtgctgcacggtgtgga

SEQ ID NO: 4825553 - DNA, 25 bp, Homo sapien
aggaggcctcagtacctgggagcct

SEQ ID NO: 4825554 - DNA, 25 bp, Homo sapien
ccgatgccgccctgcgtgaaaggcg

SEQ ID NO: 4825555 - DNA, 25 bp, Homo sapien
ttaggaaacagcgtgggcgtgttcc

SEQ ID NO: 4825556 - DNA, 25 bp, Homo sapien
aggtgggcatcaggcttaggaaaca

SEQ ID NO: 4825557 - DNA, 25 bp, Homo sapien
tctcattcttgtcgtctacaccggc

SEQ ID NO: 4825558 - DNA, 25 bp, Homo sapien
ttgtcgtctacaccggcggggctgc

SEQ ID NO: 4825559 - DNA, 25 bp, Homo sapien
cattcttgtcgtctacaccggcggg

SEQ ID NO: 4825560 - DNA, 25 bp, Homo sapien
tcttgtcgtctacaccggcggggct

SEQ ID NO: 4825561 - DNA, 25 bp, Homo sapien
gcttgaagaagatgcactgggtcac

SEQ ID NO: 4825562 - DNA, 25 bp, Homo sapien
tcagagctaagctgcaggccgtggc

SEQ ID NO: 4825563 - DNA, 25 bp, Homo sapien
tgtcaccccagctgactttagcctc

SEQ ID NO: 4825564 - DNA, 25 bp, Homo sapien
accccggtccacttccaggcaccag

SEQ ID NO: 4825565 - DNA, 25 bp, Homo sapien
agcctcctaggtgtctgctacagct

SEQ ID NO: 4825566 - DNA, 25 bp, Homo sapien
aaagcctcctaggtgtctgctacag

SEQ ID NO: 4825567 - DNA, 25 bp, Homo sapien
accaaagcctcctaggtgtctgcta

SEQ ID NO: 4825568 - DNA, 25 bp, Homo sapien
acacaccaaagcctcctaggtgtct

SEQ ID NO: 4825569 - DNA, 25 bp, Homo sapien
tttaggcctttgttcaaatctccca

SEQ ID NO: 4825570 - DNA, 25 bp, Homo sapien
taggcctttgttcaaatctcccatc

SEQ ID NO: 4825571 - DNA, 25 bp, Homo sapien
tcccatcaacttggcgccccaggga

SEQ ID NO: 4825572 - DNA, 25 bp, Homo sapien
ggcctttgttcaaatctcccatcaa

SEQ ID NO: 4825573 - DNA, 25 bp, Homo sapien
gaaaggggctcgtcctgagaagcca

SEQ ID NO: 4825574 - DNA, 25 bp, Homo sapien
acgtctcccgggcagccacagatcc

SEQ ID NO: 4825575 - DNA, 25 bp, Homo sapien
tgagaaaggggctcgtcctgagaag

SEQ ID NO: 4825576 - DNA, 25 bp, Homo sapien
tcccgggcagccacagatcccacac

SEQ ID NO: 4825577 - DNA, 25 bp, Homo sapien
aagaccaggaatagcaagtccccag

SEQ ID NO: 4825578 - DNA, 25 bp, Homo sapien
ggagggttatttttaacgcactgca

SEQ ID NO: 4825579 - DNA, 25 bp, Homo sapien
ctgcactagagcatctctaaggccg

SEQ ID NO: 4825580 - DNA, 25 bp, Homo sapien
ccacaaaaatgagaagaccaggaat

SEQ ID NO: 4825581 - DNA, 25 bp, Homo sapien
tctgagcagtgccagttcagcacct

SEQ ID NO: 4825582 - DNA, 25 bp, Homo sapien
gagcagtgccagttcagcaccttgg

SEQ ID NO: 4825583 - DNA, 25 bp, Homo sapien
taggaatcctgggaagagcccagat

SEQ ID NO: 4825584 - DNA, 25 bp, Homo sapien
ggcttgtggagcctgctaggaatcc

SEQ ID NO: 4825585 - DNA, 25 bp, Homo sapien
ctggccaacggcctgagaaatccca

SEQ ID NO: 4825586 - DNA, 25 bp, Homo sapien
ggggagactggccaacggcctgaga

SEQ ID NO: 4825587 - DNA, 25 bp, Homo sapien
gagactggccaacggcctgagaaat

SEQ ID NO: 4825588 - DNA, 25 bp, Homo sapien
actggccaacggcctgagaaatccc

SEQ ID NO: 4825589 - DNA, 25 bp, Homo sapien
tcactccttagaacatgtcccatgg

SEQ ID NO: 4825590 - DNA, 25 bp, Homo sapien
cgataacagtaagcaccagtccagc

SEQ ID NO: 4825591 - DNA, 25 bp, Homo sapien
actgctgtcagggtgccatgggctc

SEQ ID NO: 4825592 - DNA, 25 bp, Homo sapien
tgcttcgcggcaccagaaatgttgc

SEQ ID NO: 4825593 - DNA, 25 bp, Homo sapien
ccatcaccttttgtgtggtggcctg

SEQ ID NO: 4825594 - DNA, 25 bp, Homo sapien
ggtgtggtttctactcaccacgtga

SEQ ID NO: 4825595 - DNA, 25 bp, Homo sapien
tcttgtagcgtgaataaatttgcca

SEQ ID NO: 4825596 - DNA, 25 bp, Homo sapien
gtggcctggcaggtcatatactttt

SEQ ID NO: 4825597 - DNA, 25 bp, Homo sapien
tgcacgtgctccggggagtgcaggc

SEQ ID NO: 4825598 - DNA, 25 bp, Homo sapien
ctccggggagtgcaggcctgggaag

SEQ ID NO: 4825599 - DNA, 25 bp, Homo sapien
gggcctttgcgctgtggggcagcag

SEQ ID NO: 4825600 - DNA, 25 bp, Homo sapien
agggcctttgcgctgtggggcagca

SEQ ID NO: 4825601 - DNA, 25 bp, Homo sapien
ccccgcctgacacgggcgacagctg

SEQ ID NO: 4825602 - DNA, 25 bp, Homo sapien
cgctgtgttcactcgggccgagtgc

SEQ ID NO: 4825603 - DNA, 25 bp, Homo sapien
agctgcggcccgctgtgttcactcg

SEQ ID NO: 4825604 - DNA, 25 bp, Homo sapien
ctgacacgggcgacagctgcggccc

SEQ ID NO: 4825605 - DNA, 25 bp, Homo sapien
tatcctccacgccaccgtccccctc

SEQ ID NO: 4825606 - DNA, 25 bp, Homo sapien
caccgtccccctccgtatcctccat

SEQ ID NO: 4825607 - DNA, 25 bp, Homo sapien
ttattagatgatgaaggctgagtgt

SEQ ID NO: 4825608 - DNA, 25 bp, Homo sapien
tattagatgatgaaggctgagtgtg

SEQ ID NO: 4825609 - DNA, 25 bp, Homo sapien
tgacttcggtcgcttcctcggtggt

SEQ ID NO: 4825610 - DNA, 25 bp, Homo sapien
gggaccatctaccacaatctgtgcg

SEQ ID NO: 4825611 - DNA, 25 bp, Homo sapien
ggatgacacttgcaagggaccatct

SEQ ID NO: 4825612 - DNA, 25 bp, Homo sapien
aatctgtgcgatctgtgcaaggcgc

SEQ ID NO: 4825613 - DNA, 25 bp, Homo sapien
tcacagggtaggcaagctgaggcca

SEQ ID NO: 4825614 - DNA, 25 bp, Homo sapien
tgaagctcagttgcgccgtggagct

SEQ ID NO: 4825615 - DNA, 25 bp, Homo sapien
cggaacggctggaacgtcatggact

SEQ ID NO: 4825616 - DNA, 25 bp, Homo sapien
ggcccgggcgtgtgctctctgaagc

SEQ ID NO: 4825617 - DNA, 25 bp, Homo sapien
ggctgtaatgctgccgagctcctgc

SEQ ID NO: 4825618 - DNA, 25 bp, Homo sapien
tgagcctccgtgttctcacctggga

SEQ ID NO: 4825619 - DNA, 25 bp, Homo sapien
cctgttgcttggcaaagccttgagc

SEQ ID NO: 4825620 - DNA, 25 bp, Homo sapien
cctttgttagcctgcgtgagtgcgt

SEQ ID NO: 4825621 - DNA, 25 bp, Homo sapien
gaggtttcagctcaacccagagaag

SEQ ID NO: 4825622 - DNA, 25 bp, Homo sapien
ttggataccgcagactttcccaggg

SEQ ID NO: 4825623 - DNA, 25 bp, Homo sapien
tctcagggcgcatggctactttaaa

SEQ ID NO: 4825624 - DNA, 25 bp, Homo sapien
tcatatgtccctgatatgggccagg

SEQ ID NO: 4825625 - DNA, 25 bp, Homo sapien
tggcctgttcgaagccgtccgtggc

SEQ ID NO: 4825626 - DNA, 25 bp, Homo sapien
tgttcgaagccgtccgtggcctccg

SEQ ID NO: 4825627 - DNA, 25 bp, Homo sapien
ggctggcctgttcgaagccgtccgt

SEQ ID NO: 4825628 - DNA, 25 bp, Homo sapien
tggcctccggtccaggctcgggctc

SEQ ID NO: 4825629 - DNA, 25 bp, Homo sapien
tcccaggcctgtggcggctcgcgag

SEQ ID NO: 4825630 - DNA, 25 bp, Homo sapien
ccttgctcctgtgggcacgtggtgg

SEQ ID NO: 4825631 - DNA, 25 bp, Homo sapien
agatgcacccacagaggtcacaggg

SEQ ID NO: 4825632 - DNA, 25 bp, Homo sapien
ggctcgcgaggatggctaggctggt

SEQ ID NO: 4825633 - DNA, 25 bp, Homo sapien
gttgcagattcacactgaggtgagg

SEQ ID NO: 4825634 - DNA, 25 bp, Homo sapien
gttgctaatggcttctcgggccctg

SEQ ID NO: 4825635 - DNA, 25 bp, Homo sapien
cactggagcggcagagttgcagatt

SEQ ID NO: 4825636 - DNA, 25 bp, Homo sapien
cctccttcacactggagcggcagag

SEQ ID NO: 4825637 - DNA, 25 bp, Homo sapien
tgaaaagggccttgcgccttggtcc

SEQ ID NO: 4825638 - DNA, 25 bp, Homo sapien
tcccttgaacgactggacactggtc

SEQ ID NO: 4825639 - DNA, 25 bp, Homo sapien
ccagacggacgctaacgcagattca

SEQ ID NO: 4825640 - DNA, 25 bp, Homo sapien
ggtttgatgtctgcagaatccgcca

SEQ ID NO: 4825641 - DNA, 25 bp, Homo sapien
gaattcgacactgcaggcagacagg

SEQ ID NO: 4825642 - DNA, 25 bp, Homo sapien
acgggcctactcagcactgggtgga

SEQ ID NO: 4825643 - DNA, 25 bp, Homo sapien
ggagggaatggtgtccctgttccca

SEQ ID NO: 4825644 - DNA, 25 bp, Homo sapien
catcacgggcctactcagcactggg

SEQ ID NO: 4825645 - DNA, 25 bp, Homo sapien
gatttgtcagagagcgtcctggtgc

SEQ ID NO: 4825646 - DNA, 25 bp, Homo sapien
caggatttgtcagagagcgtcctgg

SEQ ID NO: 4825647 - DNA, 25 bp, Homo sapien
tcaggatttgtcagagagcgtcctg

SEQ ID NO: 4825648 - DNA, 25 bp, Homo sapien
aggatttgtcagagagcgtcctggt

SEQ ID NO: 4825649 - DNA, 25 bp, Homo sapien
gtgtttccagtctcggtcttgctga

SEQ ID NO: 4825650 - DNA, 25 bp, Homo sapien
tgtgtttccagtctcggtcttgctg

SEQ ID NO: 4825651 - DNA, 25 bp, Homo sapien
tctgtgtttccagtctcggtcttgc

SEQ ID NO: 4825652 - DNA, 25 bp, Homo sapien
tgggaatggaattggagctttgcag

SEQ ID NO: 4825653 - DNA, 25 bp, Homo sapien
tagaacctccttaagacacaaatcc

SEQ ID NO: 4825654 - DNA, 25 bp, Homo sapien
tgattagggtcctatctttagtctc

SEQ ID NO: 4825655 - DNA, 25 bp, Homo sapien
ggaatgatacagtcttttacaggca

SEQ ID NO: 4825656 - DNA, 25 bp, Homo sapien
ctaagcctcataaatgaaggaatga

SEQ ID NO: 4825657 - DNA, 25 bp, Homo sapien
ggtgtcagctccagtgccagcatcc

SEQ ID NO: 4825658 - DNA, 25 bp, Homo sapien
ccagcccgaggcgtccaggtgtcag

SEQ ID NO: 4825659 - DNA, 25 bp, Homo sapien
caagccagcccgaggcgtccaggtg

SEQ ID NO: 4825660 - DNA, 25 bp, Homo sapien
ccggcccaagccagcccgaggcgtc

SEQ ID NO: 4825661 - DNA, 25 bp, Homo sapien
agcccgaggcgtccaggtgtcagcc

SEQ ID NO: 4825662 - DNA, 25 bp, Homo sapien
cgcagcctgctcacgaggctgtgga

SEQ ID NO: 4825663 - DNA, 25 bp, Homo sapien
accaggatccgagcaaggagtgcgc

SEQ ID NO: 4825664 - DNA, 25 bp, Homo sapien
ctgagatagtggaagccgacaagga

SEQ ID NO: 4825665 - DNA, 25 bp, Homo sapien
tggaagccgacaaggaaaaggagct

SEQ ID NO: 4825666 - DNA, 25 bp, Homo sapien
tatgtgtccgctaaaaattcctaac

SEQ ID NO: 4825667 - DNA, 25 bp, Homo sapien
taagcaattgctttagatacctcct

SEQ ID NO: 4825668 - DNA, 25 bp, Homo sapien
catacgattcccataacttactgtg

SEQ ID NO: 4825669 - DNA, 25 bp, Homo sapien
aaatgaaggcgcattccagaggaga

SEQ ID NO: 4825670 - DNA, 25 bp, Homo sapien
tgctttatgaggaattagtcccttt

SEQ ID NO: 4825671 - DNA, 25 bp, Homo sapien
ctagaggagattatgttgaactgat

SEQ ID NO: 4825672 - DNA, 25 bp, Homo sapien
ctgcataatctgtagtggtaacttg

SEQ ID NO: 4825673 - DNA, 25 bp, Homo sapien
gaattgaatggattgtccctcttct

SEQ ID NO: 4825674 - DNA, 25 bp, Homo sapien
gagccagcatcctcggtggtataga

SEQ ID NO: 4825675 - DNA, 25 bp, Homo sapien
tacctgtgcactggaaagagcggtt

SEQ ID NO: 4825676 - DNA, 25 bp, Homo sapien
cagagaaatagttccatccgagccc

SEQ ID NO: 4825677 - DNA, 25 bp, Homo sapien
tctctgcaggacctcaaagtggcca

SEQ ID NO: 4825678 - DNA, 25 bp, Homo sapien
tgccaacgttggtgcagcaagaggt

SEQ ID NO: 4825679 - DNA, 25 bp, Homo sapien
cctgtgaggacctgacgcaagtgcc

SEQ ID NO: 4825680 - DNA, 25 bp, Homo sapien
caacgtgggcttcatgtgcactaca

SEQ ID NO: 4825681 - DNA, 25 bp, Homo sapien
tccgttagcgtctctgcggcagatg

SEQ ID NO: 4825682 - DNA, 25 bp, Homo sapien
tctgggagcaggtgatagaaggcca

SEQ ID NO: 4825683 - DNA, 25 bp, Homo sapien
gtcaggactgacagtgcagtggcag

SEQ ID NO: 4825684 - DNA, 25 bp, Homo sapien
taaagcggtaatggagacagacgtg

SEQ ID NO: 4825685 - DNA, 25 bp, Homo sapien
tgctacgctgcggttaggagtaaag

SEQ ID NO: 4825686 - DNA, 25 bp, Homo sapien
acttctggcagcagcgtaggtcgca

SEQ ID NO: 4825687 - DNA, 25 bp, Homo sapien
gcacctcagagctatccctgctgga

SEQ ID NO: 4825688 - DNA, 25 bp, Homo sapien
ccctgagtgtgccacgagtgctgca

SEQ ID NO: 4825689 - DNA, 25 bp, Homo sapien
tccgcacggcattaggctgagggct

SEQ ID NO: 4825690 - DNA, 25 bp, Homo sapien
cagtcgcagtgaagactgcgcacag

SEQ ID NO: 4825691 - DNA, 25 bp, Homo sapien
accctggctgccgtggtaatccagt

SEQ ID NO: 4825692 - DNA, 25 bp, Homo sapien
cacaggagcgtgttcataggagcat

SEQ ID NO: 4825693 - DNA, 25 bp, Homo sapien
cgcacaggagcgtgttcataggagc

SEQ ID NO: 4825694 - DNA, 25 bp, Homo sapien
tcaaatggaaaaaatcgataaattg

SEQ ID NO: 4825695 - DNA, 25 bp, Homo sapien
aattgaactacagcaaaacttttgc

SEQ ID NO: 4825696 - DNA, 25 bp, Homo sapien
tcgataaattgaactacagcaaaac

SEQ ID NO: 4825697 - DNA, 25 bp, Homo sapien
tggaaaaaatcgataaattgaacta

SEQ ID NO: 4825698 - DNA, 25 bp, Homo sapien
gtatctgctataggattagtattcc

SEQ ID NO: 4825699 - DNA, 25 bp, Homo sapien
aaagatttgaacagaagtgtcatca

SEQ ID NO: 4825700 - DNA, 25 bp, Homo sapien
aacatatttgctaaacacgtatctg

SEQ ID NO: 4825701 - DNA, 25 bp, Homo sapien
gaaaagacaagcctaaaattggaga

SEQ ID NO: 4825702 - DNA, 25 bp, Homo sapien
tcacagccatcacggctgggtggaa

SEQ ID NO: 4825703 - DNA, 25 bp, Homo sapien
acagccatcacggctgggtggaaaa

SEQ ID NO: 4825704 - DNA, 25 bp, Homo sapien
ttcacagccatcacggctgggtgga

SEQ ID NO: 4825705 - DNA, 25 bp, Homo sapien
cacagccatcacggctgggtggaaa

SEQ ID NO: 4825706 - DNA, 25 bp, Homo sapien
tttacaaacaagtctcatcccatca

SEQ ID NO: 4825707 - DNA, 25 bp, Homo sapien
agcccagctgcctgcgttgcggcct

SEQ ID NO: 4825708 - DNA, 25 bp, Homo sapien
gcacagcgagttccccggaggagca

SEQ ID NO: 4825709 - DNA, 25 bp, Homo sapien
ccccacagagacctcagggtgattg

SEQ ID NO: 4825710 - DNA, 25 bp, Homo sapien
gtgtgaatcgtgtatcctgagggtc

SEQ ID NO: 4825711 - DNA, 25 bp, Homo sapien
gctggcagtgtgaatcgtgtatcct

SEQ ID NO: 4825712 - DNA, 25 bp, Homo sapien
ggcagtgtgaatcgtgtatcctgag

SEQ ID NO: 4825713 - DNA, 25 bp, Homo sapien
cttagctggcagtgtgaatcgtgta

SEQ ID NO: 4825714 - DNA, 25 bp, Homo sapien
caaagggacagacactgctgcagag

SEQ ID NO: 4825715 - DNA, 25 bp, Homo sapien
agtaactgttgcacaaagggacaga

SEQ ID NO: 4825716 - DNA, 25 bp, Homo sapien
gtaactgttgcacaaagggacagac

SEQ ID NO: 4825717 - DNA, 25 bp, Homo sapien
cggctggtggttccaggctgcacgc

SEQ ID NO: 4825718 - DNA, 25 bp, Homo sapien
gctggtggttccaggctgcacgctc

SEQ ID NO: 4825719 - DNA, 25 bp, Homo sapien
gctgcggctggtggttccaggctgc

SEQ ID NO: 4825720 - DNA, 25 bp, Homo sapien
tgcggctggtggttccaggctgcac

SEQ ID NO: 4825721 - DNA, 25 bp, Homo sapien
ggctccccttcatcaggtgagggtg

SEQ ID NO: 4825722 - DNA, 25 bp, Homo sapien
ctcaggattgattgccactggtctg

SEQ ID NO: 4825723 - DNA, 25 bp, Homo sapien
ttgattgccactggtctgccccaga

SEQ ID NO: 4825724 - DNA, 25 bp, Homo sapien
ccgggctccccttcatcaggtgagg

SEQ ID NO: 4825725 - DNA, 25 bp, Homo sapien
agtgttgccgcccaaggcagcactc

SEQ ID NO: 4825726 - DNA, 25 bp, Homo sapien
gcagctgcaccaggatagtgtagca

SEQ ID NO: 4825727 - DNA, 25 bp, Homo sapien
cagtgagtgcactgtagtgttgccg

SEQ ID NO: 4825728 - DNA, 25 bp, Homo sapien
caggatagtgtagcagccccgtggt

SEQ ID NO: 4825729 - DNA, 25 bp, Homo sapien
ccagcgcagggatcacattgtcggg

SEQ ID NO: 4825730 - DNA, 25 bp, Homo sapien
tatccttgaggccaagctgcgtgtc

SEQ ID NO: 4825731 - DNA, 25 bp, Homo sapien
caagctgcgtgtccagacggccatg

SEQ ID NO: 4825732 - DNA, 25 bp, Homo sapien
accctggctttatccttgaggccaa

SEQ ID NO: 4825733 - DNA, 25 bp, Homo sapien
aagggactcagggtcccgtgatgag

SEQ ID NO: 4825734 - DNA, 25 bp, Homo sapien
agggactcagggtcccgtgatgagg

SEQ ID NO: 4825735 - DNA, 25 bp, Homo sapien
gaagggactcagggtcccgtgatga

SEQ ID NO: 4825736 - DNA, 25 bp, Homo sapien
gcactctgttccagactcggatggg

SEQ ID NO: 4825737 - DNA, 25 bp, Homo sapien
actgtgctggcacccgacgaggagc

SEQ ID NO: 4825738 - DNA, 25 bp, Homo sapien
ccagcgggtccttggaaatctgtgg

SEQ ID NO: 4825739 - DNA, 25 bp, Homo sapien
ctggcacccgacgaggagccttgga

SEQ ID NO: 4825740 - DNA, 25 bp, Homo sapien
ggccactgcactgttcacctgtggc

SEQ ID NO: 4825741 - DNA, 25 bp, Homo sapien
tgcctatctgccacaggaggacttg

SEQ ID NO: 4825742 - DNA, 25 bp, Homo sapien
acagccccttgcctatctgccacag

SEQ ID NO: 4825743 - DNA, 25 bp, Homo sapien
agccccttgcctatctgccacagga

SEQ ID NO: 4825744 - DNA, 25 bp, Homo sapien
cccttgcctatctgccacaggagga

SEQ ID NO: 4825745 - DNA, 25 bp, Homo sapien
ttttctttatccccggcctctctga

SEQ ID NO: 4825746 - DNA, 25 bp, Homo sapien
tgtggtctctcagctgttccaccat

SEQ ID NO: 4825747 - DNA, 25 bp, Homo sapien
agaagaggggtgtggtctctcagct

SEQ ID NO: 4825748 - DNA, 25 bp, Homo sapien
cttttctttatccccggcctctctg

SEQ ID NO: 4825749 - DNA, 25 bp, Homo sapien
gctttctgcccccgctgtgagtgcc

SEQ ID NO: 4825750 - DNA, 25 bp, Homo sapien
aatccagacgctgattttgagagat

SEQ ID NO: 4825751 - DNA, 25 bp, Homo sapien
ccgccgaggagaaagtgagaaaaag

SEQ ID NO: 4825752 - DNA, 25 bp, Homo sapien
cagtcgaaatttccaaaatatcggc

SEQ ID NO: 4825753 - DNA, 25 bp, Homo sapien
gatggtggtctccagttcagttgaa

SEQ ID NO: 4825754 - DNA, 25 bp, Homo sapien
ctatctccatgcgttccggtcaagg

SEQ ID NO: 4825755 - DNA, 25 bp, Homo sapien
tggtctccagttcagttgaaatttc

SEQ ID NO: 4825756 - DNA, 25 bp, Homo sapien
tggtggtctccagttcagttgaaat

SEQ ID NO: 4825757 - DNA, 25 bp, Homo sapien
ttcctgtctccgctgcgagtgcagc

SEQ ID NO: 4825758 - DNA, 25 bp, Homo sapien
ccacagcctgaggtcgaggaaacgg

SEQ ID NO: 4825759 - DNA, 25 bp, Homo sapien
gccacagcctgaggtcgaggaaacg

SEQ ID NO: 4825760 - DNA, 25 bp, Homo sapien
gaaacgggcgcccccggatcagtgc

SEQ ID NO: 4825761 - DNA, 25 bp, Homo sapien
gcgcccccggatcagtgctcatttt

SEQ ID NO: 4825762 - DNA, 25 bp, Homo sapien
agcatagcgtaaaagcttaaaaact

SEQ ID NO: 4825763 - DNA, 25 bp, Homo sapien
tttatttttacttgcaagggaagca

SEQ ID NO: 4825764 - DNA, 25 bp, Homo sapien
aactttgcagcctagtcatgtggca

SEQ ID NO: 4825765 - DNA, 25 bp, Homo sapien
caagagaggaactcgagcaggctgt

SEQ ID NO: 4825766 - DNA, 25 bp, Homo sapien
tcatcagcaagatccgggaggagta

SEQ ID NO: 4825767 - DNA, 25 bp, Homo sapien
tcataaacacattcagcatcctgcc

SEQ ID NO: 4825768 - DNA, 25 bp, Homo sapien
cataaacacattcagcatcctgccc

SEQ ID NO: 4825769 - DNA, 25 bp, Homo sapien
caagatccgggaggagtacccagac

SEQ ID NO: 4825770 - DNA, 25 bp, Homo sapien
tctgcatgcttgactctgagtagtt

SEQ ID NO: 4825771 - DNA, 25 bp, Homo sapien
ctgcatgcttgactctgagtagttg

SEQ ID NO: 4825772 - DNA, 25 bp, Homo sapien
tattatttatactcttttattagac

SEQ ID NO: 4825773 - DNA, 25 bp, Homo sapien
gatacgggctcttatgccggcctgc

SEQ ID NO: 4825774 - DNA, 25 bp, Homo sapien
gagatctgtcgcctctccgcagaga

SEQ ID NO: 4825775 - DNA, 25 bp, Homo sapien
ctgacgcccagggagatctgtcgcc

SEQ ID NO: 4825776 - DNA, 25 bp, Homo sapien
gcagagaccacgtgtgttcaccctc

SEQ ID NO: 4825777 - DNA, 25 bp, Homo sapien
tgaaaagagttgtcacagaaaaatt

SEQ ID NO: 4825778 - DNA, 25 bp, Homo sapien
tgcccatatcaagtaggagtctccg

SEQ ID NO: 4825779 - DNA, 25 bp, Homo sapien
ttaaactgcccatatcaagtaggag

SEQ ID NO: 4825780 - DNA, 25 bp, Homo sapien
cccatatcaagtaggagtctccggg

SEQ ID NO: 4825781 - DNA, 25 bp, Homo sapien
gtgctgaaccatggcgccaccagag

SEQ ID NO: 4825782 - DNA, 25 bp, Homo sapien
agtgccaaggagtgagtctttagag

SEQ ID NO: 4825783 - DNA, 25 bp, Homo sapien
gtccacggccctgagtgccaaggag

SEQ ID NO: 4825784 - DNA, 25 bp, Homo sapien
gcaagagcgtctgtgctgaaccatg

SEQ ID NO: 4825785 - DNA, 25 bp, Homo sapien
tactaatgtaataatatccacacca

SEQ ID NO: 4825786 - DNA, 25 bp, Homo sapien
taatgtaataatatccacaccatgc

SEQ ID NO: 4825787 - DNA, 25 bp, Homo sapien
cacaccatgccctatcactgatcta

SEQ ID NO: 4825788 - DNA, 25 bp, Homo sapien
taataatatccacaccatgccctat

SEQ ID NO: 4825789 - DNA, 25 bp, Homo sapien
ccacaccatcgcttccaatactaat

SEQ ID NO: 4825790 - DNA, 25 bp, Homo sapien
tccacaccatcgcttccaatactaa

SEQ ID NO: 4825791 - DNA, 25 bp, Homo sapien
taataatatccacaccatgccctat

SEQ ID NO: 4825792 - DNA, 25 bp, Homo sapien
taatgtaataatatccacaccatgc

SEQ ID NO: 4825793 - DNA, 25 bp, Homo sapien
tgtaataatatccacaccatgccct

SEQ ID NO: 4825794 - DNA, 25 bp, Homo sapien
acaccatgccctatcactgatctag

SEQ ID NO: 4825795 - DNA, 25 bp, Homo sapien
catgtgcttgttggtgaagtgtgtc

SEQ ID NO: 4825796 - DNA, 25 bp, Homo sapien
tcttgtgtgagttaagggttatctc

SEQ ID NO: 4825797 - DNA, 25 bp, Homo sapien
acacgtaggctgcaccatttcatat

SEQ ID NO: 4825798 - DNA, 25 bp, Homo sapien
tctggataacagacactgatgaagt

SEQ ID NO: 4825799 - DNA, 25 bp, Homo sapien
gaggcaccctggtaggctagtggag

SEQ ID NO: 4825800 - DNA, 25 bp, Homo sapien
ctttatgagaggcaccctggtaggc

SEQ ID NO: 4825801 - DNA, 25 bp, Homo sapien
atgagaggcaccctggtaggctagt

SEQ ID NO: 4825802 - DNA, 25 bp, Homo sapien
ttatgagaggcaccctggtaggcta

SEQ ID NO: 4825803 - DNA, 25 bp, Homo sapien
ttcccgcctcgactcctgatatcaa

SEQ ID NO: 4825804 - DNA, 25 bp, Homo sapien
gaaggctttctactaatggaattcc

SEQ ID NO: 4825805 - DNA, 25 bp, Homo sapien
aatggcgcaaccttgctggtcactg

SEQ ID NO: 4825806 - DNA, 25 bp, Homo sapien
tatgtagaaggccttcccaaaggaa

SEQ ID NO: 4825807 - DNA, 25 bp, Homo sapien
ttactttcacatgttatattccaca

SEQ ID NO: 4825808 - DNA, 25 bp, Homo sapien
tgctcatcgctgctcatcatcatag

SEQ ID NO: 4825809 - DNA, 25 bp, Homo sapien
tctgccgtgggctttactttcacat

SEQ ID NO: 4825810 - DNA, 25 bp, Homo sapien
ttccttgaggcttcggctgctcatc

SEQ ID NO: 4825811 - DNA, 25 bp, Homo sapien
ccagacttcttagagaacccagtga

SEQ ID NO: 4825812 - DNA, 25 bp, Homo sapien
tagcctcaggctaaactttggtttc

SEQ ID NO: 4825813 - DNA, 25 bp, Homo sapien
caaacatgaggcaaagctagacaca

SEQ ID NO: 4825814 - DNA, 25 bp, Homo sapien
tgtctatgccacatgtgccttcggc

SEQ ID NO: 4825815 - DNA, 25 bp, Homo sapien
gcagcagctgatgcacagggctccc

SEQ ID NO: 4825816 - DNA, 25 bp, Homo sapien
gggtgaaggaactcagctacagaca

SEQ ID NO: 4825817 - DNA, 25 bp, Homo sapien
cgcacctggtccaagaacccaagtt

SEQ ID NO: 4825818 - DNA, 25 bp, Homo sapien
aacccaagttttagatctagagtga

SEQ ID NO: 4825819 - DNA, 25 bp, Homo sapien
cttcagggtcgtctgtgtctgttaa

SEQ ID NO: 4825820 - DNA, 25 bp, Homo sapien
ttcagggtcgtctgtgtctgttaaa

SEQ ID NO: 4825821 - DNA, 25 bp, Homo sapien
aaatatacagtaggcaattgccaac

SEQ ID NO: 4825822 - DNA, 25 bp, Homo sapien
ttgctttatgctagaaccgttccga

SEQ ID NO: 4825823 - DNA, 25 bp, Homo sapien
gcctacttggaatatctatcgcctt

SEQ ID NO: 4825824 - DNA, 25 bp, Homo sapien
caggctgtcgttcctctgtatggct

SEQ ID NO: 4825825 - DNA, 25 bp, Homo sapien
cacccaatgcaaaaagcatactgcc

SEQ ID NO: 4825826 - DNA, 25 bp, Homo sapien
ccaatgcaaaaagcatactgccttc

SEQ ID NO: 4825827 - DNA, 25 bp, Homo sapien
ttccacccaatgcaaaaagcatact

SEQ ID NO: 4825828 - DNA, 25 bp, Homo sapien
aatgcaaaaagcatactgccttctc

SEQ ID NO: 4825829 - DNA, 25 bp, Homo sapien
gattcatgcacagagatatttactt

SEQ ID NO: 4825830 - DNA, 25 bp, Homo sapien
gcacagagatatttactttagtatt

SEQ ID NO: 4825831 - DNA, 25 bp, Homo sapien
ttcatgcacagagatatttacttta

SEQ ID NO: 4825832 - DNA, 25 bp, Homo sapien
catgcacagagatatttactttagt

SEQ ID NO: 4825833 - DNA, 25 bp, Homo sapien
cacagcaatacatgttagcaacttt

SEQ ID NO: 4825834 - DNA, 25 bp, Homo sapien
ataagtcaatacagtagtaagagtc

SEQ ID NO: 4825835 - DNA, 25 bp, Homo sapien
cttttatatatactaaggtttcaca

SEQ ID NO: 4825836 - DNA, 25 bp, Homo sapien
agtcatggaaaagccagcggggacc

SEQ ID NO: 4825837 - DNA, 25 bp, Homo sapien
cgcctgactgagcctcccaaagtgt

SEQ ID NO: 4825838 - DNA, 25 bp, Homo sapien
aggtgatccgcctgactgagcctcc

SEQ ID NO: 4825839 - DNA, 25 bp, Homo sapien
gcaggctggtttcaaactcctgacc

SEQ ID NO: 4825840 - DNA, 25 bp, Homo sapien
ctcaggtgatccgcctgactgagcc

SEQ ID NO: 4825841 - DNA, 25 bp, Homo sapien
acagggtgtcgccatgttgacgagg

SEQ ID NO: 4825842 - DNA, 25 bp, Homo sapien
agacagggtgtcgccatgttgacga

SEQ ID NO: 4825843 - DNA, 25 bp, Homo sapien
gagacagggtgtcgccatgttgacg

SEQ ID NO: 4825844 - DNA, 25 bp, Homo sapien
cagggtgtcgccatgttgacgaggc

SEQ ID NO: 4825845 - DNA, 25 bp, Homo sapien
gcttgtcttttggttctcttaacaa

SEQ ID NO: 4825846 - DNA, 25 bp, Homo sapien
gaccagctgtgctatctttttgtgg

SEQ ID NO: 4825847 - DNA, 25 bp, Homo sapien
catctttttgtaagtgtacttgcca

SEQ ID NO: 4825848 - DNA, 25 bp, Homo sapien
tttcaaaataattagcttggaataa

SEQ ID NO: 4825849 - DNA, 25 bp, Homo sapien
tttgcagcccacacgagagggtctg

SEQ ID NO: 4825850 - DNA, 25 bp, Homo sapien
tgcagacatggcctttgcagcccac

SEQ ID NO: 4825851 - DNA, 25 bp, Homo sapien
atttggcctctgtcatgaaacttca

SEQ ID NO: 4825852 - DNA, 25 bp, Homo sapien
cgcccgggatgcagacatggccttt

SEQ ID NO: 4825853 - DNA, 25 bp, Homo sapien
cccggaacacgcatgtatctctcag

SEQ ID NO: 4825854 - DNA, 25 bp, Homo sapien
atataacccccggaacacgcatgta

SEQ ID NO: 4825855 - DNA, 25 bp, Homo sapien
cgcatgtatctctcagagcgtacat

SEQ ID NO: 4825856 - DNA, 25 bp, Homo sapien
gaacacgcatgtatctctcagagcg

SEQ ID NO: 4825857 - DNA, 25 bp, Homo sapien
caagctgcggtcttggaacagaaat

SEQ ID NO: 4825858 - DNA, 25 bp, Homo sapien
gcccctcgctttgggacaccttgag

SEQ ID NO: 4825859 - DNA, 25 bp, Homo sapien
gaatccagcgcactcgaggttcatt

SEQ ID NO: 4825860 - DNA, 25 bp, Homo sapien
ccggcggcgtccatggttgagtaaa

SEQ ID NO: 4825861 - DNA, 25 bp, Homo sapien
gggcggtgctgctcccgagtcggcg

SEQ ID NO: 4825862 - DNA, 25 bp, Homo sapien
gagtccgtaggtgctggcgggagcg

SEQ ID NO: 4825863 - DNA, 25 bp, Homo sapien
ctgttaggtaagaggcgcgtgaggc

SEQ ID NO: 4825864 - DNA, 25 bp, Homo sapien
aggcgcgtgaggctcctgtgccggg

SEQ ID NO: 4825865 - DNA, 25 bp, Homo sapien
ccagtgtctccgccggttgaaagcg

SEQ ID NO: 4825866 - DNA, 25 bp, Homo sapien
tccgccggttgaaagcgcgtgtctg

SEQ ID NO: 4825867 - DNA, 25 bp, Homo sapien
cgtcgggttctgttggagtgcgttc

SEQ ID NO: 4825868 - DNA, 25 bp, Homo sapien
aaagcgcgtgtctgcgtcgggttct

SEQ ID NO: 4825869 - DNA, 25 bp, Homo sapien
cggacctcggctccggagaatccgt

SEQ ID NO: 4825870 - DNA, 25 bp, Homo sapien
accccgggtgtggaggacgccgcag

SEQ ID NO: 4825871 - DNA, 25 bp, Homo sapien
tccccgccgacaggagggcggttgc

SEQ ID NO: 4825872 - DNA, 25 bp, Homo sapien
gacaggcttcggagcatttccgggc

SEQ ID NO: 4825873 - DNA, 25 bp, Homo sapien
ggcggttgccgagcctgtgacatcc

SEQ ID NO: 4825874 - DNA, 25 bp, Homo sapien
gaggccgcgcgcgataggatgggcg

SEQ ID NO: 4825875 - DNA, 25 bp, Homo sapien
ctcagtgacggaaccggacacagac

SEQ ID NO: 4825876 - DNA, 25 bp, Homo sapien
gatgggcggacggtgaagagaacta

SEQ ID NO: 4825877 - DNA, 25 bp, Homo sapien
tgaagagaactagggtggaagggcc

SEQ ID NO: 4825878 - DNA, 25 bp, Homo sapien
ttctcagtgggacaccgggaaggta

SEQ ID NO: 4825879 - DNA, 25 bp, Homo sapien
caacagtcaccgctagtgggaggcg

SEQ ID NO: 4825880 - DNA, 25 bp, Homo sapien
ttgttacaggatcgggcaggtcccc

SEQ ID NO: 4825881 - DNA, 25 bp, Homo sapien
gacatccacagcgaggcaatgaaga

SEQ ID NO: 4825882 - DNA, 25 bp, Homo sapien
gaggcctcataagctgaacctgaca

SEQ ID NO: 4825883 - DNA, 25 bp, Homo sapien
tatgccacagccattaaatacagag

SEQ ID NO: 4825884 - DNA, 25 bp, Homo sapien
taagactgaaaagtattgaggcctc

SEQ ID NO: 4825885 - DNA, 25 bp, Homo sapien
gaacacatgtaatctgttggaacaa

SEQ ID NO: 4825886 - DNA, 25 bp, Homo sapien
cctgaagtctgctagtacctgctga

SEQ ID NO: 4825887 - DNA, 25 bp, Homo sapien
tacctgctgagcacagtgtcatggg

SEQ ID NO: 4825888 - DNA, 25 bp, Homo sapien
ccagtagagagtaacaagcaccagc

SEQ ID NO: 4825889 - DNA, 25 bp, Homo sapien
catgaccttaatacgatagtggcag

SEQ ID NO: 4825890 - DNA, 25 bp, Homo sapien
caagttcgaattcactgggtcacag

SEQ ID NO: 4825891 - DNA, 25 bp, Homo sapien
gacagtgcattgtccctaaacgacc

SEQ ID NO: 4825892 - DNA, 25 bp, Homo sapien
tctaatcatggtcaacaaagatctg

SEQ ID NO: 4825893 - DNA, 25 bp, Homo sapien
tacttgcctcactgacaccatgtgg

SEQ ID NO: 4825894 - DNA, 25 bp, Homo sapien
catttccactaaaggtaaggctgga

SEQ ID NO: 4825895 - DNA, 25 bp, Homo sapien
aatgtaagtagccagaaccatggaa

SEQ ID NO: 4825896 - DNA, 25 bp, Homo sapien
tacactagtgggtatacgtcaccag

SEQ ID NO: 4825897 - DNA, 25 bp, Homo sapien
gggctacagctgtgatcttcaagaa

SEQ ID NO: 4825898 - DNA, 25 bp, Homo sapien
ggattctctaagtcctccaaggagg

SEQ ID NO: 4825899 - DNA, 25 bp, Homo sapien
tatgccaaatgagatgtccagacct

SEQ ID NO: 4825900 - DNA, 25 bp, Homo sapien
caggccatggagattaaaacagtgc

SEQ ID NO: 4825901 - DNA, 25 bp, Homo sapien
catggtgcctaggaagacagatggc

SEQ ID NO: 4825902 - DNA, 25 bp, Homo sapien
tcaagagtatgggagtcacgctgca

SEQ ID NO: 4825903 - DNA, 25 bp, Homo sapien
tctaccagtctcacagaaccatggg

SEQ ID NO: 4825904 - DNA, 25 bp, Homo sapien
tgtgccagttgctatacgatgccct

SEQ ID NO: 4825905 - DNA, 25 bp, Homo sapien
gatagcctgggacacgaaatgcata

SEQ ID NO: 4825906 - DNA, 25 bp, Homo sapien
gccaccaaatgtattcctctgggtt

SEQ ID NO: 4825907 - DNA, 25 bp, Homo sapien
cacaccatccaagcactaagaagac

SEQ ID NO: 4825908 - DNA, 25 bp, Homo sapien
gcattgtactagctcagccaccaaa

SEQ ID NO: 4825909 - DNA, 25 bp, Homo sapien
gtgatggcattgtactagctcagcc

SEQ ID NO: 4825910 - DNA, 25 bp, Homo sapien
ttgagtgaagtctacaatgatatcc

SEQ ID NO: 4825911 - DNA, 25 bp, Homo sapien
caatagagaccagatgactgatgtt

SEQ ID NO: 4825912 - DNA, 25 bp, Homo sapien
actcttcttgagtgaagtctacaat

SEQ ID NO: 4825913 - DNA, 25 bp, Homo sapien
tagagaccagatgactgatgttctc

SEQ ID NO: 4825914 - DNA, 25 bp, Homo sapien
cttgcagtaagcttattctttgtgt

SEQ ID NO: 4825915 - DNA, 25 bp, Homo sapien
cagtaagcttattctttgtgttgaa

SEQ ID NO: 4825916 - DNA, 25 bp, Homo sapien
acttgctccaattgggaaagcacaa

SEQ ID NO: 4825917 - DNA, 25 bp, Homo sapien
acaactgatttgcagagctgtttgc

SEQ ID NO: 4825918 - DNA, 25 bp, Homo sapien
ttgaatgaatggtatctcttgatgt

SEQ ID NO: 4825919 - DNA, 25 bp, Homo sapien
cccttctgatagatatgttgaatga

SEQ ID NO: 4825920 - DNA, 25 bp, Homo sapien
gatggtggacgtgcccttctgatag

SEQ ID NO: 4825921 - DNA, 25 bp, Homo sapien
gtgctgatggtggacgtgcccttct

SEQ ID NO: 4825922 - DNA, 25 bp, Homo sapien
taagtcattgcatagaaaaggatcc

SEQ ID NO: 4825923 - DNA, 25 bp, Homo sapien
aagtcattgcatagaaaaggatcct

SEQ ID NO: 4825924 - DNA, 25 bp, Homo sapien
gattaaaggataaccagtcactgaa

SEQ ID NO: 4825925 - DNA, 25 bp, Homo sapien
tcgtctaaggacagaagagtgattg

SEQ ID NO: 4825926 - DNA, 25 bp, Homo sapien
tgtgaatcatctcatgtcgcctaag

SEQ ID NO: 4825927 - DNA, 25 bp, Homo sapien
caaagtgtttcgttctcatgtaggt

SEQ ID NO: 4825928 - DNA, 25 bp, Homo sapien
aggctttcccacatagaggacatac

SEQ ID NO: 4825929 - DNA, 25 bp, Homo sapien
ttgcttttttagtgtgagttctctc

SEQ ID NO: 4825930 - DNA, 25 bp, Homo sapien
ttctctcatgttgtctaaggttaaa

SEQ ID NO: 4825931 - DNA, 25 bp, Homo sapien
ttacatattcattgcttttttagtg

SEQ ID NO: 4825932 - DNA, 25 bp, Homo sapien
tagtgttaacgctacagctgatgat

SEQ ID NO: 4825933 - DNA, 25 bp, Homo sapien
gagtctgaagtttgtgccataaaca

SEQ ID NO: 4825934 - DNA, 25 bp, Homo sapien
tcacgttgtatatggtcagcctaga

SEQ ID NO: 4825935 - DNA, 25 bp, Homo sapien
gaagactcctccacattcctttgat

SEQ ID NO: 4825936 - DNA, 25 bp, Homo sapien
tctcactggaaaaatgctggtattg

SEQ ID NO: 4825937 - DNA, 25 bp, Homo sapien
attttcacactgacgacaggcacag

SEQ ID NO: 4825938 - DNA, 25 bp, Homo sapien
tcatgtcattgagagttctacacca

SEQ ID NO: 4825939 - DNA, 25 bp, Homo sapien
ctgaatgagagtgcacagcaattac

SEQ ID NO: 4825940 - DNA, 25 bp, Homo sapien
gacaggtgagtgtcccttatgcccc

SEQ ID NO: 4825941 - DNA, 25 bp, Homo sapien
tgtggcagttaagtccacccaagct

SEQ ID NO: 4825942 - DNA, 25 bp, Homo sapien
tatcctggcgagatcttcacctggg

SEQ ID NO: 4825943 - DNA, 25 bp, Homo sapien
gcagcctggtgggttactgacacag

SEQ ID NO: 4825944 - DNA, 25 bp, Homo sapien
ggtctttatggaggtcgctgtcacc

SEQ ID NO: 4825945 - DNA, 25 bp, Homo sapien
ctttatggaggtcgctgtcaccaca

SEQ ID NO: 4825946 - DNA, 25 bp, Homo sapien
gtcaccacactccggtgctcagagc

SEQ ID NO: 4825947 - DNA, 25 bp, Homo sapien
tcaccacactccggtgctcagagct

SEQ ID NO: 4825948 - DNA, 25 bp, Homo sapien
tcccaaggatgtagacagcgctgca

SEQ ID NO: 4825949 - DNA, 25 bp, Homo sapien
gacatgtgaaagatcgcagcagcca

SEQ ID NO: 4825950 - DNA, 25 bp, Homo sapien
ggcctaagatcctgccctgtcgacg

SEQ ID NO: 4825951 - DNA, 25 bp, Homo sapien
cagtattgctaacagaggctggcca

SEQ ID NO: 4825952 - DNA, 25 bp, Homo sapien
ggaactgcttcagggatcaatgcaa

SEQ ID NO: 4825953 - DNA, 25 bp, Homo sapien
taggaattcagtgctctcgaagaac

SEQ ID NO: 4825954 - DNA, 25 bp, Homo sapien
taactgttgactataagcctcaggt

SEQ ID NO: 4825955 - DNA, 25 bp, Homo sapien
taagtaacgcaacgatttctgagtg

SEQ ID NO: 4825956 - DNA, 25 bp, Homo sapien
gactgaaacggatgcttatggctac

SEQ ID NO: 4825957 - DNA, 25 bp, Homo sapien
tggactctaacgtggagtgtggact

SEQ ID NO: 4825958 - DNA, 25 bp, Homo sapien
gagtgtggactctgtaacgtggagt

SEQ ID NO: 4825959 - DNA, 25 bp, Homo sapien
taacgtggagtgtggaatctgtaac

SEQ ID NO: 4825960 - DNA, 25 bp, Homo sapien
aacgtggagtgtggattctgtaacg

SEQ ID NO: 4825961 - DNA, 25 bp, Homo sapien
gagtgtggactctgtaacgtggagt

SEQ ID NO: 4825962 - DNA, 25 bp, Homo sapien
taacgtggagtgtggaatctgtaac

SEQ ID NO: 4825963 - DNA, 25 bp, Homo sapien
aacgtggagtgtggattctgtaacg

SEQ ID NO: 4825964 - DNA, 25 bp, Homo sapien
tggactctaacgtggagtgtggact

SEQ ID NO: 4825965 - DNA, 25 bp, Homo sapien
gcactcctgtttaatcagagggatg

SEQ ID NO: 4825966 - DNA, 25 bp, Homo sapien
tctcccacgtggtccagtcaccatt

SEQ ID NO: 4825967 - DNA, 25 bp, Homo sapien
aaacccagcgactctcgtgtgcctg

SEQ ID NO: 4825968 - DNA, 25 bp, Homo sapien
acagagactaccctaaaacccagcg

SEQ ID NO: 4825969 - DNA, 25 bp, Homo sapien
tgagtaccctggattaatctccttt

SEQ ID NO: 4825970 - DNA, 25 bp, Homo sapien
ggattaatctccttttggataggtc

SEQ ID NO: 4825971 - DNA, 25 bp, Homo sapien
cctgagtaccctggattaatctcct

SEQ ID NO: 4825972 - DNA, 25 bp, Homo sapien
taccctggattaatctccttttgga

SEQ ID NO: 4825973 - DNA, 25 bp, Homo sapien
caggatccgggatcaggctatgtcc

SEQ ID NO: 4825974 - DNA, 25 bp, Homo sapien
gggccaaggtgtctccaaggtgctg

SEQ ID NO: 4825975 - DNA, 25 bp, Homo sapien
cacgcggcttacttcacagccagga

SEQ ID NO: 4825976 - DNA, 25 bp, Homo sapien
acagcaggaccacgagcagggccaa

SEQ ID NO: 4825977 - DNA, 25 bp, Homo sapien
tcaagcgagtggaatgacggtttcc

SEQ ID NO: 4825978 - DNA, 25 bp, Homo sapien
ctgtgggcaagtttggaactgctgt

SEQ ID NO: 4825979 - DNA, 25 bp, Homo sapien
tagtcagtccttgtgatgaaggtgc

SEQ ID NO: 4825980 - DNA, 25 bp, Homo sapien
gacggtttcctatagaagcacagtt

SEQ ID NO: 4825981 - DNA, 25 bp, Homo sapien
tcttggtaaagattattgccgatcg

SEQ ID NO: 4825982 - DNA, 25 bp, Homo sapien
aagctctcgttctggcattagccac

SEQ ID NO: 4825983 - DNA, 25 bp, Homo sapien
gccgatcgttggttttctttgccca

SEQ ID NO: 4825984 - DNA, 25 bp, Homo sapien
tccactgtggagcacaagctcactg

SEQ ID NO: 4825985 - DNA, 25 bp, Homo sapien
atccagtgcacaaggtgaggcctgt

SEQ ID NO: 4825986 - DNA, 25 bp, Homo sapien
tccagtgcacaaggtgaggcctgtg

SEQ ID NO: 4825987 - DNA, 25 bp, Homo sapien
tgcggatgtcttggatccacctctg

SEQ ID NO: 4825988 - DNA, 25 bp, Homo sapien
tttcttccaaaacgccagtccgtca

SEQ ID NO: 4825989 - DNA, 25 bp, Homo sapien
gactccatttgacgtgaggcttgca

SEQ ID NO: 4825990 - DNA, 25 bp, Homo sapien
tccttggtctgcaactcgtgtggct

SEQ ID NO: 4825991 - DNA, 25 bp, Homo sapien
agcagttcacacttgtgcctgcttc

SEQ ID NO: 4825992 - DNA, 25 bp, Homo sapien
aagcagttcacacttgtgcctgctt

SEQ ID NO: 4825993 - DNA, 25 bp, Homo sapien
gcagttcacacttgtgcctgcttct

SEQ ID NO: 4825994 - DNA, 25 bp, Homo sapien
ccacacctcagcattgctggcggat

SEQ ID NO: 4825995 - DNA, 25 bp, Homo sapien
cctcagcattgctggcggatcactg

SEQ ID NO: 4825996 - DNA, 25 bp, Homo sapien
tgctgaagcgtcttccccatttcca

SEQ ID NO: 4825997 - DNA, 25 bp, Homo sapien
caatgctgaagcgtcttccccattt

SEQ ID NO: 4825998 - DNA, 25 bp, Homo sapien
tgcagagatttgacgacttgataga

SEQ ID NO: 4825999 - DNA, 25 bp, Homo sapien
cagagatttgacgacttgatagaaa

SEQ ID NO: 4826000 - DNA, 25 bp, Homo sapien
tttgcagagatttgacgacttgata

SEQ ID NO: 4826001 - DNA, 25 bp, Homo sapien
gcagagatttgacgacttgatagaa

SEQ ID NO: 4826002 - DNA, 25 bp, Homo sapien
catccatgcggaggacactggtgat

SEQ ID NO: 4826003 - DNA, 25 bp, Homo sapien
gataaagctccttgccgctaccact

SEQ ID NO: 4826004 - DNA, 25 bp, Homo sapien
ctaaagtaggtcatccatgcggagg

SEQ ID NO: 4826005 - DNA, 25 bp, Homo sapien
tgatctgggatgtaagataaagctc

SEQ ID NO: 4826006 - DNA, 25 bp, Homo sapien
gaaggcggcctgagcaatctagatt

SEQ ID NO: 4826007 - DNA, 25 bp, Homo sapien
caaaccaccgctgaaaggcaacgtt

SEQ ID NO: 4826008 - DNA, 25 bp, Homo sapien
aaattctgggagttgcataccggcc

SEQ ID NO: 4826009 - DNA, 25 bp, Homo sapien
tccttctaaagggtgggatgaccaa

SEQ ID NO: 4826010 - DNA, 25 bp, Homo sapien
agcctgaaggaattgaacaccagga

SEQ ID NO: 4826011 - DNA, 25 bp, Homo sapien
gaaaatcactcgttttaaggaagca

SEQ ID NO: 4826012 - DNA, 25 bp, Homo sapien
tgcatgtccgagaagcgatgccgtt

SEQ ID NO: 4826013 - DNA, 25 bp, Homo sapien
aagcgatgccgttgaaggaatttcc

SEQ ID NO: 4826014 - DNA, 25 bp, Homo sapien
gcttttcgagctctgtgtcccgggc

SEQ ID NO: 4826015 - DNA, 25 bp, Homo sapien
tctacacagtattgcagtaacgctc

SEQ ID NO: 4826016 - DNA, 25 bp, Homo sapien
ttgaggatcttccagcgtgacccca

SEQ ID NO: 4826017 - DNA, 25 bp, Homo sapien
cgccatgtcccggagttgaggatct

SEQ ID NO: 4826018 - DNA, 25 bp, Homo sapien
gtcaagctgctcaagtggtgttgca

SEQ ID NO: 4826019 - DNA, 25 bp, Homo sapien
tggtgttgcaaagactgaagacatt

SEQ ID NO: 4826020 - DNA, 25 bp, Homo sapien
tcaagctgctcaagtggtgttgcaa

SEQ ID NO: 4826021 - DNA, 25 bp, Homo sapien
aagcccgggatgactgcactctagg

SEQ ID NO: 4826022 - DNA, 25 bp, Homo sapien
ccttcaggtgttctcgtggcctgag

SEQ ID NO: 4826023 - DNA, 25 bp, Homo sapien
gcatttccaccctgcggccgtattt

SEQ ID NO: 4826024 - DNA, 25 bp, Homo sapien
gcgtccctgagaatgtgcgtgcccg

SEQ ID NO: 4826025 - DNA, 25 bp, Homo sapien
cgaccaggcggttattgccggaagt

SEQ ID NO: 4826026 - DNA, 25 bp, Homo sapien
gccatgctgattggccggcgcggat

SEQ ID NO: 4826027 - DNA, 25 bp, Homo sapien
cagcgtgcgcctgcgtagtaggcac

SEQ ID NO: 4826028 - DNA, 25 bp, Homo sapien
ggatccgcgtggcaatgttgctgcc

SEQ ID NO: 4826029 - DNA, 25 bp, Homo sapien
gcgtcccccagtgcccaacgggcgc

SEQ ID NO: 4826030 - DNA, 25 bp, Homo sapien
tcccccagtgcccaacgggcgcgcc

SEQ ID NO: 4826031 - DNA, 25 bp, Homo sapien
cgcgtcccccagtgcccaacgggcg

SEQ ID NO: 4826032 - DNA, 25 bp, Homo sapien
cgcccgcgtcccccagtgcccaacg

SEQ ID NO: 4826033 - DNA, 25 bp, Homo sapien
cgcgcctgcggcccccagtcttcac

SEQ ID NO: 4826034 - DNA, 25 bp, Homo sapien
agcgcgcctgcggcccccagtcttc

SEQ ID NO: 4826035 - DNA, 25 bp, Homo sapien
tagcgcgcctgcggcccccagtctt

SEQ ID NO: 4826036 - DNA, 25 bp, Homo sapien
ctagcgcgcctgcggcccccagtct

SEQ ID NO: 4826037 - DNA, 25 bp, Homo sapien
cagaccccacctgacgcgcccgcgg

SEQ ID NO: 4826038 - DNA, 25 bp, Homo sapien
gaccccacctgacgcgcccgcggcc

SEQ ID NO: 4826039 - DNA, 25 bp, Homo sapien
cccacctgacgcgcccgcggcccat

SEQ ID NO: 4826040 - DNA, 25 bp, Homo sapien
ccccacctgacgcgcccgcggccca

SEQ ID NO: 4826041 - DNA, 25 bp, Homo sapien
cagcgaggcggacacaagctcgggc

SEQ ID NO: 4826042 - DNA, 25 bp, Homo sapien
caggagtcgtccccgaaacaccttg

SEQ ID NO: 4826043 - DNA, 25 bp, Homo sapien
ggcaaacgccggcaggagtcgtccc

SEQ ID NO: 4826044 - DNA, 25 bp, Homo sapien
gagcccggagggcaaacgccggcag

SEQ ID NO: 4826045 - DNA, 25 bp, Homo sapien
gaaaggtagctgaattactcaagca

SEQ ID NO: 4826046 - DNA, 25 bp, Homo sapien
cgttgaatttagctacagaaaggta

SEQ ID NO: 4826047 - DNA, 25 bp, Homo sapien
tggtcgacagagacgaaaatgttat

SEQ ID NO: 4826048 - DNA, 25 bp, Homo sapien
tacatcatggagaataaatgagaga

SEQ ID NO: 4826049 - DNA, 25 bp, Homo sapien
gcgtatcccatgaaaggtttaccag

SEQ ID NO: 4826050 - DNA, 25 bp, Homo sapien
ggtttaccagaggtgacattctagc

SEQ ID NO: 4826051 - DNA, 25 bp, Homo sapien
gaagtcatttaaggctggatcaagt

SEQ ID NO: 4826052 - DNA, 25 bp, Homo sapien
tctttgccagaagttagaagcaacc

SEQ ID NO: 4826053 - DNA, 25 bp, Homo sapien
gccatcttctgtcttaatccaactc

SEQ ID NO: 4826054 - DNA, 25 bp, Homo sapien
agccatcttctgtcttaatccaact

SEQ ID NO: 4826055 - DNA, 25 bp, Homo sapien
catcttctgtcttaatccaactcca

SEQ ID NO: 4826056 - DNA, 25 bp, Homo sapien
ctttcaagtttctgactacaagatt

SEQ ID NO: 4826057 - DNA, 25 bp, Homo sapien
tcaagtttctgactacaagattcac

SEQ ID NO: 4826058 - DNA, 25 bp, Homo sapien
ttcaagtttctgactacaagattca

SEQ ID NO: 4826059 - DNA, 25 bp, Homo sapien
caagtttctgactacaagattcaca

SEQ ID NO: 4826060 - DNA, 25 bp, Homo sapien
ggtttttgtgtggtaagcaatctgc

SEQ ID NO: 4826061 - DNA, 25 bp, Homo sapien
tacagttcattctaaaatccatcta

SEQ ID NO: 4826062 - DNA, 25 bp, Homo sapien
agcttgtggtttttgtgtggtaagc

SEQ ID NO: 4826063 - DNA, 25 bp, Homo sapien
tgtggtttttgtgtggtaagcaatc

SEQ ID NO: 4826064 - DNA, 25 bp, Homo sapien
aaacacctaggagtgagactgccag

SEQ ID NO: 4826065 - DNA, 25 bp, Homo sapien
tttcgatgcatattcatgctcttca

SEQ ID NO: 4826066 - DNA, 25 bp, Homo sapien
ttttcctttttttcgatgcatattc

SEQ ID NO: 4826067 - DNA, 25 bp, Homo sapien
cctttttttcgatgcatattcatgc

SEQ ID NO: 4826068 - DNA, 25 bp, Homo sapien
catgctcttcattattgaatatttc

SEQ ID NO: 4826069 - DNA, 25 bp, Homo sapien
tcctttgtgctttctttatggacat

SEQ ID NO: 4826070 - DNA, 25 bp, Homo sapien
ggacatagatccatttttcacgata

SEQ ID NO: 4826071 - DNA, 25 bp, Homo sapien
tagatccatttttcacgataaaaac

SEQ ID NO: 4826072 - DNA, 25 bp, Homo sapien
ttatggacatagatccatttttcac

SEQ ID NO: 4826073 - DNA, 25 bp, Homo sapien
tgtggacgacgttaaagctaagatc

SEQ ID NO: 4826074 - DNA, 25 bp, Homo sapien
gaggcatgcactgcccgagtttgaa

SEQ ID NO: 4826075 - DNA, 25 bp, Homo sapien
aactggattcattctaggctacgca

SEQ ID NO: 4826076 - DNA, 25 bp, Homo sapien
tatgctcaaccacaaggatcagggc

SEQ ID NO: 4826077 - DNA, 25 bp, Homo sapien
gtcaattaattgtgcgattaaaaaa

SEQ ID NO: 4826078 - DNA, 25 bp, Homo sapien
gtcaattagccaaaaagaattggca

SEQ ID NO: 4826079 - DNA, 25 bp, Homo sapien
aattagtcaattagccaaaaagaat

SEQ ID NO: 4826080 - DNA, 25 bp, Homo sapien
taatgtcaattaattgtgcgattaa

SEQ ID NO: 4826081 - DNA, 25 bp, Homo sapien
tatcttgaattgcacttgagaagtc

SEQ ID NO: 4826082 - DNA, 25 bp, Homo sapien
ctcccaaggtgcaatagccatgcct

SEQ ID NO: 4826083 - DNA, 25 bp, Homo sapien
ttctcccaaggtgcaatagccatgc

SEQ ID NO: 4826084 - DNA, 25 bp, Homo sapien
tcttgaattgcacttgagaagtcta

SEQ ID NO: 4826085 - DNA, 25 bp, Homo sapien
tgttgaagtaattcttctgtgccac

SEQ ID NO: 4826086 - DNA, 25 bp, Homo sapien
aatgaagttaactgggattttgcaa

SEQ ID NO: 4826087 - DNA, 25 bp, Homo sapien
gggattttgcaattagctgcaacag

SEQ ID NO: 4826088 - DNA, 25 bp, Homo sapien
tgtgccacgccactcaatgaagtta

SEQ ID NO: 4826089 - DNA, 25 bp, Homo sapien
tgtagctgttgttgccaggcgagaa

SEQ ID NO: 4826090 - DNA, 25 bp, Homo sapien
tagtcatctgaagatcctgtagctg

SEQ ID NO: 4826091 - DNA, 25 bp, Homo sapien
gaatagtttctaatcggcaaatcca

SEQ ID NO: 4826092 - DNA, 25 bp, Homo sapien
cagagggtagagcttaggtcttgca

SEQ ID NO: 4826093 - DNA, 25 bp, Homo sapien
taggacttctacagcaagccccatg

SEQ ID NO: 4826094 - DNA, 25 bp, Homo sapien
tgaatgactgtagggtcacaccaag

SEQ ID NO: 4826095 - DNA, 25 bp, Homo sapien
ggacttttagcacaacccacctatg

SEQ ID NO: 4826096 - DNA, 25 bp, Homo sapien
gctgaacatcactaccacggatctg

SEQ ID NO: 4826097 - DNA, 25 bp, Homo sapien
tgtctcggcccacccagtcaaagat

SEQ ID NO: 4826098 - DNA, 25 bp, Homo sapien
ccacccagtcaaagatgcaagcttg

SEQ ID NO: 4826099 - DNA, 25 bp, Homo sapien
gctcagcatacagccatgccttcct

SEQ ID NO: 4826100 - DNA, 25 bp, Homo sapien
ttcctgctctgtctcggcccaccca

SEQ ID NO: 4826101 - DNA, 25 bp, Homo sapien
gcctaaggtgatgatgtcccatccg

SEQ ID NO: 4826102 - DNA, 25 bp, Homo sapien
cactgagggtgaggccattgttcac

SEQ ID NO: 4826103 - DNA, 25 bp, Homo sapien
catccgtctgagaaccggtatagga

SEQ ID NO: 4826104 - DNA, 25 bp, Homo sapien
gcaaaatggtactgacaaagcttct

SEQ ID NO: 4826105 - DNA, 25 bp, Homo sapien
acagctcgggcctgcacgtgatagg

SEQ ID NO: 4826106 - DNA, 25 bp, Homo sapien
tctcattaacgccttttgggaacag

SEQ ID NO: 4826107 - DNA, 25 bp, Homo sapien
gggctcatcccaggcaaccttcatt

SEQ ID NO: 4826108 - DNA, 25 bp, Homo sapien
ccttaatgttagttactgaggcctg

SEQ ID NO: 4826109 - DNA, 25 bp, Homo sapien
aatgcacgggctaaaggagtaacag

SEQ ID NO: 4826110 - DNA, 25 bp, Homo sapien
gaccagtgcagagctagcgaaatta

SEQ ID NO: 4826111 - DNA, 25 bp, Homo sapien
caccagtgttcacgggagaatcccc

SEQ ID NO: 4826112 - DNA, 25 bp, Homo sapien
catacttcagtcacggcttttgagg

SEQ ID NO: 4826113 - DNA, 25 bp, Homo sapien
ctgaaaggatcaaatgtctacaaaa

SEQ ID NO: 4826114 - DNA, 25 bp, Homo sapien
taatgtttctgaagtgcaaagtaca

SEQ ID NO: 4826115 - DNA, 25 bp, Homo sapien
cagtgccgacagaaatgcagtgtgt

SEQ ID NO: 4826116 - DNA, 25 bp, Homo sapien
tccgtactgctccttcgctgggtaa

SEQ ID NO: 4826117 - DNA, 25 bp, Homo sapien
cttgaatagtaaagcaagatggtag

SEQ ID NO: 4826118 - DNA, 25 bp, Homo sapien
tgaatagtaaagcaagatggtagtc

SEQ ID NO: 4826119 - DNA, 25 bp, Homo sapien
ttgaatagtaaagcaagatggtagt

SEQ ID NO: 4826120 - DNA, 25 bp, Homo sapien
tttgatcaaagtggccactcagccc

SEQ ID NO: 4826121 - DNA, 25 bp, Homo sapien
gcaacgttttcatcccgaacacagg

SEQ ID NO: 4826122 - DNA, 25 bp, Homo sapien
tcaacactctcgtccttgctgaggt

SEQ ID NO: 4826123 - DNA, 25 bp, Homo sapien
tgagaaagctcaagtcagcgagagc

SEQ ID NO: 4826124 - DNA, 25 bp, Homo sapien
gactcttaggaggaacgcaggtaaa

SEQ ID NO: 4826125 - DNA, 25 bp, Homo sapien
gcaggtaaacgggaccagaggctct

SEQ ID NO: 4826126 - DNA, 25 bp, Homo sapien
gtcagtgctggatctctccatggca

SEQ ID NO: 4826127 - DNA, 25 bp, Homo sapien
gtgtttatgcgcacatctagcagcc

SEQ ID NO: 4826128 - DNA, 25 bp, Homo sapien
tgaagaggtcgatgaagtgctgcgg

SEQ ID NO: 4826129 - DNA, 25 bp, Homo sapien
gctgcggagacacaggcgtgaagca

SEQ ID NO: 4826130 - DNA, 25 bp, Homo sapien
agctgtcagggtcggccgccgtgca

SEQ ID NO: 4826131 - DNA, 25 bp, Homo sapien
agtgctgcggagacacaggcgtgaa

SEQ ID NO: 4826132 - DNA, 25 bp, Homo sapien
tcacagaacactcactatgagccct

SEQ ID NO: 4826133 - DNA, 25 bp, Homo sapien
aacactcactatgagccctgcacag

SEQ ID NO: 4826134 - DNA, 25 bp, Homo sapien
agacagcaggattcacaatctccaa

SEQ ID NO: 4826135 - DNA, 25 bp, Homo sapien
gattcacaatctccaatagggatgg

SEQ ID NO: 4826136 - DNA, 25 bp, Homo sapien
tgcagaagggcagttcttcccaggc

SEQ ID NO: 4826137 - DNA, 25 bp, Homo sapien
gatgaaaatgcaaccatgcagtccc

SEQ ID NO: 4826138 - DNA, 25 bp, Homo sapien
agaagtagaaatgatttccttggcc

SEQ ID NO: 4826139 - DNA, 25 bp, Homo sapien
atgcagtcccccctttgcagaaggg

SEQ ID NO: 4826140 - DNA, 25 bp, Homo sapien
tgaagtttagactgcactgggctgt

SEQ ID NO: 4826141 - DNA, 25 bp, Homo sapien
cagtccaggattatgcacagaccag

SEQ ID NO: 4826142 - DNA, 25 bp, Homo sapien
tattggccgttagtgtcacgtcaac

SEQ ID NO: 4826143 - DNA, 25 bp, Homo sapien
cccgttgttgggctgcgtgtgcaca

SEQ ID NO: 4826144 - DNA, 25 bp, Homo sapien
gtagaaatgatttgcttgggctcct

SEQ ID NO: 4826145 - DNA, 25 bp, Homo sapien
tgggctccttgaccctattcaaaaa

SEQ ID NO: 4826146 - DNA, 25 bp, Homo sapien
acgtttctatcctatgcctgctgag

SEQ ID NO: 4826147 - DNA, 25 bp, Homo sapien
cacaataatctttgggtggtgggac

SEQ ID NO: 4826148 - DNA, 25 bp, Homo sapien
tgtaacttaatctcacaggagtggc

SEQ ID NO: 4826149 - DNA, 25 bp, Homo sapien
tactacctggctttaggctcctggg

SEQ ID NO: 4826150 - DNA, 25 bp, Homo sapien
tacaaatcggtctgctcctgagagg

SEQ ID NO: 4826151 - DNA, 25 bp, Homo sapien
gagaggctactgcatggctttccaa

SEQ ID NO: 4826152 - DNA, 25 bp, Homo sapien
tttccatgcaaaaacgagacagttg

SEQ ID NO: 4826153 - DNA, 25 bp, Homo sapien
tgaacttgtggatacgtggtagaga

SEQ ID NO: 4826154 - DNA, 25 bp, Homo sapien
catacgaggtccctacagaagtcaa

SEQ ID NO: 4826155 - DNA, 25 bp, Homo sapien
tcccttacttaggaagaacaagagc

SEQ ID NO: 4826156 - DNA, 25 bp, Homo sapien
gtgcagccaccgtgtaaaacactta

SEQ ID NO: 4826157 - DNA, 25 bp, Homo sapien
ccgtgtaaaacacttatggcagtgc

SEQ ID NO: 4826158 - DNA, 25 bp, Homo sapien
aatctcagcaggataccacttcaca

SEQ ID NO: 4826159 - DNA, 25 bp, Homo sapien
aaatcaaaatctcagcaggatacca

SEQ ID NO: 4826160 - DNA, 25 bp, Homo sapien
tatctgaaaagggtgaatacccaga

SEQ ID NO: 4826161 - DNA, 25 bp, Homo sapien
aaacggccaacaaacagatactcag

SEQ ID NO: 4826162 - DNA, 25 bp, Homo sapien
gacaaagagcccaaatagacatttc

SEQ ID NO: 4826163 - DNA, 25 bp, Homo sapien
tctccaaagacgacatataaacggc

SEQ ID NO: 4826164 - DNA, 25 bp, Homo sapien
ggaaccaagtaggaggtctctcact

SEQ ID NO: 4826165 - DNA, 25 bp, Homo sapien
tagaggccatatgaacatcccactg

SEQ ID NO: 4826166 - DNA, 25 bp, Homo sapien
tggacctaacagacacaacagcagt

SEQ ID NO: 4826167 - DNA, 25 bp, Homo sapien
gcagtagcccactttcagtaacgga

SEQ ID NO: 4826168 - DNA, 25 bp, Homo sapien
aagctcagcatgaagatacacatct

SEQ ID NO: 4826169 - DNA, 25 bp, Homo sapien
gaatccaggctagagaaatgcaaga

SEQ ID NO: 4826170 - DNA, 25 bp, Homo sapien
catgttatgcgtcttcaaaaagcga

SEQ ID NO: 4826171 - DNA, 25 bp, Homo sapien
caagaaggcggttccctctagagtc

SEQ ID NO: 4826172 - DNA, 25 bp, Homo sapien
aatgtcccagcatggtttttcagag

SEQ ID NO: 4826173 - DNA, 25 bp, Homo sapien
gaaagctgaacaaatctggatggtg

SEQ ID NO: 4826174 - DNA, 25 bp, Homo sapien
taaaacgtgctattaagacagaagg

SEQ ID NO: 4826175 - DNA, 25 bp, Homo sapien
gaagtgaggctattgatccctttga

SEQ ID NO: 4826176 - DNA, 25 bp, Homo sapien
tgcagttgccgtgcctctgttggaa

SEQ ID NO: 4826177 - DNA, 25 bp, Homo sapien
cttgctgcgcaggaatgtaaacact

SEQ ID NO: 4826178 - DNA, 25 bp, Homo sapien
tctgttggaacgctaagtgcctgca

SEQ ID NO: 4826179 - DNA, 25 bp, Homo sapien
tggctcttatcagcaagtcctgcag

SEQ ID NO: 4826180 - DNA, 25 bp, Homo sapien
tcacctatcagtccatgttttgcag

SEQ ID NO: 4826181 - DNA, 25 bp, Homo sapien
gatgctctcccataatacagcagta

SEQ ID NO: 4826182 - DNA, 25 bp, Homo sapien
tgtatgtagcacgtataaatgcagc

SEQ ID NO: 4826183 - DNA, 25 bp, Homo sapien
tggtgaacacgtgcagggattgtac

SEQ ID NO: 4826184 - DNA, 25 bp, Homo sapien
tgattccatattgacgcgtgctgag

SEQ ID NO: 4826185 - DNA, 25 bp, Homo sapien
caatgcgtggctgtggattccgtgt

SEQ ID NO: 4826186 - DNA, 25 bp, Homo sapien
tgggcacgtgttccgatgcatggct

SEQ ID NO: 4826187 - DNA, 25 bp, Homo sapien
tgactctgcattccatgttggcgtg

SEQ ID NO: 4826188 - DNA, 25 bp, Homo sapien
tcttgattccatgttgacttgtgct

SEQ ID NO: 4826189 - DNA, 25 bp, Homo sapien
gttccgacacgtggctctggattcc

SEQ ID NO: 4826190 - DNA, 25 bp, Homo sapien
ctgggttccgacacgtggctctgga

SEQ ID NO: 4826191 - DNA, 25 bp, Homo sapien
gtggctcttgattccatgttgactt

SEQ ID NO: 4826192 - DNA, 25 bp, Homo sapien
ttccattgtattagcaagtgtgcat

SEQ ID NO: 4826193 - DNA, 25 bp, Homo sapien
tgaagctgacttatattcttccgga

SEQ ID NO: 4826194 - DNA, 25 bp, Homo sapien
tgcatttgtatagttttaagcgctt

SEQ ID NO: 4826195 - DNA, 25 bp, Homo sapien
taaatggtcttatttggtccttatc

SEQ ID NO: 4826196 - DNA, 25 bp, Homo sapien
caggcagagcgtccggcggccggga

SEQ ID NO: 4826197 - DNA, 25 bp, Homo sapien
aggagccgcaggcagagcgtccggc

SEQ ID NO: 4826198 - DNA, 25 bp, Homo sapien
ggacgcggagccacagcccgacgca

SEQ ID NO: 4826199 - DNA, 25 bp, Homo sapien
acgcacggacggagggacgccggag

SEQ ID NO: 4826200 - DNA, 25 bp, Homo sapien
ttgccttggtgacccgagcggacgt

SEQ ID NO: 4826201 - DNA, 25 bp, Homo sapien
atgcgcactgcgctcccggccgttg

SEQ ID NO: 4826202 - DNA, 25 bp, Homo sapien
cgtggccacgccctccggccagggt

SEQ ID NO: 4826203 - DNA, 25 bp, Homo sapien
ccttgccgcggcctgagcgccagcg

SEQ ID NO: 4826204 - DNA, 25 bp, Homo sapien
tctggtccccacactgtttgacctc

SEQ ID NO: 4826205 - DNA, 25 bp, Homo sapien
tgaacacggtcagaagatcacaggt

SEQ ID NO: 4826206 - DNA, 25 bp, Homo sapien
gggccacgctctgaacacggtcaga

SEQ ID NO: 4826207 - DNA, 25 bp, Homo sapien
tctgtgtgttcgcaggtctggtccc

SEQ ID NO: 4826208 - DNA, 25 bp, Homo sapien
tggccagaacgtccaggaacaaagg

SEQ ID NO: 4826209 - DNA, 25 bp, Homo sapien
ccctgggtctctaaggctgtgagcc

SEQ ID NO: 4826210 - DNA, 25 bp, Homo sapien
cgaaggccttccatggggatcttct

SEQ ID NO: 4826211 - DNA, 25 bp, Homo sapien
ggaaacacaacctgccatttgggcc

SEQ ID NO: 4826212 - DNA, 25 bp, Homo sapien
tctggggcttatatcccttcagcgg

SEQ ID NO: 4826213 - DNA, 25 bp, Homo sapien
tgcatggcaccaaggtacctggcac

SEQ ID NO: 4826214 - DNA, 25 bp, Homo sapien
ggacacagcgttcggtgcatggcac

SEQ ID NO: 4826215 - DNA, 25 bp, Homo sapien
cggggacatagagatgccaagtcca

SEQ ID NO: 4826216 - DNA, 25 bp, Homo sapien
gcaacgttacaaagatctgtgcctc

SEQ ID NO: 4826217 - DNA, 25 bp, Homo sapien
gaaactcgtgggcttatgtgactac

SEQ ID NO: 4826218 - DNA, 25 bp, Homo sapien
gagaccacagcgtattcattaaaga

SEQ ID NO: 4826219 - DNA, 25 bp, Homo sapien
tctcttgcacattgctgggcatggc

SEQ ID NO: 4826220 - DNA, 25 bp, Homo sapien
aatccgcttagccaggagagcatgg

SEQ ID NO: 4826221 - DNA, 25 bp, Homo sapien
ttcggtcagcctcacacacgtggca

SEQ ID NO: 4826222 - DNA, 25 bp, Homo sapien
tgttggccagcgctgaatccgctta

SEQ ID NO: 4826223 - DNA, 25 bp, Homo sapien
gagtttctctctggacggcggccgc

SEQ ID NO: 4826224 - DNA, 25 bp, Homo sapien
tagtctttatgttgaccttgagctg

SEQ ID NO: 4826225 - DNA, 25 bp, Homo sapien
tgggaccccgaggttcgtgagcgga

SEQ ID NO: 4826226 - DNA, 25 bp, Homo sapien
gggagccgaggaaacgttcatgaaa

SEQ ID NO: 4826227 - DNA, 25 bp, Homo sapien
ttcgtgagcggaagggcttgcagga

SEQ ID NO: 4826228 - DNA, 25 bp, Homo sapien
tgtctctgtgggtggtcaccggcgg

SEQ ID NO: 4826229 - DNA, 25 bp, Homo sapien
tctctgtgggtggtcacagtagcgt

SEQ ID NO: 4826230 - DNA, 25 bp, Homo sapien
tgtgggtggtcaccggcgggtgtga

SEQ ID NO: 4826231 - DNA, 25 bp, Homo sapien
cagctctgtccgtgtgggtgctcac

SEQ ID NO: 4826232 - DNA, 25 bp, Homo sapien
gctatgaaaccagaaatgactccac

SEQ ID NO: 4826233 - DNA, 25 bp, Homo sapien
tgaacctcagaacagagtcgccagg

SEQ ID NO: 4826234 - DNA, 25 bp, Homo sapien
tgcctaaacggctctttgctgtggg

SEQ ID NO: 4826235 - DNA, 25 bp, Homo sapien
gtcgccaggccatagggtgtgcaca

SEQ ID NO: 4826236 - DNA, 25 bp, Homo sapien
caccgatgacatggactcaggaatc

SEQ ID NO: 4826237 - DNA, 25 bp, Homo sapien
cataagcaggcggagagagctcgcc

SEQ ID NO: 4826238 - DNA, 25 bp, Homo sapien
aaagtattccaggtccatccccaag

SEQ ID NO: 4826239 - DNA, 25 bp, Homo sapien
cagctgcacccaacgtggaaaagta

SEQ ID NO: 4826240 - DNA, 25 bp, Homo sapien
gccgtcggtggtaaacctatgcaga

SEQ ID NO: 4826241 - DNA, 25 bp, Homo sapien
caatcgcttgtctgaagaggtgagt

SEQ ID NO: 4826242 - DNA, 25 bp, Homo sapien
gagcaccagggcaatcgcttgtctg

SEQ ID NO: 4826243 - DNA, 25 bp, Homo sapien
ggatgcctcagcaactgccaacggc

SEQ ID NO: 4826244 - DNA, 25 bp, Homo sapien
tgaacactcggcagtctacgcatgg

SEQ ID NO: 4826245 - DNA, 25 bp, Homo sapien
caagactcggccactattacaggcg

SEQ ID NO: 4826246 - DNA, 25 bp, Homo sapien
gtaggttatagttcgtccacaagga

SEQ ID NO: 4826247 - DNA, 25 bp, Homo sapien
tacaagcacctgttgagttccagct

SEQ ID NO: 4826248 - DNA, 25 bp, Homo sapien
cgggcctcaattaacttagctattc

SEQ ID NO: 4826249 - DNA, 25 bp, Homo sapien
gcacaatatgctagtaagttaacgg

SEQ ID NO: 4826250 - DNA, 25 bp, Homo sapien
gaacggttacgttgccttaggatga

SEQ ID NO: 4826251 - DNA, 25 bp, Homo sapien
ttaggatgaacagggtcttaaagcc

SEQ ID NO: 4826252 - DNA, 25 bp, Homo sapien
gctttactttgcgaaaccttctgca

SEQ ID NO: 4826253 - DNA, 25 bp, Homo sapien
ttgaggaatagaggtacagtcgagc

SEQ ID NO: 4826254 - DNA, 25 bp, Homo sapien
tcactttcctgaccctgagaatatt

SEQ ID NO: 4826255 - DNA, 25 bp, Homo sapien
taaatcttgtctctaatatgtcagc

SEQ ID NO: 4826256 - DNA, 25 bp, Homo sapien
tctccatcccctgcaagtgaatgca

SEQ ID NO: 4826257 - DNA, 25 bp, Homo sapien
tggtggttcacatgtggccatttcc

SEQ ID NO: 4826258 - DNA, 25 bp, Homo sapien
tcctgggttgcacagaatccctgcc

SEQ ID NO: 4826259 - DNA, 25 bp, Homo sapien
cctgggttgcacagaatccctgccc

SEQ ID NO: 4826260 - DNA, 25 bp, Homo sapien
gatgagggtcgcccccgtgacctgt

SEQ ID NO: 4826261 - DNA, 25 bp, Homo sapien
gagcggcactgacagagctggcaga

SEQ ID NO: 4826262 - DNA, 25 bp, Homo sapien
gggtacgacactggcgatgagcggc

SEQ ID NO: 4826263 - DNA, 25 bp, Homo sapien
tggcagagaaggacgtgccgggagg

SEQ ID NO: 4826264 - DNA, 25 bp, Homo sapien
cactgtcaggatgttgcagctcatg

SEQ ID NO: 4826265 - DNA, 25 bp, Homo sapien
ttttctgtgtttacaagggtggcag

SEQ ID NO: 4826266 - DNA, 25 bp, Homo sapien
actgcatttgtgacacacttgcctg

SEQ ID NO: 4826267 - DNA, 25 bp, Homo sapien
tcttgcacacgttgtctccctggtg

SEQ ID NO: 4826268 - DNA, 25 bp, Homo sapien
tggcaagcaactgccatggtccacg

SEQ ID NO: 4826269 - DNA, 25 bp, Homo sapien
ggccaaaccgaacatgaattcctct

SEQ ID NO: 4826270 - DNA, 25 bp, Homo sapien
agccaccgcttgtccatccctgaat

SEQ ID NO: 4826271 - DNA, 25 bp, Homo sapien
atcctcaaaggccaaaccgaacatg

SEQ ID NO: 4826272 - DNA, 25 bp, Homo sapien
tgagagttcacacattcagctgtgt

SEQ ID NO: 4826273 - DNA, 25 bp, Homo sapien
tgatatgagagttcacacattcagc

SEQ ID NO: 4826274 - DNA, 25 bp, Homo sapien
tcacgctgatttattgatatgagag

SEQ ID NO: 4826275 - DNA, 25 bp, Homo sapien
gatttattgatatgagagttcacac

SEQ ID NO: 4826276 - DNA, 25 bp, Homo sapien
cctcctcttgttgacgtggggttgc

SEQ ID NO: 4826277 - DNA, 25 bp, Homo sapien
gacagaaacatgcacgtactcctcc

SEQ ID NO: 4826278 - DNA, 25 bp, Homo sapien
aaacatgcacgtactcctcctcttg

SEQ ID NO: 4826279 - DNA, 25 bp, Homo sapien
ggttgcgtcttgctctccagaagcc

SEQ ID NO: 4826280 - DNA, 25 bp, Homo sapien
gggctggctgtgagcccctccatag

SEQ ID NO: 4826281 - DNA, 25 bp, Homo sapien
catagctgtcggctgccaggagcag

SEQ ID NO: 4826282 - DNA, 25 bp, Homo sapien
tgagcccctccatagctgtcggctg

SEQ ID NO: 4826283 - DNA, 25 bp, Homo sapien
ggctgtgagcccctccatagctgtc

SEQ ID NO: 4826284 - DNA, 25 bp, Homo sapien
cataagtctatgaagccagacgtgg

SEQ ID NO: 4826285 - DNA, 25 bp, Homo sapien
catgtgggcgggtccattcggttcc

SEQ ID NO: 4826286 - DNA, 25 bp, Homo sapien
gtatagtggtggtctctcactgggc

SEQ ID NO: 4826287 - DNA, 25 bp, Homo sapien
tttcacacaccttataatggagctg

SEQ ID NO: 4826288 - DNA, 25 bp, Homo sapien
catcggtcatgtccgtgggtgacgc

SEQ ID NO: 4826289 - DNA, 25 bp, Homo sapien
gcacctcggcgtcctgccgttggta

SEQ ID NO: 4826290 - DNA, 25 bp, Homo sapien
tcatcgtgggtacctcagcgttctg

SEQ ID NO: 4826291 - DNA, 25 bp, Homo sapien
cactggcgcggtgccagcatgcgtc

SEQ ID NO: 4826292 - DNA, 25 bp, Homo sapien
cctcgccaggatcatgggttttccc

SEQ ID NO: 4826293 - DNA, 25 bp, Homo sapien
atcgatccggagaagtggtgttgac

SEQ ID NO: 4826294 - DNA, 25 bp, Homo sapien
gctttccacctgcatggctacggca

SEQ ID NO: 4826295 - DNA, 25 bp, Homo sapien
tatggacgacagagccgaggaaaag

SEQ ID NO: 4826296 - DNA, 25 bp, Homo sapien
agggaggcaccggcgcactgggggg

SEQ ID NO: 4826297 - DNA, 25 bp, Homo sapien
ggcaccggcgcactggggggcggcc

SEQ ID NO: 4826298 - DNA, 25 bp, Homo sapien
ggaggcaccggcgcactggggggcg

SEQ ID NO: 4826299 - DNA, 25 bp, Homo sapien
gaggcaccggcgcactggggggcgg

SEQ ID NO: 4826300 - DNA, 25 bp, Homo sapien
gcgaagcggcccctcctcagaccga

SEQ ID NO: 4826301 - DNA, 25 bp, Homo sapien
cctcctcagaccgacggctcccggg

SEQ ID NO: 4826302 - DNA, 25 bp, Homo sapien
ttcctcagcgcggacatcctcggac

SEQ ID NO: 4826303 - DNA, 25 bp, Homo sapien
tcagtacgtccgtccgcggtccgtc

SEQ ID NO: 4826304 - DNA, 25 bp, Homo sapien
cagctgccggcacaagacaatttgg

SEQ ID NO: 4826305 - DNA, 25 bp, Homo sapien
gggttatttcccaactgcaaggaca

SEQ ID NO: 4826306 - DNA, 25 bp, Homo sapien
cacgggctgttgatgagattcctcc

SEQ ID NO: 4826307 - DNA, 25 bp, Homo sapien
tccagaaggaaatggtacgcacact

SEQ ID NO: 4826308 - DNA, 25 bp, Homo sapien
gaattaaagtgcacctgacaccgcg

SEQ ID NO: 4826309 - DNA, 25 bp, Homo sapien
gagccggcacgtttttatacccaca

SEQ ID NO: 4826310 - DNA, 25 bp, Homo sapien
tcttggatcatcttagaggacacgc

SEQ ID NO: 4826311 - DNA, 25 bp, Homo sapien
taaagaactcgaagctcctagggct

SEQ ID NO: 4826312 - DNA, 25 bp, Homo sapien
gcaaggctgcttcaagctttttaca

SEQ ID NO: 4826313 - DNA, 25 bp, Homo sapien
cttgctgccgtttctaagttctctg

SEQ ID NO: 4826314 - DNA, 25 bp, Homo sapien
aaaacgctttcaaaacttgctgccg

SEQ ID NO: 4826315 - DNA, 25 bp, Homo sapien
tggccgcgcagtgcctttgtgtaca

SEQ ID NO: 4826316 - DNA, 25 bp, Homo sapien
tggaatgaccccatcacaggaccat

SEQ ID NO: 4826317 - DNA, 25 bp, Homo sapien
agtgccccctgcacatcctgagtgg

SEQ ID NO: 4826318 - DNA, 25 bp, Homo sapien
tcctgagtggtccatggaatgaccc

SEQ ID NO: 4826319 - DNA, 25 bp, Homo sapien
gcacaggcgtggagaagggcgctct

SEQ ID NO: 4826320 - DNA, 25 bp, Homo sapien
tacagtaagtgtctgctgacagtgt

SEQ ID NO: 4826321 - DNA, 25 bp, Homo sapien
cagacgccgtccaaaggactggaat

SEQ ID NO: 4826322 - DNA, 25 bp, Homo sapien
atttaactttgggtacagcagacgc

SEQ ID NO: 4826323 - DNA, 25 bp, Homo sapien
ctaaactgcattgccggctttgcca

SEQ ID NO: 4826324 - DNA, 25 bp, Homo sapien
ctcaaaacggaagggctagatggga

SEQ ID NO: 4826325 - DNA, 25 bp, Homo sapien
aaattcagaatgtggtttcccctag

SEQ ID NO: 4826326 - DNA, 25 bp, Homo sapien
ccaaacaagacgtgtacgggacatt

SEQ ID NO: 4826327 - DNA, 25 bp, Homo sapien
gagtcttaagctgataactgacacc

SEQ ID NO: 4826328 - DNA, 25 bp, Homo sapien
gccaagcctcggatggcgagaaagc

SEQ ID NO: 4826329 - DNA, 25 bp, Homo sapien
ggcgcaggcagagggttagcagccg

SEQ ID NO: 4826330 - DNA, 25 bp, Homo sapien
gttagcagccgcgagggaagccgcg

SEQ ID NO: 4826331 - DNA, 25 bp, Homo sapien
ctagggccaagcctcggatggcgag

SEQ ID NO: 4826332 - DNA, 25 bp, Homo sapien
gacgctgccaagagaacggtcactg

SEQ ID NO: 4826333 - DNA, 25 bp, Homo sapien
cagggcaatgaatccttctatccgc

SEQ ID NO: 4826334 - DNA, 25 bp, Homo sapien
gagactgtgacagctggtccagaca

SEQ ID NO: 4826335 - DNA, 25 bp, Homo sapien
tatccgccatacagtgcctcaggtg

SEQ ID NO: 4826336 - DNA, 25 bp, Homo sapien
ttacaaagcacacgcatctcctcgg

SEQ ID NO: 4826337 - DNA, 25 bp, Homo sapien
gggctccgattccacaccagtgagg

SEQ ID NO: 4826338 - DNA, 25 bp, Homo sapien
ggtttcctccgatgattctcccttg

SEQ ID NO: 4826339 - DNA, 25 bp, Homo sapien
aattcattaagagacaccacttgtc

SEQ ID NO: 4826340 - DNA, 25 bp, Homo sapien
cctgtctggtaagatacagcaatgc

SEQ ID NO: 4826341 - DNA, 25 bp, Homo sapien
gtctggtaagatacagcaatgcttc

SEQ ID NO: 4826342 - DNA, 25 bp, Homo sapien
attcctgtctggtaagatacagcaa

SEQ ID NO: 4826343 - DNA, 25 bp, Homo sapien
ctggtaagatacagcaatgcttctg

SEQ ID NO: 4826344 - DNA, 25 bp, Homo sapien
gatggtctccttggtcgcattctcc

SEQ ID NO: 4826345 - DNA, 25 bp, Homo sapien
catatgtattcacgtttgtgccttc

SEQ ID NO: 4826346 - DNA, 25 bp, Homo sapien
caacggaattccctctgacgcttca

SEQ ID NO: 4826347 - DNA, 25 bp, Homo sapien
aagcagctgaacaagaccgtatggg

SEQ ID NO: 4826348 - DNA, 25 bp, Homo sapien
aagtcttttaccatcccggccactg

SEQ ID NO: 4826349 - DNA, 25 bp, Homo sapien
tttgtaggagttttcctgaacactc

SEQ ID NO: 4826350 - DNA, 25 bp, Homo sapien
caatcgattagtttgctccgaagtc

SEQ ID NO: 4826351 - DNA, 25 bp, Homo sapien
gaggatctctcccacatcggctcct

SEQ ID NO: 4826352 - DNA, 25 bp, Homo sapien
tgaatcaggatgagcaggtgcacca

SEQ ID NO: 4826353 - DNA, 25 bp, Homo sapien
tagccctgggttctacagtgagtca

SEQ ID NO: 4826354 - DNA, 25 bp, Homo sapien
taagtataattagactgcagccctc

SEQ ID NO: 4826355 - DNA, 25 bp, Homo sapien
tgcagccctcattgttgccgggaac

SEQ ID NO: 4826356 - DNA, 25 bp, Homo sapien
tcagcgtgggagaccccagacacca

SEQ ID NO: 4826357 - DNA, 25 bp, Homo sapien
cagggtgtggacataactggaaacc

SEQ ID NO: 4826358 - DNA, 25 bp, Homo sapien
cctcgcgtgaaacgcccctgccatt

SEQ ID NO: 4826359 - DNA, 25 bp, Homo sapien
gcccgtgtcagctgcacacgctgct

SEQ ID NO: 4826360 - DNA, 25 bp, Homo sapien
gttcctacaaatcacactcagaggg

SEQ ID NO: 4826361 - DNA, 25 bp, Homo sapien
ttcccagtgccaacggaagccgagt

SEQ ID NO: 4826362 - DNA, 25 bp, Homo sapien
acagctcgcggtacacggttctgct

SEQ ID NO: 4826363 - DNA, 25 bp, Homo sapien
gaagccgagtaatacacgttcctac

SEQ ID NO: 4826364 - DNA, 25 bp, Homo sapien
tcctcggggcttaaggcagaggcct

SEQ ID NO: 4826365 - DNA, 25 bp, Homo sapien
gagagccgagacctgggttccctct

SEQ ID NO: 4826366 - DNA, 25 bp, Homo sapien
gcaatgagagccgagacctgggttc

SEQ ID NO: 4826367 - DNA, 25 bp, Homo sapien
tcttcctcggggcttaaggcagagg

SEQ ID NO: 4826368 - DNA, 25 bp, Homo sapien
gatcgtgtacagagcggttctcgct

SEQ ID NO: 4826369 - DNA, 25 bp, Homo sapien
ttgtggcgggatggccacatcacga

SEQ ID NO: 4826370 - DNA, 25 bp, Homo sapien
gctcctccacatgatcgtgtacaga

SEQ ID NO: 4826371 - DNA, 25 bp, Homo sapien
atggccgcgtcatgacgtccacaca

SEQ ID NO: 4826372 - DNA, 25 bp, Homo sapien
aacccatggcacacgcgggttggca

SEQ ID NO: 4826373 - DNA, 25 bp, Homo sapien
gcacacgcgggctggcatgggatca

SEQ ID NO: 4826374 - DNA, 25 bp, Homo sapien
gggatcagggaagccatggcgcacg

SEQ ID NO: 4826375 - DNA, 25 bp, Homo sapien
acagggtcagtggaaccatggcgca

SEQ ID NO: 4826376 - DNA, 25 bp, Homo sapien
cacttgtaggtcattcccgagggag

SEQ ID NO: 4826377 - DNA, 25 bp, Homo sapien
gactgggacctgcacgcatactcat

SEQ ID NO: 4826378 - DNA, 25 bp, Homo sapien
cagaaagatgtctgaatgagccgct

SEQ ID NO: 4826379 - DNA, 25 bp, Homo sapien
tggatcgacaaaacatggcggcggt

SEQ ID NO: 4826380 - DNA, 25 bp, Homo sapien
ttgccgggaataccaagcggagcct

SEQ ID NO: 4826381 - DNA, 25 bp, Homo sapien
tacgaaggccatcagggtttccaag

SEQ ID NO: 4826382 - DNA, 25 bp, Homo sapien
tcactggtgctttcctggatggcgc

SEQ ID NO: 4826383 - DNA, 25 bp, Homo sapien
catctgatgtcgttgttgccgggaa

SEQ ID NO: 4826384 - DNA, 25 bp, Homo sapien
aattttaaatgtcatcccgctgtca

SEQ ID NO: 4826385 - DNA, 25 bp, Homo sapien
tacacatttgggtcgactaagttga

SEQ ID NO: 4826386 - DNA, 25 bp, Homo sapien
gagaaatctttggttacccagacaa

SEQ ID NO: 4826387 - DNA, 25 bp, Homo sapien
taattaaaattcaccgaggcagagc

SEQ ID NO: 4826388 - DNA, 25 bp, Homo sapien
tgcaagaaacgaggatgatgcccct

SEQ ID NO: 4826389 - DNA, 25 bp, Homo sapien
gacaactggtaaacacttcctggga

SEQ ID NO: 4826390 - DNA, 25 bp, Homo sapien
gaaaacgctgcctggaacaatcgct

SEQ ID NO: 4826391 - DNA, 25 bp, Homo sapien
tgtgatcgtccctcaagaatggcgc

SEQ ID NO: 4826392 - DNA, 25 bp, Homo sapien
caagatctgcagagtgtgtcggcca

SEQ ID NO: 4826393 - DNA, 25 bp, Homo sapien
taataggctgtgcacgtgtagagag

SEQ ID NO: 4826394 - DNA, 25 bp, Homo sapien
tttcaagggattggctcactcgcgc

SEQ ID NO: 4826395 - DNA, 25 bp, Homo sapien
gaagagctgacatcggaggccatga

SEQ ID NO: 4826396 - DNA, 25 bp, Homo sapien
caccatgaagtatgagtttagctac

SEQ ID NO: 4826397 - DNA, 25 bp, Homo sapien
tatttctcccgtcttggtctgtaca

SEQ ID NO: 4826398 - DNA, 25 bp, Homo sapien
caatgaacccatgcgggcttggtgc

SEQ ID NO: 4826399 - DNA, 25 bp, Homo sapien
caaatgcttttgctgtactatagac

SEQ ID NO: 4826400 - DNA, 25 bp, Homo sapien
cagaccccggaggaagtcctggaga

SEQ ID NO: 4826401 - DNA, 25 bp, Homo sapien
aagaagaatcacgtctgtgcagcag

SEQ ID NO: 4826402 - DNA, 25 bp, Homo sapien
tctcagccagtgatcgaattccctg

SEQ ID NO: 4826403 - DNA, 25 bp, Homo sapien
ttatagatgaggtcacagaccccgg

SEQ ID NO: 4826404 - DNA, 25 bp, Homo sapien
tcagaagtactatcagggatgctgc

SEQ ID NO: 4826405 - DNA, 25 bp, Homo sapien
gattattggttctagtcgttgggac

SEQ ID NO: 4826406 - DNA, 25 bp, Homo sapien
tagtccaggactcggtcaaactaac

SEQ ID NO: 4826407 - DNA, 25 bp, Homo sapien
ccagctgggtagattctgctgacca

SEQ ID NO: 4826408 - DNA, 25 bp, Homo sapien
gtggccctgcgccatcctgaaggag

SEQ ID NO: 4826409 - DNA, 25 bp, Homo sapien
ttagagtcctcccatagcggtggcc

SEQ ID NO: 4826410 - DNA, 25 bp, Homo sapien
gagctcgcgtcccagatcgttataa

SEQ ID NO: 4826411 - DNA, 25 bp, Homo sapien
cactgctgtggaggacaagggaaca

SEQ ID NO: 4826412 - DNA, 25 bp, Homo sapien
taccaagacttgagatgcagggcgc

SEQ ID NO: 4826413 - DNA, 25 bp, Homo sapien
tctgagacttcagacacaaggtgtc

SEQ ID NO: 4826414 - DNA, 25 bp, Homo sapien
gcacccctgacgtgataaaggaccg

SEQ ID NO: 4826415 - DNA, 25 bp, Homo sapien
ctcgcgagacttgagacgcagggca

SEQ ID NO: 4826416 - DNA, 25 bp, Homo sapien
ctaagacttgagatgcacggtgtcc

SEQ ID NO: 4826417 - DNA, 25 bp, Homo sapien
catcccgagacttcatatacacggc

SEQ ID NO: 4826418 - DNA, 25 bp, Homo sapien
ccgagacttcatatacacggcatac

SEQ ID NO: 4826419 - DNA, 25 bp, Homo sapien
gatgcacggtgtccccgacatgata

SEQ ID NO: 4826420 - DNA, 25 bp, Homo sapien
gggtgtccacactgccgctgaagtg

SEQ ID NO: 4826421 - DNA, 25 bp, Homo sapien
cggtgtccacactgccgctgaagtg

SEQ ID NO: 4826422 - DNA, 25 bp, Homo sapien
gagggtgtccacactgccgctgaag

SEQ ID NO: 4826423 - DNA, 25 bp, Homo sapien
acggtgtccacactgccgctgaagt

SEQ ID NO: 4826424 - DNA, 25 bp, Homo sapien
tctgagctcccaacagtaagaggtg

SEQ ID NO: 4826425 - DNA, 25 bp, Homo sapien
aaatcttgctttgtgagttgccacg

SEQ ID NO: 4826426 - DNA, 25 bp, Homo sapien
caaactggatttgagcgactggaaa

SEQ ID NO: 4826427 - DNA, 25 bp, Homo sapien
gacagacggtgaagtcgctctgccc

SEQ ID NO: 4826428 - DNA, 25 bp, Homo sapien
ctttatatgtataatcacaccaaag

SEQ ID NO: 4826429 - DNA, 25 bp, Homo sapien
cgaaattccagcatgaataactcac

SEQ ID NO: 4826430 - DNA, 25 bp, Homo sapien
tattcaagctccaatgaataagcca

SEQ ID NO: 4826431 - DNA, 25 bp, Homo sapien
ccccacagagatcacgaaattccag

SEQ ID NO: 4826432 - DNA, 25 bp, Homo sapien
tgatgctttcgcacatgcaacttgg

SEQ ID NO: 4826433 - DNA, 25 bp, Homo sapien
gctttcgcacatgcaacttggccat

SEQ ID NO: 4826434 - DNA, 25 bp, Homo sapien
tgtccatgatgctttcgcacatgca

SEQ ID NO: 4826435 - DNA, 25 bp, Homo sapien
gctttgtccatgatgctttcgcaca

SEQ ID NO: 4826436 - DNA, 25 bp, Homo sapien
aggaagaggtctgaaacaccccaca

SEQ ID NO: 4826437 - DNA, 25 bp, Homo sapien
accccacaccgcacatggcacctgg

SEQ ID NO: 4826438 - DNA, 25 bp, Homo sapien
ccggaggcctcgtcctgcaggaaga

SEQ ID NO: 4826439 - DNA, 25 bp, Homo sapien
catggcacctggacagaggcatgag

SEQ ID NO: 4826440 - DNA, 25 bp, Homo sapien
cagctgctctccgccatatcgatca

SEQ ID NO: 4826441 - DNA, 25 bp, Homo sapien
ccacacagctgctctccgccatatc

SEQ ID NO: 4826442 - DNA, 25 bp, Homo sapien
cacagctgctctccgccatatcgat

SEQ ID NO: 4826443 - DNA, 25 bp, Homo sapien
acacagctgctctccgccatatcga

SEQ ID NO: 4826444 - DNA, 25 bp, Homo sapien
gaagcttcggaagacggcaaacgtc

SEQ ID NO: 4826445 - DNA, 25 bp, Homo sapien
tcaaaggagacgtgaagagcaaagc

SEQ ID NO: 4826446 - DNA, 25 bp, Homo sapien
tcctggatgaggtgacaacgattcc

SEQ ID NO: 4826447 - DNA, 25 bp, Homo sapien
tcgcagcatgttcgaggacgccaga

SEQ ID NO: 4826448 - DNA, 25 bp, Homo sapien
ttagatcacagcaggagcaggtcgg

SEQ ID NO: 4826449 - DNA, 25 bp, Homo sapien
tcacagcaggagcaggtcggagcag

SEQ ID NO: 4826450 - DNA, 25 bp, Homo sapien
agatcacagcaggagcaggtcggag

SEQ ID NO: 4826451 - DNA, 25 bp, Homo sapien
atcacagcaggagcaggtcggagca

SEQ ID NO: 4826452 - DNA, 25 bp, Homo sapien
gtctacagagtaatataacttcttg

SEQ ID NO: 4826453 - DNA, 25 bp, Homo sapien
tttccagatgtggacattaatgcag

SEQ ID NO: 4826454 - DNA, 25 bp, Homo sapien
gtttccagatgtggacattaatgca

SEQ ID NO: 4826455 - DNA, 25 bp, Homo sapien
aaatcaatgtctacagagtaatata

SEQ ID NO: 4826456 - DNA, 25 bp, Homo sapien
gagaataatgggcaccgagcaccct

SEQ ID NO: 4826457 - DNA, 25 bp, Homo sapien
agagaataacgagcgcctggcaccg

SEQ ID NO: 4826458 - DNA, 25 bp, Homo sapien
caccgcacctggagaataacaggca

SEQ ID NO: 4826459 - DNA, 25 bp, Homo sapien
tacctggagagtaaccggcacctgg

SEQ ID NO: 4826460 - DNA, 25 bp, Homo sapien
ccgacctggagaataacgggcgcct

SEQ ID NO: 4826461 - DNA, 25 bp, Homo sapien
ccacctggagaataacgggcgcctg

SEQ ID NO: 4826462 - DNA, 25 bp, Homo sapien
gggcgcctgacacccgacctggaga

SEQ ID NO: 4826463 - DNA, 25 bp, Homo sapien
ctggagaataacgggcgcctggtac

SEQ ID NO: 4826464 - DNA, 25 bp, Homo sapien
aagccggatggaagatgttgacgcc

SEQ ID NO: 4826465 - DNA, 25 bp, Homo sapien
tatgagctctggaaggcgaacagct

SEQ ID NO: 4826466 - DNA, 25 bp, Homo sapien
tgctccttgaatcataagccggatg

SEQ ID NO: 4826467 - DNA, 25 bp, Homo sapien
gatgcgctaacttgcgccgtcctgg

SEQ ID NO: 4826468 - DNA, 25 bp, Homo sapien
gatttaggagtacaacagaagccaa

SEQ ID NO: 4826469 - DNA, 25 bp, Homo sapien
atgctgtcattccttagggccacgg

SEQ ID NO: 4826470 - DNA, 25 bp, Homo sapien
taacgtccatgccttaatgctgtca

SEQ ID NO: 4826471 - DNA, 25 bp, Homo sapien
tgacaacgggatgcgtcacaggcag

SEQ ID NO: 4826472 - DNA, 25 bp, Homo sapien
tgaggctgtgaacccactcgtggtg

SEQ ID NO: 4826473 - DNA, 25 bp, Homo sapien
gaggctgtgaatccactcgcggtga

SEQ ID NO: 4826474 - DNA, 25 bp, Homo sapien
tgtgaacccgcttgctgtgacacgc

SEQ ID NO: 4826475 - DNA, 25 bp, Homo sapien
tgaggctgtgaacccgcttgctgtg

SEQ ID NO: 4826476 - DNA, 25 bp, Homo sapien
ccgagaaactgacaaatagttgatg

SEQ ID NO: 4826477 - DNA, 25 bp, Homo sapien
tgacactgagtctcaatgaggttcc

SEQ ID NO: 4826478 - DNA, 25 bp, Homo sapien
caaatagttgatgtaatatgacact

SEQ ID NO: 4826479 - DNA, 25 bp, Homo sapien
tgaggttcctcacacaacttgattt

SEQ ID NO: 4826480 - DNA, 25 bp, Homo sapien
cacggaaaccgagctgaacatgcat

SEQ ID NO: 4826481 - DNA, 25 bp, Homo sapien
aactgagccgaccacgcacattgag

SEQ ID NO: 4826482 - DNA, 25 bp, Homo sapien
gagccgaacacgtgcagcgagctga

SEQ ID NO: 4826483 - DNA, 25 bp, Homo sapien
ataccgagccgaccatgcacaatga

SEQ ID NO: 4826484 - DNA, 25 bp, Homo sapien
tgttacactgaattgcctgaggaag

SEQ ID NO: 4826485 - DNA, 25 bp, Homo sapien
tcagtggaatgagccgtgaaaactc

SEQ ID NO: 4826486 - DNA, 25 bp, Homo sapien
gaaatattgctacctgggagctacc

SEQ ID NO: 4826487 - DNA, 25 bp, Homo sapien
agatgccacgagtggagaggcccac

SEQ ID NO: 4826488 - DNA, 25 bp, Homo sapien
gctccccattgctgaaccacattag

SEQ ID NO: 4826489 - DNA, 25 bp, Homo sapien
acattagccagctacgttgttgcat

SEQ ID NO: 4826490 - DNA, 25 bp, Homo sapien
caacacagtgctccccattgctgaa

SEQ ID NO: 4826491 - DNA, 25 bp, Homo sapien
ggattttaaccagccgtgatgagcc

SEQ ID NO: 4826492 - DNA, 25 bp, Homo sapien
gtgccggcgctgaatctcatccaca

SEQ ID NO: 4826493 - DNA, 25 bp, Homo sapien
tgctcagtgcttgtcggcaattgtg

SEQ ID NO: 4826494 - DNA, 25 bp, Homo sapien
gaaaagcagccatcggaacacaggc

SEQ ID NO: 4826495 - DNA, 25 bp, Homo sapien
tgatcctggagccaacggtgctcag

SEQ ID NO: 4826496 - DNA, 25 bp, Homo sapien
caccagcacgcggtataggctcatt

SEQ ID NO: 4826497 - DNA, 25 bp, Homo sapien
tgtctgtgtcagtgccgtgtgagct

SEQ ID NO: 4826498 - DNA, 25 bp, Homo sapien
gccacgtagtgagctgggacttgca

SEQ ID NO: 4826499 - DNA, 25 bp, Homo sapien
ggcgggggctcatgccattcccaac

SEQ ID NO: 4826500 - DNA, 25 bp, Homo sapien
ggaaaagacagtttcgctgtcttct

SEQ ID NO: 4826501 - DNA, 25 bp, Homo sapien
ggagcagccgcagcgtcggcatcca

SEQ ID NO: 4826502 - DNA, 25 bp, Homo sapien
ggagatctccccttctgatttaatc

SEQ ID NO: 4826503 - DNA, 25 bp, Homo sapien
gatggaatatgcctgcttgacattc

SEQ ID NO: 4826504 - DNA, 25 bp, Homo sapien
cagacagagatgttctttaggtaac

SEQ ID NO: 4826505 - DNA, 25 bp, Homo sapien
tagatcgacaagagatggatccaga

SEQ ID NO: 4826506 - DNA, 25 bp, Homo sapien
tttccacctgccactcgagttctag

SEQ ID NO: 4826507 - DNA, 25 bp, Homo sapien
acaggaaggtgtctatgtaaactgc

SEQ ID NO: 4826508 - DNA, 25 bp, Homo sapien
gggtgacgaggagcttcccatcgtc

SEQ ID NO: 4826509 - DNA, 25 bp, Homo sapien
atcgtcgtgtcgtgttcggctccgg

SEQ ID NO: 4826510 - DNA, 25 bp, Homo sapien
ccatcgtcgtgtcgtgttcggctcc

SEQ ID NO: 4826511 - DNA, 25 bp, Homo sapien
tgacgaggagcttcccatcgtcgtg

SEQ ID NO: 4826512 - DNA, 25 bp, Homo sapien
tctcccaggtggaccatcaggtgtg

SEQ ID NO: 4826513 - DNA, 25 bp, Homo sapien
cctctgctccagggcgtctggcgag

SEQ ID NO: 4826514 - DNA, 25 bp, Homo sapien
tctggcgagtcgaggtaggcgagca

SEQ ID NO: 4826515 - DNA, 25 bp, Homo sapien
acctgcacggctggccgctgccgac

SEQ ID NO: 4826516 - DNA, 25 bp, Homo sapien
gtgttgggttttccaagacaggtca

SEQ ID NO: 4826517 - DNA, 25 bp, Homo sapien
gggtcccaaggagatgaaattgctg

SEQ ID NO: 4826518 - DNA, 25 bp, Homo sapien
gctgggtcccaaggagatgaaattg

SEQ ID NO: 4826519 - DNA, 25 bp, Homo sapien
ttccaagacaggtcaaagagacggt

SEQ ID NO: 4826520 - DNA, 25 bp, Homo sapien
tacttggtgctagccacgttgtctg

SEQ ID NO: 4826521 - DNA, 25 bp, Homo sapien
gaagctttgattatgcagagccagc

SEQ ID NO: 4826522 - DNA, 25 bp, Homo sapien
ctagatctgagtgccctatgttgtc

SEQ ID NO: 4826523 - DNA, 25 bp, Homo sapien
gtggccctcacgaaggaagctttga

SEQ ID NO: 4826524 - DNA, 25 bp, Homo sapien
caccgatagcgggacatcagctcgg

SEQ ID NO: 4826525 - DNA, 25 bp, Homo sapien
tatttggtgcaccagtccaatagga

SEQ ID NO: 4826526 - DNA, 25 bp, Homo sapien
cgagaggctccatgcagcaatggga

SEQ ID NO: 4826527 - DNA, 25 bp, Homo sapien
gctatggactgaattacgcacaccc

SEQ ID NO: 4826528 - DNA, 25 bp, Homo sapien
tgacccgggctgtgaatactagaaa

SEQ ID NO: 4826529 - DNA, 25 bp, Homo sapien
gagcaaggctgtaagttgcagccca

SEQ ID NO: 4826530 - DNA, 25 bp, Homo sapien
taactttaggaatcacccatcgtag

SEQ ID NO: 4826531 - DNA, 25 bp, Homo sapien
gataccaatcgttatagaaagacag

SEQ ID NO: 4826532 - DNA, 25 bp, Homo sapien
ggcatcagccgtgcgggtgtcaggg

SEQ ID NO: 4826533 - DNA, 25 bp, Homo sapien
tgcagaaagtcaccggcccacaggc

SEQ ID NO: 4826534 - DNA, 25 bp, Homo sapien
taccaagagctttccttgcttaatg

SEQ ID NO: 4826535 - DNA, 25 bp, Homo sapien
aggccctctgcgacggggactccgt

SEQ ID NO: 4826536 - DNA, 25 bp, Homo sapien
cagccgaggactccacgttcacact

SEQ ID NO: 4826537 - DNA, 25 bp, Homo sapien
tgagggcctcaggtgccttctacca

SEQ ID NO: 4826538 - DNA, 25 bp, Homo sapien
tcacctcggagtcctacaccaaaca

SEQ ID NO: 4826539 - DNA, 25 bp, Homo sapien
caaacaccaaagctcccaggtggat

SEQ ID NO: 4826540 - DNA, 25 bp, Homo sapien
agacatttgtttcgggcctggagga

SEQ ID NO: 4826541 - DNA, 25 bp, Homo sapien
gacctcagacatttgtttcgggcct

SEQ ID NO: 4826542 - DNA, 25 bp, Homo sapien
cgcagcagtcggaagcttctctgaa

SEQ ID NO: 4826543 - DNA, 25 bp, Homo sapien
acgcacactttccacacgcagcagt

SEQ ID NO: 4826544 - DNA, 25 bp, Homo sapien
gactcaatggtaagtgtgctgccct

SEQ ID NO: 4826545 - DNA, 25 bp, Homo sapien
ggcacacccagtcgacggtaagcat

SEQ ID NO: 4826546 - DNA, 25 bp, Homo sapien
catgcaccacattcgacggtaagtg

SEQ ID NO: 4826547 - DNA, 25 bp, Homo sapien
tacagaccacgaaacacgttaagtg

SEQ ID NO: 4826548 - DNA, 25 bp, Homo sapien
gaggcttatgtccattgcaccacag

SEQ ID NO: 4826549 - DNA, 25 bp, Homo sapien
caggatgacgtcagcagaatgatgg

SEQ ID NO: 4826550 - DNA, 25 bp, Homo sapien
tggagacaacacctgattccaggat

SEQ ID NO: 4826551 - DNA, 25 bp, Homo sapien
atggtgtcactcagcccgaggctta

SEQ ID NO: 4826552 - DNA, 25 bp, Homo sapien
gatcctcatgtgagcgcaaccaagt

SEQ ID NO: 4826553 - DNA, 25 bp, Homo sapien
ttctcatggccagacggatgcacgg

SEQ ID NO: 4826554 - DNA, 25 bp, Homo sapien
gaacatgactgaacatctaccacgg

SEQ ID NO: 4826555 - DNA, 25 bp, Homo sapien
ttgctccacatgctgggagacggct

SEQ ID NO: 4826556 - DNA, 25 bp, Homo sapien
cttccggctccccgcagagcgtgca

SEQ ID NO: 4826557 - DNA, 25 bp, Homo sapien
gctggctttcactagttccaaacag

SEQ ID NO: 4826558 - DNA, 25 bp, Homo sapien
tgtgtcccgagttccccaaggctga

SEQ ID NO: 4826559 - DNA, 25 bp, Homo sapien
gctgaaagcagacctcgaaatcaaa

SEQ ID NO: 4826560 - DNA, 25 bp, Homo sapien
tccagttaattcagagtccccgcta

SEQ ID NO: 4826561 - DNA, 25 bp, Homo sapien
agtattcggcttttagagtcacacg

SEQ ID NO: 4826562 - DNA, 25 bp, Homo sapien
ccaatggacacggttgagcttctgt

SEQ ID NO: 4826563 - DNA, 25 bp, Homo sapien
cgagtaagagcctttccaatggaca

SEQ ID NO: 4826564 - DNA, 25 bp, Homo sapien
gagcttctgtgaccctgagtataca

SEQ ID NO: 4826565 - DNA, 25 bp, Homo sapien
aataagggaattaagtgtttcatag

SEQ ID NO: 4826566 - DNA, 25 bp, Homo sapien
tcatagaagttccaagttaacccta

SEQ ID NO: 4826567 - DNA, 25 bp, Homo sapien
catagaagttccaagttaaccctat

SEQ ID NO: 4826568 - DNA, 25 bp, Homo sapien
tctggatgtaatgagcgctgcacac

SEQ ID NO: 4826569 - DNA, 25 bp, Homo sapien
acccacatccgagccgcacacgctg

SEQ ID NO: 4826570 - DNA, 25 bp, Homo sapien
tgtaatgagcgctgcacacccacat

SEQ ID NO: 4826571 - DNA, 25 bp, Homo sapien
gagccgcacacgctgccaccagcct

SEQ ID NO: 4826572 - DNA, 25 bp, Homo sapien
cagaccctcgttaactaaaatgccg

SEQ ID NO: 4826573 - DNA, 25 bp, Homo sapien
aaaatgccgctccattttcacgcca

SEQ ID NO: 4826574 - DNA, 25 bp, Homo sapien
gcatttcaaggatttagttgggctg

SEQ ID NO: 4826575 - DNA, 25 bp, Homo sapien
ggcatccagaccctcgttaactaaa

SEQ ID NO: 4826576 - DNA, 25 bp, Homo sapien
ttatcaggagaggtctctgcaaagc

SEQ ID NO: 4826577 - DNA, 25 bp, Homo sapien
tatcaggagaggtctctgcaaagca

SEQ ID NO: 4826578 - DNA, 25 bp, Homo sapien
attatcaggagaggtctctgcaaag

SEQ ID NO: 4826579 - DNA, 25 bp, Homo sapien
gcaagccattcattatccaagcaga

SEQ ID NO: 4826580 - DNA, 25 bp, Homo sapien
gggagagggcatgtattccaaagta

SEQ ID NO: 4826581 - DNA, 25 bp, Homo sapien
caaagtattcctcgatagctttctc

SEQ ID NO: 4826582 - DNA, 25 bp, Homo sapien
gataacgcattaatgagcaagccat

SEQ ID NO: 4826583 - DNA, 25 bp, Homo sapien
gcactgggaccatgacattgagcca

SEQ ID NO: 4826584 - DNA, 25 bp, Homo sapien
tctgcggtagagcaagcaataaaca

SEQ ID NO: 4826585 - DNA, 25 bp, Homo sapien
tagtaagctacgatgcctcactgag

SEQ ID NO: 4826586 - DNA, 25 bp, Homo sapien
tctggaccatgtgaccgtaaaggaa

SEQ ID NO: 4826587 - DNA, 25 bp, Homo sapien
tactgatgggatcattttaatgggt

SEQ ID NO: 4826588 - DNA, 25 bp, Homo sapien
tctccgtgctgcacctcaattactg

SEQ ID NO: 4826589 - DNA, 25 bp, Homo sapien
taatgggttcctctgaagcaattcc

SEQ ID NO: 4826590 - DNA, 25 bp, Homo sapien
ctgaagcaattccacagccccggat

SEQ ID NO: 4826591 - DNA, 25 bp, Homo sapien
ctgtgttcagacatcatgagcaggt

SEQ ID NO: 4826592 - DNA, 25 bp, Homo sapien
gaaatcctgtgttcagacatcatga

SEQ ID NO: 4826593 - DNA, 25 bp, Homo sapien
gcagagcaattcctgcattcgcggg

SEQ ID NO: 4826594 - DNA, 25 bp, Homo sapien
ccgcagcagagcaattcctgcattc

SEQ ID NO: 4826595 - DNA, 25 bp, Homo sapien
tgaaaaggacatggctcaaggacac

SEQ ID NO: 4826596 - DNA, 25 bp, Homo sapien
ggaagtcgtgcctgcccaaatatct

SEQ ID NO: 4826597 - DNA, 25 bp, Homo sapien
tatttcacgggactgccaagatgag

SEQ ID NO: 4826598 - DNA, 25 bp, Homo sapien
ccaaaggcgcttttgagaggataac

SEQ ID NO: 4826599 - DNA, 25 bp, Homo sapien
gagcacggctgatcttatgtaacag

SEQ ID NO: 4826600 - DNA, 25 bp, Homo sapien
tgcccgggattttcgcaatggaaac

SEQ ID NO: 4826601 - DNA, 25 bp, Homo sapien
catatactacaacaccaaagggagg

SEQ ID NO: 4826602 - DNA, 25 bp, Homo sapien
tttatgctggctaaagagcacggct

SEQ ID NO: 4826603 - DNA, 25 bp, Homo sapien
ctcccagtaccatggattgaataag

SEQ ID NO: 4826604 - DNA, 25 bp, Homo sapien
taattttggcatatggtggaagaaa

SEQ ID NO: 4826605 - DNA, 25 bp, Homo sapien
tgccagttctcccagtaccatggat

SEQ ID NO: 4826606 - DNA, 25 bp, Homo sapien
cagtttctgcacacgtcctgccagt

SEQ ID NO: 4826607 - DNA, 25 bp, Homo sapien
ccaacgtgaggtggggactgatact

SEQ ID NO: 4826608 - DNA, 25 bp, Homo sapien
cgctccaccgcatacacaatgggtt

SEQ ID NO: 4826609 - DNA, 25 bp, Homo sapien
ttccaaaggcacaagcaggacatgg

SEQ ID NO: 4826610 - DNA, 25 bp, Homo sapien
tactggctggtgctgaatccatcaa

SEQ ID NO: 4826611 - DNA, 25 bp, Homo sapien
acacagtcaggacccgcacggtgtt

SEQ ID NO: 4826612 - DNA, 25 bp, Homo sapien
tcaggacccgcacggtgtttccaca

SEQ ID NO: 4826613 - DNA, 25 bp, Homo sapien
cgcggcctttccacacactgtcagg

SEQ ID NO: 4826614 - DNA, 25 bp, Homo sapien
agtcaggacccgcacggtgtttcca

SEQ ID NO: 4826615 - DNA, 25 bp, Homo sapien
agtcaggatccgcacggcctttcca

SEQ ID NO: 4826616 - DNA, 25 bp, Homo sapien
cacagtcaggacctgcacggccttt

SEQ ID NO: 4826617 - DNA, 25 bp, Homo sapien
acggcctttccacacatagtcagga

SEQ ID NO: 4826618 - DNA, 25 bp, Homo sapien
atggcctttccacgcacagtcagga

SEQ ID NO: 4826619 - DNA, 25 bp, Homo sapien
tcctgcgcatctccgtcatgttctg

SEQ ID NO: 4826620 - DNA, 25 bp, Homo sapien
tcattcaccaaccgtcacggtttca

SEQ ID NO: 4826621 - DNA, 25 bp, Homo sapien
ctgttttcccctcgtactttgccat

SEQ ID NO: 4826622 - DNA, 25 bp, Homo sapien
tatcccactgtctgttttcccctcg

SEQ ID NO: 4826623 - DNA, 25 bp, Homo sapien
tgctcgcgggtttgccgaatgaacg

SEQ ID NO: 4826624 - DNA, 25 bp, Homo sapien
tagacacgggcactgtagacacaag

SEQ ID NO: 4826625 - DNA, 25 bp, Homo sapien
tagacacaagggcacaccctgaaga

SEQ ID NO: 4826626 - DNA, 25 bp, Homo sapien
aatgaacgtgcgctgtagacacggg

SEQ ID NO: 4826627 - DNA, 25 bp, Homo sapien
cctgagcacccttgcgactgagatc

SEQ ID NO: 4826628 - DNA, 25 bp, Homo sapien
gccagtctgtggcatcagccagaga

SEQ ID NO: 4826629 - DNA, 25 bp, Homo sapien
gaagagcacacgtcttctgcagtag

SEQ ID NO: 4826630 - DNA, 25 bp, Homo sapien
gatgagtctggccatccactagcca

SEQ ID NO: 4826631 - DNA, 25 bp, Homo sapien
ccagcaataggaatagcagtcactg

SEQ ID NO: 4826632 - DNA, 25 bp, Homo sapien
cagtcactgtacattagacgactcc

SEQ ID NO: 4826633 - DNA, 25 bp, Homo sapien
cctgtgaggcgggaaatatttgctg

SEQ ID NO: 4826634 - DNA, 25 bp, Homo sapien
gtattaatattctcactcaccagca

SEQ ID NO: 4826635 - DNA, 25 bp, Homo sapien
gaccatcatgatcaaacaggagttt

SEQ ID NO: 4826636 - DNA, 25 bp, Homo sapien
gccacacaagagacagaccatcatg

SEQ ID NO: 4826637 - DNA, 25 bp, Homo sapien
aacgaggccaccgatctccatggtg

SEQ ID NO: 4826638 - DNA, 25 bp, Homo sapien
caggagtttggaagctaccggaaga

SEQ ID NO: 4826639 - DNA, 25 bp, Homo sapien
catttgcagttggtggttcgacccc

SEQ ID NO: 4826640 - DNA, 25 bp, Homo sapien
catggtcagggctacacatttgcag

SEQ ID NO: 4826641 - DNA, 25 bp, Homo sapien
tgagaggcgagaaaccgtgttcacg

SEQ ID NO: 4826642 - DNA, 25 bp, Homo sapien
gagcattcccgggtctctgtctgga

SEQ ID NO: 4826643 - DNA, 25 bp, Homo sapien
ccttgcaggctacgtttgtgtgtga

SEQ ID NO: 4826644 - DNA, 25 bp, Homo sapien
tgcaggctacgtttgtgtgtgagaa

SEQ ID NO: 4826645 - DNA, 25 bp, Homo sapien
cttccttgcaggctacgtttgtgtg

SEQ ID NO: 4826646 - DNA, 25 bp, Homo sapien
tgagaagaagacacgggaaaggcac

SEQ ID NO: 4826647 - DNA, 25 bp, Homo sapien
taccctgagctagaagtgattgact

SEQ ID NO: 4826648 - DNA, 25 bp, Homo sapien
gactgttttaacaacttggaggcca

SEQ ID NO: 4826649 - DNA, 25 bp, Homo sapien
ccaaaggacagggaagcatgagtgt

SEQ ID NO: 4826650 - DNA, 25 bp, Homo sapien
atgagtgttgaacccgccgaccaca

SEQ ID NO: 4826651 - DNA, 25 bp, Homo sapien
atgcgccgtgacctttatttttaat

SEQ ID NO: 4826652 - DNA, 25 bp, Homo sapien
catgcgccgtgacctttatttttaa

SEQ ID NO: 4826653 - DNA, 25 bp, Homo sapien
cacgtatgaagccttttccgtcggt

SEQ ID NO: 4826654 - DNA, 25 bp, Homo sapien
gtcggttacgaacagcaactcctca

SEQ ID NO: 4826655 - DNA, 25 bp, Homo sapien
ggttaaatgtccttcacggtctctg

SEQ ID NO: 4826656 - DNA, 25 bp, Homo sapien
gcttgtccagccgtgttcacgtatg

SEQ ID NO: 4826657 - DNA, 25 bp, Homo sapien
gggtaactgtgcaccaagttctcag

SEQ ID NO: 4826658 - DNA, 25 bp, Homo sapien
gggtaactgagcaccaagttctcag

SEQ ID NO: 4826659 - DNA, 25 bp, Homo sapien
acaggccgcggtaactgtgcaccaa

SEQ ID NO: 4826660 - DNA, 25 bp, Homo sapien
gggtaactgtgcatcaagttctcag

SEQ ID NO: 4826661 - DNA, 25 bp, Homo sapien
gggtaactgtgcaccaagttctcag

SEQ ID NO: 4826662 - DNA, 25 bp, Homo sapien
ggcacaggccggggtaactgcacca

SEQ ID NO: 4826663 - DNA, 25 bp, Homo sapien
cataggccggggtaactgtgcacca

SEQ ID NO: 4826664 - DNA, 25 bp, Homo sapien
agttctcaggggacgggcataggcc

SEQ ID NO: 4826665 - DNA, 25 bp, Homo sapien
ggattcctacaaatatgacctgctc

SEQ ID NO: 4826666 - DNA, 25 bp, Homo sapien
taagcagaggtttataccatttaat

SEQ ID NO: 4826667 - DNA, 25 bp, Homo sapien
cagtggtttgccaaatgtgtgtttg

SEQ ID NO: 4826668 - DNA, 25 bp, Homo sapien
ccaggcacctaaccagtgttcagtg

SEQ ID NO: 4826669 - DNA, 25 bp, Homo sapien
gacagtcctccaaacttggcatgaa

SEQ ID NO: 4826670 - DNA, 25 bp, Homo sapien
tttggctggaaaacccgtgctggga

SEQ ID NO: 4826671 - DNA, 25 bp, Homo sapien
tgtatgcccctaccatttggctgga

SEQ ID NO: 4826672 - DNA, 25 bp, Homo sapien
taggatgtcctaaaacagccctggg

SEQ ID NO: 4826673 - DNA, 25 bp, Homo sapien
ttgcacatcaattatattaatacat

SEQ ID NO: 4826674 - DNA, 25 bp, Homo sapien
ttatattaatacatctctttgttta

SEQ ID NO: 4826675 - DNA, 25 bp, Homo sapien
tgcacatcaattatattaatacatc

SEQ ID NO: 4826676 - DNA, 25 bp, Homo sapien
tcaattatattaatacatctctttg

SEQ ID NO: 4826677 - DNA, 25 bp, Homo sapien
cattaaaccaacgttcagaatctgg

SEQ ID NO: 4826678 - DNA, 25 bp, Homo sapien
tttcattgccgataggacgttttcc

SEQ ID NO: 4826679 - DNA, 25 bp, Homo sapien
acacacgttcaggtgtgtctctggg

SEQ ID NO: 4826680 - DNA, 25 bp, Homo sapien
gatggacacctttgcttacaggagg

SEQ ID NO: 4826681 - DNA, 25 bp, Homo sapien
gctggagctgcctgcgagacgatga

SEQ ID NO: 4826682 - DNA, 25 bp, Homo sapien
tgcgagacgatgagcgtctgcaatc

SEQ ID NO: 4826683 - DNA, 25 bp, Homo sapien
gacgatgagcgtctgcaatctgcat

SEQ ID NO: 4826684 - DNA, 25 bp, Homo sapien
agctgcctgcgagacgatgagcgtc

SEQ ID NO: 4826685 - DNA, 25 bp, Homo sapien
tctgccggccccggaaagctgatgc

SEQ ID NO: 4826686 - DNA, 25 bp, Homo sapien
atgcccggctggaccaagtctccag

SEQ ID NO: 4826687 - DNA, 25 bp, Homo sapien
gctgatgcccggctggaccaagtct

SEQ ID NO: 4826688 - DNA, 25 bp, Homo sapien
ccggaaagctgatgcccggctggac

SEQ ID NO: 4826689 - DNA, 25 bp, Homo sapien
tgtaagcatagctccatgtcaaaag

SEQ ID NO: 4826690 - DNA, 25 bp, Homo sapien
gaagcattgggccttgttcttgtaa

SEQ ID NO: 4826691 - DNA, 25 bp, Homo sapien
gatggcaaatatggcaccagctttg

SEQ ID NO: 4826692 - DNA, 25 bp, Homo sapien
gatgtcagatgtattcaacatttca

SEQ ID NO: 4826693 - DNA, 25 bp, Homo sapien
gaacgtgagcctgcaatgtagacga

SEQ ID NO: 4826694 - DNA, 25 bp, Homo sapien
tgcttgcagcctaactcgaggccac

SEQ ID NO: 4826695 - DNA, 25 bp, Homo sapien
cccgcggtgtagacgatgtgaagct

SEQ ID NO: 4826696 - DNA, 25 bp, Homo sapien
tagacgatgcgaagtcgtggtaacg

SEQ ID NO: 4826697 - DNA, 25 bp, Homo sapien
aaagccatgttgactgaggacaaga

SEQ ID NO: 4826698 - DNA, 25 bp, Homo sapien
agccatgttgactgaggacaagagg

SEQ ID NO: 4826699 - DNA, 25 bp, Homo sapien
gcaaagccatgttgactgaggacaa

SEQ ID NO: 4826700 - DNA, 25 bp, Homo sapien
caaagccatgttgactgaggacaag

SEQ ID NO: 4826701 - DNA, 25 bp, Homo sapien
cctgcctctcctggaccacctccat

SEQ ID NO: 4826702 - DNA, 25 bp, Homo sapien
tttgtccaatacctgcctctcctgg

SEQ ID NO: 4826703 - DNA, 25 bp, Homo sapien
gtttgtccaatacctgcctctcctg

SEQ ID NO: 4826704 - DNA, 25 bp, Homo sapien
atacctgcctctcctggaccacctc

SEQ ID NO: 4826705 - DNA, 25 bp, Homo sapien
aacggcattgaacacccggaagcgc

SEQ ID NO: 4826706 - DNA, 25 bp, Homo sapien
ccggaagcgcggcggaaaccctcag

SEQ ID NO: 4826707 - DNA, 25 bp, Homo sapien
tatgtgacccccaccgtggacttca

SEQ ID NO: 4826708 - DNA, 25 bp, Homo sapien
ctcaggtgcggggaatatgtgaccc

SEQ ID NO: 4826709 - DNA, 25 bp, Homo sapien
tgctgcgtgggcgaccatgagtact

SEQ ID NO: 4826710 - DNA, 25 bp, Homo sapien
ctgcgtgggcgaccatgagtactgc

SEQ ID NO: 4826711 - DNA, 25 bp, Homo sapien
cgctcctcattgaagtgctgcgtgg

SEQ ID NO: 4826712 - DNA, 25 bp, Homo sapien
ctgggcgcgggcgagtagcgctcct

SEQ ID NO: 4826713 - DNA, 25 bp, Homo sapien
tagtgcgagctgtagtgcatccgcg

SEQ ID NO: 4826714 - DNA, 25 bp, Homo sapien
tgaccgtcagcgtagaccaggagct

SEQ ID NO: 4826715 - DNA, 25 bp, Homo sapien
agagcttctgcacggagtgtaccag

SEQ ID NO: 4826716 - DNA, 25 bp, Homo sapien
ttcagcgagctcttgcggtaggcct

SEQ ID NO: 4826717 - DNA, 25 bp, Homo sapien
ccgtgaacacgccaaacaaaatggg

SEQ ID NO: 4826718 - DNA, 25 bp, Homo sapien
gggagtccgaacctcttcatgtcaa

SEQ ID NO: 4826719 - DNA, 25 bp, Homo sapien
gcccgtgaacatgccgaataaaact

SEQ ID NO: 4826720 - DNA, 25 bp, Homo sapien
tgaacacgccgaataaaacagggct

SEQ ID NO: 4826721 - DNA, 25 bp, Homo sapien
ccgtgaacacgccaagcacaacggg

SEQ ID NO: 4826722 - DNA, 25 bp, Homo sapien
aacacgccaagcacaacggggctgc

SEQ ID NO: 4826723 - DNA, 25 bp, Homo sapien
cgccaagcacaacggggctgctgac

SEQ ID NO: 4826724 - DNA, 25 bp, Homo sapien
tgcccgtgaacacgccaagcacaac

SEQ ID NO: 4826725 - DNA, 25 bp, Homo sapien
ccccatggctttaatgtaactccca

SEQ ID NO: 4826726 - DNA, 25 bp, Homo sapien
ccaagcggtctctgtccgatggact

SEQ ID NO: 4826727 - DNA, 25 bp, Homo sapien
tgtccgatggacttcagcagcggct

SEQ ID NO: 4826728 - DNA, 25 bp, Homo sapien
gctctggtaggattgccgactttgg

SEQ ID NO: 4826729 - DNA, 25 bp, Homo sapien
gccactcgtcccacaagctggcact

SEQ ID NO: 4826730 - DNA, 25 bp, Homo sapien
cactcgtcccacaagctggcactga

SEQ ID NO: 4826731 - DNA, 25 bp, Homo sapien
tcagccactcgtcccacaagctggc

SEQ ID NO: 4826732 - DNA, 25 bp, Homo sapien
actcgtcccacaagctggcactgac

SEQ ID NO: 4826733 - DNA, 25 bp, Homo sapien
tggagcctcgtacaggactctgggc

SEQ ID NO: 4826734 - DNA, 25 bp, Homo sapien
aacattgttagtactggagcctcgt

SEQ ID NO: 4826735 - DNA, 25 bp, Homo sapien
tgagttttgccagtgtaaagttctg

SEQ ID NO: 4826736 - DNA, 25 bp, Homo sapien
caactacattgggtgatggtgtgag

SEQ ID NO: 4826737 - DNA, 25 bp, Homo sapien
tctgaatccatgtcgataacggcca

SEQ ID NO: 4826738 - DNA, 25 bp, Homo sapien
gataacggccatatgtgaacagtgt

SEQ ID NO: 4826739 - DNA, 25 bp, Homo sapien
ccatgtcgataacggccatatgtga

SEQ ID NO: 4826740 - DNA, 25 bp, Homo sapien
gatttctgaatccatgtcgataacg

SEQ ID NO: 4826741 - DNA, 25 bp, Homo sapien
caatgtggctggtaattccgtgttc

SEQ ID NO: 4826742 - DNA, 25 bp, Homo sapien
tgcctgtggtaccagcagcactgac

SEQ ID NO: 4826743 - DNA, 25 bp, Homo sapien
gtccgccgggtgtctgtggtcatat

SEQ ID NO: 4826744 - DNA, 25 bp, Homo sapien
gggtccaagccgtcaatggcagctg

SEQ ID NO: 4826745 - DNA, 25 bp, Homo sapien
ctgattctagggcacttccaagaag

SEQ ID NO: 4826746 - DNA, 25 bp, Homo sapien
gacctgctgattctagggcacttcc

SEQ ID NO: 4826747 - DNA, 25 bp, Homo sapien
acctgctgattctagggcacttcca

SEQ ID NO: 4826748 - DNA, 25 bp, Homo sapien
ggacctgctgattctagggcacttc

SEQ ID NO: 4826749 - DNA, 25 bp, Homo sapien
tgctgacggtgcctccgagatgtga

SEQ ID NO: 4826750 - DNA, 25 bp, Homo sapien
ggcttctgagcagagtccggccttc

SEQ ID NO: 4826751 - DNA, 25 bp, Homo sapien
ccagctggtgagtctatggagcacc

SEQ ID NO: 4826752 - DNA, 25 bp, Homo sapien
gctcttgactgcagaggctcggaaa

SEQ ID NO: 4826753 - DNA, 25 bp, Homo sapien
taagtggtaattcctgcggcatccc

SEQ ID NO: 4826754 - DNA, 25 bp, Homo sapien
gatgttgctccccttagattgtcat

SEQ ID NO: 4826755 - DNA, 25 bp, Homo sapien
tcatccacaaacaggcgagacggaa

SEQ ID NO: 4826756 - DNA, 25 bp, Homo sapien
cgagacggaaagctgtgcaagtgaa

SEQ ID NO: 4826757 - DNA, 25 bp, Homo sapien
cactggtgccaggtcatcgtgcact

SEQ ID NO: 4826758 - DNA, 25 bp, Homo sapien
ttgcgcgctggtgtcaggtcatgat

SEQ ID NO: 4826759 - DNA, 25 bp, Homo sapien
catcgtgcactggtgtcaggtcatt

SEQ ID NO: 4826760 - DNA, 25 bp, Homo sapien
ctggggccacgtcatcgcacactgg

SEQ ID NO: 4826761 - DNA, 25 bp, Homo sapien
cagtgggacgggcagctctgctgca

SEQ ID NO: 4826762 - DNA, 25 bp, Homo sapien
cagatgtggggaccggcaccagcac

SEQ ID NO: 4826763 - DNA, 25 bp, Homo sapien
ctcctctgtggatcccccaggtcga

SEQ ID NO: 4826764 - DNA, 25 bp, Homo sapien
ctgggcagtgggacgggcagctctg

SEQ ID NO: 4826765 - DNA, 25 bp, Homo sapien
agaaaaggcattctgtgagcacccg

SEQ ID NO: 4826766 - DNA, 25 bp, Homo sapien
agaaaggagaaaaggcattctgtga

SEQ ID NO: 4826767 - DNA, 25 bp, Homo sapien
ggagaaaaggcattctgtgagcacc

SEQ ID NO: 4826768 - DNA, 25 bp, Homo sapien
aaggagaaaaggcattctgtgagca

SEQ ID NO: 4826769 - DNA, 25 bp, Homo sapien
gctcagggtgctgacggccctcatg

SEQ ID NO: 4826770 - DNA, 25 bp, Homo sapien
ctctggttccgggagcggaatttcg

SEQ ID NO: 4826771 - DNA, 25 bp, Homo sapien
ggccctcatgtagctctggttccgg

SEQ ID NO: 4826772 - DNA, 25 bp, Homo sapien
caggcacatcgcttgcagcttgcag

SEQ ID NO: 4826773 - DNA, 25 bp, Homo sapien
gagtagccggcttgaatggctcgaa

SEQ ID NO: 4826774 - DNA, 25 bp, Homo sapien
acttcactgaagacggactcgcaca

SEQ ID NO: 4826775 - DNA, 25 bp, Homo sapien
aaacatcccgggaggtcgagggcat

SEQ ID NO: 4826776 - DNA, 25 bp, Homo sapien
cacacggactcgaattgcccattga

SEQ ID NO: 4826777 - DNA, 25 bp, Homo sapien
caagcctaagttcttgcagcgagga

SEQ ID NO: 4826778 - DNA, 25 bp, Homo sapien
cacaaagtgcaatgatagtgccgac

SEQ ID NO: 4826779 - DNA, 25 bp, Homo sapien
gaataccgcagaaaccaagagtcag

SEQ ID NO: 4826780 - DNA, 25 bp, Homo sapien
ggatctgttgcctttctcccgaagc

SEQ ID NO: 4826781 - DNA, 25 bp, Homo sapien
tgtaaaacacaagtctagatgcggg

SEQ ID NO: 4826782 - DNA, 25 bp, Homo sapien
cagggatggcgtcttcatgatgcac

SEQ ID NO: 4826783 - DNA, 25 bp, Homo sapien
tcctgagcggctgggaagacgttca

SEQ ID NO: 4826784 - DNA, 25 bp, Homo sapien
acaccctgggctttagtttgcaaca

SEQ ID NO: 4826785 - DNA, 25 bp, Homo sapien
gatttatctgcatcacgctcgcctt

SEQ ID NO: 4826786 - DNA, 25 bp, Homo sapien
gcagttcctgatacagatgcacgat

SEQ ID NO: 4826787 - DNA, 25 bp, Homo sapien
gatacagatgcacgatttatctgca

SEQ ID NO: 4826788 - DNA, 25 bp, Homo sapien
tctggcttacatatgcagttcctga

SEQ ID NO: 4826789 - DNA, 25 bp, Homo sapien
tgggaggcagattcaacagtacttc

SEQ ID NO: 4826790 - DNA, 25 bp, Homo sapien
ggcagattcaacagtacttccatct

SEQ ID NO: 4826791 - DNA, 25 bp, Homo sapien
ttcaacagtacttccatctccacaa

SEQ ID NO: 4826792 - DNA, 25 bp, Homo sapien
gattcaacagtacttccatctccac

SEQ ID NO: 4826793 - DNA, 25 bp, Homo sapien
cttcattcggttgggctcagggcac

SEQ ID NO: 4826794 - DNA, 25 bp, Homo sapien
caagtggacgtgaccatggctgctg

SEQ ID NO: 4826795 - DNA, 25 bp, Homo sapien
ggccagcgcttcattcggttgggct

SEQ ID NO: 4826796 - DNA, 25 bp, Homo sapien
tgctctctgcaggaacctcgggatt

SEQ ID NO: 4826797 - DNA, 25 bp, Homo sapien
ttgcatggggcattctgtaccaccg

SEQ ID NO: 4826798 - DNA, 25 bp, Homo sapien
tcctcccaaactcgagttgcatggg

SEQ ID NO: 4826799 - DNA, 25 bp, Homo sapien
agtctcctcccaaactcgagttgca

SEQ ID NO: 4826800 - DNA, 25 bp, Homo sapien
ggcattctgtaccaccggctgtaca

SEQ ID NO: 4826801 - DNA, 25 bp, Homo sapien
tcctgggtggattcggtgctgctct

SEQ ID NO: 4826802 - DNA, 25 bp, Homo sapien
tttccagcgcgaggttcatggcctt

SEQ ID NO: 4826803 - DNA, 25 bp, Homo sapien
gggacatcctctgtgcgcggctgtc

SEQ ID NO: 4826804 - DNA, 25 bp, Homo sapien
cttgtcgctggtccgcacagagctg

SEQ ID NO: 4826805 - DNA, 25 bp, Homo sapien
ctgaccttgggtatggctgatgctc

SEQ ID NO: 4826806 - DNA, 25 bp, Homo sapien
atctgaccttgggtatggctgatgc

SEQ ID NO: 4826807 - DNA, 25 bp, Homo sapien
gctgatgctctgggaattcagaatc

SEQ ID NO: 4826808 - DNA, 25 bp, Homo sapien
gaccttgggtatggctgatgctctg

SEQ ID NO: 4826809 - DNA, 25 bp, Homo sapien
gagctgtgatgagacctgtctgtga

SEQ ID NO: 4826810 - DNA, 25 bp, Homo sapien
agacatctgaggaacaggggacttg

SEQ ID NO: 4826811 - DNA, 25 bp, Homo sapien
gaacaggggacttgccgctggcttc

SEQ ID NO: 4826812 - DNA, 25 bp, Homo sapien
catctgaggaacaggggacttgccg

SEQ ID NO: 4826813 - DNA, 25 bp, Homo sapien
gacagagtggtattcccgcagaccg

SEQ ID NO: 4826814 - DNA, 25 bp, Homo sapien
tgtcagaatctgtggccgtttccac

SEQ ID NO: 4826815 - DNA, 25 bp, Homo sapien
cacttgcaccccgacagagtggtat

SEQ ID NO: 4826816 - DNA, 25 bp, Homo sapien
agaccgcggctctccgtgtcagaat

SEQ ID NO: 4826817 - DNA, 25 bp, Homo sapien
gaggtgtccacttgggtccgatagt

SEQ ID NO: 4826818 - DNA, 25 bp, Homo sapien
gccgtgacgctgttagaacgtttaa

SEQ ID NO: 4826819 - DNA, 25 bp, Homo sapien
tgccgctggaaggatgagccgaact

SEQ ID NO: 4826820 - DNA, 25 bp, Homo sapien
tctctaccgtgtcgatggcgggctc

SEQ ID NO: 4826821 - DNA, 25 bp, Homo sapien
ttctccactaatgctgtgatgtgca

SEQ ID NO: 4826822 - DNA, 25 bp, Homo sapien
tttctccactaatgctgtgatgtgc

SEQ ID NO: 4826823 - DNA, 25 bp, Homo sapien
ttttctccactaatgctgtgatgtg

SEQ ID NO: 4826824 - DNA, 25 bp, Homo sapien
tcccttcacttgaataccaaaggga

SEQ ID NO: 4826825 - DNA, 25 bp, Homo sapien
tctttggcataatgccaaggcattt

SEQ ID NO: 4826826 - DNA, 25 bp, Homo sapien
ttcttgtaaagcatgagctggtaac

SEQ ID NO: 4826827 - DNA, 25 bp, Homo sapien
tgtaaagcatgagctggtaacaatt

SEQ ID NO: 4826828 - DNA, 25 bp, Homo sapien
cttgtaaagcatgagctggtaacaa

SEQ ID NO: 4826829 - DNA, 25 bp, Homo sapien
gcaaacgccgtgtgaacgatcggaa

SEQ ID NO: 4826830 - DNA, 25 bp, Homo sapien
tgggtcacgtggaaggcagcatctc

SEQ ID NO: 4826831 - DNA, 25 bp, Homo sapien
atcggaacacggctgtgctgacttg

SEQ ID NO: 4826832 - DNA, 25 bp, Homo sapien
caacattcggcgtccatcgtcacct

SEQ ID NO: 4826833 - DNA, 25 bp, Homo sapien
tgtcagcatgcacaaaaccagagct

SEQ ID NO: 4826834 - DNA, 25 bp, Homo sapien
ccaagttgaggcatatactaacaag

SEQ ID NO: 4826835 - DNA, 25 bp, Homo sapien
ttggcgtcaacttaggcaatgcagt

SEQ ID NO: 4826836 - DNA, 25 bp, Homo sapien
cttgattgagtgacatgcaggtctc

SEQ ID NO: 4826837 - DNA, 25 bp, Homo sapien
tactcacctagtccattgggatgag

SEQ ID NO: 4826838 - DNA, 25 bp, Homo sapien
ccgggtcaccgctactattctgtga

SEQ ID NO: 4826839 - DNA, 25 bp, Homo sapien
tctgcagtgcattcggcacagggcc

SEQ ID NO: 4826840 - DNA, 25 bp, Homo sapien
tcagggagaactggtctagatattc

SEQ ID NO: 4826841 - DNA, 25 bp, Homo sapien
tacttttattaacaataggcagcct

SEQ ID NO: 4826842 - DNA, 25 bp, Homo sapien
aagtcttagcttgggaaggatttct

SEQ ID NO: 4826843 - DNA, 25 bp, Homo sapien
taatgtgactttatgcagaccagca

SEQ ID NO: 4826844 - DNA, 25 bp, Homo sapien
cagcatttctttgggttcactatag

SEQ ID NO: 4826845 - DNA, 25 bp, Homo sapien
ttagttgggttgtatggcaacatct

SEQ ID NO: 4826846 - DNA, 25 bp, Homo sapien
tcttcataggtgcttagcagaggcc

SEQ ID NO: 4826847 - DNA, 25 bp, Homo sapien
tgtatggcaacatcttcataggtgc

SEQ ID NO: 4826848 - DNA, 25 bp, Homo sapien
tgtgctgacaagcatccatgtcttt

SEQ ID NO: 4826849 - DNA, 25 bp, Homo sapien
tgtctgtcgggcatcttaacaccgg

SEQ ID NO: 4826850 - DNA, 25 bp, Homo sapien
tccttggatctgatttaccagccag

SEQ ID NO: 4826851 - DNA, 25 bp, Homo sapien
ggccttgtgccgttcacaaatccac

SEQ ID NO: 4826852 - DNA, 25 bp, Homo sapien
caaatccacttcaagacaggctgct

SEQ ID NO: 4826853 - DNA, 25 bp, Homo sapien
tggccaagctgatgattccacctgc

SEQ ID NO: 4826854 - DNA, 25 bp, Homo sapien
tctctgcagagcacaaatcactaac

SEQ ID NO: 4826855 - DNA, 25 bp, Homo sapien
tcactggctttcagcgtgggccctt

SEQ ID NO: 4826856 - DNA, 25 bp, Homo sapien
gcgtcatctgcgtcttctggccaag

SEQ ID NO: 4826857 - DNA, 25 bp, Homo sapien
aagccaataaaactgctggaatttc

SEQ ID NO: 4826858 - DNA, 25 bp, Homo sapien
acagcactcctgattttaccgagaa

SEQ ID NO: 4826859 - DNA, 25 bp, Homo sapien
agaagctgggcactcccaacagcac

SEQ ID NO: 4826860 - DNA, 25 bp, Homo sapien
tattctgttggcaaagccaataaaa

SEQ ID NO: 4826861 - DNA, 25 bp, Homo sapien
agtagccggccaggtcctgcgacgt

SEQ ID NO: 4826862 - DNA, 25 bp, Homo sapien
tcatcttccagtcgttgagccgcag

SEQ ID NO: 4826863 - DNA, 25 bp, Homo sapien
gctgcagctcgtcgaacttcatgct

SEQ ID NO: 4826864 - DNA, 25 bp, Homo sapien
cgacgtcggcctcggcatggcgctg

SEQ ID NO: 4826865 - DNA, 25 bp, Homo sapien
ggaattctgccggaaggacgccgct

SEQ ID NO: 4826866 - DNA, 25 bp, Homo sapien
tctcgatgctgtccgcgcgctcgga

SEQ ID NO: 4826867 - DNA, 25 bp, Homo sapien
gcttcctggcgttgtctgtcgggca

SEQ ID NO: 4826868 - DNA, 25 bp, Homo sapien
acgccgctcgcttggcggccatgag

SEQ ID NO: 4826869 - DNA, 25 bp, Homo sapien
ggttcagacttgtcatcgcctggga

SEQ ID NO: 4826870 - DNA, 25 bp, Homo sapien
gaagcttgacacaaggagcctcgtg

SEQ ID NO: 4826871 - DNA, 25 bp, Homo sapien
gtaagactctcctctctgcgcgtga

SEQ ID NO: 4826872 - DNA, 25 bp, Homo sapien
caacaaaagcagaagtcgtcctcgc

SEQ ID NO: 4826873 - DNA, 25 bp, Homo sapien
gaagaccggtctgaactgtgaaaca

SEQ ID NO: 4826874 - DNA, 25 bp, Homo sapien
gagtcaccaaccctgtgcaatgtag

SEQ ID NO: 4826875 - DNA, 25 bp, Homo sapien
cattccatcaggtctagcagcaggt

SEQ ID NO: 4826876 - DNA, 25 bp, Homo sapien
gagttaaacgtatcagctgccagta

SEQ ID NO: 4826877 - DNA, 25 bp, Homo sapien
gagcgtcctttgtcgtactggcaga

SEQ ID NO: 4826878 - DNA, 25 bp, Homo sapien
tatttcggcccgtgttggagaagcg

SEQ ID NO: 4826879 - DNA, 25 bp, Homo sapien
tatttacaggaggtgaacatcagcg

SEQ ID NO: 4826880 - DNA, 25 bp, Homo sapien
taaggtaccacgatcaagctgggag

SEQ ID NO: 4826881 - DNA, 25 bp, Homo sapien
aaaataacacgagaattcactccaa

SEQ ID NO: 4826882 - DNA, 25 bp, Homo sapien
taactaaatactgtaggatttatta

SEQ ID NO: 4826883 - DNA, 25 bp, Homo sapien
ataaaactctttggtctatataatt

SEQ ID NO: 4826884 - DNA, 25 bp, Homo sapien
ctgagattaaaataacacgagaatt

SEQ ID NO: 4826885 - DNA, 25 bp, Homo sapien
cagttttgtgcatatgactaggtag

SEQ ID NO: 4826886 - DNA, 25 bp, Homo sapien
tgtgcatatgactaggtagttttcc

SEQ ID NO: 4826887 - DNA, 25 bp, Homo sapien
catatgactaggtagttttcctagc

SEQ ID NO: 4826888 - DNA, 25 bp, Homo sapien
tgttcctatctcccacctgttgatg

SEQ ID NO: 4826889 - DNA, 25 bp, Homo sapien
agtttgctgagactcttcactgtga

SEQ ID NO: 4826890 - DNA, 25 bp, Homo sapien
tatcaagttgagaaagtacccttta

SEQ ID NO: 4826891 - DNA, 25 bp, Homo sapien
gtaccctttattccgagtttgctga

SEQ ID NO: 4826892 - DNA, 25 bp, Homo sapien
tctttttacatatcgttgcgcttga

SEQ ID NO: 4826893 - DNA, 25 bp, Homo sapien
gactgggacagcaggagtgcaacac

SEQ ID NO: 4826894 - DNA, 25 bp, Homo sapien
agcaggagtgcaacacccacaccaa

SEQ ID NO: 4826895 - DNA, 25 bp, Homo sapien
tagagcatgcaagaaattcctacaa

SEQ ID NO: 4826896 - DNA, 25 bp, Homo sapien
gccttgacccctgagtttagagcat

SEQ ID NO: 4826897 - DNA, 25 bp, Homo sapien
cacagacaaggatgtgaaacttggg

SEQ ID NO: 4826898 - DNA, 25 bp, Homo sapien
tcagaaaccaagaacagtacttagg

SEQ ID NO: 4826899 - DNA, 25 bp, Homo sapien
gaaacttgggatcagctggtcagaa

SEQ ID NO: 4826900 - DNA, 25 bp, Homo sapien
cccctctcttatgaaataacgagac

SEQ ID NO: 4826901 - DNA, 25 bp, Homo sapien
tgtggcacgaatcctaccaagtggt

SEQ ID NO: 4826902 - DNA, 25 bp, Homo sapien
tctggactcccgcagatcagctgct

SEQ ID NO: 4826903 - DNA, 25 bp, Homo sapien
tgtggcaaagactctacctgaccta

SEQ ID NO: 4826904 - DNA, 25 bp, Homo sapien
aggaccgcggtgcttgcaaacaaca

SEQ ID NO: 4826905 - DNA, 25 bp, Homo sapien
tggctatagtcatgcttagatgtag

SEQ ID NO: 4826906 - DNA, 25 bp, Homo sapien
tagatgtagttacgcactgaaatgc

SEQ ID NO: 4826907 - DNA, 25 bp, Homo sapien
cacctgcacttacacgtagcttggc

SEQ ID NO: 4826908 - DNA, 25 bp, Homo sapien
tacatccaccaagtactagatcttg

SEQ ID NO: 4826909 - DNA, 25 bp, Homo sapien
gagctgagggtatagtcggccttgg

SEQ ID NO: 4826910 - DNA, 25 bp, Homo sapien
atagtcggccttggaccctcgcttt

SEQ ID NO: 4826911 - DNA, 25 bp, Homo sapien
gataactgccttatctccccctcag

SEQ ID NO: 4826912 - DNA, 25 bp, Homo sapien
ctgagggtatagtcggccttggacc

SEQ ID NO: 4826913 - DNA, 25 bp, Homo sapien
ccagtcacgactggccggcctcaaa

SEQ ID NO: 4826914 - DNA, 25 bp, Homo sapien
gtcactgacctcattgccgcccagt

SEQ ID NO: 4826915 - DNA, 25 bp, Homo sapien
cgggctccctgcgcttggcgccgcc

SEQ ID NO: 4826916 - DNA, 25 bp, Homo sapien
tgcaggactcccggcagtcactgac

SEQ ID NO: 4826917 - DNA, 25 bp, Homo sapien
ccggccctcacccgggctccctgag

SEQ ID NO: 4826918 - DNA, 25 bp, Homo sapien
ggccctcacccgggctccctgagcg

SEQ ID NO: 4826919 - DNA, 25 bp, Homo sapien
ctcacccgggctccctgagcgctca

SEQ ID NO: 4826920 - DNA, 25 bp, Homo sapien
ccctcacccgggctccctgagcgct

SEQ ID NO: 4826921 - DNA, 25 bp, Homo sapien
cagccggtctgagggaagcgaggtc

SEQ ID NO: 4826922 - DNA, 25 bp, Homo sapien
cacacaggtgagctgaccgtacttg

SEQ ID NO: 4826923 - DNA, 25 bp, Homo sapien
agctgaccgtacttgcccagccggt

SEQ ID NO: 4826924 - DNA, 25 bp, Homo sapien
ctaactcggtgaccagtggaggcca

SEQ ID NO: 4826925 - DNA, 25 bp, Homo sapien
gggccctacactgtgtcttgtctaa

SEQ ID NO: 4826926 - DNA, 25 bp, Homo sapien
cagcggtccctgggattgtcacgta

SEQ ID NO: 4826927 - DNA, 25 bp, Homo sapien
cgggccctacactgtgtcttgtcta

SEQ ID NO: 4826928 - DNA, 25 bp, Homo sapien
aggaaatgaagtcagtgcagcggtc

SEQ ID NO: 4826929 - DNA, 25 bp, Homo sapien
tctggccaccaaagaacggtaagtg

SEQ ID NO: 4826930 - DNA, 25 bp, Homo sapien
caggtaaagggcgtgctcatctcca

SEQ ID NO: 4826931 - DNA, 25 bp, Homo sapien
ccgttgctgtcgtgatgtgaaacca

SEQ ID NO: 4826932 - DNA, 25 bp, Homo sapien
tcatctccaggagcaacgtggtcat

SEQ ID NO: 4826933 - DNA, 25 bp, Homo sapien
ggcaggagtgatttgttatgcttat

SEQ ID NO: 4826934 - DNA, 25 bp, Homo sapien
cccgaaggcaggagtgatttgttat

SEQ ID NO: 4826935 - DNA, 25 bp, Homo sapien
caggagtgatttgttatgcttattt

SEQ ID NO: 4826936 - DNA, 25 bp, Homo sapien
gaaggcaggagtgatttgttatgct

SEQ ID NO: 4826937 - DNA, 25 bp, Homo sapien
cacagtatctgacacccggctggtg

SEQ ID NO: 4826938 - DNA, 25 bp, Homo sapien
cacaagttcctccttgagttcccag

SEQ ID NO: 4826939 - DNA, 25 bp, Homo sapien
tctggtgccagatggggccaacctc

SEQ ID NO: 4826940 - DNA, 25 bp, Homo sapien
ggtggttatgcatgaacagtctgta

SEQ ID NO: 4826941 - DNA, 25 bp, Homo sapien
gaaatacgaagaataagccactgtg

SEQ ID NO: 4826942 - DNA, 25 bp, Homo sapien
tcaaaataaaatctcgctgagtctg

SEQ ID NO: 4826943 - DNA, 25 bp, Homo sapien
ctttatacagttaacatgagcaggg

SEQ ID NO: 4826944 - DNA, 25 bp, Homo sapien
tagaactatgtagacatactggccc

SEQ ID NO: 4826945 - DNA, 25 bp, Homo sapien
ccaccacatgtggtaggttagaacc

SEQ ID NO: 4826946 - DNA, 25 bp, Homo sapien
tccaaaacagagactcggaccagcc

SEQ ID NO: 4826947 - DNA, 25 bp, Homo sapien
taggttagaaccatgcggcagtgaa

SEQ ID NO: 4826948 - DNA, 25 bp, Homo sapien
catgtgaatcatcagccactggttg

SEQ ID NO: 4826949 - DNA, 25 bp, Homo sapien
cagagccagtccgacaaggaacagt

SEQ ID NO: 4826950 - DNA, 25 bp, Homo sapien
tatggattaatgattagcgtaagca

SEQ ID NO: 4826951 - DNA, 25 bp, Homo sapien
gagtcttcttatgggtccaatatgg

SEQ ID NO: 4826952 - DNA, 25 bp, Homo sapien
tgaggcagatacaggctgctgacca

SEQ ID NO: 4826953 - DNA, 25 bp, Homo sapien
gcagcagctgcccgttgccttctgg

SEQ ID NO: 4826954 - DNA, 25 bp, Homo sapien
atggcctcttcttccgcagcagctg

SEQ ID NO: 4826955 - DNA, 25 bp, Homo sapien
gctcttggcttctggctgtgcgaag

SEQ ID NO: 4826956 - DNA, 25 bp, Homo sapien
ccgttgccttctggcctgctcttgg

SEQ ID NO: 4826957 - DNA, 25 bp, Homo sapien
tcctagatgcttgacacggtccggc

SEQ ID NO: 4826958 - DNA, 25 bp, Homo sapien
ttcccagaatcggtgtgccagctct

SEQ ID NO: 4826959 - DNA, 25 bp, Homo sapien
gagcctgccagacagtcataaaatt

SEQ ID NO: 4826960 - DNA, 25 bp, Homo sapien
gtccggcgcggctaaactgacagag

SEQ ID NO: 4826961 - DNA, 25 bp, Homo sapien
gggttaaactccaaggcgtctctgc

SEQ ID NO: 4826962 - DNA, 25 bp, Homo sapien
tgtgcagctggaaagagtcaacgct

SEQ ID NO: 4826963 - DNA, 25 bp, Homo sapien
gaccctgcagtcgagcatctctgag

SEQ ID NO: 4826964 - DNA, 25 bp, Homo sapien
gaggaacaccaaccacagaattagg

SEQ ID NO: 4826965 - DNA, 25 bp, Homo sapien
ggactcatcatcaggcagctcattg

SEQ ID NO: 4826966 - DNA, 25 bp, Homo sapien
atcatcaggcagctcattgccaggg

SEQ ID NO: 4826967 - DNA, 25 bp, Homo sapien
cttgggactcatcatcaggcagctc

SEQ ID NO: 4826968 - DNA, 25 bp, Homo sapien
catcatcaggcagctcattgccagg

SEQ ID NO: 4826969 - DNA, 25 bp, Homo sapien
catgattctcacgagcagccgacgt

SEQ ID NO: 4826970 - DNA, 25 bp, Homo sapien
caaaacactgttccgagagttccat

SEQ ID NO: 4826971 - DNA, 25 bp, Homo sapien
tccacgtacatttcaaaggtgcttg

SEQ ID NO: 4826972 - DNA, 25 bp, Homo sapien
cataaggaacgtaagtcacacatga

SEQ ID NO: 4826973 - DNA, 25 bp, Homo sapien
ggtcaatatagttaaagcaccagca

SEQ ID NO: 4826974 - DNA, 25 bp, Homo sapien
atcacttttagtcaggagtcagaga

SEQ ID NO: 4826975 - DNA, 25 bp, Homo sapien
cctgccaggtgtgaggtttccagtt

SEQ ID NO: 4826976 - DNA, 25 bp, Homo sapien
gcaatcaaaatacaccgctccgggc

SEQ ID NO: 4826977 - DNA, 25 bp, Homo sapien
gaataggttagtttattttgagaga

SEQ ID NO: 4826978 - DNA, 25 bp, Homo sapien
cactatcgaaagagaaagcgcactg

SEQ ID NO: 4826979 - DNA, 25 bp, Homo sapien
tctcaatagaggatgtgaagcacgc

SEQ ID NO: 4826980 - DNA, 25 bp, Homo sapien
gaatgtcgcttgtaccatgctccac

SEQ ID NO: 4826981 - DNA, 25 bp, Homo sapien
aacgcagggccattttctatccggg

SEQ ID NO: 4826982 - DNA, 25 bp, Homo sapien
gacagaagtggaatcaacagtgccc

SEQ ID NO: 4826983 - DNA, 25 bp, Homo sapien
cacttgacacgcacataatggagga

SEQ ID NO: 4826984 - DNA, 25 bp, Homo sapien
gaagagaaccacattcaccgggtgc

SEQ ID NO: 4826985 - DNA, 25 bp, Homo sapien
taaatgccgtgttgaagagcccagc

SEQ ID NO: 4826986 - DNA, 25 bp, Homo sapien
ggtgcgtcctgtctttactgccgaa

SEQ ID NO: 4826987 - DNA, 25 bp, Homo sapien
tgctggcatgtcacacaaaatcacg

SEQ ID NO: 4826988 - DNA, 25 bp, Homo sapien
catgcattcgtgaaagtctgggtgc

SEQ ID NO: 4826989 - DNA, 25 bp, Homo sapien
tgtgacaaggctggacagactcatg

SEQ ID NO: 4826990 - DNA, 25 bp, Homo sapien
tgttacagcgtgtttgagccatgcg

SEQ ID NO: 4826991 - DNA, 25 bp, Homo sapien
aaacagatctggaactctccatggg

SEQ ID NO: 4826992 - DNA, 25 bp, Homo sapien
tcaccatgcaagacgggatgcacag

SEQ ID NO: 4826993 - DNA, 25 bp, Homo sapien
tctgatggcccatgagcaatgagca

SEQ ID NO: 4826994 - DNA, 25 bp, Homo sapien
aaatgtcacactttgtgaaacaatg

SEQ ID NO: 4826995 - DNA, 25 bp, Homo sapien
aaaatgtcacactttgtgaaacaat

SEQ ID NO: 4826996 - DNA, 25 bp, Homo sapien
aatgtcacactttgtgaaacaatgt

SEQ ID NO: 4826997 - DNA, 25 bp, Homo sapien
ttacacaatttgatcatatatcatg

SEQ ID NO: 4826998 - DNA, 25 bp, Homo sapien
tgaaaaatgtatttagcaagaaaga

SEQ ID NO: 4826999 - DNA, 25 bp, Homo sapien
tgtttacacaatttgatcatatatc

SEQ ID NO: 4827000 - DNA, 25 bp, Homo sapien
acacaatttgatcatatatcatgaa

SEQ ID NO: 4827001 - DNA, 25 bp, Homo sapien
tttacccaaggactgcaacccctga

SEQ ID NO: 4827002 - DNA, 25 bp, Homo sapien
aagaacaagttgagctaaggatgcc

SEQ ID NO: 4827003 - DNA, 25 bp, Homo sapien
acaagaacaagttgagctaaggatg

SEQ ID NO: 4827004 - DNA, 25 bp, Homo sapien
gactgcaacccctgaacaagaacaa

SEQ ID NO: 4827005 - DNA, 25 bp, Homo sapien
ttggaggctactgtatttcaagggt

SEQ ID NO: 4827006 - DNA, 25 bp, Homo sapien
ggaggctactgtatttcaagggtag

SEQ ID NO: 4827007 - DNA, 25 bp, Homo sapien
aaatttggaggctactgtatttcaa

SEQ ID NO: 4827008 - DNA, 25 bp, Homo sapien
aaaatttggaggctactgtatttca

SEQ ID NO: 4827009 - DNA, 25 bp, Homo sapien
gaagcctgtaccaaactgtccaaac

SEQ ID NO: 4827010 - DNA, 25 bp, Homo sapien
gttgatgaagatggacacccttgct

SEQ ID NO: 4827011 - DNA, 25 bp, Homo sapien
agaaaaatcacaccaggcgccatgg

SEQ ID NO: 4827012 - DNA, 25 bp, Homo sapien
tgatttgcaaaagcttaaggcctga

SEQ ID NO: 4827013 - DNA, 25 bp, Homo sapien
gcctccacacgcggcctgcaggcag

SEQ ID NO: 4827014 - DNA, 25 bp, Homo sapien
aggcagccgtctggagtcaggggct

SEQ ID NO: 4827015 - DNA, 25 bp, Homo sapien
gcctccacacgcggcctccacacgc

SEQ ID NO: 4827016 - DNA, 25 bp, Homo sapien
cccagaaggtgcctgtgctgttggc

SEQ ID NO: 4827017 - DNA, 25 bp, Homo sapien
ctacgcggactaagggcaaggctct

SEQ ID NO: 4827018 - DNA, 25 bp, Homo sapien
ggtgggccggcttgttgttcatctc

SEQ ID NO: 4827019 - DNA, 25 bp, Homo sapien
cggcttgttgttcatctctccccag

SEQ ID NO: 4827020 - DNA, 25 bp, Homo sapien
ctcagaaacgtgagttcctgcagca

SEQ ID NO: 4827021 - DNA, 25 bp, Homo sapien
caggccgcagtcacggggctgctca

SEQ ID NO: 4827022 - DNA, 25 bp, Homo sapien
ctggcagaggacagacggcgctcca

SEQ ID NO: 4827023 - DNA, 25 bp, Homo sapien
gctgctcaggtgctgcgatgggaga

SEQ ID NO: 4827024 - DNA, 25 bp, Homo sapien
tcacgggacccaggtacagcctggc

SEQ ID NO: 4827025 - DNA, 25 bp, Homo sapien
ggtgggcccgattcagcactggaaa

SEQ ID NO: 4827026 - DNA, 25 bp, Homo sapien
cgtggtgccggatccaggctctaaa

SEQ ID NO: 4827027 - DNA, 25 bp, Homo sapien
tctgttggtgtgcaaaagacccatc

SEQ ID NO: 4827028 - DNA, 25 bp, Homo sapien
ctatgttagacaatccgggtgggcc

SEQ ID NO: 4827029 - DNA, 25 bp, Homo sapien
cgaggtttcacccaaactcattctt

SEQ ID NO: 4827030 - DNA, 25 bp, Homo sapien
cagacaccacctagtaggcaccttc

SEQ ID NO: 4827031 - DNA, 25 bp, Homo sapien
gacgaggtttcacccaaactcattc

SEQ ID NO: 4827032 - DNA, 25 bp, Homo sapien
cccagacaccacctagtaggcacct

SEQ ID NO: 4827033 - DNA, 25 bp, Homo sapien
catgctgtcattggcgggcccagac

SEQ ID NO: 4827034 - DNA, 25 bp, Homo sapien
gagcctgccggtttctcggcagcgc

SEQ ID NO: 4827035 - DNA, 25 bp, Homo sapien
gttccgggcgcccattggccgcaga

SEQ ID NO: 4827036 - DNA, 25 bp, Homo sapien
cattggcgggcccagaccgttccgg

SEQ ID NO: 4827037 - DNA, 25 bp, Homo sapien
ggacgcgacccgcagtcccctgctg

SEQ ID NO: 4827038 - DNA, 25 bp, Homo sapien
gcgacccgcagtcccctgctgttcc

SEQ ID NO: 4827039 - DNA, 25 bp, Homo sapien
ccaggacgcgacccgcagtcccctg

SEQ ID NO: 4827040 - DNA, 25 bp, Homo sapien
acgcgacccgcagtcccctgctgtt

SEQ ID NO: 4827041 - DNA, 25 bp, Homo sapien
tgagaaatcctggaggtctcatctg

SEQ ID NO: 4827042 - DNA, 25 bp, Homo sapien
aactgccgatgttggctgctaaagc

SEQ ID NO: 4827043 - DNA, 25 bp, Homo sapien
tgcatccgtaactgccgatgttggc

SEQ ID NO: 4827044 - DNA, 25 bp, Homo sapien
gtctataaagagttatgcatccgta

SEQ ID NO: 4827045 - DNA, 25 bp, Homo sapien
tctgtctctgcgtctgcctctgtct

SEQ ID NO: 4827046 - DNA, 25 bp, Homo sapien
tctctgcctctgtatctgcctctgc

SEQ ID NO: 4827047 - DNA, 25 bp, Homo sapien
tgtctctctgtctctgcgtctgcct

SEQ ID NO: 4827048 - DNA, 25 bp, Homo sapien
tctctctgcctctgtatctgcctct

SEQ ID NO: 4827049 - DNA, 25 bp, Homo sapien
gcactcgggcctcgagcatcctggg

SEQ ID NO: 4827050 - DNA, 25 bp, Homo sapien
atcgtccactcctccggcctccatg

SEQ ID NO: 4827051 - DNA, 25 bp, Homo sapien
cctggtcggtttcctatcgtccact

SEQ ID NO: 4827052 - DNA, 25 bp, Homo sapien
tgctcagccctgtccggcactcggg

SEQ ID NO: 4827053 - DNA, 25 bp, Homo sapien
gccgaagacccagggacgttccaca

SEQ ID NO: 4827054 - DNA, 25 bp, Homo sapien
cacagtcagtgcttcgggacggcat

SEQ ID NO: 4827055 - DNA, 25 bp, Homo sapien
tgtgctgcaattgtgctgtctgtgc

SEQ ID NO: 4827056 - DNA, 25 bp, Homo sapien
tgtctgtgccgttcaccgtgtgccc

SEQ ID NO: 4827057 - DNA, 25 bp, Homo sapien
cctcaccggcatcgttttcaatggt

SEQ ID NO: 4827058 - DNA, 25 bp, Homo sapien
gacctcaccggcatcgttttcaatg

SEQ ID NO: 4827059 - DNA, 25 bp, Homo sapien
ggacctcaccggcatcgttttcaat

SEQ ID NO: 4827060 - DNA, 25 bp, Homo sapien
caccggcatcgttttcaatggtggg

SEQ ID NO: 4827061 - DNA, 25 bp, Homo sapien
ctcaataggtgtagggctgtcgaca

SEQ ID NO: 4827062 - DNA, 25 bp, Homo sapien
tcaggtggataaacatgcactcaat

SEQ ID NO: 4827063 - DNA, 25 bp, Homo sapien
gcttgtcaccgttcaggtggataaa

SEQ ID NO: 4827064 - DNA, 25 bp, Homo sapien
aaggagagacactgcttgtcaccgt

SEQ ID NO: 4827065 - DNA, 25 bp, Homo sapien
ctctctcagctctgttaagggaagg

SEQ ID NO: 4827066 - DNA, 25 bp, Homo sapien
gcgggaggcaggggctctcgctggt

SEQ ID NO: 4827067 - DNA, 25 bp, Homo sapien
gaggcaggggctctcgctggtccat

SEQ ID NO: 4827068 - DNA, 25 bp, Homo sapien
gggaggcaggggctctcgctggtcc

SEQ ID NO: 4827069 - DNA, 25 bp, Homo sapien
aggagcgggaggcaggggctctcgc

SEQ ID NO: 4827070 - DNA, 25 bp, Homo sapien
tgatccagctacaatctctgagggc

SEQ ID NO: 4827071 - DNA, 25 bp, Homo sapien
tggaaacgtcggtcagtgtccacct

SEQ ID NO: 4827072 - DNA, 25 bp, Homo sapien
gccccggtgactgacttgcttatga

SEQ ID NO: 4827073 - DNA, 25 bp, Homo sapien
catgtgcaacatgtggtccggcagg

SEQ ID NO: 4827074 - DNA, 25 bp, Homo sapien
cataaccacttcttggctctgggtg

SEQ ID NO: 4827075 - DNA, 25 bp, Homo sapien
tctgggtgtcactgcggtttgtagc

SEQ ID NO: 4827076 - DNA, 25 bp, Homo sapien
gtttaactcgggatatgattttctc

SEQ ID NO: 4827077 - DNA, 25 bp, Homo sapien
gcttggaagagcatgtttgattctc

SEQ ID NO: 4827078 - DNA, 25 bp, Homo sapien
atgcgttctcggagccggcacctct

SEQ ID NO: 4827079 - DNA, 25 bp, Homo sapien
tgcatgtcccgtgtgccaggtacag

SEQ ID NO: 4827080 - DNA, 25 bp, Homo sapien
ggtatgaccctgagaagaaccgcat

SEQ ID NO: 4827081 - DNA, 25 bp, Homo sapien
ttggcggcaatgtgtgacacgcaca

SEQ ID NO: 4827082 - DNA, 25 bp, Homo sapien
gggcctgtctgtccgcttctgggat

SEQ ID NO: 4827083 - DNA, 25 bp, Homo sapien
tctcaggggcggatggggcctgtct

SEQ ID NO: 4827084 - DNA, 25 bp, Homo sapien
actgtcaaaatcgaactgttctccc

SEQ ID NO: 4827085 - DNA, 25 bp, Homo sapien
ctccactgtcaaaatcgaactgttc

SEQ ID NO: 4827086 - DNA, 25 bp, Homo sapien
gtgcaggggcttcactggctccagc

SEQ ID NO: 4827087 - DNA, 25 bp, Homo sapien
gggtgcaggggcttcactggctcca

SEQ ID NO: 4827088 - DNA, 25 bp, Homo sapien
gcaggggcttcactggctccagcac

SEQ ID NO: 4827089 - DNA, 25 bp, Homo sapien
ctgtgggtgcaggggcttcactggc

SEQ ID NO: 4827090 - DNA, 25 bp, Homo sapien
ctgaagaaacaccgtgcgagccaag

SEQ ID NO: 4827091 - DNA, 25 bp, Homo sapien
gaagaaacaccgtgcgagccaagag

SEQ ID NO: 4827092 - DNA, 25 bp, Homo sapien
gaaacaccgtgcgagccaagaggaa

SEQ ID NO: 4827093 - DNA, 25 bp, Homo sapien
aacaccgtgcgagccaagaggaacg

SEQ ID NO: 4827094 - DNA, 25 bp, Homo sapien
tggcgctacgcacaaagaaaccatg

SEQ ID NO: 4827095 - DNA, 25 bp, Homo sapien
ccatgcaaacaaccgagaggctgat

SEQ ID NO: 4827096 - DNA, 25 bp, Homo sapien
cagagaggcgggtactatgcacaaa

SEQ ID NO: 4827097 - DNA, 25 bp, Homo sapien
tgctgtgcacaaagaaacgccatgc

SEQ ID NO: 4827098 - DNA, 25 bp, Homo sapien
tggtcctcctggaatggcgtgatgt

SEQ ID NO: 4827099 - DNA, 25 bp, Homo sapien
gacagaatatgggttgactttcatc

SEQ ID NO: 4827100 - DNA, 25 bp, Homo sapien
tcatcgggagcaccagcttagtagg

SEQ ID NO: 4827101 - DNA, 25 bp, Homo sapien
agggcaccgcatagccgcagggtac

SEQ ID NO: 4827102 - DNA, 25 bp, Homo sapien
cagagaattgggctggcgatcttct

SEQ ID NO: 4827103 - DNA, 25 bp, Homo sapien
gaattgggctggcgatcttctgtga

SEQ ID NO: 4827104 - DNA, 25 bp, Homo sapien
tcagagaattgggctggcgatcttc

SEQ ID NO: 4827105 - DNA, 25 bp, Homo sapien
gagaattgggctggcgatcttctgt

SEQ ID NO: 4827106 - DNA, 25 bp, Homo sapien
agtgcgctgtcctctcgaccgactt

SEQ ID NO: 4827107 - DNA, 25 bp, Homo sapien
gtcctctcgaccgacttgatcttca

SEQ ID NO: 4827108 - DNA, 25 bp, Homo sapien
cgggcaagtgcgctgtcctctcgac

SEQ ID NO: 4827109 - DNA, 25 bp, Homo sapien
ccagcgggcaagtgcgctgtcctct

SEQ ID NO: 4827110 - DNA, 25 bp, Homo sapien
tggaaaaatacgctacagaacttat

SEQ ID NO: 4827111 - DNA, 25 bp, Homo sapien
gctctgtttacgttgcagactgctc

SEQ ID NO: 4827112 - DNA, 25 bp, Homo sapien
gaaatctaaacacgaatcattcacg

SEQ ID NO: 4827113 - DNA, 25 bp, Homo sapien
cagactgctctcatttcaaggagtg

SEQ ID NO: 4827114 - DNA, 25 bp, Homo sapien
cctgcaagagaacgtccaaactatg

SEQ ID NO: 4827115 - DNA, 25 bp, Homo sapien
gaggttccactcattgactagcggt

SEQ ID NO: 4827116 - DNA, 25 bp, Homo sapien
tgctgttgtcaagctccagtattac

SEQ ID NO: 4827117 - DNA, 25 bp, Homo sapien
gttacacgcttcacatgaaaatccg

SEQ ID NO: 4827118 - DNA, 25 bp, Homo sapien
tatgaagttgacgttctgacgcaca

SEQ ID NO: 4827119 - DNA, 25 bp, Homo sapien
cacacttctatatggctctctgacg

SEQ ID NO: 4827120 - DNA, 25 bp, Homo sapien
tacaacggtggcacacagacttcca

SEQ ID NO: 4827121 - DNA, 25 bp, Homo sapien
gaaataagaaaagagcccatcagtg

SEQ ID NO: 4827122 - DNA, 25 bp, Homo sapien
gtcatcgtaaattgcttcctctgga

SEQ ID NO: 4827123 - DNA, 25 bp, Homo sapien
tggttcagagtctgagttttccctt

SEQ ID NO: 4827124 - DNA, 25 bp, Homo sapien
tcccttggaacgtcatcgtaaattg

SEQ ID NO: 4827125 - DNA, 25 bp, Homo sapien
gaacgtcatcgtaaattgcttcctc

SEQ ID NO: 4827126 - DNA, 25 bp, Homo sapien
catgaatacagaaaacgtctgggcc

SEQ ID NO: 4827127 - DNA, 25 bp, Homo sapien
gcatcggcctaggtatggatcaacg

SEQ ID NO: 4827128 - DNA, 25 bp, Homo sapien
tgtgtttcctacctctttgccggca

SEQ ID NO: 4827129 - DNA, 25 bp, Homo sapien
cgtctgggccgtccactaaatagtc

SEQ ID NO: 4827130 - DNA, 25 bp, Homo sapien
tcaggttaaaagagccacgtccttc

SEQ ID NO: 4827131 - DNA, 25 bp, Homo sapien
tcgggagattcaccctgggcctggt

SEQ ID NO: 4827132 - DNA, 25 bp, Homo sapien
aatagcggttcctgtgtaggcagcc

SEQ ID NO: 4827133 - DNA, 25 bp, Homo sapien
tgtactttgctggacgtggccgctc

SEQ ID NO: 4827134 - DNA, 25 bp, Homo sapien
gagcggtgctggtatcgactctcca

SEQ ID NO: 4827135 - DNA, 25 bp, Homo sapien
tgtccaggatctgtcaatagcagag

SEQ ID NO: 4827136 - DNA, 25 bp, Homo sapien
cagaacacacggcatgaacggtcac

SEQ ID NO: 4827137 - DNA, 25 bp, Homo sapien
aactcaatcggcactatcagcgctg

SEQ ID NO: 4827138 - DNA, 25 bp, Homo sapien
gagagccccgaactctaaacgagtg

SEQ ID NO: 4827139 - DNA, 25 bp, Homo sapien
catttacctgcaagcacctaggagt

SEQ ID NO: 4827140 - DNA, 25 bp, Homo sapien
ggaatgcccgaagcgaccggataaa

SEQ ID NO: 4827141 - DNA, 25 bp, Homo sapien
taaattaacgaacgccgtgagctcc

SEQ ID NO: 4827142 - DNA, 25 bp, Homo sapien
taatgccactcagtcctacgtgctg

SEQ ID NO: 4827143 - DNA, 25 bp, Homo sapien
tcagtcctacgtgctgaactgaccg

SEQ ID NO: 4827144 - DNA, 25 bp, Homo sapien
tcctacgtgctgaactgaccgaaag

SEQ ID NO: 4827145 - DNA, 25 bp, Homo sapien
tgaccgaaaggaatatttacgtata

SEQ ID NO: 4827146 - DNA, 25 bp, Homo sapien
ctatggaggcattggctgtacagtg

SEQ ID NO: 4827147 - DNA, 25 bp, Homo sapien
tatggaggcattggctgtacagtga

SEQ ID NO: 4827148 - DNA, 25 bp, Homo sapien
ggcattggctgtacagtgagcgtac

SEQ ID NO: 4827149 - DNA, 25 bp, Homo sapien
ggaggcattggctgtacagtgagcg

SEQ ID NO: 4827150 - DNA, 25 bp, Homo sapien
agtgaccaggcagcgccatcgactt

SEQ ID NO: 4827151 - DNA, 25 bp, Homo sapien
tgtcgttggcccttagccccgcgta

SEQ ID NO: 4827152 - DNA, 25 bp, Homo sapien
tcgacttattgtcctcgatgacaat

SEQ ID NO: 4827153 - DNA, 25 bp, Homo sapien
tcgatgacaatcttgtcgttggccc

SEQ ID NO: 4827154 - DNA, 25 bp, Homo sapien
cacaggatcaggcacgtttggacgc

SEQ ID NO: 4827155 - DNA, 25 bp, Homo sapien
gccttgttaaggctcctgggaccca

SEQ ID NO: 4827156 - DNA, 25 bp, Homo sapien
tctgtattccgcacagcagttggca

SEQ ID NO: 4827157 - DNA, 25 bp, Homo sapien
tgaacgttaaatccagtcaccctgg

SEQ ID NO: 4827158 - DNA, 25 bp, Homo sapien
tgcccaagagcggagggtctacagc

SEQ ID NO: 4827159 - DNA, 25 bp, Homo sapien
ggctgggcatcatcctgagagctca

SEQ ID NO: 4827160 - DNA, 25 bp, Homo sapien
taaaactttagaattccatgtgggc

SEQ ID NO: 4827161 - DNA, 25 bp, Homo sapien
cagtcatgccaggtaacttgtcagc

SEQ ID NO: 4827162 - DNA, 25 bp, Homo sapien
actttcaaattcactcgaactccat

SEQ ID NO: 4827163 - DNA, 25 bp, Homo sapien
ttttgtggttgctgcgcaggaagga

SEQ ID NO: 4827164 - DNA, 25 bp, Homo sapien
ttcttgcactccgagtcactctgct

SEQ ID NO: 4827165 - DNA, 25 bp, Homo sapien
cactctgctcttcgtaactttcaaa

SEQ ID NO: 4827166 - DNA, 25 bp, Homo sapien
catagtgctcctttaaacgggttag

SEQ ID NO: 4827167 - DNA, 25 bp, Homo sapien
tgagctgctgaatctccaccacgcc

SEQ ID NO: 4827168 - DNA, 25 bp, Homo sapien
tcatagtgctcctttaaacgggtta

SEQ ID NO: 4827169 - DNA, 25 bp, Homo sapien
tccaccacgcccaccgtgcttgcca

SEQ ID NO: 4827170 - DNA, 25 bp, Homo sapien
ctcttcacggctgccctggtcctct

SEQ ID NO: 4827171 - DNA, 25 bp, Homo sapien
ttcgcggccttcacgagcttctgca

SEQ ID NO: 4827172 - DNA, 25 bp, Homo sapien
gtcctgatgaaggagcggcccctct

SEQ ID NO: 4827173 - DNA, 25 bp, Homo sapien
cctgtgcgatgagagacttggtcct

SEQ ID NO: 4827174 - DNA, 25 bp, Homo sapien
ctgagataaaccctcgggcatcggg

SEQ ID NO: 4827175 - DNA, 25 bp, Homo sapien
ggtgcttgcagtcaacatcaatgaa

SEQ ID NO: 4827176 - DNA, 25 bp, Homo sapien
ctgctgctgagataaaccctcgggc

SEQ ID NO: 4827177 - DNA, 25 bp, Homo sapien
tcaagatggcttccgggtgcttgca

SEQ ID NO: 4827178 - DNA, 25 bp, Homo sapien
aatcctcttaagagcatctacgtag

SEQ ID NO: 4827179 - DNA, 25 bp, Homo sapien
gagcatctacgtagttcttttcact

SEQ ID NO: 4827180 - DNA, 25 bp, Homo sapien
tcttttcactgtcgacaactgaacc

SEQ ID NO: 4827181 - DNA, 25 bp, Homo sapien
ctgaacccagtatatatcttcttac

SEQ ID NO: 4827182 - DNA, 25 bp, Homo sapien
tcatttccacggagtcccactcgga

SEQ ID NO: 4827183 - DNA, 25 bp, Homo sapien
gctggccagcgcgatctgaaatagc

SEQ ID NO: 4827184 - DNA, 25 bp, Homo sapien
gatctctttgactcggtagaacacc

SEQ ID NO: 4827185 - DNA, 25 bp, Homo sapien
gcgagtggcactgcaggatctcttt

SEQ ID NO: 4827186 - DNA, 25 bp, Homo sapien
cctggcctttagagagaactgcaca

SEQ ID NO: 4827187 - DNA, 25 bp, Homo sapien
gcacacttgtcagcttgcaggagat

SEQ ID NO: 4827188 - DNA, 25 bp, Homo sapien
caaaacatcagcctaagaagggaag

SEQ ID NO: 4827189 - DNA, 25 bp, Homo sapien
ttggccagggcattgcaacttcagc

SEQ ID NO: 4827190 - DNA, 25 bp, Homo sapien
tgtgtcacagcatagggccgaaagc

SEQ ID NO: 4827191 - DNA, 25 bp, Homo sapien
taaaatgactcgaaactgccagtgc

SEQ ID NO: 4827192 - DNA, 25 bp, Homo sapien
tgccagtgcagaaaccaccagtggt

SEQ ID NO: 4827193 - DNA, 25 bp, Homo sapien
aagtgttcaggcaagctgttgcaac

SEQ ID NO: 4827194 - DNA, 25 bp, Homo sapien
caaagcatttatagacctcatcaag

SEQ ID NO: 4827195 - DNA, 25 bp, Homo sapien
acatatacaaactatataggaaaac

SEQ ID NO: 4827196 - DNA, 25 bp, Homo sapien
agtacatatacaaactatataggaa

SEQ ID NO: 4827197 - DNA, 25 bp, Homo sapien
gcatttatagacctcatcaagtaca

SEQ ID NO: 4827198 - DNA, 25 bp, Homo sapien
tattcactgtatgcatccagcacca

SEQ ID NO: 4827199 - DNA, 25 bp, Homo sapien
aagaaaagcgggctttgtggcacat

SEQ ID NO: 4827200 - DNA, 25 bp, Homo sapien
gaaattgttcacatattcactgtat

SEQ ID NO: 4827201 - DNA, 25 bp, Homo sapien
ggactgccacggctgtgctgaaatt

SEQ ID NO: 4827202 - DNA, 25 bp, Homo sapien
tcatcatcaggctgtagagcgtggt

SEQ ID NO: 4827203 - DNA, 25 bp, Homo sapien
gcaggaggatgaactgtgggaacct

SEQ ID NO: 4827204 - DNA, 25 bp, Homo sapien
tcaggctgtagagcgtggttcgatc

SEQ ID NO: 4827205 - DNA, 25 bp, Homo sapien
tgggcttcatcatcaggctgtagag

SEQ ID NO: 4827206 - DNA, 25 bp, Homo sapien
ggtatctttcgtttatggctttggc

SEQ ID NO: 4827207 - DNA, 25 bp, Homo sapien
ttcacagcgttgatcagcatctctc

SEQ ID NO: 4827208 - DNA, 25 bp, Homo sapien
gttcaggtatctttcgtttatggct

SEQ ID NO: 4827209 - DNA, 25 bp, Homo sapien
tgcttcacttcacagcgttgatcag

SEQ ID NO: 4827210 - DNA, 25 bp, Homo sapien
ggaatagagttgaagaaaacctctc

SEQ ID NO: 4827211 - DNA, 25 bp, Homo sapien
tggaatagagttgaagaaaacctct

SEQ ID NO: 4827212 - DNA, 25 bp, Homo sapien
ttggaatagagttgaagaaaacctc

SEQ ID NO: 4827213 - DNA, 25 bp, Homo sapien
gaattactccaaacgatccaaaaga

SEQ ID NO: 4827214 - DNA, 25 bp, Homo sapien
attggtgtgactctcccgaaggcct

SEQ ID NO: 4827215 - DNA, 25 bp, Homo sapien
gaactctgggcgaagggaattactc

SEQ ID NO: 4827216 - DNA, 25 bp, Homo sapien
catccaccccggttaagaactctgg

SEQ ID NO: 4827217 - DNA, 25 bp, Homo sapien
ggtcctggatccatttgagggtcta

SEQ ID NO: 4827218 - DNA, 25 bp, Homo sapien
gacaggctgttaaggttttacatac

SEQ ID NO: 4827219 - DNA, 25 bp, Homo sapien
tatgggttctcactatcatgcccag

SEQ ID NO: 4827220 - DNA, 25 bp, Homo sapien
cgtagctcagactatataggtgcat

SEQ ID NO: 4827221 - DNA, 25 bp, Homo sapien
tcagagtactgctgcagacaagtag

SEQ ID NO: 4827222 - DNA, 25 bp, Homo sapien
gtaagcatcaagctgaaatgtagcc

SEQ ID NO: 4827223 - DNA, 25 bp, Homo sapien
tggcaaatgaactgccgccttctgg

SEQ ID NO: 4827224 - DNA, 25 bp, Homo sapien
ccttcagtgaatacgggaaagccca

SEQ ID NO: 4827225 - DNA, 25 bp, Homo sapien
aataatgaatattagatgcaataac

SEQ ID NO: 4827226 - DNA, 25 bp, Homo sapien
gcaataatgaatattagatgcaata

SEQ ID NO: 4827227 - DNA, 25 bp, Homo sapien
taatgaatattagatgcaataactt

SEQ ID NO: 4827228 - DNA, 25 bp, Homo sapien
caataatgaatattagatgcaataa

SEQ ID NO: 4827229 - DNA, 25 bp, Homo sapien
caatggtatgcgatgtagaagtcac

SEQ ID NO: 4827230 - DNA, 25 bp, Homo sapien
tgtttgttctgagaccaagcctcgc

SEQ ID NO: 4827231 - DNA, 25 bp, Homo sapien
aagaaaaacagagtcctcagccccg

SEQ ID NO: 4827232 - DNA, 25 bp, Homo sapien
tgattctaaacctacgctgctgccc

SEQ ID NO: 4827233 - DNA, 25 bp, Homo sapien
catttaacatgaagactcggcgttc

SEQ ID NO: 4827234 - DNA, 25 bp, Homo sapien
tgacggtggcacacattaacacatc

SEQ ID NO: 4827235 - DNA, 25 bp, Homo sapien
tatcatatcatctgatcgaatgagg

SEQ ID NO: 4827236 - DNA, 25 bp, Homo sapien
tctctcctctgtcgttgtaaactgt

SEQ ID NO: 4827237 - DNA, 25 bp, Homo sapien
ccaagagtcaagtgtgtcctggcgc

SEQ ID NO: 4827238 - DNA, 25 bp, Homo sapien
caacttgacacatcgtgtgggccaa

SEQ ID NO: 4827239 - DNA, 25 bp, Homo sapien
ggaagcacctcataacaccagggaa

SEQ ID NO: 4827240 - DNA, 25 bp, Homo sapien
tctatgatcttgtctcccagggcag

SEQ ID NO: 4827241 - DNA, 25 bp, Homo sapien
tggaacgctccacttcagcaagtac

SEQ ID NO: 4827242 - DNA, 25 bp, Homo sapien
tctccggcgggtgaacggcaaggtg

SEQ ID NO: 4827243 - DNA, 25 bp, Homo sapien
ggtttcgcgttagcaaccacggcca

SEQ ID NO: 4827244 - DNA, 25 bp, Homo sapien
tgccatactcgatggcgtccacatg

SEQ ID NO: 4827245 - DNA, 25 bp, Homo sapien
atccagctcaactgtacagaagcac

SEQ ID NO: 4827246 - DNA, 25 bp, Homo sapien
gtgtcttgttacaaatcctcctgta

SEQ ID NO: 4827247 - DNA, 25 bp, Homo sapien
gtaccaaccgccatatccagctcaa

SEQ ID NO: 4827248 - DNA, 25 bp, Homo sapien
ctccagctacctgttcataatgact

SEQ ID NO: 4827249 - DNA, 25 bp, Homo sapien
gcaagaacagtgacccttgccgccc

SEQ ID NO: 4827250 - DNA, 25 bp, Homo sapien
agaacagtgacccttgccgcccaga

SEQ ID NO: 4827251 - DNA, 25 bp, Homo sapien
cttcaaaacgaagttcactcttaca

SEQ ID NO: 4827252 - DNA, 25 bp, Homo sapien
aacgaagttcactcttacaggcata

SEQ ID NO: 4827253 - DNA, 25 bp, Homo sapien
cgcatgtggcatcgccaccactgtg

SEQ ID NO: 4827254 - DNA, 25 bp, Homo sapien
agagccacgcatgtggcatcgccac

SEQ ID NO: 4827255 - DNA, 25 bp, Homo sapien
aacagagccacgcatgtggcatcgc

SEQ ID NO: 4827256 - DNA, 25 bp, Homo sapien
tgtggcatcgccaccactgtgggac

SEQ ID NO: 4827257 - DNA, 25 bp, Homo sapien
tgggctggccgtccacacttaggga

SEQ ID NO: 4827258 - DNA, 25 bp, Homo sapien
cgtgtgcacctttccgtgggctggc

SEQ ID NO: 4827259 - DNA, 25 bp, Homo sapien
tggccgtctgcacttaggacacaga

SEQ ID NO: 4827260 - DNA, 25 bp, Homo sapien
gagtcttctccacgagacttatggg

SEQ ID NO: 4827261 - DNA, 25 bp, Homo sapien
tgggcatccaaacaaggccttgtat

SEQ ID NO: 4827262 - DNA, 25 bp, Homo sapien
gaagtaggaagatcgctcgagccaa

SEQ ID NO: 4827263 - DNA, 25 bp, Homo sapien
gaagatcgctcgagccaaggaagtc

SEQ ID NO: 4827264 - DNA, 25 bp, Homo sapien
taaaattataagtgcaatgttaact

SEQ ID NO: 4827265 - DNA, 25 bp, Homo sapien
tgctttcattcgcaaactttgatga

SEQ ID NO: 4827266 - DNA, 25 bp, Homo sapien
tgtggtaactgatgcctataatgtc

SEQ ID NO: 4827267 - DNA, 25 bp, Homo sapien
tgtaacacaagtataggctggttgt

SEQ ID NO: 4827268 - DNA, 25 bp, Homo sapien
gatgataaactctataaacacaacc

SEQ ID NO: 4827269 - DNA, 25 bp, Homo sapien
catgcaacaagttttgtaaatcttg

SEQ ID NO: 4827270 - DNA, 25 bp, Homo sapien
ggccaattacatttaagtcatgcaa

SEQ ID NO: 4827271 - DNA, 25 bp, Homo sapien
gatacagttgtcctggccccatgta

SEQ ID NO: 4827272 - DNA, 25 bp, Homo sapien
taaatcttgatacagttgtcctggc

SEQ ID NO: 4827273 - DNA, 25 bp, Homo sapien
gcttcccgggaagctgtaactgaat

SEQ ID NO: 4827274 - DNA, 25 bp, Homo sapien
tgtaaacctgatgtccagtcatggg

SEQ ID NO: 4827275 - DNA, 25 bp, Homo sapien
catgggctactgactggtttaagtt

SEQ ID NO: 4827276 - DNA, 25 bp, Homo sapien
gaattctgcagcagtccgcagctct

SEQ ID NO: 4827277 - DNA, 25 bp, Homo sapien
ctgtaaagaacgtcggtcgcccaga

SEQ ID NO: 4827278 - DNA, 25 bp, Homo sapien
gctgtaaagaacgtcggtcgcccag

SEQ ID NO: 4827279 - DNA, 25 bp, Homo sapien
agctgtaaagaacgtcggtcgccca

SEQ ID NO: 4827280 - DNA, 25 bp, Homo sapien
tgtaaagaacgtcggtcgcccagat

SEQ ID NO: 4827281 - DNA, 25 bp, Homo sapien
catctgtaagctgttgacccaggac

SEQ ID NO: 4827282 - DNA, 25 bp, Homo sapien
ctgtaagctgttgacccaggactcc

SEQ ID NO: 4827283 - DNA, 25 bp, Homo sapien
tctgtaagctgttgacccaggactc

SEQ ID NO: 4827284 - DNA, 25 bp, Homo sapien
gccatctgtaagctgttgacccagg

SEQ ID NO: 4827285 - DNA, 25 bp, Homo sapien
gacgaggagaggatgcttctccttt

SEQ ID NO: 4827286 - DNA, 25 bp, Homo sapien
caccatcacgggcatgtgtccgacg

SEQ ID NO: 4827287 - DNA, 25 bp, Homo sapien
tttaatgtgattcccatcgtcttcc

SEQ ID NO: 4827288 - DNA, 25 bp, Homo sapien
tgtgattcccatcgtcttccacaca

SEQ ID NO: 4827289 - DNA, 25 bp, Homo sapien
ggctcctagactacataacgtctta

SEQ ID NO: 4827290 - DNA, 25 bp, Homo sapien
gctaagaggctcctagactacataa

SEQ ID NO: 4827291 - DNA, 25 bp, Homo sapien
ggaataaaatcaaacgctcacatat

SEQ ID NO: 4827292 - DNA, 25 bp, Homo sapien
cacatataaaacagagctaagaggc

SEQ ID NO: 4827293 - DNA, 25 bp, Homo sapien
acaggaaaccatgtgccgtggaaaa

SEQ ID NO: 4827294 - DNA, 25 bp, Homo sapien
aaaccatgtgccgtggaaaatgaat

SEQ ID NO: 4827295 - DNA, 25 bp, Homo sapien
caggaaaccatgtgccgtggaaaat

SEQ ID NO: 4827296 - DNA, 25 bp, Homo sapien
catgtgccgtggaaaatgaatctgg

SEQ ID NO: 4827297 - DNA, 25 bp, Homo sapien
tctcatcacaccgaccatgaacgtt

SEQ ID NO: 4827298 - DNA, 25 bp, Homo sapien
agtctctcatcacaccgaccatgaa

SEQ ID NO: 4827299 - DNA, 25 bp, Homo sapien
tcacaccgaccatgaacgttgattc

SEQ ID NO: 4827300 - DNA, 25 bp, Homo sapien
gaccatgaacgttgattctctgtga

SEQ ID NO: 4827301 - DNA, 25 bp, Homo sapien
taggaacactgaccaagcaggagct

SEQ ID NO: 4827302 - DNA, 25 bp, Homo sapien
tctgcctacctggacggaaaacagt

SEQ ID NO: 4827303 - DNA, 25 bp, Homo sapien
taagtacactctgggatacgccacc

SEQ ID NO: 4827304 - DNA, 25 bp, Homo sapien
tgcaagaaccaggaacgtctactgc

SEQ ID NO: 4827305 - DNA, 25 bp, Homo sapien
gaatctctacaacgagaacacatag

SEQ ID NO: 4827306 - DNA, 25 bp, Homo sapien
cacgcctgccgtggaatttctaaag

SEQ ID NO: 4827307 - DNA, 25 bp, Homo sapien
cagtgtacatgaacttcctgtgtgt

SEQ ID NO: 4827308 - DNA, 25 bp, Homo sapien
ttctaaagtagcattgctgcaacag

SEQ ID NO: 4827309 - DNA, 25 bp, Homo sapien
tctcctcgacgggaacgtacagcat

SEQ ID NO: 4827310 - DNA, 25 bp, Homo sapien
gattccacgttgaagcactcaatga

SEQ ID NO: 4827311 - DNA, 25 bp, Homo sapien
catgcacaggatgcgagattccacg

SEQ ID NO: 4827312 - DNA, 25 bp, Homo sapien
gaaacgagacgatggcaatctgacc

SEQ ID NO: 4827313 - DNA, 25 bp, Homo sapien
gagtgaaaaagtgctgaagtctcac

SEQ ID NO: 4827314 - DNA, 25 bp, Homo sapien
caagccaggctcatgactgtggact

SEQ ID NO: 4827315 - DNA, 25 bp, Homo sapien
gcgtagctggcgactgccccgttga

SEQ ID NO: 4827316 - DNA, 25 bp, Homo sapien
caggccagcgtacaggctctgagac

SEQ ID NO: 4827317 - DNA, 25 bp, Homo sapien
ctcccacaagcagcggcggccagat

SEQ ID NO: 4827318 - DNA, 25 bp, Homo sapien
agagctcccacaagcagcggcggcc

SEQ ID NO: 4827319 - DNA, 25 bp, Homo sapien
ccagagctcccacaagcagcggcgg

SEQ ID NO: 4827320 - DNA, 25 bp, Homo sapien
gcacagctgccaccaacgcggcagg

SEQ ID NO: 4827321 - DNA, 25 bp, Homo sapien
caccaagaacgaagtggcaggctat

SEQ ID NO: 4827322 - DNA, 25 bp, Homo sapien
gctatgcgcttctgcgcaggctgcc

SEQ ID NO: 4827323 - DNA, 25 bp, Homo sapien
agtggcaggctatgcgcttctgcgc

SEQ ID NO: 4827324 - DNA, 25 bp, Homo sapien
ctcccacacggtacgccggacagct

SEQ ID NO: 4827325 - DNA, 25 bp, Homo sapien
tccatcatgagtagacttctaactg

SEQ ID NO: 4827326 - DNA, 25 bp, Homo sapien
ggacgcctaacttgatcactttttg

SEQ ID NO: 4827327 - DNA, 25 bp, Homo sapien
gcccacaacgtgtcttccatcatga

SEQ ID NO: 4827328 - DNA, 25 bp, Homo sapien
gaagacttgacctccggaagccgcc

SEQ ID NO: 4827329 - DNA, 25 bp, Homo sapien
actgtgcccggctagaaggaaattt

SEQ ID NO: 4827330 - DNA, 25 bp, Homo sapien
tagaaggaaatttagccacaggcaa

SEQ ID NO: 4827331 - DNA, 25 bp, Homo sapien
caggcaagaagccttgacttcggca

SEQ ID NO: 4827332 - DNA, 25 bp, Homo sapien
ttgacttcggcaccagaagtcagct

SEQ ID NO: 4827333 - DNA, 25 bp, Homo sapien
tattcatgatccacggcagagcgtc

SEQ ID NO: 4827334 - DNA, 25 bp, Homo sapien
cctttcctggctgaagacggcatta

SEQ ID NO: 4827335 - DNA, 25 bp, Homo sapien
gaagacggcattagcccgcatccca

SEQ ID NO: 4827336 - DNA, 25 bp, Homo sapien
tgtggacctcgcattcctaaccaaa

SEQ ID NO: 4827337 - DNA, 25 bp, Homo sapien
tatgaactgaagcttcacaggatct

SEQ ID NO: 4827338 - DNA, 25 bp, Homo sapien
gcggaacacgaatctcacacacaaa

SEQ ID NO: 4827339 - DNA, 25 bp, Homo sapien
gatcttcacagtctaaactatctgg

SEQ ID NO: 4827340 - DNA, 25 bp, Homo sapien
gacttggttcctaggcagataatcc

SEQ ID NO: 4827341 - DNA, 25 bp, Homo sapien
tgaaaaaggcggagcgtggaccctg

SEQ ID NO: 4827342 - DNA, 25 bp, Homo sapien
acggccatgtgggagatcaccatgc

SEQ ID NO: 4827343 - DNA, 25 bp, Homo sapien
gaggtgaaggcaatccagatcccga

SEQ ID NO: 4827344 - DNA, 25 bp, Homo sapien
cctgcaggtgcttgagagtttccgt

SEQ ID NO: 4827345 - DNA, 25 bp, Homo sapien
ctgaaaccagggtaaccgtgggctg

SEQ ID NO: 4827346 - DNA, 25 bp, Homo sapien
gataaacaccaaggatcctgcaggg

SEQ ID NO: 4827347 - DNA, 25 bp, Homo sapien
taaccgtgggctgcttcgccccgga

SEQ ID NO: 4827348 - DNA, 25 bp, Homo sapien
tggctgctctcggaactctgaaacc

SEQ ID NO: 4827349 - DNA, 25 bp, Homo sapien
tcatcggccgcctggaaactatgag

SEQ ID NO: 4827350 - DNA, 25 bp, Homo sapien
tgggcttgggatggatccatcatcg

SEQ ID NO: 4827351 - DNA, 25 bp, Homo sapien
atggatccatcatcggccgcctgga

SEQ ID NO: 4827352 - DNA, 25 bp, Homo sapien
tgggatggatccatcatcggccgcc

SEQ ID NO: 4827353 - DNA, 25 bp, Homo sapien
tcctttgaacatgcgggacagagca

SEQ ID NO: 4827354 - DNA, 25 bp, Homo sapien
ggtaacgaccgctctaacgaatgtg

SEQ ID NO: 4827355 - DNA, 25 bp, Homo sapien
tcacaacctaaaagctgaggcgccg

SEQ ID NO: 4827356 - DNA, 25 bp, Homo sapien
cggtggagactcagaaaggcgcaat

SEQ ID NO: 4827357 - DNA, 25 bp, Homo sapien
caggctggtgccgaccatcagcaat

SEQ ID NO: 4827358 - DNA, 25 bp, Homo sapien
aggctcgtcaccgacagccgctggt

SEQ ID NO: 4827359 - DNA, 25 bp, Homo sapien
catcagcaatccgtggcagacgagc

SEQ ID NO: 4827360 - DNA, 25 bp, Homo sapien
tgggaatcccttgcagacgtgggac

SEQ ID NO: 4827361 - DNA, 25 bp, Homo sapien
tttcctcagcactatttcagttcta

SEQ ID NO: 4827362 - DNA, 25 bp, Homo sapien
cagcactatttcagttctaatactc

SEQ ID NO: 4827363 - DNA, 25 bp, Homo sapien
tgcataaaataccttcttacttacc

SEQ ID NO: 4827364 - DNA, 25 bp, Homo sapien
tcttacttaccctatggaaatatcc

SEQ ID NO: 4827365 - DNA, 25 bp, Homo sapien
tccttcaggagatcatagatggtgc

SEQ ID NO: 4827366 - DNA, 25 bp, Homo sapien
gccaggacgatgaatttgacaggac

SEQ ID NO: 4827367 - DNA, 25 bp, Homo sapien
caaccagatggctgcgtcagggtca

SEQ ID NO: 4827368 - DNA, 25 bp, Homo sapien
ttctcagcgagacaggatccttcag

SEQ ID NO: 4827369 - DNA, 25 bp, Homo sapien
tcggagcgtgcgtgctaaagcagac

SEQ ID NO: 4827370 - DNA, 25 bp, Homo sapien
tatgatacaataggtctgacgctga

SEQ ID NO: 4827371 - DNA, 25 bp, Homo sapien
tagcaccaggagtcattcggagcgt

SEQ ID NO: 4827372 - DNA, 25 bp, Homo sapien
caggatggcgctcactaagtatgca

SEQ ID NO: 4827373 - DNA, 25 bp, Homo sapien
tactggatcttaagccaatgggtgg

SEQ ID NO: 4827374 - DNA, 25 bp, Homo sapien
tcaggatactggatcttaagccaat

SEQ ID NO: 4827375 - DNA, 25 bp, Homo sapien
ggacttacattcgtcacctctgatt

SEQ ID NO: 4827376 - DNA, 25 bp, Homo sapien
taagccaatgggtggacttacattc

SEQ ID NO: 4827377 - DNA, 25 bp, Homo sapien
ttcataactgcagggacctctagag

SEQ ID NO: 4827378 - DNA, 25 bp, Homo sapien
gcagaggaacatttcatgcctttaa

SEQ ID NO: 4827379 - DNA, 25 bp, Homo sapien
tatggtcaatgaaacttgcagagga

SEQ ID NO: 4827380 - DNA, 25 bp, Homo sapien
tttggaaatggactgtaggcccaat

SEQ ID NO: 4827381 - DNA, 25 bp, Homo sapien
gcacacggggcgttttcgggcgcgc

SEQ ID NO: 4827382 - DNA, 25 bp, Homo sapien
ggagccagcgctccggctccaggct

SEQ ID NO: 4827383 - DNA, 25 bp, Homo sapien
tctccgagcacctgcgagcgggagc

SEQ ID NO: 4827384 - DNA, 25 bp, Homo sapien
ggcccacgtcgccactcgagcccga

SEQ ID NO: 4827385 - DNA, 25 bp, Homo sapien
ctcgccgcggctcctcttcagccgc

SEQ ID NO: 4827386 - DNA, 25 bp, Homo sapien
ccgggacgcgcagccaggcgggtgg

SEQ ID NO: 4827387 - DNA, 25 bp, Homo sapien
ggacgcgcagccaggcgggtgggct

SEQ ID NO: 4827388 - DNA, 25 bp, Homo sapien
gcggctcctcttcagccgccgggcc

SEQ ID NO: 4827389 - DNA, 25 bp, Homo sapien
gaactttaaaatctgacggcggcgc

SEQ ID NO: 4827390 - DNA, 25 bp, Homo sapien
cacacgaggttgttgctggagcaaa

SEQ ID NO: 4827391 - DNA, 25 bp, Homo sapien
ggaatcgggcgaacttctcactcag

SEQ ID NO: 4827392 - DNA, 25 bp, Homo sapien
aatctgaaggcaatggaacgctccc

SEQ ID NO: 4827393 - DNA, 25 bp, Homo sapien
tgacctccggagaagggcagatatc

SEQ ID NO: 4827394 - DNA, 25 bp, Homo sapien
tgtgatcaggaaacccgctgttctc

SEQ ID NO: 4827395 - DNA, 25 bp, Homo sapien
tgcaaacatgtgctggataccaaca

SEQ ID NO: 4827396 - DNA, 25 bp, Homo sapien
gagtcaccaagggaacacatgctga

SEQ ID NO: 4827397 - DNA, 25 bp, Homo sapien
gacaccaagatcttcagctacgctg

SEQ ID NO: 4827398 - DNA, 25 bp, Homo sapien
tccaccaccatcagcgatgttgttt

SEQ ID NO: 4827399 - DNA, 25 bp, Homo sapien
tccgggagatggtctcacagcactg

SEQ ID NO: 4827400 - DNA, 25 bp, Homo sapien
cagaatggacgtggtgtcacacacc

SEQ ID NO: 4827401 - DNA, 25 bp, Homo sapien
caatgtaacggtgacccgaaatgga

SEQ ID NO: 4827402 - DNA, 25 bp, Homo sapien
ggaaaggaccacaatgtaacggtga

SEQ ID NO: 4827403 - DNA, 25 bp, Homo sapien
aagctgtgaagctgcatcggtgaag

SEQ ID NO: 4827404 - DNA, 25 bp, Homo sapien
ccatcctgctgtccagtggtggcca

SEQ ID NO: 4827405 - DNA, 25 bp, Homo sapien
agaaccttgaagctctgatccccag

SEQ ID NO: 4827406 - DNA, 25 bp, Homo sapien
tctggaatcagcttcagccaacagc

SEQ ID NO: 4827407 - DNA, 25 bp, Homo sapien
taaattggcaaacgcttcacggaca

SEQ ID NO: 4827408 - DNA, 25 bp, Homo sapien
gcagatatgagtgccggcagatgca

SEQ ID NO: 4827409 - DNA, 25 bp, Homo sapien
gataaccaggtattgggtgcgccct

SEQ ID NO: 4827410 - DNA, 25 bp, Homo sapien
tcttgaaaagagtccccttatgggc

SEQ ID NO: 4827411 - DNA, 25 bp, Homo sapien
tggctacacaactgcaaggtcacgg

SEQ ID NO: 4827412 - DNA, 25 bp, Homo sapien
ggtcatccgtaattcactgccaggg

SEQ ID NO: 4827413 - DNA, 25 bp, Homo sapien
tggccaaggtcgagccttactccgg

SEQ ID NO: 4827414 - DNA, 25 bp, Homo sapien
tgcaggtctggccaaggtcgagcct

SEQ ID NO: 4827415 - DNA, 25 bp, Homo sapien
ggtctggccaaggtcgagccttact

SEQ ID NO: 4827416 - DNA, 25 bp, Homo sapien
gcctgcaggtctggccaaggtcgag

SEQ ID NO: 4827417 - DNA, 25 bp, Homo sapien
ccgcgggccaccgctggagggcggg

SEQ ID NO: 4827418 - DNA, 25 bp, Homo sapien
gagactgcagggtgtctgcgccggg

SEQ ID NO: 4827419 - DNA, 25 bp, Homo sapien
aagcacagggacgcgccgagactgc

SEQ ID NO: 4827420 - DNA, 25 bp, Homo sapien
ccttccgccgctgaggcgagggact

SEQ ID NO: 4827421 - DNA, 25 bp, Homo sapien
ggtcctcaagccaaacgcgcggttc

SEQ ID NO: 4827422 - DNA, 25 bp, Homo sapien
ctcttccgggcacgcgcgctcctca

SEQ ID NO: 4827423 - DNA, 25 bp, Homo sapien
cctcaagccaaacgcgcggttcggg

SEQ ID NO: 4827424 - DNA, 25 bp, Homo sapien
cgctcctcaggggacgcgagctcct

SEQ ID NO: 4827425 - DNA, 25 bp, Homo sapien
ctcatgaagcagtaggcggcgtcgc

SEQ ID NO: 4827426 - DNA, 25 bp, Homo sapien
ccgctgtaggcgtcggcgaggagca

SEQ ID NO: 4827427 - DNA, 25 bp, Homo sapien
acctcggccacgttgtcgggccgca

SEQ ID NO: 4827428 - DNA, 25 bp, Homo sapien
ccagatagtggtcgctcatgaagca

SEQ ID NO: 4827429 - DNA, 25 bp, Homo sapien
cgaacacggcgggctcgcgcagcac

SEQ ID NO: 4827430 - DNA, 25 bp, Homo sapien
gccgcggccaagaggtgggcgcggc

SEQ ID NO: 4827431 - DNA, 25 bp, Homo sapien
cggccgaacacggcgggctcgcgca

SEQ ID NO: 4827432 - DNA, 25 bp, Homo sapien
ggccgaacacggcgggctcgcgcag

SEQ ID NO: 4827433 - DNA, 25 bp, Homo sapien
tccggccgccgcgtggaagcagtag

SEQ ID NO: 4827434 - DNA, 25 bp, Homo sapien
tggaagcagtagacggccgcgtccc

SEQ ID NO: 4827435 - DNA, 25 bp, Homo sapien
agttgtagaggacgcacaggccgca

SEQ ID NO: 4827436 - DNA, 25 bp, Homo sapien
agccgcgtcagctcgcgccactctc

SEQ ID NO: 4827437 - DNA, 25 bp, Homo sapien
ctggtcggacgggcgcgcgcggccg

SEQ ID NO: 4827438 - DNA, 25 bp, Homo sapien
cccgcgggcgccacgccgcccgcca

SEQ ID NO: 4827439 - DNA, 25 bp, Homo sapien
gtcggacgggcgcgcgcggccgtcg

SEQ ID NO: 4827440 - DNA, 25 bp, Homo sapien
ggcccgcgggcgccacgccgcccgc

SEQ ID NO: 4827441 - DNA, 25 bp, Homo sapien
ggcgctccagctgtccgtggccggg

SEQ ID NO: 4827442 - DNA, 25 bp, Homo sapien
tccagctgtccgtggccgggttgta

SEQ ID NO: 4827443 - DNA, 25 bp, Homo sapien
ctccagctgtccgtggccgggttgt

SEQ ID NO: 4827444 - DNA, 25 bp, Homo sapien
cgctccagctgtccgtggccgggtt

SEQ ID NO: 4827445 - DNA, 25 bp, Homo sapien
gcgagcgcgcctggcgcaggggcct

SEQ ID NO: 4827446 - DNA, 25 bp, Homo sapien
ccacggcgtagaggtgaccgtccag

SEQ ID NO: 4827447 - DNA, 25 bp, Homo sapien
tagaggtgaccgtccagggccagca

SEQ ID NO: 4827448 - DNA, 25 bp, Homo sapien
ccgcccacggcgtagaggtgaccgt

SEQ ID NO: 4827449 - DNA, 25 bp, Homo sapien
ctcatgcgccacggcgaaggcgccc

SEQ ID NO: 4827450 - DNA, 25 bp, Homo sapien
cacgggggcccagcggtcggcgcgc

SEQ ID NO: 4827451 - DNA, 25 bp, Homo sapien
tgcgccacggcgaaggcgccccggg

SEQ ID NO: 4827452 - DNA, 25 bp, Homo sapien
atgcgccacggcgaaggcgccccgg

SEQ ID NO: 4827453 - DNA, 25 bp, Homo sapien
ctgctgcacgggcactcctgccact

SEQ ID NO: 4827454 - DNA, 25 bp, Homo sapien
agcaggcgatagaagagggagcccc

SEQ ID NO: 4827455 - DNA, 25 bp, Homo sapien
cgcgggtcatacttgagcaggcgat

SEQ ID NO: 4827456 - DNA, 25 bp, Homo sapien
tcctgccactcgtcgcgccgcgggt

SEQ ID NO: 4827457 - DNA, 25 bp, Homo sapien
cggctgccgctcagatcgaagcggt

SEQ ID NO: 4827458 - DNA, 25 bp, Homo sapien
cgctcagatcgaagcggtagatgaa

SEQ ID NO: 4827459 - DNA, 25 bp, Homo sapien
tcgaagcggtagatgaagccgtcga

SEQ ID NO: 4827460 - DNA, 25 bp, Homo sapien
cagatcgaagcggtagatgaagccg

SEQ ID NO: 4827461 - DNA, 25 bp, Homo sapien
tggccaggcagtggtatcgggacac

SEQ ID NO: 4827462 - DNA, 25 bp, Homo sapien
ggcaggctggaagcgccaggtgccc

SEQ ID NO: 4827463 - DNA, 25 bp, Homo sapien
ggctcacgcagtagatggcgccgtc

SEQ ID NO: 4827464 - DNA, 25 bp, Homo sapien
gagagcgaacgggatgagcacaccc

SEQ ID NO: 4827465 - DNA, 25 bp, Homo sapien
taaaaggcgtgaccctctctgcgtg

SEQ ID NO: 4827466 - DNA, 25 bp, Homo sapien
tgtaccctgaggctgaccctttgga

SEQ ID NO: 4827467 - DNA, 25 bp, Homo sapien
ttcgaagtgtccaaaccaccagcgt

SEQ ID NO: 4827468 - DNA, 25 bp, Homo sapien
tagttcgcggcgacctacttgaggg

SEQ ID NO: 4827469 - DNA, 25 bp, Homo sapien
tagatagacaagcaccctggtaagt

SEQ ID NO: 4827470 - DNA, 25 bp, Homo sapien
tccacaataggttggccggacatcc

SEQ ID NO: 4827471 - DNA, 25 bp, Homo sapien
tcttacagcagaagtcggtgcctcc

SEQ ID NO: 4827472 - DNA, 25 bp, Homo sapien
tcctcccggatgtggaaaacgtgga

SEQ ID NO: 4827473 - DNA, 25 bp, Homo sapien
ctttctgcgtgatttatttcatctc

SEQ ID NO: 4827474 - DNA, 25 bp, Homo sapien
tacgaggctctgcactatttatgcc

SEQ ID NO: 4827475 - DNA, 25 bp, Homo sapien
gaactgacaaacatacgaggctctg

SEQ ID NO: 4827476 - DNA, 25 bp, Homo sapien
tcatctcggcatgaactgacaaaca

SEQ ID NO: 4827477 - DNA, 25 bp, Homo sapien
ctctgaattccctgttgaaatgcac

SEQ ID NO: 4827478 - DNA, 25 bp, Homo sapien
tctgaattccctgttgaaatgcaca

SEQ ID NO: 4827479 - DNA, 25 bp, Homo sapien
ccaagctgtgatggctaagaggaga

SEQ ID NO: 4827480 - DNA, 25 bp, Homo sapien
taatcagcagcggtagccaggtagt

SEQ ID NO: 4827481 - DNA, 25 bp, Homo sapien
ccaggtagtacatgccgggggcctt

SEQ ID NO: 4827482 - DNA, 25 bp, Homo sapien
ccttgggtgagactgtaagacatgc

SEQ ID NO: 4827483 - DNA, 25 bp, Homo sapien
tgggatgagccacgactgcatctca

SEQ ID NO: 4827484 - DNA, 25 bp, Homo sapien
tgagccacgactgcatctcattcat

SEQ ID NO: 4827485 - DNA, 25 bp, Homo sapien
ccggccgccccgacagtgggatgag

SEQ ID NO: 4827486 - DNA, 25 bp, Homo sapien
gccgccccgacagtgggatgagcca

SEQ ID NO: 4827487 - DNA, 25 bp, Homo sapien
tactaggacgtggtgcattgttgcc

SEQ ID NO: 4827488 - DNA, 25 bp, Homo sapien
gagtaggtccctagtgctctggccc

SEQ ID NO: 4827489 - DNA, 25 bp, Homo sapien
tcaattgggcgagtgctacccaggc

SEQ ID NO: 4827490 - DNA, 25 bp, Homo sapien
cattgttgcctagaggtagccctgg

SEQ ID NO: 4827491 - DNA, 25 bp, Homo sapien
gagttcacccacgactggtcctggt

SEQ ID NO: 4827492 - DNA, 25 bp, Homo sapien
aaccttcagtttggccgtgttggca

SEQ ID NO: 4827493 - DNA, 25 bp, Homo sapien
tcaagagcgtgcaaagagttcaccc

SEQ ID NO: 4827494 - DNA, 25 bp, Homo sapien
ctcagcgcaggtcagggctaacact

SEQ ID NO: 4827495 - DNA, 25 bp, Homo sapien
tctccgaccagcaaggttcatctgg

SEQ ID NO: 4827496 - DNA, 25 bp, Homo sapien
ggtcagaagtttcctctccgaccag

SEQ ID NO: 4827497 - DNA, 25 bp, Homo sapien
tggaattgttctcagttcccactga

SEQ ID NO: 4827498 - DNA, 25 bp, Homo sapien
aaggttcatctggacgtcgtacgga

SEQ ID NO: 4827499 - DNA, 25 bp, Homo sapien
cagaaagtcatccagatgttctcct

SEQ ID NO: 4827500 - DNA, 25 bp, Homo sapien
tgccatacagaaagtcatccagatg

SEQ ID NO: 4827501 - DNA, 25 bp, Homo sapien
caattgtgcctttcgtgttatatct

SEQ ID NO: 4827502 - DNA, 25 bp, Homo sapien
gatcttgtcttttgtagagcagata

SEQ ID NO: 4827503 - DNA, 25 bp, Homo sapien
aagccacccacactccagccgagga

SEQ ID NO: 4827504 - DNA, 25 bp, Homo sapien
ccagacagaaaggaaaattgcaagg

SEQ ID NO: 4827505 - DNA, 25 bp, Homo sapien
gaattcctgaccaccggctcaccaa

SEQ ID NO: 4827506 - DNA, 25 bp, Homo sapien
ccacactccagccgaggaaggcaga

SEQ ID NO: 4827507 - DNA, 25 bp, Homo sapien
tgacaccaggatgaaacgcgagcct

SEQ ID NO: 4827508 - DNA, 25 bp, Homo sapien
cagggaaatatgactcgcccgggtc

SEQ ID NO: 4827509 - DNA, 25 bp, Homo sapien
tcccggaatgctcctgacacgttta

SEQ ID NO: 4827510 - DNA, 25 bp, Homo sapien
cctgcaaacaacgtgtggagcccat

SEQ ID NO: 4827511 - DNA, 25 bp, Homo sapien
gggtcacttgcaacgtgccagccaa

SEQ ID NO: 4827512 - DNA, 25 bp, Homo sapien
agttgattccacaagtatggggtca

SEQ ID NO: 4827513 - DNA, 25 bp, Homo sapien
atgctcaggaccaccaaaatcagga

SEQ ID NO: 4827514 - DNA, 25 bp, Homo sapien
aagtatggggtcacttgcaacgtgc

SEQ ID NO: 4827515 - DNA, 25 bp, Homo sapien
gaatattacggtaggactggtcgaa

SEQ ID NO: 4827516 - DNA, 25 bp, Homo sapien
gcaggtaccgtgtttgaatattacg

SEQ ID NO: 4827517 - DNA, 25 bp, Homo sapien
gactggtcgaagtgcctatgtctct

SEQ ID NO: 4827518 - DNA, 25 bp, Homo sapien
ttttgacgcatattcgtccagcagg

SEQ ID NO: 4827519 - DNA, 25 bp, Homo sapien
ctgtgaagacgaccgctgactcaag

SEQ ID NO: 4827520 - DNA, 25 bp, Homo sapien
accgctgactcaaggacttctggga

SEQ ID NO: 4827521 - DNA, 25 bp, Homo sapien
gacgaccgctgactcaaggacttct

SEQ ID NO: 4827522 - DNA, 25 bp, Homo sapien
tgaagacgaccgctgactcaaggac

SEQ ID NO: 4827523 - DNA, 25 bp, Homo sapien
tgcgtgctcactcgcttcgcacaga

SEQ ID NO: 4827524 - DNA, 25 bp, Homo sapien
atcttcctgcgtgctcactcgcttc

SEQ ID NO: 4827525 - DNA, 25 bp, Homo sapien
ttcctgcgtgctcactcgcttcgca

SEQ ID NO: 4827526 - DNA, 25 bp, Homo sapien
tcgcttcgcacagaccctgcagatg

SEQ ID NO: 4827527 - DNA, 25 bp, Homo sapien
agagcacgtgccacctctataagca

SEQ ID NO: 4827528 - DNA, 25 bp, Homo sapien
gccacctctataagcacatgcatgt

SEQ ID NO: 4827529 - DNA, 25 bp, Homo sapien
gtgcatgttgaatgacaccagccct

SEQ ID NO: 4827530 - DNA, 25 bp, Homo sapien
aatgccctcttcattgccccagtat

SEQ ID NO: 4827531 - DNA, 25 bp, Homo sapien
agggccacatcgcacagaaagtccc

SEQ ID NO: 4827532 - DNA, 25 bp, Homo sapien
cacatcgcacagaaagtcccggtat

SEQ ID NO: 4827533 - DNA, 25 bp, Homo sapien
cgcacagaaagtcccggtatcggag

SEQ ID NO: 4827534 - DNA, 25 bp, Homo sapien
catcgcacagaaagtcccggtatcg

SEQ ID NO: 4827535 - DNA, 25 bp, Homo sapien
tcaccataggcggccaccagggact

SEQ ID NO: 4827536 - DNA, 25 bp, Homo sapien
agcgctgtcgcttggcctcaccata

SEQ ID NO: 4827537 - DNA, 25 bp, Homo sapien
tgaatggcgtatttgtccagcttgt

SEQ ID NO: 4827538 - DNA, 25 bp, Homo sapien
gtgccaggtggacatcctcctccaa

SEQ ID NO: 4827539 - DNA, 25 bp, Homo sapien
tcccagacggtgtgggatcgcagcc

SEQ ID NO: 4827540 - DNA, 25 bp, Homo sapien
tatccgctcttcaaatgtgtgtctc

SEQ ID NO: 4827541 - DNA, 25 bp, Homo sapien
cacgggcgtgggaaatccttgcacg

SEQ ID NO: 4827542 - DNA, 25 bp, Homo sapien
ccttgcacggtgaagcagagtttca

SEQ ID NO: 4827543 - DNA, 25 bp, Homo sapien
tgtacgccatagttgctctcaatcc

SEQ ID NO: 4827544 - DNA, 25 bp, Homo sapien
gatctccagtgtgtgtacgccatag

SEQ ID NO: 4827545 - DNA, 25 bp, Homo sapien
tttcccggttcagccgcctggcaaa

SEQ ID NO: 4827546 - DNA, 25 bp, Homo sapien
tgctctcaatcctgtactttcccgg

SEQ ID NO: 4827547 - DNA, 25 bp, Homo sapien
ggtctgcaatgctgattactggacg

SEQ ID NO: 4827548 - DNA, 25 bp, Homo sapien
ttactggacgccagcgtccagagcc

SEQ ID NO: 4827549 - DNA, 25 bp, Homo sapien
tgctgattactggacgccagcgtcc

SEQ ID NO: 4827550 - DNA, 25 bp, Homo sapien
caatgctgattactggacgccagcg

SEQ ID NO: 4827551 - DNA, 25 bp, Homo sapien
gcccgccagaaggagagctttccta

SEQ ID NO: 4827552 - DNA, 25 bp, Homo sapien
caagccttgctcatgtgatatctcc

SEQ ID NO: 4827553 - DNA, 25 bp, Homo sapien
ggtccacctggcatctatttcacac

SEQ ID NO: 4827554 - DNA, 25 bp, Homo sapien
gaagcctctcgaacatccaggatag

SEQ ID NO: 4827555 - DNA, 25 bp, Homo sapien
tcctcagtgaggaagggtgaacgcc

SEQ ID NO: 4827556 - DNA, 25 bp, Homo sapien
caccgctggaaggattcgaatgcca

SEQ ID NO: 4827557 - DNA, 25 bp, Homo sapien
caagccaggtggactcagattctca

SEQ ID NO: 4827558 - DNA, 25 bp, Homo sapien
ttgacccacccttgtactcgaggag

SEQ ID NO: 4827559 - DNA, 25 bp, Homo sapien
ctggcgtacacagagggttccaagg

SEQ ID NO: 4827560 - DNA, 25 bp, Homo sapien
tggcgtacacagagggttccaaggt

SEQ ID NO: 4827561 - DNA, 25 bp, Homo sapien
ggtgcagagaccgattaacttctaa

SEQ ID NO: 4827562 - DNA, 25 bp, Homo sapien
ccgattaacttctaagtgacaaact

SEQ ID NO: 4827563 - DNA, 25 bp, Homo sapien
gggtccattccatgcaggagccgtt

SEQ ID NO: 4827564 - DNA, 25 bp, Homo sapien
tcccatgcgagttctaaggtggtcc

SEQ ID NO: 4827565 - DNA, 25 bp, Homo sapien
gaatcctgggatgaaaccaccgaaa

SEQ ID NO: 4827566 - DNA, 25 bp, Homo sapien
tgatcctggtgcacacgtgcattga

SEQ ID NO: 4827567 - DNA, 25 bp, Homo sapien
cagtcgtgatgggatgatacagagc

SEQ ID NO: 4827568 - DNA, 25 bp, Homo sapien
gatgggatgatacagagcctgcctg

SEQ ID NO: 4827569 - DNA, 25 bp, Homo sapien
cgtgatgggatgatacagagcctgc

SEQ ID NO: 4827570 - DNA, 25 bp, Homo sapien
gtcgtgatgggatgatacagagcct

SEQ ID NO: 4827571 - DNA, 25 bp, Homo sapien
ttttctacctctatggaatgcgcgg

SEQ ID NO: 4827572 - DNA, 25 bp, Homo sapien
aaggtactggcactcctgaaaatcc

SEQ ID NO: 4827573 - DNA, 25 bp, Homo sapien
gcctgatcccagaagatggtgcagt

SEQ ID NO: 4827574 - DNA, 25 bp, Homo sapien
aatggacagcctcccgtgacctcaa

SEQ ID NO: 4827575 - DNA, 25 bp, Homo sapien
gagaaaaaaacaagagaaagtctgc

SEQ ID NO: 4827576 - DNA, 25 bp, Homo sapien
agagaaaaaaacaagagaaagtctg

SEQ ID NO: 4827577 - DNA, 25 bp, Homo sapien
agaaaaaaacaagagaaagtctgcg

SEQ ID NO: 4827578 - DNA, 25 bp, Homo sapien
accaccgccgcgttggtggacactt

SEQ ID NO: 4827579 - DNA, 25 bp, Homo sapien
cactgctgagtatgtcgcagtgtcg

SEQ ID NO: 4827580 - DNA, 25 bp, Homo sapien
cttgtccgtgggcattggtggccac

SEQ ID NO: 4827581 - DNA, 25 bp, Homo sapien
gagtatgtcgcagtgtcgtcaaagt

SEQ ID NO: 4827582 - DNA, 25 bp, Homo sapien
caccgaacggaatggttcctcgtct

SEQ ID NO: 4827583 - DNA, 25 bp, Homo sapien
atcgggagtcccaccgaacggaatg

SEQ ID NO: 4827584 - DNA, 25 bp, Homo sapien
atccaatcgggagtcccaccgaacg

SEQ ID NO: 4827585 - DNA, 25 bp, Homo sapien
tctccaaaaactggacgtcgaagtg

SEQ ID NO: 4827586 - DNA, 25 bp, Homo sapien
tgcgtgtacggaatcatcgatgaca

SEQ ID NO: 4827587 - DNA, 25 bp, Homo sapien
accagcatggtgcacttgagagtga

SEQ ID NO: 4827588 - DNA, 25 bp, Homo sapien
ttgagagtgaccgtctcgccttccc

SEQ ID NO: 4827589 - DNA, 25 bp, Homo sapien
tgtggtcgctgacgccgccccgaga

SEQ ID NO: 4827590 - DNA, 25 bp, Homo sapien
gcagggtgtacaggccctcgtcgtc

SEQ ID NO: 4827591 - DNA, 25 bp, Homo sapien
cccgagacacgatgcgcagggtgta

SEQ ID NO: 4827592 - DNA, 25 bp, Homo sapien
ttctccaaagaacatcttcgtccac

SEQ ID NO: 4827593 - DNA, 25 bp, Homo sapien
caagctcaggctatcgtgtgggaag

SEQ ID NO: 4827594 - DNA, 25 bp, Homo sapien
gaagatgtatggatgcgtcctgcac

SEQ ID NO: 4827595 - DNA, 25 bp, Homo sapien
tacatggcgcaggagcgctctgacg

SEQ ID NO: 4827596 - DNA, 25 bp, Homo sapien
gacgccttctttgtaggtcagctgt

SEQ ID NO: 4827597 - DNA, 25 bp, Homo sapien
tcccggttggcgtcgtggcactgca

SEQ ID NO: 4827598 - DNA, 25 bp, Homo sapien
gtcacgatgacgtagtcccggttgg

SEQ ID NO: 4827599 - DNA, 25 bp, Homo sapien
actgcaagtccatgggtgcaccggg

SEQ ID NO: 4827600 - DNA, 25 bp, Homo sapien
gcccctgtgaccagcgggtcagcat

SEQ ID NO: 4827601 - DNA, 25 bp, Homo sapien
ggctgatgcccgcactgttcactgc

SEQ ID NO: 4827602 - DNA, 25 bp, Homo sapien
aaagccctgtgaccgggtatttgca

SEQ ID NO: 4827603 - DNA, 25 bp, Homo sapien
gattttcaccggtgcatcattgcac

SEQ ID NO: 4827604 - DNA, 25 bp, Homo sapien
cactcggaatatgtaagaccttcct

SEQ ID NO: 4827605 - DNA, 25 bp, Homo sapien
aaggtcatcctgataaatggcaatc

SEQ ID NO: 4827606 - DNA, 25 bp, Homo sapien
cttcaaggtcatcctgataaatggc

SEQ ID NO: 4827607 - DNA, 25 bp, Homo sapien
catcctgataaatggcaatctcctt

SEQ ID NO: 4827608 - DNA, 25 bp, Homo sapien
taaatggcaatctccttctctccct

SEQ ID NO: 4827609 - DNA, 25 bp, Homo sapien
tgttttgagatcctagagaaaaatc

SEQ ID NO: 4827610 - DNA, 25 bp, Homo sapien
catctgcttcagatgtagaaaacca

SEQ ID NO: 4827611 - DNA, 25 bp, Homo sapien
atgcaatgtgtggatactagttggg

SEQ ID NO: 4827612 - DNA, 25 bp, Homo sapien
aaccaatccagaaaacgcttttgag

SEQ ID NO: 4827613 - DNA, 25 bp, Homo sapien
gtcggcctcaagcaggccttctttt

SEQ ID NO: 4827614 - DNA, 25 bp, Homo sapien
ggctcgtcggcctcaagcaggcctt

SEQ ID NO: 4827615 - DNA, 25 bp, Homo sapien
aacctcattctacacgggctcgtcg

SEQ ID NO: 4827616 - DNA, 25 bp, Homo sapien
attctacacgggctcgtcggcctca

SEQ ID NO: 4827617 - DNA, 25 bp, Homo sapien
aagcacatgctagatgccactaagc

SEQ ID NO: 4827618 - DNA, 25 bp, Homo sapien
gataccgctaagcacacgtgagaca

SEQ ID NO: 4827619 - DNA, 25 bp, Homo sapien
catgagacactgctaagcaaaggct

SEQ ID NO: 4827620 - DNA, 25 bp, Homo sapien
catgctagatgccactaagtacaca

SEQ ID NO: 4827621 - DNA, 25 bp, Homo sapien
tcaaaagggtccctcgagccaggga

SEQ ID NO: 4827622 - DNA, 25 bp, Homo sapien
caagccttgcggatttgcagattct

SEQ ID NO: 4827623 - DNA, 25 bp, Homo sapien
gccttgcggatttgcagattctcca

SEQ ID NO: 4827624 - DNA, 25 bp, Homo sapien
atcacacaagccttgcggatttgca

SEQ ID NO: 4827625 - DNA, 25 bp, Homo sapien
tgtagcaaaaggccccgagaaagtg

SEQ ID NO: 4827626 - DNA, 25 bp, Homo sapien
tagcaaaaggccccgagaaagtgga

SEQ ID NO: 4827627 - DNA, 25 bp, Homo sapien
agcaaaaggccccgagaaagtggag

SEQ ID NO: 4827628 - DNA, 25 bp, Homo sapien
cggaactgtcttgctgcctttgccc

SEQ ID NO: 4827629 - DNA, 25 bp, Homo sapien
tttcggaactgtcttgctgcctttg

SEQ ID NO: 4827630 - DNA, 25 bp, Homo sapien
ttcggaactgtcttgctgcctttgc

SEQ ID NO: 4827631 - DNA, 25 bp, Homo sapien
tcggaactgtcttgctgcctttgcc

SEQ ID NO: 4827632 - DNA, 25 bp, Homo sapien
cacttgccgaaattccaaaactgaa

SEQ ID NO: 4827633 - DNA, 25 bp, Homo sapien
gtgctgatgagggaagcaaaccaag

SEQ ID NO: 4827634 - DNA, 25 bp, Homo sapien
gtgtgagccgctgacagcagcatct

SEQ ID NO: 4827635 - DNA, 25 bp, Homo sapien
tctgtaacacttgccgaaattccaa

SEQ ID NO: 4827636 - DNA, 25 bp, Homo sapien
gaggacgacatagtttctgctgatc

SEQ ID NO: 4827637 - DNA, 25 bp, Homo sapien
gtggctcccagctgaggacgacata

SEQ ID NO: 4827638 - DNA, 25 bp, Homo sapien
tgaagtacatgagcgggtccttgcc

SEQ ID NO: 4827639 - DNA, 25 bp, Homo sapien
atctcggaagcgtgcacaccggtgg

SEQ ID NO: 4827640 - DNA, 25 bp, Homo sapien
gaaatatggttcgtttccattcctg

SEQ ID NO: 4827641 - DNA, 25 bp, Homo sapien
cctgtttccgccatgctgcattgag

SEQ ID NO: 4827642 - DNA, 25 bp, Homo sapien
ttgcaaataaccagagaaggccaga

SEQ ID NO: 4827643 - DNA, 25 bp, Homo sapien
catgctggagtctgaaatatggttc

SEQ ID NO: 4827644 - DNA, 25 bp, Homo sapien
tgaggtcaaacacggcatatctcgg

SEQ ID NO: 4827645 - DNA, 25 bp, Homo sapien
gccatgccggtttgctgacagcact

SEQ ID NO: 4827646 - DNA, 25 bp, Homo sapien
gacgttatctccgaaggttcgctca

SEQ ID NO: 4827647 - DNA, 25 bp, Homo sapien
gatctcacagccgtctgggcgttga

SEQ ID NO: 4827648 - DNA, 25 bp, Homo sapien
ggcatcagagctttggaagctacag

SEQ ID NO: 4827649 - DNA, 25 bp, Homo sapien
aagctacagcagagatcttccggcc

SEQ ID NO: 4827650 - DNA, 25 bp, Homo sapien
gatcttccggcccttttcacaggga

SEQ ID NO: 4827651 - DNA, 25 bp, Homo sapien
catcagagctttggaagctacagca

SEQ ID NO: 4827652 - DNA, 25 bp, Homo sapien
tatccaatgggcttgtggttgcagg

SEQ ID NO: 4827653 - DNA, 25 bp, Homo sapien
ggccacacagcagtccacgtagtag

SEQ ID NO: 4827654 - DNA, 25 bp, Homo sapien
gacgtcttggtgtttcgggaagcaa

SEQ ID NO: 4827655 - DNA, 25 bp, Homo sapien
tcatgcttaggtcggtcccactgca

SEQ ID NO: 4827656 - DNA, 25 bp, Homo sapien
gattcctgggaattttcactcatcc

SEQ ID NO: 4827657 - DNA, 25 bp, Homo sapien
tgctctcccgtggttaagccgtgca

SEQ ID NO: 4827658 - DNA, 25 bp, Homo sapien
gcattgaccgccttgactcggaaga

SEQ ID NO: 4827659 - DNA, 25 bp, Homo sapien
gagtgcggcctgcacttttatgacg

SEQ ID NO: 4827660 - DNA, 25 bp, Homo sapien
gaatccgtgtttccctgtttgagca

SEQ ID NO: 4827661 - DNA, 25 bp, Homo sapien
cagagatgacagatacgattccagt

SEQ ID NO: 4827662 - DNA, 25 bp, Homo sapien
tttgagcagggcacttgaaacggac

SEQ ID NO: 4827663 - DNA, 25 bp, Homo sapien
ttcaggttccttcaaatgagtgtga

SEQ ID NO: 4827664 - DNA, 25 bp, Homo sapien
tctcggccccttgaaagaagcttgg

SEQ ID NO: 4827665 - DNA, 25 bp, Homo sapien
tggtatgaacatttgacacagcaga

SEQ ID NO: 4827666 - DNA, 25 bp, Homo sapien
cagaagatgttctgtcttctcggcc

SEQ ID NO: 4827667 - DNA, 25 bp, Homo sapien
taaggcttccataggatgaacggtt

SEQ ID NO: 4827668 - DNA, 25 bp, Homo sapien
ggatgggcgagccaccactgaattt

SEQ ID NO: 4827669 - DNA, 25 bp, Homo sapien
gaccttccagccgagggtcatggag

SEQ ID NO: 4827670 - DNA, 25 bp, Homo sapien
tcacagttgaggagcgtaatcccat

SEQ ID NO: 4827671 - DNA, 25 bp, Homo sapien
gtgaacttcacgcttgtccaggtag

SEQ ID NO: 4827672 - DNA, 25 bp, Homo sapien
cgttaggattgtcggtttgctgggt

SEQ ID NO: 4827673 - DNA, 25 bp, Homo sapien
taggattgtcggtttgctgggtgag

SEQ ID NO: 4827674 - DNA, 25 bp, Homo sapien
aggattgtcggtttgctgggtgagg

SEQ ID NO: 4827675 - DNA, 25 bp, Homo sapien
ttaggattgtcggtttgctgggtga

SEQ ID NO: 4827676 - DNA, 25 bp, Homo sapien
gtcccccatacttggactctgcatg

SEQ ID NO: 4827677 - DNA, 25 bp, Homo sapien
ttggactctgcatgacaagagcccc

SEQ ID NO: 4827678 - DNA, 25 bp, Homo sapien
ccccatacttggactctgcatgaca

SEQ ID NO: 4827679 - DNA, 25 bp, Homo sapien
tacttggactctgcatgacaagagc

SEQ ID NO: 4827680 - DNA, 25 bp, Homo sapien
gttgacggcggcgattttgaactcg

SEQ ID NO: 4827681 - DNA, 25 bp, Homo sapien
aactcgtagagtgagccttccgtca

SEQ ID NO: 4827682 - DNA, 25 bp, Homo sapien
cacacttgaagtgctcactgggatc

SEQ ID NO: 4827683 - DNA, 25 bp, Homo sapien
acttgaagtgctcactgggatctga

SEQ ID NO: 4827684 - DNA, 25 bp, Homo sapien
gtgacctgggccaaatccgtgtcat

SEQ ID NO: 4827685 - DNA, 25 bp, Homo sapien
gccaaatccgtgtcataggtcaggg

SEQ ID NO: 4827686 - DNA, 25 bp, Homo sapien
cctgggccaaatccgtgtcataggt

SEQ ID NO: 4827687 - DNA, 25 bp, Homo sapien
caccctcagggcctcctactctgcc

SEQ ID NO: 4827688 - DNA, 25 bp, Homo sapien
tgtgaagtcagatgccaccttgttg

SEQ ID NO: 4827689 - DNA, 25 bp, Homo sapien
ctgtgaagtcagatgccaccttgtt

SEQ ID NO: 4827690 - DNA, 25 bp, Homo sapien
taaataacggttggctgttgtcgtc

SEQ ID NO: 4827691 - DNA, 25 bp, Homo sapien
tccacagcatgaccaaggacgtgtc

SEQ ID NO: 4827692 - DNA, 25 bp, Homo sapien
tccctgaagtccacgaaatatccag

SEQ ID NO: 4827693 - DNA, 25 bp, Homo sapien
cagaacgtcaagtcgtaggcaggac

SEQ ID NO: 4827694 - DNA, 25 bp, Homo sapien
acaggctccgacgtgtctgagggct

SEQ ID NO: 4827695 - DNA, 25 bp, Homo sapien
tgagggcttccccacgccatttgca

SEQ ID NO: 4827696 - DNA, 25 bp, Homo sapien
atttgcattgactgcccggaccctg

SEQ ID NO: 4827697 - DNA, 25 bp, Homo sapien
tgcccggaccctgaagacataggtc

SEQ ID NO: 4827698 - DNA, 25 bp, Homo sapien
tctccccacaaatcattgctgtttt

SEQ ID NO: 4827699 - DNA, 25 bp, Homo sapien
atccataatacatgcacactctccc

SEQ ID NO: 4827700 - DNA, 25 bp, Homo sapien
ctctccccacaaatcattgctgttt

SEQ ID NO: 4827701 - DNA, 25 bp, Homo sapien
actctccccacaaatcattgctgtt

SEQ ID NO: 4827702 - DNA, 25 bp, Homo sapien
agcggcttagggacacggtgttctt

SEQ ID NO: 4827703 - DNA, 25 bp, Homo sapien
agggacacggtgttctttcaactct

SEQ ID NO: 4827704 - DNA, 25 bp, Homo sapien
tgaggtgagcggcttagggacacgg

SEQ ID NO: 4827705 - DNA, 25 bp, Homo sapien
taagaagagtatgaggtgagcggct

SEQ ID NO: 4827706 - DNA, 25 bp, Homo sapien
gagacgcgtctgtcatttcctggca

SEQ ID NO: 4827707 - DNA, 25 bp, Homo sapien
gccttgttcatcgacaccagcactg

SEQ ID NO: 4827708 - DNA, 25 bp, Homo sapien
gaagcccagatagatgttgccttgt

SEQ ID NO: 4827709 - DNA, 25 bp, Homo sapien
tcctcgtaggatttacaccaggtga

SEQ ID NO: 4827710 - DNA, 25 bp, Homo sapien
tgtatcacttacagacacggagtaa

SEQ ID NO: 4827711 - DNA, 25 bp, Homo sapien
cttctgggtccagaacaaaactgga

SEQ ID NO: 4827712 - DNA, 25 bp, Homo sapien
cggattctttaagtacagcttggag

SEQ ID NO: 4827713 - DNA, 25 bp, Homo sapien
caaaactggaggacactccgtctgt

SEQ ID NO: 4827714 - DNA, 25 bp, Homo sapien
aaaaagtatttcaattcatctggac

SEQ ID NO: 4827715 - DNA, 25 bp, Homo sapien
tatttcaattcatctggacctgcac

SEQ ID NO: 4827716 - DNA, 25 bp, Homo sapien
aagtatttcaattcatctggacctg

SEQ ID NO: 4827717 - DNA, 25 bp, Homo sapien
gtatttcaattcatctggacctgca

SEQ ID NO: 4827718 - DNA, 25 bp, Homo sapien
ctcaatgccatcaaacgctcgagct

SEQ ID NO: 4827719 - DNA, 25 bp, Homo sapien
tttcattgctcaatgccatcaaacg

SEQ ID NO: 4827720 - DNA, 25 bp, Homo sapien
tgctcaatgccatcaaacgctcgag

SEQ ID NO: 4827721 - DNA, 25 bp, Homo sapien
attgctcaatgccatcaaacgctcg

SEQ ID NO: 4827722 - DNA, 25 bp, Homo sapien
cagagacttctctgtcgttaataat

SEQ ID NO: 4827723 - DNA, 25 bp, Homo sapien
aagctaattccgatttcagaggaat

SEQ ID NO: 4827724 - DNA, 25 bp, Homo sapien
gtcgttaataataaatcggtagctg

SEQ ID NO: 4827725 - DNA, 25 bp, Homo sapien
acccgccccttatcaaaaatctcat

SEQ ID NO: 4827726 - DNA, 25 bp, Homo sapien
tcaatactaaatcgatccatcacca

SEQ ID NO: 4827727 - DNA, 25 bp, Homo sapien
aatctgcacagtgtaggtcccctca

SEQ ID NO: 4827728 - DNA, 25 bp, Homo sapien
atctccaataagaactagagaagac

SEQ ID NO: 4827729 - DNA, 25 bp, Homo sapien
caataatgccagtagctttgtcaca

SEQ ID NO: 4827730 - DNA, 25 bp, Homo sapien
ctttcctttgaaactcagcctcttc

SEQ ID NO: 4827731 - DNA, 25 bp, Homo sapien
gcctcttccagcacagtcttgaatg

SEQ ID NO: 4827732 - DNA, 25 bp, Homo sapien
ttgaaactcagcctcttccagcaca

SEQ ID NO: 4827733 - DNA, 25 bp, Homo sapien
tcagcctcttccagcacagtcttga

SEQ ID NO: 4827734 - DNA, 25 bp, Homo sapien
aagtcgaacttcacattcttccgtg

SEQ ID NO: 4827735 - DNA, 25 bp, Homo sapien
cttgcaaacaagtcgaacttcacat

SEQ ID NO: 4827736 - DNA, 25 bp, Homo sapien
cttccgtgacatcccagtgcaagta

SEQ ID NO: 4827737 - DNA, 25 bp, Homo sapien
cacattcttccgtgacatcccagtg

SEQ ID NO: 4827738 - DNA, 25 bp, Homo sapien
gaatccacacacgatatctcatgaa

SEQ ID NO: 4827739 - DNA, 25 bp, Homo sapien
ttggccctccccgtacagtgctgat

SEQ ID NO: 4827740 - DNA, 25 bp, Homo sapien
tatgccttactgaccattccacgga

SEQ ID NO: 4827741 - DNA, 25 bp, Homo sapien
ttctctcggtggatatgaaactgcc

SEQ ID NO: 4827742 - DNA, 25 bp, Homo sapien
ggccacgcagcgcttcactccaaag

SEQ ID NO: 4827743 - DNA, 25 bp, Homo sapien
caagtcacttgctttccctctgaac

SEQ ID NO: 4827744 - DNA, 25 bp, Homo sapien
cagaatgccccaattgtttgtgatg

SEQ ID NO: 4827745 - DNA, 25 bp, Homo sapien
tgcttaataatcctggagctggtct

SEQ ID NO: 4827746 - DNA, 25 bp, Homo sapien
ttcatacagaacatcatccttgagc

SEQ ID NO: 4827747 - DNA, 25 bp, Homo sapien
ccaggttaggcagtgtctccgtttc

SEQ ID NO: 4827748 - DNA, 25 bp, Homo sapien
caggttaggcagtgtctccgtttca

SEQ ID NO: 4827749 - DNA, 25 bp, Homo sapien
tgtctccgtttcatacagaacatca

SEQ ID NO: 4827750 - DNA, 25 bp, Homo sapien
tcaaggatggacacatcttggcctc

SEQ ID NO: 4827751 - DNA, 25 bp, Homo sapien
ccagctatttcaaggatggacacat

SEQ ID NO: 4827752 - DNA, 25 bp, Homo sapien
gctatttcaaggatggacacatctt

SEQ ID NO: 4827753 - DNA, 25 bp, Homo sapien
tttcaaggatggacacatcttggcc

SEQ ID NO: 4827754 - DNA, 25 bp, Homo sapien
attgccaaaatcatatcatcataca

SEQ ID NO: 4827755 - DNA, 25 bp, Homo sapien
cacagactctactcattgccaaaat

SEQ ID NO: 4827756 - DNA, 25 bp, Homo sapien
tcattgccaaaatcatatcatcata

SEQ ID NO: 4827757 - DNA, 25 bp, Homo sapien
cagactctactcattgccaaaatca

SEQ ID NO: 4827758 - DNA, 25 bp, Homo sapien
tggcgtcacgccgaggtactgcctg

SEQ ID NO: 4827759 - DNA, 25 bp, Homo sapien
atggtgtgcgtgaagctctctccgg

SEQ ID NO: 4827760 - DNA, 25 bp, Homo sapien
tctccggctgcgtcatggcgtcacg

SEQ ID NO: 4827761 - DNA, 25 bp, Homo sapien
aacaaaggccccctccgtgacagag

SEQ ID NO: 4827762 - DNA, 25 bp, Homo sapien
tacatagttattgtgcttctaggag

SEQ ID NO: 4827763 - DNA, 25 bp, Homo sapien
gaaaagagcttaaaccatgatatgt

SEQ ID NO: 4827764 - DNA, 25 bp, Homo sapien
catgaacggtatttgtgactccgac

SEQ ID NO: 4827765 - DNA, 25 bp, Homo sapien
tattcctaaatcctgaaagagcctt

SEQ ID NO: 4827766 - DNA, 25 bp, Homo sapien
tgttatcagatattcagccttggaa

SEQ ID NO: 4827767 - DNA, 25 bp, Homo sapien
gcaataaacgagaacacacacagtg

SEQ ID NO: 4827768 - DNA, 25 bp, Homo sapien
gtagatgatctatgggtcagaggtc

SEQ ID NO: 4827769 - DNA, 25 bp, Homo sapien
tgaagactaattcgcttgaggtaga

SEQ ID NO: 4827770 - DNA, 25 bp, Homo sapien
ggtgcagagtaccttcagtggcgaa

SEQ ID NO: 4827771 - DNA, 25 bp, Homo sapien
agtaccttcagtggcgaagcagatt

SEQ ID NO: 4827772 - DNA, 25 bp, Homo sapien
gaagtcgtattccttctggggtgca

SEQ ID NO: 4827773 - DNA, 25 bp, Homo sapien
ccttctggggtgcagagtaccttca

SEQ ID NO: 4827774 - DNA, 25 bp, Homo sapien
tcagccagcagtttgcctggttgtt

SEQ ID NO: 4827775 - DNA, 25 bp, Homo sapien
gttgtttcagatgtcggcttgtgct

SEQ ID NO: 4827776 - DNA, 25 bp, Homo sapien
cctgttttggggactcctcgattca

SEQ ID NO: 4827777 - DNA, 25 bp, Homo sapien
gttttggggactcctcgattcagcc

SEQ ID NO: 4827778 - DNA, 25 bp, Homo sapien
aagtcagactctgcgtgtgaaatct

SEQ ID NO: 4827779 - DNA, 25 bp, Homo sapien
acctctcctcccagttagttcaaga

SEQ ID NO: 4827780 - DNA, 25 bp, Homo sapien
tcaagagttagctgagattttagga

SEQ ID NO: 4827781 - DNA, 25 bp, Homo sapien
tggacataaggacgaagatgtgccg

SEQ ID NO: 4827782 - DNA, 25 bp, Homo sapien
ccaggctccgcccagctgctctcag

SEQ ID NO: 4827783 - DNA, 25 bp, Homo sapien
ctgggagcctcacgaaggctgaccc

SEQ ID NO: 4827784 - DNA, 25 bp, Homo sapien
tctcagtccacagtcagcatgggct

SEQ ID NO: 4827785 - DNA, 25 bp, Homo sapien
tgggagcctcacgaaggctgacccc

SEQ ID NO: 4827786 - DNA, 25 bp, Homo sapien
gctcactggatgagatcttagcatc

SEQ ID NO: 4827787 - DNA, 25 bp, Homo sapien
ggttgtctttgccatcgaaaatctc

SEQ ID NO: 4827788 - DNA, 25 bp, Homo sapien
tgtccggacaggtcaagggagcgtt

SEQ ID NO: 4827789 - DNA, 25 bp, Homo sapien
tcagtcggctcacatatctgcagcc

SEQ ID NO: 4827790 - DNA, 25 bp, Homo sapien
ggaattctgcaaatgcttcatcaaa

SEQ ID NO: 4827791 - DNA, 25 bp, Homo sapien
gctggaattctgcaaatgcttcatc

SEQ ID NO: 4827792 - DNA, 25 bp, Homo sapien
ttgaattgctggaattctgcaaatg

SEQ ID NO: 4827793 - DNA, 25 bp, Homo sapien
gaattgctggaattctgcaaatgct

SEQ ID NO: 4827794 - DNA, 25 bp, Homo sapien
actgcggtcagcttcggatgtgcga

SEQ ID NO: 4827795 - DNA, 25 bp, Homo sapien
gatgtgcgaagactcgatggtgcat

SEQ ID NO: 4827796 - DNA, 25 bp, Homo sapien
tgcatttgaaaaccccgaattgtcc

SEQ ID NO: 4827797 - DNA, 25 bp, Homo sapien
ctagcatgggccaaggactgcggtc

SEQ ID NO: 4827798 - DNA, 25 bp, Homo sapien
catcctggttacaatccaacaggta

SEQ ID NO: 4827799 - DNA, 25 bp, Homo sapien
tggttacaatccaacaggtacttac

SEQ ID NO: 4827800 - DNA, 25 bp, Homo sapien
ctggttacaatccaacaggtactta

SEQ ID NO: 4827801 - DNA, 25 bp, Homo sapien
tcctggttacaatccaacaggtact

SEQ ID NO: 4827802 - DNA, 25 bp, Homo sapien
cgtgtgtccctgagttgggcagaaa

SEQ ID NO: 4827803 - DNA, 25 bp, Homo sapien
tacagttgagggataaaccaaagcc

SEQ ID NO: 4827804 - DNA, 25 bp, Homo sapien
gaattcaccgaggacggaaggcctg

SEQ ID NO: 4827805 - DNA, 25 bp, Homo sapien
caccttggttaggaaaacatctgcg

SEQ ID NO: 4827806 - DNA, 25 bp, Homo sapien
gtcaggcaagccgccgatcaacctg

SEQ ID NO: 4827807 - DNA, 25 bp, Homo sapien
aagccgccgatcaacctgccacgat

SEQ ID NO: 4827808 - DNA, 25 bp, Homo sapien
atggtcaccacgtcaggcaagccgc

SEQ ID NO: 4827809 - DNA, 25 bp, Homo sapien
tgatggtcaccacgtcaggcaagcc

SEQ ID NO: 4827810 - DNA, 25 bp, Homo sapien
caagagaaggggttgcgtccatcgc

SEQ ID NO: 4827811 - DNA, 25 bp, Homo sapien
ttgcgtccatcgcaccgtgctgaca

SEQ ID NO: 4827812 - DNA, 25 bp, Homo sapien
tgggttccctctgctccgccccaag

SEQ ID NO: 4827813 - DNA, 25 bp, Homo sapien
tgctccgccccaagagaaggggttg

SEQ ID NO: 4827814 - DNA, 25 bp, Homo sapien
ttcggaatgttatgtgattccttcc

SEQ ID NO: 4827815 - DNA, 25 bp, Homo sapien
tcagggcgagtgtggctgcctcatc

SEQ ID NO: 4827816 - DNA, 25 bp, Homo sapien
acaggtttgtggattcggaatgtta

SEQ ID NO: 4827817 - DNA, 25 bp, Homo sapien
cctgagtggcacaacgtgttcctct

SEQ ID NO: 4827818 - DNA, 25 bp, Homo sapien
gctggatgtcctggtcgttcttgaa

SEQ ID NO: 4827819 - DNA, 25 bp, Homo sapien
ggtttccaaacaccgtgcaggtcag

SEQ ID NO: 4827820 - DNA, 25 bp, Homo sapien
gaggtcacgcctttgatggtcatgc

SEQ ID NO: 4827821 - DNA, 25 bp, Homo sapien
ggtcatgctgacgtacttggcctgc

SEQ ID NO: 4827822 - DNA, 25 bp, Homo sapien
gatcttctccccgtgtttgtacacg

SEQ ID NO: 4827823 - DNA, 25 bp, Homo sapien
gcggggccatgtccgggatcttctc

SEQ ID NO: 4827824 - DNA, 25 bp, Homo sapien
catgtccgggatcttctccccgtgt

SEQ ID NO: 4827825 - DNA, 25 bp, Homo sapien
ttctccccgtgtttgtacacgctca

SEQ ID NO: 4827826 - DNA, 25 bp, Homo sapien
catctgccgtctaccctcgtgtaaa

SEQ ID NO: 4827827 - DNA, 25 bp, Homo sapien
cagagatgctagatctcgcggcccc

SEQ ID NO: 4827828 - DNA, 25 bp, Homo sapien
tgatcaactatcagcccacacagga

SEQ ID NO: 4827829 - DNA, 25 bp, Homo sapien
tgcccacacccgtgaaaatgctagt

SEQ ID NO: 4827830 - DNA, 25 bp, Homo sapien
taggtgtgatttggtacaggaaaac

SEQ ID NO: 4827831 - DNA, 25 bp, Homo sapien
agccgtgaaagtgcatgataaccca

SEQ ID NO: 4827832 - DNA, 25 bp, Homo sapien
agtgcatgataacccataattaaac

SEQ ID NO: 4827833 - DNA, 25 bp, Homo sapien
gggcaggtaggtgtgatttggtaca

SEQ ID NO: 4827834 - DNA, 25 bp, Homo sapien
taagaacaaactccgctcaagttca

SEQ ID NO: 4827835 - DNA, 25 bp, Homo sapien
agcacgctttggaaaatgcggctgc

SEQ ID NO: 4827836 - DNA, 25 bp, Homo sapien
gctttggaaaatgcggctgccacca

SEQ ID NO: 4827837 - DNA, 25 bp, Homo sapien
cggctgccaccacgcaataagaaca

SEQ ID NO: 4827838 - DNA, 25 bp, Homo sapien
tctccgtgctgagcattcgctgcct

SEQ ID NO: 4827839 - DNA, 25 bp, Homo sapien
tgaaacgactcaggcgaagagctcc

SEQ ID NO: 4827840 - DNA, 25 bp, Homo sapien
cagtgggcgacctcgatgtctttcc

SEQ ID NO: 4827841 - DNA, 25 bp, Homo sapien
catgcacggattcttaaaaagcgac

SEQ ID NO: 4827842 - DNA, 25 bp, Homo sapien
cttgagagctggagcggccagcacg

SEQ ID NO: 4827843 - DNA, 25 bp, Homo sapien
gcttgagagctggagcggccagcac

SEQ ID NO: 4827844 - DNA, 25 bp, Homo sapien
ctgtgcttgagagctggagcggcca

SEQ ID NO: 4827845 - DNA, 25 bp, Homo sapien
tgtgcttgagagctggagcggccag

SEQ ID NO: 4827846 - DNA, 25 bp, Homo sapien
ttgtgggaaagagcaacatacaaga

SEQ ID NO: 4827847 - DNA, 25 bp, Homo sapien
tgggagaggactcttgtgggaaaga

SEQ ID NO: 4827848 - DNA, 25 bp, Homo sapien
cgaaacccgagcctgtgaccaaggg

SEQ ID NO: 4827849 - DNA, 25 bp, Homo sapien
agcaacatacaagacgaaacccgag

SEQ ID NO: 4827850 - DNA, 25 bp, Homo sapien
actcactagacacaagggccgagga

SEQ ID NO: 4827851 - DNA, 25 bp, Homo sapien
gattactgacgagaggagacgcatt

SEQ ID NO: 4827852 - DNA, 25 bp, Homo sapien
tggcacgatgaaagcgattactgac

SEQ ID NO: 4827853 - DNA, 25 bp, Homo sapien
gaggtccgtggccttccactgcata

SEQ ID NO: 4827854 - DNA, 25 bp, Homo sapien
tatctcttcgtttggatgtggcgcg

SEQ ID NO: 4827855 - DNA, 25 bp, Homo sapien
tcacctatgggcatgcgagtctgct

SEQ ID NO: 4827856 - DNA, 25 bp, Homo sapien
cttccggcttctacccagggtgcag

SEQ ID NO: 4827857 - DNA, 25 bp, Homo sapien
cattggccttccagctagattcaag

SEQ ID NO: 4827858 - DNA, 25 bp, Homo sapien
tatccgtcttgtggaagcaccttca

SEQ ID NO: 4827859 - DNA, 25 bp, Homo sapien
cttcaaccagagtaaaatgactctg

SEQ ID NO: 4827860 - DNA, 25 bp, Homo sapien
cctggaactcagaccttgcattgtt

SEQ ID NO: 4827861 - DNA, 25 bp, Homo sapien
tcagaccttgcattgttgatggaca

SEQ ID NO: 4827862 - DNA, 25 bp, Homo sapien
tcattagcacgagtttgaaaggatg

SEQ ID NO: 4827863 - DNA, 25 bp, Homo sapien
gggattatccgagcatcctgcctct

SEQ ID NO: 4827864 - DNA, 25 bp, Homo sapien
tccacatgattgcaatgattgcaga

SEQ ID NO: 4827865 - DNA, 25 bp, Homo sapien
tccctgtttgtgattcgcctgctca

SEQ ID NO: 4827866 - DNA, 25 bp, Homo sapien
gacagaaatggcgacagacgtcaca

SEQ ID NO: 4827867 - DNA, 25 bp, Homo sapien
caaggttaggagagatacagggtta

SEQ ID NO: 4827868 - DNA, 25 bp, Homo sapien
ggtcgcaacagatacttctccctgg

SEQ ID NO: 4827869 - DNA, 25 bp, Homo sapien
gatggctgctctttcattaacgtgg

SEQ ID NO: 4827870 - DNA, 25 bp, Homo sapien
cagaagctagaatgcaagtccgcaa

SEQ ID NO: 4827871 - DNA, 25 bp, Homo sapien
tatagactgctactatgccattcac

SEQ ID NO: 4827872 - DNA, 25 bp, Homo sapien
gaagttaatttacactaggtgctga

SEQ ID NO: 4827873 - DNA, 25 bp, Homo sapien
gacagtcctgactgcatatttctga

SEQ ID NO: 4827874 - DNA, 25 bp, Homo sapien
gaactgccaagatgccggaccacag

SEQ ID NO: 4827875 - DNA, 25 bp, Homo sapien
acaagaataggttaagccatcatct

SEQ ID NO: 4827876 - DNA, 25 bp, Homo sapien
ccactcaaggagaacagcgggactg

SEQ ID NO: 4827877 - DNA, 25 bp, Homo sapien
gaaacgtcaagtgatgtctgcagga

SEQ ID NO: 4827878 - DNA, 25 bp, Homo sapien
ggttcctcctcttggaattgggaca

SEQ ID NO: 4827879 - DNA, 25 bp, Homo sapien
cctggttcgtcatcctggagttggg

SEQ ID NO: 4827880 - DNA, 25 bp, Homo sapien
gtcatcctggagttggggcatctac

SEQ ID NO: 4827881 - DNA, 25 bp, Homo sapien
cttcccctggttcgtcatcctggag

SEQ ID NO: 4827882 - DNA, 25 bp, Homo sapien
tgtgcgtgcacacatccagaaacac

SEQ ID NO: 4827883 - DNA, 25 bp, Homo sapien
ataaaggcaagtgtgcgctctcacc

SEQ ID NO: 4827884 - DNA, 25 bp, Homo sapien
tgcgagaggcctgttcatgggcacc

SEQ ID NO: 4827885 - DNA, 25 bp, Homo sapien
agaatggctccagcaggtataaagg

SEQ ID NO: 4827886 - DNA, 25 bp, Homo sapien
caagtacacactggcttgctgcggg

SEQ ID NO: 4827887 - DNA, 25 bp, Homo sapien
tagttcatcacggttttcacaggcc

SEQ ID NO: 4827888 - DNA, 25 bp, Homo sapien
cagacactgccactcgggtagggat

SEQ ID NO: 4827889 - DNA, 25 bp, Homo sapien
tcacaaaggcgaagaaaatcagggc

SEQ ID NO: 4827890 - DNA, 25 bp, Homo sapien
tatgtcccgcgtcgtcgggatgaga

SEQ ID NO: 4827891 - DNA, 25 bp, Homo sapien
agtctggtcggcaaccaggagttca

SEQ ID NO: 4827892 - DNA, 25 bp, Homo sapien
gtcggcattgggaccgtctacccta

SEQ ID NO: 4827893 - DNA, 25 bp, Homo sapien
tcggcaaccaggagttcatttctca

SEQ ID NO: 4827894 - DNA, 25 bp, Homo sapien
cattctgaaacgattccccattctg

SEQ ID NO: 4827895 - DNA, 25 bp, Homo sapien
ccattctggaatagctccccgttct

SEQ ID NO: 4827896 - DNA, 25 bp, Homo sapien
aaagttccccatgcttgaacggctt

SEQ ID NO: 4827897 - DNA, 25 bp, Homo sapien
tagctccccgttctggaatggttcc

SEQ ID NO: 4827898 - DNA, 25 bp, Homo sapien
atttccaagacatcgcaggcctcca

SEQ ID NO: 4827899 - DNA, 25 bp, Homo sapien
tgcatcttgcaaacgaggctccctg

SEQ ID NO: 4827900 - DNA, 25 bp, Homo sapien
gaagcctgaacctaactgaagggcc

SEQ ID NO: 4827901 - DNA, 25 bp, Homo sapien
gctgtcaggatatggaaggccacat

SEQ ID NO: 4827902 - DNA, 25 bp, Homo sapien
tggtccttagcgcttcgctcctggg

SEQ ID NO: 4827903 - DNA, 25 bp, Homo sapien
actcctgtaggagttctcacagtct

SEQ ID NO: 4827904 - DNA, 25 bp, Homo sapien
gatcggggctaagctaaagacattg

SEQ ID NO: 4827905 - DNA, 25 bp, Homo sapien
agagcttatttccacgatcggggct

SEQ ID NO: 4827906 - DNA, 25 bp, Homo sapien
gaattcctctttcaagccgaacctg

SEQ ID NO: 4827907 - DNA, 25 bp, Homo sapien
ttcaagccgaacctgactgtctcca

SEQ ID NO: 4827908 - DNA, 25 bp, Homo sapien
tgacaagacagccaatcgtccttct

SEQ ID NO: 4827909 - DNA, 25 bp, Homo sapien
ttcttggctcactccctcggggaat

SEQ ID NO: 4827910 - DNA, 25 bp, Homo sapien
tatggaacggagaaatgggcagtca

SEQ ID NO: 4827911 - DNA, 25 bp, Homo sapien
tttagctgcaggacaaaccagactg

SEQ ID NO: 4827912 - DNA, 25 bp, Homo sapien
ggcgacttgacttctctgtgaggaa

SEQ ID NO: 4827913 - DNA, 25 bp, Homo sapien
tgccgagctgacaatgaggatgccc

SEQ ID NO: 4827914 - DNA, 25 bp, Homo sapien
gagtaacggctgattccgagagccc

SEQ ID NO: 4827915 - DNA, 25 bp, Homo sapien
ccgagagcccaagccgaagctaatt

SEQ ID NO: 4827916 - DNA, 25 bp, Homo sapien
gctaattctacagaggtgttcacag

SEQ ID NO: 4827917 - DNA, 25 bp, Homo sapien
gcttttccgggcactgacagggata

SEQ ID NO: 4827918 - DNA, 25 bp, Homo sapien
gctccagagtccacaatcttgagct

SEQ ID NO: 4827919 - DNA, 25 bp, Homo sapien
tccagagtccacaatcttgagctct

SEQ ID NO: 4827920 - DNA, 25 bp, Homo sapien
cagggctccagagtccacaatcttg

SEQ ID NO: 4827921 - DNA, 25 bp, Homo sapien
cagcagggctccagagtccacaatc

SEQ ID NO: 4827922 - DNA, 25 bp, Homo sapien
gctccatcttcccatcgctgacaga

SEQ ID NO: 4827923 - DNA, 25 bp, Homo sapien
gacagacaagcacagcgtctttcta

SEQ ID NO: 4827924 - DNA, 25 bp, Homo sapien
tgggacacggctgttcccacagaaa

SEQ ID NO: 4827925 - DNA, 25 bp, Homo sapien
agctgatgatgggacacggctgttc

SEQ ID NO: 4827926 - DNA, 25 bp, Homo sapien
agtttgtttgcttgccatttcctcc

SEQ ID NO: 4827927 - DNA, 25 bp, Homo sapien
taaaatctgttgtggctatattaca

SEQ ID NO: 4827928 - DNA, 25 bp, Homo sapien
tctcttgagttacgacttgttgggt

SEQ ID NO: 4827929 - DNA, 25 bp, Homo sapien
tcagatattcctcctgggatcattt

SEQ ID NO: 4827930 - DNA, 25 bp, Homo sapien
tagttattgaatactgtcctgagct

SEQ ID NO: 4827931 - DNA, 25 bp, Homo sapien
gggaagctcaacgtcaaggtgctgg

SEQ ID NO: 4827932 - DNA, 25 bp, Homo sapien
tagaatatagctaaatgtgctacga

SEQ ID NO: 4827933 - DNA, 25 bp, Homo sapien
atgtgctacgaaaatactactgttc

SEQ ID NO: 4827934 - DNA, 25 bp, Homo sapien
tccaggaattcgcagtcctgagtca

SEQ ID NO: 4827935 - DNA, 25 bp, Homo sapien
tttccctgcatcatcccggtcaaga

SEQ ID NO: 4827936 - DNA, 25 bp, Homo sapien
gaattcgcagtcctgagtcaatcca

SEQ ID NO: 4827937 - DNA, 25 bp, Homo sapien
cggtcaagatgtgatgacctccagg

SEQ ID NO: 4827938 - DNA, 25 bp, Homo sapien
ccattgggcggttacaagagcagag

SEQ ID NO: 4827939 - DNA, 25 bp, Homo sapien
tcttctgtcttgatgaatcggctct

SEQ ID NO: 4827940 - DNA, 25 bp, Homo sapien
cttctgtcttgatgaatcggctctg

SEQ ID NO: 4827941 - DNA, 25 bp, Homo sapien
tacaagagcagagaaggactaggct

SEQ ID NO: 4827942 - DNA, 25 bp, Homo sapien
ggagccggctagcacccaaccatca

SEQ ID NO: 4827943 - DNA, 25 bp, Homo sapien
gggcaacaggtataaagatgtctct

SEQ ID NO: 4827944 - DNA, 25 bp, Homo sapien
ggctagcacccaaccatcaagtttc

SEQ ID NO: 4827945 - DNA, 25 bp, Homo sapien
ccagggcaacaggtataaagatgtc

SEQ ID NO: 4827946 - DNA, 25 bp, Homo sapien
tgctgtgtgttaggagatacttaca

SEQ ID NO: 4827947 - DNA, 25 bp, Homo sapien
ttagtggacactgccagtttttcaa

SEQ ID NO: 4827948 - DNA, 25 bp, Homo sapien
ctaacgtggttaaggctgctataaa

SEQ ID NO: 4827949 - DNA, 25 bp, Homo sapien
tcttccagcattggactaacgtggt

SEQ ID NO: 4827950 - DNA, 25 bp, Homo sapien
taatagatggaaagcacctgaaacg

SEQ ID NO: 4827951 - DNA, 25 bp, Homo sapien
ctaaaatcataagaggtcacagctg

SEQ ID NO: 4827952 - DNA, 25 bp, Homo sapien
tgagcttgctctaggaacactgaaa

SEQ ID NO: 4827953 - DNA, 25 bp, Homo sapien
tctcaggactaggaaagtgggctca

SEQ ID NO: 4827954 - DNA, 25 bp, Homo sapien
cgaactcctgtgacctcgtgttctg

SEQ ID NO: 4827955 - DNA, 25 bp, Homo sapien
ccaccgtgcccggcctgggcagata

SEQ ID NO: 4827956 - DNA, 25 bp, Homo sapien
agccaccgtgcccggcctgggcaga

SEQ ID NO: 4827957 - DNA, 25 bp, Homo sapien
gttctgcccgccttggcctcccaaa

SEQ ID NO: 4827958 - DNA, 25 bp, Homo sapien
tgaatgagatctgccctgcacagtc

SEQ ID NO: 4827959 - DNA, 25 bp, Homo sapien
cttctctcatggatggatcttggct

SEQ ID NO: 4827960 - DNA, 25 bp, Homo sapien
tttgtgaatgagatctgccctgcac

SEQ ID NO: 4827961 - DNA, 25 bp, Homo sapien
tcgccctcacttccatgggcgccat

SEQ ID NO: 4827962 - DNA, 25 bp, Homo sapien
tgctaatcgtcccactctgtgctca

SEQ ID NO: 4827963 - DNA, 25 bp, Homo sapien
tcctaggtctatgccttgtcaggac

SEQ ID NO: 4827964 - DNA, 25 bp, Homo sapien
gacaacactgtcctaggtctatgcc

SEQ ID NO: 4827965 - DNA, 25 bp, Homo sapien
gtggcctctgttgctgctattgcca

SEQ ID NO: 4827966 - DNA, 25 bp, Homo sapien
tccccacaatgggtagtcgttgttg

SEQ ID NO: 4827967 - DNA, 25 bp, Homo sapien
ggtagtcgttgttgccccgagtcag

SEQ ID NO: 4827968 - DNA, 25 bp, Homo sapien
caatgggtagtcgttgttgccccga

SEQ ID NO: 4827969 - DNA, 25 bp, Homo sapien
gttgttgccccgagtcagtcccgtc

SEQ ID NO: 4827970 - DNA, 25 bp, Homo sapien
tcaactgttgatgtgttatgctccc

SEQ ID NO: 4827971 - DNA, 25 bp, Homo sapien
gttcacgggttgagaaacacatttg

SEQ ID NO: 4827972 - DNA, 25 bp, Homo sapien
gcagcatatctcagcccttccatgg

SEQ ID NO: 4827973 - DNA, 25 bp, Homo sapien
tcttcccattaagactgcggctgcg

SEQ ID NO: 4827974 - DNA, 25 bp, Homo sapien
gctacattcgagaccttctttgagt

SEQ ID NO: 4827975 - DNA, 25 bp, Homo sapien
tgccctgtacacgttaataagtttg

SEQ ID NO: 4827976 - DNA, 25 bp, Homo sapien
ataatggcagggtgaccgccaccca

SEQ ID NO: 4827977 - DNA, 25 bp, Homo sapien
gctcagggctttggtgagactgcca

SEQ ID NO: 4827978 - DNA, 25 bp, Homo sapien
ttacttgcagaacatccaaatgctg

SEQ ID NO: 4827979 - DNA, 25 bp, Homo sapien
gataaagaccagcaaatagggataa

SEQ ID NO: 4827980 - DNA, 25 bp, Homo sapien
aactgtatctcaccctgaccatgtg

SEQ ID NO: 4827981 - DNA, 25 bp, Homo sapien
ccaaatgctggtgtattctgagccg

SEQ ID NO: 4827982 - DNA, 25 bp, Homo sapien
caccttatctttttacgagggagat

SEQ ID NO: 4827983 - DNA, 25 bp, Homo sapien
tctctgtcaggatgctatttccaca

SEQ ID NO: 4827984 - DNA, 25 bp, Homo sapien
tgccagttatacaggattgggttcc

SEQ ID NO: 4827985 - DNA, 25 bp, Homo sapien
agcctcacttgactttctgtctgtg

SEQ ID NO: 4827986 - DNA, 25 bp, Homo sapien
caccgatgaaggtaatcggcccggt

SEQ ID NO: 4827987 - DNA, 25 bp, Homo sapien
cagacggcacaattgctaacaccga

SEQ ID NO: 4827988 - DNA, 25 bp, Homo sapien
tgctaacaccgatgaaggtaatcgg

SEQ ID NO: 4827989 - DNA, 25 bp, Homo sapien
gcacaattgctaacaccgatgaagg

SEQ ID NO: 4827990 - DNA, 25 bp, Homo sapien
ttccgagaggcagccttcctcctgg

SEQ ID NO: 4827991 - DNA, 25 bp, Homo sapien
ggctccccgattcttgtcccaacag

SEQ ID NO: 4827992 - DNA, 25 bp, Homo sapien
tgggctccccgattcttgtcccaac

SEQ ID NO: 4827993 - DNA, 25 bp, Homo sapien
cctgggctccccgattcttgtccca

SEQ ID NO: 4827994 - DNA, 25 bp, Homo sapien
gttggcctcactgttatagatctgg

SEQ ID NO: 4827995 - DNA, 25 bp, Homo sapien
tgtgactaaagggatcgtggcctca

SEQ ID NO: 4827996 - DNA, 25 bp, Homo sapien
cacacattacgtgggtgacacggac

SEQ ID NO: 4827997 - DNA, 25 bp, Homo sapien
taattgaattgggtgcttgcctcca

SEQ ID NO: 4827998 - DNA, 25 bp, Homo sapien
ctttcatggcatagacaaaaaacaa

SEQ ID NO: 4827999 - DNA, 25 bp, Homo sapien
cagctgtatttttcggcaagtttta

SEQ ID NO: 4828000 - DNA, 25 bp, Homo sapien
ctgagttcaacttattacaaaacag

SEQ ID NO: 4828001 - DNA, 25 bp, Homo sapien
attcgaggacttggaattctgcaaa

SEQ ID NO: 4828002 - DNA, 25 bp, Homo sapien
gcccatgaatctctgcgactaaaga

SEQ ID NO: 4828003 - DNA, 25 bp, Homo sapien
tgtcgtccctgccactgaccaggaa

SEQ ID NO: 4828004 - DNA, 25 bp, Homo sapien
gactaaagatttccccagacgctcc

SEQ ID NO: 4828005 - DNA, 25 bp, Homo sapien
gggagacttcggtcattcccaagcc

SEQ ID NO: 4828006 - DNA, 25 bp, Homo sapien
ggctcagtggcctcgtaaccatgta

SEQ ID NO: 4828007 - DNA, 25 bp, Homo sapien
gatttgtggcagtaacggtctcagg

SEQ ID NO: 4828008 - DNA, 25 bp, Homo sapien
gacagtacgtaatgcctggctcagt

SEQ ID NO: 4828009 - DNA, 25 bp, Homo sapien
gaacgcttgtgtccaactgcactgg

SEQ ID NO: 4828010 - DNA, 25 bp, Homo sapien
ctcgggatggcaagggcgtggcaca

SEQ ID NO: 4828011 - DNA, 25 bp, Homo sapien
cgaagtccgcgtaacttttcaatgt

SEQ ID NO: 4828012 - DNA, 25 bp, Homo sapien
atggcaagggcgtggcacaaacacc

SEQ ID NO: 4828013 - DNA, 25 bp, Homo sapien
tttccattctgtgttacgaagtccg

SEQ ID NO: 4828014 - DNA, 25 bp, Homo sapien
tggccctgcccatttgacaggctgt

SEQ ID NO: 4828015 - DNA, 25 bp, Homo sapien
tccagggaaggtttcagcagcgcag

SEQ ID NO: 4828016 - DNA, 25 bp, Homo sapien
cgcagcatgtgcgtgggagaaatca

SEQ ID NO: 4828017 - DNA, 25 bp, Homo sapien
cacagacgatgaggagaacattata

SEQ ID NO: 4828018 - DNA, 25 bp, Homo sapien
cagaggctccagtggtctttacgga

SEQ ID NO: 4828019 - DNA, 25 bp, Homo sapien
tttacggacgctcgagcacaatcga

SEQ ID NO: 4828020 - DNA, 25 bp, Homo sapien
tgtttgctcgttggatgcctgggca

SEQ ID NO: 4828021 - DNA, 25 bp, Homo sapien
tgcctgggcagttagaaatagccgc

SEQ ID NO: 4828022 - DNA, 25 bp, Homo sapien
gtgcatctcttgttgagcacagagg

SEQ ID NO: 4828023 - DNA, 25 bp, Homo sapien
aggcactcggcataaatgaagagga

SEQ ID NO: 4828024 - DNA, 25 bp, Homo sapien
agaggaggcactcggcataaatgaa

SEQ ID NO: 4828025 - DNA, 25 bp, Homo sapien
taaatgaagaggatgcttgctgagc

SEQ ID NO: 4828026 - DNA, 25 bp, Homo sapien
ggtctgcatggaaacgactcaataa

SEQ ID NO: 4828027 - DNA, 25 bp, Homo sapien
ggaaagtcactggtaatgaatcagg

SEQ ID NO: 4828028 - DNA, 25 bp, Homo sapien
ttgcggctgatagccaggatctggt

SEQ ID NO: 4828029 - DNA, 25 bp, Homo sapien
atgggcgcaaaggaggatgactttt

SEQ ID NO: 4828030 - DNA, 25 bp, Homo sapien
tgagcgtggtggtgcatgactgtaa

SEQ ID NO: 4828031 - DNA, 25 bp, Homo sapien
cagctactcgggaggctgaggcaca

SEQ ID NO: 4828032 - DNA, 25 bp, Homo sapien
agctgagcgtggtggtgcatgactg

SEQ ID NO: 4828033 - DNA, 25 bp, Homo sapien
tcccagctactcgggaggctgaggc

SEQ ID NO: 4828034 - DNA, 25 bp, Homo sapien
tgctgcactcatccacttgccatgg

SEQ ID NO: 4828035 - DNA, 25 bp, Homo sapien
aaactaagtcccgaggagcatccat

SEQ ID NO: 4828036 - DNA, 25 bp, Homo sapien
ggagcatccatatgcatgacctgca

SEQ ID NO: 4828037 - DNA, 25 bp, Homo sapien
gccatggtgttttggaaactaagtc

SEQ ID NO: 4828038 - DNA, 25 bp, Homo sapien
caggagacttctcacgctgttcgaa

SEQ ID NO: 4828039 - DNA, 25 bp, Homo sapien
taaagtttacaatgcgagctcccac

SEQ ID NO: 4828040 - DNA, 25 bp, Homo sapien
tccagagctgcaggctagtcttgcc

SEQ ID NO: 4828041 - DNA, 25 bp, Homo sapien
gattgctggtttgttttcgccgtcc

SEQ ID NO: 4828042 - DNA, 25 bp, Homo sapien
cgttaaaggttatgaaactgtgacg

SEQ ID NO: 4828043 - DNA, 25 bp, Homo sapien
gtaaaacacaaaccaattatgtcca

SEQ ID NO: 4828044 - DNA, 25 bp, Homo sapien
tggcaattgattctcgatatattcc

SEQ ID NO: 4828045 - DNA, 25 bp, Homo sapien
cctggcttagtgtatgtagttgtgc

SEQ ID NO: 4828046 - DNA, 25 bp, Homo sapien
tattgtccaatgactctgcctgtaa

SEQ ID NO: 4828047 - DNA, 25 bp, Homo sapien
catctcgtggcctctgttgaacctt

SEQ ID NO: 4828048 - DNA, 25 bp, Homo sapien
gaatctgcgcttccaccgaagccag

SEQ ID NO: 4828049 - DNA, 25 bp, Homo sapien
caatgcctacaaatttattgtccaa

SEQ ID NO: 4828050 - DNA, 25 bp, Homo sapien
taatttggccaatcgttttggcact

SEQ ID NO: 4828051 - DNA, 25 bp, Homo sapien
gaattcctatagcacctttgacaaa

SEQ ID NO: 4828052 - DNA, 25 bp, Homo sapien
ctatggaaagaattgaggtgtggca

SEQ ID NO: 4828053 - DNA, 25 bp, Homo sapien
tacagtactttagaccacatgagag

SEQ ID NO: 4828054 - DNA, 25 bp, Homo sapien
tgaggtcagccggtgagctctccca

SEQ ID NO: 4828055 - DNA, 25 bp, Homo sapien
gagtctggttcctcgtcttgattag

SEQ ID NO: 4828056 - DNA, 25 bp, Homo sapien
ccgatgtacggtatttgtatgttct

SEQ ID NO: 4828057 - DNA, 25 bp, Homo sapien
gacatgctcatgcatgtgattagca

SEQ ID NO: 4828058 - DNA, 25 bp, Homo sapien
tggtctgctgttcccatagtatgac

SEQ ID NO: 4828059 - DNA, 25 bp, Homo sapien
tgctgttcccatagtatgacccacc

SEQ ID NO: 4828060 - DNA, 25 bp, Homo sapien
cctttggtctgctgttcccatagta

SEQ ID NO: 4828061 - DNA, 25 bp, Homo sapien
ctgctgttcccatagtatgacccac

SEQ ID NO: 4828062 - DNA, 25 bp, Homo sapien
tctgccaacaccttctaggacttga

SEQ ID NO: 4828063 - DNA, 25 bp, Homo sapien
gatgcttcctctccacgtgtgactc

SEQ ID NO: 4828064 - DNA, 25 bp, Homo sapien
cagattatatggttgtatggtctca

SEQ ID NO: 4828065 - DNA, 25 bp, Homo sapien
cccacagccattgacctaggtcagt

SEQ ID NO: 4828066 - DNA, 25 bp, Homo sapien
gagtcttttctctgtcttagctagt

SEQ ID NO: 4828067 - DNA, 25 bp, Homo sapien
ggaatgactccacattaatttgtaa

SEQ ID NO: 4828068 - DNA, 25 bp, Homo sapien
gtggtgtcagttggaatgactccac

SEQ ID NO: 4828069 - DNA, 25 bp, Homo sapien
ctcatagcagtcttgaatgaaccct

SEQ ID NO: 4828070 - DNA, 25 bp, Homo sapien
tttcattgaatctcaaccacagaat

SEQ ID NO: 4828071 - DNA, 25 bp, Homo sapien
cccagagtaatagcttaaaattcta

SEQ ID NO: 4828072 - DNA, 25 bp, Homo sapien
cattaattacccagagtaatagctt

SEQ ID NO: 4828073 - DNA, 25 bp, Homo sapien
ctgaaacattaattacccagagtaa

SEQ ID NO: 4828074 - DNA, 25 bp, Homo sapien
ttgattgagtactgtggtggctcca

SEQ ID NO: 4828075 - DNA, 25 bp, Homo sapien
gtgctcaggtggcaggcagttaaat

SEQ ID NO: 4828076 - DNA, 25 bp, Homo sapien
caggcagttaaatctgttagcagac

SEQ ID NO: 4828077 - DNA, 25 bp, Homo sapien
ctgtcttgattgagtactgtggtgg

SEQ ID NO: 4828078 - DNA, 25 bp, Homo sapien
gcccagtttggcacgtgccaagcat

SEQ ID NO: 4828079 - DNA, 25 bp, Homo sapien
gccggatgaacagcaaacgctggag

SEQ ID NO: 4828080 - DNA, 25 bp, Homo sapien
gtttgtgcgccggatgaacagcaaa

SEQ ID NO: 4828081 - DNA, 25 bp, Homo sapien
ctggagcccagtttggcacgtgcca

SEQ ID NO: 4828082 - DNA, 25 bp, Homo sapien
catgttaagatgctctcagggacca

SEQ ID NO: 4828083 - DNA, 25 bp, Homo sapien
gccttgacaaatttagggcccagga

SEQ ID NO: 4828084 - DNA, 25 bp, Homo sapien
tagtagcagccgtcagagccttgac

SEQ ID NO: 4828085 - DNA, 25 bp, Homo sapien
tgtgcctgggaaaacacctgataga

SEQ ID NO: 4828086 - DNA, 25 bp, Homo sapien
caggcaaggacagaaagagcggttt

SEQ ID NO: 4828087 - DNA, 25 bp, Homo sapien
cctgtggcgtctgcggtactgcgtt

SEQ ID NO: 4828088 - DNA, 25 bp, Homo sapien
agcggtttccccataaaaatgcctg

SEQ ID NO: 4828089 - DNA, 25 bp, Homo sapien
gaatctttcccaacaggaggtagga

SEQ ID NO: 4828090 - DNA, 25 bp, Homo sapien
tctcccatgggtttggttgaacctg

SEQ ID NO: 4828091 - DNA, 25 bp, Homo sapien
gagattcgctgaactgagtgttcca

SEQ ID NO: 4828092 - DNA, 25 bp, Homo sapien
tgcactttaggatcaacttggagct

SEQ ID NO: 4828093 - DNA, 25 bp, Homo sapien
ttctgactcatgaacctgaaagcag

SEQ ID NO: 4828094 - DNA, 25 bp, Homo sapien
taattgtctaaacttgcttgatgag

SEQ ID NO: 4828095 - DNA, 25 bp, Homo sapien
agcgtgtcccttctggataggcatg

SEQ ID NO: 4828096 - DNA, 25 bp, Homo sapien
cagattgcactagctcagttctcag

SEQ ID NO: 4828097 - DNA, 25 bp, Homo sapien
tttggaaatattgtcagcgtgtccc

SEQ ID NO: 4828098 - DNA, 25 bp, Homo sapien
cattgtgtcttagatacactgttgg

SEQ ID NO: 4828099 - DNA, 25 bp, Homo sapien
aaaagactagccagacattgtgtct

SEQ ID NO: 4828100 - DNA, 25 bp, Homo sapien
atagcaaaagactagccagacattg

SEQ ID NO: 4828101 - DNA, 25 bp, Homo sapien
agcaaaagactagccagacattgtg

SEQ ID NO: 4828102 - DNA, 25 bp, Homo sapien
tcacttacgaaagactggcacaact

SEQ ID NO: 4828103 - DNA, 25 bp, Homo sapien
caatgtatggctttgtgttgtcacc

SEQ ID NO: 4828104 - DNA, 25 bp, Homo sapien
tctattatccgtcaaagctgggatg

SEQ ID NO: 4828105 - DNA, 25 bp, Homo sapien
gcttggtgcctgagacaaaatcact

SEQ ID NO: 4828106 - DNA, 25 bp, Homo sapien
accatgccaggctaaggtttgtagt

SEQ ID NO: 4828107 - DNA, 25 bp, Homo sapien
catgccaggctaaggtttgtagttt

SEQ ID NO: 4828108 - DNA, 25 bp, Homo sapien
ctcaggctggagcaccatcttggct

SEQ ID NO: 4828109 - DNA, 25 bp, Homo sapien
cctctgcctccttgctttaagcaat

SEQ ID NO: 4828110 - DNA, 25 bp, Homo sapien
tccatctacaacttcagccctaaaa

SEQ ID NO: 4828111 - DNA, 25 bp, Homo sapien
ccaggcctctgtccttattgtctaa

SEQ ID NO: 4828112 - DNA, 25 bp, Homo sapien
tcagctctatcctcctgtcagcgtt

SEQ ID NO: 4828113 - DNA, 25 bp, Homo sapien
cctgtcagcgttacaaaacagtatc

SEQ ID NO: 4828114 - DNA, 25 bp, Homo sapien
ctagctcagatcatagtcaggcgat

SEQ ID NO: 4828115 - DNA, 25 bp, Homo sapien
tgggtgagtactaccaagaggctgt

SEQ ID NO: 4828116 - DNA, 25 bp, Homo sapien
gattgtgcagtgagtaccatttgac

SEQ ID NO: 4828117 - DNA, 25 bp, Homo sapien
tgaaggcaacaagggactctctaag

SEQ ID NO: 4828118 - DNA, 25 bp, Homo sapien
taagagagccttgtgaataacggcc

SEQ ID NO: 4828119 - DNA, 25 bp, Homo sapien
tgttcctgaatgtacccagctcggg

SEQ ID NO: 4828120 - DNA, 25 bp, Homo sapien
gcaatgaccttatcactctgggtga

SEQ ID NO: 4828121 - DNA, 25 bp, Homo sapien
tgaacacaggctacatgaactcttg

SEQ ID NO: 4828122 - DNA, 25 bp, Homo sapien
gctaatgacaataactgtgtaactc

SEQ ID NO: 4828123 - DNA, 25 bp, Homo sapien
ggaacacctttattcttctgtcgat

SEQ ID NO: 4828124 - DNA, 25 bp, Homo sapien
ggtttccactgggagttcgcattga

SEQ ID NO: 4828125 - DNA, 25 bp, Homo sapien
tcgcattgaataagcccaggtaatc

SEQ ID NO: 4828126 - DNA, 25 bp, Homo sapien
tagtcacacacccagagaagtaagg

SEQ ID NO: 4828127 - DNA, 25 bp, Homo sapien
tgcccaccaggtacagtcgaatcat

SEQ ID NO: 4828128 - DNA, 25 bp, Homo sapien
cactgagacgcttgtgaggacagac

SEQ ID NO: 4828129 - DNA, 25 bp, Homo sapien
tccatgggcagatgttaatgaacac

SEQ ID NO: 4828130 - DNA, 25 bp, Homo sapien
tccaagctgcacgatttacagaagt

SEQ ID NO: 4828131 - DNA, 25 bp, Homo sapien
taacaagtgtgtgctagtggtagat

SEQ ID NO: 4828132 - DNA, 25 bp, Homo sapien
tgtgaattacttttgagataaccgc

SEQ ID NO: 4828133 - DNA, 25 bp, Homo sapien
tcacagctgtgtatgtgtgctcaaa

SEQ ID NO: 4828134 - DNA, 25 bp, Homo sapien
ccttgtagccaaagagagatggatc

SEQ ID NO: 4828135 - DNA, 25 bp, Homo sapien
tgtagccaaagagagatggatctag

SEQ ID NO: 4828136 - DNA, 25 bp, Homo sapien
ccaaagagagatggatctagatcca

SEQ ID NO: 4828137 - DNA, 25 bp, Homo sapien
tagccaaagagagatggatctagat

SEQ ID NO: 4828138 - DNA, 25 bp, Homo sapien
tgcactcattacaaagaatcctggt

SEQ ID NO: 4828139 - DNA, 25 bp, Homo sapien
ggttctggcattctgcagtggctgc

SEQ ID NO: 4828140 - DNA, 25 bp, Homo sapien
cggctgtctggcagagtagagttct

SEQ ID NO: 4828141 - DNA, 25 bp, Homo sapien
gaataaccgtgtctataaactcacg

SEQ ID NO: 4828142 - DNA, 25 bp, Homo sapien
tatagctgttctgtagacgaaagtc

SEQ ID NO: 4828143 - DNA, 25 bp, Homo sapien
tggcagtctatcaacgaggtacgta

SEQ ID NO: 4828144 - DNA, 25 bp, Homo sapien
gaaatgtctaattaggcaagcacct

SEQ ID NO: 4828145 - DNA, 25 bp, Homo sapien
tctctagtaataatgccttggcacc

SEQ ID NO: 4828146 - DNA, 25 bp, Homo sapien
acaaacggtgctctatacactaggg

SEQ ID NO: 4828147 - DNA, 25 bp, Homo sapien
tacgtgctggagtacgacttagaca

SEQ ID NO: 4828148 - DNA, 25 bp, Homo sapien
taatgtcatccaatatacgtgctgg

SEQ ID NO: 4828149 - DNA, 25 bp, Homo sapien
tggaaacacgggaaagtcctgtgac

SEQ ID NO: 4828150 - DNA, 25 bp, Homo sapien
tgtgaggtgatttgctggtcattca

SEQ ID NO: 4828151 - DNA, 25 bp, Homo sapien
catttctggttattgtctaggatgg

SEQ ID NO: 4828152 - DNA, 25 bp, Homo sapien
cttcctagagttcccactggaaatt

SEQ ID NO: 4828153 - DNA, 25 bp, Homo sapien
aaggttaaacttatatgtgaggtga

SEQ ID NO: 4828154 - DNA, 25 bp, Homo sapien
gccgtggcgggcaatgaactcataa

SEQ ID NO: 4828155 - DNA, 25 bp, Homo sapien
tcgatgcccgctaatcacttggagg

SEQ ID NO: 4828156 - DNA, 25 bp, Homo sapien
taaataaggacgctccatgagacac

SEQ ID NO: 4828157 - DNA, 25 bp, Homo sapien
tgagacacacattctgccgtggcgg

SEQ ID NO: 4828158 - DNA, 25 bp, Homo sapien
cttcttggccgtaggcattgcttca

SEQ ID NO: 4828159 - DNA, 25 bp, Homo sapien
tcagtcaggcctgcattcgcattgt

SEQ ID NO: 4828160 - DNA, 25 bp, Homo sapien
cttcagggatggattggtgaccaaa

SEQ ID NO: 4828161 - DNA, 25 bp, Homo sapien
gatttgctgatgtgaaggacatacc

SEQ ID NO: 4828162 - DNA, 25 bp, Homo sapien
catctttctttaaaatgccattgac

SEQ ID NO: 4828163 - DNA, 25 bp, Homo sapien
ctcagccttgatcccttcatctttc

SEQ ID NO: 4828164 - DNA, 25 bp, Homo sapien
tcagccttgatcccttcatctttct

SEQ ID NO: 4828165 - DNA, 25 bp, Homo sapien
tttctttaaaatgccattgactatt

SEQ ID NO: 4828166 - DNA, 25 bp, Homo sapien
gaagtttgactttctgactgctcac

SEQ ID NO: 4828167 - DNA, 25 bp, Homo sapien
caacaataggtagacagcgagcagc

SEQ ID NO: 4828168 - DNA, 25 bp, Homo sapien
tccacgtgggaaggaggacgtcaac

SEQ ID NO: 4828169 - DNA, 25 bp, Homo sapien
tctcttagatcttcggacaggtggt

SEQ ID NO: 4828170 - DNA, 25 bp, Homo sapien
gcacatttccggtttccttgtagaa

SEQ ID NO: 4828171 - DNA, 25 bp, Homo sapien
gctccgggcagctattgttaagaca

SEQ ID NO: 4828172 - DNA, 25 bp, Homo sapien
tagaaggagcagttcagaagccact

SEQ ID NO: 4828173 - DNA, 25 bp, Homo sapien
gacaaagcaacttcttaaggccttg

SEQ ID NO: 4828174 - DNA, 25 bp, Homo sapien
ggaaatggtacttcagaggctcacc

SEQ ID NO: 4828175 - DNA, 25 bp, Homo sapien
tgaggacacttctcgtaggaacatg

SEQ ID NO: 4828176 - DNA, 25 bp, Homo sapien
gaacatggttgacaactgaggccag

SEQ ID NO: 4828177 - DNA, 25 bp, Homo sapien
cacatagatgttgcttctgggcacc

SEQ ID NO: 4828178 - DNA, 25 bp, Homo sapien
tgtctaaacaacaaatctgggtatt

SEQ ID NO: 4828179 - DNA, 25 bp, Homo sapien
ctaaattatcgtctccatggaatcc

SEQ ID NO: 4828180 - DNA, 25 bp, Homo sapien
catctttaagatggcacagtcccct

SEQ ID NO: 4828181 - DNA, 25 bp, Homo sapien
gtgattcttagctccaatgccccat

SEQ ID NO: 4828182 - DNA, 25 bp, Homo sapien
gccttggcacagtggaacgacacga

SEQ ID NO: 4828183 - DNA, 25 bp, Homo sapien
cgccagaactctgtggtggtgccaa

SEQ ID NO: 4828184 - DNA, 25 bp, Homo sapien
tgcaacccgggatacctgcttcagg

SEQ ID NO: 4828185 - DNA, 25 bp, Homo sapien
cgaagtacagttgggaacgtgctcc

SEQ ID NO: 4828186 - DNA, 25 bp, Homo sapien
gcagaacctcgttagtttaatccga

SEQ ID NO: 4828187 - DNA, 25 bp, Homo sapien
gtgcagaacctcgttagtttaatcc

SEQ ID NO: 4828188 - DNA, 25 bp, Homo sapien
cagaacctcgttagtttaatccgat

SEQ ID NO: 4828189 - DNA, 25 bp, Homo sapien
cctcgttagtttaatccgatcccat

SEQ ID NO: 4828190 - DNA, 25 bp, Homo sapien
tatacggacaacgtctagttcctgc

SEQ ID NO: 4828191 - DNA, 25 bp, Homo sapien
gcaggaattggcttgctgatccagt

SEQ ID NO: 4828192 - DNA, 25 bp, Homo sapien
taactgccgttgtagcttaaatagg

SEQ ID NO: 4828193 - DNA, 25 bp, Homo sapien
tagcaaaggagaatcgtaactgccg

SEQ ID NO: 4828194 - DNA, 25 bp, Homo sapien
acttcccactgtcaaaaccatggac

SEQ ID NO: 4828195 - DNA, 25 bp, Homo sapien
ttgataatggaccaagaggctggtg

SEQ ID NO: 4828196 - DNA, 25 bp, Homo sapien
gccagagctcaattatacgtacata

SEQ ID NO: 4828197 - DNA, 25 bp, Homo sapien
gacagccagagctcaattatacgta

SEQ ID NO: 4828198 - DNA, 25 bp, Homo sapien
tcttctgtggttgagtcatgagtac

SEQ ID NO: 4828199 - DNA, 25 bp, Homo sapien
caatgttgggcgctaaatggccatc

SEQ ID NO: 4828200 - DNA, 25 bp, Homo sapien
ttagactgtccgaaagaaccatggt

SEQ ID NO: 4828201 - DNA, 25 bp, Homo sapien
gcacgtgtgcatggctttaatgaga

SEQ ID NO: 4828202 - DNA, 25 bp, Homo sapien
aagaagatgccctcgtcagcactag

SEQ ID NO: 4828203 - DNA, 25 bp, Homo sapien
gaactgtgcactggtgaatctgctc

SEQ ID NO: 4828204 - DNA, 25 bp, Homo sapien
tgcaacagagaatggctgagctgcc

SEQ ID NO: 4828205 - DNA, 25 bp, Homo sapien
gacttaaccagaagttgaagcagga

SEQ ID NO: 4828206 - DNA, 25 bp, Homo sapien
gggaactttctagctgacttaacca

SEQ ID NO: 4828207 - DNA, 25 bp, Homo sapien
tcttccagatcacgtgtcctctcaa

SEQ ID NO: 4828208 - DNA, 25 bp, Homo sapien
gtcctctcaagagccacagggtgct

SEQ ID NO: 4828209 - DNA, 25 bp, Homo sapien
cgtgtcctctcaagagccacagggt

SEQ ID NO: 4828210 - DNA, 25 bp, Homo sapien
agatcacgtgtcctctcaagagcca

SEQ ID NO: 4828211 - DNA, 25 bp, Homo sapien
ctctgctctcatccgtgtctccgac

SEQ ID NO: 4828212 - DNA, 25 bp, Homo sapien
tgccgcatgcgtggagatcacccag

SEQ ID NO: 4828213 - DNA, 25 bp, Homo sapien
gtgtctccgactgccgcatgcgtgg

SEQ ID NO: 4828214 - DNA, 25 bp, Homo sapien
tccgactgccgcatgcgtggagatc

SEQ ID NO: 4828215 - DNA, 25 bp, Homo sapien
tgaatgatgacctttcggaacccaa

SEQ ID NO: 4828216 - DNA, 25 bp, Homo sapien
caaatctgttcatgtgccggcagcc

SEQ ID NO: 4828217 - DNA, 25 bp, Homo sapien
tcctgaagtatatccggtgccctct

SEQ ID NO: 4828218 - DNA, 25 bp, Homo sapien
cattcttgagtgcttgggtccctga

SEQ ID NO: 4828219 - DNA, 25 bp, Homo sapien
tatgcacattgaacagcgtccaagt

SEQ ID NO: 4828220 - DNA, 25 bp, Homo sapien
tgcccctgtccttgtgagcatgaag

SEQ ID NO: 4828221 - DNA, 25 bp, Homo sapien
catagtcagacaagacagtgcctgc

SEQ ID NO: 4828222 - DNA, 25 bp, Homo sapien
tgcaggacgtggcttcaaataacct

SEQ ID NO: 4828223 - DNA, 25 bp, Homo sapien
cactccagcctaggcaacagagtga

SEQ ID NO: 4828224 - DNA, 25 bp, Homo sapien
ctaggcaacagagtgagactccatc

SEQ ID NO: 4828225 - DNA, 25 bp, Homo sapien
gcagtgagccaagatcgtgccactg

SEQ ID NO: 4828226 - DNA, 25 bp, Homo sapien
tcgcttgaacccgggtagtggagct

SEQ ID NO: 4828227 - DNA, 25 bp, Homo sapien
actctgatttgatggctgttgccga

SEQ ID NO: 4828228 - DNA, 25 bp, Homo sapien
tttgatggctgttgccgacatccat

SEQ ID NO: 4828229 - DNA, 25 bp, Homo sapien
ctgatttgatggctgttgccgacat

SEQ ID NO: 4828230 - DNA, 25 bp, Homo sapien
ctttgactctgatttgatggctgtt

SEQ ID NO: 4828231 - DNA, 25 bp, Homo sapien
cacagctgggaactaaggagtcctg

SEQ ID NO: 4828232 - DNA, 25 bp, Homo sapien
actctatgaagcaccaggagacaca

SEQ ID NO: 4828233 - DNA, 25 bp, Homo sapien
ccagactctatgaagcaccaggaga

SEQ ID NO: 4828234 - DNA, 25 bp, Homo sapien
ccacagctgggaactaaggagtcct

SEQ ID NO: 4828235 - DNA, 25 bp, Homo sapien
tcgcctcatgtctggtgcatttggg

SEQ ID NO: 4828236 - DNA, 25 bp, Homo sapien
gacggccgtaaatgagtgccaaacc

SEQ ID NO: 4828237 - DNA, 25 bp, Homo sapien
ctcattaatacggtccagggctcgc

SEQ ID NO: 4828238 - DNA, 25 bp, Homo sapien
tagcagctcattaatacggtccagg

SEQ ID NO: 4828239 - DNA, 25 bp, Homo sapien
ggtctagagttcgaagagtctcctc

SEQ ID NO: 4828240 - DNA, 25 bp, Homo sapien
gctacagagcaaagagcatgatccg

SEQ ID NO: 4828241 - DNA, 25 bp, Homo sapien
gcatgatccgcaaaacgccttttgg

SEQ ID NO: 4828242 - DNA, 25 bp, Homo sapien
ctaagcccacgtggaaaataggcac

SEQ ID NO: 4828243 - DNA, 25 bp, Homo sapien
cccatatgtctgctgaagaagccag

SEQ ID NO: 4828244 - DNA, 25 bp, Homo sapien
cccttctcaaagtatgacccctggg

SEQ ID NO: 4828245 - DNA, 25 bp, Homo sapien
tgttttatcggccaatatcttgcag

SEQ ID NO: 4828246 - DNA, 25 bp, Homo sapien
caggctcagtgcagccagcgtttgg

SEQ ID NO: 4828247 - DNA, 25 bp, Homo sapien
cctgctgtgccgaaatgttgcttcc

SEQ ID NO: 4828248 - DNA, 25 bp, Homo sapien
ctgccaggagcttgccatcaatgaa

SEQ ID NO: 4828249 - DNA, 25 bp, Homo sapien
catcaatgaattgtagagaccgaca

SEQ ID NO: 4828250 - DNA, 25 bp, Homo sapien
gagaccgacactttgctttaagacg

SEQ ID NO: 4828251 - DNA, 25 bp, Homo sapien
tgtttcccagaagtactcctgtgga

SEQ ID NO: 4828252 - DNA, 25 bp, Homo sapien
ggtcccaagccctctgctaagcaaa

SEQ ID NO: 4828253 - DNA, 25 bp, Homo sapien
gaagtgagagctactctatccaata

SEQ ID NO: 4828254 - DNA, 25 bp, Homo sapien
tattctgtgatggtgcaagtcccaa

SEQ ID NO: 4828255 - DNA, 25 bp, Homo sapien
acagcctttcatggctgctagccag

SEQ ID NO: 4828256 - DNA, 25 bp, Homo sapien
tacccatgggtttgcaatcttgctg

SEQ ID NO: 4828257 - DNA, 25 bp, Homo sapien
agccagagatcccaattatgccgcc

SEQ ID NO: 4828258 - DNA, 25 bp, Homo sapien
gctgcagttttctatacagcagtgc

SEQ ID NO: 4828259 - DNA, 25 bp, Homo sapien
gcaaaacttggcaaggacattggtg

SEQ ID NO: 4828260 - DNA, 25 bp, Homo sapien
caaggacattggtgtggtcatcttt

SEQ ID NO: 4828261 - DNA, 25 bp, Homo sapien
tctttgcacctgaaacaggaaagca

SEQ ID NO: 4828262 - DNA, 25 bp, Homo sapien
aatagacacagatgtctttgcacct

SEQ ID NO: 4828263 - DNA, 25 bp, Homo sapien
actgcaaggcttaaagtagagctgc

SEQ ID NO: 4828264 - DNA, 25 bp, Homo sapien
tcttttgctagaatgaagtcctttg

SEQ ID NO: 4828265 - DNA, 25 bp, Homo sapien
caatttgtggaagttgagagtaggc

SEQ ID NO: 4828266 - DNA, 25 bp, Homo sapien
gaattgagcggcctttactgcaagg

SEQ ID NO: 4828267 - DNA, 25 bp, Homo sapien
gaggcgcacagacactcatattgat

SEQ ID NO: 4828268 - DNA, 25 bp, Homo sapien
acctgattgagactgagcaaggctc

SEQ ID NO: 4828269 - DNA, 25 bp, Homo sapien
gggtagaatgactgcacctgattga

SEQ ID NO: 4828270 - DNA, 25 bp, Homo sapien
tgtccaaattgtgttcaacgctctc

SEQ ID NO: 4828271 - DNA, 25 bp, Homo sapien
tgcattcagggtggtatggctgttg

SEQ ID NO: 4828272 - DNA, 25 bp, Homo sapien
gcttaggttccgagatcaggtgcat

SEQ ID NO: 4828273 - DNA, 25 bp, Homo sapien
tgcttaggttccgagatcaggtgca

SEQ ID NO: 4828274 - DNA, 25 bp, Homo sapien
attcagggtggtatggctgttgact

SEQ ID NO: 4828275 - DNA, 25 bp, Homo sapien
cagactttcgcaactgttctctctc

SEQ ID NO: 4828276 - DNA, 25 bp, Homo sapien
ttcagcccggggacagactttcgca

SEQ ID NO: 4828277 - DNA, 25 bp, Homo sapien
gggacagactttcgcaactgttctc

SEQ ID NO: 4828278 - DNA, 25 bp, Homo sapien
agcttcggttcagcccggggacaga

SEQ ID NO: 4828279 - DNA, 25 bp, Homo sapien
ccttgtgcgttcatgtccctctgga

SEQ ID NO: 4828280 - DNA, 25 bp, Homo sapien
tgtattctgcccgtgggaagcacca

SEQ ID NO: 4828281 - DNA, 25 bp, Homo sapien
cacagctctttgcagagggtgacct

SEQ ID NO: 4828282 - DNA, 25 bp, Homo sapien
gagtgtgaggctgtccccgttaaga

SEQ ID NO: 4828283 - DNA, 25 bp, Homo sapien
gggcgatgccaactcttccttcaat

SEQ ID NO: 4828284 - DNA, 25 bp, Homo sapien
tcttccttcaataaacactcgatgg

SEQ ID NO: 4828285 - DNA, 25 bp, Homo sapien
cactcgatggtaacttgcttctaac

SEQ ID NO: 4828286 - DNA, 25 bp, Homo sapien
tcagggcgatgccaactcttccttc

SEQ ID NO: 4828287 - DNA, 25 bp, Homo sapien
gttcctggggcaccataggcttcct

SEQ ID NO: 4828288 - DNA, 25 bp, Homo sapien
gcaccataggcttcctagctcctgg

SEQ ID NO: 4828289 - DNA, 25 bp, Homo sapien
ttcttggtagcacgtggctcctcca

SEQ ID NO: 4828290 - DNA, 25 bp, Homo sapien
cctgggcctctcacttcttggtagc

SEQ ID NO: 4828291 - DNA, 25 bp, Homo sapien
acctccagaagcctcacttgggtct

SEQ ID NO: 4828292 - DNA, 25 bp, Homo sapien
ctgcgatgctgatgccctaggagaa

SEQ ID NO: 4828293 - DNA, 25 bp, Homo sapien
ttaggggtaacttgtggctcctctc

SEQ ID NO: 4828294 - DNA, 25 bp, Homo sapien
gctggtgtcccgcaggaaactgact

SEQ ID NO: 4828295 - DNA, 25 bp, Homo sapien
aaagttgtagcttcttgcctttgag

SEQ ID NO: 4828296 - DNA, 25 bp, Homo sapien
tagttaaacagcgactcaaagggaa

SEQ ID NO: 4828297 - DNA, 25 bp, Homo sapien
ggatcttgtcattcacagtagttaa

SEQ ID NO: 4828298 - DNA, 25 bp, Homo sapien
cattgctgtcatcagacgatgccgg

SEQ ID NO: 4828299 - DNA, 25 bp, Homo sapien
tgttgactgccgtttcttcagaagg

SEQ ID NO: 4828300 - DNA, 25 bp, Homo sapien
gagccagatgctctgtaatgtgact

SEQ ID NO: 4828301 - DNA, 25 bp, Homo sapien
tatgatcacctttagaaatttcaca

SEQ ID NO: 4828302 - DNA, 25 bp, Homo sapien
gactaactgtgctgatttttgctct

SEQ ID NO: 4828303 - DNA, 25 bp, Homo sapien
ggctgacgcttagtttgccccagag

SEQ ID NO: 4828304 - DNA, 25 bp, Homo sapien
tctcggtgctttgaacacagatcat

SEQ ID NO: 4828305 - DNA, 25 bp, Homo sapien
tgatgctgcaacacgatggaaaaaa

SEQ ID NO: 4828306 - DNA, 25 bp, Homo sapien
aactcgatatacaaattgatgctgc

SEQ ID NO: 4828307 - DNA, 25 bp, Homo sapien
gacccttgaggagctgctagcttga

SEQ ID NO: 4828308 - DNA, 25 bp, Homo sapien
tccctcacagcctccaaaggctcct

SEQ ID NO: 4828309 - DNA, 25 bp, Homo sapien
ctgaccctccatctctcccgtccct

SEQ ID NO: 4828310 - DNA, 25 bp, Homo sapien
tccatctctcccgtccctcacagcc

SEQ ID NO: 4828311 - DNA, 25 bp, Homo sapien
cctcacagcctccaaaggctcctcc

SEQ ID NO: 4828312 - DNA, 25 bp, Homo sapien
tgtgcagcgggagatgcagacgctt

SEQ ID NO: 4828313 - DNA, 25 bp, Homo sapien
gtgcagcgggagatgcagacgctta

SEQ ID NO: 4828314 - DNA, 25 bp, Homo sapien
ctgtgcagcgggagatgcagacgct

SEQ ID NO: 4828315 - DNA, 25 bp, Homo sapien
tgcagcgggagatgcagacgcttac

SEQ ID NO: 4828316 - DNA, 25 bp, Homo sapien
gattctatatcataaggcctgacaa

SEQ ID NO: 4828317 - DNA, 25 bp, Homo sapien
tgtccagattctatatcataaggcc

SEQ ID NO: 4828318 - DNA, 25 bp, Homo sapien
taaggcctgacaatggagctaccag

SEQ ID NO: 4828319 - DNA, 25 bp, Homo sapien
gacaatggagctaccagatttagga

SEQ ID NO: 4828320 - DNA, 25 bp, Homo sapien
catgatgtggacagtcgttgcattt

SEQ ID NO: 4828321 - DNA, 25 bp, Homo sapien
tcaggccccagtgccgcatgatgtg

SEQ ID NO: 4828322 - DNA, 25 bp, Homo sapien
ccaattaagaactcatagggcagca

SEQ ID NO: 4828323 - DNA, 25 bp, Homo sapien
tattacgtgatttccatttgatcct

SEQ ID NO: 4828324 - DNA, 25 bp, Homo sapien
tctacacccaaggaatcggagcctg

SEQ ID NO: 4828325 - DNA, 25 bp, Homo sapien
tgttaaatatcagaggtgcctctac

SEQ ID NO: 4828326 - DNA, 25 bp, Homo sapien
gagatgatgacttatgtctgtcatt

SEQ ID NO: 4828327 - DNA, 25 bp, Homo sapien
tccctacttggttggtagttgagga

SEQ ID NO: 4828328 - DNA, 25 bp, Homo sapien
gaaaacatcaccatgtcttgcagga

SEQ ID NO: 4828329 - DNA, 25 bp, Homo sapien
catacatgcatatgtccagtggcag

SEQ ID NO: 4828330 - DNA, 25 bp, Homo sapien
cacttttatggtataagcaaaatgg

SEQ ID NO: 4828331 - DNA, 25 bp, Homo sapien
ggtggtacttacaaatccatacatg

SEQ ID NO: 4828332 - DNA, 25 bp, Homo sapien
ccaaacctgacacgttcagttcaca

SEQ ID NO: 4828333 - DNA, 25 bp, Homo sapien
aacctgacacgttcagttcacagaa

SEQ ID NO: 4828334 - DNA, 25 bp, Homo sapien
tcagttcacagaagaacccttttcc

SEQ ID NO: 4828335 - DNA, 25 bp, Homo sapien
ggtgaccccaaacctgacacgttca

SEQ ID NO: 4828336 - DNA, 25 bp, Homo sapien
ctgagaatgagccagatggcactta

SEQ ID NO: 4828337 - DNA, 25 bp, Homo sapien
tgagaatgagccagatggcacttac

SEQ ID NO: 4828338 - DNA, 25 bp, Homo sapien
gagtcactgaagcagggacatcttg

SEQ ID NO: 4828339 - DNA, 25 bp, Homo sapien
tagtaatgaacagttgagagtcact

SEQ ID NO: 4828340 - DNA, 25 bp, Homo sapien
cacagtgggcttcggataatgcgtt

SEQ ID NO: 4828341 - DNA, 25 bp, Homo sapien
atgcgttttaactggacacttcagg

SEQ ID NO: 4828342 - DNA, 25 bp, Homo sapien
tcaatgaacgccgacagcatgtgtt

SEQ ID NO: 4828343 - DNA, 25 bp, Homo sapien
cagcatgtgtttcaatgcaacgtca

SEQ ID NO: 4828344 - DNA, 25 bp, Homo sapien
tttcaatgcaacgtcataaaagaag

SEQ ID NO: 4828345 - DNA, 25 bp, Homo sapien
gcttgtatgtcttcaatgaacgccg

SEQ ID NO: 4828346 - DNA, 25 bp, Homo sapien
tgggcgccagtcgcatttgttgtag

SEQ ID NO: 4828347 - DNA, 25 bp, Homo sapien
gtaggagggacttgcagagttttca

SEQ ID NO: 4828348 - DNA, 25 bp, Homo sapien
gcgccagtcgcatttgttgtaggag

SEQ ID NO: 4828349 - DNA, 25 bp, Homo sapien
tgtaggagggacttgcagagttttc

SEQ ID NO: 4828350 - DNA, 25 bp, Homo sapien
ccccgtcacagacatggtatgttct

SEQ ID NO: 4828351 - DNA, 25 bp, Homo sapien
cgtcacagacatggtatgttctcac

SEQ ID NO: 4828352 - DNA, 25 bp, Homo sapien
tccccgtcacagacatggtatgttc

SEQ ID NO: 4828353 - DNA, 25 bp, Homo sapien
ccgtcacagacatggtatgttctca

SEQ ID NO: 4828354 - DNA, 25 bp, Homo sapien
tcaccactgctgtgcaagaacattg

SEQ ID NO: 4828355 - DNA, 25 bp, Homo sapien
gaataccctctacgcatgccatcat

SEQ ID NO: 4828356 - DNA, 25 bp, Homo sapien
ttctcatggctaagatgttccttgt

SEQ ID NO: 4828357 - DNA, 25 bp, Homo sapien
cttgttgacgctgattgcctctggg

SEQ ID NO: 4828358 - DNA, 25 bp, Homo sapien
tcaggggatgaggttaacctgacta

SEQ ID NO: 4828359 - DNA, 25 bp, Homo sapien
gaggttaacctgactattcccatcc

SEQ ID NO: 4828360 - DNA, 25 bp, Homo sapien
gggatgaggttaacctgactattcc

SEQ ID NO: 4828361 - DNA, 25 bp, Homo sapien
aacctgactattcccatccgacttg

SEQ ID NO: 4828362 - DNA, 25 bp, Homo sapien
gaagcagcactttaatatcctcagg

SEQ ID NO: 4828363 - DNA, 25 bp, Homo sapien
ggccaagattccataggctataaga

SEQ ID NO: 4828364 - DNA, 25 bp, Homo sapien
taggctataagaagcagcactttaa

SEQ ID NO: 4828365 - DNA, 25 bp, Homo sapien
ctgtggccaagattccataggctat

SEQ ID NO: 4828366 - DNA, 25 bp, Homo sapien
tggtgccaactttcctgtgctcttg

SEQ ID NO: 4828367 - DNA, 25 bp, Homo sapien
ctctttgtgccagggcggagaatct

SEQ ID NO: 4828368 - DNA, 25 bp, Homo sapien
gaagtagcacctcttttgcaaagcg

SEQ ID NO: 4828369 - DNA, 25 bp, Homo sapien
catatgggtcatgttcagtcactct

SEQ ID NO: 4828370 - DNA, 25 bp, Homo sapien
ctgtctcaggagcacgccgtgtgtt

SEQ ID NO: 4828371 - DNA, 25 bp, Homo sapien
gatatttccgcactgctgtctcagg

SEQ ID NO: 4828372 - DNA, 25 bp, Homo sapien
tctgggttcctcctgacgaatgtga

SEQ ID NO: 4828373 - DNA, 25 bp, Homo sapien
cgaccacgctgtgggaacattcctg

SEQ ID NO: 4828374 - DNA, 25 bp, Homo sapien
tctggtgtggattgagattaaagcc

SEQ ID NO: 4828375 - DNA, 25 bp, Homo sapien
ttcctctggtgtggattgagattaa

SEQ ID NO: 4828376 - DNA, 25 bp, Homo sapien
ggtgtggattgagattaaagccttg

SEQ ID NO: 4828377 - DNA, 25 bp, Homo sapien
tgtggattgagattaaagccttgta

SEQ ID NO: 4828378 - DNA, 25 bp, Homo sapien
ttcactagcccgactgtgtggtccc

SEQ ID NO: 4828379 - DNA, 25 bp, Homo sapien
ggctggtttttcatcgcatttttca

SEQ ID NO: 4828380 - DNA, 25 bp, Homo sapien
ttttcacccatatttactaggtggc

SEQ ID NO: 4828381 - DNA, 25 bp, Homo sapien
cgaatatttgccatgggtttgccac

SEQ ID NO: 4828382 - DNA, 25 bp, Homo sapien
gctgagacctggaggcatcaccacc

SEQ ID NO: 4828383 - DNA, 25 bp, Homo sapien
gagcaggtggcgctgagacctggag

SEQ ID NO: 4828384 - DNA, 25 bp, Homo sapien
tggaggcatcaccaccagaggaagg

SEQ ID NO: 4828385 - DNA, 25 bp, Homo sapien
ggtggcgctgagacctggaggcatc

SEQ ID NO: 4828386 - DNA, 25 bp, Homo sapien
atactacaaaatggagcagggcagg

SEQ ID NO: 4828387 - DNA, 25 bp, Homo sapien
ttcaatactacaaaatggagcaggg

SEQ ID NO: 4828388 - DNA, 25 bp, Homo sapien
tgagacactcttttagaatcggtga

SEQ ID NO: 4828389 - DNA, 25 bp, Homo sapien
tttagaatcggtgaaagaggaagta

SEQ ID NO: 4828390 - DNA, 25 bp, Homo sapien
tgtccacgtattcatcctctttcct

SEQ ID NO: 4828391 - DNA, 25 bp, Homo sapien
tttgtgtccacgtattcatcctctt

SEQ ID NO: 4828392 - DNA, 25 bp, Homo sapien
gaatctttgtgtccacgtattcatc

SEQ ID NO: 4828393 - DNA, 25 bp, Homo sapien
tctttgtgtccacgtattcatcctc

SEQ ID NO: 4828394 - DNA, 25 bp, Homo sapien
gaatgatggtccgtgcaccttctca

SEQ ID NO: 4828395 - DNA, 25 bp, Homo sapien
tgatggtccgtgcaccttctcacat

SEQ ID NO: 4828396 - DNA, 25 bp, Homo sapien
gagaatgatggtccgtgcaccttct

SEQ ID NO: 4828397 - DNA, 25 bp, Homo sapien
ctgagaatgatggtccgtgcacctt

SEQ ID NO: 4828398 - DNA, 25 bp, Homo sapien
tgcgtggtgacaacgcccgtgctgc

SEQ ID NO: 4828399 - DNA, 25 bp, Homo sapien
gcataatctgtcactgctggaacca

SEQ ID NO: 4828400 - DNA, 25 bp, Homo sapien
tgcactgtacttgggatcttaatcc

SEQ ID NO: 4828401 - DNA, 25 bp, Homo sapien
tccaggacagaagaacctcatcatg

SEQ ID NO: 4828402 - DNA, 25 bp, Homo sapien
ggtccaggtgttgtgcagcatcttt

SEQ ID NO: 4828403 - DNA, 25 bp, Homo sapien
gtagagctctctaaatgcactggct

SEQ ID NO: 4828404 - DNA, 25 bp, Homo sapien
tcgctgtgcacatctgaaggaaagg

SEQ ID NO: 4828405 - DNA, 25 bp, Homo sapien
tgcactggctactgttcaaaggtcg

SEQ ID NO: 4828406 - DNA, 25 bp, Homo sapien
ccttctccacggcactgaaatggca

SEQ ID NO: 4828407 - DNA, 25 bp, Homo sapien
aaatggcatccaagggcagtttcct

SEQ ID NO: 4828408 - DNA, 25 bp, Homo sapien
aatacactccacatgatctctatca

SEQ ID NO: 4828409 - DNA, 25 bp, Homo sapien
ctctatcatgatacacgtgggctat

SEQ ID NO: 4828410 - DNA, 25 bp, Homo sapien
tcagatgtgcggtgtgctctagaac

SEQ ID NO: 4828411 - DNA, 25 bp, Homo sapien
tagagttgcaattgacagccggcca

SEQ ID NO: 4828412 - DNA, 25 bp, Homo sapien
gacgtgctctagaggtgcagttgac

SEQ ID NO: 4828413 - DNA, 25 bp, Homo sapien
taagcttgccactcgctttgcagga

SEQ ID NO: 4828414 - DNA, 25 bp, Homo sapien
tatgaactgtcagtcgaggtttttt

SEQ ID NO: 4828415 - DNA, 25 bp, Homo sapien
cacttgccaattctatatgaactgt

SEQ ID NO: 4828416 - DNA, 25 bp, Homo sapien
ttgccaattctatatgaactgtcag

SEQ ID NO: 4828417 - DNA, 25 bp, Homo sapien
tcacttgccaattctatatgaactg

SEQ ID NO: 4828418 - DNA, 25 bp, Homo sapien
ccagatccttcactaaaaccttgga

SEQ ID NO: 4828419 - DNA, 25 bp, Homo sapien
ccccagatccttcactaaaaccttg

SEQ ID NO: 4828420 - DNA, 25 bp, Homo sapien
cagatccttcactaaaaccttggac

SEQ ID NO: 4828421 - DNA, 25 bp, Homo sapien
tccttctcatagccccagatccttc

SEQ ID NO: 4828422 - DNA, 25 bp, Homo sapien
ctcagcacccggtaccccagcccac

SEQ ID NO: 4828423 - DNA, 25 bp, Homo sapien
ccagcccacgactgcgtggccgctg

SEQ ID NO: 4828424 - DNA, 25 bp, Homo sapien
cacccggtaccccagcccacgactg

SEQ ID NO: 4828425 - DNA, 25 bp, Homo sapien
cagcccacgactgcgtggccgctgc

SEQ ID NO: 4828426 - DNA, 25 bp, Homo sapien
gcttccattgaagccacagcttcaa

SEQ ID NO: 4828427 - DNA, 25 bp, Homo sapien
cagcttcaatgccatagagaccatt

SEQ ID NO: 4828428 - DNA, 25 bp, Homo sapien
cttcaatgccatagagaccattttt

SEQ ID NO: 4828429 - DNA, 25 bp, Homo sapien
tccattgaagccacagcttcaatgc

SEQ ID NO: 4828430 - DNA, 25 bp, Homo sapien
ggagaatggctgcttagagaccatt

SEQ ID NO: 4828431 - DNA, 25 bp, Homo sapien
gaccattagcagctggtgtagtgaa

SEQ ID NO: 4828432 - DNA, 25 bp, Homo sapien
tcatggccgtgcgttctgtgaaatc

SEQ ID NO: 4828433 - DNA, 25 bp, Homo sapien
tgcttagagaccattagcagctggt

SEQ ID NO: 4828434 - DNA, 25 bp, Homo sapien
ttctctgtgatgctttgccattctc

SEQ ID NO: 4828435 - DNA, 25 bp, Homo sapien
attctctgtgatgctttgccattct

SEQ ID NO: 4828436 - DNA, 25 bp, Homo sapien
tcacttggcaagtcttgcgtgtttc

SEQ ID NO: 4828437 - DNA, 25 bp, Homo sapien
tatcagtgcatatcatgagcctcca

SEQ ID NO: 4828438 - DNA, 25 bp, Homo sapien
caagtcttgcgtgtttctggtatca

SEQ ID NO: 4828439 - DNA, 25 bp, Homo sapien
tctggtatcagtgcatatcatgagc

SEQ ID NO: 4828440 - DNA, 25 bp, Homo sapien
ggcagcacctgatgtgtccactgct

SEQ ID NO: 4828441 - DNA, 25 bp, Homo sapien
gaggcagcacctgatgtgtccactg

SEQ ID NO: 4828442 - DNA, 25 bp, Homo sapien
gcttatccttcctggtagaatgccc

SEQ ID NO: 4828443 - DNA, 25 bp, Homo sapien
tagaatgcccctcagggaggcagca

SEQ ID NO: 4828444 - DNA, 25 bp, Homo sapien
caggtttaagtggaactgaatgaag

SEQ ID NO: 4828445 - DNA, 25 bp, Homo sapien
tcccatttctaaggcagtggactcc

SEQ ID NO: 4828446 - DNA, 25 bp, Homo sapien
ccttacttaggtagcatgcctggtc

SEQ ID NO: 4828447 - DNA, 25 bp, Homo sapien
caaagtgctctcagatagatgcagg

SEQ ID NO: 4828448 - DNA, 25 bp, Homo sapien
ttgtgaaggttgagtacggatactg

SEQ ID NO: 4828449 - DNA, 25 bp, Homo sapien
gggtgaccaacacgccagggcagca

SEQ ID NO: 4828450 - DNA, 25 bp, Homo sapien
tccacagcagtactgagagatctcg

SEQ ID NO: 4828451 - DNA, 25 bp, Homo sapien
ggaaggctgtttctaaatggactgg

SEQ ID NO: 4828452 - DNA, 25 bp, Homo sapien
ttacgctgtggccactggcccaaga

SEQ ID NO: 4828453 - DNA, 25 bp, Homo sapien
gctgtggccactggcccaagataca

SEQ ID NO: 4828454 - DNA, 25 bp, Homo sapien
acgctgtggccactggcccaagata

SEQ ID NO: 4828455 - DNA, 25 bp, Homo sapien
ggcccaagatacatctgcatggatg

SEQ ID NO: 4828456 - DNA, 25 bp, Homo sapien
taacatgagaatgcaatccagtcgg

SEQ ID NO: 4828457 - DNA, 25 bp, Homo sapien
gaatgcaatccagtcggagaaacag

SEQ ID NO: 4828458 - DNA, 25 bp, Homo sapien
aagggaagtataacatgagaatgca

SEQ ID NO: 4828459 - DNA, 25 bp, Homo sapien
caatccagtcggagaaacaggagcc

SEQ ID NO: 4828460 - DNA, 25 bp, Homo sapien
tgaatgaccagcagttcaagtgaca

SEQ ID NO: 4828461 - DNA, 25 bp, Homo sapien
aatgaccagcagttcaagtgacagc

SEQ ID NO: 4828462 - DNA, 25 bp, Homo sapien
atgaccagcagttcaagtgacagca

SEQ ID NO: 4828463 - DNA, 25 bp, Homo sapien
gaatgaccagcagttcaagtgacag

SEQ ID NO: 4828464 - DNA, 25 bp, Homo sapien
cattcgggaccactcttgtggtcgg

SEQ ID NO: 4828465 - DNA, 25 bp, Homo sapien
gagctgtataagttccattcgggac

SEQ ID NO: 4828466 - DNA, 25 bp, Homo sapien
ctatttgaaccgaccctggtaatga

SEQ ID NO: 4828467 - DNA, 25 bp, Homo sapien
accactcttgtggtcgggtccatac

SEQ ID NO: 4828468 - DNA, 25 bp, Homo sapien
catctgttggggaagccgttttcct

SEQ ID NO: 4828469 - DNA, 25 bp, Homo sapien
cacacacggaggcaccatctgttgg

SEQ ID NO: 4828470 - DNA, 25 bp, Homo sapien
cacattcgtgtgcacggctgtgtcc

SEQ ID NO: 4828471 - DNA, 25 bp, Homo sapien
cattcgtgtgcacggctgtgtcccc

SEQ ID NO: 4828472 - DNA, 25 bp, Homo sapien
ggcgtttcctctccgtctgtaaatg

SEQ ID NO: 4828473 - DNA, 25 bp, Homo sapien
catgtgtgacacacgcctctcctct

SEQ ID NO: 4828474 - DNA, 25 bp, Homo sapien
tgtctctctagaagccggcgtttcc

SEQ ID NO: 4828475 - DNA, 25 bp, Homo sapien
aatgcatctgaagtgcggtcgctac

SEQ ID NO: 4828476 - DNA, 25 bp, Homo sapien
cacacagtagtgtaatagaacgttg

SEQ ID NO: 4828477 - DNA, 25 bp, Homo sapien
tgatgaagccccatggatagacgta

SEQ ID NO: 4828478 - DNA, 25 bp, Homo sapien
agccccatggatagacgtagtcaca

SEQ ID NO: 4828479 - DNA, 25 bp, Homo sapien
gatagacgtagtcacacagtagtgt

SEQ ID NO: 4828480 - DNA, 25 bp, Homo sapien
tttgaaccttagagagggtgttgag

SEQ ID NO: 4828481 - DNA, 25 bp, Homo sapien
tcccaatctttcaggccgaatccac

SEQ ID NO: 4828482 - DNA, 25 bp, Homo sapien
ccactgactgaatccactttctcag

SEQ ID NO: 4828483 - DNA, 25 bp, Homo sapien
tcacttatttgaaccttagagaggg

SEQ ID NO: 4828484 - DNA, 25 bp, Homo sapien
tatttgccgtaagacagtgaagaat

SEQ ID NO: 4828485 - DNA, 25 bp, Homo sapien
ttatttgccgtaagacagtgaagaa

SEQ ID NO: 4828486 - DNA, 25 bp, Homo sapien
ccaccaatacgtagaaatggggtat

SEQ ID NO: 4828487 - DNA, 25 bp, Homo sapien
ttgccgtaagacagtgaagaattaa

SEQ ID NO: 4828488 - DNA, 25 bp, Homo sapien
gtttcctttgacgttatgtgagctt

SEQ ID NO: 4828489 - DNA, 25 bp, Homo sapien
ttgaatacggccgttgatcaatatt

SEQ ID NO: 4828490 - DNA, 25 bp, Homo sapien
taatcttaggatgtatggcatccat

SEQ ID NO: 4828491 - DNA, 25 bp, Homo sapien
gccgttgatcaatatttagggtttc

SEQ ID NO: 4828492 - DNA, 25 bp, Homo sapien
cccgaagatgcaatctcctgctcta

SEQ ID NO: 4828493 - DNA, 25 bp, Homo sapien
gagatggtggcacacccgaagatgc

SEQ ID NO: 4828494 - DNA, 25 bp, Homo sapien
gcacacccgaagatgcaatctcctg

SEQ ID NO: 4828495 - DNA, 25 bp, Homo sapien
ggtggcacacccgaagatgcaatct

SEQ ID NO: 4828496 - DNA, 25 bp, Homo sapien
tctctcctgttagtgttgtctaagg

SEQ ID NO: 4828497 - DNA, 25 bp, Homo sapien
gatgtgccgcgtgatatgtggcagc

SEQ ID NO: 4828498 - DNA, 25 bp, Homo sapien
gctgagtctctgacgtagagcttct

SEQ ID NO: 4828499 - DNA, 25 bp, Homo sapien
tagtgttgtctaaggcccatctgct

SEQ ID NO: 4828500 - DNA, 25 bp, Homo sapien
cttggttgttagtcctcatttctgt

SEQ ID NO: 4828501 - DNA, 25 bp, Homo sapien
cagacagaaacgaccatgagatgga

SEQ ID NO: 4828502 - DNA, 25 bp, Homo sapien
aagcagacagaaacgaccatgagat

SEQ ID NO: 4828503 - DNA, 25 bp, Homo sapien
acagaaacgaccatgagatggaggg

SEQ ID NO: 4828504 - DNA, 25 bp, Homo sapien
gcagacagaaacgaccatgagatgg

SEQ ID NO: 4828505 - DNA, 25 bp, Homo sapien
gatgacagtgttggtacaggcagac

SEQ ID NO: 4828506 - DNA, 25 bp, Homo sapien
agctcctttgcctggtgtcccggtg

SEQ ID NO: 4828507 - DNA, 25 bp, Homo sapien
tatgaagcatgaggcgatgacagtg

SEQ ID NO: 4828508 - DNA, 25 bp, Homo sapien
gaggttcagcttgggagctcctttg

SEQ ID NO: 4828509 - DNA, 25 bp, Homo sapien
taagacgatcataaccctgaaattg

SEQ ID NO: 4828510 - DNA, 25 bp, Homo sapien
tcatttattaagacgatcataaccc

SEQ ID NO: 4828511 - DNA, 25 bp, Homo sapien
cctgaaattgcagcatgcggtcctg

SEQ ID NO: 4828512 - DNA, 25 bp, Homo sapien
gcagcatgcggtcctgcttgtattt

SEQ ID NO: 4828513 - DNA, 25 bp, Homo sapien
ccaagggccgtttcctcactattct

SEQ ID NO: 4828514 - DNA, 25 bp, Homo sapien
gagagtctgccaagggccgtttcct

SEQ ID NO: 4828515 - DNA, 25 bp, Homo sapien
cactgagagtctgccaagggccgtt

SEQ ID NO: 4828516 - DNA, 25 bp, Homo sapien
gctcccactgagagtctgccaaggg

SEQ ID NO: 4828517 - DNA, 25 bp, Homo sapien
aatgtgttcctaagtctccacagcc

SEQ ID NO: 4828518 - DNA, 25 bp, Homo sapien
aaatgtgttcctaagtctccacagc

SEQ ID NO: 4828519 - DNA, 25 bp, Homo sapien
aaagcttctgtaagttctcagggct

SEQ ID NO: 4828520 - DNA, 25 bp, Homo sapien
gttggtgatttcaccccgtggagag

SEQ ID NO: 4828521 - DNA, 25 bp, Homo sapien
gatttcaccccgtggagagaagtcc

SEQ ID NO: 4828522 - DNA, 25 bp, Homo sapien
cagggctttgatacttgaagacaca

SEQ ID NO: 4828523 - DNA, 25 bp, Homo sapien
tagtgttagaagctttccgtaaggc

SEQ ID NO: 4828524 - DNA, 25 bp, Homo sapien
ccgtaaggccatgggtttgatcctg

SEQ ID NO: 4828525 - DNA, 25 bp, Homo sapien
gggcctgtagtgttagaagctttcc

SEQ ID NO: 4828526 - DNA, 25 bp, Homo sapien
tagaagctttccgtaaggccatggg

SEQ ID NO: 4828527 - DNA, 25 bp, Homo sapien
ctgacagtgtttgccagatgcatgt

SEQ ID NO: 4828528 - DNA, 25 bp, Homo sapien
tcagggcactttttccgcaggggtc

SEQ ID NO: 4828529 - DNA, 25 bp, Homo sapien
gcatgtgaagactgttgaggaacca

SEQ ID NO: 4828530 - DNA, 25 bp, Homo sapien
gctgttttctcagggcactttttcc

SEQ ID NO: 4828531 - DNA, 25 bp, Homo sapien
attcctccacgggattgcacctgtc

SEQ ID NO: 4828532 - DNA, 25 bp, Homo sapien
ctccacgggattgcacctgtcagcc

SEQ ID NO: 4828533 - DNA, 25 bp, Homo sapien
tcctccacgggattgcacctgtcag

SEQ ID NO: 4828534 - DNA, 25 bp, Homo sapien
ccacgggattgcacctgtcagccat

SEQ ID NO: 4828535 - DNA, 25 bp, Homo sapien
gtaattcacgagtcttctcagatca

SEQ ID NO: 4828536 - DNA, 25 bp, Homo sapien
acgagtcttctcagatcattcttac

SEQ ID NO: 4828537 - DNA, 25 bp, Homo sapien
ctaatttgtagtaattcacgagtct

SEQ ID NO: 4828538 - DNA, 25 bp, Homo sapien
ttcacgagtcttctcagatcattct

SEQ ID NO: 4828539 - DNA, 25 bp, Homo sapien
tatgaggaataattgcagggcaggc

SEQ ID NO: 4828540 - DNA, 25 bp, Homo sapien
caaaacccttataccatgaggagga

SEQ ID NO: 4828541 - DNA, 25 bp, Homo sapien
acacatatcggcgttaatgcacggc

SEQ ID NO: 4828542 - DNA, 25 bp, Homo sapien
tcctcttcgcattgctagtacaatg

SEQ ID NO: 4828543 - DNA, 25 bp, Homo sapien
cagagaatcaggtagcacgtgtgta

SEQ ID NO: 4828544 - DNA, 25 bp, Homo sapien
ccaaggccaaggacaaaatttgtgt

SEQ ID NO: 4828545 - DNA, 25 bp, Homo sapien
tcatgatgccgtgttgagaatggct

SEQ ID NO: 4828546 - DNA, 25 bp, Homo sapien
gatgaggacccaccttaaagatgtc

SEQ ID NO: 4828547 - DNA, 25 bp, Homo sapien
tccacccttgcttctgatgaacatg

SEQ ID NO: 4828548 - DNA, 25 bp, Homo sapien
tgtccagtaagcctgtagaacactg

SEQ ID NO: 4828549 - DNA, 25 bp, Homo sapien
ctgatgaacatgctgatctaaaatt

SEQ ID NO: 4828550 - DNA, 25 bp, Homo sapien
taagcctgtagaacactgagctcag

SEQ ID NO: 4828551 - DNA, 25 bp, Homo sapien
ctgaaggtcgctggaatttcagcat

SEQ ID NO: 4828552 - DNA, 25 bp, Homo sapien
gaaggtcgctggaatttcagcatca

SEQ ID NO: 4828553 - DNA, 25 bp, Homo sapien
tattcttcagtatcttgtaaatgtg

SEQ ID NO: 4828554 - DNA, 25 bp, Homo sapien
gtcgctggaatttcagcatcaagct

SEQ ID NO: 4828555 - DNA, 25 bp, Homo sapien
tctgaaagcctattttttagttcta

SEQ ID NO: 4828556 - DNA, 25 bp, Homo sapien
ttctcccagggacacaattcccctg

SEQ ID NO: 4828557 - DNA, 25 bp, Homo sapien
ggacacaattcccctggttccctgc

SEQ ID NO: 4828558 - DNA, 25 bp, Homo sapien
tgatagagtctgaaagcctattttt

SEQ ID NO: 4828559 - DNA, 25 bp, Homo sapien
gacaccaagcagaggctatggcact

SEQ ID NO: 4828560 - DNA, 25 bp, Homo sapien
tcatgtttccaaacgatatcaccct

SEQ ID NO: 4828561 - DNA, 25 bp, Homo sapien
actgcctcgagtggatgagggtcct

SEQ ID NO: 4828562 - DNA, 25 bp, Homo sapien
cactgtgccgactgcactacgcgaa

SEQ ID NO: 4828563 - DNA, 25 bp, Homo sapien
tgctgtgccacattatcaaccccga

SEQ ID NO: 4828564 - DNA, 25 bp, Homo sapien
gggtacacgtctttggagtctgctg

SEQ ID NO: 4828565 - DNA, 25 bp, Homo sapien
tatcaaccccgaattgccagctctg

SEQ ID NO: 4828566 - DNA, 25 bp, Homo sapien
ccagctctgcaagtcgatgttgggc

SEQ ID NO: 4828567 - DNA, 25 bp, Homo sapien
ctttaccgtaaaggtcatagaacag

SEQ ID NO: 4828568 - DNA, 25 bp, Homo sapien
tgtcacgcgcatcaaagatgccatc

SEQ ID NO: 4828569 - DNA, 25 bp, Homo sapien
agcttcacccagagcatgtcacgcg

SEQ ID NO: 4828570 - DNA, 25 bp, Homo sapien
tgttattgactctaagttgagcttc

SEQ ID NO: 4828571 - DNA, 25 bp, Homo sapien
tatagccgtatgtatcatttctggc

SEQ ID NO: 4828572 - DNA, 25 bp, Homo sapien
gacacagtcaagttcacaaaacggg

SEQ ID NO: 4828573 - DNA, 25 bp, Homo sapien
gaagagcccggagatgaactgagtc

SEQ ID NO: 4828574 - DNA, 25 bp, Homo sapien
tgagtcaaacttggacactctgtct

SEQ ID NO: 4828575 - DNA, 25 bp, Homo sapien
ggcgttagaagcatagtgtcctggc

SEQ ID NO: 4828576 - DNA, 25 bp, Homo sapien
cagtggctcttgtctgcacacagtt

SEQ ID NO: 4828577 - DNA, 25 bp, Homo sapien
cacagatacccattgattttcagct

SEQ ID NO: 4828578 - DNA, 25 bp, Homo sapien
tcttggcccagctcacggcgttaga

SEQ ID NO: 4828579 - DNA, 25 bp, Homo sapien
gatgaggatggagagatcggtgcat

SEQ ID NO: 4828580 - DNA, 25 bp, Homo sapien
caccgtggaggggaacactgacaga

SEQ ID NO: 4828581 - DNA, 25 bp, Homo sapien
tggagagatcggtgcattctgcata

SEQ ID NO: 4828582 - DNA, 25 bp, Homo sapien
gctggactctggtaagcaccgtgga

SEQ ID NO: 4828583 - DNA, 25 bp, Homo sapien
tatacagttctggatttgtggagcc

SEQ ID NO: 4828584 - DNA, 25 bp, Homo sapien
cagttctggatttgtggagcctcac

SEQ ID NO: 4828585 - DNA, 25 bp, Homo sapien
tggatttgtggagcctcactttcca

SEQ ID NO: 4828586 - DNA, 25 bp, Homo sapien
catatatacagttctggatttgtgg

SEQ ID NO: 4828587 - DNA, 25 bp, Homo sapien
tgccaaatcgttggtgacagcctgg

SEQ ID NO: 4828588 - DNA, 25 bp, Homo sapien
tctgctgcagtgagtatggcaacac

SEQ ID NO: 4828589 - DNA, 25 bp, Homo sapien
tcaacacgaagataggaatcagccc

SEQ ID NO: 4828590 - DNA, 25 bp, Homo sapien
ggcaacacagtttggccgtcctgag

SEQ ID NO: 4828591 - DNA, 25 bp, Homo sapien
ccagtccttgggtaatatcagcaag

SEQ ID NO: 4828592 - DNA, 25 bp, Homo sapien
acagcctcttgtgactcagacctct

SEQ ID NO: 4828593 - DNA, 25 bp, Homo sapien
tcagccagtccttgggtaatatcag

SEQ ID NO: 4828594 - DNA, 25 bp, Homo sapien
cagcctcttgtgactcagacctctt

SEQ ID NO: 4828595 - DNA, 25 bp, Homo sapien
tcattggctcctcagagggcccggt

SEQ ID NO: 4828596 - DNA, 25 bp, Homo sapien
ttggctcctcagagggcccggtggg

SEQ ID NO: 4828597 - DNA, 25 bp, Homo sapien
ggctcctcagagggcccggtgggac

SEQ ID NO: 4828598 - DNA, 25 bp, Homo sapien
cattggctcctcagagggcccggtg

SEQ ID NO: 4828599 - DNA, 25 bp, Homo sapien
tagcatccttcgatgtcatccctgt

SEQ ID NO: 4828600 - DNA, 25 bp, Homo sapien
tgtccgattccataacttgccagcc

SEQ ID NO: 4828601 - DNA, 25 bp, Homo sapien
ttctgctgaggcttctcggtgctga

SEQ ID NO: 4828602 - DNA, 25 bp, Homo sapien
gaatgaatgggaaacacggctgaac

SEQ ID NO: 4828603 - DNA, 25 bp, Homo sapien
ggtccaccatgacgtactcttgtcg

SEQ ID NO: 4828604 - DNA, 25 bp, Homo sapien
ctggcttagcacacaggtccaccat

SEQ ID NO: 4828605 - DNA, 25 bp, Homo sapien
gacgtactcttgtcgggcttgccag

SEQ ID NO: 4828606 - DNA, 25 bp, Homo sapien
tcacagtgtaggacaaagttcaggc

SEQ ID NO: 4828607 - DNA, 25 bp, Homo sapien
aaaggaaggaaatctcattcagttg

SEQ ID NO: 4828608 - DNA, 25 bp, Homo sapien
gctggccagaatttcataacataac

SEQ ID NO: 4828609 - DNA, 25 bp, Homo sapien
taccatatctaagtgacactctaag

SEQ ID NO: 4828610 - DNA, 25 bp, Homo sapien
taagcagactctaaacacagcatac

SEQ ID NO: 4828611 - DNA, 25 bp, Homo sapien
ttttacttacaaccatactcaccag

SEQ ID NO: 4828612 - DNA, 25 bp, Homo sapien
tgtgccatgtattggatcacctcct

SEQ ID NO: 4828613 - DNA, 25 bp, Homo sapien
atctcttacctaggccggacggcag

SEQ ID NO: 4828614 - DNA, 25 bp, Homo sapien
ctggatctcttacctaggccggacg

SEQ ID NO: 4828615 - DNA, 25 bp, Homo sapien
tcttctcatccagagtataatcatc

SEQ ID NO: 4828616 - DNA, 25 bp, Homo sapien
gactgggagattccaatgtcctcgt

SEQ ID NO: 4828617 - DNA, 25 bp, Homo sapien
ttaagagccaacccacagcaggact

SEQ ID NO: 4828618 - DNA, 25 bp, Homo sapien
gattccaatgtcctcgtttcttctc

SEQ ID NO: 4828619 - DNA, 25 bp, Homo sapien
ctgtgtatttgaccgagaaggcaat

SEQ ID NO: 4828620 - DNA, 25 bp, Homo sapien
tcaaataagacctgatttgctttta

SEQ ID NO: 4828621 - DNA, 25 bp, Homo sapien
tgtatttgaccgagaaggcaattat

SEQ ID NO: 4828622 - DNA, 25 bp, Homo sapien
ctctgtgtatttgaccgagaaggca

SEQ ID NO: 4828623 - DNA, 25 bp, Homo sapien
gcttagactgcccaataaacgttgg

SEQ ID NO: 4828624 - DNA, 25 bp, Homo sapien
taccatatgggaaggcatggtgcgc

SEQ ID NO: 4828625 - DNA, 25 bp, Homo sapien
ccctcctgggagtcgtagaaatcca

SEQ ID NO: 4828626 - DNA, 25 bp, Homo sapien
tatgcaagtgtgtcgcgcaagaacc

SEQ ID NO: 4828627 - DNA, 25 bp, Homo sapien
ctttgttgttggtatggccagggtc

SEQ ID NO: 4828628 - DNA, 25 bp, Homo sapien
ttctttgttgttggtatggccaggg

SEQ ID NO: 4828629 - DNA, 25 bp, Homo sapien
tgttgttggtatggccagggtcttc

SEQ ID NO: 4828630 - DNA, 25 bp, Homo sapien
tttgttgttggtatggccagggtct

SEQ ID NO: 4828631 - DNA, 25 bp, Homo sapien
aggacggcatcattgggctctcttc

SEQ ID NO: 4828632 - DNA, 25 bp, Homo sapien
gaggacggcatcattgggctctctt

SEQ ID NO: 4828633 - DNA, 25 bp, Homo sapien
gacggcatcattgggctctcttcct

SEQ ID NO: 4828634 - DNA, 25 bp, Homo sapien
gtctctccacgactctgtgcccttg

SEQ ID NO: 4828635 - DNA, 25 bp, Homo sapien
gaccaaagtgtgtaactgaggctga

SEQ ID NO: 4828636 - DNA, 25 bp, Homo sapien
ccatgtctggcgttgctctgtagta

SEQ ID NO: 4828637 - DNA, 25 bp, Homo sapien
gccactgttcgaataaagaccaaag

SEQ ID NO: 4828638 - DNA, 25 bp, Homo sapien
tattgaggaacattcgaagaaacgc

SEQ ID NO: 4828639 - DNA, 25 bp, Homo sapien
ttcctgtggtctttattcataaatg

SEQ ID NO: 4828640 - DNA, 25 bp, Homo sapien
caggaagcgttttctaacacccagc

SEQ ID NO: 4828641 - DNA, 25 bp, Homo sapien
tttctaacacccagcttgtcgcagc

SEQ ID NO: 4828642 - DNA, 25 bp, Homo sapien
tcactccaacaggaagcgttttcta

SEQ ID NO: 4828643 - DNA, 25 bp, Homo sapien
tgccacctctggtaggtgtggaagc

SEQ ID NO: 4828644 - DNA, 25 bp, Homo sapien
tgcgatggtgtaagaagccctgtcc

SEQ ID NO: 4828645 - DNA, 25 bp, Homo sapien
tcctttgagcagaaagtgccacctc

SEQ ID NO: 4828646 - DNA, 25 bp, Homo sapien
gaaagtgtcatctgtctccggtagg

SEQ ID NO: 4828647 - DNA, 25 bp, Homo sapien
tatctgcgctgaaaatctgagtgcc

SEQ ID NO: 4828648 - DNA, 25 bp, Homo sapien
tctgagtctcccaccgtatgtgaag

SEQ ID NO: 4828649 - DNA, 25 bp, Homo sapien
catgtctgaaatcgcaagccctgta

SEQ ID NO: 4828650 - DNA, 25 bp, Homo sapien
tgatcgtcgtcaggttgccccatgt

SEQ ID NO: 4828651 - DNA, 25 bp, Homo sapien
tctttttaacacgtcttctgcaagc

SEQ ID NO: 4828652 - DNA, 25 bp, Homo sapien
ggaatgttctccctttgctaacctc

SEQ ID NO: 4828653 - DNA, 25 bp, Homo sapien
tgtggcaggaacgaaccacctttcc

SEQ ID NO: 4828654 - DNA, 25 bp, Homo sapien
caagcctgtctactgcggaatgttc

SEQ ID NO: 4828655 - DNA, 25 bp, Homo sapien
aattactgacaggtttagctcccct

SEQ ID NO: 4828656 - DNA, 25 bp, Homo sapien
caatgcgatgtcttgcatgtaagtg

SEQ ID NO: 4828657 - DNA, 25 bp, Homo sapien
tagcgttggtcatcaatgcgatgtc

SEQ ID NO: 4828658 - DNA, 25 bp, Homo sapien
cttcttgaatccgaaattactgaca

SEQ ID NO: 4828659 - DNA, 25 bp, Homo sapien
cacactcttacaaaggcatccacag

SEQ ID NO: 4828660 - DNA, 25 bp, Homo sapien
cacttgtagcgtagtacacttgggt

SEQ ID NO: 4828661 - DNA, 25 bp, Homo sapien
ttccatgacttcgctgctgtggcct

SEQ ID NO: 4828662 - DNA, 25 bp, Homo sapien
tctgtgacctgcaacgttctttaaa

SEQ ID NO: 4828663 - DNA, 25 bp, Homo sapien
cttacttggtataacagccagcatg

SEQ ID NO: 4828664 - DNA, 25 bp, Homo sapien
ttacttggtataacagccagcatgg

SEQ ID NO: 4828665 - DNA, 25 bp, Homo sapien
tacttggtataacagccagcatggg

SEQ ID NO: 4828666 - DNA, 25 bp, Homo sapien
ggaactgtggataaagtaatgccat

SEQ ID NO: 4828667 - DNA, 25 bp, Homo sapien
cagaggaactgtggataaagtaatg

SEQ ID NO: 4828668 - DNA, 25 bp, Homo sapien
ttagagatggtagtgcagaggaact

SEQ ID NO: 4828669 - DNA, 25 bp, Homo sapien
tagtgcagaggaactgtggataaag

SEQ ID NO: 4828670 - DNA, 25 bp, Homo sapien
gaaacactaagcgttcctccttcac

SEQ ID NO: 4828671 - DNA, 25 bp, Homo sapien
tggaaggaaacactaagcgttcctc

SEQ ID NO: 4828672 - DNA, 25 bp, Homo sapien
ggaaacactaagcgttcctccttca

SEQ ID NO: 4828673 - DNA, 25 bp, Homo sapien
aacactaagcgttcctccttcactt

SEQ ID NO: 4828674 - DNA, 25 bp, Homo sapien
gagtgaacattacccccgttccata

SEQ ID NO: 4828675 - DNA, 25 bp, Homo sapien
aaaattgcagtacagtagtgtgtcc

SEQ ID NO: 4828676 - DNA, 25 bp, Homo sapien
cagtacagtagtgtgtccaaaatac

SEQ ID NO: 4828677 - DNA, 25 bp, Homo sapien
gagtggaggagtgaacattaccccc

SEQ ID NO: 4828678 - DNA, 25 bp, Homo sapien
cttctgccatgctggtgctcagcac

SEQ ID NO: 4828679 - DNA, 25 bp, Homo sapien
gccgattagagtcgcaatatctaga

SEQ ID NO: 4828680 - DNA, 25 bp, Homo sapien
gaaatattgaagcatgtacactcca

SEQ ID NO: 4828681 - DNA, 25 bp, Homo sapien
aacacgactaattcgttggacgccg

SEQ ID NO: 4828682 - DNA, 25 bp, Homo sapien
tccatgccacccgtaaaatttggct

SEQ ID NO: 4828683 - DNA, 25 bp, Homo sapien
gttttgtatagtgtatttctgaatc

SEQ ID NO: 4828684 - DNA, 25 bp, Homo sapien
tttgtatagtgtatttctgaatcca

SEQ ID NO: 4828685 - DNA, 25 bp, Homo sapien
ttttgtatagtgtatttctgaatcc

SEQ ID NO: 4828686 - DNA, 25 bp, Homo sapien
ttgtatagtgtatttctgaatccat

SEQ ID NO: 4828687 - DNA, 25 bp, Homo sapien
ccattacaatttggtttcacataca

SEQ ID NO: 4828688 - DNA, 25 bp, Homo sapien
ttacaatttggtttcacatacaggc

SEQ ID NO: 4828689 - DNA, 25 bp, Homo sapien
cttccattacaatttggtttcacat

SEQ ID NO: 4828690 - DNA, 25 bp, Homo sapien
tcttccattacaatttggtttcaca

SEQ ID NO: 4828691 - DNA, 25 bp, Homo sapien
tctgattgttgtcagttatcttatg

SEQ ID NO: 4828692 - DNA, 25 bp, Homo sapien
tgaggcgtcaacttttcttttatct

SEQ ID NO: 4828693 - DNA, 25 bp, Homo sapien
ctgaggcgtcaacttttcttttatc

SEQ ID NO: 4828694 - DNA, 25 bp, Homo sapien
tgttgtcagttatcttatgtctttc

SEQ ID NO: 4828695 - DNA, 25 bp, Homo sapien
gatggcttctgtccattgatgatac

SEQ ID NO: 4828696 - DNA, 25 bp, Homo sapien
tggcttctgtccattgatgatacaa

SEQ ID NO: 4828697 - DNA, 25 bp, Homo sapien
gcttctgtccattgatgatacaagt

SEQ ID NO: 4828698 - DNA, 25 bp, Homo sapien
agatggcttctgtccattgatgata

SEQ ID NO: 4828699 - DNA, 25 bp, Homo sapien
actgcaagtgggagagtgtagctct

SEQ ID NO: 4828700 - DNA, 25 bp, Homo sapien
aatgagggaaacacttggccgcgct

SEQ ID NO: 4828701 - DNA, 25 bp, Homo sapien
gatagccagtgcgttgacctcgcag

SEQ ID NO: 4828702 - DNA, 25 bp, Homo sapien
cacaaggtttttcttgccggcaggg

SEQ ID NO: 4828703 - DNA, 25 bp, Homo sapien
ttgtcagtaacaactcgggtgacct

SEQ ID NO: 4828704 - DNA, 25 bp, Homo sapien
cactcatgtgccgtgaagagcagat

SEQ ID NO: 4828705 - DNA, 25 bp, Homo sapien
cagaggcacctccacttgtcagtaa

SEQ ID NO: 4828706 - DNA, 25 bp, Homo sapien
tagccacatggccaagacagatctc

SEQ ID NO: 4828707 - DNA, 25 bp, Homo sapien
ctcttcaaccttaaagaactgcact

SEQ ID NO: 4828708 - DNA, 25 bp, Homo sapien
ggtctcttcaaccttaaagaactgc

SEQ ID NO: 4828709 - DNA, 25 bp, Homo sapien
tccatgagcattcaggaaagcccca

SEQ ID NO: 4828710 - DNA, 25 bp, Homo sapien
caggtctcttcaaccttaaagaact

SEQ ID NO: 4828711 - DNA, 25 bp, Homo sapien
caagtccccgagactgatcgaggcg

SEQ ID NO: 4828712 - DNA, 25 bp, Homo sapien
atggcttgtggagagcccctcggct

SEQ ID NO: 4828713 - DNA, 25 bp, Homo sapien
tcagcaccaagtccccgagactgat

SEQ ID NO: 4828714 - DNA, 25 bp, Homo sapien
ctgatcgaggcgttgccgatggctt

SEQ ID NO: 4828715 - DNA, 25 bp, Homo sapien
gagatgaaagtgaatggtagtagaa

SEQ ID NO: 4828716 - DNA, 25 bp, Homo sapien
cactgagttcccggtacttaacagt

SEQ ID NO: 4828717 - DNA, 25 bp, Homo sapien
tgaatggtagtagaattcactgagt

SEQ ID NO: 4828718 - DNA, 25 bp, Homo sapien
gaaagtgaatggtagtagaattcac

SEQ ID NO: 4828719 - DNA, 25 bp, Homo sapien
aaaaagtggattctataccaggtgg

SEQ ID NO: 4828720 - DNA, 25 bp, Homo sapien
agtggattctataccaggtggttgt

SEQ ID NO: 4828721 - DNA, 25 bp, Homo sapien
ctcaaaaaagtggattctataccag

SEQ ID NO: 4828722 - DNA, 25 bp, Homo sapien
ccaggtggttgtcagaaagagatgg

SEQ ID NO: 4828723 - DNA, 25 bp, Homo sapien
tccaacaggcaatgggatgtttctc

SEQ ID NO: 4828724 - DNA, 25 bp, Homo sapien
atgtctaatgcagccctatcatcca

SEQ ID NO: 4828725 - DNA, 25 bp, Homo sapien
gctgtgctctctccgaaaacgcagg

SEQ ID NO: 4828726 - DNA, 25 bp, Homo sapien
taagaaatgtctaatgcagccctat

SEQ ID NO: 4828727 - DNA, 25 bp, Homo sapien
aaacggagattccacgttctcttgg

SEQ ID NO: 4828728 - DNA, 25 bp, Homo sapien
ccacgttctcttggcttgccttcca

SEQ ID NO: 4828729 - DNA, 25 bp, Homo sapien
acggagattccacgttctcttggct

SEQ ID NO: 4828730 - DNA, 25 bp, Homo sapien
cacgttctcttggcttgccttccat

SEQ ID NO: 4828731 - DNA, 25 bp, Homo sapien
ctgtgtccgtgagcttcttgaaggc

SEQ ID NO: 4828732 - DNA, 25 bp, Homo sapien
tcattttacacgcagacgtcgctcc

SEQ ID NO: 4828733 - DNA, 25 bp, Homo sapien
cacgggcagttgcaggtctgtgtcc

SEQ ID NO: 4828734 - DNA, 25 bp, Homo sapien
ttcaaacgccaacaggatgcctgag

SEQ ID NO: 4828735 - DNA, 25 bp, Homo sapien
tgctttcctttgatggcatcttcct

SEQ ID NO: 4828736 - DNA, 25 bp, Homo sapien
cttgtttgtgaagtctttctgaggc

SEQ ID NO: 4828737 - DNA, 25 bp, Homo sapien
ctgaggctcctcaattttctgtctt

SEQ ID NO: 4828738 - DNA, 25 bp, Homo sapien
tggcatcttcctgttggttttgttt

SEQ ID NO: 4828739 - DNA, 25 bp, Homo sapien
cgtgggtttcagtgggtagctggta

SEQ ID NO: 4828740 - DNA, 25 bp, Homo sapien
ttcctttttcatcaccgaagcttcc

SEQ ID NO: 4828741 - DNA, 25 bp, Homo sapien
cctttttcatcaccgaagcttccat

SEQ ID NO: 4828742 - DNA, 25 bp, Homo sapien
cagtgggtagctggtactcttcctt

SEQ ID NO: 4828743 - DNA, 25 bp, Homo sapien
ctggtaacacagacttcacatccat

SEQ ID NO: 4828744 - DNA, 25 bp, Homo sapien
cctggtaacacagacttcacatcca

SEQ ID NO: 4828745 - DNA, 25 bp, Homo sapien
tgatgataatggtctgcagggtgac

SEQ ID NO: 4828746 - DNA, 25 bp, Homo sapien
tgctttcgctctgcaggactggctt

SEQ ID NO: 4828747 - DNA, 25 bp, Homo sapien
gaatcccatggcttaggtttactgc

SEQ ID NO: 4828748 - DNA, 25 bp, Homo sapien
gacagcgtctagtaagaatcccatg

SEQ ID NO: 4828749 - DNA, 25 bp, Homo sapien
gatgttccctcttcgttgattccca

SEQ ID NO: 4828750 - DNA, 25 bp, Homo sapien
gctgctgggcgtcggatgctgctgt

SEQ ID NO: 4828751 - DNA, 25 bp, Homo sapien
gggcgtcggatgctgctgttttgtg

SEQ ID NO: 4828752 - DNA, 25 bp, Homo sapien
ctgctgctgggcgtcggatgctgct

SEQ ID NO: 4828753 - DNA, 25 bp, Homo sapien
tgctgggcgtcggatgctgctgttt

SEQ ID NO: 4828754 - DNA, 25 bp, Homo sapien
atcctgaagatggaagctttgcgct

SEQ ID NO: 4828755 - DNA, 25 bp, Homo sapien
gagaagaatcttttatcctgaagat

SEQ ID NO: 4828756 - DNA, 25 bp, Homo sapien
ttatgagaagaatcttttatcctga

SEQ ID NO: 4828757 - DNA, 25 bp, Homo sapien
gaagatggaagctttgcgcttttac

SEQ ID NO: 4828758 - DNA, 25 bp, Homo sapien
gtcttattaagatccaaatttccta

SEQ ID NO: 4828759 - DNA, 25 bp, Homo sapien
tgtctttctctgctttagtactgtg

SEQ ID NO: 4828760 - DNA, 25 bp, Homo sapien
cttcccatgtcttattaagatccaa

SEQ ID NO: 4828761 - DNA, 25 bp, Homo sapien
tttctctgctttagtactgtgtgac

SEQ ID NO: 4828762 - DNA, 25 bp, Homo sapien
tgggcttcaccaacgtggcctcact

SEQ ID NO: 4828763 - DNA, 25 bp, Homo sapien
tcacatatcccgtgggcttcaccaa

SEQ ID NO: 4828764 - DNA, 25 bp, Homo sapien
tgttttcccatcacatatcccgtgg

SEQ ID NO: 4828765 - DNA, 25 bp, Homo sapien
ctgtcatgttttcccatcacatatc

SEQ ID NO: 4828766 - DNA, 25 bp, Homo sapien
gattgagagtcttggaatgtctttc

SEQ ID NO: 4828767 - DNA, 25 bp, Homo sapien
ctgtgaatgaaggtgcaggatttat

SEQ ID NO: 4828768 - DNA, 25 bp, Homo sapien
tcaaagtgattgaatgggggtgcag

SEQ ID NO: 4828769 - DNA, 25 bp, Homo sapien
tgtgaatgggcttgcaggatttctt

SEQ ID NO: 4828770 - DNA, 25 bp, Homo sapien
agagtgactgtgaatgaaggtgcag

SEQ ID NO: 4828771 - DNA, 25 bp, Homo sapien
tgagagtcagcaacggctgcatgcc

SEQ ID NO: 4828772 - DNA, 25 bp, Homo sapien
gccaggtaggtcttccactgcgtat

SEQ ID NO: 4828773 - DNA, 25 bp, Homo sapien
tgcatgcctggtgattcgaggccag

SEQ ID NO: 4828774 - DNA, 25 bp, Homo sapien
tgttggataaacacggccctgagag

SEQ ID NO: 4828775 - DNA, 25 bp, Homo sapien
gaaatccagccctgagatttccgca

SEQ ID NO: 4828776 - DNA, 25 bp, Homo sapien
ggcatctgcaggcagcacctggacg

SEQ ID NO: 4828777 - DNA, 25 bp, Homo sapien
gccctgagatttccgcacacccaac

SEQ ID NO: 4828778 - DNA, 25 bp, Homo sapien
ggcagcacctggacggggcggagtt

SEQ ID NO: 4828779 - DNA, 25 bp, Homo sapien
tcataagaaggggattcaggcgaca

SEQ ID NO: 4828780 - DNA, 25 bp, Homo sapien
gggattcaggcgacatgggagaaag

SEQ ID NO: 4828781 - DNA, 25 bp, Homo sapien
ttcaggcgacatgggagaaagtttc

SEQ ID NO: 4828782 - DNA, 25 bp, Homo sapien
aatgcagtagaagggggtcataaga

SEQ ID NO: 4828783 - DNA, 25 bp, Homo sapien
tctgatgaagttgacttgcaggtgg

SEQ ID NO: 4828784 - DNA, 25 bp, Homo sapien
agggaagctgaaaagtctctgtaga

SEQ ID NO: 4828785 - DNA, 25 bp, Homo sapien
gggaagctgaaaagtctctgtagat

SEQ ID NO: 4828786 - DNA, 25 bp, Homo sapien
gatgaagttgacttgcaggtggtaa

SEQ ID NO: 4828787 - DNA, 25 bp, Homo sapien
tggattttgattctagaagcctctg

SEQ ID NO: 4828788 - DNA, 25 bp, Homo sapien
ctagaagcctctgatgagctgaaga

SEQ ID NO: 4828789 - DNA, 25 bp, Homo sapien
cattggattttgattctagaagcct

SEQ ID NO: 4828790 - DNA, 25 bp, Homo sapien
ttgattctagaagcctctgatgagc

SEQ ID NO: 4828791 - DNA, 25 bp, Homo sapien
aaattcataacactagaaaagccgc

SEQ ID NO: 4828792 - DNA, 25 bp, Homo sapien
gacagacatctatcattacagtaac

SEQ ID NO: 4828793 - DNA, 25 bp, Homo sapien
tatcttaaatctaggccttgaaatc

SEQ ID NO: 4828794 - DNA, 25 bp, Homo sapien
taactccaagggttccccatgccaa

SEQ ID NO: 4828795 - DNA, 25 bp, Homo sapien
gttcgacttcgtacttcacatttgg

SEQ ID NO: 4828796 - DNA, 25 bp, Homo sapien
ggtctttgttcgacttcgtacttca

SEQ ID NO: 4828797 - DNA, 25 bp, Homo sapien
tcgtacttcacatttggctcttcct

SEQ ID NO: 4828798 - DNA, 25 bp, Homo sapien
cctctgggtctttgttcgacttcgt

SEQ ID NO: 4828799 - DNA, 25 bp, Homo sapien
gaaggaatggaagatccatgtagac

SEQ ID NO: 4828800 - DNA, 25 bp, Homo sapien
tccatgtagacgtgtcagtgtccag

SEQ ID NO: 4828801 - DNA, 25 bp, Homo sapien
gaagatccatgtagacgtgtcagtg

SEQ ID NO: 4828802 - DNA, 25 bp, Homo sapien
tgtagacgtgtcagtgtccaggaag

SEQ ID NO: 4828803 - DNA, 25 bp, Homo sapien
ttttcagctatgtccagtaaaggaa

SEQ ID NO: 4828804 - DNA, 25 bp, Homo sapien
taaacagtggaaggtgagaacgtgc

SEQ ID NO: 4828805 - DNA, 25 bp, Homo sapien
gggtctctgtatctccccgtacgag

SEQ ID NO: 4828806 - DNA, 25 bp, Homo sapien
cgtcctcgtattttccctggtatgg

SEQ ID NO: 4828807 - DNA, 25 bp, Homo sapien
tgcctgctgtgtttgttcgtggaga

SEQ ID NO: 4828808 - DNA, 25 bp, Homo sapien
actgggtttggtgggacggctctag

SEQ ID NO: 4828809 - DNA, 25 bp, Homo sapien
tttgttcgtggagatataactgggt

SEQ ID NO: 4828810 - DNA, 25 bp, Homo sapien
gctttggtgtcagaagaccttgatt

SEQ ID NO: 4828811 - DNA, 25 bp, Homo sapien
ttctcttcctaaattcacaaagaca

SEQ ID NO: 4828812 - DNA, 25 bp, Homo sapien
ggcatcagccggcatctgatgtctc

SEQ ID NO: 4828813 - DNA, 25 bp, Homo sapien
caacataatggagtagccctcatcc

SEQ ID NO: 4828814 - DNA, 25 bp, Homo sapien
gatgtctcaactccaacataatgga

SEQ ID NO: 4828815 - DNA, 25 bp, Homo sapien
aagccagggctttgatttcttgccc

SEQ ID NO: 4828816 - DNA, 25 bp, Homo sapien
aggcagaagccagggctttgatttc

SEQ ID NO: 4828817 - DNA, 25 bp, Homo sapien
cagaagccagggctttgatttcttg

SEQ ID NO: 4828818 - DNA, 25 bp, Homo sapien
gaagccagggctttgatttcttgcc

SEQ ID NO: 4828819 - DNA, 25 bp, Homo sapien
gtttctgcagaagcatcacgtcgca

SEQ ID NO: 4828820 - DNA, 25 bp, Homo sapien
tctccgtggagtttcaatgtcatgc

SEQ ID NO: 4828821 - DNA, 25 bp, Homo sapien
tatagcaaatccgaattctccgtgg

SEQ ID NO: 4828822 - DNA, 25 bp, Homo sapien
tttttaactcaaggccacagactcg

SEQ ID NO: 4828823 - DNA, 25 bp, Homo sapien
tccccagaatagagagcatcagagg

SEQ ID NO: 4828824 - DNA, 25 bp, Homo sapien
tccctgaaccatttatatcctttcc

SEQ ID NO: 4828825 - DNA, 25 bp, Homo sapien
caggggaattatactgctggagttg

SEQ ID NO: 4828826 - DNA, 25 bp, Homo sapien
tatcctttccatataagtctatatt

SEQ ID NO: 4828827 - DNA, 25 bp, Homo sapien
catccataggaacggtggagcagga

SEQ ID NO: 4828828 - DNA, 25 bp, Homo sapien
taattgcgtaacatctgaaagtgca

SEQ ID NO: 4828829 - DNA, 25 bp, Homo sapien
agcaggaggtgtatgtgacgaataa

SEQ ID NO: 4828830 - DNA, 25 bp, Homo sapien
gtgagcatcatccataggaacggtg

SEQ ID NO: 4828831 - DNA, 25 bp, Homo sapien
ctgatgaggctgtacgatgacgcac

SEQ ID NO: 4828832 - DNA, 25 bp, Homo sapien
tcccagtggagccatcgtcagatga

SEQ ID NO: 4828833 - DNA, 25 bp, Homo sapien
tcttgcccgaaccagaaacaacagg

SEQ ID NO: 4828834 - DNA, 25 bp, Homo sapien
cattgtgttgtggatctcttgcccg

SEQ ID NO: 4828835 - DNA, 25 bp, Homo sapien
tgcccagtgtcatcaagtgtgaagg

SEQ ID NO: 4828836 - DNA, 25 bp, Homo sapien
cgatgatgagaacatggtacgtcac

SEQ ID NO: 4828837 - DNA, 25 bp, Homo sapien
tcagcggaatgtccagaagcacagc

SEQ ID NO: 4828838 - DNA, 25 bp, Homo sapien
tgacccggtgctttcagatttttga

SEQ ID NO: 4828839 - DNA, 25 bp, Homo sapien
gcactgtaggtctattgttcttcat

SEQ ID NO: 4828840 - DNA, 25 bp, Homo sapien
ctccatgtaacaggagcactgtagg

SEQ ID NO: 4828841 - DNA, 25 bp, Homo sapien
tctgctcctctgaaatcttctggtt

SEQ ID NO: 4828842 - DNA, 25 bp, Homo sapien
ttctctgctcctctgaaatcttctg

SEQ ID NO: 4828843 - DNA, 25 bp, Homo sapien
caatccaacacagaggcctcaggta

SEQ ID NO: 4828844 - DNA, 25 bp, Homo sapien
ggtatcaacctccatagttcagcac

SEQ ID NO: 4828845 - DNA, 25 bp, Homo sapien
caatgggacatacagcctaaactcc

SEQ ID NO: 4828846 - DNA, 25 bp, Homo sapien
tccaaattgctgcacacaatgggac

SEQ ID NO: 4828847 - DNA, 25 bp, Homo sapien
gcattgtcttgaagtgtaaggattc

SEQ ID NO: 4828848 - DNA, 25 bp, Homo sapien
gattcttggcagacagccttctgtt

SEQ ID NO: 4828849 - DNA, 25 bp, Homo sapien
agggagatggatgaagagctggcat

SEQ ID NO: 4828850 - DNA, 25 bp, Homo sapien
tttgtgccctttctgggtgttgagg

SEQ ID NO: 4828851 - DNA, 25 bp, Homo sapien
tgctctctcggaggttaggggctga

SEQ ID NO: 4828852 - DNA, 25 bp, Homo sapien
tctctcggaggttaggggctgacat

SEQ ID NO: 4828853 - DNA, 25 bp, Homo sapien
ctgtgctctctcggaggttaggggc

SEQ ID NO: 4828854 - DNA, 25 bp, Homo sapien
ctctctcggaggttaggggctgaca

SEQ ID NO: 4828855 - DNA, 25 bp, Homo sapien
ttccctgacgtttaacacagtcgct

SEQ ID NO: 4828856 - DNA, 25 bp, Homo sapien
cagtcgctgacacccggcagactgt

SEQ ID NO: 4828857 - DNA, 25 bp, Homo sapien
ggcctttaagagaatcaactgcaaa

SEQ ID NO: 4828858 - DNA, 25 bp, Homo sapien
ccggcagactgtatggaaggatttt

SEQ ID NO: 4828859 - DNA, 25 bp, Homo sapien
tgtattatcagaatgtctatatgtc

SEQ ID NO: 4828860 - DNA, 25 bp, Homo sapien
tattatcagaatgtctatatgtctg

SEQ ID NO: 4828861 - DNA, 25 bp, Homo sapien
ttatcagaatgtctatatgtctgcc

SEQ ID NO: 4828862 - DNA, 25 bp, Homo sapien
attatcagaatgtctatatgtctgc

SEQ ID NO: 4828863 - DNA, 25 bp, Homo sapien
caatctgggccggtgcctgcttctt

SEQ ID NO: 4828864 - DNA, 25 bp, Homo sapien
ttctggatcatctgtgattgtcctg

SEQ ID NO: 4828865 - DNA, 25 bp, Homo sapien
atctgggccggtgcctgcttcttca

SEQ ID NO: 4828866 - DNA, 25 bp, Homo sapien
tctgtgattgtcctggcaatctggg

SEQ ID NO: 4828867 - DNA, 25 bp, Homo sapien
ctaaactaatgtgggtcgcctcatc

SEQ ID NO: 4828868 - DNA, 25 bp, Homo sapien
aaactaatgtgggtcgcctcatctc

SEQ ID NO: 4828869 - DNA, 25 bp, Homo sapien
actaatgtgggtcgcctcatctctt

SEQ ID NO: 4828870 - DNA, 25 bp, Homo sapien
atgtgggtcgcctcatctcttcttc

SEQ ID NO: 4828871 - DNA, 25 bp, Homo sapien
gtggttttgagtgtattattcacca

SEQ ID NO: 4828872 - DNA, 25 bp, Homo sapien
tgtggttttgagtgtattattcacc

SEQ ID NO: 4828873 - DNA, 25 bp, Homo sapien
tggttttgagtgtattattcaccat

SEQ ID NO: 4828874 - DNA, 25 bp, Homo sapien
gtgtggttttgagtgtattattcac

SEQ ID NO: 4828875 - DNA, 25 bp, Homo sapien
gaaagaggatatgcttgcagtttcc

SEQ ID NO: 4828876 - DNA, 25 bp, Homo sapien
tctgagtacaggcttcgggctggct

SEQ ID NO: 4828877 - DNA, 25 bp, Homo sapien
ggaggatgaataattgacacccttc

SEQ ID NO: 4828878 - DNA, 25 bp, Homo sapien
tgcagtttccactcaagtttggagg

SEQ ID NO: 4828879 - DNA, 25 bp, Homo sapien
gctggttgatgccttgtgtcaaagc

SEQ ID NO: 4828880 - DNA, 25 bp, Homo sapien
gcctccacagttacaaatgaggcat

SEQ ID NO: 4828881 - DNA, 25 bp, Homo sapien
tccacagttacaaatgaggcatcac

SEQ ID NO: 4828882 - DNA, 25 bp, Homo sapien
aaagcctccacagttacaaatgagg

SEQ ID NO: 4828883 - DNA, 25 bp, Homo sapien
gcgaccctgcgccactctttccgag

SEQ ID NO: 4828884 - DNA, 25 bp, Homo sapien
gccccgcgaccctgcgccactcttt

SEQ ID NO: 4828885 - DNA, 25 bp, Homo sapien
accctgcgccactctttccgagctc

SEQ ID NO: 4828886 - DNA, 25 bp, Homo sapien
ctgcgccactctttccgagctccgc

SEQ ID NO: 4828887 - DNA, 25 bp, Homo sapien
agaggggtgatcagagagcatctct

SEQ ID NO: 4828888 - DNA, 25 bp, Homo sapien
agaaaagaggggtgatcagagagca

SEQ ID NO: 4828889 - DNA, 25 bp, Homo sapien
aaaagaggggtgatcagagagcatc

SEQ ID NO: 4828890 - DNA, 25 bp, Homo sapien
aagaggggtgatcagagagcatctc

SEQ ID NO: 4828891 - DNA, 25 bp, Homo sapien
ccgcgccggtaagtgaggcagagct

SEQ ID NO: 4828892 - DNA, 25 bp, Homo sapien
gaccgcgccggtaagtgaggcagag

SEQ ID NO: 4828893 - DNA, 25 bp, Homo sapien
accgcgccggtaagtgaggcagagc

SEQ ID NO: 4828894 - DNA, 25 bp, Homo sapien
gcaggaggacttttcgtagacttct

SEQ ID NO: 4828895 - DNA, 25 bp, Homo sapien
caggaggacttttcgtagacttctt

SEQ ID NO: 4828896 - DNA, 25 bp, Homo sapien
tcaattggaatcatttcgcactggg

SEQ ID NO: 4828897 - DNA, 25 bp, Homo sapien
ggaatcatttcgcactggggtgcaa

SEQ ID NO: 4828898 - DNA, 25 bp, Homo sapien
tcatttcgcactggggtgcaatgaa

SEQ ID NO: 4828899 - DNA, 25 bp, Homo sapien
attcaattggaatcatttcgcactg

SEQ ID NO: 4828900 - DNA, 25 bp, Homo sapien
ggtaaacttatatccttccttgaca

SEQ ID NO: 4828901 - DNA, 25 bp, Homo sapien
gtaaacttatatccttccttgacac

SEQ ID NO: 4828902 - DNA, 25 bp, Homo sapien
tgggtaaacttatatccttccttga

SEQ ID NO: 4828903 - DNA, 25 bp, Homo sapien
tatccaattcagtctggcctgtaac

SEQ ID NO: 4828904 - DNA, 25 bp, Homo sapien
gtaacaagtccagcgaagcaaaatt

SEQ ID NO: 4828905 - DNA, 25 bp, Homo sapien
tccaattcagtctggcctgtaacaa

SEQ ID NO: 4828906 - DNA, 25 bp, Homo sapien
tggcctgtaacaagtccagcgaagc

SEQ ID NO: 4828907 - DNA, 25 bp, Homo sapien
tttgagatcccgataacactgtttg

SEQ ID NO: 4828908 - DNA, 25 bp, Homo sapien
tgagatcccgataacactgtttgtc

SEQ ID NO: 4828909 - DNA, 25 bp, Homo sapien
ctttgagatcccgataacactgttt

SEQ ID NO: 4828910 - DNA, 25 bp, Homo sapien
ttgagatcccgataacactgtttgt

SEQ ID NO: 4828911 - DNA, 25 bp, Homo sapien
tcctttatgcgcagatgttactcaa

SEQ ID NO: 4828912 - DNA, 25 bp, Homo sapien
ctggtcctttatgcgcagatgttac

SEQ ID NO: 4828913 - DNA, 25 bp, Homo sapien
ggtcctttatgcgcagatgttactc

SEQ ID NO: 4828914 - DNA, 25 bp, Homo sapien
cctttatgcgcagatgttactcaaa

SEQ ID NO: 4828915 - DNA, 25 bp, Homo sapien
ataactggatatgcagtgttcccag

SEQ ID NO: 4828916 - DNA, 25 bp, Homo sapien
tgataactggatatgcagtgttccc

SEQ ID NO: 4828917 - DNA, 25 bp, Homo sapien
taactggatatgcagtgttcccaga

SEQ ID NO: 4828918 - DNA, 25 bp, Homo sapien
tgggtagtcaaagagaagaccacac

SEQ ID NO: 4828919 - DNA, 25 bp, Homo sapien
ctgggtagtcaaagagaagaccaca

SEQ ID NO: 4828920 - DNA, 25 bp, Homo sapien
aaatggttgtctaccccaaatatct

SEQ ID NO: 4828921 - DNA, 25 bp, Homo sapien
taaatggttgtctaccccaaatatc

SEQ ID NO: 4828922 - DNA, 25 bp, Homo sapien
ctaaatggttgtctaccccaaatat

SEQ ID NO: 4828923 - DNA, 25 bp, Homo sapien
ttgtctcatttcttccatggcctct

SEQ ID NO: 4828924 - DNA, 25 bp, Homo sapien
gcctctgcaatcacatctgtattca

SEQ ID NO: 4828925 - DNA, 25 bp, Homo sapien
gatgctgctgcctgggtttgtctca

SEQ ID NO: 4828926 - DNA, 25 bp, Homo sapien
tggcctctgcaatcacatctgtatt

SEQ ID NO: 4828927 - DNA, 25 bp, Homo sapien
tgtctgtgatacttcatatttcatt

SEQ ID NO: 4828928 - DNA, 25 bp, Homo sapien
gcagcaatttatagctcacatcttc

SEQ ID NO: 4828929 - DNA, 25 bp, Homo sapien
tttatagctcacatcttccacttcc

SEQ ID NO: 4828930 - DNA, 25 bp, Homo sapien
ctccttgtctgtgatacttcatatt

SEQ ID NO: 4828931 - DNA, 25 bp, Homo sapien
cttcttttctttgtatggtttcagg

SEQ ID NO: 4828932 - DNA, 25 bp, Homo sapien
ggttcaaatgcttcttttctttgta

SEQ ID NO: 4828933 - DNA, 25 bp, Homo sapien
gcttcttttctttgtatggtttcag

SEQ ID NO: 4828934 - DNA, 25 bp, Homo sapien
cttttctttgtatggtttcaggatg

SEQ ID NO: 4828935 - DNA, 25 bp, Homo sapien
caacaaagcatactctacatgaaac

SEQ ID NO: 4828936 - DNA, 25 bp, Homo sapien
aatgggctcaacaaagcatactcta

SEQ ID NO: 4828937 - DNA, 25 bp, Homo sapien
tgaatgggctcaacaaagcatactc

SEQ ID NO: 4828938 - DNA, 25 bp, Homo sapien
ggctcaacaaagcatactctacatg

SEQ ID NO: 4828939 - DNA, 25 bp, Homo sapien
tcttttgtgtagcacccaggaaaca

SEQ ID NO: 4828940 - DNA, 25 bp, Homo sapien
tgtgactccacaccgccggaatcgt

SEQ ID NO: 4828941 - DNA, 25 bp, Homo sapien
ccggaatcgtggtggtggattcctc

SEQ ID NO: 4828942 - DNA, 25 bp, Homo sapien
tggtggattcctcttttgtgtagca

SEQ ID NO: 4828943 - DNA, 25 bp, Homo sapien
ctgtgctttgtctttgagtgtcagg

SEQ ID NO: 4828944 - DNA, 25 bp, Homo sapien
cacactgtgctttgtctttgagtgt

SEQ ID NO: 4828945 - DNA, 25 bp, Homo sapien
catcctcatccttgcaccttctgga

SEQ ID NO: 4828946 - DNA, 25 bp, Homo sapien
ggtgggagatgctggtccctgaagg

SEQ ID NO: 4828947 - DNA, 25 bp, Homo sapien
tgtgctttcggcaaacagcacacca

SEQ ID NO: 4828948 - DNA, 25 bp, Homo sapien
gcacaccattgtctcctagaccttg

SEQ ID NO: 4828949 - DNA, 25 bp, Homo sapien
cctagaccttgtcaaaatattacac

SEQ ID NO: 4828950 - DNA, 25 bp, Homo sapien
tctctgtgctttcggcaaacagcac

SEQ ID NO: 4828951 - DNA, 25 bp, Homo sapien
ccccttccgcttcccaagtgaggca

SEQ ID NO: 4828952 - DNA, 25 bp, Homo sapien
cctgaccccttccgcttcccaagtg

SEQ ID NO: 4828953 - DNA, 25 bp, Homo sapien
tgaccccttccgcttcccaagtgag

SEQ ID NO: 4828954 - DNA, 25 bp, Homo sapien
ctgaccccttccgcttcccaagtga

SEQ ID NO: 4828955 - DNA, 25 bp, Homo sapien
gaactctggtcgctttcttcacatg

SEQ ID NO: 4828956 - DNA, 25 bp, Homo sapien
taatagagtcaagctgccttcagaa

SEQ ID NO: 4828957 - DNA, 25 bp, Homo sapien
tacgagcacttccaagaactctggt

SEQ ID NO: 4828958 - DNA, 25 bp, Homo sapien
catactgtacctttgttgctgtgac

SEQ ID NO: 4828959 - DNA, 25 bp, Homo sapien
gaggtcgtttgtctgccgtatgcca

SEQ ID NO: 4828960 - DNA, 25 bp, Homo sapien
gaagaagctaaagcaacaaaacgcc

SEQ ID NO: 4828961 - DNA, 25 bp, Homo sapien
taaagcaacaaaacgccaaactcgc

SEQ ID NO: 4828962 - DNA, 25 bp, Homo sapien
gcaaaccaagcaggcgacatgtcag

SEQ ID NO: 4828963 - DNA, 25 bp, Homo sapien
caaccatgttgctctggtagacgtc

SEQ ID NO: 4828964 - DNA, 25 bp, Homo sapien
tgatccttgttagaaatcaaccatg

SEQ ID NO: 4828965 - DNA, 25 bp, Homo sapien
ggtagacgtcatgttctgctagcat

SEQ ID NO: 4828966 - DNA, 25 bp, Homo sapien
acaagagaaaatgacgatgccccat

SEQ ID NO: 4828967 - DNA, 25 bp, Homo sapien
ctcacctgtcctgcgggagggtgtc

SEQ ID NO: 4828968 - DNA, 25 bp, Homo sapien
gcgggagggtgtcggagtcacgctc

SEQ ID NO: 4828969 - DNA, 25 bp, Homo sapien
tctcacctgtcctgcgggagggtgt

SEQ ID NO: 4828970 - DNA, 25 bp, Homo sapien
tcctgcgggagggtgtcggagtcac

SEQ ID NO: 4828971 - DNA, 25 bp, Homo sapien
ctgcccaggatacccatggctgtga

SEQ ID NO: 4828972 - DNA, 25 bp, Homo sapien
tcctgcccaggatacccatggctgt

SEQ ID NO: 4828973 - DNA, 25 bp, Homo sapien
tgtcctgcccaggatacccatggct

SEQ ID NO: 4828974 - DNA, 25 bp, Homo sapien
cccaggatacccatggctgtgagga

SEQ ID NO: 4828975 - DNA, 25 bp, Homo sapien
ctgtcctgcccaggatgcccatgac

SEQ ID NO: 4828976 - DNA, 25 bp, Homo sapien
ccaggatgcccatgactgtgaggac

SEQ ID NO: 4828977 - DNA, 25 bp, Homo sapien
cctgcccaggatgcccatgactgtg

SEQ ID NO: 4828978 - DNA, 25 bp, Homo sapien
cccaggatgcccatgactgtgagga

SEQ ID NO: 4828979 - DNA, 25 bp, Homo sapien
gagggtgtcagagtcacgctctcac

SEQ ID NO: 4828980 - DNA, 25 bp, Homo sapien
aggggagggtgtcagagtcacgctc

SEQ ID NO: 4828981 - DNA, 25 bp, Homo sapien
agcaggggagggtgtcagagtcacg

SEQ ID NO: 4828982 - DNA, 25 bp, Homo sapien
gggagggtgtcagagtcacgctctc

SEQ ID NO: 4828983 - DNA, 25 bp, Homo sapien
cccaggatgcccatggctgtgagga

SEQ ID NO: 4828984 - DNA, 25 bp, Homo sapien
tctgtcctgcccaggatgcccatgg

SEQ ID NO: 4828985 - DNA, 25 bp, Homo sapien
gtcctgcccaggatgcccatggctg

SEQ ID NO: 4828986 - DNA, 25 bp, Homo sapien
tcatctgtcctgcccaggatgccca

SEQ ID NO: 4828987 - DNA, 25 bp, Homo sapien
cttgtccagcctttctgcaatggca

SEQ ID NO: 4828988 - DNA, 25 bp, Homo sapien
tagaaatgctctcctcccgttttca

SEQ ID NO: 4828989 - DNA, 25 bp, Homo sapien
ggcattgatctagacaaccccacag

SEQ ID NO: 4828990 - DNA, 25 bp, Homo sapien
cttcaatccttgtccagcctttctg

SEQ ID NO: 4828991 - DNA, 25 bp, Homo sapien
tctggcatatgaacgtaatctgaag

SEQ ID NO: 4828992 - DNA, 25 bp, Homo sapien
taatctgaagtgctggcgttgcctt

SEQ ID NO: 4828993 - DNA, 25 bp, Homo sapien
ctttccagggcaaatctagtgtatt

SEQ ID NO: 4828994 - DNA, 25 bp, Homo sapien
gcaacaggtgtagctcttgcaagct

SEQ ID NO: 4828995 - DNA, 25 bp, Homo sapien
catgcttcaaatagccagggaatgg

SEQ ID NO: 4828996 - DNA, 25 bp, Homo sapien
tctatcaaaatgaccgataacatgc

SEQ ID NO: 4828997 - DNA, 25 bp, Homo sapien
gatctggaactaatgcaaacttctg

SEQ ID NO: 4828998 - DNA, 25 bp, Homo sapien
tacatttagtgtactgagtactggg

SEQ ID NO: 4828999 - DNA, 25 bp, Homo sapien
gtgagtgcaggaagcaatgtagaat

SEQ ID NO: 4829000 - DNA, 25 bp, Homo sapien
taggtataccaggagagaacatgtg

SEQ ID NO: 4829001 - DNA, 25 bp, Homo sapien
aactcccaagcactgatagtcccac

SEQ ID NO: 4829002 - DNA, 25 bp, Homo sapien
aaatttctgtaatcatgctaactcc

SEQ ID NO: 4829003 - DNA, 25 bp, Homo sapien
tatcaagacaggagttccctgaaat

SEQ ID NO: 4829004 - DNA, 25 bp, Homo sapien
tctcatttttcacgaccctatgcat

SEQ ID NO: 4829005 - DNA, 25 bp, Homo sapien
gcatctcatttttcacgaccctatg

SEQ ID NO: 4829006 - DNA, 25 bp, Homo sapien
gagttccctgaaatatccagcatct

SEQ ID NO: 4829007 - DNA, 25 bp, Homo sapien
ttactcctcgtagcgaccagaagga

SEQ ID NO: 4829008 - DNA, 25 bp, Homo sapien
tcctcgtagcgaccagaaggagaac

SEQ ID NO: 4829009 - DNA, 25 bp, Homo sapien
tagcgaccagaaggagaactatgtc

SEQ ID NO: 4829010 - DNA, 25 bp, Homo sapien
tcgtagcgaccagaaggagaactat

SEQ ID NO: 4829011 - DNA, 25 bp, Homo sapien
tcgtacttaaggctgatcacttctg

SEQ ID NO: 4829012 - DNA, 25 bp, Homo sapien
ttaaggatcgtacttaaggctgatc

SEQ ID NO: 4829013 - DNA, 25 bp, Homo sapien
tacttaaggctgatcacttctgtgc

SEQ ID NO: 4829014 - DNA, 25 bp, Homo sapien
aaggatcgtacttaaggctgatcac

SEQ ID NO: 4829015 - DNA, 25 bp, Homo sapien
gaataatgatgctgtcaaatcttcg

SEQ ID NO: 4829016 - DNA, 25 bp, Homo sapien
gctctatcttggcttcgatttgttc

SEQ ID NO: 4829017 - DNA, 25 bp, Homo sapien
aatgatgctgtcaaatcttcgttca

SEQ ID NO: 4829018 - DNA, 25 bp, Homo sapien
tcgatttgttctgaataatgatgct

SEQ ID NO: 4829019 - DNA, 25 bp, Homo sapien
ttatccctgtaacccgattggactc

SEQ ID NO: 4829020 - DNA, 25 bp, Homo sapien
aagtggactttcgttgccagcggca

SEQ ID NO: 4829021 - DNA, 25 bp, Homo sapien
cagagccacgtagagacagctgggt

SEQ ID NO: 4829022 - DNA, 25 bp, Homo sapien
tgtgcaagtggactttcgttgccag

SEQ ID NO: 4829023 - DNA, 25 bp, Homo sapien
cagaaattttgtatccatgtacagg

SEQ ID NO: 4829024 - DNA, 25 bp, Homo sapien
aatttaaagtgaaatcaagacgtgg

SEQ ID NO: 4829025 - DNA, 25 bp, Homo sapien
caaagttattactaatctcagagag

SEQ ID NO: 4829026 - DNA, 25 bp, Homo sapien
tcactggatagttgtaaaagcctcc

SEQ ID NO: 4829027 - DNA, 25 bp, Homo sapien
cacacgcaatcccatgataatggta

SEQ ID NO: 4829028 - DNA, 25 bp, Homo sapien
tacaagtcactagcatagcagtgag

SEQ ID NO: 4829029 - DNA, 25 bp, Homo sapien
gcagtgagcaggagaccaacacaca

SEQ ID NO: 4829030 - DNA, 25 bp, Homo sapien
acaataaggtacatatccattcgtc

SEQ ID NO: 4829031 - DNA, 25 bp, Homo sapien
gcaacaagagacacggaaggggcat

SEQ ID NO: 4829032 - DNA, 25 bp, Homo sapien
ttctttgctggcaacaagagacacg

SEQ ID NO: 4829033 - DNA, 25 bp, Homo sapien
attctttgctggcaacaagagacac

SEQ ID NO: 4829034 - DNA, 25 bp, Homo sapien
gctgtttggaagaagtttccttctc

SEQ ID NO: 4829035 - DNA, 25 bp, Homo sapien
ttactgtgggtacttgagtatcagc

SEQ ID NO: 4829036 - DNA, 25 bp, Homo sapien
cggtcgcagttgaggtcactggaac

SEQ ID NO: 4829037 - DNA, 25 bp, Homo sapien
gagtatcagcttcagctgatggtgc

SEQ ID NO: 4829038 - DNA, 25 bp, Homo sapien
tcactggaacccgttactgtgggta

SEQ ID NO: 4829039 - DNA, 25 bp, Homo sapien
tgccgtgggcagctgcgccgcgcgc

SEQ ID NO: 4829040 - DNA, 25 bp, Homo sapien
cgcccggccactgccgtgggcagct

SEQ ID NO: 4829041 - DNA, 25 bp, Homo sapien
agcagcagggctttcccggggagga

SEQ ID NO: 4829042 - DNA, 25 bp, Homo sapien
caccggaggcgcttgcaagcagcag

SEQ ID NO: 4829043 - DNA, 25 bp, Homo sapien
gccggagtcgccgtttgtgcgctct

SEQ ID NO: 4829044 - DNA, 25 bp, Homo sapien
cattggggcggcgtcgcgttcccct

SEQ ID NO: 4829045 - DNA, 25 bp, Homo sapien
ccgtttgtgcgctctggccattggg

SEQ ID NO: 4829046 - DNA, 25 bp, Homo sapien
ggctggtgacgccagcgccggagtc

SEQ ID NO: 4829047 - DNA, 25 bp, Homo sapien
ctgcggggtcaagtgcgagctcctg

SEQ ID NO: 4829048 - DNA, 25 bp, Homo sapien
gcggggtcaagtgcgagctcctgta

SEQ ID NO: 4829049 - DNA, 25 bp, Homo sapien
tgcggggtcaagtgcgagctcctgt

SEQ ID NO: 4829050 - DNA, 25 bp, Homo sapien
cggggtcaagtgcgagctcctgtac

SEQ ID NO: 4829051 - DNA, 25 bp, Homo sapien
cagtgggtccgtggagctccttcat

SEQ ID NO: 4829052 - DNA, 25 bp, Homo sapien
gcagtgggtccgtggagctccttca

SEQ ID NO: 4829053 - DNA, 25 bp, Homo sapien
gctccttcattaaccccacagggac

SEQ ID NO: 4829054 - DNA, 25 bp, Homo sapien
tgtgccgggcggattccgcccccac

SEQ ID NO: 4829055 - DNA, 25 bp, Homo sapien
tgccgggcggattccgcccccacgc

SEQ ID NO: 4829056 - DNA, 25 bp, Homo sapien
ggtgggctgcagcgctaggatgagg

SEQ ID NO: 4829057 - DNA, 25 bp, Homo sapien
gtgtgtgccgggcggattccgcccc

SEQ ID NO: 4829058 - DNA, 25 bp, Homo sapien
tcttagtcacccaagctcgtggtcg

SEQ ID NO: 4829059 - DNA, 25 bp, Homo sapien
tgcctctgacattgccggctgcgga

SEQ ID NO: 4829060 - DNA, 25 bp, Homo sapien
gctcagtccggatgccttggccggt

SEQ ID NO: 4829061 - DNA, 25 bp, Homo sapien
tgtctgcgggaatgcgccccgagat

SEQ ID NO: 4829062 - DNA, 25 bp, Homo sapien
aagagtgattggcagggcgaaggag

SEQ ID NO: 4829063 - DNA, 25 bp, Homo sapien
ggaggactgtatctggttcattagg

SEQ ID NO: 4829064 - DNA, 25 bp, Homo sapien
gactgtatctggttcattaggaaac

SEQ ID NO: 4829065 - DNA, 25 bp, Homo sapien
gttcattaggaaactccagatctgc

SEQ ID NO: 4829066 - DNA, 25 bp, Homo sapien
gtgttgcctcctccgagacgtggac

SEQ ID NO: 4829067 - DNA, 25 bp, Homo sapien
tttttctcggcagtacagggtgtca

SEQ ID NO: 4829068 - DNA, 25 bp, Homo sapien
tacgagttgggctggaactgtgctc

SEQ ID NO: 4829069 - DNA, 25 bp, Homo sapien
agccggcctggaaagttcgggctct

SEQ ID NO: 4829070 - DNA, 25 bp, Homo sapien
ggaccgcagggtacggagtggccgc

SEQ ID NO: 4829071 - DNA, 25 bp, Homo sapien
gcgaagggtaagacggacttgctcc

SEQ ID NO: 4829072 - DNA, 25 bp, Homo sapien
atgcacgggagggagcttccatcgc

SEQ ID NO: 4829073 - DNA, 25 bp, Homo sapien
gccccgtgtgcggacgcgagtgtgc

SEQ ID NO: 4829074 - DNA, 25 bp, Homo sapien
cgtgtggagtatctgcagacatgac

SEQ ID NO: 4829075 - DNA, 25 bp, Homo sapien
gacatgactgcgtggaggagattcc

SEQ ID NO: 4829076 - DNA, 25 bp, Homo sapien
gggtgattatttggctccgctcata

SEQ ID NO: 4829077 - DNA, 25 bp, Homo sapien
gctcgccttgccctcgggtgattat

SEQ ID NO: 4829078 - DNA, 25 bp, Homo sapien
tcaccttgagacaatctgggagacg

SEQ ID NO: 4829079 - DNA, 25 bp, Homo sapien
aagtcatagtcagtaaaacccacgg

SEQ ID NO: 4829080 - DNA, 25 bp, Homo sapien
tgctcgtgttccacaggacttggga

SEQ ID NO: 4829081 - DNA, 25 bp, Homo sapien
tagttccggacgagcttttccagct

SEQ ID NO: 4829082 - DNA, 25 bp, Homo sapien
tcccctctgacacatccattttggg

SEQ ID NO: 4829083 - DNA, 25 bp, Homo sapien
taacccttcctacaatcaactggta

SEQ ID NO: 4829084 - DNA, 25 bp, Homo sapien
cattttacatttcaccctctcccct

SEQ ID NO: 4829085 - DNA, 25 bp, Homo sapien
tgacacatccattttgggtaaccct

SEQ ID NO: 4829086 - DNA, 25 bp, Homo sapien
cattcctccacttgagcagttcctg

SEQ ID NO: 4829087 - DNA, 25 bp, Homo sapien
acaaaatcctttccataccatcatg

SEQ ID NO: 4829088 - DNA, 25 bp, Homo sapien
tgccctgtgaaagctcagattcaca

SEQ ID NO: 4829089 - DNA, 25 bp, Homo sapien
gtggtcccagttccgcagcccaacc

SEQ ID NO: 4829090 - DNA, 25 bp, Homo sapien
ggtcccggcgtgttctgctccggct

SEQ ID NO: 4829091 - DNA, 25 bp, Homo sapien
gagatgaggaatgagaggtcccggc

SEQ ID NO: 4829092 - DNA, 25 bp, Homo sapien
aatgagaggtcccggcgtgttctgc

SEQ ID NO: 4829093 - DNA, 25 bp, Homo sapien
tgaggaatgagaggtcccggcgtgt

SEQ ID NO: 4829094 - DNA, 25 bp, Homo sapien
ctttggtctggcatctgcactgaca

SEQ ID NO: 4829095 - DNA, 25 bp, Homo sapien
cctttggtctggcatctgcactgac

SEQ ID NO: 4829096 - DNA, 25 bp, Homo sapien
catttcctttggtctggcatctgca

SEQ ID NO: 4829097 - DNA, 25 bp, Homo sapien
ttggtctggcatctgcactgacaac

SEQ ID NO: 4829098 - DNA, 25 bp, Homo sapien
cttccatagtgcgaggcagtgtcct

SEQ ID NO: 4829099 - DNA, 25 bp, Homo sapien
gttaagaggatctatgtcagtatcg

SEQ ID NO: 4829100 - DNA, 25 bp, Homo sapien
cctgggcactgcgttctttaataca

SEQ ID NO: 4829101 - DNA, 25 bp, Homo sapien
agatcccattcaaatgttccacagc

SEQ ID NO: 4829102 - DNA, 25 bp, Homo sapien
ttcacagctgaacaagctatcatgc

SEQ ID NO: 4829103 - DNA, 25 bp, Homo sapien
gcacgaacgtgttctttacggcata

SEQ ID NO: 4829104 - DNA, 25 bp, Homo sapien
caagctatcatgcatctgtatgagg

SEQ ID NO: 4829105 - DNA, 25 bp, Homo sapien
ttctttacggcatattcacagctga

SEQ ID NO: 4829106 - DNA, 25 bp, Homo sapien
gcacatggagagtttgtgtacttca

SEQ ID NO: 4829107 - DNA, 25 bp, Homo sapien
tgcccttgagtggagacacaagcaa

SEQ ID NO: 4829108 - DNA, 25 bp, Homo sapien
cccagagatacatgtgtgcccttga

SEQ ID NO: 4829109 - DNA, 25 bp, Homo sapien
tctttttggtagcaccttattggtc

SEQ ID NO: 4829110 - DNA, 25 bp, Homo sapien
acacgctttcttcaagtaccctgag

SEQ ID NO: 4829111 - DNA, 25 bp, Homo sapien
tactcaactgtgacgctgccatctg

SEQ ID NO: 4829112 - DNA, 25 bp, Homo sapien
ccctgctacttcctatccatagaaa

SEQ ID NO: 4829113 - DNA, 25 bp, Homo sapien
catgtctaccaccttcctcaaatgc

SEQ ID NO: 4829114 - DNA, 25 bp, Homo sapien
ggagactgcattattgaaacccatg

SEQ ID NO: 4829115 - DNA, 25 bp, Homo sapien
aacccatgcgtttcgtagcccttca

SEQ ID NO: 4829116 - DNA, 25 bp, Homo sapien
ggtaattgttcctacatcctcccca

SEQ ID NO: 4829117 - DNA, 25 bp, Homo sapien
gggataggctctctccctaagcttc

SEQ ID NO: 4829118 - DNA, 25 bp, Homo sapien
ctggttcatggcctcatcacctctc

SEQ ID NO: 4829119 - DNA, 25 bp, Homo sapien
ctctcccaactaccgccacagtcct

SEQ ID NO: 4829120 - DNA, 25 bp, Homo sapien
tggttcatggcctcatcacctctcc

SEQ ID NO: 4829121 - DNA, 25 bp, Homo sapien
ctcatcacctctcccaactaccgcc

SEQ ID NO: 4829122 - DNA, 25 bp, Homo sapien
cttgtgggctgaaagctcaatgagg

SEQ ID NO: 4829123 - DNA, 25 bp, Homo sapien
agcttgtgggctgaaagctcaatga

SEQ ID NO: 4829124 - DNA, 25 bp, Homo sapien
cagcttgtgggctgaaagctcaatg

SEQ ID NO: 4829125 - DNA, 25 bp, Homo sapien
gcttgtgggctgaaagctcaatgag

SEQ ID NO: 4829126 - DNA, 25 bp, Homo sapien
taggtgcatcaatgatatcctgcaa

SEQ ID NO: 4829127 - DNA, 25 bp, Homo sapien
taactgcaaaatcggttaagcctgc

SEQ ID NO: 4829128 - DNA, 25 bp, Homo sapien
taagcctgcataatcagccataggt

SEQ ID NO: 4829129 - DNA, 25 bp, Homo sapien
aaagtctccagatatcccataactg

SEQ ID NO: 4829130 - DNA, 25 bp, Homo sapien
gccagtggacatggaccgtcactcc

SEQ ID NO: 4829131 - DNA, 25 bp, Homo sapien
agtggacatggaccgtcactcccag

SEQ ID NO: 4829132 - DNA, 25 bp, Homo sapien
agcttccggactccttctctctaac

SEQ ID NO: 4829133 - DNA, 25 bp, Homo sapien
ccagcttccggactccttctctcta

SEQ ID NO: 4829134 - DNA, 25 bp, Homo sapien
cataaccacatggattccacgggct

SEQ ID NO: 4829135 - DNA, 25 bp, Homo sapien
ggattccacgggctatagaacaaat

SEQ ID NO: 4829136 - DNA, 25 bp, Homo sapien
tccacgggctatagaacaaatcaaa

SEQ ID NO: 4829137 - DNA, 25 bp, Homo sapien
cacgggctatagaacaaatcaaagt

SEQ ID NO: 4829138 - DNA, 25 bp, Homo sapien
catcattggctcagacaactggaac

SEQ ID NO: 4829139 - DNA, 25 bp, Homo sapien
aatcatcatcattggctcagacaac

SEQ ID NO: 4829140 - DNA, 25 bp, Homo sapien
cattggctcagacaactggaactga

SEQ ID NO: 4829141 - DNA, 25 bp, Homo sapien
aaaacaatcatcatcattggctcag

SEQ ID NO: 4829142 - DNA, 25 bp, Homo sapien
catcttatgcttggattcctggcca

SEQ ID NO: 4829143 - DNA, 25 bp, Homo sapien
tgaacctagaatagaaaccacgtct

SEQ ID NO: 4829144 - DNA, 25 bp, Homo sapien
acgtcttctgggctcattaccttga

SEQ ID NO: 4829145 - DNA, 25 bp, Homo sapien
ggagacacctctcccatgaacctag

SEQ ID NO: 4829146 - DNA, 25 bp, Homo sapien
cttcagactgcttgtcttcctgttg

SEQ ID NO: 4829147 - DNA, 25 bp, Homo sapien
caatcggtgtgaaataccagtatcc

SEQ ID NO: 4829148 - DNA, 25 bp, Homo sapien
tgatcagtgccctgtagttcctttt

SEQ ID NO: 4829149 - DNA, 25 bp, Homo sapien
attggctgggcagtatgatcagtgc

SEQ ID NO: 4829150 - DNA, 25 bp, Homo sapien
ctgctggcgaaacactattgcacct

SEQ ID NO: 4829151 - DNA, 25 bp, Homo sapien
ttctccctagtattatctaatagtc

SEQ ID NO: 4829152 - DNA, 25 bp, Homo sapien
cctagtattatctaatagtctatac

SEQ ID NO: 4829153 - DNA, 25 bp, Homo sapien
gaaacactattgcacctttttgcct

SEQ ID NO: 4829154 - DNA, 25 bp, Homo sapien
tatctaacttgtcactatctcctag

SEQ ID NO: 4829155 - DNA, 25 bp, Homo sapien
ggctttgtgatgaatacccttatct

SEQ ID NO: 4829156 - DNA, 25 bp, Homo sapien
ttgattcagttggaaggctttgtga

SEQ ID NO: 4829157 - DNA, 25 bp, Homo sapien
ttagtgccttcagttaacctcaaag

SEQ ID NO: 4829158 - DNA, 25 bp, Homo sapien
ctatggtagactgctagaaatgtct

SEQ ID NO: 4829159 - DNA, 25 bp, Homo sapien
tacctgagagctacaatagttcaca

SEQ ID NO: 4829160 - DNA, 25 bp, Homo sapien
gggactagcttgacctggaagtact

SEQ ID NO: 4829161 - DNA, 25 bp, Homo sapien
tcctgtgtgtgtgacactacctgag

SEQ ID NO: 4829162 - DNA, 25 bp, Homo sapien
aggagttttggcgatgcgagggcag

SEQ ID NO: 4829163 - DNA, 25 bp, Homo sapien
tattcagagcagtaccgcttggcca

SEQ ID NO: 4829164 - DNA, 25 bp, Homo sapien
tcatggtgctattcagagcagtacc

SEQ ID NO: 4829165 - DNA, 25 bp, Homo sapien
tggtgctattcagagcagtaccgct

SEQ ID NO: 4829166 - DNA, 25 bp, Homo sapien
gctattcagagcagtaccgcttggc

SEQ ID NO: 4829167 - DNA, 25 bp, Homo sapien
gaataagcaaatggcaatgtgaaat

SEQ ID NO: 4829168 - DNA, 25 bp, Homo sapien
tgaataagcaaatggcaatgtgaaa

SEQ ID NO: 4829169 - DNA, 25 bp, Homo sapien
ataagcaaatggcaatgtgaaatcc

SEQ ID NO: 4829170 - DNA, 25 bp, Homo sapien
ctttgaataagcaaatggcaatgtg

SEQ ID NO: 4829171 - DNA, 25 bp, Homo sapien
tgtcaggtgaccattaagcgatggt

SEQ ID NO: 4829172 - DNA, 25 bp, Homo sapien
cgtgtttcctcgttcttagaagctg

SEQ ID NO: 4829173 - DNA, 25 bp, Homo sapien
ccataaagggttgataaagtacaca

SEQ ID NO: 4829174 - DNA, 25 bp, Homo sapien
cagacaagctgcattcaccagtaaa

SEQ ID NO: 4829175 - DNA, 25 bp, Homo sapien
tctgctgcatcccaatgaggtggtt

SEQ ID NO: 4829176 - DNA, 25 bp, Homo sapien
taacttgcacgccattgtcaaccca

SEQ ID NO: 4829177 - DNA, 25 bp, Homo sapien
cattaggaaccttccctgaaatctt

SEQ ID NO: 4829178 - DNA, 25 bp, Homo sapien
tgtcaacccacaaccaaactacatt

SEQ ID NO: 4829179 - DNA, 25 bp, Homo sapien
caggtatcccctggaacagagatgc

SEQ ID NO: 4829180 - DNA, 25 bp, Homo sapien
cagaaactgtctgggactagctgtc

SEQ ID NO: 4829181 - DNA, 25 bp, Homo sapien
ttcttgaggaaaggctgaacccagg

SEQ ID NO: 4829182 - DNA, 25 bp, Homo sapien
tgtaagcagacacgggtggaataca

SEQ ID NO: 4829183 - DNA, 25 bp, Homo sapien
tacacttgtgagtcaatttcgggct

SEQ ID NO: 4829184 - DNA, 25 bp, Homo sapien
tcttgtggctgtttaggtactccag

SEQ ID NO: 4829185 - DNA, 25 bp, Homo sapien
cgggctctttatcacattccactgg

SEQ ID NO: 4829186 - DNA, 25 bp, Homo sapien
tatcctggttactgtagcttatagg

SEQ ID NO: 4829187 - DNA, 25 bp, Homo sapien
attcatggagcccatgaagcctcca

SEQ ID NO: 4829188 - DNA, 25 bp, Homo sapien
tctgatctaggtaattatcatgtcc

SEQ ID NO: 4829189 - DNA, 25 bp, Homo sapien
tcctcctagctaccagaaattatag

SEQ ID NO: 4829190 - DNA, 25 bp, Homo sapien
gtcctattatagtgctgtaagatgc

SEQ ID NO: 4829191 - DNA, 25 bp, Homo sapien
gaagttcgcctcctgaacaattgtt

SEQ ID NO: 4829192 - DNA, 25 bp, Homo sapien
cacagccctggagatttagaagttc

SEQ ID NO: 4829193 - DNA, 25 bp, Homo sapien
ggtgtctgcgtctttcttccctctc

SEQ ID NO: 4829194 - DNA, 25 bp, Homo sapien
aagaagttcccctctgtggcacagc

SEQ ID NO: 4829195 - DNA, 25 bp, Homo sapien
ttgaaactgcgagtcttcctgtgtg

SEQ ID NO: 4829196 - DNA, 25 bp, Homo sapien
gattttctcgaagcctcatctcaaa

SEQ ID NO: 4829197 - DNA, 25 bp, Homo sapien
tcctgaagcacattcggaagatttt

SEQ ID NO: 4829198 - DNA, 25 bp, Homo sapien
gcaaagctctcctcgtggaaatgat

SEQ ID NO: 4829199 - DNA, 25 bp, Homo sapien
cccaaaagcaacagtgcttctgcag

SEQ ID NO: 4829200 - DNA, 25 bp, Homo sapien
caaaagcaacagtgcttctgcaggt

SEQ ID NO: 4829201 - DNA, 25 bp, Homo sapien
aaagcaacagtgcttctgcaggtag

SEQ ID NO: 4829202 - DNA, 25 bp, Homo sapien
ctgccccaaaagcaacagtgcttct

SEQ ID NO: 4829203 - DNA, 25 bp, Homo sapien
ctagaaccatgggtgagttagtgag

SEQ ID NO: 4829204 - DNA, 25 bp, Homo sapien
actggagtggttttgcaggcgttca

SEQ ID NO: 4829205 - DNA, 25 bp, Homo sapien
ggtatcctctctttgatggaactgg

SEQ ID NO: 4829206 - DNA, 25 bp, Homo sapien
tagtgagaagaacgggtatcctctc

SEQ ID NO: 4829207 - DNA, 25 bp, Homo sapien
aggggaacatcacacactggggcct

SEQ ID NO: 4829208 - DNA, 25 bp, Homo sapien
ataggtgagaattgaacaataagaa

SEQ ID NO: 4829209 - DNA, 25 bp, Homo sapien
gtgagaattgaacaataagaacaca

SEQ ID NO: 4829210 - DNA, 25 bp, Homo sapien
tggacacaggaaggggaacatcaca

SEQ ID NO: 4829211 - DNA, 25 bp, Homo sapien
gcatattgcgctcacagacgcggca

SEQ ID NO: 4829212 - DNA, 25 bp, Homo sapien
tatctccaggctagccggcatttgg

SEQ ID NO: 4829213 - DNA, 25 bp, Homo sapien
tttggaccgtaagtttagcagggca

SEQ ID NO: 4829214 - DNA, 25 bp, Homo sapien
tcttgggtaggctccgctagatggc

SEQ ID NO: 4829215 - DNA, 25 bp, Homo sapien
attgctcacatttgagtacagtctc

SEQ ID NO: 4829216 - DNA, 25 bp, Homo sapien
cctccctacatggagattgctcaca

SEQ ID NO: 4829217 - DNA, 25 bp, Homo sapien
ttggtggcatcctccctacatggag

SEQ ID NO: 4829218 - DNA, 25 bp, Homo sapien
gctcacatttgagtacagtctccat

SEQ ID NO: 4829219 - DNA, 25 bp, Homo sapien
cagttgttcataggctaatgtggaa

SEQ ID NO: 4829220 - DNA, 25 bp, Homo sapien
cttccagttgttcataggctaatgt

SEQ ID NO: 4829221 - DNA, 25 bp, Homo sapien
gctaatgtggaaagatcagtctcca

SEQ ID NO: 4829222 - DNA, 25 bp, Homo sapien
gttcataggctaatgtggaaagatc

SEQ ID NO: 4829223 - DNA, 25 bp, Homo sapien
taattgacctgcttaagaagggtac

SEQ ID NO: 4829224 - DNA, 25 bp, Homo sapien
gtaggtttgttagggagtcgtgtca

SEQ ID NO: 4829225 - DNA, 25 bp, Homo sapien
ctgtaggtttgttagggagtcgtgt

SEQ ID NO: 4829226 - DNA, 25 bp, Homo sapien
tttgttagggagtcgtgtcatcaag

SEQ ID NO: 4829227 - DNA, 25 bp, Homo sapien
ggtttgttagggagtcgtgtcatca

SEQ ID NO: 4829228 - DNA, 25 bp, Homo sapien
acagttgaccccctgttcttcaaga

SEQ ID NO: 4829229 - DNA, 25 bp, Homo sapien
tgttcttcaagagtgcccccaatga

SEQ ID NO: 4829230 - DNA, 25 bp, Homo sapien
tatttgcagtcctgctgctgtgcgt

SEQ ID NO: 4829231 - DNA, 25 bp, Homo sapien
cagtcctgctgctgtgcgtttggca

SEQ ID NO: 4829232 - DNA, 25 bp, Homo sapien
ggattcccatactggccaggtagcc

SEQ ID NO: 4829233 - DNA, 25 bp, Homo sapien
caactgagtgtctcttcagtggctt

SEQ ID NO: 4829234 - DNA, 25 bp, Homo sapien
catgtgatgtctctgcaactgagtg

SEQ ID NO: 4829235 - DNA, 25 bp, Homo sapien
gtggcttccgctcccttcagcatct

SEQ ID NO: 4829236 - DNA, 25 bp, Homo sapien
gagggcatttgatatacaattgtca

SEQ ID NO: 4829237 - DNA, 25 bp, Homo sapien
gagagatcaaaaaagtcagagggca

SEQ ID NO: 4829238 - DNA, 25 bp, Homo sapien
ccctggctctcctcaaattggttct

SEQ ID NO: 4829239 - DNA, 25 bp, Homo sapien
tcagctagatagagcttatccctgg

SEQ ID NO: 4829240 - DNA, 25 bp, Homo sapien
ggggagggctccaaacaggatgagc

SEQ ID NO: 4829241 - DNA, 25 bp, Homo sapien
ctgggcagggattcgcagtttccca

SEQ ID NO: 4829242 - DNA, 25 bp, Homo sapien
tgtgggaaatctgggcagggattcg

SEQ ID NO: 4829243 - DNA, 25 bp, Homo sapien
gaaatctgggcagggattcgcagtt

SEQ ID NO: 4829244 - DNA, 25 bp, Homo sapien
cttaagtgagcactggaacttaatt

SEQ ID NO: 4829245 - DNA, 25 bp, Homo sapien
taagtgagcactggaacttaattgc

SEQ ID NO: 4829246 - DNA, 25 bp, Homo sapien
ttaagtgagcactggaacttaattg

SEQ ID NO: 4829247 - DNA, 25 bp, Homo sapien
tgtttaccaacttctgaactatata

SEQ ID NO: 4829248 - DNA, 25 bp, Homo sapien
gtttaccaacttctgaactatatac

SEQ ID NO: 4829249 - DNA, 25 bp, Homo sapien
ctgtttaccaacttctgaactatat

SEQ ID NO: 4829250 - DNA, 25 bp, Homo sapien
agatttgtgaattggatttgttaga

SEQ ID NO: 4829251 - DNA, 25 bp, Homo sapien
ctgattgggtgcagtaacttaagca

SEQ ID NO: 4829252 - DNA, 25 bp, Homo sapien
tgggtgcagtaacttaagcataaag

SEQ ID NO: 4829253 - DNA, 25 bp, Homo sapien
gtgaattggatttgttagatgtttg

SEQ ID NO: 4829254 - DNA, 25 bp, Homo sapien
tactccaacgattggtacccgtata

SEQ ID NO: 4829255 - DNA, 25 bp, Homo sapien
tcattatctccgtggaaaccctcca

SEQ ID NO: 4829256 - DNA, 25 bp, Homo sapien
acaggactcattatctccgtggaaa

SEQ ID NO: 4829257 - DNA, 25 bp, Homo sapien
actctataacctccaaacctaattg

SEQ ID NO: 4829258 - DNA, 25 bp, Homo sapien
cacatttgcgaggactgttctctgt

SEQ ID NO: 4829259 - DNA, 25 bp, Homo sapien
acacatttgcgaggactgttctctg

SEQ ID NO: 4829260 - DNA, 25 bp, Homo sapien
cacacatttgcgaggactgttctct

SEQ ID NO: 4829261 - DNA, 25 bp, Homo sapien
ccagtaggattcaaacacttccaag

SEQ ID NO: 4829262 - DNA, 25 bp, Homo sapien
ataaatgattccctctgcccgtacg

SEQ ID NO: 4829263 - DNA, 25 bp, Homo sapien
aaggcccctgatgactcatggcaaa

SEQ ID NO: 4829264 - DNA, 25 bp, Homo sapien
gtctatgctcatagcctggcaggtt

SEQ ID NO: 4829265 - DNA, 25 bp, Homo sapien
agggtgttcactgagaaagtgcctt

SEQ ID NO: 4829266 - DNA, 25 bp, Homo sapien
gttctggggcaccaacgggcatcgt

SEQ ID NO: 4829267 - DNA, 25 bp, Homo sapien
cgggcatcgtccatgctttgtggga

SEQ ID NO: 4829268 - DNA, 25 bp, Homo sapien
actgaaatacctgtgactcggggaa

SEQ ID NO: 4829269 - DNA, 25 bp, Homo sapien
gtcgctttgtttatgcaaaacggca

SEQ ID NO: 4829270 - DNA, 25 bp, Homo sapien
taagattaggaagtggcttaaccca

SEQ ID NO: 4829271 - DNA, 25 bp, Homo sapien
taaatttccgacaagacaaactggc

SEQ ID NO: 4829272 - DNA, 25 bp, Homo sapien
aaggtcacctgaactaattgcctag

SEQ ID NO: 4829273 - DNA, 25 bp, Homo sapien
tctgctctggcgttttcagggcttc

SEQ ID NO: 4829274 - DNA, 25 bp, Homo sapien
tgctctggcgttttcagggcttccc

SEQ ID NO: 4829275 - DNA, 25 bp, Homo sapien
cctctgctctggcgttttcagggct

SEQ ID NO: 4829276 - DNA, 25 bp, Homo sapien
ctggcgttttcagggcttcccttgg

SEQ ID NO: 4829277 - DNA, 25 bp, Homo sapien
ggagatgcaagtgccttcatctcca

SEQ ID NO: 4829278 - DNA, 25 bp, Homo sapien
tgcaagtgccttcatctccaaacac

SEQ ID NO: 4829279 - DNA, 25 bp, Homo sapien
ctggagatgcaagtgccttcatctc

SEQ ID NO: 4829280 - DNA, 25 bp, Homo sapien
gatgcaagtgccttcatctccaaac

SEQ ID NO: 4829281 - DNA, 25 bp, Homo sapien
ccttgtacacgagctcttataatca

SEQ ID NO: 4829282 - DNA, 25 bp, Homo sapien
aaagatctaagtccaaaagtctcct

SEQ ID NO: 4829283 - DNA, 25 bp, Homo sapien
tcccagatgccttgtacacgagctc

SEQ ID NO: 4829284 - DNA, 25 bp, Homo sapien
ggtatacggaagtaaaatgggcata

SEQ ID NO: 4829285 - DNA, 25 bp, Homo sapien
tcaggattaaggtatctttgaagag

SEQ ID NO: 4829286 - DNA, 25 bp, Homo sapien
gtgcccctctttcaggattaaggta

SEQ ID NO: 4829287 - DNA, 25 bp, Homo sapien
ccctctttcaggattaaggtatctt

SEQ ID NO: 4829288 - DNA, 25 bp, Homo sapien
tctttcaggattaaggtatctttga

SEQ ID NO: 4829289 - DNA, 25 bp, Homo sapien
ccaggaactgcggaaggatgtagtt

SEQ ID NO: 4829290 - DNA, 25 bp, Homo sapien
aatttgcggcaaaagctgaagtgtc

SEQ ID NO: 4829291 - DNA, 25 bp, Homo sapien
tgtagttgacgctgatgaactgtgc

SEQ ID NO: 4829292 - DNA, 25 bp, Homo sapien
cctgtccacagtgcaccagatgttc

SEQ ID NO: 4829293 - DNA, 25 bp, Homo sapien
gctttgtcacttcaatgtacgcccg

SEQ ID NO: 4829294 - DNA, 25 bp, Homo sapien
cccgaggagcaaaagtctgggcctc

SEQ ID NO: 4829295 - DNA, 25 bp, Homo sapien
caatgtacgcccgaggagcaaaagt

SEQ ID NO: 4829296 - DNA, 25 bp, Homo sapien
cctccttgtgctgtatgggggtcag

SEQ ID NO: 4829297 - DNA, 25 bp, Homo sapien
ccaggccgagatctgcttgccgggc

SEQ ID NO: 4829298 - DNA, 25 bp, Homo sapien
cccaggccgagatctgcttgccggg

SEQ ID NO: 4829299 - DNA, 25 bp, Homo sapien
tttcagttattgctaaacaagcccg

SEQ ID NO: 4829300 - DNA, 25 bp, Homo sapien
tactcttctgagctatactggctgc

SEQ ID NO: 4829301 - DNA, 25 bp, Homo sapien
cactgtgtgcttgtttagaagagtc

SEQ ID NO: 4829302 - DNA, 25 bp, Homo sapien
gatgtggccccatgatgtccagttt

SEQ ID NO: 4829303 - DNA, 25 bp, Homo sapien
gactctgggcacaccttgttctcga

SEQ ID NO: 4829304 - DNA, 25 bp, Homo sapien
gaggtgcacagaatcaataagggcg

SEQ ID NO: 4829305 - DNA, 25 bp, Homo sapien
tgttctcgaccgtatgaccatcctg

SEQ ID NO: 4829306 - DNA, 25 bp, Homo sapien
gatagaatctgtagcatgagcacca

SEQ ID NO: 4829307 - DNA, 25 bp, Homo sapien
ctgggtttggagaacacatacacca

SEQ ID NO: 4829308 - DNA, 25 bp, Homo sapien
ctttgctagaccctctgggtttgga

SEQ ID NO: 4829309 - DNA, 25 bp, Homo sapien
aatattctttgctagaccctctggg

SEQ ID NO: 4829310 - DNA, 25 bp, Homo sapien
tggccttggagaaaggagaatattc

SEQ ID NO: 4829311 - DNA, 25 bp, Homo sapien
tattagctgttcaatgccatgtctg

SEQ ID NO: 4829312 - DNA, 25 bp, Homo sapien
gtgtgaagtacccttctgtctttcg

SEQ ID NO: 4829313 - DNA, 25 bp, Homo sapien
ggccatctttgcatattagctgttc

SEQ ID NO: 4829314 - DNA, 25 bp, Homo sapien
tctgtctttcgcaaccaaatccaca

SEQ ID NO: 4829315 - DNA, 25 bp, Homo sapien
atcttccacacgtttttgtgtgatt

SEQ ID NO: 4829316 - DNA, 25 bp, Homo sapien
tcttccacacgtttttgtgtgattt

SEQ ID NO: 4829317 - DNA, 25 bp, Homo sapien
gacatcatcttaattccacgtgggt

SEQ ID NO: 4829318 - DNA, 25 bp, Homo sapien
cagaatgggagaactggagaatgca

SEQ ID NO: 4829319 - DNA, 25 bp, Homo sapien
tgcatcaactaacactgctgggcag

SEQ ID NO: 4829320 - DNA, 25 bp, Homo sapien
gtgaccttgaggatccagaatggga

SEQ ID NO: 4829321 - DNA, 25 bp, Homo sapien
tattgattcaaaacatcgtcgtcag

SEQ ID NO: 4829322 - DNA, 25 bp, Homo sapien
tcgtcgtcagtgctaagctcctgga

SEQ ID NO: 4829323 - DNA, 25 bp, Homo sapien
tctccaatgtttacaataaccgtat

SEQ ID NO: 4829324 - DNA, 25 bp, Homo sapien
cctggagacattggcgagtacagcc

SEQ ID NO: 4829325 - DNA, 25 bp, Homo sapien
tcccagcatgatatcccagcaagga

SEQ ID NO: 4829326 - DNA, 25 bp, Homo sapien
tcagcaaatcagcaaggtggtccag

SEQ ID NO: 4829327 - DNA, 25 bp, Homo sapien
gaagacactacaaaggtcagcaaat

SEQ ID NO: 4829328 - DNA, 25 bp, Homo sapien
tgtgcacaggaacatcttgccgtcc

SEQ ID NO: 4829329 - DNA, 25 bp, Homo sapien
gagcttagtgaagtgtccgtcacct

SEQ ID NO: 4829330 - DNA, 25 bp, Homo sapien
aagtgtccgtcacctgcagcgtcct

SEQ ID NO: 4829331 - DNA, 25 bp, Homo sapien
ttagtgaagtgtccgtcacctgcag

SEQ ID NO: 4829332 - DNA, 25 bp, Homo sapien
gggagcttagtgaagtgtccgtcac

SEQ ID NO: 4829333 - DNA, 25 bp, Homo sapien
aatcatgctgtcttggaccacagga

SEQ ID NO: 4829334 - DNA, 25 bp, Homo sapien
aatgtgcgttaggtgtgcattttct

SEQ ID NO: 4829335 - DNA, 25 bp, Homo sapien
ccacaggaatgtgcgttaggtgtgc

SEQ ID NO: 4829336 - DNA, 25 bp, Homo sapien
cgtgtgactgtggacacatttcagc

SEQ ID NO: 4829337 - DNA, 25 bp, Homo sapien
tctctgtcacacctgatcagggtgt

SEQ ID NO: 4829338 - DNA, 25 bp, Homo sapien
ttctctctgtcacacctgatcaggg

SEQ ID NO: 4829339 - DNA, 25 bp, Homo sapien
tctctctgtcacacctgatcagggt

SEQ ID NO: 4829340 - DNA, 25 bp, Homo sapien
ctctgtcacacctgatcagggtgtt

SEQ ID NO: 4829341 - DNA, 25 bp, Homo sapien
tatctccactgggtttgctgtctgg

SEQ ID NO: 4829342 - DNA, 25 bp, Homo sapien
ctccactgggtttgctgtctggtcc

SEQ ID NO: 4829343 - DNA, 25 bp, Homo sapien
ctatctccactgggtttgctgtctg

SEQ ID NO: 4829344 - DNA, 25 bp, Homo sapien
ctgtctggtcctcagttttctgtcc

SEQ ID NO: 4829345 - DNA, 25 bp, Homo sapien
caaggtgtgcaaccagccatttgga

SEQ ID NO: 4829346 - DNA, 25 bp, Homo sapien
cacggatgggattttcaccagagcg

SEQ ID NO: 4829347 - DNA, 25 bp, Homo sapien
tacatcccggttagacgaaagcatc

SEQ ID NO: 4829348 - DNA, 25 bp, Homo sapien
ctaataattcgtgactgcagctcct

SEQ ID NO: 4829349 - DNA, 25 bp, Homo sapien
ccgtctagaatttggaaaagctcca

SEQ ID NO: 4829350 - DNA, 25 bp, Homo sapien
gccgtctagaatttggaaaagctcc

SEQ ID NO: 4829351 - DNA, 25 bp, Homo sapien
cgtctagaatttggaaaagctccat

SEQ ID NO: 4829352 - DNA, 25 bp, Homo sapien
agccgtctagaatttggaaaagctc

SEQ ID NO: 4829353 - DNA, 25 bp, Homo sapien
tggggctgctttggacttaatggac

SEQ ID NO: 4829354 - DNA, 25 bp, Homo sapien
tcagagaacactggggctgctttgg

SEQ ID NO: 4829355 - DNA, 25 bp, Homo sapien
gtttggcgtctgagaatcagtacat

SEQ ID NO: 4829356 - DNA, 25 bp, Homo sapien
gtctccatgagaatgtaaatctgtg

SEQ ID NO: 4829357 - DNA, 25 bp, Homo sapien
cagaagctttctgggactcatcgtc

SEQ ID NO: 4829358 - DNA, 25 bp, Homo sapien
tgccaccacaaccatgcatctccat

SEQ ID NO: 4829359 - DNA, 25 bp, Homo sapien
ctgagtcccgcagcctctgggtgta

SEQ ID NO: 4829360 - DNA, 25 bp, Homo sapien
aaatgaccagaagctttctgggact

SEQ ID NO: 4829361 - DNA, 25 bp, Homo sapien
gtatcaccatccaacaaccacggct

SEQ ID NO: 4829362 - DNA, 25 bp, Homo sapien
gagcctaggcacagtctgctctcta

SEQ ID NO: 4829363 - DNA, 25 bp, Homo sapien
caagctggtacctacgttagagcct

SEQ ID NO: 4829364 - DNA, 25 bp, Homo sapien
tccccttttaagtactgtagcatgc

SEQ ID NO: 4829365 - DNA, 25 bp, Homo sapien
tatttccgcaaccatctgaccacag

SEQ ID NO: 4829366 - DNA, 25 bp, Homo sapien
aacccgccaatggaagatggcagtt

SEQ ID NO: 4829367 - DNA, 25 bp, Homo sapien
ctgaccacagagagatacggctcta

SEQ ID NO: 4829368 - DNA, 25 bp, Homo sapien
gagatacggctctatccctcaggaa

SEQ ID NO: 4829369 - DNA, 25 bp, Homo sapien
gaggttgtttattccacacacaagc

SEQ ID NO: 4829370 - DNA, 25 bp, Homo sapien
ccaaagaggttgtttattccacaca

SEQ ID NO: 4829371 - DNA, 25 bp, Homo sapien
acacaagcacgaacgtgtagaccat

SEQ ID NO: 4829372 - DNA, 25 bp, Homo sapien
tccacacacaagcacgaacgtgtag

SEQ ID NO: 4829373 - DNA, 25 bp, Homo sapien
gatgctgagaacttcgaaataacag

SEQ ID NO: 4829374 - DNA, 25 bp, Homo sapien
ttccatatatcctgggataatatgc

SEQ ID NO: 4829375 - DNA, 25 bp, Homo sapien
gataatatgctcagaatccacagct

SEQ ID NO: 4829376 - DNA, 25 bp, Homo sapien
ttcgaaataacaggagttccacttc

SEQ ID NO: 4829377 - DNA, 25 bp, Homo sapien
tcaaaaatagaggaatgcaactcgc

SEQ ID NO: 4829378 - DNA, 25 bp, Homo sapien
tctttagcgtctgtgtttcccggta

SEQ ID NO: 4829379 - DNA, 25 bp, Homo sapien
gcaactcgcacggatttctttagcg

SEQ ID NO: 4829380 - DNA, 25 bp, Homo sapien
tccacgatctcgctgaacttcagaa

SEQ ID NO: 4829381 - DNA, 25 bp, Homo sapien
cgcccatatcaaagacaaaagggca

SEQ ID NO: 4829382 - DNA, 25 bp, Homo sapien
cacggcatcgcccatatcaaagaca

SEQ ID NO: 4829383 - DNA, 25 bp, Homo sapien
gtctattgtcagctctgccccaaat

SEQ ID NO: 4829384 - DNA, 25 bp, Homo sapien
tattgtcagctctgccccaaatact

SEQ ID NO: 4829385 - DNA, 25 bp, Homo sapien
tctgctaatgtgacagcgttcactg

SEQ ID NO: 4829386 - DNA, 25 bp, Homo sapien
gcttctgctaatgtgacagcgttca

SEQ ID NO: 4829387 - DNA, 25 bp, Homo sapien
tgctaatgtgacagcgttcactgga

SEQ ID NO: 4829388 - DNA, 25 bp, Homo sapien
tggcttctgctaatgtgacagcgtt

SEQ ID NO: 4829389 - DNA, 25 bp, Homo sapien
gaaattaggcagatcgatggaaaag

SEQ ID NO: 4829390 - DNA, 25 bp, Homo sapien
ggcagatcgatggaaaagaaatacc

SEQ ID NO: 4829391 - DNA, 25 bp, Homo sapien
cactagaaattaggcagatcgatgg

SEQ ID NO: 4829392 - DNA, 25 bp, Homo sapien
aaaaagcactagaaattaggcagat

SEQ ID NO: 4829393 - DNA, 25 bp, Homo sapien
gagggccgcgtcttcttctttggaa

SEQ ID NO: 4829394 - DNA, 25 bp, Homo sapien
tctttgtaacttgttgagggccgcg

SEQ ID NO: 4829395 - DNA, 25 bp, Homo sapien
ggcattgctatatggtaagtccatt

SEQ ID NO: 4829396 - DNA, 25 bp, Homo sapien
gctatatggtaagtccattgttctt

SEQ ID NO: 4829397 - DNA, 25 bp, Homo sapien
ttcacagtttcataactaagttgtg

SEQ ID NO: 4829398 - DNA, 25 bp, Homo sapien
tcataactaagttgtggaaattctc

SEQ ID NO: 4829399 - DNA, 25 bp, Homo sapien
ttcataactaagttgtggaaattct

SEQ ID NO: 4829400 - DNA, 25 bp, Homo sapien
cagtttcataactaagttgtggaaa

SEQ ID NO: 4829401 - DNA, 25 bp, Homo sapien
tcagtggcccctggctagtgccttc

SEQ ID NO: 4829402 - DNA, 25 bp, Homo sapien
tgtctcatgggtccttttgcttaaa

SEQ ID NO: 4829403 - DNA, 25 bp, Homo sapien
tggtgtggtattcccacatggagaa

SEQ ID NO: 4829404 - DNA, 25 bp, Homo sapien
aatgctttcgtcatgtgtctcatgg

SEQ ID NO: 4829405 - DNA, 25 bp, Homo sapien
gtaactgaagctttgtgaacagaaa

SEQ ID NO: 4829406 - DNA, 25 bp, Homo sapien
ttgaggatgatgtaatttgcttctc

SEQ ID NO: 4829407 - DNA, 25 bp, Homo sapien
acatggctggccgtgttctcagaac

SEQ ID NO: 4829408 - DNA, 25 bp, Homo sapien
ctgtttatgtcagggttgggactgg

SEQ ID NO: 4829409 - DNA, 25 bp, Homo sapien
agtcaaggtgatgcctgtagcagaa

SEQ ID NO: 4829410 - DNA, 25 bp, Homo sapien
aaaagggccaatgaaggatgactgt

SEQ ID NO: 4829411 - DNA, 25 bp, Homo sapien
aaagtcaaggtgatgcctgtagcag

SEQ ID NO: 4829412 - DNA, 25 bp, Homo sapien
ccaaaagtcaaggtgatgcctgtag

SEQ ID NO: 4829413 - DNA, 25 bp, Homo sapien
gattatgtaaaatcagctgactgca

SEQ ID NO: 4829414 - DNA, 25 bp, Homo sapien
catctagtattgagaaggcaaacac

SEQ ID NO: 4829415 - DNA, 25 bp, Homo sapien
tccttttcgagcaataatcctactg

SEQ ID NO: 4829416 - DNA, 25 bp, Homo sapien
tcagttcaaatgaccataggcctaa

SEQ ID NO: 4829417 - DNA, 25 bp, Homo sapien
aaatgtgttactctgcccttgttcc

SEQ ID NO: 4829418 - DNA, 25 bp, Homo sapien
catggtcaaatgtgttactctgccc

SEQ ID NO: 4829419 - DNA, 25 bp, Homo sapien
attccaaatcatggtcaaatgtgtt

SEQ ID NO: 4829420 - DNA, 25 bp, Homo sapien
aaatcatggtcaaatgtgttactct

SEQ ID NO: 4829421 - DNA, 25 bp, Homo sapien
cctcattgcctctcgagcggtgctg

SEQ ID NO: 4829422 - DNA, 25 bp, Homo sapien
tgccatcttcgatcaacctcattgc

SEQ ID NO: 4829423 - DNA, 25 bp, Homo sapien
agctcctgtgcttatcctcttcaag

SEQ ID NO: 4829424 - DNA, 25 bp, Homo sapien
tgcaaagccacttgactgtttgggc

SEQ ID NO: 4829425 - DNA, 25 bp, Homo sapien
tacaaccctcaatacttgagacagt

SEQ ID NO: 4829426 - DNA, 25 bp, Homo sapien
ttacaaccctcaatacttgagacag

SEQ ID NO: 4829427 - DNA, 25 bp, Homo sapien
tttacaaccctcaatacttgagaca

SEQ ID NO: 4829428 - DNA, 25 bp, Homo sapien
ctttacaaccctcaatacttgagac

SEQ ID NO: 4829429 - DNA, 25 bp, Homo sapien
tgcaatattgaagacaattaaactc

SEQ ID NO: 4829430 - DNA, 25 bp, Homo sapien
gcaatattgaagacaattaaactca

SEQ ID NO: 4829431 - DNA, 25 bp, Homo sapien
ctgcaatattgaagacaattaaact

SEQ ID NO: 4829432 - DNA, 25 bp, Homo sapien
caatattgaagacaattaaactcac

SEQ ID NO: 4829433 - DNA, 25 bp, Homo sapien
catcatgaaatttcccgtagacagc

SEQ ID NO: 4829434 - DNA, 25 bp, Homo sapien
ccgtagacagcacggactttaatat

SEQ ID NO: 4829435 - DNA, 25 bp, Homo sapien
gaaatttcccgtagacagcacggac

SEQ ID NO: 4829436 - DNA, 25 bp, Homo sapien
tttcccgtagacagcacggacttta

SEQ ID NO: 4829437 - DNA, 25 bp, Homo sapien
gattgcaaagctccttgatgacaag

SEQ ID NO: 4829438 - DNA, 25 bp, Homo sapien
gatgacaagctctcacactcttgct

SEQ ID NO: 4829439 - DNA, 25 bp, Homo sapien
cactcttgcttgcaggtaggaggag

SEQ ID NO: 4829440 - DNA, 25 bp, Homo sapien
aactccacctgcaaatatgattgca

SEQ ID NO: 4829441 - DNA, 25 bp, Homo sapien
gggagccacggaaattctgttggat

SEQ ID NO: 4829442 - DNA, 25 bp, Homo sapien
gatcgtgtttgaagggattcgtcct

SEQ ID NO: 4829443 - DNA, 25 bp, Homo sapien
ttggattcattttggcgcagaggag

SEQ ID NO: 4829444 - DNA, 25 bp, Homo sapien
tcttcagtcgaaaatgggagggcat

SEQ ID NO: 4829445 - DNA, 25 bp, Homo sapien
cagctccactctcggtcttcaccaa

SEQ ID NO: 4829446 - DNA, 25 bp, Homo sapien
gtacattaaacgcagacgtgtctcc

SEQ ID NO: 4829447 - DNA, 25 bp, Homo sapien
cactctcggtcttcaccaataccca

SEQ ID NO: 4829448 - DNA, 25 bp, Homo sapien
taaacgcagacgtgtctcccagctc

SEQ ID NO: 4829449 - DNA, 25 bp, Homo sapien
ttcaagtggaatttcctgcagtctt

SEQ ID NO: 4829450 - DNA, 25 bp, Homo sapien
tctgtcttctgaaccgtgacgggtc

SEQ ID NO: 4829451 - DNA, 25 bp, Homo sapien
tggggacccccgatgacatccatgt

SEQ ID NO: 4829452 - DNA, 25 bp, Homo sapien
tctgaaccgtgacgggtcatccttc

SEQ ID NO: 4829453 - DNA, 25 bp, Homo sapien
ccgtggttccggtcccacagaagca

SEQ ID NO: 4829454 - DNA, 25 bp, Homo sapien
agcacccacttcacttgaactttga

SEQ ID NO: 4829455 - DNA, 25 bp, Homo sapien
gagactggtggattccgtggttccg

SEQ ID NO: 4829456 - DNA, 25 bp, Homo sapien
cctctggctggtgcatgatggagga

SEQ ID NO: 4829457 - DNA, 25 bp, Homo sapien
tctgagtgtgatgtcgacttcctcc

SEQ ID NO: 4829458 - DNA, 25 bp, Homo sapien
gacagcatcccgacctgatgaggct

SEQ ID NO: 4829459 - DNA, 25 bp, Homo sapien
gtgtcaggctctgtaaggaagatcc

SEQ ID NO: 4829460 - DNA, 25 bp, Homo sapien
aggaatcttcggctggttccacggg

SEQ ID NO: 4829461 - DNA, 25 bp, Homo sapien
ctgcaggcacccgctgccctggcca

SEQ ID NO: 4829462 - DNA, 25 bp, Homo sapien
ctggccacttcgtgctgcgtgccag

SEQ ID NO: 4829463 - DNA, 25 bp, Homo sapien
tgccctggccacttcgtgctgcgtg

SEQ ID NO: 4829464 - DNA, 25 bp, Homo sapien
gccacttcgtgctgcgtgccaggct

SEQ ID NO: 4829465 - DNA, 25 bp, Homo sapien
ctaattatcaaggagaacactcaga

SEQ ID NO: 4829466 - DNA, 25 bp, Homo sapien
gaacagacaacagggcaatgactga

SEQ ID NO: 4829467 - DNA, 25 bp, Homo sapien
tgagtttgcatcaggattgggcttg

SEQ ID NO: 4829468 - DNA, 25 bp, Homo sapien
ccaacagaacagacaacagggcaat

SEQ ID NO: 4829469 - DNA, 25 bp, Homo sapien
caagcaggtctggaaggcgagtaac

SEQ ID NO: 4829470 - DNA, 25 bp, Homo sapien
tctgagctcagctgaagccatatgg

SEQ ID NO: 4829471 - DNA, 25 bp, Homo sapien
gcgagtaacgcggtacaagcacact

SEQ ID NO: 4829472 - DNA, 25 bp, Homo sapien
actgtgaaagtcaaaggcaaacacc

SEQ ID NO: 4829473 - DNA, 25 bp, Homo sapien
gagtctatatagcatctcacagttc

SEQ ID NO: 4829474 - DNA, 25 bp, Homo sapien
acagttcagatcctttagggcagca

SEQ ID NO: 4829475 - DNA, 25 bp, Homo sapien
cactatttactgaagcagcatggga

SEQ ID NO: 4829476 - DNA, 25 bp, Homo sapien
tgtgttatggatttagattcagtgt

SEQ ID NO: 4829477 - DNA, 25 bp, Homo sapien
ggtgtcgcctttgccgtttatggga

SEQ ID NO: 4829478 - DNA, 25 bp, Homo sapien
ccgtttatgggatgtgcatttgcaa

SEQ ID NO: 4829479 - DNA, 25 bp, Homo sapien
tgataaaggcatattggtgtcgcct

SEQ ID NO: 4829480 - DNA, 25 bp, Homo sapien
tgtttcaatcggcagtgactgaccc

SEQ ID NO: 4829481 - DNA, 25 bp, Homo sapien
acttcaaagcatattggatgtcatc

SEQ ID NO: 4829482 - DNA, 25 bp, Homo sapien
gtgatgggtccctgagcaaagatgg

SEQ ID NO: 4829483 - DNA, 25 bp, Homo sapien
agtgatgggtccctgagcaaagatg

SEQ ID NO: 4829484 - DNA, 25 bp, Homo sapien
aagtgatgggtccctgagcaaagat

SEQ ID NO: 4829485 - DNA, 25 bp, Homo sapien
tacactgatgggctgattggccacc

SEQ ID NO: 4829486 - DNA, 25 bp, Homo sapien
tcctggacgtctgtttatggtcaca

SEQ ID NO: 4829487 - DNA, 25 bp, Homo sapien
gattgcagccaattcctcctacact

SEQ ID NO: 4829488 - DNA, 25 bp, Homo sapien
tatgtcaaggctaaacttccttgat

SEQ ID NO: 4829489 - DNA, 25 bp, Homo sapien
caagccagccttgaatgagaagcat

SEQ ID NO: 4829490 - DNA, 25 bp, Homo sapien
tgtcagtatatctttaggatgattc

SEQ ID NO: 4829491 - DNA, 25 bp, Homo sapien
ctgatgtcagtatatctttaggatg

SEQ ID NO: 4829492 - DNA, 25 bp, Homo sapien
gatgtcagtatatctttaggatgat

SEQ ID NO: 4829493 - DNA, 25 bp, Homo sapien
aactgatgtcagtatatctttagga

SEQ ID NO: 4829494 - DNA, 25 bp, Homo sapien
tttatattaagttgttctaagctac

SEQ ID NO: 4829495 - DNA, 25 bp, Homo sapien
ctttatattaagttgttctaagcta

SEQ ID NO: 4829496 - DNA, 25 bp, Homo sapien
agcacagggagcagtaaaagcttga

SEQ ID NO: 4829497 - DNA, 25 bp, Homo sapien
ccagcacagggagcagtaaaagctt

SEQ ID NO: 4829498 - DNA, 25 bp, Homo sapien
cacagggagcagtaaaagcttgagg

SEQ ID NO: 4829499 - DNA, 25 bp, Homo sapien
ctgaccagcacagggagcagtaaaa

SEQ ID NO: 4829500 - DNA, 25 bp, Homo sapien
gaatgcagcctgctgctcggcttca

SEQ ID NO: 4829501 - DNA, 25 bp, Homo sapien
catacatgttcgctgcagataaaga

SEQ ID NO: 4829502 - DNA, 25 bp, Homo sapien
ccctgtgtacccgcagagcttcaaa

SEQ ID NO: 4829503 - DNA, 25 bp, Homo sapien
aaaaagttcatacatgttcgctgca

SEQ ID NO: 4829504 - DNA, 25 bp, Homo sapien
ctccttggttgccaagcactggtgg

SEQ ID NO: 4829505 - DNA, 25 bp, Homo sapien
gcactggtggtgaactttgtcttca

SEQ ID NO: 4829506 - DNA, 25 bp, Homo sapien
cttggttgccaagcactggtggtga

SEQ ID NO: 4829507 - DNA, 25 bp, Homo sapien
ccctccttggttgccaagcactggt

SEQ ID NO: 4829508 - DNA, 25 bp, Homo sapien
aatagctagaaatcttatttatcct

SEQ ID NO: 4829509 - DNA, 25 bp, Homo sapien
caatctcttcacgctgtaatagcta

SEQ ID NO: 4829510 - DNA, 25 bp, Homo sapien
tctcttcacgctgtaatagctagaa

SEQ ID NO: 4829511 - DNA, 25 bp, Homo sapien
cttcacgctgtaatagctagaaatc

SEQ ID NO: 4829512 - DNA, 25 bp, Homo sapien
gttcttaaacgcattctcatccccg

SEQ ID NO: 4829513 - DNA, 25 bp, Homo sapien
ctgccgagacattcgcagcgctcca

SEQ ID NO: 4829514 - DNA, 25 bp, Homo sapien
tgggcattagatccacacaaaagag

SEQ ID NO: 4829515 - DNA, 25 bp, Homo sapien
cgccgcgttggttcttttaggtgtg

SEQ ID NO: 4829516 - DNA, 25 bp, Homo sapien
gatgcgtgtgaattcgacatgtgga

SEQ ID NO: 4829517 - DNA, 25 bp, Homo sapien
agatgcgtgtgaattcgacatgtgg

SEQ ID NO: 4829518 - DNA, 25 bp, Homo sapien
gcgtgtgaattcgacatgtggacat

SEQ ID NO: 4829519 - DNA, 25 bp, Homo sapien
tgcgtgtgaattcgacatgtggaca

SEQ ID NO: 4829520 - DNA, 25 bp, Homo sapien
acagttaacctctgactcacctctg

SEQ ID NO: 4829521 - DNA, 25 bp, Homo sapien
ggagcccttcatacttaagcatttc

SEQ ID NO: 4829522 - DNA, 25 bp, Homo sapien
tgcttctcacggagcccttcatact

SEQ ID NO: 4829523 - DNA, 25 bp, Homo sapien
tcctggattttggacagttaacctc

SEQ ID NO: 4829524 - DNA, 25 bp, Homo sapien
ttgaatccgaggtatacctccgata

SEQ ID NO: 4829525 - DNA, 25 bp, Homo sapien
aatccgaggtatacctccgatatct

SEQ ID NO: 4829526 - DNA, 25 bp, Homo sapien
tgaatccgaggtatacctccgatat

SEQ ID NO: 4829527 - DNA, 25 bp, Homo sapien
cttgaatccgaggtatacctccgat

SEQ ID NO: 4829528 - DNA, 25 bp, Homo sapien
cactccactatctacacctgtgatg

SEQ ID NO: 4829529 - DNA, 25 bp, Homo sapien
ttctcccagcctctattctgactgg

SEQ ID NO: 4829530 - DNA, 25 bp, Homo sapien
tctgactggtcttaaagcaaacgcc

SEQ ID NO: 4829531 - DNA, 25 bp, Homo sapien
tcttaaagcaaacgccacctggatg

SEQ ID NO: 4829532 - DNA, 25 bp, Homo sapien
gcagcacgttcttactgtgaggcac

SEQ ID NO: 4829533 - DNA, 25 bp, Homo sapien
cacttgatccatgggaagtttttgg

SEQ ID NO: 4829534 - DNA, 25 bp, Homo sapien
tgtgaggcacgcaatgccacttgat

SEQ ID NO: 4829535 - DNA, 25 bp, Homo sapien
ctagagtgagtcgtacagcagcacg

SEQ ID NO: 4829536 - DNA, 25 bp, Homo sapien
cggtttgagcttcttcacgctattg

SEQ ID NO: 4829537 - DNA, 25 bp, Homo sapien
cccctgtgtgtatggtagactccaa

SEQ ID NO: 4829538 - DNA, 25 bp, Homo sapien
tccatgggctgcacacgcggtttga

SEQ ID NO: 4829539 - DNA, 25 bp, Homo sapien
tctgcccctgtgtgtatggtagact

SEQ ID NO: 4829540 - DNA, 25 bp, Homo sapien
ttcaagtttctctgacgttccctgg

SEQ ID NO: 4829541 - DNA, 25 bp, Homo sapien
aacagcattcacatggctctgccca

SEQ ID NO: 4829542 - DNA, 25 bp, Homo sapien
ggcaccccttcggattcagtttctg

SEQ ID NO: 4829543 - DNA, 25 bp, Homo sapien
taagctagtcctttgcgcaggggca

SEQ ID NO: 4829544 - DNA, 25 bp, Homo sapien
tgttaccactttgggcacctgaggt

SEQ ID NO: 4829545 - DNA, 25 bp, Homo sapien
ctgtatcctttgtcgtatgtggcca

SEQ ID NO: 4829546 - DNA, 25 bp, Homo sapien
taagcattcacatatccctgggcat

SEQ ID NO: 4829547 - DNA, 25 bp, Homo sapien
tctccgcacagttagctgaatggtt

SEQ ID NO: 4829548 - DNA, 25 bp, Homo sapien
ttttcaggtgttgcagccgtcttga

SEQ ID NO: 4829549 - DNA, 25 bp, Homo sapien
tttttcaggtgttgcagccgtcttg

SEQ ID NO: 4829550 - DNA, 25 bp, Homo sapien
gtttttcaggtgttgcagccgtctt

SEQ ID NO: 4829551 - DNA, 25 bp, Homo sapien
gacccttgctggtgattttcctgcc

SEQ ID NO: 4829552 - DNA, 25 bp, Homo sapien
tgtggtgggcctttccaactccagc

SEQ ID NO: 4829553 - DNA, 25 bp, Homo sapien
ccactgagccatggatgacacaggt

SEQ ID NO: 4829554 - DNA, 25 bp, Homo sapien
cagctgttagtatcatgtgcaagtc

SEQ ID NO: 4829555 - DNA, 25 bp, Homo sapien
acttgtggtcttctggagagttgac

SEQ ID NO: 4829556 - DNA, 25 bp, Homo sapien
cagaagtagtcgacttgtggtcttc

SEQ ID NO: 4829557 - DNA, 25 bp, Homo sapien
cacagttgacaaggtgtcagaagta

SEQ ID NO: 4829558 - DNA, 25 bp, Homo sapien
tgtggcattgcttggcacagttgac

SEQ ID NO: 4829559 - DNA, 25 bp, Homo sapien
gttatacccttactcttgatggaag

SEQ ID NO: 4829560 - DNA, 25 bp, Homo sapien
gcaggtgttctgtgggactgccttc

SEQ ID NO: 4829561 - DNA, 25 bp, Homo sapien
gatggaaggtctagctgaatataca

SEQ ID NO: 4829562 - DNA, 25 bp, Homo sapien
ggccgcatgtatgcaaaagaccact

SEQ ID NO: 4829563 - DNA, 25 bp, Homo sapien
ggtgcaaactctgaaagtaaaacag

SEQ ID NO: 4829564 - DNA, 25 bp, Homo sapien
cctgtgttgactgaatagtcctgaa

SEQ ID NO: 4829565 - DNA, 25 bp, Homo sapien
gaaatgacattacatttaccaccca

SEQ ID NO: 4829566 - DNA, 25 bp, Homo sapien
ccaccagcctgtgttgactgaatag

SEQ ID NO: 4829567 - DNA, 25 bp, Homo sapien
gtcctcctatgtgcctttgtgcttt

SEQ ID NO: 4829568 - DNA, 25 bp, Homo sapien
taattactaaatgattgttgatgga

SEQ ID NO: 4829569 - DNA, 25 bp, Homo sapien
tttgacttcgatcctctgtgctaac

SEQ ID NO: 4829570 - DNA, 25 bp, Homo sapien
cttgtctttgacttcgatcctctgt

SEQ ID NO: 4829571 - DNA, 25 bp, Homo sapien
ttactaaatgattgttgatggaatc

SEQ ID NO: 4829572 - DNA, 25 bp, Homo sapien
gaaatgtctacctttgtaaggagca

SEQ ID NO: 4829573 - DNA, 25 bp, Homo sapien
agaaatgtctacctttgtaaggagc

SEQ ID NO: 4829574 - DNA, 25 bp, Homo sapien
aatgtctacctttgtaaggagcatt

SEQ ID NO: 4829575 - DNA, 25 bp, Homo sapien
aagaaatgtctacctttgtaaggag

SEQ ID NO: 4829576 - DNA, 25 bp, Homo sapien
ctgcccataaaaaatcccaatagtc

SEQ ID NO: 4829577 - DNA, 25 bp, Homo sapien
gcccataaaaaatcccaatagtcat

SEQ ID NO: 4829578 - DNA, 25 bp, Homo sapien
tgcccataaaaaatcccaatagtca

SEQ ID NO: 4829579 - DNA, 25 bp, Homo sapien
gtgacagatggtctgtttcaatatt

SEQ ID NO: 4829580 - DNA, 25 bp, Homo sapien
cagtgacagatggtctgtttcaata

SEQ ID NO: 4829581 - DNA, 25 bp, Homo sapien
gacagatggtctgtttcaatatttt

SEQ ID NO: 4829582 - DNA, 25 bp, Homo sapien
gctgaaaatgtatttctctggtgga

SEQ ID NO: 4829583 - DNA, 25 bp, Homo sapien
gatgggcagagtaggatccgcaggc

SEQ ID NO: 4829584 - DNA, 25 bp, Homo sapien
ctcgggatgggcagagtaggatccg

SEQ ID NO: 4829585 - DNA, 25 bp, Homo sapien
cgggatgggcagagtaggatccgca

SEQ ID NO: 4829586 - DNA, 25 bp, Homo sapien
tgggcagagtaggatccgcaggctg

SEQ ID NO: 4829587 - DNA, 25 bp, Homo sapien
cttcccttccagctgaacggtcact

SEQ ID NO: 4829588 - DNA, 25 bp, Homo sapien
ctactctgtgctcataacgcagggt

SEQ ID NO: 4829589 - DNA, 25 bp, Homo sapien
gcagggtttcgtttgtcctatcttc

SEQ ID NO: 4829590 - DNA, 25 bp, Homo sapien
tcactgggtcacagaattccaccgg

SEQ ID NO: 4829591 - DNA, 25 bp, Homo sapien
cactggaaaccctgacggtactttg

SEQ ID NO: 4829592 - DNA, 25 bp, Homo sapien
cctccacaggccagtatatcaatgt

SEQ ID NO: 4829593 - DNA, 25 bp, Homo sapien
tcccatggtccccacgtgtggtggt

SEQ ID NO: 4829594 - DNA, 25 bp, Homo sapien
tgattttggacctgcagcctctaag

SEQ ID NO: 4829595 - DNA, 25 bp, Homo sapien
cacctctaagacaccatagagtgta

SEQ ID NO: 4829596 - DNA, 25 bp, Homo sapien
caaacacctctaagacaccatagag

SEQ ID NO: 4829597 - DNA, 25 bp, Homo sapien
aacacctctaagacaccatagagtg

SEQ ID NO: 4829598 - DNA, 25 bp, Homo sapien
ccaaacacctctaagacaccataga

SEQ ID NO: 4829599 - DNA, 25 bp, Homo sapien
gccccatgactgctcaggacccagt

SEQ ID NO: 4829600 - DNA, 25 bp, Homo sapien
tgcctggcctattgcagtggtgctt

SEQ ID NO: 4829601 - DNA, 25 bp, Homo sapien
gtgctttggtaatggtgctggagaa

SEQ ID NO: 4829602 - DNA, 25 bp, Homo sapien
ctggtgatgaatccgaggaagatgc

SEQ ID NO: 4829603 - DNA, 25 bp, Homo sapien
tctctgagcggcagtctatagactg

SEQ ID NO: 4829604 - DNA, 25 bp, Homo sapien
cgaagctgcgggtgttaggtggcgt

SEQ ID NO: 4829605 - DNA, 25 bp, Homo sapien
tagactggacagtctcacgggcaca

SEQ ID NO: 4829606 - DNA, 25 bp, Homo sapien
ggcacagtaggtagtcacagatgat

SEQ ID NO: 4829607 - DNA, 25 bp, Homo sapien
ggtataccggtatctttgactgatg

SEQ ID NO: 4829608 - DNA, 25 bp, Homo sapien
tcgggtataccggtatctttgactg

SEQ ID NO: 4829609 - DNA, 25 bp, Homo sapien
ttctcctggagtttggagtgaagct

SEQ ID NO: 4829610 - DNA, 25 bp, Homo sapien
gtttctcctggagtttggagtgaag

SEQ ID NO: 4829611 - DNA, 25 bp, Homo sapien
gctgtttgttgttattccttgttcc

SEQ ID NO: 4829612 - DNA, 25 bp, Homo sapien
gtttggacaggcactctcccactga

SEQ ID NO: 4829613 - DNA, 25 bp, Homo sapien
tctcccactgacgtgcttgtaactt

SEQ ID NO: 4829614 - DNA, 25 bp, Homo sapien
gttattccttgttccctctgtagga

SEQ ID NO: 4829615 - DNA, 25 bp, Homo sapien
ccttttagggttcccagggcatctg

SEQ ID NO: 4829616 - DNA, 25 bp, Homo sapien
gacccaaatctggattcttagtcac

SEQ ID NO: 4829617 - DNA, 25 bp, Homo sapien
acccaaatctggattcttagtcact

SEQ ID NO: 4829618 - DNA, 25 bp, Homo sapien
gattcttagtcactgtgataatagg

SEQ ID NO: 4829619 - DNA, 25 bp, Homo sapien
agacccaaatctggattcttagtca

SEQ ID NO: 4829620 - DNA, 25 bp, Homo sapien
catccctgtcctgtccagtcatcca

SEQ ID NO: 4829621 - DNA, 25 bp, Homo sapien
tcatccctgtcctgtccagtcatcc

SEQ ID NO: 4829622 - DNA, 25 bp, Homo sapien
agccaaagcccacgggtgtcctttg

SEQ ID NO: 4829623 - DNA, 25 bp, Homo sapien
accccagagccaaagcccacgggtg

SEQ ID NO: 4829624 - DNA, 25 bp, Homo sapien
atgggctgacatcgaagagcaggcc

SEQ ID NO: 4829625 - DNA, 25 bp, Homo sapien
gctgaccttgaagcccttctgattg

SEQ ID NO: 4829626 - DNA, 25 bp, Homo sapien
gaaggttgggtatcaaggctctgaa

SEQ ID NO: 4829627 - DNA, 25 bp, Homo sapien
gacattcttgaaagagccgtgccac

SEQ ID NO: 4829628 - DNA, 25 bp, Homo sapien
taagaaatgatacggaagctccggg

SEQ ID NO: 4829629 - DNA, 25 bp, Homo sapien
ggtcctgtgccgtacgtaagaaatg

SEQ ID NO: 4829630 - DNA, 25 bp, Homo sapien
gcctcgccatacagaagagtctcgg

SEQ ID NO: 4829631 - DNA, 25 bp, Homo sapien
tgtaacgagcgtccttaacaagcct

SEQ ID NO: 4829632 - DNA, 25 bp, Homo sapien
agagcatctcttggtctagttcagg

SEQ ID NO: 4829633 - DNA, 25 bp, Homo sapien
cttggtctagttcaggtggaccagg

SEQ ID NO: 4829634 - DNA, 25 bp, Homo sapien
gggcatgcacgctagcttccaggga

SEQ ID NO: 4829635 - DNA, 25 bp, Homo sapien
cagcctcgctgtgcaagggcatgca

SEQ ID NO: 4829636 - DNA, 25 bp, Homo sapien
ccagaggaaactctgcttcacttcc

SEQ ID NO: 4829637 - DNA, 25 bp, Homo sapien
ttccagaggaaactctgcttcactt

SEQ ID NO: 4829638 - DNA, 25 bp, Homo sapien
tttccagaggaaactctgcttcact

SEQ ID NO: 4829639 - DNA, 25 bp, Homo sapien
tccagaggaaactctgcttcacttc

SEQ ID NO: 4829640 - DNA, 25 bp, Homo sapien
tgagattagctcaactcgacagaaa

SEQ ID NO: 4829641 - DNA, 25 bp, Homo sapien
cagctatgctgaagatgtgtgagat

SEQ ID NO: 4829642 - DNA, 25 bp, Homo sapien
tatcgggaaagaaaccgatcggctc

SEQ ID NO: 4829643 - DNA, 25 bp, Homo sapien
cctggtagaccacaggacagctatg

SEQ ID NO: 4829644 - DNA, 25 bp, Homo sapien
tcccgtcttggtggttctgccctca

SEQ ID NO: 4829645 - DNA, 25 bp, Homo sapien
gccaccatctggtttgtatcctcct

SEQ ID NO: 4829646 - DNA, 25 bp, Homo sapien
tttccaccacactttctacttagac

SEQ ID NO: 4829647 - DNA, 25 bp, Homo sapien
tttgtcagaggaatggccacttgca

SEQ ID NO: 4829648 - DNA, 25 bp, Homo sapien
caagtttggccgagagcaacaaagg

SEQ ID NO: 4829649 - DNA, 25 bp, Homo sapien
gagcaacaaagggatggaatgcttc

SEQ ID NO: 4829650 - DNA, 25 bp, Homo sapien
aagcgagtttggcaagtttggccga

SEQ ID NO: 4829651 - DNA, 25 bp, Homo sapien
aagccaagaagcgagtttggcaagt

SEQ ID NO: 4829652 - DNA, 25 bp, Homo sapien
cggggggagggcggcaagctccagg

SEQ ID NO: 4829653 - DNA, 25 bp, Homo sapien
cgcggggggagggcggcaagctcca

SEQ ID NO: 4829654 - DNA, 25 bp, Homo sapien
gggggagggcggcaagctccaggct

SEQ ID NO: 4829655 - DNA, 25 bp, Homo sapien
gagggcggcaagctccaggctggcc

SEQ ID NO: 4829656 - DNA, 25 bp, Homo sapien
ccacagtgcaagcaataacgttttg

SEQ ID NO: 4829657 - DNA, 25 bp, Homo sapien
tcaggtcccacagtgcaagcaataa

SEQ ID NO: 4829658 - DNA, 25 bp, Homo sapien
ggtcccacagtgcaagcaataacgt

SEQ ID NO: 4829659 - DNA, 25 bp, Homo sapien
tggatcaggtcccacagtgcaagca

SEQ ID NO: 4829660 - DNA, 25 bp, Homo sapien
acacaaagggaatagggtcccagtg

SEQ ID NO: 4829661 - DNA, 25 bp, Homo sapien
ccagtgggtgttgccgttcgtccat

SEQ ID NO: 4829662 - DNA, 25 bp, Homo sapien
gtcccagtgggtgttgccgttcgtc

SEQ ID NO: 4829663 - DNA, 25 bp, Homo sapien
cacaaagggaatagggtcccagtgg

SEQ ID NO: 4829664 - DNA, 25 bp, Homo sapien
tttgaacgttgtgcccatcgctgct

SEQ ID NO: 4829665 - DNA, 25 bp, Homo sapien
tgagggatctttgaacgttgtgccc

SEQ ID NO: 4829666 - DNA, 25 bp, Homo sapien
gggtgcaaaaccgcctggcattcct

SEQ ID NO: 4829667 - DNA, 25 bp, Homo sapien
gccactccccgagggctttgaggga

SEQ ID NO: 4829668 - DNA, 25 bp, Homo sapien
catagagtttgggtctttggctgtg

SEQ ID NO: 4829669 - DNA, 25 bp, Homo sapien
gagtcactgaacctgtcccgactca

SEQ ID NO: 4829670 - DNA, 25 bp, Homo sapien
tcagggaaagcgcccctgcctcggg

SEQ ID NO: 4829671 - DNA, 25 bp, Homo sapien
tgaacctgtcccgactcagggaaag

SEQ ID NO: 4829672 - DNA, 25 bp, Homo sapien
tccacagataaatggtcgttgtgat

SEQ ID NO: 4829673 - DNA, 25 bp, Homo sapien
ctcttatccacagataaatggtgga

SEQ ID NO: 4829674 - DNA, 25 bp, Homo sapien
taaatggtggatgttacgtctcaac

SEQ ID NO: 4829675 - DNA, 25 bp, Homo sapien
tggtcgttgtgatgtctcttatcca

SEQ ID NO: 4829676 - DNA, 25 bp, Homo sapien
tcctggagaagagtaggtgcaacga

SEQ ID NO: 4829677 - DNA, 25 bp, Homo sapien
aagctgctgttccacgggatgaagg

SEQ ID NO: 4829678 - DNA, 25 bp, Homo sapien
ggagagacgatgttcctcctggaga

SEQ ID NO: 4829679 - DNA, 25 bp, Homo sapien
agcaggttataatggcggtgattcc

SEQ ID NO: 4829680 - DNA, 25 bp, Homo sapien
cagtttgagtgctacaaatggttga

SEQ ID NO: 4829681 - DNA, 25 bp, Homo sapien
gtttgagtgctacaaatggttgagt

SEQ ID NO: 4829682 - DNA, 25 bp, Homo sapien
agtttgagtgctacaaatggttgag

SEQ ID NO: 4829683 - DNA, 25 bp, Homo sapien
gaagaattgaggcaggttctttttc

SEQ ID NO: 4829684 - DNA, 25 bp, Homo sapien
ttctgtgaagaattgaggcaggttc

SEQ ID NO: 4829685 - DNA, 25 bp, Homo sapien
ctgtgaagaattgaggcaggttctt

SEQ ID NO: 4829686 - DNA, 25 bp, Homo sapien
gtgaagaattgaggcaggttctttt

SEQ ID NO: 4829687 - DNA, 25 bp, Homo sapien
ggaatgtgcctatggtggctgtcca

SEQ ID NO: 4829688 - DNA, 25 bp, Homo sapien
tgagagaacagtctcgggaatgtgc

SEQ ID NO: 4829689 - DNA, 25 bp, Homo sapien
gaacagtctcgggaatgtgcctatg

SEQ ID NO: 4829690 - DNA, 25 bp, Homo sapien
cctatggtggctgtccagtaggtag

SEQ ID NO: 4829691 - DNA, 25 bp, Homo sapien
gagtctcccaccttctactctcgtg

SEQ ID NO: 4829692 - DNA, 25 bp, Homo sapien
acctctgctgtaggtctgtctgttg

SEQ ID NO: 4829693 - DNA, 25 bp, Homo sapien
tactctcgtgcctgctctcgccctg

SEQ ID NO: 4829694 - DNA, 25 bp, Homo sapien
ctgctgtaggtctgtctgttgtcat

SEQ ID NO: 4829695 - DNA, 25 bp, Homo sapien
gtaattcaggatttgaaaagcctct

SEQ ID NO: 4829696 - DNA, 25 bp, Homo sapien
tgaattcatcccgtggagtccagcc

SEQ ID NO: 4829697 - DNA, 25 bp, Homo sapien
cagcctgtgctgtgatgcaggtagc

SEQ ID NO: 4829698 - DNA, 25 bp, Homo sapien
tgttcagttgagaaattatccctca

SEQ ID NO: 4829699 - DNA, 25 bp, Homo sapien
cacgtgtgtgcaacatctagctcag

SEQ ID NO: 4829700 - DNA, 25 bp, Homo sapien
cgtgtgtgcaacatctagctcaggt

SEQ ID NO: 4829701 - DNA, 25 bp, Homo sapien
acgtgtgtgcaacatctagctcagg

SEQ ID NO: 4829702 - DNA, 25 bp, Homo sapien
gtgtgtgcaacatctagctcaggtg

SEQ ID NO: 4829703 - DNA, 25 bp, Homo sapien
gagagacccctacatttggaatcaa

SEQ ID NO: 4829704 - DNA, 25 bp, Homo sapien
aaagccagactcaagagctctcgag

SEQ ID NO: 4829705 - DNA, 25 bp, Homo sapien
caaaaccatcagtagtgaaagccag

SEQ ID NO: 4829706 - DNA, 25 bp, Homo sapien
ttttccgcaagagtttctgtggaca

SEQ ID NO: 4829707 - DNA, 25 bp, Homo sapien
tcatgaccccaggagaacctcacag

SEQ ID NO: 4829708 - DNA, 25 bp, Homo sapien
aggagaacctcacagcactctgctg

SEQ ID NO: 4829709 - DNA, 25 bp, Homo sapien
ggccacgtgctggactctgggaatt

SEQ ID NO: 4829710 - DNA, 25 bp, Homo sapien
cacgtgctggactctgggaattgga

SEQ ID NO: 4829711 - DNA, 25 bp, Homo sapien
gagttaggatcttcagtcctctcct

SEQ ID NO: 4829712 - DNA, 25 bp, Homo sapien
cagggcacctgcttgttagccttcc

SEQ ID NO: 4829713 - DNA, 25 bp, Homo sapien
ctggcgagaggctttccgtctctgc

SEQ ID NO: 4829714 - DNA, 25 bp, Homo sapien
tctgctattaactccccagggcacc

SEQ ID NO: 4829715 - DNA, 25 bp, Homo sapien
tgtgttggctatggagctggcgaga

SEQ ID NO: 4829716 - DNA, 25 bp, Homo sapien
ccctcattcctccaggagcaacttc

SEQ ID NO: 4829717 - DNA, 25 bp, Homo sapien
tctcaccactcgtgcttccagcagg

SEQ ID NO: 4829718 - DNA, 25 bp, Homo sapien
ggcatcctctcaccactcgtgcttc

SEQ ID NO: 4829719 - DNA, 25 bp, Homo sapien
caccactcgtgcttccagcaggcct

SEQ ID NO: 4829720 - DNA, 25 bp, Homo sapien
acaatcgttgttgccaaatctcgga

SEQ ID NO: 4829721 - DNA, 25 bp, Homo sapien
caactgggttgaactttgctgggct

SEQ ID NO: 4829722 - DNA, 25 bp, Homo sapien
gatcaccttcatccttaggcgatag

SEQ ID NO: 4829723 - DNA, 25 bp, Homo sapien
tgccatggaggtgctcacaatcgtt

SEQ ID NO: 4829724 - DNA, 25 bp, Homo sapien
ttatttcagaaaacgtatgtgtcga

SEQ ID NO: 4829725 - DNA, 25 bp, Homo sapien
gaggacattcgttttagtggtgaat

SEQ ID NO: 4829726 - DNA, 25 bp, Homo sapien
gattatgaccgtagccacattcact

SEQ ID NO: 4829727 - DNA, 25 bp, Homo sapien
tcctttctcggtggtacaatcagag

SEQ ID NO: 4829728 - DNA, 25 bp, Homo sapien
cacaacaggaagttgtttccttgga

SEQ ID NO: 4829729 - DNA, 25 bp, Homo sapien
agcagtgacgttcatccaagcacaa

SEQ ID NO: 4829730 - DNA, 25 bp, Homo sapien
ggatttcacctcatcccacttcagc

SEQ ID NO: 4829731 - DNA, 25 bp, Homo sapien
ttcatccaagcacaacaggaagttg

SEQ ID NO: 4829732 - DNA, 25 bp, Homo sapien
ctttcacaggatagcaggcaaggac

SEQ ID NO: 4829733 - DNA, 25 bp, Homo sapien
tttcacaggatagcaggcaaggacc

SEQ ID NO: 4829734 - DNA, 25 bp, Homo sapien
ttcacaggatagcaggcaaggacca

SEQ ID NO: 4829735 - DNA, 25 bp, Homo sapien
tcacaggatagcaggcaaggaccat

SEQ ID NO: 4829736 - DNA, 25 bp, Homo sapien
tagaaatcctattgtaagaagattg

SEQ ID NO: 4829737 - DNA, 25 bp, Homo sapien
gaaatcctattgtaagaagattgag

SEQ ID NO: 4829738 - DNA, 25 bp, Homo sapien
tttagaaatcctattgtaagaagat

SEQ ID NO: 4829739 - DNA, 25 bp, Homo sapien
aaatcctattgtaagaagattgagt

SEQ ID NO: 4829740 - DNA, 25 bp, Homo sapien
caaactagtgatttctggtggacat

SEQ ID NO: 4829741 - DNA, 25 bp, Homo sapien
tggacgccagtagccctcactgtgt

SEQ ID NO: 4829742 - DNA, 25 bp, Homo sapien
tactagctagctttgcgtgctcagg

SEQ ID NO: 4829743 - DNA, 25 bp, Homo sapien
taatgatttagcaatgagcaggctc

SEQ ID NO: 4829744 - DNA, 25 bp, Homo sapien
gaggatcactgctctggagtacttg

SEQ ID NO: 4829745 - DNA, 25 bp, Homo sapien
tgtgaatctccaggaaaaagcacca

SEQ ID NO: 4829746 - DNA, 25 bp, Homo sapien
ggaggatcactgctctggagtactt

SEQ ID NO: 4829747 - DNA, 25 bp, Homo sapien
ttgctgtgaatctccaggaaaaagc

SEQ ID NO: 4829748 - DNA, 25 bp, Homo sapien
cattgggtcatccactcgtccctgt

SEQ ID NO: 4829749 - DNA, 25 bp, Homo sapien
ggtcatccactcgtccctgtagtac

SEQ ID NO: 4829750 - DNA, 25 bp, Homo sapien
gatggtgtagaatccattgggtcat

SEQ ID NO: 4829751 - DNA, 25 bp, Homo sapien
aagatggtgtagaatccattgggtc

SEQ ID NO: 4829752 - DNA, 25 bp, Homo sapien
gaaatttcttaaactctctttgcaa

SEQ ID NO: 4829753 - DNA, 25 bp, Homo sapien
tcagcccttggtgtgatgaatgatt

SEQ ID NO: 4829754 - DNA, 25 bp, Homo sapien
ttttgaggaatcagggaagaaggag

SEQ ID NO: 4829755 - DNA, 25 bp, Homo sapien
tgcaaacattttccagcaggatcat

SEQ ID NO: 4829756 - DNA, 25 bp, Homo sapien
tatttttaagctaggctcagtggag

SEQ ID NO: 4829757 - DNA, 25 bp, Homo sapien
tgtccatagaatatctattacctgt

SEQ ID NO: 4829758 - DNA, 25 bp, Homo sapien
tttatttttaagctaggctcagtgg

SEQ ID NO: 4829759 - DNA, 25 bp, Homo sapien
taagctaggctcagtggaggaaata

SEQ ID NO: 4829760 - DNA, 25 bp, Homo sapien
tctgactttcgaaacagggaatgag

SEQ ID NO: 4829761 - DNA, 25 bp, Homo sapien
ctgactttcgaaacagggaatgaga

SEQ ID NO: 4829762 - DNA, 25 bp, Homo sapien
gcttctctgactttcgaaacaggga

SEQ ID NO: 4829763 - DNA, 25 bp, Homo sapien
tctctgactttcgaaacagggaatg

SEQ ID NO: 4829764 - DNA, 25 bp, Homo sapien
ttgcagaggcgcacactgagctcca

SEQ ID NO: 4829765 - DNA, 25 bp, Homo sapien
gttgcagaggcgcacactgagctcc

SEQ ID NO: 4829766 - DNA, 25 bp, Homo sapien
ctgtgttgcagaggcgcacactgag

SEQ ID NO: 4829767 - DNA, 25 bp, Homo sapien
aactctgtgttgcagaggcgcacac

SEQ ID NO: 4829768 - DNA, 25 bp, Homo sapien
tttcccttgataattatgcgaggcc

SEQ ID NO: 4829769 - DNA, 25 bp, Homo sapien
ataattatgcgaggccagctcagca

SEQ ID NO: 4829770 - DNA, 25 bp, Homo sapien
cttgataattatgcgaggccagctc

SEQ ID NO: 4829771 - DNA, 25 bp, Homo sapien
tcccttgataattatgcgaggccag

SEQ ID NO: 4829772 - DNA, 25 bp, Homo sapien
tccaccgctattgttaatggcaaat

SEQ ID NO: 4829773 - DNA, 25 bp, Homo sapien
aatagaagcatctcgagtattcgta

SEQ ID NO: 4829774 - DNA, 25 bp, Homo sapien
taggagcctcggaatcattatttgg

SEQ ID NO: 4829775 - DNA, 25 bp, Homo sapien
tgtttttcctccaccgctattgtta

SEQ ID NO: 4829776 - DNA, 25 bp, Homo sapien
tgcacactgtcagatcctccgtggg

SEQ ID NO: 4829777 - DNA, 25 bp, Homo sapien
ttttgtagaagcttagcctgtatcc

SEQ ID NO: 4829778 - DNA, 25 bp, Homo sapien
cacagtatttgtggacctctttttt

SEQ ID NO: 4829779 - DNA, 25 bp, Homo sapien
tttgaccacagtatttgtggacctc

SEQ ID NO: 4829780 - DNA, 25 bp, Homo sapien
ctgtccacattcacccatgtgcagg

SEQ ID NO: 4829781 - DNA, 25 bp, Homo sapien
aacctattgtgcagtccacctcctg

SEQ ID NO: 4829782 - DNA, 25 bp, Homo sapien
ctagaatgagcagacggccaaccta

SEQ ID NO: 4829783 - DNA, 25 bp, Homo sapien
ggttgaaccacgaccataaacagtg

SEQ ID NO: 4829784 - DNA, 25 bp, Homo sapien
ttcagattcgcactcagaaaaggcc

SEQ ID NO: 4829785 - DNA, 25 bp, Homo sapien
tgcgtctgtacaagaaactacgact

SEQ ID NO: 4829786 - DNA, 25 bp, Homo sapien
tcctcgctgtgtcctgtgtgaccat

SEQ ID NO: 4829787 - DNA, 25 bp, Homo sapien
catcccgtagagaaatgaaagtttc

SEQ ID NO: 4829788 - DNA, 25 bp, Homo sapien
caaatgggaggtgttctggatgttt

SEQ ID NO: 4829789 - DNA, 25 bp, Homo sapien
agtgagagagagccccacatgggaa

SEQ ID NO: 4829790 - DNA, 25 bp, Homo sapien
agagagccccacatgggaattggca

SEQ ID NO: 4829791 - DNA, 25 bp, Homo sapien
ccacatgggaattggcaaatgggag

SEQ ID NO: 4829792 - DNA, 25 bp, Homo sapien
tccgtggctcgcaggctttctgacg

SEQ ID NO: 4829793 - DNA, 25 bp, Homo sapien
cattgttgctgtgaggatcgatact

SEQ ID NO: 4829794 - DNA, 25 bp, Homo sapien
caggcagataccactaaggctgcca

SEQ ID NO: 4829795 - DNA, 25 bp, Homo sapien
gacgtctttcacttgcagacaagaa

SEQ ID NO: 4829796 - DNA, 25 bp, Homo sapien
gctcctgtagagccaatgccagggt

SEQ ID NO: 4829797 - DNA, 25 bp, Homo sapien
ccggcaaggaggctcctgtagagcc

SEQ ID NO: 4829798 - DNA, 25 bp, Homo sapien
ccctccggcaaggaggctcctgtag

SEQ ID NO: 4829799 - DNA, 25 bp, Homo sapien
ctccggcaaggaggctcctgtagag

SEQ ID NO: 4829800 - DNA, 25 bp, Homo sapien
ttgcatctcagatcactgagggagc

SEQ ID NO: 4829801 - DNA, 25 bp, Homo sapien
ggccctgcactttgcatctcagatc

SEQ ID NO: 4829802 - DNA, 25 bp, Homo sapien
catcttcaacgccgatgaggccctg

SEQ ID NO: 4829803 - DNA, 25 bp, Homo sapien
ttctgagttcccctccggctgggct

SEQ ID NO: 4829804 - DNA, 25 bp, Homo sapien
cctcccttgcatcactaagcacggg

SEQ ID NO: 4829805 - DNA, 25 bp, Homo sapien
gggccacgtggaccactgatgcgtc

SEQ ID NO: 4829806 - DNA, 25 bp, Homo sapien
cgtggaccactgatgcgtcatacat

SEQ ID NO: 4829807 - DNA, 25 bp, Homo sapien
tgcatcactaagcacggggccacgt

SEQ ID NO: 4829808 - DNA, 25 bp, Homo sapien
aaacaaaaagttccttgcagccagt

SEQ ID NO: 4829809 - DNA, 25 bp, Homo sapien
aacaaaaagttccttgcagccagtg

SEQ ID NO: 4829810 - DNA, 25 bp, Homo sapien
acaaaaagttccttgcagccagtgt

SEQ ID NO: 4829811 - DNA, 25 bp, Homo sapien
tgagcaatgtctcccttgcactgtg

SEQ ID NO: 4829812 - DNA, 25 bp, Homo sapien
gcaatgtctcccttgcactgtggtt

SEQ ID NO: 4829813 - DNA, 25 bp, Homo sapien
agcaatgtctcccttgcactgtggt

SEQ ID NO: 4829814 - DNA, 25 bp, Homo sapien
ctcccggctggcactgagcaatgtc

SEQ ID NO: 4829815 - DNA, 25 bp, Homo sapien
catatcgccagtgcatgtgcttccc

SEQ ID NO: 4829816 - DNA, 25 bp, Homo sapien
actctgaagtgatttgcatatcgcc

SEQ ID NO: 4829817 - DNA, 25 bp, Homo sapien
ttatgctgggaagcgtaatttgatc

SEQ ID NO: 4829818 - DNA, 25 bp, Homo sapien
gacctcgacctgtgtaactctgaag

SEQ ID NO: 4829819 - DNA, 25 bp, Homo sapien
taggggacacggatactgttgacct

SEQ ID NO: 4829820 - DNA, 25 bp, Homo sapien
tcttatccgtaatatctgcatattg

SEQ ID NO: 4829821 - DNA, 25 bp, Homo sapien
tctgcatattgtgctttggtaaggt

SEQ ID NO: 4829822 - DNA, 25 bp, Homo sapien
aagcatggctccaatttgagtaggg

SEQ ID NO: 4829823 - DNA, 25 bp, Homo sapien
gaagacagacaaagagaaccgctct

SEQ ID NO: 4829824 - DNA, 25 bp, Homo sapien
gagaaccgctcttctgtaacaacgg

SEQ ID NO: 4829825 - DNA, 25 bp, Homo sapien
cctttttggactggcaatggtgaaa

SEQ ID NO: 4829826 - DNA, 25 bp, Homo sapien
tcttctgtaacaacgggaaggtgaa

SEQ ID NO: 4829827 - DNA, 25 bp, Homo sapien
atgacagccccaggagaaaaccagg

SEQ ID NO: 4829828 - DNA, 25 bp, Homo sapien
gccccaggagaaaaccaggagatgt

SEQ ID NO: 4829829 - DNA, 25 bp, Homo sapien
cagccccaggagaaaaccaggagat

SEQ ID NO: 4829830 - DNA, 25 bp, Homo sapien
ggagaaaaccaggagatgtaaacat

SEQ ID NO: 4829831 - DNA, 25 bp, Homo sapien
tgagtctacacacagcggtcatcat

SEQ ID NO: 4829832 - DNA, 25 bp, Homo sapien
gaacaagaaacgctgagtctacaca

SEQ ID NO: 4829833 - DNA, 25 bp, Homo sapien
gaaacgctgagtctacacacagcgg

SEQ ID NO: 4829834 - DNA, 25 bp, Homo sapien
ctggaacaagaaacgctgagtctac

SEQ ID NO: 4829835 - DNA, 25 bp, Homo sapien
actctcttccgatgaggatgagtct

SEQ ID NO: 4829836 - DNA, 25 bp, Homo sapien
agggccacttctagatactctcttc

SEQ ID NO: 4829837 - DNA, 25 bp, Homo sapien
tctcttccgatgaggatgagtctgc

SEQ ID NO: 4829838 - DNA, 25 bp, Homo sapien
cacttctagatactctcttccgatg

SEQ ID NO: 4829839 - DNA, 25 bp, Homo sapien
ttatttcgatctggaagatgcacca

SEQ ID NO: 4829840 - DNA, 25 bp, Homo sapien
tctggaagatgcaccaactgtctct

SEQ ID NO: 4829841 - DNA, 25 bp, Homo sapien
gatgcaccaactgtctcttccttct

SEQ ID NO: 4829842 - DNA, 25 bp, Homo sapien
ttcgatctggaagatgcaccaactg

SEQ ID NO: 4829843 - DNA, 25 bp, Homo sapien
agagatcccagtaccggagccaggc

SEQ ID NO: 4829844 - DNA, 25 bp, Homo sapien
tggcagtttggttttgggccaacac

SEQ ID NO: 4829845 - DNA, 25 bp, Homo sapien
gatagaacaataactggacaaccag

SEQ ID NO: 4829846 - DNA, 25 bp, Homo sapien
ccaacactttgcctattgagctggc

SEQ ID NO: 4829847 - DNA, 25 bp, Homo sapien
cggcctgtactttgtaattttcatg

SEQ ID NO: 4829848 - DNA, 25 bp, Homo sapien
ccggcctgtactttgtaattttcat

SEQ ID NO: 4829849 - DNA, 25 bp, Homo sapien
actgaaatctgttgagggcgatgag

SEQ ID NO: 4829850 - DNA, 25 bp, Homo sapien
tttctttgtcaccagaactgaaatc

SEQ ID NO: 4829851 - DNA, 25 bp, Homo sapien
ccagaactgaaatctgttgagggcg

SEQ ID NO: 4829852 - DNA, 25 bp, Homo sapien
ttgtcaccagaactgaaatctgttg

SEQ ID NO: 4829853 - DNA, 25 bp, Homo sapien
ttaaggacagagaaggactctaatt

SEQ ID NO: 4829854 - DNA, 25 bp, Homo sapien
aggacagagaaggactctaatttat

SEQ ID NO: 4829855 - DNA, 25 bp, Homo sapien
cttaaggacagagaaggactctaat

SEQ ID NO: 4829856 - DNA, 25 bp, Homo sapien
taaggacagagaaggactctaattt

SEQ ID NO: 4829857 - DNA, 25 bp, Homo sapien
tgattttggatcttgtgatgagaag

SEQ ID NO: 4829858 - DNA, 25 bp, Homo sapien
gatcttgtgatgagaagttgtgagc

SEQ ID NO: 4829859 - DNA, 25 bp, Homo sapien
gagaagttgtgagcttctgtgctaa

SEQ ID NO: 4829860 - DNA, 25 bp, Homo sapien
tcttcagttgattttggatcttgtg

SEQ ID NO: 4829861 - DNA, 25 bp, Homo sapien
agggtggagtttgggcgaggaggag

SEQ ID NO: 4829862 - DNA, 25 bp, Homo sapien
ttgggcgaggaggaggtttgtacaa

SEQ ID NO: 4829863 - DNA, 25 bp, Homo sapien
ttggagaagggtggagtttgggcga

SEQ ID NO: 4829864 - DNA, 25 bp, Homo sapien
tttgggcgaggaggaggtttgtaca

SEQ ID NO: 4829865 - DNA, 25 bp, Homo sapien
tacgagggtccagagcatgtttttc

SEQ ID NO: 4829866 - DNA, 25 bp, Homo sapien
aaaaccccttgcagctcttagtagg

SEQ ID NO: 4829867 - DNA, 25 bp, Homo sapien
ctttactctacaacccgctatggga

SEQ ID NO: 4829868 - DNA, 25 bp, Homo sapien
tacaggagcgtcctatgaacatgtg

SEQ ID NO: 4829869 - DNA, 25 bp, Homo sapien
tctttcttcggattataatcatcaa

SEQ ID NO: 4829870 - DNA, 25 bp, Homo sapien
caccatacagcggtcgacttttagc

SEQ ID NO: 4829871 - DNA, 25 bp, Homo sapien
aatcatcaaggtctttctcattgga

SEQ ID NO: 4829872 - DNA, 25 bp, Homo sapien
atcaaggtctttctcattggagcac

SEQ ID NO: 4829873 - DNA, 25 bp, Homo sapien
cactgaagtctcactacaaaggtcc

SEQ ID NO: 4829874 - DNA, 25 bp, Homo sapien
tgcagttgcctcaccatggacatta

SEQ ID NO: 4829875 - DNA, 25 bp, Homo sapien
tatgcgggaagaaagctcggaaact

SEQ ID NO: 4829876 - DNA, 25 bp, Homo sapien
cgaatcataggttcttatgcgggaa

SEQ ID NO: 4829877 - DNA, 25 bp, Homo sapien
tgaaagagacttcggatccctgagg

SEQ ID NO: 4829878 - DNA, 25 bp, Homo sapien
acctcaaatccccagtaagggaatg

SEQ ID NO: 4829879 - DNA, 25 bp, Homo sapien
aatccccagtaagggaatgaaagag

SEQ ID NO: 4829880 - DNA, 25 bp, Homo sapien
agggaatgaaagagacttcggatcc

SEQ ID NO: 4829881 - DNA, 25 bp, Homo sapien
ctggcggcgcgcgcgggcactgggc

SEQ ID NO: 4829882 - DNA, 25 bp, Homo sapien
ccgccatgacagacggcgggatccg

SEQ ID NO: 4829883 - DNA, 25 bp, Homo sapien
cggccagctggcctacgcggtgctt

SEQ ID NO: 4829884 - DNA, 25 bp, Homo sapien
gggccgccatgacagacggcgggat

SEQ ID NO: 4829885 - DNA, 25 bp, Homo sapien
ccagctggcctacgcggtgcttgcg

SEQ ID NO: 4829886 - DNA, 25 bp, Homo sapien
ttggatgaccacacttcaacatagg

SEQ ID NO: 4829887 - DNA, 25 bp, Homo sapien
cccatatccacaagctgtgttgtaa

SEQ ID NO: 4829888 - DNA, 25 bp, Homo sapien
cacacttcaacataggccactacat

SEQ ID NO: 4829889 - DNA, 25 bp, Homo sapien
ttgcccccatatccacaagctgtgt

SEQ ID NO: 4829890 - DNA, 25 bp, Homo sapien
gagctttacgcctctcttctgagct

SEQ ID NO: 4829891 - DNA, 25 bp, Homo sapien
gccatctttgaagataacgtgagtt

SEQ ID NO: 4829892 - DNA, 25 bp, Homo sapien
acccagagcaccgaaacgagcttta

SEQ ID NO: 4829893 - DNA, 25 bp, Homo sapien
gaagataacgtgagttacttgtttg

SEQ ID NO: 4829894 - DNA, 25 bp, Homo sapien
tcactgacacggagataacagcgca

SEQ ID NO: 4829895 - DNA, 25 bp, Homo sapien
gacacggagataacagcgcaaattc

SEQ ID NO: 4829896 - DNA, 25 bp, Homo sapien
gagataacagcgcaaattcagatga

SEQ ID NO: 4829897 - DNA, 25 bp, Homo sapien
gataacagcgcaaattcagatgacc

SEQ ID NO: 4829898 - DNA, 25 bp, Homo sapien
gagcatttggaagacgcaaacaagg

SEQ ID NO: 4829899 - DNA, 25 bp, Homo sapien
tttggaagacgcaaacaagggagag

SEQ ID NO: 4829900 - DNA, 25 bp, Homo sapien
cacaggccaagaactaaaggcagaa

SEQ ID NO: 4829901 - DNA, 25 bp, Homo sapien
aaaggcagaaagagtgtagccttgg

SEQ ID NO: 4829902 - DNA, 25 bp, Homo sapien
ccatagctaggtcattttaacagac

SEQ ID NO: 4829903 - DNA, 25 bp, Homo sapien
gcttctattatacattgacacagca

SEQ ID NO: 4829904 - DNA, 25 bp, Homo sapien
tgacacagcactaaatctgcacatg

SEQ ID NO: 4829905 - DNA, 25 bp, Homo sapien
catggtactcataaagctaagggta

SEQ ID NO: 4829906 - DNA, 25 bp, Homo sapien
attagctgcagggaacaatgattca

SEQ ID NO: 4829907 - DNA, 25 bp, Homo sapien
catcaatgtgtgctccagctgtcct

SEQ ID NO: 4829908 - DNA, 25 bp, Homo sapien
tagctgcagggaacaatgattcatc

SEQ ID NO: 4829909 - DNA, 25 bp, Homo sapien
caatgattcatcaatgtgtgctcca

SEQ ID NO: 4829910 - DNA, 25 bp, Homo sapien
ttttaattaggcttgataagtgttc

SEQ ID NO: 4829911 - DNA, 25 bp, Homo sapien
ttaggcttgataagtgttcattcat

SEQ ID NO: 4829912 - DNA, 25 bp, Homo sapien
taattaggcttgataagtgttcatt

SEQ ID NO: 4829913 - DNA, 25 bp, Homo sapien
aattaggcttgataagtgttcattc

SEQ ID NO: 4829914 - DNA, 25 bp, Homo sapien
tgaaatctcttatcattttctggtg

SEQ ID NO: 4829915 - DNA, 25 bp, Homo sapien
ttaaaattaaaatctttgggctgca

SEQ ID NO: 4829916 - DNA, 25 bp, Homo sapien
ttttgcctttgtagctctttagcca

SEQ ID NO: 4829917 - DNA, 25 bp, Homo sapien
aattaaaatctttgggctgcataca

SEQ ID NO: 4829918 - DNA, 25 bp, Homo sapien
tgaggcagcgggagggctgagcatg

SEQ ID NO: 4829919 - DNA, 25 bp, Homo sapien
tgactgcatgaagtgggatcagcat

SEQ ID NO: 4829920 - DNA, 25 bp, Homo sapien
aacttgactgcatgaagtgggatca

SEQ ID NO: 4829921 - DNA, 25 bp, Homo sapien
cttgactgcatgaagtgggatcagc

SEQ ID NO: 4829922 - DNA, 25 bp, Homo sapien
atgaacttgactgcatgaagtggga

SEQ ID NO: 4829923 - DNA, 25 bp, Homo sapien
aataagagaataggtacatcatcat

SEQ ID NO: 4829924 - DNA, 25 bp, Homo sapien
ttcatctcttgtaatctcttctcca

SEQ ID NO: 4829925 - DNA, 25 bp, Homo sapien
tccttcatctcttgtaatctcttct

SEQ ID NO: 4829926 - DNA, 25 bp, Homo sapien
tctccttcatctcttgtaatctctt

SEQ ID NO: 4829927 - DNA, 25 bp, Homo sapien
ccttcatctcttgtaatctcttctc

SEQ ID NO: 4829928 - DNA, 25 bp, Homo sapien
ttcttaaagacaccatggaatggca

SEQ ID NO: 4829929 - DNA, 25 bp, Homo sapien
gaaacaatttggatgtccacctggg

SEQ ID NO: 4829930 - DNA, 25 bp, Homo sapien
caagcttccgactgaaaaaggctac

SEQ ID NO: 4829931 - DNA, 25 bp, Homo sapien
ttatcaggacagcaatgcatcccag

SEQ ID NO: 4829932 - DNA, 25 bp, Homo sapien
tgaacacaaagtatcacgtgaaatg

SEQ ID NO: 4829933 - DNA, 25 bp, Homo sapien
tatcacgtgaaatgttcaaaggtgc

SEQ ID NO: 4829934 - DNA, 25 bp, Homo sapien
tacttggattatcatgagactgctg

SEQ ID NO: 4829935 - DNA, 25 bp, Homo sapien
aaaggtgcttcacacagagagttac

SEQ ID NO: 4829936 - DNA, 25 bp, Homo sapien
agccccactggggactaggtgaaga

SEQ ID NO: 4829937 - DNA, 25 bp, Homo sapien
gccccactggggactaggtgaagaa

SEQ ID NO: 4829938 - DNA, 25 bp, Homo sapien
caaaagatgagtgtaagccaccagc

SEQ ID NO: 4829939 - DNA, 25 bp, Homo sapien
gcagcctcggcatgatagatctcct

SEQ ID NO: 4829940 - DNA, 25 bp, Homo sapien
catatgaagactccccacagctaag

SEQ ID NO: 4829941 - DNA, 25 bp, Homo sapien
tttgccaacgcaggaaaaatcagac

SEQ ID NO: 4829942 - DNA, 25 bp, Homo sapien
gggcttcgccttcagaggagtttga

SEQ ID NO: 4829943 - DNA, 25 bp, Homo sapien
gggcagaagtcacgcaactcgaagt

SEQ ID NO: 4829944 - DNA, 25 bp, Homo sapien
cagcctgtctacaacaccttagggc

SEQ ID NO: 4829945 - DNA, 25 bp, Homo sapien
tgtgtgcttttcagaccaaccgctt

SEQ ID NO: 4829946 - DNA, 25 bp, Homo sapien
taaaatatggatgcactgttacatg

SEQ ID NO: 4829947 - DNA, 25 bp, Homo sapien
gacagcaagtcatctattcctaaag

SEQ ID NO: 4829948 - DNA, 25 bp, Homo sapien
taaccaataagtctagaagttccac

SEQ ID NO: 4829949 - DNA, 25 bp, Homo sapien
gagaaatagattcctaacagactta

SEQ ID NO: 4829950 - DNA, 25 bp, Homo sapien
tcttcatagttaacactgaccaaag

SEQ ID NO: 4829951 - DNA, 25 bp, Homo sapien
gcagcgccaagactccaatggaata

SEQ ID NO: 4829952 - DNA, 25 bp, Homo sapien
gatacaatcgatggcttaatctacc

SEQ ID NO: 4829953 - DNA, 25 bp, Homo sapien
taaacaaggcttgttacaaatgatc

SEQ ID NO: 4829954 - DNA, 25 bp, Homo sapien
tgtgaagtgcaaaattttttattgt

SEQ ID NO: 4829955 - DNA, 25 bp, Homo sapien
gatgatttcaaacgctaccatgact

SEQ ID NO: 4829956 - DNA, 25 bp, Homo sapien
gacggtcaaagttcaagatttcttc

SEQ ID NO: 4829957 - DNA, 25 bp, Homo sapien
gagaaatcatgcagagagaatgcgt

SEQ ID NO: 4829958 - DNA, 25 bp, Homo sapien
tgaaaacacatactaaggctaatgg

SEQ ID NO: 4829959 - DNA, 25 bp, Homo sapien
tcccgtctgtctgtaatggcatgaa

SEQ ID NO: 4829960 - DNA, 25 bp, Homo sapien
tcaccagatatagagtgtgcatccc

SEQ ID NO: 4829961 - DNA, 25 bp, Homo sapien
tgcatccctgacattgaaactgaag

SEQ ID NO: 4829962 - DNA, 25 bp, Homo sapien
tgtagaagatcctctcgcactagcg

SEQ ID NO: 4829963 - DNA, 25 bp, Homo sapien
cgttctatcagcgtattgaagctct

SEQ ID NO: 4829964 - DNA, 25 bp, Homo sapien
agttcccgttctatcagcgtattga

SEQ ID NO: 4829965 - DNA, 25 bp, Homo sapien
tatcagcgtattgaagctctttgta

SEQ ID NO: 4829966 - DNA, 25 bp, Homo sapien
tctcgctcagttcccgttctatcag

SEQ ID NO: 4829967 - DNA, 25 bp, Homo sapien
ttgttacaatgggaatgtatctgtg

SEQ ID NO: 4829968 - DNA, 25 bp, Homo sapien
aatctttgttacaatgggaatgtat

SEQ ID NO: 4829969 - DNA, 25 bp, Homo sapien
caatgggaatgtatctgtgtactgt

SEQ ID NO: 4829970 - DNA, 25 bp, Homo sapien
ttacaatgggaatgtatctgtgtac

SEQ ID NO: 4829971 - DNA, 25 bp, Homo sapien
tctttgcccatgaagcgtaataaac

SEQ ID NO: 4829972 - DNA, 25 bp, Homo sapien
tgatgggaacactcagtctgaactc

SEQ ID NO: 4829973 - DNA, 25 bp, Homo sapien
tgtggactgacatcgaatcagcagt

SEQ ID NO: 4829974 - DNA, 25 bp, Homo sapien
tgagtacctacatacctcgatttgg

SEQ ID NO: 4829975 - DNA, 25 bp, Homo sapien
gccgtcacatgagtcatctaaaaca

SEQ ID NO: 4829976 - DNA, 25 bp, Homo sapien
caattcctcatgaggtttgatgagg

SEQ ID NO: 4829977 - DNA, 25 bp, Homo sapien
ttgatgaggtccttaaagccgtcac

SEQ ID NO: 4829978 - DNA, 25 bp, Homo sapien
ttcttcaattcctcatgaggtttga

SEQ ID NO: 4829979 - DNA, 25 bp, Homo sapien
aaaaatcctagtggccagggtgcac

SEQ ID NO: 4829980 - DNA, 25 bp, Homo sapien
aacttcttctaggataaattacttg

SEQ ID NO: 4829981 - DNA, 25 bp, Homo sapien
tattaatgacaccagcatgtctggc

SEQ ID NO: 4829982 - DNA, 25 bp, Homo sapien
caaatcaggactttaagccttggtc

SEQ ID NO: 4829983 - DNA, 25 bp, Homo sapien
ggaaagcctctgtaaacatttctgt

SEQ ID NO: 4829984 - DNA, 25 bp, Homo sapien
ttgccttcacatgcaacaagctgga

SEQ ID NO: 4829985 - DNA, 25 bp, Homo sapien
gagattctacaactgagccacttac

SEQ ID NO: 4829986 - DNA, 25 bp, Homo sapien
tcgtgtatttctaccagagtgctgg

SEQ ID NO: 4829987 - DNA, 25 bp, Homo sapien
tcaatgggaggatgaccatcagctc

SEQ ID NO: 4829988 - DNA, 25 bp, Homo sapien
tgtggactgtcccagagttttgagg

SEQ ID NO: 4829989 - DNA, 25 bp, Homo sapien
ggtcagtaagtccaacaagaaacac

SEQ ID NO: 4829990 - DNA, 25 bp, Homo sapien
gaatcactgaaggagcttttagaaa

SEQ ID NO: 4829991 - DNA, 25 bp, Homo sapien
gtggcaattcccctaaacgtgtgat

SEQ ID NO: 4829992 - DNA, 25 bp, Homo sapien
tatctttctgcgtacagcgggtctg

SEQ ID NO: 4829993 - DNA, 25 bp, Homo sapien
gatcttacagagctcactggccggc

SEQ ID NO: 4829994 - DNA, 25 bp, Homo sapien
gctggtcggcactaaagggcctatc

SEQ ID NO: 4829995 - DNA, 25 bp, Homo sapien
tctcaaactaattactggtaagagg

SEQ ID NO: 4829996 - DNA, 25 bp, Homo sapien
tgttggacagaagtgagtcacagtc

SEQ ID NO: 4829997 - DNA, 25 bp, Homo sapien
agaataccggtgatgtgctgagacc

SEQ ID NO: 4829998 - DNA, 25 bp, Homo sapien
agtggcagggtcacttggcgtgaac

SEQ ID NO: 4829999 - DNA, 25 bp, Homo sapien
caggtcatgcttgtaggacagggca

SEQ ID NO: 4830000 - DNA, 25 bp, Homo sapien
gggagccccaatgttagatcttatt

SEQ ID NO: 4830001 - DNA, 25 bp, Homo sapien
gagtaagaataagcctgcggtctgg

SEQ ID NO: 4830002 - DNA, 25 bp, Homo sapien
cttgctccttgtggaagtcgctggg

SEQ ID NO: 4830003 - DNA, 25 bp, Homo sapien
ggtatctactacagaatgcctactg

SEQ ID NO: 4830004 - DNA, 25 bp, Homo sapien
tgaaagaatccaacgaccagtgaga

SEQ ID NO: 4830005 - DNA, 25 bp, Homo sapien
cagagcaaacgtgaaaaaggtggtc

SEQ ID NO: 4830006 - DNA, 25 bp, Homo sapien
aaagcacacagttaggcgcatccaa

SEQ ID NO: 4830007 - DNA, 25 bp, Homo sapien
aactgtgtagtataaccaatatgtc

SEQ ID NO: 4830008 - DNA, 25 bp, Homo sapien
gaatttcatgccatcaggaagtaca

SEQ ID NO: 4830009 - DNA, 25 bp, Homo sapien
acttcaaatgtaaccaactgtgtag

SEQ ID NO: 4830010 - DNA, 25 bp, Homo sapien
catgaagcggtttgtatactacgta

SEQ ID NO: 4830011 - DNA, 25 bp, Homo sapien
ccaatgttttgatggatgtcttaaa

SEQ ID NO: 4830012 - DNA, 25 bp, Homo sapien
gttgcaaagaatatagcactgtatt

SEQ ID NO: 4830013 - DNA, 25 bp, Homo sapien
agatgataagagcatgccaacaagc

SEQ ID NO: 4830014 - DNA, 25 bp, Homo sapien
caatattcgcttctgtattagacta

SEQ ID NO: 4830015 - DNA, 25 bp, Homo sapien
agtcgtggtctcacagacgtctggt

SEQ ID NO: 4830016 - DNA, 25 bp, Homo sapien
aatcataagagagaacccagcagcc

SEQ ID NO: 4830017 - DNA, 25 bp, Homo sapien
cacattcagggtgcgaagtggcttc

SEQ ID NO: 4830018 - DNA, 25 bp, Homo sapien
cttcccggaaagcacgtgagtcgtg

SEQ ID NO: 4830019 - DNA, 25 bp, Homo sapien
gtacagatgcatatccttagaaata

SEQ ID NO: 4830020 - DNA, 25 bp, Homo sapien
agaataagttgggtaaggaatcctg

SEQ ID NO: 4830021 - DNA, 25 bp, Homo sapien
cagaagaataagttgggtaaggaat

SEQ ID NO: 4830022 - DNA, 25 bp, Homo sapien
ggaatcctgtacagatgcatatcct

SEQ ID NO: 4830023 - DNA, 25 bp, Homo sapien
agaagcagacaaactctgtgggttc

SEQ ID NO: 4830024 - DNA, 25 bp, Homo sapien
gaaagaagcagacaaactctgtggg

SEQ ID NO: 4830025 - DNA, 25 bp, Homo sapien
aagcagacaaactctgtgggttcta

SEQ ID NO: 4830026 - DNA, 25 bp, Homo sapien
cagacaaactctgtgggttctatgt

SEQ ID NO: 4830027 - DNA, 25 bp, Homo sapien
gccacgctgccgcagcctgcaggag

SEQ ID NO: 4830028 - DNA, 25 bp, Homo sapien
atggaggacctagaccgcagcgcct

SEQ ID NO: 4830029 - DNA, 25 bp, Homo sapien
cctccgcagagaatgagctctggca

SEQ ID NO: 4830030 - DNA, 25 bp, Homo sapien
ggagcctccgcagagaatgagctct

SEQ ID NO: 4830031 - DNA, 25 bp, Homo sapien
cgatgatctgtgttgcagttggcaa

SEQ ID NO: 4830032 - DNA, 25 bp, Homo sapien
gaaggctcgagtcacacttcacagt

SEQ ID NO: 4830033 - DNA, 25 bp, Homo sapien
cagttggcaacacgagaaggctcga

SEQ ID NO: 4830034 - DNA, 25 bp, Homo sapien
aatgcaaccacatcgccaagcacta

SEQ ID NO: 4830035 - DNA, 25 bp, Homo sapien
aaggttacacagctacggtgtagca

SEQ ID NO: 4830036 - DNA, 25 bp, Homo sapien
cacagctacggtgtagcaaggttag

SEQ ID NO: 4830037 - DNA, 25 bp, Homo sapien
aaagaatgtgggctatgaattgagg

SEQ ID NO: 4830038 - DNA, 25 bp, Homo sapien
tactctctaggctatctttggaagt

SEQ ID NO: 4830039 - DNA, 25 bp, Homo sapien
ttgtcccacagtcgtaagccatagg

SEQ ID NO: 4830040 - DNA, 25 bp, Homo sapien
gccataggaatgtagttgatttcaa

SEQ ID NO: 4830041 - DNA, 25 bp, Homo sapien
gggtgtttttgccactatctcctcc

SEQ ID NO: 4830042 - DNA, 25 bp, Homo sapien
ccgctttactggatgatactttagg

SEQ ID NO: 4830043 - DNA, 25 bp, Homo sapien
gtggtactaagaatacctgtgggaa

SEQ ID NO: 4830044 - DNA, 25 bp, Homo sapien
aattcaactgcagttgtggtactaa

SEQ ID NO: 4830045 - DNA, 25 bp, Homo sapien
cacccaccatactgtgaaattcaac

SEQ ID NO: 4830046 - DNA, 25 bp, Homo sapien
actaagaatacctgtgggaatgtaa

SEQ ID NO: 4830047 - DNA, 25 bp, Homo sapien
gaacggctcctcagaaatccagtga

SEQ ID NO: 4830048 - DNA, 25 bp, Homo sapien
aagtggtgagacagttcgaacggct

SEQ ID NO: 4830049 - DNA, 25 bp, Homo sapien
cagtgacccaattctaaagaccata

SEQ ID NO: 4830050 - DNA, 25 bp, Homo sapien
gacccaattctaaagaccatagcac

SEQ ID NO: 4830051 - DNA, 25 bp, Homo sapien
gcacaatcctgtatccaagcaaact

SEQ ID NO: 4830052 - DNA, 25 bp, Homo sapien
caagatataagactacctgcccaag

SEQ ID NO: 4830053 - DNA, 25 bp, Homo sapien
ttttgaacatgaaaggcaacttctg

SEQ ID NO: 4830054 - DNA, 25 bp, Homo sapien
actgttatcacagcaccagcaagcc

SEQ ID NO: 4830055 - DNA, 25 bp, Homo sapien
cacttatgttatacaatacagatca

SEQ ID NO: 4830056 - DNA, 25 bp, Homo sapien
caatacagatcatcttggaactgca

SEQ ID NO: 4830057 - DNA, 25 bp, Homo sapien
tacagacgctgctgtcacaaccaag

SEQ ID NO: 4830058 - DNA, 25 bp, Homo sapien
cattcttctgagcactgtttataca

SEQ ID NO: 4830059 - DNA, 25 bp, Homo sapien
gtttagaaattcactgacaggaaca

SEQ ID NO: 4830060 - DNA, 25 bp, Homo sapien
gaacaaacgctacttagtgactgag

SEQ ID NO: 4830061 - DNA, 25 bp, Homo sapien
gacaaatgctgtcaagttagttctt

SEQ ID NO: 4830062 - DNA, 25 bp, Homo sapien
gtgactgagacaagaaaaaagtgtg

SEQ ID NO: 4830063 - DNA, 25 bp, Homo sapien
ttgtccagaagggagtgtgatcgca

SEQ ID NO: 4830064 - DNA, 25 bp, Homo sapien
ttgttgtccagaagggagtgtgatc

SEQ ID NO: 4830065 - DNA, 25 bp, Homo sapien
actttgttgtccagaagggagtgtg

SEQ ID NO: 4830066 - DNA, 25 bp, Homo sapien
ccagaagggagtgtgatcgcagctc

SEQ ID NO: 4830067 - DNA, 25 bp, Homo sapien
aaccaggcgctagagaatccgcggg

SEQ ID NO: 4830068 - DNA, 25 bp, Homo sapien
ggtaatttacagtcccctgcagatg

SEQ ID NO: 4830069 - DNA, 25 bp, Homo sapien
gagtagtcgattcttcctgctgaag

SEQ ID NO: 4830070 - DNA, 25 bp, Homo sapien
tttggactcaaagaagacgtaggcc

SEQ ID NO: 4830071 - DNA, 25 bp, Homo sapien
agtaatgattaagtcacatgcccca

SEQ ID NO: 4830072 - DNA, 25 bp, Homo sapien
catgccccaccttttgatactaaca

SEQ ID NO: 4830073 - DNA, 25 bp, Homo sapien
ggcaaaattgcaccaacctattaaa

SEQ ID NO: 4830074 - DNA, 25 bp, Homo sapien
ttcaatggcaaaattgcaccaacct

SEQ ID NO: 4830075 - DNA, 25 bp, Homo sapien
tgtggaagcccaagtaagtaatgcc

SEQ ID NO: 4830076 - DNA, 25 bp, Homo sapien
gaatgcagtacagaaccagacggct

SEQ ID NO: 4830077 - DNA, 25 bp, Homo sapien
ttgaaccaaacagcggagcaaacgc

SEQ ID NO: 4830078 - DNA, 25 bp, Homo sapien
ctagcactcagtcgcgtcaggagct

SEQ ID NO: 4830079 - DNA, 25 bp, Homo sapien
aatatccacgggagaacgactgcca

SEQ ID NO: 4830080 - DNA, 25 bp, Homo sapien
tctgatgactgactccacgaatggt

SEQ ID NO: 4830081 - DNA, 25 bp, Homo sapien
gggcatcggaaacaggaaacttata

SEQ ID NO: 4830082 - DNA, 25 bp, Homo sapien
ttgaacccgtagatgtggaggccac

SEQ ID NO: 4830083 - DNA, 25 bp, Homo sapien
gcccggccctacattcagtacagtt

SEQ ID NO: 4830084 - DNA, 25 bp, Homo sapien
tatagattcaagtcaggaggtaagg

SEQ ID NO: 4830085 - DNA, 25 bp, Homo sapien
tctagtaagcactcctagggtgtgg

SEQ ID NO: 4830086 - DNA, 25 bp, Homo sapien
taagggaggctcttttatggcaaag

SEQ ID NO: 4830087 - DNA, 25 bp, Homo sapien
gagtcttcctgatgtcgacagttca

SEQ ID NO: 4830088 - DNA, 25 bp, Homo sapien
ttttggaatgtcagattacgaatat

SEQ ID NO: 4830089 - DNA, 25 bp, Homo sapien
ccggaaagaatcgtgttttggaatg

SEQ ID NO: 4830090 - DNA, 25 bp, Homo sapien
gtcagattacgaatatacattttaa

SEQ ID NO: 4830091 - DNA, 25 bp, Homo sapien
tgccttttatgcttgatccggaaag

SEQ ID NO: 4830092 - DNA, 25 bp, Homo sapien
cagaaggcttcccaccctgcacgtg

SEQ ID NO: 4830093 - DNA, 25 bp, Homo sapien
cagctcaagatacagaaggcttccc

SEQ ID NO: 4830094 - DNA, 25 bp, Homo sapien
agatacagaaggcttcccaccctgc

SEQ ID NO: 4830095 - DNA, 25 bp, Homo sapien
ccaccctgcacgtggcttcctcagg

SEQ ID NO: 4830096 - DNA, 25 bp, Homo sapien
tctgtgcgcacctgtgtaacgaccg

SEQ ID NO: 4830097 - DNA, 25 bp, Homo sapien
aagggtgggcaacatcagtgctgac

SEQ ID NO: 4830098 - DNA, 25 bp, Homo sapien
cccagctcgatacggaaggcttctt

SEQ ID NO: 4830099 - DNA, 25 bp, Homo sapien
ccttttcatggatctagctgctggc

SEQ ID NO: 4830100 - DNA, 25 bp, Homo sapien
tgagtaacatctggagatggagccg

SEQ ID NO: 4830101 - DNA, 25 bp, Homo sapien
agatggagccgacgccaggcgaggg

SEQ ID NO: 4830102 - DNA, 25 bp, Homo sapien
agccgacgccaggcgagggtttcca

SEQ ID NO: 4830103 - DNA, 25 bp, Homo sapien
gcggtagccagtgagtaacatctgg

SEQ ID NO: 4830104 - DNA, 25 bp, Homo sapien
caatgcattgctgggatggtacagg

SEQ ID NO: 4830105 - DNA, 25 bp, Homo sapien
ttctgtttggcaacccatagctggg

SEQ ID NO: 4830106 - DNA, 25 bp, Homo sapien
aacctgggatggtctgactgtcata

SEQ ID NO: 4830107 - DNA, 25 bp, Homo sapien
tgcttatgagagctgcacggattgc

SEQ ID NO: 4830108 - DNA, 25 bp, Homo sapien
gcttactctatctacccgcaaatga

SEQ ID NO: 4830109 - DNA, 25 bp, Homo sapien
taattgtcccagataaggccttggc

SEQ ID NO: 4830110 - DNA, 25 bp, Homo sapien
cttggctgtggaggcccgcgtcctt

SEQ ID NO: 4830111 - DNA, 25 bp, Homo sapien
gctttctgtccgttttggcagtcag

SEQ ID NO: 4830112 - DNA, 25 bp, Homo sapien
gagagcttggacatgttgacaccta

SEQ ID NO: 4830113 - DNA, 25 bp, Homo sapien
tagctccaggaataacatgggccag

SEQ ID NO: 4830114 - DNA, 25 bp, Homo sapien
cagttctcaatatcgggaagcagcc

SEQ ID NO: 4830115 - DNA, 25 bp, Homo sapien
tacacatcttccacgcagggttttg

SEQ ID NO: 4830116 - DNA, 25 bp, Homo sapien
gtacgtgcagaacttcagaagacag

SEQ ID NO: 4830117 - DNA, 25 bp, Homo sapien
ctcaccgccgactatgtgcagagta

SEQ ID NO: 4830118 - DNA, 25 bp, Homo sapien
accgccgactatgtgcagagtaagt

SEQ ID NO: 4830119 - DNA, 25 bp, Homo sapien
tgtgcagagtaagtacgtgcagaac

SEQ ID NO: 4830120 - DNA, 25 bp, Homo sapien
cggcacagagtgggtagatgctcaa

SEQ ID NO: 4830121 - DNA, 25 bp, Homo sapien
taaagacacgcactgcatggaggct

SEQ ID NO: 4830122 - DNA, 25 bp, Homo sapien
aagggcggtctcctccacataaaga

SEQ ID NO: 4830123 - DNA, 25 bp, Homo sapien
cagaggctgcatcagcaagcacctt

SEQ ID NO: 4830124 - DNA, 25 bp, Homo sapien
ctccgggtcgacagtgatgatggta

SEQ ID NO: 4830125 - DNA, 25 bp, Homo sapien
cattggctccgggtcgacagtgatg

SEQ ID NO: 4830126 - DNA, 25 bp, Homo sapien
tgatgatggtaaagacggcgtccat

SEQ ID NO: 4830127 - DNA, 25 bp, Homo sapien
ttggctccgggtcgacagtgatgat

SEQ ID NO: 4830128 - DNA, 25 bp, Homo sapien
tgaagccgaaaaaataagacaatgg

SEQ ID NO: 4830129 - DNA, 25 bp, Homo sapien
ataagacaatggtgggaaacgctgg

SEQ ID NO: 4830130 - DNA, 25 bp, Homo sapien
gaaacgctggggcttgcctgtgtcc

SEQ ID NO: 4830131 - DNA, 25 bp, Homo sapien
tctaatgtcttcctgaagccgaaaa

SEQ ID NO: 4830132 - DNA, 25 bp, Homo sapien
acttgtagccaaaatctggagtcta

SEQ ID NO: 4830133 - DNA, 25 bp, Homo sapien
cttgtagccaaaatctggagtctac

SEQ ID NO: 4830134 - DNA, 25 bp, Homo sapien
ctggtgggccgggtggagcctggac

SEQ ID NO: 4830135 - DNA, 25 bp, Homo sapien
tggacaacgacattcctcacgaccg

SEQ ID NO: 4830136 - DNA, 25 bp, Homo sapien
gcctggacaacgacattcctcacga

SEQ ID NO: 4830137 - DNA, 25 bp, Homo sapien
gtggagcctggacaacgacattcct

SEQ ID NO: 4830138 - DNA, 25 bp, Homo sapien
gctttgccccgaggagagctgttct

SEQ ID NO: 4830139 - DNA, 25 bp, Homo sapien
ttgggtgttcgggaagaaagcctgc

SEQ ID NO: 4830140 - DNA, 25 bp, Homo sapien
tgggtgttcgggaagaaagcctgct

SEQ ID NO: 4830141 - DNA, 25 bp, Homo sapien
gcctgctttgccccgaggagagctg

SEQ ID NO: 4830142 - DNA, 25 bp, Homo sapien
ttgctagtaccttccacattatcag

SEQ ID NO: 4830143 - DNA, 25 bp, Homo sapien
tgaagcacattgccggcctccaggg

SEQ ID NO: 4830144 - DNA, 25 bp, Homo sapien
acctggaaggccacttggctgcggc

SEQ ID NO: 4830145 - DNA, 25 bp, Homo sapien
cggtcaaaagttcttctgttggctg

SEQ ID NO: 4830146 - DNA, 25 bp, Homo sapien
tgtggctccttccagtgcaaacctg

SEQ ID NO: 4830147 - DNA, 25 bp, Homo sapien
tacactctcctccttactagaatat

SEQ ID NO: 4830148 - DNA, 25 bp, Homo sapien
tctcacatacactctcctccttact

SEQ ID NO: 4830149 - DNA, 25 bp, Homo sapien
acatacactctcctccttactagaa

SEQ ID NO: 4830150 - DNA, 25 bp, Homo sapien
ttactagaatatctccattcagcac

SEQ ID NO: 4830151 - DNA, 25 bp, Homo sapien
gtcctcttctcagaggcaccaccag

SEQ ID NO: 4830152 - DNA, 25 bp, Homo sapien
attgcggggttcacaggcggttctc

SEQ ID NO: 4830153 - DNA, 25 bp, Homo sapien
ttccaccacacccacgaaattgcgg

SEQ ID NO: 4830154 - DNA, 25 bp, Homo sapien
tcagtcctcttctcagaggcaccac

SEQ ID NO: 4830155 - DNA, 25 bp, Homo sapien
gatgccgagcttctctgcaccggca

SEQ ID NO: 4830156 - DNA, 25 bp, Homo sapien
tctctccacgtcagactgagtcaaa

SEQ ID NO: 4830157 - DNA, 25 bp, Homo sapien
gtcagactgagtcaaaccacaaccc

SEQ ID NO: 4830158 - DNA, 25 bp, Homo sapien
ccacaacccgggttaaattcagatg

SEQ ID NO: 4830159 - DNA, 25 bp, Homo sapien
ttctcagtgtagagttacacgtgac

SEQ ID NO: 4830160 - DNA, 25 bp, Homo sapien
aagtcggcattaactggtctttggc

SEQ ID NO: 4830161 - DNA, 25 bp, Homo sapien
acgtgacaatgtggcctgcactgag

SEQ ID NO: 4830162 - DNA, 25 bp, Homo sapien
caaacgatgtctgcagcctgtggac

SEQ ID NO: 4830163 - DNA, 25 bp, Homo sapien
caagctttggtgaaagccctggctc

SEQ ID NO: 4830164 - DNA, 25 bp, Homo sapien
tggctctgcacaaccgtctccaaaa

SEQ ID NO: 4830165 - DNA, 25 bp, Homo sapien
tccatcgtgagtcctgtccgagcgg

SEQ ID NO: 4830166 - DNA, 25 bp, Homo sapien
ggcacctgaccgtcttccatcgtga

SEQ ID NO: 4830167 - DNA, 25 bp, Homo sapien
catgggcactggacaaagggcctgc

SEQ ID NO: 4830168 - DNA, 25 bp, Homo sapien
taagatttgattaagttggtcttcc

SEQ ID NO: 4830169 - DNA, 25 bp, Homo sapien
ttttccaggaggcagtacgtagttg

SEQ ID NO: 4830170 - DNA, 25 bp, Homo sapien
ggcagtacgtagttgtggtaagatt

SEQ ID NO: 4830171 - DNA, 25 bp, Homo sapien
tttttgcccccagcttcaataacaa

SEQ ID NO: 4830172 - DNA, 25 bp, Homo sapien
aagctcagctgtcgaggttttgagg

SEQ ID NO: 4830173 - DNA, 25 bp, Homo sapien
ctcagctgtcgaggttttgaggttt

SEQ ID NO: 4830174 - DNA, 25 bp, Homo sapien
aagaaagctcagctgtcgaggtttt

SEQ ID NO: 4830175 - DNA, 25 bp, Homo sapien
ctgtgtgcaaatggggaggtgaaca

SEQ ID NO: 4830176 - DNA, 25 bp, Homo sapien
ggaatccagtaatgtgactggcttc

SEQ ID NO: 4830177 - DNA, 25 bp, Homo sapien
aggaatccagtaatgtgactggctt

SEQ ID NO: 4830178 - DNA, 25 bp, Homo sapien
caggaatccagtaatgtgactggct

SEQ ID NO: 4830179 - DNA, 25 bp, Homo sapien
gcagacaaggccatggggggatccg

SEQ ID NO: 4830180 - DNA, 25 bp, Homo sapien
gacaaggccatggggggatccgtgt

SEQ ID NO: 4830181 - DNA, 25 bp, Homo sapien
gggggatccgtgtgttaggaggctc

SEQ ID NO: 4830182 - DNA, 25 bp, Homo sapien
ggggatccgtgtgttaggaggctca

SEQ ID NO: 4830183 - DNA, 25 bp, Homo sapien
gggatcggcaggcaataattgcaag

SEQ ID NO: 4830184 - DNA, 25 bp, Homo sapien
ggtgtggaccagaccgttcgtgctt

SEQ ID NO: 4830185 - DNA, 25 bp, Homo sapien
taaaacattcacatgcacgccaagt

SEQ ID NO: 4830186 - DNA, 25 bp, Homo sapien
cacgccaagtgatgaggtgtggacc

SEQ ID NO: 4830187 - DNA, 25 bp, Homo sapien
aatatctgaaattaatggttcacac

SEQ ID NO: 4830188 - DNA, 25 bp, Homo sapien
agggaccttctcagaggagtataac

SEQ ID NO: 4830189 - DNA, 25 bp, Homo sapien
gaagggatgaagggaccttctcaga

SEQ ID NO: 4830190 - DNA, 25 bp, Homo sapien
ttagagatttgaggggatgtatttc

SEQ ID NO: 4830191 - DNA, 25 bp, Homo sapien
gaggtgtctcgagattgtttcaatg

SEQ ID NO: 4830192 - DNA, 25 bp, Homo sapien
gagagaggtgtctcgagattgtttc

SEQ ID NO: 4830193 - DNA, 25 bp, Homo sapien
tgcaaaagtagaattcctagagcca

SEQ ID NO: 4830194 - DNA, 25 bp, Homo sapien
cattcccgaaacacgctgggtttgg

SEQ ID NO: 4830195 - DNA, 25 bp, Homo sapien
ctgctggcaggcgagacaaacatcg

SEQ ID NO: 4830196 - DNA, 25 bp, Homo sapien
acaaacatcgctggctggtcggcaa

SEQ ID NO: 4830197 - DNA, 25 bp, Homo sapien
ggtacggccctgcagacaagtggca

SEQ ID NO: 4830198 - DNA, 25 bp, Homo sapien
tccgcacaggtggactagttcacag

SEQ ID NO: 4830199 - DNA, 25 bp, Homo sapien
ttcttctttccgctgtagggcccga

SEQ ID NO: 4830200 - DNA, 25 bp, Homo sapien
tagggcccgatgacgatgctggcct

SEQ ID NO: 4830201 - DNA, 25 bp, Homo sapien
ctcagacagatacttgactgtggct

SEQ ID NO: 4830202 - DNA, 25 bp, Homo sapien
tttctcagacagatacttgactgtg

SEQ ID NO: 4830203 - DNA, 25 bp, Homo sapien
cgccctccctggaaacctgtccaca

SEQ ID NO: 4830204 - DNA, 25 bp, Homo sapien
gcaaggagcgggaatgccgagggtg

SEQ ID NO: 4830205 - DNA, 25 bp, Homo sapien
tggaagggggtgtgagcctgacgcc

SEQ ID NO: 4830206 - DNA, 25 bp, Homo sapien
ggaccacaccacagcgtctgtgtgc

SEQ ID NO: 4830207 - DNA, 25 bp, Homo sapien
gttcccatttcctcgtgaactgtac

SEQ ID NO: 4830208 - DNA, 25 bp, Homo sapien
ttagagttcccatttcctcgtgaac

SEQ ID NO: 4830209 - DNA, 25 bp, Homo sapien
gagttcccatttcctcgtgaactgt

SEQ ID NO: 4830210 - DNA, 25 bp, Homo sapien
tagagttcccatttcctcgtgaact

SEQ ID NO: 4830211 - DNA, 25 bp, Homo sapien
ggccccagtgccgggcgctgccagg

SEQ ID NO: 4830212 - DNA, 25 bp, Homo sapien
gccccagtgccgggcgctgccaggg

SEQ ID NO: 4830213 - DNA, 25 bp, Homo sapien
tggagtcgtttgacgtcttttaaca

SEQ ID NO: 4830214 - DNA, 25 bp, Homo sapien
cttttaacaccctttgagcacatga

SEQ ID NO: 4830215 - DNA, 25 bp, Homo sapien
ctttgtcaaataaaagatggagtcg

SEQ ID NO: 4830216 - DNA, 25 bp, Homo sapien
tgagcagacggagtgatcatgagat

SEQ ID NO: 4830217 - DNA, 25 bp, Homo sapien
ggacattacggtcacactgtgctca

SEQ ID NO: 4830218 - DNA, 25 bp, Homo sapien
tcctggagcccgtgtgttagcacgg

SEQ ID NO: 4830219 - DNA, 25 bp, Homo sapien
ttagcacggcgtggggttccagcct

SEQ ID NO: 4830220 - DNA, 25 bp, Homo sapien
ctccatgaacgccagagtgggacat

SEQ ID NO: 4830221 - DNA, 25 bp, Homo sapien
tctaaagtcgggtaaggatcttggc

SEQ ID NO: 4830222 - DNA, 25 bp, Homo sapien
cagtatctacttgtctattaaggga

SEQ ID NO: 4830223 - DNA, 25 bp, Homo sapien
gagactgaataggaaacatggaagg

SEQ ID NO: 4830224 - DNA, 25 bp, Homo sapien
gaccatcagtcatgtaaaagatact

SEQ ID NO: 4830225 - DNA, 25 bp, Homo sapien
tcgtgtgcacagttccgtcagctgg

SEQ ID NO: 4830226 - DNA, 25 bp, Homo sapien
gcactgcacggcacacgctttgcaa

SEQ ID NO: 4830227 - DNA, 25 bp, Homo sapien
gactgcctgttgatatgcactgtgg

SEQ ID NO: 4830228 - DNA, 25 bp, Homo sapien
cactgtggatatcaatcgtgtgcac

SEQ ID NO: 4830229 - DNA, 25 bp, Homo sapien
ggaaggggctgtcagagccacccaa

SEQ ID NO: 4830230 - DNA, 25 bp, Homo sapien
gaaggggctgtcagagccacccaac

SEQ ID NO: 4830231 - DNA, 25 bp, Homo sapien
aggaaggggctgtcagagccaccca

SEQ ID NO: 4830232 - DNA, 25 bp, Homo sapien
ccgagcaagcgtgactccacacaag

SEQ ID NO: 4830233 - DNA, 25 bp, Homo sapien
tgagcagctgccgagcaagcgtgac

SEQ ID NO: 4830234 - DNA, 25 bp, Homo sapien
agctgccgagcaagcgtgactccac

SEQ ID NO: 4830235 - DNA, 25 bp, Homo sapien
aagtgagcagctgccgagcaagcgt

SEQ ID NO: 4830236 - DNA, 25 bp, Homo sapien
cccagatgttaccaagggcacaggc

SEQ ID NO: 4830237 - DNA, 25 bp, Homo sapien
cagatggcataattggtgagaaatc

SEQ ID NO: 4830238 - DNA, 25 bp, Homo sapien
tcagaaacaggacacaagttacagg

SEQ ID NO: 4830239 - DNA, 25 bp, Homo sapien
cacacaatacccagatgttaccaag

SEQ ID NO: 4830240 - DNA, 25 bp, Homo sapien
gagaggtctactacactggagatgc

SEQ ID NO: 4830241 - DNA, 25 bp, Homo sapien
gacgcccactacactggggtctggt

SEQ ID NO: 4830242 - DNA, 25 bp, Homo sapien
ctggagaggtctactacactggaga

SEQ ID NO: 4830243 - DNA, 25 bp, Homo sapien
cgctggagacgcccactacactggg

SEQ ID NO: 4830244 - DNA, 25 bp, Homo sapien
tgcagctactagattggaattcact

SEQ ID NO: 4830245 - DNA, 25 bp, Homo sapien
tactagattggaattcacttcacaa

SEQ ID NO: 4830246 - DNA, 25 bp, Homo sapien
gctgcagctactagattggaattca

SEQ ID NO: 4830247 - DNA, 25 bp, Homo sapien
ctactagattggaattcacttcaca

SEQ ID NO: 4830248 - DNA, 25 bp, Homo sapien
accccctgtgagtttacgacatctg

SEQ ID NO: 4830249 - DNA, 25 bp, Homo sapien
tgtgagtttacgacatctgcaaaac

SEQ ID NO: 4830250 - DNA, 25 bp, Homo sapien
gagtttacgacatctgcaaaacaag

SEQ ID NO: 4830251 - DNA, 25 bp, Homo sapien
cctgtgagtttacgacatctgcaaa

SEQ ID NO: 4830252 - DNA, 25 bp, Homo sapien
gtggtgctcggatgctgcagtccca

SEQ ID NO: 4830253 - DNA, 25 bp, Homo sapien
gggaagagctgtcgtttcagtaccc

SEQ ID NO: 4830254 - DNA, 25 bp, Homo sapien
agatatggagttgttggtcttgaga

SEQ ID NO: 4830255 - DNA, 25 bp, Homo sapien
ggaacaaaggctggcgggtggactg

SEQ ID NO: 4830256 - DNA, 25 bp, Homo sapien
tccactccctgttctatgccagcaa

SEQ ID NO: 4830257 - DNA, 25 bp, Homo sapien
cactccctgttctatgccagcaagg

SEQ ID NO: 4830258 - DNA, 25 bp, Homo sapien
actgagccctgttgagtgacttcac

SEQ ID NO: 4830259 - DNA, 25 bp, Homo sapien
tgagccctgttgagtgacttcacac

SEQ ID NO: 4830260 - DNA, 25 bp, Homo sapien
ccagcctttcgtgataacagcagca

SEQ ID NO: 4830261 - DNA, 25 bp, Homo sapien
aaatgtcgcagacccttgaggaccg

SEQ ID NO: 4830262 - DNA, 25 bp, Homo sapien
cgcctgagagtggaaatacgcctat

SEQ ID NO: 4830263 - DNA, 25 bp, Homo sapien
cttatcacttgaatggagcccagac

SEQ ID NO: 4830264 - DNA, 25 bp, Homo sapien
ctgttggcataagtttaacgacggg

SEQ ID NO: 4830265 - DNA, 25 bp, Homo sapien
tccagtgagtttagttctgttggca

SEQ ID NO: 4830266 - DNA, 25 bp, Homo sapien
tctgatgcaattcacatccagtgag

SEQ ID NO: 4830267 - DNA, 25 bp, Homo sapien
cccagccttaatacgcttttaaatg

SEQ ID NO: 4830268 - DNA, 25 bp, Homo sapien
ccaaagcatgaattaagtcggtcag

SEQ ID NO: 4830269 - DNA, 25 bp, Homo sapien
gcagcttcccattaggaggttgagc

SEQ ID NO: 4830270 - DNA, 25 bp, Homo sapien
cattcaccccaagcacgggagtgtt

SEQ ID NO: 4830271 - DNA, 25 bp, Homo sapien
gcaaagacagcctaaaaccaagggc

SEQ ID NO: 4830272 - DNA, 25 bp, Homo sapien
ggaatacttttgattgcctatttga

SEQ ID NO: 4830273 - DNA, 25 bp, Homo sapien
gaatacttttgattgcctatttgac

SEQ ID NO: 4830274 - DNA, 25 bp, Homo sapien
aatacttttgattgcctatttgact

SEQ ID NO: 4830275 - DNA, 25 bp, Homo sapien
gcctttttagtggctggtgaaagga

SEQ ID NO: 4830276 - DNA, 25 bp, Homo sapien
catttgcctggttgccgtatgcatt

SEQ ID NO: 4830277 - DNA, 25 bp, Homo sapien
cacaaaactttcctgcgggcttgaa

SEQ ID NO: 4830278 - DNA, 25 bp, Homo sapien
tgggaactgggttgccaccatgtgc

SEQ ID NO: 4830279 - DNA, 25 bp, Homo sapien
tgtttagagcaccttttagagcacc

SEQ ID NO: 4830280 - DNA, 25 bp, Homo sapien
aatctgcgttgggtgcgtccagcct

SEQ ID NO: 4830281 - DNA, 25 bp, Homo sapien
aaatcaactgtgtcgtgcacctgtg

SEQ ID NO: 4830282 - DNA, 25 bp, Homo sapien
gagtaatgcatggagttctcggccc

SEQ ID NO: 4830283 - DNA, 25 bp, Homo sapien
ttctcggccccacgtgaggtatcgt

SEQ ID NO: 4830284 - DNA, 25 bp, Homo sapien
ttttctgcagcgagcacaagaggcc

SEQ ID NO: 4830285 - DNA, 25 bp, Homo sapien
tacaggctcaactaatgaagtcacg

SEQ ID NO: 4830286 - DNA, 25 bp, Homo sapien
gcagaacagtagtcaaggcataaga

SEQ ID NO: 4830287 - DNA, 25 bp, Homo sapien
tggtcatgtctcatcagcaatacag

SEQ ID NO: 4830288 - DNA, 25 bp, Homo sapien
aacacagtcgtaggccagaggtcac

SEQ ID NO: 4830289 - DNA, 25 bp, Homo sapien
catggtcggtatcatcacgatcacc

SEQ ID NO: 4830290 - DNA, 25 bp, Homo sapien
atgtgtacttcttcccgctgactga

SEQ ID NO: 4830291 - DNA, 25 bp, Homo sapien
tccgttcactgctgcgagcgtgcaa

SEQ ID NO: 4830292 - DNA, 25 bp, Homo sapien
gtgcctgcccgtgactctgaattta

SEQ ID NO: 4830293 - DNA, 25 bp, Homo sapien
ccgtgcctgcccgtgactctgaatt

SEQ ID NO: 4830294 - DNA, 25 bp, Homo sapien
tatgctactaccaagcagtcatttc

SEQ ID NO: 4830295 - DNA, 25 bp, Homo sapien
aatttatatgctactaccaagcagt

SEQ ID NO: 4830296 - DNA, 25 bp, Homo sapien
cagtccaatagacctacaagagtcc

SEQ ID NO: 4830297 - DNA, 25 bp, Homo sapien
ggaagggccagtccaatagacctac

SEQ ID NO: 4830298 - DNA, 25 bp, Homo sapien
gtccaatagacctacaagagtccat

SEQ ID NO: 4830299 - DNA, 25 bp, Homo sapien
gggccagtccaatagacctacaaga

SEQ ID NO: 4830300 - DNA, 25 bp, Homo sapien
tggcaggcatttacgcacaagctaa

SEQ ID NO: 4830301 - DNA, 25 bp, Homo sapien
gctaaagtttactagccatggctct

SEQ ID NO: 4830302 - DNA, 25 bp, Homo sapien
tgccagcatccaagtgtggttaatg

SEQ ID NO: 4830303 - DNA, 25 bp, Homo sapien
tttaactaaaactgcgattgccagc

SEQ ID NO: 4830304 - DNA, 25 bp, Homo sapien
gacagatgttagagtaatgccagtc

SEQ ID NO: 4830305 - DNA, 25 bp, Homo sapien
tatttggcatctgaacatagccaca

SEQ ID NO: 4830306 - DNA, 25 bp, Homo sapien
caatgtcacttcataggaataatcc

SEQ ID NO: 4830307 - DNA, 25 bp, Homo sapien
cccataaaatgtggccgtaggacag

SEQ ID NO: 4830308 - DNA, 25 bp, Homo sapien
tgagcagtggcgttgaggtgcgcat

SEQ ID NO: 4830309 - DNA, 25 bp, Homo sapien
tgaacaagggccgacagctccaggg

SEQ ID NO: 4830310 - DNA, 25 bp, Homo sapien
tgggaggtctgaagcgcatctgacc

SEQ ID NO: 4830311 - DNA, 25 bp, Homo sapien
gaagcgcatctgaccactgaacaag

SEQ ID NO: 4830312 - DNA, 25 bp, Homo sapien
aaaccacaagggtaggtgccatgga

SEQ ID NO: 4830313 - DNA, 25 bp, Homo sapien
ttaagacaccataagcacagctaaa

SEQ ID NO: 4830314 - DNA, 25 bp, Homo sapien
caggacaggtaattcacgaatgata

SEQ ID NO: 4830315 - DNA, 25 bp, Homo sapien
atgtccatattatgtaaacattgct

SEQ ID NO: 4830316 - DNA, 25 bp, Homo sapien
gctctaaagtcccatccgtttgaaa

SEQ ID NO: 4830317 - DNA, 25 bp, Homo sapien
gctgaagggtcagcacaggtgatcc

SEQ ID NO: 4830318 - DNA, 25 bp, Homo sapien
tgaaaatcacaagttgcgcctggcc

SEQ ID NO: 4830319 - DNA, 25 bp, Homo sapien
cagtcctggcaagcgcactgcattc

SEQ ID NO: 4830320 - DNA, 25 bp, Homo sapien
ggcacgttcccgttgtgtcaggaca

SEQ ID NO: 4830321 - DNA, 25 bp, Homo sapien
gtcaggacactcagtgggcagggtg

SEQ ID NO: 4830322 - DNA, 25 bp, Homo sapien
ttaacgtgaaacgaaattcaataca

SEQ ID NO: 4830323 - DNA, 25 bp, Homo sapien
cacatgtcccattagatgcagggca

SEQ ID NO: 4830324 - DNA, 25 bp, Homo sapien
tcattgtgacaataggtagttttca

SEQ ID NO: 4830325 - DNA, 25 bp, Homo sapien
cagaccttgtgctgggtgatggaat

SEQ ID NO: 4830326 - DNA, 25 bp, Homo sapien
ttcaggggcacagaccttgtgctgg

SEQ ID NO: 4830327 - DNA, 25 bp, Homo sapien
aataggtagttttcaggggcacaga

SEQ ID NO: 4830328 - DNA, 25 bp, Homo sapien
tcaccacaggccagtgaggtcactg

SEQ ID NO: 4830329 - DNA, 25 bp, Homo sapien
agtcacctatgagttcttaagaacc

SEQ ID NO: 4830330 - DNA, 25 bp, Homo sapien
tcagaagtcatcttgtatacgccag

SEQ ID NO: 4830331 - DNA, 25 bp, Homo sapien
taaaaaggcccgaagcgtctctgaa

SEQ ID NO: 4830332 - DNA, 25 bp, Homo sapien
caacacatggcaaacatgatatcag

SEQ ID NO: 4830333 - DNA, 25 bp, Homo sapien
catgactaagacacaaagactggaa

SEQ ID NO: 4830334 - DNA, 25 bp, Homo sapien
gacaaaggttctgtgacctttcaat

SEQ ID NO: 4830335 - DNA, 25 bp, Homo sapien
cagtactgtgctctaatgacaaagg

SEQ ID NO: 4830336 - DNA, 25 bp, Homo sapien
gaattctatagaagaggcctgacag

SEQ ID NO: 4830337 - DNA, 25 bp, Homo sapien
gatcgagtctaagccaagaaacttg

SEQ ID NO: 4830338 - DNA, 25 bp, Homo sapien
cgtgctcagccacaaatcggtgttt

SEQ ID NO: 4830339 - DNA, 25 bp, Homo sapien
gcaaaaagcggccagtggacattgt

SEQ ID NO: 4830340 - DNA, 25 bp, Homo sapien
caatttcatctcgaggacggcaggc

SEQ ID NO: 4830341 - DNA, 25 bp, Homo sapien
tcttgattcactgcaaccttggctc

SEQ ID NO: 4830342 - DNA, 25 bp, Homo sapien
cttgattcactgcaaccttggctca

SEQ ID NO: 4830343 - DNA, 25 bp, Homo sapien
gcaatcttgattcactgcaaccttg

SEQ ID NO: 4830344 - DNA, 25 bp, Homo sapien
aatcttgattcactgcaaccttggc

SEQ ID NO: 4830345 - DNA, 25 bp, Homo sapien
tgagaaggagagttactctgttgcc

SEQ ID NO: 4830346 - DNA, 25 bp, Homo sapien
tatttgagaaggagagttactctgt

SEQ ID NO: 4830347 - DNA, 25 bp, Homo sapien
ttgagaaggagagttactctgttgc

SEQ ID NO: 4830348 - DNA, 25 bp, Homo sapien
atttatttgagaaggagagttactc

SEQ ID NO: 4830349 - DNA, 25 bp, Homo sapien
acggcaccacgatgagggctcagtg

SEQ ID NO: 4830350 - DNA, 25 bp, Homo sapien
tgggactcagcatctcgtttatggt

SEQ ID NO: 4830351 - DNA, 25 bp, Homo sapien
tgaggtaggaacaacagctgagatg

SEQ ID NO: 4830352 - DNA, 25 bp, Homo sapien
caacagataaataacccagagcggg

SEQ ID NO: 4830353 - DNA, 25 bp, Homo sapien
tgtaatgtctagcaacagtcagtcc

SEQ ID NO: 4830354 - DNA, 25 bp, Homo sapien
tgggagcactaccaagccaggatgc

SEQ ID NO: 4830355 - DNA, 25 bp, Homo sapien
tttgagtaaggctttgcagacccac

SEQ ID NO: 4830356 - DNA, 25 bp, Homo sapien
tcagggatcagaacttaacactggg

SEQ ID NO: 4830357 - DNA, 25 bp, Homo sapien
tctttaggaagattgcaagattgta

SEQ ID NO: 4830358 - DNA, 25 bp, Homo sapien
cattttgaattgcttattgacagta

SEQ ID NO: 4830359 - DNA, 25 bp, Homo sapien
tataaatacaattctgttaggtttg

SEQ ID NO: 4830360 - DNA, 25 bp, Homo sapien
caatcttgctaaacttgttataagt

SEQ ID NO: 4830361 - DNA, 25 bp, Homo sapien
gaaaccctgatatagtccacgttga

SEQ ID NO: 4830362 - DNA, 25 bp, Homo sapien
tatgctgctatactgacttgcctcg

SEQ ID NO: 4830363 - DNA, 25 bp, Homo sapien
tgttcaaagtcaatcagccataaat

SEQ ID NO: 4830364 - DNA, 25 bp, Homo sapien
acagagattgtcaaaactaggtgtg

SEQ ID NO: 4830365 - DNA, 25 bp, Homo sapien
taacctgaggtcagaatgatttcct

SEQ ID NO: 4830366 - DNA, 25 bp, Homo sapien
gaaagctttgcctaacctgaggtca

SEQ ID NO: 4830367 - DNA, 25 bp, Homo sapien
tgagttctttacatggtctgggtac

SEQ ID NO: 4830368 - DNA, 25 bp, Homo sapien
cttttattaatgagttatgagttct

SEQ ID NO: 4830369 - DNA, 25 bp, Homo sapien
ggtcacaggcagtatcggccaactc

SEQ ID NO: 4830370 - DNA, 25 bp, Homo sapien
gatgactaagcgtgactcctgggaa

SEQ ID NO: 4830371 - DNA, 25 bp, Homo sapien
tagctacctgcactcattgctgtgg

SEQ ID NO: 4830372 - DNA, 25 bp, Homo sapien
ggccgaccttaaatgaactaccaga

SEQ ID NO: 4830373 - DNA, 25 bp, Homo sapien
tattccacttttgttctaggtttca

SEQ ID NO: 4830374 - DNA, 25 bp, Homo sapien
tgagacagttagtttttatttattc

SEQ ID NO: 4830375 - DNA, 25 bp, Homo sapien
aatgagacagttagtttttatttat

SEQ ID NO: 4830376 - DNA, 25 bp, Homo sapien
tgaaatgagacagttagtttttatt

SEQ ID NO: 4830377 - DNA, 25 bp, Homo sapien
ctgcatgctttttcgaacattgaga

SEQ ID NO: 4830378 - DNA, 25 bp, Homo sapien
cgaacattgagaccattgtgtttat

SEQ ID NO: 4830379 - DNA, 25 bp, Homo sapien
aaactgtacttctcgatatgattcc

SEQ ID NO: 4830380 - DNA, 25 bp, Homo sapien
gaaactgtacttctcgatatgattc

SEQ ID NO: 4830381 - DNA, 25 bp, Homo sapien
aattagctttttcagtaaatcgtct

SEQ ID NO: 4830382 - DNA, 25 bp, Homo sapien
tgaattagctttttcagtaaatcgt

SEQ ID NO: 4830383 - DNA, 25 bp, Homo sapien
ttagctttttcagtaaatcgtctat

SEQ ID NO: 4830384 - DNA, 25 bp, Homo sapien
gggagacaatactgaattagctttt

SEQ ID NO: 4830385 - DNA, 25 bp, Homo sapien
cagagcacttgagatcatgaattca

SEQ ID NO: 4830386 - DNA, 25 bp, Homo sapien
cctctgtttttcttagggcattaca

SEQ ID NO: 4830387 - DNA, 25 bp, Homo sapien
gagagttgaggttgtgcctctgcac

SEQ ID NO: 4830388 - DNA, 25 bp, Homo sapien
tttcttagggcattacatgttgtgt

SEQ ID NO: 4830389 - DNA, 25 bp, Homo sapien
tccatccacctaagcccagtgattg

SEQ ID NO: 4830390 - DNA, 25 bp, Homo sapien
ttctcagctcccaaaacgcgggctg

SEQ ID NO: 4830391 - DNA, 25 bp, Homo sapien
caaaacgcgggctgcgtgggccatc

SEQ ID NO: 4830392 - DNA, 25 bp, Homo sapien
ttccatccacctaagcccagtgatt

SEQ ID NO: 4830393 - DNA, 25 bp, Homo sapien
ccagaggttatccaagaaaggaagt

SEQ ID NO: 4830394 - DNA, 25 bp, Homo sapien
ttcccagaggttatccaagaaagga

SEQ ID NO: 4830395 - DNA, 25 bp, Homo sapien
ttattcccagaggttatccaagaaa

SEQ ID NO: 4830396 - DNA, 25 bp, Homo sapien
tattcccagaggttatccaagaaag

SEQ ID NO: 4830397 - DNA, 25 bp, Homo sapien
cgctttgctttgacggccacaggca

SEQ ID NO: 4830398 - DNA, 25 bp, Homo sapien
tgtggagagatgggacggtcctgca

SEQ ID NO: 4830399 - DNA, 25 bp, Homo sapien
ctgcacagtgctcgctttgctttga

SEQ ID NO: 4830400 - DNA, 25 bp, Homo sapien
agtgctcgctttgctttgacggcca

SEQ ID NO: 4830401 - DNA, 25 bp, Homo sapien
ttgagaacagccgtgcaaaactctg

SEQ ID NO: 4830402 - DNA, 25 bp, Homo sapien
cccagtgagtgagattgaccagaac

SEQ ID NO: 4830403 - DNA, 25 bp, Homo sapien
tttgccttccacacaagggtggcct

SEQ ID NO: 4830404 - DNA, 25 bp, Homo sapien
tgaccaataccagtgagtttccaag

SEQ ID NO: 4830405 - DNA, 25 bp, Homo sapien
tggccttggcctgcgaccgttttat

SEQ ID NO: 4830406 - DNA, 25 bp, Homo sapien
ccgttttattatcgggcttctgcat

SEQ ID NO: 4830407 - DNA, 25 bp, Homo sapien
tgtggacagatgaccccagatatgt

SEQ ID NO: 4830408 - DNA, 25 bp, Homo sapien
gcatcttatgtaatgttactctctg

SEQ ID NO: 4830409 - DNA, 25 bp, Homo sapien
taaagtgtacaattacaggtttgaa

SEQ ID NO: 4830410 - DNA, 25 bp, Homo sapien
caggtttgaagacctttcgatcggt

SEQ ID NO: 4830411 - DNA, 25 bp, Homo sapien
agacctttcgatcggtcggccaggg

SEQ ID NO: 4830412 - DNA, 25 bp, Homo sapien
caattacaggtttgaagacctttcg

SEQ ID NO: 4830413 - DNA, 25 bp, Homo sapien
tataaccatgcaatgggttcatctt

SEQ ID NO: 4830414 - DNA, 25 bp, Homo sapien
actcatgggaggtgcccctataacc

SEQ ID NO: 4830415 - DNA, 25 bp, Homo sapien
gatgcacatgggtgctttcccaatc

SEQ ID NO: 4830416 - DNA, 25 bp, Homo sapien
agccagcggaatgggagaccagagt

SEQ ID NO: 4830417 - DNA, 25 bp, Homo sapien
tgtacaacatttaacaaggagttac

SEQ ID NO: 4830418 - DNA, 25 bp, Homo sapien
tgaaaggtgaattctgtctatgcct

SEQ ID NO: 4830419 - DNA, 25 bp, Homo sapien
tcctcccctttactggaatggtgct

SEQ ID NO: 4830420 - DNA, 25 bp, Homo sapien
gagcccttgcagtctgatgaccttt

SEQ ID NO: 4830421 - DNA, 25 bp, Homo sapien
tgttaaagcagatccacaggacttt

SEQ ID NO: 4830422 - DNA, 25 bp, Homo sapien
aagcagatccacaggacttttggat

SEQ ID NO: 4830423 - DNA, 25 bp, Homo sapien
gcagatccacaggacttttggatct

SEQ ID NO: 4830424 - DNA, 25 bp, Homo sapien
taaagcagatccacaggacttttgg

SEQ ID NO: 4830425 - DNA, 25 bp, Homo sapien
tcccggatcgatggctcagggatgc

SEQ ID NO: 4830426 - DNA, 25 bp, Homo sapien
agcaggcggccaatcaccgcccggg

SEQ ID NO: 4830427 - DNA, 25 bp, Homo sapien
agggatgctcacaccccatgaccct

SEQ ID NO: 4830428 - DNA, 25 bp, Homo sapien
gctcccggcggcaaagcaagggaac

SEQ ID NO: 4830429 - DNA, 25 bp, Homo sapien
tgtggagcaccagggacagcagcat

SEQ ID NO: 4830430 - DNA, 25 bp, Homo sapien
gtacgtgtggagcaccagggacagc

SEQ ID NO: 4830431 - DNA, 25 bp, Homo sapien
ggagtacgtgtggagcaccagggac

SEQ ID NO: 4830432 - DNA, 25 bp, Homo sapien
cgtgtggagcaccagggacagcagc

SEQ ID NO: 4830433 - DNA, 25 bp, Homo sapien
ccaggccaacacgtaggtgggcgcc

SEQ ID NO: 4830434 - DNA, 25 bp, Homo sapien
caacacgtaggtgggcgccgtgccc

SEQ ID NO: 4830435 - DNA, 25 bp, Homo sapien
cgtgcccaggagcacgacgctgggc

SEQ ID NO: 4830436 - DNA, 25 bp, Homo sapien
gcgccgtgcccaggagcacgacgct

SEQ ID NO: 4830437 - DNA, 25 bp, Homo sapien
tggaccccggtgtaattctcgaaga

SEQ ID NO: 4830438 - DNA, 25 bp, Homo sapien
aaggcggagagcagccgccagaccc

SEQ ID NO: 4830439 - DNA, 25 bp, Homo sapien
gagcaccatgctctggtagacgcag

SEQ ID NO: 4830440 - DNA, 25 bp, Homo sapien
gccggtcgtccagcgcttggtagaa

SEQ ID NO: 4830441 - DNA, 25 bp, Homo sapien
atctcggcagaacggcaggaagcat

SEQ ID NO: 4830442 - DNA, 25 bp, Homo sapien
gggtcccactcgtagcctcaggacg

SEQ ID NO: 4830443 - DNA, 25 bp, Homo sapien
cagcttcctagagagcgatctcggc

SEQ ID NO: 4830444 - DNA, 25 bp, Homo sapien
gggaggcggcacgtgctctccgtgc

SEQ ID NO: 4830445 - DNA, 25 bp, Homo sapien
taaaagcgcacttcggagtgtagac

SEQ ID NO: 4830446 - DNA, 25 bp, Homo sapien
gacgtctccgatctgttccaacatg

SEQ ID NO: 4830447 - DNA, 25 bp, Homo sapien
gagtgtagacgtctccgatctgttc

SEQ ID NO: 4830448 - DNA, 25 bp, Homo sapien
aaaggccagaaactgctaaacgcgt

SEQ ID NO: 4830449 - DNA, 25 bp, Homo sapien
tcagacaacagatcacccacacatt

SEQ ID NO: 4830450 - DNA, 25 bp, Homo sapien
cattcaagcccagttaaagttggca

SEQ ID NO: 4830451 - DNA, 25 bp, Homo sapien
tgtattcatttcttcgcccagcttt

SEQ ID NO: 4830452 - DNA, 25 bp, Homo sapien
aatgtatctagttaggcttctacgg

SEQ ID NO: 4830453 - DNA, 25 bp, Homo sapien
tcctttgatttgaacagacggtggg

SEQ ID NO: 4830454 - DNA, 25 bp, Homo sapien
tatacttaagggtcctcaggcatcc

SEQ ID NO: 4830455 - DNA, 25 bp, Homo sapien
tcagtgggcaatcagttcgttctac

SEQ ID NO: 4830456 - DNA, 25 bp, Homo sapien
gaaacactgctaggttttacagcca

SEQ ID NO: 4830457 - DNA, 25 bp, Homo sapien
taagaacagggcaatcttccagtaa

SEQ ID NO: 4830458 - DNA, 25 bp, Homo sapien
tatcataagaacagggcaatcttcc

SEQ ID NO: 4830459 - DNA, 25 bp, Homo sapien
aaatactagtagtgggctatccatg

SEQ ID NO: 4830460 - DNA, 25 bp, Homo sapien
ggctatccatggaatcatcagccgc

SEQ ID NO: 4830461 - DNA, 25 bp, Homo sapien
tgactgtactctccaagtttagtct

SEQ ID NO: 4830462 - DNA, 25 bp, Homo sapien
actgtactctccaagtttagtctga

SEQ ID NO: 4830463 - DNA, 25 bp, Homo sapien
tgtactctccaagtttagtctgaac

SEQ ID NO: 4830464 - DNA, 25 bp, Homo sapien
tactctccaagtttagtctgaacag

SEQ ID NO: 4830465 - DNA, 25 bp, Homo sapien
ctgagaggtggcctagcaagttctc

SEQ ID NO: 4830466 - DNA, 25 bp, Homo sapien
gaggtggcctagcaagttctctgac

SEQ ID NO: 4830467 - DNA, 25 bp, Homo sapien
gagaggtggcctagcaagttctctg

SEQ ID NO: 4830468 - DNA, 25 bp, Homo sapien
tgagaggtggcctagcaagttctct

SEQ ID NO: 4830469 - DNA, 25 bp, Homo sapien
cttctcaaggacataagcctatatg

SEQ ID NO: 4830470 - DNA, 25 bp, Homo sapien
tctttctagttggaagtggtctgtc

SEQ ID NO: 4830471 - DNA, 25 bp, Homo sapien
ttgaggatcctgcaagtagtctgtc

SEQ ID NO: 4830472 - DNA, 25 bp, Homo sapien
tatgtgatgttctaaacttgctttc

SEQ ID NO: 4830473 - DNA, 25 bp, Homo sapien
ttctcccaccatgcattaggaattt

SEQ ID NO: 4830474 - DNA, 25 bp, Homo sapien
tcccacagcacatggtcatcctggt

SEQ ID NO: 4830475 - DNA, 25 bp, Homo sapien
ccagaatgtactggaagtctgtctc

SEQ ID NO: 4830476 - DNA, 25 bp, Homo sapien
cacatggtcatcctggtggacacta

SEQ ID NO: 4830477 - DNA, 25 bp, Homo sapien
tgtctcattttctagcacttcttcc

SEQ ID NO: 4830478 - DNA, 25 bp, Homo sapien
tccatagtattaagaacgctggttc

SEQ ID NO: 4830479 - DNA, 25 bp, Homo sapien
ctgtttccatagtattaagaacgct

SEQ ID NO: 4830480 - DNA, 25 bp, Homo sapien
aagaacgctggttcttccaactcca

SEQ ID NO: 4830481 - DNA, 25 bp, Homo sapien
tagtattaagaacgctggttcttcc

SEQ ID NO: 4830482 - DNA, 25 bp, Homo sapien
gaattagatgcggaccagtttcacc

SEQ ID NO: 4830483 - DNA, 25 bp, Homo sapien
caaaggacaaactagttattctgct

SEQ ID NO: 4830484 - DNA, 25 bp, Homo sapien
agaactcatcagacatcccctacag

SEQ ID NO: 4830485 - DNA, 25 bp, Homo sapien
ccatgacatataaactgcctattga

SEQ ID NO: 4830486 - DNA, 25 bp, Homo sapien
ttttttggcaaatctccatatagca

SEQ ID NO: 4830487 - DNA, 25 bp, Homo sapien
tattttttggcaaatctccatatag

SEQ ID NO: 4830488 - DNA, 25 bp, Homo sapien
tgctttgatgatttgctaaatatat

SEQ ID NO: 4830489 - DNA, 25 bp, Homo sapien
ttttggcaaatctccatatagcaat

SEQ ID NO: 4830490 - DNA, 25 bp, Homo sapien
taaaagccaacatgtagtaagcaca

SEQ ID NO: 4830491 - DNA, 25 bp, Homo sapien
tagagagctctattaatcgagtgga

SEQ ID NO: 4830492 - DNA, 25 bp, Homo sapien
tctatcaagagccattccctgtact

SEQ ID NO: 4830493 - DNA, 25 bp, Homo sapien
tatcactatcagcaacacttccaga

SEQ ID NO: 4830494 - DNA, 25 bp, Homo sapien
ggtgccagagcggtgatacaaagtc

SEQ ID NO: 4830495 - DNA, 25 bp, Homo sapien
tgaggatgtggtgccagagcggtga

SEQ ID NO: 4830496 - DNA, 25 bp, Homo sapien
gagcggtgatacaaagtcacaggca

SEQ ID NO: 4830497 - DNA, 25 bp, Homo sapien
aaagtcacaggcactcggaggtagg

SEQ ID NO: 4830498 - DNA, 25 bp, Homo sapien
tcattcccctagtattttctcaact

SEQ ID NO: 4830499 - DNA, 25 bp, Homo sapien
aaatcattcccctagtattttctca

SEQ ID NO: 4830500 - DNA, 25 bp, Homo sapien
atcattcccctagtattttctcaac

SEQ ID NO: 4830501 - DNA, 25 bp, Homo sapien
aatcattcccctagtattttctcaa

SEQ ID NO: 4830502 - DNA, 25 bp, Homo sapien
ttctgtatggttctgtatggttacc

SEQ ID NO: 4830503 - DNA, 25 bp, Homo sapien
ctgtatggttaccaggctacagcac

SEQ ID NO: 4830504 - DNA, 25 bp, Homo sapien
taccaaatgcaaaagtaagcagaca

SEQ ID NO: 4830505 - DNA, 25 bp, Homo sapien
ctgtaccaaatgcaaaagtaagcag

SEQ ID NO: 4830506 - DNA, 25 bp, Homo sapien
caatcaaacaaaggtctcacatgcc

SEQ ID NO: 4830507 - DNA, 25 bp, Homo sapien
gatgctgggtagatatatgtgctcc

SEQ ID NO: 4830508 - DNA, 25 bp, Homo sapien
cggtactaggttaggacagcaatca

SEQ ID NO: 4830509 - DNA, 25 bp, Homo sapien
tatgtgctccttatgtaaccaagta

SEQ ID NO: 4830510 - DNA, 25 bp, Homo sapien
tttgcatttcttgaaaggcttttta

SEQ ID NO: 4830511 - DNA, 25 bp, Homo sapien
ttctttaaatctatctgagatattt

SEQ ID NO: 4830512 - DNA, 25 bp, Homo sapien
tgcatttcttgaaaggctttttatt

SEQ ID NO: 4830513 - DNA, 25 bp, Homo sapien
ctatgattaggatgtttaaaatttc

SEQ ID NO: 4830514 - DNA, 25 bp, Homo sapien
ccagttagcgcgtacatgaggctct

SEQ ID NO: 4830515 - DNA, 25 bp, Homo sapien
catgaggctcttcacaggttgtact

SEQ ID NO: 4830516 - DNA, 25 bp, Homo sapien
tcacaggttgtactatgaatgggct

SEQ ID NO: 4830517 - DNA, 25 bp, Homo sapien
agacaggacccagttagcgcgtaca

SEQ ID NO: 4830518 - DNA, 25 bp, Homo sapien
cctgatggccaagatgtcagcaaca

SEQ ID NO: 4830519 - DNA, 25 bp, Homo sapien
ttaacccttctttcagcacgtagcg

SEQ ID NO: 4830520 - DNA, 25 bp, Homo sapien
gcacatgtcctagcgcattctgcct

SEQ ID NO: 4830521 - DNA, 25 bp, Homo sapien
tgagcaaagtaacacccatacaatg

SEQ ID NO: 4830522 - DNA, 25 bp, Homo sapien
tggagttcctgcgtccacgtagctc

SEQ ID NO: 4830523 - DNA, 25 bp, Homo sapien
tgcgctttacatagattcctccatg

SEQ ID NO: 4830524 - DNA, 25 bp, Homo sapien
tctctttctcgttaaatttggcact

SEQ ID NO: 4830525 - DNA, 25 bp, Homo sapien
cacgtagctctgcaacttgtttcgc

SEQ ID NO: 4830526 - DNA, 25 bp, Homo sapien
aactgatgaacaggggcaacaaaac

SEQ ID NO: 4830527 - DNA, 25 bp, Homo sapien
gggcacggatgaatactcgatgagg

SEQ ID NO: 4830528 - DNA, 25 bp, Homo sapien
aaaaccctgctacccatggggcacg

SEQ ID NO: 4830529 - DNA, 25 bp, Homo sapien
tgaacaggggcaacaaaaccctgct

SEQ ID NO: 4830530 - DNA, 25 bp, Homo sapien
cagcaaatgcctgactagctgaaag

SEQ ID NO: 4830531 - DNA, 25 bp, Homo sapien
gactagctgaaaggacttttgtttg

SEQ ID NO: 4830532 - DNA, 25 bp, Homo sapien
tttgctctggattataccttgtacc

SEQ ID NO: 4830533 - DNA, 25 bp, Homo sapien
gacttttgtttgctctggattatac

SEQ ID NO: 4830534 - DNA, 25 bp, Homo sapien
ttttgggccagtcaagcgaagctct

SEQ ID NO: 4830535 - DNA, 25 bp, Homo sapien
tcttaagagcgagagtgccgttacc

SEQ ID NO: 4830536 - DNA, 25 bp, Homo sapien
aatctcaatcgcacaccaagctggg

SEQ ID NO: 4830537 - DNA, 25 bp, Homo sapien
gatgactgaggcaacgatggagaca

SEQ ID NO: 4830538 - DNA, 25 bp, Homo sapien
tgcctttattcgtggtgttagcaca

SEQ ID NO: 4830539 - DNA, 25 bp, Homo sapien
catggtcggtgactctcttcgctgc

SEQ ID NO: 4830540 - DNA, 25 bp, Homo sapien
catgcaatcaaaagcaacgtgagtt

SEQ ID NO: 4830541 - DNA, 25 bp, Homo sapien
ccttcataaaccaccgtaacatcat

SEQ ID NO: 4830542 - DNA, 25 bp, Homo sapien
taacgtgcactcagtactgccgggc

SEQ ID NO: 4830543 - DNA, 25 bp, Homo sapien
gaaaactggttatcgctaggaagga

SEQ ID NO: 4830544 - DNA, 25 bp, Homo sapien
ttttatactagctagcccctgggcc

SEQ ID NO: 4830545 - DNA, 25 bp, Homo sapien
gtggctcaaccccaaacagctgatg

SEQ ID NO: 4830546 - DNA, 25 bp, Homo sapien
gctggccttacccatgagctctgct

SEQ ID NO: 4830547 - DNA, 25 bp, Homo sapien
tggcaggcaacagaggctggcctta

SEQ ID NO: 4830548 - DNA, 25 bp, Homo sapien
gcttcacggcacagcacaggaggaa

SEQ ID NO: 4830549 - DNA, 25 bp, Homo sapien
gctggaacgcattcctccgatggca

SEQ ID NO: 4830550 - DNA, 25 bp, Homo sapien
taatgtctcagaaagcgggaatgct

SEQ ID NO: 4830551 - DNA, 25 bp, Homo sapien
gaaggacaagggacactactggctg

SEQ ID NO: 4830552 - DNA, 25 bp, Homo sapien
tgctatgctgggaaaggtgccgcct

SEQ ID NO: 4830553 - DNA, 25 bp, Homo sapien
gaaagcaggattggccacacaaagc

SEQ ID NO: 4830554 - DNA, 25 bp, Homo sapien
ggtcaacactgcagatacccggtat

SEQ ID NO: 4830555 - DNA, 25 bp, Homo sapien
gaagatttcaagcacctacaggagt

SEQ ID NO: 4830556 - DNA, 25 bp, Homo sapien
tagaatgcttcgtggagtacagtgc

SEQ ID NO: 4830557 - DNA, 25 bp, Homo sapien
ggcagggcctctactaagacgtcag

SEQ ID NO: 4830558 - DNA, 25 bp, Homo sapien
ctctgaagggacccgcaaatgccta

SEQ ID NO: 4830559 - DNA, 25 bp, Homo sapien
ggacccgcaaatgcctaccaccacc

SEQ ID NO: 4830560 - DNA, 25 bp, Homo sapien
tgaagggacccgcaaatgcctacca

SEQ ID NO: 4830561 - DNA, 25 bp, Homo sapien
gaagggacccgcaaatgcctaccac

SEQ ID NO: 4830562 - DNA, 25 bp, Homo sapien
gccatcttctcatatgttcttgttc

SEQ ID NO: 4830563 - DNA, 25 bp, Homo sapien
tgggacatcttttttgtcgatacga

SEQ ID NO: 4830564 - DNA, 25 bp, Homo sapien
tgatttcgaaacgttcatgcagcca

SEQ ID NO: 4830565 - DNA, 25 bp, Homo sapien
tgtcgatacgatcaatgtgaatatg

SEQ ID NO: 4830566 - DNA, 25 bp, Homo sapien
cagaaagggaaagcgcttctattgc

SEQ ID NO: 4830567 - DNA, 25 bp, Homo sapien
aaagtggtcctgaatggctcgctga

SEQ ID NO: 4830568 - DNA, 25 bp, Homo sapien
gttatgatagcagaacatacccgat

SEQ ID NO: 4830569 - DNA, 25 bp, Homo sapien
catggatatggactgctcactgcac

SEQ ID NO: 4830570 - DNA, 25 bp, Homo sapien
taggaccagcggttcttagacagcg

SEQ ID NO: 4830571 - DNA, 25 bp, Homo sapien
ggaaaagttatgcaggtccctggaa

SEQ ID NO: 4830572 - DNA, 25 bp, Homo sapien
catggagctcctattccgccagaag

SEQ ID NO: 4830573 - DNA, 25 bp, Homo sapien
tacccggcagagaccaagatcaaag

SEQ ID NO: 4830574 - DNA, 25 bp, Homo sapien
cttctttctggatctggtgactcat

SEQ ID NO: 4830575 - DNA, 25 bp, Homo sapien
caaaccacttaagatcaacattgat

SEQ ID NO: 4830576 - DNA, 25 bp, Homo sapien
catcggtcataagcatgcctgcagt

SEQ ID NO: 4830577 - DNA, 25 bp, Homo sapien
tgcctgcagtcaaaccacttaagat

SEQ ID NO: 4830578 - DNA, 25 bp, Homo sapien
ggcagccaagtagggttccatatat

SEQ ID NO: 4830579 - DNA, 25 bp, Homo sapien
aggcagccaagtagggttccatata

SEQ ID NO: 4830580 - DNA, 25 bp, Homo sapien
tccatatatccaggtgttcacatac

SEQ ID NO: 4830581 - DNA, 25 bp, Homo sapien
aacaatttgatgtcatgtgcagccg

SEQ ID NO: 4830582 - DNA, 25 bp, Homo sapien
atagacaatgtagcacatcccactg

SEQ ID NO: 4830583 - DNA, 25 bp, Homo sapien
acaatgtagcacatcccactgtctg

SEQ ID NO: 4830584 - DNA, 25 bp, Homo sapien
tgcagccgccaaaaatagacaatgt

SEQ ID NO: 4830585 - DNA, 25 bp, Homo sapien
aatcaacaaggctttatttacactc

SEQ ID NO: 4830586 - DNA, 25 bp, Homo sapien
caatcaacaaggctttatttacact

SEQ ID NO: 4830587 - DNA, 25 bp, Homo sapien
ttcaatcaacaaggctttatttaca

SEQ ID NO: 4830588 - DNA, 25 bp, Homo sapien
tcaatcaacaaggctttatttacac

SEQ ID NO: 4830589 - DNA, 25 bp, Homo sapien
tcgtcacaaattctattatccaatc

SEQ ID NO: 4830590 - DNA, 25 bp, Homo sapien
tgcccaagaccattgcatatcagct

SEQ ID NO: 4830591 - DNA, 25 bp, Homo sapien
tacaaccaggtatgtttgcccaaga

SEQ ID NO: 4830592 - DNA, 25 bp, Homo sapien
agcagccccgatgctaaagttgtac

SEQ ID NO: 4830593 - DNA, 25 bp, Homo sapien
taactagctgcaagatactaaatac

SEQ ID NO: 4830594 - DNA, 25 bp, Homo sapien
tttcctttgaacatcctgacacttc

SEQ ID NO: 4830595 - DNA, 25 bp, Homo sapien
caaattaatgctcaaaaatgcagcc

SEQ ID NO: 4830596 - DNA, 25 bp, Homo sapien
tagttcataggaaatggacagagca

SEQ ID NO: 4830597 - DNA, 25 bp, Homo sapien
tgtgtacagggtgtgcaaattaagc

SEQ ID NO: 4830598 - DNA, 25 bp, Homo sapien
gcacttatggcacagacaaagggaa

SEQ ID NO: 4830599 - DNA, 25 bp, Homo sapien
gcaggcaaaaggcacacgctagtaa

SEQ ID NO: 4830600 - DNA, 25 bp, Homo sapien
cagaatgtctgcaggctctcatcac

SEQ ID NO: 4830601 - DNA, 25 bp, Homo sapien
aagtctgcgtgcaagccgctgagca

SEQ ID NO: 4830602 - DNA, 25 bp, Homo sapien
accactgacgggatccaagggaagg

SEQ ID NO: 4830603 - DNA, 25 bp, Homo sapien
cagaaacgcgacttctgaatgaata

SEQ ID NO: 4830604 - DNA, 25 bp, Homo sapien
ccagtgggaatccaccacactacag

SEQ ID NO: 4830605 - DNA, 25 bp, Homo sapien
caaatgcaaaatgcctctgcagtag

SEQ ID NO: 4830606 - DNA, 25 bp, Homo sapien
taaacaaattcgttcagtcatgaca

SEQ ID NO: 4830607 - DNA, 25 bp, Homo sapien
gaacttcttgacacagacaaatgca

SEQ ID NO: 4830608 - DNA, 25 bp, Homo sapien
tgcagtagctggtgaagcccactca

SEQ ID NO: 4830609 - DNA, 25 bp, Homo sapien
catattaatgtgtagctccactaaa

SEQ ID NO: 4830610 - DNA, 25 bp, Homo sapien
ctaaaaatcgtgatctggttcctgg

SEQ ID NO: 4830611 - DNA, 25 bp, Homo sapien
tgctctaaggcgatacatattaatg

SEQ ID NO: 4830612 - DNA, 25 bp, Homo sapien
cacagctcttgctctaaggcgatac

SEQ ID NO: 4830613 - DNA, 25 bp, Homo sapien
catgggagaagcagtgtaacacagt

SEQ ID NO: 4830614 - DNA, 25 bp, Homo sapien
tccagtagcagtaagcagaaatgtc

SEQ ID NO: 4830615 - DNA, 25 bp, Homo sapien
cactgaaaggtcttctcccatggga

SEQ ID NO: 4830616 - DNA, 25 bp, Homo sapien
tgtgggccactgatatatttctgca

SEQ ID NO: 4830617 - DNA, 25 bp, Homo sapien
gacttacaggtaggtatacggctct

SEQ ID NO: 4830618 - DNA, 25 bp, Homo sapien
taaaagcatgcacatcgacggcatt

SEQ ID NO: 4830619 - DNA, 25 bp, Homo sapien
tatcaatacaggttaaggagaagct

SEQ ID NO: 4830620 - DNA, 25 bp, Homo sapien
tcaagtgatcttatgcaggtcaggc

SEQ ID NO: 4830621 - DNA, 25 bp, Homo sapien
tagcgattgtacagacgagcacttc

SEQ ID NO: 4830622 - DNA, 25 bp, Homo sapien
tcaagtattcttgcctgctggagac

SEQ ID NO: 4830623 - DNA, 25 bp, Homo sapien
ggtgtaagagttagccagatcggca

SEQ ID NO: 4830624 - DNA, 25 bp, Homo sapien
cattgtagctttccaccagatacgg

SEQ ID NO: 4830625 - DNA, 25 bp, Homo sapien
gctgaattaatgaggcaccaataat

SEQ ID NO: 4830626 - DNA, 25 bp, Homo sapien
ctgaattaatgaggcaccaataatc

SEQ ID NO: 4830627 - DNA, 25 bp, Homo sapien
tgctgaattaatgaggcaccaataa

SEQ ID NO: 4830628 - DNA, 25 bp, Homo sapien
tcacccagcgtggatgaacgcaggc

SEQ ID NO: 4830629 - DNA, 25 bp, Homo sapien
cccagcgtggatgaacgcaggcgct

SEQ ID NO: 4830630 - DNA, 25 bp, Homo sapien
cgtggatgaacgcaggcgctgctcc

SEQ ID NO: 4830631 - DNA, 25 bp, Homo sapien
ctttcacccagcgtggatgaacgca

SEQ ID NO: 4830632 - DNA, 25 bp, Homo sapien
cagagatgcgcttgtctgtaggctg

SEQ ID NO: 4830633 - DNA, 25 bp, Homo sapien
cgtgtgcggcgatgaatgcagcaga

SEQ ID NO: 4830634 - DNA, 25 bp, Homo sapien
ctgcaggactgtgcggaggactcca

SEQ ID NO: 4830635 - DNA, 25 bp, Homo sapien
gatactggcagcgtgtgcttccggc

SEQ ID NO: 4830636 - DNA, 25 bp, Homo sapien
gcctccatatgggaaagtctctctg

SEQ ID NO: 4830637 - DNA, 25 bp, Homo sapien
ccatatgggaaagtctctctgcagg

SEQ ID NO: 4830638 - DNA, 25 bp, Homo sapien
ctcagcctccatatgggaaagtctc

SEQ ID NO: 4830639 - DNA, 25 bp, Homo sapien
acgctctcatgctctctagcctcag

SEQ ID NO: 4830640 - DNA, 25 bp, Homo sapien
tgtgactcagctgctacagcatcag

SEQ ID NO: 4830641 - DNA, 25 bp, Homo sapien
cagcatcaggcactgaagttggttc

SEQ ID NO: 4830642 - DNA, 25 bp, Homo sapien
gtcgggttggtctgggcatgtgcca

SEQ ID NO: 4830643 - DNA, 25 bp, Homo sapien
agctgccagtgcctgcttatctgtg

SEQ ID NO: 4830644 - DNA, 25 bp, Homo sapien
cacatgctgaccttcgaaggacagt

SEQ ID NO: 4830645 - DNA, 25 bp, Homo sapien
tgattttggccaagatcgcccctcc

SEQ ID NO: 4830646 - DNA, 25 bp, Homo sapien
catgtcggctttcaagagtgtggtc

SEQ ID NO: 4830647 - DNA, 25 bp, Homo sapien
ggtcaggagtttcttaaccatccaa

SEQ ID NO: 4830648 - DNA, 25 bp, Homo sapien
cctgcgccttcagagttcggcactg

SEQ ID NO: 4830649 - DNA, 25 bp, Homo sapien
cagagttcggcactgcttgtccaag

SEQ ID NO: 4830650 - DNA, 25 bp, Homo sapien
ggaaagacaccgagaaacactgcaa

SEQ ID NO: 4830651 - DNA, 25 bp, Homo sapien
agacaccgagaaacactgcaagagg

SEQ ID NO: 4830652 - DNA, 25 bp, Homo sapien
gctcgggcagattttgagtgccata

SEQ ID NO: 4830653 - DNA, 25 bp, Homo sapien
gaagatctgtggattgggctctgcc

SEQ ID NO: 4830654 - DNA, 25 bp, Homo sapien
agatctgtggattgggctctgccag

SEQ ID NO: 4830655 - DNA, 25 bp, Homo sapien
ttttgagtgccataagagggtgctg

SEQ ID NO: 4830656 - DNA, 25 bp, Homo sapien
ctgaaacaatcaagccccaacttaa

SEQ ID NO: 4830657 - DNA, 25 bp, Homo sapien
tccctaaaacatcggggtgagaggc

SEQ ID NO: 4830658 - DNA, 25 bp, Homo sapien
aacttaaataacacaacctcctcag

SEQ ID NO: 4830659 - DNA, 25 bp, Homo sapien
catcggggtgagaggccttacccgt

SEQ ID NO: 4830660 - DNA, 25 bp, Homo sapien
gatgcacccttcgatgggcagaaga

SEQ ID NO: 4830661 - DNA, 25 bp, Homo sapien
gaaactgtctttccggcatgtcgct

SEQ ID NO: 4830662 - DNA, 25 bp, Homo sapien
cagcgtttctgaggccagttgtaaa

SEQ ID NO: 4830663 - DNA, 25 bp, Homo sapien
acttgggacactgggctagcaggct

SEQ ID NO: 4830664 - DNA, 25 bp, Homo sapien
gagagatggggacagtctagcccta

SEQ ID NO: 4830665 - DNA, 25 bp, Homo sapien
tggggacagtctagccctatcctct

SEQ ID NO: 4830666 - DNA, 25 bp, Homo sapien
gatggggacagtctagccctatcct

SEQ ID NO: 4830667 - DNA, 25 bp, Homo sapien
gggacagtctagccctatcctctgc

SEQ ID NO: 4830668 - DNA, 25 bp, Homo sapien
gaaccacctgccagatacagtaatg

SEQ ID NO: 4830669 - DNA, 25 bp, Homo sapien
caacgggctcctccctacgtgcagc

SEQ ID NO: 4830670 - DNA, 25 bp, Homo sapien
ctgtctccgaaccacctgccagata

SEQ ID NO: 4830671 - DNA, 25 bp, Homo sapien
cttctgggctctcggcaggggcact

SEQ ID NO: 4830672 - DNA, 25 bp, Homo sapien
tctatcctctgccagcttcgatcaa

SEQ ID NO: 4830673 - DNA, 25 bp, Homo sapien
agagctcttctatcctctgccagct

SEQ ID NO: 4830674 - DNA, 25 bp, Homo sapien
tcggccacagagctcttctatcctc

SEQ ID NO: 4830675 - DNA, 25 bp, Homo sapien
cacagagctcttctatcctctgcca

SEQ ID NO: 4830676 - DNA, 25 bp, Homo sapien
ttagcaatgttcctaacaaagacgg

SEQ ID NO: 4830677 - DNA, 25 bp, Homo sapien
ccaattatgcagatggtgttagcaa

SEQ ID NO: 4830678 - DNA, 25 bp, Homo sapien
gagtaaggtgatagtatttggcaaa

SEQ ID NO: 4830679 - DNA, 25 bp, Homo sapien
caactgtgcttctcccataccagga

SEQ ID NO: 4830680 - DNA, 25 bp, Homo sapien
gaggcatctcaagtgggtgctcctg

SEQ ID NO: 4830681 - DNA, 25 bp, Homo sapien
ggaagttctgtcaattcgtcttggc

SEQ ID NO: 4830682 - DNA, 25 bp, Homo sapien
cagaccttaggaagaatgacatcag

SEQ ID NO: 4830683 - DNA, 25 bp, Homo sapien
tgagctgcagctttgtgcactcgct

SEQ ID NO: 4830684 - DNA, 25 bp, Homo sapien
tgtcagcgaaaagcttagtctggct

SEQ ID NO: 4830685 - DNA, 25 bp, Homo sapien
tagatcatcagacccaacgttccat

SEQ ID NO: 4830686 - DNA, 25 bp, Homo sapien
ccagcagtagggagtcatgtgacaa

SEQ ID NO: 4830687 - DNA, 25 bp, Homo sapien
taatggagttaggtggacaaaagcc

SEQ ID NO: 4830688 - DNA, 25 bp, Homo sapien
tccagtgcgtgagaagctcccgctt

SEQ ID NO: 4830689 - DNA, 25 bp, Homo sapien
gcaaagccatactcgtgggagaact

SEQ ID NO: 4830690 - DNA, 25 bp, Homo sapien
cacagtgagcaggacgcagattctc

SEQ ID NO: 4830691 - DNA, 25 bp, Homo sapien
agatagccggatgctcctcacaggt

SEQ ID NO: 4830692 - DNA, 25 bp, Homo sapien
tttgtccacagcgtacactgatgtc

SEQ ID NO: 4830693 - DNA, 25 bp, Homo sapien
cagcgtacactgatgtccggagaca

SEQ ID NO: 4830694 - DNA, 25 bp, Homo sapien
ccggagacagcggaaacagccatgt

SEQ ID NO: 4830695 - DNA, 25 bp, Homo sapien
cactgatgtccggagacagcggaaa

SEQ ID NO: 4830696 - DNA, 25 bp, Homo sapien
ggcttactacttcaccacaggacgg

SEQ ID NO: 4830697 - DNA, 25 bp, Homo sapien
tggaagcggtaagaacagctgcctc

SEQ ID NO: 4830698 - DNA, 25 bp, Homo sapien
tgagctacctgtggttccgagcaga

SEQ ID NO: 4830699 - DNA, 25 bp, Homo sapien
cattgggaagaggttcaaagcggcc

SEQ ID NO: 4830700 - DNA, 25 bp, Homo sapien
aattcgcgcctaacggcttagccag

SEQ ID NO: 4830701 - DNA, 25 bp, Homo sapien
atgcaagatcccctcgcagaagcag

SEQ ID NO: 4830702 - DNA, 25 bp, Homo sapien
tccttagtagatgcccacgcatgca

SEQ ID NO: 4830703 - DNA, 25 bp, Homo sapien
aaagtgctgcgatgccaagatgtgc

SEQ ID NO: 4830704 - DNA, 25 bp, Homo sapien
ggacttgctttaggcggccccagag

SEQ ID NO: 4830705 - DNA, 25 bp, Homo sapien
gcttctgcccttatcaggagcccgg

SEQ ID NO: 4830706 - DNA, 25 bp, Homo sapien
cctgctggccactacgaataaacca

SEQ ID NO: 4830707 - DNA, 25 bp, Homo sapien
cctgactagtggttaacggacttgc

SEQ ID NO: 4830708 - DNA, 25 bp, Homo sapien
aaagcttccatgaggatacagcctg

SEQ ID NO: 4830709 - DNA, 25 bp, Homo sapien
cgataccgggtaacgtgccctgtgt

SEQ ID NO: 4830710 - DNA, 25 bp, Homo sapien
tgggcgaggtgtagaccacgatacc

SEQ ID NO: 4830711 - DNA, 25 bp, Homo sapien
gatatctccgaagagaaggttttcc

SEQ ID NO: 4830712 - DNA, 25 bp, Homo sapien
catgctttcgccatgggatgtgcct

SEQ ID NO: 4830713 - DNA, 25 bp, Homo sapien
taaaagtacctagacctgaatagtc

SEQ ID NO: 4830714 - DNA, 25 bp, Homo sapien
tccccgatgtggatcaacttggccc

SEQ ID NO: 4830715 - DNA, 25 bp, Homo sapien
gaactatttcatcagcttgacaagg

SEQ ID NO: 4830716 - DNA, 25 bp, Homo sapien
cgtgtacagagaaacgctattggtt

SEQ ID NO: 4830717 - DNA, 25 bp, Homo sapien
aaatcaattcctaagcactttatag

SEQ ID NO: 4830718 - DNA, 25 bp, Homo sapien
ttattagagttttatggtgtgctcc

SEQ ID NO: 4830719 - DNA, 25 bp, Homo sapien
taagctgtttgaatcaaaaacaaga

SEQ ID NO: 4830720 - DNA, 25 bp, Homo sapien
tgctgcctcctcgtttttgttgaaa

SEQ ID NO: 4830721 - DNA, 25 bp, Homo sapien
cccttttttactgaggttgctgcct

SEQ ID NO: 4830722 - DNA, 25 bp, Homo sapien
tctgtccgttaacgtccacaaggtc

SEQ ID NO: 4830723 - DNA, 25 bp, Homo sapien
cagaaggcttcagttgttacacaca

SEQ ID NO: 4830724 - DNA, 25 bp, Homo sapien
tttgtgcccggtgtctgcctagccc

SEQ ID NO: 4830725 - DNA, 25 bp, Homo sapien
aaaacggccgccacactgctcagag

SEQ ID NO: 4830726 - DNA, 25 bp, Homo sapien
gaaacaaaaacggccgccacactgc

SEQ ID NO: 4830727 - DNA, 25 bp, Homo sapien
tccttctttgtgcccggtgtctgcc

SEQ ID NO: 4830728 - DNA, 25 bp, Homo sapien
tcagcccatcggtgtgtatcgagtg

SEQ ID NO: 4830729 - DNA, 25 bp, Homo sapien
tgcataatggtggaacttgatccct

SEQ ID NO: 4830730 - DNA, 25 bp, Homo sapien
aagaagagtcttcacggctactgcc

SEQ ID NO: 4830731 - DNA, 25 bp, Homo sapien
aatgctgttcaatcctaaagagtgc

SEQ ID NO: 4830732 - DNA, 25 bp, Homo sapien
aaatctagactttgcccattcctgg

SEQ ID NO: 4830733 - DNA, 25 bp, Homo sapien
aattgtttgatcaagcacagcccag

SEQ ID NO: 4830734 - DNA, 25 bp, Homo sapien
tgtcatgcatgactagtcgttgagg

SEQ ID NO: 4830735 - DNA, 25 bp, Homo sapien
gagagtgcactttaactccccgaaa

SEQ ID NO: 4830736 - DNA, 25 bp, Homo sapien
taggacagcagatatggttagcgct

SEQ ID NO: 4830737 - DNA, 25 bp, Homo sapien
aatgagccaggcttttaggacagca

SEQ ID NO: 4830738 - DNA, 25 bp, Homo sapien
agaaataggccttgcagataactgc

SEQ ID NO: 4830739 - DNA, 25 bp, Homo sapien
aactgcctcataggaggcacctgtc

SEQ ID NO: 4830740 - DNA, 25 bp, Homo sapien
gtaagaccggaagccgggcagcgtg

SEQ ID NO: 4830741 - DNA, 25 bp, Homo sapien
gggattaagctgtgttttgacaacg

SEQ ID NO: 4830742 - DNA, 25 bp, Homo sapien
ctgtgttttgacaacggctcagggt

SEQ ID NO: 4830743 - DNA, 25 bp, Homo sapien
ggccttccgcgttcttgttggtcag

SEQ ID NO: 4830744 - DNA, 25 bp, Homo sapien
cagtgatgcaagactaaatgaatga

SEQ ID NO: 4830745 - DNA, 25 bp, Homo sapien
agggtatcagtgatgcaagactaaa

SEQ ID NO: 4830746 - DNA, 25 bp, Homo sapien
tcagtgatgcaagactaaatgaatg

SEQ ID NO: 4830747 - DNA, 25 bp, Homo sapien
gtatcagtgatgcaagactaaatga

SEQ ID NO: 4830748 - DNA, 25 bp, Homo sapien
tgccaagccacggctgagggaaggc

SEQ ID NO: 4830749 - DNA, 25 bp, Homo sapien
cactgccaagccacggctgagggaa

SEQ ID NO: 4830750 - DNA, 25 bp, Homo sapien
ctgccaagccacggctgagggaagg

SEQ ID NO: 4830751 - DNA, 25 bp, Homo sapien
actgccaagccacggctgagggaag

SEQ ID NO: 4830752 - DNA, 25 bp, Homo sapien
cattcatgtcgccattcacagttgg

SEQ ID NO: 4830753 - DNA, 25 bp, Homo sapien
cctgcagtatagatatgaagcccct

SEQ ID NO: 4830754 - DNA, 25 bp, Homo sapien
tgtactgatcgccttttgctgcaag

SEQ ID NO: 4830755 - DNA, 25 bp, Homo sapien
gcagctcttagagattcccgcacat

SEQ ID NO: 4830756 - DNA, 25 bp, Homo sapien
tctctcataaggtggttttgctctt

SEQ ID NO: 4830757 - DNA, 25 bp, Homo sapien
ccatctctcataaggtggttttgct

SEQ ID NO: 4830758 - DNA, 25 bp, Homo sapien
tccatctctcataaggtggttttgc

SEQ ID NO: 4830759 - DNA, 25 bp, Homo sapien
catctctcataaggtggttttgctc

SEQ ID NO: 4830760 - DNA, 25 bp, Homo sapien
agccggccagcgtgaaggagcctga

SEQ ID NO: 4830761 - DNA, 25 bp, Homo sapien
gtccagccggccagcgtgaaggagc

SEQ ID NO: 4830762 - DNA, 25 bp, Homo sapien
gccggccagcgtgaaggagcctgac

SEQ ID NO: 4830763 - DNA, 25 bp, Homo sapien
ccagccggccagcgtgaaggagcct

SEQ ID NO: 4830764 - DNA, 25 bp, Homo sapien
ttgacaggcaaatacactggtgccc

SEQ ID NO: 4830765 - DNA, 25 bp, Homo sapien
gattcgcttgttcccttgttgacag

SEQ ID NO: 4830766 - DNA, 25 bp, Homo sapien
gaaccacacagggacttgattcgct

SEQ ID NO: 4830767 - DNA, 25 bp, Homo sapien
catagtctccaagtgcaagcacccg

SEQ ID NO: 4830768 - DNA, 25 bp, Homo sapien
tccgtgtcccaagggacgaggaaca

SEQ ID NO: 4830769 - DNA, 25 bp, Homo sapien
aaagcatcccgtggttgagtggcct

SEQ ID NO: 4830770 - DNA, 25 bp, Homo sapien
agggtcatggcgcttgtcacaggca

SEQ ID NO: 4830771 - DNA, 25 bp, Homo sapien
agccttcagggtctgtgagccgcca

SEQ ID NO: 4830772 - DNA, 25 bp, Homo sapien
taacagcaccccaatctggcagttg

SEQ ID NO: 4830773 - DNA, 25 bp, Homo sapien
caatctggcagttgtagctctgcag

SEQ ID NO: 4830774 - DNA, 25 bp, Homo sapien
gagggatacttggagagtcgctaac

SEQ ID NO: 4830775 - DNA, 25 bp, Homo sapien
tacttggagagtcgctaacagcacc

SEQ ID NO: 4830776 - DNA, 25 bp, Homo sapien
ttccacaatctcactgctcctaggt

SEQ ID NO: 4830777 - DNA, 25 bp, Homo sapien
tccacaatctcactgctcctaggtc

SEQ ID NO: 4830778 - DNA, 25 bp, Homo sapien
tttccacaatctcactgctcctagg

SEQ ID NO: 4830779 - DNA, 25 bp, Homo sapien
aaatccagcgccttccatccagggt

SEQ ID NO: 4830780 - DNA, 25 bp, Homo sapien
ggagctagctccaacctacgtgggt

SEQ ID NO: 4830781 - DNA, 25 bp, Homo sapien
taatcaagatctactgcgagtggcc

SEQ ID NO: 4830782 - DNA, 25 bp, Homo sapien
tgacaagcacctgacacaaacagct

SEQ ID NO: 4830783 - DNA, 25 bp, Homo sapien
cacattcacagtggcgtcacacctg

SEQ ID NO: 4830784 - DNA, 25 bp, Homo sapien
gtctgaggtcactctccttagcact

SEQ ID NO: 4830785 - DNA, 25 bp, Homo sapien
gtgtctgaggtcactctccttagca

SEQ ID NO: 4830786 - DNA, 25 bp, Homo sapien
tgtctgaggtcactctccttagcac

SEQ ID NO: 4830787 - DNA, 25 bp, Homo sapien
tactggaagatagtgtgggctctgc

SEQ ID NO: 4830788 - DNA, 25 bp, Homo sapien
tccttaaggtgctactgcagtgctg

SEQ ID NO: 4830789 - DNA, 25 bp, Homo sapien
tctgctaggtcagcgtctgatgtgt

SEQ ID NO: 4830790 - DNA, 25 bp, Homo sapien
tgctgcgcgcccagttctctgtaag

SEQ ID NO: 4830791 - DNA, 25 bp, Homo sapien
cagttgtgtctacactcagagttga

SEQ ID NO: 4830792 - DNA, 25 bp, Homo sapien
tcagagttgacactggtggcaagtc

SEQ ID NO: 4830793 - DNA, 25 bp, Homo sapien
ctgaactgcatgtgtatgaaggaac

SEQ ID NO: 4830794 - DNA, 25 bp, Homo sapien
cccagcttgagggtgtcaaggctct

SEQ ID NO: 4830795 - DNA, 25 bp, Homo sapien
tgagaaccagctttttcgttcatag

SEQ ID NO: 4830796 - DNA, 25 bp, Homo sapien
atttttcagtgttctagaggttgag

SEQ ID NO: 4830797 - DNA, 25 bp, Homo sapien
ttttcagtgttctagaggttgagaa

SEQ ID NO: 4830798 - DNA, 25 bp, Homo sapien
cagctttttcgttcatagatggcac

SEQ ID NO: 4830799 - DNA, 25 bp, Homo sapien
gaaaggaccacgtgtatgcacctag

SEQ ID NO: 4830800 - DNA, 25 bp, Homo sapien
tctcgtagttgtatggtttcaggtc

SEQ ID NO: 4830801 - DNA, 25 bp, Homo sapien
tgttgagtcttcaatccatgttgag

SEQ ID NO: 4830802 - DNA, 25 bp, Homo sapien
tgttgagctgattttttacatgctg

SEQ ID NO: 4830803 - DNA, 25 bp, Homo sapien
tgtttgacttccttatgtattcaga

SEQ ID NO: 4830804 - DNA, 25 bp, Homo sapien
tagcgttcaatgcagccccgcttgt

SEQ ID NO: 4830805 - DNA, 25 bp, Homo sapien
ctaccacgtaggctttgcaaacatt

SEQ ID NO: 4830806 - DNA, 25 bp, Homo sapien
ccccgcttgtctattttcccatttg

SEQ ID NO: 4830807 - DNA, 25 bp, Homo sapien
ctccttaagactgagagcgccgctg

SEQ ID NO: 4830808 - DNA, 25 bp, Homo sapien
tagcgaggcttgagatgcctcttcc

SEQ ID NO: 4830809 - DNA, 25 bp, Homo sapien
ctcataggggcagccgacttcactg

SEQ ID NO: 4830810 - DNA, 25 bp, Homo sapien
tggaacagcgaccacccctagcgag

SEQ ID NO: 4830811 - DNA, 25 bp, Homo sapien
gacagtgctctgatccaagggtttg

SEQ ID NO: 4830812 - DNA, 25 bp, Homo sapien
taaacgcttccatggagtcccacag

SEQ ID NO: 4830813 - DNA, 25 bp, Homo sapien
ggccatcacctcagaagacagtgct

SEQ ID NO: 4830814 - DNA, 25 bp, Homo sapien
tcttgagtgaccagctggaaaggcc

SEQ ID NO: 4830815 - DNA, 25 bp, Homo sapien
gaaatgaaggtccagtgtcaccacc

SEQ ID NO: 4830816 - DNA, 25 bp, Homo sapien
gtcacaaaatcgttacttctccagg

SEQ ID NO: 4830817 - DNA, 25 bp, Homo sapien
tgtgctgggcaaacactcagtgtca

SEQ ID NO: 4830818 - DNA, 25 bp, Homo sapien
taagacgtagggttacaggagatcc

SEQ ID NO: 4830819 - DNA, 25 bp, Homo sapien
agatgagattcctacagtcctggag

SEQ ID NO: 4830820 - DNA, 25 bp, Homo sapien
tgctcaattttggatgctgtctctg

SEQ ID NO: 4830821 - DNA, 25 bp, Homo sapien
gagtacgctacccatactgcttcag

SEQ ID NO: 4830822 - DNA, 25 bp, Homo sapien
tcctggagaacaccgtagagggact

SEQ ID NO: 4830823 - DNA, 25 bp, Homo sapien
caattgctgatgaggctacagccca

SEQ ID NO: 4830824 - DNA, 25 bp, Homo sapien
gtgaccccagccataaggagccttg

SEQ ID NO: 4830825 - DNA, 25 bp, Homo sapien
tttcaggtaagacaagccggcatgc

SEQ ID NO: 4830826 - DNA, 25 bp, Homo sapien
tctcactgagaaggttcaagaaggt

SEQ ID NO: 4830827 - DNA, 25 bp, Homo sapien
tagcaggtgctctcttgctgtgaca

SEQ ID NO: 4830828 - DNA, 25 bp, Homo sapien
aacccaagacccttggtgtagcagg

SEQ ID NO: 4830829 - DNA, 25 bp, Homo sapien
tgtgacatttccctctcggaaacca

SEQ ID NO: 4830830 - DNA, 25 bp, Homo sapien
acctttgcgtgcagaagcagacaca

SEQ ID NO: 4830831 - DNA, 25 bp, Homo sapien
agcccctcatatttactctggatcg

SEQ ID NO: 4830832 - DNA, 25 bp, Homo sapien
tgtccaataggtcctgcagatgtcc

SEQ ID NO: 4830833 - DNA, 25 bp, Homo sapien
ttcccacagaccctagaatccttgt

SEQ ID NO: 4830834 - DNA, 25 bp, Homo sapien
cgtgtagttgcagtcagtgatttca

SEQ ID NO: 4830835 - DNA, 25 bp, Homo sapien
ttctccaagtaacctgagtccctgc

SEQ ID NO: 4830836 - DNA, 25 bp, Homo sapien
gctgaggttctaattcccaaagcat

SEQ ID NO: 4830837 - DNA, 25 bp, Homo sapien
agagagggacgagagttctccaagt

SEQ ID NO: 4830838 - DNA, 25 bp, Homo sapien
gcttctaaggcatcaggaaaaatga

SEQ ID NO: 4830839 - DNA, 25 bp, Homo sapien
cttgtagcaagttttgtgtttgcac

SEQ ID NO: 4830840 - DNA, 25 bp, Homo sapien
ttgtagcaagttttgtgtttgcacc

SEQ ID NO: 4830841 - DNA, 25 bp, Homo sapien
tgtagcaagttttgtgtttgcacct

SEQ ID NO: 4830842 - DNA, 25 bp, Homo sapien
tggccactgtgattaacgcaatcag

SEQ ID NO: 4830843 - DNA, 25 bp, Homo sapien
gaacgcaactatggaacctgcacct

SEQ ID NO: 4830844 - DNA, 25 bp, Homo sapien
gcacctccggtgagattcactacaa

SEQ ID NO: 4830845 - DNA, 25 bp, Homo sapien
gcaatcagcccagcaggtaactgca

SEQ ID NO: 4830846 - DNA, 25 bp, Homo sapien
tgttgctacaatgtcgctttgatgt

SEQ ID NO: 4830847 - DNA, 25 bp, Homo sapien
ttgctacaatgtcgctttgatgttt

SEQ ID NO: 4830848 - DNA, 25 bp, Homo sapien
ttgttgctacaatgtcgctttgatg

SEQ ID NO: 4830849 - DNA, 25 bp, Homo sapien
ctttgttgctacaatgtcgctttga

SEQ ID NO: 4830850 - DNA, 25 bp, Homo sapien
gggtggccaatgaaagcagcaaact

SEQ ID NO: 4830851 - DNA, 25 bp, Homo sapien
tccagggtggccaatgaaagcagca

SEQ ID NO: 4830852 - DNA, 25 bp, Homo sapien
cacatgtggcttctgctactgcagt

SEQ ID NO: 4830853 - DNA, 25 bp, Homo sapien
tactgcagtccagggtggccaatga

SEQ ID NO: 4830854 - DNA, 25 bp, Homo sapien
gacagcgcgatgcactctgaggagc

SEQ ID NO: 4830855 - DNA, 25 bp, Homo sapien
ggtcctgcgcctttcgtggtacact

SEQ ID NO: 4830856 - DNA, 25 bp, Homo sapien
tggtacactccaccggatctgctgc

SEQ ID NO: 4830857 - DNA, 25 bp, Homo sapien
tcagactcagcgagaggcttgaggt

SEQ ID NO: 4830858 - DNA, 25 bp, Homo sapien
tataacgtcgctttgggtcctgcgc

SEQ ID NO: 4830859 - DNA, 25 bp, Homo sapien
gcaagagctgatgaagctgcagccc

SEQ ID NO: 4830860 - DNA, 25 bp, Homo sapien
aggctaactcctctctcccgactcg

SEQ ID NO: 4830861 - DNA, 25 bp, Homo sapien
gcagagccacttcaggcaagagctg

SEQ ID NO: 4830862 - DNA, 25 bp, Homo sapien
tcccgactcgtctgctcctgctctc

SEQ ID NO: 4830863 - DNA, 25 bp, Homo sapien
ccagcgctgtgcacgacattcccat

SEQ ID NO: 4830864 - DNA, 25 bp, Homo sapien
aaggttgagggagatgctttagtta

SEQ ID NO: 4830865 - DNA, 25 bp, Homo sapien
tttagttatcactccactgccccca

SEQ ID NO: 4830866 - DNA, 25 bp, Homo sapien
tccaccggccgatgcctgctgcctt

SEQ ID NO: 4830867 - DNA, 25 bp, Homo sapien
ctagggtgggcgatgactgctgcaa

SEQ ID NO: 4830868 - DNA, 25 bp, Homo sapien
agggtgggcgatgactgctgcaaac

SEQ ID NO: 4830869 - DNA, 25 bp, Homo sapien
tagggtgggcgatgactgctgcaaa

SEQ ID NO: 4830870 - DNA, 25 bp, Homo sapien
gggtgggcgatgactgctgcaaact

SEQ ID NO: 4830871 - DNA, 25 bp, Homo sapien
gacagcgcgatgcactctgaggagc

SEQ ID NO: 4830872 - DNA, 25 bp, Homo sapien
ggtcctgcgcctttcgtggtacact

SEQ ID NO: 4830873 - DNA, 25 bp, Homo sapien
tcagactcagcgagaggcttgaggt

SEQ ID NO: 4830874 - DNA, 25 bp, Homo sapien
tataacgtcgctttgggtcctgcgc

SEQ ID NO: 4830875 - DNA, 25 bp, Homo sapien
tggtacactccaccggatctgctgc

SEQ ID NO: 4830876 - DNA, 25 bp, Homo sapien
gcaagagctgatgaagctgcagccc

SEQ ID NO: 4830877 - DNA, 25 bp, Homo sapien
tcccgactcgtctgctcctgctctc

SEQ ID NO: 4830878 - DNA, 25 bp, Homo sapien
gcagagccacttcaggcaagagctg

SEQ ID NO: 4830879 - DNA, 25 bp, Homo sapien
aggctaactcctctctcccgactcg

SEQ ID NO: 4830880 - DNA, 25 bp, Homo sapien
tccaccggccgatgcctgctgcctt

SEQ ID NO: 4830881 - DNA, 25 bp, Homo sapien
tttagttatcactccactgccccca

SEQ ID NO: 4830882 - DNA, 25 bp, Homo sapien
aaggttgagggagatgctttagtta

SEQ ID NO: 4830883 - DNA, 25 bp, Homo sapien
ccagcgctgtgcacgacattcccat

SEQ ID NO: 4830884 - DNA, 25 bp, Homo sapien
gggtgggcgatgactgctgcaaact

SEQ ID NO: 4830885 - DNA, 25 bp, Homo sapien
tagggtgggcgatgactgctgcaaa

SEQ ID NO: 4830886 - DNA, 25 bp, Homo sapien
ctagggtgggcgatgactgctgcaa

SEQ ID NO: 4830887 - DNA, 25 bp, Homo sapien
agggtgggcgatgactgctgcaaac

SEQ ID NO: 4830888 - DNA, 25 bp, Homo sapien
tctgcgtagcccccgctgtgcccca

SEQ ID NO: 4830889 - DNA, 25 bp, Homo sapien
ctgcgtagcccccgctgtgccccat

SEQ ID NO: 4830890 - DNA, 25 bp, Homo sapien
ctctgcgtagcccccgctgtgcccc

SEQ ID NO: 4830891 - DNA, 25 bp, Homo sapien
gcccgggagtgactgtgtggcacag

SEQ ID NO: 4830892 - DNA, 25 bp, Homo sapien
ggcccgggagtgactgtgtggcaca

SEQ ID NO: 4830893 - DNA, 25 bp, Homo sapien
ccgggagtgactgtgtggcacaggc

SEQ ID NO: 4830894 - DNA, 25 bp, Homo sapien
caggcccgggagtgactgtgtggca

SEQ ID NO: 4830895 - DNA, 25 bp, Homo sapien
gaaccacattaagattctgctactg

SEQ ID NO: 4830896 - DNA, 25 bp, Homo sapien
tctgctactgcagtctagggtgcgc

SEQ ID NO: 4830897 - DNA, 25 bp, Homo sapien
ttgataaaggcatactggtagaacc

SEQ ID NO: 4830898 - DNA, 25 bp, Homo sapien
gggcagacgaggatggaatatccct

SEQ ID NO: 4830899 - DNA, 25 bp, Homo sapien
aaccgagcactgtgcccaatatgct

SEQ ID NO: 4830900 - DNA, 25 bp, Homo sapien
gaagcaccagatcttgaatggccga

SEQ ID NO: 4830901 - DNA, 25 bp, Homo sapien
gacagatggccagttatgatctctt

SEQ ID NO: 4830902 - DNA, 25 bp, Homo sapien
tagaacctgctctattagaacacag

SEQ ID NO: 4830903 - DNA, 25 bp, Homo sapien
agaccccgggctagtgccagtggca

SEQ ID NO: 4830904 - DNA, 25 bp, Homo sapien
cagaccccgggctagtgccagtggc

SEQ ID NO: 4830905 - DNA, 25 bp, Homo sapien
accccgggctagtgccagtggcagc

SEQ ID NO: 4830906 - DNA, 25 bp, Homo sapien
cccgggctagtgccagtggcagctg

SEQ ID NO: 4830907 - DNA, 25 bp, Homo sapien
aagtgcgccctgttcagatcagtgc

SEQ ID NO: 4830908 - DNA, 25 bp, Homo sapien
gtgcgccctgttcagatcagtgcgg

SEQ ID NO: 4830909 - DNA, 25 bp, Homo sapien
ggcacactctatgcagcttgtctag

SEQ ID NO: 4830910 - DNA, 25 bp, Homo sapien
tgcggtccaggaggtcgggccccgc

SEQ ID NO: 4830911 - DNA, 25 bp, Homo sapien
gggtctgcatgtcgctgtctatagc

SEQ ID NO: 4830912 - DNA, 25 bp, Homo sapien
ctgcatgtcgctgtctatagcccgg

SEQ ID NO: 4830913 - DNA, 25 bp, Homo sapien
ccagggtctgcatgtcgctgtctat

SEQ ID NO: 4830914 - DNA, 25 bp, Homo sapien
gttctcatagaccagggtctgcatg

SEQ ID NO: 4830915 - DNA, 25 bp, Homo sapien
ttgggaagaagaagcacccggcgcg

SEQ ID NO: 4830916 - DNA, 25 bp, Homo sapien
agcaacagccgtagcctcttctctt

SEQ ID NO: 4830917 - DNA, 25 bp, Homo sapien
ccagcaacagccgtagcctcttctc

SEQ ID NO: 4830918 - DNA, 25 bp, Homo sapien
ccctccagcaacagccgtagcctct

SEQ ID NO: 4830919 - DNA, 25 bp, Homo sapien
ttcccccctccagcaacagccgtag

SEQ ID NO: 4830920 - DNA, 25 bp, Homo sapien
ctgaatgcggtaacgtgcacaggga

SEQ ID NO: 4830921 - DNA, 25 bp, Homo sapien
gctctgaatgcggtaacgtgcacag

SEQ ID NO: 4830922 - DNA, 25 bp, Homo sapien
aatgcggtaacgtgcacagggagat

SEQ ID NO: 4830923 - DNA, 25 bp, Homo sapien
ccaagctctgaatgcggtaacgtgc

SEQ ID NO: 4830924 - DNA, 25 bp, Homo sapien
tcttcagaaagagtattcccataga

SEQ ID NO: 4830925 - DNA, 25 bp, Homo sapien
gaaatcactgctgatcctcgtacca

SEQ ID NO: 4830926 - DNA, 25 bp, Homo sapien
aatcactgctgatcctcgtaccagc

SEQ ID NO: 4830927 - DNA, 25 bp, Homo sapien
aagaaatcactgctgatcctcgtac

SEQ ID NO: 4830928 - DNA, 25 bp, Homo sapien
tgataggtctgccagtcctttggaa

SEQ ID NO: 4830929 - DNA, 25 bp, Homo sapien
gtaccgtcatgtgagtcaccagcat

SEQ ID NO: 4830930 - DNA, 25 bp, Homo sapien
ccagtcctttggaacatatcccacg

SEQ ID NO: 4830931 - DNA, 25 bp, Homo sapien
ggactccacacatcagtaccgtcat

SEQ ID NO: 4830932 - DNA, 25 bp, Homo sapien
cagacaatatgcactgaaatgggtg

SEQ ID NO: 4830933 - DNA, 25 bp, Homo sapien
gacaatatgcactgaaatgggtgtg

SEQ ID NO: 4830934 - DNA, 25 bp, Homo sapien
agacaatatgcactgaaatgggtgt

SEQ ID NO: 4830935 - DNA, 25 bp, Homo sapien
cacagacaatatgcactgaaatggg

SEQ ID NO: 4830936 - DNA, 25 bp, Homo sapien
taaaagaaagagaggcggtcgtgcc

SEQ ID NO: 4830937 - DNA, 25 bp, Homo sapien
aagagaggcggtcgtgccatcatct

SEQ ID NO: 4830938 - DNA, 25 bp, Homo sapien
agaggcggtcgtgccatcatctgca

SEQ ID NO: 4830939 - DNA, 25 bp, Homo sapien
gaaagagaggcggtcgtgccatcat

SEQ ID NO: 4830940 - DNA, 25 bp, Homo sapien
ctgtaggccccttgcagaaagagct

SEQ ID NO: 4830941 - DNA, 25 bp, Homo sapien
cacactgtttgccatcttgtctggc

SEQ ID NO: 4830942 - DNA, 25 bp, Homo sapien
tgccatcttgtctggctgggcagct

SEQ ID NO: 4830943 - DNA, 25 bp, Homo sapien
tcatctgtaggccccttgcagaaag

SEQ ID NO: 4830944 - DNA, 25 bp, Homo sapien
ttccaaggctttccttcagtccagc

SEQ ID NO: 4830945 - DNA, 25 bp, Homo sapien
agtccagccctcactaaacgctgga

SEQ ID NO: 4830946 - DNA, 25 bp, Homo sapien
cctcactaaacgctggaactgttgt

SEQ ID NO: 4830947 - DNA, 25 bp, Homo sapien
ttaagtgtcttcaccattcatcaca

SEQ ID NO: 4830948 - DNA, 25 bp, Homo sapien
catctctactaacgcctgactaaaa

SEQ ID NO: 4830949 - DNA, 25 bp, Homo sapien
cagaacattacagccccttccagga

SEQ ID NO: 4830950 - DNA, 25 bp, Homo sapien
catattaccgacacccaattcaaga

SEQ ID NO: 4830951 - DNA, 25 bp, Homo sapien
aaaattgaacgtctccatattaccg

SEQ ID NO: 4830952 - DNA, 25 bp, Homo sapien
taaggcacttgttcttaacaaccgc

SEQ ID NO: 4830953 - DNA, 25 bp, Homo sapien
ggcacttgttcttaacaaccgccat

SEQ ID NO: 4830954 - DNA, 25 bp, Homo sapien
tcttcttcactccctttttgccacc

SEQ ID NO: 4830955 - DNA, 25 bp, Homo sapien
ttcataaggcacttgttcttaacaa

SEQ ID NO: 4830956 - DNA, 25 bp, Homo sapien
gatctttcatagagaatggaccaac

SEQ ID NO: 4830957 - DNA, 25 bp, Homo sapien
tctttcatagagaatggaccaacta

SEQ ID NO: 4830958 - DNA, 25 bp, Homo sapien
tgatctttcatagagaatggaccaa

SEQ ID NO: 4830959 - DNA, 25 bp, Homo sapien
ctttcatagagaatggaccaactac

SEQ ID NO: 4830960 - DNA, 25 bp, Homo sapien
tattgaacatagcaggtgctttcac

SEQ ID NO: 4830961 - DNA, 25 bp, Homo sapien
ttatattgaacatagcaggtgcttt

SEQ ID NO: 4830962 - DNA, 25 bp, Homo sapien
tatattgaacatagcaggtgctttc

SEQ ID NO: 4830963 - DNA, 25 bp, Homo sapien
cttatattgaacatagcaggtgctt

SEQ ID NO: 4830964 - DNA, 25 bp, Homo sapien
ttgagtcctggtgaccaagtctttc

SEQ ID NO: 4830965 - DNA, 25 bp, Homo sapien
tcctggtgaccaagtctttccaata

SEQ ID NO: 4830966 - DNA, 25 bp, Homo sapien
cttgagtcctggtgaccaagtcttt

SEQ ID NO: 4830967 - DNA, 25 bp, Homo sapien
tggtgaccaagtctttccaatattt

SEQ ID NO: 4830968 - DNA, 25 bp, Homo sapien
tcatttcaaacacaagacccttgag

SEQ ID NO: 4830969 - DNA, 25 bp, Homo sapien
actcatttcaaacacaagacccttg

SEQ ID NO: 4830970 - DNA, 25 bp, Homo sapien
gactcatttcaaacacaagaccctt

SEQ ID NO: 4830971 - DNA, 25 bp, Homo sapien
atttcaaacacaagacccttgagac

SEQ ID NO: 4830972 - DNA, 25 bp, Homo sapien
gttagtcaggcagcttttgtcctga

SEQ ID NO: 4830973 - DNA, 25 bp, Homo sapien
tgttgaacatttttcaaccatggaa

SEQ ID NO: 4830974 - DNA, 25 bp, Homo sapien
aagttagtcaggcagcttttgtcct

SEQ ID NO: 4830975 - DNA, 25 bp, Homo sapien
agcttcaatcattgttgaacatttt

SEQ ID NO: 4830976 - DNA, 25 bp, Homo sapien
agtatcagattgtcgtgttttttag

SEQ ID NO: 4830977 - DNA, 25 bp, Homo sapien
gaggtcttcagtatcagattgtcgt

SEQ ID NO: 4830978 - DNA, 25 bp, Homo sapien
tcagtatcagattgtcgtgtttttt

SEQ ID NO: 4830979 - DNA, 25 bp, Homo sapien
ggtcttcagtatcagattgtcgtgt

SEQ ID NO: 4830980 - DNA, 25 bp, Homo sapien
gcaggtgccacatttcaggtcagca

SEQ ID NO: 4830981 - DNA, 25 bp, Homo sapien
tagagccaacggtcatggacttgtg

SEQ ID NO: 4830982 - DNA, 25 bp, Homo sapien
cagcagggtcgggggtagagccaac

SEQ ID NO: 4830983 - DNA, 25 bp, Homo sapien
tggaaatgaaagcaggtgccacatt

SEQ ID NO: 4830984 - DNA, 25 bp, Homo sapien
tgcttggtgtaagtgttgtatgctc

SEQ ID NO: 4830985 - DNA, 25 bp, Homo sapien
tcaatgcttggtgtaagtgttgtat

SEQ ID NO: 4830986 - DNA, 25 bp, Homo sapien
aatgcttggtgtaagtgttgtatgc

SEQ ID NO: 4830987 - DNA, 25 bp, Homo sapien
caatgcttggtgtaagtgttgtatg

SEQ ID NO: 4830988 - DNA, 25 bp, Homo sapien
aaactcactcttgagaggccagaag

SEQ ID NO: 4830989 - DNA, 25 bp, Homo sapien
cagaagtggtgcttgaactttcttc

SEQ ID NO: 4830990 - DNA, 25 bp, Homo sapien
gccaccaaactcactcttgagaggc

SEQ ID NO: 4830991 - DNA, 25 bp, Homo sapien
ctggccaccaaactcactcttgaga

SEQ ID NO: 4830992 - DNA, 25 bp, Homo sapien
ctctaattcttatcaaaaaactcag

SEQ ID NO: 4830993 - DNA, 25 bp, Homo sapien
ttcttcctactctaattcttatcaa

SEQ ID NO: 4830994 - DNA, 25 bp, Homo sapien
tcctactctaattcttatcaaaaaa

SEQ ID NO: 4830995 - DNA, 25 bp, Homo sapien
aaaaaactcagtgatctctgtgcat

SEQ ID NO: 4830996 - DNA, 25 bp, Homo sapien
ggagatataaattgttctctgtggc

SEQ ID NO: 4830997 - DNA, 25 bp, Homo sapien
agatataaattgttctctgtggcca

SEQ ID NO: 4830998 - DNA, 25 bp, Homo sapien
gatataaattgttctctgtggccat

SEQ ID NO: 4830999 - DNA, 25 bp, Homo sapien
ctggagatataaattgttctctgtg

SEQ ID NO: 4831000 - DNA, 25 bp, Homo sapien
cgatttaccccatctcagttctcag

SEQ ID NO: 4831001 - DNA, 25 bp, Homo sapien
taataccagcgatttaccccatctc

SEQ ID NO: 4831002 - DNA, 25 bp, Homo sapien
taccagcgatttaccccatctcagt

SEQ ID NO: 4831003 - DNA, 25 bp, Homo sapien
tctgttcgcagaattatctcctgag

SEQ ID NO: 4831004 - DNA, 25 bp, Homo sapien
atggtggtaatgaaacgatgaagat

SEQ ID NO: 4831005 - DNA, 25 bp, Homo sapien
tccaacctgactgttcccatacaga

SEQ ID NO: 4831006 - DNA, 25 bp, Homo sapien
tcccatacagagttgtgttgagcct

SEQ ID NO: 4831007 - DNA, 25 bp, Homo sapien
gactgttcccatacagagttgtgtt

SEQ ID NO: 4831008 - DNA, 25 bp, Homo sapien
cagagttgtgttgagcctcgttaca

SEQ ID NO: 4831009 - DNA, 25 bp, Homo sapien
tcggcttggtccacagataagcgtg

SEQ ID NO: 4831010 - DNA, 25 bp, Homo sapien
ctaagtgcatgagggaaccggattc

SEQ ID NO: 4831011 - DNA, 25 bp, Homo sapien
ccccgacgagtggtgagtaatctgt

SEQ ID NO: 4831012 - DNA, 25 bp, Homo sapien
tgcggtgaaacgtcaatcggcttgg

SEQ ID NO: 4831013 - DNA, 25 bp, Homo sapien
ttcccagggggcaagcatgagacag

SEQ ID NO: 4831014 - DNA, 25 bp, Homo sapien
aagcatgagacagcggccttcctct

SEQ ID NO: 4831015 - DNA, 25 bp, Homo sapien
gaagaaaccatggacaatacccagc

SEQ ID NO: 4831016 - DNA, 25 bp, Homo sapien
cagttcccagggggcaagcatgaga

SEQ ID NO: 4831017 - DNA, 25 bp, Homo sapien
tgcctggcaggttcctgctaatagc

SEQ ID NO: 4831018 - DNA, 25 bp, Homo sapien
cttttgcctggcaggttcctgctaa

SEQ ID NO: 4831019 - DNA, 25 bp, Homo sapien
ctggcaggttcctgctaatagcttc

SEQ ID NO: 4831020 - DNA, 25 bp, Homo sapien
tttgcctggcaggttcctgctaata

SEQ ID NO: 4831021 - DNA, 25 bp, Homo sapien
tgttctggtaattctgagccctggt

SEQ ID NO: 4831022 - DNA, 25 bp, Homo sapien
ttattttgctgataaccttctctcg

SEQ ID NO: 4831023 - DNA, 25 bp, Homo sapien
tcctctgtcatggattgttctggta

SEQ ID NO: 4831024 - DNA, 25 bp, Homo sapien
ttttgctgataaccttctctcgtgt

SEQ ID NO: 4831025 - DNA, 25 bp, Homo sapien
actaacttcaatggcatgggtatta

SEQ ID NO: 4831026 - DNA, 25 bp, Homo sapien
aagctgcctgactaacttcaatggc

SEQ ID NO: 4831027 - DNA, 25 bp, Homo sapien
ggcaaaagctgcctgactaacttca

SEQ ID NO: 4831028 - DNA, 25 bp, Homo sapien
gaaatgagtcttgctgatttgcaga

SEQ ID NO: 4831029 - DNA, 25 bp, Homo sapien
caggtccaatccatactttttcctc

SEQ ID NO: 4831030 - DNA, 25 bp, Homo sapien
catttgtttcctctggagcggtcga

SEQ ID NO: 4831031 - DNA, 25 bp, Homo sapien
aacttcctggtccagatagttgctg

SEQ ID NO: 4831032 - DNA, 25 bp, Homo sapien
tggagcggtcgattggtcatgaact

SEQ ID NO: 4831033 - DNA, 25 bp, Homo sapien
tggtccagatagttgctgtgtcatt

SEQ ID NO: 4831034 - DNA, 25 bp, Homo sapien
catttcaacgagtttgtcatcatgt

SEQ ID NO: 4831035 - DNA, 25 bp, Homo sapien
tgacatttcaacgagtttgtcatca

SEQ ID NO: 4831036 - DNA, 25 bp, Homo sapien
gacatttcaacgagtttgtcatcat

SEQ ID NO: 4831037 - DNA, 25 bp, Homo sapien
tttcaacgagtttgtcatcatgtga

SEQ ID NO: 4831038 - DNA, 25 bp, Homo sapien
tggtactgtcctctgtagacatcat

SEQ ID NO: 4831039 - DNA, 25 bp, Homo sapien
gtactgtcctctgtagacatcatct

SEQ ID NO: 4831040 - DNA, 25 bp, Homo sapien
atggtactgtcctctgtagacatca

SEQ ID NO: 4831041 - DNA, 25 bp, Homo sapien
ggtactgtcctctgtagacatcatc

SEQ ID NO: 4831042 - DNA, 25 bp, Homo sapien
tctgtggcttgaaaggctgtcggct

SEQ ID NO: 4831043 - DNA, 25 bp, Homo sapien
aacatcttcctggaagggcctggcc

SEQ ID NO: 4831044 - DNA, 25 bp, Homo sapien
cttgtccctcagaacatcttcctgg

SEQ ID NO: 4831045 - DNA, 25 bp, Homo sapien
taagttgcaagatgtaggtgcctgg

SEQ ID NO: 4831046 - DNA, 25 bp, Homo sapien
tctgagggatggagcccacaaatga

SEQ ID NO: 4831047 - DNA, 25 bp, Homo sapien
gctgccactctgagggatggagccc

SEQ ID NO: 4831048 - DNA, 25 bp, Homo sapien
gaaaacccagtgaggccggctgtct

SEQ ID NO: 4831049 - DNA, 25 bp, Homo sapien
cactctgagggatggagcccacaaa

SEQ ID NO: 4831050 - DNA, 25 bp, Homo sapien
tgctcctggtcttgcaaactgtggt

SEQ ID NO: 4831051 - DNA, 25 bp, Homo sapien
gctcctggtcttgcaaactgtggtt

SEQ ID NO: 4831052 - DNA, 25 bp, Homo sapien
agttggcattggtctcattggctga

SEQ ID NO: 4831053 - DNA, 25 bp, Homo sapien
aggaagttggcattggtctcattgg

SEQ ID NO: 4831054 - DNA, 25 bp, Homo sapien
tggcattggtctcattggctgaggt

SEQ ID NO: 4831055 - DNA, 25 bp, Homo sapien
gaagttggcattggtctcattggct

SEQ ID NO: 4831056 - DNA, 25 bp, Homo sapien
gttgatgtgtggagtccggtgcctg

SEQ ID NO: 4831057 - DNA, 25 bp, Homo sapien
ttgatgtgtggagtccggtgcctgg

SEQ ID NO: 4831058 - DNA, 25 bp, Homo sapien
gatgtgtggagtccggtgcctggtt

SEQ ID NO: 4831059 - DNA, 25 bp, Homo sapien
tgatgtgtggagtccggtgcctggt

SEQ ID NO: 4831060 - DNA, 25 bp, Homo sapien
gtgggaaatggtaggatgttctccc

SEQ ID NO: 4831061 - DNA, 25 bp, Homo sapien
agtgggaaatggtaggatgttctcc

SEQ ID NO: 4831062 - DNA, 25 bp, Homo sapien
gtaagtgggaaatggtaggatgttc

SEQ ID NO: 4831063 - DNA, 25 bp, Homo sapien
gaacgtcgtgggtctgccgtggcgc

SEQ ID NO: 4831064 - DNA, 25 bp, Homo sapien
atggccacccgctggaacgtcgtgg

SEQ ID NO: 4831065 - DNA, 25 bp, Homo sapien
gaagacatggccacccgctggaacg

SEQ ID NO: 4831066 - DNA, 25 bp, Homo sapien
cgtcgtgggtctgccgtggcgctct

SEQ ID NO: 4831067 - DNA, 25 bp, Homo sapien
aggccgggatgtgggtagacaggtc

SEQ ID NO: 4831068 - DNA, 25 bp, Homo sapien
tgtgggtagacaggtcaggtggccc

SEQ ID NO: 4831069 - DNA, 25 bp, Homo sapien
gccgggatgtgggtagacaggtcag

SEQ ID NO: 4831070 - DNA, 25 bp, Homo sapien
atgtgggtagacaggtcaggtggcc

SEQ ID NO: 4831071 - DNA, 25 bp, Homo sapien
caggaaggttattgtcagcctgagg

SEQ ID NO: 4831072 - DNA, 25 bp, Homo sapien
ctgatggacgcaccaggtaaaagca

SEQ ID NO: 4831073 - DNA, 25 bp, Homo sapien
tgaggctcctgtagaggtgcatcca

SEQ ID NO: 4831074 - DNA, 25 bp, Homo sapien
gaggtgcatccacgttgcaggtatt

SEQ ID NO: 4831075 - DNA, 25 bp, Homo sapien
gagcttgtcttaataattggattca

SEQ ID NO: 4831076 - DNA, 25 bp, Homo sapien
cttccatcccagaaatcgctctcct

SEQ ID NO: 4831077 - DNA, 25 bp, Homo sapien
tccctttctggttgggcagcaagag

SEQ ID NO: 4831078 - DNA, 25 bp, Homo sapien
tttctggttgggcagcaagagttga

SEQ ID NO: 4831079 - DNA, 25 bp, Homo sapien
aggaggcagatggcttccatcccag

SEQ ID NO: 4831080 - DNA, 25 bp, Homo sapien
cgaagggcgcggagtgacagcgcgt

SEQ ID NO: 4831081 - DNA, 25 bp, Homo sapien
tgacagcgcgtgacggcctccgaga

SEQ ID NO: 4831082 - DNA, 25 bp, Homo sapien
agctgccgcttctcggctgtgtggc

SEQ ID NO: 4831083 - DNA, 25 bp, Homo sapien
cgcttctcggctgtgtggctttgac

SEQ ID NO: 4831084 - DNA, 25 bp, Homo sapien
ggcagctccgaagccactggcaagc

SEQ ID NO: 4831085 - DNA, 25 bp, Homo sapien
cggaagagaagaggctgcggctgta

SEQ ID NO: 4831086 - DNA, 25 bp, Homo sapien
gaggacgacgtccctccggaagaga

SEQ ID NO: 4831087 - DNA, 25 bp, Homo sapien
gccgagaggccgctcgcgccgtatc

SEQ ID NO: 4831088 - DNA, 25 bp, Homo sapien
caaggtggctttggccgatgtccac

SEQ ID NO: 4831089 - DNA, 25 bp, Homo sapien
gacacagggtaagagcaaagacaag

SEQ ID NO: 4831090 - DNA, 25 bp, Homo sapien
agcagggagaccatcggggtccaac

SEQ ID NO: 4831091 - DNA, 25 bp, Homo sapien
ctctcgtggcgtcccttctcttctc

SEQ ID NO: 4831092 - DNA, 25 bp, Homo sapien
ccaaatgtctttatccagaagagct

SEQ ID NO: 4831093 - DNA, 25 bp, Homo sapien
gagcttttagcaacaaagttaccca

SEQ ID NO: 4831094 - DNA, 25 bp, Homo sapien
tacctcttctgctgaactctatttg

SEQ ID NO: 4831095 - DNA, 25 bp, Homo sapien
ccgtgcctggccaaacataaactta

SEQ ID NO: 4831096 - DNA, 25 bp, Homo sapien
cgtccacgttaccgcattcagagct

SEQ ID NO: 4831097 - DNA, 25 bp, Homo sapien
cccgtccacgttaccgcattcagag

SEQ ID NO: 4831098 - DNA, 25 bp, Homo sapien
tctccccgtccacgttaccgcattc

SEQ ID NO: 4831099 - DNA, 25 bp, Homo sapien
tccacgttaccgcattcagagcttg

SEQ ID NO: 4831100 - DNA, 25 bp, Homo sapien
cgaagggacgtcgggaggctccgtg

SEQ ID NO: 4831101 - DNA, 25 bp, Homo sapien
acttctgaggcaggccgcaacatgg

SEQ ID NO: 4831102 - DNA, 25 bp, Homo sapien
aaaaaacagacaggcacttctgagg

SEQ ID NO: 4831103 - DNA, 25 bp, Homo sapien
ttctgaggcaggccgcaacatggat

SEQ ID NO: 4831104 - DNA, 25 bp, Homo sapien
gtgagactccatggaaacacaaaac

SEQ ID NO: 4831105 - DNA, 25 bp, Homo sapien
ggataatcaagataacgaccctcaa

SEQ ID NO: 4831106 - DNA, 25 bp, Homo sapien
acgaccctcaacagcggcggagagg

SEQ ID NO: 4831107 - DNA, 25 bp, Homo sapien
gatacggatactttctaggtgatct

SEQ ID NO: 4831108 - DNA, 25 bp, Homo sapien
agcagagagttgatcttattcattc

SEQ ID NO: 4831109 - DNA, 25 bp, Homo sapien
agtacatttcttttcgcattcccat

SEQ ID NO: 4831110 - DNA, 25 bp, Homo sapien
gctgcagtacatttcttttcgcatt

SEQ ID NO: 4831111 - DNA, 25 bp, Homo sapien
gcatgctgcagtacatttcttttcg

SEQ ID NO: 4831112 - DNA, 25 bp, Homo sapien
tgcagtacatttcttttcgcattcc

SEQ ID NO: 4831113 - DNA, 25 bp, Homo sapien
cacaatgtgctgtgcgcatcctcgg

SEQ ID NO: 4831114 - DNA, 25 bp, Homo sapien
tcctcggatattgtgtgttcctctg

SEQ ID NO: 4831115 - DNA, 25 bp, Homo sapien
tgtgcgcatcctcggatattgtgtg

SEQ ID NO: 4831116 - DNA, 25 bp, Homo sapien
tgtgctgtgcgcatcctcggatatt

SEQ ID NO: 4831117 - DNA, 25 bp, Homo sapien
ttttcaggggtggactgttgggcca

SEQ ID NO: 4831118 - DNA, 25 bp, Homo sapien
tttcaggggtggactgttgggccac

SEQ ID NO: 4831119 - DNA, 25 bp, Homo sapien
cgcctttttcaggggtggactgttg

SEQ ID NO: 4831120 - DNA, 25 bp, Homo sapien
ccaagatgtggggtcccgacgtgcc

SEQ ID NO: 4831121 - DNA, 25 bp, Homo sapien
ttggcccaagatgtggggtcccgac

SEQ ID NO: 4831122 - DNA, 25 bp, Homo sapien
atgtggggtcccgacgtgccatcat

SEQ ID NO: 4831123 - DNA, 25 bp, Homo sapien
tcttggcccaagatgtggggtcccg

SEQ ID NO: 4831124 - DNA, 25 bp, Homo sapien
gatcttcttcatcgggcgggggagc

SEQ ID NO: 4831125 - DNA, 25 bp, Homo sapien
tcttcttcatcgggcgggggagccc

SEQ ID NO: 4831126 - DNA, 25 bp, Homo sapien
atcttcttcatcgggcgggggagcc

SEQ ID NO: 4831127 - DNA, 25 bp, Homo sapien
cttggcccaactggggccctccgct

SEQ ID NO: 4831128 - DNA, 25 bp, Homo sapien
tgtcaacaacgcagccaaacgtggc

SEQ ID NO: 4831129 - DNA, 25 bp, Homo sapien
atggtgaagccgatgtcaacaacgc

SEQ ID NO: 4831130 - DNA, 25 bp, Homo sapien
gcagccaaacgtggctacacaggac

SEQ ID NO: 4831131 - DNA, 25 bp, Homo sapien
gactcaaggttccaaggggcacgat

SEQ ID NO: 4831132 - DNA, 25 bp, Homo sapien
gggccgttaagtgctgggagagttc

SEQ ID NO: 4831133 - DNA, 25 bp, Homo sapien
ggccgttaagtgctgggagagttcg

SEQ ID NO: 4831134 - DNA, 25 bp, Homo sapien
ccgttaagtgctgggagagttcgga

SEQ ID NO: 4831135 - DNA, 25 bp, Homo sapien
ttaagtgctgggagagttcggatac

SEQ ID NO: 4831136 - DNA, 25 bp, Homo sapien
agcacttcatggggcacctggtact

SEQ ID NO: 4831137 - DNA, 25 bp, Homo sapien
cagcacttcatggggcacctggtac

SEQ ID NO: 4831138 - DNA, 25 bp, Homo sapien
tccttttccattcggcagcggcttc

SEQ ID NO: 4831139 - DNA, 25 bp, Homo sapien
ggatccttttccattcggcagcggc

SEQ ID NO: 4831140 - DNA, 25 bp, Homo sapien
atccttttccattcggcagcggctt

SEQ ID NO: 4831141 - DNA, 25 bp, Homo sapien
gatccttttccattcggcagcggct

SEQ ID NO: 4831142 - DNA, 25 bp, Homo sapien
catgaagtggaacggactaatgccc

SEQ ID NO: 4831143 - DNA, 25 bp, Homo sapien
gatgccttcgcctggaatccaattg

SEQ ID NO: 4831144 - DNA, 25 bp, Homo sapien
gggacgtcttctctgaacacatgca

SEQ ID NO: 4831145 - DNA, 25 bp, Homo sapien
ggactaatttcctcatgccgctagg

SEQ ID NO: 4831146 - DNA, 25 bp, Homo sapien
tgtgtggaccggcattggcccgctt

SEQ ID NO: 4831147 - DNA, 25 bp, Homo sapien
tggttgtgtggaccggcattggccc

SEQ ID NO: 4831148 - DNA, 25 bp, Homo sapien
tggaccggcattggcccgcttgcaa

SEQ ID NO: 4831149 - DNA, 25 bp, Homo sapien
gtggaccggcattggcccgcttgca

SEQ ID NO: 4831150 - DNA, 25 bp, Homo sapien
ggagcccctgccagacatttcggta

SEQ ID NO: 4831151 - DNA, 25 bp, Homo sapien
gacagggtccaagcgcggcctctta

SEQ ID NO: 4831152 - DNA, 25 bp, Homo sapien
acagtgaagccaagacggagcccct

SEQ ID NO: 4831153 - DNA, 25 bp, Homo sapien
catttcggtagctgagcgatcagcg

SEQ ID NO: 4831154 - DNA, 25 bp, Homo sapien
tgtgtcggcttcaccacgaggagag

SEQ ID NO: 4831155 - DNA, 25 bp, Homo sapien
gattggagcctaggcccaagctgtg

SEQ ID NO: 4831156 - DNA, 25 bp, Homo sapien
ggtcaccgcaggacgtttgtcttgt

SEQ ID NO: 4831157 - DNA, 25 bp, Homo sapien
gatctggaagggacccagtctcggt

SEQ ID NO: 4831158 - DNA, 25 bp, Homo sapien
agtacatttcttttcgcattcccat

SEQ ID NO: 4831159 - DNA, 25 bp, Homo sapien
tgcagtacatttcttttcgcattcc

SEQ ID NO: 4831160 - DNA, 25 bp, Homo sapien
gctgcagtacatttcttttcgcatt

SEQ ID NO: 4831161 - DNA, 25 bp, Homo sapien
gcatgctgcagtacatttcttttcg

SEQ ID NO: 4831162 - DNA, 25 bp, Homo sapien
tcggtcaaatctgtagaacacaatg

SEQ ID NO: 4831163 - DNA, 25 bp, Homo sapien
gcgcatcctcggatattgtgtgttc

SEQ ID NO: 4831164 - DNA, 25 bp, Homo sapien
caccagtcggtcaaatctgtagaac

SEQ ID NO: 4831165 - DNA, 25 bp, Homo sapien
tcctcggatattgtgtgttcctctg

SEQ ID NO: 4831166 - DNA, 25 bp, Homo sapien
tttcaggggtggactgttgggccac

SEQ ID NO: 4831167 - DNA, 25 bp, Homo sapien
ttttcaggggtggactgttgggcca

SEQ ID NO: 4831168 - DNA, 25 bp, Homo sapien
cgcctttttcaggggtggactgttg

SEQ ID NO: 4831169 - DNA, 25 bp, Homo sapien
tcttggcccaagatgtggggtcccg

SEQ ID NO: 4831170 - DNA, 25 bp, Homo sapien
ttggcccaagatgtggggtcccgac

SEQ ID NO: 4831171 - DNA, 25 bp, Homo sapien
atgtggggtcccgacgtgccatcat

SEQ ID NO: 4831172 - DNA, 25 bp, Homo sapien
ccaagatgtggggtcccgacgtgcc

SEQ ID NO: 4831173 - DNA, 25 bp, Homo sapien
tcttcttcatcgggcgggggagccc

SEQ ID NO: 4831174 - DNA, 25 bp, Homo sapien
atcttcttcatcgggcgggggagcc

SEQ ID NO: 4831175 - DNA, 25 bp, Homo sapien
gatcttcttcatcgggcgggggagc

SEQ ID NO: 4831176 - DNA, 25 bp, Homo sapien
cttggcccaactggggccctccgct

SEQ ID NO: 4831177 - DNA, 25 bp, Homo sapien
tgtcaacaacgcagccaaacgtggc

SEQ ID NO: 4831178 - DNA, 25 bp, Homo sapien
atggtgaagccgatgtcaacaacgc

SEQ ID NO: 4831179 - DNA, 25 bp, Homo sapien
gactcaaggttccaaggggcacgat

SEQ ID NO: 4831180 - DNA, 25 bp, Homo sapien
gcagccaaacgtggctacacaggac

SEQ ID NO: 4831181 - DNA, 25 bp, Homo sapien
gggccgttaagtgctgggagagttc

SEQ ID NO: 4831182 - DNA, 25 bp, Homo sapien
ccgttaagtgctgggagagttcgga

SEQ ID NO: 4831183 - DNA, 25 bp, Homo sapien
ggccgttaagtgctgggagagttcg

SEQ ID NO: 4831184 - DNA, 25 bp, Homo sapien
ttaagtgctgggagagttcggatac

SEQ ID NO: 4831185 - DNA, 25 bp, Homo sapien
agcacttcatggggcacctggtact

SEQ ID NO: 4831186 - DNA, 25 bp, Homo sapien
cagcacttcatggggcacctggtac

SEQ ID NO: 4831187 - DNA, 25 bp, Homo sapien
ttccttctctcccttatccttgttc

SEQ ID NO: 4831188 - DNA, 25 bp, Homo sapien
tctctcccttatccttgttcaaggg

SEQ ID NO: 4831189 - DNA, 25 bp, Homo sapien
tctcccttatccttgttcaagggcc

SEQ ID NO: 4831190 - DNA, 25 bp, Homo sapien
cttctctcccttatccttgttcaag

SEQ ID NO: 4831191 - DNA, 25 bp, Homo sapien
gatccttttccattcggcagcggct

SEQ ID NO: 4831192 - DNA, 25 bp, Homo sapien
tccttttccattcggcagcggcttc

SEQ ID NO: 4831193 - DNA, 25 bp, Homo sapien
atccttttccattcggcagcggctt

SEQ ID NO: 4831194 - DNA, 25 bp, Homo sapien
ggatccttttccattcggcagcggc

SEQ ID NO: 4831195 - DNA, 25 bp, Homo sapien
aggatcgtggagtccctgaccccaa

SEQ ID NO: 4831196 - DNA, 25 bp, Homo sapien
tggagtccctgaccccaagaaggca

SEQ ID NO: 4831197 - DNA, 25 bp, Homo sapien
ccgatttcctcccgcagacgggaag

SEQ ID NO: 4831198 - DNA, 25 bp, Homo sapien
ctggaaggatcgtggagtccctgac

SEQ ID NO: 4831199 - DNA, 25 bp, Homo sapien
ggactaatttcctcatgccgctagg

SEQ ID NO: 4831200 - DNA, 25 bp, Homo sapien
catgaagtggaacggactaatgccc

SEQ ID NO: 4831201 - DNA, 25 bp, Homo sapien
gatgccttcgcctggaatccaattg

SEQ ID NO: 4831202 - DNA, 25 bp, Homo sapien
gggacgtcttctctgaacacatgca

SEQ ID NO: 4831203 - DNA, 25 bp, Homo sapien
gtggaccggcattggcccgcttgca

SEQ ID NO: 4831204 - DNA, 25 bp, Homo sapien
tgtgtggaccggcattggcccgctt

SEQ ID NO: 4831205 - DNA, 25 bp, Homo sapien
tggaccggcattggcccgcttgcaa

SEQ ID NO: 4831206 - DNA, 25 bp, Homo sapien
tggttgtgtggaccggcattggccc

SEQ ID NO: 4831207 - DNA, 25 bp, Homo sapien
tcagacatttcggtagctgagccat

SEQ ID NO: 4831208 - DNA, 25 bp, Homo sapien
aagacggagcccctgtcagacattt

SEQ ID NO: 4831209 - DNA, 25 bp, Homo sapien
ggtagctgagccatcagcgaggaca

SEQ ID NO: 4831210 - DNA, 25 bp, Homo sapien
gccatcagcgaggacagggtccacg

SEQ ID NO: 4831211 - DNA, 25 bp, Homo sapien
gatctggaagggacccagtctcggt

SEQ ID NO: 4831212 - DNA, 25 bp, Homo sapien
tcctttggtccaagacttgaggagg

SEQ ID NO: 4831213 - DNA, 25 bp, Homo sapien
ggtcaccgcaggacgtttgtcttgt

SEQ ID NO: 4831214 - DNA, 25 bp, Homo sapien
tcggcttcaccacgaggagaggctc

SEQ ID NO: 4831215 - DNA, 25 bp, Homo sapien
gtcccctttgatttacgcttcatta

SEQ ID NO: 4831216 - DNA, 25 bp, Homo sapien
cagtcccctttgatttacgcttcat

SEQ ID NO: 4831217 - DNA, 25 bp, Homo sapien
actccagtcccctttgatttacgct

SEQ ID NO: 4831218 - DNA, 25 bp, Homo sapien
tccagtcccctttgatttacgcttc

SEQ ID NO: 4831219 - DNA, 25 bp, Homo sapien
gctgcagtacatttcttttcgcatt

SEQ ID NO: 4831220 - DNA, 25 bp, Homo sapien
tgcagtacatttcttttcgcattcc

SEQ ID NO: 4831221 - DNA, 25 bp, Homo sapien
gcatgctgcagtacatttcttttcg

SEQ ID NO: 4831222 - DNA, 25 bp, Homo sapien
agtacatttcttttcgcattcccat

SEQ ID NO: 4831223 - DNA, 25 bp, Homo sapien
gcgcatcctcggatattgtgtgttc

SEQ ID NO: 4831224 - DNA, 25 bp, Homo sapien
caccagtcggtcaaatctgtagaac

SEQ ID NO: 4831225 - DNA, 25 bp, Homo sapien
tcctcggatattgtgtgttcctctg

SEQ ID NO: 4831226 - DNA, 25 bp, Homo sapien
tcggtcaaatctgtagaacacaatg

SEQ ID NO: 4831227 - DNA, 25 bp, Homo sapien
ttttcaggggtggactgttgggcca

SEQ ID NO: 4831228 - DNA, 25 bp, Homo sapien
tttcaggggtggactgttgggccac

SEQ ID NO: 4831229 - DNA, 25 bp, Homo sapien
cgcctttttcaggggtggactgttg

SEQ ID NO: 4831230 - DNA, 25 bp, Homo sapien
ccaagatgtggggtcccgacgtgcc

SEQ ID NO: 4831231 - DNA, 25 bp, Homo sapien
tcttggcccaagatgtggggtcccg

SEQ ID NO: 4831232 - DNA, 25 bp, Homo sapien
atgtggggtcccgacgtgccatcat

SEQ ID NO: 4831233 - DNA, 25 bp, Homo sapien
ttggcccaagatgtggggtcccgac

SEQ ID NO: 4831234 - DNA, 25 bp, Homo sapien
atcttcttcatcgggcgggggagcc

SEQ ID NO: 4831235 - DNA, 25 bp, Homo sapien
cttggcccaactggggccctccgct

SEQ ID NO: 4831236 - DNA, 25 bp, Homo sapien
tcttcttcatcgggcgggggagccc

SEQ ID NO: 4831237 - DNA, 25 bp, Homo sapien
gatcttcttcatcgggcgggggagc

SEQ ID NO: 4831238 - DNA, 25 bp, Homo sapien
atggtgaagccgatgtcaacaacgc

SEQ ID NO: 4831239 - DNA, 25 bp, Homo sapien
gcagccaaacgtggctacacaggac

SEQ ID NO: 4831240 - DNA, 25 bp, Homo sapien
tgtcaacaacgcagccaaacgtggc

SEQ ID NO: 4831241 - DNA, 25 bp, Homo sapien
gactcaaggttccaaggggcacgat

SEQ ID NO: 4831242 - DNA, 25 bp, Homo sapien
gggccgttaagtgctgggagagttc

SEQ ID NO: 4831243 - DNA, 25 bp, Homo sapien
ccgttaagtgctgggagagttcgga

SEQ ID NO: 4831244 - DNA, 25 bp, Homo sapien
ggccgttaagtgctgggagagttcg

SEQ ID NO: 4831245 - DNA, 25 bp, Homo sapien
ttaagtgctgggagagttcggatac

SEQ ID NO: 4831246 - DNA, 25 bp, Homo sapien
aaaggccccgcagtttttgcacttg

SEQ ID NO: 4831247 - DNA, 25 bp, Homo sapien
aggccccgcagtttttgcacttgag

SEQ ID NO: 4831248 - DNA, 25 bp, Homo sapien
tacttctggccgtgtggccaaaggc

SEQ ID NO: 4831249 - DNA, 25 bp, Homo sapien
ctggtacttctggccgtgtggccaa

SEQ ID NO: 4831250 - DNA, 25 bp, Homo sapien
tccccaaggtcgctggaaccagggc

SEQ ID NO: 4831251 - DNA, 25 bp, Homo sapien
ccaaggtcgctggaaccagggctgc

SEQ ID NO: 4831252 - DNA, 25 bp, Homo sapien
tgccttccagcacttcatggggcac

SEQ ID NO: 4831253 - DNA, 25 bp, Homo sapien
cagggctgccttccagcacttcatg

SEQ ID NO: 4831254 - DNA, 25 bp, Homo sapien
tctcccttatccttgttcaagggcc

SEQ ID NO: 4831255 - DNA, 25 bp, Homo sapien
atccttttccattcggcagcggctt

SEQ ID NO: 4831256 - DNA, 25 bp, Homo sapien
gatccttttccattcggcagcggct

SEQ ID NO: 4831257 - DNA, 25 bp, Homo sapien
tccttttccattcggcagcggcttc

SEQ ID NO: 4831258 - DNA, 25 bp, Homo sapien
ggatccttttccattcggcagcggc

SEQ ID NO: 4831259 - DNA, 25 bp, Homo sapien
ctgaaaggaaatcaaccagggtgac

SEQ ID NO: 4831260 - DNA, 25 bp, Homo sapien
ctggaaggatcgtggagtccctgac

SEQ ID NO: 4831261 - DNA, 25 bp, Homo sapien
ccgatttcctcccgcagacgggaag

SEQ ID NO: 4831262 - DNA, 25 bp, Homo sapien
aggatcgtggagtccctgaccccaa

SEQ ID NO: 4831263 - DNA, 25 bp, Homo sapien
tggagtccctgaccccaagaaggca

SEQ ID NO: 4831264 - DNA, 25 bp, Homo sapien
ggactaatttcctcatgccgctagg

SEQ ID NO: 4831265 - DNA, 25 bp, Homo sapien
gggacgtcttctctgaacacatgca

SEQ ID NO: 4831266 - DNA, 25 bp, Homo sapien
catgaagtggaacggactaatgccc

SEQ ID NO: 4831267 - DNA, 25 bp, Homo sapien
gatgccttcgcctggaatccaattg

SEQ ID NO: 4831268 - DNA, 25 bp, Homo sapien
tgtgtggaccggcattggcccgctt

SEQ ID NO: 4831269 - DNA, 25 bp, Homo sapien
tggttgtgtggaccggcattggccc

SEQ ID NO: 4831270 - DNA, 25 bp, Homo sapien
tggaccggcattggcccgcttgcaa

SEQ ID NO: 4831271 - DNA, 25 bp, Homo sapien
gtggaccggcattggcccgcttgca

SEQ ID NO: 4831272 - DNA, 25 bp, Homo sapien
ggtagctgagccatcagcgaggaca

SEQ ID NO: 4831273 - DNA, 25 bp, Homo sapien
tgccagacatttcggtagctgagcc

SEQ ID NO: 4831274 - DNA, 25 bp, Homo sapien
acagtgaagccaagacggagcccct

SEQ ID NO: 4831275 - DNA, 25 bp, Homo sapien
gccatcagcgaggacagggtccacg

SEQ ID NO: 4831276 - DNA, 25 bp, Homo sapien
gatctggaagggacccagtctcggt

SEQ ID NO: 4831277 - DNA, 25 bp, Homo sapien
tcctttggtccaagacttgaggagg

SEQ ID NO: 4831278 - DNA, 25 bp, Homo sapien
ggtcaccgcaggacgtttgtcttgt

SEQ ID NO: 4831279 - DNA, 25 bp, Homo sapien
tcggcttcaccacgaggagaggctc

SEQ ID NO: 4831280 - DNA, 25 bp, Homo sapien
agcagagagttgatcttattcattc

SEQ ID NO: 4831281 - DNA, 25 bp, Homo sapien
acgaccctcaacagcggcggagagg

SEQ ID NO: 4831282 - DNA, 25 bp, Homo sapien
ggataatcaagataacgaccctcaa

SEQ ID NO: 4831283 - DNA, 25 bp, Homo sapien
gatacggatactttctaggtgatct

SEQ ID NO: 4831284 - DNA, 25 bp, Homo sapien
gctgcagtacatttcttttcgcatt

SEQ ID NO: 4831285 - DNA, 25 bp, Homo sapien
tgcagtacatttcttttcgcattcc

SEQ ID NO: 4831286 - DNA, 25 bp, Homo sapien
agtacatttcttttcgcattcccat

SEQ ID NO: 4831287 - DNA, 25 bp, Homo sapien
gcatgctgcagtacatttcttttcg

SEQ ID NO: 4831288 - DNA, 25 bp, Homo sapien
gcgcatcctcggatattgtgtgttc

SEQ ID NO: 4831289 - DNA, 25 bp, Homo sapien
caccagtcggtcaaatctgtagaac

SEQ ID NO: 4831290 - DNA, 25 bp, Homo sapien
tcctcggatattgtgtgttcctctg

SEQ ID NO: 4831291 - DNA, 25 bp, Homo sapien
tcggtcaaatctgtagaacacaatg

SEQ ID NO: 4831292 - DNA, 25 bp, Homo sapien
tttcaggggtggactgttgggccac

SEQ ID NO: 4831293 - DNA, 25 bp, Homo sapien
cgcctttttcaggggtggactgttg

SEQ ID NO: 4831294 - DNA, 25 bp, Homo sapien
ttttcaggggtggactgttgggcca

SEQ ID NO: 4831295 - DNA, 25 bp, Homo sapien
atgtggggtcccgacgtgccatcat

SEQ ID NO: 4831296 - DNA, 25 bp, Homo sapien
tcttggcccaagatgtggggtcccg

SEQ ID NO: 4831297 - DNA, 25 bp, Homo sapien
ttggcccaagatgtggggtcccgac

SEQ ID NO: 4831298 - DNA, 25 bp, Homo sapien
ccaagatgtggggtcccgacgtgcc

SEQ ID NO: 4831299 - DNA, 25 bp, Homo sapien
atcttcttcatcgggcgggggagcc

SEQ ID NO: 4831300 - DNA, 25 bp, Homo sapien
cttggcccaactggggccctccgct

SEQ ID NO: 4831301 - DNA, 25 bp, Homo sapien
gatcttcttcatcgggcgggggagc

SEQ ID NO: 4831302 - DNA, 25 bp, Homo sapien
tcttcttcatcgggcgggggagccc

SEQ ID NO: 4831303 - DNA, 25 bp, Homo sapien
atggtgaagccgatgtcaacaacgc

SEQ ID NO: 4831304 - DNA, 25 bp, Homo sapien
tgtcaacaacgcagccaaacgtggc

SEQ ID NO: 4831305 - DNA, 25 bp, Homo sapien
gcagccaaacgtggctacacaggac

SEQ ID NO: 4831306 - DNA, 25 bp, Homo sapien
gactcaaggttccaaggggcacgat

SEQ ID NO: 4831307 - DNA, 25 bp, Homo sapien
ggccgttaagtgctgggagagttcg

SEQ ID NO: 4831308 - DNA, 25 bp, Homo sapien
gggccgttaagtgctgggagagttc

SEQ ID NO: 4831309 - DNA, 25 bp, Homo sapien
ttaagtgctgggagagttcggatac

SEQ ID NO: 4831310 - DNA, 25 bp, Homo sapien
ccgttaagtgctgggagagttcgga

SEQ ID NO: 4831311 - DNA, 25 bp, Homo sapien
agcacttcatggggcacctggtact

SEQ ID NO: 4831312 - DNA, 25 bp, Homo sapien
cagcacttcatggggcacctggtac

SEQ ID NO: 4831313 - DNA, 25 bp, Homo sapien
ggatccttttccattcggcagcggc

SEQ ID NO: 4831314 - DNA, 25 bp, Homo sapien
gatccttttccattcggcagcggct

SEQ ID NO: 4831315 - DNA, 25 bp, Homo sapien
atccttttccattcggcagcggctt

SEQ ID NO: 4831316 - DNA, 25 bp, Homo sapien
tccttttccattcggcagcggcttc

SEQ ID NO: 4831317 - DNA, 25 bp, Homo sapien
ggactaatttcctcatgccgctagg

SEQ ID NO: 4831318 - DNA, 25 bp, Homo sapien
gggacgtcttctctgaacacatgca

SEQ ID NO: 4831319 - DNA, 25 bp, Homo sapien
gatgccttcgcctggaatccaattg

SEQ ID NO: 4831320 - DNA, 25 bp, Homo sapien
catgaagtggaacggactaatgccc

SEQ ID NO: 4831321 - DNA, 25 bp, Homo sapien
tgtgtggaccggcattggcccgctt

SEQ ID NO: 4831322 - DNA, 25 bp, Homo sapien
tggttgtgtggaccggcattggccc

SEQ ID NO: 4831323 - DNA, 25 bp, Homo sapien
tggaccggcattggcccgcttgcaa

SEQ ID NO: 4831324 - DNA, 25 bp, Homo sapien
gtggaccggcattggcccgcttgca

SEQ ID NO: 4831325 - DNA, 25 bp, Homo sapien
gatctggaagggacccagtctcggt

SEQ ID NO: 4831326 - DNA, 25 bp, Homo sapien
tgtgtcggcttcaccacgaggagag

SEQ ID NO: 4831327 - DNA, 25 bp, Homo sapien
gattggagcctaggcccaagctgtg

SEQ ID NO: 4831328 - DNA, 25 bp, Homo sapien
ggtcaccgcaggacgtttgtcttgt

SEQ ID NO: 4831329 - DNA, 25 bp, Homo sapien
acgaccctcaacagcggcggagagg

SEQ ID NO: 4831330 - DNA, 25 bp, Homo sapien
gatacggatactttctaggtgatct

SEQ ID NO: 4831331 - DNA, 25 bp, Homo sapien
ggataatcaagataacgaccctcaa

SEQ ID NO: 4831332 - DNA, 25 bp, Homo sapien
agcagagagttgatcttattcattc

SEQ ID NO: 4831333 - DNA, 25 bp, Homo sapien
ggctgcagtacatttcttttcgcat

SEQ ID NO: 4831334 - DNA, 25 bp, Homo sapien
gcaggctgcagtacatttcttttcg

SEQ ID NO: 4831335 - DNA, 25 bp, Homo sapien
attcagcaggctgcagtacatttct

SEQ ID NO: 4831336 - DNA, 25 bp, Homo sapien
cagcaggctgcagtacatttctttt

SEQ ID NO: 4831337 - DNA, 25 bp, Homo sapien
tcggtcaaatctgtagaacacaatg

SEQ ID NO: 4831338 - DNA, 25 bp, Homo sapien
gcgcatcctcggatattgtgtgttc

SEQ ID NO: 4831339 - DNA, 25 bp, Homo sapien
caccagtcggtcaaatctgtagaac

SEQ ID NO: 4831340 - DNA, 25 bp, Homo sapien
tcctcggatattgtgtgttcctctg

SEQ ID NO: 4831341 - DNA, 25 bp, Homo sapien
tttcaggggtggactgttgggccac

SEQ ID NO: 4831342 - DNA, 25 bp, Homo sapien
ttttcaggggtggactgttgggcca

SEQ ID NO: 4831343 - DNA, 25 bp, Homo sapien
cgcctttttcaggggtggactgttg

SEQ ID NO: 4831344 - DNA, 25 bp, Homo sapien
tcttggcccaagatgtggggtcccg

SEQ ID NO: 4831345 - DNA, 25 bp, Homo sapien
ccaagatgtggggtcccgacgtgcc

SEQ ID NO: 4831346 - DNA, 25 bp, Homo sapien
ttggcccaagatgtggggtcccgac

SEQ ID NO: 4831347 - DNA, 25 bp, Homo sapien
atgtggggtcccgacgtgccatcat

SEQ ID NO: 4831348 - DNA, 25 bp, Homo sapien
cttggcccaactggggccctccgct

SEQ ID NO: 4831349 - DNA, 25 bp, Homo sapien
atcttcttcatcgggcgggggagcc

SEQ ID NO: 4831350 - DNA, 25 bp, Homo sapien
tcttcttcatcgggcgggggagccc

SEQ ID NO: 4831351 - DNA, 25 bp, Homo sapien
gatcttcttcatcgggcgggggagc

SEQ ID NO: 4831352 - DNA, 25 bp, Homo sapien
gactcaaggttccaaggggcacgat

SEQ ID NO: 4831353 - DNA, 25 bp, Homo sapien
tgtcaacaacgcagccaaacgtggc

SEQ ID NO: 4831354 - DNA, 25 bp, Homo sapien
atggtgaagccgatgtcaacaacgc

SEQ ID NO: 4831355 - DNA, 25 bp, Homo sapien
gcagccaaacgtggctacacaggac

SEQ ID NO: 4831356 - DNA, 25 bp, Homo sapien
ggccgttaagtgctgggagagttcg

SEQ ID NO: 4831357 - DNA, 25 bp, Homo sapien
gggccgttaagtgctgggagagttc

SEQ ID NO: 4831358 - DNA, 25 bp, Homo sapien
ccgttaagtgctgggagagttcgga

SEQ ID NO: 4831359 - DNA, 25 bp, Homo sapien
ttaagtgctgggagagttcggatac

SEQ ID NO: 4831360 - DNA, 25 bp, Homo sapien
cagcacttcatggggcacctggtac

SEQ ID NO: 4831361 - DNA, 25 bp, Homo sapien
agcacttcatggggcacctggtact

SEQ ID NO: 4831362 - DNA, 25 bp, Homo sapien
ggatccttttccattcggcagcggc

SEQ ID NO: 4831363 - DNA, 25 bp, Homo sapien
gatccttttccattcggcagcggct

SEQ ID NO: 4831364 - DNA, 25 bp, Homo sapien
tccttttccattcggcagcggcttc

SEQ ID NO: 4831365 - DNA, 25 bp, Homo sapien
atccttttccattcggcagcggctt

SEQ ID NO: 4831366 - DNA, 25 bp, Homo sapien
aggatcgtggagtccctgaccccaa

SEQ ID NO: 4831367 - DNA, 25 bp, Homo sapien
ctggaaggatcgtggagtccctgac

SEQ ID NO: 4831368 - DNA, 25 bp, Homo sapien
tggagtccctgaccccaagaaggca

SEQ ID NO: 4831369 - DNA, 25 bp, Homo sapien
ccgatttcctcccgcagacgggaag

SEQ ID NO: 4831370 - DNA, 25 bp, Homo sapien
tggaccggcattggcccgcttgcaa

SEQ ID NO: 4831371 - DNA, 25 bp, Homo sapien
tgtgtggaccggcattggcccgctt

SEQ ID NO: 4831372 - DNA, 25 bp, Homo sapien
tggttgtgtggaccggcattggccc

SEQ ID NO: 4831373 - DNA, 25 bp, Homo sapien
gtggaccggcattggcccgcttgca

SEQ ID NO: 4831374 - DNA, 25 bp, Homo sapien
aagacggagcccctgtcagacattt

SEQ ID NO: 4831375 - DNA, 25 bp, Homo sapien
gccatcagcgaggacagggtccacg

SEQ ID NO: 4831376 - DNA, 25 bp, Homo sapien
tcagacatttcggtagctgagccat

SEQ ID NO: 4831377 - DNA, 25 bp, Homo sapien
ggtagctgagccatcagcgaggaca

SEQ ID NO: 4831378 - DNA, 25 bp, Homo sapien
tgtgtcggcttcaccacgaggagag

SEQ ID NO: 4831379 - DNA, 25 bp, Homo sapien
ggtcaccgcaggacgtttgtcttgt

SEQ ID NO: 4831380 - DNA, 25 bp, Homo sapien
gatctggaagggacccagtctcggt

SEQ ID NO: 4831381 - DNA, 25 bp, Homo sapien
gattggagcctaggcccaagctgtg

SEQ ID NO: 4831382 - DNA, 25 bp, Homo sapien
ggataatcaagataacgaccctcaa

SEQ ID NO: 4831383 - DNA, 25 bp, Homo sapien
acgaccctcaacagcggcggagagg

SEQ ID NO: 4831384 - DNA, 25 bp, Homo sapien
gatacggatactttctaggtgatct

SEQ ID NO: 4831385 - DNA, 25 bp, Homo sapien
agcagagagttgatcttattcattc

SEQ ID NO: 4831386 - DNA, 25 bp, Homo sapien
gaccgcactgggaaacacagatgag

SEQ ID NO: 4831387 - DNA, 25 bp, Homo sapien
aacgctttgtccttcagtgcctgcc

SEQ ID NO: 4831388 - DNA, 25 bp, Homo sapien
gcttggaaaccaccgtgaattggac

SEQ ID NO: 4831389 - DNA, 25 bp, Homo sapien
tgaggaaagtcaacaacgctttgtc

SEQ ID NO: 4831390 - DNA, 25 bp, Homo sapien
agtacatttcttttcgcattcccat

SEQ ID NO: 4831391 - DNA, 25 bp, Homo sapien
gctgcagtacatttcttttcgcatt

SEQ ID NO: 4831392 - DNA, 25 bp, Homo sapien
gcatgctgcagtacatttcttttcg

SEQ ID NO: 4831393 - DNA, 25 bp, Homo sapien
tgcagtacatttcttttcgcattcc

SEQ ID NO: 4831394 - DNA, 25 bp, Homo sapien
tcggtcaaatctgtagaacacaatg

SEQ ID NO: 4831395 - DNA, 25 bp, Homo sapien
caccagtcggtcaaatctgtagaac

SEQ ID NO: 4831396 - DNA, 25 bp, Homo sapien
cacaatgtgctgtgcgcatcctcgg

SEQ ID NO: 4831397 - DNA, 25 bp, Homo sapien
tcctcggatattgtgtgttcctctg

SEQ ID NO: 4831398 - DNA, 25 bp, Homo sapien
tttcaggggtggactgttgggccac

SEQ ID NO: 4831399 - DNA, 25 bp, Homo sapien
ttttcaggggtggactgttgggcca

SEQ ID NO: 4831400 - DNA, 25 bp, Homo sapien
cgcctttttcaggggtggactgttg

SEQ ID NO: 4831401 - DNA, 25 bp, Homo sapien
tcttggcccaagatgtggggtcccg

SEQ ID NO: 4831402 - DNA, 25 bp, Homo sapien
ttggcccaagatgtggggtcccgac

SEQ ID NO: 4831403 - DNA, 25 bp, Homo sapien
ccaagatgtggggtcccgacgtgcc

SEQ ID NO: 4831404 - DNA, 25 bp, Homo sapien
atgtggggtcccgacgtgccatcat

SEQ ID NO: 4831405 - DNA, 25 bp, Homo sapien
tcttcttcatcgggcgggggagccc

SEQ ID NO: 4831406 - DNA, 25 bp, Homo sapien
atcttcttcatcgggcgggggagcc

SEQ ID NO: 4831407 - DNA, 25 bp, Homo sapien
gatcttcttcatcgggcgggggagc

SEQ ID NO: 4831408 - DNA, 25 bp, Homo sapien
cttggcccaactggggccctccgct

SEQ ID NO: 4831409 - DNA, 25 bp, Homo sapien
tgtcaacaacgcagccaaacgtggc

SEQ ID NO: 4831410 - DNA, 25 bp, Homo sapien
atggtgaagccgatgtcaacaacgc

SEQ ID NO: 4831411 - DNA, 25 bp, Homo sapien
gcagccaaacgtggctacacaggac

SEQ ID NO: 4831412 - DNA, 25 bp, Homo sapien
gactcaaggttccaaggggcacgat

SEQ ID NO: 4831413 - DNA, 25 bp, Homo sapien
ggccgttaagtgctgggagagttcg

SEQ ID NO: 4831414 - DNA, 25 bp, Homo sapien
gggccgttaagtgctgggagagttc

SEQ ID NO: 4831415 - DNA, 25 bp, Homo sapien
ccgttaagtgctgggagagttcgga

SEQ ID NO: 4831416 - DNA, 25 bp, Homo sapien
ttaagtgctgggagagttcggatac

SEQ ID NO: 4831417 - DNA, 25 bp, Homo sapien
tccccaaggtcgctggaaccagggc

SEQ ID NO: 4831418 - DNA, 25 bp, Homo sapien
ggttggcttcaaccccaggcttcca

SEQ ID NO: 4831419 - DNA, 25 bp, Homo sapien
ccaaggtcgctggaaccagggctgc

SEQ ID NO: 4831420 - DNA, 25 bp, Homo sapien
tggcttcaaccccaggcttccatgg

SEQ ID NO: 4831421 - DNA, 25 bp, Homo sapien
atccttttccattcggcagcggctt

SEQ ID NO: 4831422 - DNA, 25 bp, Homo sapien
ggatccttttccattcggcagcggc

SEQ ID NO: 4831423 - DNA, 25 bp, Homo sapien
gatccttttccattcggcagcggct

SEQ ID NO: 4831424 - DNA, 25 bp, Homo sapien
tccttttccattcggcagcggcttc

SEQ ID NO: 4831425 - DNA, 25 bp, Homo sapien
gaccaggggcccggggtgacactca

SEQ ID NO: 4831426 - DNA, 25 bp, Homo sapien
cgcagacgggaagctgaaaggaaat

SEQ ID NO: 4831427 - DNA, 25 bp, Homo sapien
cagacgggaagctgaaaggaaatca

SEQ ID NO: 4831428 - DNA, 25 bp, Homo sapien
gcagacgggaagctgaaaggaaatc

SEQ ID NO: 4831429 - DNA, 25 bp, Homo sapien
gacgggaagctgaaaggaaatcaac

SEQ ID NO: 4831430 - DNA, 25 bp, Homo sapien
tccaccacgaggagagtctcgtgga

SEQ ID NO: 4831431 - DNA, 25 bp, Homo sapien
ggagagtctcgtggacctggtgcct

SEQ ID NO: 4831432 - DNA, 25 bp, Homo sapien
ggctccaccacgaggagagtctcgt

SEQ ID NO: 4831433 - DNA, 25 bp, Homo sapien
ccacgaggagagtctcgtggacctg

SEQ ID NO: 4831434 - DNA, 25 bp, Homo sapien
agttcaggcaagcctgaatcggagc

SEQ ID NO: 4831435 - DNA, 25 bp, Homo sapien
gggaagttcaggcaagcctgaatcg

SEQ ID NO: 4831436 - DNA, 25 bp, Homo sapien
tcggtttcttggggaagttcaggca

SEQ ID NO: 4831437 - DNA, 25 bp, Homo sapien
gtttcttggggaagttcaggcaagc

SEQ ID NO: 4831438 - DNA, 25 bp, Homo sapien
ctacttggtccaagttcggttgcgg

SEQ ID NO: 4831439 - DNA, 25 bp, Homo sapien
ccaagttcggttgcggctggtggag

SEQ ID NO: 4831440 - DNA, 25 bp, Homo sapien
tcctgcccatctggggcgacctact

SEQ ID NO: 4831441 - DNA, 25 bp, Homo sapien
catctggggcgacctacttggtcca

SEQ ID NO: 4831442 - DNA, 25 bp, Homo sapien
tgagggctctgagcgaggaaggctc

SEQ ID NO: 4831443 - DNA, 25 bp, Homo sapien
ctctgagcgaggaaggctcccggct

SEQ ID NO: 4831444 - DNA, 25 bp, Homo sapien
tctgagcgaggaaggctcccggctt

SEQ ID NO: 4831445 - DNA, 25 bp, Homo sapien
agctgccctgtggcgcgaggcgaga

SEQ ID NO: 4831446 - DNA, 25 bp, Homo sapien
cgaggcgagacatgttggcagtaat

SEQ ID NO: 4831447 - DNA, 25 bp, Homo sapien
cctgttattctttactccgctgaga

SEQ ID NO: 4831448 - DNA, 25 bp, Homo sapien
ttggcagtaatgctgccctgttatt

SEQ ID NO: 4831449 - DNA, 25 bp, Homo sapien
tgtctcagaaaataccgctcagttc

SEQ ID NO: 4831450 - DNA, 25 bp, Homo sapien
cagttccgaggcctcctagatgtgg

SEQ ID NO: 4831451 - DNA, 25 bp, Homo sapien
ataacgaccctcaacagcggcggaa

SEQ ID NO: 4831452 - DNA, 25 bp, Homo sapien
cgaccctcaacagcggcggaaaggg

SEQ ID NO: 4831453 - DNA, 25 bp, Homo sapien
ttccttccacgctctttggttcatt

SEQ ID NO: 4831454 - DNA, 25 bp, Homo sapien
tgagctttccggtcacatcgtttcc

SEQ ID NO: 4831455 - DNA, 25 bp, Homo sapien
tccctgtggccgttctctgagcttt

SEQ ID NO: 4831456 - DNA, 25 bp, Homo sapien
ctttggttcattgtggtcctgctgc

SEQ ID NO: 4831457 - DNA, 25 bp, Homo sapien
tgattcatgattgcatgctcaatgc

SEQ ID NO: 4831458 - DNA, 25 bp, Homo sapien
catgctctgttgcagggtcatatct

SEQ ID NO: 4831459 - DNA, 25 bp, Homo sapien
aagggcatgctctgttgcagggtca

SEQ ID NO: 4831460 - DNA, 25 bp, Homo sapien
gattgcatgctcaatgcagaagggc

SEQ ID NO: 4831461 - DNA, 25 bp, Homo sapien
cataaaggtggtgatatctcaatgg

SEQ ID NO: 4831462 - DNA, 25 bp, Homo sapien
gaaacttccagggacacataagtac

SEQ ID NO: 4831463 - DNA, 25 bp, Homo sapien
tatacatctattgtttgccaggcaa

SEQ ID NO: 4831464 - DNA, 25 bp, Homo sapien
tgccaggcaatatagtaggaactga

SEQ ID NO: 4831465 - DNA, 25 bp, Homo sapien
atggagtctcatggctgaagggcca

SEQ ID NO: 4831466 - DNA, 25 bp, Homo sapien
tgggcatcgtgggtctaggcctttt

SEQ ID NO: 4831467 - DNA, 25 bp, Homo sapien
cctttttatgatgctctctgagtct

SEQ ID NO: 4831468 - DNA, 25 bp, Homo sapien
gccagcatcaatgtgggttgagcct

SEQ ID NO: 4831469 - DNA, 25 bp, Homo sapien
ggttcttgaacccacaggactgatt

SEQ ID NO: 4831470 - DNA, 25 bp, Homo sapien
gtctggccagggatatagcattctc

SEQ ID NO: 4831471 - DNA, 25 bp, Homo sapien
tgattctaggttcttgtctggccag

SEQ ID NO: 4831472 - DNA, 25 bp, Homo sapien
tctgcagaaccttatagtaatgagc

SEQ ID NO: 4831473 - DNA, 25 bp, Homo sapien
tacttaggtttatgctgtatcaaac

SEQ ID NO: 4831474 - DNA, 25 bp, Homo sapien
tacagaacgctcaagtggtactttc

SEQ ID NO: 4831475 - DNA, 25 bp, Homo sapien
aagcattctatttcctttaggcacc

SEQ ID NO: 4831476 - DNA, 25 bp, Homo sapien
tatgtgtgcgagtaatggatgattc

SEQ ID NO: 4831477 - DNA, 25 bp, Homo sapien
aacaaattgagacaatgaccttccg

SEQ ID NO: 4831478 - DNA, 25 bp, Homo sapien
tgagacaatgaccttccgcaggacc

SEQ ID NO: 4831479 - DNA, 25 bp, Homo sapien
caccaaacaaattgagacaatgacc

SEQ ID NO: 4831480 - DNA, 25 bp, Homo sapien
attgagacaatgaccttccgcagga

SEQ ID NO: 4831481 - DNA, 25 bp, Homo sapien
taaaatccaccatgctctacagcac

SEQ ID NO: 4831482 - DNA, 25 bp, Homo sapien
ttcatccttcttcggcaggcaccaa

SEQ ID NO: 4831483 - DNA, 25 bp, Homo sapien
catgataagtggtgttggaattggc

SEQ ID NO: 4831484 - DNA, 25 bp, Homo sapien
gggttcttgataatctgacatgata

SEQ ID NO: 4831485 - DNA, 25 bp, Homo sapien
caagacggttatcaagatggaagta

SEQ ID NO: 4831486 - DNA, 25 bp, Homo sapien
tgcaagacggttatcaagatggaag

SEQ ID NO: 4831487 - DNA, 25 bp, Homo sapien
aaatgcaagacggttatcaagatgg

SEQ ID NO: 4831488 - DNA, 25 bp, Homo sapien
cggttatcaagatggaagtacttaa

SEQ ID NO: 4831489 - DNA, 25 bp, Homo sapien
gcccgcaacaaggatcacaaggttt

SEQ ID NO: 4831490 - DNA, 25 bp, Homo sapien
gtcgcccgcaacaaggatcacaagg

SEQ ID NO: 4831491 - DNA, 25 bp, Homo sapien
ccgcaacaaggatcacaaggttttt

SEQ ID NO: 4831492 - DNA, 25 bp, Homo sapien
tcgcccgcaacaaggatcacaaggt

SEQ ID NO: 4831493 - DNA, 25 bp, Homo sapien
aaatcatcacagaggtcgacacggg

SEQ ID NO: 4831494 - DNA, 25 bp, Homo sapien
gaaaagtggttgaactgccactcac

SEQ ID NO: 4831495 - DNA, 25 bp, Homo sapien
ctcagggagagaagtccgctggatt

SEQ ID NO: 4831496 - DNA, 25 bp, Homo sapien
caggtctcctgctactcagaggaag

SEQ ID NO: 4831497 - DNA, 25 bp, Homo sapien
tttgagagtgctcccgggacagcat

SEQ ID NO: 4831498 - DNA, 25 bp, Homo sapien
gtttgagagtgctcccgggacagca

SEQ ID NO: 4831499 - DNA, 25 bp, Homo sapien
tgatctgtccgggtcgtcgaagaga

SEQ ID NO: 4831500 - DNA, 25 bp, Homo sapien
ctcctgatctgtccgggtcgtcgaa

SEQ ID NO: 4831501 - DNA, 25 bp, Homo sapien
actcctgatctgtccgggtcgtcga

SEQ ID NO: 4831502 - DNA, 25 bp, Homo sapien
ctcagggagagaagtccgctggatt

SEQ ID NO: 4831503 - DNA, 25 bp, Homo sapien
gaaaagtggttgaactgccactcac

SEQ ID NO: 4831504 - DNA, 25 bp, Homo sapien
aaatcatcacagaggtcgacacggg

SEQ ID NO: 4831505 - DNA, 25 bp, Homo sapien
caggtctcctgctactcagaggaag

SEQ ID NO: 4831506 - DNA, 25 bp, Homo sapien
cattgagttcttcgggcttcaccaa

SEQ ID NO: 4831507 - DNA, 25 bp, Homo sapien
tgcttgcctctatggaagccagcag

SEQ ID NO: 4831508 - DNA, 25 bp, Homo sapien
tttgagagtgctcccgggacagcat

SEQ ID NO: 4831509 - DNA, 25 bp, Homo sapien
catgtcaaggcactcaggatattgc

SEQ ID NO: 4831510 - DNA, 25 bp, Homo sapien
tggtcctcccttgcagagaagcgag

SEQ ID NO: 4831511 - DNA, 25 bp, Homo sapien
ggtcctcccttgcagagaagcgagt

SEQ ID NO: 4831512 - DNA, 25 bp, Homo sapien
ctcccaagtagagtgagtcgtcctc

SEQ ID NO: 4831513 - DNA, 25 bp, Homo sapien
ccaagtagagtgagtcgtcctccat

SEQ ID NO: 4831514 - DNA, 25 bp, Homo sapien
cccaagtagagtgagtcgtcctcca

SEQ ID NO: 4831515 - DNA, 25 bp, Homo sapien
tcccaagtagagtgagtcgtcctcc

SEQ ID NO: 4831516 - DNA, 25 bp, Homo sapien
gttttgaaaagtggttgaactgcca

SEQ ID NO: 4831517 - DNA, 25 bp, Homo sapien
ggccgagaagatgtgagttttgaaa

SEQ ID NO: 4831518 - DNA, 25 bp, Homo sapien
ttgaaaagtggttgaactgccactc

SEQ ID NO: 4831519 - DNA, 25 bp, Homo sapien
gaaaagtggttgaactgccactcac

SEQ ID NO: 4831520 - DNA, 25 bp, Homo sapien
gagagaagtccgctggatttcagca

SEQ ID NO: 4831521 - DNA, 25 bp, Homo sapien
tccgctggatttcagcaaaagctgc

SEQ ID NO: 4831522 - DNA, 25 bp, Homo sapien
ctcagggagagaagtccgctggatt

SEQ ID NO: 4831523 - DNA, 25 bp, Homo sapien
gaagtccgctggatttcagcaaaag

SEQ ID NO: 4831524 - DNA, 25 bp, Homo sapien
gagaagtgataccagaggcagtgac

SEQ ID NO: 4831525 - DNA, 25 bp, Homo sapien
aaggagaagtgataccagaggcagt

SEQ ID NO: 4831526 - DNA, 25 bp, Homo sapien
caaaggagaagtgataccagaggca

SEQ ID NO: 4831527 - DNA, 25 bp, Homo sapien
tcaaaggagaagtgataccagaggc

SEQ ID NO: 4831528 - DNA, 25 bp, Homo sapien
tggtgaagaagaggacagcaatcct

SEQ ID NO: 4831529 - DNA, 25 bp, Homo sapien
gtagaacttggctcataaagaagaa

SEQ ID NO: 4831530 - DNA, 25 bp, Homo sapien
tggtagaacttggctcataaagaag

SEQ ID NO: 4831531 - DNA, 25 bp, Homo sapien
tgaagaagaggacagcaatcctcat

SEQ ID NO: 4831532 - DNA, 25 bp, Homo sapien
ggagccatttggacgttcacagatc

SEQ ID NO: 4831533 - DNA, 25 bp, Homo sapien
tggacgttcacagatctccttgaat

SEQ ID NO: 4831534 - DNA, 25 bp, Homo sapien
gccatttggacgttcacagatctcc

SEQ ID NO: 4831535 - DNA, 25 bp, Homo sapien
cgacaggagccatttggacgttcac

SEQ ID NO: 4831536 - DNA, 25 bp, Homo sapien
gatcaaacatgttcaaggtgctatg

SEQ ID NO: 4831537 - DNA, 25 bp, Homo sapien
acatgttcaaggtgctatggccgta

SEQ ID NO: 4831538 - DNA, 25 bp, Homo sapien
tccaagtactagttaggcccactcc

SEQ ID NO: 4831539 - DNA, 25 bp, Homo sapien
aaacatgttcaaggtgctatggccg

SEQ ID NO: 4831540 - DNA, 25 bp, Homo sapien
gacctttataaggtggaaggcttga

SEQ ID NO: 4831541 - DNA, 25 bp, Homo sapien
cctttataaggtggaaggcttgatg

SEQ ID NO: 4831542 - DNA, 25 bp, Homo sapien
acctttataaggtggaaggcttgat

SEQ ID NO: 4831543 - DNA, 25 bp, Homo sapien
cattgcacccaataccagttctgaa

SEQ ID NO: 4831544 - DNA, 25 bp, Homo sapien
gaattctaacctctgtaatgagcat

SEQ ID NO: 4831545 - DNA, 25 bp, Homo sapien
taatgagcattgcacccaataccag

SEQ ID NO: 4831546 - DNA, 25 bp, Homo sapien
aggtaagtggctgaattctaacctc

SEQ ID NO: 4831547 - DNA, 25 bp, Homo sapien
agcagtgatagtgccatcccccagt

SEQ ID NO: 4831548 - DNA, 25 bp, Homo sapien
cttccccagctatgttcaataatta

SEQ ID NO: 4831549 - DNA, 25 bp, Homo sapien
ttccccagctatgttcaataattac

SEQ ID NO: 4831550 - DNA, 25 bp, Homo sapien
gtgatagtgccatcccccagtctct

SEQ ID NO: 4831551 - DNA, 25 bp, Homo sapien
gtgatgatgccctttcttccaaact

SEQ ID NO: 4831552 - DNA, 25 bp, Homo sapien
tcagagatgatgttaccaatttctt

SEQ ID NO: 4831553 - DNA, 25 bp, Homo sapien
cattgcatcagagatgatgttacca

SEQ ID NO: 4831554 - DNA, 25 bp, Homo sapien
gatgatgccctttcttccaaacttt

SEQ ID NO: 4831555 - DNA, 25 bp, Homo sapien
tctaattcatcagtcagtgtttttc

SEQ ID NO: 4831556 - DNA, 25 bp, Homo sapien
taattcatcagtcagtgtttttcca

SEQ ID NO: 4831557 - DNA, 25 bp, Homo sapien
tcaaattttcatgccttcaataatt

SEQ ID NO: 4831558 - DNA, 25 bp, Homo sapien
tcatcagtcagtgtttttccatcct

SEQ ID NO: 4831559 - DNA, 25 bp, Homo sapien
tttcatgcaacagaacataggcatc

SEQ ID NO: 4831560 - DNA, 25 bp, Homo sapien
ttttcatgcaacagaacataggcat

SEQ ID NO: 4831561 - DNA, 25 bp, Homo sapien
cttttcatgcaacagaacataggca

SEQ ID NO: 4831562 - DNA, 25 bp, Homo sapien
tctccatcaatgtctccagcaatta

SEQ ID NO: 4831563 - DNA, 25 bp, Homo sapien
ggatgagtgtagttagagcttctcc

SEQ ID NO: 4831564 - DNA, 25 bp, Homo sapien
catcaatgtctccagcaattatgac

SEQ ID NO: 4831565 - DNA, 25 bp, Homo sapien
tttagcctattcaggatgagtgtag

SEQ ID NO: 4831566 - DNA, 25 bp, Homo sapien
tcagccctcttctccaaacactgta

SEQ ID NO: 4831567 - DNA, 25 bp, Homo sapien
cagccctcttctccaaacactgtac

SEQ ID NO: 4831568 - DNA, 25 bp, Homo sapien
ggcataatctttgatcacagtgacc

SEQ ID NO: 4831569 - DNA, 25 bp, Homo sapien
agcatggcataatctttgatcacag

SEQ ID NO: 4831570 - DNA, 25 bp, Homo sapien
atggcataatctttgatcacagtga

SEQ ID NO: 4831571 - DNA, 25 bp, Homo sapien
catttttcaatttgagacttgttac

SEQ ID NO: 4831572 - DNA, 25 bp, Homo sapien
tactccatctgaaagtttctccact

SEQ ID NO: 4831573 - DNA, 25 bp, Homo sapien
cagctactccatctgaaagtttctc

SEQ ID NO: 4831574 - DNA, 25 bp, Homo sapien
tccatctgaaagtttctccactcac

SEQ ID NO: 4831575 - DNA, 25 bp, Homo sapien
agctactccatctgaaagtttctcc

SEQ ID NO: 4831576 - DNA, 25 bp, Homo sapien
cattagctggagtgaatgagtccaa

SEQ ID NO: 4831577 - DNA, 25 bp, Homo sapien
cattcttagcaattgtcattgctgg

SEQ ID NO: 4831578 - DNA, 25 bp, Homo sapien
cttcattagctggagtgaatgagtc

SEQ ID NO: 4831579 - DNA, 25 bp, Homo sapien
taatttctataccaattattttatc

SEQ ID NO: 4831580 - DNA, 25 bp, Homo sapien
aggccatgccagcagcatccaatga

SEQ ID NO: 4831581 - DNA, 25 bp, Homo sapien
tccagggctgttcccttctttagga

SEQ ID NO: 4831582 - DNA, 25 bp, Homo sapien
acagctgctgtagttaatagagagg

SEQ ID NO: 4831583 - DNA, 25 bp, Homo sapien
cagggctgttcccttctttaggaat

SEQ ID NO: 4831584 - DNA, 25 bp, Homo sapien
ctctaacaaggcctcacaaatgtac

SEQ ID NO: 4831585 - DNA, 25 bp, Homo sapien
caaggcctcacaaatgtactgagag

SEQ ID NO: 4831586 - DNA, 25 bp, Homo sapien
tctaacaaggcctcacaaatgtact

SEQ ID NO: 4831587 - DNA, 25 bp, Homo sapien
taacaaggcctcacaaatgtactga

SEQ ID NO: 4831588 - DNA, 25 bp, Homo sapien
atcggcaagtgctcgacgcgtggcc

SEQ ID NO: 4831589 - DNA, 25 bp, Homo sapien
aaaggaggaacagatcggcaagtgc

SEQ ID NO: 4831590 - DNA, 25 bp, Homo sapien
aaatgctgccgaagaaagaaataaa

SEQ ID NO: 4831591 - DNA, 25 bp, Homo sapien
agaggcggccggtgtgctgtgctca

SEQ ID NO: 4831592 - DNA, 25 bp, Homo sapien
acttgattgttccagcacctctttc

SEQ ID NO: 4831593 - DNA, 25 bp, Homo sapien
aggacaccacttgattgttccagca

SEQ ID NO: 4831594 - DNA, 25 bp, Homo sapien
tctttcccttcgcttaaacaggctg

SEQ ID NO: 4831595 - DNA, 25 bp, Homo sapien
ttcgcttaaacaggctggagcagtc

SEQ ID NO: 4831596 - DNA, 25 bp, Homo sapien
gcaaacgtgcatgcctcagaactgg

SEQ ID NO: 4831597 - DNA, 25 bp, Homo sapien
gaggtgggctcgatctcagactcca

SEQ ID NO: 4831598 - DNA, 25 bp, Homo sapien
gagccattgttccatccctgaaggg

SEQ ID NO: 4831599 - DNA, 25 bp, Homo sapien
tagccttggctcagagtgaaacgca

SEQ ID NO: 4831600 - DNA, 25 bp, Homo sapien
ccattctggtgagaaaaagcgtgac

SEQ ID NO: 4831601 - DNA, 25 bp, Homo sapien
ccctggaataggtgttgcgtatcaa

SEQ ID NO: 4831602 - DNA, 25 bp, Homo sapien
gacatttgctctgatccctggaata

SEQ ID NO: 4831603 - DNA, 25 bp, Homo sapien
gaatatataacccttggcagcgggc

SEQ ID NO: 4831604 - DNA, 25 bp, Homo sapien
gttgtccaatcaggtgcaggttttt

SEQ ID NO: 4831605 - DNA, 25 bp, Homo sapien
ctccggggccacgttgtccaatcag

SEQ ID NO: 4831606 - DNA, 25 bp, Homo sapien
gggccacgttgtccaatcaggtgca

SEQ ID NO: 4831607 - DNA, 25 bp, Homo sapien
cacgttgtccaatcaggtgcaggtt

SEQ ID NO: 4831608 - DNA, 25 bp, Homo sapien
aatgaagcctacagcaaaacagtct

SEQ ID NO: 4831609 - DNA, 25 bp, Homo sapien
atgaagcctacagcaaaacagtctt

SEQ ID NO: 4831610 - DNA, 25 bp, Homo sapien
tgaagcctacagcaaaacagtcttt

SEQ ID NO: 4831611 - DNA, 25 bp, Homo sapien
tcagactgtcctctgcagttgaatt

SEQ ID NO: 4831612 - DNA, 25 bp, Homo sapien
ttatccacacttggctgctgagggc

SEQ ID NO: 4831613 - DNA, 25 bp, Homo sapien
gctgagggctgggtcagactgtcct

SEQ ID NO: 4831614 - DNA, 25 bp, Homo sapien
ggctgggtcagactgtcctctgcag

SEQ ID NO: 4831615 - DNA, 25 bp, Homo sapien
cacctggccagatactatattatac

SEQ ID NO: 4831616 - DNA, 25 bp, Homo sapien
tggccagatactatattatactagt

SEQ ID NO: 4831617 - DNA, 25 bp, Homo sapien
cctggccagatactatattatacta

SEQ ID NO: 4831618 - DNA, 25 bp, Homo sapien
gcacctggccagatactatattata

SEQ ID NO: 4831619 - DNA, 25 bp, Homo sapien
tttagggaagactcttcggaataga

SEQ ID NO: 4831620 - DNA, 25 bp, Homo sapien
gaagactcttcggaatagagattgg

SEQ ID NO: 4831621 - DNA, 25 bp, Homo sapien
gactcttcggaatagagattgggat

SEQ ID NO: 4831622 - DNA, 25 bp, Homo sapien
tcttcggaatagagattgggatttc

SEQ ID NO: 4831623 - DNA, 25 bp, Homo sapien
atggcagttgaaccaaaatgaagaa

SEQ ID NO: 4831624 - DNA, 25 bp, Homo sapien
ctgatggcagttgaaccaaaatgaa

SEQ ID NO: 4831625 - DNA, 25 bp, Homo sapien
ggcagttgaaccaaaatgaagaaca

SEQ ID NO: 4831626 - DNA, 25 bp, Homo sapien
tgatggcagttgaaccaaaatgaag

SEQ ID NO: 4831627 - DNA, 25 bp, Homo sapien
ggaaaaatcaagtcctgcctggcac

SEQ ID NO: 4831628 - DNA, 25 bp, Homo sapien
gaaaaatcaagtcctgcctggcacc

SEQ ID NO: 4831629 - DNA, 25 bp, Homo sapien
gggaaaaatcaagtcctgcctggca

SEQ ID NO: 4831630 - DNA, 25 bp, Homo sapien
ctgtgccaagaaagagctgctgagg

SEQ ID NO: 4831631 - DNA, 25 bp, Homo sapien
ctgctgagggagctttccaggaaat

SEQ ID NO: 4831632 - DNA, 25 bp, Homo sapien
agagctgctgagggagctttccagg

SEQ ID NO: 4831633 - DNA, 25 bp, Homo sapien
agctgctgagggagctttccaggaa

SEQ ID NO: 4831634 - DNA, 25 bp, Homo sapien
gaaagttcagcctgcaatttccatc

SEQ ID NO: 4831635 - DNA, 25 bp, Homo sapien
cgaccaagcttgcacgactcacaga

SEQ ID NO: 4831636 - DNA, 25 bp, Homo sapien
ttgcacgactcacagacagcaaact

SEQ ID NO: 4831637 - DNA, 25 bp, Homo sapien
tgcaatttccatcgggcttctcatt

SEQ ID NO: 4831638 - DNA, 25 bp, Homo sapien
gcaagaagaatgagagcagccaaaa

SEQ ID NO: 4831639 - DNA, 25 bp, Homo sapien
cttggaaaatttgagcaagaagaat

SEQ ID NO: 4831640 - DNA, 25 bp, Homo sapien
gcagccaaaataaagacaaatattt

SEQ ID NO: 4831641 - DNA, 25 bp, Homo sapien
ggaaaatttgagcaagaagaatgag

SEQ ID NO: 4831642 - DNA, 25 bp, Homo sapien
gcaaaatggtgctaattcagctcta

SEQ ID NO: 4831643 - DNA, 25 bp, Homo sapien
taagacattcggcttcacagtgacc

SEQ ID NO: 4831644 - DNA, 25 bp, Homo sapien
tccattctcttactaattagtgctc

SEQ ID NO: 4831645 - DNA, 25 bp, Homo sapien
attagtgctctatgaattgctgtcc

SEQ ID NO: 4831646 - DNA, 25 bp, Homo sapien
gatcactgagaaacctggcacctgg

SEQ ID NO: 4831647 - DNA, 25 bp, Homo sapien
gggagcttcaaggagaacgtctcaa

SEQ ID NO: 4831648 - DNA, 25 bp, Homo sapien
gatgaacttctactcccacctaggg

SEQ ID NO: 4831649 - DNA, 25 bp, Homo sapien
ggctgaagatccctgttgtgtcaac

SEQ ID NO: 4831650 - DNA, 25 bp, Homo sapien
ccgcctccgcaggcagaaagcgcat

SEQ ID NO: 4831651 - DNA, 25 bp, Homo sapien
cccgcctccgcaggcagaaagcgca

SEQ ID NO: 4831652 - DNA, 25 bp, Homo sapien
gtcattctgcgattctgtccaggaa

SEQ ID NO: 4831653 - DNA, 25 bp, Homo sapien
gaatcactaaggcttctttggcgcc

SEQ ID NO: 4831654 - DNA, 25 bp, Homo sapien
ttctttggcgccagtaaccatacat

SEQ ID NO: 4831655 - DNA, 25 bp, Homo sapien
cattgtcattctgcgattctgtcca

SEQ ID NO: 4831656 - DNA, 25 bp, Homo sapien
tgcatccagtaagtcctaatgctca

SEQ ID NO: 4831657 - DNA, 25 bp, Homo sapien
gcatccagtaagtcctaatgctcat

SEQ ID NO: 4831658 - DNA, 25 bp, Homo sapien
ctgcatccagtaagtcctaatgctc

SEQ ID NO: 4831659 - DNA, 25 bp, Homo sapien
cacttggtgacgtttgggtggattc

SEQ ID NO: 4831660 - DNA, 25 bp, Homo sapien
acgtttgggtggattcatttgcgtg

SEQ ID NO: 4831661 - DNA, 25 bp, Homo sapien
tgctccacttggtgacgtttgggtg

SEQ ID NO: 4831662 - DNA, 25 bp, Homo sapien
atactggtaccctgctccacttggt

SEQ ID NO: 4831663 - DNA, 25 bp, Homo sapien
tcctggaattgagggtgtttttgca

SEQ ID NO: 4831664 - DNA, 25 bp, Homo sapien
ctggcctgaattcagtgtggagctc

SEQ ID NO: 4831665 - DNA, 25 bp, Homo sapien
aattcagtgtggagctcctggaatt

SEQ ID NO: 4831666 - DNA, 25 bp, Homo sapien
agggactggcctgaattcagtgtgg

SEQ ID NO: 4831667 - DNA, 25 bp, Homo sapien
tgctcccgtgaaaagatggccgtca

SEQ ID NO: 4831668 - DNA, 25 bp, Homo sapien
cccgtgaaaagatggccgtcagtat

SEQ ID NO: 4831669 - DNA, 25 bp, Homo sapien
gatgagctcctcattgctggaatcc

SEQ ID NO: 4831670 - DNA, 25 bp, Homo sapien
aaagatggccgtcagtattctccaa

SEQ ID NO: 4831671 - DNA, 25 bp, Homo sapien
ctacaaggacatcagcatgcaaggg

SEQ ID NO: 4831672 - DNA, 25 bp, Homo sapien
ttcaaaagcattggcctggggagtg

SEQ ID NO: 4831673 - DNA, 25 bp, Homo sapien
cagccttaggaattatttattgtgg

SEQ ID NO: 4831674 - DNA, 25 bp, Homo sapien
tgtggcatcagaccaatgactacaa

SEQ ID NO: 4831675 - DNA, 25 bp, Homo sapien
gaatctctggggcttcttaagcgcc

SEQ ID NO: 4831676 - DNA, 25 bp, Homo sapien
cattgtcattctgcggttctgtctg

SEQ ID NO: 4831677 - DNA, 25 bp, Homo sapien
tctggggcttcttaagcgccggtaa

SEQ ID NO: 4831678 - DNA, 25 bp, Homo sapien
ttcttaagcgccggtaaccatacat

SEQ ID NO: 4831679 - DNA, 25 bp, Homo sapien
cctgctccacttggcgacgtttggg

SEQ ID NO: 4831680 - DNA, 25 bp, Homo sapien
acttggcgacgtttgggtggattca

SEQ ID NO: 4831681 - DNA, 25 bp, Homo sapien
tgtactgggaccctgctccacttgg

SEQ ID NO: 4831682 - DNA, 25 bp, Homo sapien
tggattcatttgtgtggtagccaaa

SEQ ID NO: 4831683 - DNA, 25 bp, Homo sapien
tggtatgaattcaggtgtggagctc

SEQ ID NO: 4831684 - DNA, 25 bp, Homo sapien
ccagggactggtatgaattcaggtg

SEQ ID NO: 4831685 - DNA, 25 bp, Homo sapien
cagggactggtatgaattcaggtgt

SEQ ID NO: 4831686 - DNA, 25 bp, Homo sapien
gactggtatgaattcaggtgtggag

SEQ ID NO: 4831687 - DNA, 25 bp, Homo sapien
aagacagtcctcagtattctgccct

SEQ ID NO: 4831688 - DNA, 25 bp, Homo sapien
agtcctcagtattctgccctccaaa

SEQ ID NO: 4831689 - DNA, 25 bp, Homo sapien
agacagtcctcagtattctgccctc

SEQ ID NO: 4831690 - DNA, 25 bp, Homo sapien
tcctcagtattctgccctccaaaaa

SEQ ID NO: 4831691 - DNA, 25 bp, Homo sapien
gatcccagccatgtggtttgcttgg

SEQ ID NO: 4831692 - DNA, 25 bp, Homo sapien
caagctgaagtcatcaacggaaggt

SEQ ID NO: 4831693 - DNA, 25 bp, Homo sapien
gtatgatgtactggatctgcacagg

SEQ ID NO: 4831694 - DNA, 25 bp, Homo sapien
ggtatcatcaagggctgctgataca

SEQ ID NO: 4831695 - DNA, 25 bp, Homo sapien
taggtgtgggtggtagagggtagca

SEQ ID NO: 4831696 - DNA, 25 bp, Homo sapien
cgtcccacaggactaggtgtgggtg

SEQ ID NO: 4831697 - DNA, 25 bp, Homo sapien
aaggctgcccgacagcgtggaatgc

SEQ ID NO: 4831698 - DNA, 25 bp, Homo sapien
agtcggctggtctagggcgtcccac

SEQ ID NO: 4831699 - DNA, 25 bp, Homo sapien
gaatgcactgactaaggatctggac

SEQ ID NO: 4831700 - DNA, 25 bp, Homo sapien
tgggaccctccgctgttgaagacag

SEQ ID NO: 4831701 - DNA, 25 bp, Homo sapien
tcagaccacgtcatgctggaagcag

SEQ ID NO: 4831702 - DNA, 25 bp, Homo sapien
cagcaaagggcaagcaagtggtcaa

SEQ ID NO: 4831703 - DNA, 25 bp, Homo sapien
agtgtctcagttggaagcaagcaca

SEQ ID NO: 4831704 - DNA, 25 bp, Homo sapien
agttggaagcaagcacagcagtcac

SEQ ID NO: 4831705 - DNA, 25 bp, Homo sapien
tctcagttggaagcaagcacagcag

SEQ ID NO: 4831706 - DNA, 25 bp, Homo sapien
tggaagcaagcacagcagtcaccac

SEQ ID NO: 4831707 - DNA, 25 bp, Homo sapien
aacgacagccctcagtccactgcct

SEQ ID NO: 4831708 - DNA, 25 bp, Homo sapien
tggaacgacagccctcagtccactg

SEQ ID NO: 4831709 - DNA, 25 bp, Homo sapien
ggaacgacagccctcagtccactgc

SEQ ID NO: 4831710 - DNA, 25 bp, Homo sapien
acgacagccctcagtccactgcctt

SEQ ID NO: 4831711 - DNA, 25 bp, Homo sapien
cccttgttccgggaccacgatgatg

SEQ ID NO: 4831712 - DNA, 25 bp, Homo sapien
acgatgatgaacgtctctgtgctgg

SEQ ID NO: 4831713 - DNA, 25 bp, Homo sapien
ttccagtctcagtgtgagttctgtc

SEQ ID NO: 4831714 - DNA, 25 bp, Homo sapien
tcagtgtgagttctgtcccttgttc

SEQ ID NO: 4831715 - DNA, 25 bp, Homo sapien
tgtaatcgatctgcagagggaactg

SEQ ID NO: 4831716 - DNA, 25 bp, Homo sapien
accacaaatacgctgttacccaggg

SEQ ID NO: 4831717 - DNA, 25 bp, Homo sapien
acaaccacaaatacgctgttaccca

SEQ ID NO: 4831718 - DNA, 25 bp, Homo sapien
gatgtaatcgatctgcagagggaac

SEQ ID NO: 4831719 - DNA, 25 bp, Homo sapien
ccgccgatgccaagtgtgtggttcc

SEQ ID NO: 4831720 - DNA, 25 bp, Homo sapien
cacgagtccccatttggctcaaccg

SEQ ID NO: 4831721 - DNA, 25 bp, Homo sapien
cacgcacgctaacacgtggggagcg

SEQ ID NO: 4831722 - DNA, 25 bp, Homo sapien
ggagcgttgcttgcaccacgagtcc

SEQ ID NO: 4831723 - DNA, 25 bp, Homo sapien
taggttttagaatgtctgtcagcag

SEQ ID NO: 4831724 - DNA, 25 bp, Homo sapien
ttagagtgggctgtgcagatagacc

SEQ ID NO: 4831725 - DNA, 25 bp, Homo sapien
tcatgtaattggattaagttaattg

SEQ ID NO: 4831726 - DNA, 25 bp, Homo sapien
gtgggctgtgcagatagacctttcc

SEQ ID NO: 4831727 - DNA, 25 bp, Homo sapien
cacgcacgctaacacgtggggagcg

SEQ ID NO: 4831728 - DNA, 25 bp, Homo sapien
ggagcgttgcttgcaccacgagtcc

SEQ ID NO: 4831729 - DNA, 25 bp, Homo sapien
cacgagtccccatttggctcaaccg

SEQ ID NO: 4831730 - DNA, 25 bp, Homo sapien
ccgccgatgccaagtgtgtggttcc

SEQ ID NO: 4831731 - DNA, 25 bp, Homo sapien
taggttttagaatgtctgtcagcag

SEQ ID NO: 4831732 - DNA, 25 bp, Homo sapien
tcatgtaattggattaagttaattg

SEQ ID NO: 4831733 - DNA, 25 bp, Homo sapien
ttagagtgggctgtgcagatagacc

SEQ ID NO: 4831734 - DNA, 25 bp, Homo sapien
gtgggctgtgcagatagacctttcc

SEQ ID NO: 4831735 - DNA, 25 bp, Homo sapien
ggagcgttgcttgcaccacgagtcc

SEQ ID NO: 4831736 - DNA, 25 bp, Homo sapien
cacgagtccccatttggctcaaccg

SEQ ID NO: 4831737 - DNA, 25 bp, Homo sapien
ccgccgatgccaagtgtgtggttcc

SEQ ID NO: 4831738 - DNA, 25 bp, Homo sapien
cacgcacgctaacacgtggggagcg

SEQ ID NO: 4831739 - DNA, 25 bp, Homo sapien
ccgccgatgccaagtgtgtggttcc

SEQ ID NO: 4831740 - DNA, 25 bp, Homo sapien
cacgcacgctaacacgtggggagcg

SEQ ID NO: 4831741 - DNA, 25 bp, Homo sapien
cacgagtccccatttggctcaaccg

SEQ ID NO: 4831742 - DNA, 25 bp, Homo sapien
ggagcgttgcttgcaccacgagtcc

SEQ ID NO: 4831743 - DNA, 25 bp, Homo sapien
cacgcacgctaacacgtggggagcg

SEQ ID NO: 4831744 - DNA, 25 bp, Homo sapien
cacgagtccccatttggctcaaccg

SEQ ID NO: 4831745 - DNA, 25 bp, Homo sapien
ccgccgatgccaagtgtgtggttcc

SEQ ID NO: 4831746 - DNA, 25 bp, Homo sapien
ggagcgttgcttgcaccacgagtcc

SEQ ID NO: 4831747 - DNA, 25 bp, Homo sapien
gtccccatttggctcaaccgccgat

SEQ ID NO: 4831748 - DNA, 25 bp, Homo sapien
ccgccgatgccaagtgtgtggttcc

SEQ ID NO: 4831749 - DNA, 25 bp, Homo sapien
ggctcaaccgccgatgccaagtgtg

SEQ ID NO: 4831750 - DNA, 25 bp, Homo sapien
ctaacacgtggggagcgttgcttgc

SEQ ID NO: 4831751 - DNA, 25 bp, Homo sapien
gtaaaattccgccaaccgaatctca

SEQ ID NO: 4831752 - DNA, 25 bp, Homo sapien
taaaattccgccaaccgaatctcac

SEQ ID NO: 4831753 - DNA, 25 bp, Homo sapien
aggaccggctgcagttctggatcct

SEQ ID NO: 4831754 - DNA, 25 bp, Homo sapien
agggacagcaaagcgaggaccggct

SEQ ID NO: 4831755 - DNA, 25 bp, Homo sapien
acagggacagcaaagcgaggaccgg

SEQ ID NO: 4831756 - DNA, 25 bp, Homo sapien
ggacagggacagggacagcaaagcg

SEQ ID NO: 4831757 - DNA, 25 bp, Homo sapien
tgcaacaaggagcaggaaagacatc

SEQ ID NO: 4831758 - DNA, 25 bp, Homo sapien
catgcaacaaggagcaggaaagaca

SEQ ID NO: 4831759 - DNA, 25 bp, Homo sapien
tatacatgcaacaaggagcaggaaa

SEQ ID NO: 4831760 - DNA, 25 bp, Homo sapien
cttctatacatgcaacaaggagcag

SEQ ID NO: 4831761 - DNA, 25 bp, Homo sapien
catggggtgaccacagcgtacatca

SEQ ID NO: 4831762 - DNA, 25 bp, Homo sapien
accacagcgtacatcactgaagcca

SEQ ID NO: 4831763 - DNA, 25 bp, Homo sapien
tgaccacagcgtacatcactgaagc

SEQ ID NO: 4831764 - DNA, 25 bp, Homo sapien
tcagcatggggtgaccacagcgtac

SEQ ID NO: 4831765 - DNA, 25 bp, Homo sapien
tcaagtgatccctgcgactcggcat

SEQ ID NO: 4831766 - DNA, 25 bp, Homo sapien
aagtgatccctgcgactcggcatcc

SEQ ID NO: 4831767 - DNA, 25 bp, Homo sapien
gtgatccctgcgactcggcatccca

SEQ ID NO: 4831768 - DNA, 25 bp, Homo sapien
caagtgatccctgcgactcggcatc

SEQ ID NO: 4831769 - DNA, 25 bp, Homo sapien
aataggaatggaagccaaactccga

SEQ ID NO: 4831770 - DNA, 25 bp, Homo sapien
tggaagccaaactccgaattgatga

SEQ ID NO: 4831771 - DNA, 25 bp, Homo sapien
ggaatggaagccaaactccgaattg

SEQ ID NO: 4831772 - DNA, 25 bp, Homo sapien
aatggaagccaaactccgaattgat

SEQ ID NO: 4831773 - DNA, 25 bp, Homo sapien
ccgccttccaccgacgctccttgag

SEQ ID NO: 4831774 - DNA, 25 bp, Homo sapien
agccaccttgtctttgctcttaccg

SEQ ID NO: 4831775 - DNA, 25 bp, Homo sapien
agagggtggacatcggccacagcca

SEQ ID NO: 4831776 - DNA, 25 bp, Homo sapien
gagggtggacatcggccacagccac

SEQ ID NO: 4831777 - DNA, 25 bp, Homo sapien
ttgtctttgctcttaccgtgtgtct

SEQ ID NO: 4831778 - DNA, 25 bp, Homo sapien
atggacaggcccgctctggcaatgc

SEQ ID NO: 4831779 - DNA, 25 bp, Homo sapien
ccatggacaggcccgctctggcaat

SEQ ID NO: 4831780 - DNA, 25 bp, Homo sapien
gcccatggacaggcccgctctggca

SEQ ID NO: 4831781 - DNA, 25 bp, Homo sapien
tggacaggcccgctctggcaatgcc

SEQ ID NO: 4831782 - DNA, 25 bp, Homo sapien
cccatcctgggactgccatccctgc

SEQ ID NO: 4831783 - DNA, 25 bp, Homo sapien
ctcccccatcctgggactgccatcc

SEQ ID NO: 4831784 - DNA, 25 bp, Homo sapien
tcctcccccatcctgggactgccat

SEQ ID NO: 4831785 - DNA, 25 bp, Homo sapien
tccgcgggctctgcctgaacttggg

SEQ ID NO: 4831786 - DNA, 25 bp, Homo sapien
gtgccggtctccttcctgcctggca

SEQ ID NO: 4831787 - DNA, 25 bp, Homo sapien
ttcctgcctggcagcggcgggtcct

SEQ ID NO: 4831788 - DNA, 25 bp, Homo sapien
tctccttcctgcctggcagcggcgg

SEQ ID NO: 4831789 - DNA, 25 bp, Homo sapien
tgggtgccggtctccttcctgcctg

SEQ ID NO: 4831790 - DNA, 25 bp, Homo sapien
actgggcgggggggctctgatcctg

SEQ ID NO: 4831791 - DNA, 25 bp, Homo sapien
ggcgggggggctctgatcctgccca

SEQ ID NO: 4831792 - DNA, 25 bp, Homo sapien
acagcatccaggagcaaccccaaga

SEQ ID NO: 4831793 - DNA, 25 bp, Homo sapien
caagctctgaatgcggtaacgtgga

SEQ ID NO: 4831794 - DNA, 25 bp, Homo sapien
gaaatcactgctgatcctcgtacca

SEQ ID NO: 4831795 - DNA, 25 bp, Homo sapien
aatcactgctgatcctcgtaccagc

SEQ ID NO: 4831796 - DNA, 25 bp, Homo sapien
aagaaatcactgctgatcctcgtac

SEQ ID NO: 4831797 - DNA, 25 bp, Homo sapien
aaagaaatcactgctgatcctcgta

SEQ ID NO: 4831798 - DNA, 25 bp, Homo sapien
caaatacggtggcaagagctatccc

SEQ ID NO: 4831799 - DNA, 25 bp, Homo sapien
agctcggcgtcccagccagacaaga

SEQ ID NO: 4831800 - DNA, 25 bp, Homo sapien
actgtccagcacgtgcctgctcctg

SEQ ID NO: 4831801 - DNA, 25 bp, Homo sapien
gcaaacagtgtgcagagggttgcaa

SEQ ID NO: 4831802 - DNA, 25 bp, Homo sapien
aacatcttcctggaagggcctggcc

SEQ ID NO: 4831803 - DNA, 25 bp, Homo sapien
tctgtggcttgaaaggctgtcggct

SEQ ID NO: 4831804 - DNA, 25 bp, Homo sapien
taagttgcaagatgtaggtgcctgg

SEQ ID NO: 4831805 - DNA, 25 bp, Homo sapien
cttgtccctcagaacatcttcctgg

SEQ ID NO: 4831806 - DNA, 25 bp, Homo sapien
gctgccactctgagggatggagccc

SEQ ID NO: 4831807 - DNA, 25 bp, Homo sapien
gaaaacccagtgaggccggctgtct

SEQ ID NO: 4831808 - DNA, 25 bp, Homo sapien
tctgagggatggagcccacaaatga

SEQ ID NO: 4831809 - DNA, 25 bp, Homo sapien
cactctgagggatggagcccacaaa

SEQ ID NO: 4831810 - DNA, 25 bp, Homo sapien
cttcaagtatctgagcagctcctgt

SEQ ID NO: 4831811 - DNA, 25 bp, Homo sapien
atctgcacactgggggctgtttgcc

SEQ ID NO: 4831812 - DNA, 25 bp, Homo sapien
tcctccttcaagtatctgagcagct

SEQ ID NO: 4831813 - DNA, 25 bp, Homo sapien
tgggggctgtttgccttctccattc

SEQ ID NO: 4831814 - DNA, 25 bp, Homo sapien
gctcctggtcttgcaaactgtggtt

SEQ ID NO: 4831815 - DNA, 25 bp, Homo sapien
tgctcctggtcttgcaaactgtggt

SEQ ID NO: 4831816 - DNA, 25 bp, Homo sapien
tggcattggtctcattggctgaggt

SEQ ID NO: 4831817 - DNA, 25 bp, Homo sapien
agttggcattggtctcattggctga

SEQ ID NO: 4831818 - DNA, 25 bp, Homo sapien
aggaagttggcattggtctcattgg

SEQ ID NO: 4831819 - DNA, 25 bp, Homo sapien
gaagttggcattggtctcattggct

SEQ ID NO: 4831820 - DNA, 25 bp, Homo sapien
ttgatgtgtggagtccggtgcctgg

SEQ ID NO: 4831821 - DNA, 25 bp, Homo sapien
gttgatgtgtggagtccggtgcctg

SEQ ID NO: 4831822 - DNA, 25 bp, Homo sapien
gatgtgtggagtccggtgcctggtt

SEQ ID NO: 4831823 - DNA, 25 bp, Homo sapien
tgatgtgtggagtccggtgcctggt

SEQ ID NO: 4831824 - DNA, 25 bp, Homo sapien
aagacacggagcacattcctgttag

SEQ ID NO: 4831825 - DNA, 25 bp, Homo sapien
agaagacacggagcacattcctgtt

SEQ ID NO: 4831826 - DNA, 25 bp, Homo sapien
gcaggaagaagacacggagcacatt

SEQ ID NO: 4831827 - DNA, 25 bp, Homo sapien
aggaagaagacacggagcacattcc

SEQ ID NO: 4831828 - DNA, 25 bp, Homo sapien
agtgggaaatggtaggatgttctcc

SEQ ID NO: 4831829 - DNA, 25 bp, Homo sapien
gtgggaaatggtaggatgttctccc

SEQ ID NO: 4831830 - DNA, 25 bp, Homo sapien
gtaagtgggaaatggtaggatgttc

SEQ ID NO: 4831831 - DNA, 25 bp, Homo sapien
ggaacatcgtgggtctgccgtggcg

SEQ ID NO: 4831832 - DNA, 25 bp, Homo sapien
aacatcgtgggtctgccgtggcgct

SEQ ID NO: 4831833 - DNA, 25 bp, Homo sapien
ccgctggaacatcgtgggtctgccg

SEQ ID NO: 4831834 - DNA, 25 bp, Homo sapien
ctggaacatcgtgggtctgccgtgg

SEQ ID NO: 4831835 - DNA, 25 bp, Homo sapien
ctttcaagttgacatgaagacatgg

SEQ ID NO: 4831836 - DNA, 25 bp, Homo sapien
tcaagttgacatgaagacatggcca

SEQ ID NO: 4831837 - DNA, 25 bp, Homo sapien
ttcaagttgacatgaagacatggcc

SEQ ID NO: 4831838 - DNA, 25 bp, Homo sapien
caagttgacatgaagacatggccac

SEQ ID NO: 4831839 - DNA, 25 bp, Homo sapien
ccgagatatagatatttccctggcg

SEQ ID NO: 4831840 - DNA, 25 bp, Homo sapien
gagatatagatatttccctggcgat

SEQ ID NO: 4831841 - DNA, 25 bp, Homo sapien
gatatagatatttccctggcgatga

SEQ ID NO: 4831842 - DNA, 25 bp, Homo sapien
gccgagatatagatatttccctggc

SEQ ID NO: 4831843 - DNA, 25 bp, Homo sapien
agttcactctcacactggggacctg

SEQ ID NO: 4831844 - DNA, 25 bp, Homo sapien
ttgaccaacatctgggtttttggat

SEQ ID NO: 4831845 - DNA, 25 bp, Homo sapien
cctgagacagggtgttttgaccaac

SEQ ID NO: 4831846 - DNA, 25 bp, Homo sapien
gctggactacacaggctgaagttct

SEQ ID NO: 4831847 - DNA, 25 bp, Homo sapien
cccaagcctttattgaccgcttgtg

SEQ ID NO: 4831848 - DNA, 25 bp, Homo sapien
ctttattgaccgcttgtgaatgatc

SEQ ID NO: 4831849 - DNA, 25 bp, Homo sapien
caagcctttattgaccgcttgtgaa

SEQ ID NO: 4831850 - DNA, 25 bp, Homo sapien
agcctttattgaccgcttgtgaatg

SEQ ID NO: 4831851 - DNA, 25 bp, Homo sapien
cctgcaaacgttggcccctgaatca

SEQ ID NO: 4831852 - DNA, 25 bp, Homo sapien
gttggcccctgaatcaccgggccag

SEQ ID NO: 4831853 - DNA, 25 bp, Homo sapien
ggtgtcctgcaaacgttggcccctg

SEQ ID NO: 4831854 - DNA, 25 bp, Homo sapien
ggcccctgaatcaccgggccagtgt

SEQ ID NO: 4831855 - DNA, 25 bp, Homo sapien
gacagcgcgtgacggcctccgagac

SEQ ID NO: 4831856 - DNA, 25 bp, Homo sapien
ttttagcggcaactccgaagggcgc

SEQ ID NO: 4831857 - DNA, 25 bp, Homo sapien
gttggtattttagcggcaactccga

SEQ ID NO: 4831858 - DNA, 25 bp, Homo sapien
ggttgaagttggtattttagcggca

SEQ ID NO: 4831859 - DNA, 25 bp, Homo sapien
accgagaggccgctcgggccgtgtc

SEQ ID NO: 4831860 - DNA, 25 bp, Homo sapien
gaccggcacccagacaggtggcgac

SEQ ID NO: 4831861 - DNA, 25 bp, Homo sapien
agcgcacagcccgaggactgcgaga

SEQ ID NO: 4831862 - DNA, 25 bp, Homo sapien
gcacagcccgaggactgcgagaacg

SEQ ID NO: 4831863 - DNA, 25 bp, Homo sapien
aggtgcattcatgtcatcctgcagg

SEQ ID NO: 4831864 - DNA, 25 bp, Homo sapien
cgagttttgagcagcctcgggtttc

SEQ ID NO: 4831865 - DNA, 25 bp, Homo sapien
taggcaatgggaaggtgcattcatg

SEQ ID NO: 4831866 - DNA, 25 bp, Homo sapien
ggaattctccacgagttttgagcag

SEQ ID NO: 4831867 - DNA, 25 bp, Homo sapien
attattgtgaggacatccttagagg

SEQ ID NO: 4831868 - DNA, 25 bp, Homo sapien
agtgccctgcggaggctgggcagca

SEQ ID NO: 4831869 - DNA, 25 bp, Homo sapien
gctgggcagcagagcattcgaatct

SEQ ID NO: 4831870 - DNA, 25 bp, Homo sapien
ggctgggcagcagagcattcgaatc

SEQ ID NO: 4831871 - DNA, 25 bp, Homo sapien
gggcagcagagcattcgaatctcat

SEQ ID NO: 4831872 - DNA, 25 bp, Homo sapien
tcctgctccttgttgcatgtataga

SEQ ID NO: 4831873 - DNA, 25 bp, Homo sapien
acagatgtctttcctgctccttgtt

SEQ ID NO: 4831874 - DNA, 25 bp, Homo sapien
tgtctttcctgctccttgttgcatg

SEQ ID NO: 4831875 - DNA, 25 bp, Homo sapien
tctttcctgctccttgttgcatgta

SEQ ID NO: 4831876 - DNA, 25 bp, Homo sapien
ggataatcaagataacgaccctcaa

SEQ ID NO: 4831877 - DNA, 25 bp, Homo sapien
gatacggatactttctaggtgatct

SEQ ID NO: 4831878 - DNA, 25 bp, Homo sapien
agcagagagttgatcttattcattc

SEQ ID NO: 4831879 - DNA, 25 bp, Homo sapien
acgaccctcaacagcggcggagagg

SEQ ID NO: 4831880 - DNA, 25 bp, Homo sapien
cttctgtggaactcccgtgtcggtg

SEQ ID NO: 4831881 - DNA, 25 bp, Homo sapien
tcggtgaacttttgtgccacggccc

SEQ ID NO: 4831882 - DNA, 25 bp, Homo sapien
tgtcggtgaacttttgtgccacggc

SEQ ID NO: 4831883 - DNA, 25 bp, Homo sapien
ctgtggaactcccgtgtcggtgaac

SEQ ID NO: 4831884 - DNA, 25 bp, Homo sapien
ctgaaattacacgtctactttcttt

SEQ ID NO: 4831885 - DNA, 25 bp, Homo sapien
tgaaattacacgtctactttctttc

SEQ ID NO: 4831886 - DNA, 25 bp, Homo sapien
ggctggcgctgagatgggcaggtgc

SEQ ID NO: 4831887 - DNA, 25 bp, Homo sapien
gctggcgctgagatgggcaggtgct

SEQ ID NO: 4831888 - DNA, 25 bp, Homo sapien
tggtcttctcccacacgtggagacg

SEQ ID NO: 4831889 - DNA, 25 bp, Homo sapien
ggtcttctcccacacgtggagacgg

SEQ ID NO: 4831890 - DNA, 25 bp, Homo sapien
gtcttctcccacacgtggagacgga

SEQ ID NO: 4831891 - DNA, 25 bp, Homo sapien
gaagaagtgccatatcgtatcgacg

SEQ ID NO: 4831892 - DNA, 25 bp, Homo sapien
gggaagaagtgccatatcgtatcga

SEQ ID NO: 4831893 - DNA, 25 bp, Homo sapien
gaagtgccatatcgtatcgacgtct

SEQ ID NO: 4831894 - DNA, 25 bp, Homo sapien
gtgccatatcgtatcgacgtcttac

SEQ ID NO: 4831895 - DNA, 25 bp, Homo sapien
tcggtcaaatctgtagaacacaatg

SEQ ID NO: 4831896 - DNA, 25 bp, Homo sapien
cagtcggtcaaatctgtagaacaca

SEQ ID NO: 4831897 - DNA, 25 bp, Homo sapien
ccagtcggtcaaatctgtagaacac

SEQ ID NO: 4831898 - DNA, 25 bp, Homo sapien
caccagtcggtcaaatctgtagaac

SEQ ID NO: 4831899 - DNA, 25 bp, Homo sapien
gttaagcacgttggatattcacaca

SEQ ID NO: 4831900 - DNA, 25 bp, Homo sapien
atgtcgatggttaagcacgttggat

SEQ ID NO: 4831901 - DNA, 25 bp, Homo sapien
aggaagccacctgctaactccctgc

SEQ ID NO: 4831902 - DNA, 25 bp, Homo sapien
gatggttaagcacgttggatattca

SEQ ID NO: 4831903 - DNA, 25 bp, Homo sapien
tttcaggggtggactgttgggccac

SEQ ID NO: 4831904 - DNA, 25 bp, Homo sapien
ttttcaggggtggactgttgggcca

SEQ ID NO: 4831905 - DNA, 25 bp, Homo sapien
cgcctttttcaggggtggactgttg

SEQ ID NO: 4831906 - DNA, 25 bp, Homo sapien
ttggcccaagatgtggggtcccgac

SEQ ID NO: 4831907 - DNA, 25 bp, Homo sapien
tcttggcccaagatgtggggtcccg

SEQ ID NO: 4831908 - DNA, 25 bp, Homo sapien
atgtggggtcccgacgtgccatcat

SEQ ID NO: 4831909 - DNA, 25 bp, Homo sapien
ccaagatgtggggtcccgacgtgcc

SEQ ID NO: 4831910 - DNA, 25 bp, Homo sapien
tcttcttcatcgggcgggggagccc

SEQ ID NO: 4831911 - DNA, 25 bp, Homo sapien
gatcttcttcatcgggcgggggagc

SEQ ID NO: 4831912 - DNA, 25 bp, Homo sapien
atcttcttcatcgggcgggggagcc

SEQ ID NO: 4831913 - DNA, 25 bp, Homo sapien
cttggcccaactggggccctccgct

SEQ ID NO: 4831914 - DNA, 25 bp, Homo sapien
gactcaaggttccaaggggcacgat

SEQ ID NO: 4831915 - DNA, 25 bp, Homo sapien
tgtcaacaacgcagccaaacgtggc

SEQ ID NO: 4831916 - DNA, 25 bp, Homo sapien
gcagccaaacgtggctacacaggac

SEQ ID NO: 4831917 - DNA, 25 bp, Homo sapien
atggtgaagccgatgtcaacaacgc

SEQ ID NO: 4831918 - DNA, 25 bp, Homo sapien
gggccgttaagtgctgggagagttc

SEQ ID NO: 4831919 - DNA, 25 bp, Homo sapien
ggccgttaagtgctgggagagttcg

SEQ ID NO: 4831920 - DNA, 25 bp, Homo sapien
ccgttaagtgctgggagagttcgga

SEQ ID NO: 4831921 - DNA, 25 bp, Homo sapien
ttaagtgctgggagagttcggatac

SEQ ID NO: 4831922 - DNA, 25 bp, Homo sapien
agcacttcatggggcacctggtact

SEQ ID NO: 4831923 - DNA, 25 bp, Homo sapien
cagcacttcatggggcacctggtac

SEQ ID NO: 4831924 - DNA, 25 bp, Homo sapien
tcgtggggaacctgcacgaagcgcc

SEQ ID NO: 4831925 - DNA, 25 bp, Homo sapien
actaaggactgtgatttggattcca

SEQ ID NO: 4831926 - DNA, 25 bp, Homo sapien
gagacaccatgtccttaggaggcag

SEQ ID NO: 4831927 - DNA, 25 bp, Homo sapien
ggacacggagctccggcctatttct

SEQ ID NO: 4831928 - DNA, 25 bp, Homo sapien
gatccttttccattcggcagcggct

SEQ ID NO: 4831929 - DNA, 25 bp, Homo sapien
atccttttccattcggcagcggctt

SEQ ID NO: 4831930 - DNA, 25 bp, Homo sapien
tccttttccattcggcagcggcttc

SEQ ID NO: 4831931 - DNA, 25 bp, Homo sapien
ggatccttttccattcggcagcggc

SEQ ID NO: 4831932 - DNA, 25 bp, Homo sapien
ctgaaaggaaatcaaccagggtgac

SEQ ID NO: 4831933 - DNA, 25 bp, Homo sapien
ccgatttcctcccgcagacgggaag

SEQ ID NO: 4831934 - DNA, 25 bp, Homo sapien
tggagtccctgaccccaagaaggca

SEQ ID NO: 4831935 - DNA, 25 bp, Homo sapien
ctggaaggatcgtggagtccctgac

SEQ ID NO: 4831936 - DNA, 25 bp, Homo sapien
aggatcgtggagtccctgaccccaa

SEQ ID NO: 4831937 - DNA, 25 bp, Homo sapien
ggactaatttcctcatgccgctagg

SEQ ID NO: 4831938 - DNA, 25 bp, Homo sapien
gatgccttcgcctggaatccaattg

SEQ ID NO: 4831939 - DNA, 25 bp, Homo sapien
catgaagtggaacggactaatgccc

SEQ ID NO: 4831940 - DNA, 25 bp, Homo sapien
gggacgtcttctctgaacacatgca

SEQ ID NO: 4831941 - DNA, 25 bp, Homo sapien
ggagcccctgccagacatttcggta

SEQ ID NO: 4831942 - DNA, 25 bp, Homo sapien
aagcgcggcctcttactggttgtgt

SEQ ID NO: 4831943 - DNA, 25 bp, Homo sapien
catttcggtagctgagcgatcagcg

SEQ ID NO: 4831944 - DNA, 25 bp, Homo sapien
cgatcagcgaggacagggtccaagc

SEQ ID NO: 4831945 - DNA, 25 bp, Homo sapien
gatctggaagggacccagtctcggt

SEQ ID NO: 4831946 - DNA, 25 bp, Homo sapien
tgtgtcggcttcaccacgaggagag

SEQ ID NO: 4831947 - DNA, 25 bp, Homo sapien
ggtcaccgcaggacgtttgtcttgt

SEQ ID NO: 4831948 - DNA, 25 bp, Homo sapien
gattggagcctaggcccaagctgtg

SEQ ID NO: 4831949 - DNA, 25 bp, Homo sapien
agcagagagttgatcttattcattc

SEQ ID NO: 4831950 - DNA, 25 bp, Homo sapien
ggataatcaagataacgaccctcaa

SEQ ID NO: 4831951 - DNA, 25 bp, Homo sapien
acgaccctcaacagcggcggagagg

SEQ ID NO: 4831952 - DNA, 25 bp, Homo sapien
gatacggatactttctaggtgatct

SEQ ID NO: 4831953 - DNA, 25 bp, Homo sapien
aatccaattacatgacctggaaagg

SEQ ID NO: 4831954 - DNA, 25 bp, Homo sapien
gaaaggtctatctgcacagcccact

SEQ ID NO: 4831955 - DNA, 25 bp, Homo sapien
cttaattgcaattaacttaatccaa

SEQ ID NO: 4831956 - DNA, 25 bp, Homo sapien
cctggaaaggtctatctgcacagcc

SEQ ID NO: 4831957 - DNA, 25 bp, Homo sapien
tgaaattacacgtctactttctttc

SEQ ID NO: 4831958 - DNA, 25 bp, Homo sapien
ggctggcgctgagatgggcaggtgc

SEQ ID NO: 4831959 - DNA, 25 bp, Homo sapien
ctgaaattacacgtctactttcttt

SEQ ID NO: 4831960 - DNA, 25 bp, Homo sapien
gctggcgctgagatgggcaggtgct

SEQ ID NO: 4831961 - DNA, 25 bp, Homo sapien
ggaagaagtgccgtatcgtatcgac

SEQ ID NO: 4831962 - DNA, 25 bp, Homo sapien
gggaagaagtgccgtatcgtatcga

SEQ ID NO: 4831963 - DNA, 25 bp, Homo sapien
ggggaagaagtgccgtatcgtatcg

SEQ ID NO: 4831964 - DNA, 25 bp, Homo sapien
tgtgctgtgcgcatcctcggatatt

SEQ ID NO: 4831965 - DNA, 25 bp, Homo sapien
cacaatgtgctgtgcgcatcctcgg

SEQ ID NO: 4831966 - DNA, 25 bp, Homo sapien
tcctcggatattgtgtgttcctctg

SEQ ID NO: 4831967 - DNA, 25 bp, Homo sapien
tgtgcgcatcctcggatattgtgtg

SEQ ID NO: 4831968 - DNA, 25 bp, Homo sapien
gttaagcacgttggatattcacaca

SEQ ID NO: 4831969 - DNA, 25 bp, Homo sapien
gatggttaagcacgttggatattca

SEQ ID NO: 4831970 - DNA, 25 bp, Homo sapien
aggaagccacctgctaactccctgc

SEQ ID NO: 4831971 - DNA, 25 bp, Homo sapien
atgtcgatggttaagcacgttggat

SEQ ID NO: 4831972 - DNA, 25 bp, Homo sapien
ttttcaggggtggactgttgggcca

SEQ ID NO: 4831973 - DNA, 25 bp, Homo sapien
tttcaggggtggactgttgggccac

SEQ ID NO: 4831974 - DNA, 25 bp, Homo sapien
cgcctttttcaggggtggactgttg

SEQ ID NO: 4831975 - DNA, 25 bp, Homo sapien
aagatttggggtcccgacgtgccat

SEQ ID NO: 4831976 - DNA, 25 bp, Homo sapien
tcttcttcatcgggcgggggagccc

SEQ ID NO: 4831977 - DNA, 25 bp, Homo sapien
cttggcccaactggggccctccgct

SEQ ID NO: 4831978 - DNA, 25 bp, Homo sapien
atcttcttcatcgggcgggggagcc

SEQ ID NO: 4831979 - DNA, 25 bp, Homo sapien
gatcttcttcatcgggcgggggagc

SEQ ID NO: 4831980 - DNA, 25 bp, Homo sapien
gactcaaggttccaaggggcacgat

SEQ ID NO: 4831981 - DNA, 25 bp, Homo sapien
atggtgaagccgatgtcaacaacgc

SEQ ID NO: 4831982 - DNA, 25 bp, Homo sapien
gcagccaaacgtggctacacaggac

SEQ ID NO: 4831983 - DNA, 25 bp, Homo sapien
acgatgttccctcgcaaagcccatg

SEQ ID NO: 4831984 - DNA, 25 bp, Homo sapien
agcacttcatggggcacctggtact

SEQ ID NO: 4831985 - DNA, 25 bp, Homo sapien
cagcacttcatggggcacctggtac

SEQ ID NO: 4831986 - DNA, 25 bp, Homo sapien
tccttttccattcggcagcggcttc

SEQ ID NO: 4831987 - DNA, 25 bp, Homo sapien
atccttttccattcggcagcggctt

SEQ ID NO: 4831988 - DNA, 25 bp, Homo sapien
gatccttttccattcggcagcggct

SEQ ID NO: 4831989 - DNA, 25 bp, Homo sapien
ggatccttttccattcggcagcggc

SEQ ID NO: 4831990 - DNA, 25 bp, Homo sapien
cgcagacgggaagctgaaaggaaat

SEQ ID NO: 4831991 - DNA, 25 bp, Homo sapien
agctgaaaggaaatcaaccagggtg

SEQ ID NO: 4831992 - DNA, 25 bp, Homo sapien
ctgaaaggaaatcaaccagggtgac

SEQ ID NO: 4831993 - DNA, 25 bp, Homo sapien
gacgggaagctgaaaggaaatcaac

SEQ ID NO: 4831994 - DNA, 25 bp, Homo sapien
ggtcaccgcaggacgtttgtcttgt

SEQ ID NO: 4831995 - DNA, 25 bp, Homo sapien
gatctggaagggacccagtctcggt

SEQ ID NO: 4831996 - DNA, 25 bp, Homo sapien
tgtgtcggcttcaccacgaggagag

SEQ ID NO: 4831997 - DNA, 25 bp, Homo sapien
gattggagcctaggcccaagctgtg

SEQ ID NO: 4831998 - DNA, 25 bp, Homo sapien
aaggcctgctgacgaccccctgtgg

SEQ ID NO: 4831999 - DNA, 25 bp, Homo sapien
gaaggcctgctgacgaccccctgtg

SEQ ID NO: 4832000 - DNA, 25 bp, Homo sapien
gaaaggtctatctgcacagcccact

SEQ ID NO: 4832001 - DNA, 25 bp, Homo sapien
cctggaaaggtctatctgcacagcc

SEQ ID NO: 4832002 - DNA, 25 bp, Homo sapien
aatccaattacatgacctggaaagg

SEQ ID NO: 4832003 - DNA, 25 bp, Homo sapien
cttaattgcaattaacttaatccaa

SEQ ID NO: 4832004 - DNA, 25 bp, Homo sapien
gctggcgctgagatgggcaggtgct

SEQ ID NO: 4832005 - DNA, 25 bp, Homo sapien
tgaaattacacgtctactttctttc

SEQ ID NO: 4832006 - DNA, 25 bp, Homo sapien
ctgaaattacacgtctactttcttt

SEQ ID NO: 4832007 - DNA, 25 bp, Homo sapien
ggctggcgctgagatgggcaggtgc

SEQ ID NO: 4832008 - DNA, 25 bp, Homo sapien
gggaagaagtgccgtatcgtatcga

SEQ ID NO: 4832009 - DNA, 25 bp, Homo sapien
ggggaagaagtgccgtatcgtatcg

SEQ ID NO: 4832010 - DNA, 25 bp, Homo sapien
ggaagaagtgccgtatcgtatcgac

SEQ ID NO: 4832011 - DNA, 25 bp, Homo sapien
tgtgcgcatcctcggatattgtgtg

SEQ ID NO: 4832012 - DNA, 25 bp, Homo sapien
cacaatgtgctgtgcgcatcctcgg

SEQ ID NO: 4832013 - DNA, 25 bp, Homo sapien
tgtgctgtgcgcatcctcggatatt

SEQ ID NO: 4832014 - DNA, 25 bp, Homo sapien
tcctcggatattgtgtgttcctctg

SEQ ID NO: 4832015 - DNA, 25 bp, Homo sapien
gatggttaagcacgttggatattca

SEQ ID NO: 4832016 - DNA, 25 bp, Homo sapien
aggaagccacctgctaactccctgc

SEQ ID NO: 4832017 - DNA, 25 bp, Homo sapien
gttaagcacgttggatattcacaca

SEQ ID NO: 4832018 - DNA, 25 bp, Homo sapien
atgtcgatggttaagcacgttggat

SEQ ID NO: 4832019 - DNA, 25 bp, Homo sapien
tttcaggggtggactgttgggccac

SEQ ID NO: 4832020 - DNA, 25 bp, Homo sapien
ttttcaggggtggactgttgggcca

SEQ ID NO: 4832021 - DNA, 25 bp, Homo sapien
cgcctttttcaggggtggactgttg

SEQ ID NO: 4832022 - DNA, 25 bp, Homo sapien
aagatttggggtcccgacgtgccat

SEQ ID NO: 4832023 - DNA, 25 bp, Homo sapien
tcttcttcatcgggcgggggagccc

SEQ ID NO: 4832024 - DNA, 25 bp, Homo sapien
atcttcttcatcgggcgggggagcc

SEQ ID NO: 4832025 - DNA, 25 bp, Homo sapien
cttggcccaactggggccctccgct

SEQ ID NO: 4832026 - DNA, 25 bp, Homo sapien
gatcttcttcatcgggcgggggagc

SEQ ID NO: 4832027 - DNA, 25 bp, Homo sapien
atggtgaagccgatgtcaacaacgc

SEQ ID NO: 4832028 - DNA, 25 bp, Homo sapien
gactcaaggttccaaggggcacgat

SEQ ID NO: 4832029 - DNA, 25 bp, Homo sapien
gcagccaaacgtggctacacaggac

SEQ ID NO: 4832030 - DNA, 25 bp, Homo sapien
acgatgttccctcgcaaagcccatg

SEQ ID NO: 4832031 - DNA, 25 bp, Homo sapien
agcacttcatggggcacctggtact

SEQ ID NO: 4832032 - DNA, 25 bp, Homo sapien
cagcacttcatggggcacctggtac

SEQ ID NO: 4832033 - DNA, 25 bp, Homo sapien
atccttttccattcggcagcggctt

SEQ ID NO: 4832034 - DNA, 25 bp, Homo sapien
ggatccttttccattcggcagcggc

SEQ ID NO: 4832035 - DNA, 25 bp, Homo sapien
tccttttccattcggcagcggcttc

SEQ ID NO: 4832036 - DNA, 25 bp, Homo sapien
gatccttttccattcggcagcggct

SEQ ID NO: 4832037 - DNA, 25 bp, Homo sapien
ctgaaaggaaatcaaccagggtgac

SEQ ID NO: 4832038 - DNA, 25 bp, Homo sapien
cgcagacgggaagctgaaaggaaat

SEQ ID NO: 4832039 - DNA, 25 bp, Homo sapien
gacgggaagctgaaaggaaatcaac

SEQ ID NO: 4832040 - DNA, 25 bp, Homo sapien
agctgaaaggaaatcaaccagggtg

SEQ ID NO: 4832041 - DNA, 25 bp, Homo sapien
gattggagcctaggcccaagctgtg

SEQ ID NO: 4832042 - DNA, 25 bp, Homo sapien
ggtcaccgcaggacgtttgtcttgt

SEQ ID NO: 4832043 - DNA, 25 bp, Homo sapien
tgtgtcggcttcaccacgaggagag

SEQ ID NO: 4832044 - DNA, 25 bp, Homo sapien
gatctggaagggacccagtctcggt

SEQ ID NO: 4832045 - DNA, 25 bp, Homo sapien
aaggcctgctgacgaccccctgtgg

SEQ ID NO: 4832046 - DNA, 25 bp, Homo sapien
gaaggcctgctgacgaccccctgtg

SEQ ID NO: 4832047 - DNA, 25 bp, Homo sapien
gaaaggtctatctgcacagcccact

SEQ ID NO: 4832048 - DNA, 25 bp, Homo sapien
aatccaattacatgacctggaaagg

SEQ ID NO: 4832049 - DNA, 25 bp, Homo sapien
cttaattgcaattaacttaatccaa

SEQ ID NO: 4832050 - DNA, 25 bp, Homo sapien
cctggaaaggtctatctgcacagcc

SEQ ID NO: 4832051 - DNA, 25 bp, Homo sapien
ggctggcgctgagatgggcaggtgc

SEQ ID NO: 4832052 - DNA, 25 bp, Homo sapien
ctgaaattacacgtctactttcttt

SEQ ID NO: 4832053 - DNA, 25 bp, Homo sapien
gctggcgctgagatgggcaggtgct

SEQ ID NO: 4832054 - DNA, 25 bp, Homo sapien
tgaaattacacgtctactttctttc

SEQ ID NO: 4832055 - DNA, 25 bp, Homo sapien
ggggaagaagtgccgtatcgtatcg

SEQ ID NO: 4832056 - DNA, 25 bp, Homo sapien
ggaagaagtgccgtatcgtatcgac

SEQ ID NO: 4832057 - DNA, 25 bp, Homo sapien
gggaagaagtgccgtatcgtatcga

SEQ ID NO: 4832058 - DNA, 25 bp, Homo sapien
tgtgcgcatcctcggatattgtgtg

SEQ ID NO: 4832059 - DNA, 25 bp, Homo sapien
tcctcggatattgtgtgttcctctg

SEQ ID NO: 4832060 - DNA, 25 bp, Homo sapien
cacaatgtgctgtgcgcatcctcgg

SEQ ID NO: 4832061 - DNA, 25 bp, Homo sapien
tgtgctgtgcgcatcctcggatatt

SEQ ID NO: 4832062 - DNA, 25 bp, Homo sapien
aggaagccacctgctaactccctgc

SEQ ID NO: 4832063 - DNA, 25 bp, Homo sapien
gatggttaagcacgttggatattca

SEQ ID NO: 4832064 - DNA, 25 bp, Homo sapien
atgtcgatggttaagcacgttggat

SEQ ID NO: 4832065 - DNA, 25 bp, Homo sapien
gttaagcacgttggatattcacaca

SEQ ID NO: 4832066 - DNA, 25 bp, Homo sapien
tttcaggggtggactgttgggccac

SEQ ID NO: 4832067 - DNA, 25 bp, Homo sapien
ttttcaggggtggactgttgggcca

SEQ ID NO: 4832068 - DNA, 25 bp, Homo sapien
cgcctttttcaggggtggactgttg

SEQ ID NO: 4832069 - DNA, 25 bp, Homo sapien
aagatttggggtcccgacgtgccat

SEQ ID NO: 4832070 - DNA, 25 bp, Homo sapien
cttggcccaactggggccctccgct

SEQ ID NO: 4832071 - DNA, 25 bp, Homo sapien
gatcttcttcatcgggcgggggagc

SEQ ID NO: 4832072 - DNA, 25 bp, Homo sapien
gactcaaggttccaaggggcacgat

SEQ ID NO: 4832073 - DNA, 25 bp, Homo sapien
gcagccaaacgtggctacacaggac

SEQ ID NO: 4832074 - DNA, 25 bp, Homo sapien
atggtgaagccgatgtcaacaacgc

SEQ ID NO: 4832075 - DNA, 25 bp, Homo sapien
acgatgttccctcgcaaagcccatg

SEQ ID NO: 4832076 - DNA, 25 bp, Homo sapien
agcacttcatggggcacctggtact

SEQ ID NO: 4832077 - DNA, 25 bp, Homo sapien
cagcacttcatggggcacctggtac

SEQ ID NO: 4832078 - DNA, 25 bp, Homo sapien
gatccttttccattcggcagcggct

SEQ ID NO: 4832079 - DNA, 25 bp, Homo sapien
tccttttccattcggcagcggcttc

SEQ ID NO: 4832080 - DNA, 25 bp, Homo sapien
atccttttccattcggcagcggctt

SEQ ID NO: 4832081 - DNA, 25 bp, Homo sapien
ggatccttttccattcggcagcggc

SEQ ID NO: 4832082 - DNA, 25 bp, Homo sapien
ctgaaaggaaatcaaccagggtgac

SEQ ID NO: 4832083 - DNA, 25 bp, Homo sapien
agctgaaaggaaatcaaccagggtg

SEQ ID NO: 4832084 - DNA, 25 bp, Homo sapien
gacgggaagctgaaaggaaatcaac

SEQ ID NO: 4832085 - DNA, 25 bp, Homo sapien
cgcagacgggaagctgaaaggaaat

SEQ ID NO: 4832086 - DNA, 25 bp, Homo sapien
tgtgtggaccggcattggcccgctt

SEQ ID NO: 4832087 - DNA, 25 bp, Homo sapien
tggttgtgtggaccggcattggccc

SEQ ID NO: 4832088 - DNA, 25 bp, Homo sapien
gtggaccggcattggcccgcttgca

SEQ ID NO: 4832089 - DNA, 25 bp, Homo sapien
tggaccggcattggcccgcttgcaa

SEQ ID NO: 4832090 - DNA, 25 bp, Homo sapien
gctgtgtgtcggcttcaccacgagg

SEQ ID NO: 4832091 - DNA, 25 bp, Homo sapien
cctggagcaggccgtgggttttgga

SEQ ID NO: 4832092 - DNA, 25 bp, Homo sapien
tcggcttcaccacgaggagaggctc

SEQ ID NO: 4832093 - DNA, 25 bp, Homo sapien
tcctttggtccaagacttgaggagg

SEQ ID NO: 4832094 - DNA, 25 bp, Homo sapien
gatctggaagggacccagtctcggt

SEQ ID NO: 4832095 - DNA, 25 bp, Homo sapien
tctgagcgaggaaggctcccggctt

SEQ ID NO: 4832096 - DNA, 25 bp, Homo sapien
gattggagcctaggcccaagctgtg

SEQ ID NO: 4832097 - DNA, 25 bp, Homo sapien
tccaagttcggttgcggctggcgga

SEQ ID NO: 4832098 - DNA, 25 bp, Homo sapien
aaggcctgctgacgaccccctgtgg

SEQ ID NO: 4832099 - DNA, 25 bp, Homo sapien
gaaggcctgctgacgaccccctgtg

SEQ ID NO: 4832100 - DNA, 25 bp, Homo sapien
aatccaattacatgacctggaaagg

SEQ ID NO: 4832101 - DNA, 25 bp, Homo sapien
cttaattgcaattaacttaatccaa

SEQ ID NO: 4832102 - DNA, 25 bp, Homo sapien
cctggaaaggtctatctgcacagcc

SEQ ID NO: 4832103 - DNA, 25 bp, Homo sapien
gaaaggtctatctgcacagcccact

SEQ ID NO: 4832104 - DNA, 25 bp, Homo sapien
tgaaattacacgtctactttctttc

SEQ ID NO: 4832105 - DNA, 25 bp, Homo sapien
ctgaaattacacgtctactttcttt

SEQ ID NO: 4832106 - DNA, 25 bp, Homo sapien
ggctggcgctgagatgggcaggtgc

SEQ ID NO: 4832107 - DNA, 25 bp, Homo sapien
gctggcgctgagatgggcaggtgct

SEQ ID NO: 4832108 - DNA, 25 bp, Homo sapien
ggaagaagtgccgtatcgtatcgac

SEQ ID NO: 4832109 - DNA, 25 bp, Homo sapien
ggggaagaagtgccgtatcgtatcg

SEQ ID NO: 4832110 - DNA, 25 bp, Homo sapien
gggaagaagtgccgtatcgtatcga

SEQ ID NO: 4832111 - DNA, 25 bp, Homo sapien
tgtgctgtgcgcatcctcggatatt

SEQ ID NO: 4832112 - DNA, 25 bp, Homo sapien
tcctcggatattgtgtgttcctctg

SEQ ID NO: 4832113 - DNA, 25 bp, Homo sapien
cacaatgtgctgtgcgcatcctcgg

SEQ ID NO: 4832114 - DNA, 25 bp, Homo sapien
tgtgcgcatcctcggatattgtgtg

SEQ ID NO: 4832115 - DNA, 25 bp, Homo sapien
aggaagccacctgctaactccctgc

SEQ ID NO: 4832116 - DNA, 25 bp, Homo sapien
atgtcgatggttaagcacgttggat

SEQ ID NO: 4832117 - DNA, 25 bp, Homo sapien
gttaagcacgttggatattcacaca

SEQ ID NO: 4832118 - DNA, 25 bp, Homo sapien
gatggttaagcacgttggatattca

SEQ ID NO: 4832119 - DNA, 25 bp, Homo sapien
tttcaggggtggactgttgggccac

SEQ ID NO: 4832120 - DNA, 25 bp, Homo sapien
cgcctttttcaggggtggactgttg

SEQ ID NO: 4832121 - DNA, 25 bp, Homo sapien
ttttcaggggtggactgttgggcca

SEQ ID NO: 4832122 - DNA, 25 bp, Homo sapien
aagatttggggtcccgacgtgccat

SEQ ID NO: 4832123 - DNA, 25 bp, Homo sapien
tcttcttcatcgggcgggggagccc

SEQ ID NO: 4832124 - DNA, 25 bp, Homo sapien
atcttcttcatcgggcgggggagcc

SEQ ID NO: 4832125 - DNA, 25 bp, Homo sapien
cttggcccaactggggccctccgct

SEQ ID NO: 4832126 - DNA, 25 bp, Homo sapien
gatcttcttcatcgggcgggggagc

SEQ ID NO: 4832127 - DNA, 25 bp, Homo sapien
gactcaaggttccaaggggcacgat

SEQ ID NO: 4832128 - DNA, 25 bp, Homo sapien
atggtgaagccgatgtcaacaacgc

SEQ ID NO: 4832129 - DNA, 25 bp, Homo sapien
gcagccaaacgtggctacacaggac

SEQ ID NO: 4832130 - DNA, 25 bp, Homo sapien
acgatgttccctcgcaaagcccatg

SEQ ID NO: 4832131 - DNA, 25 bp, Homo sapien
agcacttcatggggcacctggtact

SEQ ID NO: 4832132 - DNA, 25 bp, Homo sapien
cagcacttcatggggcacctggtac

SEQ ID NO: 4832133 - DNA, 25 bp, Homo sapien
ttccttctctcccttatccttgttc

SEQ ID NO: 4832134 - DNA, 25 bp, Homo sapien
tctcccttatccttgttcaagggcc

SEQ ID NO: 4832135 - DNA, 25 bp, Homo sapien
tctctcccttatccttgttcaaggg

SEQ ID NO: 4832136 - DNA, 25 bp, Homo sapien
cttctctcccttatccttgttcaag

SEQ ID NO: 4832137 - DNA, 25 bp, Homo sapien
ggatccttttccattcggcagcggc

SEQ ID NO: 4832138 - DNA, 25 bp, Homo sapien
gatccttttccattcggcagcggct

SEQ ID NO: 4832139 - DNA, 25 bp, Homo sapien
tccttttccattcggcagcggcttc

SEQ ID NO: 4832140 - DNA, 25 bp, Homo sapien
atccttttccattcggcagcggctt

SEQ ID NO: 4832141 - DNA, 25 bp, Homo sapien
agctgaaaggaaatcaaccagggtg

SEQ ID NO: 4832142 - DNA, 25 bp, Homo sapien
cgcagacgggaagctgaaaggaaat

SEQ ID NO: 4832143 - DNA, 25 bp, Homo sapien
gacgggaagctgaaaggaaatcaac

SEQ ID NO: 4832144 - DNA, 25 bp, Homo sapien
ctgaaaggaaatcaaccagggtgac

SEQ ID NO: 4832145 - DNA, 25 bp, Homo sapien
gatctggaagggacccagtctcggt

SEQ ID NO: 4832146 - DNA, 25 bp, Homo sapien
tgtgtcggcttcaccacgaggagag

SEQ ID NO: 4832147 - DNA, 25 bp, Homo sapien
ggtcaccgcaggacgtttgtcttgt

SEQ ID NO: 4832148 - DNA, 25 bp, Homo sapien
gattggagcctaggcccaagctgtg

SEQ ID NO: 4832149 - DNA, 25 bp, Homo sapien
aaggcctgctgacgaccccctgtgg

SEQ ID NO: 4832150 - DNA, 25 bp, Homo sapien
gaaggcctgctgacgaccccctgtg

SEQ ID NO: 4832151 - DNA, 25 bp, Homo sapien
aatccaattacatgacctggaaagg

SEQ ID NO: 4832152 - DNA, 25 bp, Homo sapien
cttaattgcaattaacttaatccaa

SEQ ID NO: 4832153 - DNA, 25 bp, Homo sapien
cctggaaaggtctatctgcacagcc

SEQ ID NO: 4832154 - DNA, 25 bp, Homo sapien
gaaaggtctatctgcacagcccact

SEQ ID NO: 4832155 - DNA, 25 bp, Homo sapien
tgaaattacacgtctactttctttc

SEQ ID NO: 4832156 - DNA, 25 bp, Homo sapien
ctgaaattacacgtctactttcttt

SEQ ID NO: 4832157 - DNA, 25 bp, Homo sapien
ggctggcgctgagatgggcaggtgc

SEQ ID NO: 4832158 - DNA, 25 bp, Homo sapien
gctggcgctgagatgggcaggtgct

SEQ ID NO: 4832159 - DNA, 25 bp, Homo sapien
ggggaagaagtgccgtatcgtatcg

SEQ ID NO: 4832160 - DNA, 25 bp, Homo sapien
ggaagaagtgccgtatcgtatcgac

SEQ ID NO: 4832161 - DNA, 25 bp, Homo sapien
gggaagaagtgccgtatcgtatcga

SEQ ID NO: 4832162 - DNA, 25 bp, Homo sapien
tcctcggatattgtgtgttcctctg

SEQ ID NO: 4832163 - DNA, 25 bp, Homo sapien
cacaatgtgctgtgcgcatcctcgg

SEQ ID NO: 4832164 - DNA, 25 bp, Homo sapien
tgtgcgcatcctcggatattgtgtg

SEQ ID NO: 4832165 - DNA, 25 bp, Homo sapien
tgtgctgtgcgcatcctcggatatt

SEQ ID NO: 4832166 - DNA, 25 bp, Homo sapien
aggaagccacctgctaactccctgc

SEQ ID NO: 4832167 - DNA, 25 bp, Homo sapien
gatggttaagcacgttggatattca

SEQ ID NO: 4832168 - DNA, 25 bp, Homo sapien
atgtcgatggttaagcacgttggat

SEQ ID NO: 4832169 - DNA, 25 bp, Homo sapien
gttaagcacgttggatattcacaca

SEQ ID NO: 4832170 - DNA, 25 bp, Homo sapien
tttcaggggtggactgttgggccac

SEQ ID NO: 4832171 - DNA, 25 bp, Homo sapien
ttttcaggggtggactgttgggcca

SEQ ID NO: 4832172 - DNA, 25 bp, Homo sapien
cgcctttttcaggggtggactgttg

SEQ ID NO: 4832173 - DNA, 25 bp, Homo sapien
aagatttggggtcccgacgtgccat

SEQ ID NO: 4832174 - DNA, 25 bp, Homo sapien
cttggcccaactggggccctccgct

SEQ ID NO: 4832175 - DNA, 25 bp, Homo sapien
tcttcttcatcgggcgggggagccc

SEQ ID NO: 4832176 - DNA, 25 bp, Homo sapien
atcttcttcatcgggcgggggagcc

SEQ ID NO: 4832177 - DNA, 25 bp, Homo sapien
gatcttcttcatcgggcgggggagc

SEQ ID NO: 4832178 - DNA, 25 bp, Homo sapien
atggtgaagccgatgtcaacaacgc

SEQ ID NO: 4832179 - DNA, 25 bp, Homo sapien
gcagccaaacgtggctacacaggac

SEQ ID NO: 4832180 - DNA, 25 bp, Homo sapien
acgatgttccctcgcaaagcccatg

SEQ ID NO: 4832181 - DNA, 25 bp, Homo sapien
gactcaaggttccaaggggcacgat

SEQ ID NO: 4832182 - DNA, 25 bp, Homo sapien
agcacttcatggggcacctggtact

SEQ ID NO: 4832183 - DNA, 25 bp, Homo sapien
cagcacttcatggggcacctggtac

SEQ ID NO: 4832184 - DNA, 25 bp, Homo sapien
ttccttctctcccttatccttgttc

SEQ ID NO: 4832185 - DNA, 25 bp, Homo sapien
tctcccttatccttgttcaagggcc

SEQ ID NO: 4832186 - DNA, 25 bp, Homo sapien
tctctcccttatccttgttcaaggg

SEQ ID NO: 4832187 - DNA, 25 bp, Homo sapien
cttctctcccttatccttgttcaag

SEQ ID NO: 4832188 - DNA, 25 bp, Homo sapien
ggatccttttccattcggcagcggc

SEQ ID NO: 4832189 - DNA, 25 bp, Homo sapien
gatccttttccattcggcagcggct

SEQ ID NO: 4832190 - DNA, 25 bp, Homo sapien
tccttttccattcggcagcggcttc

SEQ ID NO: 4832191 - DNA, 25 bp, Homo sapien
atccttttccattcggcagcggctt

SEQ ID NO: 4832192 - DNA, 25 bp, Homo sapien
ctgaaaggaaatcaaccagggtgac

SEQ ID NO: 4832193 - DNA, 25 bp, Homo sapien
cgcagacgggaagctgaaaggaaat

SEQ ID NO: 4832194 - DNA, 25 bp, Homo sapien
agctgaaaggaaatcaaccagggtg

SEQ ID NO: 4832195 - DNA, 25 bp, Homo sapien
gacgggaagctgaaaggaaatcaac

SEQ ID NO: 4832196 - DNA, 25 bp, Homo sapien
gatctggaagggacccagtctcggt

SEQ ID NO: 4832197 - DNA, 25 bp, Homo sapien
tgtgtcggcttcaccacgaggagag

SEQ ID NO: 4832198 - DNA, 25 bp, Homo sapien
gattggagcctaggcccaagctgtg

SEQ ID NO: 4832199 - DNA, 25 bp, Homo sapien
ggtcaccgcaggacgtttgtcttgt

SEQ ID NO: 4832200 - DNA, 25 bp, Homo sapien
aaggcctgctgacgaccccctgtgg

SEQ ID NO: 4832201 - DNA, 25 bp, Homo sapien
gaaggcctgctgacgaccccctgtg

SEQ ID NO: 4832202 - DNA, 25 bp, Homo sapien
cctggaaaggtctatctgcacagcc

SEQ ID NO: 4832203 - DNA, 25 bp, Homo sapien
gaaaggtctatctgcacagcccact

SEQ ID NO: 4832204 - DNA, 25 bp, Homo sapien
aatccaattacatgacctggaaagg

SEQ ID NO: 4832205 - DNA, 25 bp, Homo sapien
cttaattgcaattaacttaatccaa

SEQ ID NO: 4832206 - DNA, 25 bp, Homo sapien
ctgaaattacacgtctactttcttt

SEQ ID NO: 4832207 - DNA, 25 bp, Homo sapien
gctggcgctgagatgggcaggtgct

SEQ ID NO: 4832208 - DNA, 25 bp, Homo sapien
ggctggcgctgagatgggcaggtgc

SEQ ID NO: 4832209 - DNA, 25 bp, Homo sapien
tgaaattacacgtctactttctttc

SEQ ID NO: 4832210 - DNA, 25 bp, Homo sapien
ggaagaagtgccgtatcgtatcgac

SEQ ID NO: 4832211 - DNA, 25 bp, Homo sapien
ggggaagaagtgccgtatcgtatcg

SEQ ID NO: 4832212 - DNA, 25 bp, Homo sapien
gggaagaagtgccgtatcgtatcga

SEQ ID NO: 4832213 - DNA, 25 bp, Homo sapien
tcctcggatattgtgtgttcctctg

SEQ ID NO: 4832214 - DNA, 25 bp, Homo sapien
cacaatgtgctgtgcgcatcctcgg

SEQ ID NO: 4832215 - DNA, 25 bp, Homo sapien
tgtgcgcatcctcggatattgtgtg

SEQ ID NO: 4832216 - DNA, 25 bp, Homo sapien
tgtgctgtgcgcatcctcggatatt

SEQ ID NO: 4832217 - DNA, 25 bp, Homo sapien
aggaagccacctgctaactccctgc

SEQ ID NO: 4832218 - DNA, 25 bp, Homo sapien
gatggttaagcacgttggatattca

SEQ ID NO: 4832219 - DNA, 25 bp, Homo sapien
atgtcgatggttaagcacgttggat

SEQ ID NO: 4832220 - DNA, 25 bp, Homo sapien
gttaagcacgttggatattcacaca

SEQ ID NO: 4832221 - DNA, 25 bp, Homo sapien
ttttcaggggtggactgttgggcca

SEQ ID NO: 4832222 - DNA, 25 bp, Homo sapien
cgcctttttcaggggtggactgttg

SEQ ID NO: 4832223 - DNA, 25 bp, Homo sapien
tttcaggggtggactgttgggccac

SEQ ID NO: 4832224 - DNA, 25 bp, Homo sapien
aagatttggggtcccgacgtgccat

SEQ ID NO: 4832225 - DNA, 25 bp, Homo sapien
tcttcttcatcgggcgggggagccc

SEQ ID NO: 4832226 - DNA, 25 bp, Homo sapien
atcttcttcatcgggcgggggagcc

SEQ ID NO: 4832227 - DNA, 25 bp, Homo sapien
cttggcccaactggggccctccgct

SEQ ID NO: 4832228 - DNA, 25 bp, Homo sapien
gatcttcttcatcgggcgggggagc

SEQ ID NO: 4832229 - DNA, 25 bp, Homo sapien
acgatgttccctcgcaaagcccatg

SEQ ID NO: 4832230 - DNA, 25 bp, Homo sapien
gactcaaggttccaaggggcacgat

SEQ ID NO: 4832231 - DNA, 25 bp, Homo sapien
atggtgaagccgatgtcaacaacgc

SEQ ID NO: 4832232 - DNA, 25 bp, Homo sapien
gcagccaaacgtggctacacaggac

SEQ ID NO: 4832233 - DNA, 25 bp, Homo sapien
agcacttcatggggcacctggtact

SEQ ID NO: 4832234 - DNA, 25 bp, Homo sapien
cagcacttcatggggcacctggtac

SEQ ID NO: 4832235 - DNA, 25 bp, Homo sapien
ttccttctctcccttatccttgttc

SEQ ID NO: 4832236 - DNA, 25 bp, Homo sapien
tctctcccttatccttgttcaaggg

SEQ ID NO: 4832237 - DNA, 25 bp, Homo sapien
cttctctcccttatccttgttcaag

SEQ ID NO: 4832238 - DNA, 25 bp, Homo sapien
tctcccttatccttgttcaagggcc

SEQ ID NO: 4832239 - DNA, 25 bp, Homo sapien
ggatccttttccattcggcagcggc

SEQ ID NO: 4832240 - DNA, 25 bp, Homo sapien
gatccttttccattcggcagcggct

SEQ ID NO: 4832241 - DNA, 25 bp, Homo sapien
tccttttccattcggcagcggcttc

SEQ ID NO: 4832242 - DNA, 25 bp, Homo sapien
atccttttccattcggcagcggctt

SEQ ID NO: 4832243 - DNA, 25 bp, Homo sapien
agctgaaaggaaatcaaccagggtg

SEQ ID NO: 4832244 - DNA, 25 bp, Homo sapien
cgcagacgggaagctgaaaggaaat

SEQ ID NO: 4832245 - DNA, 25 bp, Homo sapien
gacgggaagctgaaaggaaatcaac

SEQ ID NO: 4832246 - DNA, 25 bp, Homo sapien
ctgaaaggaaatcaaccagggtgac

SEQ ID NO: 4832247 - DNA, 25 bp, Homo sapien
gatctggaagggacccagtctcggt

SEQ ID NO: 4832248 - DNA, 25 bp, Homo sapien
tcggcttcaccacgaggagaggctc

SEQ ID NO: 4832249 - DNA, 25 bp, Homo sapien
gattggagcctaggcccaagctgtg

SEQ ID NO: 4832250 - DNA, 25 bp, Homo sapien
ggtcaccgcaggacgtttgtcttgt

SEQ ID NO: 4832251 - DNA, 25 bp, Homo sapien
attcaggttggaaggcctgctgacg

SEQ ID NO: 4832252 - DNA, 25 bp, Homo sapien
aggttggaaggcctgctgacgaccc

SEQ ID NO: 4832253 - DNA, 25 bp, Homo sapien
tcatgattcaggttggaaggcctgc

SEQ ID NO: 4832254 - DNA, 25 bp, Homo sapien
ggttggaaggcctgctgacgacccc

SEQ ID NO: 4832255 - DNA, 25 bp, Homo sapien
aagatttggggtcccgacgtgccat

SEQ ID NO: 4832256 - DNA, 25 bp, Homo sapien
acgtggtacttctggccgtgtggcc

SEQ ID NO: 4832257 - DNA, 25 bp, Homo sapien
tggcttcaccccggggcttccatgg

SEQ ID NO: 4832258 - DNA, 25 bp, Homo sapien
ccaaggtcgctggaaccagggctgc

SEQ ID NO: 4832259 - DNA, 25 bp, Homo sapien
ccagcacttcatggggcacgtggta

SEQ ID NO: 4832260 - DNA, 25 bp, Homo sapien
atccttttccattcggcagcggctt

SEQ ID NO: 4832261 - DNA, 25 bp, Homo sapien
gatccttttccattcggcagcggct

SEQ ID NO: 4832262 - DNA, 25 bp, Homo sapien
tccttttccattcggcagcggcttc

SEQ ID NO: 4832263 - DNA, 25 bp, Homo sapien
ggatccttttccattcggcagcggc

SEQ ID NO: 4832264 - DNA, 25 bp, Homo sapien
ctgaaaggaaatcaaccagggtgac

SEQ ID NO: 4832265 - DNA, 25 bp, Homo sapien
cagacgggaagctgaaaggaaatca

SEQ ID NO: 4832266 - DNA, 25 bp, Homo sapien
gacgggaagctgaaaggaaatcaac

SEQ ID NO: 4832267 - DNA, 25 bp, Homo sapien
agctgaaaggaaatcaaccagggtg

SEQ ID NO: 4832268 - DNA, 25 bp, Homo sapien
gagcttcggagtcaccgcacagagt

SEQ ID NO: 4832269 - DNA, 25 bp, Homo sapien
gcggaagtctgactcctgcgcgtca

SEQ ID NO: 4832270 - DNA, 25 bp, Homo sapien
cagcgtccgaaacactgctctcagg

SEQ ID NO: 4832271 - DNA, 25 bp, Homo sapien
tcctattgacgtcccagcggaagtc

SEQ ID NO: 4832272 - DNA, 25 bp, Homo sapien
ggttggaaggcctgctgacgacccc

SEQ ID NO: 4832273 - DNA, 25 bp, Homo sapien
aggttggaaggcctgctgacgaccc

SEQ ID NO: 4832274 - DNA, 25 bp, Homo sapien
tcatgattcaggttggaaggcctgc

SEQ ID NO: 4832275 - DNA, 25 bp, Homo sapien
attcaggttggaaggcctgctgacg

SEQ ID NO: 4832276 - DNA, 25 bp, Homo sapien
gtcccagtacaggtaaggcactttc

SEQ ID NO: 4832277 - DNA, 25 bp, Homo sapien
catgcaccgataggaaaagcctcta

SEQ ID NO: 4832278 - DNA, 25 bp, Homo sapien
caagtgcatgtgattttgggccaca

SEQ ID NO: 4832279 - DNA, 25 bp, Homo sapien
gcagcaatgtgtgccggatgactaa

SEQ ID NO: 4832280 - DNA, 25 bp, Homo sapien
cgctgcaagcccatagccggcagag

SEQ ID NO: 4832281 - DNA, 25 bp, Homo sapien
gatacagacgcaggtcaaccgctaa

SEQ ID NO: 4832282 - DNA, 25 bp, Homo sapien
cggcagagggcaatggaactcgctt

SEQ ID NO: 4832283 - DNA, 25 bp, Homo sapien
caaccgctaaacagtgaaggccaag

SEQ ID NO: 4832284 - DNA, 25 bp, Homo sapien
catatgtttggggggccgtgtattt

SEQ ID NO: 4832285 - DNA, 25 bp, Homo sapien
ctcggcacagatgagtataggccat

SEQ ID NO: 4832286 - DNA, 25 bp, Homo sapien
tccatatgtttggggggccgtgtat

SEQ ID NO: 4832287 - DNA, 25 bp, Homo sapien
tttggattgtgcctcggcacagatg

SEQ ID NO: 4832288 - DNA, 25 bp, Homo sapien
tgttcggatgggcacctgcgcttgt

SEQ ID NO: 4832289 - DNA, 25 bp, Homo sapien
gaaatctagcagtccccttgagggc

SEQ ID NO: 4832290 - DNA, 25 bp, Homo sapien
gtctggcttagcaagtgattgaaca

SEQ ID NO: 4832291 - DNA, 25 bp, Homo sapien
gcacctctttgttggcctgcatgtc

SEQ ID NO: 4832292 - DNA, 25 bp, Homo sapien
taccatagcgtcattcaacctgtcc

SEQ ID NO: 4832293 - DNA, 25 bp, Homo sapien
ggccagggcacactattccatgttc

SEQ ID NO: 4832294 - DNA, 25 bp, Homo sapien
gggcacacccatatcacttgagttt

SEQ ID NO: 4832295 - DNA, 25 bp, Homo sapien
gcaggtcctactacttaatcagcag

SEQ ID NO: 4832296 - DNA, 25 bp, Homo sapien
tgagacgttctccttgaagctcccc

SEQ ID NO: 4832297 - DNA, 25 bp, Homo sapien
tctccttgaagctcccctaggtggg

SEQ ID NO: 4832298 - DNA, 25 bp, Homo sapien
tcagaaagcccttgagacgttctcc

SEQ ID NO: 4832299 - DNA, 25 bp, Homo sapien
cccctaggtgggagtagaagttcat

SEQ ID NO: 4832300 - DNA, 25 bp, Homo sapien
tctcagtgatccattacacagattt

SEQ ID NO: 4832301 - DNA, 25 bp, Homo sapien
caaaaacacccagtataaaccattg

SEQ ID NO: 4832302 - DNA, 25 bp, Homo sapien
gaaatgggggcagtatcaaaaacac

SEQ ID NO: 4832303 - DNA, 25 bp, Homo sapien
tccatccctggagttgacacaacag

SEQ ID NO: 4832304 - DNA, 25 bp, Homo sapien
cacgtaaaacactcgcgttgtggca

SEQ ID NO: 4832305 - DNA, 25 bp, Homo sapien
caacttgcaactggtggaagcagcc

SEQ ID NO: 4832306 - DNA, 25 bp, Homo sapien
cgttgtggcaaacgcggagaccaag

SEQ ID NO: 4832307 - DNA, 25 bp, Homo sapien
tgaaaggcccctttcctggagtgga

SEQ ID NO: 4832308 - DNA, 25 bp, Homo sapien
cgacctgctccactcaagatgtgca

SEQ ID NO: 4832309 - DNA, 25 bp, Homo sapien
ggccaactgtggcaattcacattgt

SEQ ID NO: 4832310 - DNA, 25 bp, Homo sapien
tccctgggtcgtgaaggcgccacga

SEQ ID NO: 4832311 - DNA, 25 bp, Homo sapien
tgtagttctgacaataaatggcccg

SEQ ID NO: 4832312 - DNA, 25 bp, Homo sapien
tccttggtgtgaatttccacgctcc

SEQ ID NO: 4832313 - DNA, 25 bp, Homo sapien
tcatccttggtgtgaatttccacgc

SEQ ID NO: 4832314 - DNA, 25 bp, Homo sapien
cttggtgtgaatttccacgctcccc

SEQ ID NO: 4832315 - DNA, 25 bp, Homo sapien
tggtgtgaatttccacgctccccac

SEQ ID NO: 4832316 - DNA, 25 bp, Homo sapien
gttgcagaaatagattcaggctcaa

SEQ ID NO: 4832317 - DNA, 25 bp, Homo sapien
tagttgcagaaatagattcaggctc

SEQ ID NO: 4832318 - DNA, 25 bp, Homo sapien
agttagttgcagaaatagattcagg

SEQ ID NO: 4832319 - DNA, 25 bp, Homo sapien
cagaaatagattcaggctcaaatcc

SEQ ID NO: 4832320 - DNA, 25 bp, Homo sapien
ggctgtagagctgaattagcaccat

SEQ ID NO: 4832321 - DNA, 25 bp, Homo sapien
tgggggctgtagagctgaattagca

SEQ ID NO: 4832322 - DNA, 25 bp, Homo sapien
ctttgaagtaaagattgggggctgt

SEQ ID NO: 4832323 - DNA, 25 bp, Homo sapien
gattgggggctgtagagctgaatta

SEQ ID NO: 4832324 - DNA, 25 bp, Homo sapien
gctaaccacttgtaagaaattgttc

SEQ ID NO: 4832325 - DNA, 25 bp, Homo sapien
taaccacttgtaagaaattgttctg

SEQ ID NO: 4832326 - DNA, 25 bp, Homo sapien
gtgtgctaaccacttgtaagaaatt

SEQ ID NO: 4832327 - DNA, 25 bp, Homo sapien
cacttgtaagaaattgttctgtcca

SEQ ID NO: 4832328 - DNA, 25 bp, Homo sapien
ggctcctgaatttctacattccttt

SEQ ID NO: 4832329 - DNA, 25 bp, Homo sapien
attacacattctgtcctcagtagtc

SEQ ID NO: 4832330 - DNA, 25 bp, Homo sapien
gaatttctacattcctttattacac

SEQ ID NO: 4832331 - DNA, 25 bp, Homo sapien
ttattacacattctgtcctcagtag

SEQ ID NO: 4832332 - DNA, 25 bp, Homo sapien
ttagaggttctccatgcatcatgaa

SEQ ID NO: 4832333 - DNA, 25 bp, Homo sapien
ggttctccatgcatcatgaagcccc

SEQ ID NO: 4832334 - DNA, 25 bp, Homo sapien
ctcaactatccttcgttccttctgt

SEQ ID NO: 4832335 - DNA, 25 bp, Homo sapien
tgaagcttttcctattagaggttct

SEQ ID NO: 4832336 - DNA, 25 bp, Homo sapien
atcaatgccccttgataaaagagct

SEQ ID NO: 4832337 - DNA, 25 bp, Homo sapien
aatcaatgccccttgataaaagagc

SEQ ID NO: 4832338 - DNA, 25 bp, Homo sapien
gataaaagagcttgattccagctac

SEQ ID NO: 4832339 - DNA, 25 bp, Homo sapien
aaaagagcttgattccagctactgc

SEQ ID NO: 4832340 - DNA, 25 bp, Homo sapien
tgacatgttccccatttctagacat

SEQ ID NO: 4832341 - DNA, 25 bp, Homo sapien
ggtcagaaagaagagcacggcaaag

SEQ ID NO: 4832342 - DNA, 25 bp, Homo sapien
tccgatcaccttccctgtaaagatg

SEQ ID NO: 4832343 - DNA, 25 bp, Homo sapien
ctgtctgtgggacaccacctccgat

SEQ ID NO: 4832344 - DNA, 25 bp, Homo sapien
ggcattcactgaaggggaccctgtc

SEQ ID NO: 4832345 - DNA, 25 bp, Homo sapien
ccttccctgtaaagatgcccatttt

SEQ ID NO: 4832346 - DNA, 25 bp, Homo sapien
cacgagggaaggagccatttggatt

SEQ ID NO: 4832347 - DNA, 25 bp, Homo sapien
ctacacgagggaaggagccatttgg

SEQ ID NO: 4832348 - DNA, 25 bp, Homo sapien
gaaggagccatttggattaattccc

SEQ ID NO: 4832349 - DNA, 25 bp, Homo sapien
ttggattaattcccttttcagacat

SEQ ID NO: 4832350 - DNA, 25 bp, Homo sapien
ttcttcatttttcccgcaattgttc

SEQ ID NO: 4832351 - DNA, 25 bp, Homo sapien
tctggcagagagcaataagttcttc

SEQ ID NO: 4832352 - DNA, 25 bp, Homo sapien
ctggatggtccgacagcatttcaga

SEQ ID NO: 4832353 - DNA, 25 bp, Homo sapien
ccgcaattgttcttgcatgtccctt

SEQ ID NO: 4832354 - DNA, 25 bp, Homo sapien
aaagaagctaggttatgtatgcttc

SEQ ID NO: 4832355 - DNA, 25 bp, Homo sapien
aaaaagaagctaggttatgtatgct

SEQ ID NO: 4832356 - DNA, 25 bp, Homo sapien
atttttattaaagtgtctgcctaca

SEQ ID NO: 4832357 - DNA, 25 bp, Homo sapien
agaagctaggttatgtatgcttctc

SEQ ID NO: 4832358 - DNA, 25 bp, Homo sapien
gtaaaaccggctcagctggtaacta

SEQ ID NO: 4832359 - DNA, 25 bp, Homo sapien
gaaagcggtgagtaaaaccggctca

SEQ ID NO: 4832360 - DNA, 25 bp, Homo sapien
gagtaaaaccggctcagctggtaac

SEQ ID NO: 4832361 - DNA, 25 bp, Homo sapien
cggtgagtaaaaccggctcagctgg

SEQ ID NO: 4832362 - DNA, 25 bp, Homo sapien
gaccttctgttggacccagtccagt

SEQ ID NO: 4832363 - DNA, 25 bp, Homo sapien
agaccttctgttggacccagtccag

SEQ ID NO: 4832364 - DNA, 25 bp, Homo sapien
cagatggagaggttccagactacct

SEQ ID NO: 4832365 - DNA, 25 bp, Homo sapien
cagactacctggatacagatgaact

SEQ ID NO: 4832366 - DNA, 25 bp, Homo sapien
tttgaggcatttaagatcacttctc

SEQ ID NO: 4832367 - DNA, 25 bp, Homo sapien
gaacgtagctagagtcccagatgga

SEQ ID NO: 4832368 - DNA, 25 bp, Homo sapien
gaggcagaagagtcactgaacctgg

SEQ ID NO: 4832369 - DNA, 25 bp, Homo sapien
ggcagaagagtcactgaacctggga

SEQ ID NO: 4832370 - DNA, 25 bp, Homo sapien
ctgaggcagaagagtcactgaacct

SEQ ID NO: 4832371 - DNA, 25 bp, Homo sapien
ggctgaggcagaagagtcactgaac

SEQ ID NO: 4832372 - DNA, 25 bp, Homo sapien
ccaggaagcccccaaggttatcatg

SEQ ID NO: 4832373 - DNA, 25 bp, Homo sapien
gagaccatggtcaaaggctctccct

SEQ ID NO: 4832374 - DNA, 25 bp, Homo sapien
gagtgaaaaactgctagagaccatg

SEQ ID NO: 4832375 - DNA, 25 bp, Homo sapien
gaagcccccaaggttatcatggtga

SEQ ID NO: 4832376 - DNA, 25 bp, Homo sapien
ctggaagatcttgatagagtagaag

SEQ ID NO: 4832377 - DNA, 25 bp, Homo sapien
aagagaaatggctaatagcagcaca

SEQ ID NO: 4832378 - DNA, 25 bp, Homo sapien
gatcttgatagagtagaagagaaat

SEQ ID NO: 4832379 - DNA, 25 bp, Homo sapien
gctaatagcagcacaagtctctgca

SEQ ID NO: 4832380 - DNA, 25 bp, Homo sapien
gcaggagaagaggcaggcagcgcat

SEQ ID NO: 4832381 - DNA, 25 bp, Homo sapien
caaagcaggggtggcaggagaagag

SEQ ID NO: 4832382 - DNA, 25 bp, Homo sapien
ggggtggcaggagaagaggcaggca

SEQ ID NO: 4832383 - DNA, 25 bp, Homo sapien
ccaaagcaggggtggcaggagaaga

SEQ ID NO: 4832384 - DNA, 25 bp, Homo sapien
tgcgacatttcttccggcaacgggc

SEQ ID NO: 4832385 - DNA, 25 bp, Homo sapien
gcaacgggcagtcccataaccacat

SEQ ID NO: 4832386 - DNA, 25 bp, Homo sapien
tttctcaaacagcatgcataggtgt

SEQ ID NO: 4832387 - DNA, 25 bp, Homo sapien
tacgattcagtaagctctcatccca

SEQ ID NO: 4832388 - DNA, 25 bp, Homo sapien
tacttccagcgactctagggaccag

SEQ ID NO: 4832389 - DNA, 25 bp, Homo sapien
gaggtcctacttccagcgactctag

SEQ ID NO: 4832390 - DNA, 25 bp, Homo sapien
gtcctacttccagcgactctaggga

SEQ ID NO: 4832391 - DNA, 25 bp, Homo sapien
tgaggtcctacttccagcgactcta

SEQ ID NO: 4832392 - DNA, 25 bp, Homo sapien
caatgcggaggccactatcttttgg

SEQ ID NO: 4832393 - DNA, 25 bp, Homo sapien
gacaatagagacctgggcatccgct

SEQ ID NO: 4832394 - DNA, 25 bp, Homo sapien
agcaccagcaaagggcggaaggttt

SEQ ID NO: 4832395 - DNA, 25 bp, Homo sapien
tgcagctgcggacagttgcacatag

SEQ ID NO: 4832396 - DNA, 25 bp, Homo sapien
acaatgtggacacgctactatccca

SEQ ID NO: 4832397 - DNA, 25 bp, Homo sapien
aggacaatgtggacacgctactatc

SEQ ID NO: 4832398 - DNA, 25 bp, Homo sapien
aaaggacaatgtggacacgctacta

SEQ ID NO: 4832399 - DNA, 25 bp, Homo sapien
gacaatgtggacacgctactatccc

SEQ ID NO: 4832400 - DNA, 25 bp, Homo sapien
ggtgtgtgggcccggagcgtgggaa

SEQ ID NO: 4832401 - DNA, 25 bp, Homo sapien
ggctgggtgtgtgggcccggagcgt

SEQ ID NO: 4832402 - DNA, 25 bp, Homo sapien
tgtgtgggcccggagcgtgggaaga

SEQ ID NO: 4832403 - DNA, 25 bp, Homo sapien
tgtgggcccggagcgtgggaagagc

SEQ ID NO: 4832404 - DNA, 25 bp, Homo sapien
cggacgggagcaatcgttgcctcat

SEQ ID NO: 4832405 - DNA, 25 bp, Homo sapien
tgacggacgggagcaatcgttgcct

SEQ ID NO: 4832406 - DNA, 25 bp, Homo sapien
gctggtgacggacgggagcaatcgt

SEQ ID NO: 4832407 - DNA, 25 bp, Homo sapien
aggctggtgacggacgggagcaatc

SEQ ID NO: 4832408 - DNA, 25 bp, Homo sapien
tgtgcaagtggaaacacacgtctgc

SEQ ID NO: 4832409 - DNA, 25 bp, Homo sapien
ctgtgcaagtggaaacacacgtctg

SEQ ID NO: 4832410 - DNA, 25 bp, Homo sapien
gcaagtggaaacacacgtctgcgga

SEQ ID NO: 4832411 - DNA, 25 bp, Homo sapien
tgcaagtggaaacacacgtctgcgg

SEQ ID NO: 4832412 - DNA, 25 bp, Homo sapien
ggttcacatgtctggcttgagacga

SEQ ID NO: 4832413 - DNA, 25 bp, Homo sapien
gctgaaacccgtttgtgccttgccc

SEQ ID NO: 4832414 - DNA, 25 bp, Homo sapien
gtggcgtagcagctgaaacccgttt

SEQ ID NO: 4832415 - DNA, 25 bp, Homo sapien
gagttctccgagagcctcagtggct

SEQ ID NO: 4832416 - DNA, 25 bp, Homo sapien
cttggtaaggtggggtgcgcggtgg

SEQ ID NO: 4832417 - DNA, 25 bp, Homo sapien
tggtaaggtggggtgcgcggtggta

SEQ ID NO: 4832418 - DNA, 25 bp, Homo sapien
atttgttccctctacgtctccccag

SEQ ID NO: 4832419 - DNA, 25 bp, Homo sapien
gttgcacgtgttggtccctgactca

SEQ ID NO: 4832420 - DNA, 25 bp, Homo sapien
tgcacttgttgcacgtgttggtccc

SEQ ID NO: 4832421 - DNA, 25 bp, Homo sapien
gcacagacatcttcccgtctatttg

SEQ ID NO: 4832422 - DNA, 25 bp, Homo sapien
cacaaggccctcaatgatccagccc

SEQ ID NO: 4832423 - DNA, 25 bp, Homo sapien
gccttttggcccctcaatactccca

SEQ ID NO: 4832424 - DNA, 25 bp, Homo sapien
tggtgtggcttcagataaattgcct

SEQ ID NO: 4832425 - DNA, 25 bp, Homo sapien
ctcaatactcccacgttccacaagg

SEQ ID NO: 4832426 - DNA, 25 bp, Homo sapien
tagagcagtagcctacttgtgtttc

SEQ ID NO: 4832427 - DNA, 25 bp, Homo sapien
ataattacagtattcttggcagaag

SEQ ID NO: 4832428 - DNA, 25 bp, Homo sapien
ctttttagagcagtagcctacttgt

SEQ ID NO: 4832429 - DNA, 25 bp, Homo sapien
gtagcctacttgtgtttccatataa

SEQ ID NO: 4832430 - DNA, 25 bp, Homo sapien
gcacaagtggcaatatctccgctcc

SEQ ID NO: 4832431 - DNA, 25 bp, Homo sapien
tgctgctcagacacttccgcaaaaa

SEQ ID NO: 4832432 - DNA, 25 bp, Homo sapien
tatttgaactgtctggcacaagtgg

SEQ ID NO: 4832433 - DNA, 25 bp, Homo sapien
aaaacctgcacctgattggacaacg

SEQ ID NO: 4832434 - DNA, 25 bp, Homo sapien
ctaccaaagcaatcctgcacagctg

SEQ ID NO: 4832435 - DNA, 25 bp, Homo sapien
cctaccaaagcaatcctgcacagct

SEQ ID NO: 4832436 - DNA, 25 bp, Homo sapien
accaaagcaatcctgcacagctggt

SEQ ID NO: 4832437 - DNA, 25 bp, Homo sapien
taccaaagcaatcctgcacagctgg

SEQ ID NO: 4832438 - DNA, 25 bp, Homo sapien
agaaagcaatccccacggaactatt

SEQ ID NO: 4832439 - DNA, 25 bp, Homo sapien
cccacggaactattttgtggataat

SEQ ID NO: 4832440 - DNA, 25 bp, Homo sapien
tccattcccaaatcacagacccaga

SEQ ID NO: 4832441 - DNA, 25 bp, Homo sapien
caatccccacggaactattttgtgg

SEQ ID NO: 4832442 - DNA, 25 bp, Homo sapien
cctcccgtgaaggagcacaaatatg

SEQ ID NO: 4832443 - DNA, 25 bp, Homo sapien
gccctcccgtgaaggagcacaaata

SEQ ID NO: 4832444 - DNA, 25 bp, Homo sapien
tgccctcccgtgaaggagcacaaat

SEQ ID NO: 4832445 - DNA, 25 bp, Homo sapien
cctgccctcccgtgaaggagcacaa

SEQ ID NO: 4832446 - DNA, 25 bp, Homo sapien
aaagagaacagcaaacagaaaaaag

SEQ ID NO: 4832447 - DNA, 25 bp, Homo sapien
gagaacagcaaacagaaaaaagacc

SEQ ID NO: 4832448 - DNA, 25 bp, Homo sapien
acagcaaacagaaaaaagaccttca

SEQ ID NO: 4832449 - DNA, 25 bp, Homo sapien
tgtttggaccaaacaaaagagaaca

SEQ ID NO: 4832450 - DNA, 25 bp, Homo sapien
cccacgcagatcttaaatgagggtc

SEQ ID NO: 4832451 - DNA, 25 bp, Homo sapien
ccctaaaaagcccacgcagatctta

SEQ ID NO: 4832452 - DNA, 25 bp, Homo sapien
aaaaagcccacgcagatcttaaatg

SEQ ID NO: 4832453 - DNA, 25 bp, Homo sapien
aagcccacgcagatcttaaatgagg

SEQ ID NO: 4832454 - DNA, 25 bp, Homo sapien
aaaagtctgcagatcccttgctgca

SEQ ID NO: 4832455 - DNA, 25 bp, Homo sapien
aagtctgcagatcccttgctgcata

SEQ ID NO: 4832456 - DNA, 25 bp, Homo sapien
aaagtctgcagatcccttgctgcat

SEQ ID NO: 4832457 - DNA, 25 bp, Homo sapien
gcaacacctattccagggatcagag

SEQ ID NO: 4832458 - DNA, 25 bp, Homo sapien
caacacctattccagggatcagagc

SEQ ID NO: 4832459 - DNA, 25 bp, Homo sapien
tctgccatccatctctggtttctct

SEQ ID NO: 4832460 - DNA, 25 bp, Homo sapien
tgccatccatctctggtttctcttt

SEQ ID NO: 4832461 - DNA, 25 bp, Homo sapien
agatctgccatccatctctggtttc

SEQ ID NO: 4832462 - DNA, 25 bp, Homo sapien
ttagatcccagatctgccatccatc

SEQ ID NO: 4832463 - DNA, 25 bp, Homo sapien
acacctactataagccacacattcc

SEQ ID NO: 4832464 - DNA, 25 bp, Homo sapien
cattcctttaagcccttgggatact

SEQ ID NO: 4832465 - DNA, 25 bp, Homo sapien
tcctttaagcccttgggatacttca

SEQ ID NO: 4832466 - DNA, 25 bp, Homo sapien
aaaatgtcttttatcagctcttcac

SEQ ID NO: 4832467 - DNA, 25 bp, Homo sapien
aaatgtcttttatcagctcttcacc

SEQ ID NO: 4832468 - DNA, 25 bp, Homo sapien
aaaaatgtcttttatcagctcttca

SEQ ID NO: 4832469 - DNA, 25 bp, Homo sapien
atggagtctgagatcgagcccacct

SEQ ID NO: 4832470 - DNA, 25 bp, Homo sapien
ctgctgtgctctgatggagtctgag

SEQ ID NO: 4832471 - DNA, 25 bp, Homo sapien
agtctgagatcgagcccacctcctt

SEQ ID NO: 4832472 - DNA, 25 bp, Homo sapien
tgctctgatggagtctgagatcgag

SEQ ID NO: 4832473 - DNA, 25 bp, Homo sapien
ctgcagcaccctggcagggagggac

SEQ ID NO: 4832474 - DNA, 25 bp, Homo sapien
gcagcaccctggcagggagggacgg

SEQ ID NO: 4832475 - DNA, 25 bp, Homo sapien
cagcaccctggcagggagggacggg

SEQ ID NO: 4832476 - DNA, 25 bp, Homo sapien
agcaccctggcagggagggacgggg

SEQ ID NO: 4832477 - DNA, 25 bp, Homo sapien
ttatccacagcgttgtctgtgctgc

SEQ ID NO: 4832478 - DNA, 25 bp, Homo sapien
cggtcacaactccagaagacaggag

SEQ ID NO: 4832479 - DNA, 25 bp, Homo sapien
tgcggtcacaactccagaagacagg

SEQ ID NO: 4832480 - DNA, 25 bp, Homo sapien
gcggtcacaactccagaagacagga

SEQ ID NO: 4832481 - DNA, 25 bp, Homo sapien
ctgcggtcacaactccagaagacag

SEQ ID NO: 4832482 - DNA, 25 bp, Homo sapien
acttttatttgtcctcgcactgagg

SEQ ID NO: 4832483 - DNA, 25 bp, Homo sapien
ccggtctctcacatggatccctggg

SEQ ID NO: 4832484 - DNA, 25 bp, Homo sapien
gtgaggctcctgctcttcggctgca

SEQ ID NO: 4832485 - DNA, 25 bp, Homo sapien
cactgaggatcatactccggtctct

SEQ ID NO: 4832486 - DNA, 25 bp, Homo sapien
cagagaagcaacttgcgatgtcctg

SEQ ID NO: 4832487 - DNA, 25 bp, Homo sapien
caaggcagatgaatcctcaagttga

SEQ ID NO: 4832488 - DNA, 25 bp, Homo sapien
aggacaaggcagatgaatcctcaag

SEQ ID NO: 4832489 - DNA, 25 bp, Homo sapien
ggacaaggcagatgaatcctcaagt

SEQ ID NO: 4832490 - DNA, 25 bp, Homo sapien
gatgccatgaggctcattggggcat

SEQ ID NO: 4832491 - DNA, 25 bp, Homo sapien
atgaggctcattggggcatggcttc

SEQ ID NO: 4832492 - DNA, 25 bp, Homo sapien
tagtgacatcctgggtcccttttct

SEQ ID NO: 4832493 - DNA, 25 bp, Homo sapien
ttagtgacatcctgggtcccttttc

SEQ ID NO: 4832494 - DNA, 25 bp, Homo sapien
ccaggtgtaggaaccagagggtaca

SEQ ID NO: 4832495 - DNA, 25 bp, Homo sapien
gggaaaatgtgagcaatgccccagg

SEQ ID NO: 4832496 - DNA, 25 bp, Homo sapien
tgagcaatgccccaggtgtaggaac

SEQ ID NO: 4832497 - DNA, 25 bp, Homo sapien
aatgccccaggtgtaggaaccagag

SEQ ID NO: 4832498 - DNA, 25 bp, Homo sapien
gagcggcagccagccacattcgggc

SEQ ID NO: 4832499 - DNA, 25 bp, Homo sapien
gagaaagtgtagtcagagctgcaag

SEQ ID NO: 4832500 - DNA, 25 bp, Homo sapien
ctgagtgtcagcttcccggagaaag

SEQ ID NO: 4832501 - DNA, 25 bp, Homo sapien
ccacattcgggcctgagtgtcagct

SEQ ID NO: 4832502 - DNA, 25 bp, Homo sapien
tggcttagagacacaacctggcctg

SEQ ID NO: 4832503 - DNA, 25 bp, Homo sapien
tggcctgtagctgataccgtctgca

SEQ ID NO: 4832504 - DNA, 25 bp, Homo sapien
cctagcatcgaacatcgcagctgaa

SEQ ID NO: 4832505 - DNA, 25 bp, Homo sapien
tggttttgctcacctgtgacgtgca

SEQ ID NO: 4832506 - DNA, 25 bp, Homo sapien
aggcttcaccccacgctgagactgg

SEQ ID NO: 4832507 - DNA, 25 bp, Homo sapien
taggaacccaatggtaaggcagagc

SEQ ID NO: 4832508 - DNA, 25 bp, Homo sapien
ttccaatgcctctcaccatgcagaa

SEQ ID NO: 4832509 - DNA, 25 bp, Homo sapien
tttataaaggttccagccacagctg

SEQ ID NO: 4832510 - DNA, 25 bp, Homo sapien
aagcaaacagaagataatggatcct

SEQ ID NO: 4832511 - DNA, 25 bp, Homo sapien
ctggaacaggcaccaaaaacaggaa

SEQ ID NO: 4832512 - DNA, 25 bp, Homo sapien
caaacagaagataatggatcctcat

SEQ ID NO: 4832513 - DNA, 25 bp, Homo sapien
caggcaccaaaaacaggaagagcaa

SEQ ID NO: 4832514 - DNA, 25 bp, Homo sapien
taggaaggcttttggtacacgtaca

SEQ ID NO: 4832515 - DNA, 25 bp, Homo sapien
ttggtacacgtacaaggcttgtgga

SEQ ID NO: 4832516 - DNA, 25 bp, Homo sapien
gcttttggtacacgtacaaggcttg

SEQ ID NO: 4832517 - DNA, 25 bp, Homo sapien
gtacaaggcttgtggaattcctcaa

SEQ ID NO: 4832518 - DNA, 25 bp, Homo sapien
ttctgtaatgtgtttatgattcctc

SEQ ID NO: 4832519 - DNA, 25 bp, Homo sapien
cgcgtcgagcacttgccgatctgtt

SEQ ID NO: 4832520 - DNA, 25 bp, Homo sapien
gagcacttgccgatctgttcctcct

SEQ ID NO: 4832521 - DNA, 25 bp, Homo sapien
tttcggccacgcgtcgagcacttgc

SEQ ID NO: 4832522 - DNA, 25 bp, Homo sapien
ttcggcagcattttcggccacgcgt

SEQ ID NO: 4832523 - DNA, 25 bp, Homo sapien
ggcatttccacactttacaacactc

SEQ ID NO: 4832524 - DNA, 25 bp, Homo sapien
tttacaacactctcgtcatgtttca

SEQ ID NO: 4832525 - DNA, 25 bp, Homo sapien
aggcatttccacactttacaacact

SEQ ID NO: 4832526 - DNA, 25 bp, Homo sapien
acactctcgtcatgtttcagggttt

SEQ ID NO: 4832527 - DNA, 25 bp, Homo sapien
aattccactgtagatagacactgtc

SEQ ID NO: 4832528 - DNA, 25 bp, Homo sapien
taggttagtatgagctctattgggt

SEQ ID NO: 4832529 - DNA, 25 bp, Homo sapien
cctctggaccatttagatacatgtt

SEQ ID NO: 4832530 - DNA, 25 bp, Homo sapien
ccagatgactctctgtattgatagt

SEQ ID NO: 4832531 - DNA, 25 bp, Homo sapien
gagctctttccatctaattctatcc

SEQ ID NO: 4832532 - DNA, 25 bp, Homo sapien
tgcccactctgtgcgacgtcctgtt

SEQ ID NO: 4832533 - DNA, 25 bp, Homo sapien
aattgagagctctttccatctaatt

SEQ ID NO: 4832534 - DNA, 25 bp, Homo sapien
tgtgcgacgtcctgtttttcctgag

SEQ ID NO: 4832535 - DNA, 25 bp, Homo sapien
agtctggggaggacatcaagccttc

SEQ ID NO: 4832536 - DNA, 25 bp, Homo sapien
aatatgaagaggaacgagaagagga

SEQ ID NO: 4832537 - DNA, 25 bp, Homo sapien
tcttaaggcaggtaacaggatcgcc

SEQ ID NO: 4832538 - DNA, 25 bp, Homo sapien
ggatcgcctataccaccaaaaacac

SEQ ID NO: 4832539 - DNA, 25 bp, Homo sapien
ctagggcaaaagactggatgacata

SEQ ID NO: 4832540 - DNA, 25 bp, Homo sapien
gatgacatatggctccactcttaag

SEQ ID NO: 4832541 - DNA, 25 bp, Homo sapien
cacaggtgccaatttgtttatacct

SEQ ID NO: 4832542 - DNA, 25 bp, Homo sapien
gaccacaggtgccaatttgtttata

SEQ ID NO: 4832543 - DNA, 25 bp, Homo sapien
gagaccacaggtgccaatttgttta

SEQ ID NO: 4832544 - DNA, 25 bp, Homo sapien
gggagaccacaggtgccaatttgtt

SEQ ID NO: 4832545 - DNA, 25 bp, Homo sapien
tctgatgagggagccctttctgaat

SEQ ID NO: 4832546 - DNA, 25 bp, Homo sapien
tctctgatgagggagccctttctga

SEQ ID NO: 4832547 - DNA, 25 bp, Homo sapien
gagccctttctgaatccgcatcagc

SEQ ID NO: 4832548 - DNA, 25 bp, Homo sapien
gtctctgatgagggagccctttctg

SEQ ID NO: 4832549 - DNA, 25 bp, Homo sapien
agaagggagtccttgtgaagaacag

SEQ ID NO: 4832550 - DNA, 25 bp, Homo sapien
cataagaaaccttagccagaagaag

SEQ ID NO: 4832551 - DNA, 25 bp, Homo sapien
ctctgtaggaggcataattgcataa

SEQ ID NO: 4832552 - DNA, 25 bp, Homo sapien
ttggcagatccactatgattccatg

SEQ ID NO: 4832553 - DNA, 25 bp, Homo sapien
gtgtgcacacatcataacatagcct

SEQ ID NO: 4832554 - DNA, 25 bp, Homo sapien
gaagtcttagcccaagtgtgcacac

SEQ ID NO: 4832555 - DNA, 25 bp, Homo sapien
caggcctggacagcttgaattgttg

SEQ ID NO: 4832556 - DNA, 25 bp, Homo sapien
gaaaatgccgttcactcccttatgg

SEQ ID NO: 4832557 - DNA, 25 bp, Homo sapien
tgggagccggttccatctagttcta

SEQ ID NO: 4832558 - DNA, 25 bp, Homo sapien
ctgggagccggttccatctagttct

SEQ ID NO: 4832559 - DNA, 25 bp, Homo sapien
aggggaacagactcagggtctgtga

SEQ ID NO: 4832560 - DNA, 25 bp, Homo sapien
gggaacagactcagggtctgtgaac

SEQ ID NO: 4832561 - DNA, 25 bp, Homo sapien
actcagggtctgtgaactggagatc

SEQ ID NO: 4832562 - DNA, 25 bp, Homo sapien
tcagggtctgtgaactggagatcac

SEQ ID NO: 4832563 - DNA, 25 bp, Homo sapien
acattccaaagatgtcagagattcg

SEQ ID NO: 4832564 - DNA, 25 bp, Homo sapien
ctgggaaggacattccaaagatgtc

SEQ ID NO: 4832565 - DNA, 25 bp, Homo sapien
aggacattccaaagatgtcagagat

SEQ ID NO: 4832566 - DNA, 25 bp, Homo sapien
gaaggacattccaaagatgtcagag

SEQ ID NO: 4832567 - DNA, 25 bp, Homo sapien
acacagactttgtgtctttctgaca

SEQ ID NO: 4832568 - DNA, 25 bp, Homo sapien
acccaaaaaactcctcctgtgccat

SEQ ID NO: 4832569 - DNA, 25 bp, Homo sapien
gcaacccaaaaaactcctcctgtgc

SEQ ID NO: 4832570 - DNA, 25 bp, Homo sapien
tactgacacagactttgtgtctttc

SEQ ID NO: 4832571 - DNA, 25 bp, Homo sapien
gctgtgtgctgtatgtcccttggga

SEQ ID NO: 4832572 - DNA, 25 bp, Homo sapien
tgtatgtcccttgggacaaggacac

SEQ ID NO: 4832573 - DNA, 25 bp, Homo sapien
gtgtgctgtatgtcccttgggacaa

SEQ ID NO: 4832574 - DNA, 25 bp, Homo sapien
caggctgtgtgctgtatgtcccttg

SEQ ID NO: 4832575 - DNA, 25 bp, Homo sapien
gagatctagaacccaaatccaaacc

SEQ ID NO: 4832576 - DNA, 25 bp, Homo sapien
taaatagccacatgattcaactccc

SEQ ID NO: 4832577 - DNA, 25 bp, Homo sapien
tcctgcctccacgtgcggtggtctt

SEQ ID NO: 4832578 - DNA, 25 bp, Homo sapien
tctttcgctgttgttttgttccact

SEQ ID NO: 4832579 - DNA, 25 bp, Homo sapien
ttcctgggtgaagtcaatagctaca

SEQ ID NO: 4832580 - DNA, 25 bp, Homo sapien
gctttcttttggatgtgtccatcat

SEQ ID NO: 4832581 - DNA, 25 bp, Homo sapien
tgtccatcatgtcccactcttcctg

SEQ ID NO: 4832582 - DNA, 25 bp, Homo sapien
cgagggacaccaggtgactgatatt

SEQ ID NO: 4832583 - DNA, 25 bp, Homo sapien
atataggatttgcttatctggtacc

SEQ ID NO: 4832584 - DNA, 25 bp, Homo sapien
tgctccagctgcaaaattatatagg

SEQ ID NO: 4832585 - DNA, 25 bp, Homo sapien
gaagaaatactcttccttcccacca

SEQ ID NO: 4832586 - DNA, 25 bp, Homo sapien
ctggattctggtcttgaagaaatac

SEQ ID NO: 4832587 - DNA, 25 bp, Homo sapien
taggatgcatggatatcatgtgttt

SEQ ID NO: 4832588 - DNA, 25 bp, Homo sapien
ctgatgataggatgcatggatatca

SEQ ID NO: 4832589 - DNA, 25 bp, Homo sapien
gatgataggatgcatggatatcatg

SEQ ID NO: 4832590 - DNA, 25 bp, Homo sapien
tgcatggatatcatgtgttttttct

SEQ ID NO: 4832591 - DNA, 25 bp, Homo sapien
tgtcatactggtggatgtgtctttt

SEQ ID NO: 4832592 - DNA, 25 bp, Homo sapien
cattgtcatactggtggatgtgtct

SEQ ID NO: 4832593 - DNA, 25 bp, Homo sapien
ttgtcatactggtggatgtgtcttt

SEQ ID NO: 4832594 - DNA, 25 bp, Homo sapien
attgtcatactggtggatgtgtctt

SEQ ID NO: 4832595 - DNA, 25 bp, Homo sapien
cttttgtccaaggtgagttctctca

SEQ ID NO: 4832596 - DNA, 25 bp, Homo sapien
cccacatagaagacaagcaggtggt

SEQ ID NO: 4832597 - DNA, 25 bp, Homo sapien
catcttgtgccgtctaaggtaaaag

SEQ ID NO: 4832598 - DNA, 25 bp, Homo sapien
catctaaggtcggaggacagactga

SEQ ID NO: 4832599 - DNA, 25 bp, Homo sapien
tagttatctccattaacttggacat

SEQ ID NO: 4832600 - DNA, 25 bp, Homo sapien
ctgtgaagtaacactcctagttatc

SEQ ID NO: 4832601 - DNA, 25 bp, Homo sapien
cctagttatctccattaacttggac

SEQ ID NO: 4832602 - DNA, 25 bp, Homo sapien
gaagtaacactcctagttatctcca

SEQ ID NO: 4832603 - DNA, 25 bp, Homo sapien
gtagttcatgcagacatctagctgg

SEQ ID NO: 4832604 - DNA, 25 bp, Homo sapien
cagtagttcatgcagacatctagct

SEQ ID NO: 4832605 - DNA, 25 bp, Homo sapien
tagttcatgcagacatctagctgga

SEQ ID NO: 4832606 - DNA, 25 bp, Homo sapien
agtagttcatgcagacatctagctg

SEQ ID NO: 4832607 - DNA, 25 bp, Homo sapien
tgcaggaataagaccctccaacgtc

SEQ ID NO: 4832608 - DNA, 25 bp, Homo sapien
taagaccctccaacgtcttgtgtga

SEQ ID NO: 4832609 - DNA, 25 bp, Homo sapien
ccctccaacgtcttgtgtgaagcca

SEQ ID NO: 4832610 - DNA, 25 bp, Homo sapien
caacgtcttgtgtgaagccacgaca

SEQ ID NO: 4832611 - DNA, 25 bp, Homo sapien
aggagattccgggtcattcgtccag

SEQ ID NO: 4832612 - DNA, 25 bp, Homo sapien
tcagacttatttatccgacgtggtg

SEQ ID NO: 4832613 - DNA, 25 bp, Homo sapien
tggaaattattgtgggaaatggccc

SEQ ID NO: 4832614 - DNA, 25 bp, Homo sapien
atttgaggagattccgggtcattcg

SEQ ID NO: 4832615 - DNA, 25 bp, Homo sapien
tgttgcctgttctccatacagagcc

SEQ ID NO: 4832616 - DNA, 25 bp, Homo sapien
ttgcctgttctccatacagagccat

SEQ ID NO: 4832617 - DNA, 25 bp, Homo sapien
atcatgctctctgttgcctgttctc

SEQ ID NO: 4832618 - DNA, 25 bp, Homo sapien
ctctctgttgcctgttctccataca

SEQ ID NO: 4832619 - DNA, 25 bp, Homo sapien
cttgccaacatttgagtggattcat

SEQ ID NO: 4832620 - DNA, 25 bp, Homo sapien
tgctccacttgccaacatttgagtg

SEQ ID NO: 4832621 - DNA, 25 bp, Homo sapien
ctctgctccacttgccaacatttga

SEQ ID NO: 4832622 - DNA, 25 bp, Homo sapien
agtggattcatttgtgtggtagtca

SEQ ID NO: 4832623 - DNA, 25 bp, Homo sapien
gggaaaggtaaggctctggtcctgc

SEQ ID NO: 4832624 - DNA, 25 bp, Homo sapien
taggcctaaatccaggtgtgaagat

SEQ ID NO: 4832625 - DNA, 25 bp, Homo sapien
agttgcaggagtaggcctaaatcca

SEQ ID NO: 4832626 - DNA, 25 bp, Homo sapien
gggtagttgcaggagtaggcctaaa

SEQ ID NO: 4832627 - DNA, 25 bp, Homo sapien
ggagtaggcctaaatccaggtgtga

SEQ ID NO: 4832628 - DNA, 25 bp, Homo sapien
ttaggacgaggacctattccaccag

SEQ ID NO: 4832629 - DNA, 25 bp, Homo sapien
gtgagagtggtacattctctgttgt

SEQ ID NO: 4832630 - DNA, 25 bp, Homo sapien
cattggatctgcatagggaactgca

SEQ ID NO: 4832631 - DNA, 25 bp, Homo sapien
gcattggatctgcatagggaactgc

SEQ ID NO: 4832632 - DNA, 25 bp, Homo sapien
ggtacattctctgttgtcatggctg

SEQ ID NO: 4832633 - DNA, 25 bp, Homo sapien
tttctgaatgttaatccttgccttc

SEQ ID NO: 4832634 - DNA, 25 bp, Homo sapien
taaagtctccgcaggtttccagagg

SEQ ID NO: 4832635 - DNA, 25 bp, Homo sapien
ctttgcaggcaatgtagccatgaga

SEQ ID NO: 4832636 - DNA, 25 bp, Homo sapien
tagccatgagaaaggtctccaaaaa

SEQ ID NO: 4832637 - DNA, 25 bp, Homo sapien
cagaggtgactgtagctgcactgaa

SEQ ID NO: 4832638 - DNA, 25 bp, Homo sapien
tgcagaacagatgtctgcaacatag

SEQ ID NO: 4832639 - DNA, 25 bp, Homo sapien
agaacagatgtctgcaacatagtag

SEQ ID NO: 4832640 - DNA, 25 bp, Homo sapien
cagaacagatgtctgcaacatagta

SEQ ID NO: 4832641 - DNA, 25 bp, Homo sapien
gcagaacagatgtctgcaacatagt

SEQ ID NO: 4832642 - DNA, 25 bp, Homo sapien
gagatgccagaaacatctttttcgg

SEQ ID NO: 4832643 - DNA, 25 bp, Homo sapien
tgagatgccagaaacatctttttcg

SEQ ID NO: 4832644 - DNA, 25 bp, Homo sapien
ctgagatgccagaaacatctttttc

SEQ ID NO: 4832645 - DNA, 25 bp, Homo sapien
acccaccttcatgaggtaggacagc

SEQ ID NO: 4832646 - DNA, 25 bp, Homo sapien
cccaccttcatgaggtaggacagca

SEQ ID NO: 4832647 - DNA, 25 bp, Homo sapien
ccaccttcatgaggtaggacagcag

SEQ ID NO: 4832648 - DNA, 25 bp, Homo sapien
gggagtcgtaagcaggccttccaaa

SEQ ID NO: 4832649 - DNA, 25 bp, Homo sapien
ggagtcgtaagcaggccttccaaac

SEQ ID NO: 4832650 - DNA, 25 bp, Homo sapien
tgcacagactctctctattctctga

SEQ ID NO: 4832651 - DNA, 25 bp, Homo sapien
cagggatatctcatcatgcacagac

SEQ ID NO: 4832652 - DNA, 25 bp, Homo sapien
ctaggcagggatatctcatcatgca

SEQ ID NO: 4832653 - DNA, 25 bp, Homo sapien
gcacagactctctctattctctgac

SEQ ID NO: 4832654 - DNA, 25 bp, Homo sapien
cggatgtctgacaccgggcctttcc

SEQ ID NO: 4832655 - DNA, 25 bp, Homo sapien
tgccctactttcaagggcagacgtc

SEQ ID NO: 4832656 - DNA, 25 bp, Homo sapien
agagtatcgcatcgggagaaacctt

SEQ ID NO: 4832657 - DNA, 25 bp, Homo sapien
tcagagtatcgcatcgggagaaacc

SEQ ID NO: 4832658 - DNA, 25 bp, Homo sapien
gccctactttcaagggcagacgtcc

SEQ ID NO: 4832659 - DNA, 25 bp, Homo sapien
ttagagtgggctgtgcagatagacc

SEQ ID NO: 4832660 - DNA, 25 bp, Homo sapien
taggttttagaatgtctgtcagcag

SEQ ID NO: 4832661 - DNA, 25 bp, Homo sapien
tcatgtaattggattaagttaattg

SEQ ID NO: 4832662 - DNA, 25 bp, Homo sapien
gtgggctgtgcagatagacctttcc

SEQ ID NO: 4832663 - DNA, 25 bp, Homo sapien
cacgagtccccatttggctcaaccg

SEQ ID NO: 4832664 - DNA, 25 bp, Homo sapien
cacgcacgctaacacgtggggagcg

SEQ ID NO: 4832665 - DNA, 25 bp, Homo sapien
ggagcgttgcttgcaccacgagtcc

SEQ ID NO: 4832666 - DNA, 25 bp, Homo sapien
ccgccgatgccaagtgtgtggttcc

SEQ ID NO: 4832667 - DNA, 25 bp, Homo sapien
cacgcacgctaacacgtggggagcg

SEQ ID NO: 4832668 - DNA, 25 bp, Homo sapien
ggagcgttgcttgcaccacgagtcc

SEQ ID NO: 4832669 - DNA, 25 bp, Homo sapien
cacgagtccccatttggctcaaccg

SEQ ID NO: 4832670 - DNA, 25 bp, Homo sapien
ccgccgatgccaagtgtgtggttcc

SEQ ID NO: 4832671 - DNA, 25 bp, Homo sapien
gtccccatttggctcaaccgccgat

SEQ ID NO: 4832672 - DNA, 25 bp, Homo sapien
ggctcaaccgccgatgccaagtgtg

SEQ ID NO: 4832673 - DNA, 25 bp, Homo sapien
ccgccgatgccaagtgtgtggttcc

SEQ ID NO: 4832674 - DNA, 25 bp, Homo sapien
ctaacacgtggggagcgttgcttgc

SEQ ID NO: 4832675 - DNA, 25 bp, Homo sapien
taaaattccgccaaccgaatctcac

SEQ ID NO: 4832676 - DNA, 25 bp, Homo sapien
gtaaaattccgccaaccgaatctca

SEQ ID NO: 4832677 - DNA, 25 bp, Homo sapien
cctaatacctcagtgggtgtacacc

SEQ ID NO: 4832678 - DNA, 25 bp, Homo sapien
cacccagccggtgatattgatccga

SEQ ID NO: 4832679 - DNA, 25 bp, Homo sapien
caatatagcactgggtgtgcatcca

SEQ ID NO: 4832680 - DNA, 25 bp, Homo sapien
caacatcgtaggaagtgtacacccc

SEQ ID NO: 4832681 - DNA, 25 bp, Homo sapien
ctgagagtcccaggaggaggaattc

SEQ ID NO: 4832682 - DNA, 25 bp, Homo sapien
tatacatgcaacaaggagcaggaaa

SEQ ID NO: 4832683 - DNA, 25 bp, Homo sapien
catgcaacaaggagcaggaaagaca

SEQ ID NO: 4832684 - DNA, 25 bp, Homo sapien
cttctatacatgcaacaaggagcag

SEQ ID NO: 4832685 - DNA, 25 bp, Homo sapien
tgcaacaaggagcaggaaagacatc

SEQ ID NO: 4832686 - DNA, 25 bp, Homo sapien
gcaaacaactgctagatgacagcca

SEQ ID NO: 4832687 - DNA, 25 bp, Homo sapien
aacaactgctagatgacagccacag

SEQ ID NO: 4832688 - DNA, 25 bp, Homo sapien
caactgctagatgacagccacaggt

SEQ ID NO: 4832689 - DNA, 25 bp, Homo sapien
aactgctagatgacagccacaggtg

SEQ ID NO: 4832690 - DNA, 25 bp, Homo sapien
catggggtgaccacagcgtacatca

SEQ ID NO: 4832691 - DNA, 25 bp, Homo sapien
accacagcgtacatcactgaagcca

SEQ ID NO: 4832692 - DNA, 25 bp, Homo sapien
tgaccacagcgtacatcactgaagc

SEQ ID NO: 4832693 - DNA, 25 bp, Homo sapien
tcagcatggggtgaccacagcgtac

SEQ ID NO: 4832694 - DNA, 25 bp, Homo sapien
tggaagccaaactccgaattgatga

SEQ ID NO: 4832695 - DNA, 25 bp, Homo sapien
aataggaatggaagccaaactccga

SEQ ID NO: 4832696 - DNA, 25 bp, Homo sapien
ggaatggaagccaaactccgaattg

SEQ ID NO: 4832697 - DNA, 25 bp, Homo sapien
aatggaagccaaactccgaattgat

SEQ ID NO: 4832698 - DNA, 25 bp, Homo sapien
ccgccttccaccgacgctccttgag

SEQ ID NO: 4832699 - DNA, 25 bp, Homo sapien
agaggccgttgtaaaacttcagcat

SEQ ID NO: 4832700 - DNA, 25 bp, Homo sapien
tcgaagtgtaccccgttcatatcag

SEQ ID NO: 4832701 - DNA, 25 bp, Homo sapien
ggtcgaagtgtaccccgttcatatc

SEQ ID NO: 4832702 - DNA, 25 bp, Homo sapien
gaagtgtaccccgttcatatcagtg

SEQ ID NO: 4832703 - DNA, 25 bp, Homo sapien
tatgagaacttatcgtagttctcat

SEQ ID NO: 4832704 - DNA, 25 bp, Homo sapien
agaacttatcgtagttctcatagac

SEQ ID NO: 4832705 - DNA, 25 bp, Homo sapien
ctatgagaacttatcgtagttctca

SEQ ID NO: 4832706 - DNA, 25 bp, Homo sapien
tgagaacttatcgtagttctcatag

SEQ ID NO: 4832707 - DNA, 25 bp, Homo sapien
ctgcaggatgacatgaatgcacctt

SEQ ID NO: 4832708 - DNA, 25 bp, Homo sapien
tgcaggatgacatgaatgcaccttc

SEQ ID NO: 4832709 - DNA, 25 bp, Homo sapien
tgggaaacccgaggctgctcaaaac

SEQ ID NO: 4832710 - DNA, 25 bp, Homo sapien
ggtggtgggaaacccgaggctgctc

SEQ ID NO: 4832711 - DNA, 25 bp, Homo sapien
cccgaggctgctcaaaactcgtgga

SEQ ID NO: 4832712 - DNA, 25 bp, Homo sapien
gctcaaaactcgtggagaattccgc

SEQ ID NO: 4832713 - DNA, 25 bp, Homo sapien
ccacgagagggtggacatcggccac

SEQ ID NO: 4832714 - DNA, 25 bp, Homo sapien
ccacagccaccttgtctttgctctt

SEQ ID NO: 4832715 - DNA, 25 bp, Homo sapien
gagggtggacatcggccacagccac

SEQ ID NO: 4832716 - DNA, 25 bp, Homo sapien
cacagccaccttgtctttgctctta

SEQ ID NO: 4832717 - DNA, 25 bp, Homo sapien
agccaggttgcaccccgatggtctc

SEQ ID NO: 4832718 - DNA, 25 bp, Homo sapien
acctccccgccccagccaggttgca

SEQ ID NO: 4832719 - DNA, 25 bp, Homo sapien
ccgctctggcaatgccctgcaccac

SEQ ID NO: 4832720 - DNA, 25 bp, Homo sapien
ggacaggcccgctctggcaatgccc

SEQ ID NO: 4832721 - DNA, 25 bp, Homo sapien
ccaggcctgcgcagctgtcacatgt

SEQ ID NO: 4832722 - DNA, 25 bp, Homo sapien
ttctggccgctctcgcgcacctctg

SEQ ID NO: 4832723 - DNA, 25 bp, Homo sapien
tgtcctggcccaggaggtcgctgtc

SEQ ID NO: 4832724 - DNA, 25 bp, Homo sapien
tgcgcagctgtcacatgtcctggcc

SEQ ID NO: 4832725 - DNA, 25 bp, Homo sapien
cccatcctgggactgccatccctgc

SEQ ID NO: 4832726 - DNA, 25 bp, Homo sapien
ctcccccatcctgggactgccatcc

SEQ ID NO: 4832727 - DNA, 25 bp, Homo sapien
acgtcctcccccatcctgggactgc

SEQ ID NO: 4832728 - DNA, 25 bp, Homo sapien
gacgtcctcccccatcctgggactg

SEQ ID NO: 4832729 - DNA, 25 bp, Homo sapien
tctccttcctgcccggcagcggcgg

SEQ ID NO: 4832730 - DNA, 25 bp, Homo sapien
gtgccggtctccttcctgcccggca

SEQ ID NO: 4832731 - DNA, 25 bp, Homo sapien
ccggtctccttcctgcccggcagcg

SEQ ID NO: 4832732 - DNA, 25 bp, Homo sapien
ttcctgcccggcagcggcgggtcct

SEQ ID NO: 4832733 - DNA, 25 bp, Homo sapien
agcctcccgacgccccttcgtcgcg

SEQ ID NO: 4832734 - DNA, 25 bp, Homo sapien
gctgcactcccaacttcaacccggg

SEQ ID NO: 4832735 - DNA, 25 bp, Homo sapien
aaatgggttcagaatgaaggctgca

SEQ ID NO: 4832736 - DNA, 25 bp, Homo sapien
tcagaatgaaggctgcactcccaac

SEQ ID NO: 4832737 - DNA, 25 bp, Homo sapien
ggcgggggggctctgattctgccca

SEQ ID NO: 4832738 - DNA, 25 bp, Homo sapien
actgggcgggggggctctgattctg

SEQ ID NO: 4832739 - DNA, 25 bp, Homo sapien
atgtcaccatgagccagcctcccag

SEQ ID NO: 4832740 - DNA, 25 bp, Homo sapien
cagcctcccagacagcatccaggag

SEQ ID NO: 4832741 - DNA, 25 bp, Homo sapien
gcattctggtatcctggtctttggc

SEQ ID NO: 4832742 - DNA, 25 bp, Homo sapien
ggatgcaaaccccagccgcctggct

SEQ ID NO: 4832743 - DNA, 25 bp, Homo sapien
ttctggtatcctggtctttggcaga

SEQ ID NO: 4832744 - DNA, 25 bp, Homo sapien
accaggatgcaaaccccagccgcct

SEQ ID NO: 4832745 - DNA, 25 bp, Homo sapien
aagaaatcactgctgatcctcgtac

SEQ ID NO: 4832746 - DNA, 25 bp, Homo sapien
aaagaaatcactgctgatcctcgta

SEQ ID NO: 4832747 - DNA, 25 bp, Homo sapien
aatcactgctgatcctcgtaccagc

SEQ ID NO: 4832748 - DNA, 25 bp, Homo sapien
gaaatcactgctgatcctcgtacca

SEQ ID NO: 4832749 - DNA, 25 bp, Homo sapien
ctgcaggatgacatgaatgcacctt

SEQ ID NO: 4832750 - DNA, 25 bp, Homo sapien
tgcaggatgacatgaatgcaccttc

SEQ ID NO: 4832751 - DNA, 25 bp, Homo sapien
ggtgggaaacccgaggctgctcaaa

SEQ ID NO: 4832752 - DNA, 25 bp, Homo sapien
cccgaggctgctcaaaactcgtgga

SEQ ID NO: 4832753 - DNA, 25 bp, Homo sapien
gtgtatcttccatgatttggaggtg

SEQ ID NO: 4832754 - DNA, 25 bp, Homo sapien
gctcaaaactcgtggagaattccgc

SEQ ID NO: 4832755 - DNA, 25 bp, Homo sapien
ccacagccaccttgtctttgctctt

SEQ ID NO: 4832756 - DNA, 25 bp, Homo sapien
acagccaccttgtctttgctcttac

SEQ ID NO: 4832757 - DNA, 25 bp, Homo sapien
gagggtggacatcggccacagccac

SEQ ID NO: 4832758 - DNA, 25 bp, Homo sapien
gagagggtggacatcggccacagcc

SEQ ID NO: 4832759 - DNA, 25 bp, Homo sapien
tgcccccgcccaggcagtcgctgtc

SEQ ID NO: 4832760 - DNA, 25 bp, Homo sapien
ccccgcccaggcagtcgctgtcccc

SEQ ID NO: 4832761 - DNA, 25 bp, Homo sapien
cccccgcccaggcagtcgctgtccc

SEQ ID NO: 4832762 - DNA, 25 bp, Homo sapien
gggctgggcatagcggccggcgcgg

SEQ ID NO: 4832763 - DNA, 25 bp, Homo sapien
tggagaagaggaaggatacggcgcg

SEQ ID NO: 4832764 - DNA, 25 bp, Homo sapien
cgcggggctgggcatagcggccggc

SEQ ID NO: 4832765 - DNA, 25 bp, Homo sapien
caccgcggacaagccgggccctggc

SEQ ID NO: 4832766 - DNA, 25 bp, Homo sapien
tgccggaagggctggccacggctgg

SEQ ID NO: 4832767 - DNA, 25 bp, Homo sapien
ctcgcagtcctcgggttctgcgctt

SEQ ID NO: 4832768 - DNA, 25 bp, Homo sapien
tcgcagtcctcgggttctgcgcttc

SEQ ID NO: 4832769 - DNA, 25 bp, Homo sapien
aagggctggccacggctggggggct

SEQ ID NO: 4832770 - DNA, 25 bp, Homo sapien
tgtctgggtgccggtctcctccctg

SEQ ID NO: 4832771 - DNA, 25 bp, Homo sapien
tgggtgccggtctcctccctgcctg

SEQ ID NO: 4832772 - DNA, 25 bp, Homo sapien
ccctgcctggccgcggcgcgtcctc

SEQ ID NO: 4832773 - DNA, 25 bp, Homo sapien
gtctgggtgccggtctcctccctgc

SEQ ID NO: 4832774 - DNA, 25 bp, Homo sapien
cctctcaactcttgctgcccaacca

SEQ ID NO: 4832775 - DNA, 25 bp, Homo sapien
agaaaaacaggaagatgcgggacgg

SEQ ID NO: 4832776 - DNA, 25 bp, Homo sapien
aaacaggaagatgcgggacgggtga

SEQ ID NO: 4832777 - DNA, 25 bp, Homo sapien
tcctctcaactcttgctgcccaacc

SEQ ID NO: 4832778 - DNA, 25 bp, Homo sapien
ttcaggggccaacgtttgcaggaca

SEQ ID NO: 4832779 - DNA, 25 bp, Homo sapien
gtggaaggccagcaaagccacacag

SEQ ID NO: 4832780 - DNA, 25 bp, Homo sapien
ggccagcctggctacgcagccccat

SEQ ID NO: 4832781 - DNA, 25 bp, Homo sapien
gcggccctcactgaggggtacagtt

SEQ ID NO: 4832782 - DNA, 25 bp, Homo sapien
actgaggggtacagttctccagcgg

SEQ ID NO: 4832783 - DNA, 25 bp, Homo sapien
gggctctgatgccgcccacggcgag

SEQ ID NO: 4832784 - DNA, 25 bp, Homo sapien
gctctgatgccgcccacggcgagga

SEQ ID NO: 4832785 - DNA, 25 bp, Homo sapien
gggggctctgatgccgcccacggcg

SEQ ID NO: 4832786 - DNA, 25 bp, Homo sapien
ctgatgccgcccacggcgaggaggg

SEQ ID NO: 4832787 - DNA, 25 bp, Homo sapien
tcgcgttccaaaggtctcactacag

SEQ ID NO: 4832788 - DNA, 25 bp, Homo sapien
gaatcgcgttccaaaggtctcacta

SEQ ID NO: 4832789 - DNA, 25 bp, Homo sapien
gttccaaaggtctcactacagttgg

SEQ ID NO: 4832790 - DNA, 25 bp, Homo sapien
ctccagaatcgcgttccaaaggtct

SEQ ID NO: 4832791 - DNA, 25 bp, Homo sapien
aagaaatcactgctgatcctcgtac

SEQ ID NO: 4832792 - DNA, 25 bp, Homo sapien
aaagaaatcactgctgatcctcgta

SEQ ID NO: 4832793 - DNA, 25 bp, Homo sapien
gaaatcactgctgatcctcgtacca

SEQ ID NO: 4832794 - DNA, 25 bp, Homo sapien
aatcactgctgatcctcgtaccagc

SEQ ID NO: 4832795 - DNA, 25 bp, Homo sapien
tcacgtgagtcaccagcatccctgg

SEQ ID NO: 4832796 - DNA, 25 bp, Homo sapien
tttggaacatatcccacgaacattc

SEQ ID NO: 4832797 - DNA, 25 bp, Homo sapien
tgataggtccgtcagtcctttggaa

SEQ ID NO: 4832798 - DNA, 25 bp, Homo sapien
cacacatcaacaccgtcacgtgagt

SEQ ID NO: 4832799 - DNA, 25 bp, Homo sapien
aagtacagtggttcaatctcggctg

SEQ ID NO: 4832800 - DNA, 25 bp, Homo sapien
actgcaacctctgtctcccaggtgc

SEQ ID NO: 4832801 - DNA, 25 bp, Homo sapien
agacagttttgccatgttgaccagg

SEQ ID NO: 4832802 - DNA, 25 bp, Homo sapien
ctgtctcccaggtgcaaacgattct

SEQ ID NO: 4832803 - DNA, 25 bp, Homo sapien
ggaaaatgttagaacagggcaacaa

SEQ ID NO: 4832804 - DNA, 25 bp, Homo sapien
aagctcagctcatgagctgagatga

SEQ ID NO: 4832805 - DNA, 25 bp, Homo sapien
gaccgagcaagccccctggatgctt

SEQ ID NO: 4832806 - DNA, 25 bp, Homo sapien
cagaccgagcaagccccctggatgc

SEQ ID NO: 4832807 - DNA, 25 bp, Homo sapien
cgagcaagccccctggatgcttctc

SEQ ID NO: 4832808 - DNA, 25 bp, Homo sapien
ccgagcaagccccctggatgcttct

SEQ ID NO: 4832809 - DNA, 25 bp, Homo sapien
accatttagctaacacccccatcct

SEQ ID NO: 4832810 - DNA, 25 bp, Homo sapien
acatttcatgacctcaaaaagaaac

SEQ ID NO: 4832811 - DNA, 25 bp, Homo sapien
tctgaatgaaatcatgtagaatgtg

SEQ ID NO: 4832812 - DNA, 25 bp, Homo sapien
gcaaccactaatcgacttcctattt

SEQ ID NO: 4832813 - DNA, 25 bp, Homo sapien
ggcacttgttcttaacaaccgccat

SEQ ID NO: 4832814 - DNA, 25 bp, Homo sapien
taaggcacttgttcttaacaaccgc

SEQ ID NO: 4832815 - DNA, 25 bp, Homo sapien
cataaggcacttgttcttaacaacc

SEQ ID NO: 4832816 - DNA, 25 bp, Homo sapien
ttcataaggcacttgttcttaacaa

SEQ ID NO: 4832817 - DNA, 25 bp, Homo sapien
gatctttcttagagaatggaccaac

SEQ ID NO: 4832818 - DNA, 25 bp, Homo sapien
tactgatctttcttagagaatggac

SEQ ID NO: 4832819 - DNA, 25 bp, Homo sapien
ctttcttagagaatggaccaactac

SEQ ID NO: 4832820 - DNA, 25 bp, Homo sapien
actgatctttcttagagaatggacc

SEQ ID NO: 4832821 - DNA, 25 bp, Homo sapien
ttatattgaacatagcaggtgcttt

SEQ ID NO: 4832822 - DNA, 25 bp, Homo sapien
tatattgaacatagcaggtgctttc

SEQ ID NO: 4832823 - DNA, 25 bp, Homo sapien
cttatattgaacatagcaggtgctt

SEQ ID NO: 4832824 - DNA, 25 bp, Homo sapien
tattgaacatagcaggtgctttcac

SEQ ID NO: 4832825 - DNA, 25 bp, Homo sapien
cctttggtcctggtgaccaagtctt

SEQ ID NO: 4832826 - DNA, 25 bp, Homo sapien
tttggtcctggtgaccaagtctttc

SEQ ID NO: 4832827 - DNA, 25 bp, Homo sapien
gatgcaatttgggttcctttggtcc

SEQ ID NO: 4832828 - DNA, 25 bp, Homo sapien
ttcctttggtcctggtgaccaagtc

SEQ ID NO: 4832829 - DNA, 25 bp, Homo sapien
tcatttcaaacactagaaacttgag

SEQ ID NO: 4832830 - DNA, 25 bp, Homo sapien
agactcatttcaaacactagaaact

SEQ ID NO: 4832831 - DNA, 25 bp, Homo sapien
actcatttcaaacactagaaacttg

SEQ ID NO: 4832832 - DNA, 25 bp, Homo sapien
atttcaaacactagaaacttgagac

SEQ ID NO: 4832833 - DNA, 25 bp, Homo sapien
taatacccatgccattgaagttagt

SEQ ID NO: 4832834 - DNA, 25 bp, Homo sapien
ggtaatacccatgccattgaagtta

SEQ ID NO: 4832835 - DNA, 25 bp, Homo sapien
acaggtaatacccatgccattgaag

SEQ ID NO: 4832836 - DNA, 25 bp, Homo sapien
gtcacaggtaatacccatgccattg

SEQ ID NO: 4832837 - DNA, 25 bp, Homo sapien
atttggcagactgttggtgctgagc

SEQ ID NO: 4832838 - DNA, 25 bp, Homo sapien
tcttcttctggatttggcagactgt

SEQ ID NO: 4832839 - DNA, 25 bp, Homo sapien
ctggatttggcagactgttggtgct

SEQ ID NO: 4832840 - DNA, 25 bp, Homo sapien
tcttctggatttggcagactgttgg

SEQ ID NO: 4832841 - DNA, 25 bp, Homo sapien
tgccaccaagcccggatacttattt

SEQ ID NO: 4832842 - DNA, 25 bp, Homo sapien
ttagcacgcatctcgtccctagtgg

SEQ ID NO: 4832843 - DNA, 25 bp, Homo sapien
attcaactttagcacgcatctcgtc

SEQ ID NO: 4832844 - DNA, 25 bp, Homo sapien
aaataggacttcttatttgctactg

SEQ ID NO: 4832845 - DNA, 25 bp, Homo sapien
ctggatattgtcacatgaggacttg

SEQ ID NO: 4832846 - DNA, 25 bp, Homo sapien
cttgacatgcggattgtggcagcct

SEQ ID NO: 4832847 - DNA, 25 bp, Homo sapien
gtcacatgaggacttgacatgcgga

SEQ ID NO: 4832848 - DNA, 25 bp, Homo sapien
aggacttgacatgcggattgtggca

SEQ ID NO: 4832849 - DNA, 25 bp, Homo sapien
agctgggtcaccctcaacttaaggc

SEQ ID NO: 4832850 - DNA, 25 bp, Homo sapien
gggtcaccctcaacttaaggctcat

SEQ ID NO: 4832851 - DNA, 25 bp, Homo sapien
gctgggtcaccctcaacttaaggct

SEQ ID NO: 4832852 - DNA, 25 bp, Homo sapien
ctgtaagaccgagctccctctctcc

SEQ ID NO: 4832853 - DNA, 25 bp, Homo sapien
taggacaccctagcagtcaggatga

SEQ ID NO: 4832854 - DNA, 25 bp, Homo sapien
gaatgtggtggatcatagagcctct

SEQ ID NO: 4832855 - DNA, 25 bp, Homo sapien
tcttggtcacgttgcatgtctgggc

SEQ ID NO: 4832856 - DNA, 25 bp, Homo sapien
gactcaagttgctcctgctcgtggt

SEQ ID NO: 4832857 - DNA, 25 bp, Homo sapien
gaaaagacacctaagcccaagaaga

SEQ ID NO: 4832858 - DNA, 25 bp, Homo sapien
tatccgggtgagagagcgaataagt

SEQ ID NO: 4832859 - DNA, 25 bp, Homo sapien
gatttctgcgggagcatctatccgg

SEQ ID NO: 4832860 - DNA, 25 bp, Homo sapien
gggcaagggtcgtctatggctccag

SEQ ID NO: 4832861 - DNA, 25 bp, Homo sapien
ttgggtatccgggggagacaacaca

SEQ ID NO: 4832862 - DNA, 25 bp, Homo sapien
attaccaccacccaacactatcggg

SEQ ID NO: 4832863 - DNA, 25 bp, Homo sapien
catcttcatcattgcattaccacca

SEQ ID NO: 4832864 - DNA, 25 bp, Homo sapien
ggtatccgggggagacaacacacat

SEQ ID NO: 4832865 - DNA, 25 bp, Homo sapien
tctgttatattcataagctaaggat

SEQ ID NO: 4832866 - DNA, 25 bp, Homo sapien
ttaattctgttatattcataagcta

SEQ ID NO: 4832867 - DNA, 25 bp, Homo sapien
tattcataagctaaggatgtacatc

SEQ ID NO: 4832868 - DNA, 25 bp, Homo sapien
agaagagaataacggcaatttttag

SEQ ID NO: 4832869 - DNA, 25 bp, Homo sapien
actcctctgcaggtgcaatggtgta

SEQ ID NO: 4832870 - DNA, 25 bp, Homo sapien
ctcctctgcaggtgcaatggtgtaa

SEQ ID NO: 4832871 - DNA, 25 bp, Homo sapien
ctaccttctagcgtcctagagaaac

SEQ ID NO: 4832872 - DNA, 25 bp, Homo sapien
tctagcgtcctagagaaacatgcag

SEQ ID NO: 4832873 - DNA, 25 bp, Homo sapien
aacatgcagagtcgaaagagggaca

SEQ ID NO: 4832874 - DNA, 25 bp, Homo sapien
gagaaacatgcagagtcgaaagagg

SEQ ID NO: 4832875 - DNA, 25 bp, Homo sapien
catggagagtggatcctgactaaac

SEQ ID NO: 4832876 - DNA, 25 bp, Homo sapien
tagaattatgaacggcgcatgaacg

SEQ ID NO: 4832877 - DNA, 25 bp, Homo sapien
ttgaggcgaaaacgcggtctggctt

SEQ ID NO: 4832878 - DNA, 25 bp, Homo sapien
gactaaacgtagctaatgtagggaa

SEQ ID NO: 4832879 - DNA, 25 bp, Homo sapien
agcttctcaattcccaggatccaat

SEQ ID NO: 4832880 - DNA, 25 bp, Homo sapien
aagcttctcaattcccaggatccaa

SEQ ID NO: 4832881 - DNA, 25 bp, Homo sapien
tccagataagactcttgttctcagt

SEQ ID NO: 4832882 - DNA, 25 bp, Homo sapien
ccaatccagataagactcttgttct

SEQ ID NO: 4832883 - DNA, 25 bp, Homo sapien
caaccttggttgctaagctgctgag

SEQ ID NO: 4832884 - DNA, 25 bp, Homo sapien
tgtagcatgcaaaccacttatgttg

SEQ ID NO: 4832885 - DNA, 25 bp, Homo sapien
tctttgagtggccatatggagcaca

SEQ ID NO: 4832886 - DNA, 25 bp, Homo sapien
ccttagtcatggtcagtgctccaca

SEQ ID NO: 4832887 - DNA, 25 bp, Homo sapien
caggttgggggtgttcacatcctga

SEQ ID NO: 4832888 - DNA, 25 bp, Homo sapien
aggttgggggtgttcacatcctgat

SEQ ID NO: 4832889 - DNA, 25 bp, Homo sapien
ttgacgccctccctggccagatggt

SEQ ID NO: 4832890 - DNA, 25 bp, Homo sapien
gtacttggccttgacgccctccctg

SEQ ID NO: 4832891 - DNA, 25 bp, Homo sapien
tggcagtgaagtgggacggggaggt

SEQ ID NO: 4832892 - DNA, 25 bp, Homo sapien
gcagtgaagtgggacggggaggtca

SEQ ID NO: 4832893 - DNA, 25 bp, Homo sapien
gatggcagtgaagtgggacggggag

SEQ ID NO: 4832894 - DNA, 25 bp, Homo sapien
cagtgaagtgggacggggaggtcat

SEQ ID NO: 4832895 - DNA, 25 bp, Homo sapien
ccctgccccagtttctaagaaaatg

SEQ ID NO: 4832896 - DNA, 25 bp, Homo sapien
ttaggataggtgacgtttcaccatg

SEQ ID NO: 4832897 - DNA, 25 bp, Homo sapien
aaaagaacaggccagtcacggtagc

SEQ ID NO: 4832898 - DNA, 25 bp, Homo sapien
catgctcggccttatttactttaaa

SEQ ID NO: 4832899 - DNA, 25 bp, Homo sapien
gaatcagaagacaaaggagatgact

SEQ ID NO: 4832900 - DNA, 25 bp, Homo sapien
acttcctttctatgagagctcacgg

SEQ ID NO: 4832901 - DNA, 25 bp, Homo sapien
tatgagagctcacggaatcagaaga

SEQ ID NO: 4832902 - DNA, 25 bp, Homo sapien
cttcacttcctttctatgagagctc

SEQ ID NO: 4832903 - DNA, 25 bp, Homo sapien
tggtcctcaatcactttgcaataaa

SEQ ID NO: 4832904 - DNA, 25 bp, Homo sapien
gatgttcattgtcattaccagtgac

SEQ ID NO: 4832905 - DNA, 25 bp, Homo sapien
aaacctgagattgtgaagatgttca

SEQ ID NO: 4832906 - DNA, 25 bp, Homo sapien
ttgtcattaccagtgacggagcagt

SEQ ID NO: 4832907 - DNA, 25 bp, Homo sapien
ggagcatccacttttcacccctggg

SEQ ID NO: 4832908 - DNA, 25 bp, Homo sapien
caccccgggagttgcacagtatata

SEQ ID NO: 4832909 - DNA, 25 bp, Homo sapien
gcttctgcccggaacatggcggtaa

SEQ ID NO: 4832910 - DNA, 25 bp, Homo sapien
gaaaaggcagactcattaccgatgg

SEQ ID NO: 4832911 - DNA, 25 bp, Homo sapien
tggtttctttgctcagtgcacctgt

SEQ ID NO: 4832912 - DNA, 25 bp, Homo sapien
caggccttttttcagcagcgttgtc

SEQ ID NO: 4832913 - DNA, 25 bp, Homo sapien
gatctccaggccttttttcagcagc

SEQ ID NO: 4832914 - DNA, 25 bp, Homo sapien
tgttgatctccaggccttttttcag

SEQ ID NO: 4832915 - DNA, 25 bp, Homo sapien
tctcctcttggaaatgtgtagtctt

SEQ ID NO: 4832916 - DNA, 25 bp, Homo sapien
tgtgagtcactctatccagcctcaa

SEQ ID NO: 4832917 - DNA, 25 bp, Homo sapien
gcagtcttcccgtctcagactggga

SEQ ID NO: 4832918 - DNA, 25 bp, Homo sapien
gtctttgagggaatgtcattttgtc

SEQ ID NO: 4832919 - DNA, 25 bp, Homo sapien
ggacttcacacccagttgttgtggg

SEQ ID NO: 4832920 - DNA, 25 bp, Homo sapien
cggtcaggacttcacacccagttgt

SEQ ID NO: 4832921 - DNA, 25 bp, Homo sapien
gggtgtttggccgacacgacacttc

SEQ ID NO: 4832922 - DNA, 25 bp, Homo sapien
tgaaggccctgcagtcaggaacggt

SEQ ID NO: 4832923 - DNA, 25 bp, Homo sapien
aaggaagcttgaggaacatgactgg

SEQ ID NO: 4832924 - DNA, 25 bp, Homo sapien
tgggatttaccgataacaacagtag

SEQ ID NO: 4832925 - DNA, 25 bp, Homo sapien
ctgggatttaccgataacaacagta

SEQ ID NO: 4832926 - DNA, 25 bp, Homo sapien
gatcaaggaagcttgaggaacatga

SEQ ID NO: 4832927 - DNA, 25 bp, Homo sapien
tccctagaagctgggactactgggc

SEQ ID NO: 4832928 - DNA, 25 bp, Homo sapien
ctagaagctgggactactgggcatg

SEQ ID NO: 4832929 - DNA, 25 bp, Homo sapien
gactactgggcatgtaccaccaagc

SEQ ID NO: 4832930 - DNA, 25 bp, Homo sapien
ggactactgggcatgtaccaccaag

SEQ ID NO: 4832931 - DNA, 25 bp, Homo sapien
acaataccctgctttcaagggcaga

SEQ ID NO: 4832932 - DNA, 25 bp, Homo sapien
accttggacaataccctgctttcaa

SEQ ID NO: 4832933 - DNA, 25 bp, Homo sapien
ttggacaataccctgctttcaaggg

SEQ ID NO: 4832934 - DNA, 25 bp, Homo sapien
ggacaataccctgctttcaagggca

SEQ ID NO: 4832935 - DNA, 25 bp, Homo sapien
ccagtcttcggggatcatggctgga

SEQ ID NO: 4832936 - DNA, 25 bp, Homo sapien
gaattactgcattaacggctcttaa

SEQ ID NO: 4832937 - DNA, 25 bp, Homo sapien
atgggttgaattactgcattaacgg

SEQ ID NO: 4832938 - DNA, 25 bp, Homo sapien
cggctcttaaatcagttagcatgcg

SEQ ID NO: 4832939 - DNA, 25 bp, Homo sapien
acctgcattcccaaataatgaaaag

SEQ ID NO: 4832940 - DNA, 25 bp, Homo sapien
tcctctacctgcattcccaaataat

SEQ ID NO: 4832941 - DNA, 25 bp, Homo sapien
ataatgaaaaggagtggagatctga

SEQ ID NO: 4832942 - DNA, 25 bp, Homo sapien
aatgaaaaggagtggagatctgaat

SEQ ID NO: 4832943 - DNA, 25 bp, Homo sapien
tgagagcctctcgagctaaagttgt

SEQ ID NO: 4832944 - DNA, 25 bp, Homo sapien
actgagagcctctcgagctaaagtt

SEQ ID NO: 4832945 - DNA, 25 bp, Homo sapien
gagagcctctcgagctaaagttgtc

SEQ ID NO: 4832946 - DNA, 25 bp, Homo sapien
gagcctctcgagctaaagttgtcat

SEQ ID NO: 4832947 - DNA, 25 bp, Homo sapien
gagcatttagttccaagcaccttcc

SEQ ID NO: 4832948 - DNA, 25 bp, Homo sapien
gccagatggacttttttggagcatt

SEQ ID NO: 4832949 - DNA, 25 bp, Homo sapien
ttggagcatttagttccaagcacct

SEQ ID NO: 4832950 - DNA, 25 bp, Homo sapien
tggccagatggacttttttggagca

SEQ ID NO: 4832951 - DNA, 25 bp, Homo sapien
ccgggccctgggttcgctctgattg

SEQ ID NO: 4832952 - DNA, 25 bp, Homo sapien
cgctctgattgcagcggtttcccgc

SEQ ID NO: 4832953 - DNA, 25 bp, Homo sapien
tcgctctgattgcagcggtttcccg

SEQ ID NO: 4832954 - DNA, 25 bp, Homo sapien
gccctgggttcgctctgattgcagc

SEQ ID NO: 4832955 - DNA, 25 bp, Homo sapien
atgatgccactttgttccccttcaa

SEQ ID NO: 4832956 - DNA, 25 bp, Homo sapien
ttaacacctcccttggaatagtgga

SEQ ID NO: 4832957 - DNA, 25 bp, Homo sapien
cttggaatagtggaatgatgccact

SEQ ID NO: 4832958 - DNA, 25 bp, Homo sapien
ggaatgatgccactttgttcccctt

SEQ ID NO: 4832959 - DNA, 25 bp, Homo sapien
gatacccgatggcgctgtcgatttg

SEQ ID NO: 4832960 - DNA, 25 bp, Homo sapien
tacccgatggcgctgtcgatttgct

SEQ ID NO: 4832961 - DNA, 25 bp, Homo sapien
cagatacccgatggcgctgtcgatt

SEQ ID NO: 4832962 - DNA, 25 bp, Homo sapien
cccgatggcgctgtcgatttgctga

SEQ ID NO: 4832963 - DNA, 25 bp, Homo sapien
atgacgctgaggtgctctgtaggct

SEQ ID NO: 4832964 - DNA, 25 bp, Homo sapien
cacggtggtcatcccacggtctcat

SEQ ID NO: 4832965 - DNA, 25 bp, Homo sapien
ttcacggtggtcatcccacggtctc

SEQ ID NO: 4832966 - DNA, 25 bp, Homo sapien
ggtggtcatcccacggtctcatgtg

SEQ ID NO: 4832967 - DNA, 25 bp, Homo sapien
cccggtcatgtttagccatatggaa

SEQ ID NO: 4832968 - DNA, 25 bp, Homo sapien
gatgtggaggtgagggtacgcattc

SEQ ID NO: 4832969 - DNA, 25 bp, Homo sapien
ccacgatatcaaacttgactaagtc

SEQ ID NO: 4832970 - DNA, 25 bp, Homo sapien
cgatatcaaacttgactaagtccct

SEQ ID NO: 4832971 - DNA, 25 bp, Homo sapien
gccccatcatatcgaggtggaagtt

SEQ ID NO: 4832972 - DNA, 25 bp, Homo sapien
tccttaggctgtttgcagtgcccag

SEQ ID NO: 4832973 - DNA, 25 bp, Homo sapien
agcaggccccatcatatcgaggtgg

SEQ ID NO: 4832974 - DNA, 25 bp, Homo sapien
caggccccatcatatcgaggtggaa

SEQ ID NO: 4832975 - DNA, 25 bp, Homo sapien
atagctgttgttccccaccagaacc

SEQ ID NO: 4832976 - DNA, 25 bp, Homo sapien
tgttgttccccaccagaaccaaatg

SEQ ID NO: 4832977 - DNA, 25 bp, Homo sapien
caccagaaccaaatgagcgcaagat

SEQ ID NO: 4832978 - DNA, 25 bp, Homo sapien
tgttccccaccagaaccaaatgagc

SEQ ID NO: 4832979 - DNA, 25 bp, Homo sapien
actaggaagcggctctcaaaaccct

SEQ ID NO: 4832980 - DNA, 25 bp, Homo sapien
gcgcgccactaggaagcggctctca

SEQ ID NO: 4832981 - DNA, 25 bp, Homo sapien
cactaggaagcggctctcaaaaccc

SEQ ID NO: 4832982 - DNA, 25 bp, Homo sapien
cgccactaggaagcggctctcaaaa

SEQ ID NO: 4832983 - DNA, 25 bp, Homo sapien
ctgcccctggactccgcgagccccg

SEQ ID NO: 4832984 - DNA, 25 bp, Homo sapien
gactccgcgagccccgcgggcctct

SEQ ID NO: 4832985 - DNA, 25 bp, Homo sapien
cctggactccgcgagccccgcgggc

SEQ ID NO: 4832986 - DNA, 25 bp, Homo sapien
aggagcgccgggggtttcagcacgg

SEQ ID NO: 4832987 - DNA, 25 bp, Homo sapien
gagacctatgatgcttttatgaagg

SEQ ID NO: 4832988 - DNA, 25 bp, Homo sapien
gacctatgatgcttttatgaaggtt

SEQ ID NO: 4832989 - DNA, 25 bp, Homo sapien
agacctatgatgcttttatgaaggt

SEQ ID NO: 4832990 - DNA, 25 bp, Homo sapien
ctgcaaaatatcctgcagcagctca

SEQ ID NO: 4832991 - DNA, 25 bp, Homo sapien
ctgatgagtctcttaactttgcctc

SEQ ID NO: 4832992 - DNA, 25 bp, Homo sapien
atctgatgagtctcttaactttgcc

SEQ ID NO: 4832993 - DNA, 25 bp, Homo sapien
tgcagcagctcagaatctgatgagt

SEQ ID NO: 4832994 - DNA, 25 bp, Homo sapien
agcaccaggcatacttgactgacgg

SEQ ID NO: 4832995 - DNA, 25 bp, Homo sapien
caccaggcatacttgactgacggcg

SEQ ID NO: 4832996 - DNA, 25 bp, Homo sapien
aaagcaccaggcatacttgactgac

SEQ ID NO: 4832997 - DNA, 25 bp, Homo sapien
accaggcatacttgactgacggcgg

SEQ ID NO: 4832998 - DNA, 25 bp, Homo sapien
tcagggtctccgccagcgcctcgta

SEQ ID NO: 4832999 - DNA, 25 bp, Homo sapien
gcctcgtacagctcatccaaaggct

SEQ ID NO: 4833000 - DNA, 25 bp, Homo sapien
catcagggtctccgccagcgcctcg

SEQ ID NO: 4833001 - DNA, 25 bp, Homo sapien
tccgccagcgcctcgtacagctcat

SEQ ID NO: 4833002 - DNA, 25 bp, Homo sapien
tagaagacaaatagccatccaccac

SEQ ID NO: 4833003 - DNA, 25 bp, Homo sapien
tccagcaatcagaaggcaagtggct

SEQ ID NO: 4833004 - DNA, 25 bp, Homo sapien
ccatgacaggaccaattgccagtca

SEQ ID NO: 4833005 - DNA, 25 bp, Homo sapien
agggcgagagagtcagtccagcaat

SEQ ID NO: 4833006 - DNA, 25 bp, Homo sapien
cccatgtgaccagacccgtggtgct

SEQ ID NO: 4833007 - DNA, 25 bp, Homo sapien
atcccatgtgaccagacccgtggtg

SEQ ID NO: 4833008 - DNA, 25 bp, Homo sapien
tgtgaccagacccgtggtgctgtgg

SEQ ID NO: 4833009 - DNA, 25 bp, Homo sapien
catgtgaccagacccgtggtgctgt

SEQ ID NO: 4833010 - DNA, 25 bp, Homo sapien
tgcgactgcaccagggtaagcccgc

SEQ ID NO: 4833011 - DNA, 25 bp, Homo sapien
gggaccgtgtctgcgactgcaccag

SEQ ID NO: 4833012 - DNA, 25 bp, Homo sapien
aaaggggaccgtgtctgcgactgca

SEQ ID NO: 4833013 - DNA, 25 bp, Homo sapien
cgtgtctgcgactgcaccagggtaa

SEQ ID NO: 4833014 - DNA, 25 bp, Homo sapien
agaaggacatttccttggagctgct

SEQ ID NO: 4833015 - DNA, 25 bp, Homo sapien
tccttggagctgctcgaggactcgg

SEQ ID NO: 4833016 - DNA, 25 bp, Homo sapien
aaggacatttccttggagctgctcg

SEQ ID NO: 4833017 - DNA, 25 bp, Homo sapien
tgctcgaggactcggctgtgacagt

SEQ ID NO: 4833018 - DNA, 25 bp, Homo sapien
ccagtccagcgctgggccattgtca

SEQ ID NO: 4833019 - DNA, 25 bp, Homo sapien
tcccagtccagcgctgggccattgt

SEQ ID NO: 4833020 - DNA, 25 bp, Homo sapien
cccagtccagcgctgggccattgtc

SEQ ID NO: 4833021 - DNA, 25 bp, Homo sapien
gaggcaccccgtcctttgatttcac

SEQ ID NO: 4833022 - DNA, 25 bp, Homo sapien
agaggcaccccgtcctttgatttca

SEQ ID NO: 4833023 - DNA, 25 bp, Homo sapien
gcgctggacctgtggatttcaggac

SEQ ID NO: 4833024 - DNA, 25 bp, Homo sapien
ctggacctgtggatttcaggactgt

SEQ ID NO: 4833025 - DNA, 25 bp, Homo sapien
tggacctgtggatttcaggactgtg

SEQ ID NO: 4833026 - DNA, 25 bp, Homo sapien
agcgctggacctgtggatttcagga

SEQ ID NO: 4833027 - DNA, 25 bp, Homo sapien
tctagagggcttcaaatgacacaaa

SEQ ID NO: 4833028 - DNA, 25 bp, Homo sapien
gagggcttcaaatgacacaaagcct

SEQ ID NO: 4833029 - DNA, 25 bp, Homo sapien
agagggcttcaaatgacacaaagcc

SEQ ID NO: 4833030 - DNA, 25 bp, Homo sapien
ctatctagagggcttcaaatgacac

SEQ ID NO: 4833031 - DNA, 25 bp, Homo sapien
gcaattacttgggtgaaaaaggaga

SEQ ID NO: 4833032 - DNA, 25 bp, Homo sapien
gaccctgaccagtgacacaatggct

SEQ ID NO: 4833033 - DNA, 25 bp, Homo sapien
caattgcggacagcgaaggccacgt

SEQ ID NO: 4833034 - DNA, 25 bp, Homo sapien
tcaattgcggacagcgaaggccacg

SEQ ID NO: 4833035 - DNA, 25 bp, Homo sapien
cgcaggaccctgaccagtgacacaa

SEQ ID NO: 4833036 - DNA, 25 bp, Homo sapien
gctcggtggtgaacagctggcacgt

SEQ ID NO: 4833037 - DNA, 25 bp, Homo sapien
cggtggtgaacagctggcacgtctc

SEQ ID NO: 4833038 - DNA, 25 bp, Homo sapien
ctagctcggtggtgaacagctggca

SEQ ID NO: 4833039 - DNA, 25 bp, Homo sapien
tcggtggtgaacagctggcacgtct

SEQ ID NO: 4833040 - DNA, 25 bp, Homo sapien
aggagtggtttggaaagcgcgccat

SEQ ID NO: 4833041 - DNA, 25 bp, Homo sapien
cgcggattggaacccgcaccatgtg

SEQ ID NO: 4833042 - DNA, 25 bp, Homo sapien
taccccaccatgtttgcagcccgag

SEQ ID NO: 4833043 - DNA, 25 bp, Homo sapien
tttggaaagcgcgccatgtgctctg

SEQ ID NO: 4833044 - DNA, 25 bp, Homo sapien
tggtgatgcgtctccatgagcggcc

SEQ ID NO: 4833045 - DNA, 25 bp, Homo sapien
tgtgaccgtctacgacaagctggca

SEQ ID NO: 4833046 - DNA, 25 bp, Homo sapien
aacttctgagttgtctatagccgcc

SEQ ID NO: 4833047 - DNA, 25 bp, Homo sapien
gaggctgacgcactagaattacttc

SEQ ID NO: 4833048 - DNA, 25 bp, Homo sapien
agcccctttcattcggtgattcctc

SEQ ID NO: 4833049 - DNA, 25 bp, Homo sapien
aagcccctttcattcggtgattcct

SEQ ID NO: 4833050 - DNA, 25 bp, Homo sapien
ccctttcattcggtgattcctcagg

SEQ ID NO: 4833051 - DNA, 25 bp, Homo sapien
gcccctttcattcggtgattcctca

SEQ ID NO: 4833052 - DNA, 25 bp, Homo sapien
ggagtgcagaccatgtgggtcttac

SEQ ID NO: 4833053 - DNA, 25 bp, Homo sapien
acagaaccagggagtgcagaccatg

SEQ ID NO: 4833054 - DNA, 25 bp, Homo sapien
ctccacacaataacagaaccaggga

SEQ ID NO: 4833055 - DNA, 25 bp, Homo sapien
tccacacaataacagaaccagggag

SEQ ID NO: 4833056 - DNA, 25 bp, Homo sapien
taaggatgaggactcctggtttgtg

SEQ ID NO: 4833057 - DNA, 25 bp, Homo sapien
aggatgaggactcctggtttgtgct

SEQ ID NO: 4833058 - DNA, 25 bp, Homo sapien
ttctaaggatgaggactcctggttt

SEQ ID NO: 4833059 - DNA, 25 bp, Homo sapien
tctaaggatgaggactcctggtttg

SEQ ID NO: 4833060 - DNA, 25 bp, Homo sapien
gaataggtgggtattctctctgaag

SEQ ID NO: 4833061 - DNA, 25 bp, Homo sapien
tctgaagacaaatggtggagagtag

SEQ ID NO: 4833062 - DNA, 25 bp, Homo sapien
cagtaataagttgcattccagaagg

SEQ ID NO: 4833063 - DNA, 25 bp, Homo sapien
ctttccacggaaagagaataggtgg

SEQ ID NO: 4833064 - DNA, 25 bp, Homo sapien
gcctttttaacccagtctgtgagac

SEQ ID NO: 4833065 - DNA, 25 bp, Homo sapien
taaattgacgaaggattgagcatgc

SEQ ID NO: 4833066 - DNA, 25 bp, Homo sapien
gactgaaccataaacgtgacattct

SEQ ID NO: 4833067 - DNA, 25 bp, Homo sapien
ttgaccctgaataccctgcagtgag

SEQ ID NO: 4833068 - DNA, 25 bp, Homo sapien
gctgatcgtgggttctacaatagtg

SEQ ID NO: 4833069 - DNA, 25 bp, Homo sapien
ctgaaaagacatccgaaaaggctga

SEQ ID NO: 4833070 - DNA, 25 bp, Homo sapien
cctggcggtctctcatcagctttac

SEQ ID NO: 4833071 - DNA, 25 bp, Homo sapien
ctccagaataatggcaggtaatcat

SEQ ID NO: 4833072 - DNA, 25 bp, Homo sapien
taggcaataggttcttgctgctggt

SEQ ID NO: 4833073 - DNA, 25 bp, Homo sapien
tgcacgctgagccacttctggatgg

SEQ ID NO: 4833074 - DNA, 25 bp, Homo sapien
tctcccggaaaatttggaagccaga

SEQ ID NO: 4833075 - DNA, 25 bp, Homo sapien
ccatcagtcatcagacaagcaaaaa

SEQ ID NO: 4833076 - DNA, 25 bp, Homo sapien
tcagaagtgggattcacatagcgct

SEQ ID NO: 4833077 - DNA, 25 bp, Homo sapien
caaggtactgtaaccaccctatggg

SEQ ID NO: 4833078 - DNA, 25 bp, Homo sapien
ggaggagttgctcaaccccttaagc

SEQ ID NO: 4833079 - DNA, 25 bp, Homo sapien
gaccctccaggaatatcaagtgacc

SEQ ID NO: 4833080 - DNA, 25 bp, Homo sapien
catctgctcacgcacgctgctgatg

SEQ ID NO: 4833081 - DNA, 25 bp, Homo sapien
tcacgcacgctgctgatgcaagcgg

SEQ ID NO: 4833082 - DNA, 25 bp, Homo sapien
gctgctgatgcaagcggccttgcgc

SEQ ID NO: 4833083 - DNA, 25 bp, Homo sapien
atcttgctggcgcatctgctcacgc

SEQ ID NO: 4833084 - DNA, 25 bp, Homo sapien
agagcctgggtgctggcgggctgag

SEQ ID NO: 4833085 - DNA, 25 bp, Homo sapien
gagagcctgggtgctggcgggctga

SEQ ID NO: 4833086 - DNA, 25 bp, Homo sapien
tgagagcctgggtgctggcgggctg

SEQ ID NO: 4833087 - DNA, 25 bp, Homo sapien
agcctgggtgctggcgggctgaggc

SEQ ID NO: 4833088 - DNA, 25 bp, Homo sapien
tgctggtcctggagttggcccaatg

SEQ ID NO: 4833089 - DNA, 25 bp, Homo sapien
ggacacagatgcaaaaggctttgag

SEQ ID NO: 4833090 - DNA, 25 bp, Homo sapien
ggctcccaattcagggtcgctgact

SEQ ID NO: 4833091 - DNA, 25 bp, Homo sapien
cagaaggtcgtaggctatggacaca

SEQ ID NO: 4833092 - DNA, 25 bp, Homo sapien
ctatgcagagtggtgtggatgtttt

SEQ ID NO: 4833093 - DNA, 25 bp, Homo sapien
gcctcagacaccttgaagggcccag

SEQ ID NO: 4833094 - DNA, 25 bp, Homo sapien
gaagctagaggcagaaagccatagg

SEQ ID NO: 4833095 - DNA, 25 bp, Homo sapien
tgaaggagattcaggcatcttccat

SEQ ID NO: 4833096 - DNA, 25 bp, Homo sapien
tttgatgcccattatgacaaccaca

SEQ ID NO: 4833097 - DNA, 25 bp, Homo sapien
ctttgatgcccattatgacaaccac

SEQ ID NO: 4833098 - DNA, 25 bp, Homo sapien
ttgatgcccattatgacaaccacaa

SEQ ID NO: 4833099 - DNA, 25 bp, Homo sapien
tgtgtcacccgttatcactggaccg

SEQ ID NO: 4833100 - DNA, 25 bp, Homo sapien
tggaaaatcgttcactggctcaggg

SEQ ID NO: 4833101 - DNA, 25 bp, Homo sapien
cctgagaatagtcatgacagtgtcc

SEQ ID NO: 4833102 - DNA, 25 bp, Homo sapien
tatgtggacgctaaatgagatccca

SEQ ID NO: 4833103 - DNA, 25 bp, Homo sapien
ggagtatttgtaatggtgtatagcc

SEQ ID NO: 4833104 - DNA, 25 bp, Homo sapien
tgcctgtaatcgcatttcagtagcg

SEQ ID NO: 4833105 - DNA, 25 bp, Homo sapien
catttcagtagcgaggcctggagta

SEQ ID NO: 4833106 - DNA, 25 bp, Homo sapien
tagcgaggcctggagtatttgtaat

SEQ ID NO: 4833107 - DNA, 25 bp, Homo sapien
cggctcaacaccacctctttctgtg

SEQ ID NO: 4833108 - DNA, 25 bp, Homo sapien
tcgtttatattcactgtgggtcctg

SEQ ID NO: 4833109 - DNA, 25 bp, Homo sapien
cattttctgaaaattccctgcccag

SEQ ID NO: 4833110 - DNA, 25 bp, Homo sapien
cctgagagcgcagggtctcgtttat

SEQ ID NO: 4833111 - DNA, 25 bp, Homo sapien
tctgatccagttcatttggtccttg

SEQ ID NO: 4833112 - DNA, 25 bp, Homo sapien
ttctgatccagttcatttggtcctt

SEQ ID NO: 4833113 - DNA, 25 bp, Homo sapien
tacatcagccaaatacggtcagaaa

SEQ ID NO: 4833114 - DNA, 25 bp, Homo sapien
catcagccaaatacggtcagaaact

SEQ ID NO: 4833115 - DNA, 25 bp, Homo sapien
ctacatcagccaaatacggtcagaa

SEQ ID NO: 4833116 - DNA, 25 bp, Homo sapien
atcagccaaatacggtcagaaactt

SEQ ID NO: 4833117 - DNA, 25 bp, Homo sapien
actgtaactgcagatttgttggaac

SEQ ID NO: 4833118 - DNA, 25 bp, Homo sapien
agccaacggacctggaattccgaga

SEQ ID NO: 4833119 - DNA, 25 bp, Homo sapien
tcattggcgttacaagggcagagtt

SEQ ID NO: 4833120 - DNA, 25 bp, Homo sapien
ggctgggtgttactgtaactgcaga

SEQ ID NO: 4833121 - DNA, 25 bp, Homo sapien
tgcattaacttgtgctgtgtgtttg

SEQ ID NO: 4833122 - DNA, 25 bp, Homo sapien
acttgtgctgtgtgtttgtcaaatt

SEQ ID NO: 4833123 - DNA, 25 bp, Homo sapien
cttgtgctgtgtgtttgtcaaattt

SEQ ID NO: 4833124 - DNA, 25 bp, Homo sapien
gtgctgtgtgtttgtcaaatttttt

SEQ ID NO: 4833125 - DNA, 25 bp, Homo sapien
cagccagcgttgcattagctagagt

SEQ ID NO: 4833126 - DNA, 25 bp, Homo sapien
acccagacgtggctttggcaaacag

SEQ ID NO: 4833127 - DNA, 25 bp, Homo sapien
ccagcgttgcattagctagagtatg

SEQ ID NO: 4833128 - DNA, 25 bp, Homo sapien
ctctgggacccagacgtggctttgg

SEQ ID NO: 4833129 - DNA, 25 bp, Homo sapien
ctacgcgaacggagaaaccaaccat

SEQ ID NO: 4833130 - DNA, 25 bp, Homo sapien
gatcagcagctacgcgaacggagaa

SEQ ID NO: 4833131 - DNA, 25 bp, Homo sapien
gaggaaaaaccgaatgagatcagca

SEQ ID NO: 4833132 - DNA, 25 bp, Homo sapien
ggaaaaaccgaatgagatcagcagc

SEQ ID NO: 4833133 - DNA, 25 bp, Homo sapien
ccagtagtttccacacaggtggcac

SEQ ID NO: 4833134 - DNA, 25 bp, Homo sapien
gaccctgatggtggaatatggtttg

SEQ ID NO: 4833135 - DNA, 25 bp, Homo sapien
tgatggtgaccctgatggtggaata

SEQ ID NO: 4833136 - DNA, 25 bp, Homo sapien
tttgaggtacgtccaaagagaagac

SEQ ID NO: 4833137 - DNA, 25 bp, Homo sapien
tacagaggacgcaaacagtggatca

SEQ ID NO: 4833138 - DNA, 25 bp, Homo sapien
cagaagtctctgagaaggtatgact

SEQ ID NO: 4833139 - DNA, 25 bp, Homo sapien
gatccccatagccttgctccggtga

SEQ ID NO: 4833140 - DNA, 25 bp, Homo sapien
tcctgttgctctacagaggacgcaa

SEQ ID NO: 4833141 - DNA, 25 bp, Homo sapien
tattgttggcctccactatggcccc

SEQ ID NO: 4833142 - DNA, 25 bp, Homo sapien
tcaaagcatgaggtaggatggagtt

SEQ ID NO: 4833143 - DNA, 25 bp, Homo sapien
atgaggtagagatcgaggaaacgca

SEQ ID NO: 4833144 - DNA, 25 bp, Homo sapien
ttcttgatattattgttggcctcca

SEQ ID NO: 4833145 - DNA, 25 bp, Homo sapien
aggaaatttgtctgcgctcaaaagt

SEQ ID NO: 4833146 - DNA, 25 bp, Homo sapien
ttgtctgcgctcaaaagtaaatgaa

SEQ ID NO: 4833147 - DNA, 25 bp, Homo sapien
aatttgtctgcgctcaaaagtaaat

SEQ ID NO: 4833148 - DNA, 25 bp, Homo sapien
ggaaatttgtctgcgctcaaaagta

SEQ ID NO: 4833149 - DNA, 25 bp, Homo sapien
tcaggcttgtcagtttggtgtccaa

SEQ ID NO: 4833150 - DNA, 25 bp, Homo sapien
gacaggtggacaaaagacgtagtac

SEQ ID NO: 4833151 - DNA, 25 bp, Homo sapien
acgtagtaccgttctgctgccagac

SEQ ID NO: 4833152 - DNA, 25 bp, Homo sapien
ggtgtccaatttctagcaggacagg

SEQ ID NO: 4833153 - DNA, 25 bp, Homo sapien
cccaatcctcctaggcagcaaacct

SEQ ID NO: 4833154 - DNA, 25 bp, Homo sapien
cagcaaacctgcaggcaagtggctg

SEQ ID NO: 4833155 - DNA, 25 bp, Homo sapien
agcaaacctgcaggcaagtggctgt

SEQ ID NO: 4833156 - DNA, 25 bp, Homo sapien
atcctcctaggcagcaaacctgcag

SEQ ID NO: 4833157 - DNA, 25 bp, Homo sapien
cagatccaggatactcagtcttgtc

SEQ ID NO: 4833158 - DNA, 25 bp, Homo sapien
agatccaggatactcagtcttgtct

SEQ ID NO: 4833159 - DNA, 25 bp, Homo sapien
atccaggatactcagtcttgtctga

SEQ ID NO: 4833160 - DNA, 25 bp, Homo sapien
gatccaggatactcagtcttgtctg

SEQ ID NO: 4833161 - DNA, 25 bp, Homo sapien
gaaggagtctgcaaacgtggaaatc

SEQ ID NO: 4833162 - DNA, 25 bp, Homo sapien
tccatgcatcgttggtgaagacagc

SEQ ID NO: 4833163 - DNA, 25 bp, Homo sapien
gaaggatagggaactctcccaggtc

SEQ ID NO: 4833164 - DNA, 25 bp, Homo sapien
tctccccaggacctatctgtttcgg

SEQ ID NO: 4833165 - DNA, 25 bp, Homo sapien
tgaaacctccgcacctggatacccc

SEQ ID NO: 4833166 - DNA, 25 bp, Homo sapien
tcagctgaaacctccgcacctggat

SEQ ID NO: 4833167 - DNA, 25 bp, Homo sapien
agctgaaacctccgcacctggatac

SEQ ID NO: 4833168 - DNA, 25 bp, Homo sapien
ctcagctgaaacctccgcacctgga

SEQ ID NO: 4833169 - DNA, 25 bp, Homo sapien
gatatccagaatggggaggtcaact

SEQ ID NO: 4833170 - DNA, 25 bp, Homo sapien
tcaactgagtctgaagacagagagc

SEQ ID NO: 4833171 - DNA, 25 bp, Homo sapien
actgagtctgaagacagagagctgg

SEQ ID NO: 4833172 - DNA, 25 bp, Homo sapien
gggaggtcaactgagtctgaagaca

SEQ ID NO: 4833173 - DNA, 25 bp, Homo sapien
tggtacaggaatgaggatggaaaat

SEQ ID NO: 4833174 - DNA, 25 bp, Homo sapien
ggtacaggaatgaggatggaaaatg

SEQ ID NO: 4833175 - DNA, 25 bp, Homo sapien
ctggtacaggaatgaggatggaaaa

SEQ ID NO: 4833176 - DNA, 25 bp, Homo sapien
ggagccctgagaggtagtatgaatt

SEQ ID NO: 4833177 - DNA, 25 bp, Homo sapien
gtatgaattaactgtggccccaacc

SEQ ID NO: 4833178 - DNA, 25 bp, Homo sapien
gaggtagtatgaattaactgtggcc

SEQ ID NO: 4833179 - DNA, 25 bp, Homo sapien
gccctgagaggtagtatgaattaac

SEQ ID NO: 4833180 - DNA, 25 bp, Homo sapien
gaatgcttggaacagctgatttggg

SEQ ID NO: 4833181 - DNA, 25 bp, Homo sapien
aaaagtgatgaatgcttggaacagc

SEQ ID NO: 4833182 - DNA, 25 bp, Homo sapien
tgatgaatgcttggaacagctgatt

SEQ ID NO: 4833183 - DNA, 25 bp, Homo sapien
tgagagagatgagtatggtgactaa

SEQ ID NO: 4833184 - DNA, 25 bp, Homo sapien
tgatcccaaacactctcaatgcttg

SEQ ID NO: 4833185 - DNA, 25 bp, Homo sapien
tcatgtcatcttcaagacgtgaaac

SEQ ID NO: 4833186 - DNA, 25 bp, Homo sapien
tgtctgtgtttcctacaaaaagcag

SEQ ID NO: 4833187 - DNA, 25 bp, Homo sapien
tgtacagacaatttccagacccttg

SEQ ID NO: 4833188 - DNA, 25 bp, Homo sapien
tagcttcagtctgatgcactggacg

SEQ ID NO: 4833189 - DNA, 25 bp, Homo sapien
tgacaggcagacttatataaacagc

SEQ ID NO: 4833190 - DNA, 25 bp, Homo sapien
cagctgttctttgttggatcatgag

SEQ ID NO: 4833191 - DNA, 25 bp, Homo sapien
gcttccaggccgaaggctactttaa

SEQ ID NO: 4833192 - DNA, 25 bp, Homo sapien
ccacatcgaatctgattagagcttc

SEQ ID NO: 4833193 - DNA, 25 bp, Homo sapien
tgggcataggatgagtgagatgggt

SEQ ID NO: 4833194 - DNA, 25 bp, Homo sapien
gagatgggtgtttgtctccagtgtc

SEQ ID NO: 4833195 - DNA, 25 bp, Homo sapien
aacatgatctctgggcatgaaccgg

SEQ ID NO: 4833196 - DNA, 25 bp, Homo sapien
tgttctggtattgcactggccgccc

SEQ ID NO: 4833197 - DNA, 25 bp, Homo sapien
tctcgagtcatgtcatttcaagtgg

SEQ ID NO: 4833198 - DNA, 25 bp, Homo sapien
ggacgcttgactttgaacatcacgg

SEQ ID NO: 4833199 - DNA, 25 bp, Homo sapien
aacatcacggcgtctcaggcactga

SEQ ID NO: 4833200 - DNA, 25 bp, Homo sapien
acccacctcctcagatagcccagtg

SEQ ID NO: 4833201 - DNA, 25 bp, Homo sapien
tgaggaggcaataagtcgccaagca

SEQ ID NO: 4833202 - DNA, 25 bp, Homo sapien
cagatagcccagtgtcaggaggagc

SEQ ID NO: 4833203 - DNA, 25 bp, Homo sapien
tgaatctgtgatagaccctgaggaa

SEQ ID NO: 4833204 - DNA, 25 bp, Homo sapien
gtttcgactgtagtgggtgcaaaac

SEQ ID NO: 4833205 - DNA, 25 bp, Homo sapien
ttggtttcgactgtagtgggtgcaa

SEQ ID NO: 4833206 - DNA, 25 bp, Homo sapien
gaggtctggttggtttcgactgtag

SEQ ID NO: 4833207 - DNA, 25 bp, Homo sapien
aggtctggttggtttcgactgtagt

SEQ ID NO: 4833208 - DNA, 25 bp, Homo sapien
cggccgggcacgcaccgcgcgcaga

SEQ ID NO: 4833209 - DNA, 25 bp, Homo sapien
ggcggagccgcgctcacagctgcca

SEQ ID NO: 4833210 - DNA, 25 bp, Homo sapien
cgggcacgcaccgcgcgcagacctt

SEQ ID NO: 4833211 - DNA, 25 bp, Homo sapien
gcggagccgcgctcacagctgccac

SEQ ID NO: 4833212 - DNA, 25 bp, Homo sapien
gaaacgaagttcttctcttctagtg

SEQ ID NO: 4833213 - DNA, 25 bp, Homo sapien
aaaccatgatccagccagtctagaa

SEQ ID NO: 4833214 - DNA, 25 bp, Homo sapien
tcttctagtgccacactccatttcc

SEQ ID NO: 4833215 - DNA, 25 bp, Homo sapien
gaatgcaaaacctctgaaaagtctt

SEQ ID NO: 4833216 - DNA, 25 bp, Homo sapien
ctttcatgcgtcttgtgatgctgac

SEQ ID NO: 4833217 - DNA, 25 bp, Homo sapien
catgccctggcgatgagtcctcttt

SEQ ID NO: 4833218 - DNA, 25 bp, Homo sapien
gctccatgccctggcgatgagtcct

SEQ ID NO: 4833219 - DNA, 25 bp, Homo sapien
gagtcctctttcatgcgtcttgtga

SEQ ID NO: 4833220 - DNA, 25 bp, Homo sapien
ctccacaatcctccagccatgtgtc

SEQ ID NO: 4833221 - DNA, 25 bp, Homo sapien
cttctccccggcactgtctgtgtcc

SEQ ID NO: 4833222 - DNA, 25 bp, Homo sapien
taaccttctccccggcactgtctgt

SEQ ID NO: 4833223 - DNA, 25 bp, Homo sapien
cctccttgcagacccctaaccttct

SEQ ID NO: 4833224 - DNA, 25 bp, Homo sapien
taatcggacaacgagcatttgagcc

SEQ ID NO: 4833225 - DNA, 25 bp, Homo sapien
cacctgtgttaatcggacaacgagc

SEQ ID NO: 4833226 - DNA, 25 bp, Homo sapien
ttgtgcacacctgtgttaatcggac

SEQ ID NO: 4833227 - DNA, 25 bp, Homo sapien
gacaacgagcatttgagccctgtgc

SEQ ID NO: 4833228 - DNA, 25 bp, Homo sapien
ctgaaaaatacacggcatcattact

SEQ ID NO: 4833229 - DNA, 25 bp, Homo sapien
cacggcatcattactgctagcttgc

SEQ ID NO: 4833230 - DNA, 25 bp, Homo sapien
tcttgcattgtgaataagctgcaga

SEQ ID NO: 4833231 - DNA, 25 bp, Homo sapien
agcttgcttatcagctcagtcttgc

SEQ ID NO: 4833232 - DNA, 25 bp, Homo sapien
gacatactgctgacttgcactggaa

SEQ ID NO: 4833233 - DNA, 25 bp, Homo sapien
gcaacatacagtcattaatgcatac

SEQ ID NO: 4833234 - DNA, 25 bp, Homo sapien
gggaaagccatttgtgcagccctga

SEQ ID NO: 4833235 - DNA, 25 bp, Homo sapien
cactggaattgcaagtcagatgtta

SEQ ID NO: 4833236 - DNA, 25 bp, Homo sapien
tatatccagacccttccagggacag

SEQ ID NO: 4833237 - DNA, 25 bp, Homo sapien
tgatgaataaaagccactgtggaac

SEQ ID NO: 4833238 - DNA, 25 bp, Homo sapien
tgattcccagcgtgtttcccaaggc

SEQ ID NO: 4833239 - DNA, 25 bp, Homo sapien
cagggacaggactattctcagagca

SEQ ID NO: 4833240 - DNA, 25 bp, Homo sapien
catactgagtaaggtgctgttacca

SEQ ID NO: 4833241 - DNA, 25 bp, Homo sapien
caccgaggtccgtgattcaatagaa

SEQ ID NO: 4833242 - DNA, 25 bp, Homo sapien
cccggcatgtggaggaaaaacctga

SEQ ID NO: 4833243 - DNA, 25 bp, Homo sapien
gaagacacttcgtcagttacagggc

SEQ ID NO: 4833244 - DNA, 25 bp, Homo sapien
gcagcagtgcaagctgcgtgagctt

SEQ ID NO: 4833245 - DNA, 25 bp, Homo sapien
tcatctttgataaccactcatatgg

SEQ ID NO: 4833246 - DNA, 25 bp, Homo sapien
taaccactcatatgggcaatggcag

SEQ ID NO: 4833247 - DNA, 25 bp, Homo sapien
gcaagctgcgtgagcttggtccagc

SEQ ID NO: 4833248 - DNA, 25 bp, Homo sapien
attcctttgtgccagtctgtgagct

SEQ ID NO: 4833249 - DNA, 25 bp, Homo sapien
tggcaatgacctaatctctcctcct

SEQ ID NO: 4833250 - DNA, 25 bp, Homo sapien
gtgccagtctgtgagctgaacactc

SEQ ID NO: 4833251 - DNA, 25 bp, Homo sapien
gcaagtgttccctcggtggcaatga

SEQ ID NO: 4833252 - DNA, 25 bp, Homo sapien
ctgaagctttgttgtattctggtaa

SEQ ID NO: 4833253 - DNA, 25 bp, Homo sapien
caggcagctctccagccatacgaat

SEQ ID NO: 4833254 - DNA, 25 bp, Homo sapien
aaaatatccattttgaagtgccaat

SEQ ID NO: 4833255 - DNA, 25 bp, Homo sapien
ctgggatctgagccttaattcccag

SEQ ID NO: 4833256 - DNA, 25 bp, Homo sapien
ttgtttttcttgccacaaaagcatt

SEQ ID NO: 4833257 - DNA, 25 bp, Homo sapien
ttttgtttttcttgccacaaaagca

SEQ ID NO: 4833258 - DNA, 25 bp, Homo sapien
tgtttttcttgccacaaaagcattt

SEQ ID NO: 4833259 - DNA, 25 bp, Homo sapien
tttgtttttcttgccacaaaagcat

SEQ ID NO: 4833260 - DNA, 25 bp, Homo sapien
tgtgccatggtgtaaccgctcgcat

SEQ ID NO: 4833261 - DNA, 25 bp, Homo sapien
gagaggcaaaaattgaagtggctgt

SEQ ID NO: 4833262 - DNA, 25 bp, Homo sapien
gctgtgagaagtaattagaaactga

SEQ ID NO: 4833263 - DNA, 25 bp, Homo sapien
tagtgctgaagagatagcctcatct

SEQ ID NO: 4833264 - DNA, 25 bp, Homo sapien
tgatctttgccgtcacgtcccttcc

SEQ ID NO: 4833265 - DNA, 25 bp, Homo sapien
tctctgatctttgccgtcacgtccc

SEQ ID NO: 4833266 - DNA, 25 bp, Homo sapien
tctctctgatctttgccgtcacgtc

SEQ ID NO: 4833267 - DNA, 25 bp, Homo sapien
tctgatctttgccgtcacgtccctt

SEQ ID NO: 4833268 - DNA, 25 bp, Homo sapien
cccaacaccttctgcgagaatcttt

SEQ ID NO: 4833269 - DNA, 25 bp, Homo sapien
ccagccaatattgctgggccgccaa

SEQ ID NO: 4833270 - DNA, 25 bp, Homo sapien
caccttctgcgagaatctttgattc

SEQ ID NO: 4833271 - DNA, 25 bp, Homo sapien
gattctcgccccctcttttgtgtgc

SEQ ID NO: 4833272 - DNA, 25 bp, Homo sapien
tcatctcagaacatcagcacttgtg

SEQ ID NO: 4833273 - DNA, 25 bp, Homo sapien
tccacagggatgattccgaaaacat

SEQ ID NO: 4833274 - DNA, 25 bp, Homo sapien
gaaaagtgactcctacgtgtcagag

SEQ ID NO: 4833275 - DNA, 25 bp, Homo sapien
tcagatcgacagaacaaatgtagga

SEQ ID NO: 4833276 - DNA, 25 bp, Homo sapien
tagttttatgttctgggacaaattc

SEQ ID NO: 4833277 - DNA, 25 bp, Homo sapien
cacaccgaaactggggtgttctgta

SEQ ID NO: 4833278 - DNA, 25 bp, Homo sapien
caccgaaactggggtgttctgtagt

SEQ ID NO: 4833279 - DNA, 25 bp, Homo sapien
tcacaccgaaactggggtgttctgt

SEQ ID NO: 4833280 - DNA, 25 bp, Homo sapien
tcttcataaagctgcttgcccagaa

SEQ ID NO: 4833281 - DNA, 25 bp, Homo sapien
aaggtcccggaagggagagatgtag

SEQ ID NO: 4833282 - DNA, 25 bp, Homo sapien
ggcactgcctgcatcaagagattca

SEQ ID NO: 4833283 - DNA, 25 bp, Homo sapien
tagaactggtcatctctacacccca

SEQ ID NO: 4833284 - DNA, 25 bp, Homo sapien
tgacccaacagagggaccgacacac

SEQ ID NO: 4833285 - DNA, 25 bp, Homo sapien
catgacccaacagagggaccgacac

SEQ ID NO: 4833286 - DNA, 25 bp, Homo sapien
atgacccaacagagggaccgacaca

SEQ ID NO: 4833287 - DNA, 25 bp, Homo sapien
tccaggctacatctgttcgccactg

SEQ ID NO: 4833288 - DNA, 25 bp, Homo sapien
tgttcgccactgttcggaatgcagg

SEQ ID NO: 4833289 - DNA, 25 bp, Homo sapien
ccactgttcggaatgcaggccccag

SEQ ID NO: 4833290 - DNA, 25 bp, Homo sapien
ttcccagggtcatccgcaggccctc

SEQ ID NO: 4833291 - DNA, 25 bp, Homo sapien
gggaatatctgacaggtccttgcaa

SEQ ID NO: 4833292 - DNA, 25 bp, Homo sapien
tatctgacaggtccttgcaaagtgt

SEQ ID NO: 4833293 - DNA, 25 bp, Homo sapien
ctcgatttcatgtgggcagacagac

SEQ ID NO: 4833294 - DNA, 25 bp, Homo sapien
ttttggtaggtggtactcgatttca

SEQ ID NO: 4833295 - DNA, 25 bp, Homo sapien
cctctcttccaacccagtgtctctg

SEQ ID NO: 4833296 - DNA, 25 bp, Homo sapien
ccctctcttccaacccagtgtctct

SEQ ID NO: 4833297 - DNA, 25 bp, Homo sapien
tcccctctcttccaacccagtgtct

SEQ ID NO: 4833298 - DNA, 25 bp, Homo sapien
cttcccctctcttccaacccagtgt

SEQ ID NO: 4833299 - DNA, 25 bp, Homo sapien
gtagtagagttggcatcagctttaa

SEQ ID NO: 4833300 - DNA, 25 bp, Homo sapien
ttgaacctcgtcttgctcatcctac

SEQ ID NO: 4833301 - DNA, 25 bp, Homo sapien
ggttcagagtcaggcttggcaaatg

SEQ ID NO: 4833302 - DNA, 25 bp, Homo sapien
tcctacagaagggttcagagtcagg

SEQ ID NO: 4833303 - DNA, 25 bp, Homo sapien
gctgttagggtaatgaagttgttcc

SEQ ID NO: 4833304 - DNA, 25 bp, Homo sapien
cagatgacagtgaggcacgtgcttg

SEQ ID NO: 4833305 - DNA, 25 bp, Homo sapien
cacttatgtctggtatgggagctgt

SEQ ID NO: 4833306 - DNA, 25 bp, Homo sapien
taaaggctggatcacacatgcagat

SEQ ID NO: 4833307 - DNA, 25 bp, Homo sapien
gaaggcgtgtgttcatctaacttaa

SEQ ID NO: 4833308 - DNA, 25 bp, Homo sapien
gggcttttgccatgatatgtgccag

SEQ ID NO: 4833309 - DNA, 25 bp, Homo sapien
gacttgacagtctacttgattttgg

SEQ ID NO: 4833310 - DNA, 25 bp, Homo sapien
tgattttggatgaaagaaggcgtgt

SEQ ID NO: 4833311 - DNA, 25 bp, Homo sapien
cactagcttcacatcatttcttctc

SEQ ID NO: 4833312 - DNA, 25 bp, Homo sapien
gcaggtacactagcttcacatcatt

SEQ ID NO: 4833313 - DNA, 25 bp, Homo sapien
ggtacactagcttcacatcatttct

SEQ ID NO: 4833314 - DNA, 25 bp, Homo sapien
gcttgcaggtacactagcttcacat

SEQ ID NO: 4833315 - DNA, 25 bp, Homo sapien
ctgagttcgtcttctgcacatgacc

SEQ ID NO: 4833316 - DNA, 25 bp, Homo sapien
tcgtcttctgcacatgacctttgat

SEQ ID NO: 4833317 - DNA, 25 bp, Homo sapien
tcttctgcacatgacctttgatctg

SEQ ID NO: 4833318 - DNA, 25 bp, Homo sapien
gagttcgtcttctgcacatgacctt

SEQ ID NO: 4833319 - DNA, 25 bp, Homo sapien
tatccattgatgcttgaacttgacc

SEQ ID NO: 4833320 - DNA, 25 bp, Homo sapien
aaaggccctgcattgtagacattga

SEQ ID NO: 4833321 - DNA, 25 bp, Homo sapien
gagctgtaaggctgcctgcttcagg

SEQ ID NO: 4833322 - DNA, 25 bp, Homo sapien
cattggttgtgcttagagtgatctc

SEQ ID NO: 4833323 - DNA, 25 bp, Homo sapien
ggttcagttcatccatgcagactgc

SEQ ID NO: 4833324 - DNA, 25 bp, Homo sapien
cacattcacatacaactggagccta

SEQ ID NO: 4833325 - DNA, 25 bp, Homo sapien
tcacatacaactggagcctactgag

SEQ ID NO: 4833326 - DNA, 25 bp, Homo sapien
ttcacatacaactggagcctactga

SEQ ID NO: 4833327 - DNA, 25 bp, Homo sapien
acattcacatacaactggagcctac

SEQ ID NO: 4833328 - DNA, 25 bp, Homo sapien
tgtgtttgacccatgcaggaccaca

SEQ ID NO: 4833329 - DNA, 25 bp, Homo sapien
gagtcatcctgtgggcaactatgaa

SEQ ID NO: 4833330 - DNA, 25 bp, Homo sapien
ctctgcctggaaagaagagtcatcc

SEQ ID NO: 4833331 - DNA, 25 bp, Homo sapien
gcaactatgaatcagcagccatgtt

SEQ ID NO: 4833332 - DNA, 25 bp, Homo sapien
acaatgaaactgttgccccagcccc

SEQ ID NO: 4833333 - DNA, 25 bp, Homo sapien
aatgaaactgttgccccagcccctc

SEQ ID NO: 4833334 - DNA, 25 bp, Homo sapien
ctgcagtgaagcacgatgacaatga

SEQ ID NO: 4833335 - DNA, 25 bp, Homo sapien
caatgaaactgttgccccagcccct

SEQ ID NO: 4833336 - DNA, 25 bp, Homo sapien
agctgccttctcagtcaaagggctg

SEQ ID NO: 4833337 - DNA, 25 bp, Homo sapien
cagtcaaagggctgtcctgtaactc

SEQ ID NO: 4833338 - DNA, 25 bp, Homo sapien
ggtatttggataggccacgaaggct

SEQ ID NO: 4833339 - DNA, 25 bp, Homo sapien
cttggacttgttgatagcacacaac

SEQ ID NO: 4833340 - DNA, 25 bp, Homo sapien
gagttgcaagaggagcacagacacc

SEQ ID NO: 4833341 - DNA, 25 bp, Homo sapien
gttgcaagaggagcacagacaccat

SEQ ID NO: 4833342 - DNA, 25 bp, Homo sapien
ctggagttgcaagaggagcacagac

SEQ ID NO: 4833343 - DNA, 25 bp, Homo sapien
ggagttgcaagaggagcacagacac

SEQ ID NO: 4833344 - DNA, 25 bp, Homo sapien
aatttattcaacttcgttggtgaga

SEQ ID NO: 4833345 - DNA, 25 bp, Homo sapien
gagtgttgtgttatctctcatgaca

SEQ ID NO: 4833346 - DNA, 25 bp, Homo sapien
caacttcgttggtgagagtgttgtg

SEQ ID NO: 4833347 - DNA, 25 bp, Homo sapien
tgacacatagaaaacccctgggtta

SEQ ID NO: 4833348 - DNA, 25 bp, Homo sapien
tcaaaaagctgcaaatagttcccac

SEQ ID NO: 4833349 - DNA, 25 bp, Homo sapien
caaaaagctgcaaatagttcccact

SEQ ID NO: 4833350 - DNA, 25 bp, Homo sapien
aaaagctgcaaatagttcccactac

SEQ ID NO: 4833351 - DNA, 25 bp, Homo sapien
gctcaaaaagctgcaaatagttccc

SEQ ID NO: 4833352 - DNA, 25 bp, Homo sapien
ttatcacttttaccggaacaaatgc

SEQ ID NO: 4833353 - DNA, 25 bp, Homo sapien
aatttctagccttctcactgcccag

SEQ ID NO: 4833354 - DNA, 25 bp, Homo sapien
ccttaaatacagctttgatcgtcat

SEQ ID NO: 4833355 - DNA, 25 bp, Homo sapien
taccggaacaaatgcaatttctagc

SEQ ID NO: 4833356 - DNA, 25 bp, Homo sapien
gcagtggtctttggtagcttggtct

SEQ ID NO: 4833357 - DNA, 25 bp, Homo sapien
tcttctggcatttggtcaggacagc

SEQ ID NO: 4833358 - DNA, 25 bp, Homo sapien
agcttggtctgagcaaagtcacatc

SEQ ID NO: 4833359 - DNA, 25 bp, Homo sapien
ctgtctgtgtagacagggccaggct

SEQ ID NO: 4833360 - DNA, 25 bp, Homo sapien
accaaacaaagcagatgacatcacc

SEQ ID NO: 4833361 - DNA, 25 bp, Homo sapien
catgcatggaattccacactgttct

SEQ ID NO: 4833362 - DNA, 25 bp, Homo sapien
catcacccatgcatggaattccaca

SEQ ID NO: 4833363 - DNA, 25 bp, Homo sapien
ctggttgggcaggtaccaaacaaag

SEQ ID NO: 4833364 - DNA, 25 bp, Homo sapien
cttctgctgcgaaggtgagtcagct

SEQ ID NO: 4833365 - DNA, 25 bp, Homo sapien
tgaacagaggattccttgggaccct

SEQ ID NO: 4833366 - DNA, 25 bp, Homo sapien
tttaagggccaaggaattccagagc

SEQ ID NO: 4833367 - DNA, 25 bp, Homo sapien
tgaaatgaaaccgtcctctgaacgt

SEQ ID NO: 4833368 - DNA, 25 bp, Homo sapien
gaacgttccagcaaagctccagcag

SEQ ID NO: 4833369 - DNA, 25 bp, Homo sapien
tgtgtcccataacagagtagcaagc

SEQ ID NO: 4833370 - DNA, 25 bp, Homo sapien
cacttggcctttcaggagggttgca

SEQ ID NO: 4833371 - DNA, 25 bp, Homo sapien
catggaccgggcatataacagctgt

SEQ ID NO: 4833372 - DNA, 25 bp, Homo sapien
ttgcagaacagagtgccaaccatgg

SEQ ID NO: 4833373 - DNA, 25 bp, Homo sapien
ggcaaaacagatagagagccttgtg

SEQ ID NO: 4833374 - DNA, 25 bp, Homo sapien
gccttgtgaaatgcccttgccatgg

SEQ ID NO: 4833375 - DNA, 25 bp, Homo sapien
tctgtttgcagcagggcaaaacaga

SEQ ID NO: 4833376 - DNA, 25 bp, Homo sapien
aacagatagagagccttgtgaaatg

SEQ ID NO: 4833377 - DNA, 25 bp, Homo sapien
tttgttgtatctgatcctgacctgg

SEQ ID NO: 4833378 - DNA, 25 bp, Homo sapien
tatttatcaaacgaccagagctatg

SEQ ID NO: 4833379 - DNA, 25 bp, Homo sapien
tggtgagtcaatgctgccttttgcc

SEQ ID NO: 4833380 - DNA, 25 bp, Homo sapien
gtgatgctgcacatgtccgtggtca

SEQ ID NO: 4833381 - DNA, 25 bp, Homo sapien
tctgaaacggttcgttctggcacag

SEQ ID NO: 4833382 - DNA, 25 bp, Homo sapien
catggttctgtttacatccgatgcc

SEQ ID NO: 4833383 - DNA, 25 bp, Homo sapien
cattcctaagtctgtgtcatggttc

SEQ ID NO: 4833384 - DNA, 25 bp, Homo sapien
aggctgcctccatctctattacggg

SEQ ID NO: 4833385 - DNA, 25 bp, Homo sapien
gcagtacttcctctgcgaaattcat

SEQ ID NO: 4833386 - DNA, 25 bp, Homo sapien
tcccggtgcagcagtacttcctctg

SEQ ID NO: 4833387 - DNA, 25 bp, Homo sapien
ttctcccggtgcagcagtacttcct

SEQ ID NO: 4833388 - DNA, 25 bp, Homo sapien
ggtgcagcagtacttcctctgcgaa

SEQ ID NO: 4833389 - DNA, 25 bp, Homo sapien
tttctggacaatgcttcaggatgta

SEQ ID NO: 4833390 - DNA, 25 bp, Homo sapien
tgtttctggacaatgcttcaggatg

SEQ ID NO: 4833391 - DNA, 25 bp, Homo sapien
gtttctggacaatgcttcaggatgt

SEQ ID NO: 4833392 - DNA, 25 bp, Homo sapien
taagccaatatgttcattggagcct

SEQ ID NO: 4833393 - DNA, 25 bp, Homo sapien
gagcagattcttaggtaggagacca

SEQ ID NO: 4833394 - DNA, 25 bp, Homo sapien
gagcctgtgaggaatgcggaactcc

SEQ ID NO: 4833395 - DNA, 25 bp, Homo sapien
gaggaatgcggaactccttttagtc

SEQ ID NO: 4833396 - DNA, 25 bp, Homo sapien
gacggcactgaagcactgtcacaag

SEQ ID NO: 4833397 - DNA, 25 bp, Homo sapien
ccagacgatggcaaaaggcagttcc

SEQ ID NO: 4833398 - DNA, 25 bp, Homo sapien
tggaagttggccagtaagccggtca

SEQ ID NO: 4833399 - DNA, 25 bp, Homo sapien
gcagggaaacgttgcaaatatgcag

SEQ ID NO: 4833400 - DNA, 25 bp, Homo sapien
gggcaactgaacagctctagagagg

SEQ ID NO: 4833401 - DNA, 25 bp, Homo sapien
catggttttctaaactcagactgga

SEQ ID NO: 4833402 - DNA, 25 bp, Homo sapien
tgtggttgtcgtcatcgggattgcc

SEQ ID NO: 4833403 - DNA, 25 bp, Homo sapien
catcaactgtgctcaggttccctaa

SEQ ID NO: 4833404 - DNA, 25 bp, Homo sapien
agatctttctgtaagaggtatttgc

SEQ ID NO: 4833405 - DNA, 25 bp, Homo sapien
gatctttctgtaagaggtatttgcc

SEQ ID NO: 4833406 - DNA, 25 bp, Homo sapien
gatgaagatctttctgtaagaggta

SEQ ID NO: 4833407 - DNA, 25 bp, Homo sapien
tgggatgaagatctttctgtaagag

SEQ ID NO: 4833408 - DNA, 25 bp, Homo sapien
gggttggctggtcctttaatcctca

SEQ ID NO: 4833409 - DNA, 25 bp, Homo sapien
tagacatgaagggttggctggtcct

SEQ ID NO: 4833410 - DNA, 25 bp, Homo sapien
tctgttcaaaacctggtcattttca

SEQ ID NO: 4833411 - DNA, 25 bp, Homo sapien
cactcagagcttggtctgttcaaaa

SEQ ID NO: 4833412 - DNA, 25 bp, Homo sapien
tccctcaggacgacatagaaagatg

SEQ ID NO: 4833413 - DNA, 25 bp, Homo sapien
caggtggacctgagagcagtccctc

SEQ ID NO: 4833414 - DNA, 25 bp, Homo sapien
caatgactggacatgtggcaagtag

SEQ ID NO: 4833415 - DNA, 25 bp, Homo sapien
tagggttgagcatggaagtcccagt

SEQ ID NO: 4833416 - DNA, 25 bp, Homo sapien
actgaattggtgtttgtaaggagac

SEQ ID NO: 4833417 - DNA, 25 bp, Homo sapien
tttgtaaggagacagcatgaggtag

SEQ ID NO: 4833418 - DNA, 25 bp, Homo sapien
cttgtcctacactgaattggtgttt

SEQ ID NO: 4833419 - DNA, 25 bp, Homo sapien
tggtgtttgtaaggagacagcatga

SEQ ID NO: 4833420 - DNA, 25 bp, Homo sapien
aggcttccgcggcaaaccagagtga

SEQ ID NO: 4833421 - DNA, 25 bp, Homo sapien
gagtgaagtgatgttcaaccccact

SEQ ID NO: 4833422 - DNA, 25 bp, Homo sapien
ttaatattaaggcttccgcggcaaa

SEQ ID NO: 4833423 - DNA, 25 bp, Homo sapien
accagagtgaagtgatgttcaaccc

SEQ ID NO: 4833424 - DNA, 25 bp, Homo sapien
gtgacattttttcgtctgcgtgtag

SEQ ID NO: 4833425 - DNA, 25 bp, Homo sapien
gagacttaagcatccctagagctgt

SEQ ID NO: 4833426 - DNA, 25 bp, Homo sapien
ggtctgagtgctataatcctggttc

SEQ ID NO: 4833427 - DNA, 25 bp, Homo sapien
tctgttgaagaacttgcaggtcact

SEQ ID NO: 4833428 - DNA, 25 bp, Homo sapien
tctctcctgcatggagccaccagcg

SEQ ID NO: 4833429 - DNA, 25 bp, Homo sapien
tctcctgcatggagccaccagcgga

SEQ ID NO: 4833430 - DNA, 25 bp, Homo sapien
tgcatggagccaccagcggactcat

SEQ ID NO: 4833431 - DNA, 25 bp, Homo sapien
ggttgggatggccatctctctcctg

SEQ ID NO: 4833432 - DNA, 25 bp, Homo sapien
acaagctgacctaaattctctccgg

SEQ ID NO: 4833433 - DNA, 25 bp, Homo sapien
cctagggacagtgagtttcatctcg

SEQ ID NO: 4833434 - DNA, 25 bp, Homo sapien
acatggtcccataagctctctgagg

SEQ ID NO: 4833435 - DNA, 25 bp, Homo sapien
tctgagggtaagaagtgtagcatcc

SEQ ID NO: 4833436 - DNA, 25 bp, Homo sapien
gagttggttgtcctctgtacaccga

SEQ ID NO: 4833437 - DNA, 25 bp, Homo sapien
gaccaatgtcagagtggtactgtga

SEQ ID NO: 4833438 - DNA, 25 bp, Homo sapien
ggtactgtgaggcagtcagactgcc

SEQ ID NO: 4833439 - DNA, 25 bp, Homo sapien
taagagactctgaaggagtgaccaa

SEQ ID NO: 4833440 - DNA, 25 bp, Homo sapien
aataggaagtgtcatctgcgtcatg

SEQ ID NO: 4833441 - DNA, 25 bp, Homo sapien
gaggtgatactagaataggaagtgt

SEQ ID NO: 4833442 - DNA, 25 bp, Homo sapien
ggtgatactagaataggaagtgtca

SEQ ID NO: 4833443 - DNA, 25 bp, Homo sapien
gtgtcatctgcgtcatgtgtacccc

SEQ ID NO: 4833444 - DNA, 25 bp, Homo sapien
agttggaaaattccaccactggagg

SEQ ID NO: 4833445 - DNA, 25 bp, Homo sapien
aagaagttggaaaattccaccactg

SEQ ID NO: 4833446 - DNA, 25 bp, Homo sapien
gttggaaaattccaccactggagga

SEQ ID NO: 4833447 - DNA, 25 bp, Homo sapien
gaagttggaaaattccaccactgga

SEQ ID NO: 4833448 - DNA, 25 bp, Homo sapien
gaaatgcacaagataacccctgagc

SEQ ID NO: 4833449 - DNA, 25 bp, Homo sapien
ggcaggaaatgcacaagataacccc

SEQ ID NO: 4833450 - DNA, 25 bp, Homo sapien
aggaaatgcacaagataacccctga

SEQ ID NO: 4833451 - DNA, 25 bp, Homo sapien
tgcacaagataacccctgagcactt

SEQ ID NO: 4833452 - DNA, 25 bp, Homo sapien
tctgatcaacgaatacaaggaaggc

SEQ ID NO: 4833453 - DNA, 25 bp, Homo sapien
tcaacgaatacaaggaaggcactgc

SEQ ID NO: 4833454 - DNA, 25 bp, Homo sapien
ttggtttatctgatcaacgaataca

SEQ ID NO: 4833455 - DNA, 25 bp, Homo sapien
aaggcactgcttgtattgtgggtgc

SEQ ID NO: 4833456 - DNA, 25 bp, Homo sapien
acagtggagcctggcatctaccaac

SEQ ID NO: 4833457 - DNA, 25 bp, Homo sapien
agcctggcatctaccaacatgtgac

SEQ ID NO: 4833458 - DNA, 25 bp, Homo sapien
ggagcctggcatctaccaacatgtg

SEQ ID NO: 4833459 - DNA, 25 bp, Homo sapien
ttacagtggagcctggcatctacca

SEQ ID NO: 4833460 - DNA, 25 bp, Homo sapien
tttccaggagttgataattttctga

SEQ ID NO: 4833461 - DNA, 25 bp, Homo sapien
tgagatggtcttgagggcgtttgct

SEQ ID NO: 4833462 - DNA, 25 bp, Homo sapien
ttttccaggagttgataattttctg

SEQ ID NO: 4833463 - DNA, 25 bp, Homo sapien
attgatgaggagaaacctcacatcc

SEQ ID NO: 4833464 - DNA, 25 bp, Homo sapien
gaggagaaacctcacatcccaaatg

SEQ ID NO: 4833465 - DNA, 25 bp, Homo sapien
aggaactgtagaggaattgatgagg

SEQ ID NO: 4833466 - DNA, 25 bp, Homo sapien
gagaaacctcacatcccaaatggca

SEQ ID NO: 4833467 - DNA, 25 bp, Homo sapien
tgatacggcctttcctgggtctggg

SEQ ID NO: 4833468 - DNA, 25 bp, Homo sapien
ctccagagatgatacggcctttcct

SEQ ID NO: 4833469 - DNA, 25 bp, Homo sapien
agatgatacggcctttcctgggtct

SEQ ID NO: 4833470 - DNA, 25 bp, Homo sapien
tccagagatgatacggcctttcctg

SEQ ID NO: 4833471 - DNA, 25 bp, Homo sapien
ggagtccgtgcacctgaccgcatgg

SEQ ID NO: 4833472 - DNA, 25 bp, Homo sapien
acctgaccgcatggcctggaccaga

SEQ ID NO: 4833473 - DNA, 25 bp, Homo sapien
ctcagggcaataaggtgcaacggga

SEQ ID NO: 4833474 - DNA, 25 bp, Homo sapien
gatctctgcagacctactcctagtg

SEQ ID NO: 4833475 - DNA, 25 bp, Homo sapien
tgagagacaagtagcatctgtgagg

SEQ ID NO: 4833476 - DNA, 25 bp, Homo sapien
ttgacgattttaggcctgagattgg

SEQ ID NO: 4833477 - DNA, 25 bp, Homo sapien
acattttggcatttggataccctga

SEQ ID NO: 4833478 - DNA, 25 bp, Homo sapien
tttttcataagcaaggttgagagac

SEQ ID NO: 4833479 - DNA, 25 bp, Homo sapien
gaatttggcagttgtggtcagccgc

SEQ ID NO: 4833480 - DNA, 25 bp, Homo sapien
ctgagcgggacctgaatttggcagt

SEQ ID NO: 4833481 - DNA, 25 bp, Homo sapien
gttctagcacgaacagtttttggca

SEQ ID NO: 4833482 - DNA, 25 bp, Homo sapien
tggtcagccgcagttctagcacgaa

SEQ ID NO: 4833483 - DNA, 25 bp, Homo sapien
ctccttgtgtttggcagaggcttca

SEQ ID NO: 4833484 - DNA, 25 bp, Homo sapien
tctctgcagaaccagtttggccacc

SEQ ID NO: 4833485 - DNA, 25 bp, Homo sapien
cagcaggtgccagaccatctctgca

SEQ ID NO: 4833486 - DNA, 25 bp, Homo sapien
aactcatcctattcttttgcaacgg

SEQ ID NO: 4833487 - DNA, 25 bp, Homo sapien
gttcatttggatcaataacaacata

SEQ ID NO: 4833488 - DNA, 25 bp, Homo sapien
ttgtttgcaaagcttgatgccatgg

SEQ ID NO: 4833489 - DNA, 25 bp, Homo sapien
gggcaggtatactttcattcctgac

SEQ ID NO: 4833490 - DNA, 25 bp, Homo sapien
taggcattttatcggttttcagttc

SEQ ID NO: 4833491 - DNA, 25 bp, Homo sapien
tccacgttaatgtacagacccaatc

SEQ ID NO: 4833492 - DNA, 25 bp, Homo sapien
tgcacactccagctgttaaatgtag

SEQ ID NO: 4833493 - DNA, 25 bp, Homo sapien
caatcccaataaagtgtcagacagg

SEQ ID NO: 4833494 - DNA, 25 bp, Homo sapien
taaaaaccgagtactacactgatgg

SEQ ID NO: 4833495 - DNA, 25 bp, Homo sapien
ctacaccgggctttgtggctccctt

SEQ ID NO: 4833496 - DNA, 25 bp, Homo sapien
ttagccacacgaacctcacagctgg

SEQ ID NO: 4833497 - DNA, 25 bp, Homo sapien
ctttttattagccacacgaacctca

SEQ ID NO: 4833498 - DNA, 25 bp, Homo sapien
gtctcctacaccgggctttgtggct

SEQ ID NO: 4833499 - DNA, 25 bp, Homo sapien
cacttaggctagttccctcctggcg

SEQ ID NO: 4833500 - DNA, 25 bp, Homo sapien
ccccacttaggctagttccctcctg

SEQ ID NO: 4833501 - DNA, 25 bp, Homo sapien
cttaggctagttccctcctggcgtc

SEQ ID NO: 4833502 - DNA, 25 bp, Homo sapien
ctgcacggggaccgtccccacttag

SEQ ID NO: 4833503 - DNA, 25 bp, Homo sapien
gggacccgaagtcagcgcggacgcc

SEQ ID NO: 4833504 - DNA, 25 bp, Homo sapien
ctgagccctgatcgctccagggacg

SEQ ID NO: 4833505 - DNA, 25 bp, Homo sapien
tcgctccagggacgctctttgtctc

SEQ ID NO: 4833506 - DNA, 25 bp, Homo sapien
gccttctccgccgtcgtcttctccc

SEQ ID NO: 4833507 - DNA, 25 bp, Homo sapien
gagcccgcagggcgccaacaccatg

SEQ ID NO: 4833508 - DNA, 25 bp, Homo sapien
ggagcccgcagggcgccaacaccat

SEQ ID NO: 4833509 - DNA, 25 bp, Homo sapien
agcccgcagggcgccaacaccatgc

SEQ ID NO: 4833510 - DNA, 25 bp, Homo sapien
cccgcagggcgccaacaccatgccc

SEQ ID NO: 4833511 - DNA, 25 bp, Homo sapien
cacgggctgggcctcgaagtagccc

SEQ ID NO: 4833512 - DNA, 25 bp, Homo sapien
cagcacgaagttgggctcgtcctgc

SEQ ID NO: 4833513 - DNA, 25 bp, Homo sapien
gccagcgaggtgaccatgagtgccc

SEQ ID NO: 4833514 - DNA, 25 bp, Homo sapien
gaagtagccccactggtccgtctgg

SEQ ID NO: 4833515 - DNA, 25 bp, Homo sapien
cactccacttggatggtgctgacgc

SEQ ID NO: 4833516 - DNA, 25 bp, Homo sapien
cggtgctggccgtcgctgtagtact

SEQ ID NO: 4833517 - DNA, 25 bp, Homo sapien
aggctgtagctgacctgcaccgtga

SEQ ID NO: 4833518 - DNA, 25 bp, Homo sapien
ctgtagtacttgatggcgggcgcca

SEQ ID NO: 4833519 - DNA, 25 bp, Homo sapien
gggtgggtgctgcacgagggagcgt

SEQ ID NO: 4833520 - DNA, 25 bp, Homo sapien
cgcagggcagcgagctgtcgcaggg

SEQ ID NO: 4833521 - DNA, 25 bp, Homo sapien
agtcgcagggcagcgagctgtcgca

SEQ ID NO: 4833522 - DNA, 25 bp, Homo sapien
tgctgcacgagggagcgtcctggga

SEQ ID NO: 4833523 - DNA, 25 bp, Homo sapien
ctagagtcctctgcgtcctggatga

SEQ ID NO: 4833524 - DNA, 25 bp, Homo sapien
gaggctcattcaaacatggccagga

SEQ ID NO: 4833525 - DNA, 25 bp, Homo sapien
catggcaaggagttatacagcagga

SEQ ID NO: 4833526 - DNA, 25 bp, Homo sapien
caaggagtcctgtttggtcccacga

SEQ ID NO: 4833527 - DNA, 25 bp, Homo sapien
tttctcagcaatagacttggctttg

SEQ ID NO: 4833528 - DNA, 25 bp, Homo sapien
ggtgcttctcgttttctcagcaata

SEQ ID NO: 4833529 - DNA, 25 bp, Homo sapien
gaaactggtgcttctcgttttctca

SEQ ID NO: 4833530 - DNA, 25 bp, Homo sapien
cgttttctcagcaatagacttggct

SEQ ID NO: 4833531 - DNA, 25 bp, Homo sapien
tcccttttggctctgtaccctcgag

SEQ ID NO: 4833532 - DNA, 25 bp, Homo sapien
tgccttcggaggtgttagtggaaaa

SEQ ID NO: 4833533 - DNA, 25 bp, Homo sapien
ctgtacggtgtctgctaggtgctga

SEQ ID NO: 4833534 - DNA, 25 bp, Homo sapien
gacttctcaggtccctaattgctgc

SEQ ID NO: 4833535 - DNA, 25 bp, Homo sapien
gttttgcctgtagcgttcacgaggg

SEQ ID NO: 4833536 - DNA, 25 bp, Homo sapien
cctgccttatgtgtgcaccttctac

SEQ ID NO: 4833537 - DNA, 25 bp, Homo sapien
ctcttttgttagaagcacgctgttg

SEQ ID NO: 4833538 - DNA, 25 bp, Homo sapien
gatccgtttccatatctgcaactta

SEQ ID NO: 4833539 - DNA, 25 bp, Homo sapien
tcccggggttgaaggagcagcccca

SEQ ID NO: 4833540 - DNA, 25 bp, Homo sapien
tccgtcacatgtgctttgcatccat

SEQ ID NO: 4833541 - DNA, 25 bp, Homo sapien
tgctgaagcagctgtttgctttgga

SEQ ID NO: 4833542 - DNA, 25 bp, Homo sapien
gcagctgtttgctttggatcccggg

SEQ ID NO: 4833543 - DNA, 25 bp, Homo sapien
gcaaccttgtgatccttctgggaga

SEQ ID NO: 4833544 - DNA, 25 bp, Homo sapien
gtgagtctttgagggctgactgcaa

SEQ ID NO: 4833545 - DNA, 25 bp, Homo sapien
ctgcaaccttgtgatccttctggga

SEQ ID NO: 4833546 - DNA, 25 bp, Homo sapien
ctgatgtgagtctttgagggctgac

SEQ ID NO: 4833547 - DNA, 25 bp, Homo sapien
tttcttggtcaagatactgtgaacc

SEQ ID NO: 4833548 - DNA, 25 bp, Homo sapien
tgttgaagctgatctgcccacacca

SEQ ID NO: 4833549 - DNA, 25 bp, Homo sapien
tgcttcagaatttttgccaaaccgg

SEQ ID NO: 4833550 - DNA, 25 bp, Homo sapien
caggaaggattctaaccctccgatt

SEQ ID NO: 4833551 - DNA, 25 bp, Homo sapien
gccgagtgggattcgctttcgccta

SEQ ID NO: 4833552 - DNA, 25 bp, Homo sapien
tttcgcctagatctcggtgggtcgg

SEQ ID NO: 4833553 - DNA, 25 bp, Homo sapien
gcgccccgggttttacaggcagcag

SEQ ID NO: 4833554 - DNA, 25 bp, Homo sapien
tagcctcttggagacgccggacctc

SEQ ID NO: 4833555 - DNA, 25 bp, Homo sapien
cgggttgtccaggatctagcagggc

SEQ ID NO: 4833556 - DNA, 25 bp, Homo sapien
cgcaggcgtcgcgtgtcgccgaggg

SEQ ID NO: 4833557 - DNA, 25 bp, Homo sapien
tccaggatctagcagggcgtggctg

SEQ ID NO: 4833558 - DNA, 25 bp, Homo sapien
tgtcccatgctgcagcgtcgggttg

SEQ ID NO: 4833559 - DNA, 25 bp, Homo sapien
cacgctggtagcgtcgcggtgtcca

SEQ ID NO: 4833560 - DNA, 25 bp, Homo sapien
ggtatccagcgccaggtcttccacg

SEQ ID NO: 4833561 - DNA, 25 bp, Homo sapien
ttcgccgggattggccacgctggta

SEQ ID NO: 4833562 - DNA, 25 bp, Homo sapien
caagggcgcccagagagaggactgc

SEQ ID NO: 4833563 - DNA, 25 bp, Homo sapien
tccctcagtcaccacaaaagtcagg

SEQ ID NO: 4833564 - DNA, 25 bp, Homo sapien
tctgcctgttcgtgaaggtgggctc

SEQ ID NO: 4833565 - DNA, 25 bp, Homo sapien
aaggtgggctccctcagtcaccaca

SEQ ID NO: 4833566 - DNA, 25 bp, Homo sapien
gcctgttcgtgaaggtgggctccct

SEQ ID NO: 4833567 - DNA, 25 bp, Homo sapien
tgtatggccgaggatatccaatctc

SEQ ID NO: 4833568 - DNA, 25 bp, Homo sapien
tgtacaggattctcagcccatggga

SEQ ID NO: 4833569 - DNA, 25 bp, Homo sapien
aagtttggtgctagcctggattctc

SEQ ID NO: 4833570 - DNA, 25 bp, Homo sapien
gagggtccctaatccgagtatgcaa

SEQ ID NO: 4833571 - DNA, 25 bp, Homo sapien
tcacatcttagtctgctgggttttt

SEQ ID NO: 4833572 - DNA, 25 bp, Homo sapien
tttaattagtttgtttagatcacat

SEQ ID NO: 4833573 - DNA, 25 bp, Homo sapien
gtggattacttacagaaggcatata

SEQ ID NO: 4833574 - DNA, 25 bp, Homo sapien
tgcatttaaagtggattacttacag

SEQ ID NO: 4833575 - DNA, 25 bp, Homo sapien
gaccacatctgtgcccgtcttgatg

SEQ ID NO: 4833576 - DNA, 25 bp, Homo sapien
cctggaagatgttcaaagtttatct

SEQ ID NO: 4833577 - DNA, 25 bp, Homo sapien
gtgaaaggctttcagataaccctgc

SEQ ID NO: 4833578 - DNA, 25 bp, Homo sapien
cctctgatcgtctgtgcccattggc

SEQ ID NO: 4833579 - DNA, 25 bp, Homo sapien
ctgggagcctccttgtttctgttaa

SEQ ID NO: 4833580 - DNA, 25 bp, Homo sapien
ttcaattgggaaatatagcaggtgt

SEQ ID NO: 4833581 - DNA, 25 bp, Homo sapien
gtactataggcaagtcaggagccag

SEQ ID NO: 4833582 - DNA, 25 bp, Homo sapien
tctctcttcgccgaattcaattggg

SEQ ID NO: 4833583 - DNA, 25 bp, Homo sapien
ggataaattcccaggcgttgggcca

SEQ ID NO: 4833584 - DNA, 25 bp, Homo sapien
ttggactctttaactgacaatctcc

SEQ ID NO: 4833585 - DNA, 25 bp, Homo sapien
tgggccaaagggcagttgagtaaca

SEQ ID NO: 4833586 - DNA, 25 bp, Homo sapien
gcttctcgtgggtaattggactctt

SEQ ID NO: 4833587 - DNA, 25 bp, Homo sapien
gctgctgtcttgaattcaggcttta

SEQ ID NO: 4833588 - DNA, 25 bp, Homo sapien
cacctggtggctgtaactgacagtt

SEQ ID NO: 4833589 - DNA, 25 bp, Homo sapien
tagggttcttctccccgagatggtc

SEQ ID NO: 4833590 - DNA, 25 bp, Homo sapien
accaggatgtgggtttgccttgcgc

SEQ ID NO: 4833591 - DNA, 25 bp, Homo sapien
tctccagacgaatttctgaggctac

SEQ ID NO: 4833592 - DNA, 25 bp, Homo sapien
aagcccttctccagacgaatttctg

SEQ ID NO: 4833593 - DNA, 25 bp, Homo sapien
tcaatggtgtctgcctctaagccct

SEQ ID NO: 4833594 - DNA, 25 bp, Homo sapien
cagacgaatttctgaggctaccaaa

SEQ ID NO: 4833595 - DNA, 25 bp, Homo sapien
caccgaggcgataggtgattcacta

SEQ ID NO: 4833596 - DNA, 25 bp, Homo sapien
cctggaattgtcaaagcactgccaa

SEQ ID NO: 4833597 - DNA, 25 bp, Homo sapien
tgttttctaagcaaggcgtcccttg

SEQ ID NO: 4833598 - DNA, 25 bp, Homo sapien
tcctgcaacttgtggtatcaaaacc

SEQ ID NO: 4833599 - DNA, 25 bp, Homo sapien
taattggcatgagacggttcctcaa

SEQ ID NO: 4833600 - DNA, 25 bp, Homo sapien
tatgctgtcatctgaaccctagaga

SEQ ID NO: 4833601 - DNA, 25 bp, Homo sapien
gctgttacgaacataaacgcccaca

SEQ ID NO: 4833602 - DNA, 25 bp, Homo sapien
tagagaagcagtgtcagaggaaacc

SEQ ID NO: 4833603 - DNA, 25 bp, Homo sapien
tttaattgggccaaacagcatatgc

SEQ ID NO: 4833604 - DNA, 25 bp, Homo sapien
ggttgtgaatttaggctccagttac

SEQ ID NO: 4833605 - DNA, 25 bp, Homo sapien
tggagagcataatcccacacgggtt

SEQ ID NO: 4833606 - DNA, 25 bp, Homo sapien
taatggcttaagataatcaggagtc

SEQ ID NO: 4833607 - DNA, 25 bp, Homo sapien
aatttatacagtttgaagcttctag

SEQ ID NO: 4833608 - DNA, 25 bp, Homo sapien
cactgggtgcaatattctgcatgag

SEQ ID NO: 4833609 - DNA, 25 bp, Homo sapien
ttcacactgggtgcaatattctgca

SEQ ID NO: 4833610 - DNA, 25 bp, Homo sapien
gcttctagcgttagttcacactggg

SEQ ID NO: 4833611 - DNA, 25 bp, Homo sapien
cttgagtgacaacgcgtgcttgcag

SEQ ID NO: 4833612 - DNA, 25 bp, Homo sapien
gaacttgagtgacaacgcgtgcttg

SEQ ID NO: 4833613 - DNA, 25 bp, Homo sapien
tgacaacgcgtgcttgcagggtgct

SEQ ID NO: 4833614 - DNA, 25 bp, Homo sapien
tgtgaacttgagtgacaacgcgtgc

SEQ ID NO: 4833615 - DNA, 25 bp, Homo sapien
aaccagtgacgtttgtggctgtgga

SEQ ID NO: 4833616 - DNA, 25 bp, Homo sapien
tcttttgcacctggcagaccctctg

SEQ ID NO: 4833617 - DNA, 25 bp, Homo sapien
tttcttgttgtccacccatacagga

SEQ ID NO: 4833618 - DNA, 25 bp, Homo sapien
atacaggaagaatgttggtgaaaag

SEQ ID NO: 4833619 - DNA, 25 bp, Homo sapien
aaagttccaggaagtcgtacttgag

SEQ ID NO: 4833620 - DNA, 25 bp, Homo sapien
cagggaagaaagaactctaccagga

SEQ ID NO: 4833621 - DNA, 25 bp, Homo sapien
ggtgtatgaacagagtcttgtaagc

SEQ ID NO: 4833622 - DNA, 25 bp, Homo sapien
cttgagatggatcttgaagaaggag

SEQ ID NO: 4833623 - DNA, 25 bp, Homo sapien
atctgtctgtgctccgatatgtggg

SEQ ID NO: 4833624 - DNA, 25 bp, Homo sapien
tctcctgcagcgataccgtatctgt

SEQ ID NO: 4833625 - DNA, 25 bp, Homo sapien
ttcctgatggttgacgtttctcctg

SEQ ID NO: 4833626 - DNA, 25 bp, Homo sapien
tatttcctgatggttgacgtttctc

SEQ ID NO: 4833627 - DNA, 25 bp, Homo sapien
ggcaaacctatacttcccgtgggca

SEQ ID NO: 4833628 - DNA, 25 bp, Homo sapien
caaggtaggaagcaagtagaccgca

SEQ ID NO: 4833629 - DNA, 25 bp, Homo sapien
catttcccagggagtgtgagcttct

SEQ ID NO: 4833630 - DNA, 25 bp, Homo sapien
acacgttatccttggcacagttcag

SEQ ID NO: 4833631 - DNA, 25 bp, Homo sapien
catgcggagaaggtagtactgccca

SEQ ID NO: 4833632 - DNA, 25 bp, Homo sapien
aggttggcattggagtcgccgcaca

SEQ ID NO: 4833633 - DNA, 25 bp, Homo sapien
tcgccgcacatggaacttgactttg

SEQ ID NO: 4833634 - DNA, 25 bp, Homo sapien
cagggtgaccacttcctggagtgct

SEQ ID NO: 4833635 - DNA, 25 bp, Homo sapien
cttcagtcagtaggtgtgtttccat

SEQ ID NO: 4833636 - DNA, 25 bp, Homo sapien
ccttcagtcagtaggtgtgtttcca

SEQ ID NO: 4833637 - DNA, 25 bp, Homo sapien
tccttcagtcagtaggtgtgtttcc

SEQ ID NO: 4833638 - DNA, 25 bp, Homo sapien
gaaaatttactgttggattatgtgg

SEQ ID NO: 4833639 - DNA, 25 bp, Homo sapien
taaggttgtagggtgtgcagagaaa

SEQ ID NO: 4833640 - DNA, 25 bp, Homo sapien
tatgactttgcttgtacttaagaag

SEQ ID NO: 4833641 - DNA, 25 bp, Homo sapien
ctgaggttgacctgtgatgtatgac

SEQ ID NO: 4833642 - DNA, 25 bp, Homo sapien
agttcattccgtttccacctggcag

SEQ ID NO: 4833643 - DNA, 25 bp, Homo sapien
taaaattcggcgtgatgaaatccaa

SEQ ID NO: 4833644 - DNA, 25 bp, Homo sapien
tgacacccaaggactcgcagggagt

SEQ ID NO: 4833645 - DNA, 25 bp, Homo sapien
tagaggcatcctgtaagctttgcac

SEQ ID NO: 4833646 - DNA, 25 bp, Homo sapien
tggagcacagccaccgtgggtcttg

SEQ ID NO: 4833647 - DNA, 25 bp, Homo sapien
tgtgggttcattacctgtgtcaaag

SEQ ID NO: 4833648 - DNA, 25 bp, Homo sapien
cttgaaatttcgcaggtgatgctct

SEQ ID NO: 4833649 - DNA, 25 bp, Homo sapien
tcttctcggtgacctgtgggttcat

SEQ ID NO: 4833650 - DNA, 25 bp, Homo sapien
gaaggaagttgataggaagctgaca

SEQ ID NO: 4833651 - DNA, 25 bp, Homo sapien
taacctctgtgaacttcagcctcaa

SEQ ID NO: 4833652 - DNA, 25 bp, Homo sapien
cagttaattacacaatctccaggag

SEQ ID NO: 4833653 - DNA, 25 bp, Homo sapien
tatcagaacctcttgggtacagctg

SEQ ID NO: 4833654 - DNA, 25 bp, Homo sapien
gccgagtttgatggtatgtcattac

SEQ ID NO: 4833655 - DNA, 25 bp, Homo sapien
cgggtccatgaatgaccggcaccat

SEQ ID NO: 4833656 - DNA, 25 bp, Homo sapien
tggtatgtcattaccgggtcgggtc

SEQ ID NO: 4833657 - DNA, 25 bp, Homo sapien
ttttgctttcgtgtacagtgtgccg

SEQ ID NO: 4833658 - DNA, 25 bp, Homo sapien
cacaaggcctcttacattcagcatg

SEQ ID NO: 4833659 - DNA, 25 bp, Homo sapien
gaccgagtgattgtcagctcacaag

SEQ ID NO: 4833660 - DNA, 25 bp, Homo sapien
gaaataaaagtcctccactcgactg

SEQ ID NO: 4833661 - DNA, 25 bp, Homo sapien
tcgactgtctgaccgagtgattgtc

SEQ ID NO: 4833662 - DNA, 25 bp, Homo sapien
gcctggaaggagctacttaacttcc

SEQ ID NO: 4833663 - DNA, 25 bp, Homo sapien
cctggaaggagctacttaacttcct

SEQ ID NO: 4833664 - DNA, 25 bp, Homo sapien
ctggaaggagctacttaacttcctt

SEQ ID NO: 4833665 - DNA, 25 bp, Homo sapien
ggtgtggcccatgtggggtctggaa

SEQ ID NO: 4833666 - DNA, 25 bp, Homo sapien
ccgtggggtgtggcccatgtggggt

SEQ ID NO: 4833667 - DNA, 25 bp, Homo sapien
tggggtgtggcccatgtggggtctg

SEQ ID NO: 4833668 - DNA, 25 bp, Homo sapien
gggtgtggcccatgtggggtctgga

SEQ ID NO: 4833669 - DNA, 25 bp, Homo sapien
gatacgaacaggaagatcaagtctt

SEQ ID NO: 4833670 - DNA, 25 bp, Homo sapien
tgggatacgaacaggaagatcaagt

SEQ ID NO: 4833671 - DNA, 25 bp, Homo sapien
ttattctgggatacgaacaggaaga

SEQ ID NO: 4833672 - DNA, 25 bp, Homo sapien
ttctgggatacgaacaggaagatca

SEQ ID NO: 4833673 - DNA, 25 bp, Homo sapien
ataaggttgccaaagtaggatggca

SEQ ID NO: 4833674 - DNA, 25 bp, Homo sapien
ccaaagtaggatggcatatttccta

SEQ ID NO: 4833675 - DNA, 25 bp, Homo sapien
aattctgcagcaacataagggtggc

SEQ ID NO: 4833676 - DNA, 25 bp, Homo sapien
taaaattctgcagcaacataagggt

SEQ ID NO: 4833677 - DNA, 25 bp, Homo sapien
gcttgggtttcactacccggtatgc

SEQ ID NO: 4833678 - DNA, 25 bp, Homo sapien
gctcctgggtctgccgctagataag

SEQ ID NO: 4833679 - DNA, 25 bp, Homo sapien
cccggtatgctctgtgatatgctaa

SEQ ID NO: 4833680 - DNA, 25 bp, Homo sapien
gataagcgtgcacccaggcttgggt

SEQ ID NO: 4833681 - DNA, 25 bp, Homo sapien
cacctgaccagtgactcttgtacca

SEQ ID NO: 4833682 - DNA, 25 bp, Homo sapien
gaaagacactcgagtgagctcggga

SEQ ID NO: 4833683 - DNA, 25 bp, Homo sapien
tcgggacagatctctccagcactgt

SEQ ID NO: 4833684 - DNA, 25 bp, Homo sapien
ccccagtgccatgagaaagacactc

SEQ ID NO: 4833685 - DNA, 25 bp, Homo sapien
gcgtcctactttgtttgatcttgaa

SEQ ID NO: 4833686 - DNA, 25 bp, Homo sapien
aatacggggaagtatcttctgggca

SEQ ID NO: 4833687 - DNA, 25 bp, Homo sapien
tgatatgtttggcaattgtcaggcc

SEQ ID NO: 4833688 - DNA, 25 bp, Homo sapien
ttccaacaggaaatatgtacacacc

SEQ ID NO: 4833689 - DNA, 25 bp, Homo sapien
caataaactgatacatgccggtgac

SEQ ID NO: 4833690 - DNA, 25 bp, Homo sapien
caaggtttcccgtgtgcagcaataa

SEQ ID NO: 4833691 - DNA, 25 bp, Homo sapien
gaatctggctcatgggcttgaaacc

SEQ ID NO: 4833692 - DNA, 25 bp, Homo sapien
ggcagtgtataaacaaagccctgtg

SEQ ID NO: 4833693 - DNA, 25 bp, Homo sapien
gaatctcaggcctgcgtgtgctccc

SEQ ID NO: 4833694 - DNA, 25 bp, Homo sapien
ctgtcgtgtgagtgggatgggtttc

SEQ ID NO: 4833695 - DNA, 25 bp, Homo sapien
agaagggctgtcgtgtgagtgggat

SEQ ID NO: 4833696 - DNA, 25 bp, Homo sapien
cctctgaccgtaccttgactcttga

SEQ ID NO: 4833697 - DNA, 25 bp, Homo sapien
gattgttgacgcgtagcacagtctg

SEQ ID NO: 4833698 - DNA, 25 bp, Homo sapien
ttgacgcgtagcacagtctgttatc

SEQ ID NO: 4833699 - DNA, 25 bp, Homo sapien
tagcacagtctgttatctttgggca

SEQ ID NO: 4833700 - DNA, 25 bp, Homo sapien
agatgagattgttgacgcgtagcac

SEQ ID NO: 4833701 - DNA, 25 bp, Homo sapien
taagagtgatccttactggctgact

SEQ ID NO: 4833702 - DNA, 25 bp, Homo sapien
cagtggccattttgtatcacggatc

SEQ ID NO: 4833703 - DNA, 25 bp, Homo sapien
tcttagtgacttgcaaatgatggga

SEQ ID NO: 4833704 - DNA, 25 bp, Homo sapien
tagtcatatgaaccgtttccgtccc

SEQ ID NO: 4833705 - DNA, 25 bp, Homo sapien
catctggggaaggattcaaatcatc

SEQ ID NO: 4833706 - DNA, 25 bp, Homo sapien
tttttgtcatttatagacttgctcc

SEQ ID NO: 4833707 - DNA, 25 bp, Homo sapien
tgtcatttatagacttgctcccatc

SEQ ID NO: 4833708 - DNA, 25 bp, Homo sapien
atttatagacttgctcccatctggg

SEQ ID NO: 4833709 - DNA, 25 bp, Homo sapien
gcgtctatgactggtcttacccttg

SEQ ID NO: 4833710 - DNA, 25 bp, Homo sapien
tcacagtgttcctccagcattccca

SEQ ID NO: 4833711 - DNA, 25 bp, Homo sapien
gtcttacccttgaatgggtccttca

SEQ ID NO: 4833712 - DNA, 25 bp, Homo sapien
tcccattgtgcgtctatgactggtc

SEQ ID NO: 4833713 - DNA, 25 bp, Homo sapien
tgaggatatcagtgccctgcgtgcc

SEQ ID NO: 4833714 - DNA, 25 bp, Homo sapien
ggagctctaccttagtcgcaaccag

SEQ ID NO: 4833715 - DNA, 25 bp, Homo sapien
tcatgctagacaacaacgggctgca

SEQ ID NO: 4833716 - DNA, 25 bp, Homo sapien
ccagtttggagagcctcatgctaga

SEQ ID NO: 4833717 - DNA, 25 bp, Homo sapien
gcaacctgaagaccgcgaggctgtg

SEQ ID NO: 4833718 - DNA, 25 bp, Homo sapien
ctgggatggacagtggcaacctgaa

SEQ ID NO: 4833719 - DNA, 25 bp, Homo sapien
aagctgcggagcaacctgcgccagc

SEQ ID NO: 4833720 - DNA, 25 bp, Homo sapien
tgcgcgtcctggtcctgcgcaggaa

SEQ ID NO: 4833721 - DNA, 25 bp, Homo sapien
ggcggcgctgccgcttcccaatcgc

SEQ ID NO: 4833722 - DNA, 25 bp, Homo sapien
gctgccgcttcccaatcgcgccctc

SEQ ID NO: 4833723 - DNA, 25 bp, Homo sapien
cggcgctgccgcttcccaatcgcgc

SEQ ID NO: 4833724 - DNA, 25 bp, Homo sapien
gccgcttcccaatcgcgccctccca

SEQ ID NO: 4833725 - DNA, 25 bp, Homo sapien
aaataaatgaacaccatgaatttgc

SEQ ID NO: 4833726 - DNA, 25 bp, Homo sapien
taaatgaacaccatgaatttgcatg

SEQ ID NO: 4833727 - DNA, 25 bp, Homo sapien
tgcagggccatgctaatcctctctg

SEQ ID NO: 4833728 - DNA, 25 bp, Homo sapien
tgcatgtcatctttgtgcagggcca

SEQ ID NO: 4833729 - DNA, 25 bp, Homo sapien
gatctcccactaggtatgtggcaaa

SEQ ID NO: 4833730 - DNA, 25 bp, Homo sapien
catttttctatacatgggtgcacgt

SEQ ID NO: 4833731 - DNA, 25 bp, Homo sapien
ggtgcacgttacacaatctccatag

SEQ ID NO: 4833732 - DNA, 25 bp, Homo sapien
tgtctggccaggattttgctttcta

SEQ ID NO: 4833733 - DNA, 25 bp, Homo sapien
caaactatgacagcaactcagagta

SEQ ID NO: 4833734 - DNA, 25 bp, Homo sapien
gcaacgatctaaaaccataggcaca

SEQ ID NO: 4833735 - DNA, 25 bp, Homo sapien
cataggcacatagatcaagattgga

SEQ ID NO: 4833736 - DNA, 25 bp, Homo sapien
tattcaacatgttgaccgcaacgat

SEQ ID NO: 4833737 - DNA, 25 bp, Homo sapien
gccataattctttcaatcctgacag

SEQ ID NO: 4833738 - DNA, 25 bp, Homo sapien
gctccctgtgggctttagtgcacag

SEQ ID NO: 4833739 - DNA, 25 bp, Homo sapien
gattccatggcatagcaaagttgat

SEQ ID NO: 4833740 - DNA, 25 bp, Homo sapien
gtctctaccacctgacaacactggg

SEQ ID NO: 4833741 - DNA, 25 bp, Homo sapien
gagtaccaggtgcagagatagaaag

SEQ ID NO: 4833742 - DNA, 25 bp, Homo sapien
tagatgtggacccaattataggaca

SEQ ID NO: 4833743 - DNA, 25 bp, Homo sapien
gattagcccagattattagctctga

SEQ ID NO: 4833744 - DNA, 25 bp, Homo sapien
ggaagcctaaggtcacatgattaaa

SEQ ID NO: 4833745 - DNA, 25 bp, Homo sapien
acgttctcatacacagaatggcaca

SEQ ID NO: 4833746 - DNA, 25 bp, Homo sapien
aaacgttctcatacacagaatggca

SEQ ID NO: 4833747 - DNA, 25 bp, Homo sapien
tgcaaacgttctcatacacagaatg

SEQ ID NO: 4833748 - DNA, 25 bp, Homo sapien
gcaaacgttctcatacacagaatgg

SEQ ID NO: 4833749 - DNA, 25 bp, Homo sapien
gtacaaatattgtctaaggtagtca

SEQ ID NO: 4833750 - DNA, 25 bp, Homo sapien
tgtaaaatcaaagttgtcggggctg

SEQ ID NO: 4833751 - DNA, 25 bp, Homo sapien
caaattacaattgtacaaatgttgt

SEQ ID NO: 4833752 - DNA, 25 bp, Homo sapien
agaattgtctcacatttgctcagaa

SEQ ID NO: 4833753 - DNA, 25 bp, Homo sapien
cacacgtgggcttcactatacctga

SEQ ID NO: 4833754 - DNA, 25 bp, Homo sapien
acaataatctggtaatttccctttg

SEQ ID NO: 4833755 - DNA, 25 bp, Homo sapien
tgctcagccaccttaacaatctata

SEQ ID NO: 4833756 - DNA, 25 bp, Homo sapien
tgaaatggagttcttgctccgttgc

SEQ ID NO: 4833757 - DNA, 25 bp, Homo sapien
gcacaagctctctggacatccacgt

SEQ ID NO: 4833758 - DNA, 25 bp, Homo sapien
caagctctctggacatccacgtaag

SEQ ID NO: 4833759 - DNA, 25 bp, Homo sapien
gctctctggacatccacgtaagatg

SEQ ID NO: 4833760 - DNA, 25 bp, Homo sapien
cacaagctctctggacatccacgta

SEQ ID NO: 4833761 - DNA, 25 bp, Homo sapien
actccatcagctcaattggctgcag

SEQ ID NO: 4833762 - DNA, 25 bp, Homo sapien
ctccatcagctcaattggctgcagc

SEQ ID NO: 4833763 - DNA, 25 bp, Homo sapien
aactccatcagctcaattggctgca

SEQ ID NO: 4833764 - DNA, 25 bp, Homo sapien
aagttggccttgcatagggcctcaa

SEQ ID NO: 4833765 - DNA, 25 bp, Homo sapien
aaagttggccttgcatagggcctca

SEQ ID NO: 4833766 - DNA, 25 bp, Homo sapien
taaagttggccttgcatagggcctc

SEQ ID NO: 4833767 - DNA, 25 bp, Homo sapien
ttaaagttggccttgcatagggcct

SEQ ID NO: 4833768 - DNA, 25 bp, Homo sapien
ggtaaagtcccacttctctgagaag

SEQ ID NO: 4833769 - DNA, 25 bp, Homo sapien
ttattgggataagctgcttctcagc

SEQ ID NO: 4833770 - DNA, 25 bp, Homo sapien
acttgaccccacagttattgggata

SEQ ID NO: 4833771 - DNA, 25 bp, Homo sapien
cgcttgtccggagggtcacgattgg

SEQ ID NO: 4833772 - DNA, 25 bp, Homo sapien
ggagggggcagcacagtagaagccc

SEQ ID NO: 4833773 - DNA, 25 bp, Homo sapien
gtagaagccctcatgagtgcagggc

SEQ ID NO: 4833774 - DNA, 25 bp, Homo sapien
ttaggagggggcagcacagtagaag

SEQ ID NO: 4833775 - DNA, 25 bp, Homo sapien
aagccctcatgagtgcagggcccac

SEQ ID NO: 4833776 - DNA, 25 bp, Homo sapien
tgcttccaatttggcgtgattcatg

SEQ ID NO: 4833777 - DNA, 25 bp, Homo sapien
cattcacacgctgaaggacatcttg

SEQ ID NO: 4833778 - DNA, 25 bp, Homo sapien
caatttggcgtgattcatgactggc

SEQ ID NO: 4833779 - DNA, 25 bp, Homo sapien
tggcgtgattcatgactggcctttt

SEQ ID NO: 4833780 - DNA, 25 bp, Homo sapien
tgagctttctgagccggtacctgcg

SEQ ID NO: 4833781 - DNA, 25 bp, Homo sapien
tttttaaacacgatgcaccgcgacc

SEQ ID NO: 4833782 - DNA, 25 bp, Homo sapien
tacctgcgtctgttgcacggcgggt

SEQ ID NO: 4833783 - DNA, 25 bp, Homo sapien
gaggcctgcgctttccaaggacttg

SEQ ID NO: 4833784 - DNA, 25 bp, Homo sapien
tgaaagcatcgtcgtcatactggct

SEQ ID NO: 4833785 - DNA, 25 bp, Homo sapien
acccatgactctagcgcctggcttt

SEQ ID NO: 4833786 - DNA, 25 bp, Homo sapien
gaccctggtgaagcctgatcttgtt

SEQ ID NO: 4833787 - DNA, 25 bp, Homo sapien
tgtagcagttgccataggagcagcc

SEQ ID NO: 4833788 - DNA, 25 bp, Homo sapien
aaaatgttcagtagaagatgcacaa

SEQ ID NO: 4833789 - DNA, 25 bp, Homo sapien
gttcagtagaagatgcacaaaactt

SEQ ID NO: 4833790 - DNA, 25 bp, Homo sapien
taaaaaatgttcagtagaagatgca

SEQ ID NO: 4833791 - DNA, 25 bp, Homo sapien
ttcagtagaagatgcacaaaacttc

SEQ ID NO: 4833792 - DNA, 25 bp, Homo sapien
tagactgtgcgttatacaagaagac

SEQ ID NO: 4833793 - DNA, 25 bp, Homo sapien
cctttcaccaaactggtagactgtg

SEQ ID NO: 4833794 - DNA, 25 bp, Homo sapien
gagctccacagatcactttatcacc

SEQ ID NO: 4833795 - DNA, 25 bp, Homo sapien
taagtgattaggagcctggctctcc

SEQ ID NO: 4833796 - DNA, 25 bp, Homo sapien
gcaagttcccaagtgcagaggtagc

SEQ ID NO: 4833797 - DNA, 25 bp, Homo sapien
ccacggataggtgggtggtggcgaa

SEQ ID NO: 4833798 - DNA, 25 bp, Homo sapien
aagtgcagaggtagcgatgcctgca

SEQ ID NO: 4833799 - DNA, 25 bp, Homo sapien
cacggataggtggttggtggcagat

SEQ ID NO: 4833800 - DNA, 25 bp, Homo sapien
tctcccctcactgcaccgtttaggg

SEQ ID NO: 4833801 - DNA, 25 bp, Homo sapien
caaaactgcatctgtttgggggttg

SEQ ID NO: 4833802 - DNA, 25 bp, Homo sapien
ttccataacgctggcccaaaactgc

SEQ ID NO: 4833803 - DNA, 25 bp, Homo sapien
tttccactgtcacgggggtgaggtc

SEQ ID NO: 4833804 - DNA, 25 bp, Homo sapien
cactgagcccggctgaaatcaaaat

SEQ ID NO: 4833805 - DNA, 25 bp, Homo sapien
tcctctcacaattcactgatgaaaa

SEQ ID NO: 4833806 - DNA, 25 bp, Homo sapien
atttcgtgcattatttcctctcaca

SEQ ID NO: 4833807 - DNA, 25 bp, Homo sapien
ccggctgaaatcaaaatttcgtgca

SEQ ID NO: 4833808 - DNA, 25 bp, Homo sapien
tatgggcaaagttaatcctctcctg

SEQ ID NO: 4833809 - DNA, 25 bp, Homo sapien
tcacatcgacatggtcagtttccag

SEQ ID NO: 4833810 - DNA, 25 bp, Homo sapien
aaggccagacccctgtatgggcaaa

SEQ ID NO: 4833811 - DNA, 25 bp, Homo sapien
tgcatgaattgccacccagagaagc

SEQ ID NO: 4833812 - DNA, 25 bp, Homo sapien
tatacagtcactggtaccgctgccg

SEQ ID NO: 4833813 - DNA, 25 bp, Homo sapien
gctggagcctcagatgcttctcggg

SEQ ID NO: 4833814 - DNA, 25 bp, Homo sapien
gaagccaatcctgtgtctccgctgg

SEQ ID NO: 4833815 - DNA, 25 bp, Homo sapien
tgaatgtctggagacgtccccactg

SEQ ID NO: 4833816 - DNA, 25 bp, Homo sapien
agccttgccacccatatctttgctt

SEQ ID NO: 4833817 - DNA, 25 bp, Homo sapien
ccttgccacccatatctttgcttcc

SEQ ID NO: 4833818 - DNA, 25 bp, Homo sapien
gccttgccacccatatctttgcttc

SEQ ID NO: 4833819 - DNA, 25 bp, Homo sapien
cttgccacccatatctttgcttcct

SEQ ID NO: 4833820 - DNA, 25 bp, Homo sapien
gaaagcctcgcctttctccgttgaa

SEQ ID NO: 4833821 - DNA, 25 bp, Homo sapien
tggagccggacacttgctaactctc

SEQ ID NO: 4833822 - DNA, 25 bp, Homo sapien
ttccgggagcgtgtggcgtccacac

SEQ ID NO: 4833823 - DNA, 25 bp, Homo sapien
gctgtcacgccagaggagagttgct

SEQ ID NO: 4833824 - DNA, 25 bp, Homo sapien
agcagcgcgagagccacggcctcgc

SEQ ID NO: 4833825 - DNA, 25 bp, Homo sapien
agagccacggcctcgccggcaggct

SEQ ID NO: 4833826 - DNA, 25 bp, Homo sapien
gcctcgccggcaggctctttactct

SEQ ID NO: 4833827 - DNA, 25 bp, Homo sapien
gcgactccagcagcgcgagagccac

SEQ ID NO: 4833828 - DNA, 25 bp, Homo sapien
aacagccaggcgcgggtcgactcct

SEQ ID NO: 4833829 - DNA, 25 bp, Homo sapien
cttctgcgggacacctgagaagaaa

SEQ ID NO: 4833830 - DNA, 25 bp, Homo sapien
agctgcaccttctgcgggacacctg

SEQ ID NO: 4833831 - DNA, 25 bp, Homo sapien
ggcgccaacagccaggcgcgggtcg

SEQ ID NO: 4833832 - DNA, 25 bp, Homo sapien
cccataacggctacatggagtgaca

SEQ ID NO: 4833833 - DNA, 25 bp, Homo sapien
tggagtgacaacagcaaccgtgaac

SEQ ID NO: 4833834 - DNA, 25 bp, Homo sapien
tcccagagagtgattcggccctgag

SEQ ID NO: 4833835 - DNA, 25 bp, Homo sapien
tagaacctgttaacccactgtagac

SEQ ID NO: 4833836 - DNA, 25 bp, Homo sapien
aatctctttgtaaaccgggtcactg

SEQ ID NO: 4833837 - DNA, 25 bp, Homo sapien
gccattcgtaatggcaatctctttg

SEQ ID NO: 4833838 - DNA, 25 bp, Homo sapien
cactcgcactggaggtaatgaactt

SEQ ID NO: 4833839 - DNA, 25 bp, Homo sapien
tccttactcattctattaatacagc

SEQ ID NO: 4833840 - DNA, 25 bp, Homo sapien
tttgctcggaaaatcttctgtaggc

SEQ ID NO: 4833841 - DNA, 25 bp, Homo sapien
atctagatcgctagctcccacgcaa

SEQ ID NO: 4833842 - DNA, 25 bp, Homo sapien
cggaaaatcttctgtaggctacaag

SEQ ID NO: 4833843 - DNA, 25 bp, Homo sapien
gccaggagtaagcaactgatcttca

SEQ ID NO: 4833844 - DNA, 25 bp, Homo sapien
tacacttaggtaaattctacagtca

SEQ ID NO: 4833845 - DNA, 25 bp, Homo sapien
atcaaaactctcacctgctggcact

SEQ ID NO: 4833846 - DNA, 25 bp, Homo sapien
caatcacagcgaaatttagcaaatg

SEQ ID NO: 4833847 - DNA, 25 bp, Homo sapien
taagtagaagaagaagactagttac

SEQ ID NO: 4833848 - DNA, 25 bp, Homo sapien
gtggcttcaaagtcaataatacaaa

SEQ ID NO: 4833849 - DNA, 25 bp, Homo sapien
ttcacaagtggcttcaaagtcaata

SEQ ID NO: 4833850 - DNA, 25 bp, Homo sapien
ctaaagtatgcgtattcagtaaaac

SEQ ID NO: 4833851 - DNA, 25 bp, Homo sapien
atgtacaaactcaggtgggtttcct

SEQ ID NO: 4833852 - DNA, 25 bp, Homo sapien
gatacacgatacatgatacacgacg

SEQ ID NO: 4833853 - DNA, 25 bp, Homo sapien
ttgaagaaatgccagcctgcagtta

SEQ ID NO: 4833854 - DNA, 25 bp, Homo sapien
caagggaaggatagcaagttaaagt

SEQ ID NO: 4833855 - DNA, 25 bp, Homo sapien
gcaatttcataggatctcacggcat

SEQ ID NO: 4833856 - DNA, 25 bp, Homo sapien
aatcagacagctgtgtgttaatctc

SEQ ID NO: 4833857 - DNA, 25 bp, Homo sapien
ttccagttagactgatgcagaaatc

SEQ ID NO: 4833858 - DNA, 25 bp, Homo sapien
cagacagctgtgtgttaatctctgg

SEQ ID NO: 4833859 - DNA, 25 bp, Homo sapien
ctgagtaattccagttagactgatg

SEQ ID NO: 4833860 - DNA, 25 bp, Homo sapien
tttgttcctaattccttcaatttca

SEQ ID NO: 4833861 - DNA, 25 bp, Homo sapien
gagggaaggtatcagctctgtctac

SEQ ID NO: 4833862 - DNA, 25 bp, Homo sapien
tacctgagggaaggtatcagctctg

SEQ ID NO: 4833863 - DNA, 25 bp, Homo sapien
ttttagtacctgagggaaggtatca

SEQ ID NO: 4833864 - DNA, 25 bp, Homo sapien
gagcctgctgagttgacactgaatg

SEQ ID NO: 4833865 - DNA, 25 bp, Homo sapien
catatgacttccgaatattgatcca

SEQ ID NO: 4833866 - DNA, 25 bp, Homo sapien
tgatccactttttcgcaaaaggagg

SEQ ID NO: 4833867 - DNA, 25 bp, Homo sapien
caaaaggagggtatttgagcctgct

SEQ ID NO: 4833868 - DNA, 25 bp, Homo sapien
tcttttgagtacaatgtcagtgccc

SEQ ID NO: 4833869 - DNA, 25 bp, Homo sapien
tttgcatcactcatccgaaaatcca

SEQ ID NO: 4833870 - DNA, 25 bp, Homo sapien
tttggattaggtatactcagcccgt

SEQ ID NO: 4833871 - DNA, 25 bp, Homo sapien
tactgtacgcctccacttataagag

SEQ ID NO: 4833872 - DNA, 25 bp, Homo sapien
gtgaggccgcccatcataatccatt

SEQ ID NO: 4833873 - DNA, 25 bp, Homo sapien
tattcgggcgatattcttagagtca

SEQ ID NO: 4833874 - DNA, 25 bp, Homo sapien
ggagtgccctctattggtaaggaag

SEQ ID NO: 4833875 - DNA, 25 bp, Homo sapien
aagcattcgaactgctattcgggcg

SEQ ID NO: 4833876 - DNA, 25 bp, Homo sapien
ttcaattggaatgatccacacacaa

SEQ ID NO: 4833877 - DNA, 25 bp, Homo sapien
tcttcatagcaacttcaattggaat

SEQ ID NO: 4833878 - DNA, 25 bp, Homo sapien
acttcaattggaatgatccacacac

SEQ ID NO: 4833879 - DNA, 25 bp, Homo sapien
agcaacttcaattggaatgatccac

SEQ ID NO: 4833880 - DNA, 25 bp, Homo sapien
ggaaggcgaatcaaacaaccaaatc

SEQ ID NO: 4833881 - DNA, 25 bp, Homo sapien
taggcagatatgtataccaagtacc

SEQ ID NO: 4833882 - DNA, 25 bp, Homo sapien
gaagtttgagctacagcccttatga

SEQ ID NO: 4833883 - DNA, 25 bp, Homo sapien
gacattcaacagaacagccaataag

SEQ ID NO: 4833884 - DNA, 25 bp, Homo sapien
cttcactagtggccaatgaagtttt

SEQ ID NO: 4833885 - DNA, 25 bp, Homo sapien
agtcttttattgactaacttcacta

SEQ ID NO: 4833886 - DNA, 25 bp, Homo sapien
ttcactagtggccaatgaagttttt

SEQ ID NO: 4833887 - DNA, 25 bp, Homo sapien
ttttattgactaacttcactagtgg

SEQ ID NO: 4833888 - DNA, 25 bp, Homo sapien
tagcctctagataagagttttacct

SEQ ID NO: 4833889 - DNA, 25 bp, Homo sapien
gaaaatacatgggtttagcctctag

SEQ ID NO: 4833890 - DNA, 25 bp, Homo sapien
gttttaccttatcaagtcgaaatgc

SEQ ID NO: 4833891 - DNA, 25 bp, Homo sapien
gaattactcaatacttagcagccat

SEQ ID NO: 4833892 - DNA, 25 bp, Homo sapien
tcctggcagacgagcaaaaactctg

SEQ ID NO: 4833893 - DNA, 25 bp, Homo sapien
cagtaaaatctatggctgagcgcag

SEQ ID NO: 4833894 - DNA, 25 bp, Homo sapien
tatgtagagaattcccacgccaaga

SEQ ID NO: 4833895 - DNA, 25 bp, Homo sapien
catgagcttgttggtacttggcgaa

SEQ ID NO: 4833896 - DNA, 25 bp, Homo sapien
taataggtaacatgcttgtgacgcc

SEQ ID NO: 4833897 - DNA, 25 bp, Homo sapien
cagtctctggtctcgaggagcatat

SEQ ID NO: 4833898 - DNA, 25 bp, Homo sapien
caacgctggattcaactatgtgcaa

SEQ ID NO: 4833899 - DNA, 25 bp, Homo sapien
gctgtccttcatgtatcaacgctgg

SEQ ID NO: 4833900 - DNA, 25 bp, Homo sapien
gatgttatcttcttcgaataggcta

SEQ ID NO: 4833901 - DNA, 25 bp, Homo sapien
tcaaccctcacagaatatgagacag

SEQ ID NO: 4833902 - DNA, 25 bp, Homo sapien
tagatttagcataagggccctagga

SEQ ID NO: 4833903 - DNA, 25 bp, Homo sapien
taccttgcactgttttatggagaca

SEQ ID NO: 4833904 - DNA, 25 bp, Homo sapien
taaagtgactggacaataaaggaca

SEQ ID NO: 4833905 - DNA, 25 bp, Homo sapien
tctatgttcaaaggtgcagagtcgg

SEQ ID NO: 4833906 - DNA, 25 bp, Homo sapien
tggtttcaatcctatgtgactgtga

SEQ ID NO: 4833907 - DNA, 25 bp, Homo sapien
gactgtgataatcatggtcccactg

SEQ ID NO: 4833908 - DNA, 25 bp, Homo sapien
ttttaactaagcacccattgtgtct

SEQ ID NO: 4833909 - DNA, 25 bp, Homo sapien
tacagtacatatgaatctctgcagc

SEQ ID NO: 4833910 - DNA, 25 bp, Homo sapien
cagcacaaatgaagggcccaatgaa

SEQ ID NO: 4833911 - DNA, 25 bp, Homo sapien
agaacctgtgcctgaataatttaca

SEQ ID NO: 4833912 - DNA, 25 bp, Homo sapien
acaggtactaaccttacaagataca

SEQ ID NO: 4833913 - DNA, 25 bp, Homo sapien
caggtactaaccttacaagatacat

SEQ ID NO: 4833914 - DNA, 25 bp, Homo sapien
gaacaggtactaaccttacaagata

SEQ ID NO: 4833915 - DNA, 25 bp, Homo sapien
gggatagctcctatctgtaactctg

SEQ ID NO: 4833916 - DNA, 25 bp, Homo sapien
agctcctatctgtaactctgccaaa

SEQ ID NO: 4833917 - DNA, 25 bp, Homo sapien
cgagacagagcctctaaaaatttat

SEQ ID NO: 4833918 - DNA, 25 bp, Homo sapien
agggattaaacatttctactcgaga

SEQ ID NO: 4833919 - DNA, 25 bp, Homo sapien
gccacagatgactgcgacttgttat

SEQ ID NO: 4833920 - DNA, 25 bp, Homo sapien
taggttctagatatctgccagttag

SEQ ID NO: 4833921 - DNA, 25 bp, Homo sapien
tacgtacacacctatattgaaagaa

SEQ ID NO: 4833922 - DNA, 25 bp, Homo sapien
acattctataggaaaagcgtaatcc

SEQ ID NO: 4833923 - DNA, 25 bp, Homo sapien
cccaaggcgttagcgaacacagaga

SEQ ID NO: 4833924 - DNA, 25 bp, Homo sapien
tgggatatgtctaaccctagggcca

SEQ ID NO: 4833925 - DNA, 25 bp, Homo sapien
taccacccggaaagtctcaagtcag

SEQ ID NO: 4833926 - DNA, 25 bp, Homo sapien
gaaattttcaacactggaccagagg

SEQ ID NO: 4833927 - DNA, 25 bp, Homo sapien
ctgtagtaaggaatgtaggatttaa

SEQ ID NO: 4833928 - DNA, 25 bp, Homo sapien
taaggaatgtaggatttaacataaa

SEQ ID NO: 4833929 - DNA, 25 bp, Homo sapien
gtagtaaggaatgtaggatttaaca

SEQ ID NO: 4833930 - DNA, 25 bp, Homo sapien
tagtaaggaatgtaggatttaacat

SEQ ID NO: 4833931 - DNA, 25 bp, Homo sapien
tccttgtattctctcttgggagaat

SEQ ID NO: 4833932 - DNA, 25 bp, Homo sapien
tcttgggagaatacaaggaagttgc

SEQ ID NO: 4833933 - DNA, 25 bp, Homo sapien
attctctcttgggagaatacaagga

SEQ ID NO: 4833934 - DNA, 25 bp, Homo sapien
cttccttgtattctctcttgggaga

SEQ ID NO: 4833935 - DNA, 25 bp, Homo sapien
acctcgcttctttcaacaatctcag

SEQ ID NO: 4833936 - DNA, 25 bp, Homo sapien
gatgtgtctgctgacctggtcgctg

SEQ ID NO: 4833937 - DNA, 25 bp, Homo sapien
aactgacgcagtgatgtgtctgctg

SEQ ID NO: 4833938 - DNA, 25 bp, Homo sapien
tcagcaccattccaggatccgggat

SEQ ID NO: 4833939 - DNA, 25 bp, Homo sapien
atctcctctaggcagtctcgcatat

SEQ ID NO: 4833940 - DNA, 25 bp, Homo sapien
cgcatatgtgctgctcatgtctctc

SEQ ID NO: 4833941 - DNA, 25 bp, Homo sapien
cagtctcgcatatgtgctgctcatg

SEQ ID NO: 4833942 - DNA, 25 bp, Homo sapien
tctaggcagtctcgcatatgtgctg

SEQ ID NO: 4833943 - DNA, 25 bp, Homo sapien
aggtacaggctgcaatcagcgtgtg

SEQ ID NO: 4833944 - DNA, 25 bp, Homo sapien
cctggagctcatctgtgccacaaaa

SEQ ID NO: 4833945 - DNA, 25 bp, Homo sapien
cagcgtgtgtgaaattggctctgcc

SEQ ID NO: 4833946 - DNA, 25 bp, Homo sapien
tcttccaatccagacagcatcttga

SEQ ID NO: 4833947 - DNA, 25 bp, Homo sapien
cagtgacggtaccttgccagaatcc

SEQ ID NO: 4833948 - DNA, 25 bp, Homo sapien
tgtcagtgacggtaccttgccagaa

SEQ ID NO: 4833949 - DNA, 25 bp, Homo sapien
tggtgtcagtgacggtaccttgcca

SEQ ID NO: 4833950 - DNA, 25 bp, Homo sapien
ctgctggtgtcagtgacggtacctt

SEQ ID NO: 4833951 - DNA, 25 bp, Homo sapien
ctagcatgttccttgattcgttcac

SEQ ID NO: 4833952 - DNA, 25 bp, Homo sapien
tccttgattcgttcacgggtaatag

SEQ ID NO: 4833953 - DNA, 25 bp, Homo sapien
tcgttcacgggtaatagtggtatat

SEQ ID NO: 4833954 - DNA, 25 bp, Homo sapien
ggtaatagtggtatatgctgcttac

SEQ ID NO: 4833955 - DNA, 25 bp, Homo sapien
gacatatttcctttcacttccaaac

SEQ ID NO: 4833956 - DNA, 25 bp, Homo sapien
catatttcctttcacttccaaacaa

SEQ ID NO: 4833957 - DNA, 25 bp, Homo sapien
cagacatatttcctttcacttccaa

SEQ ID NO: 4833958 - DNA, 25 bp, Homo sapien
ccccctatcacagacatatttcctt

SEQ ID NO: 4833959 - DNA, 25 bp, Homo sapien
tcccaaatccgcagagacagtgtct

SEQ ID NO: 4833960 - DNA, 25 bp, Homo sapien
gacagtgtcttccacttccagcgga

SEQ ID NO: 4833961 - DNA, 25 bp, Homo sapien
caaatcacaacagaggtaggagcag

SEQ ID NO: 4833962 - DNA, 25 bp, Homo sapien
cgatgtctcctcgaagctccaggaa

SEQ ID NO: 4833963 - DNA, 25 bp, Homo sapien
cccaacagataaggggaaaaggcag

SEQ ID NO: 4833964 - DNA, 25 bp, Homo sapien
ccaacagataaggggaaaaggcagg

SEQ ID NO: 4833965 - DNA, 25 bp, Homo sapien
atcaaaccagcctactgagcatcct

SEQ ID NO: 4833966 - DNA, 25 bp, Homo sapien
gatcaaaccagcctactgagcatcc

SEQ ID NO: 4833967 - DNA, 25 bp, Homo sapien
aggtgatcaaaccagcctactgagc

SEQ ID NO: 4833968 - DNA, 25 bp, Homo sapien
gtgatcaaaccagcctactgagcat

SEQ ID NO: 4833969 - DNA, 25 bp, Homo sapien
gaccacaccaggagatactgctttt

SEQ ID NO: 4833970 - DNA, 25 bp, Homo sapien
ctgaagattaagaccacaccagacc

SEQ ID NO: 4833971 - DNA, 25 bp, Homo sapien
acactgaagattaagaccacaccag

SEQ ID NO: 4833972 - DNA, 25 bp, Homo sapien
gcttttcccttagaaggactcacaa

SEQ ID NO: 4833973 - DNA, 25 bp, Homo sapien
tcagtgcttcatcttctgctctcaa

SEQ ID NO: 4833974 - DNA, 25 bp, Homo sapien
ccttgccttcagtgcttcatcttct

SEQ ID NO: 4833975 - DNA, 25 bp, Homo sapien
gtgcttcatcttctgctctcaacat

SEQ ID NO: 4833976 - DNA, 25 bp, Homo sapien
gccttcagtgcttcatcttctgctc

SEQ ID NO: 4833977 - DNA, 25 bp, Homo sapien
tccacactggtgacgattccacact

SEQ ID NO: 4833978 - DNA, 25 bp, Homo sapien
cctgcaggagccgagagagtggtgc

SEQ ID NO: 4833979 - DNA, 25 bp, Homo sapien
tgtgctgctagaacccaaagacacg

SEQ ID NO: 4833980 - DNA, 25 bp, Homo sapien
gcactaaatgcttgttcctgcagga

SEQ ID NO: 4833981 - DNA, 25 bp, Homo sapien
agcagtttacacaaacgtccgcttg

SEQ ID NO: 4833982 - DNA, 25 bp, Homo sapien
acaagctgtggtttgccggtcgcca

SEQ ID NO: 4833983 - DNA, 25 bp, Homo sapien
tggtttgccggtcgccactcctggt

SEQ ID NO: 4833984 - DNA, 25 bp, Homo sapien
ttacacaaacgtccgcttgcatcac

SEQ ID NO: 4833985 - DNA, 25 bp, Homo sapien
ggagcattgcttgagcccaaaagtc

SEQ ID NO: 4833986 - DNA, 25 bp, Homo sapien
gagccatgatcatgcaattccagcc

SEQ ID NO: 4833987 - DNA, 25 bp, Homo sapien
cttgagcccaaaagtctgaggctgc

SEQ ID NO: 4833988 - DNA, 25 bp, Homo sapien
cattgcttgagcccaaaagtctgag

SEQ ID NO: 4833989 - DNA, 25 bp, Homo sapien
tcatagtgcaatgcttggcttgtag

SEQ ID NO: 4833990 - DNA, 25 bp, Homo sapien
gaataatgcacttaaacttcatagt

SEQ ID NO: 4833991 - DNA, 25 bp, Homo sapien
ggtcttcatcgatgtggttctacaa

SEQ ID NO: 4833992 - DNA, 25 bp, Homo sapien
tacaacgagctgacatgaacagaat

SEQ ID NO: 4833993 - DNA, 25 bp, Homo sapien
ccactcaactgtctggattcttctg

SEQ ID NO: 4833994 - DNA, 25 bp, Homo sapien
actcaactgtctggattcttctgct

SEQ ID NO: 4833995 - DNA, 25 bp, Homo sapien
caactgtctggattcttctgctttt

SEQ ID NO: 4833996 - DNA, 25 bp, Homo sapien
gtccactcaactgtctggattcttc

SEQ ID NO: 4833997 - DNA, 25 bp, Homo sapien
attcagagaagtaggaaacgcgagc

SEQ ID NO: 4833998 - DNA, 25 bp, Homo sapien
tattggcaagcacctgttttctcag

SEQ ID NO: 4833999 - DNA, 25 bp, Homo sapien
tgagatattggcaagcacctgtttt

SEQ ID NO: 4834000 - DNA, 25 bp, Homo sapien
cgcgagcttgaatcttcttcagtgt

SEQ ID NO: 4834001 - DNA, 25 bp, Homo sapien
catgaatggcgtcggacactgtgtc

SEQ ID NO: 4834002 - DNA, 25 bp, Homo sapien
tgtagccagtttcagatgtaccctg

SEQ ID NO: 4834003 - DNA, 25 bp, Homo sapien
gatgtaccctgaccggaatagttct

SEQ ID NO: 4834004 - DNA, 25 bp, Homo sapien
tgtgtcctcactcaaagtcccgatg

SEQ ID NO: 4834005 - DNA, 25 bp, Homo sapien
caggaacagtgaattgcccaagatc

SEQ ID NO: 4834006 - DNA, 25 bp, Homo sapien
gactctcagacaaaagcgtatcttc

SEQ ID NO: 4834007 - DNA, 25 bp, Homo sapien
gcgtctcttggatgcggatgttccc

SEQ ID NO: 4834008 - DNA, 25 bp, Homo sapien
tactctaagattcatggtccataag

SEQ ID NO: 4834009 - DNA, 25 bp, Homo sapien
ctggaaaattcttgctgtgaaaatt

SEQ ID NO: 4834010 - DNA, 25 bp, Homo sapien
gtgaaaatttgacatttgattagcc

SEQ ID NO: 4834011 - DNA, 25 bp, Homo sapien
aaattcttgctgtgaaaatttgaca

SEQ ID NO: 4834012 - DNA, 25 bp, Homo sapien
gaaaatttgacatttgattagccat

SEQ ID NO: 4834013 - DNA, 25 bp, Homo sapien
gcagagccctttggatagagccaca

SEQ ID NO: 4834014 - DNA, 25 bp, Homo sapien
gccctgttgactagaggagtgccca

SEQ ID NO: 4834015 - DNA, 25 bp, Homo sapien
gaaaaacggatcgtcttgctgcagg

SEQ ID NO: 4834016 - DNA, 25 bp, Homo sapien
tgtagacgtccaccaatgccaagtt

SEQ ID NO: 4834017 - DNA, 25 bp, Homo sapien
gaatcaatcgtccttgctgcaccag

SEQ ID NO: 4834018 - DNA, 25 bp, Homo sapien
tgagtaacatacacctggacagagc

SEQ ID NO: 4834019 - DNA, 25 bp, Homo sapien
gcaactgctgcacattccggaagaa

SEQ ID NO: 4834020 - DNA, 25 bp, Homo sapien
tgtgttaggcaccaaaccatactgc

SEQ ID NO: 4834021 - DNA, 25 bp, Homo sapien
gaaattctcagaaggcctcgggagc

SEQ ID NO: 4834022 - DNA, 25 bp, Homo sapien
tcgggagctgcgctgatgtattctc

SEQ ID NO: 4834023 - DNA, 25 bp, Homo sapien
tcttggttatggttacaagtggccc

SEQ ID NO: 4834024 - DNA, 25 bp, Homo sapien
tgtccggcaatagggaagcaacttc

SEQ ID NO: 4834025 - DNA, 25 bp, Homo sapien
gcaagtcctcacctgctcgcaaaga

SEQ ID NO: 4834026 - DNA, 25 bp, Homo sapien
agaaggcaagtcctcacctgctcgc

SEQ ID NO: 4834027 - DNA, 25 bp, Homo sapien
aaagactctacttgcctgagtttcc

SEQ ID NO: 4834028 - DNA, 25 bp, Homo sapien
ttctccaataaaagactctacttgc

SEQ ID NO: 4834029 - DNA, 25 bp, Homo sapien
gacatgttacccgactaaggatcac

SEQ ID NO: 4834030 - DNA, 25 bp, Homo sapien
gagaggcacagagtgcactgtcatt

SEQ ID NO: 4834031 - DNA, 25 bp, Homo sapien
tcttctaaagcagccgtaaaccctc

SEQ ID NO: 4834032 - DNA, 25 bp, Homo sapien
tttgccttaagaagtgccctcccca

SEQ ID NO: 4834033 - DNA, 25 bp, Homo sapien
gctcctgtgcggtgtcacagattgc

SEQ ID NO: 4834034 - DNA, 25 bp, Homo sapien
tgtgcggtgtcacagattgcagggt

SEQ ID NO: 4834035 - DNA, 25 bp, Homo sapien
cctgtgcggtgtcacagattgcagg

SEQ ID NO: 4834036 - DNA, 25 bp, Homo sapien
tcctgtgcggtgtcacagattgcag

SEQ ID NO: 4834037 - DNA, 25 bp, Homo sapien
tcgagtacagatacaactgcatggc

SEQ ID NO: 4834038 - DNA, 25 bp, Homo sapien
gcctgttcatctagccccatgatgg

SEQ ID NO: 4834039 - DNA, 25 bp, Homo sapien
tccttgcgccaagagaggtttgcct

SEQ ID NO: 4834040 - DNA, 25 bp, Homo sapien
cctgctggaatgatgcctttacaca

SEQ ID NO: 4834041 - DNA, 25 bp, Homo sapien
caagtctagtttctatgtacaattt

SEQ ID NO: 4834042 - DNA, 25 bp, Homo sapien
aaataatggctttaatgatgatata

SEQ ID NO: 4834043 - DNA, 25 bp, Homo sapien
tcatgtcgttgaagtgacaacagca

SEQ ID NO: 4834044 - DNA, 25 bp, Homo sapien
tacaaagttcaaactcatgtcgttg

SEQ ID NO: 4834045 - DNA, 25 bp, Homo sapien
gaagagaatctgagcatacgtggac

SEQ ID NO: 4834046 - DNA, 25 bp, Homo sapien
tatttgtaacatataccgtattctt

SEQ ID NO: 4834047 - DNA, 25 bp, Homo sapien
aagtggatgcgggtcatcataaagg

SEQ ID NO: 4834048 - DNA, 25 bp, Homo sapien
catggaagaatcttgtaatagcagt

SEQ ID NO: 4834049 - DNA, 25 bp, Homo sapien
gaagaatcttgtaatagcagtttgg

SEQ ID NO: 4834050 - DNA, 25 bp, Homo sapien
tcatggaagaatcttgtaatagcag

SEQ ID NO: 4834051 - DNA, 25 bp, Homo sapien
aatcttgtaatagcagtttggctcc

SEQ ID NO: 4834052 - DNA, 25 bp, Homo sapien
atgtccctggggtagtagtcctgcg

SEQ ID NO: 4834053 - DNA, 25 bp, Homo sapien
ctgcgggtaactcttgagccatcat

SEQ ID NO: 4834054 - DNA, 25 bp, Homo sapien
gattctagactggggttgcttgtgc

SEQ ID NO: 4834055 - DNA, 25 bp, Homo sapien
cgggtaactcttgagccatcataac

SEQ ID NO: 4834056 - DNA, 25 bp, Homo sapien
ctggtaaataaaatctggaagctat

SEQ ID NO: 4834057 - DNA, 25 bp, Homo sapien
gttcaggaaagcctacaccaaacca

SEQ ID NO: 4834058 - DNA, 25 bp, Homo sapien
gaaagcctacaccaaaccagcactt

SEQ ID NO: 4834059 - DNA, 25 bp, Homo sapien
tcacagtccgctggggagttcctga

SEQ ID NO: 4834060 - DNA, 25 bp, Homo sapien
cactttggtgtgctgattcttggag

SEQ ID NO: 4834061 - DNA, 25 bp, Homo sapien
agcagaagagacaattagagctttg

SEQ ID NO: 4834062 - DNA, 25 bp, Homo sapien
gcagaagagacaattagagctttgg

SEQ ID NO: 4834063 - DNA, 25 bp, Homo sapien
cagcagaagagacaattagagcttt

SEQ ID NO: 4834064 - DNA, 25 bp, Homo sapien
cagaagagacaattagagctttggt

SEQ ID NO: 4834065 - DNA, 25 bp, Homo sapien
aagactggacttgggaacttggaga

SEQ ID NO: 4834066 - DNA, 25 bp, Homo sapien
aaggtgttggaacctgtggtctgag

SEQ ID NO: 4834067 - DNA, 25 bp, Homo sapien
tggaacctgtggtctgagtggcggg

SEQ ID NO: 4834068 - DNA, 25 bp, Homo sapien
gacttgggaacttggagacttggaa

SEQ ID NO: 4834069 - DNA, 25 bp, Homo sapien
ttggggcctgtcagagcactgtttt

SEQ ID NO: 4834070 - DNA, 25 bp, Homo sapien
agatttggggcctgtcagagcactg

SEQ ID NO: 4834071 - DNA, 25 bp, Homo sapien
tttggggcctgtcagagcactgttt

SEQ ID NO: 4834072 - DNA, 25 bp, Homo sapien
tggaagatttggggcctgtcagagc

SEQ ID NO: 4834073 - DNA, 25 bp, Homo sapien
gagacttctccaaagttgggtagtg

SEQ ID NO: 4834074 - DNA, 25 bp, Homo sapien
tggagacttctccaaagttgggtag

SEQ ID NO: 4834075 - DNA, 25 bp, Homo sapien
ctggagacttctccaaagttgggta

SEQ ID NO: 4834076 - DNA, 25 bp, Homo sapien
agacttctccaaagttgggtagtgg

SEQ ID NO: 4834077 - DNA, 25 bp, Homo sapien
tggaacactctaggtagctggcccc

SEQ ID NO: 4834078 - DNA, 25 bp, Homo sapien
tgttgttctggcttcgaaactagca

SEQ ID NO: 4834079 - DNA, 25 bp, Homo sapien
gcttcagcgtggagagggcgatcca

SEQ ID NO: 4834080 - DNA, 25 bp, Homo sapien
gctgcggcggctgatccctttacca

SEQ ID NO: 4834081 - DNA, 25 bp, Homo sapien
cgcgtctgccctcgggacttatgag

SEQ ID NO: 4834082 - DNA, 25 bp, Homo sapien
ttatgagctgaacccggtacgtagc

SEQ ID NO: 4834083 - DNA, 25 bp, Homo sapien
cccaagtctcgagtccgagggaagg

SEQ ID NO: 4834084 - DNA, 25 bp, Homo sapien
tacgtagctccccaagtctcgagtc

SEQ ID NO: 4834085 - DNA, 25 bp, Homo sapien
cgtcctccggcttctgatgaaacgg

SEQ ID NO: 4834086 - DNA, 25 bp, Homo sapien
gcgctctgtgccacgggtgtcagac

SEQ ID NO: 4834087 - DNA, 25 bp, Homo sapien
gtcagacttttgcaaaagccctgtc

SEQ ID NO: 4834088 - DNA, 25 bp, Homo sapien
attctaacgggacgccctcctgtag

SEQ ID NO: 4834089 - DNA, 25 bp, Homo sapien
agcacctctgcccggctgcgaccct

SEQ ID NO: 4834090 - DNA, 25 bp, Homo sapien
aggagcacctctgcccggctgcgac

SEQ ID NO: 4834091 - DNA, 25 bp, Homo sapien
gaggagcacctctgcccggctgcga

SEQ ID NO: 4834092 - DNA, 25 bp, Homo sapien
cacctctgcccggctgcgaccctgt

SEQ ID NO: 4834093 - DNA, 25 bp, Homo sapien
ccttagtaatatgtcgttgaataaa

SEQ ID NO: 4834094 - DNA, 25 bp, Homo sapien
agcatcccggcttaaggaggttcct

SEQ ID NO: 4834095 - DNA, 25 bp, Homo sapien
tcagcatcccggcttaaggaggttc

SEQ ID NO: 4834096 - DNA, 25 bp, Homo sapien
aaggaggttccttagtaatatgtcg

SEQ ID NO: 4834097 - DNA, 25 bp, Homo sapien
tttttagcctatgagcttctcaggg

SEQ ID NO: 4834098 - DNA, 25 bp, Homo sapien
agcttctcaggggtaaaattatatt

SEQ ID NO: 4834099 - DNA, 25 bp, Homo sapien
cctatgagcttctcaggggtaaaat

SEQ ID NO: 4834100 - DNA, 25 bp, Homo sapien
tttttttagcctatgagcttctcag

SEQ ID NO: 4834101 - DNA, 25 bp, Homo sapien
ctgcgtctttgccaattcctgccat

SEQ ID NO: 4834102 - DNA, 25 bp, Homo sapien
taatatgtttaattgactgttgatg

SEQ ID NO: 4834103 - DNA, 25 bp, Homo sapien
gtttttggcgagtcaaagttatatg

SEQ ID NO: 4834104 - DNA, 25 bp, Homo sapien
gcagcaggctattgtagtgaagttt

SEQ ID NO: 4834105 - DNA, 25 bp, Homo sapien
gtaaaactacagcatagaatacata

SEQ ID NO: 4834106 - DNA, 25 bp, Homo sapien
gaaataacctcactagacaacggct

SEQ ID NO: 4834107 - DNA, 25 bp, Homo sapien
gaataatctcaacgtgtgtgacctc

SEQ ID NO: 4834108 - DNA, 25 bp, Homo sapien
tgagatgcgtgtctcctcaggcaca

SEQ ID NO: 4834109 - DNA, 25 bp, Homo sapien
tgtaaatatcaggacggaaccagct

SEQ ID NO: 4834110 - DNA, 25 bp, Homo sapien
cattcttatcgcatctctctttgta

SEQ ID NO: 4834111 - DNA, 25 bp, Homo sapien
tgtgagcccagtcaatctatatact

SEQ ID NO: 4834112 - DNA, 25 bp, Homo sapien
tcacttatcatgtctaactctatgc

SEQ ID NO: 4834113 - DNA, 25 bp, Homo sapien
tctatatactccagtctttttccag

SEQ ID NO: 4834114 - DNA, 25 bp, Homo sapien
actggctatggataatgtagtggct

SEQ ID NO: 4834115 - DNA, 25 bp, Homo sapien
ccacactggctatggataatgtagt

SEQ ID NO: 4834116 - DNA, 25 bp, Homo sapien
agtggctattgtgtagatctgctct

SEQ ID NO: 4834117 - DNA, 25 bp, Homo sapien
attgtgtagatctgctctgtgccca

SEQ ID NO: 4834118 - DNA, 25 bp, Homo sapien
cagtaatgacccgacaatgagtttg

SEQ ID NO: 4834119 - DNA, 25 bp, Homo sapien
acggcctgcccaatacagcatgagg

SEQ ID NO: 4834120 - DNA, 25 bp, Homo sapien
tcttggagacttgaacgtgagtgtc

SEQ ID NO: 4834121 - DNA, 25 bp, Homo sapien
ctgggttgctgacactgctcacggc

SEQ ID NO: 4834122 - DNA, 25 bp, Homo sapien
gcttgcgtggaagaaggcatccttc

SEQ ID NO: 4834123 - DNA, 25 bp, Homo sapien
cttctactgtggtttggttcagtgc

SEQ ID NO: 4834124 - DNA, 25 bp, Homo sapien
tgctggtgtaagtgatgcacttgtg

SEQ ID NO: 4834125 - DNA, 25 bp, Homo sapien
aaactggtcagttgaatctctctca

SEQ ID NO: 4834126 - DNA, 25 bp, Homo sapien
gacatgatgcgtttgggtgactgca

SEQ ID NO: 4834127 - DNA, 25 bp, Homo sapien
gaagagatacgttgccaagcccagt

SEQ ID NO: 4834128 - DNA, 25 bp, Homo sapien
tgctgtagggatcaaaatggacatg

SEQ ID NO: 4834129 - DNA, 25 bp, Homo sapien
caatggtgagcacatcactgcagca

SEQ ID NO: 4834130 - DNA, 25 bp, Homo sapien
gaattccaagattcgacctttgatc

SEQ ID NO: 4834131 - DNA, 25 bp, Homo sapien
cagcatcttccagagtgttgtctga

SEQ ID NO: 4834132 - DNA, 25 bp, Homo sapien
gcagtttgacagaagttataaggca

SEQ ID NO: 4834133 - DNA, 25 bp, Homo sapien
tataaggcaggtcaatgacagatct

SEQ ID NO: 4834134 - DNA, 25 bp, Homo sapien
attccatgcaacactgctgtgaaac

SEQ ID NO: 4834135 - DNA, 25 bp, Homo sapien
gcttccacatagtgtaaacagcagc

SEQ ID NO: 4834136 - DNA, 25 bp, Homo sapien
gaaacaggctgagtgtccagcttcc

SEQ ID NO: 4834137 - DNA, 25 bp, Homo sapien
caagagacacgtgcatggaaatggt

SEQ ID NO: 4834138 - DNA, 25 bp, Homo sapien
ctcaggctgcttctcattgattgga

SEQ ID NO: 4834139 - DNA, 25 bp, Homo sapien
taccctttactaggagagccaatcc

SEQ ID NO: 4834140 - DNA, 25 bp, Homo sapien
tataactcccagtctaaggctgaag

SEQ ID NO: 4834141 - DNA, 25 bp, Homo sapien
gcatgtgacgttgaagctgaaccca

SEQ ID NO: 4834142 - DNA, 25 bp, Homo sapien
ctatccattccccacgcagagggtg

SEQ ID NO: 4834143 - DNA, 25 bp, Homo sapien
ctttgagaaagcaacagagaaagca

SEQ ID NO: 4834144 - DNA, 25 bp, Homo sapien
tgagaaagcaacagagaaagcagac

SEQ ID NO: 4834145 - DNA, 25 bp, Homo sapien
gagaaagcaacagagaaagcagacc

SEQ ID NO: 4834146 - DNA, 25 bp, Homo sapien
tttgagaaagcaacagagaaagcag

SEQ ID NO: 4834147 - DNA, 25 bp, Homo sapien
tgctcaggtccctcaaggtgatgtt

SEQ ID NO: 4834148 - DNA, 25 bp, Homo sapien
tctctggtggtttagcaactgctca

SEQ ID NO: 4834149 - DNA, 25 bp, Homo sapien
taccaagtaatgagcaactgacatc

SEQ ID NO: 4834150 - DNA, 25 bp, Homo sapien
actgacatcatccatgggtgactct

SEQ ID NO: 4834151 - DNA, 25 bp, Homo sapien
tctgccgctgaggccggctaatttt

SEQ ID NO: 4834152 - DNA, 25 bp, Homo sapien
gcatctgccgctgaggccggctaat

SEQ ID NO: 4834153 - DNA, 25 bp, Homo sapien
catctgccgctgaggccggctaatt

SEQ ID NO: 4834154 - DNA, 25 bp, Homo sapien
aggcatctgccgctgaggccggcta

SEQ ID NO: 4834155 - DNA, 25 bp, Homo sapien
cactgggagtgcctgattatttgta

SEQ ID NO: 4834156 - DNA, 25 bp, Homo sapien
ctgattatttgtaatgtccctccag

SEQ ID NO: 4834157 - DNA, 25 bp, Homo sapien
ttccctgtaacagaacttagctccc

SEQ ID NO: 4834158 - DNA, 25 bp, Homo sapien
tggctgctcagcctttattcaccgt

SEQ ID NO: 4834159 - DNA, 25 bp, Homo sapien
gattcttccctcagcgtgggtttcc

SEQ ID NO: 4834160 - DNA, 25 bp, Homo sapien
gaacacgaaagagcggggcgcggtg

SEQ ID NO: 4834161 - DNA, 25 bp, Homo sapien
ttggaacacgaaagagcggggcgcg

SEQ ID NO: 4834162 - DNA, 25 bp, Homo sapien
aaagcctttggaacacgaaagagcg

SEQ ID NO: 4834163 - DNA, 25 bp, Homo sapien
agcctttggaacacgaaagagcggg

SEQ ID NO: 4834164 - DNA, 25 bp, Homo sapien
taccactgattgaccctggctaagt

SEQ ID NO: 4834165 - DNA, 25 bp, Homo sapien
tattaatactagcttgaacaacagg

SEQ ID NO: 4834166 - DNA, 25 bp, Homo sapien
cagtccatagcagttggcctgtgag

SEQ ID NO: 4834167 - DNA, 25 bp, Homo sapien
catgaattgtggagttaggcagaac

SEQ ID NO: 4834168 - DNA, 25 bp, Homo sapien
tgctccacggctctaagagtcaggg

SEQ ID NO: 4834169 - DNA, 25 bp, Homo sapien
ctgctccacggctctaagagtcagg

SEQ ID NO: 4834170 - DNA, 25 bp, Homo sapien
tggactcccaactaggcgaggtgac

SEQ ID NO: 4834171 - DNA, 25 bp, Homo sapien
ccccaggtgaaatatgcaaagatgc

SEQ ID NO: 4834172 - DNA, 25 bp, Homo sapien
tatgcatatatgactggttcccacc

SEQ ID NO: 4834173 - DNA, 25 bp, Homo sapien
tagacctttagacgctgtgcatgtg

SEQ ID NO: 4834174 - DNA, 25 bp, Homo sapien
tttttaatacacctcagagctgcaa

SEQ ID NO: 4834175 - DNA, 25 bp, Homo sapien
ttttaatacacctcagagctgcaaa

SEQ ID NO: 4834176 - DNA, 25 bp, Homo sapien
tttctgctaggagttagaggcttca

SEQ ID NO: 4834177 - DNA, 25 bp, Homo sapien
tcctgcaagcctgcgtttctgctag

SEQ ID NO: 4834178 - DNA, 25 bp, Homo sapien
agcgcatgtgaaacaaaggagccca

SEQ ID NO: 4834179 - DNA, 25 bp, Homo sapien
caggcgtcttgctacactgttggca

SEQ ID NO: 4834180 - DNA, 25 bp, Homo sapien
gagggtggtcagaattcagtcctca

SEQ ID NO: 4834181 - DNA, 25 bp, Homo sapien
ttagaacaaaggagggtggtcagaa

SEQ ID NO: 4834182 - DNA, 25 bp, Homo sapien
cacgtgccagcggattcatttggtg

SEQ ID NO: 4834183 - DNA, 25 bp, Homo sapien
aggtccacgtgccagcggattcatt

SEQ ID NO: 4834184 - DNA, 25 bp, Homo sapien
gaatgttaaggtctggcccgtggca

SEQ ID NO: 4834185 - DNA, 25 bp, Homo sapien
gattaataaatacacggcctccctg

SEQ ID NO: 4834186 - DNA, 25 bp, Homo sapien
taaatcgacacttggaggttataca

SEQ ID NO: 4834187 - DNA, 25 bp, Homo sapien
gcaaggagaattgggcagctcatga

SEQ ID NO: 4834188 - DNA, 25 bp, Homo sapien
gtgaagtaaagccaaacatccacac

SEQ ID NO: 4834189 - DNA, 25 bp, Homo sapien
aaacagatgttgttgctgagtcaaa

SEQ ID NO: 4834190 - DNA, 25 bp, Homo sapien
ctgggggtgaagtaaagccaaacat

SEQ ID NO: 4834191 - DNA, 25 bp, Homo sapien
agatgttgttgctgagtcaaacctg

SEQ ID NO: 4834192 - DNA, 25 bp, Homo sapien
gctttctgcagtcaaggcctttccc

SEQ ID NO: 4834193 - DNA, 25 bp, Homo sapien
ctgtgaggagagggtgaagttgacc

SEQ ID NO: 4834194 - DNA, 25 bp, Homo sapien
tgtgaggagagggtgaagttgaccg

SEQ ID NO: 4834195 - DNA, 25 bp, Homo sapien
gtgaggagagggtgaagttgaccgg

SEQ ID NO: 4834196 - DNA, 25 bp, Homo sapien
tgaggagagggtgaagttgaccgga

SEQ ID NO: 4834197 - DNA, 25 bp, Homo sapien
tgacccgccacctggaagctcaagg

SEQ ID NO: 4834198 - DNA, 25 bp, Homo sapien
gaagccaacattctgaagctcctcc

SEQ ID NO: 4834199 - DNA, 25 bp, Homo sapien
aagaagccaacattctgaagctcct

SEQ ID NO: 4834200 - DNA, 25 bp, Homo sapien
gcctgacccgccacctggaagctca

SEQ ID NO: 4834201 - DNA, 25 bp, Homo sapien
aatgtcctgagcacaagagcctctg

SEQ ID NO: 4834202 - DNA, 25 bp, Homo sapien
cataagatgaggtccaaaaatgtcc

SEQ ID NO: 4834203 - DNA, 25 bp, Homo sapien
gcttgatggattaactcattggcca

SEQ ID NO: 4834204 - DNA, 25 bp, Homo sapien
ggagttgaggtatgcctccctcccg

SEQ ID NO: 4834205 - DNA, 25 bp, Homo sapien
cgtccttcaatcacctcgcttcccg

SEQ ID NO: 4834206 - DNA, 25 bp, Homo sapien
tgacgaggtgttccaccagggcaat

SEQ ID NO: 4834207 - DNA, 25 bp, Homo sapien
tgctctgacgaggtgttccaccagg

SEQ ID NO: 4834208 - DNA, 25 bp, Homo sapien
ttcagacgtccagacttctagtgcc

SEQ ID NO: 4834209 - DNA, 25 bp, Homo sapien
gtcatataggaatattggattcatc

SEQ ID NO: 4834210 - DNA, 25 bp, Homo sapien
catctgtgccactcttgaagccttt

SEQ ID NO: 4834211 - DNA, 25 bp, Homo sapien
ctcttcttacagatcatttgtgctg

SEQ ID NO: 4834212 - DNA, 25 bp, Homo sapien
taaagtaggtcatataggaatattg

SEQ ID NO: 4834213 - DNA, 25 bp, Homo sapien
cactctaccagctgagaagaagtct

SEQ ID NO: 4834214 - DNA, 25 bp, Homo sapien
aaatgcttcctaagcagactcccag

SEQ ID NO: 4834215 - DNA, 25 bp, Homo sapien
caggatgaaggagaaaacggaagac

SEQ ID NO: 4834216 - DNA, 25 bp, Homo sapien
tcagctaattctacagtctccccag

SEQ ID NO: 4834217 - DNA, 25 bp, Homo sapien
ggtcccaggtgatgataatactaaa

SEQ ID NO: 4834218 - DNA, 25 bp, Homo sapien
aaactaaatctcaggctgccaccct

SEQ ID NO: 4834219 - DNA, 25 bp, Homo sapien
agaaccattgctctgaccagcggaa

SEQ ID NO: 4834220 - DNA, 25 bp, Homo sapien
tcagattcagtcagtctggagcagg

SEQ ID NO: 4834221 - DNA, 25 bp, Homo sapien
gctcaatcagctgtcgagaggccat

SEQ ID NO: 4834222 - DNA, 25 bp, Homo sapien
gacagctcaatcagctgtcgagagg

SEQ ID NO: 4834223 - DNA, 25 bp, Homo sapien
ctgcccaagatgtaaccaagctgta

SEQ ID NO: 4834224 - DNA, 25 bp, Homo sapien
tgtaaccaagctgtagtgaagggac

SEQ ID NO: 4834225 - DNA, 25 bp, Homo sapien
tccccgggagagcttgaaacatggc

SEQ ID NO: 4834226 - DNA, 25 bp, Homo sapien
gtccccgggagagcttgaaacatgg

SEQ ID NO: 4834227 - DNA, 25 bp, Homo sapien
cccgggagagcttgaaacatggccc

SEQ ID NO: 4834228 - DNA, 25 bp, Homo sapien
ggtccccgggagagcttgaaacatg

SEQ ID NO: 4834229 - DNA, 25 bp, Homo sapien
catgcgcatgagctagaaaaagcag

SEQ ID NO: 4834230 - DNA, 25 bp, Homo sapien
aaaagccacgcggttgtatgtgctg

SEQ ID NO: 4834231 - DNA, 25 bp, Homo sapien
tatgtgctgttgagttgggtgctct

SEQ ID NO: 4834232 - DNA, 25 bp, Homo sapien
aggagcaggtcttcgggaaaagcca

SEQ ID NO: 4834233 - DNA, 25 bp, Homo sapien
tcttaatgtgaaaatcatgtttgca

SEQ ID NO: 4834234 - DNA, 25 bp, Homo sapien
aaagcattgggctgaaactaaaagt

SEQ ID NO: 4834235 - DNA, 25 bp, Homo sapien
attcataatggtggatgaccaaagc

SEQ ID NO: 4834236 - DNA, 25 bp, Homo sapien
tctgcgggtgggttgctaccgtaaa

SEQ ID NO: 4834237 - DNA, 25 bp, Homo sapien
tagatccccacgatacatttcaatt

SEQ ID NO: 4834238 - DNA, 25 bp, Homo sapien
tgatcctgagtaaatgacttcatcc

SEQ ID NO: 4834239 - DNA, 25 bp, Homo sapien
tctctggtactgtcgggttgatcct

SEQ ID NO: 4834240 - DNA, 25 bp, Homo sapien
catctggacgttgagttttcccttt

SEQ ID NO: 4834241 - DNA, 25 bp, Homo sapien
gagctagatgtgaagagtatactga

SEQ ID NO: 4834242 - DNA, 25 bp, Homo sapien
actgtggagctagatgtgaagagta

SEQ ID NO: 4834243 - DNA, 25 bp, Homo sapien
ctggactgtggagctagatgtgaag

SEQ ID NO: 4834244 - DNA, 25 bp, Homo sapien
gagtatactgaacacaaatgtaatg

SEQ ID NO: 4834245 - DNA, 25 bp, Homo sapien
tggctctcaagttccaaatcagcag

SEQ ID NO: 4834246 - DNA, 25 bp, Homo sapien
gttccaaatcagcagtatctctcat

SEQ ID NO: 4834247 - DNA, 25 bp, Homo sapien
caagttccaaatcagcagtatctct

SEQ ID NO: 4834248 - DNA, 25 bp, Homo sapien
tcaagttccaaatcagcagtatctc

SEQ ID NO: 4834249 - DNA, 25 bp, Homo sapien
ctgagagtgtgggggtgaatggagg

SEQ ID NO: 4834250 - DNA, 25 bp, Homo sapien
aagaatgaacgaagaaaagctgtgt

SEQ ID NO: 4834251 - DNA, 25 bp, Homo sapien
caggcccagattcttctcccagtca

SEQ ID NO: 4834252 - DNA, 25 bp, Homo sapien
ggagcaagaatgaacgaagaaaagc

SEQ ID NO: 4834253 - DNA, 25 bp, Homo sapien
gtcacccaggcccagattcttctcc

SEQ ID NO: 4834254 - DNA, 25 bp, Homo sapien
tggatcggtgttgcctgcagacaga

SEQ ID NO: 4834255 - DNA, 25 bp, Homo sapien
gatggatcggtgttgcctgcagaca

SEQ ID NO: 4834256 - DNA, 25 bp, Homo sapien
accaggatggatcggtgttgcctgc

SEQ ID NO: 4834257 - DNA, 25 bp, Homo sapien
ggaggcaccaggatggatcggtgtt

SEQ ID NO: 4834258 - DNA, 25 bp, Homo sapien
gcacatgttggaggatacttagaat

SEQ ID NO: 4834259 - DNA, 25 bp, Homo sapien
aaggtgcaggcggtccactgttgga

SEQ ID NO: 4834260 - DNA, 25 bp, Homo sapien
ggtgaagggtttcctctgaatattg

SEQ ID NO: 4834261 - DNA, 25 bp, Homo sapien
tggatttaggaagttcacacataac

SEQ ID NO: 4834262 - DNA, 25 bp, Homo sapien
tgtttgcaaggtgctaaacatgatg

SEQ ID NO: 4834263 - DNA, 25 bp, Homo sapien
ggtagtgtagtcagtgaaataggac

SEQ ID NO: 4834264 - DNA, 25 bp, Homo sapien
tgtaaatggctggtagtgtagtcag

SEQ ID NO: 4834265 - DNA, 25 bp, Homo sapien
catgatgggggaggctaaagaaata

SEQ ID NO: 4834266 - DNA, 25 bp, Homo sapien
gatggtacttcaggctcacaacagc

SEQ ID NO: 4834267 - DNA, 25 bp, Homo sapien
cagtgacgcctctgaagtgataaca

SEQ ID NO: 4834268 - DNA, 25 bp, Homo sapien
tgtgatgtgattacagaggagccgc

SEQ ID NO: 4834269 - DNA, 25 bp, Homo sapien
gataacactaagattcacgcccagg

SEQ ID NO: 4834270 - DNA, 25 bp, Homo sapien
cactttccaagtgccgattactgtg

SEQ ID NO: 4834271 - DNA, 25 bp, Homo sapien
tgtagctagggataccaaggcccct

SEQ ID NO: 4834272 - DNA, 25 bp, Homo sapien
tccccagcatggtagaagcccacat

SEQ ID NO: 4834273 - DNA, 25 bp, Homo sapien
gatctactccggtacctgggagggc

SEQ ID NO: 4834274 - DNA, 25 bp, Homo sapien
tgacagcgatttttctcccggagag

SEQ ID NO: 4834275 - DNA, 25 bp, Homo sapien
taatcctgcacaaatgtggtaggct

SEQ ID NO: 4834276 - DNA, 25 bp, Homo sapien
taatttttccctagcatagacgtcc

SEQ ID NO: 4834277 - DNA, 25 bp, Homo sapien
tggccacagggttcaaaacactcag

SEQ ID NO: 4834278 - DNA, 25 bp, Homo sapien
tcttatcataactgaatggtcttga

SEQ ID NO: 4834279 - DNA, 25 bp, Homo sapien
ttcttccccccaagtcaattatagc

SEQ ID NO: 4834280 - DNA, 25 bp, Homo sapien
agtcaattatagcctctttgcagtt

SEQ ID NO: 4834281 - DNA, 25 bp, Homo sapien
ctgaaatccagtagttaatgggaga

SEQ ID NO: 4834282 - DNA, 25 bp, Homo sapien
caatgatgtatgactggttgacagg

SEQ ID NO: 4834283 - DNA, 25 bp, Homo sapien
gacagggagccttttgaatatgcat

SEQ ID NO: 4834284 - DNA, 25 bp, Homo sapien
cccaccaagactgattctgggtcaa

SEQ ID NO: 4834285 - DNA, 25 bp, Homo sapien
gaatatgcatatgttactctgtagc

SEQ ID NO: 4834286 - DNA, 25 bp, Homo sapien
aatacacaccttgctcatcaaattg

SEQ ID NO: 4834287 - DNA, 25 bp, Homo sapien
caatacacaccttgctcatcaaatt

SEQ ID NO: 4834288 - DNA, 25 bp, Homo sapien
atcaatacacaccttgctcatcaaa

SEQ ID NO: 4834289 - DNA, 25 bp, Homo sapien
tcaatacacaccttgctcatcaaat

SEQ ID NO: 4834290 - DNA, 25 bp, Homo sapien
tccttgagcctttggcacttgcagt

SEQ ID NO: 4834291 - DNA, 25 bp, Homo sapien
tggcacttgcagtgctaccaataca

SEQ ID NO: 4834292 - DNA, 25 bp, Homo sapien
tgcagtgctaccaatacacagcaag

SEQ ID NO: 4834293 - DNA, 25 bp, Homo sapien
tgctaccaatacacagcaaggcctc

SEQ ID NO: 4834294 - DNA, 25 bp, Homo sapien
tttagctccataacagacgggtaca

SEQ ID NO: 4834295 - DNA, 25 bp, Homo sapien
aagctaggcaaagattacttctgca

SEQ ID NO: 4834296 - DNA, 25 bp, Homo sapien
aactcagagagtcttaaccttaacg

SEQ ID NO: 4834297 - DNA, 25 bp, Homo sapien
tgtagtgggtcagatcttcccaaag

SEQ ID NO: 4834298 - DNA, 25 bp, Homo sapien
gacatactcattgctctgggttctg

SEQ ID NO: 4834299 - DNA, 25 bp, Homo sapien
tccttccagacatactcattgctct

SEQ ID NO: 4834300 - DNA, 25 bp, Homo sapien
tccagacatactcattgctctgggt

SEQ ID NO: 4834301 - DNA, 25 bp, Homo sapien
tcctccttccagacatactcattgc

SEQ ID NO: 4834302 - DNA, 25 bp, Homo sapien
ctcgatccgtggaagaaactccttc

SEQ ID NO: 4834303 - DNA, 25 bp, Homo sapien
gatcatctgttctttcggtctccat

SEQ ID NO: 4834304 - DNA, 25 bp, Homo sapien
tttgggattccaggaatcaacagaa

SEQ ID NO: 4834305 - DNA, 25 bp, Homo sapien
ctgttctttcggtctccatttccat

SEQ ID NO: 4834306 - DNA, 25 bp, Homo sapien
ctgtaaggcaggattgagactgctg

SEQ ID NO: 4834307 - DNA, 25 bp, Homo sapien
gctggcctctgtgtgacataatata

SEQ ID NO: 4834308 - DNA, 25 bp, Homo sapien
ctggcctctgtgtgacataatatat

SEQ ID NO: 4834309 - DNA, 25 bp, Homo sapien
aggcaggattgagactgctggcctc

SEQ ID NO: 4834310 - DNA, 25 bp, Homo sapien
cttccctgttcagcataggcttctt

SEQ ID NO: 4834311 - DNA, 25 bp, Homo sapien
tccctgttcagcataggcttcttgg

SEQ ID NO: 4834312 - DNA, 25 bp, Homo sapien
ctgttcagcataggcttcttggacc

SEQ ID NO: 4834313 - DNA, 25 bp, Homo sapien
ccctgttcagcataggcttcttgga

SEQ ID NO: 4834314 - DNA, 25 bp, Homo sapien
tgtttcgcaatgcatcaggagactg

SEQ ID NO: 4834315 - DNA, 25 bp, Homo sapien
gttctcctggccaaaaatgtcgcta

SEQ ID NO: 4834316 - DNA, 25 bp, Homo sapien
ccgagggacgaggagacaaaatctc

SEQ ID NO: 4834317 - DNA, 25 bp, Homo sapien
tcatttgctgactatccgagggacg

SEQ ID NO: 4834318 - DNA, 25 bp, Homo sapien
gagctgaaggtccagccggagccct

SEQ ID NO: 4834319 - DNA, 25 bp, Homo sapien
ccaggttgaaggccaaaatgaggag

SEQ ID NO: 4834320 - DNA, 25 bp, Homo sapien
gctcaatcttgggttgaccaggttg

SEQ ID NO: 4834321 - DNA, 25 bp, Homo sapien
gaagatcaacaagacccaggagctg

SEQ ID NO: 4834322 - DNA, 25 bp, Homo sapien
acaacccggttccacactagcaact

SEQ ID NO: 4834323 - DNA, 25 bp, Homo sapien
tctgtctttcgctgtcccagagaac

SEQ ID NO: 4834324 - DNA, 25 bp, Homo sapien
cagagaaccttttgcacaacccggt

SEQ ID NO: 4834325 - DNA, 25 bp, Homo sapien
cccatcctctgtctttcgctgtccc

SEQ ID NO: 4834326 - DNA, 25 bp, Homo sapien
cagactgatcggaggacattgggtc

SEQ ID NO: 4834327 - DNA, 25 bp, Homo sapien
caaggctgggaatagacccatggcc

SEQ ID NO: 4834328 - DNA, 25 bp, Homo sapien
gaatgactgacgcagctcttctgta

SEQ ID NO: 4834329 - DNA, 25 bp, Homo sapien
gaaggatgaactgagtccagactga

SEQ ID NO: 4834330 - DNA, 25 bp, Homo sapien
cccacgcagcagttgcataaccttg

SEQ ID NO: 4834331 - DNA, 25 bp, Homo sapien
cataaccttgctgcaataatcagag

SEQ ID NO: 4834332 - DNA, 25 bp, Homo sapien
caagggctcgggacagctgtcctgc

SEQ ID NO: 4834333 - DNA, 25 bp, Homo sapien
aatagtctttactgagaagccccaa

SEQ ID NO: 4834334 - DNA, 25 bp, Homo sapien
tactggatggtgaatccctaaggat

SEQ ID NO: 4834335 - DNA, 25 bp, Homo sapien
aaatggctcgctgaactggaaggta

SEQ ID NO: 4834336 - DNA, 25 bp, Homo sapien
gcctccaacaagtcttccggatcag

SEQ ID NO: 4834337 - DNA, 25 bp, Homo sapien
gagaagctaagttgaaggcacagca

SEQ ID NO: 4834338 - DNA, 25 bp, Homo sapien
ccttggagatcagcacgtgctgcag

SEQ ID NO: 4834339 - DNA, 25 bp, Homo sapien
cttggagatcagcacgtgctgcagg

SEQ ID NO: 4834340 - DNA, 25 bp, Homo sapien
ccaacctccatgcagtcgggatgaa

SEQ ID NO: 4834341 - DNA, 25 bp, Homo sapien
tggccatcggagctcaaccttcatg

SEQ ID NO: 4834342 - DNA, 25 bp, Homo sapien
aattactgaagatggtgtcaagtcc

SEQ ID NO: 4834343 - DNA, 25 bp, Homo sapien
agccaaatggagctgccaagaacca

SEQ ID NO: 4834344 - DNA, 25 bp, Homo sapien
gggctcagatggtggcctaaatcca

SEQ ID NO: 4834345 - DNA, 25 bp, Homo sapien
ttcgaatggcgccagggtcagacaa

SEQ ID NO: 4834346 - DNA, 25 bp, Homo sapien
ctgatgctgtagaagaaccgttcga

SEQ ID NO: 4834347 - DNA, 25 bp, Homo sapien
tgtagaagaaccgttcgaatggcgc

SEQ ID NO: 4834348 - DNA, 25 bp, Homo sapien
tgatgattatcccatcgccaacagg

SEQ ID NO: 4834349 - DNA, 25 bp, Homo sapien
gatgattatcccatcgccaacaggg

SEQ ID NO: 4834350 - DNA, 25 bp, Homo sapien
ccaacaggggcaagtccaaatgcct

SEQ ID NO: 4834351 - DNA, 25 bp, Homo sapien
gcctttacgtcccttcacgatgtca

SEQ ID NO: 4834352 - DNA, 25 bp, Homo sapien
aagggagaaactttctcagaggcgg

SEQ ID NO: 4834353 - DNA, 25 bp, Homo sapien
cactgccttagggttataatttgga

SEQ ID NO: 4834354 - DNA, 25 bp, Homo sapien
ccaaattggagttggctgatgggat

SEQ ID NO: 4834355 - DNA, 25 bp, Homo sapien
tcagaggcgggtatctgcgcaatat

SEQ ID NO: 4834356 - DNA, 25 bp, Homo sapien
tgctttctgcaccacaaccgcttgt

SEQ ID NO: 4834357 - DNA, 25 bp, Homo sapien
cacaaccgcttgtgaagagcacttt

SEQ ID NO: 4834358 - DNA, 25 bp, Homo sapien
tgaagagcactttgtgcgagtaatt

SEQ ID NO: 4834359 - DNA, 25 bp, Homo sapien
gggaaagcgctcccgttcactgctg

SEQ ID NO: 4834360 - DNA, 25 bp, Homo sapien
tatgggaacgtgactgtagaaggcc

SEQ ID NO: 4834361 - DNA, 25 bp, Homo sapien
tagaacaaggtaccaagggtcagcc

SEQ ID NO: 4834362 - DNA, 25 bp, Homo sapien
gagttcaagtctggaggaattccca

SEQ ID NO: 4834363 - DNA, 25 bp, Homo sapien
tagacttacttggtttaggcacaca

SEQ ID NO: 4834364 - DNA, 25 bp, Homo sapien
gaacattgagtctctgctcactctc

SEQ ID NO: 4834365 - DNA, 25 bp, Homo sapien
tatctgagaaactttgcagtcactc

SEQ ID NO: 4834366 - DNA, 25 bp, Homo sapien
catccagatatcatccccagttgca

SEQ ID NO: 4834367 - DNA, 25 bp, Homo sapien
ccttcttctttgaactcctcactaa

SEQ ID NO: 4834368 - DNA, 25 bp, Homo sapien
aattgtgcatctgtcttgaggctac

SEQ ID NO: 4834369 - DNA, 25 bp, Homo sapien
tgataagagcaccaatcctattcct

SEQ ID NO: 4834370 - DNA, 25 bp, Homo sapien
catgtcttagagctggaatctccag

SEQ ID NO: 4834371 - DNA, 25 bp, Homo sapien
ttcccctgtaggagcacttacttac

SEQ ID NO: 4834372 - DNA, 25 bp, Homo sapien
gtcaccaaggcaccgaacacacttg

SEQ ID NO: 4834373 - DNA, 25 bp, Homo sapien
tattaaagctctctagccacttaga

SEQ ID NO: 4834374 - DNA, 25 bp, Homo sapien
gacactgtcagtctaatcagaggcc

SEQ ID NO: 4834375 - DNA, 25 bp, Homo sapien
cacttagagctgcaggtcaccaagg

SEQ ID NO: 4834376 - DNA, 25 bp, Homo sapien
atcacatgcccgttttgtgcgtttg

SEQ ID NO: 4834377 - DNA, 25 bp, Homo sapien
caagaaatgggcttaattgaaactg

SEQ ID NO: 4834378 - DNA, 25 bp, Homo sapien
tgcgtttgccttttgggccccagta

SEQ ID NO: 4834379 - DNA, 25 bp, Homo sapien
cttgtcttggcagcacaatcacatg

SEQ ID NO: 4834380 - DNA, 25 bp, Homo sapien
tgtagtgagcaggtctgtccatgag

SEQ ID NO: 4834381 - DNA, 25 bp, Homo sapien
tgccacggtgtaggaaattcgcaca

SEQ ID NO: 4834382 - DNA, 25 bp, Homo sapien
gccctctgttggattgatggtggaa

SEQ ID NO: 4834383 - DNA, 25 bp, Homo sapien
aattcgcacacgtagcttctcagca

SEQ ID NO: 4834384 - DNA, 25 bp, Homo sapien
tgttttcctttgcatgcccacagcc

SEQ ID NO: 4834385 - DNA, 25 bp, Homo sapien
agcctagaagtttgaagcgcttgtc

SEQ ID NO: 4834386 - DNA, 25 bp, Homo sapien
tagaagtttgaagcgcttgtcagga

SEQ ID NO: 4834387 - DNA, 25 bp, Homo sapien
cctttgcatgcccacagcctagaag

SEQ ID NO: 4834388 - DNA, 25 bp, Homo sapien
tctcaggaatcacaggacgtcttag

SEQ ID NO: 4834389 - DNA, 25 bp, Homo sapien
tgaaatggctattgtggcaccagaa

SEQ ID NO: 4834390 - DNA, 25 bp, Homo sapien
tggcaaggtcatctccacacgtgat

SEQ ID NO: 4834391 - DNA, 25 bp, Homo sapien
gatgggcacaatcagaacctctgag

SEQ ID NO: 4834392 - DNA, 25 bp, Homo sapien
tccttcttcacatggtggcaggaaa

SEQ ID NO: 4834393 - DNA, 25 bp, Homo sapien
cttcacatggtggcaggaaagagaa

SEQ ID NO: 4834394 - DNA, 25 bp, Homo sapien
tcttcacatggtggcaggaaagaga

SEQ ID NO: 4834395 - DNA, 25 bp, Homo sapien
cttcttcacatggtggcaggaaaga

SEQ ID NO: 4834396 - DNA, 25 bp, Homo sapien
ggtgctgtaactcgcccctttaatc

SEQ ID NO: 4834397 - DNA, 25 bp, Homo sapien
caggtcctggtgctgtaactcgccc

SEQ ID NO: 4834398 - DNA, 25 bp, Homo sapien
ctggtgctgtaactcgcccctttaa

SEQ ID NO: 4834399 - DNA, 25 bp, Homo sapien
cccaagtgggaagactgtttgaagc

SEQ ID NO: 4834400 - DNA, 25 bp, Homo sapien
ggccaggactgtgagacccacactt

SEQ ID NO: 4834401 - DNA, 25 bp, Homo sapien
cgattacgtcactagtttttaggca

SEQ ID NO: 4834402 - DNA, 25 bp, Homo sapien
ggagtcaactcgcttaaggaaatat

SEQ ID NO: 4834403 - DNA, 25 bp, Homo sapien
cacacagtatccagctgccatagaa

SEQ ID NO: 4834404 - DNA, 25 bp, Homo sapien
gatctacctgtattgctgccgctaa

SEQ ID NO: 4834405 - DNA, 25 bp, Homo sapien
ggaagggcccttctaatgctgctga

SEQ ID NO: 4834406 - DNA, 25 bp, Homo sapien
tatatgaccgtttcacggagcgggc

SEQ ID NO: 4834407 - DNA, 25 bp, Homo sapien
cattttcccgtgatatccagctggc

SEQ ID NO: 4834408 - DNA, 25 bp, Homo sapien
caattccaatgcattgcagctttca

SEQ ID NO: 4834409 - DNA, 25 bp, Homo sapien
aatgcttttgtcacggatgctgcgc

SEQ ID NO: 4834410 - DNA, 25 bp, Homo sapien
gactgatgtccctgctataacccca

SEQ ID NO: 4834411 - DNA, 25 bp, Homo sapien
tataaccccacttccgatgcagaca

SEQ ID NO: 4834412 - DNA, 25 bp, Homo sapien
tattctgatgcaacttctggccttg

SEQ ID NO: 4834413 - DNA, 25 bp, Homo sapien
ttcatttatattctgatgcaacttc

SEQ ID NO: 4834414 - DNA, 25 bp, Homo sapien
gttatgatgctaagtaagtcagcac

SEQ ID NO: 4834415 - DNA, 25 bp, Homo sapien
tccactatccagatactttcctgcc

SEQ ID NO: 4834416 - DNA, 25 bp, Homo sapien
ttgtgagcagctccagatgagccac

SEQ ID NO: 4834417 - DNA, 25 bp, Homo sapien
ttttgtgagcagctccagatgagcc

SEQ ID NO: 4834418 - DNA, 25 bp, Homo sapien
gtgttctacaagcttcactggaaga

SEQ ID NO: 4834419 - DNA, 25 bp, Homo sapien
aaaagtgttctacaagcttcactgg

SEQ ID NO: 4834420 - DNA, 25 bp, Homo sapien
gagctcaggtgaagactatttgatg

SEQ ID NO: 4834421 - DNA, 25 bp, Homo sapien
cagaggaaaagccacggttgtaata

SEQ ID NO: 4834422 - DNA, 25 bp, Homo sapien
gaatgacttcataagtctcccactg

SEQ ID NO: 4834423 - DNA, 25 bp, Homo sapien
taaggctattagattagagctcagg

SEQ ID NO: 4834424 - DNA, 25 bp, Homo sapien
tttgatcctgctgatgactgtatgt

SEQ ID NO: 4834425 - DNA, 25 bp, Homo sapien
gactgtatgtatcaaggagtaggag

SEQ ID NO: 4834426 - DNA, 25 bp, Homo sapien
ggagttgtccagcaggaaaaatccg

SEQ ID NO: 4834427 - DNA, 25 bp, Homo sapien
gaattttcacataactttcgcattc

SEQ ID NO: 4834428 - DNA, 25 bp, Homo sapien
ttgctattgtctggctaagagttat

SEQ ID NO: 4834429 - DNA, 25 bp, Homo sapien
gctattgtctggctaagagttattt

SEQ ID NO: 4834430 - DNA, 25 bp, Homo sapien
attgctattgtctggctaagagtta

SEQ ID NO: 4834431 - DNA, 25 bp, Homo sapien
tattgtctggctaagagttattttc

SEQ ID NO: 4834432 - DNA, 25 bp, Homo sapien
tcatctgtaatcgagctaatatgtg

SEQ ID NO: 4834433 - DNA, 25 bp, Homo sapien
tgctcatctgtaatcgagctaatat

SEQ ID NO: 4834434 - DNA, 25 bp, Homo sapien
catctgtaatcgagctaatatgtgg

SEQ ID NO: 4834435 - DNA, 25 bp, Homo sapien
tctgtaatcgagctaatatgtgggc

SEQ ID NO: 4834436 - DNA, 25 bp, Homo sapien
aggactatgcttgatgccaaaaaca

SEQ ID NO: 4834437 - DNA, 25 bp, Homo sapien
tccatccctatttccctttccatct

SEQ ID NO: 4834438 - DNA, 25 bp, Homo sapien
ggactatgcttgatgccaaaaacac

SEQ ID NO: 4834439 - DNA, 25 bp, Homo sapien
ctccatccctatttccctttccatc

SEQ ID NO: 4834440 - DNA, 25 bp, Homo sapien
cactgcctaaaagtggatggattac

SEQ ID NO: 4834441 - DNA, 25 bp, Homo sapien
gacatttttgcaagaaggtgaccct

SEQ ID NO: 4834442 - DNA, 25 bp, Homo sapien
tgctgaagggccaagaaacctgggc

SEQ ID NO: 4834443 - DNA, 25 bp, Homo sapien
cctgagactgaagtggatggtgatc

SEQ ID NO: 4834444 - DNA, 25 bp, Homo sapien
gaagctttgccgtgtaaatgccgac

SEQ ID NO: 4834445 - DNA, 25 bp, Homo sapien
ggtggcaaggcacaaacaagacttg

SEQ ID NO: 4834446 - DNA, 25 bp, Homo sapien
aattcgcatgggaaaacattgaagg

SEQ ID NO: 4834447 - DNA, 25 bp, Homo sapien
ggcttttcagaaaattcgcatggga

SEQ ID NO: 4834448 - DNA, 25 bp, Homo sapien
gtcccagagcgaccctaactgagct

SEQ ID NO: 4834449 - DNA, 25 bp, Homo sapien
agctgtcccagagcgaccctaactg

SEQ ID NO: 4834450 - DNA, 25 bp, Homo sapien
ccagagcgaccctaactgagcttca

SEQ ID NO: 4834451 - DNA, 25 bp, Homo sapien
agagcgaccctaactgagcttcagg

SEQ ID NO: 4834452 - DNA, 25 bp, Homo sapien
aattccatggattatgttacagccc

SEQ ID NO: 4834453 - DNA, 25 bp, Homo sapien
tatgttacagcccagttcttgatct

SEQ ID NO: 4834454 - DNA, 25 bp, Homo sapien
ctgcagtgtcaattccatggattat

SEQ ID NO: 4834455 - DNA, 25 bp, Homo sapien
gtcaattccatggattatgttacag

SEQ ID NO: 4834456 - DNA, 25 bp, Homo sapien
tcctcctggacacggttttgtcctg

SEQ ID NO: 4834457 - DNA, 25 bp, Homo sapien
cctcctggacacggttttgtcctgt

SEQ ID NO: 4834458 - DNA, 25 bp, Homo sapien
tgggcacacctcttgtactagacat

SEQ ID NO: 4834459 - DNA, 25 bp, Homo sapien
actctccaccaaagggataggaatc

SEQ ID NO: 4834460 - DNA, 25 bp, Homo sapien
caccaaagggataggaatctccaga

SEQ ID NO: 4834461 - DNA, 25 bp, Homo sapien
ccaccaaagggataggaatctccag

SEQ ID NO: 4834462 - DNA, 25 bp, Homo sapien
caaagggataggaatctccagacag

SEQ ID NO: 4834463 - DNA, 25 bp, Homo sapien
cttgcagagacagtgctctcagaag

SEQ ID NO: 4834464 - DNA, 25 bp, Homo sapien
tgcagagacagtgctctcagaagaa

SEQ ID NO: 4834465 - DNA, 25 bp, Homo sapien
ttgcagagacagtgctctcagaaga

SEQ ID NO: 4834466 - DNA, 25 bp, Homo sapien
gactgtctccaggtatctatttgca

SEQ ID NO: 4834467 - DNA, 25 bp, Homo sapien
tcaggcatggaagattgggaagaca

SEQ ID NO: 4834468 - DNA, 25 bp, Homo sapien
tctgttctgtaagacctaggcttga

SEQ ID NO: 4834469 - DNA, 25 bp, Homo sapien
gaagattttgtaggactctggacac

SEQ ID NO: 4834470 - DNA, 25 bp, Homo sapien
tctgtggtacatataatattatatc

SEQ ID NO: 4834471 - DNA, 25 bp, Homo sapien
cagttgattattccacagcccagat

SEQ ID NO: 4834472 - DNA, 25 bp, Homo sapien
tggtgtacttagcatctgctcacag

SEQ ID NO: 4834473 - DNA, 25 bp, Homo sapien
tgtcatcataacctcgttcagaatc

SEQ ID NO: 4834474 - DNA, 25 bp, Homo sapien
tatttttagataaatatccccttga

SEQ ID NO: 4834475 - DNA, 25 bp, Homo sapien
gatgccataagtataacacttctgg

SEQ ID NO: 4834476 - DNA, 25 bp, Homo sapien
tccagtgcctcccttatccaagatg

SEQ ID NO: 4834477 - DNA, 25 bp, Homo sapien
cacttctggtcattgtaactattgg

SEQ ID NO: 4834478 - DNA, 25 bp, Homo sapien
tattagtcagcagggatttgcatac

SEQ ID NO: 4834479 - DNA, 25 bp, Homo sapien
tcattctaatggttttagctctaga

SEQ ID NO: 4834480 - DNA, 25 bp, Homo sapien
ctaatggttttagctctagatcttt

SEQ ID NO: 4834481 - DNA, 25 bp, Homo sapien
agtttgccattgttacgacttccat

SEQ ID NO: 4834482 - DNA, 25 bp, Homo sapien
ttttgttgctgctgtcgttgatatg

SEQ ID NO: 4834483 - DNA, 25 bp, Homo sapien
gattcactattgtgcttgtggccat

SEQ ID NO: 4834484 - DNA, 25 bp, Homo sapien
gcttgtggccatttgataaactgcc

SEQ ID NO: 4834485 - DNA, 25 bp, Homo sapien
tgtcattcaatactgattcactatt

SEQ ID NO: 4834486 - DNA, 25 bp, Homo sapien
caatactgattcactattgtgcttg

SEQ ID NO: 4834487 - DNA, 25 bp, Homo sapien
ggaagtgcccaggaagtagtaagct

SEQ ID NO: 4834488 - DNA, 25 bp, Homo sapien
agtgcccaggaagtagtaagctcat

SEQ ID NO: 4834489 - DNA, 25 bp, Homo sapien
gaagtgcccaggaagtagtaagctc

SEQ ID NO: 4834490 - DNA, 25 bp, Homo sapien
aagtgcccaggaagtagtaagctca

SEQ ID NO: 4834491 - DNA, 25 bp, Homo sapien
tgcctctttgatggaatctggttct

SEQ ID NO: 4834492 - DNA, 25 bp, Homo sapien
caggttctgcctctttgatggaatc

SEQ ID NO: 4834493 - DNA, 25 bp, Homo sapien
ggttctgcctctttgatggaatctg

SEQ ID NO: 4834494 - DNA, 25 bp, Homo sapien
tctgcctctttgatggaatctggtt

SEQ ID NO: 4834495 - DNA, 25 bp, Homo sapien
aattcaccgacaggccgaagggagg

SEQ ID NO: 4834496 - DNA, 25 bp, Homo sapien
ttctctccaagtaaattcaccgaca

SEQ ID NO: 4834497 - DNA, 25 bp, Homo sapien
tttagcgctcagttcttgcaacgtc

SEQ ID NO: 4834498 - DNA, 25 bp, Homo sapien
ggaggtgttgctagtccctgcctct

SEQ ID NO: 4834499 - DNA, 25 bp, Homo sapien
aaagaccacaaactctcctacaagg

SEQ ID NO: 4834500 - DNA, 25 bp, Homo sapien
gcgtgtccggttgccctgaccagag

SEQ ID NO: 4834501 - DNA, 25 bp, Homo sapien
gaccagagacgaaaccgtgcagagg

SEQ ID NO: 4834502 - DNA, 25 bp, Homo sapien
aaactctcctacaaggcgtgtccgg

SEQ ID NO: 4834503 - DNA, 25 bp, Homo sapien
caccataagccagcgaccacaggtg

SEQ ID NO: 4834504 - DNA, 25 bp, Homo sapien
agtgcgtccactcagtaacccaaca

SEQ ID NO: 4834505 - DNA, 25 bp, Homo sapien
tccccactgtgtacagagtgcgtcc

SEQ ID NO: 4834506 - DNA, 25 bp, Homo sapien
tgtgtacagagtgcgtccactcagt

SEQ ID NO: 4834507 - DNA, 25 bp, Homo sapien
gatggctcccaatttgcactttgca

SEQ ID NO: 4834508 - DNA, 25 bp, Homo sapien
tgtaggctttcaggctcacaggctc

SEQ ID NO: 4834509 - DNA, 25 bp, Homo sapien
tgtggagaggtattcatagcaggac

SEQ ID NO: 4834510 - DNA, 25 bp, Homo sapien
tttgcaaggaagacataaacacgct

SEQ ID NO: 4834511 - DNA, 25 bp, Homo sapien
gttccactggattggacgctgccca

SEQ ID NO: 4834512 - DNA, 25 bp, Homo sapien
gaggaagtagaaatggtgcaaccac

SEQ ID NO: 4834513 - DNA, 25 bp, Homo sapien
gaaacatctatgtagacagaacacc

SEQ ID NO: 4834514 - DNA, 25 bp, Homo sapien
gagaggaacccaagagaagcacata

SEQ ID NO: 4834515 - DNA, 25 bp, Homo sapien
ggactgttcagcccagatttctccc

SEQ ID NO: 4834516 - DNA, 25 bp, Homo sapien
tggactgttcagcccagatttctcc

SEQ ID NO: 4834517 - DNA, 25 bp, Homo sapien
gactgttcagcccagatttctccct

SEQ ID NO: 4834518 - DNA, 25 bp, Homo sapien
gagtagagatctggccttctcagtg

SEQ ID NO: 4834519 - DNA, 25 bp, Homo sapien
cactgggatggtcgctttgctttaa

SEQ ID NO: 4834520 - DNA, 25 bp, Homo sapien
tgcacatgcccgttgattcctgtgt

SEQ ID NO: 4834521 - DNA, 25 bp, Homo sapien
ttcctgtgtcctatgcaggtgccca

SEQ ID NO: 4834522 - DNA, 25 bp, Homo sapien
gaatcaccaaatattggtcggatcc

SEQ ID NO: 4834523 - DNA, 25 bp, Homo sapien
tccttggaaggacccatgcagcttc

SEQ ID NO: 4834524 - DNA, 25 bp, Homo sapien
tcggatccttggaaggacccatgca

SEQ ID NO: 4834525 - DNA, 25 bp, Homo sapien
tattggtcggatccttggaaggacc

SEQ ID NO: 4834526 - DNA, 25 bp, Homo sapien
ggattattcgtcctgctgacctcaa

SEQ ID NO: 4834527 - DNA, 25 bp, Homo sapien
ggatttttcatcgtgcatctcagcc

SEQ ID NO: 4834528 - DNA, 25 bp, Homo sapien
cctttctttatgacggaagagtccg

SEQ ID NO: 4834529 - DNA, 25 bp, Homo sapien
catcttcccgtgtctgggtggttaa

SEQ ID NO: 4834530 - DNA, 25 bp, Homo sapien
tactgcaacagctggtaccgtcaac

SEQ ID NO: 4834531 - DNA, 25 bp, Homo sapien
gatgaagtagaaaccgctgggacca

SEQ ID NO: 4834532 - DNA, 25 bp, Homo sapien
tgaattgttactgccactgccggct

SEQ ID NO: 4834533 - DNA, 25 bp, Homo sapien
tacagattgtgctggtggtactgca

SEQ ID NO: 4834534 - DNA, 25 bp, Homo sapien
aataaacaattcaaaagtctctgac

SEQ ID NO: 4834535 - DNA, 25 bp, Homo sapien
taataaacaattcaaaagtctctga

SEQ ID NO: 4834536 - DNA, 25 bp, Homo sapien
ttaataaacaattcaaaagtctctg

SEQ ID NO: 4834537 - DNA, 25 bp, Homo sapien
cttaataaacaattcaaaagtctct

SEQ ID NO: 4834538 - DNA, 25 bp, Homo sapien
taaactagcacacaaacgacaaaac

SEQ ID NO: 4834539 - DNA, 25 bp, Homo sapien
ggtgatgaagaaccataaccacgcc

SEQ ID NO: 4834540 - DNA, 25 bp, Homo sapien
gcagagactaccaactacagtgagt

SEQ ID NO: 4834541 - DNA, 25 bp, Homo sapien
tattcctgcacaccaaaaactaaag

SEQ ID NO: 4834542 - DNA, 25 bp, Homo sapien
caaatgctcgcacaacatcatttta

SEQ ID NO: 4834543 - DNA, 25 bp, Homo sapien
taatagtggccacaacatcaaagcc

SEQ ID NO: 4834544 - DNA, 25 bp, Homo sapien
cacgaggtaaatggtctgctagaca

SEQ ID NO: 4834545 - DNA, 25 bp, Homo sapien
gcatattttggtctccccgtctaga

SEQ ID NO: 4834546 - DNA, 25 bp, Homo sapien
ggttaatcatatctcccaagtgtgg

SEQ ID NO: 4834547 - DNA, 25 bp, Homo sapien
gacccattaatggatcacaagcagc

SEQ ID NO: 4834548 - DNA, 25 bp, Homo sapien
aaagtgaccttaatccagggttctg

SEQ ID NO: 4834549 - DNA, 25 bp, Homo sapien
gggtccagagcttaagaaattcaca

SEQ ID NO: 4834550 - DNA, 25 bp, Homo sapien
ggaaagtcataagttcagttacaca

SEQ ID NO: 4834551 - DNA, 25 bp, Homo sapien
caggaatcagcttaagggtctatca

SEQ ID NO: 4834552 - DNA, 25 bp, Homo sapien
tcaattgaagggatacacaaactgc

SEQ ID NO: 4834553 - DNA, 25 bp, Homo sapien
cagtgaatgtacacataagatttgc

SEQ ID NO: 4834554 - DNA, 25 bp, Homo sapien
taaattaacataggataacagttat

SEQ ID NO: 4834555 - DNA, 25 bp, Homo sapien
tataccccatatttatctgctttca

SEQ ID NO: 4834556 - DNA, 25 bp, Homo sapien
tgttgttaagtctgtgtattttggg

SEQ ID NO: 4834557 - DNA, 25 bp, Homo sapien
tgttcaaatacttacagagcactaa

SEQ ID NO: 4834558 - DNA, 25 bp, Homo sapien
tatgaagcgggatgagacctccatc

SEQ ID NO: 4834559 - DNA, 25 bp, Homo sapien
tatccctggcatttggatcagctcc

SEQ ID NO: 4834560 - DNA, 25 bp, Homo sapien
gagcgtggacattagcacccatctg

SEQ ID NO: 4834561 - DNA, 25 bp, Homo sapien
tcatgcagaggtgtatagttccagt

SEQ ID NO: 4834562 - DNA, 25 bp, Homo sapien
ttcagtttaagaatctggcacctca

SEQ ID NO: 4834563 - DNA, 25 bp, Homo sapien
gattcagtttaagaatctggcacct

SEQ ID NO: 4834564 - DNA, 25 bp, Homo sapien
ctgattcagtttaagaatctggcac

SEQ ID NO: 4834565 - DNA, 25 bp, Homo sapien
tcagtttaagaatctggcacctcat

SEQ ID NO: 4834566 - DNA, 25 bp, Homo sapien
gattatttactggtaagtgtcgtct

SEQ ID NO: 4834567 - DNA, 25 bp, Homo sapien
cctcggggatacagagattatttac

SEQ ID NO: 4834568 - DNA, 25 bp, Homo sapien
ttactggtaagtgtcgtctcggcat

SEQ ID NO: 4834569 - DNA, 25 bp, Homo sapien
agcagaaacagtatcttacctcggg

SEQ ID NO: 4834570 - DNA, 25 bp, Homo sapien
tcccatcagtgttccgaatgtttgg

SEQ ID NO: 4834571 - DNA, 25 bp, Homo sapien
cagtgttccgaatgtttgggtcagc

SEQ ID NO: 4834572 - DNA, 25 bp, Homo sapien
cgaatgtttgggtcagctccgtgct

SEQ ID NO: 4834573 - DNA, 25 bp, Homo sapien
tgtttgggtcagctccgtgctgcag

SEQ ID NO: 4834574 - DNA, 25 bp, Homo sapien
taaaatcaagtaaggagttacacag

SEQ ID NO: 4834575 - DNA, 25 bp, Homo sapien
aatcattcggtagctctctgtcttc

SEQ ID NO: 4834576 - DNA, 25 bp, Homo sapien
cacagatataatcattcggtagctc

SEQ ID NO: 4834577 - DNA, 25 bp, Homo sapien
gagttacacagatataatcattcgg

SEQ ID NO: 4834578 - DNA, 25 bp, Homo sapien
tgggccagacattgcatactctatt

SEQ ID NO: 4834579 - DNA, 25 bp, Homo sapien
tgaagagtaagtctgttagtttatt

SEQ ID NO: 4834580 - DNA, 25 bp, Homo sapien
agcagctgaaagtagaacttgcaga

SEQ ID NO: 4834581 - DNA, 25 bp, Homo sapien
actatctaattatttgaagagtaag

SEQ ID NO: 4834582 - DNA, 25 bp, Homo sapien
gtaagcagtaatgtaccattttcca

SEQ ID NO: 4834583 - DNA, 25 bp, Homo sapien
tcagtgcctaatgtaagcagtaatg

SEQ ID NO: 4834584 - DNA, 25 bp, Homo sapien
ccataatgccaaaacttgtattcaa

SEQ ID NO: 4834585 - DNA, 25 bp, Homo sapien
tgccaaaacttgtattcaactatct

SEQ ID NO: 4834586 - DNA, 25 bp, Homo sapien
tctagagaacttcactattgtacag

SEQ ID NO: 4834587 - DNA, 25 bp, Homo sapien
caatgtatcttagaaagtaatccat

SEQ ID NO: 4834588 - DNA, 25 bp, Homo sapien
taatccatcagtagttctagagaac

SEQ ID NO: 4834589 - DNA, 25 bp, Homo sapien
cttggaggctggttatcacttattg

SEQ ID NO: 4834590 - DNA, 25 bp, Homo sapien
ctacagcaaagatctgatgagaatt

SEQ ID NO: 4834591 - DNA, 25 bp, Homo sapien
gagaattaaagtatctacagcaaag

SEQ ID NO: 4834592 - DNA, 25 bp, Homo sapien
tatctacagcaaagatctgatgaga

SEQ ID NO: 4834593 - DNA, 25 bp, Homo sapien
ttaaagtatctacagcaaagatctg

SEQ ID NO: 4834594 - DNA, 25 bp, Homo sapien
cacctagtaatgtcacagtgggagc

SEQ ID NO: 4834595 - DNA, 25 bp, Homo sapien
agacccctctgtcatcgcaatggtg

SEQ ID NO: 4834596 - DNA, 25 bp, Homo sapien
gaaagccagtgataatgacgatcct

SEQ ID NO: 4834597 - DNA, 25 bp, Homo sapien
taagcctagatataacagacccctc

SEQ ID NO: 4834598 - DNA, 25 bp, Homo sapien
gactgaatttgctaccacgagagtg

SEQ ID NO: 4834599 - DNA, 25 bp, Homo sapien
taaggtattccctacaagttgctag

SEQ ID NO: 4834600 - DNA, 25 bp, Homo sapien
gcagctaaagggctgtggtcccaga

SEQ ID NO: 4834601 - DNA, 25 bp, Homo sapien
catctagaggtacagcttgcaaagc

SEQ ID NO: 4834602 - DNA, 25 bp, Homo sapien
gcgccggcgagcgccgcctgggagg

SEQ ID NO: 4834603 - DNA, 25 bp, Homo sapien
ccgcgccggcgagcgccgcctggga

SEQ ID NO: 4834604 - DNA, 25 bp, Homo sapien
gccggcgagcgccgcctgggaggca

SEQ ID NO: 4834605 - DNA, 25 bp, Homo sapien
ggcgagcgccgcctgggaggcagcg

SEQ ID NO: 4834606 - DNA, 25 bp, Homo sapien
gaagaatccttgcaccatgctccag

SEQ ID NO: 4834607 - DNA, 25 bp, Homo sapien
agaatgatgactccctggcaactgc

SEQ ID NO: 4834608 - DNA, 25 bp, Homo sapien
cctggacaagggaccaaaggcattg

SEQ ID NO: 4834609 - DNA, 25 bp, Homo sapien
tctagggcttgtaaaggtgcatgca

SEQ ID NO: 4834610 - DNA, 25 bp, Homo sapien
tattaccatttcaacgtgtggcagc

SEQ ID NO: 4834611 - DNA, 25 bp, Homo sapien
taccctactatatccacaatattac

SEQ ID NO: 4834612 - DNA, 25 bp, Homo sapien
tatgtaattgtaaacttccagtagc

SEQ ID NO: 4834613 - DNA, 25 bp, Homo sapien
tttatttaccctactatatccacaa

SEQ ID NO: 4834614 - DNA, 25 bp, Homo sapien
ctaaatgaacaagttgctgcaggtt

SEQ ID NO: 4834615 - DNA, 25 bp, Homo sapien
tgcaggtttggtgccactgctagca

SEQ ID NO: 4834616 - DNA, 25 bp, Homo sapien
ctgacagataatgttcacacgggtg

SEQ ID NO: 4834617 - DNA, 25 bp, Homo sapien
tgggccctgcagtctactaaatgaa

SEQ ID NO: 4834618 - DNA, 25 bp, Homo sapien
gaaatgattccgaatgatttttcct

SEQ ID NO: 4834619 - DNA, 25 bp, Homo sapien
aagaatatagtgcttggcgctgtta

SEQ ID NO: 4834620 - DNA, 25 bp, Homo sapien
gcttggcgctgttatttcttagaaa

SEQ ID NO: 4834621 - DNA, 25 bp, Homo sapien
caatggtaaatctccgaaagcttta

SEQ ID NO: 4834622 - DNA, 25 bp, Homo sapien
catcactcacttttacccaaataca

SEQ ID NO: 4834623 - DNA, 25 bp, Homo sapien
cacactatcaactctacatcactca

SEQ ID NO: 4834624 - DNA, 25 bp, Homo sapien
gcattttcctgaatgtctttgctca

SEQ ID NO: 4834625 - DNA, 25 bp, Homo sapien
tatcaactctacatcactcactttt

SEQ ID NO: 4834626 - DNA, 25 bp, Homo sapien
tttttctgaaatcataataaacatt

SEQ ID NO: 4834627 - DNA, 25 bp, Homo sapien
aaagtgtcctccatatttttctgaa

SEQ ID NO: 4834628 - DNA, 25 bp, Homo sapien
aaacattttcatacatctccttttc

SEQ ID NO: 4834629 - DNA, 25 bp, Homo sapien
aataaacattttcatacatctcctt

SEQ ID NO: 4834630 - DNA, 25 bp, Homo sapien
aaggctttgtatgcatgaagtctga

SEQ ID NO: 4834631 - DNA, 25 bp, Homo sapien
tcatagcaaggctttgtatgcatga

SEQ ID NO: 4834632 - DNA, 25 bp, Homo sapien
ttatcacaagttaatccaagcagct

SEQ ID NO: 4834633 - DNA, 25 bp, Homo sapien
tgaagtctgatgtttatcacaagtt

SEQ ID NO: 4834634 - DNA, 25 bp, Homo sapien
tctggataacacataaactaaaaac

SEQ ID NO: 4834635 - DNA, 25 bp, Homo sapien
cagggtaataggcattccatatata

SEQ ID NO: 4834636 - DNA, 25 bp, Homo sapien
tggataacacataaactaaaaacta

SEQ ID NO: 4834637 - DNA, 25 bp, Homo sapien
gttctggataacacataaactaaaa

SEQ ID NO: 4834638 - DNA, 25 bp, Homo sapien
gcctcatataggggcaattcatctg

SEQ ID NO: 4834639 - DNA, 25 bp, Homo sapien
ttgcctcatataggggcaattcatc

SEQ ID NO: 4834640 - DNA, 25 bp, Homo sapien
cttgcctcatataggggcaattcat

SEQ ID NO: 4834641 - DNA, 25 bp, Homo sapien
catataggggcaattcatctggcct

SEQ ID NO: 4834642 - DNA, 25 bp, Homo sapien
caatttcaccactgcagataccaac

SEQ ID NO: 4834643 - DNA, 25 bp, Homo sapien
actgccacaatttcaccactgcaga

SEQ ID NO: 4834644 - DNA, 25 bp, Homo sapien
cacaatttcaccactgcagatacca

SEQ ID NO: 4834645 - DNA, 25 bp, Homo sapien
gccacaatttcaccactgcagatac

SEQ ID NO: 4834646 - DNA, 25 bp, Homo sapien
tgttaagaaatagccaaaccatgtc

SEQ ID NO: 4834647 - DNA, 25 bp, Homo sapien
tagccaaaccatgtcttttttgaaa

SEQ ID NO: 4834648 - DNA, 25 bp, Homo sapien
agaaatagccaaaccatgtcttttt

SEQ ID NO: 4834649 - DNA, 25 bp, Homo sapien
cttgttaagaaatagccaaaccatg

SEQ ID NO: 4834650 - DNA, 25 bp, Homo sapien
tattttgagaggcagttgaccacag

SEQ ID NO: 4834651 - DNA, 25 bp, Homo sapien
caccaaaaagtcaggcccctctgaa

SEQ ID NO: 4834652 - DNA, 25 bp, Homo sapien
gctgtgtgaacactacacttcaaga

SEQ ID NO: 4834653 - DNA, 25 bp, Homo sapien
tcacgccctgggcagaatacagcag

SEQ ID NO: 4834654 - DNA, 25 bp, Homo sapien
tatatggtagatgtacagtagcccc

SEQ ID NO: 4834655 - DNA, 25 bp, Homo sapien
taaaaactcagatggcagcaaaact

SEQ ID NO: 4834656 - DNA, 25 bp, Homo sapien
tgttacatagtacagccccagtctc

SEQ ID NO: 4834657 - DNA, 25 bp, Homo sapien
atgcctaaaactgcggacggtacct

SEQ ID NO: 4834658 - DNA, 25 bp, Homo sapien
tctgaagcaaaggacactcacaggg

SEQ ID NO: 4834659 - DNA, 25 bp, Homo sapien
gctaccacagtgaaagaaaggagaa

SEQ ID NO: 4834660 - DNA, 25 bp, Homo sapien
catgaatgtctctctaagctaagaa

SEQ ID NO: 4834661 - DNA, 25 bp, Homo sapien
tgaaatgttagagagcttaccagcc

SEQ ID NO: 4834662 - DNA, 25 bp, Homo sapien
ggtgatggagccgtgacgttagcca

SEQ ID NO: 4834663 - DNA, 25 bp, Homo sapien
gatggagccgtgacgttagccagct

SEQ ID NO: 4834664 - DNA, 25 bp, Homo sapien
tgatggagccgtgacgttagccagc

SEQ ID NO: 4834665 - DNA, 25 bp, Homo sapien
atggagccgtgacgttagccagctt

SEQ ID NO: 4834666 - DNA, 25 bp, Homo sapien
aggagttcgtctttcttgtattcac

SEQ ID NO: 4834667 - DNA, 25 bp, Homo sapien
ctagcagcttctaggagttcgtctt

SEQ ID NO: 4834668 - DNA, 25 bp, Homo sapien
gcttctaggagttcgtctttcttgt

SEQ ID NO: 4834669 - DNA, 25 bp, Homo sapien
gcagcttctaggagttcgtctttct

SEQ ID NO: 4834670 - DNA, 25 bp, Homo sapien
taaattataaacgaccaagaacaca

SEQ ID NO: 4834671 - DNA, 25 bp, Homo sapien
attcctgttaattaccctatagtgg

SEQ ID NO: 4834672 - DNA, 25 bp, Homo sapien
ttcacacgagagtaaaatatgggtt

SEQ ID NO: 4834673 - DNA, 25 bp, Homo sapien
catggatcacaataaatctcttttg

SEQ ID NO: 4834674 - DNA, 25 bp, Homo sapien
tcgcccatcacttgcatggcaattc

SEQ ID NO: 4834675 - DNA, 25 bp, Homo sapien
cagtaaagccattagtttttcttca

SEQ ID NO: 4834676 - DNA, 25 bp, Homo sapien
ctttcgcccatcacttgcatggcaa

SEQ ID NO: 4834677 - DNA, 25 bp, Homo sapien
atttagaggagtcagtaaagccatt

SEQ ID NO: 4834678 - DNA, 25 bp, Homo sapien
aataaagccatgtaggtatacgtgc

SEQ ID NO: 4834679 - DNA, 25 bp, Homo sapien
caccagttctatgaatgtgtcacaa

SEQ ID NO: 4834680 - DNA, 25 bp, Homo sapien
cattatcatacccagaaaagagcat

SEQ ID NO: 4834681 - DNA, 25 bp, Homo sapien
taatcaccgacaaaactgcagtttc

SEQ ID NO: 4834682 - DNA, 25 bp, Homo sapien
gactgacttgtcctgatttgcccag

SEQ ID NO: 4834683 - DNA, 25 bp, Homo sapien
cagcaaactaagacggttggtcacc

SEQ ID NO: 4834684 - DNA, 25 bp, Homo sapien
tggtcaccctaccttagccaggcaa

SEQ ID NO: 4834685 - DNA, 25 bp, Homo sapien
tgaagaaccagtttggcctagacca

SEQ ID NO: 4834686 - DNA, 25 bp, Homo sapien
ttctttattgtagcctgacagtata

SEQ ID NO: 4834687 - DNA, 25 bp, Homo sapien
ccgctctagtagtctgcaatgtcta

SEQ ID NO: 4834688 - DNA, 25 bp, Homo sapien
ttgttcttgaacctgtgctgcccgc

SEQ ID NO: 4834689 - DNA, 25 bp, Homo sapien
tactgcagtcaagtagtgagcatgg

SEQ ID NO: 4834690 - DNA, 25 bp, Homo sapien
tttcctttgtgtatagatctagtaa

SEQ ID NO: 4834691 - DNA, 25 bp, Homo sapien
ttttgcatgaacatcagcaccatgc

SEQ ID NO: 4834692 - DNA, 25 bp, Homo sapien
ttcgaactctgttgtagcccgctgc

SEQ ID NO: 4834693 - DNA, 25 bp, Homo sapien
ccgctgctagatgtaaaggagtcga

SEQ ID NO: 4834694 - DNA, 25 bp, Homo sapien
ttgtcttttgcatgaacatcagcac

SEQ ID NO: 4834695 - DNA, 25 bp, Homo sapien
tgcattatgaagaggcacaagtcca

SEQ ID NO: 4834696 - DNA, 25 bp, Homo sapien
tccggagttggagccatatccacag

SEQ ID NO: 4834697 - DNA, 25 bp, Homo sapien
taatgtaggatcagcgccatggcta

SEQ ID NO: 4834698 - DNA, 25 bp, Homo sapien
gagcagacttctacacggttcttgg

SEQ ID NO: 4834699 - DNA, 25 bp, Homo sapien
ggagtaaactgccagagatccatgg

SEQ ID NO: 4834700 - DNA, 25 bp, Homo sapien
taatgatttccagagcgagtgtttt

SEQ ID NO: 4834701 - DNA, 25 bp, Homo sapien
catgagactgcggttgtttgaaatt

SEQ ID NO: 4834702 - DNA, 25 bp, Homo sapien
cagtgctgtttcatgagactgcggt

SEQ ID NO: 4834703 - DNA, 25 bp, Homo sapien
tttagctaagtctgcttctctggct

SEQ ID NO: 4834704 - DNA, 25 bp, Homo sapien
gctccttttctaagtaacaattctg

SEQ ID NO: 4834705 - DNA, 25 bp, Homo sapien
tctaagtaacaattctgtcacttgt

SEQ ID NO: 4834706 - DNA, 25 bp, Homo sapien
cttgtttacgtttgggatgcagaga

SEQ ID NO: 4834707 - DNA, 25 bp, Homo sapien
gtcacttgtttacgtttgggatgca

SEQ ID NO: 4834708 - DNA, 25 bp, Homo sapien
ttccatgacatcattatgggctctt

SEQ ID NO: 4834709 - DNA, 25 bp, Homo sapien
tccatgacatcattatgggctcttt

SEQ ID NO: 4834710 - DNA, 25 bp, Homo sapien
gctctttcggctgcaacatgcaggg

SEQ ID NO: 4834711 - DNA, 25 bp, Homo sapien
ttcggctgcaacatgcaggggagtc

SEQ ID NO: 4834712 - DNA, 25 bp, Homo sapien
tagaaacaagatctaaatcagcttt

SEQ ID NO: 4834713 - DNA, 25 bp, Homo sapien
aatcagctttataggagaatccatg

SEQ ID NO: 4834714 - DNA, 25 bp, Homo sapien
tcagtgctgagtctggcactctgct

SEQ ID NO: 4834715 - DNA, 25 bp, Homo sapien
tcagaaaaatcggagagagagaagc

SEQ ID NO: 4834716 - DNA, 25 bp, Homo sapien
atcagcaccctctactccagtcaga

SEQ ID NO: 4834717 - DNA, 25 bp, Homo sapien
caccctctactccagtcagacccaa

SEQ ID NO: 4834718 - DNA, 25 bp, Homo sapien
caatcagcaccctctactccagtca

SEQ ID NO: 4834719 - DNA, 25 bp, Homo sapien
ccctctactccagtcagacccaagt

SEQ ID NO: 4834720 - DNA, 25 bp, Homo sapien
caggtgacctgctagggcggctcta

SEQ ID NO: 4834721 - DNA, 25 bp, Homo sapien
ggcggctctatgcaaagcagtctga

SEQ ID NO: 4834722 - DNA, 25 bp, Homo sapien
ggtcagagccgtaactcagcaggag

SEQ ID NO: 4834723 - DNA, 25 bp, Homo sapien
cagtctgaccaagggtgtccagtgc

SEQ ID NO: 4834724 - DNA, 25 bp, Homo sapien
tcccgtctcaagatcaccattaagg

SEQ ID NO: 4834725 - DNA, 25 bp, Homo sapien
catgttgatagtgaagacatgctag

SEQ ID NO: 4834726 - DNA, 25 bp, Homo sapien
ttaaggctgaagtagaatgatcact

SEQ ID NO: 4834727 - DNA, 25 bp, Homo sapien
gacatgctagatagatttccttcta

SEQ ID NO: 4834728 - DNA, 25 bp, Homo sapien
gagtcgataatcaacatcagaagta

SEQ ID NO: 4834729 - DNA, 25 bp, Homo sapien
tagatgcctctaagagtcgataatc

SEQ ID NO: 4834730 - DNA, 25 bp, Homo sapien
tcagaagtacgtataggtgtactct

SEQ ID NO: 4834731 - DNA, 25 bp, Homo sapien
tcaacatcagaagtacgtataggtg

SEQ ID NO: 4834732 - DNA, 25 bp, Homo sapien
gacactaagcctacgagtacctgga

SEQ ID NO: 4834733 - DNA, 25 bp, Homo sapien
gcagcaacaagacaccaccttgaag

SEQ ID NO: 4834734 - DNA, 25 bp, Homo sapien
agcatttggccgttttgcccttccg

SEQ ID NO: 4834735 - DNA, 25 bp, Homo sapien
ggtgactgggtcatgcggactcttc

SEQ ID NO: 4834736 - DNA, 25 bp, Homo sapien
ggtactctacaacagacacgcggtt

SEQ ID NO: 4834737 - DNA, 25 bp, Homo sapien
ggaatgccggccctctaagtctcta

SEQ ID NO: 4834738 - DNA, 25 bp, Homo sapien
cacgcggttgtagcctgctgcgaag

SEQ ID NO: 4834739 - DNA, 25 bp, Homo sapien
tctttggcatggacatcggcaccgt

SEQ ID NO: 4834740 - DNA, 25 bp, Homo sapien
gatgaggcctaaatcgtgcagttta

SEQ ID NO: 4834741 - DNA, 25 bp, Homo sapien
gaaatattcatgtctgatgtgtccc

SEQ ID NO: 4834742 - DNA, 25 bp, Homo sapien
aaatacataatggttcgatgaggcc

SEQ ID NO: 4834743 - DNA, 25 bp, Homo sapien
gctctccaatgcactgaaacagttt

SEQ ID NO: 4834744 - DNA, 25 bp, Homo sapien
ggtactgactatactgaacactgcg

SEQ ID NO: 4834745 - DNA, 25 bp, Homo sapien
tagttatccatttctaaataaggag

SEQ ID NO: 4834746 - DNA, 25 bp, Homo sapien
caaacctttgagttacaatgattct

SEQ ID NO: 4834747 - DNA, 25 bp, Homo sapien
gaaatacacccacctctgttcttta

SEQ ID NO: 4834748 - DNA, 25 bp, Homo sapien
ggtaaatttccataagtccgccaca

SEQ ID NO: 4834749 - DNA, 25 bp, Homo sapien
tgccttactaaaagctcagccacct

SEQ ID NO: 4834750 - DNA, 25 bp, Homo sapien
cacctcatagtgtccatatgaacag

SEQ ID NO: 4834751 - DNA, 25 bp, Homo sapien
tgaacaggcattatgaaggggcacc

SEQ ID NO: 4834752 - DNA, 25 bp, Homo sapien
tggcagcatccaacaaagcagcatc

SEQ ID NO: 4834753 - DNA, 25 bp, Homo sapien
agcatcccctctcagtaagtcctga

SEQ ID NO: 4834754 - DNA, 25 bp, Homo sapien
cagaggggttgaatttctgccctgg

SEQ ID NO: 4834755 - DNA, 25 bp, Homo sapien
tctttttagttggatctgctccatg

SEQ ID NO: 4834756 - DNA, 25 bp, Homo sapien
gctacttccaggttattatagcctg

SEQ ID NO: 4834757 - DNA, 25 bp, Homo sapien
tagaagatattcagctacttccagg

SEQ ID NO: 4834758 - DNA, 25 bp, Homo sapien
ccatgctctagaagatattcagcta

SEQ ID NO: 4834759 - DNA, 25 bp, Homo sapien
cataagatgccgcattatgaagagg

SEQ ID NO: 4834760 - DNA, 25 bp, Homo sapien
tataacagctgcacagcttttctag

SEQ ID NO: 4834761 - DNA, 25 bp, Homo sapien
gccactgtgcctgctactcgaatat

SEQ ID NO: 4834762 - DNA, 25 bp, Homo sapien
aagccaacatactttccatgcctgt

SEQ ID NO: 4834763 - DNA, 25 bp, Homo sapien
tactcgaatatttttaaggtgctga

SEQ ID NO: 4834764 - DNA, 25 bp, Homo sapien
gagaacacctggtacgtatgaactg

SEQ ID NO: 4834765 - DNA, 25 bp, Homo sapien
agaacacctggtacgtatgaactgg

SEQ ID NO: 4834766 - DNA, 25 bp, Homo sapien
gaacacctggtacgtatgaactggc

SEQ ID NO: 4834767 - DNA, 25 bp, Homo sapien
aagctggaaaggaggtcttggaatc

SEQ ID NO: 4834768 - DNA, 25 bp, Homo sapien
tcattacaacaagctggaaaggagg

SEQ ID NO: 4834769 - DNA, 25 bp, Homo sapien
tttccacatgcatggtctcatttaa

SEQ ID NO: 4834770 - DNA, 25 bp, Homo sapien
ttagttaatgcaatttccacatgca

SEQ ID NO: 4834771 - DNA, 25 bp, Homo sapien
tctacttacactttggactccatct

SEQ ID NO: 4834772 - DNA, 25 bp, Homo sapien
tatgtctaaatgattgccgggtgga

SEQ ID NO: 4834773 - DNA, 25 bp, Homo sapien
gtaaagcaccattgtgtatacctgt

SEQ ID NO: 4834774 - DNA, 25 bp, Homo sapien
cattctgtaaagtgaaactagtacc

SEQ ID NO: 4834775 - DNA, 25 bp, Homo sapien
aaaaggatacaaagagttaagaatg

SEQ ID NO: 4834776 - DNA, 25 bp, Homo sapien
ggatacaaagagttaagaatgagat

SEQ ID NO: 4834777 - DNA, 25 bp, Homo sapien
atacaaagagttaagaatgagatca

SEQ ID NO: 4834778 - DNA, 25 bp, Homo sapien
aaggatacaaagagttaagaatgag

SEQ ID NO: 4834779 - DNA, 25 bp, Homo sapien
ggagtaaacgcccacttatctgttg

SEQ ID NO: 4834780 - DNA, 25 bp, Homo sapien
tcaataaagccgctatgtcaacatg

SEQ ID NO: 4834781 - DNA, 25 bp, Homo sapien
ctgcaccatgcgctaggaggagggc

SEQ ID NO: 4834782 - DNA, 25 bp, Homo sapien
gcatttacacacgtgttgtatttta

SEQ ID NO: 4834783 - DNA, 25 bp, Homo sapien
tgatcattccttctcctatccacag

SEQ ID NO: 4834784 - DNA, 25 bp, Homo sapien
caactgcttttcgagtatgcgggag

SEQ ID NO: 4834785 - DNA, 25 bp, Homo sapien
agggatgacactttaatttagctca

SEQ ID NO: 4834786 - DNA, 25 bp, Homo sapien
gatagtctccaaagacagccaccca

SEQ ID NO: 4834787 - DNA, 25 bp, Homo sapien
tcagcaaagctctgatatcgtcagc

SEQ ID NO: 4834788 - DNA, 25 bp, Homo sapien
caactctgctaaagggccagtgagg

SEQ ID NO: 4834789 - DNA, 25 bp, Homo sapien
agtgaggttgtctatgctgctggca

SEQ ID NO: 4834790 - DNA, 25 bp, Homo sapien
gggtggatgctggtgagatcagaga

SEQ ID NO: 4834791 - DNA, 25 bp, Homo sapien
ttggaggctcctcctacggccaact

SEQ ID NO: 4834792 - DNA, 25 bp, Homo sapien
gctgatattcatgtcaagaccagca

SEQ ID NO: 4834793 - DNA, 25 bp, Homo sapien
ttctgtttcaaagatatcccgaagg

SEQ ID NO: 4834794 - DNA, 25 bp, Homo sapien
ttagaaattggctgatattcatgtc

SEQ ID NO: 4834795 - DNA, 25 bp, Homo sapien
aaagatatcccgaaggtgttcaagg

SEQ ID NO: 4834796 - DNA, 25 bp, Homo sapien
agcagctagcactacaggggcccag

SEQ ID NO: 4834797 - DNA, 25 bp, Homo sapien
gcagctagcactacaggggcccagt

SEQ ID NO: 4834798 - DNA, 25 bp, Homo sapien
ccagcagctagcactacaggggccc

SEQ ID NO: 4834799 - DNA, 25 bp, Homo sapien
agctagcactacaggggcccagtaa

SEQ ID NO: 4834800 - DNA, 25 bp, Homo sapien
gaactctcgtgaaggtgacctgctt

SEQ ID NO: 4834801 - DNA, 25 bp, Homo sapien
tccctaagagaactctcgtgaaggt

SEQ ID NO: 4834802 - DNA, 25 bp, Homo sapien
gtgacctgcttggtcacggttgcaa

SEQ ID NO: 4834803 - DNA, 25 bp, Homo sapien
caatgtcttggacaatccctaagag

SEQ ID NO: 4834804 - DNA, 25 bp, Homo sapien
tagttggtccaaataactgatagta

SEQ ID NO: 4834805 - DNA, 25 bp, Homo sapien
gttggaaagttacatagttggtcca

SEQ ID NO: 4834806 - DNA, 25 bp, Homo sapien
tagtcgcagtgagttacatggtgtc

SEQ ID NO: 4834807 - DNA, 25 bp, Homo sapien
acatatctatcaggcagtggccact

SEQ ID NO: 4834808 - DNA, 25 bp, Homo sapien
aagttgtcttgatagtctcatcagc

SEQ ID NO: 4834809 - DNA, 25 bp, Homo sapien
tccaattgccttcaatgctacgagt

SEQ ID NO: 4834810 - DNA, 25 bp, Homo sapien
cttgcctcaagatagaggaggaatc

SEQ ID NO: 4834811 - DNA, 25 bp, Homo sapien
ttagctaggatatctttaacagttc

SEQ ID NO: 4834812 - DNA, 25 bp, Homo sapien
ccatatcagccaacacatctagtgt

SEQ ID NO: 4834813 - DNA, 25 bp, Homo sapien
tgattaatttgtggcggtgcccata

SEQ ID NO: 4834814 - DNA, 25 bp, Homo sapien
tggcggtgcccatatgcattgatgc

SEQ ID NO: 4834815 - DNA, 25 bp, Homo sapien
gtccacctaagagtctttctactcc

SEQ ID NO: 4834816 - DNA, 25 bp, Homo sapien
aatcgttccctgattaacacagtga

SEQ ID NO: 4834817 - DNA, 25 bp, Homo sapien
cagcaaaatcgttccctgattaaca

SEQ ID NO: 4834818 - DNA, 25 bp, Homo sapien
gcaagatccagcaaaatcgttccct

SEQ ID NO: 4834819 - DNA, 25 bp, Homo sapien
cgttccctgattaacacagtgaaaa

SEQ ID NO: 4834820 - DNA, 25 bp, Homo sapien
tctgtgttctcgaatagtactttgc

SEQ ID NO: 4834821 - DNA, 25 bp, Homo sapien
tatctgttgaagatgccgccagcat

SEQ ID NO: 4834822 - DNA, 25 bp, Homo sapien
gccagcattaccaccatctctgtgt

SEQ ID NO: 4834823 - DNA, 25 bp, Homo sapien
taccaccatctctgtgttctcgaat

SEQ ID NO: 4834824 - DNA, 25 bp, Homo sapien
catgaaacaacatgcgctcattgtg

SEQ ID NO: 4834825 - DNA, 25 bp, Homo sapien
cagacacttccttctgtcggtggca

SEQ ID NO: 4834826 - DNA, 25 bp, Homo sapien
gatggttgtgattctcctcagacac

SEQ ID NO: 4834827 - DNA, 25 bp, Homo sapien
gtcggtggcagaaccgctccctcaa

SEQ ID NO: 4834828 - DNA, 25 bp, Homo sapien
ggccccaaacattcctcctatgtat

SEQ ID NO: 4834829 - DNA, 25 bp, Homo sapien
ctgtccttgtgtgtagggcagcctg

SEQ ID NO: 4834830 - DNA, 25 bp, Homo sapien
tatgcatgtcgctcatcaaaccctt

SEQ ID NO: 4834831 - DNA, 25 bp, Homo sapien
tcaaaccctttatgaataatggcat

SEQ ID NO: 4834832 - DNA, 25 bp, Homo sapien
ttggactacaagcgcctgccaccac

SEQ ID NO: 4834833 - DNA, 25 bp, Homo sapien
cttggactacaagcgcctgccacca

SEQ ID NO: 4834834 - DNA, 25 bp, Homo sapien
ctccgcctcctgggtactcaccatt

SEQ ID NO: 4834835 - DNA, 25 bp, Homo sapien
gcttggactacaagcgcctgccacc

SEQ ID NO: 4834836 - DNA, 25 bp, Homo sapien
ccagggctcgcctgttgctgccgag

SEQ ID NO: 4834837 - DNA, 25 bp, Homo sapien
aggccctggtcttctgcttcctgcc

SEQ ID NO: 4834838 - DNA, 25 bp, Homo sapien
cacaaaggtgaacttgacaggccct

SEQ ID NO: 4834839 - DNA, 25 bp, Homo sapien
ccgaggcaggagatgacgtgggacc

SEQ ID NO: 4834840 - DNA, 25 bp, Homo sapien
cagaaaggatttcccaagggtcact

SEQ ID NO: 4834841 - DNA, 25 bp, Homo sapien
ggtcactctacagaagagcatttgt

SEQ ID NO: 4834842 - DNA, 25 bp, Homo sapien
gcagaaaggatttcccaagggtcac

SEQ ID NO: 4834843 - DNA, 25 bp, Homo sapien
cgtgggccattttcatggtgctaaa

SEQ ID NO: 4834844 - DNA, 25 bp, Homo sapien
gacgctcggtctaccaatgactgag

SEQ ID NO: 4834845 - DNA, 25 bp, Homo sapien
ttcagcatatgccagcccattgacg

SEQ ID NO: 4834846 - DNA, 25 bp, Homo sapien
ccaatgactgagtggtgccctggag

SEQ ID NO: 4834847 - DNA, 25 bp, Homo sapien
aacttggttatgcttgtttgatgag

SEQ ID NO: 4834848 - DNA, 25 bp, Homo sapien
acggtctctgtgctctattgacatg

SEQ ID NO: 4834849 - DNA, 25 bp, Homo sapien
tgtgaacttggttatgcttgtttga

SEQ ID NO: 4834850 - DNA, 25 bp, Homo sapien
tgctctattgacatgtttgtgaact

SEQ ID NO: 4834851 - DNA, 25 bp, Homo sapien
tggctgacagctactaatgggtttt

SEQ ID NO: 4834852 - DNA, 25 bp, Homo sapien
tggcacaaggcattagttcagagct

SEQ ID NO: 4834853 - DNA, 25 bp, Homo sapien
ctcaaaacggcatgagggcccaagc

SEQ ID NO: 4834854 - DNA, 25 bp, Homo sapien
taattaatactagcacactgtgtgg

SEQ ID NO: 4834855 - DNA, 25 bp, Homo sapien
tctccccgcttcattcccccttctc

SEQ ID NO: 4834856 - DNA, 25 bp, Homo sapien
tctctccccgcttcattcccccttc

SEQ ID NO: 4834857 - DNA, 25 bp, Homo sapien
ctctctccccgcttcattccccctt

SEQ ID NO: 4834858 - DNA, 25 bp, Homo sapien
ctctccccgcttcattcccccttct

SEQ ID NO: 4834859 - DNA, 25 bp, Homo sapien
ccatcttatgttgtgggtgaatcag

SEQ ID NO: 4834860 - DNA, 25 bp, Homo sapien
cattaatgcccagtgataaccatct

SEQ ID NO: 4834861 - DNA, 25 bp, Homo sapien
caagtcaaattttacctgggagatg

SEQ ID NO: 4834862 - DNA, 25 bp, Homo sapien
tggaaacagctaccaacttacaagt

SEQ ID NO: 4834863 - DNA, 25 bp, Homo sapien
gaaaacctaaccagaaattgcagtg

SEQ ID NO: 4834864 - DNA, 25 bp, Homo sapien
ctagattcagtagttcagagtggtc

SEQ ID NO: 4834865 - DNA, 25 bp, Homo sapien
gccctaactataacatgacgatgaa

SEQ ID NO: 4834866 - DNA, 25 bp, Homo sapien
gagaggtaggacaccccttagtgag

SEQ ID NO: 4834867 - DNA, 25 bp, Homo sapien
ggcccgaggtagcactaatatcttt

SEQ ID NO: 4834868 - DNA, 25 bp, Homo sapien
gatgtaacccactgagctagaagga

SEQ ID NO: 4834869 - DNA, 25 bp, Homo sapien
taaagccttgccgaatgtggaagcc

SEQ ID NO: 4834870 - DNA, 25 bp, Homo sapien
cctcaaaggctgttaatcgtgacca

SEQ ID NO: 4834871 - DNA, 25 bp, Homo sapien
ttctggcttcatgatctggtaagtg

SEQ ID NO: 4834872 - DNA, 25 bp, Homo sapien
catgatctggtaagtgataagatac

SEQ ID NO: 4834873 - DNA, 25 bp, Homo sapien
ctctgcggctgttgcggtctgggaa

SEQ ID NO: 4834874 - DNA, 25 bp, Homo sapien
tctggtaagtgataagatactctgg

SEQ ID NO: 4834875 - DNA, 25 bp, Homo sapien
tactgtcccgaagacctctgtggca

SEQ ID NO: 4834876 - DNA, 25 bp, Homo sapien
tatgataacgagaagtgcagctaca

SEQ ID NO: 4834877 - DNA, 25 bp, Homo sapien
tccagcactgggttgaagccaaaat

SEQ ID NO: 4834878 - DNA, 25 bp, Homo sapien
gagatatgttaaaaggccgcccctg

SEQ ID NO: 4834879 - DNA, 25 bp, Homo sapien
tcttaaatagaaacccaccaggcag

SEQ ID NO: 4834880 - DNA, 25 bp, Homo sapien
tgttctgagcaaagcgcatgaggcc

SEQ ID NO: 4834881 - DNA, 25 bp, Homo sapien
tgagtcaagtatccagcaggccaac

SEQ ID NO: 4834882 - DNA, 25 bp, Homo sapien
aaagggttcttcatacggctacaga

SEQ ID NO: 4834883 - DNA, 25 bp, Homo sapien
gctccggctactctacggcaggatt

SEQ ID NO: 4834884 - DNA, 25 bp, Homo sapien
tctctggcacaggagaccgaaggaa

SEQ ID NO: 4834885 - DNA, 25 bp, Homo sapien
tgggattaggcaggcattagcagca

SEQ ID NO: 4834886 - DNA, 25 bp, Homo sapien
ctttgaaagcctcagacgcccttct

SEQ ID NO: 4834887 - DNA, 25 bp, Homo sapien
ggctagaaaaccacatgcccaggtc

SEQ ID NO: 4834888 - DNA, 25 bp, Homo sapien
gaggcttcgtgcaatctctgggcta

SEQ ID NO: 4834889 - DNA, 25 bp, Homo sapien
ctcctgcagtcgttgaagccccaga

SEQ ID NO: 4834890 - DNA, 25 bp, Homo sapien
gaatacccgatgactctacagactg

SEQ ID NO: 4834891 - DNA, 25 bp, Homo sapien
aatggccaataaaggtgcatcccca

SEQ ID NO: 4834892 - DNA, 25 bp, Homo sapien
tgttcaatggccaataaaggtgcat

SEQ ID NO: 4834893 - DNA, 25 bp, Homo sapien
tcaatggccaataaaggtgcatccc

SEQ ID NO: 4834894 - DNA, 25 bp, Homo sapien
tggccaataaaggtgcatccccaca

SEQ ID NO: 4834895 - DNA, 25 bp, Homo sapien
gatttgccactgtcgtttttataac

SEQ ID NO: 4834896 - DNA, 25 bp, Homo sapien
gccactgtcgtttttataacgttca

SEQ ID NO: 4834897 - DNA, 25 bp, Homo sapien
caccgaaaagcagttgtaatgattt

SEQ ID NO: 4834898 - DNA, 25 bp, Homo sapien
gttgtaatgatttgccactgtcgtt

SEQ ID NO: 4834899 - DNA, 25 bp, Homo sapien
gagatcaacttccttatgcccgtag

SEQ ID NO: 4834900 - DNA, 25 bp, Homo sapien
tgacagagatcaacttccttatgcc

SEQ ID NO: 4834901 - DNA, 25 bp, Homo sapien
ccaccgtactggtaggtattcatta

SEQ ID NO: 4834902 - DNA, 25 bp, Homo sapien
atgcccgtagttcccaccgtactgg

SEQ ID NO: 4834903 - DNA, 25 bp, Homo sapien
ttgcaaatgcaaccgctgctgccat

SEQ ID NO: 4834904 - DNA, 25 bp, Homo sapien
ttagttccagatccgaagccggagg

SEQ ID NO: 4834905 - DNA, 25 bp, Homo sapien
ctcgaagtcggttggaaggaaggcg

SEQ ID NO: 4834906 - DNA, 25 bp, Homo sapien
ggaaggcgcagaaggctctttctgt

SEQ ID NO: 4834907 - DNA, 25 bp, Homo sapien
cctcagggcctggactgcggatata

SEQ ID NO: 4834908 - DNA, 25 bp, Homo sapien
tgagagcacctgacaagcttaagga

SEQ ID NO: 4834909 - DNA, 25 bp, Homo sapien
tctgtgcagcacagatgcggtgtgc

SEQ ID NO: 4834910 - DNA, 25 bp, Homo sapien
caggactcattgtatgtgggtcaac

SEQ ID NO: 4834911 - DNA, 25 bp, Homo sapien
aagagcctttggaagacgtcgctgt

SEQ ID NO: 4834912 - DNA, 25 bp, Homo sapien
gaaaaagcctggatgcgaaaggatg

SEQ ID NO: 4834913 - DNA, 25 bp, Homo sapien
tgctgtggtcccttcctccggcgtt

SEQ ID NO: 4834914 - DNA, 25 bp, Homo sapien
cgtcgctgttatctcattgtctgtg

SEQ ID NO: 4834915 - DNA, 25 bp, Homo sapien
gcacttctgcgcctctaatctcggg

SEQ ID NO: 4834916 - DNA, 25 bp, Homo sapien
tccgaaggtttctcatggcaggcgt

SEQ ID NO: 4834917 - DNA, 25 bp, Homo sapien
cttataggcggattcattctgagtc

SEQ ID NO: 4834918 - DNA, 25 bp, Homo sapien
tccccgaagtaggtctgatgtccgc

SEQ ID NO: 4834919 - DNA, 25 bp, Homo sapien
tgctgaaagggtttgagatcgccat

SEQ ID NO: 4834920 - DNA, 25 bp, Homo sapien
tctacttatattgggacaaacaccc

SEQ ID NO: 4834921 - DNA, 25 bp, Homo sapien
taattgacaagagccgaaatggcct

SEQ ID NO: 4834922 - DNA, 25 bp, Homo sapien
aatggcctcgaagcgagaagggcct

SEQ ID NO: 4834923 - DNA, 25 bp, Homo sapien
caagatgagcggcaaataccctgca

SEQ ID NO: 4834924 - DNA, 25 bp, Homo sapien
tgcagagcctgttacaaaaccattc

SEQ ID NO: 4834925 - DNA, 25 bp, Homo sapien
tcatttaaggcgttcccactcaggc

SEQ ID NO: 4834926 - DNA, 25 bp, Homo sapien
gagttccgaaactatctgcgaaagg

SEQ ID NO: 4834927 - DNA, 25 bp, Homo sapien
acaaatgtcccagcatccgatcagg

SEQ ID NO: 4834928 - DNA, 25 bp, Homo sapien
tttaagaagccatcacaaatgtccc

SEQ ID NO: 4834929 - DNA, 25 bp, Homo sapien
ggtgagtttgatcaggagcatagac

SEQ ID NO: 4834930 - DNA, 25 bp, Homo sapien
gcatagactactcttaagcccaaag

SEQ ID NO: 4834931 - DNA, 25 bp, Homo sapien
tgaaattgctacaaaccacccacat

SEQ ID NO: 4834932 - DNA, 25 bp, Homo sapien
caccactgaaattgctacaaaccac

SEQ ID NO: 4834933 - DNA, 25 bp, Homo sapien
cactgaaattgctacaaaccaccca

SEQ ID NO: 4834934 - DNA, 25 bp, Homo sapien
aaattgctacaaaccacccacatga

SEQ ID NO: 4834935 - DNA, 25 bp, Homo sapien
caaaaatccacttttctagtcccat

SEQ ID NO: 4834936 - DNA, 25 bp, Homo sapien
tctcagtggatcttcctttccccat

SEQ ID NO: 4834937 - DNA, 25 bp, Homo sapien
gataatttgccaataacattccaaa

SEQ ID NO: 4834938 - DNA, 25 bp, Homo sapien
agaactgtaccagccaaactgccag

SEQ ID NO: 4834939 - DNA, 25 bp, Homo sapien
accaaactaggcaagttgtctacac

SEQ ID NO: 4834940 - DNA, 25 bp, Homo sapien
caagttgtctacacagactcctttg

SEQ ID NO: 4834941 - DNA, 25 bp, Homo sapien
aactaggcaagttgtctacacagac

SEQ ID NO: 4834942 - DNA, 25 bp, Homo sapien
taggcaagttgtctacacagactcc

SEQ ID NO: 4834943 - DNA, 25 bp, Homo sapien
agacacagccatagcgcgagaacca

SEQ ID NO: 4834944 - DNA, 25 bp, Homo sapien
ccaccagattagcaagaatcccaga

SEQ ID NO: 4834945 - DNA, 25 bp, Homo sapien
cagagacacagccatagcgcgagaa

SEQ ID NO: 4834946 - DNA, 25 bp, Homo sapien
cagattagcaagaatcccagagaca

SEQ ID NO: 4834947 - DNA, 25 bp, Homo sapien
tcttctagtgccaatctcctttctc

SEQ ID NO: 4834948 - DNA, 25 bp, Homo sapien
tggtgccctgcaaacacatccagaa

SEQ ID NO: 4834949 - DNA, 25 bp, Homo sapien
accaggcaaatgtgactcacgttga

SEQ ID NO: 4834950 - DNA, 25 bp, Homo sapien
tgactcacgttgataatggaaatcc

SEQ ID NO: 4834951 - DNA, 25 bp, Homo sapien
gggtgatgccatcaccattgccacc

SEQ ID NO: 4834952 - DNA, 25 bp, Homo sapien
attgggtgatgccatcaccattgcc

SEQ ID NO: 4834953 - DNA, 25 bp, Homo sapien
tgggtgatgccatcaccattgccac

SEQ ID NO: 4834954 - DNA, 25 bp, Homo sapien
ggtgatgccatcaccattgccacca

SEQ ID NO: 4834955 - DNA, 25 bp, Homo sapien
cagaaggcagttagtgtcgctccac

SEQ ID NO: 4834956 - DNA, 25 bp, Homo sapien
tctggactggagttgtgccatacgg

SEQ ID NO: 4834957 - DNA, 25 bp, Homo sapien
tggtgactctgaacgtgaggagcta

SEQ ID NO: 4834958 - DNA, 25 bp, Homo sapien
gcgataccgcatctcagaagccagg

SEQ ID NO: 4834959 - DNA, 25 bp, Homo sapien
cacatacagagaaatcctaggcaaa

SEQ ID NO: 4834960 - DNA, 25 bp, Homo sapien
cctaggcaaatctatgatggttaca

SEQ ID NO: 4834961 - DNA, 25 bp, Homo sapien
tgaagcaagtaccaaccctgaagtg

SEQ ID NO: 4834962 - DNA, 25 bp, Homo sapien
ccttgccttacagagtgaagaatca

SEQ ID NO: 4834963 - DNA, 25 bp, Homo sapien
ctccacgcagctgttgcttctgttc

SEQ ID NO: 4834964 - DNA, 25 bp, Homo sapien
ttctgttcccaggagcccattattc

SEQ ID NO: 4834965 - DNA, 25 bp, Homo sapien
ttcccaggagcccattattccacat

SEQ ID NO: 4834966 - DNA, 25 bp, Homo sapien
cctccacgcagctgttgcttctgtt

SEQ ID NO: 4834967 - DNA, 25 bp, Homo sapien
cagggtctccatagctaagttccct

SEQ ID NO: 4834968 - DNA, 25 bp, Homo sapien
gggtctccatagctaagttcccttg

SEQ ID NO: 4834969 - DNA, 25 bp, Homo sapien
ggtctccatagctaagttcccttga

SEQ ID NO: 4834970 - DNA, 25 bp, Homo sapien
ctccatagctaagttcccttgacat

SEQ ID NO: 4834971 - DNA, 25 bp, Homo sapien
agtaccattatccagcttcagtggc

SEQ ID NO: 4834972 - DNA, 25 bp, Homo sapien
tgtctgtggtatcctgagtgtccgg

SEQ ID NO: 4834973 - DNA, 25 bp, Homo sapien
aaaggccccgtctgcattcctggaa

SEQ ID NO: 4834974 - DNA, 25 bp, Homo sapien
gctgcatgagtggtctccccagaaa

SEQ ID NO: 4834975 - DNA, 25 bp, Homo sapien
gtttttcgtttaccagaatagctgc

SEQ ID NO: 4834976 - DNA, 25 bp, Homo sapien
ccagaatagctgcaagaaaagttat

SEQ ID NO: 4834977 - DNA, 25 bp, Homo sapien
cacctttttggcaccgtggacgagt

SEQ ID NO: 4834978 - DNA, 25 bp, Homo sapien
cagccacatctaacttgggaaggtg

SEQ ID NO: 4834979 - DNA, 25 bp, Homo sapien
acagagaacaagtgcgctcctgtcg

SEQ ID NO: 4834980 - DNA, 25 bp, Homo sapien
tctcgggacgaagttctcggacaga

SEQ ID NO: 4834981 - DNA, 25 bp, Homo sapien
tgtggcccggcgagttcctgaggtt

SEQ ID NO: 4834982 - DNA, 25 bp, Homo sapien
gaggccgcccgtaatcgaggttgcc

SEQ ID NO: 4834983 - DNA, 25 bp, Homo sapien
gcaagccctccgggtggccgagagc

SEQ ID NO: 4834984 - DNA, 25 bp, Homo sapien
aagccctccgggtggccgagagcat

SEQ ID NO: 4834985 - DNA, 25 bp, Homo sapien
gctggcaagccctccgggtggccga

SEQ ID NO: 4834986 - DNA, 25 bp, Homo sapien
cctcgggacgggaaagaggctgtgg

SEQ ID NO: 4834987 - DNA, 25 bp, Homo sapien
gacgatgttcgaggccgagttgccc

SEQ ID NO: 4834988 - DNA, 25 bp, Homo sapien
gggctgacgatgttcgaggccgagt

SEQ ID NO: 4834989 - DNA, 25 bp, Homo sapien
cctgggggctgacgatgttcgaggc

SEQ ID NO: 4834990 - DNA, 25 bp, Homo sapien
gctacaggggtctgttccttccggc

SEQ ID NO: 4834991 - DNA, 25 bp, Homo sapien
taacgtgtggccctcgttctgggaa

SEQ ID NO: 4834992 - DNA, 25 bp, Homo sapien
tctgggaaacgcgtgctgtctgcag

SEQ ID NO: 4834993 - DNA, 25 bp, Homo sapien
gcctgagacgcagttccacacttaa

SEQ ID NO: 4834994 - DNA, 25 bp, Homo sapien
tacatggcatcgaagcacgtgaaca

SEQ ID NO: 4834995 - DNA, 25 bp, Homo sapien
tgaacgggaagtatagcacaagctg

SEQ ID NO: 4834996 - DNA, 25 bp, Homo sapien
aagtctggcatttgaaaagtatcgc

SEQ ID NO: 4834997 - DNA, 25 bp, Homo sapien
gcatagcaaagacacggcagtgtgt

SEQ ID NO: 4834998 - DNA, 25 bp, Homo sapien
aaacttttacggctgagtagcaggt

SEQ ID NO: 4834999 - DNA, 25 bp, Homo sapien
ctggcccagatacagagatgtgttg

SEQ ID NO: 4835000 - DNA, 25 bp, Homo sapien
cactcacagctatatggagacagca

SEQ ID NO: 4835001 - DNA, 25 bp, Homo sapien
cattgtaggcttggccctacaccaa

SEQ ID NO: 4835002 - DNA, 25 bp, Homo sapien
tcttgaccttgaaccagtttggaaa

SEQ ID NO: 4835003 - DNA, 25 bp, Homo sapien
cctcttttgtagttctcgaattgct

SEQ ID NO: 4835004 - DNA, 25 bp, Homo sapien
gtagttctcgaattgctttgtctga

SEQ ID NO: 4835005 - DNA, 25 bp, Homo sapien
gaattgctttgtctgatcacactgg

SEQ ID NO: 4835006 - DNA, 25 bp, Homo sapien
gctttgtctgatcacactggctgta

SEQ ID NO: 4835007 - DNA, 25 bp, Homo sapien
caatcccaagaggttacatactata

SEQ ID NO: 4835008 - DNA, 25 bp, Homo sapien
caatctagatatccttcaatgtgtg

SEQ ID NO: 4835009 - DNA, 25 bp, Homo sapien
accaactggggtgaatctcagggaa

SEQ ID NO: 4835010 - DNA, 25 bp, Homo sapien
agcactggtacattaaccaactggg

SEQ ID NO: 4835011 - DNA, 25 bp, Homo sapien
cagaatgcagcaaacccaataaatc

SEQ ID NO: 4835012 - DNA, 25 bp, Homo sapien
gcataaatgagtctccatatcttgg

SEQ ID NO: 4835013 - DNA, 25 bp, Homo sapien
gcatcacactccacggcataaatga

SEQ ID NO: 4835014 - DNA, 25 bp, Homo sapien
tctccatatcttggtattaggaaaa

SEQ ID NO: 4835015 - DNA, 25 bp, Homo sapien
gtaagcacatgacgcacagctctga

SEQ ID NO: 4835016 - DNA, 25 bp, Homo sapien
tcgcagtccagacgtgaagtccctg

SEQ ID NO: 4835017 - DNA, 25 bp, Homo sapien
tgtgcacctacagcttagccacgtg

SEQ ID NO: 4835018 - DNA, 25 bp, Homo sapien
cactctatcggagctgggtggagac

SEQ ID NO: 4835019 - DNA, 25 bp, Homo sapien
atggctgtggccgaccatccatttc

SEQ ID NO: 4835020 - DNA, 25 bp, Homo sapien
caaatgcaatggctgtggccgacca

SEQ ID NO: 4835021 - DNA, 25 bp, Homo sapien
tgttggcaaaagcttttggttgtca

SEQ ID NO: 4835022 - DNA, 25 bp, Homo sapien
tgcccatcattgttggcaaaagctt

SEQ ID NO: 4835023 - DNA, 25 bp, Homo sapien
tgccaaaaagtctactgcatttgga

SEQ ID NO: 4835024 - DNA, 25 bp, Homo sapien
gccaaaaagtctactgcatttggag

SEQ ID NO: 4835025 - DNA, 25 bp, Homo sapien
ccaaaaagtctactgcatttggaga

SEQ ID NO: 4835026 - DNA, 25 bp, Homo sapien
tcctccagcaggcaatatgttaggc

SEQ ID NO: 4835027 - DNA, 25 bp, Homo sapien
tcagcaaagacactgcaagagtact

SEQ ID NO: 4835028 - DNA, 25 bp, Homo sapien
ctggccagaatgtacatacttaagg

SEQ ID NO: 4835029 - DNA, 25 bp, Homo sapien
tatgttaggctataaaatgaacctc

SEQ ID NO: 4835030 - DNA, 25 bp, Homo sapien
tctttcctgaagctcaagccgagaa

SEQ ID NO: 4835031 - DNA, 25 bp, Homo sapien
gttctgaacacattccgaaggatgt

SEQ ID NO: 4835032 - DNA, 25 bp, Homo sapien
gactaaacgtcattgtatgtaccaa

SEQ ID NO: 4835033 - DNA, 25 bp, Homo sapien
gacactatggaagcttcgttttgaa

SEQ ID NO: 4835034 - DNA, 25 bp, Homo sapien
gtttaggacagcatgaagcagcaga

SEQ ID NO: 4835035 - DNA, 25 bp, Homo sapien
tgtagtttaggacagcatgaagcag

SEQ ID NO: 4835036 - DNA, 25 bp, Homo sapien
taggacagcatgaagcagcagaaat

SEQ ID NO: 4835037 - DNA, 25 bp, Homo sapien
gggatgtagtttaggacagcatgaa

SEQ ID NO: 4835038 - DNA, 25 bp, Homo sapien
caagcgaagtctggtgtcttcagct

SEQ ID NO: 4835039 - DNA, 25 bp, Homo sapien
tcaagcgaagtctggtgtcttcagc

SEQ ID NO: 4835040 - DNA, 25 bp, Homo sapien
tttccttctcacaatgagaattcac

SEQ ID NO: 4835041 - DNA, 25 bp, Homo sapien
tctcacaatgagaattcactaatcg

SEQ ID NO: 4835042 - DNA, 25 bp, Homo sapien
ccttctcacaatgagaattcactaa

SEQ ID NO: 4835043 - DNA, 25 bp, Homo sapien
ctcacaatgagaattcactaatcgc

SEQ ID NO: 4835044 - DNA, 25 bp, Homo sapien
tttaaggcgcgcaataatggaaagc

SEQ ID NO: 4835045 - DNA, 25 bp, Homo sapien
aacattttgagagagccaggctaca

SEQ ID NO: 4835046 - DNA, 25 bp, Homo sapien
ccattttaggagtatcagcgacgta

SEQ ID NO: 4835047 - DNA, 25 bp, Homo sapien
ggtgatccacagtaacacatgcctt

SEQ ID NO: 4835048 - DNA, 25 bp, Homo sapien
aaagcttgcacaaagacgtgtctat

SEQ ID NO: 4835049 - DNA, 25 bp, Homo sapien
tctgagttcgctgcaaagaagttaa

SEQ ID NO: 4835050 - DNA, 25 bp, Homo sapien
ttagcaaacctaaatggcaagaagt

SEQ ID NO: 4835051 - DNA, 25 bp, Homo sapien
taatgtgtaggccagagagaatttc

SEQ ID NO: 4835052 - DNA, 25 bp, Homo sapien
ataacagtatcaactatgggtagcc

SEQ ID NO: 4835053 - DNA, 25 bp, Homo sapien
tccagtctcatagcatagtacccaa

SEQ ID NO: 4835054 - DNA, 25 bp, Homo sapien
tcagagaaggtttgttaacacagaa

SEQ ID NO: 4835055 - DNA, 25 bp, Homo sapien
tgtccaggttactgcacccagtaca

SEQ ID NO: 4835056 - DNA, 25 bp, Homo sapien
tgcactccagcccaggcgacgagag

SEQ ID NO: 4835057 - DNA, 25 bp, Homo sapien
cactccagcccaggcgacgagagca

SEQ ID NO: 4835058 - DNA, 25 bp, Homo sapien
attgcactccagcccaggcgacgag

SEQ ID NO: 4835059 - DNA, 25 bp, Homo sapien
tccagcccaggcgacgagagcaaaa

SEQ ID NO: 4835060 - DNA, 25 bp, Homo sapien
gaagctcctggtgagctcggctcac

SEQ ID NO: 4835061 - DNA, 25 bp, Homo sapien
acaagtaggcatggatcctccctcc

SEQ ID NO: 4835062 - DNA, 25 bp, Homo sapien
tcctttacggatcccaactagatag

SEQ ID NO: 4835063 - DNA, 25 bp, Homo sapien
cactgactaagcttcctacaggaag

SEQ ID NO: 4835064 - DNA, 25 bp, Homo sapien
tccaggcatacaggtagcatgatac

SEQ ID NO: 4835065 - DNA, 25 bp, Homo sapien
gagatatcaaccagaccaaccaatg

SEQ ID NO: 4835066 - DNA, 25 bp, Homo sapien
tatatttgataagactaaggccctc

SEQ ID NO: 4835067 - DNA, 25 bp, Homo sapien
catcaagggagtgttaacgagatct

SEQ ID NO: 4835068 - DNA, 25 bp, Homo sapien
catcttcaactgacaaagtgtaaaa

SEQ ID NO: 4835069 - DNA, 25 bp, Homo sapien
tccactgtaatgaagctgaattaag

SEQ ID NO: 4835070 - DNA, 25 bp, Homo sapien
aatttcaaatggacttctttgcaca

SEQ ID NO: 4835071 - DNA, 25 bp, Homo sapien
cttgatctcaacaccctgctaagaa

SEQ ID NO: 4835072 - DNA, 25 bp, Homo sapien
aagtcacttcttggattcatgtttt

SEQ ID NO: 4835073 - DNA, 25 bp, Homo sapien
tgaaatctcggccgggtacgatggc

SEQ ID NO: 4835074 - DNA, 25 bp, Homo sapien
ttggaactcaagtcacttcttggat

SEQ ID NO: 4835075 - DNA, 25 bp, Homo sapien
aaatgaaatctcggccgggtacgat

SEQ ID NO: 4835076 - DNA, 25 bp, Homo sapien
ccttgtggactcagaatatggagac

SEQ ID NO: 4835077 - DNA, 25 bp, Homo sapien
gggtgggcccaacattattactgtc

SEQ ID NO: 4835078 - DNA, 25 bp, Homo sapien
gatgacacgtagcatgttcagctgt

SEQ ID NO: 4835079 - DNA, 25 bp, Homo sapien
gaaaggctggttctagatgacacgt

SEQ ID NO: 4835080 - DNA, 25 bp, Homo sapien
agagagctgttcatttccttaaagc

SEQ ID NO: 4835081 - DNA, 25 bp, Homo sapien
tgtagagagctgttcatttccttaa

SEQ ID NO: 4835082 - DNA, 25 bp, Homo sapien
catcaaaggtgtaaggcccttgttt

SEQ ID NO: 4835083 - DNA, 25 bp, Homo sapien
gtcttatcatcaaaggtgtaaggcc

SEQ ID NO: 4835084 - DNA, 25 bp, Homo sapien
ctacttcagatacttcagacttcac

SEQ ID NO: 4835085 - DNA, 25 bp, Homo sapien
tacttcagacttcacatagtgcatt

SEQ ID NO: 4835086 - DNA, 25 bp, Homo sapien
gacttcacatagtgcattctctcat

SEQ ID NO: 4835087 - DNA, 25 bp, Homo sapien
tacttcagatacttcagacttcaca

SEQ ID NO: 4835088 - DNA, 25 bp, Homo sapien
tctccacaatctgaacttctatatt

SEQ ID NO: 4835089 - DNA, 25 bp, Homo sapien
caatctgaacttctatattttgaac

SEQ ID NO: 4835090 - DNA, 25 bp, Homo sapien
tctgaacttctatattttgaaccat

SEQ ID NO: 4835091 - DNA, 25 bp, Homo sapien
ccacaatctgaacttctatattttg

SEQ ID NO: 4835092 - DNA, 25 bp, Homo sapien
tatgcagtattgtgtggaaagtgcc

SEQ ID NO: 4835093 - DNA, 25 bp, Homo sapien
ggatcagtaagaggcacgctgttcc

SEQ ID NO: 4835094 - DNA, 25 bp, Homo sapien
ggtccaacacggtaaggatcagtaa

SEQ ID NO: 4835095 - DNA, 25 bp, Homo sapien
cgctgttccgatacgtatgcagtat

SEQ ID NO: 4835096 - DNA, 25 bp, Homo sapien
caatcctctgtagcatgctgccagg

SEQ ID NO: 4835097 - DNA, 25 bp, Homo sapien
catttcccgaagttctcacactgag

SEQ ID NO: 4835098 - DNA, 25 bp, Homo sapien
caatcagcggctggtcgtaccattt

SEQ ID NO: 4835099 - DNA, 25 bp, Homo sapien
tcatgtggagaccaaatgtcaaagg

SEQ ID NO: 4835100 - DNA, 25 bp, Homo sapien
ttcgactgttctgttgccattgaca

SEQ ID NO: 4835101 - DNA, 25 bp, Homo sapien
ctctgggaaaggttcgactgttctg

SEQ ID NO: 4835102 - DNA, 25 bp, Homo sapien
ggttcgactgttctgttgccattga

SEQ ID NO: 4835103 - DNA, 25 bp, Homo sapien
gaaaggttcgactgttctgttgcca

SEQ ID NO: 4835104 - DNA, 25 bp, Homo sapien
ccagattttgaagccctgagaacac

SEQ ID NO: 4835105 - DNA, 25 bp, Homo sapien
tttggcactagtctttgcacacaat

SEQ ID NO: 4835106 - DNA, 25 bp, Homo sapien
atttggcactagtctttgcacacaa

SEQ ID NO: 4835107 - DNA, 25 bp, Homo sapien
aatttggcactagtctttgcacaca

SEQ ID NO: 4835108 - DNA, 25 bp, Homo sapien
actgacttgaaagacagcatcacac

SEQ ID NO: 4835109 - DNA, 25 bp, Homo sapien
gaccaagcctattaccttcgttctc

SEQ ID NO: 4835110 - DNA, 25 bp, Homo sapien
catcacacacaggtaggagaagccc

SEQ ID NO: 4835111 - DNA, 25 bp, Homo sapien
taattgcaaaatgtgtggctccact

SEQ ID NO: 4835112 - DNA, 25 bp, Homo sapien
atgctggatatgtgccagtgagaca

SEQ ID NO: 4835113 - DNA, 25 bp, Homo sapien
gctggatatgtgccagtgagacacc

SEQ ID NO: 4835114 - DNA, 25 bp, Homo sapien
tgctggatatgtgccagtgagacac

SEQ ID NO: 4835115 - DNA, 25 bp, Homo sapien
cccctaaagttcaggagtctgcaga

SEQ ID NO: 4835116 - DNA, 25 bp, Homo sapien
acaggtctccggcaaaagcattcac

SEQ ID NO: 4835117 - DNA, 25 bp, Homo sapien
cacataaatgaccacgagagctcca

SEQ ID NO: 4835118 - DNA, 25 bp, Homo sapien
tgtgctgcacaacgactaacagcga

SEQ ID NO: 4835119 - DNA, 25 bp, Homo sapien
taggatttgaagtatagcctcctgc

SEQ ID NO: 4835120 - DNA, 25 bp, Homo sapien
gcagacttctttataagtaggattt

SEQ ID NO: 4835121 - DNA, 25 bp, Homo sapien
tgagttgaatacactcctttcaaga

SEQ ID NO: 4835122 - DNA, 25 bp, Homo sapien
tagcctcctgcaaaaccaacttgag

SEQ ID NO: 4835123 - DNA, 25 bp, Homo sapien
atcttacgaggaaaagttgtgcagc

SEQ ID NO: 4835124 - DNA, 25 bp, Homo sapien
ttacaagagaggaaacgggctcagg

SEQ ID NO: 4835125 - DNA, 25 bp, Homo sapien
tctgggcctcagatttcccgtgctg

SEQ ID NO: 4835126 - DNA, 25 bp, Homo sapien
gaacagcctgcttgaaaatccaccg

SEQ ID NO: 4835127 - DNA, 25 bp, Homo sapien
ttgagagagataagcgtttttatcc

SEQ ID NO: 4835128 - DNA, 25 bp, Homo sapien
gataagcgtttttatcctgcctgct

SEQ ID NO: 4835129 - DNA, 25 bp, Homo sapien
tatcctgcctgctacaagtttaagg

SEQ ID NO: 4835130 - DNA, 25 bp, Homo sapien
gcctgctacaagtttaaggtccaat

SEQ ID NO: 4835131 - DNA, 25 bp, Homo sapien
tcaaacatcattacctctggagctc

SEQ ID NO: 4835132 - DNA, 25 bp, Homo sapien
agttcaaacatcattacctctggag

SEQ ID NO: 4835133 - DNA, 25 bp, Homo sapien
cgagttcaaacatcattacctctgg

SEQ ID NO: 4835134 - DNA, 25 bp, Homo sapien
caaacatcattacctctggagctcc

SEQ ID NO: 4835135 - DNA, 25 bp, Homo sapien
tgacaggggcactggtgtgacagtc

SEQ ID NO: 4835136 - DNA, 25 bp, Homo sapien
gggcactggtgtgacagtcgccagc

SEQ ID NO: 4835137 - DNA, 25 bp, Homo sapien
cactggtgtgacagtcgccagcagc

SEQ ID NO: 4835138 - DNA, 25 bp, Homo sapien
actggtgtgacagtcgccagcagct

SEQ ID NO: 4835139 - DNA, 25 bp, Homo sapien
tctctgctgcgctgacctggctgga

SEQ ID NO: 4835140 - DNA, 25 bp, Homo sapien
tggagacatcagtcccatcaagcat

SEQ ID NO: 4835141 - DNA, 25 bp, Homo sapien
gctgcgctgacctggctggagacat

SEQ ID NO: 4835142 - DNA, 25 bp, Homo sapien
gctggagacatcagtcccatcaagc

SEQ ID NO: 4835143 - DNA, 25 bp, Homo sapien
tgaattaactcttcttgtaactgca

SEQ ID NO: 4835144 - DNA, 25 bp, Homo sapien
gaattaactcttcttgtaactgcat

SEQ ID NO: 4835145 - DNA, 25 bp, Homo sapien
ctgtgaattaactcttcttgtaact

SEQ ID NO: 4835146 - DNA, 25 bp, Homo sapien
gtgaattaactcttcttgtaactgc

SEQ ID NO: 4835147 - DNA, 25 bp, Homo sapien
cgggcagagcccgagtcaggaacac

SEQ ID NO: 4835148 - DNA, 25 bp, Homo sapien
atggaagaagccgagaggagcagca

SEQ ID NO: 4835149 - DNA, 25 bp, Homo sapien
cgagctgggtggcaccgactgccat

SEQ ID NO: 4835150 - DNA, 25 bp, Homo sapien
tcaggaacaccagcgagctgggtgg

SEQ ID NO: 4835151 - DNA, 25 bp, Homo sapien
atcaggactgtgaacagcagaacac

SEQ ID NO: 4835152 - DNA, 25 bp, Homo sapien
caggactgtgaacagcagaacaccc

SEQ ID NO: 4835153 - DNA, 25 bp, Homo sapien
ccaaatcaggactgtgaacagcaga

SEQ ID NO: 4835154 - DNA, 25 bp, Homo sapien
aaatcaggactgtgaacagcagaac

SEQ ID NO: 4835155 - DNA, 25 bp, Homo sapien
tgtcttgcagtgtttatgtcccgtc

SEQ ID NO: 4835156 - DNA, 25 bp, Homo sapien
tctgatgcattctcagtgacgcagg

SEQ ID NO: 4835157 - DNA, 25 bp, Homo sapien
tgtcccgtccaaccgaaatgacttg

SEQ ID NO: 4835158 - DNA, 25 bp, Homo sapien
tcagtgacgcaggtccaggcctctt

SEQ ID NO: 4835159 - DNA, 25 bp, Homo sapien
cgcttgtgtacgtgtgccgctagag

SEQ ID NO: 4835160 - DNA, 25 bp, Homo sapien
gagatccctcaaccagaagtggagc

SEQ ID NO: 4835161 - DNA, 25 bp, Homo sapien
caggctacgtgaccagtccatctgt

SEQ ID NO: 4835162 - DNA, 25 bp, Homo sapien
tcattactaaccaggatgccgtgcc

SEQ ID NO: 4835163 - DNA, 25 bp, Homo sapien
gcactggctttagcccaggcagcca

SEQ ID NO: 4835164 - DNA, 25 bp, Homo sapien
cactggctttagcccaggcagccat

SEQ ID NO: 4835165 - DNA, 25 bp, Homo sapien
aatccatcgacattggctagaactc

SEQ ID NO: 4835166 - DNA, 25 bp, Homo sapien
caataaaggcgttggagaagcattc

SEQ ID NO: 4835167 - DNA, 25 bp, Homo sapien
gcaaattgcattttgtggtaacaat

SEQ ID NO: 4835168 - DNA, 25 bp, Homo sapien
caactgccaataaaggcgttggaga

SEQ ID NO: 4835169 - DNA, 25 bp, Homo sapien
caaaggcttcaattttcgaaataat

SEQ ID NO: 4835170 - DNA, 25 bp, Homo sapien
gcaagtcaaaggcttcaattttcga

SEQ ID NO: 4835171 - DNA, 25 bp, Homo sapien
atgggcagactgctccattgaggca

SEQ ID NO: 4835172 - DNA, 25 bp, Homo sapien
taattttgggcttaatgccttggag

SEQ ID NO: 4835173 - DNA, 25 bp, Homo sapien
cacttcaaacaccgtggctgcttgc

SEQ ID NO: 4835174 - DNA, 25 bp, Homo sapien
gtggtctgtgtagatccccaggtcc

SEQ ID NO: 4835175 - DNA, 25 bp, Homo sapien
tcaacgacttcctctgacaagaacc

SEQ ID NO: 4835176 - DNA, 25 bp, Homo sapien
ttcctctgacaagaacctttgtcca

SEQ ID NO: 4835177 - DNA, 25 bp, Homo sapien
cctgtcaacgacttcctctgacaag

SEQ ID NO: 4835178 - DNA, 25 bp, Homo sapien
cctttgtccaccagagtccatgaga

SEQ ID NO: 4835179 - DNA, 25 bp, Homo sapien
ctttgattcttccaggttaggataa

SEQ ID NO: 4835180 - DNA, 25 bp, Homo sapien
caggttaggataattagattttgct

SEQ ID NO: 4835181 - DNA, 25 bp, Homo sapien
taggataattagattttgctactgt

SEQ ID NO: 4835182 - DNA, 25 bp, Homo sapien
gattcttccaggttaggataattag

SEQ ID NO: 4835183 - DNA, 25 bp, Homo sapien
catcactaatcatccggctccagaa

SEQ ID NO: 4835184 - DNA, 25 bp, Homo sapien
tccatcaacgaacatgtgggttgcc

SEQ ID NO: 4835185 - DNA, 25 bp, Homo sapien
gactgtcttacttaactcggcgtaa

SEQ ID NO: 4835186 - DNA, 25 bp, Homo sapien
tattttgccagagacatatggtccc

SEQ ID NO: 4835187 - DNA, 25 bp, Homo sapien
gtgttctggctggtacaccactcgg

SEQ ID NO: 4835188 - DNA, 25 bp, Homo sapien
cttgggtcgggtcgtgattctccca

SEQ ID NO: 4835189 - DNA, 25 bp, Homo sapien
cgtgattctcccagaagaccttgag

SEQ ID NO: 4835190 - DNA, 25 bp, Homo sapien
tggtacaccactcggacgacttctg

SEQ ID NO: 4835191 - DNA, 25 bp, Homo sapien
accaccctgatttatgatcctcact

SEQ ID NO: 4835192 - DNA, 25 bp, Homo sapien
tcaccaccctgatttatgatcctca

SEQ ID NO: 4835193 - DNA, 25 bp, Homo sapien
gatttatgatcctcactgcagagct

SEQ ID NO: 4835194 - DNA, 25 bp, Homo sapien
accctgatttatgatcctcactgca

SEQ ID NO: 4835195 - DNA, 25 bp, Homo sapien
catgtcttcactgataattttggag

SEQ ID NO: 4835196 - DNA, 25 bp, Homo sapien
aattttggagctcttatcatcttcc

SEQ ID NO: 4835197 - DNA, 25 bp, Homo sapien
tgggcctctgatacatgtcttcact

SEQ ID NO: 4835198 - DNA, 25 bp, Homo sapien
acagtcaaatggctgaacgtctgct

SEQ ID NO: 4835199 - DNA, 25 bp, Homo sapien
aatccaacctgctgctctctttcaa

SEQ ID NO: 4835200 - DNA, 25 bp, Homo sapien
tctgagtaagaacagtcagtcttac

SEQ ID NO: 4835201 - DNA, 25 bp, Homo sapien
gctctctttcaaaatgtccattttc

SEQ ID NO: 4835202 - DNA, 25 bp, Homo sapien
gtcagtcttacatatcttcaccacc

SEQ ID NO: 4835203 - DNA, 25 bp, Homo sapien
ttctactacagtaagaccattgaca

SEQ ID NO: 4835204 - DNA, 25 bp, Homo sapien
gcaaatatcactgtagatactgctt

SEQ ID NO: 4835205 - DNA, 25 bp, Homo sapien
aaatatcactgtagatactgcttct

SEQ ID NO: 4835206 - DNA, 25 bp, Homo sapien
ctactacagtaagaccattgacatc

SEQ ID NO: 4835207 - DNA, 25 bp, Homo sapien
gctaatccgtggagtggcatcctct

SEQ ID NO: 4835208 - DNA, 25 bp, Homo sapien
tgaccacatgagtaatgatgctagc

SEQ ID NO: 4835209 - DNA, 25 bp, Homo sapien
tccttaggctaatccgtggagtggc

SEQ ID NO: 4835210 - DNA, 25 bp, Homo sapien
gtaatgatgctagcatgtctgtcat

SEQ ID NO: 4835211 - DNA, 25 bp, Homo sapien
aaacccaacagcatagacggtgcag

SEQ ID NO: 4835212 - DNA, 25 bp, Homo sapien
tgcagcccacggggggcaaaccaga

SEQ ID NO: 4835213 - DNA, 25 bp, Homo sapien
gtaaggccaggatgtgtggccctgg

SEQ ID NO: 4835214 - DNA, 25 bp, Homo sapien
tcacggtaaggccaggatgtgtggc

SEQ ID NO: 4835215 - DNA, 25 bp, Homo sapien
gcaccaaaggctacctgcatgctgc

SEQ ID NO: 4835216 - DNA, 25 bp, Homo sapien
tgcaccaaaggctacctgcatgctg

SEQ ID NO: 4835217 - DNA, 25 bp, Homo sapien
caccaaaggctacctgcatgctgca

SEQ ID NO: 4835218 - DNA, 25 bp, Homo sapien
ggtagatggccgagcggtactgagt

SEQ ID NO: 4835219 - DNA, 25 bp, Homo sapien
ccgagcggtactgagtgccatggtc

SEQ ID NO: 4835220 - DNA, 25 bp, Homo sapien
gccatggtcgttcccctggcgcata

SEQ ID NO: 4835221 - DNA, 25 bp, Homo sapien
tttgcttggcagaggtcgggtagat

SEQ ID NO: 4835222 - DNA, 25 bp, Homo sapien
tgggataagccatagtgagagcaga

SEQ ID NO: 4835223 - DNA, 25 bp, Homo sapien
ataagccatagtgagagcagagggc

SEQ ID NO: 4835224 - DNA, 25 bp, Homo sapien
ggataagccatagtgagagcagagg

SEQ ID NO: 4835225 - DNA, 25 bp, Homo sapien
aagccatagtgagagcagagggcca

SEQ ID NO: 4835226 - DNA, 25 bp, Homo sapien
tgatgggcaggaacccatgttccgt

SEQ ID NO: 4835227 - DNA, 25 bp, Homo sapien
cccggtgcagcactctgatgggcag

SEQ ID NO: 4835228 - DNA, 25 bp, Homo sapien
gtggccgtcccatgttccatggccg

SEQ ID NO: 4835229 - DNA, 25 bp, Homo sapien
caggaacccatgttccgtggccgtc

SEQ ID NO: 4835230 - DNA, 25 bp, Homo sapien
cacaaagagacactttggttcctga

SEQ ID NO: 4835231 - DNA, 25 bp, Homo sapien
aagagacactttggttcctgaaaag

SEQ ID NO: 4835232 - DNA, 25 bp, Homo sapien
gagacactttggttcctgaaaagga

SEQ ID NO: 4835233 - DNA, 25 bp, Homo sapien
caggatggggtacacaaagagacac

SEQ ID NO: 4835234 - DNA, 25 bp, Homo sapien
ccaggagtgttaagaaatgaccctc

SEQ ID NO: 4835235 - DNA, 25 bp, Homo sapien
gagttctagaccataatccaggagt

SEQ ID NO: 4835236 - DNA, 25 bp, Homo sapien
caaatgtcccgaatgtagtgatggg

SEQ ID NO: 4835237 - DNA, 25 bp, Homo sapien
tcccagcagcgctcaaagaagacaa

SEQ ID NO: 4835238 - DNA, 25 bp, Homo sapien
tggtatccacaacccagccaacttt

SEQ ID NO: 4835239 - DNA, 25 bp, Homo sapien
aagcagaatccagcatgttcaaggt

SEQ ID NO: 4835240 - DNA, 25 bp, Homo sapien
caaaactctgacagtcgctggtgag

SEQ ID NO: 4835241 - DNA, 25 bp, Homo sapien
ggtcagcaaacccagcgtgaagttc

SEQ ID NO: 4835242 - DNA, 25 bp, Homo sapien
cccctccattttatgcaaagttgta

SEQ ID NO: 4835243 - DNA, 25 bp, Homo sapien
ggttagggttgctcaccaaagatat

SEQ ID NO: 4835244 - DNA, 25 bp, Homo sapien
tatgcaaagttgtattagggttagg

SEQ ID NO: 4835245 - DNA, 25 bp, Homo sapien
agaaaagattatcaagtcttctcct

SEQ ID NO: 4835246 - DNA, 25 bp, Homo sapien
gactgataccggcatctgcacaggg

SEQ ID NO: 4835247 - DNA, 25 bp, Homo sapien
ctccttgatcctcacaagaatgctg

SEQ ID NO: 4835248 - DNA, 25 bp, Homo sapien
ttccaccatcaacctgggcagtagg

SEQ ID NO: 4835249 - DNA, 25 bp, Homo sapien
ttctgatgtacttggatggaactca

SEQ ID NO: 4835250 - DNA, 25 bp, Homo sapien
atggcgcagggcactagacctaagg

SEQ ID NO: 4835251 - DNA, 25 bp, Homo sapien
ggacacgagagccttttattcctcc

SEQ ID NO: 4835252 - DNA, 25 bp, Homo sapien
catagcaacgggaagatggctcggc

SEQ ID NO: 4835253 - DNA, 25 bp, Homo sapien
ttcctcctcgcttgcagccaatggg

SEQ ID NO: 4835254 - DNA, 25 bp, Homo sapien
ctgatgacattgaccctgaccgttt

SEQ ID NO: 4835255 - DNA, 25 bp, Homo sapien
atgacattgaccctgaccgtttctg

SEQ ID NO: 4835256 - DNA, 25 bp, Homo sapien
tgatgacattgaccctgaccgtttc

SEQ ID NO: 4835257 - DNA, 25 bp, Homo sapien
gctgatgacattgaccctgaccgtt

SEQ ID NO: 4835258 - DNA, 25 bp, Homo sapien
ccaggcgagttgagcagaggaggct

SEQ ID NO: 4835259 - DNA, 25 bp, Homo sapien
atggctgcacccaggcgagttgagc

SEQ ID NO: 4835260 - DNA, 25 bp, Homo sapien
ctgcacccaggcgagttgagcagag

SEQ ID NO: 4835261 - DNA, 25 bp, Homo sapien
acccaggcgagttgagcagaggagg

SEQ ID NO: 4835262 - DNA, 25 bp, Homo sapien
taacccataaaagcacggacacctg

SEQ ID NO: 4835263 - DNA, 25 bp, Homo sapien
tctgctgggaatgggcggctgtggc

SEQ ID NO: 4835264 - DNA, 25 bp, Homo sapien
tgggaatgggcaggtgtgtcactgt

SEQ ID NO: 4835265 - DNA, 25 bp, Homo sapien
actgtggtctccgagctctgctggg

SEQ ID NO: 4835266 - DNA, 25 bp, Homo sapien
ccattcatgcccattgcggatacag

SEQ ID NO: 4835267 - DNA, 25 bp, Homo sapien
tggcactgtcccgagccatgccttc

SEQ ID NO: 4835268 - DNA, 25 bp, Homo sapien
aaatcatctgcccattcatgcccat

SEQ ID NO: 4835269 - DNA, 25 bp, Homo sapien
atgttcacacgccttgggcaaatca

SEQ ID NO: 4835270 - DNA, 25 bp, Homo sapien
ggaacgcagtttgcaaatggacggt

SEQ ID NO: 4835271 - DNA, 25 bp, Homo sapien
ctcactaagctctcccatgaactga

SEQ ID NO: 4835272 - DNA, 25 bp, Homo sapien
atgtaggagacaattaaagagtggt

SEQ ID NO: 4835273 - DNA, 25 bp, Homo sapien
gcagtttgcaaatggacggtgctac

SEQ ID NO: 4835274 - DNA, 25 bp, Homo sapien
tagtatctataactgccactggaga

SEQ ID NO: 4835275 - DNA, 25 bp, Homo sapien
ggaactgccatgtcctagaaacaac

SEQ ID NO: 4835276 - DNA, 25 bp, Homo sapien
aatggcaaagaccagctagggtgga

SEQ ID NO: 4835277 - DNA, 25 bp, Homo sapien
gcatcgatcactacagcacagcgta

SEQ ID NO: 4835278 - DNA, 25 bp, Homo sapien
aatgtgcagctcaatctgatttgta

SEQ ID NO: 4835279 - DNA, 25 bp, Homo sapien
taatgaacacaaactcatcactttt

SEQ ID NO: 4835280 - DNA, 25 bp, Homo sapien
ggcagcgtgtctgcaccagatggcc

SEQ ID NO: 4835281 - DNA, 25 bp, Homo sapien
tggcctcgagttaatgaacacaaac

SEQ ID NO: 4835282 - DNA, 25 bp, Homo sapien
cgtagtgttgtaggctgataaagga

SEQ ID NO: 4835283 - DNA, 25 bp, Homo sapien
catgaaacaatactcagcacttcca

SEQ ID NO: 4835284 - DNA, 25 bp, Homo sapien
tgataaaggaggtgcacggaacccg

SEQ ID NO: 4835285 - DNA, 25 bp, Homo sapien
gtaaagagttatgggctaccacagg

SEQ ID NO: 4835286 - DNA, 25 bp, Homo sapien
agggactgcctcctttcttacagtg

SEQ ID NO: 4835287 - DNA, 25 bp, Homo sapien
atctgttcgggctgccgtaacaaca

SEQ ID NO: 4835288 - DNA, 25 bp, Homo sapien
caagggtctctttacaacggcactc

SEQ ID NO: 4835289 - DNA, 25 bp, Homo sapien
gcaaggaacgtgcacgctgtgttga

SEQ ID NO: 4835290 - DNA, 25 bp, Homo sapien
tctggtggacctgggcacaaaacac

SEQ ID NO: 4835291 - DNA, 25 bp, Homo sapien
aactaggtgacaaggtatccccaag

SEQ ID NO: 4835292 - DNA, 25 bp, Homo sapien
ggagacagaccctagagccttttgg

SEQ ID NO: 4835293 - DNA, 25 bp, Homo sapien
tcaagtatgctctcccagtaatggc

SEQ ID NO: 4835294 - DNA, 25 bp, Homo sapien
tcgtcatgctacaagacaggcacgg

SEQ ID NO: 4835295 - DNA, 25 bp, Homo sapien
tccaagaggtgctgtgtctgcgcag

SEQ ID NO: 4835296 - DNA, 25 bp, Homo sapien
caggttggccctgtgagtcacggaa

SEQ ID NO: 4835297 - DNA, 25 bp, Homo sapien
tatggatcacgtgctaagggaactc

SEQ ID NO: 4835298 - DNA, 25 bp, Homo sapien
tgtgttatataagcgagaggtgcaa

SEQ ID NO: 4835299 - DNA, 25 bp, Homo sapien
taaggagcctaactcccagctgatt

SEQ ID NO: 4835300 - DNA, 25 bp, Homo sapien
tgtctgtttggcaaagctcagcctc

SEQ ID NO: 4835301 - DNA, 25 bp, Homo sapien
tcagcctccatgagatattcaaagg

SEQ ID NO: 4835302 - DNA, 25 bp, Homo sapien
caggaatgcggctccattggaaacc

SEQ ID NO: 4835303 - DNA, 25 bp, Homo sapien
ttccggaggcgttattttaagatga

SEQ ID NO: 4835304 - DNA, 25 bp, Homo sapien
tatggtatgttggaagttcagagca

SEQ ID NO: 4835305 - DNA, 25 bp, Homo sapien
ggcagttcactgtttggcaaaccaa

SEQ ID NO: 4835306 - DNA, 25 bp, Homo sapien
tgcgggcagcaaacactatgaaact

SEQ ID NO: 4835307 - DNA, 25 bp, Homo sapien
tattgtttcaacacacttgcgggtg

SEQ ID NO: 4835308 - DNA, 25 bp, Homo sapien
tgttagattagcaaaaggccctttg

SEQ ID NO: 4835309 - DNA, 25 bp, Homo sapien
tggaatttactgacccgtctcccag

SEQ ID NO: 4835310 - DNA, 25 bp, Homo sapien
tagtaataacaacttagcaaagtgc

SEQ ID NO: 4835311 - DNA, 25 bp, Homo sapien
ccaaccttctattgcaaattcctgg

SEQ ID NO: 4835312 - DNA, 25 bp, Homo sapien
aagtgcttagcacacgcttaagcct

SEQ ID NO: 4835313 - DNA, 25 bp, Homo sapien
gcttaagcctatacaggaaatccta

SEQ ID NO: 4835314 - DNA, 25 bp, Homo sapien
cgtgccaccgcacatgcctgtgcaa

SEQ ID NO: 4835315 - DNA, 25 bp, Homo sapien
gaggatcaaggcttgatagcccatg

SEQ ID NO: 4835316 - DNA, 25 bp, Homo sapien
gatcaaggcttgatagcccatgagt

SEQ ID NO: 4835317 - DNA, 25 bp, Homo sapien
atcgtgccaccgcacatgcctgtgc

SEQ ID NO: 4835318 - DNA, 25 bp, Homo sapien
ggcccccatgcaagccaaccctgat

SEQ ID NO: 4835319 - DNA, 25 bp, Homo sapien
cccggcacgtgccctcactcctggt

SEQ ID NO: 4835320 - DNA, 25 bp, Homo sapien
ctgtcccacttgatctccccagccc

SEQ ID NO: 4835321 - DNA, 25 bp, Homo sapien
gtgttgccccctgtgcctgcagtca

SEQ ID NO: 4835322 - DNA, 25 bp, Homo sapien
ctcactcctggtgttgccccctgtg

SEQ ID NO: 4835323 - DNA, 25 bp, Homo sapien
taaggcggcttgacttctcgatcaa

SEQ ID NO: 4835324 - DNA, 25 bp, Homo sapien
tcactacactgaacataaggcggct

SEQ ID NO: 4835325 - DNA, 25 bp, Homo sapien
tctcgatcaatcagcctaatggcag

SEQ ID NO: 4835326 - DNA, 25 bp, Homo sapien
caaacggatcgtaggaatttggcct

SEQ ID NO: 4835327 - DNA, 25 bp, Homo sapien
ctcataaactccacaggcaaagtgt

SEQ ID NO: 4835328 - DNA, 25 bp, Homo sapien
tctcataaactccacaggcaaagtg

SEQ ID NO: 4835329 - DNA, 25 bp, Homo sapien
tcccgtacagcaccaaggtccacaa

SEQ ID NO: 4835330 - DNA, 25 bp, Homo sapien
tatctctgtccatagtctcaaaatt

SEQ ID NO: 4835331 - DNA, 25 bp, Homo sapien
gtccatagtctcaaaattacattct

SEQ ID NO: 4835332 - DNA, 25 bp, Homo sapien
tctcctctaatatctctgtccatag

SEQ ID NO: 4835333 - DNA, 25 bp, Homo sapien
tgctgcttagcgagcatctccctcg

SEQ ID NO: 4835334 - DNA, 25 bp, Homo sapien
gagcatctccctcgaatccttgact

SEQ ID NO: 4835335 - DNA, 25 bp, Homo sapien
tctggacaagccaatgcccaggaac

SEQ ID NO: 4835336 - DNA, 25 bp, Homo sapien
ttagcgagcatctccctcgaatcct

SEQ ID NO: 4835337 - DNA, 25 bp, Homo sapien
tgaaccaaatcaagctgcacgaaga

SEQ ID NO: 4835338 - DNA, 25 bp, Homo sapien
tgcacgaagacgcaatcttccccag

SEQ ID NO: 4835339 - DNA, 25 bp, Homo sapien
gtgagtcggccacccagaaagggaa

SEQ ID NO: 4835340 - DNA, 25 bp, Homo sapien
cccaggcccttcagaggaaagtcct

SEQ ID NO: 4835341 - DNA, 25 bp, Homo sapien
tacaagtggtgctaaatgtttccca

SEQ ID NO: 4835342 - DNA, 25 bp, Homo sapien
tgccctaagagacatgtgatcgccc

SEQ ID NO: 4835343 - DNA, 25 bp, Homo sapien
tgtcagaagtatcaatgccctaaga

SEQ ID NO: 4835344 - DNA, 25 bp, Homo sapien
tagaagccagggataggagaagcct

SEQ ID NO: 4835345 - DNA, 25 bp, Homo sapien
cagagttcctctgccaatgtcgagc

SEQ ID NO: 4835346 - DNA, 25 bp, Homo sapien
ccagcttgggttctgatggccacag

SEQ ID NO: 4835347 - DNA, 25 bp, Homo sapien
gatgccaccctgataggaaatgcct

SEQ ID NO: 4835348 - DNA, 25 bp, Homo sapien
tcagcaaggtcactggagatgccac

SEQ ID NO: 4835349 - DNA, 25 bp, Homo sapien
ttcaaagaggaaaccacattcagga

SEQ ID NO: 4835350 - DNA, 25 bp, Homo sapien
tgatggtccagggattgtcctctca

SEQ ID NO: 4835351 - DNA, 25 bp, Homo sapien
ggattgtcctctcacatccagcact

SEQ ID NO: 4835352 - DNA, 25 bp, Homo sapien
cagggattgtcctctcacatccagc

SEQ ID NO: 4835353 - DNA, 25 bp, Homo sapien
aggcatcagaacgtgaatgtggctg

SEQ ID NO: 4835354 - DNA, 25 bp, Homo sapien
tcagaacgtgaatgtggctgcagcc

SEQ ID NO: 4835355 - DNA, 25 bp, Homo sapien
attttactgtatggcttcacagagc

SEQ ID NO: 4835356 - DNA, 25 bp, Homo sapien
gggctccagagtcacggatttcggg

SEQ ID NO: 4835357 - DNA, 25 bp, Homo sapien
caatctgagtccttccgctagtgca

SEQ ID NO: 4835358 - DNA, 25 bp, Homo sapien
tcctgcggagctacctcaagaggct

SEQ ID NO: 4835359 - DNA, 25 bp, Homo sapien
gagttgagaacctgtgacctggaca

SEQ ID NO: 4835360 - DNA, 25 bp, Homo sapien
tcaagaggcttcgtgtggcccagac

SEQ ID NO: 4835361 - DNA, 25 bp, Homo sapien
gaagagtctcctcaaagggttcgaa

SEQ ID NO: 4835362 - DNA, 25 bp, Homo sapien
tgacggcgcttgcaactcatgctga

SEQ ID NO: 4835363 - DNA, 25 bp, Homo sapien
taaatgtggctatgacaccggtagc

SEQ ID NO: 4835364 - DNA, 25 bp, Homo sapien
tagacatgcctattttgggaccgca

SEQ ID NO: 4835365 - DNA, 25 bp, Homo sapien
aaaagtgttcttccaatagagtgag

SEQ ID NO: 4835366 - DNA, 25 bp, Homo sapien
taatgtcttcgcctttggaatggag

SEQ ID NO: 4835367 - DNA, 25 bp, Homo sapien
tacacacagaaacaatgcggcacct

SEQ ID NO: 4835368 - DNA, 25 bp, Homo sapien
tttgaagtgccagaacgtgaagtac

SEQ ID NO: 4835369 - DNA, 25 bp, Homo sapien
agctctgggcaggagcaggttggag

SEQ ID NO: 4835370 - DNA, 25 bp, Homo sapien
ttggagggaggaacccatagggaga

SEQ ID NO: 4835371 - DNA, 25 bp, Homo sapien
aaagagcggaaggagcagctctggg

SEQ ID NO: 4835372 - DNA, 25 bp, Homo sapien
actggactcagtgcccagccttgac

SEQ ID NO: 4835373 - DNA, 25 bp, Homo sapien
aatgacagggtatgcttggctgctg

SEQ ID NO: 4835374 - DNA, 25 bp, Homo sapien
ttaatgacagggtatgcttggctgc

SEQ ID NO: 4835375 - DNA, 25 bp, Homo sapien
caccagattcggtttaatgacaggg

SEQ ID NO: 4835376 - DNA, 25 bp, Homo sapien
ccagattcggtttaatgacagggta

SEQ ID NO: 4835377 - DNA, 25 bp, Homo sapien
tagcgatcagctaatttgaccttcc

SEQ ID NO: 4835378 - DNA, 25 bp, Homo sapien
tatgggaatgcaccttagcgatcag

SEQ ID NO: 4835379 - DNA, 25 bp, Homo sapien
gccgagaggccaagtgatggtcaca

SEQ ID NO: 4835380 - DNA, 25 bp, Homo sapien
gatggtcacaggcaaatgacaggat

SEQ ID NO: 4835381 - DNA, 25 bp, Homo sapien
tcaagatggcatccttattgcctag

SEQ ID NO: 4835382 - DNA, 25 bp, Homo sapien
tattgcctagaatataggcccgttt

SEQ ID NO: 4835383 - DNA, 25 bp, Homo sapien
gcaaacaccgtcacatgctgacgct

SEQ ID NO: 4835384 - DNA, 25 bp, Homo sapien
tgacgctgtgtcagccatagaatgt

SEQ ID NO: 4835385 - DNA, 25 bp, Homo sapien
gacaccagtaccaactccatcagag

SEQ ID NO: 4835386 - DNA, 25 bp, Homo sapien
tagttacattcactcacaaacctgg

SEQ ID NO: 4835387 - DNA, 25 bp, Homo sapien
aaatccattgcaaatccagtgaaga

SEQ ID NO: 4835388 - DNA, 25 bp, Homo sapien
cctgagacggatttatcgttttagc

SEQ ID NO: 4835389 - DNA, 25 bp, Homo sapien
tctcatggacactggagcggtggcc

SEQ ID NO: 4835390 - DNA, 25 bp, Homo sapien
aacaggcttccggtgcacttgggct

SEQ ID NO: 4835391 - DNA, 25 bp, Homo sapien
tagtagtccaagttccagagaaagg

SEQ ID NO: 4835392 - DNA, 25 bp, Homo sapien
cagcagtgacttggcgaccatctcg

SEQ ID NO: 4835393 - DNA, 25 bp, Homo sapien
gtgtgagcacatgggtgtgtgtgaa

SEQ ID NO: 4835394 - DNA, 25 bp, Homo sapien
actcactctggcactctgatcagca

SEQ ID NO: 4835395 - DNA, 25 bp, Homo sapien
tgtgtgagcacatggttgtgtatgc

SEQ ID NO: 4835396 - DNA, 25 bp, Homo sapien
tcagcatccagtggtaaaggtctac

SEQ ID NO: 4835397 - DNA, 25 bp, Homo sapien
tgtgagcatgtgtgtgtgcactgtg

SEQ ID NO: 4835398 - DNA, 25 bp, Homo sapien
tgtgtgtgagcacatgtgagcatgt

SEQ ID NO: 4835399 - DNA, 25 bp, Homo sapien
tgtgtgtgtgagcacatgtgagcat

SEQ ID NO: 4835400 - DNA, 25 bp, Homo sapien
catgtgagcatgtgtgtgtgcactg

SEQ ID NO: 4835401 - DNA, 25 bp, Homo sapien
tcatggaaagcacactcactgcagg

SEQ ID NO: 4835402 - DNA, 25 bp, Homo sapien
ctggaggacagatggtgaatagcca

SEQ ID NO: 4835403 - DNA, 25 bp, Homo sapien
gaggacagatggtgaatagccagtc

SEQ ID NO: 4835404 - DNA, 25 bp, Homo sapien
actaatgggttctgaccccatcagc

SEQ ID NO: 4835405 - DNA, 25 bp, Homo sapien
gaaaggtcacattcttcaagaagca

SEQ ID NO: 4835406 - DNA, 25 bp, Homo sapien
gccactgcccgacacaagtgtgtga

SEQ ID NO: 4835407 - DNA, 25 bp, Homo sapien
tcatcttgtagaagtagctgaaagg

SEQ ID NO: 4835408 - DNA, 25 bp, Homo sapien
gactttctgcgagaccactgctgtg

SEQ ID NO: 4835409 - DNA, 25 bp, Homo sapien
agggaaaagagagcaacagactggc

SEQ ID NO: 4835410 - DNA, 25 bp, Homo sapien
cagcaccaaggagacgcctccaata

SEQ ID NO: 4835411 - DNA, 25 bp, Homo sapien
tccgtttaacttatgccaggaggga

SEQ ID NO: 4835412 - DNA, 25 bp, Homo sapien
tccaatacacccaggactctgtggc

SEQ ID NO: 4835413 - DNA, 25 bp, Homo sapien
aacaaacggcccacaagcatatgaa

SEQ ID NO: 4835414 - DNA, 25 bp, Homo sapien
gacaagagaccttacatgatctcct

SEQ ID NO: 4835415 - DNA, 25 bp, Homo sapien
gtccccgtgtgacaagagaccttac

SEQ ID NO: 4835416 - DNA, 25 bp, Homo sapien
taaaaacaaacggcccacaagcata

SEQ ID NO: 4835417 - DNA, 25 bp, Homo sapien
ggcattctagcagtttcagcaacag

SEQ ID NO: 4835418 - DNA, 25 bp, Homo sapien
tcaacttccaagcaggcgtcttcgg

SEQ ID NO: 4835419 - DNA, 25 bp, Homo sapien
gctccacatggttaagaatacgcag

SEQ ID NO: 4835420 - DNA, 25 bp, Homo sapien
tcaaagctgcaggtgatagcatgcc

SEQ ID NO: 4835421 - DNA, 25 bp, Homo sapien
catgagagttcccattgctctgtgt

SEQ ID NO: 4835422 - DNA, 25 bp, Homo sapien
cctcagtcccctgcaatgcatgaga

SEQ ID NO: 4835423 - DNA, 25 bp, Homo sapien
tctcgtaggtaaaaatctaggactg

SEQ ID NO: 4835424 - DNA, 25 bp, Homo sapien
ggctcacagtaggtggaagtatatt

SEQ ID NO: 4835425 - DNA, 25 bp, Homo sapien
cacagtgtggtgttgcttctgctgc

SEQ ID NO: 4835426 - DNA, 25 bp, Homo sapien
taacggataccgtcatgtttctttg

SEQ ID NO: 4835427 - DNA, 25 bp, Homo sapien
cttggtgcacctttataacagcaga

SEQ ID NO: 4835428 - DNA, 25 bp, Homo sapien
ggaaatcagatgtcctgccccacag

SEQ ID NO: 4835429 - DNA, 25 bp, Homo sapien
tatgcttgtcctgcgtgtgcacacg

SEQ ID NO: 4835430 - DNA, 25 bp, Homo sapien
ttactaagcctacatggagtgtgcg

SEQ ID NO: 4835431 - DNA, 25 bp, Homo sapien
catagggagcacaggttgaccaaat

SEQ ID NO: 4835432 - DNA, 25 bp, Homo sapien
cactgctggcacatgcaaggaggac

SEQ ID NO: 4835433 - DNA, 25 bp, Homo sapien
aagaaagagggtacctgcagttcaa

SEQ ID NO: 4835434 - DNA, 25 bp, Homo sapien
caggaaagaaagagggtacctgcag

SEQ ID NO: 4835435 - DNA, 25 bp, Homo sapien
aaagaaagagggtacctgcagttca

SEQ ID NO: 4835436 - DNA, 25 bp, Homo sapien
aggaaagaaagagggtacctgcagt

SEQ ID NO: 4835437 - DNA, 25 bp, Homo sapien
gcatatttccaagacagatgaccct

SEQ ID NO: 4835438 - DNA, 25 bp, Homo sapien
tgaccctcatttccatcacagtttg

SEQ ID NO: 4835439 - DNA, 25 bp, Homo sapien
tcagcggtgcatatttccaagacag

SEQ ID NO: 4835440 - DNA, 25 bp, Homo sapien
gacagatgaccctcatttccatcac

SEQ ID NO: 4835441 - DNA, 25 bp, Homo sapien
tgaacgtacaatagtgtctcttggg

SEQ ID NO: 4835442 - DNA, 25 bp, Homo sapien
gaatgctttggacactctacccaga

SEQ ID NO: 4835443 - DNA, 25 bp, Homo sapien
caaaggatcctatgaccctctggag

SEQ ID NO: 4835444 - DNA, 25 bp, Homo sapien
ttacatcctatgaactgagctgccc

SEQ ID NO: 4835445 - DNA, 25 bp, Homo sapien
tttgtgcgcacaaggatgccgtatg

SEQ ID NO: 4835446 - DNA, 25 bp, Homo sapien
taggaattctacagagcagggtcgg

SEQ ID NO: 4835447 - DNA, 25 bp, Homo sapien
gatgccgagtgttctgtcctgcgac

SEQ ID NO: 4835448 - DNA, 25 bp, Homo sapien
tcctgcgacacgtgagaggtgcaag

SEQ ID NO: 4835449 - DNA, 25 bp, Homo sapien
tacatggaattccacagtatgtctt

SEQ ID NO: 4835450 - DNA, 25 bp, Homo sapien
cactctacgtacatgccatattttg

SEQ ID NO: 4835451 - DNA, 25 bp, Homo sapien
cacatctgggaacatgacaagcaca

SEQ ID NO: 4835452 - DNA, 25 bp, Homo sapien
ggcatgcgtcagaataccctttctt

SEQ ID NO: 4835453 - DNA, 25 bp, Homo sapien
gacgggtcctgtcgggtggcggata

SEQ ID NO: 4835454 - DNA, 25 bp, Homo sapien
caggcttcggttgtccttcccagca

SEQ ID NO: 4835455 - DNA, 25 bp, Homo sapien
cctgcgatgagcgtggcgtcaatct

SEQ ID NO: 4835456 - DNA, 25 bp, Homo sapien
gcctgggacctcatggacgggtcct

SEQ ID NO: 4835457 - DNA, 25 bp, Homo sapien
gtgggttagaccagccagctcagag

SEQ ID NO: 4835458 - DNA, 25 bp, Homo sapien
tatcagatactgtgccttggtccct

SEQ ID NO: 4835459 - DNA, 25 bp, Homo sapien
tgtttcgccgtctgagccagcagaa

SEQ ID NO: 4835460 - DNA, 25 bp, Homo sapien
tcacaacagccacgggaaggaagtc

SEQ ID NO: 4835461 - DNA, 25 bp, Homo sapien
gggacacagaaaggcgccatcagct

SEQ ID NO: 4835462 - DNA, 25 bp, Homo sapien
catcagctcccatgctagagagaca

SEQ ID NO: 4835463 - DNA, 25 bp, Homo sapien
ccgggctctccgcattccaagtgga

SEQ ID NO: 4835464 - DNA, 25 bp, Homo sapien
tgacgctgggcagggacttaccttg

SEQ ID NO: 4835465 - DNA, 25 bp, Homo sapien
gccattggggttcttgctcaggtac

SEQ ID NO: 4835466 - DNA, 25 bp, Homo sapien
tgtccctcccggatgtcggtagtga

SEQ ID NO: 4835467 - DNA, 25 bp, Homo sapien
tccgcatagtagaaagtctgtccct

SEQ ID NO: 4835468 - DNA, 25 bp, Homo sapien
tgctggtggtagtcttccgcatagt

SEQ ID NO: 4835469 - DNA, 25 bp, Homo sapien
cactgaggctatacacgtttgcaaa

SEQ ID NO: 4835470 - DNA, 25 bp, Homo sapien
tgtgaatcacacaagcattgcccaa

SEQ ID NO: 4835471 - DNA, 25 bp, Homo sapien
cgaaggatttcagcgaatgagtcac

SEQ ID NO: 4835472 - DNA, 25 bp, Homo sapien
tagaattcatcaagcggactcacat

SEQ ID NO: 4835473 - DNA, 25 bp, Homo sapien
cgactaagtgactagtgggtgcgca

SEQ ID NO: 4835474 - DNA, 25 bp, Homo sapien
tgttatcttctgtgaagatgcaccg

SEQ ID NO: 4835475 - DNA, 25 bp, Homo sapien
gtgcgcagggacatctgcctcgagc

SEQ ID NO: 4835476 - DNA, 25 bp, Homo sapien
gacatcaggcagacacgttcttggc

SEQ ID NO: 4835477 - DNA, 25 bp, Homo sapien
ccgtccagagcctttccttttgctt

SEQ ID NO: 4835478 - DNA, 25 bp, Homo sapien
tccgtccagagcctttccttttgct

SEQ ID NO: 4835479 - DNA, 25 bp, Homo sapien
cttccacctccaagggggccacttg

SEQ ID NO: 4835480 - DNA, 25 bp, Homo sapien
gggccacttggtcgcagaagagcca

SEQ ID NO: 4835481 - DNA, 25 bp, Homo sapien
tatggaggctggcaaccatgtttgg

SEQ ID NO: 4835482 - DNA, 25 bp, Homo sapien
cagccgggaccgaatagattcatgt

SEQ ID NO: 4835483 - DNA, 25 bp, Homo sapien
gatcttgcagaattcagcccaaatg

SEQ ID NO: 4835484 - DNA, 25 bp, Homo sapien
ttttacacgttatcaaggagctggg

SEQ ID NO: 4835485 - DNA, 25 bp, Homo sapien
catgaacacatatggcactatcacc

SEQ ID NO: 4835486 - DNA, 25 bp, Homo sapien
tcaccacagctcttaggttccttct

SEQ ID NO: 4835487 - DNA, 25 bp, Homo sapien
ctatcaccacagctcttaggttcct

SEQ ID NO: 4835488 - DNA, 25 bp, Homo sapien
agcagcatgaacacatatggcacta

SEQ ID NO: 4835489 - DNA, 25 bp, Homo sapien
ggccaaatattgtgatagacacctc

SEQ ID NO: 4835490 - DNA, 25 bp, Homo sapien
aaagctacgagtttcatgcagccag

SEQ ID NO: 4835491 - DNA, 25 bp, Homo sapien
tgctccacatcatgggtcatcaggg

SEQ ID NO: 4835492 - DNA, 25 bp, Homo sapien
gggccccaacattacctcaggatgt

SEQ ID NO: 4835493 - DNA, 25 bp, Homo sapien
ccccaccaatggctgctgagaaatc

SEQ ID NO: 4835494 - DNA, 25 bp, Homo sapien
tcaatttgtatgcagatccttccca

SEQ ID NO: 4835495 - DNA, 25 bp, Homo sapien
aatcaaccttcagagatacgtaggg

SEQ ID NO: 4835496 - DNA, 25 bp, Homo sapien
cattggcacaaaggtagactagatc

SEQ ID NO: 4835497 - DNA, 25 bp, Homo sapien
cagtaggctgttagtcctagactaa

SEQ ID NO: 4835498 - DNA, 25 bp, Homo sapien
taaaactcaggaatacctagaggaa

SEQ ID NO: 4835499 - DNA, 25 bp, Homo sapien
caacgtctctgttatccaatcaaaa

SEQ ID NO: 4835500 - DNA, 25 bp, Homo sapien
ttccaagtaacttaaatgtgtcaca

SEQ ID NO: 4835501 - DNA, 25 bp, Homo sapien
gcacattgggctccgaacatcaaag

SEQ ID NO: 4835502 - DNA, 25 bp, Homo sapien
ccgaacatcaaagtgctatcattca

SEQ ID NO: 4835503 - DNA, 25 bp, Homo sapien
cagcacattgggctccgaacatcaa

SEQ ID NO: 4835504 - DNA, 25 bp, Homo sapien
ctgcagcacattgggctccgaacat

SEQ ID NO: 4835505 - DNA, 25 bp, Homo sapien
gaactctagtcttgaattgagcttg

SEQ ID NO: 4835506 - DNA, 25 bp, Homo sapien
cagttggatgaaattccgagtctcc

SEQ ID NO: 4835507 - DNA, 25 bp, Homo sapien
gaaattccgagtctccattcaccct

SEQ ID NO: 4835508 - DNA, 25 bp, Homo sapien
gcagccttctaagaatgtgaactct

SEQ ID NO: 4835509 - DNA, 25 bp, Homo sapien
aagtcttccccatggattatagccg

SEQ ID NO: 4835510 - DNA, 25 bp, Homo sapien
gactgtcggtctggtggcatctgct

SEQ ID NO: 4835511 - DNA, 25 bp, Homo sapien
cacttttgtatctgagctatgccct

SEQ ID NO: 4835512 - DNA, 25 bp, Homo sapien
cactctctctgacctagtttaggga

SEQ ID NO: 4835513 - DNA, 25 bp, Homo sapien
gcatattatagttccatcctggatc

SEQ ID NO: 4835514 - DNA, 25 bp, Homo sapien
ttcaacagttttactaggatttgcc

SEQ ID NO: 4835515 - DNA, 25 bp, Homo sapien
tcttctaccagaataactgtctttt

SEQ ID NO: 4835516 - DNA, 25 bp, Homo sapien
tttaacgcaggcctgttggcaacaa

SEQ ID NO: 4835517 - DNA, 25 bp, Homo sapien
gcgcccaccactttgcccagctagt

SEQ ID NO: 4835518 - DNA, 25 bp, Homo sapien
cccaggttcaaacgattcttctgcc

SEQ ID NO: 4835519 - DNA, 25 bp, Homo sapien
ttggctcactgtaaaacttccaccc

SEQ ID NO: 4835520 - DNA, 25 bp, Homo sapien
aggttcaaacgattcttctgcctca

SEQ ID NO: 4835521 - DNA, 25 bp, Homo sapien
tcaccacagcataaggaattacgta

SEQ ID NO: 4835522 - DNA, 25 bp, Homo sapien
ggtaaaatgtcaagatcaccacagc

SEQ ID NO: 4835523 - DNA, 25 bp, Homo sapien
taaatggagggacgctttctatact

SEQ ID NO: 4835524 - DNA, 25 bp, Homo sapien
ctgatgttcccaatgtataaagaga

SEQ ID NO: 4835525 - DNA, 25 bp, Homo sapien
ctacggttgtggtcagaagtccaaa

SEQ ID NO: 4835526 - DNA, 25 bp, Homo sapien
agaagtccaaaacacctctgaccgg

SEQ ID NO: 4835527 - DNA, 25 bp, Homo sapien
aatgtattactctacggttgtggtc

SEQ ID NO: 4835528 - DNA, 25 bp, Homo sapien
tctgaccgggctcaaatcaaagtgc

SEQ ID NO: 4835529 - DNA, 25 bp, Homo sapien
cccaagtggttgctgctattggcca

SEQ ID NO: 4835530 - DNA, 25 bp, Homo sapien
cagagagtcggtaaaaatagctatt

SEQ ID NO: 4835531 - DNA, 25 bp, Homo sapien
tccacttgaaagtggcatacagaga

SEQ ID NO: 4835532 - DNA, 25 bp, Homo sapien
atagctatttaaggcaatcttttgg

SEQ ID NO: 4835533 - DNA, 25 bp, Homo sapien
acctggaacttggaagtagcttgcc

SEQ ID NO: 4835534 - DNA, 25 bp, Homo sapien
tgggaagcaggaagctcgctctttc

SEQ ID NO: 4835535 - DNA, 25 bp, Homo sapien
gaagcaggaagctcgctctttcctc

SEQ ID NO: 4835536 - DNA, 25 bp, Homo sapien
ttgccacttttagcctgagtcctct

SEQ ID NO: 4835537 - DNA, 25 bp, Homo sapien
tttttgcctagtgccagcgggctgc

SEQ ID NO: 4835538 - DNA, 25 bp, Homo sapien
gaagtctgttcatcaaaaggtgcca

SEQ ID NO: 4835539 - DNA, 25 bp, Homo sapien
tcaaaactactgtcccaaaggctgt

SEQ ID NO: 4835540 - DNA, 25 bp, Homo sapien
ggctgcacctcagtaggctatagga

SEQ ID NO: 4835541 - DNA, 25 bp, Homo sapien
tgtgttgttccggttttaggatatg

SEQ ID NO: 4835542 - DNA, 25 bp, Homo sapien
ctctgtgttgttccggttttaggat

SEQ ID NO: 4835543 - DNA, 25 bp, Homo sapien
tctgtgttgttccggttttaggata

SEQ ID NO: 4835544 - DNA, 25 bp, Homo sapien
tgttgttccggttttaggatatgtg

SEQ ID NO: 4835545 - DNA, 25 bp, Homo sapien
tagagacctggatcgagctgtttcc

SEQ ID NO: 4835546 - DNA, 25 bp, Homo sapien
gaattacttctgctaggtcactgga

SEQ ID NO: 4835547 - DNA, 25 bp, Homo sapien
cagaattctaacgagggcatccgga

SEQ ID NO: 4835548 - DNA, 25 bp, Homo sapien
gagtttgaatcaaggcctacgtggc

SEQ ID NO: 4835549 - DNA, 25 bp, Homo sapien
cagctattttgtcctgacaggttca

SEQ ID NO: 4835550 - DNA, 25 bp, Homo sapien
gacaggttcaggaagctgaaacgct

SEQ ID NO: 4835551 - DNA, 25 bp, Homo sapien
tctcattccccaaggctatttctag

SEQ ID NO: 4835552 - DNA, 25 bp, Homo sapien
ctatttctagagtgcgcttccagct

SEQ ID NO: 4835553 - DNA, 25 bp, Homo sapien
ttcatctttgcattgtcctccaagc

SEQ ID NO: 4835554 - DNA, 25 bp, Homo sapien
tctttgcattgtcctccaagcccag

SEQ ID NO: 4835555 - DNA, 25 bp, Homo sapien
caagcccagcaagtagaaaatgctc

SEQ ID NO: 4835556 - DNA, 25 bp, Homo sapien
agcccagcaagtagaaaatgctcca

SEQ ID NO: 4835557 - DNA, 25 bp, Homo sapien
aaatgctggttctgacaaaactcca

SEQ ID NO: 4835558 - DNA, 25 bp, Homo sapien
aaatgaatgaactgcctaatgtttt

SEQ ID NO: 4835559 - DNA, 25 bp, Homo sapien
aactccacgtccaataaaatgaatg

SEQ ID NO: 4835560 - DNA, 25 bp, Homo sapien
tttatctggcttccagttattctga

SEQ ID NO: 4835561 - DNA, 25 bp, Homo sapien
ccgtacagggaagaattagggcaca

SEQ ID NO: 4835562 - DNA, 25 bp, Homo sapien
tgtggcacacagacaatgccctcct

SEQ ID NO: 4835563 - DNA, 25 bp, Homo sapien
cattgcgtacccctcttggctggca

SEQ ID NO: 4835564 - DNA, 25 bp, Homo sapien
tgaactctaagtcggcattgcgtac

SEQ ID NO: 4835565 - DNA, 25 bp, Homo sapien
agacctgctggtttcggagccatcg

SEQ ID NO: 4835566 - DNA, 25 bp, Homo sapien
gtttcggagccatcgacctcctcat

SEQ ID NO: 4835567 - DNA, 25 bp, Homo sapien
gagattcagaaaatcagggcagggc

SEQ ID NO: 4835568 - DNA, 25 bp, Homo sapien
agattcagaaaatcagggcagggcc

SEQ ID NO: 4835569 - DNA, 25 bp, Homo sapien
gattccaatgacagtagcttgccct

SEQ ID NO: 4835570 - DNA, 25 bp, Homo sapien
ttgcggccctcactggattccaatg

SEQ ID NO: 4835571 - DNA, 25 bp, Homo sapien
tatgtgggccactgttctgccgctg

SEQ ID NO: 4835572 - DNA, 25 bp, Homo sapien
tgccctacggcttactgctactgtt

SEQ ID NO: 4835573 - DNA, 25 bp, Homo sapien
ggaagatccgtgaatcccatgggca

SEQ ID NO: 4835574 - DNA, 25 bp, Homo sapien
tccaccagatgggtatgtgctacat

SEQ ID NO: 4835575 - DNA, 25 bp, Homo sapien
cacctagactgataaatttggccca

SEQ ID NO: 4835576 - DNA, 25 bp, Homo sapien
tgtgggcctcggagacacatccata

SEQ ID NO: 4835577 - DNA, 25 bp, Homo sapien
cagacgtgccggagaatgccatttt

SEQ ID NO: 4835578 - DNA, 25 bp, Homo sapien
tgagacacgatctaggaagcctacc

SEQ ID NO: 4835579 - DNA, 25 bp, Homo sapien
tacttgcgcgagacagctgaaaggg

SEQ ID NO: 4835580 - DNA, 25 bp, Homo sapien
ccagggattgtaggaggtcacgtca

SEQ ID NO: 4835581 - DNA, 25 bp, Homo sapien
taggcagctcagtaggccagtgcac

SEQ ID NO: 4835582 - DNA, 25 bp, Homo sapien
gaagccctaggttctatgtgcaaaa

SEQ ID NO: 4835583 - DNA, 25 bp, Homo sapien
tgcttccgaagaaccctgtaagtgt

SEQ ID NO: 4835584 - DNA, 25 bp, Homo sapien
tcacggaaacacctctgtggaggct

SEQ ID NO: 4835585 - DNA, 25 bp, Homo sapien
ccaggagtccttccgggcatggata

SEQ ID NO: 4835586 - DNA, 25 bp, Homo sapien
ttcttgctcctatggcgtggttgcc

SEQ ID NO: 4835587 - DNA, 25 bp, Homo sapien
atacttgctggagactggtggccac

SEQ ID NO: 4835588 - DNA, 25 bp, Homo sapien
gcagtaatgcagctggaccctgtaa

SEQ ID NO: 4835589 - DNA, 25 bp, Homo sapien
tagtactcccaagaatcccctctat

SEQ ID NO: 4835590 - DNA, 25 bp, Homo sapien
cactttatcatgttagggaaatgct

SEQ ID NO: 4835591 - DNA, 25 bp, Homo sapien
taaatataaccctacacagtatgtg

SEQ ID NO: 4835592 - DNA, 25 bp, Homo sapien
tatccacacccagagttttgccttg

SEQ ID NO: 4835593 - DNA, 25 bp, Homo sapien
ttccagtgcaggttgccagtctcag

SEQ ID NO: 4835594 - DNA, 25 bp, Homo sapien
gtgcaggttgccagtctcagaggcc

SEQ ID NO: 4835595 - DNA, 25 bp, Homo sapien
ccagtgcaggttgccagtctcagag

SEQ ID NO: 4835596 - DNA, 25 bp, Homo sapien
gattccagtgcaggttgccagtctc

SEQ ID NO: 4835597 - DNA, 25 bp, Homo sapien
gtggtatgatcctggcttactgcta

SEQ ID NO: 4835598 - DNA, 25 bp, Homo sapien
cactcctggccagattgggtaattt

SEQ ID NO: 4835599 - DNA, 25 bp, Homo sapien
caccactcctggccagattgggtaa

SEQ ID NO: 4835600 - DNA, 25 bp, Homo sapien
tggtatgatcctggcttactgctac

SEQ ID NO: 4835601 - DNA, 25 bp, Homo sapien
ccaagagagcagtatgcgggaaact

SEQ ID NO: 4835602 - DNA, 25 bp, Homo sapien
caaaaggcatgtcttccatgtcggc

SEQ ID NO: 4835603 - DNA, 25 bp, Homo sapien
catgtgaaatgggaagccccttata

SEQ ID NO: 4835604 - DNA, 25 bp, Homo sapien
ccaaatcattgagcccttggtgggc

SEQ ID NO: 4835605 - DNA, 25 bp, Homo sapien
ggccctgggctgtgctgtgggcccg

SEQ ID NO: 4835606 - DNA, 25 bp, Homo sapien
ccctgggctgtgctgtgggcccggg

SEQ ID NO: 4835607 - DNA, 25 bp, Homo sapien
ctgggctgtgctgtgggcccggggg

SEQ ID NO: 4835608 - DNA, 25 bp, Homo sapien
gccctgggctgtgctgtgggcccgg

SEQ ID NO: 4835609 - DNA, 25 bp, Homo sapien
tcccctagccctgcctaggatagcc

SEQ ID NO: 4835610 - DNA, 25 bp, Homo sapien
gcctaggatagccactccagcctct

SEQ ID NO: 4835611 - DNA, 25 bp, Homo sapien
tgagttcccgtgaccagggacagga

SEQ ID NO: 4835612 - DNA, 25 bp, Homo sapien
agtccgtggaccgagctgagttccc

SEQ ID NO: 4835613 - DNA, 25 bp, Homo sapien
tgttgaagcgaccaacaagtgcttg

SEQ ID NO: 4835614 - DNA, 25 bp, Homo sapien
tgaacatgccgagtgtgtatgagct

SEQ ID NO: 4835615 - DNA, 25 bp, Homo sapien
gcttattcacgaaacgatttaggga

SEQ ID NO: 4835616 - DNA, 25 bp, Homo sapien
ggccagacagcccaagcttgaatcc

SEQ ID NO: 4835617 - DNA, 25 bp, Homo sapien
agaatctaccggaaagccctggctg

SEQ ID NO: 4835618 - DNA, 25 bp, Homo sapien
tgagagcaaagctgtagcgcctgtg

SEQ ID NO: 4835619 - DNA, 25 bp, Homo sapien
aggaaatgccccttccggacagagg

SEQ ID NO: 4835620 - DNA, 25 bp, Homo sapien
ggctgagcagctcctttacttaggg

SEQ ID NO: 4835621 - DNA, 25 bp, Homo sapien
aaggggaaacacttagtcagcatcc

SEQ ID NO: 4835622 - DNA, 25 bp, Homo sapien
aaacacttagtcagcatccagtgtg

SEQ ID NO: 4835623 - DNA, 25 bp, Homo sapien
gaaaaggggaaacacttagtcagca

SEQ ID NO: 4835624 - DNA, 25 bp, Homo sapien
gggaaacacttagtcagcatccagt

SEQ ID NO: 4835625 - DNA, 25 bp, Homo sapien
ttccctcgaaaatagatctgtcacc

SEQ ID NO: 4835626 - DNA, 25 bp, Homo sapien
cctgtgattctggaataccgagttc

SEQ ID NO: 4835627 - DNA, 25 bp, Homo sapien
tcgaaaatagatctgtcaccacatt

SEQ ID NO: 4835628 - DNA, 25 bp, Homo sapien
ccgagttcttccctcgaaaatagat

SEQ ID NO: 4835629 - DNA, 25 bp, Homo sapien
tataagcagtgagccgcagtgagaa

SEQ ID NO: 4835630 - DNA, 25 bp, Homo sapien
gagaatccaccacttgttgaggatg

SEQ ID NO: 4835631 - DNA, 25 bp, Homo sapien
aatactcacctgccacggaaactca

SEQ ID NO: 4835632 - DNA, 25 bp, Homo sapien
aacagctcctcggaatataagcagt

SEQ ID NO: 4835633 - DNA, 25 bp, Homo sapien
gtggcagtgggaggcccatggtact

SEQ ID NO: 4835634 - DNA, 25 bp, Homo sapien
ggtgggcgccctgagaggtggcagt

SEQ ID NO: 4835635 - DNA, 25 bp, Homo sapien
ctggataccgagcagtcgcaggttc

SEQ ID NO: 4835636 - DNA, 25 bp, Homo sapien
gtgggagccattcatgccgactgga

SEQ ID NO: 4835637 - DNA, 25 bp, Homo sapien
cggcagaattggctgtgcccagaaa

SEQ ID NO: 4835638 - DNA, 25 bp, Homo sapien
aaagcggcagaattggctgtgccca

SEQ ID NO: 4835639 - DNA, 25 bp, Homo sapien
gcagaattggctgtgcccagaaacc

SEQ ID NO: 4835640 - DNA, 25 bp, Homo sapien
tcaaaagcggcagaattggctgtgc

SEQ ID NO: 4835641 - DNA, 25 bp, Homo sapien
tcatcgagcttgatgggcgaagcca

SEQ ID NO: 4835642 - DNA, 25 bp, Homo sapien
cagcattcgcgccatgtggcagggc

SEQ ID NO: 4835643 - DNA, 25 bp, Homo sapien
ttggtccccagcacgacactcagtt

SEQ ID NO: 4835644 - DNA, 25 bp, Homo sapien
gatgggctagttaagtcgttggtcc

SEQ ID NO: 4835645 - DNA, 25 bp, Homo sapien
agactccactgagcgggaatctgct

SEQ ID NO: 4835646 - DNA, 25 bp, Homo sapien
aggagctaaactttgggcactgtga

SEQ ID NO: 4835647 - DNA, 25 bp, Homo sapien
tccaatgcaagtcttgtcctcactc

SEQ ID NO: 4835648 - DNA, 25 bp, Homo sapien
tcacattgcagtggctttttcccca

SEQ ID NO: 4835649 - DNA, 25 bp, Homo sapien
tgaccattggcgctttcatcagatc

SEQ ID NO: 4835650 - DNA, 25 bp, Homo sapien
catagctctcattcttgtatccggc

SEQ ID NO: 4835651 - DNA, 25 bp, Homo sapien
tccgttttcacagagtttttgtcag

SEQ ID NO: 4835652 - DNA, 25 bp, Homo sapien
tcttgtatccggcacacagcatatt

SEQ ID NO: 4835653 - DNA, 25 bp, Homo sapien
cagagggtgaggacctataaggtga

SEQ ID NO: 4835654 - DNA, 25 bp, Homo sapien
ggctgcaggccctaattcccataca

SEQ ID NO: 4835655 - DNA, 25 bp, Homo sapien
ttgcactggcagttcccagagggtg

SEQ ID NO: 4835656 - DNA, 25 bp, Homo sapien
gcagcagagagagaatacccttgca

SEQ ID NO: 4835657 - DNA, 25 bp, Homo sapien
tatatagataccaaatcctccttgg

SEQ ID NO: 4835658 - DNA, 25 bp, Homo sapien
tacctagtgtacctgaagaagatca

SEQ ID NO: 4835659 - DNA, 25 bp, Homo sapien
agcatattgactcccagggtgctca

SEQ ID NO: 4835660 - DNA, 25 bp, Homo sapien
gatcagaaatagttaagcagggttg

SEQ ID NO: 4835661 - DNA, 25 bp, Homo sapien
gaggttgtaggggtgtagagcgttg

SEQ ID NO: 4835662 - DNA, 25 bp, Homo sapien
gctccacgggagaagcatgtggctg

SEQ ID NO: 4835663 - DNA, 25 bp, Homo sapien
catccctgctccacgggagaagcat

SEQ ID NO: 4835664 - DNA, 25 bp, Homo sapien
aggttggctctggaggttgtagggg

SEQ ID NO: 4835665 - DNA, 25 bp, Homo sapien
ctggtaccacttctcaccaggctct

SEQ ID NO: 4835666 - DNA, 25 bp, Homo sapien
tggggtgcagaccagaggcccccca

SEQ ID NO: 4835667 - DNA, 25 bp, Homo sapien
gtaccacttctcaccaggctctggg

SEQ ID NO: 4835668 - DNA, 25 bp, Homo sapien
gtgcagaccagaggccccccactgt

SEQ ID NO: 4835669 - DNA, 25 bp, Homo sapien
caccaacgaggtgtatatccctggg

SEQ ID NO: 4835670 - DNA, 25 bp, Homo sapien
tagttcaccaacgaggtgtatatcc

SEQ ID NO: 4835671 - DNA, 25 bp, Homo sapien
cagaggttgtagttcaccaacgagg

SEQ ID NO: 4835672 - DNA, 25 bp, Homo sapien
tttctcgatccagaggttgtagttc

SEQ ID NO: 4835673 - DNA, 25 bp, Homo sapien
gtacaaaatagctctgaacaacaca

SEQ ID NO: 4835674 - DNA, 25 bp, Homo sapien
acaaaatagctctgaacaacacatg

SEQ ID NO: 4835675 - DNA, 25 bp, Homo sapien
tctgtttgacagaagtcctcctttt

SEQ ID NO: 4835676 - DNA, 25 bp, Homo sapien
gagcccataggtttctgtttgacag

SEQ ID NO: 4835677 - DNA, 25 bp, Homo sapien
tgaaagaatagcctctattttatta

SEQ ID NO: 4835678 - DNA, 25 bp, Homo sapien
ttgaaagaatagcctctattttatt

SEQ ID NO: 4835679 - DNA, 25 bp, Homo sapien
ggaagacaggaacacgttctcgagg

SEQ ID NO: 4835680 - DNA, 25 bp, Homo sapien
acgttctcgagggacttcttgtgaa

SEQ ID NO: 4835681 - DNA, 25 bp, Homo sapien
ccacaccagcccgtgcagttgcatg

SEQ ID NO: 4835682 - DNA, 25 bp, Homo sapien
gtgaattgtggtccgccccacacca

SEQ ID NO: 4835683 - DNA, 25 bp, Homo sapien
gaacactcagccaggctgtaggtcc

SEQ ID NO: 4835684 - DNA, 25 bp, Homo sapien
gaggaaagaagcacgcggcagcgct

SEQ ID NO: 4835685 - DNA, 25 bp, Homo sapien
ggtggcccaggaaattcgaatccag

SEQ ID NO: 4835686 - DNA, 25 bp, Homo sapien
ccaagcttccatttaaggatttgca

SEQ ID NO: 4835687 - DNA, 25 bp, Homo sapien
agagactggcaagctcaaacctggg

SEQ ID NO: 4835688 - DNA, 25 bp, Homo sapien
ctagacattgtagctgtaggacctc

SEQ ID NO: 4835689 - DNA, 25 bp, Homo sapien
gaggctcaccccattatggagggca

SEQ ID NO: 4835690 - DNA, 25 bp, Homo sapien
taggccaggctcgagttctatgccc

SEQ ID NO: 4835691 - DNA, 25 bp, Homo sapien
aagccctggtctttttcctcacaga

SEQ ID NO: 4835692 - DNA, 25 bp, Homo sapien
tgggtcaacagagcacacagtcagt

SEQ ID NO: 4835693 - DNA, 25 bp, Homo sapien
cagatggtctgagaagcacaggtgc

SEQ ID NO: 4835694 - DNA, 25 bp, Homo sapien
aggccaccatgtcctgtttgttgag

SEQ ID NO: 4835695 - DNA, 25 bp, Homo sapien
tcaactcaaggctatgcccaagggt

SEQ ID NO: 4835696 - DNA, 25 bp, Homo sapien
ctttgtttgagagcttccggtgttc

SEQ ID NO: 4835697 - DNA, 25 bp, Homo sapien
gtgtgagacccaggcggctttgttt

SEQ ID NO: 4835698 - DNA, 25 bp, Homo sapien
tccggtgttcattctttgtaaagtg

SEQ ID NO: 4835699 - DNA, 25 bp, Homo sapien
tggatggaagtcctggcggaaacac

SEQ ID NO: 4835700 - DNA, 25 bp, Homo sapien
gggatgatttggccccagcggccat

SEQ ID NO: 4835701 - DNA, 25 bp, Homo sapien
tgaacacggtgaggtcacgggcacg

SEQ ID NO: 4835702 - DNA, 25 bp, Homo sapien
gcggccatcccgagcctgaatggat

SEQ ID NO: 4835703 - DNA, 25 bp, Homo sapien
ccctctgcccagataggggctgagc

SEQ ID NO: 4835704 - DNA, 25 bp, Homo sapien
ctgccgggagggagagatgcagcca

SEQ ID NO: 4835705 - DNA, 25 bp, Homo sapien
gagagagagtggcagctcggaagag

SEQ ID NO: 4835706 - DNA, 25 bp, Homo sapien
agcacgtccgctgcagtggcctgtg

SEQ ID NO: 4835707 - DNA, 25 bp, Homo sapien
taggacctgcgttgtcccctccctc

SEQ ID NO: 4835708 - DNA, 25 bp, Homo sapien
tggaagacttctttcactccctggg

SEQ ID NO: 4835709 - DNA, 25 bp, Homo sapien
ctgaagttggaagacttctttcact

SEQ ID NO: 4835710 - DNA, 25 bp, Homo sapien
tcactccctggggtgttaagagtgc

SEQ ID NO: 4835711 - DNA, 25 bp, Homo sapien
ctccctggggtgttaagagtgccat

SEQ ID NO: 4835712 - DNA, 25 bp, Homo sapien
gatgctctcgtagagggtgtccagc

SEQ ID NO: 4835713 - DNA, 25 bp, Homo sapien
gaagcctttgcccactgcaaagatg

SEQ ID NO: 4835714 - DNA, 25 bp, Homo sapien
cagcaggatgctcctccgggagtct

SEQ ID NO: 4835715 - DNA, 25 bp, Homo sapien
tctgtgaacttgaccacctgggcca

SEQ ID NO: 4835716 - DNA, 25 bp, Homo sapien
catctttgcgtgagcaagctccagg

SEQ ID NO: 4835717 - DNA, 25 bp, Homo sapien
ccatctttgcgtgagcaagctccag

SEQ ID NO: 4835718 - DNA, 25 bp, Homo sapien
tccaggactcccccggcacctgcag

SEQ ID NO: 4835719 - DNA, 25 bp, Homo sapien
tctgaccaggcacacgggattctgt

SEQ ID NO: 4835720 - DNA, 25 bp, Homo sapien
gagtctttgttggaaccatcacagg

SEQ ID NO: 4835721 - DNA, 25 bp, Homo sapien
tcatttgactaaggaggcagctgtc

SEQ ID NO: 4835722 - DNA, 25 bp, Homo sapien
tcttgattagattcgggccatgagt

SEQ ID NO: 4835723 - DNA, 25 bp, Homo sapien
gcagggcttgttctcgctctcacga

SEQ ID NO: 4835724 - DNA, 25 bp, Homo sapien
gtgctgactaggacgccacctgggc

SEQ ID NO: 4835725 - DNA, 25 bp, Homo sapien
gtccctgtgcaaggcagtaagaaca

SEQ ID NO: 4835726 - DNA, 25 bp, Homo sapien
ggactgcagggcttgttctcgctct

SEQ ID NO: 4835727 - DNA, 25 bp, Homo sapien
tcactctccagctgaggactccagg

SEQ ID NO: 4835728 - DNA, 25 bp, Homo sapien
ggacaaagatgtacagggcgcagac

SEQ ID NO: 4835729 - DNA, 25 bp, Homo sapien
tctgtgccatatgcatcgctcagca

SEQ ID NO: 4835730 - DNA, 25 bp, Homo sapien
tgccatatgcatcgctcagcactgg

SEQ ID NO: 4835731 - DNA, 25 bp, Homo sapien
ctcgcctgaggggtgtcaggttctg

SEQ ID NO: 4835732 - DNA, 25 bp, Homo sapien
tggaggctccccgatgtgagggcgg

SEQ ID NO: 4835733 - DNA, 25 bp, Homo sapien
tgagggcggggtacttcagggctgc

SEQ ID NO: 4835734 - DNA, 25 bp, Homo sapien
cggggtacttcagggctgccgggca

SEQ ID NO: 4835735 - DNA, 25 bp, Homo sapien
tcctccgtgtcgtagcatgggacag

SEQ ID NO: 4835736 - DNA, 25 bp, Homo sapien
gttgaatcatatgccacttccatgg

SEQ ID NO: 4835737 - DNA, 25 bp, Homo sapien
cctcatagacggactcatacgatat

SEQ ID NO: 4835738 - DNA, 25 bp, Homo sapien
tggatgtacaaacacctccccaagt

SEQ ID NO: 4835739 - DNA, 25 bp, Homo sapien
taagactagacaagataggcatgtt

SEQ ID NO: 4835740 - DNA, 25 bp, Homo sapien
caagataggcatgttcaaggtggtg

SEQ ID NO: 4835741 - DNA, 25 bp, Homo sapien
ctagacaagataggcatgttcaagg

SEQ ID NO: 4835742 - DNA, 25 bp, Homo sapien
gactagacaagataggcatgttcaa

SEQ ID NO: 4835743 - DNA, 25 bp, Homo sapien
gattaggcgacagcatgcatatgtg

SEQ ID NO: 4835744 - DNA, 25 bp, Homo sapien
ggcattcctacacagctggtgggct

SEQ ID NO: 4835745 - DNA, 25 bp, Homo sapien
aatgccattgtcaccgtcattgcca

SEQ ID NO: 4835746 - DNA, 25 bp, Homo sapien
aataaaaatctctacctcgtgagat

SEQ ID NO: 4835747 - DNA, 25 bp, Homo sapien
gagagcttgccacctttgcttgaga

SEQ ID NO: 4835748 - DNA, 25 bp, Homo sapien
caggcaggattgtcaggaagagccc

SEQ ID NO: 4835749 - DNA, 25 bp, Homo sapien
ggtccgtggtctgttgatcttccca

SEQ ID NO: 4835750 - DNA, 25 bp, Homo sapien
gcagcacaagtggtcccttcagggt

SEQ ID NO: 4835751 - DNA, 25 bp, Homo sapien
ttttgatcagcaagctggactctgg

SEQ ID NO: 4835752 - DNA, 25 bp, Homo sapien
aacctggtggagaggtactgaggcc

SEQ ID NO: 4835753 - DNA, 25 bp, Homo sapien
tccaaggatagcgtacataggatta

SEQ ID NO: 4835754 - DNA, 25 bp, Homo sapien
gaggctgcccattgagggatcccag

SEQ ID NO: 4835755 - DNA, 25 bp, Homo sapien
caagaacagagtgggagtgggacag

SEQ ID NO: 4835756 - DNA, 25 bp, Homo sapien
ggatgtgggctctgcaccccgacag

SEQ ID NO: 4835757 - DNA, 25 bp, Homo sapien
caccccgacagcctggtcacagagc

SEQ ID NO: 4835758 - DNA, 25 bp, Homo sapien
gggccaagaacagagtgggagtggg

SEQ ID NO: 4835759 - DNA, 25 bp, Homo sapien
tctctaagcttgttccccaggatcg

SEQ ID NO: 4835760 - DNA, 25 bp, Homo sapien
tgctcgtggatccacaagtccctgt

SEQ ID NO: 4835761 - DNA, 25 bp, Homo sapien
gatcgtcacagcctcagtaatggag

SEQ ID NO: 4835762 - DNA, 25 bp, Homo sapien
gaaatggccccggtaatctctaagc

SEQ ID NO: 4835763 - DNA, 25 bp, Homo sapien
atgctggaggctgggcggcgagctg

SEQ ID NO: 4835764 - DNA, 25 bp, Homo sapien
gccagcagtgccatgctggaggctg

SEQ ID NO: 4835765 - DNA, 25 bp, Homo sapien
caggcaggggccagcagtgccatgc

SEQ ID NO: 4835766 - DNA, 25 bp, Homo sapien
aggctgggcggcgagctgggaggag

SEQ ID NO: 4835767 - DNA, 25 bp, Homo sapien
tgggggcgttgaggttcagagtctt

SEQ ID NO: 4835768 - DNA, 25 bp, Homo sapien
gagctccatctgggtgtggactgcc

SEQ ID NO: 4835769 - DNA, 25 bp, Homo sapien
tgttctggatctggcgctgcagcag

SEQ ID NO: 4835770 - DNA, 25 bp, Homo sapien
tctttcctttgctcgctctttgggg

SEQ ID NO: 4835771 - DNA, 25 bp, Homo sapien
tttaatcacaagaagtctctctgtg

SEQ ID NO: 4835772 - DNA, 25 bp, Homo sapien
tcatggttatgggtggctggtcccc

SEQ ID NO: 4835773 - DNA, 25 bp, Homo sapien
caccgtgccgcaaggctcatggtta

SEQ ID NO: 4835774 - DNA, 25 bp, Homo sapien
agtctcgtgtggcagtcgggacctt

SEQ ID NO: 4835775 - DNA, 25 bp, Homo sapien
attgactggatcagtgtgattggcc

SEQ ID NO: 4835776 - DNA, 25 bp, Homo sapien
tactagatcagtgtgatcgactgga

SEQ ID NO: 4835777 - DNA, 25 bp, Homo sapien
aggtcagtgtggtcgactggcccat

SEQ ID NO: 4835778 - DNA, 25 bp, Homo sapien
ggatcaatatgattgaccaggtcag

SEQ ID NO: 4835779 - DNA, 25 bp, Homo sapien
ggaagctgcccactatcaatgtgac

SEQ ID NO: 4835780 - DNA, 25 bp, Homo sapien
tcaaccgggtcagtgtgatcgaatg

SEQ ID NO: 4835781 - DNA, 25 bp, Homo sapien
aactggaagagcgtgatcaactgga

SEQ ID NO: 4835782 - DNA, 25 bp, Homo sapien
tcgactgggtctgcatgatcaactg

SEQ ID NO: 4835783 - DNA, 25 bp, Homo sapien
tgagctcgctaacctacgatctggt

SEQ ID NO: 4835784 - DNA, 25 bp, Homo sapien
caaggaccacgaggctttctgcact

SEQ ID NO: 4835785 - DNA, 25 bp, Homo sapien
ggtagccatcatcgaaactaatggg

SEQ ID NO: 4835786 - DNA, 25 bp, Homo sapien
ttttgtgtgcacagcccaaggacca

SEQ ID NO: 4835787 - DNA, 25 bp, Homo sapien
catctattgctcagtctcgaaggtg

SEQ ID NO: 4835788 - DNA, 25 bp, Homo sapien
tccggtgtcgagctgagtacttttc

SEQ ID NO: 4835789 - DNA, 25 bp, Homo sapien
taacttgattcggatgcttgggctg

SEQ ID NO: 4835790 - DNA, 25 bp, Homo sapien
gagtgaggctgttaggacacacccg

SEQ ID NO: 4835791 - DNA, 25 bp, Homo sapien
gacgccgagctgtcggatggacaat

SEQ ID NO: 4835792 - DNA, 25 bp, Homo sapien
gaacgccttcatggtttgggccaag

SEQ ID NO: 4835793 - DNA, 25 bp, Homo sapien
cacgcgggacgagggccctcttcgt

SEQ ID NO: 4835794 - DNA, 25 bp, Homo sapien
tgcacaacgccgagctcagcaagat

SEQ ID NO: 4835795 - DNA, 25 bp, Homo sapien
cccgccaggcgaagcgaggcgaccc

SEQ ID NO: 4835796 - DNA, 25 bp, Homo sapien
cgcctgccccgccaggcgaagcgag

SEQ ID NO: 4835797 - DNA, 25 bp, Homo sapien
gcgaagcgaggcgacccgcgtgcgg

SEQ ID NO: 4835798 - DNA, 25 bp, Homo sapien
ggcgacccgcgtgcggccatggctt

SEQ ID NO: 4835799 - DNA, 25 bp, Homo sapien
tgcgggccaagttggacgccccgac

SEQ ID NO: 4835800 - DNA, 25 bp, Homo sapien
cacactggaattgttggctgatgac

SEQ ID NO: 4835801 - DNA, 25 bp, Homo sapien
tacccagaagtcagacgtgtgtaca

SEQ ID NO: 4835802 - DNA, 25 bp, Homo sapien
tcttagggagcttacaacttagtgg

SEQ ID NO: 4835803 - DNA, 25 bp, Homo sapien
gaaatatcaggactcgcaaagcctg

SEQ ID NO: 4835804 - DNA, 25 bp, Homo sapien
tgtcccatgtattaggaggtctttc

SEQ ID NO: 4835805 - DNA, 25 bp, Homo sapien
tttccaccttgtcttgtgggaacag

SEQ ID NO: 4835806 - DNA, 25 bp, Homo sapien
gagctcaggaaattagtccacctaa

SEQ ID NO: 4835807 - DNA, 25 bp, Homo sapien
tactacctgatgtcccatgtattag

SEQ ID NO: 4835808 - DNA, 25 bp, Homo sapien
gtgcataaaacttctacgaacattg

SEQ ID NO: 4835809 - DNA, 25 bp, Homo sapien
aagtccttctttgggcatacacttt

SEQ ID NO: 4835810 - DNA, 25 bp, Homo sapien
tttgggcatacactttcatttcccc

SEQ ID NO: 4835811 - DNA, 25 bp, Homo sapien
tctacgaacattgaaatacaagtcc

SEQ ID NO: 4835812 - DNA, 25 bp, Homo sapien
gaaagcttgattctgaattcgtctg

SEQ ID NO: 4835813 - DNA, 25 bp, Homo sapien
ctagcttgaaagcttgattctgaat

SEQ ID NO: 4835814 - DNA, 25 bp, Homo sapien
tagcttgaaagcttgattctgaatt

SEQ ID NO: 4835815 - DNA, 25 bp, Homo sapien
agcttgattctgaattcgtctgcat

SEQ ID NO: 4835816 - DNA, 25 bp, Homo sapien
atccattttctgtatacatctgcat

SEQ ID NO: 4835817 - DNA, 25 bp, Homo sapien
tatccattttctgtatacatctgca

SEQ ID NO: 4835818 - DNA, 25 bp, Homo sapien
tcgctgccccggtgagtaactgcat

SEQ ID NO: 4835819 - DNA, 25 bp, Homo sapien
ccagcaccttgacggaaggaagcac

SEQ ID NO: 4835820 - DNA, 25 bp, Homo sapien
tcatcttcacctttgtgaggtacgt

SEQ ID NO: 4835821 - DNA, 25 bp, Homo sapien
tgacggaaggaagcaccctcatctt

SEQ ID NO: 4835822 - DNA, 25 bp, Homo sapien
tgcagctgctgcgtttcggagcctg

SEQ ID NO: 4835823 - DNA, 25 bp, Homo sapien
gaaggctttcggcacagtctgtccg

SEQ ID NO: 4835824 - DNA, 25 bp, Homo sapien
ctgtccgagtgatctcagcccttgg

SEQ ID NO: 4835825 - DNA, 25 bp, Homo sapien
tacgttgattggagtaagaacctct

SEQ ID NO: 4835826 - DNA, 25 bp, Homo sapien
tgcagatgctcttcacatgtcattg

SEQ ID NO: 4835827 - DNA, 25 bp, Homo sapien
tgtctactgtagtcacaaacccgcg

SEQ ID NO: 4835828 - DNA, 25 bp, Homo sapien
aactagactgatgctcttcccagag

SEQ ID NO: 4835829 - DNA, 25 bp, Homo sapien
tgcaagcctccctattgcagatgct

SEQ ID NO: 4835830 - DNA, 25 bp, Homo sapien
tgttcctcttcatccgcgtacgcat

SEQ ID NO: 4835831 - DNA, 25 bp, Homo sapien
atccgcgtacgcatttattccctct

SEQ ID NO: 4835832 - DNA, 25 bp, Homo sapien
cctgtgtctgccgttctgccctgtg

SEQ ID NO: 4835833 - DNA, 25 bp, Homo sapien
gtgtctgccgttctgccctgtgcgc

SEQ ID NO: 4835834 - DNA, 25 bp, Homo sapien
ctgaggttctggagtccggccctgc

SEQ ID NO: 4835835 - DNA, 25 bp, Homo sapien
tcagctgaggttctggagtccggcc

SEQ ID NO: 4835836 - DNA, 25 bp, Homo sapien
cagctgaggttctggagtccggccc

SEQ ID NO: 4835837 - DNA, 25 bp, Homo sapien
aggttctggagtccggccctgccac

SEQ ID NO: 4835838 - DNA, 25 bp, Homo sapien
gaggctaaggccgtgaaattaaagc

SEQ ID NO: 4835839 - DNA, 25 bp, Homo sapien
taattgtcatgatcaggaggtcctc

SEQ ID NO: 4835840 - DNA, 25 bp, Homo sapien
tcttgccgttcctgtgccgagtgtg

SEQ ID NO: 4835841 - DNA, 25 bp, Homo sapien
ccctttgggttcactcggatgcctg

SEQ ID NO: 4835842 - DNA, 25 bp, Homo sapien
tcctcaggttgcagcaagagttggc

SEQ ID NO: 4835843 - DNA, 25 bp, Homo sapien
tgtgagaccttctgcggattaagtg

SEQ ID NO: 4835844 - DNA, 25 bp, Homo sapien
cagtcaacttaggtgagtgtagacc

SEQ ID NO: 4835845 - DNA, 25 bp, Homo sapien
ccttagtctctggattatgtggtca

SEQ ID NO: 4835846 - DNA, 25 bp, Homo sapien
tgatgcacgggactgtgtacagggg

SEQ ID NO: 4835847 - DNA, 25 bp, Homo sapien
ggaagaacatcgtaggccagcatag

SEQ ID NO: 4835848 - DNA, 25 bp, Homo sapien
aagaacatcgtaggccagcataggg

SEQ ID NO: 4835849 - DNA, 25 bp, Homo sapien
acatcgtaggccagcatagggagtg

SEQ ID NO: 4835850 - DNA, 25 bp, Homo sapien
gagaactctcttctctttaccaaga

SEQ ID NO: 4835851 - DNA, 25 bp, Homo sapien
ctttgtatgtggtatgcacgagaac

SEQ ID NO: 4835852 - DNA, 25 bp, Homo sapien
tgtggtatgcacgagaactctcttc

SEQ ID NO: 4835853 - DNA, 25 bp, Homo sapien
tctctttaccaagaacagttctctt

SEQ ID NO: 4835854 - DNA, 25 bp, Homo sapien
tgtgtcacattgatcatctccagct

SEQ ID NO: 4835855 - DNA, 25 bp, Homo sapien
tcttccatggccagtgtgtcgggaa

SEQ ID NO: 4835856 - DNA, 25 bp, Homo sapien
tcattcacagaagttgaggcctgtg

SEQ ID NO: 4835857 - DNA, 25 bp, Homo sapien
tccagctctggaggagcctcgttta

SEQ ID NO: 4835858 - DNA, 25 bp, Homo sapien
ctttcatgtactcatcagtgcatgt

SEQ ID NO: 4835859 - DNA, 25 bp, Homo sapien
ctgatgctgtgaggtccttcacttc

SEQ ID NO: 4835860 - DNA, 25 bp, Homo sapien
tttcatgtactcatcagtgcatgtc

SEQ ID NO: 4835861 - DNA, 25 bp, Homo sapien
tgatgctgtgaggtccttcacttct

SEQ ID NO: 4835862 - DNA, 25 bp, Homo sapien
tgcgatgtgtgcttccaccgaggag

SEQ ID NO: 4835863 - DNA, 25 bp, Homo sapien
tgctgtgtactgagcatttgcgatg

SEQ ID NO: 4835864 - DNA, 25 bp, Homo sapien
caccgaggagggacgggagtcacta

SEQ ID NO: 4835865 - DNA, 25 bp, Homo sapien
gacgggagtcactagaggcttcaga

SEQ ID NO: 4835866 - DNA, 25 bp, Homo sapien
tcaaagcgtattgaagttggacctc

SEQ ID NO: 4835867 - DNA, 25 bp, Homo sapien
tgaagttggacctccataagccaag

SEQ ID NO: 4835868 - DNA, 25 bp, Homo sapien
tgtccatttcaaagcgtattgaagt

SEQ ID NO: 4835869 - DNA, 25 bp, Homo sapien
gggaatgaactggaatctttggtgg

SEQ ID NO: 4835870 - DNA, 25 bp, Homo sapien
tcaggcccctgagcacgttctggct

SEQ ID NO: 4835871 - DNA, 25 bp, Homo sapien
tttcaggcccctgagcacgttctgg

SEQ ID NO: 4835872 - DNA, 25 bp, Homo sapien
tctttcaggcccctgagcacgttct

SEQ ID NO: 4835873 - DNA, 25 bp, Homo sapien
ggcccctgagcacgttctggctcat

SEQ ID NO: 4835874 - DNA, 25 bp, Homo sapien
tatgagttgtatttaagtacggccg

SEQ ID NO: 4835875 - DNA, 25 bp, Homo sapien
tgctcctcagatttacttccttatg

SEQ ID NO: 4835876 - DNA, 25 bp, Homo sapien
tgtatttaagtacggccgtggtgtc

SEQ ID NO: 4835877 - DNA, 25 bp, Homo sapien
acacgtgcgtccatgagctcctact

SEQ ID NO: 4835878 - DNA, 25 bp, Homo sapien
gtaggagttctctggctggacaagg

SEQ ID NO: 4835879 - DNA, 25 bp, Homo sapien
agcatgagccacgacttgtcccggc

SEQ ID NO: 4835880 - DNA, 25 bp, Homo sapien
taggcctgaagggtaggagttctct

SEQ ID NO: 4835881 - DNA, 25 bp, Homo sapien
aaaagcagcatgagccacgacttgt

SEQ ID NO: 4835882 - DNA, 25 bp, Homo sapien
ttgaacggctctgtgcgggcctggg

SEQ ID NO: 4835883 - DNA, 25 bp, Homo sapien
cagacttgtagcttgtgttcctcac

SEQ ID NO: 4835884 - DNA, 25 bp, Homo sapien
tcacaggtgactgtgcttgaacggc

SEQ ID NO: 4835885 - DNA, 25 bp, Homo sapien
gcgggcctgggtgtcatgggtgtca

SEQ ID NO: 4835886 - DNA, 25 bp, Homo sapien
tgaaaatgaattccgagcagacgct

SEQ ID NO: 4835887 - DNA, 25 bp, Homo sapien
gattgaattagaaccctcatgagag

SEQ ID NO: 4835888 - DNA, 25 bp, Homo sapien
tccccattgcttgctgattatccag

SEQ ID NO: 4835889 - DNA, 25 bp, Homo sapien
tttttgaggcaaagcatgacttctt

SEQ ID NO: 4835890 - DNA, 25 bp, Homo sapien
gtcttctctcacttggtttgcaatt

SEQ ID NO: 4835891 - DNA, 25 bp, Homo sapien
ggtacttgtgctgaccggtgcctgc

SEQ ID NO: 4835892 - DNA, 25 bp, Homo sapien
gggcctgtgtacataagcgtgtgtc

SEQ ID NO: 4835893 - DNA, 25 bp, Homo sapien
ggccccttgagacctgcagcaggta

SEQ ID NO: 4835894 - DNA, 25 bp, Homo sapien
cacctaaattggagatgtatgcact

SEQ ID NO: 4835895 - DNA, 25 bp, Homo sapien
gaaagatcatcacgaactgccagtt

SEQ ID NO: 4835896 - DNA, 25 bp, Homo sapien
gaggcgctgtttccctgctgaatcc

SEQ ID NO: 4835897 - DNA, 25 bp, Homo sapien
taataactggtttggagtgcaccta

SEQ ID NO: 4835898 - DNA, 25 bp, Homo sapien
attaaatcttcggtcagggtccagg

SEQ ID NO: 4835899 - DNA, 25 bp, Homo sapien
aaatgctaatgccagggttctgccc

SEQ ID NO: 4835900 - DNA, 25 bp, Homo sapien
tgaggtggtcttctaccaggccctg

SEQ ID NO: 4835901 - DNA, 25 bp, Homo sapien
atagttctcaacaaggtcgtcctgg

SEQ ID NO: 4835902 - DNA, 25 bp, Homo sapien
aaggtcgcttgccgccagatggcag

SEQ ID NO: 4835903 - DNA, 25 bp, Homo sapien
gtcgcttgccgccagatggcagtca

SEQ ID NO: 4835904 - DNA, 25 bp, Homo sapien
tcgcttgccgccagatggcagtcat

SEQ ID NO: 4835905 - DNA, 25 bp, Homo sapien
ggtcgcttgccgccagatggcagtc

SEQ ID NO: 4835906 - DNA, 25 bp, Homo sapien
tcacttggtggagtcggtgaaaccc

SEQ ID NO: 4835907 - DNA, 25 bp, Homo sapien
ttcacttggtggagtcggtgaaacc

SEQ ID NO: 4835908 - DNA, 25 bp, Homo sapien
cttggtggagtcggtgaaacccctg

SEQ ID NO: 4835909 - DNA, 25 bp, Homo sapien
cttcacttggtggagtcggtgaaac

SEQ ID NO: 4835910 - DNA, 25 bp, Homo sapien
tctagccaatgagcgaatacgtact

SEQ ID NO: 4835911 - DNA, 25 bp, Homo sapien
gagggagttacgcacgtcctgattc

SEQ ID NO: 4835912 - DNA, 25 bp, Homo sapien
ggtatcacaggctctccgacatgtc

SEQ ID NO: 4835913 - DNA, 25 bp, Homo sapien
tctatgctggctgaacgtgagtgtc

SEQ ID NO: 4835914 - DNA, 25 bp, Homo sapien
tttgcgaggtgctggtacgaataca

SEQ ID NO: 4835915 - DNA, 25 bp, Homo sapien
attattttgcgaggtgctggtacga

SEQ ID NO: 4835916 - DNA, 25 bp, Homo sapien
gcgaggtgctggtacgaatacagaa

SEQ ID NO: 4835917 - DNA, 25 bp, Homo sapien
tattttgcgaggtgctggtacgaat

SEQ ID NO: 4835918 - DNA, 25 bp, Homo sapien
cagtcatgtctgtgaagtattgccc

SEQ ID NO: 4835919 - DNA, 25 bp, Homo sapien
acagtcatgtctgtgaagtattgcc

SEQ ID NO: 4835920 - DNA, 25 bp, Homo sapien
gtcatgtctgtgaagtattgcccaa

SEQ ID NO: 4835921 - DNA, 25 bp, Homo sapien
gcgtgcacagtcatgtctgtgaagt

SEQ ID NO: 4835922 - DNA, 25 bp, Homo sapien
tcaggccggaattgctgccaggaag

SEQ ID NO: 4835923 - DNA, 25 bp, Homo sapien
tgtgattaatatagcgtcttctttt

SEQ ID NO: 4835924 - DNA, 25 bp, Homo sapien
gccggaattgctgccaggaagccag

SEQ ID NO: 4835925 - DNA, 25 bp, Homo sapien
gtgattaatatagcgtcttcttttc

SEQ ID NO: 4835926 - DNA, 25 bp, Homo sapien
ggattcctgggtgtgatttttgata

SEQ ID NO: 4835927 - DNA, 25 bp, Homo sapien
acagcttgacatcacacaatgttga

SEQ ID NO: 4835928 - DNA, 25 bp, Homo sapien
caatgttgacaggaagtatgcacag

SEQ ID NO: 4835929 - DNA, 25 bp, Homo sapien
ggtgttcacagtacttttgtgacgg

SEQ ID NO: 4835930 - DNA, 25 bp, Homo sapien
taccctgatgtacggtttctggtaa

SEQ ID NO: 4835931 - DNA, 25 bp, Homo sapien
tgatgtacggtttctggtaaaccaa

SEQ ID NO: 4835932 - DNA, 25 bp, Homo sapien
tgtttaccctgatgtacggtttctg

SEQ ID NO: 4835933 - DNA, 25 bp, Homo sapien
acatgtggtgtttaccctgatgtac

SEQ ID NO: 4835934 - DNA, 25 bp, Homo sapien
ctgcacctggaagttagaatcagct

SEQ ID NO: 4835935 - DNA, 25 bp, Homo sapien
acctggaagttagaatcagctggca

SEQ ID NO: 4835936 - DNA, 25 bp, Homo sapien
tgcaccaaatgctttctgcacctgg

SEQ ID NO: 4835937 - DNA, 25 bp, Homo sapien
tcatcgtggagtggaaaattctggc

SEQ ID NO: 4835938 - DNA, 25 bp, Homo sapien
catgggtggccctgagtcatcgtag

SEQ ID NO: 4835939 - DNA, 25 bp, Homo sapien
gctcagaataacaggcagctctcca

SEQ ID NO: 4835940 - DNA, 25 bp, Homo sapien
aattctaggcagtcgattcacccag

SEQ ID NO: 4835941 - DNA, 25 bp, Homo sapien
tagaacagtgtgtccatgcctctgc

SEQ ID NO: 4835942 - DNA, 25 bp, Homo sapien
tggccctctttggatgaaaggctgg

SEQ ID NO: 4835943 - DNA, 25 bp, Homo sapien
caggaacaaggttggccctctttgg

SEQ ID NO: 4835944 - DNA, 25 bp, Homo sapien
ccaggaacaaggttggccctctttg

SEQ ID NO: 4835945 - DNA, 25 bp, Homo sapien
gggcattgcggacatgctgacattg

SEQ ID NO: 4835946 - DNA, 25 bp, Homo sapien
ggtcaggagtcccaaggaacttgct

SEQ ID NO: 4835947 - DNA, 25 bp, Homo sapien
ccaaggaacttgctagaaaatgtac

SEQ ID NO: 4835948 - DNA, 25 bp, Homo sapien
catgctgacattggtcaggagtccc

SEQ ID NO: 4835949 - DNA, 25 bp, Homo sapien
aaaagggcaggattccacaaagatg

SEQ ID NO: 4835950 - DNA, 25 bp, Homo sapien
ttccctgagttgaggttgaccgcaa

SEQ ID NO: 4835951 - DNA, 25 bp, Homo sapien
gattccacaaagatgtggcagacac

SEQ ID NO: 4835952 - DNA, 25 bp, Homo sapien
aggttgaccgcaaaagggcaggatt

SEQ ID NO: 4835953 - DNA, 25 bp, Homo sapien
tgaggctctcggtgaacagcaactc

SEQ ID NO: 4835954 - DNA, 25 bp, Homo sapien
ccagatggccttttgcgttcttgac

SEQ ID NO: 4835955 - DNA, 25 bp, Homo sapien
tagcatgaatgtgaagaccattgcc

SEQ ID NO: 4835956 - DNA, 25 bp, Homo sapien
tctgccagacacttgcccaaaggtg

SEQ ID NO: 4835957 - DNA, 25 bp, Homo sapien
tgaagtactgggctctagcttggct

SEQ ID NO: 4835958 - DNA, 25 bp, Homo sapien
tcaggaagcttgcaaagacctcggt

SEQ ID NO: 4835959 - DNA, 25 bp, Homo sapien
actgggctctagcttggcttcagga

SEQ ID NO: 4835960 - DNA, 25 bp, Homo sapien
ggcttcaggaagcttgcaaagacct

SEQ ID NO: 4835961 - DNA, 25 bp, Homo sapien
gacatttcgtatgttctcaggccac

SEQ ID NO: 4835962 - DNA, 25 bp, Homo sapien
ggtagaggatttttgacatttcgta

SEQ ID NO: 4835963 - DNA, 25 bp, Homo sapien
cctaaactcaaggtgttgtacagct

SEQ ID NO: 4835964 - DNA, 25 bp, Homo sapien
caaggtgttgtacagctctggtaga

SEQ ID NO: 4835965 - DNA, 25 bp, Homo sapien
tgcatcctgaagttcaatgcttaag

SEQ ID NO: 4835966 - DNA, 25 bp, Homo sapien
tgaagttcaatgcttaagacagaca

SEQ ID NO: 4835967 - DNA, 25 bp, Homo sapien
agcccatccacgctggaagcagctg

SEQ ID NO: 4835968 - DNA, 25 bp, Homo sapien
tctttgcatcctgaagttcaatgct

SEQ ID NO: 4835969 - DNA, 25 bp, Homo sapien
tgggcttctcttgcgcctggtcacg

SEQ ID NO: 4835970 - DNA, 25 bp, Homo sapien
ccgcagggtcattttgggcttctct

SEQ ID NO: 4835971 - DNA, 25 bp, Homo sapien
gacttcaccccgcagggtcattttg

SEQ ID NO: 4835972 - DNA, 25 bp, Homo sapien
ttctcttgcgcctggtcacgggctc

SEQ ID NO: 4835973 - DNA, 25 bp, Homo sapien
tggttatgtgggaaaagagcgtttc

SEQ ID NO: 4835974 - DNA, 25 bp, Homo sapien
tatgtgggaaaagagcgtttcaggt

SEQ ID NO: 4835975 - DNA, 25 bp, Homo sapien
ctggagcgacacgatacttggttat

SEQ ID NO: 4835976 - DNA, 25 bp, Homo sapien
gacacgatacttggttatgtgggaa

SEQ ID NO: 4835977 - DNA, 25 bp, Homo sapien
ttctgccctcggacagaattggcat

SEQ ID NO: 4835978 - DNA, 25 bp, Homo sapien
tgccctcggacagaattggcatgac

SEQ ID NO: 4835979 - DNA, 25 bp, Homo sapien
gcgttgacaactctggagtcctcca

SEQ ID NO: 4835980 - DNA, 25 bp, Homo sapien
ctccccacaggagcggcagcgttga

SEQ ID NO: 4835981 - DNA, 25 bp, Homo sapien
tgaactgtcccaaatttgagaacaa

SEQ ID NO: 4835982 - DNA, 25 bp, Homo sapien
aactgtcccaaatttgagaacaaga

SEQ ID NO: 4835983 - DNA, 25 bp, Homo sapien
gaactgtcccaaatttgagaacaag

SEQ ID NO: 4835984 - DNA, 25 bp, Homo sapien
cgttctcatcagcacccgcttttga

SEQ ID NO: 4835985 - DNA, 25 bp, Homo sapien
tctccgttctcatcagcacccgctt

SEQ ID NO: 4835986 - DNA, 25 bp, Homo sapien
ctgattctccgttctcatcagcacc

SEQ ID NO: 4835987 - DNA, 25 bp, Homo sapien
gattctccgttctcatcagcacccg

SEQ ID NO: 4835988 - DNA, 25 bp, Homo sapien
ttcaatcttgatgctcacctcatca

SEQ ID NO: 4835989 - DNA, 25 bp, Homo sapien
tctttttcaatcttgatgctcacct

SEQ ID NO: 4835990 - DNA, 25 bp, Homo sapien
acctcatcaaatggactcacctctt

SEQ ID NO: 4835991 - DNA, 25 bp, Homo sapien
atcaaatggactcacctctttccct

SEQ ID NO: 4835992 - DNA, 25 bp, Homo sapien
gtctgccttgttcagctctccctgg

SEQ ID NO: 4835993 - DNA, 25 bp, Homo sapien
tccttggctcgcctggtcctgtctg

SEQ ID NO: 4835994 - DNA, 25 bp, Homo sapien
aaaggtgctgccttgatcctgctgc

SEQ ID NO: 4835995 - DNA, 25 bp, Homo sapien
tgtggctttccttgcactggctggc

SEQ ID NO: 4835996 - DNA, 25 bp, Homo sapien
gcggccagaacgaaagaggcgccat

SEQ ID NO: 4835997 - DNA, 25 bp, Homo sapien
atctgcggccagaacgaaagaggcg

SEQ ID NO: 4835998 - DNA, 25 bp, Homo sapien
ctgcggccagaacgaaagaggcgcc

SEQ ID NO: 4835999 - DNA, 25 bp, Homo sapien
cagatctgcggccagaacgaaagag

SEQ ID NO: 4836000 - DNA, 25 bp, Homo sapien
caccaggagttgggatggcaacttc

SEQ ID NO: 4836001 - DNA, 25 bp, Homo sapien
caggagttgggatggcaacttccaa

SEQ ID NO: 4836002 - DNA, 25 bp, Homo sapien
agagaacggtggatgctgagctgac

SEQ ID NO: 4836003 - DNA, 25 bp, Homo sapien
atgctgagctgaccgggagcaccag

SEQ ID NO: 4836004 - DNA, 25 bp, Homo sapien
gcaggtggaggaggagcccccaact

SEQ ID NO: 4836005 - DNA, 25 bp, Homo sapien
tcactggtgggcaggtggaggagga

SEQ ID NO: 4836006 - DNA, 25 bp, Homo sapien
gggcaggtggaggaggagcccccaa

SEQ ID NO: 4836007 - DNA, 25 bp, Homo sapien
gtgggcaggtggaggaggagccccc

SEQ ID NO: 4836008 - DNA, 25 bp, Homo sapien
gatcacggcttggttcagcagagca

SEQ ID NO: 4836009 - DNA, 25 bp, Homo sapien
gtgcccatagcacacgtatatatgt

SEQ ID NO: 4836010 - DNA, 25 bp, Homo sapien
tgtaagacgaacttggatcacggct

SEQ ID NO: 4836011 - DNA, 25 bp, Homo sapien
caccattgtggttggctgaaaatca

SEQ ID NO: 4836012 - DNA, 25 bp, Homo sapien
gaagacatgttcatcgatgcactcc

SEQ ID NO: 4836013 - DNA, 25 bp, Homo sapien
catgaacatttggtcccttggccaa

SEQ ID NO: 4836014 - DNA, 25 bp, Homo sapien
agaattgcagcgacagtcctgtggg

SEQ ID NO: 4836015 - DNA, 25 bp, Homo sapien
ccttggccaaacataacgacgtaga

SEQ ID NO: 4836016 - DNA, 25 bp, Homo sapien
ttctagtctgatcttcggaatgcag

SEQ ID NO: 4836017 - DNA, 25 bp, Homo sapien
tcagagctcgtcacagccaaacgtg

SEQ ID NO: 4836018 - DNA, 25 bp, Homo sapien
gaagcgtgtaacaatttctagtctg

SEQ ID NO: 4836019 - DNA, 25 bp, Homo sapien
tcttcggaatgcagtcagtgatgga

SEQ ID NO: 4836020 - DNA, 25 bp, Homo sapien
tccgcatctgcatcgacggctgagt

SEQ ID NO: 4836021 - DNA, 25 bp, Homo sapien
ctggtccgcatctgcatcgacggct

SEQ ID NO: 4836022 - DNA, 25 bp, Homo sapien
ctgcatcgacggctgagtgcaccgg

SEQ ID NO: 4836023 - DNA, 25 bp, Homo sapien
catctgcatcgacggctgagtgcac

SEQ ID NO: 4836024 - DNA, 25 bp, Homo sapien
tgagagtcctgtgagtgtggtgccc

SEQ ID NO: 4836025 - DNA, 25 bp, Homo sapien
agtgagagtcctgtgagtgtggtgc

SEQ ID NO: 4836026 - DNA, 25 bp, Homo sapien
gtgagagtcctgtgagtgtggtgcc

SEQ ID NO: 4836027 - DNA, 25 bp, Homo sapien
agcctggcccggtggccgagtcact

SEQ ID NO: 4836028 - DNA, 25 bp, Homo sapien
aagcctggcccggtggccgagtcac

SEQ ID NO: 4836029 - DNA, 25 bp, Homo sapien
gagctatgtccctgcgtgaccccag

SEQ ID NO: 4836030 - DNA, 25 bp, Homo sapien
gtggctacagggaccagagctatgt

SEQ ID NO: 4836031 - DNA, 25 bp, Homo sapien
ggccacagtgatggcgagtgaccgg

SEQ ID NO: 4836032 - DNA, 25 bp, Homo sapien
ccacagtgatggcgagtgaccggga

SEQ ID NO: 4836033 - DNA, 25 bp, Homo sapien
cagtgatggcgagtgaccgggagca

SEQ ID NO: 4836034 - DNA, 25 bp, Homo sapien
cacagtgatggcgagtgaccgggag

SEQ ID NO: 4836035 - DNA, 25 bp, Homo sapien
tttgctctgtgtgcccggtctctct

SEQ ID NO: 4836036 - DNA, 25 bp, Homo sapien
gtcctctctgaggtgagtccaacag

SEQ ID NO: 4836037 - DNA, 25 bp, Homo sapien
cctctctgaggtgagtccaacagct

SEQ ID NO: 4836038 - DNA, 25 bp, Homo sapien
ttcgtaatttgagggctcctgctgt

SEQ ID NO: 4836039 - DNA, 25 bp, Homo sapien
ccatgcagcctatggtcctgaagcc

SEQ ID NO: 4836040 - DNA, 25 bp, Homo sapien
atgcagcctatggtcctgaagcctt

SEQ ID NO: 4836041 - DNA, 25 bp, Homo sapien
catgcagcctatggtcctgaagcct

SEQ ID NO: 4836042 - DNA, 25 bp, Homo sapien
ggtctgtggccctggtcgcgactac

SEQ ID NO: 4836043 - DNA, 25 bp, Homo sapien
tttgagctgccagaccttgcctttg

SEQ ID NO: 4836044 - DNA, 25 bp, Homo sapien
catgggtgcactatttctgcaggcc

SEQ ID NO: 4836045 - DNA, 25 bp, Homo sapien
gagcctatgaaccagaggtctgtgg

SEQ ID NO: 4836046 - DNA, 25 bp, Homo sapien
cccgggggctacactgtgctgtctt

SEQ ID NO: 4836047 - DNA, 25 bp, Homo sapien
tcggtcctttctgaccttcctcttc

SEQ ID NO: 4836048 - DNA, 25 bp, Homo sapien
atcaccagggccctctcggtccttt

SEQ ID NO: 4836049 - DNA, 25 bp, Homo sapien
ttctttgggtgtggataagtggtgc

SEQ ID NO: 4836050 - DNA, 25 bp, Homo sapien
ccaaccccaggcctgacagccactt

SEQ ID NO: 4836051 - DNA, 25 bp, Homo sapien
aaccccaggcctgacagccacttcg

SEQ ID NO: 4836052 - DNA, 25 bp, Homo sapien
ccccaggcctgacagccacttcgtc

SEQ ID NO: 4836053 - DNA, 25 bp, Homo sapien
accccaggcctgacagccacttcgt

SEQ ID NO: 4836054 - DNA, 25 bp, Homo sapien
ggaagatgaggcccttctgagcttg

SEQ ID NO: 4836055 - DNA, 25 bp, Homo sapien
acaaagagcttgtgctccctgggaa

SEQ ID NO: 4836056 - DNA, 25 bp, Homo sapien
tctgagcttgggcctgcaccacact

SEQ ID NO: 4836057 - DNA, 25 bp, Homo sapien
agcttgggcctgcaccacactggct

SEQ ID NO: 4836058 - DNA, 25 bp, Homo sapien
tgcagccgccggtgattctgtcttc

SEQ ID NO: 4836059 - DNA, 25 bp, Homo sapien
tcagaaagaagccacgcagtgtgaa

SEQ ID NO: 4836060 - DNA, 25 bp, Homo sapien
tcccattctggtgtgcgttcccctg

SEQ ID NO: 4836061 - DNA, 25 bp, Homo sapien
taaaaccaagttcttcccgatgcag

SEQ ID NO: 4836062 - DNA, 25 bp, Homo sapien
tgaagcccagggcaacaaggaatcg

SEQ ID NO: 4836063 - DNA, 25 bp, Homo sapien
agcccagggcaacaaggaatcgccc

SEQ ID NO: 4836064 - DNA, 25 bp, Homo sapien
ctgaagcccagggcaacaaggaatc

SEQ ID NO: 4836065 - DNA, 25 bp, Homo sapien
ccagggcaacaaggaatcgccccat

SEQ ID NO: 4836066 - DNA, 25 bp, Homo sapien
tctgtggaccccagggagtagaagg

SEQ ID NO: 4836067 - DNA, 25 bp, Homo sapien
cacagagaacgttccttctgcagat

SEQ ID NO: 4836068 - DNA, 25 bp, Homo sapien
ttgcatctcatggaagggctggcag

SEQ ID NO: 4836069 - DNA, 25 bp, Homo sapien
cgttccttctgcagatgacttggct

SEQ ID NO: 4836070 - DNA, 25 bp, Homo sapien
tggttgccatccaaacgggaacttg

SEQ ID NO: 4836071 - DNA, 25 bp, Homo sapien
tcatccagtgatgagcccatcgttt

SEQ ID NO: 4836072 - DNA, 25 bp, Homo sapien
atccagtgatgagcccatcgtttct

SEQ ID NO: 4836073 - DNA, 25 bp, Homo sapien
catccagtgatgagcccatcgtttc

SEQ ID NO: 4836074 - DNA, 25 bp, Homo sapien
ctgttctgtttcctctctgcagaag

SEQ ID NO: 4836075 - DNA, 25 bp, Homo sapien
gttctggaagctaagttgtactttc

SEQ ID NO: 4836076 - DNA, 25 bp, Homo sapien
tgcagaagttctggaagctaagttg

SEQ ID NO: 4836077 - DNA, 25 bp, Homo sapien
tcctctctgcagaagttctggaagc

SEQ ID NO: 4836078 - DNA, 25 bp, Homo sapien
ggtgaggtcatgtaactctgccagg

SEQ ID NO: 4836079 - DNA, 25 bp, Homo sapien
agggtgggcaggcaagatcccgcgg

SEQ ID NO: 4836080 - DNA, 25 bp, Homo sapien
gatcccgcgggtgaggtcatgtaac

SEQ ID NO: 4836081 - DNA, 25 bp, Homo sapien
atgtaactctgccaggaacggcggg

SEQ ID NO: 4836082 - DNA, 25 bp, Homo sapien
caggcttgtggtccagtccagttgg

SEQ ID NO: 4836083 - DNA, 25 bp, Homo sapien
ccaacaagcaggcttgtggtccagt

SEQ ID NO: 4836084 - DNA, 25 bp, Homo sapien
ccttggcaatatggtttcctaagct

SEQ ID NO: 4836085 - DNA, 25 bp, Homo sapien
tcctaagctgagagcccaacaagca

SEQ ID NO: 4836086 - DNA, 25 bp, Homo sapien
ctcccaagtctcaagcgagctgttt

SEQ ID NO: 4836087 - DNA, 25 bp, Homo sapien
tctcccaagtctcaagcgagctgtt

SEQ ID NO: 4836088 - DNA, 25 bp, Homo sapien
ccaagtctcaagcgagctgtttggt

SEQ ID NO: 4836089 - DNA, 25 bp, Homo sapien
gtaacaccctgcagctgccggaaag

SEQ ID NO: 4836090 - DNA, 25 bp, Homo sapien
tgtgcggagtaagagttaaactgcc

SEQ ID NO: 4836091 - DNA, 25 bp, Homo sapien
agagagatggcgcttccgggcacca

SEQ ID NO: 4836092 - DNA, 25 bp, Homo sapien
tcagacagccgtctgttgccccggt

SEQ ID NO: 4836093 - DNA, 25 bp, Homo sapien
gagcagcaacaggcccctcgctcac

SEQ ID NO: 4836094 - DNA, 25 bp, Homo sapien
agcagcaacaggcccctcgctcaca

SEQ ID NO: 4836095 - DNA, 25 bp, Homo sapien
cagaccctgggtaccagggggagca

SEQ ID NO: 4836096 - DNA, 25 bp, Homo sapien
accctgggtaccagggggagcagca

SEQ ID NO: 4836097 - DNA, 25 bp, Homo sapien
ggcgggacggcagcatatcccatct

SEQ ID NO: 4836098 - DNA, 25 bp, Homo sapien
ccttgttaaagaacgttactcagtg

SEQ ID NO: 4836099 - DNA, 25 bp, Homo sapien
catctttcacgttcagtccttgtta

SEQ ID NO: 4836100 - DNA, 25 bp, Homo sapien
ccccaggcaggtgagcgtcaggctt

SEQ ID NO: 4836101 - DNA, 25 bp, Homo sapien
gtttcggtagagaccccacatggga

SEQ ID NO: 4836102 - DNA, 25 bp, Homo sapien
gcttagaggagcatttgcctgttcc

SEQ ID NO: 4836103 - DNA, 25 bp, Homo sapien
gggctccgacttatcacctgagcag

SEQ ID NO: 4836104 - DNA, 25 bp, Homo sapien
catctgtggcgagcatttggggctc

SEQ ID NO: 4836105 - DNA, 25 bp, Homo sapien
gtcctcttggatggcagatatgtct

SEQ ID NO: 4836106 - DNA, 25 bp, Homo sapien
agaggcatctgaccagagcccaaca

SEQ ID NO: 4836107 - DNA, 25 bp, Homo sapien
ggtgtggtgatgcactgagttatgg

SEQ ID NO: 4836108 - DNA, 25 bp, Homo sapien
tacagttgaagaactgggtctgtct

SEQ ID NO: 4836109 - DNA, 25 bp, Homo sapien
taggccaccactctgccaagacctg

SEQ ID NO: 4836110 - DNA, 25 bp, Homo sapien
ggccaccactctgccaagacctggt

SEQ ID NO: 4836111 - DNA, 25 bp, Homo sapien
ccaccactctgccaagacctggtac

SEQ ID NO: 4836112 - DNA, 25 bp, Homo sapien
ctaggccaccactctgccaagacct

SEQ ID NO: 4836113 - DNA, 25 bp, Homo sapien
tatcccagtaaaggtagttctctag

SEQ ID NO: 4836114 - DNA, 25 bp, Homo sapien
gaatgaacagttgagacactgtgtc

SEQ ID NO: 4836115 - DNA, 25 bp, Homo sapien
actgaggcccaataaatgcttaatg

SEQ ID NO: 4836116 - DNA, 25 bp, Homo sapien
tgtgtcttgcaaaggaagacatctc

SEQ ID NO: 4836117 - DNA, 25 bp, Homo sapien
gtggcctgggttctcggcaggtccc

SEQ ID NO: 4836118 - DNA, 25 bp, Homo sapien
tgtagctgctgacccgagccttctg

SEQ ID NO: 4836119 - DNA, 25 bp, Homo sapien
cccctgtagctgctgacccgagcct

SEQ ID NO: 4836120 - DNA, 25 bp, Homo sapien
gctgacccgagccttctgcttgctt

SEQ ID NO: 4836121 - DNA, 25 bp, Homo sapien
gctctcgtctatacatcctgtgtga

SEQ ID NO: 4836122 - DNA, 25 bp, Homo sapien
tgctctcgtctatacatcctgtgtg

SEQ ID NO: 4836123 - DNA, 25 bp, Homo sapien
cggcatacactgatagatagtaaag

SEQ ID NO: 4836124 - DNA, 25 bp, Homo sapien
cactgatagatagtaaaggcaaaaa

SEQ ID NO: 4836125 - DNA, 25 bp, Homo sapien
ttgaaggagcttctaggttcaccac

SEQ ID NO: 4836126 - DNA, 25 bp, Homo sapien
atttcagccttgcaaactgtttcct

SEQ ID NO: 4836127 - DNA, 25 bp, Homo sapien
tttcagccttgcaaactgtttcctc

SEQ ID NO: 4836128 - DNA, 25 bp, Homo sapien
tcagccttgcaaactgtttcctcac

SEQ ID NO: 4836129 - DNA, 25 bp, Homo sapien
catttcagccttgcaaactgtttcc

SEQ ID NO: 4836130 - DNA, 25 bp, Homo sapien
atcccattggcctggttagaaaact

SEQ ID NO: 4836131 - DNA, 25 bp, Homo sapien
gacttatctctataatcccattggc

SEQ ID NO: 4836132 - DNA, 25 bp, Homo sapien
gaagagaagacttatctctataatc

SEQ ID NO: 4836133 - DNA, 25 bp, Homo sapien
tatctctataatcccattggcctgg

SEQ ID NO: 4836134 - DNA, 25 bp, Homo sapien
atggtaacgacatggatttgtcttc

SEQ ID NO: 4836135 - DNA, 25 bp, Homo sapien
taacgacatggatttgtcttcttag

SEQ ID NO: 4836136 - DNA, 25 bp, Homo sapien
acgacatggatttgtcttcttaggg

SEQ ID NO: 4836137 - DNA, 25 bp, Homo sapien
ggtaacgacatggatttgtcttctt

SEQ ID NO: 4836138 - DNA, 25 bp, Homo sapien
cttgctcagtgtatcggttggcttt

SEQ ID NO: 4836139 - DNA, 25 bp, Homo sapien
gcttgctcagtgtatcggttggctt

SEQ ID NO: 4836140 - DNA, 25 bp, Homo sapien
cgcctgcagccgagtccgcaggagt

SEQ ID NO: 4836141 - DNA, 25 bp, Homo sapien
gagcccgcctgcagccgagtccgca

SEQ ID NO: 4836142 - DNA, 25 bp, Homo sapien
gcctgcagccgagtccgcaggagtc

SEQ ID NO: 4836143 - DNA, 25 bp, Homo sapien
cccgcctgcagccgagtccgcagga

SEQ ID NO: 4836144 - DNA, 25 bp, Homo sapien
gcgttaccgggggtctgctgaccaa

SEQ ID NO: 4836145 - DNA, 25 bp, Homo sapien
tgaccaaaccgagccggatcgtctg

SEQ ID NO: 4836146 - DNA, 25 bp, Homo sapien
accgagccggatcgtctgagccctg

SEQ ID NO: 4836147 - DNA, 25 bp, Homo sapien
gggtctgctgaccaaaccgagccgg

SEQ ID NO: 4836148 - DNA, 25 bp, Homo sapien
catgtgtataggtttgaagtccacg

SEQ ID NO: 4836149 - DNA, 25 bp, Homo sapien
cagaggaccggggttgtgcaccttt

SEQ ID NO: 4836150 - DNA, 25 bp, Homo sapien
tcacatgtgtataggtttgaagtcc

SEQ ID NO: 4836151 - DNA, 25 bp, Homo sapien
tgtataggtttgaagtccacgccca

SEQ ID NO: 4836152 - DNA, 25 bp, Homo sapien
gaatagttacaatgggtggtcccga

SEQ ID NO: 4836153 - DNA, 25 bp, Homo sapien
tccctgggtgaatgtgaagtgtctg

SEQ ID NO: 4836154 - DNA, 25 bp, Homo sapien
ccgaagtccagaggcgaagggttca

SEQ ID NO: 4836155 - DNA, 25 bp, Homo sapien
tgtctgcccattcacagtctcctca

SEQ ID NO: 4836156 - DNA, 25 bp, Homo sapien
tttgaggaagacttcgggatgtgcc

SEQ ID NO: 4836157 - DNA, 25 bp, Homo sapien
tccggagtctttgggaaccaatcca

SEQ ID NO: 4836158 - DNA, 25 bp, Homo sapien
tgttgtgacgcatgtgaagaaatac

SEQ ID NO: 4836159 - DNA, 25 bp, Homo sapien
gcaaatgttcctcattccggagtct

SEQ ID NO: 4836160 - DNA, 25 bp, Homo sapien
ggagcaaataactggccccaggcca

SEQ ID NO: 4836161 - DNA, 25 bp, Homo sapien
aggccacactgccagtagacgtggt

SEQ ID NO: 4836162 - DNA, 25 bp, Homo sapien
ccacaagtaatggagcaaataactg

SEQ ID NO: 4836163 - DNA, 25 bp, Homo sapien
gccagtagacgtggttgtcttggcc

SEQ ID NO: 4836164 - DNA, 25 bp, Homo sapien
accagctaccaagagaggcctgttg

SEQ ID NO: 4836165 - DNA, 25 bp, Homo sapien
ttggtgagcaagagacaccagctac

SEQ ID NO: 4836166 - DNA, 25 bp, Homo sapien
ctcactggagggcatcctgttggtg

SEQ ID NO: 4836167 - DNA, 25 bp, Homo sapien
aatctgaggattgctggacacctcc

SEQ ID NO: 4836168 - DNA, 25 bp, Homo sapien
aggccatgtctccttgaggcatgcg

SEQ ID NO: 4836169 - DNA, 25 bp, Homo sapien
ttttatctcctacacaggccatgtc

SEQ ID NO: 4836170 - DNA, 25 bp, Homo sapien
ttctcatttagtttggtcgtggact

SEQ ID NO: 4836171 - DNA, 25 bp, Homo sapien
ttggtcgtggactgtgctttgcaga

SEQ ID NO: 4836172 - DNA, 25 bp, Homo sapien
cgagcagccaccagatagcttgcac

SEQ ID NO: 4836173 - DNA, 25 bp, Homo sapien
agccaccagatagcttgcacccacg

SEQ ID NO: 4836174 - DNA, 25 bp, Homo sapien
ctttgcctgaagtgcaaagagcccc

SEQ ID NO: 4836175 - DNA, 25 bp, Homo sapien
tgatgctggcggtgatcccgatggt

SEQ ID NO: 4836176 - DNA, 25 bp, Homo sapien
gctgccacaacgcaggaagatggct

SEQ ID NO: 4836177 - DNA, 25 bp, Homo sapien
aagagccccattcatgatttgatct

SEQ ID NO: 4836178 - DNA, 25 bp, Homo sapien
tgggtccgtcaaggcccaatgtcct

SEQ ID NO: 4836179 - DNA, 25 bp, Homo sapien
cgcaccagaaggtcttgttccatcc

SEQ ID NO: 4836180 - DNA, 25 bp, Homo sapien
ggccagcgcgtgttgtctctgttcc

SEQ ID NO: 4836181 - DNA, 25 bp, Homo sapien
ccctctcgcaccagaaggtcttgtt

SEQ ID NO: 4836182 - DNA, 25 bp, Homo sapien
aatgttagtccaggtagcacatccc

SEQ ID NO: 4836183 - DNA, 25 bp, Homo sapien
tggcaagagcactacagcagcacaa

SEQ ID NO: 4836184 - DNA, 25 bp, Homo sapien
gggctggccaatctcaagtctcctg

SEQ ID NO: 4836185 - DNA, 25 bp, Homo sapien
tgcctcactgagttccagagacctg

SEQ ID NO: 4836186 - DNA, 25 bp, Homo sapien
cacgggatcttgttccgactcgtct

SEQ ID NO: 4836187 - DNA, 25 bp, Homo sapien
tcattgataagagcctgcagccacc

SEQ ID NO: 4836188 - DNA, 25 bp, Homo sapien
caccctgttgatctcattgataaga

SEQ ID NO: 4836189 - DNA, 25 bp, Homo sapien
ctagggcatagtcacgggatcttgt

SEQ ID NO: 4836190 - DNA, 25 bp, Homo sapien
tcttccctgcttaggtggcatggtg

SEQ ID NO: 4836191 - DNA, 25 bp, Homo sapien
tctttgtagcccattggttcagcag

SEQ ID NO: 4836192 - DNA, 25 bp, Homo sapien
caaattctagagtgcggaaagacct

SEQ ID NO: 4836193 - DNA, 25 bp, Homo sapien
gaaagacctaggtaatatctcgcct

SEQ ID NO: 4836194 - DNA, 25 bp, Homo sapien
tcacctctggtcctgctcaacactt

SEQ ID NO: 4836195 - DNA, 25 bp, Homo sapien
ctcaacacttgctgcccagatgtgg

SEQ ID NO: 4836196 - DNA, 25 bp, Homo sapien
ctgctcaacacttgctgcccagatg

SEQ ID NO: 4836197 - DNA, 25 bp, Homo sapien
tctggtcctgctcaacacttgctgc

SEQ ID NO: 4836198 - DNA, 25 bp, Homo sapien
tcggggctcatggactcggggctca

SEQ ID NO: 4836199 - DNA, 25 bp, Homo sapien
cggggctcatggactcggggctcat

SEQ ID NO: 4836200 - DNA, 25 bp, Homo sapien
ggactcggggctcatggactcgggg

SEQ ID NO: 4836201 - DNA, 25 bp, Homo sapien
actcggggctcatggactcggggct

SEQ ID NO: 4836202 - DNA, 25 bp, Homo sapien
gcctcgtattcatttgctaagacca

SEQ ID NO: 4836203 - DNA, 25 bp, Homo sapien
aacaacatagacttggggctcatag

SEQ ID NO: 4836204 - DNA, 25 bp, Homo sapien
cttgggcctcgtattcatttgctaa

SEQ ID NO: 4836205 - DNA, 25 bp, Homo sapien
acaaacaacatagacttggggctca

SEQ ID NO: 4836206 - DNA, 25 bp, Homo sapien
tgcacagtgaagcatcaggcctttg

SEQ ID NO: 4836207 - DNA, 25 bp, Homo sapien
agtccaggcctcgagggtcacctcc

SEQ ID NO: 4836208 - DNA, 25 bp, Homo sapien
cctggagatttacaggacccagtct

SEQ ID NO: 4836209 - DNA, 25 bp, Homo sapien
tttacaggacccagtctggtgcaca

SEQ ID NO: 4836210 - DNA, 25 bp, Homo sapien
gattggagcggttgccatggggacc

SEQ ID NO: 4836211 - DNA, 25 bp, Homo sapien
accagaaactgtgcccagatgcatt

SEQ ID NO: 4836212 - DNA, 25 bp, Homo sapien
acacagattggagcggttgccatgg

SEQ ID NO: 4836213 - DNA, 25 bp, Homo sapien
tgacacagattggagcggttgccat

SEQ ID NO: 4836214 - DNA, 25 bp, Homo sapien
tattgccctgtgtgttcagcagtgc

SEQ ID NO: 4836215 - DNA, 25 bp, Homo sapien
aaaaagaaaatattgccctgtgtgt

SEQ ID NO: 4836216 - DNA, 25 bp, Homo sapien
cctgtgtgttcagcagtgctggtat

SEQ ID NO: 4836217 - DNA, 25 bp, Homo sapien
tgacctcggttgatacgcccacccc

SEQ ID NO: 4836218 - DNA, 25 bp, Homo sapien
cagttgatattacgtatttgatggg

SEQ ID NO: 4836219 - DNA, 25 bp, Homo sapien
gttgatattacgtatttgatgggca

SEQ ID NO: 4836220 - DNA, 25 bp, Homo sapien
tattacgtatttgatgggcatgtga

SEQ ID NO: 4836221 - DNA, 25 bp, Homo sapien
gatattacgtatttgatgggcatgt

SEQ ID NO: 4836222 - DNA, 25 bp, Homo sapien
tgcagatcacggagggctgcaaact

SEQ ID NO: 4836223 - DNA, 25 bp, Homo sapien
tagaatgcagatcacggagggctgc

SEQ ID NO: 4836224 - DNA, 25 bp, Homo sapien
gatgctaaggagtgagagttgcaca

SEQ ID NO: 4836225 - DNA, 25 bp, Homo sapien
tcattggctcttgtggattcccagt

SEQ ID NO: 4836226 - DNA, 25 bp, Homo sapien
cagaattttccatagagttaggttc

SEQ ID NO: 4836227 - DNA, 25 bp, Homo sapien
tccggttgtgagtgggcagaatttt

SEQ ID NO: 4836228 - DNA, 25 bp, Homo sapien
tggtgcctcggtgggcttccggttg

SEQ ID NO: 4836229 - DNA, 25 bp, Homo sapien
gcagaattttccatagagttaggtt

SEQ ID NO: 4836230 - DNA, 25 bp, Homo sapien
gaatggacctaagggtgcctcaggc

SEQ ID NO: 4836231 - DNA, 25 bp, Homo sapien
tagttgaagagacccatgtatgacc

SEQ ID NO: 4836232 - DNA, 25 bp, Homo sapien
cccggccagcattgtatcttaaagg

SEQ ID NO: 4836233 - DNA, 25 bp, Homo sapien
tcaggcatgggaagacccgataccg

SEQ ID NO: 4836234 - DNA, 25 bp, Homo sapien
acattcctgtctgttgcggatgaac

SEQ ID NO: 4836235 - DNA, 25 bp, Homo sapien
caaacattcctgtctgttgcggatg

SEQ ID NO: 4836236 - DNA, 25 bp, Homo sapien
ctcgcaaacattcctgtctgttgcg

SEQ ID NO: 4836237 - DNA, 25 bp, Homo sapien
gcaaacattcctgtctgttgcggat

SEQ ID NO: 4836238 - DNA, 25 bp, Homo sapien
agaaaacttggtccctactggaatg

SEQ ID NO: 4836239 - DNA, 25 bp, Homo sapien
caggcatttgctacactcagaagga

SEQ ID NO: 4836240 - DNA, 25 bp, Homo sapien
tcagaaggaattaaccaggcaggag

SEQ ID NO: 4836241 - DNA, 25 bp, Homo sapien
tgatgttggatagcccaccctagca

SEQ ID NO: 4836242 - DNA, 25 bp, Homo sapien
tctgactagaaggtgagcgatcgcc

SEQ ID NO: 4836243 - DNA, 25 bp, Homo sapien
gctaacaggataagacgggcaccac

SEQ ID NO: 4836244 - DNA, 25 bp, Homo sapien
tcagttgttacgatacccagcggct

SEQ ID NO: 4836245 - DNA, 25 bp, Homo sapien
tctaagcgaaagacatgaggcctca

SEQ ID NO: 4836246 - DNA, 25 bp, Homo sapien
ttttggagttaggacagtgtcgcag

SEQ ID NO: 4836247 - DNA, 25 bp, Homo sapien
tgtcgcagttgttgtcgactgtaac

SEQ ID NO: 4836248 - DNA, 25 bp, Homo sapien
agtgtcgcagttgttgtcgactgta

SEQ ID NO: 4836249 - DNA, 25 bp, Homo sapien
aagttttggagttaggacagtgtcg

SEQ ID NO: 4836250 - DNA, 25 bp, Homo sapien
gcctgatgtgaagctgacgccgtat

SEQ ID NO: 4836251 - DNA, 25 bp, Homo sapien
tcagaggccctaatcatgacagagg

SEQ ID NO: 4836252 - DNA, 25 bp, Homo sapien
gacagaggaacgattattgctacag

SEQ ID NO: 4836253 - DNA, 25 bp, Homo sapien
gggtcctctgagttaggtccagctc

SEQ ID NO: 4836254 - DNA, 25 bp, Homo sapien
ggcacagtactactgctgatcttca

SEQ ID NO: 4836255 - DNA, 25 bp, Homo sapien
aggcacagtactactgctgatcttc

SEQ ID NO: 4836256 - DNA, 25 bp, Homo sapien
tcagaattttgattggataattata

SEQ ID NO: 4836257 - DNA, 25 bp, Homo sapien
ttaggactgcataggaaacttctca

SEQ ID NO: 4836258 - DNA, 25 bp, Homo sapien
acttctcatcattcagaattttgat

SEQ ID NO: 4836259 - DNA, 25 bp, Homo sapien
taattatatttgtttatatcagtgg

SEQ ID NO: 4836260 - DNA, 25 bp, Homo sapien
ctcagcagtttttgagaggtcgagg

SEQ ID NO: 4836261 - DNA, 25 bp, Homo sapien
taatctcagcagtttttgagaggtc

SEQ ID NO: 4836262 - DNA, 25 bp, Homo sapien
tctcagcagtttttgagaggtcgag

SEQ ID NO: 4836263 - DNA, 25 bp, Homo sapien
atgttaggttaagccgggtgcggtg

SEQ ID NO: 4836264 - DNA, 25 bp, Homo sapien
cacgtgtgttcctaatgcaatttga

SEQ ID NO: 4836265 - DNA, 25 bp, Homo sapien
taatgcaatttgaggttccctctca

SEQ ID NO: 4836266 - DNA, 25 bp, Homo sapien
ttcactgagaggtgataatcggcag

SEQ ID NO: 4836267 - DNA, 25 bp, Homo sapien
ggtgataatcggcagctgtagtcat

SEQ ID NO: 4836268 - DNA, 25 bp, Homo sapien
tcagaagatgctggaaaatagtatt

SEQ ID NO: 4836269 - DNA, 25 bp, Homo sapien
tgcggtgctcggctcgtaaagattt

SEQ ID NO: 4836270 - DNA, 25 bp, Homo sapien
aaatagtatttaggcagcagctggc

SEQ ID NO: 4836271 - DNA, 25 bp, Homo sapien
cattagctggacatacactctgatt

SEQ ID NO: 4836272 - DNA, 25 bp, Homo sapien
tgtaacatcagaatgataccatttc

SEQ ID NO: 4836273 - DNA, 25 bp, Homo sapien
gatggcctgggtaatgtcacaagtg

SEQ ID NO: 4836274 - DNA, 25 bp, Homo sapien
ttttcatatatgcaacctcgatggc

SEQ ID NO: 4836275 - DNA, 25 bp, Homo sapien
taccgactctaccattgtaacatca

SEQ ID NO: 4836276 - DNA, 25 bp, Homo sapien
agttcagcgtgactttcaccatttt

SEQ ID NO: 4836277 - DNA, 25 bp, Homo sapien
taagttcagcgtgactttcaccatt

SEQ ID NO: 4836278 - DNA, 25 bp, Homo sapien
cttaagttcagcgtgactttcacca

SEQ ID NO: 4836279 - DNA, 25 bp, Homo sapien
gcaaaagttcacctgtgtccagccc

SEQ ID NO: 4836280 - DNA, 25 bp, Homo sapien
ttacctcgaaatgctcaatggccag

SEQ ID NO: 4836281 - DNA, 25 bp, Homo sapien
ttatttacctcgaaatgctcaatgg

SEQ ID NO: 4836282 - DNA, 25 bp, Homo sapien
gtgctttatttacctcgaaatgctc

SEQ ID NO: 4836283 - DNA, 25 bp, Homo sapien
tgctttatttacctcgaaatgctca

SEQ ID NO: 4836284 - DNA, 25 bp, Homo sapien
gttagtccagccatgagctctgtaa

SEQ ID NO: 4836285 - DNA, 25 bp, Homo sapien
gctgggagagcccacgtatgggtta

SEQ ID NO: 4836286 - DNA, 25 bp, Homo sapien
ggagagcccacgtatgggttagtcc

SEQ ID NO: 4836287 - DNA, 25 bp, Homo sapien
cacgtatgggttagtccagccatga

SEQ ID NO: 4836288 - DNA, 25 bp, Homo sapien
caggtatctttttcttcggtgcaac

SEQ ID NO: 4836289 - DNA, 25 bp, Homo sapien
tctcaggtatctttttcttcggtgc

SEQ ID NO: 4836290 - DNA, 25 bp, Homo sapien
tcttctcaggtatctttttcttcgg

SEQ ID NO: 4836291 - DNA, 25 bp, Homo sapien
cagtttcttctcaggtatctttttc

SEQ ID NO: 4836292 - DNA, 25 bp, Homo sapien
tgcctcccaccctgtacttgagtag

SEQ ID NO: 4836293 - DNA, 25 bp, Homo sapien
cccaagtattggtgtcatgcttaag

SEQ ID NO: 4836294 - DNA, 25 bp, Homo sapien
tatgagacataccacttgactcagc

SEQ ID NO: 4836295 - DNA, 25 bp, Homo sapien
gacatagtacacgtaacagatcttc

SEQ ID NO: 4836296 - DNA, 25 bp, Homo sapien
gtgctttttctccatttccttagtg

SEQ ID NO: 4836297 - DNA, 25 bp, Homo sapien
tttttctccatttccttagtgccat

SEQ ID NO: 4836298 - DNA, 25 bp, Homo sapien
ctttttctccatttccttagtgcca

SEQ ID NO: 4836299 - DNA, 25 bp, Homo sapien
gctttttctccatttccttagtgcc

SEQ ID NO: 4836300 - DNA, 25 bp, Homo sapien
ggtgtgccctcgttttccatcattt

SEQ ID NO: 4836301 - DNA, 25 bp, Homo sapien
caaagcccgtagaagtgtggtgtgc

SEQ ID NO: 4836302 - DNA, 25 bp, Homo sapien
ctgcgtgccaaagcccgtagaagtg

SEQ ID NO: 4836303 - DNA, 25 bp, Homo sapien
gaagtgtggtgtgccctcgttttcc

SEQ ID NO: 4836304 - DNA, 25 bp, Homo sapien
ctacagttccatccggagctgattg

SEQ ID NO: 4836305 - DNA, 25 bp, Homo sapien
tacagttccatccggagctgattgt

SEQ ID NO: 4836306 - DNA, 25 bp, Homo sapien
caggtaccttccagattaaagtggg

SEQ ID NO: 4836307 - DNA, 25 bp, Homo sapien
caaagccctggtttgaagtgaagtg

SEQ ID NO: 4836308 - DNA, 25 bp, Homo sapien
catacctagatcaagggtggctggg

SEQ ID NO: 4836309 - DNA, 25 bp, Homo sapien
catgccattgtgaagaactagccgt

SEQ ID NO: 4836310 - DNA, 25 bp, Homo sapien
ggattaccacctttactctgcccag

SEQ ID NO: 4836311 - DNA, 25 bp, Homo sapien
gaaataatctttacctgctggcctt

SEQ ID NO: 4836312 - DNA, 25 bp, Homo sapien
taccatagggagtatgaggcttaca

SEQ ID NO: 4836313 - DNA, 25 bp, Homo sapien
tagagataccaaatacactcagcga

SEQ ID NO: 4836314 - DNA, 25 bp, Homo sapien
gagcaaaccacacagtttcataaac

SEQ ID NO: 4836315 - DNA, 25 bp, Homo sapien
gcaaaccacacagtttcataaacct

SEQ ID NO: 4836316 - DNA, 25 bp, Homo sapien
aaccacacagtttcataaacctcat

SEQ ID NO: 4836317 - DNA, 25 bp, Homo sapien
tgtgagcaaaccacacagtttcata

SEQ ID NO: 4836318 - DNA, 25 bp, Homo sapien
catagatatctcttagtacaaagta

SEQ ID NO: 4836319 - DNA, 25 bp, Homo sapien
caagtttaatggtgggtaggagcac

SEQ ID NO: 4836320 - DNA, 25 bp, Homo sapien
tccttctatgaatacaagatactca

SEQ ID NO: 4836321 - DNA, 25 bp, Homo sapien
caaacacagacaccgtttccagatg

SEQ ID NO: 4836322 - DNA, 25 bp, Homo sapien
agcgttcagtcctcgccccggtggg

SEQ ID NO: 4836323 - DNA, 25 bp, Homo sapien
gtattgatagcgttcagtcctcgcc

SEQ ID NO: 4836324 - DNA, 25 bp, Homo sapien
atagcgttcagtcctcgccccggtg

SEQ ID NO: 4836325 - DNA, 25 bp, Homo sapien
ttgatagcgttcagtcctcgccccg

SEQ ID NO: 4836326 - DNA, 25 bp, Homo sapien
ttggagtctcaccaagacacaggct

SEQ ID NO: 4836327 - DNA, 25 bp, Homo sapien
ccttctgaagcaccagcctcgaggc

SEQ ID NO: 4836328 - DNA, 25 bp, Homo sapien
gcctcgaggcacttctgttggagtc

SEQ ID NO: 4836329 - DNA, 25 bp, Homo sapien
tctgttggagtctcaccaagacaca

SEQ ID NO: 4836330 - DNA, 25 bp, Homo sapien
agagggcatccacggccaagcatac

SEQ ID NO: 4836331 - DNA, 25 bp, Homo sapien
cctgcagagggcatccacggccaag

SEQ ID NO: 4836332 - DNA, 25 bp, Homo sapien
tgcagagggcatccacggccaagca

SEQ ID NO: 4836333 - DNA, 25 bp, Homo sapien
atccacggccaagcatacactctgc

SEQ ID NO: 4836334 - DNA, 25 bp, Homo sapien
cctcctcgcctttttgcttttccat

SEQ ID NO: 4836335 - DNA, 25 bp, Homo sapien
ctaagtagctcccatcgcgggctcc

SEQ ID NO: 4836336 - DNA, 25 bp, Homo sapien
taagtagctcccatcgcgggctcca

SEQ ID NO: 4836337 - DNA, 25 bp, Homo sapien
tagctcccatcgcgggctccaagtc

SEQ ID NO: 4836338 - DNA, 25 bp, Homo sapien
agtagctcccatcgcgggctccaag

SEQ ID NO: 4836339 - DNA, 25 bp, Homo sapien
tttttgcgtaattgctatggctaca

SEQ ID NO: 4836340 - DNA, 25 bp, Homo sapien
aatctggttgacagtttagaggctg

SEQ ID NO: 4836341 - DNA, 25 bp, Homo sapien
tcattcctgatcttacagaatctgg

SEQ ID NO: 4836342 - DNA, 25 bp, Homo sapien
ttttgggtaaaataaggtgtgctga

SEQ ID NO: 4836343 - DNA, 25 bp, Homo sapien
ttccgaagcctgaatatcctcatgg

SEQ ID NO: 4836344 - DNA, 25 bp, Homo sapien
tctggtgggctaaggtgcttttctg

SEQ ID NO: 4836345 - DNA, 25 bp, Homo sapien
tggaggcactcgtggcgagcctctt

SEQ ID NO: 4836346 - DNA, 25 bp, Homo sapien
ccagaccttcttgctaccgtggagg

SEQ ID NO: 4836347 - DNA, 25 bp, Homo sapien
tgctttattggtcttagagctgcgg

SEQ ID NO: 4836348 - DNA, 25 bp, Homo sapien
cttccaaacaaccagtgcaaaatcc

SEQ ID NO: 4836349 - DNA, 25 bp, Homo sapien
attggtcttagagctgcgggcttca

SEQ ID NO: 4836350 - DNA, 25 bp, Homo sapien
gtatcttccaaacaaccagtgcaaa

SEQ ID NO: 4836351 - DNA, 25 bp, Homo sapien
gacacgctaagatctggcttcaaag

SEQ ID NO: 4836352 - DNA, 25 bp, Homo sapien
gacaacaaagacacgctaagatctg

SEQ ID NO: 4836353 - DNA, 25 bp, Homo sapien
gataacccgacaacaaagacacgct

SEQ ID NO: 4836354 - DNA, 25 bp, Homo sapien
ctgataacccgacaacaaagacacg

SEQ ID NO: 4836355 - DNA, 25 bp, Homo sapien
tagcgaacaaagcactgggaagaac

SEQ ID NO: 4836356 - DNA, 25 bp, Homo sapien
tgcatgaagctcagcggaaaaaagc

SEQ ID NO: 4836357 - DNA, 25 bp, Homo sapien
cggaaaaaagctcgggtatgaggca

SEQ ID NO: 4836358 - DNA, 25 bp, Homo sapien
gatcaaatagaaggtccttgtgcat

SEQ ID NO: 4836359 - DNA, 25 bp, Homo sapien
gacagatctgcaggtaccacccgat

SEQ ID NO: 4836360 - DNA, 25 bp, Homo sapien
ggtgatcaccaccatagccgaggga

SEQ ID NO: 4836361 - DNA, 25 bp, Homo sapien
tccgtaactcggtgattccaaagag

SEQ ID NO: 4836362 - DNA, 25 bp, Homo sapien
gaagaacatacctttctaatggaga

SEQ ID NO: 4836363 - DNA, 25 bp, Homo sapien
agagcgccgcgccacgaggtgtaac

SEQ ID NO: 4836364 - DNA, 25 bp, Homo sapien
cgcagggaagtagcggaaacacccg

SEQ ID NO: 4836365 - DNA, 25 bp, Homo sapien
gttcaccaggcctaggactcggcca

SEQ ID NO: 4836366 - DNA, 25 bp, Homo sapien
tggccgctagggactcctagcggaa

SEQ ID NO: 4836367 - DNA, 25 bp, Homo sapien
gagaaagccgcctcagaatccgctt

SEQ ID NO: 4836368 - DNA, 25 bp, Homo sapien
gctcctccgtattgtcctgccggga

SEQ ID NO: 4836369 - DNA, 25 bp, Homo sapien
cgtcgatgtttgaatggaggagcca

SEQ ID NO: 4836370 - DNA, 25 bp, Homo sapien
acaggatcaagtggtggcccgtcag

SEQ ID NO: 4836371 - DNA, 25 bp, Homo sapien
gggtcttaatcagctccgcaaactc

SEQ ID NO: 4836372 - DNA, 25 bp, Homo sapien
taaaatcccaatctataaaagaaca

SEQ ID NO: 4836373 - DNA, 25 bp, Homo sapien
gtaggctattgaggacttcatcaac

SEQ ID NO: 4836374 - DNA, 25 bp, Homo sapien
gggcattcctgtaggctattgagga

SEQ ID NO: 4836375 - DNA, 25 bp, Homo sapien
gaaacacagggttaaagagcatgaa

SEQ ID NO: 4836376 - DNA, 25 bp, Homo sapien
aatggaactggctatattcaagcat

SEQ ID NO: 4836377 - DNA, 25 bp, Homo sapien
tccaactgaataattcgaaaatctt

SEQ ID NO: 4836378 - DNA, 25 bp, Homo sapien
gatggtacccagtgatcctacaaat

SEQ ID NO: 4836379 - DNA, 25 bp, Homo sapien
ttatgatgatggtacccagtgatcc

SEQ ID NO: 4836380 - DNA, 25 bp, Homo sapien
aatcgtgtccagatgtattcgggga

SEQ ID NO: 4836381 - DNA, 25 bp, Homo sapien
aaatcgtgtccagatgtattcgggg

SEQ ID NO: 4836382 - DNA, 25 bp, Homo sapien
cgtgtccagatgtattcggggaagg

SEQ ID NO: 4836383 - DNA, 25 bp, Homo sapien
tcgtgtccagatgtattcggggaag

SEQ ID NO: 4836384 - DNA, 25 bp, Homo sapien
catctatactgtctttggctgccaa

SEQ ID NO: 4836385 - DNA, 25 bp, Homo sapien
caatgggattctacgtgaggcagca

SEQ ID NO: 4836386 - DNA, 25 bp, Homo sapien
gtcagcaaccactctcacaggcaat

SEQ ID NO: 4836387 - DNA, 25 bp, Homo sapien
agaacagccagcgtccatgtctgac

SEQ ID NO: 4836388 - DNA, 25 bp, Homo sapien
tcctggaaaacagacataggaaaac

SEQ ID NO: 4836389 - DNA, 25 bp, Homo sapien
atcctggaaaacagacataggaaaa

SEQ ID NO: 4836390 - DNA, 25 bp, Homo sapien
aatcctggaaaacagacataggaaa

SEQ ID NO: 4836391 - DNA, 25 bp, Homo sapien
gtgcagtaggaaagtcatgtaacca

SEQ ID NO: 4836392 - DNA, 25 bp, Homo sapien
taatgtgtgtaaaaggcttagaaca

SEQ ID NO: 4836393 - DNA, 25 bp, Homo sapien
catagtgttgttgaagcattaagag

SEQ ID NO: 4836394 - DNA, 25 bp, Homo sapien
catgctctacataggtagaaattcc

SEQ ID NO: 4836395 - DNA, 25 bp, Homo sapien
cggtaaaagaaagggtacatcagag

SEQ ID NO: 4836396 - DNA, 25 bp, Homo sapien
ttcaaattcttgctcaggaaggaag

SEQ ID NO: 4836397 - DNA, 25 bp, Homo sapien
tgatggagtccagagtagacaatgc

SEQ ID NO: 4836398 - DNA, 25 bp, Homo sapien
tatcacttcaaacataggacggtaa

SEQ ID NO: 4836399 - DNA, 25 bp, Homo sapien
acagggattgcactgactctacaga

SEQ ID NO: 4836400 - DNA, 25 bp, Homo sapien
taagcatgcatgtgtctaacctctc

SEQ ID NO: 4836401 - DNA, 25 bp, Homo sapien
ttcattgtcagatcgcttgttgcca

SEQ ID NO: 4836402 - DNA, 25 bp, Homo sapien
ggagaactgccactttaatgagcca

SEQ ID NO: 4836403 - DNA, 25 bp, Homo sapien
taatagcttagtactgggaagcgcc

SEQ ID NO: 4836404 - DNA, 25 bp, Homo sapien
tccgaagagcttcatcatcgatgga

SEQ ID NO: 4836405 - DNA, 25 bp, Homo sapien
gaagcgccctccatgtcgaaatgta

SEQ ID NO: 4836406 - DNA, 25 bp, Homo sapien
gaaatgtagctaccttccgaagagc

SEQ ID NO: 4836407 - DNA, 25 bp, Homo sapien
ccacgttcagggatcgggtgtcaat

SEQ ID NO: 4836408 - DNA, 25 bp, Homo sapien
tttgtaccagtgagtggctgaccac

SEQ ID NO: 4836409 - DNA, 25 bp, Homo sapien
gacttatgaattcgcctccactgag

SEQ ID NO: 4836410 - DNA, 25 bp, Homo sapien
gagggtagcatttatcagcttctcg

SEQ ID NO: 4836411 - DNA, 25 bp, Homo sapien
cttccacaagtttgattaagctctc

SEQ ID NO: 4836412 - DNA, 25 bp, Homo sapien
gaatctctttgatgtgagtcagcca

SEQ ID NO: 4836413 - DNA, 25 bp, Homo sapien
ttgatgtgagtcagccagttagagg

SEQ ID NO: 4836414 - DNA, 25 bp, Homo sapien
tgagccgctaggcaggcagttgtca

SEQ ID NO: 4836415 - DNA, 25 bp, Homo sapien
ctgtcgatgcactgagccgctaggc

SEQ ID NO: 4836416 - DNA, 25 bp, Homo sapien
tcagggcctcaaaaccacgaatggt

SEQ ID NO: 4836417 - DNA, 25 bp, Homo sapien
gctctaagatgatctgggccaagga

SEQ ID NO: 4836418 - DNA, 25 bp, Homo sapien
tcacctggagtgtggaatcagttcc

SEQ ID NO: 4836419 - DNA, 25 bp, Homo sapien
tgcagccactctctttcaatcaggg

SEQ ID NO: 4836420 - DNA, 25 bp, Homo sapien
cagcatcaataagcagttcctctgt

SEQ ID NO: 4836421 - DNA, 25 bp, Homo sapien
catcaataagcagttcctctgtgaa

SEQ ID NO: 4836422 - DNA, 25 bp, Homo sapien
ttttaatcaatcgaaatttcacaca

SEQ ID NO: 4836423 - DNA, 25 bp, Homo sapien
cgaaatttcacacattatgtcagct

SEQ ID NO: 4836424 - DNA, 25 bp, Homo sapien
cagcgctgctggaatgggtgaccag

SEQ ID NO: 4836425 - DNA, 25 bp, Homo sapien
gaggcataagcatgctcaaagagca

SEQ ID NO: 4836426 - DNA, 25 bp, Homo sapien
gttgcccagaaatgttccaaactgt

SEQ ID NO: 4836427 - DNA, 25 bp, Homo sapien
ggaaactgacgaaggatctgccaca

SEQ ID NO: 4836428 - DNA, 25 bp, Homo sapien
agaacagggaaactgacgaaggatc

SEQ ID NO: 4836429 - DNA, 25 bp, Homo sapien
gaagactctgcggagcaactgaagg

SEQ ID NO: 4836430 - DNA, 25 bp, Homo sapien
aagactctgcggagcaactgaaggc

SEQ ID NO: 4836431 - DNA, 25 bp, Homo sapien
agtggaagactctgcggagcaactg

SEQ ID NO: 4836432 - DNA, 25 bp, Homo sapien
gtggaagactctgcggagcaactga

SEQ ID NO: 4836433 - DNA, 25 bp, Homo sapien
ttccatacttaaggggataagcttc

SEQ ID NO: 4836434 - DNA, 25 bp, Homo sapien
gcttccatacttaaggggataagct

SEQ ID NO: 4836435 - DNA, 25 bp, Homo sapien
tacttaaggggataagcttcaatag

SEQ ID NO: 4836436 - DNA, 25 bp, Homo sapien
ataagcttccatacttaaggggata

SEQ ID NO: 4836437 - DNA, 25 bp, Homo sapien
aaagcctgaactgtagcccacgtgc

SEQ ID NO: 4836438 - DNA, 25 bp, Homo sapien
ccaggctgcaccatgtcagtggatg

SEQ ID NO: 4836439 - DNA, 25 bp, Homo sapien
tattgctcagacatgtaagatccct

SEQ ID NO: 4836440 - DNA, 25 bp, Homo sapien
tacagttactcaagtcaggaggcac

SEQ ID NO: 4836441 - DNA, 25 bp, Homo sapien
ttcgaaggatattgacttttgcttg

SEQ ID NO: 4836442 - DNA, 25 bp, Homo sapien
tgccttcgaaggatattgacttttg

SEQ ID NO: 4836443 - DNA, 25 bp, Homo sapien
tgcttcatccaaatacttagaggat

SEQ ID NO: 4836444 - DNA, 25 bp, Homo sapien
tctttattatattcaatgatgttaa

SEQ ID NO: 4836445 - DNA, 25 bp, Homo sapien
tctcctgcatcccgtcctctgtttc

SEQ ID NO: 4836446 - DNA, 25 bp, Homo sapien
tgcatcccgtcctctgtttccagtt

SEQ ID NO: 4836447 - DNA, 25 bp, Homo sapien
tcagggactctcctgcatcccgtcc

SEQ ID NO: 4836448 - DNA, 25 bp, Homo sapien
agggactctcctgcatcccgtcctc

SEQ ID NO: 4836449 - DNA, 25 bp, Homo sapien
caaaggcagctctccgatgcaatgt

SEQ ID NO: 4836450 - DNA, 25 bp, Homo sapien
catttcacacaacgcagagctacga

SEQ ID NO: 4836451 - DNA, 25 bp, Homo sapien
tatggccgatcaacagaagcagtgg

SEQ ID NO: 4836452 - DNA, 25 bp, Homo sapien
tgtaaatatcggaggaccatacctg

SEQ ID NO: 4836453 - DNA, 25 bp, Homo sapien
caggcctagcccatgtgaaagaata

SEQ ID NO: 4836454 - DNA, 25 bp, Homo sapien
cctgcagacggttaaagagaatggc

SEQ ID NO: 4836455 - DNA, 25 bp, Homo sapien
tagttaatccttagacctgcagacg

SEQ ID NO: 4836456 - DNA, 25 bp, Homo sapien
tacacgagttatgccttgaagcaga

SEQ ID NO: 4836457 - DNA, 25 bp, Homo sapien
ccggccaacccaaggtgaatgatta

SEQ ID NO: 4836458 - DNA, 25 bp, Homo sapien
taaaccaagcttgacaaaccggcca

SEQ ID NO: 4836459 - DNA, 25 bp, Homo sapien
gaacagtaccacattcgacaagact

SEQ ID NO: 4836460 - DNA, 25 bp, Homo sapien
tgcgtacacaggttcacaatatgga

SEQ ID NO: 4836461 - DNA, 25 bp, Homo sapien
gccattgtgacctcattggagtgcg

SEQ ID NO: 4836462 - DNA, 25 bp, Homo sapien
ctattttcccgctgagtccaactct

SEQ ID NO: 4836463 - DNA, 25 bp, Homo sapien
cattgtgacctcattggagtgcggg

SEQ ID NO: 4836464 - DNA, 25 bp, Homo sapien
tcctgaggtggtagcacgcctattt

SEQ ID NO: 4836465 - DNA, 25 bp, Homo sapien
ctcctctcctcctggctcagggagc

SEQ ID NO: 4836466 - DNA, 25 bp, Homo sapien
ctttctcctctcctcctggctcagg

SEQ ID NO: 4836467 - DNA, 25 bp, Homo sapien
ctttccttggactttctcctctcct

SEQ ID NO: 4836468 - DNA, 25 bp, Homo sapien
ttctcctctcctcctggctcaggga

SEQ ID NO: 4836469 - DNA, 25 bp, Homo sapien
tagcagggcaatagggaggtggaag

SEQ ID NO: 4836470 - DNA, 25 bp, Homo sapien
cacgcagtttaagtagcagggcaat

SEQ ID NO: 4836471 - DNA, 25 bp, Homo sapien
cagtttaagtagcagggcaataggg

SEQ ID NO: 4836472 - DNA, 25 bp, Homo sapien
agaaagggggcccacgaagccagca

SEQ ID NO: 4836473 - DNA, 25 bp, Homo sapien
cagtctttgtctttatttatccctg

SEQ ID NO: 4836474 - DNA, 25 bp, Homo sapien
tcttcagtctttgtctttatttatc

SEQ ID NO: 4836475 - DNA, 25 bp, Homo sapien
ttgtctttatttatccctgtccctc

SEQ ID NO: 4836476 - DNA, 25 bp, Homo sapien
ttcagtctttgtctttatttatccc

SEQ ID NO: 4836477 - DNA, 25 bp, Homo sapien
gggagcagcctgacgttccagagca

SEQ ID NO: 4836478 - DNA, 25 bp, Homo sapien
gattcaccaacatagggagcagcct

SEQ ID NO: 4836479 - DNA, 25 bp, Homo sapien
gacaaacgtgattcaccaacatagg

SEQ ID NO: 4836480 - DNA, 25 bp, Homo sapien
ccagctctgacaaacgtgattcacc

SEQ ID NO: 4836481 - DNA, 25 bp, Homo sapien
ttcctgcgcacccagcgcaaactac

SEQ ID NO: 4836482 - DNA, 25 bp, Homo sapien
acccagcgcaaactacgaacccaga

SEQ ID NO: 4836483 - DNA, 25 bp, Homo sapien
ccagcgcaaactacgaacccagagt

SEQ ID NO: 4836484 - DNA, 25 bp, Homo sapien
gcgcacccagcgcaaactacgaacc

SEQ ID NO: 4836485 - DNA, 25 bp, Homo sapien
ttctcggcgtgggaagccctttcaa

SEQ ID NO: 4836486 - DNA, 25 bp, Homo sapien
catccaggactaggacacgaggtct

SEQ ID NO: 4836487 - DNA, 25 bp, Homo sapien
tccgcaggcgatggcttcccaaagt

SEQ ID NO: 4836488 - DNA, 25 bp, Homo sapien
tctgactgcagaccgggagtcttct

SEQ ID NO: 4836489 - DNA, 25 bp, Homo sapien
tgagggggcgatacagatactgact

SEQ ID NO: 4836490 - DNA, 25 bp, Homo sapien
tccacttatctgcattaacagcagc

SEQ ID NO: 4836491 - DNA, 25 bp, Homo sapien
atgacttcttccatgcccctgcata

SEQ ID NO: 4836492 - DNA, 25 bp, Homo sapien
gttggtcatggaaggtcatgacttc

SEQ ID NO: 4836493 - DNA, 25 bp, Homo sapien
cccagccaacaacttggattcttac

SEQ ID NO: 4836494 - DNA, 25 bp, Homo sapien
caacttggattcttacagtcactta

SEQ ID NO: 4836495 - DNA, 25 bp, Homo sapien
cagtcacttatttcagcaagtgcaa

SEQ ID NO: 4836496 - DNA, 25 bp, Homo sapien
gccaacaacttggattcttacagtc

SEQ ID NO: 4836497 - DNA, 25 bp, Homo sapien
gaggaagtctcttccaacagaaaag

SEQ ID NO: 4836498 - DNA, 25 bp, Homo sapien
gaagaggaagtctcttccaacagaa

SEQ ID NO: 4836499 - DNA, 25 bp, Homo sapien
ttcaaagccaattcaggtgtccagt

SEQ ID NO: 4836500 - DNA, 25 bp, Homo sapien
aagccaattcaggtgtccagtcccc

SEQ ID NO: 4836501 - DNA, 25 bp, Homo sapien
aggacaggcgtccaacagccacagg

SEQ ID NO: 4836502 - DNA, 25 bp, Homo sapien
gagatgcccagaaagcggaccggca

SEQ ID NO: 4836503 - DNA, 25 bp, Homo sapien
accggcaggacaggcgtccaacagc

SEQ ID NO: 4836504 - DNA, 25 bp, Homo sapien
gctcgcctcagcatcctaatgaaca

SEQ ID NO: 4836505 - DNA, 25 bp, Homo sapien
gacgcagagtggaagttagcatctg

SEQ ID NO: 4836506 - DNA, 25 bp, Homo sapien
agactcgtggatggtctgtgtcaga

SEQ ID NO: 4836507 - DNA, 25 bp, Homo sapien
tgtcagagaaagacgcagagtggaa

SEQ ID NO: 4836508 - DNA, 25 bp, Homo sapien
ctgtaattaagactcgtggatggtc

SEQ ID NO: 4836509 - DNA, 25 bp, Homo sapien
ctcaaaagattagcaagccccactc

SEQ ID NO: 4836510 - DNA, 25 bp, Homo sapien
agccccactcccagctggccaagag

SEQ ID NO: 4836511 - DNA, 25 bp, Homo sapien
tcaaaagattagcaagccccactcc

SEQ ID NO: 4836512 - DNA, 25 bp, Homo sapien
cccactcccagctggccaagagccc

SEQ ID NO: 4836513 - DNA, 25 bp, Homo sapien
tgaaagacatgatcggggggtttcc

SEQ ID NO: 4836514 - DNA, 25 bp, Homo sapien
tcggggggtttccttatgtcagaca

SEQ ID NO: 4836515 - DNA, 25 bp, Homo sapien
catgatcggggggtttccttatgtc

SEQ ID NO: 4836516 - DNA, 25 bp, Homo sapien
ctgtgaaagacatgatcggggggtt

SEQ ID NO: 4836517 - DNA, 25 bp, Homo sapien
ttgcttctccaaaggcgctgagcaa

SEQ ID NO: 4836518 - DNA, 25 bp, Homo sapien
gttgtttaccacgatctcccgaaga

SEQ ID NO: 4836519 - DNA, 25 bp, Homo sapien
ctgtaatgaaacagccaggtgatgc

SEQ ID NO: 4836520 - DNA, 25 bp, Homo sapien
gctctcgccagggaaacatttgctt

SEQ ID NO: 4836521 - DNA, 25 bp, Homo sapien
atgagctccgcgtggaccttggaca

SEQ ID NO: 4836522 - DNA, 25 bp, Homo sapien
tgttccgcagcgacatccaggatgt

SEQ ID NO: 4836523 - DNA, 25 bp, Homo sapien
aaaagccccaatcgtgctaggcaca

SEQ ID NO: 4836524 - DNA, 25 bp, Homo sapien
cttggacaccccatagatggtcctg

SEQ ID NO: 4836525 - DNA, 25 bp, Homo sapien
cagcaatccagctgagtgatgctta

SEQ ID NO: 4836526 - DNA, 25 bp, Homo sapien
tcagcaatccagctgagtgatgctt

SEQ ID NO: 4836527 - DNA, 25 bp, Homo sapien
agcaatccagctgagtgatgcttac

SEQ ID NO: 4836528 - DNA, 25 bp, Homo sapien
ctaacccataccggtaatgataata

SEQ ID NO: 4836529 - DNA, 25 bp, Homo sapien
ctcctccaggctgggagtcagctga

SEQ ID NO: 4836530 - DNA, 25 bp, Homo sapien
ctccaggctgggagtcagctgaaat

SEQ ID NO: 4836531 - DNA, 25 bp, Homo sapien
tcagctgaaatgattccaggatatc

SEQ ID NO: 4836532 - DNA, 25 bp, Homo sapien
gagtcagctgaaatgattccaggat

SEQ ID NO: 4836533 - DNA, 25 bp, Homo sapien
gagctccccagatcacacctggaga

SEQ ID NO: 4836534 - DNA, 25 bp, Homo sapien
gctggaggatgaccggagctcccca

SEQ ID NO: 4836535 - DNA, 25 bp, Homo sapien
gaaaaaggccagtaacgtctccata

SEQ ID NO: 4836536 - DNA, 25 bp, Homo sapien
gtatccagtccgttcttatctcaca

SEQ ID NO: 4836537 - DNA, 25 bp, Homo sapien
cgtatgtaggttataacaaaacaat

SEQ ID NO: 4836538 - DNA, 25 bp, Homo sapien
ggaatcccgtatgtaggttataaca

SEQ ID NO: 4836539 - DNA, 25 bp, Homo sapien
gaatcccgtatgtaggttataacaa

SEQ ID NO: 4836540 - DNA, 25 bp, Homo sapien
ctgaaagggaatcccgtatgtaggt

SEQ ID NO: 4836541 - DNA, 25 bp, Homo sapien
gcttccaggttgcactcgaatttgc

SEQ ID NO: 4836542 - DNA, 25 bp, Homo sapien
ggttgcactcgaatttgccatgctt

SEQ ID NO: 4836543 - DNA, 25 bp, Homo sapien
tcatgggcagtctcgtgcaggcttc

SEQ ID NO: 4836544 - DNA, 25 bp, Homo sapien
tccaggttgcactcgaatttgccat

SEQ ID NO: 4836545 - DNA, 25 bp, Homo sapien
cattgtaggtcctcatggaaaggga

SEQ ID NO: 4836546 - DNA, 25 bp, Homo sapien
cagctcctcgggtgtgaagctcatg

SEQ ID NO: 4836547 - DNA, 25 bp, Homo sapien
ggaattccggcacgtgcttgaggac

SEQ ID NO: 4836548 - DNA, 25 bp, Homo sapien
gctcatggcgctgacattgtaggtc

SEQ ID NO: 4836549 - DNA, 25 bp, Homo sapien
ctatggcctggcgaacggcatccac

SEQ ID NO: 4836550 - DNA, 25 bp, Homo sapien
tctggaagatcaaagtcgtgtttcc

SEQ ID NO: 4836551 - DNA, 25 bp, Homo sapien
ccagtccttccgagcattgctgtca

SEQ ID NO: 4836552 - DNA, 25 bp, Homo sapien
gaagatcaaagtcgtgtttccaccc

SEQ ID NO: 4836553 - DNA, 25 bp, Homo sapien
ttccgagcattgctgtcatcaaagt

SEQ ID NO: 4836554 - DNA, 25 bp, Homo sapien
ttggcttgggcaactctgctttcag

SEQ ID NO: 4836555 - DNA, 25 bp, Homo sapien
tctcccttgacagtggaccaggaca

SEQ ID NO: 4836556 - DNA, 25 bp, Homo sapien
ttcagaaccatggaagttcaacatg

SEQ ID NO: 4836557 - DNA, 25 bp, Homo sapien
cagattctttcagttggcttgggca

SEQ ID NO: 4836558 - DNA, 25 bp, Homo sapien
tgaggagtacctctttgaaagtcct

SEQ ID NO: 4836559 - DNA, 25 bp, Homo sapien
tgccaaaatttagtccaatgagtca

SEQ ID NO: 4836560 - DNA, 25 bp, Homo sapien
tcagttccaaataatgtaggctcct

SEQ ID NO: 4836561 - DNA, 25 bp, Homo sapien
tctagcagttcaatatgagctgcca

SEQ ID NO: 4836562 - DNA, 25 bp, Homo sapien
acattgatgggctccgggatcccaa

SEQ ID NO: 4836563 - DNA, 25 bp, Homo sapien
gggatcccaagatgtgcaccagata

SEQ ID NO: 4836564 - DNA, 25 bp, Homo sapien
cagattgggaaagattcaaggaacc

SEQ ID NO: 4836565 - DNA, 25 bp, Homo sapien
caccagatactgagtgttcagacag

SEQ ID NO: 4836566 - DNA, 25 bp, Homo sapien
cgggatcgctgtttgtgtagcaaca

SEQ ID NO: 4836567 - DNA, 25 bp, Homo sapien
gcaacgccacacacaaacatgtgag

SEQ ID NO: 4836568 - DNA, 25 bp, Homo sapien
tgcagtagctttcactaatccagtc

SEQ ID NO: 4836569 - DNA, 25 bp, Homo sapien
ggactccaggccatctatcttgctg

SEQ ID NO: 4836570 - DNA, 25 bp, Homo sapien
accctatcggcatagtacactgtag

SEQ ID NO: 4836571 - DNA, 25 bp, Homo sapien
ggcatagtacactgtagccctgaat

SEQ ID NO: 4836572 - DNA, 25 bp, Homo sapien
tggtccctcattcccggaaggtcac

SEQ ID NO: 4836573 - DNA, 25 bp, Homo sapien
cctgttggtccctcattcccggaag

SEQ ID NO: 4836574 - DNA, 25 bp, Homo sapien
tgatcacggtgacactgcagcagag

SEQ ID NO: 4836575 - DNA, 25 bp, Homo sapien
tcagtcactggtgccatgaatatgg

SEQ ID NO: 4836576 - DNA, 25 bp, Homo sapien
tatctactgggtctaatgggtatcc

SEQ ID NO: 4836577 - DNA, 25 bp, Homo sapien
tccatagagaaccaaaagtcaacct

SEQ ID NO: 4836578 - DNA, 25 bp, Homo sapien
tcgccctttaggtggacatccttta

SEQ ID NO: 4836579 - DNA, 25 bp, Homo sapien
ctcacactagagctgtcgcccttta

SEQ ID NO: 4836580 - DNA, 25 bp, Homo sapien
ccctttaggtggacatcctttagca

SEQ ID NO: 4836581 - DNA, 25 bp, Homo sapien
agagctgtcgccctttaggtggaca

SEQ ID NO: 4836582 - DNA, 25 bp, Homo sapien
cccaggagtatgttctctgtgtggg

SEQ ID NO: 4836583 - DNA, 25 bp, Homo sapien
ctgagccccaggagtatgttctctg

SEQ ID NO: 4836584 - DNA, 25 bp, Homo sapien
tggcagcccgtacttcaaaatctgc

SEQ ID NO: 4836585 - DNA, 25 bp, Homo sapien
aggccctggcagcccgtacttcaaa

SEQ ID NO: 4836586 - DNA, 25 bp, Homo sapien
gacgaagcaccatagatactggtca

SEQ ID NO: 4836587 - DNA, 25 bp, Homo sapien
accatagatactggtcacttccagg

SEQ ID NO: 4836588 - DNA, 25 bp, Homo sapien
gaaagagacgaagcaccatagatac

SEQ ID NO: 4836589 - DNA, 25 bp, Homo sapien
gcaccatagatactggtcacttcca

SEQ ID NO: 4836590 - DNA, 25 bp, Homo sapien
cacattgcacgttcctcagagaaaa

SEQ ID NO: 4836591 - DNA, 25 bp, Homo sapien
tattggcagccctttgcaaaagttt

SEQ ID NO: 4836592 - DNA, 25 bp, Homo sapien
aaagtattggcagccctttgcaaaa

SEQ ID NO: 4836593 - DNA, 25 bp, Homo sapien
tcacattgcacgttcctcagagaaa

SEQ ID NO: 4836594 - DNA, 25 bp, Homo sapien
aggcccctctgcctttgcccagcct

SEQ ID NO: 4836595 - DNA, 25 bp, Homo sapien
tctgcctttgcccagcctctggctt

SEQ ID NO: 4836596 - DNA, 25 bp, Homo sapien
tgcctttgcccagcctctggctttc

SEQ ID NO: 4836597 - DNA, 25 bp, Homo sapien
ctccaggcccctctgcctttgccca

SEQ ID NO: 4836598 - DNA, 25 bp, Homo sapien
gaaatgagaactgctctattcctga

SEQ ID NO: 4836599 - DNA, 25 bp, Homo sapien
ccctgcgaacgaaaactggatgact

SEQ ID NO: 4836600 - DNA, 25 bp, Homo sapien
gtctggctacaggtctccaaactaa

SEQ ID NO: 4836601 - DNA, 25 bp, Homo sapien
cacccttctggtttggaatcactga

SEQ ID NO: 4836602 - DNA, 25 bp, Homo sapien
aaagcaaggatgcccagtctcgtaa

SEQ ID NO: 4836603 - DNA, 25 bp, Homo sapien
ctgaatgttttcacctcctgtttag

SEQ ID NO: 4836604 - DNA, 25 bp, Homo sapien
aaggatgcccagtctcgtaacttct

SEQ ID NO: 4836605 - DNA, 25 bp, Homo sapien
tgttttcacctcctgtttaggaaca

SEQ ID NO: 4836606 - DNA, 25 bp, Homo sapien
aagagtccaggaccagatgaattca

SEQ ID NO: 4836607 - DNA, 25 bp, Homo sapien
aaaagagtccaggaccagatgaatt

SEQ ID NO: 4836608 - DNA, 25 bp, Homo sapien
agagtccaggaccagatgaattcac

SEQ ID NO: 4836609 - DNA, 25 bp, Homo sapien
ccaaaaagagtccaggaccagatga

SEQ ID NO: 4836610 - DNA, 25 bp, Homo sapien
tgacgatgcctgaccgagttcaaga

SEQ ID NO: 4836611 - DNA, 25 bp, Homo sapien
aagcatcgctgggtgtaaaacgcaa

SEQ ID NO: 4836612 - DNA, 25 bp, Homo sapien
tgatttagttgcttgggtaacccag

SEQ ID NO: 4836613 - DNA, 25 bp, Homo sapien
gctcagtagctatcaaagaggcctg

SEQ ID NO: 4836614 - DNA, 25 bp, Homo sapien
tgcgtggcgacatcaacaagctgaa

SEQ ID NO: 4836615 - DNA, 25 bp, Homo sapien
agctgaaaatcgaacacacctgccg

SEQ ID NO: 4836616 - DNA, 25 bp, Homo sapien
tgcaggaccagcaactggccagaca

SEQ ID NO: 4836617 - DNA, 25 bp, Homo sapien
gccagacagctcatgcgcctgcgtg

SEQ ID NO: 4836618 - DNA, 25 bp, Homo sapien
cagcagcgtgtttgaagggcactcc

SEQ ID NO: 4836619 - DNA, 25 bp, Homo sapien
acaacactgacgaaaataataaggc

SEQ ID NO: 4836620 - DNA, 25 bp, Homo sapien
caattttacccaggcttctaagtgg

SEQ ID NO: 4836621 - DNA, 25 bp, Homo sapien
ccagcgttaatctggctctttctca

SEQ ID NO: 4836622 - DNA, 25 bp, Homo sapien
ggacccaaatgcaggggtgggtgcc

SEQ ID NO: 4836623 - DNA, 25 bp, Homo sapien
tgtcttccttgggtgtacagcttcc

SEQ ID NO: 4836624 - DNA, 25 bp, Homo sapien
agtggagacagattgagtgaggggg

SEQ ID NO: 4836625 - DNA, 25 bp, Homo sapien
agattgagtgagggggggaggcagg

SEQ ID NO: 4836626 - DNA, 25 bp, Homo sapien
atttgaagaagcagggagacctgcc

SEQ ID NO: 4836627 - DNA, 25 bp, Homo sapien
tgaagaagcagggagacctgcccat

SEQ ID NO: 4836628 - DNA, 25 bp, Homo sapien
ctttgaaagatttgaagaagcaggg

SEQ ID NO: 4836629 - DNA, 25 bp, Homo sapien
tttgaaagatttgaagaagcaggga

SEQ ID NO: 4836630 - DNA, 25 bp, Homo sapien
gggcccagcaagaacagccgtacct

SEQ ID NO: 4836631 - DNA, 25 bp, Homo sapien
gcaagaacagccgtacctgggccat

SEQ ID NO: 4836632 - DNA, 25 bp, Homo sapien
ccagcaagaacagccgtacctgggc

SEQ ID NO: 4836633 - DNA, 25 bp, Homo sapien
ccgggggcccagcaagaacagccgt

SEQ ID NO: 4836634 - DNA, 25 bp, Homo sapien
atgtccattcagcactaccggcctc

SEQ ID NO: 4836635 - DNA, 25 bp, Homo sapien
atccagccccatgtccattcagcac

SEQ ID NO: 4836636 - DNA, 25 bp, Homo sapien
gcaggcggaagtcttttcatccagc

SEQ ID NO: 4836637 - DNA, 25 bp, Homo sapien
aatagcagctcatggcgattccggg

SEQ ID NO: 4836638 - DNA, 25 bp, Homo sapien
ttgtacttctgtagcatagaatctc

SEQ ID NO: 4836639 - DNA, 25 bp, Homo sapien
cttgtacttctgtagcatagaatct

SEQ ID NO: 4836640 - DNA, 25 bp, Homo sapien
caaagaagcaaaagtgctagcacca

SEQ ID NO: 4836641 - DNA, 25 bp, Homo sapien
tctctcccttgccaatgtaatcggt

SEQ ID NO: 4836642 - DNA, 25 bp, Homo sapien
aatgtaatcggtatgcattcttcac

SEQ ID NO: 4836643 - DNA, 25 bp, Homo sapien
agcaaaagtgctagcaccaggctct

SEQ ID NO: 4836644 - DNA, 25 bp, Homo sapien
tctgagtggtaatattattcttttg

SEQ ID NO: 4836645 - DNA, 25 bp, Homo sapien
ggaatatatcatgtataatcaaggg

SEQ ID NO: 4836646 - DNA, 25 bp, Homo sapien
atttctgagtggtaatattattctt

SEQ ID NO: 4836647 - DNA, 25 bp, Homo sapien
aaataggaatatatcatgtataatc

SEQ ID NO: 4836648 - DNA, 25 bp, Homo sapien
cagtgtcttccgacgggaagtgggc

SEQ ID NO: 4836649 - DNA, 25 bp, Homo sapien
cttccgacgggaagtgggcgataca

SEQ ID NO: 4836650 - DNA, 25 bp, Homo sapien
agtgggcgatacagccaggttgata

SEQ ID NO: 4836651 - DNA, 25 bp, Homo sapien
ggcgatacagccaggttgatacccc

SEQ ID NO: 4836652 - DNA, 25 bp, Homo sapien
cacacccacaagttccccttgccaa

SEQ ID NO: 4836653 - DNA, 25 bp, Homo sapien
tcacacccacaagttccccttgcca

SEQ ID NO: 4836654 - DNA, 25 bp, Homo sapien
cctctctagctgagtccggaattca

SEQ ID NO: 4836655 - DNA, 25 bp, Homo sapien
tctgcccgggctttggtccatcagc

SEQ ID NO: 4836656 - DNA, 25 bp, Homo sapien
tgcagctgcagttctaggctgctca

SEQ ID NO: 4836657 - DNA, 25 bp, Homo sapien
ttccaggcagccgagtagcctgggt

SEQ ID NO: 4836658 - DNA, 25 bp, Homo sapien
actcttctgcacgtgagcggcctct

SEQ ID NO: 4836659 - DNA, 25 bp, Homo sapien
agtggtgaggagttgtggagctgcc

SEQ ID NO: 4836660 - DNA, 25 bp, Homo sapien
tcggtgtggaatgtgctcgagtggt

SEQ ID NO: 4836661 - DNA, 25 bp, Homo sapien
gagctgcccagagtcggcgggatgg

SEQ ID NO: 4836662 - DNA, 25 bp, Homo sapien
gagcatcgatgaagctatagcctgg

SEQ ID NO: 4836663 - DNA, 25 bp, Homo sapien
aggagcccttgctccccctgagaga

SEQ ID NO: 4836664 - DNA, 25 bp, Homo sapien
gctgcggagccacaggcgagcttgg

SEQ ID NO: 4836665 - DNA, 25 bp, Homo sapien
aggagtgccagccaaggtgccagac

SEQ ID NO: 4836666 - DNA, 25 bp, Homo sapien
acctccggagcctgaaggccctcac

SEQ ID NO: 4836667 - DNA, 25 bp, Homo sapien
atgtctgtgccccagatccacgtgg

SEQ ID NO: 4836668 - DNA, 25 bp, Homo sapien
gtgccctcgcatgtccggctgccag

SEQ ID NO: 4836669 - DNA, 25 bp, Homo sapien
gccccagatccacgtggaagaagtg

SEQ ID NO: 4836670 - DNA, 25 bp, Homo sapien
ccagtctggtcttcgagtgcgttca

SEQ ID NO: 4836671 - DNA, 25 bp, Homo sapien
tgcccttcccgagaagagagagctc

SEQ ID NO: 4836672 - DNA, 25 bp, Homo sapien
ttccaggacggatcatagacccgag

SEQ ID NO: 4836673 - DNA, 25 bp, Homo sapien
tcaggacagatagaccttggcacag

SEQ ID NO: 4836674 - DNA, 25 bp, Homo sapien
gagcgtagagtaagacctggatgta

SEQ ID NO: 4836675 - DNA, 25 bp, Homo sapien
acctggatgtagaaacggctgctgg

SEQ ID NO: 4836676 - DNA, 25 bp, Homo sapien
gaagctaggagcgtagagtaagacc

SEQ ID NO: 4836677 - DNA, 25 bp, Homo sapien
ttggaggaagaagctaggagcgtag

SEQ ID NO: 4836678 - DNA, 25 bp, Homo sapien
gaacaatgagtcacagcctgcttgt

SEQ ID NO: 4836679 - DNA, 25 bp, Homo sapien
gagaagcctcgttctagaacaatga

SEQ ID NO: 4836680 - DNA, 25 bp, Homo sapien
ttaggtgaacacgagaagcctcgtt

SEQ ID NO: 4836681 - DNA, 25 bp, Homo sapien
acagcctgcttgtttagccatccag

SEQ ID NO: 4836682 - DNA, 25 bp, Homo sapien
agcagccagaggagttagctcatgg

SEQ ID NO: 4836683 - DNA, 25 bp, Homo sapien
catggttggcgaaggctcctccaag

SEQ ID NO: 4836684 - DNA, 25 bp, Homo sapien
tagctcatggttggcgaaggctcct

SEQ ID NO: 4836685 - DNA, 25 bp, Homo sapien
gcagccagaggagttagctcatggt

SEQ ID NO: 4836686 - DNA, 25 bp, Homo sapien
cagttgtttgccctgatgtccggct

SEQ ID NO: 4836687 - DNA, 25 bp, Homo sapien
ttgccctgatgtccggctgtagccc

SEQ ID NO: 4836688 - DNA, 25 bp, Homo sapien
ttgcacagggaaccatgggcggcgt

SEQ ID NO: 4836689 - DNA, 25 bp, Homo sapien
ggtctcatgacccagcatgtatcca

SEQ ID NO: 4836690 - DNA, 25 bp, Homo sapien
gcgtgatagctagtcctgccagata

SEQ ID NO: 4836691 - DNA, 25 bp, Homo sapien
ggaaagctttccacacgcgtgatag

SEQ ID NO: 4836692 - DNA, 25 bp, Homo sapien
tatgtgctgcggtgtagacgtgctc

SEQ ID NO: 4836693 - DNA, 25 bp, Homo sapien
taggttctagaagatggcacagcaa

SEQ ID NO: 4836694 - DNA, 25 bp, Homo sapien
gtaagtgatgagctccggaagcacc

SEQ ID NO: 4836695 - DNA, 25 bp, Homo sapien
acagttcaaggtcatgcgggccagt

SEQ ID NO: 4836696 - DNA, 25 bp, Homo sapien
gagccctcggatgagctttcaggca

SEQ ID NO: 4836697 - DNA, 25 bp, Homo sapien
tgtgctcgggacacaaaaggtgcag

SEQ ID NO: 4836698 - DNA, 25 bp, Homo sapien
gctgactctgcatgtgtcagggtgg

SEQ ID NO: 4836699 - DNA, 25 bp, Homo sapien
actctgcatgtgtcagggtggaaga

SEQ ID NO: 4836700 - DNA, 25 bp, Homo sapien
ctgtgggctgactctgcatgtgtca

SEQ ID NO: 4836701 - DNA, 25 bp, Homo sapien
tgtgggctgactctgcatgtgtcag

SEQ ID NO: 4836702 - DNA, 25 bp, Homo sapien
aagctggcagtagatgcccaagggc

SEQ ID NO: 4836703 - DNA, 25 bp, Homo sapien
agtgtggccggaagttccctccagg

SEQ ID NO: 4836704 - DNA, 25 bp, Homo sapien
tcctgatccaaaggtggaagctggc

SEQ ID NO: 4836705 - DNA, 25 bp, Homo sapien
cgcagggcttgtcccttgggcatcc

SEQ ID NO: 4836706 - DNA, 25 bp, Homo sapien
ctgggtggaggttcggggtctgccg

SEQ ID NO: 4836707 - DNA, 25 bp, Homo sapien
tgctggccgtgtccgggctcggatt

SEQ ID NO: 4836708 - DNA, 25 bp, Homo sapien
cccgcgggttcgctgccctcccaga

SEQ ID NO: 4836709 - DNA, 25 bp, Homo sapien
cctgctggccgtgtccgggctcgga

SEQ ID NO: 4836710 - DNA, 25 bp, Homo sapien
cgggagaggccgctcatgcgctccc

SEQ ID NO: 4836711 - DNA, 25 bp, Homo sapien
gatcgcggtgaaaggctcgcggcgg

SEQ ID NO: 4836712 - DNA, 25 bp, Homo sapien
gagagctcggccgtcgccaggcaac

SEQ ID NO: 4836713 - DNA, 25 bp, Homo sapien
ggtgaaccgacagggcgctaggacc

SEQ ID NO: 4836714 - DNA, 25 bp, Homo sapien
gtttggcgaaggcatgtagttcctc

SEQ ID NO: 4836715 - DNA, 25 bp, Homo sapien
gagccgtgatgcgctccttcctcat

SEQ ID NO: 4836716 - DNA, 25 bp, Homo sapien
ctgagctaggagagccgtgatgcgc

SEQ ID NO: 4836717 - DNA, 25 bp, Homo sapien
ttctgagctaggagagccgtgatgc

SEQ ID NO: 4836718 - DNA, 25 bp, Homo sapien
tctgagctaggagagccgtgatgcg

SEQ ID NO: 4836719 - DNA, 25 bp, Homo sapien
tggagatgaaatgagcccctgtgtc

SEQ ID NO: 4836720 - DNA, 25 bp, Homo sapien
attggccgatggagatgaaatgagc

SEQ ID NO: 4836721 - DNA, 25 bp, Homo sapien
tgtgtcctcgctcctgcatcactga

SEQ ID NO: 4836722 - DNA, 25 bp, Homo sapien
tgacgttgccgtgggctattgagtt

SEQ ID NO: 4836723 - DNA, 25 bp, Homo sapien
cacatggtgatgctaggtctggcca

SEQ ID NO: 4836724 - DNA, 25 bp, Homo sapien
tcacataaaggagtagccacctctt

SEQ ID NO: 4836725 - DNA, 25 bp, Homo sapien
gattctaaggcatgcagaggtgcca

SEQ ID NO: 4836726 - DNA, 25 bp, Homo sapien
ttacctatgggtgggcacaagggca

SEQ ID NO: 4836727 - DNA, 25 bp, Homo sapien
caccaagtccggcagagttagcaaa

SEQ ID NO: 4836728 - DNA, 25 bp, Homo sapien
tgacacccttacagtggagcaggct

SEQ ID NO: 4836729 - DNA, 25 bp, Homo sapien
gacaaacgctgcagatctcatggag

SEQ ID NO: 4836730 - DNA, 25 bp, Homo sapien
tcgtgaggaaggaccatgagcagct

SEQ ID NO: 4836731 - DNA, 25 bp, Homo sapien
tgtgaacaccttacgtaaccatggt

SEQ ID NO: 4836732 - DNA, 25 bp, Homo sapien
cacaatattagcgagaccccaggtc

SEQ ID NO: 4836733 - DNA, 25 bp, Homo sapien
catggtacatttgccagaactaagc

SEQ ID NO: 4836734 - DNA, 25 bp, Homo sapien
tacaagggatagcacagagaatttc

SEQ ID NO: 4836735 - DNA, 25 bp, Homo sapien
tcctgggtggaatgcgaacagctta

SEQ ID NO: 4836736 - DNA, 25 bp, Homo sapien
catgctgtcaccaaactgctagtgg

SEQ ID NO: 4836737 - DNA, 25 bp, Homo sapien
gtaagacatccattgctccagagag

SEQ ID NO: 4836738 - DNA, 25 bp, Homo sapien
ttctaagtgtcctggagtccaagca

SEQ ID NO: 4836739 - DNA, 25 bp, Homo sapien
gaaggatgatactcaagtgactaga

SEQ ID NO: 4836740 - DNA, 25 bp, Homo sapien
gacaccggccagaggctacagttgg

SEQ ID NO: 4836741 - DNA, 25 bp, Homo sapien
tatgagtgtccaggtcaccctctgg

SEQ ID NO: 4836742 - DNA, 25 bp, Homo sapien
tacaactttgccctcactcagggac

SEQ ID NO: 4836743 - DNA, 25 bp, Homo sapien
cccacgatgtggcaaagagacagct

SEQ ID NO: 4836744 - DNA, 25 bp, Homo sapien
cctccaaggatacatagaagctctc

SEQ ID NO: 4836745 - DNA, 25 bp, Homo sapien
gccaggctggtaaccttctgcgtga

SEQ ID NO: 4836746 - DNA, 25 bp, Homo sapien
gatgaagagccacgtgcacctggca

SEQ ID NO: 4836747 - DNA, 25 bp, Homo sapien
agttcttttaaagcgtgacttgcct

SEQ ID NO: 4836748 - DNA, 25 bp, Homo sapien
cttttaaagcgtgacttgccttctt

SEQ ID NO: 4836749 - DNA, 25 bp, Homo sapien
ttcttttaaagcgtgacttgccttc

SEQ ID NO: 4836750 - DNA, 25 bp, Homo sapien
tcttttaaagcgtgacttgccttct

SEQ ID NO: 4836751 - DNA, 25 bp, Homo sapien
gattgccaacttttcgtgcggtgta

SEQ ID NO: 4836752 - DNA, 25 bp, Homo sapien
gtgctgtgaggttagctgctcccac

SEQ ID NO: 4836753 - DNA, 25 bp, Homo sapien
ggtcccgatgacatcccttcgggtg

SEQ ID NO: 4836754 - DNA, 25 bp, Homo sapien
gcagccaccgagagagaggattgcc

SEQ ID NO: 4836755 - DNA, 25 bp, Homo sapien
tcatccatgaattggctgtgagtca

SEQ ID NO: 4836756 - DNA, 25 bp, Homo sapien
atccatgaattggctgtgagtcaga

SEQ ID NO: 4836757 - DNA, 25 bp, Homo sapien
tgaattggctgtgagtcagatatca

SEQ ID NO: 4836758 - DNA, 25 bp, Homo sapien
ttggctgtgagtcagatatcaatga

SEQ ID NO: 4836759 - DNA, 25 bp, Homo sapien
cagactgcccctctaagtggtccag

SEQ ID NO: 4836760 - DNA, 25 bp, Homo sapien
ttccatgtctaaatccacgtgggcc

SEQ ID NO: 4836761 - DNA, 25 bp, Homo sapien
ttagacaaccacagaacccgagctg

SEQ ID NO: 4836762 - DNA, 25 bp, Homo sapien
tgcagttcaagtctgccgcacagag

SEQ ID NO: 4836763 - DNA, 25 bp, Homo sapien
tatggtccacgaatcaccaaggtct

SEQ ID NO: 4836764 - DNA, 25 bp, Homo sapien
cacagaggtcctagttcatcagcca

SEQ ID NO: 4836765 - DNA, 25 bp, Homo sapien
tcccacttcaagacacagaggtcct

SEQ ID NO: 4836766 - DNA, 25 bp, Homo sapien
catcagccaactgcgtgtggtgcat

SEQ ID NO: 4836767 - DNA, 25 bp, Homo sapien
ttcttaatgctaagttgtcttttca

SEQ ID NO: 4836768 - DNA, 25 bp, Homo sapien
ccgtgcctggctatgtggttcttaa

SEQ ID NO: 4836769 - DNA, 25 bp, Homo sapien
gagccctccttaatcatattaaaca

SEQ ID NO: 4836770 - DNA, 25 bp, Homo sapien
ctggctatgtggttcttaatgctaa

SEQ ID NO: 4836771 - DNA, 25 bp, Homo sapien
tactcaattcccacataatcatggg

SEQ ID NO: 4836772 - DNA, 25 bp, Homo sapien
tatgccttttttcgaaatgtgtaga

SEQ ID NO: 4836773 - DNA, 25 bp, Homo sapien
ttttgacaagctatgaattcctgca

SEQ ID NO: 4836774 - DNA, 25 bp, Homo sapien
gtattacactggcaagaattcccaa

SEQ ID NO: 4836775 - DNA, 25 bp, Homo sapien
tgcttttagcagagcgtatcacggt

SEQ ID NO: 4836776 - DNA, 25 bp, Homo sapien
gtgggattcccacgctcaagagcat

SEQ ID NO: 4836777 - DNA, 25 bp, Homo sapien
ttttgtctgcagcaacctgtgaggg

SEQ ID NO: 4836778 - DNA, 25 bp, Homo sapien
cagacatttcgtacagcagtatgga

SEQ ID NO: 4836779 - DNA, 25 bp, Homo sapien
tctttggcacaatagttctgaaacc

SEQ ID NO: 4836780 - DNA, 25 bp, Homo sapien
gaccctttcttcaattggccgagct

SEQ ID NO: 4836781 - DNA, 25 bp, Homo sapien
tctggatcatgacttgtgacaagga

SEQ ID NO: 4836782 - DNA, 25 bp, Homo sapien
gagtctcccataaataatgcctgca

SEQ ID NO: 4836783 - DNA, 25 bp, Homo sapien
tttaaatgccagcagaatcttttcc

SEQ ID NO: 4836784 - DNA, 25 bp, Homo sapien
gaatcttttcccagcactagcacag

SEQ ID NO: 4836785 - DNA, 25 bp, Homo sapien
catctggcctccttgtgcaatactt

SEQ ID NO: 4836786 - DNA, 25 bp, Homo sapien
ccaaagttctgggttggatacaggc

SEQ ID NO: 4836787 - DNA, 25 bp, Homo sapien
tgtcgcgatcacaatgccatgctag

SEQ ID NO: 4836788 - DNA, 25 bp, Homo sapien
gaagccttgccatgttatgtgctgg

SEQ ID NO: 4836789 - DNA, 25 bp, Homo sapien
cctgccagacataggtgggtagcat

SEQ ID NO: 4836790 - DNA, 25 bp, Homo sapien
tttaccactgaagaaggcgaggcga

SEQ ID NO: 4836791 - DNA, 25 bp, Homo sapien
ccagcaacagaggagcataaggcct

SEQ ID NO: 4836792 - DNA, 25 bp, Homo sapien
caatgaccgttaagtggccagccag

SEQ ID NO: 4836793 - DNA, 25 bp, Homo sapien
gaggatttgagtgatttgcccagca

SEQ ID NO: 4836794 - DNA, 25 bp, Homo sapien
cctgactcaacgaagggccagtggt

SEQ ID NO: 4836795 - DNA, 25 bp, Homo sapien
ggcgctgaccttcagggggctccat

SEQ ID NO: 4836796 - DNA, 25 bp, Homo sapien
gctttttgctacttaccagccccat

SEQ ID NO: 4836797 - DNA, 25 bp, Homo sapien
tgatcggcttttccttgtccggctt

SEQ ID NO: 4836798 - DNA, 25 bp, Homo sapien
ggcgtccttgtcttgggcgctgacc

SEQ ID NO: 4836799 - DNA, 25 bp, Homo sapien
gtgttcatcgggcggtggaggagta

SEQ ID NO: 4836800 - DNA, 25 bp, Homo sapien
gaggagtaaggtggttgaagacaac

SEQ ID NO: 4836801 - DNA, 25 bp, Homo sapien
ggaggagtaaggtggttgaagacaa

SEQ ID NO: 4836802 - DNA, 25 bp, Homo sapien
catcgggcggtggaggagtaaggtg

SEQ ID NO: 4836803 - DNA, 25 bp, Homo sapien
tacagagccaccacgaaatgcttgt

SEQ ID NO: 4836804 - DNA, 25 bp, Homo sapien
cattcatagcggtgtagtcatacag

SEQ ID NO: 4836805 - DNA, 25 bp, Homo sapien
tctgcaggtcccgatcattcatagc

SEQ ID NO: 4836806 - DNA, 25 bp, Homo sapien
gtcatacagagccaccacgaaatgc

SEQ ID NO: 4836807 - DNA, 25 bp, Homo sapien
ttctcttcctgtgacgagtgacctg

SEQ ID NO: 4836808 - DNA, 25 bp, Homo sapien
ttcctgtgacgagtgacctggccag

SEQ ID NO: 4836809 - DNA, 25 bp, Homo sapien
ccacaaagttactgggcacatagcc

SEQ ID NO: 4836810 - DNA, 25 bp, Homo sapien
aggctctccactcgggccacaaagt

SEQ ID NO: 4836811 - DNA, 25 bp, Homo sapien
ttctggtcccagtcggccctgagct

SEQ ID NO: 4836812 - DNA, 25 bp, Homo sapien
caggtgaaactcagagcgaccctgc

SEQ ID NO: 4836813 - DNA, 25 bp, Homo sapien
tgctcctcggagtattcccacacag

SEQ ID NO: 4836814 - DNA, 25 bp, Homo sapien
ctggaaaacggcaggaacaggtgaa

SEQ ID NO: 4836815 - DNA, 25 bp, Homo sapien
aggagccggccttgttgattggagc

SEQ ID NO: 4836816 - DNA, 25 bp, Homo sapien
agcctccttccgaccctgtgatcta

SEQ ID NO: 4836817 - DNA, 25 bp, Homo sapien
cttgttgattggagcaagaagctgc

SEQ ID NO: 4836818 - DNA, 25 bp, Homo sapien
ccggccttgttgattggagcaagaa

SEQ ID NO: 4836819 - DNA, 25 bp, Homo sapien
tcttatagtgcttgatcagctcccc

SEQ ID NO: 4836820 - DNA, 25 bp, Homo sapien
ggagatgtagtagcccccttcatcc

SEQ ID NO: 4836821 - DNA, 25 bp, Homo sapien
cttcatccaggcagcggatcttata

SEQ ID NO: 4836822 - DNA, 25 bp, Homo sapien
cagcggatcttatagtgcttgatca

SEQ ID NO: 4836823 - DNA, 25 bp, Homo sapien
tgcccccattgcacgccccctctta

SEQ ID NO: 4836824 - DNA, 25 bp, Homo sapien
gcccccattgcacgccccctcttac

SEQ ID NO: 4836825 - DNA, 25 bp, Homo sapien
ccctgcccccattgcacgccccctc

SEQ ID NO: 4836826 - DNA, 25 bp, Homo sapien
ctgcccccattgcacgccccctctt

SEQ ID NO: 4836827 - DNA, 25 bp, Homo sapien
gcctctggcatagaccatccccctt

SEQ ID NO: 4836828 - DNA, 25 bp, Homo sapien
cggggccgggcgcacacagggcagg

SEQ ID NO: 4836829 - DNA, 25 bp, Homo sapien
ggcagggtcagcctctggcatagac

SEQ ID NO: 4836830 - DNA, 25 bp, Homo sapien
gccgggcgcacacagggcagggtca

SEQ ID NO: 4836831 - DNA, 25 bp, Homo sapien
gccgggggatctcccattcatcctg

SEQ ID NO: 4836832 - DNA, 25 bp, Homo sapien
cgccgaattgtccagacccgagttt

SEQ ID NO: 4836833 - DNA, 25 bp, Homo sapien
agactgccgggggatctcccattca

SEQ ID NO: 4836834 - DNA, 25 bp, Homo sapien
ccagacttcgccgaattgtccagac

SEQ ID NO: 4836835 - DNA, 25 bp, Homo sapien
cagagagcttgctcggaggtgatcc

SEQ ID NO: 4836836 - DNA, 25 bp, Homo sapien
acagagagcttgctcggaggtgatc

SEQ ID NO: 4836837 - DNA, 25 bp, Homo sapien
gacagagagcttgctcggaggtgat

SEQ ID NO: 4836838 - DNA, 25 bp, Homo sapien
ccttggtgaccactgcgtagagtcg

SEQ ID NO: 4836839 - DNA, 25 bp, Homo sapien
actgcgtagagtcggaccagccgct

SEQ ID NO: 4836840 - DNA, 25 bp, Homo sapien
ggaccagccgctcgtgctgcagagc

SEQ ID NO: 4836841 - DNA, 25 bp, Homo sapien
tcggaccagccgctcgtgctgcaga

SEQ ID NO: 4836842 - DNA, 25 bp, Homo sapien
gatgcggctctgcggggggcaccac

SEQ ID NO: 4836843 - DNA, 25 bp, Homo sapien
ctcgctctgaggatgcggctctgcg

SEQ ID NO: 4836844 - DNA, 25 bp, Homo sapien
ctgcgccgacatgtcaatcagcctt

SEQ ID NO: 4836845 - DNA, 25 bp, Homo sapien
ccagttttaacagggccaccagatg

SEQ ID NO: 4836846 - DNA, 25 bp, Homo sapien
tagagctctcggctaaaaccctcct

SEQ ID NO: 4836847 - DNA, 25 bp, Homo sapien
gagagttccagttttaacagggcca

SEQ ID NO: 4836848 - DNA, 25 bp, Homo sapien
tgtgtacgcacgtgtgtgcctcaca

SEQ ID NO: 4836849 - DNA, 25 bp, Homo sapien
ctcagcggaaaaaggcgttgtggca

SEQ ID NO: 4836850 - DNA, 25 bp, Homo sapien
tcctgcagcggcgctactgggtaag

SEQ ID NO: 4836851 - DNA, 25 bp, Homo sapien
aggcgttgtggcatcagttcctgca

SEQ ID NO: 4836852 - DNA, 25 bp, Homo sapien
agttcctgcagcggcgctactgggt

SEQ ID NO: 4836853 - DNA, 25 bp, Homo sapien
tgtttgtgtgagtttgtgtttgagt

SEQ ID NO: 4836854 - DNA, 25 bp, Homo sapien
tgtgtgagtttgtgtttgagtctga

SEQ ID NO: 4836855 - DNA, 25 bp, Homo sapien
tgagtttgtgtttgagtctgagtct

SEQ ID NO: 4836856 - DNA, 25 bp, Homo sapien
tgtgagtttgtgtttgagtctgagt

SEQ ID NO: 4836857 - DNA, 25 bp, Homo sapien
caagaacagtgcttccgggaacacc

SEQ ID NO: 4836858 - DNA, 25 bp, Homo sapien
tctggcgagactttgcatggcttcc

SEQ ID NO: 4836859 - DNA, 25 bp, Homo sapien
gaaatgacattacgcttgagccatg

SEQ ID NO: 4836860 - DNA, 25 bp, Homo sapien
taaaaaatgttgagtagggcccaga

SEQ ID NO: 4836861 - DNA, 25 bp, Homo sapien
ttgtgaccaagaacctcacccagcg

SEQ ID NO: 4836862 - DNA, 25 bp, Homo sapien
tcagacatgcgacttcaagaagcca

SEQ ID NO: 4836863 - DNA, 25 bp, Homo sapien
gaagccagcactagaattgattcca

SEQ ID NO: 4836864 - DNA, 25 bp, Homo sapien
cattagacgaggttgatttgtgacc

SEQ ID NO: 4836865 - DNA, 25 bp, Homo sapien
ctcgttctcgctccacacagctgtg

SEQ ID NO: 4836866 - DNA, 25 bp, Homo sapien
tcgttctcgctccacacagctgtgt

SEQ ID NO: 4836867 - DNA, 25 bp, Homo sapien
acgcagcaacgtgggcatcagagac

SEQ ID NO: 4836868 - DNA, 25 bp, Homo sapien
aaggagctgtttcttggatggagta

SEQ ID NO: 4836869 - DNA, 25 bp, Homo sapien
tcagccgaataaactcctctcctag

SEQ ID NO: 4836870 - DNA, 25 bp, Homo sapien
gtagaaaggtgactgtgttgctcct

SEQ ID NO: 4836871 - DNA, 25 bp, Homo sapien
ctgtcgatgattcgagccaagccaa

SEQ ID NO: 4836872 - DNA, 25 bp, Homo sapien
cctcttgggccgtgtattcactgtc

SEQ ID NO: 4836873 - DNA, 25 bp, Homo sapien
gcaattttgcagcacaaggcctcag

SEQ ID NO: 4836874 - DNA, 25 bp, Homo sapien
tcgcggtggatggaattcatgcgct

SEQ ID NO: 4836875 - DNA, 25 bp, Homo sapien
gctgtagaaaccgtatagccctcag

SEQ ID NO: 4836876 - DNA, 25 bp, Homo sapien
tagaaaccgtatagccctcaggtgt

SEQ ID NO: 4836877 - DNA, 25 bp, Homo sapien
tctagagctgtagaaaccgtatagc

SEQ ID NO: 4836878 - DNA, 25 bp, Homo sapien
gtatagccctcaggtgtcttccctc

SEQ ID NO: 4836879 - DNA, 25 bp, Homo sapien
gaaaagccatgcaagctttgggagg

SEQ ID NO: 4836880 - DNA, 25 bp, Homo sapien
tgtgggaaaagccatgcaagctttg

SEQ ID NO: 4836881 - DNA, 25 bp, Homo sapien
tgggaaaagccatgcaagctttggg

SEQ ID NO: 4836882 - DNA, 25 bp, Homo sapien
ggaaaagccatgcaagctttgggag

SEQ ID NO: 4836883 - DNA, 25 bp, Homo sapien
ttccatcaggaggactccaaacgac

SEQ ID NO: 4836884 - DNA, 25 bp, Homo sapien
ggcacccgcccataagtgacaactt

SEQ ID NO: 4836885 - DNA, 25 bp, Homo sapien
acgtctgctttgatggtgaagaccc

SEQ ID NO: 4836886 - DNA, 25 bp, Homo sapien
tgaagaccccgaagtggatggcttc

SEQ ID NO: 4836887 - DNA, 25 bp, Homo sapien
acaggcaccaagcacaggcgacctg

SEQ ID NO: 4836888 - DNA, 25 bp, Homo sapien
aagcacaggcgacctgccatcaggg

SEQ ID NO: 4836889 - DNA, 25 bp, Homo sapien
ccaagcacaggcgacctgccatcag

SEQ ID NO: 4836890 - DNA, 25 bp, Homo sapien
gccacaggcaccaagcacaggcgac

SEQ ID NO: 4836891 - DNA, 25 bp, Homo sapien
gggctgtcgtccacgattctggcca

SEQ ID NO: 4836892 - DNA, 25 bp, Homo sapien
ctgggggctgtcgtccacgattctg

SEQ ID NO: 4836893 - DNA, 25 bp, Homo sapien
gtcgtccacgattctggccacacag

SEQ ID NO: 4836894 - DNA, 25 bp, Homo sapien
cgtccacgattctggccacacagga

SEQ ID NO: 4836895 - DNA, 25 bp, Homo sapien
tgcggcagaggagaccgcaagcggg

SEQ ID NO: 4836896 - DNA, 25 bp, Homo sapien
tctccagcctcgtgcgttgcctggc

SEQ ID NO: 4836897 - DNA, 25 bp, Homo sapien
ccacttctccagcctcgtgcgttgc

SEQ ID NO: 4836898 - DNA, 25 bp, Homo sapien
ctgcggcagaggagaccgcaagcgg

SEQ ID NO: 4836899 - DNA, 25 bp, Homo sapien
cggctgcgccagcactcggcgatga

SEQ ID NO: 4836900 - DNA, 25 bp, Homo sapien
ggtgggccgctcctcgggccggctg

SEQ ID NO: 4836901 - DNA, 25 bp, Homo sapien
cgcggcatgcggtagccgcgctcca

SEQ ID NO: 4836902 - DNA, 25 bp, Homo sapien
ttgcggatgacctcggggttgctca

SEQ ID NO: 4836903 - DNA, 25 bp, Homo sapien
gctgcagctcgtactgccgctcggt

SEQ ID NO: 4836904 - DNA, 25 bp, Homo sapien
gggctgcagctcgtactgccgctcg

SEQ ID NO: 4836905 - DNA, 25 bp, Homo sapien
gcagctcgtactgccgctcggtggc

SEQ ID NO: 4836906 - DNA, 25 bp, Homo sapien
ctagggctgcagctcgtactgccgc

SEQ ID NO: 4836907 - DNA, 25 bp, Homo sapien
aagggcacaggcgacaccccgcctt

SEQ ID NO: 4836908 - DNA, 25 bp, Homo sapien
gtcgtccgcgcagaggtgggcacgg

SEQ ID NO: 4836909 - DNA, 25 bp, Homo sapien
ccttcgcggcccgtctgggatggca

SEQ ID NO: 4836910 - DNA, 25 bp, Homo sapien
gcccactggattccgggtctgagaa

SEQ ID NO: 4836911 - DNA, 25 bp, Homo sapien
tctacaaatgaagcggcacagagag

SEQ ID NO: 4836912 - DNA, 25 bp, Homo sapien
tagtactccggatgaccgtgcgagg

SEQ ID NO: 4836913 - DNA, 25 bp, Homo sapien
cgtgcgaggtcactgttacagccct

SEQ ID NO: 4836914 - DNA, 25 bp, Homo sapien
gatgacagtcgcttaccagtcctga

SEQ ID NO: 4836915 - DNA, 25 bp, Homo sapien
cactggggccaactgggtttgaggt

SEQ ID NO: 4836916 - DNA, 25 bp, Homo sapien
ctacatgacaatagtgctcggttcc

SEQ ID NO: 4836917 - DNA, 25 bp, Homo sapien
tgacaatagtgctcggttcctggca

SEQ ID NO: 4836918 - DNA, 25 bp, Homo sapien
agctgggttcgaggtgcttggtttt

SEQ ID NO: 4836919 - DNA, 25 bp, Homo sapien
gattagtggtaagctcatccagtag

SEQ ID NO: 4836920 - DNA, 25 bp, Homo sapien
ccagctctgagggtctaagggttct

SEQ ID NO: 4836921 - DNA, 25 bp, Homo sapien
gaaatcacagaggttgagcccaggc

SEQ ID NO: 4836922 - DNA, 25 bp, Homo sapien
cagatcggagattcctgctaagtcc

SEQ ID NO: 4836923 - DNA, 25 bp, Homo sapien
catagcatccttagctgcacagagg

SEQ ID NO: 4836924 - DNA, 25 bp, Homo sapien
tggcttcctcgacagaacgcagctg

SEQ ID NO: 4836925 - DNA, 25 bp, Homo sapien
aagaccacaaatggccttcccaggg

SEQ ID NO: 4836926 - DNA, 25 bp, Homo sapien
tgcacagaggtcatttccatcagcc

SEQ ID NO: 4836927 - DNA, 25 bp, Homo sapien
tcagtgggagactttccagacccct

SEQ ID NO: 4836928 - DNA, 25 bp, Homo sapien
catgggcattagtccagggtgagtc

SEQ ID NO: 4836929 - DNA, 25 bp, Homo sapien
tctgcaaactcgctagactagccgt

SEQ ID NO: 4836930 - DNA, 25 bp, Homo sapien
tagccgtggtgagtatgtgaaaccc

SEQ ID NO: 4836931 - DNA, 25 bp, Homo sapien
ttcacggagtagagaggtgacatgt

SEQ ID NO: 4836932 - DNA, 25 bp, Homo sapien
gggcccaactatataagtgctttgt

SEQ ID NO: 4836933 - DNA, 25 bp, Homo sapien
gctagtagatctgagagacagggaa

SEQ ID NO: 4836934 - DNA, 25 bp, Homo sapien
gctttgtggctgtagccttgtgcta

SEQ ID NO: 4836935 - DNA, 25 bp, Homo sapien
cggactaatacagattgcttctaca

SEQ ID NO: 4836936 - DNA, 25 bp, Homo sapien
ggactaatacagattgcttctacat

SEQ ID NO: 4836937 - DNA, 25 bp, Homo sapien
gactaatacagattgcttctacatt

SEQ ID NO: 4836938 - DNA, 25 bp, Homo sapien
cactcatcacttctagggggaggag

SEQ ID NO: 4836939 - DNA, 25 bp, Homo sapien
gatttcagtcctggttttagccctg

SEQ ID NO: 4836940 - DNA, 25 bp, Homo sapien
tactctacaactttctggtccctgg

SEQ ID NO: 4836941 - DNA, 25 bp, Homo sapien
tccatgtcaggcaaagctgtgtgag

SEQ ID NO: 4836942 - DNA, 25 bp, Homo sapien
ccctgtgggacattggacggctcct

SEQ ID NO: 4836943 - DNA, 25 bp, Homo sapien
ggcaggatggaggggatgtggcccc

SEQ ID NO: 4836944 - DNA, 25 bp, Homo sapien
caggcaggatggaggggatgtggcc

SEQ ID NO: 4836945 - DNA, 25 bp, Homo sapien
caggatggaggggatgtggcccccg

SEQ ID NO: 4836946 - DNA, 25 bp, Homo sapien
tggcaggcaggatggaggggatgtg

SEQ ID NO: 4836947 - DNA, 25 bp, Homo sapien
aggccccggtctcctaatctgcgtg

SEQ ID NO: 4836948 - DNA, 25 bp, Homo sapien
aggtccgctccgcagaggagactca

SEQ ID NO: 4836949 - DNA, 25 bp, Homo sapien
gccctgcgaggctgtgatgtgctca

SEQ ID NO: 4836950 - DNA, 25 bp, Homo sapien
aatctgcgtgggctgaccaacaagg

SEQ ID NO: 4836951 - DNA, 25 bp, Homo sapien
agacatgggatccagctgcgctaac

SEQ ID NO: 4836952 - DNA, 25 bp, Homo sapien
tggaggaccccaggaacttgctttg

SEQ ID NO: 4836953 - DNA, 25 bp, Homo sapien
caccgggttacatgaagcaaatggc

SEQ ID NO: 4836954 - DNA, 25 bp, Homo sapien
catggacaaactcgggtgcaggctt

SEQ ID NO: 4836955 - DNA, 25 bp, Homo sapien
tcaagggcacggagatgtctcaggc

SEQ ID NO: 4836956 - DNA, 25 bp, Homo sapien
gactggcaaacacaatgatagacat

SEQ ID NO: 4836957 - DNA, 25 bp, Homo sapien
taggtgactggcaaacacaatgata

SEQ ID NO: 4836958 - DNA, 25 bp, Homo sapien
cagctaggtgactggcaaacacaat

SEQ ID NO: 4836959 - DNA, 25 bp, Homo sapien
gtgactggcaaacacaatgatagac

SEQ ID NO: 4836960 - DNA, 25 bp, Homo sapien
taggagctccatagatatgtgaggg

SEQ ID NO: 4836961 - DNA, 25 bp, Homo sapien
gctaatgcgaatggcagccagctgg

SEQ ID NO: 4836962 - DNA, 25 bp, Homo sapien
gggctaatgcgaatggcagccagct

SEQ ID NO: 4836963 - DNA, 25 bp, Homo sapien
caccagagaccgctcttagtaggag

SEQ ID NO: 4836964 - DNA, 25 bp, Homo sapien
tgtgggtaaacttgctgatggcctc

SEQ ID NO: 4836965 - DNA, 25 bp, Homo sapien
ctagacactgtgggtaaacttgctg

SEQ ID NO: 4836966 - DNA, 25 bp, Homo sapien
atggcctcctgtggcttccgcttgg

SEQ ID NO: 4836967 - DNA, 25 bp, Homo sapien
gcctcctgtggcttccgcttgggct

SEQ ID NO: 4836968 - DNA, 25 bp, Homo sapien
tgctttccaggcatgctctcttgcc

SEQ ID NO: 4836969 - DNA, 25 bp, Homo sapien
cacgtgctttccaggcatgctctct

SEQ ID NO: 4836970 - DNA, 25 bp, Homo sapien
gtgctttccaggcatgctctcttgc

SEQ ID NO: 4836971 - DNA, 25 bp, Homo sapien
tgccacgtgctttccaggcatgctc

SEQ ID NO: 4836972 - DNA, 25 bp, Homo sapien
taaagataccaaaggcgctgttggg

SEQ ID NO: 4836973 - DNA, 25 bp, Homo sapien
cgacaagcagttggaggttgagatt

SEQ ID NO: 4836974 - DNA, 25 bp, Homo sapien
cgctgttgggattcaggtggccaca

SEQ ID NO: 4836975 - DNA, 25 bp, Homo sapien
aggtggccacatccgacaagcagtt

SEQ ID NO: 4836976 - DNA, 25 bp, Homo sapien
gggatcatctggcctctttacatcc

SEQ ID NO: 4836977 - DNA, 25 bp, Homo sapien
ctgatagggatcatctggcctcttt

SEQ ID NO: 4836978 - DNA, 25 bp, Homo sapien
gatagggatcatctggcctctttac

SEQ ID NO: 4836979 - DNA, 25 bp, Homo sapien
gatcatctggcctctttacatccat

SEQ ID NO: 4836980 - DNA, 25 bp, Homo sapien
ctgcactcagttgtggctgggagca

SEQ ID NO: 4836981 - DNA, 25 bp, Homo sapien
ctgctgcactcagttgtggctggga

SEQ ID NO: 4836982 - DNA, 25 bp, Homo sapien
ctccctgctgcactcagttgtggct

SEQ ID NO: 4836983 - DNA, 25 bp, Homo sapien
ctggccaccggaggagcccgcccgc

SEQ ID NO: 4836984 - DNA, 25 bp, Homo sapien
gaagcttcccggatgcataagcatc

SEQ ID NO: 4836985 - DNA, 25 bp, Homo sapien
tccacgaagtgtcgggaacaccagg

SEQ ID NO: 4836986 - DNA, 25 bp, Homo sapien
gccagtgggagaagatacactttcc

SEQ ID NO: 4836987 - DNA, 25 bp, Homo sapien
taaatggtgtgcaaagccagtggga

SEQ ID NO: 4836988 - DNA, 25 bp, Homo sapien
cggtgttcagatcctgatgcattag

SEQ ID NO: 4836989 - DNA, 25 bp, Homo sapien
gggcggtgttcagatcctgatgcat

SEQ ID NO: 4836990 - DNA, 25 bp, Homo sapien
cacacgatggggcggtgttcagatc

SEQ ID NO: 4836991 - DNA, 25 bp, Homo sapien
cacgatggggcggtgttcagatcct

SEQ ID NO: 4836992 - DNA, 25 bp, Homo sapien
cgggccacacagagggaaagggtat

SEQ ID NO: 4836993 - DNA, 25 bp, Homo sapien
ggccacacagagggaaagggtatcc

SEQ ID NO: 4836994 - DNA, 25 bp, Homo sapien
tggacgggccacacagagggaaagg

SEQ ID NO: 4836995 - DNA, 25 bp, Homo sapien
ctggacgggccacacagagggaaag

SEQ ID NO: 4836996 - DNA, 25 bp, Homo sapien
accacgggtacatccctggcgtagc

SEQ ID NO: 4836997 - DNA, 25 bp, Homo sapien
ctgtggtcaccacgggtacatccct

SEQ ID NO: 4836998 - DNA, 25 bp, Homo sapien
catccctggcgtagcgggatcgatg

SEQ ID NO: 4836999 - DNA, 25 bp, Homo sapien
tagcgggatcgatgtgtctggctgg

SEQ ID NO: 4837000 - DNA, 25 bp, Homo sapien
ttggccagaggctccggtgtcccag

SEQ ID NO: 4837001 - DNA, 25 bp, Homo sapien
tactgggtaaatattggccagaggc

SEQ ID NO: 4837002 - DNA, 25 bp, Homo sapien
ccagaggctccggtgtcccaggagc

SEQ ID NO: 4837003 - DNA, 25 bp, Homo sapien
aatattggccagaggctccggtgtc

SEQ ID NO: 4837004 - DNA, 25 bp, Homo sapien
tctcttcccagaagacccaggcagg

SEQ ID NO: 4837005 - DNA, 25 bp, Homo sapien
tcttcccagaagacccaggcaggca

SEQ ID NO: 4837006 - DNA, 25 bp, Homo sapien
tttctcttcccagaagacccaggca

SEQ ID NO: 4837007 - DNA, 25 bp, Homo sapien
cccagaagacccaggcaggcatctt

SEQ ID NO: 4837008 - DNA, 25 bp, Homo sapien
cacacatgacaaggcagctccgaat

SEQ ID NO: 4837009 - DNA, 25 bp, Homo sapien
actttatcacacatgacaaggcagc

SEQ ID NO: 4837010 - DNA, 25 bp, Homo sapien
acatgacaaggcagctccgaatcag

SEQ ID NO: 4837011 - DNA, 25 bp, Homo sapien
atcacacatgacaaggcagctccga

SEQ ID NO: 4837012 - DNA, 25 bp, Homo sapien
tcttttttgccgatgccattcctct

SEQ ID NO: 4837013 - DNA, 25 bp, Homo sapien
gacatcccagctttgtgtgaggccg

SEQ ID NO: 4837014 - DNA, 25 bp, Homo sapien
ttcctttacaccccgaagcatcagg

SEQ ID NO: 4837015 - DNA, 25 bp, Homo sapien
gcctctgcagcccatatggctgcca

SEQ ID NO: 4837016 - DNA, 25 bp, Homo sapien
aggtgcaggggatggtagcattctg

SEQ ID NO: 4837017 - DNA, 25 bp, Homo sapien
gggatggtagcattctggggatcta

SEQ ID NO: 4837018 - DNA, 25 bp, Homo sapien
tggtagcattctggggatctagggc

SEQ ID NO: 4837019 - DNA, 25 bp, Homo sapien
ggtgcaggggatggtagcattctgg

SEQ ID NO: 4837020 - DNA, 25 bp, Homo sapien
gggagaaagtccaccgtgctttcca

SEQ ID NO: 4837021 - DNA, 25 bp, Homo sapien
agaaagtccaccgtgctttccactg

SEQ ID NO: 4837022 - DNA, 25 bp, Homo sapien
gagaaagtccaccgtgctttccact

SEQ ID NO: 4837023 - DNA, 25 bp, Homo sapien
ggagaaagtccaccgtgctttccac

SEQ ID NO: 4837024 - DNA, 25 bp, Homo sapien
tcagggaaccaaggagcaggctgac

SEQ ID NO: 4837025 - DNA, 25 bp, Homo sapien
tcctgcatcaggtcggctgcaaacg

SEQ ID NO: 4837026 - DNA, 25 bp, Homo sapien
taagacgcggagtctcacaaactga

SEQ ID NO: 4837027 - DNA, 25 bp, Homo sapien
gaacaggtaccgtctctctcgatgg

SEQ ID NO: 4837028 - DNA, 25 bp, Homo sapien
tcaggcccagcgcaagccattttgg

SEQ ID NO: 4837029 - DNA, 25 bp, Homo sapien
gatggataccagtgcattggagtct

SEQ ID NO: 4837030 - DNA, 25 bp, Homo sapien
ccttatcgggggaatcaggtatttg

SEQ ID NO: 4837031 - DNA, 25 bp, Homo sapien
tttgtgtaaatcagagaaggatttg

SEQ ID NO: 4837032 - DNA, 25 bp, Homo sapien
aggtatttgtgtagatttgtgtaaa

SEQ ID NO: 4837033 - DNA, 25 bp, Homo sapien
gcaggtaacacccaattacaactga

SEQ ID NO: 4837034 - DNA, 25 bp, Homo sapien
ccagtatcggggcaggtaacaccca

SEQ ID NO: 4837035 - DNA, 25 bp, Homo sapien
aaggagctgcagataaaaagtccag

SEQ ID NO: 4837036 - DNA, 25 bp, Homo sapien
gataaagctggagcgagcctgcaaa

SEQ ID NO: 4837037 - DNA, 25 bp, Homo sapien
agttgagtccatgaggccaataaac

SEQ ID NO: 4837038 - DNA, 25 bp, Homo sapien
gtactagttgagtccatgaggccaa

SEQ ID NO: 4837039 - DNA, 25 bp, Homo sapien
tctgactacaatggtactagttgag

SEQ ID NO: 4837040 - DNA, 25 bp, Homo sapien
ctctgactacaatggtactagttga

SEQ ID NO: 4837041 - DNA, 25 bp, Homo sapien
gaggctgaggtgcaacagatgtccc

SEQ ID NO: 4837042 - DNA, 25 bp, Homo sapien
tcttgggacataaggacataaggtc

SEQ ID NO: 4837043 - DNA, 25 bp, Homo sapien
gacagatcctctttcctatgcgaca

SEQ ID NO: 4837044 - DNA, 25 bp, Homo sapien
ggctggtccgatcatatggcttctc

SEQ ID NO: 4837045 - DNA, 25 bp, Homo sapien
tggtgtgaggcaaactctgcacagg

SEQ ID NO: 4837046 - DNA, 25 bp, Homo sapien
ctggtgtgaggcaaactctgcacag

SEQ ID NO: 4837047 - DNA, 25 bp, Homo sapien
cctggtgtgaggcaaactctgcaca

SEQ ID NO: 4837048 - DNA, 25 bp, Homo sapien
tgcaaaaagagtttgtaaactattc

SEQ ID NO: 4837049 - DNA, 25 bp, Homo sapien
gagtttgtaaactattcggcgacac

SEQ ID NO: 4837050 - DNA, 25 bp, Homo sapien
aactattcggcgacacacaacaggg

SEQ ID NO: 4837051 - DNA, 25 bp, Homo sapien
cacaacagggattaaaattcatggc

SEQ ID NO: 4837052 - DNA, 25 bp, Homo sapien
gccagattgatcgaaatgcatccaa

SEQ ID NO: 4837053 - DNA, 25 bp, Homo sapien
accagcgtgcgaccacgaaggacgt

SEQ ID NO: 4837054 - DNA, 25 bp, Homo sapien
cctggcccatgtggcgccagattga

SEQ ID NO: 4837055 - DNA, 25 bp, Homo sapien
tgcatccaaagcaaaccggcttcgg

SEQ ID NO: 4837056 - DNA, 25 bp, Homo sapien
agagaaggaaggcattagatctgtg

SEQ ID NO: 4837057 - DNA, 25 bp, Homo sapien
ctggggtatgggattcgggggtgcg

SEQ ID NO: 4837058 - DNA, 25 bp, Homo sapien
cagagaaggaaggcattagatctgt

SEQ ID NO: 4837059 - DNA, 25 bp, Homo sapien
gagaaggaaggcattagatctgtgc

SEQ ID NO: 4837060 - DNA, 25 bp, Homo sapien
gaacgaatgctgtgggcaaagaaca

SEQ ID NO: 4837061 - DNA, 25 bp, Homo sapien
tatgccagggaaaagctgcagtcct

SEQ ID NO: 4837062 - DNA, 25 bp, Homo sapien
catctgaaggcgcagagtatgccag

SEQ ID NO: 4837063 - DNA, 25 bp, Homo sapien
caaggaggagacaagaaacgttcac

SEQ ID NO: 4837064 - DNA, 25 bp, Homo sapien
tttctacggaaagcacccacggcca

SEQ ID NO: 4837065 - DNA, 25 bp, Homo sapien
taaggtgaggatcatgaacagatcc

SEQ ID NO: 4837066 - DNA, 25 bp, Homo sapien
cactaaggtgaggatcatgaacaga

SEQ ID NO: 4837067 - DNA, 25 bp, Homo sapien
tggtgacactaaggtgaggatcatg

SEQ ID NO: 4837068 - DNA, 25 bp, Homo sapien
gctggcagaagcctcggtgcgcggc

SEQ ID NO: 4837069 - DNA, 25 bp, Homo sapien
cgcaggcgctggcagaagcctcggt

SEQ ID NO: 4837070 - DNA, 25 bp, Homo sapien
cttattgatgaggtgcgcgctgacg

SEQ ID NO: 4837071 - DNA, 25 bp, Homo sapien
gcctggcaggccttattgatgaggt

SEQ ID NO: 4837072 - DNA, 25 bp, Homo sapien
catctgtgaaatgcaccggttgtgc

SEQ ID NO: 4837073 - DNA, 25 bp, Homo sapien
gttgtgctgaatcaatcctctgtct

SEQ ID NO: 4837074 - DNA, 25 bp, Homo sapien
ggaacaaatgaacaccacatcgtta

SEQ ID NO: 4837075 - DNA, 25 bp, Homo sapien
ggccccagtatagtttccatcacct

SEQ ID NO: 4837076 - DNA, 25 bp, Homo sapien
tgaggatgcagtccacggctcggag

SEQ ID NO: 4837077 - DNA, 25 bp, Homo sapien
gggagagcttgctaattaagcagca

SEQ ID NO: 4837078 - DNA, 25 bp, Homo sapien
ctgggagagcttgctaattaagcag

SEQ ID NO: 4837079 - DNA, 25 bp, Homo sapien
tccacggctcggagagctggtggca

SEQ ID NO: 4837080 - DNA, 25 bp, Homo sapien
ctcgccccgaggtgacccggagttg

SEQ ID NO: 4837081 - DNA, 25 bp, Homo sapien
gcacccttgccctcgccccgaggtg

SEQ ID NO: 4837082 - DNA, 25 bp, Homo sapien
acccggagttggagaagacgcccag

SEQ ID NO: 4837083 - DNA, 25 bp, Homo sapien
gaggtgacccggagttggagaagac

SEQ ID NO: 4837084 - DNA, 25 bp, Homo sapien
ctgcagccggttacagacgagagga

SEQ ID NO: 4837085 - DNA, 25 bp, Homo sapien
tactctgggttgcaaagcgaataca

SEQ ID NO: 4837086 - DNA, 25 bp, Homo sapien
gatacggagtggacgtagagcctcc

SEQ ID NO: 4837087 - DNA, 25 bp, Homo sapien
cacttgctatggtccgtgcctcgga

SEQ ID NO: 4837088 - DNA, 25 bp, Homo sapien
ctgcacgagcctccgcgggcgcagc

SEQ ID NO: 4837089 - DNA, 25 bp, Homo sapien
gcgcagcgccgagaaccagggtgca

SEQ ID NO: 4837090 - DNA, 25 bp, Homo sapien
cctgcacgagcctccgcgggcgcag

SEQ ID NO: 4837091 - DNA, 25 bp, Homo sapien
ggcgcagcgccgagaaccagggtgc

SEQ ID NO: 4837092 - DNA, 25 bp, Homo sapien
gcgagggatccggacagacattcaa

SEQ ID NO: 4837093 - DNA, 25 bp, Homo sapien
tgggcgccggtctgcgatactcctt

SEQ ID NO: 4837094 - DNA, 25 bp, Homo sapien
gaacgaatgccgagtcctgcaacac

SEQ ID NO: 4837095 - DNA, 25 bp, Homo sapien
cctccaagatatggacgcgcctctg

SEQ ID NO: 4837096 - DNA, 25 bp, Homo sapien
gcaactcggccctagggcgctgact

SEQ ID NO: 4837097 - DNA, 25 bp, Homo sapien
ggcctggaggttccgcgcacgctcc

SEQ ID NO: 4837098 - DNA, 25 bp, Homo sapien
aagtccccagctcgcggctcgggtc

SEQ ID NO: 4837099 - DNA, 25 bp, Homo sapien
agcggcgacgaagcctctcgcggcc

SEQ ID NO: 4837100 - DNA, 25 bp, Homo sapien
cgtcagtcccggtaacttcacgcgg

SEQ ID NO: 4837101 - DNA, 25 bp, Homo sapien
caagttcacacggaaagaatccaaa

SEQ ID NO: 4837102 - DNA, 25 bp, Homo sapien
cctgcgatatgcaaacaagggttgg

SEQ ID NO: 4837103 - DNA, 25 bp, Homo sapien
caatttcggtgaagtgagtagcgca

SEQ ID NO: 4837104 - DNA, 25 bp, Homo sapien
acataacccggcggatccgggcagc

SEQ ID NO: 4837105 - DNA, 25 bp, Homo sapien
agcccaaagccaagcgacataaccc

SEQ ID NO: 4837106 - DNA, 25 bp, Homo sapien
cgggcagccccgtggccggcggagg

SEQ ID NO: 4837107 - DNA, 25 bp, Homo sapien
ccggcggagggaagtcacggctccg

SEQ ID NO: 4837108 - DNA, 25 bp, Homo sapien
ccaacctccacggtgcgggccgcgc

SEQ ID NO: 4837109 - DNA, 25 bp, Homo sapien
cccagggattccatcggccgcgggt

SEQ ID NO: 4837110 - DNA, 25 bp, Homo sapien
caggaaacacttccccgaggcgctt

SEQ ID NO: 4837111 - DNA, 25 bp, Homo sapien
ctttcctcaacctggtggcagtccg

SEQ ID NO: 4837112 - DNA, 25 bp, Homo sapien
tgttgaaattgagcctggatcctgc

SEQ ID NO: 4837113 - DNA, 25 bp, Homo sapien
ttcgcaggccaacaggaaatgcgct

SEQ ID NO: 4837114 - DNA, 25 bp, Homo sapien
tcagaatgggagaattgcaagcgcc

SEQ ID NO: 4837115 - DNA, 25 bp, Homo sapien
gatcctgcagttggcggagaaagcc

SEQ ID NO: 4837116 - DNA, 25 bp, Homo sapien
tctggaatactcaactcctgcagtt

SEQ ID NO: 4837117 - DNA, 25 bp, Homo sapien
caagtagctgacctatttcattgca

SEQ ID NO: 4837118 - DNA, 25 bp, Homo sapien
aagtagctgacctatttcattgcat

SEQ ID NO: 4837119 - DNA, 25 bp, Homo sapien
ctggaatactcaactcctgcagttc

SEQ ID NO: 4837120 - DNA, 25 bp, Homo sapien
tagagtcatcgtgaagcttaggagt

SEQ ID NO: 4837121 - DNA, 25 bp, Homo sapien
gtcacatggtaactcctaaaagctt

SEQ ID NO: 4837122 - DNA, 25 bp, Homo sapien
cattccagcaagtttggttagagaa

SEQ ID NO: 4837123 - DNA, 25 bp, Homo sapien
ggtttggcaaatagttcattccagc

SEQ ID NO: 4837124 - DNA, 25 bp, Homo sapien
tctttaagaagaggcaactactccc

SEQ ID NO: 4837125 - DNA, 25 bp, Homo sapien
tttcaatagtagatttacaagaatg

SEQ ID NO: 4837126 - DNA, 25 bp, Homo sapien
caggctctgagacttacggaataaa

SEQ ID NO: 4837127 - DNA, 25 bp, Homo sapien
aactatatatgaatccaggctctga

SEQ ID NO: 4837128 - DNA, 25 bp, Homo sapien
taagcagaatcataacaccaaggtg

SEQ ID NO: 4837129 - DNA, 25 bp, Homo sapien
taaccatgtggacgtcaaatcggac

SEQ ID NO: 4837130 - DNA, 25 bp, Homo sapien
ttaatgcagagtgcctgggacccaa

SEQ ID NO: 4837131 - DNA, 25 bp, Homo sapien
ggagactggcctagaaagaacttta

SEQ ID NO: 4837132 - DNA, 25 bp, Homo sapien
cacaggcgcagaagctgctaggctg

SEQ ID NO: 4837133 - DNA, 25 bp, Homo sapien
gacacccgcggccacaggcgcagaa

SEQ ID NO: 4837134 - DNA, 25 bp, Homo sapien
acccgcggccacaggcgcagaagct

SEQ ID NO: 4837135 - DNA, 25 bp, Homo sapien
cggccacaggcgcagaagctgctag

SEQ ID NO: 4837136 - DNA, 25 bp, Homo sapien
gagccttcgggtcccccactcgtca

SEQ ID NO: 4837137 - DNA, 25 bp, Homo sapien
gccttcgggtcccccactcgtcaca

SEQ ID NO: 4837138 - DNA, 25 bp, Homo sapien
gaagacggagggcagcgtccaggcc

SEQ ID NO: 4837139 - DNA, 25 bp, Homo sapien
cggagggcagcgtccaggcctggag

SEQ ID NO: 4837140 - DNA, 25 bp, Homo sapien
gggcagaagacggagggcagcgtcc

SEQ ID NO: 4837141 - DNA, 25 bp, Homo sapien
ctattgggggcagaagacggagggc

SEQ ID NO: 4837142 - DNA, 25 bp, Homo sapien
tccagcattgagcaaagggctctag

SEQ ID NO: 4837143 - DNA, 25 bp, Homo sapien
tgaattcaccccagggcctgaaggt

SEQ ID NO: 4837144 - DNA, 25 bp, Homo sapien
tttttggtggttccggaagctgatg

SEQ ID NO: 4837145 - DNA, 25 bp, Homo sapien
aagggctctaggctcttgtttactc

SEQ ID NO: 4837146 - DNA, 25 bp, Homo sapien
tgtcgcgaagatcaaaaatcaaagg

SEQ ID NO: 4837147 - DNA, 25 bp, Homo sapien
tcgcgaagatcaaaaatcaaagggg

SEQ ID NO: 4837148 - DNA, 25 bp, Homo sapien
ctgtcgcgaagatcaaaaatcaaag

SEQ ID NO: 4837149 - DNA, 25 bp, Homo sapien
gcgaagatcaaaaatcaaaggggaa

SEQ ID NO: 4837150 - DNA, 25 bp, Homo sapien
cctcgcaggtcaaggagccacgcgg

SEQ ID NO: 4837151 - DNA, 25 bp, Homo sapien
tgcgagctcccggcttcggtgtcct

SEQ ID NO: 4837152 - DNA, 25 bp, Homo sapien
gacggcaacaacgataatatgcgtg

SEQ ID NO: 4837153 - DNA, 25 bp, Homo sapien
ggagagaaaacgacggcaacaacga

SEQ ID NO: 4837154 - DNA, 25 bp, Homo sapien
tgggcacgtagactggcgaggacgc

SEQ ID NO: 4837155 - DNA, 25 bp, Homo sapien
ccgcgccgtgcatgaaggcgccggg

SEQ ID NO: 4837156 - DNA, 25 bp, Homo sapien
acggaggagggcacccgcggtgtgg

SEQ ID NO: 4837157 - DNA, 25 bp, Homo sapien
gcgcctccgccctggaggtaggaca

SEQ ID NO: 4837158 - DNA, 25 bp, Homo sapien
tcccgcctggctccatcccgggctg

SEQ ID NO: 4837159 - DNA, 25 bp, Homo sapien
gtgtaagcggctccgtcggctcccg

SEQ ID NO: 4837160 - DNA, 25 bp, Homo sapien
gcggcggggtgtaagcggctccgtc

SEQ ID NO: 4837161 - DNA, 25 bp, Homo sapien
ggaaggagaagcgcggcgacaccgg

SEQ ID NO: 4837162 - DNA, 25 bp, Homo sapien
gcgcgcccgtactgctcgcggcccg

SEQ ID NO: 4837163 - DNA, 25 bp, Homo sapien
ggctggagtaggagcccgcgaagcc

SEQ ID NO: 4837164 - DNA, 25 bp, Homo sapien
aggacgcgcccacgtcggccatgta

SEQ ID NO: 4837165 - DNA, 25 bp, Homo sapien
ccacgtcggccatgtaagccgggta

SEQ ID NO: 4837166 - DNA, 25 bp, Homo sapien
tggtggaaaaacaagaggccctcga

SEQ ID NO: 4837167 - DNA, 25 bp, Homo sapien
gaaactcgaggtagtgaagcaccat

SEQ ID NO: 4837168 - DNA, 25 bp, Homo sapien
ccttccacagaagccggtcttctgg

SEQ ID NO: 4837169 - DNA, 25 bp, Homo sapien
cagcccaacgaaggcgttggtggaa

SEQ ID NO: 4837170 - DNA, 25 bp, Homo sapien
ctgggatggcggggaggccgcactc

SEQ ID NO: 4837171 - DNA, 25 bp, Homo sapien
ggatggcggggaggccgcactccga

SEQ ID NO: 4837172 - DNA, 25 bp, Homo sapien
tgggatggcggggaggccgcactcc

SEQ ID NO: 4837173 - DNA, 25 bp, Homo sapien
atggcggggaggccgcactccgacc

SEQ ID NO: 4837174 - DNA, 25 bp, Homo sapien
agcgcagcgcggccacggtcgatgt

SEQ ID NO: 4837175 - DNA, 25 bp, Homo sapien
ctgtcctcccgcgtcacccacagcg

SEQ ID NO: 4837176 - DNA, 25 bp, Homo sapien
tgtcctcccgcgtcacccacagcgc

SEQ ID NO: 4837177 - DNA, 25 bp, Homo sapien
cctcctttgttctcggtgtgagacc

SEQ ID NO: 4837178 - DNA, 25 bp, Homo sapien
cagctgggccgccaaatggcccaga

SEQ ID NO: 4837179 - DNA, 25 bp, Homo sapien
aaaatcatcagctaccccgagggat

SEQ ID NO: 4837180 - DNA, 25 bp, Homo sapien
gaaggtctgcggtccaaaccattgt

SEQ ID NO: 4837181 - DNA, 25 bp, Homo sapien
taactcgggtgtcatgaacaagcgc

SEQ ID NO: 4837182 - DNA, 25 bp, Homo sapien
tatctcgcaaaagtcgcggcgaggc

SEQ ID NO: 4837183 - DNA, 25 bp, Homo sapien
ccctattttaagtcagaggccccag

SEQ ID NO: 4837184 - DNA, 25 bp, Homo sapien
gaacaagcgcgtttgaggtccctat

SEQ ID NO: 4837185 - DNA, 25 bp, Homo sapien
catcagcaacctctacatggcatgg

SEQ ID NO: 4837186 - DNA, 25 bp, Homo sapien
ttcataagctatccgggaagagccc

SEQ ID NO: 4837187 - DNA, 25 bp, Homo sapien
taacacgctgaagctatgaatgcca

SEQ ID NO: 4837188 - DNA, 25 bp, Homo sapien
taagtgccacctgcataacacgctg

SEQ ID NO: 4837189 - DNA, 25 bp, Homo sapien
ggcaattaccaccaagatccctacg

SEQ ID NO: 4837190 - DNA, 25 bp, Homo sapien
agttcacatacattgcagtcaggcc

SEQ ID NO: 4837191 - DNA, 25 bp, Homo sapien
acatttgtcttagggtcgtagctca

SEQ ID NO: 4837192 - DNA, 25 bp, Homo sapien
cattctgtgtggttggacccaggca

SEQ ID NO: 4837193 - DNA, 25 bp, Homo sapien
cagcgcccaggagtttatgatgaag

SEQ ID NO: 4837194 - DNA, 25 bp, Homo sapien
caattgtctaggagtgttcttctca

SEQ ID NO: 4837195 - DNA, 25 bp, Homo sapien
caaggcaagaactatccgcagagct

SEQ ID NO: 4837196 - DNA, 25 bp, Homo sapien
gaagacaagccatattctatactgc

SEQ ID NO: 4837197 - DNA, 25 bp, Homo sapien
gttgaggaatgatacggaagattcc

SEQ ID NO: 4837198 - DNA, 25 bp, Homo sapien
aatgatacggaagattccgtaggac

SEQ ID NO: 4837199 - DNA, 25 bp, Homo sapien
tgaggaatgatacggaagattccgt

SEQ ID NO: 4837200 - DNA, 25 bp, Homo sapien
atacggaagattccgtaggacgaca

SEQ ID NO: 4837201 - DNA, 25 bp, Homo sapien
ctagaagtagaaatggagatttcaa

SEQ ID NO: 4837202 - DNA, 25 bp, Homo sapien
tcagttctaaatggaggcgataagg

SEQ ID NO: 4837203 - DNA, 25 bp, Homo sapien
gttgctatcgatcagttctaaatgg

SEQ ID NO: 4837204 - DNA, 25 bp, Homo sapien
cagttgctatcgatcagttctaaat

SEQ ID NO: 4837205 - DNA, 25 bp, Homo sapien
gaggcgataaggtttgactggattt

SEQ ID NO: 4837206 - DNA, 25 bp, Homo sapien
aattcgagtttgatgtccacgcagg

SEQ ID NO: 4837207 - DNA, 25 bp, Homo sapien
caggcaagcatgaattcgagtttga

SEQ ID NO: 4837208 - DNA, 25 bp, Homo sapien
tgtccacgcaggcacaggaaggctt

SEQ ID NO: 4837209 - DNA, 25 bp, Homo sapien
gcaggcacaggaaggcttaatgtta

SEQ ID NO: 4837210 - DNA, 25 bp, Homo sapien
gagcttgtttccctgtgacgtttgt

SEQ ID NO: 4837211 - DNA, 25 bp, Homo sapien
tccctgtgacgtttgttatgatgag

SEQ ID NO: 4837212 - DNA, 25 bp, Homo sapien
gtgacgtttgttatgatgaggctga

SEQ ID NO: 4837213 - DNA, 25 bp, Homo sapien
aagggagcttgtttccctgtgacgt

SEQ ID NO: 4837214 - DNA, 25 bp, Homo sapien
tggcggtccccataaagattataag

SEQ ID NO: 4837215 - DNA, 25 bp, Homo sapien
ggtccccataaagattataagcaaa

SEQ ID NO: 4837216 - DNA, 25 bp, Homo sapien
cccataaagattataagcaaaatcc

SEQ ID NO: 4837217 - DNA, 25 bp, Homo sapien
gttggcggtccccataaagattata

SEQ ID NO: 4837218 - DNA, 25 bp, Homo sapien
caaggataaccttctccttagtgat

SEQ ID NO: 4837219 - DNA, 25 bp, Homo sapien
aaccttctccttagtgatcagccct

SEQ ID NO: 4837220 - DNA, 25 bp, Homo sapien
accttctccttagtgatcagccctg

SEQ ID NO: 4837221 - DNA, 25 bp, Homo sapien
tagccttcgcaggaagtctctacct

SEQ ID NO: 4837222 - DNA, 25 bp, Homo sapien
tattcggcagttttctatagttggg

SEQ ID NO: 4837223 - DNA, 25 bp, Homo sapien
ttcatctgatgtgctggtcttcggg

SEQ ID NO: 4837224 - DNA, 25 bp, Homo sapien
tatggaccagctctcgaagtctttc

SEQ ID NO: 4837225 - DNA, 25 bp, Homo sapien
gaggtggacgccttagccaacagtc

SEQ ID NO: 4837226 - DNA, 25 bp, Homo sapien
ccacgcagaccagacttaaaggcag

SEQ ID NO: 4837227 - DNA, 25 bp, Homo sapien
ggcaattccagacgcaagtagaggt

SEQ ID NO: 4837228 - DNA, 25 bp, Homo sapien
tggtctccacaactcaaaagtgcag

SEQ ID NO: 4837229 - DNA, 25 bp, Homo sapien
ggctgaccgcgttcacttgtactca

SEQ ID NO: 4837230 - DNA, 25 bp, Homo sapien
aattttgtcctaactccaaggatgg

SEQ ID NO: 4837231 - DNA, 25 bp, Homo sapien
tgcaagccaggaaccaactgacagc

SEQ ID NO: 4837232 - DNA, 25 bp, Homo sapien
tcagcggtcaggtttgagactgcaa

SEQ ID NO: 4837233 - DNA, 25 bp, Homo sapien
tacgaaaggcactgagaggaacttc

SEQ ID NO: 4837234 - DNA, 25 bp, Homo sapien
cacccacgtttggaggaaagacttg

SEQ ID NO: 4837235 - DNA, 25 bp, Homo sapien
tctggtatgaacctcggtaagcacc

SEQ ID NO: 4837236 - DNA, 25 bp, Homo sapien
caaagttgggttatgcattcaagca

SEQ ID NO: 4837237 - DNA, 25 bp, Homo sapien
cctcagagccgcccatgagatgcgg

SEQ ID NO: 4837238 - DNA, 25 bp, Homo sapien
tcagagccgcccatgagatgcggcc

SEQ ID NO: 4837239 - DNA, 25 bp, Homo sapien
agcctccaccaaggtcgcctgccct

SEQ ID NO: 4837240 - DNA, 25 bp, Homo sapien
ctccaccaaggtcgcctgccctcag

SEQ ID NO: 4837241 - DNA, 25 bp, Homo sapien
ataagcgtagcatctccccagctac

SEQ ID NO: 4837242 - DNA, 25 bp, Homo sapien
gggtctgccgctcccttcactcgct

SEQ ID NO: 4837243 - DNA, 25 bp, Homo sapien
taccacaaggctgccggggtctgcc

SEQ ID NO: 4837244 - DNA, 25 bp, Homo sapien
tccccagctaccacaaggctgccgg

SEQ ID NO: 4837245 - DNA, 25 bp, Homo sapien
ccaaagtactgggtgagtacaccac

SEQ ID NO: 4837246 - DNA, 25 bp, Homo sapien
caaagtactgggtgagtacaccaca

SEQ ID NO: 4837247 - DNA, 25 bp, Homo sapien
ggggaacagacaagaaaagacacag

SEQ ID NO: 4837248 - DNA, 25 bp, Homo sapien
atctgagaatctagagcgcacagaa

SEQ ID NO: 4837249 - DNA, 25 bp, Homo sapien
gacacagaggattaattctttgttt

SEQ ID NO: 4837250 - DNA, 25 bp, Homo sapien
gaatctagagcgcacagaaacaatg

SEQ ID NO: 4837251 - DNA, 25 bp, Homo sapien
tgagcggccggttgatgccgttcat

SEQ ID NO: 4837252 - DNA, 25 bp, Homo sapien
agagcggggtggacatagccccaca

SEQ ID NO: 4837253 - DNA, 25 bp, Homo sapien
ggcgttgcacagatagtgacccgtc

SEQ ID NO: 4837254 - DNA, 25 bp, Homo sapien
cagccggcgctgaggcttgatgagc

SEQ ID NO: 4837255 - DNA, 25 bp, Homo sapien
aggaggctgcgaggcacgtgcttac

SEQ ID NO: 4837256 - DNA, 25 bp, Homo sapien
tcaaaaccagaggatgtcccaccaa

SEQ ID NO: 4837257 - DNA, 25 bp, Homo sapien
atgtcccaccaaggcgagagctccg

SEQ ID NO: 4837258 - DNA, 25 bp, Homo sapien
caaggcgagagctccgcagccaggt

SEQ ID NO: 4837259 - DNA, 25 bp, Homo sapien
tgggccctaacgaccctgcatgaga

SEQ ID NO: 4837260 - DNA, 25 bp, Homo sapien
tgcgccactgcgaggaataaatcag

SEQ ID NO: 4837261 - DNA, 25 bp, Homo sapien
aacaaggtttctgctgcccgaggag

SEQ ID NO: 4837262 - DNA, 25 bp, Homo sapien
catgagatctctgacctgtgacggc

SEQ ID NO: 4837263 - DNA, 25 bp, Homo sapien
ctgcaagacaggaaacaaatgcttc

SEQ ID NO: 4837264 - DNA, 25 bp, Homo sapien
gcaagacaggaaacaaatgcttcat

SEQ ID NO: 4837265 - DNA, 25 bp, Homo sapien
tgcaagacaggaaacaaatgcttca

SEQ ID NO: 4837266 - DNA, 25 bp, Homo sapien
tcgccctccgcattgcggcgccaca

SEQ ID NO: 4837267 - DNA, 25 bp, Homo sapien
gcattgcggcgccacagcgtggtgg

SEQ ID NO: 4837268 - DNA, 25 bp, Homo sapien
tccgcattgcggcgccacagcgtgg

SEQ ID NO: 4837269 - DNA, 25 bp, Homo sapien
gccctccgcattgcggcgccacagc

SEQ ID NO: 4837270 - DNA, 25 bp, Homo sapien
gatcccctctttccgcattgcaaga

SEQ ID NO: 4837271 - DNA, 25 bp, Homo sapien
ccctctttccgcattgcaagaggcc

SEQ ID NO: 4837272 - DNA, 25 bp, Homo sapien
ggatcccctctttccgcattgcaag

SEQ ID NO: 4837273 - DNA, 25 bp, Homo sapien
tcccctctttccgcattgcaagagg

SEQ ID NO: 4837274 - DNA, 25 bp, Homo sapien
ctgggtctttgcagtcggcaatgat

SEQ ID NO: 4837275 - DNA, 25 bp, Homo sapien
tgcttcgaaagctcccaacacgttc

SEQ ID NO: 4837276 - DNA, 25 bp, Homo sapien
agtcggcaatgatcaggccccagct

SEQ ID NO: 4837277 - DNA, 25 bp, Homo sapien
agcttgagttgagcctgcttcgaaa

SEQ ID NO: 4837278 - DNA, 25 bp, Homo sapien
ctgcagcgccaaagatgaaaggacc

SEQ ID NO: 4837279 - DNA, 25 bp, Homo sapien
tggatccccgttagcccaaagagaa

SEQ ID NO: 4837280 - DNA, 25 bp, Homo sapien
caaagatgaaaggaccgagtaaagt

SEQ ID NO: 4837281 - DNA, 25 bp, Homo sapien
caaagagaattgaaaggaactgagc

SEQ ID NO: 4837282 - DNA, 25 bp, Homo sapien
gagataatatttctgaaggggcttt

SEQ ID NO: 4837283 - DNA, 25 bp, Homo sapien
tttcatggagataatatttctgaag

SEQ ID NO: 4837284 - DNA, 25 bp, Homo sapien
tggagataatatttctgaaggggct

SEQ ID NO: 4837285 - DNA, 25 bp, Homo sapien
tcatggagataatatttctgaaggg

SEQ ID NO: 4837286 - DNA, 25 bp, Homo sapien
taattctctacccattaacagctgt

SEQ ID NO: 4837287 - DNA, 25 bp, Homo sapien
ttaaatcattgtcctctatgagcct

SEQ ID NO: 4837288 - DNA, 25 bp, Homo sapien
aaggcagagtggtatattgaagaga

SEQ ID NO: 4837289 - DNA, 25 bp, Homo sapien
cattaacagctgtatgaccctcgtt

SEQ ID NO: 4837290 - DNA, 25 bp, Homo sapien
cagaggtccttatctgcggagggct

SEQ ID NO: 4837291 - DNA, 25 bp, Homo sapien
cagcagggcctgagataatactcta

SEQ ID NO: 4837292 - DNA, 25 bp, Homo sapien
gaggccacgtgtgtttcaggcttca

SEQ ID NO: 4837293 - DNA, 25 bp, Homo sapien
taatatccccacagcaaaacacgtg

SEQ ID NO: 4837294 - DNA, 25 bp, Homo sapien
gaggaaggctctcactgcctgaagg

SEQ ID NO: 4837295 - DNA, 25 bp, Homo sapien
gcgggaggaaggctctcactgcctg

SEQ ID NO: 4837296 - DNA, 25 bp, Homo sapien
gggaggaaggctctcactgcctgaa

SEQ ID NO: 4837297 - DNA, 25 bp, Homo sapien
ggaaggctctcactgcctgaaggag

SEQ ID NO: 4837298 - DNA, 25 bp, Homo sapien
gctgctgtgcccgtagtgagatgac

SEQ ID NO: 4837299 - DNA, 25 bp, Homo sapien
tgcccgtagtgagatgacaggccag

SEQ ID NO: 4837300 - DNA, 25 bp, Homo sapien
acggagctgctgtgcccgtagtgag

SEQ ID NO: 4837301 - DNA, 25 bp, Homo sapien
agtgagatgacaggccaggctccgt

SEQ ID NO: 4837302 - DNA, 25 bp, Homo sapien
cagacatcgcactgactgagaacgt

SEQ ID NO: 4837303 - DNA, 25 bp, Homo sapien
ggcccatggccagacatcgcactga

SEQ ID NO: 4837304 - DNA, 25 bp, Homo sapien
actggctgacgggagacgcatagcc

SEQ ID NO: 4837305 - DNA, 25 bp, Homo sapien
tggtctgtggagactggctgacggg

SEQ ID NO: 4837306 - DNA, 25 bp, Homo sapien
tgacacggtgaacgaagggtctgca

SEQ ID NO: 4837307 - DNA, 25 bp, Homo sapien
aacagatgccgtcattcgggctgga

SEQ ID NO: 4837308 - DNA, 25 bp, Homo sapien
ccagtcccatcagcgtgtaaaggca

SEQ ID NO: 4837309 - DNA, 25 bp, Homo sapien
gagacatgtacaagctgcgggcaga

SEQ ID NO: 4837310 - DNA, 25 bp, Homo sapien
caggtcctgagggactctggctgcc

SEQ ID NO: 4837311 - DNA, 25 bp, Homo sapien
aggtcctgagggactctggctgcca

SEQ ID NO: 4837312 - DNA, 25 bp, Homo sapien
ctgcaggtcctgagggactctggct

SEQ ID NO: 4837313 - DNA, 25 bp, Homo sapien
ctgccggggcgaggctgcaggtcct

SEQ ID NO: 4837314 - DNA, 25 bp, Homo sapien
tagcagtcgtcttctttccaggaat

SEQ ID NO: 4837315 - DNA, 25 bp, Homo sapien
tgcagaggagaacgcggcagatccc

SEQ ID NO: 4837316 - DNA, 25 bp, Homo sapien
gcagaaacagcaatgtgcagaggag

SEQ ID NO: 4837317 - DNA, 25 bp, Homo sapien
tcgaattcgtgttgcagaatctctg

SEQ ID NO: 4837318 - DNA, 25 bp, Homo sapien
atttcaccttaagacaatgttaaca

SEQ ID NO: 4837319 - DNA, 25 bp, Homo sapien
aaacagaatcttggttcaaaggtat

SEQ ID NO: 4837320 - DNA, 25 bp, Homo sapien
tttcaccttaagacaatgttaacag

SEQ ID NO: 4837321 - DNA, 25 bp, Homo sapien
cagaatcttggttcaaaggtattct

SEQ ID NO: 4837322 - DNA, 25 bp, Homo sapien
gagctttccgaatggctgtgtccca

SEQ ID NO: 4837323 - DNA, 25 bp, Homo sapien
cacttattaggaagctgcgactggt

SEQ ID NO: 4837324 - DNA, 25 bp, Homo sapien
gcaaataacagcagccacagcggta

SEQ ID NO: 4837325 - DNA, 25 bp, Homo sapien
gatgcaaactgaagaataggcgcca

SEQ ID NO: 4837326 - DNA, 25 bp, Homo sapien
caatgggcgactgtggaggatatca

SEQ ID NO: 4837327 - DNA, 25 bp, Homo sapien
ccagtgggaaggttggaagccactc

SEQ ID NO: 4837328 - DNA, 25 bp, Homo sapien
atccccaaggaaagctatacaatgg

SEQ ID NO: 4837329 - DNA, 25 bp, Homo sapien
gggagcctcggagtttatagcagct

SEQ ID NO: 4837330 - DNA, 25 bp, Homo sapien
ggcccatgcggcctccgtcccctta

SEQ ID NO: 4837331 - DNA, 25 bp, Homo sapien
ctgggggcggagatttcccggctcg

SEQ ID NO: 4837332 - DNA, 25 bp, Homo sapien
gcggagatttcccggctcggcggcc

SEQ ID NO: 4837333 - DNA, 25 bp, Homo sapien
cccatgcggcctccgtccccttagg

SEQ ID NO: 4837334 - DNA, 25 bp, Homo sapien
gtcggcccgacccagcaccgctacg

SEQ ID NO: 4837335 - DNA, 25 bp, Homo sapien
acccagcaccgctacgcagcccgca

SEQ ID NO: 4837336 - DNA, 25 bp, Homo sapien
gtgggtggcacgtcggcccgaccca

SEQ ID NO: 4837337 - DNA, 25 bp, Homo sapien
agcaccgctacgcagcccgcacagc

SEQ ID NO: 4837338 - DNA, 25 bp, Homo sapien
ccaggccgcagatctaccggagggc

SEQ ID NO: 4837339 - DNA, 25 bp, Homo sapien
gggtctaagaccactgctttcccaa

SEQ ID NO: 4837340 - DNA, 25 bp, Homo sapien
ttctcttccgagtgcccgaggtggg

SEQ ID NO: 4837341 - DNA, 25 bp, Homo sapien
gaagagtcgctgaagatgccgcgcc

SEQ ID NO: 4837342 - DNA, 25 bp, Homo sapien
gatggacaggtgggaagcaagccgc

SEQ ID NO: 4837343 - DNA, 25 bp, Homo sapien
ggaagcaagccgcctctgcaacagc

SEQ ID NO: 4837344 - DNA, 25 bp, Homo sapien
gggaagcaagccgcctctgcaacag

SEQ ID NO: 4837345 - DNA, 25 bp, Homo sapien
taaccagttggatgcctgatcctct

SEQ ID NO: 4837346 - DNA, 25 bp, Homo sapien
tgaaaatctccggacacgtgggcat

SEQ ID NO: 4837347 - DNA, 25 bp, Homo sapien
ggaagcttctggaaaagccttcatc

SEQ ID NO: 4837348 - DNA, 25 bp, Homo sapien
caccaagtcctgaaaatctccggac

SEQ ID NO: 4837349 - DNA, 25 bp, Homo sapien
gagctcagaatcataagtgagaccc

SEQ ID NO: 4837350 - DNA, 25 bp, Homo sapien
actgctgccgacttatttcccactt

SEQ ID NO: 4837351 - DNA, 25 bp, Homo sapien
gggaggtgtgcatgaaacgaccaac

SEQ ID NO: 4837352 - DNA, 25 bp, Homo sapien
cacttttgaagggaccagatgccgc

SEQ ID NO: 4837353 - DNA, 25 bp, Homo sapien
accaacagtgtgctaggcagcacat

SEQ ID NO: 4837354 - DNA, 25 bp, Homo sapien
agcaccaacagtgtgctaggcagca

SEQ ID NO: 4837355 - DNA, 25 bp, Homo sapien
caccaacagtgtgctaggcagcaca

SEQ ID NO: 4837356 - DNA, 25 bp, Homo sapien
taagcaccaacagtgtgctaggcag

SEQ ID NO: 4837357 - DNA, 25 bp, Homo sapien
aggctggcgggctgtagcttcttac

SEQ ID NO: 4837358 - DNA, 25 bp, Homo sapien
ctggcgggctgtagcttcttactgc

SEQ ID NO: 4837359 - DNA, 25 bp, Homo sapien
tggtgaaatttcctcaccaacggcc

SEQ ID NO: 4837360 - DNA, 25 bp, Homo sapien
ttcttactgctgccccctgtcttga

SEQ ID NO: 4837361 - DNA, 25 bp, Homo sapien
gctctgcagaccgtgaggatccatc

SEQ ID NO: 4837362 - DNA, 25 bp, Homo sapien
tactcagaatcatcctcgccctggg

SEQ ID NO: 4837363 - DNA, 25 bp, Homo sapien
gaggatccatcaagggtcttctgcc

SEQ ID NO: 4837364 - DNA, 25 bp, Homo sapien
tgggctccccgacctgctttgggtc

SEQ ID NO: 4837365 - DNA, 25 bp, Homo sapien
aaaccaaagctgacacgcagccacc

SEQ ID NO: 4837366 - DNA, 25 bp, Homo sapien
aaatcgttcacccaaacgctgccaa

SEQ ID NO: 4837367 - DNA, 25 bp, Homo sapien
gctctggagaaatcgttcacccaaa

SEQ ID NO: 4837368 - DNA, 25 bp, Homo sapien
aacgctgccaaacaaaccaaagctg

SEQ ID NO: 4837369 - DNA, 25 bp, Homo sapien
ccagctcctccgaggctaaggcagg

SEQ ID NO: 4837370 - DNA, 25 bp, Homo sapien
ctcaaaacaaagcaaaaaaactcat

SEQ ID NO: 4837371 - DNA, 25 bp, Homo sapien
aggttgcagtgaggcgagatcgtgc

SEQ ID NO: 4837372 - DNA, 25 bp, Homo sapien
agaattggttgaacctgggaggcag

SEQ ID NO: 4837373 - DNA, 25 bp, Homo sapien
gaacttctcagacaggatgtcacag

SEQ ID NO: 4837374 - DNA, 25 bp, Homo sapien
gcttgtcctcgatggaacttctcag

SEQ ID NO: 4837375 - DNA, 25 bp, Homo sapien
gcctggcctagagcttctaaggctt

SEQ ID NO: 4837376 - DNA, 25 bp, Homo sapien
tctctggtccagcagtgtatagcag

SEQ ID NO: 4837377 - DNA, 25 bp, Homo sapien
tctgtacaaggcttcattcttaatg

SEQ ID NO: 4837378 - DNA, 25 bp, Homo sapien
gagaaaggggatggatcccagctct

SEQ ID NO: 4837379 - DNA, 25 bp, Homo sapien
tcccagctctgtacaaggcttcatt

SEQ ID NO: 4837380 - DNA, 25 bp, Homo sapien
aaggcttcattcttaatgatgttcc

SEQ ID NO: 4837381 - DNA, 25 bp, Homo sapien
tctgtaacccatcttcgggcccaaa

SEQ ID NO: 4837382 - DNA, 25 bp, Homo sapien
tgtgtgctgcggtctgccttggaac

SEQ ID NO: 4837383 - DNA, 25 bp, Homo sapien
caggtgagcctctgtaacccatctt

SEQ ID NO: 4837384 - DNA, 25 bp, Homo sapien
gcccaaacgcctccttcatgacctg

SEQ ID NO: 4837385 - DNA, 25 bp, Homo sapien
aggagaactggcactgctctggctc

SEQ ID NO: 4837386 - DNA, 25 bp, Homo sapien
ggagaactggcactgctctggctcc

SEQ ID NO: 4837387 - DNA, 25 bp, Homo sapien
agaactggcactgctctggctcctc

SEQ ID NO: 4837388 - DNA, 25 bp, Homo sapien
gagaactggcactgctctggctcct

SEQ ID NO: 4837389 - DNA, 25 bp, Homo sapien
cggcaaggttccgtgaggagcacca

SEQ ID NO: 4837390 - DNA, 25 bp, Homo sapien
caaagctatgttgggagcacagcca

SEQ ID NO: 4837391 - DNA, 25 bp, Homo sapien
acttagacgtcaggttccccaagcg

SEQ ID NO: 4837392 - DNA, 25 bp, Homo sapien
cacgatggtgcaattcaacaggatg

SEQ ID NO: 4837393 - DNA, 25 bp, Homo sapien
acatttgacccatctcactgactgg

SEQ ID NO: 4837394 - DNA, 25 bp, Homo sapien
tcggtgcctctaagaccagcctgtc

SEQ ID NO: 4837395 - DNA, 25 bp, Homo sapien
tgattcaccatagcgacagcccgct

SEQ ID NO: 4837396 - DNA, 25 bp, Homo sapien
gacctcgaatttgatcacctgccaa

SEQ ID NO: 4837397 - DNA, 25 bp, Homo sapien
aaatctccaacgctaacgtacctca

SEQ ID NO: 4837398 - DNA, 25 bp, Homo sapien
aatctccaacgctaacgtacctcat

SEQ ID NO: 4837399 - DNA, 25 bp, Homo sapien
atctccaacgctaacgtacctcatt

SEQ ID NO: 4837400 - DNA, 25 bp, Homo sapien
atacaattgcttggagaacaacatt

SEQ ID NO: 4837401 - DNA, 25 bp, Homo sapien
acaattgcttggagaacaacattta

SEQ ID NO: 4837402 - DNA, 25 bp, Homo sapien
tacaattgcttggagaacaacattt

SEQ ID NO: 4837403 - DNA, 25 bp, Homo sapien
cagaccgtcacagcgagtattacag

SEQ ID NO: 4837404 - DNA, 25 bp, Homo sapien
gagtctgtcgagtccaagtgtgtcc

SEQ ID NO: 4837405 - DNA, 25 bp, Homo sapien
cgttgtaaagcaaacccagcgtgtt

SEQ ID NO: 4837406 - DNA, 25 bp, Homo sapien
gcagtgcagaccgaaacagacaagt

SEQ ID NO: 4837407 - DNA, 25 bp, Homo sapien
gatagcgttaacagcctctcagttt

SEQ ID NO: 4837408 - DNA, 25 bp, Homo sapien
ctgcttctcctgtggatagcgttaa

SEQ ID NO: 4837409 - DNA, 25 bp, Homo sapien
ccaggtgtcattgataacgcccttt

SEQ ID NO: 4837410 - DNA, 25 bp, Homo sapien
attgataacgccctttctctcctta

SEQ ID NO: 4837411 - DNA, 25 bp, Homo sapien
cgcaggagcccaacggtggtccgca

SEQ ID NO: 4837412 - DNA, 25 bp, Homo sapien
gtggtccgcagtcgggagagcagtg

SEQ ID NO: 4837413 - DNA, 25 bp, Homo sapien
ccacttggtcaataagtcgcccacg

SEQ ID NO: 4837414 - DNA, 25 bp, Homo sapien
aataagtcgcccacgtgtccggcct

SEQ ID NO: 4837415 - DNA, 25 bp, Homo sapien
gcaggcctagtacggcgacgccccg

SEQ ID NO: 4837416 - DNA, 25 bp, Homo sapien
cgccgctccgcccacttcaaccggc

SEQ ID NO: 4837417 - DNA, 25 bp, Homo sapien
cagggggcaggcctagtacggcgac

SEQ ID NO: 4837418 - DNA, 25 bp, Homo sapien
ccgctccgcccacttcaaccggcct

SEQ ID NO: 4837419 - DNA, 25 bp, Homo sapien
gcaggcggcggactcccgggcgcga

SEQ ID NO: 4837420 - DNA, 25 bp, Homo sapien
ggcggactcccgggcgcgactctca

SEQ ID NO: 4837421 - DNA, 25 bp, Homo sapien
aggcggcggactcccgggcgcgact

SEQ ID NO: 4837422 - DNA, 25 bp, Homo sapien
ctcccgggcgcgactctcacctctg

SEQ ID NO: 4837423 - DNA, 25 bp, Homo sapien
tggccaaggcatttcacgaactcca

SEQ ID NO: 4837424 - DNA, 25 bp, Homo sapien
gtggccaaggcatttcacgaactcc

SEQ ID NO: 4837425 - DNA, 25 bp, Homo sapien
cggaagcgcaccaggttgtagaact

SEQ ID NO: 4837426 - DNA, 25 bp, Homo sapien
cccgatccggaagcgcaccaggttg

SEQ ID NO: 4837427 - DNA, 25 bp, Homo sapien
tccggaagcgcaccaggttgtagaa

SEQ ID NO: 4837428 - DNA, 25 bp, Homo sapien
gatccggaagcgcaccaggttgtag

SEQ ID NO: 4837429 - DNA, 25 bp, Homo sapien
cttgccccagatccgggcccggccg

SEQ ID NO: 4837430 - DNA, 25 bp, Homo sapien
ccaggcgtcggccctgctcgccgcg

SEQ ID NO: 4837431 - DNA, 25 bp, Homo sapien
tgaggccggcccagcgagctccttc

SEQ ID NO: 4837432 - DNA, 25 bp, Homo sapien
atccgggcccggccgctcaggccct

SEQ ID NO: 4837433 - DNA, 25 bp, Homo sapien
ggagcgcaaccaccgggaaccacgc

SEQ ID NO: 4837434 - DNA, 25 bp, Homo sapien
acgcaaaagtcgctcatgcccaggg

SEQ ID NO: 4837435 - DNA, 25 bp, Homo sapien
caccgggaaccacgcaaaagtcgct

SEQ ID NO: 4837436 - DNA, 25 bp, Homo sapien
aaagtcgctcatgcccagggcggct

SEQ ID NO: 4837437 - DNA, 25 bp, Homo sapien
cccgcgtaacccacccacattgcct

SEQ ID NO: 4837438 - DNA, 25 bp, Homo sapien
cctctcccgcgtaacccacccacat

SEQ ID NO: 4837439 - DNA, 25 bp, Homo sapien
tcccgcgtaacccacccacattgcc

SEQ ID NO: 4837440 - DNA, 25 bp, Homo sapien
tctcccgcgtaacccacccacattg

SEQ ID NO: 4837441 - DNA, 25 bp, Homo sapien
caaccacctagctaatccatagacg

SEQ ID NO: 4837442 - DNA, 25 bp, Homo sapien
cagaaacggccttcatgtgatgtta

SEQ ID NO: 4837443 - DNA, 25 bp, Homo sapien
gaacttggaagcgtagataggcgat

SEQ ID NO: 4837444 - DNA, 25 bp, Homo sapien
aagcaccgaggatgaagcgatggaa

SEQ ID NO: 4837445 - DNA, 25 bp, Homo sapien
gaagcacatggacactgaaagaaag

SEQ ID NO: 4837446 - DNA, 25 bp, Homo sapien
catttgctactgtcctgttggccca

SEQ ID NO: 4837447 - DNA, 25 bp, Homo sapien
gaaagactccgatgttcaggcacct

SEQ ID NO: 4837448 - DNA, 25 bp, Homo sapien
acctatcaagcctcggcctgagtca

SEQ ID NO: 4837449 - DNA, 25 bp, Homo sapien
cccaacaggaaaccaatgctaccat

SEQ ID NO: 4837450 - DNA, 25 bp, Homo sapien
ttccctcccaacaggaaaccaatgc

SEQ ID NO: 4837451 - DNA, 25 bp, Homo sapien
aggaaaccaatgctaccattttctc

SEQ ID NO: 4837452 - DNA, 25 bp, Homo sapien
caacaggaaaccaatgctaccattt

SEQ ID NO: 4837453 - DNA, 25 bp, Homo sapien
agacaacacacacggcggtgggaga

SEQ ID NO: 4837454 - DNA, 25 bp, Homo sapien
gagtttttcctccatagactcaagc

SEQ ID NO: 4837455 - DNA, 25 bp, Homo sapien
accaaggtgcgcttgaagagggcca

SEQ ID NO: 4837456 - DNA, 25 bp, Homo sapien
ctgcggccatgggaatcgcggaccc

SEQ ID NO: 4837457 - DNA, 25 bp, Homo sapien
ctgcgactggtctgattgagatact

SEQ ID NO: 4837458 - DNA, 25 bp, Homo sapien
ctgcgaaactgcgactggtctgatt

SEQ ID NO: 4837459 - DNA, 25 bp, Homo sapien
tctgattgagatacttgtagcaagt

SEQ ID NO: 4837460 - DNA, 25 bp, Homo sapien
ctggtctgattgagatacttgtagc

SEQ ID NO: 4837461 - DNA, 25 bp, Homo sapien
cgcatttccccatccagcgcctgga

SEQ ID NO: 4837462 - DNA, 25 bp, Homo sapien
atttccccatccagcgcctggataa

SEQ ID NO: 4837463 - DNA, 25 bp, Homo sapien
tttccccatccagcgcctggataac

SEQ ID NO: 4837464 - DNA, 25 bp, Homo sapien
gcatttccccatccagcgcctggat

SEQ ID NO: 4837465 - DNA, 25 bp, Homo sapien
cccagaagtgagttgcatttaacca

SEQ ID NO: 4837466 - DNA, 25 bp, Homo sapien
gttgaatgtcaccactactcccaga

SEQ ID NO: 4837467 - DNA, 25 bp, Homo sapien
ccaatgtagaactatggagaccaga

SEQ ID NO: 4837468 - DNA, 25 bp, Homo sapien
tacgatcatacataaaggcaactgg

SEQ ID NO: 4837469 - DNA, 25 bp, Homo sapien
gagctcggagaaccagataaaatat

SEQ ID NO: 4837470 - DNA, 25 bp, Homo sapien
agagctcggagaaccagataaaata

SEQ ID NO: 4837471 - DNA, 25 bp, Homo sapien
acactgatggtcatgtcatcttcca

SEQ ID NO: 4837472 - DNA, 25 bp, Homo sapien
cagagctcggagaaccagataaaat

SEQ ID NO: 4837473 - DNA, 25 bp, Homo sapien
aagagtgaaagttgtgtaacagcgg

SEQ ID NO: 4837474 - DNA, 25 bp, Homo sapien
gaaagagtgaaagttgtgtaacagc

SEQ ID NO: 4837475 - DNA, 25 bp, Homo sapien
taaaggaaagagtgaaagttgtgta

SEQ ID NO: 4837476 - DNA, 25 bp, Homo sapien
agtgaaagttgtgtaacagcgggac

SEQ ID NO: 4837477 - DNA, 25 bp, Homo sapien
cctccagcacctggcgatccttctc

SEQ ID NO: 4837478 - DNA, 25 bp, Homo sapien
agcacctggcgatccttctccttgc

SEQ ID NO: 4837479 - DNA, 25 bp, Homo sapien
cagcacctggcgatccttctccttg

SEQ ID NO: 4837480 - DNA, 25 bp, Homo sapien
ccagcacctggcgatccttctcctt

SEQ ID NO: 4837481 - DNA, 25 bp, Homo sapien
attatgaacacaacagtccgtagac

SEQ ID NO: 4837482 - DNA, 25 bp, Homo sapien
tccacatgtatggaggctaccggac

SEQ ID NO: 4837483 - DNA, 25 bp, Homo sapien
cgtagacaagatgcgtaaccccact

SEQ ID NO: 4837484 - DNA, 25 bp, Homo sapien
ggacaaccacgttagcaattatgaa

SEQ ID NO: 4837485 - DNA, 25 bp, Homo sapien
caactgtggacaaaaagggcttctt

SEQ ID NO: 4837486 - DNA, 25 bp, Homo sapien
cacaaagcagataaggaacttgccc

SEQ ID NO: 4837487 - DNA, 25 bp, Homo sapien
tacaaacgaggagacggagacacaa

SEQ ID NO: 4837488 - DNA, 25 bp, Homo sapien
cagatgtccacatgaacttgaggga

SEQ ID NO: 4837489 - DNA, 25 bp, Homo sapien
cccattctccggcaaatgtcggcaa

SEQ ID NO: 4837490 - DNA, 25 bp, Homo sapien
gtcacatgcttatccaaaaactctg

SEQ ID NO: 4837491 - DNA, 25 bp, Homo sapien
ttgtcccactcctgttcagaggtca

SEQ ID NO: 4837492 - DNA, 25 bp, Homo sapien
cactgtttggtatttctcagccaga

SEQ ID NO: 4837493 - DNA, 25 bp, Homo sapien
tctgagcttcactatgaggactgcc

SEQ ID NO: 4837494 - DNA, 25 bp, Homo sapien
gctgatatcctacatagctgctggt

SEQ ID NO: 4837495 - DNA, 25 bp, Homo sapien
tcggagatcctaatttaagcacagt

SEQ ID NO: 4837496 - DNA, 25 bp, Homo sapien
ccacagaagtgatgagtaagtctca

SEQ ID NO: 4837497 - DNA, 25 bp, Homo sapien
gccaattccgaccagcccagcaaca

SEQ ID NO: 4837498 - DNA, 25 bp, Homo sapien
caattccgaccagcccagcaacata

SEQ ID NO: 4837499 - DNA, 25 bp, Homo sapien
ctgagaaaagacgggaaaggccaat

SEQ ID NO: 4837500 - DNA, 25 bp, Homo sapien
ggaaaggccaattccgaccagccca

SEQ ID NO: 4837501 - DNA, 25 bp, Homo sapien
ccaactaaggggtcttcaaactctg

SEQ ID NO: 4837502 - DNA, 25 bp, Homo sapien
acaggcccatagagttggcacgttc

SEQ ID NO: 4837503 - DNA, 25 bp, Homo sapien
catagagttggcacgttctgtatct

SEQ ID NO: 4837504 - DNA, 25 bp, Homo sapien
gcccatagagttggcacgttctgta

SEQ ID NO: 4837505 - DNA, 25 bp, Homo sapien
tcttccagatagtcacggatgatgt

SEQ ID NO: 4837506 - DNA, 25 bp, Homo sapien
ccttgctggtcttccagatagtcac

SEQ ID NO: 4837507 - DNA, 25 bp, Homo sapien
ctcttgaggccagaactctcttcct

SEQ ID NO: 4837508 - DNA, 25 bp, Homo sapien
cagatagtcacggatgatgtttgtt

SEQ ID NO: 4837509 - DNA, 25 bp, Homo sapien
ttaggaatatgaaccctgtatctgc

SEQ ID NO: 4837510 - DNA, 25 bp, Homo sapien
ttcttaggagtaagactcagcatct

SEQ ID NO: 4837511 - DNA, 25 bp, Homo sapien
tgtgaactatcttgttcttatctcc

SEQ ID NO: 4837512 - DNA, 25 bp, Homo sapien
cagcccccagagtagtttaaatgtg

SEQ ID NO: 4837513 - DNA, 25 bp, Homo sapien
acatctgggatgtggtgcagtgcat

SEQ ID NO: 4837514 - DNA, 25 bp, Homo sapien
tctgagtctcgaaaggtaggtgatg

SEQ ID NO: 4837515 - DNA, 25 bp, Homo sapien
tgcacggccaagtcaatattctccg

SEQ ID NO: 4837516 - DNA, 25 bp, Homo sapien
taagttcattcaggcactgcacggc

SEQ ID NO: 4837517 - DNA, 25 bp, Homo sapien
tactgagaggctaggtctaccggac

SEQ ID NO: 4837518 - DNA, 25 bp, Homo sapien
caggttctttttatgccgggtctag

SEQ ID NO: 4837519 - DNA, 25 bp, Homo sapien
cataagacggcgatacagattttac

SEQ ID NO: 4837520 - DNA, 25 bp, Homo sapien
gagcaatggattatcggatcggaaa

SEQ ID NO: 4837521 - DNA, 25 bp, Homo sapien
cacagaattaagcagtctaaaacaa

SEQ ID NO: 4837522 - DNA, 25 bp, Homo sapien
aacacacagaattaagcagtctaaa

SEQ ID NO: 4837523 - DNA, 25 bp, Homo sapien
cagaattaagcagtctaaaacaatt

SEQ ID NO: 4837524 - DNA, 25 bp, Homo sapien
aattaagcagtctaaaacaattcta

SEQ ID NO: 4837525 - DNA, 25 bp, Homo sapien
ggcagccaaagtggcaatggccatc

SEQ ID NO: 4837526 - DNA, 25 bp, Homo sapien
tccgaatcttcactgcccctttgaa

SEQ ID NO: 4837527 - DNA, 25 bp, Homo sapien
tatactgatatatgatggctttgac

SEQ ID NO: 4837528 - DNA, 25 bp, Homo sapien
gacagctggcatattggtggcatcc

SEQ ID NO: 4837529 - DNA, 25 bp, Homo sapien
cataatgaaagtaccagactgggtg

SEQ ID NO: 4837530 - DNA, 25 bp, Homo sapien
gatttttcaattgaggcctgtggca

SEQ ID NO: 4837531 - DNA, 25 bp, Homo sapien
gagcaatctgctcggctcctgtgaa

SEQ ID NO: 4837532 - DNA, 25 bp, Homo sapien
tctcaccagggtactacacagcagt

SEQ ID NO: 4837533 - DNA, 25 bp, Homo sapien
cataggtgcctctgatagaagttct

SEQ ID NO: 4837534 - DNA, 25 bp, Homo sapien
caaattatgaccctagccatgaggc

SEQ ID NO: 4837535 - DNA, 25 bp, Homo sapien
tgcaaaccatattcctgtaaacgcg

SEQ ID NO: 4837536 - DNA, 25 bp, Homo sapien
gactagacggatgcacaaaaccatg

SEQ ID NO: 4837537 - DNA, 25 bp, Homo sapien
gcaagaggccagacgacttgtggct

SEQ ID NO: 4837538 - DNA, 25 bp, Homo sapien
tgctcgctacaacactaagtccaga

SEQ ID NO: 4837539 - DNA, 25 bp, Homo sapien
tccagagatcggacagagtcaacgt

SEQ ID NO: 4837540 - DNA, 25 bp, Homo sapien
tgtggccaactgctcgtgaagacct

SEQ ID NO: 4837541 - DNA, 25 bp, Homo sapien
gccacagtgcgaggcttgatgatta

SEQ ID NO: 4837542 - DNA, 25 bp, Homo sapien
ggtacttccacgtctcagcagttct

SEQ ID NO: 4837543 - DNA, 25 bp, Homo sapien
actgaaataagctcttgtgcaatgc

SEQ ID NO: 4837544 - DNA, 25 bp, Homo sapien
tgacacaggctcctataaatgttta

SEQ ID NO: 4837545 - DNA, 25 bp, Homo sapien
gatgcttcgttgctagaccaaaccc

SEQ ID NO: 4837546 - DNA, 25 bp, Homo sapien
gaaatcttggttgtgacagtccccg

SEQ ID NO: 4837547 - DNA, 25 bp, Homo sapien
ggaatcaatcgctggcacccaagtg

SEQ ID NO: 4837548 - DNA, 25 bp, Homo sapien
tatgcccttccaggagataagtaag

SEQ ID NO: 4837549 - DNA, 25 bp, Homo sapien
gacctactgcacctgtctagtgtca

SEQ ID NO: 4837550 - DNA, 25 bp, Homo sapien
gagatctcaaacctctgcttgatgc

SEQ ID NO: 4837551 - DNA, 25 bp, Homo sapien
tctgtaatgtgtagcgcaaggccac

SEQ ID NO: 4837552 - DNA, 25 bp, Homo sapien
cagtctagtaacagttgccgggcca

SEQ ID NO: 4837553 - DNA, 25 bp, Homo sapien
agttgggaagattctgcgtccggat

SEQ ID NO: 4837554 - DNA, 25 bp, Homo sapien
tagtggcttcgggaaatcagctgac

SEQ ID NO: 4837555 - DNA, 25 bp, Homo sapien
agagagtggtcaggtactgccagct

SEQ ID NO: 4837556 - DNA, 25 bp, Homo sapien
ggcagccaaaagcatgacaaacgac

SEQ ID NO: 4837557 - DNA, 25 bp, Homo sapien
cagtgttctccagtctgaacatagt

SEQ ID NO: 4837558 - DNA, 25 bp, Homo sapien
tcagtgttctccagtctgaacatag

SEQ ID NO: 4837559 - DNA, 25 bp, Homo sapien
tatggtggacttcagctatggacaa

SEQ ID NO: 4837560 - DNA, 25 bp, Homo sapien
aagtaaatccactttatggtggact

SEQ ID NO: 4837561 - DNA, 25 bp, Homo sapien
ggtggacttcagctatggacaaatt

SEQ ID NO: 4837562 - DNA, 25 bp, Homo sapien
acttcagctatggacaaatttggga

SEQ ID NO: 4837563 - DNA, 25 bp, Homo sapien
gctgggatgaggcaccctttccttt

SEQ ID NO: 4837564 - DNA, 25 bp, Homo sapien
ttcactttcctaaaggtcccagcca

SEQ ID NO: 4837565 - DNA, 25 bp, Homo sapien
gtgatcatcacccacaaggacaggt

SEQ ID NO: 4837566 - DNA, 25 bp, Homo sapien
cagccacacagcgttcttttaggga

SEQ ID NO: 4837567 - DNA, 25 bp, Homo sapien
cacctaaaccgtggcactgaatgct

SEQ ID NO: 4837568 - DNA, 25 bp, Homo sapien
catactaagtaggatctcatgacag

SEQ ID NO: 4837569 - DNA, 25 bp, Homo sapien
tgcagcgacttcacctaaaccgtgg

SEQ ID NO: 4837570 - DNA, 25 bp, Homo sapien
tgacagtcacatatgcagcgacttc

SEQ ID NO: 4837571 - DNA, 25 bp, Homo sapien
cttttaattatcattctagccagga

SEQ ID NO: 4837572 - DNA, 25 bp, Homo sapien
aaggcagtttgcattcttaggaaac

SEQ ID NO: 4837573 - DNA, 25 bp, Homo sapien
gaattttattcccagcctttgtgtg

SEQ ID NO: 4837574 - DNA, 25 bp, Homo sapien
taaatgagaatacgagaatacccag

SEQ ID NO: 4837575 - DNA, 25 bp, Homo sapien
tactggagaccaatcttctaaaagg

SEQ ID NO: 4837576 - DNA, 25 bp, Homo sapien
ctcgatcccctaatgtcgtgatccg

SEQ ID NO: 4837577 - DNA, 25 bp, Homo sapien
cgatcccctaatgtcgtgatccgac

SEQ ID NO: 4837578 - DNA, 25 bp, Homo sapien
tgggccatcaactccattcttgagc

SEQ ID NO: 4837579 - DNA, 25 bp, Homo sapien
cattcttgagctccatcttttccac

SEQ ID NO: 4837580 - DNA, 25 bp, Homo sapien
ctgcagaagagtagactttatgagt

SEQ ID NO: 4837581 - DNA, 25 bp, Homo sapien
gcagaagagtagactttatgagtac

SEQ ID NO: 4837582 - DNA, 25 bp, Homo sapien
tgcagaagagtagactttatgagta

SEQ ID NO: 4837583 - DNA, 25 bp, Homo sapien
tgattaagccaccatccacgatggg

SEQ ID NO: 4837584 - DNA, 25 bp, Homo sapien
aattcaatgattaagccaccatcca

SEQ ID NO: 4837585 - DNA, 25 bp, Homo sapien
aacaatgcaaatccaacgctgcagc

SEQ ID NO: 4837586 - DNA, 25 bp, Homo sapien
gcagctcgaaacaactcaaattcaa

SEQ ID NO: 4837587 - DNA, 25 bp, Homo sapien
ctgcttctagcatggagccagcggg

SEQ ID NO: 4837588 - DNA, 25 bp, Homo sapien
ggcatgtcgacatcagcttaaggct

SEQ ID NO: 4837589 - DNA, 25 bp, Homo sapien
gattcattccatgcgcactgtctcc

SEQ ID NO: 4837590 - DNA, 25 bp, Homo sapien
acctccatcgtatacgcacctgcag

SEQ ID NO: 4837591 - DNA, 25 bp, Homo sapien
cctgggggacaagagtgaatctgtg

SEQ ID NO: 4837592 - DNA, 25 bp, Homo sapien
ggggacaagagtgaatctgtgtctc

SEQ ID NO: 4837593 - DNA, 25 bp, Homo sapien
gggggacaagagtgaatctgtgtct

SEQ ID NO: 4837594 - DNA, 25 bp, Homo sapien
ctgggggacaagagtgaatctgtgt

SEQ ID NO: 4837595 - DNA, 25 bp, Homo sapien
ggagttttgagatcagccttggcaa

SEQ ID NO: 4837596 - DNA, 25 bp, Homo sapien
caaaattagccaagcatgctggcac

SEQ ID NO: 4837597 - DNA, 25 bp, Homo sapien
attagccaagcatgctggcacatgc

SEQ ID NO: 4837598 - DNA, 25 bp, Homo sapien
cacggtgaaaccccatctctactaa

SEQ ID NO: 4837599 - DNA, 25 bp, Homo sapien
cagcctcggtgacagcgcaaggctc

SEQ ID NO: 4837600 - DNA, 25 bp, Homo sapien
tcggtgacagcgcaaggctccgtct

SEQ ID NO: 4837601 - DNA, 25 bp, Homo sapien
cagtggctcaagcctgtaatcccag

SEQ ID NO: 4837602 - DNA, 25 bp, Homo sapien
agtggctcaagcctgtaatcccagc

SEQ ID NO: 4837603 - DNA, 25 bp, Homo sapien
gccaacatgctgaaacctcacctct

SEQ ID NO: 4837604 - DNA, 25 bp, Homo sapien
ccaaggtgggaggatgacaaggtca

SEQ ID NO: 4837605 - DNA, 25 bp, Homo sapien
gagttcaagaccagcctggccaaca

SEQ ID NO: 4837606 - DNA, 25 bp, Homo sapien
aacatgctgaaacctcacctctact

SEQ ID NO: 4837607 - DNA, 25 bp, Homo sapien
cataaccaagatgctaccccgtggg

SEQ ID NO: 4837608 - DNA, 25 bp, Homo sapien
atgatgagcataacagccggccgtc

SEQ ID NO: 4837609 - DNA, 25 bp, Homo sapien
tatagagcaaactagaagaaccagc

SEQ ID NO: 4837610 - DNA, 25 bp, Homo sapien
caactgaagtggtatgaggctagct

SEQ ID NO: 4837611 - DNA, 25 bp, Homo sapien
tgggatgacaggcactcaccaatat

SEQ ID NO: 4837612 - DNA, 25 bp, Homo sapien
gatgacaggcactcaccaatatgcc

SEQ ID NO: 4837613 - DNA, 25 bp, Homo sapien
atttttaagtacatacaggatttca

SEQ ID NO: 4837614 - DNA, 25 bp, Homo sapien
cactcaccaatatgcctgggtaatt

SEQ ID NO: 4837615 - DNA, 25 bp, Homo sapien
agagtgagattccgtctcccaggct

SEQ ID NO: 4837616 - DNA, 25 bp, Homo sapien
tttgttgttgttgtgactgacagag

SEQ ID NO: 4837617 - DNA, 25 bp, Homo sapien
gcaacctgcagcctcctagattcaa

SEQ ID NO: 4837618 - DNA, 25 bp, Homo sapien
ttgttgttgtgactgacagagtgag

SEQ ID NO: 4837619 - DNA, 25 bp, Homo sapien
tacagattgcctccttatgacgcgg

SEQ ID NO: 4837620 - DNA, 25 bp, Homo sapien
tatgacgcggctcaaaaggaaacca

SEQ ID NO: 4837621 - DNA, 25 bp, Homo sapien
gactagtgccgtagggagtacctgc

SEQ ID NO: 4837622 - DNA, 25 bp, Homo sapien
tggattggccaaacatcagacctgt

SEQ ID NO: 4837623 - DNA, 25 bp, Homo sapien
aagatctaatctgccgtgggcctgt

SEQ ID NO: 4837624 - DNA, 25 bp, Homo sapien
tctgccgtgggcctgtcgtgccagt

SEQ ID NO: 4837625 - DNA, 25 bp, Homo sapien
gaattccacgcaccgatcagtactg

SEQ ID NO: 4837626 - DNA, 25 bp, Homo sapien
aggatcactgtggaatcgaatcaga

SEQ ID NO: 4837627 - DNA, 25 bp, Homo sapien
gccagggatgagtgacttaaggtct

SEQ ID NO: 4837628 - DNA, 25 bp, Homo sapien
ccagaagccttgtggtgttgaggac

SEQ ID NO: 4837629 - DNA, 25 bp, Homo sapien
aaggtcttttaaggatgagtctgac

SEQ ID NO: 4837630 - DNA, 25 bp, Homo sapien
tctgactatattggttgacccttgt

SEQ ID NO: 4837631 - DNA, 25 bp, Homo sapien
ttcccttttcaggagtgtaccaaca

SEQ ID NO: 4837632 - DNA, 25 bp, Homo sapien
caactttgagtgtgttgggccttca

SEQ ID NO: 4837633 - DNA, 25 bp, Homo sapien
tccttcccggagcatgaccagctga

SEQ ID NO: 4837634 - DNA, 25 bp, Homo sapien
tgtaccaacacgtcaccggagagat

SEQ ID NO: 4837635 - DNA, 25 bp, Homo sapien
aaatcagtgactggctgaccgtggc

SEQ ID NO: 4837636 - DNA, 25 bp, Homo sapien
tgctctacaagtcaggtgcgtgctg

SEQ ID NO: 4837637 - DNA, 25 bp, Homo sapien
cccgagctcggttcattttccagga

SEQ ID NO: 4837638 - DNA, 25 bp, Homo sapien
caatagcgagaaggacatcatggcc

SEQ ID NO: 4837639 - DNA, 25 bp, Homo sapien
gctacagcccgacctacaaacagga

SEQ ID NO: 4837640 - DNA, 25 bp, Homo sapien
ccaagtgtagcaagatctgtgagcc

SEQ ID NO: 4837641 - DNA, 25 bp, Homo sapien
catcagggtgcagaccgtactccat

SEQ ID NO: 4837642 - DNA, 25 bp, Homo sapien
tgtaggttgactccgctttctcccg

SEQ ID NO: 4837643 - DNA, 25 bp, Homo sapien
ccagagttatgtttaccgaggacct

SEQ ID NO: 4837644 - DNA, 25 bp, Homo sapien
tgtcccaccatcaaagagatcagag

SEQ ID NO: 4837645 - DNA, 25 bp, Homo sapien
gcctgcaagcttcgatgcacgggaa

SEQ ID NO: 4837646 - DNA, 25 bp, Homo sapien
ggatcagagcttgtaatgaagacct

SEQ ID NO: 4837647 - DNA, 25 bp, Homo sapien
tgttcccgtgctcttagccgctctg

SEQ ID NO: 4837648 - DNA, 25 bp, Homo sapien
tctggcaaaatgtaagcacttgact

SEQ ID NO: 4837649 - DNA, 25 bp, Homo sapien
tactctgggaaggtcttactgagcc

SEQ ID NO: 4837650 - DNA, 25 bp, Homo sapien
gagtgccaagactagtttttataga

SEQ ID NO: 4837651 - DNA, 25 bp, Homo sapien
tgtgtgctgggtgggttttctgaca

SEQ ID NO: 4837652 - DNA, 25 bp, Homo sapien
gctccatgggacagatgggcctctg

SEQ ID NO: 4837653 - DNA, 25 bp, Homo sapien
gttttcagttgcttcggggctacag

SEQ ID NO: 4837654 - DNA, 25 bp, Homo sapien
tttcagttgcttcggggctacagct

SEQ ID NO: 4837655 - DNA, 25 bp, Homo sapien
cctggtttgcatagatgattggcag

SEQ ID NO: 4837656 - DNA, 25 bp, Homo sapien
gtacctggtttgcatagatgattgg

SEQ ID NO: 4837657 - DNA, 25 bp, Homo sapien
attccactcataggtgtcttcaggc

SEQ ID NO: 4837658 - DNA, 25 bp, Homo sapien
tcaggcctatggagagcagcttgcg

SEQ ID NO: 4837659 - DNA, 25 bp, Homo sapien
tagggaaccgccgtgttctgcaagc

SEQ ID NO: 4837660 - DNA, 25 bp, Homo sapien
taccctggtgtaatctcgcctgcgg

SEQ ID NO: 4837661 - DNA, 25 bp, Homo sapien
gcttttataaagcaggcccaaggtc

SEQ ID NO: 4837662 - DNA, 25 bp, Homo sapien
aaggtcctttggtatccgatgcaga

SEQ ID NO: 4837663 - DNA, 25 bp, Homo sapien
cctcagccacccagatgtaagcgat

SEQ ID NO: 4837664 - DNA, 25 bp, Homo sapien
aagccttatcgtccgcctctgtaga

SEQ ID NO: 4837665 - DNA, 25 bp, Homo sapien
ggccattgtattccctgtctgctgc

SEQ ID NO: 4837666 - DNA, 25 bp, Homo sapien
ccagtgtgtttatctactgagggac

SEQ ID NO: 4837667 - DNA, 25 bp, Homo sapien
aaagactaaccactagatcaccagg

SEQ ID NO: 4837668 - DNA, 25 bp, Homo sapien
agtgagagcgccaaagactaaccac

SEQ ID NO: 4837669 - DNA, 25 bp, Homo sapien
gagcgccaaagactaaccactagat

SEQ ID NO: 4837670 - DNA, 25 bp, Homo sapien
gcgccaaagactaaccactagatca

SEQ ID NO: 4837671 - DNA, 25 bp, Homo sapien
tatgcaggccgtctgactcagatgt

SEQ ID NO: 4837672 - DNA, 25 bp, Homo sapien
cctatgcaggccgtctgactcagat

SEQ ID NO: 4837673 - DNA, 25 bp, Homo sapien
agtcatctcctatgcaggccgtctg

SEQ ID NO: 4837674 - DNA, 25 bp, Homo sapien
tgcaggccgtctgactcagatgtct

SEQ ID NO: 4837675 - DNA, 25 bp, Homo sapien
ccccgctccacactcccgtgtactt

SEQ ID NO: 4837676 - DNA, 25 bp, Homo sapien
tccccgctccacactcccgtgtact

SEQ ID NO: 4837677 - DNA, 25 bp, Homo sapien
ctccccgctccacactcccgtgtac

SEQ ID NO: 4837678 - DNA, 25 bp, Homo sapien
agcggcaaagcctaaccactagact

SEQ ID NO: 4837679 - DNA, 25 bp, Homo sapien
cagcggcactgagagcggcaaagcc

SEQ ID NO: 4837680 - DNA, 25 bp, Homo sapien
ggaatccaacccaggcagcggcact

SEQ ID NO: 4837681 - DNA, 25 bp, Homo sapien
cactgagagcggcaaagcctaacca

SEQ ID NO: 4837682 - DNA, 25 bp, Homo sapien
gttgaattgaatcgggcagtgttga

SEQ ID NO: 4837683 - DNA, 25 bp, Homo sapien
cagcacaggctgttcaacataaacg

SEQ ID NO: 4837684 - DNA, 25 bp, Homo sapien
aatcgggcagtgttgacagaacaca

SEQ ID NO: 4837685 - DNA, 25 bp, Homo sapien
taaacgggctgggttgaattgaatc

SEQ ID NO: 4837686 - DNA, 25 bp, Homo sapien
tccagagagccggtgctatctcggt

SEQ ID NO: 4837687 - DNA, 25 bp, Homo sapien
agagagccggtgctatctcggtgac

SEQ ID NO: 4837688 - DNA, 25 bp, Homo sapien
ctgtctccagagagccggtgctatc

SEQ ID NO: 4837689 - DNA, 25 bp, Homo sapien
tgggggtcacgcctgtctccagaga

SEQ ID NO: 4837690 - DNA, 25 bp, Homo sapien
gatatggttccaggatgcagtcatg

SEQ ID NO: 4837691 - DNA, 25 bp, Homo sapien
agtcatggccggtgtcttccttggg

SEQ ID NO: 4837692 - DNA, 25 bp, Homo sapien
ccagagaagtaagtgctgccagttt

SEQ ID NO: 4837693 - DNA, 25 bp, Homo sapien
acatctgttggtcctagtgactggc

SEQ ID NO: 4837694 - DNA, 25 bp, Homo sapien
ctgtgtgctggggagcagcccagag

SEQ ID NO: 4837695 - DNA, 25 bp, Homo sapien
cagcccagagatgcagacacacggc

SEQ ID NO: 4837696 - DNA, 25 bp, Homo sapien
cccagagatgcagacacacggccag

SEQ ID NO: 4837697 - DNA, 25 bp, Homo sapien
cagagatgcagacacacggccagga

SEQ ID NO: 4837698 - DNA, 25 bp, Homo sapien
ttctgatgttctatgccacatcttc

SEQ ID NO: 4837699 - DNA, 25 bp, Homo sapien
ctgagagtttcccaattctaagaac

SEQ ID NO: 4837700 - DNA, 25 bp, Homo sapien
cattctgatgttctatgccacatct

SEQ ID NO: 4837701 - DNA, 25 bp, Homo sapien
gagtttcccaattctaagaacattc

SEQ ID NO: 4837702 - DNA, 25 bp, Homo sapien
ggccagcacgatccaaaatctaact

SEQ ID NO: 4837703 - DNA, 25 bp, Homo sapien
actgacggccagcacgatccaaaat

SEQ ID NO: 4837704 - DNA, 25 bp, Homo sapien
gacggccagcacgatccaaaatcta

SEQ ID NO: 4837705 - DNA, 25 bp, Homo sapien
gatactgacggccagcacgatccaa

SEQ ID NO: 4837706 - DNA, 25 bp, Homo sapien
gaagaaggcagccgcaatgccagga

SEQ ID NO: 4837707 - DNA, 25 bp, Homo sapien
aaggcagccgcaatgccaggacatc

SEQ ID NO: 4837708 - DNA, 25 bp, Homo sapien
agaaggcagccgcaatgccaggaca

SEQ ID NO: 4837709 - DNA, 25 bp, Homo sapien
cctcttctccaggtgaggtggagag

SEQ ID NO: 4837710 - DNA, 25 bp, Homo sapien
tgctgttttgcatacctggcactaa

SEQ ID NO: 4837711 - DNA, 25 bp, Homo sapien
ctttttggtcctcgtggtcagcaca

SEQ ID NO: 4837712 - DNA, 25 bp, Homo sapien
caccaggtggcagactttgcctgct

SEQ ID NO: 4837713 - DNA, 25 bp, Homo sapien
tctgcttggcgatcaattgcttcct

SEQ ID NO: 4837714 - DNA, 25 bp, Homo sapien
cagttcctgattttgcatctcaaga

SEQ ID NO: 4837715 - DNA, 25 bp, Homo sapien
gcatctcaagaactccaaaaaccat

SEQ ID NO: 4837716 - DNA, 25 bp, Homo sapien
cacccagttcctgattttgcatctc

SEQ ID NO: 4837717 - DNA, 25 bp, Homo sapien
tttgcatctcaagaactccaaaaac

SEQ ID NO: 4837718 - DNA, 25 bp, Homo sapien
aacatgcctagcaggcacactctga

SEQ ID NO: 4837719 - DNA, 25 bp, Homo sapien
gggtgagccgactgctcagagccca

SEQ ID NO: 4837720 - DNA, 25 bp, Homo sapien
tgaacctctgcaccaaacgctaagc

SEQ ID NO: 4837721 - DNA, 25 bp, Homo sapien
cagaagggcagctgagttttggatc

SEQ ID NO: 4837722 - DNA, 25 bp, Homo sapien
agaggcctcgggtctgcattgagac

SEQ ID NO: 4837723 - DNA, 25 bp, Homo sapien
ggcctcgggtctgcattgagaccct

SEQ ID NO: 4837724 - DNA, 25 bp, Homo sapien
tgacacactggaccctacacccatt

SEQ ID NO: 4837725 - DNA, 25 bp, Homo sapien
tgctactttcaccagtgcggtgaca

SEQ ID NO: 4837726 - DNA, 25 bp, Homo sapien
tccgccaggatacaggtggattgcg

SEQ ID NO: 4837727 - DNA, 25 bp, Homo sapien
tggattgcgttctgccacaatattc

SEQ ID NO: 4837728 - DNA, 25 bp, Homo sapien
tgcactagccagaaagccgtatgtt

SEQ ID NO: 4837729 - DNA, 25 bp, Homo sapien
agccgtatgtttcttcgggtgtccg

SEQ ID NO: 4837730 - DNA, 25 bp, Homo sapien
tcaaatgtatgccacttcaatggac

SEQ ID NO: 4837731 - DNA, 25 bp, Homo sapien
caacttcaggatgtttgcgatgtgg

SEQ ID NO: 4837732 - DNA, 25 bp, Homo sapien
ttgagattgcacatctgtgaaagac

SEQ ID NO: 4837733 - DNA, 25 bp, Homo sapien
tgtggttgagattgcacatctgtga

SEQ ID NO: 4837734 - DNA, 25 bp, Homo sapien
tccattctctggaccagcccagcat

SEQ ID NO: 4837735 - DNA, 25 bp, Homo sapien
ctccattctctggaccagcccagca

SEQ ID NO: 4837736 - DNA, 25 bp, Homo sapien
ttctgccagtaccaacagtccagcc

SEQ ID NO: 4837737 - DNA, 25 bp, Homo sapien
cagtaccaacagtccagccttcccc

SEQ ID NO: 4837738 - DNA, 25 bp, Homo sapien
ccaagtcctcgctattctttgaaag

SEQ ID NO: 4837739 - DNA, 25 bp, Homo sapien
aaagaacagtctccttctcatcccc

SEQ ID NO: 4837740 - DNA, 25 bp, Homo sapien
catccccaagtcctcgctattcttt

SEQ ID NO: 4837741 - DNA, 25 bp, Homo sapien
caaagaacagtctccttctcatccc

SEQ ID NO: 4837742 - DNA, 25 bp, Homo sapien
ttagacattttggccggcaagtacc

SEQ ID NO: 4837743 - DNA, 25 bp, Homo sapien
tatgtagacattgggtccacttcta

SEQ ID NO: 4837744 - DNA, 25 bp, Homo sapien
gcagtcgccaacatgaagcaaagat

SEQ ID NO: 4837745 - DNA, 25 bp, Homo sapien
aagtaccttgcagtcgccaacatga

SEQ ID NO: 4837746 - DNA, 25 bp, Homo sapien
tcacacaaaatacgatattgttcgt

SEQ ID NO: 4837747 - DNA, 25 bp, Homo sapien
aactatttcccagtcagtataggta

SEQ ID NO: 4837748 - DNA, 25 bp, Homo sapien
tcccagtcagtataggtaaatattt

SEQ ID NO: 4837749 - DNA, 25 bp, Homo sapien
gtatcacacaaaatacgatattgtt

SEQ ID NO: 4837750 - DNA, 25 bp, Homo sapien
caagaatgctcacacattgtggatg

SEQ ID NO: 4837751 - DNA, 25 bp, Homo sapien
gcataaaatactagatgtggacaag

SEQ ID NO: 4837752 - DNA, 25 bp, Homo sapien
tgttcattagtaggttcccaagtta

SEQ ID NO: 4837753 - DNA, 25 bp, Homo sapien
gaagggtcatatcacaaataaggat

SEQ ID NO: 4837754 - DNA, 25 bp, Homo sapien
tgaagtgcaatgctgatgaacatgc

SEQ ID NO: 4837755 - DNA, 25 bp, Homo sapien
gatcagctggcaccgtaggtctctg

SEQ ID NO: 4837756 - DNA, 25 bp, Homo sapien
ggagctccacactgacactaagggt

SEQ ID NO: 4837757 - DNA, 25 bp, Homo sapien
agtacagcggcctaggatcctgggc

SEQ ID NO: 4837758 - DNA, 25 bp, Homo sapien
cactaagggtgcatcctgggctcat

SEQ ID NO: 4837759 - DNA, 25 bp, Homo sapien
gggaggacagttgaacctgttctcc

SEQ ID NO: 4837760 - DNA, 25 bp, Homo sapien
gtggtgtggtggcatcagtgatgta

SEQ ID NO: 4837761 - DNA, 25 bp, Homo sapien
ccccatgctgaaccttttcatgtac

SEQ ID NO: 4837762 - DNA, 25 bp, Homo sapien
ccaggagtggtgtggtggcatcagt

SEQ ID NO: 4837763 - DNA, 25 bp, Homo sapien
accccccaggagtggtgtggtggca

SEQ ID NO: 4837764 - DNA, 25 bp, Homo sapien
ttatggagcagacattgtcgtgtac

SEQ ID NO: 4837765 - DNA, 25 bp, Homo sapien
cacctctgtatcttcttcgtcttgg

SEQ ID NO: 4837766 - DNA, 25 bp, Homo sapien
ctctgtatcttcttcgtcttggtgt

SEQ ID NO: 4837767 - DNA, 25 bp, Homo sapien
agacatctgtggccctctgcactat

SEQ ID NO: 4837768 - DNA, 25 bp, Homo sapien
tcacctctgtatcttcttcgtcttg

SEQ ID NO: 4837769 - DNA, 25 bp, Homo sapien
atgggtttcacctcagccacggttc

SEQ ID NO: 4837770 - DNA, 25 bp, Homo sapien
tcagcataccggctgtcagctctga

SEQ ID NO: 4837771 - DNA, 25 bp, Homo sapien
cagggccacggaatctcacaggtgt

SEQ ID NO: 4837772 - DNA, 25 bp, Homo sapien
aacctgctcagcataccggctgtca

SEQ ID NO: 4837773 - DNA, 25 bp, Homo sapien
tgaagtgcaatgctgatgaacatgc

SEQ ID NO: 4837774 - DNA, 25 bp, Homo sapien
tcttcagaggagtgaatatacacag

SEQ ID NO: 4837775 - DNA, 25 bp, Homo sapien
agaggagtgaatatacacagaagtc

SEQ ID NO: 4837776 - DNA, 25 bp, Homo sapien
tcagaggagtgaatatacacagaag

SEQ ID NO: 4837777 - DNA, 25 bp, Homo sapien
ctcttcagaggagtgaatatacaca

SEQ ID NO: 4837778 - DNA, 25 bp, Homo sapien
cttcctgggtgaagtcaatagctac

SEQ ID NO: 4837779 - DNA, 25 bp, Homo sapien
ttcctgggtgaagtcaatagctaca

SEQ ID NO: 4837780 - DNA, 25 bp, Homo sapien
agtcaatagctacatcttcaaaagt

SEQ ID NO: 4837781 - DNA, 25 bp, Homo sapien
agctacatcttcaaaagtcactttc

SEQ ID NO: 4837782 - DNA, 25 bp, Homo sapien
gtgactgatattttccagcatcaca

SEQ ID NO: 4837783 - DNA, 25 bp, Homo sapien
acatctctgtacagctttctcttgg

SEQ ID NO: 4837784 - DNA, 25 bp, Homo sapien
cgagggacaccaggtgactgatatt

SEQ ID NO: 4837785 - DNA, 25 bp, Homo sapien
tctgtacagctttctcttggatgtg

SEQ ID NO: 4837786 - DNA, 25 bp, Homo sapien
tgctccagctgcaaaattatatagg

SEQ ID NO: 4837787 - DNA, 25 bp, Homo sapien
ctggattctggtcttgaagaaatac

SEQ ID NO: 4837788 - DNA, 25 bp, Homo sapien
atataggatttgcttatctggtacc

SEQ ID NO: 4837789 - DNA, 25 bp, Homo sapien
gaaatactcttccttcccgccacag

SEQ ID NO: 4837790 - DNA, 25 bp, Homo sapien
ctgatgataggatgcatggatatca

SEQ ID NO: 4837791 - DNA, 25 bp, Homo sapien
tgcatggatatcatgtgttttttct

SEQ ID NO: 4837792 - DNA, 25 bp, Homo sapien
gatgataggatgcatggatatcatg

SEQ ID NO: 4837793 - DNA, 25 bp, Homo sapien
taggatgcatggatatcatgtgttt

SEQ ID NO: 4837794 - DNA, 25 bp, Homo sapien
tgtcatactggtggatgcgtctttt

SEQ ID NO: 4837795 - DNA, 25 bp, Homo sapien
attgtcatactggtggatgcgtctt

SEQ ID NO: 4837796 - DNA, 25 bp, Homo sapien
ttgtcatactggtggatgcgtcttt

SEQ ID NO: 4837797 - DNA, 25 bp, Homo sapien
cattgtcatactggtggatgcgtct

SEQ ID NO: 4837798 - DNA, 25 bp, Homo sapien
caaaaggatcctccagaatgagaga

SEQ ID NO: 4837799 - DNA, 25 bp, Homo sapien
aaggatcctccagaatgagagagtt

SEQ ID NO: 4837800 - DNA, 25 bp, Homo sapien
tattcaaaaggatcctccagaatga

SEQ ID NO: 4837801 - DNA, 25 bp, Homo sapien
ttatattcaaaaggatcctccagaa

SEQ ID NO: 4837802 - DNA, 25 bp, Homo sapien
ttaacaaacactgagttattgtgga

SEQ ID NO: 4837803 - DNA, 25 bp, Homo sapien
gtgagttaacaaacactgagttatt

SEQ ID NO: 4837804 - DNA, 25 bp, Homo sapien
aacaaacactgagttattgtggaac

SEQ ID NO: 4837805 - DNA, 25 bp, Homo sapien
caaacactgagttattgtggaactg

SEQ ID NO: 4837806 - DNA, 25 bp, Homo sapien
catcttgtgccgtctaaggtaaaag

SEQ ID NO: 4837807 - DNA, 25 bp, Homo sapien
ttccacactgtttgctgacacaggg

SEQ ID NO: 4837808 - DNA, 25 bp, Homo sapien
cttttgtccaaggtgagttctctca

SEQ ID NO: 4837809 - DNA, 25 bp, Homo sapien
tctcatgtcttcgaaggttaaagga

SEQ ID NO: 4837810 - DNA, 25 bp, Homo sapien
ctgaaggccttcccacatagaagac

SEQ ID NO: 4837811 - DNA, 25 bp, Homo sapien
actgaaggccttcccacatagaaga

SEQ ID NO: 4837812 - DNA, 25 bp, Homo sapien
gactgaaggccttcccacatagaag

SEQ ID NO: 4837813 - DNA, 25 bp, Homo sapien
agactgaaggccttcccacatagaa

SEQ ID NO: 4837814 - DNA, 25 bp, Homo sapien
atgctccgggcccagcgggggcatc

SEQ ID NO: 4837815 - DNA, 25 bp, Homo sapien
cagcgggggtatccagcctcaggct

SEQ ID NO: 4837816 - DNA, 25 bp, Homo sapien
ccgcttctcgcggagccagggccgc

SEQ ID NO: 4837817 - DNA, 25 bp, Homo sapien
catctgggcccagcgggggtatcca

SEQ ID NO: 4837818 - DNA, 25 bp, Homo sapien
aggaggtgaacctggagctcccgcc

SEQ ID NO: 4837819 - DNA, 25 bp, Homo sapien
ccgccggcctctgggcgctccttgg

SEQ ID NO: 4837820 - DNA, 25 bp, Homo sapien
gtgaacctggagctcccgccggcct

SEQ ID NO: 4837821 - DNA, 25 bp, Homo sapien
tctgggcgctccttggtggaaggag

SEQ ID NO: 4837822 - DNA, 25 bp, Homo sapien
caatacaagcataccctggatgggc

SEQ ID NO: 4837823 - DNA, 25 bp, Homo sapien
cccatggaaacctgagaggacttag

SEQ ID NO: 4837824 - DNA, 25 bp, Homo sapien
ctctaggagtagagttacagtctcc

SEQ ID NO: 4837825 - DNA, 25 bp, Homo sapien
aaaggcctaagcagtccaatctgtc

SEQ ID NO: 4837826 - DNA, 25 bp, Homo sapien
gtagttcatccagacatccagttgg

SEQ ID NO: 4837827 - DNA, 25 bp, Homo sapien
gttcatccagacatccagttggaag

SEQ ID NO: 4837828 - DNA, 25 bp, Homo sapien
atccagacatccagttggaagtggg

SEQ ID NO: 4837829 - DNA, 25 bp, Homo sapien
cagtagttcatccagacatccagtt

SEQ ID NO: 4837830 - DNA, 25 bp, Homo sapien
ttttccatacttctggggcctgggc

SEQ ID NO: 4837831 - DNA, 25 bp, Homo sapien
cctgggcctgctacacctcagggtt

SEQ ID NO: 4837832 - DNA, 25 bp, Homo sapien
gggcctgggcctgctacacctcagg

SEQ ID NO: 4837833 - DNA, 25 bp, Homo sapien
ctcagggttcctcttcacagtcaca

SEQ ID NO: 4837834 - DNA, 25 bp, Homo sapien
cctctatggcagcaacatgaattct

SEQ ID NO: 4837835 - DNA, 25 bp, Homo sapien
aaagagcccctctatggcagcaaca

SEQ ID NO: 4837836 - DNA, 25 bp, Homo sapien
gagcccctctatggcagcaacatga

SEQ ID NO: 4837837 - DNA, 25 bp, Homo sapien
tgaaaagagcccctctatggcagca

SEQ ID NO: 4837838 - DNA, 25 bp, Homo sapien
tcttctagaaggtcttccgctggat

SEQ ID NO: 4837839 - DNA, 25 bp, Homo sapien
ggtcttccgctggattggaaatggc

SEQ ID NO: 4837840 - DNA, 25 bp, Homo sapien
ctagaaggtcttccgctggattgga

SEQ ID NO: 4837841 - DNA, 25 bp, Homo sapien
tcatctcttctagaaggtcttccgc

SEQ ID NO: 4837842 - DNA, 25 bp, Homo sapien
actcgtgtccaactccaaatagtag

SEQ ID NO: 4837843 - DNA, 25 bp, Homo sapien
cgtgtccaactccaaatagtagctt

SEQ ID NO: 4837844 - DNA, 25 bp, Homo sapien
tgcactcgtgtccaactccaaatag

SEQ ID NO: 4837845 - DNA, 25 bp, Homo sapien
acatgcactcgtgtccaactccaaa

SEQ ID NO: 4837846 - DNA, 25 bp, Homo sapien
agaggccaattatcacaagtccaaa

SEQ ID NO: 4837847 - DNA, 25 bp, Homo sapien
accagtcagtcttccacacaatgac

SEQ ID NO: 4837848 - DNA, 25 bp, Homo sapien
cagtcagtcttccacacaatgacac

SEQ ID NO: 4837849 - DNA, 25 bp, Homo sapien
ggccaattatcacaagtccaaatct

SEQ ID NO: 4837850 - DNA, 25 bp, Homo sapien
tggattcatttgtgttgtagtcaag

SEQ ID NO: 4837851 - DNA, 25 bp, Homo sapien
tctgctccacttgccaacatttgag

SEQ ID NO: 4837852 - DNA, 25 bp, Homo sapien
gctccacttgccaacatttgagtgg

SEQ ID NO: 4837853 - DNA, 25 bp, Homo sapien
cacttgccaacatttgagtggattc

SEQ ID NO: 4837854 - DNA, 25 bp, Homo sapien
gtagttgcaggagtaggcctaaatc

SEQ ID NO: 4837855 - DNA, 25 bp, Homo sapien
taggcctaaatccaggtgtgaagat

SEQ ID NO: 4837856 - DNA, 25 bp, Homo sapien
agttgcaggagtaggcctaaatcca

SEQ ID NO: 4837857 - DNA, 25 bp, Homo sapien
ggagtaggcctaaatccaggtgtga

SEQ ID NO: 4837858 - DNA, 25 bp, Homo sapien
ctgtggccaaatatgggataattgt

SEQ ID NO: 4837859 - DNA, 25 bp, Homo sapien
agtccacagggttgtattattatca

SEQ ID NO: 4837860 - DNA, 25 bp, Homo sapien
atcattcctgttaatactcatcaat

SEQ ID NO: 4837861 - DNA, 25 bp, Homo sapien
aactgctgtttaggtcccaagtcca

SEQ ID NO: 4837862 - DNA, 25 bp, Homo sapien
tttctgaatgttaatccttgccttc

SEQ ID NO: 4837863 - DNA, 25 bp, Homo sapien
tgtgatttctgactcctgccatgtc

SEQ ID NO: 4837864 - DNA, 25 bp, Homo sapien
gatccagaacaagagtcactttagt

SEQ ID NO: 4837865 - DNA, 25 bp, Homo sapien
catagagtcccaatgtgtgcacatg

SEQ ID NO: 4837866 - DNA, 25 bp, Homo sapien
tgtactacctcctgaaagctggtgc

SEQ ID NO: 4837867 - DNA, 25 bp, Homo sapien
acaggtttccagaggtgactgtagc

SEQ ID NO: 4837868 - DNA, 25 bp, Homo sapien
agaggtgactgtagctgcactgaaa

SEQ ID NO: 4837869 - DNA, 25 bp, Homo sapien
ttaaagtctccacaggtttccagag

SEQ ID NO: 4837870 - DNA, 25 bp, Homo sapien
tccagaggtgactgtagctgcactg

SEQ ID NO: 4837871 - DNA, 25 bp, Homo sapien
cccagaatgggctttcttgccccat

SEQ ID NO: 4837872 - DNA, 25 bp, Homo sapien
aaattgctgtctgttgcccacctga

SEQ ID NO: 4837873 - DNA, 25 bp, Homo sapien
tgccccatctagtctatctaacatt

SEQ ID NO: 4837874 - DNA, 25 bp, Homo sapien
aaagaatttatacataccctttatg

SEQ ID NO: 4837875 - DNA, 25 bp, Homo sapien
ttatccccacacatcgacagaggga

SEQ ID NO: 4837876 - DNA, 25 bp, Homo sapien
cttggagttttgagttatgctggaa

SEQ ID NO: 4837877 - DNA, 25 bp, Homo sapien
gacagagggacctgtaatcgccatg

SEQ ID NO: 4837878 - DNA, 25 bp, Homo sapien
aagggacttgtctcaaataagactt

SEQ ID NO: 4837879 - DNA, 25 bp, Homo sapien
gaaacctatcaatccaggccgtgag

SEQ ID NO: 4837880 - DNA, 25 bp, Homo sapien
tgtgacaggagggtaaactgactct

SEQ ID NO: 4837881 - DNA, 25 bp, Homo sapien
aaggccttaaccctactcagcgctg

SEQ ID NO: 4837882 - DNA, 25 bp, Homo sapien
gaaacggcaggatgcagcttacacc

SEQ ID NO: 4837883 - DNA, 25 bp, Homo sapien
aatgccaattccaacaccacttatc

SEQ ID NO: 4837884 - DNA, 25 bp, Homo sapien
gtcagattatcaagaaccccttaaa

SEQ ID NO: 4837885 - DNA, 25 bp, Homo sapien
acttatcatgtcagattatcaagaa

SEQ ID NO: 4837886 - DNA, 25 bp, Homo sapien
ttaatgccaattccaacaccactta

SEQ ID NO: 4837887 - DNA, 25 bp, Homo sapien
gaagagatgtctgcaaagtagtaga

SEQ ID NO: 4837888 - DNA, 25 bp, Homo sapien
tgatttgggtcctgtggaaggtcat

SEQ ID NO: 4837889 - DNA, 25 bp, Homo sapien
tcctgtggaaggtcattgtctcaat

SEQ ID NO: 4837890 - DNA, 25 bp, Homo sapien
ctttcctgcagtaagaggtgatttg

SEQ ID NO: 4837891 - DNA, 25 bp, Homo sapien
tatggatttacattccatttgtgga

SEQ ID NO: 4837892 - DNA, 25 bp, Homo sapien
tttacattccatttgtggactaatt

SEQ ID NO: 4837893 - DNA, 25 bp, Homo sapien
tccatttgtggactaattttctcac

SEQ ID NO: 4837894 - DNA, 25 bp, Homo sapien
acattccatttgtggactaattttc

SEQ ID NO: 4837895 - DNA, 25 bp, Homo sapien
cgttcatactaaatttattctgtta

SEQ ID NO: 4837896 - DNA, 25 bp, Homo sapien
aatttattctgttacttaagagtgt

SEQ ID NO: 4837897 - DNA, 25 bp, Homo sapien
ctaaatttattctgttacttaagag

SEQ ID NO: 4837898 - DNA, 25 bp, Homo sapien
aacgttcatactaaatttattctgt

SEQ ID NO: 4837899 - DNA, 25 bp, Homo sapien
ctgagatgccagaaacatctttttt

SEQ ID NO: 4837900 - DNA, 25 bp, Homo sapien
gagatgccagaaacatcttttttgg

SEQ ID NO: 4837901 - DNA, 25 bp, Homo sapien
tgagatgccagaaacatcttttttg

SEQ ID NO: 4837902 - DNA, 25 bp, Homo sapien
cctgaatcatccattactcccacac

SEQ ID NO: 4837903 - DNA, 25 bp, Homo sapien
gaatcatccattactcccacacata

SEQ ID NO: 4837904 - DNA, 25 bp, Homo sapien
tgaatcatccattactcccacacat

SEQ ID NO: 4837905 - DNA, 25 bp, Homo sapien
ctgaatcatccattactcccacaca

SEQ ID NO: 4837906 - DNA, 25 bp, Homo sapien
tgtgtattatattccctcttcgctg

SEQ ID NO: 4837907 - DNA, 25 bp, Homo sapien
aaataactattgcaggaatgaaagg

SEQ ID NO: 4837908 - DNA, 25 bp, Homo sapien
tgcagttcactatatcatgaccgtg

SEQ ID NO: 4837909 - DNA, 25 bp, Homo sapien
aacatcttagaatagttgtccatac

SEQ ID NO: 4837910 - DNA, 25 bp, Homo sapien
atgaatccttcaagttataaagatg

SEQ ID NO: 4837911 - DNA, 25 bp, Homo sapien
tgaagggcagtttttggacaattcc

SEQ ID NO: 4837912 - DNA, 25 bp, Homo sapien
agggcagtttttggacaattcccat

SEQ ID NO: 4837913 - DNA, 25 bp, Homo sapien
cggcttagggtaaatgaatccttca

SEQ ID NO: 4837914 - DNA, 25 bp, Homo sapien
aaagggagtcacataggaaatctag

SEQ ID NO: 4837915 - DNA, 25 bp, Homo sapien
gcaaaatcgcctatgaccagaaaag

SEQ ID NO: 4837916 - DNA, 25 bp, Homo sapien
aaatctagaagacctattggctgag

SEQ ID NO: 4837917 - DNA, 25 bp, Homo sapien
tggtaagagtagagtgtctgacacc

SEQ ID NO: 4837918 - DNA, 25 bp, Homo sapien
gaacagacaaacctaatataagcta

SEQ ID NO: 4837919 - DNA, 25 bp, Homo sapien
cctaatataagctaaaaaagttcag

SEQ ID NO: 4837920 - DNA, 25 bp, Homo sapien
catgctgaagctaccccatctttac

SEQ ID NO: 4837921 - DNA, 25 bp, Homo sapien
tagcccagtgtggtgtggtacgcag

SEQ ID NO: 4837922 - DNA, 25 bp, Homo sapien
tatgaaatccttacgatgccctctg

SEQ ID NO: 4837923 - DNA, 25 bp, Homo sapien
ctggagtttcctcctacagccagtg

SEQ ID NO: 4837924 - DNA, 25 bp, Homo sapien
gaagacaagcctgtgggaattcaac

SEQ ID NO: 4837925 - DNA, 25 bp, Homo sapien
tcagtttcctgataccgtgatccac

SEQ ID NO: 4837926 - DNA, 25 bp, Homo sapien
catccgggatgttctcaggaatgca

SEQ ID NO: 4837927 - DNA, 25 bp, Homo sapien
ggaggccccttaggtccagaaggca

SEQ ID NO: 4837928 - DNA, 25 bp, Homo sapien
gcaccttggaacattgagggaggcc

SEQ ID NO: 4837929 - DNA, 25 bp, Homo sapien
tgcacgagctgatccctgccttggt

SEQ ID NO: 4837930 - DNA, 25 bp, Homo sapien
tcacaaaagttgagggacacgggag

SEQ ID NO: 4837931 - DNA, 25 bp, Homo sapien
catgtcacaaaagttgagggacacg

SEQ ID NO: 4837932 - DNA, 25 bp, Homo sapien
ttaggggacatgtcacaaaagttga

SEQ ID NO: 4837933 - DNA, 25 bp, Homo sapien
gggacatgtcacaaaagttgaggga

SEQ ID NO: 4837934 - DNA, 25 bp, Homo sapien
gggggtcgtcagcaggccttccaac

SEQ ID NO: 4837935 - DNA, 25 bp, Homo sapien
gcaggaccacaaggaaccaaagagg

SEQ ID NO: 4837936 - DNA, 25 bp, Homo sapien
caaagtatccgtatccagaatcaat

SEQ ID NO: 4837937 - DNA, 25 bp, Homo sapien
tccgccgcttttgagggtcgttatc

SEQ ID NO: 4837938 - DNA, 25 bp, Homo sapien
tggaaggaaacgatgtgaccggaaa

SEQ ID NO: 4837939 - DNA, 25 bp, Homo sapien
tacctaggcggcctcggaactcagc

SEQ ID NO: 4837940 - DNA, 25 bp, Homo sapien
actctcagcaggattgcatacctag

SEQ ID NO: 4837941 - DNA, 25 bp, Homo sapien
cggcctcggaactcagcgggatttg

SEQ ID NO: 4837942 - DNA, 25 bp, Homo sapien
gcaggattgcatacctaggcggcct

SEQ ID NO: 4837943 - DNA, 25 bp, Homo sapien
ccaacacgcacctagtaaaattccg

SEQ ID NO: 4837944 - DNA, 25 bp, Homo sapien
taccaacacgcacctagtaaaattc

SEQ ID NO: 4837945 - DNA, 25 bp, Homo sapien
ctaccaacacgcacctagtaaaatt

SEQ ID NO: 4837946 - DNA, 25 bp, Homo sapien
tctaccaacacgcacctagtaaaat

SEQ ID NO: 4837947 - DNA, 25 bp, Homo sapien
ggtgaccagaggcagtataaaaggc

SEQ ID NO: 4837948 - DNA, 25 bp, Homo sapien
ggcagtataaaaggcagcctggaaa

SEQ ID NO: 4837949 - DNA, 25 bp, Homo sapien
ccagaggcagtataaaaggcagcct

SEQ ID NO: 4837950 - DNA, 25 bp, Homo sapien
gaccagaggcagtataaaaggcagc

SEQ ID NO: 4837951 - DNA, 25 bp, Homo sapien
tcagcagccgtaactgagggacagg

SEQ ID NO: 4837952 - DNA, 25 bp, Homo sapien
tccaatacctagagtcgcaagacga

SEQ ID NO: 4837953 - DNA, 25 bp, Homo sapien
catgaccgggcccaatggctcatat

SEQ ID NO: 4837954 - DNA, 25 bp, Homo sapien
ttaaggcaccaatgacatgaccggg

SEQ ID NO: 4837955 - DNA, 25 bp, Homo sapien
gccagctggcctcgggctgcaaaca

SEQ ID NO: 4837956 - DNA, 25 bp, Homo sapien
gcagccagctggcctcgggctgcaa

SEQ ID NO: 4837957 - DNA, 25 bp, Homo sapien
ctgcagccagctggcctcgggctgc

SEQ ID NO: 4837958 - DNA, 25 bp, Homo sapien
agccagctggcctcgggctgcaaac

SEQ ID NO: 4837959 - DNA, 25 bp, Homo sapien
gaatcctgccaggaaaaagccctca

SEQ ID NO: 4837960 - DNA, 25 bp, Homo sapien
ggcagactgaaaggacgtggcctcc

SEQ ID NO: 4837961 - DNA, 25 bp, Homo sapien
cgatgttaatccgtggcatgtgcct

SEQ ID NO: 4837962 - DNA, 25 bp, Homo sapien
caaagactagctggagaatcctgcc

SEQ ID NO: 4837963 - DNA, 25 bp, Homo sapien
actggaggatgtgtccagagagaca

SEQ ID NO: 4837964 - DNA, 25 bp, Homo sapien
ggaggatgtgtccagagagacaccc

SEQ ID NO: 4837965 - DNA, 25 bp, Homo sapien
tggaggatgtgtccagagagacacc

SEQ ID NO: 4837966 - DNA, 25 bp, Homo sapien
ccactggaggatgtgtccagagaga

SEQ ID NO: 4837967 - DNA, 25 bp, Homo sapien
tcacggcacacgcaggcaaacagca

SEQ ID NO: 4837968 - DNA, 25 bp, Homo sapien
aagttcacggcacacgcaggcaaac

SEQ ID NO: 4837969 - DNA, 25 bp, Homo sapien
tgaagttcacggcacacgcaggcaa

SEQ ID NO: 4837970 - DNA, 25 bp, Homo sapien
cacttgaagttcacggcacacgcag

SEQ ID NO: 4837971 - DNA, 25 bp, Homo sapien
ctgactcctcaaagatcaggccatt

SEQ ID NO: 4837972 - DNA, 25 bp, Homo sapien
caaagatcaggccattttctacatg

SEQ ID NO: 4837973 - DNA, 25 bp, Homo sapien
tcctcaaagatcaggccattttcta

SEQ ID NO: 4837974 - DNA, 25 bp, Homo sapien
gactcctcaaagatcaggccatttt

SEQ ID NO: 4837975 - DNA, 25 bp, Homo sapien
cctggcgtggtggcagacatggcta

SEQ ID NO: 4837976 - DNA, 25 bp, Homo sapien
ctggcgtggtggcagacatggctac

SEQ ID NO: 4837977 - DNA, 25 bp, Homo sapien
gcgctgctcgaaaggctttgccctg

SEQ ID NO: 4837978 - DNA, 25 bp, Homo sapien
cgaaaggctttgccctgagactcca

SEQ ID NO: 4837979 - DNA, 25 bp, Homo sapien
catttcagcttctggccactgggag

SEQ ID NO: 4837980 - DNA, 25 bp, Homo sapien
gggaggcgctgctcgaaaggctttg

SEQ ID NO: 4837981 - DNA, 25 bp, Homo sapien
acattagctgtctaggcgtgtgggt

SEQ ID NO: 4837982 - DNA, 25 bp, Homo sapien
ctaataagacattagctgtctaggc

SEQ ID NO: 4837983 - DNA, 25 bp, Homo sapien
taagacattagctgtctaggcgtgt

SEQ ID NO: 4837984 - DNA, 25 bp, Homo sapien
ggaatgtttggagattattaaactc

SEQ ID NO: 4837985 - DNA, 25 bp, Homo sapien
gatcagatgggaagcggaagctcat

SEQ ID NO: 4837986 - DNA, 25 bp, Homo sapien
tgggaagcggaagctcatcatgacc

SEQ ID NO: 4837987 - DNA, 25 bp, Homo sapien
agatgggaagcggaagctcatcatg

SEQ ID NO: 4837988 - DNA, 25 bp, Homo sapien
atcagatgggaagcggaagctcatc

SEQ ID NO: 4837989 - DNA, 25 bp, Homo sapien
ggttccatgacagagtcccacacaa

SEQ ID NO: 4837990 - DNA, 25 bp, Homo sapien
gccagcacatgaaggcatactgggt

SEQ ID NO: 4837991 - DNA, 25 bp, Homo sapien
gagacatggatgacccagtgcctgt

SEQ ID NO: 4837992 - DNA, 25 bp, Homo sapien
gggcagcccattaactacagagtca

SEQ ID NO: 4837993 - DNA, 25 bp, Homo sapien
gcccgtgcaactgttggtatgtcaa

SEQ ID NO: 4837994 - DNA, 25 bp, Homo sapien
tgaggcccgtgcaactgttggtatg

SEQ ID NO: 4837995 - DNA, 25 bp, Homo sapien
ggaaaaacatagcatattgaatcat

SEQ ID NO: 4837996 - DNA, 25 bp, Homo sapien
agagtctcactgtgttgcccaggct

SEQ ID NO: 4837997 - DNA, 25 bp, Homo sapien
gttgcccaggctggattactgtggc

SEQ ID NO: 4837998 - DNA, 25 bp, Homo sapien
agtctcactgtgttgcccaggctgg

SEQ ID NO: 4837999 - DNA, 25 bp, Homo sapien
tgcccaggctggattactgtggcac

SEQ ID NO: 4838000 - DNA, 25 bp, Homo sapien
cagctcctacggtttcgttttctat

SEQ ID NO: 4838001 - DNA, 25 bp, Homo sapien
ctccgacagctcctacggtttcgtt

SEQ ID NO: 4838002 - DNA, 25 bp, Homo sapien
cacctccgacagctcctacggtttc

SEQ ID NO: 4838003 - DNA, 25 bp, Homo sapien
agctcctacggtttcgttttctatg

SEQ ID NO: 4838004 - DNA, 25 bp, Homo sapien
ccgcacgaagctccggatcctgggc

SEQ ID NO: 4838005 - DNA, 25 bp, Homo sapien
tcggaagaccatgggctcgctcctg

SEQ ID NO: 4838006 - DNA, 25 bp, Homo sapien
gcacgaagctccggatcctgggccc

SEQ ID NO: 4838007 - DNA, 25 bp, Homo sapien
cgtcggaagaccatgggctcgctcc

SEQ ID NO: 4838008 - DNA, 25 bp, Homo sapien
catccctggttaggacttgctgtgg

SEQ ID NO: 4838009 - DNA, 25 bp, Homo sapien
gaagccaaccttccttaatcaccca

SEQ ID NO: 4838010 - DNA, 25 bp, Homo sapien
ggttaggacttgctgtggattctca

SEQ ID NO: 4838011 - DNA, 25 bp, Homo sapien
ccagacccatccctggttaggactt

SEQ ID NO: 4838012 - DNA, 25 bp, Homo sapien
caatctgtggactcaggaaagactg

SEQ ID NO: 4838013 - DNA, 25 bp, Homo sapien
tctgtggtccactagcgtccttcct

SEQ ID NO: 4838014 - DNA, 25 bp, Homo sapien
gcattgaccgtatatgcccttttgc

SEQ ID NO: 4838015 - DNA, 25 bp, Homo sapien
taagcccaggatttatcagtataac

SEQ ID NO: 4838016 - DNA, 25 bp, Homo sapien
gttaaactgccttaggttatcatta

SEQ ID NO: 4838017 - DNA, 25 bp, Homo sapien
aactgccttaggttatcattactgt

SEQ ID NO: 4838018 - DNA, 25 bp, Homo sapien
catcagtcgtaatcttcacttgcac

SEQ ID NO: 4838019 - DNA, 25 bp, Homo sapien
ctgccttaggttatcattactgttc

SEQ ID NO: 4838020 - DNA, 25 bp, Homo sapien
tgtaaaatggggaatggcgccttta

SEQ ID NO: 4838021 - DNA, 25 bp, Homo sapien
aatggggaatggcgcctttactggg

SEQ ID NO: 4838022 - DNA, 25 bp, Homo sapien
ctgtaaaatggggaatggcgccttt

SEQ ID NO: 4838023 - DNA, 25 bp, Homo sapien
aaaatggggaatggcgcctttactg

SEQ ID NO: 4838024 - DNA, 25 bp, Homo sapien
atttgctcctgatgactcagtgcag

SEQ ID NO: 4838025 - DNA, 25 bp, Homo sapien
tcagtgcagacaagctctgtaactc

SEQ ID NO: 4838026 - DNA, 25 bp, Homo sapien
tgatgactcagtgcagacaagctct

SEQ ID NO: 4838027 - DNA, 25 bp, Homo sapien
tcctgatgactcagtgcagacaagc

SEQ ID NO: 4838028 - DNA, 25 bp, Homo sapien
tcccctgccctgcgtcaactgcact

SEQ ID NO: 4838029 - DNA, 25 bp, Homo sapien
ggacacgcagcctttaagaactgtg

SEQ ID NO: 4838030 - DNA, 25 bp, Homo sapien
gaaactctgaacacatccgagcatc

SEQ ID NO: 4838031 - DNA, 25 bp, Homo sapien
caaactctggacacgcagcctttaa

SEQ ID NO: 4838032 - DNA, 25 bp, Homo sapien
gcagcctttaagaactgtgacactc

SEQ ID NO: 4838033 - DNA, 25 bp, Homo sapien
ttacagcgcttaaaggcggcacgaa

SEQ ID NO: 4838034 - DNA, 25 bp, Homo sapien
gaccctcctggtgagtgttaacaat

SEQ ID NO: 4838035 - DNA, 25 bp, Homo sapien
aaggcggcacgaaaccaaagagtga

SEQ ID NO: 4838036 - DNA, 25 bp, Homo sapien
cctcctggtgagtgttaacaattct

SEQ ID NO: 4838037 - DNA, 25 bp, Homo sapien
gttctgttgtgctgttcctttgttt

SEQ ID NO: 4838038 - DNA, 25 bp, Homo sapien
tgaaaaaaggtgataccatatccaa

SEQ ID NO: 4838039 - DNA, 25 bp, Homo sapien
gttgtgctgttcctttgtttgactt

SEQ ID NO: 4838040 - DNA, 25 bp, Homo sapien
aaaaggtgataccatatccaatcat

SEQ ID NO: 4838041 - DNA, 25 bp, Homo sapien
tgaaatttaaaaattgcttgagaaa

SEQ ID NO: 4838042 - DNA, 25 bp, Homo sapien
agaatgaaatttaaaaattgcttga

SEQ ID NO: 4838043 - DNA, 25 bp, Homo sapien
ctcaataaggtaaaagaatgaaatt

SEQ ID NO: 4838044 - DNA, 25 bp, Homo sapien
aatgaaatttaaaaattgcttgaga

SEQ ID NO: 4838045 - DNA, 25 bp, Homo sapien
tttccacttgcagacactttaggca

SEQ ID NO: 4838046 - DNA, 25 bp, Homo sapien
gcagacactttaggcactaagaaaa

SEQ ID NO: 4838047 - DNA, 25 bp, Homo sapien
cacttgcagacactttaggcactaa

SEQ ID NO: 4838048 - DNA, 25 bp, Homo sapien
cttcctctggatttccacttgcaga

SEQ ID NO: 4838049 - DNA, 25 bp, Homo sapien
ttcctgggtgaagtcaatagctaca

SEQ ID NO: 4838050 - DNA, 25 bp, Homo sapien
cttcctgggtgaagtcaatagctac

SEQ ID NO: 4838051 - DNA, 25 bp, Homo sapien
agtcaatagctacatcttcaaaagt

SEQ ID NO: 4838052 - DNA, 25 bp, Homo sapien
agctacatcttcaaaagtcactttc

SEQ ID NO: 4838053 - DNA, 25 bp, Homo sapien
tctgtacagctttctcttggatgtg

SEQ ID NO: 4838054 - DNA, 25 bp, Homo sapien
acatctctgtacagctttctcttgg

SEQ ID NO: 4838055 - DNA, 25 bp, Homo sapien
cgagggacaccaggtgactgatatt

SEQ ID NO: 4838056 - DNA, 25 bp, Homo sapien
gtgactgatattttccagcatcaca

SEQ ID NO: 4838057 - DNA, 25 bp, Homo sapien
atataggatttgcttatctggtacc

SEQ ID NO: 4838058 - DNA, 25 bp, Homo sapien
aaattatataggatttgcttatctg

SEQ ID NO: 4838059 - DNA, 25 bp, Homo sapien
ttatataggatttgcttatctggta

SEQ ID NO: 4838060 - DNA, 25 bp, Homo sapien
aattatataggatttgcttatctgg

SEQ ID NO: 4838061 - DNA, 25 bp, Homo sapien
gaagaaatactcttccttcccgcca

SEQ ID NO: 4838062 - DNA, 25 bp, Homo sapien
ctggattctggtcttgaagaaatac

SEQ ID NO: 4838063 - DNA, 25 bp, Homo sapien
cttccttcccgccacagctcttttc

SEQ ID NO: 4838064 - DNA, 25 bp, Homo sapien
aatactcttccttcccgccacagct

SEQ ID NO: 4838065 - DNA, 25 bp, Homo sapien
ctggtggatgcgtcttttctgatga

SEQ ID NO: 4838066 - DNA, 25 bp, Homo sapien
tgcatggatatcatgtgttttttct

SEQ ID NO: 4838067 - DNA, 25 bp, Homo sapien
tcttttctgatgataggatgcatgg

SEQ ID NO: 4838068 - DNA, 25 bp, Homo sapien
cattgtcatactggtggatgcgtct

SEQ ID NO: 4838069 - DNA, 25 bp, Homo sapien
caatcttctcccgaatcattatatt

SEQ ID NO: 4838070 - DNA, 25 bp, Homo sapien
gtgcaatcttctcccgaatcattat

SEQ ID NO: 4838071 - DNA, 25 bp, Homo sapien
ctgtgagtgcaatcttctcccgaat

SEQ ID NO: 4838072 - DNA, 25 bp, Homo sapien
tcttctcccgaatcattatattcaa

SEQ ID NO: 4838073 - DNA, 25 bp, Homo sapien
tgacatagggtttctttctactgtg

SEQ ID NO: 4838074 - DNA, 25 bp, Homo sapien
tctttctactgtgagttaacaaaca

SEQ ID NO: 4838075 - DNA, 25 bp, Homo sapien
gtttctttctactgtgagttaacaa

SEQ ID NO: 4838076 - DNA, 25 bp, Homo sapien
ggtttctttctactgtgagttaaca

SEQ ID NO: 4838077 - DNA, 25 bp, Homo sapien
ctttagtatgaatttgtttacgtgg

SEQ ID NO: 4838078 - DNA, 25 bp, Homo sapien
attacgaagggattttccacactgt

SEQ ID NO: 4838079 - DNA, 25 bp, Homo sapien
acgaagggattttccacactgtttg

SEQ ID NO: 4838080 - DNA, 25 bp, Homo sapien
agattacgaagggattttccacact

SEQ ID NO: 4838081 - DNA, 25 bp, Homo sapien
cttttgtccaaggtgagttctctca

SEQ ID NO: 4838082 - DNA, 25 bp, Homo sapien
tgccgtctaaggtaaaagcaattag

SEQ ID NO: 4838083 - DNA, 25 bp, Homo sapien
catcttgtgccgtctaaggtaaaag

SEQ ID NO: 4838084 - DNA, 25 bp, Homo sapien
cccacatagaagacaagcatgaggt

SEQ ID NO: 4838085 - DNA, 25 bp, Homo sapien
gaatagggcggcctgcgcagggccc

SEQ ID NO: 4838086 - DNA, 25 bp, Homo sapien
gggccttgcaaaaagagcggcctct

SEQ ID NO: 4838087 - DNA, 25 bp, Homo sapien
atactgacgccctgagggcgcggaa

SEQ ID NO: 4838088 - DNA, 25 bp, Homo sapien
tctcgggccttgcaaaaagagcggc

SEQ ID NO: 4838089 - DNA, 25 bp, Homo sapien
tagttatctccattaacttggacat

SEQ ID NO: 4838090 - DNA, 25 bp, Homo sapien
gaagtaacactcctagttatctcca

SEQ ID NO: 4838091 - DNA, 25 bp, Homo sapien
cctagttatctccattaacttggac

SEQ ID NO: 4838092 - DNA, 25 bp, Homo sapien
ctgtgaagtaacactcctagttatc

SEQ ID NO: 4838093 - DNA, 25 bp, Homo sapien
cagtagttcatgcagacatctagct

SEQ ID NO: 4838094 - DNA, 25 bp, Homo sapien
tagttcatgcagacatctagctgga

SEQ ID NO: 4838095 - DNA, 25 bp, Homo sapien
agtagttcatgcagacatctagctg

SEQ ID NO: 4838096 - DNA, 25 bp, Homo sapien
gtagttcatgcagacatctagctgg

SEQ ID NO: 4838097 - DNA, 25 bp, Homo sapien
cacagagtgagggagtccccttcat

SEQ ID NO: 4838098 - DNA, 25 bp, Homo sapien
ccccttcatccttgagctctggcca

SEQ ID NO: 4838099 - DNA, 25 bp, Homo sapien
cttcatccttgagctctggccacag

SEQ ID NO: 4838100 - DNA, 25 bp, Homo sapien
gagtgagggagtccccttcatcctt

SEQ ID NO: 4838101 - DNA, 25 bp, Homo sapien
atcaggcccgagatgccccctggtt

SEQ ID NO: 4838102 - DNA, 25 bp, Homo sapien
ggactctgctcatcaggcccgagat

SEQ ID NO: 4838103 - DNA, 25 bp, Homo sapien
caggcccgagatgccccctggttgt

SEQ ID NO: 4838104 - DNA, 25 bp, Homo sapien
actctgctcatcaggcccgagatgc

SEQ ID NO: 4838105 - DNA, 25 bp, Homo sapien
cgtcgacctctgtgatgatttggct

SEQ ID NO: 4838106 - DNA, 25 bp, Homo sapien
tgtgatccttgttccgggcgacatg

SEQ ID NO: 4838107 - DNA, 25 bp, Homo sapien
gcggccagagagctcgtcatttgaa

SEQ ID NO: 4838108 - DNA, 25 bp, Homo sapien
tgattggtttatcgcgcacctgatg

SEQ ID NO: 4838109 - DNA, 25 bp, Homo sapien
gaaacaagggccagtattaacaatc

SEQ ID NO: 4838110 - DNA, 25 bp, Homo sapien
ccagggcttttctacggtgcaattt

SEQ ID NO: 4838111 - DNA, 25 bp, Homo sapien
gcgagaatccaggagacacacggct

SEQ ID NO: 4838112 - DNA, 25 bp, Homo sapien
caatcttatgctatcctgggtttca

SEQ ID NO: 4838113 - DNA, 25 bp, Homo sapien
tcattcctggtaagccagagagcct

SEQ ID NO: 4838114 - DNA, 25 bp, Homo sapien
tctcattaggtacaaagatcaaagt

SEQ ID NO: 4838115 - DNA, 25 bp, Homo sapien
cattaggtacaaagatcaaagttga

SEQ ID NO: 4838116 - DNA, 25 bp, Homo sapien
tcattaggtacaaagatcaaagttg

SEQ ID NO: 4838117 - DNA, 25 bp, Homo sapien
attaggtacaaagatcaaagttgac

SEQ ID NO: 4838118 - DNA, 25 bp, Homo sapien
cggagagacacaattgtggacaatg

SEQ ID NO: 4838119 - DNA, 25 bp, Homo sapien
caatggcccgttacttttgtatgtt

SEQ ID NO: 4838120 - DNA, 25 bp, Homo sapien
gacacaattgtggacaatggcccgt

SEQ ID NO: 4838121 - DNA, 25 bp, Homo sapien
caattgtggacaatggcccgttact

SEQ ID NO: 4838122 - DNA, 25 bp, Homo sapien
aacaacacacaacacggcccgttgg

SEQ ID NO: 4838123 - DNA, 25 bp, Homo sapien
gataagtcaataggtgcaacgaacc

SEQ ID NO: 4838124 - DNA, 25 bp, Homo sapien
caaatgcccttcattgctagactgg

SEQ ID NO: 4838125 - DNA, 25 bp, Homo sapien
caacgaaccaccatagcaaaggata

SEQ ID NO: 4838126 - DNA, 25 bp, Homo sapien
acatgcactcgtgtccaactccaaa

SEQ ID NO: 4838127 - DNA, 25 bp, Homo sapien
tgcactcgtgtccaactccaaatag

SEQ ID NO: 4838128 - DNA, 25 bp, Homo sapien
actcgtgtccaactccaaatagtag

SEQ ID NO: 4838129 - DNA, 25 bp, Homo sapien
cgtgtccaactccaaatagtagctt

SEQ ID NO: 4838130 - DNA, 25 bp, Homo sapien
tgctccacttgccaacatttgaatg

SEQ ID NO: 4838131 - DNA, 25 bp, Homo sapien
tctgctccacttgccaacatttgaa

SEQ ID NO: 4838132 - DNA, 25 bp, Homo sapien
gctccacttgccaacatttgaatgg

SEQ ID NO: 4838133 - DNA, 25 bp, Homo sapien
ccacttgccaacatttgaatggatt

SEQ ID NO: 4838134 - DNA, 25 bp, Homo sapien
gggaaaggtaaggctctggtcctgc

SEQ ID NO: 4838135 - DNA, 25 bp, Homo sapien
gcaggtgtaggactaaattcagatg

SEQ ID NO: 4838136 - DNA, 25 bp, Homo sapien
tgcaggtgtaggactaaattcagat

SEQ ID NO: 4838137 - DNA, 25 bp, Homo sapien
aggtgtaggactaaattcagatgtg

SEQ ID NO: 4838138 - DNA, 25 bp, Homo sapien
ttgcaggtgtaggactaaattcaga

SEQ ID NO: 4838139 - DNA, 25 bp, Homo sapien
gaccacatcgcccaagctcagctgc

SEQ ID NO: 4838140 - DNA, 25 bp, Homo sapien
tcagaaacaaccacgtggaccacat

SEQ ID NO: 4838141 - DNA, 25 bp, Homo sapien
ggtacattctctgttgtcatggctg

SEQ ID NO: 4838142 - DNA, 25 bp, Homo sapien
cattggatctgcatagggaactgca

SEQ ID NO: 4838143 - DNA, 25 bp, Homo sapien
acatagccatgagaaaggtgtccaa

SEQ ID NO: 4838144 - DNA, 25 bp, Homo sapien
tttaaagtctccacaggtgtccaga

SEQ ID NO: 4838145 - DNA, 25 bp, Homo sapien
gcaacatagccatgagaaaggtgtc

SEQ ID NO: 4838146 - DNA, 25 bp, Homo sapien
ccagaggtgactgtagctgtactga

SEQ ID NO: 4838147 - DNA, 25 bp, Homo sapien
agaaagaatttatacataccattta

SEQ ID NO: 4838148 - DNA, 25 bp, Homo sapien
gcgatgcagaactgtaaagtaatta

SEQ ID NO: 4838149 - DNA, 25 bp, Homo sapien
ccacatctattctatctaacatgtt

SEQ ID NO: 4838150 - DNA, 25 bp, Homo sapien
tgccacatctattctatctaacatg

SEQ ID NO: 4838151 - DNA, 25 bp, Homo sapien
tagtggattgaaggcattgttagtc

SEQ ID NO: 4838152 - DNA, 25 bp, Homo sapien
taagtacttccatcttgataactgt

SEQ ID NO: 4838153 - DNA, 25 bp, Homo sapien
ctaatttcaaatatacccaagtact

SEQ ID NO: 4838154 - DNA, 25 bp, Homo sapien
ctttgtgagtcattaacagatctta

SEQ ID NO: 4838155 - DNA, 25 bp, Homo sapien
acttatcatgtcagattatcaagaa

SEQ ID NO: 4838156 - DNA, 25 bp, Homo sapien
aatgccaattccaacaccacttatc

SEQ ID NO: 4838157 - DNA, 25 bp, Homo sapien
gtcagattatcaagaaccccttaaa

SEQ ID NO: 4838158 - DNA, 25 bp, Homo sapien
ttaatgccaattccaacaccactta

SEQ ID NO: 4838159 - DNA, 25 bp, Homo sapien
ctgcaaagtagtagaagatcaaatt

SEQ ID NO: 4838160 - DNA, 25 bp, Homo sapien
gcaaagtagtagaagatcaaattgg

SEQ ID NO: 4838161 - DNA, 25 bp, Homo sapien
aagtagtagaagatcaaattggtgc

SEQ ID NO: 4838162 - DNA, 25 bp, Homo sapien
caaagtagtagaagatcaaattggt

SEQ ID NO: 4838163 - DNA, 25 bp, Homo sapien
tcttctttcctgcagtaagaggtgg

SEQ ID NO: 4838164 - DNA, 25 bp, Homo sapien
ggtcctgcggaaggtcattgtctca

SEQ ID NO: 4838165 - DNA, 25 bp, Homo sapien
tttcctgcagtaagaggtggtttgg

SEQ ID NO: 4838166 - DNA, 25 bp, Homo sapien
ttctttcctgcagtaagaggtggtt

SEQ ID NO: 4838167 - DNA, 25 bp, Homo sapien
tatgagcagcaaccatttcaagagc

SEQ ID NO: 4838168 - DNA, 25 bp, Homo sapien
tgtctctgacatatgagcagcaacc

SEQ ID NO: 4838169 - DNA, 25 bp, Homo sapien
ggaactgctacctttcttaaactgc

SEQ ID NO: 4838170 - DNA, 25 bp, Homo sapien
aatgcagtgactgttgggccaaacc

SEQ ID NO: 4838171 - DNA, 25 bp, Homo sapien
ctgagatgccagaaacatctttttt

SEQ ID NO: 4838172 - DNA, 25 bp, Homo sapien
gagatgccagaaacatcttttttgg

SEQ ID NO: 4838173 - DNA, 25 bp, Homo sapien
tgagatgccagaaacatcttttttg

SEQ ID NO: 4838174 - DNA, 25 bp, Homo sapien
gaatcatccattactcccacacata

SEQ ID NO: 4838175 - DNA, 25 bp, Homo sapien
ctgaatcatccattactcccacaca

SEQ ID NO: 4838176 - DNA, 25 bp, Homo sapien
tgaatcatccattactcccacacat

SEQ ID NO: 4838177 - DNA, 25 bp, Homo sapien
cctgaatcatccattactcccacac

SEQ ID NO: 4838178 - DNA, 25 bp, Homo sapien
tgcctcacactcagtgaaagaccag

SEQ ID NO: 4838179 - DNA, 25 bp, Homo sapien
aagaatctctcagggcttccatccc

SEQ ID NO: 4838180 - DNA, 25 bp, Homo sapien
aacctcgggcagtagctgcctcaca

SEQ ID NO: 4838181 - DNA, 25 bp, Homo sapien
tacttctctcagctacctgtcctgc

SEQ ID NO: 4838182 - DNA, 25 bp, Homo sapien
tgtgtattatattccctcttcgctg

SEQ ID NO: 4838183 - DNA, 25 bp, Homo sapien
tgcagttcactatatcatgaccgtg

SEQ ID NO: 4838184 - DNA, 25 bp, Homo sapien
aacatcttagaatagttgtccatac

SEQ ID NO: 4838185 - DNA, 25 bp, Homo sapien
aaataactattgcaggaatgaaagg

SEQ ID NO: 4838186 - DNA, 25 bp, Homo sapien
cggcttagggtaaatgaatccttca

SEQ ID NO: 4838187 - DNA, 25 bp, Homo sapien
agggcagtttttggacaattcccat

SEQ ID NO: 4838188 - DNA, 25 bp, Homo sapien
atgaatccttcaagttataaagatg

SEQ ID NO: 4838189 - DNA, 25 bp, Homo sapien
tgaagggcagtttttggacaattcc

SEQ ID NO: 4838190 - DNA, 25 bp, Homo sapien
aaagggagtcacataggaaatctag

SEQ ID NO: 4838191 - DNA, 25 bp, Homo sapien
aaatctagaagacctattggctgag

SEQ ID NO: 4838192 - DNA, 25 bp, Homo sapien
gcaaaatcgcctatgaccagaaaag

SEQ ID NO: 4838193 - DNA, 25 bp, Homo sapien
tggtaagagtagagtgtctgacacc

SEQ ID NO: 4838194 - DNA, 25 bp, Homo sapien
atagtgcccagccaaagagagtagc

SEQ ID NO: 4838195 - DNA, 25 bp, Homo sapien
gtgcccagccaaagagagtagcttt

SEQ ID NO: 4838196 - DNA, 25 bp, Homo sapien
tagtgcccagccaaagagagtagct

SEQ ID NO: 4838197 - DNA, 25 bp, Homo sapien
cccagccaaagagagtagctttaaa

SEQ ID NO: 4838198 - DNA, 25 bp, Homo sapien
tgaggaattaccaagatgaccatag

SEQ ID NO: 4838199 - DNA, 25 bp, Homo sapien
gaagacaagcctgtgggaattcaac

SEQ ID NO: 4838200 - DNA, 25 bp, Homo sapien
ctggagtttcctcctacagccagtg

SEQ ID NO: 4838201 - DNA, 25 bp, Homo sapien
tatgaaatccttacgatgccctctg

SEQ ID NO: 4838202 - DNA, 25 bp, Homo sapien
tattggctgaaagcatccacctgca

SEQ ID NO: 4838203 - DNA, 25 bp, Homo sapien
tccacctgcaaacttacgtattata

SEQ ID NO: 4838204 - DNA, 25 bp, Homo sapien
cagtttcctgataccgtgatccacc

SEQ ID NO: 4838205 - DNA, 25 bp, Homo sapien
tgcctggcccttgtagcagtacttt

SEQ ID NO: 4838206 - DNA, 25 bp, Homo sapien
catggaccctaagtcgtgcaggtgc

SEQ ID NO: 4838207 - DNA, 25 bp, Homo sapien
gtgctggttcatcattccgactcct

SEQ ID NO: 4838208 - DNA, 25 bp, Homo sapien
aaggaacatggaccctaagtcgtgc

SEQ ID NO: 4838209 - DNA, 25 bp, Homo sapien
gctggttcatcattccgactcctgc

SEQ ID NO: 4838210 - DNA, 25 bp, Homo sapien
aacgatgtgaccggaaagctcggaa

SEQ ID NO: 4838211 - DNA, 25 bp, Homo sapien
cgatgtgaccggaaagctcggaaaa

SEQ ID NO: 4838212 - DNA, 25 bp, Homo sapien
atgtgaccggaaagctcggaaaacg

SEQ ID NO: 4838213 - DNA, 25 bp, Homo sapien
cggaaagctcggaaaacggccacag

SEQ ID NO: 4838214 - DNA, 25 bp, Homo sapien
cggcctcggaactcagcgggatttg

SEQ ID NO: 4838215 - DNA, 25 bp, Homo sapien
tcactgaaagatctaggcagggata

SEQ ID NO: 4838216 - DNA, 25 bp, Homo sapien
cactgaaagatctaggcagggatat

SEQ ID NO: 4838217 - DNA, 25 bp, Homo sapien
actgaaagatctaggcagggatatc

SEQ ID NO: 4838218 - DNA, 25 bp, Homo sapien
ggttctccccctgatcctaagagta

SEQ ID NO: 4838219 - DNA, 25 bp, Homo sapien
gttctccccctgatcctaagagtag

SEQ ID NO: 4838220 - DNA, 25 bp, Homo sapien
cggatgtctgacaccgggcctttcc

SEQ ID NO: 4838221 - DNA, 25 bp, Homo sapien
ccaaggacctgcaccggcctctgag

SEQ ID NO: 4838222 - DNA, 25 bp, Homo sapien
aataaggaggtcaacaaaaaacatg

SEQ ID NO: 4838223 - DNA, 25 bp, Homo sapien
gtgataataaggaggtcaacaaaaa

SEQ ID NO: 4838224 - DNA, 25 bp, Homo sapien
tgactaatacacctcagcacagacg

SEQ ID NO: 4838225 - DNA, 25 bp, Homo sapien
tgtaatactccctcagaggcttttt

SEQ ID NO: 4838226 - DNA, 25 bp, Homo sapien
gctttttgccttcacagagaagagc

SEQ ID NO: 4838227 - DNA, 25 bp, Homo sapien
tactccctcagaggctttttgcctt

SEQ ID NO: 4838228 - DNA, 25 bp, Homo sapien
cagaggctttttgccttcacagaga

SEQ ID NO: 4838229 - DNA, 25 bp, Homo sapien
actggaggatgtgtccagagagaca

SEQ ID NO: 4838230 - DNA, 25 bp, Homo sapien
ggaggatgtgtccagagagacaccc

SEQ ID NO: 4838231 - DNA, 25 bp, Homo sapien
tggaggatgtgtccagagagacacc

SEQ ID NO: 4838232 - DNA, 25 bp, Homo sapien
ccactggaggatgtgtccagagaga

SEQ ID NO: 4838233 - DNA, 25 bp, Homo sapien
gactcctcaaagatcaggccatttt

SEQ ID NO: 4838234 - DNA, 25 bp, Homo sapien
ctgactcctcaaagatcaggccatt

SEQ ID NO: 4838235 - DNA, 25 bp, Homo sapien
tcctcaaagatcaggccattttcta

SEQ ID NO: 4838236 - DNA, 25 bp, Homo sapien
caaagatcaggccattttctacatg

SEQ ID NO: 4838237 - DNA, 25 bp, Homo sapien
agagctgctgagactcttgcaggtt

SEQ ID NO: 4838238 - DNA, 25 bp, Homo sapien
ctgagactcttgcaggttcttccag

SEQ ID NO: 4838239 - DNA, 25 bp, Homo sapien
agctgctgagactcttgcaggttct

SEQ ID NO: 4838240 - DNA, 25 bp, Homo sapien
ctgctgagactcttgcaggttcttc

SEQ ID NO: 4838241 - DNA, 25 bp, Homo sapien
ggttccatgacagagtcccacacaa

SEQ ID NO: 4838242 - DNA, 25 bp, Homo sapien
gccagcacatgaaggcatactgggt

SEQ ID NO: 4838243 - DNA, 25 bp, Homo sapien
gggcagcccattaactacagagtca

SEQ ID NO: 4838244 - DNA, 25 bp, Homo sapien
gagacatggatgacccagtgcctgt

SEQ ID NO: 4838245 - DNA, 25 bp, Homo sapien
aaccacttctggtacgaggtcaggg

SEQ ID NO: 4838246 - DNA, 25 bp, Homo sapien
gacgtagcaatggtccatcagctct

SEQ ID NO: 4838247 - DNA, 25 bp, Homo sapien
ctggactgggacgtagcaatggtcc

SEQ ID NO: 4838248 - DNA, 25 bp, Homo sapien
gcgaccctcacagccggatcctcga

SEQ ID NO: 4838249 - DNA, 25 bp, Homo sapien
ggaatgttcaatagatggaatcctg

SEQ ID NO: 4838250 - DNA, 25 bp, Homo sapien
tctcaggaatgttcaatagatggaa

SEQ ID NO: 4838251 - DNA, 25 bp, Homo sapien
agtgtctttcatgccgcgtgacacc

SEQ ID NO: 4838252 - DNA, 25 bp, Homo sapien
tgttcaatagatggaatcctgtgtg

SEQ ID NO: 4838253 - DNA, 25 bp, Homo sapien
cattgagtcagcacttcagaagggt

SEQ ID NO: 4838254 - DNA, 25 bp, Homo sapien
agaccatgggctcgctcttgggcct

SEQ ID NO: 4838255 - DNA, 25 bp, Homo sapien
gaagaccatgggctcgctcttgggc

SEQ ID NO: 4838256 - DNA, 25 bp, Homo sapien
acgaagctccggatcctggggcccg

SEQ ID NO: 4838257 - DNA, 25 bp, Homo sapien
cgtcggaagaccatgggctcgctct

SEQ ID NO: 4838258 - DNA, 25 bp, Homo sapien
tcccagggacagtcgccctaactgg

SEQ ID NO: 4838259 - DNA, 25 bp, Homo sapien
taaggcccctgctgaaaagaccttc

SEQ ID NO: 4838260 - DNA, 25 bp, Homo sapien
gagagtgcctacgttagcccaaggc

SEQ ID NO: 4838261 - DNA, 25 bp, Homo sapien
gaagcatgcacccgtaaggcccctg

SEQ ID NO: 4838262 - DNA, 25 bp, Homo sapien
tacatctcccttgtcaggcacatgg

SEQ ID NO: 4838263 - DNA, 25 bp, Homo sapien
acatctcccttgtcaggcacatggt

SEQ ID NO: 4838264 - DNA, 25 bp, Homo sapien
ttacatctcccttgtcaggcacatg

SEQ ID NO: 4838265 - DNA, 25 bp, Homo sapien
cgttttagactttgaacacagttca

SEQ ID NO: 4838266 - DNA, 25 bp, Homo sapien
ttctcatagctgagcagggctcaag

SEQ ID NO: 4838267 - DNA, 25 bp, Homo sapien
taacaaattagctctcgggactctt

SEQ ID NO: 4838268 - DNA, 25 bp, Homo sapien
gtgttgctaactgccctgcctttca

SEQ ID NO: 4838269 - DNA, 25 bp, Homo sapien
tttctttgtcagatcttgcgctcat

SEQ ID NO: 4838270 - DNA, 25 bp, Homo sapien
tcagatcttgcgctcatttggttct

SEQ ID NO: 4838271 - DNA, 25 bp, Homo sapien
agatcttgcgctcatttggttctgg

SEQ ID NO: 4838272 - DNA, 25 bp, Homo sapien
ttgtcagatcttgcgctcatttggt

SEQ ID NO: 4838273 - DNA, 25 bp, Homo sapien
ccgttgattctgtctaaaaacacag

SEQ ID NO: 4838274 - DNA, 25 bp, Homo sapien
gaaggtgtatgcaacatctcagacc

SEQ ID NO: 4838275 - DNA, 25 bp, Homo sapien
aaaacacagcaataaccacatccca

SEQ ID NO: 4838276 - DNA, 25 bp, Homo sapien
taaatgaaagtgtttggaggaataa

SEQ ID NO: 4838277 - DNA, 25 bp, Homo sapien
ggttaggacttgctgtggattctca

SEQ ID NO: 4838278 - DNA, 25 bp, Homo sapien
catccctggttaggacttgctgtgg

SEQ ID NO: 4838279 - DNA, 25 bp, Homo sapien
gaagccaaccttccttaatcaccca

SEQ ID NO: 4838280 - DNA, 25 bp, Homo sapien
ccagacccatccctggttaggactt

SEQ ID NO: 4838281 - DNA, 25 bp, Homo sapien
caatctgtggactcaggaaagactg

SEQ ID NO: 4838282 - DNA, 25 bp, Homo sapien
tctgtggtccactagcgtccttcct

SEQ ID NO: 4838283 - DNA, 25 bp, Homo sapien
gcattgaccgtatatgcccttttgc

SEQ ID NO: 4838284 - DNA, 25 bp, Homo sapien
taagcccaggatttatcagtataac

SEQ ID NO: 4838285 - DNA, 25 bp, Homo sapien
tggcgacagagggatactgtctgaa

SEQ ID NO: 4838286 - DNA, 25 bp, Homo sapien
tcaccagacactgcacaccaagata

SEQ ID NO: 4838287 - DNA, 25 bp, Homo sapien
accaagataaagatttcttctggcc

SEQ ID NO: 4838288 - DNA, 25 bp, Homo sapien
gatgacatttgtccctcaccagaca

SEQ ID NO: 4838289 - DNA, 25 bp, Homo sapien
ctacaccctgaagcaacgttttaga

SEQ ID NO: 4838290 - DNA, 25 bp, Homo sapien
caccctgaagcaacgttttagaaag

SEQ ID NO: 4838291 - DNA, 25 bp, Homo sapien
cattaaccataggagagataaagga

SEQ ID NO: 4838292 - DNA, 25 bp, Homo sapien
ttaaccataggagagataaaggaaa

SEQ ID NO: 4838293 - DNA, 25 bp, Homo sapien
aatggggaatggcgcctttactggg

SEQ ID NO: 4838294 - DNA, 25 bp, Homo sapien
tgtaaaatggggaatggcgccttta

SEQ ID NO: 4838295 - DNA, 25 bp, Homo sapien
ctgtaaaatggggaatggcgccttt

SEQ ID NO: 4838296 - DNA, 25 bp, Homo sapien
aaaatggggaatggcgcctttactg

SEQ ID NO: 4838297 - DNA, 25 bp, Homo sapien
tcagtgcagacaagctctgtaactc

SEQ ID NO: 4838298 - DNA, 25 bp, Homo sapien
atttgctcctgatgactcagtgcag

SEQ ID NO: 4838299 - DNA, 25 bp, Homo sapien
tgatgactcagtgcagacaagctct

SEQ ID NO: 4838300 - DNA, 25 bp, Homo sapien
tcctgatgactcagtgcagacaagc

SEQ ID NO: 4838301 - DNA, 25 bp, Homo sapien
ttggtatttaccaagcaattaccca

SEQ ID NO: 4838302 - DNA, 25 bp, Homo sapien
actgtactccagctagaccttctct

SEQ ID NO: 4838303 - DNA, 25 bp, Homo sapien
ggtattgtgggcctctagtcccaac

SEQ ID NO: 4838304 - DNA, 25 bp, Homo sapien
tgttgcaactgacattactttatca

SEQ ID NO: 4838305 - DNA, 25 bp, Homo sapien
agacagtttgagggaacaggatgct

SEQ ID NO: 4838306 - DNA, 25 bp, Homo sapien
gacagtttgagggaacaggatgctg

SEQ ID NO: 4838307 - DNA, 25 bp, Homo sapien
cagacagtttgagggaacaggatgc

SEQ ID NO: 4838308 - DNA, 25 bp, Homo sapien
tcccctgccctgcgtcaactgcact

SEQ ID NO: 4838309 - DNA, 25 bp, Homo sapien
aggtcaatcctgcactaagctgtga

SEQ ID NO: 4838310 - DNA, 25 bp, Homo sapien
atgtacacatatatacatgtacata

SEQ ID NO: 4838311 - DNA, 25 bp, Homo sapien
catatatacatgtacatatgtgtat

SEQ ID NO: 4838312 - DNA, 25 bp, Homo sapien
tatatgtatgtgagtatatgtacac

SEQ ID NO: 4838313 - DNA, 25 bp, Homo sapien
tatgtatgtgagtatatgtacacat

SEQ ID NO: 4838314 - DNA, 25 bp, Homo sapien
catatgtatatatgcgtgtgtacac

SEQ ID NO: 4838315 - DNA, 25 bp, Homo sapien
tgtatgtatatatgcgtgtgtacac

SEQ ID NO: 4838316 - DNA, 25 bp, Homo sapien
tatatgcgtgtgtacacacacatat

SEQ ID NO: 4838317 - DNA, 25 bp, Homo sapien
gtatgtatatatgcgtgtgtacaca

SEQ ID NO: 4838318 - DNA, 25 bp, Homo sapien
atgattgtacccctgcaccacaatg

SEQ ID NO: 4838319 - DNA, 25 bp, Homo sapien
ttaagccccgaagttcaagggtgca

SEQ ID NO: 4838320 - DNA, 25 bp, Homo sapien
cacgacacaactctatctcaactaa

SEQ ID NO: 4838321 - DNA, 25 bp, Homo sapien
tggccaacacgacacaactctatct

SEQ ID NO: 4838322 - DNA, 25 bp, Homo sapien
agcaggcaagcattcatcacccact

SEQ ID NO: 4838323 - DNA, 25 bp, Homo sapien
tcaataatctccaaccaggcgcgga

SEQ ID NO: 4838324 - DNA, 25 bp, Homo sapien
tgagcaggcaagcattcatcaccca

SEQ ID NO: 4838325 - DNA, 25 bp, Homo sapien
ttgagtcaataatctccaaccaggc

SEQ ID NO: 4838326 - DNA, 25 bp, Homo sapien
caggggtctttgtctcaagcagcaa

SEQ ID NO: 4838327 - DNA, 25 bp, Homo sapien
catgactgtctgcaacacaccccat

SEQ ID NO: 4838328 - DNA, 25 bp, Homo sapien
agcagcaaccataggaccgagggtc

SEQ ID NO: 4838329 - DNA, 25 bp, Homo sapien
gaatgtcaccaggttccactgacag

SEQ ID NO: 4838330 - DNA, 25 bp, Homo sapien
tcagagtcacctaagtccctcataa

SEQ ID NO: 4838331 - DNA, 25 bp, Homo sapien
tcacctaagtccctcataatggcaa

SEQ ID NO: 4838332 - DNA, 25 bp, Homo sapien
caaaacaagcgattttccaattgcc

SEQ ID NO: 4838333 - DNA, 25 bp, Homo sapien
gagtcacctaagtccctcataatgg

SEQ ID NO: 4838334 - DNA, 25 bp, Homo sapien
tttccttcaatgacagtaatgctgc

SEQ ID NO: 4838335 - DNA, 25 bp, Homo sapien
aatcagagcgaacccagggcccggg

SEQ ID NO: 4838336 - DNA, 25 bp, Homo sapien
ctgcaatcagagcgaacccagggcc

SEQ ID NO: 4838337 - DNA, 25 bp, Homo sapien
tgggagggccgcctgtctcctgtcc

SEQ ID NO: 4838338 - DNA, 25 bp, Homo sapien
gggcccgggtgagcccgcctccgca

SEQ ID NO: 4838339 - DNA, 25 bp, Homo sapien
tctccaaggagctggcgggaaaccg

SEQ ID NO: 4838340 - DNA, 25 bp, Homo sapien
gctctccaaggagctggcgggaaac

SEQ ID NO: 4838341 - DNA, 25 bp, Homo sapien
ggggctgggtcatctgccagctctc

SEQ ID NO: 4838342 - DNA, 25 bp, Homo sapien
tgggtcatctgccagctctccaagg

SEQ ID NO: 4838343 - DNA, 25 bp, Homo sapien
ataccaggctgatttcagtgcttta

SEQ ID NO: 4838344 - DNA, 25 bp, Homo sapien
gaaaataagttctgtccttccaaga

SEQ ID NO: 4838345 - DNA, 25 bp, Homo sapien
aagctcttgctacggtggctgttca

SEQ ID NO: 4838346 - DNA, 25 bp, Homo sapien
catggtgagactctagattctttcc

SEQ ID NO: 4838347 - DNA, 25 bp, Homo sapien
gcttcaaagagtcactgggaggatt

SEQ ID NO: 4838348 - DNA, 25 bp, Homo sapien
ggagaatacagcagcccagaatgca

SEQ ID NO: 4838349 - DNA, 25 bp, Homo sapien
tcgtcagatagcaacaagggagaat

SEQ ID NO: 4838350 - DNA, 25 bp, Homo sapien
aggctgcagagttagatccccagaa

SEQ ID NO: 4838351 - DNA, 25 bp, Homo sapien
tctccttattagctggttcctcctg

SEQ ID NO: 4838352 - DNA, 25 bp, Homo sapien
tccttattagctggttcctcctgtc

SEQ ID NO: 4838353 - DNA, 25 bp, Homo sapien
ggttcctcctgtctgtactctgagc

SEQ ID NO: 4838354 - DNA, 25 bp, Homo sapien
gttcctcctgtctgtactctgagcc

SEQ ID NO: 4838355 - DNA, 25 bp, Homo sapien
tcagccccaaaacctgttggctttg

SEQ ID NO: 4838356 - DNA, 25 bp, Homo sapien
gccatccctttagaatgagacctct

SEQ ID NO: 4838357 - DNA, 25 bp, Homo sapien
tttatcactatgaacttccaatgcc

SEQ ID NO: 4838358 - DNA, 25 bp, Homo sapien
aaacctgttggctttgctttatcac

SEQ ID NO: 4838359 - DNA, 25 bp, Homo sapien
aagttgaccatttcatgcaccttca

SEQ ID NO: 4838360 - DNA, 25 bp, Homo sapien
agttgaccatttcatgcaccttcag

SEQ ID NO: 4838361 - DNA, 25 bp, Homo sapien
aaagttgaccatttcatgcaccttc

SEQ ID NO: 4838362 - DNA, 25 bp, Homo sapien
gttgaccatttcatgcaccttcaga

SEQ ID NO: 4838363 - DNA, 25 bp, Homo sapien
tatctgtttatacactaaccacaga

SEQ ID NO: 4838364 - DNA, 25 bp, Homo sapien
gtgtctgcacccagcaggacttcag

SEQ ID NO: 4838365 - DNA, 25 bp, Homo sapien
gcacccagcaggacttcagtaaata

SEQ ID NO: 4838366 - DNA, 25 bp, Homo sapien
catcttgactgtagcctcagggctg

SEQ ID NO: 4838367 - DNA, 25 bp, Homo sapien
gatgaagttgccatccaccaagaaa

SEQ ID NO: 4838368 - DNA, 25 bp, Homo sapien
gaaatggtgatatcagaagaacaga

SEQ ID NO: 4838369 - DNA, 25 bp, Homo sapien
aggcacctccgcagagacagagaac

SEQ ID NO: 4838370 - DNA, 25 bp, Homo sapien
gaacatcatcgactcgcagggtgaa

SEQ ID NO: 4838371 - DNA, 25 bp, Homo sapien
tagaatagatcacttagccccactc

SEQ ID NO: 4838372 - DNA, 25 bp, Homo sapien
cattaattggtcaggcaagactatg

SEQ ID NO: 4838373 - DNA, 25 bp, Homo sapien
tctttatcaattctggtgcagggca

SEQ ID NO: 4838374 - DNA, 25 bp, Homo sapien
gattcggccaactctaggcatccct

SEQ ID NO: 4838375 - DNA, 25 bp, Homo sapien
atatcaacaacccacggcgatggcg

SEQ ID NO: 4838376 - DNA, 25 bp, Homo sapien
tatttgggccatcagagtttagacc

SEQ ID NO: 4838377 - DNA, 25 bp, Homo sapien
tcagtatggatctcaggcggtgcgt

SEQ ID NO: 4838378 - DNA, 25 bp, Homo sapien
gtagtttatcaacaccagccgccag

SEQ ID NO: 4838379 - DNA, 25 bp, Homo sapien
tctagggtgaaggtacgctaagaac

SEQ ID NO: 4838380 - DNA, 25 bp, Homo sapien
agccttgcggttagcttgtgtgctg

SEQ ID NO: 4838381 - DNA, 25 bp, Homo sapien
actgaaagtaaatatgcttcttatc

SEQ ID NO: 4838382 - DNA, 25 bp, Homo sapien
cgagtacgtccacagtcagccttgc

SEQ ID NO: 4838383 - DNA, 25 bp, Homo sapien
gtgttctagcccagtatatctcaaa

SEQ ID NO: 4838384 - DNA, 25 bp, Homo sapien
tcaaactttgctgcatcaaggacct

SEQ ID NO: 4838385 - DNA, 25 bp, Homo sapien
tgctgcatcaaggaccttgttgaaa

SEQ ID NO: 4838386 - DNA, 25 bp, Homo sapien
agaacctttgtgtcccctgagtgtt

SEQ ID NO: 4838387 - DNA, 25 bp, Homo sapien
gattatagaacatcaactcgatttg

SEQ ID NO: 4838388 - DNA, 25 bp, Homo sapien
tgagagaatcttcgggtctcctggg

SEQ ID NO: 4838389 - DNA, 25 bp, Homo sapien
cagagggcttcattatcaaatataa

SEQ ID NO: 4838390 - DNA, 25 bp, Homo sapien
aaaataaaagtgacagccgggtgca

SEQ ID NO: 4838391 - DNA, 25 bp, Homo sapien
gcaaaatgattagtgacttcacgat

SEQ ID NO: 4838392 - DNA, 25 bp, Homo sapien
tgtttaccgccttccctcaagacaa

SEQ ID NO: 4838393 - DNA, 25 bp, Homo sapien
cgatatctgattctcatttagttgg

SEQ ID NO: 4838394 - DNA, 25 bp, Homo sapien
caaaatgcatagcaacacttcttaa

SEQ ID NO: 4838395 - DNA, 25 bp, Homo sapien
taaaggttaatgctggctgccatgt

SEQ ID NO: 4838396 - DNA, 25 bp, Homo sapien
tgccatgtgacccaatgccagtttg

SEQ ID NO: 4838397 - DNA, 25 bp, Homo sapien
gatttgtggatctgacctaaccctc

SEQ ID NO: 4838398 - DNA, 25 bp, Homo sapien
tgcattcaaagaaccatcgttccag

SEQ ID NO: 4838399 - DNA, 25 bp, Homo sapien
ctaagaagaatacaaatactgatca

SEQ ID NO: 4838400 - DNA, 25 bp, Homo sapien
caaatactgatcatgcaatatgtta

SEQ ID NO: 4838401 - DNA, 25 bp, Homo sapien
tgttattgttatcacaccatctcct

SEQ ID NO: 4838402 - DNA, 25 bp, Homo sapien
tctcctgctacacgccaggtttcct

SEQ ID NO: 4838403 - DNA, 25 bp, Homo sapien
tggtctttcttatcagccctgtgga

SEQ ID NO: 4838404 - DNA, 25 bp, Homo sapien
tcgtgatccggccatcctggcttcc

SEQ ID NO: 4838405 - DNA, 25 bp, Homo sapien
accgcgcctggaagcccatggtctt

SEQ ID NO: 4838406 - DNA, 25 bp, Homo sapien
gcaagctgcacctcctggggttaac

SEQ ID NO: 4838407 - DNA, 25 bp, Homo sapien
aaagggctgccttcgtggaatgctg

SEQ ID NO: 4838408 - DNA, 25 bp, Homo sapien
ctagaaaagggctgccttcgtggaa

SEQ ID NO: 4838409 - DNA, 25 bp, Homo sapien
tgccttcgtggaatgctggtcctgg

SEQ ID NO: 4838410 - DNA, 25 bp, Homo sapien
ctgccttcgtggaatgctggtcctg

SEQ ID NO: 4838411 - DNA, 25 bp, Homo sapien
tagtagcgtagggacagatagccaa

SEQ ID NO: 4838412 - DNA, 25 bp, Homo sapien
tagccaaggaaggatcgtgctccac

SEQ ID NO: 4838413 - DNA, 25 bp, Homo sapien
aatagattgcccagctttagaagtg

SEQ ID NO: 4838414 - DNA, 25 bp, Homo sapien
tacatagacacttggttacagctga

SEQ ID NO: 4838415 - DNA, 25 bp, Homo sapien
acaactgggtgtgaagtcctgaccg

SEQ ID NO: 4838416 - DNA, 25 bp, Homo sapien
cacacaagaggaagtgtcgtgtcgg

SEQ ID NO: 4838417 - DNA, 25 bp, Homo sapien
gtgaagtcctgaccgttcctgactg

SEQ ID NO: 4838418 - DNA, 25 bp, Homo sapien
ggaagtgtcgtgtcggccaaacacc

SEQ ID NO: 4838419 - DNA, 25 bp, Homo sapien
gccacgcctggctaatttttgcatt

SEQ ID NO: 4838420 - DNA, 25 bp, Homo sapien
attacagacatgtaccgccacgcct

SEQ ID NO: 4838421 - DNA, 25 bp, Homo sapien
tggagcaatctcagctcactgcaac

SEQ ID NO: 4838422 - DNA, 25 bp, Homo sapien
ttccatcgtccaggttggaaggcag

SEQ ID NO: 4838423 - DNA, 25 bp, Homo sapien
caccggctcacgtatactgtgacag

SEQ ID NO: 4838424 - DNA, 25 bp, Homo sapien
gagccaccggctcacgtatactgtg

SEQ ID NO: 4838425 - DNA, 25 bp, Homo sapien
gtgagccaccggctcacgtatactg

SEQ ID NO: 4838426 - DNA, 25 bp, Homo sapien
ccggctcacgtatactgtgacagta

SEQ ID NO: 4838427 - DNA, 25 bp, Homo sapien
gagatggtccaatctgcaaaaagtt

SEQ ID NO: 4838428 - DNA, 25 bp, Homo sapien
gattcccgagatggtccaatctgca

SEQ ID NO: 4838429 - DNA, 25 bp, Homo sapien
tttccgatctttgggattcccgaga

SEQ ID NO: 4838430 - DNA, 25 bp, Homo sapien
ctaaggctcaatgctttgtggaaga

SEQ ID NO: 4838431 - DNA, 25 bp, Homo sapien
gatccaccgcaaaggacatcaaaaa

SEQ ID NO: 4838432 - DNA, 25 bp, Homo sapien
caccgcaaaggacatcaaaaagaaa

SEQ ID NO: 4838433 - DNA, 25 bp, Homo sapien
tccaccgcaaaggacatcaaaaaga

SEQ ID NO: 4838434 - DNA, 25 bp, Homo sapien
gtgatccaccgcaaaggacatcaaa

SEQ ID NO: 4838435 - DNA, 25 bp, Homo sapien
caaataagcaatggtcaacaaaaaa

SEQ ID NO: 4838436 - DNA, 25 bp, Homo sapien
attcagaaaatgactaccacaatgg

SEQ ID NO: 4838437 - DNA, 25 bp, Homo sapien
gagatggacaaactaacaggcattc

SEQ ID NO: 4838438 - DNA, 25 bp, Homo sapien
gtcaaaccaaataagcaatggtcaa

SEQ ID NO: 4838439 - DNA, 25 bp, Homo sapien
tatacatctggcctaatgccgccct

SEQ ID NO: 4838440 - DNA, 25 bp, Homo sapien
gagctcagctagcaaaccagtccag

SEQ ID NO: 4838441 - DNA, 25 bp, Homo sapien
tggctttggatgtaacaaggttgag

SEQ ID NO: 4838442 - DNA, 25 bp, Homo sapien
aagaagttgagtgttaaaactgctg

SEQ ID NO: 4838443 - DNA, 25 bp, Homo sapien
agcgtgccatgtagcaggactacag

SEQ ID NO: 4838444 - DNA, 25 bp, Homo sapien
gcctcagcgtgccatgtagcaggac

SEQ ID NO: 4838445 - DNA, 25 bp, Homo sapien
tcagcgtgccatgtagcaggactac

SEQ ID NO: 4838446 - DNA, 25 bp, Homo sapien
cctcagcgtgccatgtagcaggact

SEQ ID NO: 4838447 - DNA, 25 bp, Homo sapien
tatcagggcaggtcccccgatagtg

SEQ ID NO: 4838448 - DNA, 25 bp, Homo sapien
cccgatagtgttgggtggtggtaat

SEQ ID NO: 4838449 - DNA, 25 bp, Homo sapien
gaagatggcaggcatgcctctgccc

SEQ ID NO: 4838450 - DNA, 25 bp, Homo sapien
gatgaagatggcaggcatgcctctg

SEQ ID NO: 4838451 - DNA, 25 bp, Homo sapien
atgtgtgttgtctcccccggatacc

SEQ ID NO: 4838452 - DNA, 25 bp, Homo sapien
tgtgttgtctcccccggatacccaa

SEQ ID NO: 4838453 - DNA, 25 bp, Homo sapien
tgtgtgttgtctcccccggataccc

SEQ ID NO: 4838454 - DNA, 25 bp, Homo sapien
gaagatccagttaaaccctgcccag

SEQ ID NO: 4838455 - DNA, 25 bp, Homo sapien
tgagcatctgatgagaccccagctg

SEQ ID NO: 4838456 - DNA, 25 bp, Homo sapien
gaataagcttggaagaggacactga

SEQ ID NO: 4838457 - DNA, 25 bp, Homo sapien
tattgtgacccggaatagaagatcc

SEQ ID NO: 4838458 - DNA, 25 bp, Homo sapien
cttggtaatgccagctcttttttgg

SEQ ID NO: 4838459 - DNA, 25 bp, Homo sapien
acttggtaatgccagctcttttttg

SEQ ID NO: 4838460 - DNA, 25 bp, Homo sapien
taggattgacttggtaatgccagct

SEQ ID NO: 4838461 - DNA, 25 bp, Homo sapien
gattgacttggtaatgccagctctt

SEQ ID NO: 4838462 - DNA, 25 bp, Homo sapien
tatttaatgatactgaagtgtatgg

SEQ ID NO: 4838463 - DNA, 25 bp, Homo sapien
aatggccatcttggttgttgctacc

SEQ ID NO: 4838464 - DNA, 25 bp, Homo sapien
gatggagaatgcttgatggatacag

SEQ ID NO: 4838465 - DNA, 25 bp, Homo sapien
catacagggacttgtatgttatgtg

SEQ ID NO: 4838466 - DNA, 25 bp, Homo sapien
tgtggaaacttcacacgagtggtcc

SEQ ID NO: 4838467 - DNA, 25 bp, Homo sapien
ggtgtggaaacttcacacgagtggt

SEQ ID NO: 4838468 - DNA, 25 bp, Homo sapien
tagggtgtggaaacttcacacgagt

SEQ ID NO: 4838469 - DNA, 25 bp, Homo sapien
tggaaacttcacacgagtggtccca

SEQ ID NO: 4838470 - DNA, 25 bp, Homo sapien
ggcaggaacctgctcatggatacag

SEQ ID NO: 4838471 - DNA, 25 bp, Homo sapien
acaacacggatgaactatgagaata

SEQ ID NO: 4838472 - DNA, 25 bp, Homo sapien
aatgggcaaatcatacggtacctga

SEQ ID NO: 4838473 - DNA, 25 bp, Homo sapien
aatagaacatggtttgatcatgcaa

SEQ ID NO: 4838474 - DNA, 25 bp, Homo sapien
atgagccttaagttgagggtgaccc

SEQ ID NO: 4838475 - DNA, 25 bp, Homo sapien
tgagccttaagttgagggtgaccca

SEQ ID NO: 4838476 - DNA, 25 bp, Homo sapien
gagccttaagttgagggtgacccag

SEQ ID NO: 4838477 - DNA, 25 bp, Homo sapien
tataaaattcatataggccaggcgc

SEQ ID NO: 4838478 - DNA, 25 bp, Homo sapien
ctgaggcgagcgagtcacgaggtca

SEQ ID NO: 4838479 - DNA, 25 bp, Homo sapien
gatagggcaagagggcaagtcttcc

SEQ ID NO: 4838480 - DNA, 25 bp, Homo sapien
ttaagaaaactcgacatcacagcag

SEQ ID NO: 4838481 - DNA, 25 bp, Homo sapien
tgcctccagagtagaagatccgtgg

SEQ ID NO: 4838482 - DNA, 25 bp, Homo sapien
cagacaggtactttgcccttctaaa

SEQ ID NO: 4838483 - DNA, 25 bp, Homo sapien
ggtattacatatggcagccccacat

SEQ ID NO: 4838484 - DNA, 25 bp, Homo sapien
tgtttcccttcataataacatcagc

SEQ ID NO: 4838485 - DNA, 25 bp, Homo sapien
gtgagaccctctgtctgcaaagaat

SEQ ID NO: 4838486 - DNA, 25 bp, Homo sapien
tctgggtaggttactggtagtgtca

SEQ ID NO: 4838487 - DNA, 25 bp, Homo sapien
gtagtgtcaggccaaactagctcta

SEQ ID NO: 4838488 - DNA, 25 bp, Homo sapien
tagctctacagtcatattcattata

SEQ ID NO: 4838489 - DNA, 25 bp, Homo sapien
tcaatactagggaccatgggcagcg

SEQ ID NO: 4838490 - DNA, 25 bp, Homo sapien
cagactgcagttgttattggaggct

SEQ ID NO: 4838491 - DNA, 25 bp, Homo sapien
gaagtcttgtccttcagcatcagtg

SEQ ID NO: 4838492 - DNA, 25 bp, Homo sapien
gtagtggcggtggaccaggtgtgtc

SEQ ID NO: 4838493 - DNA, 25 bp, Homo sapien
gtgtttggttctttgttatgctgtc

SEQ ID NO: 4838494 - DNA, 25 bp, Homo sapien
ccatattgtgccttggagaagacca

SEQ ID NO: 4838495 - DNA, 25 bp, Homo sapien
cagccttgagtctctggaattgcag

SEQ ID NO: 4838496 - DNA, 25 bp, Homo sapien
agtttttggtcacatatgtgtccca

SEQ ID NO: 4838497 - DNA, 25 bp, Homo sapien
gagaaattccccgttagcctgatgg

SEQ ID NO: 4838498 - DNA, 25 bp, Homo sapien
ttgacttccgcaatgattttgaagc

SEQ ID NO: 4838499 - DNA, 25 bp, Homo sapien
tctccttgacttccgcaatgatttt

SEQ ID NO: 4838500 - DNA, 25 bp, Homo sapien
ccttgacttccgcaatgattttgaa
